United States Patent Application Publication US 2026/0226531 A1, published August 6, 2026 (application 19/394,946).

The application's sequence listing, which the Patent Office published only in electronic form, follows.

SEQUENCE LISTING (80631 sequences)

SEQ ID NO: 1 - DNA, 110 bp, synthetic construct
  source 1..110: mol_type = other DNA
cacctctcttggctgtggcggaagctccagaagaggaacggctgggtctgaaggctccgggtgccggtgcccacggtcagatctcctccctctgtgccttgtggccggcg

SEQ ID NO: 2 - DNA, 110 bp, synthetic construct
  source 1..110: mol_type = other DNA
tccgggtgccggtgcccacggtcagatctcctccctctgtgccttgtggccggcggacgggacagagtccactctgtccagggacaaaactcctggggcgctctgagctc

SEQ ID NO: 3 - DNA, 110 bp, synthetic construct
  source 1..110: mol_type = other DNA
gtcccaggcttccacggcggcagctccatgatattcagtctcgatggtggaggcgtcagaagacttggggcgaggctgggggccagcagggccgtgtccaggaggtctga

SEQ ID NO: 4 - DNA, 110 bp, synthetic construct
  source 1..110: mol_type = other DNA
gcctggtggtggctcctggcactggatttgggctgcagaaccagcagctgagatccaggtgttggaatcagagagctctgggtgtgcctccccgctctgttacagggtgg

SEQ ID NO: 5 - DNA, 110 bp, synthetic construct
  source 1..110: mol_type = other DNA
ctgtgaatcaccgctcacatcccgggtccagttttccgcctctcgggttatcttttgctaatccgcctgccaaacctctccgcagattatagtcttgactgcttttcctc

SEQ ID NO: 6 - DNA, 110 bp, synthetic construct
  source 1..110: mol_type = other DNA
tgctaatccgcctgccaaacctctccgcagattatagtcttgactgcttttcctctcactgctttgcaaagacctcatttttgtcgggcggcccgggttgaggtgtcact

SEQ ID NO: 7 - DNA, 110 bp, synthetic construct
  source 1..110: mol_type = other DNA
gactgggcggctgccgcgccgaagagcccctgcgatgctcagcgacgcctcgccccttccaaagcgcagcagcatcggagctttgaggctcaggccaacctgagagagca

SEQ ID NO: 8 - DNA, 110 bp, synthetic construct
  source 1..110: mol_type = other DNA
cttccaaagcgcagcagcatcggagctttgaggctcaggccaacctgagagagcatcaactggttctgcaaaaggaactgaagtgagagacaacggtcaccgttccagga

SEQ ID NO: 9 - DNA, 110 bp, synthetic construct
  source 1..110: mol_type = other DNA
tgaggaaaacaaggactttccaccccactggatggacgcagggaggcacctgcaagctggcagcaacaggctggtcaccaggaaacaaactggaggaagccatgggtgtg

SEQ ID NO: 10 - DNA, 110 bp, synthetic construct
  source 1..110: mol_type = other DNA
atgagtgggtgactttgctgtatagcagaaaccgacagaacactgcaaatcatctataataaaaaataaaaataaatacataaagctagagcctctacctcactcccagg

SEQ ID NO: 11 - DNA, 110 bp, synthetic construct; identical to SEQ ID NO: 10
  source 1..110: mol_type = other DNA

SEQ ID NO: 12 - DNA, 110 bp, synthetic construct
  source 1..110: mol_type = other DNA
tttcctcggcggcggcggcggcggcggcctggggcgccgtgtgcgtttgggagagtagctcgggaggagttgagtccttgggcgaaacagacgcggaaagcactgcaaac

SEQ ID NO: 13 - DNA, 110 bp, synthetic construct
  source 1..110: mol_type = other DNA
tagctcgggaggagttgagtccttgggcgaaacagacgcggaaagcactgcaaacacgctgtcccggtggcggactcagctgggggccgcggccgtgctccgcggcgctg

SEQ ID NO: 14 - DNA, 110 bp, synthetic construct
  source 1..110: mol_type = other DNA
tccgaaactctgaacacgtgaagtacgtctgatactgttgtaaatacttggtgacaccggcccccgcggagtttaacgttaccaagacgcccttgtgggcttgaaggact

SEQ ID NO: 15 - DNA, 110 bp, synthetic construct
  source 1..110: mol_type = other DNA
agtcatcgatggcagtgaatgtgagcgcgtgttccccgccttcactgacgtgtagtgtgttcactccagtgtcagtttatcacgagttgtctcacacacacacagcacat

SEQ ID NO: 16 - DNA, 110 bp, synthetic construct
  source 1..110: mol_type = other DNA
tgtgttcactccagtgtcagtttatcacgagttgtctcacacacacacagcacatacaaacacagcacccacgtagtacacacgcatgcaattcatatctagtacgtatg

SEQ ID NO: 17 - DNA, 110 bp, synthetic construct
  source 1..110: mol_type = other DNA
agtgtttttgtctgttgagtagcaataactgtaagtgctcttaggattgcatattttaaaggttaaggttggtagtcttggccggttatttttgagtcagtttaataata

SEQ ID NO: 18 - DNA, 110 bp, synthetic construct
  source 1..110: mol_type = other DNA
ttaaaggttaaggttggtagtcttggccggttatttttgagtcagtttaataatagaaaggagatgattacaaatgttctcgacccaagtctaacgacatcttggcttct

SEQ ID NO: 19 - DNA, 110 bp, synthetic construct
  source 1..110: mol_type = other DNA
ggaagaagaggcaaacgtcagttggttctgagtccatctgtctcttcggaatatatagatgcttggtgctaaggtgcaaggatttcacgtgtagagcggcggtgtgttaa

SEQ ID NO: 20 - DNA, 110 bp, synthetic construct
  source 1..110: mol_type = other DNA
gtggccacgtctctgcctcctgacctggtcgcgcctggcctggctgcattcttccctgtgagcccgcttttgtaaattccctgcgccccgttgtttctgggagtttgggg

SEQ ID NO: 21 - DNA, 110 bp, synthetic construct
  source 1..110: mol_type = other DNA
agagattctcgcagccagtttacgtgcgaagcctgatgtgaaagacagaccctgtgcgcgcaccgaagcggacgtgtagcgcgtgaagtgcttgttgtcggaatgccgtt

SEQ ID NO: 22 - DNA, 110 bp, synthetic construct
  source 1..110: mol_type = other DNA
gcgcgcaccgaagcggacgtgtagcgcgtgaagtgcttgttgtcggaatgccgttcagactcagcgtttaagggtctccttcctgttctctggcgggtttttccttcttt

SEQ ID NO: 23 - DNA, 110 bp, synthetic construct
  source 1..110: mol_type = other DNA
atcacgcggcagcgctcctgtaaaccacctgcactcctttcggcaatggtttacagcttctcgtgtgtggtagttgctccatttgttcagtttatctgtaagaatgttaa

SEQ ID NO: 24 - DNA, 110 bp, synthetic construct
  source 1..110: mol_type = other DNA
gcttctcgtgtgtggtagttgctccatttgttcagtttatctgtaagaatgttaatttttgatgctgtcgtctgtaggatactgtcacgtatcgtgtgtcatgtgtcgta

SEQ ID NO: 25 - DNA, 110 bp, synthetic construct
  source 1..110: mol_type = other DNA
agtgaccggtgtattgacatacagatgacaaagcggtgttgaaggcagtaaaatgcgtctcggtgtttgcagctgctcacgtacagcccgcctgaacccccacctccctg

SEQ ID NO: 26 - DNA, 110 bp, synthetic construct
  source 1..110: mol_type = other DNA
tcccggggattattttccaaactggactttgacccactagtagacaggagagcgatatgattgaaggtgaacatctttctgtgaaaacaacaaatagctttatcagaaga

SEQ ID NO: 27 - DNA, 110 bp, synthetic construct
  source 1..110: mol_type = other DNA
tatgattgaaggtgaacatctttctgtgaaaacaacaaatagctttatcagaagaaggcttccctggcggctcagcaggttaaaggtccaacattgccacggctgcagca

SEQ ID NO: 28 - DNA, 110 bp, synthetic construct
  source 1..110: mol_type = other DNA
ggtttctgaaaactttgacggcctccatcagacagataaaacagaagcaaactccacaggacggacacaggccagcaggggcggcgtctagagctggtggactccctgct

SEQ ID NO: 29 - DNA, 110 bp, synthetic construct
  source 1..110: mol_type = other DNA
acaggacggacacaggccagcaggggcggcgtctagagctggtggactccctgctgggtgtcggctgaggggacggcagcgggcctgcctgagtgagggacccagattta

SEQ ID NO: 30 - DNA, 110 bp, synthetic construct
  source 1..110: mol_type = other DNA
ggaatctcttgcaggacctctttctctcacttcccagcttttcctccccaggctccttttctccctgtggtcttgccccacggcgtgaggactgtgtgtcacctctccag

SEQ ID NO: 31 - DNA, 110 bp, synthetic construct
  source 1..110: mol_type = other DNA
caactggctggccaggtggcctgatggggtgaaaactgcccagaacaaagacacgaattaatctagctttaaagcatttaacagcaagtagcttaaaatcttcatctggc

SEQ ID NO: 32 - DNA, 110 bp, synthetic construct
  source 1..110: mol_type = other DNA
agaaggatgcaggtccagcttcccaggtccctgaagcccaggtggatctgatggtttttggttttggtgtttgtttgttttttggctttttagggccccacctgtggcat

SEQ ID NO: 33 - DNA, 110 bp, synthetic construct
  source 1..110: mol_type = other DNA
gagcagagttctgctccgggaaatcactgagcagtgaggacgttaggcttttctcatcggccccgacctgctgcaaatgcctcccctccccccaccccaggggcaccggc

SEQ ID NO: 34 - DNA, 110 bp, synthetic construct
  source 1..110: mol_type = other DNA
actgagcagtgaggacgttaggcttttctcatcggccccgacctgctgcaaatgcctcccctccccccaccccaggggcaccggctggggcccaagctcggcctggaggg

SEQ ID NO: 35 - DNA, 110 bp, synthetic construct
  source 1..110: mol_type = other DNA
tcccgggcctccaggtggcaggtggcagaacgtggggcttctctgcctccagagcggaatgagccgctggctgtaataaatcggtgtctatccgaacccccagatttctt

SEQ ID NO: 36 - DNA, 110 bp, synthetic construct
  source 1..110: mol_type = other DNA
ggaatgagccgctggctgtaataaatcggtgtctatccgaacccccagatttcttccgaaaaccttgatttgtgcagggatgtacaaagacctccgtgtcactctccaaa

SEQ ID NO: 37 - DNA, 110 bp, synthetic construct
  source 1..110: mol_type = other DNA
gaaaccagctcagacctcctctccttccctcgcgtctggttagaatccagggatctgagttccctctgccctgtccccgctcggcccctcgtgctctcccctcgggagat

SEQ ID NO: 38 - DNA, 110 bp, synthetic construct
  source 1..110: mol_type = other DNA
tgagttccctctgccctgtccccgctcggcccctcgtgctctcccctcgggagatggtcggcagtcagctctcaacgcctggcttaactgccgcgtcccagccaagctgc

SEQ ID NO: 39 - DNA, 110 bp, synthetic construct
  source 1..110: mol_type = other DNA
tcacttctgtccagctgcagggaccctgcttccagcaggactttgctttctccttcaccaaccagctgtccattcaaacaggtgggaaagtccatcccacaccgtgaaca

SEQ ID NO: 40 - DNA, 110 bp, synthetic construct
  source 1..110: mol_type = other DNA
caccaaccagctgtccattcaaacaggtgggaaagtccatcccacaccgtgaacacgcttttccttctcttcctagtattttgtgggtttcttttaaaaggtcacctgtt

SEQ ID NO: 41 - DNA, 110 bp, synthetic construct
  source 1..110: mol_type = other DNA
gcgtccctttgctcagcaaggctgccctgaaaagccctccttttttccttccctgaaaggaagctggagccgaggcagctcatggcgggagggtctgcgggcggggagct

SEQ ID NO: 42 - DNA, 110 bp, synthetic construct
  source 1..110: mol_type = other DNA
aaaggaagctggagccgaggcagctcatggcgggagggtctgcgggcggggagctttggggtcagtggctgcgtgtgctcccacctttcaagttgccttgagagtgaatg

SEQ ID NO: 43 - DNA, 110 bp, synthetic construct
  source 1..110: mol_type = other DNA
ctggcctctcccagccccgagccgcgggcgccgcgtcgccgcggtcctgagttcccagcctcgcctcctgccagatgagttcctattaagtctcgtccggtctctttgtt

SEQ ID NO: 44 - DNA, 110 bp, synthetic construct
  source 1..110: mol_type = other DNA
cagcctcgcctcctgccagatgagttcctattaagtctcgtccggtctctttgttcaggggaagaagttcgagatctggccagacgggctgccctcggcccggaagctgg

SEQ ID NO: 45 - DNA, 110 bp, synthetic construct
  source 1..110: mol_type = other DNA
tgatccacgccggtctgaaactggagtcaaagcagagttcaagatttcaccttagatacgcagtatagctttaaaagaaagacgaatcgacaaatatttacaattccaca

SEQ ID NO: 46 - DNA, 110 bp, synthetic construct
  source 1..110: mol_type = other DNA
atacgcagtatagctttaaaagaaagacgaatcgacaaatatttacaattccacaagtcggaatttgtttgtatcagaagaaatgaggtgatttcttatgtaagagtaag

SEQ ID NO: 47 - DNA, 110 bp, synthetic construct
  source 1..110: mol_type = other DNA
gacccctgggggaagcagcccagcgcgacggccaagctgcgaactactcttaagcagaacagggaggggccaagtccaagagtttatcccgtttgcttctaagatacctc

SEQ ID NO: 48 - DNA, 110 bp, synthetic construct
  source 1..110: mol_type = other DNA
agaacagggaggggccaagtccaagagtttatcccgtttgcttctaagatacctccctcccacgcgcagccaacaccacggggaagcgagacagggagggaaaggggagg

SEQ ID NO: 49 - DNA, 110 bp, synthetic construct; identical to SEQ ID NO: 47
  source 1..110: mol_type = other DNA

SEQ ID NO: 50 - DNA, 110 bp, synthetic construct; identical to SEQ ID NO: 48
  source 1..110: mol_type = other DNA

SEQ ID NO: 51 - DNA, 110 bp, synthetic construct
  source 1..110: mol_type = other DNA
aagtttacggccgtcttgcatttctggtgcacaccaggggacaaaggaaacctgtttcctaccgttccattacgtcagtgtgaaattaacaaacacctgaaaacatcaca

SEQ ID NO: 52 - DNA, 110 bp, synthetic construct
  source 1..110: mol_type = other DNA
ttcctaccgttccattacgtcagtgtgaaattaacaaacacctgaaaacatcacagaatccttttgagtaagaaaacccaaaacttcaagtgtgggtaatatccaatgaa

SEQ ID NO: 53 - DNA, 110 bp, synthetic construct
  source 1..110: mol_type = other DNA
catcactcaagcaaacttcactaaaacagtcactacaaatgcaaaataaaagctggaaggcatgtatctaatcgttaatggtgcttctcctttggtgctggaactacaga

SEQ ID NO: 54 - DNA, 110 bp, synthetic construct
  source 1..110: mol_type = other DNA
gaaggcatgtatctaatcgttaatggtgcttctcctttggtgctggaactacagagagtctgtattttcttcgattcgcctttttgtacttttctccgtttgtaacggga

SEQ ID NO: 55 - DNA, 110 bp, synthetic construct
  source 1..110: mol_type = other DNA
acgaacacaacacgcctggtgcaaaagaagctcccactgagcagacaaatcagccttaaacactgctgaccttaaacatcagttcgatattctaatattttctttaacca

SEQ ID NO: 56 - DNA, 110 bp, synthetic construct
  source 1..110: mol_type = other DNA
ttaaacactgctgaccttaaacatcagttcgatattctaatattttctttaaccacatgcacttttaggagtaatacacccatgcactgtcgaggactcttaaggcccca

SEQ ID NO: 57 - DNA, 110 bp, synthetic construct
  source 1..110: mol_type = other DNA
gtctccgggcttcgggttttatcagcctgtcttgtcgcagttggagaggaattgtcctgaaaaatcctcacgccgaagccagggttccctttctcctttcgaattcaggg

SEQ ID NO: 58 - DNA, 110 bp, synthetic construct
  source 1..110: mol_type = other DNA
cctgaaaaatcctcacgccgaagccagggttccctttctcctttcgaattcagggtacatcctcgccaaacaacagctgtgaagtctggactctcccatttcggtttaag

SEQ ID NO: 59 - DNA, 110 bp, synthetic construct
  source 1..110: mol_type = other DNA
gcaggaggcagaggcttagcaggcaggctctccacccttctctgccctcgttctagggagaagggacgcctgctcacacacacgcaagctcacacacatccacacacctg

SEQ ID NO: 60 - DNA, 110 bp, synthetic construct
  source 1..110: mol_type = other DNA
cctcgttctagggagaagggacgcctgctcacacacacgcaagctcacacacatccacacacctgcacactcacacaatgcatgcttatacacatgaacctcatgcaatt

SEQ ID NO: 61 - DNA, 110 bp, synthetic construct
  source 1..110: mol_type = other DNA
gggtctttctaccagacagccatcgtcagcatctcttccaggtaagattcatttacaccgaatccattttccgcagcttagcatctgccccgcagagccgtgagacacct

SEQ ID NO: 62 - DNA, 110 bp, synthetic construct
  source 1..110: mol_type = other DNA
caccgaatccattttccgcagcttagcatctgccccgcagagccgtgagacacctgatcaatagcgaatcgtgagttggcgcggacacacacccctgggaattagatcgc

SEQ ID NO: 63 - DNA, 110 bp, synthetic construct
  source 1..110: mol_type = other DNA
aaggactcaaacctgagggggtttcgttttactgcatgaattaccatcagtagtcaagtcttaagagcctcaggaatcatctttaatccacaactctcttttccccaaaa

SEQ ID NO: 64 - DNA, 110 bp, synthetic construct
  source 1..110: mol_type = other DNA
tgttaacatcctacccaacccccttctggggctccccacgggcttagcgttctggtccatcccccagtccagagcccaggactcctgtggtctagaccggcaggctgttc

SEQ ID NO: 65 - DNA, 110 bp, synthetic construct
  source 1..110: mol_type = other DNA
tccatcccccagtccagagcccaggactcctgtggtctagaccggcaggctgttcagcttcatctcaccagaaaggtttaagggctctggctgaagaggcagaatgtccc

SEQ ID NO: 66 - DNA, 110 bp, synthetic construct
  source 1..110: mol_type = other DNA
ccatgtccctggcctgtccaacagacgtctcggtgaagaggaaacttatccacgacaccactgagctgatccacctgcatgccctcaggaacgagagaaaggagagccgt

SEQ ID NO: 67 - DNA, 110 bp, synthetic construct
  source 1..110: mol_type = other DNA
tccttgaggctcaagcctgccgtgtcccctcttggtctggctattaaaactacctttgctgtttccgccggctctgtccctgggtttctatctggcatcgggggacagag

SEQ ID NO: 68 - DNA, 110 bp, synthetic construct
  source 1..110: mol_type = other DNA
aattttttaaaaattggttcaaatcctaatccgggtttagtgctgagcttctgcagccttcacgtgcctcctttggaaaagggacctaaacacccgctctgtctaccttc

SEQ ID NO: 69 - DNA, 110 bp, synthetic construct
  source 1..110: mol_type = other DNA
catttatttgctgccctggccaacagtgttattgctcaagctaagagaaaatatacacttaatttttgctatgaaatatggtaaaaacaagaaaggaaaatagaccttca

SEQ ID NO: 70 - DNA, 110 bp, synthetic construct
  source 1..110: mol_type = other DNA
gctgtgtcctggatggcgtgtgccttccctggaccagactcacagctgctggcccctgtcctgcctcttcagagcagttcctcagagctaccgagagcccgtctcccggg

SEQ ID NO: 71 - DNA, 110 bp, synthetic construct
  source 1..110: mol_type = other DNA
gttgattaatttgcgactctctaattgacagttttaagcctcgtcacaggctctgtatccgcttgggtttctttctgctgagaatcgctcgttcacatctttccctcatc

SEQ ID NO: 72 - DNA, 110 bp, synthetic construct
  source 1..110: mol_type = other DNA
ggagccgcagcctctgtctgccttatccctgtcccacaaatgcagagacccagctcggcccgggacagtcccatgccctcctgtgcccctctccagtgctatgggtagat

SEQ ID NO: 73 - DNA, 110 bp, synthetic construct
  source 1..110: mol_type = other DNA
cggcccgggacagtcccatgccctcctgtgcccctctccagtgctatgggtagatcagagcgctgtgatggcagcattactgagcccaagtgcaccgtccagcttgaacc

SEQ ID NO: 74 - DNA, 110 bp, synthetic construct
  source 1..110: mol_type = other DNA
attctgaaatcgcagacctcttatctagggggacttggtggggaatcagtcattaaattctctctgttctaagtcctcaatgacccagttcttcggcagccaggaccctg

SEQ ID NO: 75 - DNA, 110 bp, synthetic construct
  source 1..110: mol_type = other DNA
ttctttgcatgaggacaccccggccatcccatcccacccaaagcagctttttactcattaaaatgtgcggccaaggcattaaggaaaagcaacggaggactataaacact

SEQ ID NO: 76 - DNA, 110 bp, synthetic construct
  source 1..110: mol_type = other DNA
cctctcaggaaccccaccgtctcatgctctttaccaaggcatcctcgactcctagcgggaacttgaacagctaccgtcccaatgctgatcccatttctgccgaatgcagc

SEQ ID NO: 77 - DNA, 110 bp, synthetic construct
  source 1..110: mol_type = other DNA
cgggaacttgaacagctaccgtcccaatgctgatcccatttctgccgaatgcagcattgaaagtcccacttctgacaccagccctgggtttccggtgagtgatggattgg

SEQ ID NO: 78 - DNA, 110 bp, synthetic construct
  source 1..110: mol_type = other DNA
tgcataaagagatgctcaacatcactgaccatcagggaagtgcagtcaaagctgcagtgagatgtcatctcccatctgttaggctgaggaaccctgggcactgttggtgg

SEQ ID NO: 79 - DNA, 110 bp, synthetic construct
  source 1..110: mol_type = other DNA
agtgagatgtcatctcccatctgttaggctgaggaaccctgggcactgttggtgggaagtaaattcgtgcagctgccatggaaaacttaaaagttaaagacagaaccacc

SEQ ID NO: 80 - DNA, 110 bp, synthetic construct
  source 1..110: mol_type = other DNA
ctgacatcacactgcaaaccactgagctaaacctgaagcttaaaaacttcattgaaaagtttgagaccaggagttcccatagtggctcagtggttagccaacctgactag

SEQ ID NO: 81 - DNA, 110 bp, synthetic construct
  source 1..110: mol_type = other DNA
gctgttactccctgaccttcatgagatttgcctacaaggtccagcctcggaactggctcctgttcgcctgccacgccacaaacgaagtggcccagctcatccagggcggc

SEQ ID NO: 82 - DNA, 110 bp, synthetic construct
  source 1..110: mol_type = other DNA
gctcctgttcgcctgccacgccacaaacgaagtggcccagctcatccagggcggccggctcatccggcacgagtaagcacagcccgtgggcccctcgtgtgcggagggac

SEQ ID NO: 83 - DNA, 110 bp, synthetic construct; identical to SEQ ID NO: 81
  source 1..110: mol_type = other DNA

SEQ ID NO: 84 - DNA, 110 bp, synthetic construct; identical to SEQ ID NO: 82
  source 1..110: mol_type = other DNA

SEQ ID NO: 85 - DNA, 110 bp, synthetic construct
  source 1..110: mol_type = other DNA
ctttttaatttttcttattttttaaatcatggagtgttttataagctgtcttacagctcatttcattcacatcagtgcttctcctgtccctaataggtaagagcttttta

SEQ ID NO: 86 - DNA, 110 bp, synthetic construct
  source 1..110: mol_type = other DNA
tccctcccaggtggcattttgactgttattctggcactaggaaacaccttcagcaagctggcgtgtcacgatttggaaattaaaaggcggaaggatctaggatggaatgc

SEQ ID NO: 87 - DNA, 110 bp, synthetic construct
  source 1..110: mol_type = other DNA
cccgcccgcaggtgatctgttgtctaactcagtgctgtccccgccggtccccggcctgtggaatgtggctgcagtcctggctcgtccaaatggcactcattacctcaaaa

SEQ ID NO: 88 - DNA, 110 bp, synthetic construct
  source 1..110: mol_type = other DNA
ctgtggaatgtggctgcagtcctggctcgtccaaatggcactcattacctcaaaagggcataagccaaatggagtcattggctttagggactaaccgtatcctccactta

SEQ ID NO: 89 - DNA, 110 bp, synthetic construct
  source 1..110: mol_type = other DNA
agagacccagttcatagcggtgacggcttatcagaatgaggaggtgagatcccacgagtggtcccccagaggtttccgagggtgcggagagcccgtgtgggtagtgtgct

SEQ ID NO: 90 - DNA, 110 bp, synthetic construct
  source 1..110: mol_type = other DNA
atcctcgcaatatatctcacaccagccactcttctccatcttcatccctgccatcctgtccacaccgccatcctgtccacaccgccatcattcggagctgcacgatcaca

SEQ ID NO: 91 - DNA, 110 bp, synthetic construct
  source 1..110: mol_type = other DNA
ctgtccacaccgccatcctgtccacaccgccatcattcggagctgcacgatcacaacagcttcctggcaagtttacctgtttctattttttgcagccagattgaattttt

SEQ ID NO: 92 - DNA, 110 bp, synthetic construct
  source 1..110: mol_type = other DNA
tcaaactagcaggtaatcaaaggaatgtttgacaaagaatgtgtcaccaacaagttccttctcatcttcccatgtccccaaagtagcccctggctctttcacccatttcc

SEQ ID NO: 93 - DNA, 110 bp, synthetic construct
  source 1..110: mol_type = other DNA
tccttctcatcttcccatgtccccaaagtagcccctggctctttcacccatttccaaagcctgaaatcatatgtgacaccagtttctagaatctattcaaaatagtatat

SEQ ID NO: 94 - DNA, 110 bp, synthetic construct
  source 1..110: mol_type = other DNA
aaaaactttaaaaaagaaatgcgtaagttttgccaagaaattctgttgtgctgttgaagagggaacttgcccagctatccaagaggatgacttgtggttaagaaaacaac

SEQ ID NO: 95 - DNA, 110 bp, synthetic construct
  source 1..110: mol_type = other DNA
gaagagggaacttgcccagctatccaagaggatgacttgtggttaagaaaacaacttgcccggcaaagtcttattctacttataagccaagactagcgatgcccagtaat

SEQ ID NO: 96 - DNA, 110 bp, synthetic construct
  source 1..110: mol_type = other DNA
tactaaaaggcaagtttggcttagagaaagtaaatccctagttatatcctgtttatacaacttgggtaatgttttttattatgatttgctgttctggacaagcagctttg

SEQ ID NO: 97 - DNA, 110 bp, synthetic construct
  source 1..110: mol_type = other DNA
tacaacttgggtaatgttttttattatgatttgctgttctggacaagcagctttgtgtaactgacggcagctcattttcagctggtttttttttttctgtttgccaaaat

SEQ ID NO: 98 - DNA, 110 bp, synthetic construct
  source 1..110: mol_type = other DNA
acacaaagggcgatccggttcgtgttggaaagcccttgaagatgaaagctgccttaacaaggtcaaatcctggaaacttattgatgaaatgtcctcataactcttcatga

SEQ ID NO: 99 - DNA, 110 bp, synthetic construct
  source 1..110: mol_type = other DNA
aacaaggtcaaatcctggaaacttattgatgaaatgtcctcataactcttcatgaagcggcactgggtacatcagtcctctaaggcttggaggcaactgtgaggacactc

SEQ ID NO: 100 - DNA, 110 bp, synthetic construct
  source 1..110: mol_type = other DNA
atgcatgtgccctacacgccctgcaagcatccctcccaagccccgttcttgggtctctgcacagcctgggctgggaaggccatagctgcatgcacacctggctttcacct

SEQ ID NO: 101 - DNA, 110 bp, synthetic construct
  source 1..110: mol_type = other DNA
ttcttgggtctctgcacagcctgggctgggaaggccatagctgcatgcacacctggctttcacctgccacttttggtaggaatctagtcacatgtgtgcctctcaaaaca

SEQ ID NO: 102 - DNA, 110 bp, synthetic construct
  source 1..110: mol_type = other DNA
ccgtgggtgtgactgaccaccgggagtggggggactattttttgatgcttggtgttaaacaccgactgctcctgttttgtcggccttgttttccaggatcctgactttat

SEQ ID NO: 103 - DNA, 110 bp, synthetic construct
  source 1..110: mol_type = other DNA
taaacaccgactgctcctgttttgtcggccttgttttccaggatcctgactttattttttctcaaattcactcaaattttacctctttttccccgaggatatgattagtt

SEQ ID NO: 104 - DNA, 110 bp, synthetic construct
  source 1..110: mol_type = other DNA
tatgccgtgattgccctaggcaagtacatgtgaaaggcatctctgttttgccaggaaatttgcgtacctgtgtttatgtagacttgtacagaatagtaagttcccaacaa

SEQ ID NO: 105 - DNA, 110 bp, synthetic construct
  source 1..110: mol_type = other DNA
aaatttgcgtacctgtgtttatgtagacttgtacagaatagtaagttcccaacaacaaacaacagcataatcaatgagaagtaacgagagatgaatgcttcctggggaag

SEQ ID NO: 106 - DNA, 110 bp, synthetic construct
  source 1..110: mol_type = other DNA
caggcctgtgtttgagagccttcactgctcggggacatggaatatggcgtagagtccagtttaaaggctaatgaaagttttcagagcagaggtgatgaaataacacctcc

SEQ ID NO: 107 - DNA, 110 bp, synthetic construct
  source 1..110: mol_type = other DNA
ccagtttaaaggctaatgaaagttttcagagcagaggtgatgaaataacacctccctccagccggggacacaagctatgtgctctgtaaacaggagaccaaagggactcc

SEQ ID NO: 108 - DNA, 110 bp, synthetic construct
  source 1..110: mol_type = other DNA
aggaacagatgagcaatgacccggcagaaggcagcctggactcctgcaacgcaacaggtacaaagacagccccaccaggacacccgctctgccttcggtctgtctccacc

SEQ ID NO: 109 - DNA, 110 bp, synthetic construct
  source 1..110: mol_type = other DNA
cttctcatcgctggtaagactcagaacagagttcagttttcttcaggagtctcgttctccaaaccgtgcctttcctagtggttcgctaaagtggtggatgtttgctgaaa

SEQ ID NO: 110 - DNA, 110 bp, synthetic construct
  source 1..110: mol_type = other DNA
tatatcatttgcaactgtgttctcccattcttggttgtattttcattttactaatggtttcttttgctggatggaagctttttagcttgatgtagtcccgtttgtttatt

SEQ ID NO: 111 - DNA, 110 bp, synthetic construct
  source 1..110: mol_type = other DNA
caaataaaggaaaagaaaaaaggattctgaattccacagacacctcagggagctgtggggcgccgtggagctcagctgtatggggtcggtggaccccaggctgagaaact

SEQ ID NO: 112 - DNA, 110 bp, synthetic construct
  source 1..110: mol_type = other DNA
gccacctcgtccttcccccttacctgtcattcaatagacaaatacctattcagcatttacatgccaggcattgttctaggttctaggaatacactgcacaagggtagctc

SEQ ID NO: 113 - DNA, 110 bp, synthetic construct
  source 1..110: mol_type = other DNA
gttgcagcttcggttctgtccactatgctgacagcaccggccttgcctccaggtatatcacgtgctacctctggtcccctgctgccgcacgagcccctcttgtcagtgac

SEQ ID NO: 114 - DNA, 110 bp, synthetic construct
  source 1..110: mol_type = other DNA
tatcacgtgctacctctggtcccctgctgccgcacgagcccctcttgtcagtgacttcaggacacgcacttggacggcagtggttcccagagtccttcctggcccacaac

SEQ ID NO: 115 - DNA, 110 bp, synthetic construct
  source 1..110: mol_type = other DNA
ttaaggtgtcgttagtgactgatgtagacaccgacagtcacgtcaccgccacacatgctccctcgtcacttaaacccttctcctcaaactcaccctagcaaagtgcccgt

SEQ ID NO: 116 - DNA, 110 bp, synthetic construct
  source 1..110: mol_type = other DNA
tgctccctcgtcacttaaacccttctcctcaaactcaccctagcaaagtgcccgttagctcacaatggtctggtttccgtcacgggtaattgtttaagcttagatctgag

SEQ ID NO: 117 - DNA, 110 bp, synthetic construct
  source 1..110: mol_type = other DNA
actctcaagcacttagacgtacgggctgagctgtaacgtctgacctgatcatcgcaggtcacttgatttgcgtgtgtgtctacaagcgggcgtctagagtacattctgta

SEQ ID NO: 118 - DNA, 110 bp, synthetic construct
  source 1..110: mol_type = other DNA
gctcctgggagctgggcccccaccttcacgcactccaggggcggagggtacgtggccatcagtcgacaccaccgccggtgtctggtggctggaagggaagccctgaagtt

SEQ ID NO: 119 - DNA, 110 bp, synthetic construct
  source 1..110: mol_type = other DNA
ccatcagtcgacaccaccgccggtgtctggtggctggaagggaagccctgaagttgttctgaaatctggagctctgtcgtttctattccagcaggtggtctcatgccccg

SEQ ID NO: 120 - DNA, 110 bp, synthetic construct
  source 1..110: mol_type = other DNA
agccacagtgggaactcccctagcgttatttcttgctgcctctcatcagacgctcaatgttctcgccctactcagtagctttccttttcccaaatgtgccaaattctgat

SEQ ID NO: 121 - DNA, 110 bp, synthetic construct
  source 1..110: mol_type = other DNA
caggctgtcacagctgaagctgtccaagatcaagaaacccccagcagacccagaagctgaccagcgaggcatgagtgagcctagctgggagcagaaatccagtctgtctc

SEQ ID NO: 122 - DNA, 110 bp, synthetic construct
  source 1..110: mol_type = other DNA
ttcccccgggaatgtgtgagctttttgactgtttcatatctttgctggtgtgtggcatagtcgggtatttttcttaaatcattctagcgtatgtgcaggggtgttgcatt

SEQ ID NO: 123 - DNA, 110 bp, synthetic construct
  source 1..110: mol_type = other DNA
tggccacgctacgtggacgtgacatttctcagctaggatatggagatctttttattttcaaagccatttttctttagaaacattatgaatattgaacttgtgatttgtct

SEQ ID NO: 124 - DNA, 110 bp, synthetic construct
  source 1..110: mol_type = other DNA
gcggattagccctgagagttaaagtgtgaggattccattgctttcaggatatctgtaagattgctggaaatacgtaagcaagtcaatagacgtggaggtgtgaggagaag

SEQ ID NO: 125 - DNA, 110 bp, synthetic construct
  source 1..110: mol_type = other DNA
ccaacagcatgtatgtgaggctggcatagaaccccatccacagtgcacagccaactaccagctcatacaaccgtgtaagtgagcccagcaagatcagcagaaacagcatt

SEQ ID NO: 126 - DNA, 110 bp, synthetic construct
  source 1..110: mol_type = other DNA
taccagctcatacaaccgtgtaagtgagcccagcaagatcagcagaaacagcattgttgttttgagccaataggtttaggagtgatttttcatttagctgtaagtaacag

SEQ ID NO: 127 - DNA, 110 bp, synthetic construct
  source 1..110: mol_type = other DNA
tggtttgtttattttaaaagaaatttaagagctgttccaatggtttacttcatccaagctctggataacatcagtgaacctccactttcatagcattttacttcatctcg

SEQ ID NO: 128 - DNA, 110 bp, synthetic construct
  source 1..110: mol_type = other DNA
aagctctggataacatcagtgaacctccactttcatagcattttacttcatctcgaaggctgaagacatctggtccttaccctcgccaggcttccgttccctcaccttgt

SEQ ID NO: 129 - DNA, 110 bp, synthetic construct
  source 1..110: mol_type = other DNA
tctgcatgttttgttaaactggtgcagtggaaatttctttaaccagatattcagactaaaactcagaattttccattgtcacgtctccaaagttcctaccaaaggcagtt

SEQ ID NO: 130 - DNA, 110 bp, synthetic construct
  source 1..110: mol_type = other DNA
ctaaaactcagaattttccattgtcacgtctccaaagttcctaccaaaggcagttgatataagcattacagtggctttgctaacggtaacatcccctgctttcaagacag

SEQ ID NO: 131 - DNA, 110 bp, synthetic construct
  source 1..110: mol_type = other DNA
tgggaattatcctgcttactgttattataataaatctccctggttttcatcctctcaaaagcttcaaatgcaggtttacatgtgctgaccagcagagagattgtcttcct

SEQ ID NO: 132 - DNA, 110 bp, synthetic construct
  source 1..110: mol_type = other DNA
caaaagcttcaaatgcaggtttacatgtgctgaccagcagagagattgtcttcctaaggctggaacatcagaagagaagagaaggatgaaaccaacttaaggatgatgaa

SEQ ID NO: 133 - DNA, 110 bp, synthetic construct
  source 1..110: mol_type = other DNA
tcattattcacggtagtcggtttccagctcatgaaccctgaactagttactactgaacaatttcttctagggggaaactcagtgtccgtttccttcaagcctctggtcat

SEQ ID NO: 134 - DNA, 110 bp, synthetic construct
  source 1..110: mol_type = other DNA
aacaatttcttctagggggaaactcagtgtccgtttccttcaagcctctggtcatgattttttgtccgctggtcaatccataaccttgttgtatatatatttctactaga

SEQ ID NO: 135 - DNA, 110 bp, synthetic construct
  source 1..110: mol_type = other DNA
tatcccagcaaagatgtgaatgggtgtatagtccacataaagacttaatgatgcacaaaatctaccatagaaattcaggagggcaacgacctgagtgattggggcactgg

SEQ ID NO: 136 - DNA, 110 bp, synthetic construct
  source 1..110: mol_type = other DNA
gcagggtacatctcatttgatcttgagagctggtgtaaaacccatttggcagttggtgatctgagacagagtgagcttagtgcacttagccaaagtcacgctggtgtatg

SEQ ID NO: 137 - DNA, 110 bp, synthetic construct
  source 1..110: mol_type = other DNA
gtgatctgagacagagtgagcttagtgcacttagccaaagtcacgctggtgtatgtcttggggttgagggtcaaattcttgcttttgatcactcttatataactttttaa

SEQ ID NO: 138 - DNA, 110 bp, synthetic construct
  source 1..110: mol_type = other DNA
agatatgggattcaaagcagggagactccagtagttgtaagcatggtgtaaagaagctgagaagctattaaggaaatatggcaatctcttgtggcttagaggacaaatgt

SEQ ID NO: 139 - DNA, 110 bp, synthetic construct
  source 1..110: mol_type = other DNA
gagctcaagtcatgttctaaaaaccatgatgttgcccagtatggatagagctaatttgaatggagtgagaaaagaaaaactgtagacttttactaactgggcagagaaaa

SEQ ID NO: 140 - DNA, 110 bp, synthetic construct
  source 1..110: mol_type = other DNA
aagacataccaagaggccgccacaagtacaaattccctcaaaaaccaattgggaaggggctaaagataagaggtagcgtctagcaaatgtcttttattctggctgtccga

SEQ ID NO: 141 - DNA, 110 bp, synthetic construct
  source 1..110: mol_type = other DNA
ggggctaaagataagaggtagcgtctagcaaatgtcttttattctggctgtccgattttcattagtcctgccaagatttgggttaaagtgttatccctttatggccactg

SEQ ID NO: 142 - DNA, 110 bp, synthetic construct
  source 1..110: mol_type = other DNA
gttggagggaagagaagggggtaaagttatttattcctccaggtgttcacagagtggcagggctgccatgctctggttggaaccctttgctgaagagggaagctcctctt

SEQ ID NO: 143 - DNA, 110 bp, synthetic construct
  source 1..110: mol_type = other DNA
ggcagggctgccatgctctggttggaaccctttgctgaagagggaagctcctcttttgatgactcacatgtgccacccccctccctccaggtgtcagtaaccacttctct

SEQ ID NO: 144 - DNA, 110 bp, synthetic construct
  source 1..110: mol_type = other DNA
acgtatccgcgtggaacagtgaacagaagaagtcggcgcctggtaaaacactccaggaaaaagcggtagaggttagggttgccgcctgagctacaccaaccacacttcta

SEQ ID NO: 145 - DNA, 110 bp, synthetic construct
  source 1..110: mol_type = other DNA
ggaaaaagcggtagaggttagggttgccgcctgagctacaccaaccacacttctaatgggggccacagctgactgctcgctgttcgctcctctctcagattaaattctgc

SEQ ID NO: 146 - DNA, 110 bp, synthetic construct
  source 1..110: mol_type = other DNA
ttataccctcagggtattattataccttgtccagaactgacctgcatgtttcagtactgaccagtgtggacacccatgaaccccgacccccgggtttctgcccccgccat

SEQ ID NO: 147 - DNA, 110 bp, synthetic construct
  source 1..110: mol_type = other DNA
cctttacaaagggcaataagaaaggtaaattaaagtcttttaataactaagctgtatatttctaagacatgagttctcaggatctcacataagaaaacacttcctcaata

SEQ ID NO: 148 - DNA, 110 bp, synthetic construct
  source 1..110: mol_type = other DNA
atatttctaagacatgagttctcaggatctcacataagaaaacacttcctcaatacgtctttttttgtttgtttgttttcagggctactcctctggcatatgcaagttcc

SEQ ID NO: 149 - DNA, 110 bp, synthetic construct
  source 1..110: mol_type = other DNA
ctccttcagagtaagcagcacaggcagcaaaggaaacagctccacaccaagacaagatggctaaaggtggtgtggtaaaaacgaagaaagcttggctggaaacactactc

SEQ ID NO: 150 - DNA, 110 bp, synthetic construct
  source 1..110: mol_type = other DNA
gatggctaaaggtggtgtggtaaaaacgaagaaagcttggctggaaacactactcattccctgggaatctgaaatatttgaaggacacttctggtggagtgcttgtaaaa

SEQ ID NO: 151 - DNA, 110 bp, synthetic construct
  source 1..110: mol_type = other DNA
tttaaccataatcacaagaattctcccagaattcgtgaggtaaacccctccattcctcatgtctggttggaatcccattcatccactttttcagtcatctgttcattcac

SEQ ID NO: 152 - DNA, 110 bp, synthetic construct
  source 1..110: mol_type = other DNA
ggctaatgtcccaacaactgtgccctcctgagggaaaaaataggccggtgtcttacagttctagagtggaaaatagggccacagataaggatcagggcggatgcaagctt

SEQ ID NO: 153 - DNA, 110 bp, synthetic construct
  source 1..110: mol_type = other DNA
tgaacctatgaaccttctgcaggggatgaatcagtgtttcctacactacctaaccagccactggatcgggaaatcattggtgacttaccctgcacctacatgttacttct

SEQ ID NO: 154 - DNA, 110 bp, synthetic construct
  source 1..110: mol_type = other DNA
cacgtttccatggagcgtcaggtaggcggggagcccaggaagccctcacggcttcttcatcaagggaaaactttcagcaccacgtctcttatggtgtgaagcagctttat

SEQ ID NO: 155 - DNA, 110 bp, synthetic construct
  source 1..110: mol_type = other DNA
ttcatcaagggaaaactttcagcaccacgtctcttatggtgtgaagcagctttatacttttgtttcagcttttctctttttaattgactttttgtcaatttaattcttta

SEQ ID NO: 156 - DNA, 110 bp, synthetic construct
  source 1..110: mol_type = other DNA
taaatattttaaatatttttgggcttcccatcttaaaaacctttttaaaaaatagtagataagtcattttgcaccgcagctcctttccactataacatcctggatctttg

SEQ ID NO: 157 - DNA, 110 bp, synthetic construct
  source 1..110: mol_type = other DNA
tagataagtcattttgcaccgcagctcctttccactataacatcctggatctttgttaattccatgtgtacaataattcatgtctttaaaattaaccatttaccaacacg

SEQ ID NO: 158 - DNA, 110 bp, synthetic construct
  source 1..110: mol_type = other DNA
ttgggacagacctgcccagcaaatgtgaagatccggactgggacagctgtccagtcaagtcaccttctcaccacactctggagacctcctcactcagaagagtgggggct

SEQ ID NO: 159 - DNA, 110 bp, synthetic construct
  source 1..110: mol_type = other DNA
ccttcaccaggcagactgggtacaactctcagatccatcatctgacactgccattttggatgagttatctaatccttcaagttttaagtattctgttctctaaaatgggc

SEQ ID NO: 160 - DNA, 110 bp, synthetic construct
  source 1..110: mol_type = other DNA
ttggatgagttatctaatccttcaagttttaagtattctgttctctaaaatgggcaaggaatggtcactgcctccttggaagtgtaactgggatcagatgggtaccagct

SEQ ID NO: 161 - DNA, 110 bp, synthetic construct
  source 1..110: mol_type = other DNA
ctgttcttatcacatccaggattccctccattcactgcaatagaacccctttcatataagagctgcatcatatcccatggcatggaaattctgtcaaatactgactcccc

SEQ ID NO: 162 - DNA, 110 bp, synthetic construct
  source 1..110: mol_type = other DNA
cagagttgcttagagaatgttatgaaaagaacgttgacaactgcttgtgccattgtgtactcattcggagctctcaaagctactgtttggattcctaggatccctgaatt

SEQ ID NO: 163 - DNA, 110 bp, synthetic construct
  source 1..110: mol_type = other DNA
aatttttttggccacacccttggcatgcaaaagttccaggaccagggatcaaacctgagccataccagtgacaacatcagattcttagtccactgcgccaccagggaact

SEQ ID NO: 164 - DNA, 110 bp, synthetic construct
  source 1..110: mol_type = other DNA
tgagccataccagtgacaacatcagattcttagtccactgcgccaccagggaactccatgagagctggatattaataacaaataactgtcctgtgagctatgctgtccaa

SEQ ID NO: 165 - DNA, 110 bp, synthetic construct
  source 1..110: mol_type = other DNA
caccttcagtgacatattttgaatggaaaggctgcatcctagtttccactggttcagatagtaaattctgcaaaacccttttgatctttccggttctgttggattcttcc

SEQ ID NO: 166 - DNA, 110 bp, synthetic construct
  source 1..110: mol_type = other DNA
agatagtaaattctgcaaaacccttttgatctttccggttctgttggattcttcccacccagagtccacgtacagcctggtatcttggcggatccacaattatgcaaaag

SEQ ID NO: 167 - DNA, 110 bp, synthetic construct
  source 1..110: mol_type = other DNA
ttacagtatatttgaagctaaaatagacggttttacattttatcatggttaaataaccatttcatgtgaataaggctgtaacatttcactggttttgtgtgggctttgtt

SEQ ID NO: 168 - DNA, 110 bp, synthetic construct; identical to SEQ ID NO: 167
  source 1..110: mol_type = other DNA

SEQ ID NO: 169 - DNA, 110 bp, synthetic construct
  source 1..110: mol_type = other DNA
cctccccttctcttccctctgttccccttggctgactccttttgaatcagaacttgctggcctgggttccttgagcttgtccactgacaggtgccatcagagtgttttct

SEQ ID NO: 170 - DNA, 110 bp, synthetic construct
  source 1..110: mol_type = other DNA
ctcaaagtaagagaccagtgatttatgcatagaacttagagactggattccagggagaccagaaatcctgtcttacagataacagcttacgtcttggtcggaaaaataaa

SEQ ID NO: 171 - DNA, 110 bp, synthetic construct
  source 1..110: mol_type = other DNA
agaccagaaatcctgtcttacagataacagcttacgtcttggtcggaaaaataaacagattacaacaatttttggtgataggaagcagagataaatttcacatagtgaaa

SEQ ID NO: 172 - DNA, 110 bp, synthetic construct
  source 1..110: mol_type = other DNA
tcaggtgtttattcagtgaaatcacaagccggtggggagtgggagagaaaacaccatggtctgtaaacaccaactccatgtaacaacgctagtccagctacgttcatcta

SEQ ID NO: 173 - DNA, 110 bp, synthetic construct
  source 1..110: mol_type = other DNA
tatttgatgctcctatatacagaaatgtcaggaaactggctaaaattctgtggtaaggacaacataattttctagtgggcactaactgtgtccaccttcactgaggagat

SEQ ID NO: 174 - DNA, 110 bp, synthetic construct
  source 1..110: mol_type = other DNA
aggacaacataattttctagtgggcactaactgtgtccaccttcactgaggagatcaggagcccactctcaagtctctttcttgctctaactaacctccctacacacatc

SEQ ID NO: 175 - DNA, 110 bp, synthetic construct
  source 1..110: mol_type = other DNA
gaatctgaaagtcacataaaataagcttcaatcgtgttatggagatattgctctagtgaggactgccatgtgtacacagcacaatatatataaaaggtccaatacaaagt

SEQ ID NO: 176 - DNA, 110 bp, synthetic construct
  source 1..110: mol_type = other DNA
agcattttagatatatattacacctttaattacccagcaaatgacaagcgcagggagaagcacaaaaattcttgagatacatcactcgccttccagaagcttaaacatct

SEQ ID NO: 177 - DNA, 110 bp, synthetic construct
  source 1..110: mol_type = other DNA
ggccgaagaccaaacgtaagtaagctcaacacaagatgcctctaccgtgtaaaacacttctccacctaggagctgtggggacacaggggacagggagggaaggaggacaa

SEQ ID NO: 178 - DNA, 110 bp, synthetic construct
  source 1..110: mol_type = other DNA
acttctccacctaggagctgtggggacacaggggacagggagggaaggaggacaacggtggacggccagcgctgccgggaggacttgggggcccctcctagaatcagagg

SEQ ID NO: 179 - DNA, 110 bp, synthetic construct
  source 1..110: mol_type = other DNA
aaactaagccgacttgggtttcgtatccacaccgggcttgttcgcactcatgctttgaaggctgcagaagagacaaaggcgattccagatatttttagaatcagattcaa

SEQ ID NO: 180 - DNA, 110 bp, synthetic construct
  source 1..110: mol_type = other DNA
tgaaggctgcagaagagacaaaggcgattccagatatttttagaatcagattcaacaccaatatgtattctcctgctggaaagtgtccttgatgaagccgagtactatta

SEQ ID NO: 181 - DNA, 110 bp, synthetic construct; identical to SEQ ID NO: 179
  source 1..110: mol_type = other DNA

SEQ ID NO: 182 - DNA, 110 bp, synthetic construct; identical to SEQ ID NO: 180
  source 1..110: mol_type = other DNA

SEQ ID NO: 183 - DNA, 110 bp, synthetic construct
  source 1..110: mol_type = other DNA
ggttttaaaatgcctagaataaattagttaaatacaaactctccgggcatcctctgatagatcactgttttccttacgtgtgcaaggaggaaacgcaggcctgtgagctc

SEQ ID NO: 184 - DNA, 110 bp, synthetic construct; identical to SEQ ID NO: 183
  source 1..110: mol_type = other DNA

SEQ ID NO: 185 - DNA, 110 bp, synthetic construct
  source 1..110: mol_type = other DNA
gtctctctgttcttatttatcagaactttgtgtagcttcctaagcggttatttcactgtacgcgatggacagacttatcacaagtgggcagaaccggggtaacaaacact

SEQ ID NO: 186 - DNA, 110 bp, synthetic construct
  source 1..110: mol_type = other DNA
tttctctgtgtgcagcgtctgtggggcaggtgtggggaagacgagaagctgggcgtttggcctgtagggcatccaccctgcctggagacacagcccattctaccaaggca

SEQ ID NO: 187 - DNA, 110 bp, synthetic construct
  source 1..110: mol_type = other DNA
tatgcatataaaggaaagtgagaacgagaattctatgagcaaatccagaacagatgatactttaggtgatttttaaagcacacattatgatctaccgcatacaggagcct

SEQ ID NO: 188 - DNA, 110 bp, synthetic construct
  source 1..110: mol_type = other DNA
cctactgagttcattgttcaccttgagtgctcccttttgtcagaagctcaggaagatactagagtttatcccacagttttgatgagaaatgacctacctaccccagggct

SEQ ID NO: 189 - DNA, 110 bp, synthetic construct
  source 1..110: mol_type = other DNA
tggaaaacattatctagaaaaaacaaacgctgtgatggccagcaggtcagaatggctcccaaaccaccggcttatactcaacacactccacaagcattaattggctatca

SEQ ID NO: 190 - DNA, 110 bp, synthetic construct
  source 1..110: mol_type = other DNA
ctcccaaaccaccggcttatactcaacacactccacaagcattaattggctatcatccaggtaggcctatagtgtataatatggggcaagagaggggccttcttaattaa

SEQ ID NO: 191 - DNA, 110 bp, synthetic construct
  source 1..110: mol_type = other DNA
gttcttgtgaggattaaatataaagcccttagagatatactaagcattacatacgtgttagctgttaccagaattattatttaaggaggtacgatgcatgaagatagaac

SEQ ID NO: 192 - DNA, 110 bp, synthetic construct
  source 1..110: mol_type = other DNA
tgttagctgttaccagaattattatttaaggaggtacgatgcatgaagatagaacaaagtcagaaaatttgaaattttaaaaacaaaaagggcctgctctcttatcatac

SEQ ID NO: 193 - DNA, 110 bp, synthetic construct
  source 1..110: mol_type = other DNA
agaaggacctctctaaaacatgcgtcagattgtgttattcttccactcaagccctccactctttcttcctgtcatcactcagagtccttaccccggcctgcaaggctgga

SEQ ID NO: 194 - DNA, 110 bp, synthetic construct
  source 1..110: mol_type = other DNA
ccactctttcttcctgtcatcactcagagtccttaccccggcctgcaaggctggaagggtctgaccctgcggccttgctgaccacacctcttgtcaccctctctctcctg

SEQ ID NO: 195 - DNA, 110 bp, synthetic construct
  source 1..110: mol_type = other DNA
accactttcctaactagatgactcccagcatgtggataacttcccacagggggcgggccaccaaaggcagcctcattttaggatgtccccctaagggctctgtgctctat

SEQ ID NO: 196 - DNA, 110 bp, synthetic construct
  source 1..110: mol_type = other DNA
atatcacgaaagagaaaacaatatgcaaatagtctaaaaaatgaagtcacctcgaagggcaaatagaacaacatgaggttaaacactcttctctccatttcgttgaggag

SEQ ID NO: 197 - DNA, 110 bp, synthetic construct
  source 1..110: mol_type = other DNA
attgtgggacacactggccagtggaaggaggatagagagcaatggagaattgacacacacagaaaacactgaggtcattttgcacccaccaaagagaataggtggatttg

SEQ ID NO: 198 - DNA, 110 bp, synthetic construct
  source 1..110: mol_type = other DNA
cacacagaaaacactgaggtcattttgcacccaccaaagagaataggtggatttgaaaggggttcagtggggtgtggttgggcatgttctttttgtccaaggttactgtg

SEQ ID NO: 199 - DNA, 110 bp, synthetic construct
  source 1..110: mol_type = other DNA
agtgcatttgtaaaacaagttaaaggccaatgaagtgattaggcaaacacaaactagtaccttagtgactcctagccattaatatgcctttctgagcacataactcatta

SEQ ID NO: 200 - DNA, 110 bp, synthetic construct
  source 1..110: mol_type = other DNA
agtaccttagtgactcctagccattaatatgcctttctgagcacataactcattactttgagtggctaaagcactgaggagactagaatcctataaaatccttaaaggtc

SEQ ID NO: 201 - DNA, 110 bp, synthetic construct
  source 1..110: mol_type = other DNA
agccttcaaagcatcatggttgttacagcagcaccatgaggttggtgtcatcatctgcatttgacagatgagagcattcatgctcagaggtacaagctgtccaaggccca

SEQ ID NO: 202 - DNA, 110 bp, synthetic construct
  source 1..110: mol_type = other DNA
tgcatttgacagatgagagcattcatgctcagaggtacaagctgtccaaggcccacagctagtcagtggtgggctgatttgtacacgggccggaggatgtcaggatctgc

SEQ ID NO: 203 - DNA, 110 bp, synthetic construct
  source 1..110: mol_type = other DNA
tatttgtcccgtatggaagccaatacaatcagcggcaccagcatagataaggagctgcataaggttgtattttagtggcaaggctgttttgtgaccatgttctgcaggca

SEQ ID NO: 204 - DNA, 110 bp, synthetic construct
  source 1..110: mol_type = other DNA
tgcataaggttgtattttagtggcaaggctgttttgtgaccatgttctgcaggcagactggaggtgacagtattatttacttttgttgcttggggtccaaagagaataaa

SEQ ID NO: 205 - DNA, 110 bp, synthetic construct
  source 1..110: mol_type = other DNA
gtgtccactcacttattctaatgtgatacaaccactgcacacctaggatagcatttactcttttgctggtcatacactgtggattatgtgaaagctgtgatcagttatta

SEQ ID NO: 206 - DNA, 110 bp, synthetic construct
  source 1..110: mol_type = other DNA
tactcttttgctggtcatacactgtggattatgtgaaagctgtgatcagttattacctaatctccttagttctcatacttataaaattggttttttgaaaactcaggcac

SEQ ID NO: 207 - DNA, 110 bp, synthetic construct
  source 1..110: mol_type = other DNA
gatacatcagatatatgaccttgttaaatgtcacttgatttctgaggccctgggtgttcatattcatgaaataggaggcatggtcaaggaaactgccttgaggctctgtt

SEQ ID NO: 208 - DNA, 110 bp, synthetic construct
  source 1..110: mol_type = other DNA
gttcatattcatgaaataggaggcatggtcaaggaaactgccttgaggctctgtttgggctctgcatttctttaaatgaatgtttattgtgacattaccttgatatttcc

SEQ ID NO: 209 - DNA, 110 bp, synthetic construct
  source 1..110: mol_type = other DNA
tccaagaatgctggagacctcccctcagccactttcaagtagacggtgctgtatcattggctgtagtgaccgagaaggtccttagagcatcttctataactaaacccttt

SEQ ID NO: 210 - DNA, 110 bp, synthetic construct
  source 1..110: mol_type = other DNA
attggctgtagtgaccgagaaggtccttagagcatcttctataactaaaccctttgacctacgtcttcccagctccctccccccagccactgacaaccaccatgctattc

SEQ ID NO: 211 - DNA, 110 bp, synthetic construct
  source 1..110: mol_type = other DNA
tggggggaaaaaactttacctggaaatcctttatttttctctctctgccatagattttcccttaactctgaaagattttgaactcctctaacctttagctactccttctt

SEQ ID NO: 212 - DNA, 110 bp, synthetic construct
  source 1..110: mol_type = other DNA
tttcccttaactctgaaagattttgaactcctctaacctttagctactccttcttctctgttcccaaagcattcaatatattgcacatggtataatgcctaatataacat

SEQ ID NO: 213 - DNA, 110 bp, synthetic construct
  source 1..110: mol_type = other DNA
aaggactccttccaaaacttcctgatacacccgtaacctcaacaaatctttcgtaactactgtatattttaaggttgtatgcgttatctacgtttagcgggttaggaagc

SEQ ID NO: 214 - DNA, 110 bp, synthetic construct
  source 1..110: mol_type = other DNA
actactgtatattttaaggttgtatgcgttatctacgtttagcgggttaggaagctaagaatccaggtaaccaggtatcttttcctaagaaataaaatcagcaagtggca

SEQ ID NO: 215 - DNA, 110 bp, synthetic construct
  source 1..110: mol_type = other DNA
tccacaaagcaacctcctgcattctctcagcaactccagttgggttaaatacaacagattgctggcagactctttataatgaaaagacctgactgcagctatggaggttc

SEQ ID NO: 216 - DNA, 110 bp, synthetic construct
  source 1..110: mol_type = other DNA
aagcctcatctgtgtttgccctgcagagaccgctgagccagagtctccttccagctctgattcgggagcatctctgagggacggtctcaaaggaacccagtgccccacgg

SEQ ID NO: 217 - DNA, 110 bp, synthetic construct
  source 1..110: mol_type = other DNA
tctgattcgggagcatctctgagggacggtctcaaaggaacccagtgccccacggggggctcgtctaggtgtaggtatagaaagtcaagaatcttaagcaactgcagctt

SEQ ID NO: 218 - DNA, 110 bp, synthetic construct
  source 1..110: mol_type = other DNA
atctggcagcgatggatgagggagaaggaataaacaagcaacgttatttttctgttgttagccagggaatcaccacaaaccttgtggcgtacagctatttctgatctcgt

SEQ ID NO: 219 - DNA, 110 bp, synthetic construct
  source 1..110: mol_type = other DNA
tgttagccagggaatcaccacaaaccttgtggcgtacagctatttctgatctcgtggtcctcatgctggctggggttgaggtctcgtcgggcgttcggggtcgtgctcca

SEQ ID NO: 220 - DNA, 110 bp, synthetic construct
  source 1..110: mol_type = other DNA
tgaagctggcagaggttggctcatgaggtttaagaagccatttctgtgacataaaagtacaaggtgaagcaccaagggctgatgtttagaagctgcagcaagtttatcca

SEQ ID NO: 221 - DNA, 110 bp, synthetic construct
  source 1..110: mol_type = other DNA
agtacaaggtgaagcaccaagggctgatgtttagaagctgcagcaagtttatccataagatttagcttagataactggtgaaagtagcgatactacacaacagattttca

SEQ ID NO: 222 - DNA, 110 bp, synthetic construct
  source 1..110: mol_type = other DNA
ttcagtaaaagtatttgtctctgaattttgaggacagtgaaaagcagatactatttttattttatttcattgtttattgtctttttagggccgcacctgcagcatatggg

SEQ ID NO: 223 - DNA, 110 bp, synthetic construct; identical to SEQ ID NO: 222
  source 1..110: mol_type = other DNA

SEQ ID NO: 224 - DNA, 110 bp, synthetic construct
  source 1..110: mol_type = other DNA
tgatagatttaatgacgccttgatgtaatgtagctaaaagcatggagttccctagtggctcagtgggctaaggattcagtgtgctcattgctgtggcttgggtcactgct

SEQ ID NO: 225 - DNA, 110 bp, synthetic construct
  source 1..110: mol_type = other DNA
tggctcagtgggctaaggattcagtgtgctcattgctgtggcttgggtcactgctggggtacaggttagaaggtaagactggcccagggacttccgcatgctgtgggctt

SEQ ID NO: 226 - DNA, 110 bp, synthetic construct
  source 1..110: mol_type = other DNA
gcatgacaaagacctacagagaaggggtgtcctgaggagggcctggcatagtttgggctaaagatgaaagatgaaaaaaaaggtcattggtttaagctactaagaggcca

SEQ ID NO: 227 - DNA, 110 bp, synthetic construct
  source 1..110: mol_type = other DNA
ggctaaagatgaaagatgaaaaaaaaggtcattggtttaagctactaagaggccagaagagaatatagattcacatagagaacggtggcatcgagtcaggcaccactgaa

SEQ ID NO: 228 - DNA, 110 bp, synthetic construct; identical to SEQ ID NO: 226
  source 1..110: mol_type = other DNA

SEQ ID NO: 229 - DNA, 110 bp, synthetic construct; identical to SEQ ID NO: 227
  source 1..110: mol_type = other DNA

SEQ ID NO: 230 - DNA, 110 bp, synthetic construct
  source 1..110: mol_type = other DNA
tataaaacagacaaacaaaactatgtcctcaaactaatacgggatttgaggagcgtgcttttaatccaaattccggtatcccctttgttacgccgaattgaatcttgcct

SEQ ID NO: 231 - DNA, 110 bp, synthetic construct
  source 1..110: mol_type = other DNA
cattttctgcatgaagcagtttggtttgtaagaatgtcaccacaatatttagcgtaagttggatttatgaatggattttgaatgttaagtgctatttgatggatgcagat

SEQ ID NO: 232 - DNA, 110 bp, synthetic construct
  source 1..110: mol_type = other DNA
tcagttaaccttaattatcatagcatttttgttttaatgtcatatagctatacttagatcatgatcttacctacaagactaaaaacgtttgtgataacactgcaggcttg

SEQ ID NO: 233 - DNA, 110 bp, synthetic construct
  source 1..110: mol_type = other DNA
gtgttttctgagctgtaaataccgttatggcgccaacacaaatgccagtgttaacttacaaactgtcacagccagctggcagttaataccttctctgaggaacagagtct

SEQ ID NO: 234 - DNA, 110 bp, synthetic construct
  source 1..110: mol_type = other DNA
tcttctagcctgaatcttatagaatacattgcaatttgcttctatttcacagagtagaagggcgagcagttaaaggagacagtggagcaggaagggaatagtaatgcttt

SEQ ID NO: 235 - DNA, 110 bp, synthetic construct
  source 1..110: mol_type = other DNA
agaagggcgagcagttaaaggagacagtggagcaggaagggaatagtaatgctttttctcctgaaataagagcagagtgggcagcctccagcttacaaatggcatgtctg

SEQ ID NO: 236 - DNA, 110 bp, synthetic construct
  source 1..110: mol_type = other DNA
taagatgcattctttcaaaattctttgtaagaattttggcacagccaatgaacagttgaatgtcgaccaaactaaaatccctgaaagttggaggccttgttatagaagaa

SEQ ID NO: 237 - DNA, 110 bp, synthetic construct
  source 1..110: mol_type = other DNA
ttgaatgtcgaccaaactaaaatccctgaaagttggaggccttgttatagaagaaatacctctttgaaatgttgccttttttctctttctaatttaattgtactagtata

SEQ ID NO: 238 - DNA, 110 bp, synthetic construct
  source 1..110: mol_type = other DNA
cctttctaaatcttactgctctctcgtggctgcattgctaccagcccatttcctgcctggtaaccaacatctaggttttttgaaaagcaattactgtatttcttatggcc

SEQ ID NO: 239 - DNA, 110 bp, synthetic construct
  source 1..110: mol_type = other DNA
agtcctgcagcagctcaggctctggcctccagatctgtgggggctctcatttcggttgttttgagccaccacaattgtgggtgttggtgcagccacaggaaatggatagt

SEQ ID NO: 240 - DNA, 110 bp, synthetic construct
  source 1..110: mol_type = other DNA
ttgttttgagccaccacaattgtgggtgttggtgcagccacaggaaatggatagttacgctgccctctcatcagctcaggtgggaattcttagacctttttacaacgaag

SEQ ID NO: 241 - DNA, 110 bp, synthetic construct
  source 1..110: mol_type = other DNA
aacatgcaatgctcccaagtgccgttaacttccaactcccatttcccactgtacaacctcagcatagtttgcatgtatcctatcacatatccgctccagcctggaaaatc

SEQ ID NO: 242 - DNA, 110 bp, synthetic construct
  source 1..110: mol_type = other DNA
acctcagcatagtttgcatgtatcctatcacatatccgctccagcctggaaaatccggaaacaccaaaaccatcaaaagagagacgtatttatgaataatgtattatagt

SEQ ID NO: 243 - DNA, 110 bp, synthetic construct
  source 1..110: mol_type = other DNA
ctttaacagtaggaaatggtattcagaagtcacagtcctggtgcgtgatgtgtcattgtcactaggttggtcactgcttctaaggttagttgcaagagctatgaaacctg

SEQ ID NO: 244 - DNA, 110 bp, synthetic construct
  source 1..110: mol_type = other DNA
ttgtcactaggttggtcactgcttctaaggttagttgcaagagctatgaaacctgccttttttaaaaaggtaaaaaccacaatatttatactgacatttccaattcatat

SEQ ID NO: 245 - DNA, 110 bp, synthetic construct
  source 1..110: mol_type = other DNA
acgcccaagggattgaacctgcaccacagcagtgacaatgctgagtccttaactgacaggccaccaggaagctcccctggttgtttttcttgcaagacaggggacagtgt

SEQ ID NO: 246 - DNA, 110 bp, synthetic construct
  source 1..110: mol_type = other DNA
acaggccaccaggaagctcccctggttgtttttcttgcaagacaggggacagtgtgagaggaagtgtgtaacttgggcattggtgcccatcttttattgtgcaaaacact

SEQ ID NO: 247 - DNA, 110 bp, synthetic construct
  source 1..110: mol_type = other DNA
aggtgaggtgatatgccagttgtagaatggcttatagtttccaaatttcaaatactatattatgattcactcatgcattgacacttagggactaataggctatgtgagac

SEQ ID NO: 248 - DNA, 110 bp, synthetic construct
  source 1..110: mol_type = other DNA
tatattatgattcactcatgcattgacacttagggactaataggctatgtgagactgagccacataaaggaagagtgccagacccttaagattttgtggcgttgaggtga

SEQ ID NO: 249 - DNA, 110 bp, synthetic construct
  source 1..110: mol_type = other DNA
gtattgcatcataattgcctttgaaaaagtaaatatgtgtaccatgtggagcagtgtctacctgaaggccaaccaggaagacggctgtccaagaagtccacgtgagaagt

SEQ ID NO: 250 - DNA, 110 bp, synthetic construct
  source 1..110: mol_type = other DNA
gtctacctgaaggccaaccaggaagacggctgtccaagaagtccacgtgagaagtagtggcatggagctcacagggagcaactggccagccaatctatggagggaaggga

SEQ ID NO: 251 - DNA, 110 bp, synthetic construct
  source 1..110: mol_type = other DNA
ctggtcctcatctaccatttggctgcagtcactcctgtcagctccgtgtataagtacggaggcaggcaaaattcacagcacacaagcaagaatcaaaaaattaatgaaca

SEQ ID NO: 252 - DNA, 110 bp, synthetic construct
  source 1..110: mol_type = other DNA
acggaggcaggcaaaattcacagcacacaagcaagaatcaaaaaattaatgaacaaggagtttcctggtggcctcgagggttaaggatctgacattgtcactgttttgtc

SEQ ID NO: 253 - DNA, 110 bp, synthetic construct
  source 1..110: mol_type = other DNA
gtttttcctaaccactcacacaaaattcgttctccatcactgctccccagcatggcttcactgtttgcatcgcacatgccaacagtctgccacttacttgtttatttcct

SEQ ID NO: 254 - DNA, 110 bp, synthetic construct
  source 1..110: mol_type = other DNA
cttcactgtttgcatcgcacatgccaacagtctgccacttacttgtttatttcctgtctgctctccagtgtagaatataggtaccatgagggcaggggctcttccgtttc

SEQ ID NO: 255 - DNA, 110 bp, synthetic construct
  source 1..110: mol_type = other DNA
tcgtggggactctcatctaaaaagtctgaccttgctgaacgagagaacatgcctctcaaagccttttggggtggagcaccataaggtcacacttccagtctatctcagcc

SEQ ID NO: 256 - DNA, 110 bp, synthetic construct
  source 1..110: mol_type = other DNA
tcaaagccttttggggtggagcaccataaggtcacacttccagtctatctcagccttgggttccccagcgtcgggtcacaaggctgacgctaaatacatgcatgaatggg

SEQ ID NO: 257 - DNA, 110 bp, synthetic construct
  source 1..110: mol_type = other DNA
ccaacagccggctgccccaactccttgattaaagagctccatcacttcaggatccttggagaggagcaggtgagtcagcctctcagaggctacatgggagcatcatggaa

SEQ ID NO: 258 - DNA, 110 bp, synthetic construct
  source 1..110: mol_type = other DNA
cagggattaggatgcagacatgttggcgggggcagagggggatgaggggcattgttctgctgaccacaacaaaccaaatttgactattgggagcatttgctcgaggaaag

SEQ ID NO: 259 - DNA, 110 bp, synthetic construct
  source 1..110: mol_type = other DNA
tctgctgaccacaacaaaccaaatttgactattgggagcatttgctcgaggaaagacaccaaggaatctcacttggctagtgaggagcgtccatctgtatacatccaggt

SEQ ID NO: 260 - DNA, 110 bp, synthetic construct
  source 1..110: mol_type = other DNA
gtgctggtttcctcctccatccaggccactcaaactttctccccatcagcaatgcagctgtttaaattccttatcatgcatgtgttaaatttccttccagagcttttcct

SEQ ID NO: 261 - DNA, 110 bp, synthetic construct
  source 1..110: mol_type = other DNA
aagtcttcttcatggaatcggtgggaaaaccagcaagaagacaagacagctgattccacagcttgtgagggactgaacgccatgccgttgcatttatttatgtatttcct

SEQ ID NO: 262 - DNA, 110 bp, synthetic construct
  source 1..110: mol_type = other DNA
ccacagcttgtgagggactgaacgccatgccgttgcatttatttatgtatttcctttttaaatgaaaccacaggtattttttgctgcccccatggcatgtggaagttgcc

SEQ ID NO: 263 - DNA, 110 bp, synthetic construct
  source 1..110: mol_type = other DNA
gttgcagagctttacaggcttaggaacacgggcagccggcatcccagtttgaatgggtctcccgggcggtgcttcgccccctggtggtgcttcgccccctcgcccacggg

SEQ ID NO: 264 - DNA, 110 bp, synthetic construct
  source 1..110: mol_type = other DNA
agtttgaatgggtctcccgggcggtgcttcgccccctggtggtgcttcgccccctcgcccacgggccaaggtctcgcgagaagtcggggctccgcccttacaaggcggcc

SEQ ID NO: 265 - DNA, 110 bp, synthetic construct
  source 1..110: mol_type = other DNA
tggcatacagaagatcccaggccacagctggaatctgagccagggttgcgacctaagccacagctacggcaatgccgggtccttaacccactgcacccgtgactccacag

SEQ ID NO: 266 - DNA, 110 bp, synthetic construct
  source 1..110: mol_type = other DNA
agccacagctacggcaatgccgggtccttaacccactgcacccgtgactccacagagccaaactggatcattaacccactagccacagtgggaactccccaaagaatttt

SEQ ID NO: 267 - DNA, 110 bp, synthetic construct
  source 1..110: mol_type = other DNA
tgggcagggatagtgggcgggcgggctgctcagatctctgtttagggagaccctgcccggctggccagctgggattaacacatcgaaagaaagaactggggcccagcact

SEQ ID NO: 268 - DNA, 110 bp, synthetic construct
  source 1..110: mol_type = other DNA
cccggctggccagctgggattaacacatcgaaagaaagaactggggcccagcactcgcacctctgctgggattcgtggatttaccccacctttctggggctcctttgcga

SEQ ID NO: 269 - DNA, 110 bp, synthetic construct
  source 1..110: mol_type = other DNA
tgtaatagtttgcatccactaactccaagctctcagtccctcctgtttaactcaacaacaacaacaacaaaaacaaacaacatgactgagcaatggacagacgacccaaa

SEQ ID NO: 270 - DNA, 110 bp, synthetic construct
  source 1..110: mol_type = other DNA
caacaacaacaacaaaaacaaacaacatgactgagcaatggacagacgacccaaatagacacttatccaaagaagacctttggatggccagtgggcacgtgaaaaatgct

SEQ ID NO: 271 - DNA, 110 bp, synthetic construct
  source 1..110: mol_type = other DNA
attgccgtatttatcttagtcctggctaaggagagccagcaggataggtttggggctgaaagactctgacttgaaacaatacgatacagttcgaaatatgggactagccc

SEQ ID NO: 272 - DNA, 110 bp, synthetic construct
  source 1..110: mol_type = other DNA
ctgaaagactctgacttgaaacaatacgatacagttcgaaatatgggactagcccagcagggattctcccagctgcttgcagacaccgggcgcatccctgcgggccagag

SEQ ID NO: 273 - DNA, 110 bp, synthetic construct
  source 1..110: mol_type = other DNA
tcctgaggccaccaggttaggaattggggacctggattcaaggtgtccctgaagaataaagaccagttggtccttattgcccgaaaaaggacttttttattttcaccagc

SEQ ID NO: 274 - DNA, 110 bp, synthetic construct
  source 1..110: mol_type = other DNA
ataaagaccagttggtccttattgcccgaaaaaggacttttttattttcaccagctcctgaaaaaatgttttaatcgtttcgctgaggcctgcgaggtagtggccctcgt

SEQ ID NO: 275 - DNA, 110 bp, synthetic construct
  source 1..110: mol_type = other DNA
ttttatgtcttggttctctgtgagataatttgcatgttggaaattttcatgtgagaaaaacacaactcaaacccgtcaaaacgtggagaggctgtgcctgaaaggtgtct

SEQ ID NO: 276 - DNA, 110 bp, synthetic construct
  source 1..110: mol_type = other DNA
aaaaacacaactcaaacccgtcaaaacgtggagaggctgtgcctgaaaggtgtctgtgccttttcttctcccagtggggatgatgcttctttttttgaaggtcaagggag

SEQ ID NO: 277 - DNA, 110 bp, synthetic construct
  source 1..110: mol_type = other DNA
gtcatgagaaactacagccgcccctcctgcagacaccagaatccatggaggctcgggtccctcccataaaggacacagcgcggtcagccctccgagtccgggctccgcgt

SEQ ID NO: 278 - DNA, 110 bp, synthetic construct
  source 1..110: mol_type = other DNA
ggtccctcccataaaggacacagcgcggtcagccctccgagtccgggctccgcgtccacggcctacacttggatccatggttggctgacgctgcagatgaggagcccgag

SEQ ID NO: 279 - DNA, 110 bp, synthetic construct
  source 1..110: mol_type = other DNA
cccctgccatcccacccccacagaagaagaggcgtggtctaaaaaccatcccttctttccttctgctaacagctccctcactttgccctttttccttaatcgcttccatt

SEQ ID NO: 280 - DNA, 110 bp, synthetic construct
  source 1..110: mol_type = other DNA
tttccttctgctaacagctccctcactttgccctttttccttaatcgcttccattttcgcacagcctctccgagcagcttccattcctagaaggaatgctggccaattca

SEQ ID NO: 281 - DNA, 110 bp, synthetic construct
  source 1..110: mol_type = other DNA
cagactctgacgcgtaaggaaggagtgagtcctgactccacgtattctgaacagagctctcacagactcactttcctcacctgaaaaatgtacatctatttcacaagttc

SEQ ID NO: 282 - DNA, 110 bp, synthetic construct
  source 1..110: mol_type = other DNA
gctctcacagactcactttcctcacctgaaaaatgtacatctatttcacaagttcactgtaatcgtgccgtaaaacgtgttatcctccttgaatgatggcactcagtctg

SEQ ID NO: 283 - DNA, 110 bp, synthetic construct
  source 1..110: mol_type = other DNA
aggaccgtgcctagcacataagcaagcatgctgcatacagcagctactacaattctcatgacacctctccttcatcacgatacgtagcaaatctgctttaaaactgtagg

SEQ ID NO: 284 - DNA, 110 bp, synthetic construct
  source 1..110: mol_type = other DNA
tcatgacacctctccttcatcacgatacgtagcaaatctgctttaaaactgtaggtgagggagttccctcatggcgcagtgggttaaggatccagtgtcgtcactgtagc

SEQ ID NO: 285 - DNA, 110 bp, synthetic construct
  source 1..110: mol_type = other DNA
aaacaggaagaggaaaaacaaaccattacaatttgttacacctcctaatctaaggaaaatgtcaagtttttgctgcagagaagaggcgcgacagaaggagagctggaaga

SEQ ID NO: 286 - DNA, 110 bp, synthetic construct
  source 1..110: mol_type = other DNA
aaaatgtcaagtttttgctgcagagaagaggcgcgacagaaggagagctggaagatgacgaggaagccgaagaaataaatttcaactgggagaaaaggatttcgagagga

SEQ ID NO: 287 - DNA, 110 bp, synthetic construct
  source 1..110: mol_type = other DNA
catccagtgttgctaataggactgttgtggccgctgccgttccttcttcccaggggtagtttgcaaggcagtggtttaaagtggtcacttgatccttggatcccttccac

SEQ ID NO: 288 - DNA, 110 bp, synthetic construct
  source 1..110: mol_type = other DNA
gtagtttgcaaggcagtggtttaaagtggtcacttgatccttggatcccttccaccggcatacctttgggcaagtgagttgcaatttcccgatctataaaatggtaatac

SEQ ID NO: 289 - DNA, 110 bp, synthetic construct
  source 1..110: mol_type = other DNA
gctcagctctccccccaccttctgggtgagactttgggcgctgcgcacagctgagtgtgcctcctgatttgacctgacctggcctcatgtggtccttccatgagacgccc

SEQ ID NO: 290 - DNA, 110 bp, synthetic construct
  source 1..110: mol_type = other DNA
tggagaagaggttagagggaagctgcacctgccctgaagaaagggatgcgttgtaaatctgacacaagcttgtgaatccatcccaggtccaactcaccaagcaaacataa

SEQ ID NO: 291 - DNA, 110 bp, synthetic construct
  source 1..110: mol_type = other DNA
aatctgacacaagcttgtgaatccatcccaggtccaactcaccaagcaaacataagtataagcgtgcacttcctcatttggcgagtcctcaccagatctaaaaaggatgg

SEQ ID NO: 292 - DNA, 110 bp, synthetic construct; identical to SEQ ID NO: 290
  source 1..110: mol_type = other DNA

SEQ ID NO: 293 - DNA, 110 bp, synthetic construct; identical to SEQ ID NO: 291
  source 1..110: mol_type = other DNA

SEQ ID NO: 294 - DNA, 110 bp, synthetic construct
  source 1..110: mol_type = other DNA
ctccccagcaacttcctgttcttcgcatgtctcactggcttgagacgtcaaaatacagggccacatctgtggcctatggatgttcccaggccaggggtcaaatcatagct

SEQ ID NO: 295 - DNA, 110 bp, synthetic construct
  source 1..110: mol_type = other DNA
caggagagggcatgagttcgggcgaggttaggcattcaaacggcagggtatggagttgtccgcctctcaaggcaaggaaattccaccgctgcctcattctgtccctcttt

SEQ ID NO: 296 - DNA, 110 bp, synthetic construct
  source 1..110: mol_type = other DNA
gatcaaacccacatcctcacagagacgacctcaggctctcaacccactgagccacaataggaactcctaatcttggcctttaaataccgttctctgccaaaggaagagca

SEQ ID NO: 297 - DNA, 110 bp, synthetic construct
  source 1..110: mol_type = other DNA
aataggaactcctaatcttggcctttaaataccgttctctgccaaaggaagagcagctccttagagaaatagccagttccagcacgagggcatgggacacacaggtgacc

SEQ ID NO: 298 - DNA, 110 bp, synthetic construct
  source 1..110: mol_type = other DNA
cttgtccccctcccactatatctttgataaacccaaacccaaacctctgagcttagtattaaatgtaggtagaatatcttcttggatgatactaagctgtcagtctggat

SEQ ID NO: 299 - DNA, 110 bp, synthetic construct
  source 1..110: mol_type = other DNA
gtattaaatgtaggtagaatatcttcttggatgatactaagctgtcagtctggattaaaacttgcaaatgtgttaaagattaataaggacatggaattcctgccatggct

SEQ ID NO: 300 - DNA, 110 bp, synthetic construct
  source 1..110: mol_type = other DNA
aatcccttcacccatattcgaggaaagaacagcaaagttacagaaaatggcacatggccctgtggggaccagctcagtccctctcactgggagaaatttagagagtccca

SEQ ID NO: 301 - DNA, 110 bp, synthetic construct
  source 1..110: mol_type = other DNA
atgacacttgacaatttctagagacccaaagctacactgaaaaatgctggcatgaaactgaaattttccaggtagaatacttggctattggcaagcggcttatgctcttc

SEQ ID NO: 302 - DNA, 110 bp, synthetic construct
  source 1..110: mol_type = other DNA
aactgaaattttccaggtagaatacttggctattggcaagcggcttatgctcttcatcacaatgcacttgccaatgaatgtgctcgcaccccccaagcattttaatgaca

SEQ ID NO: 303 - DNA, 110 bp, synthetic construct
  source 1..110: mol_type = other DNA
ctccagggtgagacgcccaacagctcatcagtctgcgtgggcttggaaacgccaccggtgaagcgcgcagcgaagtgcggggaaaacgctcaggggcaagaagctcccgt

SEQ ID NO: 304 - DNA, 110 bp, synthetic construct
  source 1..110: mol_type = other DNA
ctcaccgcctgcagcagtgggtccctgctgacctttgaaccccagccagcacagcctcctccaggccccaggcctctgagcatgcccgcctcactgacctccaaactcaa

SEQ ID NO: 305 - DNA, 110 bp, synthetic construct
  source 1..110: mol_type = other DNA
ctcctccaggccccaggcctctgagcatgcccgcctcactgacctccaaactcaagtgtctgtgatgacacaccaccgccccagcaacagctgagggatcgggaatgacc

SEQ ID NO: 306 - DNA, 110 bp, synthetic construct
  source 1..110: mol_type = other DNA
ccagtgaagatactctgttttcagtcaaaaccgagatcattctaaatgtcaccactccgcccccatctgggctcctaaaagcaagctgctttgtctctaaatcagatgtc

SEQ ID NO: 307 - DNA, 110 bp, synthetic construct
  source 1..110: mol_type = other DNA
gccctaaaaaggggagggggagaaaagagtgcagcattagagatcaatgccaaatatgcttctttccatctagttttcaggagcatttctggaatcaatagcctggtata

SEQ ID NO: 308 - DNA, 110 bp, synthetic construct
  source 1..110: mol_type = other DNA
atgcttctttccatctagttttcaggagcatttctggaatcaatagcctggtatacttcacttaaaaccataccaaaggtactttgctggtacttctggccctaagctca

SEQ ID NO: 309 - DNA, 110 bp, synthetic construct
  source 1..110: mol_type = other DNA
ccccgctgcccaccagaaccatcttgggcacaacaagctagcccttttctaacataactgagtgagggcttgtgtgcccgcagtgcagaacgccaagctctgataacagg

SEQ ID NO: 310 - DNA, 110 bp, synthetic construct
  source 1..110: mol_type = other DNA
agtcacactgatgataccagcaagctaatgtcctgtcttttaggatatgcatggtacatgctaaaaatcctataaggtcctggagagctttcatttaattattcattaaa

SEQ ID NO: 311 - DNA, 110 bp, synthetic construct
  source 1..110: mol_type = other DNA
accagcaagctaatgtcctgtcttttaggatatgcatggtacatgctaaaaatcctataaggtcctggagagctttcatttaattattcattaaagaagcatttattttc

SEQ ID NO: 312 - DNA, 110 bp, synthetic construct
  source 1..110: mol_type = other DNA
tctctggggctgctgccctgtggattaaatggccttctcttcatgcacattgtagtgtattctacaacccactctcaacccagctgatgagatgaagaggcgtggacctg

SEQ ID NO: 313 - DNA, 110 bp, synthetic construct
  source 1..110: mol_type = other DNA
tgtattctacaacccactctcaacccagctgatgagatgaagaggcgtggacctgcccgtcacttgcaatatataacctttactacaggtggttgtcagagtaaaacctc

SEQ ID NO: 314 - DNA, 110 bp, synthetic construct
  source 1..110: mol_type = other DNA
ttggattaacattttatttgttggcccagttcctcctttgtagggaaataaccataatagtagctacagtttatagcccttgtgatgtgccaggtacgcctttagcgctt

SEQ ID NO: 315 - DNA, 110 bp, synthetic construct
  source 1..110: mol_type = other DNA
aactctcttgaattatttttgtatgtgggttctttctcactctttttatcagcccctttccgcacagaccagggtgggaggataaggctgaccagtttctagcttcttct

SEQ ID NO: 316 - DNA, 110 bp, synthetic construct
  source 1..110: mol_type = other DNA
ctttccgcacagaccagggtgggaggataaggctgaccagtttctagcttcttctgtcttcctcttaaaacacccttctctgtacttggttcctctgtcttccttccctt

SEQ ID NO: 317 - DNA, 110 bp, synthetic construct
  source 1..110: mol_type = other DNA
cccccagcccagacactcatactgcttcctcctctgctcccaggaccccacagagccaccagagagggtgccagaccctgggacgcccagtccttctctgatcctggggg

SEQ ID NO: 318 - DNA, 110 bp, synthetic construct
  source 1..110: mol_type = other DNA
ccaccagagagggtgccagaccctgggacgcccagtccttctctgatcctgggggacgcagtccttctgtttctgttcattcccaagagggaacaggtgttaatcttgcc

SEQ ID NO: 319 - DNA, 110 bp, synthetic construct
  source 1..110: mol_type = other DNA
gagaaaccctgcaggaaggaaacctccctttccttaactgtttttccacacttgtttgggtagaactttcctccaccccagctcccatgacacctgtgaacacctggagg

SEQ ID NO: 320 - DNA, 110 bp, synthetic construct
  source 1..110: mol_type = other DNA
cgtttgtttaaatacagaggccaaaagagccaagtatcataacacaggctgaaacatttttaagaaacgtttttcttggagtgtagctgactcacaactttgggttagtg

SEQ ID NO: 321 - DNA, 110 bp, synthetic construct
  source 1..110: mol_type = other DNA
atttttaagaaacgtttttcttggagtgtagctgactcacaactttgggttagtgtcaggtgtacagcagagtggatccgccacacacatgcacacatccattccttttc

SEQ ID NO: 322 - DNA, 110 bp, synthetic construct
  source 1..110: mol_type = other DNA
cgtggtctggcagccacaggcatttaatgggaccttccagtctagggctttacgtactttcgattcccttcattctcacagcaaacataaaagccaaatattattatgga

SEQ ID NO: 323 - DNA, 110 bp, synthetic construct
  source 1..110: mol_type = other DNA
gtttagacgtttccagttgtaattaaggtttttcagggatgaacttctcagtattttccaacaaggctcatttgataactgcattcctccaaaattcttccagaattcta

SEQ ID NO: 324 - DNA, 110 bp, synthetic construct
  source 1..110: mol_type = other DNA
ttccaacaaggctcatttgataactgcattcctccaaaattcttccagaattctaaatattgttgagccagcttttcttttcctttaattcccacttgtgtcaagtctga

SEQ ID NO: 325 - DNA, 110 bp, synthetic construct
  source 1..110: mol_type = other DNA
tttcttaggaaaccacagcttcattaaaaatacatgtgattcctactgagagctaacatttcccagatgaagagctccgtgaaagcaggttagcgcccctctgcatccct

SEQ ID NO: 326 - DNA, 110 bp, synthetic construct
  source 1..110: mol_type = other DNA
acatttcccagatgaagagctccgtgaaagcaggttagcgcccctctgcatccctgagaggctggaaggagaggtggcggtggtcctgatccccgggcctggtctgcaga

SEQ ID NO: 327 - DNA, 110 bp, synthetic construct
  source 1..110: mol_type = other DNA
caacaagggattctgtttcaaaacaaacagcaagtggcaaagctaacatccaactcgcaagcccaaagggtacgctgccttttccctcacggtgttttctgagatgtttt

SEQ ID NO: 328 - DNA, 110 bp, synthetic construct
  source 1..110: mol_type = other DNA
agatgagcgcagaggccctgggatgtgcacacacagaggaaagaccatgtgaccttgagaaggtggccgtctgcaagccaggaagagaggcctcaggagaaaccaaacct

SEQ ID NO: 329 - DNA, 110 bp, synthetic construct
  source 1..110: mol_type = other DNA
ccctgggatgtgcacacacagaggaaagaccatgtgaccttgagaaggtggccgtctgcaagccaggaagagaggcctcaggagaaaccaaacctgctgacaccttgatc

SEQ ID NO: 330 - DNA, 110 bp, synthetic construct
  source 1..110: mol_type = other DNA
gcccacggtaagacgagagttgagtgtttggcgttacagactccgggaaaagaaaacgctgccgttcggcggtaggaagaatacttgcatgtgtgcttgcatcgtctgac

SEQ ID NO: 331 - DNA, 110 bp, synthetic construct
  source 1..110: mol_type = other DNA
acgctgccgttcggcggtaggaagaatacttgcatgtgtgcttgcatcgtctgactttccgtctgggcggtgaagatgcggtgcaggcggcgtggtgaactgatgtgcag

SEQ ID NO: 332 - DNA, 110 bp, synthetic construct
  source 1..110: mol_type = other DNA
ttctctattagccctgttctggggtgattccttttttctttttatagcccaacatgaatcgctgaacaggagggagagcaatctggttttattttggtgttggatttgtc

SEQ ID NO: 333 - DNA, 110 bp, synthetic construct
  source 1..110: mol_type = other DNA
gctccgagtgggagaagaggggagctgtacaaagtaagcttcgattctggggcaaattgtggtccatgaggagtacatggtcttggaggaggacacttgtctctttggcc

SEQ ID NO: 334 - DNA, 110 bp, synthetic construct
  source 1..110: mol_type = other DNA
acaggaactcctgcatcactttaaaatcaaaagtgactgcatacacatactgcacagagaatttgattaagtatagagctagtcccgtataaatgaagtaacagtttgcg

SEQ ID NO: 335 - DNA, 110 bp, synthetic construct; identical to SEQ ID NO: 334
  source 1..110: mol_type = other DNA

SEQ ID NO: 336 - DNA, 110 bp, synthetic construct
  source 1..110: mol_type = other DNA
cctatcgatggcctcatacggtttagagctgtctgactttctggagagactgtgagtggaatgttgatttgcccccattgctggagactgtctaaattggatggttagca

SEQ ID NO: 337 - DNA, 110 bp, synthetic construct
  source 1..110: mol_type = other DNA
gagtgtttctgtgatacaggaacactggggagaccatggacgcttgcagcctctgcacctagtcttaaaggagaagcagccttcaggaagtgaaggccggttggaggggc

SEQ ID NO: 338 - DNA, 110 bp, synthetic construct
  source 1..110: mol_type = other DNA
cacctagtcttaaaggagaagcagccttcaggaagtgaaggccggttggaggggcgcagaggagggagggctgggtctggacggggcgggggcggaggcgggtgagtgag

SEQ ID NO: 339 - DNA, 110 bp, synthetic construct
  source 1..110: mol_type = other DNA
ctcggcctcgttccttggggcccctctgtgattgcccagctgcttgaggggtgagcccgggacagggatttatttcatcctaatagggtgagtttatatttttaaaaaac

SEQ ID NO: 340 - DNA, 110 bp, synthetic construct
  source 1..110: mol_type = other DNA
cccgggacagggatttatttcatcctaatagggtgagtttatatttttaaaaaacagatgggggcttaacagtttttactcttttttattggaaaatgcgatgtcagttg

SEQ ID NO: 341 - DNA, 110 bp, synthetic construct
  source 1..110: mol_type = other DNA
tacaaagaattcccacgtgccctgtaccagctttcccggatgaacgcagtccaggtgtggaatccggctgctctcctgattccgcgctgttagcagtgcggaggccatgt

SEQ ID NO: 342 - DNA, 110 bp, synthetic construct
  source 1..110: mol_type = other DNA
tgtggaatccggctgctctcctgattccgcgctgttagcagtgcggaggccatgttcccatttcattacttgtccactgatgctcttcttcggccccaggttctgcccag

SEQ ID NO: 343 - DNA, 110 bp, synthetic construct
  source 1..110: mol_type = other DNA
gaaggccatctctgcacacgccctctgccctttccccccagacctgccctaggcccatcccggtacccgggtccttcctggcgcctcctgcagctttactgatgacaatg

SEQ ID NO: 344 - DNA, 110 bp, synthetic construct
  source 1..110: mol_type = other DNA
catcccggtacccgggtccttcctggcgcctcctgcagctttactgatgacaatgacgccactggcccaggtcttatccccacaggccagaaacaagttcaactgtccca

SEQ ID NO: 345 - DNA, 110 bp, synthetic construct
  source 1..110: mol_type = other DNA
gaactctatccaatccctttcgacagaacatgatggaggataatatgagatcgcgctgctgtacagcagacattgacggaacgttgtaaatcaactacactttaaaattg

SEQ ID NO: 346 - DNA, 110 bp, synthetic construct
  source 1..110: mol_type = other DNA
ctgctgtacagcagacattgacggaacgttgtaaatcaactacactttaaaattgttgtacagtctgcttgtggagagaaagagaggggcataaataatgatagaatatg

SEQ ID NO: 347 - DNA, 110 bp, synthetic construct
  source 1..110: mol_type = other DNA
cgctctctgcaaagccacacagagcaaggctggatgtcacccacagtcaggatcaacatcgggcctgtggcactgccctgcgtggggaacacgactctgggcctgcaggg

SEQ ID NO: 348 - DNA, 110 bp, synthetic construct
  source 1..110: mol_type = other DNA
gtcacccacagtcaggatcaacatcgggcctgtggcactgccctgcgtggggaacacgactctgggcctgcagggctccctctgcccctcggcaccacggccggctggcc

SEQ ID NO: 349 - DNA, 110 bp, synthetic construct
  source 1..110: mol_type = other DNA
gcggggcagaagctcagtgaaggaaaggaaaaccctggaaggggatgagacactcatcttcaaacgtccgtgagctctcagggagacaaagaacaaactcaacatgggga

SEQ ID NO: 350 - DNA, 110 bp, synthetic construct
  source 1..110: mol_type = other DNA
atcttcaaacgtccgtgagctctcagggagacaaagaacaaactcaacatggggagactggagacgggacaagaaaaagagggggacgactgtgacaacagctgccgttt

SEQ ID NO: 351 - DNA, 110 bp, synthetic construct
  source 1..110: mol_type = other DNA
cactgctgctcaccaggggcccccttcacagcacagagctgcagccacgggcccggggtcacacagggcactgtctcaccacagtccccccatcctgggcagctgctctg

SEQ ID NO: 352 - DNA, 110 bp, synthetic construct
  source 1..110: mol_type = other DNA
gggtcacacagggcactgtctcaccacagtccccccatcctgggcagctgctctgatgggatggtggaatggcctttaggagactccgttcagcaccagctggggggcga

SEQ ID NO: 353 - DNA, 110 bp, synthetic construct
  source 1..110: mol_type = other DNA
caaccctgagtattctcagatcccatggtctcccctccaaagaatgcagagccaatatgtcctgatttttaataaactacagatcctttttagtatcattcataactcaa

SEQ ID NO: 354 - DNA, 110 bp, synthetic construct
  source 1..110: mol_type = other DNA
tatgtcctgatttttaataaactacagatcctttttagtatcattcataactcaacgtgtaggccgtgccctattaaatccctccaaacctcttctttggaccccctgta

SEQ ID NO: 355 - DNA, 110 bp, synthetic construct
  source 1..110: mol_type = other DNA
ctcatccagaaatcctctctcagggataatgattaatccaagcacccctgccaagctgacacataaaactaaccatcataggtggctactactattacagtcaatttgaa

SEQ ID NO: 356 - DNA, 110 bp, synthetic construct
  source 1..110: mol_type = other DNA
ctgacacataaaactaaccatcataggtggctactactattacagtcaatttgaagttatcaaggtttagagaggttgagtatctgctcgtaattccacagcaaggaaca

SEQ ID NO: 357 - DNA, 110 bp, synthetic construct
  source 1..110: mol_type = other DNA
ggctgagggggcaaggagccgcggacctggggagctcccttcaccgcttctagaagaagacggagtgaagcctggaacatgtcacagcacaaagaggcctagaggagacc

SEQ ID NO: 358 - DNA, 110 bp, synthetic construct
  source 1..110: mol_type = other DNA
cacctttaacttgctcagagaaagaaactggcactgggtcagggggccaggataggagatgggggcttcttatccacagcaccgcaggcccttcttctacttttggcttt

SEQ ID NO: 359 - DNA, 110 bp, synthetic construct
  source 1..110: mol_type = other DNA
gagatgggggcttcttatccacagcaccgcaggcccttcttctacttttggctttttgccattctttgtgacaaactttaggatctttttttttttagtttactgttttt

SEQ ID NO: 360 - DNA, 110 bp, synthetic construct
  source 1..110: mol_type = other DNA
gaacagcgtgtgcaaaggtaggaaagccttgtgagcttaggagacctcaccagtccactacggcgagtgtgcaggcgagaggggtgcagagagaagccaggaaggtatga

SEQ ID NO: 361 - DNA, 110 bp, synthetic construct
  source 1..110: mol_type = other DNA
cactacggcgagtgtgcaggcgagaggggtgcagagagaagccaggaaggtatgaggatgcactggacaccatcctaaagcccagtcaattgagagtaatgagcatgaag

SEQ ID NO: 362 - DNA, 110 bp, synthetic construct
  source 1..110: mol_type = other DNA
aaaaaagatgcgtacaagagcttaattttaacttttgaaaaactctgcacctggacagctcacttccatctttctcgaggcttactccctcatctggactcggggaggag

SEQ ID NO: 363 - DNA, 110 bp, synthetic construct
  source 1..110: mol_type = other DNA
cagctcacttccatctttctcgaggcttactccctcatctggactcggggaggaggtggttggcaggctcgggagaggccagaggcagccctcagtgagcccagcaaaac

SEQ ID NO: 364 - DNA, 110 bp, synthetic construct
  source 1..110: mol_type = other DNA
ccgaaataaacctattctcaataaccaggagaaaaggattgcccacctaacagaagcgacattttaggtccacctgggcccagaaacccggttatgcaggtgaggacaag

SEQ ID NO: 365 - DNA, 110 bp, synthetic construct
  source 1..110: mol_type = other DNA
gcgacattttaggtccacctgggcccagaaacccggttatgcaggtgaggacaagagctaaataccactcagcaatcaggagaaggctcccttttgctgcagtaacaaat

SEQ ID NO: 366 - DNA, 110 bp, synthetic construct
  source 1..110: mol_type = other DNA
aggtggcaggtgttatgttctctaagagataaccacagcaaagaggagctaagtacttgtcccaagtcacacagaaaggcactcggctctaacccaagagtctggcttaa

SEQ ID NO: 367 - DNA, 110 bp, synthetic construct
  source 1..110: mol_type = other DNA
gcaggggaacagcactctcttcaggggggatccacagcaaccggccgcctgggactgggtgccaatcagcctgccaaagatcccaaagaccggagcacttactgtgagac

SEQ ID NO: 368 - DNA, 110 bp, synthetic construct
  source 1..110: mol_type = other DNA
catcttcaaatatcatcacactgggggttaggtcttcaacctaagaatttgaggaaggagtgaccattgtggcacagcaaaacgaacctgactagtacccatgtggatgc

SEQ ID NO: 369 - DNA, 110 bp, synthetic construct
  source 1..110: mol_type = other DNA
tcacactgggggttaggtcttcaacctaagaatttgaggaaggagtgaccattgtggcacagcaaaacgaacctgactagtacccatgtggatgcaggttctatccctgg

SEQ ID NO: 370 - DNA, 110 bp, synthetic construct
  source 1..110: mol_type = other DNA
acctctgacgggtgaccaggatgctaagggctctcgaggctgtatgataatgttagctttataaagagctgtggaagaaaagaggaacgtttaacctgaaaagaaacagg

SEQ ID NO: 371 - DNA, 110 bp, synthetic construct
  source 1..110: mol_type = other DNA
tcctagtcagattcatttcccgctgcaccatgaactcctactgtattgtgtttctttcaagtacagtttataagtgaagctaacaaagtatttatttcaatcactaaaag

SEQ ID NO: 372 - DNA, 110 bp, synthetic construct
  source 1..110: mol_type = other DNA
ctttgatgtcggagtctgggtttcagtcttctttgttttttcgtcatcatttggacactcccagtcaatcagcttgtctccaatttcagcctctgttagaggacctcaga

SEQ ID NO: 373 - DNA, 110 bp, synthetic construct
  source 1..110: mol_type = other DNA
cactcccagtcaatcagcttgtctccaatttcagcctctgttagaggacctcagatgcctgtgacctagagcctaaggacacagcagggatgcagaagtttggacatttc

SEQ ID NO: 374 - DNA, 110 bp, synthetic construct
  source 1..110: mol_type = other DNA
tggagggtaatctgtggcacttgtcacctcattgatccctaagcacattacagttgattttggttggtctgcctggctagctgtgtctccatctttatagagagagcagg

SEQ ID NO: 375 - DNA, 110 bp, synthetic construct
  source 1..110: mol_type = other DNA
gattttggttggtctgcctggctagctgtgtctccatctttatagagagagcagggagcaccctctgtgtgtgtctttgccagttctccctgtagggctcttcagcaaac

SEQ ID NO: 376 - DNA, 110 bp, synthetic construct
  source 1..110: mol_type = other DNA
ccagtgttcattgcagctctatttacaatagccaaggcatggaagctaatgtccatggataaagaagacacagtacatatacacaatgggatgttactcagtcctaaaaa

SEQ ID NO: 377 - DNA, 110 bp, synthetic construct; identical to SEQ ID NO: 376
  source 1..110: mol_type = other DNA

SEQ ID NO: 378 - DNA, 110 bp, synthetic construct
  source 1..110: mol_type = other DNA
agccctagaaagaaacataaaggaaaaggaaaagagaaaaggaaacctctagctattgagggaaccatgacagtcttgcccctgagagtggaaggcgtctttatcctggg

SEQ ID NO: 379 - DNA, 110 bp, synthetic construct
  source 1..110: mol_type = other DNA
ttgagggaaccatgacagtcttgcccctgagagtggaaggcgtctttatcctgggagatttccacaggaccctgaggccgtgacagacacaggaggccaccctcagggac

SEQ ID NO: 380 - DNA, 110 bp, synthetic construct
  source 1..110: mol_type = other DNA
cggggcagaagtgggcacagatgcaggaacagaattaagcaccagcatctgtgctttggaatgctcccatgaaccgggcctccggaaggagctgccctctgccccatagc

SEQ ID NO: 381 - DNA, 110 bp, synthetic construct
  source 1..110: mol_type = other DNA
ttggaatgctcccatgaaccgggcctccggaaggagctgccctctgccccatagctaatatgctcagtgaatccttgtgcccggagtcattttctgatccaagaagcctt

SEQ ID NO: 382 - DNA, 110 bp, synthetic construct
  source 1..110: mol_type = other DNA
gtgagccagtgggatctgtcatttgagcagatgtggactacagggaaaatgtaggagtttagatgatgccgtgactttggccagagcttctggagggttggaatcgccat

SEQ ID NO: 383 - DNA, 110 bp, synthetic construct
  source 1..110: mol_type = other DNA
agtttagatgatgccgtgactttggccagagcttctggagggttggaatcgccatctgagataaggacagctgtggaaggaccaggtggctgggcaggtgggtggtccgg

SEQ ID NO: 384 - DNA, 110 bp, synthetic construct
  source 1..110: mol_type = other DNA
gcttctaaggatgccagtaaaatccacgtggctgtaacaaaaccggctctgtgctgggaacaggaccaggtgctctccctttgtcagctgtcgggtcctgaggtccttgc

SEQ ID NO: 385 - DNA, 110 bp, synthetic construct
  source 1..110: mol_type = other DNA
gggaacaggaccaggtgctctccctttgtcagctgtcgggtcctgaggtccttgcaaggtcggggctaccacggccatttaccaggaaaccaaggctcacggaggatacg

SEQ ID NO: 386 - DNA, 110 bp, synthetic construct
  source 1..110: mol_type = other DNA
ccacggggtcatgttttagcagttgggagggttactcatcttaaaagcaaagaaccgggcctttgctttttcttggttttctcaagactggatggcttttgtcagcttac

SEQ ID NO: 387 - DNA, 110 bp, synthetic construct
  source 1..110: mol_type = other DNA
cgggcctttgctttttcttggttttctcaagactggatggcttttgtcagcttacttttccacagaagaaacccacacaggcaggactgccgacagggcacccgggccca

SEQ ID NO: 388 - DNA, 110 bp, synthetic construct
  source 1..110: mol_type = other DNA
cttctggagggagacttaatccagggatatacagcaacaatgaatgggaacttgttttgtgaaagctgaggttattgtgtttttgtttgtttgtaactcatctgcatgac

SEQ ID NO: 389 - DNA, 110 bp, synthetic construct
  source 1..110: mol_type = other DNA
cagatcccgagccacatctgtcacctacaccacagcttgcggcaatgctagatccttaaccactgaagatatgtggcaactatagagcaagtctgctggtgccacttttc

SEQ ID NO: 390 - DNA, 110 bp, synthetic construct
  source 1..110: mol_type = other DNA
cttgcggcaatgctagatccttaaccactgaagatatgtggcaactatagagcaagtctgctggtgccacttttccaacagcatctgctcactttgtgtctctgtcatat

SEQ ID NO: 391 - DNA, 110 bp, synthetic construct
  source 1..110: mol_type = other DNA
gctctgcgctggctcagtttgccacatttctagaaactgagttttacatcttttgtccttctagacgtcacagttgaagattttaagctggagagggacacgatcaaact

SEQ ID NO: 392 - DNA, 110 bp, synthetic construct
  source 1..110: mol_type = other DNA
ttggctcggctgcagctgtgggctggagcacctgcacatggattttttggtttttagggctgcacccctggcatatggaagtccccgggctaggggccgaattggagctg

SEQ ID NO: 393 - DNA, 110 bp, synthetic construct; identical to SEQ ID NO: 392
  source 1..110: mol_type = other DNA

SEQ ID NO: 394 - DNA, 110 bp, synthetic construct
  source 1..110: mol_type = other DNA
tttcaagagacaccttaaggcactgcaaaggagaacttagctttttcggattctgagccacagaaaactgaaggatttctttagtttttctggtttgcttctagtagtga

SEQ ID NO: 395 - DNA, 110 bp, synthetic construct
  source 1..110: mol_type = other DNA
tactcacaaacagcttaggtacacattagtcccagctcttcctttgcagatgaggcaaacgaggaccccagcggcagagtgacttgctaataggtaactggtgggaccca

SEQ ID NO: 396 - DNA, 110 bp, synthetic construct
  source 1..110: mol_type = other DNA
caaacgaggaccccagcggcagagtgacttgctaataggtaactggtgggacccaggactggggttcttgccagttgctcagagggtatacactgacctggcggatcttg

SEQ ID NO: 397 - DNA, 110 bp, synthetic construct
  source 1..110: mol_type = other DNA
tcttacttgtccacctgctgctgactttcacgcccacctgagtttccctctgctctaagtccgtggtttatgaactttcacacaggggctgggaagctgcctctggttcc

SEQ ID NO: 398 - DNA, 110 bp, synthetic construct
  source 1..110: mol_type = other DNA
taagtccgtggtttatgaactttcacacaggggctgggaagctgcctctggttccagctgctagagtcttgctgtgtgaccacagacagtccctgctccctctgaatctg

SEQ ID NO: 399 - DNA, 110 bp, synthetic construct
  source 1..110: mol_type = other DNA
caaatgattaaatacagatgcatatacgagggctcgcgggggtctgtctgaccgtccccaggcctcttcctccagttaaaagattcactaagtcactttgtcttaaatgt

SEQ ID NO: 400 - DNA, 110 bp, synthetic construct
  source 1..110: mol_type = other DNA
ccccaggcctcttcctccagttaaaagattcactaagtcactttgtcttaaatgtctgtcttcaaggatgaaactgagtgaggctcaggcaggcagagtttcagcgggta

SEQ ID NO: 401 - DNA, 110 bp, synthetic construct
  source 1..110: mol_type = other DNA
ccaggtaagatttcctgccaggcaagtggacaatcactgcttttcttagagtgttttcagacaaatcctaatgtaattaataccttttgtgggcttccggtttttcttta

SEQ ID NO: 402 - DNA, 110 bp, synthetic construct
  source 1..110: mol_type = other DNA
actgcttttcttagagtgttttcagacaaatcctaatgtaattaataccttttgtgggcttccggtttttctttacaaatttgcttttgtgattttaggtactgaaaagc

SEQ ID NO: 403 - DNA, 110 bp, synthetic construct
  source 1..110: mol_type = other DNA
gaagattccttaagcagatggtcctggcctcctgaaggcaactcgcctcctgcctgtccacactgaagggtgtaaaacatgcggatcgggctgcagagctctagtttcag

SEQ ID NO: 404 - DNA, 110 bp, synthetic construct
  source 1..110: mol_type = other DNA
gtccacactgaagggtgtaaaacatgcggatcgggctgcagagctctagtttcagccctccaacgcagtgtggcctctgcaacagtttttggttgttctttcatccgttt

SEQ ID NO: 405 - DNA, 110 bp, synthetic construct
  source 1..110: mol_type = other DNA
tgttgaagacaagttctgttgagagttatgaggccggagaacatctgacccctttcactatcttccttccatcaagaaaggatgatggggaagctccagaccagcaatca

SEQ ID NO: 406 - DNA, 110 bp, synthetic construct
  source 1..110: mol_type = other DNA
cactatcttccttccatcaagaaaggatgatggggaagctccagaccagcaatcagaagacacatgttctcaccctgcctttgcctttaggtctctatgttactttgctg

SEQ ID NO: 407 - DNA, 110 bp, synthetic construct
  source 1..110: mol_type = other DNA
ttggcacacggtgggtgcaacatcgagctgcaattcctgtctctcctgctcaagggcacgctgggaaggaggtggtgtgtgcaaagagctaaccttgaatctaccataat

SEQ ID NO: 408 - DNA, 110 bp, synthetic construct
  source 1..110: mol_type = other DNA
gcacgctgggaaggaggtggtgtgtgcaaagagctaaccttgaatctaccataattgaaaacagattctctaaccccagcacgtgactagagcacctagagtcacacact

SEQ ID NO: 409 - DNA, 110 bp, synthetic construct
  source 1..110: mol_type = other DNA
tccttgaatagaagtttggctgtgctttgaccaatgagacattagcaaatgtgataccagaagaggcttgaaaagagctggtagattagaatgtgctctcctttgctgct

SEQ ID NO: 410 - DNA, 110 bp, synthetic construct
  source 1..110: mol_type = other DNA
accagaagaggcttgaaaagagctggtagattagaatgtgctctcctttgctgctcctggcagccccgctaccaccactaagtgaatgagccaggctagctttccagacg

SEQ ID NO: 411 - DNA, 110 bp, synthetic construct
  source 1..110: mol_type = other DNA
acgtgagatactgagcttgctagttggattcgtctccgctgagcctcgagggcaactccctgagcttgtggcataaaaccggcgtttcctgtcattcactcattcatctg

SEQ ID NO: 412 - DNA, 110 bp, synthetic construct
  source 1..110: mol_type = other DNA
ctccctgagcttgtggcataaaaccggcgtttcctgtcattcactcattcatctgaagcacaaccattaagtgcctggtgggtgtggggacatgatggtggctagagagc

SEQ ID NO: 413 - DNA, 110 bp, synthetic construct
  source 1..110: mol_type = other DNA
actcccaaatatcaattatcattgcggtacttcacttcccaatggcccccaggcgctggaatgtaagccactaacttacagaataatgagaattgtgaacgattacgaag

SEQ ID NO: 414 - DNA, 110 bp, synthetic construct
  source 1..110: mol_type = other DNA
tctggaaacgtctaatggctttcatcagcttagaggcgtactgaaaatcgtagctctcttttcctcactcgtctgtgggctgggaaggctcggctggaggaccagcttgt

SEQ ID NO: 415 - DNA, 110 bp, synthetic construct
  source 1..110: mol_type = other DNA
ctcttttcctcactcgtctgtgggctgggaaggctcggctggaggaccagcttgttcctgaggggtaactgcaggggtaggacaattagaaaccagcaaagctgacaggg

SEQ ID NO: 416 - DNA, 110 bp, synthetic construct
  source 1..110: mol_type = other DNA
cagctcaggtgatgtgacaacaatgacaccgactggaggcggccctgagcacgtgtgcttatgacaggtgtcagttgcccttccaagggatgtatttatgtctgttaact

SEQ ID NO: 417 - DNA, 110 bp, synthetic construct
  source 1..110: mol_type = other DNA
cttggcacagcataggggtcctgctcttctgctgggggcttgtgaggagccctagagctcgtgcggtgaatgcctgatcttggccaggctcatttctaggacctagtaaa

SEQ ID NO: 418 - DNA, 110 bp, synthetic construct
  source 1..110: mol_type = other DNA
gaaagaagttaagaggaatttcttataaaatgtacacggcttctcaggaaggagctgattaagtgctttaaattgtaatgtgtggctagaggtaaatgaaattttctgta

SEQ ID NO: 419 - DNA, 110 bp, synthetic construct
  source 1..110: mol_type = other DNA
tgattaagtgctttaaattgtaatgtgtggctagaggtaaatgaaattttctgtaggatgtaatttcctgtatctcgagacctactgttccctgtgcttctcttccctgc

SEQ ID NO: 420 - DNA, 110 bp, synthetic construct
  source 1..110: mol_type = other DNA
ctctgatctgaaaacaactctcctttctcctgttcctctcctgcctaaatacaatcaagcctccaaactctgctggcaatcaacctgctacaggaccttcctactcaagt

SEQ ID NO: 421 - DNA, 110 bp, synthetic construct
  source 1..110: mol_type = other DNA
caagcctccaaactctgctggcaatcaacctgctacaggaccttcctactcaagtccacagcaagcccaccatcctcagcctcattccagcctggtggcaaccacaccac

SEQ ID NO: 422 - DNA, 110 bp, synthetic construct
  source 1..110: mol_type = other DNA
caaagagctgaaaacaaccatcttccaaatgtccatcaccgagggggtatttatgaaattctcagaaagctaagcaatagaacatgacaccgctcttaaaaaggaggtat

SEQ ID NO: 423 - DNA, 110 bp, synthetic construct
  source 1..110: mol_type = other DNA
aaattctcagaaagctaagcaatagaacatgacaccgctcttaaaaaggaggtatatctgtgtgtgtagataaagacgtttttctataatatcacgtgaagtgaaaagaa

SEQ ID NO: 424 - DNA, 110 bp, synthetic construct; identical to SEQ ID NO: 422
  source 1..110: mol_type = other DNA

SEQ ID NO: 425 - DNA, 110 bp, synthetic construct; identical to SEQ ID NO: 423
  source 1..110: mol_type = other DNA

SEQ ID NO: 426 - DNA, 110 bp, synthetic construct
  source 1..110: mol_type = other DNA
agtaggtccccaggacggtcaccacgggactgagaggggaccaggcctggcatatgacagacaggcagcttgaacaagacatcaacacactgcgcaacactcacggaccg

SEQ ID NO: 427 - DNA, 110 bp, synthetic construct
  source 1..110: mol_type = other DNA
atttaatcttgcagtttcttaacctctcccgttttatctttaatgtgcgctgtactatttcatcttaacagtgagctctttaaaaaaaaaaaaaaaaaatccctccatag

SEQ ID NO: 428 - DNA, 110 bp, synthetic construct
  source 1..110: mol_type = other DNA
taagagataagtagagaaacaatagagaatctcaaaatgtgcaaagagaagacagaacatgacacacagctgtcacgatacacgtgataaagggcaactgcttaatcaag

SEQ ID NO: 429 - DNA, 110 bp, synthetic construct
  source 1..110: mol_type = other DNA
tcaccccctaagtgcctgggttccaaagtccgcccccagctcccttcccttttccatgccttttcctttcctatggtttctacccatggaccacaactgcagttctaggc

SEQ ID NO: 430 - DNA, 110 bp, synthetic construct
  source 1..110: mol_type = other DNA
atgccttttcctttcctatggtttctacccatggaccacaactgcagttctaggctaaggttacactaagtctaggacccactccagatcagctaaaataaactctctgg

SEQ ID NO: 431 - DNA, 110 bp, synthetic construct
  source 1..110: mol_type = other DNA
atattgatatttaactcatgaacatttttttttatttgtcatgcgctatttcttaactcccaagcagactaagatggcaacatccacattttgaccttttatgtcactta

SEQ ID NO: 432 - DNA, 110 bp, synthetic construct
  source 1..110: mol_type = other DNA
ttttaggatattttacctccacatcgctgtaaacgtgggtattatttttgctactacacaaactcaaagcccgcatccgatatctccgaatggctgggcacaactacgaa

SEQ ID NO: 433 - DNA, 110 bp, synthetic construct
  source 1..110: mol_type = other DNA
acacaaactcaaagcccgcatccgatatctccgaatggctgggcacaactacgaaacacactcggctgccacaaagctaacctatttttcctgccttcacctaataagct

SEQ ID NO: 434 - DNA, 110 bp, synthetic construct
  source 1..110: mol_type = other DNA
ataataataatattggagttcttctgtggcacaatatagatatggtgcagcttgagtctctgttgtggcataggtttgatcctggcctaggaacttctgcatgctgcagg

SEQ ID NO: 435 - DNA, 110 bp, synthetic construct; identical to SEQ ID NO: 434
  source 1..110: mol_type = other DNA

SEQ ID NO: 436 - DNA, 110 bp, synthetic construct
  source 1..110: mol_type = other DNA
cctcctctttctttttgaatcttttggctgaactggcagcacacaggatttccctggccaggcaggggtcaagcccaagccacggcagtgacactgctttacctgctgta

SEQ ID NO: 437 - DNA, 110 bp, synthetic construct
  source 1..110: mol_type = other DNA
ggccaggcaggggtcaagcccaagccacggcagtgacactgctttacctgctgtaccgcagggaactcttcctttctttatatctttctgtttcacagtatagagaaaca

SEQ ID NO: 438 - DNA, 110 bp, synthetic construct
  source 1..110: mol_type = other DNA
acaaaagaaggactctgtctgacattcactgtctgaattggacagacaagaaataaaataataataggcaccatctgttgagcccctgaattatactgtgctgagttctg

SEQ ID NO: 439 - DNA, 110 bp, synthetic construct
  source 1..110: mol_type = other DNA
aaataataataggcaccatctgttgagcccctgaattatactgtgctgagttctgtgttcagcatccattatctctaattcatgaatgcttcccacaaatgtttcttgag

SEQ ID NO: 440 - DNA, 110 bp, synthetic construct
  source 1..110: mol_type = other DNA
actctgaggatgtgaaatttgggcagagattgaaggaaagtcagctatgtggagtctgggaagaaagaagagcaattacaaagatcctgagggatgaatgaccagcatct

SEQ ID NO: 441 - DNA, 110 bp, synthetic construct
  source 1..110: mol_type = other DNA
cctccttgaggtcagagactctccctcctcactttgaagaagcaagttcccatgagttctgcagctgcaaggaggcaattctgccagcaaaccaggggcacctggaagta

SEQ ID NO: 442 - DNA, 110 bp, synthetic construct
  source 1..110: mol_type = other DNA
tgacacatgaatacccagtaactatatggatcccagtcagtgcctgatgtgttgttatcacttgtctcagtcttcaatggtagggtgggcatctcctgtgagagggaggc

SEQ ID NO: 443 - DNA, 110 bp, synthetic construct
  source 1..110: mol_type = other DNA
tagtgcagcgtgacttccatctttgctatgatcactcagttgctgcctctttctctacctcccctcacttcagcccactccctgcctcagcctggtgagctcctcctcac

SEQ ID NO: 444 - DNA, 110 bp, synthetic construct
  source 1..110: mol_type = other DNA
tacctcccctcacttcagcccactccctgcctcagcctggtgagctcctcctcacccaattctcttccctttgaaatacccctttccatgttctcccacaccactggctt

SEQ ID NO: 445 - DNA, 110 bp, synthetic construct
  source 1..110: mol_type = other DNA
atttttgtatctttacatggggtggagtgtctatctcctattttatgttctatcttaggttttgtgtgctgttgccagtgtcccttgaggccttgaagaccaagttcaag

SEQ ID NO: 446 - DNA, 110 bp, synthetic construct
  source 1..110: mol_type = other DNA
taggttttgtgtgctgttgccagtgtcccttgaggccttgaagaccaagttcaagttcattgggtttggctaatgacatcaggtaagaggtagccttggagctctgctct

SEQ ID NO: 447 - DNA, 110 bp, synthetic construct
  source 1..110: mol_type = other DNA
ttggtccagggaagaactctaagtcctagaaggactcagaactggctggcatcagcaatttgtccttgatccagggccaaacgtggttgctgctactagatgtgaatggt

SEQ ID NO: 448 - DNA, 110 bp, synthetic construct
  source 1..110: mol_type = other DNA
caatttgtccttgatccagggccaaacgtggttgctgctactagatgtgaatggtccctaaacctgatgtcttgtgtttagggaattgttttcatgtagtagattttata

SEQ ID NO: 449 - DNA, 110 bp, synthetic construct
  source 1..110: mol_type = other DNA
ctttttaataatagctatcttgacaggtgtgaggcgatatctcattatggttttggtttacatttccttgataataagtgatgtcaggcctctttcatgctcatgttggc

SEQ ID NO: 450 - DNA, 110 bp, synthetic construct
  source 1..110: mol_type = other DNA
gtttacatttccttgataataagtgatgtcaggcctctttcatgctcatgttggccatttttatgtctttgaaaaaaatgtgtagccaggtcttttgtccatttttaatt

SEQ ID NO: 451 - DNA, 110 bp, synthetic construct
  source 1..110: mol_type = other DNA
tccaccttccggagaggtggctggaggtgtctttaacctggagctcccttctggggattccgcaggatggaataggtgaacatcaggccccaaggcacctctgagaggcc

SEQ ID NO: 452 - DNA, 110 bp, synthetic construct
  source 1..110: mol_type = other DNA
cagagaggaaatagggttggtagccatgcagcagaatctgcctctgtctgaatacacagaagaacctgtactgcctccctcactgagaaagggatgaaaaaatccttgtc

SEQ ID NO: 453 - DNA, 110 bp, synthetic construct
  source 1..110: mol_type = other DNA
ctaaaatccttcattgcctaccctgaatcagcaaagtgcctttgtatgtgagacggagaacctggagggaacacagagctgctcttaccttttctgtacttggggtgtta

SEQ ID NO: 454 - DNA, 110 bp, synthetic construct
  source 1..110: mol_type = other DNA
gcctggatcaacatctctgatattgtaacagatacaagaaattagcaggagctcccatcatggctccgcagtaatgaactcggctcgtatccataaggatatgggttcga

SEQ ID NO: 455 - DNA, 110 bp, synthetic construct
  source 1..110: mol_type = other DNA
tatagcagaaaatatcattaggtacaaagttagggcagttgtggagcaaatgtaggacttctctcaaggatcatacctatttgtcagcatctgaaacaatttttttcata

SEQ ID NO: 456 - DNA, 110 bp, synthetic construct
  source 1..110: mol_type = other DNA
gttaggaaatttttttgggggggaaattttaaggttttaaattcaggacggtacctctaacagttacagatgctctcacatttgggttttaaatatgggttgcatttggg

SEQ ID NO: 457 - DNA, 110 bp, synthetic construct
  source 1..110: mol_type = other DNA
tctaacagttacagatgctctcacatttgggttttaaatatgggttgcatttgggggttgaataccagctgagaaatatataaaaacaaagtattatgactttgttactt

SEQ ID NO: 458 - DNA, 110 bp, synthetic construct
  source 1..110: mol_type = other DNA
ctgtctttctatagctctcattagagtgtgattctaagcatgagttgacttttcctcatcttgattttccgagattttatagtagaatatctctttgttttctgctacct

SEQ ID NO: 459 - DNA, 110 bp, synthetic construct
  source 1..110: mol_type = other DNA
tcatcttgattttccgagattttatagtagaatatctctttgttttctgctacctttaccctcctgtgcccaccgtagccagttcacgactgaaggctgaaatggaatct

SEQ ID NO: 460 - DNA, 110 bp, synthetic construct
  source 1..110: mol_type = other DNA
acccaagtacattgaaccacaaagatcattcattccctacttctttgctgcgcataagacatggcctagagaaagccaacacctgtgcgcttttgaaatgtatgaagttt

SEQ ID NO: 461 - DNA, 110 bp, synthetic construct
  source 1..110: mol_type = other DNA
gcactttattgctgataaaatgcttgttcatctattgcttcattgtccctcaaggaaggcacctccctccctttgcccgcaccgtgtgttgggcaccttctgtgccagga

SEQ ID NO: 462 - DNA, 110 bp, synthetic construct
  source 1..110: mol_type = other DNA
aaggcacctccctccctttgcccgcaccgtgtgttgggcaccttctgtgccaggactccagatatccaggaaaggaataatccctccttaggctttgagcagtctaagaa

SEQ ID NO: 463 - DNA, 110 bp, synthetic construct
  source 1..110: mol_type = other DNA
ttaatttcatcattgcctccgtgggtaactcgctctgctccctctatctgctatcaagctgagaagaatacaaaataccttttctcattcataatgactgctatctgacc

SEQ ID NO: 464 - DNA, 110 bp, synthetic construct
  source 1..110: mol_type = other DNA
gttcgggtgactaactggctgaggtatatgaaatagtgagtcttctataccaagtgccttattagtactgctattgtgattattagctacaattcatattcctctttgaa

SEQ ID NO: 465 - DNA, 110 bp, synthetic construct
  source 1..110: mol_type = other DNA
ccaagcagacatttcagcaaacccctccaactcaactgaaccttggatgatcatgtgaccctcgtcccctgcaagcaagacctcggtggtactgaagctgcaggtgatct

SEQ ID NO: 466 - DNA, 110 bp, synthetic construct
  source 1..110: mol_type = other DNA
tgaccctcgtcccctgcaagcaagacctcggtggtactgaagctgcaggtgatctgtccttctcagggtgaggaagcttgggaagggactgggtgggtcggacagggacc

SEQ ID NO: 467 - DNA, 110 bp, synthetic construct
  source 1..110: mol_type = other DNA
gttgtgatcactgcagcacaatatggtcaagtctgaaacaagtgtgcatgggaactcagggaaacagacaatggtcacccagcttaaccaagaaaggccagagacagctt

SEQ ID NO: 468 - DNA, 110 bp, synthetic construct
  source 1..110: mol_type = other DNA
gtctggggttgcaagcagtgcagctccagccactccagggtccactgagatgagaagtaacttgagtctgtgagtaaatgggatggggcaccggctgtccctttgggtgg

SEQ ID NO: 469 - DNA, 110 bp, synthetic construct
  source 1..110: mol_type = other DNA
aggattttgtaaaagtcatcagctaagggaaagattatccttgctgttgaggtttgggcacctgaactcatgtaaactgacttggaaggccttctctgaccagagatagt

SEQ ID NO: 470 - DNA, 110 bp, synthetic construct
  source 1..110: mol_type = other DNA
gggcacctgaactcatgtaaactgacttggaaggccttctctgaccagagatagtggtgtcctttctttgtgcttctagaacatcctgaacccaccttgtcaaagaatct

SEQ ID NO: 471 - DNA, 110 bp, synthetic construct
  source 1..110: mol_type = other DNA
atcatttgtgccttaaaaatctatgtaaagcaaatattagctctgttgatagacggccttttcatacacacataacaactcatttgaaatatctggggagaagttcttac

SEQ ID NO: 472 - DNA, 110 bp, synthetic construct
  source 1..110: mol_type = other DNA
attgtttaatgaataggaactagttaattatggtgatggggaaagacaaaggacggttttcgagtgggggatgcaaagctctagtttctacaatgtgggctgcaaattgc

SEQ ID NO: 473 - DNA, 110 bp, synthetic construct
  source 1..110: mol_type = other DNA
ttttatttatttttatttttacagctgcacctgcagcatacggaagttctcaagctaggggttttgtcagagctgcagctgccggcccacagccatagcaatgccagatc

SEQ ID NO: 474 - DNA, 110 bp, synthetic construct; identical to SEQ ID NO: 473
  source 1..110: mol_type = other DNA

SEQ ID NO: 475 - DNA, 110 bp, synthetic construct
  source 1..110: mol_type = other DNA
ctgcccaacagcgaccataaggatacctcctttccaggtgagttttgaccatcgatgaagctaatgtatgtctaagtacattataaactataaaattccctatagacaag

SEQ ID NO: 476 - DNA, 110 bp, synthetic construct
  source 1..110: mol_type = other DNA
tggcacccacaccggccatgggtgtgcagtaagtgtggaagggattatagtgcaaaacaaaggtctgcagaccgcctgagaccacacctcaggatgagtgttaccaacag

SEQ ID NO: 477 - DNA, 110 bp, synthetic construct
  source 1..110: mol_type = other DNA
aacaaaggtctgcagaccgcctgagaccacacctcaggatgagtgttaccaacagttaaataaagtctacaccgaagcacgcactcatcaagcacccttcagtgccctgg

SEQ ID NO: 478 - DNA, 110 bp, synthetic construct
  source 1..110: mol_type = other DNA
ctctgagcaaggtgagcaaaagagaattattaaaaggatattgagagctcacagaattgacaagaagtctgaagacccaaactcgcaacccagaagggtgaaggaaggcc

SEQ ID NO: 479 - DNA, 110 bp, synthetic construct
  source 1..110: mol_type = other DNA
gacttgaaatatatgccctcagagaagcctgaccacaggctcactcactttatcttatgaggttgaggtcttccctctccctctgcctgagctctggtcccgtgtctctg

SEQ ID NO: 480 - DNA, 110 bp, synthetic construct
  source 1..110: mol_type = other DNA
tatgaggttgaggtcttccctctccctctgcctgagctctggtcccgtgtctctgcttggacattagtcatgctctccagtccttaggtgattctcttggacaaggacaa

SEQ ID NO: 481 - DNA, 110 bp, synthetic construct
  source 1..110: mol_type = other DNA
gttaccaggggtaatgttctccttccccgacaggtctggggtctcttccactcggagacaccagttggtgaggtcccggacacccacaaagtggatcctgccacacgcac

SEQ ID NO: 482 - DNA, 110 bp, synthetic construct
  source 1..110: mol_type = other DNA
tgagtatttagtaatttgccagatgtgttgaacactttccttgcccttgagataattacattgttcctgggaagccaatgcctgcaagtgtaaaatagaacgctgagata

SEQ ID NO: 483 - DNA, 110 bp, synthetic construct
  source 1..110: mol_type = other DNA
gagaaatgttctgaagtttctttagaccttataagaaatgttgcctcaggcctgaaagtgaaggtgttaaaatttacagatttctttcctctggctctcatgtttttatt

SEQ ID NO: 484 - DNA, 110 bp, synthetic construct
  source 1..110: mol_type = other DNA
aagtgaaggtgttaaaatttacagatttctttcctctggctctcatgtttttattccctcttcctctgtctgggtatcatttgcttgggggagattcacagatagttttg

SEQ ID NO: 485 - DNA, 110 bp, synthetic construct
  source 1..110: mol_type = other DNA
cccctaaatgtcatctgatactacaatttttactttaggcctttcacatagctttacactgggatgaaaatactgatgtgatcacgggattaaagcagaaaaccttctat

SEQ ID NO: 486 - DNA, 110 bp, synthetic construct
  source 1..110: mol_type = other DNA
acactgggatgaaaatactgatgtgatcacgggattaaagcagaaaaccttctatggaagaccgaactggaataacgagttccggcgggtagcctacagtcaccccaggt

SEQ ID NO: 487 - DNA, 110 bp, synthetic construct
  source 1..110: mol_type = other DNA
ctgccgctgtgttgggccaagtgatgtgtaagacagcagtgctgtctgcagagagcttacagtccagtcaggcaggcaaaactagtaagatagaggagttcccgtcgtgg

SEQ ID NO: 488 - DNA, 110 bp, synthetic construct
  source 1..110: mol_type = other DNA
gccaagtgatgtgtaagacagcagtgctgtctgcagagagcttacagtccagtcaggcaggcaaaactagtaagatagaggagttcccgtcgtggcgcagtggttaatga

SEQ ID NO: 489 - DNA, 110 bp, synthetic construct
  source 1..110: mol_type = other DNA
gtttacttagaagcgcttaagagagagggaagcaaaaataggttgggaggtagcttttgttaagacatgcaggataattcattaggccgaaagtacctgtggatcaagaa

SEQ ID NO: 490 - DNA, 110 bp, synthetic construct
  source 1..110: mol_type = other DNA
tttgttaagacatgcaggataattcattaggccgaaagtacctgtggatcaagaaatactttaaggctactctggtcaagggagtgtctcagttccacatacagcttggc

SEQ ID NO: 491 - DNA, 110 bp, synthetic construct
  source 1..110: mol_type = other DNA
tcttgcttgctgaaactcccaagtatgaagtcctgcatagcttccttcacattattcactaatataagtaaatatcatgaacaaattgtgttatgtgacttttagattga

SEQ ID NO: 492 - DNA, 110 bp, synthetic construct
  source 1..110: mol_type = other DNA
gtggtcacccagttacctcggacgtcagagaagttaaagtcttcagttaaagctgataaaaatgtggaggacagaagatagttccaggccaggatacgggctgtgagaaa

SEQ ID NO: 493 - DNA, 110 bp, synthetic construct
  source 1..110: mol_type = other DNA
cggaagcagcctgtgtgacaatcacggaagagaaatgcaggagctaccccatcgccccgaacagcgcgtgtaaaccagcctctcctggcccatcacacagctgtttattt

SEQ ID NO: 494 - DNA, 110 bp, synthetic construct
  source 1..110: mol_type = other DNA
cttgatccgctaccgcttttttcacttcataaactttcatagtaagtccacattgttatagttgtgtagcttggtgctttaacggtattaaataactaaattttaaaaaa

SEQ ID NO: 495 - DNA, 110 bp, synthetic construct
  source 1..110: mol_type = other DNA
atcacagtaatccaatgacctcatggtaatatgtaattctgccaaatatttttgttttgttttgttttgttttttagggccatactcgcagcacatggaggttcccaagc

SEQ ID NO: 496 - DNA, 110 bp, synthetic construct
  source 1..110: mol_type = other DNA
gtaatatgtaattctgccaaatatttttgttttgttttgttttgttttttagggccatactcgcagcacatggaggttcccaagctagaggttaaatcaaagctatagct

SEQ ID NO: 497 - DNA, 110 bp, synthetic construct
  source 1..110: mol_type = other DNA
tttaatgatttgagaccaataatttttttggctgcgcctgtggtatgcagaaattccagggccagggaccaaacccgaaccacagcagtgataacaccagatccttaacc

SEQ ID NO: 498 - DNA, 110 bp, synthetic construct
  source 1..110: mol_type = other DNA
ccaataatttttttggctgcgcctgtggtatgcagaaattccagggccagggaccaaacccgaaccacagcagtgataacaccagatccttaacccgctgagccaccagg

SEQ ID NO: 499 - DNA, 110 bp, synthetic construct
  source 1..110: mol_type = other DNA
aaacgttggatgtagctactttttctcaggggatggggttcccgggagtcaggatccatacccacgtccacggccacctcctcctttctgcccatgggaaggcaggaaac

SEQ ID NO: 500 - DNA, 110 bp, synthetic construct
  source 1..110: mol_type = other DNA
aaaaatatttctctaggaccggagtaggttggtaaattaaaagttaaaaaggagaacgtcaactgagaagccagcacggattcgacttggaaattactgggtttccattt

SEQ ID NO: 501 - DNA, 110 bp, synthetic construct
  source 1..110: mol_type = other DNA
gcttgattattgccaaagaggatgaaaacaattctggtgatggcaactttctcaggggacttaaactgaaaactcagtatatatcaatttaactcccatggtaaataatg

SEQ ID NO: 502 - DNA, 110 bp, synthetic construct
  source 1..110: mol_type = other DNA
gccggtctcccttctcttcccttagttccttaatctttcactgcactgccgctgccacaggcaaacattttaaagcaaaagaggtaaaactctatgtcaaactctgaata

SEQ ID NO: 503 - DNA, 110 bp, synthetic construct
  source 1..110: mol_type = other DNA
cacaggcaaacattttaaagcaaaagaggtaaaactctatgtcaaactctgaatatgtggagagaggtgttataggacctgcttagtgggatgcccaaagcacacacacc

SEQ ID NO: 504 - DNA, 110 bp, synthetic construct; identical to SEQ ID NO: 502
  source 1..110: mol_type = other DNA

SEQ ID NO: 505 - DNA, 110 bp, synthetic construct; identical to SEQ ID NO: 503
  source 1..110: mol_type = other DNA

SEQ ID NO: 506 - DNA, 110 bp, synthetic construct
  source 1..110: mol_type = other DNA
acacacatcaactcacctaacacacacaaaccctgcaaggtgggtagtttaattaccccatcttccagaggaggaaagtaaaagtatgagctagaatccaaggcaacaca

SEQ ID NO: 507 - DNA, 110 bp, synthetic construct
  source 1..110: mol_type = other DNA
ccccatcttccagaggaggaaagtaaaagtatgagctagaatccaaggcaacacaatcagttagggagagaaccaggatctgaacccatgtagtaaggctccaggtctgt

SEQ ID NO: 508 - DNA, 110 bp, synthetic construct
  source 1..110: mol_type = other DNA
tggtcacccggacaatcaatggtcagatgcctggcgctcccagagcatgaaacgctactacatgaagccaaatgtacacaggcagttagaaactgtaatcatccttgcca

SEQ ID NO: 509 - DNA, 110 bp, synthetic construct
  source 1..110: mol_type = other DNA
acgactgtaagttatatgtagggagggtttgcacacctaacctccacttgttttggggtcaatttacttgacctcagagatgccttaatatgtttcgttgcataatagtc

SEQ ID NO: 510 - DNA, 110 bp, synthetic construct
  source 1..110: mol_type = other DNA
cacaacgtaacttagtgcctattacttgcaactactacgctcttaaaagctaacacacaagaagggggagacaatgcaaactaatgtccaaatgactgcagcaaaagaaa

SEQ ID NO: 511 - DNA, 110 bp, synthetic construct
  source 1..110: mol_type = other DNA
ttatttaactaatatttgatttttaaaaggactgtcccaaagaatgacaatgacatccatgaaacgaaggatttaagcacctttaatgcagtgtaagtaaaaagaggtta

SEQ ID NO: 512 - DNA, 110 bp, synthetic construct
  source 1..110: mol_type = other DNA
aaaggaaaataaaacatgactaagttccctctggatattttctgcttgccaaaggctgagactaaactattctttttgtttcttttttaaaagattaggaaatacccaga

SEQ ID NO: 513 - DNA, 110 bp, synthetic construct
  source 1..110: mol_type = other DNA
tccctctggatattttctgcttgccaaaggctgagactaaactattctttttgtttcttttttaaaagattaggaaatacccagagacgaaaaagaaatataaaagagat

SEQ ID NO: 514 - DNA, 110 bp, synthetic construct
  source 1..110: mol_type = other DNA
taacgacgtgcccaagcattttcctggcgtctagagaaaacgttaaaaacaaaagctttggatccggttgggggcagggggacgagggaagcacgcctgcaaccagcaag

SEQ ID NO: 515 - DNA, 110 bp, synthetic construct
  source 1..110: mol_type = other DNA
aggttgcaaaatgaatagttcctgttgtcaatgggaacattcaaatgcactgatccccagttctggagcaggcagcgcacacagggagccatgtctgcagcatatggaag

SEQ ID NO: 516 - DNA, 110 bp, synthetic construct
  source 1..110: mol_type = other DNA
cccagttctggagcaggcagcgcacacagggagccatgtctgcagcatatggaagttcccagctgcaacctacaccacagctttggcacctccagatccttcaacccact

SEQ ID NO: 517 - DNA, 110 bp, synthetic construct
  source 1..110: mol_type = other DNA
cctccttctttcctaaagtataccccctccaggctccatctttttagttttccggttttagtttcagtttctgagtctggaatcctttttccattcaatatcttcattga

SEQ ID NO: 518 - DNA, 110 bp, synthetic construct
  source 1..110: mol_type = other DNA
tgcaacctcatggttcctagttggattcgttttcattgcaccacaacgcaattttatttcttagtcttatttattacattctgcaaattaggctacatgccattccacat

SEQ ID NO: 519 - DNA, 110 bp, synthetic construct; identical to SEQ ID NO: 518
  source 1..110: mol_type = other DNA

SEQ ID NO: 520 - DNA, 110 bp, synthetic construct
  source 1..110: mol_type = other DNA
gggaactctaagaataatttttccgtgtgaagactaagtccatggaacacatttcctcagaaagggcttctggttaaactgcccagagattaagtttatgcatgaagatt

SEQ ID NO: 521 - DNA, 110 bp, synthetic construct
  source 1..110: mol_type = other DNA
aacacatttcctcagaaagggcttctggttaaactgcccagagattaagtttatgcatgaagattattattattaagaacaactagagtttctctaagtttttttctttc

SEQ ID NO: 522 - DNA, 110 bp, synthetic construct
  source 1..110: mol_type = other DNA
ccccagggtagccctccagctggagaggaagggagtcaggggtcagtgcccagggtgctatccttcagagggacagtctcatccctttgacagcgctgctccgagtctcc

SEQ ID NO: 523 - DNA, 110 bp, synthetic construct
  source 1..110: mol_type = other DNA
tgctatccttcagagggacagtctcatccctttgacagcgctgctccgagtctccagcaggactgtgtccacagtgacaagtagctgaggaacttcatggcatctccctg

SEQ ID NO: 524 - DNA, 110 bp, synthetic construct
  source 1..110: mol_type = other DNA
tgaaatgcgggaaaggagccggggctcagtggaatgcgtatcaggaagaagagtgtcttagggagagagaccagagcaggtgtgtaaaccgagaggaataagtcaatgga

SEQ ID NO: 525 - DNA, 110 bp, synthetic construct
  source 1..110: mol_type = other DNA
ctggagatgttttatgcatgaatccaaattctgtgagatcgtcatatgaaagacgcaagttattttaaatatgattttaatacggtattctgctgaaaaaatcacaaatg

SEQ ID NO: 526 - DNA, 110 bp, synthetic construct
  source 1..110: mol_type = other DNA
gcatgaatccaaattctgtgagatcgtcatatgaaagacgcaagttattttaaatatgattttaatacggtattctgctgaaaaaatcacaaatgttgctgaaaaaggaa

SEQ ID NO: 527 - DNA, 110 bp, synthetic construct
  source 1..110: mol_type = other DNA
gataaacttcttcctttagtctctacggtcgccgaaaaagggacaccctttttctcttggcagctgttgatccatcatttgcttgtataagttgagaactgttctcttta

SEQ ID NO: 528 - DNA, 110 bp, synthetic construct
  source 1..110: mol_type = other DNA
cttggcagctgttgatccatcatttgcttgtataagttgagaactgttctctttatttcgctgtctggctggttcttttctatcccctggatgccagccacagagttttc

SEQ ID NO: 529 - DNA, 110 bp, synthetic construct
  source 1..110: mol_type = other DNA
tatgggaactcctcctattttctgattttaacattaactttacctgagataatgtgtaatgttccagctctgctctagatattccatctcctaaagtcatgttctaatga

SEQ ID NO: 530 - DNA, 110 bp, synthetic construct
  source 1..110: mol_type = other DNA
ctgctttctcactacccagtgagaatggatgggatgggcctggctgcctgggaggcctggtagctcatcctgggtgtggggcgggaggggtggtggtgctgctttcagag

SEQ ID NO: 531 - DNA, 110 bp, synthetic construct
  source 1..110: mol_type = other DNA
cctggtagctcatcctgggtgtggggcgggaggggtggtggtgctgctttcagaggcaggggacggctgaacaggttgcagcccgccgaggatgggtgttttaaagactg

SEQ ID NO: 532 - DNA, 110 bp, synthetic construct
  source 1..110: mol_type = other DNA
gctcacctagcagtgacaaggcaaacattgttttataattagacttatggcttcctacctccttagaagattgtaaggaaattccaaaagctctgcaggtgctctcatat

SEQ ID NO: 533 - DNA, 110 bp, synthetic construct
  source 1..110: mol_type = other DNA
tgagtcattgtgcagtgagtggtggtagaagaaacaaaggccataatttaccaaattgtggcctgaaagaaagcactagcatactcacctttagaatctgggtcatagct

SEQ ID NO: 534 - DNA, 110 bp, synthetic construct
  source 1..110: mol_type = other DNA
cccatctgttgcataagtacagctcttattgttgaaacaagctgtctccgtgcagtgatgtgcctgccagactcacggttttcattttttctgctactgttgaagaatat

SEQ ID NO: 535 - DNA, 110 bp, synthetic construct
  source 1..110: mol_type = other DNA
tgatgtgcctgccagactcacggttttcattttttctgctactgttgaagaatattcttagactaacacttgcacgtgagtctccttgcttctttgatcccatcttgtcc

SEQ ID NO: 536 - DNA, 110 bp, synthetic construct
  source 1..110: mol_type = other DNA
ccgggcacacctggagagtgactttggggatggataccttctttctggtgaaggagaagcaaaattctgaattattgtcttctttcaggcgtgtcactatgaaactatga

SEQ ID NO: 537 - DNA, 110 bp, synthetic construct
  source 1..110: mol_type = other DNA
gaagcaaaattctgaattattgtcttctttcaggcgtgtcactatgaaactatgacaggatgggtccttaagatgttactgcttatttgttaaaactaccttaaagtttt

SEQ ID NO: 538 - DNA, 110 bp, synthetic construct; identical to SEQ ID NO: 536
  source 1..110: mol_type = other DNA

SEQ ID NO: 539 - DNA, 110 bp, synthetic construct; identical to SEQ ID NO: 537
  source 1..110: mol_type = other DNA

SEQ ID NO: 540 - DNA, 110 bp, synthetic construct
  source 1..110: mol_type = other DNA
aaatttatttccctacctccatttcctgtttgttgggtttaaatacgtggctatacaggtagagtattttcttccctgcaacgttcgcgcttggtttagattacagtgtg

SEQ ID NO: 541 - DNA, 110 bp, synthetic construct
  source 1..110: mol_type = other DNA
caggtagagtattttcttccctgcaacgttcgcgcttggtttagattacagtgtgaccgcaatggctgtgttatttgaatgagattatctgtatttgaggtgcttgaggc

SEQ ID NO: 542 - DNA, 110 bp, synthetic construct
  source 1..110: mol_type = other DNA
tttatgccctgatctttattatttctttctctcccctaactttgggttttgtttgttcttctattactagttcctttaggtataaggttagatcacttatttgagatttt

SEQ ID NO: 543 - DNA, 110 bp, synthetic construct
  source 1..110: mol_type = other DNA
ctaactttgggttttgtttgttcttctattactagttcctttaggtataaggttagatcacttatttgagatttttttttgtttgttgatttctcgaggtgagtgtgtat

SEQ ID NO: 544 - DNA, 110 bp, synthetic construct
  source 1..110: mol_type = other DNA
catgtcttattttacagtttctgtgagtcagaatttaggcatgacttgcttaggtgcttctcccaaggctgcaatctacttgtcagctggggcttcattcatacctccac

SEQ ID NO: 545 - DNA, 110 bp, synthetic construct
  source 1..110: mol_type = other DNA
attaggggctgatctaagtggctcctcacacttgctgggtccttaagtgtctctcactctgattgcttctctgaagatacatcagcctactgcagattcacggccctgtc

SEQ ID NO: 546 - DNA, 110 bp, synthetic construct
  source 1..110: mol_type = other DNA
actctgattgcttctctgaagatacatcagcctactgcagattcacggccctgtcaccccgctgcagccacactgacaccctttccttccttcaggtccattcaaaacta

SEQ ID NO: 547 - DNA, 110 bp, synthetic construct
  source 1..110: mol_type = other DNA
atgcattcttctcagaacctcttcaacacttgaaccattagagtgagtttatggagcttctagattctgtgttggggaagacacatatgaaccccatttccttggcagct

SEQ ID NO: 548 - DNA, 110 bp, synthetic construct
  source 1..110: mol_type = other DNA
gcttctagattctgtgttggggaagacacatatgaaccccatttccttggcagctcacctattctcctgtgacccacataaaacttttgtttgtaaatatcctttctttt

SEQ ID NO: 549 - DNA, 110 bp, synthetic construct
  source 1..110: mol_type = other DNA
attatttgctgatatcatccactggtacagatcagttttcatgactcaagacataaaggctaaatatgcatgaccaaagctgtaaactgagggaatggtctgaagtaggt

SEQ ID NO: 550 - DNA, 110 bp, synthetic construct; identical to SEQ ID NO: 549
  source 1..110: mol_type = other DNA

SEQ ID NO: 551 - DNA, 110 bp, synthetic construct
  source 1..110: mol_type = other DNA
cctgagtttttggagagtggctgttaatggaacacatgattaacagctattagcgaggagtacagacaaaaatactatgcataaaactattactaggagttcccgtcgtg

SEQ ID NO: 552 - DNA, 110 bp, synthetic construct
  source 1..110: mol_type = other DNA
tctgaccataggaaatagcaaacggtgttactcctgggggccacctccactgtccctgcagggcaactgacagagctggtactgtccactgctgagcagagatggagatg

SEQ ID NO: 553 - DNA, 110 bp, synthetic construct
  source 1..110: mol_type = other DNA
ctgcagggcaactgacagagctggtactgtccactgctgagcagagatggagatggtgctaagtttttacaggtgttttagccagtggttctcacctggggtttagcagc

SEQ ID NO: 554 - DNA, 110 bp, synthetic construct
  source 1..110: mol_type = other DNA
acagcctttctcagtagcaatctattatctacaagggggctttccttctcttttctaccccattacatctcccatttactggatataggtgttaggagaaaataattttc

SEQ ID NO: 555 - DNA, 110 bp, synthetic construct
  source 1..110: mol_type = other DNA
taccccattacatctcccatttactggatataggtgttaggagaaaataattttcacctttccacacaatgagagataacatagcctgatgcatttcactcccttaggat

SEQ ID NO: 556 - DNA, 110 bp, synthetic construct
  source 1..110: mol_type = other DNA
attaaatagagcagtatcgttctaaaaattttattctcttctcagcagctaacttgacaaaccacatctgttttttgttgtgctcactttttgttcttatctgctgagga

SEQ ID NO: 557 - DNA, 110 bp, synthetic construct
  source 1..110: mol_type = other DNA
gacaaaccacatctgttttttgttgtgctcactttttgttcttatctgctgaggataaaatatttacggacattggatcaaatgcttaaattcatggcttttttttgtga

SEQ ID NO: 558 - DNA, 110 bp, synthetic construct
  source 1..110: mol_type = other DNA
cctttgggtaaggtcgtctccccaaatgagctcataagcagaggaaggcctagcgaacagagaaggtgggagagtcacaacagccttccgtaccaacatttcctgggaaa

SEQ ID NO: 559 - DNA, 110 bp, synthetic construct
  source 1..110: mol_type = other DNA
gtactaactaaaatacataatcacagtaagataattaggtcagggataattttcattatgagcaggtttaattctaagctgctgatgcttttaaggtcatgaatgtgttg

SEQ ID NO: 560 - DNA, 110 bp, synthetic construct
  source 1..110: mol_type = other DNA
ttatgagcaggtttaattctaagctgctgatgcttttaaggtcatgaatgtgttgggacaccgtagatcctgttgtttggaggactaagattcaaactaagcagtttatc

SEQ ID NO: 561 - DNA, 110 bp, synthetic construct
  source 1..110: mol_type = other DNA
tcttaatgatggccattctgaccagtagcaccaactttttatattcaaagaggaaatgttgacctaaatgtttagcttggcaatagaaaaagttagtaggctccacatct

SEQ ID NO: 562 - DNA, 110 bp, synthetic construct
  source 1..110: mol_type = other DNA
cccaattccatcgcctcaccttccatgacgggaagatagctaatgacgctaaagttcctgtttacaaaacaaatttttctttgaggtggctctcacggtataacaatatt

SEQ ID NO: 563 - DNA, 110 bp, synthetic construct
  source 1..110: mol_type = other DNA
cccaggtgctatgcttgcacatatcacttggctatttaagctaccatttcttttgaattacctattcacgttcatttgtccattgggttctttgtgggttttgtgatgat

SEQ ID NO: 564 - DNA, 110 bp, synthetic construct
  source 1..110: mol_type = other DNA
aattacctattcacgttcatttgtccattgggttctttgtgggttttgtgatgatttgacaaacttatttatgctttcttcaggtctatgttctgttcgtaatgtgtaca

SEQ ID NO: 565 - DNA, 110 bp, synthetic construct
  source 1..110: mol_type = other DNA
gaggatggcagtaggctaatcagcagcctctgattatcatcactcacaggaacccactcagggaatttgaacctcttcttccatctcgaaattctgcatatttaaatgtg

SEQ ID NO: 566 - DNA, 110 bp, synthetic construct
  source 1..110: mol_type = other DNA
actcagggaatttgaacctcttcttccatctcgaaattctgcatatttaaatgtgctagtttccagaacagtaatatttccaccagaaaacacagcaagaggctcattat

SEQ ID NO: 567 - DNA, 110 bp, synthetic construct
  source 1..110: mol_type = other DNA
tcttcccaggagacaaagtaaaggaaatgttgagctggaaactgtgaccagcaatttactccttgtgttgctctggccacatcagcaaggtcttatatcacagaaagtga

SEQ ID NO: 568 - DNA, 110 bp, synthetic construct
  source 1..110: mol_type = other DNA
tccccccatttttctaatgttcgggaatacaccattgaatcttacatgaagccataaatttcataatacactgttcaatcaaatagtttgtttagagaagtccctcccca

SEQ ID NO: 569 - DNA, 110 bp, synthetic construct
  source 1..110: mol_type = other DNA
aaatttcataatacactgttcaatcaaatagtttgtttagagaagtccctccccacaaaacgtttgcccagggccctgcacatgaaaaaagcagccctgcttgaggatga

SEQ ID NO: 570 - DNA, 110 bp, synthetic construct
  source 1..110: mol_type = other DNA
gttcagaatggtgtttaactgcatcatctggcactaggcttttccacttaccaaataatgtgtttgtaatcaacttatttaaacttactgtgcctcagttccctcatctg

SEQ ID NO: 571 - DNA, 110 bp, synthetic construct
  source 1..110: mol_type = other DNA
gattacattttttgcaatcggtgaacctgtattgacatgttatcatcccacgtccatcggtatttacattagggttccccctcggggctgtgcagtctcagtgtttggac

SEQ ID NO: 572 - DNA, 110 bp, synthetic construct
  source 1..110: mol_type = other DNA
atcggtatttacattagggttccccctcggggctgtgcagtctcagtgtttggacaaatgtatagtaacatgtattcaccgctggtgtgccacacagaatagtttcgctg

SEQ ID NO: 573 - DNA, 110 bp, synthetic construct
  source 1..110: mol_type = other DNA
aatgaatacttaaagaccacatgagctggtgtagtttggtagccctggaattatatctctcattggaagtcccaacatgcccatcagctccttcccttgtgccttccaca

SEQ ID NO: 574 - DNA, 110 bp, synthetic construct
  source 1..110: mol_type = other DNA
attgtaacacttgattttggagaaatcattttcattgctacttgttccttcccatcagagaggaaattaagcagcttcattcctcaataaactccagctatgtgtagtta

SEQ ID NO: 575 - DNA, 110 bp, synthetic construct
  source 1..110: mol_type = other DNA
caggcaacatgagcctgcttagtatgcaaataatctttgacccttagtgtaaaatgaagaaaaagctgacaaaaattaattaaacatagggcagatgcctaggctcaata

SEQ ID NO: 576 - DNA, 110 bp, synthetic construct
  source 1..110: mol_type = other DNA
gaagaaaaagctgacaaaaattaattaaacatagggcagatgcctaggctcaatagggttagccttagcttccgttaatttgaatttctaggctctagactgattatctc

SEQ ID NO: 577 - DNA, 110 bp, synthetic construct
  source 1..110: mol_type = other DNA
acttctgtaggactattttgtaaatacaagtaagggtattagataactatattatgccttattacaaatgccgttggggggcagattggcaaagaaggagggatggactt

SEQ ID NO: 578 - DNA, 110 bp, synthetic construct
  source 1..110: mol_type = other DNA
gccttattacaaatgccgttggggggcagattggcaaagaaggagggatggactttcaggctgtagctaatgaaggacaacaacatggctttcaatgagaaaagaaaata

SEQ ID NO: 579 - DNA, 110 bp, synthetic construct
  source 1..110: mol_type = other DNA
ctgatggagaaagaaggtggaatatcgctctggttgtctctattttctcagtaaaatatcagctgagaatgaggaagtaggtgttgaagagtgaaggaaagagaagcatg

SEQ ID NO: 580 - DNA, 110 bp, synthetic construct
  source 1..110: mol_type = other DNA
atatcagctgagaatgaggaagtaggtgttgaagagtgaaggaaagagaagcatgtatgacatagtttctgagaaagctgactacacagtatgcctcaaaacacagagtt

SEQ ID NO: 581 - DNA, 110 bp, synthetic construct
  source 1..110: mol_type = other DNA
tttcccaaatgtttagcagcatgaagtctgtcccttaatctaaaataccatccgaagggtaagccggtagattcaacgcaccctgactgcactcaaatcccagactggaa

SEQ ID NO: 582 - DNA, 110 bp, synthetic construct
  source 1..110: mol_type = other DNA
ctcttcctgtgacgagactaataggcctatttataggtattaatatgaaggtcattttggacctcaaatctgctgtataattttgttttttgctgagtatatttatgtgg

SEQ ID NO: 583 - DNA, 110 bp, synthetic construct
  source 1..110: mol_type = other DNA
agcaatgagtaaatgcacatgcgaagctttgttttattgagcagttggccgtataatgatttaatgtctaaactatttattaagactttgggggagtgacaagtgttctt

SEQ ID NO: 584 - DNA, 110 bp, synthetic construct
  source 1..110: mol_type = other DNA
agagtttgtatgttttagccccttctggggccgcttccccatggcattaatctttttatttccatttagcatgtttatataaacagggctccgtgttcagtttccatagt

SEQ ID NO: 585 - DNA, 110 bp, synthetic construct
  source 1..110: mol_type = other DNA
cttgggaaacaaaccatcgccgtcagaaaacgtaaaggcaatctatcgctttccccttccagcccaacattccgaaccggctcatttcaagaaggaacgtctgacccagc

SEQ ID NO: 586 - DNA, 110 bp, synthetic construct
  source 1..110: mol_type = other DNA
tttaatattcattcaacaaatcactccctagctaaaatccctccaacagttacggactgctagaaaagaaactaaactctacatgtaaaccaacttaagtcctgcaggat

SEQ ID NO: 587 - DNA, 110 bp, synthetic construct
  source 1..110: mol_type = other DNA
gtgccaagtggagaactgagtcttctttccaattgccaagtctgtgagtcttcttgaaagcaggtcctccatctccaggcccgtcttcacacaacttttgtccctgcaga

SEQ ID NO: 588 - DNA, 110 bp, synthetic construct
  source 1..110: mol_type = other DNA
gaaagcaggtcctccatctccaggcccgtcttcacacaacttttgtccctgcagatagcctgagtgcaaactgagtcacccaactaagtttctcccaaattctggacccc

SEQ ID NO: 589 - DNA, 110 bp, synthetic construct
  source 1..110: mol_type = other DNA
atccattctactgcttatatatatttggtcttttttttttttttttcaactctggggctgtgcagacattctcgttcatatcttttaatgtgtatgtacatttctaccgg

SEQ ID NO: 590 - DNA, 110 bp, synthetic construct
  source 1..110: mol_type = other DNA
ttcgaagtgaatacaagatatacgggtggagatgctcagtaagacattaagtacatggatcagaagttctacatagcggtgaagaccaaagaattaaactgaggacatga

SEQ ID NO: 591 - DNA, 110 bp, synthetic construct
  source 1..110: mol_type = other DNA
ctgggaaggtaaaaatgacctttctgatatttctttggttttttccttccctttcttgtctccattctcttttttctgaaacagctattttatcagatgcagacttcctg

SEQ ID NO: 592 - DNA, 110 bp, synthetic construct
  source 1..110: mol_type = other DNA
cttccctttcttgtctccattctcttttttctgaaacagctattttatcagatgcagacttcctgttttgattatctatgactcatcttgtatttctaaaatttacctct

SEQ ID NO: 593 - DNA, 110 bp, synthetic construct
  source 1..110: mol_type = other DNA
aagtcccatctacgcacaaagtctcccggtagtttatctctggcccagcatctcgccagagcgtctctcgaataccccaacttcacacaacagtagctttaacacatcca

SEQ ID NO: 594 - DNA, 110 bp, synthetic construct
  source 1..110: mol_type = other DNA
ccagagcgtctctcgaataccccaacttcacacaacagtagctttaacacatccaaagcaaggcttatcttccccaggaacctccctgcccacagccttctccatctcac

SEQ ID NO: 595 - DNA, 110 bp, synthetic construct
  source 1..110: mol_type = other DNA
tgtcacccttttaacatttatgttctccgcctccttttaaaaaaaactagattctatcctaaaaatttatactattcctcatatattttctgctccgattgaacatagcc

SEQ ID NO: 596 - DNA, 110 bp, synthetic construct; identical to SEQ ID NO: 595
  source 1..110: mol_type = other DNA

SEQ ID NO: 597 - DNA, 110 bp, synthetic construct
  source 1..110: mol_type = other DNA
tgaggacaggaactttattgattttgttcacatctgtaaatcctgtggctcttaagatacagtgctcttagtaacacttgctgctttattaataataacactacaggctc

SEQ ID NO: 598 - DNA, 110 bp, synthetic construct
  source 1..110: mol_type = other DNA
gatacagtgctcttagtaacacttgctgctttattaataataacactacaggctcataacaaatatttgttaagtaagggaatgaagtaattccaagggatctgacgatg

SEQ ID NO: 599 - DNA, 110 bp, synthetic construct
  source 1..110: mol_type = other DNA
gagctttaacgaatgtgctgttgtataatgaccagattcggaaaaggattccatgaaatttggattatttttaaatgtctttgtggttattcaagttttataatgtagtg

SEQ ID NO: 600 - DNA, 110 bp, synthetic construct; identical to SEQ ID NO: 599
  source 1..110: mol_type = other DNA

SEQ ID NO: 601 - DNA, 110 bp, synthetic construct
  source 1..110: mol_type = other DNA
ctcttggggcatcacagaggactcgtgccgtttctcgtgttcatgcctttgctcgagctgttccttctgcctggaattcgtctttcatatttttcacctggtgaactcaa

SEQ ID NO: 602 - DNA, 110 bp, synthetic construct
  source 1..110: mol_type = other DNA
catggccactggggaacatgtgcgagttgggcttatttatgtctatatacatggtgcttctattattactttatagtctttcttatatctttctattatttttagtcttt

SEQ ID NO: 603 - DNA, 110 bp, synthetic construct
  source 1..110: mol_type = other DNA
cacgaccttttgccctctatggaaaacaaagacgagtgagctctggttggtaccctcaaagctcttgtagcctggtagggacgatccttgtattaggtggactgcccagt

SEQ ID NO: 604 - DNA, 110 bp, synthetic construct
  source 1..110: mol_type = other DNA
tcaaagctcttgtagcctggtagggacgatccttgtattaggtggactgcccagttgtgctaaaattggatgcatttatgagatggaatagggcagtagatgttgatacc

SEQ ID NO: 605 - DNA, 110 bp, synthetic construct
  source 1..110: mol_type = other DNA
aataaatacattttgtactagaatggaaggtggaaggacaagaactattgggtggtattcggatttcagcagtgaaacatcatggaaaagatgacctcagcttcgccagc

SEQ ID NO: 606 - DNA, 110 bp, synthetic construct
  source 1..110: mol_type = other DNA
tattcggatttcagcagtgaaacatcatggaaaagatgacctcagcttcgccagcacgttcccactgaaggccttttgcccttcttgtctctaggctacacattcttcat

SEQ ID NO: 607 - DNA, 110 bp, synthetic construct
  source 1..110: mol_type = other DNA
gaatgcagtgtatttgtgatgcaattgactggatttagggctaatgtctgtgaacatccatctcgttcaagtttatacacctctgtcgtgtggcactttcttttgaatca

SEQ ID NO: 608 - DNA, 110 bp, synthetic construct
  source 1..110: mol_type = other DNA
ttctctgcaccttcagagagcgttccagggacatgtctttgtgtattgcaagtgggggtggctgtttctccttagtctccattcagcaggcatgaccactatcagtttgt

SEQ ID NO: 609 - DNA, 110 bp, synthetic construct
  source 1..110: mol_type = other DNA
gggtggctgtttctccttagtctccattcagcaggcatgaccactatcagtttgtgtttttcagaaattacacatctctcctccctaaacaaggtcaggaaacacatggt

SEQ ID NO: 610 - DNA, 110 bp, synthetic construct
  source 1..110: mol_type = other DNA
gcattctctgcacaactctggtcaatacatttcgatgcagataattcttagataattcatgctgccaataagctcttctcttttttctttctttctttttttttttttaa

SEQ ID NO: 611 - DNA, 110 bp, synthetic construct
  source 1..110: mol_type = other DNA
tataaaataatacatcaaatgtaatgagagctcacaaggattttagagttcaggctctcgaatcagaccctgatgctgcgtcttgattttactgcttttctagctgtgtc

SEQ ID NO: 612 - DNA, 110 bp, synthetic construct
  source 1..110: mol_type = other DNA
tctcgaatcagaccctgatgctgcgtcttgattttactgcttttctagctgtgtctttgggcaggtcacttgatgtcctcaagcctcaagctcttaattggtaagctaaa

SEQ ID NO: 613 - DNA, 110 bp, synthetic construct
  source 1..110: mol_type = other DNA
ctgaagttcttgcctcatagattttttccgctaaccttcatggatttgctctttgacaataattcccaaagctctgatttaaatttaacttgaagagcctttagtgggtt

SEQ ID NO: 614 - DNA, 110 bp, synthetic construct
  source 1..110: mol_type = other DNA
acaataattcccaaagctctgatttaaatttaacttgaagagcctttagtgggttcatatggtaaccgaaattttaagttcactccaggccagcacttttataatttgca

SEQ ID NO: 615 - DNA, 110 bp, synthetic construct
  source 1..110: mol_type = other DNA
cacgtggagcaattgaaggaactgaccagcactgtccggaaggagcacctgactctggaaaaaggcctgcatttaacgaaggaattctcagacaaatacaaagcactaac

SEQ ID NO: 616 - DNA, 110 bp, synthetic construct
  source 1..110: mol_type = other DNA
attgagaagctactatgtgccagcatctctatactatatgatagagggaagaagcatgggcaacatcggtctatatctgagtgtctatttattccatcttcaaggggtct

SEQ ID NO: 617 - DNA, 110 bp, synthetic construct
  source 1..110: mol_type = other DNA
atgggcaacatcggtctatatctgagtgtctatttattccatcttcaaggggtctttggggagacagataataaataaaattaaggtgcattattctaagttagaagatg

SEQ ID NO: 618 - DNA, 110 bp, synthetic construct
  source 1..110: mol_type = other DNA
caggagcaggagctggctgtttccatgtacttaactcatggcactggaatgacgggtcattttaaagtctgttttctaagaaaagcttgtgcttagttttaaaatcgtgt

SEQ ID NO: 619 - DNA, 110 bp, synthetic construct
  source 1..110: mol_type = other DNA
gtgaggcagcacaaatgattttaaaacgtgaaactttctatagacctgtttctcaaacagctagaacgctgcctcattatgccgcaacaagtaatttcagtgactgtaag

SEQ ID NO: 620 - DNA, 110 bp, synthetic construct
  source 1..110: mol_type = other DNA
aacagctagaacgctgcctcattatgccgcaacaagtaatttcagtgactgtaagaaaaagattgtgatgtctgtatcctgagtagtatcacaagtgtggtaataagaaa

SEQ ID NO: 621 - DNA, 110 bp, synthetic construct
  source 1..110: mol_type = other DNA
gatcaaacctgtgtcctcatggatgctggtcagatgggtctccgctgagccgtgacaggaactccagtacatcttacctttgagccggcatccctgcagcctcctaactg

SEQ ID NO: 622 - DNA, 110 bp, synthetic construct
  source 1..110: mol_type = other DNA
ctcagaaacacagacccaacatgtgtggtcgagccacacccagaataagatttcaggaagcgggtgcgatgagacaactgcttaactcgttacacggtaaccaggctcag

SEQ ID NO: 623 - DNA, 110 bp, synthetic construct
  source 1..110: mol_type = other DNA
ggaagcgggtgcgatgagacaactgcttaactcgttacacggtaaccaggctcagcgagtgtagacggatgatgcccattaacagcaggaaatagaaaggacacactggt

SEQ ID NO: 624 - DNA, 110 bp, synthetic construct
  source 1..110: mol_type = other DNA
tcacacaaagccccagaacccagagcaaaggaaatcaccgggggagccaggtcgtccttcctgagaggagtttttaaagagaaggtcactttcagccattcaacctcttg

SEQ ID NO: 625 - DNA, 110 bp, synthetic construct
  source 1..110: mol_type = other DNA
tgtgtgtgtgtgtgtgtgtgtgtgtgtgtgttttcctttagaggatgtggaccgagcatatttaattataaatcattgagacggtatgacagcaggaccccgggggctca

SEQ ID NO: 626 - DNA, 110 bp, synthetic construct
  source 1..110: mol_type = other DNA
gcatatttaattataaatcattgagacggtatgacagcaggaccccgggggctcaccttccctgcaaacagaagtgcttcgtattggctggtgtgagtctcaactttgag

SEQ ID NO: 627 - DNA, 110 bp, synthetic construct
  source 1..110: mol_type = other DNA
ttcaaatatcctcaatggaaagctaacatccccgagaaaggggcgggggagggataaattaggagcttgggattaacatacacatagtacaatatataaaacagatgacc

SEQ ID NO: 628 - DNA, 110 bp, synthetic construct
  source 1..110: mol_type = other DNA
aaattaggagcttgggattaacatacacatagtacaatatataaaacagatgaccaacaaggacctactgtattgcactggggattctactcggtgttttttaataatct

SEQ ID NO: 629 - DNA, 110 bp, synthetic construct
  source 1..110: mol_type = other DNA
acatctcattatcataaattcatttagttctggattaacagtgggctggttaagcatggacataatagtttccctcctttgggttctgtctctattttactcctaaattt

SEQ ID NO: 630 - DNA, 110 bp, synthetic construct
  source 1..110: mol_type = other DNA
atggacataatagtttccctcctttgggttctgtctctattttactcctaaatttagaggatcactgccatgaattcttcacccactggtaaagtatttgaacttacttc

SEQ ID NO: 631 - DNA, 110 bp, synthetic construct
  source 1..110: mol_type = other DNA
tagaacagttatgaaacttagaacaagtgaaccggttcatagagttactgaaaccgccctaaagaaaagctttcaataactacactttccctgttaactatgttatccaa

SEQ ID NO: 632 - DNA, 110 bp, synthetic construct
  source 1..110: mol_type = other DNA
gccctaaagaaaagctttcaataactacactttccctgttaactatgttatccaaatatctgagtttaggatacttattcaactggtcagcccagggagagcttttgctg

SEQ ID NO: 633 - DNA, 110 bp, synthetic construct
  source 1..110: mol_type = other DNA
tcatgcccacttcgtagcacttgcgtagccggcaggcctgacagctcttcctcctgttcttatcaattgtgcactggttggtagctggacacatgtagtcattatgtcct

SEQ ID NO: 634 - DNA, 110 bp, synthetic construct
  source 1..110: mol_type = other DNA
gttcttatcaattgtgcactggttggtagctggacacatgtagtcattatgtcctatcaaaagcaagaggacagaattagtattatttcagcaaatttagccggtcagaa

SEQ ID NO: 635 - DNA, 110 bp, synthetic construct
  source 1..110: mol_type = other DNA
caggccatcggttattcctgttggacctaaggcccccactgtgttgaaccataaccagactccaccctgataccatgtcctccgggtcttatgtcacctttaggctaaca

SEQ ID NO: 636 - DNA, 110 bp, synthetic construct
  source 1..110: mol_type = other DNA
cagactccaccctgataccatgtcctccgggtcttatgtcacctttaggctaacacctgccttggccgtgtctgtttggcgtaatgttgagcactgtctatacaaaggcg

SEQ ID NO: 637 - DNA, 110 bp, synthetic construct
  source 1..110: mol_type = other DNA
gcacctgcaatcttggatagtttataccttttaataaacttcctttgccccagcctaaggaactctatacagccatctgatactttgctttaattgctatcccaaacatc

SEQ ID NO: 638 - DNA, 110 bp, synthetic construct; identical to SEQ ID NO: 637
  source 1..110: mol_type = other DNA

SEQ ID NO: 639 - DNA, 110 bp, synthetic construct
  source 1..110: mol_type = other DNA
acttgcatgtttcttgcttaaaaagaaagagcttgctctccatggccattcttccccctttttcgtgagcttattctgtctcttcccaaagataatctcccaagtatttg

SEQ ID NO: 640 - DNA, 110 bp, synthetic construct
  source 1..110: mol_type = other DNA
ctgcttaaaatacaatatgcccgggcattgtccaccacggatcattttcaggagtgtggtaataatcacttgagatttactgcaactgaaattaaattatttagagcgct

SEQ ID NO: 641 - DNA, 110 bp, synthetic construct
  source 1..110: mol_type = other DNA
cttagcaagagtgtgatataaccagcacagtatcaaaggtaagcagaggccagtggggaagctgctaagaggtacccaggatccttcctaggaaggacatctttaaagaa

SEQ ID NO: 642 - DNA, 110 bp, synthetic construct
  source 1..110: mol_type = other DNA
gggaagctgctaagaggtacccaggatccttcctaggaaggacatctttaaagaacaggctctgagagccagagcaaccaccacaaaaagatgcctacaccaagcaatag

SEQ ID NO: 643 - DNA, 110 bp, synthetic construct
  source 1..110: mol_type = other DNA
gatagatgagggggaaggcgggaggcgggacagacaggatgcaaccacattcactgagctcctgtatcaccctgttccaagcggtgcaccttacacagtcaactcattga

SEQ ID NO: 644 - DNA, 110 bp, synthetic construct
  source 1..110: mol_type = other DNA
gagctcctgtatcaccctgttccaagcggtgcaccttacacagtcaactcattgaatggttataggcactctgtgaggacaacgtgcttgttattcttatcaaagtcctg

SEQ ID NO: 645 - DNA, 110 bp, synthetic construct; identical to SEQ ID NO: 643
  source 1..110: mol_type = other DNA

SEQ ID NO: 646 - DNA, 110 bp, synthetic construct; identical to SEQ ID NO: 644
  source 1..110: mol_type = other DNA

SEQ ID NO: 647 - DNA, 110 bp, synthetic construct
  source 1..110: mol_type = other DNA
tccggctgtcccctcccctcaaattccctccccagctcctctacctggcaagctcctgcttgtcctttaaggtctctctcaaatgctacctcttgtataaacatggctca

SEQ ID NO: 648 - DNA, 110 bp, synthetic construct; identical to SEQ ID NO: 647
  source 1..110: mol_type = other DNA

SEQ ID NO: 649 - DNA, 110 bp, synthetic construct
  source 1..110: mol_type = other DNA
gctagtcaagttcactaccactgagccacgaagggaactccaagagatcgaatttagatagaaccaaggagaaagtcaaggacggagctctgggcactccaacactggga

SEQ ID NO: 650 - DNA, 110 bp, synthetic construct
  source 1..110: mol_type = other DNA
agatagaaccaaggagaaagtcaaggacggagctctgggcactccaacactgggaagccaaggagatgaggaggataaaaccagagacgatgacatttcagctgggaaag

SEQ ID NO: 651 - DNA, 110 bp, synthetic construct
  source 1..110: mol_type = other DNA
ttgcctttgacgctgtgggtgttctggaacatacttcccagtcgctgaggagcttctcctataccatggcaggatcataagttaaaggctagtcctttagcttttcctgt

SEQ ID NO: 652 - DNA, 110 bp, synthetic construct
  source 1..110: mol_type = other DNA
ctcctataccatggcaggatcataagttaaaggctagtcctttagcttttcctgtaatcaatctttacagtttaccaacggtctagagcttagagaatgactttaacttc

SEQ ID NO: 653 - DNA, 110 bp, synthetic construct
  source 1..110: mol_type = other DNA
acagaggtatacatgtatactggagccagagcttttgttcggctcttccaaatccataaaaacactgatactgcaaagtagctatgcttatggcctctgagtccaaatcc

SEQ ID NO: 654 - DNA, 110 bp, synthetic construct
  source 1..110: mol_type = other DNA
tgtgaaggcaggctttagcgcttggtggttagaatttcctagaagagaatggaagcatccaggtctgtgtatagaaattcctgaaagattatataattaggttcttcaaa

SEQ ID NO: 655 - DNA, 110 bp, synthetic construct
  source 1..110: mol_type = other DNA
catccaggtctgtgtatagaaattcctgaaagattatataattaggttcttcaaaaccgactggttcagctggcagggaatagtactaattaaagttgaactaaaatagc

SEQ ID NO: 656 - DNA, 110 bp, synthetic construct
  source 1..110: mol_type = other DNA
gtttcatccctagacccactcacctttctctgaagtacctttgaaactttgggtagttagcttggcgccagggcatcatagtgaactgctggtcagctggattctttacc

SEQ ID NO: 657 - DNA, 110 bp, synthetic construct
  source 1..110: mol_type = other DNA
atgagatattgagagatttccaccaatttcatcctaaaaaagcaaaaaaacaaacaaaaaaacccactacagtagtccccatctattctcagaggatatgttctaagaac

SEQ ID NO: 658 - DNA, 110 bp, synthetic construct
  source 1..110: mol_type = other DNA
aaaaaaacccactacagtagtccccatctattctcagaggatatgttctaagaacttgaaaccacagatagtactgaaccccatatatcctgtgttttttcctatacata

SEQ ID NO: 659 - DNA, 110 bp, synthetic construct
  source 1..110: mol_type = other DNA
acacagactcaaagcaattacagagggtaaggctggctggccacaggtcccatagttgagccagggtgagaaggccaggacttactgccaactacttctaggggttttcc

SEQ ID NO: 660 - DNA, 110 bp, synthetic construct
  source 1..110: mol_type = other DNA
ttgagccagggtgagaaggccaggacttactgccaactacttctaggggttttccatgacacgaccaatcattgcaggaccagttactgcgcacgatgacaaaatgcctt

SEQ ID NO: 661 - DNA, 110 bp, synthetic construct
  source 1..110: mol_type = other DNA
aaaatggaacactatctgattccatttctatgaaatgtccagaataggcaaagcttcagagattgaaaggcgggcaattagcagtaaccagggactggcgggaaggggaa

SEQ ID NO: 662 - DNA, 110 bp, synthetic construct
  source 1..110: mol_type = other DNA
tcagagattgaaaggcgggcaattagcagtaaccagggactggcgggaaggggaaataaggaatgacggttaatgggtacagagttgctttcagggttcagaacgtgaga

SEQ ID NO: 663 - DNA, 110 bp, synthetic construct
  source 1..110: mol_type = other DNA
actggaacaacacacagaagctaatgtgcacacgccatctctctcggtaggttttggacaagcaatttcattctagagtctccattcacttatgctccaacaggagactc

SEQ ID NO: 664 - DNA, 110 bp, synthetic construct
  source 1..110: mol_type = other DNA
ggtagtggaggtgagcgggctgcccttcattctgaggcagagccagggtggccgacttgcagctgagaatggggatttgagccctggagggttggttcattttctcccgc

SEQ ID NO: 665 - DNA, 110 bp, synthetic construct
  source 1..110: mol_type = other DNA
caccctaacttagttatatctgcaaagagcttacttccaaataaggtcaccaagaggagttcccgttgtggctcagcaagttatgaacccaactaatgtccatgaggatg

SEQ ID NO: 666 - DNA, 110 bp, synthetic construct
  source 1..110: mol_type = other DNA
gatgagcgactgcctcaagtcagacggagccctcatttcaggggccagagtacccgtgaccactatgacctcatccaggtgatggtttccagctggttcatatgaccctg

SEQ ID NO: 667 - DNA, 110 bp, synthetic construct
  source 1..110: mol_type = other DNA
gtgaccactatgacctcatccaggtgatggtttccagctggttcatatgaccctgttgattcaggctggtaccccaaagctatttcccatctcgtgagaccacaagctcg

SEQ ID NO: 668 - DNA, 110 bp, synthetic construct
  source 1..110: mol_type = other DNA
gttagtgactccagaaccttgcatttatagcacagacttcattattgaacgaatcctagacccaatgttcagctgccctgtggacgtcttcacttgaacttaacaacaga

SEQ ID NO: 669 - DNA, 110 bp, synthetic construct
  source 1..110: mol_type = other DNA
tatttacagcaagatggaaaacactgccagtgcctggaagacaggtggcagaggtcttagatggctagaagctgagtagcccgcagagtgctgggtgcttctaccgaaac

SEQ ID NO: 670 - DNA, 110 bp, synthetic construct
  source 1..110: mol_type = other DNA
cttagatggctagaagctgagtagcccgcagagtgctgggtgcttctaccgaaacatccagaggaagggaattgtactagtaaggtgtctacaccaatttgcgatcaact

SEQ ID NO: 671 - DNA, 110 bp, synthetic construct
  source 1..110: mol_type = other DNA
agcccatgcaaagctctcagcacgggcctggcctatagttaaggtgcaagaaatgcgaggaaccatcatcaccgtggtggatcttacctgcacatcatagaggaactgga

SEQ ID NO: 672 - DNA, 110 bp, synthetic construct
  source 1..110: mol_type = other DNA
cttcttgtgtgagcacagaagctggaagatggtgattctatagcatggcttaattcatgcttcgaaaccccaaatctgctcagaaaggaagtgtcggtgggtctgctttg

SEQ ID NO: 673 - DNA, 110 bp, synthetic construct
  source 1..110: mol_type = other DNA
ccccaagtggaatttattttgatttgtacaaagaccttggtacacaatttggcatcgtccaactgagtatttttttcagctctgtgtaagcagaatttactcatttattt

SEQ ID NO: 674 - DNA, 110 bp, synthetic construct
  source 1..110: mol_type = other DNA
tatctaaatatccaggacttaaggaaataaaatatatcggccatgtcagctttaaagagaaccttcttagatatgcagaaaccataatgttacccaatttctaggttctc

SEQ ID NO: 675 - DNA, 110 bp, synthetic construct
  source 1..110: mol_type = other DNA
agagaaccttcttagatatgcagaaaccataatgttacccaatttctaggttctctagaataaagccatgtaatcatcattctcaaagtcaggctgaactgtttttttgt

SEQ ID NO: 676 - DNA, 110 bp, synthetic construct
  source 1..110: mol_type = other DNA
tctagatgtttctcctttgaacatttgataaatggtttaggttcttttcccagaaaagggattttcaatttatttcgtctaaggggtacacagattctggattaagaaaa

SEQ ID NO: 677 - DNA, 110 bp, synthetic construct
  source 1..110: mol_type = other DNA
aagggattttcaatttatttcgtctaaggggtacacagattctggattaagaaaatctggtcgaatcctaaagcactgcagtggattcagtgaccagctgcaccctacag

SEQ ID NO: 678 - DNA, 110 bp, synthetic construct
  source 1..110: mol_type = other DNA
agaggtgttttggtttccatgataaaggaagccaggggaatcaacatccaatgctagaaaaatctctttgtagctccttctctcccacaaaactgacgtccacaatgacc

SEQ ID NO: 679 - DNA, 110 bp, synthetic construct
  source 1..110: mol_type = other DNA
cttgtttttgctcagcaaaatctcttttttaaaagacagtgagattacacccacgtctgtgcctcttttggtggaaaagatactctcgctggaatgcagctcttgtaaat

SEQ ID NO: 680 - DNA, 110 bp, synthetic construct
  source 1..110: mol_type = other DNA
ttaaaagaaaatactctagttaatacaggacttaagatcaattgcagctccccagctttccatttaaaacacaatgattgctttaatagccgacttaactctaaagtctt

SEQ ID NO: 681 - DNA, 110 bp, synthetic construct
  source 1..110: mol_type = other DNA
acagagcctctgcccaagttggcaggctatggagggctgcatctcggttgaccgagtggatggtagctacgttgtaagtgccgcaatacagttatcaacactttcctatc

SEQ ID NO: 682 - DNA, 110 bp, synthetic construct
  source 1..110: mol_type = other DNA
gtggatggtagctacgttgtaagtgccgcaatacagttatcaacactttcctatcaccggagcaacctgtgttacccttacaatgccctgaatgcattcaacgtctgagc

SEQ ID NO: 683 - DNA, 110 bp, synthetic construct
  source 1..110: mol_type = other DNA
tgcacagcatcatttaaaagcctaaataaataattacgtcattagcaaaatatcaacttagttaaaaaagggaaattcaaatgaagtcatcctagaagggcatgcaaact

SEQ ID NO: 684 - DNA, 110 bp, synthetic construct; identical to SEQ ID NO: 683
  source 1..110: mol_type = other DNA

SEQ ID NO: 685 - DNA, 110 bp, synthetic construct
  source 1..110: mol_type = other DNA
attagtaaatacgtgcagagcctctggagcactgcctgcactggtcagtggcagctgtcattcccacggtccccgcccccactgccacacccatcagtccagaggccact

SEQ ID NO: 686 - DNA, 110 bp, synthetic construct
  source 1..110: mol_type = other DNA
tgtcattcccacggtccccgcccccactgccacacccatcagtccagaggccactgctcctcagcacaacaaggaactacaagacaagaggcaaatgggaacccgaggta

SEQ ID NO: 687 - DNA, 110 bp, synthetic construct
  source 1..110: mol_type = other DNA
ctgtctttaaacactggcggagacagggagaaatacactggtttctccattctgtcacccttcaatccaataccttccattggatgaatccagctgatggggaacttgga

SEQ ID NO: 688 - DNA, 110 bp, synthetic construct
  source 1..110: mol_type = other DNA
cacccttcaatccaataccttccattggatgaatccagctgatggggaacttggaaccgtcagtttgcaggtgtgtcaccaccaccactcctgcagtcctgagcaggaaa

SEQ ID NO: 689 - DNA, 110 bp, synthetic construct
  source 1..110: mol_type = other DNA
gaaatatggagtcctagggctgggttagttaagaagatgagtatactcagaatgttagaaatcagtgtagcaaaggggacgagtagcaaggggactcaggtagggggcct

SEQ ID NO: 690 - DNA, 110 bp, synthetic construct
  source 1..110: mol_type = other DNA
tagaaatcagtgtagcaaaggggacgagtagcaaggggactcaggtagggggcctgagtcaagagcatcaacaaaatactcaaagatatgtgcactcctaggtttactgc

SEQ ID NO: 691 - DNA, 110 bp, synthetic construct
  source 1..110: mol_type = other DNA
gagtttgtatttgcttttcattgctttgtttttgttttttgaaacttcggcaaggaaatgaggagctgagggtaaaagcttgctcctaacctgtccccccctcatcaaca

SEQ ID NO: 692 - DNA, 110 bp, synthetic construct; identical to SEQ ID NO: 691
  source 1..110: mol_type = other DNA

SEQ ID NO: 693 - DNA, 110 bp, synthetic construct
  source 1..110: mol_type = other DNA
tgtgcttatgaatatttaatgtgtgctttttagtgggttggtttttatcatctttcttatttaaaaataattctgacctcattctccctctcccccccaaaaaaggtaaa

SEQ ID NO: 694 - DNA, 110 bp, synthetic construct
  source 1..110: mol_type = other DNA
cctgtgctctcaggtcagatgctcgccttctgaagaatcttcaggaaccacgcctcccatctccgctgggcatgtgtgtctggcccacactagctcaggcaccacgggag

SEQ ID NO: 695 - DNA, 110 bp, synthetic construct
  source 1..110: mol_type = other DNA
cccatctccgctgggcatgtgtgtctggcccacactagctcaggcaccacgggagagcctgctggctgtcagtgtgaactcaccccagactttctttctggaggccaaac

SEQ ID NO: 696 - DNA, 110 bp, synthetic construct
  source 1..110: mol_type = other DNA
gtcagattcgtttctgctgtgccactttgcaccacgaaggagcaccccacccccgtgtttagatacagatatatacacagaagaaatttagtagctgctcttagataaag

SEQ ID NO: 697 - DNA, 110 bp, synthetic construct
  source 1..110: mol_type = other DNA
cccacccccgtgtttagatacagatatatacacagaagaaatttagtagctgctcttagataaaggactcaccaatctagtgcatttgtgttcttcactgaaatgaaata

SEQ ID NO: 698 - DNA, 110 bp, synthetic construct
  source 1..110: mol_type = other DNA
agggcatcatttcacatatctgttccgcaatctcctcttcaatccaaacttcctctagacacttgagttggggaaagcttggattctgcatcctcttttctgaccagtta

SEQ ID NO: 699 - DNA, 110 bp, synthetic construct
  source 1..110: mol_type = other DNA
gtcgccctcccctatgaaagcagcacggcccccacccctctccctactaagagtgtatttaagtctcaattctaagccacctgtggaattacacaccccctgggaattac

SEQ ID NO: 700 - DNA, 110 bp, synthetic construct
  source 1..110: mol_type = other DNA
ttcaaagggcgtgttgattaagcatttattataatggaagtttcagcaagtccgaaggacaaaaccacagtacccccaaataaatagctgaggctagcaaccaggagtcg

SEQ ID NO: 701 - DNA, 110 bp, synthetic construct
  source 1..110: mol_type = other DNA
aggacaaaaccacagtacccccaaataaatagctgaggctagcaaccaggagtcggcaaggtctctttaatgtgtacgtgatccggtggcctaaactaagccattttaga

SEQ ID NO: 702 - DNA, 110 bp, synthetic construct
  source 1..110: mol_type = other DNA
cagatctaggtctggtcaagtactgccaagctgaataagacagtcttcttttattcaaactgacaatcaccaacattcatcagcacctctgtgccaggcaccgtgcctat

SEQ ID NO: 703 - DNA, 110 bp, synthetic construct
  source 1..110: mol_type = other DNA
gggactgaatgagcccgtctccctctggagagctggcactcatccaagttgctagcaccagctttacccaactggaccaacccggagaatttcaatcaaaacaaggcagc

SEQ ID NO: 704 - DNA, 110 bp, synthetic construct
  source 1..110: mol_type = other DNA
caccagctttacccaactggaccaacccggagaatttcaatcaaaacaaggcagctaaaatattaatgaaggagcaactatataaaatctcggcctcattcgggcgctgg

SEQ ID NO: 705 - DNA, 110 bp, synthetic construct
  source 1..110: mol_type = other DNA
tctgaggaggcacagagaggacttctgggcagaaggggacatgccaggacccttggcaacagaaagctcacggtcattcattcgacggatgtttcttgagtacccactgc

SEQ ID NO: 706 - DNA, 110 bp, synthetic construct
  source 1..110: mol_type = other DNA
gcaacagaaagctcacggtcattcattcgacggatgtttcttgagtacccactgcgtgcagggggtggtcccatcactgagcaagaatggcaacttcctgccttcgtgga

SEQ ID NO: 707 - DNA, 110 bp, synthetic construct
  source 1..110: mol_type = other DNA
cacctgtatcataaactttttttactttctgccagcggcttctttttttagctgggccgataactgctgagctcaggcaggaccaggtattttgtcatctcccctcccct

SEQ ID NO: 708 - DNA, 110 bp, synthetic construct
  source 1..110: mol_type = other DNA
gccgataactgctgagctcaggcaggaccaggtattttgtcatctcccctcccctgcacttcaatccataggggtggtccctctcctgagcatttgtcagggctgctgtc

SEQ ID NO: 709 - DNA, 110 bp, synthetic construct
  source 1..110: mol_type = other DNA
ataatgaggtgcggggaaggcattcgggctctgcctgttttgtctgaaactctgctgaccagagtggcctgtttggtggcctctcaatcattggttgtacctcggctttg

SEQ ID NO: 710 - DNA, 110 bp, synthetic construct
  source 1..110: mol_type = other DNA
atgctaagtgagaagctagggctgcacaggtaggtctggaagggctctgaacacctcctgaatcaaggaagtgacccaatcagattagtattccagaagtcattccagct

SEQ ID NO: 711 - DNA, 110 bp, synthetic construct
  source 1..110: mol_type = other DNA
cagcataatataagcagacttaaaaataagcgcattattgtttgtgacctgtgcctgagttttacaaggcccatcagctagcagagtaaatacggataagttaaattttc

SEQ ID NO: 712 - DNA, 110 bp, synthetic construct
  source 1..110: mol_type = other DNA
cctaggtcactgctgtggcttaggtcactgctgtggcacagtccaatccctagtctgggaattttggcatgccccagggctgcccaaaataaagaaaaaaaaagactttg

SEQ ID NO: 713 - DNA, 110 bp, synthetic construct
  source 1..110: mol_type = other DNA
tctaaagaatccttagttcctcagagacatggcccaccactaggagaaagtgttgcctatcgttctgaaagtcccaactcacagacagatgtaggaagacctttgtcagg

SEQ ID NO: 714 - DNA, 110 bp, synthetic construct
  source 1..110: mol_type = other DNA
tattcacaaactgggaaaagcacttttaagatagttattactacaactgctccgataattccaaccaccatgacattcaaaaacataaaaaatactgggaaaacactgct

SEQ ID NO: 715 - DNA, 110 bp, synthetic construct
  source 1..110: mol_type = other DNA
atatcgagagggcttttgtgggagaaagattaatcagaggaaactctccagtttaaggaaaagctcctgctgtggtctttgaagatgttttaattttatgaaatcaaagg

SEQ ID NO: 716 - DNA, 110 bp, synthetic construct
  source 1..110: mol_type = other DNA
ctataaggcccactaggaccccaaaggtttgtctggacactccccagctgtttttgtccagctgcagctgggagccagaggtgggtcacaagatgaattagtgggtcttc

SEQ ID NO: 717 - DNA, 110 bp, synthetic construct
  source 1..110: mol_type = other DNA
ctaagaagagaaactgaaaccaagctaggaaagaccactctcaaagcaaccagctgacacttagagaaggggcgtgaccggcagaccgcatgacaggcaggccagacggg

SEQ ID NO: 718 - DNA, 110 bp, synthetic construct
  source 1..110: mol_type = other DNA
cagatgtgaaaaaaaaaaattctttaagtggcttgatgtcagttaagcttaatcattgagttaatttaatgtaatctcaatgtcaacactgtgagtcaacatccgaaaaa

SEQ ID NO: 719 - DNA, 110 bp, synthetic construct
  source 1..110: mol_type = other DNA
ttcatccttccagacccaattcacatatagctcttctctgtagccttcccttataggccaagaagaaataattgttctcgtctctgtccaaatgcctaagtctatttgtc

SEQ ID NO: 720 - DNA, 110 bp, synthetic construct
  source 1..110: mol_type = other DNA
gcctttcttcaggttttctgggttgtctacaaaaagcacacattttctttgttggcaaaagcaccgggccagggcagggttttttcactttgcatcgttgtcagtttcat

SEQ ID NO: 721 - DNA, 110 bp, synthetic construct
  source 1..110: mol_type = other DNA
catttctcaaaagggaatgctgggtgaataactgccgagattttaggcaagttcctttttctttttttcttcttacagctgtacttgtgcaatatggaagttccctgggc

SEQ ID NO: 722 - DNA, 110 bp, synthetic construct
  source 1..110: mol_type = other DNA
cctactcttatcatcttttttcgagtgtttcaaatattcaatgtggttttcctactttatttttatgggtgggttaacaaacctaggaaggagctcctgttgtggctcag

SEQ ID NO: 723 - DNA, 110 bp, synthetic construct
  source 1..110: mol_type = other DNA
gttttcctactttatttttatgggtgggttaacaaacctaggaaggagctcctgttgtggctcagtgggaatgaaactgactagtatccacgaggacacgggttcgatcc

SEQ ID NO: 724 - DNA, 110 bp, synthetic construct
  source 1..110: mol_type = other DNA
tgagacaaagagattgttgttccatagacatgtcttcaactagaagcctgggctagagcagccgtgttggggccatgagtaccgggagtaaacagagaaagagccagtct

SEQ ID NO: 725 - DNA, 110 bp, synthetic construct
  source 1..110: mol_type = other DNA
gagcagccgtgttggggccatgagtaccgggagtaaacagagaaagagccagtctgtcaagagaagccagaggatggagcaaaggcacagagggaagtagagatgagaaa

SEQ ID NO: 726 - DNA, 110 bp, synthetic construct
  source 1..110: mol_type = other DNA
catacttagaataacgtgaaaagaacccagcagcaggccttccaaagttaacatggttgaaaacaataaaaacaccaaactccattttcaaatcttgctagataagccag

SEQ ID NO: 727 - DNA, 110 bp, synthetic construct
  source 1..110: mol_type = other DNA
gatgttctctctggaatgttaaacatggtcagattttgataaatccttgaaggactttgaatgaagcagctgttcatgcaagtcaaacatgcagataagtgagatatttc

SEQ ID NO: 728 - DNA, 110 bp, synthetic construct
  source 1..110: mol_type = other DNA
gttcaaataattgcgtcaagatggaacaaggagaccttttgaaagctgttggcgcatcatcacgtgtgtacccagacaatgcattagaagtctggccccaagattaggcc

SEQ ID NO: 729 - DNA, 110 bp, synthetic construct
  source 1..110: mol_type = other DNA
ctgactctatcacctcatcgttgccgaggccatgggctgctctcagtagaagacggaacgtggcaaagagattatggtgggcccatttctgcaagctgcgggactcctct

SEQ ID NO: 730 - DNA, 110 bp, synthetic construct
  source 1..110: mol_type = other DNA
gaacgtggcaaagagattatggtgggcccatttctgcaagctgcgggactcctctgctgagtgacagtggctcgaacattctccactggcttggccaaaactttctcaga

SEQ ID NO: 731 - DNA, 110 bp, synthetic construct
  source 1..110: mol_type = other DNA
gtagatgcaaactattacatatagaatggataagcaacgaggtcctgctgtgaactatatccaatctcttaggacaacacatgatagaagatagtatgagaaaaagaatg

SEQ ID NO: 732 - DNA, 110 bp, synthetic construct; identical to SEQ ID NO: 731
  source 1..110: mol_type = other DNA

SEQ ID NO: 733 - DNA, 110 bp, synthetic construct
  source 1..110: mol_type = other DNA
acaggcgtagagacaggaggatggccagcttggcaagagcaaggtcttcaggcggactcacagagtgtccccaggatggcgttcaagaaggcaagtttccataaagtgga

SEQ ID NO: 734 - DNA, 110 bp, synthetic construct
  source 1..110: mol_type = other DNA
tttggaaagtttagctttatagagctaagctatttcatctgggaagtgtcctactttctcacctactttgggagaaacttcttgcctccccaaaggattacctgtgcacc

SEQ ID NO: 735 - DNA, 110 bp, synthetic construct
  source 1..110: mol_type = other DNA
ttctcacctactttgggagaaacttcttgcctccccaaaggattacctgtgcacccctcagactgctcaccttctcatcctttttcttttcttttcttttttcttttttt

SEQ ID NO: 736 - DNA, 110 bp, synthetic construct
  source 1..110: mol_type = other DNA
gtatccccatcttagggaatcagagcgcaaacaaaatccactgttctaaaaacagccactgctctctcatcttggctctgagacaagttcaaagcaagttatatagcatg

SEQ ID NO: 737 - DNA, 110 bp, synthetic construct
  source 1..110: mol_type = other DNA
atccctatagagggaaattttctgaaagctactttgcttaatttacaatgatgccaaacaaatagataggcatttatggacaattaatcttggtactattgacaaggcaa

SEQ ID NO: 738 - DNA, 110 bp, synthetic construct
  source 1..110: mol_type = other DNA
gccactttggcataaggattattttgagctggagacaactgagaaacagaagatacaggaggagttctctgccctctccctttctacctaaaagcaaggcataaatttcc

SEQ ID NO: 739 - DNA, 110 bp, synthetic construct
  source 1..110: mol_type = other DNA
tgagtggacggggcaagcaaggagctttataagaaatatcaggttaatgttactcataagttaacagcttacgttttaaggaatgtaaattagcaggtttatttccacta

SEQ ID NO: 740 - DNA, 110 bp, synthetic construct
  source 1..110: mol_type = other DNA
aatgttactcataagttaacagcttacgttttaaggaatgtaaattagcaggtttatttccactacgttattttgcaaatgatatcatcaccacatctcctgtaaataac

SEQ ID NO: 741 - DNA, 110 bp, synthetic construct
  source 1..110: mol_type = other DNA
gcaagaacagaagcatgctggctgagaaaaccccttccttctgcagtaggtcccctctggcgccctctactgacaaggttgagcatcatgccagctttaaaggagaaaag

SEQ ID NO: 742 - DNA, 110 bp, synthetic construct
  source 1..110: mol_type = other DNA
tctggcgccctctactgacaaggttgagcatcatgccagctttaaaggagaaaagcttaggtagcccagttccatggctgagcgagccacgagaggtgaatttagagttg

SEQ ID NO: 743 - DNA, 110 bp, synthetic construct
  source 1..110: mol_type = other DNA
tttaagcatttctgaaaagtattctcaaatcagcaatatatttgcctgtgaaagtcacacaatgtcaagggcattaagcttcaggagaagaaactaatcggaggtttatg

SEQ ID NO: 744 - DNA, 110 bp, synthetic construct
  source 1..110: mol_type = other DNA
gttcaatgcctggcctcatgcagtgggttaaggacccagtgtttccatgagctacagaaggggtcggatcccctgttgctgtggcttcaggctggcagctgaagctcaga

SEQ ID NO: 745 - DNA, 110 bp, synthetic construct
  source 1..110: mol_type = other DNA
ggttaaggacccagtgtttccatgagctacagaaggggtcggatcccctgttgctgtggcttcaggctggcagctgaagctcagattctacccctagcctgggaacttcc

SEQ ID NO: 746 - DNA, 110 bp, synthetic construct
  source 1..110: mol_type = other DNA
gtgaatacactgaaaccagggaacagcacacttaaaagagcaaggtttatggtaagtgagttatgagctcagttctaaaaacctcattttagggagttcccgtcgtggcg

SEQ ID NO: 747 - DNA, 110 bp, synthetic construct
  source 1..110: mol_type = other DNA
attatactcctcaaggcaccaacggtagtatttttaagcacagcaatctcgggtgttctatttcagtagctcgtgtgacataaagagcctcactttgatccttcatgcaa

SEQ ID NO: 748 - DNA, 110 bp, synthetic construct
  source 1..110: mol_type = other DNA
atttgacagtgtggtgtattgtaagctcttttagggcagggctcccagcttcctctccagttgccttggagggttgtgctaaaaatgtggcaaatggccagttcgctggg

SEQ ID NO: 749 - DNA, 110 bp, synthetic construct
  source 1..110: mol_type = other DNA
tccagttgccttggagggttgtgctaaaaatgtggcaaatggccagttcgctggggcgttcaaggatgactaagaggcactgtcaccacatatccttaaaaacaccaagg

SEQ ID NO: 750 - DNA, 110 bp, synthetic construct
  source 1..110: mol_type = other DNA
ctgagctacaacaggaactccttctcaccttttaaaaagctctttctgatatttcctttcaagtgattttgcctgaaacaaacatggggaaattatgcatcacttgatct

SEQ ID NO: 751 - DNA, 110 bp, synthetic construct
  source 1..110: mol_type = other DNA
agatgatgtcccttgcagatgatgatttaacacggcatttgtcttcattgcccaatgagaagaggcagctgaggtgcttgttgaaaatgcagatgccggccctttcctcg

SEQ ID NO: 752 - DNA, 110 bp, synthetic construct
  source 1..110: mol_type = other DNA
gaaaggccctgtgactaaagctgggctgtcctgaagggtagggagatattttccggatcaaatgtgcagaggaaatgtgggcctgaggacaggaaactagaatttagtag

SEQ ID NO: 753 - DNA, 110 bp, synthetic construct
  source 1..110: mol_type = other DNA
gtaagcacacggggcttgctatccttccccatctcacacccaatgctctaaaatcccggtgctggtaaagtgaaatcctagattgtccagagatggatgatgtcaactcc

SEQ ID NO: 754 - DNA, 110 bp, synthetic construct
  source 1..110: mol_type = other DNA
taagcacgttatcagaaagcaatggcaggacgccatcctgcccctcagctaatcgcggtgggagctagggtgccagtcagcagacaggatgcccagggctcagcccaggc

SEQ ID NO: 755 - DNA, 110 bp, synthetic construct
  source 1..110: mol_type = other DNA
tcccctcctaggttgctcattgttctgaggcagggattttgtctcatttatttcccaatttctagagcttttctgaaacatagcaggtacttaagaccttcttgatgaat

SEQ ID NO: 756 - DNA, 110 bp, synthetic construct
  source 1..110: mol_type = other DNA
atattgcttgataaaaaaattcgcccatcaatggttctcctacttgaacggccaaggaatcacagagatccttgtttaaaatgtagattgctgagcatcaccaccacatt

SEQ ID NO: 757 - DNA, 110 bp, synthetic construct
  source 1..110: mol_type = other DNA
ggaatcacagagatccttgtttaaaatgtagattgctgagcatcaccaccacattggtgaagtggacgaggatcaaaaatgcatttttaagaggtttcctcaccccaaca

SEQ ID NO: 758 - DNA, 110 bp, synthetic construct
  source 1..110: mol_type = other DNA
actggatcctcaacccactgcaccacaagagaactccctattgagcattcttgatttgtacactgacattgtataaatgaatctctcccaaaacatagttaattgcgcag

SEQ ID NO: 759 - DNA, 110 bp, synthetic construct
  source 1..110: mol_type = other DNA
ttgtacactgacattgtataaatgaatctctcccaaaacatagttaattgcgcagttctttaatatgcaaggtaccatctagggtcaccctaaccaagcaagaaaaataa

SEQ ID NO: 760 - DNA, 110 bp, synthetic construct
  source 1..110: mol_type = other DNA
ggagatggtagccaccaatgcttctgctaaaatggttcactgtaggatttgactatgacattgttttggctcacatggcagacaagctagtgcttaatgataggcaacta

SEQ ID NO: 761 - DNA, 110 bp, synthetic construct
  source 1..110: mol_type = other DNA
ggttttatgtcttatgcttgagtctttaatccatttttagttaatttttgtgagttgtataagtgaagggttcaatttcattcttttgcatatgtttatcctgttccccc

SEQ ID NO: 762 - DNA, 110 bp, synthetic construct
  source 1..110: mol_type = other DNA
tgtataagtgaagggttcaatttcattcttttgcatatgtttatcctgttcccccagcaccatttatcaaagagactatcctttccccattgagtattcttgactccttt

SEQ ID NO: 763 - DNA, 110 bp, synthetic construct
  source 1..110: mol_type = other DNA
ttcttttacagctattactcatactaatagttaccgctttttcacaatgtaaccactatgcaggattctacctaagtacctgctaaactctttctggcccactcactata

SEQ ID NO: 764 - DNA, 110 bp, synthetic construct
  source 1..110: mol_type = other DNA
acttaataagacaacgtgtaaatggcaagagctcattgggcgagagtagagtaaaaagagactccacaagcccccggcatctcttccctcatgccagtcgtgactgttgt

SEQ ID NO: 765 - DNA, 110 bp, synthetic construct
  source 1..110: mol_type = other DNA
aagagactccacaagcccccggcatctcttccctcatgccagtcgtgactgttgtagattcagacccttttattctctcctatattaacacatcacctctaaacccgcag

SEQ ID NO: 766 - DNA, 110 bp, synthetic construct
  source 1..110: mol_type = other DNA
atcaaacgtaaacagaacacaacattcagctactatgacaatgagcatacacattgcatagagtgattattaagtaagagatgataatgtcattgccttagaccctacca

SEQ ID NO: 767 - DNA, 110 bp, synthetic construct
  source 1..110: mol_type = other DNA
tagcagtaatatatgagagaaactgcaaaaccagttagcatgccctccatatgaggaagattttcaagtatagctctttttaagacgcctgattaggaggctgtgattgc

SEQ ID NO: 768 - DNA, 110 bp, synthetic construct
  source 1..110: mol_type = other DNA
ccagatggcctaaaccacagaaattgtctcatcatgttccttttgaacttgtttgcattggcattgcccagcattaattgccttgcagttctggagccttgacttctgag

SEQ ID NO: 769 - DNA, 110 bp, synthetic construct
  source 1..110: mol_type = other DNA
aacatgtagcatcttggccacagcacagaaagttctcttttaccctccaatcccaggttatcactttacagcttctgaagcatagatcagtcttgcctgttctaatcttt

SEQ ID NO: 770 - DNA, 110 bp, synthetic construct
  source 1..110: mol_type = other DNA
ggttatcactttacagcttctgaagcatagatcagtcttgcctgttctaatctttttggaatggggtcataagcacgtctgttgtgtgtcaggcttatttcactcaacgt

SEQ ID NO: 771 - DNA, 110 bp, synthetic construct; identical to SEQ ID NO: 769
  source 1..110: mol_type = other DNA

SEQ ID NO: 772 - DNA, 110 bp, synthetic construct; identical to SEQ ID NO: 770
  source 1..110: mol_type = other DNA

SEQ ID NO: 773 - DNA, 110 bp, synthetic construct
  source 1..110: mol_type = other DNA
tgctactgcagtcccgcgtgcatatgaccctggggcctgaagggccagctagatggtctaaggtcacacgccctgcaaatggtgaagctgggctctcaaactaggtcatc

SEQ ID NO: 774 - DNA, 110 bp, synthetic construct
  source 1..110: mol_type = other DNA
gtctaaggtcacacgccctgcaaatggtgaagctgggctctcaaactaggtcatctgtctccagctcccagtcctttaaatcgtcatgcataatggccatgctagagttg

SEQ ID NO: 775 - DNA, 110 bp, synthetic construct
  source 1..110: mol_type = other DNA
catcatacttatcacaggcaaagcactgtaattccctattgattggtctgttcacacctaagttcttgaaggcactgaactgagccatattcttcaaggtaattccacca

SEQ ID NO: 776 - DNA, 110 bp, synthetic construct
  source 1..110: mol_type = other DNA
atgttccccatcctacctcttcctcccatctcctttgccataccccctctttggtcaagagatccctaacctcaagtcctgacttgccttcttggtcagcaattaatttt

SEQ ID NO: 777 - DNA, 110 bp, synthetic construct
  source 1..110: mol_type = other DNA
gagagtacacacacgtccattgattttataatctatggcactcccattaatactagtgtaagctcatactaatatttgcttccctaaatgagatacacaatatagttaaa

SEQ ID NO: 778 - DNA, 110 bp, synthetic construct
  source 1..110: mol_type = other DNA
gagagatccttaaccagcaaattgagggaataaaactgtttttttaaatcagcagcatactaaaaagtacttctgtagctatcgctaatgttttgcctgctttaaaatat

SEQ ID NO: 779 - DNA, 110 bp, synthetic construct
  source 1..110: mol_type = other DNA
catactaaaaagtacttctgtagctatcgctaatgttttgcctgctttaaaatatgaatgcccccctttaaaaaattagtactttctgaattactgcaatgtagaaaatg

SEQ ID NO: 780 - DNA, 110 bp, synthetic construct
  source 1..110: mol_type = other DNA
cttaaccgctatggtatactgcttctagtgattgagaaaatctcatcttaagacaaccagtcacatatggaaagaattaaacatgaccattagtatacgctgacagctaa

SEQ ID NO: 781 - DNA, 110 bp, synthetic construct
  source 1..110: mol_type = other DNA
attctggcttgtttcctttatgtgaaaagttctcctgttcccagaaattcaaatgcatcattctatacatagctaaaattttgtatcctcaatgaagcttttcttagtag

SEQ ID NO: 782 - DNA, 110 bp, synthetic construct
  source 1..110: mol_type = other DNA
aatgagtaacatttcagaattgagtctatgtgtggacaaaaagaagagagaatttggaatgagacataagattctggttttgacagtagagtgcccagctttatccatta

SEQ ID NO: 783 - DNA, 110 bp, synthetic construct
  source 1..110: mol_type = other DNA
ggaatgagacataagattctggttttgacagtagagtgcccagctttatccattaaaatgtgtttggctgcccatactaggaaatctaggtctataattaaaacctgtgg

SEQ ID NO: 784 - DNA, 110 bp, synthetic construct
  source 1..110: mol_type = other DNA
gatttttttaattatcagtagttactgtttacatgtttattgctcattggtgtgccgctgctagctgtagcacagtccatttagctatttgtctgttggtgaacatttga

SEQ ID NO: 785 - DNA, 110 bp, synthetic construct
  source 1..110: mol_type = other DNA
aagagcagatatagtcatgagaggggttataattgcttaatgaggtttaggggattatcttctggaaatgtgaaagatgtggccttgatcagcctccacatatctctcat

SEQ ID NO: 786 - DNA, 110 bp, synthetic construct
  source 1..110: mol_type = other DNA
aaggtggctgttatgcagcatatcactatatcctttggcaggcaagcttatatgtctgttcctttattatccttctttaaatgtcaaaatattcatgagtacagtcttct

SEQ ID NO: 787 - DNA, 110 bp, synthetic construct
  source 1..110: mol_type = other DNA
gattcatgagaaatactgatagtagaccatgtgctaaaagatgtccccaaactgggagtgaaaagctctgaggacaggcttacggagatgggtcaggtggctactgttga

SEQ ID NO: 788 - DNA, 110 bp, synthetic construct
  source 1..110: mol_type = other DNA
gagtgaaaagctctgaggacaggcttacggagatgggtcaggtggctactgttgagggggaaggacccaaaagtgtatattgtgggtactggtctagttaaatcctctct

SEQ ID NO: 789 - DNA, 110 bp, synthetic construct
  source 1..110: mol_type = other DNA
aatcccaatcaaccaaggctatcaatcttccttcctcgatatcttcaaatcctatcttgaattcccattgtgggttaatgatcctgttgtctctgtcattcatttgatcc

SEQ ID NO: 790 - DNA, 110 bp, synthetic construct
  source 1..110: mol_type = other DNA
gtctatctatctatctgacttcaatgctggtcttctcatttattgtgttattactgcatttgtttcccagtccttcaacataattttgacagatggtatatagtaattgt

SEQ ID NO: 791 - DNA, 110 bp, synthetic construct
  source 1..110: mol_type = other DNA
gggcaagacctagttcttgtcaccagcacgggatggctgcagatgtgggaaagtccatattctctaagcttctcagcagaactagcctaaaaggtggaaggcagaattaa

SEQ ID NO: 792 - DNA, 110 bp, synthetic construct
  source 1..110: mol_type = other DNA
tttgtatgcattaaatggaaattggaggttcaagaagaaaaaaggccttagcggtaatttaatccttggaaataccaaatatattcaaactaacatagctattaattagg

SEQ ID NO: 793 - DNA, 110 bp, synthetic construct
  source 1..110: mol_type = other DNA
gtgaagtggcttcccaaagtcattcagctagtatacttattatttacttaacacgacaaattaagttgggtggtagtcgcagggttgaagataaagcagtcagcaataaa

SEQ ID NO: 794 - DNA, 110 bp, synthetic construct
  source 1..110: mol_type = other DNA
gatcaatttttgaagtattaccattagcacttcaaatatcaagttgtcagaaatattctcctatctcacaattttattcacacgtgatttgacaggtgacactatggtaa

SEQ ID NO: 795 - DNA, 110 bp, synthetic construct
  source 1..110: mol_type = other DNA
ttctcctatctcacaattttattcacacgtgatttgacaggtgacactatggtaaaatgtgtacgtaacagtgtaatttgcaaagttatatttttagttagaagcatcaa

SEQ ID NO: 796 - DNA, 110 bp, synthetic construct
  source 1..110: mol_type = other DNA
acgaaggatagcctcgccagccctgacatgctcccatacagacacctattgcagactgagcttcttaccatggataaccactgaaccactgaaagttaacatctttttaa

SEQ ID NO: 797 - DNA, 110 bp, synthetic construct
  source 1..110: mol_type = other DNA
cactgttgataaaatccaaatgtcacatttcctgagcagcttattctagcagccgcagttattttcctttttactctgaactaccctgccttctatctctacgtctctga

SEQ ID NO: 798 - DNA, 110 bp, synthetic construct
  source 1..110: mol_type = other DNA
aggttgtgcacccttgccctttcttgcatctggagttgaggacgcttaagtttcccaggagttaagaagcactttggaagctggtgggataaagccatcttactctcact

SEQ ID NO: 799 - DNA, 110 bp, synthetic construct
  source 1..110: mol_type = other DNA
caggagttaagaagcactttggaagctggtgggataaagccatcttactctcactccacatatgagggctgccaatcacaggaaaaaattttaggaacaggtttgctaaa

SEQ ID NO: 800 - DNA, 110 bp, synthetic construct
  source 1..110: mol_type = other DNA
tacattgggcacatagacttgcgtttaacattagaggcagttctgccataaaacatcaatgatacatgtccaacaagccgtggaactttgccaagggtctacacctcctt

SEQ ID NO: 801 - DNA, 110 bp, synthetic construct
  source 1..110: mol_type = other DNA
tttgtacccttttatcaacttctttctagttcccatgccccctggaaaccactgttataatctctgtttctacaaatttaaagattttggttcttgttttgttttgtttc

SEQ ID NO: 802 - DNA, 110 bp, synthetic construct
  source 1..110: mol_type = other DNA
gagcctctggaaaaatgaattttcagttggagtttatacagaggacgctgttatattttagtgcagatagaagaaaataaaaacaattgagtttccctaagctattatat

SEQ ID NO: 803 - DNA, 110 bp, synthetic construct
  source 1..110: mol_type = other DNA
atacagaggacgctgttatattttagtgcagatagaagaaaataaaaacaattgagtttccctaagctattatatccaataagaggaggaaacaaattctctttaagaag

SEQ ID NO: 804 - DNA, 110 bp, synthetic construct; identical to SEQ ID NO: 802
  source 1..110: mol_type = other DNA

SEQ ID NO: 805 - DNA, 110 bp, synthetic construct; identical to SEQ ID NO: 803
  source 1..110: mol_type = other DNA

SEQ ID NO: 806 - DNA, 110 bp, synthetic construct
  source 1..110: mol_type = other DNA
cccacggtgagatgtaacataaaactataaagataatcttttagagcacaatacacgtttaaacacggagtttcaaattacatttccattaggtcttgcacttagtaaaa

SEQ ID NO: 807 - DNA, 110 bp, synthetic construct
  source 1..110: mol_type = other DNA
tcccaagcatctaatccttatgtatattcagtcactctgtttaaatgtcttcagtgacaagaagctctctgggaagcagtcctagtagcagacagcactaatgaccaatt

SEQ ID NO: 808 - DNA, 110 bp, synthetic construct
  source 1..110: mol_type = other DNA
tggcatttctttgctgctgcttctgtctgcagttcttcccactcctccttggcttagtggcctcatccccttcagtcatgtttccagtcatgtcagcctcctcttggcag

SEQ ID NO: 809 - DNA, 110 bp, synthetic construct
  source 1..110: mol_type = other DNA
gaaatgaaatatggatatagatgttatttcatgaggttctgctattttgctactgctgaatagagatgatatgtgtgttgggaaagatattttcctccaattccaaagga

SEQ ID NO: 810 - DNA, 110 bp, synthetic construct
  source 1..110: mol_type = other DNA
ctgaatagagatgatatgtgtgttgggaaagatattttcctccaattccaaaggacaggaaatattcattttgttgatagtctaaatttcatgaaatgtggtagtgggga

SEQ ID NO: 811 - DNA, 110 bp, synthetic construct
  source 1..110: mol_type = other DNA
tagaaagcattaacttggccagaattcttcccacccctcaacacacgtacacatataccttgttttattgcatttcactttattgagctttgcagatatttcttttcttt

SEQ ID NO: 812 - DNA, 110 bp, synthetic construct
  source 1..110: mol_type = other DNA
aacagatggttggctggatttagcccatgggccatatttttctaggtctctaagacatagagatgaatcaccatactagagtttaaagggatatggcagtcatgtagtcc

SEQ ID NO: 813 - DNA, 110 bp, synthetic construct
  source 1..110: mol_type = other DNA
gccactgactgggtagattagggaaggaccatggtacagaagttaagaccagtctttagaatctggatggccgggtttgagttgccattaggaaataaccatgggcagat

SEQ ID NO: 814 - DNA, 110 bp, synthetic construct
  source 1..110: mol_type = other DNA
ttagaatctggatggccgggtttgagttgccattaggaaataaccatgggcagatttcagatataactaaggataattatagtaccaacctcatagttgttgagaggtgg

SEQ ID NO: 815 - DNA, 110 bp, synthetic construct
  source 1..110: mol_type = other DNA
tgtgcctagtacaccacacaaagccgtgctgccatgagcacagcttattagggctgtgcattgggaatgtaacactttgggagcagaattacacagcaggtgagtcaaaa

SEQ ID NO: 816 - DNA, 110 bp, synthetic construct
  source 1..110: mol_type = other DNA
gttccttcaggttggaagcagcttgaattgctgtcctgatacaaaggatggctacaacagagaatcaactctctcccaatggacttcctgtgtgagcgaaatgaatctgt

SEQ ID NO: 817 - DNA, 110 bp, synthetic construct
  source 1..110: mol_type = other DNA
aagcatattcttagtacttaactcctaatgaacaacgacataattttcctgagaaagtagtaatagtttactaggaagtgaatccatctttaggattcataagtaactgg

SEQ ID NO: 818 - DNA, 110 bp, synthetic construct
  source 1..110: mol_type = other DNA
agtagtaatagtttactaggaagtgaatccatctttaggattcataagtaactggacacatatttcatttaatcctcaagtaactatgtgaacccaaaccatggcatacg

SEQ ID NO: 819 - DNA, 110 bp, synthetic construct
  source 1..110: mol_type = other DNA
ctagatatgaatagatgctgggcacccacgcccccaaaccttatgctgacccacctcactctcttactgaattcctgttcccagcatttgcatctgtaatttctgcttta

SEQ ID NO: 820 - DNA, 110 bp, synthetic construct
  source 1..110: mol_type = other DNA
tcactctcttactgaattcctgttcccagcatttgcatctgtaatttctgctttacatggattcaacccccctcaacttagaggaaaacctttgggatatggaggggtcc

SEQ ID NO: 821 - DNA, 110 bp, synthetic construct
  source 1..110: mol_type = other DNA
tatttgagaaattatcacagatcattaagcccagagaagctggccatccaaaaggaggatgagccaatgaaccaagctgctcgcaaaaagaaaggttatcaggtttaaag

SEQ ID NO: 822 - DNA, 110 bp, synthetic construct
  source 1..110: mol_type = other DNA
aggatgagccaatgaaccaagctgctcgcaaaaagaaaggttatcaggtttaaagatgtcctgaaacactgtgtttcacaccctcctgtgggagaacaacagcatgttaa

SEQ ID NO: 823 - DNA, 110 bp, synthetic construct
  source 1..110: mol_type = other DNA
acttggtcggcagccaatgaaacaataaacagaccaaagtctctttagaattgcttgcagtggataaatctctactccaaccttgttctcataattggagaggaaatgag

SEQ ID NO: 824 - DNA, 110 bp, synthetic construct
  source 1..110: mol_type = other DNA
tgcagtggataaatctctactccaaccttgttctcataattggagaggaaatgagaactactttacaaaaaagtcaagactcaagagttgggctgactggctgtctttct

SEQ ID NO: 825 - DNA, 110 bp, synthetic construct
  source 1..110: mol_type = other DNA
gggaactcctcagctatgttttttaaatttccccatcaatgttgatttaagggagtaactaacttgcctgtatcatgatgaatagtttcaggccaatgactagttttagc

SEQ ID NO: 826 - DNA, 110 bp, synthetic construct; identical to SEQ ID NO: 825
  source 1..110: mol_type = other DNA

SEQ ID NO: 827 - DNA, 110 bp, synthetic construct
  source 1..110: mol_type = other DNA
cattaatttctgcttttgagattccagagttgccctagaagcttccctttccaactctaggatattcaatgtttaatttcataagcctccctaatatctttccaatgagt

SEQ ID NO: 828 - DNA, 110 bp, synthetic construct
  source 1..110: mol_type = other DNA
gctcagacacagaattgacgcatattgtagctctgatgagatgggaggactttctcccatgtgctgggtcaccgaacaccctccctggtgtactcaatctaatccagtcc

SEQ ID NO: 829 - DNA, 110 bp, synthetic construct
  source 1..110: mol_type = other DNA
gaattgattttctgttatttgcaagcaaagagtcctaatcaatataaactgtaatcaagggaatttggaacttgcctatttaaaccctttttccttctcaaagcatcaca

SEQ ID NO: 830 - DNA, 110 bp, synthetic construct
  source 1..110: mol_type = other DNA
caagggaatttggaacttgcctatttaaaccctttttccttctcaaagcatcacatgtgatcattaggccctcctttactgcaagccagtgcaggatgtgtatggctaat

SEQ ID NO: 831 - DNA, 110 bp, synthetic construct
  source 1..110: mol_type = other DNA
gcccgggggcgggaggggagtatgtttgggctaataaaggaagaggctcaccatttctagccctgcaggacagcatggggacagtggtgaaacagaggaactggccaaga

SEQ ID NO: 832 - DNA, 110 bp, synthetic construct
  source 1..110: mol_type = other DNA
tataaataacctgatcttgcccccatcatcttgatctccagccccccaaccccttttggtttcttcagcatggggatggcccaaatcaatcccagtatcactaacacttc

SEQ ID NO: 833 - DNA, 110 bp, synthetic construct
  source 1..110: mol_type = other DNA
gctgtgcatgttggaaaaatacctggagtttcatcatttttaaaatagacatcatcataataatacttatcttgctgagttgatatgaagattaaaagagataccaatgt

SEQ ID NO: 834 - DNA, 110 bp, synthetic construct
  source 1..110: mol_type = other DNA
gtactcacaaatgatttaaatgaactggcacgtagtagtgacattttccatcctgcaatcatggccaccacgatgtgttatactctcattaatttcacaagctaacccca

SEQ ID NO: 835 - DNA, 110 bp, synthetic construct
  source 1..110: mol_type = other DNA
caatcatggccaccacgatgtgttatactctcattaatttcacaagctaaccccaagtaagccaggctccatataagcagaaggcaactaaagtaaactaatgatagaaa

SEQ ID NO: 836 - DNA, 110 bp, synthetic construct
  source 1..110: mol_type = other DNA
aaaacaaaagatggtagaaaaagcaaggtggagacaccttggtgcacagtttggggtcaccaaagccaagaagctccttttcgcagggtgagaaacaaggtcactcctga

SEQ ID NO: 837 - DNA, 110 bp, synthetic construct
  source 1..110: mol_type = other DNA
gtcaccaaagccaagaagctccttttcgcagggtgagaaacaaggtcactcctgagtccctaataggcacaagtaatccatcaatgactaaaaagagggagaaagaggga

SEQ ID NO: 838 - DNA, 110 bp, synthetic construct
  source 1..110: mol_type = other DNA
cctaatcaacgtgggtttccgagctctcagtcttgttctctgccaatccattccccaaccagcaagctcattcccttggcaatggctccctattgttctcagggtaaact

SEQ ID NO: 839 - DNA, 110 bp, synthetic construct
  source 1..110: mol_type = other DNA
cacttttcatcatttcaaaaagaaaacccttacccatgaacagtcactccctgctcttctctccctcttggcccctggcaaccactcctctacttcctgtctctatggat

SEQ ID NO: 840 - DNA, 110 bp, synthetic construct
  source 1..110: mol_type = other DNA
cgacacccgaaaaatctttttttcataatctaattatcacaggaattggcccatttgctttgtgacaatacttgcaactgtgactgcatgtaagaattcaaatgcaaaat

SEQ ID NO: 841 - DNA, 110 bp, synthetic construct
  source 1..110: mol_type = other DNA
aaaactctgtctcacattctctttcccagcaagcgaacctaaggcaatcaacattcagctttacaaattagcattactgcttctttgcttcagatattatttttattttc

SEQ ID NO: 842 - DNA, 110 bp, synthetic construct
  source 1..110: mol_type = other DNA
aatgcagtctcccttccaggatccagggagagatgccagtcaaattctttactctaccgcagctgcttgttgcaattgccggtaagctttttaaaaagtgtccatgcctg

SEQ ID NO: 843 - DNA, 110 bp, synthetic construct
  source 1..110: mol_type = other DNA
agagaggaatgaaaatgttaaaaacatgaaataagacttctgaaatatttaaaatgtaggcagagctgagctaaacttatgcaagttgctcattctcaacaatttgaaga

SEQ ID NO: 844 - DNA, 110 bp, synthetic construct
  source 1..110: mol_type = other DNA
gccatgattggagtctgcgttgctgcgactggcataggccagcagttgcaacttggacttgacccctacctggggaacttccgtatgctatatgtgcagacctggaaaaa

SEQ ID NO: 845 - DNA, 110 bp, synthetic construct
  source 1..110: mol_type = other DNA
gacttgacccctacctggggaacttccgtatgctatatgtgcagacctggaaaaaaaaaaaaaaaaaaaaaagcagttttgcagatgacttcaatgtctggcttaatata

SEQ ID NO: 846 - DNA, 110 bp, synthetic construct
  source 1..110: mol_type = other DNA
tttgaaggacatacatcaaaattaatcacggctacctctggggaatgaattgttagaagggccagtaaacttgcaatttttactttaaataactttcttttgttacagtg

SEQ ID NO: 847 - DNA, 110 bp, synthetic construct
  source 1..110: mol_type = other DNA
gaagggccagtaaacttgcaatttttactttaaataactttcttttgttacagtgaacgtacatatatttttacaatttcacgtatgtgatttgttgaggaatgagcctt

SEQ ID NO: 848 - DNA, 110 bp, synthetic construct
  source 1..110: mol_type = other DNA
actattttaaaattactccaagcatacacacagtacgattccttaactgtacaattctttccgtctaatcttgttgtgccttagtctctccagctgtaagaccgggaaga

SEQ ID NO: 849 - DNA, 110 bp, synthetic construct
  source 1..110: mol_type = other DNA
tctttccgtctaatcttgttgtgccttagtctctccagctgtaagaccgggaagaacagtgtttctcacgggggtcgtgaggatcacatgtatttacctgtgaagtgctt

SEQ ID NO: 850 - DNA, 110 bp, synthetic construct
  source 1..110: mol_type = other DNA
tgtggtttttctcaatgcctttttcttgccttaactttttgcttttttttttttttttttccttcttctaggattgctctcacgtctgatgtggcctcagtttcatgtca

SEQ ID NO: 851 - DNA, 110 bp, synthetic construct
  source 1..110: mol_type = other DNA
tttttccttcttctaggattgctctcacgtctgatgtggcctcagtttcatgtcacatctacccctctgcacttcagacttagaaaggtaagggtggctctgctctgcgc

SEQ ID NO: 852 - DNA, 110 bp, synthetic construct
  source 1..110: mol_type = other DNA
tcttcagctcttaaaaagccgggtctgttgtgaaatttttcccttttgctcctaggcacatggctacccattcaccccagaaatctcaccagtgcgctcattgtgagaag

SEQ ID NO: 853 - DNA, 110 bp, synthetic construct
  source 1..110: mol_type = other DNA
gcacatggctacccattcaccccagaaatctcaccagtgcgctcattgtgagaagactttcaaccggaaagaccacctgaaaaaccacctccaaacccacgaccccaaca

SEQ ID NO: 854 - DNA, 110 bp, synthetic construct
  source 1..110: mol_type = other DNA
taattcccataatatgctactatgtatgctttaaatagctgattataacccatgactaatagaaaacaagacaaggatatctgctttcaccaatggtattcaacaaagta

SEQ ID NO: 855 - DNA, 110 bp, synthetic construct; identical to SEQ ID NO: 854
  source 1..110: mol_type = other DNA

SEQ ID NO: 856 - DNA, 110 bp, synthetic construct
  source 1..110: mol_type = other DNA
cttgacagttctttcaggaattgatggtgagcctgacagaggacctgagtatcgcaatttcctttcatgcccacacggccaccctccatctgcatgagtccacccacctc

SEQ ID NO: 857 - DNA, 110 bp, synthetic construct
  source 1..110: mol_type = other DNA
acatgctgggttagtggcatgtactgctaacatagcatgaccaatccaggaataaaaatttttaagttccctattttgtttttagatcattgaagctcaattattttcag

SEQ ID NO: 858 - DNA, 110 bp, synthetic construct
  source 1..110: mol_type = other DNA
cagtcacatctgtcttgctaggagatactccccttcttcctggctttaagaagcactgtgagctgccacatggagagggccatgaggcaaggaacagagggcaatttttg

SEQ ID NO: 859 - DNA, 110 bp, synthetic construct
  source 1..110: mol_type = other DNA
ctgtgagctgccacatggagagggccatgaggcaaggaacagagggcaatttttggctcatggccagcaagaaactgaggccctcagtctggccttttgcaaggaatgga

SEQ ID NO: 860 - DNA, 110 bp, synthetic construct
  source 1..110: mol_type = other DNA
gagagcccctcaaaggcagtgaccacaatgctccctcccctcagataccaggcgttgttccccagctgaacacagctgcatgccgtgaaaacaaactgcttccctacaac

SEQ ID NO: 861 - DNA, 110 bp, synthetic construct
  source 1..110: mol_type = other DNA
cagtcagtgactgcacatcagagttgaaagctctttagcccactggatagaagttaaggtgagggctcaaaggctctcgaagtcaccacctccctccatatgagtgcacc

SEQ ID NO: 862 - DNA, 110 bp, synthetic construct
  source 1..110: mol_type = other DNA
gggagggatttgttgttacacagcagtagctggcaatttcacacactcactcaacctcccagccattgtctggttgcaactgggaagaagtagcaccccccccccctgta

SEQ ID NO: 863 - DNA, 110 bp, synthetic construct
  source 1..110: mol_type = other DNA
acgtgttgattcctgatgtctaggaacatctccaagctacatggcacgaggtaatacatagagaagtttatttaaagacaaaacaaaaccatttttaatcccaccgtgag

SEQ ID NO: 864 - DNA, 110 bp, synthetic construct
  source 1..110: mol_type = other DNA
ggctcactctggcagccttatctcctatcactcttccattgctcctgctgttctagctcctggctgcttttgctatttcttaaacatgccaagcctgttctcacatcagg

SEQ ID NO: 865 - DNA, 110 bp, synthetic construct
  source 1..110: mol_type = other DNA
gaaaccaaggcttagagaagctatgtaacttgcccaaagccatataattagtaatgtcacagtcaggattgagattaaagtgtggttgattccaaatgctgtgtgatttt

SEQ ID NO: 866 - DNA, 110 bp, synthetic construct
  source 1..110: mol_type = other DNA
ttaaataaaatataataccaatatttaattatgtccggaaggaaatgtttctcactgaggtagagcgagaaggaaggaacatcactgtagatcacgagatatatcttctc

SEQ ID NO: 867 - DNA, 110 bp, synthetic construct; identical to SEQ ID NO: 866
  source 1..110: mol_type = other DNA

SEQ ID NO: 868 - DNA, 110 bp, synthetic construct
  source 1..110: mol_type = other DNA
aatttgtcacaaaaggccatgaacgctggttttttgttagtttctttcttgtcaattacaattgttccttttcaccagctgaagggcccgtggctgggatggacagaaat

SEQ ID NO: 869 - DNA, 110 bp, synthetic construct
  source 1..110: mol_type = other DNA
aactctgtagcagcaagagggataattattttagaacgaggggttcatgccattcagttctaatccactcccaggcaacattatgcttcaatgagttaagaaccaggaag

SEQ ID NO: 870 - DNA, 110 bp, synthetic construct
  source 1..110: mol_type = other DNA
agttctaatccactcccaggcaacattatgcttcaatgagttaagaaccaggaaggaaatattcaactccacttaagagcatcaggtacacaagaatggtaatcttaggt

SEQ ID NO: 871 - DNA, 110 bp, synthetic construct
  source 1..110: mol_type = other DNA
caggggggatctgcactaaatctgggctaaaagggtttccgagtgcacctaggacacatctctctcagcagctctcctgactgctaaaagtgactttaacatttaccttg

SEQ ID NO: 872 - DNA, 110 bp, synthetic construct
  source 1..110: mol_type = other DNA
tctaggaggagattattgcatggacgcttatataaaaattctgagtcgaagaagaggaaatacctccagagtcattttgcaggacaggcagctgagattgacagaaagag

SEQ ID NO: 873 - DNA, 110 bp, synthetic construct
  source 1..110: mol_type = other DNA
ggaaatacctccagagtcattttgcaggacaggcagctgagattgacagaaagagcctggagtcagacaggcttggtgtgcacccaggctctgccgcagtgtgtctgacc

SEQ ID NO: 874 - DNA, 110 bp, synthetic construct
  source 1..110: mol_type = other DNA
gtgtagtaggggctagctctcattcagaggctttccaggctcttgagttgctagcagattttgccactaagggaagggatttagtgagaagtttcgaaggtgtaaatggg

SEQ ID NO: 875 - DNA, 110 bp, synthetic construct
  source 1..110: mol_type = other DNA
agattttgccactaagggaagggatttagtgagaagtttcgaaggtgtaaatgggggactgtcgtggttcaacaggctaagaacctgactagaatccatgaggatggggg

SEQ ID NO: 876 - DNA, 110 bp, synthetic construct
  source 1..110: mol_type = other DNA
ccaccccaccccaggcggggcctctatacttgccctgtccttgaatcacttcttcgtttaaaggagagcttgtagtgaggcctaaaactgccacccctcctcccgagtga

SEQ ID NO: 877 - DNA, 110 bp, synthetic construct
  source 1..110: mol_type = other DNA
gggaacttctgcatatcttaagcaaggcccaaaaaatgatgttatggaagaacatgtaacggcatggaaaaatacttttaaaatgttccatgtggaaaaaatagatatta

SEQ ID NO: 878 - DNA, 110 bp, synthetic construct
  source 1..110: mol_type = other DNA
ctggtcctcggaccacacttggaggaggtagggcctaaccagtgttgtgcccacgcaagaatgaaaagtcagtagaggagaaagaacgaacacactggggctctaagaca

SEQ ID NO: 879 - DNA, 110 bp, synthetic construct
  source 1..110: mol_type = other DNA
aaatgtctaaccccttttacctcggaaagtagccttctttggaaacagggtcattgcagctgtcagtggttaggatgatgtcgtcctggtgtagggcagacccttcctta

SEQ ID NO: 880 - DNA, 110 bp, synthetic construct
  source 1..110: mol_type = other DNA
gcagctgtcagtggttaggatgatgtcgtcctggtgtagggcagacccttccttagtccaatatggtgtctgtataagaagacacacagggaggctgccgaaggaaggtg

SEQ ID NO: 881 - DNA, 110 bp, synthetic construct
  source 1..110: mol_type = other DNA
ctatcatgctgatcttgcacctccagcctcaagagcagcctcagcctctgctgcttagaagctactccacctgtcatattttgttacagcaggctgagtggattaagaca

SEQ ID NO: 882 - DNA, 110 bp, synthetic construct
  source 1..110: mol_type = other DNA
cgccttgctttgggtttacagatccggccgttggtgaacttgcctggggaatagttgttgactcagggtaggtactggttgatgcatttgggagattttattttggaact

SEQ ID NO: 883 - DNA, 110 bp, synthetic construct
  source 1..110: mol_type = other DNA
attccattgctatttctagatctttcattttcttcatgttttcagtagtaaacccaaagttttaagcttcctttttatgggagtcagagtagtctaaacagagtctaggc

SEQ ID NO: 884 - DNA, 110 bp, synthetic construct
  source 1..110: mol_type = other DNA
aaagttttaagcttcctttttatgggagtcagagtagtctaaacagagtctaggctgccaaatctatcttctacatcttataaagaaataagataatgctgggtgcatgt

SEQ ID NO: 885 - DNA, 110 bp, synthetic construct
  source 1..110: mol_type = other DNA
cagagtctgaagagctctagtatgcctgaatatgagctcaaaattttggagtttccgtcgtggtgcagcggttaacgaatccaactaggaatcatgaggttgagggttcg

SEQ ID NO: 886 - DNA, 110 bp, synthetic construct; identical to SEQ ID NO: 885
  source 1..110: mol_type = other DNA

SEQ ID NO: 887 - DNA, 110 bp, synthetic construct
  source 1..110: mol_type = other DNA
acttgacgtattattttacaatacggtaaaacttaaaagtggagctgggggtgacggctagatggaaaggtgaaatcccttagtcggaaaggtcagccatctctggattt

SEQ ID NO: 888 - DNA, 110 bp, synthetic construct
  source 1..110: mol_type = other DNA
aaaaagtctgctgttccttgatttagggatccaagctccatctgtcttatggctgcaccattttcaacaggaggcttccagcatccattcattaatcaagaaggacgaat

SEQ ID NO: 889 - DNA, 110 bp, synthetic construct
  source 1..110: mol_type = other DNA
tctgaagctctgctacctctgactgccctgttagcacgctgcaacgattacctctttcgtctggtggcacggcacatttgtcagctcagagataattatttttttatttt

SEQ ID NO: 890 - DNA, 110 bp, synthetic construct
  source 1..110: mol_type = other DNA
agatccataaagtgaatatagagatactatatttatttttaaaagaccacctataagtgaacctgcacagttcacacttgtgttgttcaagggtcagctgtatcacctta

SEQ ID NO: 891 - DNA, 110 bp, synthetic construct
  source 1..110: mol_type = other DNA
ctgtgattacttcacagtaaaggaactgttggctttagcaaaacgggatcaactcacctttctaaactttaaacagcagtacttctatatgactgctttctccagttctt

SEQ ID NO: 892 - DNA, 110 bp, synthetic construct
  source 1..110: mol_type = other DNA
ggtggtcaccatttagcgctagctgtgttgctcatgcagaaatactagcctagtgtttgctttttgttatcagagaatcccaaaatttatttttatgtgaaatctaactt

SEQ ID NO: 893 - DNA, 110 bp, synthetic construct
  source 1..110: mol_type = other DNA
ccacttcacagcaaagagaacaagctcaagagttagacagacccggctatgtttgctgcttataaactatgcaacccttgggaaattgacttgtgcctcctagttttcac

SEQ ID NO: 894 - DNA, 110 bp, synthetic construct
  source 1..110: mol_type = other DNA
ttgcaaatgcaaatccagttactcaatggggaaagtccactgcctggactccaatgttcctataaagtagctgcttggcaaagggagctggacacacctccttggaaatg

SEQ ID NO: 895 - DNA, 110 bp, synthetic construct
  source 1..110: mol_type = other DNA
aacacttcattaggagtgaattcaagtttccagggttatccagcttcctcaagcagttttaagaattgaaatgccagagttcccactgtgaggcagcaggttaaggatct

SEQ ID NO: 896 - DNA, 110 bp, synthetic construct
  source 1..110: mol_type = other DNA
atttcataagtgttcattagttatctttggcacagaaacaggaagaaaggcaaaaaagagaaaaggaagctaatttgctggatgtagactttgtgttagaccacagtagt

SEQ ID NO: 897 - DNA, 110 bp, synthetic construct
  source 1..110: mol_type = other DNA
aagagaaaaggaagctaatttgctggatgtagactttgtgttagaccacagtagtcaatttttatatttcttcccctttaataattaaaacaaccatgagaggatttccc

SEQ ID NO: 898 - DNA, 110 bp, synthetic construct
  source 1..110: mol_type = other DNA
gtattcacttacccagttcctgaccatttttatttttactgctgagccttgatgggaactcctcctgaccacttttaaagtgaaatcccctcctcacttcctaccgccct

SEQ ID NO: 899 - DNA, 110 bp, synthetic construct
  source 1..110: mol_type = other DNA
aagaaaaataatgcattcataatgagaattgtgtttaagctcttaggaataaatataactactgctaatactcagtgaaagcatttgtggatctgcttattagacgtaag

SEQ ID NO: 900 - DNA, 110 bp, synthetic construct
  source 1..110: mol_type = other DNA
tgtaaggaagtggaaaccagagaagtggtcttgaggaaggaccctgtagcaggaaatatacctcttgaggaaagaaaagtgacctccatatcttgcttgacaatgcagct

SEQ ID NO: 901 - DNA, 110 bp, synthetic construct
  source 1..110: mol_type = other DNA
ttttctatgtgtttacagcaaaagcacaatcttcatagcagttcactcttatgaagctcacaattctctttttattgctagtgttggattggctaatatgtctatttaca

SEQ ID NO: 902 - DNA, 110 bp, synthetic construct
  source 1..110: mol_type = other DNA
gtccttgagaaagagagaggcttgtttctagtttttctactcctagctctagtccccttggctgtgtttgctgcatttggattctgtgaaatttccctgttttgcatgtc

SEQ ID NO: 903 - DNA, 110 bp, synthetic construct
  source 1..110: mol_type = other DNA
gagaggagatgaagaagatagatattaagtgattcgtctcagaaataagtgcctgagttttaaaaactgccaaaaactggggaaacacaaagtactctagtagggtttaa

SEQ ID NO: 904 - DNA, 110 bp, synthetic construct
  source 1..110: mol_type = other DNA
ttgtagcaggcaaaacctggaacaacccagtatttcacataacaccaaaatagtatgtaaattttattatatccatacagtgtactaccatgaggaattttaaatgaact

SEQ ID NO: 905 - DNA, 110 bp, synthetic construct
  source 1..110: mol_type = other DNA
tagttcagatgatctatgcagctctcactctgctttgctgctcttaatccagtcgctgcacttttctcacagcttttctcagtgactttgaggtcccgccgactcagctg

SEQ ID NO: 906 - DNA, 110 bp, synthetic construct
  source 1..110: mol_type = other DNA
atctttcccttgtttattcatagacgctaaggtaattaggactgtttctactatatcatctgccagctgtgaggagaatgagaacaatagtcattcattccagtgggatc

SEQ ID NO: 907 - DNA, 110 bp, synthetic construct
  source 1..110: mol_type = other DNA
accttgaaaaagaacaaagctgaatgtattgtgcttcctcatttcagactatgctacatagctacagttttcaaaacagtatgataatggcacaaaaacagacacataga

SEQ ID NO: 908 - DNA, 110 bp, synthetic construct; identical to SEQ ID NO: 907
  source 1..110: mol_type = other DNA

SEQ ID NO: 909 - DNA, 110 bp, synthetic construct
  source 1..110: mol_type = other DNA
aaacattgtcatcatcataaaacaaaccaaagactcatttttaggtgtgtatactatggtaagaaaaattggtgtgacaatgtcagataccatatcttttccttgaaaga

SEQ ID NO: 910 - DNA, 110 bp, synthetic construct
  source 1..110: mol_type = other DNA
cagagaactctgcaggaaatagtccttgcagaagccttttaaagtaagtcttatgattcatgagagctaaaatgtgagggcctatcacacagagggcactgaagaagatt

SEQ ID NO: 911 - DNA, 110 bp, synthetic construct
  source 1..110: mol_type = other DNA
agaaacaaaccttttggactgaaactagaatatgtttaaattctttctctcacctacatgaccccatgaaatctttcctttggaaaaaaaaaaaaaaaacagcaggattt

SEQ ID NO: 912 - DNA, 110 bp, synthetic construct
  source 1..110: mol_type = other DNA
aataatgcagttgtgttatgatcattcagctagaagtgtttgagctgagaaagaatcaaactaagcccaaaaacttgattgttataccctgctaaatattgtcaaaaccc

SEQ ID NO: 913 - DNA, 110 bp, synthetic construct
  source 1..110: mol_type = other DNA
gtctcccaaccctgcctttgacagaggtgaagactttaaaattaaatcattccgctcctctaatcacatcgattcagaggggttgtatgtgagaacagatgcaaggctcc

SEQ ID NO: 914 - DNA, 110 bp, synthetic construct
  source 1..110: mol_type = other DNA
atgtaacacagagagaaggtcacctaaagaagctctggcagtggtcaaggtgaggaggatgtagcagtggcctgttggtcctgtgttattgtctgaaggctggatgagag

SEQ ID NO: 915 - DNA, 110 bp, synthetic construct
  source 1..110: mol_type = other DNA
attaaaactggatcattagaatccagattaatgggctattttgaacaaaagatacatagatagggccttatgtatgaaaaagaggtggtataatagagtgttgctaactt

SEQ ID NO: 916 - DNA, 110 bp, synthetic construct
  source 1..110: mol_type = other DNA
atagatagggccttatgtatgaaaaagaggtggtataatagagtgttgctaacttatactctgaagattgatcaggattaaactctagctctgtgtctcccaaattttat

SEQ ID NO: 917 - DNA, 110 bp, synthetic construct
  source 1..110: mol_type = other DNA
caaactacaactggaagatggaaacatctaggaaaagaggatggtggacaatacgagcatgatggagggcaggggcatccagatataggacttgtgcaagaaaacatatg

SEQ ID NO: 918 - DNA, 110 bp, synthetic construct
  source 1..110: mol_type = other DNA
cttcctgcaattttctctgtattctcgctgtcttcagcaaacacatctaatcttattaccatttattatagatttagctttacaaaaatccaaaagctcacctagaacca

SEQ ID NO: 919 - DNA, 110 bp, synthetic construct
  source 1..110: mol_type = other DNA
gagtagtcctcagagactacctggagaacaacgttacaaattttaggctaccatagttggaggaaggaccctagcagctgcttgtcccagattcatgtatactctaaagg

SEQ ID NO: 920 - DNA, 110 bp, synthetic construct
  source 1..110: mol_type = other DNA
aagtaggtttataccagacactattttaagtcctttaaaagactgtgtcagatgaggcacacctgaactttgtcctttgaagcaggtgtcatgattggccatgttttaca

SEQ ID NO: 921 - DNA, 110 bp, synthetic construct
  source 1..110: mol_type = other DNA
agcagttctactttggagtatctcaaaatatgtctcaccatgctctatcctagaatgagctggaagatacttgtttattgaagcatcatttatggtatggagcattgcag

SEQ ID NO: 922 - DNA, 110 bp, synthetic construct
  source 1..110: mol_type = other DNA
tactattgtcagagacaaagaatatacgctaattacctaagtacacatttgaatccaggaatttgagcctgaaaagactttttccctagttagctttgattttctgaagg

SEQ ID NO: 923 - DNA, 110 bp, synthetic construct; identical to SEQ ID NO: 922
  source 1..110: mol_type = other DNA

SEQ ID NO: 924 - DNA, 110 bp, synthetic construct
  source 1..110: mol_type = other DNA
aaggaaagatggctaatgtttttcctccagtcttggagatggtgcacagctttgaatcctctgtgggccctttatccagaaggtgcccttggctccaaagtaaaagaata

SEQ ID NO: 925 - DNA, 110 bp, synthetic construct
  source 1..110: mol_type = other DNA
ggctgatgtgacagtgtcttgttcagcatttcactactattaatgatgcttgggtggcatagccagcctgctcttttctcattcccaacaacaggatagaagatagaatg

SEQ ID NO: 926 - DNA, 110 bp, synthetic construct
  source 1..110: mol_type = other DNA
tatatttcaggcaccgttctaagctccccatatgtattaaatcttcataataatcctgagagcataccaaacacagagcaggaaaaaacagccatctcatctctcattgg

SEQ ID NO: 927 - DNA, 110 bp, synthetic construct
  source 1..110: mol_type = other DNA
gcagcagcgggtgcccagttctgaaattctcaggggtggtagctgttcacgtgtaatgtactcagagcatgtgataggagcaacagtatcatactacctctcctggagat

SEQ ID NO: 928 - DNA, 110 bp, synthetic construct
  source 1..110: mol_type = other DNA
atatttgctcaaagattgataagattaataagacacttacccagtgacacatatgcaaatagataaatcccatttaaaaaactgtacaaaggatggaaaaactaactctg

SEQ ID NO: 929 - DNA, 110 bp, synthetic construct
  source 1..110: mol_type = other DNA
gcatcctaatcacctttttcttttccatatacacttctgccaggtgatctcatctggatgcatgactttaaatatcttctatgtaccagtaactctcaaagccggatctc

SEQ ID NO: 930 - DNA, 110 bp, synthetic construct
  source 1..110: mol_type = other DNA
tctctaatagtaaaatggctttatgcctttcaaatatggaatgggtcttagcttacctttaaaatttttttctttgctttcctagaaacgctatttcccaaatgtactgt

SEQ ID NO: 931 - DNA, 110 bp, synthetic construct
  source 1..110: mol_type = other DNA
cttttttcttcatattaacggcagagattcttgagcatgattttagcccaaaaagaaagagaaaagtttaaatgtgatacagagaaggtatcattgatggagcaatgtac

SEQ ID NO: 932 - DNA, 110 bp, synthetic construct
  source 1..110: mol_type = other DNA
aaagaagctacaggggaagctatttgccattaggcactattgataactgtgtgttgaattttcctatagtcaactcagtttgcaagaggaccttcagctgaagaacagac

SEQ ID NO: 933 - DNA, 110 bp, synthetic construct
  source 1..110: mol_type = other DNA
aggaactaaccagaacacctagccagttaggaacacattccatttctataggtatagataaaaaagattcacatcatcaaaactgatgttttcctcaggaaaaaaaaaat

SEQ ID NO: 934 - DNA, 110 bp, synthetic construct
  source 1..110: mol_type = other DNA
cacctagccagttaggaacacattccatttctataggtatagataaaaaagattcacatcatcaaaactgatgttttcctcaggaaaaaaaaaatctagcttttctctaa

SEQ ID NO: 935 - DNA, 110 bp, synthetic construct
  source 1..110: mol_type = other DNA
acatggatatgagctcggtcaggttgacaaagttttcagctaataattgaactagatttctaatataggaggcaagatgtcttgagctcagcccagaccccacccttgcc

SEQ ID NO: 936 - DNA, 110 bp, synthetic construct
  source 1..110: mol_type = other DNA
ctgccaggtgctgactatgtgcttacccagagaaagtcatgtgacctttctgacgcttgcatttatcacaaagataatttatatgttccagtattgtttagattaatgat

SEQ ID NO: 937 - DNA, 110 bp, synthetic construct
  source 1..110: mol_type = other DNA
cagaaagagtatgatattacaagttaattgttctatcttatatatgactatagacactttaggtatttaataacttgtcctaaacctaccagattctgtccccctgagga

SEQ ID NO: 938 - DNA, 110 bp, synthetic construct
  source 1..110: mol_type = other DNA
acaatgccctacctcacatatataactttgttttatgtaggttagccttgacatacattcatttgttccaccagcatttactgagtgactactatgggccaggtgagcac

SEQ ID NO: 939 - DNA, 110 bp, synthetic construct
  source 1..110: mol_type = other DNA
cattcatttgttccaccagcatttactgagtgactactatgggccaggtgagcactctagctgctgggaatacagaagtaaacttgacagacagaaagccctgttctaat

SEQ ID NO: 940 - DNA, 110 bp, synthetic construct
  source 1..110: mol_type = other DNA
ccagatccaagcctcgtctgcgacctataccatgctggatgcttaaaccactaagtgtggccaggtatcgaacccttgtcctcatggatgttagtcgggtctgctactgc

SEQ ID NO: 941 - DNA, 110 bp, synthetic construct; identical to SEQ ID NO: 940
  source 1..110: mol_type = other DNA

SEQ ID NO: 942 - DNA, 110 bp, synthetic construct; identical to SEQ ID NO: 940
  source 1..110: mol_type = other DNA

SEQ ID NO: 943 - DNA, 110 bp, synthetic construct; identical to SEQ ID NO: 940
  source 1..110: mol_type = other DNA

SEQ ID NO: 944 - DNA, 110 bp, synthetic construct
  source 1..110: mol_type = other DNA
tgatagaccaggtatctcacagctcaatgggccatgtgaattaattttctggggcacagcttactgccatccttatgtatacgctatgataaaattttaaactgtatgta

SEQ ID NO: 945 - DNA, 110 bp, synthetic construct
  source 1..110: mol_type = other DNA
ctcacagctcaatgggccatgtgaattaattttctggggcacagcttactgccatccttatgtatacgctatgataaaattttaaactgtatgtatgattgataattatt

SEQ ID NO: 946 - DNA, 110 bp, synthetic construct
  source 1..110: mol_type = other DNA
ttagtatcagaagtggagtcactgggggccatgcaaaagtagctaatccagaggtgatctttaaaagtctagatgtatatatatgtgtgtgtgtgtgtgtgtgtatacat

SEQ ID NO: 947 - DNA, 110 bp, synthetic construct
  source 1..110: mol_type = other DNA
acaatgatcacaagtattgttggccaatccctcaagcacagaagaaatatatcatctacctaccctgccacagattgcaacagtccctttgcttccaatacttcttggct

SEQ ID NO: 948 - DNA, 110 bp, synthetic construct
  source 1..110: mol_type = other DNA
atgcaaacatcttctgttgacaaaacccaaagaatcaaatcagccatgcctcagaaaagttgacagctacagagagatacacgcattcatccccaacaacatacagttct

SEQ ID NO: 949 - DNA, 110 bp, synthetic construct
  source 1..110: mol_type = other DNA
aaagttgacagctacagagagatacacgcattcatccccaacaacatacagttctctgtgggccacattcttcgatcttctatgtccttgtaaaagttgtcctttcctga

SEQ ID NO: 950 - DNA, 110 bp, synthetic construct
  source 1..110: mol_type = other DNA
ggtatgtaattccacagtattcttaacaaaagagaagctaagggaaataagggtctattgtgttgaggaactgaatccttgctccttgggaaagggagatcaaccaaccc

SEQ ID NO: 951 - DNA, 110 bp, synthetic construct
  source 1..110: mol_type = other DNA
tgggacttcttcatagatcagcagtatgcagacagccattccatgaaggaagaggagaaagcagtggtgaacaacggcccaattgtgtggacaaacaagtcatgaagact

SEQ ID NO: 952 - DNA, 110 bp, synthetic construct
  source 1..110: mol_type = other DNA
agaaagcagtggtgaacaacggcccaattgtgtggacaaacaagtcatgaagactggataggaacccaaggcacagtgggcaaagtaaatactcactgccaaaaaacttg

SEQ ID NO: 953 - DNA, 110 bp, synthetic construct
  source 1..110: mol_type = other DNA
tctgaggctgactaaatgagcagattgggaactgcagatacgaggaaccagaagtacagagggccagctataaattatacacagattttctacttcatagaggatcagca

SEQ ID NO: 954 - DNA, 110 bp, synthetic construct
  source 1..110: mol_type = other DNA
agcacacgaagtgctcgtgggcagcaaccatatgctataagaattgtaaattgcttaaatttgtttgaagtcgacggtgagggtaataacaaaatgcttgtcaggaagaa

SEQ ID NO: 955 - DNA, 110 bp, synthetic construct
  source 1..110: mol_type = other DNA
ctgaaatcgcatcatacttatttctcagtagaaaatgacataagaagaaaatactgaatgcatcagacactacacttgcagcagttttaggctgaggagcttgcagaatg

SEQ ID NO: 956 - DNA, 110 bp, synthetic construct
  source 1..110: mol_type = other DNA
cttgtcacaaacgtaacaagcctttaaaacaagaactggggactggggtggggagggcactctgagcctcacgaaaccctgtgagggaatcaatacaatcagcgtaatcc

SEQ ID NO: 957 - DNA, 110 bp, synthetic construct
  source 1..110: mol_type = other DNA
tctttgtatttttgggtcttatagcctcttctctccacagacaataattccattgttcaggcccaaattgatgctcacatgcataacagcaagactacttaccagcctcc

SEQ ID NO: 958 - DNA, 110 bp, synthetic construct
  source 1..110: mol_type = other DNA
ttcaggcccaaattgatgctcacatgcataacagcaagactacttaccagcctcccttctccatttttaccccaatacaggaagaaactttgtaaggtgcaaacttaact

SEQ ID NO: 959 - DNA, 110 bp, synthetic construct
  source 1..110: mol_type = other DNA
atgagagttctcagatggaatagatgctcatagcccttcaaaacatatagaaatattgaactgatcctcaattattaattgacctcaaagggtacaacagaacaataaca

SEQ ID NO: 960 - DNA, 110 bp, synthetic construct
  source 1..110: mol_type = other DNA
ttgaactgatcctcaattattaattgacctcaaagggtacaacagaacaataacaataaccttaacagttttcccctttcagtcaatgtttattaacagttagtgccaaa

SEQ ID NO: 961 - DNA, 110 bp, synthetic construct; identical to SEQ ID NO: 959
  source 1..110: mol_type = other DNA

SEQ ID NO: 962 - DNA, 110 bp, synthetic construct; identical to SEQ ID NO: 960
  source 1..110: mol_type = other DNA

SEQ ID NO: 963 - DNA, 110 bp, synthetic construct
  source 1..110: mol_type = other DNA
cagcagataccagaacaaccaaattttgcagatttcagccagtttgaagtatttgctgcatcaaatgtaaatgaagaacagggtgatgaagctgagaaacatccagaggt

SEQ ID NO: 964 - DNA, 110 bp, synthetic construct
  source 1..110: mol_type = other DNA
ctgcatcaaatgtaaatgaagaacagggtgatgaagctgagaaacatccagaggtcttggttagttttcaagattcttttgagaattttcccatatcatgttcataggcg

SEQ ID NO: 965 - DNA, 110 bp, synthetic construct
  source 1..110: mol_type = other DNA
gcacctggcacacagcagacattcagcaggtgttagctgaatcaaaatctgtacatctccttgtgtcaacagcttgaggttataattcacgagcataagacgtagcaagt

SEQ ID NO: 966 - DNA, 110 bp, synthetic construct
  source 1..110: mol_type = other DNA
agtgatgagaaatgacctagtttgggacaagacagccttccttcagaggcatgaaaggcagtaatcgacttcgccagaacccgagttattagctgtattttgtccttggt

SEQ ID NO: 967 - DNA, 110 bp, synthetic construct
  source 1..110: mol_type = other DNA
aggcagtaatcgacttcgccagaacccgagttattagctgtattttgtccttggtgatcctggagttggtaggtgttattgggacctgtcagcacccatatacacttact

SEQ ID NO: 968 - DNA, 110 bp, synthetic construct
  source 1..110: mol_type = other DNA
tccatgcaatctcaaaataatctcaaagagatattgtatgtgcatgaggtgtgcaactttaaaagctgattctaaaatatttatggaaattgaaagggttaaagtagtcc

SEQ ID NO: 969 - DNA, 110 bp, synthetic construct
  source 1..110: mol_type = other DNA
ctaaaagacttaggactcctcctcttcactttgcgctcctccattgttttaagttccttattgcaccaaggccagcttcttatgacctaaggaaagacagcaaaatcata

SEQ ID NO: 970 - DNA, 110 bp, synthetic construct
  source 1..110: mol_type = other DNA
ccttattgcaccaaggccagcttcttatgacctaaggaaagacagcaaaatcatacacatagttgcaatatgccaaaatgaaggaggttcgaaagcccacttcatggact

SEQ ID NO: 971 - DNA, 110 bp, synthetic construct
  source 1..110: mol_type = other DNA
gacttaatcccatcccttcaattccagaaggttaaaccttttagaataaccagaatactacagctgcattaaacctttcaaatatgaagttaggtatatggaattcccat

SEQ ID NO: 972 - DNA, 110 bp, synthetic construct
  source 1..110: mol_type = other DNA
accttttagaataaccagaatactacagctgcattaaacctttcaaatatgaagttaggtatatggaattcccatggagttcctgttgtggctcagtaggttaagaaccc

SEQ ID NO: 973 - DNA, 110 bp, synthetic construct
  source 1..110: mol_type = other DNA
gcctctgggcagtggtgagagctgagatgtgagacctcgtgaaagatgaagcattgggcgctgaagcaataactaacgtcataggcagagttgagtccctctggaggcct

SEQ ID NO: 974 - DNA, 110 bp, synthetic construct
  source 1..110: mol_type = other DNA
gggcgctgaagcaataactaacgtcataggcagagttgagtccctctggaggcctcaaggaactgagggacatgaactccttaaggaccaatgtgtttgcctttagaggt

SEQ ID NO: 975 - DNA, 110 bp, synthetic construct
  source 1..110: mol_type = other DNA
gctactaatgcgctccagaaagtttcagctccaaaagaagttgccaaaagaggagaagccttggtgtgtaccagtctggaaaagtaccagaatgctgcctgtgtttaggg

SEQ ID NO: 976 - DNA, 110 bp, synthetic construct
  source 1..110: mol_type = other DNA
gcattagaaatgtttggtggccagggtcaaactgcagcagtgacagcctcgagtgtgagcatgaagctgtcatcaccttgcgtgtcactgcatgtgccctactgggctcg

SEQ ID NO: 977 - DNA, 110 bp, synthetic construct
  source 1..110: mol_type = other DNA
tgagcatgaagctgtcatcaccttgcgtgtcactgcatgtgccctactgggctcgcggcagtttgaacaacatggggctgtgttcagatcagaccgcaagagcgtttata

SEQ ID NO: 978 - DNA, 110 bp, synthetic construct
  source 1..110: mol_type = other DNA
agcagagtgtgcgaggcagggttgggggggcattttgtcctttgaagtagaggggatcagagcgagaggaaggcagcttgtccgacaagcactccctccccaccgagctt

SEQ ID NO: 979 - DNA, 110 bp, synthetic construct
  source 1..110: mol_type = other DNA
atcagagcgagaggaaggcagcttgtccgacaagcactccctccccaccgagcttccctagtcctttctccggagattctgtctctggggtggggccacagagtaattta

SEQ ID NO: 980 - DNA, 110 bp, synthetic construct
  source 1..110: mol_type = other DNA
aatgctctccctgactctcaatgttgtctgaatagtgggaaggagcaggttcactgagagggcctggaacaatttgaaaaaatcgagctttttgtgcactggactgtcct

SEQ ID NO: 981 - DNA, 110 bp, synthetic construct
  source 1..110: mol_type = other DNA
gaaagcataagaatgaatgggtgtgtctgtggatttaagcattgtatttcaagtatttcgaccatgcatgaagataataagtgcacctaaattaacttagtcatgtataa

SEQ ID NO: 982 - DNA, 110 bp, synthetic construct
  source 1..110: mol_type = other DNA
tctgtggatttaagcattgtatttcaagtatttcgaccatgcatgaagataataagtgcacctaaattaacttagtcatgtataatcatctatctcagatgttaagcttg

SEQ ID NO: 983 - DNA, 110 bp, synthetic construct
  source 1..110: mol_type = other DNA
gggcagcgctcagaaaccagggattctagctgccagacggatgacatcaaagtcgtaccaccttcgatgagaagaatcagggcgcagaaggggcagggcatcgccgccca

SEQ ID NO: 984 - DNA, 110 bp, synthetic construct
  source 1..110: mol_type = other DNA
gaaaacacaacaaaaggcatgagacctgtttttaaggaagggtgaaaggcatagaagctaaattgcagaggagctaaactccaagtgctggcaagtaaaatcagcagtca

SEQ ID NO: 985 - DNA, 110 bp, synthetic construct
  source 1..110: mol_type = other DNA
agctaaattgcagaggagctaaactccaagtgctggcaagtaaaatcagcagtcagcagggctataaattatctaccacttaccgtacaaacaccgtcatttcagctctg

SEQ ID NO: 986 - DNA, 110 bp, synthetic construct
  source 1..110: mol_type = other DNA
ttcaaccttgataaacatgggccattttgcattaatttgttttccttcatgctcctttagtaacgtggatgataatagttcctaaacagttttggacatcaaaatttaaa

SEQ ID NO: 987 - DNA, 110 bp, synthetic construct
  source 1..110: mol_type = other DNA
catgggccattttgcattaatttgttttccttcatgctcctttagtaacgtggatgataatagttcctaaacagttttggacatcaaaatttaaatactctgttatactc

SEQ ID NO: 988 - DNA, 110 bp, synthetic construct
  source 1..110: mol_type = other DNA
ttaccagagtgtaggacagaatgatcatatacacagataccatccatttagtacggcttttatccctctagtggccaaatagcagttttccacaatttgggcataatgat

SEQ ID NO: 989 - DNA, 110 bp, synthetic construct
  source 1..110: mol_type = other DNA
aacacaaagttactattttaaccacttttaaaagttcaatttggtagcatggatatgttatcatgttgtgtaaccatcaccactatctatttgtagaactttttcatcac

SEQ ID NO: 990 - DNA, 110 bp, synthetic construct
  source 1..110: mol_type = other DNA
ctggtcttctactttctgatacgatctgtgtggtctatcctatatatgctgatggttcagtcagccagagatgcttgaggagctttcctagtccttctatgaatctctgg

SEQ ID NO: 991 - DNA, 110 bp, synthetic construct
  source 1..110: mol_type = other DNA
acttctgttgctgagttattttgtatgatacttttaattttaaatagaaggacctaaatataattttacccttccttccttcctacctcccttcctcccctttcctctct

SEQ ID NO: 992 - DNA, 110 bp, synthetic construct; identical to SEQ ID NO: 991
  source 1..110: mol_type = other DNA

SEQ ID NO: 993 - DNA, 110 bp, synthetic construct
  source 1..110: mol_type = other DNA
ggcttcatggagtccaccgaccccaccagccgcaccagctcagctgcgatgtaatagatagtccgagccaccggcccactcagggctggtgccgtggaggagcagcctga

SEQ ID NO: 994 - DNA, 110 bp, synthetic construct
  source 1..110: mol_type = other DNA
agatagtccgagccaccggcccactcagggctggtgccgtggaggagcagcctgagccccggccatggtcggagatcccgggggacgcagagtccgactccacactggta

SEQ ID NO: 995 - DNA, 110 bp, synthetic construct
  source 1..110: mol_type = other DNA
gaccttggattaactctctagctgtgttcttctgaaaacatgataaaagcgtaggacacgtcagctatgttaccaggcagcctagtttaggataaaaatatctcccaatt

SEQ ID NO: 996 - DNA, 110 bp, synthetic construct
  source 1..110: mol_type = other DNA
tgggtcacaggtggacaggatggggcataagcttgttctgttgtcctaggaagctggccccatcaatggcacctcctttcagggtcccagccagacccccattatttagt

SEQ ID NO: 997 - DNA, 110 bp, synthetic construct
  source 1..110: mol_type = other DNA
ggccccatcaatggcacctcctttcagggtcccagccagacccccattatttagtgggagtctagacgtcatcagccatctgcagctccacaagagcagcagccaacctt

SEQ ID NO: 998 - DNA, 110 bp, synthetic construct
  source 1..110: mol_type = other DNA
aaaaccctcccccttccctgcaccttcatggtctcagctctgaacacttttctgctcacgctgaagactccccagtctctccggcctcccacctgcttcccctgaccagg

SEQ ID NO: 999 - DNA, 110 bp, synthetic construct
  source 1..110: mol_type = other DNA
tcacgctgaagactccccagtctctccggcctcccacctgcttcccctgaccaggccctgaagaatctgcttcaccctccccttctggctcagcgtttgttattcctcac

SEQ ID NO: 1000 - DNA, 110 bp, synthetic construct
  source 1..110: mol_type = other DNA
cgatctttctagatgctgtctcgtcgaggaaaggacatacctaagccaagattcccgttacagaaagcgattactttttatgtgcaggcatgtgcaggttcactcttact

SEQ ID NO: 1001 - DNA, 110 bp, synthetic construct
  source 1..110: mol_type = other DNA
cgttacagaaagcgattactttttatgtgcaggcatgtgcaggttcactcttacttaattaaataaatcagcggccccaggtttcatgccctgacatgtcattatttctt

SEQ ID NO: 1002 - DNA, 110 bp, synthetic construct
  source 1..110: mol_type = other DNA
ggtactatagtccaggtgggaaacggtagtggtttgaaggagggtagtgataatgaactgggaaagctgcatggattcgagatatatttttgcaagtagcagccaaagat

SEQ ID NO: 1003 - DNA, 110 bp, synthetic construct
  source 1..110: mol_type = other DNA
ccttggtcatttaccctgtgaagtacacccagaccttcaaccttcatgccaacactgctgtcacttacatctataactgggcctatggcttcgggtgggcggccacaatt

SEQ ID NO: 1004 - DNA, 110 bp, synthetic construct
  source 1..110: mol_type = other DNA
gcaatgtcacagtggttctcttgagtgccagcctcacttgacaccatccccattagcttaagctgaatggcaggaagccagattaatccccctccatacttctcagcaaa

SEQ ID NO: 1005 - DNA, 110 bp, synthetic construct
  source 1..110: mol_type = other DNA
ccctaaaaaataaaaaaataaagagctaacatatgccataggtgtatttgaaggtgtttttctatgctcaagggttttcatgactcagattggtaacaataaatttgcct

SEQ ID NO: 1006 - DNA, 110 bp, synthetic construct
  source 1..110: mol_type = other DNA
atgataaatgctagatcagttttagctaattttaaagacatccacataaaaagggaaagagttttgggtgtcatgctttgtctcgtttcattccaaaaaattaacatcat

SEQ ID NO: 1007 - DNA, 110 bp, synthetic construct
  source 1..110: mol_type = other DNA
catgctgtcactccaacatctggcgcggccacctccactcccagcagttcagaaccaacagtggcacaaacggcccacaaactaccctccgggacagctgcaaacccagg

SEQ ID NO: 1008 - DNA, 110 bp, synthetic construct
  source 1..110: mol_type = other DNA
caacagtggcacaaacggcccacaaactaccctccgggacagctgcaaacccagggccaggtcgaccaggccagccccgcgggtggctgcccaattcgcacccgcagctc

SEQ ID NO: 1009 - DNA, 110 bp, synthetic construct
  source 1..110: mol_type = other DNA
gagtttaggaggaactcggaagcactccagttggcagtggcttcactgacagctttaagggagaagcttagataccagattcgtcttccatccaggcagaggctcctagg

SEQ ID NO: 1010 - DNA, 110 bp, synthetic construct
  source 1..110: mol_type = other DNA
taagggagaagcttagataccagattcgtcttccatccaggcagaggctcctaggcgatatgactgcaaggttatatgtgaaattcaaaatttgaagcaaaagattctca

SEQ ID NO: 1011 - DNA, 110 bp, synthetic construct
  source 1..110: mol_type = other DNA
agaagattcttatcattaaagccccactcttagaattccaggcaacccatttatttctctcaaagaaagctggttcttgcaaaccaacaaaaaaaccgcctttggctttc

SEQ ID NO: 1012 - DNA, 110 bp, synthetic construct
  source 1..110: mol_type = other DNA
tctctcaaagaaagctggttcttgcaaaccaacaaaaaaaccgcctttggctttcagattatagtgtctactctgcacttaagaaatccagtcacggagttcccattgtg

SEQ ID NO: 1013 - DNA, 110 bp, synthetic construct
  source 1..110: mol_type = other DNA
agggagcgatatttgtttggagcttgggagagagaacgttcattggtgaaaatgaaagtacatttttctccaaaagcctgagatcattctaatttttctgcagaaatact

SEQ ID NO: 1014 - DNA, 110 bp, synthetic construct
  source 1..110: mol_type = other DNA
tagaatttagaaaccaagatctaagaattaaatatgctcattgctaccagggtgtctttgtatctaggctcttgtagagaacagagctggaaaaacacatgcatgcacat

SEQ ID NO: 1015 - DNA, 110 bp, synthetic construct
  source 1..110: mol_type = other DNA
ctttgtatctaggctcttgtagagaacagagctggaaaaacacatgcatgcacatgtgcacaaacacacacacagtgattgtctatatgtgtaatataaattctgatgtt

SEQ ID NO: 1016 - DNA, 110 bp, synthetic construct
  source 1..110: mol_type = other DNA
ctggacttcccctcctacagtaaacagctctaaaaacagacaaaatacatgaaacaactgtttttagatgtggattaacagacaacagggggttgctatcctggaaagaa

SEQ ID NO: 1017 - DNA, 110 bp, synthetic construct
  source 1..110: mol_type = other DNA
tcccccagaaccacaacaaaggccaagccaggggcctttccctgctctcttgagccattgcagacttgcctaggaggctgccttgctttccctagaaagccttattttat

SEQ ID NO: 1018 - DNA, 110 bp, synthetic construct
  source 1..110: mol_type = other DNA
cattgcagacttgcctaggaggctgccttgctttccctagaaagccttattttatgagtcataagccttttcaatctcccttgctacatagctggcatcatcattcttga

SEQ ID NO: 1019 - DNA, 110 bp, synthetic construct
  source 1..110: mol_type = other DNA
acgaaaaaacccaaacaacaacagcaacaacaaaaactctcagattgaataggttataggctctcgcttggcccacatctttcctgcctcacatatcttttagcaatatt

SEQ ID NO: 1020 - DNA, 110 bp, synthetic construct
  source 1..110: mol_type = other DNA
tcagatagtaaacacttaaaaacagtgtcttagtctttttcatacttgtggttctcacagggctgggattgatatcttgctggtaacaggagcttcatttttctttttaa

SEQ ID NO: 1021 - DNA, 110 bp, synthetic construct
  source 1..110: mol_type = other DNA
cacagggctgggattgatatcttgctggtaacaggagcttcatttttctttttaattaatgaaagattcctaagtaattttgaagtcaggtctttataatctcatctact

SEQ ID NO: 1022 - DNA, 110 bp, synthetic construct
  source 1..110: mol_type = other DNA
atttctcagaagatatcagctcatgaacatgtaccaatgtggcacaggcagggtgcaggtacagatgtgataaactgactactggtaaatggaaccaagataaataacat

SEQ ID NO: 1023 - DNA, 110 bp, synthetic construct
  source 1..110: mol_type = other DNA
acttttgtcacattcaccgacaggcataggatacttcctcaccccaatatctcggagcttggtcaagagactcactttggccaacagaatcctactgggcatatgccact

SEQ ID NO: 1024 - DNA, 110 bp, synthetic construct
  source 1..110: mol_type = other DNA
gtcctggatcgtcatcattttttctcctcctgtattccttaagcacatctatttgcccattccctcacagctgaaactgttagaggctacaagctcctttcaaggagatt

SEQ ID NO: 1025 - DNA, 110 bp, synthetic construct
  source 1..110: mol_type = other DNA
cacccacccctacccccaccagaccctggagacatctcctgtgctttaaagctagagactctagttttacctcccagatggataaacttatttccaaaagggtaagaacc

SEQ ID NO: 1026 - DNA, 110 bp, synthetic construct
  source 1..110: mol_type = other DNA
atgtggccctaaaaagccaaaacaaaacgtactttttactatgcagtggggtgttttttatgtacagggccaaagcatagttagaaaagtctcttaaggagcttaaagtc

SEQ ID NO: 1027 - DNA, 110 bp, synthetic construct
  source 1..110: mol_type = other DNA
ttttatgtacagggccaaagcatagttagaaaagtctcttaaggagcttaaagtctagtggagaagaaagataagtattccctggatgcagagtgtggtaggttcaaagg

SEQ ID NO: 1028 - DNA, 110 bp, synthetic construct
  source 1..110: mol_type = other DNA
gtgcttttgaaaaatctctttggctatttgtgaacagattgaagacagcaaaagtggatacaaagaaagcagcctctagaggatggtggaatggcccgtcctggaatgtg

SEQ ID NO: 1029 - DNA, 110 bp, synthetic construct
  source 1..110: mol_type = other DNA
ggatacaaagaaagcagcctctagaggatggtggaatggcccgtcctggaatgtggtagctctcaggggagtctggtttactcagtgagccatcaaaccatcttctcagt

SEQ ID NO: 1030 - DNA, 110 bp, synthetic construct
  source 1..110: mol_type = other DNA
tagataatcactactaagtgcatttcacacttccctgaccttttgtcatgatttctaagtcttcattgaaaatgtcagctgtaataaggtgatgccctccagaaaaactg

SEQ ID NO: 1031 - DNA, 110 bp, synthetic construct
  source 1..110: mol_type = other DNA
caaatggaacatagcaaacattcatggtccagagcagaggagagaaccacctgcacattgtcagcctataacttatgaggagaaggatttgcaagtcagccagttaccaa

SEQ ID NO: 1032 - DNA, 110 bp, synthetic construct
  source 1..110: mol_type = other DNA
cattgtcagcctataacttatgaggagaaggatttgcaagtcagccagttaccaagtgcagctgctcaaccacaaatgcaaggtgctggcaggtgtcacaggaggtcatc

SEQ ID NO: 1033 - DNA, 110 bp, synthetic construct
  source 1..110: mol_type = other DNA
gacacgggagaccagcacattcaagtctaaaaagtcatataaagacatgaagggaggacagttcatggtgctcaggaactatatgtcaaaaatttggtgagtgagtatag

SEQ ID NO: 1034 - DNA, 110 bp, synthetic construct
  source 1..110: mol_type = other DNA
ggacagttcatggtgctcaggaactatatgtcaaaaatttggtgagtgagtatagcaatgtctcggggtttaagactattgtataaaatccactgtatttctgtatacta

SEQ ID NO: 1035 - DNA, 110 bp, synthetic construct
  source 1..110: mol_type = other DNA
tcaaggactagccatgcccctcccatcacaggtctataacatactaaatgttccttctgtctcttcatacagccaacatctactcattcctcagctctcagatgagcctt

SEQ ID NO: 1036 - DNA, 110 bp, synthetic construct
  source 1..110: mol_type = other DNA
tctgtctcttcatacagccaacatctactcattcctcagctctcagatgagccttacttccttacagatttcttaactacgtcaaatatctatcctgaccatgaactctt

SEQ ID NO: 1037 - DNA, 110 bp, synthetic construct
  source 1..110: mol_type = other DNA
aaatgaggaatgaagacacagcagtcaagcagcatgaccaaagtcacgtaacggtggtaaaagcagattttgaccacaggaagtctggcccagagtccatgtccccaacc

SEQ ID NO: 1038 - DNA, 110 bp, synthetic construct
  source 1..110: mol_type = other DNA
ggtaaaagcagattttgaccacaggaagtctggcccagagtccatgtccccaaccactgtgctgtgacctcctcctcaaagaatttcagactccttatcacatgttgcta

SEQ ID NO: 1039 - DNA, 110 bp, synthetic construct
  source 1..110: mol_type = other DNA
cagcagcctaagcctttctcccaagagagggcaaggaccctgcctgactcattcgtcttccctgctaagccctgaacagtcccctgcagacagcagagttaatcaaattt

SEQ ID NO: 1040 - DNA, 110 bp, synthetic construct
  source 1..110: mol_type = other DNA
tttaaaataattggagtatttgttccatgaagacaggaatctttgcccattatgttcactggtatatccctgggacccagcataagcattcaggaaatattgttatttag

SEQ ID NO: 1041 - DNA, 110 bp, synthetic construct
  source 1..110: mol_type = other DNA
tcactggtatatccctgggacccagcataagcattcaggaaatattgttatttagtgactgcagcataatacaagcccaaactttcactgtagtttttgtaatcgtgcaa

SEQ ID NO: 1042 - DNA, 110 bp, synthetic construct
  source 1..110: mol_type = other DNA
gaatttagtctttacattttcatctgtattatgttctcactctacttggacccttaataaaagtttcccatttgggccacgtcactgaactttctgggtttggtttcccc

SEQ ID NO: 1043 - DNA, 110 bp, synthetic construct
  source 1..110: mol_type = other DNA
tcgcctcaggaattttctttcttttccttagtcatatctctattgatattgcccgtgtagcttttgttagttgtatctttgttagttacggctccatgggtatttatttc

SEQ ID NO: 1044 - DNA, 110 bp, synthetic construct
  source 1..110: mol_type = other DNA
ttttacctcaggtcatcttcacagcatcctttgggagaaatatgcattttccccgcttgtaattaaagaagagactcagggaggtgaggagctggccccacttatgcagg

SEQ ID NO: 1045 - DNA, 110 bp, synthetic construct
  source 1..110: mol_type = other DNA
cttgtaattaaagaagagactcagggaggtgaggagctggccccacttatgcaggtaccagcaatcttggtttgctgtaccagtccacagtcttcacatttctatgtgaa

SEQ ID NO: 1046 - DNA, 110 bp, synthetic construct
  source 1..110: mol_type = other DNA
aatagtagaaaaatagattattgtaattacatggctctcagctatttatgttcgtctttgttgcatgaaaagcacatggtacaggagttcccttcgtggctcagtggaaa

SEQ ID NO: 1047 - DNA, 110 bp, synthetic construct
  source 1..110: mol_type = other DNA
tttctttaatagaagaggagttctcattgctacgaaattcatccttttaactgtagtgcaattccatctgtggggataatttcgatcctgcttctagccgtgtctcagct

SEQ ID NO: 1048 - DNA, 110 bp, synthetic construct
  source 1..110: mol_type = other DNA
gtgcaattccatctgtggggataatttcgatcctgcttctagccgtgtctcagcttttatttatctataggtctgcagcccttgttctcatctgaacttttaataacatt

SEQ ID NO: 1049 - DNA, 110 bp, synthetic construct
  source 1..110: mol_type = other DNA
ggctcatttttttccccttctgatttggttcctcttgatgtttacaaaactaaatgcagatctgcttcagcctggtgaaaaagcccctgttttgcttcctgacttccgga

SEQ ID NO: 1050 - DNA, 110 bp, synthetic construct
  source 1..110: mol_type = other DNA
tattgaaatgttacctgtttttttcccccctctaggataatggacacttagcattgagcaaatggacatcacgctaataaccgtgctctctagcaggctgttaggagttt

SEQ ID NO: 1051 - DNA, 110 bp, synthetic construct
  source 1..110: mol_type = other DNA
gagcaaatggacatcacgctaataaccgtgctctctagcaggctgttaggagttttgcagatgggttaggaaacaatttagcatgtgattgagatacacatagaattaaa

SEQ ID NO: 1052 - DNA, 110 bp, synthetic construct
  source 1..110: mol_type = other DNA
cctcttcatgtgcaccagccctctttttaaatcataattccttgcagttttatgtatttcctctgtggtgcccaatgagctgttatcaacccgagttctcagtagtaccc

SEQ ID NO: 1053 - DNA, 110 bp, synthetic construct
  source 1..110: mol_type = other DNA
atttcctctgtggtgcccaatgagctgttatcaacccgagttctcagtagtaccccagggagggagacaagaaagcaagtgctggcatcccaccacctgcccgtgggaac

SEQ ID NO: 1054 - DNA, 110 bp, synthetic construct
  source 1..110: mol_type = other DNA
acttcctgtactgtcctattcccacggcctgccaactaaagcagttgttaggacctttctcttccaggaggggctttccttttctgaatttgaattcattcggtttcaac

SEQ ID NO: 1055 - DNA, 110 bp, synthetic construct
  source 1..110: mol_type = other DNA
tttctcttccaggaggggctttccttttctgaatttgaattcattcggtttcaacctcagctcgccggtgggctttaaatatttcgtatattatgtatcttctcattggt

SEQ ID NO: 1056 - DNA, 110 bp, synthetic construct
  source 1..110: mol_type = other DNA
ctactgagtcttggcatattttctatcataagcgacacttcttagtttccagtgggcgtccgggaagaaactcggcgcttcctggtgaggagagacgctgtgtgcgagta

SEQ ID NO: 1057 - DNA, 110 bp, synthetic construct
  source 1..110: mol_type = other DNA
ggtgctgaactaaaggaagaactgacaaacacagcaggtgtggaccaaggtgtaagcagcaggggccgtgtcttcttttaggcgcaactgcagaaatatgccagcacacc

SEQ ID NO: 1058 - DNA, 110 bp, synthetic construct
  source 1..110: mol_type = other DNA
gcagcaggggccgtgtcttcttttaggcgcaactgcagaaatatgccagcacacctccccccacatgtgaaaagtctcttctcctgtcagtgaagtttaatgtagtctat

SEQ ID NO: 1059 - DNA, 110 bp, synthetic construct
  source 1..110: mol_type = other DNA
gttttcttccttaattcctagtaagttttatggctctgttctaagctgcttacgttgctttaccagcctggactagtgatgatggagggagcatgatcgggtaggaggga

SEQ ID NO: 1060 - DNA, 110 bp, synthetic construct
  source 1..110: mol_type = other DNA
tgctttaccagcctggactagtgatgatggagggagcatgatcgggtaggagggagatatttggaagaggacccggagggttgcttctactcccaggctggtttacaggc

SEQ ID NO: 1061 - DNA, 110 bp, synthetic construct
  source 1..110: mol_type = other DNA
agccctgaaactgggcctgaagaaacaagctgtgtttcaaggccaaaatcccacccaacgtcaagatcctgctgctaattcattgcctcaattctgaatgagcttaatct

SEQ ID NO: 1062 - DNA, 110 bp, synthetic construct
  source 1..110: mol_type = other DNA
caacgtcaagatcctgctgctaattcattgcctcaattctgaatgagcttaatctcttagaaattataccctaacttgagggccatttgtcttttcactgtatttatttg

SEQ ID NO: 1063 - DNA, 110 bp, synthetic construct
  source 1..110: mol_type = other DNA
atttgatcaaaacttgagggacgtcagggagctgtccaaccagatatctgggaaaatgcctttcttacagaggaactagctctgatcaccctagagtgggattgtgcctg

SEQ ID NO: 1064 - DNA, 110 bp, synthetic construct
  source 1..110: mol_type = other DNA
atgcctttcttacagaggaactagctctgatcaccctagagtgggattgtgcctggctttctggtacctgggatgagcagaagttcagtgtgggtgggaaggagggaaaa

SEQ ID NO: 1065 - DNA, 110 bp, synthetic construct
  source 1..110: mol_type = other DNA
tgtgcattggatctccagaatttactcatcttgcataactgaaactttgtgccccttgaccaacatcatcccatcttccccatagctgctgacaaccacgtcttagtcta

SEQ ID NO: 1066 - DNA, 110 bp, synthetic construct
  source 1..110: mol_type = other DNA
ttgaccaacatcatcccatcttccccatagctgctgacaaccacgtcttagtctatttctataaatttgactattttggactccacatatgagatcatgttttttgtgtt

SEQ ID NO: 1067 - DNA, 110 bp, synthetic construct
  source 1..110: mol_type = other DNA
aactgacttgtcaacaagaacttgcagagacagcacagatactaaacaactccattccctcctttgggggcctgaagcttaggagatttgacttgtttaagccacagggc

SEQ ID NO: 1068 - DNA, 110 bp, synthetic construct
  source 1..110: mol_type = other DNA
tccctcctttgggggcctgaagcttaggagatttgacttgtttaagccacagggcaagcaaacaaccagctaagcccagatcgcaggtttctggattttcaggctattca

SEQ ID NO: 1069 - DNA, 110 bp, synthetic construct
  source 1..110: mol_type = other DNA
ccacctcggataatgtcagagatgaagacctaactgaggctgtttcatcaagttagccactatcctacagcttaccccatgttagttcaggcacttagaaagacacaccc

SEQ ID NO: 1070 - DNA, 110 bp, synthetic construct
  source 1..110: mol_type = other DNA
aactatctcaccactatcttggccagaggcaaaacacaagtataaccaacctggcatcaagcagtagaaggctggcctaggataagcgagaggatgcagagagtcttcag

SEQ ID NO: 1071 - DNA, 110 bp, synthetic construct
  source 1..110: mol_type = other DNA
atcaagcagtagaaggctggcctaggataagcgagaggatgcagagagtcttcagctatgtggaacctgaaactcatctcagccatatcagaatatttctagcctgaaat

SEQ ID NO: 1072 - DNA, 110 bp, synthetic construct
  source 1..110: mol_type = other DNA
gccggactgaggatacccactggtccccggtctctgactttggctttttagtttgcttcatgcagtcactttctaaataagacttaaatcatccagacacctaaatgatt

SEQ ID NO: 1073 - DNA, 110 bp, synthetic construct
  source 1..110: mol_type = other DNA
tggttgctgaaattctcctctttccctttcttctaaattagtttcacttcacacgcatcaaaatgcagctaatcccaatagatgcgatctgtcttcttttctgcatctga

SEQ ID NO: 1074 - DNA, 110 bp, synthetic construct
  source 1..110: mol_type = other DNA
ttcaacagtgaagaaactgagactcatttaggtgaagtggtagagccaggatgcaaacccacacctctctgcctccagagccagaaagtcttgcagctttctttgtatag

SEQ ID NO: 1075 - DNA, 110 bp, synthetic construct
  source 1..110: mol_type = other DNA
aacccacacctctctgcctccagagccagaaagtcttgcagctttctttgtatagattttcttgatctcttacctttctcatttgttgctcataactttagcctgtctct

SEQ ID NO: 1076 - DNA, 110 bp, synthetic construct
  source 1..110: mol_type = other DNA
gagtgccagaggggaagctgtacccaccaaactgccaccatgcttaataagctctcatctagtttctggttaacatacgatttcactaccaaggccactgactttccttt

SEQ ID NO: 1077 - DNA, 110 bp, synthetic construct
  source 1..110: mol_type = other DNA
agtgcttgtggaaaccatcgtctggaaagaaatgtgtggagagtaatgcaagacgctcttgtcaacctgatcatcctcttgtataggacacacaatggctcctggaggac

SEQ ID NO: 1078 - DNA, 110 bp, synthetic construct
  source 1..110: mol_type = other DNA
ttaagataccaagtcatagaattatccttactttctgacagcatcagatccagggacaagctcctgtcttgaactcctcccccaccaaatactgaacacaactaaaaatt

SEQ ID NO: 1079 - DNA, 110 bp, synthetic construct
  source 1..110: mol_type = other DNA
ttaagtgttgtttaaaataaatgattcaggtacagtctaaataattctccgtgaatactattttgttataaaaagacccccttaacaccagcgaatacacaccctttaga

SEQ ID NO: 1080 - DNA, 110 bp, synthetic construct
  source 1..110: mol_type = other DNA
tctccgtgaatactattttgttataaaaagacccccttaacaccagcgaatacacaccctttagaaaaaataaacgtaaaagtaataaaagataatcagatggattacat

SEQ ID NO: 1081 - DNA, 110 bp, synthetic construct
  source 1..110: mol_type = other DNA
gtatttaatgattgctgttacctcctgggctttcaggaagaagattgcttgttatgaggactctgggaactttttaaaaatatatattttaaggaaattcaaattcaaaa

SEQ ID NO: 1082 - DNA, 110 bp, synthetic construct
  source 1..110: mol_type = other DNA
aacttgtgttatatttgcagtacattgatcatctctgatgacccaactgaaggtgaacaaaagaaatctctagttggaacagttacttcagagtctcgtcaagatgatga

SEQ ID NO: 1083 - DNA, 110 bp, synthetic construct
  source 1..110: mol_type = other DNA
ccacatgtttgtccttccctcttattttcttctgtccattcccaaagttcagtcgaataattaaacattcatttatttatcaaacagaattatatatgtcacagagtgaa

SEQ ID NO: 1084 - DNA, 110 bp, synthetic construct
  source 1..110: mol_type = other DNA
tggataaaaattttaaaatcagtaatcaccctgggccagttttagagcagtcagattatagtagtgagatcacatatgtaaggtcttgctattttctaaacccggtggta

SEQ ID NO: 1085 - DNA, 110 bp, synthetic construct
  source 1..110: mol_type = other DNA
tttccactgattgttttttgacaaatgcccaaagaatacagctgttcaaagagctgactctcagtcacatcagataaagacagcccctgagaatgaagctttttcaggct

SEQ ID NO: 1086 - DNA, 110 bp, synthetic construct
  source 1..110: mol_type = other DNA
gactctcagtcacatcagataaagacagcccctgagaatgaagctttttcaggctgctgcctaggtcatatagtggtacttctctggagatggtaatttatgggcacttt

SEQ ID NO: 1087 - DNA, 110 bp, synthetic construct
  source 1..110: mol_type = other DNA
agagtgcttccagcccacaggggaaggaccatcaggagctgccgcttctcccaaaagttgcacttcaaaggaaagaaaaagctaggcagtaactagtggaaaacacagga

SEQ ID NO: 1088 - DNA, 110 bp, synthetic construct
  source 1..110: mol_type = other DNA
ccacattcatttcccaaagagcatcttcctctggcaccaaaggggaaatccagcttcctgtggttgttctcctaaaccagcatgctgtggatgagtctgagagctcagcc

SEQ ID NO: 1089 - DNA, 110 bp, synthetic construct
  source 1..110: mol_type = other DNA
tcctgtggttgttctcctaaaccagcatgctgtggatgagtctgagagctcagccattccaggccagctgggggtgctgggtgggtcctgattctcccagtctcggctcc

SEQ ID NO: 1090 - DNA, 110 bp, synthetic construct
  source 1..110: mol_type = other DNA
gatgtgatgtaggtttgggtttgcaggagtgacaacctctgttggccattacggttgcctctgttcttctaaatccatggaaagagctcttaacctccagccccagggga

SEQ ID NO: 1091 - DNA, 110 bp, synthetic construct
  source 1..110: mol_type = other DNA
tgcctctgttcttctaaatccatggaaagagctcttaacctccagccccaggggatggccaaagcgctctgtagttcagtgctgctcaagcctgactgccctctggagtc

SEQ ID NO: 1092 - DNA, 110 bp, synthetic construct
  source 1..110: mol_type = other DNA
aaaaacctcagcccaccaccaacctgaattttcttacatctatattagtatatttgggatataatgtaaaaatggggcttttggcaaatgatttgaactgtgtgttaaca

SEQ ID NO: 1093 - DNA, 110 bp, synthetic construct
  source 1..110: mol_type = other DNA
gggatataatgtaaaaatggggcttttggcaaatgatttgaactgtgtgttaacaggcaacgtaatgaactcaaatataaaataaaagtatgacaacaaaacaaagcatt

SEQ ID NO: 1094 - DNA, 110 bp, synthetic construct
  source 1..110: mol_type = other DNA
acattagtctgagaaacccatttaagttagcttaaacaaaggatagatataccaccacttaatatacctcacctattggttgcatgcacttaatttcctgtcattacaaa

SEQ ID NO: 1095 - DNA, 110 bp, synthetic construct
  source 1..110: mol_type = other DNA
catgtcagccccaaatatgccttggcatattgttttgagttgaagtaacttgagaaacagccaatgcaataagggctctcagcccttttcctttctacctaaatgcagct

SEQ ID NO: 1096 - DNA, 110 bp, synthetic construct
  source 1..110: mol_type = other DNA
aacagccaatgcaataagggctctcagcccttttcctttctacctaaatgcagctcacaaaatttccatgagaaaagtgtcttttctataccaagaagagagataagata

SEQ ID NO: 1097 - DNA, 110 bp, synthetic construct
  source 1..110: mol_type = other DNA
gttgagtggaatcaaccctgaataaagcagtcattgtcttctctgtgcctgtaactgaatagctgaccattgctggaaaaagtcatagaaaggcagactgattccactgc

SEQ ID NO: 1098 - DNA, 110 bp, synthetic construct
  source 1..110: mol_type = other DNA
tgaatagctgaccattgctggaaaaagtcatagaaaggcagactgattccactgcaaattcattcttacagatcttaaatgggtcctcaatactatccagtggtttccct

SEQ ID NO: 1099 - DNA, 110 bp, synthetic construct
  source 1..110: mol_type = other DNA
gactgagcctggacccagtggtgggagaaagctgtgagtgactgtagatgtttgtcatgcacgtgggaggagaggggtgagacacaggctttggacttgctatctctgga

SEQ ID NO: 1100 - DNA, 110 bp, synthetic construct
  source 1..110: mol_type = other DNA
tcatttaacagtgtaaattttatcacatccttctgctgcttaaagctttctgtggtcttttcatgatactgaggataaaatgcaagctccttgtgagcttatgcgcctat

SEQ ID NO: 1101 - DNA, 110 bp, synthetic construct
  source 1..110: mol_type = other DNA
tcttttcatgatactgaggataaaatgcaagctccttgtgagcttatgcgcctatgagactttgcgtggtattgcctcacctcctgccttcacctgctacatggttctga

SEQ ID NO: 1102 - DNA, 110 bp, synthetic construct
  source 1..110: mol_type = other DNA
agtgagctgcgctctggatggtagtgggccagcagtaaggcatatgcttttcttaggaggactgagtcaatctttgctgaattctccacctttgcttgcccagccttcta

SEQ ID NO: 1103 - DNA, 110 bp, synthetic construct
  source 1..110: mol_type = other DNA
ccaacaggaaaggggaagttcatcattgaagattgagcctatggagtctaaggttgaccagatgtcctgacatttgtctttaggggggaaagggccaaaggcaatgcttc

SEQ ID NO: 1104 - DNA, 110 bp, synthetic construct
  source 1..110: mol_type = other DNA
gaccagatgtcctgacatttgtctttaggggggaaagggccaaaggcaatgcttctcagagacagtacaaaaaagagagctagagcctggggaagcctgagcccaacaca

SEQ ID NO: 1105 - DNA, 110 bp, synthetic construct
  source 1..110: mol_type = other DNA
gttctctgcaattcatgtcccctttgcccccaccagagcttcacatcacctgtcaccccctatgtgtgttatcacctcctaaggccaccttcccgtccatgctgttgaaa

SEQ ID NO: 1106 - DNA, 110 bp, synthetic construct
  source 1..110: mol_type = other DNA
cccattgttcagatcaaacccttagcccatccttgcctcttccccatatctggcctgtcaacaagccagtcagctctatgtttgcaatgtagttagattttaattatctg

SEQ ID NO: 1107 - DNA, 110 bp, synthetic construct
  source 1..110: mol_type = other DNA
tgagccccatgtcagatcaccatgcctgggaatctggcattagaagtaagaactcccatagcatctggcattgaaagccagtggggcttgtaagcaggagctccacagga

SEQ ID NO: 1108 - DNA, 110 bp, synthetic construct; identical to SEQ ID NO: 1107
  source 1..110: mol_type = other DNA

SEQ ID NO: 1109 - DNA, 110 bp, synthetic construct
  source 1..110: mol_type = other DNA
attctagagattgtatcctttgcttagaaagttcgtggattcccagtttgggcctcttctggtacggaaaatggatggttacctgtttagctatatggagagttgaatta

SEQ ID NO: 1110 - DNA, 110 bp, synthetic construct
  source 1..110: mol_type = other DNA
cttctggtacggaaaatggatggttacctgtttagctatatggagagttgaattagaattttcttctctttcctctttctcttttcaaaggcttgctgggtggttcgtac

SEQ ID NO: 1111 - DNA, 110 bp, synthetic construct
  source 1..110: mol_type = other DNA
ggtgttattagccaaccggtttgtcaagagttctttgttttttgcaacaatacaatttattttctgagttgcctgaacaaacaggtcgtaatttgggctattgtgtggag

SEQ ID NO: 1112 - DNA, 110 bp, synthetic construct
  source 1..110: mol_type = other DNA
gaattaacatcacccaaagtggtgagacctggaggtgtgagcatggacttcggcaacagctcagtcaaatctgaatctgagacccatgtctcactaatcataggataacc

SEQ ID NO: 1113 - DNA, 110 bp, synthetic construct
  source 1..110: mol_type = other DNA
gaataatatttctgacttcctttttccattattcattccattttcttttccaccatccagaacctcatccaggtttctttacccagtatggaatgatccaagcttctttc

SEQ ID NO: 1114 - DNA, 110 bp, synthetic construct
  source 1..110: mol_type = other DNA
tccagaacctcatccaggtttctttacccagtatggaatgatccaagcttctttcctgaagcttctgaatctttgcggtcctgacttgtttggatgctgtaattttccat

SEQ ID NO: 1115 - DNA, 110 bp, synthetic construct
  source 1..110: mol_type = other DNA
tcctcaaggttctcccatgcgctattgtgtggccaatatgcctctacattgatgattcctcagaagtctgctttctgttttaatcaagctgaatagaagcagccctttgt

SEQ ID NO: 1116 - DNA, 110 bp, synthetic construct
  source 1..110: mol_type = other DNA
agagagaaattgctcaaaataccccgcccattacatctttaaaaaaaaggctataaaatctattaccatccagagtttctacttcatttctcaaagtcattcagaaggca

SEQ ID NO: 1117 - DNA, 110 bp, synthetic construct
  source 1..110: mol_type = other DNA
gtaaaatggatttaatgataacacttacctcttagaactgatttgaggattaaaggacatgcgaagcatttagccctggtgcttggtacatactaagagctcaaaacatg

SEQ ID NO: 1118 - DNA, 110 bp, synthetic construct
  source 1..110: mol_type = other DNA
gacatgcgaagcatttagccctggtgcttggtacatactaagagctcaaaacatgttagaggatatcaagacagacctcaaaattatgacctttctatactttttgttgt

SEQ ID NO: 1119 - DNA, 110 bp, synthetic construct
  source 1..110: mol_type = other DNA
tcgtggagttgtaatgagccatcacgaaggggtttttagagccaggttttcaatcctgggtaagatttgacctagcaaaactgaaatgaggttaagaataaatggcactc

SEQ ID NO: 1120 - DNA, 110 bp, synthetic construct
  source 1..110: mol_type = other DNA
tggtccactagccatcatttgtagactcttggactctcagagtctaaaagagtttgccagctccttagagtctgcagaactactcatgactcagaggtagagagagcgct

SEQ ID NO: 1121 - DNA, 110 bp, synthetic construct
  source 1..110: mol_type = other DNA
gccagctccttagagtctgcagaactactcatgactcagaggtagagagagcgctctgcaaatctatccagggcaccagtgcctggtcctagatgttccctggagggcct

SEQ ID NO: 1122 - DNA, 110 bp, synthetic construct
  source 1..110: mol_type = other DNA
agatggtcttaaagctgatttttatttggggacttcttagaagcattttgtgtcaatcattatccctcagtccatccaaacaaatgctcatcaatttacctgtctcacaa

SEQ ID NO: 1123 - DNA, 110 bp, synthetic construct
  source 1..110: mol_type = other DNA
ttctcaggccagtgtcacctgctggccctcaaggtccctccccctacttcctcggaccactggcaagctctctccgtgtttctcccgaatctgaatcttttgtcacttgg

SEQ ID NO: 1124 - DNA, 110 bp, synthetic construct
  source 1..110: mol_type = other DNA
caaccaggtgtaagcaccatagatcttaagtaaagatgtaggatctcaaccaggtgtaagcaccatagatcttgagtaaagatgtaggatcaccacctagatctttaagt

SEQ ID NO: 1125 - DNA, 110 bp, synthetic construct
  source 1..110: mol_type = other DNA
gtaagcaccatagatcttgagtaaagatgtaggatcaccacctagatctttaagtaaagatgtaagtcaccacccatgacttacatgaatgaaaaaaatagccgtatttt

SEQ ID NO: 1126 - DNA, 110 bp, synthetic construct
  source 1..110: mol_type = other DNA
gcctgtcatctgaaaaattgtggtgtgtggaggcaattaagatggcaaatatacctacctaggcctgttacacatcttactattatcccctctttggcctgtttcttaat

SEQ ID NO: 1127 - DNA, 110 bp, synthetic construct
  source 1..110: mol_type = other DNA
cacctcgaggtctttaaccaggatccttacccatggagccacagggaaacttcctccaaagagggattttaaagagagctctggttattcagactcagcaatggccatag

SEQ ID NO: 1128 - DNA, 110 bp, synthetic construct
  source 1..110: mol_type = other DNA
ccaaagagggattttaaagagagctctggttattcagactcagcaatggccatagggttaaaaatcataatccctgaagaagatgtcattgactcttttataacctccac

SEQ ID NO: 1129 - DNA, 110 bp, synthetic construct; identical to SEQ ID NO: 1127
  source 1..110: mol_type = other DNA

SEQ ID NO: 1130 - DNA, 110 bp, synthetic construct; identical to SEQ ID NO: 1128
  source 1..110: mol_type = other DNA

SEQ ID NO: 1131 - DNA, 110 bp, synthetic construct
  source 1..110: mol_type = other DNA
tgtgtcacttctgggccaaggttcttaagaagtgggtgtgcctcctccactctctccctttccctttagctggacagatgcagatgatactgaagggtcccaggagaaaa

SEQ ID NO: 1132 - DNA, 110 bp, synthetic construct
  source 1..110: mol_type = other DNA
gtcaaagccaagtaagattcctggtccaagttttctcatgaggcaagaccttgtgggacttgggtctttagcctttctgggcttccatacgatcctaagtgaatcacttc

SEQ ID NO: 1133 - DNA, 110 bp, synthetic construct
  source 1..110: mol_type = other DNA
cccaaagagattgtaagtaagaacttttgtaggcctgggtataatgcatttctcatttgaacccttagatatgaagctagtaaaatttagctgcctgaaagagatggagt

SEQ ID NO: 1134 - DNA, 110 bp, synthetic construct
  source 1..110: mol_type = other DNA
gaggtaaaattcctctccccagccaagctgaaaggaggaaaggtaaggtgctcgaagacccagaaaaactctgatttggagaaaggggatgttttctttccttatgaact

SEQ ID NO: 1135 - DNA, 110 bp, synthetic construct
  source 1..110: mol_type = other DNA
cctaagatgacgatgtgggaagatgatgctgagcacagtctgctttgatgatggcttagtgcagcttagggtgtagtttgatgatggtttggtgtgatgataatgtgacg

SEQ ID NO: 1136 - DNA, 110 bp, synthetic construct
  source 1..110: mol_type = other DNA
attgccagtgacataaatctgaatgaatttaagtgcaagtcaccaaagcaggaggggtagaggtggtgctgaacactctgtcaattcatcctaggtccttaattttgtcc

SEQ ID NO: 1137 - DNA, 110 bp, synthetic construct
  source 1..110: mol_type = other DNA
gggatggagagcaggaggaggggaagggaggcaggtggaacactgaggtcctaggacagctgtgttctcaggacagatggccagctgataggatgacataatgcaaaggg

SEQ ID NO: 1138 - DNA, 110 bp, synthetic construct
  source 1..110: mol_type = other DNA
acagctgtgttctcaggacagatggccagctgataggatgacataatgcaaagggccagtattgagccagggcactgtaatttagaggaaggaaatattagaaagtagca

SEQ ID NO: 1139 - DNA, 110 bp, synthetic construct
  source 1..110: mol_type = other DNA
atcttcgtaaactctaacagatgatgcatgattcctggacaggggcctgccaaatttacaaactcctacttcagagttctgcggtgctgaaaatcatacatgccaactgg

SEQ ID NO: 1140 - DNA, 110 bp, synthetic construct
  source 1..110: mol_type = other DNA
ttacaaactcctacttcagagttctgcggtgctgaaaatcatacatgccaactggtgcccagctgcaaagcccatcatcagctacaaagaaagcagaacgctcacatcga

SEQ ID NO: 1141 - DNA, 110 bp, synthetic construct
  source 1..110: mol_type = other DNA
ccctggagtaacagcaaataaagccatggacacgctgttctctggacacttttgcggtccttcctttccagggcttccttacagctccagacttgagacctgcagctctg

SEQ ID NO: 1142 - DNA, 110 bp, synthetic construct
  source 1..110: mol_type = other DNA
gtggagttttcatatttttataacaacacatgtaacaatttggttctgttccacgtgaagtgtatagttaatacaatctgactctgagctgcttgagggcagggtgtatt

SEQ ID NO: 1143 - DNA, 110 bp, synthetic construct
  source 1..110: mol_type = other DNA
tgaagtgtatagttaatacaatctgactctgagctgcttgagggcagggtgtattttattcatcttacctttcctccagagcaccttgtagagagatccgtctatatgct

SEQ ID NO: 1144 - DNA, 110 bp, synthetic construct
  source 1..110: mol_type = other DNA
agcatgcccacatccacctattgtgcaatgagcttgaaaactttagagatatacgtaaggtaagagaacatacactctaagacagcatccgagagaagtaagcatggact

SEQ ID NO: 1145 - DNA, 110 bp, synthetic construct
  source 1..110: mol_type = other DNA
tgagagtacagtaacaggtgaaaaggagcaccaataacatctgtaagcggtatcaatagtggtacagaacatggccaggtatacatgtgtttaaaagggcagttaaagct

SEQ ID NO: 1146 - DNA, 110 bp, synthetic construct
  source 1..110: mol_type = other DNA
atagtggtacagaacatggccaggtatacatgtgtttaaaagggcagttaaagctgaggtacctaaatgagttggggagaatccccgagcggtcaaaaaatggtttgctt

SEQ ID NO: 1147 - DNA, 110 bp, synthetic construct
  source 1..110: mol_type = other DNA
actaaacgatacccttcactcagctatatatatggttgcacttcacacttctgctgccaccgggatccataaacatgcaatggcatgggtgacctatcatcacgctatca

SEQ ID NO: 1148 - DNA, 110 bp, synthetic construct
  source 1..110: mol_type = other DNA
aatattctagagacaggctggtctaaatataagactctatcaataaagccaactgattaatacacttcgttttaaaccttttttgtcatattccttgagccaggactttg

SEQ ID NO: 1149 - DNA, 110 bp, synthetic construct
  source 1..110: mol_type = other DNA
attaatacacttcgttttaaaccttttttgtcatattccttgagccaggactttgagtagccattctctggattttgatgcattaacgttaattttcacattcaacttat

SEQ ID NO: 1150 - DNA, 110 bp, synthetic construct
  source 1..110: mol_type = other DNA
ttccagagcctccaatccctggtctcatcctctctttgcaacattgtttgcttcactctcagccactcagccatgggtaatttggctttttcttgggaacatcttccata

SEQ ID NO: 1151 - DNA, 110 bp, synthetic construct
  source 1..110: mol_type = other DNA
ttatattataaagtacccaccccaggggattctgtcatagctagttcatcgactagtatttgtggactttacaagtgtagcctgggccaccccccttttttgaattcctc

SEQ ID NO: 1152 - DNA, 110 bp, synthetic construct
  source 1..110: mol_type = other DNA
cactattttccaactaattttagatcactttaattaattggtgagagctctttatggccgagcactttattttattaattgtttatcttcctcagcctcaagtattttgt

SEQ ID NO: 1153 - DNA, 110 bp, synthetic construct; identical to SEQ ID NO: 1152
  source 1..110: mol_type = other DNA

SEQ ID NO: 1154 - DNA, 110 bp, synthetic construct
  source 1..110: mol_type = other DNA
aaaagaaaaggaaggaaaagaaaacagcagcaaacatcaacctgtgttgcccatccttaggggaagagtttgcagagctaaattgctgtagagtgagatacaaaggcctt

SEQ ID NO: 1155 - DNA, 110 bp, synthetic construct
  source 1..110: mol_type = other DNA
cttaggggaagagtttgcagagctaaattgctgtagagtgagatacaaaggccttggtctaagagtataacctgcttgcttcctgaaagtgtgttcccatatccgatggt

SEQ ID NO: 1156 - DNA, 110 bp, synthetic construct
  source 1..110: mol_type = other DNA
agattatgggatgatggtatcatattttatcttgcatcagaattgtctgagggcttgttaacccaggttgctgggtttacccagtgattgattctgattggatagcttta

SEQ ID NO: 1157 - DNA, 110 bp, synthetic construct
  source 1..110: mol_type = other DNA
tgttaacccaggttgctgggtttacccagtgattgattctgattggatagctttaggatggagcctgagaatatgcatttctaataagtcctcagtgatattgctgctga

SEQ ID NO: 1158 - DNA, 110 bp, synthetic construct
  source 1..110: mol_type = other DNA
ttctactagagtcatctcttactagctttaagtccttcaagtttaatttcactttctgagcctcatttgtaaacaccgcagggttgttatgacaaagtaatgggcacgaa

SEQ ID NO: 1159 - DNA, 110 bp, synthetic construct
  source 1..110: mol_type = other DNA
attttaaaagattagtcctcttgaaaaaagaagttgaggatggggggcccagctccaagaggaggaggtagataggagagcagagaattgacaggctcaaccctaagggc

SEQ ID NO: 1160 - DNA, 110 bp, synthetic construct
  source 1..110: mol_type = other DNA
agttggcggtgactgctggcccttgggaggtgctgctaaaaaaccaaggtggaggcaggacactggagagctctggcttggggaatcgacaggaattaacagatgttgac

SEQ ID NO: 1161 - DNA, 110 bp, synthetic construct
  source 1..110: mol_type = other DNA
caggacactggagagctctggcttggggaatcgacaggaattaacagatgttgacacagtgcaaagcccggtatatgctggctggcataactctttcctccccccaaaac

SEQ ID NO: 1162 - DNA, 110 bp, synthetic construct; identical to SEQ ID NO: 1160
  source 1..110: mol_type = other DNA

SEQ ID NO: 1163 - DNA, 110 bp, synthetic construct; identical to SEQ ID NO: 1161
  source 1..110: mol_type = other DNA

SEQ ID NO: 1164 - DNA, 110 bp, synthetic construct
  source 1..110: mol_type = other DNA
tgagttgcaatttttataaaactgcttaggaggtagcctagcaaatattcctccgttccttgaaattgtgtttttagctgagaaacgatttccaagatttccaacccttg

SEQ ID NO: 1165 - DNA, 110 bp, synthetic construct
  source 1..110: mol_type = other DNA
aaagcaacagtaggccaggagctcatatcttcaggatatagagaaatgccttgtaagcctgtagaattctgcagaaagagaagttacagtttgaacagtttcaaagtttg

SEQ ID NO: 1166 - DNA, 110 bp, synthetic construct
  source 1..110: mol_type = other DNA
tctcctgtatcgtaggcattcaataaacaattgtagctcagagtgtgacagggctcccagaggctgaggattattggtttatctattagtaactggtcaggtcaggtctg

SEQ ID NO: 1167 - DNA, 110 bp, synthetic construct
  source 1..110: mol_type = other DNA
tttcccctctagactaaaaggttcttgtgtgcaagattatgtctttttttttttgtcttttttgtctttttagggccacacctgaggcataggaggttcccagagcaatt

SEQ ID NO: 1168 - DNA, 110 bp, synthetic construct
  source 1..110: mol_type = other DNA
tttttttttgtcttttttgtctttttagggccacacctgaggcataggaggttcccagagcaattagacccaggaggtctaattggagttgaagccgccagcctacacca

SEQ ID NO: 1169 - DNA, 110 bp, synthetic construct
  source 1..110: mol_type = other DNA
gtcactccaaccaagaagtccgcacaggccagggatgcgatcaggaagttcgtgggtgtgtgcagctgtttgaagtgaagaatagagataatgaccagtaagtttccgaa

SEQ ID NO: 1170 - DNA, 110 bp, synthetic construct
  source 1..110: mol_type = other DNA
cttttaaaaaagaactccagtcctgagaagttagtgaattgactggaactgtatttacccagaagctggagatgtgtctttttggggggtagggggtatagtctgctggt

SEQ ID NO: 1171 - DNA, 110 bp, synthetic construct
  source 1..110: mol_type = other DNA
tacccagaagctggagatgtgtctttttggggggtagggggtatagtctgctggtgggtgctggtggatgagaagacaattgatagaggaaaaagagttgaaaatgtgtt

SEQ ID NO: 1172 - DNA, 110 bp, synthetic construct
  source 1..110: mol_type = other DNA
cactggaaacagggctgcagtgtgtattaatccctttctcctttagtagcgattccatgttccttttacctgcttttaaggcttcagctgtagagtagcccagactctcc

SEQ ID NO: 1173 - DNA, 110 bp, synthetic construct
  source 1..110: mol_type = other DNA
aaaatgaaaagtagtacaatagccaaattttaaaaattcgtcaagttttcactatgttacattgaaaatctttgaaaggtgacacttgcactcatgcctcatagcatatc

SEQ ID NO: 1174 - DNA, 110 bp, synthetic construct
  source 1..110: mol_type = other DNA
actaacttaactctcttctgatatgaaatagacattatcttgtttaaatatttgttgagccacatctttttgtttgtttgtttagagtggggagggtcaaatgcccctta

SEQ ID NO: 1175 - DNA, 110 bp, synthetic construct
  source 1..110: mol_type = other DNA
aatcttaaacattaactaaaggccagaccatgtaacataattgttagtaaggacataaatgctgcccagagcctctcagctctagcttggcgtgaggaagtcctaagaat

SEQ ID NO: 1176 - DNA, 110 bp, synthetic construct
  source 1..110: mol_type = other DNA
tatgtctcccctgttgtatgcagctgctgatgtttatatacatgacaacacaattacagaaaattcagtgcagtcaggcaaagattccatcagactaactgatggatatc

SEQ ID NO: 1177 - DNA, 110 bp, synthetic construct
  source 1..110: mol_type = other DNA
gtaaatttctctggctaaaatccaaggtagcaattgaaggacttaaatactgttaaaagggtgggtggggcatttgaggaaatgcaagctatcttcaatgcagtcctaat

SEQ ID NO: 1178 - DNA, 110 bp, synthetic construct
  source 1..110: mol_type = other DNA
ggtgtttaaaacatcctactctattctctatattcttctggcacaaaaatatagtatctctgccattatattttatatgagtttgttatttggctttcatccaaactcta

SEQ ID NO: 1179 - DNA, 110 bp, synthetic construct
  source 1..110: mol_type = other DNA
ctatctggcatggctaccaggtaaggcttttgaaaccagttaatagcttgctactaggctcttggccaaatgaagcacctgatcaaagaatctctgttaactctatcccc

SEQ ID NO: 1180 - DNA, 110 bp, synthetic construct
  source 1..110: mol_type = other DNA
aggctcttggccaaatgaagcacctgatcaaagaatctctgttaactctatcccctgatagtcccatttttgagggggtgggtcaactgggacccagtgactaacagcgt

SEQ ID NO: 1181 - DNA, 110 bp, synthetic construct
  source 1..110: mol_type = other DNA
aagcaaatggtggacaattactaatttaaaataataatagttgctaattgtcataaactatggtacagacatattatgtggattatgcacagtcccttgggaatttccca

SEQ ID NO: 1182 - DNA, 110 bp, synthetic construct; identical to SEQ ID NO: 1181
  source 1..110: mol_type = other DNA

SEQ ID NO: 1183 - DNA, 110 bp, synthetic construct
  source 1..110: mol_type = other DNA
tctcactggctgtggggagcatctcaccagtgcagtcttggtagggtcatctttaatactttcactttgacagcaagcctagcgggggtcacgtgtgtcagagcttctcc

SEQ ID NO: 1184 - DNA, 110 bp, synthetic construct
  source 1..110: mol_type = other DNA
atactttcactttgacagcaagcctagcgggggtcacgtgtgtcagagcttctcctcctgtatgcctctttgtctctggcctcttccctacatttatgacaaattcatag

SEQ ID NO: 1185 - DNA, 110 bp, synthetic construct
  source 1..110: mol_type = other DNA
cttctttcccaaatccatctgcctgcctagtgtagctgatacacaactcccaggatgcactctggcccatgttgcctcttggcctttgctcatagtgccttttccccaag

SEQ ID NO: 1186 - DNA, 110 bp, synthetic construct
  source 1..110: mol_type = other DNA
aaatcagggccctcactgacactggaaaataacataatgaactgcctaaggccaccctggaatcacataaatgtaatcttacatggcttcttttgctaatctatccaatt

SEQ ID NO: 1187 - DNA, 110 bp, synthetic construct
  source 1..110: mol_type = other DNA
cctggaatcacataaatgtaatcttacatggcttcttttgctaatctatccaattagatttttacaacactggatcttaaaagggatgtggtgcacatgaactttaaact

SEQ ID NO: 1188 - DNA, 110 bp, synthetic construct
  source 1..110: mol_type = other DNA
ggaccaaggtttaggtctcttaccgccctccttcttagaggcctgttacctccaaaaatatctaaccattgagctgttttgctggaataagatgttatgtaataggaacc

SEQ ID NO: 1189 - DNA, 110 bp, synthetic construct
  source 1..110: mol_type = other DNA
aaatctggacctctcacacataaggaataattattttgtacatatgcctacatattctggaatagaaattctcagctacttcgcatttccagatctcaaagcaatagtaa

SEQ ID NO: 1190 - DNA, 110 bp, synthetic construct
  source 1..110: mol_type = other DNA
tctggaatagaaattctcagctacttcgcatttccagatctcaaagcaatagtaaatgacgccactattccttgcacagaaaaaattgtccagagaaaatattcacgatt

SEQ ID NO: 1191 - DNA, 110 bp, synthetic construct
  source 1..110: mol_type = other DNA
aaaagattaagacataaggcgaatctcagtcacattctgaaggctgaattttatccctacacacaaacacatacacactgtcatactaattaccttctttggcacagctt

SEQ ID NO: 1192 - DNA, 110 bp, synthetic construct
  source 1..110: mol_type = other DNA
cctacacacaaacacatacacactgtcatactaattaccttctttggcacagcttggtttcaacccaaatatacaaccaaggattgttgttaacacacagactgacaata

SEQ ID NO: 1193 - DNA, 110 bp, synthetic construct
  source 1..110: mol_type = other DNA
actccattatatggagaaaataaatgatcacaaatcataaaacaataccagttaacactttgggtgcatttcccatatactaagcactgagctgtaccctgtacactctg

SEQ ID NO: 1194 - DNA, 110 bp, synthetic construct
  source 1..110: mol_type = other DNA
cactttgggtgcatttcccatatactaagcactgagctgtaccctgtacactctgcttttgctgacttctcttcaccgtttatgaaacagtgacagctagagagctgtgc

SEQ ID NO: 1195 - DNA, 110 bp, synthetic construct
  source 1..110: mol_type = other DNA
tgaccgtcataattataatcaaatactggtccactaaccacattgactccattcctttccatggcatagtttataagaagaacatggtggaagtaatcccacatttctaa

SEQ ID NO: 1196 - DNA, 110 bp, synthetic construct
  source 1..110: mol_type = other DNA
tttttctaatttttcccataaaaacaaaacatacaactatttcacaaacataatcttgtaagtggctcctactgaatactatcaaagaaatctctccttgaactgaatcc

SEQ ID NO: 1197 - DNA, 110 bp, synthetic construct
  source 1..110: mol_type = other DNA
gaaaactttacccacaattgttcaaaggacctatattacattattgacaaaattgtattgagacacttttacagcaagctcccaagagtgaaaaggatgacgaattagag

SEQ ID NO: 1198 - DNA, 110 bp, synthetic construct
  source 1..110: mol_type = other DNA
aacagggtcagaagacttgggtttgttcccgcttctactttaattagctgtttgatatttaatttaggaataatattaacttcttactaaagatagtctttgaagattcc

SEQ ID NO: 1199 - DNA, 110 bp, synthetic construct
  source 1..110: mol_type = other DNA
gagccccatgtccaggaagtaaaaaacccaggcagcccatgtgggagacccagtcagagaaaagccaagggcccagccaatagtcccagctgagctcccggctggcccct

SEQ ID NO: 1200 - DNA, 110 bp, synthetic construct
  source 1..110: mol_type = other DNA
agagaaaagccaagggcccagccaatagtcccagctgagctcccggctggcccctggcactaacagcccacaatgtgattgaggccattagggtccttcagccaacctgg

SEQ ID NO: 1201 - DNA, 110 bp, synthetic construct
  source 1..110: mol_type = other DNA
agagggaggaggtcatacagtaggtggtttgaattgtcatcacagacaatggcaaaaagaaaaataactgggacagtccagaattcccagcaaaactcaaagaccagctg

SEQ ID NO: 1202 - DNA, 110 bp, synthetic construct
  source 1..110: mol_type = other DNA
aaagaaaaataactgggacagtccagaattcccagcaaaactcaaagaccagctgaacacccgtgagttgagtgatttttttttctccaccagtgtgaagggtttaagta

SEQ ID NO: 1203 - DNA, 110 bp, synthetic construct
  source 1..110: mol_type = other DNA
cattaacccactgcaccacaagagaactccctgaaatgttcttttctggtttgggttcaaagcactagaatgacctttcttaggccttagttatcaaacaggggatgtta

SEQ ID NO: 1204 - DNA, 110 bp, synthetic construct
  source 1..110: mol_type = other DNA
ttagctgtgtcttgttccgcatggtttatcagcatctgcatcaaagaatgactggaagagataaagttcaaattaagtattgactgctaacacatctttacagctgaggt

SEQ ID NO: 1205 - DNA, 110 bp, synthetic construct
  source 1..110: mol_type = other DNA
tagaaatggggaaaagtaggaagatgatctttgaagctcaatatacgttcttcaactcatcacaggatacagacctaaaatccctggatttgagactggatgatcaatat

SEQ ID NO: 1206 - DNA, 110 bp, synthetic construct
  source 1..110: mol_type = other DNA
aggaactcctccgtgggtcatttttcaagtaaaatggtattccatgaagggaagtggctactttagctcacagcttaaatatttacacagtgcttttcctcaagtcaacc

SEQ ID NO: 1207 - DNA, 110 bp, synthetic construct
  source 1..110: mol_type = other DNA
ttcttggccctctgaagcctgtggtcactcagttataaacaagctacagcctattcctccctatcacatctgttttcctaagtttcactccttggagcaaataatgacgt

SEQ ID NO: 1208 - DNA, 110 bp, synthetic construct
  source 1..110: mol_type = other DNA
aggtggtctctcctgtatcattattctccatgctttcactgacagacacagatgtttgaattagaactaaacaaaatcctggaaaacatatataatttctagtctatata

SEQ ID NO: 1209 - DNA, 110 bp, synthetic construct
  source 1..110: mol_type = other DNA
atccatgcattctagcttatggggtgctgtttgcagcagaactaagaagggacggctgatgaggaatcagccgcagagctggttgagatatggtccagtttttggttatt

SEQ ID NO: 1210 - DNA, 110 bp, synthetic construct
  source 1..110: mol_type = other DNA
gtgatggctcaagactactctgtttccccttctgtatgattttctttgatttcttccaccccccacgacaatgtctcagttgtgtttgttctgtgcatacctttcttggc

SEQ ID NO: 1211 - DNA, 110 bp, synthetic construct
  source 1..110: mol_type = other DNA
tcatttgtacaacactgtaggtgaagaaagaccacagtggcttaatattccccatcttctgagggccacacaatgaaggttggtaatgctggtttaccatttaaattcaa

SEQ ID NO: 1212 - DNA, 110 bp, synthetic construct
  source 1..110: mol_type = other DNA
ctcataggaaaatgatctcatctcattcatgaaactctttgcagggttatttttttcataggaaaatgaccattggaataggcccacttgacacagattccttgtcttat

SEQ ID NO: 1213 - DNA, 110 bp, synthetic construct
  source 1..110: mol_type = other DNA
gttaaacttgactcttagagcagctgggacctctgaggctcaggaatgacgtggcaccaggaggggataacctgtggaggcccagagtggttggtagatgttcatttgtt

SEQ ID NO: 1214 - DNA, 110 bp, synthetic construct
  source 1..110: mol_type = other DNA
accaggaggggataacctgtggaggcccagagtggttggtagatgttcatttgttctactcatcgttagtcattgcattggcatcatacaaccttgagaatgatgacctg

SEQ ID NO: 1215 - DNA, 110 bp, synthetic construct
  source 1..110: mol_type = other DNA
tgggaggactgcccagcaggtcttagctccttgaaggctactgaagtagttactacttatggggactcaaggtggtaatgagaaagtccgatgcgaattcaaggtggtaa

SEQ ID NO: 1216 - DNA, 110 bp, synthetic construct
  source 1..110: mol_type = other DNA
ttgaaaatccaatctatttttgttgatgggttctaaggccaatagctattttattatcatgtcacacaagatgtttggctagtttttactgggagaatacatgaaaaaga

SEQ ID NO: 1217 - DNA, 110 bp, synthetic construct
  source 1..110: mol_type = other DNA
acatcaagtgtgcttcaagctaagaagtggtggaaaccagaagctggaggaggttgaggggcaatcaggaggatgcttgattgggttattgctgtcaaaaatatctggct

SEQ ID NO: 1218 - DNA, 110 bp, synthetic construct
  source 1..110: mol_type = other DNA
gttggatttctaacccactgtgccatagaaggaactccacaaaatagttttcctatcctctatgtttttaaaaagatatacacagcttttgaaatcactttattcattct

SEQ ID NO: 1219 - DNA, 110 bp, synthetic construct
  source 1..110: mol_type = other DNA
aggcaacatgccttaacccccagaccctttgataggcctccctgtgccacctattacagatgatctgccttagctaagacttcgaatttgatcttaccttcaagatgcca

SEQ ID NO: 1220 - DNA, 110 bp, synthetic construct
  source 1..110: mol_type = other DNA
gttgccaagtatttttgcaaatgttataaatcttttaaataaaacgggctgaccgataaatgacatgtttcctttttacactgagtgtgcacactacctgtctgttggta

SEQ ID NO: 1221 - DNA, 110 bp, synthetic construct
  source 1..110: mol_type = other DNA
caattggctttactgtgagtgagtggcctcaagtttagtttggtaacattatcatctatttattatcattcataataatctttttctctcctttctctcttccctaggct

SEQ ID NO: 1222 - DNA, 110 bp, synthetic construct
  source 1..110: mol_type = other DNA
ctatttattatcattcataataatctttttctctcctttctctcttccctaggctggcttgctcccttgttcagtcttgctttcatttcctctctctctccctcacacat

SEQ ID NO: 1223 - DNA, 110 bp, synthetic construct
  source 1..110: mol_type = other DNA
tcccagtgatattaactaaagatgcttaaatgttaagagacctgcaaaactgcttaatgcatatggcccaggtcagtacacatagagtggaagggagaacgttgctgcgt

SEQ ID NO: 1224 - DNA, 110 bp, synthetic construct
  source 1..110: mol_type = other DNA
aatgcatatggcccaggtcagtacacatagagtggaagggagaacgttgctgcgtggtagttgtttacccgggaacacgtgtgaggttgtattcctttttgtttttttgt

SEQ ID NO: 1225 - DNA, 110 bp, synthetic construct
  source 1..110: mol_type = other DNA
gaatcctacatatccattacacagttgtctaatgcccatgtgttcggtattattcctgccctcatccacccctcctacttcataagctttcttaaaaatcatacatgtgt

SEQ ID NO: 1226 - DNA, 110 bp, synthetic construct
  source 1..110: mol_type = other DNA
ctgccctcatccacccctcctacttcataagctttcttaaaaatcatacatgtgtaaaaaagtatctgcagttaagattttatttcattcatgtcaggtataacaagtgc

SEQ ID NO: 1227 - DNA, 110 bp, synthetic construct
  source 1..110: mol_type = other DNA
tttcaaaataaaagttttagggagtaaagagcaaccgtttccatgtgtgcgaaattttacaacacattttcaaggcacacatcgtgcacaatctaaatgacattaaagct

SEQ ID NO: 1228 - DNA, 110 bp, synthetic construct
  source 1..110: mol_type = other DNA
tttacaacacattttcaaggcacacatcgtgcacaatctaaatgacattaaagctgattgtgcatgcgtgcgtgtgtatacagaggcaaaaaggtttttctggaaaggaa

SEQ ID NO: 1229 - DNA, 110 bp, synthetic construct
  source 1..110: mol_type = other DNA
ggcatttgacagcatctacagagaagcatcacccatgagctgccaggccagataacaagagaaaacccacggtggaccccaagaaacccatgttcatgagaagacataag

SEQ ID NO: 1230 - DNA, 110 bp, synthetic construct
  source 1..110: mol_type = other DNA
aaataacatctatttacctatggtaagatgctggtgaaagaatggattcagctattaggttcaaagacccgaggttattatgttgctggaacaaaatagaaaaggatcat

SEQ ID NO: 1231 - DNA, 110 bp, synthetic construct
  source 1..110: mol_type = other DNA
taggttcaaagacccgaggttattatgttgctggaacaaaatagaaaaggatcattttatccttcgttggaaagaaacagtcttgttctaggaaaccagtggcttgccaa

SEQ ID NO: 1232 - DNA, 110 bp, synthetic construct
  source 1..110: mol_type = other DNA
ccctgcaatttactcagcaaacatttaggaaacccctgaatcgtgtcaagctcgagttgagccttggaaatgcaaagatgaaggagagaacacacaggtgctactttcag

SEQ ID NO: 1233 - DNA, 110 bp, synthetic construct
  source 1..110: mol_type = other DNA
ttgacacagacctgagggccagagtaatactccctttagcccatcagaggaggcgggacacccacgtgtcatccagagcactacccagatcagttggtactgaaggagca

SEQ ID NO: 1234 - DNA, 110 bp, synthetic construct
  source 1..110: mol_type = other DNA
gcaattgcaatggaaagtgacaagagctgcgatgggcaatgttcaagatgccataggaacacacaggtagaagcacaaactaagaagcttggggtgggagaccatgatgg

SEQ ID NO: 1235 - DNA, 110 bp, synthetic construct
  source 1..110: mol_type = other DNA
ggtctgagaaatttcaagatctttttttaagcctcagcatttctttttctattcggtaatcacatatcttttttcttttgttttagggccacccaaggcttatggaagtt

SEQ ID NO: 1236 - DNA, 110 bp, synthetic construct
  source 1..110: mol_type = other DNA
tttgctgaggatatttgcaggaaccagatttgggaggagagctaaaacttggtacttcagaaagagagcattccccgtggacattcagcacgagcagagacattatagca

SEQ ID NO: 1237 - DNA, 110 bp, synthetic construct
  source 1..110: mol_type = other DNA
ttcagaaagagagcattccccgtggacattcagcacgagcagagacattatagcaagggacaccttcagaacttgttgcctgattattataaaagcagggccatttaccc

SEQ ID NO: 1238 - DNA, 110 bp, synthetic construct
  source 1..110: mol_type = other DNA
aatttgaaatcgtatgtaaaattcaatcacagttttactgacctttaatcaagatttaaccttttgctttctgtgaacaaatgttcaggtttaaaggagccttggagtac

SEQ ID NO: 1239 - DNA, 110 bp, synthetic construct
  source 1..110: mol_type = other DNA
tactgacctttaatcaagatttaaccttttgctttctgtgaacaaatgttcaggtttaaaggagccttggagtacccattgtggctcagcaggttaagagcccaactagt

SEQ ID NO: 1240 - DNA, 110 bp, synthetic construct
  source 1..110: mol_type = other DNA
ttaagccactgtgccaccagggaactcccaaggcttggaatttaaacctggaccgaactctcggtttcattagctgtcatttactctctgcctcgtgcttttctcttctg

SEQ ID NO: 1241 - DNA, 110 bp, synthetic construct
  source 1..110: mol_type = other DNA
aaacttagatttttattagtggtattcctgtcaatatcatgatgagctgtcagcctcattcagggtatgggttccaacaccataaacattctccacctggaaatccatgg

SEQ ID NO: 1242 - DNA, 110 bp, synthetic construct
  source 1..110: mol_type = other DNA
tcccccctggtgctgaggttgggataccccagaggaaggtcacatctccccatagtggagatgctgacttttccagagagggcaccatcctgagtcacagattatgcaaa

SEQ ID NO: 1243 - DNA, 110 bp, synthetic construct
  source 1..110: mol_type = other DNA
tggagatgctgacttttccagagagggcaccatcctgagtcacagattatgcaaagctggctggaaatctcccctctggagtgctgggggaagctgtccttattgagatg

SEQ ID NO: 1244 - DNA, 110 bp, synthetic construct
  source 1..110: mol_type = other DNA
tagttgatcatggtaatttataaaagtacttcaatcttgcgtcatcatttatgcatagctaagacgagggtccataggaatttaaaatgtattctcaaggatgggcccct

SEQ ID NO: 1245 - DNA, 110 bp, synthetic construct
  source 1..110: mol_type = other DNA
tacaaagtgttataaggctgtcttgtggccttgtctccttcatctcccccatatagtcatttctgctttaaaaatggaaccgttagtcttatgctaaaatataatatatg

SEQ ID NO: 1246 - DNA, 110 bp, synthetic construct
  source 1..110: mol_type = other DNA
caactgcaaaaaaaggggagggggaaggcagtctttctcattggaaatgaaacggaaatagaaccaaggccccagaactcatagctaagttagtatacgtacaaacacac

SEQ ID NO: 1247 - DNA, 110 bp, synthetic construct
  source 1..110: mol_type = other DNA
aagagatcaagaacagaaggcatttcccaccaacgggagaggaagagaagctattgctggaataaatataaggatctgtatatagaggtagtctttttaaatggctgaat

SEQ ID NO: 1248 - DNA, 110 bp, synthetic construct
  source 1..110: mol_type = other DNA
ggagaggaagagaagctattgctggaataaatataaggatctgtatatagaggtagtctttttaaatggctgaatataggtttttaaaatgatccatttataagtaagtg

SEQ ID NO: 1249 - DNA, 110 bp, synthetic construct
  source 1..110: mol_type = other DNA
gacaataacagaatttcctgaaactatctggaaagatacgagtgttattggaatccttgtgattaactgagcatgacaaccactttttagcttatagaaagaactgacgc

SEQ ID NO: 1250 - DNA, 110 bp, synthetic construct
  source 1..110: mol_type = other DNA
cttgtgattaactgagcatgacaaccactttttagcttatagaaagaactgacgcacttgatacttactaattaaagcactaatctctataacaaattctagaattgaaa

SEQ ID NO: 1251 - DNA, 110 bp, synthetic construct
  source 1..110: mol_type = other DNA
aatgaaggctactcaaggatcaatataaggataagaaaacttgaaatgagtagtcaaatggatggaattaacctgaggtgctctgagaacattttaaaatcccctttgat

SEQ ID NO: 1252 - DNA, 110 bp, synthetic construct
  source 1..110: mol_type = other DNA
aaatggatggaattaacctgaggtgctctgagaacattttaaaatcccctttgatatatcagtttctaagggtgccaatgaagttggtacaatggtttgaaaggaagatg

SEQ ID NO: 1253 - DNA, 110 bp, synthetic construct
  source 1..110: mol_type = other DNA
agagtcaaaactacctgcaactttctgttttgaaaaatgttcaacttcagctatggctgaatagagaaagtagagcctgagcagatggctgtcaaaacaccaatggctac

SEQ ID NO: 1254 - DNA, 110 bp, synthetic construct; identical to SEQ ID NO: 1253
  source 1..110: mol_type = other DNA

SEQ ID NO: 1255 - DNA, 110 bp, synthetic construct
  source 1..110: mol_type = other DNA
tcatggccaccagcaaaactgagaggatgactgctccattagtgactaagatcagtagagctctgtgctgactatggtgaacttatactgtgaataaaaaattaaaatat

SEQ ID NO: 1256 - DNA, 110 bp, synthetic construct
  source 1..110: mol_type = other DNA
actgaggtaattccactacataaaaatacatttatgcctagcatgttctgactacattttagtattaataagcatgtctaatctgctctaagagcttcactctgattgct

SEQ ID NO: 1257 - DNA, 110 bp, synthetic construct
  source 1..110: mol_type = other DNA
cctcatggatactagttggattctcaacttgctgagtctcaacaggaactccccatttttttttgaacagcagcatctgcagtatatggacgttcccaggctagggcttg

SEQ ID NO: 1258 - DNA, 110 bp, synthetic construct
  source 1..110: mol_type = other DNA
atggaaatgctcaagaatgtttcagttatgcttaaaaatcagtatgtcagctagagtcatcacatcacatttatacttatttttagctctcctttagggttcctataagt

SEQ ID NO: 1259 - DNA, 110 bp, synthetic construct
  source 1..110: mol_type = other DNA
gcaggaaaaggaccacacatgttgtgaacatgaacaagtattcagatagagaacattcttgatttgtcatgggaaaggttatagttatttactaataagtatttatttac

SEQ ID NO: 1260 - DNA, 110 bp, synthetic construct
  source 1..110: mol_type = other DNA
caaagtgataaaagtgacacatatattagaggcctctttgatggcccaccagcagtatagaagttcttgctaaagcacatgtcattctctcccagacttgagtagacaga

SEQ ID NO: 1261 - DNA, 110 bp, synthetic construct
  source 1..110: mol_type = other DNA
cattaagtttaacaagggatatgtaggtaatggcccatgttatctacagatctggcgttttatatttctaaaagctgccactagtgggttatttcctcaccaagtctcta

SEQ ID NO: 1262 - DNA, 110 bp, synthetic construct
  source 1..110: mol_type = other DNA
tatgagggtacggtaaatgggtaattggaagaatcgaatgtatatcaaggcattcagcatatgtaagtcagcagagctccaaatcttggacctagaaatcacaggctaga

SEQ ID NO: 1263 - DNA, 110 bp, synthetic construct
  source 1..110: mol_type = other DNA
cataatgagggttgcctttcagttgataccctcttgacattatttgtagcatccgataaattttaaagcatagtttaaagacgtttcattctgctatcatcagccttgac

SEQ ID NO: 1264 - DNA, 110 bp, synthetic construct
  source 1..110: mol_type = other DNA
gtgatgagcagaacaagacatgatgggcttgtgcttctaagcctgtcctcctctgctatttggagctgaggctgaagttagtgccagtgttcccagatgcatgtggctag

SEQ ID NO: 1265 - DNA, 110 bp, synthetic construct
  source 1..110: mol_type = other DNA
tctttatattctatgcttcctcatgacatattaccaataaatgttttataaaccatccatagcggagtagattagggatttttgaaccaggttgcttgtagctctagaag

SEQ ID NO: 1266 - DNA, 110 bp, synthetic construct
  source 1..110: mol_type = other DNA
tccatagcggagtagattagggatttttgaaccaggttgcttgtagctctagaagaacatagggactaatgcagaattagggacagtggccatggtgattagctgacagc

SEQ ID NO: 1267 - DNA, 110 bp, synthetic construct
  source 1..110: mol_type = other DNA
acgaaaagacgaacagaatgtccgtgagctgtgggtcagtaacaaatagtctaccgtgtaatcaggatctcataagacaaaagaaggaggagttcccatcgtggctcagt

SEQ ID NO: 1268 - DNA, 110 bp, synthetic construct
  source 1..110: mol_type = other DNA
cattttcattgtcctgtgtgttatatgtagtactatgataatcacaaaaaactagtatttttttccccagccattctgcctgaaatgtgaatatcttcagctggcaccat

SEQ ID NO: 1269 - DNA, 110 bp, synthetic construct
  source 1..110: mol_type = other DNA
tatttttttccccagccattctgcctgaaatgtgaatatcttcagctggcaccatggtttagcgaacataggcttgacctttgatctctttctcattacctaattgagat

SEQ ID NO: 1270 - DNA, 110 bp, synthetic construct
  source 1..110: mol_type = other DNA
caaggtatccctttaatataggcgttcctaacctggatgtttttgagttgaacataggccactggagaatttgtacgtgaaaaaaattctatcttacttccactaatttc

SEQ ID NO: 1271 - DNA, 110 bp, synthetic construct
  source 1..110: mol_type = other DNA
aattcacgttccttgtatttgttttgataaatggaatggaaactgtgctttgcagtcagcttctaggattgctgatgaaaagtcagccaggagcacgaagctccctgtca

SEQ ID NO: 1272 - DNA, 110 bp, synthetic construct
  source 1..110: mol_type = other DNA
tcagcttctaggattgctgatgaaaagtcagccaggagcacgaagctccctgtcatgcttcagtgttcttagtttgtgacatttttgacaagatcttccttttcttcttg

SEQ ID NO: 1273 - DNA, 110 bp, synthetic construct
  source 1..110: mol_type = other DNA
gatgttcacaatttccatgtgaaaagtttactatggcttatagtgaatgacatcttttactttggaggagaactcttttcatctcagctagaaattcttcttgaacttga

SEQ ID NO: 1274 - DNA, 110 bp, synthetic construct
  source 1..110: mol_type = other DNA
gttgttttgtacatcattggatcaattgaaaaattgtccacagataactgaatagttagttatgtgagggagagggagctgacatatctttcctactgtatatcatactc

SEQ ID NO: 1275 - DNA, 110 bp, synthetic construct
  source 1..110: mol_type = other DNA
actgttaagtttaagaaattaaaagggctagaggagtcatatgtctatcagtaaagagtcagctaatactttaaactttgcccgccattggtcattacctttgttgttag

SEQ ID NO: 1276 - DNA, 110 bp, synthetic construct
  source 1..110: mol_type = other DNA
gagtcagctaatactttaaactttgcccgccattggtcattacctttgttgttagaccttccttaaagaatggctaaaggtagttcttcaaataaaaaaaagaaataata

SEQ ID NO: 1277 - DNA, 110 bp, synthetic construct
  source 1..110: mol_type = other DNA
gctgagccacaatggtaactcctcttatagcaatttttaaataccatgaaaatattttttcttttttggaaaagtaatatttgggggaggcgagtttttaagtattttgt

SEQ ID NO: 1278 - DNA, 110 bp, synthetic construct
  source 1..110: mol_type = other DNA
tgacccaagaaaaaaagatcataaatcccagcaggggaagacatggttgtggcttgaccttggaaagatgagctaaaggtgcggaggaaaccataaattcaatttgcaat

SEQ ID NO: 1279 - DNA, 110 bp, synthetic construct
  source 1..110: mol_type = other DNA
gaccttggaaagatgagctaaaggtgcggaggaaaccataaattcaatttgcaataataacaaaaataaaattgtttacactttgcccagtgggtgaagtgaaaaatcta

SEQ ID NO: 1280 - DNA, 110 bp, synthetic construct
  source 1..110: mol_type = other DNA
gagttcctgctagtaaccatcttgtgaccatgaccagagctggacagtggacagaattgacatgctaaggatagtggaatggagctcccagtcgtggttcagaggaaaca

SEQ ID NO: 1281 - DNA, 110 bp, synthetic construct
  source 1..110: mol_type = other DNA
gaaaagcctatgactctttgctattaaaacagaatagaaatgtctgttttcaactctcgtgaacaataccatagcctctccacgttgcattgttttcctttgtgatttgg

SEQ ID NO: 1282 - DNA, 110 bp, synthetic construct
  source 1..110: mol_type = other DNA
ctcgtgaacaataccatagcctctccacgttgcattgttttcctttgtgatttggtccccaactccccatccatagaaatgtttccttttctgtgcatgattatatccac

SEQ ID NO: 1283 - DNA, 110 bp, synthetic construct
  source 1..110: mol_type = other DNA
ttttgttctcaccccctccttcttcaggcactttttattctcattttattccatcaatggaaaacagcactttggtccctcactcaaatctgtgttctctgttggcaccc

SEQ ID NO: 1284 - DNA, 110 bp, synthetic construct
  source 1..110: mol_type = other DNA
aatggaaaacagcactttggtccctcactcaaatctgtgttctctgttggcaccccatgtttggaatttctcctgttttttcttgatttcactcaagtagttctctgatt

SEQ ID NO: 1285 - DNA, 110 bp, synthetic construct
  source 1..110: mol_type = other DNA
aaatctctgctacataccagctgcatggccttagacaagttatttattctttcgatgcctctctttcctcatccttaaaatgggaatcataatggagagttgttgtgcag

SEQ ID NO: 1286 - DNA, 110 bp, synthetic construct
  source 1..110: mol_type = other DNA
cactctcagggaattgacctgcctctatttcaggggactgctgggggccggtagttggaaggtggtctcagcaagctgccagtgggcacaagatgaccttgtcctttgcc

SEQ ID NO: 1287 - DNA, 110 bp, synthetic construct
  source 1..110: mol_type = other DNA
tggaaggtggtctcagcaagctgccagtgggcacaagatgaccttgtcctttgccttcttcttcttggaacttcaggctggtctatggatacccaggatctagggtgcat

SEQ ID NO: 1288 - DNA, 110 bp, synthetic construct
  source 1..110: mol_type = other DNA
aagaagccacaagtataagaagcttgacaagtgcttgcatgttggggtgtatccatgtgcacaagtgtgcatggctagtcagtcaagcatgacaggtcaaagagagaaga

SEQ ID NO: 1289 - DNA, 110 bp, synthetic construct
  source 1..110: mol_type = other DNA
gggaagtttgcatcatatatcccagcatggaacagtaaatactctggatcaccaatttacttatctaaataatttttaaaatacgttaacaaatgcaggttcagtttttc

SEQ ID NO: 1290 - DNA, 110 bp, synthetic construct
  source 1..110: mol_type = other DNA
ttctattggattgtagcaggtacaaagaaaagtatctgcaagaagtgaggttggagaaatagaccagatagtgaattctcttttatgctctgctaaaaagattgagtttt

SEQ ID NO: 1291 - DNA, 110 bp, synthetic construct
  source 1..110: mol_type = other DNA
gaaatagaccagatagtgaattctcttttatgctctgctaaaaagattgagttttatcctgaaagaagtattatagggccattgcccagattaaaaggaattggtggctc

SEQ ID NO: 1292 - DNA, 110 bp, synthetic construct
  source 1..110: mol_type = other DNA
ggcgtcgggggtgcctgggggctcgaggtccccgcctgagtattcgagggaaagcccaaatccctagagctagtctaacgaatgaccgaacttttccgcgaacctgaagt

SEQ ID NO: 1293 - DNA, 110 bp, synthetic construct
  source 1..110: mol_type = other DNA
ccaaatccctagagctagtctaacgaatgaccgaacttttccgcgaacctgaagttcgagggggtaagagccaccttggcgccgcgtccgcgggactctagcacccagga

SEQ ID NO: 1294 - DNA, 110 bp, synthetic construct
  source 1..110: mol_type = other DNA
atctaatttgaccttatattactcccgataagtcttccaattccacccagttaactttcttactgtcaacattccttccttcatacaccaggctcacaaggcctctgggt

SEQ ID NO: 1295 - DNA, 110 bp, synthetic construct
  source 1..110: mol_type = other DNA
atacttgcaagaggttgcaagccatcctggtttcctggcttttatacagcctggaccttccttatgagatggttgctgcccagccaggcctcttaggacttggctgtctc

SEQ ID NO: 1296 - DNA, 110 bp, synthetic construct
  source 1..110: mol_type = other DNA
ccttccttatgagatggttgctgcccagccaggcctcttaggacttggctgtctccctctctaagtagcaacaggaaggtattgttaatagcttagggcaataagataac

SEQ ID NO: 1297 - DNA, 110 bp, synthetic construct
  source 1..110: mol_type = other DNA
tttatgcagtcaagttcactgagggtttgctgtcctctctgtagttattaaaatgacttgaaaatgcattaatgtggggccattggtattgctatatttaaggtagccaa

SEQ ID NO: 1298 - DNA, 110 bp, synthetic construct
  source 1..110: mol_type = other DNA
gcattggccacataggtgaacaaaaatgtatctttgggaaaacagtttgttaatttgaaaaaaaatacatagctgaacaggaattttattattcctgtccaccactcaac

SEQ ID NO: 1299 - DNA, 110 bp, synthetic construct
  source 1..110: mol_type = other DNA
aaaccacagccaaaatagtaccatgcattagtatttaaatacttaacgacatacagagtgtgctcttaatgaaggtacaagggaggtaggcctcttcacaagcttggtta

SEQ ID NO: 1300 - DNA, 110 bp, synthetic construct
  source 1..110: mol_type = other DNA
aatctccagatattgattctaaagcaatggaaatctatacataacctgacagagaattcaaaataattgtcttaaagtagctcagtgaaatagaggaaaacacagataca

SEQ ID NO: 1301 - DNA, 110 bp, synthetic construct
  source 1..110: mol_type = other DNA
tcagatgtgtgcaggattgtctgaggagttggtaggaaggcacatgagaaggtctatccaagagattctggctaaagaagagaggccttttttcataatatataccctat

SEQ ID NO: 1302 - DNA, 110 bp, synthetic construct
  source 1..110: mol_type = other DNA
acccacaataaaccctggcaactcttacagagatcagaagtgggcaggaaaactagcagaaaaactatagtaaacccttaaaagagttaagattttttttcttaagtcat

SEQ ID NO: 1303 - DNA, 110 bp, synthetic construct
  source 1..110: mol_type = other DNA
catagaagacaagccaataaacttctgctatcactctattttcattgtgtcttgcttctggtttacttcaatctttaattcttcacatgaaaatactggagttataattg

SEQ ID NO: 1304 - DNA, 110 bp, synthetic construct
  source 1..110: mol_type = other DNA
ttctggtttacttcaatctttaattcttcacatgaaaatactggagttataattgttaagacagtaaaatttccacctataacaagaaaaccttgcagaagagatgccaa

SEQ ID NO: 1305 - DNA, 110 bp, synthetic construct
  source 1..110: mol_type = other DNA
tctggtgagacgtcttttctgggttacagactgcccaacttcttatatcctcacagaatgaaaagagtgagcttcctttctggcctttttaaaatcagggcactaatccc

SEQ ID NO: 1306 - DNA, 110 bp, synthetic construct
  source 1..110: mol_type = other DNA
ttttttcatggtaaaatacaatatatacaatatcgttttcaggtggctaatttagcattcttagatgaacacctagctaaaagggacaattttccagaaaagacgtgttg

SEQ ID NO: 1307 - DNA, 110 bp, synthetic construct
  source 1..110: mol_type = other DNA
gctaatttagcattcttagatgaacacctagctaaaagggacaattttccagaaaagacgtgttgatcaccaaaaaaactgactcaaagaaaagagaaaaaaatttacac

SEQ ID NO: 1308 - DNA, 110 bp, synthetic construct; identical to SEQ ID NO: 1306
  source 1..110: mol_type = other DNA

SEQ ID NO: 1309 - DNA, 110 bp, synthetic construct; identical to SEQ ID NO: 1307
  source 1..110: mol_type = other DNA

SEQ ID NO: 1310 - DNA, 110 bp, synthetic construct
  source 1..110: mol_type = other DNA
aacgtattagttttaggaggtatatatgtcttgtagacctcaagctattcaattaactcatcaactgtactctcccacaactatctaacagagttaatcttattttctgt

SEQ ID NO: 1311 - DNA, 110 bp, synthetic construct; identical to SEQ ID NO: 1310
  source 1..110: mol_type = other DNA

SEQ ID NO: 1312 - DNA, 110 bp, synthetic construct
  source 1..110: mol_type = other DNA
cagaccaaattattatggcctgtgaggcactgtgtcaggctgaattgtcaaagtagctgaaagtcagtccggcttgaatcttcagcttaaggtgtgtgattgttaggcaa

SEQ ID NO: 1313 - DNA, 110 bp, synthetic construct
  source 1..110: mol_type = other DNA
gatacagagtggaacagaacatggtccctttcttctagtagtgcagaaatactgataaaccagataaacagaacagaaatggcgagcgctaacttgggaaatgcaggagc

SEQ ID NO: 1314 - DNA, 110 bp, synthetic construct
  source 1..110: mol_type = other DNA
taaaccagataaacagaacagaaatggcgagcgctaacttgggaaatgcaggagctgtgaccgtgaagagaggaggcaaaaatggagacccaagagatggaaggtgaaag

SEQ ID NO: 1315 - DNA, 110 bp, synthetic construct; identical to SEQ ID NO: 1313
  source 1..110: mol_type = other DNA

SEQ ID NO: 1316 - DNA, 110 bp, synthetic construct; identical to SEQ ID NO: 1314
  source 1..110: mol_type = other DNA

SEQ ID NO: 1317 - DNA, 110 bp, synthetic construct
  source 1..110: mol_type = other DNA
accaccaccaccactcccacccccactaaatctgacccgaatattcgatacttgaaacactacccggaggatttctgtctgctgtctctattctccgcttgactaagaat

SEQ ID NO: 1318 - DNA, 110 bp, synthetic construct
  source 1..110: mol_type = other DNA
aacacaacgattcttaaaagtggggaattgttaaattgagatttaaaatattacgtaaccattaaagtgaggctttgaaatctttaatgtgatccatttctcacaagaca

SEQ ID NO: 1319 - DNA, 110 bp, synthetic construct
  source 1..110: mol_type = other DNA
aaggaaagttggcatctggcacaaaaagaacctgagaatgggaaagaaaagctagatgagtcccaagaattgggcaaaccacgaggcagtttttataacacttggtctcc

SEQ ID NO: 1320 - DNA, 110 bp, synthetic construct
  source 1..110: mol_type = other DNA
ggttctttttttaagccttttttcattttttaattttcttaagcataccgcttagtggctcattttatccagttagagaagagaggatgagatttggtctgtggaactct

SEQ ID NO: 1321 - DNA, 110 bp, synthetic construct
  source 1..110: mol_type = other DNA
acaaacaaagcaggctggtattcagcgctcagatcctccactgaaaggctaaatgactggaggcaagctgtctaaccttctgaactatagcttcatcatccacatttaca

SEQ ID NO: 1322 - DNA, 110 bp, synthetic construct
  source 1..110: mol_type = other DNA
aactctccctttgctactttttaagttattgcgttttggccatttcattttaaacttgaaatttcttaagaaatagacaaagggcttgattacagctaatatggatttgt

SEQ ID NO: 1323 - DNA, 110 bp, synthetic construct
  source 1..110: mol_type = other DNA
ttgaaatttcttaagaaatagacaaagggcttgattacagctaatatggatttgtcttcctttcatttcagctgtgctgagactagtttggaagaggaaaatgaggagta

SEQ ID NO: 1324 - DNA, 110 bp, synthetic construct
  source 1..110: mol_type = other DNA
aagtaaattagatgaactactaggtgaaagttttactttgaaaataaaactctgagtatttctcagccttcaatctaagcttaaacctttcagagttgtagtccatcttg

SEQ ID NO: 1325 - DNA, 110 bp, synthetic construct
  source 1..110: mol_type = other DNA
gtatttctcagccttcaatctaagcttaaacctttcagagttgtagtccatcttgagcgtgctaatgaaaaatattttatattgcaagttcagtcaaatcactaccttgt

SEQ ID NO: 1326 - DNA, 110 bp, synthetic construct
  source 1..110: mol_type = other DNA
ccatagttatacttgcccagaagatatgagctgctgtgacaattcatatgagctacttgtagtgaacatcagttatcttcccagtagccaataccccttttcctttcttc

SEQ ID NO: 1327 - DNA, 110 bp, synthetic construct; identical to SEQ ID NO: 1326
  source 1..110: mol_type = other DNA

SEQ ID NO: 1328 - DNA, 110 bp, synthetic construct
  source 1..110: mol_type = other DNA
caagtgttagcaaaactgacagtttctggccttatggagcttatgttgtagttatggggaaaagataataaagaaataaacaaataaatacatgggactggtgttaataa

SEQ ID NO: 1329 - DNA, 110 bp, synthetic construct
  source 1..110: mol_type = other DNA
ctcatccatggtcactgttaaggttgttctctatccacaggcaagggaaatgcctattaacactagtatactctggcattcaatattaagcttaaattgggagtggacct

SEQ ID NO: 1330 - DNA, 110 bp, synthetic construct
  source 1..110: mol_type = other DNA
attaacactagtatactctggcattcaatattaagcttaaattgggagtggaccttggaaaaaggatgcagtaatggtgacatcatgattatcgtaaaccggttacaagg

SEQ ID NO: 1331 - DNA, 110 bp, synthetic construct
  source 1..110: mol_type = other DNA
tagcactgctgctagacagcactgggaaggatattttcagtgtttccacacctgtttgcaatggtatacggacaagtaaatcggtcttggccgaggaaatgcctggtgac

SEQ ID NO: 1332 - DNA, 110 bp, synthetic construct
  source 1..110: mol_type = other DNA
ttgcaatggtatacggacaagtaaatcggtcttggccgaggaaatgcctggtgaccaggaataaacatctgggtcatcatgccaggcaagttgtctagactggcagagat

SEQ ID NO: 1333 - DNA, 110 bp, synthetic construct
  source 1..110: mol_type = other DNA
aaagcccactccagttaaaacagccccaacggtgttggataattcatcctcatgtttaaatgcctccaagtaattccattctgctgttttgttttgccttctagaaacat

SEQ ID NO: 1334 - DNA, 110 bp, synthetic construct
  source 1..110: mol_type = other DNA
taaagacatgtagggttggattaggaattttctcagtagtgtgcgagtgaaaccaatacagcaaagaagaagtcgctggggccgagttcaaattattttttaaactgaaa

SEQ ID NO: 1335 - DNA, 110 bp, synthetic construct
  source 1..110: mol_type = other DNA
agtgaaaccaatacagcaaagaagaagtcgctggggccgagttcaaattattttttaaactgaaatcctggttgtgcccaataatttatttcatagtaactcaatattat

SEQ ID NO: 1336 - DNA, 110 bp, synthetic construct
  source 1..110: mol_type = other DNA
accctatcagactgctgtttctagccctgatgttgggactagtactaaacactctaaggcataaatgactctacagctggaaagaaaattaaatgaaataactatttcaa

SEQ ID NO: 1337 - DNA, 110 bp, synthetic construct
  source 1..110: mol_type = other DNA
ctttaatggccaatccaagtaaacaatctttggttgtttggaaatatctgttatagttccagtcggatgtagccttcaactcagtattttcactttaaaagtctgtccct

SEQ ID NO: 1338 - DNA, 110 bp, synthetic construct
  source 1..110: mol_type = other DNA
gttccagtcggatgtagccttcaactcagtattttcactttaaaagtctgtccctaaattatattttttcattagtgaaacggcatatgtttaagattactcacaattta

SEQ ID NO: 1339 - DNA, 110 bp, synthetic construct
  source 1..110: mol_type = other DNA
gagacagttgggaggtaaaataaatgaagagtgctgttcaattaaataaaggtagagtgatggagggcggggagagatgctgacattaggcctgaagctcaggtttctga

SEQ ID NO: 1340 - DNA, 110 bp, synthetic construct
  source 1..110: mol_type = other DNA
agtgatggagggcggggagagatgctgacattaggcctgaagctcaggtttctgacttgcatgcgtacttgaatggatggtgacaccgtctatcgagaaagagaattaga

SEQ ID NO: 1341 - DNA, 110 bp, synthetic construct
  source 1..110: mol_type = other DNA
ctcttggcatattcctcaaaggggagccggctgtgctcccagccacaccttggaccctaagctgctgtttccttatgaaaatttgccactttttcctggtcattcccacc

SEQ ID NO: 1342 - DNA, 110 bp, synthetic construct
  source 1..110: mol_type = other DNA
gcgtacaccttgacttttttgctgcactgcaatactgcacaaacaggcaagaagggggccaaatagaacaaagtccaatcccttttccttgaacaaatattccttttgta

SEQ ID NO: 1343 - DNA, 110 bp, synthetic construct
  source 1..110: mol_type = other DNA
cctgtccctttaattcaaatgtcactttccatttgaagtaggcctttcaggctagcatggtgagaattctaggcagcgtttctttggaaactttgcagtatccatggata

SEQ ID NO: 1344 - DNA, 110 bp, synthetic construct
  source 1..110: mol_type = other DNA
tactatatttcaagaattttaaaatgcatgttttctccccacatttttacacctctttctgaggctaaccaccacatttcttcaaaacaattagtagtcatttgatatac

SEQ ID NO: 1345 - DNA, 110 bp, synthetic construct
  source 1..110: mol_type = other DNA
cattaacccaaccaaggcttccctggtcccatgctcaacccatgcctttaagggtgctcctgaaggcattgaaagctgtgggatattgaaggatggagaggccccgctca

SEQ ID NO: 1346 - DNA, 110 bp, synthetic construct
  source 1..110: mol_type = other DNA
agatcacatgcagatcaggcagagggccagggtcttggcttgaagccctggacgcaatcctagttcctggtagggctttgacagtgctgactttcccagatcacagtccc

SEQ ID NO: 1347 - DNA, 110 bp, synthetic construct
  source 1..110: mol_type = other DNA
ccctccccacatcccgtatttctcccttaccctctccacaaccctctcactctccttttcttaagaaagcaacttagttctaccccagcttctatttttatgtccacatt

SEQ ID NO: 1348 - DNA, 110 bp, synthetic construct
  source 1..110: mol_type = other DNA
ttttcttaagaaagcaacttagttctaccccagcttctatttttatgtccacattctccagctcataagcttaatatcatctttagcatttcaatgttggaaacatttcc

SEQ ID NO: 1349 - DNA, 110 bp, synthetic construct
  source 1..110: mol_type = other DNA
aagttatctaaagcaagaaagcttgttccaaaaaatgctggaggaatattaaaagcaaacttattgagctatctttcatcatctacaacatggtagtagtatttgccaag

SEQ ID NO: 1350 - DNA, 110 bp, synthetic construct
  source 1..110: mol_type = other DNA
tgctggaggaatattaaaagcaaacttattgagctatctttcatcatctacaacatggtagtagtatttgccaagaaatatagaaaggttatatattatgattgggatca

SEQ ID NO: 1351 - DNA, 110 bp, synthetic construct
  source 1..110: mol_type = other DNA
tccttgtcacagttctcttaggaacttttttaaccccttgaatattccaaaatttgtagcataaggtagtaagatggtctggcctagttaataaactggatcattggtgg

SEQ ID NO: 1352 - DNA, 110 bp, synthetic construct
  source 1..110: mol_type = other DNA
tctgaactgaggtagagggagagtgcaaagatagcatcctttggtctgtgttctctcagcatagctctgtaggctctgcacgtgtggtaaacctgaagcctgcccctaaa

SEQ ID NO: 1353 - DNA, 110 bp, synthetic construct
  source 1..110: mol_type = other DNA
aaatactttgtgactataaggagatctagaatttgtttttaaaactctcgcttataaaaccttgtctctcacaagagcaccactgtggtagatatcgttattatttccat

SEQ ID NO: 1354 - DNA, 110 bp, synthetic construct
  source 1..110: mol_type = other DNA
aaaaccttgtctctcacaagagcaccactgtggtagatatcgttattatttccatgttaacaagttaaagaggtcaagtttcaaatagttacgtcacttgcggaaggtca

SEQ ID NO: 1355 - DNA, 110 bp, synthetic construct
  source 1..110: mol_type = other DNA
actggccacacagcatccgtaagaaggcacttgacacaactaagataaggatcttgctgcagctctctccaaagtttaggatgccgttccttctgggcagtgggtgacta

SEQ ID NO: 1356 - DNA, 110 bp, synthetic construct
  source 1..110: mol_type = other DNA
gctgcagctctctccaaagtttaggatgccgttccttctgggcagtgggtgactaaaactagtccctttatatgcctttgatgtatgttgtcttagtattggcttctgct

SEQ ID NO: 1357 - DNA, 110 bp, synthetic construct
  source 1..110: mol_type = other DNA
actaaaagcgcaatgatcatgccctcatgttttctttaaaataagcacccatcgtcttagttatgtcttatgaaacattctgatgggcaaagaaaaagttgaggcaaagg

SEQ ID NO: 1358 - DNA, 110 bp, synthetic construct
  source 1..110: mol_type = other DNA
aatgcattagtgggctggtcagctagtatacttgccttttaaatgctagatctgtagagactgataggactttgttctgggtcttccagtttacctatggggtagacact

SEQ ID NO: 1359 - DNA, 110 bp, synthetic construct
  source 1..110: mol_type = other DNA
tgaagttcactacctctgtggagacagttctaatcttgtttttgttccctttggcaaattgttactagttttctttagcaggcgctaagagaatatattttagcctcact

SEQ ID NO: 1360 - DNA, 110 bp, synthetic construct
  source 1..110: mol_type = other DNA
aaattgttactagttttctttagcaggcgctaagagaatatattttagcctcactggactatgctcatttatttttattctgtgaaaacccctccacgcatttgcgctcg

SEQ ID NO: 1361 - DNA, 110 bp, synthetic construct
  source 1..110: mol_type = other DNA
atgtacagaaaatgtgtggactgggaacaggcatgatgcctttgaacgttcctcagcactggagcctcagacgctagttcctatgtattttacactacagaccagctgtg

SEQ ID NO: 1362 - DNA, 110 bp, synthetic construct
  source 1..110: mol_type = other DNA
gcactggagcctcagacgctagttcctatgtattttacactacagaccagctgtgacaatgtcaaaattgccgatggtaatcacccctatgtgaaaaaaagtatacttat

SEQ ID NO: 1363 - DNA, 110 bp, synthetic construct
  source 1..110: mol_type = other DNA
ctcgcacaaaaaatggtaaaaaaaaaaattcactaatgcatgctagcaatttcttattactttggccccatcgtgttctttgagcatttccaatggtcttcttcacctgc

SEQ ID NO: 1364 - DNA, 110 bp, synthetic construct
  source 1..110: mol_type = other DNA
ggaatcagcaagagggaaagacatcgaaatacgaaagtacaattagaacagctaagttactagagccacagaaactgtttatatcatctagttcttgtggagaaaaaaag

SEQ ID NO: 1365 - DNA, 110 bp, synthetic construct
  source 1..110: mol_type = other DNA
gttactagagccacagaaactgtttatatcatctagttcttgtggagaaaaaaagcaactaaaatcttagaggaaacagtagaattgtgaaatggtttacactgcttcaa

SEQ ID NO: 1366 - DNA, 110 bp, synthetic construct
  source 1..110: mol_type = other DNA
gcttttatggtgataaaatggcaggctagctcttccgaaaagcgtgtcagtaatattttgacttgattatttcctggaatacgagattgaattaaaaccaaagttcatat

SEQ ID NO: 1367 - DNA, 110 bp, synthetic construct
  source 1..110: mol_type = other DNA
tcatgcttgcctatcttgctgtatataaattttgattctttgttgcttggcttttgcacagtagctcattataaatgcatgacttgctctccacaaagaattctgcaccc

SEQ ID NO: 1368 - DNA, 110 bp, synthetic construct
  source 1..110: mol_type = other DNA
caaaaagagaactcccacctgtagtgcattttaatgcaagttttctaaatgatctaataaattggcctaacttttaaaatctgaaatagttctagaaaaggatcactttg

SEQ ID NO: 1369 - DNA, 110 bp, synthetic construct
  source 1..110: mol_type = other DNA
aataaattggcctaacttttaaaatctgaaatagttctagaaaaggatcactttgcctaatttatgcctatcatcaggagttacacttgatctacctgcaaagtgaagaa

SEQ ID NO: 1370 - DNA, 110 bp, synthetic construct
  source 1..110: mol_type = other DNA
ttgctcatcttaaatactcattgataaatgagaaggagctagtatttcaaaagcatgtttaaatataacaagactgaagtctcaaaatcaaggaatgaagtttaatcacc

SEQ ID NO: 1371 - DNA, 110 bp, synthetic construct
  source 1..110: mol_type = other DNA
tgttgtgagccttgatgtgggaaactgttatatgggcatttacatatgtaaatattgatcagctttaaacctctgctttatactggataatctgtgtaaattatgcctca

SEQ ID NO: 1372 - DNA, 110 bp, synthetic construct
  source 1..110: mol_type = other DNA
ctgccactagaacgactgttttcatcttattcccttctagcaagctttttaatggcatttatctcatacagctgtttattgagcaagaaaatatttgactcaaggtttat

SEQ ID NO: 1373 - DNA, 110 bp, synthetic construct
  source 1..110: mol_type = other DNA
ccagattcaggaaatatgtttccagagttcccactgtagctcagggggtgaagaatccaatgcagcctccatgaagatgtaggtttgatccctggcctcctcgctcagta

SEQ ID NO: 1374 - DNA, 110 bp, synthetic construct
  source 1..110: mol_type = other DNA
gtctgtttcaccatcctacagcaactcagtagagttttagagtctcgagtacttatctagatgatgagcagagcacaagctccatttcctgccttttgcagcaaactata

SEQ ID NO: 1375 - DNA, 110 bp, synthetic construct
  source 1..110: mol_type = other DNA
tctagatgatgagcagagcacaagctccatttcctgccttttgcagcaaactataggctaccatgttttccgttcaccagggaagtcagtgtttaatgatgggtgtgatc

SEQ ID NO: 1376 - DNA, 110 bp, synthetic construct
  source 1..110: mol_type = other DNA
tatgtacaataagaaagaacaaagtctggtgttccccagtggttcagtgggttcaggatccagtgttgccgctgctgtggccacagctgatgctgtggcctgagttccat

SEQ ID NO: 1377 - DNA, 110 bp, synthetic construct
  source 1..110: mol_type = other DNA
attctcaaggtctgagactccattctgttcctgagcacagggaaacaagctttgagggacaaggtattcaacagcttaggaaggatttcagcatgaaaagtcttatttcc

SEQ ID NO: 1378 - DNA, 110 bp, synthetic construct
  source 1..110: mol_type = other DNA
gggacaaggtattcaacagcttaggaaggatttcagcatgaaaagtcttatttcctaggtctaataacatctcgattctgcaatgttggcacttgaatgatcatttccca

SEQ ID NO: 1379 - DNA, 110 bp, synthetic construct
  source 1..110: mol_type = other DNA
aagttgcagtgaattgctaagtaattgttcacatattactcaccctactatcagcgaagagcattatgctgcctagatgaagctagattaaaaccaattataaagatgac

SEQ ID NO: 1380 - DNA, 110 bp, synthetic construct
  source 1..110: mol_type = other DNA
tgggtggagttctgccgttctgaggtcagctccgtgccctggggggtcttcgacttaggggaggaggatggagatgtacatgtcgccagtcttgtacgtgttggggcacc

SEQ ID NO: 1381 - DNA, 110 bp, synthetic construct
  source 1..110: mol_type = other DNA
atgcaaaattgttggcctcactaaacctggatctgcctcagctaggcattcattaaatattagctcttattattgtaagcatccatttatgattataataatcccactga

SEQ ID NO: 1382 - DNA, 110 bp, synthetic construct
  source 1..110: mol_type = other DNA
cctcagctaggcattcattaaatattagctcttattattgtaagcatccatttatgattataataatcccactgagtataatattcatggagtttgtactgaagttgcag

SEQ ID NO: 1383 - DNA, 110 bp, synthetic construct
  source 1..110: mol_type = other DNA
tatagagcagtctttacacactgctcctggtagacaaaggcatacagcttcatcgtctccaacctagagactatgtctgttggaaatgacatcttcataaggatgccctc

SEQ ID NO: 1384 - DNA, 110 bp, synthetic construct
  source 1..110: mol_type = other DNA
atttgaccttcacctttcaatggtttgcaagagattttttaaaaattattacatgtgcgatggggatatacatactaacatatgtattcacagctcctcacctccacccc

SEQ ID NO: 1385 - DNA, 110 bp, synthetic construct
  source 1..110: mol_type = other DNA
tgcgatggggatatacatactaacatatgtattcacagctcctcacctccaccccctcaattaacttctaaagaatattgttaagtttccctgatcagcccctgagagtt

SEQ ID NO: 1386 - DNA, 110 bp, synthetic construct
  source 1..110: mol_type = other DNA
tcagcatgaattccttgagtgaatggctactagttcaagaattactgcagctagcacatatatgttctcagataaaagcacaatcgcccagcacagtctgttttaactga

SEQ ID NO: 1387 - DNA, 110 bp, synthetic construct
  source 1..110: mol_type = other DNA
tcctgccagcctggcagtatcagttggaatacttagatggcagccggcttgccccagagctagtgtccctggagaaggagataggaacctcatggtttttcctgatttag

SEQ ID NO: 1388 - DNA, 110 bp, synthetic construct
  source 1..110: mol_type = other DNA
agagctagtgtccctggagaaggagataggaacctcatggtttttcctgatttagcccaggaagtgatgcagcaacaattcctctgtattctgttggttacaaatgactc

SEQ ID NO: 1389 - DNA, 110 bp, synthetic construct
  source 1..110: mol_type = other DNA
tctaataacctcatctaacttaattacagctgcaaagaccttatttccaaatgcggtcacatttatgatctactgagtgtaggacttcaacgtactttatgggtgaacac

SEQ ID NO: 1390 - DNA, 110 bp, synthetic construct
  source 1..110: mol_type = other DNA
ccaaccgtgtctctatgatcctagctgaatgtcctacgattcagttcaatgcagttctgatactaactgaagttagcacattgcaggttaaggactcagtgctatgagac

SEQ ID NO: 1391 - DNA, 110 bp, synthetic construct
  source 1..110: mol_type = other DNA
tcttatgagcactctggctttagctggtcatgagtctcccgatgtccagcatcgccttttaggttttcttggggattggctgaatgcatatgtctgcccacccctctgct

SEQ ID NO: 1392 - DNA, 110 bp, synthetic construct
  source 1..110: mol_type = other DNA
aaacaagagcctgtagaattatagcttgaatgatgtcgaaacttaaatgacaatcaactgctgacaatgacaaactatatcagatactggaattatctgacaaagtaggc

SEQ ID NO: 1393 - DNA, 110 bp, synthetic construct
  source 1..110: mol_type = other DNA
ggatgtaatgaaggaagaatgaagagattgagatgatttatctgcatctaaactcagatcctatccactgtggtttaaaagcctgtgcttacttttcacctttcagagca

SEQ ID NO: 1394 - DNA, 110 bp, synthetic construct
  source 1..110: mol_type = other DNA
agatcctatccactgtggtttaaaagcctgtgcttacttttcacctttcagagcaagagcaccaccactgctccccactttcccaccctaacccatcaacatgttctgtg

SEQ ID NO: 1395 - DNA, 110 bp, synthetic construct
  source 1..110: mol_type = other DNA
gtaacttcaaaagataaagctcacatgttgacgtaaaacttaggccctggggatctcaagatttgtgagaaaggggaatataattcttggctcataattctatcataatc

SEQ ID NO: 1396 - DNA, 110 bp, synthetic construct
  source 1..110: mol_type = other DNA
taactagtgacttctgccaaattgagagaagacagataggaaagtattaattatcaagctaagcagaatgtctttttctgtgcctgtctcataattggtaataagccctc

SEQ ID NO: 1397 - DNA, 110 bp, synthetic construct
  source 1..110: mol_type = other DNA
ttctctttagcaatgtcagcagctaccttactctctctgtctctggttgacccaggttctcaaagctgaatccaatgttagctgctcctgaagattctggcccttctcag

SEQ ID NO: 1398 - DNA, 110 bp, synthetic construct
  source 1..110: mol_type = other DNA
aacggaaagatgtgattttttaaaagtttaacttactgaacggtaatcatccacgtgagtgctatcatcccaataattcatttaaaaggccaaacatacatgcaaatgct

SEQ ID NO: 1399 - DNA, 110 bp, synthetic construct
  source 1..110: mol_type = other DNA
agtatgtaaatcctccttccacagcacctaaaaactatagaaaaatagactgtaatagtttaaagaacaaattcaggagtcagactaccttagtcttctgtcacatacta

SEQ ID NO: 1400 - DNA, 110 bp, synthetic construct
  source 1..110: mol_type = other DNA
tagtttaaagaacaaattcaggagtcagactaccttagtcttctgtcacatactagctgtgtgaccttaggtaagctacctaccatctctttcatgccttatttgatcac

SEQ ID NO: 1401 - DNA, 110 bp, synthetic construct
  source 1..110: mol_type = other DNA
tatttattctctccttgtgccctacaaaacaaacactggattcatttagctttgcacacactgtgtattagtcataattccaacaggatacagatgccataatcaaaata

SEQ ID NO: 1402 - DNA, 110 bp, synthetic construct
  source 1..110: mol_type = other DNA
ctgcattcatgatgggagatacctgttcaatttagccagcccatccataatatgtgagagtgtagctattataaatggaaaaaattcattggaatggatacttcctagta

SEQ ID NO: 1403 - DNA, 110 bp, synthetic construct
  source 1..110: mol_type = other DNA
tcatcaaattcttctcccaaatggaaactaatctctgtgttcttgaatgtgctctgagtcctgatcactaccttgtccccctcctgactgatgatcaccgttggtttagt

SEQ ID NO: 1404 - DNA, 110 bp, synthetic construct
  source 1..110: mol_type = other DNA
accaactatagcttctagaagaggtaaatgcagctgcatcctctttgttccatcctcaggacatttagggtccatggcctttttaaactgccctgcacccttcttgaggt

SEQ ID NO: 1405 - DNA, 110 bp, synthetic construct
  source 1..110: mol_type = other DNA
aaaaaaaaggaagaaagaaagaaagaaaagctaagacacaggcatgagtcaaaattcaattttctcttattgcttggaggtggaggtcctgatttgaggtagagcactcc

SEQ ID NO: 1406 - DNA, 110 bp, synthetic construct
  source 1..110: mol_type = other DNA
agcttccctatgaagtcagctgaggctgcagttgggccttcatcatagcacaacttctccttctgcccattctcttttccttctccttcctgctgcaagtatcagtccca

SEQ ID NO: 1407 - DNA, 110 bp, synthetic construct
  source 1..110: mol_type = other DNA
aatagctgagatttgttggattttttttaatgtagtaagctctgtgaaaagaattttgcatgctctttctcatttgaatatgttaccatatcaggtaatttcgttgacat

SEQ ID NO: 1408 - DNA, 110 bp, synthetic construct
  source 1..110: mol_type = other DNA
aaagacgtgttggtgatatcttggcgacaggaagaatggtctgtgtcagcgataacaaccacgttcctattccctgatcctaccatttatcttctgggtgccacctttca

SEQ ID NO: 1409 - DNA, 110 bp, synthetic construct
  source 1..110: mol_type = other DNA
caaccacgttcctattccctgatcctaccatttatcttctgggtgccacctttcataccttctatagggtttctgggcaaattttaaaatgactgtgctgtcaacctttt

SEQ ID NO: 1410 - DNA, 110 bp, synthetic construct
  source 1..110: mol_type = other DNA
tcataggagagtgaaaataagatatcaaatgttggcagctatcagtctacctgtagggcagctgctgagactttactgcctgtatatggaccctgactatcctccagctc

SEQ ID NO: 1411 - DNA, 110 bp, synthetic construct
  source 1..110: mol_type = other DNA
tgaataagatgtttcaaacttgtccaccaccactactctttaattcttatatacacactctgatataaaagactcttagctcacacctctatgaaccaatccttgctggc

SEQ ID NO: 1412 - DNA, 110 bp, synthetic construct
  source 1..110: mol_type = other DNA
cactctgatataaaagactcttagctcacacctctatgaaccaatccttgctggcatcaatgactgagagtagaagttgagttggagtgttgatttgaagtgctattgct

SEQ ID NO: 1413 - DNA, 110 bp, synthetic construct
  source 1..110: mol_type = other DNA
ttgtaaggaaagctagtgtgccatccactctaatctcctcagctccaatccagacacctttccttttaactgtagaggccagagacactgataggaaatggagacaagta

SEQ ID NO: 1414 - DNA, 110 bp, synthetic construct
  source 1..110: mol_type = other DNA
acacaagtgaaatgtgaaacccagaaggccttggcatcatgtacactcatttctgtagcctgaagcacgaaaagctgaggttaaaacctaggccttatacaagggtattg

SEQ ID NO: 1415 - DNA, 110 bp, synthetic construct
  source 1..110: mol_type = other DNA
tagcctgaagcacgaaaagctgaggttaaaacctaggccttatacaagggtattgcagggaaggatgagttttcaacccagtccttcagggacctaactggcaagaagta

SEQ ID NO: 1416 - DNA, 110 bp, synthetic construct
  source 1..110: mol_type = other DNA
atactctgttatctattagatgcctaaagaaggtttggactagtacacactcatacaccagagacccctcccccagctcagtgcatcaccactggcaagattcccagccc

SEQ ID NO: 1417 - DNA, 110 bp, synthetic construct
  source 1..110: mol_type = other DNA
acgtttactcagaagtggtgatggttatattaggtgaagagggaaacaggcacagctcactttagtttcagttatccagatgcgtaggatccaagaacttagacaaagac

SEQ ID NO: 1418 - DNA, 110 bp, synthetic construct
  source 1..110: mol_type = other DNA
ctcactttagtttcagttatccagatgcgtaggatccaagaacttagacaaagacacacatacaggaaaaatctgtgcctgcctccagatgcctccattctaaccactct

SEQ ID NO: 1419 - DNA, 110 bp, synthetic construct
  source 1..110: mol_type = other DNA
gtgaacagaaactaatgaacttgaccaaacaaataaatatcagcaccctgtcccttatcatttctttcacaagcttataagttgattttctagtgaagaacagcttttag

SEQ ID NO: 1420 - DNA, 110 bp, synthetic construct
  source 1..110: mol_type = other DNA
acacttgaccgtcaaaatgacccaaccacttcctccatgtctgtgtgtatgaacagtgatgcaataagctctcaaatatcatctcattaatacttccaatttgtttgcta

SEQ ID NO: 1421 - DNA, 110 bp, synthetic construct
  source 1..110: mol_type = other DNA
ggagaaatccttccaaggagagacatagtcatgttccattgaactggaagctgagagagccctctgaccattcagactccccccacccctgaaccaagaggcagagatgg

SEQ ID NO: 1422 - DNA, 110 bp, synthetic construct
  source 1..110: mol_type = other DNA
agagccctctgaccattcagactccccccacccctgaaccaagaggcagagatggaggctactcttatcagagatattgagtccaattaccatggcaattggcgtgatca

SEQ ID NO: 1423 - DNA, 110 bp, synthetic construct
  source 1..110: mol_type = other DNA
ttcagcttctgcattcagattcctggaaccctttaaaagacagacgatgaaatgactgttttgctggaatgacccggtttgtttctctgtgcaattgagctgaacctctg

SEQ ID NO: 1424 - DNA, 110 bp, synthetic construct
  source 1..110: mol_type = other DNA
ctgttttgctggaatgacccggtttgtttctctgtgcaattgagctgaacctctggaaagaactgagtagaatggggtcatttcaggctcacccttttctgtaaatcata

SEQ ID NO: 1425 - DNA, 110 bp, synthetic construct
  source 1..110: mol_type = other DNA
atgccaaagaagtttaccagggaattttctttttttaatgaccagaaagtatccacagtaggtaaattgatagatcaggctgttatctgaatgcatcatctccacttggt

SEQ ID NO: 1426 - DNA, 110 bp, synthetic construct
  source 1..110: mol_type = other DNA
cagtgttccaaacagatgaactttccttttactactttgctttgaatttttctaagatggtactgcaaatattttgagcttctctttgttcccatcagggttttattcat

SEQ ID NO: 1427 - DNA, 110 bp, synthetic construct
  source 1..110: mol_type = other DNA
tgggatttgcctgtggctcactgaccttaagctggactcctctgctgatcccaagtaaaccaatttttgctggagaacactggtagtctatttgttttaagttaacaaag

SEQ ID NO: 1428 - DNA, 110 bp, synthetic construct
  source 1..110: mol_type = other DNA
aaacttctcagaaaagaatggcacagcacctcaatcacagataattctttcccagttgttttgaattcaccactcatctcattttaaacttttatttaaactcagtatta

SEQ ID NO: 1429 - DNA, 110 bp, synthetic construct
  source 1..110: mol_type = other DNA
ttgttttgaattcaccactcatctcattttaaacttttatttaaactcagtattatcagtttaaatccttgggtgaaagcaatataagggtaagggctcaggattgctat

SEQ ID NO: 1430 - DNA, 110 bp, synthetic construct
  source 1..110: mol_type = other DNA
ggcgcgcatgcgcagggcacagaggtcctcggaccctcatagctgtggttgatattgacagaggatggctcatttctccggtgaggaccaagcgatgctgcaggcgatgc

SEQ ID NO: 1431 - DNA, 110 bp, synthetic construct
  source 1..110: mol_type = other DNA
aaaagctaaattgaattgtgctttataatttaagagaaatcactttaggttttttaacagaaaagtgtgtgtcagtgtgtgacagtaaatctgggtgcagaatggcatag

SEQ ID NO: 1432 - DNA, 110 bp, synthetic construct; identical to SEQ ID NO: 1431
  source 1..110: mol_type = other DNA

SEQ ID NO: 1433 - DNA, 110 bp, synthetic construct
  source 1..110: mol_type = other DNA
aaatggattccttcatgatactttgtcttttattcagaaagaaatcgtatttcattttttgtgaacatcttactggatttgccatatggccacttcttgctggatgggag

SEQ ID NO: 1434 - DNA, 110 bp, synthetic construct
  source 1..110: mol_type = other DNA
tttttgtgaacatcttactggatttgccatatggccacttcttgctggatgggagatgatgaaaaaggaatttagatagagattgggtcaaccagtcattgttacccgtt

SEQ ID NO: 1435 - DNA, 110 bp, synthetic construct
  source 1..110: mol_type = other DNA
aacagtcttagtgctcagcttgtagttctagatattattcctctctaggagttctgttttcttctggagtctaattttattgtcatttaaattttagaaaacagagatat

SEQ ID NO: 1436 - DNA, 110 bp, synthetic construct; identical to SEQ ID NO: 1435
  source 1..110: mol_type = other DNA

SEQ ID NO: 1437 - DNA, 110 bp, synthetic construct
  source 1..110: mol_type = other DNA
agcttgctttgggaagaaggggataggaggatatagactggtatttggatgattagagttcactgaccttactatagctacagggcctcaggagagtaaacagccaggct

SEQ ID NO: 1438 - DNA, 110 bp, synthetic construct
  source 1..110: mol_type = other DNA
caacaggaactccagaaagacagaatgtttttaagagtcctctttaaactgtagtaatggggattaaatcttggaaattatgttttatactttctgatctaaaatctcag

SEQ ID NO: 1439 - DNA, 110 bp, synthetic construct
  source 1..110: mol_type = other DNA
aaaaaggaaacttttaaatccacatcaagcagattttacctgtaaaattacttaagagagctcctgtctgtatttcataatttcctcttcattgaactattctgtgtatt

SEQ ID NO: 1440 - DNA, 110 bp, synthetic construct
  source 1..110: mol_type = other DNA
gcacttggcaagccctacacaggactatggcatccagcaagagtttatataaagatgctgcagggcctacatgtttgaaacccaaacatgaaaaagcacgaaaagcaaac

SEQ ID NO: 1441 - DNA, 110 bp, synthetic construct
  source 1..110: mol_type = other DNA
tgctgcagggcctacatgtttgaaacccaaacatgaaaaagcacgaaaagcaaactaaagatcaatttctctcatgattatagatgtaaaaatactaacaaaccggagtt

SEQ ID NO: 1442 - DNA, 110 bp, synthetic construct
  source 1..110: mol_type = other DNA
ctcataattcaaaagtcatagaagctggaaaaaatcctcaaacagaaatttcttccctgttccagactgtttaaatggtgtacaatacgtgggctaatagccatctgttg

SEQ ID NO: 1443 - DNA, 110 bp, synthetic construct
  source 1..110: mol_type = other DNA
ccgttgcgccacaacaggagatcctaattcccttttcttgagtgtcaatgggtcataataaatattataacacttccttgattaggttattaatcagttgactttgagtt

SEQ ID NO: 1444 - DNA, 110 bp, synthetic construct
  source 1..110: mol_type = other DNA
agttatgtcccagtaagttgaaaataactaagtcaaatgcatttaaagctgaacagcttagcctaatttatcttaaatgtgttcagacacacattagcctataattgaga

SEQ ID NO: 1445 - DNA, 110 bp, synthetic construct
  source 1..110: mol_type = other DNA
tcatgaatcttctaggaccaaatgatctggctctgggtgccactgccttggaacattttctaatttggcactttaaaggacactttatgattcctcacttgataggaatt

SEQ ID NO: 1446 - DNA, 110 bp, synthetic construct
  source 1..110: mol_type = other DNA
ggacctgctgaaagtggtgcaagctactccaagttgcagggccctgggaacttttaataagcctcaggcagattcagacagtgcctggaatatttgtcagtgacagtggc

SEQ ID NO: 1447 - DNA, 110 bp, synthetic construct
  source 1..110: mol_type = other DNA
accacctgaagcaaattagtgattatgggtcaatagatgcaatattcactcatgtcccttgatttttagtgcctcagctgattaagcctgggatgaaaaatcttattaaa

SEQ ID NO: 1448 - DNA, 110 bp, synthetic construct
  source 1..110: mol_type = other DNA
atgttaaattcttcataatgtcctacctagtatgtctggggcatctaatccataggccagttactttatgaagcaatgtatagttggatgtttatttatactatattttc

SEQ ID NO: 1449 - DNA, 110 bp, synthetic construct
  source 1..110: mol_type = other DNA
ccaaggagaagataaaggaaaaaaaagaatatgatggctatcagattcctcctatgcctgtctattttatgagacaattttacggtaataaaaacagattgaataaagat

SEQ ID NO: 1450 - DNA, 110 bp, synthetic construct
  source 1..110: mol_type = other DNA
ggctatcagattcctcctatgcctgtctattttatgagacaattttacggtaataaaaacagattgaataaagatttcttagcctaccaactaactaaaaggagaaaata

SEQ ID NO: 1451 - DNA, 110 bp, synthetic construct
  source 1..110: mol_type = other DNA
ggtgtaggttgcagacgcagctcaggtccgttctgctgtggctgtggcctaggctggcagctcgagttccaattaaacacctagcctgggaaattccatatgccctgctg

SEQ ID NO: 1452 - DNA, 110 bp, synthetic construct; identical to SEQ ID NO: 1451
  source 1..110: mol_type = other DNA

SEQ ID NO: 1453 - DNA, 110 bp, synthetic construct
  source 1..110: mol_type = other DNA
agctgcagaacagagtactagaaaaaaagagagcagcactgattgaaagctcttgggacctgcagagggtatcctttgaatactcagtagaacgctgttcagtgcatacc

SEQ ID NO: 1454 - DNA, 110 bp, synthetic construct
  source 1..110: mol_type = other DNA
taacattgctgtttgttgaatctagtagacagctaagtacctctcactaagcatgtgacatgacacaaagagtgatctgtcttcttctctcctgttgtggtctctgttta

SEQ ID NO: 1455 - DNA, 110 bp, synthetic construct
  source 1..110: mol_type = other DNA
ggattattcggctgaatttgaagatacaaagtgccatgctgtggaaagggtcacaaattagggaactatgtagcttttataaactgagagtagccccttgccaacagaaa

SEQ ID NO: 1456 - DNA, 110 bp, synthetic construct
  source 1..110: mol_type = other DNA
aattagggaactatgtagcttttataaactgagagtagccccttgccaacagaaagaaaaatggaaatctcagtcctacaaaagcaaggaactaaattctaccaaaagcc

SEQ ID NO: 1457 - DNA, 110 bp, synthetic construct
  source 1..110: mol_type = other DNA
gaactactacttaaatagaaagtcagaatgtcaatagtagaaatgagatttttttccaagactacctaaactgttgctgggcagcctcagctttttttttttttttttaa

SEQ ID NO: 1458 - DNA, 110 bp, synthetic construct
  source 1..110: mol_type = other DNA
tagtatggacattaatagcagtgtcagtggcaacagtgactagggatcatggtgtctccagtgtcctagaaatcagcatttttaatttttagtttccacggccttaatgc

SEQ ID NO: 1459 - DNA, 110 bp, synthetic construct
  source 1..110: mol_type = other DNA
ctccagtgtcctagaaatcagcatttttaatttttagtttccacggccttaatgcaaatcaaatgaacattagaagtagaagcaacatttttgtaaggcagaagcagtgg

SEQ ID NO: 1460 - DNA, 110 bp, synthetic construct
  source 1..110: mol_type = other DNA
tccggaagtcataggctgaacagttgcaagagctcaaacagggccaggaaacacttgagtttccatcagccagaatagagcttgtgttaactccgaggtagagatacaaa

SEQ ID NO: 1461 - DNA, 110 bp, synthetic construct
  source 1..110: mol_type = other DNA
tgaagtacaaatgccaaatgccatttgtttgctgagtcctatactatttgatctattgttaacactgaatttaagctgcctcttttttggttctgtttggatcacaccac

SEQ ID NO: 1462 - DNA, 110 bp, synthetic construct
  source 1..110: mol_type = other DNA
accctctggaatatgtggctttaagtgaataaataatttgtccttacacttatgaccaataattaacctactaatcctaaggcttcataccagtgaaacataaaaaattc

SEQ ID NO: 1463 - DNA, 110 bp, synthetic construct
  source 1..110: mol_type = other DNA
gtaatatttaaaggaatggtaattaaaaattgtccagaaccactgaactctaatccacagattcaaaaagctcaacaaaaccataactgaatacaccacagaaaacccac

SEQ ID NO: 1464 - DNA, 110 bp, synthetic construct
  source 1..110: mol_type = other DNA
cacagattcaaaaagctcaacaaaaccataactgaatacaccacagaaaacccactgaagaccaaagcaattagactgattaatatggtgagagaaaattatccagttat

SEQ ID NO: 1465 - DNA, 110 bp, synthetic construct
  source 1..110: mol_type = other DNA
aaacctgtgctccaagaagttgcaaagaccttctctgcaattactattatctcccttctacatgagggttggttttccccaggaggcaccaggttaccatttctgtcctc

SEQ ID NO: 1466 - DNA, 110 bp, synthetic construct
  source 1..110: mol_type = other DNA
ccagaaggggagagaagaagagactaatttggaactgagcttgaatgtcacaaatgctgagacatccagaacaaggacaactatcagaaacactggactaaaagagattt

SEQ ID NO: 1467 - DNA, 110 bp, synthetic construct
  source 1..110: mol_type = other DNA
atacggagaaatcacccctcctaccatctcactgtggcttctttttcgtcttgcgaatagaatatcttttttggtaggttccaagcttttttgtcaatagttgttgagca

SEQ ID NO: 1468 - DNA, 110 bp, synthetic construct
  source 1..110: mol_type = other DNA
cagtgaggtaacatgaaaaaggtataagaaggaattgcagcagaggagacaaaggaaaaagagctgaggcggagaataagccacttcacatactatgaaaaagcctcgga

SEQ ID NO: 1469 - DNA, 110 bp, synthetic construct
  source 1..110: mol_type = other DNA
aaaaagagctgaggcggagaataagccacttcacatactatgaaaaagcctcggaggaattccccttgtggcttaatgggttaagaacctgacatagtatccttgaggat

SEQ ID NO: 1470 - DNA, 110 bp, synthetic construct
  source 1..110: mol_type = other DNA
aggggcatttgttggctgcattaactgcttcctgtcaggtaaaagctgtgtcttatcgataaactggccaagacagccagctgtggtgaccttcactgtatctcagtgac

SEQ ID NO: 1471 - DNA, 110 bp, synthetic construct
  source 1..110: mol_type = other DNA
tcgataaactggccaagacagccagctgtggtgaccttcactgtatctcagtgacttttaactttggctctaaagttttcctgtttatgccagggacgagtacacaagga

SEQ ID NO: 1472 - DNA, 110 bp, synthetic construct; identical to SEQ ID NO: 1470
  source 1..110: mol_type = other DNA

SEQ ID NO: 1473 - DNA, 110 bp, synthetic construct; identical to SEQ ID NO: 1471
  source 1..110: mol_type = other DNA

SEQ ID NO: 1474 - DNA, 110 bp, synthetic construct
  source 1..110: mol_type = other DNA
agaggttatactcagatttttagcctcactccttctatggctcattcatttccgggactactcccccaacacacaaaaattttcagctgctctgccaatagttaagtttt

SEQ ID NO: 1475 - DNA, 110 bp, synthetic construct
  source 1..110: mol_type = other DNA
ttacattcttcagctctttctttcttctattttctaactcttttttgatattcttagtgtgttcatccatccttttcttgagctcagtgagcatctctactatcattacc

SEQ ID NO: 1476 - DNA, 110 bp, synthetic construct
  source 1..110: mol_type = other DNA
gccatcactcttactcctgctatcattgttcttaatatcatcattttggacaaaatctccaatgtgtaactcctcctaatagctggtccacatttacctgtggaccagaa

SEQ ID NO: 1477 - DNA, 110 bp, synthetic construct
  source 1..110: mol_type = other DNA
ggagcaaaaatctaaacactcctccccacggatgttgacctgttccctgcagaattggaccaactctttgagaattcaaaaggagtttgctagttgcgagtgtaaagtta

SEQ ID NO: 1478 - DNA, 110 bp, synthetic construct
  source 1..110: mol_type = other DNA
tggaccaactctttgagaattcaaaaggagtttgctagttgcgagtgtaaagttatagatgtaatttatatgctagaaatgcaaaatctccaacactgataagcaaattg

SEQ ID NO: 1479 - DNA, 110 bp, synthetic construct
  source 1..110: mol_type = other DNA
cctgctgcatccatctatctcctaactcacagctctctccaaagctccaggagctaaacccacacagaatgaccagacacacagggaacttcccctggaagccaccctca

SEQ ID NO: 1480 - DNA, 110 bp, synthetic construct
  source 1..110: mol_type = other DNA
aaacccacacagaatgaccagacacacagggaacttcccctggaagccaccctcaaccaatgaatgaaaggagacagtggataaacgtgtcggtcagcctttgttctggt

SEQ ID NO: 1481 - DNA, 110 bp, synthetic construct
  source 1..110: mol_type = other DNA
cactgtcatcccttactgttcagctatctctacctcctctttctcacactgtacagccaacccgtcaccattccccactgttctgccttcagagtgcatccagggtcttg

SEQ ID NO: 1482 - DNA, 110 bp, synthetic construct
  source 1..110: mol_type = other DNA
tcttttgctattgttaatatctttgaaatgcttttttccttaggaaggcaatacgtaaactattccttgtgttgatttttctttgtgtattgttctgtggcacagatttc

SEQ ID NO: 1483 - DNA, 110 bp, synthetic construct
  source 1..110: mol_type = other DNA
gggtaggttgttgctcactgtgggggcaggacattggaggtggaggtccccaggaatgaccactggcatgagctcctctaaagtctgccattttggaaaaatctgtctcc

SEQ ID NO: 1484 - DNA, 110 bp, synthetic construct
  source 1..110: mol_type = other DNA
atgaccactggcatgagctcctctaaagtctgccattttggaaaaatctgtctccacgcatcagggctaagaagccccaggccaaactacaaagtacaaacacagcccca

SEQ ID NO: 1485 - DNA, 110 bp, synthetic construct
  source 1..110: mol_type = other DNA
ggcctacgccacagccatggaaacaccagatccgaatcacatctgtggacctgaacagcagcttgaatccttaacttactgcactgggccagggatcgaaccctttcatc

SEQ ID NO: 1486 - DNA, 110 bp, synthetic construct
  source 1..110: mol_type = other DNA
ccttaatatgaaatgtttgcctgttcttagaaattactgacccaacacctgacatatacaggttacccaagcaaatcagagaagctctggagcatggaaaagatgaaaac

SEQ ID NO: 1487 - DNA, 110 bp, synthetic construct
  source 1..110: mol_type = other DNA
cttttacccttgcctctccccggtgtccctctctttgaggatccaggggcagcacctggagcagaggacagatagaaacagggcaagaagctcagacagaagaagacatg

SEQ ID NO: 1488 - DNA, 110 bp, synthetic construct
  source 1..110: mol_type = other DNA
ttgaaaaatttaatccatgcactccccaaaatagagttctctgtttagctgggcaaatcctcttctcaagctctcgcctcctcgaataaagttgaggtgggagtccctgt

SEQ ID NO: 1489 - DNA, 110 bp, synthetic construct
  source 1..110: mol_type = other DNA
aatcctcttctcaagctctcgcctcctcgaataaagttgaggtgggagtccctgtccggccagttaaatatatatcctcattgcttttaatgacttaacttgttcttttt

SEQ ID NO: 1490 - DNA, 110 bp, synthetic construct
  source 1..110: mol_type = other DNA
cacaccctctctccattcccaagaggacaggctgcattggaccagaacattgtatctggacattgggaagaatttttaatctcctacctttagttctttccatgtacaaa

SEQ ID NO: 1491 - DNA, 110 bp, synthetic construct
  source 1..110: mol_type = other DNA
ccattagcttagaaattcacaaactgaattcatagcatagtttaactgacttctcagagagtctagagataaactatagcattgtaaaaaagagggccaaattctgcttt

SEQ ID NO: 1492 - DNA, 110 bp, synthetic construct
  source 1..110: mol_type = other DNA
agagagtctagagataaactatagcattgtaaaaaagagggccaaattctgctttttatttatgcactgattcaacaaatcttgtaggcattcaccatatgctaggtgct

SEQ ID NO: 1493 - DNA, 110 bp, synthetic construct
  source 1..110: mol_type = other DNA
agcaaggccagcgatggaacctgcaccctcattgttcctagttgggttgccctaaagttttaaaatgaactttaattagttatgcttctggaagagaatgggaagaaaaa

SEQ ID NO: 1494 - DNA, 110 bp, synthetic construct
  source 1..110: mol_type = other DNA
ggcatagtaaataaaactgtcattgtcttcctatctaccacagataattgttattttcagaggacctgtacttaagaacagcgtttccatttgcattctttcagagctcc

SEQ ID NO: 1495 - DNA, 110 bp, synthetic construct
  source 1..110: mol_type = other DNA
ttcagaggacctgtacttaagaacagcgtttccatttgcattctttcagagctcccacaagctcttctacaaaaccatctgattaattggtgcctgataattatctgtgc

SEQ ID NO: 1496 - DNA, 110 bp, synthetic construct
  source 1..110: mol_type = other DNA
ctggaagctgagactgttcaaatttatgtttcctctctcaggtattaattaccatagggcattagctggcacacaggaaccctttccattatttaaattcttatctccct

SEQ ID NO: 1497 - DNA, 110 bp, synthetic construct
  source 1..110: mol_type = other DNA
ccagatctcacatctttaggttccccctggagacatcctgataccctattttgaatgtttgaagactgggccaaaatctcaagggtcttcctggatgacacttttctggt

SEQ ID NO: 1498 - DNA, 110 bp, synthetic construct
  source 1..110: mol_type = other DNA
cacatccctttaaggtcaaagtagacatagctactagatcaagtagcaaaggggcagaggaggaaggattttcgaatttcctttcctggagaaaatcctctctcatgcat

SEQ ID NO: 1499 - DNA, 110 bp, synthetic construct
  source 1..110: mol_type = other DNA
gttctgctgcagggaaatctgccttgggtgagagcagagcatcccagagaacaaattcctattgggtgagcatcactggagcgttaatcaggtttaaaaataagctccga

SEQ ID NO: 1500 - DNA, 110 bp, synthetic construct
  source 1..110: mol_type = other DNA
ttcctattgggtgagcatcactggagcgttaatcaggtttaaaaataagctccgattatcagaatactagattccaaaagtaggaagcaaggacgtaacatttactgagt

SEQ ID NO: 1501 - DNA, 110 bp, synthetic construct
  source 1..110: mol_type = other DNA
aatggatgtgctgccctcaaaagttgacataaagagactcttctgtaaataccgtcatattctatatgtttaaggaagaggcctacaagaaatcattttttaaaaaagga

SEQ ID NO: 1502 - DNA, 110 bp, synthetic construct
  source 1..110: mol_type = other DNA
cagtgaaatggtggttggctgaaatgatccttaagaaggtgatatctataaagtggagaagaatctggccagatagggctgggttcaaaccctggttctgcaacttacga

SEQ ID NO: 1503 - DNA, 110 bp, synthetic construct
  source 1..110: mol_type = other DNA
gagaagaatctggccagatagggctgggttcaaaccctggttctgcaacttacgagtgatatcaccttgagcaatacatacaactttcatgggtttcacttctctcaact

SEQ ID NO: 1504 - DNA, 110 bp, synthetic construct
  source 1..110: mol_type = other DNA
agagacatgacttagtggattctctactcaggatctctcaagactacagttaatgtgctttggccaagctgcattctcatctggaggctaaaccagggaagaatctattt

SEQ ID NO: 1505 - DNA, 110 bp, synthetic construct
  source 1..110: mol_type = other DNA
tttacttctcagactacttgtcaggctatgctttggacaatgggttccaagtacagctttggaaatactctagttttgggagggaataaatatgacaaaatgtagctcaa

SEQ ID NO: 1506 - DNA, 110 bp, synthetic construct
  source 1..110: mol_type = other DNA
ggaactgagcattgtggaagatcaaggtccagaacacccacgtaatctcaatataccataactagctctttaaacctaaaaataccagaggaagagctcctatggaaaaa

SEQ ID NO: 1507 - DNA, 110 bp, synthetic construct
  source 1..110: mol_type = other DNA
agaatgtgaaattcattccaacactcactgggtgatgggaggttttgtttggttgcattgtttgatatctcagacttactccgtaactagctaaaaactggcctgtgcta

SEQ ID NO: 1508 - DNA, 110 bp, synthetic construct
  source 1..110: mol_type = other DNA
cattgtttgatatctcagacttactccgtaactagctaaaaactggcctgtgctattttcaaggacagatcacctccctttagactggcttgaatgccactcaccaagct

SEQ ID NO: 1509 - DNA, 110 bp, synthetic construct
  source 1..110: mol_type = other DNA
tgataggtccatttccttacacagtacttccttgaaaatgtaccacctttatccgaggtaaactaaacattcctttaatatgaacatgtctccaagctctgtgcaagaaa

SEQ ID NO: 1510 - DNA, 110 bp, synthetic construct
  source 1..110: mol_type = other DNA
gatgttaaatgtttaatgtgggatattgtcattgccgtggacctcaacatataacctgtaattaaaatttcaaatgactctcattctgaagtgcattgcctctggtttgc

SEQ ID NO: 1511 - DNA, 110 bp, synthetic construct
  source 1..110: mol_type = other DNA
ctgtaattaaaatttcaaatgactctcattctgaagtgcattgcctctggtttgcataatgcacaatatattcattgttgtggctttctttgcataaatcaatcttatta

SEQ ID NO: 1512 - DNA, 110 bp, synthetic construct
  source 1..110: mol_type = other DNA
acaagaattctccctgtcttccatgagctacaagtctaatgaaggagtcagttcccaaaacactaactccccagtggcaagttttctagtggatacacatccaaagtgcc

SEQ ID NO: 1513 - DNA, 110 bp, synthetic construct
  source 1..110: mol_type = other DNA
tcagattcgttaaccactgtgccacgaagggaactcctgacaatgtcttatttattttatagcttataactctgtcttacattcagttcaatacttaaattgatttgagt

SEQ ID NO: 1514 - DNA, 110 bp, synthetic construct; identical to SEQ ID NO: 1513
  source 1..110: mol_type = other DNA

SEQ ID NO: 1515 - DNA, 110 bp, synthetic construct
  source 1..110: mol_type = other DNA
ccccacattcccatggacaccagctgggtttgtttctgctgcgccatgccgcaacaggaactcctaaaaataaaaataaaaaatcttaaaattataggccaagaggaaaa

SEQ ID NO: 1516 - DNA, 110 bp, synthetic construct
  source 1..110: mol_type = other DNA
gcactagctggatggctagggaactctgtgacagtgacttcatcctcctcatactcccatgctcatgcaacccctaagaaagaggttgggggagagctccagagaccagc

SEQ ID NO: 1517 - DNA, 110 bp, synthetic construct
  source 1..110: mol_type = other DNA
tcctcatactcccatgctcatgcaacccctaagaaagaggttgggggagagctccagagaccagccagaaccttagaagggccaggaaggtggtcccaaagatacacggt

SEQ ID NO: 1518 - DNA, 110 bp, synthetic construct
  source 1..110: mol_type = other DNA
gggtgaaagtaggacatccatgaaaacacaggtgaccccctacagcgaggggactagtgaagctggggagagatgagggctctctattcaaaagcttgggccatttctat

SEQ ID NO: 1519 - DNA, 110 bp, synthetic construct
  source 1..110: mol_type = other DNA
aaatggcaatttaaatcattatttatctagctacatgtttaatatcttttgccgacacataagcccatcaggacaggaggctctctgcgtcgttcacactgtgtctcctg

SEQ ID NO: 1520 - DNA, 110 bp, synthetic construct
  source 1..110: mol_type = other DNA
ctcttggaatgtggtaggcattcactgaatgctagcttgtggagaagacaggcagaagacagtgtaagtgctttgctgggggcaggatgcagtggaattgcagagaatgg

SEQ ID NO: 1521 - DNA, 110 bp, synthetic construct
  source 1..110: mol_type = other DNA
gctgcgccacgacgggaactcctaatcacttctctcatttatttttttagatgatttttggaggccagaaacaagctttattcttactattgcaattggaatatttctgg

SEQ ID NO: 1522 - DNA, 110 bp, synthetic construct
  source 1..110: mol_type = other DNA
ttacgacagtggaggatgtggctcttgtttcaaggaccttgccaccaggtagggtaagtcatatgggaataactcatttaggcagagagcaagaaggcccactagaatgg

SEQ ID NO: 1523 - DNA, 110 bp, synthetic construct
  source 1..110: mol_type = other DNA
aagtcatatgggaataactcatttaggcagagagcaagaaggcccactagaatggagtagaggagatactactgaagcacagaggagagatgtgggaagacttcacaggg

SEQ ID NO: 1524 - DNA, 110 bp, synthetic construct
  source 1..110: mol_type = other DNA
agctactgtggaagagaatcacatatccattttcatcttagatcatttagctcatttttaaatttgtctactgcctgagaacctgcagagatgattggcagtatggtgag

SEQ ID NO: 1525 - DNA, 110 bp, synthetic construct
  source 1..110: mol_type = other DNA
ccacattattgttctaactgttccaatctatctttttccagtccatcttccatatggctatctgagttagcttattgaaatacttctcttgtcatgtgattctttcatct

SEQ ID NO: 1526 - DNA, 110 bp, synthetic construct
  source 1..110: mol_type = other DNA
actgtgggattgaaatatatactaagctcatgtgagcatatctggaggacattcattgagagatggagctggcagagggggatgaagtcacccaaagagaagaaagcttc

SEQ ID NO: 1527 - DNA, 110 bp, synthetic construct
  source 1..110: mol_type = other DNA
ttgagagatggagctggcagagggggatgaagtcacccaaagagaagaaagcttcagggagtagcagcttggttcaggaacagtggtcagcactggaagggagctgtaac

SEQ ID NO: 1528 - DNA, 110 bp, synthetic construct
  source 1..110: mol_type = other DNA
tgaaaactaaatgaagttactaagttaagaaagctcttgcatcactaatgacccgtgtcgtccagactaacctaactctacaaagtttagagaactttctcataggtcag

SEQ ID NO: 1529 - DNA, 110 bp, synthetic construct
  source 1..110: mol_type = other DNA
agaaagaaaatgatgtgtgtcatttgtggccttgagaacaactgcagtagaaaaggctccatagctggcccattacccttccccttgtaagtttcttctaggaaaagaga

SEQ ID NO: 1530 - DNA, 110 bp, synthetic construct
  source 1..110: mol_type = other DNA
tattgaggcagatgttcaaccatagagttctacagtgtctaatggataacatagagaacatacataggaaaaagaaagaggacgtttctttttggaactaagctgaacaa

SEQ ID NO: 1531 - DNA, 110 bp, synthetic construct
  source 1..110: mol_type = other DNA
gaacatacataggaaaaagaaagaggacgtttctttttggaactaagctgaacaatttcaagcaacattccatatctatgtggaattacagtagcagttgcatagaataa

SEQ ID NO: 1532 - DNA, 110 bp, synthetic construct
  source 1..110: mol_type = other DNA
ttcaataatcaggaactggatgttcagcttggtagcttgggttttccttacaagaataacagagacgagaaagcaccttgcccttaactttgtagttatgaaggcattag

SEQ ID NO: 1533 - DNA, 110 bp, synthetic construct
  source 1..110: mol_type = other DNA
tagattcccatcctaaccacacaggctgagtaaagagaaagatttttaaatgaaagaaatgtaacccatcccataacaacatcttggattttggggtgtaaatgtactca

SEQ ID NO: 1534 - DNA, 110 bp, synthetic construct
  source 1..110: mol_type = other DNA
gcacatttaaaaagagtagtcctattaaaaaaaaattttaggaacaaagtatttgctagtatataggttcaataaagtcaacaccataccagtcgatggtcccaactctt

SEQ ID NO: 1535 - DNA, 110 bp, synthetic construct
  source 1..110: mol_type = other DNA
tgttgtgtcccatacatgtcgtttctctcaagaaatgatttaaaacccacttcttcctcagaacctcaccactcaggtcattcctgaaaccattttttcctcagtgtaga

SEQ ID NO: 1536 - DNA, 110 bp, synthetic construct
  source 1..110: mol_type = other DNA
aaagcctaccccatggccatgacagagcacaaaacctatcccgaacgttagctattctggaacccttggatgtagtagctagtttgaattgttagaccattttgtggtcc

SEQ ID NO: 1537 - DNA, 110 bp, synthetic construct
  source 1..110: mol_type = other DNA
tctggaacccttggatgtagtagctagtttgaattgttagaccattttgtggtcctcactactctggtcaaaatattttctaggagttcctgtcgtggcgcagtggttaa

SEQ ID NO: 1538 - DNA, 110 bp, synthetic construct
  source 1..110: mol_type = other DNA
ggagtccttctgccagtttccagttagttttcaatgagaactgaaatcgtgcaggtgtagctttgatgtgttcttgggggcagctgagctccatgtgctcttactctgcc

SEQ ID NO: 1539 - DNA, 110 bp, synthetic construct
  source 1..110: mol_type = other DNA
tgtagctttgatgtgttcttgggggcagctgagctccatgtgctcttactctgccatattgatccctttataggttattttttttaattccctggctgacttcaaaattg

SEQ ID NO: 1540 - DNA, 110 bp, synthetic construct
  source 1..110: mol_type = other DNA
cagatagacactgcattcagagttatgatagttgcgtcatagcaagcaattcacgtttagaaaaaccccagtctattaaaggagctgctagtaaacctgtccatccactc

SEQ ID NO: 1541 - DNA, 110 bp, synthetic construct
  source 1..110: mol_type = other DNA
ttcttcagatgtaatttcaaagattagcataaaaaaatatatactcctgttttatctctacctttccatgaagtggccattagttcctcagagacaactatggaagtctt

SEQ ID NO: 1542 - DNA, 110 bp, synthetic construct
  source 1..110: mol_type = other DNA
ctctacctttccatgaagtggccattagttcctcagagacaactatggaagtctttgaaattggctcaacattcccttgtaaacagcatctcaattttatttggggcagc

SEQ ID NO: 1543 - DNA, 110 bp, synthetic construct
  source 1..110: mol_type = other DNA
gaggtaagacccagggatcaaaatcttccaaaactcccaaggtggttgcactatgtggcaaagttaagagcttctgtgttagatctttcaagttcaggttccccagactc

SEQ ID NO: 1544 - DNA, 110 bp, synthetic construct
  source 1..110: mol_type = other DNA
atttgaatggtgagaaggctgagtcatagagacactaagcaacttgatgtatagtgtgtaagtggggagaccagatcctaacctacgtcagggccagagctgctttcttt

SEQ ID NO: 1545 - DNA, 110 bp, synthetic construct
  source 1..110: mol_type = other DNA
gtgtaagtggggagaccagatcctaacctacgtcagggccagagctgctttctttaccaaaagccatctcccatcagggccggggaagctaaaaacactggtgggaatgt

SEQ ID NO: 1546 - DNA, 110 bp, synthetic construct
  source 1..110: mol_type = other DNA
tgtaacatgtcatgagggtgtgtacaataaaagtgacagcacagtgatgaggagaacagaaacttcggcgggtctggaagaaatactgaaaaacagacatgctgaaaggg

SEQ ID NO: 1547 - DNA, 110 bp, synthetic construct
  source 1..110: mol_type = other DNA
acagaaacttcggcgggtctggaagaaatactgaaaaacagacatgctgaaagggatccgattagtgcccatgagagaggaactccagccagcatgagggtgtcagtaaa

SEQ ID NO: 1548 - DNA, 110 bp, synthetic construct; identical to SEQ ID NO: 1546
  source 1..110: mol_type = other DNA

SEQ ID NO: 1549 - DNA, 110 bp, synthetic construct; identical to SEQ ID NO: 1547
  source 1..110: mol_type = other DNA

SEQ ID NO: 1550 - DNA, 110 bp, synthetic construct
  source 1..110: mol_type = other DNA
acctgttccttgcatgagtacaaattcataaaatgaaatccatgaaaacctcaggaagggaaatttaagatacttctagcctgcctttttataaattttggctttaaagg

SEQ ID NO: 1551 - DNA, 110 bp, synthetic construct
  source 1..110: mol_type = other DNA
ggggcagagtgctggtcatggtagtggttctttgggacctacttctttgctgtgttcttcttgatggactgaagctgcccacagtctcatggagtcatccttcagtacat

SEQ ID NO: 1552 - DNA, 110 bp, synthetic construct
  source 1..110: mol_type = other DNA
tcttcttgatggactgaagctgcccacagtctcatggagtcatccttcagtacatatcctggctttcttttgggttactgcacaggatgatgaagtgctctgcacaggat

SEQ ID NO: 1553 - DNA, 110 bp, synthetic construct
  source 1..110: mol_type = other DNA
acttattattggtccaattcttttgactttagctattttgggggtcaatttgtattcaatccactgagcaatcaaaagtcaggggttaaacattttgattgctgacacct

SEQ ID NO: 1554 - DNA, 110 bp, synthetic construct
  source 1..110: mol_type = other DNA
actctttaacttgagatacctagagatttctagttaagttctttaagtagagatataagtgcccacttttaaaaaccttcaagtcaatggtgtcgcttgtaatggttatg

SEQ ID NO: 1555 - DNA, 110 bp, synthetic construct
  source 1..110: mol_type = other DNA
acatgagtgtgtttgtttagatgatctctaaggtattgcccagtttaaaattttgattatcctatgacttctggaacaggctatatatgagagatttataacatattata

SEQ ID NO: 1556 - DNA, 110 bp, synthetic construct
  source 1..110: mol_type = other DNA
tctagaggagattgagtcaattcgtataatatctattcaggtagtttcactggtgacaatggaattacttgctctcagcttctacccctaccatcatatttttgaaggaa

SEQ ID NO: 1557 - DNA, 110 bp, synthetic construct
  source 1..110: mol_type = other DNA
acagagctgagttaggagcagaaaaaatgtgctgaatgtgaccagagctcaatattacataatttttcacatcaggtctctacaagttttctgcttattataagactaat

SEQ ID NO: 1558 - DNA, 110 bp, synthetic construct
  source 1..110: mol_type = other DNA
ctggagaatgtatctatagatgtagctatagctttcaaaaataaagaaaaaagacatgtttttaggtagaataaagggctgtgattatttgacatgagcacacttgcaat

SEQ ID NO: 1559 - DNA, 110 bp, synthetic construct
  source 1..110: mol_type = other DNA
tctacaccaatctctcacctaggccagctttagaatttgaagttgacacatagcagggttgacttttttttttagtgaagaaaattataaaacatagaattctctattca

SEQ ID NO: 1560 - DNA, 110 bp, synthetic construct
  source 1..110: mol_type = other DNA
gacagaggtctgtattggaaatgactgagatgctgaaactgcagaaaatgtgatgtgagagcttacttctgaaaaatcagatgtggaatctatgcttggtgggaggttgc

SEQ ID NO: 1561 - DNA, 110 bp, synthetic construct
  source 1..110: mol_type = other DNA
aattctcttttacatgaatgttttaaaatctgggtaaaatataaaaacatacctgtttgaaggcactgaagatgactgaaaataggcagaaactagaggagattcagctt

SEQ ID NO: 1562 - DNA, 110 bp, synthetic construct
  source 1..110: mol_type = other DNA
tttgaaggcactgaagatgactgaaaataggcagaaactagaggagattcagctttgaaagaagataattgcactgaatgagatttcttactttatatctactgcctgag

SEQ ID NO: 1563 - DNA, 110 bp, synthetic construct; identical to SEQ ID NO: 1561
  source 1..110: mol_type = other DNA

SEQ ID NO: 1564 - DNA, 110 bp, synthetic construct; identical to SEQ ID NO: 1562
  source 1..110: mol_type = other DNA

SEQ ID NO: 1565 - DNA, 110 bp, synthetic construct
  source 1..110: mol_type = other DNA
tttcaccctgaaaagtggtattttctacagctatcattaattgacactcctgcctataaacatttaatgacttctgagaggtgttaatataacaataaaaactcaaactg

SEQ ID NO: 1566 - DNA, 110 bp, synthetic construct
  source 1..110: mol_type = other DNA
gtattcaatgcaacttacaagtagcattcttagaaacaactttattactaatgaacacattttgctctatgctttataggataggtgtaatttccactcactgatcctaa

SEQ ID NO: 1567 - DNA, 110 bp, synthetic construct
  source 1..110: mol_type = other DNA
cacattttgctctatgctttataggataggtgtaatttccactcactgatcctaatgcagcttgcaagtagttttctaaggaagatcttcaagaagaatttggttttagg

SEQ ID NO: 1568 - DNA, 110 bp, synthetic construct
  source 1..110: mol_type = other DNA
agtaatgggaccctggaaaaatcaaggcttgtgataaagattcaagggtcattctcacaactgttaccaagaatactttagcatcaattacatttaacattgtccttttt

SEQ ID NO: 1569 - DNA, 110 bp, synthetic construct
  source 1..110: mol_type = other DNA
cattctccctagattgtccatacataagtgactagtatgtcccttactcacttctgtcagctctcttctttgaaatcaccttttaacctttcctgattgcctcacaaaaa

SEQ ID NO: 1570 - DNA, 110 bp, synthetic construct
  source 1..110: mol_type = other DNA
gcagatttaggcagtgcccagagcatttggcagtggcaatggcagtgccagggtatgtgagttccccagtgagtgagagcaatatcaagtggtgtttggttgcaatgccc

SEQ ID NO: 1571 - DNA, 110 bp, synthetic construct
  source 1..110: mol_type = other DNA
tgtgagttccccagtgagtgagagcaatatcaagtggtgtttggttgcaatgccctcctctgtagtgctcttggaggtgactgggtcctcaagtggtacctgttcatgga

SEQ ID NO: 1572 - DNA, 110 bp, synthetic construct
  source 1..110: mol_type = other DNA
agccacagagcttcatatccttactttaacacttccaaaattcatgatctagagcaaatatactgtgaatcttttacatgtgcacttaaagtaaatattactatttctgt

SEQ ID NO: 1573 - DNA, 110 bp, synthetic construct; identical to SEQ ID NO: 1572
  source 1..110: mol_type = other DNA

SEQ ID NO: 1574 - DNA, 110 bp, synthetic construct
  source 1..110: mol_type = other DNA
agttagatttttacctttttattgttggctatgtttgtggcttgaaggctgcgctactactgacatccttcagagaggctaaatacctttgagtgacattcagtcagagg

SEQ ID NO: 1575 - DNA, 110 bp, synthetic construct
  source 1..110: mol_type = other DNA
actactgacatccttcagagaggctaaatacctttgagtgacattcagtcagaggctatcagctcggagattctctgattgctctctagagggtgggtttgggcctgggc

SEQ ID NO: 1576 - DNA, 110 bp, synthetic construct
  source 1..110: mol_type = other DNA
ccttattttatttgatattctgtgtcaaactaaatacgtaagagagaagaacagatctgactatatattggatctattccttcaactactctaatctttgtgctctgtcg

SEQ ID NO: 1577 - DNA, 110 bp, synthetic construct
  source 1..110: mol_type = other DNA
tctgactatatattggatctattccttcaactactctaatctttgtgctctgtcgcctggtcttagttatgctagctctgcacctttgtaaaaaaaaaaaaaagactgcc

SEQ ID NO: 1578 - DNA, 110 bp, synthetic construct; identical to SEQ ID NO: 1576
  source 1..110: mol_type = other DNA

SEQ ID NO: 1579 - DNA, 110 bp, synthetic construct; identical to SEQ ID NO: 1577
  source 1..110: mol_type = other DNA

SEQ ID NO: 1580 - DNA, 110 bp, synthetic construct
  source 1..110: mol_type = other DNA
tctggtacagttcctatgagaatcactgttcccaaaacacataccttctaagataataatgcacagataaatttttagctaaaggcatttaagtcaaaaggcttttattt

SEQ ID NO: 1581 - DNA, 110 bp, synthetic construct
  source 1..110: mol_type = other DNA
gctgtgttgtaggtcatagctcaggtatggtgtagctgtggcatatgctggcacgtatgtgccatacatacgtatggtacatatgtggcatatgctggcatatgctagca

SEQ ID NO: 1582 - DNA, 110 bp, synthetic construct
  source 1..110: mol_type = other DNA
acacacacacacacacacacacagctgagagccctggtctgagtacaaggggccttctgatggtcagggaaatccattgcccctagcggaagggatgtaacagactgagt

SEQ ID NO: 1583 - DNA, 110 bp, synthetic construct
  source 1..110: mol_type = other DNA
ctgctgttcttcccacacaaaagtgaattgtttcttgatcttctttaatgatgaagattgaaagaacacattttctgcttcaatagctgcatttgaaacaccagaaactt

SEQ ID NO: 1584 - DNA, 110 bp, synthetic construct
  source 1..110: mol_type = other DNA
aaaaggggaaattcaacatcaccactgcaagctagacacacgtttaagtaccctacttggccttcactgattcctaaatactaaagttagagttctcgttccatatgtgc

SEQ ID NO: 1585 - DNA, 110 bp, synthetic construct
  source 1..110: mol_type = other DNA
gcatgactacttctctcaattcaaatacaacacaattcatttctctttatttgctcattgaacaaatatttatgtagcagctcctaggccttaggaactcttttaataga

SEQ ID NO: 1586 - DNA, 110 bp, synthetic construct
  source 1..110: mol_type = other DNA
actcctgtaccttcagaagtgacagttgggtttttttggttcttttgtatcttgtacataacttgccccaactgcccatgcctgcagctatttttactcccttgaagttt

SEQ ID NO: 1587 - DNA, 110 bp, synthetic construct
  source 1..110: mol_type = other DNA
acataacttgccccaactgcccatgcctgcagctatttttactcccttgaagtttttccgttttgttgtttgaggagatgtctgtccaagtggaagcactgaagcaaagg

SEQ ID NO: 1588 - DNA, 110 bp, synthetic construct
  source 1..110: mol_type = other DNA
ggggtcgaactggagctgcaggtgccagcctaggccacagccatagcaacactatttccaagccacaattgcaaactacactatagcttgcagcaatgccggatccttaa

SEQ ID NO: 1589 - DNA, 110 bp, synthetic construct
  source 1..110: mol_type = other DNA
cagcctaggccacagccatagcaacactatttccaagccacaattgcaaactacactatagcttgcagcaatgccggatccttaacccactaaaagaggccagggatcga

SEQ ID NO: 1590 - DNA, 110 bp, synthetic construct; identical to SEQ ID NO: 1588
  source 1..110: mol_type = other DNA

SEQ ID NO: 1591 - DNA, 110 bp, synthetic construct; identical to SEQ ID NO: 1589
  source 1..110: mol_type = other DNA

SEQ ID NO: 1592 - DNA, 110 bp, synthetic construct
  source 1..110: mol_type = other DNA
gagacagtggtgcatcaatgaaaaggatgtagcaggggatgttctctgtcactgcatggctcagaaaataagaatagtatagcacagagttctttcaaatgcctgggcct

SEQ ID NO: 1593 - DNA, 110 bp, synthetic construct
  source 1..110: mol_type = other DNA
agagctgtaaaataacatttcattttaaatattcgccgctatttcttaggtatttgtctgaggtgatagattgctttgaaatttcaaagtaattttcattcaactcctgg

SEQ ID NO: 1594 - DNA, 110 bp, synthetic construct; identical to SEQ ID NO: 1593
  source 1..110: mol_type = other DNA

SEQ ID NO: 1595 - DNA, 110 bp, synthetic construct
  source 1..110: mol_type = other DNA
ttccttaactgctgtaagaagaacatttcttgagcagccactgtttcaaagagatcaggatacactctgaacaaacctggtcccagctcaaagtcttgagccaaatccat

SEQ ID NO: 1596 - DNA, 110 bp, synthetic construct
  source 1..110: mol_type = other DNA
caggatacactctgaacaaacctggtcccagctcaaagtcttgagccaaatccattcaaatccagaaaagtcacagctgccctgcttaccaataagaagaaaataaagat

SEQ ID NO: 1597 - DNA, 110 bp, synthetic construct
  source 1..110: mol_type = other DNA
aataatacagaaggaaaaggggataatattatacagggcacaaaaccataaaattgttaggtcacttcttgcttctgtgtccaagcctcagaattttatttgacctatcc

SEQ ID NO: 1598 - DNA, 110 bp, synthetic construct
  source 1..110: mol_type = other DNA
gttaggtcacttcttgcttctgtgtccaagcctcagaattttatttgacctatcccaaactccatattattgttaagtaaaaactgcaattcttatatcagtctgtagtg

SEQ ID NO: 1599 - DNA, 110 bp, synthetic construct
  source 1..110: mol_type = other DNA
atatgtctgtaggaatctagagctctggcacagataaggaagtggggtaggaaatgatttggtggtatgtagatgaagttgtcatcagggacctgagtgaaaactgctaa

SEQ ID NO: 1600 - DNA, 110 bp, synthetic construct
  source 1..110: mol_type = other DNA
gccacagtagtgacctgagtggctgcagtgacagtgtcaggtccataacccacctaagctagcaaggaactcctatcctgactccttttgaggtaccatatctctgtggc

SEQ ID NO: 1601 - DNA, 110 bp, synthetic construct
  source 1..110: mol_type = other DNA
ctaatccagagccaaacctcccctgtagggcctgtgcaccccaggaggaaatattcctctgccttaatcagctcaggtccaagtaccaggcaaccagggaccacctctat

SEQ ID NO: 1602 - DNA, 110 bp, synthetic construct
  source 1..110: mol_type = other DNA
tatttttcagccctactctccttcttgtctccttccaaaactaaatggcataaattttagatcttttggtgtagtaccacaggccacacacttggtttttttcaggggga

SEQ ID NO: 1603 - DNA, 110 bp, synthetic construct
  source 1..110: mol_type = other DNA
tttagatcttttggtgtagtaccacaggccacacacttggtttttttcagggggagctggcttagtttctatttttctccctttcaattcactaattaatttacctcttc

SEQ ID NO: 1604 - DNA, 110 bp, synthetic construct
  source 1..110: mol_type = other DNA
taggagacgggagtgccatcttccttgagtttacatttcagagatggcaacttcatcctcgagaaaggcattcctgagtcataaagctgccgaaagacttattcagtttt

SEQ ID NO: 1605 - DNA, 110 bp, synthetic construct
  source 1..110: mol_type = other DNA
ccagccaggccagcactatatacatgagtgaggtcactgttgattagtcatcctcaagctaaccaaccagctgactgcaggtcatgaatgaacctggcagaaatcaggaa

SEQ ID NO: 1606 - DNA, 110 bp, synthetic construct
  source 1..110: mol_type = other DNA
tggcgcccaacagagtggcttagattgcttatattggagcagttcttctacactgtttctggccaatcatcttgcttgtgactatattttgtccagctcagggtcctccc

SEQ ID NO: 1607 - DNA, 110 bp, synthetic construct
  source 1..110: mol_type = other DNA
tttctggccaatcatcttgcttgtgactatattttgtccagctcagggtcctccctggtggtacacacatttctcagccaagatggattccagcatgagtttctgagagg

SEQ ID NO: 1608 - DNA, 110 bp, synthetic construct
  source 1..110: mol_type = other DNA
aggacttctgctccagcaccttgggccccagacccacacttgatagagcactgacagcagctgagcagaggagaagaccctgctcacacctggcactggttctagctcct

SEQ ID NO: 1609 - DNA, 110 bp, synthetic construct
  source 1..110: mol_type = other DNA
ggcattgatggaggcttttcctgaccactctatttaaaattgcatccctcctcgaattttatcccatctcatggccttctaagcttagtttttctcccttatattaccat

SEQ ID NO: 1610 - DNA, 110 bp, synthetic construct
  source 1..110: mol_type = other DNA
atgaaatttccaaatcttccccagtggctaggactagcctggattttctaaggtcttagaagctgccctgtgcatcagaatgacatgccactaaagcactaatagattga

SEQ ID NO: 1611 - DNA, 110 bp, synthetic construct
  source 1..110: mol_type = other DNA
agatccatcattttcctatataagtggcacatttaggaagaacttttctgtcataaatcagtttacgaagcttccttgtgtttatttacttccttggatagttccaaaaa

SEQ ID NO: 1612 - DNA, 110 bp, synthetic construct
  source 1..110: mol_type = other DNA
agaaggaggaaaaaatagattatcaaatatatgtttatggagtgctttctatagcttatacaggatgctaactgctttctgtatgtcatttcacttaatacttgcataag

SEQ ID NO: 1613 - DNA, 110 bp, synthetic construct; identical to SEQ ID NO: 1612
  source 1..110: mol_type = other DNA

SEQ ID NO: 1614 - DNA, 110 bp, synthetic construct
  source 1..110: mol_type = other DNA
gtgcaaattctggaccacctgctttaagaggccccattcacttcccatagtattgtgagccagcttcaagtatgtgggtaaggacaacacgtggcaatttagttattttc

SEQ ID NO: 1615 - DNA, 110 bp, synthetic construct
  source 1..110: mol_type = other DNA
ggaacagatagagagagctcagaattaaactcacacacctatagccaactaatctatgatgaaggaggcaaggatacacatgggagaaaaggcagttccttcaataagtg

SEQ ID NO: 1616 - DNA, 110 bp, synthetic construct; identical to SEQ ID NO: 1615
  source 1..110: mol_type = other DNA

SEQ ID NO: 1617 - DNA, 110 bp, synthetic construct
  source 1..110: mol_type = other DNA
ttcagccttcctcacacagcttcaggtgatttgtaaacttaactcatcactaacgaaaattctaacaactgatatattcacaactgccttctatttatcatgttttgttc

SEQ ID NO: 1618 - DNA, 110 bp, synthetic construct
  source 1..110: mol_type = other DNA
gtaaatgaagaattacataagaggcaagtggtggtaggaaaagatttattttcacaatgttgtaggaaaatcagagagaatttcaaaaaggatatgacaactgagtggaa

SEQ ID NO: 1619 - DNA, 110 bp, synthetic construct
  source 1..110: mol_type = other DNA
gcccaaagctcaccatcaagttaataagctttcactaataataaaaaatggattatatctccataatctataagagctagcatacggggaatcccaagaattaaaatgaa

SEQ ID NO: 1620 - DNA, 110 bp, synthetic construct
  source 1..110: mol_type = other DNA
tatctccataatctataagagctagcatacggggaatcccaagaattaaaatgaaagaaaaacgaaaggttatcagatgaaattgaagcttctggtgtccatagctctga

SEQ ID NO: 1621 - DNA, 110 bp, synthetic construct
  source 1..110: mol_type = other DNA
ctgaaatctactcttagcaaatgtccagtatttaatatagtagtaacaactatagtcatcctgctgtacatttgatctctgcggacttacatcttacataactgcaactt

SEQ ID NO: 1622 - DNA, 110 bp, synthetic construct
  source 1..110: mol_type = other DNA
tcatcctgctgtacatttgatctctgcggacttacatcttacataactgcaactttatagcttttgaccaaaatctcttcatttactccacctacccttctattttgtgc

SEQ ID NO: 1623 - DNA, 110 bp, synthetic construct
  source 1..110: mol_type = other DNA
ggaaaagttttatctctttagacattgtaagagttgtctttgagtttcattcatatagaatgctaatatattttattgcagtcatggcacgagggctgcctaaaaatata

SEQ ID NO: 1624 - DNA, 110 bp, synthetic construct
  source 1..110: mol_type = other DNA
aggtgtccatatagtcaaaaagtggaaccatcccgagcctggcagggagagagactggtctgtccacactgcaggtcacggctcctccgtgagaccaccggtcctgatac

SEQ ID NO: 1625 - DNA, 110 bp, synthetic construct
  source 1..110: mol_type = other DNA
cagatactaaatctgtcactagactcagaatcaagtagtcagcctttggccctcttccagtatataatggaacaaattccagacctctccaagagtaattctttttgaag

SEQ ID NO: 1626 - DNA, 110 bp, synthetic construct
  source 1..110: mol_type = other DNA
cgcggtctaaacatgtcaaaattcatctttccaaataacactttgtaataactctagtgaaataaagaggcagagtgcctagaatcaaaagaacaatattcaaaatctac

SEQ ID NO: 1627 - DNA, 110 bp, synthetic construct
  source 1..110: mol_type = other DNA
gtatctatccatctatctggtagaggttagtataccaaaactacagccaacctgcttactggattacctaggctgactagctcattctcataacttattcaaacatttcc

SEQ ID NO: 1628 - DNA, 110 bp, synthetic construct
  source 1..110: mol_type = other DNA
ctgattaattgcaaagaaataagtacaggtaggatgtgaattaattcagctttttcccctccttagcagtggagacttttttttttcctaaatagaagccagcatataaa

SEQ ID NO: 1629 - DNA, 110 bp, synthetic construct
  source 1..110: mol_type = other DNA
aaatgtgaaaatcccttccatcaaatggaagatgttaactccttgatgaccttcagcacacacagctcctggaactggaggattgataatgttaacccctgtgacaccac

SEQ ID NO: 1630 - DNA, 110 bp, synthetic construct
  source 1..110: mol_type = other DNA
ataacgttaatctagttggttatctttgcttgaccagagcaaagcaaaacagagtttatggtaactgcagctttaatcaattttgaagtctcttttaagaaagaatacag

SEQ ID NO: 1631 - DNA, 110 bp, synthetic construct
  source 1..110: mol_type = other DNA
ctcaaggttcagaaactttcagtgtttaaaaggtgcctcagcttttcagctggtgttgcagagcctgtggacttggagggtgggtgtttgtgccggagaaaacatcagtt

SEQ ID NO: 1632 - DNA, 110 bp, synthetic construct
  source 1..110: mol_type = other DNA
cttgcaaaaaagtaacatattgcatgaagtcagtccctggattagccagaccctatgtttgccttcctgatttttttcccagcttgagcagctcttaactggcatcttcc

SEQ ID NO: 1633 - DNA, 110 bp, synthetic construct
  source 1..110: mol_type = other DNA
ggcaaatagtggtgtgacccagcacagctctgtgccctgtcaaagcagggagctccccacctcccagcctccaggtgagaggtccagagaaagaagaagaagtaagaggt

SEQ ID NO: 1634 - DNA, 110 bp, synthetic construct
  source 1..110: mol_type = other DNA
cccacctcccagcctccaggtgagaggtccagagaaagaagaagaagtaagaggtaggtagtgccctaaaatattctcaaacaagcctgctcacagatatgtctttatat

SEQ ID NO: 1635 - DNA, 110 bp, synthetic construct
  source 1..110: mol_type = other DNA
caaaactcctacacttcataccgaaccaacctatatatttgtcagtatttcccgtaacagaaaataccagaattatatacttttatatctaaaatactaccaccaacccc

SEQ ID NO: 1636 - DNA, 110 bp, synthetic construct
  source 1..110: mol_type = other DNA
tttaaaaattcctacctcaaggagcatttggtgtggattacaccttggcctattagaaagttaataataaataaaaatttccctgtgccctgaatcagctttcgatgcat

SEQ ID NO: 1637 - DNA, 110 bp, synthetic construct
  source 1..110: mol_type = other DNA
gaaagttaataataaataaaaatttccctgtgccctgaatcagctttcgatgcatcagtacattcagcatcatatttagacaaacttgaaaatgctctttatatacctta

SEQ ID NO: 1638 - DNA, 110 bp, synthetic construct
  source 1..110: mol_type = other DNA
aatgtaccatggaatgatgatgctttgccgtgatttttaaaaatatatattatttccaaagtcttgaaagaatgctgtgtttacttcacattgcatcttcgtgttccatt

SEQ ID NO: 1639 - DNA, 110 bp, synthetic construct; identical to SEQ ID NO: 1638
  source 1..110: mol_type = other DNA

SEQ ID NO: 1640 - DNA, 110 bp, synthetic construct
  source 1..110: mol_type = other DNA
aggatttgggtttttatggctcctgctatttaaaggaaagaattccttgtctaatgggggaaaggcctggataaaatctgttattcaggtttacttataagagttaaact

SEQ ID NO: 1641 - DNA, 110 bp, synthetic construct
  source 1..110: mol_type = other DNA
ttggctacctgcccatttgctaaaaaaacaccaaggcctaggtcactcctatgagagaaagaaagtttatttagagaatttcaggatgcaagtgtcagcaccattttagg

SEQ ID NO: 1642 - DNA, 110 bp, synthetic construct
  source 1..110: mol_type = other DNA
aacagcattgctgctcccctgtgtttgttgtcatgagctagggaaataaccagtctactcacccaagactgattaccatgagttttaagaggatactgctgaccatcagt

SEQ ID NO: 1643 - DNA, 110 bp, synthetic construct
  source 1..110: mol_type = other DNA
aaccaaaaggcatgttttcctttgccacatctgtgattttaaaaaaacaaaaatcaaaaacaacgaactatgcaaaagaagggtacttgttttcccataaattctgtaac

SEQ ID NO: 1644 - DNA, 110 bp, synthetic construct
  source 1..110: mol_type = other DNA
cataaagcaaggggaggcaggtgacattcctcagtgggaacagaaataagtccgtcaactttgtcttagtcttagacatccttctagacctcgtttcagaatcaactgag

SEQ ID NO: 1645 - DNA, 110 bp, synthetic construct
  source 1..110: mol_type = other DNA
ttaaatgcaatcagtatcttttctcattgggttgttttatgtgtaatattccgtttgattcacatagctctttgtaagagataacgcaggtttaggagaaatgacatatt

SEQ ID NO: 1646 - DNA, 110 bp, synthetic construct
  source 1..110: mol_type = other DNA
agcagagccagtagcttcttctgtgaatccctggtttactttgtggtctcttatatggcttctcagctcctccaccattggattcctatgcgacactttgcttaaatgta

SEQ ID NO: 1647 - DNA, 110 bp, synthetic construct
  source 1..110: mol_type = other DNA
aatcagaaagttcctcttatgtctaatggacttcaaagtaccccctttctttgtgtatcatcagaagagagctggtgtgtcttgcaaacttcttgggtgcagacagagaa

SEQ ID NO: 1648 - DNA, 110 bp, synthetic construct
  source 1..110: mol_type = other DNA
attgattctcttcctcccagctgccgctgctttaacgcctcgcctagattattgtatctgttgataaccctgccgactttgctacagctattttcagtacaatagccaga

SEQ ID NO: 1649 - DNA, 110 bp, synthetic construct
  source 1..110: mol_type = other DNA
atcactgtctctctttatgcctagtacgttaaacacatgattttctaaatttaaaggttttcagatgccaaggtaaatttcattttgttttccccccaaaaaacccaatg

SEQ ID NO: 1650 - DNA, 110 bp, synthetic construct
  source 1..110: mol_type = other DNA
aaaacattataaatcatcatatgagtcaggtccagcatctgtgccagctgtccgcttctgatgtcatcatattctctttccgttacagttttttctccatgtgagaattg

SEQ ID NO: 1651 - DNA, 110 bp, synthetic construct
  source 1..110: mol_type = other DNA
gaagggaactgtcagtattcatgtattaagaaattattgcttgtttaagaaatcatttatctcttcttctattataaatgataagcttggagttcccattgtgtctcagt

SEQ ID NO: 1652 - DNA, 110 bp, synthetic construct
  source 1..110: mol_type = other DNA
ctgatgggaggaactggtgcctacgcactgatgggtggagccgaatcttatccctctggttggccagggctatgtaaaagggtatgtttagaggtggctgtgggctcagg

SEQ ID NO: 1653 - DNA, 110 bp, synthetic construct
  source 1..110: mol_type = other DNA
ttgctcactactctccttcacctccaaattcctcattcctttatcttaatatactggaccctaccctttctctccttttcgtcaagtgactgtgttatagcgaacctgag

SEQ ID NO: 1654 - DNA, 110 bp, synthetic construct
  source 1..110: mol_type = other DNA
ggaccctaccctttctctccttttcgtcaagtgactgtgttatagcgaacctgaggtgatgcttctcagctgctgcttcaaacaccagcagaaggaagcaatactagtat

SEQ ID NO: 1655 - DNA, 110 bp, synthetic construct
  source 1..110: mol_type = other DNA
ttcagctctctactggacatggccacttgaatatatatgacaggcactttgaatgtaacttgtccaaaatacagctagttcttcttttacattccttcacctgcccatgt

SEQ ID NO: 1656 - DNA, 110 bp, synthetic construct
  source 1..110: mol_type = other DNA
gttgatgatactgaagaagagaaatgtggccatctgtctgtaaactagacagtaggaaataagagtagcaggctagataatgacccaacaatgacagggataaactgaat

SEQ ID NO: 1657 - DNA, 110 bp, synthetic construct
  source 1..110: mol_type = other DNA
gttctgtcctctgccatgacctgagctgctacagttggatctttgatccactgggccacagcaggaactccctggctagactcttgatggagattagccaaaacatggaa

SEQ ID NO: 1658 - DNA, 110 bp, synthetic construct
  source 1..110: mol_type = other DNA
agcatatgggtttaagttgtgtcatattaagattggtgcatcctcctttctatttgagcaactgtagaaccttagctcccttctaaaggctactctagttatttctgaga

SEQ ID NO: 1659 - DNA, 110 bp, synthetic construct
  source 1..110: mol_type = other DNA
atgagttctctgagcaccatccatagaatagcatagaatatgagctaaaaatatgttgaatgaatgagtgaacattataccacaaagaaagcctaagtcatgaacttggt

SEQ ID NO: 1660 - DNA, 110 bp, synthetic construct
  source 1..110: mol_type = other DNA
cctgttttattaatgggactttacctgtaggaataggtgaaaagaagccagaaaaatagatatattctctgtaatttaaagtttccatctcactaaaatcttagtggcta

SEQ ID NO: 1661 - DNA, 110 bp, synthetic construct; identical to SEQ ID NO: 1660
  source 1..110: mol_type = other DNA

SEQ ID NO: 1662 - DNA, 110 bp, synthetic construct
  source 1..110: mol_type = other DNA
cagaccatccctgggactactggatcagaagtctaggcatgtgccttggaaatctgcattttaatcagctcccttagggatttttacataccaagtaaaatttgagagca

SEQ ID NO: 1663 - DNA, 110 bp, synthetic construct
  source 1..110: mol_type = other DNA
gttggaccagtggtgggtgggaccaattcctgacacagctgtcgataggatccagggtgtcccaaagcttatttcagcctactagtaagtggggctagatccttggcagc

SEQ ID NO: 1664 - DNA, 110 bp, synthetic construct
  source 1..110: mol_type = other DNA
ggtgtcccaaagcttatttcagcctactagtaagtggggctagatccttggcagctggctgaggggcccaggatatcttagagctggcactggcctgttggtggctgtgg

SEQ ID NO: 1665 - DNA, 110 bp, synthetic construct
  source 1..110: mol_type = other DNA
ttcccctgcatggacaccaggattggggcagtgaacctgtggctctcactattcgctccccacagaaggcctccagctgcgtaatccccctcctcttctgtgtccctcct

SEQ ID NO: 1666 - DNA, 110 bp, synthetic construct
  source 1..110: mol_type = other DNA
ggatgtttggatggttctacctcttggctattccaaatagtgctacttattaacgtgggtgtgtaaatatctctttaagatccagctttcagtccttttggacatatacc

SEQ ID NO: 1667 - DNA, 110 bp, synthetic construct
  source 1..110: mol_type = other DNA
agttaattggaaaccacagggccagaaggctgttgtgtacaacctgaaaatatgtatttgtgaattctgaaaggagctcctaatgagagcttgaagagccctgggtcgcg

SEQ ID NO: 1668 - DNA, 110 bp, synthetic construct
  source 1..110: mol_type = other DNA
atttgtgaattctgaaaggagctcctaatgagagcttgaagagccctgggtcgcggggatgagtggtgcccagatggcgcccagaggctcagtcagcagttgtgaagaac

SEQ ID NO: 1669 - DNA, 110 bp, synthetic construct
  source 1..110: mol_type = other DNA
tgtcctttgaagatacataataacattagctagatattgactttaccagtctccggggattagtcagaagttaaaatgtgcctgggatggtcccatcatgctagtactca

SEQ ID NO: 1670 - DNA, 110 bp, synthetic construct
  source 1..110: mol_type = other DNA
aggaggtgagctcagggttttctagctcactatcttgatcaggaaccctaaacggactttacttaaatttttttccaaatagctgattttccacctctgtgaaaatcctc

SEQ ID NO: 1671 - DNA, 110 bp, synthetic construct
  source 1..110: mol_type = other DNA
gggtcacctgaaacatacaaaagatgcccatgtgagcaggacccctcacggctgctgcaggagccgctggaccccccactaccaagcagtgtggaaagaggacttcaata

SEQ ID NO: 1672 - DNA, 110 bp, synthetic construct
  source 1..110: mol_type = other DNA
tgcaggagccgctggaccccccactaccaagcagtgtggaaagaggacttcaataaatgcctctgaagatgatggaggacgatgacgatgatggtgatgataaagttcct

SEQ ID NO: 1673 - DNA, 110 bp, synthetic construct
  source 1..110: mol_type = other DNA
tcagcctgggtccatctggagaaagttgggttgaagatgaggctaaacatttatggaggaggtactattctaagggaagagtgagagtgccccaggctaggagaacacca

SEQ ID NO: 1674 - DNA, 110 bp, synthetic construct
  source 1..110: mol_type = other DNA
gaggaggtactattctaagggaagagtgagagtgccccaggctaggagaacaccaccagggcactacacaacatatgccaagtaaaaagaactacaaacagatgacgttc

SEQ ID NO: 1675 - DNA, 110 bp, synthetic construct
  source 1..110: mol_type = other DNA
aaatataaatcttatttgctgtacccaggtgtattaccatatttcctaattatgctattttagattctagacttacagaaaggctacagtgtgaaaaaccatgtactgtt

SEQ ID NO: 1676 - DNA, 110 bp, synthetic construct
  source 1..110: mol_type = other DNA
tattttagattctagacttacagaaaggctacagtgtgaaaaaccatgtactgtttttcctttcatgactgttcataaagaccttcatagaagttcaatcgcttatgtac

SEQ ID NO: 1677 - DNA, 110 bp, synthetic construct
  source 1..110: mol_type = other DNA
atatttaagttaattatcaataggtatgtacttactgccattttgtccatttttttctgcttacttctgtagttcctctctgttcctttctttatctttctttccctgga

SEQ ID NO: 1678 - DNA, 110 bp, synthetic construct; identical to SEQ ID NO: 1677
  source 1..110: mol_type = other DNA

SEQ ID NO: 1679 - DNA, 110 bp, synthetic construct
  source 1..110: mol_type = other DNA
agtcaaattcatttctcttagaagtatagtaggattcttttatatttgtctccgttcagttctgtgtgccagtgacaatagcaaaactcttttctggtgtagtttgtttg

SEQ ID NO: 1680 - DNA, 110 bp, synthetic construct
  source 1..110: mol_type = other DNA
agaaaaagattaccatggagctgtttaagtactgtctagctgttgttaataaaacatttgaaaatgtagtaatgggagttccccttgtggaaacaaactcgactattatc

SEQ ID NO: 1681 - DNA, 110 bp, synthetic construct
  source 1..110: mol_type = other DNA
gtgggcttaatcaaccttctcctttatttgtgcacttgaaagactagaaagtagtggaacttcatagctaatagaatatatcaatagtttctgcttgccccatatcaagg

SEQ ID NO: 1682 - DNA, 110 bp, synthetic construct
  source 1..110: mol_type = other DNA
acagacactgggataggctcatgggatcagcagtaaacaaattagacaagaattccagccctttatagcttaccgtctatcaaatgtccttagttgtgatttgctcttgg

SEQ ID NO: 1683 - DNA, 110 bp, synthetic construct
  source 1..110: mol_type = other DNA
cagaaggaaacctcggtcagtcgtgggaaagagttcctcactttaggttcttgaagctaagagaaaaccttcccagacacttgaaaatagtgtcagtcttgccacggaga

SEQ ID NO: 1684 - DNA, 110 bp, synthetic construct
  source 1..110: mol_type = other DNA
caagactgacacattgatcatcgtgaccactgaaggattcagagtaagagcatcttcttgcttttctttggcttgggatatccttctagctctgtaagcagttgcatggc

SEQ ID NO: 1685 - DNA, 110 bp, synthetic construct
  source 1..110: mol_type = other DNA
ggtggatacctaaagacggctgtggtttaaaacttcagaaagctcatatgaccttgccatgtacgcactggtctgagattccgtgtgggtattgtcatcacaggggcaga

SEQ ID NO: 1686 - DNA, 110 bp, synthetic construct
  source 1..110: mol_type = other DNA
ttttttttttttttgcttttatttccctttcctgagtagacatatccaaacaagtattttttaagactgatgacaaagagcttaatgcccatattctccgctaggtattt

SEQ ID NO: 1687 - DNA, 110 bp, synthetic construct
  source 1..110: mol_type = other DNA
gatgagatggggaggcatgtggcaaggagctgagggcagcttctaggagccgagcatattctctggctgacagccagcagggcaatgggacctcagtcccacaaccacta

SEQ ID NO: 1688 - DNA, 110 bp, synthetic construct
  source 1..110: mol_type = other DNA
tcactcccagggatggagagggcgatgatgcagcaaaaggccacatagatgccagctttggctctgttcatgcattcagcccttcccacagcccaggtgatgaggggctt

SEQ ID NO: 1689 - DNA, 110 bp, synthetic construct
  source 1..110: mol_type = other DNA
tgacccctggggtgactgggggtgcaggtagtgcctgttcatggaagctttagcggtggaaggccatgaccacctcaggaatccaacatgaattgcctcctttgttgtag

SEQ ID NO: 1690 - DNA, 110 bp, synthetic construct
  source 1..110: mol_type = other DNA
tgaggcccaggttccaacacctccaataagggcctggtcacaccacccatcaggcaaagtccattgctcccgatgccatgcccttctgccgcgcaaagtcacagtgccca

SEQ ID NO: 1691 - DNA, 110 bp, synthetic construct
  source 1..110: mol_type = other DNA
atgtgtaggctcacttcctctcttcatactatgtttcttggcatttacagttgttgtttgtatacaattttccagattctctgtcctaagctgtaggcttctgtagctca

SEQ ID NO: 1692 - DNA, 110 bp, synthetic construct
  source 1..110: mol_type = other DNA
gtttgtatacaattttccagattctctgtcctaagctgtaggcttctgtagctcagtttttcctcaggcgtggagccttcctagattaaatccatgaattaagcctataa

SEQ ID NO: 1693 - DNA, 110 bp, synthetic construct
  source 1..110: mol_type = other DNA
gatcgttagagaatggagattctcagtagagtgaaaaagacaggactgagcctgcatttcttcaagaatataaaatccagtacgcagagagtttgcaaaagagatttaga

SEQ ID NO: 1694 - DNA, 110 bp, synthetic construct
  source 1..110: mol_type = other DNA
atttcttcaagaatataaaatccagtacgcagagagtttgcaaaagagatttagagcgtgttcctcattttaagcttcaagtgggtgcagagcagcgggtgagctggtgt

SEQ ID NO: 1695 - DNA, 110 bp, synthetic construct
  source 1..110: mol_type = other DNA
tcatcctgatgggatttgcccctcaggcggtctggctgaccatgaatgaattacaaatttctctggtttctacttcccttacttgtaggcccctgccagttttaaatttc

SEQ ID NO: 1696 - DNA, 110 bp, synthetic construct
  source 1..110: mol_type = other DNA
atttttttctatgcaaatgggatctctgtagatcttagcaccactatttttccactgtcggataagctaagataccagctcttagccctgtcattactgtacgttccact

SEQ ID NO: 1697 - DNA, 110 bp, synthetic construct
  source 1..110: mol_type = other DNA
tgtcggataagctaagataccagctcttagccctgtcattactgtacgttccacttgacaagtctattggcttctgaagaagtgttttccatcttgattcctgactttgc

SEQ ID NO: 1698 - DNA, 110 bp, synthetic construct
  source 1..110: mol_type = other DNA
aagtgggataggaccacaaatggctaacatgagtctcccttcccactcactccagcagagaaggtcctccacttaatcaaccctcctgatcaaacagaccaggggcagct

SEQ ID NO: 1699 - DNA, 110 bp, synthetic construct
  source 1..110: mol_type = other DNA
cagagaaggtcctccacttaatcaaccctcctgatcaaacagaccaggggcagctcttgctgatccctgggtagtgggtttcagttcctttctagtgtgtggacttggtc

SEQ ID NO: 1700 - DNA, 110 bp, synthetic construct
  source 1..110: mol_type = other DNA
ggctatatataagatgtacatgtatatattcatattcgaacggcacacctacagcgaatctagaatcacagaattataggatgaggactgtaggcatttttctctatatt

SEQ ID NO: 1701 - DNA, 110 bp, synthetic construct
  source 1..110: mol_type = other DNA
gaatctagaatcacagaattataggatgaggactgtaggcatttttctctatatttggctgcaatctgtggaaatctgacttgcgctagtttgggccaaaaagcaggatt

SEQ ID NO: 1702 - DNA, 110 bp, synthetic construct
  source 1..110: mol_type = other DNA
tcagggcactagcctagctatacacatgaatgagtaaggctcagcttccatggttggggagactggactctcagtgtgagagacatatagatagcaattagttacattag

SEQ ID NO: 1703 - DNA, 110 bp, synthetic construct
  source 1..110: mol_type = other DNA
cattcctaccctgagcacatggactagagcccctctgaggagtcaggcaccatccacattctggccacagcagttgacaaaatagactctatcactggtcggtcttgtgc

SEQ ID NO: 1704 - DNA, 110 bp, synthetic construct
  source 1..110: mol_type = other DNA
acattctggccacagcagttgacaaaatagactctatcactggtcggtcttgtgctgcaaacacactggtgggaggacatagacaacaaacatacaaacacatatgtatg

SEQ ID NO: 1705 - DNA, 110 bp, synthetic construct
  source 1..110: mol_type = other DNA
tttctagtcccccctccaaatctcctctatttattattacccaacatcagtgttaccaagtctaagctcacactgcttggtacttaacaggccaataaattgagagatga

SEQ ID NO: 1706 - DNA, 110 bp, synthetic construct
  source 1..110: mol_type = other DNA
ccaagtctaagctcacactgcttggtacttaacaggccaataaattgagagatgagttattggggcaggaatagtgactttattcagaagccagcagaccaaaaaggtgg

SEQ ID NO: 1707 - DNA, 110 bp, synthetic construct
  source 1..110: mol_type = other DNA
ccatacaacttgtatgatgagcaaatcacttatttttattgcatattctttcacgtacaaccacaagagctattgcgttttcatttcatgctagggaataggatttctca

SEQ ID NO: 1708 - DNA, 110 bp, synthetic construct
  source 1..110: mol_type = other DNA
ggtaaatagtttgacagcaaggctattctgagctggtgtcttaaacagctaacctctcaactagcacctcagggcatgtgtttaggcatttgactcttgggacaagttct

SEQ ID NO: 1709 - DNA, 110 bp, synthetic construct
  source 1..110: mol_type = other DNA
acatcctgtgtgatttttctccagccgcgttcagctgtttggatataagtagcagatgagtggagagcgagatttaactggggttagagttttgccaaatgagtttgaac

SEQ ID NO: 1710 - DNA, 110 bp, synthetic construct
  source 1..110: mol_type = other DNA
agtcaacaggtgccaaaggaaatagcttattccttcttttaagacatggtgacacttttcaccaatggaaatgtaactattggtgcctcgtgcttgggagaataattccc

SEQ ID NO: 1711 - DNA, 110 bp, synthetic construct
  source 1..110: mol_type = other DNA
ttaagacgctataacttagttaagctgacacacaggtaaacaaataattacaacaaactgtgagaataaggccatgaagggcttatagattgccatgaaatcacagagaa

SEQ ID NO: 1712 - DNA, 110 bp, synthetic construct
  source 1..110: mol_type = other DNA
cagattcaacagaaggggactaagtagagtgtcaatttcagaggaatagatttttggtggtcatcttggaggctagctaccatgtttttcaagagaaacagcagtatttt

SEQ ID NO: 1713 - DNA, 110 bp, synthetic construct
  source 1..110: mol_type = other DNA
agctaaggagcagcagggccagaatttaaatctgggcagtctcacaacagaggctgtgttctaacctcttcctcttgtagcttgtaggacctgatgccgggccattgttt

SEQ ID NO: 1714 - DNA, 110 bp, synthetic construct
  source 1..110: mol_type = other DNA
gtgttctaacctcttcctcttgtagcttgtaggacctgatgccgggccattgtttgtgggtttgtagaggcagaatcctgagaaaattggttgtgaaccttagtggacaa

SEQ ID NO: 1715 - DNA, 110 bp, synthetic construct
  source 1..110: mol_type = other DNA
ttatgtttgtgtgaattagtaatgatcctttaaaaaatgctgaaaaaatttttcaaaattatgtatctcctggacttttcacaaaagaaatgaccccggtgggttcgcct

SEQ ID NO: 1716 - DNA, 110 bp, synthetic construct; identical to SEQ ID NO: 1715
  source 1..110: mol_type = other DNA

SEQ ID NO: 1717 - DNA, 110 bp, synthetic construct; identical to SEQ ID NO: 1715
  source 1..110: mol_type = other DNA

SEQ ID NO: 1718 - DNA, 110 bp, synthetic construct; identical to SEQ ID NO: 1715
  source 1..110: mol_type = other DNA

SEQ ID NO: 1719 - DNA, 110 bp, synthetic construct
  source 1..110: mol_type = other DNA
ttttctttctatttacctggataatatgttctcttcttatttttctttgcattatctagacccgtggagattaaagagcaaaggactattctcctttcttgggggttgag

SEQ ID NO: 1720 - DNA, 110 bp, synthetic construct
  source 1..110: mol_type = other DNA
ctagacccgtggagattaaagagcaaaggactattctcctttcttgggggttgagcacaagttcaccctatgtctgactcaactcttttttaaatgacctttgcattatt

SEQ ID NO: 1721 - DNA, 110 bp, synthetic construct
  source 1..110: mol_type = other DNA
tgctggttatataaatacttaaggtaacaacaaggatatgagaaggtaggagaaggaaatgagagagctggggagcagtaagggttgggcaacttcagagacagaagcaa

SEQ ID NO: 1722 - DNA, 110 bp, synthetic construct
  source 1..110: mol_type = other DNA
gaaatgagagagctggggagcagtaagggttgggcaacttcagagacagaagcaagactgagagaatggcagcctgtgttagactatagaagaacccttgatcctggttt

SEQ ID NO: 1723 - DNA, 110 bp, synthetic construct
  source 1..110: mol_type = other DNA
catcatatcaaagtgaaaaagctaaagagcatgccatttgaaaccatttccagtttatagtgacaaggctgtttaagctaaagaaattaaaaacaagttgaaccaacttc

SEQ ID NO: 1724 - DNA, 110 bp, synthetic construct
  source 1..110: mol_type = other DNA
tatagtgacaaggctgtttaagctaaagaaattaaaaacaagttgaaccaacttccactgccaaaaacctataaatggggggtatcggtaacatttattttaaaagtaat

SEQ ID NO: 1725 - DNA, 110 bp, synthetic construct
  source 1..110: mol_type = other DNA
ctatatgatgacagatatttcattcactccacagatatttatcatgtggctattgatagctaatacaaatgactaatacttgttcacaccatttcctgtgtctggtctta

SEQ ID NO: 1726 - DNA, 110 bp, synthetic construct
  source 1..110: mol_type = other DNA
tggacctcttagttttttatcttcatatgactgcagagaagctgaaacattttactttctccacttgcaggtgatatacaaattggaatggaggataaaaagggccagtt

SEQ ID NO: 1727 - DNA, 110 bp, synthetic construct
  source 1..110: mol_type = other DNA
gtcttctatttgttctttggccccagctctcacctcccacgtgtccattacctctagccatgaatcgccttggagacccgcaggcatagttgactgtgcccaaggtgaga

SEQ ID NO: 1728 - DNA, 110 bp, synthetic construct
  source 1..110: mol_type = other DNA
tgtattgttacaccctatcttcacctgcagagatttttctcccagaaaattcccgttactgtattatccaaaagatttagcttccccagtatcacactttctctcctaaa

SEQ ID NO: 1729 - DNA, 110 bp, synthetic construct
  source 1..110: mol_type = other DNA
aattaggcacctaatacatgctaaaaactaccctaaagatgaagctacaatcgtgaagaagacagccagaaattttgtctcagaagtctatatgcttctgagaacataca

SEQ ID NO: 1730 - DNA, 110 bp, synthetic construct
  source 1..110: mol_type = other DNA
aaactaatagaattctcatgtgttcttcgtgctaatataaataccttccatttagctgccatatttctcgcttcccacccatatacacattttccttggtatttcttcct

SEQ ID NO: 1731 - DNA, 110 bp, synthetic construct; identical to SEQ ID NO: 1730
  source 1..110: mol_type = other DNA

SEQ ID NO: 1732 - DNA, 110 bp, synthetic construct
  source 1..110: mol_type = other DNA
catgccctggatgtggccaaaaaaaaaaaaaaaaaattaaagaatatatgtactcatgcttaccacatattcagtcaactgtgtgtagctgtgtattacgtattattgag

SEQ ID NO: 1733 - DNA, 110 bp, synthetic construct
  source 1..110: mol_type = other DNA
ttggccctggaataaatctttctctgccccaaactccaacattccagtttgtttggcctcactgtgcactgggcataggaacttgtattctgtaatcactctccatttgg

SEQ ID NO: 1734 - DNA, 110 bp, synthetic construct
  source 1..110: mol_type = other DNA
gcctcactgtgcactgggcataggaacttgtattctgtaatcactctccatttggaaagcacatggcttgtttgagaatctgaaagaaagctctgtgggtgaagctctga

SEQ ID NO: 1735 - DNA, 110 bp, synthetic construct
  source 1..110: mol_type = other DNA
tggtgatgtaaatactaaccatggagggagaatttaatgcattgacaccatccgatgcttagaagagtccccggcccatagtaagtgtctgacaaatgagatgcaaaaca

SEQ ID NO: 1736 - DNA, 110 bp, synthetic construct
  source 1..110: mol_type = other DNA
agaactcattaaaatgttgactgaaacattaacagttttttaaagcaacacctttagtgcttaagaaaatttatacaagcacgctgttctttactcttccctaaagtgta

SEQ ID NO: 1737 - DNA, 110 bp, synthetic construct
  source 1..110: mol_type = other DNA
agtgcttaagaaaatttatacaagcacgctgttctttactcttccctaaagtgtagctcttttgctctctacagaatgagaataatcacaagaaagcctgccagggtagg

SEQ ID NO: 1738 - DNA, 110 bp, synthetic construct
  source 1..110: mol_type = other DNA
ttccttggtcacctcttcctgtatctatcccctagtcccaccctctgcacgacacggccctgcctgctccaggcttcccaccgctgccctaggtcctgggctcagctgcc

SEQ ID NO: 1739 - DNA, 110 bp, synthetic construct
  source 1..110: mol_type = other DNA
tctgtattatgactgacttcgtattatgtataaagttcctaaggaatccaagtatatagcaaatactatcaattctagtggttattcaatagcatcgcactgttttctac

SEQ ID NO: 1740 - DNA, 110 bp, synthetic construct
  source 1..110: mol_type = other DNA
gtcatatgatatctctacttaagtacttggcaggacttctaaaggccttaattaaagactggctctgggacaaatgctaaaggaaatatttaccacaattccagtatatt

SEQ ID NO: 1741 - DNA, 110 bp, synthetic construct
  source 1..110: mol_type = other DNA
agactggctctgggacaaatgctaaaggaaatatttaccacaattccagtatatttatttctattttgcccccatatttcattctccattgacacccactaaaattacta

SEQ ID NO: 1742 - DNA, 110 bp, synthetic construct
  source 1..110: mol_type = other DNA
ttatgattgaatcagtaccaatttagatggatctggtgctttattcattagaaataagaaattaaatctgtcctgacaaggcaaggttctcatcagatttctcttttttt

SEQ ID NO: 1743 - DNA, 110 bp, synthetic construct
  source 1..110: mol_type = other DNA
aagtagaataaacacatggtcactagagatgtttgcagatttattgcaaagggggaaattccccaaaatgtctatggacaacaaattcatgcaatctctcaaacagacag

SEQ ID NO: 1744 - DNA, 110 bp, synthetic construct
  source 1..110: mol_type = other DNA
ccctgaggtctctgcctggctgtcccttctgcctggccaggctgaccatggccggtcattcagctgtcaccctggagtgacttcctgggggaaacttacctgaccctctg

SEQ ID NO: 1745 - DNA, 110 bp, synthetic construct
  source 1..110: mol_type = other DNA
tcttcagaaggggcctcccacttaagggcactcttagtacatgtatcacattcaagaacccccactacacatcttcccatctttcagtgtcagctttaccttcaaaacag

SEQ ID NO: 1746 - DNA, 110 bp, synthetic construct
  source 1..110: mol_type = other DNA
gaacccccactacacatcttcccatctttcagtgtcagctttaccttcaaaacaggtttgaaaatctccctctgtgccctggtccgttggctcccataggatacacgaga

SEQ ID NO: 1747 - DNA, 110 bp, synthetic construct
  source 1..110: mol_type = other DNA
agagaggaagggcagcaacattatggcttctagaacaagcatgtatgcaagccggatggtgtgattgtgtggtagctgttcactctgaatatgaggaacttcaagttagt

SEQ ID NO: 1748 - DNA, 110 bp, synthetic construct
  source 1..110: mol_type = other DNA
acagaaaatcgtatggagtgcttaggacaagaataagctgagaggtataagtcaattttaatttgagcaaaatagggaattcctgtcatggctcagcaggttatgaactt

SEQ ID NO: 1749 - DNA, 110 bp, synthetic construct
  source 1..110: mol_type = other DNA
aaaatgggtgtcttcaagaagagtttgaggagacctcaagtgttactgcatttgctaatggataatgtaagctccggttcacggacctgcaaaagctgactgttaactca

SEQ ID NO: 1750 - DNA, 110 bp, synthetic construct
  source 1..110: mol_type = other DNA
taatggataatgtaagctccggttcacggacctgcaaaagctgactgttaactcacaagtgagtgctggcaccagaggcacatcaacaatcctatgtgcaacaggggtcc

SEQ ID NO: 1751 - DNA, 110 bp, synthetic construct
  source 1..110: mol_type = other DNA
atacctcgtccctctcctctcttgcttgtttgtcaaaagaatgattcagctctgggctgtaaagaatggcgcgtgctgcttcaggactgataccatcagcaataaataca

SEQ ID NO: 1752 - DNA, 110 bp, synthetic construct
  source 1..110: mol_type = other DNA
gctgtaaagaatggcgcgtgctgcttcaggactgataccatcagcaataaatacaaagtaggcttgttttccaaaccatcctcaaagtgatttaagagacgtccagtctc

SEQ ID NO: 1753 - DNA, 110 bp, synthetic construct
  source 1..110: mol_type = other DNA
ttgtcagaaaagtgtgttcaaaacagcacttttaaaaggtcattaataacagccttcaaatgaagctaatgctatgcttgaaacctcaccatgttttcccaagctttcat

SEQ ID NO: 1754 - DNA, 110 bp, synthetic construct
  source 1..110: mol_type = other DNA
aattaacaagtcccaaagacctgcttctcttttgcaaagcccaggacagagtttgtgctgccttaccattcagctagctatcaattcatactaaaagttgtaaaacagac

SEQ ID NO: 1755 - DNA, 110 bp, synthetic construct
  source 1..110: mol_type = other DNA
gtgtcaacagcatcagtgatgttgcagttctcagaggaagtggctgtggggccaatggcacaccaagtattccagagagaccgtgtccagagagagctgcagtggtggtt

SEQ ID NO: 1756 - DNA, 110 bp, synthetic construct
  source 1..110: mol_type = other DNA
tggcacaccaagtattccagagagaccgtgtccagagagagctgcagtggtggttcagagcacaggaccattgttgtgtagtgccaggaatggcaatttcaaatctcttg

SEQ ID NO: 1757 - DNA, 110 bp, synthetic construct
  source 1..110: mol_type = other DNA
ataaaattttactttcagagtggtttttgcattttgtaactgaaactctttccatgactgatcaagtgcttcccagtctctcataagccaagataagctctctgcagaaa

SEQ ID NO: 1758 - DNA, 110 bp, synthetic construct
  source 1..110: mol_type = other DNA
gactgatcaagtgcttcccagtctctcataagccaagataagctctctgcagaaaatctgattatgaattaatcaaaaagaagattctcaggcaaacaggagcagtgggt

SEQ ID NO: 1759 - DNA, 110 bp, synthetic construct
  source 1..110: mol_type = other DNA
ggtcagtttcaagttcacagtcaaaagtgtttaggatcctggtgggtgatataaatgaataaaggtgtggagagaattctggaaaacctgtgtaagatcaggcctgaggg

SEQ ID NO: 1760 - DNA, 110 bp, synthetic construct
  source 1..110: mol_type = other DNA
tgaataaaggtgtggagagaattctggaaaacctgtgtaagatcaggcctgagggatacgtagcagtcagctagtgcggatgctagaaaagagtctttaggaagaaggaa

SEQ ID NO: 1761 - DNA, 110 bp, synthetic construct
  source 1..110: mol_type = other DNA
gcttcagagctaattttgtctgatttttctcttgctgttgtcatatatttcccagtgttagctttctctgaccctgcactttggtctctcaaagtgtactccaaaagtgt

SEQ ID NO: 1762 - DNA, 110 bp, synthetic construct
  source 1..110: mol_type = other DNA
tgttagctttctctgaccctgcactttggtctctcaaagtgtactccaaaagtgtcccttgggtttggtccagtgaagactgcaactggccctagttaacaggtctcact

SEQ ID NO: 1763 - DNA, 110 bp, synthetic construct
  source 1..110: mol_type = other DNA
agaccagaggctcaggataaaataaagttgatttaattcacatgtcctagagtcagaaggcacagcacaccatgcagggccatctggataaaccagtgtggtctggaggc

SEQ ID NO: 1764 - DNA, 110 bp, synthetic construct
  source 1..110: mol_type = other DNA
gaaggcacagcacaccatgcagggccatctggataaaccagtgtggtctggaggcagaagacaggtatgcagaaagagcttatgccatgatctttactgatatttccttg

SEQ ID NO: 1765 - DNA, 110 bp, synthetic construct
  source 1..110: mol_type = other DNA
tactatcactgcacatactagcattagcatgacttgaagctataagaactaaatgtctttgagctgtctacaccaaacttaacatgtgacatgtcatgataaaaataata

SEQ ID NO: 1766 - DNA, 110 bp, synthetic construct
  source 1..110: mol_type = other DNA
tctttgagctgtctacaccaaacttaacatgtgacatgtcatgataaaaataataatgataaaaatagttacgaaagtataggaatgataatggtatcctttcacctcag

SEQ ID NO: 1767 - DNA, 110 bp, synthetic construct; identical to SEQ ID NO: 1765
  source 1..110: mol_type = other DNA

SEQ ID NO: 1768 - DNA, 110 bp, synthetic construct; identical to SEQ ID NO: 1766
  source 1..110: mol_type = other DNA

SEQ ID NO: 1769 - DNA, 110 bp, synthetic construct
  source 1..110: mol_type = other DNA
ctatatggaaggatcacagctacagaaggaaaatccttggaccccctgacagctccctctggagcactagttctttcccaagcccaccctagagttcaagggaggtgatc

SEQ ID NO: 1770 - DNA, 110 bp, synthetic construct
  source 1..110: mol_type = other DNA
cctctggagcactagttctttcccaagcccaccctagagttcaagggaggtgatctaacgaccatacttacaccatttctgccttagttaagtaactaaacaaacatgtg

SEQ ID NO: 1771 - DNA, 110 bp, synthetic construct
  source 1..110: mol_type = other DNA
tgattggtccgttgtttactcctaaggaaagagcgccgtgattggcccatgagggtcatgaaagaccattctgcacctcccaccacgagctttttgctggtaacaagcag

SEQ ID NO: 1772 - DNA, 110 bp, synthetic construct
  source 1..110: mol_type = other DNA
tcatgaaagaccattctgcacctcccaccacgagctttttgctggtaacaagcaggaacagaagcagcaaaaagtagaaaatacggagagaagaaagaagagaatgaaga

SEQ ID NO: 1773 - DNA, 110 bp, synthetic construct
  source 1..110: mol_type = other DNA
ccgaagctgaaagagtccaggttcaaaggtcagctctgccattcactttgtcacgtcttctctcagacccttgcgtcctcgtatgtagaaagaaaataatgctccttagt

SEQ ID NO: 1774 - DNA, 110 bp, synthetic construct
  source 1..110: mol_type = other DNA
ggccccgcctcaggggaaggaggagcggctcctccgaagaaaccccaggccgcctgggaggatctcggctttccggacgcgtagcctgctttgtagatgtgttcttatcc

SEQ ID NO: 1775 - DNA, 110 bp, synthetic construct
  source 1..110: mol_type = other DNA
gggaggatctcggctttccggacgcgtagcctgctttgtagatgtgttcttatccatttacatgccccgcagctcaagctgatttagaagggactacacaggcctgctgg

SEQ ID NO: 1776 - DNA, 110 bp, synthetic construct
  source 1..110: mol_type = other DNA
catcttcatcatattgcttccaatcatttaaaattcagagtgaaaattattaactgcagcatcaagaccactggaatcaaaacaaactgattttccttcaacttgatgca

SEQ ID NO: 1777 - DNA, 110 bp, synthetic construct
  source 1..110: mol_type = other DNA
tccaaggatctggtgggaaggacataagagaaaggatgtggaagtgatcaatatactacgaagcattattcatgcccatctgctcctgcctcaggccctttgcactagct

SEQ ID NO: 1778 - DNA, 110 bp, synthetic construct
  source 1..110: mol_type = other DNA
gaaataatctacagaccacaagtagtaccatgttgcaaaaatctgcaaatcccataagtggacagcttgaagacaacccccagggcagggaagaaagtaagtgtgatcct

SEQ ID NO: 1779 - DNA, 110 bp, synthetic construct
  source 1..110: mol_type = other DNA
tgacaaagtatattgtttcaggattatatgcagcaacacgctatatcactaaccagatatcaggctgctgggactgaaataacatccttcgtggccagaggaggtgtgta

SEQ ID NO: 1780 - DNA, 110 bp, synthetic construct
  source 1..110: mol_type = other DNA
gatatcaggctgctgggactgaaataacatccttcgtggccagaggaggtgtgtagttaacagggatgtttctttgagaccagttgtccagccatcagcatatacaaact

SEQ ID NO: 1781 - DNA, 110 bp, synthetic construct
  source 1..110: mol_type = other DNA
gagacactggtataaactcatgcttacatacagaaacagatggctgcctatgggactatctatagaagtatctagacacatacgttagtatatgtgtatactagctgaca

SEQ ID NO: 1782 - DNA, 110 bp, synthetic construct
  source 1..110: mol_type = other DNA
ctatctatagaagtatctagacacatacgttagtatatgtgtatactagctgacaaggcatggcagcaattgcatatcagtagcaaccagcatatctaggacacagatca

SEQ ID NO: 1783 - DNA, 110 bp, synthetic construct; identical to SEQ ID NO: 1781
  source 1..110: mol_type = other DNA

SEQ ID NO: 1784 - DNA, 110 bp, synthetic construct; identical to SEQ ID NO: 1782
  source 1..110: mol_type = other DNA

SEQ ID NO: 1785 - DNA, 110 bp, synthetic construct
  source 1..110: mol_type = other DNA
catttcctttcacatgcaaatgccccagtccaactggattaattattcattcctctttcttctgactttgcccatgatttccctgcccatctctacaaatccttgaaggg

SEQ ID NO: 1786 - DNA, 110 bp, synthetic construct
  source 1..110: mol_type = other DNA
tttcttctgactttgcccatgatttccctgcccatctctacaaatccttgaagggtcaggcaaactcaatctcccattcttgtgatggcttgtaagtcattctttgtatt

SEQ ID NO: 1787 - DNA, 110 bp, synthetic construct
  source 1..110: mol_type = other DNA
accataattgctacacagcagacactgtctttccctcttacatgtcttttcctcaaaagctgttcttcttcctggctttgtggagataaattgtgcaagaaaaaaaaatg

SEQ ID NO: 1788 - DNA, 110 bp, synthetic construct
  source 1..110: mol_type = other DNA
ctttattccttcctttcttttctttctgcctgcctttcttccttccttactttcttctttccttccttttaagaataattaggggaatttagagccccagctaacacact

SEQ ID NO: 1789 - DNA, 110 bp, synthetic construct
  source 1..110: mol_type = other DNA
tctttccttccttttaagaataattaggggaatttagagccccagctaacacactaacctgagaagtgaaaaatctactgcttttgttgactttgctattaactggcttc

SEQ ID NO: 1790 - DNA, 110 bp, synthetic construct
  source 1..110: mol_type = other DNA
accaaaacaaaacaaacaccaatgaaaacaagatcattttgggaaactgctttccatttctcaaatcttagctatgtgaacaagtctgagtttcacattctttatccctt

SEQ ID NO: 1791 - DNA, 110 bp, synthetic construct
  source 1..110: mol_type = other DNA
atttctcaaatcttagctatgtgaacaagtctgagtttcacattctttatcccttaacatagaaagcttagcgccgtgcagtcttgggtaccgatttccgggatcctggg

SEQ ID NO: 1792 - DNA, 110 bp, synthetic construct
  source 1..110: mol_type = other DNA
tcagtcccgctgaagaccccctgagaagcagccttcagaattagctgccaagggatggcaaagctggagtatttatccactgaccctcatccttcattgattaaggactg

SEQ ID NO: 1793 - DNA, 110 bp, synthetic construct
  source 1..110: mol_type = other DNA
ggatactaaccccaaaaagccctgcccgctggagctaacacagttagtgagagtacaaataaatgagtaaaatgtttggtgcatcagaaggtggtaaatggcagagagag

SEQ ID NO: 1794 - DNA, 110 bp, synthetic construct
  source 1..110: mol_type = other DNA
ctgagtgaccttgggaaaccagctcttgcaagctgagaacagcacagtgcagccgtgctggggagtggagagaacataaacctccgcagccctgcttttcaacccgccct

SEQ ID NO: 1795 - DNA, 110 bp, synthetic construct
  source 1..110: mol_type = other DNA
ttacctgcttgttgagaactggctgctgtaaaccatcaaatagaagtctgatgcttttgtacttggcttcttcaccaatacacttgactatcagatctaaacaagaaagc

SEQ ID NO: 1796 - DNA, 110 bp, synthetic construct
  source 1..110: mol_type = other DNA
tttgtacttggcttcttcaccaatacacttgactatcagatctaaacaagaaagccacatgtgaaacaattttacattatatgattcatcatttactggatcataaagca

SEQ ID NO: 1797 - DNA, 110 bp, synthetic construct
  source 1..110: mol_type = other DNA
atgttattcctgaaaatacttacagatggttttttatttctaggttctgcaaacttctgcaagaatggaaccaaaggggaaggtggttcagttgctttttcaggctttaa

SEQ ID NO: 1798 - DNA, 110 bp, synthetic construct
  source 1..110: mol_type = other DNA
ctctactatatcacatcaataggtcaaagggaggaagctatgtattcatttaggtaaaaaggtgtctgataaaaataaaatccgcgtttaggagttcccgtcgtggcgca

SEQ ID NO: 1799 - DNA, 110 bp, synthetic construct
  source 1..110: mol_type = other DNA
aaaatgaagagcttttccttagttttttacacgacataccggtaaatcttgtggcattagccctagaaaaggaaaaacactttagctttacaagactataaacataaaga

SEQ ID NO: 1800 - DNA, 110 bp, synthetic construct; identical to SEQ ID NO: 1799
  source 1..110: mol_type = other DNA

SEQ ID NO: 1801 - DNA, 110 bp, synthetic construct
  source 1..110: mol_type = other DNA
tagagctacctttaacctagttttattgtagatgttgtccatgggccttttaaattgctaccctaattactgaatttgtttttatggtgagatttgggacaacccaaaaa

SEQ ID NO: 1802 - DNA, 110 bp, synthetic construct
  source 1..110: mol_type = other DNA
tgctaccctaattactgaatttgtttttatggtgagatttgggacaacccaaaaatacattgcttctgctgctatctttctagaatcctctatgatttgtcttaaaaaaa

SEQ ID NO: 1803 - DNA, 110 bp, synthetic construct
  source 1..110: mol_type = other DNA
aatgggacacattcatattaacattaaccaacttctccaggtacttgttatttctgcacttaaaaagcactgatacaaattggcttagcaatagaggacattttgtgttt

SEQ ID NO: 1804 - DNA, 110 bp, synthetic construct
  source 1..110: mol_type = other DNA
tattgacagcatggccaaggccctgagaaataattcattagaagacaggaggatgtctggcaggttaggtcatgctcaggaacaacagtcacatttttaagaggttctgg

SEQ ID NO: 1805 - DNA, 110 bp, synthetic construct
  source 1..110: mol_type = other DNA
tctggcaggttaggtcatgctcaggaacaacagtcacatttttaagaggttctggaaacaatgagaggtcaaaggttggtttgtgtatttcaggaggaaggatctgtgtt

SEQ ID NO: 1806 - DNA, 110 bp, synthetic construct
  source 1..110: mol_type = other DNA
tctaactgctgctgggtctccttcagctccttctaaccataggccagatgtatgtgcaaagtcatgacaaagactgtcagtttcttctgcaagtcatccacatcattgaa

SEQ ID NO: 1807 - DNA, 110 bp, synthetic construct
  source 1..110: mol_type = other DNA
tatgtagttttgagacctagagcaattgaactagtagcattcattgccatttagcagaatggagacacaacatcaaagaaacatgtgaagcaaacaaaacctcaaacaaa

SEQ ID NO: 1808 - DNA, 110 bp, synthetic construct
  source 1..110: mol_type = other DNA
tggaagccccagatgatggagaccaggtttggggagctgccaggcactggcccgtcccacagacctcagtcttactgctcacggagttcctttttctattccttgaaact

SEQ ID NO: 1809 - DNA, 110 bp, synthetic construct
  source 1..110: mol_type = other DNA
tccaacctatgagtggaaggaaagttttttaagctaccagtcaaagtttatgctatacataatgcatttgggaagaatgtataaggatttcaaagtcagtttcttgcttt

SEQ ID NO: 1810 - DNA, 110 bp, synthetic construct
  source 1..110: mol_type = other DNA
aatgtgacttagtgataaaaccacaggacagagaatcagagagaaacctcccatacctgctgagaggcctgacatccattttcactggcattatcaccttaagcaggtca

SEQ ID NO: 1811 - DNA, 110 bp, synthetic construct
  source 1..110: mol_type = other DNA
aagctaaatattcccttagtctcttatattccatggactaaaaatgaacttcagaatatagtcaaagattttccctaagtgattgaaaatcctcacagatttgctgagga

SEQ ID NO: 1812 - DNA, 110 bp, synthetic construct
  source 1..110: mol_type = other DNA
ttagtctcttatattccatggactaaaaatgaacttcagaatatagtcaaagattttccctaagtgattgaaaatcctcacagatttgctgaggaatttaacatagtcat

SEQ ID NO: 1813 - DNA, 110 bp, synthetic construct
  source 1..110: mol_type = other DNA
ctatgggttggagtgatgggttggaagctgcagccacaaagcaggctacatccactcatcctggaccttcaccaagtaactggaccatcaccaagtaactagggtcggag

SEQ ID NO: 1814 - DNA, 110 bp, synthetic construct
  source 1..110: mol_type = other DNA
ccagtggctgcttcaggccagggatcagggtgagacaagaattattccacaattgccttcctaagctcagccccaattaccacctctccccactccaatttaatttaaaa

SEQ ID NO: 1815 - DNA, 110 bp, synthetic construct
  source 1..110: mol_type = other DNA
tctgatcagagatcctgatttctatttgttggagagtcattatcaaggcttgttgaattcaatattttaaaagatgctgtaaaaaatcagcatttctaccttattcccaa

SEQ ID NO: 1816 - DNA, 110 bp, synthetic construct; identical to SEQ ID NO: 1815
  source 1..110: mol_type = other DNA

SEQ ID NO: 1817 - DNA, 110 bp, synthetic construct
  source 1..110: mol_type = other DNA
tcccacttagtatctcttaaatatgtctacttctttttatgccttaatcaccttcatttcccactcacactttcctagctgatctccctgcatctgtttttggccccttt

SEQ ID NO: 1818 - DNA, 110 bp, synthetic construct
  source 1..110: mol_type = other DNA
gagctgaacaaaatccctgatttcatgaagcttaccttccagtgaggaaacaggccataaagacaacaaacaagtaaaatatttatgtgttagaggcaataactgctagg

SEQ ID NO: 1819 - DNA, 110 bp, synthetic construct
  source 1..110: mol_type = other DNA
aggtgagattaatttctataagcttatgtgaatgacactattagggtatcattattagtgtagaattcacacagcatccactagttggcaagtcacattccctactttgt

SEQ ID NO: 1820 - DNA, 110 bp, synthetic construct
  source 1..110: mol_type = other DNA
tagtgtagaattcacacagcatccactagttggcaagtcacattccctactttgttgttgttcattaaaggtcattgcatgctaaatcattaattcatcctgttacaggg

SEQ ID NO: 1821 - DNA, 110 bp, synthetic construct
  source 1..110: mol_type = other DNA
ttttactcttccaacctaaaattcaaatttgggtcttctcttttttctgctcagttaatcaagtagtcatctttatgagagagatttaagcattaagctttgagggggtt

SEQ ID NO: 1822 - DNA, 110 bp, synthetic construct
  source 1..110: mol_type = other DNA
taaggttttgtcaagaaattatccaacacttgagagctgtatgtacacaaagatgacaaagtcatgatctggaacctcacattctttagggtaattctaatagaaacctg

SEQ ID NO: 1823 - DNA, 110 bp, synthetic construct
  source 1..110: mol_type = other DNA
aaagaaacaaagcagaaacagccagctaggaaagaggctgctgaagcagtttgaagatcaatatgcaatctcctttggcagagagtgtgattggcggcttatgatagaat

SEQ ID NO: 1824 - DNA, 110 bp, synthetic construct
  source 1..110: mol_type = other DNA
cataaacacatattctggagttttgcttacacatagtttaatgccctgccttccttattttaaaaatctaacagcagagagtttccactgtggctcagtggaaatgaacc

SEQ ID NO: 1825 - DNA, 110 bp, synthetic construct; identical to SEQ ID NO: 1824
  source 1..110: mol_type = other DNA

SEQ ID NO: 1826 - DNA, 110 bp, synthetic construct
  source 1..110: mol_type = other DNA
caacctcatgggtcctagtcggattcctttctgctgtgtcatgatgggaactcctagattttatttatacaaaataaatagcttacattttatatttttagataaatata

SEQ ID NO: 1827 - DNA, 110 bp, synthetic construct
  source 1..110: mol_type = other DNA
tctttctttttttctttttagagccgcacccacggatggcatgtggaagttactagggctagggatcaaattggacttgcagctgcaggcctccactacagctacttcaa

SEQ ID NO: 1828 - DNA, 110 bp, synthetic construct
  source 1..110: mol_type = other DNA
attagtatactgggaagagtaatgtcaggcaatttctaggccaaatagagtagtgccgagggttctagcttaggagctagcattagattggacatgagctattttttctt

SEQ ID NO: 1829 - DNA, 110 bp, synthetic construct
  source 1..110: mol_type = other DNA
aggtatggagcaggatagggcattgcattattacaggtggtctgtgtggaaagataagggctagagaagctgaagctgaagagacagatgggccaggtcatgaaaggccc

SEQ ID NO: 1830 - DNA, 110 bp, synthetic construct
  source 1..110: mol_type = other DNA
ggatgtggtcctgagctggggcacagaggaataaggccctttcctcaacatcatgtgaagtatctgaagcatggctgccccatgtgagcaagcctagagtgacgtgtata

SEQ ID NO: 1831 - DNA, 110 bp, synthetic construct
  source 1..110: mol_type = other DNA
taaaattctaaggtaccgtggtgaaacttagctttccagtaactagcattctgatatatcttgacttctctaatatatgcattggagaaggaaccagaaaaagataccaa

SEQ ID NO: 1832 - DNA, 110 bp, synthetic construct
  source 1..110: mol_type = other DNA
tgattcaatgagaaaattaaaaaagaagttaaaaaaaatatttttagggagctccccttgtggctgaaaggaaacaagtccaactagtgtccatggggatgcaggttcaa

SEQ ID NO: 1833 - DNA, 110 bp, synthetic construct
  source 1..110: mol_type = other DNA
ttgctccttcatatattccatgggacccttgaagcaatttgtgtttgtggtttctagcttaggaaacctaaattgtcataatatcctcttaattgatgtacctgcttctg

SEQ ID NO: 1834 - DNA, 110 bp, synthetic construct
  source 1..110: mol_type = other DNA
ctttgctctctctgatgaaccaagtgattgtcaaaccttagcatacattagaatcacttggaaggcttgttaaaacacagctatctaagatttcccgtgtagcatagtgg

SEQ ID NO: 1835 - DNA, 110 bp, synthetic construct
  source 1..110: mol_type = other DNA
cattagaatcacttggaaggcttgttaaaacacagctatctaagatttcccgtgtagcatagtgggttaaggatcaggcattgtaactgcagtggctcaggttgctgctg

SEQ ID NO: 1836 - DNA, 110 bp, synthetic construct
  source 1..110: mol_type = other DNA
ggaactcgtccctactcacctctgtgtcttgctcaagctctcttccatacattctgcctcactagtttcggatgcaatgccaacattatctcctataggaagatttcccc

SEQ ID NO: 1837 - DNA, 110 bp, synthetic construct
  source 1..110: mol_type = other DNA
cactctacagtgtgccaaaaagactggggttggctgatttctatttttattagaaatcctgagcttcaggaaaaatggaattttagctaggagggcagatttgctttttt

SEQ ID NO: 1838 - DNA, 110 bp, synthetic construct
  source 1..110: mol_type = other DNA
gactaaagtgcatcattttaaggccagctttcattttaatggtactctatggcacttgggctaacaccaaaccaccagtaattatgtttgggatctggtttttgaccatt

SEQ ID NO: 1839 - DNA, 110 bp, synthetic construct
  source 1..110: mol_type = other DNA
atttttattgtaatatgtcttggtgtgagtctgtttggcctcaccttgattggagctctctgtgcttgctgtatcttgatgtctgtttcctttagacatggaaagttttc

SEQ ID NO: 1840 - DNA, 110 bp, synthetic construct; identical to SEQ ID NO: 1839
  source 1..110: mol_type = other DNA

SEQ ID NO: 1841 - DNA, 110 bp, synthetic construct
  source 1..110: mol_type = other DNA
aaaaactaagagctatttttaaaaactgtacatactcatgatgaatagaaaccgtgtcatgcagctagatacagttaaccctttatttctgccggaatccccatccacag

SEQ ID NO: 1842 - DNA, 110 bp, synthetic construct
  source 1..110: mol_type = other DNA
gtcatgcagctagatacagttaaccctttatttctgccggaatccccatccacagactcaaccaaccatggatggaaaatactcagaaaaaaaattcccaaaagttccac

SEQ ID NO: 1843 - DNA, 110 bp, synthetic construct
  source 1..110: mol_type = other DNA
aaatttagatttattctccttgtgcacatccttgtatactttatccttccttcgctcagctggtggcgtatcttgccttggagaagaattaacacagaaaaaaaaagaag

SEQ ID NO: 1844 - DNA, 110 bp, synthetic construct
  source 1..110: mol_type = other DNA
tgatttactggtacagaatcactttctccatctgcactccctaagccctccctttcctttgatcctgaactgagctgctttaaaaagaaagatgcttggggctggaacaa

SEQ ID NO: 1845 - DNA, 110 bp, synthetic construct
  source 1..110: mol_type = other DNA
cccacaccagagcaccagcctcctttccagttttcctgcctttctctggaccaatccccttgtgatcatttgccaaatagctactccagtgatcttcatcaaataggtgg

SEQ ID NO: 1846 - DNA, 110 bp, synthetic construct
  source 1..110: mol_type = other DNA
ccccttgtgatcatttgccaaatagctactccagtgatcttcatcaaataggtggctgattatgtgactctcgtaatcaacctctttgccctaaagaccaagttcaaatt

SEQ ID NO: 1847 - DNA, 110 bp, synthetic construct
  source 1..110: mol_type = other DNA
gcatctaatgtgcacgattgattgggtcactactcaagttgattctttcattctcagcctttattatgctttttgagtaaaaatggcctttaaaaaaaccactgttttcc

SEQ ID NO: 1848 - DNA, 110 bp, synthetic construct
  source 1..110: mol_type = other DNA
gtcactactcaagttgattctttcattctcagcctttattatgctttttgagtaaaaatggcctttaaaaaaaccactgttttcctaaaagtgaaacatgctcattataa

SEQ ID NO: 1849 - DNA, 110 bp, synthetic construct
  source 1..110: mol_type = other DNA
gttctcaataacatttacttaattgatgaattgatccattctataaagaacctattccttcttttgagattatgggaagatgttacctatattactctcatttcacatgc

SEQ ID NO: 1850 - DNA, 110 bp, synthetic construct
  source 1..110: mol_type = other DNA
tagaccaatcaggccgcctggggacaggtggctttccctaagacattgtgtggctacacaggagcttggaggatgcctaacaaaaccagggttcgttaggaacaatgaaa

SEQ ID NO: 1851 - DNA, 110 bp, synthetic construct
  source 1..110: mol_type = other DNA
atcactctggttgtactaagaaggaaacagtgtggagataaaggttagaacagaaggaaagccacaagccaggaggccagttacaaggcaattgcaataatctaggccaa

SEQ ID NO: 1852 - DNA, 110 bp, synthetic construct
  source 1..110: mol_type = other DNA
ctctacacaaccacagcatgagctacatttggttttgccctcagccttttttcggctgcactcaaggcatgtgaaagttccagggccaaggatcgaacctttgcaacagc

SEQ ID NO: 1853 - DNA, 110 bp, synthetic construct
  source 1..110: mol_type = other DNA
caaacgcaaggtctaacagaggcccaagtcaagttcgaggaaagatacaaaaccgacaagaacaaatggttcttccagaagctgtggttttaagtatgtcttatttcagt

SEQ ID NO: 1854 - DNA, 110 bp, synthetic construct
  source 1..110: mol_type = other DNA
aagtaaattatggtacactgataagatagaaatctgggcatctatttaaaaaaaaactgacagcaatctctacataccaagagtagagccaggggcctcaagataaattg

SEQ ID NO: 1855 - DNA, 110 bp, synthetic construct
  source 1..110: mol_type = other DNA
actgacagcaatctctacataccaagagtagagccaggggcctcaagataaattgtttaaaaaaagcaaagtacagaaaagggtgttaagaatcatctcttgggaaagag

SEQ ID NO: 1856 - DNA, 110 bp, synthetic construct
  source 1..110: mol_type = other DNA
atagaattagtacacagtccctgaaacctaattctcaaggttgcagagatatatagatacagagtcaggtatattaaaatttcttataaagaaatttcagtttagagtca

SEQ ID NO: 1857 - DNA, 110 bp, synthetic construct
  source 1..110: mol_type = other DNA
ctgattggaggaccgcgccatggcgccttcctactctggggagctaataactaccatccgcaagggatgtccccaaactaagaaacaggcaaaactgtttatctgcaaca

SEQ ID NO: 1858 - DNA, 110 bp, synthetic construct
  source 1..110: mol_type = other DNA
tctcccactatataccccaggagaacatccagggatttgctgggttttatacatatgatttttattttttccttatagctggtttattgtgttctgtcaattttctactg

SEQ ID NO: 1859 - DNA, 110 bp, synthetic construct
  source 1..110: mol_type = other DNA
gaaggacccagcccaatgattcccagaattaaatcattttcacatattctatgagctttctgccataataacactcatcattaccattatatgcttactatttttcttta

SEQ ID NO: 1860 - DNA, 110 bp, synthetic construct
  source 1..110: mol_type = other DNA
gtttgatgggatgggttatttcttcttttaagctgttaagaatcctctcttccgtcctccagctctctggataaatgaaccgacccagaaggtccaagacagagatttag

SEQ ID NO: 1861 - DNA, 110 bp, synthetic construct
  source 1..110: mol_type = other DNA
aaattacaactggaataagtattactggaatatgcaacagggaatctgacacaaattttaaaaagactaaagaagggaattcccgtcgtggctcagtggtaatgaaccta

SEQ ID NO: 1862 - DNA, 110 bp, synthetic construct
  source 1..110: mol_type = other DNA
gtctattttagccacattaaagccatattaccagcacctgagagttgcactggcaatttgaattccttaagtgtaaattgctgtgtacacataacatggtattaaagtat

SEQ ID NO: 1863 - DNA, 110 bp, synthetic construct
  source 1..110: mol_type = other DNA
atttgaattccttaagtgtaaattgctgtgtacacataacatggtattaaagtattaaataagccactatcttaatgagtcagggttggaatcgacttacccaggggtaa

SEQ ID NO: 1864 - DNA, 110 bp, synthetic construct
  source 1..110: mol_type = other DNA
aaggttaagtatcgcgctgagcacaatctccagccggggaaggtcatgccttcgtctcatctcagatgttgcctttttatgagggctttttatagcccactttcttggga

SEQ ID NO: 1865 - DNA, 110 bp, synthetic construct
  source 1..110: mol_type = other DNA
ctcatctcagatgttgcctttttatgagggctttttatagcccactttcttgggagaaacttttttcttaattaagaattctaattttaaagtgagctgtgacctctttc

SEQ ID NO: 1866 - DNA, 110 bp, synthetic construct
  source 1..110: mol_type = other DNA
caaacacagaactacactctaataattttttcacagtaagtaaatctcttaaatacagtgtgttacaagtattctggggtttgttctgcaaggcaaacctgtgaaaatag

SEQ ID NO: 1867 - DNA, 110 bp, synthetic construct
  source 1..110: mol_type = other DNA
cagtgtgttacaagtattctggggtttgttctgcaaggcaaacctgtgaaaataggtgtataactatttcctcaaagaatgggagatattttaaatgtcaacaaccaaaa

SEQ ID NO: 1868 - DNA, 110 bp, synthetic construct
  source 1..110: mol_type = other DNA
tacagactgtgtaaccccaaatccatgttgagatcctaaccccagtacgtcagggtgagattgattttagagacagggcctctgaagaggcaaccgaggttaaaatgagg

SEQ ID NO: 1869 - DNA, 110 bp, synthetic construct
  source 1..110: mol_type = other DNA
aaatcccagatgcattttttacatactatatttatgggtaccagtgagctgaggtcaaaaagcagaaaaaaaattatgcttcaagaatatagttttgggaatctctggga

SEQ ID NO: 1870 - DNA, 110 bp, synthetic construct
  source 1..110: mol_type = other DNA
tttttgcagactgattcaaccagcacataagacctaagggccagctcctgttcgcgagaagaactcctactaccagcctaaggaggcaagtgagaaataataggcacgtc

SEQ ID NO: 1871 - DNA, 110 bp, synthetic construct
  source 1..110: mol_type = other DNA
gatgtgactaagaaatgaacagtcactttctcttaaatttattttttaaggtcttcttgtgttttattatccctgcctctttctgggaaggtcagcttcactgattaaaa

SEQ ID NO: 1872 - DNA, 110 bp, synthetic construct
  source 1..110: mol_type = other DNA
ctttctcttaaatttattttttaaggtcttcttgtgttttattatccctgcctctttctgggaaggtcagcttcactgattaaaagagatagtaaaacccttgtgtgacc

SEQ ID NO: 1873 - DNA, 110 bp, synthetic construct
  source 1..110: mol_type = other DNA
cctgctttactagaggctaatattcagggagtgcagacgtgggcggagggtgcaggcctaacaggggccaagcttcatttgctcctgggtttttcagagaatcagctctc

SEQ ID NO: 1874 - DNA, 110 bp, synthetic construct
  source 1..110: mol_type = other DNA
ctccagttctacaggatggagcagggaagaagccttggatggtaagatgagtacccccctacagaaatcttctttaactcgaagcaagttacaatgtacaaataatagca

SEQ ID NO: 1875 - DNA, 110 bp, synthetic construct
  source 1..110: mol_type = other DNA
ctcccatctcaagctgccaaacagaggacccactacgcccgccctttcagcagaatctaggcctccaagccctcaggagatgaagggtatgcaggaccctcaaatgcagc

SEQ ID NO: 1876 - DNA, 110 bp, synthetic construct
  source 1..110: mol_type = other DNA
tacttttatattcaggaaaataaagctacttctgttttgatagaaagaaacaattattctctgattctgctctttgtagtgactaaggacacttaatacatgggatgtag

SEQ ID NO: 1877 - DNA, 110 bp, synthetic construct
  source 1..110: mol_type = other DNA
ccaatgcctgtgttaatgcacatgttccatgatctaagaacacaaaagcaagtgtgggaagactggccgggtgaagttcatcccgccaacttctaagtggcgctgaatgg

SEQ ID NO: 1878 - DNA, 110 bp, synthetic construct
  source 1..110: mol_type = other DNA
gggaagactggccgggtgaagttcatcccgccaacttctaagtggcgctgaatgggagcggtttgcatttttggaggaatactctgtcagctccatcagcttcccctgca

SEQ ID NO: 1879 - DNA, 110 bp, synthetic construct
  source 1..110: mol_type = other DNA
gaggagagagattcatgaccacatatgtccaaggaagtggaaagtgtacaatatagatgtctccaactttctaggaacacagctacttagaaaaccaatcacacccacaa

SEQ ID NO: 1880 - DNA, 110 bp, synthetic construct
  source 1..110: mol_type = other DNA
gacatattctggctgtataaagaggtctcctgtcaacttattatcttccacttgcaagtattttactacatttttaaaggcctgaaagagttattgtaatgtttcaaact

SEQ ID NO: 1881 - DNA, 110 bp, synthetic construct
  source 1..110: mol_type = other DNA
gctgtcttgtgtttccccttcttttctctcttgttcccactctagccacttcctaccctgccactcccccttccctcagcctactggactcctatccactcttaagtgcc

SEQ ID NO: 1882 - DNA, 110 bp, synthetic construct
  source 1..110: mol_type = other DNA
ccctgccactcccccttccctcagcctactggactcctatccactcttaagtgcccggtcaaggcacttctcctgtgggaccgccctccaggtcatggtgacctttcttt

SEQ ID NO: 1883 - DNA, 110 bp, synthetic construct
  source 1..110: mol_type = other DNA
agatgctccacgggctccaccaagctgaccggtacccctcttgggagggggtggggcgagcaagagtagcttctgacccaacgttgatgttgacgttggaatcctttcca

SEQ ID NO: 1884 - DNA, 110 bp, synthetic construct
  source 1..110: mol_type = other DNA
gcgagcaagagtagcttctgacccaacgttgatgttgacgttggaatcctttccagaagggcttcagcctgccccaccgagggagcctctaagtccccacgctgggattt

SEQ ID NO: 1885 - DNA, 110 bp, synthetic construct
  source 1..110: mol_type = other DNA
aatagggatatttgtgcctgtaataagtgctttgacacagtgtgattcctttgacaatctagattttgacctggtctatttaaactctgctgggaacataattttcacat

SEQ ID NO: 1886 - DNA, 110 bp, synthetic construct
  source 1..110: mol_type = other DNA
aaaacctgaattcctacaggtacaaaaatggttttttgctcctttagctacagcttagatgtgttttattatcaaaggggccctggtatctcttcactacaaatgacgtt

SEQ ID NO: 1887 - DNA, 110 bp, synthetic construct
  source 1..110: mol_type = other DNA
gccaactccactttgcagggggtgaccgaaggctctttccgttgttgtcgtgctcatcctcaagggggagtgtcttgctccaagggaggggacctctctcatagccctgc

SEQ ID NO: 1888 - DNA, 110 bp, synthetic construct
  source 1..110: mol_type = other DNA
atcctcaagggggagtgtcttgctccaagggaggggacctctctcatagccctgctcacctgcagcatgcagagctgtggtcccaagtgaaagccctctgacttccgcaa

SEQ ID NO: 1889 - DNA, 110 bp, synthetic construct
  source 1..110: mol_type = other DNA
atttctaacatatccttactgcaaagttactttccccacatacctcagacaaggttctttcagagcacagctgtggaccttcccagacctccagctccagcttgactttg

SEQ ID NO: 1890 - DNA, 110 bp, synthetic construct
  source 1..110: mol_type = other DNA
actagatggttcccgtccttcctctcaggatggtgagtctggtggtccaggattgtgcaagtgtcttaatcaatgtcaccagctcctcagatatccacctgttaaggatg

SEQ ID NO: 1891 - DNA, 110 bp, synthetic construct
  source 1..110: mol_type = other DNA
cctgtagtgccagagataatggcatatccttgacccactgcagcagcaactctcaaaaaataatgttaattttaaaagtatagtggtacaatttattgtatataaatggt

SEQ ID NO: 1892 - DNA, 110 bp, synthetic construct
  source 1..110: mol_type = other DNA
ataatggcatatccttgacccactgcagcagcaactctcaaaaaataatgttaattttaaaagtatagtggtacaatttattgtatataaatggtgtgacaagagacagt

SEQ ID NO: 1893 - DNA, 110 bp, synthetic construct
  source 1..110: mol_type = other DNA
aaggactcaggaatgagaaatctcaaatccaatttccagctctaccatttatatagacatgaggcttctggcaaatcaaactctatgaccatctgtcaatatctgtaaaa

SEQ ID NO: 1894 - DNA, 110 bp, synthetic construct
  source 1..110: mol_type = other DNA
ccgtggaaattcagttttattattttgaacacaaggacttttggcagcatacagtgttaattactgtggcaaatataatctgcgatagcttcttttgtggccatattgtg

SEQ ID NO: 1895 - DNA, 110 bp, synthetic construct
  source 1..110: mol_type = other DNA
gttaattactgtggcaaatataatctgcgatagcttcttttgtggccatattgtgctgctgatacacatagagcatgttataagtttaaatccattgttctttttaacac

SEQ ID NO: 1896 - DNA, 110 bp, synthetic construct
  source 1..110: mol_type = other DNA
gcatttctgtttacagtgatgctgaagctactggtcttagaacaacaatttgaaaaactctgttgtaatatcccctcaaaccctagttgagtccctccaaaagccacata

SEQ ID NO: 1897 - DNA, 110 bp, synthetic construct
  source 1..110: mol_type = other DNA
ctgcccttctactggagtgccatgagcagctggaaaagtgtgcattcagtgagaagggatgcaggctagtggactttatggactgaagatgctagagaccatgggccatc

SEQ ID NO: 1898 - DNA, 110 bp, synthetic construct
  source 1..110: mol_type = other DNA
agatgtggttttgtgggatgaagtaaaagaaccaccaaaatggagcagtcaggtagagcagttttggagctgacatgcctgaaactggagcacaatgagttgaggggcaa

SEQ ID NO: 1899 - DNA, 110 bp, synthetic construct
  source 1..110: mol_type = other DNA
gagcagttttggagctgacatgcctgaaactggagcacaatgagttgaggggcaaacaaataagaatcttcgtttgagttctatgcagtggggagacttgagccactaga

SEQ ID NO: 1900 - DNA, 110 bp, synthetic construct
  source 1..110: mol_type = other DNA
tttcatttatatccctggatatttttttcccagaaaattacattcacctgcatgtttcttttcagaaatattttctatcttttaagaaatggctggaaactcagggtaat

SEQ ID NO: 1901 - DNA, 110 bp, synthetic construct
  source 1..110: mol_type = other DNA
attggttggtctaaaaaaaggaaactaataagtagcttttacagcattacgattacaaaaatattattaaccaaaattccaaatgtgtgtgtgtgtgtgtgtgtgagttc

SEQ ID NO: 1902 - DNA, 110 bp, synthetic construct; identical to SEQ ID NO: 1901
  source 1..110: mol_type = other DNA

SEQ ID NO: 1903 - DNA, 110 bp, synthetic construct
  source 1..110: mol_type = other DNA
aggcatacaacaataaggccaggagagaaaaaacagctgtccttccactgcccccggggccctgaagccatgtgctgacaatagcaggcaggtggtatttgggagtttct

SEQ ID NO: 1904 - DNA, 110 bp, synthetic construct
  source 1..110: mol_type = other DNA
gaactcctactgtatctttttgattatgtgactattgtccatctcctgcaacatactactagctgccataggcgagggatcatgtatgttgcattcatcaaggtaccttc

SEQ ID NO: 1905 - DNA, 110 bp, synthetic construct
  source 1..110: mol_type = other DNA
gctatatggcaggtggatatagatatcttcatttcagaaaggaagatgaagcaagagaatttaaggatgatagccaagcttactggtaggattaagatttgaactgcatc

SEQ ID NO: 1906 - DNA, 110 bp, synthetic construct
  source 1..110: mol_type = other DNA
ctcccccgctttggatgtggttcatgtaaatgctctttcacatcagcagcacgttgaaattctcggtaatggagaatcaatttaaaaattaaattaactttgtacatctt

SEQ ID NO: 1907 - DNA, 110 bp, synthetic construct
  source 1..110: mol_type = other DNA
caataataactcacccacttctttcctaccagtccttttgttggttctctattggcaagcttcttccaaggttcactttaaagtagggatgaggctctataagcagattg

SEQ ID NO: 1908 - DNA, 110 bp, synthetic construct
  source 1..110: mol_type = other DNA
tagaaaatatgggagaacacaacactcgctaaaccacagctctggtgggatttatgttagggcaccatgaccactcagagtacaacattctaggtgaggcagcatttaca

SEQ ID NO: 1909 - DNA, 110 bp, synthetic construct
  source 1..110: mol_type = other DNA
ttatgttttgttttgctttgtggtatactgacacaaaacgtctgtcctcttctcaccacatttcagtggaccaggccttctggagctcagggacctgtgtggctccctcc

SEQ ID NO: 1910 - DNA, 110 bp, synthetic construct
  source 1..110: mol_type = other DNA
gaggagcctgtgagagataattaggttatgagggtggagccctcctgaatgggattagtgtccttatacaaaaagaccagagagccagcttactccttttccatcatggg

SEQ ID NO: 1911 - DNA, 110 bp, synthetic construct
  source 1..110: mol_type = other DNA
tagtgtccttatacaaaaagaccagagagccagcttactccttttccatcatgggaagacacagaagtcagaaatctgcaacccataagaaggctttcaccagaattcca

SEQ ID NO: 1912 - DNA, 110 bp, synthetic construct
  source 1..110: mol_type = other DNA
aggtcaggctcgtgtgtagtccaattctgctaattccctttgagaggaggagcgcctgccctgctttgtctttgccatattaatggacagagcaatccagccaggtggca

SEQ ID NO: 1913 - DNA, 110 bp, synthetic construct
  source 1..110: mol_type = other DNA
acccatctcaacacatgattatcattaagttctaagttaaaggagcccttttcagtatttcattgtgtggataggtaaagctatctgactctcacaatgagagcctcact

SEQ ID NO: 1914 - DNA, 110 bp, synthetic construct
  source 1..110: mol_type = other DNA
gagcagagagaatgagaaaagatgggtagcctatgaaagcagagaaatggttgagtagtcatatcatgcaggcccagccatgttaaagtagagctggcttttattctgag

SEQ ID NO: 1915 - DNA, 110 bp, synthetic construct
  source 1..110: mol_type = other DNA
tagtcatatcatgcaggcccagccatgttaaagtagagctggcttttattctgagtaagatgggagccattgcagggtttttagcagagaaattagatggtctgacttat

SEQ ID NO: 1916 - DNA, 110 bp, synthetic construct
  source 1..110: mol_type = other DNA
aaggaggcttaggtacttggaccttctcaattgatgggttaagttgagagtctgtagagaatgaagcgaagaatgaaagggcacatagctcttctgtctattgagaaaag

SEQ ID NO: 1917 - DNA, 110 bp, synthetic construct
  source 1..110: mol_type = other DNA
ctagataacattttagatatgtcacctcattaaacctccctaagctcttttcagaagttgcaaatgttaccttgtctacttgaaaaattgagaaatctagactgcaagtt

SEQ ID NO: 1918 - DNA, 110 bp, synthetic construct
  source 1..110: mol_type = other DNA
agaatataacccatttctcttctagccttaacccatccaaccaattccaataccatgcttgcctttaagacgagctaaacttttcttaaagcaaattattttccatgaca

SEQ ID NO: 1919 - DNA, 110 bp, synthetic construct
  source 1..110: mol_type = other DNA
tcccgtgtacctggttcttattgctattcagataagagcacacgtaagacatcgacagcattgtagcccaagattcaagacagttttctctcattacagttaagtgtgtt

SEQ ID NO: 1920 - DNA, 110 bp, synthetic construct
  source 1..110: mol_type = other DNA
tctctcaagagtgccaacttttccatgtcagttttaaagtgctgatgcaaaagtagattcaaaacactatttcttcttgcctgaaaatgtttagaaccctcaaagtaact

SEQ ID NO: 1921 - DNA, 110 bp, synthetic construct
  source 1..110: mol_type = other DNA
tcccattttgatcatcttctgattttctgcattctaaacttactctttcctcattcaacattaagcttaagctgcataggtgacattttactgggtatgatgcagctggg

SEQ ID NO: 1922 - DNA, 110 bp, synthetic construct
  source 1..110: mol_type = other DNA
tcaaattacacatggctggctgcaaaattaaattgctctttcaggatatcagcggagacatagatacagcattatagctctgtgttcctattgttttcggatcagaaaat

SEQ ID NO: 1923 - DNA, 110 bp, synthetic construct
  source 1..110: mol_type = other DNA
ctctggggccattttgttgttgttgtgtaaatatatatgtgtcaccttaatgtctttgatatcataaagggcaagttaaaccaagagaggtttaaactataaagaaataa

SEQ ID NO: 1924 - DNA, 110 bp, synthetic construct
  source 1..110: mol_type = other DNA
cctcatgtttttcatatagatatgtatagatttcatagagatatgattccatattgaatctattcctttagctgctaacctttgtggtctgtttcctgtgcttagtcatg

SEQ ID NO: 1925 - DNA, 110 bp, synthetic construct
  source 1..110: mol_type = other DNA
caaagctcacattcaaggaggacgttaatgctaagcattaaccactatttaccttagcttttttctctcttcatgtctatatttcaaactagaaatgctacctttctgat

SEQ ID NO: 1926 - DNA, 110 bp, synthetic construct
  source 1..110: mol_type = other DNA
aatagaaaaatatatttcctgattttttaaaaagtgatgtagcctaatttatgcctttctgaggtagagctaaggtccctctgtcttgaagaaaacttacattaaagctt

SEQ ID NO: 1927 - DNA, 110 bp, synthetic construct
  source 1..110: mol_type = other DNA
ccaaatatattacaacctgtggaaactttctgcggtgactttcttagtttagtgtttaaaaacattttctattccctttcaactgttcgaagcattaaaagctcatattc

SEQ ID NO: 1928 - DNA, 110 bp, synthetic construct
  source 1..110: mol_type = other DNA
ttaaaaacattttctattccctttcaactgttcgaagcattaaaagctcatattcaaaatagagactagcaacttgctttcagcatcaacataaaagccttgccctttca

SEQ ID NO: 1929 - DNA, 110 bp, synthetic construct
  source 1..110: mol_type = other DNA
aatgtaattactggtgacaccagtgacaagcctgtggcatgcattccaccaattctctgttctgcatctataaccaacaagctcttctgtccttcctttagtctcggccc

SEQ ID NO: 1930 - DNA, 110 bp, synthetic construct
  source 1..110: mol_type = other DNA
gtaccttctcttgcttcagatcttagatgatttctagttttggtgatttcttcgttgtcctgtgagctacaaagtttatgtggagtaggctagagctcagactgatccac

SEQ ID NO: 1931 - DNA, 110 bp, synthetic construct
  source 1..110: mol_type = other DNA
aactgttcatctttgtttggagaaggaccaacatgttcaagaggcatcactctgtcctctgtcctccatgaccagtacagctaacatttactttttgactttagttgtgt

SEQ ID NO: 1932 - DNA, 110 bp, synthetic construct
  source 1..110: mol_type = other DNA
tgaatactatagtaaagtggaaaataaaacagctgtatgggtacaggatggttgttatgtatattcgatttttcccctggtgatcacaaggctgcctgggagctgtggct

SEQ ID NO: 1933 - DNA, 110 bp, synthetic construct
  source 1..110: mol_type = other DNA
tatgtatattcgatttttcccctggtgatcacaaggctgcctgggagctgtggctcactgcctctgccaggcaccaagaaagtattaccacatattgctaatgtgagaaa

SEQ ID NO: 1934 - DNA, 110 bp, synthetic construct
  source 1..110: mol_type = other DNA
aatccagtgtgctattctaaaagcatcattcacaacaaataactgccttggcccgatttgagaaaaataccgtaaatgtgttcttttattcccccaaagagctacacgat

SEQ ID NO: 1935 - DNA, 110 bp, synthetic construct
  source 1..110: mol_type = other DNA
aacactcattattgaaagtacagcatgcactttctacacaatattctgatgaggagaacaattcagaaaagtggtccttattatgcccacttacaaatgaaaaagttgag

SEQ ID NO: 1936 - DNA, 110 bp, synthetic construct
  source 1..110: mol_type = other DNA
gaaatgtttattgtggagtcatgcaagaatgcatagctcatgctcaaaaaatctgcactcccctatggttttcagggaaacgtttttaaaggcaaacttgctttggagtg

SEQ ID NO: 1937 - DNA, 110 bp, synthetic construct
  source 1..110: mol_type = other DNA
ctgttggtaagaataaattgagtcctgtttttttcccattaaacttctattttgcaatgaaagtgactgcaaaagatcagagccatagggagttcccatcgtggcttagt

SEQ ID NO: 1938 - DNA, 110 bp, synthetic construct; identical to SEQ ID NO: 1937
  source 1..110: mol_type = other DNA

SEQ ID NO: 1939 - DNA, 110 bp, synthetic construct; identical to SEQ ID NO: 1937
  source 1..110: mol_type = other DNA

SEQ ID NO: 1940 - DNA, 110 bp, synthetic construct; identical to SEQ ID NO: 1937
  source 1..110: mol_type = other DNA

SEQ ID NO: 1941 - DNA, 110 bp, synthetic construct
  source 1..110: mol_type = other DNA
gccacctgagcaaccagtttggttaagtggcagcctttatacctgccattcaaatgactccaacaaacatcactgtaattgctagtatggacttgacctcaaaaaggggg

SEQ ID NO: 1942 - DNA, 110 bp, synthetic construct
  source 1..110: mol_type = other DNA
gactccaacaaacatcactgtaattgctagtatggacttgacctcaaaaagggggtagcctgaggattatctggtgtattgtcaatcaactctgcattgttgagccactc

SEQ ID NO: 1943 - DNA, 110 bp, synthetic construct
  source 1..110: mol_type = other DNA
acgaagaacaacacgttccaaatttagaaacttctgtataatttagagtttaaaactactaggtagctttcgtctcaggtgtctggacttaaaaccaacttgaatataaa

SEQ ID NO: 1944 - DNA, 110 bp, synthetic construct
  source 1..110: mol_type = other DNA
ggagacgggctataaatgtgcctcatttagtttctgatatgttgcagcaagatctaagtattagaatgagattttatttctgcaagttacacattagcatttattattta

SEQ ID NO: 1945 - DNA, 110 bp, synthetic construct
  source 1..110: mol_type = other DNA
tacaccttctaagaacaggggaaaggaacagctttgcccaccaccagctccaacaccagttgctcctcaagcagccaagagtagtatcttgctttgcatgacatccttct

SEQ ID NO: 1946 - DNA, 110 bp, synthetic construct
  source 1..110: mol_type = other DNA
gattccttaaaacaagctactgaatgacaggaaaattaaaaactgtatctttgttcaaattaagaaatccagagattttggatatgccatatcaatgaaaaatgagctgc

SEQ ID NO: 1947 - DNA, 110 bp, synthetic construct
  source 1..110: mol_type = other DNA
gcaaacaagacttcatctagaatttttaaatgcagatttctaggagcaacttttctttcagctgaggttgggataaattacatttgatactgtattgtggatgcagggta

SEQ ID NO: 1948 - DNA, 110 bp, synthetic construct
  source 1..110: mol_type = other DNA
tttcagctgaggttgggataaattacatttgatactgtattgtggatgcagggtaaccatggtaaaatgtgggaggttaggcattctgtcagtcactgatttactgcttc

SEQ ID NO: 1949 - DNA, 110 bp, synthetic construct; identical to SEQ ID NO: 1947
  source 1..110: mol_type = other DNA

SEQ ID NO: 1950 - DNA, 110 bp, synthetic construct; identical to SEQ ID NO: 1948
  source 1..110: mol_type = other DNA

SEQ ID NO: 1951 - DNA, 110 bp, synthetic construct
  source 1..110: mol_type = other DNA
aggggcctccttcagctttggccttcacattgacgcatgctggatagtagcccgcgacatgaggactgttttatttatggtagcatatcctgtcctgttcttactgatac

SEQ ID NO: 1952 - DNA, 110 bp, synthetic construct
  source 1..110: mol_type = other DNA
agtgacataaaacaacacttatttattacctcatagtttctttaggtcatgtcgtagctggatcccctgactcaggtcttacaaggatgaaatcaagatgtcagctgggg

SEQ ID NO: 1953 - DNA, 110 bp, synthetic construct
  source 1..110: mol_type = other DNA
aatgggactagtaagggtctctgatttagagaattcaggaaggatcaggatttcttctgaattttgagcagcttcggttgcaggaagacttacccggaggagttggtttg

SEQ ID NO: 1954 - DNA, 110 bp, synthetic construct
  source 1..110: mol_type = other DNA
tctgaattttgagcagcttcggttgcaggaagacttacccggaggagttggtttggattgagatgtctgagtgtctgtaccccgatcaaattatcacacaagaatggatc

SEQ ID NO: 1955 - DNA, 110 bp, synthetic construct
  source 1..110: mol_type = other DNA
gaaatttcagggaggaattccagaaaggagataatatgcagaaaatacctccaaaatctgcatcccctttaaactttgctgagttctaggccatacatgtatccaatgga

SEQ ID NO: 1956 - DNA, 110 bp, synthetic construct
  source 1..110: mol_type = other DNA
atctgcatcccctttaaactttgctgagttctaggccatacatgtatccaatggaaagctgcaaagaagggcaaatggatttgcaaaatgaataattttcaacctcatat

SEQ ID NO: 1957 - DNA, 110 bp, synthetic construct
  source 1..110: mol_type = other DNA
cacacaccccagatgtctctctttgtgtctaaacatcttaattttctaaggatcccagtcagattgaattagggcccacctaacagcttcatttttactaaatcacttct

SEQ ID NO: 1958 - DNA, 110 bp, synthetic construct
  source 1..110: mol_type = other DNA
cattcatggccaaatgtcctctgagaagtaactgtggtaatgcccctccttaataactactgccttatccaattataagctgagttaatttaaagctggtttagtccttg

SEQ ID NO: 1959 - DNA, 110 bp, synthetic construct
  source 1..110: mol_type = other DNA
gcagttagattaagaatccatgggtttaaatcctgactcctgtatgtgcaagtagtatgatcatggggtagtattttaaactttctgtactttacttccccaaattaatt

SEQ ID NO: 1960 - DNA, 110 bp, synthetic construct
  source 1..110: mol_type = other DNA
actcaatatactattgaaatctgagtatattgaactattttttatgctatgatgaataaagctagctgtgaggagctgccaaagaattctggaactgagatagctgctag

SEQ ID NO: 1961 - DNA, 110 bp, synthetic construct
  source 1..110: mol_type = other DNA
gatcccatatttgcttcaggcatcctttcctattcttatcctccactgtcttattgatttagccaagtctaagctgccactggtcaaaagatgcaacattattttatgct

SEQ ID NO: 1962 - DNA, 110 bp, synthetic construct
  source 1..110: mol_type = other DNA
atattaatattctataaaaccatgcaaaggcatacatgaattttaaatgctcactgcaaagtgaaaacgtccagtcagaaaaggctgtattctacttcttcagaaaaggc

SEQ ID NO: 1963 - DNA, 110 bp, synthetic construct
  source 1..110: mol_type = other DNA
gaagaatgtggggtgaatatggagtcatgtgataatgagccatagacacatctataggttcaatgatttttttcctttaaaattacaaatgattcaagagtaatacaaat

SEQ ID NO: 1964 - DNA, 110 bp, synthetic construct
  source 1..110: mol_type = other DNA
ctgaaaataccttctacctgtaaggaatatctgttgggaataaattcttctcacccagagccattgcaccattgcagcttttgggaagcacagtctttactatcccctca

SEQ ID NO: 1965 - DNA, 110 bp, synthetic construct
  source 1..110: mol_type = other DNA
tattgggaaagagagttgtagcttcagactgatgtagaaaaattacagttcttcctaaactagatccacttatctattatctaaccaatacgttcttacctaccagcctt

SEQ ID NO: 1966 - DNA, 110 bp, synthetic construct
  source 1..110: mol_type = other DNA
taaactagatccacttatctattatctaaccaatacgttcttacctaccagccttttaggtggtattcgcatttcctgtctaagacttttataacttcaagcaattgcat

SEQ ID NO: 1967 - DNA, 110 bp, synthetic construct
  source 1..110: mol_type = other DNA
ctctctccctcactccttgcttcctttcctgtagttaggaaataggagttggtgttttagttccaatgtgttttcccttcctctagaaatagctctgtctgattgtatat

SEQ ID NO: 1968 - DNA, 110 bp, synthetic construct
  source 1..110: mol_type = other DNA
tttagttccaatgtgttttcccttcctctagaaatagctctgtctgattgtatatttaaacacccatatgctatacacatacacagagaatcatgcagaaataaattcat

SEQ ID NO: 1969 - DNA, 110 bp, synthetic construct
  source 1..110: mol_type = other DNA
tgccgcttcacccctgcagctgtttcttgtagtcccctgatgcattgcgtgccctgagaagcagcttcagtcaactttcacagccagagagaacctgcctccaatctgtg

SEQ ID NO: 1970 - DNA, 110 bp, synthetic construct
  source 1..110: mol_type = other DNA
gagaagcagcttcagtcaactttcacagccagagagaacctgcctccaatctgtgtctaagattctggattctggattctcacctcccctttctccctccaactgaatgg

SEQ ID NO: 1971 - DNA, 110 bp, synthetic construct
  source 1..110: mol_type = other DNA
tatacccagcatcagcccagatcccatttatcaccctcttcaggtttacacagcccagtgtaagtacatcccttaacttgggactgtggagcaagaatgaggatcagctt

SEQ ID NO: 1972 - DNA, 110 bp, synthetic construct
  source 1..110: mol_type = other DNA
cagtgtaagtacatcccttaacttgggactgtggagcaagaatgaggatcagcttcccagatgtctcaggcagcaatgtttataggtctattaataagctctataatgca

SEQ ID NO: 1973 - DNA, 110 bp, synthetic construct
  source 1..110: mol_type = other DNA
ccaagctccttacaattattcatatatttaaattttgtgacaattttataaagtaaataacatgtttttataagatacaggctgagggctgtggtttgggggaatgattc

SEQ ID NO: 1974 - DNA, 110 bp, synthetic construct; identical to SEQ ID NO: 1973
  source 1..110: mol_type = other DNA

SEQ ID NO: 1975 - DNA, 110 bp, synthetic construct
  source 1..110: mol_type = other DNA
taccccatggccctaaaaagctaaaaaggaaaaaatgaaaagaaaagaaaatcgtggcatatgaatatgtaactgaacatcttggagaaatgttctcttcaaaatttgta

SEQ ID NO: 1976 - DNA, 110 bp, synthetic construct
  source 1..110: mol_type = other DNA
agtgaagcctagattgtttttcttaatcaataagtggtcattatttacaagatacctgtaaacagtcatacattttttaaaacttctcttcacacctatgccctaaattg

SEQ ID NO: 1977 - DNA, 110 bp, synthetic construct
  source 1..110: mol_type = other DNA
cttaattaaattaaaagcttcaaagtttcacagacagtcaataagcacttaactaattaagcacttcactatgtgctaagcattaatgtgcttgctatgtatttggcaaa

SEQ ID NO: 1978 - DNA, 110 bp, synthetic construct; identical to SEQ ID NO: 1977
  source 1..110: mol_type = other DNA

SEQ ID NO: 1979 - DNA, 110 bp, synthetic construct
  source 1..110: mol_type = other DNA
taggactcagaatgacagacatatgaagcggaattgaacttggtccacaatacagagtagagctatcatagctagtccataaacctatgtgcaataaacaaatgtttgtc

SEQ ID NO: 1980 - DNA, 110 bp, synthetic construct
  source 1..110: mol_type = other DNA
tccctgctctatagtctgcaatatgcagctaggcagaaaactcaaaaaactgtggggctcagcatggtttttctccctctttaaaggcaaaatgccctactctggctgtt

SEQ ID NO: 1981 - DNA, 110 bp, synthetic construct
  source 1..110: mol_type = other DNA
ggtggcctgcatgtatactacatttattgagacattattatttcattttgtgaattccaaatgttcaactatagcttggcgaatttcataggccttctaatttgattctg

SEQ ID NO: 1982 - DNA, 110 bp, synthetic construct
  source 1..110: mol_type = other DNA
tccaaatgttcaactatagcttggcgaatttcataggccttctaatttgattctgtggatgctggaaaattggaaaattagcagcatattgtcagtatctaggttttagg

SEQ ID NO: 1983 - DNA, 110 bp, synthetic construct
  source 1..110: mol_type = other DNA
acaaaagaaatgccagagagcttaaacactgtaacagaaatgaagactacctctgataagcttattaacagattggaccaagcggaggaaagaatctgcactggaggcta

SEQ ID NO: 1984 - DNA, 110 bp, synthetic construct
  source 1..110: mol_type = other DNA
ataagcttattaacagattggaccaagcggaggaaagaatctgcactggaggctatctaaatagcaatccgctaacagcaggaaataaacagcaaaaagactaaggagaa

SEQ ID NO: 1985 - DNA, 110 bp, synthetic construct; identical to SEQ ID NO: 1983
  source 1..110: mol_type = other DNA

SEQ ID NO: 1986 - DNA, 110 bp, synthetic construct; identical to SEQ ID NO: 1984
  source 1..110: mol_type = other DNA

SEQ ID NO: 1987 - DNA, 110 bp, synthetic construct
  source 1..110: mol_type = other DNA
agtcattcatagggaggccccaccttgtgtgaactttgcctctggagcttgacaaggttcttgcagtgaaaacgagaaaaatccccttctgcttctcacacggagagggt

SEQ ID NO: 1988 - DNA, 110 bp, synthetic construct
  source 1..110: mol_type = other DNA
atcaacgtatagtagaatctcattgttgctttaatttgcacttttttataacaagtatattggagcatttttcatgtgcttcgggaacattcgtatagctttttacctat

SEQ ID NO: 1989 - DNA, 110 bp, synthetic construct
  source 1..110: mol_type = other DNA
tatattggagcatttttcatgtgcttcgggaacattcgtatagctttttacctatttaaaatgtggctgtgtcttgttatttaattgtaagtctatttttgcttacttcc

SEQ ID NO: 1990 - DNA, 110 bp, synthetic construct
  source 1..110: mol_type = other DNA
aaaagaatgagattacctcttatatctttagcctccagatgtttacctctctccccagtacactgttcagtgtggcaataccatagctgaaatcctactgtggagtgtct

SEQ ID NO: 1991 - DNA, 110 bp, synthetic construct
  source 1..110: mol_type = other DNA
tttaactactgactggtgcctttgtctcgacaatgggaccaatacagcacagatcactggactaatacccagtgctgctgataatcatgataaatgtatgctcagaggtt

SEQ ID NO: 1992 - DNA, 110 bp, synthetic construct
  source 1..110: mol_type = other DNA
actggactaatacccagtgctgctgataatcatgataaatgtatgctcagaggttcttgggtcagtcattcccaagacatgaatgtccatctaagtgtagtttcttctct

SEQ ID NO: 1993 - DNA, 110 bp, synthetic construct
  source 1..110: mol_type = other DNA
aaccccattttctaacacccgctgaacaaccagacctctagtgttaacacttctattgcgcagaggatgacataaagctcaaacccttctgatgatcaaggacctcatac

SEQ ID NO: 1994 - DNA, 110 bp, synthetic construct
  source 1..110: mol_type = other DNA
acagttaggatctgcttccatctgggtacctgttgcctagcccagggcctttcagtgctaacagatcatctttcaagtattgattagagaggaggatggcttaataattc

SEQ ID NO: 1995 - DNA, 110 bp, synthetic construct
  source 1..110: mol_type = other DNA
acaccacccaaaagccgtacaggccgcttggttgaaatggaaagaattcctccttccttcaggcataagggctcacactcttcgccagtaagggattcagctatggttcc

SEQ ID NO: 1996 - DNA, 110 bp, synthetic construct
  source 1..110: mol_type = other DNA
ccttcaggcataagggctcacactcttcgccagtaagggattcagctatggttccatcactttttaatgcttaaatgctattgccacagggtcactctaattccatgata

SEQ ID NO: 1997 - DNA, 110 bp, synthetic construct
  source 1..110: mol_type = other DNA
ggacaacaacagggggcacagagggcattaaagaataaaaaactatgggaaaatgtaaaggaaaggtaatgtagatttattctttggtacacattttattatttgaggca

SEQ ID NO: 1998 - DNA, 110 bp, synthetic construct
  source 1..110: mol_type = other DNA
ctgagagcctaccagctggttagctgaagtcactcactctgtgggcctttgcacaaggtgctaaagcaagtcttcctagagaaacctccaaatcaaaagatgtaagagaa

SEQ ID NO: 1999 - DNA, 110 bp, synthetic construct
  source 1..110: mol_type = other DNA
tccactcagtattcctccacaggagctgtccactggggagtgtactcagtaccgtcacctgtcacccatatgtgggcttacaaagtatattgttattggcactgcccctg

SEQ ID NO: 2000 - DNA, 110 bp, synthetic construct
  source 1..110: mol_type = other DNA
tcaggaagcacaggagtaataaagagggtggtagctccatagctagaaggggatataggcagccttctatctcctagactctaggagaaaggagaagattaatgtctatc

SEQ ID NO: 2001 - DNA, 110 bp, synthetic construct
  source 1..110: mol_type = other DNA
gcatgtggaactgaatgtgccaattatctagaaaataacagtgtattacgtagaaaaccaagccattatgaatctggatagatatacaacatttaaaactggctccatta

SEQ ID NO: 2002 - DNA, 110 bp, synthetic construct
  source 1..110: mol_type = other DNA
gcccaggtgaaagttttttgcttatgctccaaatagaaaggaactaggtcaaaaagcatgtatcctattagttattgtatatcattaagcacagctgctttggggagtaa

SEQ ID NO: 2003 - DNA, 110 bp, synthetic construct
  source 1..110: mol_type = other DNA
gcatgtatcctattagttattgtatatcattaagcacagctgctttggggagtaattgttttagtgaaaaaaggctagttcttctaggaaaaaagattcctgagtttagt

SEQ ID NO: 2004 - DNA, 110 bp, synthetic construct
  source 1..110: mol_type = other DNA
cgcaaaacaaaaatcctcatggagattagggtgtagctcccattgagacagtcctaggaaatcacttgatttatgttgagtgaaaaaaacgcatattatggccactaata

SEQ ID NO: 2005 - DNA, 110 bp, synthetic construct
  source 1..110: mol_type = other DNA
ctctcttaaggaacaaaataaacacatatttggctgctagtgaaaactaccagaggacaaatgggataacccaaatgtactagcaaatttgtaactgacacaaagaaaaa

SEQ ID NO: 2006 - DNA, 110 bp, synthetic construct
  source 1..110: mol_type = other DNA
atgtagaccccagacctgctggaaccagaaggttgatgaccctgactcccaacgtccaggagctgatcacaccctgcgccttgaacattctaagactcctcgcttactcc

SEQ ID NO: 2007 - DNA, 110 bp, synthetic construct
  source 1..110: mol_type = other DNA
ctggtgagccaatggggtagaaaccggagttgaaattcaggggcatgcagcccttgctgcctctagctggtatcgtctagcgggagcaatgattactcccggttacttat

SEQ ID NO: 2008 - DNA, 110 bp, synthetic construct
  source 1..110: mol_type = other DNA
gaaaccacgctatcactctgcttgagcaccccaggaaggcagagcttcccagctggtagaataggaattgaatttgaactgtggaaaacatagagataagcttttaattt

SEQ ID NO: 2009 - DNA, 110 bp, synthetic construct
  source 1..110: mol_type = other DNA
gtagaataggaattgaatttgaactgtggaaaacatagagataagcttttaattttcttgcatactggagtttacagtaaggttcctacctactccctaaatgatgtctg

SEQ ID NO: 2010 - DNA, 110 bp, synthetic construct
  source 1..110: mol_type = other DNA
ttaaccgctgagctgccatgggaactcctaattcacctttaaaatgtttattccactaaactttgtagaatggaccagattataattagataattcctaaggtaagctga

SEQ ID NO: 2011 - DNA, 110 bp, synthetic construct
  source 1..110: mol_type = other DNA
atgcatcctgcatttcttgatctcttttgttatttagacatttgttttgtccactgttgatgcctcctctgagctaagctcctccagtttgatgaatgactagatgtgtc

SEQ ID NO: 2012 - DNA, 110 bp, synthetic construct
  source 1..110: mol_type = other DNA
caacagcaggtcttcaccatttctagcatagacaaaggtgacttaacgatgtacgcaaggcctttcaaaggaagccaagaaatactgaaagaactattctgaaagcaaaa

SEQ ID NO: 2013 - DNA, 110 bp, synthetic construct
  source 1..110: mol_type = other DNA
ttcttccttctcctgattattttaccttgtagtgctgagacagctagctctagggttcttccctcatgagcgtcttagagatattaggtaattacttgtagcaaaatctt

SEQ ID NO: 2014 - DNA, 110 bp, synthetic construct
  source 1..110: mol_type = other DNA
ggaagagagggaggttggaaagctcagggagagagttaactaggaagaaagtcaatgatgttgaaaaaaactgatctgaatcagtatctgcatgtatgaatttggctgtc

SEQ ID NO: 2015 - DNA, 110 bp, synthetic construct
  source 1..110: mol_type = other DNA
tagttcctgctgtttctcagtgactattctttcatcatctcacagacttttcctggcatactgtaactagctatcagtctgtctttttctctcatctccttttgaaagaa

SEQ ID NO: 2016 - DNA, 110 bp, synthetic construct
  source 1..110: mol_type = other DNA
gaaactaggaggagaatcaagccagctacataattatttggtcaatggttttgtaactttgtagtcaggcagcagtacagacaggtctttttcctttgcgaaccctgaga

SEQ ID NO: 2017 - DNA, 110 bp, synthetic construct
  source 1..110: mol_type = other DNA
cacatggtaaaataagcaatgtgagcaaaagttaagtatttgtttgaagttactgaaaatttttttgttacttcacataactcaatctagcctagagtttacagacacct

SEQ ID NO: 2018 - DNA, 110 bp, synthetic construct
  source 1..110: mol_type = other DNA
aaaatttttttgttacttcacataactcaatctagcctagagtttacagacacctgtaatagctgatattgaatagtttctgtgggccaataacgatgtctattaattct

SEQ ID NO: 2019 - DNA, 110 bp, synthetic construct
  source 1..110: mol_type = other DNA
tcattttgcatgtgagaatcaggcttattaaataactgtcccagtgtcacaaagataggaataaatgcaagtgggatacgaggccaactccattagaatctaaaaaccat

SEQ ID NO: 2020 - DNA, 110 bp, synthetic construct
  source 1..110: mol_type = other DNA
ggaataatggacatgagaataaaagggccatggtagatgagatggaatctatggatatgcccaaaaatatgttccctggatcaccaagacccatctactcaattgctgct

SEQ ID NO: 2021 - DNA, 110 bp, synthetic construct
  source 1..110: mol_type = other DNA
aagaggtggaaaacacctctcctccccttttaaaattttgcttctggttgttgttgtttgagggtttaatgcttgaagctgctgtaaccatctcataatatgaggggaca

SEQ ID NO: 2022 - DNA, 110 bp, synthetic construct
  source 1..110: mol_type = other DNA
atttactttaaaatgtaaactattttttaggtttatagcaaaattgagctaaagtgcagagagactcaatagacttcctgcccccagccatgtcgggcttccctggctat

SEQ ID NO: 2023 - DNA, 110 bp, synthetic construct
  source 1..110: mol_type = other DNA
tccaggtccttaatggagaagaaatatttgacattgttgccattcagacatacagatttgggctccaatgtatttacataatcttcatatgtgattctaggggtcttcat

SEQ ID NO: 2024 - DNA, 110 bp, synthetic construct
  source 1..110: mol_type = other DNA
atttgggctccaatgtatttacataatcttcatatgtgattctaggggtcttcattgggctatattgagaatcttgtctcaaattatgagattaataaattctgaaaagg

SEQ ID NO: 2025 - DNA, 110 bp, synthetic construct
  source 1..110: mol_type = other DNA
tattattttgtaaggtttccgtaatgcacatttatgatataaaaagtgccttgcatactgcttcatcggaaggggacctaatttagattaacctgtgacttcaacagcag

SEQ ID NO: 2026 - DNA, 110 bp, synthetic construct
  source 1..110: mol_type = other DNA
gcctgggaggacttttattttgtccttactctcagagatgctgacgaaagtaatttcttacccccaaccccatacccaattacgaattgaaaaaaaataacactgatcta

SEQ ID NO: 2027 - DNA, 110 bp, synthetic construct
  source 1..110: mol_type = other DNA
tcttacccccaaccccatacccaattacgaattgaaaaaaaataacactgatctactgaagatttaataggaagtctaaacttggcattcctgaaaataaatttgaaaat

SEQ ID NO: 2028 - DNA, 110 bp, synthetic construct; identical to SEQ ID NO: 2026
  source 1..110: mol_type = other DNA

SEQ ID NO: 2029 - DNA, 110 bp, synthetic construct; identical to SEQ ID NO: 2027
  source 1..110: mol_type = other DNA

SEQ ID NO: 2030 - DNA, 110 bp, synthetic construct
  source 1..110: mol_type = other DNA
atagtacttgaaatgatctgagagcataatgtaataatatgttctattttgtaccttttgagtatgaggtaagtgtgaaagtaataaggtgcccacaccacagataagtg

SEQ ID NO: 2031 - DNA, 110 bp, synthetic construct
  source 1..110: mol_type = other DNA
tagatcgaaggttttcagtttttaagctttcatcaaataaaatccttaacagacgtctaatctatggcacagacagtgcttctctgaagtaggttagaagcctagatacc

SEQ ID NO: 2032 - DNA, 110 bp, synthetic construct
  source 1..110: mol_type = other DNA
tacttttattataatacatttgtcacattggtttgtttatattttcgttatgctcattatactgtgagctttttgaggggcactaaccgtatcttagtcatgtttagcct

SEQ ID NO: 2033 - DNA, 110 bp, synthetic construct
  source 1..110: mol_type = other DNA
tagtatatggctgccaaagtgagcacccagtttatattttaaatttataaattgatagtgtggtatcagagtgttctaaaaggcttcttaataaaatgtaccatagaaga

SEQ ID NO: 2034 - DNA, 110 bp, synthetic construct
  source 1..110: mol_type = other DNA
tattgttttcttaaactatacttttataattagaggtagagttgagagatgcttccagtttcagtcccaacatatgatgaaacgttactactctcatcttgacaacagca

SEQ ID NO: 2035 - DNA, 110 bp, synthetic construct
  source 1..110: mol_type = other DNA
cagtttcagtcccaacatatgatgaaacgttactactctcatcttgacaacagcaaaagagcttgacgacccaaaagtcagcaacttttactggacccatcagagggctg

SEQ ID NO: 2036 - DNA, 110 bp, synthetic construct
  source 1..110: mol_type = other DNA
gggtgtgtcatcaagctcccctgaaaacagtacttcagatctcaagttactccaagtaatagctacctaagtttgtgttacctctcctaataaaatataatctcaaaggc

SEQ ID NO: 2037 - DNA, 110 bp, synthetic construct
  source 1..110: mol_type = other DNA
cagagggtgtgtgccttgctcctcgctgaaatgtgcatttctacacggagagataaaggagctggtttttactcccaagccctttgctacttaaataaagttattggctg

SEQ ID NO: 2038 - DNA, 110 bp, synthetic construct
  source 1..110: mol_type = other DNA
ataactcatattttgggggttgatctggagttggggataaagaactagaattcgaagacctgagcttaagccctatttctgtttatttacatggcattaaggatgattag

SEQ ID NO: 2039 - DNA, 110 bp, synthetic construct
  source 1..110: mol_type = other DNA
tatttggttttgcttctagaaacagagccaatataatacctgaaacccctgatgtcttctcccaccttgaaagttgattttattctgaagcattatgctagattcaggct

SEQ ID NO: 2040 - DNA, 110 bp, synthetic construct
  source 1..110: mol_type = other DNA
tatctgcttaacagttgccaaaaaggaaaggggaaggacaatctttcttttcccccttgggttttacagaaatggtcctggcgagctgtggtcctaggtccccgcaaacc

SEQ ID NO: 2041 - DNA, 110 bp, synthetic construct
  source 1..110: mol_type = other DNA
cttgggttttacagaaatggtcctggcgagctgtggtcctaggtccccgcaaaccaggactgacacacatgcacacttttgaggtcaggaatcagtagggacacagagca

SEQ ID NO: 2042 - DNA, 110 bp, synthetic construct
  source 1..110: mol_type = other DNA
ctaagcctgatgctacacaagtccagctacgctgggcagaggttcaaaaggcaatggcaacagcaacattctagggaccaactcaagccctcatgctgagcccatcctct

SEQ ID NO: 2043 - DNA, 110 bp, synthetic construct
  source 1..110: mol_type = other DNA
agttcaaggcaatagattccttgaagcacctaccatgatctgggcattgcactaagcactaagaacagatataagaatgacagaacagagttccttctttcacaaagctc

SEQ ID NO: 2044 - DNA, 110 bp, synthetic construct
  source 1..110: mol_type = other DNA
gcactaagaacagatataagaatgacagaacagagttccttctttcacaaagctcagggcaaattgtggaaaagaacagaatgctcaagggcagaaattaaagaagaaaa

SEQ ID NO: 2045 - DNA, 110 bp, synthetic construct
  source 1..110: mol_type = other DNA
aaaccacactctttgttttaacccttaaaccatccacccctacagtgtgttgtacctccataaaagctgttccatctttccagttgctcagaccaaaaactttggagttc

SEQ ID NO: 2046 - DNA, 110 bp, synthetic construct
  source 1..110: mol_type = other DNA
cttccgtttcccctctattgttcccattaccacctcatcacttacagggaagactgctgttagcttatcacatcttcaatttcctacagaattagatgatagcgatattt

SEQ ID NO: 2047 - DNA, 110 bp, synthetic construct
  source 1..110: mol_type = other DNA
aaaacaaggattataccagcagtcttcagcttgagttgagctgtactgtggatttgcttgctggtagcctgggaggtattgcatgggagttgagaggacaaggaagcagt

SEQ ID NO: 2048 - DNA, 110 bp, synthetic construct
  source 1..110: mol_type = other DNA
atcatttaacatagactatcaaagacctgatgagtgggagacagaggaaaaaaggatcagtgatccagctcaaactaagaagagcttcagaactggggcagggtagaacc

SEQ ID NO: 2049 - DNA, 110 bp, synthetic construct
  source 1..110: mol_type = other DNA
tccaggtcacaccagctggtatggccaagctgggattccagcccagttccatgcggacccaaagtctgctctgagtggtgttctaaaccaccactctgtaatgcagcaat

SEQ ID NO: 2050 - DNA, 110 bp, synthetic construct
  source 1..110: mol_type = other DNA
ctcaagcactccttaggctccatcttcactttccttagagagcagtttttggctctgagcttggtggcaagcacctctgcttcgtacagttcagtgtgagatggcaagga

SEQ ID NO: 2051 - DNA, 110 bp, synthetic construct
  source 1..110: mol_type = other DNA
tgagcttggtggcaagcacctctgcttcgtacagttcagtgtgagatggcaaggacagtgagggcagcctaaatgttctaaagcaggttttcaagatagaaacaaaaaaa

SEQ ID NO: 2052 - DNA, 110 bp, synthetic construct
  source 1..110: mol_type = other DNA
cagacatctgctacttctcccctcagccctgacacaatccctgcagcctaccttccaagctccaacactaagaggaaaaaaaacaagcaaagtgtgaaggggggaagttc

SEQ ID NO: 2053 - DNA, 110 bp, synthetic construct
  source 1..110: mol_type = other DNA
caagctccaacactaagaggaaaaaaaacaagcaaagtgtgaaggggggaagttctttagatcttggctactaatgtagtccttcaggttacctagactataatcctttt

SEQ ID NO: 2054 - DNA, 110 bp, synthetic construct
  source 1..110: mol_type = other DNA
tctgccctggcacagaatctggaacctccactctgtggcatcaggacaccctgagtcagctccacagcccttggaaaagaaaaatagccccactttgtgacaggcactgt

SEQ ID NO: 2055 - DNA, 110 bp, synthetic construct
  source 1..110: mol_type = other DNA
tgattcacccagcacagggttgtcttatccaaatcacatctttctggctcgcccacagcctgaaccaccacctctgctgtattgtatttggactggccctaaaagaagat

SEQ ID NO: 2056 - DNA, 110 bp, synthetic construct
  source 1..110: mol_type = other DNA
cagcctgaaccaccacctctgctgtattgtatttggactggccctaaaagaagatgatcccggagctcctactgtggctcagcggaaacgaatctcactagcatccatga

SEQ ID NO: 2057 - DNA, 110 bp, synthetic construct
  source 1..110: mol_type = other DNA
tgctgcgattatacacttgcatcattatcatgaaacctgaaaaaagtaaagccgtttttaaaaatgtgttcagctcttctgggcctcagggtaaatgctggcttgctcct

SEQ ID NO: 2058 - DNA, 110 bp, synthetic construct
  source 1..110: mol_type = other DNA
actagccctgacctctaggcgacccccttcttggctctcatggcaccttgaacttctccttcctgacacttgtcagggttgtactttaatatgtttgttgttacattgct

SEQ ID NO: 2059 - DNA, 110 bp, synthetic construct
  source 1..110: mol_type = other DNA
atccattacattcactgcatctctggagaccatcttgaaaagtttcccactgggtaaatttgaggtagtttgagctatttttatacattataacatgttgaaaaaaaatt

SEQ ID NO: 2060 - DNA, 110 bp, synthetic construct
  source 1..110: mol_type = other DNA
tgcatctctggagaccatcttgaaaagtttcccactgggtaaatttgaggtagtttgagctatttttatacattataacatgttgaaaaaaaattttgtgcatccattat

SEQ ID NO: 2061 - DNA, 110 bp, synthetic construct
  source 1..110: mol_type = other DNA
ctcatgcaactctccatattaaaaaaggattcctacctcaatggtacaaatactttgtaaccttgtatagctcatcttttttttcttcatttttggtcgcttctcggcat

SEQ ID NO: 2062 - DNA, 110 bp, synthetic construct
  source 1..110: mol_type = other DNA
tgtaaccttgtatagctcatcttttttttcttcatttttggtcgcttctcggcatatggagcttccaggccacggatcaaatctgagctgcagtctcaccccaagccaca

SEQ ID NO: 2063 - DNA, 110 bp, synthetic construct; identical to SEQ ID NO: 2061
  source 1..110: mol_type = other DNA

SEQ ID NO: 2064 - DNA, 110 bp, synthetic construct
  source 1..110: mol_type = other DNA
acaaatactttgtaaccttgtatagctcatcttttttttcttcatttttggtcgcttctcggcatatggagcttccaggccacggatcaaatctgagctgcagtctcacc

SEQ ID NO: 2065 - DNA, 110 bp, synthetic construct
  source 1..110: mol_type = other DNA
gtgtttcggcgccatttttgttgtgggcaaaaccacctccactatctagtcaacgccgtacaagtgtctggacactcccctacgttactttttaatgtagccaccgacat

SEQ ID NO: 2066 - DNA, 110 bp, synthetic construct
  source 1..110: mol_type = other DNA
aaacagcaggacataggacacatatggagtttgagaaggaagaacattctcaagttatagtggataagctgtggcaattatgaaatactccttagaaccaaacaataaat

SEQ ID NO: 2067 - DNA, 110 bp, synthetic construct
  source 1..110: mol_type = other DNA
tatagtggataagctgtggcaattatgaaatactccttagaaccaaacaataaatatcttaaaggtagtaaagcaaagcagttaagagtatgggaggagttcccgtcgtg

SEQ ID NO: 2068 - DNA, 110 bp, synthetic construct
  source 1..110: mol_type = other DNA
ttttggtaatcccgtggcttcagctggactaaattgcccctcacttgaaattccaccttagttatctgagaggactacttgctttatgcaaatgcacaagtaaagtactt

SEQ ID NO: 2069 - DNA, 110 bp, synthetic construct
  source 1..110: mol_type = other DNA
ggtgtttgttggattctcaggtattggttctttagtgattctggtcaggttacctgccatgcagagcaagctgggtaaaccctcgtggtgacatccaggcctttttgcag

SEQ ID NO: 2070 - DNA, 110 bp, synthetic construct
  source 1..110: mol_type = other DNA
aatatcttttagacctggtttgatttcttggaggcctagtatctgcggagagttaattgaagtgaagcattccaccattcttaatctagtgcctgactttttttcaggtc

SEQ ID NO: 2071 - DNA, 110 bp, synthetic construct
  source 1..110: mol_type = other DNA
attgaagtgaagcattccaccattcttaatctagtgcctgactttttttcaggtctgtggagggaggcttgtcagacaaattcccggaatgttaggtcatgataaagaat

SEQ ID NO: 2072 - DNA, 110 bp, synthetic construct
  source 1..110: mol_type = other DNA
accaatctcaatatttggattattttagaaaatgtagaaatacatattaaaaatatgtccttgtgttctggtctactcttctcttgccccaccctttccaatctcttttt

SEQ ID NO: 2073 - DNA, 110 bp, synthetic construct
  source 1..110: mol_type = other DNA
tgagaaattaatgtattatttatgttagaccttttgaatattggaagtagctcatgcagccctatatcttcacttctgctcctgtgagcttttggggaaccaacattgca

SEQ ID NO: 2074 - DNA, 110 bp, synthetic construct
  source 1..110: mol_type = other DNA
agaaattcctttttacaaatctgtgcagaagtggccaggcaaattctgttccagtgcagaaaataacttcagtgtatcaaaaatgataaaggttattagcttagactgga

SEQ ID NO: 2075 - DNA, 110 bp, synthetic construct
  source 1..110: mol_type = other DNA
gaagatcaaaacagactgtagtcaattttcagaccaatcaattgagtctctttgggtataaatgggcaatatgatagctagttgagagttacaaagctacagaataattt

SEQ ID NO: 2076 - DNA, 110 bp, synthetic construct
  source 1..110: mol_type = other DNA
ctcaaaatacttaggttgttaaatacatcttatctgtctgctacaaagtgcataggggaaccagctctgattgtttaggaataaagtgggataagacttcctgagatgat

SEQ ID NO: 2077 - DNA, 110 bp, synthetic construct
  source 1..110: mol_type = other DNA
atgcaggagctccgagcgcgctcccactttctgagctgaggctgctgtttctctgaaaaccattctgcccttcttttcccactgtgtttccgttttctttgctaagtatg

SEQ ID NO: 2078 - DNA, 110 bp, synthetic construct
  source 1..110: mol_type = other DNA
agcttcctccaggccttgccgagtgggcctctgtggccagattggatttgacattgcagctcagtggtgagttgggcaactactgagtgaagggctgagcttagattatt

SEQ ID NO: 2079 - DNA, 110 bp, synthetic construct
  source 1..110: mol_type = other DNA
ttaaagggctgttttgactgaaatgtttcaggttaaagagcaagacattaatatcggggagagaagtacattgttaagctggatttgccagctctttcctgttggccaaa

SEQ ID NO: 2080 - DNA, 110 bp, synthetic construct
  source 1..110: mol_type = other DNA
catagtgaagcctggcagaggggacattggtggtggagactggatggtggggtatattccagtggagcttcagggactgaagggggattaccgagttgggaacatgctgc

SEQ ID NO: 2081 - DNA, 110 bp, synthetic construct
  source 1..110: mol_type = other DNA
atatgctttaaatttttcagaatgaggtaaagaatgttcttgaaatcaggccggaaacaaacctctatccttacatagcatttgcctttaaagagcacacattttaacca

SEQ ID NO: 2082 - DNA, 110 bp, synthetic construct
  source 1..110: mol_type = other DNA
actcttacatattgctctttttcatcctcatggccttgagagatgggtactatgtagtcatgaagaaatagacaatgaagacttcatagtcagcaaaactaattaaccag

SEQ ID NO: 2083 - DNA, 110 bp, synthetic construct
  source 1..110: mol_type = other DNA
agtcatgaagaaatagacaatgaagacttcatagtcagcaaaactaattaaccagagtctctacatccctgctaagaaatcacggttaaaaaaaaaaagtctaattgtga

SEQ ID NO: 2084 - DNA, 110 bp, synthetic construct
  source 1..110: mol_type = other DNA
tgactcctgatcaatctgtaaatgttattgccacttagcatcctgtctgaccctacaacagcaggcagagcatctcttttcctcgcccacccacactcacacctgcatgt

SEQ ID NO: 2085 - DNA, 110 bp, synthetic construct
  source 1..110: mol_type = other DNA
ccctcaggccagtcatcacactggcagtgtcgtattggagaatgagctagcccagcccgaagcccacgcagcagcgggctacaggagccaccactgactggactgatgga

SEQ ID NO: 2086 - DNA, 110 bp, synthetic construct
  source 1..110: mol_type = other DNA
tgggtggtggcagtgaattacaatttgtgcatgtctcattgcctaaataactctagaaagcagcattgctgtttgcattcatcagacatctgttagaaatttctagatat

SEQ ID NO: 2087 - DNA, 110 bp, synthetic construct
  source 1..110: mol_type = other DNA
gctcttgttcttaaccctggcggggggaaggggcagaatctgcagctctgagttaactctaggaatctatccaagttaccgacctgttaaagacgacgctttacacaccc

SEQ ID NO: 2088 - DNA, 110 bp, synthetic construct
  source 1..110: mol_type = other DNA
gctcttttgaagtaaataaatgtcttctaatgagcttctaaatgacagagaggaggaggcaaagctaacctccacatgctatgggcatcagaaacatggtaaagctacaa

SEQ ID NO: 2089 - DNA, 110 bp, synthetic construct
  source 1..110: mol_type = other DNA
gaggcaaagctaacctccacatgctatgggcatcagaaacatggtaaagctacaatttagcactaatcttaacagcttatgaatgccagaaaatgtgtcaaactaaagag

SEQ ID NO: 2090 - DNA, 110 bp, synthetic construct
  source 1..110: mol_type = other DNA
aaccttctagtaatgccagtgctactactgattatggttattatcattatttttaatatcacttattaagctctatgccataataggaactccatagagcagtttacata

SEQ ID NO: 2091 - DNA, 110 bp, synthetic construct
  source 1..110: mol_type = other DNA
atatcacttattaagctctatgccataataggaactccatagagcagtttacataataacatcttgcttaatcttcctaaggacttcaggagaccggtgtaatgtcttta

SEQ ID NO: 2092 - DNA, 110 bp, synthetic construct
  source 1..110: mol_type = other DNA
gaagaagcaaaaactactcaagaaatataaatatcctaagaagctctatacaagaataactactaaaggctaaaagtacctgaccgaatccttttctgttatagcaaatt

SEQ ID NO: 2093 - DNA, 110 bp, synthetic construct
  source 1..110: mol_type = other DNA
atgacgggaactcctggagagcattttcatacattgaaaagcttttaaaatgcagaggaagctaatgaaagttacattataggattaattttctaaagtagcttaatttt

SEQ ID NO: 2094 - DNA, 110 bp, synthetic construct
  source 1..110: mol_type = other DNA
cactgctcctagtgagtccccatagtacaaatgtggatcaacttaattcagtgctaaaaactaggtccatccaataaagactggtaagacagaataaataatgttttaat

SEQ ID NO: 2095 - DNA, 110 bp, synthetic construct
  source 1..110: mol_type = other DNA
ttcctatcctacttcgttcattagagctgagtttctcctttgagggaaaataactttattgtaaaaaaaaatcataagagagaaagagtggacatctccagagatctgca

SEQ ID NO: 2096 - DNA, 110 bp, synthetic construct
  source 1..110: mol_type = other DNA
gtttctcaaagggtggtctggaatcttcaagatcctttcagaagctccatgaagccaaaattattttcgtaataactctaaaatatttctcagagttcccatcgtggctc

SEQ ID NO: 2097 - DNA, 110 bp, synthetic construct
  source 1..110: mol_type = other DNA
acagtagaaagccaatgacagagtcctaaggaagagatcagcaaagagctgtcatgaagaaagtggtatcatgagaaaagagaaactttcaaatgctatgctagagtcca

SEQ ID NO: 2098 - DNA, 110 bp, synthetic construct
  source 1..110: mol_type = other DNA
tgggactattagaaaattttgtaaagccttgaacttattcagaaacttcatgaaagggacagcttctgctccagacctatggatcagagtctacagattgtcattcttta

SEQ ID NO: 2099 - DNA, 110 bp, synthetic construct
  source 1..110: mol_type = other DNA
gagtggaaggtattatatagtgatttcagtcagagaaagaggcctgagcacctattggagtgtgaagataacaataagggagctcagaattcaattaacttgaatcattg

SEQ ID NO: 2100 - DNA, 110 bp, synthetic construct
  source 1..110: mol_type = other DNA
catttctgctgcactataaccaaaaactccctgaatatctttctctatttaatttatcatgtctttaaatttaaagaagatttcctgttgtctgtgctgcttattgtcca

SEQ ID NO: 2101 - DNA, 110 bp, synthetic construct
  source 1..110: mol_type = other DNA
gcagctttgcagaaaataaaacagtgatgggggcagcttgtgggtcacatatccgggatttagatttgattctaagtgttgagggagatgaggtgattcggtttttgttt

SEQ ID NO: 2102 - DNA, 110 bp, synthetic construct
  source 1..110: mol_type = other DNA
tttgcaactgtattttaataggagctagcatttttattcaaacttatgtaagtgtaatgatggcattttaaaccttagaaagctggtagggtaaggaaatttgtggggca

SEQ ID NO: 2103 - DNA, 110 bp, synthetic construct
  source 1..110: mol_type = other DNA
ttattactgattttttaaatgaaaatgattccccagatcccattctactggatgacagataagtccacattcctccagttccacagctaagagatcagacttgataaaaa

SEQ ID NO: 2104 - DNA, 110 bp, synthetic construct
  source 1..110: mol_type = other DNA
aaaattagagtttctagttatgttgctacagtacactcctgtcctgactgatacagccttggtgctacatgtagctcatatcactgttcacttttccttccacactgccc

SEQ ID NO: 2105 - DNA, 110 bp, synthetic construct
  source 1..110: mol_type = other DNA
cttttgtgctgggactgtggctcgctaccgacgctttggccgtttccaaggctggatttcctattgattttcctcctcctttgcttccccaggctcgcgcggccggacat

SEQ ID NO: 2106 - DNA, 110 bp, synthetic construct
  source 1..110: mol_type = other DNA
atttcctattgattttcctcctcctttgcttccccaggctcgcgcggccggacattgtgggtgtgcgtgctgaatttctcccggatgctccccgactaacatggatgtcc

SEQ ID NO: 2107 - DNA, 110 bp, synthetic construct
  source 1..110: mol_type = other DNA
agtggcatttgtaatttttattagtgtttctaggtttctgccaaaacactagcgtcttcagaggcaaaataaggatgggaaaagggcaagaccaagcaagaacaacacag

SEQ ID NO: 2108 - DNA, 110 bp, synthetic construct
  source 1..110: mol_type = other DNA
cagaaagtcacagaaatagcctgagaaaaggggacagaaataacactctccttccccaaaacacacagttgtgcactcatttaaaaaagagacataatactcaatagtta

SEQ ID NO: 2109 - DNA, 110 bp, synthetic construct
  source 1..110: mol_type = other DNA
aggcggagccaaggaagtcctggaggtcagttgattgttctgctgtgaaaacatactcatttaaaatacaagtgaatggagttcctgttttggctcagtgggttaaggac

SEQ ID NO: 2110 - DNA, 110 bp, synthetic construct
  source 1..110: mol_type = other DNA
ttaatctgctgagccacagcaggaactcccaagacagaaactcaatcaaacacttcaatatttttgcagctgattgtacaatatccataccatatggggtgaataaaaat

SEQ ID NO: 2111 - DNA, 110 bp, synthetic construct
  source 1..110: mol_type = other DNA
agatgtcacagagaaagcctgtcctaaacccagctcctaagcctggaataggtttccttcaacacaatcctgtatcactgtggtattcccatgaccctcccccatgagaa

SEQ ID NO: 2112 - DNA, 110 bp, synthetic construct
  source 1..110: mol_type = other DNA
catgaaaaattcctatattctgttagtcattaattcattttccaaatggttacgcatgcctactatatacagtgtgtgttaatagaccatgtggctgataagaaaacata

SEQ ID NO: 2113 - DNA, 110 bp, synthetic construct
  source 1..110: mol_type = other DNA
gaatacatttaggcttagagagaacaagttggccagagtcacatggttggtaaatggtagagctgggatttgaacatatgtttcttagaatccaaagcccttgttccata

SEQ ID NO: 2114 - DNA, 110 bp, synthetic construct
  source 1..110: mol_type = other DNA
ggttcattggataaactcagatgccatcagtgagttttgagtcaatgcatgctttataggacttccttcagtgaggcccccagatctagctcttgagctaagctcaagga

SEQ ID NO: 2115 - DNA, 110 bp, synthetic construct
  source 1..110: mol_type = other DNA
ataggacttccttcagtgaggcccccagatctagctcttgagctaagctcaaggataaagttaaatagagtatcttttaatttgaatttttttcttacaaatttatcaaa

SEQ ID NO: 2116 - DNA, 110 bp, synthetic construct
  source 1..110: mol_type = other DNA
tgtgatctagaaaatgaattttctagattatgcatttacttttattcttttctacaacattgttttgattgcattggtcaatggtagctgcaatattttagccctgtggc

SEQ ID NO: 2117 - DNA, 110 bp, synthetic construct
  source 1..110: mol_type = other DNA
aacattgttttgattgcattggtcaatggtagctgcaatattttagccctgtggctaatctcagttgattgaaaaaaataacaaagctgtatgatgatacatattaaatt

SEQ ID NO: 2118 - DNA, 110 bp, synthetic construct
  source 1..110: mol_type = other DNA
caaagggtgattgggactgatgctcacaaagtagtcaaggccaactcttgcagcgctgtgtaaattgaaattagattttattccatgtgtgctgaaagtctttagaagat

SEQ ID NO: 2119 - DNA, 110 bp, synthetic construct
  source 1..110: mol_type = other DNA
aattctgaattcatttatggacctttaaagtataaaatgtccttaatataggtatttccttagttgaaaataactagtattccattttgccttcctgactccaggtaaac

SEQ ID NO: 2120 - DNA, 110 bp, synthetic construct
  source 1..110: mol_type = other DNA
tgggaatcaggcttctgtgttcttaaaagtaagaaagtatagataaactgaaggtgtaagtatgtgtcttatagattgtataaataaagcaccaaacatgtaataaactc

SEQ ID NO: 2121 - DNA, 110 bp, synthetic construct
  source 1..110: mol_type = other DNA
ggaaattgtggtcaaagaatgacagcaaatcaagtgtgcaaaccatacagaatatgtgtgaccagctgatagtcaacgtttctaaatgaatttttttttttttttttaat

SEQ ID NO: 2122 - DNA, 110 bp, synthetic construct
  source 1..110: mol_type = other DNA
tgatgttggtcatcttttcagggcctcttggccatctgtatttcttctttggaaaatgtctagattttctgcccatttaaaaaatttttttttatattgagctgaatgag

SEQ ID NO: 2123 - DNA, 110 bp, synthetic construct
  source 1..110: mol_type = other DNA
ttgggggtctgtgcccatgatgaatattggtctaaggttttattttcttctgctctctttgtctgaatttgatatcaggatgttttcctcacaaaatgaattgagacgta

SEQ ID NO: 2124 - DNA, 110 bp, synthetic construct
  source 1..110: mol_type = other DNA
tctttgtctgaatttgatatcaggatgttttcctcacaaaatgaattgagacgtattctttcctttctcttttctggtgaagcttatatagaattggttccacatctgca

SEQ ID NO: 2125 - DNA, 110 bp, synthetic construct
  source 1..110: mol_type = other DNA
ttttttgcttctttcaattagcatactttttaaaaagacagatccagactctccatgctattactcatatttgaaccagataaattctcatcaatcctttctgcactttt

SEQ ID NO: 2126 - DNA, 110 bp, synthetic construct
  source 1..110: mol_type = other DNA
aagaaaccagattttatatgtatgccttacagtgatggtagagcactattattgcatttagtagatgttctacacataaagcatgaaatagttcatattcaaacactgta

SEQ ID NO: 2127 - DNA, 110 bp, synthetic construct
  source 1..110: mol_type = other DNA
tgacttatgcactgagtgacataaaatcctgcctgaagtgtttggagctcagaataggaaagtgttctgcaggaagttcaggctgcagcacaagtaactctgaatgaaat

SEQ ID NO: 2128 - DNA, 110 bp, synthetic construct
  source 1..110: mol_type = other DNA
tttcgcattagatagatgggtattgacatggtgtaccacccagattcctcttcaaagaaagacttgtcactcaattggaatctgaattccggtttgacccaggtgcagag

SEQ ID NO: 2129 - DNA, 110 bp, synthetic construct
  source 1..110: mol_type = other DNA
tttagttttaaatctctgctccaaactgcaatttttggaaaatgtgtgtggccacatttttgttgttgattctttatatcttctcctagtttttaagtcatcgaatccta

SEQ ID NO: 2130 - DNA, 110 bp, synthetic construct
  source 1..110: mol_type = other DNA
atttttgttgttgattctttatatcttctcctagtttttaagtcatcgaatcctaattgctggcatacctgctggctttttattgaatgccaggcattgcatatgaaaaa

SEQ ID NO: 2131 - DNA, 110 bp, synthetic construct
  source 1..110: mol_type = other DNA
tcccacagtccaacatccatttaaattaattgttcaattccaatctccatgtatagtggttcagaattgtcaacccctatccccacaggaaaatatcccatatcctgaaa

SEQ ID NO: 2132 - DNA, 110 bp, synthetic construct
  source 1..110: mol_type = other DNA
agccagacaggagagaaaacatgccttttactgaactaataattacttcagcctctatactgtttatacatcatagcttcttcatatacagttgccaatacttaattata

SEQ ID NO: 2133 - DNA, 110 bp, synthetic construct; identical to SEQ ID NO: 2132
  source 1..110: mol_type = other DNA

SEQ ID NO: 2134 - DNA, 110 bp, synthetic construct
  source 1..110: mol_type = other DNA
aaatatttaatattttattaaccaaattttattattattattttttaatggccgcatcttcaacaaatggaagtttctgagctggggtcaaattggcgctgcacttccac

SEQ ID NO: 2135 - DNA, 110 bp, synthetic construct
  source 1..110: mol_type = other DNA
tcaaaagaatttattctgcctgccacccctgtatcttcttatgtcaattcagcgcccaacagctgttgggcatcttgctgtcatctaccctatacacatctcctgaagca

SEQ ID NO: 2136 - DNA, 110 bp, synthetic construct
  source 1..110: mol_type = other DNA
gagacagtccaaacccatgagctaaaagagcactggagtaagcagttgtcttacattggaacctccatatgctgtgggtgcagcacccccgcccccgtcaaaaaagaaag

SEQ ID NO: 2137 - DNA, 110 bp, synthetic construct
  source 1..110: mol_type = other DNA
ctttgatgcttctatttagaccacccttaccatcactgttccattcagtgtttgcctactcacattctagtccagttccaaggtggtcacagcttggagattttctgcaa

SEQ ID NO: 2138 - DNA, 110 bp, synthetic construct
  source 1..110: mol_type = other DNA
ctactcacattctagtccagttccaaggtggtcacagcttggagattttctgcaaaccctttcaccttgaattaataaaggctttgctctcagctccgcttttactaaaa

SEQ ID NO: 2139 - DNA, 110 bp, synthetic construct; identical to SEQ ID NO: 2137
  source 1..110: mol_type = other DNA

SEQ ID NO: 2140 - DNA, 110 bp, synthetic construct; identical to SEQ ID NO: 2138
  source 1..110: mol_type = other DNA

SEQ ID NO: 2141 - DNA, 110 bp, synthetic construct
  source 1..110: mol_type = other DNA
ggccctaaaaagacaaagaaaattcaccaataaactaatatagattattgtagaagcattattttttgacatgagaaatttcaagctcctagtgtgtttattctgagagg

SEQ ID NO: 2142 - DNA, 110 bp, synthetic construct
  source 1..110: mol_type = other DNA
agaatactttaggggtacaaaaactaagatgtagcctatcttttcttatacacatcagctgtaaaaacaaaatatatacattaaaaaatgctggtaaattgccacagtgg

SEQ ID NO: 2143 - DNA, 110 bp, synthetic construct
  source 1..110: mol_type = other DNA
aagtatattaggtggaaactgcatggccttttatgacccaacctcagaagtaacatagcatactctatgggttgaagcactcataagctctcctagctttgagaaaagat

SEQ ID NO: 2144 - DNA, 110 bp, synthetic construct
  source 1..110: mol_type = other DNA
gggaaacacaactattgatagttcactatatctgcctgattatacatcttcctgtatttgcttatgtaccacttcatatttagttcctttagggctgaggttttatcttt

SEQ ID NO: 2145 - DNA, 110 bp, synthetic construct
  source 1..110: mol_type = other DNA
tagaaaaagataactaggtgccattagagtgggagccaactaaagcacctatttgaacactgagaactgtcatgctagctcccgacctcagaagaatgctttaaaaggca

SEQ ID NO: 2146 - DNA, 110 bp, synthetic construct
  source 1..110: mol_type = other DNA
aacactgagaactgtcatgctagctcccgacctcagaagaatgctttaaaaggcaaaggtctttatttcagaatttaaattgtggctcaaatgcaaatgtttcttttcct

SEQ ID NO: 2147 - DNA, 110 bp, synthetic construct
  source 1..110: mol_type = other DNA
ccagccccctttcccccatcaccatggtgcaccctgcaggaattcaggatggatacaaatgagctgccaagctctcagccattgcaaccaaccctgatggtgcatcctga

SEQ ID NO: 2148 - DNA, 110 bp, synthetic construct
  source 1..110: mol_type = other DNA
ttgtgccccttagtttcatccccaacacctttagaagaaaagctctgatacatgctgagaaaagtatgtaatcatcagaggaacagacataggaaatcgtctgggtagag

SEQ ID NO: 2149 - DNA, 110 bp, synthetic construct
  source 1..110: mol_type = other DNA
aaaatttggaaaattaagcctcctattcatgaggatctgggcctctgtgatcttattcagcagagtcccatcacagctataatattctagaatctgcattaaaaaataaa

SEQ ID NO: 2150 - DNA, 110 bp, synthetic construct
  source 1..110: mol_type = other DNA
cttggatgaagtcaattccttgcctttttctgacctagaaactgcctgccttttgcggcttgtgacaccttgtgccagcttcagaaccagttgtgtatcatcttcaaaca

SEQ ID NO: 2151 - DNA, 110 bp, synthetic construct
  source 1..110: mol_type = other DNA
tagaacattttgagcctgatgctgtacaaaagtttaaactctgtcaatcattccacagtcagattggccctactagaaaaagatttaatggaaaagaagtcataaatcaa

SEQ ID NO: 2152 - DNA, 110 bp, synthetic construct
  source 1..110: mol_type = other DNA
agggagagggaaagagaatagcaaaaggctatttacaagacacacacctaaaacagaatctttcattttcaatgtttttaaagtttggacaaaggatagagaaagattgg

SEQ ID NO: 2153 - DNA, 110 bp, synthetic construct
  source 1..110: mol_type = other DNA
taaggttttgagaaagattaatatgagtgagaccaaacgatgggttcgggggaatagagggataatagtaaggtcccatgatcaggtctcaagtccactgcaataaagcc

SEQ ID NO: 2154 - DNA, 110 bp, synthetic construct
  source 1..110: mol_type = other DNA
acagcttccagcagggtgcaaagaggccaagctggggaagagtttattaataaatgccagctgagcacaggtaaggtagagttagttaggtctggtctgtaaataagggc

SEQ ID NO: 2155 - DNA, 110 bp, synthetic construct
  source 1..110: mol_type = other DNA
gccagctgagcacaggtaaggtagagttagttaggtctggtctgtaaataagggctttcctaaaaccgtagtctctaataataattccatggtacaaggcagagtggagt

SEQ ID NO: 2156 - DNA, 110 bp, synthetic construct
  source 1..110: mol_type = other DNA
tattcagactctaggtagtgggaatataagcattggcatttgaataacacatcatccactaataacacatagtcacacccaagttcttgtatgcaaataatgacagcatt

SEQ ID NO: 2157 - DNA, 110 bp, synthetic construct
  source 1..110: mol_type = other DNA
ccactttttatttgcctctagcttcatgtttatttagaatcaaatgcactgtgggcaagccctagacaaacaccttcccctctgagcctcagaccttttctttcctcttt

SEQ ID NO: 2158 - DNA, 110 bp, synthetic construct
  source 1..110: mol_type = other DNA
aggtggaaaaatcacattcaaattttccatgctagcagttagctgccatgaaaagtatgcagaagaggaagggatggggaggcaatcaataaagttcaattcattatctg

SEQ ID NO: 2159 - DNA, 110 bp, synthetic construct
  source 1..110: mol_type = other DNA
agcagacaagaaaacaaacactttggaatggaagcagcagtgccatgactcaaaaacaaataaagaactgtacatgtttaaggtctgagcagctattctgccagaggaag

SEQ ID NO: 2160 - DNA, 110 bp, synthetic construct
  source 1..110: mol_type = other DNA
acaaataaagaactgtacatgtttaaggtctgagcagctattctgccagaggaagtcagagcagactccacagaggaagtgaatttgaactagtaaaagtttccaggaga

SEQ ID NO: 2161 - DNA, 110 bp, synthetic construct
  source 1..110: mol_type = other DNA
gaagcagggataggtaatatggcagatattgcactagctcttaaagcctctactcaaaggtatctaaactacttctactcacatttctttttatttatttatttatttat

SEQ ID NO: 2162 - DNA, 110 bp, synthetic construct
  source 1..110: mol_type = other DNA
acacctataactgggcagagttagagaaaaatgagaccagcaggtaacagagtatgtgggtggagaaatctggccactgacaattccaagtgtcctctgccataggccca

SEQ ID NO: 2163 - DNA, 110 bp, synthetic construct
  source 1..110: mol_type = other DNA
cctccaccaccccctcctcctgcttcttctgtttaattttctatgatgattacatgttacttttgtaataatttaaactcatatttactaaaattgtagagcccagttct

SEQ ID NO: 2164 - DNA, 110 bp, synthetic construct
  source 1..110: mol_type = other DNA
gttacttttgtaataatttaaactcatatttactaaaattgtagagcccagttctggctttgcagactggaatatcagactccagaggtgcggttatggagtcagctctt

SEQ ID NO: 2165 - DNA, 110 bp, synthetic construct
  source 1..110: mol_type = other DNA
ctttcccaaagccttgtgtgttgtctccatttgaacatgtgcctagagtcagtcccttgagagattcacaagctcccagcttttagatgaaggtcatatcctgggggaag

SEQ ID NO: 2166 - DNA, 110 bp, synthetic construct
  source 1..110: mol_type = other DNA
gagttattatagttcatccttccattgaggatttactctgggtgcgagctctactgtctgtgcgtttcaaagctcctgttcatctagttcagtgtgtgccctcaagatgg

SEQ ID NO: 2167 - DNA, 110 bp, synthetic construct
  source 1..110: mol_type = other DNA
gtctgtgcgtttcaaagctcctgttcatctagttcagtgtgtgccctcaagatggaagcagaccagcgtcctctcctccctgcatgctctcctttagtttttgaccacag

SEQ ID NO: 2168 - DNA, 110 bp, synthetic construct
  source 1..110: mol_type = other DNA
ggaaatttgtcttggtgtatgagttacataaaggcagtggttgaggacatggatttgggattagctggtttgtatatgaaagtcatgtttgtaggtgagttattccttat

SEQ ID NO: 2169 - DNA, 110 bp, synthetic construct
  source 1..110: mol_type = other DNA
gccacgtgttccttccttccgtcctcctcctctatctctctccttggcttggtccatctcaccagctacatcaccaggtagatctgcatggtcgtgaccaccatcaatca

SEQ ID NO: 2170 - DNA, 110 bp, synthetic construct
  source 1..110: mol_type = other DNA
atttaaaaagctctgatgtacttgttaatttattcagaatagggccaaatggtaagcatctgttctgctgctgattatcctataaaatagggcatacagtagccgaccat

SEQ ID NO: 2171 - DNA, 110 bp, synthetic construct
  source 1..110: mol_type = other DNA
actattatttacatacacagcctactacgggagaggagatggaacccactaaatgactgaatgcccttatgaaaggaactctacacaaatctgctagaatagagctcttt

SEQ ID NO: 2172 - DNA, 110 bp, synthetic construct
  source 1..110: mol_type = other DNA
actgaatgcccttatgaaaggaactctacacaaatctgctagaatagagctctttaatttccacatcgattacagattacaggactttagtgctccaattactcaatgct

SEQ ID NO: 2173 - DNA, 110 bp, synthetic construct
  source 1..110: mol_type = other DNA
caagtatcaccttgaatgagctaattctaaaaaccaagactatctgacttgacatttatggtgtacccagttctctataggctgcagcatagtattatggcctctaataa

SEQ ID NO: 2174 - DNA, 110 bp, synthetic construct
  source 1..110: mol_type = other DNA
tggtaaaacagacatttgcagatccttttccttgctgagagctgaaaatggaccgtcagcagagataagcagggatagagattttgttcatgatgaattgcttgttctcg

SEQ ID NO: 2175 - DNA, 110 bp, synthetic construct
  source 1..110: mol_type = other DNA
ctggcacatatgaggaggtgtaaataatgcgaaagcaaatttatctgtctttgaaagagcttccaacgaaaagggggtaggcaggcttccataaccaaaaaggaagtcaa

SEQ ID NO: 2176 - DNA, 110 bp, synthetic construct
  source 1..110: mol_type = other DNA
agagcttccaacgaaaagggggtaggcaggcttccataaccaaaaaggaagtcaacacacctctccatgcaagcacaaatgtcacacacagcactctgaaaaactaagtt

SEQ ID NO: 2177 - DNA, 110 bp, synthetic construct
  source 1..110: mol_type = other DNA
caaggactctgttgcaactggctgaggttggaactaattcctcctctgtctgcgttacaaaataagtgaagactaaccagcccgggcaggtttttttgtatccttggatt

SEQ ID NO: 2178 - DNA, 110 bp, synthetic construct
  source 1..110: mol_type = other DNA
accattaacaatagcagaatactggggccaatatagattattttgatggcaacatacgcttggaggcttggagctttccaagtattccatggcagtaaaaaccacagact

SEQ ID NO: 2179 - DNA, 110 bp, synthetic construct
  source 1..110: mol_type = other DNA
aggcaccaaatcaataaagcagactccttcacaagactccctatggccaggaaggcccatgaggatctgcctgttggagctcttccccactctcctagcatgaaggctag

SEQ ID NO: 2180 - DNA, 110 bp, synthetic construct
  source 1..110: mol_type = other DNA
acaagcagacaccagagcagggcttggccactctgtcgtgctgagaatgacctcgtatgatgctcgccctctccttcccacccccaccctgatttaatggatctgggtga

SEQ ID NO: 2181 - DNA, 110 bp, synthetic construct
  source 1..110: mol_type = other DNA
actagataccttatttcaagacttcataggaactaagagagtgtagaatccgtgatcaaggaacagagtgtagagcttggaatcagcccatggtgtgcagagcccctgat

SEQ ID NO: 2182 - DNA, 110 bp, synthetic construct
  source 1..110: mol_type = other DNA
tcaaggaacagagtgtagagcttggaatcagcccatggtgtgcagagcccctgattcatgacacagacacaactgcaatccagacacaactaatccagaaaaggatgcat

SEQ ID NO: 2183 - DNA, 110 bp, synthetic construct
  source 1..110: mol_type = other DNA
aaatagaatcctgaatgctttgtaaaacaaaactggcatttccaaagcagctctctgaaatgtctagaggctgatgttataaaaaccgccatcatcatctgaagcatgtt

SEQ ID NO: 2184 - DNA, 110 bp, synthetic construct
  source 1..110: mol_type = other DNA
tagctctatacctgtcatggtcagggatgcagctttataggcatctgcttttacagtgaagggtgagtgcaagtttagtagtatctatggtcatctcctgttaaatattc

SEQ ID NO: 2185 - DNA, 110 bp, synthetic construct
  source 1..110: mol_type = other DNA
ggctggtttaagtggcataaggcacatggcttatggcagggccaagactggtgctgatggaatctgctggtgtccaactccaaactatttttctaccatatctcaactgt

SEQ ID NO: 2186 - DNA, 110 bp, synthetic construct
  source 1..110: mol_type = other DNA
ttagaaactacttgtaacaacttccagaataaaagcccctctggggtttcagggcagagctagattgttgggttggtctctctctctctcttttttttttttcatggaga

SEQ ID NO: 2187 - DNA, 110 bp, synthetic construct
  source 1..110: mol_type = other DNA
agagctagattgttgggttggtctctctctctctcttttttttttttcatggagactaaactcttagatcataggtcatcttctggaagcatcagtctgcctactgcttg

SEQ ID NO: 2188 - DNA, 110 bp, synthetic construct
  source 1..110: mol_type = other DNA
gtcatgacacttagctacagagcacaggggttgtgaggattcactgctgtgtctggcgacgcttggggcctttggatgaaaggctgtctgtgggtagcctctgtgacgag

SEQ ID NO: 2189 - DNA, 110 bp, synthetic construct
  source 1..110: mol_type = other DNA
taggagtcacattcggcattaaaaagcaacaaggaaaggttgctgagatggccctagggaggccagctttctagcatggaagcaagacttgccttagtctgagacagatg

SEQ ID NO: 2190 - DNA, 110 bp, synthetic construct
  source 1..110: mol_type = other DNA
agggaggccagctttctagcatggaagcaagacttgccttagtctgagacagatgttgggagacaactggagatcaagaggaaataagtaactgaggttgaggggagacc

SEQ ID NO: 2191 - DNA, 110 bp, synthetic construct
  source 1..110: mol_type = other DNA
gttggtttgttaaaaaggacaaattacagctagaaaggtatacatctggctcactgaccatggagacaatgactgtaaagaggaggaagaatcacatccaataaatagga

SEQ ID NO: 2192 - DNA, 110 bp, synthetic construct
  source 1..110: mol_type = other DNA
tgacgagctttataaccgcttatgactagagggaaaatccaatccatttactctgtcatagctaaaagcagatgttaacctcaataaatatttgataatttaatgactaa

SEQ ID NO: 2193 - DNA, 110 bp, synthetic construct
  source 1..110: mol_type = other DNA
ctaccttaagacaacctttcttggaaggaaattctgagagtaccttaaaggggcgcagagctgtgttcttatccaatttatacagcaggtgtatgaagtagtgttttgtt

SEQ ID NO: 2194 - DNA, 110 bp, synthetic construct
  source 1..110: mol_type = other DNA
ttttctaacattcttttcatcttctaaccataacatgaaatttctgtattcctgaaagacagatacaagtaatcacttcctcccccccaccacactttcctagcaattta

SEQ ID NO: 2195 - DNA, 110 bp, synthetic construct
  source 1..110: mol_type = other DNA
aagacagatacaagtaatcacttcctcccccccaccacactttcctagcaatttataaaatgattagtgttctcacagaacagtgtgttcattcacttaataggcattta

SEQ ID NO: 2196 - DNA, 110 bp, synthetic construct
  source 1..110: mol_type = other DNA
ttactattattgttctctgccatccttaaatttcaaactgaattcctaccagtcaatgtagttcaggggaaaattaaagctcttgtgacatcattcccatcataaagagg

SEQ ID NO: 2197 - DNA, 110 bp, synthetic construct
  source 1..110: mol_type = other DNA
gaaattaaggtaaagaaggtctaattaacgtgttaaaaagaagatccattcgggatcctagtcctattcatataaaactttttaaaaagtgaggtatctcttgaagttca

SEQ ID NO: 2198 - DNA, 110 bp, synthetic construct
  source 1..110: mol_type = other DNA
cctttctatgcaatggaaaaacttcttgccctccatctttcatctctttagcatcggagtgtataaccacccagactttctgtgaaagggagtttataagcaggccagat

SEQ ID NO: 2199 - DNA, 110 bp, synthetic construct
  source 1..110: mol_type = other DNA
ggagtgtataaccacccagactttctgtgaaagggagtttataagcaggccagatcttatgctctgtccttagattaatatgattttcacataagtttgaattattatta

SEQ ID NO: 2200 - DNA, 110 bp, synthetic construct
  source 1..110: mol_type = other DNA
tcttccgttccagtatgtttccaattctaaaactgctcctctggagcctgtggtgggcagttatgtcagcagagtagtttattttcagcttaaaaagactgtttgcacat

SEQ ID NO: 2201 - DNA, 110 bp, synthetic construct
  source 1..110: mol_type = other DNA
ggcagttatgtcagcagagtagtttattttcagcttaaaaagactgtttgcacatgcccagcagccaccacgtctgtcccgttcttcggcccttgtgcatatcactgcag

SEQ ID NO: 2202 - DNA, 110 bp, synthetic construct
  source 1..110: mol_type = other DNA
gagcagggatgtgattccctgcagagtgctagtcatgcaccatttggccacggtggcttgagctgttctgtaccaggctcggcgccaggcatggaggatgcagaatgagt

SEQ ID NO: 2203 - DNA, 110 bp, synthetic construct
  source 1..110: mol_type = other DNA
gcttgagctgttctgtaccaggctcggcgccaggcatggaggatgcagaatgagttaatgttccagtcaagtgtgatgtcttaattaatgaacccccagactaatgctgc

SEQ ID NO: 2204 - DNA, 110 bp, synthetic construct
  source 1..110: mol_type = other DNA
gaccagacagccagggctagatctttgtttctagacttaagagcttccctgacaactcagcctccatattcctttgctcatcttaaaacactgccctggagactgtgctg

SEQ ID NO: 2205 - DNA, 110 bp, synthetic construct
  source 1..110: mol_type = other DNA
ttgagaggccagagtatggatgaggtcatacataggtacaatcacatcttccaggaggatggcagggttgtagcaggagggcatgctgtgagctaggaggtgaagctctt

SEQ ID NO: 2206 - DNA, 110 bp, synthetic construct
  source 1..110: mol_type = other DNA
aggatggcagggttgtagcaggagggcatgctgtgagctaggaggtgaagctcttgggagatgaggggggtgttctggcagtgagtggaggtcaagaacaccagagcttc

SEQ ID NO: 2207 - DNA, 110 bp, synthetic construct
  source 1..110: mol_type = other DNA
ctaacagggcagctctgtttctgaagccaggtttccaagctctgtccccacccagggcctctgtacctggtaccctgttccttcaggaaatgcagtggccattatctaga

SEQ ID NO: 2208 - DNA, 110 bp, synthetic construct
  source 1..110: mol_type = other DNA
agaaaggggctaggaacataattgaagagataatagcggaaaacatcccaaacctggaaagaaaacaaatatccaagtccaggatccacagggagtcccaaagaggaaca

SEQ ID NO: 2209 - DNA, 110 bp, synthetic construct
  source 1..110: mol_type = other DNA
cactcaaaactcaagagccatataaaggtagacagtgaataacccccctccactcagctaccctttttctcctcctgtaggcaattgtttgttttctatatattctctta

SEQ ID NO: 2210 - DNA, 110 bp, synthetic construct
  source 1..110: mol_type = other DNA
ggaatatacttggaagagtcaaagaaaagaactcaggaatacagatggaaatgacaatttagggaatcaaagcgacttgtggtcctttgtgtagatatgaaaacagtagg

SEQ ID NO: 2211 - DNA, 110 bp, synthetic construct
  source 1..110: mol_type = other DNA
cgaagttggaacaaagaatccccagaagtgtacctgttgttttgaggatcattgggaaggagctgtgtgagcaagagaggcaggaggtgatgaggggccagattgcacag

SEQ ID NO: 2212 - DNA, 110 bp, synthetic construct
  source 1..110: mol_type = other DNA
cttgtgaccacatgagctaattaaagttggggcagagttgggtatgaacccctaatgtccccaagcctccctccttcaatttaccagctccatggttaaaccaacagccc

SEQ ID NO: 2213 - DNA, 110 bp, synthetic construct
  source 1..110: mol_type = other DNA
tcactttaggaactgctgggtgaatcgccttacagtgaaacagcttccatcccggcccagccccaagtggatgagcttcaggagtgggttgagtgctcctgtgctggtgt

SEQ ID NO: 2214 - DNA, 110 bp, synthetic construct
  source 1..110: mol_type = other DNA
ataccctcacaaaaggtggtttgattattatgccctgagctataataaaattcccatcttaaaaatgagaaattgaaagaattaggaggttgtaagagaaaaacaatgtc

SEQ ID NO: 2215 - DNA, 110 bp, synthetic construct
  source 1..110: mol_type = other DNA
ctatgttggactggatgtgtagctgttaagctctccgactggaagtccactgtggtcctatctattttatagatgactaatcacacagcattagtgacttgcttaagatc

SEQ ID NO: 2216 - DNA, 110 bp, synthetic construct
  source 1..110: mol_type = other DNA
aggtgtcttgggacccatttatacaggctattaactattatgagctgctggtatccaaatttattttagtactaggcaactgattaaaaataaatacaaatttaaattcc

SEQ ID NO: 2217 - DNA, 110 bp, synthetic construct
  source 1..110: mol_type = other DNA
catatcataaaaccatagaccataaagctggaaggtgtccaagagttcactatcccaagtattctcattttacaaaagaatcaactggggccagcagaggtttactgact

SEQ ID NO: 2218 - DNA, 110 bp, synthetic construct
  source 1..110: mol_type = other DNA
gcttccttctgttagatatttataaatatatttgtgttcaccacaatgtctatcctcaagggacacagttcatgttttagaattctttatattcctccataagctttaat

SEQ ID NO: 2219 - DNA, 110 bp, synthetic construct
  source 1..110: mol_type = other DNA
cagaggaatgagaaagaagaaatgcttgttgctataaggtaccagttgtgggggtagcttgttacaaagcattattgcagcaatagctgactaatacataagagtattgt

SEQ ID NO: 2220 - DNA, 110 bp, synthetic construct
  source 1..110: mol_type = other DNA
cttctggggctgcatattaggtccagaagagtagtcttcattttccctctctcctcttgcccacccaatccagtgtccatttatttattaacagggacctttctccatct

SEQ ID NO: 2221 - DNA, 110 bp, synthetic construct
  source 1..110: mol_type = other DNA
tgttttaggctatggggatgtgtattaggtacccgagccaggaagaactgttatgaaagcagtgctttcacagctgggaggatgagagcggcaagacttctaggaggcag

SEQ ID NO: 2222 - DNA, 110 bp, synthetic construct
  source 1..110: mol_type = other DNA
gccatcatacccttacttttgcagagaaggccctcacggggagcctcagctggtcggggagaacaaggaaaacccctcatcatttcccatctcctgtttttcatgccaac

SEQ ID NO: 2223 - DNA, 110 bp, synthetic construct
  source 1..110: mol_type = other DNA
ctgccccaattatagccatagaagtataattatcactccagctttatcatgctgctaccagatagaaatctataccctactttctctgaccctgcaggaggagacccaat

SEQ ID NO: 2224 - DNA, 110 bp, synthetic construct
  source 1..110: mol_type = other DNA
cctcagcctcaagagaccttgcagcctcttgtctccccttttgagaacacaatcctgacacatcaggaagaacaggctggcttgcttgaaggtgaaccagagagaggccc

SEQ ID NO: 2225 - DNA, 110 bp, synthetic construct
  source 1..110: mol_type = other DNA
tgacacatcaggaagaacaggctggcttgcttgaaggtgaaccagagagaggccctgtcatcagcaagcagcgacagcccgatgtgtgagtgtagccatcttggaccatt

SEQ ID NO: 2226 - DNA, 110 bp, synthetic construct
  source 1..110: mol_type = other DNA
gtttcctccttttcatccctgcttccacaatcccagaaccacttacacaaccccctgcaaagattttctaacatgtaagctcatcatgggctctcttccttttagagcaa

SEQ ID NO: 2227 - DNA, 110 bp, synthetic construct
  source 1..110: mol_type = other DNA
ctgagacagggtgtccagtgaccctgacttccagggcagacgttctctcaccagaggaccaagcaggcatacaaccctgtgcgggagccggcagggagcctgaacagcag

SEQ ID NO: 2228 - DNA, 110 bp, synthetic construct
  source 1..110: mol_type = other DNA
ggaccaagcaggcatacaaccctgtgcgggagccggcagggagcctgaacagcagcagcatacctgtgggcagcccaagcaactgggctcccaggaaggcagccagaact

SEQ ID NO: 2229 - DNA, 110 bp, synthetic construct
  source 1..110: mol_type = other DNA
caaatgtcagctttgagatgagacccatcccatcttgattataaaacgggaaacctgtcctcctgctgccttccctccctctctctaccctttcttttttccatcacact

SEQ ID NO: 2230 - DNA, 110 bp, synthetic construct
  source 1..110: mol_type = other DNA
agtagttagtgccttggaaataaatgacagaacttggttcctctgcctaaatatcaaacataacacataatgctctgtttgcaagtaactcctttgcattggtcttaaga

SEQ ID NO: 2231 - DNA, 110 bp, synthetic construct
  source 1..110: mol_type = other DNA
tgtgcttcatcaagcatttcaacaacatcaggagaaagccctgaagatgcttttatagatgaagcttagaaaagactgttggttctaaatcaagccatatattttactgc

SEQ ID NO: 2232 - DNA, 110 bp, synthetic construct
  source 1..110: mol_type = other DNA
atactggattttccataagaggaacataggatggctggctaaaccaaagaaaaagagtaaaatgctcctttgaagttgcatgattattgaattatctcaagtaatatctt

SEQ ID NO: 2233 - DNA, 110 bp, synthetic construct
  source 1..110: mol_type = other DNA
cagaatccctcgtccctgagaaggggggcctgcgaagcccgctggagacaagctgcgcgaaggaaagctctaccctccagccgctccggtgcagaaataatggaggcaaa

SEQ ID NO: 2234 - DNA, 110 bp, synthetic construct
  source 1..110: mol_type = other DNA
gaagtaggtctcactttgcatctgtggttagagctccctaaatttttcagtctagaccacatctgtgaacttttgagagtacttgtgtcacaatgaaggttgagagacag

SEQ ID NO: 2235 - DNA, 110 bp, synthetic construct
  source 1..110: mol_type = other DNA
accacatctgtgaacttttgagagtacttgtgtcacaatgaaggttgagagacagcagataaatgaaggtataggagcttggcagacactttctggtgctaagaagctgc

SEQ ID NO: 2236 - DNA, 110 bp, synthetic construct; identical to SEQ ID NO: 2234
  source 1..110: mol_type = other DNA

SEQ ID NO: 2237 - DNA, 110 bp, synthetic construct; identical to SEQ ID NO: 2235
  source 1..110: mol_type = other DNA

SEQ ID NO: 2238 - DNA, 110 bp, synthetic construct
  source 1..110: mol_type = other DNA
gattagaattcccaaactcactgcagaacaaagaagctcatcccacaaggacagtaatgggggaaaaaacagaaagcaaacaagccatagggtgcaggtgtggaaacaat

SEQ ID NO: 2239 - DNA, 110 bp, synthetic construct
  source 1..110: mol_type = other DNA
tggtatgggtttgggaaagagggatacgtgaagaggaagggactttgttgtcctcacctcctttctcttaaataaatggaagatcccacaaaaagttctatatataaaaa

SEQ ID NO: 2240 - DNA, 110 bp, synthetic construct
  source 1..110: mol_type = other DNA
ggctactgtttaataaagcagtgtgacatagtgggaagaccatggatttggggtcagggatgacctggacagatcatggctcagctacctacaaactaagtgggctctct

SEQ ID NO: 2241 - DNA, 110 bp, synthetic construct
  source 1..110: mol_type = other DNA
ctactcagattttcttagtttttacttaatatactctttccgtttcaggaccccatccaatataccacataacctttagtcatcaggcctccttagagtccttgtttgtg

SEQ ID NO: 2242 - DNA, 110 bp, synthetic construct
  source 1..110: mol_type = other DNA
tgcctcctggtgtggagaggtagcgttgctgcgccaagctatgcttgaggtcttggtctacttcggttacgaaaaccctctggtatttcctacaggtgttagcagtggtt

SEQ ID NO: 2243 - DNA, 110 bp, synthetic construct
  source 1..110: mol_type = other DNA
tagttctgcaaggttagtgcagcgagacctcctgtcacgactctttgggtggtaaattcttagctggaggcgatgtgggaggtcagagctggggctcagcccccagcaaa

SEQ ID NO: 2244 - DNA, 110 bp, synthetic construct
  source 1..110: mol_type = other DNA
ggtcgggggtggagtaggagggagctgatgtccaattgctattcgtttgctccccagtggattgaaaatggggagtgaaagaatctgacctttatgttaggccattttca

SEQ ID NO: 2245 - DNA, 110 bp, synthetic construct
  source 1..110: mol_type = other DNA
attccggtgcagtgggggagccactgtgaggtgtggcagtagggaccctccacgcacactgttgcacaccagcccaggacaccaagcagcccttggaaaacaacagtgtc

SEQ ID NO: 2246 - DNA, 110 bp, synthetic construct
  source 1..110: mol_type = other DNA
tatctgtgacctatactgcattttgcggcaattttactggatccttagctcactgagccaggccaaggatcgaacccacatcttcatggatactatgtcatcaggtactt

SEQ ID NO: 2247 - DNA, 110 bp, synthetic construct; identical to SEQ ID NO: 2246
  source 1..110: mol_type = other DNA

SEQ ID NO: 2248 - DNA, 110 bp, synthetic construct
  source 1..110: mol_type = other DNA
atctgagccatatctgtgacctatactgcattttgcggcaattttactggatccttagctcactgagccaggccaaggatcgaacccacatcttcatggatactatgtca

SEQ ID NO: 2249 - DNA, 110 bp, synthetic construct; identical to SEQ ID NO: 2248
  source 1..110: mol_type = other DNA

SEQ ID NO: 2250 - DNA, 110 bp, synthetic construct
  source 1..110: mol_type = other DNA
tccacatctctgcctgtgactatgtcacagaggctctgggaggcgctgggccaaggctggggcatatctgggggagaatgtctgattgtgccccactctgaaagatgaag

SEQ ID NO: 2251 - DNA, 110 bp, synthetic construct
  source 1..110: mol_type = other DNA
gctggggcatatctgggggagaatgtctgattgtgccccactctgaaagatgaagcccaaattggtgtgtgtgtgtcggtggagaggtggagcaagacagagaggatgaa

SEQ ID NO: 2252 - DNA, 110 bp, synthetic construct
  source 1..110: mol_type = other DNA
gatgtgaagctcatccagatagaggtggttagccacataggtgggcaaagagtgggagcctgagcttttgggttccttctggtcccctctcatccctgcaagaccaagtc

SEQ ID NO: 2253 - DNA, 110 bp, synthetic construct
  source 1..110: mol_type = other DNA
tattaacatagaatggctacagacttccagctctcttcctctgagcattgccatgaaaacaaacagataaacaaatgcccactcagccgcaagtaaacaaataggaaaaa

SEQ ID NO: 2254 - DNA, 110 bp, synthetic construct
  source 1..110: mol_type = other DNA
taaccttgttctaatcacatgatagagacagccattggaagggaggaacttcaaatcgaaaggtgtccacatagagcaataaccggcccagctgggagctgctcaaggac

SEQ ID NO: 2255 - DNA, 110 bp, synthetic construct
  source 1..110: mol_type = other DNA
agacaatggacagtaagccagtccactccatttcccacctgcttctccccgggatgtctctacaacagaggctataagagctaaacacttgatttccaagctttccttga

SEQ ID NO: 2256 - DNA, 110 bp, synthetic construct
  source 1..110: mol_type = other DNA
tctttctctcttatggtatgatttaaatcagtccttttctctttgttctcttatagtatagctctgaagtagagttagggctatgcctttggtatttgggtagaatgttt

SEQ ID NO: 2257 - DNA, 110 bp, synthetic construct; identical to SEQ ID NO: 2256
  source 1..110: mol_type = other DNA

SEQ ID NO: 2258 - DNA, 110 bp, synthetic construct
  source 1..110: mol_type = other DNA
aaccatctcctctagctagttactgacttgtaaatgttgttcttggaattgaccaaagggagaaaaatgttgcaccgtatttgcaaagagacttaaaatatctgtagatg

SEQ ID NO: 2259 - DNA, 110 bp, synthetic construct
  source 1..110: mol_type = other DNA
ttcttcatttgatcctcatccatggttagtaagtctggtcagtgtgttcctcagtagagctgaagaggaaaacatttttgaaacaaacataccaagaaaatcacatcttt

SEQ ID NO: 2260 - DNA, 110 bp, synthetic construct
  source 1..110: mol_type = other DNA
agagctgaagaggaaaacatttttgaaacaaacataccaagaaaatcacatctttctcttgctaatatccagcctgtctcataccacaagtgcagtgttatttgctaata

SEQ ID NO: 2261 - DNA, 110 bp, synthetic construct
  source 1..110: mol_type = other DNA
cctgggttcccaattttaccttactctgtgtgggtacttgctttaggatgaagaaactttcaagggcttcagctgccaaacatgtctgttctacaggtcttcctcgacct

SEQ ID NO: 2262 - DNA, 110 bp, synthetic construct
  source 1..110: mol_type = other DNA
ctcagatgcatcttattttggatgttctccactttcacatacttccatcctccgtgcttctattataacctcatgctagcttgtctaccttcctctggaatgtaagatcc

SEQ ID NO: 2263 - DNA, 110 bp, synthetic construct
  source 1..110: mol_type = other DNA
tacaggtattcttggtgaccagtctgcatacttatccaatgctgcattgtactgaaggagctttctgtttgggagatggactagagagtcagatctgttccccagcaagg

SEQ ID NO: 2264 - DNA, 110 bp, synthetic construct
  source 1..110: mol_type = other DNA
atctcaggctcactattccctaagttctgcttccacatcatccagatactcccagcaacaccgtttaaagactcatctcaaggcgagtgaaataacaagaaagatccaaa

SEQ ID NO: 2265 - DNA, 110 bp, synthetic construct
  source 1..110: mol_type = other DNA
caacaccgtttaaagactcatctcaaggcgagtgaaataacaagaaagatccaaaggccaaagacagtaagtaatgataaatttgattatgtatatgaaacaatgaaaat

SEQ ID NO: 2266 - DNA, 110 bp, synthetic construct
  source 1..110: mol_type = other DNA
catgctggcttgggcagaagaggtggccgtgttcttcctactcacttgttccacgtctgagtccaaaggcacatcttcctcttcctctgcttcctcttcactggaggacg

SEQ ID NO: 2267 - DNA, 110 bp, synthetic construct
  source 1..110: mol_type = other DNA
tgtcctgtctggggtcaggcttgttcctggcttttggtaaaggataacactgcagacagctattaaatggtgtgaacaaccacaatgagaacaaagagtattgcttatca

SEQ ID NO: 2268 - DNA, 110 bp, synthetic construct
  source 1..110: mol_type = other DNA
tcagtctgggatacgcgcctagggaaacggtacatgtgtagtaagctttccagatgattcttttagtgatggtctggattgctcgggagaaatactgcctgaaggatatg

SEQ ID NO: 2269 - DNA, 110 bp, synthetic construct
  source 1..110: mol_type = other DNA
aacaacaacaaaaaaaaacagtgccacatttttttttgtttttttttagggctgaacctttggcacacagaagtgctcatgctaggggtccaattggagctgcagcagcc

SEQ ID NO: 2270 - DNA, 110 bp, synthetic construct
  source 1..110: mol_type = other DNA
aaacagtgccacatttttttttgtttttttttagggctgaacctttggcacacagaagtgctcatgctaggggtccaattggagctgcagcagccagcctacaccacagc

SEQ ID NO: 2271 - DNA, 110 bp, synthetic construct
  source 1..110: mol_type = other DNA
attggggtaaggtttgcatgtagaatgaaattttaaagactcgtgtaaaataatatagcgcttgcagtataattgccaccaggaactaagaatgtcaagtaagctcattt

SEQ ID NO: 2272 - DNA, 110 bp, synthetic construct
  source 1..110: mol_type = other DNA
tagcgcttgcagtataattgccaccaggaactaagaatgtcaagtaagctcatttggagcatagcccatttcacagcatcgccacaggtagtttatttatagctctggga

SEQ ID NO: 2273 - DNA, 110 bp, synthetic construct
  source 1..110: mol_type = other DNA
agaggctgatggcaagggccaaacttcagttcacagatgaattctaagggggggaaaaggagttagctggttgaagaaggcagagagggcagaggggagagggtcaggac

SEQ ID NO: 2274 - DNA, 110 bp, synthetic construct
  source 1..110: mol_type = other DNA
tcagattgaggtaaaccaaaaagacatatgagcaagctcaatggctcagtagacacaacacacaagatccagatggaatatggtcaaacagagcctccctggtttaagtt

SEQ ID NO: 2275 - DNA, 110 bp, synthetic construct
  source 1..110: mol_type = other DNA
gaaacgatgggcacagaaagccttttgtatctggttgggccacacagggttctattcagtttcaatcctccctttgctttgattctcctcagtcttgaggggaacaggta

SEQ ID NO: 2276 - DNA, 110 bp, synthetic construct
  source 1..110: mol_type = other DNA
aggggtttggagaagtaaagggtgccttgatggagtacaggggatttttagggcagcaagcttattctataagatactataatggtggatgcatgtcatacatttgtcca

SEQ ID NO: 2277 - DNA, 110 bp, synthetic construct
  source 1..110: mol_type = other DNA
cttcccacttaagattctcactttcctcttcagctcccgcccagtcccaggtgcagctgtggtgggaaactcaacccccacctactcacccatcagtggagggaatgaat

SEQ ID NO: 2278 - DNA, 110 bp, synthetic construct
  source 1..110: mol_type = other DNA
gctgtggtgggaaactcaacccccacctactcacccatcagtggagggaatgaatatcggtctctcccccccccccctttcctgaggctttatggtattacccaatcctc

SEQ ID NO: 2279 - DNA, 110 bp, synthetic construct
  source 1..110: mol_type = other DNA
ctataggtatatcagttccaccctttccttcaacgtaacaggccttgtccctagtgctctaggcccctgaccatcactggtaaacagaactcctaggaccattgcagggt

SEQ ID NO: 2280 - DNA, 110 bp, synthetic construct
  source 1..110: mol_type = other DNA
gctctaggcccctgaccatcactggtaaacagaactcctaggaccattgcagggtaggttccttctccagctctctggttctagggttcctccggactttctctgtctga

SEQ ID NO: 2281 - DNA, 110 bp, synthetic construct; identical to SEQ ID NO: 2279
  source 1..110: mol_type = other DNA

SEQ ID NO: 2282 - DNA, 110 bp, synthetic construct; identical to SEQ ID NO: 2280
  source 1..110: mol_type = other DNA

SEQ ID NO: 2283 - DNA, 110 bp, synthetic construct
  source 1..110: mol_type = other DNA
acttactgagcgtgcccaggcaccggtcatccccagtcattgttgtacaccctgtagacaatgcaccaggacagcattaggaagctcaggagaaaactgtacctggaagc

SEQ ID NO: 2284 - DNA, 110 bp, synthetic construct
  source 1..110: mol_type = other DNA
agccatagaggcgatagttcaaagagagctgaggaaacagtaggtggctatatagggtttgtgtgagagtggagggtgaaagtgtcaaaaatctggtgaggatggaggac

SEQ ID NO: 2285 - DNA, 110 bp, synthetic construct
  source 1..110: mol_type = other DNA
tgaggtgaatgctattattgccactgccagcttacaaatgagattctgaaacacaggttaggcaattcgcccagggcccacaggtaataaatggaacaagagttcccatc

SEQ ID NO: 2286 - DNA, 110 bp, synthetic construct
  source 1..110: mol_type = other DNA
catcattcacctccagcctcctccagcccatccttctcccatagttctagagctttatcccaggtctctacaggacaacttcgtccatcatgcctcagaataccagagtg

SEQ ID NO: 2287 - DNA, 110 bp, synthetic construct
  source 1..110: mol_type = other DNA
aacccctggcaaccccactggctccattgtcacagctgaaaaggtagaaggtggatgagaaagatatcagtactatgaaatctttgattttctaaaattgagtggaaaaa

SEQ ID NO: 2288 - DNA, 110 bp, synthetic construct
  source 1..110: mol_type = other DNA
ttcttctttctcagcatatcatgttgattgtcactattgcccctgatatggccgtctctgacagtctcatctctcctcgtgccagatgctgtcaagggagactattacca

SEQ ID NO: 2289 - DNA, 110 bp, synthetic construct
  source 1..110: mol_type = other DNA
gtaaaaggctgagacactgttcatgactgagaagagagccggctagttaaaaaacaacgtactggagttcccaactgggaaccatgaggttgtggcttagatccctggcc

SEQ ID NO: 2290 - DNA, 110 bp, synthetic construct
  source 1..110: mol_type = other DNA
gaattgttattataagagttttaaaattaagtttcagaaagttcacaggtggcataataggttaaggatccagggttgccacagctgtggcttgagttcaaaccctgacc

SEQ ID NO: 2291 - DNA, 110 bp, synthetic construct; identical to SEQ ID NO: 2290
  source 1..110: mol_type = other DNA

SEQ ID NO: 2292 - DNA, 110 bp, synthetic construct
  source 1..110: mol_type = other DNA
ataagattcccaatgtcgaacatgaaataagaagccaagccgggatttgaacctaggtggtttgctccagagcccattttcttttttttccttttttttttagggctgca

SEQ ID NO: 2293 - DNA, 110 bp, synthetic construct
  source 1..110: mol_type = other DNA
ggtaaaaaattttttctttactgtgacggcagtgtcaatggtgtctgttgatttgcttcaaatagaaaagtaagctctcttcatcttggatcatacaaacatgcatgaaa

SEQ ID NO: 2294 - DNA, 110 bp, synthetic construct
  source 1..110: mol_type = other DNA
cctttttgttgcttaaatgttaagccatagcccttgtgcactgttgtccacagcaacaaatcagagcttgtgaatttgaatgcttttgcttacagagcctaagagttaaa

SEQ ID NO: 2295 - DNA, 110 bp, synthetic construct
  source 1..110: mol_type = other DNA
acaaatcagagcttgtgaatttgaatgcttttgcttacagagcctaagagttaaatgtcagtcaggatacacacattccctgatgccaagaaaaaatgttttctcctgtt

SEQ ID NO: 2296 - DNA, 110 bp, synthetic construct
  source 1..110: mol_type = other DNA
cgcatgatgccacagaaccaggagtccacgcgtcaccattgagtgtcttcagagggctccactgagggttagtcagtccgtcatggagccaagctgtgggtcatggccca

SEQ ID NO: 2297 - DNA, 110 bp, synthetic construct
  source 1..110: mol_type = other DNA
gctccactgagggttagtcagtccgtcatggagccaagctgtgggtcatggcccagctccccaccagcatcctgaccagagtagaggcagttttcctccttcacatatag

SEQ ID NO: 2298 - DNA, 110 bp, synthetic construct
  source 1..110: mol_type = other DNA
acttgatcatggcagttcacctacctggctttcagtgtccaactaaaagcccaagttaatcattcttgcttaatcacaagtgaattaacggtgtttctgggattaaaaga

SEQ ID NO: 2299 - DNA, 110 bp, synthetic construct
  source 1..110: mol_type = other DNA
tccattgagccatgacaggaactccccctttgctttgttctcaatctaagtgggaaagcttcaagtttctcatggttaaatatgacattagctgtaggttttttggtggc

SEQ ID NO: 2300 - DNA, 110 bp, synthetic construct
  source 1..110: mol_type = other DNA
aagcttcaagtttctcatggttaaatatgacattagctgtaggttttttggtggctattctccatcaagctgacaaagttcccttctattcctaagtaactgagcattct

SEQ ID NO: 2301 - DNA, 110 bp, synthetic construct; identical to SEQ ID NO: 2299
  source 1..110: mol_type = other DNA

SEQ ID NO: 2302 - DNA, 110 bp, synthetic construct; identical to SEQ ID NO: 2300
  source 1..110: mol_type = other DNA

SEQ ID NO: 2303 - DNA, 110 bp, synthetic construct
  source 1..110: mol_type = other DNA
acagatgctattttgaaatcttactaaatgatttggggttctgagaagattctagatattagctattgctaggtaacatgtggatccaaataaagaaaatattcctactc

SEQ ID NO: 2304 - DNA, 110 bp, synthetic construct
  source 1..110: mol_type = other DNA
tctctccactctagatgttaaattagcttccatcactgataaaaattgccagaagtcctaagggcctttatacctggagactttcatgcaatgctctggagaaaagaaag

SEQ ID NO: 2305 - DNA, 110 bp, synthetic construct
  source 1..110: mol_type = other DNA
gtgtcctcacatggccattcctctatccgtgtcctaatctcctcttcttagaaggatatgagtcattttggattaataccccattttaacttaattccccttttaaaggc

SEQ ID NO: 2306 - DNA, 110 bp, synthetic construct
  source 1..110: mol_type = other DNA
atatgagtcattttggattaataccccattttaacttaattccccttttaaaggccctgcctctaaatccagtcacattctgaggtctttggggtttagggcttcaacat

SEQ ID NO: 2307 - DNA, 110 bp, synthetic construct
  source 1..110: mol_type = other DNA
cacttctgcccaagtaagaatttggatgattgaggaggcatagcttgttagggtaaggaagaattttatttttcaaaagatgtttattggtctttattcttttttctggt

SEQ ID NO: 2308 - DNA, 110 bp, synthetic construct
  source 1..110: mol_type = other DNA
ttttctttttttatgttggaagggagcttgttgttgccttgttccgactcctgcctttaatcaagaccacactcacaccatcctaaagacaggagctgccatcctatttt

SEQ ID NO: 2309 - DNA, 110 bp, synthetic construct
  source 1..110: mol_type = other DNA
acattagatttttgtaattaggtcaaagtgagagataccactgttgggagctacggctaaagtttaacaatgatttcttagaaggcagttaattagactgggttgggata

SEQ ID NO: 2310 - DNA, 110 bp, synthetic construct
  source 1..110: mol_type = other DNA
agaacactgagataccatgctcagccacaaagtgaggggtctagacagtcagcacatcaagagaccagagcaatagccctgaggcccattttattgggggaactgaccca

SEQ ID NO: 2311 - DNA, 110 bp, synthetic construct
  source 1..110: mol_type = other DNA
gttagcaaagggacaaggcaagagaggcaggatctacatcagccagcacatgcattttgatgtggagtgacacctcctcaactcaagctagaaggtgcaggagtgaagca

SEQ ID NO: 2312 - DNA, 110 bp, synthetic construct
  source 1..110: mol_type = other DNA
agtgactgcctgtgggccccagaagcttggggtgtatcccttggccagctgtggatgcactggggagaaagtgttccaacattctgcttcccctaaaggtggaagaggtg

SEQ ID NO: 2313 - DNA, 110 bp, synthetic construct
  source 1..110: mol_type = other DNA
tcctaggtagttataatgctcagctgggttgagaaccagcaggtgacactataaaaatcacctgaaatcattcaaccctgaactgtgttccaagcaggcatactttttct

SEQ ID NO: 2314 - DNA, 110 bp, synthetic construct
  source 1..110: mol_type = other DNA
cctcacagatgttatatcaggctcttaacccaccgagctacaatgggaacaccttaactcccctatacttcatttctcacttgcttcatttttccagagtcatcacagcc

SEQ ID NO: 2315 - DNA, 110 bp, synthetic construct
  source 1..110: mol_type = other DNA
tgccagggaattataaatggaaaaattctgagagctcatgcagtgttgggagatgtttgagtgccaaccatccacaaaggggaaaccttgttgaagatgtagggcattgg

SEQ ID NO: 2316 - DNA, 110 bp, synthetic construct
  source 1..110: mol_type = other DNA
cgctgccaattctcagcctggctcagcactggaagaaaggtacacagaaactcagtccagcttcttctgtctcctcccaccccatctcacatttagcaaagaggcaaacc

SEQ ID NO: 2317 - DNA, 110 bp, synthetic construct
  source 1..110: mol_type = other DNA
ctctgtttttaccccttaattcctttctcatgcctcctttgggagctttcctaaagtctgccatgtccactggcatggcctggcctttaatgctctgcctagctcactcc

SEQ ID NO: 2318 - DNA, 110 bp, synthetic construct
  source 1..110: mol_type = other DNA
aagctcggataacatctagccctttgttacaggttccatctaactccttagcaccatccggataattcatgactccaactactctgtccttaattacttggctgtttcag

SEQ ID NO: 2319 - DNA, 110 bp, synthetic construct
  source 1..110: mol_type = other DNA
agcaaggaaatgtagtaatagcttaagagcgcaggtttaaaatcagacagatgaaggttcaaattctactattggcacttgttgacacctaggcacatattttggtcaca

SEQ ID NO: 2320 - DNA, 110 bp, synthetic construct
  source 1..110: mol_type = other DNA
tacaaaaggtttctggtcaagttcgtgggcccaaagcacatgttaccttctctcggaaagataagagaattccaagaagtggaatttgtaagaattttgaaaatggggag

SEQ ID NO: 2321 - DNA, 110 bp, synthetic construct
  source 1..110: mol_type = other DNA
ccaggagctaatatttttcaaggcatgagctggacttatagctctgaggatgaccataacaaggaagagtaggtactctagtgtgatgttatgagattcaaaatcaggga

SEQ ID NO: 2322 - DNA, 110 bp, synthetic construct
  source 1..110: mol_type = other DNA
ataacaaggaagagtaggtactctagtgtgatgttatgagattcaaaatcagggatttttagaaaagaaaatggaaattgtctgtaagctgcaatgaggtaaaagtttta

SEQ ID NO: 2323 - DNA, 110 bp, synthetic construct
  source 1..110: mol_type = other DNA
gaatgactcagaagaccgctcaaattgttgtccagcaaattcatgccataaaataaaacggctctggctttaagctgctaagtttaggtggagtggacatctttgtggtg

SEQ ID NO: 2324 - DNA, 110 bp, synthetic construct
  source 1..110: mol_type = other DNA
ggctccatcttggtgcaaattgctgctgggttgatttcttaggatcaagctaagtttttaaaaaaggagtttaattaaaagtaaatgagtgggagagaaagtagcctgtt

SEQ ID NO: 2325 - DNA, 110 bp, synthetic construct
  source 1..110: mol_type = other DNA
tgggtccttaacctgctgagccacaatgggaacttcaagatgtgaagcattatattgaggtaaaagcttgtcctagtggaagctttaaaaaaatgtctaatcacaaaata

SEQ ID NO: 2326 - DNA, 110 bp, synthetic construct
  source 1..110: mol_type = other DNA
tgaggtaaaagcttgtcctagtggaagctttaaaaaaatgtctaatcacaaaatactagggatgtagtgtttccattaagagaatggacagttgcattttccatgattct

SEQ ID NO: 2327 - DNA, 110 bp, synthetic construct
  source 1..110: mol_type = other DNA
tgttcttgcaccataacctggagcattcataactatatgctggcattcaggggcagctatgtactctgagggccccaggttgcatgctctgtgggagatcactatccaag

SEQ ID NO: 2328 - DNA, 110 bp, synthetic construct
  source 1..110: mol_type = other DNA
tggtttcattgccttctctagaaatctttccagctgaatcattgaggtgcttcctgtcagtaagaactcagtctcttttccccccatcctgaaaattctgccttctatag

SEQ ID NO: 2329 - DNA, 110 bp, synthetic construct
  source 1..110: mol_type = other DNA
gtcagtaagaactcagtctcttttccccccatcctgaaaattctgccttctatagaaatgtttgtgagctctgtacatgaagaacacactatatgaaaactttcagaagt

SEQ ID NO: 2330 - DNA, 110 bp, synthetic construct
  source 1..110: mol_type = other DNA
attcatatatagatccaagaagagttcttgagggttctttgattttcaaaatatcagcactttataggtgtgaagtaaaaactaatttaagcagtctagcagcttccaag

SEQ ID NO: 2331 - DNA, 110 bp, synthetic construct
  source 1..110: mol_type = other DNA
agcactttataggtgtgaagtaaaaactaatttaagcagtctagcagcttccaagtgtgctagagtatatccttcttttgaaaaacactgtcttccttgttttagttgta

SEQ ID NO: 2332 - DNA, 110 bp, synthetic construct
  source 1..110: mol_type = other DNA
gggacacctctattgctgttttacctctgttttaaaaacaaataagattagttagtatacgtagtgttattgtatataggccacgaatttccaaactacttacatagctg

SEQ ID NO: 2333 - DNA, 110 bp, synthetic construct
  source 1..110: mol_type = other DNA
gtagcattctcagcaggccaaagagtccttgttaaaaagccaactaacaacaacaaaagtaaagaacacatacactgttagttactaacaacatttaataccattaacaa

SEQ ID NO: 2334 - DNA, 110 bp, synthetic construct
  source 1..110: mol_type = other DNA
aaagtaaagaacacatacactgttagttactaacaacatttaataccattaacaaaatgttcattgcagggctaataaactgtcctctagaaacattctccacattcacc

SEQ ID NO: 2335 - DNA, 110 bp, synthetic construct
  source 1..110: mol_type = other DNA
ggtaatgactggcactgtagtgggaattaattcaaggagctgagccaagaaatgagagactgctagaaaaggagcagtgtgtcaggcacttttccaggagaggaatggta

SEQ ID NO: 2336 - DNA, 110 bp, synthetic construct
  source 1..110: mol_type = other DNA
ttgggaaacgcaagaagtcctatatcaggaacatactggaaaggttaaaacaatccaaacaagattatccaatattcagattaggtatgttaaattttacccttgaataa

SEQ ID NO: 2337 - DNA, 110 bp, synthetic construct
  source 1..110: mol_type = other DNA
caggaacatactggaaaggttaaaacaatccaaacaagattatccaatattcagattaggtatgttaaattttacccttgaataaaatgatgaattctgacttctgagct

SEQ ID NO: 2338 - DNA, 110 bp, synthetic construct
  source 1..110: mol_type = other DNA
gaagcctccaaggtcttggaaacaatttacctcttggcctcatgttcctattattaacctggcaggcctaccctctgaatttgatatctgactagctctgttgtgccagt

SEQ ID NO: 2339 - DNA, 110 bp, synthetic construct
  source 1..110: mol_type = other DNA
cttgcttgtatttttatatttaactgaacagaccttccatggacatcatctggcctgaaatttaactataactaaagtgacatatttatgttagttcaacccatacttat

SEQ ID NO: 2340 - DNA, 110 bp, synthetic construct
  source 1..110: mol_type = other DNA
aggatttctataatgtgttcattattcttcccccaagcatggcctcaggtctatcaaactgctcagctacattgtagtaaccctcccccaaatgggtctgctcccctcca

SEQ ID NO: 2341 - DNA, 110 bp, synthetic construct
  source 1..110: mol_type = other DNA
taattcattttaaacactccccacacacaaataacaaagccattatactagttcgctgctcccagataggaagctctccatccatggcttctgattcagcttagttctat

SEQ ID NO: 2342 - DNA, 110 bp, synthetic construct
  source 1..110: mol_type = other DNA
ctggcactgaggctggtgggggtgccaggggcggcttgggggacctggtccatggggataaggagaaacccaacaaagctgggcgtgcttggggagaggtgaaggcaggg

SEQ ID NO: 2343 - DNA, 110 bp, synthetic construct
  source 1..110: mol_type = other DNA
ggataaggagaaacccaacaaagctgggcgtgcttggggagaggtgaaggcaggggagtcccaggaagggccagaccctgtaatgcctaactgctgacatagacagcatg

SEQ ID NO: 2344 - DNA, 110 bp, synthetic construct
  source 1..110: mol_type = other DNA
agtgtgcctgaaattttctcttggtaacttgaagataataattgcagaagaacttttctacagagaaccgggagagggagaaaataactgctgacatgaaggctgcctgg

SEQ ID NO: 2345 - DNA, 110 bp, synthetic construct
  source 1..110: mol_type = other DNA
ttctacagagaaccgggagagggagaaaataactgctgacatgaaggctgcctggcccctgggctgctgtttaaaagaatgcttggccacagagggctcagcccaagagg

SEQ ID NO: 2346 - DNA, 110 bp, synthetic construct; identical to SEQ ID NO: 2344
  source 1..110: mol_type = other DNA

SEQ ID NO: 2347 - DNA, 110 bp, synthetic construct; identical to SEQ ID NO: 2345
  source 1..110: mol_type = other DNA

SEQ ID NO: 2348 - DNA, 110 bp, synthetic construct
  source 1..110: mol_type = other DNA
aggaagctgcaaagttgaacaagacaagatttccgacctcagggagctctgagcccagtagaggaaacagatgtgtaaacaaacaattacagtgcaatgtgatgaatgca

SEQ ID NO: 2349 - DNA, 110 bp, synthetic construct
  source 1..110: mol_type = other DNA
gatcctgcattgccatgaactgtggtgtgggtaggagatactgctaagatctggcattgctatggcttatggcacaggctggcagctgtagttatgattcgaccccttgc

SEQ ID NO: 2350 - DNA, 110 bp, synthetic construct
  source 1..110: mol_type = other DNA
tcaaacaatgagaattccattactttccttgcaactgaattatttttatatttcataaaatcgaactaacagtcattttaaagagaagaaaagggagttcccggcatggc

SEQ ID NO: 2351 - DNA, 110 bp, synthetic construct
  source 1..110: mol_type = other DNA
tccattactttccttgcaactgaattatttttatatttcataaaatcgaactaacagtcattttaaagagaagaaaagggagttcccggcatggcgcagcggaaatgaat

SEQ ID NO: 2352 - DNA, 110 bp, synthetic construct
  source 1..110: mol_type = other DNA
taggtaaagttggcagaaattgacatcttaacgatagaattagcctaatatagtctctacatgtattatgtactttcaactccagatctcaagaggcaaaatcctttgag

SEQ ID NO: 2353 - DNA, 110 bp, synthetic construct
  source 1..110: mol_type = other DNA
tctacatgtattatgtactttcaactccagatctcaagaggcaaaatcctttgaggcctaattttggagctaacaaactatcaattctgcctcattcgattgacccaagc

SEQ ID NO: 2354 - DNA, 110 bp, synthetic construct
  source 1..110: mol_type = other DNA
tactgtgtaccactgctgctcccagcaatgggctaagcccgctgactgagaagcatcagaaagcccactgaaagcagtcagcctgaaatctacctgcttggctccacagg

SEQ ID NO: 2355 - DNA, 110 bp, synthetic construct
  source 1..110: mol_type = other DNA
tcagaaagcccactgaaagcagtcagcctgaaatctacctgcttggctccacaggccagtgggtctccaccatgagcttgcagagcctttagagaacacatacctgtccc

SEQ ID NO: 2356 - DNA, 110 bp, synthetic construct
  source 1..110: mol_type = other DNA
tgtgagtgcctgaatgaaacaagcaaattacattttagtagtctataatattgtcccttaagaaaaaatgatagagctaaacattgtagcagaaatgaaactgttacagg

SEQ ID NO: 2357 - DNA, 110 bp, synthetic construct; identical to SEQ ID NO: 2356
  source 1..110: mol_type = other DNA

SEQ ID NO: 2358 - DNA, 110 bp, synthetic construct
  source 1..110: mol_type = other DNA
aggtgaccaattaggaaaaaactgctgggtctagactagccaaaagcatagtatatatacctatttcttttcccaaaaactcttagctatgctttaactcaactccatct

SEQ ID NO: 2359 - DNA, 110 bp, synthetic construct
  source 1..110: mol_type = other DNA
aaatctattgaaaaacagttccaatcatttgctaaaaattaatacagccgcattttttgcttttgtggccactgcacgtatatagtacgatacgatgaaataggaaatta

SEQ ID NO: 2360 - DNA, 110 bp, synthetic construct
  source 1..110: mol_type = other DNA
tttgcttttgtggccactgcacgtatatagtacgatacgatgaaataggaaattaacctttattgaagacgaacccctcttttgttacagggaggacacagggaaacagc

SEQ ID NO: 2361 - DNA, 110 bp, synthetic construct
  source 1..110: mol_type = other DNA
atctggcacttaggagattttcagtaccttatctgttgatgaacgaagaacatatatctgatagcacattcctctgaggttcagtttcttaatttcataaaatgacatta

SEQ ID NO: 2362 - DNA, 110 bp, synthetic construct
  source 1..110: mol_type = other DNA
atctgatagcacattcctctgaggttcagtttcttaatttcataaaatgacattagtaatagcagtaaccagcacatgagtttgttttaacaacccaattgaataatgtg

SEQ ID NO: 2363 - DNA, 110 bp, synthetic construct; identical to SEQ ID NO: 2361
  source 1..110: mol_type = other DNA

SEQ ID NO: 2364 - DNA, 110 bp, synthetic construct; identical to SEQ ID NO: 2362
  source 1..110: mol_type = other DNA

SEQ ID NO: 2365 - DNA, 110 bp, synthetic construct
  source 1..110: mol_type = other DNA
cactcacaacacctgttgtcccttcatcctgcctagagctttgtctctgtttcggatctcaggggcaataggaattcctcagagagggcactatgccagggttctggagg

SEQ ID NO: 2366 - DNA, 110 bp, synthetic construct
  source 1..110: mol_type = other DNA
cctcagtgcttatctggattcttcatcagaatggggagctttctgttggccttcagtataatactgatttctattattagctcctctacagtatttcttggtttttggct

SEQ ID NO: 2367 - DNA, 110 bp, synthetic construct
  source 1..110: mol_type = other DNA
ttctagcacagaactgttctcagagtgtttcagctatggttgcattgttccctccagctggatcacaagcttctcatacagaagacccatttttcattcttttcagttcc

SEQ ID NO: 2368 - DNA, 110 bp, synthetic construct
  source 1..110: mol_type = other DNA
tcacacaagtatttaaatgacattacgggttaaaggattttttaaaaaaaatatgtgcagaggtgttaatgagatgtacaaaatatgtcagaacgaggatcagcacacaa

SEQ ID NO: 2369 - DNA, 110 bp, synthetic construct
  source 1..110: mol_type = other DNA
tgctttcttctgttatttgccaatgaaaatcagtatctatggacgatgacgttttgctgctggttttgatataaacagactaacaactcagggtctgtgggagcttcata

SEQ ID NO: 2370 - DNA, 110 bp, synthetic construct
  source 1..110: mol_type = other DNA
gctgctggttttgatataaacagactaacaactcagggtctgtgggagcttcatatttggtagagtatattattaagggtagtctctggggccagagagcttggatttga

SEQ ID NO: 2371 - DNA, 110 bp, synthetic construct
  source 1..110: mol_type = other DNA
tatccaaagtgcgtttgtttgttttttgagttcttcattatcttctggctctaaaggatgctttaagctaatcttctgtattttctatcccagtctcagaattagttatt

SEQ ID NO: 2372 - DNA, 110 bp, synthetic construct
  source 1..110: mol_type = other DNA
tgtcaatcttttctttctttgcttagcttttccacccctctagtagactcaatactgccattattacaattaatagagtgaaaatcacaagtatgcatatgattttctca

SEQ ID NO: 2373 - DNA, 110 bp, synthetic construct
  source 1..110: mol_type = other DNA
cactctccactagttggactctgcttcagctaagccgatcagactcatgctggatgtcttgggttggtactggctaagtggggctgctgccttggtctttctctcaggac

SEQ ID NO: 2374 - DNA, 110 bp, synthetic construct
  source 1..110: mol_type = other DNA
tagggccactgctgctacctgcagcccttctcaccttgagctgtttgatgatctcttgtcctccactcccagagccactgtttgggaagctactgccactaattcctcag

SEQ ID NO: 2375 - DNA, 110 bp, synthetic construct
  source 1..110: mol_type = other DNA
gtttattctagttattagacccctgcttttttttcatacactgagtgcatggaacaaacagcttgactctttcatctactgaagtgacgtataaaatgaactgttgtggc

SEQ ID NO: 2376 - DNA, 110 bp, synthetic construct
  source 1..110: mol_type = other DNA
attattttaaagcatatgaagtaacttctgtttcaggaaaactgttaccatagaggaggtcattcagctagaacagtcaggtttttttcaatgtcgtatcatgaaactca

SEQ ID NO: 2377 - DNA, 110 bp, synthetic construct
  source 1..110: mol_type = other DNA
gtaaatctttttcaaacatctctaacatccatgattcttctctcaataacagaacctcttcctgttttcccacagaaggccccacagagcatttctgcctttgtgtttgc

SEQ ID NO: 2378 - DNA, 110 bp, synthetic construct
  source 1..110: mol_type = other DNA
ctgagaagctggagcatgtatcctcagacagacaaactttaaaataacgcctagagtaacaagtatcaaccatcctagaagactgtcatatgccatcaagggttatatcc

SEQ ID NO: 2379 - DNA, 110 bp, synthetic construct
  source 1..110: mol_type = other DNA
ggatgtgcccttttcagatgcattgaaacctgggttttggaaagttttccccaggttgcatctctgccttataacccttacaaagctgggatcaaccattgctgtttaat

SEQ ID NO: 2380 - DNA, 110 bp, synthetic construct
  source 1..110: mol_type = other DNA
agtacagattactgtaaagtacttgaaggaatctgcttatatgaatcagctggatctatcatgacaaaataccatagactgtgtggcttaaacaacagaaatctatgttc

SEQ ID NO: 2381 - DNA, 110 bp, synthetic construct
  source 1..110: mol_type = other DNA
tgtcaggtccgtcatctgcaattatattttattcaagtgtaggcccagcactgaatataaagatactgaaattagaaaatgaaattttaaaatcctaaataagcagaatc

SEQ ID NO: 2382 - DNA, 110 bp, synthetic construct
  source 1..110: mol_type = other DNA
ttgcttgcctaaccctagcctcatgtggcagtgctgacagatctgatatgaactagggcagcagttctcagcttcaggtgggtatacaaggtatttagcaagttctaagt

SEQ ID NO: 2383 - DNA, 110 bp, synthetic construct
  source 1..110: mol_type = other DNA
tgacaagatcttgatcataatccctttgcacagaccactgagccacaggccgttcaccaagaacacactgaatgatgaggtcaggttatcctatacagccacgcttcatg

SEQ ID NO: 2384 - DNA, 110 bp, synthetic construct
  source 1..110: mol_type = other DNA
gcaaagactgctaccccaaatcctaaggccactcccacatttgccccataagagagggagagaagaattcctgctgtggcacaacaggatcagcatcctcttggaaacac

SEQ ID NO: 2385 - DNA, 110 bp, synthetic construct
  source 1..110: mol_type = other DNA
gatccccagggattcttgcctctagccagcagctgtcttccagcttcaagtccgtgtctgcggtttggccagtccagacccgcagtgctctttctcttttgctaatgagt

SEQ ID NO: 2386 - DNA, 110 bp, synthetic construct
  source 1..110: mol_type = other DNA
ttggcatatgtgagtttcagctattgtgtgggatatgcttgtattaaaaaactatctgttgtttagctgaaaatctgattgcactaggtgtttcctattctgtctggcag

SEQ ID NO: 2387 - DNA, 110 bp, synthetic construct
  source 1..110: mol_type = other DNA
tctttagagggagtgggtttgatatcaggaagtaaaccaacagtgagccagtggcatttgtttctgacacttgagctagctcaccatatcccagccacaaatatgcatga

SEQ ID NO: 2388 - DNA, 110 bp, synthetic construct
  source 1..110: mol_type = other DNA
caggaggctctgccgtctctggataagcctggctggtactcccaggggaatgcggtccacctttatgaacttctgaagaaaatgactggccaacctgaacccaaggtatt

SEQ ID NO: 2389 - DNA, 110 bp, synthetic construct
  source 1..110: mol_type = other DNA
aggtttgaagatcgaggaaggaacaaggatccaagaaataaaggaggcctctagaagctggaaaggtaaggaaatagtttcccatagagcctccaaaggaatgcagctct

SEQ ID NO: 2390 - DNA, 110 bp, synthetic construct
  source 1..110: mol_type = other DNA
agaagcttagagacaaaactgctgaagtcagactcttgattggcattttcgctgcttttaatagaagctcaggtctattcctcctccacagaggccagaggagcacatca

SEQ ID NO: 2391 - DNA, 110 bp, synthetic construct
  source 1..110: mol_type = other DNA
atcctcaggggtactagtcgagttcgttaccgatgagccacaatggggactccctcagtgcaacctttttaagctacaatttgcagttgattattgggtcttgatatcta

SEQ ID NO: 2392 - DNA, 110 bp, synthetic construct
  source 1..110: mol_type = other DNA
caagggttttcacatgcttccctttctagtgtgcgttgagcttactaggagtgattcctaaaaggggagcattgtgttggagtttcagtaaagcctctaacatgtggcat

SEQ ID NO: 2393 - DNA, 110 bp, synthetic construct
  source 1..110: mol_type = other DNA
ccgcccctgcctgctctgcactcagaagccctaggacctggtctccagctgccacaccatctgttgtgaaaacgaccctccaggtctgcccagactcttctgatcaaaga

SEQ ID NO: 2394 - DNA, 110 bp, synthetic construct
  source 1..110: mol_type = other DNA
aagtattttgatcaactcacaatggtgaaagtctggtgtctttagtgaaacctaatctttcctctacttgccccagcttccagtaatacactggagtaggattattgctg

SEQ ID NO: 2395 - DNA, 110 bp, synthetic construct
  source 1..110: mol_type = other DNA
aaaaccccaaagatggggggctatgatagagttgaagactatttttctatggcataggttccaccaagctccaataaaggatagagaagtaacaatagaatccccttgac

SEQ ID NO: 2396 - DNA, 110 bp, synthetic construct
  source 1..110: mol_type = other DNA
aggttccaccaagctccaataaaggatagagaagtaacaatagaatccccttgacaagagacccagagtagggggataatattctcctgagtagtaggaacttgacacct

SEQ ID NO: 2397 - DNA, 110 bp, synthetic construct
  source 1..110: mol_type = other DNA
ttctccattctaaagctttgaagatcagagccatggagtccaggatggtagtcagtgatgggtgaaaagtagccctatacagaatgtgaggagatcacaaaagtgggtaa

SEQ ID NO: 2398 - DNA, 110 bp, synthetic construct
  source 1..110: mol_type = other DNA
gaactgccaagttgatcgctttcagtcaactctccttcagcacagaggggctaaagatcatgtttaaatggtcattctttaaacaaatatttattttgcacttattttgt

SEQ ID NO: 2399 - DNA, 110 bp, synthetic construct
  source 1..110: mol_type = other DNA
atggctctggttacagctgtggcatgggttcagcccgggaaatttcacacacctcaggtgtggccgaaaaaacgaggggaaaataagatatcccactatgcttagcccta

SEQ ID NO: 2400 - DNA, 110 bp, synthetic construct; identical to SEQ ID NO: 2399
  source 1..110: mol_type = other DNA

SEQ ID NO: 2401 - DNA, 110 bp, synthetic construct
  source 1..110: mol_type = other DNA
gacaaaatcccaaataggagccagggaagtaaagaggaaccaaggaacccaaaatgaagaccaagaagaaatagaaaagtgggaagagaagctggacaccagggcctaag

SEQ ID NO: 2402 - DNA, 110 bp, synthetic construct
  source 1..110: mol_type = other DNA
gaagaccaagaagaaatagaaaagtgggaagagaagctggacaccagggcctaagaactcaaggaaagagtctccaggagtttttacctgattcaaagtctcagggaagt

SEQ ID NO: 2403 - DNA, 110 bp, synthetic construct
  source 1..110: mol_type = other DNA
gaaattttggtcctctccatacaaacatgctttggggtctacccactatgtgccatcccccacaagagagtacctccaaggctgctataacatagctaatgagtctatgc

SEQ ID NO: 2404 - DNA, 110 bp, synthetic construct
  source 1..110: mol_type = other DNA
tcccccacaagagagtacctccaaggctgctataacatagctaatgagtctatgccaatatctaacattttatcataagctctcaattattttctaacaatttttaaaaa

SEQ ID NO: 2405 - DNA, 110 bp, synthetic construct
  source 1..110: mol_type = other DNA
tcacttgtctaggtaacttatctgtgctgaatactgtgcaaacttctcagtggatttacctagacacccagaattgacattcagcttggctggttctaagcccaggattc

SEQ ID NO: 2406 - DNA, 110 bp, synthetic construct
  source 1..110: mol_type = other DNA
ttacctagacacccagaattgacattcagcttggctggttctaagcccaggattcatctgccagtgaccttgtctttaaaaagtaataatccagtgatttttgtggttag

SEQ ID NO: 2407 - DNA, 110 bp, synthetic construct
  source 1..110: mol_type = other DNA
taagtaacagaggcaggttgtaaactggatctctggcccaagtccagtgtcctttgctccactctgcatggaaaagaaaatcgcagttcttttccatttgagggcagtgt

SEQ ID NO: 2408 - DNA, 110 bp, synthetic construct
  source 1..110: mol_type = other DNA
gctccactctgcatggaaaagaaaatcgcagttcttttccatttgagggcagtgtcagaaaagacctcatggagattatagtgtttgaattggccatgaaaaatgagatc

SEQ ID NO: 2409 - DNA, 110 bp, synthetic construct
  source 1..110: mol_type = other DNA
atgcccctaaaggtattgcctgagacacattatataatcaaatcaccagtggatatctatacatctacatccctatagacctgaatcctaaccatagaccttaaagcagc

SEQ ID NO: 2410 - DNA, 110 bp, synthetic construct
  source 1..110: mol_type = other DNA
aaaacacactgtgaactcagagggcatgagctgaatgggtctatctcagagcagtatgaactgtggtataaattactgtctcaaacttgattccactggtgttactgtcc

SEQ ID NO: 2411 - DNA, 110 bp, synthetic construct
  source 1..110: mol_type = other DNA
gccaaaacatcaaattgctgaaattctaactaaaaatcatattcttaggacacttcagtttcttccagtgatagtgatggatggtgttttctttttaaaagttcaaacta

SEQ ID NO: 2412 - DNA, 110 bp, synthetic construct
  source 1..110: mol_type = other DNA
cagtttcttccagtgatagtgatggatggtgttttctttttaaaagttcaaactaagtataaagagcagtgttcctgatttactcatgttgtttgttttcattagataaa

SEQ ID NO: 2413 - DNA, 110 bp, synthetic construct
  source 1..110: mol_type = other DNA
attctgtgtgataagcactatgctagaggtgtagaagttgctttggaatcataggaggggctcctaacatatattggacagtgattcaggcacaacttcccaaaggaagc

SEQ ID NO: 2414 - DNA, 110 bp, synthetic construct
  source 1..110: mol_type = other DNA
aggggctcctaacatatattggacagtgattcaggcacaacttcccaaaggaagcagcctgagaatcctatcataagtaaggtaatactatttaatttttaaaattcatt

SEQ ID NO: 2415 - DNA, 110 bp, synthetic construct
  source 1..110: mol_type = other DNA
ttttatttccccaatacattacttttttttctactgtacaacatggtgacacagttatacatacatgtgatcttttttaattcgtgattcttcctcagacctagtggttc

SEQ ID NO: 2416 - DNA, 110 bp, synthetic construct
  source 1..110: mol_type = other DNA
gtgacacagttatacatacatgtgatcttttttaattcgtgattcttcctcagacctagtggttctgaagttgtcagttggttctctcattatttcttttttttttaatt

SEQ ID NO: 2417 - DNA, 110 bp, synthetic construct
  source 1..110: mol_type = other DNA
ttctgttattctgttatcaggttacatgatagacaaatgctagcctctgcataatatttttgccttggaaaaatgggccatcggaacaaaccattgaggcgccccagtca

SEQ ID NO: 2418 - DNA, 110 bp, synthetic construct
  source 1..110: mol_type = other DNA
atttttgccttggaaaaatgggccatcggaacaaaccattgaggcgccccagtcaactgtgccctaacagaagcttgatttttccagtaaaaatgtcatgtcagattatt

SEQ ID NO: 2419 - DNA, 110 bp, synthetic construct
  source 1..110: mol_type = other DNA
accatgaaatagctaccctgctcctctatttatcatttgtttgtatttttgtcctaaatgctataacatacaaaaaatatgcctctgagtataccatttatgtattttgg

SEQ ID NO: 2420 - DNA, 110 bp, synthetic construct; identical to SEQ ID NO: 2419
  source 1..110: mol_type = other DNA

SEQ ID NO: 2421 - DNA, 110 bp, synthetic construct
  source 1..110: mol_type = other DNA
catttacctcttatccatatatgctaaacatcagtattttaaataatccatcagtatcagtgaggttgactgaaatggattatttggtcactaatgatactcaaatactt

SEQ ID NO: 2422 - DNA, 110 bp, synthetic construct
  source 1..110: mol_type = other DNA
aaaatacagaccaaacttgactaatagcgtaatagcctacatttctaactccactcatgagatctggaagtctttcataatttttaaatattgggatcttttataatgag

SEQ ID NO: 2423 - DNA, 110 bp, synthetic construct
  source 1..110: mol_type = other DNA
tgtaacaaatgcctgttgtgtaggttgcagacaggcaagtaattagcaccacagatgctgaaagacaagtagttaaacctcctggactccaggaagcgatcaatgacctg

SEQ ID NO: 2424 - DNA, 110 bp, synthetic construct
  source 1..110: mol_type = other DNA
tgctgaaagacaagtagttaaacctcctggactccaggaagcgatcaatgacctggtaaagaagtacaagctttcccgagcttttgtacggccctcgggtacggaagacg

SEQ ID NO: 2425 - DNA, 110 bp, synthetic construct
  source 1..110: mol_type = other DNA
ctgtgccacttctgggcactaaagattgatgacagcaaacagtgaagaatcactttctgaactttgcacttcgataacatgtcagagataaaactagggaaaccttttgc

SEQ ID NO: 2426 - DNA, 110 bp, synthetic construct
  source 1..110: mol_type = other DNA
ttgtttccactaagccgccatgggaactccaatctctagaactttaaaatcttgaaaaaccgaaactctataccagttaaacgcgtgctttctccctttcctccaagctc

SEQ ID NO: 2427 - DNA, 110 bp, synthetic construct
  source 1..110: mol_type = other DNA
aaaaccgaaactctataccagttaaacgcgtgctttctccctttcctccaagctcctggcaactaccattttactctgtttctaatgcatatgactactttagatacctt

SEQ ID NO: 2428 - DNA, 110 bp, synthetic construct; identical to SEQ ID NO: 2426
  source 1..110: mol_type = other DNA

SEQ ID NO: 2429 - DNA, 110 bp, synthetic construct; identical to SEQ ID NO: 2427
  source 1..110: mol_type = other DNA

SEQ ID NO: 2430 - DNA, 110 bp, synthetic construct
  source 1..110: mol_type = other DNA
atcccttcgccatgtgaattctttccaggtaaggaatggctcctttataagcaaggtgtgatttttcagcctaactcatggttgttttttaaggatgcggtctttctcag

SEQ ID NO: 2431 - DNA, 110 bp, synthetic construct
  source 1..110: mol_type = other DNA
taagagttgtctccaggtgtagctctttcctgatacagagacatctttacaaatggaaatttcctttatatatgtaaatttccgttacaaatggggacatttatatttta

SEQ ID NO: 2432 - DNA, 110 bp, synthetic construct
  source 1..110: mol_type = other DNA
gaaatttcctttatatatgtaaatttccgttacaaatggggacatttatattttatttttagatagttacagggaggttcaaaagcttttctcttgcctctgctggttct

SEQ ID NO: 2433 - DNA, 110 bp, synthetic construct
  source 1..110: mol_type = other DNA
cgcacacagaagtgcccttctctctctgtcctctgggcccccagtgcatccaacagaggtcagctagaatattttcagaaaccagggctccagttatatcaccctcctca

SEQ ID NO: 2434 - DNA, 110 bp, synthetic construct
  source 1..110: mol_type = other DNA
gaggtcagctagaatattttcagaaaccagggctccagttatatcaccctcctcaaaaccccatgactctgactccttgcagaattgcccccaaatcctgttagacctct

SEQ ID NO: 2435 - DNA, 110 bp, synthetic construct
  source 1..110: mol_type = other DNA
caggaggcctttgcttgtcatgttctcagatgggggccagaaacctggactttttggtgctttaaagttcactaggattgagagatagctgggaacatggatctctaagt

SEQ ID NO: 2436 - DNA, 110 bp, synthetic construct
  source 1..110: mol_type = other DNA
ttagtcaccatgtccatttaattagctttgtaaaatacctagtacaacttacaaaaagttttcccatatgcttgtataatgggccaatgtttgaaaagtagaaaagggtt

SEQ ID NO: 2437 - DNA, 110 bp, synthetic construct
  source 1..110: mol_type = other DNA
tgatctcagcccaaggccaacaggagggcatatgcaacccacacaagggacacccctggaacacctgtctctagagacagggggggaattgcatcgccgggctccacagt

SEQ ID NO: 2438 - DNA, 110 bp, synthetic construct
  source 1..110: mol_type = other DNA
ctggaacacctgtctctagagacagggggggaattgcatcgccgggctccacagtacaccatctacatatggacattagtagtaatttccaaatgaaaaagcaagacaaa

SEQ ID NO: 2439 - DNA, 110 bp, synthetic construct; identical to SEQ ID NO: 2437
  source 1..110: mol_type = other DNA

SEQ ID NO: 2440 - DNA, 110 bp, synthetic construct; identical to SEQ ID NO: 2438
  source 1..110: mol_type = other DNA

SEQ ID NO: 2441 - DNA, 110 bp, synthetic construct
  source 1..110: mol_type = other DNA
atcaaaatttaaggcattaagcatcgttctcagctatggctctgcagttctcacagctgctttttttgatccttgtgtggtgttcgtgggtcattgggtttctgcttaat

SEQ ID NO: 2442 - DNA, 110 bp, synthetic construct
  source 1..110: mol_type = other DNA
ctcagggtcacaggcagaggtgggagtgggcagaaaacagaatgttacaatagtaggtacagatacagctgaaatatcaatgtcattttttttttctttttaaagctgca

SEQ ID NO: 2443 - DNA, 110 bp, synthetic construct
  source 1..110: mol_type = other DNA
tccacatgcctccagtgagtagggcaattgcacagcttttctcagcatccccccttcagagccctcattcaagctgtacttaaaagcaggaaggtttctcggccacagtc

SEQ ID NO: 2444 - DNA, 110 bp, synthetic construct
  source 1..110: mol_type = other DNA
gaggcacagtttggggtgcactatgatttctagttttagaatgacagaggaaagacatcttcagctttcccttgaaaatcacttttggagggagaggggggctgcaccca

SEQ ID NO: 2445 - DNA, 110 bp, synthetic construct
  source 1..110: mol_type = other DNA
ccccatgatcctgtgttctcggccacatcacccagccactccctccagggccttaatggtgctgccaagaatagtgttcagcttcttgctctgggactacaggaggcaga

SEQ ID NO: 2446 - DNA, 110 bp, synthetic construct
  source 1..110: mol_type = other DNA
tcaattaaaagatgggcgtctacttcctgaaaaacagtgaacacaaggcccacatgacacagggaaagtaaatcatgtccaagtaacagaaaataatccttccattattc

SEQ ID NO: 2447 - DNA, 110 bp, synthetic construct
  source 1..110: mol_type = other DNA
gtacattttaactagataattttagaagagggaagaatgtaggtcaataccaaaatctaagttataggctgttgtgtgcactatttgtgggaccacataccacactagag

SEQ ID NO: 2448 - DNA, 110 bp, synthetic construct
  source 1..110: mol_type = other DNA
tctaagttataggctgttgtgtgcactatttgtgggaccacataccacactagagaaaggaaattccatgtatagtatggcaaagtacctaggcaggacttaactgttta

SEQ ID NO: 2449 - DNA, 110 bp, synthetic construct
  source 1..110: mol_type = other DNA
tatacaaatatttgtgctgaccggtaagctgataagtgccaactggagtcaattcatttaagaggaaaattatttatgattacaatttggctgtaaggcttcttgagtat

SEQ ID NO: 2450 - DNA, 110 bp, synthetic construct
  source 1..110: mol_type = other DNA
ctcataggctccctgcagggccactagcttgcctggttcccctgcccctgggttaagccctcctggctaagtaagaaactcccatcagccagggcaggtgccttctggcc

SEQ ID NO: 2451 - DNA, 110 bp, synthetic construct
  source 1..110: mol_type = other DNA
ccagcccacccttctgctaccttaggtatttcttgttttaggaaattaatcatgaaatctattaatttaaactgaactaagacatatgatctccatgttgatatgaaaaa

SEQ ID NO: 2452 - DNA, 110 bp, synthetic construct
  source 1..110: mol_type = other DNA
ttagaattgccatgctgtccagaacatggattcctccagaagtatgtatgaatgtgtataactgattggaactgggactatacgaggtggagggggaagcatagagcctt

SEQ ID NO: 2453 - DNA, 110 bp, synthetic construct
  source 1..110: mol_type = other DNA
gtataactgattggaactgggactatacgaggtggagggggaagcatagagcctttgggggaattagtgtcaccaagaataaggtttaaagcttctttctatttcttagc

SEQ ID NO: 2454 - DNA, 110 bp, synthetic construct
  source 1..110: mol_type = other DNA
ctgttattcaaatgtttatcatttccagggaaatttctcatttgctacatgtctaaagtttaaggtcacttgtttgagtgtattgtttacacaaatacagtatgtttctc

SEQ ID NO: 2455 - DNA, 110 bp, synthetic construct
  source 1..110: mol_type = other DNA
aagtttaaggtcacttgtttgagtgtattgtttacacaaatacagtatgtttctcattagtgactgtgaaaaacacccaaatatgccatttccaatcaagtctgattttc

SEQ ID NO: 2456 - DNA, 110 bp, synthetic construct
  source 1..110: mol_type = other DNA
gagacccattagtgtcacataggggaggatcatagccagcacctagatgccaaacaatagcttggaaagtatgtagttagaccacatccagggagaaactggagggttgg

SEQ ID NO: 2457 - DNA, 110 bp, synthetic construct
  source 1..110: mol_type = other DNA
aatagcttggaaagtatgtagttagaccacatccagggagaaactggagggttggcattttgcctgctctccttgtgcttgttccaggtttaaaatgttgtgtgcagaat

SEQ ID NO: 2458 - DNA, 110 bp, synthetic construct
  source 1..110: mol_type = other DNA
ccttctcttgctttgaaaagcttcccagcccagccaagctgattcagactctagcaggggttgtcagccactgctctgggatgtttgtggaaacaggccgtgtgttttcc

SEQ ID NO: 2459 - DNA, 110 bp, synthetic construct
  source 1..110: mol_type = other DNA
aatagtacacctttaattggctattcccaaatgcagatgaagctattttgtgggctcctggttctaaactcctgaaaagggttggggtggggtagggttgaagttcaggg

SEQ ID NO: 2460 - DNA, 110 bp, synthetic construct
  source 1..110: mol_type = other DNA
ataagtgaccattttcatgctgcaaagacagagaagagaaagtatctaatgtctttctcttctgcaaagagaggaaggctgagcaacttgaaaagattcagatgcccact

SEQ ID NO: 2461 - DNA, 110 bp, synthetic construct; identical to SEQ ID NO: 2460
  source 1..110: mol_type = other DNA

SEQ ID NO: 2462 - DNA, 110 bp, synthetic construct
  source 1..110: mol_type = other DNA
tgtttttaactgaattgtcatcacaggccactgctcctggaagagaccaccagaaggatgacttctaatctcactggaccctcttcaagggctcagcctctacaaatgag

SEQ ID NO: 2463 - DNA, 110 bp, synthetic construct; identical to SEQ ID NO: 2462
  source 1..110: mol_type = other DNA

SEQ ID NO: 2464 - DNA, 110 bp, synthetic construct
  source 1..110: mol_type = other DNA
ctgaaatttgtaatatttacattaagctatttttcatataaatctatgacttcatcatcttccacaggcctgccaagaaagtgatttttttttgcaaggtagctatctca

SEQ ID NO: 2465 - DNA, 110 bp, synthetic construct
  source 1..110: mol_type = other DNA
tgcaatgatttcacaactctgttatttgttacatatgtaaatctggtagctaagaaatcacactatggcatgactagttaacaacccttttagtgcaggctcatgtttct

SEQ ID NO: 2466 - DNA, 110 bp, synthetic construct
  source 1..110: mol_type = other DNA
aatcacactatggcatgactagttaacaacccttttagtgcaggctcatgtttctttgaaaatacaagctttcaaaagcattgggcttctgatttacttgcctcttatca

SEQ ID NO: 2467 - DNA, 110 bp, synthetic construct
  source 1..110: mol_type = other DNA
gaatgtaatacagtgctgccactttaaaaacactctagaagctcctcgaaaacctaagcattgagttaccatatgacttggaaattctgcttctaggtacatgcctaaga

SEQ ID NO: 2468 - DNA, 110 bp, synthetic construct
  source 1..110: mol_type = other DNA
ccaggttccagaataaagggagggagaagggctgagcccagttcattcttccagactcatcaacgagcttgtccttctgcctcttctctttacccttcaacatcctgtct

SEQ ID NO: 2469 - DNA, 110 bp, synthetic construct
  source 1..110: mol_type = other DNA
ggcaaactccaccagagagctgagaagctgtgaaaataaaagacccaatgagaccttgaacttcatctgggcaaggtgccctgggagctatccaaggtactaaccagcta

SEQ ID NO: 2470 - DNA, 110 bp, synthetic construct
  source 1..110: mol_type = other DNA
atgcttatgcttcaaattagacttatatcctttaaattatatgagctcagaattgactaaaatcccattattttggtcctaacaaagttttctctttcccctgttgccat

SEQ ID NO: 2471 - DNA, 110 bp, synthetic construct
  source 1..110: mol_type = other DNA
cccactgtataaatctggggattgaacccgcatcccagtgctccacagacaccaaggatcccactgcaccacaggggagctccatgtgcaggaatcttgactgataattg

SEQ ID NO: 2472 - DNA, 110 bp, synthetic construct
  source 1..110: mol_type = other DNA
gtccccagcaagcaggcttcctcctgtccaacagagtccttagttgctgttaacgtattttcttctctttttttagctacttaataatataaagaacatggaaaaaaaca

SEQ ID NO: 2473 - DNA, 110 bp, synthetic construct
  source 1..110: mol_type = other DNA
ccttcattctccacatattaggaggaaagcttatacttcccccagctcaggggtgggggtgggggggcctcccccatcttagccaaccagcatcttctattggactttag

SEQ ID NO: 2474 - DNA, 110 bp, synthetic construct
  source 1..110: mol_type = other DNA
aatggtatcttaggacttagcttcagatacaagggaaccctgagatccaacacttcagtaacaaataggcacaagagaaaacagggagtcaggctctccacgccaggttc

SEQ ID NO: 2475 - DNA, 110 bp, synthetic construct
  source 1..110: mol_type = other DNA
ccctgcagcttttagaaagaaactcagcaataactcattgaaccagcactgtaaggagctgagttattcaacatatttgaaagttcaccccactcatacctttaagcaat

SEQ ID NO: 2476 - DNA, 110 bp, synthetic construct
  source 1..110: mol_type = other DNA
tgagctgcatatgaagaagctgtgactcacgggccatgtagttctggcaagtcattcatctgtaatcattggtgtcctccttgaggacctaggaaataagcttcctctca

SEQ ID NO: 2477 - DNA, 110 bp, synthetic construct
  source 1..110: mol_type = other DNA
ccactccctcccatttccccccagggaaccccaataaacttatctttaaataagtacctggatgagtttgaatctgaacatatggatgtgccagaagctcagggatggat

SEQ ID NO: 2478 - DNA, 110 bp, synthetic construct
  source 1..110: mol_type = other DNA
cttaagcatataggctagagactcttgccagagggtaaccataagtgagaaatgtccaaacatcaggagttttttcaccccagcaccatttgcttttaagcttcagattg

SEQ ID NO: 2479 - DNA, 110 bp, synthetic construct
  source 1..110: mol_type = other DNA
tgagaaatgtccaaacatcaggagttttttcaccccagcaccatttgcttttaagcttcagattgacttaatatttttcctgttttctaattttttaatagttccttaaa

SEQ ID NO: 2480 - DNA, 110 bp, synthetic construct
  source 1..110: mol_type = other DNA
cagagcagcaagctcagaccttggctggccggcttttccaaaggaatcatggtctggttaatgtaattttgacaaatgtaccgcagtatattaagatctttacaataagg

SEQ ID NO: 2481 - DNA, 110 bp, synthetic construct
  source 1..110: mol_type = other DNA
ggttaatgtaattttgacaaatgtaccgcagtatattaagatctttacaataaggaaaattgagagaggagtgcacatcaacactgtactaccttcgcaacccctgtgta

SEQ ID NO: 2482 - DNA, 110 bp, synthetic construct; identical to SEQ ID NO: 2480
  source 1..110: mol_type = other DNA

SEQ ID NO: 2483 - DNA, 110 bp, synthetic construct; identical to SEQ ID NO: 2481
  source 1..110: mol_type = other DNA

SEQ ID NO: 2484 - DNA, 110 bp, synthetic construct
  source 1..110: mol_type = other DNA
cattgcatcaaggtttcccattacacaactgtgcagagctgaacatcagacaaattcttcagcagataataaactgcattttgcatacttaagaattcagacattgtcaa

SEQ ID NO: 2485 - DNA, 110 bp, synthetic construct
  source 1..110: mol_type = other DNA
aggaatataaaatatcttttgcaccctctttgaggacgcctgttcgatattgccagaaatatttattgtttgtcctggctgaaacctgacaagatatttaaaaggatttt

SEQ ID NO: 2486 - DNA, 110 bp, synthetic construct
  source 1..110: mol_type = other DNA
gaaatatttattgtttgtcctggctgaaacctgacaagatatttaaaaggatttttttttttttaagtaactctgtggtcagctgttggtcagaaattggaagctgatct

SEQ ID NO: 2487 - DNA, 110 bp, synthetic construct
  source 1..110: mol_type = other DNA
gccattctgtgaccaagaagcttgcagaattttggagggatgtccgccctgacatcgtgttgctgacttaacacagcgattgcctacatccagacttcttggcatgtgag

SEQ ID NO: 2488 - DNA, 110 bp, synthetic construct
  source 1..110: mol_type = other DNA
ttacttctgaatttcctactttaccatctcttaattaaaggcttagactgactttcagttctgatgttctgtgtgtctaaacatgtagcaacatatttgtattaaggggt

SEQ ID NO: 2489 - DNA, 110 bp, synthetic construct
  source 1..110: mol_type = other DNA
cagttctgatgttctgtgtgtctaaacatgtagcaacatatttgtattaaggggtaagggaggaggtaaagttggcagtaaaattctttagaaagagactattatcctga

SEQ ID NO: 2490 - DNA, 110 bp, synthetic construct
  source 1..110: mol_type = other DNA
tcagtgtgttatggatctgatgttgctgagagctgtggtgcagctcatatgtggagttgctgtggaggaggatccggagttgctgattcgacatctagcctgggaacatc

SEQ ID NO: 2491 - DNA, 110 bp, synthetic construct
  source 1..110: mol_type = other DNA
tctgtttaaaaagctatgtgtgtacactaggttttgctagtcagcttcctggtaggatccaaaagacactgttaatcgtactctcatctaggagttcccgcggtggtaca

SEQ ID NO: 2492 - DNA, 110 bp, synthetic construct
  source 1..110: mol_type = other DNA
aaaacactgatcatccttctgttcttaatgaacatggtgaattttagatgagacgccactaagagaattcctttacaatgtgtgccagctatcaatgtatcaatgtatta

SEQ ID NO: 2493 - DNA, 110 bp, synthetic construct
  source 1..110: mol_type = other DNA
gccaagtacttagaaaaggtttctaagtggaaataatgggatggatgaaaaggaaacccagattcaggccaaatgataaacatgccctcctaatgttatttccatctcaa

SEQ ID NO: 2494 - DNA, 110 bp, synthetic construct
  source 1..110: mol_type = other DNA
acccagattcaggccaaatgataaacatgccctcctaatgttatttccatctcaaaaacatccgttggatccccctccctactccaaagtccattctgctgtgtgggcat

SEQ ID NO: 2495 - DNA, 110 bp, synthetic construct
  source 1..110: mol_type = other DNA
agacatctcagattaacgaatttagtgcttttctgtgtatgggaagatgtaagattctgggctcactgaactcgtccttggtgtgcgccccagctatctggggccagtat

SEQ ID NO: 2496 - DNA, 110 bp, synthetic construct
  source 1..110: mol_type = other DNA
tctgggctcactgaactcgtccttggtgtgcgccccagctatctggggccagtatcctgtgctttctcattctgagtctccttggctgcagcagttggctgctagatgat

SEQ ID NO: 2497 - DNA, 110 bp, synthetic construct
  source 1..110: mol_type = other DNA
ttaggtaggcttgcaggtcaccgagtttcctcgccagactgtgccgccaaatggggctgcaggtgagcagagatgctggttgggtttcctgctggagctctgcaggtgga

SEQ ID NO: 2498 - DNA, 110 bp, synthetic construct
  source 1..110: mol_type = other DNA
gctgcaggtgagcagagatgctggttgggtttcctgctggagctctgcaggtggacactcagtctgcccagctctgaatgctgcttgctggaagaccccgcccctacttc

SEQ ID NO: 2499 - DNA, 110 bp, synthetic construct
  source 1..110: mol_type = other DNA
ccactgtgccacagtgggaactcctattgggttttattttacatgcatcatctgacactagaatttctttcctttaaaaaaattgattatagttgatttacattgttctg

SEQ ID NO: 2500 - DNA, 110 bp, synthetic construct
  source 1..110: mol_type = other DNA
tctatgctgctacagagacaaaactgaatccttaacctgtgtgccatagcagaaactcctccctctttttttaaaaaagattaaaaaaattgtagtaatttataatgttt

SEQ ID NO: 2501 - DNA, 110 bp, synthetic construct
  source 1..110: mol_type = other DNA
tgtaagaatggtccctgtaaagaagggaagagggagcaatggggttagctctacacccctcagttcttaaagatgcaggtgataccagagacttcatcaggatgatgcag

SEQ ID NO: 2502 - DNA, 110 bp, synthetic construct
  source 1..110: mol_type = other DNA
cttggatcagactctaacactgaattgattttactcacacttctgataccaaatgcaggggatttctccactataatcactgctcgtcaactctccagctgggcatccta

SEQ ID NO: 2503 - DNA, 110 bp, synthetic construct
  source 1..110: mol_type = other DNA
caggggatttctccactataatcactgctcgtcaactctccagctgggcatcctacaattcagcaattcaaatctgttctgacactgatcacccagacttagcacagacc

SEQ ID NO: 2504 - DNA, 110 bp, synthetic construct
  source 1..110: mol_type = other DNA
cagtgtgcttgtccaggagtaattttcaccatggtagagaagttatgctctacttctttttaaaatttcactgtagattatactgaaagccatatctagtctatctgggg

SEQ ID NO: 2505 - DNA, 110 bp, synthetic construct
  source 1..110: mol_type = other DNA
cagcttactaagcatacaaatattcatggaggctttgccttgatatgggagtcagaaaccaggagtcaaggtgagaagtgaagtcaagtatcaaaggcaagttgggccct

SEQ ID NO: 2506 - DNA, 110 bp, synthetic construct
  source 1..110: mol_type = other DNA
gaagggcaaataagagtgtgagtcccattaagagtgcaaactggaatgtagtagaaagaacatgagctttagaacaagaccaaggtcccccctgaatcccagctctgacc

SEQ ID NO: 2507 - DNA, 110 bp, synthetic construct
  source 1..110: mol_type = other DNA
actgcgtaatgcagtggcaagatccccagtttatcttttaaaataacacagcaaattatcctctatttgtacttgttgcaaaaattttaaaaacattcagtatgtcatat

SEQ ID NO: 2508 - DNA, 110 bp, synthetic construct
  source 1..110: mol_type = other DNA
agacaagtttaaaagtttaatacaaccataaatgttcctacgtacagagttgttttataacctttctctcccttgaaattatcaccatacagctaagttttcactacaag

SEQ ID NO: 2509 - DNA, 110 bp, synthetic construct
  source 1..110: mol_type = other DNA
ccataaatgttcctacgtacagagttgttttataacctttctctcccttgaaattatcaccatacagctaagttttcactacaagtctaactaaatgaatattaaattag

SEQ ID NO: 2510 - DNA, 110 bp, synthetic construct
  source 1..110: mol_type = other DNA
actactggatcgattttgaccctactaggggtgaaaggcctcctagtattccagaggtgattgattcattgccccataaggcatatttcacttttaaaaaataatatcct

SEQ ID NO: 2511 - DNA, 110 bp, synthetic construct
  source 1..110: mol_type = other DNA
ttctatttaataacttttttgaatgcctgtatcatcctgggcttttaaaatccccccaaacactgaaattataacaggaaaacaacatgagaggtggaaagagtagaaat

SEQ ID NO: 2512 - DNA, 110 bp, synthetic construct
  source 1..110: mol_type = other DNA
taggagtttccttcagaaaaccagttttagtacactccaaaccaagaatattcttcttagttactacttaacttaatctgaagtggtctcagaccttaatattattaatt

SEQ ID NO: 2513 - DNA, 110 bp, synthetic construct
  source 1..110: mol_type = other DNA
tccaaaccaagaatattcttcttagttactacttaacttaatctgaagtggtctcagaccttaatattattaattggagtatgttgatccttcaggcagagttttaatgt

SEQ ID NO: 2514 - DNA, 110 bp, synthetic construct
  source 1..110: mol_type = other DNA
aactgaggcttagaagatttaaataacttttcccaagtcatgagccctcatcctagaactgcatgaactcaaagctcatattcttagttcaagggttacattgtttctca

SEQ ID NO: 2515 - DNA, 110 bp, synthetic construct
  source 1..110: mol_type = other DNA
gtttttactatgcacctgccatatgtcaggcactgagctacgtcccagaaggttaatggggggcaaggcaggtagggttcctggtatcataaaaccagcagtttagtgag

SEQ ID NO: 2516 - DNA, 110 bp, synthetic construct
  source 1..110: mol_type = other DNA
gtaacaactcccacttgtaccagtgagaaaacctaagagctgagggtggaggttcagggcatctgagcaataaagtgcatttttattccttgagaccctgttgttcctaa

SEQ ID NO: 2517 - DNA, 110 bp, synthetic construct
  source 1..110: mol_type = other DNA
ttaaaaataatagtttgggattcccaaactgatactagtctacataacatcttgtttgtattttaaaaggtgagctttcccaaagatagttaccttcattttaggaaaac

SEQ ID NO: 2518 - DNA, 110 bp, synthetic construct
  source 1..110: mol_type = other DNA
attatgcttatttttatagccagatagaccaatgtgtaaccttcgaaagccattcaaggtcatttgcctgagctttacttcctggtataatgctttgctatctgttattt

SEQ ID NO: 2519 - DNA, 110 bp, synthetic construct
  source 1..110: mol_type = other DNA
aatcatcttgctcagcccctacttcatctggcccaagatccttcttggtggcacacccatctctcagccaagatggactccagtgaggttgactgtttcctccctcctat

SEQ ID NO: 2520 - DNA, 110 bp, synthetic construct
  source 1..110: mol_type = other DNA
tcaagtgctcctccaaaagccaggggacgtggactgcacactgtcctaaaaaagtccattgtacttagctgagtttgagaatatggaataatgccattttttttctaacc

SEQ ID NO: 2521 - DNA, 110 bp, synthetic construct
  source 1..110: mol_type = other DNA
tttcaaaatctaaatcaatgacctccactacacagcaattaaaatcaaagctcatgccacagcctctcccaatgatcctctgagctgcaagtagcagaaaaccaaaatta

SEQ ID NO: 2522 - DNA, 110 bp, synthetic construct
  source 1..110: mol_type = other DNA
gccacagcctctcccaatgatcctctgagctgcaagtagcagaaaaccaaaattaagtcactctaaatgctaacaagatgcactgactgttacgaatggaaatccagagg

SEQ ID NO: 2523 - DNA, 110 bp, synthetic construct
  source 1..110: mol_type = other DNA
aatcacttaccccacagtatcagggatgtaaacagacccataatggccaaaaattgcttggggatcagggttgtttgtgacagtcacagttcaataatactgggcatttt

SEQ ID NO: 2524 - DNA, 110 bp, synthetic construct
  source 1..110: mol_type = other DNA
gactttttatgctgtcttcattagcccttaaagatttctcctattgccttcttcttttgtggcagtggtatctttgagctgcctctggcaagcaacaatacaaagggtga

SEQ ID NO: 2525 - DNA, 110 bp, synthetic construct
  source 1..110: mol_type = other DNA
gggaggaccctattggttacaatagataattaaattgttggctgttttttagtataatttgatcgaagacattagtattaaacgcttaaaaagttacattgggatatagc

SEQ ID NO: 2526 - DNA, 110 bp, synthetic construct
  source 1..110: mol_type = other DNA
cacaatgaaattttgtcaattttctctttctgagtaacacaccaccccaaaatcttatagcttaaaacagtagccacttgtttatacacagttctttgggtggttacttt

SEQ ID NO: 2527 - DNA, 110 bp, synthetic construct
  source 1..110: mol_type = other DNA
tcctcacaacaaagccatgaggtaggttctattttattatgcattttacaaatgcaaactggactgactgactttgaacacagtaaccctattgtatgatcaagccaccc

SEQ ID NO: 2528 - DNA, 110 bp, synthetic construct
  source 1..110: mol_type = other DNA
ttaaccatgttatctggagtaaggcctgataatcttattttaaaaaattctctcaaggtaattctaatgtgtagcccagggtgagagtcactgagaatatgcttataaag

SEQ ID NO: 2529 - DNA, 110 bp, synthetic construct
  source 1..110: mol_type = other DNA
tgtggtttatatgcttctgactttctctttctttaattctgtatttcattgacctacttttaaatttatgcagaagggactctgaataactcagtgtataaagtttgata

SEQ ID NO: 2530 - DNA, 110 bp, synthetic construct
  source 1..110: mol_type = other DNA
aaaaaaaaaaaggtgagaagtgaagaatgttgagaaggggagcttatcttaacttctctgggtagggtctagcacacactgaggagaaaactgatgtaaatgtggaggca

SEQ ID NO: 2531 - DNA, 110 bp, synthetic construct
  source 1..110: mol_type = other DNA
acagccttaaatccactgaaggttgcctacattactggttgtctgcacatgattgtggagacagctgtcttcattgagaccctcatcaccctgggtgctgaggtgtggtg

SEQ ID NO: 2532 - DNA, 110 bp, synthetic construct
  source 1..110: mol_type = other DNA
aagcatagaatcttgaagagtgggttgagggctcagagtcaatagatcacccacagactaagggtctgtatttaatgagatctacctcttcatactattatctgggattc

SEQ ID NO: 2533 - DNA, 110 bp, synthetic construct
  source 1..110: mol_type = other DNA
gactaagggtctgtatttaatgagatctacctcttcatactattatctgggattcataagcactttcaaacatgagaagttctcattcagtggatgttctaagtacactg

SEQ ID NO: 2534 - DNA, 110 bp, synthetic construct; identical to SEQ ID NO: 2532
  source 1..110: mol_type = other DNA

SEQ ID NO: 2535 - DNA, 110 bp, synthetic construct; identical to SEQ ID NO: 2533
  source 1..110: mol_type = other DNA

SEQ ID NO: 2536 - DNA, 110 bp, synthetic construct
  source 1..110: mol_type = other DNA
gccatttcctcttttttaaaacataggacactttattggacaaagtatctaagagaaatcaattttacctttctactaaggttaggttctccttttagctaatgttgcat

SEQ ID NO: 2537 - DNA, 110 bp, synthetic construct; identical to SEQ ID NO: 2536
  source 1..110: mol_type = other DNA

SEQ ID NO: 2538 - DNA, 110 bp, synthetic construct
  source 1..110: mol_type = other DNA
cttagtattacctaatttgacaaatttgggaaaggagggcagaagtgaaataacgtgcttatggtcattcagctggtgagtgggagggtagagtcacactcaggctctca

SEQ ID NO: 2539 - DNA, 110 bp, synthetic construct
  source 1..110: mol_type = other DNA
gttaaggacctgacatagtctttgtgaggatgcaggttctatccctggtctcactcggtgggttaacgatccgtcattgtcaaaagctgtggcatagatcacagatgtgg

SEQ ID NO: 2540 - DNA, 110 bp, synthetic construct
  source 1..110: mol_type = other DNA
gttctatccctggtctcactcggtgggttaacgatccgtcattgtcaaaagctgtggcatagatcacagatgtggctcagattcagtgttgctgtagctgtggcataggc

SEQ ID NO: 2541 - DNA, 110 bp, synthetic construct
  source 1..110: mol_type = other DNA
ctcccactagactgagattttcgtgagcaaagaaattctgtatatgttttcactgtttttggtaacacctagctttgactggaagtaactacccaataggcattttttta

SEQ ID NO: 2542 - DNA, 110 bp, synthetic construct
  source 1..110: mol_type = other DNA
agcaaattcctaactatagagtgttggactcttttctctgtggttcctcacccccctgctcccaggagcttagcttagctaaatttttattctacaattttccttgtttc

SEQ ID NO: 2543 - DNA, 110 bp, synthetic construct
  source 1..110: mol_type = other DNA
ccccttaatgtttcctcaatctggtcaagtttgctttcactcaaggctgttggatgtgaggtctctctctgatggaaattctaattccccagacaagggcacagcttgct

SEQ ID NO: 2544 - DNA, 110 bp, synthetic construct
  source 1..110: mol_type = other DNA
gtgaggtctctctctgatggaaattctaattccccagacaagggcacagcttgctctttagggaatttacctctgtcactctatgagttttatgttgctcttgtaatgaa

SEQ ID NO: 2545 - DNA, 110 bp, synthetic construct
  source 1..110: mol_type = other DNA
ggggatctttcataaagggccaggggtttgagtctcatattaggcatcccaaacctggtgtcttaaatggggaggaagagctcccttaactggtctgaaagccagtggga

SEQ ID NO: 2546 - DNA, 110 bp, synthetic construct
  source 1..110: mol_type = other DNA
ttaacattcatttccaccaaagtcaaatttactacaagtgatctatgcagtatattctttaggattccagttgatgaagctagccaacacctttctgccttcacttggga

SEQ ID NO: 2547 - DNA, 110 bp, synthetic construct
  source 1..110: mol_type = other DNA
gaattagcaccactgaaagaaaacaaaaacaaacaagagcttcctcacttctcctctgtgtgtattttaaatactcaacaattgtagggatgatttaccttataaagata

SEQ ID NO: 2548 - DNA, 110 bp, synthetic construct
  source 1..110: mol_type = other DNA
taatgctttctcagtgctctcaaaacaacctgcaaggcctgcaagaccaggtttctgccttcatctccaatcttgtctcacaaatttaccatttttctttcatccatcca

SEQ ID NO: 2549 - DNA, 110 bp, synthetic construct
  source 1..110: mol_type = other DNA
tgccttcatctccaatcttgtctcacaaatttaccatttttctttcatccatccatacattccaccacactcgcctttttctctttgggaaacagggcaaaccctttccc

SEQ ID NO: 2550 - DNA, 110 bp, synthetic construct
  source 1..110: mol_type = other DNA
tcttaacccaacctcatcattgttatctctgctcagaggtcagtacagtcttcgcagtgcatcactgccttgctcttctttaaagttttaccccacatgtgctacagccc

SEQ ID NO: 2551 - DNA, 110 bp, synthetic construct
  source 1..110: mol_type = other DNA
gagaggatgaccaaagatgcagttctggacttgatgaccagaagtgtctgagagccatcctaatggaggtgactgaagcaagctctgaatcagagtgtgaatatgagagt

SEQ ID NO: 2552 - DNA, 110 bp, synthetic construct
  source 1..110: mol_type = other DNA
caggcaggttttattttaagaaactaataaaagtaatatgattctacttttcaaagctgtttatcacttggaatttcagtttgggtgactgcactctagtaaattagctg

SEQ ID NO: 2553 - DNA, 110 bp, synthetic construct
  source 1..110: mol_type = other DNA
gaatttatgtgactctgacaatgtactggtattaggatcagatggcaaactaaaaaagacttaaccacagatttaaatatttattaagatgattgcttggctttggaggg

SEQ ID NO: 2554 - DNA, 110 bp, synthetic construct
  source 1..110: mol_type = other DNA
caaagaaaattgataagacagaaaaagttcagacttgagttatagaataacaaccggacacaggattcgatgttaatagcatacctaggatgaagtgaacaccaactgaa

SEQ ID NO: 2555 - DNA, 110 bp, synthetic construct
  source 1..110: mol_type = other DNA
ggacacaggattcgatgttaatagcatacctaggatgaagtgaacaccaactgaatctggaagtaccaggtggaattaagaaccacatttcagggagttcccgtcatggc

SEQ ID NO: 2556 - DNA, 110 bp, synthetic construct
  source 1..110: mol_type = other DNA
tcccttgtcatcatagtagactgaaagaaagaaaacaatggacatgtacttaaaaagcttatctcttctgttccacaataatgtgaacatactgaacactactaaattgt

SEQ ID NO: 2557 - DNA, 110 bp, synthetic construct
  source 1..110: mol_type = other DNA
acccttttagataatgtacttctcatttatttctactgctctctgtacttgtttttccctttagctaattctactgcctcagtttctatgatcctctgtgagtacatttc

SEQ ID NO: 2558 - DNA, 110 bp, synthetic construct
  source 1..110: mol_type = other DNA
tccctttagctaattctactgcctcagtttctatgatcctctgtgagtacatttcccattctaaccccctaggaaagagcatcaagatgtactggctgatcactaacatg

SEQ ID NO: 2559 - DNA, 110 bp, synthetic construct
  source 1..110: mol_type = other DNA
taagcgctgatgtcacgtgtcttgtgttactcaatataaagcagacaggaatgtaaggagaagctggtaagcgtcgccatgagcccagcattcctactccacaggacgtg

SEQ ID NO: 2560 - DNA, 110 bp, synthetic construct
  source 1..110: mol_type = other DNA
accaaccttgaaacttattttgcagagcaagttcctcagtgctctgatcatggcagatgcctgacaaatgggtgacaagctcatcctcctaaagggccagttacaaatta

SEQ ID NO: 2561 - DNA, 110 bp, synthetic construct
  source 1..110: mol_type = other DNA
agctgtgggcgattaaattcgtttgtacagactccaaaatgcagttttgaaaaggaatctctgattttaaaatggaagaaggtaccagaatctgttttaacaatagcttc

SEQ ID NO: 2562 - DNA, 110 bp, synthetic construct
  source 1..110: mol_type = other DNA
taatcagtgtttttgggcttttagtattcccctccatgcctgtccatcttgacctagcttcagttgtagcaggcgtgaccacagggttcatttacctcaaataatgaaag

SEQ ID NO: 2563 - DNA, 110 bp, synthetic construct
  source 1..110: mol_type = other DNA
gcaaaataaatctagttaccctctgtcaccatacgaagctaatacaatattatagactatattccctatgttgtacatcatattctcatgacattaatttttttttgcca

SEQ ID NO: 2564 - DNA, 110 bp, synthetic construct
  source 1..110: mol_type = other DNA
atcacgtgatgagtatgtatcgaaggaaaagaagaaagcagatcctgaaaatagcttcactagtgacagaaacgtgaattctccgtttaaatttagttgggttttttgtt

SEQ ID NO: 2565 - DNA, 110 bp, synthetic construct
  source 1..110: mol_type = other DNA
ttcactagtgacagaaacgtgaattctccgtttaaatttagttgggttttttgtttgtttgtttgtttttgctttttaggactgcacccacagcataaggaagttcccag

SEQ ID NO: 2566 - DNA, 110 bp, synthetic construct
  source 1..110: mol_type = other DNA
cctttccttagggcacttaccaccactgtgtgaactccagcaggataggggtattgtctgctacatacacagcctatcccaagtgcctgatacaatgcctagtctttatg

SEQ ID NO: 2567 - DNA, 110 bp, synthetic construct
  source 1..110: mol_type = other DNA
gtctgctacatacacagcctatcccaagtgcctgatacaatgcctagtctttatgggcagccaataagaataagtgagtgcaataatcatcagggaaatgcaaatcgaaa

SEQ ID NO: 2568 - DNA, 110 bp, synthetic construct
  source 1..110: mol_type = other DNA
gaacttaaaaaggcaaggttaaagatctgattacagtgctattgacaaagaaagttggttgttgttgtggcaaacattttaagatgctaagtacaattactgctgataat

SEQ ID NO: 2569 - DNA, 110 bp, synthetic construct
  source 1..110: mol_type = other DNA
caaagaaagttggttgttgttgtggcaaacattttaagatgctaagtacaattactgctgataatatctaccaggacatagtcaacttttagaaattccatataatctct

SEQ ID NO: 2570 - DNA, 110 bp, synthetic construct
  source 1..110: mol_type = other DNA
aatagaacttcagagttatagatgtgcacctgggcagccagaagaaactacagcgtcaaggcttctttgcagctaaatgtgaccatgtgactaagatttggccaaagaga

SEQ ID NO: 2571 - DNA, 110 bp, synthetic construct
  source 1..110: mol_type = other DNA
tggcaagcctcctctggcccttctctcagcagcagacctgagtatagagttggcccggggctcagagatgggtcaaggcctgcaaaacggctccgtatgctccacccccc

SEQ ID NO: 2572 - DNA, 110 bp, synthetic construct
  source 1..110: mol_type = other DNA
gcttcatatctcttgggctttctttgacatataatggcagcttagctttgactcactacaactacaatgtaagttgcatgaaagtgaaaatacaaatttaactcaactca

SEQ ID NO: 2573 - DNA, 110 bp, synthetic construct
  source 1..110: mol_type = other DNA
taattatcaccaccttaggcccaacaacatactataagttaacttaaaaggttctctctgggagtgacatcatctggcaagctttctatcattgctgctttaaaccttca

SEQ ID NO: 2574 - DNA, 110 bp, synthetic construct
  source 1..110: mol_type = other DNA
ttccatttaatccaaagttcccatatttaagcaaggtttctagcacttctattggtattgtcaacataaacctatgcccactgttgagaatggagctagggaggatgaaa

SEQ ID NO: 2575 - DNA, 110 bp, synthetic construct
  source 1..110: mol_type = other DNA
ccttgtcagttcagatcatctatatgtacattaaaacagaaggcggaatttctgtagaggccttattgagatactagagagaaggttataaaattcctgttggcaaagga

SEQ ID NO: 2576 - DNA, 110 bp, synthetic construct
  source 1..110: mol_type = other DNA
caataaaacttgagaatgaacaaactcatttcttaatgaaaggttaaggtaaagaaaatgtatttgcagatgttttatatgtgcactaaaagaacgtctgaggaggaggg

SEQ ID NO: 2577 - DNA, 110 bp, synthetic construct
  source 1..110: mol_type = other DNA
aagtaacctcagtgtcttgaaagcaattgcacttccatgatttttagtaaagaaaattcagcacttcaaaagtccaattattggaaagaagaaacaaatattttcctttg

SEQ ID NO: 2578 - DNA, 110 bp, synthetic construct
  source 1..110: mol_type = other DNA
gcacattctgagaaagcgacatgaacagattctctttgctttgcatagagctgagatgtagaccagttgtttctcagtggacacttgggctgtttctagccaagcagcag

SEQ ID NO: 2579 - DNA, 110 bp, synthetic construct
  source 1..110: mol_type = other DNA
atgtagaccagttgtttctcagtggacacttgggctgtttctagccaagcagcagttttccagttaagcacactctgcaccttctggtcagaagccagttttggctgatt

SEQ ID NO: 2580 - DNA, 110 bp, synthetic construct; identical to SEQ ID NO: 2578
  source 1..110: mol_type = other DNA

SEQ ID NO: 2581 - DNA, 110 bp, synthetic construct; identical to SEQ ID NO: 2579
  source 1..110: mol_type = other DNA

SEQ ID NO: 2582 - DNA, 110 bp, synthetic construct
  source 1..110: mol_type = other DNA
acaacaccagacacccagtatccatgttttaatatgtcccagagagatttacttcaacaccagcttgaaaaagatgttctgtaaatctttttttttttttttttttgtct

SEQ ID NO: 2583 - DNA, 110 bp, synthetic construct
  source 1..110: mol_type = other DNA
cacccacattagccttgtgtgggtgagcaataatttatcctgtgtcaagtcactgagattttggagtctatcacaaaagctaacattaattagcatagtaaactaagtaa

SEQ ID NO: 2584 - DNA, 110 bp, synthetic construct
  source 1..110: mol_type = other DNA
caagtcactgagattttggagtctatcacaaaagctaacattaattagcatagtaaactaagtaaggactttgccttaaaactttaaaaaagcctttgccttggaactta

SEQ ID NO: 2585 - DNA, 110 bp, synthetic construct; identical to SEQ ID NO: 2583
  source 1..110: mol_type = other DNA

SEQ ID NO: 2586 - DNA, 110 bp, synthetic construct; identical to SEQ ID NO: 2584
  source 1..110: mol_type = other DNA

SEQ ID NO: 2587 - DNA, 110 bp, synthetic construct
  source 1..110: mol_type = other DNA
tgcatttctgctgctttaagtagtctttttatattgcaatggtacatcaacaatggtaatcaatggtgaaaaatatcactactgtgctaaagctgtaagattcactcact

SEQ ID NO: 2588 - DNA, 110 bp, synthetic construct
  source 1..110: mol_type = other DNA
gcaatggtacatcaacaatggtaatcaatggtgaaaaatatcactactgtgctaaagctgtaagattcactcactaacaaaattgtaaatcttctacttacttattaaac

SEQ ID NO: 2589 - DNA, 110 bp, synthetic construct; identical to SEQ ID NO: 2587
  source 1..110: mol_type = other DNA

SEQ ID NO: 2590 - DNA, 110 bp, synthetic construct; identical to SEQ ID NO: 2588
  source 1..110: mol_type = other DNA

SEQ ID NO: 2591 - DNA, 110 bp, synthetic construct
  source 1..110: mol_type = other DNA
cgccagcaatagtgtactttgtgaacccacacaacaggttaaaatgacaaaacaaagaacactcacaggtgaacagctatagcaaaggaatattcagtggcttctctcct

SEQ ID NO: 2592 - DNA, 110 bp, synthetic construct
  source 1..110: mol_type = other DNA
cataatactctgtgtttcaaatatgaatcaataatggccagtagccaaagtaagtgttttggaaagatacaataatggaataaatcttccctggaatattgagctcatta

SEQ ID NO: 2593 - DNA, 110 bp, synthetic construct
  source 1..110: mol_type = other DNA
cagcccaagaaatggcaaaaagacacacacacacaaaaaaaataactcctagaagttcttggtactccagagagttccctctgcccacagtttccatcctggcccctgtt

SEQ ID NO: 2594 - DNA, 110 bp, synthetic construct
  source 1..110: mol_type = other DNA
ttcttggtactccagagagttccctctgcccacagtttccatcctggcccctgtttgagtcctcaacctgtgtccatccaaacaaccatgatgaaagaatttataaagag

SEQ ID NO: 2595 - DNA, 110 bp, synthetic construct; identical to SEQ ID NO: 2593
  source 1..110: mol_type = other DNA

SEQ ID NO: 2596 - DNA, 110 bp, synthetic construct; identical to SEQ ID NO: 2594
  source 1..110: mol_type = other DNA

SEQ ID NO: 2597 - DNA, 110 bp, synthetic construct
  source 1..110: mol_type = other DNA
caaacaatgcacaggtatcagatattgcaaaacctgcccaagatcatcctcttggtgtaggcattcagatctcagggagtgcaataaaccacctggtggggaagaagtca

SEQ ID NO: 2598 - DNA, 110 bp, synthetic construct
  source 1..110: mol_type = other DNA
gaattgaagtcctggaggaagtgggtggcaaaaagctgctagaggcaacagtcggatgataggatggagggaaggtttatgtgcgtgcaagtgtctgtgtgtgtgtgtgt

SEQ ID NO: 2599 - DNA, 110 bp, synthetic construct
  source 1..110: mol_type = other DNA
ttaaccctctccctgaatatgaaaggacatgaccatcaggaagtggaataagtcagctatcatggaaaactgaaggaagagtagaaggaaagtgcttctttccactatca

SEQ ID NO: 2600 - DNA, 110 bp, synthetic construct
  source 1..110: mol_type = other DNA
gctatcatggaaaactgaaggaagagtagaaggaaagtgcttctttccactatcacttaaattgttccaataaatcaagaaatcattttttaatcgagtgttgacaatgt

SEQ ID NO: 2601 - DNA, 110 bp, synthetic construct
  source 1..110: mol_type = other DNA
aagccacctgttgaccatctctagccgatgtctcctcacagtcacacctaaagcggaatgggacatctcagaaaacacacacagccctctctgtccttctcacaactgcc

SEQ ID NO: 2602 - DNA, 110 bp, synthetic construct
  source 1..110: mol_type = other DNA
ggccccaagtgtaccacatgggtccgctttttttcctggtgaaactaggtaattctacacactgttagatactcatgatccccctgaaaatttccactggcaggtaaaca

SEQ ID NO: 2603 - DNA, 110 bp, synthetic construct
  source 1..110: mol_type = other DNA
cacctctgcagcaacccaagaggctgcagtcagattcttaaccctctgtgccacggtgggaacgccattaatgagtattttaaaatcagtaacttgaagttttttttttt

SEQ ID NO: 2604 - DNA, 110 bp, synthetic construct
  source 1..110: mol_type = other DNA
ttcaactcagtgaacaaacaccagctccaatgcgtcttgactcaggaaacaacacttgccttttccccacctagaactctcatattccaagggcaaatgagccaaagttt

SEQ ID NO: 2605 - DNA, 110 bp, synthetic construct
  source 1..110: mol_type = other DNA
ggattatgagtcataattactggaaacatctaggtgggcaataggcaagggtgattttcctaagcaaagacacattggagctgctgttccttcagggatttggttatact

SEQ ID NO: 2606 - DNA, 110 bp, synthetic construct
  source 1..110: mol_type = other DNA
ttacatggtgaattggtaacccgtgctgaggcagtcagaatctaaaaagtccagtagcagtccaggagctatttattaaaaagaatatttaactgaaaaagatggcaagc

SEQ ID NO: 2607 - DNA, 110 bp, synthetic construct
  source 1..110: mol_type = other DNA
gggctcttgctggaacactgactgtacattggataggggatcataagacagagggaaaattttgggtaaaagctttgaaaactcctttgtctgagataatttttccagga

SEQ ID NO: 2608 - DNA, 110 bp, synthetic construct
  source 1..110: mol_type = other DNA
agcatttcatgttggttgttttgagttttcttgcttggaggagaggggactttttccctccaaatctagggtctataaaaagatgagtggtgtaacaaaaatagactggt

SEQ ID NO: 2609 - DNA, 110 bp, synthetic construct
  source 1..110: mol_type = other DNA
tccggaagggaagaagggtcttttttctgatcctctgtgagccctgtggtaagagcttccaatggatggtcttgaagtttcactcttgtaggaaatgggagtctgtccct

SEQ ID NO: 2610 - DNA, 110 bp, synthetic construct
  source 1..110: mol_type = other DNA
tgttgtcctaggtcacaaggttctgtttctccctgcatgtgtaaagaaggcattttcataacaaaactggattctccaaaaaagataacacatttggagtgcttttcagg

SEQ ID NO: 2611 - DNA, 110 bp, synthetic construct
  source 1..110: mol_type = other DNA
atgccctatagataagaaacatctgcctaaaggccatagttaaagaatagctttcagaacgactgagagcattcatgaccctaagccttttccccacttcacatttccaa

SEQ ID NO: 2612 - DNA, 110 bp, synthetic construct
  source 1..110: mol_type = other DNA
agaactgtgtagaacaaaaaaataaaagagagagagtgagagaaaaggaatcaggaggtgtctaacactcccatgagggatctctgaaagagaaagggaagctacctaac

SEQ ID NO: 2613 - DNA, 110 bp, synthetic construct; identical to SEQ ID NO: 2612
  source 1..110: mol_type = other DNA

SEQ ID NO: 2614 - DNA, 110 bp, synthetic construct
  source 1..110: mol_type = other DNA
ttcaaaaaagttttgagaacctatgtggtttgtcaatatttgcttacatgttttcattctaggtctaagttgtggagggggcttttaatcacatcttcaatagccaaaga

SEQ ID NO: 2615 - DNA, 110 bp, synthetic construct
  source 1..110: mol_type = other DNA
attctaggtctaagttgtggagggggcttttaatcacatcttcaatagccaaagagctattgcaatagcggagttccagcggagatgacaatttgatcattattttaaat

SEQ ID NO: 2616 - DNA, 110 bp, synthetic construct
  source 1..110: mol_type = other DNA
tacattttattcctatcctcctggcttttaccaggccttaaatctaattatggttctagaagcaaataaaagcagtttgtgggtctaaaggagaatcagcatttcctaca

SEQ ID NO: 2617 - DNA, 110 bp, synthetic construct
  source 1..110: mol_type = other DNA
ttgcagtggcttgaacaaaataacaaagacaaaagcttgctgtgcaaagaattatagggcacacgaaacttcatgagatcatctattccatctctcaccaagctgaagct

SEQ ID NO: 2618 - DNA, 110 bp, synthetic construct
  source 1..110: mol_type = other DNA
agggcacacgaaacttcatgagatcatctattccatctctcaccaagctgaagctcagatgtgcccagagagatatctgccttcactgcaacactcagtttaaagatgag

SEQ ID NO: 2619 - DNA, 110 bp, synthetic construct
  source 1..110: mol_type = other DNA
gactcttccctgttgctcctctttctctttcgcatgattcttgccttgccctgtccaggtgcctgaaccaggcaccttgcagtgttcttgaatgaatgtcattttatgca

SEQ ID NO: 2620 - DNA, 110 bp, synthetic construct
  source 1..110: mol_type = other DNA
caggtgcctgaaccaggcaccttgcagtgttcttgaatgaatgtcattttatgcagcacatgcagacctctgctcccatcagattagtttcctcgtggacctgggcactc

SEQ ID NO: 2621 - DNA, 110 bp, synthetic construct
  source 1..110: mol_type = other DNA
attgttacttgctttggaccaaactacaatttctattttctttctttggacatactttcccctttctccagcttcatcaggaaaacttatcttctctaacagcaagggtt

SEQ ID NO: 2622 - DNA, 110 bp, synthetic construct
  source 1..110: mol_type = other DNA
tttcccctttctccagcttcatcaggaaaacttatcttctctaacagcaagggtttcacctgcatattcctcaggtgcctgccatggtcctaggaacatgttcaggactc

SEQ ID NO: 2623 - DNA, 110 bp, synthetic construct; identical to SEQ ID NO: 2621
  source 1..110: mol_type = other DNA

SEQ ID NO: 2624 - DNA, 110 bp, synthetic construct; identical to SEQ ID NO: 2622
  source 1..110: mol_type = other DNA

SEQ ID NO: 2625 - DNA, 110 bp, synthetic construct
  source 1..110: mol_type = other DNA
tgacatagtggttagtcacaggtgagccttagctgttgtctaagctgtgctcccgggggttagggaagcagtgtgtgggcagcgcttctgcttcctggtgactccaggag

SEQ ID NO: 2626 - DNA, 110 bp, synthetic construct
  source 1..110: mol_type = other DNA
gcccccgagttaaatccagacagatccagaacctccgggtttatctcgttcatcccctcagttgacaggaaacagatctgcacagcagcaccagccccgctgtatcattg

SEQ ID NO: 2627 - DNA, 110 bp, synthetic construct
  source 1..110: mol_type = other DNA
caccaggttcaaccaacataaaacaaaacttcttgtctcactaagttctagattagggcattcagaggccttttctttcattatgggtctctgtacttatggctctaatc

SEQ ID NO: 2628 - DNA, 110 bp, synthetic construct
  source 1..110: mol_type = other DNA
gggcattcagaggccttttctttcattatgggtctctgtacttatggctctaatctattagaaggattgaatacattctcacccagaagttgaaatggctgtgacctgaa

SEQ ID NO: 2629 - DNA, 110 bp, synthetic construct
  source 1..110: mol_type = other DNA
cagaagaggtcaccccttgctgcagcaggcttgtatctcgccctaaaagcctcatgatgcccacgtgcccttacatggacttgttcgccatggcctgcctggagcactct

SEQ ID NO: 2630 - DNA, 110 bp, synthetic construct
  source 1..110: mol_type = other DNA
gatgcccacgtgcccttacatggacttgttcgccatggcctgcctggagcactctgccctcggtttgtattttcagagggcttagtaaattagattagatatttgaaagc

SEQ ID NO: 2631 - DNA, 110 bp, synthetic construct
  source 1..110: mol_type = other DNA
taaagaagccaggccagtggcagaattgcactggtgagaaagtcaggggcagagagaggacttggaatcccaggctgagctacgtcctgactaggcatgtccagcagtcc

SEQ ID NO: 2632 - DNA, 110 bp, synthetic construct
  source 1..110: mol_type = other DNA
gaggacttggaatcccaggctgagctacgtcctgactaggcatgtccagcagtccccatgatgtaggaaaacatgggagggggtggtggccaattacaggggagtcttgt

SEQ ID NO: 2633 - DNA, 110 bp, synthetic construct
  source 1..110: mol_type = other DNA
gtgtactgctgtgtgaataaccctgggagcatggagggagacatggcctttgcctttgtagaatcttctattgtggatcagcgtacaaagcaaatgacactgcagctctg

SEQ ID NO: 2634 - DNA, 110 bp, synthetic construct
  source 1..110: mol_type = other DNA
ttgtagaatcttctattgtggatcagcgtacaaagcaaatgacactgcagctctgtgccttgacaggctactccagccctgtccaccctggaaggccactctactccagg

SEQ ID NO: 2635 - DNA, 110 bp, synthetic construct
  source 1..110: mol_type = other DNA
gtctctacttaggaccaactagagaaagccaaatatgcatcctaacccatcacataggatgtctgccttctagttagccctcccacagcttccccaggccaaccacctcc

SEQ ID NO: 2636 - DNA, 110 bp, synthetic construct
  source 1..110: mol_type = other DNA
aggatgtctgccttctagttagccctcccacagcttccccaggccaaccacctccagttaagatacatctgaagccttccctttttttctaccataaagcttttccattt

SEQ ID NO: 2637 - DNA, 110 bp, synthetic construct
  source 1..110: mol_type = other DNA
gttggattgtttcttacagacttttcacatggtcgttgatggtcttttaagcacaagcagctgagctctcactatttgttacattttttctggacacatttgcacaagag

SEQ ID NO: 2638 - DNA, 110 bp, synthetic construct
  source 1..110: mol_type = other DNA
agcagctgagctctcactatttgttacattttttctggacacatttgcacaagagaatgtgttatgaaattatcaggcttcaaggtcatggggagttatctggtcagtcc

SEQ ID NO: 2639 - DNA, 110 bp, synthetic construct; identical to SEQ ID NO: 2637
  source 1..110: mol_type = other DNA

SEQ ID NO: 2640 - DNA, 110 bp, synthetic construct; identical to SEQ ID NO: 2638
  source 1..110: mol_type = other DNA

SEQ ID NO: 2641 - DNA, 110 bp, synthetic construct
  source 1..110: mol_type = other DNA
ttattactgctgttcttcagggctcaggctatctttgctctcaacacatttccttatgacatgaccatttctttgtccttactttgcacacttgttccatcaacattttc

SEQ ID NO: 2642 - DNA, 110 bp, synthetic construct
  source 1..110: mol_type = other DNA
atgacatgaccatttctttgtccttactttgcacacttgttccatcaacattttcctcttcactctcctcttttacagttggagtctgtgtgctttcttttttctttttt

SEQ ID NO: 2643 - DNA, 110 bp, synthetic construct
  source 1..110: mol_type = other DNA
cctagaacatgtagttctggggacctgaggagggtatgctgcaaggaggcataaggcacctcctacagaaggccaacagagctacatgtgggtgagctccaagttgtgtc

SEQ ID NO: 2644 - DNA, 110 bp, synthetic construct
  source 1..110: mol_type = other DNA
ccaatttgtgggtcacccacctgaggagtatgggatttaattatattgtgattcggcctctcctacccaccttgtagtttcttctttatgattagctgtagaaggtcttt

SEQ ID NO: 2645 - DNA, 110 bp, synthetic construct
  source 1..110: mol_type = other DNA
tcgccttctcacatgtggtgctgacagaatgatttttggtggggggatggaggaagagatgtcaaaaagctaacaactttcatagcaaactctgacagagttcaggaaag

SEQ ID NO: 2646 - DNA, 110 bp, synthetic construct
  source 1..110: mol_type = other DNA
gagatgtcaaaaagctaacaactttcatagcaaactctgacagagttcaggaaagaccatttctagcactagaaaattttctattttctgagtttgtttaaatatacaca

SEQ ID NO: 2647 - DNA, 110 bp, synthetic construct
  source 1..110: mol_type = other DNA
tctttcttcccccttgaatctgtgatgtgctgagtcccagccagctccctattagtgcaggttaggcccctgtggcagtgagggcctttggatcaaggagtcagcaatgt

SEQ ID NO: 2648 - DNA, 110 bp, synthetic construct
  source 1..110: mol_type = other DNA
agcacctccctggcttgacggaacctgcaaagtcatcttccttaatcacctcttcctagtttagaactattcatggccctggtaggtggttactcctagcttgggacttg

SEQ ID NO: 2649 - DNA, 110 bp, synthetic construct
  source 1..110: mol_type = other DNA
ctagtttagaactattcatggccctggtaggtggttactcctagcttgggacttgagggttccctgatagctgatgtgttggcagtaacaagaggacaaggaacaaggtc

SEQ ID NO: 2650 - DNA, 110 bp, synthetic construct; identical to SEQ ID NO: 2648
  source 1..110: mol_type = other DNA

SEQ ID NO: 2651 - DNA, 110 bp, synthetic construct; identical to SEQ ID NO: 2649
  source 1..110: mol_type = other DNA

SEQ ID NO: 2652 - DNA, 110 bp, synthetic construct
  source 1..110: mol_type = other DNA
acatctccactgatttctgctcatccacctttggttcagaactccagccagtccggttacagctcaccaaggggaggtagaagggccctggccttggatcacaagcccca

SEQ ID NO: 2653 - DNA, 110 bp, synthetic construct
  source 1..110: mol_type = other DNA
gttacagctcaccaaggggaggtagaagggccctggccttggatcacaagccccatgctccactctgctgctaggaggagggtccagaagtcaacaaatgcatccaattc

SEQ ID NO: 2654 - DNA, 110 bp, synthetic construct
  source 1..110: mol_type = other DNA
taaaaggtggtaatgtgaattgtcagcaaacagaagctgggacagagtaacttgccatagtttgaggttcagctcaccgtctgccctgagaagaaccttttgcttggaga

SEQ ID NO: 2655 - DNA, 110 bp, synthetic construct
  source 1..110: mol_type = other DNA
cgtgcccctatcctctgtttgctgtccttccctgtgtgcacagtccccatcataaaccttgccaaacacccatacccactgctctttgctcctccctcagtcaccatcat

SEQ ID NO: 2656 - DNA, 110 bp, synthetic construct
  source 1..110: mol_type = other DNA
tggggctcctgctgagggcttcctttatgatgtttttccacttttgctagaccctcagctctctgcacacatttttcaagcattcacccaacactaggcccttcctggta

SEQ ID NO: 2657 - DNA, 110 bp, synthetic construct
  source 1..110: mol_type = other DNA
acatgcttgaaaactagtatacctccccagtagtctccacaacttgtcatcaatgactaatgggcccttctccccatcctttccaatccagaagttttaaactcaaaagc

SEQ ID NO: 2658 - DNA, 110 bp, synthetic construct
  source 1..110: mol_type = other DNA
actaatgggcccttctccccatcctttccaatccagaagttttaaactcaaaagctgtgaaatccaattgcccctatgttaacgtcacatttcccagccaaaatgctaca

SEQ ID NO: 2659 - DNA, 110 bp, synthetic construct
  source 1..110: mol_type = other DNA
cagctcggacgtcaaagctgggagcaatagtaacacatgcaccacctcccccatctttcctgggttctgagaaggcaggagagtctgagggctaagagctaaggttcagg

SEQ ID NO: 2660 - DNA, 110 bp, synthetic construct
  source 1..110: mol_type = other DNA
tttcctgggttctgagaaggcaggagagtctgagggctaagagctaaggttcaggaaagagaagccaggtcttccgcggccatctgcagagcagcaaatcaggagtcagg

SEQ ID NO: 2661 - DNA, 110 bp, synthetic construct; identical to SEQ ID NO: 2659
  source 1..110: mol_type = other DNA

SEQ ID NO: 2662 - DNA, 110 bp, synthetic construct; identical to SEQ ID NO: 2660
  source 1..110: mol_type = other DNA

SEQ ID NO: 2663 - DNA, 110 bp, synthetic construct
  source 1..110: mol_type = other DNA
gatatgagtcggtttcacttccgatgcgccacaaagggaactccagggccccttattcatggaccataaggatgttgtgactcgggccagctccaagaaaatagtgacgt

SEQ ID NO: 2664 - DNA, 110 bp, synthetic construct
  source 1..110: mol_type = other DNA
ttcatggaccataaggatgttgtgactcgggccagctccaagaaaatagtgacgtgtgtctccaatgctacacctgtttggtaccataaactttccactttccatgacac

SEQ ID NO: 2665 - DNA, 110 bp, synthetic construct
  source 1..110: mol_type = other DNA
tcttcatgtgatgctgctgccttcagaatttagtcatgttgagcattttataccccttttgaccgaaaaattcccctccagaatgtaagcgttcctagagagtctggtca

SEQ ID NO: 2666 - DNA, 110 bp, synthetic construct
  source 1..110: mol_type = other DNA
cttttgaccgaaaaattcccctccagaatgtaagcgttcctagagagtctggtcaccacggccttggttgtagagagctgaagagaaggcacaggcacatcacacaccca

SEQ ID NO: 2667 - DNA, 110 bp, synthetic construct
  source 1..110: mol_type = other DNA
cattccttccctctcacctcccttccccgctctcccatcatccctcccatctaaagagtgttcagatgtttgcattttaaagaaagaatttggcaaccccaaagaaactc

SEQ ID NO: 2668 - DNA, 110 bp, synthetic construct
  source 1..110: mol_type = other DNA
gagtgttcagatgtttgcattttaaagaaagaatttggcaaccccaaagaaactccaaagtggagactagaaagaaaaattcaaacagcatctgttggggaagcttggga

SEQ ID NO: 2669 - DNA, 110 bp, synthetic construct; identical to SEQ ID NO: 2667
  source 1..110: mol_type = other DNA

SEQ ID NO: 2670 - DNA, 110 bp, synthetic construct; identical to SEQ ID NO: 2668
  source 1..110: mol_type = other DNA

SEQ ID NO: 2671 - DNA, 110 bp, synthetic construct
  source 1..110: mol_type = other DNA
atgacatcaggcatacaaatctacaacaactttaacaactggaataccttacaagatagtgtgatatccctaaaaatcagatgcttacccactacaaccaaagactgatt

SEQ ID NO: 2672 - DNA, 110 bp, synthetic construct; identical to SEQ ID NO: 2671
  source 1..110: mol_type = other DNA

SEQ ID NO: 2673 - DNA, 110 bp, synthetic construct
  source 1..110: mol_type = other DNA
taccctcaaaacttacgtaatcaagttttctgcatgcacggcagcttccacgatattaagtgatggtggtttagcagcttctgcttgcaactgctttacttcttttcgca

SEQ ID NO: 2674 - DNA, 110 bp, synthetic construct
  source 1..110: mol_type = other DNA
ggaggatattgtcagaatcttagagtgcaagtccacgttttattaagattatttattgactttagcttgatatatataaatcttagatttttcacgctgtcggctctccc

SEQ ID NO: 2675 - DNA, 110 bp, synthetic construct
  source 1..110: mol_type = other DNA
agcatatttaaaagatgaacagctctgcccttctaaacaggacaggagccaaagaggtcactcctgggacagatccacttaaggagagaaggatgaaagtcaagaatgcc

SEQ ID NO: 2676 - DNA, 110 bp, synthetic construct
  source 1..110: mol_type = other DNA
aacaccagatcctctacccactgcacagggctggggatggaacccttgccactgcagacacaacaccagagccttaacatgctgtgtcacagcaggtactgcaatagctt

SEQ ID NO: 2677 - DNA, 110 bp, synthetic construct
  source 1..110: mol_type = other DNA
agacacaacaccagagccttaacatgctgtgtcacagcaggtactgcaatagcttctcctttataggaaactgacaaaactgtaaaagtttactgatatttttacttatt

SEQ ID NO: 2678 - DNA, 110 bp, synthetic construct
  source 1..110: mol_type = other DNA
agaaggcagagttgcatctgtccatggaaagagccaaagttgacaatcgtcttcagaacatggacttcctaaaagccaaggcagaggagttcagatctggaattagagct

SEQ ID NO: 2679 - DNA, 110 bp, synthetic construct
  source 1..110: mol_type = other DNA
gaacatggacttcctaaaagccaaggcagaggagttcagatctggaattagagctgcagaggtttgtatggagggctgaatgtatttagctcttttcagacttttctttt

SEQ ID NO: 2680 - DNA, 110 bp, synthetic construct
  source 1..110: mol_type = other DNA
aaagttccaaccctggtctttcctccagcgatggtttgttcagaggaccagcctgcatcctgaagctacctaggggcccatcaagaatcacctcatttgtaaatcaacta

SEQ ID NO: 2681 - DNA, 110 bp, synthetic construct
  source 1..110: mol_type = other DNA
gcacagaggagcaatcaagaaagagggagggtagtatcctatgtttattctatcctgtaatgaattgttggagtcagattaggagtacagctgcttctcttattaatgta

SEQ ID NO: 2682 - DNA, 110 bp, synthetic construct
  source 1..110: mol_type = other DNA
tattctatcctgtaatgaattgttggagtcagattaggagtacagctgcttctcttattaatgtactgagtttttctagctcctctttaatggtttgatttttttttttt

SEQ ID NO: 2683 - DNA, 110 bp, synthetic construct
  source 1..110: mol_type = other DNA
acaaccatggcctgaaaaggccaagtcaactgagtgctcagccccctcagggacatgggtctgagtcaacctggaccagctgacagtgagggaacctggaatagaggtgg

SEQ ID NO: 2684 - DNA, 110 bp, synthetic construct
  source 1..110: mol_type = other DNA
gcagcagcaacaacagttttttaggagctggtgctgagacaggccgagcaggaccgtgggcacagccctgcttcaaggcacctctgtccataacaccccgtgggccttgt

SEQ ID NO: 2685 - DNA, 110 bp, synthetic construct
  source 1..110: mol_type = other DNA
tcatcacctgctatctctgtagttgactcagaaagtataccccagcctcctggtcctgccattcagacttcccacaaaatttgtcccctcctccacctttcctgtatcac

SEQ ID NO: 2686 - DNA, 110 bp, synthetic construct
  source 1..110: mol_type = other DNA
ctgccattcagacttcccacaaaatttgtcccctcctccacctttcctgtatcacttctcccagcatcctgcatctgagtggctcgcaaagaatgcattacccagcaaca

SEQ ID NO: 2687 - DNA, 110 bp, synthetic construct
  source 1..110: mol_type = other DNA
agagggagagagagggagagtgagagagagggagagagtggagataggcgggtctttcagcttttctgatgcttcctgctgacgtcactcagtgcccttcctgtgcatgt

SEQ ID NO: 2688 - DNA, 110 bp, synthetic construct
  source 1..110: mol_type = other DNA
ttcagcttttctgatgcttcctgctgacgtcactcagtgcccttcctgtgcatgtatgtgcgagtttgaacatgatgagtgcacacatccacatccccgcccccccgctt

SEQ ID NO: 2689 - DNA, 110 bp, synthetic construct
  source 1..110: mol_type = other DNA
gtcaatgcccaggagaggaggtggggagcgctaggaacccatttgctccctacggttaactcaaggcagagatgcaagaaatggagtgtgtggatcataactggaccaaa

SEQ ID NO: 2690 - DNA, 110 bp, synthetic construct
  source 1..110: mol_type = other DNA
tccgattggacccctagcctgggagtttttggatgccgcaggtgcagccctaaaaagcaaacattttttaaatggtgtgtgtcagttattaaaaattattaaggaaaata

SEQ ID NO: 2691 - DNA, 110 bp, synthetic construct; identical to SEQ ID NO: 2690
  source 1..110: mol_type = other DNA

SEQ ID NO: 2692 - DNA, 110 bp, synthetic construct
  source 1..110: mol_type = other DNA
acaaactgatgctgagacagtggcttcatctccctggggtcctctgtcaggagaacaataccctgctcccaccctagctcctagggtagctgtgaatctggagcagaagg

SEQ ID NO: 2693 - DNA, 110 bp, synthetic construct
  source 1..110: mol_type = other DNA
accaggctcaggctatcctcagagcatggaggaagctgccccgccctatggccgttggtggactccagtgtagccaggaggcgacctgagagacacagaaggaaatctct

SEQ ID NO: 2694 - DNA, 110 bp, synthetic construct
  source 1..110: mol_type = other DNA
ctgtcattgctacattcctcaggtcagcagaggccaggaaggcagcctcttctgagctcatctccagtctccttgcatccccgtaatccatcagagcggacttcctaagg

SEQ ID NO: 2695 - DNA, 110 bp, synthetic construct
  source 1..110: mol_type = other DNA
gctcatctccagtctccttgcatccccgtaatccatcagagcggacttcctaaggactatgccggtagcacccctcccctgctggagaaccttccaagaatccccatacc

SEQ ID NO: 2696 - DNA, 110 bp, synthetic construct
  source 1..110: mol_type = other DNA
ctcctgttgatggacatctgcgtagctgccatcaggaaacttccatgcatgtcctttggtgaatatgtgcatatctgtggtgtatcaggattagaagtgaatctgctggg

SEQ ID NO: 2697 - DNA, 110 bp, synthetic construct
  source 1..110: mol_type = other DNA
agatgaaaaacccctttgggatgtttctggcatgtgatccttgggatagtcctgcgaagatcaggcaagctcccccctgcccccagtgccactccattgtcttccgtttg

SEQ ID NO: 2698 - DNA, 110 bp, synthetic construct
  source 1..110: mol_type = other DNA
atgtctcagggggaccatgagagtcagcagaggagggtgtatgaaaactggacagcttcatgcatagttctgggaagggagtgccccccagcgaggaatagagatccttc

SEQ ID NO: 2699 - DNA, 110 bp, synthetic construct
  source 1..110: mol_type = other DNA
cttcatgcatagttctgggaagggagtgccccccagcgaggaatagagatccttcactcccagccagtacgtaggacttccctgaggaggttactgtgctgccacagttt

SEQ ID NO: 2700 - DNA, 110 bp, synthetic construct
  source 1..110: mol_type = other DNA
ccatttatctgctaattcattcataaacagctcgaagaggtgaagggccttgaccagagtctaggacactgccgagctgagaacaagactcaggacacctaactggtccc

SEQ ID NO: 2701 - DNA, 110 bp, synthetic construct
  source 1..110: mol_type = other DNA
tcctcatagatatcagttgtttctttaccactgagccacaacagcaactcctagataaccatttttactagtttttcatgtaccttccttgagcttcctttcacaaatat

SEQ ID NO: 2702 - DNA, 110 bp, synthetic construct
  source 1..110: mol_type = other DNA
aactcctagataaccatttttactagtttttcatgtaccttccttgagcttcctttcacaaatataagacaaatatatatgtccatttctctctcattttcttacacaga

SEQ ID NO: 2703 - DNA, 110 bp, synthetic construct
  source 1..110: mol_type = other DNA
gattagctgtgttaaaatgtattatgcgctcaccttgctccctcattaggtaccttctaaaaaatgatttttgagcctttgccagagatacaaaatgtaaagtcatatga

SEQ ID NO: 2704 - DNA, 110 bp, synthetic construct
  source 1..110: mol_type = other DNA
ttaggtaccttctaaaaaatgatttttgagcctttgccagagatacaaaatgtaaagtcatatgactttaaaatcttagagtgtatttcttacttttgataagcaacgcc

SEQ ID NO: 2705 - DNA, 110 bp, synthetic construct
  source 1..110: mol_type = other DNA
catttcatctccctcacactcagcacaaagaaaacaatatgaagaaaaatacagtctcattatttacaatgaaaagagtctacttcattctgcaggcctggcatattgta

SEQ ID NO: 2706 - DNA, 110 bp, synthetic construct
  source 1..110: mol_type = other DNA
taagtggataataaaaattagcaatgacattggccctaataataataactaccaatatccctcagttccgccctttcaaccagcctggcaaattgcctgagcagcctggt

SEQ ID NO: 2707 - DNA, 110 bp, synthetic construct
  source 1..110: mol_type = other DNA
ctcaggttgaacgctcaagccaaggccccgtggcgagttgatggagcagatgtgagagcaggaggtggagaaggctgaccctggagtcacagggaggggtcagctcactt

SEQ ID NO: 2708 - DNA, 110 bp, synthetic construct
  source 1..110: mol_type = other DNA
gagcaggaggtggagaaggctgaccctggagtcacagggaggggtcagctcacttggggcattgaaaagcagctccaagagttcccatcatggttcagtggttaatgaat

SEQ ID NO: 2709 - DNA, 110 bp, synthetic construct
  source 1..110: mol_type = other DNA
ttaacctgctaagccacaacaggaattcctcagttcaaattttaaacagcaccgtatttattccatattcagcaactcttgattgagtgtctctgctgccttgggattgt

SEQ ID NO: 2710 - DNA, 110 bp, synthetic construct
  source 1..110: mol_type = other DNA
aggattaatttttaatgggttttatagcgtggcagataaatcagttatggagagacaaggagctggcaatgcctagtgaatattgactgtgctgtttaaaagggaaacct

SEQ ID NO: 2711 - DNA, 110 bp, synthetic construct
  source 1..110: mol_type = other DNA
caaggagctggcaatgcctagtgaatattgactgtgctgtttaaaagggaaaccttggcaaaaaggggacagccacccagccgtcagattggctatgtgagtgactgagg

SEQ ID NO: 2712 - DNA, 110 bp, synthetic construct
  source 1..110: mol_type = other DNA
aaagcctcaggaggaattgggaattcggggagttgtaatgttttcctacaggagtgagatctcttctttaaggtaataatttgttgttgttgttgttgttgttttgcttt

SEQ ID NO: 2713 - DNA, 110 bp, synthetic construct
  source 1..110: mol_type = other DNA
ctacaggagtgagatctcttctttaaggtaataatttgttgttgttgttgttgttgttttgctttttagggccacacctgaaggatatgaagtttcccaggctaggggtc

SEQ ID NO: 2714 - DNA, 110 bp, synthetic construct
  source 1..110: mol_type = other DNA
gaagatggacttggagaggacatgatcccaggaagcccagcgaggaaggtttatgatctagctaaaagaaaattagcgaggtcatggagttcccgtcgtggcgcagcaga

SEQ ID NO: 2715 - DNA, 110 bp, synthetic construct
  source 1..110: mol_type = other DNA
tattatctgtttatttattcattgtctttgccagtagaacatcagctccataaagtcaaagaatctgtgtctcttatacctggaatgtacctgtcacataatagcctctc

SEQ ID NO: 2716 - DNA, 110 bp, synthetic construct
  source 1..110: mol_type = other DNA
aaagaatgctgaccttaaaatcaatataaatgatatgacccaattgatgtaaaattgggtgtgtatgagtgtgtgtgtgtgaaactatacatgggagagaagtatgatag

SEQ ID NO: 2717 - DNA, 110 bp, synthetic construct; identical to SEQ ID NO: 2716
  source 1..110: mol_type = other DNA

SEQ ID NO: 2718 - DNA, 110 bp, synthetic construct
  source 1..110: mol_type = other DNA
cccagatctcaagcatgtctctgccatctcctgtgttttgaccttatatcagtcactgaacctgcccatagtttcaccagctgtaaacctaggaactaacactcttctac

SEQ ID NO: 2719 - DNA, 110 bp, synthetic construct
  source 1..110: mol_type = other DNA
ctgaacctgcccatagtttcaccagctgtaaacctaggaactaacactcttctaccttccgtgtagggcatccagcttcaaatggtgtaatgctcatggaagactttaaa

SEQ ID NO: 2720 - DNA, 110 bp, synthetic construct
  source 1..110: mol_type = other DNA
acttggatctgatccctggcccgggaattccatacgcagaagggcaaccaaaagtgaaaaaagaaaaactagtttcttttgaaagatagaagttgccacagatggagatt

SEQ ID NO: 2721 - DNA, 110 bp, synthetic construct; identical to SEQ ID NO: 2720
  source 1..110: mol_type = other DNA

SEQ ID NO: 2722 - DNA, 110 bp, synthetic construct
  source 1..110: mol_type = other DNA
ggattttttgcagagagagctgtgagtgtgttacgagtcctacatctcactgggagaggcaggaggtggcctccctttcacctcaagtctggaggatgtgtggagagcat

SEQ ID NO: 2723 - DNA, 110 bp, synthetic construct
  source 1..110: mol_type = other DNA
gaaggaggttatggcaatggggagccgtctagaccctcacagtaaggtgcaagaaaagtgggtttagaattgatagaccaggtggtagcctgcccagcttccaaaacgtg

SEQ ID NO: 2724 - DNA, 110 bp, synthetic construct
  source 1..110: mol_type = other DNA
aagtgggtttagaattgatagaccaggtggtagcctgcccagcttccaaaacgtgtgatctggaccctgtcctcatctggaatggacagccagtgatcaggactgggagg

SEQ ID NO: 2725 - DNA, 110 bp, synthetic construct
  source 1..110: mol_type = other DNA
gtggcgttaataaatgcaaaattcatccttaagagaaaagttttctgtgacttgaaagcttccttttacctcatttgtgaggtggactagtctgtacaagtcgggctcag

SEQ ID NO: 2726 - DNA, 110 bp, synthetic construct
  source 1..110: mol_type = other DNA
aagcttccttttacctcatttgtgaggtggactagtctgtacaagtcgggctcagcgtttagagggtgctaattccggttatgggataacagccaggagtgactgcagtg

SEQ ID NO: 2727 - DNA, 110 bp, synthetic construct
  source 1..110: mol_type = other DNA
ccctgacccctttacaattattgtttagtttccataaaacttttgtgaaaactttcattttgttttgctcaagctggtttgagtagagtttctatcatttgcaacaagaa

SEQ ID NO: 2728 - DNA, 110 bp, synthetic construct
  source 1..110: mol_type = other DNA
ctcccaccccaggcctgcacctgccattttcattctctgtctctcttttggccactctcgaccactttttcttcaagacttatcctttcccctgagacttccctgtcctt

SEQ ID NO: 2729 - DNA, 110 bp, synthetic construct
  source 1..110: mol_type = other DNA
ggacgtgctctggtcagctctgcatctgtgaatatgtgctggcgtgagctggactgctggcccccctggcacagagcctgccatattatgggatggatgctggtaaaccc

SEQ ID NO: 2730 - DNA, 110 bp, synthetic construct
  source 1..110: mol_type = other DNA
gctggcccccctggcacagagcctgccatattatgggatggatgctggtaaaccctggctcctttcccccttctgtgcatattttgtgtttggacaccaggctccatcct

SEQ ID NO: 2731 - DNA, 110 bp, synthetic construct
  source 1..110: mol_type = other DNA
gaatttccatgaaactaggtgattccgaagttcagcctgcctgcttttgacaattagctaaataaacggcacggggtcacttggagtaacaattcacagacttgcctgag

SEQ ID NO: 2732 - DNA, 110 bp, synthetic construct
  source 1..110: mol_type = other DNA
agctaaataaacggcacggggtcacttggagtaacaattcacagacttgcctgagacaggcaaaagttaaaccccacggggtgagggggaggctggttctggggagggaa

SEQ ID NO: 2733 - DNA, 110 bp, synthetic construct
  source 1..110: mol_type = other DNA
cgaggccaagtagaaatagacatctgtccagcagagttagcaggctggcctagcaatgagctcaggacaaataaagcccttgaagaagaagcaggtgcaacagcctggac

SEQ ID NO: 2734 - DNA, 110 bp, synthetic construct
  source 1..110: mol_type = other DNA
gtcaccctagcagcaaacttggaattgcacacactgcttgtggcctcagggtaaaaaaaatgcacgtcatcctcataccagaggagtcctgctctcccccacacccatca

SEQ ID NO: 2735 - DNA, 110 bp, synthetic construct
  source 1..110: mol_type = other DNA
caagctcccagttggtgctgatgctgctagtccggaagcacattttgagaagcgcagcttccagctcatccctcctgggagctccccaacctgtgacaaggtatctggga

SEQ ID NO: 2736 - DNA, 110 bp, synthetic construct
  source 1..110: mol_type = other DNA
accacaagtgcccacggcctcctaagatagagaaactgaggccaagagagctgaagtcactgatccaggctctccttggcccctcgggcaagggcctgaatgacccatct

SEQ ID NO: 2737 - DNA, 110 bp, synthetic construct
  source 1..110: mol_type = other DNA
aagccacattcaggagttccctcccccacctccacttagtccggtgctcagagctgggtccaagggagcttcaagaaaccccattgaggaacaaatgacaaccaccccct

SEQ ID NO: 2738 - DNA, 110 bp, synthetic construct
  source 1..110: mol_type = other DNA
gggtccaagggagcttcaagaaaccccattgaggaacaaatgacaaccaccccctaccaacagcctgcactccttattagcatacgcacagagattaatctaccagatca

SEQ ID NO: 2739 - DNA, 110 bp, synthetic construct
  source 1..110: mol_type = other DNA
tttttttttttaagccaagggcaggggacaggaaattagctggcaagcttggatgtaaaaagtaccagataacgagcccatgatggactgggggtgtgggggtggcattt

SEQ ID NO: 2740 - DNA, 110 bp, synthetic construct
  source 1..110: mol_type = other DNA
ctgttccaaccagtcttcccaaaaagaagttggaggtgatgagctggagaacggccaggcagagagatgctaaatgagaagagaaatcctgaaaacaaattcttccacct

SEQ ID NO: 2741 - DNA, 110 bp, synthetic construct
  source 1..110: mol_type = other DNA
ccatcagatctggagtgactgagcaggagccaacatcatggcccatcatctaactaatgatggggttacggggaaagtacaggggcctgagtccagacaagtctggagct

SEQ ID NO: 2742 - DNA, 110 bp, synthetic construct
  source 1..110: mol_type = other DNA
aatgatggggttacggggaaagtacaggggcctgagtccagacaagtctggagctgccttagccctagaaacaccatggtaaccagtgctgccgcatggtgccctgccta

SEQ ID NO: 2743 - DNA, 110 bp, synthetic construct
  source 1..110: mol_type = other DNA
caccactgccttgcgtggggtaggcttccagcttgcaaagatgaacttggcctatcctttatcaaggtaagccattcccctctgattgtttctgcctcctcagcacggca

SEQ ID NO: 2744 - DNA, 110 bp, synthetic construct
  source 1..110: mol_type = other DNA
aagttcccatgggcacatctgtgtgttcatgaatgtggttttatcagctgattctttgtctcgtcctgtactgactcagcaggctagtttgcgtctgactttaatgagct

SEQ ID NO: 2745 - DNA, 110 bp, synthetic construct
  source 1..110: mol_type = other DNA
ttgtctcgtcctgtactgactcagcaggctagtttgcgtctgactttaatgagctttgatgtctggaagtgcaagtcctggaggacttcagacaccactgcaaagggcgg

SEQ ID NO: 2746 - DNA, 110 bp, synthetic construct
  source 1..110: mol_type = other DNA
ccctgccatcctaggtccatgtcctggagcaagagagcaatcactgtgagaaggggaagtggaaactgctgctccaggggctctgtgccacagctcacccctgccggtgc

SEQ ID NO: 2747 - DNA, 110 bp, synthetic construct
  source 1..110: mol_type = other DNA
gaagtggaaactgctgctccaggggctctgtgccacagctcacccctgccggtgctgagttcagggccgagcaaggtgactgcagagcaagggcggtcagaggagcttcc

SEQ ID NO: 2748 - DNA, 110 bp, synthetic construct
  source 1..110: mol_type = other DNA
gcaaagagctagtgtgtgagagagagataacagacctatgagataggcctggatgattttgatcagacccaggtctggggttagtggtcagcggtcacgagaaaatctcc

SEQ ID NO: 2749 - DNA, 110 bp, synthetic construct
  source 1..110: mol_type = other DNA
tgaagttgtgagggaggaggcagtccctggagggtggctgggttgtgatggctgatggagtaaggcgggccggtagccggcagccagcagtgtcccccgtctcccccaga

SEQ ID NO: 2750 - DNA, 110 bp, synthetic construct
  source 1..110: mol_type = other DNA
cccagggcaggaattgtttcaccatcgcccatgttccttgccaggcacaccctcaccccccaccccggcttcattttcccccgttaattcccctgatagaacttggccgg

SEQ ID NO: 2751 - DNA, 110 bp, synthetic construct
  source 1..110: mol_type = other DNA
ccccccaccccggcttcattttcccccgttaattcccctgatagaacttggccgggcactcccctgtctgaggctgccacgtcgaggcaggccctgcagataagtgggtt

SEQ ID NO: 2752 - DNA, 110 bp, synthetic construct
  source 1..110: mol_type = other DNA
aaggccaagcacaaagctgaaggctagggtaagcttggaatcaggctgaagtcatgtcgggcaaggaatcagccagccttctagcatagccgtgatgaaagatggggcaa

SEQ ID NO: 2753 - DNA, 110 bp, synthetic construct
  source 1..110: mol_type = other DNA
ttgttcttcttttgactttttttttttttaatcaatcatttaaatatgcaaaggctgtttttagcttatcggctggtaccaaagcaggccaagggtggaatctggtcagt

SEQ ID NO: 2754 - DNA, 110 bp, synthetic construct
  source 1..110: mol_type = other DNA
aggggtcgaatcagagctgccctgcccgcctacatctcaggtgcagcaacacccgatcttagctgcatctgcagtctatgctatatagcctgcagcaacgtgggatcctt

SEQ ID NO: 2755 - DNA, 110 bp, synthetic construct
  source 1..110: mol_type = other DNA
aatgcctttgacagctccctaatgtaacaccttccaccccgcccctcctccactgctaccacccgggagttaattagagccctccttgggtgttttccagacatgggatt

SEQ ID NO: 2756 - DNA, 110 bp, synthetic construct
  source 1..110: mol_type = other DNA
cctcaggccccacccactgtctcctagcatgctccactggcttgagagagacatggtaggggagtagcagagtaaatcccatccagctgggaaaatacagtcccagaaga

SEQ ID NO: 2757 - DNA, 110 bp, synthetic construct
  source 1..110: mol_type = other DNA
gtaggggagtagcagagtaaatcccatccagctgggaaaatacagtcccagaagactctcaataaatgtgagttcccttcctcctctctccagtgatggagaggggcccc

SEQ ID NO: 2758 - DNA, 110 bp, synthetic construct
  source 1..110: mol_type = other DNA
agttgactgttgtggtgtttctgctgtggcacaatgggattggtggtgttgctacagctccaggatgcaggttccatccctggcccagtgtgttaaaagatccggctttg

SEQ ID NO: 2759 - DNA, 110 bp, synthetic construct
  source 1..110: mol_type = other DNA
tggccctggcaggtcactaggcccacaagtacccagacaggaccagtgtaccccgtgtggataaaaggggcaccagagaggggaattgtgatcactgtgccttctgcaag

SEQ ID NO: 2760 - DNA, 110 bp, synthetic construct
  source 1..110: mol_type = other DNA
ttgtgattttgattaaaggaagcaaagtgttctgggaacaaatgaaagctatatatcagttcccatgtaggaaatctaattgttccctgaaataataatgtcatcatttc

SEQ ID NO: 2761 - DNA, 110 bp, synthetic construct
  source 1..110: mol_type = other DNA
tcagttcccatgtaggaaatctaattgttccctgaaataataatgtcatcatttcccgtctgactaggggactgttccttccacctccagaccgcctctccccacagggc

SEQ ID NO: 2762 - DNA, 110 bp, synthetic construct
  source 1..110: mol_type = other DNA
accagacattgaactaataagcatcaaggagatgcagatgaccaagacatgaccgctattcttaaggaagttatagagtgggagagagaaaacatttaaataactacata

SEQ ID NO: 2763 - DNA, 110 bp, synthetic construct
  source 1..110: mol_type = other DNA
actgcagacatttgctctaaaatgcccaacatggccatgcaggaatgtagagccggcttggttcccagcaacgcacagttatgctatatggcttgaagttgtatttcaac

SEQ ID NO: 2764 - DNA, 110 bp, synthetic construct
  source 1..110: mol_type = other DNA
acatggtgtatgataactataatgtcacctaaaaatcacatccatttcagaaatacacattatctaaaacatgcattaaaacacagatgtctgaaggaggtagaaatcat

SEQ ID NO: 2765 - DNA, 110 bp, synthetic construct
  source 1..110: mol_type = other DNA
catgtttatagcgctctattttcataggatcttagctagggaattttagagatgagaaaactgattttaagaaagctaacttttacagggatggggtaaaaatctagtct

SEQ ID NO: 2766 - DNA, 110 bp, synthetic construct
  source 1..110: mol_type = other DNA
gcttttagggggacagaggtactcgcagctgtgataagacacttcctattgcatgtgactggagcaggcaagtgcagtatcagtgggtcagcaccagggtgtgtatccct

SEQ ID NO: 2767 - DNA, 110 bp, synthetic construct
  source 1..110: mol_type = other DNA
tgttttcttctagttcctcagacacctgaaggggatgcttactctgcatttactgctcagctctggggagcctggcatggaacagagcacactccttccttagggcaggg

SEQ ID NO: 2768 - DNA, 110 bp, synthetic construct
  source 1..110: mol_type = other DNA
gagactcagggattccagggagaacccagtggctttgggtgatgtgctgtatctgagaacactggggccagctgtgcatgtccactctgaagaagacatgtccagggctc

SEQ ID NO: 2769 - DNA, 110 bp, synthetic construct
  source 1..110: mol_type = other DNA
ccaggaagctgcccctgagctggtggaattcccacattttctgtatgctccagtcttaccagggaccccatgtctagcagaccacactgagactgacatacagggttgtg

SEQ ID NO: 2770 - DNA, 110 bp, synthetic construct
  source 1..110: mol_type = other DNA
actccacaccgcacaatcttgcagccagggacacatcccagcctttagctttcaccctgcatcctgagagaccctccttcagctacggctaggtagaattctgatgtttg

SEQ ID NO: 2771 - DNA, 110 bp, synthetic construct
  source 1..110: mol_type = other DNA
gacagcagtcatatggtcatcatcaccaagacctgctcagaagagtctccaaatagccactgagctctcccagcttccttccaatgccctcacacacaatcttacggatg

SEQ ID NO: 2772 - DNA, 110 bp, synthetic construct
  source 1..110: mol_type = other DNA
aatgttttgcctgtgttgtcttctagcatttttttactcttagctgggctaggctggaactaaatattggaagcagtggaacaagtttctagggtctagggcgcaggtca

SEQ ID NO: 2773 - DNA, 110 bp, synthetic construct
  source 1..110: mol_type = other DNA
ttgtgacctgtgccacaacttcggcaacgctggatccttaaccaactgtgccaaccagggatctaacttgcatcccgggacataggtttgatcctgctgtgccacagcag

SEQ ID NO: 2774 - DNA, 110 bp, synthetic construct
  source 1..110: mol_type = other DNA
cagggatctaacttgcatcccgggacataggtttgatcctgctgtgccacagcaggaactcctgtcaatgtttttcaaagaaaatgattttgtataatgattcttttaaa

SEQ ID NO: 2775 - DNA, 110 bp, synthetic construct
  source 1..110: mol_type = other DNA
tgccgaaagtgataaatcatcctcttatttgttaaggcagtttacataacacatccggtgcctggatcatgctgggtaaatgaggcatcactttacatagttacggcagt

SEQ ID NO: 2776 - DNA, 110 bp, synthetic construct
  source 1..110: mol_type = other DNA
ctgctaattcagggagcaagcactggtagctgctggatttagaaataaaagtcgagggtttagcagctaggactccgagggagcctaagtgggagccctgctgttgtgag

SEQ ID NO: 2777 - DNA, 110 bp, synthetic construct
  source 1..110: mol_type = other DNA
tcatgaggttgtagtcaagctgccagttcaaggtgcaggtttgtctaaagacactagtgccaagggggtccactgtcaaatttttgtgtattgttggtcccttggcacat

SEQ ID NO: 2778 - DNA, 110 bp, synthetic construct
  source 1..110: mol_type = other DNA
aaaaaatcagtcaagcaagaaacttgcatttattaaggatctgccttgctgagacactcttattcgacagagtagaaggtaattaatgggtaaaaaagggaattcctgtt

SEQ ID NO: 2779 - DNA, 110 bp, synthetic construct
  source 1..110: mol_type = other DNA
cgaaatttgctaaaagcatctgttttaagtattctcactatgcttgagaagaaatgactacatgaggcaatgttagcttgattgcagtgatgatttaacaatacatacat

SEQ ID NO: 2780 - DNA, 110 bp, synthetic construct
  source 1..110: mol_type = other DNA
cactatgcttgagaagaaatgactacatgaggcaatgttagcttgattgcagtgatgatttaacaatacatacatatattcaattaccaagttggagaacttaaatatat

SEQ ID NO: 2781 - DNA, 110 bp, synthetic construct
  source 1..110: mol_type = other DNA
agaagtgcttctctttcagattgaaaagctgagagaaactgatgatctgtctgcgcgtgggcttcatgtgatagagcccactgagtaagacactgtctgtgctgcctggc

SEQ ID NO: 2782 - DNA, 110 bp, synthetic construct
  source 1..110: mol_type = other DNA
ttaatgtatcaaacaggtatattttatatcaatactttcatccaagagatattcgaactgttacatttagatacagactgaggggtatggaatatgtgatagtcccacac

SEQ ID NO: 2783 - DNA, 110 bp, synthetic construct
  source 1..110: mol_type = other DNA
agggatgtctgcaaaggacagccaggaagctgatgtggcagaagcagagtaaagcatgagaagagcccagagattaccagacaggccccatgagccagtgagaggacact

SEQ ID NO: 2784 - DNA, 110 bp, synthetic construct
  source 1..110: mol_type = other DNA
gggatgcaggaacctctattcccaccctgggtttgattgtgttgacaacacacctgtggcttataatcaatgacctggctctccagcagtggagcttcactttttgaaga

SEQ ID NO: 2785 - DNA, 110 bp, synthetic construct
  source 1..110: mol_type = other DNA
gtggcttataatcaatgacctggctctccagcagtggagcttcactttttgaagagagaaaaaaagagatacagaattttaaaaatgtaaacccagctagaggaagagtt

SEQ ID NO: 2786 - DNA, 110 bp, synthetic construct
  source 1..110: mol_type = other DNA
tcagtgtatatcattatcgagggttatcattgatacttcaggatcatgattaggctcagtaaattatctgtgattgatgcattctatcaatccaggtaaatctaaatgaa

SEQ ID NO: 2787 - DNA, 110 bp, synthetic construct
  source 1..110: mol_type = other DNA
gaatgatgcagtgcaattgttcaacttattatcaatccaactaatggtactttcactttaccagtattaagctatataatgagacatgatcaaagaactttcaaaaagca

SEQ ID NO: 2788 - DNA, 110 bp, synthetic construct
  source 1..110: mol_type = other DNA
taggggtctggaatgattgttctactaatcataaatacgctcatcctcaccacgagcctccttgcctctctcagctgtccgtctagacctatcactctctctctctatcc

SEQ ID NO: 2789 - DNA, 110 bp, synthetic construct
  source 1..110: mol_type = other DNA
cccatagtccagagatcatcttggttcatgtcatgccaaggacaatgagactactactgttcttggcctttactcccattgagccaacacactctcttaaataataaccc

SEQ ID NO: 2790 - DNA, 110 bp, synthetic construct
  source 1..110: mol_type = other DNA
ttctgccgagggagagcctgttcctgaaactatactgtgttaaaaacttatctcgaggagtggcacttatttaaatattgaatatctagtgttactctttaccttgacaa

SEQ ID NO: 2791 - DNA, 110 bp, synthetic construct
  source 1..110: mol_type = other DNA
tctcttctttaacttttgctcattatcatcaaatttcagtaagatgtgctgcttctgattagggtggtcttatttgataatgtagatggccattctttgctcctttgctg

SEQ ID NO: 2792 - DNA, 110 bp, synthetic construct
  source 1..110: mol_type = other DNA
tgattagggtggtcttatttgataatgtagatggccattctttgctcctttgctgctctcccaggtaggaccagcagatcctacacgagtagtggaaaagggcagtggtg

SEQ ID NO: 2793 - DNA, 110 bp, synthetic construct
  source 1..110: mol_type = other DNA
ttgggcaactataaataaagatttttgtaagcagcatgtagaagtttttatgtggatatatattttcagctcctttgggaaaataccaagggtgagtttattgaactggt

SEQ ID NO: 2794 - DNA, 110 bp, synthetic construct
  source 1..110: mol_type = other DNA
ggattggctgcaccaagatcttttcacctctaggaattgttacatgagctggattttaaaagtagcacagaagagaagaaaggctcaaggaaatgagaaagtgatgggta

SEQ ID NO: 2795 - DNA, 110 bp, synthetic construct
  source 1..110: mol_type = other DNA
ctgtggatactagacagtcacccctccatacctgcctgttccaaagctgtggagtcaaccaacatcagatcctatactatgttaacaatctatgggatttgagcatcccc

SEQ ID NO: 2796 - DNA, 110 bp, synthetic construct
  source 1..110: mol_type = other DNA
cttaacaaaggcagcctttggaaaactccaggccagaatttaggcacccctgtgccacagcacatgcagaattaagaaactgggtagctcattaattctaccttctctcc

SEQ ID NO: 2797 - DNA, 110 bp, synthetic construct
  source 1..110: mol_type = other DNA
cacagcacatgcagaattaagaaactgggtagctcattaattctaccttctctcctttcacagaaaggtggcccaatgaaagtcacctcaggcgtcactcagagtagctc

SEQ ID NO: 2798 - DNA, 110 bp, synthetic construct
  source 1..110: mol_type = other DNA
agtggagctagagctgggtctaggccctcttgtgggcagagacatgtctagggttgtgtctagaggaagaagtggactcaggaagttttaggtggtatgtctgctgatgg

SEQ ID NO: 2799 - DNA, 110 bp, synthetic construct
  source 1..110: mol_type = other DNA
caggtagatagaataacatgattggtcagtctgggccaagtgatcatacctgtacctatggagacacaggtacttgatagctgcaaccacaacagcataactggggcagg

SEQ ID NO: 2800 - DNA, 110 bp, synthetic construct
  source 1..110: mol_type = other DNA
tttttcttttgcttcacatgctctcccacaattgcctatatacctctactcctaactccttccacaagcttcagacttacctgcctccatgaaaggaataaaatatggta

SEQ ID NO: 2801 - DNA, 110 bp, synthetic construct
  source 1..110: mol_type = other DNA
gcaagtaatattttaaacctaaactcagaatttttttttctctcctcatagaaatctgtttagtttctcccaagagggataagtaggctccagaacaatggaaaggaacc

SEQ ID NO: 2802 - DNA, 110 bp, synthetic construct; identical to SEQ ID NO: 2801
  source 1..110: mol_type = other DNA

SEQ ID NO: 2803 - DNA, 110 bp, synthetic construct; identical to SEQ ID NO: 2801
  source 1..110: mol_type = other DNA

SEQ ID NO: 2804 - DNA, 110 bp, synthetic construct; identical to SEQ ID NO: 2801
  source 1..110: mol_type = other DNA

SEQ ID NO: 2805 - DNA, 110 bp, synthetic construct
  source 1..110: mol_type = other DNA
ggtgcaactaaccagagtcaacgatttttcagcaccaactgaaatcaggaagtgattttattttagctttctatagttttgccacttcaagttcctttctcatctgtgtg

SEQ ID NO: 2806 - DNA, 110 bp, synthetic construct
  source 1..110: mol_type = other DNA
atagcctacttaactcatgttacatactcgtgacccttggtcttcttgtcattgacaccctaacttaggtagcagaacaaaatacaattccctcttgcttctctttcctt

SEQ ID NO: 2807 - DNA, 110 bp, synthetic construct
  source 1..110: mol_type = other DNA
caccctaacttaggtagcagaacaaaatacaattccctcttgcttctctttccttcttacagcttttccattcttccctcaaactgtttacaattcccattaactatttt

SEQ ID NO: 2808 - DNA, 110 bp, synthetic construct
  source 1..110: mol_type = other DNA
atccctggaatcaagggaaaccagtttctatttattcactctatccatttgaagcagaattctaaggcagtacatatataactgcttacttaattatgtttctggaattg

SEQ ID NO: 2809 - DNA, 110 bp, synthetic construct
  source 1..110: mol_type = other DNA
agaattctaaggcagtacatatataactgcttacttaattatgtttctggaattgacatcctgattatatatgtttacactgtacttataaagctctttctagtcagctg

SEQ ID NO: 2810 - DNA, 110 bp, synthetic construct
  source 1..110: mol_type = other DNA
gcccttccacatccttggcttgtttagccctaactttatgcacacaactccccatcccaaggggcctccttccatctccttttcctgttttatatcaagctacttcagtg

SEQ ID NO: 2811 - DNA, 110 bp, synthetic construct
  source 1..110: mol_type = other DNA
tctgtagaaaatcctattggaaactctaagtccatcaatgcgcgtattataagcccttgccaccaccaatatcagaggacactcctaacctaaaaccaaattggcttcag

SEQ ID NO: 2812 - DNA, 110 bp, synthetic construct
  source 1..110: mol_type = other DNA
cttgccaccaccaatatcagaggacactcctaacctaaaaccaaattggcttcagctgtctctctggtctctgacccaggactactccattaaccatctcacactgaccc

SEQ ID NO: 2813 - DNA, 110 bp, synthetic construct; identical to SEQ ID NO: 2811
  source 1..110: mol_type = other DNA

SEQ ID NO: 2814 - DNA, 110 bp, synthetic construct; identical to SEQ ID NO: 2812
  source 1..110: mol_type = other DNA

SEQ ID NO: 2815 - DNA, 110 bp, synthetic construct
  source 1..110: mol_type = other DNA
actgcacaggtttctagatcaccttcaaattccttccccatttaagttttgggaaagaatgtaagttatccaaaggatggtgaagacctctgattctatgggtgcaaata

SEQ ID NO: 2816 - DNA, 110 bp, synthetic construct
  source 1..110: mol_type = other DNA
tagaatacatttaagatgcctttgcagccagggatggccatgtgctgcactcttggctaatgagaggtaaacatctttgatgggatgtgggggggtttccaacaaagctg

SEQ ID NO: 2817 - DNA, 110 bp, synthetic construct
  source 1..110: mol_type = other DNA
gctaatgagaggtaaacatctttgatgggatgtgggggggtttccaacaaagctgtgtaagagggatgaaatcagctaaaatatcttgtagctttcacctttctttgccc

SEQ ID NO: 2818 - DNA, 110 bp, synthetic construct
  source 1..110: mol_type = other DNA
ttctgaccactttaaaataaaatcatacttgtcactggtggtttgaaagaatgtgagtacgcccaaggctgtggcctctgaggaatgactggtgacacaacttccatggt

SEQ ID NO: 2819 - DNA, 110 bp, synthetic construct
  source 1..110: mol_type = other DNA
agttacaattcttgaagactgtgctgcagtgtattgggaaatgttcttacctttccctcccttccaacaccaagggattttgatttgaagacaaagaagcatctccattc

SEQ ID NO: 2820 - DNA, 110 bp, synthetic construct
  source 1..110: mol_type = other DNA
aggcactaggaccgcccagacgccaataggcagccaagcttcactgcctgtcaaagggattgagccgcctttgctgttacacaagagagcaggcagcagcagtagcaaca

SEQ ID NO: 2821 - DNA, 110 bp, synthetic construct
  source 1..110: mol_type = other DNA
taagaacaaatatcagtgtagcacgtaggagttaatgagttgtcatgaattaactttgtgttactaactgttcagaccttgatgcctcattttaaagtgagtttgaggta

SEQ ID NO: 2822 - DNA, 110 bp, synthetic construct
  source 1..110: mol_type = other DNA
ttgtgttactaactgttcagaccttgatgcctcattttaaagtgagtttgaggtagtcaagtggcttcagaattctctctatagctctagaattctataattaatataaa

SEQ ID NO: 2823 - DNA, 110 bp, synthetic construct
  source 1..110: mol_type = other DNA
aagcataactgcagtgttgttgttttcaaaagggaaaggagctctgtgtaaacaaaagcaacagacttctaccctactacctggaactctattatggggagaatcatctt

SEQ ID NO: 2824 - DNA, 110 bp, synthetic construct
  source 1..110: mol_type = other DNA
tttccttggaaaatagcaatacccacatgatcttttggagaaatctataaagaagacattctgaatgtatttgcagtgttgttctgtgtccttcctaaagatcaaggtgg

SEQ ID NO: 2825 - DNA, 110 bp, synthetic construct
  source 1..110: mol_type = other DNA
aaataacaattttgatcccagttggacatactagctgtcccatggggctagtgctacttgctgtttctaggtttgttggtgctgcctatcaccagagtggtattttttaa

SEQ ID NO: 2826 - DNA, 110 bp, synthetic construct
  source 1..110: mol_type = other DNA
gccatggctgtagctctaaaaagcaaaaaaagagaaagaaaaaaaaggatggtcttttcagcaaatgctactgagacaactagatattcatatgaaaagaggacaaagaa

SEQ ID NO: 2827 - DNA, 110 bp, synthetic construct; identical to SEQ ID NO: 2826
  source 1..110: mol_type = other DNA

SEQ ID NO: 2828 - DNA, 110 bp, synthetic construct
  source 1..110: mol_type = other DNA
acaatattgataattatttcatccttgttcactagtatagagagctcagaaatgagaagctgaaagggtaagtttcaattaaagtgctaccagggtaattaggttatatg

SEQ ID NO: 2829 - DNA, 110 bp, synthetic construct
  source 1..110: mol_type = other DNA
ttgcttccatttccttctggaatctattccattaaactctccaaggataggtttgcctatatggccagagctaaagaacaggatattttacccaatttaaacaaggaccc

SEQ ID NO: 2830 - DNA, 110 bp, synthetic construct
  source 1..110: mol_type = other DNA
cctatatggccagagctaaagaacaggatattttacccaatttaaacaaggaccccataaaaatcaatatggcgatgtgctctccgaatagtgtcctgaccttggcagac

SEQ ID NO: 2831 - DNA, 110 bp, synthetic construct
  source 1..110: mol_type = other DNA
gtgatatttcctgccaattagggaaagagactgtgctttgctcttcgcagtgacatcaagagctagcagattgcttcgtacatgttgcatgtaactacacacacaactgc

SEQ ID NO: 2832 - DNA, 110 bp, synthetic construct
  source 1..110: mol_type = other DNA
tcaagagctagcagattgcttcgtacatgttgcatgtaactacacacacaactgcaatttagtttcattgaacaggtgctgaatgaaagggcattggcagcaggtaaatc

SEQ ID NO: 2833 - DNA, 110 bp, synthetic construct
  source 1..110: mol_type = other DNA
tatggatgctactctaatctctgcctctccagcttcctatcgtgaactctgacgtggtgtctggggctcagaagctgtcttctaagaaacgcaacatgaggaaaaaaaga

SEQ ID NO: 2834 - DNA, 110 bp, synthetic construct
  source 1..110: mol_type = other DNA
agcagagactgtggtgccgtaattactggaaatgatgtgtccacatcatccgtattatttagctcatgaatttttgactttctcttccaagaaaagcagtgatgtgtttt

SEQ ID NO: 2835 - DNA, 110 bp, synthetic construct
  source 1..110: mol_type = other DNA
aaggttagtaccaatcatcagtgccatttcattaatccagaagattgaaatggtggtggtcgcagacaaatgccttgtgaaactatgtatatcattagctacccgatagg

SEQ ID NO: 2836 - DNA, 110 bp, synthetic construct
  source 1..110: mol_type = other DNA
gtggtcgcagacaaatgccttgtgaaactatgtatatcattagctacccgataggaaaactaaacaaagccggaaataccacaatttcacatctcaagaatgaggaccaa

SEQ ID NO: 2837 - DNA, 110 bp, synthetic construct
  source 1..110: mol_type = other DNA
ctttgcacaccaagttttcatgggccagggagcaccatgacctctagtctcttgtctcttagtttaaattcttaagagagtgaatatgaatagcccaggtcatgggtcag

SEQ ID NO: 2838 - DNA, 110 bp, synthetic construct
  source 1..110: mol_type = other DNA
tggagttttcctcacctgatgagcatatggccatagtttcccatgaacaccctcatggagctcatcatcaggcaagaaagatggacatgatgctgactaacacatgaata

SEQ ID NO: 2839 - DNA, 110 bp, synthetic construct
  source 1..110: mol_type = other DNA
tggagctcatcatcaggcaagaaagatggacatgatgctgactaacacatgaatatatatggtcgcaagttgtgatcagttctaggaaagcgaagtgtgctatgagagat

SEQ ID NO: 2840 - DNA, 110 bp, synthetic construct
  source 1..110: mol_type = other DNA
gagatacctccaggagctcccctctagttccagctcctggcgtggtcctagatctcacgagacattctgcatggttccagctcccacgtgttggccttctgggcccccat

SEQ ID NO: 2841 - DNA, 110 bp, synthetic construct
  source 1..110: mol_type = other DNA
aaactaggtattgtagacttagtaatctttaatgaactttcacataattttaacctaaggtgtcaagacttcattagaatttgaaattcacagatcattgaccaaagcac

SEQ ID NO: 2842 - DNA, 110 bp, synthetic construct
  source 1..110: mol_type = other DNA
actcaagaataccagctctttgaaggcaaagatgatgccttccacatcctccatgtacatgtgagctactctcctgggaaatcttcacattctgatggcttcttccagtt

SEQ ID NO: 2843 - DNA, 110 bp, synthetic construct
  source 1..110: mol_type = other DNA
cagttttgatgatgatgatgatgatgttaatgatgacaaatataaccttttccacaatccctaaatggtatgtcagcaggaattattatcatctctaatttgtaggcaag

SEQ ID NO: 2844 - DNA, 110 bp, synthetic construct
  source 1..110: mol_type = other DNA
aaaactacctggtcactttggctgacctgctttggacaaagtttatactcagagaagcgcaggatgttaggggaagctagaggagtaacagaaatagaaggccagttgaa

SEQ ID NO: 2845 - DNA, 110 bp, synthetic construct
  source 1..110: mol_type = other DNA
agcgcaggatgttaggggaagctagaggagtaacagaaatagaaggccagttgaaacgttctgcagacgatgtggcagaagaaaaaaagacacagagaactgatagattg

SEQ ID NO: 2846 - DNA, 110 bp, synthetic construct
  source 1..110: mol_type = other DNA
ccttattataggtctttgcagtgacacacattggtaatagttaacactcacagcgacacagcctgataagatttctagaacctggcataagactcacaactaaatacttg

SEQ ID NO: 2847 - DNA, 110 bp, synthetic construct
  source 1..110: mol_type = other DNA
agtgactacaccagtttaaaaaattaatttggaaacatggcccagagatagacacttcaaagacacccctcaaaatacagtcaaatctttgataactgtattagtttgct

SEQ ID NO: 2848 - DNA, 110 bp, synthetic construct
  source 1..110: mol_type = other DNA
ctaaattttacttctatcctaattagctctcaaatgataaagatgcaaattataactattcatgttaacgtagttttcaaaagctttgtgataggagtttccgtcgtggc

SEQ ID NO: 2849 - DNA, 110 bp, synthetic construct
  source 1..110: mol_type = other DNA
tatcatgcatgatctcattttttttctctcctatgttttaaggatctgtttgtgtcactgtccattgctcctagctgctgcacaatatttcaaaatctgtattttaaaaa

SEQ ID NO: 2850 - DNA, 110 bp, synthetic construct
  source 1..110: mol_type = other DNA
ggctgagatccactgctctgtatccgactaagagctcctcagaggaccatttgatgttcctctgtatttccagtgcccggcacagtgttcagtgaatcactgtgaatgcg

SEQ ID NO: 2851 - DNA, 110 bp, synthetic construct
  source 1..110: mol_type = other DNA
ggatgaggcattgctattgagaaaataatacagcaatgttaaggaaaggtttagaggagaaacccatcataatccaccccccacacacacacaaagatcttacatttata

SEQ ID NO: 2852 - DNA, 110 bp, synthetic construct
  source 1..110: mol_type = other DNA
ggagaaacccatcataatccaccccccacacacacacaaagatcttacatttatacattacttattcacatgtataactatttagagatatttgtaatcatagtctacac

SEQ ID NO: 2853 - DNA, 110 bp, synthetic construct
  source 1..110: mol_type = other DNA
acagactgttaattgtaccaaattatatcttgtcagatttgatgacaccagtcagctgccctggggtggggggctgggctgagctcatgaaattcatttcatgtaatact

SEQ ID NO: 2854 - DNA, 110 bp, synthetic construct
  source 1..110: mol_type = other DNA
tcccagcacagccacgtcccacacctggtggccctgcagctgggtcttgaaggatgcatatgagctgtctaaagcagaagaacattcaggcaaagtggagaccatgagtg

SEQ ID NO: 2855 - DNA, 110 bp, synthetic construct
  source 1..110: mol_type = other DNA
gcatatgagctgtctaaagcagaagaacattcaggcaaagtggagaccatgagtgacggcatgagtggggtgtgaaagtggatggtgtttccccgggggccagtttccta

SEQ ID NO: 2856 - DNA, 110 bp, synthetic construct
  source 1..110: mol_type = other DNA
tggtcactcctccaactatttttgcttcagggtcttgggagccatgatcagagtagaatttccttcaccttcagttcttccattgacccttttggatttagcttactcac

SEQ ID NO: 2857 - DNA, 110 bp, synthetic construct
  source 1..110: mol_type = other DNA
gaatttccttcaccttcagttcttccattgacccttttggatttagcttactcactaaccaagttctgaagtgcaggtgccagtaagttactttaaaaacctcttaaaac

SEQ ID NO: 2858 - DNA, 110 bp, synthetic construct
  source 1..110: mol_type = other DNA
tttttatctgcattcttctgaagaatgacctttagattctgagcgagctgttgcatgattgtgtcctcatgctgggcagacctgagggagggaatggccatgtaacgagg

SEQ ID NO: 2859 - DNA, 110 bp, synthetic construct
  source 1..110: mol_type = other DNA
ggggattctgaaggagccctagagaggataaatggttgcctctttgtcaacagtgtggactcatgaccaggtgctgatctcaggaggattggctggctcccttcagtctc

SEQ ID NO: 2860 - DNA, 110 bp, synthetic construct
  source 1..110: mol_type = other DNA
tggactcatgaccaggtgctgatctcaggaggattggctggctcccttcagtctccgggtctccaagttgggacttcttggacacatcaggaggaaagaacacagccact

SEQ ID NO: 2861 - DNA, 110 bp, synthetic construct
  source 1..110: mol_type = other DNA
ggactcacttccttgctcaaaagctacccgtggttccaaatacattccaagcaccaggttcagcactcaagcaccgccggtctaggccttcctcctctttcctttcagac

SEQ ID NO: 2862 - DNA, 110 bp, synthetic construct
  source 1..110: mol_type = other DNA
aggttcagcactcaagcaccgccggtctaggccttcctcctctttcctttcagactggtcccctcacggcctcagaaaacagcttcatttcccccacagcgccccccaga

SEQ ID NO: 2863 - DNA, 110 bp, synthetic construct
  source 1..110: mol_type = other DNA
ctggacctcccaggacaaggttgaaccagaagctacttctgcttctgctccccgaatgacagctggcaccctacttccagaattgatcccactcacggattcattaataa

SEQ ID NO: 2864 - DNA, 110 bp, synthetic construct
  source 1..110: mol_type = other DNA
cctggcctgaggtgtgctggaagtctgacactggaagaaggacaaggcaggaggagccaggccctccacattcacagcttacttcacaacactgctaagtattacccatc

SEQ ID NO: 2865 - DNA, 110 bp, synthetic construct
  source 1..110: mol_type = other DNA
gccaggccctccacattcacagcttacttcacaacactgctaagtattacccatcttttaggggcagaaagtggataggggagattctggaaagttccaaagaggtttta

SEQ ID NO: 2866 - DNA, 110 bp, synthetic construct
  source 1..110: mol_type = other DNA
gatcctgatgtggccatgatttgggaaccagaaatatatagtaaagttgctatatatatatagcatgttgaccaaagcagctgaatgtttatccctcctcatgcagttaa

SEQ ID NO: 2867 - DNA, 110 bp, synthetic construct
  source 1..110: mol_type = other DNA
atatatagcatgttgaccaaagcagctgaatgtttatccctcctcatgcagttaatatcagatctattccctgaagttatcatgatacatggtcatatagacacagtctt

SEQ ID NO: 2868 - DNA, 110 bp, synthetic construct; identical to SEQ ID NO: 2866
  source 1..110: mol_type = other DNA

SEQ ID NO: 2869 - DNA, 110 bp, synthetic construct; identical to SEQ ID NO: 2867
  source 1..110: mol_type = other DNA

SEQ ID NO: 2870 - DNA, 110 bp, synthetic construct
  source 1..110: mol_type = other DNA
gccctggggatcgggaaaaactactctgccctctttaccacatgacagctaggcaaatatttgaagtggcaagcatggaccacaccatttgcctcttctccagcctaaac

SEQ ID NO: 2871 - DNA, 110 bp, synthetic construct
  source 1..110: mol_type = other DNA
aatatttgaagtggcaagcatggaccacaccatttgcctcttctccagcctaaacatttgctctaactctcccccatacagcataggttgttcttctctcacaccctgag

SEQ ID NO: 2872 - DNA, 110 bp, synthetic construct
  source 1..110: mol_type = other DNA
ctgggggtggggggagggttgaactgtttttctccatgttcctgacttctgaaggcactgattgcagctctcaacagtacttcacatttaggatttactttcaaggttta

SEQ ID NO: 2873 - DNA, 110 bp, synthetic construct
  source 1..110: mol_type = other DNA
tcttaaagggacaattgtgtaagtgctgtggttacctgagctggaggcctgcctggctttgatggacggttctgccctgtgtgagcccgctcagagccatgcagggacgg

SEQ ID NO: 2874 - DNA, 110 bp, synthetic construct
  source 1..110: mol_type = other DNA
cccccacccaccccaccaccccctgccgtcggagagaagccttacctgtggtcacacagctgtactgtggatactgtgtgaaagcaatcgccctttcaagcccatccctc

SEQ ID NO: 2875 - DNA, 110 bp, synthetic construct
  source 1..110: mol_type = other DNA
atctcccagagctggaatgcaggtctccaggtacagctgagaggactgtgtcaggtatgcctcttctccaaaataatccagcttgaagagtgtggccccgccttccacct

SEQ ID NO: 2876 - DNA, 110 bp, synthetic construct
  source 1..110: mol_type = other DNA
gacaggctgtgttctctgttccagtatacctgtagggagagctataggatgctctaccctatttcctatgtgctgtggttaggttccctgatcaagtgggctgaaggctg

SEQ ID NO: 2877 - DNA, 110 bp, synthetic construct
  source 1..110: mol_type = other DNA
tacgccagcttcttccactcatgaggccgcaggtacctggaggccagccgccatagcacagagcggagctgctgcatttcctgtcgatggtcctgcttaaaggtcaagct

SEQ ID NO: 2878 - DNA, 110 bp, synthetic construct
  source 1..110: mol_type = other DNA
cattgttcttattttctgatttgctaggactggtgaagacctcattttggactagtatttgagaatcaactgaatctcctgaagaacatgctccaggaagatggcttaaa

SEQ ID NO: 2879 - DNA, 110 bp, synthetic construct
  source 1..110: mol_type = other DNA
gagatgcctaaggacactcagttcccagttctcctccctctggttttgctctggtagccaagccaggactccaaagctggccatggtgggattctgcaaggaaggtccac

SEQ ID NO: 2880 - DNA, 110 bp, synthetic construct
  source 1..110: mol_type = other DNA
agccaagccaggactccaaagctggccatggtgggattctgcaaggaaggtccactggccgtgtgctgagaggaaggagtctgagacggcttcgtggaatcaccaacagc

SEQ ID NO: 2881 - DNA, 110 bp, synthetic construct
  source 1..110: mol_type = other DNA
ggtggaactctaggccacattgcaggctctgggggaagagccccactttctggcaactcggacttgatccccagctctgtgactggctggccaggaacctaattcctgag

SEQ ID NO: 2882 - DNA, 110 bp, synthetic construct
  source 1..110: mol_type = other DNA
actcggacttgatccccagctctgtgactggctggccaggaacctaattcctgagctggcttcctcatctgtaaaatgggcgtataccaccctgtctgctacatcagagg

SEQ ID NO: 2883 - DNA, 110 bp, synthetic construct
  source 1..110: mol_type = other DNA
tcctttgtgcagtgagttggggacaaaaaactgcccctcccccacccgattctcagtttccccccaactcgggtgtatggctcccttctctccctcccttgttcgcttct

SEQ ID NO: 2884 - DNA, 110 bp, synthetic construct
  source 1..110: mol_type = other DNA
gtttccccccaactcgggtgtatggctcccttctctccctcccttgttcgcttctttttctatagaagcaactttgtccatctttctctgtacataatctccccataagc

SEQ ID NO: 2885 - DNA, 110 bp, synthetic construct
  source 1..110: mol_type = other DNA
ctctagtgaaatacttaagaggtggaggcttggtttcctggaagaaatagttgcagaggagcctgtagtatgttttgaaaacaaggcttttcctttccagttttgttctg

SEQ ID NO: 2886 - DNA, 110 bp, synthetic construct
  source 1..110: mol_type = other DNA
gaggagcctgtagtatgttttgaaaacaaggcttttcctttccagttttgttctgattagtacctccaaaatgtcaaaattcctgatattgggggagggaaaaagacata

SEQ ID NO: 2887 - DNA, 110 bp, synthetic construct
  source 1..110: mol_type = other DNA
taccacagctgcagcataggtgctcggatttgatctctggacgggcacgtctatatgccccaggtgtggccaaaaaaaaagtaaaataaaatgaaatcacagacaactca

SEQ ID NO: 2888 - DNA, 110 bp, synthetic construct
  source 1..110: mol_type = other DNA
ataaatcaatcagccaatctatttaaagtgccttaacaacaatccagtagttccgttgtagttcagcagtaataagctggactggtatccatgaggacatgagttcaatc

SEQ ID NO: 2889 - DNA, 110 bp, synthetic construct
  source 1..110: mol_type = other DNA
actgatatctcctgtttactctggcatagttggatgtacatttgcataaatgtgtttgttccaattagctttgttgaataggcatttaatttaaaaaatgaggcttatat

SEQ ID NO: 2890 - DNA, 110 bp, synthetic construct
  source 1..110: mol_type = other DNA
acacttacaatatgaacacgatggctgtgagtttactaggacacaacagtgggatttgcctcccaaaagctcttggtaacttagactgatttaatagatatataaagtcc

SEQ ID NO: 2891 - DNA, 110 bp, synthetic construct
  source 1..110: mol_type = other DNA
ttgcctcccaaaagctcttggtaacttagactgatttaatagatatataaagtccagatcaactgaagtagtggttgcttaagttttggacctctagggagtcttggcat

SEQ ID NO: 2892 - DNA, 110 bp, synthetic construct
  source 1..110: mol_type = other DNA
acctattagaagaggcttacttaatgaattggcagacctaaagtttctgatgctgttttttccctttaattctgggtcatactttacgttttggtctttactcacacttt

SEQ ID NO: 2893 - DNA, 110 bp, synthetic construct
  source 1..110: mol_type = other DNA
gagaatccttaatccttcgctggtagcattgtgagagcttcctagagttccaaacatcatattttttgtggcgtttgtttgccgtagcttagcctccatacccacggacc

SEQ ID NO: 2894 - DNA, 110 bp, synthetic construct
  source 1..110: mol_type = other DNA
atcatattttttgtggcgtttgtttgccgtagcttagcctccatacccacggaccactgaagttaccttaaataattttgccttctgtatcaaggggcagacaatgctgg

SEQ ID NO: 2895 - DNA, 110 bp, synthetic construct
  source 1..110: mol_type = other DNA
aaatgcaaaaatgtaacttaaaaatcatatgcaaaagaaggccaaagactgtacgagagatacagaaattcagaggaaggagagactttaaggagacacttggtagtttc

SEQ ID NO: 2896 - DNA, 110 bp, synthetic construct
  source 1..110: mol_type = other DNA
tcatctctggcatagagtcttgacttgctacctgctccaacttctggtaaccttatatttctgcgccctgttttggtttcctggatgtctggtcccttgtttgccctgac

SEQ ID NO: 2897 - DNA, 110 bp, synthetic construct
  source 1..110: mol_type = other DNA
gttagcagacagttttaacctcattgtgagatggttggtggagctgccctcatccagtggctggatccagagcatcatggcctcataggaagagaaaggtagcccagttt

SEQ ID NO: 2898 - DNA, 110 bp, synthetic construct
  source 1..110: mol_type = other DNA
agtggctggatccagagcatcatggcctcataggaagagaaaggtagcccagttttagaaaaacatcctgccagaaatggagtgaccttcaagcttgttgaagaaagctc

SEQ ID NO: 2899 - DNA, 110 bp, synthetic construct
  source 1..110: mol_type = other DNA
atactgctgatattgctgaggtttattgcctgcatttatagtcaaagaaaatgctaggtttcagacggaggttagtgatagacaataaagatgcaatttttaaaaatctc

SEQ ID NO: 2900 - DNA, 110 bp, synthetic construct
  source 1..110: mol_type = other DNA
aggtttcagacggaggttagtgatagacaataaagatgcaatttttaaaaatctcattcaaattcaaaccctaatttccacccacaaatccagttaaataatttctgcca

SEQ ID NO: 2901 - DNA, 110 bp, synthetic construct
  source 1..110: mol_type = other DNA
tgtctccttctcattgcatcatactagaggatacttgatgttgatatgtcttattgctagtgatattttaaccttgattgctttattaaggcacactctgctatattttc

SEQ ID NO: 2902 - DNA, 110 bp, synthetic construct
  source 1..110: mol_type = other DNA
atgatgttagaaattaggtaacttttctattttggttctttatttagatatcagcctggtaaaagcttatcagaagtataccgttgtgtgtacaaagttcgaagtcgttt

SEQ ID NO: 2903 - DNA, 110 bp, synthetic construct
  source 1..110: mol_type = other DNA
ctgtgttactggacctcacatatctgactggcattcatgaagacatgggcaaacagaacaccaagcgacatgaaaagaaacaccgacatgaatctgaggagaaaggggat

SEQ ID NO: 2904 - DNA, 110 bp, synthetic construct
  source 1..110: mol_type = other DNA
gaacaccaagcgacatgaaaagaaacaccgacatgaatctgaggagaaaggggatgttgagcagaaaactgaaagtgaatcagctttagatacacgaacaggcttaacat

SEQ ID NO: 2905 - DNA, 110 bp, synthetic construct
  source 1..110: mol_type = other DNA
cagctggtacagtggttctggcacacactggaggagttctccaatgaggagcgtgtgctcttcatgaggtttgtgtctggaagatctcgactcccagccaacactgctga

SEQ ID NO: 2906 - DNA, 110 bp, synthetic construct
  source 1..110: mol_type = other DNA
attgcaatgagggatcagctcataaattcctgcaattgcagaaaatgagagcatccaagcaagaggaaattaccggcttatgccaatagtatgcagcatctctgagctca

SEQ ID NO: 2907 - DNA, 110 bp, synthetic construct
  source 1..110: mol_type = other DNA
caagcaagaggaaattaccggcttatgccaatagtatgcagcatctctgagctcaggaatacctcccagccccaaggttcttgtgattgggcatttcctgtgggaaagta

SEQ ID NO: 2908 - DNA, 110 bp, synthetic construct
  source 1..110: mol_type = other DNA
tctctcagccagactctgtcaagcaaaccactgagctgcctgtttgtagcctaaagatgactatcttaaggagtacccgtcgtggcacagtggttagcgaatccaactag

SEQ ID NO: 2909 - DNA, 110 bp, synthetic construct
  source 1..110: mol_type = other DNA
tgggacaactagcaagatacatgtgaggaatcccaagcactagtgagagctagtcctgttgaaatggctggtcactttgctgaggagcaaagcagttcagtctggctgaa

SEQ ID NO: 2910 - DNA, 110 bp, synthetic construct
  source 1..110: mol_type = other DNA
tttggagtttcagctggtataaaaactggtcacaaacctcagctcctgtgctgtttcctacaaaatatccaaccttgctgaatatttcatgaagttggtgacatgacaaa

SEQ ID NO: 2911 - DNA, 110 bp, synthetic construct
  source 1..110: mol_type = other DNA
ctttacatttattagattcctattcctaggccaatgatccgttttgttccttttcaatttcttgctaaggcagataatcctgaagtatcctggaaaagagtactttgtga

SEQ ID NO: 2912 - DNA, 110 bp, synthetic construct
  source 1..110: mol_type = other DNA
aatttcttgctaaggcagataatcctgaagtatcctggaaaagagtactttgtgagaacagagcaggaggacacatcacgggaatggtggtcatgaagttccagtaaatc

SEQ ID NO: 2913 - DNA, 110 bp, synthetic construct
  source 1..110: mol_type = other DNA
ctgccttacatcttattttctgtctttcaacagaagcaattatgtatagtttaatcacgccaacttgtggtaaaatttagctgtctcaagaacaggaatattccctatgg

SEQ ID NO: 2914 - DNA, 110 bp, synthetic construct
  source 1..110: mol_type = other DNA
tgtgtgagaggctatgcatggagccacttgcctcactcacttgtcagcatgggctcgtttagcagattaactcacacaccaaacatctgtaagaagaggtcaccttagag

SEQ ID NO: 2915 - DNA, 110 bp, synthetic construct
  source 1..110: mol_type = other DNA
cgtttagcagattaactcacacaccaaacatctgtaagaagaggtcaccttagagctgtgtcaaggactccccaggcacggatggaatgagacaaggagaggtatatttt

SEQ ID NO: 2916 - DNA, 110 bp, synthetic construct
  source 1..110: mol_type = other DNA
gactccaccctcatcacctcttcatctcccaaaggccccacttctgagggtgaagatttcaagaaaggaatgggtaggggcattcaatccattgtaatggtcatttttca

SEQ ID NO: 2917 - DNA, 110 bp, synthetic construct
  source 1..110: mol_type = other DNA
ggaactccctctcactctccttccgtgcagaactctggggccttcaggattccagaaacttgaggaagggcaccgggtccatggcagttgctcccaagttgcctattgtc

SEQ ID NO: 2918 - DNA, 110 bp, synthetic construct
  source 1..110: mol_type = other DNA
aaacttgaggaagggcaccgggtccatggcagttgctcccaagttgcctattgtccaagccctagtggaccagttagaggccggggctgctgcccacagcatgctcctca

SEQ ID NO: 2919 - DNA, 110 bp, synthetic construct
  source 1..110: mol_type = other DNA
ggaagacatcctaaccacactctcatgctccctcagcccccctctcagaaggctaggctatagaaacacctcaccatcctgatgctcagcccccttcttggagatgacat

SEQ ID NO: 2920 - DNA, 110 bp, synthetic construct
  source 1..110: mol_type = other DNA
gtggctggacagatctgaaatgtccaattcattagcgagcctcattcagctggtaggaaggtgatatacacttaatgaaaattagggtacagacttgtatcccgtttaaa

SEQ ID NO: 2921 - DNA, 110 bp, synthetic construct
  source 1..110: mol_type = other DNA
tgcagggctgttattctccaatcctcctctattttatgatcctattcttggtcctccctctgccctagtttggatgtatgctatctgattagaccttaagtctgtgttca

SEQ ID NO: 2922 - DNA, 110 bp, synthetic construct
  source 1..110: mol_type = other DNA
gggaacagtccaccagacaagcctctgaaagcccagggcacagccaccactgtgcctcacacaaggtgtgtggctaaagtcgtgagccctgcagcctcccttcctcacct

SEQ ID NO: 2923 - DNA, 110 bp, synthetic construct
  source 1..110: mol_type = other DNA
tatcttttgttcaccttataagcaggtagcagccaatcaccgaagcccaaaagccagcagagtggggtacctgttacatcacagagcttgctgcatcacgtctttcccaa

SEQ ID NO: 2924 - DNA, 110 bp, synthetic construct
  source 1..110: mol_type = other DNA
tagaggaatttagatggacactggaatgtattctgtttttacagttttcaacaataaacgtatcttctcaatcatgagtcgcctaaggttattaagctgactgtggagtc

SEQ ID NO: 2925 - DNA, 110 bp, synthetic construct
  source 1..110: mol_type = other DNA
aaacgtatcttctcaatcatgagtcgcctaaggttattaagctgactgtggagtctcttggcataaaaccatcctcaggaggcaaaaacaatcatattgcaatgaggctc

SEQ ID NO: 2926 - DNA, 110 bp, synthetic construct
  source 1..110: mol_type = other DNA
ccctgggcagatcatgcctaacacctcgcttatcttccactaactcacccataaaaggacagggacgggctaagactcaggtatccttcagctagaatattctgaaatcc

SEQ ID NO: 2927 - DNA, 110 bp, synthetic construct
  source 1..110: mol_type = other DNA
aggacagggacgggctaagactcaggtatccttcagctagaatattctgaaatccccctacattgatgaaacaagctgaaagtacctcccgttaagtcagcttatacaaa

SEQ ID NO: 2928 - DNA, 110 bp, synthetic construct
  source 1..110: mol_type = other DNA
caatgacaccaatgacctcaagagttatacaaatgtccacctctgagcctcagtgcccattatcataaaaagaacacactgccctgtccagactgagatctgaaaggctc

SEQ ID NO: 2929 - DNA, 110 bp, synthetic construct
  source 1..110: mol_type = other DNA
ccaacaattatcccaagtgatgttgcctaacatgcaatcattagaactttattgccttggatctaaggcttttcactgcttccggagaaaacatggatctcttctgtcca

SEQ ID NO: 2930 - DNA, 110 bp, synthetic construct
  source 1..110: mol_type = other DNA
cttggatctaaggcttttcactgcttccggagaaaacatggatctcttctgtccaatcttttccccaaagaacaaatgagagatgagtttaaaagtggggagaagataga

SEQ ID NO: 2931 - DNA, 110 bp, synthetic construct
  source 1..110: mol_type = other DNA
cagtgtgatttcaaagcccacgtcctaacctctagagtttcccaaattatttcaaatacttcggttgccataactggggatctggccttacacttacagtgagtggggaa

SEQ ID NO: 2932 - DNA, 110 bp, synthetic construct
  source 1..110: mol_type = other DNA
taaagaacttaaaaataaaacaaaacggatccctgcaactcacagatgtggcaaatagacttgtggttgctagggcagggagacaaggaagaggaaggattgggagtttg

SEQ ID NO: 2933 - DNA, 110 bp, synthetic construct
  source 1..110: mol_type = other DNA
taaaacaaaacggatccctgcaactcacagatgtggcaaatagacttgtggttgctagggcagggagacaaggaagaggaaggattgggagtttgggattagcagatgca

SEQ ID NO: 2934 - DNA, 110 bp, synthetic construct
  source 1..110: mol_type = other DNA
gatgtgtcctcgcatggctggtcctctgtgaccacattaagccttatgttttacttacctcggaagcatgagccatgtgataactgggaggatggtgtaacaggatgagg

SEQ ID NO: 2935 - DNA, 110 bp, synthetic construct
  source 1..110: mol_type = other DNA
tacctcggaagcatgagccatgtgataactgggaggatggtgtaacaggatgaggccctgtgcctggaacacccaaatctacccagaggaagaccgtgatcattccgagc

SEQ ID NO: 2936 - DNA, 110 bp, synthetic construct
  source 1..110: mol_type = other DNA
ctgtgtcaataatgggaaatgaagtttttcattttaacttggatttgtatccagatgctactgagggggattcctatactgacatgtccaaagtggatggtgtggtatca

SEQ ID NO: 2937 - DNA, 110 bp, synthetic construct
  source 1..110: mol_type = other DNA
tgctactgagggggattcctatactgacatgtccaaagtggatggtgtggtatcactgaacgttggctgtattcagattgtctatctccataaattcctcatgtcacttc

SEQ ID NO: 2938 - DNA, 110 bp, synthetic construct
  source 1..110: mol_type = other DNA
ataactagcattgggtctattgataatcatgtgcttaacaaagtagaaaattaggtaaatatagagatcatgtatgtaatgctctttgcacacctaacagattaagggtt

SEQ ID NO: 2939 - DNA, 110 bp, synthetic construct
  source 1..110: mol_type = other DNA
agtaaactcaccagggcaacatcttccatgaagctcatgtaactttaatgccttgtcctggcattgtttccccagccggtactggcccctctgcgtggcctcctggaggc

SEQ ID NO: 2940 - DNA, 110 bp, synthetic construct
  source 1..110: mol_type = other DNA
ggagggagtctagtgttggaatactgatgtggtgtttcttggtaatgtgcaggtagctggctttggagcccagcggtggggaactacccctccttctcatgttcccattg

SEQ ID NO: 2941 - DNA, 110 bp, synthetic construct
  source 1..110: mol_type = other DNA
gcacgaagagttttataaacctcaacccagccacaaaaatggagtcagagagattagtcgaactggacagcagaatctcctccattgtaagcttccttccatcagagaaa

SEQ ID NO: 2942 - DNA, 110 bp, synthetic construct
  source 1..110: mol_type = other DNA
agtcgaactggacagcagaatctcctccattgtaagcttccttccatcagagaaatagggactgcattttacatgatgttatactaattactggcttggctcagtcaggc

SEQ ID NO: 2943 - DNA, 110 bp, synthetic construct; identical to SEQ ID NO: 2941
  source 1..110: mol_type = other DNA

SEQ ID NO: 2944 - DNA, 110 bp, synthetic construct; identical to SEQ ID NO: 2942
  source 1..110: mol_type = other DNA

SEQ ID NO: 2945 - DNA, 110 bp, synthetic construct
  source 1..110: mol_type = other DNA
aaagaatgaatctcaatagcccacttgggtgttatgcatacagctttagtcttattagcacagcacaccaaccaagtgagtattcttgcttctaatagcctttttttcac

SEQ ID NO: 2946 - DNA, 110 bp, synthetic construct
  source 1..110: mol_type = other DNA
taaccactgcaccatgatgggaactccatcctaattcttctttttctttcttttctctctctctcttttttaaatttagagaagcccttttagtattttttttttagaat

SEQ ID NO: 2947 - DNA, 110 bp, synthetic construct; identical to SEQ ID NO: 2946
  source 1..110: mol_type = other DNA

SEQ ID NO: 2948 - DNA, 110 bp, synthetic construct
  source 1..110: mol_type = other DNA
tgaattctccattactccaagtgacctccaaggagttcaagcatctggaagaactagcagagataagctcctcagggtagtggaaaattatagaaaccagtgaagtgagg

SEQ ID NO: 2949 - DNA, 110 bp, synthetic construct
  source 1..110: mol_type = other DNA
cagctgattaagaagtaaatagagaaatatgaaacaacaaaaagctctagtaggaacgttcacattaggcaaatagaagctaaagagtattattagagataaagagagac

SEQ ID NO: 2950 - DNA, 110 bp, synthetic construct
  source 1..110: mol_type = other DNA
tttcttatttatccaatgttaggaaacagggcaagttctgcacgatgcagggctaggtctcagcacctcagttggggcttatgatttttctctggggacctaaatttctg

SEQ ID NO: 2951 - DNA, 110 bp, synthetic construct
  source 1..110: mol_type = other DNA
ttgtccaggaaatctgaaccgttctataggccacattgagcggtgaagggcaggtctggtgttgtctggcattgggaaggggggcaggaaggggacagggttgtcacaca

SEQ ID NO: 2952 - DNA, 110 bp, synthetic construct
  source 1..110: mol_type = other DNA
ctggtgttgtctggcattgggaaggggggcaggaaggggacagggttgtcacacatcagctctgccacccatgtgttatatgatcttggtcctgttactcccttctgtgc

SEQ ID NO: 2953 - DNA, 110 bp, synthetic construct
  source 1..110: mol_type = other DNA
cgagctctggttttcagtgagctctgatggaaccctttgtccacagatcttccactaatatgtcccatgaatgatttgtgttatgtctgtgaggcatttccccacagtgt

SEQ ID NO: 2954 - DNA, 110 bp, synthetic construct
  source 1..110: mol_type = other DNA
atctgctcctaggagactcttcctccttgaccgttaagatcagtggtgggtcccctcggcagctacctgagggaagtgtcccaggctctttgtcaggccactcacggtcc

SEQ ID NO: 2955 - DNA, 110 bp, synthetic construct
  source 1..110: mol_type = other DNA
tcggcagctacctgagggaagtgtcccaggctctttgtcaggccactcacggtccggaactctgcagaaaggcctttggctgcgtcctccgttccctacttgggcctggc

SEQ ID NO: 2956 - DNA, 110 bp, synthetic construct
  source 1..110: mol_type = other DNA
cgttttcatccatttcactcttccacaggtgtatttatccatccatttattcggcagtcaagtgataatggcctagagtgtagcagttcctaggctagggctagtcactc

SEQ ID NO: 2957 - DNA, 110 bp, synthetic construct
  source 1..110: mol_type = other DNA
gaattttaataatgtggtgactgtcattgatgctgatgtgactggttgagatgcttgaaggggtggggagggaagctgcgtcgggccgcagggaggggacccccgacctg

SEQ ID NO: 2958 - DNA, 110 bp, synthetic construct
  source 1..110: mol_type = other DNA
tgaaggggtggggagggaagctgcgtcgggccgcagggaggggacccccgacctgtctgcctgctgtggaggtacagagcaaggatcccatggtgagccgtcaggcgcca

SEQ ID NO: 2959 - DNA, 110 bp, synthetic construct
  source 1..110: mol_type = other DNA
tcagttctcttccaccatcagggaactacccaacatcagacatcatctttgtcctcagagcttcccatgcttgtgtccatttccctgctttgagcacctgcttcatagga

SEQ ID NO: 2960 - DNA, 110 bp, synthetic construct
  source 1..110: mol_type = other DNA
gggctctgactttgaatatgtattctaacctcactcacggggaagcttccctggactgttgcaatgcctgagtaaatagatacaaagtgcaagttcacacacaaggcctg

SEQ ID NO: 2961 - DNA, 110 bp, synthetic construct
  source 1..110: mol_type = other DNA
aaccccctcagacgagaggttgtgtctagctacttctgaaatggtggctacaatcctgctattgtggtactgacagctataaaggggactttaagaaccctagcaataat

SEQ ID NO: 2962 - DNA, 110 bp, synthetic construct
  source 1..110: mol_type = other DNA
gtcccactactagccttatcatccaaggtagttttgagagaaaaggattctttgtcctgattccttagctggaaaacatccaggaggatgggaattatggttagccacta

SEQ ID NO: 2963 - DNA, 110 bp, synthetic construct
  source 1..110: mol_type = other DNA
tgtctccataggaagaaaactgcagatctgtttgggagaaccccccacgcaaatttgagaacagcttacacataggaaaataggtttgttttttttcttctagcgacatt

SEQ ID NO: 2964 - DNA, 110 bp, synthetic construct
  source 1..110: mol_type = other DNA
tgagaacagcttacacataggaaaataggtttgttttttttcttctagcgacattaacatagtcaaacaactgaagagagaattctattcacaaagtcggggtcccatca

SEQ ID NO: 2965 - DNA, 110 bp, synthetic construct
  source 1..110: mol_type = other DNA
ttgtggctctattttactacaacaagagataaatacaaagagtgacaggtcacaacaagggccaccttgactcagggctgctagtgttgctaccccagagatggaaccag

SEQ ID NO: 2966 - DNA, 110 bp, synthetic construct
  source 1..110: mol_type = other DNA
gtgtgtgtgtgtgtacatacacaattttatgaccactcttcttgcacaattgaatatatggaaaaataataatcttttcattgttaacagctataaggaagaacagatat

SEQ ID NO: 2967 - DNA, 110 bp, synthetic construct
  source 1..110: mol_type = other DNA
cagaaatgccttgccgtggggatgtctcgagatggtgagcgcccactgcccacattgtacagtagcatggggttgtgaaagtgctttctgaagcctagacccagatctgc

SEQ ID NO: 2968 - DNA, 110 bp, synthetic construct
  source 1..110: mol_type = other DNA
taccgtggcctggaatcaaacacacaatgtttctgaggtatgcctatgaaaggaatcagaaagctctaggtatgcaactgtagtgtgatatccagtggccactcagagaa

SEQ ID NO: 2969 - DNA, 110 bp, synthetic construct
  source 1..110: mol_type = other DNA
tcagaaagctctaggtatgcaactgtagtgtgatatccagtggccactcagagaagatttaagtgactacacatacctaaagatttaccttctaggacttaccatcgtgg

SEQ ID NO: 2970 - DNA, 110 bp, synthetic construct; identical to SEQ ID NO: 2968
  source 1..110: mol_type = other DNA

SEQ ID NO: 2971 - DNA, 110 bp, synthetic construct; identical to SEQ ID NO: 2969
  source 1..110: mol_type = other DNA

SEQ ID NO: 2972 - DNA, 110 bp, synthetic construct
  source 1..110: mol_type = other DNA
tgaaggctagattgtctactttcaagataggtcacgtagatgtcaggttggtactggtggtgagctgtagacttcaggtcctctccataggctgcttgggcttcctcatg

SEQ ID NO: 2973 - DNA, 110 bp, synthetic construct
  source 1..110: mol_type = other DNA
atgtgggttagtctcttcacaccagaatgtgagctccttgagggcaaggacttcatttcattaactgtcctaatgcccaggcccctaggcgttgtgtgagaaggtgcaga

SEQ ID NO: 2974 - DNA, 110 bp, synthetic construct
  source 1..110: mol_type = other DNA
ggctagggtgatgctggcgaccactcccaaattcccacactgcacttccttcttggagaggatgctctgtccatcactcattcttgacacccggctgatggagaacacac

SEQ ID NO: 2975 - DNA, 110 bp, synthetic construct
  source 1..110: mol_type = other DNA
accattcagagcccctgaaagggggatggggtgctttggattttcatggagtaggttttttggaggatggggtcgagtggttgagtaacaggtgcattgaaaatactgca

SEQ ID NO: 2976 - DNA, 110 bp, synthetic construct
  source 1..110: mol_type = other DNA
tactagcctgcctgtctctttacattctggtattagtcttgaaaaagagagagccctcccgtgagctgtgtaaagcatctgcatggaagaataggggtcttattcatata

SEQ ID NO: 2977 - DNA, 110 bp, synthetic construct
  source 1..110: mol_type = other DNA
ggctattttcctttgggctatgttgtttcatggcatgctctagggttttcctgctgaaattgctgaacttgtgcaaatatgtcagctggtcaacccgcaagccggagaag

SEQ ID NO: 2978 - DNA, 110 bp, synthetic construct
  source 1..110: mol_type = other DNA
tcaaattaaatgcagttaaaattttgatttcatcatcgcaggagctgcattcaagctcagcatccacaggtgtttaacggcttccttctcagacagcacaactagaaagc

SEQ ID NO: 2979 - DNA, 110 bp, synthetic construct
  source 1..110: mol_type = other DNA
ctcagcatccacaggtgtttaacggcttccttctcagacagcacaactagaaagcaagagaatgagaccctatgattagggggcctggcattttcttaggtgctttcaaa

SEQ ID NO: 2980 - DNA, 110 bp, synthetic construct
  source 1..110: mol_type = other DNA
acatttcccctgtttttccctagcattccatgttacatagaagtccaatgcccgtttaatcaccattctttagtaagtattcttcttgcacgccttgccccgaaacacac

SEQ ID NO: 2981 - DNA, 110 bp, synthetic construct
  source 1..110: mol_type = other DNA
gatacctttgacttatcagtcacttgctataaagctagactcaggccatctctactctttggtgatgactgttattatcatcacctcctttactgatgaagaaccaggaa

SEQ ID NO: 2982 - DNA, 110 bp, synthetic construct
  source 1..110: mol_type = other DNA
acaaagtagattacagtttttagggacatggacatatccacagcttagagtagcaaacatataacccattaatgagaactatagtgacctacagtggaaatatttaatat

SEQ ID NO: 2983 - DNA, 110 bp, synthetic construct
  source 1..110: mol_type = other DNA
tcctcacctcctctggggcttctttatcctctttctttttttcctttttcttttaatggccgcacccatggtgtatggatgttcccgggctgtgggttgagtcagagctg

SEQ ID NO: 2984 - DNA, 110 bp, synthetic construct
  source 1..110: mol_type = other DNA
ggaggtggagggaggggtctgcagtgagtaactaaggagaggaatctgggaacagaaatggtggcctgagcagaccttggtggagaccagagatggccccatggcagcca

SEQ ID NO: 2985 - DNA, 110 bp, synthetic construct
  source 1..110: mol_type = other DNA
cctttcaattctttacctggacaagtcttactcatccttcaggcctcagcttttcctggtgcacactaggaaaattttctaattttccaagtctagggtaaaacacgtgt

SEQ ID NO: 2986 - DNA, 110 bp, synthetic construct
  source 1..110: mol_type = other DNA
ccaactactttgtgagaggggctttctctgccctgtctcctgtacacttggatatctctgctttactcccatggtacccaactttactctttcatagcactgttaacact

SEQ ID NO: 2987 - DNA, 110 bp, synthetic construct
  source 1..110: mol_type = other DNA
actcagtaagtacatagtcactaaggcaaaagaaacttctgagaagaggggagaaaataatcttctcaggtgaaataatccagtttgttcctcttcaatgctcacattcc

SEQ ID NO: 2988 - DNA, 110 bp, synthetic construct
  source 1..110: mol_type = other DNA
aataatcttctcaggtgaaataatccagtttgttcctcttcaatgctcacattcccaaggtggatcatttgctaaatcataaaggaggcttatttccttcctcctcctgc

SEQ ID NO: 2989 - DNA, 110 bp, synthetic construct
  source 1..110: mol_type = other DNA
gccaggccaggagatgcctattttctcactcttttctgcatcagcagatccatgctctggtcctgttttctacagtgactctaatcaatgtgcctgctctgagctgggaa

SEQ ID NO: 2990 - DNA, 110 bp, synthetic construct
  source 1..110: mol_type = other DNA
tctggtcctgttttctacagtgactctaatcaatgtgcctgctctgagctgggaatgctgccttcagaacaagcagagattcatggatgttgccatgctacctccaatgc

SEQ ID NO: 2991 - DNA, 110 bp, synthetic construct
  source 1..110: mol_type = other DNA
cttctacagcttcagtttctattgtgtctatgtaccatggatagtcctctactgaaaggcctttggtttctaatcttccctactgccaagaatactataatcagtaactt

SEQ ID NO: 2992 - DNA, 110 bp, synthetic construct
  source 1..110: mol_type = other DNA
gtctgtcagcctgtctctatgtccctcttccactcacccctcacacgccaccttcacagcttgtgtgtgtagacacagaggagaaggctggcatcagaggccacccttga

SEQ ID NO: 2993 - DNA, 110 bp, synthetic construct
  source 1..110: mol_type = other DNA
caaatgtgcccatccctgagccatttctatagcaagaccgaggttagagctggtaggaactgccctaggaaatgggagttaggtctttcccacccagacttcatggcctc

SEQ ID NO: 2994 - DNA, 110 bp, synthetic construct
  source 1..110: mol_type = other DNA
tcaacaagagtcagttccatcaaatatttggctaaagtgtgttgctcaacatcgacctacaaaagaacagccagggacagtgagaagcacagctgttattactctcttgc

SEQ ID NO: 2995 - DNA, 110 bp, synthetic construct
  source 1..110: mol_type = other DNA
tatgctagcaataatctttatttagtttctggtctactttctttttatctttccttcctttgggggccacatctgaggcgtatggaagtttgcaggccagggatcaaatc

SEQ ID NO: 2996 - DNA, 110 bp, synthetic construct
  source 1..110: mol_type = other DNA
ctggtcactcaacttggacacaacagaacataagaaatggtaagactctactatgtgaaaatttaaaggtctcttaaaataaactagtgactcagtgttgaacagggggg

SEQ ID NO: 2997 - DNA, 110 bp, synthetic construct
  source 1..110: mol_type = other DNA
agttagcacagtttcaacttcattacccttcagagggtgataagaactgtacgtttggagttccccttgtagctcagcaggttacaaaccatcctatccattaggatgca

SEQ ID NO: 2998 - DNA, 110 bp, synthetic construct
  source 1..110: mol_type = other DNA
aacttcattacccttcagagggtgataagaactgtacgtttggagttccccttgtagctcagcaggttacaaaccatcctatccattaggatgcaggtttgatccctggc

SEQ ID NO: 2999 - DNA, 110 bp, synthetic construct
  source 1..110: mol_type = other DNA
cttctggatttttccccctccacacataggcacatctgttaagtcacttttctgtagtttgcagttccctgctaaaatcgtcaagtttgattttatcccttgaacacaat

SEQ ID NO: 3000 - DNA, 110 bp, synthetic construct
  source 1..110: mol_type = other DNA
ggagattatatgcagggcatctgatattaatttcttagctaatattcctcattataagttaactgattggtgttctggcatattgatctgggtaaaggtaggtctgtatg

SEQ ID NO: 3001 - DNA, 110 bp, synthetic construct
  source 1..110: mol_type = other DNA
tacaattacttaacatctatacctgccagactaggaggtccttaaatggcagtcttagtacttagctgaacacccagatattagtcatgctgaataggtatttgttaaat

SEQ ID NO: 3002 - DNA, 110 bp, synthetic construct
  source 1..110: mol_type = other DNA
tgggaccagcttctcaacagaggaatttggaaattgggatagaactaaacccctcaaaactacttcatgagcattcctcactacagaaagaaggaccaccagaaccagtt

SEQ ID NO: 3003 - DNA, 110 bp, synthetic construct
  source 1..110: mol_type = other DNA
ttgaacctgagccccagcagtgacaacactagatccttaacctgctaggccacccaagagctcccctagctcctttatttttttttttgcatgtgagtgagagagatcat

SEQ ID NO: 3004 - DNA, 110 bp, synthetic construct
  source 1..110: mol_type = other DNA
aaaacttaaatgagaatctagttaccactgggcatttacagattcagctcttagctgttgctgatctttgacgataagcagattttgcccaaggcctggtgagcaatgct

SEQ ID NO: 3005 - DNA, 110 bp, synthetic construct
  source 1..110: mol_type = other DNA
aggattttccccatgctcgtgaggccagctctacccagctagatgagctgatgtagcacacctctgaacaggggcctgatgtacatggagtgtaagcaggaacagagaca

SEQ ID NO: 3006 - DNA, 110 bp, synthetic construct
  source 1..110: mol_type = other DNA
ttctacgtttaattgtatgtttcctgctctgtggtagcccatttattctccccatcggaatttcagctggtttgtgagacaatgaaagaaagaaggaaaggaagaaagag

SEQ ID NO: 3007 - DNA, 110 bp, synthetic construct
  source 1..110: mol_type = other DNA
tcattgcaggaggtaattgtagacctgtcttgactttccatctccatcattaaggaagctgctgtattgattcctcagtgggctattcccaagtggtttagaatctggag

SEQ ID NO: 3008 - DNA, 110 bp, synthetic construct
  source 1..110: mol_type = other DNA
ttccaaccttcttcacacacccttccagctagtctagttcacttgttatttcaacattctaactttggatacagactcctctctgcctgaaatatctcctctcttctctg

SEQ ID NO: 3009 - DNA, 110 bp, synthetic construct
  source 1..110: mol_type = other DNA
tagcttcttctgccccctcccccagcccccagcacatcacacctgttagtcccagtgctccaagtgttgctttggctgtctatgccctaaacccaccggcagtaccttgg

SEQ ID NO: 3010 - DNA, 110 bp, synthetic construct
  source 1..110: mol_type = other DNA
tatgtaaacaattactattgttactgtctctgtagacctctctaggttataacttccttgagggtaagagctgtgtcttaccagctcctagcgattgtaactactgtgct

SEQ ID NO: 3011 - DNA, 110 bp, synthetic construct
  source 1..110: mol_type = other DNA
gagacagcttcctttcccctaacttcccatgtccattgttcacgaaatgatacggcatctacctccttcaactgttttgtcatcattctttcttccttcagcctctgccc

SEQ ID NO: 3012 - DNA, 110 bp, synthetic construct
  source 1..110: mol_type = other DNA
tatgtcacacaaattctggcagggagggctggcctcaccacccccctgggtcctcagccacgtgcccctcactcaggctccacctggacatcagtggaaaaagctgggaa

SEQ ID NO: 3013 - DNA, 110 bp, synthetic construct
  source 1..110: mol_type = other DNA
tccaggcaaccaagacatagcaaaggggacagaagactaagaaagacatgtctgcttttcaaaagccaagttcaggattgaagtttgcagaaaccccctactgagtggac

SEQ ID NO: 3014 - DNA, 110 bp, synthetic construct
  source 1..110: mol_type = other DNA
aagccaggtggaagccagaatgtctttctttcgtgacctagctttgggagtcaaaccctaccattccctactggtcacacagagcagccctatttaacatgggaaaggac

SEQ ID NO: 3015 - DNA, 110 bp, synthetic construct
  source 1..110: mol_type = other DNA
aataggatgataaataatgaagtccacacactgactggagccacagacaaaaccaaaccacttgctctcaaaagtgctacagtggccgtactccccttccagctctgctg

SEQ ID NO: 3016 - DNA, 110 bp, synthetic construct
  source 1..110: mol_type = other DNA
ggcctggagagcccagatgaccactctctcagtctgtcctgcccagtctgaaaacaccttctgagcactgggcctctgacatcaggtcctaggtctgagggatgctccag

SEQ ID NO: 3017 - DNA, 110 bp, synthetic construct
  source 1..110: mol_type = other DNA
accttctgagcactgggcctctgacatcaggtcctaggtctgagggatgctccagaaacccctgtcgtcaaggaggtcactgccaactcgcatgtcctgtactggtttcc

SEQ ID NO: 3018 - DNA, 110 bp, synthetic construct
  source 1..110: mol_type = other DNA
gtcgatcataacattgaccacagtttgctttttatctaggattgcctctccaattaaattataattttctaaacaatagctagttatcattcagagttctaaacattctg

SEQ ID NO: 3019 - DNA, 110 bp, synthetic construct
  source 1..110: mol_type = other DNA
tctgagaaagtggcagaacccactaatagctgaaagcagctgccagcagttcatcatctccacactggaatgcttctcagcagagtcacaaaacaaaatcacagagcaca

SEQ ID NO: 3020 - DNA, 110 bp, synthetic construct
  source 1..110: mol_type = other DNA
agaagggggagaaacctcacagagaatgaccaccttcataaaatcaaggcaagcaaaaccaaactccttcaaatcccaatttgttcttagagaaaaaggattatttagcc

SEQ ID NO: 3021 - DNA, 110 bp, synthetic construct
  source 1..110: mol_type = other DNA
aaatattaaccaaagttagcatattctgagctctgtccacgtggaagtgacttataccttaccccctttcccccaacactccataatatttcttaacaatgttcatcaag

SEQ ID NO: 3022 - DNA, 110 bp, synthetic construct
  source 1..110: mol_type = other DNA
accttaccccctttcccccaacactccataatatttcttaacaatgttcatcaagcctggcaataagattaaagttccttcacaacagtcagtaactgtaactcgaagcc

SEQ ID NO: 3023 - DNA, 110 bp, synthetic construct
  source 1..110: mol_type = other DNA
agctaggatttgtactttcttttccacagcttccccctcaggatgaatgggaagaattttatgtaaaaattagtttaatatggagttcccatcatggctcagcggttaac

SEQ ID NO: 3024 - DNA, 110 bp, synthetic construct
  source 1..110: mol_type = other DNA
tgttttttcacttaagagctgagatacttaatttacctatttctaagccttaaaagagaaataattaaagtatcgtttcctacagagttcccactatggtgtaattggtt

SEQ ID NO: 3025 - DNA, 110 bp, synthetic construct
  source 1..110: mol_type = other DNA
gagaaataattaaagtatcgtttcctacagagttcccactatggtgtaattggttaagaacctgactgtattaactcaggtagctgcaaaggtgcaggttcaatccctgg

SEQ ID NO: 3026 - DNA, 110 bp, synthetic construct
  source 1..110: mol_type = other DNA
cataaggagagtttaaagtgtgaatttatactcttgatctgaaaggtccctttcacatttctctaagtttattttgtcctttttctagcttctttatttggatgcttaga

SEQ ID NO: 3027 - DNA, 110 bp, synthetic construct
  source 1..110: mol_type = other DNA
aggtcattctgatacatgctgaagtttgagagccatgaccctataaaatagcccctgacattacatattgtaaaactgataaggatttgttggattgaaaaaaatgaatg

SEQ ID NO: 3028 - DNA, 110 bp, synthetic construct
  source 1..110: mol_type = other DNA
tgacattacatattgtaaaactgataaggatttgttggattgaaaaaaatgaatgactcctccaaagagctgtgctatcacccagttttgacaatagtctaagaaatata

SEQ ID NO: 3029 - DNA, 110 bp, synthetic construct; identical to SEQ ID NO: 3027
  source 1..110: mol_type = other DNA

SEQ ID NO: 3030 - DNA, 110 bp, synthetic construct; identical to SEQ ID NO: 3028
  source 1..110: mol_type = other DNA

SEQ ID NO: 3031 - DNA, 110 bp, synthetic construct
  source 1..110: mol_type = other DNA
agtatattaagcgtatgcataggacatctgcatatttaccatcctcccaaaatatagattgtcaaatcaatatcagcagacagttggaaagaccaaacttacagataaac

SEQ ID NO: 3032 - DNA, 110 bp, synthetic construct
  source 1..110: mol_type = other DNA
agccgccaggaaattccctcttttttctctttttatcacaatgtcatattacattcaactttttccttgggcctacctagcctttgttttttttgtttgtttgtttctaa

SEQ ID NO: 3033 - DNA, 110 bp, synthetic construct
  source 1..110: mol_type = other DNA
tttccttcctttttatggctgagtataattccataccacatctttatctgttcatttactgaccaacacttagcttccatatattgactattgtaaataatactactatg

SEQ ID NO: 3034 - DNA, 110 bp, synthetic construct
  source 1..110: mol_type = other DNA
tagcaaatgctggaagaagacctggtttaatgtgtaagacctttatacaactagtaaaatggtccacatgcaaacagttgacccatatgactattagggtccacttaagt

SEQ ID NO: 3035 - DNA, 110 bp, synthetic construct
  source 1..110: mol_type = other DNA
ccttacagagaggaattattgcttttatgtctgtacttgtggaagcttaacaagtgtttctaaaatataatttgttgaatggtaacaaagaggtttcagtaacttcaggt

SEQ ID NO: 3036 - DNA, 110 bp, synthetic construct
  source 1..110: mol_type = other DNA
tccaagaccagcacgtaggtctggcccaggtcataagaagtcactgctttttccctggatctcactgtacacaaggccttatatgcaccctcccagaattgagcctctgt

SEQ ID NO: 3037 - DNA, 110 bp, synthetic construct
  source 1..110: mol_type = other DNA
ttcctgaccagggagcctgtgacctacgctgaattctttaaccgactgcactgggcagggatcgaacccaaatctacgcagctaccctggctcttgcagttggattttca

SEQ ID NO: 3038 - DNA, 110 bp, synthetic construct
  source 1..110: mol_type = other DNA
tgtgttaccatttatcctcaattcacaaaaatggatcgttggttcacaagctggttctttgaaatacatatggagaataaaagcctatgtctcgggagttcccaatgtgg

SEQ ID NO: 3039 - DNA, 110 bp, synthetic construct
  source 1..110: mol_type = other DNA
aagctgagtgaaatgtggttgaaaggctcacagctaagtaaaagagagagatgtgttatctcttacctatgatgcaatgtcatgagagtcaaagttatgagaacattgct

SEQ ID NO: 3040 - DNA, 110 bp, synthetic construct
  source 1..110: mol_type = other DNA
gaagagcttaagtgtaaaaaatacacaatcaacccagtttcctccttcctgtaccataaggcacagctacatgccatctggtgattattaggggagaaagctgccatctg

SEQ ID NO: 3041 - DNA, 110 bp, synthetic construct
  source 1..110: mol_type = other DNA
ataaggcacagctacatgccatctggtgattattaggggagaaagctgccatctgccacttctgctaatacacaggaaagggatagctctccctgccctgtaagcctggg

SEQ ID NO: 3042 - DNA, 110 bp, synthetic construct; identical to SEQ ID NO: 3040
  source 1..110: mol_type = other DNA

SEQ ID NO: 3043 - DNA, 110 bp, synthetic construct; identical to SEQ ID NO: 3041
  source 1..110: mol_type = other DNA

SEQ ID NO: 3044 - DNA, 110 bp, synthetic construct
  source 1..110: mol_type = other DNA
attgtacccattgtatagaatagtaaaggtagggaagatgtgagacctacccaatgtcacatagctaagtggtgaggaacagatttgaatccagtctatttatctcccaa

SEQ ID NO: 3045 - DNA, 110 bp, synthetic construct
  source 1..110: mol_type = other DNA
ggaaattgactaactgctgggctactgattttattgtgttattattgctaataagtggaaagggccagaaatttggggtggaacaaatttcaaatgagagagtcctagaa

SEQ ID NO: 3046 - DNA, 110 bp, synthetic construct
  source 1..110: mol_type = other DNA
tcccctttttaaatattgtaggaggaagaaatttttcctttactcttggaggttctttgagctggtctaataattaaaattgacataagacagagtaagaggagaaagac

SEQ ID NO: 3047 - DNA, 110 bp, synthetic construct
  source 1..110: mol_type = other DNA
acagagaaaatcatgggtcactttaggaagtacttttacaaaaaagctgaggcatttatcaaataattacaggtacataaatctactttatggcatgttttcagattcaa

SEQ ID NO: 3048 - DNA, 110 bp, synthetic construct
  source 1..110: mol_type = other DNA
actgatctatatttctgttgttatgccagtaccatacggttttcatgactgtagctttctagtaaagtccgaagtttgggaacctagttcttcaagctccagttttattt

SEQ ID NO: 3049 - DNA, 110 bp, synthetic construct
  source 1..110: mol_type = other DNA
tttctagtaaagtccgaagtttgggaacctagttcttcaagctccagttttatttttcaagattgctttggcaatttttggtcttttgtgtaaccaaacaaattaaaaaa

SEQ ID NO: 3050 - DNA, 110 bp, synthetic construct
  source 1..110: mol_type = other DNA
tcagaggatttcaaaactttttaaaaatcttagttttctatccttctctagccaaattatttctatatttctatccttgagctcactaatgctctcttccatataatctg

SEQ ID NO: 3051 - DNA, 110 bp, synthetic construct
  source 1..110: mol_type = other DNA
tcccagactcagatctcttgttgtctcccagctagcaattctacaagtgtttaatttgaacataatattccagccttgttctaggattcttggtcccatctgcaatttga

SEQ ID NO: 3052 - DNA, 110 bp, synthetic construct
  source 1..110: mol_type = other DNA
aacagtcatcccatggctctaaaatgaaaggctggaccaatggtaaggatgatgaggcaggaagctggaaggagccccaaacctcaccctaactctgtctgcttaccctt

SEQ ID NO: 3053 - DNA, 110 bp, synthetic construct
  source 1..110: mol_type = other DNA
acagaattgtttttactgaaatatgcatctagtgatatcaaaaaataaagatgccacaacaaagcagctgcagatgacatgggaaaactatgtgcacaaggtctgacaca

SEQ ID NO: 3054 - DNA, 110 bp, synthetic construct
  source 1..110: mol_type = other DNA
acaacaaagcagctgcagatgacatgggaaaactatgtgcacaaggtctgacacattttgctgaaactaacattgacgcatggccagaaaaactcttgagttaaataatt

SEQ ID NO: 3055 - DNA, 110 bp, synthetic construct
  source 1..110: mol_type = other DNA
tgattacaaaagagataggaacatctctgaaaagaggatacattcaaacaacacctagcacagtgctcctagctgatactggataaatagattctgctagattgctgata

SEQ ID NO: 3056 - DNA, 110 bp, synthetic construct
  source 1..110: mol_type = other DNA
ttcaaggccctgatatatctttcttcttgcccccagtgtcgcctccagttaccctctcttctagtcaaatatagctgctctctgtacatctgtctgtgaattgcccctct

SEQ ID NO: 3057 - DNA, 110 bp, synthetic construct
  source 1..110: mol_type = other DNA
caaaaaaaaaaaaactctaacctgtaacggttccagcactgctacagctggaacgtaggtcacagctgtaatttggattcagtccctggccccaggaatttccatatgtc

SEQ ID NO: 3058 - DNA, 110 bp, synthetic construct
  source 1..110: mol_type = other DNA
aatccttgggcatgataccccagaacctttgtatataaaattcagtcaggtgatgctggcatgtatccaggcttgtgaacaactgtactcaagatctataagacccccag

SEQ ID NO: 3059 - DNA, 110 bp, synthetic construct
  source 1..110: mol_type = other DNA
ctggcatgtatccaggcttgtgaacaactgtactcaagatctataagacccccagctccaaaatcccgtgacaataacataaaggtgattaaaagaatcatttttcttat

SEQ ID NO: 3060 - DNA, 110 bp, synthetic construct
  source 1..110: mol_type = other DNA
gaactaaccagactaatcagagcataggtttaagagtctagaggaggccatacggatacttgttgactgactgcacataattgatcactgtaagcttgagaccaagtttt

SEQ ID NO: 3061 - DNA, 110 bp, synthetic construct
  source 1..110: mol_type = other DNA
aagcatcagaaatttacctaataaataataagcactgcacaacatatatgaaaaagggagtaagacacgaagaaaccttaagatgtgtcctttgctgagggccatggtag

SEQ ID NO: 3062 - DNA, 110 bp, synthetic construct
  source 1..110: mol_type = other DNA
gggagtaagacacgaagaaaccttaagatgtgtcctttgctgagggccatggtagtgactaccctgaacccacctgcttgtggagagctgagagaagctgaggagatgca

SEQ ID NO: 3063 - DNA, 110 bp, synthetic construct
  source 1..110: mol_type = other DNA
gaaagaaacaccatgttcaggagacaatgagtggtcttgttcagctgctgtgtacaatatcaaagtctaagacaaggaggtataggagtagggaagcatccagtgagaag

SEQ ID NO: 3064 - DNA, 110 bp, synthetic construct
  source 1..110: mol_type = other DNA
ccaagattctcaaggttattctgttgttactagagagctgggatcaattaatgccttttagggtgtgcattttcattctagattataagatatgacactgttaatagcag

SEQ ID NO: 3065 - DNA, 110 bp, synthetic construct
  source 1..110: mol_type = other DNA
taattcacatattagaacaatttctatcaatcatcatttgtgcacttagagatttgcatacacctcatacactatccaaaaccccctctctccagccatccaatttttag

SEQ ID NO: 3066 - DNA, 110 bp, synthetic construct
  source 1..110: mol_type = other DNA
acaaaagatcctgggagttacaagaagccaggaaaataggtggaaggccccaaaagttccagtgaaggggcaaagtgaacctagaaacagtgcacacagcatgggagaca

SEQ ID NO: 3067 - DNA, 110 bp, synthetic construct
  source 1..110: mol_type = other DNA
gttccagtgaaggggcaaagtgaacctagaaacagtgcacacagcatgggagacacaaacagctaagcagattgatggcgtgatcttgggagtagcacaagctccatgat

SEQ ID NO: 3068 - DNA, 110 bp, synthetic construct
  source 1..110: mol_type = other DNA
gctatggatgtggcatagactggcagctgtagctccaagagcaggatgactgataccacctgactggcaccaatccctagaaccatatcttgacaatttcctgcactagt

SEQ ID NO: 3069 - DNA, 110 bp, synthetic construct
  source 1..110: mol_type = other DNA
cagtgtccctcggcttgggagagtgggtcgatactccggaccagcgtgggagaaggtgcagcgcacaggcagaactgtatgaagatggggcccaaaccagcccactcttt

SEQ ID NO: 3070 - DNA, 110 bp, synthetic construct
  source 1..110: mol_type = other DNA
tagttaagttgctatggtcaggacaaagtgtttattacatcagccagtttcttagaaaacattaagcaggagtagttttgcctttagcttctgtttaagggtttttttgg

SEQ ID NO: 3071 - DNA, 110 bp, synthetic construct
  source 1..110: mol_type = other DNA
atctgaatatattttttgttaaaagggcaaagggaaaaataatctgtaacgtcgttttgtaatttgtagcttagtccttttggggagacagcagaatttgagctttgggg

SEQ ID NO: 3072 - DNA, 110 bp, synthetic construct
  source 1..110: mol_type = other DNA
taggaagttgtaaatgaaagtcaacaggccagagggaaagtcagagtaggtgatataaatttggtagtatttagacctagagggcatttaaagcaatggaactggatgag

SEQ ID NO: 3073 - DNA, 110 bp, synthetic construct
  source 1..110: mol_type = other DNA
accatgtgtatcaatgactaacaattcagcaggcagttctctagctgcagagacgtcaaggaggatgaagactgaggaaacgtcattggatttggccactaggaggtcct

SEQ ID NO: 3074 - DNA, 110 bp, synthetic construct
  source 1..110: mol_type = other DNA
ctctcaacctgattgtaagggttttatggccttggaaagttttgtggtcagctggtcagttttcctttcctttctacctcattcatgccgatttaggaagacatttctgt

SEQ ID NO: 3075 - DNA, 110 bp, synthetic construct
  source 1..110: mol_type = other DNA
aactgccctcaatgtatgactttactttcagttctccatatccacagatccacgccctcagcttcaaccaattatagatttgttatactgtagtatgtattgtgaaaaaa

SEQ ID NO: 3076 - DNA, 110 bp, synthetic construct
  source 1..110: mol_type = other DNA
caactgcagctctaagtcaacccctagcccaggaacttccctataccacagggatggccctaaaaagacaaggaaaaaaattttatttggtagcaagactaggtttgatg

SEQ ID NO: 3077 - DNA, 110 bp, synthetic construct; identical to SEQ ID NO: 3076
  source 1..110: mol_type = other DNA

SEQ ID NO: 3078 - DNA, 110 bp, synthetic construct
  source 1..110: mol_type = other DNA
accaaggaaggccttactgagaagctgaaaatcaaggaagttagaaaccaccacacattcatatgcaggaaggaacatccaggaagatgagaaaaggcccaaaggcccag

SEQ ID NO: 3079 - DNA, 110 bp, synthetic construct
  source 1..110: mol_type = other DNA
aaatgtgacatttccagtcagacaataacagctctggttatccacagtacagacatgagtgtcttcagcaatttaggtctatgggagaaagaagcagcaaaaaagtaaga

SEQ ID NO: 3080 - DNA, 110 bp, synthetic construct
  source 1..110: mol_type = other DNA
tttcctgtgccctctttgtgaatcagtttcctcgtgtgtaacacaggacagaagatctcctttccgtcttggtcatcaacagtagctaaggaatgtcaatgtgttctgaa

SEQ ID NO: 3081 - DNA, 110 bp, synthetic construct
  source 1..110: mol_type = other DNA
attcccaatccagggggcttggcctctcccaagttaccaccttgccttacaacttgtgcttttcacacctaagttttaattgaagagctttctgtagaaaagaaggccca

SEQ ID NO: 3082 - DNA, 110 bp, synthetic construct
  source 1..110: mol_type = other DNA
gtgcttttcacacctaagttttaattgaagagctttctgtagaaaagaaggcccaatttcaagctggcatgaaaaaagaagaggctggcttttgagaagcttttttaggt

SEQ ID NO: 3083 - DNA, 110 bp, synthetic construct; identical to SEQ ID NO: 3081
  source 1..110: mol_type = other DNA

SEQ ID NO: 3084 - DNA, 110 bp, synthetic construct; identical to SEQ ID NO: 3082
  source 1..110: mol_type = other DNA

SEQ ID NO: 3085 - DNA, 110 bp, synthetic construct
  source 1..110: mol_type = other DNA
tggttctgatggtgccaagggagcccccattgagctgatagtagagtggagacgtgatccactgagaggtgggttttcagaagccacatccatccagcaggacagatgta

SEQ ID NO: 3086 - DNA, 110 bp, synthetic construct
  source 1..110: mol_type = other DNA
aaggaagaagaaaatgaggagcaagagctctgcactcagaccctaagggaaagtagccccagagggagtatatatagggtggtgcctgtgcagagctggtccatggacac

SEQ ID NO: 3087 - DNA, 110 bp, synthetic construct
  source 1..110: mol_type = other DNA
gccccagagggagtatatatagggtggtgcctgtgcagagctggtccatggacacggtgaccgcttctctgaacgtctcaaagcctcactttgacacaaagtagttagtg

SEQ ID NO: 3088 - DNA, 110 bp, synthetic construct
  source 1..110: mol_type = other DNA
aagacagggactctgatgtctaggagttgtatataaggtgctccagaaacatgcgtactgctaactgctatgtggctggagataggggatcagtagctgctactgtgcta

SEQ ID NO: 3089 - DNA, 110 bp, synthetic construct
  source 1..110: mol_type = other DNA
tactgctaactgctatgtggctggagataggggatcagtagctgctactgtgctaagaagctgaaactgacgaaaataaaacattcacatcttcccttggaagttacaag

SEQ ID NO: 3090 - DNA, 110 bp, synthetic construct
  source 1..110: mol_type = other DNA
atccaatcttgcaaactgccttttccgcacaacccaaacaatagaacacaacatttgagtggtttgtcagctaagggcaagtgatggacagatggacaaggtagctcaag

SEQ ID NO: 3091 - DNA, 110 bp, synthetic construct
  source 1..110: mol_type = other DNA
taactattgcttttataaattacccataactattttcagcctaaagggtaataacataatacatcaagataattaagaggatctggaaaagtgctgagcttctcgtaccc

SEQ ID NO: 3092 - DNA, 110 bp, synthetic construct
  source 1..110: mol_type = other DNA
ataatacatcaagataattaagaggatctggaaaagtgctgagcttctcgtaccctaagaacttaagttggtgaagtgatcaagtaacatacaatggaaataaagtttgt

SEQ ID NO: 3093 - DNA, 110 bp, synthetic construct
  source 1..110: mol_type = other DNA
aagttggcaaattatggccacctgttttcaatggaacacagctatactcatttatttacatactgtctatggctgctctcatgcaaggatcacagggccccttaagccta

SEQ ID NO: 3094 - DNA, 110 bp, synthetic construct
  source 1..110: mol_type = other DNA
ttttaatcaaatatggtgctgatgtacacacgcaaagtaaattttgtaaaactgcatttgatatttcaatagacaatgggaacgaagatttagcagagatactacaggta

SEQ ID NO: 3095 - DNA, 110 bp, synthetic construct
  source 1..110: mol_type = other DNA
gtaaaactgcatttgatatttcaatagacaatgggaacgaagatttagcagagatactacaggtaacttttgactttaagaaaatgaaaggatcagtcttatggatgatt

SEQ ID NO: 3096 - DNA, 110 bp, synthetic construct
  source 1..110: mol_type = other DNA
aggtgttaggcattactcaggagacaaactaatcaaaaaagatgcaggtgatccatcttctcttatctactgaatgtagaaactagataatgcataatttattacatcat

SEQ ID NO: 3097 - DNA, 110 bp, synthetic construct
  source 1..110: mol_type = other DNA
cccatgcttgtgatttccatttctagtccatccagataccaagaccccttgaagagcatgagcagaaatgagggtgtgacgctatcctgagacccagagagtgagccact

SEQ ID NO: 3098 - DNA, 110 bp, synthetic construct
  source 1..110: mol_type = other DNA
atccttagggacttgatgcctaatgaggacattcctgctattctttggcaaataatttaataaagtaacaagctgcatatctgggatctatggggaatacaggagaagca

SEQ ID NO: 3099 - DNA, 110 bp, synthetic construct
  source 1..110: mol_type = other DNA
tttaataaagtaacaagctgcatatctgggatctatggggaatacaggagaagcataaaacagtctagatcctcacgggacttcaagtcaacaaggaatggagcttggca

SEQ ID NO: 3100 - DNA, 110 bp, synthetic construct
  source 1..110: mol_type = other DNA
gataataggcagccttggccctgaggggtctgggggcagttgagagcttcttgcatccaatgaatggcagaaaagtagaaggaagcatgctagaagggacagagaatata

SEQ ID NO: 3101 - DNA, 110 bp, synthetic construct
  source 1..110: mol_type = other DNA
tatggctgcacccactctatatggaagctccctgaccagagattgaattcaagtcatagctgtgacctatgctacagctgcagcaatgccagcctctttaactcactgta

SEQ ID NO: 3102 - DNA, 110 bp, synthetic construct
  source 1..110: mol_type = other DNA
ccccttctttttatatttaaaacaagcaaacaaaccaaggcccagagaagtatttaacttgcccaaggacaatcaattattgaaagaaaaaaggttaaaaccctaatatg

SEQ ID NO: 3103 - DNA, 110 bp, synthetic construct
  source 1..110: mol_type = other DNA
aacttgcccaaggacaatcaattattgaaagaaaaaaggttaaaaccctaatatggtattatttccatgtccctattgctgcctctgacttttaatcaattcagtctact

SEQ ID NO: 3104 - DNA, 110 bp, synthetic construct
  source 1..110: mol_type = other DNA
atcccaacactgaagcactgctgttgagtgagccaggtcttgatgccaaaatgacgatctctgggagagcttatgccaatgaatattcccagattcatctgccaccagtg

SEQ ID NO: 3105 - DNA, 110 bp, synthetic construct
  source 1..110: mol_type = other DNA
tgggtcgctttgggagtgcaggtttgattcccctgccagatgcagtggttaaagattcggtgttgtcacaactgcagctcagattcaatccctagattgaatccacatgc

SEQ ID NO: 3106 - DNA, 110 bp, synthetic construct
  source 1..110: mol_type = other DNA
agactgtgcttttttaatccaagaaagtaaataatcgtttgtgcccaggagctgaaagaagagagaactgagttggttaaaaaaaaaaaagaagaagaagaaacaggaga

SEQ ID NO: 3107 - DNA, 110 bp, synthetic construct
  source 1..110: mol_type = other DNA
gagcttgtgaagaatacacattcttcacaatgtgtaggtgggtgtggggctgcgctcagggactgcatgtctaccagcaggttatgaaattcttatgaacaataaactat

SEQ ID NO: 3108 - DNA, 110 bp, synthetic construct
  source 1..110: mol_type = other DNA
tcagacaaatcattggaagtaaccaagggtaacagtttggtataaaattttttaagttgtgtttaaaaacaaaaagtgagattctgtggtgcgaattaattggtaacatg

SEQ ID NO: 3109 - DNA, 110 bp, synthetic construct
  source 1..110: mol_type = other DNA
acttgttcacttggacctgccagcttcactcctataatttctctgccaggtcactgagggcattggagtttgtggatttccggatcttgacaggggccttcacaacaatt

SEQ ID NO: 3110 - DNA, 110 bp, synthetic construct
  source 1..110: mol_type = other DNA
gagggcattggagtttgtggatttccggatcttgacaggggccttcacaacaatttttgagagaagggtgggctgaggattttctgttatttagtgaactcacagcatga

SEQ ID NO: 3111 - DNA, 110 bp, synthetic construct
  source 1..110: mol_type = other DNA
cttggggtgcaaagtccatgtttcaaagtggcctgactaaagatgtatacctatgattatacccagagtccaaagttcctgtcgtggtgcagtggaaatgaatccgacta

SEQ ID NO: 3112 - DNA, 110 bp, synthetic construct
  source 1..110: mol_type = other DNA
ctaagcctcagaatgtcatatcatgcagttggaccaaaatatttctaattaccgtacagctctaaaaatcaatgatactgtgattttcattaactcaaaggagatgtaat

SEQ ID NO: 3113 - DNA, 110 bp, synthetic construct
  source 1..110: mol_type = other DNA
agcctctgcgctagcctcatccagcaggaggcagactctagactcaagaaaaccacaatcctacagctgtcagaccaagcccaccaatcataaggccagaccctgccctg

SEQ ID NO: 3114 - DNA, 110 bp, synthetic construct
  source 1..110: mol_type = other DNA
gaaaaagtacattttctcattttctgttcttggcgtaaattttaattcgttccagtggaaccaaaacctcctgaaccccttttggtgtcatccaaaacctaaaaagacat

SEQ ID NO: 3115 - DNA, 110 bp, synthetic construct
  source 1..110: mol_type = other DNA
tggaaccaaaacctcctgaaccccttttggtgtcatccaaaacctaaaaagacataaaggtagtgagccatagagttaatttcagatcctctttcagttctcttcagctc

SEQ ID NO: 3116 - DNA, 110 bp, synthetic construct
  source 1..110: mol_type = other DNA
ccagcactcaccaagcacatcatttggcctccctggcagcctcttctgaataaccccagtacccagcaaaagggatccctcccagggtcacactctgtcttccgttcagc

SEQ ID NO: 3117 - DNA, 110 bp, synthetic construct
  source 1..110: mol_type = other DNA
ccagtacccagcaaaagggatccctcccagggtcacactctgtcttccgttcagcttctcacctccacctgcaaactggggggaggggcttgtggaattctcctatggta

SEQ ID NO: 3118 - DNA, 110 bp, synthetic construct; identical to SEQ ID NO: 3116
  source 1..110: mol_type = other DNA

SEQ ID NO: 3119 - DNA, 110 bp, synthetic construct; identical to SEQ ID NO: 3117
  source 1..110: mol_type = other DNA

SEQ ID NO: 3120 - DNA, 110 bp, synthetic construct
  source 1..110: mol_type = other DNA
ctttctacccttcctacatcttgcaaactatttttatcctcttctctcaaaatgtccccccctcttttccttctccctattctttcttcctctaccctttcctctcatat

SEQ ID NO: 3121 - DNA, 110 bp, synthetic construct
  source 1..110: mol_type = other DNA
aaaatttatcaacaactgtaaaaaatattccagaatgatgcaagttaggtgggtacagctagttttacgtatttttgtaagatagctaaaatcctttttagagggagaag

SEQ ID NO: 3122 - DNA, 110 bp, synthetic construct; identical to SEQ ID NO: 3121
  source 1..110: mol_type = other DNA

SEQ ID NO: 3123 - DNA, 110 bp, synthetic construct; identical to SEQ ID NO: 3121
  source 1..110: mol_type = other DNA

SEQ ID NO: 3124 - DNA, 110 bp, synthetic construct; identical to SEQ ID NO: 3121
  source 1..110: mol_type = other DNA

SEQ ID NO: 3125 - DNA, 110 bp, synthetic construct
  source 1..110: mol_type = other DNA
ccctggacctctataaaccccagcagatacagagagggaaaaaggagggagctagttatttctgagggccagctgttttttttaaaaaagtatctcttttaatcattata

SEQ ID NO: 3126 - DNA, 110 bp, synthetic construct
  source 1..110: mol_type = other DNA
ttatttctgagggccagctgttttttttaaaaaagtatctcttttaatcattataggggcaatgtgagataggtgctatttttagctcccaaaccatatacatcaccttt

SEQ ID NO: 3127 - DNA, 110 bp, synthetic construct
  source 1..110: mol_type = other DNA
tttcaccacttaggcccactttgtttcccctcagctgctctgccctctggccacatcctcctctgggaccacaaagtgttctgttttctcatcctcatgtgaggaattgc

SEQ ID NO: 3128 - DNA, 110 bp, synthetic construct
  source 1..110: mol_type = other DNA
tttcttagacattttctcctttcatattatggtttttgtttgtttgtttaaaatgtattttctcacagatctgcagttgagaagacagacacaaaaggatcagcatagtt

SEQ ID NO: 3129 - DNA, 110 bp, synthetic construct
  source 1..110: mol_type = other DNA
ccctgactttctgttgcattatctaactttctactcttataggtataagagaatatagctttatttgctatttgttttcctgatattgtgagtctgttgatatacttttt

SEQ ID NO: 3130 - DNA, 110 bp, synthetic construct
  source 1..110: mol_type = other DNA
aatttgagagtatcatttagacaattgtacctttaattgtaccatcccaggaaatagctgtgataggcagatgggcttctgactcttcagctaaatgctcatgtgatctt

SEQ ID NO: 3131 - DNA, 110 bp, synthetic construct
  source 1..110: mol_type = other DNA
cttgctcctctttctggggttcccatcttttctcaggtctgctcaggagcaggttctgattcaagctgacatgggtccaaatgctttggaaacagttaagaggatggatg

SEQ ID NO: 3132 - DNA, 110 bp, synthetic construct
  source 1..110: mol_type = other DNA
taggtggccacgttatcagtattgtcatttttaagcctagcagtgtatgggggacaggtgttgaaattgtaaagttggaatgaaaatgaaactagacatttttttcagaa

SEQ ID NO: 3133 - DNA, 110 bp, synthetic construct
  source 1..110: mol_type = other DNA
aacttggattttcccatcatcagaggtcaagatgctgtgagacccagggtaagagaagagacatcagcttactttttacaggatccgtaccgctcgcagcgactgagggg

SEQ ID NO: 3134 - DNA, 110 bp, synthetic construct
  source 1..110: mol_type = other DNA
attaggggaaagatactgccaaaagcaatccaggggtctgcttctctatcttctaatgttcttccttatcacctcatttaaccagaagctgactttataaggccaggacc

SEQ ID NO: 3135 - DNA, 110 bp, synthetic construct
  source 1..110: mol_type = other DNA
atgttcttccttatcacctcatttaaccagaagctgactttataaggccaggacccctaaactaagatagagccaactgcctaagcttcacaaaattctctgggagttgc

SEQ ID NO: 3136 - DNA, 110 bp, synthetic construct
  source 1..110: mol_type = other DNA
agctatgatcatggtttcttttcttttgtctgagtccccttccctacctattcaagtcctatctgctttcctgcttaagtcttgctctagttctcaaatgttttccatta

SEQ ID NO: 3137 - DNA, 110 bp, synthetic construct
  source 1..110: mol_type = other DNA
gtcctatctgctttcctgcttaagtcttgctctagttctcaaatgttttccattatgccatttcctgtagatttcatctataccttttctgcacttgccataggaataaa

SEQ ID NO: 3138 - DNA, 110 bp, synthetic construct
  source 1..110: mol_type = other DNA
gagtgaggtcagggatcaaatctgcatcctcatatagacaatgtcaggtccttcaccagctgaactatcacagaaactccatccactctaaacatcttgaaaacaccacg

SEQ ID NO: 3139 - DNA, 110 bp, synthetic construct
  source 1..110: mol_type = other DNA
aaggtgccttggagtggtgtctggtcccccgagggtaattgctgtttggtcctatcggatggctagacccaagcacatgatctccagctgttgtgaatgtcctgtgcttc

SEQ ID NO: 3140 - DNA, 110 bp, synthetic construct
  source 1..110: mol_type = other DNA
gagatatggaagcaccaaggtttaggaataccaaaactagctacacggggagacagggcttccagaattcaggggcactactttggaggccttcaatgtcatgccagaac

SEQ ID NO: 3141 - DNA, 110 bp, synthetic construct
  source 1..110: mol_type = other DNA
atataaaatttatatatacatgaggtgacttttgaccaagaccaatcagggccaaagaatatattttggactttgaagcacatagattgaagacaaaagttcatcgttct

SEQ ID NO: 3142 - DNA, 110 bp, synthetic construct
  source 1..110: mol_type = other DNA
agcaaaatgccatgatgtggaaaaggaatgtgataacgtagagaaaccatcccgctcccattttccagaaatctagatcaattcttacaagttcatccctaattaaaaag

SEQ ID NO: 3143 - DNA, 110 bp, synthetic construct
  source 1..110: mol_type = other DNA
agcatgcagctgtagctggaaatatttgggtttcccgaaaagctgggattgactgatctctatttacaccatgtgttcataatagctccacagtgtggttgtaagatttt

SEQ ID NO: 3144 - DNA, 110 bp, synthetic construct
  source 1..110: mol_type = other DNA
atctctatttacaccatgtgttcataatagctccacagtgtggttgtaagatttttgattaacatgcatacatcgtgctattctttttatctcctacagtgctgagcata

SEQ ID NO: 3145 - DNA, 110 bp, synthetic construct
  source 1..110: mol_type = other DNA
aattaagcttctaacgtgatcgtgggaaaaacaagagctgatcaatttttcagtaacagacccacagaaggtcaactcagggatctgtggagactgttaatacttaacat

SEQ ID NO: 3146 - DNA, 110 bp, synthetic construct
  source 1..110: mol_type = other DNA
acatatagacagtttgtagctctgatataatgtactaagaagggtgcattaattactataattaatactacccttgtggtattcttcccagaagtgtataaactcaatta

SEQ ID NO: 3147 - DNA, 110 bp, synthetic construct; identical to SEQ ID NO: 3146
  source 1..110: mol_type = other DNA

SEQ ID NO: 3148 - DNA, 110 bp, synthetic construct; identical to SEQ ID NO: 3146
  source 1..110: mol_type = other DNA

SEQ ID NO: 3149 - DNA, 110 bp, synthetic construct; identical to SEQ ID NO: 3146
  source 1..110: mol_type = other DNA

SEQ ID NO: 3150 - DNA, 110 bp, synthetic construct
  source 1..110: mol_type = other DNA
ttttgtcccttacagctggtctttatagaatgtagtccttggcgccagctcaaacttagagggccctttacttcaattctctaccctactcttgtacatacacaaacata

SEQ ID NO: 3151 - DNA, 110 bp, synthetic construct
  source 1..110: mol_type = other DNA
ttagagggccctttacttcaattctctaccctactcttgtacatacacaaacatacagacttggctgtcagaaatactcatcagtttcacagtctattttatgactttct

SEQ ID NO: 3152 - DNA, 110 bp, synthetic construct
  source 1..110: mol_type = other DNA
tgtgcaaagctttggttggtggaattgcctcagtgaagctgtgtcatcatcattagccacattttcaggatccagaatcttaaaatctgtaccttaggtctttttttacg

SEQ ID NO: 3153 - DNA, 110 bp, synthetic construct
  source 1..110: mol_type = other DNA
ctctgatgtccctgtttcccttgatgatttgaaggtattctttttacccttattttttttttttaacattttgacagtgattttcttgatatggtgtcttcacatttctc

SEQ ID NO: 3154 - DNA, 110 bp, synthetic construct
  source 1..110: mol_type = other DNA
tttttttttaacattttgacagtgattttcttgatatggtgtcttcacatttctcaagctcgatgtgccccaagatcccccttcagaaatgcaggatagagtaaccacag

SEQ ID NO: 3155 - DNA, 110 bp, synthetic construct
  source 1..110: mol_type = other DNA
acctgggttcacccttatgtaacagagaaaaacaccaacctctcaccttagcagctatcattggagcattggaaatatcaggaagaagaggacatcttagtacaagggcc

SEQ ID NO: 3156 - DNA, 110 bp, synthetic construct
  source 1..110: mol_type = other DNA
cttaagagtcctatttaatacatatgactgatgtacccagctgtgtaccatacataaaacatgaaggcactatttccctgatgtctctttccctcccttcggtgaccccc

SEQ ID NO: 3157 - DNA, 110 bp, synthetic construct
  source 1..110: mol_type = other DNA
caaagctacaaagctgtcagcagccaggtttgctggagagctctgagagagaatcacccatcaggactccaggggctttgcttgagaggtggccagtcacctggggggat

SEQ ID NO: 3158 - DNA, 110 bp, synthetic construct
  source 1..110: mol_type = other DNA
catatagctctccagttttttaaacatcactgttgatgggactgtattttctccattctatctgctatactactttctcatagattaattgaccatatttgagtggattt

SEQ ID NO: 3159 - DNA, 110 bp, synthetic construct
  source 1..110: mol_type = other DNA
gtcactgccatacacacttgcctctgcaactcaccttcatatgtgtgacctccaatatgtcagtgaccctcaattttgccatttgaaaaatcaaaacactcattcttcag

SEQ ID NO: 3160 - DNA, 110 bp, synthetic construct
  source 1..110: mol_type = other DNA
cacttgtcccaatcagtagatagtaattcatcactttctggtgtagtgtctcagtaggtgctaaatccttgagtagagctttcaaagagaaaaattaggattgaaaaaaa

SEQ ID NO: 3161 - DNA, 110 bp, synthetic construct
  source 1..110: mol_type = other DNA
aggtgctaaatccttgagtagagctttcaaagagaaaaattaggattgaaaaaaaaaacctgatatggctttctaagttagggccaatcaaatccagggaaaaaaacaga

SEQ ID NO: 3162 - DNA, 110 bp, synthetic construct
  source 1..110: mol_type = other DNA
gtaagtagggttgtcagatgtgctacattgcttcctattaggtctggttaggttccctggctaggtgggctaaaatctgtgttaagccatagctgttcaataggcatgtc

SEQ ID NO: 3163 - DNA, 110 bp, synthetic construct
  source 1..110: mol_type = other DNA
cctggctaggtgggctaaaatctgtgttaagccatagctgttcaataggcatgtcaggcaactatttccctccccccaccaagtttcaaggtacgtctgagcaaagtacc

SEQ ID NO: 3164 - DNA, 110 bp, synthetic construct
  source 1..110: mol_type = other DNA
agcctatgcctaaaccaatgcctagcacccacacctagtcccactgcagcacagctgcacacgagtgcaagggctgtagcagccgaaagggagagctcagttgtgaggga

SEQ ID NO: 3165 - DNA, 110 bp, synthetic construct
  source 1..110: mol_type = other DNA
tgcacacgagtgcaagggctgtagcagccgaaagggagagctcagttgtgagggacaatgacatctcagactggagtggtatctgaatggcatagtgacaacgattactc

SEQ ID NO: 3166 - DNA, 110 bp, synthetic construct
  source 1..110: mol_type = other DNA
acagctcagagttaaaagttgttcccactagggaaaactagtggaatagaaggtatggggaaaagaaagggattgtgttttcataagtcttttactattatctcacttta

SEQ ID NO: 3167 - DNA, 110 bp, synthetic construct
  source 1..110: mol_type = other DNA
aactagtggaatagaaggtatggggaaaagaaagggattgtgttttcataagtcttttactattatctcactttaactccatgaacatgttactttgaataatgctttat

SEQ ID NO: 3168 - DNA, 110 bp, synthetic construct
  source 1..110: mol_type = other DNA
agccaagctggtgaggataaatgtaatatttggggctgtattgaaacctaaaatctttagagagtgatacataaacttactgcggatttttttaaaaagatgagtttggt

SEQ ID NO: 3169 - DNA, 110 bp, synthetic construct
  source 1..110: mol_type = other DNA
tttagagagtgatacataaacttactgcggatttttttaaaaagatgagtttggttttattgtgactaatgacttgggagctttttaatttgtggtaagggagaaagggg

SEQ ID NO: 3170 - DNA, 110 bp, synthetic construct
  source 1..110: mol_type = other DNA
atgcactagactatgaaatccttcctgtacctgaggtctgaagtgcagcagcatccatgcctttgttggaccatgtctgggctgcaagagcagctaccctgctaccctag

SEQ ID NO: 3171 - DNA, 110 bp, synthetic construct
  source 1..110: mol_type = other DNA
gataccaagtgtctgtgcatccagaaatgcccataatgagttggactcgccaagtcataaaacctggtagctttaatagcactatatagtaatgcagaaatggtacattt

SEQ ID NO: 3172 - DNA, 110 bp, synthetic construct
  source 1..110: mol_type = other DNA
cataaaacctggtagctttaatagcactatatagtaatgcagaaatggtacattttggatcaagcacatgcaatagcaggggcacatgcaagcaccatgagcggagagcc

SEQ ID NO: 3173 - DNA, 110 bp, synthetic construct; identical to SEQ ID NO: 3171
  source 1..110: mol_type = other DNA

SEQ ID NO: 3174 - DNA, 110 bp, synthetic construct; identical to SEQ ID NO: 3172
  source 1..110: mol_type = other DNA

SEQ ID NO: 3175 - DNA, 110 bp, synthetic construct
  source 1..110: mol_type = other DNA
agcataaagtctactcatccagaaggggaaaaaaagaaaagaaaaacatagcttacaaaggaatcccttttggctattagtgaatttcttagtggaaatcctacaggcta

SEQ ID NO: 3176 - DNA, 110 bp, synthetic construct
  source 1..110: mol_type = other DNA
attagaggagtccagctcaaaggctgaggtggatctgaggaagtaaacagcaggaggctgccagtgaaccacactccttacaactgagcaacatgcccttcctttgaagg

SEQ ID NO: 3177 - DNA, 110 bp, synthetic construct
  source 1..110: mol_type = other DNA
ggtgcagcactaaaaaacaaaacaaaacaaaacaaaacaaaagactttatctaaggacagctgaaaaaaattggggaggtaaaagagctcttgtggcttttaacacctgc

SEQ ID NO: 3178 - DNA, 110 bp, synthetic construct
  source 1..110: mol_type = other DNA
gacagctgaaaaaaattggggaggtaaaagagctcttgtggcttttaacacctgccaaaataactttctataaatgaggatatagacgaggtgctcaccacaatgactac

SEQ ID NO: 3179 - DNA, 110 bp, synthetic construct
  source 1..110: mol_type = other DNA
ataaataaatatataaaatttgaggccataatgaaaaggctttgcataatttctctcctcaaatgatcacctatcagttcctctttcaaggatgagtcagagagttaacc

SEQ ID NO: 3180 - DNA, 110 bp, synthetic construct
  source 1..110: mol_type = other DNA
ggtcatgccagaccaggaaatatcgaggaaatattccagactgaaggagaccagagaaacatgctaactaagttcaatgtcatcctgggctgggtcccaggccagaaaag

SEQ ID NO: 3181 - DNA, 110 bp, synthetic construct
  source 1..110: mol_type = other DNA
gaaacatgctaactaagttcaatgtcatcctgggctgggtcccaggccagaaaagtaaatatgagattattgggacagttggaaaaacttggatggaagtgtatcaaggt

SEQ ID NO: 3182 - DNA, 110 bp, synthetic construct
  source 1..110: mol_type = other DNA
ggcagaggtctccagtggggagagctcaatcatttcaagtccctcttacaacagcaaaaagaatgaaaacaacaagctccaactggtttgtgtttgtttagactgcacac

SEQ ID NO: 3183 - DNA, 110 bp, synthetic construct
  source 1..110: mol_type = other DNA
aaaaagaatgaaaacaacaagctccaactggtttgtgtttgtttagactgcacacaagcatgagtgccagcaatcactaaaccagacacagaagggaaagtgccaaacgc

SEQ ID NO: 3184 - DNA, 110 bp, synthetic construct
  source 1..110: mol_type = other DNA
ggtccccctcccctacgggcctgagatcggccgaggggtatgcctcttacccaaaggcgcgcagagcctccggccacagtgttggcgcagcaaaacctgccgctccccgc

SEQ ID NO: 3185 - DNA, 110 bp, synthetic construct
  source 1..110: mol_type = other DNA
gggtatgcctcttacccaaaggcgcgcagagcctccggccacagtgttggcgcagcaaaacctgccgctccccgctggggcttgcagcctcagctggggcaccacccgct

SEQ ID NO: 3186 - DNA, 110 bp, synthetic construct
  source 1..110: mol_type = other DNA
ataacttggatcacatgcctacctgtacaccagtctctgcatctaagggaatcgaaagggtcctgatgagccaagctgggtcatatataacagagaaaggcaacaccccc

SEQ ID NO: 3187 - DNA, 110 bp, synthetic construct
  source 1..110: mol_type = other DNA
acagcaaagagttcggggcagccaagcccgagctgcatttgtcagcccctctgtaagcactgtcaagacactctctcagatctggaaacaccagtgtgggcatgaaccat

SEQ ID NO: 3188 - DNA, 110 bp, synthetic construct
  source 1..110: mol_type = other DNA
tttcccaaatcaacatcgattttaatgtttacgtggtgttctcttagaccttattctggacatctggattatttctcatcatttgctagtaaatgtccttgttacatcca

SEQ ID NO: 3189 - DNA, 110 bp, synthetic construct
  source 1..110: mol_type = other DNA
aagaagagcaatagacataacatctaaaatagaaagctatccaacaatattcaacaactggacattgaaaataaaaatgttaaggaaactaaggtctgactcacaaacac

SEQ ID NO: 3190 - DNA, 110 bp, synthetic construct; identical to SEQ ID NO: 3189
  source 1..110: mol_type = other DNA

SEQ ID NO: 3191 - DNA, 110 bp, synthetic construct; identical to SEQ ID NO: 3189
  source 1..110: mol_type = other DNA

SEQ ID NO: 3192 - DNA, 110 bp, synthetic construct; identical to SEQ ID NO: 3189
  source 1..110: mol_type = other DNA

SEQ ID NO: 3193 - DNA, 110 bp, synthetic construct
  source 1..110: mol_type = other DNA
ggggataaaaatagaacctaattttgttggattgttggaggattaaataggctcatgcaatatgcataaaatagtgcctgttacatagtaactgctacataagtattaac

SEQ ID NO: 3194 - DNA, 110 bp, synthetic construct
  source 1..110: mol_type = other DNA
ttctattccgccatcttaatcctgtctctgtactttaaatgagtgaattagtgtgagttatatctaaataaagctgtttgatctatctatttatatctcaacagagtgat

SEQ ID NO: 3195 - DNA, 110 bp, synthetic construct
  source 1..110: mol_type = other DNA
aacaaacttgctattggataaatcttcccaagatgaagttcttatcgcctgacgctccagcctaaaagcttttgatgactcatttaatgccaagttatccataagactcc

SEQ ID NO: 3196 - DNA, 110 bp, synthetic construct
  source 1..110: mol_type = other DNA
tgtgccttatgggactgctgggatctcaggatacctaaacctcaagctcttctttgccagccctgcagcaacactgagtcactgtgtctgtgccccacatggtggtggtg

SEQ ID NO: 3197 - DNA, 110 bp, synthetic construct
  source 1..110: mol_type = other DNA
ttggaggtctcccacaatattgtgagatttgtccccaggagctcctccagattcacacaataaataggggagagaaatttcctcatgcttcctatagagagacctcaggg

SEQ ID NO: 3198 - DNA, 110 bp, synthetic construct
  source 1..110: mol_type = other DNA
acccaaaccaattaagcacctcgaaaggacttgctctgggatccaaagctttcaatgcctcaccatctccagtgactaaaagaaattgccctgcttattgtttaaaaaaa

SEQ ID NO: 3199 - DNA, 110 bp, synthetic construct
  source 1..110: mol_type = other DNA
tgcctcaccatctccagtgactaaaagaaattgccctgcttattgtttaaaaaaaaaaaaaaaaaactgtataaaagaatagaacatcatggagttcccgtggtggctca

SEQ ID NO: 3200 - DNA, 110 bp, synthetic construct
  source 1..110: mol_type = other DNA
atacctatctagcagaatattatgcagccataagaaagaatgaaaaagatctttgctgatatgacatgaactctaagatatacgaagctaaaacaatgtccaatacacgt

SEQ ID NO: 3201 - DNA, 110 bp, synthetic construct
  source 1..110: mol_type = other DNA
aatattatgcagccataagaaagaatgaaaaagatctttgctgatatgacatgaactctaagatatacgaagctaaaacaatgtccaatacacgttgaatgattccattt

SEQ ID NO: 3202 - DNA, 110 bp, synthetic construct
  source 1..110: mol_type = other DNA
cctcacaacaaaagaagagtaaacccacacagctacccagggactaccccatataagtggccctacaatactgcagtagatagttgttttccctaaactcagagtaagaa

SEQ ID NO: 3203 - DNA, 110 bp, synthetic construct
  source 1..110: mol_type = other DNA
agagtaaacccacacagctacccagggactaccccatataagtggccctacaatactgcagtagatagttgttttccctaaactcagagtaagaaaaacataaacaaaat

SEQ ID NO: 3204 - DNA, 110 bp, synthetic construct
  source 1..110: mol_type = other DNA
tcattattttggccctggtcagggccctcaaggtaatttgactgttgcagctaaatcaagtgggcaaggtagataaacatgggtgtttaacatgaaagaagtctgggtgg

SEQ ID NO: 3205 - DNA, 110 bp, synthetic construct
  source 1..110: mol_type = other DNA
tcaagtgggcaaggtagataaacatgggtgtttaacatgaaagaagtctgggtggcaaaagaaggcaatgaaagaccttatgcaatgttgttgataagaaagggctgggg

SEQ ID NO: 3206 - DNA, 110 bp, synthetic construct
  source 1..110: mol_type = other DNA
atcaagaacagttcatgcttaagatggcactgacattggccttataatgagttttccacattaattgtagaggggagaaggaaccaagaccccacccacccctccatttg

SEQ ID NO: 3207 - DNA, 110 bp, synthetic construct
  source 1..110: mol_type = other DNA
ctgggggatagggggtgggtcatggccaggcctgggatggtgagttccactgaccccaccagctttgtccacaggcaagaagtccccatcttcatctgagtcaaggactg

SEQ ID NO: 3208 - DNA, 110 bp, synthetic construct
  source 1..110: mol_type = other DNA
gtgtggtaggtgctttccctattgacagctgctctggctagaattccatcctagatccatccaccccttaaattaaaaagcaaaaacaaaactaaaaaacgaccatattc

SEQ ID NO: 3209 - DNA, 110 bp, synthetic construct
  source 1..110: mol_type = other DNA
tggatactgtgctctcagagctaaaagggaaaaggaccaattgttgtgcatgggtggtgagtgtaaacttctgctaggatcaatgtgagaaacagtaaaaacccatcgaa

SEQ ID NO: 3210 - DNA, 110 bp, synthetic construct
  source 1..110: mol_type = other DNA
tagaataactggactttgggaattcctttttatggtgagtatggatgagagagtgaattacctgaaacattctgtttgagaacgtgctttcataatgtcagttacagtaa

SEQ ID NO: 3211 - DNA, 110 bp, synthetic construct
  source 1..110: mol_type = other DNA
tgagagagtgaattacctgaaacattctgtttgagaacgtgctttcataatgtcagttacagtaaaatttgcatttttaaaaaaatagccaaatgtaaatagctctgagt

SEQ ID NO: 3212 - DNA, 110 bp, synthetic construct
  source 1..110: mol_type = other DNA
tgcgctgcagcattagcagcctaacttctctagggatgacagcagcatcacacatccccataagctctgtttcttaaatgtcaatttaacgtgctgagggcaattaggaa

SEQ ID NO: 3213 - DNA, 110 bp, synthetic construct
  source 1..110: mol_type = other DNA
ccccataagctctgtttcttaaatgtcaatttaacgtgctgagggcaattaggaaaaatgaagactggatttttagtgagcatacagattctggtacgtagagtatggtc

SEQ ID NO: 3214 - DNA, 110 bp, synthetic construct
  source 1..110: mol_type = other DNA
tcattgttccaccctgctccctcacactgatatactgtctgagtaaggatgtatcttcagccttagggcagtgtcatttctgggagggctttggaaaaggcataatagaa

SEQ ID NO: 3215 - DNA, 110 bp, synthetic construct
  source 1..110: mol_type = other DNA
aataccttgagctaagaatttaaaactctgaaaatgctgttttctgcaagttctgcagtgaaattactagcagccagagcagtcaggccactgcagagttttgaattttg

SEQ ID NO: 3216 - DNA, 110 bp, synthetic construct
  source 1..110: mol_type = other DNA
cagtgaaattactagcagccagagcagtcaggccactgcagagttttgaattttgtatgacagccatgctatatactatggccccatcccttggtctgccagagacatgc

SEQ ID NO: 3217 - DNA, 110 bp, synthetic construct
  source 1..110: mol_type = other DNA
aactcctgtcccattgtagataagattatctaaattatagggttttccctgtcttggattttcacgtgtttcactctgatttttctaaagtatgaacttaaaatcagtga

SEQ ID NO: 3218 - DNA, 110 bp, synthetic construct
  source 1..110: mol_type = other DNA
ccctgcatgaggtgagtaaggcagtcagagctcagaatggaagcaggcacccaccctcagggacatacgaatgcctgtttgatgggctagtattaccttttcaaaaacac

SEQ ID NO: 3219 - DNA, 110 bp, synthetic construct
  source 1..110: mol_type = other DNA
tggtcccgttttcctgttttgagaagcaaacgaacccgtgcagggtgcaaacacggagcaagcagaaaccagtcacaggcgcccccgtgtgccctatgagggaactgcag

SEQ ID NO: 3220 - DNA, 110 bp, synthetic construct
  source 1..110: mol_type = other DNA
ggcacagcagcggcagccattggtgcctgactggacccagggctgcaggcgaggaagaagctcaggttcatcccaagtggccgggaagccagtcagtgacaagaggaacc

SEQ ID NO: 3221 - DNA, 110 bp, synthetic construct
  source 1..110: mol_type = other DNA
agaagctcaggttcatcccaagtggccgggaagccagtcagtgacaagaggaacctcatagggagaggacaataggggcagaagtttctcagatgcagggcagtggcccc

SEQ ID NO: 3222 - DNA, 110 bp, synthetic construct
  source 1..110: mol_type = other DNA
ggctctgatttttccagataaggaaaaaagtgaggctgaggccacacagctcagaggcagggctgggcccaaagcctgggcctcttgaataacccctcaccgtccctcat

SEQ ID NO: 3223 - DNA, 110 bp, synthetic construct
  source 1..110: mol_type = other DNA
gaggtatgtgctgtattgtggccataggaggggcagaggctgctccgggagggccacccagcctcagaaacaatccaggagcggctgcaggagctgagtaagctctggga

SEQ ID NO: 3224 - DNA, 110 bp, synthetic construct
  source 1..110: mol_type = other DNA
acccagcctcagaaacaatccaggagcggctgcaggagctgagtaagctctgggaggagctgcaggccaactgccagaggaaggcagccaatctacaggaggccagcgag

SEQ ID NO: 3225 - DNA, 110 bp, synthetic construct
  source 1..110: mol_type = other DNA
tcccctcagtgtagcaagtactgttccaggtgggagctgactgttagctagtcattcctggctagtcctcccacccaagccctccagaagtacgtacatgcagttccgag

SEQ ID NO: 3226 - DNA, 110 bp, synthetic construct
  source 1..110: mol_type = other DNA
gcggtcttgcctctccccatcctaccgcaagcagctagggcccggtgagtcaatcattcattcactcagggaacgttcatcgtgagcctgtgtggcagatcctgagccaa

SEQ ID NO: 3227 - DNA, 110 bp, synthetic construct
  source 1..110: mol_type = other DNA
tttaaggaatagaacaaatgtacttatgaaatgtgttgtaatattgccagttcgcaatcactagcttaaatctgaagtggcttctagaaccagcatattgacagttaagt

SEQ ID NO: 3228 - DNA, 110 bp, synthetic construct
  source 1..110: mol_type = other DNA
ctactaaagggactgtggttcacaagcatgttccctctgaaaagttactgttgcgccatatttgtcatttagcactggtagtcagtcttatttgcagattgagggtagtt

SEQ ID NO: 3229 - DNA, 110 bp, synthetic construct
  source 1..110: mol_type = other DNA
gacaagagaatccttttgaaaggaggaaaaacaggcaggattgtctccttccccaaattcctgtatcccccaggctaacttgggtgtccacaagctttttcagatttgaa

SEQ ID NO: 3230 - DNA, 110 bp, synthetic construct
  source 1..110: mol_type = other DNA
aattcctgtatcccccaggctaacttgggtgtccacaagctttttcagatttgaagagagaaaagggggacagattcaggtcagggggcttatcccgcaagcaatggtgg

SEQ ID NO: 3231 - DNA, 110 bp, synthetic construct
  source 1..110: mol_type = other DNA
gcacacaagaatcacctgagcagctccctaggggctccaatacaattagttagggatgaggcctgagaggcactggtagtttccacaagccccctaaatagcccagtgtg

SEQ ID NO: 3232 - DNA, 110 bp, synthetic construct
  source 1..110: mol_type = other DNA
tggaacactgaaacacaggtttgctccctggactggcacagtgtgttaaggattccaggcagaggtcacagctgcagcttggatctgatccctggccccagaactccatg

SEQ ID NO: 3233 - DNA, 110 bp, synthetic construct
  source 1..110: mol_type = other DNA
actcccaaagccagttttatagcttctcacctaattggcagggcggccatatgagtgattccttgccttccacaagttcttgctgcctgtgggccctcatggcctgttgt

SEQ ID NO: 3234 - DNA, 110 bp, synthetic construct
  source 1..110: mol_type = other DNA
ttttaagttttggcccaactctcattcacatgtctcctaaggaacattcatcatattccacaaccactatgaagtaattataatagctaagctcttaagtgtctcgaatt

SEQ ID NO: 3235 - DNA, 110 bp, synthetic construct
  source 1..110: mol_type = other DNA
ttccacaaccactatgaagtaattataatagctaagctcttaagtgtctcgaattacctgagccgattgtaccagcttgctatatagagccacttttccttgatgagtga

SEQ ID NO: 3236 - DNA, 110 bp, synthetic construct
  source 1..110: mol_type = other DNA
gaactcccctccttggtagttctgagccaacacctaagaggtctatctacctcaaagcctccacattagagaggccccacccagagctagagaggctcccgcagttcagt

SEQ ID NO: 3237 - DNA, 110 bp, synthetic construct
  source 1..110: mol_type = other DNA
gcatggcctctcctttagaggccaatacctgagcagggtccatcggttccctgtcttctcctcctggaagcaaatactaaaacccacaaaggattctatacaggcgcagg

SEQ ID NO: 3238 - DNA, 110 bp, synthetic construct
  source 1..110: mol_type = other DNA
agcgagtctcctcccctcccccatctgcctgactcacctggcctaccagaacttgcatagctcccttgggagagctgggtctatgccgagccaaccctggcttccagtct

SEQ ID NO: 3239 - DNA, 110 bp, synthetic construct
  source 1..110: mol_type = other DNA
catagctcccttgggagagctgggtctatgccgagccaaccctggcttccagtcttgcctgctggactgctgaaggggccgtgggccagagtcctggctgtggtggcaag

SEQ ID NO: 3240 - DNA, 110 bp, synthetic construct; identical to SEQ ID NO: 3238
  source 1..110: mol_type = other DNA

SEQ ID NO: 3241 - DNA, 110 bp, synthetic construct; identical to SEQ ID NO: 3239
  source 1..110: mol_type = other DNA

SEQ ID NO: 3242 - DNA, 110 bp, synthetic construct
  source 1..110: mol_type = other DNA
tttgcaactactctgagcggcaggatgtggctggttgtgtaaggtctgagaagttgcaacctgtctgttaggaatgaggctggtgggattccccaccatttccagaagcc

SEQ ID NO: 3243 - DNA, 110 bp, synthetic construct
  source 1..110: mol_type = other DNA
gcaacctgtctgttaggaatgaggctggtgggattccccaccatttccagaagcctgggaggaaggaaagcagcagtatcgtgaaccctgctccctctgagcaccagtga

SEQ ID NO: 3244 - DNA, 110 bp, synthetic construct
  source 1..110: mol_type = other DNA
tgcctgattattcaagaggaaataaatgagatgctaaaagtactcctccactccaactctgaagtctttgttacgttggcaaatacactggatctaagagtccttaccct

SEQ ID NO: 3245 - DNA, 110 bp, synthetic construct
  source 1..110: mol_type = other DNA
ataggatgacacgtgggctgtaggttcctctggcttccatttcacttcgataccctgctgagctccacaccaggttctccttctgtctgagaaatactcttggaatttga

SEQ ID NO: 3246 - DNA, 110 bp, synthetic construct
  source 1..110: mol_type = other DNA
acctattgaatagatagatgactccatgagtaatgttgatgtccaaatgttgccacctcatctaggaaagcattacacacaggcagtttaggaacttcatagagggttat

SEQ ID NO: 3247 - DNA, 110 bp, synthetic construct
  source 1..110: mol_type = other DNA
cctcatctaggaaagcattacacacaggcagtttaggaacttcatagagggttataaaacaaggaaagacagggagagttttgctagtgggagatggatgctttctgtgc

SEQ ID NO: 3248 - DNA, 110 bp, synthetic construct
  source 1..110: mol_type = other DNA
gaggaagccaaactgtggtcttataaggctacttctatgcaagatcacgcctttgtattttttttgaggggggggaggttactatttatttttggtgtgggaaatagaat

SEQ ID NO: 3249 - DNA, 110 bp, synthetic construct
  source 1..110: mol_type = other DNA
tatgcaagatcacgcctttgtattttttttgaggggggggaggttactatttatttttggtgtgggaaatagaatattagctgtctcttttttcggtgtgagcaggctgt

SEQ ID NO: 3250 - DNA, 110 bp, synthetic construct
  source 1..110: mol_type = other DNA
attggacatcttatgaatctgttcctggaggtctcacagagaatcagacatatccttgtgcgtgctggtgtattggattgtagcccggatgggcccccaaaagatgatgc

SEQ ID NO: 3251 - DNA, 110 bp, synthetic construct
  source 1..110: mol_type = other DNA
cccctctgtagccttgagtcccaggccttggtgggatgctctctgatgtgaactgggagggtcagcctgcacagcagggacctgccctctccacatgggcggctaaccag

SEQ ID NO: 3252 - DNA, 110 bp, synthetic construct
  source 1..110: mol_type = other DNA
ttccaaactcccacaagtgttcccattgtatgaaagtaccaggcaaccaggataaaggaagcttgattgatgcagtgggaggtgggctcctggagttcagaggagggcag

SEQ ID NO: 3253 - DNA, 110 bp, synthetic construct
  source 1..110: mol_type = other DNA
tggtgagaaagcataaatggaataaaaagggaaatacaaccactgattctacatttatttaaaagataatgttttgtagacccagatgtcatgagattaggaaaaactag

SEQ ID NO: 3254 - DNA, 110 bp, synthetic construct; identical to SEQ ID NO: 3253
  source 1..110: mol_type = other DNA

SEQ ID NO: 3255 - DNA, 110 bp, synthetic construct
  source 1..110: mol_type = other DNA
gctaccatcttgtgtgtacttttagaaaacacttcttttctccacacttactcgtattcaggattgggtatatatgggaaatggtcactggaaaattggagaaatgaagg

SEQ ID NO: 3256 - DNA, 110 bp, synthetic construct
  source 1..110: mol_type = other DNA
tgtaggatggatgctttatgaatccagtttagtaagcactgcagtctttctacatgagcctgacctgagctggtcatgaattatggtttgctctctgcattcactggagg

SEQ ID NO: 3257 - DNA, 110 bp, synthetic construct
  source 1..110: mol_type = other DNA
attcatccaccatcttgccattaagtagctgcacatcatgttggctcactcaatctctcagtggttctgtttccttattggtaaaatgtggggagaatgatggtcactgc

SEQ ID NO: 3258 - DNA, 110 bp, synthetic construct
  source 1..110: mol_type = other DNA
attcccccagcggctggaggtttggcagctgaagcttcttgattgattctcccacagaagttgcccttgaccatcagtgcttcctatcccaagaccctccccagggatag

SEQ ID NO: 3259 - DNA, 110 bp, synthetic construct
  source 1..110: mol_type = other DNA
ctaggggaaatggaaaaattcagagagagaaaaacgggaataagtatattagactattttccagccatatatacccgttggcgtaggaaagataaacctagatttaaaag

SEQ ID NO: 3260 - DNA, 110 bp, synthetic construct
  source 1..110: mol_type = other DNA
attttccagccatatatacccgttggcgtaggaaagataaacctagatttaaaagtagacccctggatatgatagaatatgagaggctcagttttgcagcactgataatt

SEQ ID NO: 3261 - DNA, 110 bp, synthetic construct
  source 1..110: mol_type = other DNA
tagtgagcacctccttaagactactgcaatagccacaataagcaaaatggattgggacttttgttcatcctcaaatcttccttggatttacaggccaatttaaattcaag

SEQ ID NO: 3262 - DNA, 110 bp, synthetic construct
  source 1..110: mol_type = other DNA
tgatttataacattgtattagtttcatatgtacaacattatatttatacttctatgtaccctaaaacgtgctcaccaccaaaaattgagtttccatctatcaccatgcag

SEQ ID NO: 3263 - DNA, 110 bp, synthetic construct
  source 1..110: mol_type = other DNA
agctctctctctctggttgtgacaaccctgggtcagttgctgagctggggcatagagtaagtggggctagagcattggcttggctcagtatggggcatacaaaggaggtc

SEQ ID NO: 3264 - DNA, 110 bp, synthetic construct
  source 1..110: mol_type = other DNA
tcagtgagcatgtcctgtgggtgggcctgggagctctgaggctctctccataccttaccctatgcctcgcttccatttggctcttcctgagttgtatcgtttctcataaa

SEQ ID NO: 3265 - DNA, 110 bp, synthetic construct
  source 1..110: mol_type = other DNA
atttacccatctccgcaggtgctatgtctcaatcatagctgctttgagccacttatagtccatttctcagtcttctcccttagtaccaattgcctgaagcgtccaaccag

SEQ ID NO: 3266 - DNA, 110 bp, synthetic construct
  source 1..110: mol_type = other DNA
aatctccccctgttgcccttctgacactactctgcaagaacctcagatttgaagcataatcagcttatgtttctcttctttgggtcctacgttgggtcctaccaacttct

SEQ ID NO: 3267 - DNA, 110 bp, synthetic construct
  source 1..110: mol_type = other DNA
gtgctgggtgcacattagtggttttttaaatagtggttggattactaagctagttttagcttttaaattgttgctcttctgattgcaatgccagccctttgaaaagaagc

SEQ ID NO: 3268 - DNA, 110 bp, synthetic construct
  source 1..110: mol_type = other DNA
ttagcttttaaattgttgctcttctgattgcaatgccagccctttgaaaagaagcccggtattgaatggtaattaagtcagccctcttccagcagcactcaacccaagca

SEQ ID NO: 3269 - DNA, 110 bp, synthetic construct
  source 1..110: mol_type = other DNA
attctccccaagttcactcgtctcctgttctgctcttctagcccttcctgtaacccataaagcttattcccacctcagggtctgcattagacaggatggggaaaggttat

SEQ ID NO: 3270 - DNA, 110 bp, synthetic construct
  source 1..110: mol_type = other DNA
cagagtgggagctccataaagtgtgcacggtttcatctttctgcagctaaatccctaaagcctttaaagggccagggagtttgaagtcttctctaatgattgagtaatgg

SEQ ID NO: 3271 - DNA, 110 bp, synthetic construct
  source 1..110: mol_type = other DNA
gagcaaagtaatcagtgatatctggcaaagcgaagagtaacagtagttaagttttatataatttatacagctggcatcatggtaggtactatttttaagtactttatgtc

SEQ ID NO: 3272 - DNA, 110 bp, synthetic construct
  source 1..110: mol_type = other DNA
atataatttatacagctggcatcatggtaggtactatttttaagtactttatgtcagtggacttctcttgtgcaatagggtaaggatccaacattgtcactgcaatggct

SEQ ID NO: 3273 - DNA, 110 bp, synthetic construct
  source 1..110: mol_type = other DNA
gatagactgagataagctgttagagagactgctttataggctgtttcagttcagggggattaaacaggatgacctcactgaaaaagaaaccacacttaccatctttaaat

SEQ ID NO: 3274 - DNA, 110 bp, synthetic construct
  source 1..110: mol_type = other DNA
gggattaaacaggatgacctcactgaaaaagaaaccacacttaccatctttaaatgaggctgctcttaactgggtcactgtgagatgcagcacatacttcttatttcaaa

SEQ ID NO: 3275 - DNA, 110 bp, synthetic construct
  source 1..110: mol_type = other DNA
ggaatcaactgcatttctccttatgttcacagcagtgccatccacattttaaccgtagctattagagatgagatggatgaaatcattttttatgtgttggacatcataga

SEQ ID NO: 3276 - DNA, 110 bp, synthetic construct
  source 1..110: mol_type = other DNA
aacttatggctcatttgataatgtaagaaagacgctggaggtagaatatatagaaaataaatctgagctcacctttgtaaattattaagatggcaatggggaggattgtc

SEQ ID NO: 3277 - DNA, 110 bp, synthetic construct
  source 1..110: mol_type = other DNA
aataaatctgagctcacctttgtaaattattaagatggcaatggggaggattgtcaaagtaaacaccaattagttagatttattgctgttttggagttcctgctgactgc

SEQ ID NO: 3278 - DNA, 110 bp, synthetic construct; identical to SEQ ID NO: 3276
  source 1..110: mol_type = other DNA

SEQ ID NO: 3279 - DNA, 110 bp, synthetic construct; identical to SEQ ID NO: 3277
  source 1..110: mol_type = other DNA

SEQ ID NO: 3280 - DNA, 110 bp, synthetic construct
  source 1..110: mol_type = other DNA
ttttgtgttttgttgaaagcatgaatatatgatacacacacatgcatggccttgatgccatggactgctgggaacacatggcatttactactgtttggagccgacggagg

SEQ ID NO: 3281 - DNA, 110 bp, synthetic construct; identical to SEQ ID NO: 3280
  source 1..110: mol_type = other DNA

SEQ ID NO: 3282 - DNA, 110 bp, synthetic construct
  source 1..110: mol_type = other DNA
ccctccttccaaagagctcatgaaccagctgagcacacagatattgtgaaagtaacaatatgcacaatgatggttaaaaaagaaaatgccagattaagccctatgtgatc

SEQ ID NO: 3283 - DNA, 110 bp, synthetic construct
  source 1..110: mol_type = other DNA
caatatgcacaatgatggttaaaaaagaaaatgccagattaagccctatgtgatcagaaaacaggttcaataaaggtgaaaaatcagcttgtggtagctactctaataca

SEQ ID NO: 3284 - DNA, 110 bp, synthetic construct
  source 1..110: mol_type = other DNA
gaagggcactgccacaacagtccttacacctctacatgggcatggtgaggtgattctggagtgctgaagaaagctggagactaaaaccaaatgtcgctgtcaactgaagt

SEQ ID NO: 3285 - DNA, 110 bp, synthetic construct
  source 1..110: mol_type = other DNA
ctggagtgctgaagaaagctggagactaaaaccaaatgtcgctgtcaactgaagtggccttgtaagggcaatatgcttggggaagcaggagcacagcaaggagcaagttt

SEQ ID NO: 3286 - DNA, 110 bp, synthetic construct; identical to SEQ ID NO: 3284
  source 1..110: mol_type = other DNA

SEQ ID NO: 3287 - DNA, 110 bp, synthetic construct; identical to SEQ ID NO: 3285
  source 1..110: mol_type = other DNA

SEQ ID NO: 3288 - DNA, 110 bp, synthetic construct
  source 1..110: mol_type = other DNA
gcctgggagttccctcgtggctcagtgggttaaggatccagcattgtcagtgcagctgcccaggttgggctcattcctagtccgagaacttccacgtgctgccaaaaaaa

SEQ ID NO: 3289 - DNA, 110 bp, synthetic construct
  source 1..110: mol_type = other DNA
ctgcccaggttgggctcattcctagtccgagaacttccacgtgctgccaaaaaaaagagtgcccaacgtccccttacattaccttcatataaatataaatggggaggagt

SEQ ID NO: 3290 - DNA, 110 bp, synthetic construct
  source 1..110: mol_type = other DNA
atcctctatggctagtgtcttttaagaagatggccatgtgaagacagagacaccccggcaaaacaccacttaaagacaaaaaagcagggattagagttaggcagctacac

SEQ ID NO: 3291 - DNA, 110 bp, synthetic construct
  source 1..110: mol_type = other DNA
cggcaaaacaccacttaaagacaaaaaagcagggattagagttaggcagctacaccagcaattgccagaaaaccaccagaagctaggaagagtcaaggaagttttcccct

SEQ ID NO: 3292 - DNA, 110 bp, synthetic construct
  source 1..110: mol_type = other DNA
aaagctgtggagtataacacctttaaatgaagacggagcttggaacagtagttgcatgcaaagtctagaatcagatagacttggttagaagcctggctcttctatctact

SEQ ID NO: 3293 - DNA, 110 bp, synthetic construct
  source 1..110: mol_type = other DNA
agcatgccctgcaattagtatacagctgcacctgttgcaaagtttctttcttcagtggtgtaaatggggacagtcaacaacattctaaattcttgagggattatcagacc

SEQ ID NO: 3294 - DNA, 110 bp, synthetic construct
  source 1..110: mol_type = other DNA
gaaagatgtcttgagtgagttgcttggccaggtttctttctgccaatttgggaccatgtgaataatgaacaattttaaaggaatgtggggtttgccagggaggtgtcaga

SEQ ID NO: 3295 - DNA, 110 bp, synthetic construct
  source 1..110: mol_type = other DNA
atgtgaataatgaacaattttaaaggaatgtggggtttgccagggaggtgtcagaaggtcatttcaagagtgctaaacacaatagactaaaaataagaatgagccaagtc

SEQ ID NO: 3296 - DNA, 110 bp, synthetic construct
  source 1..110: mol_type = other DNA
attcatgggaggtaagtgaaactcagctgattgcattccataaggagctttatcacctttttacttatgagcataaattactctggattttaatttcaggtttggagttt

SEQ ID NO: 3297 - DNA, 110 bp, synthetic construct
  source 1..110: mol_type = other DNA
tattactgtgatctcatgggcaaaaagagtcatggagagtcatcgagttttttgaggtcatgtgtctaaaagctgcaaaacagatttgaacccaggtattctgggcacat

SEQ ID NO: 3298 - DNA, 110 bp, synthetic construct
  source 1..110: mol_type = other DNA
ggtcatgtgtctaaaagctgcaaaacagatttgaacccaggtattctgggcacatgtttacctgttgcatgcaccatttatggaatatgtttttttaacatggtcaaata

SEQ ID NO: 3299 - DNA, 110 bp, synthetic construct
  source 1..110: mol_type = other DNA
ataaattaaatcattgctgggtttcttttgagcttattctttgttttctgatgattgtgttttctgtattgtggttggagcatctaaaagccaaacacaatatttggaag

SEQ ID NO: 3300 - DNA, 110 bp, synthetic construct
  source 1..110: mol_type = other DNA
acaacagtacaggagaaaatatggactgggattggattctgataaatactgcaatgatttcagtgagttattctctttattttaaagatgatcatttctgataagaattt

SEQ ID NO: 3301 - DNA, 110 bp, synthetic construct
  source 1..110: mol_type = other DNA
tacgtgtagcataatgaaggaaatctataaagcttggctaggttgtgaactaacgttgctgtccactttgagtcatgagatgtcagcacgatgttcatgttcagagtccc

SEQ ID NO: 3302 - DNA, 110 bp, synthetic construct
  source 1..110: mol_type = other DNA
caagttgactctttggttgccagggaaacagcagaaaggcacacctttaacccccaacccttgataagatatcatagtgcaggtagatctgatttaaagattagaacaat

SEQ ID NO: 3303 - DNA, 110 bp, synthetic construct
  source 1..110: mol_type = other DNA
aacccttgataagatatcatagtgcaggtagatctgatttaaagattagaacaatcactagctgggaccagaaacaaatacataggcactttccaaggctctgtgattaa

SEQ ID NO: 3304 - DNA, 110 bp, synthetic construct
  source 1..110: mol_type = other DNA
ctacctggaagtaaaatatcgtgacctatggtcatcagcctttaactgatacaacctattttaactttttacagatgtcctactggaactgctatttcacatatactctg

SEQ ID NO: 3305 - DNA, 110 bp, synthetic construct
  source 1..110: mol_type = other DNA
taactgcaaaccaaaaagttctttgaagtgatagagctatagttcaaatctaaatctacctacttctaaaatgatatttcagtagttcccgtcgtggcccgcagaaacaa

SEQ ID NO: 3306 - DNA, 110 bp, synthetic construct
  source 1..110: mol_type = other DNA
atacttgaaaccctgtacaactccatataccctctaatttcatcttttcaatgaagttctccccgttatccacagagctgcaatcacagtggcttccttcaattctttca

SEQ ID NO: 3307 - DNA, 110 bp, synthetic construct
  source 1..110: mol_type = other DNA
atttttgactcttggaagttaatgtcaataaactccagtattggattagcaaggaatcaaaattcattccctaacactggaatttgaaggctgtattagtttcctgtttc

SEQ ID NO: 3308 - DNA, 110 bp, synthetic construct
  source 1..110: mol_type = other DNA
tgtggctttttcataggcttttcacagtccctcaaaggattttaacataatgcggttttatataaaataaaatgggaatgatgacattacaaagattaggagagagattt

SEQ ID NO: 3309 - DNA, 110 bp, synthetic construct
  source 1..110: mol_type = other DNA
aaaaaaaaagaaaacacgtggtggtagatggaaagatatatgatacagcaagtatagtaaaatgttaatagtggtggtgtatgtggatgatcagtatgtaactctttcta

SEQ ID NO: 3310 - DNA, 110 bp, synthetic construct
  source 1..110: mol_type = other DNA
agtaaaatgttaatagtggtggtgtatgtggatgatcagtatgtaactctttctactttgccctgtctttgacatttttcaaaataaatatgggaggaaagtccttgtga

SEQ ID NO: 3311 - DNA, 110 bp, synthetic construct
  source 1..110: mol_type = other DNA
tagttaaacagtgtcctgtagtagaaaggctcaggctttagaaagacctgggtttgtacacagtctttccaaatgactagctgtgtaattataaaataagagtaggagtt

SEQ ID NO: 3312 - DNA, 110 bp, synthetic construct
  source 1..110: mol_type = other DNA
aaggctcaggctttagaaagacctgggtttgtacacagtctttccaaatgactagctgtgtaattataaaataagagtaggagttctcattgtggctcagcaggttaaga

SEQ ID NO: 3313 - DNA, 110 bp, synthetic construct; identical to SEQ ID NO: 3311
  source 1..110: mol_type = other DNA

SEQ ID NO: 3314 - DNA, 110 bp, synthetic construct; identical to SEQ ID NO: 3312
  source 1..110: mol_type = other DNA

SEQ ID NO: 3315 - DNA, 110 bp, synthetic construct
  source 1..110: mol_type = other DNA
aactgcagcttgagttcagtccctggccccagaacttccacatgctgacagtgctgctaaaataaaaaaatcctgttttatgatgatgtgtgtaatttttaaatttccta

SEQ ID NO: 3316 - DNA, 110 bp, synthetic construct
  source 1..110: mol_type = other DNA
gccccagaacttccacatgctgacagtgctgctaaaataaaaaaatcctgttttatgatgatgtgtgtaatttttaaatttcctattaatgtaaaaaactagtgtattct

SEQ ID NO: 3317 - DNA, 110 bp, synthetic construct; identical to SEQ ID NO: 3315
  source 1..110: mol_type = other DNA

SEQ ID NO: 3318 - DNA, 110 bp, synthetic construct; identical to SEQ ID NO: 3316
  source 1..110: mol_type = other DNA

SEQ ID NO: 3319 - DNA, 110 bp, synthetic construct
  source 1..110: mol_type = other DNA
gaagtgatcagatattcagccccaggcatgttgtctcctcactgttaatcccattcgatactccctttaactgattctaagcaggttgcttagctaaaatgaaaaaatac

SEQ ID NO: 3320 - DNA, 110 bp, synthetic construct
  source 1..110: mol_type = other DNA
tcaactctctggtggagtgttgcaggtgtgccccaacattcacatagagcccctcagcaaaaactggaagacttatctgttccgagtgtttaagaaaattgctgttcaac

SEQ ID NO: 3321 - DNA, 110 bp, synthetic construct
  source 1..110: mol_type = other DNA
agcaaaaactggaagacttatctgttccgagtgtttaagaaaattgctgttcaactattagatgaccactaagctaaccaagcagagacttcagtggctatatacaagaa

SEQ ID NO: 3322 - DNA, 110 bp, synthetic construct
  source 1..110: mol_type = other DNA
aatagtaataataaataatttagtactgtttgcagaagttctactcagatttacacgaattcactgaaatccttgcaaacactatctctacataggtctccagaggcata

SEQ ID NO: 3323 - DNA, 110 bp, synthetic construct; identical to SEQ ID NO: 3322
  source 1..110: mol_type = other DNA

SEQ ID NO: 3324 - DNA, 110 bp, synthetic construct
  source 1..110: mol_type = other DNA
ggaaggggaggtgcttgcttggtgccacatagcaaatggagagtagagagtcaccaccaagcagcctcttaacctatgggctgtttatatactattacttcaccccactg

SEQ ID NO: 3325 - DNA, 110 bp, synthetic construct
  source 1..110: mol_type = other DNA
accaagcagcctcttaacctatgggctgtttatatactattacttcaccccactggattataatcagtagctcatgtgcctccatctttcttactgcatccaacataaat

SEQ ID NO: 3326 - DNA, 110 bp, synthetic construct
  source 1..110: mol_type = other DNA
ctcaggccccacggctgctgagacctagttacctatggctgcaagcaccattttggccaagaggctggagtcatgtgcacttcctcccctactgctctgtgttttctgca

SEQ ID NO: 3327 - DNA, 110 bp, synthetic construct
  source 1..110: mol_type = other DNA
agatataggttctgtgtttgccatatgatggtattcacatagtcgttgaatgagtaaagaaatgattttaaagtagattagcatacctgtaatacaggtataagagttcc

SEQ ID NO: 3328 - DNA, 110 bp, synthetic construct
  source 1..110: mol_type = other DNA
attttattcttatttttattttttaatctagtttcctagtgcttgtcactgtgtctgaatagcttagggtagccattgattcgaaatgtgctttgaacaaacatttcaag

SEQ ID NO: 3329 - DNA, 110 bp, synthetic construct
  source 1..110: mol_type = other DNA
tgaatagcttagggtagccattgattcgaaatgtgctttgaacaaacatttcaagcctgtaaattctatctactgctgtttgaaatgtgtttggattgaggagtgtattt

SEQ ID NO: 3330 - DNA, 110 bp, synthetic construct; identical to SEQ ID NO: 3328
  source 1..110: mol_type = other DNA

SEQ ID NO: 3331 - DNA, 110 bp, synthetic construct; identical to SEQ ID NO: 3329
  source 1..110: mol_type = other DNA

SEQ ID NO: 3332 - DNA, 110 bp, synthetic construct
  source 1..110: mol_type = other DNA
ttcctgcactctgtgcccagtgccagtaggccctcagcctttattatcacagccgcccccccccatttgttccctgatgggggagcagcataaggggttgggactcactg

SEQ ID NO: 3333 - DNA, 110 bp, synthetic construct
  source 1..110: mol_type = other DNA
ataatatttcatttaggtgcatgttatgaaagtatgtattgtctttgtggatggacaaacagtaattttgctggtagctagggcattttgtaagaagaatttataaaggc

SEQ ID NO: 3334 - DNA, 110 bp, synthetic construct
  source 1..110: mol_type = other DNA
tgtacatgcatacatatatatccctttacatatatatgtatgtgggtgtgagtgtgtatgtgtgggtgtgtgttgcatacacagaatcaggcacttacctgcaaactctc

SEQ ID NO: 3335 - DNA, 110 bp, synthetic construct
  source 1..110: mol_type = other DNA
gaagctgggaaggaggcatggaacagattaaccctgccgacaccttgttttagacctctggcctccagaactgtgagcaaatgaatttctgttgttttaaaccacagagt

SEQ ID NO: 3336 - DNA, 110 bp, synthetic construct
  source 1..110: mol_type = other DNA
gtgatggccacctcagagcaatgctgggaggctccatgggttgcagcaggctcgggtgaagtggggagcttggacaagctcctgaactcctagagcctcagtttacttgt

SEQ ID NO: 3337 - DNA, 110 bp, synthetic construct
  source 1..110: mol_type = other DNA
tgagacaatgcttttcagtttgaatggtgttgactccagttatgaggacatttcccccagaacagctgtcgtgtcctctttctctccgctcccaagacacctgcccaccc

SEQ ID NO: 3338 - DNA, 110 bp, synthetic construct
  source 1..110: mol_type = other DNA
gcactccagagacaccccccaccccactgcgcgacagcaggaactcccgttcttcatcttttaagcagtttctcacatttccgttttgcctccatgatggtgacagtctc

SEQ ID NO: 3339 - DNA, 110 bp, synthetic construct
  source 1..110: mol_type = other DNA
atcttttaagcagtttctcacatttccgttttgcctccatgatggtgacagtctccttggagctctgctgtgacattccactgcagccggccagtcagccatctacgctt

SEQ ID NO: 3340 - DNA, 110 bp, synthetic construct
  source 1..110: mol_type = other DNA
cttcttagctaagccttagaaggcccattgtctttctcaacaaagttgatggagcatttcacacagagcaagcccagaagtgaaatgtacattcttctcctacatctgtg

SEQ ID NO: 3341 - DNA, 110 bp, synthetic construct
  source 1..110: mol_type = other DNA
ctccttatccaagctctacccatttcgtctgggaaactgcctcttagatcaacatgaatcaacctttctcttcctctttacacttattatcgaaatcgcaccattagccc

SEQ ID NO: 3342 - DNA, 110 bp, synthetic construct
  source 1..110: mol_type = other DNA
taggagagggggcacacctcagtaaagagagtcagctcatgttctgtagctcctagaagatgcagaaaaggctttggactttattctgagagaatggggagcagttgact

SEQ ID NO: 3343 - DNA, 110 bp, synthetic construct
  source 1..110: mol_type = other DNA
agagggtttttcctctcttcgaccctcaacatatgcttgtgttttgccatgcagctctgggagagaatccggttcattgttataggatggagcagtcaggccctgccaca

SEQ ID NO: 3344 - DNA, 110 bp, synthetic construct
  source 1..110: mol_type = other DNA
tctgggagagaatccggttcattgttataggatggagcagtcaggccctgccacagaggttggctttgccctatttattctggaacctggcctcctgaggctctcaggtc

SEQ ID NO: 3345 - DNA, 110 bp, synthetic construct
  source 1..110: mol_type = other DNA
aggaggtaagccacgtgaagagtttaagggtttaacctggtgctcggaccctgcgcaggtctgggtgaattattctagctgcaggaatgatcccatgaggcgggcacctt

SEQ ID NO: 3346 - DNA, 110 bp, synthetic construct
  source 1..110: mol_type = other DNA
caggtctgggtgaattattctagctgcaggaatgatcccatgaggcgggcaccttcgttaccctcttgtacaaagaaagcagatgctcagtgagggcaggcagcttccca

SEQ ID NO: 3347 - DNA, 110 bp, synthetic construct
  source 1..110: mol_type = other DNA
gaccggattttctgaaatgtggaggatttttttcctacaatttctgggaatctgtaagaattcctttagcttgtttcgaaatacactggtttgagtggatattttcatca

SEQ ID NO: 3348 - DNA, 110 bp, synthetic construct
  source 1..110: mol_type = other DNA
ttagtctcttagagtttctttgtattttgttgttggaggtacaagcatggcagcaaagtgtcccggccccggtaccaggtcccagcttatctcattcccaggcccctata

SEQ ID NO: 3349 - DNA, 110 bp, synthetic construct
  source 1..110: mol_type = other DNA
ataatacaggtaccattatttttattatgattatttgatagatgagcaaactgaggcagggagagattcagagacttgttacaacccctcagctaggaagcaggttgcct

SEQ ID NO: 3350 - DNA, 110 bp, synthetic construct
  source 1..110: mol_type = other DNA
gcagggagagattcagagacttgttacaacccctcagctaggaagcaggttgcctcctgttcagagaatgcttggttcatcactgagcaaaatagagtagccccagcatt

SEQ ID NO: 3351 - DNA, 110 bp, synthetic construct
  source 1..110: mol_type = other DNA
cagaagtttctttgaaactgtccagcatgggcatccttggaaatgggggaaatgaaggagactcccataagagtgtagctccatgtcttttggtgccattgttaagctgg

SEQ ID NO: 3352 - DNA, 110 bp, synthetic construct
  source 1..110: mol_type = other DNA
caatgtccatggggacctgcatgggcaccagaaatgctgactatgactactgattgtacgtaagctggagtgatgggtgcatctgtccccctcttgtttggagtcccccg

SEQ ID NO: 3353 - DNA, 110 bp, synthetic construct
  source 1..110: mol_type = other DNA
gtacgtaagctggagtgatgggtgcatctgtccccctcttgtttggagtcccccgaggggttatgacggtgtttcctgagtgagaagggaaggaaagggcttaacctgtg

SEQ ID NO: 3354 - DNA, 110 bp, synthetic construct
  source 1..110: mol_type = other DNA
gaagaggaactaagctttggaaagaattcatttttgtagctttgtattttgatatgtctcttctactgctgcagaaaattcatgaaggaattggtttccatttcctctct

SEQ ID NO: 3355 - DNA, 110 bp, synthetic construct
  source 1..110: mol_type = other DNA
ggaatgccaccatttgggaccagatttggggtcatgatagctgagtgacttagaatgcacagcctggccaaacctggcccacgagccccgggagggcagctctgagtgtg

SEQ ID NO: 3356 - DNA, 110 bp, synthetic construct
  source 1..110: mol_type = other DNA
tgacttagaatgcacagcctggccaaacctggcccacgagccccgggagggcagctctgagtgtggcagcctccgcccccccccagccccagtcaccctggatgggctgc

SEQ ID NO: 3357 - DNA, 110 bp, synthetic construct
  source 1..110: mol_type = other DNA
tacgtgggtgggatgggacagggcgtgtttcaaatctccagagcttgcttgtcttgcctgtggcctccatgcacacacaggtccctcaggagcatcctaaacaattctgc

SEQ ID NO: 3358 - DNA, 110 bp, synthetic construct
  source 1..110: mol_type = other DNA
ggccccaaggccacatatttggcatctggttgtctctggtcctggctgagatcgctgaaagagagtgcctgtagcgacagcttgggaacagccaaagctaacacattggt

SEQ ID NO: 3359 - DNA, 110 bp, synthetic construct
  source 1..110: mol_type = other DNA
gtaaatatacccaagaaaataaatccacggtctgtcttcagggcagagtagctggaagcagagatgcctttctgcacattatgaattttggaccaatgtgccaaaaagtt

SEQ ID NO: 3360 - DNA, 110 bp, synthetic construct
  source 1..110: mol_type = other DNA
gaatcaggctcaccaataagaggcctttgtgtgtgaactggaagtgggactgcacagaggccagctgtgctgctcttcttccatggctcacgtcaacagatcgcagcatc

SEQ ID NO: 3361 - DNA, 110 bp, synthetic construct
  source 1..110: mol_type = other DNA
aaaactgctcaaaatccccaaagggctttcctagcaacaaaaatccatgagaatagaattccccccaagctccagtgagcaaaggcccgtgccatggagaggcaggggag

SEQ ID NO: 3362 - DNA, 110 bp, synthetic construct
  source 1..110: mol_type = other DNA
ggcaggtgcttttggctcaagacagaactttcaccacgagaaagaaaattgcaactgaaggtctgcatgtagcctgctcaccatgccctaatgttgggtcacacattcat

SEQ ID NO: 3363 - DNA, 110 bp, synthetic construct
  source 1..110: mol_type = other DNA
acaagttctcatgtgcactgggacctggggcaggcagcaactccatagcagcaagacctacttgtgggtcttggagggtctcctaaggttggggggtggtcagctatggc

SEQ ID NO: 3364 - DNA, 110 bp, synthetic construct
  source 1..110: mol_type = other DNA
acctacttgtgggtcttggagggtctcctaaggttggggggtggtcagctatggccaactgtgagagcaaggacattggtggcagaaccccaggaaataatcaatgtgag

SEQ ID NO: 3365 - DNA, 110 bp, synthetic construct
  source 1..110: mol_type = other DNA
tcctgagtttcagacactgacatcccaaggcctccggtttaggaggtgctgtttcccgaagctaatcatgggctgctgtgtgcatttctgtgaacctgcttcagtgaccc

SEQ ID NO: 3366 - DNA, 110 bp, synthetic construct
  source 1..110: mol_type = other DNA
atcccagctaattcagtttaattagccaggtgaaccaaatttttggatgttatccagtagctgaccagtcttcgcatcattgattttcgatttgggaatcttgagaggga

SEQ ID NO: 3367 - DNA, 110 bp, synthetic construct
  source 1..110: mol_type = other DNA
agtagctgaccagtcttcgcatcattgattttcgatttgggaatcttgagagggaaagaaaatctgtaatttccctttggacactgcgcttttctcgaggatgaatctcc

SEQ ID NO: 3368 - DNA, 110 bp, synthetic construct
  source 1..110: mol_type = other DNA
aatatttttcagcgataagaaagaatgtgctatcaagcttcaaaaaggcacaggtgaatcttaaatgcatattgctaaatcagagaagttcatctaaaaaatgtttaggt

SEQ ID NO: 3369 - DNA, 110 bp, synthetic construct
  source 1..110: mol_type = other DNA
tgagcaaagagaagatgcagggctctgaggccagcatgcccaacctgtgaagaacacatgaacctctggaggagctggcagattgggacaggaggtgcaagagcttggga

SEQ ID NO: 3370 - DNA, 110 bp, synthetic construct
  source 1..110: mol_type = other DNA
acatgaacctctggaggagctggcagattgggacaggaggtgcaagagcttgggagccttcaaggacttggcctttatgctgaggaagggagagggccattgctagcact

SEQ ID NO: 3371 - DNA, 110 bp, synthetic construct
  source 1..110: mol_type = other DNA
ccttcaggcttgtggaacacctaggctcatggtttattttaataactggagagcttaatgagtcctagataggccatgagtttcagcagcatgtgaagcactttaacaaa

SEQ ID NO: 3372 - DNA, 110 bp, synthetic construct
  source 1..110: mol_type = other DNA
taatgagtcctagataggccatgagtttcagcagcatgtgaagcactttaacaaaacagaagaaaaattataattcttagtgttatctctctataactccttgaagcagg

SEQ ID NO: 3373 - DNA, 110 bp, synthetic construct
  source 1..110: mol_type = other DNA
ggcatggtgccagcattccatgcatagcagataccaaggttctgcccatggcacgtctgcttaggtgcagtgaccaaggttgaagctcagcaggatcctgtgagaccatc

SEQ ID NO: 3374 - DNA, 110 bp, synthetic construct
  source 1..110: mol_type = other DNA
aggtagttagtactctggccagccctgcaaagttttcaagagattgaaatgcacgttggagcagttagggagctttcccctgctactaaaccagaaaaatgagacacatc

SEQ ID NO: 3375 - DNA, 110 bp, synthetic construct
  source 1..110: mol_type = other DNA
ttggagcagttagggagctttcccctgctactaaaccagaaaaatgagacacatcccaggaggtgtgacacacaagccaaatcaccaacaccttccccactgttccactg

SEQ ID NO: 3376 - DNA, 110 bp, synthetic construct
  source 1..110: mol_type = other DNA
ttttatatttttaagattaaaatgaaataattggctccatgagcttctaatatggatggacagcagacaacatgtttaaatggacaagtggcccttgctaagcagagacc

SEQ ID NO: 3377 - DNA, 110 bp, synthetic construct
  source 1..110: mol_type = other DNA
atggacagcagacaacatgtttaaatggacaagtggcccttgctaagcagagaccaggacacttctgaagacctctgacaccagaaggccttgttcacatttagtggctt

SEQ ID NO: 3378 - DNA, 110 bp, synthetic construct
  source 1..110: mol_type = other DNA
aggctcctctcagccagaattggccatagggaatcttcacagccagaggaaaaacagagcttcttgcaatgagctaggtgttctatttgtaattttgtgtgactgtttgc

SEQ ID NO: 3379 - DNA, 110 bp, synthetic construct
  source 1..110: mol_type = other DNA
agagcttcttgcaatgagctaggtgttctatttgtaattttgtgtgactgtttgccttccctcacaattcaccaggatgtcttcagataaaacttaagcacattctgagt

SEQ ID NO: 3380 - DNA, 110 bp, synthetic construct
  source 1..110: mol_type = other DNA
cctaagaacagcaggagggtgaaatgactcagctctgctaagaagcagatggagggaaggcttttggaggctgtcttggccccactttctcctggtgctgaagccccacg

SEQ ID NO: 3381 - DNA, 110 bp, synthetic construct
  source 1..110: mol_type = other DNA
gaaggcttttggaggctgtcttggccccactttctcctggtgctgaagccccacgggcagttatgactgagcctgaccctaccccaagggataacagtgcaatatgctgt

SEQ ID NO: 3382 - DNA, 110 bp, synthetic construct; identical to SEQ ID NO: 3380
  source 1..110: mol_type = other DNA

SEQ ID NO: 3383 - DNA, 110 bp, synthetic construct; identical to SEQ ID NO: 3381
  source 1..110: mol_type = other DNA

SEQ ID NO: 3384 - DNA, 110 bp, synthetic construct
  source 1..110: mol_type = other DNA
aaagaaaagaatttttagccacttgatgctgccagatatataaaaattagattcttggaccattctggagtggtcctgggaagcatcctaagccctcaattgggacccct

SEQ ID NO: 3385 - DNA, 110 bp, synthetic construct
  source 1..110: mol_type = other DNA
tggaccattctggagtggtcctgggaagcatcctaagccctcaattgggaccccttggggagctatgtccaaggcttgctggaaaggtgttggtaccagagcccaactga

SEQ ID NO: 3386 - DNA, 110 bp, synthetic construct
  source 1..110: mol_type = other DNA
attaaaattaagggcatgtgcgcattcacctgaactgtagaccagatgcttagaatatgagcctattaaagagtcagtcactatttttagccatggaagttcattgttaa

SEQ ID NO: 3387 - DNA, 110 bp, synthetic construct
  source 1..110: mol_type = other DNA
tatgagcctattaaagagtcagtcactatttttagccatggaagttcattgttaaccttccacaataacagtaaacactagcactaaatattcagtgcctatgtgctaat

SEQ ID NO: 3388 - DNA, 110 bp, synthetic construct
  source 1..110: mol_type = other DNA
cactaactctctgcatggtcaaaaatcagcattttaactacgcagtccttccatatccatggttccacatctgtggattcaaccaaccacagattgtgttatactctagt

SEQ ID NO: 3389 - DNA, 110 bp, synthetic construct
  source 1..110: mol_type = other DNA
tgaaaaggactcccatagatagaagggcatgaaggtgattacaaagtatttcttaacacaggataacctcagcttcagtagcgtgtaagaagtggttcctctataggtgg

SEQ ID NO: 3390 - DNA, 110 bp, synthetic construct
  source 1..110: mol_type = other DNA
acacaggataacctcagcttcagtagcgtgtaagaagtggttcctctataggtggaccagaatggacaatagcattatctggagagaaaagtgactttgcagggagacca

SEQ ID NO: 3391 - DNA, 110 bp, synthetic construct
  source 1..110: mol_type = other DNA
ctccaattatttccagttttgaagctggtgcccgccaacaggctggctgctagtgccctccagccctccttttcccccttccctctggccacttccctcctccccctccg

SEQ ID NO: 3392 - DNA, 110 bp, synthetic construct
  source 1..110: mol_type = other DNA
tttgtaggttgcttttaatttaaaaattatcagacttctgatttcagccctgacatgttaaaggagcttggaagcagtcactactatccctacaagaacaaaaaatctga

SEQ ID NO: 3393 - DNA, 110 bp, synthetic construct
  source 1..110: mol_type = other DNA
tgttaaaggagcttggaagcagtcactactatccctacaagaacaaaaaatctgaagaaagtgaaagttaatagaatctttttggatccatcagacaactgaggtcaccc

SEQ ID NO: 3394 - DNA, 110 bp, synthetic construct
  source 1..110: mol_type = other DNA
gtgtgtcattcttcatttgtatattttccttcaaccaatcctatagatacctataatgcctacctatagacagcattcaatattggttgaaagaaaaatgaatgaagaaa

SEQ ID NO: 3395 - DNA, 110 bp, synthetic construct
  source 1..110: mol_type = other DNA
tctgaccaggtttaatttactggatgtggaatcaacagcaacatggacacccaagaaaagcaataatgaattagatctaccaacgttttttgttttttttttcaaggagc

SEQ ID NO: 3396 - DNA, 110 bp, synthetic construct
  source 1..110: mol_type = other DNA
aaaagcaataatgaattagatctaccaacgttttttgttttttttttcaaggagctttgagaatattggggtatgatgaaaatgaggagttgaaaacagatgccatacaa

SEQ ID NO: 3397 - DNA, 110 bp, synthetic construct
  source 1..110: mol_type = other DNA
atgcaggtgggctcaatcccacccctgcccttttccccccacagcttcaggccaggtgctctagcctcagcttagtgtccttttctgtacagtgggatgcggaggggggg

SEQ ID NO: 3398 - DNA, 110 bp, synthetic construct
  source 1..110: mol_type = other DNA
gtgctctagcctcagcttagtgtccttttctgtacagtgggatgcggaggggggggggcgtgtccgcatgtgcactcatgtgcacacatgtgctaggaaactctagttct

SEQ ID NO: 3399 - DNA, 110 bp, synthetic construct; identical to SEQ ID NO: 3397
  source 1..110: mol_type = other DNA

SEQ ID NO: 3400 - DNA, 110 bp, synthetic construct; identical to SEQ ID NO: 3398
  source 1..110: mol_type = other DNA

SEQ ID NO: 3401 - DNA, 110 bp, synthetic construct
  source 1..110: mol_type = other DNA
tacattctcagatgctcgcagaaaagctccaggttaggccttcaaatctcagatgtaatcttgctatctgacacacaatttgtctgacaatgaatttccacctctgctaa

SEQ ID NO: 3402 - DNA, 110 bp, synthetic construct
  source 1..110: mol_type = other DNA
gagaactcctactcctttccttctttaagagaattcttgacatttctttatgtgttattcattctacaaagtcattcatcatcgtctcctagattttgataaaaggagct

SEQ ID NO: 3403 - DNA, 110 bp, synthetic construct
  source 1..110: mol_type = other DNA
tattcattctacaaagtcattcatcatcgtctcctagattttgataaaaggagctttgcatatggcatttttgatagcttgaaaagagatgacaatgtcagcaggtattt

SEQ ID NO: 3404 - DNA, 110 bp, synthetic construct
  source 1..110: mol_type = other DNA
aaaatgctgggcaccctagtgccaaaataaaaagggcctttcttttctgggctacttatgccctctctaggaggctagctcttcctaggtaattgtttttcaatgtcttt

SEQ ID NO: 3405 - DNA, 110 bp, synthetic construct
  source 1..110: mol_type = other DNA
gctgcccctcagtatggaaggaactcccccagtgcagggactgtcctctggatgtcttgtgggcatgattctcgattccctgcatggttaccccccacccttcccaagtt

SEQ ID NO: 3406 - DNA, 110 bp, synthetic construct
  source 1..110: mol_type = other DNA
cttgtgggcatgattctcgattccctgcatggttaccccccacccttcccaagttaatcaggaccttgaattgctgccaagcttttaagcaaattgcttcctagcaaatg

SEQ ID NO: 3407 - DNA, 110 bp, synthetic construct
  source 1..110: mol_type = other DNA
cacaaccatctggccttcattgtctccctagaagcttaaggtatgatgagaggtttttagtttaagaaagtcctgggcattttatggagtccaaactggatttgctgtaa

SEQ ID NO: 3408 - DNA, 110 bp, synthetic construct
  source 1..110: mol_type = other DNA
ggggagaggaatttgtgtatttttggagaagagttttgtgaaagctattaaaaatttaatgaacacagccttatatataataactctactccaagaattagtgaatttcc

SEQ ID NO: 3409 - DNA, 110 bp, synthetic construct
  source 1..110: mol_type = other DNA
aacctcatgtgtaactctgtctggaagctgattccatgccacattagcccatgtcatgttctgtggaagttggttgggtgaatggatctgctcccaatgtctaccttgct

SEQ ID NO: 3410 - DNA, 110 bp, synthetic construct
  source 1..110: mol_type = other DNA
actttttccagctctttctgcagctatgatcccactcctgattaagctatttctatgtcatactgcacaaaagaaacaaggagggtcatttagctttgatgctaactgtc

SEQ ID NO: 3411 - DNA, 110 bp, synthetic construct
  source 1..110: mol_type = other DNA
aatatttatgtcaattaggtttgtcctacactttagcttctctctcctttgaagtcagcttgttcatctggctctttctctgtggttggtagtcttcctcaactgtggga

SEQ ID NO: 3412 - DNA, 110 bp, synthetic construct
  source 1..110: mol_type = other DNA
gtagccttttgggaaaaaattgttaaaaatacacagacctctcccagtttagggatttgcccatttgtgagaacgctataccaaccagtgaattaagttagaagatagtg

SEQ ID NO: 3413 - DNA, 110 bp, synthetic construct
  source 1..110: mol_type = other DNA
aatatttgaaaatgaacccattatcagccagagtgtgaggtaacctgtgctcaggacaactgtcagagggccaagactggccccatgactcttgcagccttgccaagaag

SEQ ID NO: 3414 - DNA, 110 bp, synthetic construct
  source 1..110: mol_type = other DNA
aagcccaggaatgaccagaggacctttaaagaaactaatcacgacaaaacagaaacaagaagtagcttcaggaaatgatgatttctgtttacaaaattagaatgtaaact

SEQ ID NO: 3415 - DNA, 110 bp, synthetic construct
  source 1..110: mol_type = other DNA
caagaagtagcttcaggaaatgatgatttctgtttacaaaattagaatgtaaactgtggaaatcttattgtgtcaatatttttaactttggtgtggtgaatagcatgttc

SEQ ID NO: 3416 - DNA, 110 bp, synthetic construct
  source 1..110: mol_type = other DNA
tcggcttggattgttatatccaagcctacctgactgctggttatctagactcagtgaagttaagatacagatgttagctaacctgatacatgacagaaaaggaaatccat

SEQ ID NO: 3417 - DNA, 110 bp, synthetic construct
  source 1..110: mol_type = other DNA
gtagggctacatgttctttggggtcagtacatggggaaaaaacatcaatttgcctcagttatttaggccatggtgaaactcttggccaaaagccttctagaaagacacaa

SEQ ID NO: 3418 - DNA, 110 bp, synthetic construct
  source 1..110: mol_type = other DNA
agattaattgaccagcaaacttattccagtgctgttgtccatcaagctatatatatcaggtggtatatatacatcaggtggtatgtagggttttttgagaatgtaagctt

SEQ ID NO: 3419 - DNA, 110 bp, synthetic construct
  source 1..110: mol_type = other DNA
gagttaccattgtggctcagccttttaagaacccaacttgtaactatgaggatgcaggttctattcctggccttgctcagcgggttaaaggtcctggcattgctgcaggc

SEQ ID NO: 3420 - DNA, 110 bp, synthetic construct
  source 1..110: mol_type = other DNA
acttgtaactatgaggatgcaggttctattcctggccttgctcagcgggttaaaggtcctggcattgctgcaggctgcagtatagattgcaaatgtggcttggatctggc

SEQ ID NO: 3421 - DNA, 110 bp, synthetic construct
  source 1..110: mol_type = other DNA
aactcctgcaaatatccttaaccaaatgttatccagctatatatagagagagagattatatagtgcagctagggaatattaattttagaaaggcaagacaggttcagcat

SEQ ID NO: 3422 - DNA, 110 bp, synthetic construct
  source 1..110: mol_type = other DNA
aaaaatttagtttcttgccagcattcactacaagtaatactaaggaaaccttatcaggctgaagggaattgatactagaaaagatcttgataatgcagtagtggagggaa

SEQ ID NO: 3423 - DNA, 110 bp, synthetic construct
  source 1..110: mol_type = other DNA
caaacaacatgatagacagacacacacacacatattaaaaaaaaaaacaaaccaaccatctctgggagaacaccctaatgttgctaaggccaaggaacttagttctacaa

SEQ ID NO: 3424 - DNA, 110 bp, synthetic construct
  source 1..110: mol_type = other DNA
tttcaaagggagacactggttaaaactctgacttcactttagaagtggtcctcttagaaaaatgtgtaaccgttgcttcccttccatttggagcacactcttgagcaaag

SEQ ID NO: 3425 - DNA, 110 bp, synthetic construct
  source 1..110: mol_type = other DNA
cagtacttccaaaccactaatttcccattttcccatgtcatcgtcaatctggtttagatatcctctcgtccaattgtcatcctagtcttatcatcatactaaaaatcctt

SEQ ID NO: 3426 - DNA, 110 bp, synthetic construct
  source 1..110: mol_type = other DNA
gcccagagaatctgtgtgagatgataaatgtttattgttgcaagctgccaaatatgggagtaatctgttatgctgaaatagacgactgttaagactatgtatttgcatgt

SEQ ID NO: 3427 - DNA, 110 bp, synthetic construct
  source 1..110: mol_type = other DNA
tttctcattgtaagccctatttttccatgttcattaaaacaaaggattttagggagctcccattgtagctaagcaaaaacaaacccaactagtattcatgaggatgtggg

SEQ ID NO: 3428 - DNA, 110 bp, synthetic construct
  source 1..110: mol_type = other DNA
ccaccacctcaaaccatcacattggggtttaggattcttttttctttttttggcctcacctgcagcatgtggaagtttctggggtagagatcgaatccaagccacactgt

SEQ ID NO: 3429 - DNA, 110 bp, synthetic construct
  source 1..110: mol_type = other DNA
gatggcaaagttaccacctaaaaatgtgcctgacccaagctctgtactccaccatcaggccactgaactctgggtggaactatccctaaacctggccccgccccctccca

SEQ ID NO: 3430 - DNA, 110 bp, synthetic construct
  source 1..110: mol_type = other DNA
tggttaaatagcgatatgtttcagtgtctggagaagaaggaactctgggaaaactgtcaagggctgctctgctgggcatctggcctttaagtcaggcaggactgcaggtg

SEQ ID NO: 3431 - DNA, 110 bp, synthetic construct
  source 1..110: mol_type = other DNA
gtcaagggctgctctgctgggcatctggcctttaagtcaggcaggactgcaggtgaggggcccatcctgtccctttcatagccctccttgtgaggagggggaacagaagg

SEQ ID NO: 3432 - DNA, 110 bp, synthetic construct
  source 1..110: mol_type = other DNA
aagctcttacccagtccctgattgcctcccttgacctagagttaatgcagtttcacatcttaacacctccattaaaaagacaatagccagggatagcttgatatgcagag

SEQ ID NO: 3433 - DNA, 110 bp, synthetic construct
  source 1..110: mol_type = other DNA
catcttaacacctccattaaaaagacaatagccagggatagcttgatatgcagagggatctgacctgccatgcccctcttttacttttctttctttcttttttttttttt

SEQ ID NO: 3434 - DNA, 110 bp, synthetic construct
  source 1..110: mol_type = other DNA
ccatcctcattcccccctttgcagacttcaactctcatgcaaagcctgcattttgcaaccctctggaaactacaagcacataattgtgaactgtttctcttaaaaggaac

SEQ ID NO: 3435 - DNA, 110 bp, synthetic construct
  source 1..110: mol_type = other DNA
caaccctctggaaactacaagcacataattgtgaactgtttctcttaaaaggaaccagagctaagacccttatgggtgcatccaccatccttggagctgtctattcagat

SEQ ID NO: 3436 - DNA, 110 bp, synthetic construct
  source 1..110: mol_type = other DNA
aactcttgtcaaattgtttcctacatagcttatcttccccatctgaaatggaagtcagtccttggatttccacctgtgaatgtcaagatttgtgaatcatgatttaagca

SEQ ID NO: 3437 - DNA, 110 bp, synthetic construct
  source 1..110: mol_type = other DNA
atttccactgggccatgacgggaactctgacatacatcactttataagcttagggcatacagtataaaggtctgacttgcacatactgccgaatgattatcacaagttta

SEQ ID NO: 3438 - DNA, 110 bp, synthetic construct; identical to SEQ ID NO: 3437
  source 1..110: mol_type = other DNA

SEQ ID NO: 3439 - DNA, 110 bp, synthetic construct
  source 1..110: mol_type = other DNA
tgcccttctttgagaatcataaaacaagaattttaacagccaagtatgtgagggcagtggagagaaacttacatcaattaagaatctgattctaatatactttttagatc

SEQ ID NO: 3440 - DNA, 110 bp, synthetic construct
  source 1..110: mol_type = other DNA
gtctctcccagtggccagggcaggacagttttgcctatatacacttctctttgccacagtggagggagatttgtcccctcccagcaaaggacaggtgtaaacagtggggt

SEQ ID NO: 3441 - DNA, 110 bp, synthetic construct
  source 1..110: mol_type = other DNA
gttctctctagtaaatccatgagttctgaatgataccaaggaaaacaaaacacaaaaaagcctaattggtcacctttggagagtgattttttgaactttggtcagtaatg

SEQ ID NO: 3442 - DNA, 110 bp, synthetic construct
  source 1..110: mol_type = other DNA
catggtgatggtagtaatttacattcccaccaacagttccagaggcctgaagtctgagattaggactggttccttcagggaaagtcttccttgtgtctctgccacagctt

SEQ ID NO: 3443 - DNA, 110 bp, synthetic construct
  source 1..110: mol_type = other DNA
tgcaccccaggaggaggtgggggtcctccagcttcaggatgcacaagaccccccgggggctagcgtggagtgctaatttctgggctgctgggtacaggactctggtgcca

SEQ ID NO: 3444 - DNA, 110 bp, synthetic construct
  source 1..110: mol_type = other DNA
gaacatatgatatacacacatatacatatgcatacacacacacacacacagagccataaaaaagaatgaaacaatgccctttgcagaaacatggatggacttggagggaa

SEQ ID NO: 3445 - DNA, 110 bp, synthetic construct
  source 1..110: mol_type = other DNA
acacatatacatatgcatacacacacacacacacagagccataaaaaagaatgaaacaatgccctttgcagaaacatggatggacttggagggaattatgtttaagtgaa

SEQ ID NO: 3446 - DNA, 110 bp, synthetic construct
  source 1..110: mol_type = other DNA
ctagcagagctgctagcaaggacataagacacatagttggtacaagattacaagaagggtggtgcggggccagcttgtagctgcctccccagcccggggtaggattgtgg

SEQ ID NO: 3447 - DNA, 110 bp, synthetic construct; identical to SEQ ID NO: 3446
  source 1..110: mol_type = other DNA

SEQ ID NO: 3448 - DNA, 110 bp, synthetic construct
  source 1..110: mol_type = other DNA
ataatcaggatattgattacagtctgagcaactagctgtctacaactcacttcatggcacattaaccaactgacaggggttacaagttaactacccaagccatatataga

SEQ ID NO: 3449 - DNA, 110 bp, synthetic construct
  source 1..110: mol_type = other DNA
ggcacattaaccaactgacaggggttacaagttaactacccaagccatatatagagatacacagagacagagtctaggactccatccaaggcaagggtgggaatacctgc

SEQ ID NO: 3450 - DNA, 110 bp, synthetic construct
  source 1..110: mol_type = other DNA
gtttattttcacttcccctgctgtagcaggggccccaaataaagtcttgcctggattttcctgtccaacttcttatcaatacttattgattaaggaaggccaagaaccca

SEQ ID NO: 3451 - DNA, 110 bp, synthetic construct
  source 1..110: mol_type = other DNA
catacaaacaggaatgaaaggagagctggagtgtataaactaacatcggacaaaatagactttaagaaaaaaaatgctacaatagacaaagatgaacagtatatcataat

SEQ ID NO: 3452 - DNA, 110 bp, synthetic construct
  source 1..110: mol_type = other DNA
gaaaggagagctggagtgtataaactaacatcggacaaaatagactttaagaaaaaaaatgctacaatagacaaagatgaacagtatatcataataaaagcccaatccat

SEQ ID NO: 3453 - DNA, 110 bp, synthetic construct
  source 1..110: mol_type = other DNA
aagagcaggctgtaattatcagttgaagctatcaaagtcaggtcagtaaactgtctaaacgcagaaagagaattcaggtaggccagaacctggctggccatggcagggac

SEQ ID NO: 3454 - DNA, 110 bp, synthetic construct
  source 1..110: mol_type = other DNA
catcacatcacacatattctttctctatgccaggcttctttaacttgaccgtatgtttttggaaattgattcttatctgtatatctagacccaaatcatttttagaattg

SEQ ID NO: 3455 - DNA, 110 bp, synthetic construct
  source 1..110: mol_type = other DNA
tctgtgataacaatacaccaaggtgacctttgtattcacggagcttacagtctaatgggagaacaggatgatcaaaaagtttcataacacacacacacaaagggagttcc

SEQ ID NO: 3456 - DNA, 110 bp, synthetic construct
  source 1..110: mol_type = other DNA
caattgctgctaatattcatacctaacagctcctcgaacattatctccatatcttggtttttagatgtaacatcaaaaaattttccttaactttctttcccagttacata

SEQ ID NO: 3457 - DNA, 110 bp, synthetic construct
  source 1..110: mol_type = other DNA
gatcctcagtctcaaggacaactgttaggttcaggctgagttccaacccttgcgttttcctctgcagctgatgcctcttgcaggatcccgcgggtttgctctgcattgta

SEQ ID NO: 3458 - DNA, 110 bp, synthetic construct
  source 1..110: mol_type = other DNA
agcagggagttccctcatagtgcagtgggttaaggcattgtaactgcagtggccagggtcactattgtggcgtgagttcagtccctggtccaggaacctacatatactgt

SEQ ID NO: 3459 - DNA, 110 bp, synthetic construct
  source 1..110: mol_type = other DNA
cattttacagccacagaaaactaacacaccctttctgctgctcttcctcatttcgaatgttccaagtttccttctgttttcatttcctttctgtctgaagaatttccgtt

SEQ ID NO: 3460 - DNA, 110 bp, synthetic construct
  source 1..110: mol_type = other DNA
ggaggcccttccagccagtgtgggccctgcctctgctggtgcagtggtggccacggtagcatcacctgccctcccaggctggactatgccctctccatggtgacagtcaa

SEQ ID NO: 3461 - DNA, 110 bp, synthetic construct
  source 1..110: mol_type = other DNA
ttgttatggcagcctgagcaaagaaacacagccatcccctggttacctgagacatgcagcgtagacggctcagcagttggggtggatttcatctgagccctattgaaccc

SEQ ID NO: 3462 - DNA, 110 bp, synthetic construct
  source 1..110: mol_type = other DNA
cacatttctctactttctcacagtggatggcatttgacacctgcctgaatcacggcaggaagcttctgctgaaacacgctttgtagttaagtggcagcatcttgctttat

SEQ ID NO: 3463 - DNA, 110 bp, synthetic construct
  source 1..110: mol_type = other DNA
tcatatcagaaacacacagctcttgtgtgtgtggaacatcctggagactgtctaaggcctcctccctggtctcggactttgcaggactgtccacactctggggaacatgc

SEQ ID NO: 3464 - DNA, 110 bp, synthetic construct
  source 1..110: mol_type = other DNA
aactgtaagaaataatacacagaggtccatggtgacctctcctgaaaccactgtacagtatcacagacaggatactgatgctaataacagtcaagatacagaacagaatc

SEQ ID NO: 3465 - DNA, 110 bp, synthetic construct
  source 1..110: mol_type = other DNA
cagtatcacagacaggatactgatgctaataacagtcaagatacagaacagaatcacaaaagatcattcatgttgcctttttattgccacaaccactcctaccccatccc

SEQ ID NO: 3466 - DNA, 110 bp, synthetic construct
  source 1..110: mol_type = other DNA
aggggaccaagcacatggtagagaaaccaggggaggccagagctggaacctggagagtgggagccccaagggaggagtacacgtgttccccaagactcaggccagggtga

SEQ ID NO: 3467 - DNA, 110 bp, synthetic construct
  source 1..110: mol_type = other DNA
agtgggagccccaagggaggagtacacgtgttccccaagactcaggccagggtgagcttctaataggaaataggcaaagacagggtatttgttgagaaagtaaaataggg

SEQ ID NO: 3468 - DNA, 110 bp, synthetic construct
  source 1..110: mol_type = other DNA
agagtgagatataaggggcccgaggtaggaagagcctggatctgtcgcctcgagcgtgattagagcgccaggcgctgagagctaagcccctccttctctgccaggagcat

SEQ ID NO: 3469 - DNA, 110 bp, synthetic construct
  source 1..110: mol_type = other DNA
tgcacttccgctctctggggcctgaatcctgtgctttctcatcctgcgtcccctcaaggtgccccattgagaggtggctgcacgtctgatggtgtgatggtgggcatcct

SEQ ID NO: 3470 - DNA, 110 bp, synthetic construct
  source 1..110: mol_type = other DNA
aaggtgccccattgagaggtggctgcacgtctgatggtgtgatggtgggcatcctgtttccatcttgagttccttctgggctcgctgtctgggcagctgtaatgggatgg

SEQ ID NO: 3471 - DNA, 110 bp, synthetic construct
  source 1..110: mol_type = other DNA
aagacacatgtgcacacacacataaattgaacataaaaataaaattctggtcatttaaaaacactgttaacggtggaaagctcagtaagcagaatctagataacgatacc

SEQ ID NO: 3472 - DNA, 110 bp, synthetic construct
  source 1..110: mol_type = other DNA
taaaaacactgttaacggtggaaagctcagtaagcagaatctagataacgatacctaggttccagacctagataaccatagtaaaactccaaaagagggagttcccttca

SEQ ID NO: 3473 - DNA, 110 bp, synthetic construct
  source 1..110: mol_type = other DNA
gccgccccaccaagcatggcaaggggagaggaagtgaaacaaggaggagctagggccggcttcttggatgggtttgcacctcgagcagcagagctgccacgcgggggaca

SEQ ID NO: 3474 - DNA, 110 bp, synthetic construct
  source 1..110: mol_type = other DNA
ccggcttcttggatgggtttgcacctcgagcagcagagctgccacgcgggggacagtatggatacactgccgactcagggtctctggagaggtccaggtacccagaggga

SEQ ID NO: 3475 - DNA, 110 bp, synthetic construct
  source 1..110: mol_type = other DNA
ctgtctctcccacagccctactgccctgccagatgccaagcaggtgctcaagaagaatttgctgactgactagctctttaagcccctggttcttcagagaagcaaagaag

SEQ ID NO: 3476 - DNA, 110 bp, synthetic construct
  source 1..110: mol_type = other DNA
aatttgctgactgactagctctttaagcccctggttcttcagagaagcaaagaagaggcaacacacaaaccagggctgagaggagcatggagggagccacatggctcaaa

SEQ ID NO: 3477 - DNA, 110 bp, synthetic construct; identical to SEQ ID NO: 3475
  source 1..110: mol_type = other DNA

SEQ ID NO: 3478 - DNA, 110 bp, synthetic construct; identical to SEQ ID NO: 3476
  source 1..110: mol_type = other DNA

SEQ ID NO: 3479 - DNA, 110 bp, synthetic construct
  source 1..110: mol_type = other DNA
gttactcagttgagttaggggtggacatgggggcccatgactcgtctctcggctttttttctgaaacacagactgagagaccgaatcctagaaaagtgcactgaaaaaag

SEQ ID NO: 3480 - DNA, 110 bp, synthetic construct
  source 1..110: mol_type = other DNA
tttttctgaaacacagactgagagaccgaatcctagaaaagtgcactgaaaaaagtgcacggtgatctttcagggagggagctgtcagggaatcatttttctctttgttt

SEQ ID NO: 3481 - DNA, 110 bp, synthetic construct
  source 1..110: mol_type = other DNA
tgtgcctgcagggagagcaggcctgggggccaagcccaaccccaacagttagaagccctgtgacctggtcctttgctttgctggggctcatctgccttgtctgccaagtg

SEQ ID NO: 3482 - DNA, 110 bp, synthetic construct
  source 1..110: mol_type = other DNA
ccctgtgacctggtcctttgctttgctggggctcatctgccttgtctgccaagtggaaaaagtatttcaagtcgtcctaaagtggaaatgatcaaagtaaacaccctgac

SEQ ID NO: 3483 - DNA, 110 bp, synthetic construct
  source 1..110: mol_type = other DNA
ttcaccagaaatgcttcaggataatctgggagcaataaatacttagttttgtgagtttacataaattaaaatcgaaatgtcatgaatgtcatgagagataagtcatcaca

SEQ ID NO: 3484 - DNA, 110 bp, synthetic construct
  source 1..110: mol_type = other DNA
tttacataaattaaaatcgaaatgtcatgaatgtcatgagagataagtcatcacaagttccacaaatttctaacagtttttatggcctcaggataagaactcaagatctc

SEQ ID NO: 3485 - DNA, 110 bp, synthetic construct
  source 1..110: mol_type = other DNA
aacctgcatcctcacaggcactatggtgggttcttagtgcacaacaggaacttcctaaatagcactttttaatgagggcatacatagcctacagaatttctggcacaagc

SEQ ID NO: 3486 - DNA, 110 bp, synthetic construct
  source 1..110: mol_type = other DNA
taaatagcactttttaatgagggcatacatagcctacagaatttctggcacaagcacatcaggagtaacatacaatcggactgatcattacagcagtaattgagaacaat

SEQ ID NO: 3487 - DNA, 110 bp, synthetic construct
  source 1..110: mol_type = other DNA
tgaggctgtcccactatattcccaagagaagggagggcagtggcgggagggggtgcttgttaccgacccaggccctgggacccatcaatcaggagaaattgataagaggc

SEQ ID NO: 3488 - DNA, 110 bp, synthetic construct
  source 1..110: mol_type = other DNA
ctctcttttcccaccctgcaggtggctgcccagggaaggccagacggacattattggaggatgatggcaggtccatcacttttgctcagattcaacacctgagaaagctc

SEQ ID NO: 3489 - DNA, 110 bp, synthetic construct
  source 1..110: mol_type = other DNA
attcctcttcttcttttgcttgtgagaagtaacttttcttcctgcaaacaggatcataaaacatcaacttctttttccattgcttttttcggaagaaaagaattagcaaa

SEQ ID NO: 3490 - DNA, 110 bp, synthetic construct
  source 1..110: mol_type = other DNA
ataaaacatcaacttctttttccattgcttttttcggaagaaaagaattagcaaaagcaggtagcttgttaggaacagattatgcgtcgaaggaatgtccagagcttagc

SEQ ID NO: 3491 - DNA, 110 bp, synthetic construct
  source 1..110: mol_type = other DNA
tccccaagtagggccacatgtgtactcctgtaataagctgcatgcccccagccccttgcaggacagagattttctatgagctatgttcacctttcacacagttgttccac

SEQ ID NO: 3492 - DNA, 110 bp, synthetic construct
  source 1..110: mol_type = other DNA
ttgcaggacagagattttctatgagctatgttcacctttcacacagttgttccacaagaaccatatctatttcccatataaagatgccatgttctgtttttctaagggca

SEQ ID NO: 3493 - DNA, 110 bp, synthetic construct
  source 1..110: mol_type = other DNA
caggagccagaaactccgatgcctagtggtccttgggatgggaatggaggtccaagctccaacactgagggacaaagcactgatgccacttggcgtctacagagctgaga

SEQ ID NO: 3494 - DNA, 110 bp, synthetic construct
  source 1..110: mol_type = other DNA
gggtgtggcctaagatgacgacaacaacaacaacaaaaaagttattgaagctatggaaatgttcagattggatcaatgattagaccaaggttatgtcagcatgcacagat

SEQ ID NO: 3495 - DNA, 110 bp, synthetic construct
  source 1..110: mol_type = other DNA
gaaatgttcagattggatcaatgattagaccaaggttatgtcagcatgcacagatactttgtgatgaaactgaaattctgacttcaaaggacgatgtcctgttaacaccc

SEQ ID NO: 3496 - DNA, 110 bp, synthetic construct
  source 1..110: mol_type = other DNA
gtagagccagctggggccgtaattgctgtgaaattacggcctggatggccgagagggagcgcccagcctccaagggccttgttttccaccccgtcaggttttcacccagc

SEQ ID NO: 3497 - DNA, 110 bp, synthetic construct
  source 1..110: mol_type = other DNA
ctctgagaattctatagacatccagagaaagtgaagtctgtctatgagttctaggttctagaaggttcctttctggtccctcctcctgagtatgaggttgttgggaaaag

SEQ ID NO: 3498 - DNA, 110 bp, synthetic construct
  source 1..110: mol_type = other DNA
ttctagaaggttcctttctggtccctcctcctgagtatgaggttgttgggaaaagcgtcttgtggcttctgtgtgagaaccacctgctggacctacctggtgtcaggggg

SEQ ID NO: 3499 - DNA, 110 bp, synthetic construct
  source 1..110: mol_type = other DNA
cttaatagtgtctggatctcagctgccctcagagtacactggacactgaaccatccagggtttgaactgcccaggtccactcacactcgggtgttttcaacaaaacatac

SEQ ID NO: 3500 - DNA, 110 bp, synthetic construct
  source 1..110: mol_type = other DNA
cattttaactatttcctgctacaggtggggatttctggggattccctgcgggaatgctcctccctgccttgcagtgaagaactaacatcagcaggtatgtgagctcttga

SEQ ID NO: 3501 - DNA, 110 bp, synthetic construct
  source 1..110: mol_type = other DNA
gctcctccctgccttgcagtgaagaactaacatcagcaggtatgtgagctcttgatgatgtgtctagaaagggacagtacaaaagcctgcaccaatgtcacaagacgtac

SEQ ID NO: 3502 - DNA, 110 bp, synthetic construct
  source 1..110: mol_type = other DNA
agtatggtctcagagacactaagttactctctaggctgtaatctaatactacgtggtctattttctcactcaaagagtttagctctgccactgcccctggagctctttcc

SEQ ID NO: 3503 - DNA, 110 bp, synthetic construct
  source 1..110: mol_type = other DNA
cctacaacacaccttctctcgcctgaactctgtcttataaattcgagcagcccatttcagcctccttagctcagggaggtgctcagccccctctccccacttcctttttc

SEQ ID NO: 3504 - DNA, 110 bp, synthetic construct
  source 1..110: mol_type = other DNA
cttgatgttaaaatctccatattttgcttctgtctctcagttgtgttttactgctgtcattagcactgtgactcgttaactatctggtcgggggtgactggtgtacactg

SEQ ID NO: 3505 - DNA, 110 bp, synthetic construct
  source 1..110: mol_type = other DNA
cacacgggatgtgtagaatgaaggcaggtgggagaagcgtggttgctggtccaacctgggaaggcccggtggttactcttctgtacctgtgtcttctttagtggtataga

SEQ ID NO: 3506 - DNA, 110 bp, synthetic construct
  source 1..110: mol_type = other DNA
ccaccaaccccactcctcctttatcaaccagacttcttcatggttgagctttcccagctccccaaacttctcattcccttctcaggatcctatacccagttttcagctcc

SEQ ID NO: 3507 - DNA, 110 bp, synthetic construct
  source 1..110: mol_type = other DNA
ataaagtcacattccaggatccagggcagacgtgagcttgaggtgacattgtttacctggaacagaggccctaaaccttcctgtgttgcagctctttcagcctcagtttt

SEQ ID NO: 3508 - DNA, 110 bp, synthetic construct
  source 1..110: mol_type = other DNA
cctggaacagaggccctaaaccttcctgtgttgcagctctttcagcctcagttttcttttctctgtccagtgtttactctgcaattccaggtggtttcttccccctgtgt

SEQ ID NO: 3509 - DNA, 110 bp, synthetic construct
  source 1..110: mol_type = other DNA
cgtttcatacagctatgtctgggtaccaaggtggggtagggcattttatctcatgtggtgttcagaaccgcccagtctggcgatggtcagagcacctctttctgaatccc

SEQ ID NO: 3510 - DNA, 110 bp, synthetic construct
  source 1..110: mol_type = other DNA
aatgcaaacaggcaattcacagaataattggacagtgaacatgaggaatgatgctcaaatgagcttagaggagtccctggttttttaaggactcatgactttaacgctta

SEQ ID NO: 3511 - DNA, 110 bp, synthetic construct
  source 1..110: mol_type = other DNA
gtggaattgcccagcccattgagctccagcttctgaccagagcagatgagaccgttcttacccaggtggagcgagacccacagcttctctagggccagggctcagaagcc

SEQ ID NO: 3512 - DNA, 110 bp, synthetic construct
  source 1..110: mol_type = other DNA
agccggaactatccaagtaagctgctcctgatttcctgacacagaagaaatttgaataataaatgtttgttgttttaaggtgaaaacaaataggcatgtccaaccaaaaa

SEQ ID NO: 3513 - DNA, 110 bp, synthetic construct
  source 1..110: mol_type = other DNA
gagtttctcacttatggctgttacacgttccaaaattccatccacactctatcttcagaaggttctagcccagggccagtggaatctccttagagaagtggatgtggtta

SEQ ID NO: 3514 - DNA, 110 bp, synthetic construct
  source 1..110: mol_type = other DNA
tcaacatgagccatcggcatccaaccctggcccccatgcacctggttcccagcatgcactggggacaatcagagctgtatgtccccactgggggagcacatctaactcag

SEQ ID NO: 3515 - DNA, 110 bp, synthetic construct
  source 1..110: mol_type = other DNA
tcactgataaaaaacaaatgagctatcaagccatgaagagacttggaggaaacggagttgcacgtgactaagtgagaagcccacacattgtaggattctaactataccat

SEQ ID NO: 3516 - DNA, 110 bp, synthetic construct
  source 1..110: mol_type = other DNA
tgctatttggtccgcaggtatcagcagcatcctgcccaggtgcacctggccagcctgagggtgctgtcagcccagcagaggcgccctcagcttacagagcaaggtttacg

SEQ ID NO: 3517 - DNA, 110 bp, synthetic construct
  source 1..110: mol_type = other DNA
tgagggtgctgtcagcccagcagaggcgccctcagcttacagagcaaggtttacgaggctcgtgctatttcactggaaaaccacacaatttcaaaatcctcagctctgaa

SEQ ID NO: 3518 - DNA, 110 bp, synthetic construct
  source 1..110: mol_type = other DNA
gctctgagggtgctgtgtgtgctgcaaggttctactgacgcctaggtgattctaggtcctgcgggataccggtgacaccagctgctttctcttaggggctactctctctc

SEQ ID NO: 3519 - DNA, 110 bp, synthetic construct
  source 1..110: mol_type = other DNA
gtcctgcgggataccggtgacaccagctgctttctcttaggggctactctctctctcccgtttggaaggcggagtgagatttgggaaaccctttcagtttctttgggact

SEQ ID NO: 3520 - DNA, 110 bp, synthetic construct
  source 1..110: mol_type = other DNA
cctctgtgacccagggggggctcggcccctccacagagatgacagcccactggtgtgtttactgtccatattcacacctacacagctgcaaactggacagagaaaaaatg

SEQ ID NO: 3521 - DNA, 110 bp, synthetic construct
  source 1..110: mol_type = other DNA
tgtttactgtccatattcacacctacacagctgcaaactggacagagaaaaaatgactctgaaccactgcacatgaataattgtgcccaagacagatgagaaagacagat

SEQ ID NO: 3522 - DNA, 110 bp, synthetic construct
  source 1..110: mol_type = other DNA
tcttcagaatcattttaaaaatagctacacttttcaagtctctctaatttttgtaaatgctcctctgtgcagcgcagtccttgaggtgggagagtgttctctgccagatc

SEQ ID NO: 3523 - DNA, 110 bp, synthetic construct
  source 1..110: mol_type = other DNA
gacgcctcgcacacctcccccatctcaagggaaggtaagacctctgaatgcttcgagtcagtgtcactttatttatagaccttcccagaaacccctaaatgtaccaaaaa

SEQ ID NO: 3524 - DNA, 110 bp, synthetic construct
  source 1..110: mol_type = other DNA
gaggcctctctctccaccctctgcgcttttccggccactcctgaggggtacagtttaatgcctcctcatcagaccacgggctctctctcacgtggactctgctcagcagc

SEQ ID NO: 3525 - DNA, 110 bp, synthetic construct
  source 1..110: mol_type = other DNA
gaagtatatcaaagtagaaagaagtagaaaaatagtgatgtacaacctcattagccagataaacccacagttaatattttcctatctcctctagggtctttattactgtt

SEQ ID NO: 3526 - DNA, 110 bp, synthetic construct
  source 1..110: mol_type = other DNA
tgatgtacaacctcattagccagataaacccacagttaatattttcctatctcctctagggtctttattactgtttttttaagcataattgaaatcatacagtatctata

SEQ ID NO: 3527 - DNA, 110 bp, synthetic construct
  source 1..110: mol_type = other DNA
tgtggagcaactttgatctgtgacagtgctgagctgggcagtgaaaatatggttgtgaagttcagaaaggaaatcccaaagccatgtggtggaggagtagggggactggg

SEQ ID NO: 3528 - DNA, 110 bp, synthetic construct
  source 1..110: mol_type = other DNA
gctgatgtggaaggaggagtgcttcctctgggtgtgaagtctatactctcacaccccaccaagctttggatctttccagggcggtgttcattcagagacccgtcacctgt

SEQ ID NO: 3529 - DNA, 110 bp, synthetic construct
  source 1..110: mol_type = other DNA
ccaccaagctttggatctttccagggcggtgttcattcagagacccgtcacctgtggaggggaatgacagatttctcatcctgacatcttcacagagacacattctaagg

SEQ ID NO: 3530 - DNA, 110 bp, synthetic construct
  source 1..110: mol_type = other DNA
atccatcatccagtgggtcaccacagctatccacaggtatgggcagtggacaccgtggcctgtggtcaagggatggatacaggactgccactggatcagaatgagatgtt

SEQ ID NO: 3531 - DNA, 110 bp, synthetic construct
  source 1..110: mol_type = other DNA
aacagtggggaaacttattaaacaccagtgagaagtacagttatctggagctctgtgggtgaggtgggaaaggcgtcaggtgtgcggtaaggaagtgagcctctgcccca

SEQ ID NO: 3532 - DNA, 110 bp, synthetic construct
  source 1..110: mol_type = other DNA
gttcctggtccagcgacatttgtcaaaggaaggaaaaacatctctgcttcacgttgcttttccaggcagccacaagatgccttattgttcataaatccaaacaaaggaga

SEQ ID NO: 3533 - DNA, 110 bp, synthetic construct
  source 1..110: mol_type = other DNA
gcttttccaggcagccacaagatgccttattgttcataaatccaaacaaaggagatggaatttagacccggtgatctttggccagaatgctttttttgattcctgtcaac

SEQ ID NO: 3534 - DNA, 110 bp, synthetic construct
  source 1..110: mol_type = other DNA
gtgtaagcactgtgtgcagctttgcatcttgccgtatgaccactggagagcacagggcccagaggaaccagacaagcagggggtaggacatggcacccactcctcttcct

SEQ ID NO: 3535 - DNA, 110 bp, synthetic construct
  source 1..110: mol_type = other DNA
gataaaagaaaaaatatctaattttcaatgaagacccatgagatccccaaattttctatttgtggggtaactgagaaggttccagcaggagcctggaagggaatgacaca

SEQ ID NO: 3536 - DNA, 110 bp, synthetic construct
  source 1..110: mol_type = other DNA
ctatttgtggggtaactgagaaggttccagcaggagcctggaagggaatgacacagggtaggcgagcccagttggagtggggagtgcaggagcctggaatggctgggctg

SEQ ID NO: 3537 - DNA, 110 bp, synthetic construct
  source 1..110: mol_type = other DNA
cacatggcgggtggtgtccttgtccctgtgcagggaccgccaaaggctacagtcctgaccttgaagaccatccagaccacaggctggtttgtgagtgagtttggcagttt

SEQ ID NO: 3538 - DNA, 110 bp, synthetic construct
  source 1..110: mol_type = other DNA
gtcctaatcctacatatccagctgggggcctgagctcagggccctgactccccactttggactttgggtaagacactgacctcatctggaaaaaggtgatggagtccctt

SEQ ID NO: 3539 - DNA, 110 bp, synthetic construct
  source 1..110: mol_type = other DNA
cagcccacccgcccaccgcctggcatggctgtggaggccagacgtgttggtcacaggtctgtgtgtcaatattgtgagcttgcgctggttggcctgcagggtggcctgaa

SEQ ID NO: 3540 - DNA, 110 bp, synthetic construct
  source 1..110: mol_type = other DNA
ggtctgtgtgtcaatattgtgagcttgcgctggttggcctgcagggtggcctgaagcagacatgtgacctggataggcagtgctgcagctctcagattcccaggtcacct

SEQ ID NO: 3541 - DNA, 110 bp, synthetic construct
  source 1..110: mol_type = other DNA
gatacctgctacctaggaggtacccaagctggtatctgcaagaattaggccagaaaatattacagtgcccctttctgaaagacacctgaggttggctgtgcacatgatgc

SEQ ID NO: 3542 - DNA, 110 bp, synthetic construct
  source 1..110: mol_type = other DNA
gcattccttggcttgtgaccacatcattccaatctctgcctcactggtcaccacggccttttcctcttctgtgtcgaatctcactctgtctctctctttttttgttaatt

SEQ ID NO: 3543 - DNA, 110 bp, synthetic construct
  source 1..110: mol_type = other DNA
taaatgttaaggggcgttaatttttcctattggtaaagggctaaaagtattaaggacccccttctcaataggaaatgtgagttcagtgagaacttgcctgtgtctcctcg

SEQ ID NO: 3544 - DNA, 110 bp, synthetic construct
  source 1..110: mol_type = other DNA
aaagacatctggttgttatggagaagagtccatgacagaatggctaaagggtctctttacaactatgaagaatcttcactctgcatcactgaatggaacagaaaggcttt

SEQ ID NO: 3545 - DNA, 110 bp, synthetic construct
  source 1..110: mol_type = other DNA
tttacaactatgaagaatcttcactctgcatcactgaatggaacagaaaggctttctcttggagtcatgtgctgcatggaacagcttccatctgaataacagatataaaa

SEQ ID NO: 3546 - DNA, 110 bp, synthetic construct
  source 1..110: mol_type = other DNA
tccttaatctgagattcattgccgattgcagacaggagcccatggctggcacatggccatccccagctgtaggtgtgcaccacgctcagctgaaatcagctgctgtaatc

SEQ ID NO: 3547 - DNA, 110 bp, synthetic construct
  source 1..110: mol_type = other DNA
gccatccccagctgtaggtgtgcaccacgctcagctgaaatcagctgctgtaatcagggcaggtccacagggacgggagaccagggactggctgggaggtaggagaggga

SEQ ID NO: 3548 - DNA, 110 bp, synthetic construct
  source 1..110: mol_type = other DNA
ccagtcccggagactctttcactggtgatcagaaagacattggctgaggaatacacatgaaattaggccaggtcacctgtcccttgcctgggtacctcacaggccactgc

SEQ ID NO: 3549 - DNA, 110 bp, synthetic construct
  source 1..110: mol_type = other DNA
ccctggagcccagaagccccatgagttctcctagccccaggcacatacctctacagatagcccatttaccttatttagctagcttgtttgtgtccactccaagtcataaa

SEQ ID NO: 3550 - DNA, 110 bp, synthetic construct
  source 1..110: mol_type = other DNA
ctgcccatgacaccagctcccccggactcagcatggaaaggggaggagccgaagagagacggagacaaggctcttttgtgatcaccgcagttccaagttggttttctctg

SEQ ID NO: 3551 - DNA, 110 bp, synthetic construct
  source 1..110: mol_type = other DNA
gatgctccttgtcactatcgcctgatgtcacacacttgaaagtaacgagtcctatgttctcccctctgagtcacgcctgagagctgatcggccagcctcctaaccctcag

SEQ ID NO: 3552 - DNA, 110 bp, synthetic construct
  source 1..110: mol_type = other DNA
atggaggagtgcgcatgtgagcagagaggtgtgtgcaggcccaccccgcctcccctcagagctcagggtggctgtgagctcctagccctggagagtcagctagactccaa

SEQ ID NO: 3553 - DNA, 110 bp, synthetic construct
  source 1..110: mol_type = other DNA
tttacagtttcattctgtttccatatatattcactggtgacttactatgtacaggccatggggaagttctgaaggttaggggaagaatcagacatttaaagccctatctt

SEQ ID NO: 3554 - DNA, 110 bp, synthetic construct
  source 1..110: mol_type = other DNA
ccatggggaagttctgaaggttaggggaagaatcagacatttaaagccctatcttcatggggctttcactctatgacctgtagcttcaggatgacgtggcactcagcctg

SEQ ID NO: 3555 - DNA, 110 bp, synthetic construct
  source 1..110: mol_type = other DNA
ccaatagaaaaaggaattcctaccaatagatttgtctttcattccagcaggaacattacaaagaaaaagcctactcccaaaatgtaaatatggaagaaaaataactttaa

SEQ ID NO: 3556 - DNA, 110 bp, synthetic construct
  source 1..110: mol_type = other DNA
ctgttgccgccacctggaggtcaacctcctcagagctgagctttagacaggagttttctgctctagatgtagcagtgacccactgatgtggagtcagggaccccacatag

SEQ ID NO: 3557 - DNA, 110 bp, synthetic construct
  source 1..110: mol_type = other DNA
tgttagggttgagggatccaagtaggaaggtgaaaaataaggggagagaatttgtcagtgggtgtcagatgataaatgaaagaaagaggaaccaagtttcctatcacaag

SEQ ID NO: 3558 - DNA, 110 bp, synthetic construct
  source 1..110: mol_type = other DNA
cagtgggtgtcagatgataaatgaaagaaagaggaaccaagtttcctatcacaaggctgagcaaacgctttttgaaaagagcctatttgactccggaatagactttgaca

SEQ ID NO: 3559 - DNA, 110 bp, synthetic construct
  source 1..110: mol_type = other DNA
ttcataaatgaccttttgaagataagcagattccttagatgaccaaaggcttgtctgagcaaaaagattcaactaaaatcctccctcactgagtctacagaatactactt

SEQ ID NO: 3560 - DNA, 110 bp, synthetic construct
  source 1..110: mol_type = other DNA
tgagcaaaaagattcaactaaaatcctccctcactgagtctacagaatactacttcccttcagattgtgaatgatggcaaaaaacgactttcaggttatgcaaaaatttc

SEQ ID NO: 3561 - DNA, 110 bp, synthetic construct
  source 1..110: mol_type = other DNA
atatgcctcggcagcgcccccaaaaatggcaaaaaagacaaacaaaacaaaaaaacatgccctaaaattggaacatgtgggcctccgtggaagaatgaatctctatccct

SEQ ID NO: 3562 - DNA, 110 bp, synthetic construct
  source 1..110: mol_type = other DNA
catgccctaaaattggaacatgtgggcctccgtggaagaatgaatctctatccctctcattttccttttcgaaaaccagaaataccgcccaccctgtccggctccacatt

SEQ ID NO: 3563 - DNA, 110 bp, synthetic construct
  source 1..110: mol_type = other DNA
aggaatttttctaaataacagagcatcatagatttttataatcaatgacgtatatcaccctctgcctggaagttagagtgaagttggagggcggtggagcaggtggctgt

SEQ ID NO: 3564 - DNA, 110 bp, synthetic construct; identical to SEQ ID NO: 3563
  source 1..110: mol_type = other DNA

SEQ ID NO: 3565 - DNA, 110 bp, synthetic construct
  source 1..110: mol_type = other DNA
cttgatcaataagggagcacgctcctcagattagaaactaaagtctgacaagcgggctgggagcagatgcacagctaggctcgctcttagaaagatggagagagcatggt

SEQ ID NO: 3566 - DNA, 110 bp, synthetic construct
  source 1..110: mol_type = other DNA
gctgggagcagatgcacagctaggctcgctcttagaaagatggagagagcatggtctaccttaagtgaagcaaaaataacagaactgccatggaaaactgtgtaggaaat

SEQ ID NO: 3567 - DNA, 110 bp, synthetic construct
  source 1..110: mol_type = other DNA
cctgctgcccactggctgggcctcctcttcctgctcagcacccactttatgtccctgatgcctgcacccccacctcgcatcttctgcagcctgagtatcattatacagct

SEQ ID NO: 3568 - DNA, 110 bp, synthetic construct
  source 1..110: mol_type = other DNA
tgatgcctgcacccccacctcgcatcttctgcagcctgagtatcattatacagctgactcctttgtaatgacagggaaggaagacttttcttctctgtctgccctgaagc

SEQ ID NO: 3569 - DNA, 110 bp, synthetic construct
  source 1..110: mol_type = other DNA
gtgatctgcaggtgatgtctgggctagtcagttaggcctggggtgagttctggagtcagcaaggcatccagaacttgtgtccacagctgccccttcagcaccatggtcag

SEQ ID NO: 3570 - DNA, 110 bp, synthetic construct
  source 1..110: mol_type = other DNA
ccaattgtggttctagacaaagcaatgcagtggtgagtcaccatgatccttgttctcaagaagtttacagtacgagtggggaaaacactaaacatggaatcacagtctga

SEQ ID NO: 3571 - DNA, 110 bp, synthetic construct
  source 1..110: mol_type = other DNA
tcaagaagtttacagtacgagtggggaaaacactaaacatggaatcacagtctgaggagctacactggaaaagcaaatgatgcaggagagaaaaaagaggtcgaggttct

SEQ ID NO: 3572 - DNA, 110 bp, synthetic construct
  source 1..110: mol_type = other DNA
tcaaatgtaaatgagccctgaaggactgaggattctagatgctcatggtgcaaatgtaaagctacacgtttacaaagactgtaaagtattagttgccgcctattagtcat

SEQ ID NO: 3573 - DNA, 110 bp, synthetic construct
  source 1..110: mol_type = other DNA
gtaaagctacacgtttacaaagactgtaaagtattagttgccgcctattagtcatgtgcaacaaaagccatgctgagttgttaaaagataactattactctatgtcttag

SEQ ID NO: 3574 - DNA, 110 bp, synthetic construct
  source 1..110: mol_type = other DNA
gttagaattttatgtactaataaacaggatcattactatctattttatcagagcattgcccccagtacttctgcctgtaatcctgtaatgtaagaaatccaaatatattc

SEQ ID NO: 3575 - DNA, 110 bp, synthetic construct; identical to SEQ ID NO: 3574
  source 1..110: mol_type = other DNA

SEQ ID NO: 3576 - DNA, 110 bp, synthetic construct
  source 1..110: mol_type = other DNA
ggttgctacaacctttagaattggtatcttgatcaaatttatcccaaaaacataatcttcagagttattagtcactggtatttttgcaacaatgtgtctattgggaaatg

SEQ ID NO: 3577 - DNA, 110 bp, synthetic construct
  source 1..110: mol_type = other DNA
gtggccctaaaatgacaacctaaccagggatcctccatatcccatataggtgtggccctaaaatgacaaaagaaaaaagagtgattattttattcttatactttcaaatt

SEQ ID NO: 3578 - DNA, 110 bp, synthetic construct
  source 1..110: mol_type = other DNA
agggatcctccatatcccatataggtgtggccctaaaatgacaaaagaaaaaagagtgattattttattcttatactttcaaatttctaatgccacttaaaaaaagggaa

SEQ ID NO: 3579 - DNA, 110 bp, synthetic construct
  source 1..110: mol_type = other DNA
gctgggagctgactctttctgtactaacagcttgagccaacaccagccaaaagacagagtatgggcattcccatagtaattcaacgatcaaaaaaccaacatagtgtctg

SEQ ID NO: 3580 - DNA, 110 bp, synthetic construct
  source 1..110: mol_type = other DNA
gattaataatagctactaaaaatcaggacgtacaagggttggatttttttactgtcaggccatcaaagactaatgttatttaagagagaaaaaaaaaagtgcaggtcggt

SEQ ID NO: 3581 - DNA, 110 bp, synthetic construct
  source 1..110: mol_type = other DNA
caggccatcaaagactaatgttatttaagagagaaaaaaaaaagtgcaggtcggtgtgcagggtaactgctgtcctgtcaagactcactggatggggctgcactagtttc

SEQ ID NO: 3582 - DNA, 110 bp, synthetic construct
  source 1..110: mol_type = other DNA
cctagacacttgcacttaccaatcagttcttccaccttctacatactcgcagcccctccagatatcagccacaggtaaaataaaatgcaatattcattacgaaatacatc

SEQ ID NO: 3583 - DNA, 110 bp, synthetic construct
  source 1..110: mol_type = other DNA
gcaagagaaaaagttagaagaaaacatgcctattccaatctaagggagcctaagaatttatgtggttttcacctgtgggaagaatttcaaggacatgttggggaaatgat

SEQ ID NO: 3584 - DNA, 110 bp, synthetic construct; identical to SEQ ID NO: 3583
  source 1..110: mol_type = other DNA

SEQ ID NO: 3585 - DNA, 110 bp, synthetic construct; identical to SEQ ID NO: 3583
  source 1..110: mol_type = other DNA

SEQ ID NO: 3586 - DNA, 110 bp, synthetic construct; identical to SEQ ID NO: 3583
  source 1..110: mol_type = other DNA

SEQ ID NO: 3587 - DNA, 110 bp, synthetic construct
  source 1..110: mol_type = other DNA
taggggtatctgcaggaggaagctcctttcctcagccactgtctatgtccataaaatcagtcttatagaggatacatagcttctttcacatttattatatgaattgtgtg

SEQ ID NO: 3588 - DNA, 110 bp, synthetic construct
  source 1..110: mol_type = other DNA
gcccaggaacttctctgtgccacaggtgtgactgtaaaaagaaaaaaaaaaaaaaaagaatatgcaggaaaacatgagctggaaggtgctataataactcatacttatct

SEQ ID NO: 3589 - DNA, 110 bp, synthetic construct; identical to SEQ ID NO: 3588
  source 1..110: mol_type = other DNA

SEQ ID NO: 3590 - DNA, 110 bp, synthetic construct; identical to SEQ ID NO: 3588
  source 1..110: mol_type = other DNA

SEQ ID NO: 3591 - DNA, 110 bp, synthetic construct; identical to SEQ ID NO: 3588
  source 1..110: mol_type = other DNA

SEQ ID NO: 3592 - DNA, 110 bp, synthetic construct
  source 1..110: mol_type = other DNA
gcaagtttgtgtcatctctttgtatcagtgcctggtacataacaagcacccaataggcaggagcttttatagtccagtactgctattgctgtaatgatctctccagggca

SEQ ID NO: 3593 - DNA, 110 bp, synthetic construct
  source 1..110: mol_type = other DNA
ggaccaaaataactcagcccaaaaggtctactcagagcttatttactggaaaatatgaaggtgttcatgccatttcttaaatcctaactaatataatcatgatgggtaaa

SEQ ID NO: 3594 - DNA, 110 bp, synthetic construct
  source 1..110: mol_type = other DNA
cgtctgctgagagtgagctggaaatcattgattaatcgttgatatatccagcctagttaaggatttctcttcagcagcactttgttaaaggcttatagacaaggaaagag

SEQ ID NO: 3595 - DNA, 110 bp, synthetic construct
  source 1..110: mol_type = other DNA
atgaagaaggaaggctgtaccaaattggattattgttaccaattatttgtcccctcttgtaattcacttatatagcatcccctctgcttgtcatgtgacctgtctgatcc

SEQ ID NO: 3596 - DNA, 110 bp, synthetic construct
  source 1..110: mol_type = other DNA
catagtttttatttctctgggataaatgcccgaaggtatgatagctatgttgtgtggtacacaaatgttcatagcaggtttatgaactctctctatcctggaaacaactc

SEQ ID NO: 3597 - DNA, 110 bp, synthetic construct
  source 1..110: mol_type = other DNA
tgagtctaaaaagtttgttccagtgtctttaatgacaaagtgtgaagctgagaataaacctaaataaatgggaaatctttgaagaatgaataatatcataatctctctgt

SEQ ID NO: 3598 - DNA, 110 bp, synthetic construct
  source 1..110: mol_type = other DNA
gtgaaggactcccatacaaactgtttgcaagcctaccctctttccagtatattattcttgtaaataatggagcacatggaatagctgaatgagggccagaggataagcgt

SEQ ID NO: 3599 - DNA, 110 bp, synthetic construct
  source 1..110: mol_type = other DNA
ttctaggaggaggatacagcacagataaagcaaggctggtggaaaagcaccattccatgggagctggagaggtcaaggacagttccacagctgaagattgggagtttcag

SEQ ID NO: 3600 - DNA, 110 bp, synthetic construct
  source 1..110: mol_type = other DNA
tcaaacaactttaatatgcccaacaatggtaacaagcatttagctttttcccattgaagacctcattgtgatcaggcacataaataaagataattgtgaccaattatttt

SEQ ID NO: 3601 - DNA, 110 bp, synthetic construct
  source 1..110: mol_type = other DNA
aactggccagtcaggcatgacccaaaggcccccaaagtagattaccctgagggataagaaaccatcagcaaagccattcagtggaaggatgatgctctggggatgttttc

SEQ ID NO: 3602 - DNA, 110 bp, synthetic construct
  source 1..110: mol_type = other DNA
acatgatgtatgagagacaaagagtcatcaatgtggccattggctcctactgggctgggttcagaggcaggtactaaatactcttgctgattcagctgaacagcaagtag

SEQ ID NO: 3603 - DNA, 110 bp, synthetic construct
  source 1..110: mol_type = other DNA
cttttgtctcctatgtcaccacagttactgtattattgtgagtatctctatataagtacatattttcagaaaggggtttgacagctacctgtcacttttccagtgtgcct

SEQ ID NO: 3604 - DNA, 110 bp, synthetic construct; identical to SEQ ID NO: 3603
  source 1..110: mol_type = other DNA

SEQ ID NO: 3605 - DNA, 110 bp, synthetic construct
  source 1..110: mol_type = other DNA
tatattttgcaataaaaaagtaatcttcaaaggttgagaagttcctaattcattgtttcgtataaagcaagctctttgaatatctctgggcaaatgtgtcttactgtgta

SEQ ID NO: 3606 - DNA, 110 bp, synthetic construct; identical to SEQ ID NO: 3605
  source 1..110: mol_type = other DNA

SEQ ID NO: 3607 - DNA, 110 bp, synthetic construct
  source 1..110: mol_type = other DNA
tggctatcaaaaatcattcttgtctacacaagtatttctaaatgacttctacacagagcaccttgataattcagatctatttctatgaaattctgttaatacaggatatg

SEQ ID NO: 3608 - DNA, 110 bp, synthetic construct; identical to SEQ ID NO: 3607
  source 1..110: mol_type = other DNA

SEQ ID NO: 3609 - DNA, 110 bp, synthetic construct
  source 1..110: mol_type = other DNA
atgggagaaattactatagctaaagaactatttccttgcctttgggaaagctgcttggccgttgaaacatagagcttatttactgatttttttattatagatttcttttc

SEQ ID NO: 3610 - DNA, 110 bp, synthetic construct
  source 1..110: mol_type = other DNA
gaaagctgcttggccgttgaaacatagagcttatttactgatttttttattatagatttcttttcatctgtgtgcttatttgggcaggaagcaattaaaatggaaatcaa

SEQ ID NO: 3611 - DNA, 110 bp, synthetic construct
  source 1..110: mol_type = other DNA
ataccgcaaatgccctccaacaaactcacctcatagagcttctctgtaggtaagagttaaatactcccagagagccatgtagacttcaggttttcacttttgctggaatt

SEQ ID NO: 3612 - DNA, 110 bp, synthetic construct
  source 1..110: mol_type = other DNA
gttaaatactcccagagagccatgtagacttcaggttttcacttttgctggaatttgtctggacagtttttaatttagatctgttaaactacttggattggtttgttatg

SEQ ID NO: 3613 - DNA, 110 bp, synthetic construct
  source 1..110: mol_type = other DNA
tccaggatccaaattctgtggtttgaggaaataatgaaatactgaaactaagataacatagtttaaaatagcaaattgagatatgaggagaaaaggtgaaaagggaaggg

SEQ ID NO: 3614 - DNA, 110 bp, synthetic construct
  source 1..110: mol_type = other DNA
acatagtttaaaatagcaaattgagatatgaggagaaaaggtgaaaagggaagggaaataaagaacatgggacagtagagaaagaattctctagctgcatatctcttttt

SEQ ID NO: 3615 - DNA, 110 bp, synthetic construct
  source 1..110: mol_type = other DNA
gaaaaaagggctaggatgagagagagcttttctgaataatccagttgaagaaatacaaggaatcctctggcaagtctgtctcgtattttcattctactttttttaaaagt

SEQ ID NO: 3616 - DNA, 110 bp, synthetic construct
  source 1..110: mol_type = other DNA
caaggaatcctctggcaagtctgtctcgtattttcattctactttttttaaaagtcattctgtggggggtggggggatacgcttgggctgtgggatggaaatcctgtgaa

SEQ ID NO: 3617 - DNA, 110 bp, synthetic construct
  source 1..110: mol_type = other DNA
tctgcaggagaggaaaccaaaagcttgctgcctagggagatggtgataaagatagctccttagtttcaattcaatcccatttccatcagcaacatatacggatggagttc

SEQ ID NO: 3618 - DNA, 110 bp, synthetic construct
  source 1..110: mol_type = other DNA
ggcctctcccaaccctccccagctctgagctctcccctggcacctgcacccctaccccccagaggtgatcccttcctagggttacatgctcttggccacagatcacatgt

SEQ ID NO: 3619 - DNA, 110 bp, synthetic construct
  source 1..110: mol_type = other DNA
gtagatttatctgttaatcctctattatatatagtagtcatctatttcatatagtagtattttaaatgttattcccacccttccaattcctccctccctgcaacagtttt

SEQ ID NO: 3620 - DNA, 110 bp, synthetic construct; identical to SEQ ID NO: 3619
  source 1..110: mol_type = other DNA

SEQ ID NO: 3621 - DNA, 110 bp, synthetic construct
  source 1..110: mol_type = other DNA
tctattatatatagtagtcatctatttcatatagtagtattttaaatgttattcccacccttccaattcctccctccctgcaacagttttactgtgttttaatctgtgag

SEQ ID NO: 3622 - DNA, 110 bp, synthetic construct; identical to SEQ ID NO: 3621
  source 1..110: mol_type = other DNA

SEQ ID NO: 3623 - DNA, 110 bp, synthetic construct
  source 1..110: mol_type = other DNA
tagggttgggcactaccaagatgagggtaggagagaaacttctcaattcatgaattatgcaccaataatatcccttatctgcttggtaaggggtattaaaatacagtcaa

SEQ ID NO: 3624 - DNA, 110 bp, synthetic construct
  source 1..110: mol_type = other DNA
tatgcaccaataatatcccttatctgcttggtaaggggtattaaaatacagtcaacaagtgtttaaagtttcacagagctattttggcttttaaaataaaatgtatgtgg

SEQ ID NO: 3625 - DNA, 110 bp, synthetic construct
  source 1..110: mol_type = other DNA
tgccatcacccaggtttgtactccccacttacatagagctgctgaagttcaaggatgggtcccgtgtgtccttggggttcagtctgcaacccgaacatgaaacccagcag

SEQ ID NO: 3626 - DNA, 110 bp, synthetic construct
  source 1..110: mol_type = other DNA
ttcccttttttgtttttgtttatttgtttgtctgtttgttttttggctgtatctgtggcaagcagtagttcctggggccagggtttgaacgagctccatagcagtgaccc

SEQ ID NO: 3627 - DNA, 110 bp, synthetic construct
  source 1..110: mol_type = other DNA
taacataaaaccgaaactatgaaaataagcttttatgcaactctgatatgctgcagtggatttcctataatcttggtaaggcgtgaaactttacagaagtaatacttaca

SEQ ID NO: 3628 - DNA, 110 bp, synthetic construct
  source 1..110: mol_type = other DNA
gtggatttcctataatcttggtaaggcgtgaaactttacagaagtaatacttacagaatttgagaagtgaaacacaatagaggttttaaaatgtagatcttgttcccttg

SEQ ID NO: 3629 - DNA, 110 bp, synthetic construct
  source 1..110: mol_type = other DNA
aattgccagaatcaaggttttcaatccacacaattacacattttgtaactcaagctttgtcattataaaaagaacagaggagcttgggcagcattagagaatgaaatgag

SEQ ID NO: 3630 - DNA, 110 bp, synthetic construct
  source 1..110: mol_type = other DNA
gactgggtccctatactgtagagcagaaattaacatgacactgtaagtcaaccataatttaaaaagagagcaagagaaagacattctaaagaatgagaagttagctgaag

SEQ ID NO: 3631 - DNA, 110 bp, synthetic construct
  source 1..110: mol_type = other DNA
aatttaaaaagagagcaagagaaagacattctaaagaatgagaagttagctgaagcctgcagagaggttatttcaggcagagcataataacagacacaacagcatttgga

SEQ ID NO: 3632 - DNA, 110 bp, synthetic construct
  source 1..110: mol_type = other DNA
acatgttttactaagtgaaagaagtttaaaagttcctttcattatcatatcccgtatggaatgttgtttatggcctagggaataaaagaatgttcaaattcaagggtgct

SEQ ID NO: 3633 - DNA, 110 bp, synthetic construct
  source 1..110: mol_type = other DNA
aagtaatgaggcaatttagcatctgaagaggtttgccttctctgttcaacagtggacactttgccaaggtctatggtgcagttttccggccgtgaaaactacacgcttct

SEQ ID NO: 3634 - DNA, 110 bp, synthetic construct
  source 1..110: mol_type = other DNA
acactttgccaaggtctatggtgcagttttccggccgtgaaaactacacgcttcttcaagggaggagagagctccagcagtaattccatgaagtagcaaatgatttgaaa

SEQ ID NO: 3635 - DNA, 110 bp, synthetic construct
  source 1..110: mol_type = other DNA
gtgaattcactattactgactatgagacagataataatcatatttgttgggcaaacaaacaaaaccagttgagggagaggggaatcatttgaaagtgcttaaatcacaat

SEQ ID NO: 3636 - DNA, 110 bp, synthetic construct
  source 1..110: mol_type = other DNA
caaacaaaaccagttgagggagaggggaatcatttgaaagtgcttaaatcacaattgaaattgactttatttgattttccatattaccgttgcgactctaaagactttag

SEQ ID NO: 3637 - DNA, 110 bp, synthetic construct
  source 1..110: mol_type = other DNA
ttcttattttgggcactaaaaggtactccaggtttatatcataggtctcctgccgcagtcctcgaatcagccagatttccaagaagctctgagtccttttcagagacaat

SEQ ID NO: 3638 - DNA, 110 bp, synthetic construct
  source 1..110: mol_type = other DNA
tgaccctcagctgggggatctacactccattactgggtcattaacttccctgacagctgcagaatagcccataggaatgcttagctcctaatcaaactcatagctacttc

SEQ ID NO: 3639 - DNA, 110 bp, synthetic construct
  source 1..110: mol_type = other DNA
gcaacttacaaaataatctcgtagcttgaattaaaactcaggaccacatcattgcaaagtctagacatgtaaccgtaagccaatgaaagctggcacacagctgatggatg

SEQ ID NO: 3640 - DNA, 110 bp, synthetic construct
  source 1..110: mol_type = other DNA
tctgttttttttttttttgtctttaaatgcctaggatagtactttcacacataatttgaacccacatgtattgttcatttatttctgcttctcactctcgccaggtttct

SEQ ID NO: 3641 - DNA, 110 bp, synthetic construct; identical to SEQ ID NO: 3640
  source 1..110: mol_type = other DNA

SEQ ID NO: 3642 - DNA, 110 bp, synthetic construct
  source 1..110: mol_type = other DNA
tctttgatctagttctaaagcaaaaattgtcttccaggagtaatacacagctatattagacttaagccatctgtatccccccagtactgtgccttattctgacagagaca

SEQ ID NO: 3643 - DNA, 110 bp, synthetic construct
  source 1..110: mol_type = other DNA
ccttggactaaaataaaatcaagtgaattagtgaagtcattttgactaattgggtaatttctgaagaggctaagacaagtgttaagtgtgaaataccaattagcttgcta

SEQ ID NO: 3644 - DNA, 110 bp, synthetic construct
  source 1..110: mol_type = other DNA
gaatcacaagaataccaaaatttttttctaggttttgaaaagctaggaaggatctgtgtgactataagatctgatatgattaaaatatttgcacagaagtgacactggag

SEQ ID NO: 3645 - DNA, 110 bp, synthetic construct
  source 1..110: mol_type = other DNA
ttactcccaccaagcgaccactgtcctgcaatttcactggcagtttgagccctggtctccatggttacatcctcactataagactgtttgttcaaaatttccattaattg

SEQ ID NO: 3646 - DNA, 110 bp, synthetic construct
  source 1..110: mol_type = other DNA
attaggagggcctaaacacagagtactgacatcaccaaatggcagagagaacacgaagcagcagtaacaattattcattatcatttaacattatttagtatactttgcca

SEQ ID NO: 3647 - DNA, 110 bp, synthetic construct
  source 1..110: mol_type = other DNA
ccaagctagaggtataagctgagctattgctgcaggcctatgccacagctgaaacaatgctgatctgggtcatatctgcaacctatgctgcagctcacggtagtgctgga

SEQ ID NO: 3648 - DNA, 110 bp, synthetic construct
  source 1..110: mol_type = other DNA
attttgaaatctcgcactgattgtacacccacacccacacacacacacgcacaagcgcgcaatagtagagtgtatgactttaaacttcttttcattccctaagatttggg

SEQ ID NO: 3649 - DNA, 110 bp, synthetic construct
  source 1..110: mol_type = other DNA
catggaagacattaataaaacatgctaacagctccaagagaaagctttcgtacttgctggtaatatctaacatcagatactcatagctctaattttatattaagaattta

SEQ ID NO: 3650 - DNA, 110 bp, synthetic construct
  source 1..110: mol_type = other DNA
ttggggactactggtcttacacttggcatccttctgtgcttgcaggatgggaattgtaggaattaaaatagtaaaagtgtgaggagctagaaagtaatatgtattattac

SEQ ID NO: 3651 - DNA, 110 bp, synthetic construct
  source 1..110: mol_type = other DNA
gtaggaattaaaatagtaaaagtgtgaggagctagaaagtaatatgtattattactgactgactagctacacaaaaatgtgtgatgcaattcaggtgtttctatggcgtg

SEQ ID NO: 3652 - DNA, 110 bp, synthetic construct
  source 1..110: mol_type = other DNA
aagtcctttatacttcaaggagactgtaacctccatttcctgtcaagctccccctttcaagttcattaaggtgtactagactatcaggaaagatttctcagatatgccta

SEQ ID NO: 3653 - DNA, 110 bp, synthetic construct
  source 1..110: mol_type = other DNA
ggattcgcacttttctctgcggggtgtcaaaggatatacagagatgggaggcaagtaatctgatgtgtcatttaagaggcccctgacagctgaagtatcgacagtgtgtg

SEQ ID NO: 3654 - DNA, 110 bp, synthetic construct
  source 1..110: mol_type = other DNA
taattcttagaacttcaaggtacttaagcccctccctgtaatatggaaagcagaccaatcaagcttaatatgctatatttctcttttaaaaaggcttaaacatttaccat

SEQ ID NO: 3655 - DNA, 110 bp, synthetic construct
  source 1..110: mol_type = other DNA
tagtaaactgttgaactattctgatcctgtttaacttccactgctatggctcaatacatacacaaaatggatttttatttgctgtgaaccaaaagcatcatcatgtagag

SEQ ID NO: 3656 - DNA, 110 bp, synthetic construct
  source 1..110: mol_type = other DNA
acatacacaaaatggatttttatttgctgtgaaccaaaagcatcatcatgtagagacaggagttgtgaataaagtcacatgattgcaaagtgacagaaaaggagagcaat

SEQ ID NO: 3657 - DNA, 110 bp, synthetic construct
  source 1..110: mol_type = other DNA
gattctccccaccgtggaggcatgaggcattctgaagagagcatccttccacttggcccagatgtctagagaaggcattacgtatatgttgcagagggcaatagcatcac

SEQ ID NO: 3658 - DNA, 110 bp, synthetic construct
  source 1..110: mol_type = other DNA
agtccacttcctgtcactgttatctcttatctttccctattggttcaatatctaaacttgagaaaataagctctcactcaaatatgcattgtcttcctactccattgtta

SEQ ID NO: 3659 - DNA, 110 bp, synthetic construct
  source 1..110: mol_type = other DNA
acaggggacacagacatattagttggggcttcttgtcttaaattttatttctattcaactccaaacttcctttccagtttggtcagattttctttcttgctttcacaacc

SEQ ID NO: 3660 - DNA, 110 bp, synthetic construct
  source 1..110: mol_type = other DNA
ctttcatttaaattggaacttaaagctgctgctttggttttggagtcagcttgtcaacctccccaaagagtggcttgctggctttattcagtctttctcctcaacctact

SEQ ID NO: 3661 - DNA, 110 bp, synthetic construct
  source 1..110: mol_type = other DNA
ctctgtgggagtgtaaatacttaaaccccttgctgtatgttgaatgatagctcacataaaaatgtccctcagattctgtcaatataaacttatgtggaaaaatattcttc

SEQ ID NO: 3662 - DNA, 110 bp, synthetic construct
  source 1..110: mol_type = other DNA
actttttattctagggtcattaattttccattttttaaaatctttattcagacttctttgaccaccttactccacttccatttgccaacaaataccctttgttctctgat

SEQ ID NO: 3663 - DNA, 110 bp, synthetic construct; identical to SEQ ID NO: 3662
  source 1..110: mol_type = other DNA

SEQ ID NO: 3664 - DNA, 110 bp, synthetic construct
  source 1..110: mol_type = other DNA
tcaatcagcaagccctctgcatttagtcagttgcctgtctataaacactagaggagagctttagtttctagagacaattagcatctttgaaaaaaacaaaaaataatcac

SEQ ID NO: 3665 - DNA, 110 bp, synthetic construct
  source 1..110: mol_type = other DNA
accacttattagctctgtagctttgggcaagctagttgactgactatgcctcagatataaaaaagagaataatgccagcacctaccttatggggtttttattaggactaa

SEQ ID NO: 3666 - DNA, 110 bp, synthetic construct
  source 1..110: mol_type = other DNA
ctgaaatagtgtatgatctgctctcaggacaaaaagcaaaatgctagctgctcagtgtgctcagatttacagatacagcattggctgagatttaacaaggtgttacagag

SEQ ID NO: 3667 - DNA, 110 bp, synthetic construct
  source 1..110: mol_type = other DNA
aagccagcatcctttttggcaactcctttaaaaggtgataagttaaaaggtaagtaggtctgttttggacggtatcccagatgcatcttcctcttaccatcaatacaatt

SEQ ID NO: 3668 - DNA, 110 bp, synthetic construct
  source 1..110: mol_type = other DNA
aggtctgttttggacggtatcccagatgcatcttcctcttaccatcaatacaattcaataatttaaaagaggaattaactgggtaaaagtagtatgtcttctttctccag

SEQ ID NO: 3669 - DNA, 110 bp, synthetic construct
  source 1..110: mol_type = other DNA
ccctactaaacaataaatgtatccagattgttgggggaaatgttaaaccacacccccaccatgtgcaaacccagccctgcacttaccagtgcttacagacagcagagcct

SEQ ID NO: 3670 - DNA, 110 bp, synthetic construct
  source 1..110: mol_type = other DNA
ccaccatgtgcaaacccagccctgcacttaccagtgcttacagacagcagagcctgagctgaacctccgccagcaaaatgccattttttatgcttgttcatatacaaata

SEQ ID NO: 3671 - DNA, 110 bp, synthetic construct
  source 1..110: mol_type = other DNA
gagggggaaaagaagacatggaaacacagagagaagggctggatctgttagctgcagaaaccaagagctgaacttgtgatgattggtaccacagatatcaacaatgccct

SEQ ID NO: 3672 - DNA, 110 bp, synthetic construct
  source 1..110: mol_type = other DNA
agaaaccaagagctgaacttgtgatgattggtaccacagatatcaacaatgccctttcaaaaactatcctaagcagtgacccagcagagtaaagagttgccaatctcttg

SEQ ID NO: 3673 - DNA, 110 bp, synthetic construct; identical to SEQ ID NO: 3671
  source 1..110: mol_type = other DNA

SEQ ID NO: 3674 - DNA, 110 bp, synthetic construct; identical to SEQ ID NO: 3672
  source 1..110: mol_type = other DNA

SEQ ID NO: 3675 - DNA, 110 bp, synthetic construct
  source 1..110: mol_type = other DNA
aaaagaactgtaagttgcttcattccaacaatgtcagctagtttccacacacttcttcaactaatttaactaatctcaccaagttacagtacaaatagtatctttattct

SEQ ID NO: 3676 - DNA, 110 bp, synthetic construct
  source 1..110: mol_type = other DNA
ttcaactaatttaactaatctcaccaagttacagtacaaatagtatctttattctcctctttcaaagctaataagcattgttagggagacagttgtccctggttcaaaat

SEQ ID NO: 3677 - DNA, 110 bp, synthetic construct
  source 1..110: mol_type = other DNA
gtggcgcagtttaacaacagtgctctataacttcattggtcatttattagaggacaaaatgtcaagttcctcccacctacaccttggcaatctctccagagctttcagct

SEQ ID NO: 3678 - DNA, 110 bp, synthetic construct
  source 1..110: mol_type = other DNA
aaaatgtcaagttcctcccacctacaccttggcaatctctccagagctttcagctacatggcttgaacccaagggcaacagggttagaaggctgatgtgtctgcagtggg

SEQ ID NO: 3679 - DNA, 110 bp, synthetic construct
  source 1..110: mol_type = other DNA
gaatggaacccacatcctcttggatactagtcaggttcataacaggccacaacggaaattcccagaaccctagtatttaaattacctcatctgcttatataagtatctat

SEQ ID NO: 3680 - DNA, 110 bp, synthetic construct
  source 1..110: mol_type = other DNA
cagagacatgcaggaatccataagggttcagctttataaattatcaaagtacatctgtgtaatcatcagctgtataaaaaagatattgctagtaacctagaaaccctctc

SEQ ID NO: 3681 - DNA, 110 bp, synthetic construct
  source 1..110: mol_type = other DNA
ccatattgtagcaggtgtgggaattttatttcttaaggctgaagagctttctatccaattcaaaaaatccactttctcacaagattggttatcatgtcccccagccaaca

SEQ ID NO: 3682 - DNA, 110 bp, synthetic construct
  source 1..110: mol_type = other DNA
ttcttatcatcctgtggtgtctctagcctctcctttttcgtcctgccaaattgcccccaagcttaactctttagcttcgtcttcaggggcctcctgggctggccttgtgg

SEQ ID NO: 3683 - DNA, 110 bp, synthetic construct
  source 1..110: mol_type = other DNA
cccaagcttaactctttagcttcgtcttcaggggcctcctgggctggccttgtggacaccaggtctcctgacagctcacctctcccttctctgcttcctgcccgctccca

SEQ ID NO: 3684 - DNA, 110 bp, synthetic construct
  source 1..110: mol_type = other DNA
tgggatgcttcctcctccttcttcctcaaatactcataggcatgtgcacatgcacatgcacattgcgtgcacaaccacacccccacacacagagtctcccaccacgtcca

SEQ ID NO: 3685 - DNA, 110 bp, synthetic construct
  source 1..110: mol_type = other DNA
atgcacattgcgtgcacaaccacacccccacacacagagtctcccaccacgtccacattccaacctatgataccattctccctccagcttccttggtgcagcataaactg

SEQ ID NO: 3686 - DNA, 110 bp, synthetic construct
  source 1..110: mol_type = other DNA
gtgggggactggcttctcctcctgtgatccctgccacaaggccaaggcctctcggagctcccccttctcctccagtctctttagaccctcctttccatcttctggatcac

SEQ ID NO: 3687 - DNA, 110 bp, synthetic construct
  source 1..110: mol_type = other DNA
ccctcacccccagaggcaaccactttctgatttatatcatcctagtgagggtttgtctacttttgcatttcacataaaaggaatcatgcactctttgggttttggctttt

SEQ ID NO: 3688 - DNA, 110 bp, synthetic construct
  source 1..110: mol_type = other DNA
tctacttttgcatttcacataaaaggaatcatgcactctttgggttttggcttttttagctcaacttaacgttattctacgttgttgcatcaatcggtagtttgttcttt

SEQ ID NO: 3689 - DNA, 110 bp, synthetic construct
  source 1..110: mol_type = other DNA
tccttcctgctcaacctagtaagtgtattttaagtcttaaatatccaaacacccttagttttcttccagctacattatcgaggtccaacacatgtgcattaacaacaagc

SEQ ID NO: 3690 - DNA, 110 bp, synthetic construct
  source 1..110: mol_type = other DNA
gatcataggtggagaactggcagaggggagctgtacagggtactctaggggccagaagagtctctccacttaaccaaactgtttccaagtaccataactgtgtcccataa

SEQ ID NO: 3691 - DNA, 110 bp, synthetic construct
  source 1..110: mol_type = other DNA
aaaacaaaaggaaagaaaagataaatgtcatataggcaaaacattaacgtgatttttgtacagccttagagacaatctagctgaactctaattcagctgagcagaaaatg

SEQ ID NO: 3692 - DNA, 110 bp, synthetic construct
  source 1..110: mol_type = other DNA
ttgtacagccttagagacaatctagctgaactctaattcagctgagcagaaaatggagcccatagagggtaagggaacacagcaggtctggagtgcacatcttcaggctc

SEQ ID NO: 3693 - DNA, 110 bp, synthetic construct
  source 1..110: mol_type = other DNA
ctcttctggatcaagatgttggcagcaagtacaaataaagaacttgaccaactgactacagcagtagttcgcaaagtgttggcttcagaccagcagtatcagctttacct

SEQ ID NO: 3694 - DNA, 110 bp, synthetic construct
  source 1..110: mol_type = other DNA
caggtctacaagcaggtgaaagagtaagccaaaaaggagggctgaaagctaaacggcaaatttggaaaaaagcacagggtggcccattgcaagcaccaaggcagtcacag

SEQ ID NO: 3695 - DNA, 110 bp, synthetic construct
  source 1..110: mol_type = other DNA
cagccagaaccttctgaagcacatgatggaaatccctccccctccccgcccccagaactgctcagcttctatcagctgagtgtgatgtgggtggaaagacttcctcacaa

SEQ ID NO: 3696 - DNA, 110 bp, synthetic construct
  source 1..110: mol_type = other DNA
ctcccggcatctcctcattacattattagtaatatataaaataatggagttaccgttgtggttcagtggaaatgaatctgaccagtatacatgcagatgcaggttcaatc

SEQ ID NO: 3697 - DNA, 110 bp, synthetic construct
  source 1..110: mol_type = other DNA
cattacattattagtaatatataaaataatggagttaccgttgtggttcagtggaaatgaatctgaccagtatacatgcagatgcaggttcaatcgctggcctcgctcag

SEQ ID NO: 3698 - DNA, 110 bp, synthetic construct
  source 1..110: mol_type = other DNA
ttaagcttaaaaatatgtttaagctatgaacttgtaaatgactttttcaagtaactcaacaactactaaccaagaactgatacaagggcttctatcatagcagcagcaga

SEQ ID NO: 3699 - DNA, 110 bp, synthetic construct
  source 1..110: mol_type = other DNA
tcaacaactactaaccaagaactgatacaagggcttctatcatagcagcagcagaaagagtgagcctagtaatacagcaggagtcctcctagttgagggatcactagtta

SEQ ID NO: 3700 - DNA, 110 bp, synthetic construct
  source 1..110: mol_type = other DNA
cggataatggtgtaaaatcactatgactgaggaaagaaattaaatgaggtcaacggtaatgagttcttataatgtacatgtactaagctaactatttcatttgctcttgt

SEQ ID NO: 3701 - DNA, 110 bp, synthetic construct
  source 1..110: mol_type = other DNA
cccatttggggccactgggagcttctctgagttggcacctcattcattttgactgaataccagccatctaccagtcttttgggatgagaagtgtttcaggcttagattgt

SEQ ID NO: 3702 - DNA, 110 bp, synthetic construct
  source 1..110: mol_type = other DNA
aatggttgggaggtgaacattctcatcatcattctaacaaaattgtcattggcagcctgtttttcaacttgaattggccagcttcttccaaaacaacaacaaagcaaacc

SEQ ID NO: 3703 - DNA, 110 bp, synthetic construct
  source 1..110: mol_type = other DNA
gtgattcatcgtctttttcccccaacctccatttgtctagagggcctattaatgacaatacctatttctttgtggtctaataatggacttggtgagatagaacttcatgt

SEQ ID NO: 3704 - DNA, 110 bp, synthetic construct
  source 1..110: mol_type = other DNA
gtcaccaaatgctttttggttttccttagtgatcacgacagatcttcatggccagatcagccttttcaacgaatgcacagattgtacagatttttacccctacagcagga

SEQ ID NO: 3705 - DNA, 110 bp, synthetic construct
  source 1..110: mol_type = other DNA
aagaccaccatgctgccgtccttgcctccacaagggcacaggaaggaaggtatgcctggagaagctcaggctggagtcaggttcaaatccttgccttctctttctatgtg

SEQ ID NO: 3706 - DNA, 110 bp, synthetic construct
  source 1..110: mol_type = other DNA
catgaatgctagggcttcagttttcatcggagaacttgactggagaaggatcccctcccaagctcatgtggtgttggcaggattcaagttccgaagggttattggacaga

SEQ ID NO: 3707 - DNA, 110 bp, synthetic construct
  source 1..110: mol_type = other DNA
cattctgtatatggtattatttttttttacaatccaaatcttgtattgatgcagttaaaaaagcagaggtgcctagctcttactgtgtagaatagaaactcatgttactg

SEQ ID NO: 3708 - DNA, 110 bp, synthetic construct
  source 1..110: mol_type = other DNA
taaaaaagcagaggtgcctagctcttactgtgtagaatagaaactcatgttactggacccagccataaagaaataaaactccgttccatcaggaactgtgttcccaggca

SEQ ID NO: 3709 - DNA, 110 bp, synthetic construct
  source 1..110: mol_type = other DNA
atggttttgcatgctaaagatgaggtagttccctgacctgaagtctttttcctttactgcaggtgatccatctcaattttcagttgggcaatagtttaatgagtagcaag

SEQ ID NO: 3710 - DNA, 110 bp, synthetic construct
  source 1..110: mol_type = other DNA
actgcaggtgatccatctcaattttcagttgggcaatagtttaatgagtagcaagtagaagctccagtccttttatgtggccgtcaactcaccagccttccaaagctacc

SEQ ID NO: 3711 - DNA, 110 bp, synthetic construct
  source 1..110: mol_type = other DNA
atctttcttttatggaaagtatccccttaggatttagagggaacatttcacaggagagtcttcagatgttagaatgtttacttatatgaatatgttaatatgattttagg

SEQ ID NO: 3712 - DNA, 110 bp, synthetic construct
  source 1..110: mol_type = other DNA
aagggtcaactgtatatatacatgtatatgtatatgtacagcctgtatatgtacatgttggtccttgaagataatggctacggaaagacattgacagagcagcttaaatc

SEQ ID NO: 3713 - DNA, 110 bp, synthetic construct
  source 1..110: mol_type = other DNA
tgttggtccttgaagataatggctacggaaagacattgacagagcagcttaaatccatttggaatttggaggcaggaattttggaggcatttagctgtgttgctctcacc

SEQ ID NO: 3714 - DNA, 110 bp, synthetic construct
  source 1..110: mol_type = other DNA
gtaagctccctgagtaagtatctttatattttacttacttctgtatccccagtgcttaaagtagtgcctaatccaagaagatagtcaataaatattagttgaatgaatat

SEQ ID NO: 3715 - DNA, 110 bp, synthetic construct
  source 1..110: mol_type = other DNA
tccccagtgcttaaagtagtgcctaatccaagaagatagtcaataaatattagttgaatgaatatgctagttactgtaaatgaaagtctctgtaaataatgcaaagggaa

SEQ ID NO: 3716 - DNA, 110 bp, synthetic construct
  source 1..110: mol_type = other DNA
aacaatgtgtatacactctactttttctggcaatcctatgagagtaactggtcatggcctcagctaagtcctgcccttcttcttgtgtactacataccaacatcctctct

SEQ ID NO: 3717 - DNA, 110 bp, synthetic construct
  source 1..110: mol_type = other DNA
gcataaatcccattcatgagggccttactctcatgatgtaatcacctcccaaaggccatctcctaataccagctcactgggggttaggatttcaaatatgaattttgagg

SEQ ID NO: 3718 - DNA, 110 bp, synthetic construct
  source 1..110: mol_type = other DNA
catggtagtttctttactgtttttgtgaagcttgtatacaagggtcaagttactattttggtccagcctaaaattaagttacatggtgagtcttccaggtctcgtcttgc

SEQ ID NO: 3719 - DNA, 110 bp, synthetic construct
  source 1..110: mol_type = other DNA
aacacacacacatatgcatacacagtgcttttcaagcttctgtccttttctagttcttccaactctcacaactttgtgtcctaaaagagctaactaggtattgctttaac

SEQ ID NO: 3720 - DNA, 110 bp, synthetic construct
  source 1..110: mol_type = other DNA
tgaatgtctgtgtgcagtatttcaaaagcaatagttcatcttttggaaagccctatttattcagtaatgatttaagttgttaggccaatgctagtaaatttgaaggaaga

SEQ ID NO: 3721 - DNA, 110 bp, synthetic construct
  source 1..110: mol_type = other DNA
caacctgattctgaattaatattatgattcactttcagcatatggaatgtgtaatggaagctggttttaactggtatgatatgtgatcataggtaatgttcctcacaagt

SEQ ID NO: 3722 - DNA, 110 bp, synthetic construct
  source 1..110: mol_type = other DNA
ggaagctggttttaactggtatgatatgtgatcataggtaatgttcctcacaagtatgaatgtgtgctaattggcactaaaaagcataatgtgggacatgttaattgata

SEQ ID NO: 3723 - DNA, 110 bp, synthetic construct
  source 1..110: mol_type = other DNA
catatacctaacttctgaaaacaaagatgttgcccaatcagatatgacctctatttggacaaaaactacaatatgaagccaatatgaaggtctctagggaaaatatggca

SEQ ID NO: 3724 - DNA, 110 bp, synthetic construct; identical to SEQ ID NO: 3723
  source 1..110: mol_type = other DNA

SEQ ID NO: 3725 - DNA, 110 bp, synthetic construct
  source 1..110: mol_type = other DNA
gaaatagggtgtgaacaaagaaaaacaacagaaaaaattaaacacttccctcgtagctctattgtcaattttctcaacacacttaattgtatgatcattgaatcatccat

SEQ ID NO: 3726 - DNA, 110 bp, synthetic construct
  source 1..110: mol_type = other DNA
gtattttgttatggtagcctgagctaagacacatgcattaggaaaatatttaacaaatccctaagtgctttaatttgtacttgaggtaggaagatgcaaatcttaagaaa

SEQ ID NO: 3727 - DNA, 110 bp, synthetic construct
  source 1..110: mol_type = other DNA
agcctgagctaagacacatgcattaggaaaatatttaacaaatccctaagtgctttaatttgtacttgaggtaggaagatgcaaatcttaagaaaatggtacaaatgcca

SEQ ID NO: 3728 - DNA, 110 bp, synthetic construct
  source 1..110: mol_type = other DNA
ttgttctggagttgtctgaattgttttgagttatatgtttaactcaacatgaccttgtctgagctcagcagggcttctcgtcctccatctagaaattttctcagtgcaaa

SEQ ID NO: 3729 - DNA, 110 bp, synthetic construct
  source 1..110: mol_type = other DNA
tgccctagccattttcaaaagttactattttcatggagattttagcctgatatcgtgcgtgcaatttctctggaaatttttgggcagagcattgagctttacgaagtggc

SEQ ID NO: 3730 - DNA, 110 bp, synthetic construct
  source 1..110: mol_type = other DNA
tgcgtgcaatttctctggaaatttttgggcagagcattgagctttacgaagtggcttggactataaatctatggcttatataaaagtggccaagagaggttttgtaggct

SEQ ID NO: 3731 - DNA, 110 bp, synthetic construct
  source 1..110: mol_type = other DNA
aatatgagcatgaatttgtttttatttcattttaactgaaatcttcagctcatgctgtccttgatttgagggttctattgttcaaattacatgagaaatagatccctatt

SEQ ID NO: 3732 - DNA, 110 bp, synthetic construct
  source 1..110: mol_type = other DNA
ttgaggatgactaagagtcccccccaaaaaaagagtactgcatgtttgccccaatcctgattcttaactgaaaccctgttttcctccttttagaatataaaactagctgc

SEQ ID NO: 3733 - DNA, 110 bp, synthetic construct
  source 1..110: mol_type = other DNA
cctgattcttaactgaaaccctgttttcctccttttagaatataaaactagctgcagttcttccccaggggaggacaccgtctttcaggcattagcctgctgtggcctcc

SEQ ID NO: 3734 - DNA, 110 bp, synthetic construct
  source 1..110: mol_type = other DNA
ctgcccccagacagcagaaacagccagctgaggaaccaaccaggtcctcgtctgccaggacacccaagaaaactacatttcaggctgagacagtcctgggatgcaagcag

SEQ ID NO: 3735 - DNA, 110 bp, synthetic construct
  source 1..110: mol_type = other DNA
catctgggtaagatggcctctaaaaccccatttagattcatgggatgaattttcttgtgtgccttgtaaatcaattctgaaaacaaccccagaagagctggggacctgtt

SEQ ID NO: 3736 - DNA, 110 bp, synthetic construct
  source 1..110: mol_type = other DNA
tgtgtgccttgtaaatcaattctgaaaacaaccccagaagagctggggacctgttttaagcaaagtaaagactacaggcaggaagtctagcttcccaaagtggctgtttt

SEQ ID NO: 3737 - DNA, 110 bp, synthetic construct
  source 1..110: mol_type = other DNA
cctgtaggtctattttaaagggtggataaaaagatgggccaattgtttttcatctttgctgtggtcagaataagatgcaatggcttaagtttgaagaacaagctgtctcc

SEQ ID NO: 3738 - DNA, 110 bp, synthetic construct
  source 1..110: mol_type = other DNA
ttgctgtggtcagaataagatgcaatggcttaagtttgaagaacaagctgtctccgttatagaggagaaagagcagtcctttatcagaccaggaaccatctccccccacc

SEQ ID NO: 3739 - DNA, 110 bp, synthetic construct
  source 1..110: mol_type = other DNA
aggtgtcagaaaatcctttggatggcgttccttgatggggaatgcaagagatgggaaagaagagattactaactccatcaccactaaattatagtttactaactacatca

SEQ ID NO: 3740 - DNA, 110 bp, synthetic construct
  source 1..110: mol_type = other DNA
aaagaagagattactaactccatcaccactaaattatagtttactaactacatcactgataaatttttttttacaaggcttgttcctaatgtttaacggggcgggggcgg

SEQ ID NO: 3741 - DNA, 110 bp, synthetic construct
  source 1..110: mol_type = other DNA
tagagttgaatttttaaggatcaggagtcctggcctagtgcttgtcaaaagtctccttctgaacaggagttcaagttgggcactgaggcaaatacccagtgaagcagtca

SEQ ID NO: 3742 - DNA, 110 bp, synthetic construct
  source 1..110: mol_type = other DNA
cttctgaacaggagttcaagttgggcactgaggcaaatacccagtgaagcagtcacacgcggtgaaaattgtttctttactcagtctcccatatcaatttaatgagcatt

SEQ ID NO: 3743 - DNA, 110 bp, synthetic construct
  source 1..110: mol_type = other DNA
cagactagacaactaaatgatagcagccagcacccaggcaccagccatgaaagagtcagtcctacatcctccagccccagagcagctgcccagatgactagagccatgag

SEQ ID NO: 3744 - DNA, 110 bp, synthetic construct
  source 1..110: mol_type = other DNA
tcagtcctacatcctccagccccagagcagctgcccagatgactagagccatgagtaagtcaaggcaagaactgtcctgctcaggtagagaatgacgattaaataagtag

SEQ ID NO: 3745 - DNA, 110 bp, synthetic construct
  source 1..110: mol_type = other DNA
gagactcttgatggaggggccaaagagctggatagtgtctaagaccctgggggtaagcctctctcaaagcatgtgcagagcagcctgcccgatccgggtttgtgcattca

SEQ ID NO: 3746 - DNA, 110 bp, synthetic construct
  source 1..110: mol_type = other DNA
tcttttccaggatccctcctcagttcctcatggctctgggtgccaaggcttcatcttctgtttgatcaggccaaaaaatactgcagattttctctcagctttcagcttcc

SEQ ID NO: 3747 - DNA, 110 bp, synthetic construct
  source 1..110: mol_type = other DNA
ttctgtttgatcaggccaaaaaatactgcagattttctctcagctttcagcttccacatagcaactgcaatctcttctgaggataaagctctagaaagtaggaaaattac

SEQ ID NO: 3748 - DNA, 110 bp, synthetic construct
  source 1..110: mol_type = other DNA
agcgatgatcacaggggaattgagtgcctttccttgaatctttcagggaactgtaagtcttaaaggaagaccgtttatctggaaggcactggatgtccaggaatcttgta

SEQ ID NO: 3749 - DNA, 110 bp, synthetic construct
  source 1..110: mol_type = other DNA
agtcttaaaggaagaccgtttatctggaaggcactggatgtccaggaatcttgtagctcacagacctgcaaggttgtccttacctaaggattttcatactaagtaagggg

SEQ ID NO: 3750 - DNA, 110 bp, synthetic construct; identical to SEQ ID NO: 3748
  source 1..110: mol_type = other DNA

SEQ ID NO: 3751 - DNA, 110 bp, synthetic construct; identical to SEQ ID NO: 3749
  source 1..110: mol_type = other DNA

SEQ ID NO: 3752 - DNA, 110 bp, synthetic construct
  source 1..110: mol_type = other DNA
cattatgagaatcaaaaagttgatttgtcttttaagctgtaatctccttgctcctgccccttgaatttctagtgtttggtggcagctttaatttttttggcagagctatt

SEQ ID NO: 3753 - DNA, 110 bp, synthetic construct; identical to SEQ ID NO: 3752
  source 1..110: mol_type = other DNA

SEQ ID NO: 3754 - DNA, 110 bp, synthetic construct
  source 1..110: mol_type = other DNA
ccaaatggtatggtcagtctgtggattgggttatttaccaactactcagctgtgtgtgtgttacacatttatgtaaccaattgatttaaatagtagcaggacaatgaggc

SEQ ID NO: 3755 - DNA, 110 bp, synthetic construct
  source 1..110: mol_type = other DNA
gtgtgttacacatttatgtaaccaattgatttaaatagtagcaggacaatgaggccagcctgcttccccaaggtagaggcatgacttctagtccattgcttgagttttca

SEQ ID NO: 3756 - DNA, 110 bp, synthetic construct
  source 1..110: mol_type = other DNA
ttcctgcgggtagtaatttgacattgaaaccttaatgacaccctttcctgtgctttatcaaatcagtaatggaagtttcagcattaagagactagactccactcttggcc

SEQ ID NO: 3757 - DNA, 110 bp, synthetic construct
  source 1..110: mol_type = other DNA
tatcaaatcagtaatggaagtttcagcattaagagactagactccactcttggcctggactttctatatgtaaagaaaaagttgaactcattgaactcatcttagggtaa

SEQ ID NO: 3758 - DNA, 110 bp, synthetic construct
  source 1..110: mol_type = other DNA
tagtgggccacagtgagttccctgtactttcaaaatgacccccagcgcaagccggaaggttcagaagcttggaaataaacacgtaatcaactttcccatccaggcagaat

SEQ ID NO: 3759 - DNA, 110 bp, synthetic construct
  source 1..110: mol_type = other DNA
aaggttcagaagcttggaaataaacacgtaatcaactttcccatccaggcagaatagttcctacccttttttttttttttttcccaagagccgatgtgcacaatgcaaac

SEQ ID NO: 3760 - DNA, 110 bp, synthetic construct
  source 1..110: mol_type = other DNA
ttttttttaacttgcaagagctcctcattattgtatatattggcctttgtctacctgagtcattgaaaaaacttactctggagttgctattgtggctcagtgtaacaaat

SEQ ID NO: 3761 - DNA, 110 bp, synthetic construct
  source 1..110: mol_type = other DNA
tgttccaccactgtttccgtgctcagaacattagacacacaggggatagaaaaacaaaagtgctgaacgaaagacagatgttccaacaaaggtgccagaattatggcaag

SEQ ID NO: 3762 - DNA, 110 bp, synthetic construct
  source 1..110: mol_type = other DNA
aaaagtgctgaacgaaagacagatgttccaacaaaggtgccagaattatggcaaggaaactcagaaatgcctgccagggcatcacagggctcaccctgtacacaggtctt

SEQ ID NO: 3763 - DNA, 110 bp, synthetic construct
  source 1..110: mol_type = other DNA
tttgtattttcttaacatatgcccttgaaagaaattataaccggatttgtattataattaacctgccagaaatagactgaggagaggtctaggaaaggattccccttatt

SEQ ID NO: 3764 - DNA, 110 bp, synthetic construct
  source 1..110: mol_type = other DNA
gagttttgttatctgcttgaaaagaatacttggtatagtttacagaatgcaagcgttcagtgatctaagaactaatggagcttaaaatgtatgtatcaatagttgaccat

SEQ ID NO: 3765 - DNA, 110 bp, synthetic construct
  source 1..110: mol_type = other DNA
tgtacactcggggagcacaatctgaagtccatggcaaaatgataaaaataaggacaataagactgccttttactctaagattattcttcctattttttaaaagtgttaaa

SEQ ID NO: 3766 - DNA, 110 bp, synthetic construct
  source 1..110: mol_type = other DNA
agtccatggcaaaatgataaaaataaggacaataagactgccttttactctaagattattcttcctattttttaaaagtgttaaagcgtcctttctttcattcatggtga

SEQ ID NO: 3767 - DNA, 110 bp, synthetic construct
  source 1..110: mol_type = other DNA
tagccctggatttgagtcttgatgctgccactcattaatggtgtgactttaggcaagttacttaacctctcagcttcaattttcacacctgtaaagagtagaagacaata

SEQ ID NO: 3768 - DNA, 110 bp, synthetic construct
  source 1..110: mol_type = other DNA
agttacttaacctctcagcttcaattttcacacctgtaaagagtagaagacaataatacctgcttcaaatgattgttaggagaattaaataagaatatttacatgcacat

SEQ ID NO: 3769 - DNA, 110 bp, synthetic construct
  source 1..110: mol_type = other DNA
tcagttttaattttttctcctccacagccattctacagacagccatctgaacccaggggacaggatttgacttactgtagcttctctctctctccctctttttttttttt

SEQ ID NO: 3770 - DNA, 110 bp, synthetic construct
  source 1..110: mol_type = other DNA
cacagcttcctaattccattttaggtctgagtcccttaactctctttagaactaaaataaactctgataacagtggttttgcgtctgaggaaggagactgggtggtgggg

SEQ ID NO: 3771 - DNA, 110 bp, synthetic construct
  source 1..110: mol_type = other DNA
aataaactctgataacagtggttttgcgtctgaggaaggagactgggtggtggggtaggaagaacacatttgtcactctatgtgctttcactgtataccttgtgcatttt

SEQ ID NO: 3772 - DNA, 110 bp, synthetic construct
  source 1..110: mol_type = other DNA
ggtgttctctaagttcctttcttctaattagatcagtctttgcacagtcagaagccaggcatgtatgagggtgtggactgggatacctggccctcagagatgctgggaca

SEQ ID NO: 3773 - DNA, 110 bp, synthetic construct
  source 1..110: mol_type = other DNA
caggcatgtatgagggtgtggactgggatacctggccctcagagatgctgggacaaaagcaccgacagatgcagggctcctaggggcacataatcttgaggtctcctttg

SEQ ID NO: 3774 - DNA, 110 bp, synthetic construct
  source 1..110: mol_type = other DNA
ctcggtatcatagggcttatctggtcatgatgaaaagggtgacagtacttcccggtctgcctaggacagtaccatttcacatgtgccatcccgctactccatccagttag

SEQ ID NO: 3775 - DNA, 110 bp, synthetic construct
  source 1..110: mol_type = other DNA
ttcattcatgctgtatgttagattccaaatacaggaatggcttagctcaagatgctgcacatagaaggccagagacaactggggaagtcatcttcttccaaagcttgggg

SEQ ID NO: 3776 - DNA, 110 bp, synthetic construct; identical to SEQ ID NO: 3775
  source 1..110: mol_type = other DNA

SEQ ID NO: 3777 - DNA, 110 bp, synthetic construct; identical to SEQ ID NO: 3775
  source 1..110: mol_type = other DNA

SEQ ID NO: 3778 - DNA, 110 bp, synthetic construct; identical to SEQ ID NO: 3775
  source 1..110: mol_type = other DNA

SEQ ID NO: 3779 - DNA, 110 bp, synthetic construct
  source 1..110: mol_type = other DNA
gaaagtgaatcctatcaccaaggcaacagcttgaccgcagtggtcagggtgaccgcagagtctaatcctagcagacctgagttcaaatcctgtgatttgggtctgtgagc

SEQ ID NO: 3780 - DNA, 110 bp, synthetic construct
  source 1..110: mol_type = other DNA
agctgcttcttcagcagaaggaatgcacaagctgaaggcctcctgaaatctctctggttccctggtggcctccaggatgcgttcatagcccgcgtgacccaggtgggggc

SEQ ID NO: 3781 - DNA, 110 bp, synthetic construct
  source 1..110: mol_type = other DNA
ggttccctggtggcctccaggatgcgttcatagcccgcgtgacccaggtgggggcaaagtgctgcttatatggtgtgtcagactgtgctccccacaggctgctggcatac

SEQ ID NO: 3782 - DNA, 110 bp, synthetic construct
  source 1..110: mol_type = other DNA
ggaaaggggcatccctcaagttccacctggagttgagatccttcctcgctcaaaggccttgctgctgggaacagtcatgccactgacttcctcctaaagtacatgtgagc

SEQ ID NO: 3783 - DNA, 110 bp, synthetic construct
  source 1..110: mol_type = other DNA
catcttttcactctgctctaaaagatcaatgatcggtttttaacctttctaggtacaatcattcgtagctttctatgggagtgatattctgaagaatttttcttttttct

SEQ ID NO: 3784 - DNA, 110 bp, synthetic construct
  source 1..110: mol_type = other DNA
aatggtgtcctagaagcgctaacagtttagcaagaggactctcaaagtatgtacagtctcgaggttcctccatttgcaaaaggaagagagttcttttgagagttctcttg

SEQ ID NO: 3785 - DNA, 110 bp, synthetic construct
  source 1..110: mol_type = other DNA
cactgactcacattatgtgtgagcttcattgccaccccctgtcatcttgggaccctcagggtcagaaatggcagctctcccgtaaggagaattaacgattcaagtttctc

SEQ ID NO: 3786 - DNA, 110 bp, synthetic construct
  source 1..110: mol_type = other DNA
tggcccaggaacttcctcatgccatgggcatggccaaaaaataaaatataaaagcaaatgtgttaaaattgagattattctcggagttcccatcagggtgcagtggttaa

SEQ ID NO: 3787 - DNA, 110 bp, synthetic construct
  source 1..110: mol_type = other DNA
ctcatgccatgggcatggccaaaaaataaaatataaaagcaaatgtgttaaaattgagattattctcggagttcccatcagggtgcagtggttaacgaatccggctagga

SEQ ID NO: 3788 - DNA, 110 bp, synthetic construct
  source 1..110: mol_type = other DNA
gacactgttctgggccatggagatatcacagagaataaaacaaaaataatttccaggacattgtataactccaatgcattaatggtatgtgaaaactctgcaaactctaa

SEQ ID NO: 3789 - DNA, 110 bp, synthetic construct
  source 1..110: mol_type = other DNA
gtgtctatggccagttttcctccactcaggtcagcagctttgggttaggccccgccctaagccagtgatgtccctgtcacttgatcacatctgcaaagaccggatttcca

SEQ ID NO: 3790 - DNA, 110 bp, synthetic construct
  source 1..110: mol_type = other DNA
atctcagcaaatacccagaacacctcctctaaccacaagcagtgccaggcaagagagcagaaagacaaagctggttcggcccctgcctcctgggcttcacgctgaatgat

SEQ ID NO: 3791 - DNA, 110 bp, synthetic construct
  source 1..110: mol_type = other DNA
gtctgtggaatctacaactaggagaattttctagaggcatatcaaagtgtcaaggattaatcagtcactagaataaagcagcccatgatatatgaatcctttcctgagac

SEQ ID NO: 3792 - DNA, 110 bp, synthetic construct
  source 1..110: mol_type = other DNA
attaatcagtcactagaataaagcagcccatgatatatgaatcctttcctgagactgcggactgaagaccgcagactggtgaccacggacctggcaacttttttttgaat

SEQ ID NO: 3793 - DNA, 110 bp, synthetic construct
  source 1..110: mol_type = other DNA
ttttgtctttttgtcttttttgtcttttgttgttgttgttgttgttgttgttgctgtttcttgggccgctcccacggcatggttttttaaagcagctgttgttttgaaaa

SEQ ID NO: 3794 - DNA, 110 bp, synthetic construct
  source 1..110: mol_type = other DNA
gtttcttgggccgctcccacggcatggttttttaaagcagctgttgttttgaaaagaaaaagaaagatataactgcacacttcctataatttatagtgttctgggacaag

SEQ ID NO: 3795 - DNA, 110 bp, synthetic construct
  source 1..110: mol_type = other DNA
ctgtgcggggacgtgcaagcccaactaggcatgtcatgactcgtgtgtactcatactcagctctgctccccaaatgtcatcttagccatttcactttccctctctggacc

SEQ ID NO: 3796 - DNA, 110 bp, synthetic construct
  source 1..110: mol_type = other DNA
ggagacttcctcagggttactttagctgagccgtccttcaaggagagaagcctaggatccacacaagtgacagaggcctccagggttaccagccacaacccactgcacaa

SEQ ID NO: 3797 - DNA, 110 bp, synthetic construct
  source 1..110: mol_type = other DNA
ctaaggaaaccaaggatcagagtgttatgtaaacatgcacaagcccataaagctagcaagtagaggcaagggttgaagccaaactccaaagctgttgctggtaccatttt

SEQ ID NO: 3798 - DNA, 110 bp, synthetic construct
  source 1..110: mol_type = other DNA
gcaagtagaggcaagggttgaagccaaactccaaagctgttgctggtaccattttgcagtatcatctgtgtcaggtgaggagattcccatacaggctctgtagggtgcca

SEQ ID NO: 3799 - DNA, 110 bp, synthetic construct; identical to SEQ ID NO: 3797
  source 1..110: mol_type = other DNA

SEQ ID NO: 3800 - DNA, 110 bp, synthetic construct; identical to SEQ ID NO: 3798
  source 1..110: mol_type = other DNA

SEQ ID NO: 3801 - DNA, 110 bp, synthetic construct
  source 1..110: mol_type = other DNA
aaatgtgcattttagaattaatgaaatatagcaaattttggggttgtcagtaagttgcaatatttaaaccctaagaccagatgggatcatcaggaagagaagaagaatta

SEQ ID NO: 3802 - DNA, 110 bp, synthetic construct
  source 1..110: mol_type = other DNA
tgcaatatttaaaccctaagaccagatgggatcatcaggaagagaagaagaattagagatgaccaaatcaagctcctaaaatatggtgtcttggtttgaatcttggtttt

SEQ ID NO: 3803 - DNA, 110 bp, synthetic construct
  source 1..110: mol_type = other DNA
cctggggcatcagctacagatgattgagctctcagaaactcaggttgaaccccaggagtgctggcagacttgttgcaaggatctcagggaggactgggtggacccagctc

SEQ ID NO: 3804 - DNA, 110 bp, synthetic construct
  source 1..110: mol_type = other DNA
gagtgctggcagacttgttgcaaggatctcagggaggactgggtggacccagctcaggaacttgggctgctggcttacctacacagcagaggaccccgagatgctttttc

SEQ ID NO: 3805 - DNA, 110 bp, synthetic construct
  source 1..110: mol_type = other DNA
cccaacacagtgggttaaagatccagaattgccatagctgaagcttagggcactattgaggcttgtatcttatccctggcccgggaactctgtatgccgtggggcagcaa

SEQ ID NO: 3806 - DNA, 110 bp, synthetic construct
  source 1..110: mol_type = other DNA
aattttctcccctgcaatatgtcgctttgtagtttgaccctgtttgggaaaattaatcaacagctgggctccttgtgttgatcatttgttttccttgcaatgggcaggag

SEQ ID NO: 3807 - DNA, 110 bp, synthetic construct
  source 1..110: mol_type = other DNA
gtattccgtggtttggacaccccagtctgttctcccactccatgctagtttccctcagtcaccagaactgaatttctattatcacattttactgatttaggcctatgtgg

SEQ ID NO: 3808 - DNA, 110 bp, synthetic construct
  source 1..110: mol_type = other DNA
cagtcaccagaactgaatttctattatcacattttactgatttaggcctatgtgggttttttccattttttgactgcaggaaatatgtgcaacatgaaatttaccactat

SEQ ID NO: 3809 - DNA, 110 bp, synthetic construct
  source 1..110: mol_type = other DNA
cacagcgtatgttctcaggaaatgggtgagatttaatgcacccataactgagacagtggtggattcgaaacctgatggtttgtatttgaatcctagttttactgttccag

SEQ ID NO: 3810 - DNA, 110 bp, synthetic construct
  source 1..110: mol_type = other DNA
gtggtggattcgaaacctgatggtttgtatttgaatcctagttttactgttccagctcttatcaactgggcctcagttatctgcatctataaaacaggtatgctgtgact

SEQ ID NO: 3811 - DNA, 110 bp, synthetic construct
  source 1..110: mol_type = other DNA
tctggaattactgtatttatttctgtgcttgttcatcatctccctctctagaagggaagcactgtgaaggcatacagttcagcctgtttactgctgtgttcccagcacct

SEQ ID NO: 3812 - DNA, 110 bp, synthetic construct
  source 1..110: mol_type = other DNA
accactgctgaatgaaactcatgggcatagtgatctctgagcttttgatgttcccctgaactgagttgggaatgccagggctgctggtagcagcccccagctgactttgt

SEQ ID NO: 3813 - DNA, 110 bp, synthetic construct
  source 1..110: mol_type = other DNA
ctgaactgagttgggaatgccagggctgctggtagcagcccccagctgactttgtgtgggcaaagacaggcagacttgaaaacagaccctctgcaaataagccgtgtgtt

SEQ ID NO: 3814 - DNA, 110 bp, synthetic construct
  source 1..110: mol_type = other DNA
tgggagatttgtttgaaggacataagctaagctcttcagcgtggtgtggagaagggtttaacctttagaatttcaactctagccttgggtaagttatttagctactcctg

SEQ ID NO: 3815 - DNA, 110 bp, synthetic construct
  source 1..110: mol_type = other DNA
cctacatttcccatctccaggaactagagcttgtgtaacatgcttgtgtaaacatttccccttgaaccttagactcacttctaaagaatagaatatggaagaaatgaggg

SEQ ID NO: 3816 - DNA, 110 bp, synthetic construct
  source 1..110: mol_type = other DNA
ctcccctgccagagcgtccacactgtcatccctgtagtctcgagtcacagggaaacagctcagcaggggcagcaacttaccacagtcactaggcctacacttcgtgtttc

SEQ ID NO: 3817 - DNA, 110 bp, synthetic construct
  source 1..110: mol_type = other DNA
cagctcagcaggggcagcaacttaccacagtcactaggcctacacttcgtgtttcctaggggttgttatcctggttgagcaaaaccccaaaactgtgacagagttgccgg

SEQ ID NO: 3818 - DNA, 110 bp, synthetic construct
  source 1..110: mol_type = other DNA
tggcagagacaggaactggctttggaatcaggcctgtgttcaacccccagcactggcattgatgacccccaaggctgagctttacctctctgagtctcagtttccttctc

SEQ ID NO: 3819 - DNA, 110 bp, synthetic construct
  source 1..110: mol_type = other DNA
gcattgatgacccccaaggctgagctttacctctctgagtctcagtttccttctctggaaagtggaaatgggacctgcctttgcagtgggtgtcagagatgtatggagcg

SEQ ID NO: 3820 - DNA, 110 bp, synthetic construct
  source 1..110: mol_type = other DNA
ttccagcccgttggctaactgttcaagtgctttattaaacacccactgtatgtaaagcatggtgtaagctgcctgtcccggggaccaggcagtccctttgtctgaccttg

SEQ ID NO: 3821 - DNA, 110 bp, synthetic construct
  source 1..110: mol_type = other DNA
agcatggtgtaagctgcctgtcccggggaccaggcagtccctttgtctgaccttggccatgtgtaccagtatctcagtccttggagcatgctggtttctttagagttgca

SEQ ID NO: 3822 - DNA, 110 bp, synthetic construct
  source 1..110: mol_type = other DNA
agatgttttgtggtaccttttggggaaccccaggagctctaaagagcctctgctgctcaccccaaaattgtatgtcccaggaaaggcagctggggggaactttgttggat

SEQ ID NO: 3823 - DNA, 110 bp, synthetic construct
  source 1..110: mol_type = other DNA
ctcaccccaaaattgtatgtcccaggaaaggcagctggggggaactttgttggatcttctgagagctgagtaatggttaggaacaagaacccttacttcgtttagcaata

SEQ ID NO: 3824 - DNA, 110 bp, synthetic construct
  source 1..110: mol_type = other DNA
ttccttcctggtgtgatcgaatattttgaaagctttatgtttgccagacaaatagttgaagaaaaattccactgatgaaagggaatgacctccctccccctccccctagg

SEQ ID NO: 3825 - DNA, 110 bp, synthetic construct
  source 1..110: mol_type = other DNA
tctggtgtaggccagcagctggagctaggattacacccctagcctgggaacctacataccgttgtggctcagtggcaatgaaggctattatccatgaggtttcaggttct

SEQ ID NO: 3826 - DNA, 110 bp, synthetic construct
  source 1..110: mol_type = other DNA
caactttgccacgacagaaactccaagcctcagtattggtatcagacaactaatatccccttctaccctcacaggcctccctcgctggtgaggacagctcctctgggagc

SEQ ID NO: 3827 - DNA, 110 bp, synthetic construct
  source 1..110: mol_type = other DNA
tccccttctaccctcacaggcctccctcgctggtgaggacagctcctctgggagcaaagattagtaagagcccattcctgccattactcagtgccacctgcagggggaag

SEQ ID NO: 3828 - DNA, 110 bp, synthetic construct
  source 1..110: mol_type = other DNA
gtgaatggagggttaggagcttggtaaagtaaggtcagaaatagagggagatgggtcacaggggacattgaaagcagtgcacggggcctcacttgttctcatgagttgag

SEQ ID NO: 3829 - DNA, 110 bp, synthetic construct
  source 1..110: mol_type = other DNA
tcacaggggacattgaaagcagtgcacggggcctcacttgttctcatgagttgagccgacttgaaggttgtagccattgctcttgtagctgggcctgcctcacacttggc

SEQ ID NO: 3830 - DNA, 110 bp, synthetic construct
  source 1..110: mol_type = other DNA
gccgagcccagagatggggaaattagttcaccctggaacctaacctggtcaaaatgaatggggaagaggaattttagacccacgtcagtgaaatccaaaacctccttttt

SEQ ID NO: 3831 - DNA, 110 bp, synthetic construct
  source 1..110: mol_type = other DNA
gaatggggaagaggaattttagacccacgtcagtgaaatccaaaacctccttttttggggcaccccaccctccacctcaagcctggagaacacttttgtccctggtccca

SEQ ID NO: 3832 - DNA, 110 bp, synthetic construct
  source 1..110: mol_type = other DNA
gcaccctaaatgatctagccctccattacctctctgaccttgccctctcctcagtcacagtaaatttctgctcttcttcaaacacatcaggcgtgccttctcctcagagt

SEQ ID NO: 3833 - DNA, 110 bp, synthetic construct
  source 1..110: mol_type = other DNA
gctgaatggaggaagagtttcagaaaggtagggtttaaatattgggaacattaggcagaacacagggtcactgggaataaaagggaaagagcaagtccctgggaaatgaa

SEQ ID NO: 3834 - DNA, 110 bp, synthetic construct
  source 1..110: mol_type = other DNA
cagaacacagggtcactgggaataaaagggaaagagcaagtccctgggaaatgaagctggtaagggcatagtctaaaaccactctttctagtggaattatctccaagatt

SEQ ID NO: 3835 - DNA, 110 bp, synthetic construct
  source 1..110: mol_type = other DNA
atagtaaaatgagttcactcccttgtacctttttttaaaaaacccacatgatcggtttctcaaacaatgcactttccttctttggggctatcattaacacataccacaga

SEQ ID NO: 3836 - DNA, 110 bp, synthetic construct
  source 1..110: mol_type = other DNA
tttttagaggaacatagtcacagtggagctttggcatttaaaattcctgggctacggaagccctcggtttgcctagttggcggccatctaaagcagaatgacctgcccca

SEQ ID NO: 3837 - DNA, 110 bp, synthetic construct
  source 1..110: mol_type = other DNA
tctccttttgctcctctgccagtgaactctagacgccttggccgcctcagaattcagttctttgatcttagacaagtggctcagctcccctgggttcttctccttgtgcg

SEQ ID NO: 3838 - DNA, 110 bp, synthetic construct
  source 1..110: mol_type = other DNA
ttttatttctcttactttccttttcagtattgtccacatgattccacacttatgcttgtaccagccagactagcttgtgaggatcatcactttgatgtgctttgtttttt

SEQ ID NO: 3839 - DNA, 110 bp, synthetic construct
  source 1..110: mol_type = other DNA
aatcagccaacttttttgagcacagatactgttgctatccagttttttttttttttagaaatacgcaattttatagcccctattgaacagacataggaagcttattttta

SEQ ID NO: 3840 - DNA, 110 bp, synthetic construct
  source 1..110: mol_type = other DNA
tgggcagcaagtggactagaacactggcaactcaggtgccaagccttgccggcaagctgttgaattgatgctgggctgaggaagggcctggcagtgtggagttaagacag

SEQ ID NO: 3841 - DNA, 110 bp, synthetic construct
  source 1..110: mol_type = other DNA
aggagaggagctcttcaggttggcagggctacgggtgttcgtggtggtttgtgcagctgagcctgaattcttggccatttgaaaatgggtgaacacacctgtacatttcc

SEQ ID NO: 3842 - DNA, 110 bp, synthetic construct
  source 1..110: mol_type = other DNA
gcgggacctgagctaatgcaatgccccacatagaaaggggagctgggtctgttgctcagcactgcaggtgcgcccccagcacaaggctttgcccctagttggttctcaaa

SEQ ID NO: 3843 - DNA, 110 bp, synthetic construct
  source 1..110: mol_type = other DNA
aaataaatagatggagaaaatatactatgctgacgttagtgaaaagaaagcaggagtagctatattaatttcagacagaattaacttcaagagagttatctgggataaag

SEQ ID NO: 3844 - DNA, 110 bp, synthetic construct
  source 1..110: mol_type = other DNA
tcctcagaaagagccggtggtaataaatgctccagcaacctcacaggagggctgggtgactcagtacagtggaaactgtaaaatgcttaggaaaatagagccctataaat

SEQ ID NO: 3845 - DNA, 110 bp, synthetic construct
  source 1..110: mol_type = other DNA
taaaatgagagaattgatgtaggtgggtattttctgttggtagtctcttagtaattggggaaaaaggtgaaagagtgaccaaataagtttggaaacacagagttaaaact

SEQ ID NO: 3846 - DNA, 110 bp, synthetic construct
  source 1..110: mol_type = other DNA
gaaaagcatatcattcaataagcagccttctgcagtcgccgctgcactaatgcgccgtgggtaagagcgggccgaagctcctcttgcctccctcttcccctccagctgta

SEQ ID NO: 3847 - DNA, 110 bp, synthetic construct
  source 1..110: mol_type = other DNA
ttaggcacatgctgttatcatcatgcccattttacagatgaggaaactgaggctcagggtggttaattagcttatgaagtctcacaggatcagcactaggatgaacccag

SEQ ID NO: 3848 - DNA, 110 bp, synthetic construct
  source 1..110: mol_type = other DNA
tggctgaggaggaaccaatttcctgcacaggcctagcctggtcctggaacctgcagctgccacttgctggggctgcctgggcccagggctgtcatgagctgggagtgatg

SEQ ID NO: 3849 - DNA, 110 bp, synthetic construct
  source 1..110: mol_type = other DNA
acggctccagttgacactggacttcaaccacatgagagaacataagacagaactgatcagctgagcccagcccaatgcccaggactttgagggattaattaatgacagcc

SEQ ID NO: 3850 - DNA, 110 bp, synthetic construct
  source 1..110: mol_type = other DNA
atcagctgagcccagcccaatgcccaggactttgagggattaattaatgacagcctcttaagacactcaactttgtggggggttgctacatagcaacagaaaactagaat

SEQ ID NO: 3851 - DNA, 110 bp, synthetic construct
  source 1..110: mol_type = other DNA
tctctttgccatgaagggagggcctaggtcagccctctttgccactcttgattttcggcattacgtgtgcctgtcgggcttgaggttttgaggatatgattcagtctcgc

SEQ ID NO: 3852 - DNA, 110 bp, synthetic construct
  source 1..110: mol_type = other DNA
gcaaatcatggaggggggtgggtgtggaaaaaagacccaggcactggcccaagccaaatggtaacgtggacctccctctactatggaaaacaaagctacacattccaacc

SEQ ID NO: 3853 - DNA, 110 bp, synthetic construct
  source 1..110: mol_type = other DNA
aaatggtaacgtggacctccctctactatggaaaacaaagctacacattccaacctgagacagaaggagctgcagatgcctgactgttctgcaccctctgcattgctacc

SEQ ID NO: 3854 - DNA, 110 bp, synthetic construct
  source 1..110: mol_type = other DNA
attttagccccacaatggcacctcggggtatgcatgccatttttagaaactccgatacaagctcagagagatgaacagctttccctaggtctcacagctaagcagggagc

SEQ ID NO: 3855 - DNA, 110 bp, synthetic construct
  source 1..110: mol_type = other DNA
catgaatgtttttaaggcttagggctggactagcctgggtcacttgcacctacattccattgggaagaactcagttctagcctctcaatctatcagaagggagctgggaa

SEQ ID NO: 3856 - DNA, 110 bp, synthetic construct
  source 1..110: mol_type = other DNA
tccattgggaagaactcagttctagcctctcaatctatcagaagggagctgggaaatgtagttctgctgtgagcccaggaagaggacgtggtagggtgagcctccagcat

SEQ ID NO: 3857 - DNA, 110 bp, synthetic construct
  source 1..110: mol_type = other DNA
tgaaaaactatatacatcaaagattactggtcgtcctttaatttctgttcttcttttcttctttggttatagaccccctgacttttagctgggcacatggctacctgaaa

SEQ ID NO: 3858 - DNA, 110 bp, synthetic construct
  source 1..110: mol_type = other DNA
ccccacctccccaagcaaattaaaccagaccttctgggggtggggccctggcatctgcattttaaaaccccttcatggtttcagtgtgcacccaggagtgagacccaatg

SEQ ID NO: 3859 - DNA, 110 bp, synthetic construct
  source 1..110: mol_type = other DNA
cttctcttcgctgctggcctcccagctcctccctcctggcccttcgccctctccctgttgttctcttcccagagcctcctgtgtgacttaaccaaaggcagaaaagctac

SEQ ID NO: 3860 - DNA, 110 bp, synthetic construct
  source 1..110: mol_type = other DNA
ttcagtcagtgcagaagctggacctggaacaagctcacgtatttctgaacctgtgattttttccgctgcccgtgaccctgatggacaggaaaagttctggctgggctggc

SEQ ID NO: 3861 - DNA, 110 bp, synthetic construct
  source 1..110: mol_type = other DNA
cctcctggccggccttggctctcaactagctgaaggtcattgttttcaactatcaggactgaggtgacagagggtgaccacctctacccacttctcctgatccttgctac

SEQ ID NO: 3862 - DNA, 110 bp, synthetic construct
  source 1..110: mol_type = other DNA
atgggaggggatagcatggggccatcttagaggcttcccatcacaccaacttatgattctctctgctattcatgaaaataagaccattcctgacctctgggaagtcacag

SEQ ID NO: 3863 - DNA, 110 bp, synthetic construct
  source 1..110: mol_type = other DNA
accatatctgtatctacagataccatttcgcactttgattcatctacagcaagacttctgaagctcggcgctgctggtatgtggggccagataattctttgccttgaggg

SEQ ID NO: 3864 - DNA, 110 bp, synthetic construct
  source 1..110: mol_type = other DNA
tgctccttggaggccagtgagcccagatgaccatttcagtgccatgtaggagaaagaatgatgcattaaggtaaaggagaccgagggcatcctcattttggtccatccgg

SEQ ID NO: 3865 - DNA, 110 bp, synthetic construct
  source 1..110: mol_type = other DNA
gaatgatgcattaaggtaaaggagaccgagggcatcctcattttggtccatccggtatcctgcttactggcaagacttgcggcttttttgagactcaatttcaaccactg

SEQ ID NO: 3866 - DNA, 110 bp, synthetic construct
  source 1..110: mol_type = other DNA
agtccatttttataggtaagaaaatcaaggagcagggaaaggaagctcatttacctcaggcatcaaatggtgagtccaaagtgctgattcagaaggcggtagggtgaatg

SEQ ID NO: 3867 - DNA, 110 bp, synthetic construct
  source 1..110: mol_type = other DNA
tcaggcatcaaatggtgagtccaaagtgctgattcagaaggcggtagggtgaatgaaagcctcaggaccatgacccgtgggtgggcacttggggtcacttgcactcagct

SEQ ID NO: 3868 - DNA, 110 bp, synthetic construct
  source 1..110: mol_type = other DNA
acatgctgtacttaggggaccatgggtaatatggcacagctggagcccaggtgacagagagaagctggaagagtggatatggcctaatggtgagtggcctcactctgcag

SEQ ID NO: 3869 - DNA, 110 bp, synthetic construct
  source 1..110: mol_type = other DNA
ggaggtttttttttttttaattcctttttggttttggattatttccagttaaataaaaaggggatgatggctgagtttacaccgtcttcaagtcagaagttctcagctta

SEQ ID NO: 3870 - DNA, 110 bp, synthetic construct
  source 1..110: mol_type = other DNA
aaaaggggatgatggctgagtttacaccgtcttcaagtcagaagttctcagcttagaaagatcacattggctgtggcatggagaacagactgaggcagaaagattggagg

SEQ ID NO: 3871 - DNA, 110 bp, synthetic construct
  source 1..110: mol_type = other DNA
gagcttggcctgaccatgacacaccccagctcagacaccctctgtggatcctcatcacctcctgatgaaggtcatacccttatcttgacattcaaggccttctctaatcc

SEQ ID NO: 3872 - DNA, 110 bp, synthetic construct
  source 1..110: mol_type = other DNA
gtggcttaaaacaatgcacatgattattttactcagtttctgtgtggaatctgggagaggcttagctggatggtcttggctcgtgagattatggcaaaatgttggcccgg

SEQ ID NO: 3873 - DNA, 110 bp, synthetic construct
  source 1..110: mol_type = other DNA
agaggcttagctggatggtcttggctcgtgagattatggcaaaatgttggcccggggctgcaggaacctgaaggcttaactggaactggactggggtttccaaatggggt

SEQ ID NO: 3874 - DNA, 110 bp, synthetic construct; identical to SEQ ID NO: 3872
  source 1..110: mol_type = other DNA

SEQ ID NO: 3875 - DNA, 110 bp, synthetic construct; identical to SEQ ID NO: 3873
  source 1..110: mol_type = other DNA

SEQ ID NO: 3876 - DNA, 110 bp, synthetic construct
  source 1..110: mol_type = other DNA
tgacgagtagtattcttttgtattaccacaatttatttgtccatttatgtgttaaaggacatcttggtcattttcagctttgggcagttatgaataaaggcactacaaac

SEQ ID NO: 3877 - DNA, 110 bp, synthetic construct
  source 1..110: mol_type = other DNA
gctttgcagggagcgtggccctgccaacacccagatgaggagcttggagcctccaggactgtgggagagtgagcttctgttatttccagccactgaatgtgtggtcattt

SEQ ID NO: 3878 - DNA, 110 bp, synthetic construct
  source 1..110: mol_type = other DNA
ggactgtgggagagtgagcttctgttatttccagccactgaatgtgtggtcatttgtcactgcagccctaggaaaccaataccagcacttcccacttgtttgaacacaga

SEQ ID NO: 3879 - DNA, 110 bp, synthetic construct
  source 1..110: mol_type = other DNA
gtcttggaggcgttctgggtcttctggaagctctggtaaaaacttcctggcttgagcaagtcacctaacctccctgagcttcatgttttcccatctgcagagctggaatg

SEQ ID NO: 3880 - DNA, 110 bp, synthetic construct
  source 1..110: mol_type = other DNA
gcaagtcacctaacctccctgagcttcatgttttcccatctgcagagctggaatgagagcccatgtccttcccagggtgtccctgaggattatgagaggagacaccagga

SEQ ID NO: 3881 - DNA, 110 bp, synthetic construct
  source 1..110: mol_type = other DNA
gtatggagcaccttcattgccggcacgggggctacaacagcgccatctagtgatgatgtggggataagctggtagaggagactactaaacagcgattgcagatggcaatg

SEQ ID NO: 3882 - DNA, 110 bp, synthetic construct
  source 1..110: mol_type = other DNA
gccagatcttcaacccactaggccaccaaggaactccctgaactctcaactttcaagaccctttgagagactttattcttgcagagattccctaaagtccacctactgcc

SEQ ID NO: 3883 - DNA, 110 bp, synthetic construct
  source 1..110: mol_type = other DNA
cataacagcaataatatactctcactgcaatagcccctaatgtttctcaggttaaagagtactttatgataacagagctggtatgtggcagggccaagtgtcattggaga

SEQ ID NO: 3884 - DNA, 110 bp, synthetic construct
  source 1..110: mol_type = other DNA
tctagtttctcacaggcacctcacctcttaaatccattttctagccttgggttacttcagagggcagtgagctgcttctgtacctgcccctctccccacccccatgtccc

SEQ ID NO: 3885 - DNA, 110 bp, synthetic construct
  source 1..110: mol_type = other DNA
ttcagagggcagtgagctgcttctgtacctgcccctctccccacccccatgtccctggatataaaaatagataaaacatataaaaaatagacaatgtacagaattaattg

SEQ ID NO: 3886 - DNA, 110 bp, synthetic construct
  source 1..110: mol_type = other DNA
aatgctcagtgactgaatgaagaatggatagggagatggactgatgggcaatctcgaaagaagactgggcagctgactggcaataggtgtcctcctgacctttcctgcgg

SEQ ID NO: 3887 - DNA, 110 bp, synthetic construct
  source 1..110: mol_type = other DNA
tctactagggagagacaggagcaaaggagagggtatgaagcctagcctggtggccagggactgtcaccaagaggcagctggcttccgtgggcacgaggccggcgacagtg

SEQ ID NO: 3888 - DNA, 110 bp, synthetic construct
  source 1..110: mol_type = other DNA
gggggagggaaggtggtgtggctggagaggtatgttcaggccactggggaagagggttcaagggccaagatctactgtggatccttttgaaatctagagaagctgaagga

SEQ ID NO: 3889 - DNA, 110 bp, synthetic construct
  source 1..110: mol_type = other DNA
gttcaagggccaagatctactgtggatccttttgaaatctagagaagctgaaggagatgggaaggcactgttatcagaagcaggtactgcagagaagactccttgtcatg

SEQ ID NO: 3890 - DNA, 110 bp, synthetic construct
  source 1..110: mol_type = other DNA
ttcacctggtttaaacaacacgttttatggaggtggccactgaggtctatggaggggagctgaattactcattattagccgtcagagctctggtctatacaccataaaca

SEQ ID NO: 3891 - DNA, 110 bp, synthetic construct
  source 1..110: mol_type = other DNA
gagtccccattcccaacagcactgtggagcaagacccaggcccacttcttgtctgggcactgaagatggagctgggccagacgggaggcaggataatggacaaaatgcat

SEQ ID NO: 3892 - DNA, 110 bp, synthetic construct
  source 1..110: mol_type = other DNA
ggcactgaagatggagctgggccagacgggaggcaggataatggacaaaatgcatttttttcccttgatgctgagcttagctctgagcagtgtttcgggagtggtaaggg

SEQ ID NO: 3893 - DNA, 110 bp, synthetic construct
  source 1..110: mol_type = other DNA
ggctgtgggagagcaaacaccaatcacctggggagatggtgtgtcaccccttcatgaaccagctactggggaggaaacacagagacgatgcttggacgatgatgcaggag

SEQ ID NO: 3894 - DNA, 110 bp, synthetic construct
  source 1..110: mol_type = other DNA
tgctctgcagagactatgccgctcggtccatcaggtcctccaagtgaaggacgcaacaattaagctcatctacgtgccatgcagggtcctggagcagataaaggccagta

SEQ ID NO: 3895 - DNA, 110 bp, synthetic construct
  source 1..110: mol_type = other DNA
acaattaagctcatctacgtgccatgcagggtcctggagcagataaaggccagtaatggatatgaacacacacactcaaccaagtgcaaaggcctgccctttctcctact

SEQ ID NO: 3896 - DNA, 110 bp, synthetic construct
  source 1..110: mol_type = other DNA
atggaacttttacaatgaagtaaaaggaaatggcaagaacagccaacctaagcatgcactggctgccttgcctgtgggcattgtgccaagggctgcggatctgctggtga

SEQ ID NO: 3897 - DNA, 110 bp, synthetic construct
  source 1..110: mol_type = other DNA
ggctcaacttagaatttcccccagtatttgatggatggagctgagtggggagctcacttcctaactccagctgaaaaaattgttcccttttcccaggtgctacagcatgt

SEQ ID NO: 3898 - DNA, 110 bp, synthetic construct
  source 1..110: mol_type = other DNA
acttcctaactccagctgaaaaaattgttcccttttcccaggtgctacagcatgtgaaatgccaccttccctgattccctgtgtcttttggtcacccagtctccccagta

SEQ ID NO: 3899 - DNA, 110 bp, synthetic construct
  source 1..110: mol_type = other DNA
ggcatagggctactgcccatggatgagtctttatttgcttttgcctcaagtctcctttctccacacaggatagacagctagatgcacagcctggagctctgcccacagaa

SEQ ID NO: 3900 - DNA, 110 bp, synthetic construct
  source 1..110: mol_type = other DNA
gccctgctactctcaggctctccctggcctccctcactccccgttcccatctgttccctgctggcagtctcctttcatgccttactgccacacttggtgctacagctctg

SEQ ID NO: 3901 - DNA, 110 bp, synthetic construct
  source 1..110: mol_type = other DNA
ccctgctggcagtctcctttcatgccttactgccacacttggtgctacagctctgtctttgcttttggctgttttttctctgtctctcagtgtttccctccatccctctc

SEQ ID NO: 3902 - DNA, 110 bp, synthetic construct
  source 1..110: mol_type = other DNA
agactctgctctatgaccttagacacctatcaatctgtgtcccagctttactggccgcaaaacaggggcagctccaaggtagtgctgagggaggaaattctgccgcctgg

SEQ ID NO: 3903 - DNA, 110 bp, synthetic construct
  source 1..110: mol_type = other DNA
cgcaaaacaggggcagctccaaggtagtgctgagggaggaaattctgccgcctggcagaagtgaagggacactcagaggtcccttctcactccagcagctaatgattcca

SEQ ID NO: 3904 - DNA, 110 bp, synthetic construct; identical to SEQ ID NO: 3902
  source 1..110: mol_type = other DNA

SEQ ID NO: 3905 - DNA, 110 bp, synthetic construct; identical to SEQ ID NO: 3903
  source 1..110: mol_type = other DNA

SEQ ID NO: 3906 - DNA, 110 bp, synthetic construct
  source 1..110: mol_type = other DNA
cttgccttggcacctgccagtccctgggactattttgctctttccacttggaagggtgtagtggggtttcttaggcaaccctgttgaatcctcctgttgggccgtgtggt

SEQ ID NO: 3907 - DNA, 110 bp, synthetic construct
  source 1..110: mol_type = other DNA
gtgtagtggggtttcttaggcaaccctgttgaatcctcctgttgggccgtgtggtagagatacctgctcccaagcctgagtctctgcagctagagcataagcaagcacag

SEQ ID NO: 3908 - DNA, 110 bp, synthetic construct
  source 1..110: mol_type = other DNA
gcttcctcctgctcgtcaggacctttctctagacggtctgcccttcatgcccacggaactggacgtcttccaggccacagctcctacatttacatttccgctgttcatga

SEQ ID NO: 3909 - DNA, 110 bp, synthetic construct
  source 1..110: mol_type = other DNA
atgagaaagatgttccacaggaacctaacaggagaaagctctagatgcagcacccggtgagtaatgagatgctaattaatttgcatttcacaagagagtcagggatgttg

SEQ ID NO: 3910 - DNA, 110 bp, synthetic construct
  source 1..110: mol_type = other DNA
atgctacacgtggaagacacacctcgaagctgagaaacacatggagagctgtggccagctcagtaacatcctgccttgtatcgcttttcctccttccctgcctcatttcc

SEQ ID NO: 3911 - DNA, 110 bp, synthetic construct
  source 1..110: mol_type = other DNA
cagctcagtaacatcctgccttgtatcgcttttcctccttccctgcctcatttccacgttttcttcactcttgctaccctgggattgtactgctcaaaaagccttagcac

SEQ ID NO: 3912 - DNA, 110 bp, synthetic construct
  source 1..110: mol_type = other DNA
tggaaatgggttctctgactcctcctcactcttacatgatcctgctagtgaggcaggttggcaaaatcatactgtcttactcagagtgggcctttagggctcaccaagca

SEQ ID NO: 3913 - DNA, 110 bp, synthetic construct
  source 1..110: mol_type = other DNA
ggttggcaaaatcatactgtcttactcagagtgggcctttagggctcaccaagcatgttcttatgacctctggcgttcagggttccatggttttaatgagtgttgactct

SEQ ID NO: 3914 - DNA, 110 bp, synthetic construct; identical to SEQ ID NO: 3912
  source 1..110: mol_type = other DNA

SEQ ID NO: 3915 - DNA, 110 bp, synthetic construct; identical to SEQ ID NO: 3913
  source 1..110: mol_type = other DNA

SEQ ID NO: 3916 - DNA, 110 bp, synthetic construct
  source 1..110: mol_type = other DNA
ggaggcagggttcaaggggcaacaccacgactagaactcagcccactcagcttcacatggctccccactgacaagtcagagccccctctcatttattctcttctattttt

SEQ ID NO: 3917 - DNA, 110 bp, synthetic construct
  source 1..110: mol_type = other DNA
gcctcacaagtgaatttcgtttttcttccctccgtgcccaatcaattagcacatgagtaataccaagcccattaggacaaaccgatgccgggggagttgtgtcatctgct

SEQ ID NO: 3918 - DNA, 110 bp, synthetic construct
  source 1..110: mol_type = other DNA
agtaataccaagcccattaggacaaaccgatgccgggggagttgtgtcatctgctatagaaatgattgcttaatataccagttggctccgaggagctcttagccacacac

SEQ ID NO: 3919 - DNA, 110 bp, synthetic construct
  source 1..110: mol_type = other DNA
agtcccttttgcccccttcaatcagctttgaaacctgcttaaactggttttcaccaatattgaaaaatgaccccattcatggccccctgctttaccctggctgagtagta

SEQ ID NO: 3920 - DNA, 110 bp, synthetic construct
  source 1..110: mol_type = other DNA
ccatctctgggaggcaagggggcctctgctgtgagctggcacagtgttcaccctggtcagctgatgcaggttggcacctaagcaaggctgatgggagttgtgctgctgga

SEQ ID NO: 3921 - DNA, 110 bp, synthetic construct
  source 1..110: mol_type = other DNA
atccagattccaggcccttctcccagagtttttgattcagtaggcctgagaacgtgcattcctaggaagttcccaggtgatgtcaatgcggctggtctggggtccacgtc

SEQ ID NO: 3922 - DNA, 110 bp, synthetic construct
  source 1..110: mol_type = other DNA
caaaattcttgtcctgtgcagagctaagccctcgtttcccccagcaactctccaaggattccatcagcaaagactgatgcagcttcagagatgaagagcatggttttcct

SEQ ID NO: 3923 - DNA, 110 bp, synthetic construct
  source 1..110: mol_type = other DNA
ttctctggtttgttgtgttctccctccttattcttctctctcagagcatcctgcctattttttaaaccctttgctcttaaattttagtccttgcaatgtgagtacctatt

SEQ ID NO: 3924 - DNA, 110 bp, synthetic construct
  source 1..110: mol_type = other DNA
agtagtgaataaatttcttggatcttatgtgtgtacatctttggcttacttgcttgtgtttgaggggtcatcttctagtagcttttagcaatttttttgtaaataaaata

SEQ ID NO: 3925 - DNA, 110 bp, synthetic construct
  source 1..110: mol_type = other DNA
gttattcccaaagatctgctgaggcctgggcagctgtgtgctatggtgagaggggctgggactgagcgctaagtggcttcggttctatgctgtgctctgctctttgctgg

SEQ ID NO: 3926 - DNA, 110 bp, synthetic construct
  source 1..110: mol_type = other DNA
cacatcatcctctcaggtaatcttagctccctgctcacctcctgttctgtgacggggttcagccttatcaggtttgctccacacaaaggggaagacagtccttgaatttt

SEQ ID NO: 3927 - DNA, 110 bp, synthetic construct
  source 1..110: mol_type = other DNA
acatatatgtaaaaccatatttaagactaacttcttaattgcatttcttaaagcagcattctggattccccatcattaataagagtcccaagtgttgccaagattaattg

SEQ ID NO: 3928 - DNA, 110 bp, synthetic construct
  source 1..110: mol_type = other DNA
gcattctggattccccatcattaataagagtcccaagtgttgccaagattaattgagaaacgcctaaaggcaaaataaacactagcactagtttaattcaaaaccatatc

SEQ ID NO: 3929 - DNA, 110 bp, synthetic construct
  source 1..110: mol_type = other DNA
ttacggtcaggtgggcagaggcagagcacatatgcactccctctcatgtttactcaagcagccagcttcatctacctgctcttactgcctgcactttgcaataatgccat

SEQ ID NO: 3930 - DNA, 110 bp, synthetic construct
  source 1..110: mol_type = other DNA
gcggggtacagttccctcagctctgcagtccagcgaccgtagtcctacaagatcaagatctttttttctgaagagccatttgacttcctttagcttcaggcccagcctgg

SEQ ID NO: 3931 - DNA, 110 bp, synthetic construct
  source 1..110: mol_type = other DNA
agatctttttttctgaagagccatttgacttcctttagcttcaggcccagcctgggcatcagcaatactgagccttaattatgatgtgtcaccatgcaaacgttggctgc

SEQ ID NO: 3932 - DNA, 110 bp, synthetic construct
  source 1..110: mol_type = other DNA
gcacatccatgtcagggcctccaatgcttagtagatgcataggacatgatcgctgccctgtttgtgtcctgtagcatctgggtcaaggaccactccttcccagcgtgctc

SEQ ID NO: 3933 - DNA, 110 bp, synthetic construct
  source 1..110: mol_type = other DNA
ccctgtttgtgtcctgtagcatctgggtcaaggaccactccttcccagcgtgctcttgctcatcactgtgtagcaggtggagagaaagcaaaggaatagcctctcctcct

SEQ ID NO: 3934 - DNA, 110 bp, synthetic construct
  source 1..110: mol_type = other DNA
tttgcgggactcgttgtatataaaagctcatctgcagatacccttccacaaggcaccaaataaacattttagggatgtggaaaactccgttgcctgtggaatccccaggc

SEQ ID NO: 3935 - DNA, 110 bp, synthetic construct
  source 1..110: mol_type = other DNA
ccaagagataccttgttacttaaaagtgttataaccttgattagaatccagatttcttaattcttgatcagctattctttctagctctcttgggttcacttactctaccc

SEQ ID NO: 3936 - DNA, 110 bp, synthetic construct
  source 1..110: mol_type = other DNA
tgtgtgggatttttttgtgtctagatgtatttcatccaatttagttatatatttggagcaggaaggtcagtttttttcatcagttcagctccctgtgatcaggtgagaag

SEQ ID NO: 3937 - DNA, 110 bp, synthetic construct
  source 1..110: mol_type = other DNA
gagcaggaaggtcagtttttttcatcagttcagctccctgtgatcaggtgagaagctctgtgcctctcttttggcactgaaatgaatggcttttggtaacagttgctgac

SEQ ID NO: 3938 - DNA, 110 bp, synthetic construct
  source 1..110: mol_type = other DNA
aagaggcataaatggtgtggccgacttttgccttaaaacaatgtaacatcgaaaagtacccatatccataaatatatgacacagtcactttaaggatggacaggatttta

SEQ ID NO: 3939 - DNA, 110 bp, synthetic construct
  source 1..110: mol_type = other DNA
ttttgccttaaaacaatgtaacatcgaaaagtacccatatccataaatatatgacacagtcactttaaggatggacaggattttactttggggatttatcatactttatt

SEQ ID NO: 3940 - DNA, 110 bp, synthetic construct
  source 1..110: mol_type = other DNA
gcttcttctctctttagtcaggctgggattaaaagctgtgtagtggtacttctgtgtagatactgagtgatgctggaaagccaccatgggcagaaaatcctaaaagtcag

SEQ ID NO: 3941 - DNA, 110 bp, synthetic construct
  source 1..110: mol_type = other DNA
tagccagccaggctgcccagcacagcagaggcatggccgtcatggtgcatgagttctgcagcctaaaacagatctatttctccatcaaatggaggtgagcgccccaggtc

SEQ ID NO: 3942 - DNA, 110 bp, synthetic construct
  source 1..110: mol_type = other DNA
gataaagatgtctgacaacaaatacggtctccttctcttttctctatatcaaacctttccataagaacataattacaaaccacttacataaattttctttatggtttgtt

SEQ ID NO: 3943 - DNA, 110 bp, synthetic construct
  source 1..110: mol_type = other DNA
ttctctcctatagtacttgtttaggtgcgtacaagtaatgagatgggaacaaaatcagatgaaaagctagatctggggcaatggtcatcaagaattcaccaacagaacca

SEQ ID NO: 3944 - DNA, 110 bp, synthetic construct
  source 1..110: mol_type = other DNA
tcacgccaagaaagcgacccagaggatgacgatgttaagagggtaattgagattaaaagaacttcatagaggatgaatatagccttttcaccttactacatttaaaagag

SEQ ID NO: 3945 - DNA, 110 bp, synthetic construct
  source 1..110: mol_type = other DNA
aaagaacttcatagaggatgaatatagccttttcaccttactacatttaaaagagtgccacccatatgctagtgaaatgacagaaatttcttttctcctacagccagctt

SEQ ID NO: 3946 - DNA, 110 bp, synthetic construct
  source 1..110: mol_type = other DNA
gaatgtaaacaggaataatataaaccaatttcagacctggttttaacagcattgaatgtagttctccagctcttttctcccatcatggtgaccttggatgcctcatatcc

SEQ ID NO: 3947 - DNA, 110 bp, synthetic construct
  source 1..110: mol_type = other DNA
gacaaagagagttctacagatttgcagaaaagtttgcaaagacattacccaggtctttggctgagcaataatgatctccctttatcattacatagggaccttcttcatct

SEQ ID NO: 3948 - DNA, 110 bp, synthetic construct
  source 1..110: mol_type = other DNA
tttggctgagcaataatgatctccctttatcattacatagggaccttcttcatcttttaaaacagaatttgactgaaagactattttatacaggtttagtcacctctgtt

SEQ ID NO: 3949 - DNA, 110 bp, synthetic construct
  source 1..110: mol_type = other DNA
gttaaagtaaccaccaggaggaggttaatatatcttagatcagtgttttgaactgggttctataaatgccaggataaaggagaaaatctacaaatgtttgatttaaattt

SEQ ID NO: 3950 - DNA, 110 bp, synthetic construct; identical to SEQ ID NO: 3949
  source 1..110: mol_type = other DNA

SEQ ID NO: 3951 - DNA, 110 bp, synthetic construct
  source 1..110: mol_type = other DNA
ttaaaccttattctttttacttcaatttccaggatattttggcctagtaccaggagaaggagtcaagattgccataataggcagccatatactgggaagggttggacagg

SEQ ID NO: 3952 - DNA, 110 bp, synthetic construct; identical to SEQ ID NO: 3951
  source 1..110: mol_type = other DNA

SEQ ID NO: 3953 - DNA, 110 bp, synthetic construct
  source 1..110: mol_type = other DNA
ccctactcctttactcttgcttcctgagattatctccagaagaaatcacctgcgtcccagtccttatctcaggttttgctatcaggggaatttaaactaggataatggtt

SEQ ID NO: 3954 - DNA, 110 bp, synthetic construct
  source 1..110: mol_type = other DNA
actacttattgtctaatgtttaaaaattgttgttttatgtatttgtccagttttctagttgtgtaaggcaggactataaatctgatttctgtccctccaactggaaaagt

SEQ ID NO: 3955 - DNA, 110 bp, synthetic construct; identical to SEQ ID NO: 3954
  source 1..110: mol_type = other DNA

SEQ ID NO: 3956 - DNA, 110 bp, synthetic construct; identical to SEQ ID NO: 3954
  source 1..110: mol_type = other DNA

SEQ ID NO: 3957 - DNA, 110 bp, synthetic construct; identical to SEQ ID NO: 3954
  source 1..110: mol_type = other DNA

SEQ ID NO: 3958 - DNA, 110 bp, synthetic construct
  source 1..110: mol_type = other DNA
tcttaatcaagaattgagcatgacagaaacacgatatacagttaattctacaacaacgcaggctgaaactacataggtccacttacacatgaatttcttgcattaaatac

SEQ ID NO: 3959 - DNA, 110 bp, synthetic construct; identical to SEQ ID NO: 3958
  source 1..110: mol_type = other DNA

SEQ ID NO: 3960 - DNA, 110 bp, synthetic construct
  source 1..110: mol_type = other DNA
tgctggcaacatcatacttgctcactgcttctataatatcatacttgctcactgctagctccaaataccatcagtggcttctaccattgataaaatgccagtggccagcc

SEQ ID NO: 3961 - DNA, 110 bp, synthetic construct
  source 1..110: mol_type = other DNA
aaccatagtaatatcttacatatatacacacaaacatacatagctacctatctgtatgtatagaatcaaccaggatttagaggaatccaagatggaatagaagcaataac

SEQ ID NO: 3962 - DNA, 110 bp, synthetic construct
  source 1..110: mol_type = other DNA
tgccctatcagagcaatgaaactaacagctggtactttgccgggggagaaacaagtcaaaaacatatttgatgagattatcgatgaaaacttcctaaacctgaagaagtc

SEQ ID NO: 3963 - DNA, 110 bp, synthetic construct
  source 1..110: mol_type = other DNA
aaagcatctatatcttttccctaagctatcttgataatggtgaacagaacctgtggttccccttataagacacaaatgcttaagtaatagctaagagttaggtgaacagt

SEQ ID NO: 3964 - DNA, 110 bp, synthetic construct
  source 1..110: mol_type = other DNA
gttccccttataagacacaaatgcttaagtaatagctaagagttaggtgaacagtgttaaattctcttagtctgagttattctatatataactaaatggatgaatggctt

SEQ ID NO: 3965 - DNA, 110 bp, synthetic construct
  source 1..110: mol_type = other DNA
cctgtgttttataattcaaaatagaaaaccaacatatcacactatccctcacacatacatgactacatgttttgataatcctattataatagctaatctgtgcttcagtg

SEQ ID NO: 3966 - DNA, 110 bp, synthetic construct
  source 1..110: mol_type = other DNA
tacatgactacatgttttgataatcctattataatagctaatctgtgcttcagtgaccacaccaactataacaacacaatgtgcctcactgtccaaaatcaaacatatat

SEQ ID NO: 3967 - DNA, 110 bp, synthetic construct
  source 1..110: mol_type = other DNA
ctcattgaatattaaatatggtacttctgctgaaagaatctctctccacatcattgctttcttaagctattactcatatttcagatgtaattttaaatatcacttcctct

SEQ ID NO: 3968 - DNA, 110 bp, synthetic construct
  source 1..110: mol_type = other DNA
catatttcatacagataagtctgccatttcagcctgttcctcatggcacttctcttgacagtagggggaaaaaagatgagaattttgtgacagtcagacatccagccact

SEQ ID NO: 3969 - DNA, 110 bp, synthetic construct
  source 1..110: mol_type = other DNA
aaatgttttctttccctgaatgtttttcatctcagtagttttttgaaggtctttctcatccattgaagtcactgctcaaatgtcagcttataagtgagggctttcatgat

SEQ ID NO: 3970 - DNA, 110 bp, synthetic construct
  source 1..110: mol_type = other DNA
tgtgatccctaccaatgactctgcctcattctatgtgtttaatgatgcctgtaagaaagcttacttactctgacaagatatttccatcagtgtccttgagttgagcagaa

SEQ ID NO: 3971 - DNA, 110 bp, synthetic construct
  source 1..110: mol_type = other DNA
tgggcagatttcaaaagacaaagcttaatacttatattttaaaagtttgaatagatgctatacatacctcaccacttacataagtagggatgcctgagacaaaaaatgaa

SEQ ID NO: 3972 - DNA, 110 bp, synthetic construct
  source 1..110: mol_type = other DNA
agttacaagccatagctgcaacctaagctgcagctgtggcaatgccagatcctttaaacaatgtgctggcctgggaatcaaacttgtatcctggtgttgcagagacactg

SEQ ID NO: 3973 - DNA, 110 bp, synthetic construct
  source 1..110: mol_type = other DNA
aaacaatgtgctggcctgggaatcaaacttgtatcctggtgttgcagagacactgctgaccctgtttgggaactccaaacatcttttttgcccaatccaaatttccgtat

SEQ ID NO: 3974 - DNA, 110 bp, synthetic construct
  source 1..110: mol_type = other DNA
aggttggagccttgagaatgggttgtcctgtatatttcaggctctaggcaacattcttaacttgaagtaaaagcaatagaatgcaaagattaaaagaattaggtccaata

SEQ ID NO: 3975 - DNA, 110 bp, synthetic construct
  source 1..110: mol_type = other DNA
cttaacttgaagtaaaagcaatagaatgcaaagattaaaagaattaggtccaatatgatgtcagatttgttgttccccattacaagatgagatagttgtaaggcttactc

SEQ ID NO: 3976 - DNA, 110 bp, synthetic construct
  source 1..110: mol_type = other DNA
tacacattatcgcatagggtgagttatgttgctgtaacaaataacatctaaatcttagtgatttaaagagaaaatgtttcttcctttctcatgctctatgctgatgccct

SEQ ID NO: 3977 - DNA, 110 bp, synthetic construct
  source 1..110: mol_type = other DNA
tagtgatttaaagagaaaatgtttcttcctttctcatgctctatgctgatgccctgccccatatcatcttcacagcagatggctcttgcacatcatttctattaattttt

SEQ ID NO: 3978 - DNA, 110 bp, synthetic construct
  source 1..110: mol_type = other DNA
gtactaggaatttttaaaatcattctactgtggccttgcttatttttcaactcttacttaattcaatatgcaaatgtagcaagagcagttggaggccttattactgaggt

SEQ ID NO: 3979 - DNA, 110 bp, synthetic construct; identical to SEQ ID NO: 3978
  source 1..110: mol_type = other DNA

SEQ ID NO: 3980 - DNA, 110 bp, synthetic construct
  source 1..110: mol_type = other DNA
tactcttacaacaagctgaattttttaaaaaaagcaatattattcagtggtacatcacattacgtttaaatcacgtataaacgtggtcctgagtttgcctaggcagtttt

SEQ ID NO: 3981 - DNA, 110 bp, synthetic construct
  source 1..110: mol_type = other DNA
cacattacgtttaaatcacgtataaacgtggtcctgagtttgcctaggcagttttcctggaataatcatcatcatccaagaaatttaaagtaagtcattttattgatttc

SEQ ID NO: 3982 - DNA, 110 bp, synthetic construct
  source 1..110: mol_type = other DNA
aatcttaatcattcatcatgctctcactttctctaatggtttcttcctactccttacctattttttcctggtacccgacttaaagttctcatttaaaatttctttctttt

SEQ ID NO: 3983 - DNA, 110 bp, synthetic construct
  source 1..110: mol_type = other DNA
acctattttttcctggtacccgacttaaagttctcatttaaaatttctttcttttttcctttagtttttccagtactgttgaggctttgcatagctcactagctattcca

SEQ ID NO: 3984 - DNA, 110 bp, synthetic construct
  source 1..110: mol_type = other DNA
gggagtaacattaatctgaggaaagggtaatattggttgaattacagctgtgtgataattaagtatcagacttaaaaaaacagtaaaagggagttcccgtcgtggcgcag

SEQ ID NO: 3985 - DNA, 110 bp, synthetic construct
  source 1..110: mol_type = other DNA
tggaaatctctggtatttaaatatagaacattcatctgtttgggactttttccaggacagctgcacccccatactccttcaatgacaaagatgttttcttctatctctct

SEQ ID NO: 3986 - DNA, 110 bp, synthetic construct
  source 1..110: mol_type = other DNA
caatgaacggaaaaataattttttgagacaactctcaaattgctaggaattggcaatagctaaggacattactatactagaatatataaacaccttcgcattttcttcag

SEQ ID NO: 3987 - DNA, 110 bp, synthetic construct
  source 1..110: mol_type = other DNA
atagctaaggacattactatactagaatatataaacaccttcgcattttcttcagacacaactggtgcactggtgtttaccataaaatctcttgaggtaatataaatcct

SEQ ID NO: 3988 - DNA, 110 bp, synthetic construct
  source 1..110: mol_type = other DNA
tagcacatggaaaacctaattcctaaaattttgcatcaagagattagagtgaacactaggtatgatatactcttggagctaatgttagttttatatgaaagcaatctatc

SEQ ID NO: 3989 - DNA, 110 bp, synthetic construct
  source 1..110: mol_type = other DNA
ctagtggttactttggaagttgatgagacttgaaaggttctgccagtttcccaccaaggaagattgctctgaagaagggaaaaccaagcaggaagctctgaggtggaaag

SEQ ID NO: 3990 - DNA, 110 bp, synthetic construct
  source 1..110: mol_type = other DNA
aaggaagattgctctgaagaagggaaaaccaagcaggaagctctgaggtggaaagctggtggtgattgattccagttgggtttccaaatcaggaaagcggagagggccta

SEQ ID NO: 3991 - DNA, 110 bp, synthetic construct
  source 1..110: mol_type = other DNA
tcatgaacaggtttatcaaacttgtatggaacattgcttcgctgactcctcaatccactctgataactccatgcagggttttttacaattatataaaaaggagggaaaag

SEQ ID NO: 3992 - DNA, 110 bp, synthetic construct
  source 1..110: mol_type = other DNA
gctacagccacagcaaagtggaatccgagccgcatttgtgacctacatcacagctcgggtcagcaccagattgttaatccaccgagcaaggccagggatcgaacctgcgt

SEQ ID NO: 3993 - DNA, 110 bp, synthetic construct; identical to SEQ ID NO: 3992
  source 1..110: mol_type = other DNA

SEQ ID NO: 3994 - DNA, 110 bp, synthetic construct
  source 1..110: mol_type = other DNA
acaaaattatgtttatcgcatgctatccaagtttagacttttccagttaatattaacctcaatgttattataaaagcttgctgattcttttcccagttgaagagcagttt

SEQ ID NO: 3995 - DNA, 110 bp, synthetic construct
  source 1..110: mol_type = other DNA
actctgtccctctccttcggagagtgcactccctggctgctggagctggactccggcactgttagagatgtaaatgtgttgaaggggtactggttggtctgatcgggtag

SEQ ID NO: 3996 - DNA, 110 bp, synthetic construct
  source 1..110: mol_type = other DNA
agcatgattaggtccagatagctgagttaaatgctatacatatgattcaccaaccaatagagatgaaaggtatctttaaaactccccaatataatctctttctcttcctc

SEQ ID NO: 3997 - DNA, 110 bp, synthetic construct
  source 1..110: mol_type = other DNA
acaacattgataaacctttacacagagtcatcaggaaaaaagtgagagggctcaaataaataagcttagaagtgaaaagggagaagttacaactgacaccacagaaatac

SEQ ID NO: 3998 - DNA, 110 bp, synthetic construct; identical to SEQ ID NO: 3997
  source 1..110: mol_type = other DNA

SEQ ID NO: 3999 - DNA, 110 bp, synthetic construct
  source 1..110: mol_type = other DNA
atgaaatgttacttcgcacttcattatatagagtagattaaaaatgactttttctatttagggagcaggtaaagggattttctagccctacttcctccacatccccatcc

SEQ ID NO: 4000 - DNA, 110 bp, synthetic construct; identical to SEQ ID NO: 3999
  source 1..110: mol_type = other DNA

SEQ ID NO: 4001 - DNA, 110 bp, synthetic construct
  source 1..110: mol_type = other DNA
tcatttccacataccaatttaatggcatgtatgctttcttcttattagttcaaactatgacacatgggtgcttgtgactgaaattagttgtaaatccaggatatgttttt

SEQ ID NO: 4002 - DNA, 110 bp, synthetic construct
  source 1..110: mol_type = other DNA
tagagaactattcctataagcactataggttccaacttaaaatttaatattatatatccaagttttaaaagtttgcaccatttcaccatgaaaaccttccaactggctgt

SEQ ID NO: 4003 - DNA, 110 bp, synthetic construct
  source 1..110: mol_type = other DNA
tcatgttgcagctctttcactctggctggggtcaaatctctgcaaactacctaaaaatggaaaacagcaatgttatatacatacgagaaatgagtctgtgggtcagcatc

SEQ ID NO: 4004 - DNA, 110 bp, synthetic construct
  source 1..110: mol_type = other DNA
caggcagtgtattgaacctacatccctgcagctgtggagacaccatcagtcccgttatgccatagcaggaactcctgacctcccctgttcttaagcatctctgagggtgg

SEQ ID NO: 4005 - DNA, 110 bp, synthetic construct
  source 1..110: mol_type = other DNA
tggtttccttgctgaatttcacccaggttcagagcctttgtacttattggtctgttgctgaaattctctttccccaggcgattgtatgaccttttttcttgtatttctat

SEQ ID NO: 4006 - DNA, 110 bp, synthetic construct
  source 1..110: mol_type = other DNA
tcatgggttgaggggaaagaagaattaagtcagttaaactgctatagtaggcctcttcatttttcttctcatagggtatgaaatgaaatttaaattttaagaattcattg

SEQ ID NO: 4007 - DNA, 110 bp, synthetic construct; identical to SEQ ID NO: 4006
  source 1..110: mol_type = other DNA

SEQ ID NO: 4008 - DNA, 110 bp, synthetic construct
  source 1..110: mol_type = other DNA
gggacctcctgctctccaatctcacatttaattttggtgaatgcgattggcaatacaaatgtaaacttctttggtcttttacctttgggttaaaacatgtcttctgaaga

SEQ ID NO: 4009 - DNA, 110 bp, synthetic construct
  source 1..110: mol_type = other DNA
agcatccatcacatgacacctaggggtgcttttgcaaataaaatccctccaagactacagtagatagttgctttcgctaaacgcacagattaggaaaatataagcaaaaa

SEQ ID NO: 4010 - DNA, 110 bp, synthetic construct
  source 1..110: mol_type = other DNA
tacagtagatagttgctttcgctaaacgcacagattaggaaaatataagcaaaaagaagcttaggaactatttttctgaagcagttaaaagaacaggataattctcctga

SEQ ID NO: 4011 - DNA, 110 bp, synthetic construct
  source 1..110: mol_type = other DNA
agccagatcttctattctacctgggaaggagagcaaattcagagctttgccctctgctgagcatggctcccagctccacccaattaggaacccaagcctgaatacctggg

SEQ ID NO: 4012 - DNA, 110 bp, synthetic construct
  source 1..110: mol_type = other DNA
gctgagcatggctcccagctccacccaattaggaacccaagcctgaatacctgggaagctgcataacctagcaacactcaagtggagagcctggtcaaaagcactgttca

SEQ ID NO: 4013 - DNA, 110 bp, synthetic construct; identical to SEQ ID NO: 4011
  source 1..110: mol_type = other DNA

SEQ ID NO: 4014 - DNA, 110 bp, synthetic construct; identical to SEQ ID NO: 4012
  source 1..110: mol_type = other DNA

SEQ ID NO: 4015 - DNA, 110 bp, synthetic construct
  source 1..110: mol_type = other DNA
atatgtcaaagtctgaaaagtggtgtagaaacaaaagtagagcccaagtcaatgttttggccattctgtgttgtaaaattccatattatttcacaagtgaagttcaacaa

SEQ ID NO: 4016 - DNA, 110 bp, synthetic construct
  source 1..110: mol_type = other DNA
aagaaatgacagattactcttcataatgctggcaccagtccacacttctgtcagcggtgcatgtagattccttctggcatttaattgtatgtgatgttttattgtttaaa

SEQ ID NO: 4017 - DNA, 110 bp, synthetic construct
  source 1..110: mol_type = other DNA
ggtgcatgtagattccttctggcatttaattgtatgtgatgttttattgtttaaaaacccgatgatgtttacaaggagtaattccttagagcttctaatttttactctat

SEQ ID NO: 4018 - DNA, 110 bp, synthetic construct
  source 1..110: mol_type = other DNA
tttagtaaattaatgaaaggctattgtgaataatagggtctgttaatgaggcagatcagattctgatttgacaggcagccagtcagtgaaacagacgcacctgcacaatt

SEQ ID NO: 4019 - DNA, 110 bp, synthetic construct
  source 1..110: mol_type = other DNA
gtcagagccacccttataaaacagaaattatgtgtatctgtttgtgtcaactctctgactgcctttctacatccacagaatataatactgagttcctctcttggcacaca

SEQ ID NO: 4020 - DNA, 110 bp, synthetic construct
  source 1..110: mol_type = other DNA
gagaaagagaatacatagaagggtccagtacagaaaagaagaaatcagccagtttgcattatctgtctatattgtccaaagtcatgatcatattacatatatatacacac

SEQ ID NO: 4021 - DNA, 110 bp, synthetic construct
  source 1..110: mol_type = other DNA
tagaagggtccagtacagaaaagaagaaatcagccagtttgcattatctgtctatattgtccaaagtcatgatcatattacatatatatacacacacacacattaattgt

SEQ ID NO: 4022 - DNA, 110 bp, synthetic construct
  source 1..110: mol_type = other DNA
gtccagggccaaatctctgacctgttgcataatcttttgccctgtagcatatattgtagaaagcatataggctctttagtctaaagagatgctttaaatttcagctatgc

SEQ ID NO: 4023 - DNA, 110 bp, synthetic construct
  source 1..110: mol_type = other DNA
gtagaaagcatataggctctttagtctaaagagatgctttaaatttcagctatgctccttattaatactataagtttgggctgattaatatcgctgaactttagtttcct

SEQ ID NO: 4024 - DNA, 110 bp, synthetic construct
  source 1..110: mol_type = other DNA
caaggacacagtaaacactgagctcaccatcaagtggaagacggaaacatgcaaacagttacccacttctgattgatgggctgtcatggaggtggtctaaggaaaggcaa

SEQ ID NO: 4025 - DNA, 110 bp, synthetic construct
  source 1..110: mol_type = other DNA
cagttacccacttctgattgatgggctgtcatggaggtggtctaaggaaaggcaagtacctaatctttcaagacagtcctgggaagactccaaaggatacaagcaacaaa

SEQ ID NO: 4026 - DNA, 110 bp, synthetic construct
  source 1..110: mol_type = other DNA
tgctgctacattgggacaaaactgctgaaagttaatttggaatactaagtatacgtaatgatttgtgataagaggtccactgagtaaaaccaaaatctttataaatgaat

SEQ ID NO: 4027 - DNA, 110 bp, synthetic construct
  source 1..110: mol_type = other DNA
gcaggggagcagtacaccacaggttggggaggggaatgccatggcagaggggaactgggagaagatctgagctggcagcaaaggcaagcaaggtgccattgttgggaagg

SEQ ID NO: 4028 - DNA, 110 bp, synthetic construct
  source 1..110: mol_type = other DNA
tatctcagagatacagttaatcagaactcattcatttcttaatcaaatccatgagtcagctcctaaattacacacaatgaaaaggtactggatctgaaacaaaagtgtct

SEQ ID NO: 4029 - DNA, 110 bp, synthetic construct
  source 1..110: mol_type = other DNA
agacagacagacagactggaatctggaatcaactgcagctacaggaaggaaccgctactgctgacataaagaagttttgctggaaagatactgaaaggagcaggcaacag

SEQ ID NO: 4030 - DNA, 110 bp, synthetic construct
  source 1..110: mol_type = other DNA
aagactactttattacaaatatacatacccctttaggcattgttcttttagctatcctaggctattgctcaaccgaactaataagtctgaactgttttctaattcctgtg

SEQ ID NO: 4031 - DNA, 110 bp, synthetic construct
  source 1..110: mol_type = other DNA
gcgaggggatgggaggagtgaaagagggaggggcagagctttcccaggccagcgcacaggcatatgggctagagcaccttcaatgaagtataggacctctccgaggacag

SEQ ID NO: 4032 - DNA, 110 bp, synthetic construct
  source 1..110: mol_type = other DNA
tttccattgcaccatgatgggaactccatggtgggtattttaaagtaaattttaataatagactaagtttttactcagagctaggatgaagtataaataatgattgtttt

SEQ ID NO: 4033 - DNA, 110 bp, synthetic construct
  source 1..110: mol_type = other DNA
tcgaacctgtaacctcatgattcctagtctgattcatttctgctgtaccatgacggaagctcctagaacctgtccttttttaaaaaattgagataatattagcttatgtt

SEQ ID NO: 4034 - DNA, 110 bp, synthetic construct
  source 1..110: mol_type = other DNA
taagaggattagaaaggtcaagagtcaacttcttgagcttgaagacagtgggagttaagcaaataagaaaactggaagactgagtagtaagcatgtgagatattagaata

SEQ ID NO: 4035 - DNA, 110 bp, synthetic construct
  source 1..110: mol_type = other DNA
ttgacacatgttatttatatagaatagtaatcaccgctgaattctttttatgagcaaatccatcctctttttaatatctcatgttatacagccaaagttcaagcccccat

SEQ ID NO: 4036 - DNA, 110 bp, synthetic construct
  source 1..110: mol_type = other DNA
catcttaaggcagattatactggacagtgatagatgaggtattctgttatgacagattctagacatatgacattggttgagacctttcagaagtgaaaaagcaaaagtgt

SEQ ID NO: 4037 - DNA, 110 bp, synthetic construct
  source 1..110: mol_type = other DNA
gaggtattctgttatgacagattctagacatatgacattggttgagacctttcagaagtgaaaaagcaaaagtgtttcttatacagaatcattgtaaagaaaatgtagtt

SEQ ID NO: 4038 - DNA, 110 bp, synthetic construct
  source 1..110: mol_type = other DNA
gaatgcaagcgtctttgtaattagagccagataatccatgtgcttgtcccttttgcaacagtcatgaaagattggttgccagacatctgtacaaggtcatttatggaaga

SEQ ID NO: 4039 - DNA, 110 bp, synthetic construct
  source 1..110: mol_type = other DNA
caacagtcatgaaagattggttgccagacatctgtacaaggtcatttatggaagatattggcaatttgtagtgagcttaagtaaaaaggggaacatagtgtctgctgtca

SEQ ID NO: 4040 - DNA, 110 bp, synthetic construct
  source 1..110: mol_type = other DNA
acatgacccaagagctggacacaggctatcagaagctgttcttttcttggaatttatgtcacacccaccattactacagtaggagtcattttcaaggacacagccttgag

SEQ ID NO: 4041 - DNA, 110 bp, synthetic construct
  source 1..110: mol_type = other DNA
ttaatgcatgggttacttaaaaggaggattttttgacttccaggtgttcataggatttttccaaagagctgtttgtaattgatactttgtctaattatattgttgaaaat

SEQ ID NO: 4042 - DNA, 110 bp, synthetic construct
  source 1..110: mol_type = other DNA
aagctgctatcaaaatgttaccttgactgaggtcatctgaaagctgactggtgctgggtgatccatgcctgaggtggttcacctacctacattggcaagtgctcacatct

SEQ ID NO: 4043 - DNA, 110 bp, synthetic construct
  source 1..110: mol_type = other DNA
ggcaggcggaactggcaggactgcacctcgatggaggaagacttcctgtgacctggcagagcttgccctggtacctctgggccacagagcttttccagggggtgggtggt

SEQ ID NO: 4044 - DNA, 110 bp, synthetic construct
  source 1..110: mol_type = other DNA
tcagcttgtactatttctgattcctctagagttacggcagaataacagggaaacagatcaagcacttaactagctggatcaattgcagttagttctcagtgcagcagtta

SEQ ID NO: 4045 - DNA, 110 bp, synthetic construct
  source 1..110: mol_type = other DNA
tagagtttatacacaaactttggtgcttctcctctctggctgttgccttcggtgttttctccattacactgcggtagcttttttttgttttgttttgttgttttttcaaa

SEQ ID NO: 4046 - DNA, 110 bp, synthetic construct
  source 1..110: mol_type = other DNA
acctcatggttcctaatcagattcatttctgctgagccatgatgagaactccacctttcactttttaaatagcttcaccaaactaattttcaatatttttccaattttaa

SEQ ID NO: 4047 - DNA, 110 bp, synthetic construct
  source 1..110: mol_type = other DNA
ctataccattagctgtcccgggtcttcagcttgatgaccacagatcttagggtatgtgcatgtgtgtgtgtatgagagagatgttcagagacaaattggtgatagctaaa

SEQ ID NO: 4048 - DNA, 110 bp, synthetic construct
  source 1..110: mol_type = other DNA
gtcacagacttctcataatatcctctcaggatggaagggagctctatgggtttttaaaaataagaacctcagtcctattcataaagcctccaccttcatgacctacatac

SEQ ID NO: 4049 - DNA, 110 bp, synthetic construct
  source 1..110: mol_type = other DNA
attgttttagaagaatcttaatgtttcatttctcacatcttattatatcttgcataattttgaaaaggtggtggctatcacatgttgtattagcttcatgccctgcccaa

SEQ ID NO: 4050 - DNA, 110 bp, synthetic construct; identical to SEQ ID NO: 4049
  source 1..110: mol_type = other DNA

SEQ ID NO: 4051 - DNA, 110 bp, synthetic construct
  source 1..110: mol_type = other DNA
ctgaaaatcttcaagcatggactttggactatttgaatgataggtatcaatagacaactggactttagctccaaacactgtgatcttaatcagtgctacctgaagccaag

SEQ ID NO: 4052 - DNA, 110 bp, synthetic construct
  source 1..110: mol_type = other DNA
cagtacagaactatctaaatcaattttctcttcactttcacagtaaaacacagccatggcttgctggagtaatatcatgaaacacccagtggaggagacttgcatgtaca

SEQ ID NO: 4053 - DNA, 110 bp, synthetic construct
  source 1..110: mol_type = other DNA
atggcttgctggagtaatatcatgaaacacccagtggaggagacttgcatgtacactggagttttcaaccttattacactaccttctttgaaacaatatagtcagaggtc

SEQ ID NO: 4054 - DNA, 110 bp, synthetic construct
  source 1..110: mol_type = other DNA
ccacaccagtaaaatggaaacagttatactcaattatatactcaattcagatccactatgaaggaaaaaaatgagatgggatgaggtaaataaggatagagaatgtttta

SEQ ID NO: 4055 - DNA, 110 bp, synthetic construct
  source 1..110: mol_type = other DNA
ctatgaaggaaaaaaatgagatgggatgaggtaaataaggatagagaatgttttattcactttaggatctttactgcttcctgggcagtaaacctcccaaaagctacccc

SEQ ID NO: 4056 - DNA, 110 bp, synthetic construct
  source 1..110: mol_type = other DNA
tgctaacattcctactttcctgagtcttctgagctcttcaatattctctaaaagcagttcctgtatctctgtctcacttacagaatattaatcatcatggtaggtatcta

SEQ ID NO: 4057 - DNA, 110 bp, synthetic construct
  source 1..110: mol_type = other DNA
gcagaggattttgaggatctggcctgccaatttccccattgtttctctccattgagaagtcactacagctgcctgttgccccaagaaagaaaatttcctcagcatgtcac

SEQ ID NO: 4058 - DNA, 110 bp, synthetic construct
  source 1..110: mol_type = other DNA
tgtccaggtttacccatggaagctgcagctagcagtatgcacagctgctgaggcggagataacttcggcagtaataaatgagtgaagctctttatcccatggaacataaa

SEQ ID NO: 4059 - DNA, 110 bp, synthetic construct
  source 1..110: mol_type = other DNA
tgagcctcacactaaaagatgtataacaagcgtaaccctaagatcttcataataaattaatgtacatggcaactttatgatgccatttcataaagtgagtgacataatat

SEQ ID NO: 4060 - DNA, 110 bp, synthetic construct
  source 1..110: mol_type = other DNA
ttaaatctatatagtatcaccttcactcagtttaaataaaagtagagtacagcaagtatagtttctggtcttctgctagatgactgtgttcttccaaacagatcagcaaa

SEQ ID NO: 4061 - DNA, 110 bp, synthetic construct; identical to SEQ ID NO: 4060
  source 1..110: mol_type = other DNA

SEQ ID NO: 4062 - DNA, 110 bp, synthetic construct; identical to SEQ ID NO: 4060
  source 1..110: mol_type = other DNA

SEQ ID NO: 4063 - DNA, 110 bp, synthetic construct; identical to SEQ ID NO: 4060
  source 1..110: mol_type = other DNA

SEQ ID NO: 4064 - DNA, 110 bp, synthetic construct
  source 1..110: mol_type = other DNA
ttggccacagaaataagatacagaatctctttttctggccttgctttaaagaagtactgacagaattcagccagatgctgtgtatctctttccagagtgcaattttaggg

SEQ ID NO: 4065 - DNA, 110 bp, synthetic construct
  source 1..110: mol_type = other DNA
tttagaaaacttgaaatgttattttccttcctccatttaaggcaaagacaaaaaatattagctgtggaagcaggtcaatgattcctttttatgtttgtgtcatggaagga

SEQ ID NO: 4066 - DNA, 110 bp, synthetic construct; identical to SEQ ID NO: 4065
  source 1..110: mol_type = other DNA

SEQ ID NO: 4067 - DNA, 110 bp, synthetic construct
  source 1..110: mol_type = other DNA
agacccaggaagactacataagttctaggaccacaattgctaagcaaatggtggagtcaaagtttaaaaccaggcagtctggctcccaaggcagtggtcttaaataccgc

SEQ ID NO: 4068 - DNA, 110 bp, synthetic construct
  source 1..110: mol_type = other DNA
gtcaaagtttaaaaccaggcagtctggctcccaaggcagtggtcttaaataccgccataccacacagtatgtttctactgtagtttttacttagcaaaagcagagataaa

SEQ ID NO: 4069 - DNA, 110 bp, synthetic construct
  source 1..110: mol_type = other DNA
attcccatctgccctgagctccaggaacttcagctgcacctctcagttcctgacgaacatgacaaagaggctgctctgagctgctcatatgttcatattcaatatgcgat

SEQ ID NO: 4070 - DNA, 110 bp, synthetic construct
  source 1..110: mol_type = other DNA
atttagggcaggtacatcagaggcatatattcaatatttctgtgtcacacacaaaagatcaactggagtcatgcaatgtaaaggtgaattaaggtttgctagaggaaatt

SEQ ID NO: 4071 - DNA, 110 bp, synthetic construct
  source 1..110: mol_type = other DNA
agatcaactggagtcatgcaatgtaaaggtgaattaaggtttgctagaggaaattttaaaagtaaaatcacagattatttcctcttaagtatgcagagaggtgaacttaa

SEQ ID NO: 4072 - DNA, 110 bp, synthetic construct
  source 1..110: mol_type = other DNA
taaaataaacttgttccaccataccctgcctcctctttcttagttttagttatgcatgttaacttagtttattgcttataatgcctagttacggatcttaacaaaacatt

SEQ ID NO: 4073 - DNA, 110 bp, synthetic construct
  source 1..110: mol_type = other DNA
tcttgtaggtcactatttactctaatgcctgtgatctgaagagcctgcagtttcaatataatacctgagtgaaaatgtagttggtgatgggccactggaaagtgagggat

SEQ ID NO: 4074 - DNA, 110 bp, synthetic construct
  source 1..110: mol_type = other DNA
atataatacctgagtgaaaatgtagttggtgatgggccactggaaagtgagggatagtgccagtatctctctgtctctttcctttgtaggattatatcagcggctcttgt

SEQ ID NO: 4075 - DNA, 110 bp, synthetic construct
  source 1..110: mol_type = other DNA
gcaatataacagctcaatgcatcttcacagcctgcatgacatcctggaacaaaaaggggacattaatgggaaaactagtgaagtcaaaatcaagtcgggaggttggtttt

SEQ ID NO: 4076 - DNA, 110 bp, synthetic construct
  source 1..110: mol_type = other DNA
atgacatcctggaacaaaaaggggacattaatgggaaaactagtgaagtcaaaatcaagtcgggaggttggttttaaaaaatatataatttattgagacatagttaattt

SEQ ID NO: 4077 - DNA, 110 bp, synthetic construct
  source 1..110: mol_type = other DNA
ttcttctttagtcttctcttatccaccctagattctacatccctactaatttttctattgaatgacagatgcatgatgatgtagctgagaatatgaacttaagatcagaa

SEQ ID NO: 4078 - DNA, 110 bp, synthetic construct
  source 1..110: mol_type = other DNA
atcttatttgaccaatattcacaaaatacttgttcagcacctattttgtgcctctcagaaaaaatgggtaatgggattataggtctttagaaatcattttgaacatcata

SEQ ID NO: 4079 - DNA, 110 bp, synthetic construct
  source 1..110: mol_type = other DNA
cagaaaaaatgggtaatgggattataggtctttagaaatcattttgaacatcatagaatatgtatagcccttagaaataactcctggcaccaaaataagcaaaatagtgg

SEQ ID NO: 4080 - DNA, 110 bp, synthetic construct
  source 1..110: mol_type = other DNA
aggaattccatcaccctcacgaaaaccctggaatatataagttggagtttctgtcactgaagatctttagtgtcagctcacttagggctggaatcttctgtctggttagg

SEQ ID NO: 4081 - DNA, 110 bp, synthetic construct
  source 1..110: mol_type = other DNA
cctcttccctctcttttttccttactgcttcctgaaatgtaatgtgatggcaggagctccaacagctatattaaaccatgagctattactaaggttgggaactagaggca

SEQ ID NO: 4082 - DNA, 110 bp, synthetic construct
  source 1..110: mol_type = other DNA
aaagatgggagtgtaaaatagcacaaccgctttggaaatacatatgactcagcaatatcaattctagatgtttactcaaaaaaatgtttaaagtaagcccaccaaataaa

SEQ ID NO: 4083 - DNA, 110 bp, synthetic construct
  source 1..110: mol_type = other DNA
accgctttggaaatacatatgactcagcaatatcaattctagatgtttactcaaaaaaatgtttaaagtaagcccaccaaataaacaaaaagcttgtgaaagagtgctaa

SEQ ID NO: 4084 - DNA, 110 bp, synthetic construct
  source 1..110: mol_type = other DNA
tatcttatggaagcatttaatatgatgtttgcttcttggtgcttattaagcatccacttaattggaatgcagacatcgaagccttaattttaaaggagtctacatgcaga

SEQ ID NO: 4085 - DNA, 110 bp, synthetic construct
  source 1..110: mol_type = other DNA
ttaagcatccacttaattggaatgcagacatcgaagccttaattttaaaggagtctacatgcagatacaagtttaaatttctaaatagagaacattttgttattcagtca

SEQ ID NO: 4086 - DNA, 110 bp, synthetic construct
  source 1..110: mol_type = other DNA
taagtggcctggatgttccagatggaaatttaacacacaacattctttgatgctttttaaatccaagtgaagggcacaagcagaagcagaaccactctccttctgatctg

SEQ ID NO: 4087 - DNA, 110 bp, synthetic construct
  source 1..110: mol_type = other DNA
tgacttacagaggcaggacagcccaacagggcagaggctacaaaaggacagctgtggttcaatataagcaggacctaataaagcagcctaacgatagtgttggctccccc

SEQ ID NO: 4088 - DNA, 110 bp, synthetic construct
  source 1..110: mol_type = other DNA
ctaacaagccatcttcaacagagagtctttatcaggttaatgatattggcatgcactgcaagaaaacatgtaccaatggaactcacagctacatttttctcttgttttct

SEQ ID NO: 4089 - DNA, 110 bp, synthetic construct
  source 1..110: mol_type = other DNA
ctgcaagaaaacatgtaccaatggaactcacagctacatttttctcttgttttctggccatggtcaagcttgttagagtgattcggtaagaaaaagaatgcaaacgtttc

SEQ ID NO: 4090 - DNA, 110 bp, synthetic construct
  source 1..110: mol_type = other DNA
cagtctctcaaatctaggcaggttcaatctggattcaggcaacctgaagaagagtccagatgctttggggtaggtcggacattcctttattggcttcacaagtggtggca

SEQ ID NO: 4091 - DNA, 110 bp, synthetic construct
  source 1..110: mol_type = other DNA
ccagatgctttggggtaggtcggacattcctttattggcttcacaagtggtggcagcaatgtggaaagtcctatccaccttttatattggtataccttttatttggccag

SEQ ID NO: 4092 - DNA, 110 bp, synthetic construct
  source 1..110: mol_type = other DNA
tatatccaacctgtatgatttactggcataaaaattagtgaaccaagtagtggttctattcatatcttcctgtctacagctctgtacaagtctacaacttgggagaggta

SEQ ID NO: 4093 - DNA, 110 bp, synthetic construct
  source 1..110: mol_type = other DNA
acaaaaatggtagtacactctttgatgtgttgttttttttaaatgcagtatagtcaatccacaatatcacattagtttgaggtgtactgcttagtgattcagatatagat

SEQ ID NO: 4094 - DNA, 110 bp, synthetic construct; identical to SEQ ID NO: 4093
  source 1..110: mol_type = other DNA

SEQ ID NO: 4095 - DNA, 110 bp, synthetic construct
  source 1..110: mol_type = other DNA
tcctactccagtacaagtcaagtggctggattagccctctacctcctggccagctggcgtttaactcagactaaacacttccctgggctagggaacacaccagcctggcc

SEQ ID NO: 4096 - DNA, 110 bp, synthetic construct
  source 1..110: mol_type = other DNA
atctcagcaagaacaaaattaaggcactccccgtgcagttttgccaattccaagaacttacagatttaaaacttgatgataatgaattgattcgacttcctttcaagatg

SEQ ID NO: 4097 - DNA, 110 bp, synthetic construct
  source 1..110: mol_type = other DNA
ccatatcaaagttccactgagaatccaaataggtaaatttgacaatgatgcataatcaatttcgccaacatagattttaaaaagtaaaagtgaaggatatggctttacta

SEQ ID NO: 4098 - DNA, 110 bp, synthetic construct
  source 1..110: mol_type = other DNA
tcaatttcgccaacatagattttaaaaagtaaaagtgaaggatatggctttactaagatccagtggtactgttcctgtaggatcttccaggaaaaattttccctaaagaa

SEQ ID NO: 4099 - DNA, 110 bp, synthetic construct
  source 1..110: mol_type = other DNA
ggaatttcattttatcccagtcacaacatttatagcaccttattgctagctgttgagcctcttcaccaaattgtaatctccttgaatgttgaattagagtttttctcaat

SEQ ID NO: 4100 - DNA, 110 bp, synthetic construct
  source 1..110: mol_type = other DNA
gtgtaaggaagtagggtgatatgttaagctaatgatgtgtttgttttggcttagttttgtctctaggttacatccagtccagatagctaaagcagaacttttctctgttg

SEQ ID NO: 4101 - DNA, 110 bp, synthetic construct
  source 1..110: mol_type = other DNA
ttttgttcagcctctaagcaggcaggtgaaaacagcatactaattttatggtccgtaagctgatctcccccctcttaacctgatcaggtggctgacaggactcttgtgca

SEQ ID NO: 4102 - DNA, 110 bp, synthetic construct
  source 1..110: mol_type = other DNA
aaaggttggcttccttcaaatcccctgataaaatcagcagtccagaccagccaattaaggccacaggtgatgtttcctatgtaagcagatccctctgcttcagatttcat

SEQ ID NO: 4103 - DNA, 110 bp, synthetic construct
  source 1..110: mol_type = other DNA
agtttctcctacttccttctgttggagtcatgttttcaaaaaagcaattgttatcaagttaatctaattaattcgtaacataaacaaccctataggacttctattctcag

SEQ ID NO: 4104 - DNA, 110 bp, synthetic construct
  source 1..110: mol_type = other DNA
ggccacaataagtaagcaaacccagaaagaggaaagcaggatattcaggaagtagtgagtccaactatacagaaattccaagaggggattccaaggatgacagcaaaggg

SEQ ID NO: 4105 - DNA, 110 bp, synthetic construct
  source 1..110: mol_type = other DNA
atcctaaacttataattgagctgtagagataggctcaggtgattcagtaaaggtagatatttaagactttctctgatcacccagatatcctcttggctaattccacactt

SEQ ID NO: 4106 - DNA, 110 bp, synthetic construct
  source 1..110: mol_type = other DNA
atattttcaaaaattgtacaattcattggcacaaaatacatccatgttgttgtgcaaccatcatcatcatcatccagctccagaattcttttaatcttgcaaagcaccat

SEQ ID NO: 4107 - DNA, 110 bp, synthetic construct
  source 1..110: mol_type = other DNA
attagaagccttatttcattcttgagcatatgttttaggactatttatatttattctctttcatttcctctgtattaggtactccaccttctgaattcatcccagttttc

SEQ ID NO: 4108 - DNA, 110 bp, synthetic construct
  source 1..110: mol_type = other DNA
agtaatcaaaagctggaaaagctaacaatttagctacaaaaattaaaaaataaaaagatctcatttcaaaaaggcacacaaatgtcggatctgttcaagaaaatgccaag

SEQ ID NO: 4109 - DNA, 110 bp, synthetic construct
  source 1..110: mol_type = other DNA
aattttcttggtggcattgtttctgctcttttgagtaaactacactttgggggtacatctcaggaaatcaaatttaaacagatttaccttttctgccaaaacattttcca

SEQ ID NO: 4110 - DNA, 110 bp, synthetic construct
  source 1..110: mol_type = other DNA
catctcaggaaatcaaatttaaacagatttaccttttctgccaaaacattttccaaatttcgctgaagtttgtttgtcagattctcatactctgccaacttctctgcatt

SEQ ID NO: 4111 - DNA, 110 bp, synthetic construct
  source 1..110: mol_type = other DNA
tttctcaccttgaatttcatgtgaacctatttcccctattttttgtgtttccccttattttcattttctcttgcagctttccaaatagatcacttcttggggtaattaaa

SEQ ID NO: 4112 - DNA, 110 bp, synthetic construct
  source 1..110: mol_type = other DNA
tgtttccccttattttcattttctcttgcagctttccaaatagatcacttcttggggtaattaaagagtttaaaggagtattaaagagattgagctgatcataaaatatt

SEQ ID NO: 4113 - DNA, 110 bp, synthetic construct
  source 1..110: mol_type = other DNA
caggtaaactgaaaaacagatatttcaaaaacacaagctagtctgagaagatcagaggagaaagagaattgtctcctgtcagcctcctttaagtccacagaaggtgcagg

SEQ ID NO: 4114 - DNA, 110 bp, synthetic construct
  source 1..110: mol_type = other DNA
attattatatgaatttaaatttaccagctatcaatgcaaagagctctacagaagtaacagactgatgaaccgatgctcccccacccccacaacttattcatttccccaaa

SEQ ID NO: 4115 - DNA, 110 bp, synthetic construct; identical to SEQ ID NO: 4114
  source 1..110: mol_type = other DNA

SEQ ID NO: 4116 - DNA, 110 bp, synthetic construct
  source 1..110: mol_type = other DNA
tgctggcacatggtgtgtgcttaataaatgtcatatgtgccggctggtattaattcttactcagctcttccttcctgcccacaaacacctggggaccgactggcaactgg

SEQ ID NO: 4117 - DNA, 110 bp, synthetic construct
  source 1..110: mol_type = other DNA
agggagccaatcatgagggatgactttttccactggtgaactctcagtttccatctttagagctatttcattgaaaggaatatatcagagaaaatcagagcactgatcac

SEQ ID NO: 4118 - DNA, 110 bp, synthetic construct
  source 1..110: mol_type = other DNA
gatacccagagcccttatttcagttaagcacatcacttagaacctggccggttaggtgccttgttctgaaggggatgaagggatggggttaggggatggggaacatgcta

SEQ ID NO: 4119 - DNA, 110 bp, synthetic construct
  source 1..110: mol_type = other DNA
gagttgctggaaggagagtggatgatagaattgtgagtgcgggacggtggtctgggggcccttctgtgggccggggtactggatcctagtctggagccccgacttcattc

SEQ ID NO: 4120 - DNA, 110 bp, synthetic construct
  source 1..110: mol_type = other DNA
agcccatgcttttccatttcaccacactgattcctgattcctacagaggcccatgtgggagggacaacaagaatgaatacaagaaagcccccaaatgagtgatgattagc

SEQ ID NO: 4121 - DNA, 110 bp, synthetic construct
  source 1..110: mol_type = other DNA
ggctgcctttctgcatgggattttgaaagactcagtattttgatactgagtttgcaaattgtggccaagaaactatttacattgtcctgatgtagatgtgttttctattt

SEQ ID NO: 4122 - DNA, 110 bp, synthetic construct
  source 1..110: mol_type = other DNA
ttagactgagtacaaattaacaagcaagtagacaatataatgtcaaatagctgagcgctaagaaggaaaataaagcaggataaatgataaagagtgactgtaggggctat

SEQ ID NO: 4123 - DNA, 110 bp, synthetic construct
  source 1..110: mol_type = other DNA
aagtggactctatgtaaaagagacccaaacttctattatgtaaatccactcagctgctaatatcatggcagctagtgtgaactaatgctagaaatggtaaagaaagtggg

SEQ ID NO: 4124 - DNA, 110 bp, synthetic construct
  source 1..110: mol_type = other DNA
tatcctgctctcaccattccatgaaacctagagtaaatatatccccatcctacgtgaagctctctagctcccccggagaacatgagacggtgctctcatgtaatgtggaa

SEQ ID NO: 4125 - DNA, 110 bp, synthetic construct
  source 1..110: mol_type = other DNA
ttctgctgtgccactatgggaactccccataatttaatttttttaatcctatcaaattcaacataggcctccttctgtgacagagctttttttggtctctgcaagtgagt

SEQ ID NO: 4126 - DNA, 110 bp, synthetic construct
  source 1..110: mol_type = other DNA
atttcatctgatgcagaaacagatagatagacagacagacagatataaagctccaatattaaagaaattcaaatgatccttggactccctatgtctaagaacttgaagta

SEQ ID NO: 4127 - DNA, 110 bp, synthetic construct
  source 1..110: mol_type = other DNA
gtgctcagacaacattcagcaatgtccatgtctcggcacctgtggtgtctcacactccaggcctctcttccctcagttccctgagctggtgaagcccctccctgttctac

SEQ ID NO: 4128 - DNA, 110 bp, synthetic construct
  source 1..110: mol_type = other DNA
tgagcaggtaatataaaatgcatatagggaagtttgtggtacacacatcagttctcagtatggttaccacccctccaaagaaaactgttcattaatctatttaaaccagt

SEQ ID NO: 4129 - DNA, 110 bp, synthetic construct
  source 1..110: mol_type = other DNA
ccatcagcaaacttctctatgtatccagaagctaaccacttctcatcactcccgttatttctcctatggtccaagctgacgatgtttcttacctgaattattgcaatggc

SEQ ID NO: 4130 - DNA, 110 bp, synthetic construct
  source 1..110: mol_type = other DNA
aaggcagctgcagacttgatggcctactgcgaagcgcatgccaaggaagatcccctcctgacacctgtcccggcttcagagaacccatttagggagaagaagtttttctg

SEQ ID NO: 4131 - DNA, 110 bp, synthetic construct
  source 1..110: mol_type = other DNA
attcttctgttctctccatctaaagacgacatttcaattttaggagcttctcgattccagtctgtccagtacaagttgctgtagataaattaaacggaatagagaaagat

SEQ ID NO: 4132 - DNA, 110 bp, synthetic construct
  source 1..110: mol_type = other DNA
gcataggcttctaagaaaatgactactcattctctattcccacatagtctggaagcttggatggcaaccactgggttactgataatgggaggcagcctctccgatggtcc

SEQ ID NO: 4133 - DNA, 110 bp, synthetic construct
  source 1..110: mol_type = other DNA
cttggatggcaaccactgggttactgataatgggaggcagcctctccgatggtccccaagatcccttcctcctggtacgtggggtcttaggtaatctccttccttgagga

SEQ ID NO: 4134 - DNA, 110 bp, synthetic construct
  source 1..110: mol_type = other DNA
ggctaaagccccatgaaaggctatacaagacaaactataattatgatgggttaaatcagttactggtaagctggcttggggatctttttaaacagtgtgtgtgtgtgtta

SEQ ID NO: 4135 - DNA, 110 bp, synthetic construct
  source 1..110: mol_type = other DNA
tcagttactggtaagctggcttggggatctttttaaacagtgtgtgtgtgtgttaagttgcttgctcagaatggaacttactgaaccaagaacacaagcttagccttcca

SEQ ID NO: 4136 - DNA, 110 bp, synthetic construct
  source 1..110: mol_type = other DNA
cccacttagatcaaccccaccactgttgcaggcagcacggtttacctgcctgaagtcctccttcctgcttcaggatccctggaaacaggtgtagagagaggccagtcaca

SEQ ID NO: 4137 - DNA, 110 bp, synthetic construct
  source 1..110: mol_type = other DNA
tcctccttcctgcttcaggatccctggaaacaggtgtagagagaggccagtcacagccaggaacaatgagcagaggtactgccataaggatgttggtggtgtgatatctt

SEQ ID NO: 4138 - DNA, 110 bp, synthetic construct
  source 1..110: mol_type = other DNA
cattgatttattcattaaataattaaataagtcttaactgacatataccttatgccaggcagttgggttccatgctgaggaaaaaaatagtaagacttggttcagtgtag

SEQ ID NO: 4139 - DNA, 110 bp, synthetic construct
  source 1..110: mol_type = other DNA
caggcagttgggttccatgctgaggaaaaaaatagtaagacttggttcagtgtagttgcttactatccacttgtggacgggggcacataaccagttacaggagagtgtgg

SEQ ID NO: 4140 - DNA, 110 bp, synthetic construct
  source 1..110: mol_type = other DNA
tgtttaagttgtaattttcataagaaataagcgaaacttctctttaaaatgttgcaataatgacccacaactattataacacgtgaaatctgcacaatggaaagggaaat

SEQ ID NO: 4141 - DNA, 110 bp, synthetic construct
  source 1..110: mol_type = other DNA
gaaagagcagatggtaacggacaacacattaatgtcagacatatcgagcttaaaacagatatatctaattagtagtcagatatatgggacaggaaatatctgacctgaaa

SEQ ID NO: 4142 - DNA, 110 bp, synthetic construct
  source 1..110: mol_type = other DNA
gtaaaagaatgtaattagaacatagactcacaccacataacaaaattaaaatggattaaagaccagaaaccataaagctcccaaaagaagcgttcccactgtggtgtagt

SEQ ID NO: 4143 - DNA, 110 bp, synthetic construct
  source 1..110: mol_type = other DNA
ttaaagaccagaaaccataaagctcccaaaagaagcgttcccactgtggtgtagtgagttaagactctgactgtagtggctggggttgttgctaaggcatagatttgatg

SEQ ID NO: 4144 - DNA, 110 bp, synthetic construct; identical to SEQ ID NO: 4142
  source 1..110: mol_type = other DNA

SEQ ID NO: 4145 - DNA, 110 bp, synthetic construct; identical to SEQ ID NO: 4143
  source 1..110: mol_type = other DNA

SEQ ID NO: 4146 - DNA, 110 bp, synthetic construct
  source 1..110: mol_type = other DNA
gtgggattcacaccctgggcagccagaaaaactacatacatgctttttgtttgcttgtttgtatttttaaagctgtacctacagcatgtggaggttcccaggctacgagg

SEQ ID NO: 4147 - DNA, 110 bp, synthetic construct
  source 1..110: mol_type = other DNA
attcagagaaaacaattatgagcatcctgataaatagtatagtgtgaccttgtctagccagagcttgcctagtgagatttatgatgtacttgacccattctgatgatttt

SEQ ID NO: 4148 - DNA, 110 bp, synthetic construct; identical to SEQ ID NO: 4147
  source 1..110: mol_type = other DNA

SEQ ID NO: 4149 - DNA, 110 bp, synthetic construct; identical to SEQ ID NO: 4147
  source 1..110: mol_type = other DNA

SEQ ID NO: 4150 - DNA, 110 bp, synthetic construct; identical to SEQ ID NO: 4147
  source 1..110: mol_type = other DNA

SEQ ID NO: 4151 - DNA, 110 bp, synthetic construct
  source 1..110: mol_type = other DNA
ctgccctataccttaaatatgggtgccctgcagggttctgttctcattagccttttcgtattatagacaactatttcaatggccacatatatttttaatactaactgcta

SEQ ID NO: 4152 - DNA, 110 bp, synthetic construct
  source 1..110: mol_type = other DNA
ataaaagcaaaaacaggacaccagaaaagatcttcagtgtcgatagtgcacatgccaagagacaaaagagagaaaagcaggcattctgacagcaaaaatagttgtcagta

SEQ ID NO: 4153 - DNA, 110 bp, synthetic construct
  source 1..110: mol_type = other DNA
caagagacaaaagagagaaaagcaggcattctgacagcaaaaatagttgtcagtatcagaagatggaattgttggcctatgggagcctgtgacacgttcaagtagcttaa

SEQ ID NO: 4154 - DNA, 110 bp, synthetic construct
  source 1..110: mol_type = other DNA
tgtttgggaaaattgaaggaggagaaagaagaaaaaaacagttaacagaagggcttaacagaagggctcacctttctctcagggccatatctgaacttgagaagcactgg

SEQ ID NO: 4155 - DNA, 110 bp, synthetic construct
  source 1..110: mol_type = other DNA
ctaccgcacctgtggcataggatgcagctgcagctcagatgtgatcattggcccgggaacttccatatgccataataatggctatttttaaaaaaagcaaacaaacacac

SEQ ID NO: 4156 - DNA, 110 bp, synthetic construct
  source 1..110: mol_type = other DNA
ggaacttccatatgccataataatggctatttttaaaaaaagcaaacaaacacactaagcattatatactgaaaaggcctagaactaaagaccagtcccatataagtgaa

SEQ ID NO: 4157 - DNA, 110 bp, synthetic construct
  source 1..110: mol_type = other DNA
catgacctcatcattcctagttagattcgtttccgctgtgccacgacgggtatccccaggattcttttctatctcagccctaagctaaactgaaagtacatatttattta

SEQ ID NO: 4158 - DNA, 110 bp, synthetic construct
  source 1..110: mol_type = other DNA
gcctttggcctgagagctggctggtgttccctcagagctcctgcccttactcatatactctggaagttgccctggagagagaaggagggagggcctccctggcagagtga

SEQ ID NO: 4159 - DNA, 110 bp, synthetic construct
  source 1..110: mol_type = other DNA
ccttggatgggacagctcattaaaatgtagttatgattacccctccctcattctggaaaaaagccaacaggtgcctctgggaaaatgtttcacactaacttgtttttcat

SEQ ID NO: 4160 - DNA, 110 bp, synthetic construct
  source 1..110: mol_type = other DNA
gaaaaaagccaacaggtgcctctgggaaaatgtttcacactaacttgtttttcatttctatattctcactcatgttcttctgctcagaattaaaaaaaccaaaaacctgc

SEQ ID NO: 4161 - DNA, 110 bp, synthetic construct
  source 1..110: mol_type = other DNA
ttgattgaggaaccatcctgaaaaaggctaccccaaaccgtgatgatgcatcagtgcttaaaatgagctcacaaacactattcacaatagccaagacatgcaagcaatgt

SEQ ID NO: 4162 - DNA, 110 bp, synthetic construct
  source 1..110: mol_type = other DNA
agttgactggaaggcagacataaaggctgaaagctctagatgccacttagatgcggccattgagtccacttcttggggtgacacagcagaagtggaagagagctggggcc

SEQ ID NO: 4163 - DNA, 110 bp, synthetic construct
  source 1..110: mol_type = other DNA
atgaatgcagaggtagccccacggtgtgtttgagctcagccggaagccagctgcgatgtgttctaatattagcaaagaggacctgctttcacaaatggagggtgattcaa

SEQ ID NO: 4164 - DNA, 110 bp, synthetic construct
  source 1..110: mol_type = other DNA
tatactagctaatatatcctttaccaacaactccctgaggaagaaaagctgtgcaaagtagaggaattatgtaaagtatgcagttacagaggtagcatctttacattact

SEQ ID NO: 4165 - DNA, 110 bp, synthetic construct
  source 1..110: mol_type = other DNA
aagtagaggaattatgtaaagtatgcagttacagaggtagcatctttacattactagaagtgttagtggaacaaggaggaagaggccatgaggagaaggtggcaccaggc

SEQ ID NO: 4166 - DNA, 110 bp, synthetic construct
  source 1..110: mol_type = other DNA
agggctatcatatgattcagtaatcctactcctgggcatatatccataaaaaaaggaaactgtaattcaaaaagatacttgcactccaatgttcatagcagcactactta

SEQ ID NO: 4167 - DNA, 110 bp, synthetic construct
  source 1..110: mol_type = other DNA
gcatatatccataaaaaaaggaaactgtaattcaaaaagatacttgcactccaatgttcatagcagcactacttacagcaaccaagacatgcaaacatatatataaaatg

SEQ ID NO: 4168 - DNA, 110 bp, synthetic construct
  source 1..110: mol_type = other DNA
ttcccatataggtttggaagaaatctgaaaataacaggacccatgctaggttttctttataagtccacaaatcacacagagacatctaagccatgggactggaaaagtag

SEQ ID NO: 4169 - DNA, 110 bp, synthetic construct
  source 1..110: mol_type = other DNA
tttataagtccacaaatcacacagagacatctaagccatgggactggaaaagtagagtagtaggttctcagggagataccctagaggtaggcctgggcagcctcccagaa

SEQ ID NO: 4170 - DNA, 110 bp, synthetic construct
  source 1..110: mol_type = other DNA
tggctagaattttgatttcattttgtttccctcacagtgaagtgctggctattcagcaagcaaacccagctatatgctttcctcttaattaattatttaaaactattctg

SEQ ID NO: 4171 - DNA, 110 bp, synthetic construct; identical to SEQ ID NO: 4170
  source 1..110: mol_type = other DNA

SEQ ID NO: 4172 - DNA, 110 bp, synthetic construct
  source 1..110: mol_type = other DNA
gaagaatcaaggaagcttgatgaacgtaggagctgagctttgatgtgtgcatgccatttgatgggctagtctgattgtatcacaacccagagtccaagaaattagtctcg

SEQ ID NO: 4173 - DNA, 110 bp, synthetic construct
  source 1..110: mol_type = other DNA
ctcttcttacctgttccgggtagctctatgcttttgggaatcccctcccattttctcctggtgtcaaggacacagagtctcccaggtcatgatgggaagtataaggaaag

SEQ ID NO: 4174 - DNA, 110 bp, synthetic construct
  source 1..110: mol_type = other DNA
tttcagtcagtaactacaatgtttatcctagccaaagtgtcttcgctgagacaattttggttgcaggtaacaaaaacagcataaggaaacaacctaaatgtcccacccac

SEQ ID NO: 4175 - DNA, 110 bp, synthetic construct
  source 1..110: mol_type = other DNA
tagttcaattaaaatctataataaaatggtcacttgctctcaaaaagaaaaccagcacagtatttcagcaaaatgtcatgactagcatgaaactgtaatttaggaagatg

SEQ ID NO: 4176 - DNA, 110 bp, synthetic construct
  source 1..110: mol_type = other DNA
cacagtatttcagcaaaatgtcatgactagcatgaaactgtaatttaggaagatgtaaaaatacggccgcataacctcactggccaacgcctgtcacatgactatgaaac

SEQ ID NO: 4177 - DNA, 110 bp, synthetic construct
  source 1..110: mol_type = other DNA
ttcagatagatgggataggagaagggaaagaacaacccccgctgtggtcaaccatgggtggagaggagtagctaagtctagggagaaagaacatgaagggtaggaaagca

SEQ ID NO: 4178 - DNA, 110 bp, synthetic construct
  source 1..110: mol_type = other DNA
gaacacttcctgagggatatggtctcaaaatcagcttttaacagttatatatatgtaatctccatccacaatgctatccaccataggcaattggtgaatagaggtgaggg

SEQ ID NO: 4179 - DNA, 110 bp, synthetic construct
  source 1..110: mol_type = other DNA
tccttcccctccatttgcaccccctacctccatctgcaccccctacctccatcagtaggtcctttgcagaagcacatggtttagcagctctggacaagaatagatcttac

SEQ ID NO: 4180 - DNA, 110 bp, synthetic construct
  source 1..110: mol_type = other DNA
gatctttgaacatactgttctttacagacttgactgtgatgctggaaattcagactgagctgggaacccagaggtagtattgaaattgtccatctcagaaaattcacaga

SEQ ID NO: 4181 - DNA, 110 bp, synthetic construct
  source 1..110: mol_type = other DNA
tccaatagtggaaatatttttttatcagcactgttcagtatagtagccaaaagtcacatgtggctattgagctcttgtaatgtggttagtatgactgaggaactgaactc

SEQ ID NO: 4182 - DNA, 110 bp, synthetic construct
  source 1..110: mol_type = other DNA
taaggagttcattctgacatttttcacttaggaaaaccaaatttcaagataggacagagaaaatcaacttgtttagaaaacatgcctgatatgcaggtatgttaaaatgt

SEQ ID NO: 4183 - DNA, 110 bp, synthetic construct
  source 1..110: mol_type = other DNA
agagaaaatcaacttgtttagaaaacatgcctgatatgcaggtatgttaaaatgtgcagaaccatggtggtttggtggcctacggaggttcacgggctaggggtcaaatc

SEQ ID NO: 4184 - DNA, 110 bp, synthetic construct
  source 1..110: mol_type = other DNA
tcaatataacacatctttatgacacatctctttcaaaaatattttaaaaagtgtttaactgtctaatgtgggcattttaggaaaataaagatctctgcccctctggagcc

SEQ ID NO: 4185 - DNA, 110 bp, synthetic construct
  source 1..110: mol_type = other DNA
ctgctcggcttttgagttcttctccttcatccccatcgggatctccaaactgaggtcatggaaggtcagagttgaaaccgatgttgactgagcgcttttcatcagaaaat

SEQ ID NO: 4186 - DNA, 110 bp, synthetic construct
  source 1..110: mol_type = other DNA
tcatggaaggtcagagttgaaaccgatgttgactgagcgcttttcatcagaaaatctgagctccaagctttttggatattgcagaagttttacccagtctgcagtgaccc

SEQ ID NO: 4187 - DNA, 110 bp, synthetic construct
  source 1..110: mol_type = other DNA
tcttccactgatgaagatactggatgaagaaggtattgccttttccggtctccaaacaatacttgacttcacaccagtgctggcaatctctgactagctgggcaaaattg

SEQ ID NO: 4188 - DNA, 110 bp, synthetic construct
  source 1..110: mol_type = other DNA
acaatacttgacttcacaccagtgctggcaatctctgactagctgggcaaaattgagagggtcctctggcaggtcttgagtggccagtgagaaggacagtgtgcccagaa

SEQ ID NO: 4189 - DNA, 110 bp, synthetic construct
  source 1..110: mol_type = other DNA
gagacaccgggaacggtcactgtcctgggcccaaaacgcttgccaacatcatcatcttcatcctcatatccctcgtcttagcctggcagtctgagcccccaatgtggggt

SEQ ID NO: 4190 - DNA, 110 bp, synthetic construct
  source 1..110: mol_type = other DNA
ggccagtgctttgttcactgaatatttctaagagctgaacacgaagtacttgaaaaagggaaggaagaggaaggtccagaggcaccgggaggttagggcctttggaaatg

SEQ ID NO: 4191 - DNA, 110 bp, synthetic construct
  source 1..110: mol_type = other DNA
caagagaaaattgacaagcctccccctgcaaccttcggggggcagagtaggacaaatgaataaatagcttgcaaaagggctatagtccaattaccgaattgtacttagag

SEQ ID NO: 4192 - DNA, 110 bp, synthetic construct
  source 1..110: mol_type = other DNA
atgaataaatagcttgcaaaagggctatagtccaattaccgaattgtacttagagcaatgttgaaaaccaatgatttaacctaaataatgcagtttctgtgctgaataac

SEQ ID NO: 4193 - DNA, 110 bp, synthetic construct
  source 1..110: mol_type = other DNA
atgaaggtagaaaatgtcatgtaagagaaaaagatcacaaaatgtccagtacatgtaagtgttattatagacattgataaaggattttgttcataagtctttcagagcac

SEQ ID NO: 4194 - DNA, 110 bp, synthetic construct
  source 1..110: mol_type = other DNA
atgtccagttctgggggtcctttagctactgcatacaaactaccaaatctgtgacaaaattgcattgcatttcctccagtcctggctgacatgagtgtttctcattcata

SEQ ID NO: 4195 - DNA, 110 bp, synthetic construct
  source 1..110: mol_type = other DNA
tgaatgacaacatgatgaatgaatgaaggagtgagttgacaggggcagaatgaacaccaggtagtaataatgattatagttgaaactggtttatccataagggatataat

SEQ ID NO: 4196 - DNA, 110 bp, synthetic construct
  source 1..110: mol_type = other DNA
tgactctctattgtgctccttataacctggcccttagctcttagggcttctcaattatagtgcattccaggtcaagcctacatctgaattcataagctccttaactcgtg

SEQ ID NO: 4197 - DNA, 110 bp, synthetic construct
  source 1..110: mol_type = other DNA
tgagactgagtacccacccaaaacgcctggcctcagcatcagctctgggctgtagagaatcagtggtaagtgttccatgggtggggctgatggggaagtggtgagagaag

SEQ ID NO: 4198 - DNA, 110 bp, synthetic construct
  source 1..110: mol_type = other DNA
aaggtccgtatgacatcatgccctatgactgctcctcagtgccactgtggaacccttgtcagcaaaccccacaaagcccttgctgattatcctcaccatctttcaaatgc

SEQ ID NO: 4199 - DNA, 110 bp, synthetic construct
  source 1..110: mol_type = other DNA
ttgtcagcaaaccccacaaagcccttgctgattatcctcaccatctttcaaatgcccatcagctcctgcctcaggagagccaggctgcctttcctttgtgtgggcgggca

SEQ ID NO: 4200 - DNA, 110 bp, synthetic construct
  source 1..110: mol_type = other DNA
ctccactgtagcccccaaggttctgcttcccgagcctgaccagcctgtcactgtgagctgggtcactccttttgctgggatcctcatctaggccaactatccctgggcct

SEQ ID NO: 4201 - DNA, 110 bp, synthetic construct
  source 1..110: mol_type = other DNA
gaatcatttttgagctcccataacgtttgaggagagcttgtaatgttttgtatatgttctgggcaatgcctggcattctgggagagattgttaagcagtaagtaatgata

SEQ ID NO: 4202 - DNA, 110 bp, synthetic construct
  source 1..110: mol_type = other DNA
aggaactcacccagtaagtttttaatgctcctatgtttctgatctccattgctataatgtgtcatgggccattcaccagcttactggggctaaatctttctcaacaaaca

SEQ ID NO: 4203 - DNA, 110 bp, synthetic construct
  source 1..110: mol_type = other DNA
ctgtacaatttgtatgtccatagtcggtctcttttgcaaagctatatcttgcaacgtccacgcaggaatatgttattgaccttccggagtccgtccattgatcttccaga

SEQ ID NO: 4204 - DNA, 110 bp, synthetic construct
  source 1..110: mol_type = other DNA
tgctttcactgaaaaaccaacacccatcattgctattcacattttgttatccacacccagttacacagctcacctcacttccaggggttggagacatgaagtccttcctt

SEQ ID NO: 4205 - DNA, 110 bp, synthetic construct
  source 1..110: mol_type = other DNA
tgtgcttcaaaggctagagttttaaggacatgtgtctttgagtaaaacctcccctggacagctagggaggaaaatgtcctatctatggtggtggtggggagtctgggcat

SEQ ID NO: 4206 - DNA, 110 bp, synthetic construct
  source 1..110: mol_type = other DNA
tcctgctttagaactgaaaaggacaaactgactggaacaaaggcatgaacatttcccagagggaatccctgttaggagcagcagctgttgagagaactgggttgcagttc

SEQ ID NO: 4207 - DNA, 110 bp, synthetic construct
  source 1..110: mol_type = other DNA
tgtgaaatgatacagtgcctacatgatgagctgaagtgaggtgagtgatacagacattatgacatagcattaggctttctaccttttcacttaaaggaaacactttatgg

SEQ ID NO: 4208 - DNA, 110 bp, synthetic construct
  source 1..110: mol_type = other DNA
acatagagaaaagaagccaaggatagatgttgaatagaaaactagcagctactttctcaaatcacagccagcaattcagtagtatgggaagataagaatctacctcaaga

SEQ ID NO: 4209 - DNA, 110 bp, synthetic construct
  source 1..110: mol_type = other DNA
ctcaaatcacagccagcaattcagtagtatgggaagataagaatctacctcaagattgatgtggactggagttcccattgtggctcagcggaaatgaatctgcctaggat

SEQ ID NO: 4210 - DNA, 110 bp, synthetic construct
  source 1..110: mol_type = other DNA
cactgtatgttagatgtatgtataatattttgcaaaccaaataaataaggatgtggttcttcatttaacaaaagaagtcaccatcatttgaagtgacctcagttatgtga

SEQ ID NO: 4211 - DNA, 110 bp, synthetic construct
  source 1..110: mol_type = other DNA
tttataggcagtgccaggtaactagactatatattcattcattcatttactcattcatttgtcagatatttattgagggtatcctgccaggccctgcagcagaaactaga

SEQ ID NO: 4212 - DNA, 110 bp, synthetic construct
  source 1..110: mol_type = other DNA
catttgtcagatatttattgagggtatcctgccaggccctgcagcagaaactagagctacacagagaactagggatgcattcactcccctcattatgtttaaaatcaacg

SEQ ID NO: 4213 - DNA, 110 bp, synthetic construct
  source 1..110: mol_type = other DNA
actttaatggtcaggcttgaatcacttgcacacattcagtctaagtgccagaaatcatatgcccttagggcagcttagcaaaaatgttctccagaaacaagagcttctta

SEQ ID NO: 4214 - DNA, 110 bp, synthetic construct
  source 1..110: mol_type = other DNA
ctaaggaataaacacattatgcttctagctcttagatcacgatgaaccaaagctaatttgcagggaaatatgaaactacagggtcacttaagtccaaattaactgtatta

SEQ ID NO: 4215 - DNA, 110 bp, synthetic construct
  source 1..110: mol_type = other DNA
cccaacgtaagaggtctatcctctgactgcacacctcctaagcctgactcgttaccaactcaggaaggaaaagctctgtcttatcccccacctgtggtctggacttgggt

SEQ ID NO: 4216 - DNA, 110 bp, synthetic construct
  source 1..110: mol_type = other DNA
ttatgccaaacttcactctgctaggattttgcaagccaaactgacagtatcgggggctacgttgtatctagtatggagcttgtggcacatgcaaattacgtgatgaataa

SEQ ID NO: 4217 - DNA, 110 bp, synthetic construct
  source 1..110: mol_type = other DNA
gcactttccattttcttcaaaaacttttcctttgcattcacaacttggctaactggtgagaggcttagctttcagcctaccttcacttccgacatgccttcctcactaag

SEQ ID NO: 4218 - DNA, 110 bp, synthetic construct
  source 1..110: mol_type = other DNA
ttactctcagtaacatcaacataactttatttcatatgttctggaatccctgaaagaatggagtccaatgatagcgttggatgtaaattctttacctgagagaagattta

SEQ ID NO: 4219 - DNA, 110 bp, synthetic construct
  source 1..110: mol_type = other DNA
gaatggagtccaatgatagcgttggatgtaaattctttacctgagagaagatttaaattgcttatgatctcaggtgaggatatatcttctgtcacgtcatttgatagtta

SEQ ID NO: 4220 - DNA, 110 bp, synthetic construct
  source 1..110: mol_type = other DNA
atctgactccctccccatcagtgagttcccaatgccttcctgctccagccagaatgcctgcctccaccagctggaggcccaggaaccctcatgtggggcaaattgctgtt

SEQ ID NO: 4221 - DNA, 110 bp, synthetic construct
  source 1..110: mol_type = other DNA
ggtacctggaagttacagctccttattaaataacgtgaggatttctacaatgctctctaggtgagctaaagatatagggggggaaaaaaaccacaacacaatttgtaaaa

SEQ ID NO: 4222 - DNA, 110 bp, synthetic construct
  source 1..110: mol_type = other DNA
tctaggtgagctaaagatatagggggggaaaaaaaccacaacacaatttgtaaaagaaattagagtaaaattaatcaacaatcaggaaaagctcaaaatattcagaaaag

SEQ ID NO: 4223 - DNA, 110 bp, synthetic construct; identical to SEQ ID NO: 4221
  source 1..110: mol_type = other DNA

SEQ ID NO: 4224 - DNA, 110 bp, synthetic construct; identical to SEQ ID NO: 4222
  source 1..110: mol_type = other DNA

SEQ ID NO: 4225 - DNA, 110 bp, synthetic construct
  source 1..110: mol_type = other DNA
ctccctttggccttctctaagagctagaactctcctgggttcttagcatctaccgtgctgttggagagggggcacggtcaggaaggatggttctgtctccatctgcccta

SEQ ID NO: 4226 - DNA, 110 bp, synthetic construct
  source 1..110: mol_type = other DNA
tctgggtggagatattggggagacacattaaactgaacaatgctgtgtgtcagcttctctgtgatctacgatatgaattccttaagggcaaagataacacaacagcttag

SEQ ID NO: 4227 - DNA, 110 bp, synthetic construct
  source 1..110: mol_type = other DNA
tctctgtgatctacgatatgaattccttaagggcaaagataacacaacagcttagtgttgatcctagcacatgataggctcgtaatcaagcatgttgagctcactgaact

SEQ ID NO: 4228 - DNA, 110 bp, synthetic construct
  source 1..110: mol_type = other DNA
gtgcagttaaggttgagagagactttactggatagtgtgtaaggtctcttccaattcttggagtctctgatgggagcccttaggaatgaactccttcaacctctggtctc

SEQ ID NO: 4229 - DNA, 110 bp, synthetic construct
  source 1..110: mol_type = other DNA
aggaatcagtgcctgagagtagaataagcctgattcctgtcattgattatatgcaaacttgagctctcatgtctacaatgactgcatcaggatttcactagagcaagaaa

SEQ ID NO: 4230 - DNA, 110 bp, synthetic construct
  source 1..110: mol_type = other DNA
taccaagatggatcatattctgggctaaaaaacaagtctcaataaatttaaaattggttcatatcacacaaagtatgtgccctctaaacacaaaagaatcaaatttgagt

SEQ ID NO: 4231 - DNA, 110 bp, synthetic construct; identical to SEQ ID NO: 4230
  source 1..110: mol_type = other DNA

SEQ ID NO: 4232 - DNA, 110 bp, synthetic construct
  source 1..110: mol_type = other DNA
gtgtaaaattttccatttgttaatcacactttaaaaacatattttcagtttggggttagcagatgcaaactattacatttagaatcgatgggcaatgagttcctgccgta

SEQ ID NO: 4233 - DNA, 110 bp, synthetic construct; identical to SEQ ID NO: 4232
  source 1..110: mol_type = other DNA

SEQ ID NO: 4234 - DNA, 110 bp, synthetic construct
  source 1..110: mol_type = other DNA
tctactcaaaaccactcaggtctgctgggtcactctggcaaatcagttagtctctcttgcctcagcttccttgtctgtaaaatgggattaactcacaaaattgctgtgag

SEQ ID NO: 4235 - DNA, 110 bp, synthetic construct
  source 1..110: mol_type = other DNA
acattcagatacatggaatgggtaacactgtcatctcctgagatggggattctgggagagggccaggtgtgggtggaatgtgtaggagaggtctgccctggagctgcagg

SEQ ID NO: 4236 - DNA, 110 bp, synthetic construct
  source 1..110: mol_type = other DNA
gagagggccaggtgtgggtggaatgtgtaggagaggtctgccctggagctgcaggtttgggaatcaaccctgggtagagaatgactgaaactatgggatgaatgaggtca

SEQ ID NO: 4237 - DNA, 110 bp, synthetic construct
  source 1..110: mol_type = other DNA
gtggacttcccagggtcatccatactctcctggcccctcacctgggtaaaatgtcttttggaagattaagaggctgccctgaagaaaggcaggtttcctgaaggtagctc

SEQ ID NO: 4238 - DNA, 110 bp, synthetic construct
  source 1..110: mol_type = other DNA
gctgttcgagtcagaccttcaaaaaataagctccagctctgaatgctccccagagcttgacttttataaagtcaaagattgggcctaagagcccttgtggtgtctgaatg

SEQ ID NO: 4239 - DNA, 110 bp, synthetic construct
  source 1..110: mol_type = other DNA
tggaatgatcaggtttgggtttttagaatattaatctgcagtgtggagcatggattgagaggaagtaaagccagcaatagaatgacttattaagagaacactggtacggt

SEQ ID NO: 4240 - DNA, 110 bp, synthetic construct
  source 1..110: mol_type = other DNA
tgagaggaagtaaagccagcaatagaatgacttattaagagaacactggtacggtctggagcagcaagactagtgatcttgaagaggtggtagcagtgaggtggaggagg

SEQ ID NO: 4241 - DNA, 110 bp, synthetic construct
  source 1..110: mol_type = other DNA
atattatatgcatgagagagagcctgtcctgaatccttaggtcactccctatctaggaatactctaatggaaactcactctgtgtacaaattgcccagtagagctgcctt

SEQ ID NO: 4242 - DNA, 110 bp, synthetic construct
  source 1..110: mol_type = other DNA
ggaatactctaatggaaactcactctgtgtacaaattgcccagtagagctgcctttttttccccccattggggtaaacaatgtttttttttcaattgaaatataggtgat

SEQ ID NO: 4243 - DNA, 110 bp, synthetic construct
  source 1..110: mol_type = other DNA
aatgattcgaccatgcattttaactgtcccttacttagacctcagatccctgcatctctttctgagcaacttatcatccaagagaagaagagagctcacacttacttatt

SEQ ID NO: 4244 - DNA, 110 bp, synthetic construct
  source 1..110: mol_type = other DNA
ctctttctgagcaacttatcatccaagagaagaagagagctcacacttacttattccaggcttggctgaggtataagtttagctaaatgcctcttaacccattctgggcc

SEQ ID NO: 4245 - DNA, 110 bp, synthetic construct
  source 1..110: mol_type = other DNA
ccagtaccctttcaatcacttccattttggcttaagacagttcaaatggaatcctgtgactagaaactaaacaagccctcactaaccctccaggtctctccatttcattt

SEQ ID NO: 4246 - DNA, 110 bp, synthetic construct
  source 1..110: mol_type = other DNA
gtgactagaaactaaacaagccctcactaaccctccaggtctctccatttcatttagtctcaaagaactgagaaccggtttgcccaaattctttaagccaagatctctga

SEQ ID NO: 4247 - DNA, 110 bp, synthetic construct
  source 1..110: mol_type = other DNA
caaggtagtcctgaaatcttcagatccttaagctaataaagcaccacagacacagttttctgggcatatattccatggggtagaacccagtgataagaccatccctgctt

SEQ ID NO: 4248 - DNA, 110 bp, synthetic construct
  source 1..110: mol_type = other DNA
ttttctgggcatatattccatggggtagaacccagtgataagaccatccctgcttaaaaagctatgacaaatgcctcttcatcaggctagtactactcacccctcaccta

SEQ ID NO: 4249 - DNA, 110 bp, synthetic construct
  source 1..110: mol_type = other DNA
cacttctggtcattcatacactaactaacatttactgtaggcttgctggttgctagctaagtattttgcccacaggccatgcagttctcaaaacaactctcctgccatcc

SEQ ID NO: 4250 - DNA, 110 bp, synthetic construct
  source 1..110: mol_type = other DNA
ggactcttacccaggccctgattctgttgttcccactcgatggcatctggcacctggtaggtggccccctccaaagggaccacattgccctgctctgagccaggttcctg

SEQ ID NO: 4251 - DNA, 110 bp, synthetic construct
  source 1..110: mol_type = other DNA
ggtaggtggccccctccaaagggaccacattgccctgctctgagccaggttcctgagacatgaggccaggaagggtgaacccgggtggctcggtgtcaccacccaggccc

SEQ ID NO: 4252 - DNA, 110 bp, synthetic construct
  source 1..110: mol_type = other DNA
agaggttatatgttcttttctgttctagttttctaaaaaaggatgggagttcccattgtggctcagcaggttaagaactcaatatagtgtctggaagatgtgggttcgat

SEQ ID NO: 4253 - DNA, 110 bp, synthetic construct; identical to SEQ ID NO: 4252
  source 1..110: mol_type = other DNA

SEQ ID NO: 4254 - DNA, 110 bp, synthetic construct
  source 1..110: mol_type = other DNA
attttacagaataaaggaagagaaaatttaaagaagaattcttagttgtgcctgtgatttatttgaagctaaagctttgaagtacaaggctccctaattctaatttgttc

SEQ ID NO: 4255 - DNA, 110 bp, synthetic construct
  source 1..110: mol_type = other DNA
tggcacagctcaaattgaagaacagggatctgaattcaactctctctgtctttgaaatcttgcctcttctagacatttcacagtatctcaaggataatagggattaaaaa

SEQ ID NO: 4256 - DNA, 110 bp, synthetic construct; identical to SEQ ID NO: 4255
  source 1..110: mol_type = other DNA

SEQ ID NO: 4257 - DNA, 110 bp, synthetic construct
  source 1..110: mol_type = other DNA
tgtataactggccttcggtaatcaataattattattgttactctatccactgtgtcataatccagctatacagaatcacatgatattttccctgccattttgcattactt

SEQ ID NO: 4258 - DNA, 110 bp, synthetic construct
  source 1..110: mol_type = other DNA
cataatccagctatacagaatcacatgatattttccctgccattttgcattacttgtcctcttcatcagactttcactgaggttctcatctcaagtgctttttttttttt

SEQ ID NO: 4259 - DNA, 110 bp, synthetic construct
  source 1..110: mol_type = other DNA
aattattattattttaataggtttaccgcaaaatttaacagctgaagatagcaaacatttattgtctcacatagttttgcaaagtcgtgaatctaggagtggcgtatctg

SEQ ID NO: 4260 - DNA, 110 bp, synthetic construct; identical to SEQ ID NO: 4259
  source 1..110: mol_type = other DNA

SEQ ID NO: 4261 - DNA, 110 bp, synthetic construct
  source 1..110: mol_type = other DNA
ttgccctctggcgggatcccttctttggacaatgggacattctccccactgaagcagtgggccaaagacccaaagccagaactactggaaagcaagaggttgcccctgcc

SEQ ID NO: 4262 - DNA, 110 bp, synthetic construct
  source 1..110: mol_type = other DNA
taaaaattctgaccttgcttttttggtatctttgaacaaatattagtatgctaattctttcctgttttcccctttctacccagacgcttaactgggaaaagaagccaaag

SEQ ID NO: 4263 - DNA, 110 bp, synthetic construct
  source 1..110: mol_type = other DNA
tctttcctgttttcccctttctacccagacgcttaactgggaaaagaagccaaagcttcacttgttgatgacatagatgttgaaatgctcaggatgcatgacaagagcag

SEQ ID NO: 4264 - DNA, 110 bp, synthetic construct
  source 1..110: mol_type = other DNA
gccactaccctgtggagctggtgtcctagaggacatgctcactgagctcttccttgggcaggagccacgtcctacttctcgtatcccttgtggcagtttatgcttatgct

SEQ ID NO: 4265 - DNA, 110 bp, synthetic construct
  source 1..110: mol_type = other DNA
ctcacaaaaatcatcgggaagctgaagaacaaacttgaagaatgggacacaactagtctccttaagacaggcaacagaactccagcctttggggtcccctgcagagacca

SEQ ID NO: 4266 - DNA, 110 bp, synthetic construct
  source 1..110: mol_type = other DNA
atgtacccctggtaaaataataatcagtttaaaagaaattaactgaaatgttcaaataattgcgtgaacaaaggccatgaatacctgctccggagagcaacccagatgtg

SEQ ID NO: 4267 - DNA, 110 bp, synthetic construct
  source 1..110: mol_type = other DNA
ataattgcgtgaacaaaggccatgaatacctgctccggagagcaacccagatgtgtgtggaaatgatctgaaaggaagtgaaggaaagctggcttgcagcgtagttctgg

SEQ ID NO: 4268 - DNA, 110 bp, synthetic construct
  source 1..110: mol_type = other DNA
atgaaggatgctctcccagggatgcagcttgctgaaagaagtgatgagcggtggagggaaacaaagtttatgagcctagtatagcaggcctttcacagggtaacataaaa

SEQ ID NO: 4269 - DNA, 110 bp, synthetic construct
  source 1..110: mol_type = other DNA
tcaagaagactgatcactagaaattgaacagactgatcactggaaatgaaattgaatatttagtaaaaacacgtcatacaaacaataggccaagaccagatggcttcaca

SEQ ID NO: 4270 - DNA, 110 bp, synthetic construct; identical to SEQ ID NO: 4269
  source 1..110: mol_type = other DNA

SEQ ID NO: 4271 - DNA, 110 bp, synthetic construct
  source 1..110: mol_type = other DNA
tgtctatgagcttccttgaattgtgagtcttaatgttaatgaaaaatatctttcaaaaataatataagcatattctgggtcatccaaatgactgtcttatcactgtcata

SEQ ID NO: 4272 - DNA, 110 bp, synthetic construct
  source 1..110: mol_type = other DNA
tattagttttctactactgcagaataaatgactacaaacttagtggcctaaaatagcaacacccatttattagctcactgtttcgtaggtcaaaagtccttgtgggctgg

SEQ ID NO: 4273 - DNA, 110 bp, synthetic construct
  source 1..110: mol_type = other DNA
caattgatcactctgctgaggaggccccggaaggtcaggcaaactcactgtcagggcggctcttagaaggctagagaaagtgatggctggcaccaagggaagtgggaagg

SEQ ID NO: 4274 - DNA, 110 bp, synthetic construct
  source 1..110: mol_type = other DNA
ccctgctggcaggaactgggaacttgtgttattcccccaggcagttactccacctattcccagaagtcggtttcctaagggcgaggcggcttcccagccattgctaggca

SEQ ID NO: 4275 - DNA, 110 bp, synthetic construct
  source 1..110: mol_type = other DNA
attcccagaagtcggtttcctaagggcgaggcggcttcccagccattgctaggcagctgctttggctaagtggttcctgagctgaggcagaaagtgtcctgctgcttgag

SEQ ID NO: 4276 - DNA, 110 bp, synthetic construct
  source 1..110: mol_type = other DNA
gttaaaggaaactacaggagtcatcatgccctctgaaatagctccaaaagtgaggcttggctgggctggcccaataggcaggttaattgtcaagactgaaacatttggat

SEQ ID NO: 4277 - DNA, 110 bp, synthetic construct
  source 1..110: mol_type = other DNA
caaccccagggtgtgttattagaatttttttttaatgtgcagctgtataagagctcattgggaccaatataaagctgagttttaaaaggccaagataggagttcctgttg

SEQ ID NO: 4278 - DNA, 110 bp, synthetic construct
  source 1..110: mol_type = other DNA
taaggatttaccacccacccttctgtgggactggcactgcgaggcccatggccgaggctgaggtcactgggatgggtggaggatgctgtcctctccccaggatgggtagt

SEQ ID NO: 4279 - DNA, 110 bp, synthetic construct
  source 1..110: mol_type = other DNA
tttcattgatttatactcttgtgaataaagtttgtgacatttaaaacaatgtaagagttcccatcgtggcccagcggaaatgaatccaactgggaaccatgaggtttcgg

SEQ ID NO: 4280 - DNA, 110 bp, synthetic construct; identical to SEQ ID NO: 4279
  source 1..110: mol_type = other DNA

SEQ ID NO: 4281 - DNA, 110 bp, synthetic construct
  source 1..110: mol_type = other DNA
agagttcattaaatacagggttttatataaatatgagtgtgtgtgtttctctggagagggatctccagcttttatcaggtttacagacaattctcaacctcaaaaagcct

SEQ ID NO: 4282 - DNA, 110 bp, synthetic construct
  source 1..110: mol_type = other DNA
ctcccggaacagaaacaagtggagttaggtaacccagaaattctcctttacatcttagctcgctttcagtccttctgaaaacccttgattcctttctgggtcaagtttct

SEQ ID NO: 4283 - DNA, 110 bp, synthetic construct
  source 1..110: mol_type = other DNA
tagctcgctttcagtccttctgaaaacccttgattcctttctgggtcaagtttctctccctcttgggttctctcatagttctcatgccctacctataaattcaccatcac

SEQ ID NO: 4284 - DNA, 110 bp, synthetic construct
  source 1..110: mol_type = other DNA
taggaagtcatgagggtggaggcctcttaggcagagacatcagagagcttgctctctttctctctctactgtgtaatgacacagtaggaaggcaactggccatctgcatg

SEQ ID NO: 4285 - DNA, 110 bp, synthetic construct
  source 1..110: mol_type = other DNA
atttagggaaaacaaaactcaagactgtgaaatgggatggcttgagcaatcctacttttagggaatccaccaggtcctggacgaggaagagcctcctcagttctttaagc

SEQ ID NO: 4286 - DNA, 110 bp, synthetic construct
  source 1..110: mol_type = other DNA
ttttagggaatccaccaggtcctggacgaggaagagcctcctcagttctttaagcgtgctgttcacatagaattgcaggcagtctgtgtacttctgaatctgctcctgag

SEQ ID NO: 4287 - DNA, 110 bp, synthetic construct
  source 1..110: mol_type = other DNA
tagtaatttcacattgccattataaaaattaacactgcattgatcaatgaggagaaggtgaactgtttagctaaagtctgaggactatttatggatttaaattattcaca

SEQ ID NO: 4288 - DNA, 110 bp, synthetic construct
  source 1..110: mol_type = other DNA
tctgctaaaactgggagtgtcgtggccaaaccaagacaagctggtcaccctatgagtagtgaagaagaatttgaacctaggtagttggactcctaaaagcagttactctt

SEQ ID NO: 4289 - DNA, 110 bp, synthetic construct
  source 1..110: mol_type = other DNA
atcataggacaaaattcattaaacagctcaagtaatattataaaggatccatttcaagattaccagctaaatgctcacttgattgttctttaaaaggtcacatccgctgg

SEQ ID NO: 4290 - DNA, 110 bp, synthetic construct
  source 1..110: mol_type = other DNA
aagattaccagctaaatgctcacttgattgttctttaaaaggtcacatccgctgggtaattcctttacatatgctataaaggcaaattggcttttagccttacaaagttt

SEQ ID NO: 4291 - DNA, 110 bp, synthetic construct
  source 1..110: mol_type = other DNA
ccagtaacaggttataggaaaactatgttattttctcttgctcaaaaagtaataagctctcctagcatagtcaaatttatagagatagaaaatagaatggtggttgccag

SEQ ID NO: 4292 - DNA, 110 bp, synthetic construct
  source 1..110: mol_type = other DNA
tcctagtggctcctggttccctgaaggagctagagaagacctgcagttacttacatgggtgggccctgaaaagagctttcccaaggtgcaggagagtggttacaagctga

SEQ ID NO: 4293 - DNA, 110 bp, synthetic construct
  source 1..110: mol_type = other DNA
acgttcccagatccctacagattgaggattcaccatgtctcctcttgcctcagtctcttccactgttcattcttcagctccaccagtatttattgaatgcttactaggca

SEQ ID NO: 4294 - DNA, 110 bp, synthetic construct
  source 1..110: mol_type = other DNA
attcaacatgtattgggcatttagtgtgctgcaaggccctttcagctttctacccacactacaaatctctttatcttttaacagtttgagtaattatcagtaaattacca

SEQ ID NO: 4295 - DNA, 110 bp, synthetic construct
  source 1..110: mol_type = other DNA
tgaaggaattataaataattgtgaaattagtcttcacattatagactggcctatgaaccaaggagctgtagatcaggctctggacactctgcctcttacctactctaccc

SEQ ID NO: 4296 - DNA, 110 bp, synthetic construct
  source 1..110: mol_type = other DNA
gtgactaaaatacacaatagaattagcaaatcaaacagtggaaggcaaactcagacaggactccttgcccatcagaacaggccaaagcaaacaagtgtattttgaattgt

SEQ ID NO: 4297 - DNA, 110 bp, synthetic construct
  source 1..110: mol_type = other DNA
caggagcggcccgcgccgggctctggaatgcgccaggtgatcgccttctccccgcccggccgggctccccggctcccagattccttccctttacagaaccttcgagctgc

SEQ ID NO: 4298 - DNA, 110 bp, synthetic construct
  source 1..110: mol_type = other DNA
ccggccgggctccccggctcccagattccttccctttacagaaccttcgagctgcttttggattctttctctcctatgcccgcggggctggagacaccatccctttaggc

SEQ ID NO: 4299 - DNA, 110 bp, synthetic construct
  source 1..110: mol_type = other DNA
agtatcatgttgtgtttgtaatctgtgtcctctcttaaaacctcttgggttaccgggacagcttctggcccacttgctggaaatccttgtgcatggttttagtttctggc

SEQ ID NO: 4300 - DNA, 110 bp, synthetic construct
  source 1..110: mol_type = other DNA
ttggaggaataagttggcaaagtaactcctctctctttgcactcaggtctcctaactaccccagattccttggttggaaaaaagctctggagggtctggaaagtgatcat

SEQ ID NO: 4301 - DNA, 110 bp, synthetic construct
  source 1..110: mol_type = other DNA
ctcctccaggggacccagagctaaagatgaataaactatacatatgaacctcatgtgttctagttccatgggttttctccatttcagaccagatcccttagtacattgtc

SEQ ID NO: 4302 - DNA, 110 bp, synthetic construct
  source 1..110: mol_type = other DNA
ttaacctctgctagccccagcttgctcatcataacgtagtactgacctcacagggttatgtgacagtatagtgaagacttatataaaccatgtagcgctgtgaaggacac

SEQ ID NO: 4303 - DNA, 110 bp, synthetic construct
  source 1..110: mol_type = other DNA
ttatgtgacagtatagtgaagacttatataaaccatgtagcgctgtgaaggacacataccactgtggaaaatggtcactgtcaccacgaccaccaccaccaccgctctac

SEQ ID NO: 4304 - DNA, 110 bp, synthetic construct
  source 1..110: mol_type = other DNA
aaagcttcagaaataaagggaaatgaagtggcatcaagcaggcctgcttctcttggactctttcacaagctattttaactgcaggcagggcacttcgcttctttgcactt

SEQ ID NO: 4305 - DNA, 110 bp, synthetic construct
  source 1..110: mol_type = other DNA
gactctttcacaagctattttaactgcaggcagggcacttcgcttctttgcacttgacttccacaaaacagatggataaaactcatcttggcagttggtctcagcttttc

SEQ ID NO: 4306 - DNA, 110 bp, synthetic construct
  source 1..110: mol_type = other DNA
attcatttccactacaccacaatgggaacgccaaaatatttcttttcatccagtcatatttttcctttttccttcgaagctaataactgtcagggagcagtggttagaag

SEQ ID NO: 4307 - DNA, 110 bp, synthetic construct
  source 1..110: mol_type = other DNA
gctagggatcaaatcagagctataactgcaggcctacaccacatcatacctgatatgatccatctcagcagcctttgccgcagctcgtggcaaagccagatccttaaccc

SEQ ID NO: 4308 - DNA, 110 bp, synthetic construct
  source 1..110: mol_type = other DNA
tgtagctaccatttacctctttttttctgtcttcataaagaaggaagtcagtgattattgctcctggaaagtgaaggtgattatataatctttaaaacattcccagtata

SEQ ID NO: 4309 - DNA, 110 bp, synthetic construct
  source 1..110: mol_type = other DNA
tattgctcctggaaagtgaaggtgattatataatctttaaaacattcccagtataataatagaaatgttgaccatttctcctagaaagccacaagccaaaggccgttgtt

SEQ ID NO: 4310 - DNA, 110 bp, synthetic construct
  source 1..110: mol_type = other DNA
tgtgtatggtaaaatgaaggaatgaggggtcagcatcacccaaacttcgtggattgagatttagagaagcatggtttcttaaaagaaaatcagaatatcattactgaaag

SEQ ID NO: 4311 - DNA, 110 bp, synthetic construct
  source 1..110: mol_type = other DNA
gagatttagagaagcatggtttcttaaaagaaaatcagaatatcattactgaaagagacagaaaggttctggaaggtcaaaattaacatctgtatcttcaacacatcagg

SEQ ID NO: 4312 - DNA, 110 bp, synthetic construct
  source 1..110: mol_type = other DNA
agtaagtgcttttaaaacgtctcatttaatccacacacaactcgatgagtttggtattttgcctcaatcgatgagaaaactcaggctctttgagattaaatgctttgtcc

SEQ ID NO: 4313 - DNA, 110 bp, synthetic construct
  source 1..110: mol_type = other DNA
gaattcttctctgagttttattccctgagagatcctttccctgctatggacttcctgtttctctttagttgtcgatgtccaagtgagtggtagaggatcagtgtaaatga

SEQ ID NO: 4314 - DNA, 110 bp, synthetic construct
  source 1..110: mol_type = other DNA
tgtttctctttagttgtcgatgtccaagtgagtggtagaggatcagtgtaaatgagagagtcacataaattgtttaatttgagcatgccaagtgatctttgtcaggctct

SEQ ID NO: 4315 - DNA, 110 bp, synthetic construct
  source 1..110: mol_type = other DNA
atgcccaagatttgatctcggaatttctgggtctagagtcctgcctctgaaatgtcaaaggtcagtcagaacctgaaagactgtcaaactggccactaaaccacctgacc

SEQ ID NO: 4316 - DNA, 110 bp, synthetic construct
  source 1..110: mol_type = other DNA
caaaggtcagtcagaacctgaaagactgtcaaactggccactaaaccacctgaccaggctggaagtacccaatcagatgcttaattcagaactataaaccctctgtgtga

SEQ ID NO: 4317 - DNA, 110 bp, synthetic construct
  source 1..110: mol_type = other DNA
ttcccctcatttctgaagcttggatcagtaaggaaatgtgcccacagcacaaggctaggtactggcagagacacggagaaaaacagaattttcttggttctaagaccata

SEQ ID NO: 4318 - DNA, 110 bp, synthetic construct
  source 1..110: mol_type = other DNA
taggtactggcagagacacggagaaaaacagaattttcttggttctaagaccatacccaggccaaggcaatgtgtggaagattgtgcctccaaaagcccagggcaactcc

SEQ ID NO: 4319 - DNA, 110 bp, synthetic construct
  source 1..110: mol_type = other DNA
tgtggtgaggtctttcctgagtttccagttccttcaatgggaagagcccgagggggacatgcagttccaacactgtgggtcatttcttacgaaccccccactctagtcta

SEQ ID NO: 4320 - DNA, 110 bp, synthetic construct
  source 1..110: mol_type = other DNA
gacatgcagttccaacactgtgggtcatttcttacgaaccccccactctagtctagctccctggggactgcagggacctgtggggctccataagtgggattctggttgtg

SEQ ID NO: 4321 - DNA, 110 bp, synthetic construct
  source 1..110: mol_type = other DNA
ggagtcctctccaaaccagggctgcgttttttgaggtggggggtgtccctgggcatgggtctctgagcttgtctcctggcaagcaagatgcagtccctcttttcaagacc

SEQ ID NO: 4322 - DNA, 110 bp, synthetic construct
  source 1..110: mol_type = other DNA
tgggtctctgagcttgtctcctggcaagcaagatgcagtccctcttttcaagacccaaaaggaagatagaattcaagccaaagaaatgttacaggaacaaaggcactagt

SEQ ID NO: 4323 - DNA, 110 bp, synthetic construct
  source 1..110: mol_type = other DNA
ttttactatgttaaggtatgttccttctacaccctggcctgttttctttgtttaccatctcccagcatttagggggtggggaacgaagaggggtttctctgggcagtgta

SEQ ID NO: 4324 - DNA, 110 bp, synthetic construct
  source 1..110: mol_type = other DNA
atctggtacctcaggtgagctcaaggccatcaagggcactgggtcttgaggaactgtactcacaaaatctcttctcacctgctgctcctgaataatgagtctgatttacc

SEQ ID NO: 4325 - DNA, 110 bp, synthetic construct
  source 1..110: mol_type = other DNA
ttggagcaaattcttcatctccgtgatcttcccctgttcatttcttcatgttttccagtttgcagttgttgccacagctacctgaaatatataagcagggttgttggccc

SEQ ID NO: 4326 - DNA, 110 bp, synthetic construct
  source 1..110: mol_type = other DNA
cagtttgcagttgttgccacagctacctgaaatatataagcagggttgttggccccattttcccaattgacaaaacaaagaatagaacttgagtctcacaaaagaaagat

SEQ ID NO: 4327 - DNA, 110 bp, synthetic construct
  source 1..110: mol_type = other DNA
agggacctgtctccagtctattctgggctgtaactttcccagcccaccccattaataacaataatgacctttaccaagcatggcttcatgccgagagctcttagagtgca

SEQ ID NO: 4328 - DNA, 110 bp, synthetic construct
  source 1..110: mol_type = other DNA
taacaataatgacctttaccaagcatggcttcatgccgagagctcttagagtgcagtatctcatttaatactcccatggcccaagggggcagattctcctgtgatggcca

SEQ ID NO: 4329 - DNA, 110 bp, synthetic construct
  source 1..110: mol_type = other DNA
tgctccccaaagtctagagaagaatcggggaggagaagggataacgaaacctgacagtctggcttctctgttgaagtgagcacacctcccagacagagcttgacttttta

SEQ ID NO: 4330 - DNA, 110 bp, synthetic construct
  source 1..110: mol_type = other DNA
agtctggcttctctgttgaagtgagcacacctcccagacagagcttgactttttattttctgtgagaagaggatgaccagatagaagtgagttacaaaagccattcacac

SEQ ID NO: 4331 - DNA, 110 bp, synthetic construct; identical to SEQ ID NO: 4329
  source 1..110: mol_type = other DNA

SEQ ID NO: 4332 - DNA, 110 bp, synthetic construct; identical to SEQ ID NO: 4330
  source 1..110: mol_type = other DNA

SEQ ID NO: 4333 - DNA, 110 bp, synthetic construct
  source 1..110: mol_type = other DNA
ttgagagaagcagacatctgggcccaaccacacacttaacaagagagtagaatgtctggggatgagcagggaagtctgaatttctagcaagctccctgtagaagtctgaa

SEQ ID NO: 4334 - DNA, 110 bp, synthetic construct
  source 1..110: mol_type = other DNA
ggcacttagcgtggagggtcaggccagtgctagtgtcaggagagccatgatgtttgcctggtttgacatgtccagagtacgctggggaagccgtgatgacagttgtgtcc

SEQ ID NO: 4335 - DNA, 110 bp, synthetic construct
  source 1..110: mol_type = other DNA
caagtgccttgagagtgcattcccaactcatcccagagcctgaaatttctccagtcttatcaccgtcctcatataatgccctttcatcccttatgcccgtccctgccatt

SEQ ID NO: 4336 - DNA, 110 bp, synthetic construct
  source 1..110: mol_type = other DNA
atgcaaccaaattagtaaaagatgcctggaaatgatactaatctagttcagggaagtggtgaggaattagcttaggaacagcatcatggacggactcacataggttcaca

SEQ ID NO: 4337 - DNA, 110 bp, synthetic construct
  source 1..110: mol_type = other DNA
aagctccaaagaatgggccttcctggggagcatgagtaagaatcattacgttgaatgcaggatgcacctgtgcagggcaaggtacatgttacccacgaggaagccaaggt

SEQ ID NO: 4338 - DNA, 110 bp, synthetic construct
  source 1..110: mol_type = other DNA
tgcaggatgcacctgtgcagggcaaggtacatgttacccacgaggaagccaaggtgcagaaagagtcagaactcaccaggccaggttttcacagctgtgactgggagagc

SEQ ID NO: 4339 - DNA, 110 bp, synthetic construct
  source 1..110: mol_type = other DNA
aaacaacccttccttctctacatgacctcctgagtggcaggattcaggccttttccctgattttggggatgggggagtgattctcaggtagactgagaagaagggtagca

SEQ ID NO: 4340 - DNA, 110 bp, synthetic construct
  source 1..110: mol_type = other DNA
cacataaatttctgatacaagatcttggggatcaaaatggaaggtgatgaggggcccgggtgctgtgggctccacagtgatacctggggaaggatacagctggtgggtgc

SEQ ID NO: 4341 - DNA, 110 bp, synthetic construct
  source 1..110: mol_type = other DNA
cccaggcatacagacacagaatattctgaattccatttactgcttgtcagcaactgggtccagagcagagcagactgctcgctcagcctgcaattcacaggtttcctgtc

SEQ ID NO: 4342 - DNA, 110 bp, synthetic construct
  source 1..110: mol_type = other DNA
ttaaaaaaagagagatctacagccagtgtcattatgagcagctcaatgaagacatcggctctgtgcccagtggtgggcagagctaagacccaggaccatgtgcagggggt

SEQ ID NO: 4343 - DNA, 110 bp, synthetic construct
  source 1..110: mol_type = other DNA
tgctgccacatgtttaatctgcatgcgtttggtgccactttatgtgcccttcccgacttggcactacagcaaggtcctagctattgggaatgtagctgtcatgacaacca

SEQ ID NO: 4344 - DNA, 110 bp, synthetic construct
  source 1..110: mol_type = other DNA
ccagtaggagctctcacactcacttgtagctgcatgtctgttctccgttacttttacccagtgtccagtttctgccatcagggcaaccgagaaaaactctctcctttttc

SEQ ID NO: 4345 - DNA, 110 bp, synthetic construct
  source 1..110: mol_type = other DNA
tcacaaataatcatctcttggctgtgccctcaggtgggaggctgggatagtcacagaagcagagctgataccatgggttcacatggccttgttgccattgtgaattttcc

SEQ ID NO: 4346 - DNA, 110 bp, synthetic construct
  source 1..110: mol_type = other DNA
gaagcagagctgataccatgggttcacatggccttgttgccattgtgaattttccatccccaggcctggccagagctacaggaatctggtatcagctgccagagcctccc

SEQ ID NO: 4347 - DNA, 110 bp, synthetic construct
  source 1..110: mol_type = other DNA
ccatccagaggtgctcacaaaaagcgctagaacctccacagttatttgcttgcgtatagtttggttgacctctagctcatccacccctatcttcaaattcttagctttcc

SEQ ID NO: 4348 - DNA, 110 bp, synthetic construct
  source 1..110: mol_type = other DNA
aagctttaataattgcagctgattaaaatagctaatttaaacccatttgtttagcacaccttatgcatacatagacctcctgaatgactatactattcactttggaattg

SEQ ID NO: 4349 - DNA, 110 bp, synthetic construct
  source 1..110: mol_type = other DNA
tctccccatcgtgggctgctttgtcatttagctgggctggtgggccttcatgacgaagatggacccccagcccttgaatctgtcctcccccatgtctactccaatctcta

SEQ ID NO: 4350 - DNA, 110 bp, synthetic construct
  source 1..110: mol_type = other DNA
agtaaagctgtttgggatagctactgattcagaaacaatctaacataaaactacacatttgaaatgtccttcagagttttgtttttgttttttttttcctgatagtcatg

SEQ ID NO: 4351 - DNA, 110 bp, synthetic construct
  source 1..110: mol_type = other DNA
gcccttttgcattttggcagcaaatactcatgtttatgtctctgccttgctgagcagcttgacttaagtttcatctcctctctctttttaaacagctttattgaggttta

SEQ ID NO: 4352 - DNA, 110 bp, synthetic construct
  source 1..110: mol_type = other DNA
tgttcttccaccatgccatctcttcacctcttcctctctatgctcagctcttgaacactcttgtcaaggcaatacatttacttattccttatatcttacctaaactaggg

SEQ ID NO: 4353 - DNA, 110 bp, synthetic construct
  source 1..110: mol_type = other DNA
aggacttcgctcttggggaatgatggaaatgaccaagcatacgtaatcagctaggatgctgagggctctaaggcataagattaacgattttctacaaggtttcggcaagg

SEQ ID NO: 4354 - DNA, 110 bp, synthetic construct
  source 1..110: mol_type = other DNA
atgctgagggctctaaggcataagattaacgattttctacaaggtttcggcaaggaatactaacgtggtcttctgtgccatcacactaacaaacaatacacagagctata

SEQ ID NO: 4355 - DNA, 110 bp, synthetic construct
  source 1..110: mol_type = other DNA
ctcttctgctgacgatgctgccaactctaggagggctaggttgagaccttggtttccatagtgatagagctctatttgccaggaatcctatagtagagatgcagggtggt

SEQ ID NO: 4356 - DNA, 110 bp, synthetic construct
  source 1..110: mol_type = other DNA
tctagttatcccttctgcctatttatcatgttttcaaagttaccttgtataagcgggaaacaaggggccagagataagctatgggtacatcacctcatgactgatgttta

SEQ ID NO: 4357 - DNA, 110 bp, synthetic construct
  source 1..110: mol_type = other DNA
ggagctcaaactggggaatgagttctgggggctaggatcttaggcaagctagaaggtcagagctggtggatattttgaagactatgaagataaagagtacccaacagtcc

SEQ ID NO: 4358 - DNA, 110 bp, synthetic construct
  source 1..110: mol_type = other DNA
gtcagagctggtggatattttgaagactatgaagataaagagtacccaacagtcctaggtaatacagtgaaaacctaaatgtagaccaaagaaccaacccccaaaagggg

SEQ ID NO: 4359 - DNA, 110 bp, synthetic construct
  source 1..110: mol_type = other DNA
cagtttcctcatgagtagggttgcaaagattaaaaaaataataacatgcaaaacacctaaaatcacgtctaggacacgaaaaattctcaagaaatcactcattaatatga

SEQ ID NO: 4360 - DNA, 110 bp, synthetic construct
  source 1..110: mol_type = other DNA
cctaaaatcacgtctaggacacgaaaaattctcaagaaatcactcattaatatgactacactcttcattttccctgtaggaatttctatcgccaccattaaagagtggag

SEQ ID NO: 4361 - DNA, 110 bp, synthetic construct; identical to SEQ ID NO: 4359
  source 1..110: mol_type = other DNA

SEQ ID NO: 4362 - DNA, 110 bp, synthetic construct; identical to SEQ ID NO: 4360
  source 1..110: mol_type = other DNA

SEQ ID NO: 4363 - DNA, 110 bp, synthetic construct
  source 1..110: mol_type = other DNA
acacacacacacccacacccacacccacacccccataggctctggggccccatcacctgcatccaaaacttgactctaccatttactggctgcatggtttcaatcaagga

SEQ ID NO: 4364 - DNA, 110 bp, synthetic construct
  source 1..110: mol_type = other DNA
attcttgagcaaaagtacatagaaaattcacatgtttcctgagaaagtgtaactgccaaatgaacttttcagtctcatcctacgatccattaatctgaaactggaccaac

SEQ ID NO: 4365 - DNA, 110 bp, synthetic construct
  source 1..110: mol_type = other DNA
ccaaatgaacttttcagtctcatcctacgatccattaatctgaaactggaccaactgttaaacttttaaaacccatactgtcttaattcatatataccatcttttcctag

SEQ ID NO: 4366 - DNA, 110 bp, synthetic construct
  source 1..110: mol_type = other DNA
gcatcagcttcactatctggcaggggtcctggcttccttgacaactgagccttcatctccctttagactgaagccacttcccgcaaagagaaaataaggggccttttctt

SEQ ID NO: 4367 - DNA, 110 bp, synthetic construct
  source 1..110: mol_type = other DNA
tctccctttagactgaagccacttcccgcaaagagaaaataaggggccttttctttttaaatttttagcttaggccattaccaggggcttctgagtttctaagaagtctt

SEQ ID NO: 4368 - DNA, 110 bp, synthetic construct
  source 1..110: mol_type = other DNA
ctataatcactgacttaatttccacagagcatccctggacaggatctctctcctgaccttctggaaagagctaaataaggccatttagaatgatgccatccttctgactg

SEQ ID NO: 4369 - DNA, 110 bp, synthetic construct
  source 1..110: mol_type = other DNA
accttctggaaagagctaaataaggccatttagaatgatgccatccttctgactgtataaaactcttctacccatccattaaatatgtggttcatgggccgaaataaagt

SEQ ID NO: 4370 - DNA, 110 bp, synthetic construct
  source 1..110: mol_type = other DNA
tttgatattcattaaaagtcagagctgaagtcacattagagtgaagccctgaacatacccataaaggaaggaagaggcacagcacagcccaaagatgaagtgagccctgt

SEQ ID NO: 4371 - DNA, 110 bp, synthetic construct
  source 1..110: mol_type = other DNA
tcaggtagcggcagaagaaaacagtgcaggtaatcatggctactaatcagcttcggaacaatcaagtgtgggctggatctcacttgctgctccaaacaacctgggcgcaa

SEQ ID NO: 4372 - DNA, 110 bp, synthetic construct
  source 1..110: mol_type = other DNA
caacttttttcaaatgacaggaaactactttaagtagtttgcttagattggtctaaggagctctgtgcagggcctgatggcacgcaggaatgctgatttcaagtctggct

SEQ ID NO: 4373 - DNA, 110 bp, synthetic construct
  source 1..110: mol_type = other DNA
aggagctctgtgcagggcctgatggcacgcaggaatgctgatttcaagtctggctggctgatactacactcctctcagaaaaagatcatggccctcatctgcagcaattc

SEQ ID NO: 4374 - DNA, 110 bp, synthetic construct
  source 1..110: mol_type = other DNA
ggtcattgtgagacagagatcaaaagacatcactgccccatgtgcaagggtatgaccacacaacccaaaggagcacagttcacatggacaccaaggtaaatggacttgta

SEQ ID NO: 4375 - DNA, 110 bp, synthetic construct
  source 1..110: mol_type = other DNA
ccacacaacccaaaggagcacagttcacatggacaccaaggtaaatggacttgtacagctcagaggtcctgcacagagtgggtagataaagagtgacttacaaagatggg

SEQ ID NO: 4376 - DNA, 110 bp, synthetic construct; identical to SEQ ID NO: 4374
  source 1..110: mol_type = other DNA

SEQ ID NO: 4377 - DNA, 110 bp, synthetic construct; identical to SEQ ID NO: 4375
  source 1..110: mol_type = other DNA

SEQ ID NO: 4378 - DNA, 110 bp, synthetic construct
  source 1..110: mol_type = other DNA
gtagctgagtcaccctattgctcatggtctcagggaatccattagctttggtttagtctccactcatctatcagctgctatgatcagataaagtggaatggtatgatggt

SEQ ID NO: 4379 - DNA, 110 bp, synthetic construct
  source 1..110: mol_type = other DNA
tattttcaagaaagcaaaagtaacttccttgtgtcattttgagatggtagtagctattttttagacatcatgacattacctcatcctcattcccctcattccatatgtca

SEQ ID NO: 4380 - DNA, 110 bp, synthetic construct
  source 1..110: mol_type = other DNA
attttttagacatcatgacattacctcatcctcattcccctcattccatatgtcaggcaggtgcttacccataaccaatgatgaacaactagcagaaaagtggcagaaat

SEQ ID NO: 4381 - DNA, 110 bp, synthetic construct
  source 1..110: mol_type = other DNA
ttttcttgatttgtttatgggaaatggtactgacatagaattccacccatcctgattggctagtacaggcaaattccatagaggaggccaaatcctaacatgggggggag

SEQ ID NO: 4382 - DNA, 110 bp, synthetic construct
  source 1..110: mol_type = other DNA
ttggctagtacaggcaaattccatagaggaggccaaatcctaacatgggggggaggggagaaaggatgccaagactaggatgaaatatctatgaacatagcggagtaaag

SEQ ID NO: 4383 - DNA, 110 bp, synthetic construct
  source 1..110: mol_type = other DNA
gaaacctctgctcacactttgccatgatgagctggaggtccagctgctgccaatacaaatcctgcaaccccctcattccagagcatgcatggcaattcagggatccatct

SEQ ID NO: 4384 - DNA, 110 bp, synthetic construct
  source 1..110: mol_type = other DNA
ttctcctcgctgcatcctgtgctgggcccatgtacgtgtgttttagcacctgtatgatgttcagtgataaatgcccctttagcttttatttaaaccagaggagtgggtcc

SEQ ID NO: 4385 - DNA, 110 bp, synthetic construct
  source 1..110: mol_type = other DNA
ccctcccactgctccatgtgggtgatagcctagccctccctccatcacctcctttctcagcttcttccctgactcagaatgatctacccacttttcatccaaattctacc

SEQ ID NO: 4386 - DNA, 110 bp, synthetic construct
  source 1..110: mol_type = other DNA
tcccacaacgtgtcaggtctgtaaatgaacacagggtctcgagagaatcaacattcaacacaaggcattgcaaggcccaggagcacccctttcttcccctgactatgaaa

SEQ ID NO: 4387 - DNA, 110 bp, synthetic construct
  source 1..110: mol_type = other DNA
cataaaactaaatgtagagataagttacactaaaaacaaaaaccgcaataaacgccagaatatgccaaatgcaaagcaagatctccagatgctagtgctaaggagtccca

SEQ ID NO: 4388 - DNA, 110 bp, synthetic construct
  source 1..110: mol_type = other DNA
tttagtgacaacatttttatctttagcatgcattcttgattaattttagaattcaagctactctctctggtagatatctctcttctcaaatcagaatcttagaaagttct

SEQ ID NO: 4389 - DNA, 110 bp, synthetic construct
  source 1..110: mol_type = other DNA
gcacacccatcacacaaacacttagggcaaattaaggagggaaagaaaagaagatcgccaagaagctataagacattcatccagtcaggactagcttctatgtcccaacc

SEQ ID NO: 4390 - DNA, 110 bp, synthetic construct
  source 1..110: mol_type = other DNA
acaaggtaactgcatgtgagctggtattttgctagcatgcatgaaaccattcccttaaacaaaatgaagctgttttaacatatattatgccaactgctatatggaaaact

SEQ ID NO: 4391 - DNA, 110 bp, synthetic construct
  source 1..110: mol_type = other DNA
taaacaaaatgaagctgttttaacatatattatgccaactgctatatggaaaactgaacatgggatcagtgggaaacagatgaacgggtgggttccttgtaatgctagtg

SEQ ID NO: 4392 - DNA, 110 bp, synthetic construct; identical to SEQ ID NO: 4390
  source 1..110: mol_type = other DNA

SEQ ID NO: 4393 - DNA, 110 bp, synthetic construct; identical to SEQ ID NO: 4391
  source 1..110: mol_type = other DNA

SEQ ID NO: 4394 - DNA, 110 bp, synthetic construct
  source 1..110: mol_type = other DNA
ctatccccacctgcagggatttgtgcccttgtaatcagctcccttaaatgtaggttgagcttactgactgacttctaataaagtatcgcagaagtgatgaaatgtcacat

SEQ ID NO: 4395 - DNA, 110 bp, synthetic construct
  source 1..110: mol_type = other DNA
tgagcttactgactgacttctaataaagtatcgcagaagtgatgaaatgtcacatctaacatcagatttaaaaagacgtttctggagtttccgtcatggtgcatcggaaa

SEQ ID NO: 4396 - DNA, 110 bp, synthetic construct
  source 1..110: mol_type = other DNA
ctatcgcaaaaggcagaatttttatttttcaaaaggagccaaaagtgaggcccatcttatacttttctcaggatccgagacactcaaacagtgctttagacatgatgagc

SEQ ID NO: 4397 - DNA, 110 bp, synthetic construct
  source 1..110: mol_type = other DNA
tctacagggtgtttttagcctctctctgccccagccccttctcatcacagcagagcaaacacaagctgaatgttccataaaacgccagcaataaaatgaaagaaccggag

SEQ ID NO: 4398 - DNA, 110 bp, synthetic construct
  source 1..110: mol_type = other DNA
cacagcagagcaaacacaagctgaatgttccataaaacgccagcaataaaatgaaagaaccggagttcctgtcgtggcgcagcagaaacgaatctgtctaggaaccatga

SEQ ID NO: 4399 - DNA, 110 bp, synthetic construct
  source 1..110: mol_type = other DNA
gccaaacggcccttaaggaccagaacggatatatacaaaagggccccggccgcaaggaaagagtacttgagacgagcaccacagacacgactcctgcacagggcagaaca

SEQ ID NO: 4400 - DNA, 110 bp, synthetic construct
  source 1..110: mol_type = other DNA
acagcctgcttcctgtagtctgatgacccaatttcacactctcctcctaagctagaaactgatgcacccaaatgtctgttgtacagcctccgttggcttgatatggataa

SEQ ID NO: 4401 - DNA, 110 bp, synthetic construct
  source 1..110: mol_type = other DNA
tgcaaatccaggtgtatcccactcctgtggactgctccttgtgtcctaagcttagcacagacaccttaaaaatggagaaagccgccctcgtcatttttgctgagctcctg

SEQ ID NO: 4402 - DNA, 110 bp, synthetic construct
  source 1..110: mol_type = other DNA
cacagacaccttaaaaatggagaaagccgccctcgtcatttttgctgagctcctgcagtactgagtgtgttcatctctgagaatctgaggtgcctacgtacagctgcctc

SEQ ID NO: 4403 - DNA, 110 bp, synthetic construct
  source 1..110: mol_type = other DNA
tttcctgatgacttaggtaaatacattaatgttcaatgatgttttttgcagaggttggcacacagcaaactctctaagctagaagcggaggtacagttttggtgttaaca

SEQ ID NO: 4404 - DNA, 110 bp, synthetic construct; identical to SEQ ID NO: 4403
  source 1..110: mol_type = other DNA

SEQ ID NO: 4405 - DNA, 110 bp, synthetic construct
  source 1..110: mol_type = other DNA
ttggcatatatatgtaataggtttttatgggggaacttactgtggaaaagtgtttctttgcggctttgttagagaagctgtcttttgtgcaaatgtttccacttataagc

SEQ ID NO: 4406 - DNA, 110 bp, synthetic construct
  source 1..110: mol_type = other DNA
ctttgcggctttgttagagaagctgtcttttgtgcaaatgtttccacttataagcatcatggaataaaaattgcttcctgatgaaaatgtttagagtttgtgtgtgtgag

SEQ ID NO: 4407 - DNA, 110 bp, synthetic construct; identical to SEQ ID NO: 4405
  source 1..110: mol_type = other DNA

SEQ ID NO: 4408 - DNA, 110 bp, synthetic construct; identical to SEQ ID NO: 4406
  source 1..110: mol_type = other DNA

SEQ ID NO: 4409 - DNA, 110 bp, synthetic construct
  source 1..110: mol_type = other DNA
cctagacatgttgtacagatacattcctgctcccaacgccaagagttgatttactatcttagatgattgcttgtttttttaagcttctaggtatactatttgcagtctaa

SEQ ID NO: 4410 - DNA, 110 bp, synthetic construct
  source 1..110: mol_type = other DNA
cctgctcccaacgccaagagttgatttactatcttagatgattgcttgtttttttaagcttctaggtatactatttgcagtctaaaaaattcacaaaagtatttttgctt

SEQ ID NO: 4411 - DNA, 110 bp, synthetic construct
  source 1..110: mol_type = other DNA
gtggacaccccctgactggtctacctaagtaagaggctcttcttccaaatcaacccctctcattattctctttatttaatgagtagcttgccttggcatgaaatgacctt

SEQ ID NO: 4412 - DNA, 110 bp, synthetic construct
  source 1..110: mol_type = other DNA
cctctcattattctctttatttaatgagtagcttgccttggcatgaaatgaccttttatttatttgtttatattttcccttccttcttattttttacctccctttctaga

SEQ ID NO: 4413 - DNA, 110 bp, synthetic construct
  source 1..110: mol_type = other DNA
tcactttcaatatattgtgccactccattttgacctccagtgtttctgcggaaaaattagctgacaaacttattgggattcacgtctatgttatttgttgcttttcccta

SEQ ID NO: 4414 - DNA, 110 bp, synthetic construct
  source 1..110: mol_type = other DNA
tgtgccactccattttgacctccagtgtttctgcggaaaaattagctgacaaacttattgggattcacgtctatgttatttgttgcttttccctagctgcttttgatatt

SEQ ID NO: 4415 - DNA, 110 bp, synthetic construct
  source 1..110: mol_type = other DNA
ccagctgccgaggctgctgccgccggggcttctcctgcttcccctcaagcccttgaagccagcggcaggctgaggatcactctgtcttactttgggtacctggggtcgtg

SEQ ID NO: 4416 - DNA, 110 bp, synthetic construct
  source 1..110: mol_type = other DNA
aagccagcggcaggctgaggatcactctgtcttactttgggtacctggggtcgtgtcccaggcgtctggcacatgccctctccctcaccatactggtcaagaaaggtaac

SEQ ID NO: 4417 - DNA, 110 bp, synthetic construct
  source 1..110: mol_type = other DNA
tctggggatatggaggcaatgggcagggctagtagctggggcctatttgctgggcccttgagagtatcaaggacccatgggaagtagcacaggctgctcttggttgtaat

SEQ ID NO: 4418 - DNA, 110 bp, synthetic construct
  source 1..110: mol_type = other DNA
ccttgagagtatcaaggacccatgggaagtagcacaggctgctcttggttgtaatgtcctgggaagtagcagtgaccttcaggcacatgtaggcagtgcccagagcattt

SEQ ID NO: 4419 - DNA, 110 bp, synthetic construct
  source 1..110: mol_type = other DNA
ttttaggtatcctgagggattcagtttgaacattcaatttaaatatagcgataaaagtaaagatagactaatttgcttgaatgagagactggagttgattcagtgttgtt

SEQ ID NO: 4420 - DNA, 110 bp, synthetic construct
  source 1..110: mol_type = other DNA
agtaaagatagactaatttgcttgaatgagagactggagttgattcagtgttgttgctacttgagacaaaagaaatttgtgtgaggtggttgaagacaaatgcatttaca

SEQ ID NO: 4421 - DNA, 110 bp, synthetic construct
  source 1..110: mol_type = other DNA
taatgtcagtgtctcttactttatcagatggaacttttaaagctggtaagggtaatcaaactggttgtctactttatattcctgattctctttaaaccttccttctcctt

SEQ ID NO: 4422 - DNA, 110 bp, synthetic construct; identical to SEQ ID NO: 4421
  source 1..110: mol_type = other DNA

SEQ ID NO: 4423 - DNA, 110 bp, synthetic construct
  source 1..110: mol_type = other DNA
taggtggagatttgaggagagtggtatgcatggagtgagtatggaagctgcatactcttcccacatacattgccctatgtttccacttggctgctccagagttacagcct

SEQ ID NO: 4424 - DNA, 110 bp, synthetic construct
  source 1..110: mol_type = other DNA
ctgggcagatgataagacctggcagaagtcaactctgtttcccacatgagatgaacaatctggggctttatggaagctatgcggagagccagaggagatttaggacagca

SEQ ID NO: 4425 - DNA, 110 bp, synthetic construct
  source 1..110: mol_type = other DNA
caatctggggctttatggaagctatgcggagagccagaggagatttaggacagcagtagtctgaggcagttagccatgggctgtgtgctcagagaaatggaggccatttc

SEQ ID NO: 4426 - DNA, 110 bp, synthetic construct
  source 1..110: mol_type = other DNA
tgcagaataggcagagccctaagaggggagccaggacttgtgggaggggttggaacccatggcaaagagctccaggctatgaccctgagcctggctgctgctctgtcctc

SEQ ID NO: 4427 - DNA, 110 bp, synthetic construct
  source 1..110: mol_type = other DNA
taaggggtgccacctggaagacaggaaacagtgggccctaagcacctccccccgcccaaggcagaatgcagtgtcccttgccctggggctctaaggctgagagtctgggg

SEQ ID NO: 4428 - DNA, 110 bp, synthetic construct
  source 1..110: mol_type = other DNA
aatcaagacaccttgtgtttgaaccccagatctgccacatatcacttatgcaatacagggccatatacaagtttcaatagctttgtggctggggctggccatctgtaagg

SEQ ID NO: 4429 - DNA, 110 bp, synthetic construct
  source 1..110: mol_type = other DNA
ctatgtgatgaaagttcagagtaggtattttctttcatctttttttccagccttttaaaccactggtcaccaaagtgtaaaactatacgtgctccctgagaatggcaagc

SEQ ID NO: 4430 - DNA, 110 bp, synthetic construct
  source 1..110: mol_type = other DNA
tccagccttttaaaccactggtcaccaaagtgtaaaactatacgtgctccctgagaatggcaagctgaaaatattagaacttctaaagtaaataaatacacataaattta

SEQ ID NO: 4431 - DNA, 110 bp, synthetic construct; identical to SEQ ID NO: 4429
  source 1..110: mol_type = other DNA

SEQ ID NO: 4432 - DNA, 110 bp, synthetic construct; identical to SEQ ID NO: 4430
  source 1..110: mol_type = other DNA

SEQ ID NO: 4433 - DNA, 110 bp, synthetic construct
  source 1..110: mol_type = other DNA
tgggaagagtttttcaatgatgtctatacctctacaaaggaaggctggccctcagattattcccagttgaacttttaggtttgtggtaactcatcttccatagggatggc

SEQ ID NO: 4434 - DNA, 110 bp, synthetic construct
  source 1..110: mol_type = other DNA
taaactagaaaatcatttagacacagatgtccttcaaagactcctggaaaaggataatgtcagagaaaccccggtgagaatgcgaatggctacttcctccacagacttgg

SEQ ID NO: 4435 - DNA, 110 bp, synthetic construct
  source 1..110: mol_type = other DNA
ataccacaggctgaaggatggccttcccaggaagctgagtttgagacagagatctgcctgcaggaggctgattagggagtgcttgtggaattgctacttgtgaaaaagga

SEQ ID NO: 4436 - DNA, 110 bp, synthetic construct
  source 1..110: mol_type = other DNA
ggggcaaaactctctggtcacttctgcagagtcaagtgttgctgttgcctatggatagtcaggccattgttatggtgttttggagcttttagatgaaaactcatgatttg

SEQ ID NO: 4437 - DNA, 110 bp, synthetic construct
  source 1..110: mol_type = other DNA
ttccctgtgactggaacacacttctctgccacactgactttggggttgcccaaatagcttgctaggccagtaaaatgtttataatggattaagaaaacgtggtgcatatg

SEQ ID NO: 4438 - DNA, 110 bp, synthetic construct
  source 1..110: mol_type = other DNA
tgatcagtgacctttaagtgaattcttccggagtactgaagatggaatccttgattatctagtaattaacttactgtgggctgctctcaaatatcaagaggcgctgtgcc

SEQ ID NO: 4439 - DNA, 110 bp, synthetic construct
  source 1..110: mol_type = other DNA
cgcctaagcctccgcggcggagggctctttgtgaggaatatgtgagtaagcagaaaccactcattgtaatgtgacaagggaggacatttgtgagggcacaggagacttct

SEQ ID NO: 4440 - DNA, 110 bp, synthetic construct
  source 1..110: mol_type = other DNA
gggagaattcggcaaaaccagagcccctgttttgccctttggttaggaaaaagaagtttctagatcatcttgtcatttagtgaactctgataaacatctattatatttga

SEQ ID NO: 4441 - DNA, 110 bp, synthetic construct
  source 1..110: mol_type = other DNA
aaccagagcccctgttttgccctttggttaggaaaaagaagtttctagatcatcttgtcatttagtgaactctgataaacatctattatatttgaatgagaaaatttttg

SEQ ID NO: 4442 - DNA, 110 bp, synthetic construct
  source 1..110: mol_type = other DNA
aatagaatatttgtctacctgaaagacattctaggatgctctgacctctcaaaatccctggcaggtttattattctaagaattttatcttcctttccattttaatactgt

SEQ ID NO: 4443 - DNA, 110 bp, synthetic construct
  source 1..110: mol_type = other DNA
cacctgcaggcagtacctggtttccagacccttggctatagtggtgacccatggggaggttgcagggccctcagcattggcagcaacttccagggaagtggagaaagttc

SEQ ID NO: 4444 - DNA, 110 bp, synthetic construct
  source 1..110: mol_type = other DNA
gaggttgcagggccctcagcattggcagcaacttccagggaagtggagaaagttcccagtcacagggaccttggtagcagcaatgggtgtgcacatttccagctaggtgg

SEQ ID NO: 4445 - DNA, 110 bp, synthetic construct
  source 1..110: mol_type = other DNA
gaaccaaggtcgggattactatcttgcattctgtgaacactcagaagcatgttggctcaatgacataaagttactaatatttgacaagttttaaagtataaaaaatatag

SEQ ID NO: 4446 - DNA, 110 bp, synthetic construct
  source 1..110: mol_type = other DNA
gttggagacaactgggtaatatttatcaagcgctcatagtttttattatggtgattcactttcttagaaaaattttaagtgtttaaaatggaaacaagtaaggtgttcag

SEQ ID NO: 4447 - DNA, 110 bp, synthetic construct
  source 1..110: mol_type = other DNA
cttgagtgagacatatctgtgacttgaatgcattggtactcattcaaaagaactcacaaaaatacctaagttaaattatgaggatctgagaattttaaccatttaaaaag

SEQ ID NO: 4448 - DNA, 110 bp, synthetic construct; identical to SEQ ID NO: 4447
  source 1..110: mol_type = other DNA

SEQ ID NO: 4449 - DNA, 110 bp, synthetic construct
  source 1..110: mol_type = other DNA
atactagaaggcacgatccccaattcagaggctctttaaaaagcagatatgtctgctcaggagtgaggtccaaggaaaaggacagagttagctttcatttagcaactaca

SEQ ID NO: 4450 - DNA, 110 bp, synthetic construct
  source 1..110: mol_type = other DNA
gccaggagaggggtagagaaacccctaccactgtctgattttgatagtaccattcgttagagaaaagctccagtttgtatcacaacccagtagttggcctttgcacatta

SEQ ID NO: 4451 - DNA, 110 bp, synthetic construct
  source 1..110: mol_type = other DNA
gttagagaaaagctccagtttgtatcacaacccagtagttggcctttgcacattacaaagtaaagacaatttacaaaaccaaacaacatgcagagatgaatgcaatgtca

SEQ ID NO: 4452 - DNA, 110 bp, synthetic construct
  source 1..110: mol_type = other DNA
ctcaatacactcttaactgtcaattgatgcataattgacatacactagcttataaagccaaataaacacttccagtggaactaagaaatattaaaaattctctcttcatt

SEQ ID NO: 4453 - DNA, 110 bp, synthetic construct
  source 1..110: mol_type = other DNA
tttcttatacctctaaacttccacatttttatcaagctgatctttaccctaatacagatctcattttaatgtttacctctaattaaccctatagcatcaacagaactggc

SEQ ID NO: 4454 - DNA, 110 bp, synthetic construct; identical to SEQ ID NO: 4453
  source 1..110: mol_type = other DNA

SEQ ID NO: 4455 - DNA, 110 bp, synthetic construct
  source 1..110: mol_type = other DNA
gaaaacagaatatttcttggctttccagactcaggattctttatttttaaaagaaagaggagagaaagggattggggggtcttgctcacttcttttcaaattttttaaaa

SEQ ID NO: 4456 - DNA, 110 bp, synthetic construct
  source 1..110: mol_type = other DNA
gcctttttctttctatggtatgtcacgggtcttcctctcttaggtgactaaaaaaggctataagtacaccatgtacagctttctgtgggtagtgaaatgagagcacttag

SEQ ID NO: 4457 - DNA, 110 bp, synthetic construct
  source 1..110: mol_type = other DNA
gtatatggaaataatataaatatttttaaaatgatcaaagtagaagtagagccagaggacttcctaagcaagactgaaaaggaacagacaaccaggattgagtagaaaca

SEQ ID NO: 4458 - DNA, 110 bp, synthetic construct
  source 1..110: mol_type = other DNA
ggctatcaaggaagaagggattcttgagaaaacttttgctttgaattgtttcccattccaacaagcatctttttttaaagatacaaaaatatcttcaaagtcacataacc

SEQ ID NO: 4459 - DNA, 110 bp, synthetic construct
  source 1..110: mol_type = other DNA
gaaggatttgggggaaacaattaagtgtaaacagcctgccaaatctggtaagttgactccaagaaaggctaacagaactgaactggtaaataagaactgtccatctgtct

SEQ ID NO: 4460 - DNA, 110 bp, synthetic construct
  source 1..110: mol_type = other DNA
actccaagaaaggctaacagaactgaactggtaaataagaactgtccatctgtctgtgccacccagccagatcaaaagaagagcctgacctgattcccattgcacctctg

SEQ ID NO: 4461 - DNA, 110 bp, synthetic construct
  source 1..110: mol_type = other DNA
atttgctttcaacccttcactacatcaaggttcctgttcccagaggcatgaaaactaccctcatataccagatttcagcatttctctaagatggcctcacacttatgaga

SEQ ID NO: 4462 - DNA, 110 bp, synthetic construct
  source 1..110: mol_type = other DNA
taccctcatataccagatttcagcatttctctaagatggcctcacacttatgagacgaccagacaattttgttattttggtgcctgagccaaaattttatcttgttacag

SEQ ID NO: 4463 - DNA, 110 bp, synthetic construct
  source 1..110: mol_type = other DNA
catatactggtatggccttttcaaaaaatcccattagacccataacataggcatagaagcctctctctctatggtgtcctctttgcattccttacactggagaagtaaaa

SEQ ID NO: 4464 - DNA, 110 bp, synthetic construct
  source 1..110: mol_type = other DNA
gcagacttgactataaaagggtagtgaattttggagctaagatttgacaaacggtttataactattaagtgagaatgaaaatggacaatatcatctcagatgactcctga

SEQ ID NO: 4465 - DNA, 110 bp, synthetic construct
  source 1..110: mol_type = other DNA
ttataactattaagtgagaatgaaaatggacaatatcatctcagatgactcctgagtatctttggtagagtggtagtgccactccctaagatagggaccatggaaggagg

SEQ ID NO: 4466 - DNA, 110 bp, synthetic construct
  source 1..110: mol_type = other DNA
atatactatacctctactcagatcaaggaagatcactttaaattacagaaaacaggagtttccgccatggttcagtggaaacgaatcttgactagtaaccataaggatgc

SEQ ID NO: 4467 - DNA, 110 bp, synthetic construct
  source 1..110: mol_type = other DNA
ctttaaattacagaaaacaggagtttccgccatggttcagtggaaacgaatcttgactagtaaccataaggatgcaggtttgatcgctggcttcactcagtaggttaagg

SEQ ID NO: 4468 - DNA, 110 bp, synthetic construct
  source 1..110: mol_type = other DNA
tactcttgtgttttaatttttaggtcaagctctttcagttactttgttttatagtatgtgcaccactaaggatatgtaacgtgattatgttacatttttataaataggcc

SEQ ID NO: 4469 - DNA, 110 bp, synthetic construct
  source 1..110: mol_type = other DNA
acctcaaggtcgtgctacctatattttggtatatcatagtcacccatgaaatcattccttgattctacctccagtataacttttctccagaagagggttcaggctgctgt

SEQ ID NO: 4470 - DNA, 110 bp, synthetic construct
  source 1..110: mol_type = other DNA
tttcctacagtctttaacactgccgtcttattttctgtcccaagtcagtatttgctatcaaagtgggatttttttcccttaatttgtaaattttcatataaccattttat

SEQ ID NO: 4471 - DNA, 110 bp, synthetic construct
  source 1..110: mol_type = other DNA
accccatctacacagtcaagctgatacctggccttctgaaaagattcattaaacatttgttttaaaaagcagatactgaagcatgcgagaatggggcatgcttccagttt

SEQ ID NO: 4472 - DNA, 110 bp, synthetic construct
  source 1..110: mol_type = other DNA
caagccttgttgttgcccagtcttgagaccaaagaaagagcccagtgacagagacatcaatagtttacagggtcttaaacaaagggtcctggagtaatgccccattgaga

SEQ ID NO: 4473 - DNA, 110 bp, synthetic construct
  source 1..110: mol_type = other DNA
agtccatcagtttctgctttctctgcctagaagtagatataccctaaattttcataggcaatatattctatattttaaattttattctgcaagttctgtagctgaacttg

SEQ ID NO: 4474 - DNA, 110 bp, synthetic construct
  source 1..110: mol_type = other DNA
aaaaataatcacagctttaaaaacatcggcccctataagaactacagtgacttcattgtgcaggttatttgacactcgagcactaaaggatagagtgatatttagtactt

SEQ ID NO: 4475 - DNA, 110 bp, synthetic construct
  source 1..110: mol_type = other DNA
aaaagaaaaaagacattgggggtaatcagccttccagggaagcatttaaagccccaaacaaaatcgatgatcattcaaagaacttctttgtctggggtcttcttctgagg

SEQ ID NO: 4476 - DNA, 110 bp, synthetic construct
  source 1..110: mol_type = other DNA
tacctttggagctttcagtttgagcatgtgcaatatttaaggaaatttctcacagaattttgataatcaagggatatctgaaggaaaaagccaatgtcctggaatgtcag

SEQ ID NO: 4477 - DNA, 110 bp, synthetic construct
  source 1..110: mol_type = other DNA
acctgctttaataagctattttctaaggagatctccctaattatgggatcctcgccaaactctgaaacagaacatcttttgcctggtcacacaggtctggggtatcagtt

SEQ ID NO: 4478 - DNA, 110 bp, synthetic construct
  source 1..110: mol_type = other DNA
agtataagaataaatgtttattcttataggccattgagttttaagactcatttgttatatagcagtattgtgcctctgggtaactaatatagccaagatttgctcataaa

SEQ ID NO: 4479 - DNA, 110 bp, synthetic construct
  source 1..110: mol_type = other DNA
ctgcccatttaactagcatattgaatttataatttattttcagggtatgttttactattacctgtttaaacttttgtacaactttttgaggtcacttttccatgttggtc

SEQ ID NO: 4480 - DNA, 110 bp, synthetic construct
  source 1..110: mol_type = other DNA
agtactcctcaggttgtcccagtacacttggtaggaatcctggttcttttctgatgcatgtaggtgtgaagactctaatcccaagataattacttgtattttccaagtaa

SEQ ID NO: 4481 - DNA, 110 bp, synthetic construct
  source 1..110: mol_type = other DNA
tggggtttcaagttgcaagagcagcacattttttttttcagcctttgcctagcaccatattaaactcccaaggatggtctcatctccagtttgccctctcctatgtcata

SEQ ID NO: 4482 - DNA, 110 bp, synthetic construct
  source 1..110: mol_type = other DNA
agagaggtagaaaaggtggtcttggatgtaaccaaacttcatactcccagggtggatgacccataagctagaaaagagttacactgcagaggtctctctcactaacttct

SEQ ID NO: 4483 - DNA, 110 bp, synthetic construct
  source 1..110: mol_type = other DNA
ggggcatgtagagataattttgggtaagggggtataaaacatgcatcttggtaaaaggttgctgctagtcaggaggaggagatgtctccattaatgattttaattttttc

SEQ ID NO: 4484 - DNA, 110 bp, synthetic construct
  source 1..110: mol_type = other DNA
tagaaaaggcaataagaccaaaaaaaaaagactgcagtacagatcttcaacccgttccacaaagacaactacagtacagcttggagtgagatctgctggttaaatttctc

SEQ ID NO: 4485 - DNA, 110 bp, synthetic construct
  source 1..110: mol_type = other DNA
ggacttgggtgctcttgaaaatcccaattcaattcaaacccagctgttctgataaaaattctggagttagtactaaggatatggtcctgctcacagacacactggcattt

SEQ ID NO: 4486 - DNA, 110 bp, synthetic construct
  source 1..110: mol_type = other DNA
gataggtttctcattttcagataatgaatctgaggcccagattactaatcagttgatctttttcattatgcccttgtaatatttggaacaaaccttatttagtcagagtg

SEQ ID NO: 4487 - DNA, 110 bp, synthetic construct
  source 1..110: mol_type = other DNA
agtttgcgtattatctggtgaattaagcttgaattttggaactactcctactcattaccaacaaatgaaaagcaactgttgtttagcctctgatgtttagaaagttcctt

SEQ ID NO: 4488 - DNA, 110 bp, synthetic construct
  source 1..110: mol_type = other DNA
tgcttacatacagtcgtatcagatggaagaagctagtttctaaaacagttcggggtgggtgtttgcttctgattagcctgtgtgtatgtgttggatgaatgagcaattgg

SEQ ID NO: 4489 - DNA, 110 bp, synthetic construct
  source 1..110: mol_type = other DNA
cagcagggtgcctagcacagctagaggggagaagcttaacaggtggctctggaggaaacacacttggtctgagatatcacgggggcctcctcttggcttgttgcaaggac

SEQ ID NO: 4490 - DNA, 110 bp, synthetic construct
  source 1..110: mol_type = other DNA
aaacacacttggtctgagatatcacgggggcctcctcttggcttgttgcaaggacttgactttccttctgtgtaagacaggaagcctttggagagttctgtacagatgaa

SEQ ID NO: 4491 - DNA, 110 bp, synthetic construct
  source 1..110: mol_type = other DNA
aaaggaatgaccataagtgtgtgcaaagttatgctacagatgtatacgtagattcttataactgtccaatgaactaagtgtctaacatgaaagatgtttggttaaaatgt

SEQ ID NO: 4492 - DNA, 110 bp, synthetic construct
  source 1..110: mol_type = other DNA
agtgtgtgcaaagttatgctacagatgtatacgtagattcttataactgtccaatgaactaagtgtctaacatgaaagatgtttggttaaaatgttagatttaattgaca

SEQ ID NO: 4493 - DNA, 110 bp, synthetic construct
  source 1..110: mol_type = other DNA
ggaaggaaaattccctgcctaaagccacatagcatcatcttaggaaataaacctggggcttcttattcccagctgactgttttctttgagatcattgaaaaatatatata

SEQ ID NO: 4494 - DNA, 110 bp, synthetic construct
  source 1..110: mol_type = other DNA
ttgccatgtagttttcagtccactgtgaaattttaacctttttcgtatgtctaaccaatctggtatcccagctttggaggtgggggtattcagagaagtgggcatctgat

SEQ ID NO: 4495 - DNA, 110 bp, synthetic construct
  source 1..110: mol_type = other DNA
gaaaaagcaccaaaacaggagagtcagagaacagggtgtcagttccattcttaccacactgggtagctgagtgacttgtacaaactcaccaactcattttttatcatgta

SEQ ID NO: 4496 - DNA, 110 bp, synthetic construct
  source 1..110: mol_type = other DNA
agggccaaagagtatgtatgtgaatatataggtacatgcttaagtcagttcttaacctattgatatcatgtatgttccatgccccttccttgctctgctcagttcagcag

SEQ ID NO: 4497 - DNA, 110 bp, synthetic construct
  source 1..110: mol_type = other DNA
ggccatttacaagctctttgaccatgaaaacttgaaataataagtttgaagctattcatatacaaaatgaaaatgtttcttatatctacggtgatacctgacatacagaa

SEQ ID NO: 4498 - DNA, 110 bp, synthetic construct
  source 1..110: mol_type = other DNA
tacattgaaccacctctctcatgaacactcaagctatcaggtagtctagaggtatggagtgattctgtaccacaacatggtctaacactgcaagtgccttctttctgttc

SEQ ID NO: 4499 - DNA, 110 bp, synthetic construct
  source 1..110: mol_type = other DNA
agtatgctaattccttgcccctaaaggacagaaaacaagtaggttaaggtgcatttgataagcatgcacagaaggatatacctgaaacagacatgcagaggacatgacct

SEQ ID NO: 4500 - DNA, 110 bp, synthetic construct
  source 1..110: mol_type = other DNA
tgataagcatgcacagaaggatatacctgaaacagacatgcagaggacatgacctataccctacactggggcaggggggcactgaaggagggagcctcagaaccgggttc

SEQ ID NO: 4501 - DNA, 110 bp, synthetic construct
  source 1..110: mol_type = other DNA
gcactctcccctgaggacactcagctggtattcttttgcagatttcagaccaaactgaactatattaacattgtatatgaggttttgacgtaggtgcctcacgatttgag

SEQ ID NO: 4502 - DNA, 110 bp, synthetic construct
  source 1..110: mol_type = other DNA
atgttcaggagatgtgagttccaaatcaattctgttgtcaagtagctgggtggtcttggggctcattatgaaatctcccaagctcatttcttcctcatttctcaaagatg

SEQ ID NO: 4503 - DNA, 110 bp, synthetic construct
  source 1..110: mol_type = other DNA
tctgctctgttccctgtgcacacctgtgcgcccttcagggagaatgaagctgatagcaagtgtagaccctgcctcgccacccgcccccctctggaagcgtggctcaccac

SEQ ID NO: 4504 - DNA, 110 bp, synthetic construct
  source 1..110: mol_type = other DNA
gcttttcacttttcatggaatcatttaaagaatcagatctttaagagtcaaaatgagagctattaagaccatccttgttttataagggaatataattaagggcccagaac

SEQ ID NO: 4505 - DNA, 110 bp, synthetic construct
  source 1..110: mol_type = other DNA
agagctattaagaccatccttgttttataagggaatataattaagggcccagaacgtctcccaggctagccaaggtcagagagggagtcgcccacaaagctggggccagc

SEQ ID NO: 4506 - DNA, 110 bp, synthetic construct
  source 1..110: mol_type = other DNA
aaaaggaaggggtggggctttgcaaagaaacgttagctagaagaagttgtgccgacaatatgggattgctgaagttcccgtactggtgcagcagaaatgaatctgactag

SEQ ID NO: 4507 - DNA, 110 bp, synthetic construct
  source 1..110: mol_type = other DNA
cataacaggattgctgggaagcaggtggaatccccagcctggcacagcaagttatggatcctgcattgccacagcggtggctcggttgcaactgcagctcaaaatctgat

SEQ ID NO: 4508 - DNA, 110 bp, synthetic construct
  source 1..110: mol_type = other DNA
tggaatccccagcctggcacagcaagttatggatcctgcattgccacagcggtggctcggttgcaactgcagctcaaaatctgatctctggcccaggaactccatatgct

SEQ ID NO: 4509 - DNA, 110 bp, synthetic construct
  source 1..110: mol_type = other DNA
gaccctggttgacatgcaggacagggcaactggagcaatggctttttcttcccttccctctctttttttagagaccatttgaacatctctgaaaaatcctatggcattac

SEQ ID NO: 4510 - DNA, 110 bp, synthetic construct
  source 1..110: mol_type = other DNA
aataaagtgttggatttttttctttcctttgtcccaaaccctgtctccatgtttctattcaccactggtggacagaagccaagtttctgcaacatttggattgaaacagg

SEQ ID NO: 4511 - DNA, 110 bp, synthetic construct
  source 1..110: mol_type = other DNA
tattcaccactggtggacagaagccaagtttctgcaacatttggattgaaacagggcatgccctggcagggtacctcccacctgcccaaatatttcttcacttgcctgcc

SEQ ID NO: 4512 - DNA, 110 bp, synthetic construct
  source 1..110: mol_type = other DNA
cactgtaccataggagaactccttgagttaacttttgtatgaggtggtgtaagagtcaaagtttataagttctctttaaaatttcttgcatatggatgtccaattatccc

SEQ ID NO: 4513 - DNA, 110 bp, synthetic construct
  source 1..110: mol_type = other DNA
tgtagtttggctctgtgagtctgaggtctgggaatctgcaagttttaacaatgaaccttcgtgattctgatgcaggtgggccatggaccacacgttgagaaacacgtagc

SEQ ID NO: 4514 - DNA, 110 bp, synthetic construct
  source 1..110: mol_type = other DNA
ccttcgtgattctgatgcaggtgggccatggaccacacgttgagaaacacgtagctccttcattacggatcgacctcaaaaacaaaaggcatgtgtttctttgaggagaa

SEQ ID NO: 4515 - DNA, 110 bp, synthetic construct
  source 1..110: mol_type = other DNA
tggtaatcataaagtttacaattcctgtgaaatcctggatattttcttgatcttccactgaactttgcttgctggttttgtcaccaaatttttgccatggtctctctttc

SEQ ID NO: 4516 - DNA, 110 bp, synthetic construct
  source 1..110: mol_type = other DNA
gaggttggggaggggggcatctagaaagatttttaagcaggagtgttatgattagagctattatttaataaaattattccattggtagtatataaagtaattgaattggg

SEQ ID NO: 4517 - DNA, 110 bp, synthetic construct; identical to SEQ ID NO: 4516
  source 1..110: mol_type = other DNA

SEQ ID NO: 4518 - DNA, 110 bp, synthetic construct
  source 1..110: mol_type = other DNA
tgtttatttaggcaaacagcatgatttcaaaagtgaagcttgaaataggtacagcttttcagacttactgaaatagacaaatatgtcttcctctcatatctgctttaaag

SEQ ID NO: 4519 - DNA, 110 bp, synthetic construct
  source 1..110: mol_type = other DNA
ttttcagacttactgaaatagacaaatatgtcttcctctcatatctgctttaaagaaaataaaaagatatcatatgctgttgagatgctggctccatgaatcattttgtg

SEQ ID NO: 4520 - DNA, 110 bp, synthetic construct
  source 1..110: mol_type = other DNA
tatttacaataactggctgtgagctggatttggctttggccagcagtttgccagtccttgctttaaaacaatagtttctaatggatcagaaatatttcaaatgtctggaa

SEQ ID NO: 4521 - DNA, 110 bp, synthetic construct
  source 1..110: mol_type = other DNA
gcactttcaattaagagaccaccaatttaaaagaaatttcaggtttctcaaaggacttaactttccctagaaaaattttcatgggttctgataactctaaaggagccaaa

SEQ ID NO: 4522 - DNA, 110 bp, synthetic construct
  source 1..110: mol_type = other DNA
cttaactttccctagaaaaattttcatgggttctgataactctaaaggagccaaaaaagagataatcatgaaaatctctctctaattctaaatattgcctatgattccaa

SEQ ID NO: 4523 - DNA, 110 bp, synthetic construct
  source 1..110: mol_type = other DNA
ccttatgaggtatagtaggtttatggcatttttgaaaaagagactactaacactggagcatggagagttctgtaaaatggataagagagaaatccatcttacaacctctt

SEQ ID NO: 4524 - DNA, 110 bp, synthetic construct
  source 1..110: mol_type = other DNA
aatacctggcatgacttggtgttcaacaaatgaacatcatattggttcataaggatgaatcttatcattcttattcatccccaggatgatacgattagaggaacccatag

SEQ ID NO: 4525 - DNA, 110 bp, synthetic construct
  source 1..110: mol_type = other DNA
cttggtacttgaaacattcttgctttgagctgcaggaaagagtaaggaatctaattcagtgggtggaaggctcagcagggggctttaattggccactcaccatttttagc

SEQ ID NO: 4526 - DNA, 110 bp, synthetic construct
  source 1..110: mol_type = other DNA
taaacccctcactcgctgcaggcaatagaagatggaagtgtaatgacaaggtcataattctttttcctctctttcgcaattacctcatttcaaaattatatgtgaccatc

SEQ ID NO: 4527 - DNA, 110 bp, synthetic construct
  source 1..110: mol_type = other DNA
tggaagaacataatacaactgtgctatttgcaggataattacagaatagtacatgaagcaattattttgaagtaccccacagactgtacaatatagtaaaaagacacagg

SEQ ID NO: 4528 - DNA, 110 bp, synthetic construct; identical to SEQ ID NO: 4527
  source 1..110: mol_type = other DNA

SEQ ID NO: 4529 - DNA, 110 bp, synthetic construct
  source 1..110: mol_type = other DNA
ctccaccaagaaacccctagggtggcagcactgaggaagctgctttccaaataccattttggggggctccgtccatggtaggaaaattgtgtgagaagctatgcaagaag

SEQ ID NO: 4530 - DNA, 110 bp, synthetic construct
  source 1..110: mol_type = other DNA
gaaacaaataaaacacatagcttggaagactgtcaaaacgtgaacagagattccgcttttccttctttttccaggccattccatcaggatgctgtcagtctgaactagtg

SEQ ID NO: 4531 - DNA, 110 bp, synthetic construct
  source 1..110: mol_type = other DNA
gcaccaagtggtcaccctctgaaggtggaatgactcatctgctctcctccccatggagctgcgggtaacattaacctctaagctgctgctgtgggcagccctgctgcagc

SEQ ID NO: 4532 - DNA, 110 bp, synthetic construct
  source 1..110: mol_type = other DNA
atcaaatattcaagggattagtgggaactgttccctaacaagctgtaaatctgcaccaaatttcaggatttctgttatttgactcataaaacactgagatggctataacg

SEQ ID NO: 4533 - DNA, 110 bp, synthetic construct
  source 1..110: mol_type = other DNA
cttccaaggctttataggagaagcatgcaagaggaacatgatgtgtccattgcgtgtctcattggccaattttgtgtgcacatcagagttctgaggacaaggtgtcataa

SEQ ID NO: 4534 - DNA, 110 bp, synthetic construct
  source 1..110: mol_type = other DNA
agaatgtaatcacctaggagctctgtaagtcctgatgccccagtctcattgtcacatcccccaagtattctgatgcaatccagctggggtgggggccaaccccagggagt

SEQ ID NO: 4535 - DNA, 110 bp, synthetic construct
  source 1..110: mol_type = other DNA
atcccccaagtattctgatgcaatccagctggggtgggggccaaccccagggagttttcaagagctcccaagggcattcctatgcagccacttctgagaagccctgatga

SEQ ID NO: 4536 - DNA, 110 bp, synthetic construct
  source 1..110: mol_type = other DNA
tctaagataggaaaatcctgataaatgccaagtagagcacagctaggtgtcccagaatactgatggacatcactgatggtttttaaagtaacttggagggggtatgtgaa

SEQ ID NO: 4537 - DNA, 110 bp, synthetic construct
  source 1..110: mol_type = other DNA
actgctggtcctttgtacagagcacctctcccataaactgtcagatctctccatgacagctaaatacatgctttagacatgttttcaaaatcaggcatgccaggcccagc

SEQ ID NO: 4538 - DNA, 110 bp, synthetic construct
  source 1..110: mol_type = other DNA
tatattctcatttcaaccctagggctcttttttctattacataaattatcataaagctatcatatcactaatgtttcccttttgaaagttcggagggacaagagcatcat

SEQ ID NO: 4539 - DNA, 110 bp, synthetic construct
  source 1..110: mol_type = other DNA
caatgtgttttttttattattgagtactgtgatatggtaaatataaaagataattttcacctatgtaccatagacaagggtagctatgacttgcaatctacaaagcaatg

SEQ ID NO: 4540 - DNA, 110 bp, synthetic construct
  source 1..110: mol_type = other DNA
ggagggaacatctgagagctctgtccctagtccccaagagaaagctggtcctctgcctctcacaggaggatgggctacaggaggcccccaggaccatctgtgctgcagga

SEQ ID NO: 4541 - DNA, 110 bp, synthetic construct
  source 1..110: mol_type = other DNA
cctctcacaggaggatgggctacaggaggcccccaggaccatctgtgctgcaggatggccaagagggaacagagtgcagggggtcttgttggtgggtgctcagagagtgt

SEQ ID NO: 4542 - DNA, 110 bp, synthetic construct
  source 1..110: mol_type = other DNA
ccgcagctattaacagcaacaagaacatgaacaataacagaatttttaagaagctaacatagtatatgcaaaaaagctatgcgaagtgttgagtgtttacatggatccat

SEQ ID NO: 4543 - DNA, 110 bp, synthetic construct
  source 1..110: mol_type = other DNA
aacatagtatatgcaaaaaagctatgcgaagtgttgagtgtttacatggatccattctaacaaccttgttcatactgctgatcgccactcaacagggaacaggatgggag

SEQ ID NO: 4544 - DNA, 110 bp, synthetic construct
  source 1..110: mol_type = other DNA
tgggaactccagtatcatgatttttttttattgtcatagttgaccaatcttctccttacccatctgtgacatcttttgatcaaggttgaaatagcctagttggttaccta

SEQ ID NO: 4545 - DNA, 110 bp, synthetic construct
  source 1..110: mol_type = other DNA
caagggttcctatcaaagacaagctgaatttgttgcataacaaaagcttaatactctgtggcacctaaatcccctttatagctttatagtactacttagaaagaatgtca

SEQ ID NO: 4546 - DNA, 110 bp, synthetic construct
  source 1..110: mol_type = other DNA
aaaatttgtaggtgtatttgctgacaacattgggaacatgacctcaggattaaaatttgctttaaaaaaaaaaaaggctaatactgagatagtgagaccttataagaaaa

SEQ ID NO: 4547 - DNA, 110 bp, synthetic construct
  source 1..110: mol_type = other DNA
agctatcaaaatctaccatatactccaacacggcctttacttgtaaaacttgcagaatggatattgtcacagtgtgtgagcagctcaatctagagccatcttttctttct

SEQ ID NO: 4548 - DNA, 110 bp, synthetic construct
  source 1..110: mol_type = other DNA
aatgcagagagacagataaggagccggtacaacagtccaggtgagaggtgatggggaatagtgtaccatttcccaatactgatatgtttggcctgtctgttattttaaaa

SEQ ID NO: 4549 - DNA, 110 bp, synthetic construct
  source 1..110: mol_type = other DNA
ggaaccagaagaagagagcaggccatgagtttttataatctaggcctcccccatgttttttcccccaccttccaccctcagggagctccttcaaagggaacatgcatctg

SEQ ID NO: 4550 - DNA, 110 bp, synthetic construct
  source 1..110: mol_type = other DNA
actatgctagtcattcatccagcaatgcactcccgcaacagatgtttctcagatacccaccatgtatctgacactacactcagcttgggaaacagtagggcatcatacat

SEQ ID NO: 4551 - DNA, 110 bp, synthetic construct
  source 1..110: mol_type = other DNA
agtttctgaccttaaagccagttgtgagcagtgaggagtacgggtgtcctgaggacaaactactagatgagaatttctgagtccttagagagctcgcactctacaggtaa

SEQ ID NO: 4552 - DNA, 110 bp, synthetic construct
  source 1..110: mol_type = other DNA
caaactactagatgagaatttctgagtccttagagagctcgcactctacaggtaacctgtttacaaataatgaattcagtttcgtgttaacattctctgctctccacatg

SEQ ID NO: 4553 - DNA, 110 bp, synthetic construct
  source 1..110: mol_type = other DNA
tgttcaaacaatatctagctgatatctattatttcagatatccctatttgaagcgatggtcacctgtttactcaggaggtaaaatgttaacaaaagaaggatgcatccca

SEQ ID NO: 4554 - DNA, 110 bp, synthetic construct
  source 1..110: mol_type = other DNA
gatatcaggtcagtaactttcccaaagtcagacagctagtcctggtagagctggagtgctggaattcacacccaggtgatctggctccagagcccatactcttcagtata

SEQ ID NO: 4555 - DNA, 110 bp, synthetic construct
  source 1..110: mol_type = other DNA
tttgaatttcaaactgaaggtcatcctgctattgattttcgtgggaccgggcaacaagaacaccttgttaaaatgatccacaaatggagcctaggtgtgcctaggttcta

SEQ ID NO: 4556 - DNA, 110 bp, synthetic construct
  source 1..110: mol_type = other DNA
ttggagaagctgacctttgagcagagacctgaataaaattagaaagtgagccctgccagatctacgggaagaacgtttcttcggggggagcagcaatgacaaaggccctg

SEQ ID NO: 4557 - DNA, 110 bp, synthetic construct
  source 1..110: mol_type = other DNA
ccagatctacgggaagaacgtttcttcggggggagcagcaatgacaaaggccctgatgtgagaacaaatttcgtggtcctgagaagcaatgtggttgttaataaaattaa

SEQ ID NO: 4558 - DNA, 110 bp, synthetic construct
  source 1..110: mol_type = other DNA
agagttagtgttcaatacagtggtgtttagctttgtgtgctgctgccagttttcagggtcacattttagctatgatctttatttccagggagaggcctaaaccatagcag

SEQ ID NO: 4559 - DNA, 110 bp, synthetic construct
  source 1..110: mol_type = other DNA
gttacaaatgagacagttgatgtaaaaatccaacagtttccaggaatatgagtatctagagctgtgtcagggagtatagttttcaggcatagcagtgcaattgcaggtag

SEQ ID NO: 4560 - DNA, 110 bp, synthetic construct
  source 1..110: mol_type = other DNA
ctagagctgtgtcagggagtatagttttcaggcatagcagtgcaattgcaggtagccccatgcttctccccccaccccccaaaatcagtaattattgattgcatctaaag

SEQ ID NO: 4561 - DNA, 110 bp, synthetic construct
  source 1..110: mol_type = other DNA
ggtgtcagtggcctggccagagaaggagaagaggagaagtgatgcacatttcaaatcacctgtgtcttgaaacaatcagaactaatagaacaactgacaatttagaagaa

SEQ ID NO: 4562 - DNA, 110 bp, synthetic construct
  source 1..110: mol_type = other DNA
tcacctgtgtcttgaaacaatcagaactaatagaacaactgacaatttagaagaaagcttcccagagtgtcctgggggcatttgtcttcaggaggttcaacttgagcctt

SEQ ID NO: 4563 - DNA, 110 bp, synthetic construct
  source 1..110: mol_type = other DNA
tgggacccctgggcagcaaagcacctgtaagtgttttgagctggggaatgataagatgcaaatttcatggcaggaaaattactctgataaaaacatgttgagggagtccc

SEQ ID NO: 4564 - DNA, 110 bp, synthetic construct
  source 1..110: mol_type = other DNA
aaaacaagcatccccaaaacacattagcctcccagcacaggaatgggaacacatgaagcaggaagcctgccggggtctttagggaaatcttgagtgctctgggctgattt

SEQ ID NO: 4565 - DNA, 110 bp, synthetic construct
  source 1..110: mol_type = other DNA
ttacaggagaacatgatgggtttaacttttcaagggttgatgcgtagaaaagatcctgttcggattttgcgaaacaacactatctcatagtatgaggatatagttacaga

SEQ ID NO: 4566 - DNA, 110 bp, synthetic construct
  source 1..110: mol_type = other DNA
ctgttcggattttgcgaaacaacactatctcatagtatgaggatatagttacagaacagcaaacccagagacaaaaattgaagacttctctcaaaatattctgagaagaa

SEQ ID NO: 4567 - DNA, 110 bp, synthetic construct
  source 1..110: mol_type = other DNA
tgaggtgaggcaggtgggagccgtgagggctcctgatcacaggcccagggcattggaccagatgtgggcacatccagcagcagatgtattttgcttaacctgcacagtgc

SEQ ID NO: 4568 - DNA, 110 bp, synthetic construct
  source 1..110: mol_type = other DNA
ttctcatagaagtctggtaagagttttagctttgcctctgagttgcttctgtgaaaactgaggctagaaattgaagctcagtgtcatggccagaggagtatatgacagat

SEQ ID NO: 4569 - DNA, 110 bp, synthetic construct
  source 1..110: mol_type = other DNA
ctcctttactacctgctgccttataaccttcactggttcctgttccacaactatgaatcatgaactttccctagccagctcctgacagtttctgtttagacaccaggtac

SEQ ID NO: 4570 - DNA, 110 bp, synthetic construct
  source 1..110: mol_type = other DNA
cacaggctaacatatgctaacacacgattttatttctgcaaagcttaactatacgctttacccaaaatacatatatcactattctccccagaacaaatgataccaagtta

SEQ ID NO: 4571 - DNA, 110 bp, synthetic construct
  source 1..110: mol_type = other DNA
tctactgcacagcaaagcaatcccactcctgggcatatatacttctgtctcatgcaaaatgttttcccattcctaggaagcccacttttgatcctaaatatcctagaggc

SEQ ID NO: 4572 - DNA, 110 bp, synthetic construct
  source 1..110: mol_type = other DNA
aatatataactctaatgtataaagctatcattatgctgtgtaccaatgggagtatacatttcactctctcagaggaaatggtttaaaacatcttctactggcttattttt

SEQ ID NO: 4573 - DNA, 110 bp, synthetic construct; identical to SEQ ID NO: 4572
  source 1..110: mol_type = other DNA

SEQ ID NO: 4574 - DNA, 110 bp, synthetic construct
  source 1..110: mol_type = other DNA
agtctctctgggctgaacactcacagcttttggagaattatacttgggtggtaatttgcacaggccgtgacagttcacccagcaggctcgtagcaacccttgcctttgtt

SEQ ID NO: 4575 - DNA, 110 bp, synthetic construct
  source 1..110: mol_type = other DNA
ttgcacaggccgtgacagttcacccagcaggctcgtagcaacccttgcctttgtttttcctgcacgacttgtgaaatggggtgggggggacatttcaaggatgaggcaat

SEQ ID NO: 4576 - DNA, 110 bp, synthetic construct
  source 1..110: mol_type = other DNA
atttttaagggctgtcattcagccatatggcctttaaatgaatgcattttctgcttattggatggcattactggactgtcacatatttttaatggtataagagaacctca

SEQ ID NO: 4577 - DNA, 110 bp, synthetic construct
  source 1..110: mol_type = other DNA
actgtatcagtgaacacttcagtcctggacttcttagtctccagaactgtgcgaaataaatctctgttgtttaagccaatcagtccatggtattttattaaaacaactgg

SEQ ID NO: 4578 - DNA, 110 bp, synthetic construct
  source 1..110: mol_type = other DNA
ataaatctctgttgtttaagccaatcagtccatggtattttattaaaacaactggagctaagataatgggcacacatagaagctgggaaatgttgtttttagtcaggtgg

SEQ ID NO: 4579 - DNA, 110 bp, synthetic construct
  source 1..110: mol_type = other DNA
taaatctcagttaatacagcggaggatggaactcatgctgcagctttgattcacaggtaattctaaggtttcagtggtcacaaatccaagggtctgatggagaagcctga

SEQ ID NO: 4580 - DNA, 110 bp, synthetic construct
  source 1..110: mol_type = other DNA
agccctcctttgttgcagaggtttcactggtggatggaaaggagttggcctctgtcggcatgagctccctcagccagggtgggctccgtgccctgctgctgctgctgctg

SEQ ID NO: 4581 - DNA, 110 bp, synthetic construct
  source 1..110: mol_type = other DNA
agtcacaggagtggttccctggtgtgaaataacccacagatagctgggctaagtggtaaccactggaggatcttgacaacatgctaaccttaagttctagaaaccttagc

SEQ ID NO: 4582 - DNA, 110 bp, synthetic construct
  source 1..110: mol_type = other DNA
aaagctttcccttctttggattaatgcttagaaagacaaaggagtggaaaaaatgtatcctcttccagcttgggtataaatacgctcttcttccactccctagatggctg

SEQ ID NO: 4583 - DNA, 110 bp, synthetic construct
  source 1..110: mol_type = other DNA
tatcctcttccagcttgggtataaatacgctcttcttccactccctagatggctgcaagggaaaggtacacaattaaaatgacagcagccaggcaagaaattagggcttg

SEQ ID NO: 4584 - DNA, 110 bp, synthetic construct
  source 1..110: mol_type = other DNA
agccatgacaagaactctggtgccatctttcttctagctaatacagtccctaaaagctaaagaatctaggttaagtcagggctataaagaaaaacaaaacaaaacaaaca

SEQ ID NO: 4585 - DNA, 110 bp, synthetic construct
  source 1..110: mol_type = other DNA
ggctaggggttgaataggagctgtaaactctggcctacgccacagccatcgcaacagcagatctgagctgtgcctgtgacctacaccagagttcatggcaacactggatc

SEQ ID NO: 4586 - DNA, 110 bp, synthetic construct; identical to SEQ ID NO: 4585
  source 1..110: mol_type = other DNA

SEQ ID NO: 4587 - DNA, 110 bp, synthetic construct
  source 1..110: mol_type = other DNA
aaattgttctgttttcttataataataatctagatagctgagttttagagagataaacattcgccatttctagagggaaaaaatagtcttttggccagcctcgtaaatcc

SEQ ID NO: 4588 - DNA, 110 bp, synthetic construct; identical to SEQ ID NO: 4587
  source 1..110: mol_type = other DNA

SEQ ID NO: 4589 - DNA, 110 bp, synthetic construct
  source 1..110: mol_type = other DNA
caacaatttccaaaggatgaggtgatatgagacctcaatttcctgaaggaggtttatggaccaggagtggggagtttctggggggaaatgagggaggagttgtggacaga

SEQ ID NO: 4590 - DNA, 110 bp, synthetic construct
  source 1..110: mol_type = other DNA
atggaccaggagtggggagtttctggggggaaatgagggaggagttgtggacagaaaattccatctgtgcccaccatgggttaggtcactgccttactccatgagaattc

SEQ ID NO: 4591 - DNA, 110 bp, synthetic construct
  source 1..110: mol_type = other DNA
aaagggaatagaaagaggggggtaagtggaaacataactagttaaaggcaggagagcctatgtactcagcttctaaccaattagtcttaggcacctgctaagtggtttag

SEQ ID NO: 4592 - DNA, 110 bp, synthetic construct
  source 1..110: mol_type = other DNA
gcctatgtactcagcttctaaccaattagtcttaggcacctgctaagtggtttagcagcatgcatgttaaagaaactggtgatcatggtatctcccctgccaggtaagta

SEQ ID NO: 4593 - DNA, 110 bp, synthetic construct; identical to SEQ ID NO: 4591
  source 1..110: mol_type = other DNA

SEQ ID NO: 4594 - DNA, 110 bp, synthetic construct; identical to SEQ ID NO: 4592
  source 1..110: mol_type = other DNA

SEQ ID NO: 4595 - DNA, 110 bp, synthetic construct
  source 1..110: mol_type = other DNA
ccactctttaccccctacttcctccggggggtcctgttgtcaccacttctacacacagagccctaatgcgccgctgccccaggccttcagctgttcatattatcactaat

SEQ ID NO: 4596 - DNA, 110 bp, synthetic construct
  source 1..110: mol_type = other DNA
actgtctcttctttgaccttttcttcagctcagttctttctactttccctcgccctccctaagtttcatccctctaattaacaggctataaaaccttgcctgacctctgc

SEQ ID NO: 4597 - DNA, 110 bp, synthetic construct
  source 1..110: mol_type = other DNA
tccctaagtttcatccctctaattaacaggctataaaaccttgcctgacctctgcggttggaacagaaaatgaattaggggatttaaatggaagttgggccaggtctttc

SEQ ID NO: 4598 - DNA, 110 bp, synthetic construct
  source 1..110: mol_type = other DNA
ggcaattatttttcttcctaaagactacatctcccaggctcccttacagctaggtgccaccatatgacaaaggtttggctaatgaactgtgattggaaatgttctgaggc

SEQ ID NO: 4599 - DNA, 110 bp, synthetic construct
  source 1..110: mol_type = other DNA
gccaccatatgacaaaggtttggctaatgaactgtgattggaaatgttctgaggcacttttggaaaagctccttaaaaggaattaaccaaactaggaggactgtcatttt

SEQ ID NO: 4600 - DNA, 110 bp, synthetic construct
  source 1..110: mol_type = other DNA
gtgagagaaaagcaccccctatccccagtctccgaaatttcctccaacgggctgcaaaggctcaaattgtccttcctagctccgctccctcatccagttaggttgtgtaa

SEQ ID NO: 4601 - DNA, 110 bp, synthetic construct
  source 1..110: mol_type = other DNA
ctattaaatcatatgtgggcaaaggtcaagcactccagctcactgatacaatacactgcagattcctgcctaagtgatggggagcgcaggaaaaagtgcttgggcaataa

SEQ ID NO: 4602 - DNA, 110 bp, synthetic construct
  source 1..110: mol_type = other DNA
tgaacctgctgttggaagtacatattaaccttgggtatagatttgagattggagatggagcaaatgagaagtcaacttatgccttgagacaaaaagtccagtaagctcta

SEQ ID NO: 4603 - DNA, 110 bp, synthetic construct
  source 1..110: mol_type = other DNA
ggagttctggggtgtcacagcccagctgaacatggcacttacccagctccactacctcatctccaggatgacgctcctggggtccagagagggagagtgagtttcccaat

SEQ ID NO: 4604 - DNA, 110 bp, synthetic construct
  source 1..110: mol_type = other DNA
tcaggggacttcacacagtctattttcttttaaaaatatattttaaagggcccagagcctactttcctctttggcataattttgcttgtttttatggcaaaggaaaattg

SEQ ID NO: 4605 - DNA, 110 bp, synthetic construct
  source 1..110: mol_type = other DNA
agcctactttcctctttggcataattttgcttgtttttatggcaaaggaaaattgcttctttcttaaactgagatggagagggacttaaatgttgtaaagtgaatgtcat

SEQ ID NO: 4606 - DNA, 110 bp, synthetic construct
  source 1..110: mol_type = other DNA
ctgaattggtttgtaagacttctagcccaggagggtatgtacccatgtcctcaatgcggctcatttttctactctgtgatatcacaccatacgtactgcttatttatagg

SEQ ID NO: 4607 - DNA, 110 bp, synthetic construct
  source 1..110: mol_type = other DNA
tcaaggggtcttcggcaaataggagagagcatatcatgtccatgtggcttaggatatgtttttaaaaccaaaacacaacaataaaaccccagatataaaactgctgatct

SEQ ID NO: 4608 - DNA, 110 bp, synthetic construct
  source 1..110: mol_type = other DNA
cgaggtcaacctcaaccagcctatggattggccctccttgagcaagataacctccctgagtccactcacctctagctgactgggggaagggaagtcttcagatggtgcag

SEQ ID NO: 4609 - DNA, 110 bp, synthetic construct
  source 1..110: mol_type = other DNA
aatctgattcattgtttcccaaaagattaagacattgttgagaagcttgggcttggacagctttcttctgctgtgtacagagggaagtttatcccccaggttatttacaa

SEQ ID NO: 4610 - DNA, 110 bp, synthetic construct
  source 1..110: mol_type = other DNA
cgagtcagcacttcaccctgaacatctttccattattggccatgctgcaaaacatactctgcttctccacattttaattctgagctacagctaatggaagcacatgcttt

SEQ ID NO: 4611 - DNA, 110 bp, synthetic construct
  source 1..110: mol_type = other DNA
cctcaactgttaaccagtctctcggccccagttcaagtcactttacttcctggggctatagtgtgaatatgatggccactagccacctatagcttcttctatttaaatta

SEQ ID NO: 4612 - DNA, 110 bp, synthetic construct
  source 1..110: mol_type = other DNA
cttcctggggctatagtgtgaatatgatggccactagccacctatagcttcttctatttaaattaatacaaattgaataaacttaaaagtcatttcctcaatcacaatag

SEQ ID NO: 4613 - DNA, 110 bp, synthetic construct
  source 1..110: mol_type = other DNA
atatctccatattactcctaggtaaacattgcaacttcaacaatttcaaatgtcgaatatgcccacattccacatctcagcccagctgtaattcctcccctgcaaaatga

SEQ ID NO: 4614 - DNA, 110 bp, synthetic construct
  source 1..110: mol_type = other DNA
cacactactttccttcctattcatatagtgcctaaactgagctgatcatcacctaggccggccctgcgcaataaaaagttacaaaatagcttccattttcaagctcttta

SEQ ID NO: 4615 - DNA, 110 bp, synthetic construct
  source 1..110: mol_type = other DNA
cccatataactgcagttaaggcaaatatagtatgcagctgtctttgcattaagcgattaaatcaaatagcatagttttgaagtacatttataaagcataaatttacctcc

SEQ ID NO: 4616 - DNA, 110 bp, synthetic construct
  source 1..110: mol_type = other DNA
gggccactttgagatacagtctggattcataggcacacatttttaaagaagcaattcacagtcagcttcattaaactgaaataatgatccttgcagttttattgcaacag

SEQ ID NO: 4617 - DNA, 110 bp, synthetic construct
  source 1..110: mol_type = other DNA
caagtataggtaaatgactataagaatgaaaacttaagccattctgttcccataaggatagcccccgtggttagtgagatgcttttcactctgataatcctcaagctacc

SEQ ID NO: 4618 - DNA, 110 bp, synthetic construct
  source 1..110: mol_type = other DNA
aaggcagagaatatagaagtagagagcaactcatttctgatgccatcagttcaattcctcagctagaggtcagctttgcccccagacttttggttatatcagtcaatgaa

SEQ ID NO: 4619 - DNA, 110 bp, synthetic construct
  source 1..110: mol_type = other DNA
gttccctctttccagtctgacttctagcctcatcacattttgattatgacctatattttttgcttcacagcttatccttattgcattattatgattgtattatagcatta

SEQ ID NO: 4620 - DNA, 110 bp, synthetic construct
  source 1..110: mol_type = other DNA
ctttatccactcctgatggttcacctcattaaggggtgaaatccacctttagcatacatttgctttccatttgtacgaatcatattttttatttttattttggaaaaatg

SEQ ID NO: 4621 - DNA, 110 bp, synthetic construct
  source 1..110: mol_type = other DNA
tttctttttaagctgatatgcccactccttatagctccagattggaattgttaaactattgagtacagtgacaaaacaaagcaaaacacatgaaagaaacaaaaacaaaa

SEQ ID NO: 4622 - DNA, 110 bp, synthetic construct
  source 1..110: mol_type = other DNA
agttgatgaatgaatttggaaaggtggagtcatattggaaggcaaatttgacatagaatttagttattgtttacatggaaaagtcagggagcaaagaagaaaagagtctg

SEQ ID NO: 4623 - DNA, 110 bp, synthetic construct
  source 1..110: mol_type = other DNA
gaatttagttattgtttacatggaaaagtcagggagcaaagaagaaaagagtctgtggcagccttgaaatttctgtattctctaagagaatataagaagagaagcaatgg

SEQ ID NO: 4624 - DNA, 110 bp, synthetic construct; identical to SEQ ID NO: 4622
  source 1..110: mol_type = other DNA

SEQ ID NO: 4625 - DNA, 110 bp, synthetic construct; identical to SEQ ID NO: 4623
  source 1..110: mol_type = other DNA

SEQ ID NO: 4626 - DNA, 110 bp, synthetic construct
  source 1..110: mol_type = other DNA
ccacctgcccagatccactgaactcaggtcctaatactgcagtagttgtgtacttggacccactgttagagctatggagtaagctcagcccctagcctggcccagattag

SEQ ID NO: 4627 - DNA, 110 bp, synthetic construct
  source 1..110: mol_type = other DNA
attgagttgaactgtggcacaccagctggtgtctaaagaattggttgtaaatacatgggaacagcccttcccttcattgcaaattgggtcccagatctcttctactggca

SEQ ID NO: 4628 - DNA, 110 bp, synthetic construct
  source 1..110: mol_type = other DNA
aatcatcacatgggttttgcctagattcctttcaaattactgctgcacttggaacaggtgagattttgtatgtgtgctttaagagtggagttctcttctcctcaatcctc

SEQ ID NO: 4629 - DNA, 110 bp, synthetic construct
  source 1..110: mol_type = other DNA
tatatatggaatggatgagtaaataggacctaatgtatagcacaggaaatctattcaatactgtattaacctatatggcaaaggaatgtgatatggaatggataagtata

SEQ ID NO: 4630 - DNA, 110 bp, synthetic construct
  source 1..110: mol_type = other DNA
caatactgtattaacctatatggcaaaggaatgtgatatggaatggataagtatataggtttaacgcattcatgatgctgtacacctgaaaaaatacaacgttgtaaatc

SEQ ID NO: 4631 - DNA, 110 bp, synthetic construct
  source 1..110: mol_type = other DNA
ggtctctgggaaattaaacatgtggatgtgacttagtatatacttatagctgtgatatagtaaataatatgcttttactacacttttagagactagttatcagagatttc

SEQ ID NO: 4632 - DNA, 110 bp, synthetic construct; identical to SEQ ID NO: 4631
  source 1..110: mol_type = other DNA

SEQ ID NO: 4633 - DNA, 110 bp, synthetic construct
  source 1..110: mol_type = other DNA
aaatagattttcttctatacactggtagggaattctgtttttttatgctctgaaaaatgcttatctcagccagctctaccttctgtttacctcccaggaagctttctcct

SEQ ID NO: 4634 - DNA, 110 bp, synthetic construct
  source 1..110: mol_type = other DNA
ataatcacagaagtggtacttaccatattcaccggccctgcccatactcaaacagaggagttacatagggcatgtactctggaaggcaaaacccttagggtacatcttac

SEQ ID NO: 4635 - DNA, 110 bp, synthetic construct
  source 1..110: mol_type = other DNA
gcactctttaaaaagtggttatcagtgtccctgagagctgtggacaagaaaagggctaaggcataatagttaaaattctgactctttgtcctcctaataaaaatatgtgg

SEQ ID NO: 4636 - DNA, 110 bp, synthetic construct
  source 1..110: mol_type = other DNA
aactgcttctcaagtagaccaaatacttggaaacttattctatgatgccaggattagcttaataccaacattagataaagatataataagagtgaaaaagtacttacctt

SEQ ID NO: 4637 - DNA, 110 bp, synthetic construct
  source 1..110: mol_type = other DNA
tggagaattcagtgtgcataacagttacattcactggtgatagggaataaattgatttccctgcagttatttaaccaactgaactgtaattgcaagtgtaatctattaac

SEQ ID NO: 4638 - DNA, 110 bp, synthetic construct
  source 1..110: mol_type = other DNA
ctctggtttcagaaaaaaaaaaatgaataaggtgaaacaaaatactattctagataaaacagcttaccatactgttctagagaaaatttcctgatggtagctaaagaagg

SEQ ID NO: 4639 - DNA, 110 bp, synthetic construct
  source 1..110: mol_type = other DNA
aaaacagcttaccatactgttctagagaaaatttcctgatggtagctaaagaaggaaagaataccaaaatcaaaaaatctagggtcttgtgaaaaaagggggaaaacgtc

SEQ ID NO: 4640 - DNA, 110 bp, synthetic construct
  source 1..110: mol_type = other DNA
gaagcatatgatgattcagaagaaagtgagaggggaaattgcagaagtgatagccctaattaggtgagaagagataagatctattgcacaagtggaaagttgtccttaac

SEQ ID NO: 4641 - DNA, 110 bp, synthetic construct
  source 1..110: mol_type = other DNA
ctaattaggtgagaagagataagatctattgcacaagtggaaagttgtccttaacaaggaacatagatagtttaatcataataagataggtgaaagcagagtacatgaac

SEQ ID NO: 4642 - DNA, 110 bp, synthetic construct
  source 1..110: mol_type = other DNA
ttacttttcctattcatatgaccactgttgttgtatgaaagacagttactgtaggaagagaggtgaaaggcccaacagaaaacttgtattactgcatttttgttaacagt

SEQ ID NO: 4643 - DNA, 110 bp, synthetic construct
  source 1..110: mol_type = other DNA
aagagaggtgaaaggcccaacagaaaacttgtattactgcatttttgttaacagttataggacggatacaaccaaatttaaaataatcttactaaattgaacatgtgttc

SEQ ID NO: 4644 - DNA, 110 bp, synthetic construct
  source 1..110: mol_type = other DNA
gtagaaattcagtattttatgtagtttgacaaatctgatagctagaatgcttcatagttcaataacttatttatatgctgcctttgttctgtggaaatcaaagaactgtc

SEQ ID NO: 4645 - DNA, 110 bp, synthetic construct
  source 1..110: mol_type = other DNA
atatatctctgtgtgtttcttggcaatatgccttctatcaaatgtaattatctttccttcatttcacactttattacaatgaactacacatgtacatattcttacacccc

SEQ ID NO: 4646 - DNA, 110 bp, synthetic construct
  source 1..110: mol_type = other DNA
ccttcatttcacactttattacaatgaactacacatgtacatattcttacaccccccacattcttttctctctctctgtccaatttctgacttttcatgatttactttat

SEQ ID NO: 4647 - DNA, 110 bp, synthetic construct
  source 1..110: mol_type = other DNA
ggaagtgttttaaactctgaggatacagagcttattttgactgtggtcaaataattgtagttccaagcctcatagaatctgatttcagaagaggggacagaaaataagtg

SEQ ID NO: 4648 - DNA, 110 bp, synthetic construct
  source 1..110: mol_type = other DNA
ccagacctcttaattcctgtgaaatattcagtttatagagatggagaacaggggaaggggagaagtcagttgttactacataaaataagtaaatgaaaagggctgatcct

SEQ ID NO: 4649 - DNA, 110 bp, synthetic construct
  source 1..110: mol_type = other DNA
ataagaaatttatcatcttgggagctaaattgaaagacactaaattatctcttagttttatttagcatcatttctaaagtaagctctggaagtggaaagagggccttaga

SEQ ID NO: 4650 - DNA, 110 bp, synthetic construct
  source 1..110: mol_type = other DNA
aaagttacggttggtaagattaaaccaattagcagcatttcatatccatgatatccagcttactggtatttttaaagctggatttgttgcccatgttaaatattttagtg

SEQ ID NO: 4651 - DNA, 110 bp, synthetic construct
  source 1..110: mol_type = other DNA
atttcatttcttctgtgcttctggcttctctcagactccagcattctctggcctatcacttgaagacccttgactagttatgtgttggcaagttgaatggcttacaacta

SEQ ID NO: 4652 - DNA, 110 bp, synthetic construct
  source 1..110: mol_type = other DNA
tggatggcatatgtgtcccactgcagtgagaatgatgaagtaatcacttttggaataaagagtcaaatggggttttgtcttttcatttattcatttttaatcatgcatga

SEQ ID NO: 4653 - DNA, 110 bp, synthetic construct
  source 1..110: mol_type = other DNA
atatctaaagattttcctgagaaagcttaagcaaagtccaagaaagtgagtaggctttgaatgaataaggagcagacagagaagtttttctgcagagggaggagggtgtg

SEQ ID NO: 4654 - DNA, 110 bp, synthetic construct
  source 1..110: mol_type = other DNA
atcaacgaccatatattgtctatgaagttatacacccatatttgcttgcccattattaatgtatgtgtatcttcgtattgttcatctgtcagggttctttataaattgta

SEQ ID NO: 4655 - DNA, 110 bp, synthetic construct
  source 1..110: mol_type = other DNA
ttaatgtatgtgtatcttcgtattgttcatctgtcagggttctttataaattgtatctaaaaatcctttgtcagatataactagtgttgatgttatctccccctctgtag

SEQ ID NO: 4656 - DNA, 110 bp, synthetic construct
  source 1..110: mol_type = other DNA
acaaagactatgggctatgcctggaagtgaagctatgtactttccaacactttctgttttctagaaatctaaaacaggaccatagtcactgcagaagctgggaagtgaag

SEQ ID NO: 4657 - DNA, 110 bp, synthetic construct
  source 1..110: mol_type = other DNA
aaaaagacattaaaaaaaaataccaaagtcatacattccccattttctttctgtgttctcaggctgaaagctcaaatactaacttggttatctggctatagtaaaacttg

SEQ ID NO: 4658 - DNA, 110 bp, synthetic construct
  source 1..110: mol_type = other DNA
ttctcaggctgaaagctcaaatactaacttggttatctggctatagtaaaacttgacagttgacaaacccaacaaggagatgacatttgaaaggcgtttggcaagggtaa

SEQ ID NO: 4659 - DNA, 110 bp, synthetic construct; identical to SEQ ID NO: 4657
  source 1..110: mol_type = other DNA

SEQ ID NO: 4660 - DNA, 110 bp, synthetic construct; identical to SEQ ID NO: 4658
  source 1..110: mol_type = other DNA

SEQ ID NO: 4661 - DNA, 110 bp, synthetic construct
  source 1..110: mol_type = other DNA
catgtttgattcctggccccactgagtgggttaagaaacttttaagtcaaaaggttgttggatgaccatcttatcacaatagctacttcatatctatgtttttgctctaa

SEQ ID NO: 4662 - DNA, 110 bp, synthetic construct
  source 1..110: mol_type = other DNA
atagcttgcatcagagctcactcaaggtggagagaaaggaaaaaagacacaagtcttggggcctcgggatactatgtgaatacacacctaactcaggttaagccaaagtc

SEQ ID NO: 4663 - DNA, 110 bp, synthetic construct
  source 1..110: mol_type = other DNA
aatgcacactcatcacagccatactaccagcaaatcagccttggaaccttttgttagaatattatcattttttgaaaataccattgtttcccataagctccattttggat

SEQ ID NO: 4664 - DNA, 110 bp, synthetic construct
  source 1..110: mol_type = other DNA
cagccatactaccagcaaatcagccttggaaccttttgttagaatattatcattttttgaaaataccattgtttcccataagctccattttggatttatgctttttatat

SEQ ID NO: 4665 - DNA, 110 bp, synthetic construct
  source 1..110: mol_type = other DNA
ttgctgcacccacagaattcccgcattgaatcagaacaatgtatacctgaattttttgctagctcatggatgataaggctgggtaagcctaaagagtgtgcctttttcaa

SEQ ID NO: 4666 - DNA, 110 bp, synthetic construct
  source 1..110: mol_type = other DNA
ttgctagctcatggatgataaggctgggtaagcctaaagagtgtgcctttttcaatgttttatgaaagagacctactgaacctgatgccttgtacctaaatcccccctat

SEQ ID NO: 4667 - DNA, 110 bp, synthetic construct
  source 1..110: mol_type = other DNA
gtaacatccccctttagcagcactccaccttctgggagacagaagtcaagagtagtgattgaggagctggacatttccattacaggccatcagctacagtcaccaagcca

SEQ ID NO: 4668 - DNA, 110 bp, synthetic construct
  source 1..110: mol_type = other DNA
agtaacaataatgctgcttattttgtactcctagcaggaaaatgaaattccaagaagtcaatctcctttcagtgattaaacctaaaactctcttgcctcattgaagattt

SEQ ID NO: 4669 - DNA, 110 bp, synthetic construct
  source 1..110: mol_type = other DNA
gtgaaagagaaaatcaagctaatgaagaacaaataatcctttaacatgtcattgtttttccctgcaaatgtatcactgcttattcctataatttctcttcttgattgttt

SEQ ID NO: 4670 - DNA, 110 bp, synthetic construct
  source 1..110: mol_type = other DNA
attgcaccagagaaacttaactgctatcatcactttactttttaggtctattacttcaggtgattgtacagctgtgttatgctattttattgttgcctccgtgttttaaa

SEQ ID NO: 4671 - DNA, 110 bp, synthetic construct
  source 1..110: mol_type = other DNA
cttttgtatttgcaatccagaacaccctagggattttttttctagttttatatatgaattccccttgactgaattatgtttgtgtgaacagcaagcactattggacaaaa

SEQ ID NO: 4672 - DNA, 110 bp, synthetic construct
  source 1..110: mol_type = other DNA
aaatccagcctacccagacttctctgcctagagataccggctggtaacaagcaatcatttgcaaaagctgttttcagtaaaacacacatttttatcttgacactgcaggc

SEQ ID NO: 4673 - DNA, 110 bp, synthetic construct
  source 1..110: mol_type = other DNA
ttccagaaggaatcagaagtgcattaatacctcctttccagaccacttatatacatcatggatcagagcagttctgcctaatcactttagaaaagaaagactcctcctgc

SEQ ID NO: 4674 - DNA, 110 bp, synthetic construct
  source 1..110: mol_type = other DNA
catcttcagcatagaagatactcaagacattttttaaaataaaagaacaaaagataacacggagccatagctgaaaacagaatataatcctagatggaagagaggtttat

SEQ ID NO: 4675 - DNA, 110 bp, synthetic construct
  source 1..110: mol_type = other DNA
ctctcacctctctgagtaactggaaatttactttaaaggccaattgaaaaatcacttctgctgctaagttcccctgatttcctcaacaggaattattccctactatatat

SEQ ID NO: 4676 - DNA, 110 bp, synthetic construct
  source 1..110: mol_type = other DNA
tccttggcactaccgatatctggggccagatagtgttttgctgtgtaagctgtcctgtgcactgcaggatgtttagcatccctagcctctctatctgctaaatagatgtc

SEQ ID NO: 4677 - DNA, 110 bp, synthetic construct
  source 1..110: mol_type = other DNA
gtctgcatcagatttctatgattcagttcattcaaccgatgcttcctaagcactatttttgagctaacactatgctagatgctagatgctagatgctgaggctgcaaaga

SEQ ID NO: 4678 - DNA, 110 bp, synthetic construct
  source 1..110: mol_type = other DNA
ttctggaggagagaagatgaaaaaacaatgggaatagagaaagaggaagagatgataggaaaactccaaaggggaaagcttttctgctgttcatagaattattatggaga

SEQ ID NO: 4679 - DNA, 110 bp, synthetic construct
  source 1..110: mol_type = other DNA
ctttatgaatctatcactctaggtttaactacaacccttaagttcaaatggaaataaaaggcagaggaaatattcagctaagctcactgttggtttaagatgagcagcta

SEQ ID NO: 4680 - DNA, 110 bp, synthetic construct
  source 1..110: mol_type = other DNA
atatcatttttcttccaacattgctgtttctattttttctagttcctgtcatcatgcgtccatttacaaagctaagaatttttttttctttttatggcttgtgcctgtgg

SEQ ID NO: 4681 - DNA, 110 bp, synthetic construct
  source 1..110: mol_type = other DNA
ctaatggatactagtcgattttggtaccgctggccacaatgtgaactccaaaatcctttcctttgagtcctgggctaacttgtcctgaggatgtttatttgcttctttgt

SEQ ID NO: 4682 - DNA, 110 bp, synthetic construct
  source 1..110: mol_type = other DNA
aagtataagtcacagtataaaaacgctaaagggagaaaagcagaatagcttttcaggaagaggaataaattactgcacaagtcctttggagaaactggcaaggacccata

SEQ ID NO: 4683 - DNA, 110 bp, synthetic construct
  source 1..110: mol_type = other DNA
aagaacttttgtcaaaatagagcagctcagccctcagtgtgctctggactggaatgtaataaagatgatctctctaatatcttatatttattccagattgcgttaggaga

SEQ ID NO: 4684 - DNA, 110 bp, synthetic construct
  source 1..110: mol_type = other DNA
ggttggctcttttgtctcctttcatccattctttttcagtcccatctgcatttctgtagcatgaaagctcctggattttgaggccaatatgaggtaggatcaatcatcct

SEQ ID NO: 4685 - DNA, 110 bp, synthetic construct
  source 1..110: mol_type = other DNA
gtagcatgaaagctcctggattttgaggccaatatgaggtaggatcaatcatcctccatatccactcaaccaacacacacacacacaaacacaccatgcccagaatagcc

SEQ ID NO: 4686 - DNA, 110 bp, synthetic construct; identical to SEQ ID NO: 4684
  source 1..110: mol_type = other DNA

SEQ ID NO: 4687 - DNA, 110 bp, synthetic construct; identical to SEQ ID NO: 4685
  source 1..110: mol_type = other DNA

SEQ ID NO: 4688 - DNA, 110 bp, synthetic construct
  source 1..110: mol_type = other DNA
accacaattcagccctttcaaactgtttctgtgcagccagtgccagtcttctatccaggtctatccacgaagctcaagtttcagcatccagccccggtgtgcaccagcag

SEQ ID NO: 4689 - DNA, 110 bp, synthetic construct
  source 1..110: mol_type = other DNA
ttccttagatgagtttgctttgtgtcctttcgctgtaaccacagctgtgagtacgactgaatgctgagtcctgtgagttttcctagtgaatcactaaatctggaagtgcc

SEQ ID NO: 4690 - DNA, 110 bp, synthetic construct
  source 1..110: mol_type = other DNA
gttctctctttgcaagattctactattcttaagctttaagttctgtgtttctttgtgaaagaggtagaaagaaaggctggaattgcccttgattgagataaaccaagaca

SEQ ID NO: 4691 - DNA, 110 bp, synthetic construct
  source 1..110: mol_type = other DNA
tctagttctgatgagaaatagctagaatgtgactttttacagaaaaacaaactctataaaaattttttttgacagtttgtacaaccacttctatctctgatggaaagtag

SEQ ID NO: 4692 - DNA, 110 bp, synthetic construct
  source 1..110: mol_type = other DNA
agaccatgtgtgagtcggcaggaccacttcaagttgaagaatgtttcttggtcgttgcaaaaattctactttgaacaaagcctgagctggtgacggtgggagtggaagac

SEQ ID NO: 4693 - DNA, 110 bp, synthetic construct
  source 1..110: mol_type = other DNA
gaaagacagtgctacactcaggacaaagctacaaagaattctgcctctaagaattactcttggtagtggagcaggaaaatgtcaataggcccctcaaaggtcttgagaga

SEQ ID NO: 4694 - DNA, 110 bp, synthetic construct
  source 1..110: mol_type = other DNA
ctagtactctccagcgcaaaaacgacacgcgacgcatcacgtgacagctgagccagccatcggtcacgtgatccttcggaagcccgggatgtggggaggaagtagtagca

SEQ ID NO: 4695 - DNA, 110 bp, synthetic construct
  source 1..110: mol_type = other DNA
cacatgttatagacgctgcaagcaagtgagggtctagggcgaactgtgttttttggcaaggagaacagagagggatttgcagccacagcccaatcagtaagtttgttgcc

SEQ ID NO: 4696 - DNA, 110 bp, synthetic construct
  source 1..110: mol_type = other DNA
caccgtaggaactcccttcatctaactttaaagcactgtatttctcacctgagtagtgtttctgttctatgaagcacctccttccaacttggagtgattggccatgaatg

SEQ ID NO: 4697 - DNA, 110 bp, synthetic construct
  source 1..110: mol_type = other DNA
gtgtttctgttctatgaagcacctccttccaacttggagtgattggccatgaatggtggacattgatctgctgtcctagaacattaggacagaattaacttaagtgggat

SEQ ID NO: 4698 - DNA, 110 bp, synthetic construct
  source 1..110: mol_type = other DNA
acttcttgaaaacagtgagcaaatcagtgaggctcactaggagaagctctaggctggccccatctctttgttaaacctgcttagaaatgaggttaagtaaaggttcttgg

SEQ ID NO: 4699 - DNA, 110 bp, synthetic construct
  source 1..110: mol_type = other DNA
ttccctccgtggcttccctgtactgagcagtccctggaactcctcattgttagtctctttaaccatgaggtgtatgggactctgggggagggagctattcatcctgtata

SEQ ID NO: 4700 - DNA, 110 bp, synthetic construct
  source 1..110: mol_type = other DNA
tcactatgattagaaactcttcaaatgtctttcaataggtattggttaggtcaattgtggtaaacccataaaatgtctttttaaaaagtgattttcagcaaagtcagaat

SEQ ID NO: 4701 - DNA, 110 bp, synthetic construct
  source 1..110: mol_type = other DNA
acaatgaactttacttgtcctcttaagactctgtccccttaaagttttcttttgcattctgatattagtgtcagaacctagagggaaattgaaaagacattagaagttct

SEQ ID NO: 4702 - DNA, 110 bp, synthetic construct
  source 1..110: mol_type = other DNA
gataagttcagccgttttagtagttcagactcatgctcccagtgatcacagtgattaacttgttatggtagttcctaaactcagatatttaactccttttcctttacttc

SEQ ID NO: 4703 - DNA, 110 bp, synthetic construct
  source 1..110: mol_type = other DNA
caagaagcacaaatcaggtaagctaacagaaaagtatgagagttagattttaggatacttcaactagttctttcaattagaaatcatggaaggctctgattgacagaatg

SEQ ID NO: 4704 - DNA, 110 bp, synthetic construct
  source 1..110: mol_type = other DNA
ttaaaaacaatatttgaacatctttcttccaaggaaagttccaattaaaagcggtaagtgttgtatttttaaatcagccagagaattaatgctgcatactcccagcatgg

SEQ ID NO: 4705 - DNA, 110 bp, synthetic construct
  source 1..110: mol_type = other DNA
aatcaagaaatttttattgaccacatatactacattcatgttttgtgttaagaggaggaaataaaccttctccttttggtgcgcaaaaccagacatgattcctgctttca

SEQ ID NO: 4706 - DNA, 110 bp, synthetic construct
  source 1..110: mol_type = other DNA
aggaaataaaccttctccttttggtgcgcaaaaccagacatgattcctgctttcatggagcttacagtctagtgaggaagatactaaataatgacatgcatacaaggtgc

SEQ ID NO: 4707 - DNA, 110 bp, synthetic construct; identical to SEQ ID NO: 4705
  source 1..110: mol_type = other DNA

SEQ ID NO: 4708 - DNA, 110 bp, synthetic construct; identical to SEQ ID NO: 4706
  source 1..110: mol_type = other DNA

SEQ ID NO: 4709 - DNA, 110 bp, synthetic construct
  source 1..110: mol_type = other DNA
tactctgagttatgccctaagagagcctctccaaacactgacttctatgggttttctaacagctttctggtatcccagaggtatctgttattgctgtcactgtttaattt

SEQ ID NO: 4710 - DNA, 110 bp, synthetic construct
  source 1..110: mol_type = other DNA
ctaacagctttctggtatcccagaggtatctgttattgctgtcactgtttaatttaggatcatagaagtaaaataataggatctatattactcataatgaccaatactca

SEQ ID NO: 4711 - DNA, 110 bp, synthetic construct
  source 1..110: mol_type = other DNA
tccaactaagcctttttctgctccatatttgtatcgctataaattaaaacaccttagtggagtctacgtaaggttgtaccgaattagtgttttctcaacttgttttaaaa

SEQ ID NO: 4712 - DNA, 110 bp, synthetic construct
  source 1..110: mol_type = other DNA
agtggagtctacgtaaggttgtaccgaattagtgttttctcaacttgttttaaaatttttccataaagttgtttcaaacatgctgttcatgaggggtagttttagtctgt

SEQ ID NO: 4713 - DNA, 110 bp, synthetic construct
  source 1..110: mol_type = other DNA
cttcccacttctaataaattccccagggtgggccgaatctgatatagactcatgacttctcacacagtgatgactggggttcaagcttccaagacagaatctgatagaac

SEQ ID NO: 4714 - DNA, 110 bp, synthetic construct
  source 1..110: mol_type = other DNA
tcccttcttatgtgggaagggagaatatttttctgagtaaaagtattgccagaagtacgggtgacacacaccccaatgttcatagcagctgtttacaatagccaagatag

SEQ ID NO: 4715 - DNA, 110 bp, synthetic construct
  source 1..110: mol_type = other DNA
agtaaaagtattgccagaagtacgggtgacacacaccccaatgttcatagcagctgtttacaatagccaagatagggaagcaatctaagtgtccaccgacagatgaatgg

SEQ ID NO: 4716 - DNA, 110 bp, synthetic construct; identical to SEQ ID NO: 4714
  source 1..110: mol_type = other DNA

SEQ ID NO: 4717 - DNA, 110 bp, synthetic construct
  source 1..110: mol_type = other DNA
tatttttctgagtaaaagtattgccagaagtacgggtgacacacaccccaatgttcatagcagctgtttacaatagccaagatagggaagcaatctaagtgtccaccgac

SEQ ID NO: 4718 - DNA, 110 bp, synthetic construct
  source 1..110: mol_type = other DNA
gagcgggcccagcccagctcagatccaggatggggaaaggaggaatgagaactaaaggaatcctcataaaggacgctggcatactctcacaagtgaattctgaccacata

SEQ ID NO: 4719 - DNA, 110 bp, synthetic construct
  source 1..110: mol_type = other DNA
aggaatcctcataaaggacgctggcatactctcacaagtgaattctgaccacatagccgactacatcgccaaaataagtgatctcacgaagctaatgacatttgtgtcaa

SEQ ID NO: 4720 - DNA, 110 bp, synthetic construct
  source 1..110: mol_type = other DNA
actaggccctcacaggttctttgagaattctaacctctagcctctaatttcattgtattttttctctatctcaatttcttcatgagcttaaaaaatggcatttcatcgta

SEQ ID NO: 4721 - DNA, 110 bp, synthetic construct
  source 1..110: mol_type = other DNA
aaaatgttagtttttatttattttttttaaggccacaccaatggtatatggaaatccctaggtcagagattgaatctgtgccgcagctgtgactgacactgtagctgcag

SEQ ID NO: 4722 - DNA, 110 bp, synthetic construct
  source 1..110: mol_type = other DNA
ccctaggtcagagattgaatctgtgccgcagctgtgactgacactgtagctgcagcaatgccaaaacctttaatccactgcaccaggccagggatggaacctgtgtgcct

SEQ ID NO: 4723 - DNA, 110 bp, synthetic construct
  source 1..110: mol_type = other DNA
tatgttgttacagtggtcaaagtttctgtcacatgtgcttcagcactgggttctccttaaccccaaaaggtaaaatgctctcagggctctaatctcaaagccaagatgaa

SEQ ID NO: 4724 - DNA, 110 bp, synthetic construct
  source 1..110: mol_type = other DNA
cttaaccccaaaaggtaaaatgctctcagggctctaatctcaaagccaagatgaaatggactactaattacctggtgaatgggcttgtttaaatctctaatccaggcacc

SEQ ID NO: 4725 - DNA, 110 bp, synthetic construct
  source 1..110: mol_type = other DNA
tatgagcaatctgaaattaagatatcttatagacttagacaatttttttctcccgccccctgacttcaacaattttaacatctgtatgttcaaatatgatattttagaga

SEQ ID NO: 4726 - DNA, 110 bp, synthetic construct
  source 1..110: mol_type = other DNA
tattctctttgttctggagattgagactaaggcccatttctccctgcagaactagtaggaatttccttgcgaagctttgaatctgaatttaaaatgcatgttaacatttc

SEQ ID NO: 4727 - DNA, 110 bp, synthetic construct
  source 1..110: mol_type = other DNA
cactttggtctcatgctatcagaaccagacttgttagaaacactaaaattgtttaagagacacaaagctattaacttttcaagtataaaaaatatttttcctgatgcttt

SEQ ID NO: 4728 - DNA, 110 bp, synthetic construct
  source 1..110: mol_type = other DNA
ttagatgaaaaagtatttttaaaccttcagcacagttattaaatgcctattgtggttgtgatagtgacagtttatagaaatccccaagctgggaggtgtaagaaatatgt

SEQ ID NO: 4729 - DNA, 110 bp, synthetic construct; identical to SEQ ID NO: 4728
  source 1..110: mol_type = other DNA

SEQ ID NO: 4730 - DNA, 110 bp, synthetic construct
  source 1..110: mol_type = other DNA
taccaataagtcacagcattacccatggctagtcttacaagtaggcagatcaagctaactgccatgcactttgtaggatttgagggctagcagaaaggcctgtctcccaa

SEQ ID NO: 4731 - DNA, 110 bp, synthetic construct
  source 1..110: mol_type = other DNA
agcaggaaatagacagccaggctagctgcactctcgggaaatgtgagtcccacatcaacttcagccaagaactcactattagcaggtgactgccctctctttttcatccg

SEQ ID NO: 4732 - DNA, 110 bp, synthetic construct
  source 1..110: mol_type = other DNA
caatcatctaagaagatggagggaacagccctgggaccacaatattaacagccaccagggaatagggtcccgtgaacccaccacttaaacccagctctcctagagagaac

SEQ ID NO: 4733 - DNA, 110 bp, synthetic construct
  source 1..110: mol_type = other DNA
cagggaatagggtcccgtgaacccaccacttaaacccagctctcctagagagaacccaaccctctgggcagccagtgactgatcctcatccctgctggggacccaaccca

SEQ ID NO: 4734 - DNA, 110 bp, synthetic construct
  source 1..110: mol_type = other DNA
aacagtgagccctcttgatcagctgattctcaatagtaggtaaaagtgatttgcttaaagtctcaagtgaactgtgctgaggagtcacatgggccacatttaggctgtca

SEQ ID NO: 4735 - DNA, 110 bp, synthetic construct
  source 1..110: mol_type = other DNA
taaagtctcaagtgaactgtgctgaggagtcacatgggccacatttaggctgtcattggctgaactgttatcttttcattttattgtagttattaatttatggtttgata

SEQ ID NO: 4736 - DNA, 110 bp, synthetic construct
  source 1..110: mol_type = other DNA
aggaatttgcacagttgatggtagaatgatgactctggctgcagatcagagatttaatcacttatctatgatgggtcagcaaattctatgtgcccaaagtcactctaaac

SEQ ID NO: 4737 - DNA, 110 bp, synthetic construct
  source 1..110: mol_type = other DNA
ctttaccaactgtataatccaggggtccctgccctctggctttagctgggttcagccaaggagaggcactatctatggatcttaagacaaaaaagagagaggagtcagag

SEQ ID NO: 4738 - DNA, 110 bp, synthetic construct
  source 1..110: mol_type = other DNA
tccaccactataatctggttccttgcaggcactctcaggcagcagatcacagcctaatccagctccaggaatgatataaggaatagttagttgctacctggctgaggagg

SEQ ID NO: 4739 - DNA, 110 bp, synthetic construct
  source 1..110: mol_type = other DNA
aatccagctccaggaatgatataaggaatagttagttgctacctggctgaggaggggtcgagggaacagctgccaccagctacagggagtggttatacaaaccaccagag

SEQ ID NO: 4740 - DNA, 110 bp, synthetic construct
  source 1..110: mol_type = other DNA
tgctccatgttccccacccattctaccctcaaattgattgacctgctcaacaagatactaaatagtgactaattatagcatcattgaattacaacaccctatgagtaata

SEQ ID NO: 4741 - DNA, 110 bp, synthetic construct
  source 1..110: mol_type = other DNA
tactaaatagtgactaattatagcatcattgaattacaacaccctatgagtaatactatggggctagagatgcttgtacagctatataatcatcaaattatcttacctct

SEQ ID NO: 4742 - DNA, 110 bp, synthetic construct
  source 1..110: mol_type = other DNA
taagtcttgaaggagtggaatctaggggtgtttaaggattggtgtctctctaggaccactgagctaacaaaggataaagaaaggacccatttctacaactagtaccattc

SEQ ID NO: 4743 - DNA, 110 bp, synthetic construct
  source 1..110: mol_type = other DNA
cagcagagcattaaactaagtgtggagcccttctaagagtgaggccttgtccaactccacagcttatatgcccataaagctagccctggaattagaattatctcagcttc

SEQ ID NO: 4744 - DNA, 110 bp, synthetic construct
  source 1..110: mol_type = other DNA
ctgtaattaggagggagtgactggctcaatgagttaggaagggcttcgctgaggagtgacatttgagctgcatctttgaggatatgcaaattatgtccagggcacacagg

SEQ ID NO: 4745 - DNA, 110 bp, synthetic construct
  source 1..110: mol_type = other DNA
taacagggcttgagtgcaggagctccacagaactggagaaaacagagactccactgctggaagatgcatacaagctctcacaaacaccaggacccagggcaataagtgac

SEQ ID NO: 4746 - DNA, 110 bp, synthetic construct
  source 1..110: mol_type = other DNA
gctggaagatgcatacaagctctcacaaacaccaggacccagggcaataagtgacttcataggatcctgggccagacctatctgttgatcttggagcgtctcttggggag

SEQ ID NO: 4747 - DNA, 110 bp, synthetic construct; identical to SEQ ID NO: 4745
  source 1..110: mol_type = other DNA

SEQ ID NO: 4748 - DNA, 110 bp, synthetic construct
  source 1..110: mol_type = other DNA
agactccactgctggaagatgcatacaagctctcacaaacaccaggacccagggcaataagtgacttcataggatcctgggccagacctatctgttgatcttggagcgtc

SEQ ID NO: 4749 - DNA, 110 bp, synthetic construct
  source 1..110: mol_type = other DNA
gatcaaagaatggaaagtctccagctcttgctttagaacacatgctctcttgggaagcctgtaggcaagactgctttatagggttcttctctgcagaaggatgggagggg

SEQ ID NO: 4750 - DNA, 110 bp, synthetic construct
  source 1..110: mol_type = other DNA
ctgttcttcattgaattgtcttggcatatctgttgaatggaaactggaattttaaaattgtccctggtgcaaagttgagatcaaagctcactgaggatgcatcactagaa

SEQ ID NO: 4751 - DNA, 110 bp, synthetic construct
  source 1..110: mol_type = other DNA
aattgtccctggtgcaaagttgagatcaaagctcactgaggatgcatcactagaatgcattactaggtctcttctgcctttccacattagacaaggatctctatgtgttc

SEQ ID NO: 4752 - DNA, 110 bp, synthetic construct; identical to SEQ ID NO: 4750
  source 1..110: mol_type = other DNA

SEQ ID NO: 4753 - DNA, 110 bp, synthetic construct; identical to SEQ ID NO: 4751
  source 1..110: mol_type = other DNA

SEQ ID NO: 4754 - DNA, 110 bp, synthetic construct
  source 1..110: mol_type = other DNA
actgggagataaacaaagaacacggtgacattgtcacctggctgcctctcctgactctttttccatcatttattggtcttccagagctgagtcacattgacaagttcaac

SEQ ID NO: 4755 - DNA, 110 bp, synthetic construct
  source 1..110: mol_type = other DNA
cttggcactaaaaatcacatttgtagccttttttctaggactgtatccactgtcagactccatcattatgccttggctttcagtttgagagtatagttgaaactcttata

SEQ ID NO: 4756 - DNA, 110 bp, synthetic construct
  source 1..110: mol_type = other DNA
gactccatcattatgccttggctttcagtttgagagtatagttgaaactcttatagctgacaagtctgtgatagcacaggtagctctcagttccttctgctttggtttac

SEQ ID NO: 4757 - DNA, 110 bp, synthetic construct
  source 1..110: mol_type = other DNA
agaggtgctcccaccatggccgctgcccccgcccttgccagggtccccgcgcgccagcactaccgcgtgcaactgcgcttcgtcaccgaagagcagcttttctccacggg

SEQ ID NO: 4758 - DNA, 110 bp, synthetic construct
  source 1..110: mol_type = other DNA
tatatacatatatatatctcacatcttctctatccttttttatccatccctgcgcacttatcttgacatcacttgcttccatatcttgactattgtagataaagctacaa

SEQ ID NO: 4759 - DNA, 110 bp, synthetic construct
  source 1..110: mol_type = other DNA
ctgcctctgacaaatagttaatgaactaagcttgctgaagcacatagataaaagtcatcacttctccccaggtctgcccctgccttgtagcacatgctggacttaactct

SEQ ID NO: 4760 - DNA, 110 bp, synthetic construct
  source 1..110: mol_type = other DNA
cttctcacaaaacaatctgatctttcttcctccacaataacaaagttcccttgattctgtcaagttaaatattgctttcttttgtactttttttccccagtttattaagt

SEQ ID NO: 4761 - DNA, 110 bp, synthetic construct
  source 1..110: mol_type = other DNA
ttacctgctcttcaatcacattttggtatcaagtgacatttttaaaaggccaaaatagttttgtcaaagccagtcattccgttcaaaggattcttttccctctgtgcacg

SEQ ID NO: 4762 - DNA, 110 bp, synthetic construct
  source 1..110: mol_type = other DNA
tctagtctagaaggagctctggagatgagttaagactctgaagacaagtccagttgtagtcgaggaaggaaggacatacacaccaagtgtaattccgttaggccactgga

SEQ ID NO: 4763 - DNA, 110 bp, synthetic construct
  source 1..110: mol_type = other DNA
ggctgggctcacacaaccagctaaaagttactgaacctgctagagaagctgtcagtattcataactgcttactagagtcaaacagcctaagacaaggtaccaattctgct

SEQ ID NO: 4764 - DNA, 110 bp, synthetic construct
  source 1..110: mol_type = other DNA
tattcataactgcttactagagtcaaacagcctaagacaaggtaccaattctgctactaattcttactagggcagccatttctccttactagggtgacccatgccaggtg

SEQ ID NO: 4765 - DNA, 110 bp, synthetic construct
  source 1..110: mol_type = other DNA
gctccttcatgctcagctcctttgctgggcctgctgagctggcagtctgcatccacctcattgtctttcctccaacaaaggtagactctctaaccacattggttcttagt

SEQ ID NO: 4766 - DNA, 110 bp, synthetic construct
  source 1..110: mol_type = other DNA
gtccctcttacccatcagtggcattgtgtctccaaagccatgctggtttcacaagactgcctgccacttggcactgcttcagcatgtgaatatttacattgacgacttct

SEQ ID NO: 4767 - DNA, 110 bp, synthetic construct
  source 1..110: mol_type = other DNA
gatggggatccatcaggttgatggatgcagggaaagtgtggagcctggagggggcatggaaaggccatgccctttccccacatcttgccctgtgcatctctttatctggt

SEQ ID NO: 4768 - DNA, 110 bp, synthetic construct
  source 1..110: mol_type = other DNA
ccttaggacaagaggatctgaatagtctatttcccacacctgacagattatggcatacatcatgtaatagcagaatggactagtggaatgtgatttcaaatcacccttcc

SEQ ID NO: 4769 - DNA, 110 bp, synthetic construct
  source 1..110: mol_type = other DNA
tacatcatgtaatagcagaatggactagtggaatgtgatttcaaatcacccttccacagaaaaggaaactcggacccagaatgaaatggttgggccaggactagctccca

SEQ ID NO: 4770 - DNA, 110 bp, synthetic construct
  source 1..110: mol_type = other DNA
ttttgcctccctctctcactccaggaaatgacttcttttcaccgtcagagtctccttgtgtcagagctgatccacattctctgagaggagtgcccaagtgagacatatct

SEQ ID NO: 4771 - DNA, 110 bp, synthetic construct
  source 1..110: mol_type = other DNA
agcaagaagtggatctagaatttggcagcctggtttggggtccaagctcataaccactctgccatgtcattcttgtcttgtgttcagaagcaataagaggccaggtgtcc

SEQ ID NO: 4772 - DNA, 110 bp, synthetic construct
  source 1..110: mol_type = other DNA
catactcagttatcttgacagaagtgtgacagaagtagatgtagaagcctgggcaagaggagaggagagtgagtagagagatttgtgaatggcagcaacagagaagaacc

SEQ ID NO: 4773 - DNA, 110 bp, synthetic construct
  source 1..110: mol_type = other DNA
agaggagaggagagtgagtagagagatttgtgaatggcagcaacagagaagaaccatgctttgtattagctagcattttccagagaaatagaaccaatagggtggatgta

SEQ ID NO: 4774 - DNA, 110 bp, synthetic construct
  source 1..110: mol_type = other DNA
atggagtttattcttctgttagagttggaaaaattttaaagtaacgaagttatatggtcagctgtacattttttaaaagtcactctagtcaaataggggataagcgtgat

SEQ ID NO: 4775 - DNA, 110 bp, synthetic construct
  source 1..110: mol_type = other DNA
ggtcagctgtacattttttaaaagtcactctagtcaaataggggataagcgtgatgtgtctctcctatatccttctttcccactatgtcttcctgcccatagcctgtgga

SEQ ID NO: 4776 - DNA, 110 bp, synthetic construct; identical to SEQ ID NO: 4774
  source 1..110: mol_type = other DNA

SEQ ID NO: 4777 - DNA, 110 bp, synthetic construct; identical to SEQ ID NO: 4775
  source 1..110: mol_type = other DNA

SEQ ID NO: 4778 - DNA, 110 bp, synthetic construct
  source 1..110: mol_type = other DNA
aaagctggacaagagctgtagaatgagtctaaagagagactagtccatggttgtgaaagaaatatctcaaaaataaaaaatatacttgtttgaagagaaaatgcatctgg

SEQ ID NO: 4779 - DNA, 110 bp, synthetic construct; identical to SEQ ID NO: 4778
  source 1..110: mol_type = other DNA

SEQ ID NO: 4780 - DNA, 110 bp, synthetic construct
  source 1..110: mol_type = other DNA
aagatatttttgctgaatagttagaatttgggctccaggttttgaagcctggaatggagcagtaagaggcattgaagagaagtatctgaagctcctcctaggaaacctaa

SEQ ID NO: 4781 - DNA, 110 bp, synthetic construct
  source 1..110: mol_type = other DNA
ggagcagtaagaggcattgaagagaagtatctgaagctcctcctaggaaacctaaagaggtcccaagtcccccactgctacctcacaatgcatctttggtttcttctttt

SEQ ID NO: 4782 - DNA, 110 bp, synthetic construct
  source 1..110: mol_type = other DNA
cacttctctagatagaaagtagaagttagacacttgtagaggatagaatttccggcctgctttgcagctcaatgagactacatgaccatatttttgtttttgttgttgtt

SEQ ID NO: 4783 - DNA, 110 bp, synthetic construct
  source 1..110: mol_type = other DNA
cattcctcaggtatttttgaatgtctacaattttctaggtcctaagaaaaacaacatgaaaaatcctgatctcaccacacttattctaagagaggagactggcagtaagc

SEQ ID NO: 4784 - DNA, 110 bp, synthetic construct; identical to SEQ ID NO: 4783
  source 1..110: mol_type = other DNA

SEQ ID NO: 4785 - DNA, 110 bp, synthetic construct
  source 1..110: mol_type = other DNA
attccagctcctttcctatcagatcacatggtttggttgcctcattacaaccatatgacctgcctttcctagagctggagctgcaattttcttggttcaatccactttcc

SEQ ID NO: 4786 - DNA, 110 bp, synthetic construct
  source 1..110: mol_type = other DNA
tgacctgcctttcctagagctggagctgcaattttcttggttcaatccactttccccttctggcctatgaatgtaagggctccattgttgcctactccaagaagtggcaa

SEQ ID NO: 4787 - DNA, 110 bp, synthetic construct
  source 1..110: mol_type = other DNA
aacccaactgttggcaaaatctgaagtgctagctgccagtttttaatttctgtattcagtgatatctggagtcacttccagcaaacggttattctgtgaaatttacccag

SEQ ID NO: 4788 - DNA, 110 bp, synthetic construct
  source 1..110: mol_type = other DNA
tcagtgatatctggagtcacttccagcaaacggttattctgtgaaatttacccagggctacagctaaaatacaatttccacagatagaagatgtaactacatcaaggcat

SEQ ID NO: 4789 - DNA, 110 bp, synthetic construct
  source 1..110: mol_type = other DNA
atgggttaattatgctgatgtgctttatgcatgcttgagttatttgtatgggagattcaacgtgatgatcaacaagctctggaacagaataaacatactgtatatatgta

SEQ ID NO: 4790 - DNA, 110 bp, synthetic construct
  source 1..110: mol_type = other DNA
ttcaacgtgatgatcaacaagctctggaacagaataaacatactgtatatatgtaaactaatcatgtcttactgttgtgcagcatggcccccataatggttttcccatct

SEQ ID NO: 4791 - DNA, 110 bp, synthetic construct
  source 1..110: mol_type = other DNA
gccttggcttattaggctggcaccttcatgaatggaattagtgctcttatagaccccagtgagctccccagcccatccaccatgtgaggacactcacaggaagatgtctg

SEQ ID NO: 4792 - DNA, 110 bp, synthetic construct
  source 1..110: mol_type = other DNA
ccagtgagctccccagcccatccaccatgtgaggacactcacaggaagatgtctgcaacacggaagaagaccctcccctgaccatgctggcaccctgatcttagacttcc

SEQ ID NO: 4793 - DNA, 110 bp, synthetic construct
  source 1..110: mol_type = other DNA
tcacccctaacatgtcatgaacatagtactgttcaataaacatctttcctgtgacactgaccaagtcacccaaagttttgctaagtcacaagagtgagaaacaatgagga

SEQ ID NO: 4794 - DNA, 110 bp, synthetic construct
  source 1..110: mol_type = other DNA
actgaccaagtcacccaaagttttgctaagtcacaagagtgagaaacaatgaggaacaaattccagtgtctgaagacattgcacacagctaccaacctggtacaacttgg

SEQ ID NO: 4795 - DNA, 110 bp, synthetic construct
  source 1..110: mol_type = other DNA
agctacacttccagaacaaataccataagtgtgcttagctaatatgttaaaaagatctgcatccttatctcattgtttccaggacctttttttgtttaactaactagtat

SEQ ID NO: 4796 - DNA, 110 bp, synthetic construct
  source 1..110: mol_type = other DNA
tctgcatccttatctcattgtttccaggacctttttttgtttaactaactagtattaagtttaacagggattttctagggaactcttaaggatggaggtagaaaaggagt

SEQ ID NO: 4797 - DNA, 110 bp, synthetic construct
  source 1..110: mol_type = other DNA
cagacactagctttttcacctcgacagagaaactatttacttcagcaaattctaggtctattagaaaacagtgtcaattttattgctttttgaaatgctatgtaaagcct

SEQ ID NO: 4798 - DNA, 110 bp, synthetic construct
  source 1..110: mol_type = other DNA
taaagtttacatttagctttgagaacagtaatgtaaataccacacctgataccttgtggattttttaaggctgcacttgaggctttttgaccagctaagtcaccactgtg

SEQ ID NO: 4799 - DNA, 110 bp, synthetic construct
  source 1..110: mol_type = other DNA
cttgcagaagtggtgtcttgaaggagtcagaggggggttttgaggggcactcacgcgtgcacatccccacaaggtgaacgaatgctttccgtgccttgaatctgctgctg

SEQ ID NO: 4800 - DNA, 110 bp, synthetic construct
  source 1..110: mol_type = other DNA
aacttcagtctagtgcttaagagcagcaaaccaagtaactcatgaaaagcttgtgcaagaggaaccacattgcagggctatatttcatggaaccttagaatgctcaaaag

SEQ ID NO: 4801 - DNA, 110 bp, synthetic construct
  source 1..110: mol_type = other DNA
attttacgatacatacataagttcgaattggtaaaattgatcacattgttccatagttaaaagattaaaaaagctgaagaaagaagtttcttcctgctactggcccagtc

SEQ ID NO: 4802 - DNA, 110 bp, synthetic construct
  source 1..110: mol_type = other DNA
tttacaggtaagaagcttagattgggcacaatactagcaaatggaatgctgggaactgacacctagcatcaccaaaggccaaaaaccacgtgcacatcaggccaaactct

SEQ ID NO: 4803 - DNA, 110 bp, synthetic construct
  source 1..110: mol_type = other DNA
cctcactcatcaccactgctggttaaagggtctgcactaacagagatgtgggtctccagaggcgtctacagctgacagtcatgaggtctcataggatggagccactatgg

SEQ ID NO: 4804 - DNA, 110 bp, synthetic construct
  source 1..110: mol_type = other DNA
ccagaggcgtctacagctgacagtcatgaggtctcataggatggagccactatggaaaatttaccacattgcataaccctaattcagagtctggcccaaggtttttcagg

SEQ ID NO: 4805 - DNA, 110 bp, synthetic construct
  source 1..110: mol_type = other DNA
tcgggttcgttaatcaccgggccacaatgggaactcctgacttcatttcttccctgatgaagttactagctccatcattcattagatttaggctgaaagttcctaatatg

SEQ ID NO: 4806 - DNA, 110 bp, synthetic construct
  source 1..110: mol_type = other DNA
tccttttaagaagataccagagcccttcctctctccaccctgtgaggatagagcaggtaagtagcctttcacagagtgggaagctgactcaccagaggcacctcacttgg

SEQ ID NO: 4807 - DNA, 110 bp, synthetic construct
  source 1..110: mol_type = other DNA
tcacctgtgccatttcccttctcaactgctggcctcaccaagattcctttctatcagaaatctcactgcctgatctaggctgggttctggtaggtgaatttaagaacaag

SEQ ID NO: 4808 - DNA, 110 bp, synthetic construct
  source 1..110: mol_type = other DNA
aagaagcccaaaactggagagaagtattaccttctaagcatttctaagaatagagggtggccttggcatttccacagtgtacagaacagctaaagaatattcactttgca

SEQ ID NO: 4809 - DNA, 110 bp, synthetic construct
  source 1..110: mol_type = other DNA
gtgttcagagcacacagcagagaactgagtaccaccaaaaaggtgtctgctgtgtgctgagtattgccctgtgaagcagcaagacaaaacagagaagtgtgggaaaagca

SEQ ID NO: 4810 - DNA, 110 bp, synthetic construct
  source 1..110: mol_type = other DNA
gattttcactctctttcccctctcagtccccaggaactcatgctccgctcgacattggcttccgcggaacatgaacctgcaagcttgaagccgccccttctccccaccgc

SEQ ID NO: 4811 - DNA, 110 bp, synthetic construct
  source 1..110: mol_type = other DNA
tatttaaccttccaagatttctgtctgttgtaattaaggagctctaggagtagagcagatcactctaagctgagtaaaaatctgaaatgatggaatttcatatgacaagg

SEQ ID NO: 4812 - DNA, 110 bp, synthetic construct
  source 1..110: mol_type = other DNA
cagatcactctaagctgagtaaaaatctgaaatgatggaatttcatatgacaaggggagatattttggggaaagttgaattttccaaatgagccaggaaggtgggtacct

SEQ ID NO: 4813 - DNA, 110 bp, synthetic construct; identical to SEQ ID NO: 4811
  source 1..110: mol_type = other DNA

SEQ ID NO: 4814 - DNA, 110 bp, synthetic construct; identical to SEQ ID NO: 4812
  source 1..110: mol_type = other DNA

SEQ ID NO: 4815 - DNA, 110 bp, synthetic construct
  source 1..110: mol_type = other DNA
cttaaccttcatcttttgggccctggccactcttctgttagacgatagtgacatcactgcaagctgtaataggatttgaataggattatttgggaataataggaagtaaa

SEQ ID NO: 4816 - DNA, 110 bp, synthetic construct
  source 1..110: mol_type = other DNA
aagaagagccaatggtataaattctgatccaagtctgaaggcctgagaagcagtacagctgatggtataagctccagtctgagtccaggtctaaaggcaggaggagacca

SEQ ID NO: 4817 - DNA, 110 bp, synthetic construct
  source 1..110: mol_type = other DNA
gagttgcatcaactttttggttcctaagaccaatgggttactattagcctttaaaaatttgaaaaagccatatttaaaaaaatggaactcataatatatacatggggggg

SEQ ID NO: 4818 - DNA, 110 bp, synthetic construct
  source 1..110: mol_type = other DNA
atcttcccagattccagaacccaagtgataccttcattagctggtggccctgagtcacactaaagctgcttgcaggtccaggtttggctcagagaaggtttggggagaca

SEQ ID NO: 4819 - DNA, 110 bp, synthetic construct
  source 1..110: mol_type = other DNA
tctcatctgtaaaatagggatggtaccacctatctcatataatagatatcatgtcaatattaactcaaaccatgaatttggagaaatgcttggcacagtatgtactcaga

SEQ ID NO: 4820 - DNA, 110 bp, synthetic construct
  source 1..110: mol_type = other DNA
aatattaactcaaaccatgaatttggagaaatgcttggcacagtatgtactcagatgtcagctattaaaaacccataaagaaggagcaaaataaccaaggcatgaactat

SEQ ID NO: 4821 - DNA, 110 bp, synthetic construct
  source 1..110: mol_type = other DNA
tctttcccacggggcacatgtcacaatccctgcctagaactttctatcttgattcattccaacgcccatccatcctccaaggccagctgaggtctctctccctcagggct

SEQ ID NO: 4822 - DNA, 110 bp, synthetic construct
  source 1..110: mol_type = other DNA
tgagggggggaaatggagcatgcgaaaacaagaacactcaaggtcatatttatttctccacattgcatagactgaaaatgtatctcttacaaagcttgccagactattag

SEQ ID NO: 4823 - DNA, 110 bp, synthetic construct
  source 1..110: mol_type = other DNA
ctccacattgcatagactgaaaatgtatctcttacaaagcttgccagactattagaaatgctccatgaaaactgcagccagtatgtcagagtctttgtactttttttttt

SEQ ID NO: 4824 - DNA, 110 bp, synthetic construct
  source 1..110: mol_type = other DNA
agtagacatctgattgtgaaatggagttaagaaccaacattttcactctcaagaattcctttaggaattcctattgtagctcagtgacttaagaacttaacatagtgtca

SEQ ID NO: 4825 - DNA, 110 bp, synthetic construct
  source 1..110: mol_type = other DNA
aacattttcactctcaagaattcctttaggaattcctattgtagctcagtgacttaagaacttaacatagtgtcactgaagatgtggagttcaatccctggcctcattca

SEQ ID NO: 4826 - DNA, 110 bp, synthetic construct
  source 1..110: mol_type = other DNA
caatttcaacaacataccttcatgcccaaaaacataactctggcttcgcttgtattcttctttatttggtagctctttcatgaagatagtgaatccagatggagatagaa

SEQ ID NO: 4827 - DNA, 110 bp, synthetic construct
  source 1..110: mol_type = other DNA
cctgctaacactgggcctctagttttcaaatcattctggctataggatgtaaacatcatctagtcttgaggaaagctaggatggtaccaccctctgggcaaaaagtaatg

SEQ ID NO: 4828 - DNA, 110 bp, synthetic construct
  source 1..110: mol_type = other DNA
agatgcaccataggtcatagatgccactggttctagtgttgccagggctttggtgtaggcctcagctgctggtccaattcatctcctagcctgggaacttctatatgctg

SEQ ID NO: 4829 - DNA, 110 bp, synthetic construct; identical to SEQ ID NO: 4828
  source 1..110: mol_type = other DNA

SEQ ID NO: 4830 - DNA, 110 bp, synthetic construct; identical to SEQ ID NO: 4828
  source 1..110: mol_type = other DNA

SEQ ID NO: 4831 - DNA, 110 bp, synthetic construct; identical to SEQ ID NO: 4828
  source 1..110: mol_type = other DNA

SEQ ID NO: 4832 - DNA, 110 bp, synthetic construct
  source 1..110: mol_type = other DNA
aatgagggggctggtgctaggaggcagatgccagcagtgttgcaccccacaatgcccggggcagagccctcaaaaaagaattatcaaaatgttagtagtgacaaggtttt

SEQ ID NO: 4833 - DNA, 110 bp, synthetic construct
  source 1..110: mol_type = other DNA
ccggggcagagccctcaaaaaagaattatcaaaatgttagtagtgacaaggtttttcagccaaaccaagcctttaaggggccagtaggtatgagtccaactcaaatacta

SEQ ID NO: 4834 - DNA, 110 bp, synthetic construct
  source 1..110: mol_type = other DNA
taccttcccattgaagcttctggtgaccaccccattctcctccttgctgggactccctgccctctttccacgcttcatttttttcactagcacttagcacattccaacat

SEQ ID NO: 4835 - DNA, 110 bp, synthetic construct
  source 1..110: mol_type = other DNA
cctgccctctttccacgcttcatttttttcactagcacttagcacattccaacatataattaatttccttgttggctatttcctcctactaggatataagcctcctaggt

SEQ ID NO: 4836 - DNA, 110 bp, synthetic construct
  source 1..110: mol_type = other DNA
ttgttttgatcataattttaagaccatgtattagatgcctactctataccatgttgttgccaagcagagattattttatttcatgcacctgtcaaccctctaaggtaagc

SEQ ID NO: 4837 - DNA, 110 bp, synthetic construct
  source 1..110: mol_type = other DNA
gttgccaagcagagattattttatttcatgcacctgtcaaccctctaaggtaagcactagtagagttggttaaagggacttacttaggaacatataaaaatcagttacta

SEQ ID NO: 4838 - DNA, 110 bp, synthetic construct
  source 1..110: mol_type = other DNA
ccatacatatgttatgctctgatttctatagcactagcttatgtatctgtttgcctcctaaaaaacggtgagctttgggatgcctgctactgtggttcacagagaaatcc

SEQ ID NO: 4839 - DNA, 110 bp, synthetic construct
  source 1..110: mol_type = other DNA
tcctaaaaaacggtgagctttgggatgcctgctactgtggttcacagagaaatcccttactgatcatgcctagtgaagtaccccatatataactataataataaaagtat

SEQ ID NO: 4840 - DNA, 110 bp, synthetic construct
  source 1..110: mol_type = other DNA
gcagctgcagtggcttctgatttaatccatgtagaagctgatggcaagttccagactccagttcacacacctactgcattgtctggaaggatgttcattatatctctact

SEQ ID NO: 4841 - DNA, 110 bp, synthetic construct
  source 1..110: mol_type = other DNA
atacattatttaccctttcggtcaggattcagtgaagaaaacagacatcattctagctatttcaaggtgaaagagatttaacagagagaattaggtgcctccagaacaaa

SEQ ID NO: 4842 - DNA, 110 bp, synthetic construct
  source 1..110: mol_type = other DNA
gctatttcaaggtgaaagagatttaacagagagaattaggtgcctccagaacaaaagcctggaggatgacaaccaagatcccactactaattctctgatttgtgccacta

SEQ ID NO: 4843 - DNA, 110 bp, synthetic construct
  source 1..110: mol_type = other DNA
ctacctagagaggcctgctgagttttaagtggcttccttccattctctttctcacaaccatcttgtctcctgtttccagggcgggtgggtgttttaagactcccaagcta

SEQ ID NO: 4844 - DNA, 110 bp, synthetic construct
  source 1..110: mol_type = other DNA
aaccatcttgtctcctgtttccagggcgggtgggtgttttaagactcccaagctatagattaggttattagacacatccgtccatgctgagaatgtagcatcccatgtgt

SEQ ID NO: 4845 - DNA, 110 bp, synthetic construct
  source 1..110: mol_type = other DNA
gaaggtggcaatcaattgaccggtgtcataagaatctttatgtttaaagtgctgtgtaagcactagtaataatcgcagtgtcttcctgttgaggcttcatactggatcat

SEQ ID NO: 4846 - DNA, 110 bp, synthetic construct
  source 1..110: mol_type = other DNA
cagcgccagtctcagacaaaactgtacaagggagcagtctgcttgttttgactatgtttccttggctagaagaagagctgttggggagggacagaccagtgtgactttgt

SEQ ID NO: 4847 - DNA, 110 bp, synthetic construct
  source 1..110: mol_type = other DNA
gtttccttggctagaagaagagctgttggggagggacagaccagtgtgactttgtctgcctttctgcacgtcacgcaagtgacttcagacctctgggtttttcccttagc

SEQ ID NO: 4848 - DNA, 110 bp, synthetic construct
  source 1..110: mol_type = other DNA
tgtgggtgtaattagagaacatttatgaaaatgcttcgttgctgagccctagcacaggtttggcacatactagaatttctgtaaatgttttttaaacatcaaggttatat

SEQ ID NO: 4849 - DNA, 110 bp, synthetic construct; identical to SEQ ID NO: 4848
  source 1..110: mol_type = other DNA

SEQ ID NO: 4850 - DNA, 110 bp, synthetic construct
  source 1..110: mol_type = other DNA
ttgtggctcagtgggttaggaacctgatgatagtcttggtgagaatgtgggttcaatccttggccttgctcagtgagttgagaatctagtgttgccacaaactgtggtgt

SEQ ID NO: 4851 - DNA, 110 bp, synthetic construct; identical to SEQ ID NO: 4850
  source 1..110: mol_type = other DNA

SEQ ID NO: 4852 - DNA, 110 bp, synthetic construct
  source 1..110: mol_type = other DNA
ggttaattccctctatccagtgggagcagggaaatgaatacacttcacccggctgaatgtggaccaagctacagaaatattcggggtgagaagccacttttagtagcaca

SEQ ID NO: 4853 - DNA, 110 bp, synthetic construct
  source 1..110: mol_type = other DNA
aatgtggaccaagctacagaaatattcggggtgagaagccacttttagtagcacaagagtatgtgatggataatcttatattaaagtactatagccttctaggggagttt

SEQ ID NO: 4854 - DNA, 110 bp, synthetic construct
  source 1..110: mol_type = other DNA
ctggctcctcacatcctctcctccagccacgctgcctcattcatggctccccaaacaatgccccagcttgcagagcatgatgcttctgttactttggtccagccctctgc

SEQ ID NO: 4855 - DNA, 110 bp, synthetic construct
  source 1..110: mol_type = other DNA
cagggaaattacttcctggaggaatctcttttttgtctttcccgaaaacgaagagcacagacattcaagctgatttgccctctaaagctgtgattggtgggccaaggctg

SEQ ID NO: 4856 - DNA, 110 bp, synthetic construct
  source 1..110: mol_type = other DNA
agtgagaatgtcctttctgggccaggtcatttaggaagtgagtctgcctcttccatgctctcctgccccaccagaagctaaatgcagaacggtctaagacctgcatgata

SEQ ID NO: 4857 - DNA, 110 bp, synthetic construct
  source 1..110: mol_type = other DNA
ctactggccaaactgtaatggatgaaaacacatcaaatgggtttaaatgcatggcactaaagtcaatagcaataatacaaacttttcctcacaggttatctctggagggg

SEQ ID NO: 4858 - DNA, 110 bp, synthetic construct
  source 1..110: mol_type = other DNA
aaccagctttatcagtaacagagctccatttgtctcttgcttttgttctcttctggtaccagagtagggaggggaacgaagggtgtgattgagaggttctagactggccc

SEQ ID NO: 4859 - DNA, 110 bp, synthetic construct
  source 1..110: mol_type = other DNA
gtaccagagtagggaggggaacgaagggtgtgattgagaggttctagactggcccaggtggccagggacccgtgattaacgctatttctctaggtttctcagtgccctcc

SEQ ID NO: 4860 - DNA, 110 bp, synthetic construct
  source 1..110: mol_type = other DNA
gttcaaactcagagcatatgatctttactatcacacttgtacccggctttctgatactcttctagcttggtcttacagtagagttttatttaaaagaatgtatgggagtt

SEQ ID NO: 4861 - DNA, 110 bp, synthetic construct
  source 1..110: mol_type = other DNA
actcttctagcttggtcttacagtagagttttatttaaaagaatgtatgggagttcccactgtggcacaacaggatctggaggcatcttgggagcgctggaatataggtt

SEQ ID NO: 4862 - DNA, 110 bp, synthetic construct
  source 1..110: mol_type = other DNA
actaaaagttcatgaccttgaatgctcacctttactttctattgcactacagtgcttcctaaatatactaaccaacactttataatccaaccagttatgctcattcccct

SEQ ID NO: 4863 - DNA, 110 bp, synthetic construct
  source 1..110: mol_type = other DNA
ttcctaaatatactaaccaacactttataatccaaccagttatgctcattcccctatccttctaaaaaagaaggaagataaaagcatgtatgaaatggaagactatattt

SEQ ID NO: 4864 - DNA, 110 bp, synthetic construct
  source 1..110: mol_type = other DNA
ctctattacagatgatgacaagcaactgtgattaataccaaagagggaattggcgatgcaaagagaaatgtagacattcatatttagcaaataatcgttttacctaatat

SEQ ID NO: 4865 - DNA, 110 bp, synthetic construct
  source 1..110: mol_type = other DNA
acacacacacacacacacacacacacacacacaccacacaatctctcttggcatctctgtttctctctgctctcagagagtatagctcaaatctcagggccattctgatg

SEQ ID NO: 4866 - DNA, 110 bp, synthetic construct
  source 1..110: mol_type = other DNA
tctgtttctctctgctctcagagagtatagctcaaatctcagggccattctgatggtttcctcagtttctacttagccctctttgtcccacagctcaaatctcagggcca

SEQ ID NO: 4867 - DNA, 110 bp, synthetic construct
  source 1..110: mol_type = other DNA
tatcccttaccattgacttgtgaacttgaaagtccatgaggaagagtaattgaactaagagcatagacatcagagctgggaaattgtgctgagaggctgctgattgggga

SEQ ID NO: 4868 - DNA, 110 bp, synthetic construct
  source 1..110: mol_type = other DNA
taagagcatagacatcagagctgggaaattgtgctgagaggctgctgattggggaggttgaggtcttagagggcagtggtcagagaagccaaggagtagaccagagaacc

SEQ ID NO: 4869 - DNA, 110 bp, synthetic construct
  source 1..110: mol_type = other DNA
aaactcaaaagaccaaaattacatttgcaagtattttctgagcactgagtgagagtgttggcattgagctagaagacccagtagattaataatcataattattttatcta

SEQ ID NO: 4870 - DNA, 110 bp, synthetic construct
  source 1..110: mol_type = other DNA
tttagtgtggccatatgtgaggggtggggtgggtgatcacatgatgggagactgcaggtttgatgctccccatgagtgtgggaagctctgagcaaacatgagggcatggg

SEQ ID NO: 4871 - DNA, 110 bp, synthetic construct
  source 1..110: mol_type = other DNA
atttataatttaaaactatctctctagctattgcatggacagcagactaggagatgagggtcggggtaggcaaggagtctttgggggctactgctgtagacctggcaaga

SEQ ID NO: 4872 - DNA, 110 bp, synthetic construct
  source 1..110: mol_type = other DNA
gattcgtttctactgtgccacaatgagaactcctgttttgttttttgaggaaccgctgttatatattcatagaagctgcaccagttttcattcccaccataactgtagga

SEQ ID NO: 4873 - DNA, 110 bp, synthetic construct
  source 1..110: mol_type = other DNA
gtgagcgtcccttactctagacgtttgtgctgaagagggagtgagggtgatgggcaaggacatggccatgtacttagcttgcactagaatattttggatacttatgaaga

SEQ ID NO: 4874 - DNA, 110 bp, synthetic construct
  source 1..110: mol_type = other DNA
ctgcttctcactgggaaattgttggttttaacttacacaaagtcagagagctggtcagaagattcataatggggtgaagagacgtgagatgacagaatgtaatgctttgg

SEQ ID NO: 4875 - DNA, 110 bp, synthetic construct
  source 1..110: mol_type = other DNA
cagaagattcataatggggtgaagagacgtgagatgacagaatgtaatgctttggggcacatatataaatgtgggtgaagagagtagttgtggttcgtgaaataaagctc

SEQ ID NO: 4876 - DNA, 110 bp, synthetic construct
  source 1..110: mol_type = other DNA
tttattgctccatttaaagatgaagacatgaggctgagaaagctttagtatctctgccagcatttcaaagacagtaagaacagagtcagaatgtctatgcaaacccgctc

SEQ ID NO: 4877 - DNA, 110 bp, synthetic construct; identical to SEQ ID NO: 4876
  source 1..110: mol_type = other DNA

SEQ ID NO: 4878 - DNA, 110 bp, synthetic construct
  source 1..110: mol_type = other DNA
atttatactcacacagtacagctctaatcaacaaagtgggaaatctattttcatacttcattcacacgaaacaccgctcttctatctccagggttttttcaagttctaaa

SEQ ID NO: 4879 - DNA, 110 bp, synthetic construct
  source 1..110: mol_type = other DNA
cttcattcacacgaaacaccgctcttctatctccagggttttttcaagttctaaactacaatcagcccttcttttaagataacaatagatcctcttattcagccagatgg

SEQ ID NO: 4880 - DNA, 110 bp, synthetic construct
  source 1..110: mol_type = other DNA
acactgagcaacccatttgcaaaatttgagaatgcttttgcaaatttgtgaagcagctggagttacaaaaaagtcctctctttcccccaagtgcatctgaaatgcttttt

SEQ ID NO: 4881 - DNA, 110 bp, synthetic construct
  source 1..110: mol_type = other DNA
ttatcatggtttctctccacagctaggctcatctcctgctaccctctcacagataccctaagaaatgctattttcacccagacacaccagactcttgcaggcttctaggc

SEQ ID NO: 4882 - DNA, 110 bp, synthetic construct
  source 1..110: mol_type = other DNA
gttggacaagatctcactcaagacatcacacagcctgctccctcacttcctccaaatctttagtcagaggtccccttttcagggaggcctcccctgactctattgaaaat

SEQ ID NO: 4883 - DNA, 110 bp, synthetic construct
  source 1..110: mol_type = other DNA
cccttttggtctccatcctttgttgttgttcataatgaagagcttcctaggatgtcttcctgtattggtgtgtggtttacaatggttccgcgtagggacagtgcccacat

SEQ ID NO: 4884 - DNA, 110 bp, synthetic construct
  source 1..110: mol_type = other DNA
cttcctgtattggtgtgtggtttacaatggttccgcgtagggacagtgcccacatgcgaactcttgaagttgcttttatacactcattttgtatattatattcttattac

SEQ ID NO: 4885 - DNA, 110 bp, synthetic construct; identical to SEQ ID NO: 4883
  source 1..110: mol_type = other DNA

SEQ ID NO: 4886 - DNA, 110 bp, synthetic construct; identical to SEQ ID NO: 4884
  source 1..110: mol_type = other DNA

SEQ ID NO: 4887 - DNA, 110 bp, synthetic construct
  source 1..110: mol_type = other DNA
acaagttgaataaaaaggggcctcactgataaataatgtgcgaaatttcaagtaggaatgttgcatttcatcattttttggggaaaaaaagtgattctggatagaaactc

SEQ ID NO: 4888 - DNA, 110 bp, synthetic construct
  source 1..110: mol_type = other DNA
gaatgttgcatttcatcattttttggggaaaaaaagtgattctggatagaaactcaaagatttctatatggctgggaagtgttaaatgttaaaaacaatcaaagactcat

SEQ ID NO: 4889 - DNA, 110 bp, synthetic construct
  source 1..110: mol_type = other DNA
ttgtttatcttgacttgcagaatgaaagtttagttttggcttgcttgctgtaccttttaggcctgaatggcttccagaactgttagctattgtatgtgaggggattcgtg

SEQ ID NO: 4890 - DNA, 110 bp, synthetic construct
  source 1..110: mol_type = other DNA
actctctttctctaactggcctctgattcttcactatatccatgacttacattttgcatagtcatgtatatttctgcttgcttcaacataaaaattgattttttaaatgt

SEQ ID NO: 4891 - DNA, 110 bp, synthetic construct
  source 1..110: mol_type = other DNA
gaattccctaaggtgtgggtcagggcctgatccatttctagaaagaaacctatactctctaagtcctatacttagtgagaactgtgagttgcagtacctcacaggaggtg

SEQ ID NO: 4892 - DNA, 110 bp, synthetic construct
  source 1..110: mol_type = other DNA
tctctaagtcctatacttagtgagaactgtgagttgcagtacctcacaggaggtgaggtataagagacattctagggtcaaattaaattagagacatttaagggtcaaat

SEQ ID NO: 4893 - DNA, 110 bp, synthetic construct
  source 1..110: mol_type = other DNA
caaactaaataaaattacttataagtgtttcccctttacactttttagcacatgattctggaaaatgagatgtttccccaaggctttcagtcttggttataatagaaaaa

SEQ ID NO: 4894 - DNA, 110 bp, synthetic construct; identical to SEQ ID NO: 4893
  source 1..110: mol_type = other DNA

SEQ ID NO: 4895 - DNA, 110 bp, synthetic construct
  source 1..110: mol_type = other DNA
cagttataccctacacactgctcgccaagagtctcctccctgagttatcctgtgtgtctcaattccagttcctgacaatatatgtcacctcttatctctaagataagata

SEQ ID NO: 4896 - DNA, 110 bp, synthetic construct
  source 1..110: mol_type = other DNA
tattatttctcagttaatcttctgttacaaccaccaccaagagaatatgcatatcctacacaaaacactccaggtagaaaaatgacttggttagtatttctgcccctatg

SEQ ID NO: 4897 - DNA, 110 bp, synthetic construct
  source 1..110: mol_type = other DNA
ctacacaaaacactccaggtagaaaaatgacttggttagtatttctgcccctatgctcacaaggccctaattactgccttccatgaggtggcagagataggtaggtacat

SEQ ID NO: 4898 - DNA, 110 bp, synthetic construct; identical to SEQ ID NO: 4896
  source 1..110: mol_type = other DNA

SEQ ID NO: 4899 - DNA, 110 bp, synthetic construct; identical to SEQ ID NO: 4897
  source 1..110: mol_type = other DNA

SEQ ID NO: 4900 - DNA, 110 bp, synthetic construct
  source 1..110: mol_type = other DNA
aaataaataagtaaataaataagtaaaatgctgatgttcaacattccccaaattagacaggactgtagtttttcctcaatgtgcagtggcgttcttgattatttgcctag

SEQ ID NO: 4901 - DNA, 110 bp, synthetic construct
  source 1..110: mol_type = other DNA
gacaggactgtagtttttcctcaatgtgcagtggcgttcttgattatttgcctagggaaattctttccaggaaaagacaggtttaatatttcattgatagtttctgtgct

SEQ ID NO: 4902 - DNA, 110 bp, synthetic construct
  source 1..110: mol_type = other DNA
aatctgatcagcctcaatagaaaatttcccaaaagaccatcatacggaagtgtaaaagattacaacagctattttataatgggaatttgagggcaaagaacgcatgaatt

SEQ ID NO: 4903 - DNA, 110 bp, synthetic construct
  source 1..110: mol_type = other DNA
ttcccaaaagaccatcatacggaagtgtaaaagattacaacagctattttataatgggaatttgagggcaaagaacgcatgaattttttaaagtgctatcagaaaattaa

SEQ ID NO: 4904 - DNA, 110 bp, synthetic construct
  source 1..110: mol_type = other DNA
aatggaaccactccctgcccccaaccttccaagtagggaatctgggctggagaatcccaagttcccagtgtcagtcaacaaaatccccaagccctgctgagcctagaagc

SEQ ID NO: 4905 - DNA, 110 bp, synthetic construct
  source 1..110: mol_type = other DNA
gtttgccaacccctgacatcaattttaattatgaagtctgagcttttctaaggaggaatgttattgctttccaaatccagactaatcacaatatccatcttagaaatatt

SEQ ID NO: 4906 - DNA, 110 bp, synthetic construct
  source 1..110: mol_type = other DNA
gaatgttattgctttccaaatccagactaatcacaatatccatcttagaaatattttaaaagaaaatctacgaagttgttgtctgacccactatgtgttggattttcaga

SEQ ID NO: 4907 - DNA, 110 bp, synthetic construct
  source 1..110: mol_type = other DNA
gatatggttgaaagagcagtaatctcagaagcagaaagctgaaacttcaatccagcttcctcatccatagtagatagcatttcctcacctcaaactcagaaggctgctta

SEQ ID NO: 4908 - DNA, 110 bp, synthetic construct
  source 1..110: mol_type = other DNA
cttcctcatccatagtagatagcatttcctcacctcaaactcagaaggctgcttagacggaacatgtgaaagtccctgctacataccaggaactctattcgtctgttttg

SEQ ID NO: 4909 - DNA, 110 bp, synthetic construct
  source 1..110: mol_type = other DNA
aactgctcctgtctccatactcagagttacaccacatcctaaaaacaaagaacagtgttctgcatagagaacatcaattgttcccctgtggtaaacagcatccttgctgt

SEQ ID NO: 4910 - DNA, 110 bp, synthetic construct
  source 1..110: mol_type = other DNA
tgttctgcatagagaacatcaattgttcccctgtggtaaacagcatccttgctgttcccatagacagagaccattactcacctccatcttgaatgactatggaattcact

SEQ ID NO: 4911 - DNA, 110 bp, synthetic construct
  source 1..110: mol_type = other DNA
gggtcagctgtcaacagcattcagagctgggcagcatatcttcccttgaaggcagatctgtctggtgaactccatatcacccgcttacacgggatgtgacaacttcacca

SEQ ID NO: 4912 - DNA, 110 bp, synthetic construct
  source 1..110: mol_type = other DNA
atctgtctggtgaactccatatcacccgcttacacgggatgtgacaacttcaccattgtgctgtcctatccatagaaagagggaaagccccaggataaacaggatgctca

SEQ ID NO: 4913 - DNA, 110 bp, synthetic construct
  source 1..110: mol_type = other DNA
attaattaaattgtagcctcactcaagttactctgtaaataactgcaagatcacaagctagtgttgaaacaagctagtgttgtgtaagtggtcagctctctttccaagga

SEQ ID NO: 4914 - DNA, 110 bp, synthetic construct
  source 1..110: mol_type = other DNA
cttagacctttactcataagagaaaggaggaaatgctcttgggatattagctcaaaactggggctccttactggggtggcagcttaattctctaaacaaacaattagatc

SEQ ID NO: 4915 - DNA, 110 bp, synthetic construct
  source 1..110: mol_type = other DNA
cactaagtctgtagaatgagtgagtagtgaattagtatgatcaattttccaagatgatcaaagaaaacacttagctaaactctggggtacgtgttgtacaaagaaggaac

SEQ ID NO: 4916 - DNA, 110 bp, synthetic construct
  source 1..110: mol_type = other DNA
cttgcctacaccatgttgatgaggttatttcaaccctattatctttttcatccggatctacatcaagcatacacttattctcttaattcttctcttttactatagctaca

SEQ ID NO: 4917 - DNA, 110 bp, synthetic construct
  source 1..110: mol_type = other DNA
ttttgttctggtagcttggaatcaggtgatatgggatctttgtttttctcctctaggccagaaatattgtatcttaagaaattatctcagattggtttaagtaatctctg

SEQ ID NO: 4918 - DNA, 110 bp, synthetic construct
  source 1..110: mol_type = other DNA
ggccagaaatattgtatcttaagaaattatctcagattggtttaagtaatctctggtgtgagtcatttaggtataagtaatgaagtgccagtcatgtgtataaatgttac

SEQ ID NO: 4919 - DNA, 110 bp, synthetic construct
  source 1..110: mol_type = other DNA
tctatgaggtttttcgtattctagtgttcttctaacataggtaaaagctttacgtctcttttaagtccttttaacccttgtatgcaagtcctatagcaactgaactagac

SEQ ID NO: 4920 - DNA, 110 bp, synthetic construct
  source 1..110: mol_type = other DNA
tcactcttcatcctgacctcactttttgacctgtatgctgggtgctaaaatctgtctccctccacatttccctcttgagcttcaaacccatatgcctggctgcttaatgt

SEQ ID NO: 4921 - DNA, 110 bp, synthetic construct
  source 1..110: mol_type = other DNA
tctctctttaatccataggcaaggctggcttcctgggcatgaaactggtgtgattgcacagagccctgcacttagaagggcccaacaaattatgtattgacttttttgtg

SEQ ID NO: 4922 - DNA, 110 bp, synthetic construct
  source 1..110: mol_type = other DNA
caaagagatctgtttttaagtactgattctaattactagctctatgacgatggccttgatgctgtgtgtgcatgtatattcataaggagaaaacaataatacagtatttc

SEQ ID NO: 4923 - DNA, 110 bp, synthetic construct
  source 1..110: mol_type = other DNA
ttcttgtgtggtctataggtagtgggggcaaaccaccacagttatctcagatcccagaggtgggtgtggccaaccaccattaaggggtctgtgaacaggcagcacctaca

SEQ ID NO: 4924 - DNA, 110 bp, synthetic construct
  source 1..110: mol_type = other DNA
agaggtgggtgtggccaaccaccattaaggggtctgtgaacaggcagcacctacagcctcagtcacctcagagaatggcacagaggaggggtctgcaactgagcagcacc

SEQ ID NO: 4925 - DNA, 110 bp, synthetic construct
  source 1..110: mol_type = other DNA
agtaccttgttcttgggatgactgtctccttctacatctagttacagtattcacttgacaaattgttcaaaggaagctgcgctaattctcaactctctgggaggattaaa

SEQ ID NO: 4926 - DNA, 110 bp, synthetic construct
  source 1..110: mol_type = other DNA
aattggctattccagcaaagcgtctcgaactgggaaagcaccaaatgttctactcaagaaaagaagggccaaacaagctagatctgagggagagatcaaaaagaaggcgt

SEQ ID NO: 4927 - DNA, 110 bp, synthetic construct
  source 1..110: mol_type = other DNA
aagaaaagaagggccaaacaagctagatctgagggagagatcaaaaagaaggcgttgcaggaggaaattcaagagggggcaattcagaaatgaggcacaggccctgacta

SEQ ID NO: 4928 - DNA, 110 bp, synthetic construct
  source 1..110: mol_type = other DNA
gttgatccgtataaattatttatctgagcactgagagccactccctaggtgcaaggcaatatgttaaagatttgctatcatgatagtgaatgagggggaaaggggagaag

SEQ ID NO: 4929 - DNA, 110 bp, synthetic construct
  source 1..110: mol_type = other DNA
gcaatatgttaaagatttgctatcatgatagtgaatgagggggaaaggggagaagtacattttgtgagttataaagttttaggaacattagttgccatgtttgcatttga

SEQ ID NO: 4930 - DNA, 110 bp, synthetic construct
  source 1..110: mol_type = other DNA
tggtcttgcttattgctaaaacttgaaagctgcaggctcttgtttaggtgggcgtgagagtgtgtgtcctcctctagaaggtggcaactttgagaagaaaagagagggat

SEQ ID NO: 4931 - DNA, 110 bp, synthetic construct
  source 1..110: mol_type = other DNA
ctgtcagatttggtagataaaatgaacagaatttgatggtagatggtctgtgcagctaaggatgagggggactgtaaggactcttcagttttctgaattttgcaactgaa

SEQ ID NO: 4932 - DNA, 110 bp, synthetic construct
  source 1..110: mol_type = other DNA
ctaaggatgagggggactgtaaggactcttcagttttctgaattttgcaactgaatgtgtgggttgtgccatttattgatatccagggaacagccacccagaagggacat

SEQ ID NO: 4933 - DNA, 110 bp, synthetic construct
  source 1..110: mol_type = other DNA
aaagaaagcaaatgtgcatatgataagcacaaaagaatcttaacttgagaaatctgtccttgttgttttgggaaagtatcatctagatctcagataaggtactaattatg

SEQ ID NO: 4934 - DNA, 110 bp, synthetic construct
  source 1..110: mol_type = other DNA
cagcacactcttgtcaatcccctcccaactcattctccaaagctgaagtgggtgtttagaggtcaagttcccctgccccatcgtcactacttaagacttgtctatgactt

SEQ ID NO: 4935 - DNA, 110 bp, synthetic construct
  source 1..110: mol_type = other DNA
ttagaggtcaagttcccctgccccatcgtcactacttaagacttgtctatgactttcatagcatttaaaattaaatcctcactttttgccttttcttaagagaccctatg

SEQ ID NO: 4936 - DNA, 110 bp, synthetic construct
  source 1..110: mol_type = other DNA
gagatctgagcagcacatgtacatggctgctaaattgttgttattgagtttcagcaagcttcagagcatggcctctttgccaaatctattatctcagcctagcccaaggc

SEQ ID NO: 4937 - DNA, 110 bp, synthetic construct
  source 1..110: mol_type = other DNA
tagagttagaaggaatacgaaattgcttggactgttgagcttgtgttaagaacatcagttgccagtactgttgagactgtgcccaatgatctctactgtcgaggttgtaa

SEQ ID NO: 4938 - DNA, 110 bp, synthetic construct
  source 1..110: mol_type = other DNA
ccgtttctgctgctgccagggaaaagagctataggtagggagatgctgaaggaagtgcgggcatatagcatggagtttgtccttttgcccccatcctgccttccagtctc

SEQ ID NO: 4939 - DNA, 110 bp, synthetic construct
  source 1..110: mol_type = other DNA
gctggaggaaaaagggaattatttaccaaaggaacttcaggacatgattaattttagcaaaagaaattgggggtgaggatgggagagagcataactaggaagtagatctt

SEQ ID NO: 4940 - DNA, 110 bp, synthetic construct
  source 1..110: mol_type = other DNA
ggtgtgtttgtggtttgtaaaagcatttacctgttttctttccagatccttcaaaaatggcaatggtatctgaattccttaaacaggcctggtttattgacaatgaagag

SEQ ID NO: 4941 - DNA, 110 bp, synthetic construct
  source 1..110: mol_type = other DNA
atccttcaaaaatggcaatggtatctgaattccttaaacaggcctggtttattgacaatgaagagcaagaatacattgtaagttaagtgacagtaaaataatagttaaat

SEQ ID NO: 4942 - DNA, 110 bp, synthetic construct
  source 1..110: mol_type = other DNA
ggggataatgaaaagctccagaagagcagatatatctggattcgagttccggttttcacctgttagctacttgaaaagcgatcgatgactgtaaggtcaggctgttcaag

SEQ ID NO: 4943 - DNA, 110 bp, synthetic construct
  source 1..110: mol_type = other DNA
tcacctgttagctacttgaaaagcgatcgatgactgtaaggtcaggctgttcaagatggctgttctcttgctctctgtacatctcctgattcacgactagtgcctgcttc

SEQ ID NO: 4944 - DNA, 110 bp, synthetic construct
  source 1..110: mol_type = other DNA
gatcaggaaaatttgaatcaactatctggcagtgaaatgactagacaccctattactactctgtcacgactataatttaaacacagaagttatgatgcataatattttat

SEQ ID NO: 4945 - DNA, 110 bp, synthetic construct
  source 1..110: mol_type = other DNA
cctccatgtgccacaggtgtggccccaaaaagacaaaaggcaaaagaccaaaaaaaccccccaaaaaccccagagtgtagcttaaattatccttaagtatcttcattcac

SEQ ID NO: 4946 - DNA, 110 bp, synthetic construct
  source 1..110: mol_type = other DNA
accccccaaaaaccccagagtgtagcttaaattatccttaagtatcttcattcacacatgaaggcaaaaaaagagatacggtcagagttgctactgtcttgttagaaaaa

SEQ ID NO: 4947 - DNA, 110 bp, synthetic construct
  source 1..110: mol_type = other DNA
taaatttgcaaatctctgttaatgaacctcaattatggcctttacttggttgcttctctatataccagagcttgaatgagactcttagttcttgaaaaatttagagttgg

SEQ ID NO: 4948 - DNA, 110 bp, synthetic construct
  source 1..110: mol_type = other DNA
tgactttgcctaattatctagctgagttttaaaatggaaacagcttacaattcatttaggataatggtcaatccttgcaatgaaaattcaaattcctgtgagaggattgg

SEQ ID NO: 4949 - DNA, 110 bp, synthetic construct
  source 1..110: mol_type = other DNA
ctgtaatagaatcagggctttgtcctcattgctatcattgttttaaactcttgtttttgaaaatggatgctaggatattacttggaagcttgaataacatatatttttca

SEQ ID NO: 4950 - DNA, 110 bp, synthetic construct
  source 1..110: mol_type = other DNA
ccttcctccttaagtatccatttagtccatgggaattccaccatctcattacacagaaccttgagaatacatgctatgccacagctatttttgactcaccctctttcctt

SEQ ID NO: 4951 - DNA, 110 bp, synthetic construct
  source 1..110: mol_type = other DNA
gcataccaaaatttaaatttttatgcagtcaaaatatatcagtctttctcttcagtctgtgagttttgtgtcacatctagaaaagctctccttgaatatttcatacagag

SEQ ID NO: 4952 - DNA, 110 bp, synthetic construct; identical to SEQ ID NO: 4951
  source 1..110: mol_type = other DNA

SEQ ID NO: 4953 - DNA, 110 bp, synthetic construct; identical to SEQ ID NO: 4951
  source 1..110: mol_type = other DNA

SEQ ID NO: 4954 - DNA, 110 bp, synthetic construct; identical to SEQ ID NO: 4951
  source 1..110: mol_type = other DNA

SEQ ID NO: 4955 - DNA, 110 bp, synthetic construct
  source 1..110: mol_type = other DNA
ttttgaccaaggagagagaaaatttaaaaagaaatgtgtaaaaaagtgaaggactagatatgctactctatagcctttgttgttaaagaacagttcataaaatggctaca

SEQ ID NO: 4956 - DNA, 110 bp, synthetic construct; identical to SEQ ID NO: 4955
  source 1..110: mol_type = other DNA

SEQ ID NO: 4957 - DNA, 110 bp, synthetic construct
  source 1..110: mol_type = other DNA
atttgactccaagtgactcccatctctttaaagaagcaaaacttaatccaatgtaacacaaattccaaaggcgtctactagaaacatttcaaaaaagaaacattttgaga

SEQ ID NO: 4958 - DNA, 110 bp, synthetic construct; identical to SEQ ID NO: 4957
  source 1..110: mol_type = other DNA

SEQ ID NO: 4959 - DNA, 110 bp, synthetic construct
  source 1..110: mol_type = other DNA
cacaacttcacttttctgggagagccagccgggtgcccgcgtgccatggaaatgtaattgcaagcctctgagcacctgccccccaccccacagtttttcttcctggccat

SEQ ID NO: 4960 - DNA, 110 bp, synthetic construct
  source 1..110: mol_type = other DNA
cacatattgtcaatacttatgaaagtaagcgttcaatttagagccacagcagaaaaaaattaagcaaacatcagagataaccgcgtacatttattcttaaagtcctactt

SEQ ID NO: 4961 - DNA, 110 bp, synthetic construct
  source 1..110: mol_type = other DNA
aaaattaagcaaacatcagagataaccgcgtacatttattcttaaagtcctacttttgcattagatttcatttagatgttgctggtttctctttgtaaaaccccttgaaa

SEQ ID NO: 4962 - DNA, 110 bp, synthetic construct
  source 1..110: mol_type = other DNA
tccaaagattattttttaaagatgatgccttttagagctgcttattatattaagtaagaacagtgcaggtgaaagttcttgtggcaagaagagaatttgtgaagtgtgct

SEQ ID NO: 4963 - DNA, 110 bp, synthetic construct
  source 1..110: mol_type = other DNA
tattctaaactgatttcacaaaaagaaaggtattccttgaactactgtatttatgaactgatagcccacaaatcatacaatttgttcctaatgtaaaggaaggggtcaaa

SEQ ID NO: 4964 - DNA, 110 bp, synthetic construct; identical to SEQ ID NO: 4963
  source 1..110: mol_type = other DNA

SEQ ID NO: 4965 - DNA, 110 bp, synthetic construct
  source 1..110: mol_type = other DNA
ttaaacatctccttagacccaatagtctcaatgcaattgctgcacatgtcattggttttaaatgcctgagaacttgactatgttgagtttagctcatgtccacgcccaca

SEQ ID NO: 4966 - DNA, 110 bp, synthetic construct
  source 1..110: mol_type = other DNA
ttttaaatgcctgagaacttgactatgttgagtttagctcatgtccacgcccacacactacaatgttgcatggattccatgtcctttctaacctcatcacaatccaaagc

SEQ ID NO: 4967 - DNA, 110 bp, synthetic construct
  source 1..110: mol_type = other DNA
aaataggtaaagtgaagaaagaacttcggttgctcatagtcattcaccctgctgggatttgagtctgtgtggaagaaaattctgtatatggccacacatagattagggaa

SEQ ID NO: 4968 - DNA, 110 bp, synthetic construct
  source 1..110: mol_type = other DNA
agaaagttattggctttattcagagtttgtaggacatttggctggtccacaagcacatattgtctgtacagtcaattaaccctttagagctgcttatggctagactaagt

SEQ ID NO: 4969 - DNA, 110 bp, synthetic construct
  source 1..110: mol_type = other DNA
catattgtctgtacagtcaattaaccctttagagctgcttatggctagactaagttactgcttcatatctttcaacactttagctttatcagtgtttgaattatgtatta

SEQ ID NO: 4970 - DNA, 110 bp, synthetic construct; identical to SEQ ID NO: 4968
  source 1..110: mol_type = other DNA

SEQ ID NO: 4971 - DNA, 110 bp, synthetic construct; identical to SEQ ID NO: 4969
  source 1..110: mol_type = other DNA

SEQ ID NO: 4972 - DNA, 110 bp, synthetic construct
  source 1..110: mol_type = other DNA
atgctcctgtcttcttcatctgtactaatgcttggagctggttataaagagccgtagacttccaggcctgtgtcccaagcctcctagtacctgtttgcagagcagggaga

SEQ ID NO: 4973 - DNA, 110 bp, synthetic construct
  source 1..110: mol_type = other DNA
aggaaaacaattcctaaaacacacttgtgagatgccaactaaagaagcattcaattaaaggataacagtttcatctgatccgaatttttggcatgatgtgaaactatttt

SEQ ID NO: 4974 - DNA, 110 bp, synthetic construct
  source 1..110: mol_type = other DNA
tttagtttgttgctccaggagacgtttgtccaagtgcaagcactgcagcaaagggtccccagtgccaggtcccaggtcccagactgtctcattccatgaccatagctctt

SEQ ID NO: 4975 - DNA, 110 bp, synthetic construct
  source 1..110: mol_type = other DNA
tccccagtgccaggtcccaggtcccagactgtctcattccatgaccatagctcttgttgggagaccctcctccaggtctccacgtttcaggtttaactgggttctggtta

SEQ ID NO: 4976 - DNA, 110 bp, synthetic construct
  source 1..110: mol_type = other DNA
agcagaccatgtcactcccatacacaaacccagctcccaacaagtgtccattgtatgcaagataaaatccaaaccacttataaagcccattctctccaacccctgccttc

SEQ ID NO: 4977 - DNA, 110 bp, synthetic construct
  source 1..110: mol_type = other DNA
caggggagccaacgactgaatccattgcttgatctaccttggaaggcattctgtattgactattaaatagctcagagaatcaatctcgaggcccacctttcagaaagggc

SEQ ID NO: 4978 - DNA, 110 bp, synthetic construct
  source 1..110: mol_type = other DNA
ttgactattaaatagctcagagaatcaatctcgaggcccacctttcagaaagggcccccaaagccaccacacagaatgggccaccactggagctgctgcttctgcctcaa

SEQ ID NO: 4979 - DNA, 110 bp, synthetic construct
  source 1..110: mol_type = other DNA
ttagccttttcagtttggcttctttcacctggttatatgcattttttttcctaaatgtcttttctaaatgtcttgtcatgcttgtcagctcattttttttttttagtgct

SEQ ID NO: 4980 - DNA, 110 bp, synthetic construct
  source 1..110: mol_type = other DNA
agtggaacatgtatactcctaaaaatactcttactctgcaaatcaaaaccacagagtaataagaaaattaaattggagctcaacactcagaggctttgcccatgatacac

SEQ ID NO: 4981 - DNA, 110 bp, synthetic construct
  source 1..110: mol_type = other DNA
gtaataagaaaattaaattggagctcaacactcagaggctttgcccatgatacacacggaaaaatgatggagacctattaaaaataatagccccattttattcctgtgaa

SEQ ID NO: 4982 - DNA, 110 bp, synthetic construct; identical to SEQ ID NO: 4980
  source 1..110: mol_type = other DNA

SEQ ID NO: 4983 - DNA, 110 bp, synthetic construct; identical to SEQ ID NO: 4981
  source 1..110: mol_type = other DNA

SEQ ID NO: 4984 - DNA, 110 bp, synthetic construct
  source 1..110: mol_type = other DNA
tgagagtcagatgtacttttttagctgttgggaatgaggaattgccccagtctgcatgctcctccctctgacctctgttaaccatccctaggtggtgggaaaaccactgg

SEQ ID NO: 4985 - DNA, 110 bp, synthetic construct
  source 1..110: mol_type = other DNA
ggatttactattgactgtttttttccccactgaattatggtcagataataaggttagataatcagctgcacgagtggtttgtgaggcattgtttttctttggggcaattg

SEQ ID NO: 4986 - DNA, 110 bp, synthetic construct
  source 1..110: mol_type = other DNA
agataatcagctgcacgagtggtttgtgaggcattgtttttctttggggcaattgttgagattttcttttggcctagtatatcttcaacttttctttcaaaaccttttaa

SEQ ID NO: 4987 - DNA, 110 bp, synthetic construct
  source 1..110: mol_type = other DNA
ataaatgatgtcaatataggttatcttgggaagcgaaggctcaggtccccatacacacagctaactagcctactctgaaaatttcattcctagacatcagagttaacatg

SEQ ID NO: 4988 - DNA, 110 bp, synthetic construct
  source 1..110: mol_type = other DNA
agaggcccccagatggaatactgtaagatagaccaggtgacatgccatgagcagccagtcatgcatcagcacattcatagctggcacttactcagcatgtgacacgcaca

SEQ ID NO: 4989 - DNA, 110 bp, synthetic construct
  source 1..110: mol_type = other DNA
cagtcatgcatcagcacattcatagctggcacttactcagcatgtgacacgcacaccagccccagcagacatgaacggcagaaatgcaagcattccttggtgagtgacat

SEQ ID NO: 4990 - DNA, 110 bp, synthetic construct; identical to SEQ ID NO: 4988
  source 1..110: mol_type = other DNA

SEQ ID NO: 4991 - DNA, 110 bp, synthetic construct; identical to SEQ ID NO: 4989
  source 1..110: mol_type = other DNA

SEQ ID NO: 4992 - DNA, 110 bp, synthetic construct
  source 1..110: mol_type = other DNA
ggggccaatggttttgcaccagagaaacctcgggtgagccttcaggtgtctacgacagcttcagtgtgccaatgtccagaacgtccagacaggccgaagtcagtcagatg

SEQ ID NO: 4993 - DNA, 110 bp, synthetic construct
  source 1..110: mol_type = other DNA
cagcttcagtgtgccaatgtccagaacgtccagacaggccgaagtcagtcagatgacctctagaggttcttctttggcaatgattcctttactctcttctatcttacttg

SEQ ID NO: 4994 - DNA, 110 bp, synthetic construct; identical to SEQ ID NO: 4992
  source 1..110: mol_type = other DNA

SEQ ID NO: 4995 - DNA, 110 bp, synthetic construct; identical to SEQ ID NO: 4993
  source 1..110: mol_type = other DNA

SEQ ID NO: 4996 - DNA, 110 bp, synthetic construct
  source 1..110: mol_type = other DNA
ttgtggcaccctgacccagcagcaggggcactaccctcgatgtactagtggtgtggtgattctggccttctgttctgaggtacctttttctcagccagtttccagctttc

SEQ ID NO: 4997 - DNA, 110 bp, synthetic construct
  source 1..110: mol_type = other DNA
gtgattctggccttctgttctgaggtacctttttctcagccagtttccagctttcccatctattccctgagctacctatcattctcccagtgaattcctttccagcctaa

SEQ ID NO: 4998 - DNA, 110 bp, synthetic construct
  source 1..110: mol_type = other DNA
atgtaggatatgtctttgtagccaaatggatgtcttatttttcaaccacctttcatccagtgtattttacatgcttgcctaattcaattattacattgagtagttgcaaa

SEQ ID NO: 4999 - DNA, 110 bp, synthetic construct
  source 1..110: mol_type = other DNA
cctgcaatatatgctgtttttgtttttttttttgtttttttttaatcacagcgcaatgtcattttctttccttcctttcttcctggccatgccctttccatgtggaagtt

SEQ ID NO: 5000 - DNA, 110 bp, synthetic construct
  source 1..110: mol_type = other DNA
atgtcattttctttccttcctttcttcctggccatgccctttccatgtggaagtttcaggtcagggactgaactagagccaaagcaatgacccaagcctctgcagtaaca

SEQ ID NO: 5001 - DNA, 110 bp, synthetic construct
  source 1..110: mol_type = other DNA
taaatctgtctttgtctcatgaatccacccatttagccacatttctatctttctcatagcttcactgtgcactacaggtgttattttaacactttccctagtggcctcac

SEQ ID NO: 5002 - DNA, 110 bp, synthetic construct
  source 1..110: mol_type = other DNA
ctatatccaaaacttcattctctttcttatcctgcccctgttgccctcaggattaaagagtaaggcccctgcctttaaaatcgcaaagagctaaaggcatttggaggggt

SEQ ID NO: 5003 - DNA, 110 bp, synthetic construct
  source 1..110: mol_type = other DNA
aagagtaaggcccctgcctttaaaatcgcaaagagctaaaggcatttggaggggtatttggcttaactcaaggagaaacttgggaactgggggaatggatctggggtaca

SEQ ID NO: 5004 - DNA, 110 bp, synthetic construct
  source 1..110: mol_type = other DNA
tatgtcttcattgtataaatgtagggggaaaaaatgtgcttgagcttttaaatcattgctgttcacagaattacagcattacatggaagtcccagactctatctggtata

SEQ ID NO: 5005 - DNA, 110 bp, synthetic construct
  source 1..110: mol_type = other DNA
tagtacatttgtatatgccatctgtcctcattttaggagtgccgtatccgatatggacatacaaggaagcttatttaacttaacattgtctttcttttcatcacttttca

SEQ ID NO: 5006 - DNA, 110 bp, synthetic construct
  source 1..110: mol_type = other DNA
ctcctgtgattcctgtagcctctggatgggctgaacatttgtttttataagattaaacaagctttttccagaatcgatgcaatgctaatccccagaggtaacctctatac

SEQ ID NO: 5007 - DNA, 110 bp, synthetic construct
  source 1..110: mol_type = other DNA
agcccctcaacatggaaaaatgtcaatatatcaatttgaattttacttgtgtcattttaacaggcatcatcaactgaatagaccaagaaaaagctacctttaatacaaaa

SEQ ID NO: 5008 - DNA, 110 bp, synthetic construct; identical to SEQ ID NO: 5007
  source 1..110: mol_type = other DNA

SEQ ID NO: 5009 - DNA, 110 bp, synthetic construct
  source 1..110: mol_type = other DNA
gttagtaaagggaacctctcaacaagggtgatacatactctccccgctctctgactggttgcttgctccagggtgcaggtagtgaagacacctgcggtatcccagagaag

SEQ ID NO: 5010 - DNA, 110 bp, synthetic construct
  source 1..110: mol_type = other DNA
atagaatctgaatgtatttattaacaagctgacttaggatgcaagaccctccacgattgagattctgtcctcccatagaaatttccagacaaactcagcacagaggacta

SEQ ID NO: 5011 - DNA, 110 bp, synthetic construct
  source 1..110: mol_type = other DNA
gggtatcggtttatttttcagcataaactctgcaggccagaaagcagtggcacagtatattcaatgtaatgaaagactagacctaacgtcaagaatacccaggaatccct

SEQ ID NO: 5012 - DNA, 110 bp, synthetic construct
  source 1..110: mol_type = other DNA
tgggaaccactctcctctcttttatttctgctggttcttatattcatgttaacctttgtctttttttatatttgatgatttttgattgtgagctgctcatttttattgga

SEQ ID NO: 5013 - DNA, 110 bp, synthetic construct
  source 1..110: mol_type = other DNA
aggggggaatgctaaattgcttgtttgcaagacatttactgagtttcctgtggctggtctgtgatacttaattctatggtacagatttcctacagatccttatgaattta

SEQ ID NO: 5014 - DNA, 110 bp, synthetic construct
  source 1..110: mol_type = other DNA
gcatctctactccgagtcagagcccaagagcttcttctggcctctgatggaggctctcagtaactgttttggttcagagacaaggctaaccagaggaggaaagcatgcat

SEQ ID NO: 5015 - DNA, 110 bp, synthetic construct
  source 1..110: mol_type = other DNA
tatggaaagtctaactaaaccatttaatcagaggccagagaagcaagaagactgcacagagtcagaaaaatgtgttaaatatgaaaatccaaattagaacacttcgtagc

SEQ ID NO: 5016 - DNA, 110 bp, synthetic construct
  source 1..110: mol_type = other DNA
acatagtagaacttcagagtttgaagttgagcttctctcctctgggtgaaactctaagtagaggtccaaagtcagccgagaagagtagaatttagggttgatgctattcc

SEQ ID NO: 5017 - DNA, 110 bp, synthetic construct
  source 1..110: mol_type = other DNA
aaagggaaatgacaccctaccagtggcaaaaaaggctcaaaacagagcaatgctagctggcatttaccactgacagtgagaagttagaccacagttaagaaaaggcagag

SEQ ID NO: 5018 - DNA, 110 bp, synthetic construct
  source 1..110: mol_type = other DNA
gctggcatttaccactgacagtgagaagttagaccacagttaagaaaaggcagagtcaggtttgaacccaagcaaacaggcctaagaacctatgtttttaatccctgtac

SEQ ID NO: 5019 - DNA, 110 bp, synthetic construct
  source 1..110: mol_type = other DNA
gacacgtggtctggtttctggaatatcctgaaatacataacttgatgaagcagttactcatcagttctcctaagctgctttatcaaaggctctctttgtgggtggcagca

SEQ ID NO: 5020 - DNA, 110 bp, synthetic construct
  source 1..110: mol_type = other DNA
actcatcagttctcctaagctgctttatcaaaggctctctttgtgggtggcagcatggctggatcatttcactagagacaaaggggataaaatgacagtgtctcccctgc

SEQ ID NO: 5021 - DNA, 110 bp, synthetic construct
  source 1..110: mol_type = other DNA
ttaactctgatggtatgccccatgaattcaggctaccttggcccttctgaactctaatctttgtgctcagaattccttttcctcagctatagttcagaaaatatttccat

SEQ ID NO: 5022 - DNA, 110 bp, synthetic construct
  source 1..110: mol_type = other DNA
ccttggcccttctgaactctaatctttgtgctcagaattccttttcctcagctatagttcagaaaatatttccatggagttcccatcatggctcagtggttaatgaaccc

SEQ ID NO: 5023 - DNA, 110 bp, synthetic construct
  source 1..110: mol_type = other DNA
gtctccagagtatggggcacataaccacccactgggtataggaaggaaccacccaaacactatgtgtttaatctgaaaagccagatattaagtttgcctgtatttaaagt

SEQ ID NO: 5024 - DNA, 110 bp, synthetic construct
  source 1..110: mol_type = other DNA
aacactatgtgtttaatctgaaaagccagatattaagtttgcctgtatttaaagtatggcaccctcatccatctgatggctgtggacggtgtccaggagacctgagggaa

SEQ ID NO: 5025 - DNA, 110 bp, synthetic construct
  source 1..110: mol_type = other DNA
cacaacgggaactccaggaattttcatcattcaatgataagacttctgatgtataacattagctgagtatttgtgtattcctcggtggggagccaagatctctggtcctc

SEQ ID NO: 5026 - DNA, 110 bp, synthetic construct
  source 1..110: mol_type = other DNA
acattagctgagtatttgtgtattcctcggtggggagccaagatctctggtcctctataaagtatatagaaattatggtctaaggtaatttttgtccttaccagaggtca

SEQ ID NO: 5027 - DNA, 110 bp, synthetic construct
  source 1..110: mol_type = other DNA
ctacaatggcttgtgtttcacttaaatcctgttgggcaagagccgtcaacacttggcacctctttggatctccactaagcccctgcgtaccacactaatgaagggtcctg

SEQ ID NO: 5028 - DNA, 110 bp, synthetic construct
  source 1..110: mol_type = other DNA
aattcttgatagagaaatctgcaactacaattactaggcaggattgtccagctgctgggggaacctcagaatatatgctcttgtatcttaaaagatgagaattacttaga

SEQ ID NO: 5029 - DNA, 110 bp, synthetic construct
  source 1..110: mol_type = other DNA
tgggggaacctcagaatatatgctcttgtatcttaaaagatgagaattacttagaaatctcgctagaaagaagcaaaacggacactggaaaaaaggcagctgtttacaca

SEQ ID NO: 5030 - DNA, 110 bp, synthetic construct
  source 1..110: mol_type = other DNA
gtagttggtcgtggccaaattcaagaatatgagacaagagagtgaaaagggtaatcagcattcaagttttcacaggaaaagctgaagccagagacaaagagcagattttg

SEQ ID NO: 5031 - DNA, 110 bp, synthetic construct
  source 1..110: mol_type = other DNA
tgaaccaaggaaagaaaatttcaagccaaagaaaacagctttaaaaatagccaatgacatcatatcagaaaccagatacaaacatatgttgaagaaatgccatcatagat

SEQ ID NO: 5032 - DNA, 110 bp, synthetic construct
  source 1..110: mol_type = other DNA
aaaagaaggtgttgcaaagggctttttctttcatagtatgtaagtgctgtcttctagataacatcaaattttgcttatgagatagagttcttttttcgtctttttttttg

SEQ ID NO: 5033 - DNA, 110 bp, synthetic construct
  source 1..110: mol_type = other DNA
agataacatcaaattttgcttatgagatagagttcttttttcgtctttttttttgtttgtttgttttttgttttttgttttttctagggccacacctgtggcatatggag

SEQ ID NO: 5034 - DNA, 110 bp, synthetic construct
  source 1..110: mol_type = other DNA
agtcgatgtcagatcacttaagaggaagcagaggaagagggtcttaagtaaaggaacatcagctgtaaaggcccaggcaggacggacagaacattagaaacttcaaggta

SEQ ID NO: 5035 - DNA, 110 bp, synthetic construct
  source 1..110: mol_type = other DNA
acatcagctgtaaaggcccaggcaggacggacagaacattagaaacttcaaggtactctacatgtctagagaggaaggattgtatcaagaaaaaaagacaggtagtcaaa

SEQ ID NO: 5036 - DNA, 110 bp, synthetic construct
  source 1..110: mol_type = other DNA
gggcctgatttggtaatgtcttggaggccagagtaatgacacgtgttattctcaatgagtggagggttttgagctggaagaagacataatgcaaatagtgtctctataag

SEQ ID NO: 5037 - DNA, 110 bp, synthetic construct
  source 1..110: mol_type = other DNA
tgagtggagggttttgagctggaagaagacataatgcaaatagtgtctctataagatgattctggcatagagaatagacttgggggtagaggggtcagtgtggataaaga

SEQ ID NO: 5038 - DNA, 110 bp, synthetic construct
  source 1..110: mol_type = other DNA
tggaagaataggacataaagaaagcaagaggaagaagaatctcaaactatcctcggcagataggcatcttctggtcccaaggttggatgctgtcactagctgataggata

SEQ ID NO: 5039 - DNA, 110 bp, synthetic construct
  source 1..110: mol_type = other DNA
ggcttaggcaacagagttaggaaggagcagaactggaaccagccctcaactagctgttgagtttgctcttggagacagttacacaaatacctaaatgtctaatgtgaaat

SEQ ID NO: 5040 - DNA, 110 bp, synthetic construct
  source 1..110: mol_type = other DNA
gttgagtttgctcttggagacagttacacaaatacctaaatgtctaatgtgaaatctataagcaagtaaggaggggatgtgaatgtggaagaggctgtgcctgatgctca

SEQ ID NO: 5041 - DNA, 110 bp, synthetic construct
  source 1..110: mol_type = other DNA
tcaattaagttcttaaagcagtgcttacactttaccttacactgaaataaatcattttgtagtatgagtgccatggagtagagcttaaatgctttagctggacatcaaga

SEQ ID NO: 5042 - DNA, 110 bp, synthetic construct
  source 1..110: mol_type = other DNA
ttttatgaaagtatatcttatcgtaacagctaaattgtaaggttgctaaagttagggtcacgtgttatgttttcgtagcacttctaatacctcacccaccgtcaagcctg

SEQ ID NO: 5043 - DNA, 110 bp, synthetic construct
  source 1..110: mol_type = other DNA
attcctgtgtctagtaactatcataaaggcattgttggcctgtgggttatgggattacatgtcttcttgagcacaagaaaaaaagactgagctgagagggttaggcaaga

SEQ ID NO: 5044 - DNA, 110 bp, synthetic construct
  source 1..110: mol_type = other DNA
tttgatacatagtaggtaatgtattgtggccccactaatgaggtagtgctgaaatacagcactgcctgaaattacagcttttctcttacattttttgctctagatttatt

SEQ ID NO: 5045 - DNA, 110 bp, synthetic construct
  source 1..110: mol_type = other DNA
aacaaaggctttcacccaatcccacaaggagctctggagctggggtggcttttcaggtttatgccactttgagccaagaggactagattctgtatacccacatccacctg

SEQ ID NO: 5046 - DNA, 110 bp, synthetic construct
  source 1..110: mol_type = other DNA
gggaccccagagcctgtgattggctctgacacatccagccgaaagggttcttattccacgaatgatttttttttttccagatcgtattgagttgggactgattttgatag

SEQ ID NO: 5047 - DNA, 110 bp, synthetic construct
  source 1..110: mol_type = other DNA
tgaaacttcaggcccatccttgccttcaatcctccgtcagctgcagcaaggctcccttgcagtctcttgcagctctgaattgggcacaggggttgggagcttcatggctg

SEQ ID NO: 5048 - DNA, 110 bp, synthetic construct
  source 1..110: mol_type = other DNA
attattgaattgagtgatactgaattgataggtttggggtggaaactgaatattttcatttctaacaagctcccagatgctgctgctgatttttgaacaacactacaaat

SEQ ID NO: 5049 - DNA, 110 bp, synthetic construct
  source 1..110: mol_type = other DNA
aagaatatcttgtctgctccttttgctcctgcttccttcatcttagccgtaaagggtcaaagcagagttaggggagtggaagaggagctggagagaaggagggaggagtc

SEQ ID NO: 5050 - DNA, 110 bp, synthetic construct
  source 1..110: mol_type = other DNA
tttctgtaattgtcattattgttctgactaatgttgattttaaagtgtagatccggccattcaaagggagacaaaactaaacagaaaatttcactgcaagataaaacatt

SEQ ID NO: 5051 - DNA, 110 bp, synthetic construct
  source 1..110: mol_type = other DNA
cacaactttttcttttctttcctccttttttctgagcttctccttgccatgtacggcctctttccttgttaaaatatttcgtactccatttgcatacccatgttactagc

SEQ ID NO: 5052 - DNA, 110 bp, synthetic construct
  source 1..110: mol_type = other DNA
caccaagctccctgaaggtgttagaggaggctgcagtcatctcaaagctcaaactgggaaggatttacttccaagctcattcataagacggttggcagccctcagatcca

SEQ ID NO: 5053 - DNA, 110 bp, synthetic construct
  source 1..110: mol_type = other DNA
caaagtagctagccaataggactcaaagtttccatgagtcattggccatatgcctaaacaccttgtggagaagtccaatgctgtcttggcttcatgtgtgtacctccttt

SEQ ID NO: 5054 - DNA, 110 bp, synthetic construct
  source 1..110: mol_type = other DNA
agccaagttgaccatagaatcgaccatcacagatagtaaacaacttataaagaactttgttaaatcttgtcaaggagtttaacatttatccctaggtctgtagagagggc

SEQ ID NO: 5055 - DNA, 110 bp, synthetic construct
  source 1..110: mol_type = other DNA
catttctaagtgcaaacatactggctcaattattctgaaagaagggagctaaaaacgtttttcctcttgcagctaccacaacgttggatggcttgcttaaaaacacaaaa

SEQ ID NO: 5056 - DNA, 110 bp, synthetic construct
  source 1..110: mol_type = other DNA
cgtttttcctcttgcagctaccacaacgttggatggcttgcttaaaaacacaaaaaacatgtgtacaaaatggtttgtccctggccttcatgttgaagattttcttctgc

SEQ ID NO: 5057 - DNA, 110 bp, synthetic construct
  source 1..110: mol_type = other DNA
atctccatctcatgaatgtgacccaatcaaacaatgatttggtcactactgctcttttacctagttttaaacttttaagaaaccctgctgtcttatcagttggatcctca

SEQ ID NO: 5058 - DNA, 110 bp, synthetic construct
  source 1..110: mol_type = other DNA
tttacctagttttaaacttttaagaaaccctgctgtcttatcagttggatcctcagcttcagtacactgctgaagactatccaagtatggtcttccaatctcccttgcct

SEQ ID NO: 5059 - DNA, 110 bp, synthetic construct; identical to SEQ ID NO: 5057
  source 1..110: mol_type = other DNA

SEQ ID NO: 5060 - DNA, 110 bp, synthetic construct; identical to SEQ ID NO: 5058
  source 1..110: mol_type = other DNA

SEQ ID NO: 5061 - DNA, 110 bp, synthetic construct
  source 1..110: mol_type = other DNA
aaagtagaagggaggttgccaagggttagttaaaaggggggattattgtttgtttgttttcctttttaggcctgcgcctgtggcatgtagaaattcccaggttaggggtc

SEQ ID NO: 5062 - DNA, 110 bp, synthetic construct
  source 1..110: mol_type = other DNA
aattgagaggctctgggatggcaacaggaaagaaacttgtttaactttgtttaggctctcaggccatctgatcagggagctctttatgtatagaatacctgttaataaca

SEQ ID NO: 5063 - DNA, 110 bp, synthetic construct
  source 1..110: mol_type = other DNA
tcgaggcttcattacatatgcatgattgactaaatcagtggccattggtgatagaactcagctctctgtcctctctaccctccctctccttagggggatgggggagcact

SEQ ID NO: 5064 - DNA, 110 bp, synthetic construct
  source 1..110: mol_type = other DNA
gttttagcttactagtctccattagtaagctcctcattggaatagagtgatccgtaggtcaaaaaaatctcaccacaggcttctgaatcacctgaagtagaaggcagtgc

SEQ ID NO: 5065 - DNA, 110 bp, synthetic construct
  source 1..110: mol_type = other DNA
aatgacacatatgacaaagagatttttatccctacctgttgctaatgggattgttgtaaagtggtttccaatgtgtggaccatagaaggcatggggcagaggtattgcaa

SEQ ID NO: 5066 - DNA, 110 bp, synthetic construct
  source 1..110: mol_type = other DNA
gttgaggagattaagaatttgtctcttcttttctcatatgtctcttcttaatataagcccatatttctttgataccagatatcgtaagttgttgtatacatcatggatgt

SEQ ID NO: 5067 - DNA, 110 bp, synthetic construct; identical to SEQ ID NO: 5066
  source 1..110: mol_type = other DNA

SEQ ID NO: 5068 - DNA, 110 bp, synthetic construct
  source 1..110: mol_type = other DNA
aaagagactcgtttgcagcatgagagctgaaacaacaaggcagtacagtgcctggttcgacctcagctgagaacatgtgtgttgggtgactcaggtttttcattgcttta

SEQ ID NO: 5069 - DNA, 110 bp, synthetic construct
  source 1..110: mol_type = other DNA
cttctagacagccaattggtaagctataagtcttcttttgctttagctgtggttagtgtgtttgctggacttgtaaaatgtattttcagtgttcatttgtttagattgag

SEQ ID NO: 5070 - DNA, 110 bp, synthetic construct
  source 1..110: mol_type = other DNA
gtgtgtttgctggacttgtaaaatgtattttcagtgttcatttgtttagattgagaggattgagctaaattttacaaagtttatgccttcattttagaaggccttttaag

SEQ ID NO: 5071 - DNA, 110 bp, synthetic construct
  source 1..110: mol_type = other DNA
tacgtgggattaatgcactccagcttaacgaagctgtgaattcagccctaaatgcaaagagtagagaatctgaaaattttaaattccttccttacatcctgctatcttga

SEQ ID NO: 5072 - DNA, 110 bp, synthetic construct
  source 1..110: mol_type = other DNA
aaagagtagagaatctgaaaattttaaattccttccttacatcctgctatcttgaatgagaagggataatgaggaatttgcctgaagaagtcagaaactggactccaacc

SEQ ID NO: 5073 - DNA, 110 bp, synthetic construct
  source 1..110: mol_type = other DNA
ggctgttttactctctattaacatcctaagttatagcagtgtaagattatatattagtgctgcaacaataaaccatgagccactgtgtgggaaaagaaagagattttaat

SEQ ID NO: 5074 - DNA, 110 bp, synthetic construct; identical to SEQ ID NO: 5073
  source 1..110: mol_type = other DNA

SEQ ID NO: 5075 - DNA, 110 bp, synthetic construct
  source 1..110: mol_type = other DNA
acagctttgtcatactatgtgaccacttggagatttgtttgtgtttaaaatacaaaactgtgaaatagattgcaaactgtgaggttgtcttaagtccttccaggcttctg

SEQ ID NO: 5076 - DNA, 110 bp, synthetic construct
  source 1..110: mol_type = other DNA
cccattcaagttgatttgatttgaggattgcccagcaaagtaaattttgaaaccatttctttaaatagacgaaactcaattctaatgaacaagatgtggaaccctagcat

SEQ ID NO: 5077 - DNA, 110 bp, synthetic construct
  source 1..110: mol_type = other DNA
tttctttaaatagacgaaactcaattctaatgaacaagatgtggaaccctagcatcagctaattacttgtgacttgttccagttgtgtaccacagtgtgttcacacatga

SEQ ID NO: 5078 - DNA, 110 bp, synthetic construct; identical to SEQ ID NO: 5076
  source 1..110: mol_type = other DNA

SEQ ID NO: 5079 - DNA, 110 bp, synthetic construct; identical to SEQ ID NO: 5077
  source 1..110: mol_type = other DNA

SEQ ID NO: 5080 - DNA, 110 bp, synthetic construct
  source 1..110: mol_type = other DNA
agaaatccaggtatcttgaagaacaatgtttcacataagatctggcacatagatgatgctgaataaacaggactgaatacatgaatgattgaatggagaggggaagggat

SEQ ID NO: 5081 - DNA, 110 bp, synthetic construct
  source 1..110: mol_type = other DNA
atgctgaataaacaggactgaatacatgaatgattgaatggagaggggaagggataaattcctccattccaatcaggtttagtgctaaatgcttaggattctgcaacaag

SEQ ID NO: 5082 - DNA, 110 bp, synthetic construct
  source 1..110: mol_type = other DNA
tgtattaaatgaaatatcatctaaaaagttaggctctcaacaaatacaacataagggccagtgaaaaaggatgactacccacaagtatgtcacatgttatgtattttctg

SEQ ID NO: 5083 - DNA, 110 bp, synthetic construct; identical to SEQ ID NO: 5082
  source 1..110: mol_type = other DNA

SEQ ID NO: 5084 - DNA, 110 bp, synthetic construct
  source 1..110: mol_type = other DNA
ctattgtgccatgatgggaactcccaaagcaatcctgaaaatgaaaatggaaccagaagactcaagatccctgatttcaggctatagttcagagctatagtattcaaaaa

SEQ ID NO: 5085 - DNA, 110 bp, synthetic construct
  source 1..110: mol_type = other DNA
gaagactcaagatccctgatttcaggctatagttcagagctatagtattcaaaaaggtatggatggtactggcacaaactgacatatagatcaatggaccaggatagaaa

SEQ ID NO: 5086 - DNA, 110 bp, synthetic construct; identical to SEQ ID NO: 5084
  source 1..110: mol_type = other DNA

SEQ ID NO: 5087 - DNA, 110 bp, synthetic construct; identical to SEQ ID NO: 5085
  source 1..110: mol_type = other DNA

SEQ ID NO: 5088 - DNA, 110 bp, synthetic construct
  source 1..110: mol_type = other DNA
accagttacatcttttctgccatgtgacacatgggcagttcatttggggcctttcttggagaaacctgaaaattctcccctccaaaaaatgatcagggtttaatataata

SEQ ID NO: 5089 - DNA, 110 bp, synthetic construct
  source 1..110: mol_type = other DNA
ggggcctttcttggagaaacctgaaaattctcccctccaaaaaatgatcagggtttaatataatataacatattatcaaattaatatcaaataagatatggaggaccaat

SEQ ID NO: 5090 - DNA, 110 bp, synthetic construct
  source 1..110: mol_type = other DNA
aaccatcttctccgtgccgctctcatgttcccattgctttgatctagcagagcgttagctcagagggaggtagatttatcaactcagagtgcttacttcagtaataatcc

SEQ ID NO: 5091 - DNA, 110 bp, synthetic construct
  source 1..110: mol_type = other DNA
tcaatttgggcaaggctagtttctccatggtctctcctctccaatctattttatcagttattgatgttagggagagaaggagatgacttttattagctagctcatttatc

SEQ ID NO: 5092 - DNA, 110 bp, synthetic construct
  source 1..110: mol_type = other DNA
agttattgatgttagggagagaaggagatgacttttattagctagctcatttatcttacttaagatggtaagatttgtcaataagtaggaatacaaatatctttctggcc

SEQ ID NO: 5093 - DNA, 110 bp, synthetic construct
  source 1..110: mol_type = other DNA
gggctcttgatgtctttcttaatccattgcaagatactctttaaacacatggcgacatctcttcaaacaaaccatcaaaatccaatgaacttacttcaatgaatgcagat

SEQ ID NO: 5094 - DNA, 110 bp, synthetic construct
  source 1..110: mol_type = other DNA
aatatggcatctattaagcaatgtacatataaatattggattagagcaactcatggctgcctccatctccagaaaattgcctttttccaagcaggagtgtctaaacccta

SEQ ID NO: 5095 - DNA, 110 bp, synthetic construct; identical to SEQ ID NO: 5094
  source 1..110: mol_type = other DNA

SEQ ID NO: 5096 - DNA, 110 bp, synthetic construct
  source 1..110: mol_type = other DNA
gtaggaattaaccatttaaattaaccatttcatcttatcacttgatagaggcactggtcaaatagatatatttgaaaaggaggggaggaaggctgttaaagagacatgtt

SEQ ID NO: 5097 - DNA, 110 bp, synthetic construct
  source 1..110: mol_type = other DNA
ggtcaaatagatatatttgaaaaggaggggaggaaggctgttaaagagacatgttcaacaatgttcatggtggcagtttgtagtggtgaaaaatcagaaacttgctggat

SEQ ID NO: 5098 - DNA, 110 bp, synthetic construct
  source 1..110: mol_type = other DNA
gaacactgtatgttcttttaaacacacttctattagaggtgtgatttccaggaagaattttttatgctatagattacaataagtcttacacactgaaacaaaaatctaac

SEQ ID NO: 5099 - DNA, 110 bp, synthetic construct
  source 1..110: mol_type = other DNA
acaatgtgttatcatgaacaggttttattacaagtggacatgactaatttctgggttccaagtcagttgggaccaaaaccattcttcctgtcttacatcacaggcttata

SEQ ID NO: 5100 - DNA, 110 bp, synthetic construct
  source 1..110: mol_type = other DNA
tagacactaatacacagtattcacacatgccttttattcaggttaggggcccatagatccaaggattcattgctatcttcatggattctgacatgacattgctcactttt

SEQ ID NO: 5101 - DNA, 110 bp, synthetic construct
  source 1..110: mol_type = other DNA
atgagggagcagaaggttggtggccagaatgccaggatggctggctttgaggcgagtggctgtctcgggaggtggctctgactttgagccaggcttcttgactgacaacc

SEQ ID NO: 5102 - DNA, 110 bp, synthetic construct
  source 1..110: mol_type = other DNA
aagttgttttaagcacacataggtgggaaacagcccatcagacactgcgacccgaagaagccagtgccccgtttttccacaggggacaaactgcctgccctcctgatacc

SEQ ID NO: 5103 - DNA, 110 bp, synthetic construct
  source 1..110: mol_type = other DNA
cccagcttttttggaagggaaggtgctaaagaattctcccaggtaaagtactaccttaaatttttccctgttatgctatagcactggactctgtatttccttatatacat

SEQ ID NO: 5104 - DNA, 110 bp, synthetic construct
  source 1..110: mol_type = other DNA
tctcctcctctcccttccacagctgctgatgctcaaagctttccctaataaacgtcatccgtcttcatttctactgagtccacttcctggacagctcaacctgaggtgat

SEQ ID NO: 5105 - DNA, 110 bp, synthetic construct
  source 1..110: mol_type = other DNA
gctttattcccaggcaagctcttcccacaccatggcaaatggtcaacctaaagctccaggtttatgtgggcccaaatctgcagtctctgtggaaggattctcagatttgg

SEQ ID NO: 5106 - DNA, 110 bp, synthetic construct
  source 1..110: mol_type = other DNA
ccaggtttatgtgggcccaaatctgcagtctctgtggaaggattctcagatttggaatatgcaaactaggctacccaagacgatggtcagaggagtggcatacatacaag

SEQ ID NO: 5107 - DNA, 110 bp, synthetic construct
  source 1..110: mol_type = other DNA
ccttgagtacatcaccacctgcccagcaacctaatcacaacatggcctgacagaatgggtcagtctaaaaccaggggaaatgcaccactgaagaaatgaggctttctcag

SEQ ID NO: 5108 - DNA, 110 bp, synthetic construct
  source 1..110: mol_type = other DNA
aagggaaggtatgtgctctgccagcagaaggaactgtataggattaaagaggagatgtggggttttcttggaacagcaggtcgtacagttttgtcagaggggagagtggc

SEQ ID NO: 5109 - DNA, 110 bp, synthetic construct
  source 1..110: mol_type = other DNA
tgtggggttttcttggaacagcaggtcgtacagttttgtcagaggggagagtggcaaacaatgtgatgatgacagaactgcagaggtagtcaggggctagctagatcagc

SEQ ID NO: 5110 - DNA, 110 bp, synthetic construct; identical to SEQ ID NO: 5108
  source 1..110: mol_type = other DNA

SEQ ID NO: 5111 - DNA, 110 bp, synthetic construct; identical to SEQ ID NO: 5109
  source 1..110: mol_type = other DNA

SEQ ID NO: 5112 - DNA, 110 bp, synthetic construct
  source 1..110: mol_type = other DNA
atacagcctgtctttaagtgttttgtttcacaaaacagtcaagggaggaatctagggagagctgtcctcaggaaatgtggtcatcttcatggccaaatcagtttggacta

SEQ ID NO: 5113 - DNA, 110 bp, synthetic construct
  source 1..110: mol_type = other DNA
tcagggaaagcaaatcagagacagatgcacccggccaacagatacccctcaaagctgcttacaaagcaagctggggcccgacaggagccaaagtctaagagtgtgagttc

SEQ ID NO: 5114 - DNA, 110 bp, synthetic construct
  source 1..110: mol_type = other DNA
aacaggaactctcaccataaattcttgagtattctttatttatctgtattcttgctatgacagataatagatggtatatgatgattgagcttctttattccatctcccac

SEQ ID NO: 5115 - DNA, 110 bp, synthetic construct
  source 1..110: mol_type = other DNA
tgaaactttaaagtcagtttccattttttctctatattctaaagaattactccgcatctcttcagttcttggcattataagtggttggcggaagtcagggttctggaaag

SEQ ID NO: 5116 - DNA, 110 bp, synthetic construct
  source 1..110: mol_type = other DNA
tccagtaataaatgagcagctaatacagaatataaaaatagctagctggaaacctctgggtaggtaagtcaagttgcaattcagtcaaagtaggaacattgcatcatagt

SEQ ID NO: 5117 - DNA, 110 bp, synthetic construct
  source 1..110: mol_type = other DNA
tggtgagaaagtatgtttagcttcatcagaaactgccacacttttccaaagacatagtaccattttgcattcctactagtaatgcatgagaatttctgatgccccacata

SEQ ID NO: 5118 - DNA, 110 bp, synthetic construct
  source 1..110: mol_type = other DNA
ctctacagtgaaatccacagttagcaaggctttaacccttgaacacagaacttacaatcagcttcttactgcacttctctttaataggaacatactgtaaaggatcacca

SEQ ID NO: 5119 - DNA, 110 bp, synthetic construct
  source 1..110: mol_type = other DNA
ttttatttgataaggtgcctcaagataaaaaaagagctcaggaaaaactaattgaaaggaaatacagactgatcagggaatccagaattttcaaggttgaaaaatgaaac

SEQ ID NO: 5120 - DNA, 110 bp, synthetic construct
  source 1..110: mol_type = other DNA
aaggaaatacagactgatcagggaatccagaattttcaaggttgaaaaatgaaactcaagtctccatcaattgaagataaaattaaatgatattttgagtttaaaaggcc

SEQ ID NO: 5121 - DNA, 110 bp, synthetic construct
  source 1..110: mol_type = other DNA
gagcaagcacccagttttcttatcagcttgcccagttgggagcataaaggaatgagtacagataagttaaaatttatcagcatcaaacaccgaaaaatggagtaagaatt

SEQ ID NO: 5122 - DNA, 110 bp, synthetic construct
  source 1..110: mol_type = other DNA
gggtctgagaatttgtgttttaacaagctccaggatcgcaccttgaggaactcaggtctaacagtgaaacatagtatgaatatggttcttgacttatattagggactcag

SEQ ID NO: 5123 - DNA, 110 bp, synthetic construct
  source 1..110: mol_type = other DNA
tcaaaattcaataatgctcagctaaaccccaaattaaactcaacacggaattcaactccatctacacagggtcatttcaactatttgaaaaatcaatcaaccaaaagttt

SEQ ID NO: 5124 - DNA, 110 bp, synthetic construct
  source 1..110: mol_type = other DNA
tctatcttatctgattggttttggagctgctgttaattgcttccctcccccaagatgttgactcagtatccacatacatgtgtctgtcatcctagaagtttggatataat

SEQ ID NO: 5125 - DNA, 110 bp, synthetic construct
  source 1..110: mol_type = other DNA
aaattttgagggttccttatatattctagatattaattcttcactggatatgtaatttgcataatttctttcccagtctgtagcttgcctttccagcatctttacatgag

SEQ ID NO: 5126 - DNA, 110 bp, synthetic construct
  source 1..110: mol_type = other DNA
agagatgtcaaagtcaatagttaaaagctggttggacccttcaattctatctcaggggtataaacgaattcatcaccagcaaacctacactataagaaatgttaaaggaa

SEQ ID NO: 5127 - DNA, 110 bp, synthetic construct
  source 1..110: mol_type = other DNA
gcccctgattccatcttcacagccagcagcgatgggtcaagtccttctcacatcccaccactctgacctcctcctctgcctccttctgcttttaaggagacttgggaata

SEQ ID NO: 5128 - DNA, 110 bp, synthetic construct
  source 1..110: mol_type = other DNA
aagaaaagaggagtgtgagttcgttgtttaaatttgttcaagtattacagtaatgagtgccacaatttactcccaaaaaaaaaaaaaaagtacagtaaaacactgctcta

SEQ ID NO: 5129 - DNA, 110 bp, synthetic construct
  source 1..110: mol_type = other DNA
caaagttgaggttgggaagcattcaagtcaggctctatcagcgtgcatgcaccatttgggtacaaaccatctcctcatcccattcctacgtctccttgctgctctctcct

SEQ ID NO: 5130 - DNA, 110 bp, synthetic construct
  source 1..110: mol_type = other DNA
acacactcaacttttttccaaacttgtattctaacaataggcagttcatgctccaagaccacaatagatttttttttcttaggagagcctatgaattttatctcaaatac

SEQ ID NO: 5131 - DNA, 110 bp, synthetic construct
  source 1..110: mol_type = other DNA
ccatgataataccacaataatagagtattttttcagaaaactgttcatgatatctgattcatatgtactatgagtcttatcataggcccataaagagaaatcctaacagg

SEQ ID NO: 5132 - DNA, 110 bp, synthetic construct
  source 1..110: mol_type = other DNA
cagtccagatctcatcaagctatattataactgggcaggaaaggtgacatatcctggaggccaaaacgtaaatgaaagtgaatactgttggccatcccctgtaagcacaa

SEQ ID NO: 5133 - DNA, 110 bp, synthetic construct
  source 1..110: mol_type = other DNA
ggcagtagaggatatgtagacctgacctcaggatccttagacctcttccctgccctgctctgctgcctaggtactgatgctctccaaatctgtttccagccctatccagt

SEQ ID NO: 5134 - DNA, 110 bp, synthetic construct
  source 1..110: mol_type = other DNA
aaagaacagtacctctaatctcccaaacatcaaaagatcagcttctagagtcattctgtcataatcctctcagcagcaattttgccacaaactaccctcatcaagaatgt

SEQ ID NO: 5135 - DNA, 110 bp, synthetic construct
  source 1..110: mol_type = other DNA
ttcgaatgctgctgttgctgctgctgctgctgcagctactgctgtgtgtgtgtgagagagagagagaaaagaaggaggcattcccgttgtggcagagcagaaatgaatcc

SEQ ID NO: 5136 - DNA, 110 bp, synthetic construct
  source 1..110: mol_type = other DNA
acaaacgcacattattttgaggtctagagaacaattttctaagaactaaggcataacctgcttaggtgatcttccaggatttacagtaaaatgaaaattcagtttcgtat

SEQ ID NO: 5137 - DNA, 110 bp, synthetic construct
  source 1..110: mol_type = other DNA
acctgcttaggtgatcttccaggatttacagtaaaatgaaaattcagtttcgtatagacaaagattaaaaaaaacagaattactgagtgtctgcttctacaatatggaac

SEQ ID NO: 5138 - DNA, 110 bp, synthetic construct
  source 1..110: mol_type = other DNA
ggaaatctttatactgtttcttcattctgccatgtctagcttaggtctttcctttgcttccatagtaccctgtacatatatatatcatgttgcctcatattgtataatct

SEQ ID NO: 5139 - DNA, 110 bp, synthetic construct
  source 1..110: mol_type = other DNA
taccctagactactctggtacactgtcatcctggatttaaatacaaattcatccgctcttcaaagccataatatgatacttatgctcttcataagttcaaggccttatac

SEQ ID NO: 5140 - DNA, 110 bp, synthetic construct
  source 1..110: mol_type = other DNA
agtcgcaatttactcagcctaacaagacccaactattctcagtccaggggcccgtctacctcctacctcagtgccaggaggcttactttttaaggagagtgagtatggca

SEQ ID NO: 5141 - DNA, 110 bp, synthetic construct
  source 1..110: mol_type = other DNA
aggcattccttaggaagagattgcagaaaggtaaggtcatttttgagagtgtatatatgaaatctggagaattgactagagtggataggccaacaggatagagcagaatg

SEQ ID NO: 5142 - DNA, 110 bp, synthetic construct
  source 1..110: mol_type = other DNA
gtggccccagaacacacagtcctcagagcaggtgtgaagcttggcctgtcccatatcccctgccctacagtcatccatccagctgcatacatggggctcttccctctctt

SEQ ID NO: 5143 - DNA, 110 bp, synthetic construct
  source 1..110: mol_type = other DNA
ttcaagacagacccatgagctctccagggtggattttgtttaattctttttcagccagcatagagctgtaaacagagcaaaccttgagaaataagtgtttgactgattat

SEQ ID NO: 5144 - DNA, 110 bp, synthetic construct
  source 1..110: mol_type = other DNA
gacaccggcctggtgcctctggcctatgtgactttgaccccaactccaagtccaacccctggaagcagccaaaactgaggccctgtgcatgttggtggcctcagggaccc

SEQ ID NO: 5145 - DNA, 110 bp, synthetic construct
  source 1..110: mol_type = other DNA
ccatccccttctcccatggcaagcttccttggccggcctttcccttaactgacccaccaggcccctctcccctagatagtcccccatttactatgaagcctagcacatct

SEQ ID NO: 5146 - DNA, 110 bp, synthetic construct
  source 1..110: mol_type = other DNA
gtacttcacacccagcggggaagtcaataggatgctgggacctgtgaaaccaaaggatggggaaggagtcaagacagcaaagatccacctttatccctgcccttcatctc

SEQ ID NO: 5147 - DNA, 110 bp, synthetic construct
  source 1..110: mol_type = other DNA
gatggggaaggagtcaagacagcaaagatccacctttatccctgcccttcatctcccctctcccagcattcctctcatatcttcccccagtgcgccctgtcccccgtaac

SEQ ID NO: 5148 - DNA, 110 bp, synthetic construct
  source 1..110: mol_type = other DNA
agggatcgaacctacaacctcatggttactggttgggttcgttaataactgagccacaatgggaactcctaattatctattttatatatagtagtgtgtatatgttaatc

SEQ ID NO: 5149 - DNA, 110 bp, synthetic construct; identical to SEQ ID NO: 5148
  source 1..110: mol_type = other DNA

SEQ ID NO: 5150 - DNA, 110 bp, synthetic construct
  source 1..110: mol_type = other DNA
tgctctcgaggacacacgatgttggcaataacatcacacaaggagagaaagctaggttctaatctggctgaggtacttctggtcactgactagctttataaagacagggt

SEQ ID NO: 5151 - DNA, 110 bp, synthetic construct
  source 1..110: mol_type = other DNA
tattttcttgccccatgcccactaatttcctgtcccaacaccctctcatccccagcactgctcgccccacacaagggggtgcatttggaccctctgattggtttcggtgg

SEQ ID NO: 5152 - DNA, 110 bp, synthetic construct
  source 1..110: mol_type = other DNA
ttgccaacgaataggatggtcctgctctagggatggggaaatggacagagcttgggtcgtctcaatctgtgagagggaagaatgctttgaatgagagcactggagggtac

SEQ ID NO: 5153 - DNA, 110 bp, synthetic construct
  source 1..110: mol_type = other DNA
gtcgtctcaatctgtgagagggaagaatgctttgaatgagagcactggagggtactcttccccaaagcttacattcagggcttttcctcccttcaaaacgaaaacagctt

SEQ ID NO: 5154 - DNA, 110 bp, synthetic construct
  source 1..110: mol_type = other DNA
gattgtgccctgagcacaggagacaggtggcaggctcaggactggctggacccttcacctgtcatacgttctgaaccctctccttgacacttcccacctggcatcgctat

SEQ ID NO: 5155 - DNA, 110 bp, synthetic construct
  source 1..110: mol_type = other DNA
cacctgtcatacgttctgaaccctctccttgacacttcccacctggcatcgctatttctgacatatggcttcttcctgacccttaggaagaggatacttgtagctcaaca

SEQ ID NO: 5156 - DNA, 110 bp, synthetic construct
  source 1..110: mol_type = other DNA
ttttatttatctgaaatacagaaagctgtttttgagctcagggcaaaatcactggtaacattttaaaagtgccactttaggagttcctgttttggctcagaggtaacgaa

SEQ ID NO: 5157 - DNA, 110 bp, synthetic construct
  source 1..110: mol_type = other DNA
atacagaaagctgtttttgagctcagggcaaaatcactggtaacattttaaaagtgccactttaggagttcctgttttggctcagaggtaacgaacccaactagcatcca

SEQ ID NO: 5158 - DNA, 110 bp, synthetic construct
  source 1..110: mol_type = other DNA
ctaatcttttcttgatctagcccctgacctgactcttccctccttaacacttcagcagctcacggcttataacgtcccaggttatagttgtaccacctcttgtcctgctg

SEQ ID NO: 5159 - DNA, 110 bp, synthetic construct
  source 1..110: mol_type = other DNA
atctggcctgtgtggctcagagcagatggaactgaaggaggctttcgcctgtcaaagtctctaagagctcaaaacatagaaggcctgggagttcctgttgtggtgcagtg

SEQ ID NO: 5160 - DNA, 110 bp, synthetic construct
  source 1..110: mol_type = other DNA
ctcagagcagatggaactgaaggaggctttcgcctgtcaaagtctctaagagctcaaaacatagaaggcctgggagttcctgttgtggtgcagtggaaacgaatccgacc

SEQ ID NO: 5161 - DNA, 110 bp, synthetic construct
  source 1..110: mol_type = other DNA
acctaaaggacaggcagcacgtgacctggaaggagctatgggctaagaattgcgttgagttttgtgtctggagtagtgatcaaagtctctcctactggcaatggccctgg

SEQ ID NO: 5162 - DNA, 110 bp, synthetic construct
  source 1..110: mol_type = other DNA
accccagttgctgcctacctctgagcactatggccctaccacaaacatgtacactcttgctcaatgacactgcccacccacccccttgccattctacaccctccattcaa

SEQ ID NO: 5163 - DNA, 110 bp, synthetic construct
  source 1..110: mol_type = other DNA
cttgctcaatgacactgcccacccacccccttgccattctacaccctccattcaaaaagtaaaagggacaagggataagagctatgctttctggagctttttaaacttct

SEQ ID NO: 5164 - DNA, 110 bp, synthetic construct
  source 1..110: mol_type = other DNA
gggagtaaagttctgtggaaatccagggactgtactttattgcattacagtccttggatttccggggtgtttcctggccacgttccttcctttccaactcactttatcca

SEQ ID NO: 5165 - DNA, 110 bp, synthetic construct
  source 1..110: mol_type = other DNA
tccacagagccatgacaggaattccaaggccaacctttattaaggtgtaattataaacagcgctgatatgtgagggagcaagctttcagcttcaggatattaaaatattt

SEQ ID NO: 5166 - DNA, 110 bp, synthetic construct
  source 1..110: mol_type = other DNA
atccacttaggtactgtctccagatgagttttaatccccgcctgtattctcctcaccagcaagtacttggataccatctttaccctgcctgcccccatcacttggttgtg

SEQ ID NO: 5167 - DNA, 110 bp, synthetic construct
  source 1..110: mol_type = other DNA
cctcattctcatggatatcagctggattcatttccattacaccacaaagtgaacttcccatcattttatttcagtttttaaaacaatttttacggccacactcatgacaa

SEQ ID NO: 5168 - DNA, 110 bp, synthetic construct
  source 1..110: mol_type = other DNA
tagtgttagcatttttcagacttctgattttatcatgggtgtaaatattgcacgtattttaaatttatgtatgatttccattcacctcttcgctgatgtctgctggatat

SEQ ID NO: 5169 - DNA, 110 bp, synthetic construct
  source 1..110: mol_type = other DNA
gaggcaggggggatgggctttgtggcaaggtgcgcaaccatcctggtttgtcaagaactttgctagttttagcactgaaattcccatgttccaggaaacccctcagacca

SEQ ID NO: 5170 - DNA, 110 bp, synthetic construct
  source 1..110: mol_type = other DNA
acccccgtggaaagcagctctgcctccaactcttgatttttaaagaagccacttaacagtttgcactgggggctggtgggtgcggggggagtgtgtggtgggtgaccaga

SEQ ID NO: 5171 - DNA, 110 bp, synthetic construct
  source 1..110: mol_type = other DNA
acagtttgcactgggggctggtgggtgcggggggagtgtgtggtgggtgaccagagtctttgtttatgtccttgtgagtggttggaggaccttggccccaggacaggtgc

SEQ ID NO: 5172 - DNA, 110 bp, synthetic construct
  source 1..110: mol_type = other DNA
caccacaccttccttactcctgcacacaactgtcagtgaagacacagctgcaacgcctttacatgtttgaaaactagcttcagttctaaagaagtctgattggcagggca

SEQ ID NO: 5173 - DNA, 110 bp, synthetic construct
  source 1..110: mol_type = other DNA
tcattggccagagctcatctggccatgcccgtgttcccagggtgtgggaaaattcgaattggaatagtggtgaacagctcactcacacagtgagtctcaatttccttacc

SEQ ID NO: 5174 - DNA, 110 bp, synthetic construct
  source 1..110: mol_type = other DNA
tcataggagaggagttccaaatccctaccctcacaccttcctgccttggccccatctgcctcctctctgtggctggagctcctgggactcctggggcaccagctgtatag

SEQ ID NO: 5175 - DNA, 110 bp, synthetic construct
  source 1..110: mol_type = other DNA
gcagtagtactctcctgggtgagctaccccagaaggcaggaacagtgtccagtaacccaggcccatggttctcaaaccttgctagccatcggactcatctggggagcttt

SEQ ID NO: 5176 - DNA, 110 bp, synthetic construct; identical to SEQ ID NO: 5175
  source 1..110: mol_type = other DNA

SEQ ID NO: 5177 - DNA, 110 bp, synthetic construct
  source 1..110: mol_type = other DNA
ctagggtccagagaggttatgtcacttactcaagtcacacagctagtgagaggcgggagggtgattccacaccaggccgtcgggctccagagtccccgctcgtaaccacc

SEQ ID NO: 5178 - DNA, 110 bp, synthetic construct
  source 1..110: mol_type = other DNA
gacatcaggaatcactataaagctgcagtaattaagacagtgtgggactggcataggcacagataaatagaccaatgaaacagaatgagtccagaaactgatccatgcat

SEQ ID NO: 5179 - DNA, 110 bp, synthetic construct
  source 1..110: mol_type = other DNA
gaaaacaagaacaccctaagcaagaggcaggcagctctttgagaaatcactgttgatctttcaacccacatacacagaatttgcctgtcatctaaagagtggaacagaaa

SEQ ID NO: 5180 - DNA, 110 bp, synthetic construct
  source 1..110: mol_type = other DNA
cctctgcatgctgttttgaatgcttggggtgatgcagagatgactaacaatacagaggtggggcctagagaagggaccatcagaaccagacttcagataaggggaggaaa

SEQ ID NO: 5181 - DNA, 110 bp, synthetic construct
  source 1..110: mol_type = other DNA
aggtggggcctagagaagggaccatcagaaccagacttcagataaggggaggaaatgaggtactgagataaagggatgggaccccaggtccaaacaacgagcttcaatca

SEQ ID NO: 5182 - DNA, 110 bp, synthetic construct
  source 1..110: mol_type = other DNA
cccttttatacttccatcaggagggctgatggtcctgaagaaaagaaagggagcgaaggaacgtgagtggcccttcactttgaagctgacacctgggggcgctgttgttc

SEQ ID NO: 5183 - DNA, 110 bp, synthetic construct
  source 1..110: mol_type = other DNA
aaggaacgtgagtggcccttcactttgaagctgacacctgggggcgctgttgttcagtcttggcacccaccgcagccactgtaacaaacaggaagccggtagtggggggc

SEQ ID NO: 5184 - DNA, 110 bp, synthetic construct
  source 1..110: mol_type = other DNA
agtaccttcaaataaattcatcacaaaacagttttcctccttgcatagcagaggagagaagttggggccctgcgaatgaattgcgcttgtcctgcaaaggcattttctca

SEQ ID NO: 5185 - DNA, 110 bp, synthetic construct
  source 1..110: mol_type = other DNA
gagaagttggggccctgcgaatgaattgcgcttgtcctgcaaaggcattttctcattgaccttagttgtttcaagatacggggatttgatatactcacacacacgcatat

SEQ ID NO: 5186 - DNA, 110 bp, synthetic construct
  source 1..110: mol_type = other DNA
ttcttccttttaatattcaatacttttctgatgtgaggttgttgatgaggttctttgggtttcatggaggccttgggaatcacttaggtgatgtctcagcctagccttcc

SEQ ID NO: 5187 - DNA, 110 bp, synthetic construct
  source 1..110: mol_type = other DNA
gttcagctaccatagcaaaagtatttgagtttacaaatattaagcactagaagtaaattttggctttcagtggaacaaaacaactgaaataaccattggatttttttgga

SEQ ID NO: 5188 - DNA, 110 bp, synthetic construct; identical to SEQ ID NO: 5187
  source 1..110: mol_type = other DNA

SEQ ID NO: 5189 - DNA, 110 bp, synthetic construct
  source 1..110: mol_type = other DNA
aaagagagagtttggaaactggggaggccaggagtctagaatatgtggataaaaatactgcacccaggagttcccgtcatggtgcagtgatcaactaggaatcacgaggt

SEQ ID NO: 5190 - DNA, 110 bp, synthetic construct
  source 1..110: mol_type = other DNA
ggccaggagtctagaatatgtggataaaaatactgcacccaggagttcccgtcatggtgcagtgatcaactaggaatcacgaggttgcaggtttggtccctggccttgct

SEQ ID NO: 5191 - DNA, 110 bp, synthetic construct
  source 1..110: mol_type = other DNA
agaatgaattagttgaaatagtggtatgaaaagtgttcgaggccaaggaaatagcacgtgcaagggtcctctgatagaagggataatggcttgtttgctgtcctaaagga

SEQ ID NO: 5192 - DNA, 110 bp, synthetic construct
  source 1..110: mol_type = other DNA
accaagggaatagcagccatttgcaggtttgttaaggggaagtgcaaagagaaaaaaacagctgataaagaaaaatctagggctccctaccccacccaccaggtttttac

SEQ ID NO: 5193 - DNA, 110 bp, synthetic construct
  source 1..110: mol_type = other DNA
gcctcttttctctcattcttccttcacctactctcctttcaagttacagatatcttccatatactcaaatatgcctagcttaggctcacctcaggactttgcactacctt

SEQ ID NO: 5194 - DNA, 110 bp, synthetic construct
  source 1..110: mol_type = other DNA
gtgtgggagtggagctgagggttctcgtggagaagcagcgcaaaccagctgaggccacagtgcacccgggcctggggctgggaccatgactccatcctgccagtgatggg

SEQ ID NO: 5195 - DNA, 110 bp, synthetic construct
  source 1..110: mol_type = other DNA
cacagtgcacccgggcctggggctgggaccatgactccatcctgccagtgatgggatccccagccactttcgaaagtcatggtttgaaggggagccagtgtcacaggcat

SEQ ID NO: 5196 - DNA, 110 bp, synthetic construct
  source 1..110: mol_type = other DNA
aggaggagtgtgaccctgggctgggccagtccctgcagctgcggccaggcagctggtcctccatggaagaagaggggctggcgcacggcagtgaccgacactccctggag

SEQ ID NO: 5197 - DNA, 110 bp, synthetic construct
  source 1..110: mol_type = other DNA
gtcctccatggaagaagaggggctggcgcacggcagtgaccgacactccctggagctgcatcctgtctgtccagtgagggtaatcctgaccctgcctcagggcccccggg

SEQ ID NO: 5198 - DNA, 110 bp, synthetic construct
  source 1..110: mol_type = other DNA
gcattccttgttctccagccttcaaactatatcgccagctttcctgccagtttactgatggcagattgtcaaactgttcagcctccataatcctatgagccaattcctca

SEQ ID NO: 5199 - DNA, 110 bp, synthetic construct
  source 1..110: mol_type = other DNA
ggacacgaggcatgaacacttggttgcctcaactgatgccagtgccaaccaaactggtaagaagagctcagctaaacacatttgtgagttgttaaaggctgaatgtgaac

SEQ ID NO: 5200 - DNA, 110 bp, synthetic construct
  source 1..110: mol_type = other DNA
ggtaagaagagctcagctaaacacatttgtgagttgttaaaggctgaatgtgaactagtgtgagaacagagaaactctgggagcagcggcatctattcacgtccccgtgg

SEQ ID NO: 5201 - DNA, 110 bp, synthetic construct
  source 1..110: mol_type = other DNA
ttctctgagttcagtgatttcatatgtcacatttcttttagccttgtcccttctcacagtcccttcctgctacctagctcagatatagcctcttcctcccagtgatcaca

SEQ ID NO: 5202 - DNA, 110 bp, synthetic construct
  source 1..110: mol_type = other DNA
agacttgccctgattccatgttaggagaaaagctgggaatgagctctttatttttaacctccgcaggaaagacagatgaggctaccagtatccattctccacacggtgtt

SEQ ID NO: 5203 - DNA, 110 bp, synthetic construct
  source 1..110: mol_type = other DNA
cagcagaaataatgacgggagagaaggtaggaggaacagttggacaatgatgtacagtgctgaattgtactatatgtgcgctgatatttagtgtcctggagctttttaaa

SEQ ID NO: 5204 - DNA, 110 bp, synthetic construct
  source 1..110: mol_type = other DNA
agtgctgaattgtactatatgtgcgctgatatttagtgtcctggagctttttaaatcctagagattttagacaaagggtttcaccatgaaacctgattccaagaggatca

SEQ ID NO: 5205 - DNA, 110 bp, synthetic construct
  source 1..110: mol_type = other DNA
ttatacatcagacttttgttttatacatcaaacgtttgtctcagatttggtcacacaactaagctttactgtaccacagaaaaagaggtttctcttgagcacatttgcat

SEQ ID NO: 5206 - DNA, 110 bp, synthetic construct
  source 1..110: mol_type = other DNA
aagaagagtttctcttaatccttctgttttcattcctatgccctctgttgtgcctgatctccccaagactccagcctccctcatttgattttctataaaaaataagcttc

SEQ ID NO: 5207 - DNA, 110 bp, synthetic construct
  source 1..110: mol_type = other DNA
ctatgccctctgttgtgcctgatctccccaagactccagcctccctcatttgattttctataaaaaataagcttctagggggagggagtggaagggatcgggagcttggg

SEQ ID NO: 5208 - DNA, 110 bp, synthetic construct
  source 1..110: mol_type = other DNA
ttttaatgaattgttggatgctttttgtggtccactttgtgtgtttatctgcagctcttctacatttattttttaagcagtagcaattctctgggtggatcatttttagg

SEQ ID NO: 5209 - DNA, 110 bp, synthetic construct; identical to SEQ ID NO: 5208
  source 1..110: mol_type = other DNA

SEQ ID NO: 5210 - DNA, 110 bp, synthetic construct
  source 1..110: mol_type = other DNA
agcttttaaagggtcagggtttccataagtgatgatggctggcaagaggattctgagagcacagcctggctataggcacatagctgtgaaagtacagcattgtattcatg

SEQ ID NO: 5211 - DNA, 110 bp, synthetic construct
  source 1..110: mol_type = other DNA
tctttccctgtcaccctacctaggcttgtttctttcctatctaaataagcttgatcaaggctaagggagtctgcagactccctgtaccctgtgcctgacttgccctgggg

SEQ ID NO: 5212 - DNA, 110 bp, synthetic construct
  source 1..110: mol_type = other DNA
cagtgtttaagacgctcccagaatcattgattcatttacttttatgctcaaaaagaaaagttcatttcatgactcttctgcctaacaaaaagaaatgattgtatgtcttc

SEQ ID NO: 5213 - DNA, 110 bp, synthetic construct; identical to SEQ ID NO: 5212
  source 1..110: mol_type = other DNA

SEQ ID NO: 5214 - DNA, 110 bp, synthetic construct
  source 1..110: mol_type = other DNA
tgctcctcaccctgcccatccccaactgcctcaatcctcctcctgccacccccatctgcctggagttagtcagctacctctgtgtcagtctgcctgatgcccatctttct

SEQ ID NO: 5215 - DNA, 110 bp, synthetic construct
  source 1..110: mol_type = other DNA
tccccagtcatcacgagtggccttgagcactctctcttgctcagagcccagctgcaaacacacggtccatgaatgtggctgggataaatgaatgatgacggaaagccaga

SEQ ID NO: 5216 - DNA, 110 bp, synthetic construct
  source 1..110: mol_type = other DNA
cagagagacagagagccagcaaacatcctggtccctcctgggccaccagctggttggctaagtgtctgaccgtgggtaaggctcagccatctctcgagaaaacagagact

SEQ ID NO: 5217 - DNA, 110 bp, synthetic construct
  source 1..110: mol_type = other DNA
gagctgtagctgtcagcctgcgccagagcaatgccagatccaagttgcatctgagacctatgccacagctcagctttcagcaacactgcatccttcacccactgaggaag

SEQ ID NO: 5218 - DNA, 110 bp, synthetic construct
  source 1..110: mol_type = other DNA
gcctgcgccagagcaatgccagatccaagttgcatctgagacctatgccacagctcagctttcagcaacactgcatccttcacccactgaggaaggccagggattgaacc

SEQ ID NO: 5219 - DNA, 110 bp, synthetic construct
  source 1..110: mol_type = other DNA
atcctagggtagcctcaggactccatgcacaattatggagaagctatgttagcataactgaacgcctttgttctgtgcagctgtatctccacaggagccaggagagagac

SEQ ID NO: 5220 - DNA, 110 bp, synthetic construct
  source 1..110: mol_type = other DNA
aagggaagaccataagtggccaggacaagagagggactcttaccctctccttgcagttcccaggactttatgcccccaggcatctcttcagaatttgagagctctgccac

SEQ ID NO: 5221 - DNA, 110 bp, synthetic construct
  source 1..110: mol_type = other DNA
gttcccaggactttatgcccccaggcatctcttcagaatttgagagctctgccacttgaattgctgaatgggggagacaggcccagagaggggcaagaacttgcctgagg

SEQ ID NO: 5222 - DNA, 110 bp, synthetic construct
  source 1..110: mol_type = other DNA
cagaaaaaataagccacagggcctttgcaagccagcagctggtgctcacttgccaccaggggagacctgccaggggcccctgatgaatgtcagtgacaagcagagttgct

SEQ ID NO: 5223 - DNA, 110 bp, synthetic construct
  source 1..110: mol_type = other DNA
aaagcttgcctggagaatctttagtgtaggcaagccagggctgaagctagactttgtaagaatgcatggtagggcatgaagagggtggggcagccctgggagccagtcca

SEQ ID NO: 5224 - DNA, 110 bp, synthetic construct
  source 1..110: mol_type = other DNA
acccaaatatctaccatcataatagctaaacagtgggaatggggacaagggtccgggaagggtgacatgtgcaggtgaggggcctccactagcctgtccagtgtccccac

SEQ ID NO: 5225 - DNA, 110 bp, synthetic construct
  source 1..110: mol_type = other DNA
caggagttccatttgctgttaagattcagctgcagggaagcaaagaataagccagaatcactgagtgttccatctggtttaccatcatggcctccaccacagcctcttct

SEQ ID NO: 5226 - DNA, 110 bp, synthetic construct
  source 1..110: mol_type = other DNA
gaaggagagggcctggcccaggactgctgacagctccccacaccaccacaccgaaggtccttgatgaatgtgcatgagattgagtggaagccattgtgaggatcctcagt

SEQ ID NO: 5227 - DNA, 110 bp, synthetic construct
  source 1..110: mol_type = other DNA
gtcctgttaactcgcttccttcttcctcaaaactctagtaggatcctctgtggtcaaaaggcagacagagctgggcccctactctgccctagccacctatctcaggactt

SEQ ID NO: 5228 - DNA, 110 bp, synthetic construct
  source 1..110: mol_type = other DNA
aaaaggcagacagagctgggcccctactctgccctagccacctatctcaggacttcttttaagtgggagacagatacacctctctcttgatgaagctatttttattcggt

SEQ ID NO: 5229 - DNA, 110 bp, synthetic construct
  source 1..110: mol_type = other DNA
gatataaataccttcctccacgtgacaactggggtaggcacagccctcacctcacaggacaggtacacctgtgccccggtgatattgtgaacactctggggtggagtgat

SEQ ID NO: 5230 - DNA, 110 bp, synthetic construct
  source 1..110: mol_type = other DNA
aggacaggtacacctgtgccccggtgatattgtgaacactctggggtggagtgatgaccacaggagctgagagaagaagacacaggaaaacaaccttgaccttgaccaag

SEQ ID NO: 5231 - DNA, 110 bp, synthetic construct
  source 1..110: mol_type = other DNA
catcagatactgtattctgggttcttcggagaggagctaaagcagaggatgtgggggaagggcgggccctgggaaggctccctagggtcctgctcggttacaaggatggt

SEQ ID NO: 5232 - DNA, 110 bp, synthetic construct; identical to SEQ ID NO: 5231
  source 1..110: mol_type = other DNA

SEQ ID NO: 5233 - DNA, 110 bp, synthetic construct
  source 1..110: mol_type = other DNA
aggaaatgtgcatcagatactgtattctgggttcttcggagaggagctaaagcagaggatgtgggggaagggcgggccctgggaaggctccctagggtcctgctcggtta

SEQ ID NO: 5234 - DNA, 110 bp, synthetic construct; identical to SEQ ID NO: 5233
  source 1..110: mol_type = other DNA

SEQ ID NO: 5235 - DNA, 110 bp, synthetic construct
  source 1..110: mol_type = other DNA
gagagccggccttcccagggagttcgagttcagttcttacctgaggttggtttcctttttgcttcttcgcccctccccagaatagaggggtctccagagctttctcccag

SEQ ID NO: 5236 - DNA, 110 bp, synthetic construct
  source 1..110: mol_type = other DNA
tttttgcttcttcgcccctccccagaatagaggggtctccagagctttctcccagagcagagatgcttcctctcagaaaagagagggtgggtcccgccggtgggtcccac

SEQ ID NO: 5237 - DNA, 110 bp, synthetic construct
  source 1..110: mol_type = other DNA
tctgcccctggaccctgttggggttgttagactcatgcctcggtgagtgtgagccctgctgggcactgacactgaatccatatgactgagctgactttctgggtcttaat

SEQ ID NO: 5238 - DNA, 110 bp, synthetic construct
  source 1..110: mol_type = other DNA
ctgctgggcactgacactgaatccatatgactgagctgactttctgggtcttaatgagcctttgttgacctggtttaatgctcggttttgagaaagtggcagtgaagaaa

SEQ ID NO: 5239 - DNA, 110 bp, synthetic construct
  source 1..110: mol_type = other DNA
gtactgagcacctgctgcagcttctgttctcatcagatcctgtaataaccccacgaggaaggtagaactgtccccatgttactgctgaggacattgaagtttaaagacat

SEQ ID NO: 5240 - DNA, 110 bp, synthetic construct
  source 1..110: mol_type = other DNA
cgccttatatgacagcgctgaaattttaccttcatgaaggtgtaatcagctgtgtgctagaagtcactttacaaggttgttagatgatattttgatacaggccgaaggat

SEQ ID NO: 5241 - DNA, 110 bp, synthetic construct
  source 1..110: mol_type = other DNA
gaagttctgatggaagagatgattctgtattacagtgtgtctgaggagcgccacgtggcagtggagaaagaccaggtgtacgctgcaaaagtggaaaataagtaggtcct

SEQ ID NO: 5242 - DNA, 110 bp, synthetic construct
  source 1..110: mol_type = other DNA
gagtctcaccatgatccctctgcctgtcctagtctgcagtcccagccccatctgaacctgcacaagctctagcgagctcatgctacctgggggggaattctctatcaaga

SEQ ID NO: 5243 - DNA, 110 bp, synthetic construct
  source 1..110: mol_type = other DNA
acctgcacaagctctagcgagctcatgctacctgggggggaattctctatcaagagtctcagctgtggttccgggctttccctttggatgctgggctgatgtatcttctc

SEQ ID NO: 5244 - DNA, 110 bp, synthetic construct
  source 1..110: mol_type = other DNA
gctgagggtgcggccctaaaaagactatatatatatatatgggagtttaaatattatagagggctgttttgtaataggctgaattattatcgatgtattatatagatgca

SEQ ID NO: 5245 - DNA, 110 bp, synthetic construct
  source 1..110: mol_type = other DNA
atagagggctgttttgtaataggctgaattattatcgatgtattatatagatgcatcatagcacctctgggttattgtcagctcttatcagtcatagactgccgtgactt

SEQ ID NO: 5246 - DNA, 110 bp, synthetic construct
  source 1..110: mol_type = other DNA
ataaagctgcaagctttttttttttgtcccaatcaggtcatgctgcccatttaaaatcaatttttactgagctgtaaaaatttagcatagcacattaaaaaaatcaacac

SEQ ID NO: 5247 - DNA, 110 bp, synthetic construct
  source 1..110: mol_type = other DNA
gagcagacacatggagctcaagtcacgcagaccttgcatctcactggggagcactggggcagagtcccaggtctgcaccacaaactagctgagggagcttgagtaataca

SEQ ID NO: 5248 - DNA, 110 bp, synthetic construct
  source 1..110: mol_type = other DNA
ggggcagagtcccaggtctgcaccacaaactagctgagggagcttgagtaatacatagaatcttgtcagatctgagcattcttgtaaactttatgtttataaagtagtta

SEQ ID NO: 5249 - DNA, 110 bp, synthetic construct
  source 1..110: mol_type = other DNA
ggatgactcctttcaactggatataagggaaagctgtggaatgatacggagaaagggttccaggcagaaggaatagctagtgcaaaagtcaggatataatttgtgttcaa

SEQ ID NO: 5250 - DNA, 110 bp, synthetic construct
  source 1..110: mol_type = other DNA
ggttccaggcagaaggaatagctagtgcaaaagtcaggatataatttgtgttcaaagcatggaaagcaggcctgtgaaaccaatgaggaaaagagtgtttcaaaaagatg

SEQ ID NO: 5251 - DNA, 110 bp, synthetic construct
  source 1..110: mol_type = other DNA
gatcaaatacccattcactacttggagctaaaacttgaagcagcttcatatccgtgatttactgtgtctcagggtgttgaattacagggtgctgactgggcagaagacaa

SEQ ID NO: 5252 - DNA, 110 bp, synthetic construct
  source 1..110: mol_type = other DNA
tgcgggtctctggagaagatgacagatatgattaaggaatagctcccctgcttggggagatcagtgaaagaaatgggcatgcaagaagggaaggtggccaaaacttttat

SEQ ID NO: 5253 - DNA, 110 bp, synthetic construct
  source 1..110: mol_type = other DNA
gcctcgctcagtgggttaacctgttgccatgagctgcggtgtagttcgcagacttggctccaatctggcactgaacccgcatcctcatggatcctaatcgggttcattaa

SEQ ID NO: 5254 - DNA, 110 bp, synthetic construct; identical to SEQ ID NO: 5253
  source 1..110: mol_type = other DNA

SEQ ID NO: 5255 - DNA, 110 bp, synthetic construct
  source 1..110: mol_type = other DNA
tgtaatcttcacatcaacttatgaggtagataatattatcatatccatttttcagatgacaaaactgaggcacagagaggttaggtagtttgtctaaggtgaaatgtcta

SEQ ID NO: 5256 - DNA, 110 bp, synthetic construct
  source 1..110: mol_type = other DNA
atgacaaaactgaggcacagagaggttaggtagtttgtctaaggtgaaatgtctagaaagctagggagccagtcttcagatctagtcatctggctttagcagctgggctc

SEQ ID NO: 5257 - DNA, 110 bp, synthetic construct
  source 1..110: mol_type = other DNA
ttgacttcctctctcatcccagcagaagcctggactatcttctgtctggctcttacctttatacctccccagcctgtgctgctgtgtggacctagagaaagtagcttcag

SEQ ID NO: 5258 - DNA, 110 bp, synthetic construct
  source 1..110: mol_type = other DNA
cctttatacctccccagcctgtgctgctgtgtggacctagagaaagtagcttcagagcacctgtcctgtcatgttgggcccttcaccagaccttatccactccctccctt

SEQ ID NO: 5259 - DNA, 110 bp, synthetic construct
  source 1..110: mol_type = other DNA
aggtttatgaggaaggtctgccccctgtagccacaggcagtggaagcaggccagggagccagagctcaggaatgagacttctttgttcctaagtgtctgggcagggcgag

SEQ ID NO: 5260 - DNA, 110 bp, synthetic construct
  source 1..110: mol_type = other DNA
gagccagagctcaggaatgagacttctttgttcctaagtgtctgggcagggcgagaacctgggtgggcaggtctgggctgttagaagtctcacatccctcgtctcactac

SEQ ID NO: 5261 - DNA, 110 bp, synthetic construct
  source 1..110: mol_type = other DNA
ccatgaagcaagtctatcagattgtgaagcccctcaaccccaacttctgcttcctccagtgcaccagcgcgtacccactccaacctgaggacgtcaacctgcgtgtcatc

SEQ ID NO: 5262 - DNA, 110 bp, synthetic construct
  source 1..110: mol_type = other DNA
ccagtgcaccagcgcgtacccactccaacctgaggacgtcaacctgcgtgtcatctcggtgagcacaaggggagggccgttgtctgatggggccattcgctgtatggaag

SEQ ID NO: 5263 - DNA, 110 bp, synthetic construct
  source 1..110: mol_type = other DNA
tctgcatggcgtccacaaggcccttaaacaagctcttgacaggctcaaaggagagtggcatggggtggcacagctcccccagactcagctgctgctgtatctgctgctca

SEQ ID NO: 5264 - DNA, 110 bp, synthetic construct
  source 1..110: mol_type = other DNA
tggcatggggtggcacagctcccccagactcagctgctgctgtatctgctgctcagcagccatgtactcctgcaagggcacaagggggtcagggcagctcaggctgtgtc

SEQ ID NO: 5265 - DNA, 110 bp, synthetic construct
  source 1..110: mol_type = other DNA
attctggaatgtgagcccctccaggtccccctgcatctgacttatctttgtctaccgaggcccccagtggccttggtgtcccacactcacctatccccttctgtgggtta

SEQ ID NO: 5266 - DNA, 110 bp, synthetic construct
  source 1..110: mol_type = other DNA
tgaacagatgcaggagagcaaaggggagcacagctagaaaggtggtcgggcaaagctctgaatgctggctgagctggcacttgagaccacggagagaggtgtcaaagttt

SEQ ID NO: 5267 - DNA, 110 bp, synthetic construct
  source 1..110: mol_type = other DNA
ttgatgtgtgagtctgttggtaatgttcagtgatttttactatttttactttttggactgaatcctgaaccagtaggataaaacttctgtgtcagaagggaagtgtagtc

SEQ ID NO: 5268 - DNA, 110 bp, synthetic construct
  source 1..110: mol_type = other DNA
gactgaatcctgaaccagtaggataaaacttctgtgtcagaagggaagtgtagtcctgctaagattccaaccatgggataccctaagcaaggtccagggcatttgggaat

SEQ ID NO: 5269 - DNA, 110 bp, synthetic construct
  source 1..110: mol_type = other DNA
acaaaatattgctgtgatttatggcagagagttttctatgttcccctctaggaattttatagcatctggccttatatttagtatctagcctttaatccattttgagttta

SEQ ID NO: 5270 - DNA, 110 bp, synthetic construct
  source 1..110: mol_type = other DNA
gggaactcctgtgctcaggtttttaacccactgtgccacagtggaaactcctccggctccctctcctgagcttcgtgcttaacacatgctgtcatcatttcttctttatg

SEQ ID NO: 5271 - DNA, 110 bp, synthetic construct
  source 1..110: mol_type = other DNA
tctccctttcgttgtccccagccacagaaaagccttagcttagcctttggttttatcatcagtgagtacacaggctggagtgctacagggagcccagggtcccctgaggc

SEQ ID NO: 5272 - DNA, 110 bp, synthetic construct
  source 1..110: mol_type = other DNA
tgacagttcccccgtctctttcccagctcctttgtctggagctccagaactgcatatgtccctgtcgctggagatctaggtgacactagatgtctcagaagacattcacc

SEQ ID NO: 5273 - DNA, 110 bp, synthetic construct
  source 1..110: mol_type = other DNA
cttccacaagctctgtcactcaccagttcagtaaacatttaccaagagccagcccgagctagacagcatgtggctagcatctcgggacctgagggttaatagaacaaact

SEQ ID NO: 5274 - DNA, 110 bp, synthetic construct
  source 1..110: mol_type = other DNA
gagctagacagcatgtggctagcatctcgggacctgagggttaatagaacaaactctcacttggctctcacaccagcttcaggagagacaggcagggctggcattagtgt

SEQ ID NO: 5275 - DNA, 110 bp, synthetic construct
  source 1..110: mol_type = other DNA
cttcgtcagagtgagaacagctggagaaggggcttgtgcctgttactacttatgatctcttagcccccaagctgcccttctctgctgggctctgtgatgcccactacatg

SEQ ID NO: 5276 - DNA, 110 bp, synthetic construct
  source 1..110: mol_type = other DNA
tctcttagcccccaagctgcccttctctgctgggctctgtgatgcccactacatgttagctctgctaatagcagacctgagggagagtggaaagcaagagaagaaaagga

SEQ ID NO: 5277 - DNA, 110 bp, synthetic construct
  source 1..110: mol_type = other DNA
gatggggaaccctaacaaggagaaagagctgtttgggtcaaagcaagtccccagaagctatttacatgaggatctggaaaacagagatctgcatgtgctcagggatgccc

SEQ ID NO: 5278 - DNA, 110 bp, synthetic construct
  source 1..110: mol_type = other DNA
agctatttacatgaggatctggaaaacagagatctgcatgtgctcagggatgcccaaaggcctgcacttgtcctatcaacgggaagggactgatgaacctgctcggaagc

SEQ ID NO: 5279 - DNA, 110 bp, synthetic construct
  source 1..110: mol_type = other DNA
acagccggagctagaggtcccttcaaagtcaaggctttggggaaccccaggagtatgctgtcagtctgtcctgcaagctgtggtcagctgcacctaccttaagttttttg

SEQ ID NO: 5280 - DNA, 110 bp, synthetic construct
  source 1..110: mol_type = other DNA
ctagaggcaggcacatgaagggacaagtattgcttgaaactcagagtctgccctatagagtctccacctcagaaggttgaaggcctgggaggccagttcttgaccttgac

SEQ ID NO: 5281 - DNA, 110 bp, synthetic construct
  source 1..110: mol_type = other DNA
gatcacaaaaagcctctggcaaaccttccaggcaagaactcaccatggttttcgcaaagaatggggatgaggacgaaggcaagcactggtttctgtggctgagaatgaca

SEQ ID NO: 5282 - DNA, 110 bp, synthetic construct
  source 1..110: mol_type = other DNA
aaatatgttatgttacatggcaaatgggactttgcagatgtaattaaggttaccgattagctgaccaatgtaatcacataagcccggaaaagtaaagacgttttttggct

SEQ ID NO: 5283 - DNA, 110 bp, synthetic construct
  source 1..110: mol_type = other DNA
tattgcaaattaaattcatattttgaagttccctcctccccaccataccaaatgcagagcaatgatagctgaaatacaaaaatcaaaaatttaaagatgcaatatcactc

SEQ ID NO: 5284 - DNA, 110 bp, synthetic construct
  source 1..110: mol_type = other DNA
tcctggaaagtttttccctccaactctaaaccttacccagttttcagggtccaaattaaattccaccttctccatgaaggctgtcctcaattttccctccaaggagatgg

SEQ ID NO: 5285 - DNA, 110 bp, synthetic construct
  source 1..110: mol_type = other DNA
ttaaattccaccttctccatgaaggctgtcctcaattttccctccaaggagatgggccctctgtcatctgaaaacttgcccttgacctttatctttatctcctctgtgca

SEQ ID NO: 5286 - DNA, 110 bp, synthetic construct
  source 1..110: mol_type = other DNA
ccagccagaagcaaagactccaaggcccctgggaatggcagagccacagacaggaggagctgggtccctgaattaccgtgtgcttctgcccagcacaggcagccatacga

SEQ ID NO: 5287 - DNA, 110 bp, synthetic construct
  source 1..110: mol_type = other DNA
ggacctagagattatcatactaagtaaatcagccaaagacaaattgcttatatgtggaatctaaacaatgatacaaaaagggattcccgtcgtagctcagtagtaacgaa

SEQ ID NO: 5288 - DNA, 110 bp, synthetic construct
  source 1..110: mol_type = other DNA
aaatcagccaaagacaaattgcttatatgtggaatctaaacaatgatacaaaaagggattcccgtcgtagctcagtagtaacgaatctgactagtatccatgaggatgtg

SEQ ID NO: 5289 - DNA, 110 bp, synthetic construct
  source 1..110: mol_type = other DNA
cttcttatcaaccttatggcacagctggagaaacagagacccaggggtgacgacttgcttgaagtcttacagtgaaacagggacagacagatggacacagaagcaaagcc

SEQ ID NO: 5290 - DNA, 110 bp, synthetic construct
  source 1..110: mol_type = other DNA
tcagagagggggttctgtgtgtaccagacacctgctgcccctcccagttccctgtcattcctgctttacaggcgtggaaatagctcagagaggcccagtgactcatccaa

SEQ ID NO: 5291 - DNA, 110 bp, synthetic construct
  source 1..110: mol_type = other DNA
cattcctgctttacaggcgtggaaatagctcagagaggcccagtgactcatccaaggccccgcagctggaaggtggtggatctggctttggggaactgtgaccctccttg

SEQ ID NO: 5292 - DNA, 110 bp, synthetic construct
  source 1..110: mol_type = other DNA
ggactgagggttctgtcccatcagacatgtcatgattgctctgtgaatcatcttgaaccttcttttatgaggcagaggtcaggggaaccgatggctcatcgctgttcaga

SEQ ID NO: 5293 - DNA, 110 bp, synthetic construct
  source 1..110: mol_type = other DNA
atttccattcaattccaacacaattcatctgaacccatgtcacgtgagtgccttctcagtgccaggcacaaggctcagtgctgggggggagacaggaacaagtcagcttg

SEQ ID NO: 5294 - DNA, 110 bp, synthetic construct
  source 1..110: mol_type = other DNA
tcagtgccaggcacaaggctcagtgctgggggggagacaggaacaagtcagcttggccttgtaagccagagaaggctcgtctacaaaggccctacaagacaggctgtgac

SEQ ID NO: 5295 - DNA, 110 bp, synthetic construct
  source 1..110: mol_type = other DNA
ttccaatccaggtaggctggttccccagctccaccctcagtcactaggaatagcctcctgggagctcagttttatgtctctgaatcctgcaagaggggcaaacacatgct

SEQ ID NO: 5296 - DNA, 110 bp, synthetic construct
  source 1..110: mol_type = other DNA
gtctaatcacaggagtgaaggaagtgggaatgaggcagggaaggaggaagggcaaataagaggtatcaaatgcaaataatatttccttcttgtgggattttcttttgaaa

SEQ ID NO: 5297 - DNA, 110 bp, synthetic construct
  source 1..110: mol_type = other DNA
ataagaggtatcaaatgcaaataatatttccttcttgtgggattttcttttgaaaagttgctttttaaggtggttcatcggggagaggaagggagaaatatctctttcct

SEQ ID NO: 5298 - DNA, 110 bp, synthetic construct
  source 1..110: mol_type = other DNA
gaggcctggcccagggcaacgggggcactgtttctggccctttgctaactagctctatgactgcatggttccttctcctcccagggccttggcatcccctctacaaagtg

SEQ ID NO: 5299 - DNA, 110 bp, synthetic construct
  source 1..110: mol_type = other DNA
tatgactgcatggttccttctcctcccagggccttggcatcccctctacaaagtggatcataagcctcgctatgtgggaacacatttgggcctttggaatgtgctggggg

SEQ ID NO: 5300 - DNA, 110 bp, synthetic construct
  source 1..110: mol_type = other DNA
tctttttagcagcagtacacacaggtttgttttcatgggcatgagtccattgggaaacctcttgcctctttgctgcatcagagaaatggagtaattttaaagaatttcaa

SEQ ID NO: 5301 - DNA, 110 bp, synthetic construct
  source 1..110: mol_type = other DNA
taggttacgctgatgtttccatttatcctttcatacattctgaagaagctcaggtctttttattcatttatttttaattttttttccttttgcaatcatatccatggcat

SEQ ID NO: 5302 - DNA, 110 bp, synthetic construct
  source 1..110: mol_type = other DNA
agggatttgtgggcactactatagtaactgaagccaagaaagtaaatgaaatatagtctgaagtcatttttcacagttaccactcattctcactctccactgacatagcg

SEQ ID NO: 5303 - DNA, 110 bp, synthetic construct
  source 1..110: mol_type = other DNA
tcagagctgcccctcgaacagtttctggtatccttgtctccagcagactgaggttctgtcagctctgtattggcacttggtccttttgtggctccagtggcccatgaaac

SEQ ID NO: 5304 - DNA, 110 bp, synthetic construct
  source 1..110: mol_type = other DNA
cccaatgttcagttttgagcatcacttttgaaataagaaagttaaactggggtgaggccggaagcaacattaagaaaactgatgtcattaatctcctgtctctagacctg

SEQ ID NO: 5305 - DNA, 110 bp, synthetic construct
  source 1..110: mol_type = other DNA
aaagagaacaagtgtaagccaaataaagtgggtgtgaaacagttgtatgataggacttgcctgatagtctgtagcttaatgttgtagcccagtgttctaaaattcctttt

SEQ ID NO: 5306 - DNA, 110 bp, synthetic construct
  source 1..110: mol_type = other DNA
gtgcttagttcataggcaagctcctggagcacattgggcctactcttctgctttgctgttgacagtttacagcaactctttctagcatggctgtgtggcagggagggata

SEQ ID NO: 5307 - DNA, 110 bp, synthetic construct
  source 1..110: mol_type = other DNA
tggtagtgggcagcatcaatacatttttgcatgagttccagctagatgtcatgtatgttggaagtttatagggagaagagcattgtttctgggacaactcacaagatcct

SEQ ID NO: 5308 - DNA, 110 bp, synthetic construct
  source 1..110: mol_type = other DNA
acctgtggtgccctgtggttctgtcatttactaacagtgcctatagagtttggtcagagggaagaatgccgaccgcttcgggggcctgttaaaaatcaagattccaagac

SEQ ID NO: 5309 - DNA, 110 bp, synthetic construct
  source 1..110: mol_type = other DNA
tattttcttaacctcttactcttctatcactaacacttggtacatgtactatggaacagtagagaacagggagaaaagcattagtttccaggttacaaagatctagcttc

SEQ ID NO: 5310 - DNA, 110 bp, synthetic construct
  source 1..110: mol_type = other DNA
acagtagagaacagggagaaaagcattagtttccaggttacaaagatctagcttcaaattcttaggcacagcagtacattattctgagcctcagtttctctacctgtaaa

SEQ ID NO: 5311 - DNA, 110 bp, synthetic construct
  source 1..110: mol_type = other DNA
atgttctttttattattcttctgatgtttcataagtgcttacagcagtgtttgacatatactggctcaatacaagcaattaggtgtagaatgaaacttttcagtggctcc

SEQ ID NO: 5312 - DNA, 110 bp, synthetic construct
  source 1..110: mol_type = other DNA
cacatatgcacattctttaagaacttggacagttggacatctgaacctagaagtttcacttcagattcttacatccaactgcatccttgacattttcatttggacatcta

SEQ ID NO: 5313 - DNA, 110 bp, synthetic construct
  source 1..110: mol_type = other DNA
tcacttcagattcttacatccaactgcatccttgacattttcatttggacatctacaagacattttctagttaatacatttccagtggagcttctaattacattctaaac

SEQ ID NO: 5314 - DNA, 110 bp, synthetic construct
  source 1..110: mol_type = other DNA
ccctgtttggaggagtagagagggggtgggagaaagcaaccacaaccatgtgtgggtagcctcagctggcactcataaaatgctaaaatgtcactaggccagtaagtccc

SEQ ID NO: 5315 - DNA, 110 bp, synthetic construct
  source 1..110: mol_type = other DNA
gtagcctcagctggcactcataaaatgctaaaatgtcactaggccagtaagtcccatgtaggacacctttttttttttttcttttttcttttttctttttcttttactaa

SEQ ID NO: 5316 - DNA, 110 bp, synthetic construct; identical to SEQ ID NO: 5314
  source 1..110: mol_type = other DNA

SEQ ID NO: 5317 - DNA, 110 bp, synthetic construct; identical to SEQ ID NO: 5315
  source 1..110: mol_type = other DNA

SEQ ID NO: 5318 - DNA, 110 bp, synthetic construct
  source 1..110: mol_type = other DNA
aggataagacagtggcattaagggctccacctgtttggtgggaggcaggagcaggtcagggaggggagggaagcattggaccaagcttcaatttctgcacctgtaacagt

SEQ ID NO: 5319 - DNA, 110 bp, synthetic construct
  source 1..110: mol_type = other DNA
tcagggaggggagggaagcattggaccaagcttcaatttctgcacctgtaacagtcaagacttttgccctgaacacctaagagggttttggaggacgagaaggagaaggc

SEQ ID NO: 5320 - DNA, 110 bp, synthetic construct; identical to SEQ ID NO: 5318
  source 1..110: mol_type = other DNA

SEQ ID NO: 5321 - DNA, 110 bp, synthetic construct; identical to SEQ ID NO: 5319
  source 1..110: mol_type = other DNA

SEQ ID NO: 5322 - DNA, 110 bp, synthetic construct
  source 1..110: mol_type = other DNA
acttcctgaatgtctggtttgcaaaatcattagcaaaattaattggtggttttaggcctttaagttttggaggaattttatgtagcaacagatgactacagggcttacac

SEQ ID NO: 5323 - DNA, 110 bp, synthetic construct
  source 1..110: mol_type = other DNA
gtggttttaggcctttaagttttggaggaattttatgtagcaacagatgactacagggcttacacttaactttgtttatttcatatttcattaatctgttcttaagtact

SEQ ID NO: 5324 - DNA, 110 bp, synthetic construct
  source 1..110: mol_type = other DNA
aaaaaaaatctataatccaattatccttagtttttcagcttacattagagtgataaaagtgcacataaggttaaaggaaatacaggtcttgataggatagaggtacagct

SEQ ID NO: 5325 - DNA, 110 bp, synthetic construct
  source 1..110: mol_type = other DNA
aaagtgcacataaggttaaaggaaatacaggtcttgataggatagaggtacagctttttgattcacccacaaaatcttataagatgcttaaggttgtagctaaacttttt

SEQ ID NO: 5326 - DNA, 110 bp, synthetic construct
  source 1..110: mol_type = other DNA
cttatcttacttatgagctgccaagtaatgattgtcacatagaaaaatgaaaatattatgctctgatacatctggccaggtgcttttctctaattcaagcagctctcctt

SEQ ID NO: 5327 - DNA, 110 bp, synthetic construct
  source 1..110: mol_type = other DNA
ttatgctctgatacatctggccaggtgcttttctctaattcaagcagctctccttaaaagcacacactactgggaagcaatttcccaatccaggtattaacatacattgg

SEQ ID NO: 5328 - DNA, 110 bp, synthetic construct
  source 1..110: mol_type = other DNA
atgaggatgctggttccatccctggcctcagtcagtgggttgaggatccagcttgcttgctccagcaagctgcagcataggtcacaggtgacgctcaaatctgccgttgt

SEQ ID NO: 5329 - DNA, 110 bp, synthetic construct
  source 1..110: mol_type = other DNA
cttgctccagcaagctgcagcataggtcacaggtgacgctcaaatctgccgttgttgtggctgtatcgtaggccagcagctccagctctgattcgacctctagctcagga

SEQ ID NO: 5330 - DNA, 110 bp, synthetic construct; identical to SEQ ID NO: 5328
  source 1..110: mol_type = other DNA

SEQ ID NO: 5331 - DNA, 110 bp, synthetic construct
  source 1..110: mol_type = other DNA
cctcagtcagtgggttgaggatccagcttgcttgctccagcaagctgcagcataggtcacaggtgacgctcaaatctgccgttgttgtggctgtatcgtaggccagcagc

SEQ ID NO: 5332 - DNA, 110 bp, synthetic construct
  source 1..110: mol_type = other DNA
taacctaagaagggacctgatgctgagtgaggttactccctttagctgaagcaattccaaaaggctgacagtagagggttatctgctggcagccctagcagcagctgggg

SEQ ID NO: 5333 - DNA, 110 bp, synthetic construct
  source 1..110: mol_type = other DNA
ttttacccccttgccctgggcagattctctgccctggccctagctcctcacagcaccagcctcttacctcttctttctccgccctctcttctctcccttttgttctttca

SEQ ID NO: 5334 - DNA, 110 bp, synthetic construct
  source 1..110: mol_type = other DNA
ccagcctcttacctcttctttctccgccctctcttctctcccttttgttctttcatctcctccctccctgtcaggagctacaaacaaattctttgtcctgacacagcaac

SEQ ID NO: 5335 - DNA, 110 bp, synthetic construct
  source 1..110: mol_type = other DNA
attaataatctgagtatctatctggtatttgtttttaacagtgagcaacttgccgtgtatacacctccttgacaacagtggaagatcaaagaatttttcttataacctgc

SEQ ID NO: 5336 - DNA, 110 bp, synthetic construct
  source 1..110: mol_type = other DNA
tctttaatatagctccttctttgttgtttttgttttatattttggccgtgtccatgacatgtggaagttcctgggcctgagactgaacccaggccacagcagggacccaa

SEQ ID NO: 5337 - DNA, 110 bp, synthetic construct
  source 1..110: mol_type = other DNA
gacatgtggaagttcctgggcctgagactgaacccaggccacagcagggacccaagctgctgcaatgacaatgccaaacctgctgcaccacaagagaattcctataactc

SEQ ID NO: 5338 - DNA, 110 bp, synthetic construct
  source 1..110: mol_type = other DNA
caaaggactggtcccatctttgggcaaaggagccagtattttgtactcctgcattgggtcaatcatgggctgtggttgcgctgcaggatggggtgaccacccatgagaag

SEQ ID NO: 5339 - DNA, 110 bp, synthetic construct
  source 1..110: mol_type = other DNA
gggtcaatcatgggctgtggttgcgctgcaggatggggtgaccacccatgagaagctcctgtttggccaagagcagttttctggagaagggagtaactatgagcctttgt

SEQ ID NO: 5340 - DNA, 110 bp, synthetic construct
  source 1..110: mol_type = other DNA
tcctcttttacagaattaaatgtgagggaatctgatataagagtttgtgatgaatcatcatgtaaatatggaggagtctgtaaagaagacggagatggtttgaaatgcgc

SEQ ID NO: 5341 - DNA, 110 bp, synthetic construct
  source 1..110: mol_type = other DNA
ttctcaatgcaagaggtacccaaggggtgaaaaggggcttcagagatgtcagacgaaagggttggaggaaggagaggttagagcaatggctttcaaacttgagccccaac

SEQ ID NO: 5342 - DNA, 110 bp, synthetic construct
  source 1..110: mol_type = other DNA
tctgatgcatgaatgccctgggcctgtttttcctgcttcacgggtcattgtccaacctaaggtatggagagtactgctttggctcttcaaccgaaaaaatagctatgctt

SEQ ID NO: 5343 - DNA, 110 bp, synthetic construct
  source 1..110: mol_type = other DNA
cctaaggtatggagagtactgctttggctcttcaaccgaaaaaatagctatgcttgcttctttgccaagggactaactattggggatagaggaaaatcttccacatcatg

SEQ ID NO: 5344 - DNA, 110 bp, synthetic construct
  source 1..110: mol_type = other DNA
ggtcccaaaagatgtttcctggagactactttattgcctaattaattaattaatatttattgagcagctattgtgtgccaggaactgcactagttggttctttcccaatt

SEQ ID NO: 5345 - DNA, 110 bp, synthetic construct
  source 1..110: mol_type = other DNA
aaaatagtatgattttcaggttcatgggttcactgggaattttctaatcagagtcccaagagaaacaagatgaggagactgagaacaggaaagattcagtgacttacctg

SEQ ID NO: 5346 - DNA, 110 bp, synthetic construct
  source 1..110: mol_type = other DNA
aattactgcacattatgggaaatgtagcactgtgtgtccagggaacaaagacgcacaagaaacaatagctacattaggagcataagctgctagaggaggatggagttgga

SEQ ID NO: 5347 - DNA, 110 bp, synthetic construct
  source 1..110: mol_type = other DNA
caagaaacaatagctacattaggagcataagctgctagaggaggatggagttggaagatgacctatgaagtctgttttagaagctggttaggtctatggctataccaccc

SEQ ID NO: 5348 - DNA, 110 bp, synthetic construct
  source 1..110: mol_type = other DNA
cttttatggggacccacaaaatggaggccaccttaggagctgagcctggcccacgtcacaaaagtacacctaagccagcctgcacttacaggaatgcctgttcaaggaaa

SEQ ID NO: 5349 - DNA, 110 bp, synthetic construct
  source 1..110: mol_type = other DNA
ccccattctggtggcattctagtgatattaggttgctgtgtaggttgctagtgaacctgcccaggttttattctgtatgttccatgccagtgaagtgcagagagaaagga

SEQ ID NO: 5350 - DNA, 110 bp, synthetic construct
  source 1..110: mol_type = other DNA
cctgcccaggttttattctgtatgttccatgccagtgaagtgcagagagaaaggaggacacttggtgagaatactggtacaggcgttcacttgatcccaaagcaagttta

SEQ ID NO: 5351 - DNA, 110 bp, synthetic construct; identical to SEQ ID NO: 5349
  source 1..110: mol_type = other DNA

SEQ ID NO: 5352 - DNA, 110 bp, synthetic construct; identical to SEQ ID NO: 5350
  source 1..110: mol_type = other DNA

SEQ ID NO: 5353 - DNA, 110 bp, synthetic construct
  source 1..110: mol_type = other DNA
tcacctaatgggggtatgttctgctgggtggcagaactctcagttggcattacctcacaggtgatgacctcttggcacaccacgggaggctagaccttagggcccagggc

SEQ ID NO: 5354 - DNA, 110 bp, synthetic construct
  source 1..110: mol_type = other DNA
cacaggtgatgacctcttggcacaccacgggaggctagaccttagggcccagggctctgagccccagaaacgatgcctgggctctaaccatcaccccaagggcccatctg

SEQ ID NO: 5355 - DNA, 110 bp, synthetic construct
  source 1..110: mol_type = other DNA
aagagggcaaagcagggtcagggccacaggaccattggtaccacctcttggaataccacagcctgggatgcttagaagggagatgggcacagagactcagaatatggagg

SEQ ID NO: 5356 - DNA, 110 bp, synthetic construct
  source 1..110: mol_type = other DNA
taagccagtcctgccatctcccaagtagagctttggctgagatgggtctctccaccatcctcacccccattctttcattacagtcacttagagtgatttttaaagtcatg

SEQ ID NO: 5357 - DNA, 110 bp, synthetic construct
  source 1..110: mol_type = other DNA
tgatagggacagagtaaagggcaaaaatagctgatttaaatagttaactccacgagaggatttaagtagaaatcacaggtatgggagacccctgtgagttaatgatcact

SEQ ID NO: 5358 - DNA, 110 bp, synthetic construct
  source 1..110: mol_type = other DNA
gatctagttcctaaacgtcctttttctttcccaatagtccctttggtgaagtgggccttccttgatttagttagctggggccacctaaattggcttccattctccatccc

SEQ ID NO: 5359 - DNA, 110 bp, synthetic construct
  source 1..110: mol_type = other DNA
atcattgtaggatcccttttaatcatttttgtacttcatgcattagaagcttctcatcactctcaatatctgtccttaaaccacctcacctcctatgagtccttctgtta

SEQ ID NO: 5360 - DNA, 110 bp, synthetic construct
  source 1..110: mol_type = other DNA
gcctgtgccgatggcaacgttttgtgagtaaaggggcatcgcctttcactcctttggaagagctggaaacaatgatttgccaagtgacttacaagatgtgaggggcaggg

SEQ ID NO: 5361 - DNA, 110 bp, synthetic construct
  source 1..110: mol_type = other DNA
catgttgcagattccagatgaaaaagttattctctgagctgatgatagtggaaccttttactctgatggagccactgaggcctctgaaagtggtgttggctagaaacctg

SEQ ID NO: 5362 - DNA, 110 bp, synthetic construct
  source 1..110: mol_type = other DNA
tggactgagaataatgaccttgctaaaagactgtattcaacaaaataaataagtatgatgaaaaccccacagatgttttatagcttaaggcagcttttcagttatttatt

SEQ ID NO: 5363 - DNA, 110 bp, synthetic construct
  source 1..110: mol_type = other DNA
gatgagaaacaagtgatgctgactcttgcatttgttagatccaattctgcatagatattaataatgatgcaccctatggatgcaatttcatgtttataacaccctggcca

SEQ ID NO: 5364 - DNA, 110 bp, synthetic construct
  source 1..110: mol_type = other DNA
actatagtgggcagagctggaagaggggagactagttgggaagctattgagtctcattattaccaaaataattcagatgccagaataccatgttttggatggcatgagat

SEQ ID NO: 5365 - DNA, 110 bp, synthetic construct
  source 1..110: mol_type = other DNA
gagtgatttcaattcaaaactagatctgtgcctcctctgatgccactttcccctagccttccatgccagaaccaccctagcttcctttgagtttatcgcaggtaccaaga

SEQ ID NO: 5366 - DNA, 110 bp, synthetic construct
  source 1..110: mol_type = other DNA
tgacacattgcctcctctgacctcagattcatatctgactacgcaaatctggttggaatgtgaaattcctttagcttctgtctgatggtcactgccctcatcagtgcttg

SEQ ID NO: 5367 - DNA, 110 bp, synthetic construct
  source 1..110: mol_type = other DNA
acttaggaatgcacatcctaagcatgtttccaagtatttccccagtaccttaggctagtgatacaattatcccaatggtccctgagtggtacacagtgaatgcttccaga

SEQ ID NO: 5368 - DNA, 110 bp, synthetic construct
  source 1..110: mol_type = other DNA
tagtgatacaattatcccaatggtccctgagtggtacacagtgaatgcttccagatcattgtccaccccatcccaatcccaccctgtgagtagttactgtataataaact

SEQ ID NO: 5369 - DNA, 110 bp, synthetic construct
  source 1..110: mol_type = other DNA
taagaatcacagctttactcaaaatttatttaaatattaaaattacgtgagagactctttgtgccatttatggtattgacatttagagcctcaaccccgattttgctcag

SEQ ID NO: 5370 - DNA, 110 bp, synthetic construct
  source 1..110: mol_type = other DNA
cactttgtctgtgcacacactgaggtggtgttaaagtctggactgattgctatatctcccctagtgggtctgagtgctaaacttcagctgatttgcaccagtggcttttt

SEQ ID NO: 5371 - DNA, 110 bp, synthetic construct
  source 1..110: mol_type = other DNA
gaagatgctagagacttacttgctgagttaaaaatagcaggaacttggtccacgcataattactgtagattatactagggaccataaacccaaactgttgtattttagaa

SEQ ID NO: 5372 - DNA, 110 bp, synthetic construct
  source 1..110: mol_type = other DNA
ggagctgtagttaccaggcctatgccatggccacagcaatgcaggattctcatctgcgatctacatcacagctcacagcaacccaggatctttaatccactgagtgaggc

SEQ ID NO: 5373 - DNA, 110 bp, synthetic construct
  source 1..110: mol_type = other DNA
tccagggaagtttagatacagtctttctatcctgagactttgttttaaatgacctaaatatttgttaccaccaccctctcttatgcgcatcctaatttggaaattcactg

SEQ ID NO: 5374 - DNA, 110 bp, synthetic construct
  source 1..110: mol_type = other DNA
tttcatgcagcagctagtaaatggaaaattcaagctgtcaatgagattgctttaaactatttaacaattggctttagaactcaaaggctagaatataactatcagaatat

SEQ ID NO: 5375 - DNA, 110 bp, synthetic construct
  source 1..110: mol_type = other DNA
tcatctcagatgattccaataaacaagcattgggtaggaaataatgcttccttttaaaattagagctatgaagaccatgcacaactataaaaaagtatcatattgagaga

SEQ ID NO: 5376 - DNA, 110 bp, synthetic construct
  source 1..110: mol_type = other DNA
gtatttttttgttatagttgatttaaaattctgtgtcaatttctgctatgcagcaaagtgacacaactacacacatatatacattctttttctcatatcaccccccatca

SEQ ID NO: 5377 - DNA, 110 bp, synthetic construct
  source 1..110: mol_type = other DNA
agttgatttaaaattctgtgtcaatttctgctatgcagcaaagtgacacaactacacacatatatacattctttttctcatatcaccccccatcatgttctatcccaaga

SEQ ID NO: 5378 - DNA, 110 bp, synthetic construct
  source 1..110: mol_type = other DNA
agagtggacagctcatttctggtatctatccaggcaatgtagagaaattatttcgggccccattcagtgcagtcttgatgtctacttcaagactggtgcccaccttcctt

SEQ ID NO: 5379 - DNA, 110 bp, synthetic construct
  source 1..110: mol_type = other DNA
tgttagctttctagttgaaatctaagaagagaaaaatcaaaccccttgtctcaatacagagccttctgatgaggtgggagaagagttaagctgaaccaaccatgcttgct

SEQ ID NO: 5380 - DNA, 110 bp, synthetic construct
  source 1..110: mol_type = other DNA
acagagccttctgatgaggtgggagaagagttaagctgaaccaaccatgcttgctttagaaatatgaccaaaaggccggaagttactgttaggagtaggaaactgtattg

SEQ ID NO: 5381 - DNA, 110 bp, synthetic construct
  source 1..110: mol_type = other DNA
tttccatcacaccaaaaaatgcttctgtgcccatttttagttagtatctttggcccaactgctggctcctggcagctgccgatcttcttgctatcactacagttttgcct

SEQ ID NO: 5382 - DNA, 110 bp, synthetic construct
  source 1..110: mol_type = other DNA
aataactaccactcatttgaatatttaaaaattgtttgtgtgtttgtaaatgtttatatgaagaggctccatggtgtaatagtaagcactctggactgtgtatgtgtgta

SEQ ID NO: 5383 - DNA, 110 bp, synthetic construct
  source 1..110: mol_type = other DNA
tggccatcattatggatgagaataatacctactttatctatttagtcactggcgaacacaaggagccagatgatagctgagcctgctgaggtaaaccttgccaggtactc

SEQ ID NO: 5384 - DNA, 110 bp, synthetic construct
  source 1..110: mol_type = other DNA
ctcaggacattaagacttaattttctcttggagctcccttgagaagagttggtgtgaaagaatgaacattttaaacaagagcaaaggctcttttggtattttttcctatg

SEQ ID NO: 5385 - DNA, 110 bp, synthetic construct
  source 1..110: mol_type = other DNA
tgtaacatattttaatccacagtcttatttcaaactcaattatttcccactaccctttcagacaatgggcttaatctgctccctctctctatttgtatttattcctatag

SEQ ID NO: 5386 - DNA, 110 bp, synthetic construct
  source 1..110: mol_type = other DNA
aatacaggggattgaggttaagagctgtaagaaagggctgatctgaagagaaaaaagacatttgtaaaactagagggaaccacgtcctaatatctgtaattacagattgt

SEQ ID NO: 5387 - DNA, 110 bp, synthetic construct
  source 1..110: mol_type = other DNA
agacatttgtaaaactagagggaaccacgtcctaatatctgtaattacagattgtaaaacagggaggtttctctattttcctgatcaatacaaagataccttctaaaggt

SEQ ID NO: 5388 - DNA, 110 bp, synthetic construct
  source 1..110: mol_type = other DNA
gcaaaaggacaagagtatgatggatgctacatgtttaaaattttaaaacacaccttattacatatggttctcggttttcctaaacaatattacaagatcatggcttaaaa

SEQ ID NO: 5389 - DNA, 110 bp, synthetic construct
  source 1..110: mol_type = other DNA
gaaatagagaaggagttgagtatggctgctttcccactgaagacagccttcccaaattagccccagctaaaggggtggagaacaaataaaaacatctttaaaatattaca

SEQ ID NO: 5390 - DNA, 110 bp, synthetic construct
  source 1..110: mol_type = other DNA
agacattctctgttttttactatttgagtctgtctataacaattgaccccgatattctaaatgccgtttcttggagttacatttcctgagaactttaaaaacaaatgtgg

SEQ ID NO: 5391 - DNA, 110 bp, synthetic construct
  source 1..110: mol_type = other DNA
attagattagcatacatcaataccaactctatgctccatagatcaatttgccaacttttcttctacaaaactgcagctctctggttattaaatgtccaggtataagggaa

SEQ ID NO: 5392 - DNA, 110 bp, synthetic construct
  source 1..110: mol_type = other DNA
cctgtgatcaggcaaacatacagaagtaaattttctctgctgttgagaacatgctcctggattgagtcttctaaaacttctgactaattaccaactataaacttgacttc

SEQ ID NO: 5393 - DNA, 110 bp, synthetic construct
  source 1..110: mol_type = other DNA
gaatatactgaagataggcaggagtgaaagctgagagaccagttaggaagttgttgcagaaaagtcactgtacttaggagctcatgacttattataaccatgcattcctc

SEQ ID NO: 5394 - DNA, 110 bp, synthetic construct
  source 1..110: mol_type = other DNA
gtctttgtgaagaacatatggacacatgctacatggtttctatatggattaagtctgtctctggccagcaatgaccacagagctagggtcctcatccatatcctcttggt

SEQ ID NO: 5395 - DNA, 110 bp, synthetic construct
  source 1..110: mol_type = other DNA
cccagcagccatgggcacatatgaagtcttgctcataatgatgtgatatctcagagggttacagatggccacatagcggtcaaaggccatcatgcttagaaggacacatt

SEQ ID NO: 5396 - DNA, 110 bp, synthetic construct
  source 1..110: mol_type = other DNA
catgattagataactggataactgtgtgggatttaaatgaaaaaagataaatgtgccattgaggaagaagctaatttgtttccttcttttgaggaaacaaggcagcattt

SEQ ID NO: 5397 - DNA, 110 bp, synthetic construct
  source 1..110: mol_type = other DNA
tgatgttgcccatgctccctcctaagatctcctctttccttctcttgtgcgatgttgctgttactttacagtgtatcctatctccactgctaagattgtttatattctaa

SEQ ID NO: 5398 - DNA, 110 bp, synthetic construct
  source 1..110: mol_type = other DNA
tttttgacactcactatgttgatttaaagaataggactgccagctgctgattccttattttagtaatgggcacaggctttacaatctatttgtggtctcttcctgcagtt

SEQ ID NO: 5399 - DNA, 110 bp, synthetic construct
  source 1..110: mol_type = other DNA
gttgtcatagcctcaggttccaaaaccactacagaattctgagaactaaatgggaaacgtcatcaaaacgcccccagcctatttgaacctgaagaaacatatctagaaac

SEQ ID NO: 5400 - DNA, 110 bp, synthetic construct
  source 1..110: mol_type = other DNA
aacgtcatcaaaacgcccccagcctatttgaacctgaagaaacatatctagaaacatgcagcatttggaaagcgctcatgattagagaatatttttatactcatcaaccc

SEQ ID NO: 5401 - DNA, 110 bp, synthetic construct
  source 1..110: mol_type = other DNA
gtgtacgtggagccattcgtggactggacatcctctgggtgcttagccagaaatgccacgatatctttggctgtccaatctaagccttccaatcgcttttcccaaaagtg

SEQ ID NO: 5402 - DNA, 110 bp, synthetic construct
  source 1..110: mol_type = other DNA
gagctcctgggaagaatgactataaacaaagaaggtgttggtagctgactaacgaggtcatttttaggtatcagccatggcctattaaaattttcccatgccatatccag

SEQ ID NO: 5403 - DNA, 110 bp, synthetic construct
  source 1..110: mol_type = other DNA
agaaggaatggggggaggcgcttacccatcagcttccagtccccattgtcaaaggctgacccatagggtgttaaggacttcacacctccaggctgcacaagtaagagtgt

SEQ ID NO: 5404 - DNA, 110 bp, synthetic construct
  source 1..110: mol_type = other DNA
ctgacccatagggtgttaaggacttcacacctccaggctgcacaagtaagagtgtcaggcagatttctatggggaatggggagtgggaggaagcagaaaacaaaggatac

SEQ ID NO: 5405 - DNA, 110 bp, synthetic construct
  source 1..110: mol_type = other DNA
taggtaatttctggtagaacaggaaaaaaccttcaggaagagaagcagggagctacaggcatgtgaggtaggaataagccatcgcgcccacaagctatcccccttccagc

SEQ ID NO: 5406 - DNA, 110 bp, synthetic construct
  source 1..110: mol_type = other DNA
caggcatgtgaggtaggaataagccatcgcgcccacaagctatcccccttccagctacatatgaactcagatgggggcctgtgggatgaggcatcaacagaatctgctta

SEQ ID NO: 5407 - DNA, 110 bp, synthetic construct
  source 1..110: mol_type = other DNA
aagggagcccctcacttctcaggcacatccaccagccccacagcatgagagatgctgctgccctgctcctccagatcccttggctataagctgagaggaggagtttcgtt

SEQ ID NO: 5408 - DNA, 110 bp, synthetic construct
  source 1..110: mol_type = other DNA
tgctgccctgctcctccagatcccttggctataagctgagaggaggagtttcgtttctctgggtgataccctcccatattcaagcttcagttggtcatcaagctgtgatg

SEQ ID NO: 5409 - DNA, 110 bp, synthetic construct
  source 1..110: mol_type = other DNA
tctgtcttgctctatctcactccagtttaaactcatcctcttgccaaaagaaattgctttaacagaatgatatatatttcttacaacctcttctataaacacacacacac

SEQ ID NO: 5410 - DNA, 110 bp, synthetic construct
  source 1..110: mol_type = other DNA
tttctattgctcttatcaaactattgtataatgagtattttgttttccctaacgcaggggtaaaatggcagaaatcttactttccttttgctcgtgtcccatacatagca

SEQ ID NO: 5411 - DNA, 110 bp, synthetic construct
  source 1..110: mol_type = other DNA
gaattgctaggttatatggtaactgtatttaacttttgaggaactgccaaaccgtatcatgaagcagctgtaccattttacattcccaacagctttgtgtaaaagttcca

SEQ ID NO: 5412 - DNA, 110 bp, synthetic construct
  source 1..110: mol_type = other DNA
taaggaagtaactgaaaacggggggagaaaagactgtcgagcctccactgttagctgatacttttctcagtttaccgagaacccagttatgcttgaaaagtgaagactac

SEQ ID NO: 5413 - DNA, 110 bp, synthetic construct
  source 1..110: mol_type = other DNA
aatgcctatctttgggtgaccaaataaacaacttacggtatgttcaaacagtggaatactactcagcagtagagaggaatcagctagtgatatgtgcagtaacacggatg

SEQ ID NO: 5414 - DNA, 110 bp, synthetic construct
  source 1..110: mol_type = other DNA
atactactcagcagtagagaggaatcagctagtgatatgtgcagtaacacggatgaatctccaagacagtatgttaagtggagaagtcagataggaggagtacatacttt

SEQ ID NO: 5415 - DNA, 110 bp, synthetic construct
  source 1..110: mol_type = other DNA
tgaaaattgttactctgcaaaagcttacaagaagaggatgaagtcaagctacagactaggaggaaatatttgcaaattacatatctgatggaagattagtatctggagtg

SEQ ID NO: 5416 - DNA, 110 bp, synthetic construct
  source 1..110: mol_type = other DNA
ctctctttcagttaggactcccatttccagaatgtgtctgcatagctaaccagggtatgcttgagtgagagagaaagagagagagagagaaggagacagacacagacaca

SEQ ID NO: 5417 - DNA, 110 bp, synthetic construct
  source 1..110: mol_type = other DNA
gtgcattatgtcatctgctgtaaagctgggggggtggggcagggaattccatgttgaaaatgttaaatatagtggtcagggagtacccaatgtggcacagcagaagcaaa

SEQ ID NO: 5418 - DNA, 110 bp, synthetic construct
  source 1..110: mol_type = other DNA
cacttgtccaggaatccataaatcgggaatgatttttctatctgttgactgagtagctttgcaaatatcctttgggggaccaaaatgaaaatttatctcaacgagtagtt

SEQ ID NO: 5419 - DNA, 110 bp, synthetic construct
  source 1..110: mol_type = other DNA
cctccatcagtctccatcataagtgcatagatacagttcacagtgctatacagcggatctcattgcttatccattacagctaatcattttcatgatctaggtagcatgga

SEQ ID NO: 5420 - DNA, 110 bp, synthetic construct
  source 1..110: mol_type = other DNA
gatctcattgcttatccattacagctaatcattttcatgatctaggtagcatggagtgtttcagttttatgtatcacatgtgtcggtttgtctatgtatttacgtgtgtt

SEQ ID NO: 5421 - DNA, 110 bp, synthetic construct
  source 1..110: mol_type = other DNA
tcagagcattcaatgaccacaaaaatatcagcactatacacctttttttccaatctcatgtgtttgcgggtccactcagttctaggctgagcttggttaagtggttgagc

SEQ ID NO: 5422 - DNA, 110 bp, synthetic construct
  source 1..110: mol_type = other DNA
ggttagggtattttcttagacaagctggtcattgagggcctttggaagaagaaagcatttagcctgaggcttcaggaaagagaaggaacccttcacacagtcataaatga

SEQ ID NO: 5423 - DNA, 110 bp, synthetic construct
  source 1..110: mol_type = other DNA
ctcaggcagttaatggagaggcccttgttgggaggaactgagacctccaccatcaactagcctcaactttccagctgtgtgaatgagttaccttgaaagagaatcttctt

SEQ ID NO: 5424 - DNA, 110 bp, synthetic construct
  source 1..110: mol_type = other DNA
ggggtgattgatatccaagctagggtatattctttcttttttccctttttgacatttttgtcttcttccttgtgctcaaagtaggatttatggaaaattatttctatgac

SEQ ID NO: 5425 - DNA, 110 bp, synthetic construct
  source 1..110: mol_type = other DNA
tgtgattgcttgattgtaaagctgctggtggtttcatgatcttatggtaaaatgcctaaaggaatggtattgtgctatgaatatagcacagacactaaatactaaatact

SEQ ID NO: 5426 - DNA, 110 bp, synthetic construct
  source 1..110: mol_type = other DNA
gataatttttaaaagacttatgggtgagttaaagaacttagtaacgtattacagcttatatctgacactaggtaagtcacttatccttattgagcccccattttctcatt

SEQ ID NO: 5427 - DNA, 110 bp, synthetic construct
  source 1..110: mol_type = other DNA
ttttatttgtctatctatgtagaaaggaagaagatagataaattgaaaggaaagtaccatttctgtaatgttcaccctggcagagggtttgaaacaatataaaaatagcg

SEQ ID NO: 5428 - DNA, 110 bp, synthetic construct
  source 1..110: mol_type = other DNA
ttgaagaagctatccaagggtagtagctaaagaaattttcttacattcttagatgtagaaacatgttaatagtggacacgaattggatggggcacgggctgtgaagctac

SEQ ID NO: 5429 - DNA, 110 bp, synthetic construct
  source 1..110: mol_type = other DNA
ccagggtgatattaaaacacaggtatgatcttttcatgtgaaatccttcattggctcttcatggcctatgggacaaagttcattctccttagcctgactcagaaggtttt

SEQ ID NO: 5430 - DNA, 110 bp, synthetic construct
  source 1..110: mol_type = other DNA
cagcctcaatctgtccctagtctggtccccacactgctgtcaggtgtgttgaggcagcttcaggcttccatcatcccagctgaaggaatgcagaaggacgagcttcttcc

SEQ ID NO: 5431 - DNA, 110 bp, synthetic construct
  source 1..110: mol_type = other DNA
gggcctctgcagctcctgcctgccacgctggcagcatcctcttggctgccacttgctggcccagctttcagcttcctgtgtgtcagagcaggagcaacaggcacagagcc

SEQ ID NO: 5432 - DNA, 110 bp, synthetic construct
  source 1..110: mol_type = other DNA
atgtgacttggtctttagctcctactgtccaggagttaggagtattatcattagaaagtgaagacatctattttcatttcaccatgtatatatttattaattcatctact

SEQ ID NO: 5433 - DNA, 110 bp, synthetic construct
  source 1..110: mol_type = other DNA
aagtgaagacatctattttcatttcaccatgtatatatttattaattcatctactcagcaaacactcattggggacctactatgggccagatactgtgaatgtgatggga

SEQ ID NO: 5434 - DNA, 110 bp, synthetic construct
  source 1..110: mol_type = other DNA
gttcaagggctatccaattggagaagcaggtaggtacccacccacaccagtctgaaacttgagcgagagctgtggacactgacgtcatctacagagagtataactgaagt

SEQ ID NO: 5435 - DNA, 110 bp, synthetic construct
  source 1..110: mol_type = other DNA
aacttgagcgagagctgtggacactgacgtcatctacagagagtataactgaagtcatggcaacagatcccataagtcaggagaaatgtacagagaggggagtgttaggg

SEQ ID NO: 5436 - DNA, 110 bp, synthetic construct
  source 1..110: mol_type = other DNA
ttccctttgtaccatctctgtagtagctgtggtcactgtcagtgaagagaggctattcagagatgtactgtgaggagttcccgtcgtggtagcggaaacgaatccgactg

SEQ ID NO: 5437 - DNA, 110 bp, synthetic construct
  source 1..110: mol_type = other DNA
ttacagaagtgttcaatgaaatcaaaagctgcaaatctgaatcctggacacaacgctggatactccaaatggccaaaaaattctaggtagcaatctggttgctgtattct

SEQ ID NO: 5438 - DNA, 110 bp, synthetic construct
  source 1..110: mol_type = other DNA
cctccttatctctaaatttcttacaatgtggaagaatatatttctctattgagggggccacttagaattagcttcctttgtgacttgaggccaaaatcttaatacatttg

SEQ ID NO: 5439 - DNA, 110 bp, synthetic construct
  source 1..110: mol_type = other DNA
ttcctacttcctccaagaagaaacacatgtgataaatttctacttggggtgttcctgccatggtgcagtgggttaaggaatccagctgcacagggaattcccattatggc

SEQ ID NO: 5440 - DNA, 110 bp, synthetic construct
  source 1..110: mol_type = other DNA
gtatatatacttcatgggccaccaatttcttctcagagtgctcatccatagagatgaaagagaagacaagcagattatctgaattatgtaagcctcttcaggctaaacaa

SEQ ID NO: 5441 - DNA, 110 bp, synthetic construct
  source 1..110: mol_type = other DNA
atataagtaatgcccttttgctcctgccctccttctctcttcccactttcatcgttgatgagaaggcatgatgcctgaatggaatatttataatgtggccacgaggccat

SEQ ID NO: 5442 - DNA, 110 bp, synthetic construct
  source 1..110: mol_type = other DNA
tgatgagaaggcatgatgcctgaatggaatatttataatgtggccacgaggccatcaatataaagacaaaaaagcaacaacttgagatgggggcagaaagatgaaaagtg

SEQ ID NO: 5443 - DNA, 110 bp, synthetic construct; identical to SEQ ID NO: 5441
  source 1..110: mol_type = other DNA

SEQ ID NO: 5444 - DNA, 110 bp, synthetic construct; identical to SEQ ID NO: 5442
  source 1..110: mol_type = other DNA

SEQ ID NO: 5445 - DNA, 110 bp, synthetic construct
  source 1..110: mol_type = other DNA
tccatcatcagtgtttgggcattctgagaaacaccggaccatctctcaagggtcctggagattgtgttggaagcagcatgctctcctactgggaaggaacacctgcttta

SEQ ID NO: 5446 - DNA, 110 bp, synthetic construct
  source 1..110: mol_type = other DNA
acgcatgtgaaatccagttgcacattttaagagggagaagctgtggggctgttggctctcagtaaagctttcccacactgtggatgccaggaggctctgaacacaagaaa

SEQ ID NO: 5447 - DNA, 110 bp, synthetic construct
  source 1..110: mol_type = other DNA
tgaacccacatcctcatagatactaaccgggatttgttactgctgagccacaaagggaactcctccatccaattttgaacgaacattattgtcacaaaacgttcttcctt

SEQ ID NO: 5448 - DNA, 110 bp, synthetic construct; identical to SEQ ID NO: 5447
  source 1..110: mol_type = other DNA

SEQ ID NO: 5449 - DNA, 110 bp, synthetic construct
  source 1..110: mol_type = other DNA
tcaggggactctgtcctattaaaaatttggaaggaagggtcccctgaagaccagctactaccaaaatggaagagaccatatcaagtgttactaagtaccccaactgctgt

SEQ ID NO: 5450 - DNA, 110 bp, synthetic construct
  source 1..110: mol_type = other DNA
tactaccaaaatggaagagaccatatcaagtgttactaagtaccccaactgctgtcaagttatggggagtactagttagatacattggtctatatcaaaacctctatctt

SEQ ID NO: 5451 - DNA, 110 bp, synthetic construct
  source 1..110: mol_type = other DNA
ctttcttaaaacctctctaactccatcctcccaggcccctatcccatggacaccagtcataaagaataccgcgagctcccaccccaattattgcccacgctctgtggggg

SEQ ID NO: 5452 - DNA, 110 bp, synthetic construct
  source 1..110: mol_type = other DNA
atgggtagagaggccagggggagtactgtccagggagtgtttgggcatagaggcagggagctggtgaggaggatggcgccgccctgctggtgatcagtgacatctcccct

SEQ ID NO: 5453 - DNA, 110 bp, synthetic construct
  source 1..110: mol_type = other DNA
gggagctggtgaggaggatggcgccgccctgctggtgatcagtgacatctcccctaaatcagacttctcttcacagatggttcatcacggctttctcagagctgtaaagg

SEQ ID NO: 5454 - DNA, 110 bp, synthetic construct
  source 1..110: mol_type = other DNA
aagcttgtctaaggagatcagggcctgctagcgaatataacagaaatggacaaatatctctataaggatgttcacccggactggaagagagatatggcattgcaggggtt

SEQ ID NO: 5455 - DNA, 110 bp, synthetic construct
  source 1..110: mol_type = other DNA
atctctataaggatgttcacccggactggaagagagatatggcattgcaggggttctgaggaggtggcatttgcatctcactgtagggatttgggattggcctggaagga

SEQ ID NO: 5456 - DNA, 110 bp, synthetic construct
  source 1..110: mol_type = other DNA
taataaaatctacataaaatttgccactgtaaccattttaaattgtacaattcagtggcttctagcacatacacaatgtccaacaaccattaccaccaactaatttctga

SEQ ID NO: 5457 - DNA, 110 bp, synthetic construct; identical to SEQ ID NO: 5456
  source 1..110: mol_type = other DNA

SEQ ID NO: 5458 - DNA, 110 bp, synthetic construct
  source 1..110: mol_type = other DNA
ctttgagaaacactgctctggttctgagccttggctgtgccttagaaccacctacagagcttttaagtcaatcaagacctggccacaccccaaaatgtctgtgtcagaat

SEQ ID NO: 5459 - DNA, 110 bp, synthetic construct
  source 1..110: mol_type = other DNA
atttgctgtgcagaaattggcacaacattgtaaattaactataatttttggaatggattaacaatgagatcctgctatgtagaatggggaaatacgtctagtcacttatg

SEQ ID NO: 5460 - DNA, 110 bp, synthetic construct; identical to SEQ ID NO: 5459
  source 1..110: mol_type = other DNA

SEQ ID NO: 5461 - DNA, 110 bp, synthetic construct
  source 1..110: mol_type = other DNA
atacgatgtggttcggatcccctgttgctatggttgtggcttaggccagcggctgaagctctggtttgaccctgtctggaaaattccacatgccacaggttcagtcctaa

SEQ ID NO: 5462 - DNA, 110 bp, synthetic construct
  source 1..110: mol_type = other DNA
actgcttgaatggcccttcaagaaaacacttaacctgtgagaaatacgattagctgacagctctttctgggtaacccctagccattgagcatggcacagacagcagagtc

SEQ ID NO: 5463 - DNA, 110 bp, synthetic construct
  source 1..110: mol_type = other DNA
tgggctggagctagagacatgacaataggtagcatatatgttttagctcaattcatgggactggatgaggtcatctagcagtctttttcaatgaccattccttgagaaaa

SEQ ID NO: 5464 - DNA, 110 bp, synthetic construct
  source 1..110: mol_type = other DNA
gtgtcaggttggggatccaagccgcacctctgagcaccccaagctgctgcagatggattcttaacactgccccacagcgggaactctgaggcaaaacatttttgaaaggc

SEQ ID NO: 5465 - DNA, 110 bp, synthetic construct
  source 1..110: mol_type = other DNA
aaacaattctgtgtttaattttcttctcagtttgtgggccggacaagaggatatgttacttttgccaatttgacattatgtactcctagccaaggaaatgattttttaaa

SEQ ID NO: 5466 - DNA, 110 bp, synthetic construct
  source 1..110: mol_type = other DNA
ggttattttctaattccttaagttgtgtattaactcacagtatttcagtctttcttcttttctcatctaactgtttaaggctacatatttccccctgtgttgatttagct

SEQ ID NO: 5467 - DNA, 110 bp, synthetic construct
  source 1..110: mol_type = other DNA
tcttttctcatctaactgtttaaggctacatatttccccctgtgttgatttagctgtgttcagtccattttgacatgtaacttttttttttttttgtctttttgcctttt

SEQ ID NO: 5468 - DNA, 110 bp, synthetic construct
  source 1..110: mol_type = other DNA
attaaattaatgactctttttcttccagctttgttgccgtaatggacctgcagcgccatataagtttagggtccacagcacgatgacttgaaggatctgcatttctcacc

SEQ ID NO: 5469 - DNA, 110 bp, synthetic construct
  source 1..110: mol_type = other DNA
aaagaaaaataatttaaaaaatactttagctggtttgttcccctcgagagtggttaccataggtcccgtcataggtcccatcgtcacagctttcatctccgtgacccagc

SEQ ID NO: 5470 - DNA, 110 bp, synthetic construct
  source 1..110: mol_type = other DNA
accataggtcccgtcataggtcccatcgtcacagctttcatctccgtgacccagctcccctcctcgtgatgggaatcatagtctctgcctttcttgggatgcttctggga

SEQ ID NO: 5471 - DNA, 110 bp, synthetic construct
  source 1..110: mol_type = other DNA
attcacttcagtttaaaattttgtcacactcattagctggtgtccttgactcctgaagtcctccaaagaaatgctgccttttgaggatcttaatatgatagcaagctaaa

SEQ ID NO: 5472 - DNA, 110 bp, synthetic construct
  source 1..110: mol_type = other DNA
aagtcctccaaagaaatgctgccttttgaggatcttaatatgatagcaagctaaaggcatcatagaaatctcttgaagagaatttttgcttaaccttaccaatggaagga

SEQ ID NO: 5473 - DNA, 110 bp, synthetic construct
  source 1..110: mol_type = other DNA
tgggtgctgcctggcagtggtgctccatgtggttgccattctgcatttccaacacatgctagccccctaatgagataacctccttaatgtcctggtgatgtcaagtgcca

SEQ ID NO: 5474 - DNA, 110 bp, synthetic construct
  source 1..110: mol_type = other DNA
aaatcaggaccttttcagagtgaaaggatgtgctagtaatcaatattcaggacaaccggtgttgggtgggacatttggtcttcccagaaatcacagtaggttaatattta

SEQ ID NO: 5475 - DNA, 110 bp, synthetic construct
  source 1..110: mol_type = other DNA
tatttgaacaacactcttgacacacgtactcctgaaagtgggcgtgagctgtcagttcagatttttctagcctagcctagctcgtgtttctcctttggcagaaatttctc

SEQ ID NO: 5476 - DNA, 110 bp, synthetic construct
  source 1..110: mol_type = other DNA
ttcagatttttctagcctagcctagctcgtgtttctcctttggcagaaatttctctgcctcctcaaaacacctcactgtctcctttgtctgcttcattctcatagtactt

SEQ ID NO: 5477 - DNA, 110 bp, synthetic construct
  source 1..110: mol_type = other DNA
ccaagagagtagggcaggttccctttcgagccgaggggaggggcaaagacctgaaaggaccttctctaaggggggacttcacgcacgaggggaatatctgagggaaacga

SEQ ID NO: 5478 - DNA, 110 bp, synthetic construct
  source 1..110: mol_type = other DNA
aggaccttctctaaggggggacttcacgcacgaggggaatatctgagggaaacgaagaaaagatccagaaagtccagacataggcacagagtgatgctcaacaggtcctc

SEQ ID NO: 5479 - DNA, 110 bp, synthetic construct
  source 1..110: mol_type = other DNA
tactgcaaatttagaagcttaaaattatataaatgcaatatctcacagatctgaggtcagacatctgggcctcagaggctgaagtcaaatgtcagtggcctgggttctta

SEQ ID NO: 5480 - DNA, 110 bp, synthetic construct; identical to SEQ ID NO: 5479
  source 1..110: mol_type = other DNA

SEQ ID NO: 5481 - DNA, 110 bp, synthetic construct
  source 1..110: mol_type = other DNA
catctttggtgcagtgacttctgaacatagagaggaagggtagcttgcttgacatcttggagccagcattagcagagtgggtctggagctctgagtgcaatgcctgtttt

SEQ ID NO: 5482 - DNA, 110 bp, synthetic construct
  source 1..110: mol_type = other DNA
ttaccatttctgtcttctgttttagcagcactcaactctggctattaaaccatttggggaacttttaaaaatatcagtgcccaggcctttctgtggaagtatctaatgga

SEQ ID NO: 5483 - DNA, 110 bp, synthetic construct
  source 1..110: mol_type = other DNA
aatcacatctgatttataggcattgccatggggggaataatatggggagatagtgacaggaattaaggagctttaaaaaacacaagtgtcacttctctcagtgagcagtt

SEQ ID NO: 5484 - DNA, 110 bp, synthetic construct
  source 1..110: mol_type = other DNA
acaggaattaaggagctttaaaaaacacaagtgtcacttctctcagtgagcagttctccagctatgtgggccatctgcaggtgattgctatgcacctgatgtctatttaa

SEQ ID NO: 5485 - DNA, 110 bp, synthetic construct
  source 1..110: mol_type = other DNA
tagtgaataaaagtgtatacaccacatgttgttattcaaactttcccctcacacagcttccaggatgcgaggatcagatttatatcctccaggaaggaggctggagagaa

SEQ ID NO: 5486 - DNA, 110 bp, synthetic construct
  source 1..110: mol_type = other DNA
gcttccaggatgcgaggatcagatttatatcctccaggaaggaggctggagagaaattttctaggggatctgaccattttgagagaaagaaatctgtaaatactaacact

SEQ ID NO: 5487 - DNA, 110 bp, synthetic construct; identical to SEQ ID NO: 5485
  source 1..110: mol_type = other DNA

SEQ ID NO: 5488 - DNA, 110 bp, synthetic construct; identical to SEQ ID NO: 5486
  source 1..110: mol_type = other DNA

SEQ ID NO: 5489 - DNA, 110 bp, synthetic construct
  source 1..110: mol_type = other DNA
cctcaatgttccacagcctttactgccttggtatggatttgaaggctaatcccctcgcctttccacatcttacctttgagctctcccatgcccaggatggtgtcacatag

SEQ ID NO: 5490 - DNA, 110 bp, synthetic construct
  source 1..110: mol_type = other DNA
ctcaccactgcctgcagaagtaagtgggaggacaagttggctgggggaggacctgtggtcaaacacggtgccactgtgaaaccaagtcttgttcagcacccggaaatatt

SEQ ID NO: 5491 - DNA, 110 bp, synthetic construct
  source 1..110: mol_type = other DNA
tggtcaaacacggtgccactgtgaaaccaagtcttgttcagcacccggaaatatttatcacacctggccacaatctgggcaaagagcagtgtgtcacacacaggacacaa

SEQ ID NO: 5492 - DNA, 110 bp, synthetic construct
  source 1..110: mol_type = other DNA
ttaaagacttgccttgaagaaagtttcatgtatcagagagatcttttgaaaagtgaataatttatgtttaaaatggatcttgagtctcctcttaaaaatgtatccaccac

SEQ ID NO: 5493 - DNA, 110 bp, synthetic construct
  source 1..110: mol_type = other DNA
ccgctgccgggagaacatccaccattcttcctgcccaagtagtagctttaatcatgcctacattgtctctctccttccttctctccccatgggatagaccttctgtttat

SEQ ID NO: 5494 - DNA, 110 bp, synthetic construct
  source 1..110: mol_type = other DNA
gcatctttaaaaagcagagaccaaaagcgtgggacaaattcctgatcagagctgggaggactggctaagacaagggcaaggacgaggcagatgggtcactagtgagttaa

SEQ ID NO: 5495 - DNA, 110 bp, synthetic construct
  source 1..110: mol_type = other DNA
aaattccatgttggaagattcttacaaagatagtcactgaaacaaggaattagtagacttgaggcatagattcatggttagtctcagaatattgagctacaatttcttaa

SEQ ID NO: 5496 - DNA, 110 bp, synthetic construct
  source 1..110: mol_type = other DNA
gacttgaggcatagattcatggttagtctcagaatattgagctacaatttcttaaagcttgtctatccttttttttcttgtcctggaggcatagctaggttgatgttata

SEQ ID NO: 5497 - DNA, 110 bp, synthetic construct; identical to SEQ ID NO: 5495
  source 1..110: mol_type = other DNA

SEQ ID NO: 5498 - DNA, 110 bp, synthetic construct; identical to SEQ ID NO: 5496
  source 1..110: mol_type = other DNA

SEQ ID NO: 5499 - DNA, 110 bp, synthetic construct
  source 1..110: mol_type = other DNA
gtacaatgaaaaggtaaaaagcatgaatgagaactaaggagaaaagctgccagccttaagtccctagagttaagtgagttataaggtatattttatctaatgggggtaat

SEQ ID NO: 5500 - DNA, 110 bp, synthetic construct
  source 1..110: mol_type = other DNA
ctacctgtagagatgtgcatgccagatgccatgcaatggaccataggaagctgaactggatggccatcaaggtttctctgagccctgaagttccttgctcttggctccca

SEQ ID NO: 5501 - DNA, 110 bp, synthetic construct
  source 1..110: mol_type = other DNA
catcaagacacaattgtgcgttagctgtagctgagagatttcatggggtgcccaaaccccaagccattttattatttggatgctttttacttgcaaagtattccattatt

SEQ ID NO: 5502 - DNA, 110 bp, synthetic construct
  source 1..110: mol_type = other DNA
tagccatctggaggagctcagcattaactatggctaatgctatagctggcattgttgtcaatctctcctaaaatagagagacctgtagtccgtgtgagttctcaaggtca

SEQ ID NO: 5503 - DNA, 110 bp, synthetic construct
  source 1..110: mol_type = other DNA
caagccaacattttcatcattgtttcaccattttaaggaagatgtttcctacacgtttccctgttaatagctactaattcttataaactacttagtggggttagagaaca

SEQ ID NO: 5504 - DNA, 110 bp, synthetic construct
  source 1..110: mol_type = other DNA
cctgggaacttccatatgccactggtgtagccctaaaaagaccaaaaaatagaaaaaagaaaaaagagagagactactggggcgagagtcgaggaggacacaaggaagtc

SEQ ID NO: 5505 - DNA, 110 bp, synthetic construct
  source 1..110: mol_type = other DNA
aaagaaaaaagagagagactactggggcgagagtcgaggaggacacaaggaagtcctgccctctatccagacttcctggaaaataggaacatcaaccagttgacactaat

SEQ ID NO: 5506 - DNA, 110 bp, synthetic construct
  source 1..110: mol_type = other DNA
ggtaagaggtgaaacggacagatttagaagagtggtgttaacctgtaaaaggtatttaactcaggtgtttaaaactgcagacggtgaaaatactatatttgtttcttggg

SEQ ID NO: 5507 - DNA, 110 bp, synthetic construct
  source 1..110: mol_type = other DNA
tgttaacctgtaaaaggtatttaactcaggtgtttaaaactgcagacggtgaaaatactatatttgtttcttgggagtaaagttgtctatatcaatgatccaagaattta

SEQ ID NO: 5508 - DNA, 110 bp, synthetic construct
  source 1..110: mol_type = other DNA
aaaaacacagagttgattgagagcagcagaagctgaagaagtacagattagcagatagaagattagttaagaacagatagaggccactgcagagtttggtgagagatgat

SEQ ID NO: 5509 - DNA, 110 bp, synthetic construct
  source 1..110: mol_type = other DNA
gttttatgacatctttgggaatcaactgtgctacatgaaatgggaatttgctgctttgtgcttacattttttagctcatagcaccatcaaagtggatgtttaaataaaga

SEQ ID NO: 5510 - DNA, 110 bp, synthetic construct
  source 1..110: mol_type = other DNA
ttgtgcttacattttttagctcatagcaccatcaaagtggatgtttaaataaagagttgctacctgtattatgtctggtgaatatacttaggggacagccatgctggcac

SEQ ID NO: 5511 - DNA, 110 bp, synthetic construct
  source 1..110: mol_type = other DNA
ggttcatggttaacaggactgctcttatggggggggggggggcagcagctcctgcaactccttctgttaccatgcagctctcagaactgtttctggcaatgtcagcagct

SEQ ID NO: 5512 - DNA, 110 bp, synthetic construct
  source 1..110: mol_type = other DNA
aactccttctgttaccatgcagctctcagaactgtttctggcaatgtcagcagctgttcctttggtccctccctttgccagggatgctcttagaactgtgtggatggatg

SEQ ID NO: 5513 - DNA, 110 bp, synthetic construct
  source 1..110: mol_type = other DNA
cctgagtgaggtgctcctgagtaagtgagcaggagcctgcacaggggagacagtgtcagctggagtcccttgtctgctgaggctgtgaaattctgtaaaaatagttccct

SEQ ID NO: 5514 - DNA, 110 bp, synthetic construct
  source 1..110: mol_type = other DNA
gtatgagagaacatataatacgggttaacaggaaggtaggatcacgcacatgagagtgaggaagagaagcaaggcagacagtgattttgtaggctttcatgacatataca

SEQ ID NO: 5515 - DNA, 110 bp, synthetic construct
  source 1..110: mol_type = other DNA
aagccttgactctcttaaaaaagataaaagaataaagaaattagggataaaggagaagaaaggtttctgtgaaggggagctgtttggcacactgagggtgctcactgtga

SEQ ID NO: 5516 - DNA, 110 bp, synthetic construct
  source 1..110: mol_type = other DNA
aagaaaggtttctgtgaaggggagctgtttggcacactgagggtgctcactgtgagtctgattccaggcaccccctaaagtgagagcagcgtggcctgggggttacaaag

SEQ ID NO: 5517 - DNA, 110 bp, synthetic construct
  source 1..110: mol_type = other DNA
tgcctcactttcctctctactctcccattcaatggctgagggcgaggatgatgacattctaccctgcccagtgcaagaatttgatggttcaggagctggcccaagagaag

SEQ ID NO: 5518 - DNA, 110 bp, synthetic construct
  source 1..110: mol_type = other DNA
attctaccctgcccagtgcaagaatttgatggttcaggagctggcccaagagaagtctgatattcctgaaagctcatccagacctttaaatcccaggcatctgtaatcac

SEQ ID NO: 5519 - DNA, 110 bp, synthetic construct
  source 1..110: mol_type = other DNA
agatgcaagcagaagtgttgagagacttctgggcagtgtcctaaaaagagaagggagatcttcgatctttcccccttcttgctgactggaaaagagacatacggatgttg

SEQ ID NO: 5520 - DNA, 110 bp, synthetic construct
  source 1..110: mol_type = other DNA
gatgggaaaaattgtggtcagaaactcattgattgggccaagttttacaagtggtcagattactatgccctaaagatgaataacttgggagttcctgctgtggcactgtg

SEQ ID NO: 5521 - DNA, 110 bp, synthetic construct
  source 1..110: mol_type = other DNA
aactgccagaataactgtgtgtggaggtccctgaagcggctgaacatccccacaactgtgatcaggacaggtctgggggccttggaagaggtcaaccctgcagcaaggtg

SEQ ID NO: 5522 - DNA, 110 bp, synthetic construct
  source 1..110: mol_type = other DNA
cccaactaataaccacactggttaataactccttctagtcaaagctctgttcatgtaacaggtgtggttcctgtctcccagttggaccctgactgacacagcatctcagt

SEQ ID NO: 5523 - DNA, 110 bp, synthetic construct
  source 1..110: mol_type = other DNA
ccgcctgggcagggctctttccccttcgaaaaaccaaggagacacatgtgaacagccactcgtacacccacagaagcctgaagggcacggccaccctaaggggtgccacg

SEQ ID NO: 5524 - DNA, 110 bp, synthetic construct
  source 1..110: mol_type = other DNA
tggcattgccacaagctgcagcataggtcacaggtgctgctcggatccagtgtgccacagctgtggtgtaagccagcagccgcggcttcaatgtgacccctagcccgaga

SEQ ID NO: 5525 - DNA, 110 bp, synthetic construct
  source 1..110: mol_type = other DNA
cacagctgtggtgtaagccagcagccgcggcttcaatgtgacccctagcccgagaacttacatatgctgcaggtgtgacttaaagtatatatataattttttaaaaggtt

SEQ ID NO: 5526 - DNA, 110 bp, synthetic construct
  source 1..110: mol_type = other DNA
aaggatctggtgttgtcacaagctgcggcataggtgacagatttggcttagattcagtgtagttgtgaatgtggcacaggcctcagctgcagctctgattcaacctctag

SEQ ID NO: 5527 - DNA, 110 bp, synthetic construct
  source 1..110: mol_type = other DNA
ctgcacggatttatgggtcaggtaggggctggactgggggacatctcatgaagaccttttccggcactgaaattcacactccgcagagctcaatgtgacacgcacatgtt

SEQ ID NO: 5528 - DNA, 110 bp, synthetic construct
  source 1..110: mol_type = other DNA
cttttccggcactgaaattcacactccgcagagctcaatgtgacacgcacatgtttgaattggaaatcaagccacttacccgccctcgctccgtgagagttgtcaacatg

SEQ ID NO: 5529 - DNA, 110 bp, synthetic construct
  source 1..110: mol_type = other DNA
cttggtcctgagctgtttctaggactcaggatgcatctcacaaatataatctgcaaaactagactgtaagctccttggggccagaaacccttctccttccctccctgggt

SEQ ID NO: 5530 - DNA, 110 bp, synthetic construct
  source 1..110: mol_type = other DNA
ttccttctaagtacatgatgccccctggacaccctgcacccctttcctccctctaggaggtaagctttaaagaggcaggggtgttgctctgttttgtgcatcgctgtgtt

SEQ ID NO: 5531 - DNA, 110 bp, synthetic construct
  source 1..110: mol_type = other DNA
ggaggtaagctttaaagaggcaggggtgttgctctgttttgtgcatcgctgtgttctttgtacccagaacaaaggctggcacgtcgtaggtacttagtaaacatttgcta

SEQ ID NO: 5532 - DNA, 110 bp, synthetic construct
  source 1..110: mol_type = other DNA
actggagagggtttggactgggcaagggtacgctttgctgatctaaatagctctccaaaggccttaagacacttgcttctgctgagaccaggctaatcttggtcggcagt

SEQ ID NO: 5533 - DNA, 110 bp, synthetic construct
  source 1..110: mol_type = other DNA
caaaggccttaagacacttgcttctgctgagaccaggctaatcttggtcggcagtggtgttaaacctcgcagtggcgccagccctgtaatgattcctggagtaataacct

SEQ ID NO: 5534 - DNA, 110 bp, synthetic construct
  source 1..110: mol_type = other DNA
cctcagtctgcatcctgcaccatctttcatgtagcaaaggtatctcatcagacacctcttgggaagtgagaatgtaaggaggaggcagcaagaggcatttattcattcaa

SEQ ID NO: 5535 - DNA, 110 bp, synthetic construct
  source 1..110: mol_type = other DNA
gttcagcgcctgcactaccactgctcatttctatgactgggacttgtcttcaggtcaaacctggggagctcattcatggataggttgctgctccaagttttcactctcct

SEQ ID NO: 5536 - DNA, 110 bp, synthetic construct
  source 1..110: mol_type = other DNA
gttctgtgatcctgctgttaggctcctttaagctcttgagggtgtgctttgccgctactcacctgtgtctggccttttgtatagaaagtgctcagcaaatacttgttgat

SEQ ID NO: 5537 - DNA, 110 bp, synthetic construct
  source 1..110: mol_type = other DNA
aagatctttaggaatcacagacaatgcccaggtttctgtaaggacacttccctttcagctgttaggataggtaagcaggttatcaagaggagctttacaggtcaaaatca

SEQ ID NO: 5538 - DNA, 110 bp, synthetic construct
  source 1..110: mol_type = other DNA
ctccatttatttcagtatactttaaatcctctcagcaatactttttattttttcccccagtgggcaggttttgcatgcattgttagatatatctgtctgtatttcataga

SEQ ID NO: 5539 - DNA, 110 bp, synthetic construct
  source 1..110: mol_type = other DNA
attgggttcctagtgagggccctcttcctcgtctgtagatggctggctgcttgttgtgtcctcatgctggggcagagagaaaagcaagctctctactgtctctttttata

SEQ ID NO: 5540 - DNA, 110 bp, synthetic construct
  source 1..110: mol_type = other DNA
cctgagttgtcagggctgggtgtggggaccgggcttgttggtggaatcacatcgacacacaggtagctcagaagaaggggaaggagttctcttggtggctcagtggttta

SEQ ID NO: 5541 - DNA, 110 bp, synthetic construct
  source 1..110: mol_type = other DNA
atcacatcgacacacaggtagctcagaagaaggggaaggagttctcttggtggctcagtggtttacaaacctgactactatccatgaggactcgggtttgatccttggcc

SEQ ID NO: 5542 - DNA, 110 bp, synthetic construct
  source 1..110: mol_type = other DNA
cctgcccgtctgtccccagacatgcactctgccactggccctggttgacgtggaaatccaaggatatatgtggacctgttggctctgggaggaactttctgtccaggggg

SEQ ID NO: 5543 - DNA, 110 bp, synthetic construct
  source 1..110: mol_type = other DNA
atccaaggatatatgtggacctgttggctctgggaggaactttctgtccagggggaacacagctaaacccttccctggctgagaggagaggagaacattggagagcaggt

SEQ ID NO: 5544 - DNA, 110 bp, synthetic construct; identical to SEQ ID NO: 5542
  source 1..110: mol_type = other DNA

SEQ ID NO: 5545 - DNA, 110 bp, synthetic construct; identical to SEQ ID NO: 5543
  source 1..110: mol_type = other DNA

SEQ ID NO: 5546 - DNA, 110 bp, synthetic construct
  source 1..110: mol_type = other DNA
ggatcaatgagtcagaggaagtgagctgggcgaagccagggtcgaggaattaacggtgattgaatgttgcatcctcatggagcacagagtcctattttgtgtgctcttgg

SEQ ID NO: 5547 - DNA, 110 bp, synthetic construct
  source 1..110: mol_type = other DNA
tatgactgatttagtgaaacatgggactgtgtgaacagcagctcacctggaccagatgtgttctgttctacaggggaaggatggtttctgctacacttccctcacatatg

SEQ ID NO: 5548 - DNA, 110 bp, synthetic construct
  source 1..110: mol_type = other DNA
cctgccggccctgacaagcatgctggagcatttctgtgatgggcactcctagcccttctccttgttggcttattattattatcttttttaaaagagctgcatctgtggca

SEQ ID NO: 5549 - DNA, 110 bp, synthetic construct
  source 1..110: mol_type = other DNA
ttctccttgttggcttattattattatcttttttaaaagagctgcatctgtggcatatgaaagttcccaggctagggtttgagtctagtctagcagccggcctacaccac

SEQ ID NO: 5550 - DNA, 110 bp, synthetic construct
  source 1..110: mol_type = other DNA
agagcgtgggaggaaggcacagtgttctgattggtcaggcttgggtcacatactccctcttggagttgaagggatgtcagcttccctggaccatggggccaaaggaggta

SEQ ID NO: 5551 - DNA, 110 bp, synthetic construct
  source 1..110: mol_type = other DNA
cctcttggagttgaagggatgtcagcttccctggaccatggggccaaaggaggtagtggcagaaggaagagttctttaaggggaatcaggggggcagacaaatcaagaca

SEQ ID NO: 5552 - DNA, 110 bp, synthetic construct
  source 1..110: mol_type = other DNA
ctgttgagataatgtaggtaaaaggcagaatgaaatgcctagacattgtaatgtccattcatcattgggacaattatcacccgtatcagttctgttgcctgtaaagaaaa

SEQ ID NO: 5553 - DNA, 110 bp, synthetic construct
  source 1..110: mol_type = other DNA
cattcatcattgggacaattatcacccgtatcagttctgttgcctgtaaagaaaaccggtacacaggaacagctcaagggaagagtttgaagatccatttagagtatgtg

SEQ ID NO: 5554 - DNA, 110 bp, synthetic construct
  source 1..110: mol_type = other DNA
ctttcaaaagaaccagtaaccctagaaattgcaggctgcaggagccacagctccttctgtgaccttgatcttggtttattctggaggtggggaccggccagtaaaatagt

SEQ ID NO: 5555 - DNA, 110 bp, synthetic construct
  source 1..110: mol_type = other DNA
tctgtgaccttgatcttggtttattctggaggtggggaccggccagtaaaatagtttcacagtgaagagggcctttgctggagagcatctggggactccttgacagagca

SEQ ID NO: 5556 - DNA, 110 bp, synthetic construct
  source 1..110: mol_type = other DNA
tgtgggaggaagacaggcagggtaaatggaacaggggtggtgaaatctcgataaatgtttaatgtagttggttgatctagaggtgtcatgatagctttccttaatttcca

SEQ ID NO: 5557 - DNA, 110 bp, synthetic construct
  source 1..110: mol_type = other DNA
tctcgataaatgtttaatgtagttggttgatctagaggtgtcatgatagctttccttaatttccataataaaaaatagaaaccatctgggagaatttgaagtccttaaaa

SEQ ID NO: 5558 - DNA, 110 bp, synthetic construct
  source 1..110: mol_type = other DNA
gaggaggctcgagggactgtgggcttcaggaccagtagcatctcctgcagctctttgggtggtagcctgaactgatgaagtttggcttcctctccgccatcctgtgtcga

SEQ ID NO: 5559 - DNA, 110 bp, synthetic construct
  source 1..110: mol_type = other DNA
gccaaatccagagactatggctcaatccacctttgttcctcctgtgctgcagttccattatctgttcagtggggtccttacacaactggttctcctggttaccacctgag

SEQ ID NO: 5560 - DNA, 110 bp, synthetic construct
  source 1..110: mol_type = other DNA
accacactggcccctactactaggcccaagggtgggctgatgacttcaggccagtcaaactctcttggaagaactcagctctctggaggagtgatgcaaggaggaaaatc

SEQ ID NO: 5561 - DNA, 110 bp, synthetic construct
  source 1..110: mol_type = other DNA
caaactctcttggaagaactcagctctctggaggagtgatgcaaggaggaaaatcatcagagtcattcctagtccctccatgggttcttgctcctgagatcccctggaaa

SEQ ID NO: 5562 - DNA, 110 bp, synthetic construct; identical to SEQ ID NO: 5560
  source 1..110: mol_type = other DNA

SEQ ID NO: 5563 - DNA, 110 bp, synthetic construct; identical to SEQ ID NO: 5561
  source 1..110: mol_type = other DNA

SEQ ID NO: 5564 - DNA, 110 bp, synthetic construct
  source 1..110: mol_type = other DNA
tcaatgttctcccttctagctggaagaactctaaaaaggagaggcaacacagcttataacctaatgtccccaagcctttgacagcccaagatgatggccatactatggga

SEQ ID NO: 5565 - DNA, 110 bp, synthetic construct
  source 1..110: mol_type = other DNA
ataacctaatgtccccaagcctttgacagcccaagatgatggccatactatgggattggccaacatttataagtgagaatattttaggaataaacaaagcctcttactca

SEQ ID NO: 5566 - DNA, 110 bp, synthetic construct
  source 1..110: mol_type = other DNA
acatactctccccgggagattctcatgcatactaacttttaatccctgatttgtagtgacagatattaggatgaggtgaaaaagatgaggaaggtgcctgttcgggtccc

SEQ ID NO: 5567 - DNA, 110 bp, synthetic construct
  source 1..110: mol_type = other DNA
gtgacagatattaggatgaggtgaaaaagatgaggaaggtgcctgttcgggtccctcaggaagagtatttgttctcaaagacttcctgtctaatagaaaatgcaaaagag

SEQ ID NO: 5568 - DNA, 110 bp, synthetic construct
  source 1..110: mol_type = other DNA
ttccgctgagccacgacaggaactccgtgattcagaatttttaaaggttatattccatttatagttatcataaactactggctagcttccctgcactgtacaatatatcc

SEQ ID NO: 5569 - DNA, 110 bp, synthetic construct; identical to SEQ ID NO: 5568
  source 1..110: mol_type = other DNA

SEQ ID NO: 5570 - DNA, 110 bp, synthetic construct
  source 1..110: mol_type = other DNA
cggcaactgagctgacagatcatcccaggtttggccagatgcttgccacagctagggggtgacacgatgacacctttgggcttctgaaaggtggagcagtggcgctctat

SEQ ID NO: 5571 - DNA, 110 bp, synthetic construct
  source 1..110: mol_type = other DNA
tcacattatttttattgtgattcaatcgcagttgcttagaactagattcaccataattcttggctcacagaaaacattccgaattctttgtagtaattatagccctattt

SEQ ID NO: 5572 - DNA, 110 bp, synthetic construct; identical to SEQ ID NO: 5571
  source 1..110: mol_type = other DNA

SEQ ID NO: 5573 - DNA, 110 bp, synthetic construct
  source 1..110: mol_type = other DNA
ttaggcagtttaggagagccaatgtataaatacatggtagggcaggaaaccaagaaggaaggtcattgtgaaacagtcaaccactggcaaggaaaagctgaagagctttt

SEQ ID NO: 5574 - DNA, 110 bp, synthetic construct
  source 1..110: mol_type = other DNA
aggaaggtcattgtgaaacagtcaaccactggcaaggaaaagctgaagagctttttgttgactttgtaaaagcccttcatgtaatcaagttcaaggtgctaaatatttcc

SEQ ID NO: 5575 - DNA, 110 bp, synthetic construct; identical to SEQ ID NO: 5573
  source 1..110: mol_type = other DNA

SEQ ID NO: 5576 - DNA, 110 bp, synthetic construct; identical to SEQ ID NO: 5574
  source 1..110: mol_type = other DNA

SEQ ID NO: 5577 - DNA, 110 bp, synthetic construct
  source 1..110: mol_type = other DNA
taagatctaagaaagtaagtcaaggaaatttcttttaatgcttcactctcctacccaaaaactccaccgccagagcctaaaattcctgggagaaagaaggatattgtttc

SEQ ID NO: 5578 - DNA, 110 bp, synthetic construct
  source 1..110: mol_type = other DNA
ccagccggaaatttcctggaccagaaataaaattctcattaagtaagtattctgcctttttccagcaagaaggcccaaggccaccctgtgatttatttttgtcataaatg

SEQ ID NO: 5579 - DNA, 110 bp, synthetic construct
  source 1..110: mol_type = other DNA
ctttttccagcaagaaggcccaaggccaccctgtgatttatttttgtcataaatgtatcacagctcttggcagcactaaatttcaccttctagaatatggaaaaatgcaa

SEQ ID NO: 5580 - DNA, 110 bp, synthetic construct
  source 1..110: mol_type = other DNA
atattctaacagacttcccttacactttgcttagagtccttgatttcattattacgatttatttatttgaagctgagggcagatcttatacatcctgtgaataccacatt

SEQ ID NO: 5581 - DNA, 110 bp, synthetic construct
  source 1..110: mol_type = other DNA
ttttctctatacaactctaacagcacaaatgtagtccactcggagatctcctttcctacaagaaagcttccactgatacctagtcatgggagatgtgcattttctcagga

SEQ ID NO: 5582 - DNA, 110 bp, synthetic construct
  source 1..110: mol_type = other DNA
ctacaagaaagcttccactgatacctagtcatgggagatgtgcattttctcaggactttggagccttcaaggtgtcacaaatgcaaagaaacaggggaaaaggaagaagg

SEQ ID NO: 5583 - DNA, 110 bp, synthetic construct
  source 1..110: mol_type = other DNA
gatgactgaaagacatgaaaaaaagaaggacagaaattgtaaatatgctgacttgctctgagattggctatgcctgttacagttgctaaatgtcttggattgatgtttat

SEQ ID NO: 5584 - DNA, 110 bp, synthetic construct; identical to SEQ ID NO: 5583
  source 1..110: mol_type = other DNA

SEQ ID NO: 5585 - DNA, 110 bp, synthetic construct
  source 1..110: mol_type = other DNA
catcagactcttaactactcacatcatacctagccaagctctcttgttaaattctccagatacttaaagctgctgccaccacacccatgatgcttgactagaggaccacc

SEQ ID NO: 5586 - DNA, 110 bp, synthetic construct
  source 1..110: mol_type = other DNA
ccagatacttaaagctgctgccaccacacccatgatgcttgactagaggaccaccgtgctgagtcactgtgggagttaagtgcttgcttgcccaaagagacttgcctctg

SEQ ID NO: 5587 - DNA, 110 bp, synthetic construct
  source 1..110: mol_type = other DNA
ctagaaccagactgcctgaaacataactcagctcctatacataactaactgtgcgaccttaggtgagttacctaacctctctgtgcctcagttttcaacctcaaaatgaa

SEQ ID NO: 5588 - DNA, 110 bp, synthetic construct
  source 1..110: mol_type = other DNA
ccagttaaaatacacagaaagacaaaaaggcaaaaactcaaaatggctctgaaaccaagaatagcaaccagcctgggaataacatatattaagaacagtgtaatagctct

SEQ ID NO: 5589 - DNA, 110 bp, synthetic construct
  source 1..110: mol_type = other DNA
caagaatagcaaccagcctgggaataacatatattaagaacagtgtaatagctctaagtgcagtgaagatggagctgaatgaaaagccaccagtgtccagggaaggcttt

SEQ ID NO: 5590 - DNA, 110 bp, synthetic construct; identical to SEQ ID NO: 5588
  source 1..110: mol_type = other DNA

SEQ ID NO: 5591 - DNA, 110 bp, synthetic construct; identical to SEQ ID NO: 5589
  source 1..110: mol_type = other DNA

SEQ ID NO: 5592 - DNA, 110 bp, synthetic construct
  source 1..110: mol_type = other DNA
ctctcagcatatagaggttcccaggctaggagtcaaatcaaagctaaaactgccggtgtacaccacagccttagcaaggtgggacctgagccacatctgccacctacacc

SEQ ID NO: 5593 - DNA, 110 bp, synthetic construct; identical to SEQ ID NO: 5592
  source 1..110: mol_type = other DNA

SEQ ID NO: 5594 - DNA, 110 bp, synthetic construct
  source 1..110: mol_type = other DNA
actggaggatcgatacacatttcccccagtttatgaacagaagctagacattcacccctagccttagcccaaaagccactatctacatttcatagaatgcagggcccaga

SEQ ID NO: 5595 - DNA, 110 bp, synthetic construct
  source 1..110: mol_type = other DNA
caggtgagtacatattcactgaatctaatttttgtcccctcctgatcctcacaccctctatacttcagagcctctatgcatgtttgaaagctgtctggtacaagaactgc

SEQ ID NO: 5596 - DNA, 110 bp, synthetic construct
  source 1..110: mol_type = other DNA
ctctatacttcagagcctctatgcatgtttgaaagctgtctggtacaagaactgctccatgaaattctatccaccatcattgtgtttaaatgtggttcctgatatcctga

SEQ ID NO: 5597 - DNA, 110 bp, synthetic construct
  source 1..110: mol_type = other DNA
aatgaaacttcccttgaagaaattgcttaagaaaaaaatggtacagtcaatcacagagtaagctttaagaacacatacatatgacatgtaagtggaaaagaaaaccaaag

SEQ ID NO: 5598 - DNA, 110 bp, synthetic construct
  source 1..110: mol_type = other DNA
ctattgaccgaatgtatgtgttcccccaaaattcataagttgaaaccccaatgtgatggtatttggagatgggtccttagaaggtaattagattatgagtggagctctca

SEQ ID NO: 5599 - DNA, 110 bp, synthetic construct
  source 1..110: mol_type = other DNA
atggtatttggagatgggtccttagaaggtaattagattatgagtggagctctcatgactgacttgtgtgcccttattaaagagaccccagagagccccttcaccccttt

SEQ ID NO: 5600 - DNA, 110 bp, synthetic construct
  source 1..110: mol_type = other DNA
tcattgactgtaggactcctagctgcactttccacgtgctgagttttagccgttcacacatcaatttgcacagttcctggcggtaacaacctggaaagaatgacagaaca

SEQ ID NO: 5601 - DNA, 110 bp, synthetic construct
  source 1..110: mol_type = other DNA
acacatcaatttgcacagttcctggcggtaacaacctggaaagaatgacagaacagggcagagcaggacagagggtgtgaaggagcaaaagacagatcgaggagggcgag

SEQ ID NO: 5602 - DNA, 110 bp, synthetic construct
  source 1..110: mol_type = other DNA
tccaagggtaagagaaggcaatagaagagttttaaatgggagaatgacatcattgaacacatacctatctcagcaaagcagtattaacagcaggcatgtcatatgtatga

SEQ ID NO: 5603 - DNA, 110 bp, synthetic construct
  source 1..110: mol_type = other DNA
ttaccttcaaaggaccccagttttcttcatgagaaagtcagaagtaccctgacctgtattattgagacatccattaggtgatctaagttgcttttccttcagcaagggct

SEQ ID NO: 5604 - DNA, 110 bp, synthetic construct
  source 1..110: mol_type = other DNA
gtactgatagctctctcattgggtctcagtctctgtctttgctcttctgctaatattcctagtatcctttattctcattaggttgattctaaacttagtgggttactaaa

SEQ ID NO: 5605 - DNA, 110 bp, synthetic construct
  source 1..110: mol_type = other DNA
tactgaatccttctaccagcaattacacatcttttatcagaaagcctctctcctatagctgcagttcttactatgttggttactactcagtccctttgctctttcaagct

SEQ ID NO: 5606 - DNA, 110 bp, synthetic construct
  source 1..110: mol_type = other DNA
tcgattccttaccagaggtgaaatcgcccttctcagcaagagaaaattccggcctcctggacacgtgacctctgaccccgggctcagcgcttccattggccggtcaggcc

SEQ ID NO: 5607 - DNA, 110 bp, synthetic construct
  source 1..110: mol_type = other DNA
gcaagagaaaattccggcctcctggacacgtgacctctgaccccgggctcagcgcttccattggccggtcaggccaggccacgcccctacccctctcaccccgcccctcg

SEQ ID NO: 5608 - DNA, 110 bp, synthetic construct
  source 1..110: mol_type = other DNA
caggagaaaaccagaacaagaccaatcaaccaaagaactctttaaagatccacaaatatttagtatgactacagcttaaaattcaaggcaggtagtgattagtgatgagg

SEQ ID NO: 5609 - DNA, 110 bp, synthetic construct
  source 1..110: mol_type = other DNA
ctttagtggttataatgagctaaggagaaggggacatagggaatgattgctaacggggagggggtttctttttgcagtgttgaaaatgctctgaagttaggtggtgatgg

SEQ ID NO: 5610 - DNA, 110 bp, synthetic construct
  source 1..110: mol_type = other DNA
tagcttcataaaaaaaaggtgaatttacatgaagtctgttctttggctagtatgaagtgctcctctgtgtccaagatcatgacgatccggccattgatgtatgtaagaag

SEQ ID NO: 5611 - DNA, 110 bp, synthetic construct
  source 1..110: mol_type = other DNA
agtgctcctctgtgtccaagatcatgacgatccggccattgatgtatgtaagaagcttcttggaaaatatccaaatgtcgatgctagattgttcataggtaagtaacaag

SEQ ID NO: 5612 - DNA, 110 bp, synthetic construct
  source 1..110: mol_type = other DNA
aggtggtggaagcaagcggatcctgtagaaagaggcagacctcccagggcagggccacggtgtgagacagggaagcagggctacctacaaaggcctagacccaaactgcc

SEQ ID NO: 5613 - DNA, 110 bp, synthetic construct
  source 1..110: mol_type = other DNA
cacggtgtgagacagggaagcagggctacctacaaaggcctagacccaaactgccttctctgcttcagagttgtccctggaatcatctggggaggagccagagccaggga

SEQ ID NO: 5614 - DNA, 110 bp, synthetic construct
  source 1..110: mol_type = other DNA
agtgtcaaagaacagctgcacagagaaagcacttagcaagaaaaccacattaagttctgaaactcagaactttttcagaccttattctctgaccgcaaagcgttaagtag

SEQ ID NO: 5615 - DNA, 110 bp, synthetic construct
  source 1..110: mol_type = other DNA
agatgaggaaagatatttaagtgggttacttctttagtgattctgtggcttgaaacacaggtttctctcttttctgggcctctcctgacccaagctgatcttacacatca

SEQ ID NO: 5616 - DNA, 110 bp, synthetic construct
  source 1..110: mol_type = other DNA
gtagtctcagggctcagaggagcacagcagcctatttccagatgctgctcgcgggaaaggcctttcctccttttacaaaaggactctttttctgaaacaaagccaggatg

SEQ ID NO: 5617 - DNA, 110 bp, synthetic construct
  source 1..110: mol_type = other DNA
aaaggcctttcctccttttacaaaaggactctttttctgaaacaaagccaggatgtgcagtgagctgaagcccagtcctcctcagattctgccgttacgttgtctgtctt

SEQ ID NO: 5618 - DNA, 110 bp, synthetic construct
  source 1..110: mol_type = other DNA
aaatcaaagcgaatccattccacctgtacattccacatattgacagtgggccccgggactgcatacagctaacatgtcatggttcatgataaaggaacagtcataattcc

SEQ ID NO: 5619 - DNA, 110 bp, synthetic construct
  source 1..110: mol_type = other DNA
ctgggcaaatgccttctgataccatctctggcctcgaatgcggaactgaaacacagaaaaagttgaccaggtgagctgctagcttgaaagctagcttgaatgcctgggta

SEQ ID NO: 5620 - DNA, 110 bp, synthetic construct
  source 1..110: mol_type = other DNA
atcatttggatccatattgccaaggaggaggtaagagaactctcactttccgaacctgacaccatggcccctgcattattcttgagctcgaattaggatctcatccccta

SEQ ID NO: 5621 - DNA, 110 bp, synthetic construct
  source 1..110: mol_type = other DNA
ctgacaccatggcccctgcattattcttgagctcgaattaggatctcatcccctacctctttctccagctcattctgctccagccatgctggctccccttggtgttccca

SEQ ID NO: 5622 - DNA, 110 bp, synthetic construct
  source 1..110: mol_type = other DNA
tccaggatcccttggatgttacattacacacatcactgatgtgggggctggaacctagcatctcaaaaggtggcaacttgaatttaaaaaatgttatcccaaccatcaga

SEQ ID NO: 5623 - DNA, 110 bp, synthetic construct
  source 1..110: mol_type = other DNA
gtccagaggcagctctcctgcccacaccagtgacagctgtggccttgtggccactgtccgggctctgctctgcctgtcccagtagcacctatgtgccagagagagctgtt

SEQ ID NO: 5624 - DNA, 110 bp, synthetic construct
  source 1..110: mol_type = other DNA
gtccgggctctgctctgcctgtcccagtagcacctatgtgccagagagagctgttggtgcctatggtgactctgcagctcagaatgtcaggctggtgctcagagccccac

SEQ ID NO: 5625 - DNA, 110 bp, synthetic construct
  source 1..110: mol_type = other DNA
acagcttaccttcaagaacatacaaaaactgctcctttccagctctgtccccacgcctttcagttgttatcacaaaactacatctttaaacaatgtgtgcccagaaacac

SEQ ID NO: 5626 - DNA, 110 bp, synthetic construct
  source 1..110: mol_type = other DNA
agtgctctggctcagagtctctcacaggcaggaatcatctcaaggctcaatagagaaaatgaggttccacttccaagctcagtcaggtagttgctggcaggattcctttt

SEQ ID NO: 5627 - DNA, 110 bp, synthetic construct
  source 1..110: mol_type = other DNA
ggctacccaagaaaatcaggttccagccttcacagttgcatggattcctcagtttatttattatttatttactgggaaaaaatacattttcaaaatagctcagatatctt

SEQ ID NO: 5628 - DNA, 110 bp, synthetic construct
  source 1..110: mol_type = other DNA
gccttcacagttgcatggattcctcagtttatttattatttatttactgggaaaaaatacattttcaaaatagctcagatatcttatttggggagaccatttttcaagta

SEQ ID NO: 5629 - DNA, 110 bp, synthetic construct
  source 1..110: mol_type = other DNA
taatcttcatctttactatgtttgcaaagagatttttgtcaattttcactaccgctattatgaagtgtttgcaagctcctgttgctcataccctaattggtatggtacaa

SEQ ID NO: 5630 - DNA, 110 bp, synthetic construct
  source 1..110: mol_type = other DNA
gtgacagaataacctgctaatggctgggctttgcatgcagctttagagttaaatatatgatggaagcggatggcttgcaggctagggaatgtgttgtataaacatgagga

SEQ ID NO: 5631 - DNA, 110 bp, synthetic construct
  source 1..110: mol_type = other DNA
cactgaacaggcaagggatcggaaaccgaaacctcaagggtgtttccactgcaccacaactgggactcttataagcgtttttttttgtttgtttgtttgtttgtttttta

SEQ ID NO: 5632 - DNA, 110 bp, synthetic construct
  source 1..110: mol_type = other DNA
ttttgagaaactgtacatcttagtgataaatattatggctcttgtggatggtacaggcaagaagtaagaggccattaattcagagaaccaaggtcactcacttcttctgt

SEQ ID NO: 5633 - DNA, 110 bp, synthetic construct
  source 1..110: mol_type = other DNA
ttcttaaagaactgtaatgtttgaaaaggttggagatagatactcaggatgtttactcttgaatccatatgttatggttagtggggctggtctgaatgtggtttataata

SEQ ID NO: 5634 - DNA, 110 bp, synthetic construct
  source 1..110: mol_type = other DNA
ctcttgaatccatatgttatggttagtggggctggtctgaatgtggtttataatacatcagctacttaaaatatttgcattatagttatttttccctatgttaagttttc

SEQ ID NO: 5635 - DNA, 110 bp, synthetic construct
  source 1..110: mol_type = other DNA
ataggaatttcattttcttaaagtgttctctcttaggaattttctgttactgaatatgattcaaagatatagttctctaaagaagggaagagccacaacattatccatcg

SEQ ID NO: 5636 - DNA, 110 bp, synthetic construct; identical to SEQ ID NO: 5635
  source 1..110: mol_type = other DNA

SEQ ID NO: 5637 - DNA, 110 bp, synthetic construct
  source 1..110: mol_type = other DNA
atattattcaaccaatctgcattacaccacttctttcttccattatggagcttgtctctcctttaaactgttaaacttgaagagggaaaccaaacctgataatctggtca

SEQ ID NO: 5638 - DNA, 110 bp, synthetic construct
  source 1..110: mol_type = other DNA
taagaattcaactacagcgtctcaggttgctgtggtggcacaagttcagtcgccggcctggtggtgtcgcagctgcagctcgggttcaatccctggccagaaactgccat

SEQ ID NO: 5639 - DNA, 110 bp, synthetic construct
  source 1..110: mol_type = other DNA
tctacctattttaaagatgtggagacatcaaaaacttgtccaagatgctaccatttttttgtttgcaatactgaactaaaccactaggtgaagctgctccttgtgtttac

SEQ ID NO: 5640 - DNA, 110 bp, synthetic construct
  source 1..110: mol_type = other DNA
tttttgtttgcaatactgaactaaaccactaggtgaagctgctccttgtgtttacaatcacaaggataaagtgtagtgtgggagttcccatggtggctcagtggtaatga

SEQ ID NO: 5641 - DNA, 110 bp, synthetic construct
  source 1..110: mol_type = other DNA
accgggtggggtaggaagagaatggaggacagatccttggaattgctcttgggcaggcttcctgttagggtgtgtggctggtaataggacaataggctggatggacccgt

SEQ ID NO: 5642 - DNA, 110 bp, synthetic construct
  source 1..110: mol_type = other DNA
gatgtcctggagaatccgagtcctactgccgtgactcctgcctctgctttttccctccctctgtacatctctgttcacctgcattacagttgtgtgtacagctctttggg

SEQ ID NO: 5643 - DNA, 110 bp, synthetic construct
  source 1..110: mol_type = other DNA
tgttgtacaactaatctccagaactccttcagcctgcaaaactgaaactttgcacccactaaacagaagctccctatctctccgcccccaccccatccctgttcccccat

SEQ ID NO: 5644 - DNA, 110 bp, synthetic construct
  source 1..110: mol_type = other DNA
ccactaaacagaagctccctatctctccgcccccaccccatccctgttcccccatcttttcacacacttggaataactcggtcttgtctttcgatgagccactgacatgc

SEQ ID NO: 5645 - DNA, 110 bp, synthetic construct
  source 1..110: mol_type = other DNA
actctggcttaaatggttaggaaagagacacttgttcttttctactcatcttagactggtgaggatgaaagcctggtgagagtggccggctgccattttgctcccaccag

SEQ ID NO: 5646 - DNA, 110 bp, synthetic construct
  source 1..110: mol_type = other DNA
ctggtgaggatgaaagcctggtgagagtggccggctgccattttgctcccaccagagacgagcttgtctgagaatggagcccgcatagagggcagcagagctgaaagatg

SEQ ID NO: 5647 - DNA, 110 bp, synthetic construct
  source 1..110: mol_type = other DNA
cgaggatgagaacaatcatcagctggggcagggggcagagcacatccatgtgagtagagggaaggtgaagcaggtggagcaggggatgtacagggagcaagagcatagcc

SEQ ID NO: 5648 - DNA, 110 bp, synthetic construct
  source 1..110: mol_type = other DNA
ccaggaggtgatcagagaggtctggtgagttctggacacccagcatctaaaaagcatctctatcagcctcccctccagaggctggccttagcctcatcctgccctctcaa

SEQ ID NO: 5649 - DNA, 110 bp, synthetic construct
  source 1..110: mol_type = other DNA
atgccacaacagtgacaatgccagatattttcacttcctaagctgccagagaactccaagaatctgaattttcaagctgtataacgtggcggcggggggagggggtctga

SEQ ID NO: 5650 - DNA, 110 bp, synthetic construct
  source 1..110: mol_type = other DNA
ccaagaatctgaattttcaagctgtataacgtggcggcggggggagggggtctgaagagttaggctgaaaacctctgaatgtcaaaagtaaatctcccacaatttttcag

SEQ ID NO: 5651 - DNA, 110 bp, synthetic construct
  source 1..110: mol_type = other DNA
acagagggggaaggcaaaccatctactatggggcttttttctaggtggaatgaagagaaacagcactagctgtgcatgtgtgtgtgtgtgggggggggtggtatgtgcat

SEQ ID NO: 5652 - DNA, 110 bp, synthetic construct
  source 1..110: mol_type = other DNA
acagtaggtctgcgggctgcatgttcatggtcatctaggagcttagctaacttttattgggtgcagttttagcatctataaaacaattcgggaaatttggattagatact

SEQ ID NO: 5653 - DNA, 110 bp, synthetic construct
  source 1..110: mol_type = other DNA
tctgaagaactaaaaccatcaataaatgaaagccagagagaaggaccactagaaccagtgccaggaccactaaacaccaaatttgaagatgaatgaaagcttgcatccac

SEQ ID NO: 5654 - DNA, 110 bp, synthetic construct
  source 1..110: mol_type = other DNA
ccatcaataaatgaaagccagagagaaggaccactagaaccagtgccaggaccactaaacaccaaatttgaagatgaatgaaagcttgcatccaccctgatccttatctg

SEQ ID NO: 5655 - DNA, 110 bp, synthetic construct
  source 1..110: mol_type = other DNA
tgaagtgacttcccctcccagagacttcataacctcttggcactttcctggttctacttttgttgtagttttgtgtgcttctactaaattgtaagctcaaggatggttac

SEQ ID NO: 5656 - DNA, 110 bp, synthetic construct
  source 1..110: mol_type = other DNA
acttttgttgtagttttgtgtgcttctactaaattgtaagctcaaggatggttactttattcatcttggtgactcctgtgtcacagagcactgccttattgcccataatg

SEQ ID NO: 5657 - DNA, 110 bp, synthetic construct
  source 1..110: mol_type = other DNA
ctttcctcctgttgtaggcttaattgcaagacagattgcacttctgtggaatgtaggcctggcgttagcttaacttggaagcggaacaggagagcatttgaactctcttg

SEQ ID NO: 5658 - DNA, 110 bp, synthetic construct
  source 1..110: mol_type = other DNA
actagggatcccgaggtaagactgctgtacctgtatctgtaagtgctgtgtttgagtttgctctgtagtttccccatcgctgcacagaacctgcacaaaaccttctgggg

SEQ ID NO: 5659 - DNA, 110 bp, synthetic construct
  source 1..110: mol_type = other DNA
gtttgctctgtagtttccccatcgctgcacagaacctgcacaaaaccttctggggcgaagcttgtttcagatggcacctgagtaacagcattccttgtggctgctggaag

SEQ ID NO: 5660 - DNA, 110 bp, synthetic construct; identical to SEQ ID NO: 5658
  source 1..110: mol_type = other DNA

SEQ ID NO: 5661 - DNA, 110 bp, synthetic construct; identical to SEQ ID NO: 5659
  source 1..110: mol_type = other DNA

SEQ ID NO: 5662 - DNA, 110 bp, synthetic construct
  source 1..110: mol_type = other DNA
acacttggtgcgaagactgatagaaaatgactttcttccaatgaaggatcatataggaaaaaacaggggtccaaggactgagaagcttttaaccattgagaagctaggag

SEQ ID NO: 5663 - DNA, 110 bp, synthetic construct
  source 1..110: mol_type = other DNA
gtcagattcgttaaccactgagccgcaatgggaactcctcccccaaacattttaaagagtccatgactctagaatatccctcagttttgagcttatctaaagttacctca

SEQ ID NO: 5664 - DNA, 110 bp, synthetic construct
  source 1..110: mol_type = other DNA
agagtccatgactctagaatatccctcagttttgagcttatctaaagttacctcatgattagactcaggttatgcatttcaagcaggaatatctcataagcgatgtgtcc

SEQ ID NO: 5665 - DNA, 110 bp, synthetic construct
  source 1..110: mol_type = other DNA
ttttttcctgcacaaggacggaggaagcagagggcattttggatccccaggagtcggaaaagttaaactttaatgagaagtgcactcggagcccactactgtcccagctc

SEQ ID NO: 5666 - DNA, 110 bp, synthetic construct
  source 1..110: mol_type = other DNA
ggaaaagttaaactttaatgagaagtgcactcggagcccactactgtcccagctctgggcgacagccgttctctggtccctctcaggttaggagctgctcaagcctgggc

SEQ ID NO: 5667 - DNA, 110 bp, synthetic construct
  source 1..110: mol_type = other DNA
tttcaaggtaggtattaatactgcccatttagagatgaaaaaactgaagtccactgaaaagaataatcatgtcactaaaataaccagctatgtaggactcagtgtatgct

SEQ ID NO: 5668 - DNA, 110 bp, synthetic construct
  source 1..110: mol_type = other DNA
cttgtcttcttcttggcttctaagcaaaggacaacccttttcctgggcctgacggctctctgcttctggaccctgtggctgctttggctgatgcagtggtgcacagcaga

SEQ ID NO: 5669 - DNA, 110 bp, synthetic construct
  source 1..110: mol_type = other DNA
ctttagacgaagacgggccagggttcaaatcccagctctgcttctcactagccgtgggtttactagccctgtcacctagcatctatcacttgagacaagtttgcctatct

SEQ ID NO: 5670 - DNA, 110 bp, synthetic construct
  source 1..110: mol_type = other DNA
acagagttttctatttggtggaagaaggaaatccagcctctctccagagtggcggcagccggctggacggggtgtgtgtttggaaagggcgctggaggaggaggaggagg

SEQ ID NO: 5671 - DNA, 110 bp, synthetic construct
  source 1..110: mol_type = other DNA
acaagccttcgctctgtcccacctctgcctttctctcagccttccggtgagctttcttacccatttgacagaggatgaaactgaggcccagaggtaccaagaaggcagaa

SEQ ID NO: 5672 - DNA, 110 bp, synthetic construct
  source 1..110: mol_type = other DNA
cttacccatttgacagaggatgaaactgaggcccagaggtaccaagaaggcagaagccatggacttaatcccatgactttacgactctagagattctccgttgtactggg

SEQ ID NO: 5673 - DNA, 110 bp, synthetic construct
  source 1..110: mol_type = other DNA
cgcagatggtatgtattagtatcatctgtgtttaacagatgagaaaacttgccgttcagagaggttaggtagcttgacaaagggcacacagttggtaactgcagagctga

SEQ ID NO: 5674 - DNA, 110 bp, synthetic construct
  source 1..110: mol_type = other DNA
ccagctcttgttcactagtggatctcagggccccagctgggcacacagtgggtattcaggaagtgcttgtaggatggatggatggatgcatggacggatggatggatgga

SEQ ID NO: 5675 - DNA, 110 bp, synthetic construct
  source 1..110: mol_type = other DNA
tctgcatggaatgcccttccctgccttcacatttccctaactccccttcctcaggccgttcctggcctcctgctcagaatgacacactccttttacatgtgccacctgtt

SEQ ID NO: 5676 - DNA, 110 bp, synthetic construct
  source 1..110: mol_type = other DNA
ccgttcctggcctcctgctcagaatgacacactccttttacatgtgccacctgttcttttccttaatcatacccatcagccttcctaacgataaacttctccacatgatt

SEQ ID NO: 5677 - DNA, 110 bp, synthetic construct
  source 1..110: mol_type = other DNA
ggtgtgatgtgtacagaggccttgaaatgtgccgacttgatttggcctcttgtgctcctctgatccactaggagacgaatatgccagaacagctgctgatctaaggagca

SEQ ID NO: 5678 - DNA, 110 bp, synthetic construct
  source 1..110: mol_type = other DNA
tcctctgatccactaggagacgaatatgccagaacagctgctgatctaaggagcagactgaatccaacccagtgcctgcagccacgccagaccaacctgaagcctggagc

SEQ ID NO: 5679 - DNA, 110 bp, synthetic construct; identical to SEQ ID NO: 5677
  source 1..110: mol_type = other DNA

SEQ ID NO: 5680 - DNA, 110 bp, synthetic construct; identical to SEQ ID NO: 5678
  source 1..110: mol_type = other DNA

SEQ ID NO: 5681 - DNA, 110 bp, synthetic construct
  source 1..110: mol_type = other DNA
agatggaggtctgggatggcttcagagacaacagattccttgtaacttggcctaaacaatcaaatatctgagaatgctgagcactgaactgggcacatggtaagcttctc

SEQ ID NO: 5682 - DNA, 110 bp, synthetic construct
  source 1..110: mol_type = other DNA
tgatataatcgcaatacaattcctcttaaatgcactcatttctctcaaattctctatctaatataggcatttaaagctatcatttccctcttttttagctatgtcccata

SEQ ID NO: 5683 - DNA, 110 bp, synthetic construct; identical to SEQ ID NO: 5682
  source 1..110: mol_type = other DNA

SEQ ID NO: 5684 - DNA, 110 bp, synthetic construct
  source 1..110: mol_type = other DNA
gggtgcgataaaccagtggccttcattcattcctccttgtttgcacagcagacacagtgctatatatacattctcggcaggttcttaagccaaaacttagaaaaattgct

SEQ ID NO: 5685 - DNA, 110 bp, synthetic construct
  source 1..110: mol_type = other DNA
ctcgttggatctccagggtggagagatagtgaggccctggccatcagatggcttgggatgtcagcgcagctggacagctggtcgaccctctaccgtttctcacctggaga

SEQ ID NO: 5686 - DNA, 110 bp, synthetic construct
  source 1..110: mol_type = other DNA
ggatgtcagcgcagctggacagctggtcgaccctctaccgtttctcacctggagaaggcagatgagaacagctcctgtcacacagagttgttgggagatgacatcagacc

SEQ ID NO: 5687 - DNA, 110 bp, synthetic construct
  source 1..110: mol_type = other DNA
gcagttccagcccctgtaccgagtaaaggtttcagggggatcctctggtcttttctccctctcagctgcctggttacctttcttgaatccttattatgttctctgaattt

SEQ ID NO: 5688 - DNA, 110 bp, synthetic construct
  source 1..110: mol_type = other DNA
gagtcactttggagctgagtgtccctgaaatccagctgccccagggacagtctccttttataccccggaagaagggaaatcccaaaggaataaactttcaaaggcctgtc

SEQ ID NO: 5689 - DNA, 110 bp, synthetic construct
  source 1..110: mol_type = other DNA
ttttataccccggaagaagggaaatcccaaaggaataaactttcaaaggcctgtctgcacacgggaagatgacacaggagctcccctgctctttgcaggctggtcttatc

SEQ ID NO: 5690 - DNA, 110 bp, synthetic construct
  source 1..110: mol_type = other DNA
cggtacaagggactgctggcatgtgtgcagagcctggcatggaagagatgctcacagcttattccctgtctccgtctcccctgcccccttgaaatgtggatttacatgag

SEQ ID NO: 5691 - DNA, 110 bp, synthetic construct
  source 1..110: mol_type = other DNA
gcctggcacatcacttaatgctgccttatttgatcccctgtccttccaggacctgtatgggccagtctgatcactctcattttaggatgagaggagttcccgttgtggtt

SEQ ID NO: 5692 - DNA, 110 bp, synthetic construct
  source 1..110: mol_type = other DNA
tgggacagacagagaccgagagaccagaggcaggcaatggactggccgttctcacccacccgctgtgtgctggggcttggcatctacgtccattcatttgattttccctg

SEQ ID NO: 5693 - DNA, 110 bp, synthetic construct
  source 1..110: mol_type = other DNA
tgccagcctctgagccaggtgctgggattcaacaggagacgaggcagcctctctggtgcccccctagccagagctcacagtccagcgggccctttgccctttgatactaa

SEQ ID NO: 5694 - DNA, 110 bp, synthetic construct
  source 1..110: mol_type = other DNA
ctgagcccccacaggaactccatcatctcctgttttagatgttgggagatggcctccagtaataccttcagcttagaggtccctttcttttggaaatgtccctgtctcca

SEQ ID NO: 5695 - DNA, 110 bp, synthetic construct
  source 1..110: mol_type = other DNA
cctcgggtgcgcatgtcaagacacaggtgctcagcctcccccttcttttctctccttcctgaaacccacacttgtatggatcacctactgtgtaccgggcatcgcaccag

SEQ ID NO: 5696 - DNA, 110 bp, synthetic construct
  source 1..110: mol_type = other DNA
ttcctgaaacccacacttgtatggatcacctactgtgtaccgggcatcgcaccagctcccgacctgaccttctgtttgcctcgccctgctctcttctcccggttctggcc

SEQ ID NO: 5697 - DNA, 110 bp, synthetic construct
  source 1..110: mol_type = other DNA
ttttacatcacaaatgccccgagaactcatttccctagaaggtgtgtccccaccgggatggaagttagaatttctgaagtttagcatggaaagcccagactgtgtgaaca

SEQ ID NO: 5698 - DNA, 110 bp, synthetic construct
  source 1..110: mol_type = other DNA
ggatggaagttagaatttctgaagtttagcatggaaagcccagactgtgtgaacagagatgagactagactgctggagagaagacaagcggcccagagagacagaggaag

SEQ ID NO: 5699 - DNA, 110 bp, synthetic construct
  source 1..110: mol_type = other DNA
cactgagccacaacaggaactcccactgcactcttaaacaatataaaaccaccagcctttttctagaagcagtgaagtttcccaagctctcaggggggcctccccgaggg

SEQ ID NO: 5700 - DNA, 110 bp, synthetic construct
  source 1..110: mol_type = other DNA
cctttttctagaagcagtgaagtttcccaagctctcaggggggcctccccgaggggcagaaaggttgggaagcaaatgaaggaagtcaaggtcagaggatggttatgccc

SEQ ID NO: 5701 - DNA, 110 bp, synthetic construct
  source 1..110: mol_type = other DNA
gggtaatgcggagagggcaacttcgaggagcaaagaccacgccaaggtttggtggagcagagggaagggattgggaatagtcaaacctagggactcagaagtggggccac

SEQ ID NO: 5702 - DNA, 110 bp, synthetic construct
  source 1..110: mol_type = other DNA
agcagagggaagggattgggaatagtcaaacctagggactcagaagtggggccacacagagctggtgcccagacttctggggaggggatgccccctggcacctcacaggg

SEQ ID NO: 5703 - DNA, 110 bp, synthetic construct
  source 1..110: mol_type = other DNA
catttcttccaaatttcccctcctcctgcttcccttcctaaaaccaaacttttttcttttttgttgtcatttattcataaaacatttaccaagggctctccagctctttg

SEQ ID NO: 5704 - DNA, 110 bp, synthetic construct
  source 1..110: mol_type = other DNA
cttttttgttgtcatttattcataaaacatttaccaagggctctccagctctttgggggactttcagcatttcccaaagagggaagatgagggctgcccttgggatgtct

SEQ ID NO: 5705 - DNA, 110 bp, synthetic construct
  source 1..110: mol_type = other DNA
tgtagacccagtatccttaacctggtggccaccggtattttcatgatggacttagagttgtacttagctgattccttgactcaacttccagccaaccacctgaatgccgc

SEQ ID NO: 5706 - DNA, 110 bp, synthetic construct
  source 1..110: mol_type = other DNA
ggtaaaatctaccccaggttgttattgtgaggattgggtgacaaatgcgtgaaatgcttagcacagctgtgtggcacacagtggacgcttaacctgagcactgctgatgg

SEQ ID NO: 5707 - DNA, 110 bp, synthetic construct
  source 1..110: mol_type = other DNA
gcttagcacagctgtgtggcacacagtggacgcttaacctgagcactgctgatggcaagagaaatgctggccccggtggagtaggtgtggtgttccttgcactaccagca

SEQ ID NO: 5708 - DNA, 110 bp, synthetic construct
  source 1..110: mol_type = other DNA
gcaaacctcacaacccacagcacagggagggaggtattcttactcttgttttgtagctgtgactcagggaggaaaagaacacatctatgggggaatgacaagcctcttgg

SEQ ID NO: 5709 - DNA, 110 bp, synthetic construct
  source 1..110: mol_type = other DNA
gactcaacacaacccacttctttttagattgattaatatggctaatcgggcaccgttagcatgtggggtcttatatatatgtcgggttcaggttggcagctgtgttgatg

SEQ ID NO: 5710 - DNA, 110 bp, synthetic construct
  source 1..110: mol_type = other DNA
catcattcctttcctttcattatcacctagctcccctatttttttaacatcatatagaacgctttcctgcatctccctctccaagatggggtgagatgcgccgctcatgc

SEQ ID NO: 5711 - DNA, 110 bp, synthetic construct
  source 1..110: mol_type = other DNA
aatacttctgctgctgctgccacacctactagctgtcattgactgagtacatattgtacgtacccgacactgtccttagcaatttagatctacacactcattcgaacctc

SEQ ID NO: 5712 - DNA, 110 bp, synthetic construct
  source 1..110: mol_type = other DNA
atgaagagcagtggggggccgggcaccgatgcctgcagaggccagggaggcacgcttacaggagtgaatgaggctgaggaagcaggaatttgtagctttagagtaacatc

SEQ ID NO: 5713 - DNA, 110 bp, synthetic construct
  source 1..110: mol_type = other DNA
gttggtgtccctaaaccctgtgcatgcttttgtacatagcccttttattatcattttagcctacttggtatgtgacacctgtttcctgccggggccctgactgatagata

SEQ ID NO: 5714 - DNA, 110 bp, synthetic construct
  source 1..110: mol_type = other DNA
ttagcctacttggtatgtgacacctgtttcctgccggggccctgactgatagatatccaagagggtcttcttgagggcgtggtttttaagttgaaacctgaaatgttggg

SEQ ID NO: 5715 - DNA, 110 bp, synthetic construct
  source 1..110: mol_type = other DNA
tatccttaccacacatctcagttggagctaacgcttatctagtgctcaataactacatgcagtggctggtggctgccttcggggatcccagtgagcagcagtggagtcct

SEQ ID NO: 5716 - DNA, 110 bp, synthetic construct
  source 1..110: mol_type = other DNA
aaggatgctctccgtggtcctggcactatcaggggaggaaagaggcggcttagctctatagccatttatatttatagatgctatacatagtttcatgtcactcttacagc

SEQ ID NO: 5717 - DNA, 110 bp, synthetic construct
  source 1..110: mol_type = other DNA
ctatagccatttatatttatagatgctatacatagtttcatgtcactcttacagcatcctgccaaggaagcagaattgtacccatttcatggagaaggaacctagagcct

SEQ ID NO: 5718 - DNA, 110 bp, synthetic construct
  source 1..110: mol_type = other DNA
ttgtgacagataacaacagtaggatgacaagacatgcttgagagggtacatgtcaaaaaagagcaggcggtttgtggggaacacaggcaaataaaagtctcaagaagaag

SEQ ID NO: 5719 - DNA, 110 bp, synthetic construct
  source 1..110: mol_type = other DNA
aaaaagagcaggcggtttgtggggaacacaggcaaataaaagtctcaagaagaagatgagcccactgggtcctcttatgtaggtcttgggatttgttttgaggtctcttt

SEQ ID NO: 5720 - DNA, 110 bp, synthetic construct
  source 1..110: mol_type = other DNA
ccttcctctcatagatgaagaagccgtcaacacagtagtcaggtgattgtcccagagtaacacagctgggaagtggcagagcacatctttgaacttgaggacctactttc

SEQ ID NO: 5721 - DNA, 110 bp, synthetic construct
  source 1..110: mol_type = other DNA
agtaacacagctgggaagtggcagagcacatctttgaacttgaggacctactttcccatctcccatgtgcttttaaggacagagagaaaggatattcacgagacagagac

SEQ ID NO: 5722 - DNA, 110 bp, synthetic construct
  source 1..110: mol_type = other DNA
ggtttttcctcctacatactctaggcttccagagggcagtgatcatgcctgcttttcctggcgtagcactgagcctcgggtattgtaggtgtttattgagtgaaagatga

SEQ ID NO: 5723 - DNA, 110 bp, synthetic construct
  source 1..110: mol_type = other DNA
tcctggcgtagcactgagcctcgggtattgtaggtgtttattgagtgaaagatgattttcttttttctttataaatggtatttcagatccagaaaaaggccttttcttga

SEQ ID NO: 5724 - DNA, 110 bp, synthetic construct; identical to SEQ ID NO: 5722
  source 1..110: mol_type = other DNA

SEQ ID NO: 5725 - DNA, 110 bp, synthetic construct; identical to SEQ ID NO: 5723
  source 1..110: mol_type = other DNA

SEQ ID NO: 5726 - DNA, 110 bp, synthetic construct
  source 1..110: mol_type = other DNA
attcatcctattgctcttctttttttttttttttttcttcatagcactctttatggccaggagattctatttgtttatctttttattacctgtgtcctctactaaagtct

SEQ ID NO: 5727 - DNA, 110 bp, synthetic construct
  source 1..110: mol_type = other DNA
tgaaataagtcttgtggccgcaggaaagatagtgctctcagagggatgggcccagtagagggagcagtggatcttctgacaagaacataatctgctgcagtgggggtcat

SEQ ID NO: 5728 - DNA, 110 bp, synthetic construct
  source 1..110: mol_type = other DNA
aacaactggcatttgttaagcctgtgctatgctctgttccagccacactgctcagaaatttacttttccttcatgctagctccgtgcttccctcagctttaaatgatgtt

SEQ ID NO: 5729 - DNA, 110 bp, synthetic construct
  source 1..110: mol_type = other DNA
aaatttacttttccttcatgctagctccgtgcttccctcagctttaaatgatgttgtttaaacatttgggctattttatgagggagttgttatcatcttcagaaacattt

SEQ ID NO: 5730 - DNA, 110 bp, synthetic construct
  source 1..110: mol_type = other DNA
ttgacagtgaaatctacagttgagctggccattacacccaaggagatgctttctgctggagcggtgagagctttggctttgctgcctgaagaatctgcgcccgagttctc

SEQ ID NO: 5731 - DNA, 110 bp, synthetic construct
  source 1..110: mol_type = other DNA
ctggagcggtgagagctttggctttgctgcctgaagaatctgcgcccgagttctcgctttaccacttgctccttttatgatttccagatctctttctttatctatgaagt

SEQ ID NO: 5732 - DNA, 110 bp, synthetic construct
  source 1..110: mol_type = other DNA
cctttcagaataataatgtctgacccctgatttagctgaaaagaaatttactcagagcagataagcaccctatgtccctgcagaccttaaaaatatgtcagatggggaat

SEQ ID NO: 5733 - DNA, 110 bp, synthetic construct
  source 1..110: mol_type = other DNA
taccttctctaaggaacacggcctctacctgcattctcattctttgggcagttgggggtggtaaaaaaaaaaaaaaaaaaagccttcttctaaatctcctgtgtcttaaa

SEQ ID NO: 5734 - DNA, 110 bp, synthetic construct
  source 1..110: mol_type = other DNA
gggtggtaaaaaaaaaaaaaaaaaaagccttcttctaaatctcctgtgtcttaaaaataatcaccctgagtcaacttttctgccatggagacacattttagggtggcaaa

SEQ ID NO: 5735 - DNA, 110 bp, synthetic construct
  source 1..110: mol_type = other DNA
ggttcaaatactttggaaaccatctcgataatgctgatttctgggtcttatcttggacctgtctaactaagctgattggaaatgggatctgaagatgtaaaagctcacag

SEQ ID NO: 5736 - DNA, 110 bp, synthetic construct
  source 1..110: mol_type = other DNA
gaacagggaaaatatttgtttggtatctaataaccaccagtaactgcatcttttattattcacaaatcactgtagctttgtaacagtgatttgactttttattcccaaac

SEQ ID NO: 5737 - DNA, 110 bp, synthetic construct
  source 1..110: mol_type = other DNA
gcatgcgcatgcgtgcacacacacacacgccaactgcaagtaaattttcagctgcatattagctgcttaaagcaaagctcatgggtctatattcccaaagcatcacggcc

SEQ ID NO: 5738 - DNA, 110 bp, synthetic construct
  source 1..110: mol_type = other DNA
atattagctgcttaaagcaaagctcatgggtctatattcccaaagcatcacggccaatccaactttcttcttttaacagtgagaaaaccaaggcccagagagggagagta

SEQ ID NO: 5739 - DNA, 110 bp, synthetic construct
  source 1..110: mol_type = other DNA
atatgacatgagttaggtgatttactctggtgctggtctgcgttggagtcaaatgacaagcttaggtgtgaatgagccaaatgatgattttaactgatgaagaaagacaa

SEQ ID NO: 5740 - DNA, 110 bp, synthetic construct
  source 1..110: mol_type = other DNA
ctggatgaaggtgagaaggacgaacaatctgtttctctggtgtcaccatttctagtagcagatagctctttattggcacaattactgcatgtgttgctacttctctacat

SEQ ID NO: 5741 - DNA, 110 bp, synthetic construct
  source 1..110: mol_type = other DNA
tttactcaacacacctgaacgcacagggtcagggttctttgctccactttacaaaggaaaaatggagctcgacagaggaagtgaatgcctaagaatgtttaagctgtgca

SEQ ID NO: 5742 - DNA, 110 bp, synthetic construct
  source 1..110: mol_type = other DNA
ctctccatccccttgtttcaggaatcaatccctcaaagccctatttagaagctttgatgggaagctctgcattgtgtgctggatctacaaatatggctctgttctcaagt

SEQ ID NO: 5743 - DNA, 110 bp, synthetic construct
  source 1..110: mol_type = other DNA
gatgggaagctctgcattgtgtgctggatctacaaatatggctctgttctcaagtagttaataatctcaaagaaggggcagtgttctcgccaacaaaaagcaaaacaata

SEQ ID NO: 5744 - DNA, 110 bp, synthetic construct
  source 1..110: mol_type = other DNA
ggcagggtgtagaaagttattgtatataggatcgccaggatgctattacgaaatactctgcattagatgcccacatgaataccgtattttgcagcttgcaaaggtctctc

SEQ ID NO: 5745 - DNA, 110 bp, synthetic construct
  source 1..110: mol_type = other DNA
ctctgcattagatgcccacatgaataccgtattttgcagcttgcaaaggtctctcagatatctcatttcatataatgcacacagccaccccgtgaggcaagtattctttt

SEQ ID NO: 5746 - DNA, 110 bp, synthetic construct
  source 1..110: mol_type = other DNA
aaaagatgctacgtctttcctttctgagcggtcttactagctatggtggtgaaggatgcagagaatggcattgatatgttggaccacagtgctgtggggtcagaaacaga

SEQ ID NO: 5747 - DNA, 110 bp, synthetic construct
  source 1..110: mol_type = other DNA
accaagaaggagtaacagtgatcatatttaccttacctccactgaaactaaaaacaggcaacatatgtgaaccaagggttttgaagacatcaagcaacgagggacagtgg

SEQ ID NO: 5748 - DNA, 110 bp, synthetic construct
  source 1..110: mol_type = other DNA
aggcaacatatgtgaaccaagggttttgaagacatcaagcaacgagggacagtggtcctttagagacaaaaaacaaataacgtgagctctgtaattgtcacagcttgctg

SEQ ID NO: 5749 - DNA, 110 bp, synthetic construct
  source 1..110: mol_type = other DNA
gaatgggctgggcaggggaggccctggaggccaaggctaggaccgtcaaggtgccacaccttggttgtttttctctgcatgtcacccagtctgattccttgctgctcctc

SEQ ID NO: 5750 - DNA, 110 bp, synthetic construct
  source 1..110: mol_type = other DNA
caggacagcgccccccacccccagtaaagagttatccaaccaagaatgtcagtagtgccaaaactgagaaaccctcatgtagatattggtatcaattcactaaaatatga

SEQ ID NO: 5751 - DNA, 110 bp, synthetic construct
  source 1..110: mol_type = other DNA
agggaacctaggcataatgagtccaaggttatgcagctagcaaaaatgaagccatgtttccaattctggatcatatgaaatctcttctttaaagccttatgacagtatca

SEQ ID NO: 5752 - DNA, 110 bp, synthetic construct
  source 1..110: mol_type = other DNA
aacaaggggagtttaaatccagttatgcttaccacagagttcgatcttttaaaatttatctcacatggccttctgcaagtatgttctctcatcctaacggtgtcatttta

SEQ ID NO: 5753 - DNA, 110 bp, synthetic construct
  source 1..110: mol_type = other DNA
cagcctccctaccccaatggctgtgctacaatatggtaacatgggatcaaacctggtctaatcaaggcatttccttctacacccagctatgcaggatcactttaaaacac

SEQ ID NO: 5754 - DNA, 110 bp, synthetic construct
  source 1..110: mol_type = other DNA
gtctaatcaaggcatttccttctacacccagctatgcaggatcactttaaaacacagctttcttcctgaggattggagagttggaaagaaatgaatggaaccatagaaga

SEQ ID NO: 5755 - DNA, 110 bp, synthetic construct
  source 1..110: mol_type = other DNA
atcccaatgggtggcattttaataaattccagcttggcaattggggaagaggcaaaacagtttgtttccaacttttctgtcacttaatacattgaagaaactgcaaggcc

SEQ ID NO: 5756 - DNA, 110 bp, synthetic construct
  source 1..110: mol_type = other DNA
tggtgcgctaccgcgtggtcaacctccacgatgacgaccacgagaaccccacagtgagccgccagcagatcgacttccagcacgggcagctggccgaggccttcaggcat

SEQ ID NO: 5757 - DNA, 110 bp, synthetic construct
  source 1..110: mol_type = other DNA
gagccgccagcagatcgacttccagcacgggcagctggccgaggccttcaggcattacaacatctcttgggagctggaggtgctggaggtgagcaactcatccttgcgcc

SEQ ID NO: 5758 - DNA, 110 bp, synthetic construct
  source 1..110: mol_type = other DNA
atctgctgagatgatgctgtattcctggtctgtaactccctatccatgggcccaagtcctccttcaataagatgaagtcctaggtagatgactcggaaagtcatttccag

SEQ ID NO: 5759 - DNA, 110 bp, synthetic construct
  source 1..110: mol_type = other DNA
caccaagtttggagctaagagaggatgctgtttcctagaaaaaatatgagctttagtgatactcctacctgggtttgaatctgcccttttctgaccatgtccttggacaa

SEQ ID NO: 5760 - DNA, 110 bp, synthetic construct
  source 1..110: mol_type = other DNA
catggagcaaccctgggagaaaaagctctgattgaaaacagacttcctgcatgcatgccttcatggattcattcaagtacatgcattcacatatgcacaaggaaacacaa

SEQ ID NO: 5761 - DNA, 110 bp, synthetic construct
  source 1..110: mol_type = other DNA
cccatcatcatggcttctgcctccttccctgctcctgctctagttccctcacaaagtcccttctcccacccagaggcagcttgccagttcagggttggagcaagaagaat

SEQ ID NO: 5762 - DNA, 110 bp, synthetic construct
  source 1..110: mol_type = other DNA
gtcccttctcccacccagaggcagcttgccagttcagggttggagcaagaagaataacattcctctgttctctgcccaacgtggaaattccatctctttgcaatttccat

SEQ ID NO: 5763 - DNA, 110 bp, synthetic construct
  source 1..110: mol_type = other DNA
ctcaatcctttgtatggatggggaaactaagctttgaaatgagaaaataatttacctaaaggagcaacgtaagttaataacaaaggtaattgtccgaagtgtatagagag

SEQ ID NO: 5764 - DNA, 110 bp, synthetic construct
  source 1..110: mol_type = other DNA
gattctatcactgagtttcaaactctggccacagatccagccttgttcactgatctttgcttcctactctgtttcccagtagaactacatccaactgctaatgggttcca

SEQ ID NO: 5765 - DNA, 110 bp, synthetic construct
  source 1..110: mol_type = other DNA
acatggtcttcttctctatgtgtgtctttctgtgtcctctcttcttatagtgacaccagccactgttatcacctttgatttaggaaccaacctaatagcagcgcaatctc

SEQ ID NO: 5766 - DNA, 110 bp, synthetic construct
  source 1..110: mol_type = other DNA
ccagccactgttatcacctttgatttaggaaccaacctaatagcagcgcaatctcagcttgatccttaattcgtgacattttcaaagactctaagactgcatgcattctg

SEQ ID NO: 5767 - DNA, 110 bp, synthetic construct
  source 1..110: mol_type = other DNA
agagtctccttgtcaaaatctggaggggttggttggtgcctcccacaagccccagggagcaaagataaagatcccattcctattggtatcaagctgcatccatcacatac

SEQ ID NO: 5768 - DNA, 110 bp, synthetic construct
  source 1..110: mol_type = other DNA
ggagcaaagataaagatcccattcctattggtatcaagctgcatccatcacataccaccactaacttaatttttacagcctgcgctgaccttccaaacttttatcattga

SEQ ID NO: 5769 - DNA, 110 bp, synthetic construct
  source 1..110: mol_type = other DNA
caatgtaactgctctatcacagccactgctgccaccatcttcctctccactactgggagaagtgggtctggtagcttgctgttccttgccttgcgttattccctcacaca

SEQ ID NO: 5770 - DNA, 110 bp, synthetic construct
  source 1..110: mol_type = other DNA
gtacttttctcaataaaacactgaaaaaagtgggatgccgaaaagattacacaaaatcagtaaaggcaattactgctggggaacagaatgaggagtgatttttttcacat

SEQ ID NO: 5771 - DNA, 110 bp, synthetic construct
  source 1..110: mol_type = other DNA
tgccagaaaccctggcaccatctctagtcacttccttcacctcttatctcccacctttcaatcataaagtcctcatcatatgagaagcttaatctgtttcccatcccttt

SEQ ID NO: 5772 - DNA, 110 bp, synthetic construct
  source 1..110: mol_type = other DNA
cttccccatgtgacccagccacctgtttcatggacagaagcgggcaagaatgagatggctctgaagactgggttccaccccacactgcctcctagctgggtaacttggag

SEQ ID NO: 5773 - DNA, 110 bp, synthetic construct
  source 1..110: mol_type = other DNA
tggctctgaagactgggttccaccccacactgcctcctagctgggtaacttggagccaaccacccaaacctccgttttctcatctgcaaaatggggatcaggagctcccg

SEQ ID NO: 5774 - DNA, 110 bp, synthetic construct
  source 1..110: mol_type = other DNA
aatcatccattggtactcacacacacaacctttctctttgtttatggctgacagctgatctgatagctccagggtccattctagtttggcatccatgccactacattttc

SEQ ID NO: 5775 - DNA, 110 bp, synthetic construct
  source 1..110: mol_type = other DNA
cccttcattggatcacttaacaaatgtttactggacatctgcttagtgctaagccaacatgctgggtgctggaaatgcagtagtaaaccagacaggcaagatcctgctct

SEQ ID NO: 5776 - DNA, 110 bp, synthetic construct
  source 1..110: mol_type = other DNA
aacatgctgggtgctggaaatgcagtagtaaaccagacaggcaagatcctgctctagtggagcttaaatcctagacagaagacagattaacaagaaataaaaatgatttg

SEQ ID NO: 5777 - DNA, 110 bp, synthetic construct; identical to SEQ ID NO: 5775
  source 1..110: mol_type = other DNA

SEQ ID NO: 5778 - DNA, 110 bp, synthetic construct; identical to SEQ ID NO: 5776
  source 1..110: mol_type = other DNA

SEQ ID NO: 5779 - DNA, 110 bp, synthetic construct
  source 1..110: mol_type = other DNA
cccactttacagatgaggaaaccaaggcagcttgttgtgccaaaggtgagagaggtaggagctgtgagtcgcgtgacccgccttgaccagctgccccctcatagggaggg

SEQ ID NO: 5780 - DNA, 110 bp, synthetic construct
  source 1..110: mol_type = other DNA
aagtccaaagtctacatacccagcggcccagtttgagttccaaggatgtaggctacttttgaatcaggacgagctgatccacagttcaaaggccatcaggtaggaggtta

SEQ ID NO: 5781 - DNA, 110 bp, synthetic construct
  source 1..110: mol_type = other DNA
ctgtaacgtgatggccaaatgatttgagcttcttgtgtaactctgttccagaggtgtgaggaatcagaactaatagaggtaaagccctgagacagggcctgatatgaaat

SEQ ID NO: 5782 - DNA, 110 bp, synthetic construct
  source 1..110: mol_type = other DNA
taagacgaggaggcagcctcagatttcttgcactgtcattcacccagaatgtatcttcttagggcagctggatgcacctgccagccctttctcccttcgttcatttcaca

SEQ ID NO: 5783 - DNA, 110 bp, synthetic construct
  source 1..110: mol_type = other DNA
tgcccctgctctccccatgtccacaccagaggataactgatacctacccccaaccccagaaagcttagatgcttccatctccggtgctaaccctttgtcttcagcacaag

SEQ ID NO: 5784 - DNA, 110 bp, synthetic construct
  source 1..110: mol_type = other DNA
ccagaaagcttagatgcttccatctccggtgctaaccctttgtcttcagcacaagccatgctgccctcagccagattccttgttgggtaaggacagcagaccctttaggc

SEQ ID NO: 5785 - DNA, 110 bp, synthetic construct
  source 1..110: mol_type = other DNA
ctctaggactagcttctcttggctctcttgacaagctgactctccaggcactcgctccctctttggaaacctgccatggcactgtgggaagtcttagccacaaggagagg

SEQ ID NO: 5786 - DNA, 110 bp, synthetic construct
  source 1..110: mol_type = other DNA
ttacggatccagcattgccgtaaactgtgctgtaggtcacagatgtggctcaaatccagccttgttgtggctgtggcataggcctgcagtttcagctctgattcagcccc

SEQ ID NO: 5787 - DNA, 110 bp, synthetic construct; identical to SEQ ID NO: 5786
  source 1..110: mol_type = other DNA

SEQ ID NO: 5788 - DNA, 110 bp, synthetic construct
  source 1..110: mol_type = other DNA
aagctgatgcagatttgatgggctaggaggagagaaagacacacagagtgggaaggtttgctcccctgggctgcaagggtttctgatcctgactgtagcaaatcccatcc

SEQ ID NO: 5789 - DNA, 110 bp, synthetic construct
  source 1..110: mol_type = other DNA
gtttgctcccctgggctgcaagggtttctgatcctgactgtagcaaatcccatccatctgtttggctgctctagccttggtgatggtgccaagagcccagacagacttag

SEQ ID NO: 5790 - DNA, 110 bp, synthetic construct
  source 1..110: mol_type = other DNA
gggctcatttccaagtgccccagtacagctctgcctggctgtcccagttcagagaagagattccatcagctttcagctggtatgcctcctgccctgtccctctctcaagg

SEQ ID NO: 5791 - DNA, 110 bp, synthetic construct
  source 1..110: mol_type = other DNA
agagattccatcagctttcagctggtatgcctcctgccctgtccctctctcaaggaacacagcactatagggcatggacattcgacagttattcatgggaatgacctgct

SEQ ID NO: 5792 - DNA, 110 bp, synthetic construct
  source 1..110: mol_type = other DNA
ttagttccctgtttctttccatatttgtgcatgaagcaagcgcatgggtgctccgcatcagctctccctgggactgcggcggcttggtgccttcccgaggatcagacaat

SEQ ID NO: 5793 - DNA, 110 bp, synthetic construct
  source 1..110: mol_type = other DNA
cttgtgcttggcttgttcccagaacatggtgccgctgtggcttgagccctgagaatgggaggggagaggagaaagagctgaggtggggacagtccacagagcccagtagc

SEQ ID NO: 5794 - DNA, 110 bp, synthetic construct
  source 1..110: mol_type = other DNA
gtgttctagactgccccccatagttccccagtgggtcagatacccacaggagcttcctgctcagctatatacccttcactggctgcctgctctgccctgcccattgcgac

SEQ ID NO: 5795 - DNA, 110 bp, synthetic construct
  source 1..110: mol_type = other DNA
actccatatgcctcagggcagccaaaaaagaaagaaggaaaaagagatgggattcccaggctggccctctgcctactctaccagtgaatggaagagatgggatccgaagg

SEQ ID NO: 5796 - DNA, 110 bp, synthetic construct
  source 1..110: mol_type = other DNA
ccaggctggccctctgcctactctaccagtgaatggaagagatgggatccgaaggcagttggagggggttagcactggtattgaaggaagttccctgcaggaggcaggac

SEQ ID NO: 5797 - DNA, 110 bp, synthetic construct
  source 1..110: mol_type = other DNA
aattcaatcactcagtttggacagctctctgacatcaaccatgtgacttcatgtagctatccagaggacagttagacaccaagacctagactagctgggaagtgaggatg

SEQ ID NO: 5798 - DNA, 110 bp, synthetic construct
  source 1..110: mol_type = other DNA
cacccacctttaaaattctaaccgccgctgagccacagaagccccctctgtaaaaagtagtacctacttaaggctgaggatcgaagaagatcctgcatatcaagctggac

SEQ ID NO: 5799 - DNA, 110 bp, synthetic construct
  source 1..110: mol_type = other DNA
agtagtacctacttaaggctgaggatcgaagaagatcctgcatatcaagctggacctggcccagggcacatgcgcagtaagtgatggctagcaaagattcagcacctcgg

SEQ ID NO: 5800 - DNA, 110 bp, synthetic construct
  source 1..110: mol_type = other DNA
ttggagtgggggaaggcatgtgcctccttccctgttgacatttgaaggaagcttctctagtcctttgtggactgttcttcttaggctaaactccctgcatctggcaaccc

SEQ ID NO: 5801 - DNA, 110 bp, synthetic construct
  source 1..110: mol_type = other DNA
gatctttgtcatctatgctttctcccagggtgctgtatcccagagcacacgtctgtgggcaccaggatattctgagagagtgggttaggatccaaatgggagtggacagt

SEQ ID NO: 5802 - DNA, 110 bp, synthetic construct
  source 1..110: mol_type = other DNA
tgggcaccaggatattctgagagagtgggttaggatccaaatgggagtggacagttgcccagagcagccagaaatacaacagaggcacctgaacctaaggaaatagatga

SEQ ID NO: 5803 - DNA, 110 bp, synthetic construct
  source 1..110: mol_type = other DNA
ttgtattagcattagggttttctcttctgatattttcccatcacaccctttgcctttttctactgggatcttccaccttttcttaccaaattgtaattggtaagaaattg

SEQ ID NO: 5804 - DNA, 110 bp, synthetic construct
  source 1..110: mol_type = other DNA
tgctttccctcaactattccagatgagttggtttggtgacattttaacctttaaagaatgaggctggaaatgcactgaattagctgagcttgtatcccaactctctagaa

SEQ ID NO: 5805 - DNA, 110 bp, synthetic construct
  source 1..110: mol_type = other DNA
gaatgaggctggaaatgcactgaattagctgagcttgtatcccaactctctagaagatgctaggaaaagactcaggaagactcatctaaaataatctgtatctgtatacc

SEQ ID NO: 5806 - DNA, 110 bp, synthetic construct
  source 1..110: mol_type = other DNA
aagtatttattcttttcagtagctctatgacatagttgcttctattattatttcaccattacaagaaactgaagcttggagatgttaaactacccatctagggtcaaaag

SEQ ID NO: 5807 - DNA, 110 bp, synthetic construct
  source 1..110: mol_type = other DNA
taattctcctcacaaggtcatctgttgctgcaatttgcaggagttggctattgtacagctactacaagagccagatagggccaccactgtcactgaaggaaagttccctt

SEQ ID NO: 5808 - DNA, 110 bp, synthetic construct
  source 1..110: mol_type = other DNA
ttaatatagagtgtctattcattaacattagcttatggtcaacagccctataactcatgcctgaacaaagctgatttaacacaactatttgctctgacaggcacattaga

SEQ ID NO: 5809 - DNA, 110 bp, synthetic construct
  source 1..110: mol_type = other DNA
catgcctgaacaaagctgatttaacacaactatttgctctgacaggcacattagagccttcttgagcctaggaacactacacagaattttagccctatgcttgggcttca

SEQ ID NO: 5810 - DNA, 110 bp, synthetic construct
  source 1..110: mol_type = other DNA
ctagggatcaagggagagggtgggagatgatcaaagtggtaccaaagtatcactggtcaaagtggcagacaggaaccacctgagtacgtccttgaagatgctgcaaggtc

SEQ ID NO: 5811 - DNA, 110 bp, synthetic construct
  source 1..110: mol_type = other DNA
tagagggactaaacactgttctaaaatacagaacttccaggtggatgtttcgaccaaatcagctaaggcgtccaggacagggaaagccaattcaactcttagcgcatcaa

SEQ ID NO: 5812 - DNA, 110 bp, synthetic construct
  source 1..110: mol_type = other DNA
cttacaagtggaaccttaattgaggcataaaagcatgcctttgatcttcccagaacctgtggttctcctatcacctgagtcctgttcctgatgacacaggttggagcaaa

SEQ ID NO: 5813 - DNA, 110 bp, synthetic construct
  source 1..110: mol_type = other DNA
ggagtcatctccccacattggactgagagcctccaaatcagattcctgttgagttaaacatccttctggctcctccctccccgctttttttttctcctgaaaaattataa

SEQ ID NO: 5814 - DNA, 110 bp, synthetic construct
  source 1..110: mol_type = other DNA
aaacatccttctggctcctccctccccgctttttttttctcctgaaaaattataacctagctttctttcttttaaaagctgttatttcgttcagtttgcttaggaaagcg

SEQ ID NO: 5815 - DNA, 110 bp, synthetic construct
  source 1..110: mol_type = other DNA
gctacagacaagcggcaagatttgttttagcaccggcttaccataaatttatttgcttgttaatgcagcttccccagttcatagttttgctaactaggagcatcaaaatg

SEQ ID NO: 5816 - DNA, 110 bp, synthetic construct
  source 1..110: mol_type = other DNA
cttgttaatgcagcttccccagttcatagttttgctaactaggagcatcaaaatgtcaatctgtcctcaggggtgtatcaaccttatgatctgaactcagtaacaggatc

SEQ ID NO: 5817 - DNA, 110 bp, synthetic construct; identical to SEQ ID NO: 5815
  source 1..110: mol_type = other DNA

SEQ ID NO: 5818 - DNA, 110 bp, synthetic construct; identical to SEQ ID NO: 5816
  source 1..110: mol_type = other DNA

SEQ ID NO: 5819 - DNA, 110 bp, synthetic construct
  source 1..110: mol_type = other DNA
tgcacacccagacctcattaaaacaggattcaaattcgggtgtgcttagttgactgtcttcagctggtggcttcataagtgactgcttcagattttgagtgaagaacata

SEQ ID NO: 5820 - DNA, 110 bp, synthetic construct
  source 1..110: mol_type = other DNA
ttagttgactgtcttcagctggtggcttcataagtgactgcttcagattttgagtgaagaacatacaactcttggagttcccattgtggcatagcagaaacgaatccgac

SEQ ID NO: 5821 - DNA, 110 bp, synthetic construct
  source 1..110: mol_type = other DNA
actaagaaaactgcatgtgtgatcttgattcttctcctaagtgttgggattcagaacctattcatccaagagtcgtattcctgggctctgaaatatttctcaaactttct

SEQ ID NO: 5822 - DNA, 110 bp, synthetic construct
  source 1..110: mol_type = other DNA
acctattcatccaagagtcgtattcctgggctctgaaatatttctcaaactttctagaaaatttggtaactatttcaagtggagggtgggaagaggaggaaggaagcatt

SEQ ID NO: 5823 - DNA, 110 bp, synthetic construct
  source 1..110: mol_type = other DNA
gatttccagttcttcagttacaagatctgtaaatttaggcaaaatctatgcctcagttcctcatcttgaaagttgagatatagtaaaacctccgatagagggctagtgca

SEQ ID NO: 5824 - DNA, 110 bp, synthetic construct
  source 1..110: mol_type = other DNA
gttcctcatcttgaaagttgagatatagtaaaacctccgatagagggctagtgcaaagagtcagtttgataatccatgcaacgtgctctgaatgatgcctggcatatgat

SEQ ID NO: 5825 - DNA, 110 bp, synthetic construct
  source 1..110: mol_type = other DNA
cacttcagtcagtttctaggccctttcaactccaagatgcagttttgagagtcaagactttgcccgcatctctactgccacttgttacatctgtaatctcttaccagtta

SEQ ID NO: 5826 - DNA, 110 bp, synthetic construct
  source 1..110: mol_type = other DNA
ggatcagagaagatacttgaaataattcttatactcataaatttgttgaggctagttttgtgccccaggatgtggtccgtccttgagaatgtaacatttgcacttgaaaa

SEQ ID NO: 5827 - DNA, 110 bp, synthetic construct; identical to SEQ ID NO: 5826
  source 1..110: mol_type = other DNA

SEQ ID NO: 5828 - DNA, 110 bp, synthetic construct
  source 1..110: mol_type = other DNA
gagagggctatatgttttggggagcaagaccacagaggtaaagcaccatgttcatcataacatatcaagggaaaatgcttaccagcatcaattatcattgttgacgttga

SEQ ID NO: 5829 - DNA, 110 bp, synthetic construct
  source 1..110: mol_type = other DNA
tggggaatcctctttatacaaaccacatgcctatgcagctccagaacaccttgttggtccagtgttcatgttagtcaaactgatgattttgtatcctacagaccaagaat

SEQ ID NO: 5830 - DNA, 110 bp, synthetic construct
  source 1..110: mol_type = other DNA
agtgggttaaggaacctgcattgctacaaattgcatctcacagatgcatctcaaatcctgggtagccatggctgtggtgaaggtctcagctgcagctctgactcaacccc

SEQ ID NO: 5831 - DNA, 110 bp, synthetic construct
  source 1..110: mol_type = other DNA
tctcacagatgcatctcaaatcctgggtagccatggctgtggtgaaggtctcagctgcagctctgactcaacccctagcctgggatctgcatatgccccaggcatggcca

SEQ ID NO: 5832 - DNA, 110 bp, synthetic construct
  source 1..110: mol_type = other DNA
cttttccccttccttctgattgcttctctgctgcttaccagcaccttggggaattggcgtggctactttgttattgaaatacgttggctggcctttcttcctttttgcct

SEQ ID NO: 5833 - DNA, 110 bp, synthetic construct
  source 1..110: mol_type = other DNA
ggcgtggctactttgttattgaaatacgttggctggcctttcttcctttttgccttctcttttacaggggggaaaaaagtgatcaaggagtagacaccaaagcatttgat

SEQ ID NO: 5834 - DNA, 110 bp, synthetic construct
  source 1..110: mol_type = other DNA
gtacccaatgtcacacaaccagtagtaactagatataattaggctataatcttcacatgccaaatccaatgggctttttcactattttgtctttcaactacaccaaaaga

SEQ ID NO: 5835 - DNA, 110 bp, synthetic construct
  source 1..110: mol_type = other DNA
catgccaaatccaatgggctttttcactattttgtctttcaactacaccaaaagattgaatattcagaaccaatgaattcaggccaggaggttgacgacctcagtggaca

SEQ ID NO: 5836 - DNA, 110 bp, synthetic construct
  source 1..110: mol_type = other DNA
caaacattgtgagatttggggatttaacacagatggtatagacacctttgaagtttaaatataccaggagttatccaaatagcactacccatacttcagggtatacttgc

SEQ ID NO: 5837 - DNA, 110 bp, synthetic construct
  source 1..110: mol_type = other DNA
taaatataccaggagttatccaaatagcactacccatacttcagggtatacttgctaatcagatctttatcacaaagaatacagaatggcgcaaatactatgtgagcccc

SEQ ID NO: 5838 - DNA, 110 bp, synthetic construct
  source 1..110: mol_type = other DNA
gtttaacacacaattctatactacttacggaagttttcctcttatagaatatagatgaagatactgagaaccagaaaagtcaataacttttttcaaggtcatccacttgc

SEQ ID NO: 5839 - DNA, 110 bp, synthetic construct
  source 1..110: mol_type = other DNA
tgaagatactgagaaccagaaaagtcaataacttttttcaaggtcatccacttgcaaattatcagagaccagctattgacaggagctattgacagggcctttagtcattc

SEQ ID NO: 5840 - DNA, 110 bp, synthetic construct
  source 1..110: mol_type = other DNA
gagatcctaagcagaggacattaattgagtagacaggggattttaaagaagccagaagtgacttagatggtcagggatgcagctaaaggaacagagagtataaattgaaa

SEQ ID NO: 5841 - DNA, 110 bp, synthetic construct
  source 1..110: mol_type = other DNA
tgagatctctacttggatatgctgcatatatctcaaacttaacatggtcaaaaatgaattcctgatgttctcccctaaaccagttcttccagcatcttccccatctcagc

SEQ ID NO: 5842 - DNA, 110 bp, synthetic construct
  source 1..110: mol_type = other DNA
aatgctaaacacattaacactgaagctttcctctagatgtgaggcttggatgacatggctcatggaaagtggacagtaatccatgcatttttttattctagatatgatta

SEQ ID NO: 5843 - DNA, 110 bp, synthetic construct
  source 1..110: mol_type = other DNA
tggctcatggaaagtggacagtaatccatgcatttttttattctagatatgattaacattgggataggaaatatttgccaggcccaggggtcaagttcaaaatctgaacc

SEQ ID NO: 5844 - DNA, 110 bp, synthetic construct
  source 1..110: mol_type = other DNA
ccatgttgccgcaaatggtattatttaattttttatgactgagtagtagtcccttgtatatatgtaccatatctttatccgttcatctgtcaacggacatttaggttgtt

SEQ ID NO: 5845 - DNA, 110 bp, synthetic construct; identical to SEQ ID NO: 5844
  source 1..110: mol_type = other DNA

SEQ ID NO: 5846 - DNA, 110 bp, synthetic construct
  source 1..110: mol_type = other DNA
tatattattcaaatgaatgcgtctttctttattctgtagaggaagccaacctaaaaaaacaccacctctttttttaaacattctgcatgaccatgatgtcttcctttcct

SEQ ID NO: 5847 - DNA, 110 bp, synthetic construct
  source 1..110: mol_type = other DNA
aaaacaccacctctttttttaaacattctgcatgaccatgatgtcttcctttcctcttctcttccagaacatgcttcagtcttgtttagtccttctcctccctaaggact

SEQ ID NO: 5848 - DNA, 110 bp, synthetic construct; identical to SEQ ID NO: 5846
  source 1..110: mol_type = other DNA

SEQ ID NO: 5849 - DNA, 110 bp, synthetic construct; identical to SEQ ID NO: 5847
  source 1..110: mol_type = other DNA

SEQ ID NO: 5850 - DNA, 110 bp, synthetic construct
  source 1..110: mol_type = other DNA
agtgaaccaagtcagacaaagaaagattctgtatgttctcacttctatgggaactctaaaagaagctaacctcattgaaacagtagaatgatggctactggggggatagg

SEQ ID NO: 5851 - DNA, 110 bp, synthetic construct
  source 1..110: mol_type = other DNA
acaggaacccattgtaggctcagtggggaaaagtatcatgattgattcttgatgtctgtcacaggcccccaggccaggtgctttccagcctcagcttagttctctgccgc

SEQ ID NO: 5852 - DNA, 110 bp, synthetic construct
  source 1..110: mol_type = other DNA
ctgtcacaggcccccaggccaggtgctttccagcctcagcttagttctctgccgccccctcctgcatttttacagatgggaaaattgatgctaggagattgaaaagaatt

SEQ ID NO: 5853 - DNA, 110 bp, synthetic construct
  source 1..110: mol_type = other DNA
aagcaaaggcagaggcaggttaagtaacctgtgtaagctcatacaactaataggagggtgtatagaattccaatccatgtctacttgaccccatagtgcagactgcagac

SEQ ID NO: 5854 - DNA, 110 bp, synthetic construct
  source 1..110: mol_type = other DNA
tcttgccttttgtagggagtccaacatcctttacatggcctctcataggttccatgggttgatatcattttggaccattcttcctctcccagcttaatgtcaaaggtaca

SEQ ID NO: 5855 - DNA, 110 bp, synthetic construct
  source 1..110: mol_type = other DNA
tcttattacaggatgagtacagtgaagttgaccactgagattttagaaaatgctttcattgatgatgtagctgtccaacagccgcttttgaaacttgcttagccttagaa

SEQ ID NO: 5856 - DNA, 110 bp, synthetic construct
  source 1..110: mol_type = other DNA
tcattgatgatgtagctgtccaacagccgcttttgaaacttgcttagccttagaacctgggccatgaaaggagcaggcagaaagaaaaggagtagcttaaatcttggagg

SEQ ID NO: 5857 - DNA, 110 bp, synthetic construct
  source 1..110: mol_type = other DNA
tttaccagagagcagtataaagagtcaggggaatcctgtggctttctctgggggtaggagaatgtggaagtgttagcgactagcttcctggaggaactgaacctacttta

SEQ ID NO: 5858 - DNA, 110 bp, synthetic construct
  source 1..110: mol_type = other DNA
ttggcaagcaagaccctattatatctgcctagatttcctcccaggaactgacaatgaaactcttcccattataccagggtagggccagaacccactctgtcctgtcgtta

SEQ ID NO: 5859 - DNA, 110 bp, synthetic construct
  source 1..110: mol_type = other DNA
tcagggctccctctagcacaaactttataattaaatatgcatgcatacttaataatcattgcccattgactcatttaaacaatcctagagtcacaatcctatacccattt

SEQ ID NO: 5860 - DNA, 110 bp, synthetic construct
  source 1..110: mol_type = other DNA
ctcgctcagtgggttaaggatttggacattgccatgagctatggagtaggttgcagatgcagctggggctgtggtgtaggctggtagctgcagctccgatttaactccta

SEQ ID NO: 5861 - DNA, 110 bp, synthetic construct; identical to SEQ ID NO: 5860
  source 1..110: mol_type = other DNA

SEQ ID NO: 5862 - DNA, 110 bp, synthetic construct
  source 1..110: mol_type = other DNA
aggatactcaagtttgcgtctgttaataaacatctgtttgtactgcttttcttctttctttaaaggcattactttttattagtctgaagacaaatggtgccggctcaacc

SEQ ID NO: 5863 - DNA, 110 bp, synthetic construct
  source 1..110: mol_type = other DNA
catgaaaccgagcaggaaccgtggcttagggacctccaaccggtcatcctacccctccctggatttccaacacagagctgcttcctggttggttcgcctaattttctacc

SEQ ID NO: 5864 - DNA, 110 bp, synthetic construct
  source 1..110: mol_type = other DNA
catctccagttatcttaattgcatatttgggaaacccgccctgtgcctgtctcatatggcatgccatttggtgtttatgaccatcatattggagttaacagcatgtggga

SEQ ID NO: 5865 - DNA, 110 bp, synthetic construct
  source 1..110: mol_type = other DNA
atggcatgccatttggtgtttatgaccatcatattggagttaacagcatgtgggagctcacccaccctgaataccaagccgatccgatctctctcccagaattgacaaga

SEQ ID NO: 5866 - DNA, 110 bp, synthetic construct
  source 1..110: mol_type = other DNA
gatgctcccttccctctgtgtgttgcttgtgaacttttgaaagtgagggatttgtctagctcttccacccagttcctgtgctatagatgatagcaaagaagacacatact

SEQ ID NO: 5867 - DNA, 110 bp, synthetic construct
  source 1..110: mol_type = other DNA
ctagctcttccacccagttcctgtgctatagatgatagcaaagaagacacatactcaacaggggaagccaaagagcataatggggccatgatttcaagccccggtcttga

SEQ ID NO: 5868 - DNA, 110 bp, synthetic construct
  source 1..110: mol_type = other DNA
aagaggaattcacagaatgtgaaagctagagcgccttcacttcctgcccctggaagggtccagctagcaaactggggtgatcgcccaaagatgataaagagaaagaattg

SEQ ID NO: 5869 - DNA, 110 bp, synthetic construct
  source 1..110: mol_type = other DNA
gggtccagctagcaaactggggtgatcgcccaaagatgataaagagaaagaattgcactgggcagaccttgagaacagaggagatctattttctcttccaaccctgaaat

SEQ ID NO: 5870 - DNA, 110 bp, synthetic construct; identical to SEQ ID NO: 5868
  source 1..110: mol_type = other DNA

SEQ ID NO: 5871 - DNA, 110 bp, synthetic construct; identical to SEQ ID NO: 5869
  source 1..110: mol_type = other DNA

SEQ ID NO: 5872 - DNA, 110 bp, synthetic construct
  source 1..110: mol_type = other DNA
ccccaaagtgagagaggccgggggcccgggagatgtcactgaatattccgccagccatcctaactccagtttgtttccttctatagacttggcacgaggccatgcatgca

SEQ ID NO: 5873 - DNA, 110 bp, synthetic construct
  source 1..110: mol_type = other DNA
catcctaactccagtttgtttccttctatagacttggcacgaggccatgcatgcagtagtaccgtgaggctctctacctgaattctccaagtccttgtaagcttcggccc

SEQ ID NO: 5874 - DNA, 110 bp, synthetic construct
  source 1..110: mol_type = other DNA
tgaaaactgccaagatgacacaaacctgaggacaaataggaggtaggatggaaacccaggcaatcaagctgcagagcctgccttggtccacgccctgcaacttaaccacc

SEQ ID NO: 5875 - DNA, 110 bp, synthetic construct
  source 1..110: mol_type = other DNA
ccaggcaatcaagctgcagagcctgccttggtccacgccctgcaacttaaccacctcctttctctctcattgcatggcaggctcttaagaaatactttcccacaaatgaa

SEQ ID NO: 5876 - DNA, 110 bp, synthetic construct
  source 1..110: mol_type = other DNA
ctgttctttcacttctctccaagcattcctcacactgcagccagagccatttctaaaggtacatcagactgttgcaggaaagaggaccccttccagggctcagctcttgt

SEQ ID NO: 5877 - DNA, 110 bp, synthetic construct
  source 1..110: mol_type = other DNA
aaggtacatcagactgttgcaggaaagaggaccccttccagggctcagctcttgtctgactcttggaaaggaatcgtctgaagtgacaaatgtgctgacaaagccagaga

SEQ ID NO: 5878 - DNA, 110 bp, synthetic construct
  source 1..110: mol_type = other DNA
gggccggctgtaccgagatgtgggacactgttccctgcccaaggcggtgcctcgtggcagaattccaccttctcctgactgcccccaacccatctccttggagctcatta

SEQ ID NO: 5879 - DNA, 110 bp, synthetic construct
  source 1..110: mol_type = other DNA
ggcagaattccaccttctcctgactgcccccaacccatctccttggagctcattattcctcctcaattgtctgtgatgactgaggccacgttgctctcacagctggagag

SEQ ID NO: 5880 - DNA, 110 bp, synthetic construct
  source 1..110: mol_type = other DNA
cctaacatgccgtgatgctccagtttcagcaccagctactctgtgtgacctcatgatgtgcatccgtctccttatcaaaccagcagaacttcagatcaggaaaaagtcca

SEQ ID NO: 5881 - DNA, 110 bp, synthetic construct
  source 1..110: mol_type = other DNA
cgaggtccctgccactgccaatctcatgccctttctcctttaccaaatggcactgctctagaatgtatttactttactatagccagtgggctcaggattttcagttctga

SEQ ID NO: 5882 - DNA, 110 bp, synthetic construct
  source 1..110: mol_type = other DNA
gtgacaacaccggctcctttttttcccattcaatttatttaaactgaaaaaaaaccccagctcacccatttttcccctttctcctactccctatttctggcaactaccaa

SEQ ID NO: 5883 - DNA, 110 bp, synthetic construct
  source 1..110: mol_type = other DNA
atttataagtttaatttgccattgtttgcatcaaagatgatctataggactcaggtctgaagtcaaaagaagttagattccccaccgtgtgcaatggaacatggtatcct

SEQ ID NO: 5884 - DNA, 110 bp, synthetic construct
  source 1..110: mol_type = other DNA
gctcagccgtgactgacagcactggtcacatactccctgctcaataaattcttgttgacttccgtctagttcattctgcaaatgtcatttaatttgaccttagctgggag

SEQ ID NO: 5885 - DNA, 110 bp, synthetic construct
  source 1..110: mol_type = other DNA
tgacttccgtctagttcattctgcaaatgtcatttaatttgaccttagctgggagatgattttcaaatgtaaaatacgaataactcagccctggagtcagtagcatctgc

SEQ ID NO: 5886 - DNA, 110 bp, synthetic construct
  source 1..110: mol_type = other DNA
ggacaatggacttcacttggaaaaacaccagcttgcactctgtctgaaagagccctggattggtccagccaaggtttgggatctggcccttactctgccttagatttact

SEQ ID NO: 5887 - DNA, 110 bp, synthetic construct
  source 1..110: mol_type = other DNA
acagcccttgtcagaagcatatgctgactccccactatcaactcaatgaagtttaagctcccaagtcagcacttaaggctttgtgatctggccacactgtttctgaatga

SEQ ID NO: 5888 - DNA, 110 bp, synthetic construct
  source 1..110: mol_type = other DNA
ctttaacacatcaatgctgatggagccctgctaagtgcctaacggtattcttactccttgtaattctctcatccaccacttgggggtttgccccacggtgactccccttt

SEQ ID NO: 5889 - DNA, 110 bp, synthetic construct
  source 1..110: mol_type = other DNA
caaggtgatttaggataagtttcctggaagaggtggtcttgaagctgaggcttgaactctaggtgggatttgaaaatgtggagatggaaggctttcttgatggaagaagc

SEQ ID NO: 5890 - DNA, 110 bp, synthetic construct
  source 1..110: mol_type = other DNA
taatggtctcttttctcctcatcagtttttctaggttattcttctttccttatacatacacacctgcacccacacatacacacacacacacacacacacacacacaagaa

SEQ ID NO: 5891 - DNA, 110 bp, synthetic construct
  source 1..110: mol_type = other DNA
atacacacctgcacccacacatacacacacacacacacacacacacacacaagaattgaagctgatatcatcagtccatgccacctctacccctcctattcctgccatcc

SEQ ID NO: 5892 - DNA, 110 bp, synthetic construct
  source 1..110: mol_type = other DNA
ttagcacttctgtctgtccagaaaggcagctggaagatgcagataaaagaaggaccactcatttcctccccctaccacctcctccatcacacacaactttgaatgcctcc

SEQ ID NO: 5893 - DNA, 110 bp, synthetic construct
  source 1..110: mol_type = other DNA
ggtccctcccttgggggaggttatggccattcaccgagataatacatgggaagcatttggcctgaaatatgataagagcttcaaaaatagtaactgctggtgttatttcc

SEQ ID NO: 5894 - DNA, 110 bp, synthetic construct
  source 1..110: mol_type = other DNA
aggaagaacatggggcacaagcacacgggttctgccagagcaaccagggcaaggtttgaggagctgacaacatggtagcttagtcttacatatgtcaagatgtggtctgt

SEQ ID NO: 5895 - DNA, 110 bp, synthetic construct
  source 1..110: mol_type = other DNA
gcaaatatctgttgccccttgcattactagcattactatagcagaagccagctttgtggctgcaaaccattgcaccccatgcctaagagtgaatttttgaggaaatctag

SEQ ID NO: 5896 - DNA, 110 bp, synthetic construct
  source 1..110: mol_type = other DNA
tcagtctcagcacccatcatcctatattgttgtcttttctttctctctgattagttaggattagctcatgaacaacaagacagaggcttagtaaaggtagacatgtatgt

SEQ ID NO: 5897 - DNA, 110 bp, synthetic construct
  source 1..110: mol_type = other DNA
taggattagctcatgaacaacaagacagaggcttagtaaaggtagacatgtatgtctaccccacaagaacccaagcccagaagtacattttccaaggtgggtatgttgat

SEQ ID NO: 5898 - DNA, 110 bp, synthetic construct
  source 1..110: mol_type = other DNA
tgctctgtcatcctctgtctccctctcatgctaaagccacaccttcctgctgtgctcataccgtaacccttaccattcattgccaataaccattcttgctccataacctc

SEQ ID NO: 5899 - DNA, 110 bp, synthetic construct
  source 1..110: mol_type = other DNA
tcataccgtaacccttaccattcattgccaataaccattcttgctccataacctcagtgtcaagaattccattctctgggctccgcccatgctgaaatcaatgactcttc

SEQ ID NO: 5900 - DNA, 110 bp, synthetic construct
  source 1..110: mol_type = other DNA
gagtgcacaagaagcagagacaaatcacatgagtgtctttaaagctggtgctccgacatgattcccctcacattccaacggcagaagaaagtcacatggccaaacacaaa

SEQ ID NO: 5901 - DNA, 110 bp, synthetic construct
  source 1..110: mol_type = other DNA
cctggcatttacccagttaggcgtcaccccataggtgtttatagatgacaaagcctggcaaccgtttggagctcctaggaaggatgaagaatcctgttttgttggcttca

SEQ ID NO: 5902 - DNA, 110 bp, synthetic construct
  source 1..110: mol_type = other DNA
cttcactctcagcactgatcatctcacacatgacacatgtgctcatcagccaccgtcttccttgccctgcgagaatgtgagcttggtgtcttttgttcattctccccagt

SEQ ID NO: 5903 - DNA, 110 bp, synthetic construct
  source 1..110: mol_type = other DNA
gctctccactggcccacagcaggcactccacacaggcagaaggaacagcaaactggtgggacgcattccagactggaagatcagcttggcaccgagcggggcagatgttc

SEQ ID NO: 5904 - DNA, 110 bp, synthetic construct
  source 1..110: mol_type = other DNA
gtgggacgcattccagactggaagatcagcttggcaccgagcggggcagatgttcctaccttgttactctgctccagatgctcatcactcggcaagttattctcgtcaac

SEQ ID NO: 5905 - DNA, 110 bp, synthetic construct
  source 1..110: mol_type = other DNA
tttttccgacaagatagggacaccacagtctgcagaggccaggtagctgcttctcagtccaacagcttccaagcaatggagccaggattcaaatctaatctgacacccaa

SEQ ID NO: 5906 - DNA, 110 bp, synthetic construct
  source 1..110: mol_type = other DNA
tcatcctattatctttatgctccctgtaatcaattcaaataaaatgaaagcagcgctatctattcatgccaactccgagaacaaaaactaatcgagtttctgcttggaat

SEQ ID NO: 5907 - DNA, 110 bp, synthetic construct
  source 1..110: mol_type = other DNA
agctcaagcatcgtcctgtccccacacccccacacacacagccaccaaccccactccctcctggccatcgccagcttggttgatcttttgaagcacgattccaggcattt

SEQ ID NO: 5908 - DNA, 110 bp, synthetic construct
  source 1..110: mol_type = other DNA
ccctcctggccatcgccagcttggttgatcttttgaagcacgattccaggcattttcctcctcaaattaaaacccatcactgcctccccttcacctttgggacaaaactc

SEQ ID NO: 5909 - DNA, 110 bp, synthetic construct
  source 1..110: mol_type = other DNA
aatacgtaaaacagcgacagctgtaggcaaagaagagtaattgaattaatcaattgtctggacattttacagattaaaagaatcttgatgtcttgattgggattaaagac

SEQ ID NO: 5910 - DNA, 110 bp, synthetic construct
  source 1..110: mol_type = other DNA
ttgacactaaagaaagctacttcactgctggtcaaggaaatgagaaccagcaatgcagactgtttcctggtaccatgaacaatctagggaacaatttaaatcaactcagc

SEQ ID NO: 5911 - DNA, 110 bp, synthetic construct
  source 1..110: mol_type = other DNA
cagactgtttcctggtaccatgaacaatctagggaacaatttaaatcaactcagcatgatgaaacatttttgtcattgtcaaggttgaaatttgtctttcctctgtacgc

SEQ ID NO: 5912 - DNA, 110 bp, synthetic construct
  source 1..110: mol_type = other DNA
ggctcttcaggctccagattccaggttaggagaggtaggagtcagatttaagtttagtaatggttacccgaggcactaaaatggataaacagaagctttgcctagggtag

SEQ ID NO: 5913 - DNA, 110 bp, synthetic construct
  source 1..110: mol_type = other DNA
agtaatggttacccgaggcactaaaatggataaacagaagctttgcctagggtagccaaggttatggcctcaaaatatggctaaatataaagtccccaaaatggaagaca

SEQ ID NO: 5914 - DNA, 110 bp, synthetic construct
  source 1..110: mol_type = other DNA
gtttccgctgtgccacgacaggaactccggggagggaaatttgagctgagtcttggaaggaggaacagaataaggagggggagggctttgaggtggtggaactgagctct

SEQ ID NO: 5915 - DNA, 110 bp, synthetic construct; identical to SEQ ID NO: 5914
  source 1..110: mol_type = other DNA

SEQ ID NO: 5916 - DNA, 110 bp, synthetic construct
  source 1..110: mol_type = other DNA
ttggccacctgcaggccagtttggctaacaggtgtattttatttggtctgcctagtttaaaacaattttgaattgtttttcaccatttctttaaggtgctatttacatac

SEQ ID NO: 5917 - DNA, 110 bp, synthetic construct
  source 1..110: mol_type = other DNA
ccagtttggctaacaggtgtattttatttggtctgcctagtttaaaacaattttgaattgtttttcaccatttctttaaggtgctatttacatacaattcaccagtttaa

SEQ ID NO: 5918 - DNA, 110 bp, synthetic construct
  source 1..110: mol_type = other DNA
acttttctttctatctctggccttccttgggtcattttgtatgctgatgtgcactgaaaacggtttttgggtggtttcctttaccccggtgtcacaactataggacatag

SEQ ID NO: 5919 - DNA, 110 bp, synthetic construct
  source 1..110: mol_type = other DNA
gaaaacggtttttgggtggtttcctttaccccggtgtcacaactataggacatagaggacagggacaaaacacagctctctttgtcaggtactgtcttaagttctcaacg

SEQ ID NO: 5920 - DNA, 110 bp, synthetic construct
  source 1..110: mol_type = other DNA
tctcaggggatcagggtttggcctctagaaagctccgaggacaatttggggccagtctcctgtaacccagaggacctcaagctctgtcctttttctgcctgtctcgttcc

SEQ ID NO: 5921 - DNA, 110 bp, synthetic construct
  source 1..110: mol_type = other DNA
gcgctttgcaactcagccttgtgtccacttaccctggtgctgcaagtttattgaacacacataacctgcaggatacagtgatatgccacttatgccagccccctcagaag

SEQ ID NO: 5922 - DNA, 110 bp, synthetic construct
  source 1..110: mol_type = other DNA
cacacataacctgcaggatacagtgatatgccacttatgccagccccctcagaagacttggagccatgacttgaacccagacagtgtgacacctgcttctcatccatata

SEQ ID NO: 5923 - DNA, 110 bp, synthetic construct
  source 1..110: mol_type = other DNA
tcaacaaacttatccaatgtcacatggataggaagcggtggagccaggattcaacctcaggcagtgtggctccagagtccgtgaaagcttcacagaatctgccttgcaca

SEQ ID NO: 5924 - DNA, 110 bp, synthetic construct
  source 1..110: mol_type = other DNA
tattgcctattgtagaagacaagggctttaggatgcacttagttcaacctatcgttgtacagctaaggggtgaaaacaatgatagtagcagtaattttcacttgcatagt

SEQ ID NO: 5925 - DNA, 110 bp, synthetic construct
  source 1..110: mol_type = other DNA
ctgccctcatccttttgtgattccctcaagtaatttagtaatcacctccagctctgccttccctttgagctagtcagctattggtcctacatcatcccttacctggttta

SEQ ID NO: 5926 - DNA, 110 bp, synthetic construct
  source 1..110: mol_type = other DNA
ggctaagtggatgtggactgagagaatacccaaaggaaaaatgtgttttgcaacagcttcttgattttctgtatatttttgaaagctacttatcagattgataatagatc

SEQ ID NO: 5927 - DNA, 110 bp, synthetic construct
  source 1..110: mol_type = other DNA
gcttcttgattttctgtatatttttgaaagctacttatcagattgataatagatcccacctgaacatcattacagactttgagatgcatagcagtgaagtgaggcaatat

SEQ ID NO: 5928 - DNA, 110 bp, synthetic construct
  source 1..110: mol_type = other DNA
gaaggcatcagactaaagactgctctgcagagtgacggggagtgtagtggaagatgagattaaagtccatgccaggtgtcataggccattttaagggggttgaattttat

SEQ ID NO: 5929 - DNA, 110 bp, synthetic construct
  source 1..110: mol_type = other DNA
gagattaaagtccatgccaggtgtcataggccattttaagggggttgaattttatactgaaatgtcatgggaaacctttgaagtactttaggcggtggtctggctgtaaa

SEQ ID NO: 5930 - DNA, 110 bp, synthetic construct; identical to SEQ ID NO: 5928
  source 1..110: mol_type = other DNA

SEQ ID NO: 5931 - DNA, 110 bp, synthetic construct; identical to SEQ ID NO: 5929
  source 1..110: mol_type = other DNA

SEQ ID NO: 5932 - DNA, 110 bp, synthetic construct
  source 1..110: mol_type = other DNA
gtggtgtgacctatggtcagagctgtagtttaggaagaataatcgggcagagacctagaataggtgagctctgcgtggggctatttgaatgcattcaggtgaagggtggc

SEQ ID NO: 5933 - DNA, 110 bp, synthetic construct
  source 1..110: mol_type = other DNA
tagaataggtgagctctgcgtggggctatttgaatgcattcaggtgaagggtggccaacacccatgcaggtcacatggccatgtaattgcatctcatttctgccagtgag

SEQ ID NO: 5934 - DNA, 110 bp, synthetic construct
  source 1..110: mol_type = other DNA
tggagctgcacctgccagcctacgccacagccatgctagatccacaccagatctgagctgcatctgtaacctatgccacagcttttagcaatgccagatccttaacccac

SEQ ID NO: 5935 - DNA, 110 bp, synthetic construct; identical to SEQ ID NO: 5934
  source 1..110: mol_type = other DNA

SEQ ID NO: 5936 - DNA, 110 bp, synthetic construct
  source 1..110: mol_type = other DNA
tgtactgagggtctgctctgcctgggatgctggcagcagagggtgagatatccggccttgccctcagggagctcatagtttagtgagggagacaggaaacaaaccatcat

SEQ ID NO: 5937 - DNA, 110 bp, synthetic construct
  source 1..110: mol_type = other DNA
ccactgttctctgggaatgcggcccttaggtttctctccgtgatgtgtgttaatcacagcgggttggatgaaaatgagggctgcggtcagtgagaggaggcctccgggag

SEQ ID NO: 5938 - DNA, 110 bp, synthetic construct
  source 1..110: mol_type = other DNA
acagcgggttggatgaaaatgagggctgcggtcagtgagaggaggcctccgggagttagagaaaggagctcagtgtggcctggggcaggcggggaaggctctgcaggaga

SEQ ID NO: 5939 - DNA, 110 bp, synthetic construct
  source 1..110: mol_type = other DNA
gccacagcaactccagatcccagccgcatcttcgaccacactatagctcacggtaatgccgggggttcttaacccactgagtgaggccaaggactgaacttgcatcctca

SEQ ID NO: 5940 - DNA, 110 bp, synthetic construct; identical to SEQ ID NO: 5939
  source 1..110: mol_type = other DNA

SEQ ID NO: 5941 - DNA, 110 bp, synthetic construct
  source 1..110: mol_type = other DNA
caggtaccactttattatgacaggaaaatttattgtccaagtgataatagctagtgattatcaagtacttaatatgtgctagtcatggtgattaagtgctttccattact

SEQ ID NO: 5942 - DNA, 110 bp, synthetic construct
  source 1..110: mol_type = other DNA
ccagcatgcaccagtctctcaggcctcccagtcatcccggacagcccccacctcctcactcccttccacatccttccaagtcaggttaatcacaccgccttaccaatctt

SEQ ID NO: 5943 - DNA, 110 bp, synthetic construct
  source 1..110: mol_type = other DNA
cccagctgaaccagaccaggcctcaggctaaacgctttaccagaggtttctcagataagtctcacaacgtcctgtgaagtcattctagtgttatctccactttacagaca

SEQ ID NO: 5944 - DNA, 110 bp, synthetic construct
  source 1..110: mol_type = other DNA
acacatcttttacgacgacaaaaagtttaaataccctaaagcagagacgattcacccccatttttcagatggggaagctgagacgcaaagagattgattgacttgtccgt

SEQ ID NO: 5945 - DNA, 110 bp, synthetic construct
  source 1..110: mol_type = other DNA
gtgaaatttggattttaacaggagctgggcagcactgtggaatgcagggcacaaggagaccagccaaaagaggctttagggctgaagagagggtggacagacagggattt

SEQ ID NO: 5946 - DNA, 110 bp, synthetic construct
  source 1..110: mol_type = other DNA
agtcacaacctgagccccagctgcagcaatgcaggatccttaatgcactgtgtctggccagggattgaacctgcatccctgcactcctaagatgccgccaatccaactgc

SEQ ID NO: 5947 - DNA, 110 bp, synthetic construct
  source 1..110: mol_type = other DNA
ggccagggattgaacctgcatccctgcactcctaagatgccgccaatccaactgcaccacagcaggaactcctgagccaaggatcttaggggatccagttgctactcccc

SEQ ID NO: 5948 - DNA, 110 bp, synthetic construct
  source 1..110: mol_type = other DNA
agtgccacccccagaggcagcgctatctgctgagggagtggccagcttcaagggttgggagcactgaggctgggggccggggcagcccttcatggggatgttatggaaga

SEQ ID NO: 5949 - DNA, 110 bp, synthetic construct
  source 1..110: mol_type = other DNA
tgggagcactgaggctgggggccggggcagcccttcatggggatgttatggaagaagctcctgggtcaccagtggttcccagaggagacctcggcagctgggggtcaccc

SEQ ID NO: 5950 - DNA, 110 bp, synthetic construct
  source 1..110: mol_type = other DNA
taaccagctggagctgagcagctggccactacctacccttgactctgttccctgcctggcccctgcactcctctcaagtttaaagccttaggaggagaaggtccaaactg

SEQ ID NO: 5951 - DNA, 110 bp, synthetic construct
  source 1..110: mol_type = other DNA
gtaaggaaactgagtctcagagaaggacattattccacccagagccctagtaatggtggcagcgttgacatttaagcccatggctgctagctggaccttcagctctttcc

SEQ ID NO: 5952 - DNA, 110 bp, synthetic construct
  source 1..110: mol_type = other DNA
gtggcagcgttgacatttaagcccatggctgctagctggaccttcagctctttcccttggccaccaagaaaccattggctccccaggtaagtgtcagcatgtaggctgac

SEQ ID NO: 5953 - DNA, 110 bp, synthetic construct
  source 1..110: mol_type = other DNA
aaccacttagccatgacaggaactcctccagtttcagtcttaatggctgtggattagctcatgatctacaggtaaattgggaaagtcctctcagaatcttagtttccttg

SEQ ID NO: 5954 - DNA, 110 bp, synthetic construct; identical to SEQ ID NO: 5953
  source 1..110: mol_type = other DNA

SEQ ID NO: 5955 - DNA, 110 bp, synthetic construct
  source 1..110: mol_type = other DNA
gaagatgcttggtagtaaatgattcaggggagggaggaaagagagcggggtgaaccggctgagcgggacttaatcaagtgagcaaggccctgacagggctggtggaggca

SEQ ID NO: 5956 - DNA, 110 bp, synthetic construct
  source 1..110: mol_type = other DNA
ggaagagtgacatcagagccggaccttgaaggatcagtaaggtttgttttacaaaagagctcaccataggattcctctaagtcaccgtttccccccagtgcctttcagtt

SEQ ID NO: 5957 - DNA, 110 bp, synthetic construct
  source 1..110: mol_type = other DNA
gcaaagcaccacacagatgctggctgtcactgggctatttaaaagggcttcctaatgaacaggccctaaggatgcttatctagagaggagcagcatcttaagtttcagat

SEQ ID NO: 5958 - DNA, 110 bp, synthetic construct
  source 1..110: mol_type = other DNA
tgaacaggccctaaggatgcttatctagagaggagcagcatcttaagtttcagatgctatcatttttccaacaaacaaattgagctgttgagcaaggggcacaagaacag

SEQ ID NO: 5959 - DNA, 110 bp, synthetic construct
  source 1..110: mol_type = other DNA
tcaggtaatatccatttattagctcataattctgtaggtcagaagtccgccatggcttagctgggtcctctgttcaggtcatcacaggctgatatcaagatgtggccaag

SEQ ID NO: 5960 - DNA, 110 bp, synthetic construct
  source 1..110: mol_type = other DNA
cttagctgggtcctctgttcaggtcatcacaggctgatatcaagatgtggccaaggttgtgttcttgtccggttcaggactatcctctatgctcactggaagaattcatc

SEQ ID NO: 5961 - DNA, 110 bp, synthetic construct
  source 1..110: mol_type = other DNA
gagcaggcgtgccacaggccgtgtaccctcccccttggagaggcccagccgggagcaggggctgcccaggtatgtctccacttctcaagcctcagcgggaacaggccctg

SEQ ID NO: 5962 - DNA, 110 bp, synthetic construct
  source 1..110: mol_type = other DNA
agtttgacgatggaggaacttgagggctagagaggataggtcatctacccaaggtcacacgatgagttgccatattttgagcatcaggcacagagcccagtactttatag

SEQ ID NO: 5963 - DNA, 110 bp, synthetic construct
  source 1..110: mol_type = other DNA
cacacgatgagttgccatattttgagcatcaggcacagagcccagtactttatagctactccttccaatcgtcactgccgtcacagctatgacagtcttcactgcttttc

SEQ ID NO: 5964 - DNA, 110 bp, synthetic construct
  source 1..110: mol_type = other DNA
accagaatcacctgggctgggtatcataccttcagcgccctggaccccgcccctgaactccccatcagctctccagggatggggctgaggaatctgcatcttcagaagct

SEQ ID NO: 5965 - DNA, 110 bp, synthetic construct
  source 1..110: mol_type = other DNA
tttggaaaaaaaaaaaagtagaccacagtcactccggggggagagttttagatggctggctggccctactcctgcattttctgattcagtaggtcttcgtgggagtgtgt

SEQ ID NO: 5966 - DNA, 110 bp, synthetic construct
  source 1..110: mol_type = other DNA
ttcagaggatggggaaggaaggcttctttaggaagtatgaataaactgagttgtgtgaaggatgagaaagagttcaggaggccaagaaggggacagggctgtccagcttg

SEQ ID NO: 5967 - DNA, 110 bp, synthetic construct
  source 1..110: mol_type = other DNA
atttctggaccaaataccaagttcagccagtttcctggggaggactccctctagtgaccatttagactatcatggtgaatctctaggaaagtaatttctacttgactcaa

SEQ ID NO: 5968 - DNA, 110 bp, synthetic construct
  source 1..110: mol_type = other DNA
gaccatttagactatcatggtgaatctctaggaaagtaatttctacttgactcaacacccttactcaggttcccaacttcctaagtccctcttagtcctctgggccaagg

SEQ ID NO: 5969 - DNA, 110 bp, synthetic construct
  source 1..110: mol_type = other DNA
ttctgacaggtgtgaagtgataactcgtgaatttgatttctatttctctgatgacagtaatgttgaacatcttttcatgggaaagctggtcatctgtgtgccttctttgg

SEQ ID NO: 5970 - DNA, 110 bp, synthetic construct
  source 1..110: mol_type = other DNA
agtaatgttgaacatcttttcatgggaaagctggtcatctgtgtgccttctttggaaaaatgtccatttgggattctgccatttttgattgagttgtatgaactatttat

SEQ ID NO: 5971 - DNA, 110 bp, synthetic construct
  source 1..110: mol_type = other DNA
agaaatgtgagagaaaagataggaatcaaagattcctatattttgattagaacagatggagctgtcactaactacagcagtcatgaaataaatggtatctgcctgtgtga

SEQ ID NO: 5972 - DNA, 110 bp, synthetic construct
  source 1..110: mol_type = other DNA
aggtcactgaattctaatagacaccctgatctttcaggatctctcagctcttaaaccccatctcaagtctcaggtgtcttcctaatgatgactatccattagtgagatga

SEQ ID NO: 5973 - DNA, 110 bp, synthetic construct
  source 1..110: mol_type = other DNA
tagacttgtacatgattgcctcactgaatatttcaatagtcttaggaggaaggtgctattaaaacttcactattgggagttctcattttagctcagtggtttaagatccc

SEQ ID NO: 5974 - DNA, 110 bp, synthetic construct
  source 1..110: mol_type = other DNA
ctattaaaacttcactattgggagttctcattttagctcagtggtttaagatcccaaatagtatacatgaggatgccagctcaattcctgacctcactgagtgggttaag

SEQ ID NO: 5975 - DNA, 110 bp, synthetic construct
  source 1..110: mol_type = other DNA
ctcatggttcctggatggatttggtaaccactgaggcacaaagggaactccaactcacaactttaaaaacatacaaacaagaacacttctacagttatggtggggatata

SEQ ID NO: 5976 - DNA, 110 bp, synthetic construct
  source 1..110: mol_type = other DNA
ccatctcctctctaggggctgatctccatgcttttgcacaggcagcccatggctcaattccctgtcctcactaatgtctttggatgctaccttcccaatgagctctacat

SEQ ID NO: 5977 - DNA, 110 bp, synthetic construct
  source 1..110: mol_type = other DNA
cccatggctcaattccctgtcctcactaatgtctttggatgctaccttcccaatgagctctacatagatcacacggtgtgaaattatgaaccccactacagcattcttgc

SEQ ID NO: 5978 - DNA, 110 bp, synthetic construct
  source 1..110: mol_type = other DNA
tcaggtatgagaatacatgcaaagtgagggacatgtgattttcccagcgagctaactagagagccaagatattgcagatggtgtagaaccaaggacgtctatcagaattc

SEQ ID NO: 5979 - DNA, 110 bp, synthetic construct
  source 1..110: mol_type = other DNA
catgcaaagtgagggacatgtgattttcccagcgagctaactagagagccaagatattgcagatggtgtagaaccaaggacgtctatcagaattcacagtcatctgatta

SEQ ID NO: 5980 - DNA, 110 bp, synthetic construct
  source 1..110: mol_type = other DNA
catagaacaggcatacaatgaggaaatgtgcaggcttctgtagtctgtcacatggattatttgcatctctctatattctagtgtgtgtcattcagtgtctttgtcagtta

SEQ ID NO: 5981 - DNA, 110 bp, synthetic construct
  source 1..110: mol_type = other DNA
attatttgcatctctctatattctagtgtgtgtcattcagtgtctttgtcagttacacatacacacatagactcatacaacaccacacacacacaaatataactaatgtc

SEQ ID NO: 5982 - DNA, 110 bp, synthetic construct
  source 1..110: mol_type = other DNA
gttccctgtatcctgcccattttgcgtcactgaacaaaccctcttaacaaaaatgtccaatccaggcttccaaatcaatgtcaacagttccaggcattgttccaagtgtt

SEQ ID NO: 5983 - DNA, 110 bp, synthetic construct
  source 1..110: mol_type = other DNA
ggtccttgccagggtccaccaagccattatgatctgggccttgcctaacatcttcaaccttatcttttgccattcttctcattctccatcgtccagacacactggtcttc

SEQ ID NO: 5984 - DNA, 110 bp, synthetic construct
  source 1..110: mol_type = other DNA
ttgagtaagtatccaaataaagtccatacattgtttttggtctgtattctttacactttaaaaaaaaaaaccccaggagttcccgtcgtagctcagtggttaataaatcc

SEQ ID NO: 5985 - DNA, 110 bp, synthetic construct
  source 1..110: mol_type = other DNA
aataaagtccatacattgtttttggtctgtattctttacactttaaaaaaaaaaaccccaggagttcccgtcgtagctcagtggttaataaatccaactaggaaccatga

SEQ ID NO: 5986 - DNA, 110 bp, synthetic construct
  source 1..110: mol_type = other DNA
gagaccacagacaggaatggaaaggggaataaggagcaaggaaaaataacaaaagatatttcaaaaaacaataactggagaaagaaaatgaagaaaagttatgtgtaaag

SEQ ID NO: 5987 - DNA, 110 bp, synthetic construct; identical to SEQ ID NO: 5986
  source 1..110: mol_type = other DNA

SEQ ID NO: 5988 - DNA, 110 bp, synthetic construct
  source 1..110: mol_type = other DNA
attagaccccttagccagggaacctctttatgctgtgggtgtggccctaaaaggacaaaagacaaaggaagagtaaaatgagggcaagttccctttgtggctcagtggtt

SEQ ID NO: 5989 - DNA, 110 bp, synthetic construct; identical to SEQ ID NO: 5988
  source 1..110: mol_type = other DNA

SEQ ID NO: 5990 - DNA, 110 bp, synthetic construct
  source 1..110: mol_type = other DNA
agatgacggtaaaggttattttaggtagggtgtcttatttcattctttttatttgagtttgtattaatatgctatactgtctgtggttttcaggaaattctaggttggat

SEQ ID NO: 5991 - DNA, 110 bp, synthetic construct; identical to SEQ ID NO: 5990
  source 1..110: mol_type = other DNA

SEQ ID NO: 5992 - DNA, 110 bp, synthetic construct
  source 1..110: mol_type = other DNA
ataccgaatagttgtgatatgagccacagaggaagtcctacacattgctttcaattggaaataaaacccatactttataatcagctttcattttaaaaatgtaaacatca

SEQ ID NO: 5993 - DNA, 110 bp, synthetic construct
  source 1..110: mol_type = other DNA
gatatgagccacagaggaagtcctacacattgctttcaattggaaataaaacccatactttataatcagctttcattttaaaaatgtaaacatcaaatgaaaacatttcc

SEQ ID NO: 5994 - DNA, 110 bp, synthetic construct; identical to SEQ ID NO: 5992
  source 1..110: mol_type = other DNA

SEQ ID NO: 5995 - DNA, 110 bp, synthetic construct; identical to SEQ ID NO: 5993
  source 1..110: mol_type = other DNA

SEQ ID NO: 5996 - DNA, 110 bp, synthetic construct
  source 1..110: mol_type = other DNA
tcagggggtcagattgttgaaagatcttcatgcctgttcactctttctgcaccaagagaaagctctgatatgtggcctatagaatttcagaaccctctttgtatttccaa

SEQ ID NO: 5997 - DNA, 110 bp, synthetic construct
  source 1..110: mol_type = other DNA
aaatcctgattttattacccatggatgactctcgccatatcccactacaagggagttcccgctgtggttcggcaggttataaacaccactagtatccttgaggacatggc

SEQ ID NO: 5998 - DNA, 110 bp, synthetic construct
  source 1..110: mol_type = other DNA
tgactctcgccatatcccactacaagggagttcccgctgtggttcggcaggttataaacaccactagtatccttgaggacatggcttcggtccctggcctcactcagggg

SEQ ID NO: 5999 - DNA, 110 bp, synthetic construct
  source 1..110: mol_type = other DNA
tcaaaaatgatgcaatagggaaacaacctaaatcaattatatagctcatctatatacattaatacaactttaaaggttttatgtcccctatacctaggtgcagaggtatt

SEQ ID NO: 6000 - DNA, 110 bp, synthetic construct
  source 1..110: mol_type = other DNA
tggttaaaaacaggtaatgttttggttagctactgctggggaacaagccaccctaaaacttactggcttaaaacaatgttttattattatctctcatgatcctgaatgtt

SEQ ID NO: 6001 - DNA, 110 bp, synthetic construct
  source 1..110: mol_type = other DNA
aaggcttctgtcaacattcatgcccaagttttttttttttttggggggggggagggcctatacacagtggtggaattgctggagcatatggcaactgtctatttaactat

SEQ ID NO: 6002 - DNA, 110 bp, synthetic construct
  source 1..110: mol_type = other DNA
gcctatacacagtggtggaattgctggagcatatggcaactgtctatttaactatccgagggaatgccaaacttttttcaaagtggttgcagcatttgacatgcccgcca

SEQ ID NO: 6003 - DNA, 110 bp, synthetic construct
  source 1..110: mol_type = other DNA
cctcggctatgcaggtaatggcctaggctgtccctggaggcagatgtaatgcccatcccatcaggggctcagagtgtcaaaccgtgtattcagctctgaccatagcgtag

SEQ ID NO: 6004 - DNA, 110 bp, synthetic construct
  source 1..110: mol_type = other DNA
tcccatcaggggctcagagtgtcaaaccgtgtattcagctctgaccatagcgtagacacccccaggcagcctggcagctctagggtatggctgctcttggccttgctgtg

SEQ ID NO: 6005 - DNA, 110 bp, synthetic construct
  source 1..110: mol_type = other DNA
gtttcaatttgttggtggcttctgaagttctaagcacctggcttccaacgcaatttgttcacaacaacagtgaggggatgaaaactctctcagtgatgggttctcccttc

SEQ ID NO: 6006 - DNA, 110 bp, synthetic construct
  source 1..110: mol_type = other DNA
tctttgagctaacatttatcagggactatgggccagatatggtaaaagcaccttcacatgtgctgctttaagatgactccacgtagcacgagctatgaaagaagaaacta

SEQ ID NO: 6007 - DNA, 110 bp, synthetic construct
  source 1..110: mol_type = other DNA
acatgtgctgctttaagatgactccacgtagcacgagctatgaaagaagaaactatggacagaaaaaaggatgtaattaaagcacacaattctatttttgaaagtgcttt

SEQ ID NO: 6008 - DNA, 110 bp, synthetic construct; identical to SEQ ID NO: 6006
  source 1..110: mol_type = other DNA

SEQ ID NO: 6009 - DNA, 110 bp, synthetic construct; identical to SEQ ID NO: 6007
  source 1..110: mol_type = other DNA

SEQ ID NO: 6010 - DNA, 110 bp, synthetic construct
  source 1..110: mol_type = other DNA
ggaaacaaaaatccacgacccatgtttataataaccataatatgagcaactgctgtttattaaggcccctgtgtgccacttgatgaccagtgtctctaattcctaaagcc

SEQ ID NO: 6011 - DNA, 110 bp, synthetic construct
  source 1..110: mol_type = other DNA
atggcagttttagatgagtttgagaagaaaagctctagataaataacagagcaggaccaccagaacttgtttttaagctgttgtgaattatttcatagaggcagaggctt

SEQ ID NO: 6012 - DNA, 110 bp, synthetic construct
  source 1..110: mol_type = other DNA
tagcctactgcatgcacagtggatgggaaaaagaagataatgagggagttcccgctatggcacaacaggatcagcagtgtctctgaagcactcggacagttttgatcacc

SEQ ID NO: 6013 - DNA, 110 bp, synthetic construct
  source 1..110: mol_type = other DNA
gggaccctcatccgccccttgtaatgtagcatagtctccaccaccccaactctgtcgcatctgggtgagtccaaacctcggtgtgggtgaggttctgtgtatggtgggta

SEQ ID NO: 6014 - DNA, 110 bp, synthetic construct
  source 1..110: mol_type = other DNA
ttatgtttgccctcaaggcatatagaaatttccaggtcagggactgaatctgagctgcatctgcaacctacaccacagctacggcaatactggatccttgacccatgtca

SEQ ID NO: 6015 - DNA, 110 bp, synthetic construct
  source 1..110: mol_type = other DNA
tgcatctgcaacctacaccacagctacggcaatactggatccttgacccatgtcacctgctgggatggaaccagcatctccacagagacaagtcaggtcattagcccact

SEQ ID NO: 6016 - DNA, 110 bp, synthetic construct
  source 1..110: mol_type = other DNA
tgttgggtactgatggctgctgggggagatgggatgggggcagtttgtggcaaggcagctggtggcgtgacctctggaaggtaacatacagattcagatactttctgaca

SEQ ID NO: 6017 - DNA, 110 bp, synthetic construct
  source 1..110: mol_type = other DNA
ccttaagcagataccttcagagtcacacattcaagcctgggggttaaagcctctactattctacctgtcaacagaatctatacctcactgatgactagggactagaatgc

SEQ ID NO: 6018 - DNA, 110 bp, synthetic construct
  source 1..110: mol_type = other DNA
ctattctacctgtcaacagaatctatacctcactgatgactagggactagaatgcaagcagagggcctggtctgtggatggctgcccggatgcattttgacaccaggccc

SEQ ID NO: 6019 - DNA, 110 bp, synthetic construct
  source 1..110: mol_type = other DNA
gttcccttcaccccaccctcacctttgtaaatggcctccttgttaaattttgagtgtttcttgctggagtcctgacttgagacaaaggcacaaacattgaggaagcgaga

SEQ ID NO: 6020 - DNA, 110 bp, synthetic construct
  source 1..110: mol_type = other DNA
gtttcttgctggagtcctgacttgagacaaaggcacaaacattgaggaagcgagagcgtgcacataccacacctcttggcagggctgtgctggctggacctgcgggcata

SEQ ID NO: 6021 - DNA, 110 bp, synthetic construct
  source 1..110: mol_type = other DNA
tttgcttcgaaaatccatttttgcctgtctctcaaggatggttttgaccacaatgcctctgatcatcactgtgaaggagttttgccaataatgtgtgatagaagctggtc

SEQ ID NO: 6022 - DNA, 110 bp, synthetic construct
  source 1..110: mol_type = other DNA
cctctgatcatcactgtgaaggagttttgccaataatgtgtgatagaagctggtcttcttcccacttcccagtgtgtcagtggattcccctgtgcctgactctcagaccc

SEQ ID NO: 6023 - DNA, 110 bp, synthetic construct
  source 1..110: mol_type = other DNA
ttcagattgatccatcttatgcacacgaatattcccatcgcaggtctcaggactccagcctttctccagcagctcttctatcagcctagaagacccaccggggctgggaa

SEQ ID NO: 6024 - DNA, 110 bp, synthetic construct
  source 1..110: mol_type = other DNA
gaggaagcctgttgatttctcccttggaaattaagagggtgccaagctaatccgctcccaccagccatgtcacctggcctccggggaaccatgagggattgggactcagg

SEQ ID NO: 6025 - DNA, 110 bp, synthetic construct
  source 1..110: mol_type = other DNA
ggtgttggtgtggttgggagagagaggcccttgcatgcaagggcctggggtgaggcggagttggggagggcaggctggcaccagctagttagagcttgggatgccttgct

SEQ ID NO: 6026 - DNA, 110 bp, synthetic construct
  source 1..110: mol_type = other DNA
tgcaagggcctggggtgaggcggagttggggagggcaggctggcaccagctagttagagcttgggatgccttgcttgagcacacccaggcccctttctggggagcagtgg

SEQ ID NO: 6027 - DNA, 110 bp, synthetic construct
  source 1..110: mol_type = other DNA
ctccaatgtgcagctccatttaccgctgcatgacaaatgcgcagcacttgtcacaggcacaaagaggtccacgtcggccacgtaatggtcaccacagctgtacccgagtg

SEQ ID NO: 6028 - DNA, 110 bp, synthetic construct
  source 1..110: mol_type = other DNA
gtgtcccagggctcccaggttgcctccgatcccatcgtgttacagcaggaaccactcaacttcctcctttttacaaatagggaaaactgcggcccagaggagtaaagtca

SEQ ID NO: 6029 - DNA, 110 bp, synthetic construct
  source 1..110: mol_type = other DNA
gggaactccgtgctgtttcactcgatccaagtgaggaaacaagctcagacaggtgaagtgactgcctcgggtttcaccgagagttagtgggaccaggacccagaagctga

SEQ ID NO: 6030 - DNA, 110 bp, synthetic construct
  source 1..110: mol_type = other DNA
aagtgactgcctcgggtttcaccgagagttagtgggaccaggacccagaagctgaggtgtctttgtcccctgatctgtgcccctgagtcctccagctttccttacccaga

SEQ ID NO: 6031 - DNA, 110 bp, synthetic construct
  source 1..110: mol_type = other DNA
caagggtgcccatgcttccagaaaaacagcctggtcaccaggatacagctcatcaccttgtaggtggcccatcccaagttgcggttttcttggacacaccgggttattgg

SEQ ID NO: 6032 - DNA, 110 bp, synthetic construct
  source 1..110: mol_type = other DNA
ccttgtaggtggcccatcccaagttgcggttttcttggacacaccgggttattgggcatctttcattcctggtggtggtaatgacacccaatacccagacgttgcctgtc

SEQ ID NO: 6033 - DNA, 110 bp, synthetic construct
  source 1..110: mol_type = other DNA
gtggctccgcggccggggagctccagctcctccctgctacttccagccctactggcgcgccgcgagtaatgagtggtaaagttagtccagctctgctccggggagccgga

SEQ ID NO: 6034 - DNA, 110 bp, synthetic construct
  source 1..110: mol_type = other DNA
cgcgccgcgagtaatgagtggtaaagttagtccagctctgctccggggagccggagccccgcccagcagtgctcgcctcttccttagatttggtctaatgccctgagcaa

SEQ ID NO: 6035 - DNA, 110 bp, synthetic construct
  source 1..110: mol_type = other DNA
ggaggtaggtaatggagagcgggtcccttggatggcagagccccagctgggacaagggtaatgctgcccttgcgtggtgcttctaggtccgtggcatgttacaggttaac

SEQ ID NO: 6036 - DNA, 110 bp, synthetic construct
  source 1..110: mol_type = other DNA
agaaaaccatatcgaggtagtacatcataactaaagtgcaggaaaccaataaaaagacaaaaaaaaaaaatttttttttttcatctttttaccatttctagggccgctcc

SEQ ID NO: 6037 - DNA, 110 bp, synthetic construct
  source 1..110: mol_type = other DNA
ggtagtacatcataactaaagtgcaggaaaccaataaaaagacaaaaaaaaaaaatttttttttttcatctttttaccatttctagggccgctcccacagcatatggagg

SEQ ID NO: 6038 - DNA, 110 bp, synthetic construct
  source 1..110: mol_type = other DNA
ttctgaaatagcatcccaatattctaaaggttgaatccataaaaccagggaaaggacacaaaacaaaaatcatgtcaaggacttgaactttcacagttacagaagtgcac

SEQ ID NO: 6039 - DNA, 110 bp, synthetic construct
  source 1..110: mol_type = other DNA
tccatttggggaactgactttttaaagtaatttgtagtgtcaatagcatctctttccatttatgttgaaagtatcgtcactacataaactttacaatcttttccgtaaag

SEQ ID NO: 6040 - DNA, 110 bp, synthetic construct
  source 1..110: mol_type = other DNA
agtgtcaatagcatctctttccatttatgttgaaagtatcgtcactacataaactttacaatcttttccgtaaagatctaatatttcttggttcacattactgctgacat

SEQ ID NO: 6041 - DNA, 110 bp, synthetic construct
  source 1..110: mol_type = other DNA
gataggaactccgaaaaagcaccactactatgcaagcttttctagagaaaaaagggaatggttcccaacccattttagaaaccaagatagctttgatgtcaaaacctgag

SEQ ID NO: 6042 - DNA, 110 bp, synthetic construct; identical to SEQ ID NO: 6041
  source 1..110: mol_type = other DNA

SEQ ID NO: 6043 - DNA, 110 bp, synthetic construct
  source 1..110: mol_type = other DNA
tgcttcgaggattacagaatacaaataagcacccacacttcgtacctggcacatagcagatgtttaataaacatgagctttttaatgaaagctggtggagaagctgaagt

SEQ ID NO: 6044 - DNA, 110 bp, synthetic construct
  source 1..110: mol_type = other DNA
aggctgtaaaggctgtagagggaggaaggtctgggttgagttggcaagttgcaatgaatgacccccagatcactctgtgcctggcctctctgctcgctgggaggtgtggc

SEQ ID NO: 6045 - DNA, 110 bp, synthetic construct
  source 1..110: mol_type = other DNA
ttttcagttgaaaaactgaattccaggaagattatattaatcactagagattacatagctagtcttgagctcattacattttactttagagtgctgtacccagaactctt

SEQ ID NO: 6046 - DNA, 110 bp, synthetic construct
  source 1..110: mol_type = other DNA
taaatcaatcaacacaaatcccgtttgtgactccttgactcaaagccctttcaggtctccccactgagctcagaatgaagccagttcctcagcttagcattcaaggtccc

SEQ ID NO: 6047 - DNA, 110 bp, synthetic construct
  source 1..110: mol_type = other DNA
ctggcaggtttcagggacgtgatgggctggggctccccttccaacttttcaactcatggagagaagacgcagagggatgtcacgtggtccccgcacagctgacgggccct

SEQ ID NO: 6048 - DNA, 110 bp, synthetic construct
  source 1..110: mol_type = other DNA
atggagagaagacgcagagggatgtcacgtggtccccgcacagctgacgggccctcccaggcaatggggaccctggtcccaggggcaggaaggagaggggtagggaggtg

SEQ ID NO: 6049 - DNA, 110 bp, synthetic construct
  source 1..110: mol_type = other DNA
tatgacaacccagacttattatatatccaactacagtttctatcaaatgctcatttaattttcaggcagctgacatgggaggagagaaaaaacatcagccaagagccatt

SEQ ID NO: 6050 - DNA, 110 bp, synthetic construct
  source 1..110: mol_type = other DNA
gtcttaggcttttatttctttatccatgttggatgcttcaattagtatctttatgcatgactcctaaattcacacttctggctcatcgctctctctcctctaaacatgca

SEQ ID NO: 6051 - DNA, 110 bp, synthetic construct
  source 1..110: mol_type = other DNA
atgattaagtcagaatcttcagcacttatttattagtgaaccaagacaagttaattccaaatcttctcaaagcccatttcattctctatattaatctggatgtcatttaa

SEQ ID NO: 6052 - DNA, 110 bp, synthetic construct
  source 1..110: mol_type = other DNA
tacagagataggtatgtactctctccaaaagacagacctgtcacaggactactcactgtcccactggccactaaagaggtgatggtagcactgggactcactgtcccact

SEQ ID NO: 6053 - DNA, 110 bp, synthetic construct
  source 1..110: mol_type = other DNA
ctgtcccactggccactaaagaggtgatggtagcactgggactcactgtcccactggttccaccgacatgaatatgacacttctttcaagaaatttttggggaggagagg

SEQ ID NO: 6054 - DNA, 110 bp, synthetic construct
  source 1..110: mol_type = other DNA
tttgtgaccatattaatgagggcttggtctacagtgtaatccttttaatgctgatgatttctcacaatgtttaaaccattatttgggagactcaacacatgttatggtaa

SEQ ID NO: 6055 - DNA, 110 bp, synthetic construct
  source 1..110: mol_type = other DNA
atgagggcttggtctacagtgtaatccttttaatgctgatgatttctcacaatgtttaaaccattatttgggagactcaacacatgttatggtaaaatgatttttttttt

SEQ ID NO: 6056 - DNA, 110 bp, synthetic construct
  source 1..110: mol_type = other DNA
ttcccaggctaggggtcaaaatggaactgcagttgctggctacagccacagccacagccacatggaacccgagtagcatctgtgacctataccacagcttacagcaacgc

SEQ ID NO: 6057 - DNA, 110 bp, synthetic construct; identical to SEQ ID NO: 6056
  source 1..110: mol_type = other DNA

SEQ ID NO: 6058 - DNA, 110 bp, synthetic construct
  source 1..110: mol_type = other DNA
gggttgaattggagctgcacctgtgacctacgccatagccatagccaccccagatccaagctgcatctgcaccctaggcaacaaggcagcaatgccagatccttaatcca

SEQ ID NO: 6059 - DNA, 110 bp, synthetic construct
  source 1..110: mol_type = other DNA
tgcatcgtacctctcatctacggtatcattttaagctgagtttcaaagcttacgtcccatctgttgtatgcccatgcatgtgcacatcatatacaaataagcttgcatgc

SEQ ID NO: 6060 - DNA, 110 bp, synthetic construct
  source 1..110: mol_type = other DNA
aggcattttgcaaagcatatagtcatttttttccagaaacggtgtcttgttggtaacttaagttaattttatgccctgcctagttgaattccttgaatgtttagcttccc

SEQ ID NO: 6061 - DNA, 110 bp, synthetic construct
  source 1..110: mol_type = other DNA
acttaagttaattttatgccctgcctagttgaattccttgaatgtttagcttcccactttatcagtgaatactcaagatgtggagggtggaacaattgtgtgggtatcat

SEQ ID NO: 6062 - DNA, 110 bp, synthetic construct
  source 1..110: mol_type = other DNA
gattttttgttgttgtctttctctacaaaaatgattagcatggcgcctaaagcttgctccggggatgtcaggtattatatttcttttagggaatcttttctgaggaagtc

SEQ ID NO: 6063 - DNA, 110 bp, synthetic construct
  source 1..110: mol_type = other DNA
gctccggggatgtcaggtattatatttcttttagggaatcttttctgaggaagtctctaatactcgtttgatatgatacccaactaaggataaagagactatatccagct

SEQ ID NO: 6064 - DNA, 110 bp, synthetic construct
  source 1..110: mol_type = other DNA
ttgagcttctccactgctcccttcttataagattgtttttcgagtcacttgatttttaccagcaaatcaaaggccgagcttcatgccagcttgagaccagctgaagccct

SEQ ID NO: 6065 - DNA, 110 bp, synthetic construct
  source 1..110: mol_type = other DNA
ttaccagcaaatcaaaggccgagcttcatgccagcttgagaccagctgaagccctccttcagcgtgctgatttattgccaagtctttacttggtaggatggatttgtttt

SEQ ID NO: 6066 - DNA, 110 bp, synthetic construct; identical to SEQ ID NO: 6064
  source 1..110: mol_type = other DNA

SEQ ID NO: 6067 - DNA, 110 bp, synthetic construct; identical to SEQ ID NO: 6065
  source 1..110: mol_type = other DNA

SEQ ID NO: 6068 - DNA, 110 bp, synthetic construct
  source 1..110: mol_type = other DNA
gactcatcgcattgtgggttgtatttgtttggggttcatctaatgcgtgtctccctccttagaatataaatccccggagcagatggctttgccagtcttgttctagaaca

SEQ ID NO: 6069 - DNA, 110 bp, synthetic construct
  source 1..110: mol_type = other DNA
tccttagaatataaatccccggagcagatggctttgccagtcttgttctagaacagggctggtcctaggaggtcctgtcacattccagaggcagactgagctggctttga

SEQ ID NO: 6070 - DNA, 110 bp, synthetic construct
  source 1..110: mol_type = other DNA
gataaacacctaaccttcacttgttcagcaccaggcacccctaagactacatagtgcaccatcgagtcctcaggatctcctcggagtaggtattatcggcagtttggaga

SEQ ID NO: 6071 - DNA, 110 bp, synthetic construct
  source 1..110: mol_type = other DNA
gcaccatcgagtcctcaggatctcctcggagtaggtattatcggcagtttggagatgagaaaacaggagttcccatcatggtacagtggaaatggaaccgactaggaacc

SEQ ID NO: 6072 - DNA, 110 bp, synthetic construct
  source 1..110: mol_type = other DNA
acagatggggagactgaggccatggaggtcaaacccctttgatgtgtaagggctgatgcagaattccacccctaatctggctccagccctcgcccagcccgtgtccttgg

SEQ ID NO: 6073 - DNA, 110 bp, synthetic construct
  source 1..110: mol_type = other DNA
atgcagaattccacccctaatctggctccagccctcgcccagcccgtgtccttggcgccccctgcaggttcaggctggaatagtggtggacgtgggggtcaggggctccc

SEQ ID NO: 6074 - DNA, 110 bp, synthetic construct
  source 1..110: mol_type = other DNA
atctaatcacggcatggagctcaggcttgggcagagcctgggacagagtgccagcctgctggggtcaagtcttctggacatggctgttggcaatgaactagtcctttctg

SEQ ID NO: 6075 - DNA, 110 bp, synthetic construct
  source 1..110: mol_type = other DNA
ccttgccaatttgctgatgaccctgcaccaggctctcaacctcggggcctcagaatccccatctgtaaagtgaggggaagcattgtcccctttgaagctcgggaggcccg

SEQ ID NO: 6076 - DNA, 110 bp, synthetic construct
  source 1..110: mol_type = other DNA
tccccatctgtaaagtgaggggaagcattgtcccctttgaagctcgggaggcccgaagaggcaactcagggcacaaggagggaacctggctgactctgctggtgctgtgt

SEQ ID NO: 6077 - DNA, 110 bp, synthetic construct
  source 1..110: mol_type = other DNA
gtgtgggcaggaggcacaaagctctgctggatgggcatgtccagcaggctgacccagcaacagccccatgcccaccagttacctcccaaacccattacaggacagcacat

SEQ ID NO: 6078 - DNA, 110 bp, synthetic construct
  source 1..110: mol_type = other DNA
aataactattttgagagatagaaaaccagcctgcagttgccgaatatttagaaaatgataacgacaaaactacacattagcacttgtgggatgcagctatttctgtactc

SEQ ID NO: 6079 - DNA, 110 bp, synthetic construct
  source 1..110: mol_type = other DNA
tgataacgacaaaactacacattagcacttgtgggatgcagctatttctgtactcacaggataattcacagctttaattgcttttattattaagtgagcaagaatgaaaa

SEQ ID NO: 6080 - DNA, 110 bp, synthetic construct
  source 1..110: mol_type = other DNA
caaattttattatgaacacatagtttgctacttaactatccttaagaccccgggtgcttccagttctcagcaggagggctccagaggaggcgagatgaagggcgcggagg

SEQ ID NO: 6081 - DNA, 110 bp, synthetic construct
  source 1..110: mol_type = other DNA
aggagaaatactcctgtacccggaggtgatccagtctcaactataagatgctttcacaaacttgctcttgttccatgctcatgatggccctgcggggtgtataacgtgag

SEQ ID NO: 6082 - DNA, 110 bp, synthetic construct
  source 1..110: mol_type = other DNA
acaaacttgctcttgttccatgctcatgatggccctgcggggtgtataacgtgagcctctcgtgcagagggcactgaggctcagagaagtcggagcacatggccaaaggc

SEQ ID NO: 6083 - DNA, 110 bp, synthetic construct
  source 1..110: mol_type = other DNA
ggggtacggatgttgactttttcatcctttctcatcactattggtgtaggactgctagcttcagattccagatgggggcgctgggcaccgagggtgaaggggcgcgccca

SEQ ID NO: 6084 - DNA, 110 bp, synthetic construct
  source 1..110: mol_type = other DNA
ctgttatccactaaaactgaatgtgtacgcgccagtgacccagcagttccactctggcgtatgtataccaaagacatgtaccgaattgttcactggggcaccaccctcaa

SEQ ID NO: 6085 - DNA, 110 bp, synthetic construct
  source 1..110: mol_type = other DNA
ggcgtatgtataccaaagacatgtaccgaattgttcactggggcaccaccctcaaaactgccaaaatgcctgtacgtagcagaatggatacatttatccaaacagataaa

SEQ ID NO: 6086 - DNA, 110 bp, synthetic construct
  source 1..110: mol_type = other DNA
ctcacctgcctgaaattgtcctccagctctctgtttttatttctttcattattattattattattttggccccacctgaagcatgtaggagttcctgggccagggatcga

SEQ ID NO: 6087 - DNA, 110 bp, synthetic construct
  source 1..110: mol_type = other DNA
ttagaaagaagaggctgtgcattaagtttatcccacgggattcaacggaagccgcaatttgtgacattcggatcatgggccggaccaagcaggccccccctcagtacaca

SEQ ID NO: 6088 - DNA, 110 bp, synthetic construct
  source 1..110: mol_type = other DNA
aatttgtgacattcggatcatgggccggaccaagcaggccccccctcagtacacattcattgggtgagtctttttttttttttggtctttttgccttttctagggccact

SEQ ID NO: 6089 - DNA, 110 bp, synthetic construct
  source 1..110: mol_type = other DNA
cctcctctcctgcagggggcctctcatgaatctgagtttggcaggcctgctgcccttgcattttggagaagcgggtgttttagtaggctggaagaagatgaaaagctagc

SEQ ID NO: 6090 - DNA, 110 bp, synthetic construct
  source 1..110: mol_type = other DNA
atgtcagcaaacattattgcttttatcttaaataagtcatttctcatgtttcagattatttcctcaggcgggatttctggagagaaagaggaaatgctggtccttttgtc

SEQ ID NO: 6091 - DNA, 110 bp, synthetic construct
  source 1..110: mol_type = other DNA
ttatttcctcaggcgggatttctggagagaaagaggaaatgctggtccttttgtcctattacttccccccttcttaggtcttgattttgaatcacccagagcaggtttta

SEQ ID NO: 6092 - DNA, 110 bp, synthetic construct
  source 1..110: mol_type = other DNA
gagggcgtggccactcgtagccggagcatcgcctcccattcccgcctgcaggctgcgccgggctcttcaggaatcacggtctgtcgtctctgaatcacactgctggggag

SEQ ID NO: 6093 - DNA, 110 bp, synthetic construct
  source 1..110: mol_type = other DNA
cgccgggctcttcaggaatcacggtctgtcgtctctgaatcacactgctggggagtggtttgcagagattcccaagtttgtaattaaaacagtcgagaaacaattttcac

SEQ ID NO: 6094 - DNA, 110 bp, synthetic construct
  source 1..110: mol_type = other DNA
ttcctctgcgacacgccccagctgtgggatcatctccaacactcaacgccccaccacctttctccttgactcagaagcaagcattccggtggctctgatggacctaggag

SEQ ID NO: 6095 - DNA, 110 bp, synthetic construct
  source 1..110: mol_type = other DNA
acctttctccttgactcagaagcaagcattccggtggctctgatggacctaggagggccaaagacagtcacgtggggtcccttgcagggagcaagagggcagtcagggtg

SEQ ID NO: 6096 - DNA, 110 bp, synthetic construct
  source 1..110: mol_type = other DNA
gggaggattgggaatttgggatttgcagatgaaagctagtatatgtaggacaaacaaggtcctactgcagagcccagggaacggcattcaatgtcctgtgataaaccata

SEQ ID NO: 6097 - DNA, 110 bp, synthetic construct
  source 1..110: mol_type = other DNA
ttgggatttgcagatgaaagctagtatatgtaggacaaacaaggtcctactgcagagcccagggaacggcattcaatgtcctgtgataaaccataatggaaaagaatacg

SEQ ID NO: 6098 - DNA, 110 bp, synthetic construct
  source 1..110: mol_type = other DNA
cacccagacacccagctcagctgaaagatagggatggtgccatcacctcctccggttcctcctcctcaactccagccctcccatcgcggggacagaatgcaaacaattcc

SEQ ID NO: 6099 - DNA, 110 bp, synthetic construct
  source 1..110: mol_type = other DNA
ttcctcctcctcaactccagccctcccatcgcggggacagaatgcaaacaattcccccagagcaaatcccggctccggtttccggatgcctccgtccaggcagcggcggt

SEQ ID NO: 6100 - DNA, 110 bp, synthetic construct
  source 1..110: mol_type = other DNA
ctgaaggtgcagctggggacacagaggcattcagatcctgaggcagcttctgacctacaaacatcagcccaaaacacccccttcacccctgcataccacagatgttggca

SEQ ID NO: 6101 - DNA, 110 bp, synthetic construct
  source 1..110: mol_type = other DNA
tacaaacatcagcccaaaacacccccttcacccctgcataccacagatgttggcacaggatagacgggttgacacttagttccaactggcacttgccaggggcccaggtg

SEQ ID NO: 6102 - DNA, 110 bp, synthetic construct
  source 1..110: mol_type = other DNA
ggcctggctgacagcacttcctcgctgccctttacctttgcttcgtctgatcaatacaaataaatttcctcactggcccttcctttgtttctcccggggcactgttgtat

SEQ ID NO: 6103 - DNA, 110 bp, synthetic construct
  source 1..110: mol_type = other DNA
gccctcagtaattgggctaacagtgttatctctggtcgcattaagaggagtatggggtaggggtaacggaggagatagctctccttgctcctggaggactgggctgagca

SEQ ID NO: 6104 - DNA, 110 bp, synthetic construct
  source 1..110: mol_type = other DNA
ggtaggggtaacggaggagatagctctccttgctcctggaggactgggctgagcagtgagttgctgggtgccatgcctcaagggctgttttgacaaactcaggctcagga

SEQ ID NO: 6105 - DNA, 110 bp, synthetic construct
  source 1..110: mol_type = other DNA
ccacctcacagggctgttgtagatgactatgtgtcaatacagtgaagtgcttagctagcttccaggcacatgctaagcctcaaaaatagccatccattattcgtaaagat

SEQ ID NO: 6106 - DNA, 110 bp, synthetic construct
  source 1..110: mol_type = other DNA
tctctggcctgggaacttctatgtgcctcgggtgcaaccaaaaaaaaaaaaggttgagggaaaaccaaagctcagagagattcaagcaagtagcaggtcctctcaccctg

SEQ ID NO: 6107 - DNA, 110 bp, synthetic construct
  source 1..110: mol_type = other DNA
gagggaaaaccaaagctcagagagattcaagcaagtagcaggtcctctcaccctggggcccagcctcacagcagttataccatgttggaactcaaggtcagacaggacta

SEQ ID NO: 6108 - DNA, 110 bp, synthetic construct
  source 1..110: mol_type = other DNA
ctttatgaatgctagcaattaggagatgagggtggataggcagccacatgttcaggtatattttatttcaagctaagaaattcggatttaccctgtgtccatggggaggc

SEQ ID NO: 6109 - DNA, 110 bp, synthetic construct
  source 1..110: mol_type = other DNA
gtatattttatttcaagctaagaaattcggatttaccctgtgtccatggggaggcagtagaactcagttcaatgaatacttacggagtgtctactgtagaaatgccaaaa

SEQ ID NO: 6110 - DNA, 110 bp, synthetic construct
  source 1..110: mol_type = other DNA
ccttccagtttttaaatgttggtgattaattaaaaaaacactaaaatgtgtacaagcctaccagaccacatctgtgggccagcctgtaacctttcttcgagggtctcccc

SEQ ID NO: 6111 - DNA, 110 bp, synthetic construct
  source 1..110: mol_type = other DNA
gcctaccagaccacatctgtgggccagcctgtaacctttcttcgagggtctcccctgaggccatgtgctggagtccagcgcagccctctcgcagggtgggagtccgttgg

SEQ ID NO: 6112 - DNA, 110 bp, synthetic construct
  source 1..110: mol_type = other DNA
agctcaccccaccctatcctctgcttaagcctgggccctgctgcccccgactcccacctcctgaccctggcctgccagctgcagggcacaggctcaggtctttatcccat

SEQ ID NO: 6113 - DNA, 110 bp, synthetic construct
  source 1..110: mol_type = other DNA
acctcctgaccctggcctgccagctgcagggcacaggctcaggtctttatcccatctttcccgtcatctctcccagcccaggctgtgatccccgggccttcctggaccac

SEQ ID NO: 6114 - DNA, 110 bp, synthetic construct
  source 1..110: mol_type = other DNA
ttttatccttttccccatgaaaatgatttaaaatcaatatgtagggacttgacttttaccttgtaattttagctcactttgcatatgtggttatgcccctttctcacttc

SEQ ID NO: 6115 - DNA, 110 bp, synthetic construct
  source 1..110: mol_type = other DNA
ttaccttgtaattttagctcactttgcatatgtggttatgcccctttctcacttctaatgtgtgtttttgcattttgcctgattgttttacttgttttattgccattttt

SEQ ID NO: 6116 - DNA, 110 bp, synthetic construct
  source 1..110: mol_type = other DNA
tgaccatggctcccttggtcccctggggagggtgtgtggtgggctgagcagccccgacagtgaggaagagagcggatggctctgaggctgtggaatgaaaggtttagaag

SEQ ID NO: 6117 - DNA, 110 bp, synthetic construct
  source 1..110: mol_type = other DNA
gacagtgaggaagagagcggatggctctgaggctgtggaatgaaaggtttagaagctgccaaggcttgagtgcagaggtgtttaattgcagaagtgtttctggctgagtg

SEQ ID NO: 6118 - DNA, 110 bp, synthetic construct
  source 1..110: mol_type = other DNA
ggggtttatcagtaggcatttgggtttccctctggacacgctccagttcagtctgcaaatggatgtgagacgaggggggggaagtcccagagtcccacatcggcccctcc

SEQ ID NO: 6119 - DNA, 110 bp, synthetic construct
  source 1..110: mol_type = other DNA
caaatggatgtgagacgaggggggggaagtcccagagtcccacatcggcccctcctgggcagtgtgcccgtcaccgacccaagtttctagtttttgcatccctgggcctc

SEQ ID NO: 6120 - DNA, 110 bp, synthetic construct
  source 1..110: mol_type = other DNA
gtctcagtcggtgggatttcccgtgactcatttggtgggttccaatgtcctgggttaagagctttcaagaggttcaaatggctcttcagatatacttttccttctctcct

SEQ ID NO: 6121 - DNA, 110 bp, synthetic construct
  source 1..110: mol_type = other DNA
agcccccaggcatcagctgtctgtccaagtgcagagacgctgccctcccgggagcccactctcttggtagctgagggccgctagggaagaattttgaagtgttatgtaag

SEQ ID NO: 6122 - DNA, 110 bp, synthetic construct
  source 1..110: mol_type = other DNA
ccactctcttggtagctgagggccgctagggaagaattttgaagtgttatgtaaggcaatgacaacgtcctccaggagggttttgcaaaagggctgagaaaatgagcacg

SEQ ID NO: 6123 - DNA, 110 bp, synthetic construct
  source 1..110: mol_type = other DNA
ctattccattctcccagtttgggcaaaatgaccttggagtgattcgactcctcactctgtcttatcctgtattcagtttgtcaggaaatcctgttggcttgaccttcagg

SEQ ID NO: 6124 - DNA, 110 bp, synthetic construct
  source 1..110: mol_type = other DNA
tctctctgtccctccagcagcatcccgcccctgaggccaggccctcttccttcattccacacacggtctccgcgcagcggacactgagctgggctgtgcagctcaacttc

SEQ ID NO: 6125 - DNA, 110 bp, synthetic construct
  source 1..110: mol_type = other DNA
agtggggcttgatggggctgccctgtcgctgccaagttcctgcggcttccagcgcgtccaggcttacctggctcacatctgcatctgtacctctaaccaggtgccaggca

SEQ ID NO: 6126 - DNA, 110 bp, synthetic construct
  source 1..110: mol_type = other DNA
gtccaggcttacctggctcacatctgcatctgtacctctaaccaggtgccaggcaccaagctatgcccttctctgctctgttcactcaccccggaccacaaccctccaag

SEQ ID NO: 6127 - DNA, 110 bp, synthetic construct
  source 1..110: mol_type = other DNA
tccttcccgcaggttctggaccttcatgataaccagctgacagcccttcctgatgatatagggcagctgacagccctccaggtatggctgcaggaaccagaaaactcacc

SEQ ID NO: 6128 - DNA, 110 bp, synthetic construct
  source 1..110: mol_type = other DNA
aggaggttggcaggatgccttggtggctgccaccaagaccaacgcgttgactgctccaaactgcccacactgctctcgtagcgacagtgacaagagtaattgcaatgaca

SEQ ID NO: 6129 - DNA, 110 bp, synthetic construct
  source 1..110: mol_type = other DNA
ccaaactgcccacactgctctcgtagcgacagtgacaagagtaattgcaatgacagtaagagtgataataacccaccaccagcagcacgtccacctccttcacatgctcc

SEQ ID NO: 6130 - DNA, 110 bp, synthetic construct
  source 1..110: mol_type = other DNA
gaccagggagagacgtttattagaaatcgtttatgccagaaagcaaggcacacattgagtcatggcctcagcaaatctctaacaataaacgcggaagggaaataccgctg

SEQ ID NO: 6131 - DNA, 110 bp, synthetic construct
  source 1..110: mol_type = other DNA
cctcccaaatgttggacaaatgatttcatctttatgtgcagtgattcagagaatgggctccggggtgaaattttgatccaccgtgatgagctgtgtgactgtggcaaata

SEQ ID NO: 6132 - DNA, 110 bp, synthetic construct
  source 1..110: mol_type = other DNA
ggctccggggtgaaattttgatccaccgtgatgagctgtgtgactgtggcaaataatgaagcccttttgtgcctcaatttcttcttcatctgtaaagtgggtaataatag

SEQ ID NO: 6133 - DNA, 110 bp, synthetic construct
  source 1..110: mol_type = other DNA
tctatggtttctgctcaattttgctgtgaatctagaacttctctgaaaaaagcctctttaaaagaaaaaaatagggagttctgagtctcagtcccttcatctaaaagggg

SEQ ID NO: 6134 - DNA, 110 bp, synthetic construct
  source 1..110: mol_type = other DNA
ctttaaaagaaaaaaatagggagttctgagtctcagtcccttcatctaaaagggggatattaggggagttctcgttgtggcaaagcagaaacaaatctgactagtgtcca

SEQ ID NO: 6135 - DNA, 110 bp, synthetic construct
  source 1..110: mol_type = other DNA
cttccatatactgcgggtgcagccaaataaataaagtaaataaataaaaataaaatagacagactagaagaaatcacaaaggggaaggtggccagctaggatggcccaaa

SEQ ID NO: 6136 - DNA, 110 bp, synthetic construct
  source 1..110: mol_type = other DNA
tagacagactagaagaaatcacaaaggggaaggtggccagctaggatggcccaaagttttaaaatgtccaaaaagtttaaaaacactctggccaaaatttaaagaaccgt

SEQ ID NO: 6137 - DNA, 110 bp, synthetic construct
  source 1..110: mol_type = other DNA
catgcccctaaaaaccctctaatgactatccctgcccacaggataaagaccgaaccccttactgtggcaacggggccttgtctatctccccaggcctgccccgtggtgaa

SEQ ID NO: 6138 - DNA, 110 bp, synthetic construct
  source 1..110: mol_type = other DNA
cccttactgtggcaacggggccttgtctatctccccaggcctgccccgtggtgaaccgtaagctcccgccaccgcagcccatgtgtggctgaccccagtcaaggcccact

SEQ ID NO: 6139 - DNA, 110 bp, synthetic construct
  source 1..110: mol_type = other DNA
tgctgatgctgaacggagcttgcccacggtccacccccagcagaccactcttgactcccttcttcacgccccgcccacccgctgtgggaaaacagaagaaccaagcattc

SEQ ID NO: 6140 - DNA, 110 bp, synthetic construct
  source 1..110: mol_type = other DNA
tcccttcttcacgccccgcccacccgctgtgggaaaacagaagaaccaagcattctgggagaaactccccggaaaaggctctgccaggacccagattcccagaagccttt

SEQ ID NO: 6141 - DNA, 110 bp, synthetic construct
  source 1..110: mol_type = other DNA
tagggctggaccgtggggccctcaagggtggggctgcagacacttcatcctcagcacccctcaggccctcggagcggccaggcgggcgggagggaggctctcaatgccca

SEQ ID NO: 6142 - DNA, 110 bp, synthetic construct
  source 1..110: mol_type = other DNA
acccctcaggccctcggagcggccaggcgggcgggagggaggctctcaatgcccacctgctagggagcgtctcaccaagaccgacgtggtggaggcaggggcttgggaaa

SEQ ID NO: 6143 - DNA, 110 bp, synthetic construct
  source 1..110: mol_type = other DNA
cacagcgaggataaaacgaacaccccagcagtggctatttcctgctggcctactgtgtggcccctggagctcttcaacattgaagggtgggtgttattgtggccacttga

SEQ ID NO: 6144 - DNA, 110 bp, synthetic construct
  source 1..110: mol_type = other DNA
tgtggcccctggagctcttcaacattgaagggtgggtgttattgtggccacttgacagacgaggacaaggaggctcagaaaggccgagcaacgcacccacagtcacgggg

SEQ ID NO: 6145 - DNA, 110 bp, synthetic construct
  source 1..110: mol_type = other DNA
gttggctttcaaaagtcttcataggaatactctactgtctgataccctctattcgttgttggtattatttttattattatctgtctcctaccacccctgaactccaactc

SEQ ID NO: 6146 - DNA, 110 bp, synthetic construct
  source 1..110: mol_type = other DNA
atgctttgtgcctcatctggtgttccagtgttccctcgatccatgacacatttggttttctgttttgtttgttttgttggttctttagggcctcgcccgcggcatatgga

SEQ ID NO: 6147 - DNA, 110 bp, synthetic construct
  source 1..110: mol_type = other DNA
ttttctgttttgtttgttttgttggttctttagggcctcgcccgcggcatatggagattcccaagttaggggtagcatcagaactgtagcttccaggctataccatagcc

SEQ ID NO: 6148 - DNA, 110 bp, synthetic construct
  source 1..110: mol_type = other DNA
agaagtgcctggagctggtgtgaagcatcagggagggaacccgagccctgctttattcttcttccttatttgtatttcccacgtatgtgttcagcgtgtaacagactcgg

SEQ ID NO: 6149 - DNA, 110 bp, synthetic construct
  source 1..110: mol_type = other DNA
ttcttcttccttatttgtatttcccacgtatgtgttcagcgtgtaacagactcggtttttttatggtattgttctatagctaaggcgagggctacacttgctcctgactc

SEQ ID NO: 6150 - DNA, 110 bp, synthetic construct
  source 1..110: mol_type = other DNA
tggtgacaaagcgaattaagaaagaattggaagttgtcattgaaaacagccttctaataaagttgtttcaaagcagatgacggagccatgattcttccgatctgggcttg

SEQ ID NO: 6151 - DNA, 110 bp, synthetic construct
  source 1..110: mol_type = other DNA
aataaagttgtttcaaagcagatgacggagccatgattcttccgatctgggcttggctggtgtggggctgtttgcatgttagaataagaatccaggagttcctgctgtgg

SEQ ID NO: 6152 - DNA, 110 bp, synthetic construct
  source 1..110: mol_type = other DNA
ccactgtacaacatggacttggagagctgagaggtaaccctctacctggggtctatcccgacgggagtagcagctgccgttccccgtggccaagtgccatgtggctggga

SEQ ID NO: 6153 - DNA, 110 bp, synthetic construct
  source 1..110: mol_type = other DNA
tcccgacgggagtagcagctgccgttccccgtggccaagtgccatgtggctgggagtgatcctgaacaaatgagcgaatcaggctggcaccacctctagaaggggcactt

SEQ ID NO: 6154 - DNA, 110 bp, synthetic construct
  source 1..110: mol_type = other DNA
tgacacttgacagacgaagctgagccccagaagtggagacttctgcctcccccatcttcttcctctcttgggtttcccaaccggaatgtgaaatactgaacgaagcgctt

SEQ ID NO: 6155 - DNA, 110 bp, synthetic construct
  source 1..110: mol_type = other DNA
cttcttcctctcttgggtttcccaaccggaatgtgaaatactgaacgaagcgcttgctgtggccagaccctggggtcttgatatctgcatgtgaatgctcacaacaaccc

SEQ ID NO: 6156 - DNA, 110 bp, synthetic construct
  source 1..110: mol_type = other DNA
gtttcttacctcttccaggctgaaacccttctgtggcttccaggaactccgggatactccttccttaccccaagctggaaactggccccctccccacccctgcactctct

SEQ ID NO: 6157 - DNA, 110 bp, synthetic construct
  source 1..110: mol_type = other DNA
actccttccttaccccaagctggaaactggccccctccccacccctgcactctctggctgctactccacacccaccttctgctctccccacgcctccctcaccctctcaa

SEQ ID NO: 6158 - DNA, 110 bp, synthetic construct
  source 1..110: mol_type = other DNA
agggaaaaaaaaaatcctctctcctagttcccttcagcagatagaaccttttggaaaaatagaatcttaagatgaaacaggattcagtatgcaccagttataagcagagc

SEQ ID NO: 6159 - DNA, 110 bp, synthetic construct
  source 1..110: mol_type = other DNA
aaaatagaatcttaagatgaaacaggattcagtatgcaccagttataagcagagcttgtcttgccctaaagagcatcgattcagaattcccatcatggctcagtggctaa

SEQ ID NO: 6160 - DNA, 110 bp, synthetic construct
  source 1..110: mol_type = other DNA
tgactctttggacctgtgccagggggatgtctggcctctggcccacaggaacagaggccaggctgtgactgtgtgaccagtacggtgtgtgatgtgtgtgtgggcgtgca

SEQ ID NO: 6161 - DNA, 110 bp, synthetic construct
  source 1..110: mol_type = other DNA
ggccaggctgtgactgtgtgaccagtacggtgtgtgatgtgtgtgtgggcgtgcacatgggtgtgagagtgtacgaatggcacccagacatgggataggacatggaacag

SEQ ID NO: 6162 - DNA, 110 bp, synthetic construct
  source 1..110: mol_type = other DNA
gggagaagcagtgagagcccagccagagcacctgcagctttccagcgaggaagtgtcagaagccctcttctagagatcccagactgagccaggaaggagcccaggagagg

SEQ ID NO: 6163 - DNA, 110 bp, synthetic construct
  source 1..110: mol_type = other DNA
acacgctgttcaggagcaggaggcttcccagcattgagacctgagcacacacatgtaaatagcatctcatcaattccgtgtggacacccaggggtgggcgggacaggaaa

SEQ ID NO: 6164 - DNA, 110 bp, synthetic construct
  source 1..110: mol_type = other DNA
taaatagcatctcatcaattccgtgtggacacccaggggtgggcgggacaggaaaacacggggatgcataagacagttccaagtccacgggtgcagagatcagtagcaat

SEQ ID NO: 6165 - DNA, 110 bp, synthetic construct
  source 1..110: mol_type = other DNA
gaggacactatggagctgatccggggacccgacggcgtttgccttccttgccggccaggtctgcttcagggttggaattaggggtcagagcgggaggggctggctcagga

SEQ ID NO: 6166 - DNA, 110 bp, synthetic construct
  source 1..110: mol_type = other DNA
caggtctgcttcagggttggaattaggggtcagagcgggaggggctggctcaggagggagaaggggcagaggggcaggggagcccgtcctgatccgcagcctccgtcagc

SEQ ID NO: 6167 - DNA, 110 bp, synthetic construct; identical to SEQ ID NO: 6165
  source 1..110: mol_type = other DNA

SEQ ID NO: 6168 - DNA, 110 bp, synthetic construct; identical to SEQ ID NO: 6166
  source 1..110: mol_type = other DNA

SEQ ID NO: 6169 - DNA, 110 bp, synthetic construct
  source 1..110: mol_type = other DNA
ttttccctaggcatgtgtgctacatggccctgagaatgaggccttagtcctcagagaatggcaacttcaaactttagttggcatcaaaatcacctgcaaggagttcccgt

SEQ ID NO: 6170 - DNA, 110 bp, synthetic construct
  source 1..110: mol_type = other DNA
tcacccagaagtcccaagtccaaggtccccagctaggagtttggtggagctgctgtgaaattcaggtcatggtctgtgtcattaatcctgtcgcgttcccggggtccaca

SEQ ID NO: 6171 - DNA, 110 bp, synthetic construct
  source 1..110: mol_type = other DNA
cctggctcctcggtggggagcgacttgtgcagctcctttctccaaagccgaccagcagtgccggcccagcccttgagggaggaagagcggaagatgaagggctctttgac

SEQ ID NO: 6172 - DNA, 110 bp, synthetic construct
  source 1..110: mol_type = other DNA
attcagaagcattcagttcattcacagtgctgtacaaccatcaccccgtccagtttttctgatcacttccttatcacttcaaacgttttttatcccttcaaaaggaaacc

SEQ ID NO: 6173 - DNA, 110 bp, synthetic construct
  source 1..110: mol_type = other DNA
tttctgatcacttccttatcacttcaaacgttttttatcccttcaaaaggaaaccgcatacccggtaagtagccactccttgtccactctccaccccagcacctggtgac

SEQ ID NO: 6174 - DNA, 110 bp, synthetic construct
  source 1..110: mol_type = other DNA
tttgtgtctataaacgcacatacaattttgtaaagatctagcaccttgcttctcagcccgcagctggccagcagcagctaatgagaaagccagcgacgctggccacagcg

SEQ ID NO: 6175 - DNA, 110 bp, synthetic construct
  source 1..110: mol_type = other DNA
attccgcaacaagcacttagtgggcacctattacacgcagcattttagagccatggacagaaaagacagaggcctcgccggcagggaagtactcggagcagaccgtgggg

SEQ ID NO: 6176 - DNA, 110 bp, synthetic construct
  source 1..110: mol_type = other DNA
gcggttgtcccatggtggccgggacagctgccctttaggctgggtccctaggggcctattcttcaggccatcaccctgggctccctggggacctggggctttttatggcc

SEQ ID NO: 6177 - DNA, 110 bp, synthetic construct
  source 1..110: mol_type = other DNA
ttatttactgaaatttagtctgagaaaaagtgggtgaggcaggcagctctggggaagccaccccacctggagaggggaacagaaactcaccaggagacattccggtgcag

SEQ ID NO: 6178 - DNA, 110 bp, synthetic construct
  source 1..110: mol_type = other DNA
tctcccacccctccccacacgctcacactggacggagaggcccctgaggaggtgggctttattggtcacttattgcccacagaggaccgagctgcaggacaggtgggggg

SEQ ID NO: 6179 - DNA, 110 bp, synthetic construct
  source 1..110: mol_type = other DNA
ccccatttttagctgtatgttatataacaggtatccagtctgttttgtgcaaaccggaagctatccttggtaaagtaaaagtatgtgccattttaaacctctcattttat

SEQ ID NO: 6180 - DNA, 110 bp, synthetic construct
  source 1..110: mol_type = other DNA
tgtgcaaaccggaagctatccttggtaaagtaaaagtatgtgccattttaaacctctcattttattttttgctaatacagacttatcaaacagataagttagatgataat

SEQ ID NO: 6181 - DNA, 110 bp, synthetic construct
  source 1..110: mol_type = other DNA
ccagttccagaaccttcaaggggtagctatcacatctcttcttccctcgtcttttttcccccattcttccctcatctgaggatacgcggctgcacgcgagcgtgctcagc

SEQ ID NO: 6182 - DNA, 110 bp, synthetic construct
  source 1..110: mol_type = other DNA
ttcccccattcttccctcatctgaggatacgcggctgcacgcgagcgtgctcagctgggtgctgggccccaggaagcgctgtcagctcccggtcactcaagctgaaacct

SEQ ID NO: 6183 - DNA, 110 bp, synthetic construct
  source 1..110: mol_type = other DNA
cagagatctaagcaggggcgcagtactggacccaggctgggcaagtaccaggatggaagaagctggtgcgtgggccggtggacgaccctcaaggatattccgggtattgg

SEQ ID NO: 6184 - DNA, 110 bp, synthetic construct
  source 1..110: mol_type = other DNA
gaagaagctggtgcgtgggccggtggacgaccctcaaggatattccgggtattggggcaagaagaggagggggcctgaccagtggctgcaagttgtccgggttggaaaga

SEQ ID NO: 6185 - DNA, 110 bp, synthetic construct
  source 1..110: mol_type = other DNA
gggtctcagggcctctcccacggccaaaacaggctcggcttctccccacagagccccaaaggcttcctggagagctacgaggagatgctgagctatgccctgcggccgga

SEQ ID NO: 6186 - DNA, 110 bp, synthetic construct
  source 1..110: mol_type = other DNA
ggacagacagatggcacaagcccagggacagcagaggctcactcaccaggtcggtgtaggctcggtgggcctgcacggcctttcgcagcagctccaccttctggtgctcc

SEQ ID NO: 6187 - DNA, 110 bp, synthetic construct
  source 1..110: mol_type = other DNA
gtaggctcggtgggcctgcacggcctttcgcagcagctccaccttctggtgctcctgggaccggggagagggcgctgaggcctgttcctgccatcctcctcggtggcccc

SEQ ID NO: 6188 - DNA, 110 bp, synthetic construct
  source 1..110: mol_type = other DNA
cccctggaggtgtccccagggaccttgaagctggtggctcctgagcgcagcctatgtgtttggccctgggtgaagtgcctaaaagcttgtcttaccttacactgtggtcc

SEQ ID NO: 6189 - DNA, 110 bp, synthetic construct
  source 1..110: mol_type = other DNA
gaactcctattgtgtggagccactgagatttgagggatgtttgttcctgcagcggagtccagctgagcctgcctaacaaaactctcccacctctgaggctcccatgccac

SEQ ID NO: 6190 - DNA, 110 bp, synthetic construct
  source 1..110: mol_type = other DNA
tgggcagtgctccctgctctcctgcgatgacttcagctggaatcctcaacccccagcccagttcctcctccagccttgcatcctttgttgtgaaaagctcccttaaccag

SEQ ID NO: 6191 - DNA, 110 bp, synthetic construct
  source 1..110: mol_type = other DNA
gcccagttcctcctccagccttgcatcctttgttgtgaaaagctcccttaaccagcctgggcaagcccccagggagcccagcctggtgtggaaccgccagcctgcccact

SEQ ID NO: 6192 - DNA, 110 bp, synthetic construct
  source 1..110: mol_type = other DNA
ccctcccccttcctcctccccctccccttgcctcccgatccctgcccttcagagcccagcccacctagacctgcttcttccctgggttcctcgaactccctgcctctctc

SEQ ID NO: 6193 - DNA, 110 bp, synthetic construct
  source 1..110: mol_type = other DNA
ccttcagagcccagcccacctagacctgcttcttccctgggttcctcgaactccctgcctctctcctttcctctctccagctctttcctccccacctcgccccgtccaag

SEQ ID NO: 6194 - DNA, 110 bp, synthetic construct
  source 1..110: mol_type = other DNA
ccatctcacttcctcgcctttcctccgggtctgacccaggcacctgtgtgcacggtgcccacttagtgaaggagagaaaaacacatatttcctctccttgcctggaccca

SEQ ID NO: 6195 - DNA, 110 bp, synthetic construct
  source 1..110: mol_type = other DNA
tgcccacttagtgaaggagagaaaaacacatatttcctctccttgcctggacccagaagggagctgtgctccatggctccctgcagctcagcctccaagggccaggggag

SEQ ID NO: 6196 - DNA, 110 bp, synthetic construct
  source 1..110: mol_type = other DNA
ttgtgccaactgtcttttcatgtttggcacactgtgttccaactgtcaggctcttgggacctgcttggctcgactgtgggcttctgggagctgcttctgcaagctcctcc

SEQ ID NO: 6197 - DNA, 110 bp, synthetic construct
  source 1..110: mol_type = other DNA
gggacctgcttggctcgactgtgggcttctgggagctgcttctgcaagctcctcccactctgagtcagtacctggcacccagtaaatacctcaggtgtgaattgaggcac

SEQ ID NO: 6198 - DNA, 110 bp, synthetic construct
  source 1..110: mol_type = other DNA
gaatctggagtctcctcgctgtggtcagaatcgagaccctggaggtgattctgagacagaaataataacagccagctgttactcagccctgtgcctgagcatcaagcaga

SEQ ID NO: 6199 - DNA, 110 bp, synthetic construct
  source 1..110: mol_type = other DNA
acagaaataataacagccagctgttactcagccctgtgcctgagcatcaagcagagtcggcaggatattcattcatttaatcctcccaacaggcccatgagagagagcga

SEQ ID NO: 6200 - DNA, 110 bp, synthetic construct
  source 1..110: mol_type = other DNA
caccccagatcaccctgccttctgaacctttgcttaggcttctgccaatgcaccgggctctagctatgggtggactcccctatagccccaacagtaataaaatgtctcac

SEQ ID NO: 6201 - DNA, 110 bp, synthetic construct
  source 1..110: mol_type = other DNA
ttgtaccctccacaaccctcacacgtgcccctgtgtccttgtggctgaccctgtggttcacagcatagtgcctggcagagtctagctcacgggtaacagggactagatgc

SEQ ID NO: 6202 - DNA, 110 bp, synthetic construct
  source 1..110: mol_type = other DNA
gttcacagcatagtgcctggcagagtctagctcacgggtaacagggactagatgccgaagtgagcttttcacaggtgtggggggtggaacggacttgtgcagcctctgcc

SEQ ID NO: 6203 - DNA, 110 bp, synthetic construct
  source 1..110: mol_type = other DNA
cagttcctcccatgtcatctgagtcgggattgctacacggacgtcagcaaaggacacagtttccagaattctccctggggtcgttcaaaggaaaccaaatctctaccaag

SEQ ID NO: 6204 - DNA, 110 bp, synthetic construct
  source 1..110: mol_type = other DNA
acagtttccagaattctccctggggtcgttcaaaggaaaccaaatctctaccaagagacctgggtgttggaggggcagggggtagcctccctgcagccccctccccttca

SEQ ID NO: 6205 - DNA, 110 bp, synthetic construct
  source 1..110: mol_type = other DNA
tctccgcagggctgggcagcctgtgctgttctgggcaatggagccctgagtgaaaagctgatggggatcacgtgacttaacgctcctactgctctcagcttcctggtcca

SEQ ID NO: 6206 - DNA, 110 bp, synthetic construct
  source 1..110: mol_type = other DNA
agctgatggggatcacgtgacttaacgctcctactgctctcagcttcctggtccataaaacgtggccagtgacgcaatttatagtgcttagcaggtttaaaaaggttttt

SEQ ID NO: 6207 - DNA, 110 bp, synthetic construct
  source 1..110: mol_type = other DNA
ggcctttggcccccaccaccctgccgccccgtctttctcaggatgagggctgcagggccttagctctgctcacaccctcagcctgagaaactcagcacagcctcggcacc

SEQ ID NO: 6208 - DNA, 110 bp, synthetic construct
  source 1..110: mol_type = other DNA
ccaggagggcatgcagcctgggccaggggcacagccagcatccagcagggcacctggctcttgatccactcctcttcaaacgaccggagccacttaacattgtagataac

SEQ ID NO: 6209 - DNA, 110 bp, synthetic construct
  source 1..110: mol_type = other DNA
ggctcttgatccactcctcttcaaacgaccggagccacttaacattgtagataacggtaaacttaacgaatttaataactgggttatctggcctcttgccgtcttgagtt

SEQ ID NO: 6210 - DNA, 110 bp, synthetic construct; identical to SEQ ID NO: 6208
  source 1..110: mol_type = other DNA

SEQ ID NO: 6211 - DNA, 110 bp, synthetic construct; identical to SEQ ID NO: 6209
  source 1..110: mol_type = other DNA

SEQ ID NO: 6212 - DNA, 110 bp, synthetic construct
  source 1..110: mol_type = other DNA
gagtcacctccaaggcatactgaaaataccaaacctatcagcttaaaagagctgaggaggagttctcttggttgctgctgcagcacaggttcaaaccctggctcaatctc

SEQ ID NO: 6213 - DNA, 110 bp, synthetic construct
  source 1..110: mol_type = other DNA
ggaggagttctcttggttgctgctgcagcacaggttcaaaccctggctcaatctctggctggaacttccatatgccggggtgggggctgaggagcagaccctggtagccc

SEQ ID NO: 6214 - DNA, 110 bp, synthetic construct
  source 1..110: mol_type = other DNA
ctggttcccttgcccttcctcttgttttctggaggacttttccttcccctattaagtaaagcaatccttaaagccattctgacgcagcaagacagactgcctagactaca

SEQ ID NO: 6215 - DNA, 110 bp, synthetic construct
  source 1..110: mol_type = other DNA
gtaaagcaatccttaaagccattctgacgcagcaagacagactgcctagactacaattgattggttgtccattggtgaagcacttttttttttgtctttttagggccaca

SEQ ID NO: 6216 - DNA, 110 bp, synthetic construct
  source 1..110: mol_type = other DNA
tggagggtcttggccgaaggctgtcgggataatacaggcctagggcgatgacggtctgagctggagcagagctttggaaggtaaaataagggggcgccgtttgggggtgg

SEQ ID NO: 6217 - DNA, 110 bp, synthetic construct
  source 1..110: mol_type = other DNA
ctgagctggagcagagctttggaaggtaaaataagggggcgccgtttgggggtggcgggagggtaggagatgaggtggattttccccccagaggggtagggagtagaagt

SEQ ID NO: 6218 - DNA, 110 bp, synthetic construct
  source 1..110: mol_type = other DNA
gggcaaggcaagctcaggagagggcaccgggcagtctctgctggcctaatggctaggacttggccctttgatctctgcagcccgggttccacccctgggctggcagctga

SEQ ID NO: 6219 - DNA, 110 bp, synthetic construct
  source 1..110: mol_type = other DNA
ggacttggccctttgatctctgcagcccgggttccacccctgggctggcagctgagaccccccccccaagctgctgcagcccacggcccgaacacaagggcacagaaatg

SEQ ID NO: 6220 - DNA, 110 bp, synthetic construct
  source 1..110: mol_type = other DNA
ttatggtttattataggatattgactacaattccctatgctatgtagtaggactttgtttatccattctctgcataataatttgcatctcctaacccaaaactcccaatc

SEQ ID NO: 6221 - DNA, 110 bp, synthetic construct
  source 1..110: mol_type = other DNA
agtaggactttgtttatccattctctgcataataatttgcatctcctaacccaaaactcccaatccatctgtccctcactcttcctcctccttgacaaccacaagtctgt

SEQ ID NO: 6222 - DNA, 110 bp, synthetic construct
  source 1..110: mol_type = other DNA
ctgagccacgaccaggaactcccacatcgttgctttggctgcacggctgggcttcatcttgaaccggtagtaaatatagctcgtgggtgaagttcatctctgcagaggaa

SEQ ID NO: 6223 - DNA, 110 bp, synthetic construct
  source 1..110: mol_type = other DNA
atcttgaaccggtagtaaatatagctcgtgggtgaagttcatctctgcagaggaagcttccttctgccctggtctctgtgcctggcacacaggaggcatagaagggcgac

SEQ ID NO: 6224 - DNA, 110 bp, synthetic construct
  source 1..110: mol_type = other DNA
tacttgaaaaaaaaaaaaatgagatcagcccatgtcagagacacgcaggctcagacggcgctgagctcctggtcagaatcaacaggcgtgtccacagagtgtgcagcaaa

SEQ ID NO: 6225 - DNA, 110 bp, synthetic construct
  source 1..110: mol_type = other DNA
cggcgctgagctcctggtcagaatcaacaggcgtgtccacagagtgtgcagcaaagaacatgaactttgccgcggagctggcggggtcgttcaaagtttttaacacccaa

SEQ ID NO: 6226 - DNA, 110 bp, synthetic construct
  source 1..110: mol_type = other DNA
ttttgttttttaatttttcgtttttaagttttattgacgtatagttgatttaccatgttgtgtgaatttctgctgtacaagtgctggctctttcctaagcgatttctagg

SEQ ID NO: 6227 - DNA, 110 bp, synthetic construct
  source 1..110: mol_type = other DNA
tgttgtgtgaatttctgctgtacaagtgctggctctttcctaagcgatttctaggcagcagctgaaagctaactggacaccttcccggcttctacagggatgagccagag

SEQ ID NO: 6228 - DNA, 110 bp, synthetic construct
  source 1..110: mol_type = other DNA
ctgcctgtgggctggttgccgtcgcatatgagcagtgctgcgtgctcgctccatggcaggtgcccaaagcctgatgttcaggactttcgggcatcatctggctgaaccct

SEQ ID NO: 6229 - DNA, 110 bp, synthetic construct
  source 1..110: mol_type = other DNA
gcaggtgcccaaagcctgatgttcaggactttcgggcatcatctggctgaaccctcccactcaccccaaaggcaggtgctgtgggtttctcagttttgcaggtaaaatga

SEQ ID NO: 6230 - DNA, 110 bp, synthetic construct
  source 1..110: mol_type = other DNA
agctgggaacgcaaagatggtttggtctggagttccggttgtgactcaggtgtaacaaacccagctagtatccatgagtttgcgggttcggtcactggccttgctcagtg

SEQ ID NO: 6231 - DNA, 110 bp, synthetic construct; identical to SEQ ID NO: 6230
  source 1..110: mol_type = other DNA

SEQ ID NO: 6232 - DNA, 110 bp, synthetic construct
  source 1..110: mol_type = other DNA
cacttgcaggcagatctgagttggggagaagctcagaattatgggagctcagaaggggttccaggatcaggtttggtgctcagagaaggcttcctggtggaggtgatgtt

SEQ ID NO: 6233 - DNA, 110 bp, synthetic construct
  source 1..110: mol_type = other DNA
aaaatacatttcctccccattacacacagtggctacacgcacggggaccttggctggcagaagctgcagccaaagtatcctgggcgtgacttgcgccagactctgctaat

SEQ ID NO: 6234 - DNA, 110 bp, synthetic construct
  source 1..110: mol_type = other DNA
aaatgtcagtgcagaatgaagaacctctgagccagctcacctgaacatgatgacatgagctgggtagtgagctccctgttccgggaggtattcaagttgaggccaggaaa

SEQ ID NO: 6235 - DNA, 110 bp, synthetic construct
  source 1..110: mol_type = other DNA
tgagctgggtagtgagctccctgttccgggaggtattcaagttgaggccaggaaatcagaattatggaaaggctccctgcctggagaagatgcctccaactgtaccatca

SEQ ID NO: 6236 - DNA, 110 bp, synthetic construct
  source 1..110: mol_type = other DNA
gagtttaagtcctgtcaagttagaggggtttgagaagcaccttgagctctctacagatctgctctaacaaggcacaaaaccgagcatgcattaagtccaaagtgatcagc

SEQ ID NO: 6237 - DNA, 110 bp, synthetic construct
  source 1..110: mol_type = other DNA
ggctttggcactgctgtggctcaggtcacagctgtagcgtgatttcaatccctggccccggaactgctgcatgcctcaaggaaaggtcaataaaaaaacaaaaggaagga

SEQ ID NO: 6238 - DNA, 110 bp, synthetic construct
  source 1..110: mol_type = other DNA
cttctcggatgttgaagctgctctttctgcctacgtatatcgaattgaaaggagagcgtgtgaaagtttccctcctgatgcagtggttttcctaatgttttatgaatcct

SEQ ID NO: 6239 - DNA, 110 bp, synthetic construct
  source 1..110: mol_type = other DNA
gcgtgtgaaagtttccctcctgatgcagtggttttcctaatgttttatgaatccttagcccttcatgtgacaaaagatgtgctgaagaagtgtgacttgctgggctttca

SEQ ID NO: 6240 - DNA, 110 bp, synthetic construct
  source 1..110: mol_type = other DNA
ctgtcacctccctccgggtgggagcgggcctcagtttactcatttgtaaagccatgtggtcagctcagttcttaagcttttctagggcggagggcaaagcgcagaggacg

SEQ ID NO: 6241 - DNA, 110 bp, synthetic construct
  source 1..110: mol_type = other DNA
gtggtcagctcagttcttaagcttttctagggcggagggcaaagcgcagaggacgttgtgaatgctttgagaattcgtgaagggactaaaacaaacatacaaaaaacaac

SEQ ID NO: 6242 - DNA, 110 bp, synthetic construct
  source 1..110: mol_type = other DNA
ccctgtaaaatttcagtcttttgacatttactgagattcactttatggcccagcctttcacctctcttactgaatgttccatttggacttgaaaagactgtgtgttctgc

SEQ ID NO: 6243 - DNA, 110 bp, synthetic construct
  source 1..110: mol_type = other DNA
tgagtatacaaccttctgggaagctaggtatgagctggcatttagcaggaacacgcagcttatgcaggacttccgttggcaagagcagagcttccctaggatcgagccag

SEQ ID NO: 6244 - DNA, 110 bp, synthetic construct
  source 1..110: mol_type = other DNA
aacttgaatgaatgaatgaaatgcttttcacatttctgtactactagagtgctgtataatgataaggatagcaagctgacattactcttaactacgtcaggtcctgttct

SEQ ID NO: 6245 - DNA, 110 bp, synthetic construct
  source 1..110: mol_type = other DNA
ttttttaaactgaaggaaataaatagaggccttgttaattctctaacttatttttcttttctttccaactttctggcttgagtgtcagcctggagtcacatgtgcagctc

SEQ ID NO: 6246 - DNA, 110 bp, synthetic construct
  source 1..110: mol_type = other DNA
cttttctttccaactttctggcttgagtgtcagcctggagtcacatgtgcagctcaaaccataaacaccagtgacataggtgaaacctgttagcccttcttgccgcaaga

SEQ ID NO: 6247 - DNA, 110 bp, synthetic construct
  source 1..110: mol_type = other DNA
agcagggcagcagcccctgagggtatagaccaggtgtgtgtattcacctgtatggtgaatattttgtaagcattgctgatccgtgactcacagctttaagaaagggttgt

SEQ ID NO: 6248 - DNA, 110 bp, synthetic construct
  source 1..110: mol_type = other DNA
tgaatattttgtaagcattgctgatccgtgactcacagctttaagaaagggttgtttttgtataaaatgacctttaaattgtgctttaaagaccccagctgttttcttag

SEQ ID NO: 6249 - DNA, 110 bp, synthetic construct
  source 1..110: mol_type = other DNA
gtgtgggggttcctctgtgagattgtttcttggacttttcacttgagcttcacgtccctcatctggtttgtgaaccagccgcctccctcggtctcactcagaaactgccc

SEQ ID NO: 6250 - DNA, 110 bp, synthetic construct
  source 1..110: mol_type = other DNA
cctccccccccagctggcacctggctctgtccactccagctctctaatccctctgtccccatgccctcagccctgccctggttcatgccccatcacctgcctctaagtca

SEQ ID NO: 6251 - DNA, 110 bp, synthetic construct
  source 1..110: mol_type = other DNA
tccccatgccctcagccctgccctggttcatgccccatcacctgcctctaagtcaccatcagcagctccctgttagcctcccagccacctcccagccctgagaaccagtg

SEQ ID NO: 6252 - DNA, 110 bp, synthetic construct
  source 1..110: mol_type = other DNA
ggagctggcacagatggggtggcctgtcttgcatctcggcctgaagccaggttcctgggtggtgccaagagttgtatggcagagcctttgggcctcaggagcatctacca

SEQ ID NO: 6253 - DNA, 110 bp, synthetic construct
  source 1..110: mol_type = other DNA
tgggtggtgccaagagttgtatggcagagcctttgggcctcaggagcatctaccaggcttacagctggcatcaagggtgacccccaggctggcatctggcccacaatcat

SEQ ID NO: 6254 - DNA, 110 bp, synthetic construct
  source 1..110: mol_type = other DNA
gggtaccccacctgtcgtgtcccttcccaaaggtgagctctggaggtggcaggcccagctgtaatctcaggtttatggtgaacagcttagtgtctggctttacctggaaa

SEQ ID NO: 6255 - DNA, 110 bp, synthetic construct
  source 1..110: mol_type = other DNA
cagctgtaatctcaggtttatggtgaacagcttagtgtctggctttacctggaaacacttgggcctctgatcctggccttgacctggtctctcctggtggcggctgcccg

SEQ ID NO: 6256 - DNA, 110 bp, synthetic construct
  source 1..110: mol_type = other DNA
tccatccatccgttggttttttcttcttaagcattgcttggtgacacctgggagggcagatgcagatataggaacctacctgccctcctccgccccccttctcatcccgc

SEQ ID NO: 6257 - DNA, 110 bp, synthetic construct
  source 1..110: mol_type = other DNA
tgaacaactaatcactgaagtgcatttaaagcgtagtaatccataccatgtttagagctgtgatgctctctttctccttgagaatcactgccctggatgagccacccagt

SEQ ID NO: 6258 - DNA, 110 bp, synthetic construct
  source 1..110: mol_type = other DNA
tgcattctgtagtgatcatcaagccttctttattttgtctgtagattgtttttcaaagttggaatcagttttgtttgttattatgaacgtgactcttattcactgcatag

SEQ ID NO: 6259 - DNA, 110 bp, synthetic construct
  source 1..110: mol_type = other DNA
aagttggaatcagttttgtttgttattatgaacgtgactcttattcactgcatagctatgttccctttcctgaacagttttttgtttgggtttctcattgagcagtctcc

SEQ ID NO: 6260 - DNA, 110 bp, synthetic construct
  source 1..110: mol_type = other DNA
ttccctcagcttgattcaagagtagcaaacgagtattttatttcatgatgaacttagctgcatcatcttaagtccttatttggtattttcactggatttttcattccaaa

SEQ ID NO: 6261 - DNA, 110 bp, synthetic construct
  source 1..110: mol_type = other DNA
agctgcatcatcttaagtccttatttggtattttcactggatttttcattccaaataaacagatggtaaatgttttcctgcagctttcatgtcttataataaatacctaa

SEQ ID NO: 6262 - DNA, 110 bp, synthetic construct
  source 1..110: mol_type = other DNA
tttgcccaaaattttgtcggaagagaaacagagtcttgcttaggccttatagtgaactataaaatgccattaaggagctcccgttgtggtacaatgagatcagcagcgtc

SEQ ID NO: 6263 - DNA, 110 bp, synthetic construct
  source 1..110: mol_type = other DNA
actataaaatgccattaaggagctcccgttgtggtacaatgagatcagcagcgtcttgggagcactggggcacgggttcaatctccggcccagcagagtgggtgaaagat

SEQ ID NO: 6264 - DNA, 110 bp, synthetic construct
  source 1..110: mol_type = other DNA
gacattcccacaggtaaattcatcacaaaaggccacaaggaactgtgaataagcgccagaatcaacatgagacacacatttgcaaagacctcctaggctgtaaagcagtt

SEQ ID NO: 6265 - DNA, 110 bp, synthetic construct
  source 1..110: mol_type = other DNA
aggcagacgtacacagcttccaagcagcgagttgcctcctgagatcaccgagctttgcaatggtctgcgactcccccagccccgggtgccttgtttgacagccctgtgct

SEQ ID NO: 6266 - DNA, 110 bp, synthetic construct
  source 1..110: mol_type = other DNA
tgcaatggtctgcgactcccccagccccgggtgccttgtttgacagccctgtgctctttgcacaggcattgaacacgcttccttgcagagcgttatctgagcataaatcg

SEQ ID NO: 6267 - DNA, 110 bp, synthetic construct
  source 1..110: mol_type = other DNA
tgttttctgtgctgttggtcagattctgtccagatcttccattaaggcatccgtggccttcaaggagcttggactctgataacttaacaggtccccttttccgtccttgc

SEQ ID NO: 6268 - DNA, 110 bp, synthetic construct
  source 1..110: mol_type = other DNA
gccttcaaggagcttggactctgataacttaacaggtccccttttccgtccttgcagcattgagagcctgtgtccacttcatgaggcccccttggccctggagccagccc

SEQ ID NO: 6269 - DNA, 110 bp, synthetic construct
  source 1..110: mol_type = other DNA
tttccgtcttctagggccagcgggaccactgacgactcgtgtcaagcctcatgctcggggccttctgtgcccgttaacgaaggaacggttacggacggtgtggtagaagt

SEQ ID NO: 6270 - DNA, 110 bp, synthetic construct
  source 1..110: mol_type = other DNA
cggggccttctgtgcccgttaacgaaggaacggttacggacggtgtggtagaagtgggatgtgggaaagccagggacgaggtagccaaaaaggcagtgacagagccgggt

SEQ ID NO: 6271 - DNA, 110 bp, synthetic construct
  source 1..110: mol_type = other DNA
caggggcagcatcttcttccctcttttttttttttttatggccacacctgtgacctagggacgttcccaggccaaggattaagtctgagccacagctgcagcaacaccag

SEQ ID NO: 6272 - DNA, 110 bp, synthetic construct
  source 1..110: mol_type = other DNA
ttatggccacacctgtgacctagggacgttcccaggccaaggattaagtctgagccacagctgcagcaacaccagatcctttcaccccctgcaccggccagggatcaaac

SEQ ID NO: 6273 - DNA, 110 bp, synthetic construct
  source 1..110: mol_type = other DNA
tgttgtggcgacacaatgatgctggactgcagtgcccagcacgaggtgccagagagcccccccgagcctctccagagcttgggctcactcacacatgtgtgcatgtgcac

SEQ ID NO: 6274 - DNA, 110 bp, synthetic construct
  source 1..110: mol_type = other DNA
ccagcacgaggtgccagagagcccccccgagcctctccagagcttgggctcactcacacatgtgtgcatgtgcactcacacatactcagacttgtgcacgcgcacacaca

SEQ ID NO: 6275 - DNA, 110 bp, synthetic construct
  source 1..110: mol_type = other DNA
cccttgttcaaggctagggggcaccctttgcatggatcttcactagatgggactgtgagcttcggcttattggctttttgtagtgatgggtgaagccttctgtttaactt

SEQ ID NO: 6276 - DNA, 110 bp, synthetic construct
  source 1..110: mol_type = other DNA
ccagcggaagcaaggtcctgctccagagcgcagggagctgttaacgccctggaataaaccaggatggaggtggatgtgaaaagcaatatatgtataacatatagctataa

SEQ ID NO: 6277 - DNA, 110 bp, synthetic construct
  source 1..110: mol_type = other DNA
aaaccaggatggaggtggatgtgaaaagcaatatatgtataacatatagctataaaaaaaactgaattcctttgctgcacatcagaaccgaacacaccacttataattta

SEQ ID NO: 6278 - DNA, 110 bp, synthetic construct; identical to SEQ ID NO: 6276
  source 1..110: mol_type = other DNA

SEQ ID NO: 6279 - DNA, 110 bp, synthetic construct; identical to SEQ ID NO: 6277
  source 1..110: mol_type = other DNA

SEQ ID NO: 6280 - DNA, 110 bp, synthetic construct
  source 1..110: mol_type = other DNA
gggttagggttagtttcagtcactgaacgcttctcagatggaggtccgtcagtacccttctggctagagaacccgcagcagtcgaccttgtccttctgtaaatgtcctgt

SEQ ID NO: 6281 - DNA, 110 bp, synthetic construct
  source 1..110: mol_type = other DNA
ccttctggctagagaacccgcagcagtcgaccttgtccttctgtaaatgtcctgtccccgaggtctgagtgaagcccgggcctggtgctggggactcgcggggggtgggg

SEQ ID NO: 6282 - DNA, 110 bp, synthetic construct
  source 1..110: mol_type = other DNA
gagacttgcctacccaagggctgtggtgtaagccaaacaactccattccgggtgaattagaaggaattgtaatttgttcagcgccttggtgacagaaatgccctttttaa

SEQ ID NO: 6283 - DNA, 110 bp, synthetic construct
  source 1..110: mol_type = other DNA
attagaaggaattgtaatttgttcagcgccttggtgacagaaatgccctttttaaacagcatcagtgggagagtaagcctgaggtgcctggtggtgagggtcttgggcag

SEQ ID NO: 6284 - DNA, 110 bp, synthetic construct
  source 1..110: mol_type = other DNA
cgcctggctgcctcccagttatgcttccaaaggatccacgctgctcgagtgcacgaggcaaccctctcccctcccccagcagccttgcttcttcccaggaacctgggccc

SEQ ID NO: 6285 - DNA, 110 bp, synthetic construct
  source 1..110: mol_type = other DNA
aagcagagaggaactgcacgacatcagtcaccttccagaaacacggaggaccgacccgtctcaagggcagcccagcagctggcagctcaggagggctcggtgggcaccca

SEQ ID NO: 6286 - DNA, 110 bp, synthetic construct
  source 1..110: mol_type = other DNA
ctggtgagtggctgctctgagccagagtgccactgctcagttctcttggaagtcgcatcgccaggcggaatcagcccttggccccggaccgccacccccacactcccact

SEQ ID NO: 6287 - DNA, 110 bp, synthetic construct
  source 1..110: mol_type = other DNA
gtaagtttaaggatacagtacgctgatgtgtaaccttatatattttgcaaaacgattaccgccttagtgtgttacacttccaccatgtttcataattttaaaagatttaa

SEQ ID NO: 6288 - DNA, 110 bp, synthetic construct
  source 1..110: mol_type = other DNA
ttaccgccttagtgtgttacacttccaccatgtttcataattttaaaagatttaaaaaaaattttggcaatgcctatggcaggcaatatttcctgggccagagattgaac

SEQ ID NO: 6289 - DNA, 110 bp, synthetic construct
  source 1..110: mol_type = other DNA
gtgcctcccatgcagacacgtgggctgcacctctgagacgggcctgaccctgtcccttctttacaaaacagaggcctggcagcggccgacccagggtctcgcagctatgg

SEQ ID NO: 6290 - DNA, 110 bp, synthetic construct
  source 1..110: mol_type = other DNA
cttctttacaaaacagaggcctggcagcggccgacccagggtctcgcagctatggcaggagccggcgctcagctgatggggagcgttggaagccaggtgaatggtcaacc

SEQ ID NO: 6291 - DNA, 110 bp, synthetic construct
  source 1..110: mol_type = other DNA
acaagggaactcctaggtcttcttttagctgcctcttctgctcacattccttggccccacttagaggcaaaggacccaggaagtaccgttttgctgggtgtttaggagga

SEQ ID NO: 6292 - DNA, 110 bp, synthetic construct
  source 1..110: mol_type = other DNA
cccacttagaggcaaaggacccaggaagtaccgttttgctgggtgtttaggaggaggaaataggttggatgaggatgtgattaataaatgccaaaaaaaaaaagagtaag

SEQ ID NO: 6293 - DNA, 110 bp, synthetic construct
  source 1..110: mol_type = other DNA
ttgctgcaaaggagggcatggctaccaattttttgctggctgcaatattcaaaaagcagcattctggaagctgcaaactttcagccccatgaacgagacattatttgaac

SEQ ID NO: 6294 - DNA, 110 bp, synthetic construct
  source 1..110: mol_type = other DNA
ccggcttgagcaccaggcggaggttttgctatttcctgggctaagacggggaggcagagggtcgaaccgggagcagggcatcacttcccttttattaagtttacggtacc

SEQ ID NO: 6295 - DNA, 110 bp, synthetic construct
  source 1..110: mol_type = other DNA
agagggtcgaaccgggagcagggcatcacttcccttttattaagtttacggtacctgggaaacacctgaagtggagagacgctaacggggcagccgggaggctgggactc

SEQ ID NO: 6296 - DNA, 110 bp, synthetic construct
  source 1..110: mol_type = other DNA
cacatttggaaatagattccaaggccgagagactcaagaatcaaactaataacccctaaagaatcatataattctggagctgaaatgcaccggagaagatggctagtcca

SEQ ID NO: 6297 - DNA, 110 bp, synthetic construct
  source 1..110: mol_type = other DNA
ctaaagaatcatataattctggagctgaaatgcaccggagaagatggctagtccaagtcccttactctaaggaagcgagactggggcaccgaggttggctggcttggtga

SEQ ID NO: 6298 - DNA, 110 bp, synthetic construct
  source 1..110: mol_type = other DNA
gtgggcacctccgactcaacaggcgtcaagtggaactgtcttctccgtctgcgcacaggcaggaggacctctgcacctttgccagtcgagctcaatcaggcgtacacctc

SEQ ID NO: 6299 - DNA, 110 bp, synthetic construct
  source 1..110: mol_type = other DNA
caggcaggaggacctctgcacctttgccagtcgagctcaatcaggcgtacacctcgcctccaggacttgacaggcttaataaatgcctgcagagtgtaaagtacagacag

SEQ ID NO: 6300 - DNA, 110 bp, synthetic construct; identical to SEQ ID NO: 6298
  source 1..110: mol_type = other DNA

SEQ ID NO: 6301 - DNA, 110 bp, synthetic construct; identical to SEQ ID NO: 6299
  source 1..110: mol_type = other DNA

SEQ ID NO: 6302 - DNA, 110 bp, synthetic construct
  source 1..110: mol_type = other DNA
ctcacttctgagataacagaagctcacctcggtcattttgccccacaccgagaatgagtgggaaagtctggtcgcacagccaagacctagggccccatggctgcagtgca

SEQ ID NO: 6303 - DNA, 110 bp, synthetic construct
  source 1..110: mol_type = other DNA
gagtgggaaagtctggtcgcacagccaagacctagggccccatggctgcagtgcatgccgctcacgagttctccccagagcagtgccaggcagtggcagcattactcaca

SEQ ID NO: 6304 - DNA, 110 bp, synthetic construct
  source 1..110: mol_type = other DNA
tctgactggaaccactgcacctactcaacggtcacatttctctggcgccttcagccaagtgtcaccctttctgagcttccacaggaaacccgttccactctccaatcacg

SEQ ID NO: 6305 - DNA, 110 bp, synthetic construct
  source 1..110: mol_type = other DNA
caagtgtcaccctttctgagcttccacaggaaacccgttccactctccaatcacgagacacgactcagcttccaaattcaattttcaaaccaactatctcaaacatttcc

SEQ ID NO: 6306 - DNA, 110 bp, synthetic construct
  source 1..110: mol_type = other DNA
catcatcagggcggcgcaatgcttaagactttgcgggttgctgcaaggattaaagtgaggcagcacacaacactggggacgctgtgagcattcaagttcattgttcaaca

SEQ ID NO: 6307 - DNA, 110 bp, synthetic construct
  source 1..110: mol_type = other DNA
ctggggaccagctcagatctccactcagagagggattcaagatgttattttgaaaataaataacaacaattcagctaaattcgaatgtgtgcctatgcagcagtaactgc

SEQ ID NO: 6308 - DNA, 110 bp, synthetic construct
  source 1..110: mol_type = other DNA
ataaataacaacaattcagctaaattcgaatgtgtgcctatgcagcagtaactgcattattgaacgcctttcctctaggtggcaagtgctaggttctttaaaattaaatg

SEQ ID NO: 6309 - DNA, 110 bp, synthetic construct
  source 1..110: mol_type = other DNA
actttgggtcccctcccccattgctggccggaagggcgtccctggaaggagccgaccagctccagcagagccagcgtttacagagaacttgctatctaccagtgcggaag

SEQ ID NO: 6310 - DNA, 110 bp, synthetic construct
  source 1..110: mol_type = other DNA
tctttccccatggaatggcctcgacgtctttgttgaaaatcagttgaccgtagaggtatgggtttatttctggactctcaaacgtattccactgaggcactgagcgctct

SEQ ID NO: 6311 - DNA, 110 bp, synthetic construct
  source 1..110: mol_type = other DNA
gtatgggtttatttctggactctcaaacgtattccactgaggcactgagcgctctatatgcagtttgcattaagtctcccaaatatcccgcatggtggaaactgccttta

SEQ ID NO: 6312 - DNA, 110 bp, synthetic construct
  source 1..110: mol_type = other DNA
cgaacgtgaaaggaccccgtcctccgggataaggcacatgcagtgcttagctcggccatggcacttgccctcggcccaggccgcggggctggcgacggtggcgatgctct

SEQ ID NO: 6313 - DNA, 110 bp, synthetic construct
  source 1..110: mol_type = other DNA
ctgcaggtgcaattcctgggtggtgccttctaagaacttgacgtgacgtggctacagtgtgtgagagtgccatgaaaactaaggggacagggccagggccagggccaggt

SEQ ID NO: 6314 - DNA, 110 bp, synthetic construct
  source 1..110: mol_type = other DNA
taaaagtatgggggaaaaaatcatgaaacgactgaacccttttgaagtcacacaccttcccctaagcacaaccagaggtgaagacactcacagacttgataaccagacca

SEQ ID NO: 6315 - DNA, 110 bp, synthetic construct
  source 1..110: mol_type = other DNA
tgggcggctttttagtatcattacgcgatgttcaactgccactcacacaacacacacggttcaaagaagctggcttctaagatgccgccggaacctttgatgcataatgc

SEQ ID NO: 6316 - DNA, 110 bp, synthetic construct
  source 1..110: mol_type = other DNA
acggttcaaagaagctggcttctaagatgccgccggaacctttgatgcataatgcaccttatttcacatgattgtttatctgaggttctcattatggaaataaataaata

SEQ ID NO: 6317 - DNA, 110 bp, synthetic construct
  source 1..110: mol_type = other DNA
acagagaagagaggcctgagtctggttgacaagccagccccaggccagtgaccagtccactccatggtccagagcccgctctcccaaaccacttctcaattaacaatgga

SEQ ID NO: 6318 - DNA, 110 bp, synthetic construct
  source 1..110: mol_type = other DNA
ttctttgccctggctgaacagtatccgtattcccccacgagcgagtcttttaacctcagccttggtgtttagacaaagacacgtattgatggttttccgcattaagtttc

SEQ ID NO: 6319 - DNA, 110 bp, synthetic construct
  source 1..110: mol_type = other DNA
cttccttactcccatctgtgatgaaagaaagggtagatcaattctcaatctaatttggtgaactggcaggctgtagctggaaagctcactctctcctccctgctttctta

SEQ ID NO: 6320 - DNA, 110 bp, synthetic construct
  source 1..110: mol_type = other DNA
tggtgaactggcaggctgtagctggaaagctcactctctcctccctgctttcttaaacaaaccctatctgcagcttgttaggctgctttctgccggtcaccttatacctg

SEQ ID NO: 6321 - DNA, 110 bp, synthetic construct
  source 1..110: mol_type = other DNA
cttccactgggacaacatcggtgagagcaaccccagcgtcaacacttgctgtacgcccaaagccttgttcattccacttccaagtaagtgaagcatctctaagttgaaga

SEQ ID NO: 6322 - DNA, 110 bp, synthetic construct
  source 1..110: mol_type = other DNA
gctacatttgtctctattacgccgcagcagttgccgtgggcacccggcagatgactcctgaatgcctctgtccgggggcagccggagcgactgacatttcaatctgggag

SEQ ID NO: 6323 - DNA, 110 bp, synthetic construct
  source 1..110: mol_type = other DNA
tcctgaatgcctctgtccgggggcagccggagcgactgacatttcaatctgggagcagccaggggctttggtgtctgcccccggcagcggcagagacgtttccagggctc

SEQ ID NO: 6324 - DNA, 110 bp, synthetic construct
  source 1..110: mol_type = other DNA
ggctgggttcagtgctgtggctgtatattgcgagtctgatccccggcctgggaactttcacatactgcgagtgtgcccccccaacaaaagagaattggactctgaggtct

SEQ ID NO: 6325 - DNA, 110 bp, synthetic construct
  source 1..110: mol_type = other DNA
tttcacatactgcgagtgtgcccccccaacaaaagagaattggactctgaggtctctgagctcccagcaagcccctccaaggcccgtctgaggtcaggccagctcccagg

SEQ ID NO: 6326 - DNA, 110 bp, synthetic construct
  source 1..110: mol_type = other DNA
accagctcctttggtttatacaaaaccatgaggctcttggcccgacgacgacgcggcatcttaggatcacctctggatccaacgcatctgaaagaggaccagcaagaatg

SEQ ID NO: 6327 - DNA, 110 bp, synthetic construct
  source 1..110: mol_type = other DNA
gcatcttaggatcacctctggatccaacgcatctgaaagaggaccagcaagaatgtttacttcgaagttcaatctcaaacagcagccaccccagagggtgtgcctgaccg

SEQ ID NO: 6328 - DNA, 110 bp, synthetic construct
  source 1..110: mol_type = other DNA
atgactcaacttcctgagcgtctgggccaaaatcaccgacaccagtgagggggaaggacaaacaggaggccggcctccagctgaacgaggagggtctgaagtgttcaccc

SEQ ID NO: 6329 - DNA, 110 bp, synthetic construct
  source 1..110: mol_type = other DNA
ggacaaacaggaggccggcctccagctgaacgaggagggtctgaagtgttcaccctgctggagagctacggagcaggtgcaaggtggcgaaaggagaaagggctctgggg

SEQ ID NO: 6330 - DNA, 110 bp, synthetic construct
  source 1..110: mol_type = other DNA
ggttaccagggctcggggtagcaggcaggacaaggagaaggctgaatctcgtctcaaaatgtccctgtctaccatttaatacgaaggttgtaaatgcagcccatctacat

SEQ ID NO: 6331 - DNA, 110 bp, synthetic construct
  source 1..110: mol_type = other DNA
aaaatgtccctgtctaccatttaatacgaaggttgtaaatgcagcccatctacatagcgtgcacgtgtcgaataaatgagtgtccactcaccttgaccacttcttcaaag

SEQ ID NO: 6332 - DNA, 110 bp, synthetic construct
  source 1..110: mol_type = other DNA
tgggttcttaacccaccgagccacaacgggaactccttagtcctattttagagatggaaagtctgtggcttgggggcctgcctgttgtctgcagctggtgtgtgtcaagg

SEQ ID NO: 6333 - DNA, 110 bp, synthetic construct
  source 1..110: mol_type = other DNA
ggaaagtctgtggcttgggggcctgcctgttgtctgcagctggtgtgtgtcaaggccaggtgcagccccggatctgagcatcagaatggtgtttccactgcacccgagtg

SEQ ID NO: 6334 - DNA, 110 bp, synthetic construct
  source 1..110: mol_type = other DNA
ctttccatcctcactgccacttcccccggcagcatttcgtgcctggattatgcaacctctctccggtggtttatctgagtctgcttttggtgtctctggtctattctcta

SEQ ID NO: 6335 - DNA, 110 bp, synthetic construct
  source 1..110: mol_type = other DNA
cctctctccggtggtttatctgagtctgcttttggtgtctctggtctattctctacacaacagccacagaggagttccctggtggcctagcagtgaagggttcagggttg

SEQ ID NO: 6336 - DNA, 110 bp, synthetic construct
  source 1..110: mol_type = other DNA
aaaaacacctaaatttcagaggtggttgctatgccacgtgaaagcacttccaaattcaaacctcagggttctaaggggctgtctcagctcgctgctcagtttcatgactc

SEQ ID NO: 6337 - DNA, 110 bp, synthetic construct
  source 1..110: mol_type = other DNA
tcaaacctcagggttctaaggggctgtctcagctcgctgctcagtttcatgactctgaaggaaacgtctgccgtggaaggtggacctgtgtctcctgaagtgggccagag

SEQ ID NO: 6338 - DNA, 110 bp, synthetic construct
  source 1..110: mol_type = other DNA
caagtgtccattttacagataaggaaactgaggctcagggaacgagagcaggtcgaggaccaaaagaggctgagctggcactcttgtgggagagggtgggactctcccct

SEQ ID NO: 6339 - DNA, 110 bp, synthetic construct
  source 1..110: mol_type = other DNA
gtcacagatgaggctcagatcccaagttgctatggctctggccaaggctggcagctccaataggacccctagcctgggaaataccacaggctgaggccctaaaaagaaaa

SEQ ID NO: 6340 - DNA, 110 bp, synthetic construct
  source 1..110: mol_type = other DNA
tccaataggacccctagcctgggaaataccacaggctgaggccctaaaaagaaaagaaagaagaatccaagagtactatagcatctagaccaagaagagaggtcaaagcc

SEQ ID NO: 6341 - DNA, 110 bp, synthetic construct
  source 1..110: mol_type = other DNA
ctaaccagacctcaggcagcgttcgccctcaccccgtctcgtcctgtttgaaagagataacaggtaccctcatcaggggtaatggacccctaagtatgccagctgctggg

SEQ ID NO: 6342 - DNA, 110 bp, synthetic construct
  source 1..110: mol_type = other DNA
gataacaggtaccctcatcaggggtaatggacccctaagtatgccagctgctgggccaggtgcgcggagaaggaagcaatgctggatgctggatcctggcacttcgactg

SEQ ID NO: 6343 - DNA, 110 bp, synthetic construct
  source 1..110: mol_type = other DNA
gggagcagtgccatcttgcgggatacccagcctctctctggggtcttctcctcccgcaggtggaaagtcacatcccttggcctgtgttcggccagctgtggtcttggcac

SEQ ID NO: 6344 - DNA, 110 bp, synthetic construct
  source 1..110: mol_type = other DNA
gcaggtggaaagtcacatcccttggcctgtgttcggccagctgtggtcttggcactgccacacgctcggtagcctgtgtgcagctggaccaaggccgggacacggaggtg

SEQ ID NO: 6345 - DNA, 110 bp, synthetic construct
  source 1..110: mol_type = other DNA
tctctccccaggcattcttcagggagctcaggtatttagaggcaaagtagggccgatgtccccaaatgccctcagatcaggtggtacaggcttagcacgcacaccaccac

SEQ ID NO: 6346 - DNA, 110 bp, synthetic construct
  source 1..110: mol_type = other DNA
agagctcgcggctccttttcacagctgcaccacaccccactgcaccgaggggcttgcatcagttcccacgttctgcaattatgggactgcgcagtgaggagatttgcggc

SEQ ID NO: 6347 - DNA, 110 bp, synthetic construct
  source 1..110: mol_type = other DNA
gcatcagttcccacgttctgcaattatgggactgcgcagtgaggagatttgcggcgtgcacgtttctaaagtttttgataagcctcttgccaaagactttgctggaactg

SEQ ID NO: 6348 - DNA, 110 bp, synthetic construct
  source 1..110: mol_type = other DNA
cctgcagcccttgaccttctctggggcacgaaggctgagaacatggacctggccctggttctcccgtcagaatccatcactgccaccggcccccgatgacggattaggac

SEQ ID NO: 6349 - DNA, 110 bp, synthetic construct
  source 1..110: mol_type = other DNA
tggttctcccgtcagaatccatcactgccaccggcccccgatgacggattaggaccggggtgagggggaggtgtgcgtgtgccgcggggagcatcggggttaaacgtggg

SEQ ID NO: 6350 - DNA, 110 bp, synthetic construct
  source 1..110: mol_type = other DNA
gccgtggccctgttggaccttccatctctgggggccaggcccccggccccaggggcacacagccagctgcttcttttggtttattcgaagccagggacttgggtggtgga

SEQ ID NO: 6351 - DNA, 110 bp, synthetic construct
  source 1..110: mol_type = other DNA
ctatcagggcaggctccgcccaactgggagctgagccaatcagattttctctccgagcatcgttaatgaaaagtggcagagacttcactgagctgtcatcttgagcggac

SEQ ID NO: 6352 - DNA, 110 bp, synthetic construct
  source 1..110: mol_type = other DNA
tgaatccatggggccccttccccaccagatccagggcccagccagcccctgactgtggtagctctgaaaccttccagaaccatctcaggctttttggctgctggtccagc

SEQ ID NO: 6353 - DNA, 110 bp, synthetic construct
  source 1..110: mol_type = other DNA
cgctgggtcctcagcacagcatccctcgcccgcctgcctgtcaacctcccgagtggcctattctagtgaattgcttctcctctatcactttgcccctcgctgaattcttt

SEQ ID NO: 6354 - DNA, 110 bp, synthetic construct
  source 1..110: mol_type = other DNA
tcccctggaagataaggcagcgagcagagcccacgccgcacctggggcgcgcaggcgcggtgcccccaccccagaagctaaccccctgcagccggacacgtctctacagc

SEQ ID NO: 6355 - DNA, 110 bp, synthetic construct; identical to SEQ ID NO: 6354
  source 1..110: mol_type = other DNA

SEQ ID NO: 6356 - DNA, 110 bp, synthetic construct
  source 1..110: mol_type = other DNA
acaatgggaactccagatggtgccttttcttaagtagaaaaatgaattgctattcaagtccattgctactctccccttcctccgtccaccccagggtccgcctttaggag

SEQ ID NO: 6357 - DNA, 110 bp, synthetic construct
  source 1..110: mol_type = other DNA
gacgcacgtgtcggccgtgcccaagggggccgtggggatagacgagagagcacgtgatggcaggactgagcaagggccgagacggctcagctggggcttccgagcaggct

SEQ ID NO: 6358 - DNA, 110 bp, synthetic construct
  source 1..110: mol_type = other DNA
gatggcaggactgagcaagggccgagacggctcagctggggcttccgagcaggcttccaggaggaggtggctcctgaaggttgagtgggaaggaaccaggctcaggaact

SEQ ID NO: 6359 - DNA, 110 bp, synthetic construct
  source 1..110: mol_type = other DNA
caacagcccctcgctgatattcaattatctcctccccacccccacctgcaattcgattatttggcgcttgcatcaacacgtcggcggctctcctgagaacgtgggagtta

SEQ ID NO: 6360 - DNA, 110 bp, synthetic construct
  source 1..110: mol_type = other DNA
ggcttcttccccgcttatctgggtttcctcatttgcgagatggaaggagggccgtgggccgagctggaggtaggaagcacacggccgctgctcccccgcccggaccctcg

SEQ ID NO: 6361 - DNA, 110 bp, synthetic construct
  source 1..110: mol_type = other DNA
gtgaccttgggcgagtagccaggctctctgatccctgaggggctctgtgggcttgggtgtggagcttgttgagggttggaatcggactttctgggtgaagaggaggagga

SEQ ID NO: 6362 - DNA, 110 bp, synthetic construct
  source 1..110: mol_type = other DNA
ggtgtggagcttgttgagggttggaatcggactttctgggtgaagaggaggaggagggggctcgggaccgccttgccagcgggccgctactgcaaggaacctgtggtcag

SEQ ID NO: 6363 - DNA, 110 bp, synthetic construct
  source 1..110: mol_type = other DNA
ccctgcatgcaggcatacgcgtgcttcccagtccgtggaagctgcttgccgcgcttcccgaggacaggggtgagcagtgagatggactctccccggatcccctctcccct

SEQ ID NO: 6364 - DNA, 110 bp, synthetic construct
  source 1..110: mol_type = other DNA
tcccgaggacaggggtgagcagtgagatggactctccccggatcccctctcccctggccttggccactgctgggggttgttgtggttgttggcgaggccaagggggcccg

SEQ ID NO: 6365 - DNA, 110 bp, synthetic construct
  source 1..110: mol_type = other DNA
cggagcctcggtggccagggcaggaggggagtcggagagcacagggttttgagggcggagaagctgttctgtcgcaggctcctgggggatgtgacactgcacacttgcaa

SEQ ID NO: 6366 - DNA, 110 bp, synthetic construct
  source 1..110: mol_type = other DNA
cggagaagctgttctgtcgcaggctcctgggggatgtgacactgcacacttgcaaagcccctagaacttggcagcccacgcagtgagctttaccttaacgcaagttaaaa

SEQ ID NO: 6367 - DNA, 110 bp, synthetic construct
  source 1..110: mol_type = other DNA
ccctccctgggcgctgccctgagtctggctgcccggggtggggagcggagcagggagccggggtcactgagcaggcctctcatgcatttgaagggaggacgggcttcttg

SEQ ID NO: 6368 - DNA, 110 bp, synthetic construct
  source 1..110: mol_type = other DNA
agccggggtcactgagcaggcctctcatgcatttgaagggaggacgggcttcttgtttcagtttgcacaggggctggcagagacgtgacctttccagcagtttgtgaagc

SEQ ID NO: 6369 - DNA, 110 bp, synthetic construct
  source 1..110: mol_type = other DNA
cccaaccctgcttttttaacaaacactttaccagtccctacatgatccggaatgaaattcatagacggtccagctacccgagtatcccagtgccatgggttcattagatg

SEQ ID NO: 6370 - DNA, 110 bp, synthetic construct
  source 1..110: mol_type = other DNA
aattcatagacggtccagctacccgagtatcccagtgccatgggttcattagatgccccccagattcgtgcccacccagagccttaggatgtgccctgatttgggaagag

SEQ ID NO: 6371 - DNA, 110 bp, synthetic construct; identical to SEQ ID NO: 6369
  source 1..110: mol_type = other DNA

SEQ ID NO: 6372 - DNA, 110 bp, synthetic construct; identical to SEQ ID NO: 6370
  source 1..110: mol_type = other DNA

SEQ ID NO: 6373 - DNA, 110 bp, synthetic construct
  source 1..110: mol_type = other DNA
tccataagcaggggcgggggtcatggctgctgccagcatgatggctcttttccttggaagccgagggcagctcattaggtactgggtggttgagcctctgttcatctaga

SEQ ID NO: 6374 - DNA, 110 bp, synthetic construct
  source 1..110: mol_type = other DNA
ggaagccgagggcagctcattaggtactgggtggttgagcctctgttcatctagatctcaagccctggatgcagtgccagcaagtgcttcctctcaggggaatgatgctg

SEQ ID NO: 6375 - DNA, 110 bp, synthetic construct
  source 1..110: mol_type = other DNA
gggcaggctctgaccttgcgcccttgtgttcagctgcaaggagcgggtttgtgcggtgggggtgggggggtgagtggttctagctgagtcactttttccattttaggggg

SEQ ID NO: 6376 - DNA, 110 bp, synthetic construct
  source 1..110: mol_type = other DNA
gtgggggtgggggggtgagtggttctagctgagtcactttttccattttagggggaaggaaggagtgatgggcgaggattgtggccaggtggggcctgcctgtttaatat

SEQ ID NO: 6377 - DNA, 110 bp, synthetic construct
  source 1..110: mol_type = other DNA
ctgtggagtggtgtccagaggccagctgatggccaggaaccaacttaaattcctgctaagagcagttgcctgattccctctgctctcctaggtactggatgcctgcaccc

SEQ ID NO: 6378 - DNA, 110 bp, synthetic construct
  source 1..110: mol_type = other DNA
ctaagagcagttgcctgattccctctgctctcctaggtactggatgcctgcacccaccccggctgttctgcaggttcaggggagggaagcagggggcggctgacttttag

SEQ ID NO: 6379 - DNA, 110 bp, synthetic construct
  source 1..110: mol_type = other DNA
aaaccagcagtggggctggcgtgggccgcttcaactatctcagcatggggactctctctttgcagggtttccaaggcaagactggccctccaggcccgccaggtgtggtc

SEQ ID NO: 6380 - DNA, 110 bp, synthetic construct
  source 1..110: mol_type = other DNA
ctctttgcagggtttccaaggcaagactggccctccaggcccgccaggtgtggtcggtcctcaggtgagacacagcatcccctggtgtccctggtcaccctgggtccctg

SEQ ID NO: 6381 - DNA, 110 bp, synthetic construct
  source 1..110: mol_type = other DNA
tcagtctctgtaacacagccgccaccacgtctggcacagaattgaggtttactagacacacagaagaaggaacacgtgacccatcatcaagaagggaaaagctggagttc

SEQ ID NO: 6382 - DNA, 110 bp, synthetic construct
  source 1..110: mol_type = other DNA
cacgtctggcacagaattgaggtttactagacacacagaagaaggaacacgtgacccatcatcaagaagggaaaagctggagttcccactgtggctcagtggtaatgaac

SEQ ID NO: 6383 - DNA, 110 bp, synthetic construct
  source 1..110: mol_type = other DNA
cccctgcctccacccccataccaggaggcttcctcttctttgcattgctggtggaggtattgcaggtgagctgtcaacaatatagctcagtattgatcagttatcacttt

SEQ ID NO: 6384 - DNA, 110 bp, synthetic construct
  source 1..110: mol_type = other DNA
ggtattgcaggtgagctgtcaacaatatagctcagtattgatcagttatcactttaaggttcctaagaggacgtggccctaaggatacaaaagaatgcaagtctcagtca

SEQ ID NO: 6385 - DNA, 110 bp, synthetic construct
  source 1..110: mol_type = other DNA
ttttactccctaagatggaaaggcaatcactttttacttgcaattatcgcagtgtaaggatgagaacatttaggtcagaggagctgagttctgtgttccatgccaagtgg

SEQ ID NO: 6386 - DNA, 110 bp, synthetic construct
  source 1..110: mol_type = other DNA
cttcctcatattactccctcctcctgcctctcctactttccagctctgactcctccactgtccctctcataaagacccggacatttatatcacaccacctggataatcca

SEQ ID NO: 6387 - DNA, 110 bp, synthetic construct
  source 1..110: mol_type = other DNA
caaaccacagtcaccctagcttctctgaaacaactccagcggcatccctggaacggacccactaagggcacaaaggccatacgctgtgttgtccaccaatcagacgtata

SEQ ID NO: 6388 - DNA, 110 bp, synthetic construct
  source 1..110: mol_type = other DNA
gacttataaaagtcagaaattggcaacaacccagtctttctccaatcaagcagccacgcacctcaactaagtcaaagaaggcagaggtagcatctacccatcaccatggt

SEQ ID NO: 6389 - DNA, 110 bp, synthetic construct
  source 1..110: mol_type = other DNA
gctccgtcatctggagatggaaggaccaattatcagggctgccaatctactgaaaaagaagcctctcatatgtcaaaacagagggaacggtcccaagactgtaaggaaac

SEQ ID NO: 6390 - DNA, 110 bp, synthetic construct
  source 1..110: mol_type = other DNA
tcgacaccatccttaatgaagaagagccaccacgtgcagtgaaacatgatttacatcctgggagaacattaagagcagacacagggcgctgttgtccaatagtccgtgat

SEQ ID NO: 6391 - DNA, 110 bp, synthetic construct
  source 1..110: mol_type = other DNA
acagagctgttccacaacatgtcttttaaagttcagtcctattctcattctcctagcttcggaggcttagaaatgtattccaatagctctcaccccatcttgtttggtga

SEQ ID NO: 6392 - DNA, 110 bp, synthetic construct
  source 1..110: mol_type = other DNA
gcttcggaggcttagaaatgtattccaatagctctcaccccatcttgtttggtgagagtgcctgtagttttcagctgtgtgggtgactgtcggaatgagaaccactgttc

SEQ ID NO: 6393 - DNA, 110 bp, synthetic construct
  source 1..110: mol_type = other DNA
ccgcatcctcatgggtactatgatgggctcttaagccgctgagccacaatggaaactcccagcatacagtgtttaaaaacagtagttgttaagcagattcacaaactatt

SEQ ID NO: 6394 - DNA, 110 bp, synthetic construct; identical to SEQ ID NO: 6393
  source 1..110: mol_type = other DNA

SEQ ID NO: 6395 - DNA, 110 bp, synthetic construct
  source 1..110: mol_type = other DNA
aaataaagagaaccttacttttagcaaatatgtccactggtgatccatcaggcaagagccagggccagcctttgaactgccacgcaggaccctgcacgaaaactgccaca

SEQ ID NO: 6396 - DNA, 110 bp, synthetic construct
  source 1..110: mol_type = other DNA
gagccagggccagcctttgaactgccacgcaggaccctgcacgaaaactgccacaacccggtccctgcaacagaaagagggagggaagacaggagactgagggtctcaga

SEQ ID NO: 6397 - DNA, 110 bp, synthetic construct
  source 1..110: mol_type = other DNA
ggacggcagacctacgggagtcgatcgggaagtggaagaggaggagccctcagctggacgggcgtcagaatatctgtcatgttatgaaacagtgcaccttggtaagacaa

SEQ ID NO: 6398 - DNA, 110 bp, synthetic construct
  source 1..110: mol_type = other DNA
ggacgggcgtcagaatatctgtcatgttatgaaacagtgcaccttggtaagacaatcgaaacagaatgggggagtatgaagaggagaaatgaccccaaactccttatgtc

SEQ ID NO: 6399 - DNA, 110 bp, synthetic construct
  source 1..110: mol_type = other DNA
gccgctgctcgggtgcacgcccttcttctctggccttcactgattgaagaattgcgaaaatattcttggaaaagttctaaaacacaaatggattttaataagtccactta

SEQ ID NO: 6400 - DNA, 110 bp, synthetic construct
  source 1..110: mol_type = other DNA
ttctctggccttcactgattgaagaattgcgaaaatattcttggaaaagttctaaaacacaaatggattttaataagtccacttaagactaaatagtcaaagatggtaag

SEQ ID NO: 6401 - DNA, 110 bp, synthetic construct
  source 1..110: mol_type = other DNA
ttccagaggctgagtcacagagagaaggtaggagaaggggagggagctggaggaagactctttttacctttccagatgagagaacactgaggaggaagctctggagagtt

SEQ ID NO: 6402 - DNA, 110 bp, synthetic construct
  source 1..110: mol_type = other DNA
gactctttttacctttccagatgagagaacactgaggaggaagctctggagagttgaagacctcggagaaaggcctaagggagggagtaagatccctgagagcagcttta

SEQ ID NO: 6403 - DNA, 110 bp, synthetic construct
  source 1..110: mol_type = other DNA
aaccagcaggctctgtggttcaggactcccgacttgacacgatattttttgccaagcaggtatggtccttggatatgctgacgtctcaagagcaaccctttttatcaaca

SEQ ID NO: 6404 - DNA, 110 bp, synthetic construct
  source 1..110: mol_type = other DNA
gcaggtatggtccttggatatgctgacgtctcaagagcaaccctttttatcaacaggactctacaggactcttttctacctgtgagtctctaatgtagtggtgctccaac

SEQ ID NO: 6405 - DNA, 110 bp, synthetic construct
  source 1..110: mol_type = other DNA
ggttcgtcttccatgccctctccacgttctgaagtagatttatgttgtgcacattgtttttaatgttgatgctacgcaacgcgtctcttttgtatcattgacaacttact

SEQ ID NO: 6406 - DNA, 110 bp, synthetic construct
  source 1..110: mol_type = other DNA
gtttttaatgttgatgctacgcaacgcgtctcttttgtatcattgacaacttacttgcaggtagcaaaccactcttgctcttttaagaggaatgggaattaacagtggga

SEQ ID NO: 6407 - DNA, 110 bp, synthetic construct
  source 1..110: mol_type = other DNA
tgcaggggttccttaccagaaaccccaaactaaatgcacaactaccaatcccagaccttggtctattaaaccaggcctgttgctgcctagagggcatcgtagccttcatc

SEQ ID NO: 6408 - DNA, 110 bp, synthetic construct
  source 1..110: mol_type = other DNA
gattttgagtgctttttatagatttgactacaatgttcaactttgcttattttcttatatggtccttatgagacttctatgaggcaggcagagtatttacaatcacctca

SEQ ID NO: 6409 - DNA, 110 bp, synthetic construct; identical to SEQ ID NO: 6408
  source 1..110: mol_type = other DNA

SEQ ID NO: 6410 - DNA, 110 bp, synthetic construct
  source 1..110: mol_type = other DNA
tggagtaggaagaacagtgtgcggcccgcagaatggtgttcagatgaggagaactgagcatagatgccagtgacttgttcagctttgcccttagataaagtcgcgcgtta

SEQ ID NO: 6411 - DNA, 110 bp, synthetic construct
  source 1..110: mol_type = other DNA
tttgtcagctagctctgcaaacacactgtttattccaatgcttagcctacgaggtttctgatttccgagggcttttattatagagttccatgtttctgcttaggccagtt

SEQ ID NO: 6412 - DNA, 110 bp, synthetic construct
  source 1..110: mol_type = other DNA
tgtccgtctgcctcaggtccccttactttcgtgagctgagaccaccactgttcacctttgttcccacctaggacaggcttttccatcaagtgagtgctgagaaagtaccc

SEQ ID NO: 6413 - DNA, 110 bp, synthetic construct
  source 1..110: mol_type = other DNA
cttccagcaacagaccctccatctagatttgtttcaggcagttatggggaaggtcagcatttcttcttgagtctctggagccttgatactttcatttcagtataatctgc

SEQ ID NO: 6414 - DNA, 110 bp, synthetic construct
  source 1..110: mol_type = other DNA
agcatttcttcttgagtctctggagccttgatactttcatttcagtataatctgcatgccgaggagaccttctggggtggcaggatttgtatcgcccgttgatatcctga

SEQ ID NO: 6415 - DNA, 110 bp, synthetic construct
  source 1..110: mol_type = other DNA
tgcatttagaggatgctcatgtttccaaatacctattcttccccttctctctcataatagaatccctgcttttcagcggggtatccgaacatgcaaaatgaaggccatat

SEQ ID NO: 6416 - DNA, 110 bp, synthetic construct
  source 1..110: mol_type = other DNA
aatagaatccctgcttttcagcggggtatccgaacatgcaaaatgaaggccatattcccaaacctctttggcttagctgtggtcttatgactgagttctagtcaatgaga

SEQ ID NO: 6417 - DNA, 110 bp, synthetic construct
  source 1..110: mol_type = other DNA
cgtaacaaagctaaaatgtaagacggtacctacccaccacatcctttagcagctgcagacatttgtggaattatcctgggaaggcatttcaaaaacaaagggtggggtgg

SEQ ID NO: 6418 - DNA, 110 bp, synthetic construct
  source 1..110: mol_type = other DNA
cagacatttgtggaattatcctgggaaggcatttcaaaaacaaagggtggggtgggacctggcacccccccacacacacacactaatgggccagcaccaaccctgagacc

SEQ ID NO: 6419 - DNA, 110 bp, synthetic construct
  source 1..110: mol_type = other DNA
gctttgttttctttcaaagcacttaagactttctggaataaatttaccccttcgttagcttgcctgtttgtctctctcgtccctctagagggagcacgtgagctgagcac

SEQ ID NO: 6420 - DNA, 110 bp, synthetic construct
  source 1..110: mol_type = other DNA
gccctggaccatgaagtagagcgaacgttagtaatgactgtgtttggcaggtattgagttttcacagcaactgaaaatatcagaagagcgaaaaactctgttctgatgcc

SEQ ID NO: 6421 - DNA, 110 bp, synthetic construct
  source 1..110: mol_type = other DNA
ctctcaactgtagagcagtttcttgctgcacatccaccggtccttggtttttgtttgcagcctggatgatgacatgcaagccgctgcttttgtctaagaggaaagcaagc

SEQ ID NO: 6422 - DNA, 110 bp, synthetic construct
  source 1..110: mol_type = other DNA
tgcagcctggatgatgacatgcaagccgctgcttttgtctaagaggaaagcaagctttgaggaaaaacatgtggaatgcttcatctccaggctcattgtgaataaggcta

SEQ ID NO: 6423 - DNA, 110 bp, synthetic construct
  source 1..110: mol_type = other DNA
gaaacattcccacctcatttaatgccctatcaagattcattcttagacacacccgaagacacttagaagtcacaagagctaactgcgctgctctggccaagccaaaggct

SEQ ID NO: 6424 - DNA, 110 bp, synthetic construct
  source 1..110: mol_type = other DNA
aagacacttagaagtcacaagagctaactgcgctgctctggccaagccaaaggctcatctttgcttccctgcattctccatccttctgccgttaaagactgacggagtca

SEQ ID NO: 6425 - DNA, 110 bp, synthetic construct
  source 1..110: mol_type = other DNA
tgacagttgttcaggatggtggcagcctggggtactctctttctttcaaaataaatggctccgatgtttggaaaatgccagcatgaaagctggtggccacagttggccat

SEQ ID NO: 6426 - DNA, 110 bp, synthetic construct
  source 1..110: mol_type = other DNA
tggctccgatgtttggaaaatgccagcatgaaagctggtggccacagttggccataggctgcatgggccaggatggggcttcagtcctttacctccactggaaagtccct

SEQ ID NO: 6427 - DNA, 110 bp, synthetic construct
  source 1..110: mol_type = other DNA
gattctgcaaatgactacaggacacagttgaaaagaagccaagtaacaggcagtaagtttagacccgtgtgaggagacatcaccgggacgtaagtagggcctttgcagct

SEQ ID NO: 6428 - DNA, 110 bp, synthetic construct
  source 1..110: mol_type = other DNA
agtttagacccgtgtgaggagacatcaccgggacgtaagtagggcctttgcagctggagagtaacgtctcggaagatgtttgaacagaatgtggggagggtagttacttg

SEQ ID NO: 6429 - DNA, 110 bp, synthetic construct
  source 1..110: mol_type = other DNA
cggtatccacagccagatgctcacttgaacaattcacacagggacaggcggcgatggaccctaggaaagctcctccacatcccgggccactgagttacttagaggatgga

SEQ ID NO: 6430 - DNA, 110 bp, synthetic construct
  source 1..110: mol_type = other DNA
ggaccctaggaaagctcctccacatcccgggccactgagttacttagaggatggagagtggagatacggagaatgatgagttgacctgaagtgtctgggtttatttctgg

SEQ ID NO: 6431 - DNA, 110 bp, synthetic construct
  source 1..110: mol_type = other DNA
gtatgctcatgtgtcaatggacacactctaggaatttagagctcagagcagaattgggaattgggctctccatgtggccctcctgatctaaccatgtgcattattgaaag

SEQ ID NO: 6432 - DNA, 110 bp, synthetic construct
  source 1..110: mol_type = other DNA
gggaattgggctctccatgtggccctcctgatctaaccatgtgcattattgaaagccgtggaaatgaatgaaattagctctatctaattatgaaattagctctatctaag

SEQ ID NO: 6433 - DNA, 110 bp, synthetic construct
  source 1..110: mol_type = other DNA
tggtacgtgaatgcaaaactgtattgtggtttcccacctgctccctcatctccagaaatgcgaattgtctgttagaccaaattctagctgaactttggttcccagtagct

SEQ ID NO: 6434 - DNA, 110 bp, synthetic construct
  source 1..110: mol_type = other DNA
ttcctctgcttttgaacagaacccattgtcgatggagccacacgggccctgccttgccaagcgctcctcgtcctgtacttggcggagaaaagtctgactctttgcaggac

SEQ ID NO: 6435 - DNA, 110 bp, synthetic construct
  source 1..110: mol_type = other DNA
gccaagcgctcctcgtcctgtacttggcggagaaaagtctgactctttgcaggactccattgcacagcttgagaggattgaacattatagattttaggttctatgcaagt

SEQ ID NO: 6436 - DNA, 110 bp, synthetic construct
  source 1..110: mol_type = other DNA
tcccaggggtttatggccattatctgagccatctttgcaaatatcaaagtgctaataatgcttatattcgagcagtagctggggatgttattgtcttcatttacctgcca

SEQ ID NO: 6437 - DNA, 110 bp, synthetic construct
  source 1..110: mol_type = other DNA
taatgcttatattcgagcagtagctggggatgttattgtcttcatttacctgccaaatgtgcaataaggaagctcatcttttcgttggctattcagtatgtcccttaatg

SEQ ID NO: 6438 - DNA, 110 bp, synthetic construct
  source 1..110: mol_type = other DNA
tgcagtttgtttaaccgtatatcccctgtagtggtaaagggagcaagttagcgcctttagaccttcattcactgggtgcgtgttcactgacgccagggccagtgtgccag

SEQ ID NO: 6439 - DNA, 110 bp, synthetic construct
  source 1..110: mol_type = other DNA
tttagaccttcattcactgggtgcgtgttcactgacgccagggccagtgtgccagcgcagggcctggtgcagggtgctggcttcttactttgaggttcttaatcgcagct

SEQ ID NO: 6440 - DNA, 110 bp, synthetic construct
  source 1..110: mol_type = other DNA
ccctcaggcagtgagacaggcctagcacatacctgcgggtcactgggacaggtcccctcgggatccactcccaggagggtccgttggagctcttctcccctatttgcctt

SEQ ID NO: 6441 - DNA, 110 bp, synthetic construct
  source 1..110: mol_type = other DNA
cctcgggatccactcccaggagggtccgttggagctcttctcccctatttgccttccgtgaaggctgctcttaaaccctccaactgattttctccccctcgtcaggtaat

SEQ ID NO: 6442 - DNA, 110 bp, synthetic construct
  source 1..110: mol_type = other DNA
tctaaacccctttccattcctgccttcacccactcaatacctgccgctaaatgaaatttcttagggccaagtgacaacaataattttaaaagaaacataaatactctttt

SEQ ID NO: 6443 - DNA, 110 bp, synthetic construct
  source 1..110: mol_type = other DNA
tcacccactcaatacctgccgctaaatgaaatttcttagggccaagtgacaacaataattttaaaagaaacataaatactcttttcatacactagattatttactgaata

SEQ ID NO: 6444 - DNA, 110 bp, synthetic construct
  source 1..110: mol_type = other DNA
tcagtgctggttttcgttgttcacatcatcccctcttggttcaaattgcggctgcgtcacagatctttaatctggccaccagtagagagcaaagagagcagcagattctg

SEQ ID NO: 6445 - DNA, 110 bp, synthetic construct
  source 1..110: mol_type = other DNA
gagataccctgcagtacatagaatagacaggtaacagagatctactgtttagtacagggacgtttactcagtaacttacatgagaaagaatctgaaaaggaatggatatg

SEQ ID NO: 6446 - DNA, 110 bp, synthetic construct
  source 1..110: mol_type = other DNA
agagatctactgtttagtacagggacgtttactcagtaacttacatgagaaagaatctgaaaaggaatggatatgtgtgtaggtataactgatttctttggctgtaagcc

SEQ ID NO: 6447 - DNA, 110 bp, synthetic construct
  source 1..110: mol_type = other DNA
accacggcgttaaccagcacctccatccagtcttaaaacgaccatttcttttccgtgctgagaacgtgtaaaatctactctctttcacatatacactacagctgtattaa

SEQ ID NO: 6448 - DNA, 110 bp, synthetic construct
  source 1..110: mol_type = other DNA
tgctgagaacgtgtaaaatctactctctttcacatatacactacagctgtattaactgtaatcaccacgctgttgttagatgcccacgacttattgatcttctaactcca

SEQ ID NO: 6449 - DNA, 110 bp, synthetic construct
  source 1..110: mol_type = other DNA
tgtgtgaccaaatgagaagtgcacacgaagcactgctccgtgcagagacaagacggttctgtaggcaaaacacctgtgccgttgtgtgtgctggaagatgcaccagcagc

SEQ ID NO: 6450 - DNA, 110 bp, synthetic construct
  source 1..110: mol_type = other DNA
gttctgtaggcaaaacacctgtgccgttgtgtgtgctggaagatgcaccagcagcttcttattcatggcacaccatttttacttgaaagaattatagacagaaacctgaa

SEQ ID NO: 6451 - DNA, 110 bp, synthetic construct
  source 1..110: mol_type = other DNA
ccaggaactccatgggctgcagggcggcaaaaaaaaaaaaaaaaaaaaaaaaaaaaaattaggatatttaacttttatctacactttatgttgtagaatttgagtcccag

SEQ ID NO: 6452 - DNA, 110 bp, synthetic construct
  source 1..110: mol_type = other DNA
aaattaggatatttaacttttatctacactttatgttgtagaatttgagtcccagactcacctgagcatgtgaatgaatctaatcacagatcagaatcagctggaggttt

SEQ ID NO: 6453 - DNA, 110 bp, synthetic construct
  source 1..110: mol_type = other DNA
gtgctcccagttttactcaccctaagaagtttccaaattagctatcaaatgtatgcattttcaaggaacagaaagaaaaaggaattaaggaaaagggatcaaatagcaaa

SEQ ID NO: 6454 - DNA, 110 bp, synthetic construct
  source 1..110: mol_type = other DNA
atgagagaaaaaaaatcttgactttattgtagatgtttagaaaaatcccagcttcagagattctgaggctagagtgtcagccgtttgaacagactgccttcttttgtttt

SEQ ID NO: 6455 - DNA, 110 bp, synthetic construct
  source 1..110: mol_type = other DNA
agagattctgaggctagagtgtcagccgtttgaacagactgccttcttttgttttaatagtcgactcagtaagatgttgataaaagaactctggaaacggcaagataatc

SEQ ID NO: 6456 - DNA, 110 bp, synthetic construct
  source 1..110: mol_type = other DNA
ccgagaatttttgaacattgggacacctgcaactgagtcatccgagaagctgagtgaacctgaagcaggataaaggcaaaagaaatgacacctgaacacatcgttttcaa

SEQ ID NO: 6457 - DNA, 110 bp, synthetic construct
  source 1..110: mol_type = other DNA
cgaacctgaatccccatggttcctagttggattcgttcctgctgcaccacaacgggaactccaatttctgggtgtctttcattggaaatagcagcatacactactctgaa

SEQ ID NO: 6458 - DNA, 110 bp, synthetic construct; identical to SEQ ID NO: 6457
  source 1..110: mol_type = other DNA

SEQ ID NO: 6459 - DNA, 110 bp, synthetic construct
  source 1..110: mol_type = other DNA
ttttaaaggccttgtaaatagaaaaaaaaaaaaccgttaaactttcacagagcaatactgcagttatgaaagtgccattgaaacatgtctatacatgtttgaaacatgtg

SEQ ID NO: 6460 - DNA, 110 bp, synthetic construct
  source 1..110: mol_type = other DNA
cacagagcaatactgcagttatgaaagtgccattgaaacatgtctatacatgtttgaaacatgtgagctttctgctcgaaagatagattattttaaaatacattaaaagt

SEQ ID NO: 6461 - DNA, 110 bp, synthetic construct
  source 1..110: mol_type = other DNA
ctctttgcactgcttcataggagagtgtgctttgtacagccctcccagaggtattctgctgttgtcttcctcgatgcttctttgtgtggtcccggggtgagcttggggga

SEQ ID NO: 6462 - DNA, 110 bp, synthetic construct
  source 1..110: mol_type = other DNA
ctgctgttgtcttcctcgatgcttctttgtgtggtcccggggtgagcttgggggattctctgatggtctaataaaaccttcatcttcagggatctctggcagtccttcgc

SEQ ID NO: 6463 - DNA, 110 bp, synthetic construct
  source 1..110: mol_type = other DNA
tggggatccataggggttggtggagagtgactggctggtgtgatgtgtgactgacctgcctttgcagctggagtgagtctcaccactgtctagcattacctagtgtaggg

SEQ ID NO: 6464 - DNA, 110 bp, synthetic construct
  source 1..110: mol_type = other DNA
ctgcctttgcagctggagtgagtctcaccactgtctagcattacctagtgtagggctgctggggatctttcttcacacaaccacaaccacgaccgcttggagatgcatgg

SEQ ID NO: 6465 - DNA, 110 bp, synthetic construct
  source 1..110: mol_type = other DNA
ctctatgctcttacctgagagcttttgcttggggtattgactaggcttaaagctttcccatattttccagctcagttccttacatccagggggtcttagcacaagtatca

SEQ ID NO: 6466 - DNA, 110 bp, synthetic construct
  source 1..110: mol_type = other DNA
taatatttgtgtgtgggggggtgtgtgtgggtttaatgtcatctcacgtggcatagttttctttcatcaatattctttaaaaaatggactcaaattttaattattatgac

SEQ ID NO: 6467 - DNA, 110 bp, synthetic construct
  source 1..110: mol_type = other DNA
gtcacagtgagggttgtcaatccacggggcgagaaccagccgttaggatgaaattgaggagcaagttgcagctgtggggcaaggggagcaggcaaacacgtagatggtat

SEQ ID NO: 6468 - DNA, 110 bp, synthetic construct
  source 1..110: mol_type = other DNA
gcaagacataaaggagatgcatttaagaaacagaaaaaggatatttcagacacaattatggtttgctgggaaaaacgcaggcgtataactggaatcccagaaaaccacac

SEQ ID NO: 6469 - DNA, 110 bp, synthetic construct
  source 1..110: mol_type = other DNA
ttatggtttgctgggaaaaacgcaggcgtataactggaatcccagaaaaccacacttcctaggtttcattgtaatggctattgctgatgaaatgatttgtttgatttgaa

SEQ ID NO: 6470 - DNA, 110 bp, synthetic construct
  source 1..110: mol_type = other DNA
gtgaaagggtgacagacagagcttttggagtcaggatttcaaagtttgattccagcttggccgtttcttaatgatgtgtcctgggatcagcggcagttttgaacctcatt

SEQ ID NO: 6471 - DNA, 110 bp, synthetic construct
  source 1..110: mol_type = other DNA
cttggccgtttcttaatgatgtgtcctgggatcagcggcagttttgaacctcattttcctcctctttgaaaagggtgtatgataacacggttacaaaggcgtgttctcat

SEQ ID NO: 6472 - DNA, 110 bp, synthetic construct
  source 1..110: mol_type = other DNA
tttggaaaggagagaaggctttgttcatgagcaagatgctcgtgtggcatgagttgtgaagttgcatccacctaggtttcatatagtttctcaagtaagctggctaaatc

SEQ ID NO: 6473 - DNA, 110 bp, synthetic construct
  source 1..110: mol_type = other DNA
gtgaagttgcatccacctaggtttcatatagtttctcaagtaagctggctaaatcttttacaaagtggctcagaactctaggagcctaggttggaatctgctggatctgc

SEQ ID NO: 6474 - DNA, 110 bp, synthetic construct
  source 1..110: mol_type = other DNA
acagcagaactgatgagtcattattatactggtaacatttcagtatttccaaagccttcctagcttactcctctaggcccctaatatttaattgagaaagaagtgtgtaa

SEQ ID NO: 6475 - DNA, 110 bp, synthetic construct
  source 1..110: mol_type = other DNA
ttagacttaattgtcattttcaggacattacatccaaaaaaatcagcatatacattctcctcaagtgcccatggtacattctcaagaattgatcgcatactggggcacaa

SEQ ID NO: 6476 - DNA, 110 bp, synthetic construct; identical to SEQ ID NO: 6475
  source 1..110: mol_type = other DNA

SEQ ID NO: 6477 - DNA, 110 bp, synthetic construct
  source 1..110: mol_type = other DNA
atctctgataaccatgctttgtattaatagttggccctttatggggatacaaggcatatgtgtatatatacatgaattttataaaaccgtgttttttctgtttggtttta

SEQ ID NO: 6478 - DNA, 110 bp, synthetic construct; identical to SEQ ID NO: 6477
  source 1..110: mol_type = other DNA

SEQ ID NO: 6479 - DNA, 110 bp, synthetic construct
  source 1..110: mol_type = other DNA
agttcccattgtggctaagaggattaagaacctgactaacattgatgaggatgtggggttgacccctggcctcactcggtggattaaggatccagcgtttcaaacaactc

SEQ ID NO: 6480 - DNA, 110 bp, synthetic construct
  source 1..110: mol_type = other DNA
gggttgacccctggcctcactcggtggattaaggatccagcgtttcaaacaactcagttgaaattagcaacagatttgaatagaatttatctaaagggtatatgtaaatg

SEQ ID NO: 6481 - DNA, 110 bp, synthetic construct
  source 1..110: mol_type = other DNA
cagcattgctgtgcactgtggtgtaggctgcagatgtggcagggatctggcatggctgtgtctgtgttgttggccagcaggtacagttccaattcaacatctagcctggg

SEQ ID NO: 6482 - DNA, 110 bp, synthetic construct; identical to SEQ ID NO: 6481
  source 1..110: mol_type = other DNA

SEQ ID NO: 6483 - DNA, 110 bp, synthetic construct
  source 1..110: mol_type = other DNA
gcaattaaatgtggcaggcagtttatttgttcattatacatttattgaccactctgcagagttcactgttcttgttgtttgaagtaagacgatactaagataagtatctt

SEQ ID NO: 6484 - DNA, 110 bp, synthetic construct; identical to SEQ ID NO: 6483
  source 1..110: mol_type = other DNA

SEQ ID NO: 6485 - DNA, 110 bp, synthetic construct
  source 1..110: mol_type = other DNA
ttcgatccctggcctcactcattgggttagggatccagtgttgcctcaagctgtggcatgtgtttggcagatagggcttcaacccagcagtgctgtggctgtggctcagg

SEQ ID NO: 6486 - DNA, 110 bp, synthetic construct
  source 1..110: mol_type = other DNA
gcatgtgtttggcagatagggcttcaacccagcagtgctgtggctgtggctcaggacagcagctgcacctctgattcaactcctaacctgggaacttggataggccacag

SEQ ID NO: 6487 - DNA, 110 bp, synthetic construct
  source 1..110: mol_type = other DNA
caggtctgttttgactcagctcgttttccccatcactgagaaggggcagcggtgccatccatcatagtcaggtcatttttttcctctgttaaagagacaccttgtcaggt

SEQ ID NO: 6488 - DNA, 110 bp, synthetic construct
  source 1..110: mol_type = other DNA
agagatggggtgccacatcttgcaattcatttatctagtatgtgttaatctcacattcattaggataaaagagacattgcaggttttctgtctctgtgggtggctatggg

SEQ ID NO: 6489 - DNA, 110 bp, synthetic construct
  source 1..110: mol_type = other DNA
ttcattaggataaaagagacattgcaggttttctgtctctgtgggtggctatgggagacatattcctaccagttaagtggaagtggacatctacagctctagggcttcat

SEQ ID NO: 6490 - DNA, 110 bp, synthetic construct
  source 1..110: mol_type = other DNA
tacctgctttaacagggtagtataagctggattaacaaaccagaaagatagggaaggaatgccattctattaaagaggctctctttgtctgcagttccaatctaaattaa

SEQ ID NO: 6491 - DNA, 110 bp, synthetic construct
  source 1..110: mol_type = other DNA
ctcttctcaattctaacggggttggctgcacagagagggcagaccaagagattgagatcttaatcacagacttgatccaggatttggaaatcgggaatatttctaatttg

SEQ ID NO: 6492 - DNA, 110 bp, synthetic construct
  source 1..110: mol_type = other DNA
aagagattgagatcttaatcacagacttgatccaggatttggaaatcgggaatatttctaatttggtgtccattccccaaagttaaggcaggactacaccctgtttcagc

SEQ ID NO: 6493 - DNA, 110 bp, synthetic construct
  source 1..110: mol_type = other DNA
taaaacataaataaatggtaagagagaaggattgtgtctgctttttccatactttttttttttcccctagcaccacttgtgtctgtttgggagctgtttaaaaataactt

SEQ ID NO: 6494 - DNA, 110 bp, synthetic construct
  source 1..110: mol_type = other DNA
ttttttttcccctagcaccacttgtgtctgtttgggagctgtttaaaaataacttcatttcctgttaaaagcaaactgagtgtattttattgtcttcaactaggaagaca

SEQ ID NO: 6495 - DNA, 110 bp, synthetic construct
  source 1..110: mol_type = other DNA
ttattacaaagcatgagccatagcatatacttttaatgaaccccttgataccactctgttcagtgtatgttagcagcagtattactagcatagcacctatatttaattag

SEQ ID NO: 6496 - DNA, 110 bp, synthetic construct
  source 1..110: mol_type = other DNA
tgataccactctgttcagtgtatgttagcagcagtattactagcatagcacctatatttaattagccaataaatacacagaaatgaatgataattgagtgtaaatatgaa

SEQ ID NO: 6497 - DNA, 110 bp, synthetic construct
  source 1..110: mol_type = other DNA
acaattgagtttaccacattgcccaaacaaaggggtaaagcagttgagactctttttttttcctaaaaggatctcaaagctattggagaatgtggtggctgaagaatgta

SEQ ID NO: 6498 - DNA, 110 bp, synthetic construct
  source 1..110: mol_type = other DNA
ttttttcctaaaaggatctcaaagctattggagaatgtggtggctgaagaatgtatcaatcacaagccaacactgttgggggaaaaggagtaacaatgtgtaacatgaaa

SEQ ID NO: 6499 - DNA, 110 bp, synthetic construct
  source 1..110: mol_type = other DNA
gagccacgatgggaactctctgattctctcttgaaactccaatttgtaaaaatctagaacttactactgttagagttgccactactgttagaaagacttgaaaatgtttt

SEQ ID NO: 6500 - DNA, 110 bp, synthetic construct
  source 1..110: mol_type = other DNA
ctctcttgaaactccaatttgtaaaaatctagaacttactactgttagagttgccactactgttagaaagacttgaaaatgttttatagctacatgtttaatgaacagaa

SEQ ID NO: 6501 - DNA, 110 bp, synthetic construct
  source 1..110: mol_type = other DNA
tatatttctcttctggaggattagcagagggaagttgctcccagagagtaatgcagaggtgagaggccaaattcattaaatcgtcttcagctacttagaatacttttcct

SEQ ID NO: 6502 - DNA, 110 bp, synthetic construct
  source 1..110: mol_type = other DNA
ggtaatatatagttcagggaaaagcttttccctcctttcccaagagcttcatttttttgatttagaagtaagtatcaattgcataaacgatagaggaatggatctttata

SEQ ID NO: 6503 - DNA, 110 bp, synthetic construct
  source 1..110: mol_type = other DNA
ccctactgctcactgacatgaagtgcgttaatataaacatggactctggcaatgtgttttctgtggagcatgttcacagggcaatctggaaagaaagggggctactcacc

SEQ ID NO: 6504 - DNA, 110 bp, synthetic construct
  source 1..110: mol_type = other DNA
gttttctgtggagcatgttcacagggcaatctggaaagaaagggggctactcacctcaaacgatacaacagacatgcttctgaaatcccgtcactagtggaagcagtcca

SEQ ID NO: 6505 - DNA, 110 bp, synthetic construct
  source 1..110: mol_type = other DNA
attgacgcaacaactatggagaacagatatggaggtgctttaaaaaaccaaaagtagagttaatatatgatgtagcaattccacccctggttatataaccagaaaagaca

SEQ ID NO: 6506 - DNA, 110 bp, synthetic construct; identical to SEQ ID NO: 6505
  source 1..110: mol_type = other DNA

SEQ ID NO: 6507 - DNA, 110 bp, synthetic construct
  source 1..110: mol_type = other DNA
gccctttctgatctacctatttcagatcctcctagtaaggctccacagtgacataaaccaattcccttgcaacaaatatcttcatacacatctcctactgcgtcgtcttc

SEQ ID NO: 6508 - DNA, 110 bp, synthetic construct
  source 1..110: mol_type = other DNA
aaccaattcccttgcaacaaatatcttcatacacatctcctactgcgtcgtcttctctacttggacacagactcacctgtttttcccactgctatcaaagtttttactca

SEQ ID NO: 6509 - DNA, 110 bp, synthetic construct
  source 1..110: mol_type = other DNA
gattgtgttttatcatgttctgtacaatttgagagaaaacagctggtgtggacactgcagtgacaccaactgttccaaatctgcttttatcacttacatgaatagaacca

SEQ ID NO: 6510 - DNA, 110 bp, synthetic construct
  source 1..110: mol_type = other DNA
cttggctcttgactggaggagaggagtgtgaaaatcacattctgagaagagcatgtgtgatgctgtgtctatgaaatatatagagggccacagcatggtgatgtagcttc

SEQ ID NO: 6511 - DNA, 110 bp, synthetic construct
  source 1..110: mol_type = other DNA
tgtgatgctgtgtctatgaaatatatagagggccacagcatggtgatgtagcttccttcttccgaaattctaggactggtcttcctagggtcttgaaaagtcatttcaaa

SEQ ID NO: 6512 - DNA, 110 bp, synthetic construct
  source 1..110: mol_type = other DNA
taagcatgatactgggagtgtctgtgaccttgtttctggatggcatttgaatctatagaatcagtaaaggagactgaccttctcaacccgccgaaggccttcaaagaaca

SEQ ID NO: 6513 - DNA, 110 bp, synthetic construct
  source 1..110: mol_type = other DNA
tagaatcagtaaaggagactgaccttctcaacccgccgaaggccttcaaagaacaaacaaatggagaaaggccaaatccatccctttttctgcattttactattttatag

SEQ ID NO: 6514 - DNA, 110 bp, synthetic construct
  source 1..110: mol_type = other DNA
agctgggatttgggtttgggatttggggtcggagaaggaatgggaccgtagaggaaaggaaagaagaaataaagctaatcttacccgatcgatcaggcgatcgtttgtgc

SEQ ID NO: 6515 - DNA, 110 bp, synthetic construct
  source 1..110: mol_type = other DNA
gaccaggggtaagtgtgggaaaactccccctacagggtgtcccagctccctttgaaatcaggatcccattatctatcttcataattctaaaacactcatggaaccctgga

SEQ ID NO: 6516 - DNA, 110 bp, synthetic construct
  source 1..110: mol_type = other DNA
gctttttcacatcatgccggcatgcagcaggtgctcggtaaatatgtgttgcacgaatgacattcagtgtaattctcagtttctattttctaatgtgagacactcacatc

SEQ ID NO: 6517 - DNA, 110 bp, synthetic construct
  source 1..110: mol_type = other DNA
gacctgtgaagaaccagcagtgattgaaacagaagccatgcctccaatctgaggcatttcaattttccagatggggtcttggggaaggtacagaagtcactgcagatccc

SEQ ID NO: 6518 - DNA, 110 bp, synthetic construct
  source 1..110: mol_type = other DNA
atttcaattttccagatggggtcttggggaaggtacagaagtcactgcagatccctgacttgggacagtggacataaatagcccttattccaaggtggtgatgcttgtgg

SEQ ID NO: 6519 - DNA, 110 bp, synthetic construct
  source 1..110: mol_type = other DNA
ggcatccttggacatgacatgcacactcagaagcctgcagattcctcttgattctgtctcttggacattttttttctttttcgtaaaggtgcatccgtggcatctacatg

SEQ ID NO: 6520 - DNA, 110 bp, synthetic construct
  source 1..110: mol_type = other DNA
tgcagattcctcttgattctgtctcttggacattttttttctttttcgtaaaggtgcatccgtggcatctacatggcagttcccaggccagggattgaatctgagccaca

SEQ ID NO: 6521 - DNA, 110 bp, synthetic construct
  source 1..110: mol_type = other DNA
gtaattgttagactccgcatatatataatctcatatatttgtcactgtctcactagcttcactgcatagaatgttctctagtcccatccatgctgctgcatcctctccag

SEQ ID NO: 6522 - DNA, 110 bp, synthetic construct
  source 1..110: mol_type = other DNA
gcttcactgcatagaatgttctctagtcccatccatgctgctgcatcctctccagtaatctttaactcttgaaaccgcaacaaaacagcacattagctctagagttaacc

SEQ ID NO: 6523 - DNA, 110 bp, synthetic construct; identical to SEQ ID NO: 6521
  source 1..110: mol_type = other DNA

SEQ ID NO: 6524 - DNA, 110 bp, synthetic construct; identical to SEQ ID NO: 6522
  source 1..110: mol_type = other DNA

SEQ ID NO: 6525 - DNA, 110 bp, synthetic construct
  source 1..110: mol_type = other DNA
cttccttcgtagccgtcctaataggtatgaggtgatttcccattgtggttttgattgcattcccctagtaattagtgatgtccagcatctttttttatgctccttggcca

SEQ ID NO: 6526 - DNA, 110 bp, synthetic construct
  source 1..110: mol_type = other DNA
tgcattcccctagtaattagtgatgtccagcatctttttttatgctccttggccatccttatatcttcttaggagaaatgtctattcaagtcccttgtcaattttataat

SEQ ID NO: 6527 - DNA, 110 bp, synthetic construct
  source 1..110: mol_type = other DNA
tgcctaactgaagattatagtaagctttcttctaataccaaaatctgtagaaaacaatatgaatgcagagaggctgagcttggatttagaggtaatttgcaaatgaaatc

SEQ ID NO: 6528 - DNA, 110 bp, synthetic construct; identical to SEQ ID NO: 6527
  source 1..110: mol_type = other DNA

SEQ ID NO: 6529 - DNA, 110 bp, synthetic construct
  source 1..110: mol_type = other DNA
tatattccacgttctgttctctgaagcatcaagaccatggcacagctaagctagggattcttataacatgtaaagctctttgatagtatcttctttgaaatgcttgcagc

SEQ ID NO: 6530 - DNA, 110 bp, synthetic construct
  source 1..110: mol_type = other DNA
gattcttataacatgtaaagctctttgatagtatcttctttgaaatgcttgcagcactaagcatgccacacatgcagtactgtatttagtgactgatgctcaagaaatat

SEQ ID NO: 6531 - DNA, 110 bp, synthetic construct
  source 1..110: mol_type = other DNA
aacgaacaggtgcaaatgtacatggttacttcagaaagccaccagctaaatcagtgcatctcatggttctgaaattaaaatatagccaatcagaaccttgaaatataatt

SEQ ID NO: 6532 - DNA, 110 bp, synthetic construct
  source 1..110: mol_type = other DNA
gcatctcatggttctgaaattaaaatatagccaatcagaaccttgaaatataattgcctccttttcaaacttaaatacattatgagcctcctgctagtgctgcacctggc

SEQ ID NO: 6533 - DNA, 110 bp, synthetic construct
  source 1..110: mol_type = other DNA
attttccttctttactgatcctcattctcctcagtatatatcccctctttactaaaatctttctacccttttttttttaaattcaggtgattttagtgctcttggaatcc

SEQ ID NO: 6534 - DNA, 110 bp, synthetic construct
  source 1..110: mol_type = other DNA
tctccgacacaggaatttcaaatatattcccccagcatgtgtcctgctatttcattttcttaatggtgtcctttgaagaggagatttttaaaaatcttgttgaaatcgat

SEQ ID NO: 6535 - DNA, 110 bp, synthetic construct
  source 1..110: mol_type = other DNA
attcccccagcatgtgtcctgctatttcattttcttaatggtgtcctttgaagaggagatttttaaaaatcttgttgaaatcgatttattgatgattttgttctatagtt

SEQ ID NO: 6536 - DNA, 110 bp, synthetic construct
  source 1..110: mol_type = other DNA
tggcctggcacagtgggttaaaagggtcctgtgttgaggcagctgtggcataggctgcagctgcttcttggattcaatcgctggcctgggaacttccatatgccacgggt

SEQ ID NO: 6537 - DNA, 110 bp, synthetic construct; identical to SEQ ID NO: 6536
  source 1..110: mol_type = other DNA

SEQ ID NO: 6538 - DNA, 110 bp, synthetic construct
  source 1..110: mol_type = other DNA
ccattatgcccacagggttctgatataattaaccatagatcacagctggaacaattgcaagttgcagactcttctgagtgctaaaggaacaaagtgaaaagtggagacaa

SEQ ID NO: 6539 - DNA, 110 bp, synthetic construct
  source 1..110: mol_type = other DNA
aacatttctgctacttaacatacccataaaagcatctaccagaactgcaaacatagagtctggaaaatatggattcaaaattcagcatattgtagtaacagatactattt

SEQ ID NO: 6540 - DNA, 110 bp, synthetic construct
  source 1..110: mol_type = other DNA
taacatacccataaaagcatctaccagaactgcaaacatagagtctggaaaatatggattcaaaattcagcatattgtagtaacagatactatttcatatgtctgcagta

SEQ ID NO: 6541 - DNA, 110 bp, synthetic construct
  source 1..110: mol_type = other DNA
acaggttcccagggtaggggtcaaatcattggagcagcagctgacagcctatgccgcagtcatagccacagcaacatgggagataagccatgtctgtgacctacatcaca

SEQ ID NO: 6542 - DNA, 110 bp, synthetic construct
  source 1..110: mol_type = other DNA
aggggtcaaatcattggagcagcagctgacagcctatgccgcagtcatagccacagcaacatgggagataagccatgtctgtgacctacatcacaactcacggcaatgcc

SEQ ID NO: 6543 - DNA, 110 bp, synthetic construct
  source 1..110: mol_type = other DNA
caaagtttggcaaaatgaaaataggaaagaaacatgctactgtaaataatggcaagttattactactcccagaaaattttttccatgcaaggtttctgcagaggttatac

SEQ ID NO: 6544 - DNA, 110 bp, synthetic construct
  source 1..110: mol_type = other DNA
gttattactactcccagaaaattttttccatgcaaggtttctgcagaggttatactgggacctgccagtattcaatgctacttacttttcatggacatgctgtatcaggg

SEQ ID NO: 6545 - DNA, 110 bp, synthetic construct
  source 1..110: mol_type = other DNA
aattctggcttcaggtctgtcaataaagaaattaaaaggctctttctatgactatagagacttataatagaataaggcctattcagcttcaggacgtacaagagccagta

SEQ ID NO: 6546 - DNA, 110 bp, synthetic construct
  source 1..110: mol_type = other DNA
gtgttctggccacctgccaatgccatgtgggtacttaattccatttttatttgggactccgtgacctaatcttcatagctacatcagtgataaacgaacatttcattttc

SEQ ID NO: 6547 - DNA, 110 bp, synthetic construct
  source 1..110: mol_type = other DNA
actccgtgacctaatcttcatagctacatcagtgataaacgaacatttcattttcgtaacatacactatatagtaactggtatctgcagtttggcacgttgctaattaaa

SEQ ID NO: 6548 - DNA, 110 bp, synthetic construct
  source 1..110: mol_type = other DNA
caaggtgtgtacacattctgtggcgctccgaggttggggtggcttagcatccactggcagtgtccacgagctccttgtggatgtcacttcacctgctttaggggccatgt

SEQ ID NO: 6549 - DNA, 110 bp, synthetic construct
  source 1..110: mol_type = other DNA
tttcattctcctccttgagtcgaagttctttttatggttctcacatagagccatttattgttttgcttttgaaatgttaaatgagacacatcttatctccggtttctagc

SEQ ID NO: 6550 - DNA, 110 bp, synthetic construct
  source 1..110: mol_type = other DNA
tattgttttgcttttgaaatgttaaatgagacacatcttatctccggtttctagctctaactctccttgtccacaaactgacttaaagtgtaatgtcacaggtagaagga

SEQ ID NO: 6551 - DNA, 110 bp, synthetic construct
  source 1..110: mol_type = other DNA
taactcagtctgtattccctgtctcctcactggaggatgagagccagggctgaatgtttcaagcttctgatgatggagtggtctttctgacaaccagccccatcctgaag

SEQ ID NO: 6552 - DNA, 110 bp, synthetic construct
  source 1..110: mol_type = other DNA
tccatgttgcttctattatagcaatggaatctcttaacattgccatttaatttaactgtgaaacatgaggtatagtgaacttcatccctggtgataatttacaaagggaa

SEQ ID NO: 6553 - DNA, 110 bp, synthetic construct
  source 1..110: mol_type = other DNA
ctgtgaaacatgaggtatagtgaacttcatccctggtgataatttacaaagggaaaatgtgaaaatcttcagccttgggcattgtgtagctttgaaattattattatttt

SEQ ID NO: 6554 - DNA, 110 bp, synthetic construct
  source 1..110: mol_type = other DNA
aagcacatcagaatttgctaaacttctgaatgctttttatctctgtcttcttacatttaaattgaaaagtgccaaagcccagattgattaggtttgtctctctgtacacc

SEQ ID NO: 6555 - DNA, 110 bp, synthetic construct
  source 1..110: mol_type = other DNA
tttaaattgaaaagtgccaaagcccagattgattaggtttgtctctctgtacaccagcacatgcgcacacatacacaagcactttaatactgaacatttagaaagttgtc

SEQ ID NO: 6556 - DNA, 110 bp, synthetic construct
  source 1..110: mol_type = other DNA
tacacagttgaatgaatttgttaaaacccatcacagtggacgtcactatatgtacatgtttaccctgtgttaaatagttttcaacagaaattagacatccaaggtcatga

SEQ ID NO: 6557 - DNA, 110 bp, synthetic construct
  source 1..110: mol_type = other DNA
attcttttaaaacgatacgaaatgttggataggatgcagtgaaattgaatcatttttacattgcacatgggaatggaaagtggtatagccactggaaaatagcttgatag

SEQ ID NO: 6558 - DNA, 110 bp, synthetic construct; identical to SEQ ID NO: 6557
  source 1..110: mol_type = other DNA

SEQ ID NO: 6559 - DNA, 110 bp, synthetic construct
  source 1..110: mol_type = other DNA
attctgttttacctcctattttctatggactcacactttggatgcttttaaagtgttctccagccaccaagaagtaatcttacccaggtttgcttatttttttaatgtgt

SEQ ID NO: 6560 - DNA, 110 bp, synthetic construct; identical to SEQ ID NO: 6559
  source 1..110: mol_type = other DNA

SEQ ID NO: 6561 - DNA, 110 bp, synthetic construct
  source 1..110: mol_type = other DNA
aggatagggaagggaagaagaccactttctccttcattcttgaggagatgtcagacatccatcatcagctcctcctccatgtcaggcagagttttcttgtcctacatggt

SEQ ID NO: 6562 - DNA, 110 bp, synthetic construct
  source 1..110: mol_type = other DNA
gcagtctccatcccttcttactgagacatgcaaaggcagacagaccaagaaggcagtggagcccagctacagtcaatggcctaagcttgaaagcctttttaatctcgctg

SEQ ID NO: 6563 - DNA, 110 bp, synthetic construct
  source 1..110: mol_type = other DNA
gtggagcccagctacagtcaatggcctaagcttgaaagcctttttaatctcgctgttctgactctcctcttctgctcaagatacaccaccaggacacttgtgtgtgtgtt

SEQ ID NO: 6564 - DNA, 110 bp, synthetic construct
  source 1..110: mol_type = other DNA
cttttttggtggtatcctcagtacttctaagaggtatttgatactcaacatttttcccacaaagggctgttttcccacagccttttgtaagctctcccttccaactccca

SEQ ID NO: 6565 - DNA, 110 bp, synthetic construct
  source 1..110: mol_type = other DNA
cccacaaagggctgttttcccacagccttttgtaagctctcccttccaactcccaacccaactcacccccagaaaccactgatctgcgctctatcattataaattaaaat

SEQ ID NO: 6566 - DNA, 110 bp, synthetic construct
  source 1..110: mol_type = other DNA
tttcccagtttcccttgcagcttagagctctgtttctgggtcaagacaatccacttatggtctgagctgatgctccttatttctaggtgtggtataaagaatgtgaaagc

SEQ ID NO: 6567 - DNA, 110 bp, synthetic construct
  source 1..110: mol_type = other DNA
tatggtctgagctgatgctccttatttctaggtgtggtataaagaatgtgaaagccctccatgccgtctgttcctttgccatgttatccgaaatgccattggttcaagat

SEQ ID NO: 6568 - DNA, 110 bp, synthetic construct
  source 1..110: mol_type = other DNA
aataaggcaacagagctcctaaaggacataatagaaaagttaagacttgattgacattttcaggtcactacatccaaaaaatttcagaatataccttcttctcaagtgca

SEQ ID NO: 6569 - DNA, 110 bp, synthetic construct; identical to SEQ ID NO: 6568
  source 1..110: mol_type = other DNA

SEQ ID NO: 6570 - DNA, 110 bp, synthetic construct
  source 1..110: mol_type = other DNA
acttacagggggaattacattagattaactcatcagtgaccagggaaaccagcgaggagcatgctccttactgcccctctgatgagcaatcactagctggggcctagggc

SEQ ID NO: 6571 - DNA, 110 bp, synthetic construct
  source 1..110: mol_type = other DNA
tcgctttccgagatactgctgtcagggagcagaaaattgttaatgccaaagtagagcattcgttgatgtttcgtagaatagccggttgatatctttaaaatctcctcaaa

SEQ ID NO: 6572 - DNA, 110 bp, synthetic construct
  source 1..110: mol_type = other DNA
gcattcgttgatgtttcgtagaatagccggttgatatctttaaaatctcctcaaagagaggaatatcttcaccaacaaaggagcataaagaactttggtaggaagatagg

SEQ ID NO: 6573 - DNA, 110 bp, synthetic construct
  source 1..110: mol_type = other DNA
attttgttcgaagtaattttatttaaatatgcaaattaaaaagtgtatacctctggctttgatttggtttcagtagatggagtgctcagaagagctaggagagggggtct

SEQ ID NO: 6574 - DNA, 110 bp, synthetic construct
  source 1..110: mol_type = other DNA
gctttgatttggtttcagtagatggagtgctcagaagagctaggagagggggtctctgccagatctcagggtggccagtgaaagcaacaaagcagagatgaaagccttaa

SEQ ID NO: 6575 - DNA, 110 bp, synthetic construct
  source 1..110: mol_type = other DNA
atctagcctggtaagacaagcaaagggatggctgaaagtcaaggataggtgtgtgccagagggcgtgacgcattacagtacccgaaagtcacattttcaaagacagtgtc

SEQ ID NO: 6576 - DNA, 110 bp, synthetic construct
  source 1..110: mol_type = other DNA
ccagagggcgtgacgcattacagtacccgaaagtcacattttcaaagacagtgtctccctgtatctttgagcaattacttcacctgatatttctctatccttatttatac

SEQ ID NO: 6577 - DNA, 110 bp, synthetic construct
  source 1..110: mol_type = other DNA
gaaagctaataagatggtgctcatacagaagctgctgcttctccctttcgttggccggatctttctctgggtgattgggcactgcttcagtttttctggttccactacgg

SEQ ID NO: 6578 - DNA, 110 bp, synthetic construct
  source 1..110: mol_type = other DNA
aggtaattggtgatgatgcagataaatatgggagtttttaaatattcacttcctttatctccattagggcagggtatggatagataattttctcacttaagtatataatg

SEQ ID NO: 6579 - DNA, 110 bp, synthetic construct; identical to SEQ ID NO: 6578
  source 1..110: mol_type = other DNA

SEQ ID NO: 6580 - DNA, 110 bp, synthetic construct
  source 1..110: mol_type = other DNA
gagacctgtcacagaaggacagatactgtgtgatttcactcatacaaggtatcgaatgtattcaaattcatggaaacaaagtataaaatggtgattccttgaagttgagg

SEQ ID NO: 6581 - DNA, 110 bp, synthetic construct
  source 1..110: mol_type = other DNA
atgtattcaaattcatggaaacaaagtataaaatggtgattccttgaagttgaggggaagaagaaatgggggttgttcaacagatctaaaccttcagtgatgcacgataa

SEQ ID NO: 6582 - DNA, 110 bp, synthetic construct
  source 1..110: mol_type = other DNA
ctgaaactttaacttagtaagtataaaattagtaacctctgctttttagactcataacagctaacgtgaaattgcttgaagcgtaagaaattgacaaaacgttaatgaag

SEQ ID NO: 6583 - DNA, 110 bp, synthetic construct
  source 1..110: mol_type = other DNA
aacagctaacgtgaaattgcttgaagcgtaagaaattgacaaaacgttaatgaagctttcagcattcacagcttgtcttttctgaactgaaagtcaggcttattcggtaa

SEQ ID NO: 6584 - DNA, 110 bp, synthetic construct
  source 1..110: mol_type = other DNA
tcaaccaaaaattatttactgtgtactggttttatgcttcactatgttctgggaaagaatgacccaaacatgcatggttcttctactcccaaaaatgcattggttttgct

SEQ ID NO: 6585 - DNA, 110 bp, synthetic construct
  source 1..110: mol_type = other DNA
agaatgacccaaacatgcatggttcttctactcccaaaaatgcattggttttgctaaatgggtgattgttttactcttacttcagacacaactataaacgagattacttt

SEQ ID NO: 6586 - DNA, 110 bp, synthetic construct
  source 1..110: mol_type = other DNA
cacatctccaatctgaatcaattagaagggtaggtacaattaacaaataattagagtccccactgtggcacagggggttaagaatctcgctgtggcatagatcacagtcg

SEQ ID NO: 6587 - DNA, 110 bp, synthetic construct
  source 1..110: mol_type = other DNA
gtccccactgtggcacagggggttaagaatctcgctgtggcatagatcacagtcgcagctcagatttgatccttggtccaggaacttccctatgccctgggtttagccaa

SEQ ID NO: 6588 - DNA, 110 bp, synthetic construct
  source 1..110: mol_type = other DNA
aagaaaatagcatcacacgctgagctctgtatccaggatagccacatactgcactgaataattcctgaagaaagcagaggttatacatgttagagccactctcctcttta

SEQ ID NO: 6589 - DNA, 110 bp, synthetic construct
  source 1..110: mol_type = other DNA
gaataattcctgaagaaagcagaggttatacatgttagagccactctcctctttatgaactgcatgctttggtgaaaataaaaagtcgaagtttcatgtctataaatgta

SEQ ID NO: 6590 - DNA, 110 bp, synthetic construct
  source 1..110: mol_type = other DNA
ggggagaggtaaggagaaatgcatgaaagactcacatgttctcacctgagtattttttcactcttcaggtaataattttcaattacttactactatctaatgtattcaga

SEQ ID NO: 6591 - DNA, 110 bp, synthetic construct
  source 1..110: mol_type = other DNA
gcatttatttgtcaaagtttaaacatgaaagctgagacctttaaagatattccaaacaggacgggtgtttctatgaggaatgcgcaatcagaaatgtttgcaaaagctca

SEQ ID NO: 6592 - DNA, 110 bp, synthetic construct
  source 1..110: mol_type = other DNA
acaggacgggtgtttctatgaggaatgcgcaatcagaaatgtttgcaaaagctcaaagaaagagggtaactagagatatctgttagctgtcagagtctgagctggctttc

SEQ ID NO: 6593 - DNA, 110 bp, synthetic construct
  source 1..110: mol_type = other DNA
cagcggtcttcccagtcaaaatctccagcagcaacaaaaaatccaaacaaactaacaaatgggcaaaggtcttgagcagatattctccaaagatgatatacagctgtcta

SEQ ID NO: 6594 - DNA, 110 bp, synthetic construct
  source 1..110: mol_type = other DNA
caaatgggcaaaggtcttgagcagatattctccaaagatgatatacagctgtctaatcagcacatgaaaagatgccaacagtattaagtgcattcacaatgttttgcagc

SEQ ID NO: 6595 - DNA, 110 bp, synthetic construct
  source 1..110: mol_type = other DNA
actgaggtgaatggacctcacctgctcacctaacagagggaaaaggggacaccacgcaaacataaccttctcggagcttctttgcctccttcatcatgatgtccagtgta

SEQ ID NO: 6596 - DNA, 110 bp, synthetic construct
  source 1..110: mol_type = other DNA
catccccagaactttctcagcttctaaacaaaagtttgtatcctttgatcagcatgtccacaattgtctcccctcaggccctggcaacccctatatcctctctgtttttt

SEQ ID NO: 6597 - DNA, 110 bp, synthetic construct
  source 1..110: mol_type = other DNA
ttctcaggcttgattgctgcagagcttgtgggtcagagttctgttatcctgtagggtctggtctttgtcattcactgggcatattcactgttatagttatagatcatatt

SEQ ID NO: 6598 - DNA, 110 bp, synthetic construct
  source 1..110: mol_type = other DNA
gtctggtctttgtcattcactgggcatattcactgttatagttatagatcatatttgtctctcaataagctaaaataaatcacctctatctgcatcccaatggaatcagc

SEQ ID NO: 6599 - DNA, 110 bp, synthetic construct
  source 1..110: mol_type = other DNA
ctaaagagacttaacagacacataattttttaaatggccaagatgaaactatatcgtctaggggtacactcttaagtgagtccattgaaaaggcacaagagattattagg

SEQ ID NO: 6600 - DNA, 110 bp, synthetic construct
  source 1..110: mol_type = other DNA
ttctccgtcttcgtggtaagcctgacgtcgttgatggctccttggtgtctgagatggcatacatagagtttcacctgcattcgctaatcgccacttcaactagaaagaag

SEQ ID NO: 6601 - DNA, 110 bp, synthetic construct
  source 1..110: mol_type = other DNA
ggcatacatagagtttcacctgcattcgctaatcgccacttcaactagaaagaagcgtctaaaatttacaggctcaaaatgaagctcttgatttttctacccactctgac

SEQ ID NO: 6602 - DNA, 110 bp, synthetic construct
  source 1..110: mol_type = other DNA
tcggattcgttaaccactgagccacgatgggaactctgactgaaaaacctttttaacttgtgaaatcctttagcatctcatcactaaattatttgtaggcttcgtgatcc

SEQ ID NO: 6603 - DNA, 110 bp, synthetic construct
  source 1..110: mol_type = other DNA
acttgtgaaatcctttagcatctcatcactaaattatttgtaggcttcgtgatcctttatccatttatagcatagacggattccttgttttcccagctgagctgctttgg

SEQ ID NO: 6604 - DNA, 110 bp, synthetic construct
  source 1..110: mol_type = other DNA
tagcagaattgtatattaccttaccttcttgaaaatgaccttactctccatagtccaggctgcaggtgcctaatgcagctgtcgtagatgatggacaaaagggaccaaca

SEQ ID NO: 6605 - DNA, 110 bp, synthetic construct
  source 1..110: mol_type = other DNA
tccacttgccttcttgttttctagtcccatcctcctggcttgctgggtgctctctttctccagatccacccccatccatcccgacctccttattaaggtgtgtggtacat

SEQ ID NO: 6606 - DNA, 110 bp, synthetic construct
  source 1..110: mol_type = other DNA
ttctccagatccacccccatccatcccgacctccttattaaggtgtgtggtacatgaaatacctactagcatcatatcaaggaagtgcaggtccctcgtgtctgtacata

SEQ ID NO: 6607 - DNA, 110 bp, synthetic construct
  source 1..110: mol_type = other DNA
acacacacatatcattaagcaaaccatataactattttttaaaaatcatgttgcgttaaagaacacgttggaatataaaactgaatcagggaaggttttgaggtcaaact

SEQ ID NO: 6608 - DNA, 110 bp, synthetic construct
  source 1..110: mol_type = other DNA
ttaaagaacacgttggaatataaaactgaatcagggaaggttttgaggtcaaactgtgatcgtgtgtatgagaatgtgctctgtagacattctcgttattagcattcttg

SEQ ID NO: 6609 - DNA, 110 bp, synthetic construct
  source 1..110: mol_type = other DNA
attgatacagttcctttgtttcagtgaacatttccataattcagatcagttcacagaatactggaaaaagaggaatgccatcattcaaagatgaaaagccacgttggtcc

SEQ ID NO: 6610 - DNA, 110 bp, synthetic construct
  source 1..110: mol_type = other DNA
gaatactggaaaaagaggaatgccatcattcaaagatgaaaagccacgttggtccatatggtgtttttctagtgtacttatgttttctgctcccaagtaaagcaactaaa

SEQ ID NO: 6611 - DNA, 110 bp, synthetic construct
  source 1..110: mol_type = other DNA
gtaaatatactgttataggcattctggtatccagctgaataaactcaatcacacttcagtagacagactgagtcaatatatcacaacagatggatgcatgcaggtgatca

SEQ ID NO: 6612 - DNA, 110 bp, synthetic construct
  source 1..110: mol_type = other DNA
gtatgtcatgccaccctcttctctcctgcaggctttctgctgaaaaatcagctggcaccttattaggttcccgtgtttattatttgttgcttttcattatttgtttgttt

SEQ ID NO: 6613 - DNA, 110 bp, synthetic construct; identical to SEQ ID NO: 6612
  source 1..110: mol_type = other DNA

SEQ ID NO: 6614 - DNA, 110 bp, synthetic construct
  source 1..110: mol_type = other DNA
agaatcacattagccagtctgagaagggaaaggccaagatagctgctcagaccgctggtatcaccacccggcaagggcaccacaagctgagacattcgggcaggggctgg

SEQ ID NO: 6615 - DNA, 110 bp, synthetic construct
  source 1..110: mol_type = other DNA
atataactggttgcacatatcttatgatttttccatgggaagtacatcatttatgaaatctctgtagcaaactgccaaccagggtctagaaaaatgatacatggcaatgc

SEQ ID NO: 6616 - DNA, 110 bp, synthetic construct
  source 1..110: mol_type = other DNA
aaatctctgtagcaaactgccaaccagggtctagaaaaatgatacatggcaatgctctgtcaccaacatcacaaggtatagactgaatttcattctgttccctgggatga

SEQ ID NO: 6617 - DNA, 110 bp, synthetic construct
  source 1..110: mol_type = other DNA
ttaataaaatgcctagcatatgctctagaatggggttgaaaacaatgagctaaaatgtcttatttgccctttgcatagataaccaaaaggtaccatccctaaccttctta

SEQ ID NO: 6618 - DNA, 110 bp, synthetic construct
  source 1..110: mol_type = other DNA
aatcactctgagaggggcaaattgaccatcatttctcctcttgtcccccaggagccttcctgtcccccatttcttccaacctccgtcttctaaaaggtccccagctaccc

SEQ ID NO: 6619 - DNA, 110 bp, synthetic construct
  source 1..110: mol_type = other DNA
cttcctgtcccccatttcttccaacctccgtcttctaaaaggtccccagctaccccgacctgtcctacaggcataacgcagaacttacctggttagctgtcagtccttgg

SEQ ID NO: 6620 - DNA, 110 bp, synthetic construct
  source 1..110: mol_type = other DNA
gatgatcacgattctgttccttctggtggaaactagtcttcatggcttttccgtgcagcaatcctaggggatgtgaaatctgtgggaaaacgcctttccttcactcgttc

SEQ ID NO: 6621 - DNA, 110 bp, synthetic construct
  source 1..110: mol_type = other DNA
cgaaacactacaatgaagaaggattatctaagtggattttaaaaaaggaagattcaggagttcccatcatggctcaggggtaacaaatctgcctagtatcccggaggacg

SEQ ID NO: 6622 - DNA, 110 bp, synthetic construct
  source 1..110: mol_type = other DNA
aagaaggattatctaagtggattttaaaaaaggaagattcaggagttcccatcatggctcaggggtaacaaatctgcctagtatcccggaggacgtaggtttgatccctg

SEQ ID NO: 6623 - DNA, 110 bp, synthetic construct
  source 1..110: mol_type = other DNA
caatatttaatcactacattaatgtgtcatgatatactcacatatttacagaattataactatgtttctgtcttatacacaacactcctctgattcacgtgcatgcttcc

SEQ ID NO: 6624 - DNA, 110 bp, synthetic construct
  source 1..110: mol_type = other DNA
ataactatgtttctgtcttatacacaacactcctctgattcacgtgcatgcttcctaatacaaatgtatgcattctttgccgtaaggatctatgggttgaattgctgaat

SEQ ID NO: 6625 - DNA, 110 bp, synthetic construct
  source 1..110: mol_type = other DNA
attatgggtggaaagtatataatctgcttgatgatttgcttgataaatgtatttgtctttttaatgagcttctttgttaaggtggttagaatgattaatgcgccagagta

SEQ ID NO: 6626 - DNA, 110 bp, synthetic construct
  source 1..110: mol_type = other DNA
tctttttaatgagcttctttgttaaggtggttagaatgattaatgcgccagagtacatcgtcagtaaccttgaaaaccaaaagtcaatatttgggaaaactccttacaca

SEQ ID NO: 6627 - DNA, 110 bp, synthetic construct
  source 1..110: mol_type = other DNA
tttccattagtgacgaaagccaggggcacaattataactcagttacatgcatgcagtcaattaaaatgttatcatttatccatggaaaagtcatgagcaagtacacctgt

SEQ ID NO: 6628 - DNA, 110 bp, synthetic construct
  source 1..110: mol_type = other DNA
gtcaattaaaatgttatcatttatccatggaaaagtcatgagcaagtacacctgttcctcttagtacatgtggctcttctggtcttggccagcacagcttgacttatgct

SEQ ID NO: 6629 - DNA, 110 bp, synthetic construct
  source 1..110: mol_type = other DNA
tggctgtagcaaaggccggcagctgcagctccaactcaacacctagcctaggaacttatgtatgccccaggtgcagccctaacacaaacaaacaaaaaatgtaaatttcc

SEQ ID NO: 6630 - DNA, 110 bp, synthetic construct
  source 1..110: mol_type = other DNA
ttatgtatgccccaggtgcagccctaacacaaacaaacaaaaaatgtaaatttccatcactccctgcttatagctccatttcactgggtgaaggccttgggagacccctc

SEQ ID NO: 6631 - DNA, 110 bp, synthetic construct
  source 1..110: mol_type = other DNA
cttcagaggatagatgccatcaagattaaattccttcaagagcccttctttataagcccaaaattaacatttattcttgacccgagttacattaaaacaacctctctcaa

SEQ ID NO: 6632 - DNA, 110 bp, synthetic construct
  source 1..110: mol_type = other DNA
gcccaaaattaacatttattcttgacccgagttacattaaaacaacctctctcaaaagctaaacatcctccattttttatggtgtatatctcagatttttttgagatagt

SEQ ID NO: 6633 - DNA, 110 bp, synthetic construct
  source 1..110: mol_type = other DNA
ctgctccagtatccgggaaggaattggtgcaagatggcacgccatcttccacactcaagaggcatgtgctacactttctgtatgttgttctcaacacgtacgaggccaat

SEQ ID NO: 6634 - DNA, 110 bp, synthetic construct
  source 1..110: mol_type = other DNA
caagaggcatgtgctacactttctgtatgttgttctcaacacgtacgaggccaattttagaaagctgccttgtgaccttcgatagtcacacatttactatctttactcct

SEQ ID NO: 6635 - DNA, 110 bp, synthetic construct
  source 1..110: mol_type = other DNA
ttaaaaacaatgtcgtatcacattcagattgttgaatctgattgcctataaaccggccctggaggttcactcttatttatctgacttgccttctgctcttcccaccaaac

SEQ ID NO: 6636 - DNA, 110 bp, synthetic construct
  source 1..110: mol_type = other DNA
aggagtattatatcctgattgacgtgcagtcagaaaagttaaaaagaactaaaggactttatccctagtctgggccaaaagatccagcttgggaagctgcctgtagagaa

SEQ ID NO: 6637 - DNA, 110 bp, synthetic construct
  source 1..110: mol_type = other DNA
actttatccctagtctgggccaaaagatccagcttgggaagctgcctgtagagaagcttaagggagatttattggaagcatttttttttcttttaaaactctttttaatg

SEQ ID NO: 6638 - DNA, 110 bp, synthetic construct; identical to SEQ ID NO: 6636
  source 1..110: mol_type = other DNA

SEQ ID NO: 6639 - DNA, 110 bp, synthetic construct; identical to SEQ ID NO: 6637
  source 1..110: mol_type = other DNA

SEQ ID NO: 6640 - DNA, 110 bp, synthetic construct
  source 1..110: mol_type = other DNA
ttaacactgagccacgacgggaactccagcatttcttatctcttgtattttttgatgccagccatccaaacagctgagaagtgacatctccttgtggttttgacttccac

SEQ ID NO: 6641 - DNA, 110 bp, synthetic construct
  source 1..110: mol_type = other DNA
gtcagtcccccacatccggaatgcagaaatcaggatatggatgtttggctgtacatgcttatgtgtgtctgtgtgtgtgtgtgtgtgtgtgtgtgtgtgtgtgtttgtaa

SEQ ID NO: 6642 - DNA, 110 bp, synthetic construct
  source 1..110: mol_type = other DNA
tgcttatgtgtgtctgtgtgtgtgtgtgtgtgtgtgtgtgtgtgtgtgtttgtaactctatctatttatgtatgcttatgtataaatgaaatgaatgaatgattggcagc

SEQ ID NO: 6643 - DNA, 110 bp, synthetic construct
  source 1..110: mol_type = other DNA
cacaagcattgtaaacccctgcgggaaataggtaacttccatttcccgctgataaagagatgctggcatcgctttattagctcctcaaggttaaaaacccatggtgtacc

SEQ ID NO: 6644 - DNA, 110 bp, synthetic construct
  source 1..110: mol_type = other DNA
acatggagcagagcattctcaagcaattagcttggaacaaagcaaagtgattacgaaaacacagatcctgtgccgtgggggaagaatgccaagtccttggttcagagaca

SEQ ID NO: 6645 - DNA, 110 bp, synthetic construct
  source 1..110: mol_type = other DNA
acagtcgtctgccttgcctataaagcatccagttgcagggtcagctgccgtgatagcctgcaccccacgacggtgatgaatctttggaggctgtgctagagtgtgatttc

SEQ ID NO: 6646 - DNA, 110 bp, synthetic construct
  source 1..110: mol_type = other DNA
aaacacatgcgaacattccagtccctttaaggcttcaaatcccctcctctccattaaaccaaggtaggttgagcatttccaacggattcactgtggaccacttgtaatcg

SEQ ID NO: 6647 - DNA, 110 bp, synthetic construct
  source 1..110: mol_type = other DNA
aaaccaaggtaggttgagcatttccaacggattcactgtggaccacttgtaatcggtgctttagtcaattagtcaaactgacacagccctctggaactgagttgccccac

SEQ ID NO: 6648 - DNA, 110 bp, synthetic construct
  source 1..110: mol_type = other DNA
aacgtcgcgtccatcccactccctccccctccgcagggacaagtctgcctccgcgtccatgaccagcttctgttgcgtaggcgggatcgtttgtgccgtatttggaattc

SEQ ID NO: 6649 - DNA, 110 bp, synthetic construct
  source 1..110: mol_type = other DNA
aacactcaaagctatctctcagaaatcagcatctctgcagctccaggatgcagttttgattccccccaagcccccgggtccagcacagtgggttaaaggatccagcatag

SEQ ID NO: 6650 - DNA, 110 bp, synthetic construct
  source 1..110: mol_type = other DNA
ttcgtatcaattgtgtgcactggctgagcaaattcaaatgccaaacgttctaaactaaaaatagccccccccccccacctccgggagagaaccaagttcaacatcttagt

SEQ ID NO: 6651 - DNA, 110 bp, synthetic construct
  source 1..110: mol_type = other DNA
taaaaatagccccccccccccacctccgggagagaaccaagttcaacatcttagtgactatagctttccacgctttccccacgcacacgctcggaaatagatcttgctcg

SEQ ID NO: 6652 - DNA, 110 bp, synthetic construct
  source 1..110: mol_type = other DNA
gacctacactgcagcttgcagcaagacccgttaatccaccaagtgaagccaggaaccgaactgcccccataggtgctaagtcaggtttgttactgctgagccacagcggg

SEQ ID NO: 6653 - DNA, 110 bp, synthetic construct
  source 1..110: mol_type = other DNA
ccgaactgcccccataggtgctaagtcaggtttgttactgctgagccacagcgggaactcctcctatagggatctcttcacttgtctttcgtcaagtccacaggaggcca

SEQ ID NO: 6654 - DNA, 110 bp, synthetic construct
  source 1..110: mol_type = other DNA
ggatccggtgttgccatgagccatgtagaggtcgcagatgcagctcagatccagtgtggccctggctgcatggcgtaggccccagctgcagctcggatgggaccccgagg

SEQ ID NO: 6655 - DNA, 110 bp, synthetic construct; identical to SEQ ID NO: 6654
  source 1..110: mol_type = other DNA

SEQ ID NO: 6656 - DNA, 110 bp, synthetic construct
  source 1..110: mol_type = other DNA
atacatcaaaatgatgcgttgctaaaacagctgtctgggtgtgatggaaagcaaagtgtgaccaccacacaaggccaacttctgcccagacgttgtcggcctctggaagt

SEQ ID NO: 6657 - DNA, 110 bp, synthetic construct
  source 1..110: mol_type = other DNA
gcaaagcaatgcagtggggatagggtttagcaagtcactctcttcatgggtgtctgcacagagcatcctttgagagaacatctctgtcccagtgcaaagctagcaaccta

SEQ ID NO: 6658 - DNA, 110 bp, synthetic construct
  source 1..110: mol_type = other DNA
gcacagagcatcctttgagagaacatctctgtcccagtgcaaagctagcaacctactatcatggtcacccactaagtgactacaactgaatttcactttaaaattcccgg

SEQ ID NO: 6659 - DNA, 110 bp, synthetic construct
  source 1..110: mol_type = other DNA
ctacaaagctacagtcatcaaaactgtatcatactggaacaaaaacagtggaacaggatagagagaccagtattaaactcacacacttacagtcaactaatgtatgacaa

SEQ ID NO: 6660 - DNA, 110 bp, synthetic construct
  source 1..110: mol_type = other DNA
catcaaaactgtatcatactggaacaaaaacagtggaacaggatagagagaccagtattaaactcacacacttacagtcaactaatgtatgacaaaggaggcatgaatat

SEQ ID NO: 6661 - DNA, 110 bp, synthetic construct
  source 1..110: mol_type = other DNA
gtggtcaggctcaggcatgcatatttttccacagctcctcaagtgattctactatgcatccaggattgagaaacattgctttaggcttttgtcttttttttttttttttt

SEQ ID NO: 6662 - DNA, 110 bp, synthetic construct
  source 1..110: mol_type = other DNA
ctctgccacctaatatttccaatgagacatcagctcttggcttttaaactgatatgcaccagagtcagcgtctggattcaaatcagcgagtccttttaagagatgtaaag

SEQ ID NO: 6663 - DNA, 110 bp, synthetic construct
  source 1..110: mol_type = other DNA
attaagtttgtgcgggcgggcacaggaaacgacaaatacgtaacaactgccacctattgtggtggtgagacttagacacacatgatttcagaaagagatggagaaatggg

SEQ ID NO: 6664 - DNA, 110 bp, synthetic construct
  source 1..110: mol_type = other DNA
attgtggtggtgagacttagacacacatgatttcagaaagagatggagaaatgggaaaaaaatgttcataaaaatcaagatttctgctctctgttttctgggtatccttc

SEQ ID NO: 6665 - DNA, 110 bp, synthetic construct
  source 1..110: mol_type = other DNA
agagaaagagatgataaagtaactctacctgaactgctagacttacctctgcagtacttgcagaaagaatcagccttataccactaagcccattgtccttggaagatcaa

SEQ ID NO: 6666 - DNA, 110 bp, synthetic construct
  source 1..110: mol_type = other DNA
acttgcagaaagaatcagccttataccactaagcccattgtccttggaagatcaatgtaagacaatgtatagatgagaagatccatggaaagcaagttcaagggggaaat

SEQ ID NO: 6667 - DNA, 110 bp, synthetic construct
  source 1..110: mol_type = other DNA
tttgctggtggatggtggaggattcaaatgaatcttctccagttttgaaatggggcacagaggtcagggaactctgttgagaaaacggtgttactaaagagatctgctgc

SEQ ID NO: 6668 - DNA, 110 bp, synthetic construct
  source 1..110: mol_type = other DNA
cacagaggtcagggaactctgttgagaaaacggtgttactaaagagatctgctgctctctgcactaaaccatctgctgctctaagatgcattttatctctgctgagacgt

SEQ ID NO: 6669 - DNA, 110 bp, synthetic construct
  source 1..110: mol_type = other DNA
ttctcacctgtgatcgtatgctgcctcctgtcagtggtgtcagtgtagatgagtcctttcccaacctgccagagctggtactctttaatgatgccatttggctccggagg

SEQ ID NO: 6670 - DNA, 110 bp, synthetic construct
  source 1..110: mol_type = other DNA
tcaaaagattctgaaccatatgacccccaaaagatgtagagtccttggcctgataggcactcacctctgttctatttcttagaacaggtgcttttggtgaagcgtgtttt

SEQ ID NO: 6671 - DNA, 110 bp, synthetic construct
  source 1..110: mol_type = other DNA
ttaaacactcatactgagctttgaagcaaagcaggtctctgagtttccactggtatttgatgaaagaccaactcgatattcattgcattgaggggctgtatcattttgtt

SEQ ID NO: 6672 - DNA, 110 bp, synthetic construct
  source 1..110: mol_type = other DNA
ttttggaatacaataatatttgagatgaaagtggtgtgttttctatgcattaggagcatacagctaaccaaaaaagacggcatgaccaagaaaattgacttcaatttata

SEQ ID NO: 6673 - DNA, 110 bp, synthetic construct
  source 1..110: mol_type = other DNA
gcatacagctaaccaaaaaagacggcatgaccaagaaaattgacttcaatttatacttactctcacaaatgtatgcataaagggatgcccagtgaatcttaattttactt

SEQ ID NO: 6674 - DNA, 110 bp, synthetic construct; identical to SEQ ID NO: 6672
  source 1..110: mol_type = other DNA

SEQ ID NO: 6675 - DNA, 110 bp, synthetic construct; identical to SEQ ID NO: 6673
  source 1..110: mol_type = other DNA

SEQ ID NO: 6676 - DNA, 110 bp, synthetic construct
  source 1..110: mol_type = other DNA
taaaatagcctttttcctttgccaaaacactttttactatatgtgcctttgatctacaaatagagaaaatgaataaaaaacacatgatgttggatttcaagggcaaagca

SEQ ID NO: 6677 - DNA, 110 bp, synthetic construct
  source 1..110: mol_type = other DNA
actatatgtgcctttgatctacaaatagagaaaatgaataaaaaacacatgatgttggatttcaagggcaaagcaagatctctggatactgacataatctttatggatta

SEQ ID NO: 6678 - DNA, 110 bp, synthetic construct
  source 1..110: mol_type = other DNA
aaaatagttgacattgaaatgactaacaactacattcataatttttaagctactacacaaaccaaacctagttttgaatgccgaaactcttctggcaaaatgtgtgagca

SEQ ID NO: 6679 - DNA, 110 bp, synthetic construct
  source 1..110: mol_type = other DNA
cacaaaccaaacctagttttgaatgccgaaactcttctggcaaaatgtgtgagcaaataagaaagataaagaaataataagcatacggaaaatgtttgagcctaatagga

SEQ ID NO: 6680 - DNA, 110 bp, synthetic construct
  source 1..110: mol_type = other DNA
gtgtggacacatgaatgaaccactgaagttttaggtcttagtatccttagttgttaaaagtaatagtatattatttgtaacacctctacctacaattgctatgaagagaa

SEQ ID NO: 6681 - DNA, 110 bp, synthetic construct
  source 1..110: mol_type = other DNA
aaaagtaatagtatattatttgtaacacctctacctacaattgctatgaagagaaaacaaagcaaacagccatagaagcattttataaaggagactgcgttgcacaggta

SEQ ID NO: 6682 - DNA, 110 bp, synthetic construct
  source 1..110: mol_type = other DNA
catcttaaaaaaggaaaaaaaaaaaagattgtaaatgtgcacattcttgaacccactcattcttgacatcatttcaaatccaatggtgaagggtctttctgggtatgaag

SEQ ID NO: 6683 - DNA, 110 bp, synthetic construct
  source 1..110: mol_type = other DNA
ctcattcttgacatcatttcaaatccaatggtgaagggtctttctgggtatgaagggaaatgccaggacctggtagcagccacgcatgttaacagggctggagggaaaat

SEQ ID NO: 6684 - DNA, 110 bp, synthetic construct
  source 1..110: mol_type = other DNA
cacagagctgaggcagtcacgttctctgacgcctagtttccctgctgacaaaacgcgaagggtggaaacgcagctttggcaaacatccaggggcccttaggagaactgta

SEQ ID NO: 6685 - DNA, 110 bp, synthetic construct
  source 1..110: mol_type = other DNA
tgatgcaccattcagttccaatggcctccaactttttatttctctgtgaccccctccgtggctatcaaggtaaccagaatcaaagttcccattgtggcgcagtataaaca

SEQ ID NO: 6686 - DNA, 110 bp, synthetic construct
  source 1..110: mol_type = other DNA
ctccaactttttatttctctgtgaccccctccgtggctatcaaggtaaccagaatcaaagttcccattgtggcgcagtataaacaaatctgactagtaaccatgaggttg

SEQ ID NO: 6687 - DNA, 110 bp, synthetic construct
  source 1..110: mol_type = other DNA
agaggaatttggaagacttcccagacactgcatctgccccgagcccttgcacctcggagtctaaggccggcaagggagacggcgcagacgactaaatttattaacgccgg

SEQ ID NO: 6688 - DNA, 110 bp, synthetic construct
  source 1..110: mol_type = other DNA
ggagtctaaggccggcaagggagacggcgcagacgactaaatttattaacgccggacgggccactctatctttcacggcaacaacagtaggtgatcccatcaaaaatctg

SEQ ID NO: 6689 - DNA, 110 bp, synthetic construct
  source 1..110: mol_type = other DNA
cagctcttccaagaggctttgatttttttttcccccgctttcttggcaacagcctgagattcatgactccatacatcaagtcagtagtttaacaacaaatggaattaaat

SEQ ID NO: 6690 - DNA, 110 bp, synthetic construct
  source 1..110: mol_type = other DNA
gagattcatgactccatacatcaagtcagtagtttaacaacaaatggaattaaattcaaagaagggaaactaattgaaggacagcaacaaaagtgtttggtaatgtgctt

SEQ ID NO: 6691 - DNA, 110 bp, synthetic construct
  source 1..110: mol_type = other DNA
caaaccagtgtcctcattaatactagttgggtttaaaacctgctgagccacaacaggaacaccctatattgctacttttacaggccacaatacatcttatggatcctttt

SEQ ID NO: 6692 - DNA, 110 bp, synthetic construct
  source 1..110: mol_type = other DNA
ggaacaccctatattgctacttttacaggccacaatacatcttatggatccttttgcacaatagttgctcagttaagaacacagcaaactttcatccccacaaaagcggt

SEQ ID NO: 6693 - DNA, 110 bp, synthetic construct
  source 1..110: mol_type = other DNA
ttagaagaaaaagttaacggatgcaacgcattgaccaaaacttaaattacacttctatacctactgccaagtaggctgggaaatgtggtttattctttgtgatcacatgg

SEQ ID NO: 6694 - DNA, 110 bp, synthetic construct
  source 1..110: mol_type = other DNA
tatacctactgccaagtaggctgggaaatgtggtttattctttgtgatcacatggccaaatgatactgaaatttctgctagtaatgcagaggggaaaatagataacaggg

SEQ ID NO: 6695 - DNA, 110 bp, synthetic construct
  source 1..110: mol_type = other DNA
ttagaagttcagagatggtgatactgttggtgcaatgagatcaacagtgtccctctagtggcagggacacaggctcgatccccagcctggtgcagtgggttaaggatcca

SEQ ID NO: 6696 - DNA, 110 bp, synthetic construct
  source 1..110: mol_type = other DNA
gttggtgcaatgagatcaacagtgtccctctagtggcagggacacaggctcgatccccagcctggtgcagtgggttaaggatccagcgttgccacaactatggcataagt

SEQ ID NO: 6697 - DNA, 110 bp, synthetic construct
  source 1..110: mol_type = other DNA
atttttgtatgtggtgatccctgagtagtcaattcaagcaaacttccgtgcagattatttcactgagaaattgaatgtcttggagttgaaagtttggttgttagtacttt

SEQ ID NO: 6698 - DNA, 110 bp, synthetic construct
  source 1..110: mol_type = other DNA
ccgtgcagattatttcactgagaaattgaatgtcttggagttgaaagtttggttgttagtactttaaacatatcaaataatagcattcgaaatgaaattctgttaagtag

SEQ ID NO: 6699 - DNA, 110 bp, synthetic construct
  source 1..110: mol_type = other DNA
aacactggattcctctttatactctgagggagcaagacaaggacgtgacctctctcctgacccgaagtcagaagcgtcagcaatcaagccctccacaggccgagagatgc

SEQ ID NO: 6700 - DNA, 110 bp, synthetic construct
  source 1..110: mol_type = other DNA
cctgacccgaagtcagaagcgtcagcaatcaagccctccacaggccgagagatgcagaggaaatcccatctgcatacagcccccaaactacattctgggctcgtcctcaa

SEQ ID NO: 6701 - DNA, 110 bp, synthetic construct
  source 1..110: mol_type = other DNA
acagaatttccctaagtttctgtgggcactttcaccgcaattttaagggagaactgctgacattatcaagagctacatcatgaggtcatttaaatattattttcctttag

SEQ ID NO: 6702 - DNA, 110 bp, synthetic construct
  source 1..110: mol_type = other DNA
actgggagtcccaaacaaatggcagctattatgccaaaaccatccccagcaaggagttgtccacgaaattttataatatgtaagaggatctaatatttaattaatttaag

SEQ ID NO: 6703 - DNA, 110 bp, synthetic construct
  source 1..110: mol_type = other DNA
atatgatctagcaattcaatcctgggcatatatccaagaaaaatgccaatttaaaaatatacatgcaccccaatattcattgcagcattatttacgattgccaaaagtgg

SEQ ID NO: 6704 - DNA, 110 bp, synthetic construct
  source 1..110: mol_type = other DNA
tcaatcctgggcatatatccaagaaaaatgccaatttaaaaatatacatgcaccccaatattcattgcagcattatttacgattgccaaaagtggaagcaacccaactgt

SEQ ID NO: 6705 - DNA, 110 bp, synthetic construct
  source 1..110: mol_type = other DNA
tgctttcttccagtgtttgtaagctgcccacatgcagagggctagtggggcagcacccatgcgactctcgttaatcaccaaaggaatgaaaggcaatatgatgaaaaaga

SEQ ID NO: 6706 - DNA, 110 bp, synthetic construct
  source 1..110: mol_type = other DNA
tcagggctcaatttactgtttttatttcttgttaaaaatgatggtgatgaggttgggattaacacagacacattactatatataaaacaggtaaccaataagcacttact

SEQ ID NO: 6707 - DNA, 110 bp, synthetic construct; identical to SEQ ID NO: 6706
  source 1..110: mol_type = other DNA

SEQ ID NO: 6708 - DNA, 110 bp, synthetic construct
  source 1..110: mol_type = other DNA
caggacctggaaaatccagatttgccataaacaaacatcaacctaatccagacatttccactgacggtgacaaagcctgctgcctcgctacatctttacaatcttaaata

SEQ ID NO: 6709 - DNA, 110 bp, synthetic construct
  source 1..110: mol_type = other DNA
ttccactgacggtgacaaagcctgctgcctcgctacatctttacaatcttaaatacaaacaatttctgtttggacttcgccctgtcaactagttttgaaaaagtttaaaa

SEQ ID NO: 6710 - DNA, 110 bp, synthetic construct
  source 1..110: mol_type = other DNA
agcaagtctgggcaacaccactggctcattcctgcattccccaagctctcgccaccatgctcttcctgaaaagtacatctaagagtctaaaatcattaactagatctcaa

SEQ ID NO: 6711 - DNA, 110 bp, synthetic construct
  source 1..110: mol_type = other DNA
gctggcttcctgcttcagattcgcaaatggaagtgacaaatggggacaatccaataaatgattagcttctaacagtattccaattaaagcccgaggaaggagctgaaaga

SEQ ID NO: 6712 - DNA, 110 bp, synthetic construct
  source 1..110: mol_type = other DNA
aaatgattagcttctaacagtattccaattaaagcccgaggaaggagctgaaagaactgctccttgggaggtccatcctccgtcctctcacactcaggcggcgagcgagg

SEQ ID NO: 6713 - DNA, 110 bp, synthetic construct
  source 1..110: mol_type = other DNA
aaagaaattaattgagtgttgcaactgactgttgtttagaacagagatgaagaatgaaattcttatcttctaagagggtgctttgtgtagctgttgctgttgctattgtg

SEQ ID NO: 6714 - DNA, 110 bp, synthetic construct
  source 1..110: mol_type = other DNA
gaaattcttatcttctaagagggtgctttgtgtagctgttgctgttgctattgtggatggttggaaaggaaattttgatgcctgggagcggcagggtagggtggatcttg

SEQ ID NO: 6715 - DNA, 110 bp, synthetic construct
  source 1..110: mol_type = other DNA
accaagtcctgtgtgttgggattggtggtttccttccgagaggaagacagacatagacgggaacacacagcttcccatcatcatagggagaaccggaaacaaacttctag

SEQ ID NO: 6716 - DNA, 110 bp, synthetic construct
  source 1..110: mol_type = other DNA
atcacttcatcccttcccagcacaaccgtatccctggaaagcttccaaaatccttattcacacatcagcgcatttagtcctttcacctattggtgggatccacggtgttg

SEQ ID NO: 6717 - DNA, 110 bp, synthetic construct
  source 1..110: mol_type = other DNA
ttggacccccttctttttttgccacgcccatggcatgcagatatgctgggaccagggattgaatccacgccacagtggtgacctgagccacagcagtaacaaggcaggat

SEQ ID NO: 6718 - DNA, 110 bp, synthetic construct
  source 1..110: mol_type = other DNA
ggattgaatccacgccacagtggtgacctgagccacagcagtaacaaggcaggatccttcttcacccgctgagctgccagggagctccagaccccgtgtttctttataga

SEQ ID NO: 6719 - DNA, 110 bp, synthetic construct
  source 1..110: mol_type = other DNA
cttttgttttttgtttgtgtgtgtgtgtgtttgttttgcttttttagggcggcactcagggcatatggacattcccaggccaggggtcgaatctgagctgcatctgcgac

SEQ ID NO: 6720 - DNA, 110 bp, synthetic construct; identical to SEQ ID NO: 6719
  source 1..110: mol_type = other DNA

SEQ ID NO: 6721 - DNA, 110 bp, synthetic construct
  source 1..110: mol_type = other DNA
accagaagcaagaaggacgtcaggtatgaggtggtatttgccttgggccttgaaagatgagcagaatctcagaggttggaaactggtgacacgatggagaaaaattaaaa

SEQ ID NO: 6722 - DNA, 110 bp, synthetic construct
  source 1..110: mol_type = other DNA
gatgagcagaatctcagaggttggaaactggtgacacgatggagaaaaattaaaacctttctaattctgtctacatcattagctcgttttcccccgttttgtggttcact

SEQ ID NO: 6723 - DNA, 110 bp, synthetic construct
  source 1..110: mol_type = other DNA
gatggaattaccttgtcttaatttcatgatgagcaggtggtcagaccacctagcgaactgctccgcagcttaatcaaagatggaaaggaaagagctggggatggctctac

SEQ ID NO: 6724 - DNA, 110 bp, synthetic construct
  source 1..110: mol_type = other DNA
cagaattccggtccatcccactccctccccctccctcttggcaaccacgagtcgctcatttttctttaattgactgaagtaacatttgggacgtgccagcttccctgatt

SEQ ID NO: 6725 - DNA, 110 bp, synthetic construct; identical to SEQ ID NO: 6724
  source 1..110: mol_type = other DNA

SEQ ID NO: 6726 - DNA, 110 bp, synthetic construct
  source 1..110: mol_type = other DNA
ggttaaggaactgacatagtctccgtgaaaatgtgggttcgatccctgcagccatcctcccagctactctatgcatctcaggattcaagaatcagatcacgggagttccc

SEQ ID NO: 6727 - DNA, 110 bp, synthetic construct
  source 1..110: mol_type = other DNA
ctgcagccatcctcccagctactctatgcatctcaggattcaagaatcagatcacgggagttcccactgtggtacagcagaaaagaatcagactagtatccatgaggatg

SEQ ID NO: 6728 - DNA, 110 bp, synthetic construct; identical to SEQ ID NO: 6726
  source 1..110: mol_type = other DNA

SEQ ID NO: 6729 - DNA, 110 bp, synthetic construct; identical to SEQ ID NO: 6727
  source 1..110: mol_type = other DNA

SEQ ID NO: 6730 - DNA, 110 bp, synthetic construct
  source 1..110: mol_type = other DNA
tttaaaaacctttccctgaaagccactggagagttcagggactttgagccctagctgcctggactccttgtttggagcctgcaataaacactgcattttcctcccctgca

SEQ ID NO: 6731 - DNA, 110 bp, synthetic construct
  source 1..110: mol_type = other DNA
tgcctggactccttgtttggagcctgcaataaacactgcattttcctcccctgcagcccggtgtcagtgcatgggcttcactgcacaggaaaggggaccgacatttggtt

SEQ ID NO: 6732 - DNA, 110 bp, synthetic construct
  source 1..110: mol_type = other DNA
gcaaaaataagccagagggactacttcaaaaagcttctgaagagcaaagaaaactatccaaaaaaaaaaaaaaaaatggatggagagatgcctgccagccaccatgccat

SEQ ID NO: 6733 - DNA, 110 bp, synthetic construct
  source 1..110: mol_type = other DNA
atccaaaaaaaaaaaaaaaaatggatggagagatgcctgccagccaccatgccatggggagagacccacacggagtggcactaacttgccagctagataagcggccacct

SEQ ID NO: 6734 - DNA, 110 bp, synthetic construct
  source 1..110: mol_type = other DNA
gctctcctattcataaaattcttgagctggtctgcaactcccttaagtgaggggaaaaggagtcagctccaaaaaagaaaagcgcacgatgaccaaaatgagagaaaatt

SEQ ID NO: 6735 - DNA, 110 bp, synthetic construct
  source 1..110: mol_type = other DNA
aaaggagtcagctccaaaaaagaaaagcgcacgatgaccaaaatgagagaaaattcccaaggaaaagcatgggtttcggcgacttttaaagcaatgaaacgtctctttct

SEQ ID NO: 6736 - DNA, 110 bp, synthetic construct
  source 1..110: mol_type = other DNA
catactagaatccaggtgggacccagagccagacttcccacagtcaggatgcagcaacgcccggagagctaggatgcaaatgaggcagagaaaggctcctctggccccaa

SEQ ID NO: 6737 - DNA, 110 bp, synthetic construct
  source 1..110: mol_type = other DNA
ttcaggaatttttttttttccccaagcttcttgttgaccttggttgctgtcacgcagagctaacgtccctgttcccacggattcattcgaaccctaaaagatgacagcag

SEQ ID NO: 6738 - DNA, 110 bp, synthetic construct
  source 1..110: mol_type = other DNA
gtcctccttggactccctggctgtctggaataccccctagccaaccacccaccactctctgagcttctcccctgcaccaagcgcccatctgtctccatggcaacagattc

SEQ ID NO: 6739 - DNA, 110 bp, synthetic construct
  source 1..110: mol_type = other DNA
tctctgagcttctcccctgcaccaagcgcccatctgtctccatggcaacagattctatgcgccagtctctggctcacacttccttccctaagccgcacggggtgggccag

SEQ ID NO: 6740 - DNA, 110 bp, synthetic construct
  source 1..110: mol_type = other DNA
tctcgatacatctacatgattcgagaagatgcgtgtgtttaatcagatagctgggtgtacacattatatattgatatctatagataaaacactaaccagagcattatagg

SEQ ID NO: 6741 - DNA, 110 bp, synthetic construct
  source 1..110: mol_type = other DNA
gatagctgggtgtacacattatatattgatatctatagataaaacactaaccagagcattatagggtattggctggattgtcgtataagagaaaaataagagcaaattgt

SEQ ID NO: 6742 - DNA, 110 bp, synthetic construct
  source 1..110: mol_type = other DNA
cacacacacacaaacacacacacacacacacacacattctttctctcatactatcttccatcgtgtcctatcccaagagattagatagtgtttcctatgctgtacggtag

SEQ ID NO: 6743 - DNA, 110 bp, synthetic construct
  source 1..110: mol_type = other DNA
ttccatcgtgtcctatcccaagagattagatagtgtttcctatgctgtacggtaggacctcattgcttatccaggctgaaaaaactgtaggagttcccattgtggctcag

SEQ ID NO: 6744 - DNA, 110 bp, synthetic construct
  source 1..110: mol_type = other DNA
agccatgagaccagtgtgtgcaagggtgaaggtccttagctcaatccagggaaggcctggggggcagtgtcatgggatgaaacctaggtaagaggatgcctgagtcaagt

SEQ ID NO: 6745 - DNA, 110 bp, synthetic construct
  source 1..110: mol_type = other DNA
cctggggggcagtgtcatgggatgaaacctaggtaagaggatgcctgagtcaagtcttcagacagagtggcaagactcaaagacacaaaccaacctcgtgtgatgtctgc

SEQ ID NO: 6746 - DNA, 110 bp, synthetic construct
  source 1..110: mol_type = other DNA
accattaaagccttaattagctcaaaaatgagaactcattacctcccatgtagtgtttcgaattacagccctgccacaggcctgggtctgcagatgccacttctaacgtt

SEQ ID NO: 6747 - DNA, 110 bp, synthetic construct
  source 1..110: mol_type = other DNA
tacaaagctgcagtaattggtaagaaacttttatggtggtggcaaccaaattaggccttcaggactccctctggaaccaacacgctcatttaaaagaaagagagagagaa

SEQ ID NO: 6748 - DNA, 110 bp, synthetic construct
  source 1..110: mol_type = other DNA
ccttcaggactccctctggaaccaacacgctcatttaaaagaaagagagagagaaagagagaaagaaaggaaggaaactttttaaagttagatgtcctcagtagaggcag

SEQ ID NO: 6749 - DNA, 110 bp, synthetic construct
  source 1..110: mol_type = other DNA
ccacattagttccagatgcgacaacagtaaacaaaggggccgttcttcattgtatcttgaaagtgaagatgcatttcccagaagctcctactcaactttccctcatgtcc

SEQ ID NO: 6750 - DNA, 110 bp, synthetic construct
  source 1..110: mol_type = other DNA
ggcgatcattgatgtaaaatatttgcccaagtgctgcccacagaggcagtcgccagctgttaggtattccattgactactatcatcctcgccgctttccagataagcagc

SEQ ID NO: 6751 - DNA, 110 bp, synthetic construct
  source 1..110: mol_type = other DNA
aaagtcctcatgccatgggcgcaggcctcccacccaaaagcaactataatgaccaaagtaaagattaggttgtacctattggtctggatagttcttaggccactacctgc

SEQ ID NO: 6752 - DNA, 110 bp, synthetic construct; identical to SEQ ID NO: 6751
  source 1..110: mol_type = other DNA

SEQ ID NO: 6753 - DNA, 110 bp, synthetic construct
  source 1..110: mol_type = other DNA
tgaacataacaattagaccttaagaattaggaaaaaaagctttgtgacttagttacttaatttgtcaacatcgatatcagcataatgcttggaatgacctcccacctgga

SEQ ID NO: 6754 - DNA, 110 bp, synthetic construct
  source 1..110: mol_type = other DNA
cttaatttgtcaacatcgatatcagcataatgcttggaatgacctcccacctggaactcaagaggcttttacagggcaatgcaccaaaacgagattacaattgaatgtgt

SEQ ID NO: 6755 - DNA, 110 bp, synthetic construct
  source 1..110: mol_type = other DNA
cccattctacaattagatggttgaaggaactacttccgaaatcagacaacttatccaagacacaatgggcttatgagacaaataatgagtttgttcattatatcctactt

SEQ ID NO: 6756 - DNA, 110 bp, synthetic construct
  source 1..110: mol_type = other DNA
tatgttacattttcccatttgcagcacatggacgtcttgggacaaatctcaagtgtctactgtcatggtttccaggctgcccattgaaacttggcaaatgggttctactc

SEQ ID NO: 6757 - DNA, 110 bp, synthetic construct
  source 1..110: mol_type = other DNA
tctactgtcatggtttccaggctgcccattgaaacttggcaaatgggttctactctggcctctccatcctgagagtcttgggctggaaggttaatcaccgcaaagagcag

SEQ ID NO: 6758 - DNA, 110 bp, synthetic construct
  source 1..110: mol_type = other DNA
taaaaatcaacgcagccagtaatgccaaaaaaaaagggaagctggcctcgtgatttaaaataaaaccccaactatttataaagcttgtctatatcttagtttattcctca

SEQ ID NO: 6759 - DNA, 110 bp, synthetic construct
  source 1..110: mol_type = other DNA
taagatgtagaaaaaggagaagccagggaaacaggcagagagttacaggagcaattagagggcaagaggcagactaagacaataaagagaaaccaagatgcaagttttta

SEQ ID NO: 6760 - DNA, 110 bp, synthetic construct
  source 1..110: mol_type = other DNA
tgtttaatacaatagatattcatatcctgacttgctgcatttattttttaaagagtcacctttataatcaccctacccatgtacgattgatcactctttttttatgtctc

SEQ ID NO: 6761 - DNA, 110 bp, synthetic construct
  source 1..110: mol_type = other DNA
tgtgctttttctcagtccttaagctaggtattgatggtttggtttttttgttcatccattcagctgtctgatgagggtgcacagggagctggagctgtgggcagctgtgc

SEQ ID NO: 6762 - DNA, 110 bp, synthetic construct
  source 1..110: mol_type = other DNA
ccattcagctgtctgatgagggtgcacagggagctggagctgtgggcagctgtgcgcacgtgggcacaggtgtcctcccgcgtccccaggacttccagtcactagaaatt

SEQ ID NO: 6763 - DNA, 110 bp, synthetic construct
  source 1..110: mol_type = other DNA
cttccctcagggtgagtgtcccaagaaagccttagacagagggctcagaacagaagccacggtctttttatgacctaaggccgcaagtgacatctcattacttctgctac

SEQ ID NO: 6764 - DNA, 110 bp, synthetic construct
  source 1..110: mol_type = other DNA
gccacggtctttttatgacctaaggccgcaagtgacatctcattacttctgctaccttctcttcgttcaaagtgactgagtccatccacacaagggcatgaatacgagga

SEQ ID NO: 6765 - DNA, 110 bp, synthetic construct
  source 1..110: mol_type = other DNA
atctcagtaaagttcaagggcatccaagtatgaaatagcttgtgaggaaattcgcattgctttcttaatttgattacgttggggaaaaggacactagttcaggaaagaga

SEQ ID NO: 6766 - DNA, 110 bp, synthetic construct
  source 1..110: mol_type = other DNA
gggacttttccctggagcctgaatagagctgttccttccctggagcctgaatagaggtccttccttccagggttttcttgagaaaaaaaaaattatccacagtcatttcc

SEQ ID NO: 6767 - DNA, 110 bp, synthetic construct
  source 1..110: mol_type = other DNA
ggtccttccttccagggttttcttgagaaaaaaaaaattatccacagtcatttccatggaggataggcctcctttataaaggagaaacatgtgcttctctatagtctgtt

SEQ ID NO: 6768 - DNA, 110 bp, synthetic construct
  source 1..110: mol_type = other DNA
ggagcagctgccacacatgtcttcctcattgatgccaccaccccgtttctccagcagtctgactgcagatctccgacagcacgtaggtaatggggcatttggggtttctg

SEQ ID NO: 6769 - DNA, 110 bp, synthetic construct
  source 1..110: mol_type = other DNA
agtctgactgcagatctccgacagcacgtaggtaatggggcatttggggtttctggaataaaacgagcagtgtccccataagacgtatccccggctctcctcagcattcc

SEQ ID NO: 6770 - DNA, 110 bp, synthetic construct
  source 1..110: mol_type = other DNA
agtgtcagggtggcctgagccaagttctactctgagacctgattagtgattcatgaatggcttgctatgagtgttatcaaccattacagcaaaagcatgtagctgaggtt

SEQ ID NO: 6771 - DNA, 110 bp, synthetic construct
  source 1..110: mol_type = other DNA
aatggcttgctatgagtgttatcaaccattacagcaaaagcatgtagctgaggttgaagaaaactttctataatggatgccttttttcttttcccttttttccttttgct

SEQ ID NO: 6772 - DNA, 110 bp, synthetic construct; identical to SEQ ID NO: 6770
  source 1..110: mol_type = other DNA

SEQ ID NO: 6773 - DNA, 110 bp, synthetic construct; identical to SEQ ID NO: 6771
  source 1..110: mol_type = other DNA

SEQ ID NO: 6774 - DNA, 110 bp, synthetic construct
  source 1..110: mol_type = other DNA
gtgaattgtttgctttatcattttctaagcgaggatctcaaatctatagcccatttcatttggctcaggaggaagcccttctatttgttaaggtaactatatttagttag

SEQ ID NO: 6775 - DNA, 110 bp, synthetic construct
  source 1..110: mol_type = other DNA
tcatttggctcaggaggaagcccttctatttgttaaggtaactatatttagttaggagacgataattctataactgctttcaagggcaaccttgaccgttctgataaaat

SEQ ID NO: 6776 - DNA, 110 bp, synthetic construct
  source 1..110: mol_type = other DNA
gaaggtggcttacccctgatagtaaatttatatttttagcaaagaaaatcaattaccacaagtgtgaaggctctgtcctctttctgtcatcaactctgttatttaccttt

SEQ ID NO: 6777 - DNA, 110 bp, synthetic construct
  source 1..110: mol_type = other DNA
ctgacctcttactcgtcagtgtacccagaaagtggtgtctttttattctagctaaagattgcggtaaaatcattagattgaacaccctgaattgctgcaggtgaaggaag

SEQ ID NO: 6778 - DNA, 110 bp, synthetic construct
  source 1..110: mol_type = other DNA
agattgcggtaaaatcattagattgaacaccctgaattgctgcaggtgaaggaagtttgctgttgttatggaagaagtgtccacactgctgagtggtgagagatggactt

SEQ ID NO: 6779 - DNA, 110 bp, synthetic construct
  source 1..110: mol_type = other DNA
taacacagcttgataagaagcgggagtgggaaatgatgtgcagagtaaagccagatgttgtccaagacaaagaaccagagcgcaatcttcagagaattgcaacgaggtaa

SEQ ID NO: 6780 - DNA, 110 bp, synthetic construct
  source 1..110: mol_type = other DNA
tgttgtccaagacaaagaaccagagcgcaatcttcagagaattgcaacgaggtaagatggtgcttttgccctccaacaaatgagtaactaaagctttgtagtgatctgtt

SEQ ID NO: 6781 - DNA, 110 bp, synthetic construct
  source 1..110: mol_type = other DNA
tcagaagactttaaaaattgacgtcaaacctagattttactctcacactgcaaaaaaaaaaaaaaaaaaagcattctgcttccgtgctcctcttatgaggctgaagtacg

SEQ ID NO: 6782 - DNA, 110 bp, synthetic construct
  source 1..110: mol_type = other DNA
aaaaaaaaaaaaaaagcattctgcttccgtgctcctcttatgaggctgaagtacgttactaacacagtgctgtatattcatgcgcgtatacagtcgtcgtgtacaaacag

SEQ ID NO: 6783 - DNA, 110 bp, synthetic construct; identical to SEQ ID NO: 6781
  source 1..110: mol_type = other DNA

SEQ ID NO: 6784 - DNA, 110 bp, synthetic construct; identical to SEQ ID NO: 6782
  source 1..110: mol_type = other DNA

SEQ ID NO: 6785 - DNA, 110 bp, synthetic construct
  source 1..110: mol_type = other DNA
cactgtcagaaaacatgaccatcaagaatgaaatgatgtgtccagggtcagatataattttgttaattctttggcagtcagacccggattctagaaggagggtcttgagc

SEQ ID NO: 6786 - DNA, 110 bp, synthetic construct
  source 1..110: mol_type = other DNA
gggaggatgaagggccagggctggagcccggaagactgagaaaaggcaggatctggggtttgggtcgggacttaatatagttcttggagagttaggatcgtggtttgact

SEQ ID NO: 6787 - DNA, 110 bp, synthetic construct
  source 1..110: mol_type = other DNA
ataaaggcatgaatttttaggcattttcgaaactccagtcagtctccggcccatgtctttctttcgactctccccactagccctccactctgcatcttcagctccagctt

SEQ ID NO: 6788 - DNA, 110 bp, synthetic construct
  source 1..110: mol_type = other DNA
tctttctttcgactctccccactagccctccactctgcatcttcagctccagcttctctccctagcacccctcacccatctcaaagggtcaaaagaatcattcaggagtt

SEQ ID NO: 6789 - DNA, 110 bp, synthetic construct
  source 1..110: mol_type = other DNA
aaggtagtacctcattgagtcctttcaccagttttaggcacttgggattactaatccaattttaaagatgaggagactgaggcccagagggtgactcgcccaaggctgca

SEQ ID NO: 6790 - DNA, 110 bp, synthetic construct
  source 1..110: mol_type = other DNA
ccaattttaaagatgaggagactgaggcccagagggtgactcgcccaaggctgcaaagctagtcggtggcaaaacagagctccaaccccagggctctgactccagggccg

SEQ ID NO: 6791 - DNA, 110 bp, synthetic construct
  source 1..110: mol_type = other DNA
tacgagcttggctctttttgttcattcatcagtaacgagtcagcttcagggattttcttttgagatgtttattggacctggccggttggatgggtgtcatatagacccaa

SEQ ID NO: 6792 - DNA, 110 bp, synthetic construct
  source 1..110: mol_type = other DNA
tcttttgagatgtttattggacctggccggttggatgggtgtcatatagacccaatttaattccctaagaatggtagcgtcaggagagccaagtatatccgtgacaatgc

SEQ ID NO: 6793 - DNA, 110 bp, synthetic construct
  source 1..110: mol_type = other DNA
gtaattgttgtgtgtgtgtgtttcttcctatcagtctataagctcaagacaacatgtgtcctttctttgcgacgccaaggcttggcgtggggtctgtcatatggaactag

SEQ ID NO: 6794 - DNA, 110 bp, synthetic construct
  source 1..110: mol_type = other DNA
tcccaaaggaggcttttttttaactgtcagcatttcctaccatcgggctagacgagactgcagctagcttaaatgtttaactagttatccttataggcatttctcctatg

SEQ ID NO: 6795 - DNA, 110 bp, synthetic construct
  source 1..110: mol_type = other DNA
ttttcaatttattttgcccccaacccatcagaggcatcactctctattagctatggcctttcaaaatgtatttcttaagtaacgaaacttgaaaactaaaattgctcctg

SEQ ID NO: 6796 - DNA, 110 bp, synthetic construct
  source 1..110: mol_type = other DNA
gcctttcaaaatgtatttcttaagtaacgaaacttgaaaactaaaattgctcctggagggcattcccattgtggctcagtgggttacaaacctgactagttatttcctga

SEQ ID NO: 6797 - DNA, 110 bp, synthetic construct
  source 1..110: mol_type = other DNA
taattgaagccaagcacagtacgtattctcaagagaaatggaaagctacagcagtttgaaatagggatgggaggttttaaagaaataactagttggatgattgcccaagc

SEQ ID NO: 6798 - DNA, 110 bp, synthetic construct
  source 1..110: mol_type = other DNA
gaaggcaactggaagtcgagctgggttacacgcaagcagagatagctagaaagagcttcaaagagctcagaaacaggctcggaaaaaggcttcctgcaggtcagcagggc

SEQ ID NO: 6799 - DNA, 110 bp, synthetic construct
  source 1..110: mol_type = other DNA
cttcaaagagctcagaaacaggctcggaaaaaggcttcctgcaggtcagcagggcattctctcagcccaaagaaaaaaatgactgtctcagcagatccaaaagaaattat

SEQ ID NO: 6800 - DNA, 110 bp, synthetic construct
  source 1..110: mol_type = other DNA
ccatctaatcatggagaaaaccatcagacaatcccatttgaagacattctacaaaatacctgaccagtatgccttgaagctgtcaagctcatcaaaaacaagtcagagga

SEQ ID NO: 6801 - DNA, 110 bp, synthetic construct
  source 1..110: mol_type = other DNA
atacctgaccagtatgccttgaagctgtcaagctcatcaaaaacaagtcagaggaactgtcacagtcaagaggagccctaggagatgtgacagctcagagtgggatggtg

SEQ ID NO: 6802 - DNA, 110 bp, synthetic construct
  source 1..110: mol_type = other DNA
aattgaatgtgaacattaaaattgttttgttgactctgtcggcatgttctgtctatgaccttagtatgcgattagcagtttaaaactctggcaactgataacacagaaaa

SEQ ID NO: 6803 - DNA, 110 bp, synthetic construct
  source 1..110: mol_type = other DNA
gaactgcctggctaaacttacttctagatgcttctcaacctgaagccaactcatttctcccgcaatctcccgatgggttgcccagcttctcttcatccacttttcctatc

SEQ ID NO: 6804 - DNA, 110 bp, synthetic construct
  source 1..110: mol_type = other DNA
ggatcttttaggagtatgaattcacataatatccttgggaatatacacatacagaaagtaagttgggaagcaaagactgagcgattaatgagggagtggccgccagagtt

SEQ ID NO: 6805 - DNA, 110 bp, synthetic construct
  source 1..110: mol_type = other DNA
aagtaagttgggaagcaaagactgagcgattaatgagggagtggccgccagagttcttgcttatcactaaggctaaaaaaatgtatctatcctaaactactgtatccagt

SEQ ID NO: 6806 - DNA, 110 bp, synthetic construct
  source 1..110: mol_type = other DNA
tttcaaaatggttttccccccacccccccttactagcagctccctcatctcacgcatcaggggatttctctcctggcaagggtctgcaagcccttccagaaatgcttgaa

SEQ ID NO: 6807 - DNA, 110 bp, synthetic construct
  source 1..110: mol_type = other DNA
atgattacatctccaccccatcatgctgacctcttcatctttcctatttcctttccttggtccttcgtcgtttctggaggacgtgtcacagctgaatgtgacagaccaca

SEQ ID NO: 6808 - DNA, 110 bp, synthetic construct
  source 1..110: mol_type = other DNA
cttggtccttcgtcgtttctggaggacgtgtcacagctgaatgtgacagaccacaacacagaaagaacagctggataaatcagagttactgaaaggcagagctggaacat

SEQ ID NO: 6809 - DNA, 110 bp, synthetic construct
  source 1..110: mol_type = other DNA
cgtgcacgctccttcgatcctcaaacactacgtggtagacactattatgggccacctcttatagacaaaggaacagaagcaccattacataactagcccagtgtcatatt

SEQ ID NO: 6810 - DNA, 110 bp, synthetic construct
  source 1..110: mol_type = other DNA
ggtaaggatgtgcctcaggaggccagctgtccttctccttacgtctctgtaccgaccttcctacttcgtccaaagcattcatccagcgttgcaagggcaattgctcagac

SEQ ID NO: 6811 - DNA, 110 bp, synthetic construct
  source 1..110: mol_type = other DNA
aacaggctccaagggaatcattttcaacaagacattcgcccgagatcacctggccagttaatacattttaaagaagaaataaattaatacataaattaatagatttgttg

SEQ ID NO: 6812 - DNA, 110 bp, synthetic construct
  source 1..110: mol_type = other DNA
cttgttacctgcccagaaacattttgctaagctgtcttctccactgtccagctgtctgagctgatctgccctgggggaaatattttcttgctagcccctggtatcttcca

SEQ ID NO: 6813 - DNA, 110 bp, synthetic construct
  source 1..110: mol_type = other DNA
tctcagatacaggtggaaatgggcaaagggtccacttgcgtcccaagtttaccgtcatcagctcactgatctcttaaattagagaacagggtggtaggtgaccaaagcct

SEQ ID NO: 6814 - DNA, 110 bp, synthetic construct
  source 1..110: mol_type = other DNA
atctgaactcatgagccattcagtaagtacatatggagtgacagtccaggttaaccttgtatagtttaacagaaaattcaccaacacatgaagtataattcctgccctta

SEQ ID NO: 6815 - DNA, 110 bp, synthetic construct
  source 1..110: mol_type = other DNA
cttgtatagtttaacagaaaattcaccaacacatgaagtataattcctgcccttaagcttgtccttagaaccagaacgaacctctaaaatccaaatgcctcactatccag

SEQ ID NO: 6816 - DNA, 110 bp, synthetic construct
  source 1..110: mol_type = other DNA
agatgacacgccttacttttttcccatctctcgggaatcgcactggctctcattcaacatcagaacacatttgttcagatatgcgctgttgacagccggaaggctattcc

SEQ ID NO: 6817 - DNA, 110 bp, synthetic construct
  source 1..110: mol_type = other DNA
gctgtactggtcctagggtttaacacaaatccatcaattgaataattggcaccccttaacttgtggatccttgattatttgatgctgggtggaaagtaggtgctgggatt

SEQ ID NO: 6818 - DNA, 110 bp, synthetic construct
  source 1..110: mol_type = other DNA
ttaacttgtggatccttgattatttgatgctgggtggaaagtaggtgctgggattgtctggagaaacaaatagcatatcagatgccaatccatcacctcgaaagccactg

SEQ ID NO: 6819 - DNA, 110 bp, synthetic construct
  source 1..110: mol_type = other DNA
cttatcatttccttttcttgggattctttttctcagtccacatttggaaaggtgtaaccttcagatagcccagctctccccgcctctgagccccccggggcccaggcctt

SEQ ID NO: 6820 - DNA, 110 bp, synthetic construct
  source 1..110: mol_type = other DNA
atactgccgaggaggttgatgttagctatttattgctccctgttgcatcccagcgtcccaaagatgcagccagaaaactaagagaatattgaaaggcaggccacagtttt

SEQ ID NO: 6821 - DNA, 110 bp, synthetic construct
  source 1..110: mol_type = other DNA
tttaggcttgagaaatgaaaaacttatgctcacacaaaaatctgtacatgaatgttcatggtagctatatttgtgctggccaaaaactagaaaccctccccaggtcctca

SEQ ID NO: 6822 - DNA, 110 bp, synthetic construct
  source 1..110: mol_type = other DNA
gatttcttttccttttccccagccttttttcctagaggtaagcttccaaaccatgactatgactaagtaaagtgctggcattgcaaatgataaatatccccaagacaaaa

SEQ ID NO: 6823 - DNA, 110 bp, synthetic construct
  source 1..110: mol_type = other DNA
gcacgtaccatgctgcctttagaagtgtattcgtctttctaagcttaaagagtgttctaacagcacaactgtagaaaatccagtggcctctgaaacaaagctactagaga

SEQ ID NO: 6824 - DNA, 110 bp, synthetic construct
  source 1..110: mol_type = other DNA
tctaacagcacaactgtagaaaatccagtggcctctgaaacaaagctactagagatagtgagtttatcagggtttcaggatacaagatcaatgtatgaaaatcaaccata

SEQ ID NO: 6825 - DNA, 110 bp, synthetic construct
  source 1..110: mol_type = other DNA
tcattcgccagctctacttagcattctactcaagctgatatctgcagctcatcgctcaaagcaagactccccagtagcttgttcaacatctcacacacacagcaggagac

SEQ ID NO: 6826 - DNA, 110 bp, synthetic construct
  source 1..110: mol_type = other DNA
agacctccccctcccttcttacatgaacccattaaaccctgccaacatcactgaatcggtggcaagctttctttctgtttttttttcattgtgcacttgtgatcgattgg

SEQ ID NO: 6827 - DNA, 110 bp, synthetic construct
  source 1..110: mol_type = other DNA
aaactgcttatggcatcgtttcactaaattcctgagattggttattgcagtgtgttttctggcctcctgtgcaaatatgctctttatcttcgggggaccacagtccactg

SEQ ID NO: 6828 - DNA, 110 bp, synthetic construct
  source 1..110: mol_type = other DNA
tttctggcctcctgtgcaaatatgctctttatcttcgggggaccacagtccactggcaggattgtgagataagtgtgtcagtaacttctagagggaagatcattccctgg

SEQ ID NO: 6829 - DNA, 110 bp, synthetic construct
  source 1..110: mol_type = other DNA
gtgtttttaattttgcactcactttaagaaaacgtgaatggcaggcagtgcagaagtgagtaagtggagctttggagtcagacagacttagaaccagagcctagctttgt

SEQ ID NO: 6830 - DNA, 110 bp, synthetic construct
  source 1..110: mol_type = other DNA
agactctctcacccatccattcatgcaatgaatactgaattcctacatatcagacacagtgctaggcactggggagacagcgacaactaaaacagagagaaacatgaagc

SEQ ID NO: 6831 - DNA, 110 bp, synthetic construct
  source 1..110: mol_type = other DNA
acagtgctaggcactggggagacagcgacaactaaaacagagagaaacatgaagcttaccttccagtgaggggaagacactcaattgtaaaatatatggactgtcagacg

SEQ ID NO: 6832 - DNA, 110 bp, synthetic construct
  source 1..110: mol_type = other DNA
atgacataagaccaaaatatgcttccttaaaaaccagagcactaaaacaactctagaatgcaggcagcttttctagcagctgaacaggtatgttaaagactttactaatt

SEQ ID NO: 6833 - DNA, 110 bp, synthetic construct
  source 1..110: mol_type = other DNA
gaatgcaggcagcttttctagcagctgaacaggtatgttaaagactttactaattaagcacaggcaataaaagtgacatattaaaatagataatgataagttattgcatt

SEQ ID NO: 6834 - DNA, 110 bp, synthetic construct
  source 1..110: mol_type = other DNA
tcggtcttttttttttttttttttttttttttttcaggcaagaaataaattaggataggatgcttgtgagagatgcaagcggtcaggcacggaagctctgcctcaaggat

SEQ ID NO: 6835 - DNA, 110 bp, synthetic construct
  source 1..110: mol_type = other DNA
taggatgcttgtgagagatgcaagcggtcaggcacggaagctctgcctcaaggatctggtgggccaccaagagttccaagtcttcatatcactatctgtgaaatgctttt

SEQ ID NO: 6836 - DNA, 110 bp, synthetic construct
  source 1..110: mol_type = other DNA
cacgcgactcccgggagttaaaaagtacttacactgtcatgtgtgtttttgttgagcgaggaaagcttggtttttagtgtagcagtagagcatgaggggttcccttagca

SEQ ID NO: 6837 - DNA, 110 bp, synthetic construct
  source 1..110: mol_type = other DNA
tgatcgagccggggctgctttttgagatcatcgaggtaagcagcaatctgtaccgtccgaaatggcgttagcgtcgtacagcatcatgcgcaatttggtttttaaaaaaa

SEQ ID NO: 6838 - DNA, 110 bp, synthetic construct
  source 1..110: mol_type = other DNA
tccgaaatggcgttagcgtcgtacagcatcatgcgcaatttggtttttaaaaaaatctccgtgtaaataatctattttttaaatgtataaattaggaatcctgtcttcta

SEQ ID NO: 6839 - DNA, 110 bp, synthetic construct
  source 1..110: mol_type = other DNA
ttcccttccttctaatgtgttacttcacattaaagtaacgtgatggctttataagcggttaacactttccataatcagagctaggaaatttaaggtgagaccataacctc

SEQ ID NO: 6840 - DNA, 110 bp, synthetic construct
  source 1..110: mol_type = other DNA
cggttaacactttccataatcagagctaggaaatttaaggtgagaccataacctccaatcagtacaaaccgtattaccttgattttttaaagagtccattaaagtctgcg

SEQ ID NO: 6841 - DNA, 110 bp, synthetic construct
  source 1..110: mol_type = other DNA
actgtatcctcatggactctgtgtcgggttcttaacccgctgagctgcaacgggaactctgctaggaacttttcaaaggcagcgaggtgaaaagatgcctttcacagaca

SEQ ID NO: 6842 - DNA, 110 bp, synthetic construct
  source 1..110: mol_type = other DNA
actctgctaggaacttttcaaaggcagcgaggtgaaaagatgcctttcacagacaggggtaatcacataacaacagctaccatgcattcagtgtttctataggtgaaagt

SEQ ID NO: 6843 - DNA, 110 bp, synthetic construct
  source 1..110: mol_type = other DNA
ctcatggccacgctactgtaatttcaggcccgatgtgggttcccacctcctgacaggtccgtgtccttacgtaggagacgcctacgcatcaccttaggagtccctcacct

SEQ ID NO: 6844 - DNA, 110 bp, synthetic construct
  source 1..110: mol_type = other DNA
gtagatcggcggctgcctagcctgggagtttccatatgccatgggtgcggacctaaaaagcaaaaaaataaagatccaagtccctaaggaacggcggttattaagacaaa

SEQ ID NO: 6845 - DNA, 110 bp, synthetic construct; identical to SEQ ID NO: 6844
  source 1..110: mol_type = other DNA

SEQ ID NO: 6846 - DNA, 110 bp, synthetic construct
  source 1..110: mol_type = other DNA
atctccacttggacctcaaattctcagcctagaaattctagtttgctgtcttggtcacttgcctatctctgtggttctgtgactggacagagctggaatttctacatgga

SEQ ID NO: 6847 - DNA, 110 bp, synthetic construct
  source 1..110: mol_type = other DNA
cacttgcctatctctgtggttctgtgactggacagagctggaatttctacatggaaatcaaaaatataaaaatgtggagttcccgtcgtggctcagtgtaaacaaatctg

SEQ ID NO: 6848 - DNA, 110 bp, synthetic construct
  source 1..110: mol_type = other DNA
ggggggaggaagaagagcgcgcctgcaagtgccaaagtcatccatcctcacccgcagagcggtgctgtcctacaagctggcacggtgacccagaaagcttaagaaaaggc

SEQ ID NO: 6849 - DNA, 110 bp, synthetic construct
  source 1..110: mol_type = other DNA
gaacacctggattaaaaacagtcatgagcgctggtccaatttcctttgttttctgggacattcgttaatgcctggagacacaatggtgtctcagggaatccagtctgggg

SEQ ID NO: 6850 - DNA, 110 bp, synthetic construct
  source 1..110: mol_type = other DNA
ggacattcgttaatgcctggagacacaatggtgtctcagggaatccagtctggggatgcttctaggacaggttagcactaagagggaccttgtggccttgcttcctgatt

SEQ ID NO: 6851 - DNA, 110 bp, synthetic construct
  source 1..110: mol_type = other DNA
cggcacatggaggttcctggcaatgctagatcctacagttagtgctagattgctcacagacagtgctggaccctggagtctggttgcagggcctagggatctcagagctg

SEQ ID NO: 6852 - DNA, 110 bp, synthetic construct
  source 1..110: mol_type = other DNA
acagacagtgctggaccctggagtctggttgcagggcctagggatctcagagctggtgtcaggtcactggttggggggctggttcctgacacagttggatatggggtcca

SEQ ID NO: 6853 - DNA, 110 bp, synthetic construct
  source 1..110: mol_type = other DNA
cgggcctgcaccgacccgcagagcgtatattggcccctgtttcacttctgcccaccacatcttgcatcagtttctcctgtgccagatctaacccaggaccacagagggaa

SEQ ID NO: 6854 - DNA, 110 bp, synthetic construct
  source 1..110: mol_type = other DNA
cgctggtcacactccctttttactcgtctagagatgagtcgttattagggtgaacagctctccctgtctcttccatctcttggttcaccagctctttccagcgtccctcc

SEQ ID NO: 6855 - DNA, 110 bp, synthetic construct
  source 1..110: mol_type = other DNA
aaggttcttggctgcttctcttgcactttgcatttttttgattcactcaggtcatttaaatctttctgactagagagacctcagtttcattccattggattcctcatgtc

SEQ ID NO: 6856 - DNA, 110 bp, synthetic construct
  source 1..110: mol_type = other DNA
aggccagggctcgaaccggcatcctcatggctactagccagattcatttccgccacaccacacaggaactcctacaaggttgactttaatgggggctgccttcggcgact

SEQ ID NO: 6857 - DNA, 110 bp, synthetic construct
  source 1..110: mol_type = other DNA
caccacacaggaactcctacaaggttgactttaatgggggctgccttcggcgactaaagcaatcttgaaagggctcttcaccgcaaagctgtctgcacacaaggccccag

SEQ ID NO: 6858 - DNA, 110 bp, synthetic construct
  source 1..110: mol_type = other DNA
cttgactgagcctcccagtcactcttccagggcagcttcttctaaacatcaaatccccagggccagggttcagcaggttaagatcccaactcgtcttcgttgggatgggg

SEQ ID NO: 6859 - DNA, 110 bp, synthetic construct
  source 1..110: mol_type = other DNA
ctgtggctccgattcaacccctaggctgggaacgtccatgtgcacggtgtggccctaaaaaaaaaagcccgtccccgaaaaaaaattgcatgtgagtgagtgcttgctgc

SEQ ID NO: 6860 - DNA, 110 bp, synthetic construct
  source 1..110: mol_type = other DNA
taaaaaaaaaagcccgtccccgaaaaaaaattgcatgtgagtgagtgcttgctgctgaaggaaactgctagagctggtgggcaccagatcctgccccctctgacggtgat

SEQ ID NO: 6861 - DNA, 110 bp, synthetic construct
  source 1..110: mol_type = other DNA
cacccgcagtacctatagcacctgtagtaccagggaaacatgccttccccagctcagcctccttctctccagctcaccttattccgagttcatgtgctgcacttccacgg

SEQ ID NO: 6862 - DNA, 110 bp, synthetic construct
  source 1..110: mol_type = other DNA
tacgcttgcgatgacacttagtgctcacccgcataatccaggataatctcccatttcaagctctttaatcacttctccaaagtccctattgcccgataacgcagcactca

SEQ ID NO: 6863 - DNA, 110 bp, synthetic construct
  source 1..110: mol_type = other DNA
ggagaactcgcacagggcatatgaaaatctagtttaaatattacttcttgggaggaagtctttctcctcttattaattaattattagctctgtagggtccttttctaaat

SEQ ID NO: 6864 - DNA, 110 bp, synthetic construct
  source 1..110: mol_type = other DNA
gacctgtctgatgagtgaatgcacagcctgttggagtgtgtggcacagaatacagtggcttgtgaccacacacccagctcctcgtaccaataggtgaggagctggtagtt

SEQ ID NO: 6865 - DNA, 110 bp, synthetic construct
  source 1..110: mol_type = other DNA
tttcatcagctcgccaaagaaaaacagttaaggggcaacctcatcagccggggttatgtggttagaggcatcaaaataagagtgacacccttttaagatgactttccaat

SEQ ID NO: 6866 - DNA, 110 bp, synthetic construct
  source 1..110: mol_type = other DNA
atgtggttagaggcatcaaaataagagtgacacccttttaagatgactttccaataggattatgttagacagaaactgcagaaagcaggaggtgctctgggtgagaaaaa

SEQ ID NO: 6867 - DNA, 110 bp, synthetic construct
  source 1..110: mol_type = other DNA
cacagggtaacatccccttccggggttcaaggcgccgtgctgagcatatgtgtccatgtcagtaggcaagactgctgagcataagccagagtcacagctgtgggctgagt

SEQ ID NO: 6868 - DNA, 110 bp, synthetic construct
  source 1..110: mol_type = other DNA
atgtcagtaggcaagactgctgagcataagccagagtcacagctgtgggctgagttccatgctcatgtctccctatcagcacgttttcagaagagaattgaaagcaaagg

SEQ ID NO: 6869 - DNA, 110 bp, synthetic construct
  source 1..110: mol_type = other DNA
gttaagtgggaacccaaagagctatatacttagggctgaaccagaactaaacctgctctatttcccctaatggtttaggcactgtaaaaaaagagttactctgtcagtgc

SEQ ID NO: 6870 - DNA, 110 bp, synthetic construct
  source 1..110: mol_type = other DNA
gctgtaatcttgattgttttccttccaaaggatgcttttccagggcatatacgtagcaataattaacctctccagttgactagtcattcagcagagctcaataggattgc

SEQ ID NO: 6871 - DNA, 110 bp, synthetic construct
  source 1..110: mol_type = other DNA
gcaataattaacctctccagttgactagtcattcagcagagctcaataggattgcgaaggagttaaactttggttgtggtggaaatggtggtttgtgtttatggatgttg

SEQ ID NO: 6872 - DNA, 110 bp, synthetic construct
  source 1..110: mol_type = other DNA
tggaaagtcagaattacggcttcatggagctgacccatgagcagtagcttggcacacagtaacctcaccgtgcactgactcaggggggaaggcagctcaaccccatttct

SEQ ID NO: 6873 - DNA, 110 bp, synthetic construct
  source 1..110: mol_type = other DNA
acagtaacctcaccgtgcactgactcaggggggaaggcagctcaaccccatttctgtccagcggggccgtggatgcagtctgcacatcaaacttctgacccacagtcaca

SEQ ID NO: 6874 - DNA, 110 bp, synthetic construct
  source 1..110: mol_type = other DNA
atgggagggcagatgtggggagggctggggggcacgtagcctggcctttgtccagaaactacttttcttccttctccccagtagactggtgcagtcctttggctgtatgt

SEQ ID NO: 6875 - DNA, 110 bp, synthetic construct
  source 1..110: mol_type = other DNA
ccggcgatgttttgttccaggaggtatggggacttcattgatttcccaggctcgctcttagctgtctgctaggtgcagaccctaggggcgaaaggacatccattgccacc

SEQ ID NO: 6876 - DNA, 110 bp, synthetic construct
  source 1..110: mol_type = other DNA
gaaagtagtccccccgttgaggttggagaaacaagacagcacagagaaacgactgccacggtgcctcctaggtgagctccagaggccaccctatcagacccacaagaaga

SEQ ID NO: 6877 - DNA, 110 bp, synthetic construct
  source 1..110: mol_type = other DNA
tgtgtgtttatgtcactaccttcagaactggctgaaagcaacagtagcatgaacaagaagctacatttctgcgtctaaagaaaaaactaggtcaaggagtcatttacagt

SEQ ID NO: 6878 - DNA, 110 bp, synthetic construct
  source 1..110: mol_type = other DNA
caatgatctgagttgagattgccacttgccccaaacagacatgggtgtgccacctgccgcagcctgcagacagtagctctggcatcggcgcccagggcaggagctggcgt

SEQ ID NO: 6879 - DNA, 110 bp, synthetic construct
  source 1..110: mol_type = other DNA
agtcttgtcatttctattcatctttgaactggaagccctagccagcttaatccagggagacaaagaaacaaaagcttgcaattgtaaataaagaagaaaacgtccctgtg

SEQ ID NO: 6880 - DNA, 110 bp, synthetic construct
  source 1..110: mol_type = other DNA
gcctcctgaatgttcaaccccgcgctgtaaggattcctcttattaaaatctcatttcaccgggctagctcctttgagagagcagtgcagaatgacgctaggcaatcagtg

SEQ ID NO: 6881 - DNA, 110 bp, synthetic construct
  source 1..110: mol_type = other DNA
tcaccgggctagctcctttgagagagcagtgcagaatgacgctaggcaatcagtgaaccaacaacaagtaactgtctcacgcatcttgaatattcttgctcatgcgctca

SEQ ID NO: 6882 - DNA, 110 bp, synthetic construct
  source 1..110: mol_type = other DNA
tcagcaaagaagcaaaaagttttgttcttataaccgttggggccctgaatcccctgatcctggcgatgagcacggctcccttcctcctcgtactaggagggtaattttca

SEQ ID NO: 6883 - DNA, 110 bp, synthetic construct
  source 1..110: mol_type = other DNA
agataaagtcaattgcaatttggtgtcataagcatttcaaaatttctacataagtgtgtatattgtgtgtgtttatccatttctacttccgtgtggactcacactgaatt

SEQ ID NO: 6884 - DNA, 110 bp, synthetic construct
  source 1..110: mol_type = other DNA
gtgtatattgtgtgtgtttatccatttctacttccgtgtggactcacactgaattttaaatgtgtgacactgttatactctcacagggctaatattaaatatgcctttta

SEQ ID NO: 6885 - DNA, 110 bp, synthetic construct
  source 1..110: mol_type = other DNA
aaccctggttctttgtttggatttctatgatgaatagcaaattctcaacattatgataagccttttctatttcctttgtaaattacctgttggtacattttactactgta

SEQ ID NO: 6886 - DNA, 110 bp, synthetic construct; identical to SEQ ID NO: 6885
  source 1..110: mol_type = other DNA

SEQ ID NO: 6887 - DNA, 110 bp, synthetic construct
  source 1..110: mol_type = other DNA
tgcactgaaaatactttcattgaaaatgactcttgtgtacagaaaattctctcaggcattctcctgccaccagcaaagtgacccaaacttcttaaggtcactttgagtcc

SEQ ID NO: 6888 - DNA, 110 bp, synthetic construct
  source 1..110: mol_type = other DNA
gcattctcctgccaccagcaaagtgacccaaacttcttaaggtcactttgagtccttaatactgcccctgcttcttcagatcagactccttcatccaggacaagaaagac

SEQ ID NO: 6889 - DNA, 110 bp, synthetic construct
  source 1..110: mol_type = other DNA
aatttgacaccaccaggttggaggaggatcacattgcatttgcaaacgtgtcccctgtgacttgagctttatcgcttgggagtcaagaggcactctctgaggcaagattt

SEQ ID NO: 6890 - DNA, 110 bp, synthetic construct
  source 1..110: mol_type = other DNA
tgtgacttgagctttatcgcttgggagtcaagaggcactctctgaggcaagatttatgaataaataattaaccatgaaaataaaaccagccctgaaaaagaagtgggtcc

SEQ ID NO: 6891 - DNA, 110 bp, synthetic construct
  source 1..110: mol_type = other DNA
gaatcccattgagcggacaaacgggtgggctcctcagtctctgattagtcatgcaaccagttaatagtcattgagcatgtgctgagggccagaaatggacctagatacta

SEQ ID NO: 6892 - DNA, 110 bp, synthetic construct
  source 1..110: mol_type = other DNA
accagttaatagtcattgagcatgtgctgagggccagaaatggacctagatactagagagaaagctgtgagcagaacagacaaaggccgggctctcttggcacctacctt

SEQ ID NO: 6893 - DNA, 110 bp, synthetic construct; identical to SEQ ID NO: 6891
  source 1..110: mol_type = other DNA

SEQ ID NO: 6894 - DNA, 110 bp, synthetic construct; identical to SEQ ID NO: 6892
  source 1..110: mol_type = other DNA

SEQ ID NO: 6895 - DNA, 110 bp, synthetic construct
  source 1..110: mol_type = other DNA
ctgggaggggacaggcaaggctggaaaacacacttcaccttccaaagcttgattgtcctgctccaggagatgaggtgctctttgactctaaggaggggggggatgggaat

SEQ ID NO: 6896 - DNA, 110 bp, synthetic construct
  source 1..110: mol_type = other DNA
ttttaaaggagctggttctgttcttcatacagtcatgtggtccgtagaagcaatggcggcttttgagcagctctgcccgggactgtggtctgtgagctgggcttcctcac

SEQ ID NO: 6897 - DNA, 110 bp, synthetic construct
  source 1..110: mol_type = other DNA
ctcaatttatttaacttgaaaatatacctttaaagacctgcaaacatcgttttcccccccaggttgaacatccttagtttcttccacttttagaacgcaatttccagaca

SEQ ID NO: 6898 - DNA, 110 bp, synthetic construct
  source 1..110: mol_type = other DNA
gcttgctgtgtctctgggaaggacctgaggagtgcagcactcctgagcgtgctttgagtaagcgtgctttgcgttgcacgtcggtgctgggaggagcacggcactcgtga

SEQ ID NO: 6899 - DNA, 110 bp, synthetic construct
  source 1..110: mol_type = other DNA
gagtaagcgtgctttgcgttgcacgtcggtgctgggaggagcacggcactcgtgagcgtggtttgccttgcacggcggtgctggtcttactgttgacctggaggtgttgc

SEQ ID NO: 6900 - DNA, 110 bp, synthetic construct
  source 1..110: mol_type = other DNA
catctgtgaaggacttgtgttaggacgagcgtggctcattcaaggaaagagctgcagctgaagcgcagggacctgagagcaagggtggaatgagatggttctggaaacct

SEQ ID NO: 6901 - DNA, 110 bp, synthetic construct
  source 1..110: mol_type = other DNA
gacttgcagcttttggaggtagagttttcaacaggaaatgagattgtaaaagaagctgtgagattaaataatgaaaatggtccggtgagaagaatatataaggcaagcac

SEQ ID NO: 6902 - DNA, 110 bp, synthetic construct
  source 1..110: mol_type = other DNA
ctgtgagattaaataatgaaaatggtccggtgagaagaatatataaggcaagcacatgtttccaggtcaatggaaaggaacttcagcatccgcagtgatttttgtctctg

SEQ ID NO: 6903 - DNA, 110 bp, synthetic construct
  source 1..110: mol_type = other DNA
ggcctgtgttgagcagcagggtccagtaaaattttaaaaactccattcttcagccacacaaggcacgcttcacatgctcagcaggcacctgtgacaagtggtaccacagt

SEQ ID NO: 6904 - DNA, 110 bp, synthetic construct
  source 1..110: mol_type = other DNA
ctcagtgcaaactcttaaacacgcttcctacagccgcttttccgggtgctcctctgtctctagcttattcacaccgtctgtattctctcaacccccatcgtgggccaaat

SEQ ID NO: 6905 - DNA, 110 bp, synthetic construct
  source 1..110: mol_type = other DNA
gtctctagcttattcacaccgtctgtattctctcaacccccatcgtgggccaaatcacccactgaagttcgaaaccaacggaaacgttggcaggagtgcagcctggaggc

SEQ ID NO: 6906 - DNA, 110 bp, synthetic construct
  source 1..110: mol_type = other DNA
ctcagagactcatcatggcctagaataagtaccttttttttttttaagagctagcagtttattctatgagtacatgtaagacttaatggactcaaagactgaaaagccag

SEQ ID NO: 6907 - DNA, 110 bp, synthetic construct
  source 1..110: mol_type = other DNA
aagagctagcagtttattctatgagtacatgtaagacttaatggactcaaagactgaaaagccagtaagcagtactgtgccatgtcttgttttatatataattttatata

SEQ ID NO: 6908 - DNA, 110 bp, synthetic construct
  source 1..110: mol_type = other DNA
gcatctgaccaggcttgagaaggtcagggggttaattttgtcctgaaggcacacattaagcctggcagctccgcgggaatttagagtatgctgagagctctctgatgtcc

SEQ ID NO: 6909 - DNA, 110 bp, synthetic construct
  source 1..110: mol_type = other DNA
ttaagcctggcagctccgcgggaatttagagtatgctgagagctctctgatgtccagcttcgagtggaagggtgcttaaggctacgcaggaagcaagacttgccctggtc

SEQ ID NO: 6910 - DNA, 110 bp, synthetic construct
  source 1..110: mol_type = other DNA
ggaaaccacggagggtgagctgagagcgcccatcccgtgggaaaggggagcccaggtccccagccagctgatgcttaacaagagggaaggcaggctcatcccaaccagcc

SEQ ID NO: 6911 - DNA, 110 bp, synthetic construct
  source 1..110: mol_type = other DNA
tccataaaacttttcttgtctcaatcttgaagaagccatcttcgtggtagtttactgacttgtattttacaatgtttttgttttctcatcagctaacatttattgagcac

SEQ ID NO: 6912 - DNA, 110 bp, synthetic construct
  source 1..110: mol_type = other DNA
ccatcttcgtggtagtttactgacttgtattttacaatgtttttgttttctcatcagctaacatttattgagcacctatttatcccaggtaccaaggatataaagatgat

SEQ ID NO: 6913 - DNA, 110 bp, synthetic construct
  source 1..110: mol_type = other DNA
aaaatttttcactgtattatgcatgttgcagaaaatgctttcatgtgtcttggcctatgtgccaaatgataaaccatatatactgggcttctttcccagggtaatttaaa

SEQ ID NO: 6914 - DNA, 110 bp, synthetic construct
  source 1..110: mol_type = other DNA
tatgtgccaaatgataaaccatatatactgggcttctttcccagggtaatttaaatcatttttataatttagctcttagagaagaaaggtgggtgagcaaatctcatact

SEQ ID NO: 6915 - DNA, 110 bp, synthetic construct
  source 1..110: mol_type = other DNA
gtcagttccgggacctatgcttgccttgccctctattttcactgggtaaaaggccagaggtgctgccccaggtatagcacccacctctctgcaactgcgagatgtgggct

SEQ ID NO: 6916 - DNA, 110 bp, synthetic construct
  source 1..110: mol_type = other DNA
agaggtgctgccccaggtatagcacccacctctctgcaactgcgagatgtgggctggagctcgagggcgccgcctcagtcgccacagcgcccctgcatggaggacagcaa

SEQ ID NO: 6917 - DNA, 110 bp, synthetic construct
  source 1..110: mol_type = other DNA
ctattttctcactcatctcctctctgccagttccctctcagtgcacagcacattgtcccccagccagagagccaagagttagagcaggtcctgttagcttactccttgag

SEQ ID NO: 6918 - DNA, 110 bp, synthetic construct
  source 1..110: mol_type = other DNA
tcccccagccagagagccaagagttagagcaggtcctgttagcttactccttgagagccaatgtcttcattcgtctgtgcacactggtcagggctttggaatccaagttc

SEQ ID NO: 6919 - DNA, 110 bp, synthetic construct
  source 1..110: mol_type = other DNA
gaggcatcaggacttctgcagctgctcgcagggtttaaaactttaatcccacattcactgggttccacctactgtgcttatcgctagatggataaggaagggcaggttag

SEQ ID NO: 6920 - DNA, 110 bp, synthetic construct
  source 1..110: mol_type = other DNA
cactgggttccacctactgtgcttatcgctagatggataaggaagggcaggttaggcaatctaaagagagagctaaatgctcagaatctagaacatgctacaatctgcct

SEQ ID NO: 6921 - DNA, 110 bp, synthetic construct
  source 1..110: mol_type = other DNA
aattggcagggggttctgcacccagtcttttgtgggaaaagccttccagacacagttcagtttcccaagaagggcaaacagcatccaaaccagaactcgatttctctcac

SEQ ID NO: 6922 - DNA, 110 bp, synthetic construct
  source 1..110: mol_type = other DNA
ttcagtttcccaagaagggcaaacagcatccaaaccagaactcgatttctctcacctccaacctgttccttttcagctctcctctcagggtgtgccaccaccacagaagc

SEQ ID NO: 6923 - DNA, 110 bp, synthetic construct
  source 1..110: mol_type = other DNA
tgaatcgatggcaacgactgtgacactctgtgtctgtgtacacagcacttttatatctggtcttgatacacctcacacttcagctgtgttccctcttaacacctgttgta

SEQ ID NO: 6924 - DNA, 110 bp, synthetic construct
  source 1..110: mol_type = other DNA
ttgaaatcttagaggcacatatccactctttgtgctacaacattatgtgttctctatactgagcaggagcagtggaagttttaattatcatgcaatcccataatctgttc

SEQ ID NO: 6925 - DNA, 110 bp, synthetic construct
  source 1..110: mol_type = other DNA
atactgagcaggagcagtggaagttttaattatcatgcaatcccataatctgttctttgaaatgaaaacaagcaaaagtgctcctcacacactgctcacagatctccacc

SEQ ID NO: 6926 - DNA, 110 bp, synthetic construct
  source 1..110: mol_type = other DNA
accctttaacccactgtgtcaggctggggatcgaacccatgtgttggtgctgcacagacactactgatcctgtggcgccccaatgggaactctctaagggccctgtttta

SEQ ID NO: 6927 - DNA, 110 bp, synthetic construct
  source 1..110: mol_type = other DNA
agacactactgatcctgtggcgccccaatgggaactctctaagggccctgttttaacttaaccactgtgttacaggccctgtgccctgaaacagtcacctgctgaagaac

SEQ ID NO: 6928 - DNA, 110 bp, synthetic construct
  source 1..110: mol_type = other DNA
ttttctctctctctttttggactatgcctatagcatctagaagttcccaggccagggattgaaccctgcaccacagctgtgatctgagccactgcagtgacaatgccaga

SEQ ID NO: 6929 - DNA, 110 bp, synthetic construct
  source 1..110: mol_type = other DNA
ggattgaaccctgcaccacagctgtgatctgagccactgcagtgacaatgccagacccttgacccactgagccacaagggaactcctgtaatgttttcttaatcagttca

SEQ ID NO: 6930 - DNA, 110 bp, synthetic construct
  source 1..110: mol_type = other DNA
ggaacagagcacacacttgaaaacgtgtgtgtacagcttacacgctgacgtaacagacatgcctacaaaatctaattgttcatcccgtgaagcgctcttaaaccaatata

SEQ ID NO: 6931 - DNA, 110 bp, synthetic construct
  source 1..110: mol_type = other DNA
gaataacccccagcagtatttactgtttggtttttcattctgattgtgagaggtgtgtgtgtgtgctcgcgtgcatgcgtgcgtgctcatgcccccttcctttcttccct

SEQ ID NO: 6932 - DNA, 110 bp, synthetic construct
  source 1..110: mol_type = other DNA
tgtgtgtgtgctcgcgtgcatgcgtgcgtgctcatgcccccttcctttcttccctgttgactggaacccgcttcctaggagagcagctaagaataccaggtatccgtttc

SEQ ID NO: 6933 - DNA, 110 bp, synthetic construct
  source 1..110: mol_type = other DNA
gatgacgaggaagaagctgcaaaatgcacctgcagaggacatggagaatacttctcacccctttagctttaattcttgtgtgcacaatcttaaatatacagtcagtcctc

SEQ ID NO: 6934 - DNA, 110 bp, synthetic construct
  source 1..110: mol_type = other DNA
cacccctttagctttaattcttgtgtgcacaatcttaaatatacagtcagtcctcaggaaatggtaatatgtttaaagagagagaagggctaactaaccccttctaactt

SEQ ID NO: 6935 - DNA, 110 bp, synthetic construct
  source 1..110: mol_type = other DNA
tctatgctccttttttttaatttttctttttagggccacatgtgtggcatgtggaagttcacaggctaggggtctaatctaagccatagcttctggcctacaccacagcc

SEQ ID NO: 6936 - DNA, 110 bp, synthetic construct
  source 1..110: mol_type = other DNA
agttcacaggctaggggtctaatctaagccatagcttctggcctacaccacagcctcggcaactggggatctgagccacatgtaaaactcaggtgttctttttcttttct

SEQ ID NO: 6937 - DNA, 110 bp, synthetic construct
  source 1..110: mol_type = other DNA
ctagtgcaggcaggagagtggcccatggccccagtcacaatcagtaactcttcatggttatgcagaattaaaatattagaagtggctttttcccataacaaagttcccac

SEQ ID NO: 6938 - DNA, 110 bp, synthetic construct
  source 1..110: mol_type = other DNA
ggttatgcagaattaaaatattagaagtggctttttcccataacaaagttcccactggagtgaaagccactagctgttgagctcctgcagctcagagggtttacctgccc

SEQ ID NO: 6939 - DNA, 110 bp, synthetic construct
  source 1..110: mol_type = other DNA
aggaatcgaacccacatcctcatggatatgagtcgggtttgtaaccactaagccgctagaaattgcaggtttaaattctaactgccaatttagaagtgtcatgtggcaag

SEQ ID NO: 6940 - DNA, 110 bp, synthetic construct
  source 1..110: mol_type = other DNA
ctagaaattgcaggtttaaattctaactgccaatttagaagtgtcatgtggcaagccagtagacggtgtacattcaaaactgcttgctaacacagcctctaagagaagat

SEQ ID NO: 6941 - DNA, 110 bp, synthetic construct
  source 1..110: mol_type = other DNA
attcattaaaggctctccctgggccccagggggaaaaattgcaacagaaccgagagcatttactccaaagtccaaagaatacggtgaactcgtgttttcccagtggtgcc

SEQ ID NO: 6942 - DNA, 110 bp, synthetic construct
  source 1..110: mol_type = other DNA
gcatttactccaaagtccaaagaatacggtgaactcgtgttttcccagtggtgccttgccgagtgaaaaattaccctaagaatttgtccttgttctaattagtgatcctc

SEQ ID NO: 6943 - DNA, 110 bp, synthetic construct
  source 1..110: mol_type = other DNA
acctgacaaagttcccaaagatatcgcctgtgacctcatcttgggatgtgatggtgcctattcgactgtcagaactcatctcgtgaagaagcctcgctttgattacagtc

SEQ ID NO: 6944 - DNA, 110 bp, synthetic construct
  source 1..110: mol_type = other DNA
gcctattcgactgtcagaactcatctcgtgaagaagcctcgctttgattacagtcagcagtacattcctcacggctacatggagttgactatcccacctcagaacggcga

SEQ ID NO: 6945 - DNA, 110 bp, synthetic construct
  source 1..110: mol_type = other DNA
cagaactccagatgtctggaggggaggcaggtgtgtaaagaacctaaagaaccatgacgtcctgatgctggaaagatgttactggaacctgagttcttggtcacgcagct

SEQ ID NO: 6946 - DNA, 110 bp, synthetic construct
  source 1..110: mol_type = other DNA
gacgtcctgatgctggaaagatgttactggaacctgagttcttggtcacgcagctggagaatgaactccgagaacacacaggaacctgagttcttggtcacgcagctgga

SEQ ID NO: 6947 - DNA, 110 bp, synthetic construct
  source 1..110: mol_type = other DNA
atctgtttgaatgtcaactccccagagattctttcactgaattcctaccaatatgaacacttctctccccaaaaggcatttacaaaaaaaagcccatctatatccttact

SEQ ID NO: 6948 - DNA, 110 bp, synthetic construct
  source 1..110: mol_type = other DNA
aacacttctctccccaaaaggcatttacaaaaaaaagcccatctatatccttactggtgaaaatgatctcctgtgctcaccagagggtctccagtgctcaccggagggtc

SEQ ID NO: 6949 - DNA, 110 bp, synthetic construct
  source 1..110: mol_type = other DNA
agttgcgcgggaagacttcgagtgggtctacactgaccagccccacgccagtcggcgccaggagatcctgggtgaggtctgggcctgcgccccgttatgtgcgcgcgcgc

SEQ ID NO: 6950 - DNA, 110 bp, synthetic construct; identical to SEQ ID NO: 6949
  source 1..110: mol_type = other DNA

SEQ ID NO: 6951 - DNA, 110 bp, synthetic construct
  source 1..110: mol_type = other DNA
aaggtgtggagagggaaggagaggaaatggaattaagagagggtgaggagttcccccggtggctccgcagaaaacgaatctgactggcatccatgagaatgcaggttcca

SEQ ID NO: 6952 - DNA, 110 bp, synthetic construct
  source 1..110: mol_type = other DNA
aaaaatattagttactaccattaatttgtgctctgagtatactcttagtttggttaagtttgggtaacttctcacttagaccattcgtaatgtcagggtagttctgtggt

SEQ ID NO: 6953 - DNA, 110 bp, synthetic construct
  source 1..110: mol_type = other DNA
aagtttgggtaacttctcacttagaccattcgtaatgtcagggtagttctgtggttttggtcatttgacttcagcagagcaaggctgattctagtaaaaaaatgatagtc

SEQ ID NO: 6954 - DNA, 110 bp, synthetic construct
  source 1..110: mol_type = other DNA
ccagcaagagaagacaggcagtaaagcaagagatgaacaggaaatcagtccggtggtgtgaagtgtagacagagaattaaagtagggtctggtgacgcagaaggcatagg

SEQ ID NO: 6955 - DNA, 110 bp, synthetic construct
  source 1..110: mol_type = other DNA
tgaggcctttctgggccccctcggggtgttttaggaggacagaggtataaagccagatggctccacccattcccccagcccagcttttgtttcagggaccagaaggtgag

SEQ ID NO: 6956 - DNA, 110 bp, synthetic construct
  source 1..110: mol_type = other DNA
gatggctccacccattcccccagcccagcttttgtttcagggaccagaaggtgaggagctattcttagagtgtggtggggcagaatttcccctggatcctggagatggga

SEQ ID NO: 6957 - DNA, 110 bp, synthetic construct
  source 1..110: mol_type = other DNA
ctccccagggggacagtcacctcccctgcgatcagagaaggcaacattttctctaaagcaaaggttaatttcttggtgccacggatccacggatgtgttatcccaggcga

SEQ ID NO: 6958 - DNA, 110 bp, synthetic construct
  source 1..110: mol_type = other DNA
aagcaaaggttaatttcttggtgccacggatccacggatgtgttatcccaggcgaatggccctacgaggcttctgttccttctcagcttgatgaggcgagctgtgctctg

SEQ ID NO: 6959 - DNA, 110 bp, synthetic construct
  source 1..110: mol_type = other DNA
cagccacataatggctggattattatcttcctaacgcgtgtggcagtattatcgctgctaagcatgggattaaggcaaaggaagaagaccaaagaaagggccgaggcagg

SEQ ID NO: 6960 - DNA, 110 bp, synthetic construct
  source 1..110: mol_type = other DNA
ataggttttgtattctgctcctgggaagaggagaggtgcggggcccggagcgtcgtgagctggcacatgtcatggcatctggtttgtgagttcctttcggcccagagtgg

SEQ ID NO: 6961 - DNA, 110 bp, synthetic construct
  source 1..110: mol_type = other DNA
tgagctggcacatgtcatggcatctggtttgtgagttcctttcggcccagagtggatggcagatagcgtcagtgctgtcttctgaaggggacgaagagggacctgagaca

SEQ ID NO: 6962 - DNA, 110 bp, synthetic construct
  source 1..110: mol_type = other DNA
cagagaaggaggctgaacaaccctagggagcttgttgagggtcaggcggatcatgagagggaacggcaagtcagaccgtggccactctggtcccaaggccgagtcattgt

SEQ ID NO: 6963 - DNA, 110 bp, synthetic construct
  source 1..110: mol_type = other DNA
gttcctaacccgctaagtcacagtgggaacccctgaatacagtctgttttcactacctaatgtccagcttcgtttgcctttgacaatcctaggataggctgtgtttgcta

SEQ ID NO: 6964 - DNA, 110 bp, synthetic construct
  source 1..110: mol_type = other DNA
tgactcttaagaaaaagtcataaaaggcgtagtggcttcttctcttgctttcgttttccatactctctgggttgtaatttaacacccttaatcagctttatagagaggtc

SEQ ID NO: 6965 - DNA, 110 bp, synthetic construct
  source 1..110: mol_type = other DNA
ttccatactctctgggttgtaatttaacacccttaatcagctttatagagaggtccgtgtagtgaggaactgaagcctgctaatagccatgtgagtgagctattctggaa

SEQ ID NO: 6966 - DNA, 110 bp, synthetic construct
  source 1..110: mol_type = other DNA
actatcttaggcaggttgtcagtatggccatcgagaagcgcattggcattttcaacgttttgagttctgattatcagtcacaatgcttaccatatgtcgagaacatcata

SEQ ID NO: 6967 - DNA, 110 bp, synthetic construct
  source 1..110: mol_type = other DNA
cgttttgagttctgattatcagtcacaatgcttaccatatgtcgagaacatcatacatatgatccaaaacctcttgagatctgtaatcgaaaaaaggcatgaaaatctat

SEQ ID NO: 6968 - DNA, 110 bp, synthetic construct
  source 1..110: mol_type = other DNA
agaagttttcaaatgggaagaggttaacacaacctttttgatttgccgctgaatctctgaaactgttgcattcctagctagttcttttaccagtgctatgagccccctag

SEQ ID NO: 6969 - DNA, 110 bp, synthetic construct
  source 1..110: mol_type = other DNA
tctgaaactgttgcattcctagctagttcttttaccagtgctatgagccccctaggccaagtgcctgtacctgtcgtcgcatgtcatttttatgcacttctttctctgct

SEQ ID NO: 6970 - DNA, 110 bp, synthetic construct
  source 1..110: mol_type = other DNA
tcccataatccaaccctcagggtcaaagtcaagtggctcattctaagagctgggcaaacacacaacttcaggtctttaggtggttaaaaaggagaactcgctttacttta

SEQ ID NO: 6971 - DNA, 110 bp, synthetic construct
  source 1..110: mol_type = other DNA
aaacacacaacttcaggtctttaggtggttaaaaaggagaactcgctttactttaaataacttatcaagagtggttcccaaaggtcctggtcgggttctaccttccaaac

SEQ ID NO: 6972 - DNA, 110 bp, synthetic construct
  source 1..110: mol_type = other DNA
aaaataactccaaatctctaatgaacagcaaatttgggatttttcacaaagctttcaagtcttagagctacagtctcaaacatccaccaagtccctctgccaagcacatc

SEQ ID NO: 6973 - DNA, 110 bp, synthetic construct
  source 1..110: mol_type = other DNA
caagtcttagagctacagtctcaaacatccaccaagtccctctgccaagcacatccctgggcccgcatcccggctcttttctctcaagcctagagcaggcaccagccccc

SEQ ID NO: 6974 - DNA, 110 bp, synthetic construct
  source 1..110: mol_type = other DNA
cagctgcttgggttgtgactacaggctagcctttgttcctcctagcagttatccataaacaaatagatctttcagaaatctccttcatatttcctcagctgactgtaaaa

SEQ ID NO: 6975 - DNA, 110 bp, synthetic construct
  source 1..110: mol_type = other DNA
taaacaaatagatctttcagaaatctccttcatatttcctcagctgactgtaaaacaaaaggaaaagcccaagtgcacctcgtcacaaaaacccaaagcttctctctgca

SEQ ID NO: 6976 - DNA, 110 bp, synthetic construct
  source 1..110: mol_type = other DNA
cagtgaaatctgttggattatcctgcaagattaaaaaaaaaaaaaaaaaaaaaatctcttaaaaaaatgctgagttctcctgtggcgcagtagggatccagcgttgtcac

SEQ ID NO: 6977 - DNA, 110 bp, synthetic construct; identical to SEQ ID NO: 6976
  source 1..110: mol_type = other DNA

SEQ ID NO: 6978 - DNA, 110 bp, synthetic construct
  source 1..110: mol_type = other DNA
acagatctataaaaccctttcttttgaacacaagcattttagtgtatcttctacacaagaacagaaagacttcacaaacctgaaacagaaccaattacaaaaagcaacaa

SEQ ID NO: 6979 - DNA, 110 bp, synthetic construct
  source 1..110: mol_type = other DNA
acattgtcctcaccacacatagagctcatgaaagtcaggcacggaaaggtgacgagactcacccaaagccacattgctaataaagagaaagccggaaaggccaggtccac

SEQ ID NO: 6980 - DNA, 110 bp, synthetic construct
  source 1..110: mol_type = other DNA
acttgattcctaagtggccatgggtcccccagatggctgtggaaaaactgtcccatcttcccactgagctggaattccctcgagggctgggactccctcacctccccctg

SEQ ID NO: 6981 - DNA, 110 bp, synthetic construct
  source 1..110: mol_type = other DNA
gacagcatgagccagcacagcctgtctcaaacagggtcatcactctggcatcctggttgctggtgaccccgggcaggcttccctcaggcccagggctaagaccactaagc

SEQ ID NO: 6982 - DNA, 110 bp, synthetic construct
  source 1..110: mol_type = other DNA
cacagagcgacaaggcgctgaccaccaccagcaggaagatgatgtgtctctggaaggacaagtagtggatggcgtcctccccgcaccactccaggatctggtcgtccctg

SEQ ID NO: 6983 - DNA, 110 bp, synthetic construct
  source 1..110: mol_type = other DNA
ggacaagtagtggatggcgtcctccccgcaccactccaggatctggtcgtccctggccaagacacacatggagtcctaatgaggagggctaacaggctgggcccctggga

SEQ ID NO: 6984 - DNA, 110 bp, synthetic construct; identical to SEQ ID NO: 6982
  source 1..110: mol_type = other DNA

SEQ ID NO: 6985 - DNA, 110 bp, synthetic construct; identical to SEQ ID NO: 6983
  source 1..110: mol_type = other DNA

SEQ ID NO: 6986 - DNA, 110 bp, synthetic construct
  source 1..110: mol_type = other DNA
gagcgaggctagggatggaacctgtatacttatggatactagtcagattaatttctgctgagccacgataggaactctcataggttgattttaaatgttgtaagccaata

SEQ ID NO: 6987 - DNA, 110 bp, synthetic construct; identical to SEQ ID NO: 6986
  source 1..110: mol_type = other DNA

SEQ ID NO: 6988 - DNA, 110 bp, synthetic construct
  source 1..110: mol_type = other DNA
gatattttagttccctcaaaacaaaacaaaaaacaggcaaaaataaataaataaatacaaccacattttcttggctggaattacaagaactcttcactggcagctcagcc

SEQ ID NO: 6989 - DNA, 110 bp, synthetic construct
  source 1..110: mol_type = other DNA
ctgcagaaagcctgccaggctgcagtgtgcaagggcctggaacaatgactggtagtatcagctattttaatgcagagttaggcacagaatccttgctaaaaataaataca

SEQ ID NO: 6990 - DNA, 110 bp, synthetic construct
  source 1..110: mol_type = other DNA
ccttaccccaagcgctccctcctcagggaaatgacagattttgtccccgataaggacggtaaggacggcctccctgctgccctcacgccctaggtgtggctggttggctt

SEQ ID NO: 6991 - DNA, 110 bp, synthetic construct
  source 1..110: mol_type = other DNA
aaatgatcacaatcaggaaatttagcactgatataatagcatttttctaacagtccacattcggatttcatcaactgttccaataaggccttacacagctatttcccccc

SEQ ID NO: 6992 - DNA, 110 bp, synthetic construct
  source 1..110: mol_type = other DNA
cacattcggatttcatcaactgttccaataaggccttacacagctatttcccccctgaatacatttggttgtcttgtttctctagaccctttttgtctggtccttcatga

SEQ ID NO: 6993 - DNA, 110 bp, synthetic construct
  source 1..110: mol_type = other DNA
taaaaaaaaatccataatactagaagaggactgttcgtttagttaggtatttacctgaccagttgtttacccacagctactctttgcaccactccagataagaggtgact

SEQ ID NO: 6994 - DNA, 110 bp, synthetic construct
  source 1..110: mol_type = other DNA
tgaccagttgtttacccacagctactctttgcaccactccagataagaggtgactaatgccataactccctattcccacattcacaacagaaattgtcttttgtcttttt

SEQ ID NO: 6995 - DNA, 110 bp, synthetic construct
  source 1..110: mol_type = other DNA
tcttgaaatatgtctgtcttctgtttctctaaccaaagaaaaggggcaacttttggggtgaagacggcagcttgctctgctgccttctcttgcctgtgactctcccttct

SEQ ID NO: 6996 - DNA, 110 bp, synthetic construct
  source 1..110: mol_type = other DNA
gggtgaagacggcagcttgctctgctgccttctcttgcctgtgactctcccttctggcctacactccccagcctctgtaaaaggtccacagtgtcgtcagataccaccct

SEQ ID NO: 6997 - DNA, 110 bp, synthetic construct
  source 1..110: mol_type = other DNA
caggagggggcagcaggtcgacccagagccttggaacaccccagcccagcacccagggctcagatctgatgccaaaactccacgtatctcttgatacagacaagatggcc

SEQ ID NO: 6998 - DNA, 110 bp, synthetic construct
  source 1..110: mol_type = other DNA
gggctcagatctgatgccaaaactccacgtatctcttgatacagacaagatggcctagaaggtttggcaggagctttctagaggtgagacctcagctgggggagacgggg

SEQ ID NO: 6999 - DNA, 110 bp, synthetic construct
  source 1..110: mol_type = other DNA
ataaactccaggcaggatggagtgggggacaggggaagtattctgaaagagtgacaaggtctcccaacgaccttctgctaggtgtggggcctcacgctgcagtgttaaat

SEQ ID NO: 7000 - DNA, 110 bp, synthetic construct
  source 1..110: mol_type = other DNA
aaggtctcccaacgaccttctgctaggtgtggggcctcacgctgcagtgttaaataaaatgcagggttaatgaggctgggagcaaaactgcacttcctcaggtcccccaa

SEQ ID NO: 7001 - DNA, 110 bp, synthetic construct
  source 1..110: mol_type = other DNA
tcaccccaaagttagagcagagcaggcagatgctgggagaatggtcagtcagagaagggggggggcaccaggccgggaagccagggagcagccaggagaccctcatccct

SEQ ID NO: 7002 - DNA, 110 bp, synthetic construct
  source 1..110: mol_type = other DNA
aaagctgccctcctgggtacacagagccccagggcctctatcccagagacagggacactctggagtctcacagtgaccacagtccggtcatgggctcccccacctcaccc

SEQ ID NO: 7003 - DNA, 110 bp, synthetic construct
  source 1..110: mol_type = other DNA
cactctggagtctcacagtgaccacagtccggtcatgggctcccccacctcaccccctgggtctctggggacagcccacatttaggaaccacaacatcaaatctagagaa

SEQ ID NO: 7004 - DNA, 110 bp, synthetic construct
  source 1..110: mol_type = other DNA
attatattagtttcagaagtatagcttagtgagtcagcatttttatagattatgctccattaaaagttataacaggggagttcccattgtggcacagccgaagcgaatct

SEQ ID NO: 7005 - DNA, 110 bp, synthetic construct
  source 1..110: mol_type = other DNA
tacatatattctgaatccatcaataatataatggatggacatgccagaaatatctttactttttggtttttaaaattcttaaggtgcattcttgggagttcccactgtgg

SEQ ID NO: 7006 - DNA, 110 bp, synthetic construct
  source 1..110: mol_type = other DNA
tccatcaataatataatggatggacatgccagaaatatctttactttttggtttttaaaattcttaaggtgcattcttgggagttcccactgtggctcagcggtaatgaa

SEQ ID NO: 7007 - DNA, 110 bp, synthetic construct; identical to SEQ ID NO: 7005
  source 1..110: mol_type = other DNA

SEQ ID NO: 7008 - DNA, 110 bp, synthetic construct; identical to SEQ ID NO: 7006
  source 1..110: mol_type = other DNA

SEQ ID NO: 7009 - DNA, 110 bp, synthetic construct
  source 1..110: mol_type = other DNA
tgtcggcctcaggctctgtgtttgcagctacagggttgtgtgtctaggaagcctattgccttcctggaagtgaaattttgggacaggcaggcacaactgattccagaaaa

SEQ ID NO: 7010 - DNA, 110 bp, synthetic construct
  source 1..110: mol_type = other DNA
gcgatcataactgccgtatgagttcataccccatccaaagctgacacgctcccaaacagcacatcgccagagcctgagccctactgcacatgggctatcccggttcagct

SEQ ID NO: 7011 - DNA, 110 bp, synthetic construct
  source 1..110: mol_type = other DNA
acagcacatcgccagagcctgagccctactgcacatgggctatcccggttcagctcaaaacgtaggctgctgtttttgctccaatgctcccctttgagtaagagtgggtg

SEQ ID NO: 7012 - DNA, 110 bp, synthetic construct
  source 1..110: mol_type = other DNA
taccttttctccaaataccttgagagtctccttcctgagtcttgttgcacactggacggtccagcaagcccttcccagctatccagactcctgagtggcgctgagctgtc

SEQ ID NO: 7013 - DNA, 110 bp, synthetic construct
  source 1..110: mol_type = other DNA
gttcaccaaacccaccccccttggcagtgttactatgaagccaggcagagatccgcacgtgttagtacaagttaacacctaactcagctgttcataccctcagagtcata

SEQ ID NO: 7014 - DNA, 110 bp, synthetic construct
  source 1..110: mol_type = other DNA
aactttcaggtctttggtgacataggttaattctgaagaccatacatccacctgaaaacaaagatgagtgaaacatctttaaatatactgcccctgaaaaatgtttctag

SEQ ID NO: 7015 - DNA, 110 bp, synthetic construct
  source 1..110: mol_type = other DNA
tactctctgtcctctcttcttaataatgctgatagctaacatttctcatgtgtataatatatacaggtgtttttcaaagtactttacatatattgactctcttaattctc

SEQ ID NO: 7016 - DNA, 110 bp, synthetic construct
  source 1..110: mol_type = other DNA
attttctctagtctggcctaactgttgctgttttttgccaaaggcaggccttaacttagctagccaagagtaagtgacgactatgagagcaaaaagtgaaagggaagagc

SEQ ID NO: 7017 - DNA, 110 bp, synthetic construct
  source 1..110: mol_type = other DNA
ttagctagccaagagtaagtgacgactatgagagcaaaaagtgaaagggaagagctggaaagtgaaataaagaatagagctcaaaaaataaatgggacaaagcagaagac

SEQ ID NO: 7018 - DNA, 110 bp, synthetic construct
  source 1..110: mol_type = other DNA
tgtctaaatagtcctataacaataaaaagtaacaaccaatagctaacaaactttcgctatccctacagtgggaaagaatctctaggctcagaagcttttacagatgattc

SEQ ID NO: 7019 - DNA, 110 bp, synthetic construct
  source 1..110: mol_type = other DNA
atttttttctttttcttttcgttactacatccctagtcatgtgcacaacaatttctgtctcatcagtgatcagtaagtagctgaaaaatagatgaatcagcttaaatgtt

SEQ ID NO: 7020 - DNA, 110 bp, synthetic construct
  source 1..110: mol_type = other DNA
cgtatctgccttttccatcttccatggcttgaaggatttcaggagagatataatctggagttccaacggccactgaggactgaacctgaagaagttcacatttttagtaa

SEQ ID NO: 7021 - DNA, 110 bp, synthetic construct
  source 1..110: mol_type = other DNA
agatataatctggagttccaacggccactgaggactgaacctgaagaagttcacatttttagtaatctactacaatgtattaggaaaaaaataattttaagttagaaatg

SEQ ID NO: 7022 - DNA, 110 bp, synthetic construct
  source 1..110: mol_type = other DNA
gtagtattgagaaacaccatgcaagtcctcatctttccatttgtcacctgaaactaaaccataagataatcagacacaatattgtaatcagatcaatcttattattttgc

SEQ ID NO: 7023 - DNA, 110 bp, synthetic construct
  source 1..110: mol_type = other DNA
aaaccataagataatcagacacaatattgtaatcagatcaatcttattattttgctgtcatcctggtgggattttgtgtctttaattgttaacatttttgaagtggtagc

SEQ ID NO: 7024 - DNA, 110 bp, synthetic construct
  source 1..110: mol_type = other DNA
ctacaactttgttcccattagtacgtcatactaaaaatggaattaaccatctcacaaaattattagctaatcagagttcccattgcggctgagcaggttaagaacacatg

SEQ ID NO: 7025 - DNA, 110 bp, synthetic construct
  source 1..110: mol_type = other DNA
aatggaattaaccatctcacaaaattattagctaatcagagttcccattgcggctgagcaggttaagaacacatgtccgtgaggatgtgtgttcaatccctggcctttct

SEQ ID NO: 7026 - DNA, 110 bp, synthetic construct
  source 1..110: mol_type = other DNA
agaaggaagtaggattgggtggaaggaggagctgagctgggatgcaacagaagccaggctgcagccaaggggagctatgcatggcctgtcttgtcccaccttgatgcaaa

SEQ ID NO: 7027 - DNA, 110 bp, synthetic construct
  source 1..110: mol_type = other DNA
aggctgcagccaaggggagctatgcatggcctgtcttgtcccaccttgatgcaaagcgggtagacccttgtacctggcgtccgtcagtgattgggtggggactggcccca

SEQ ID NO: 7028 - DNA, 110 bp, synthetic construct; identical to SEQ ID NO: 7026
  source 1..110: mol_type = other DNA

SEQ ID NO: 7029 - DNA, 110 bp, synthetic construct; identical to SEQ ID NO: 7027
  source 1..110: mol_type = other DNA

SEQ ID NO: 7030 - DNA, 110 bp, synthetic construct
  source 1..110: mol_type = other DNA
ccaaatgaatggaagcaattgtatttgtatttaaatatagtttttaaggggagctggagaatgagtctactcatttggtcccctctgggaaaaggttgttatttgtggaa

SEQ ID NO: 7031 - DNA, 110 bp, synthetic construct
  source 1..110: mol_type = other DNA
ggagaatgagtctactcatttggtcccctctgggaaaaggttgttatttgtggaaaatacaagtgagatccacactttgggaaacaagaaataaaattacaggacacttc

SEQ ID NO: 7032 - DNA, 110 bp, synthetic construct
  source 1..110: mol_type = other DNA
caccccgctgtaatctggattctaccctgaagctgccttcacctcggtcacaatctcttgctcaatgcaggattcctttcagcccctcttgttcttggcgtctctacagc

SEQ ID NO: 7033 - DNA, 110 bp, synthetic construct
  source 1..110: mol_type = other DNA
tcttgctcaatgcaggattcctttcagcccctcttgttcttggcgtctctacagcttttggacctgagacctgctctcaggcttccttctgcttgcctacaccactcctg

SEQ ID NO: 7034 - DNA, 110 bp, synthetic construct
  source 1..110: mol_type = other DNA
gccagatccttaacccactaagtgagttcaggattgaaccctcatggatactagttgggctggtttcactgagccacaacgggaactccttaatgctcatttacaggatg

SEQ ID NO: 7035 - DNA, 110 bp, synthetic construct; identical to SEQ ID NO: 7034
  source 1..110: mol_type = other DNA

SEQ ID NO: 7036 - DNA, 110 bp, synthetic construct
  source 1..110: mol_type = other DNA
tttataaggtaaatggttgtttacgtgtttgggtaattttgagatatgagaaattgtgctttcttgactagtttggatgttttttgtctttttgctttttctagggccac

SEQ ID NO: 7037 - DNA, 110 bp, synthetic construct
  source 1..110: mol_type = other DNA
agccgaacttgggttcaaaacctgacttttatcacttaactgttacgcagccttgagcaaggttttacaagctctctgaggcttggtttccttatgtgccagatggagct

SEQ ID NO: 7038 - DNA, 110 bp, synthetic construct
  source 1..110: mol_type = other DNA
gacgggaactcctagtaacatttcttcaaatgaagcaccaccttcctcaaaagccctgtgaaaagctagtagtggtagagcattagtaacttctgatggtttgttggatt

SEQ ID NO: 7039 - DNA, 110 bp, synthetic construct
  source 1..110: mol_type = other DNA
ctgtgaaaagctagtagtggtagagcattagtaacttctgatggtttgttggattgtttatgtatgtgtttttgttgttgttggtgtttttgctttttagggctgtaccc

SEQ ID NO: 7040 - DNA, 110 bp, synthetic construct; identical to SEQ ID NO: 7038
  source 1..110: mol_type = other DNA

SEQ ID NO: 7041 - DNA, 110 bp, synthetic construct; identical to SEQ ID NO: 7039
  source 1..110: mol_type = other DNA

SEQ ID NO: 7042 - DNA, 110 bp, synthetic construct
  source 1..110: mol_type = other DNA
tcgatgaacttgcagagcctcctggagaggaagaagagaactgggactccctctagggaaaatgacactaagagaagtcacataggggcacttgctctaccatgagtaca

SEQ ID NO: 7043 - DNA, 110 bp, synthetic construct
  source 1..110: mol_type = other DNA
gggaaaatgacactaagagaagtcacataggggcacttgctctaccatgagtacactagtgctggcaaggatcagtttggagtcctccctctaccctattagcaccaggt

SEQ ID NO: 7044 - DNA, 110 bp, synthetic construct; identical to SEQ ID NO: 7042
  source 1..110: mol_type = other DNA

SEQ ID NO: 7045 - DNA, 110 bp, synthetic construct; identical to SEQ ID NO: 7043
  source 1..110: mol_type = other DNA

SEQ ID NO: 7046 - DNA, 110 bp, synthetic construct
  source 1..110: mol_type = other DNA
gctttgcaatcaaagtgtactttattaaaattgcttttacagttttatctgtgccccattcggtgtcactctatatggtttaaaaataccgtctcgaggcacgggatgta

SEQ ID NO: 7047 - DNA, 110 bp, synthetic construct
  source 1..110: mol_type = other DNA
attttaaagctttctttctgaaagagcacattttagttacatctccagaacgatgaccagaggccaatcttcatttagtaaatgtcttttaagcatttctatatccaggt

SEQ ID NO: 7048 - DNA, 110 bp, synthetic construct
  source 1..110: mol_type = other DNA
tcagggagcagttgtgtccagcatatgaatcttgcagtcaagtcagtgcttcgtgctgatggagaacacgggacataggcacaaagacaatgcctgcgaatcggccctgg

SEQ ID NO: 7049 - DNA, 110 bp, synthetic construct
  source 1..110: mol_type = other DNA
ctgatggagaacacgggacataggcacaaagacaatgcctgcgaatcggccctggtactgaatatttgcaactcatttgggcccccaagattaatctcctggtttatcaa

SEQ ID NO: 7050 - DNA, 110 bp, synthetic construct
  source 1..110: mol_type = other DNA
aacaaagtggtgctggcgccacctggtggtacttgtcagctctgtcaacggaggcgtctccgctggcttctgaactggttcacagcgtgaaggaagcagttccaggtact

SEQ ID NO: 7051 - DNA, 110 bp, synthetic construct
  source 1..110: mol_type = other DNA
agcttacgacagtataatccatttctccatagctgtagctcttctgcctaaaatccttccaagattttgtgcacattttagactaactcgatgcttaattgcaggacact

SEQ ID NO: 7052 - DNA, 110 bp, synthetic construct
  source 1..110: mol_type = other DNA
ggagagacaaactcacaaaagcctttatataaaatagctcagctcaacacgaagtaacacatacaggtgtttacagcgcacagagctccgagggattctcaatgactttg

SEQ ID NO: 7053 - DNA, 110 bp, synthetic construct
  source 1..110: mol_type = other DNA
aacacatacaggtgtttacagcgcacagagctccgagggattctcaatgactttggatgctcattttgtaaaagcagcctcctgtggagattggttaaatacttgggatt

SEQ ID NO: 7054 - DNA, 110 bp, synthetic construct
  source 1..110: mol_type = other DNA
attgaaccagcatcctcatggatactgtgtttctcatattcgtttcagctgcaccacaacaggaactccaagactgcggggatttttaacccttcttccaggggtaattc

SEQ ID NO: 7055 - DNA, 110 bp, synthetic construct; identical to SEQ ID NO: 7054
  source 1..110: mol_type = other DNA

SEQ ID NO: 7056 - DNA, 110 bp, synthetic construct
  source 1..110: mol_type = other DNA
gtgtgtcatggatacaaaaaaaatacccatgactaggactctaatctacaacagagataaatttataattctaccaaaaagccgaagtgctgatgttaccatgtcgcgag

SEQ ID NO: 7057 - DNA, 110 bp, synthetic construct
  source 1..110: mol_type = other DNA
gataaatttataattctaccaaaaagccgaagtgctgatgttaccatgtcgcgagtgatactgggatgaagacaaagaaccgcctttctccgccccaacttcccacctcg

SEQ ID NO: 7058 - DNA, 110 bp, synthetic construct
  source 1..110: mol_type = other DNA
cctaaaccccaccgagttcaagggtcaatttatacggggaatttcctgtccttgcagcttgattctaatgtaaagctaaaactgatctgaaaattaaagctaattcataa

SEQ ID NO: 7059 - DNA, 110 bp, synthetic construct
  source 1..110: mol_type = other DNA
cttttgacccctctggcctggcgtctccttccttctctgtcctctaattcccttcccttcatcccatgtgtgcatgtgcgtgctgcagctcaccccacccagtgcccctc

SEQ ID NO: 7060 - DNA, 110 bp, synthetic construct
  source 1..110: mol_type = other DNA
ccttcatcccatgtgtgcatgtgcgtgctgcagctcaccccacccagtgcccctccagcctcacggatctacagggtttaaaaatacttctgccgcccttccatggaaaa

SEQ ID NO: 7061 - DNA, 110 bp, synthetic construct
  source 1..110: mol_type = other DNA
ctggaaatgaaattctgacgtgtgtacaagcaaataaatgtaggctctgctctgcctctgttttactcagaagtgttaattaaaataaatggaaaaaatcttgggtttta

SEQ ID NO: 7062 - DNA, 110 bp, synthetic construct
  source 1..110: mol_type = other DNA
cgataaagaaggattaaggaagctccatttcgtctggctccctaagctcataccaaagctgctgaaaagactaacatgagcctttccctgcttccacactgcttatgtgc

SEQ ID NO: 7063 - DNA, 110 bp, synthetic construct
  source 1..110: mol_type = other DNA
tctgttggaaggctaagctctgccaacacgggttaatacctgttaataccctcctcttttccaggtgatacatttacatttggtaaggactttcaggagaaaatgttcta

SEQ ID NO: 7064 - DNA, 110 bp, synthetic construct
  source 1..110: mol_type = other DNA
cttgtctaacctgtccattcttttcctagataaaaagaaacaagaaggaagacttaagcagttaaaaaatgactagctcgctgctcccaacagcccacttagcaaatgtg

SEQ ID NO: 7065 - DNA, 110 bp, synthetic construct
  source 1..110: mol_type = other DNA
agaaacaagaaggaagacttaagcagttaaaaaatgactagctcgctgctcccaacagcccacttagcaaatgtgcaggcagatcatgcggacaagataacatctgaaga

SEQ ID NO: 7066 - DNA, 110 bp, synthetic construct
  source 1..110: mol_type = other DNA
atctatacctgtgcagttatgtgagccaagacattctcttgtttgcttaaaccagattctctggagagtctcattctgtttgtagcagtaagaacagatacacaaagccc

SEQ ID NO: 7067 - DNA, 110 bp, synthetic construct
  source 1..110: mol_type = other DNA
attctctggagagtctcattctgtttgtagcagtaagaacagatacacaaagcccagtagttcctggtttcgtctttatccaggccctccgcccagacccctggcggtct

SEQ ID NO: 7068 - DNA, 110 bp, synthetic construct
  source 1..110: mol_type = other DNA
agtgaagaactagtttggctttatcatttgtataatcagttaattattcttcatacattcacgtttcagaagggccctgaatctactcttattatcgttactcactcagg

SEQ ID NO: 7069 - DNA, 110 bp, synthetic construct; identical to SEQ ID NO: 7068
  source 1..110: mol_type = other DNA

SEQ ID NO: 7070 - DNA, 110 bp, synthetic construct
  source 1..110: mol_type = other DNA
cctgtggaagaatgcatttctggctcctttcgcccttcccctttcctccccttcctacccccctgcatagaatgaaggtctgatgtagacagtgtaaatagccagagctt

SEQ ID NO: 7071 - DNA, 110 bp, synthetic construct
  source 1..110: mol_type = other DNA
tacccccctgcatagaatgaaggtctgatgtagacagtgtaaatagccagagcttctgggcatgctattgtctgagcatctgaccaacatcagcaagagagaaaagctgg

SEQ ID NO: 7072 - DNA, 110 bp, synthetic construct
  source 1..110: mol_type = other DNA
ctgctgctcccactgcacaagtccctgggcaaaatctcctgacttaagagattccagtccagccttgatcacctccccacttcctccatccgagagtgacagtcaccaaa

SEQ ID NO: 7073 - DNA, 110 bp, synthetic construct
  source 1..110: mol_type = other DNA
agtccagccttgatcacctccccacttcctccatccgagagtgacagtcaccaaactatcagctgttggtaacaagtccttttaggtcctgtgaaccaggacttaatttc

SEQ ID NO: 7074 - DNA, 110 bp, synthetic construct
  source 1..110: mol_type = other DNA
aagaaaaggttcaatagcttcttgctcttattctcaaaactcctgctggggacaaaaccaatccggagctagaaagaaggacgccctgaaggtagaggtcagacacctag

SEQ ID NO: 7075 - DNA, 110 bp, synthetic construct
  source 1..110: mol_type = other DNA
aaccaatccggagctagaaagaaggacgccctgaaggtagaggtcagacacctaggatatatctcacggaggacaaagtaaagaatttatctgttggggaagcgaagaga

SEQ ID NO: 7076 - DNA, 110 bp, synthetic construct
  source 1..110: mol_type = other DNA
gtctattataagactagtctgaattctcacagcttcaacacatcttcacaaggcagctgaggagctcccattgtggctcagcagtatcgaacccagctagtgtccctgag

SEQ ID NO: 7077 - DNA, 110 bp, synthetic construct
  source 1..110: mol_type = other DNA
ccaccacagacttaaacaccctctgttacctcttgtgtgagtgccctcagctccctccaaccccattacagtgtaagctcacagatggcagggactggactgtttccttc

SEQ ID NO: 7078 - DNA, 110 bp, synthetic construct
  source 1..110: mol_type = other DNA
tccaaccccattacagtgtaagctcacagatggcagggactggactgtttccttcacccctggacccctattcatcaggggctatgcctggcgtacaggagactttaatg

SEQ ID NO: 7079 - DNA, 110 bp, synthetic construct
  source 1..110: mol_type = other DNA
gtcattcggagatacacccatcctgttctcctcacccagagcctgcctccaggaaaactgctctaacggaacttgttcaaccgaaccaatgtgggtttttacggaaccta

SEQ ID NO: 7080 - DNA, 110 bp, synthetic construct
  source 1..110: mol_type = other DNA
gttgctgtgagctgcagtgtaggtcatagatgtggctcggatccccgcattgccatggctgtggtgtaagccggcagctgtcgctccgattcagcccccagcccgggaat

SEQ ID NO: 7081 - DNA, 110 bp, synthetic construct
  source 1..110: mol_type = other DNA
agtgtaggtcatagatgtggctcggatccccgcattgccatggctgtggtgtaagccggcagctgtcgctccgattcagcccccagcccgggaatttccacatgctgcag

SEQ ID NO: 7082 - DNA, 110 bp, synthetic construct
  source 1..110: mol_type = other DNA
gcagtgcacaagtggcatttctttaaaaaaaaattgcttcgtgtatttgttatctgtttctgcttttcacaggaggaactctctggcatgaaaaatcgggtacaagtagt

SEQ ID NO: 7083 - DNA, 110 bp, synthetic construct
  source 1..110: mol_type = other DNA
gaaagatatttttattttttcagttaggggctgttgccagtattgctgctctgaacattctttcttatgtcagttcgtgtgcatggcactcatttatgttgagtatgtac

SEQ ID NO: 7084 - DNA, 110 bp, synthetic construct
  source 1..110: mol_type = other DNA
cattctttcttatgtcagttcgtgtgcatggcactcatttatgttgagtatgtaccttgggatgttgttggtcttagggtatggatatgtttgatttgagtagataaggg

SEQ ID NO: 7085 - DNA, 110 bp, synthetic construct
  source 1..110: mol_type = other DNA
gtgagagaaatagagtttactacaggagtacagaaggagatttggctccttctgcactgggcttccaggtgatgaggctttcggagttggtgaataggagttctcagagt

SEQ ID NO: 7086 - DNA, 110 bp, synthetic construct
  source 1..110: mol_type = other DNA
actgggcttccaggtgatgaggctttcggagttggtgaataggagttctcagagtgagaagggtgaatacccaggtagcgggaaccgcacactcaaagagaaaatgatga

SEQ ID NO: 7087 - DNA, 110 bp, synthetic construct
  source 1..110: mol_type = other DNA
gcattccccagagttcctgtggtagctcagtggtaaccaaccagactaggaactgtgagaactcggtccgatccctggccctgctcagtggcttaaagttccagtgttgc

SEQ ID NO: 7088 - DNA, 110 bp, synthetic construct
  source 1..110: mol_type = other DNA
gtcacttgtgctctctgggcctcagagttactgtaatgggcagaactccatgatgctaaggtgcgtctcctctctaacacgacctgaccatttcggagacaggagcaggg

SEQ ID NO: 7089 - DNA, 110 bp, synthetic construct
  source 1..110: mol_type = other DNA
tgctggagccttccacgtgggagctgtccgacgttcacctaaaacacatctcctcaagtgccccgtggagtcgggagcccccctgccccctggacttcacaggctgcttt

SEQ ID NO: 7090 - DNA, 110 bp, synthetic construct
  source 1..110: mol_type = other DNA
tcagttttaaatgctttctaacagtgcttttaaagtgtcttttaaataccctgcatccagctttaaatagcaaagcattcctaccagattaacagttaaaacataagtgg

SEQ ID NO: 7091 - DNA, 110 bp, synthetic construct
  source 1..110: mol_type = other DNA
tccagctttaaatagcaaagcattcctaccagattaacagttaaaacataagtggccagtttaaaacatagccactgcgagatgaatgacaggttgcagtaaaatctcta

SEQ ID NO: 7092 - DNA, 110 bp, synthetic construct
  source 1..110: mol_type = other DNA
tgtgtcaagcatggtgatcatcagaaacatcctagaagagcaaaatgatacaacttggcagtttcttatgaagctgaacatagcaaatgacacaaaaattgcattcctag

SEQ ID NO: 7093 - DNA, 110 bp, synthetic construct
  source 1..110: mol_type = other DNA
ctttactcaggacggtggtttcaaaactttccctggcctcccaccaggcctgttacgtaggcggaaatgcacacaaccccacgacgttactccacctgctaagctactga

SEQ ID NO: 7094 - DNA, 110 bp, synthetic construct
  source 1..110: mol_type = other DNA
cgtaggcggaaatgcacacaaccccacgacgttactccacctgctaagctactgagctgagactggagcccaggttgatgggatttcatgatgtccgggagcttttcatt

SEQ ID NO: 7095 - DNA, 110 bp, synthetic construct
  source 1..110: mol_type = other DNA
ttaagtagacagcagggagtcctgcctcgtctacaagagtcagagaagggtttgtaggaaatgtgacgttttgagctcgcatctgaaagatgcatggtaactatgcaagc

SEQ ID NO: 7096 - DNA, 110 bp, synthetic construct
  source 1..110: mol_type = other DNA
agtcaaaactggtcctccccccacaccatgagaatagatcattttgaaaaccagaataaatttgtttgcatcttgcctgtattttcaatgtctccctctctatttactcc

SEQ ID NO: 7097 - DNA, 110 bp, synthetic construct
  source 1..110: mol_type = other DNA
ggaatcccatctttcttaatgaagccttctataaagtcaatatggaaataacattgaaccacctcttgaactaataatatgacacagttcagcacttgattgatacagtg

SEQ ID NO: 7098 - DNA, 110 bp, synthetic construct
  source 1..110: mol_type = other DNA
gaggtgtgttactataatctcatgtaggtatttttctaaaaatgttagttagctgtcacatttttaaaatttggattccagcttccttcttaaaatcaacttcattcagg

SEQ ID NO: 7099 - DNA, 110 bp, synthetic construct
  source 1..110: mol_type = other DNA
ttgccccagagtgaactttttcaggtggggttggcagtggatgtcacctatcagtgtcttatgaggctcctgaccagccctgggttggccctattcctggcttgagcttc

SEQ ID NO: 7100 - DNA, 110 bp, synthetic construct
  source 1..110: mol_type = other DNA
gtcttatgaggctcctgaccagccctgggttggccctattcctggcttgagcttcctccttctttctgaagttctattatcatccttgaatgctcatctcgggccagaat

SEQ ID NO: 7101 - DNA, 110 bp, synthetic construct
  source 1..110: mol_type = other DNA
ctgctgttattctgaagcctaggcccgtgcgtgatggaagcttccagttggagcattctccacttgctgcagccggctttggcgtcgaaagccttttctgtgtccctgtc

SEQ ID NO: 7102 - DNA, 110 bp, synthetic construct
  source 1..110: mol_type = other DNA
ttctccacttgctgcagccggctttggcgtcgaaagccttttctgtgtccctgtcacaggacatttgatgcccttcgtgattctcagctctcgtgggcatctcccatcta

SEQ ID NO: 7103 - DNA, 110 bp, synthetic construct
  source 1..110: mol_type = other DNA
gactctctgaacgtttgaagacgatggcactggtctacgcatttgacgacattgagtgaatctgtccacataagcaggactcagtaagtcattagagatttgaggacaca

SEQ ID NO: 7104 - DNA, 110 bp, synthetic construct
  source 1..110: mol_type = other DNA
gtgaatctgtccacataagcaggactcagtaagtcattagagatttgaggacacatgagctccaaaggcaggagacaaaccctacgaggactcagaagtccatcctctct

SEQ ID NO: 7105 - DNA, 110 bp, synthetic construct
  source 1..110: mol_type = other DNA
tctggcaagttaatgactctgacaagcaaaaccttccgatgaatttaaagtgggtttttttgtttatttgtttgtttgttttcctttttagggctgcacctgcagcatat

SEQ ID NO: 7106 - DNA, 110 bp, synthetic construct; identical to SEQ ID NO: 7105
  source 1..110: mol_type = other DNA

SEQ ID NO: 7107 - DNA, 110 bp, synthetic construct
  source 1..110: mol_type = other DNA
aggacagcagctctcaggtctgggcaggtatgggtgggggtatgagaggcatcgctccgcttgtgacataatgaaattcggtgcctgcgacacacaggagaaatagcccc

SEQ ID NO: 7108 - DNA, 110 bp, synthetic construct
  source 1..110: mol_type = other DNA
ctgtctaacagtaatagcgaacatttattgaatgcttatcatgtgttaggaacatgtaggagctcctagcacacaatggtaggttatacgtattgacttacgtcatcttc

SEQ ID NO: 7109 - DNA, 110 bp, synthetic construct
  source 1..110: mol_type = other DNA
gtaggagctcctagcacacaatggtaggttatacgtattgacttacgtcatcttcataaaaccctatgaagtaattatcattactcccaatttacagacaggaaaactga

SEQ ID NO: 7110 - DNA, 110 bp, synthetic construct
  source 1..110: mol_type = other DNA
ttaaaaagagccacttgctccaagagaatgttccagtttggtggcaaagtgcttgaacgcccagacggaacgctgttctttctagcccattttggatgggctgcaatggc

SEQ ID NO: 7111 - DNA, 110 bp, synthetic construct
  source 1..110: mol_type = other DNA
aacgcccagacggaacgctgttctttctagcccattttggatgggctgcaatggcagctcccattttaaagggacgtgggctccaaaaatgcacttggaagtaagtcttt

SEQ ID NO: 7112 - DNA, 110 bp, synthetic construct
  source 1..110: mol_type = other DNA
acagactccagaatgttgtaccaggaaaactcaccaagactccaacccagacggagaagaatgaggatgggtcccaaacgagggagggtgacaaagctatttatcatttc

SEQ ID NO: 7113 - DNA, 110 bp, synthetic construct
  source 1..110: mol_type = other DNA
gaagaatgaggatgggtcccaaacgagggagggtgacaaagctatttatcatttcagtcatgttttctgacagcttcaggacatcgcacacctttggttgggactactga

SEQ ID NO: 7114 - DNA, 110 bp, synthetic construct
  source 1..110: mol_type = other DNA
cccagcctaggcacagccttcttttcggcctctcttggtctgcaagcttcctgtttcctccaccactttcgcctcttcctcgttgtcatttcagctggtcactggcttcc

SEQ ID NO: 7115 - DNA, 110 bp, synthetic construct
  source 1..110: mol_type = other DNA
tcctccaccactttcgcctcttcctcgttgtcatttcagctggtcactggcttccaggggtgacggcagcaaaaggacactgcctggccagagacatgcaagaatggagg

SEQ ID NO: 7116 - DNA, 110 bp, synthetic construct
  source 1..110: mol_type = other DNA
gatgaactctgatgtttcactccagtctcacttgtctgggagctgcaaaccttcacagcgttccatggagcccaccgggtctatgtgagctgggtcccaggactcaggac

SEQ ID NO: 7117 - DNA, 110 bp, synthetic construct
  source 1..110: mol_type = other DNA
cagcgttccatggagcccaccgggtctatgtgagctgggtcccaggactcaggaccataccatacagatgatctgttcaggagatcaagtgccactgaaagatgtatact

SEQ ID NO: 7118 - DNA, 110 bp, synthetic construct
  source 1..110: mol_type = other DNA
ccagcgagatctccttgaagccccaggggtacctatgaagtcacagcttcccccagggtcactctagctccagctaggcctggggtttccttcctcatgggcaactttcc

SEQ ID NO: 7119 - DNA, 110 bp, synthetic construct
  source 1..110: mol_type = other DNA
gggtcactctagctccagctaggcctggggtttccttcctcatgggcaactttcccagagcttccacacggccaataggctgtttgggggtttctaggtttctccttccg

SEQ ID NO: 7120 - DNA, 110 bp, synthetic construct; identical to SEQ ID NO: 7118
  source 1..110: mol_type = other DNA

SEQ ID NO: 7121 - DNA, 110 bp, synthetic construct; identical to SEQ ID NO: 7119
  source 1..110: mol_type = other DNA

SEQ ID NO: 7122 - DNA, 110 bp, synthetic construct
  source 1..110: mol_type = other DNA
tttgtgcatttccctgatgacgtctggaattgctttgtgtgtctagtggccattctacctcccccttttgtaaaatgtctttggtccattttcttgtaggggtagcttgt

SEQ ID NO: 7123 - DNA, 110 bp, synthetic construct
  source 1..110: mol_type = other DNA
tacctcccccttttgtaaaatgtctttggtccattttcttgtaggggtagcttgttggtcacttgtctctccttgatttgcaggagttttgttcttttgtttgtcttttg

SEQ ID NO: 7124 - DNA, 110 bp, synthetic construct
  source 1..110: mol_type = other DNA
gaagccactgaaactcagactcaagaaggacattttccaagcttgcctacctcgaagagggtgacgtatggtcagtgtggcctgaaagctttacgttcttacaactgggg

SEQ ID NO: 7125 - DNA, 110 bp, synthetic construct
  source 1..110: mol_type = other DNA
ttttctcagagttttacccatcatgactgccatccggctacgagaatttattgaccgccgcccagggattccatccaggtaacgttcttccagagacaggtgcctccaga

SEQ ID NO: 7126 - DNA, 110 bp, synthetic construct
  source 1..110: mol_type = other DNA
cgccgcccagggattccatccaggtaacgttcttccagagacaggtgcctccagagctgtggcaaggcagacagaccgacccctggggaattggaagtgcctctccctgt

SEQ ID NO: 7127 - DNA, 110 bp, synthetic construct
  source 1..110: mol_type = other DNA
tgccaggatgggaactccactatgagtgttttttatgtaacaatgaatctagttttatttcttttggctcaaaactattcaacagctaaactccctctcactgcatataa

SEQ ID NO: 7128 - DNA, 110 bp, synthetic construct
  source 1..110: mol_type = other DNA
tatttcttttggctcaaaactattcaacagctaaactccctctcactgcatataagaccaacctaaggcctgtgagttggtccctacctgtcgaactttatcttcaggta

SEQ ID NO: 7129 - DNA, 110 bp, synthetic construct
  source 1..110: mol_type = other DNA
acaaaggtggctggagtttgcaaagcagaatagcaaagatgaaagagctgtgcgcagaattccagagatatgctaagggtccccttcatctatgcacaaagtgtatattt

SEQ ID NO: 7130 - DNA, 110 bp, synthetic construct
  source 1..110: mol_type = other DNA
gaactcctgcttctcccttttaatgagctgtttgttccctgatacttgcagagctggctttttgtcgtttagatggccttaaacctcacctcgtcaatgagaccttccca

SEQ ID NO: 7131 - DNA, 110 bp, synthetic construct
  source 1..110: mol_type = other DNA
ccgattgtgaccaggactcgttgcttgtagctgtggccttgctgttcttttgtccgggcctctctcagatgcttgaagcctcttgggttcctcctctgcatccttcatct

SEQ ID NO: 7132 - DNA, 110 bp, synthetic construct
  source 1..110: mol_type = other DNA
gggcctctctcagatgcttgaagcctcttgggttcctcctctgcatccttcatctttaaaccggcaatagtgcattgagtcctcacacctcacatatctctgcctccctc

SEQ ID NO: 7133 - DNA, 110 bp, synthetic construct
  source 1..110: mol_type = other DNA
gaaacctccatatgctgtgggtacgtctccaacaagacaaaaaaaaaaagttcaagcttctaatcatggcttggtctttccagtgacaggaaccatccagcacccgccca

SEQ ID NO: 7134 - DNA, 110 bp, synthetic construct; identical to SEQ ID NO: 7133
  source 1..110: mol_type = other DNA

SEQ ID NO: 7135 - DNA, 110 bp, synthetic construct
  source 1..110: mol_type = other DNA
atccctggcctagcttggtgggttaaggatctggcactgctatggcgcagggtggtagctgcagttccaatgcgactcttaggtgggaaacctccatatactgcgggtgc

SEQ ID NO: 7136 - DNA, 110 bp, synthetic construct
  source 1..110: mol_type = other DNA
tagctgcagttccaatgcgactcttaggtgggaaacctccatatactgcgggtgcggttctaaaaaggggaggggagaaaaaaaaaagagcaacatttcctgcagtggca

SEQ ID NO: 7137 - DNA, 110 bp, synthetic construct
  source 1..110: mol_type = other DNA
gtgttagatgacaacacacgtagaagagtcaagagcacaagctctccctcttactggtcatggccccaaagcaaattatttgcatcttttatgccttaggcttcctatct

SEQ ID NO: 7138 - DNA, 110 bp, synthetic construct
  source 1..110: mol_type = other DNA
ttgaaagggtctgtgagacacctttagactctttagaggttgttttgctagctagagtggtgccctgaaacaccatattccatctttctgaggcctcaacaaaggatttt

SEQ ID NO: 7139 - DNA, 110 bp, synthetic construct
  source 1..110: mol_type = other DNA
ccccctgagtattggtggtctcaggaagtgtactttctggggcctccgggcacataattcctgtggcctctgggtgtgtaccctctgtggcttctaagttcatacttctg

SEQ ID NO: 7140 - DNA, 110 bp, synthetic construct
  source 1..110: mol_type = other DNA
actaagtgagttggtcctaagtgcgctggttattcaggagatgcccctgtctagaggtggcagtcacttgacctgtctgaatgaagtagctgggactcaggggatcagag

SEQ ID NO: 7141 - DNA, 110 bp, synthetic construct
  source 1..110: mol_type = other DNA
ggtggcagtcacttgacctgtctgaatgaagtagctgggactcaggggatcagagtgcacgagccggagtgcgcagacttgtaaccagctcacaagagccagtggttaag

SEQ ID NO: 7142 - DNA, 110 bp, synthetic construct
  source 1..110: mol_type = other DNA
aggaagttaacggatgaaccaaaaatagcttctgtgctcatattggcggtattgctgctgcctgctgggtgggagagaatgtcccggaacgggatggcttgaggcttttg

SEQ ID NO: 7143 - DNA, 110 bp, synthetic construct
  source 1..110: mol_type = other DNA
tgctgcctgctgggtgggagagaatgtcccggaacgggatggcttgaggcttttgctaaaagagaagtacagcatggcttagggggctaaagggactgcttttggatccc

SEQ ID NO: 7144 - DNA, 110 bp, synthetic construct
  source 1..110: mol_type = other DNA
tgggctgggaccactctgactggcagcccagtaaactcccaaacaatgtggcacctggccttctgcagagaccaaatggagcgtgcgttgacgggaatggtgttaatcca

SEQ ID NO: 7145 - DNA, 110 bp, synthetic construct
  source 1..110: mol_type = other DNA
tggccttctgcagagaccaaatggagcgtgcgttgacgggaatggtgttaatccagcttgcacttggatttgtgaagcagagacttgtattttcaaaatatgtagggaaa

SEQ ID NO: 7146 - DNA, 110 bp, synthetic construct
  source 1..110: mol_type = other DNA
ttatggggtgctttatatacaattaaatttgccaaagaaaacaattacaagcttggcgacaacaataacacaaacctatttaaagttgttggagagtggccaaaataggc

SEQ ID NO: 7147 - DNA, 110 bp, synthetic construct
  source 1..110: mol_type = other DNA
atcgcatgagccccttcctgagtgtcttcactttctgtcttattggggctgccgatgaaaccagcgaaacaagctttagtaaattatcctctgggataaagcagcctcac

SEQ ID NO: 7148 - DNA, 110 bp, synthetic construct
  source 1..110: mol_type = other DNA
tgaaaccagcgaaacaagctttagtaaattatcctctgggataaagcagcctcactgcgtctctgagataaaaggcgtttcgacaacttgatggctgacaggagttgttt

SEQ ID NO: 7149 - DNA, 110 bp, synthetic construct
  source 1..110: mol_type = other DNA
actgcgtggggcctgctcagggacacacctctggagagagccttggtcaccttttagccctttggccagatggtggacgcacattcattttatgctactttctgcccctc

SEQ ID NO: 7150 - DNA, 110 bp, synthetic construct
  source 1..110: mol_type = other DNA
agccctttggccagatggtggacgcacattcattttatgctactttctgcccctctgtatttctgtcaaagttcatggtaacttttcatcaaggaaaaagagctctcttt

SEQ ID NO: 7151 - DNA, 110 bp, synthetic construct
  source 1..110: mol_type = other DNA
ctgggggttcagggctcctgccgctcgctgtgatctggagaaaaagtgaggggcttgcaccggaagtgatgcttctttcctgcacaccgtgtcaagccccaggttgggtt

SEQ ID NO: 7152 - DNA, 110 bp, synthetic construct
  source 1..110: mol_type = other DNA
ctcgttaactgctgaggcacgacaggaactcctgctccttcttttaaaaattatagttgatttacagtgtgtcttcaagtaaggggggtaagtcaggatgcagatggtga

SEQ ID NO: 7153 - DNA, 110 bp, synthetic construct
  source 1..110: mol_type = other DNA
tgtcttattatagttgatttacaatgtcctgtcaattgctgctgcaaagttatttttaaaaacgactccgcatcctgtctcctttctcaaccccaccccttctgcgctca

SEQ ID NO: 7154 - DNA, 110 bp, synthetic construct; identical to SEQ ID NO: 7153
  source 1..110: mol_type = other DNA

SEQ ID NO: 7155 - DNA, 110 bp, synthetic construct; identical to SEQ ID NO: 7153
  source 1..110: mol_type = other DNA

SEQ ID NO: 7156 - DNA, 110 bp, synthetic construct; identical to SEQ ID NO: 7153
  source 1..110: mol_type = other DNA

SEQ ID NO: 7157 - DNA, 110 bp, synthetic construct
  source 1..110: mol_type = other DNA
atttcccgtttgaagtttctggaaagagactattgggttccttagatgagtctcgtacatctcaccacctctgctctgttcttggagagaggcctgtgcaccagaacaat

SEQ ID NO: 7158 - DNA, 110 bp, synthetic construct
  source 1..110: mol_type = other DNA
tacatctcaccacctctgctctgttcttggagagaggcctgtgcaccagaacaatttctaagccttgagctacttatgcaagcaattctagaacattcaggaaatacttt

SEQ ID NO: 7159 - DNA, 110 bp, synthetic construct; identical to SEQ ID NO: 7157
  source 1..110: mol_type = other DNA

SEQ ID NO: 7160 - DNA, 110 bp, synthetic construct; identical to SEQ ID NO: 7158
  source 1..110: mol_type = other DNA

SEQ ID NO: 7161 - DNA, 110 bp, synthetic construct
  source 1..110: mol_type = other DNA
atgttgaataaaagtggcaagtgtggatatccttgtcttatttctcatcttagtggaaattctttatttcagcttttcaccattgggaatgttgttagctctgagttggt

SEQ ID NO: 7162 - DNA, 110 bp, synthetic construct; identical to SEQ ID NO: 7161
  source 1..110: mol_type = other DNA

SEQ ID NO: 7163 - DNA, 110 bp, synthetic construct
  source 1..110: mol_type = other DNA
ttgttttggggggtttggcgtgtggtgttctggctggtagggctgatgcccaatgaagtgcaggaggcgacagtgggtagaaagtaaacagcgtggccgttttccggggg

SEQ ID NO: 7164 - DNA, 110 bp, synthetic construct
  source 1..110: mol_type = other DNA
aagtgcaggaggcgacagtgggtagaaagtaaacagcgtggccgttttccggggggggggttctccctccctcaagactctgctgaagcttggccaaggtgggagcacca

SEQ ID NO: 7165 - DNA, 110 bp, synthetic construct
  source 1..110: mol_type = other DNA
cgggcacaatgttcctaaaatccagatttccacagtcaggaaataacctattcatacctggtactcctgtttagcctttccatgccaagggccaactctctcattattaa

SEQ ID NO: 7166 - DNA, 110 bp, synthetic construct
  source 1..110: mol_type = other DNA
ctctgagcatttctgcatgcttgacagcttttacgtaaaaatgtacaatccctctctccaaaatggcacaacggagatttcataggcctgaacattgattagatgaagag

SEQ ID NO: 7167 - DNA, 110 bp, synthetic construct
  source 1..110: mol_type = other DNA
ctccaaaatggcacaacggagatttcataggcctgaacattgattagatgaagagggtgggacacaaagaggagctgaaaaataactctatacatagcatcagaatttgc

SEQ ID NO: 7168 - DNA, 110 bp, synthetic construct
  source 1..110: mol_type = other DNA
catcttccagcagccgtttagatattgggttgtctctgcgttctcagaactggaagcccactcagtgtctgggaagctagagaagggatcctggctgcaatactctgttc

SEQ ID NO: 7169 - DNA, 110 bp, synthetic construct
  source 1..110: mol_type = other DNA
gcccactcagtgtctgggaagctagagaagggatcctggctgcaatactctgttcccctgactcacacaggagatgaaaagtttatccttctggactcaaatgcatatta

SEQ ID NO: 7170 - DNA, 110 bp, synthetic construct
  source 1..110: mol_type = other DNA
ctgtccgagtgctatgcatggaagtgtcagcttggtggctcggtcagtggctgctttttcatcctcagtctagcaagctctgcgaatggagacgcagacagaggggagga

SEQ ID NO: 7171 - DNA, 110 bp, synthetic construct
  source 1..110: mol_type = other DNA
ttttcatcctcagtctagcaagctctgcgaatggagacgcagacagaggggaggaaagagaaatcaaccaggagagcagggattagggtcccatcctcaaagtatagggc

SEQ ID NO: 7172 - DNA, 110 bp, synthetic construct
  source 1..110: mol_type = other DNA
tgctcttggccccatctcagccttgggcatgctggcagtaggccctggtgtccatccctcagatattgttttcacaagccaccagtacagatccactgaggtcagatacc

SEQ ID NO: 7173 - DNA, 110 bp, synthetic construct
  source 1..110: mol_type = other DNA
tatgggctacccagtctacgatatttttatgcagcagcacaaatggactaagacggccccagagttccattactaggaattcattcaggagaaatgaaaatgtctctaca

SEQ ID NO: 7174 - DNA, 110 bp, synthetic construct
  source 1..110: mol_type = other DNA
atttgatccgcaagcagtttatttttgtctgggtgtgctacataggataccaggacccatcacaaatgtttaaaatagctgaacttttaaaaacctgttggatgctttta

SEQ ID NO: 7175 - DNA, 110 bp, synthetic construct
  source 1..110: mol_type = other DNA
gaggttaagtacactgcctgaggtcgcccaggtaggaagtggaagaatctggatttgactgtgggctggtctggctccaaaggccttgttcttcccactagaccatgcta

SEQ ID NO: 7176 - DNA, 110 bp, synthetic construct
  source 1..110: mol_type = other DNA
tgactgtgggctggtctggctccaaaggccttgttcttcccactagaccatgctagcttaggaaatgccccttcttctttgctcaggtgactgcacaactgattttcata

SEQ ID NO: 7177 - DNA, 110 bp, synthetic construct
  source 1..110: mol_type = other DNA
tcccccagtcccgcttctgacaccacttctaaggtttactctgtttcgaaacacgagaaggtacaaagatgtactcttcatttcaggatgcagtgtacagcagaggctct

SEQ ID NO: 7178 - DNA, 110 bp, synthetic construct
  source 1..110: mol_type = other DNA
acacacgagacccaacaactcaacatcatatgaaaattcctccagcgcagagcgttagacatgacgctgctctgaagggaaatggtcccaaaggcccaaagcctggctcc

SEQ ID NO: 7179 - DNA, 110 bp, synthetic construct
  source 1..110: mol_type = other DNA
gctgaggtcacactggagtgggggtgggccctcagcagaagctggtgaccccataagaaggctggagaaagacgaggagaaggctgcgtggagacggaggcagaggctgg

SEQ ID NO: 7180 - DNA, 110 bp, synthetic construct
  source 1..110: mol_type = other DNA
gcagaactgggtcctttccctgtctttctctttctagggaaataaaaagtttattctttctcaaaaacttggaagattgcttttgataagtcagtatgaggaagcttgag

SEQ ID NO: 7181 - DNA, 110 bp, synthetic construct
  source 1..110: mol_type = other DNA
ccaacataaattgtcatggagtaaatgttggtgtttccaggaaattcatgcgttgaggcaccaaaccctaatgtgatggtacgtggaagcagggtctttgagaggtactt

SEQ ID NO: 7182 - DNA, 110 bp, synthetic construct
  source 1..110: mol_type = other DNA
aggcaccaaaccctaatgtgatggtacgtggaagcagggtctttgagaggtacttaggtcatgagagctgagccttcatggatgggattaatgtcttcctaagagacaca

SEQ ID NO: 7183 - DNA, 110 bp, synthetic construct
  source 1..110: mol_type = other DNA
tacatagagtctactgtcttttctgtgattagaggtacatttacgagcattaggtatcaagttgacctacacatggggagggcagaagtgtagacacaaagtaacactgg

SEQ ID NO: 7184 - DNA, 110 bp, synthetic construct
  source 1..110: mol_type = other DNA
tgcgaggagcagcgtctgctgaggcttgctagccagggcagtggcaggggcaaggccatcgatgtgaccatgagcttggcttatgaaacagaccagcgtgtggagtgtag

SEQ ID NO: 7185 - DNA, 110 bp, synthetic construct
  source 1..110: mol_type = other DNA
gtccagaaaaaaataaaatattagttgtgtgtgagctttcggtgtcaagtcttgagaataataaggtaacaaaattgcaagcatcaaggaagtgcaccgctagctcaaag

SEQ ID NO: 7186 - DNA, 110 bp, synthetic construct
  source 1..110: mol_type = other DNA
gacaaggaaatcagcatttaaataggaaacccagaccagaagaaatcccaaaatgcaaagactcaggatcttaggttcagcaaatattttgtgcttctgataaactgtga

SEQ ID NO: 7187 - DNA, 110 bp, synthetic construct
  source 1..110: mol_type = other DNA
tctgggtctaaaacctgctaatgttattgggctttgaaattccatttagaggagaataagctggactgtggaataggtattttacacagacatgttcccagggacactaa

SEQ ID NO: 7188 - DNA, 110 bp, synthetic construct
  source 1..110: mol_type = other DNA
ataagctggactgtggaataggtattttacacagacatgttcccagggacactaatcaggttttggaaaagaggaaaccagccacttgctgagcggcatcgtggccaaaa

SEQ ID NO: 7189 - DNA, 110 bp, synthetic construct
  source 1..110: mol_type = other DNA
agggtcaatacgtgtgattgctgatggaaggatgaaccatggcttcagtggaagcgttttcatttggtattgaaagtaaatgtccagctgaaaaataattgcaccgagta

SEQ ID NO: 7190 - DNA, 110 bp, synthetic construct
  source 1..110: mol_type = other DNA
gttttcatttggtattgaaagtaaatgtccagctgaaaaataattgcaccgagtaaaataaggctgagataatgaaacagtgaagaacaaatccaaccccatttgagatc

SEQ ID NO: 7191 - DNA, 110 bp, synthetic construct; identical to SEQ ID NO: 7189
  source 1..110: mol_type = other DNA

SEQ ID NO: 7192 - DNA, 110 bp, synthetic construct; identical to SEQ ID NO: 7190
  source 1..110: mol_type = other DNA

SEQ ID NO: 7193 - DNA, 110 bp, synthetic construct
  source 1..110: mol_type = other DNA
gctcctagacagattcattaaccactgcgccacgatgggaactcctatatcgtgctaatttttataatgcaaatgtatccttatattgcatatgtttaaaaatgaagtat

SEQ ID NO: 7194 - DNA, 110 bp, synthetic construct; identical to SEQ ID NO: 7193
  source 1..110: mol_type = other DNA

SEQ ID NO: 7195 - DNA, 110 bp, synthetic construct
  source 1..110: mol_type = other DNA
tctactttaagatgaggataaaagccattgttgcttttaatgtatctatttgatagagctacatcgtcttctgtaaatcaggctttacaggcacttttatatcgacgtca

SEQ ID NO: 7196 - DNA, 110 bp, synthetic construct
  source 1..110: mol_type = other DNA
gagctacatcgtcttctgtaaatcaggctttacaggcacttttatatcgacgtcacattgatacaagaagcctccatttttcttgattttatacgcttcagaaatcttag

SEQ ID NO: 7197 - DNA, 110 bp, synthetic construct
  source 1..110: mol_type = other DNA
ttgagaggtaaaaccaacagactatgttggtgaactgactttagtggagcaagagaatgagaagggatggatggggactgtacactcagggctactcccagcagtatgga

SEQ ID NO: 7198 - DNA, 110 bp, synthetic construct
  source 1..110: mol_type = other DNA
aatgagaagggatggatggggactgtacactcagggctactcccagcagtatggatgcaagacctggggcagaacccccccacccccggaccctcagtaggaaacgcaag

SEQ ID NO: 7199 - DNA, 110 bp, synthetic construct
  source 1..110: mol_type = other DNA
ttaagagaagtcaaaccataggtattagcccactgcttcaattctctttccgtaaagatcagaggcaaccttgtgaggaataccacagcttcacagaagatttcaggagg

SEQ ID NO: 7200 - DNA, 110 bp, synthetic construct
  source 1..110: mol_type = other DNA
tctggagatgaggtacctggagaaggaagtagaggttatccagattttctagcctgttctctgataagtggatgaagttggccgtaagcctgatgtttggcaaagtcacc

SEQ ID NO: 7201 - DNA, 110 bp, synthetic construct
  source 1..110: mol_type = other DNA
gttctctgataagtggatgaagttggccgtaagcctgatgtttggcaaagtcaccagtttattgccgcccaagaagagagtaggtatgctcggaataaactgaattgttt

SEQ ID NO: 7202 - DNA, 110 bp, synthetic construct
  source 1..110: mol_type = other DNA
agttgtctaaacccagagaatggatgacaccaacagtgaaccttgatgtagaggttagttaacactaagtactggctcatcaattgtagccagggtacctcactaaggca

SEQ ID NO: 7203 - DNA, 110 bp, synthetic construct
  source 1..110: mol_type = other DNA
tagttaacactaagtactggctcatcaattgtagccagggtacctcactaaggcagaggttactaatgggcaaaactgcactgagagggggtcatatgggaaatctgtat

SEQ ID NO: 7204 - DNA, 110 bp, synthetic construct
  source 1..110: mol_type = other DNA
ggaaataagcccagtgcaaaggcttatttccatctaaggctcctcactaactctggcagtgataaatgtcacaaggcatgtctctccgctcttcccaactctgagaccaa

SEQ ID NO: 7205 - DNA, 110 bp, synthetic construct
  source 1..110: mol_type = other DNA
tgaaaagtttctgaacattcgttgcacagcaacatgaacatatttaatgctgcggaatcgcacacttaaaaacggttaagacggtcaattttaggttatgcctattttgt

SEQ ID NO: 7206 - DNA, 110 bp, synthetic construct
  source 1..110: mol_type = other DNA
aatcgcacacttaaaaacggttaagacggtcaattttaggttatgcctattttgtcacaatgataaattttcaaaagaaagaaaacgaaggaatgatgcccagcaaacca

SEQ ID NO: 7207 - DNA, 110 bp, synthetic construct
  source 1..110: mol_type = other DNA
attctagaaagcagctcctctgccaaggtgagtcagagcctgatgtacagatgctgctggatggtttgaagacggaaggcctggccagcctcacaggcgagcatccctga

SEQ ID NO: 7208 - DNA, 110 bp, synthetic construct
  source 1..110: mol_type = other DNA
gctggatggtttgaagacggaaggcctggccagcctcacaggcgagcatccctgaaccgcctactctaaaggattttgtttggccacttggggctgttgagaagagcttg

SEQ ID NO: 7209 - DNA, 110 bp, synthetic construct
  source 1..110: mol_type = other DNA
gagagatagtcaggacatcgcttagcaaaactgaagagggctgacaaagtttcctggctacaaaaagaactctcccctggcaaaagcagcctgacatgtaatgcaggctt

SEQ ID NO: 7210 - DNA, 110 bp, synthetic construct
  source 1..110: mol_type = other DNA
ggctacaaaaagaactctcccctggcaaaagcagcctgacatgtaatgcaggcttcttaatctttcctgtgcctggaccctttggcagtttagtaaagccaagatcagat

SEQ ID NO: 7211 - DNA, 110 bp, synthetic construct
  source 1..110: mol_type = other DNA
cctgacccctagaacacacagcggtgcagttagcctcagtatcacaaggtagctcctggcacagctccagacactatgtaattatttgaattaggatctgtgccacttta

SEQ ID NO: 7212 - DNA, 110 bp, synthetic construct
  source 1..110: mol_type = other DNA
cccagttcatttctgagctctgttgttactgcgctctgctattttaagttgaaaataaaatatttgctcatagtagcaatgaagttacggtctcatgattcagcctgttc

SEQ ID NO: 7213 - DNA, 110 bp, synthetic construct
  source 1..110: mol_type = other DNA
taaaatatttgctcatagtagcaatgaagttacggtctcatgattcagcctgttctggaaaaccttgcttggaacagggaagagtcagcactagaaaatgttacacgcta

SEQ ID NO: 7214 - DNA, 110 bp, synthetic construct
  source 1..110: mol_type = other DNA
ttatgtgaatggtctaatctcacgcctctaagaagaaagcaactcgggagtgtgtggaagagcttcctgaacactgagctgcaggaaagtggatggacggtgagtaagag

SEQ ID NO: 7215 - DNA, 110 bp, synthetic construct; identical to SEQ ID NO: 7214
  source 1..110: mol_type = other DNA

SEQ ID NO: 7216 - DNA, 110 bp, synthetic construct
  source 1..110: mol_type = other DNA
ggtctgcttgtttccaaatcccactctttctgctatgtaatcccgacccacgtgggggcttggtagctgaagagtgatgggccacagagaagaaaggtcagcacaatttc

SEQ ID NO: 7217 - DNA, 110 bp, synthetic construct
  source 1..110: mol_type = other DNA
atcatctgccagccctacagcccaaagcgaatgacataaaatcgcctggcctccatttcctgatctgtcgtgagccaaggggtgggggtgggagagaacaatgtagaagc

SEQ ID NO: 7218 - DNA, 110 bp, synthetic construct
  source 1..110: mol_type = other DNA
tttcctgatctgtcgtgagccaaggggtgggggtgggagagaacaatgtagaagcaaaaactgacactttgccttgttttcaacacaatcatgtagtttagggtccctgg

SEQ ID NO: 7219 - DNA, 110 bp, synthetic construct
  source 1..110: mol_type = other DNA
gattccttagccccagtatagtacagaaaagatgcttaataaatgtacatatgaaacgtgtaaagtattataacagtcccagtgccatgggttccaggtggaaacgtgac

SEQ ID NO: 7220 - DNA, 110 bp, synthetic construct
  source 1..110: mol_type = other DNA
acgtgtaaagtattataacagtcccagtgccatgggttccaggtggaaacgtgacccgtgctcagtatatcagggacatcaccttgtaggctttcgcagtcacctccctc

SEQ ID NO: 7221 - DNA, 110 bp, synthetic construct
  source 1..110: mol_type = other DNA
cctctgcaaatgcaccccttgatgtacataaaaacaagcttgcagataaggccgtttttgtgagaacctctcagaaaaaaagataacatatctgtgatagtgaatcacag

SEQ ID NO: 7222 - DNA, 110 bp, synthetic construct
  source 1..110: mol_type = other DNA
aaaataacatgatgcagttccaaagtagtatttgaatagaaagctctaaggaccagggtggttttggatacaatcggttgacataaaatgaaatgtaagtttgtagatct

SEQ ID NO: 7223 - DNA, 110 bp, synthetic construct
  source 1..110: mol_type = other DNA
gggtggttttggatacaatcggttgacataaaatgaaatgtaagtttgtagatctcctcaatctcgagcaaatcagcatggaacaactgtttgtgatgttagagaagcta

SEQ ID NO: 7224 - DNA, 110 bp, synthetic construct
  source 1..110: mol_type = other DNA
agactcttctcacacgcttgctgttgggggattggaacacgatctagcccagaccaatgagagagcttcctaaatgctttctctgcttctgccctctttataaaataaaa

SEQ ID NO: 7225 - DNA, 110 bp, synthetic construct
  source 1..110: mol_type = other DNA
aatcaattcagaacacatttctgaggcttctaaagaagccattaaccagcgctgctcagccttccttggctgcacattggaatcagctggggagttttacaaatctcagt

SEQ ID NO: 7226 - DNA, 110 bp, synthetic construct
  source 1..110: mol_type = other DNA
tcagccttccttggctgcacattggaatcagctggggagttttacaaatctcagtgcctgagctgcaccctattcccattaaatgagagtctctggggatgagacccaga

SEQ ID NO: 7227 - DNA, 110 bp, synthetic construct
  source 1..110: mol_type = other DNA
aagaagcacatacattgagaaacaaatcaaacacaggctcccgggaagttctctaagacagctgggcccttaacatatctgaggtctggaatgtttagcatgttgttatt

SEQ ID NO: 7228 - DNA, 110 bp, synthetic construct
  source 1..110: mol_type = other DNA
agacagctgggcccttaacatatctgaggtctggaatgtttagcatgttgttattaaatagcaacgggatgcctaagatttcaaacgccatcctcactttctgattcaac

SEQ ID NO: 7229 - DNA, 110 bp, synthetic construct
  source 1..110: mol_type = other DNA
ccccagtctgacacatagtagacattcaatcttttgtttaatagctatatccagttatttccctgtattccagctcaacatatacaatttcttcaaccattcttggtgta

SEQ ID NO: 7230 - DNA, 110 bp, synthetic construct
  source 1..110: mol_type = other DNA
aatgtgtgtgtttgtacacatttccatgcatatatctgtatgtacattggtacacacattaagctgaacgtgagcttatgtcgatgcctctaacttcattaccacgtgga

SEQ ID NO: 7231 - DNA, 110 bp, synthetic construct
  source 1..110: mol_type = other DNA
acattaagctgaacgtgagcttatgtcgatgcctctaacttcattaccacgtggatgattctagctccctccccttgcttgtctctaaattcccaatctaacagtgggaa

SEQ ID NO: 7232 - DNA, 110 bp, synthetic construct
  source 1..110: mol_type = other DNA
tctttgatagtaaagtcatcttaaatcgacagcttttccaatttacagtggcttttaagatatggtttaatgaaatatagaaacgtatattctggagttcccattgtgat

SEQ ID NO: 7233 - DNA, 110 bp, synthetic construct
  source 1..110: mol_type = other DNA
tgctgggcatagtgctgccgtctcataaccatccagggaacacggtgaagagtgaacgactcatgaagaatgagtcctcacatgtcctgcttctgagagggagctgacac

SEQ ID NO: 7234 - DNA, 110 bp, synthetic construct
  source 1..110: mol_type = other DNA
ggcattgattcagccgagaggccccactgataaggtgtcgttatccttttccaccgccagccccatccaagctcctgcattgaatttggatcccatttttatttcaggaa

SEQ ID NO: 7235 - DNA, 110 bp, synthetic construct
  source 1..110: mol_type = other DNA
gccagccccatccaagctcctgcattgaatttggatcccatttttatttcaggaacagagactaaggactgtaacccatggtaagttaggagttgaaacaacagccactg

SEQ ID NO: 7236 - DNA, 110 bp, synthetic construct
  source 1..110: mol_type = other DNA
actgtcatttcttattgctgaaaatatgcatggtagagcccccttttctttcccttgatccttggtaatctaacttacactaattctgtctaaaatagtagggcctgagg

SEQ ID NO: 7237 - DNA, 110 bp, synthetic construct
  source 1..110: mol_type = other DNA
tgatccttggtaatctaacttacactaattctgtctaaaatagtagggcctgaggcaatagttaatgaattttgcagtctctgtttttaaatatggaagctttttttttt

SEQ ID NO: 7238 - DNA, 110 bp, synthetic construct
  source 1..110: mol_type = other DNA
agacatactgacagccgcctctaatttctgttatgtgtaaaagcacggttacgaattcacagatgtttggtgactctgagctattccaagagggggagttttcatggaga

SEQ ID NO: 7239 - DNA, 110 bp, synthetic construct
  source 1..110: mol_type = other DNA
ttcacagatgtttggtgactctgagctattccaagagggggagttttcatggagattttgggaattacactaggccataaaatacgagacagattatgtggaggacagaa

SEQ ID NO: 7240 - DNA, 110 bp, synthetic construct; identical to SEQ ID NO: 7238
  source 1..110: mol_type = other DNA

SEQ ID NO: 7241 - DNA, 110 bp, synthetic construct; identical to SEQ ID NO: 7239
  source 1..110: mol_type = other DNA

SEQ ID NO: 7242 - DNA, 110 bp, synthetic construct
  source 1..110: mol_type = other DNA
tttatggttgaaaactggctgttgcagcaatattcactttaaaaacagagttttggcccgtattcagtattactatggaaacagctgtttctagcaattcactgataaga

SEQ ID NO: 7243 - DNA, 110 bp, synthetic construct
  source 1..110: mol_type = other DNA
gcccgtattcagtattactatggaaacagctgtttctagcaattcactgataagatacagttcaaggacccaggtctgtgtgggaggttttttttttaccatctaccaaa

SEQ ID NO: 7244 - DNA, 110 bp, synthetic construct
  source 1..110: mol_type = other DNA
taactctacttggtgtgagtttatttctgggctctctgttctgttctgttgatctcattgtctagtctttagtgaatactatgctgtcttggttaattgaactttttata

SEQ ID NO: 7245 - DNA, 110 bp, synthetic construct
  source 1..110: mol_type = other DNA
tcacctcacataatgggtaaaaaacggaaaaatcacatagaccattttttatgatacaaacatcttcatttctgaactcaaaaggacaattggtctacatgtgaatgcat

SEQ ID NO: 7246 - DNA, 110 bp, synthetic construct; identical to SEQ ID NO: 7245
  source 1..110: mol_type = other DNA

SEQ ID NO: 7247 - DNA, 110 bp, synthetic construct
  source 1..110: mol_type = other DNA
agtctccgtcctccctactccccagtggagctcctcctggttaacacagccagaggtcaactccaagcgctgactggaatcaacctgtcacaggcacgacagctggtgtc

SEQ ID NO: 7248 - DNA, 110 bp, synthetic construct
  source 1..110: mol_type = other DNA
aagcaggggcacagagtgatgtgctaatgcaaattggtttatgctctctttttctcccaaggcctcttgacataaataagctgtaattattttacagtaaactgcttggg

SEQ ID NO: 7249 - DNA, 110 bp, synthetic construct
  source 1..110: mol_type = other DNA
cccaaggcctcttgacataaataagctgtaattattttacagtaaactgcttgggagccacttttctgcaggtttttagccattacaacatgtgtctacttgtttggaga

SEQ ID NO: 7250 - DNA, 110 bp, synthetic construct
  source 1..110: mol_type = other DNA
aaccctagtaccagatgacctatgacctagagggctcagacttctagctgagagagaaaacacaaaatccacttgttccacttctgtaaggtggaacccttaccagatgg

SEQ ID NO: 7251 - DNA, 110 bp, synthetic construct
  source 1..110: mol_type = other DNA
cagaccttctaggattggcctaaattatttgtgtagttagaatataacattttcactgccacaaaaataaatataaaatccctccatttctaagagctcattaacttaaa

SEQ ID NO: 7252 - DNA, 110 bp, synthetic construct
  source 1..110: mol_type = other DNA
gggagagcaaggccactgctgtcagcatcggccagtgtcaacagcatcggcctcgctggagacccaaaagtctggagaaatgactgcagcagtgatatgcaaatgactcc

SEQ ID NO: 7253 - DNA, 110 bp, synthetic construct
  source 1..110: mol_type = other DNA
cccagacccctcctgattagcttccctttgaaggttgagatgagctggagtattcttcctaattcaggtccaggagatgtgggggtgtcacaatttacacacagaacgaa

SEQ ID NO: 7254 - DNA, 110 bp, synthetic construct
  source 1..110: mol_type = other DNA
ccctgggaaaccaatacttgtttgtaggtgaattcaatgaccacatcaataaatgaccaatgatttaagacgcgtttcttgccgatgatacggatacacgttatttttag

SEQ ID NO: 7255 - DNA, 110 bp, synthetic construct
  source 1..110: mol_type = other DNA
accaatgatttaagacgcgtttcttgccgatgatacggatacacgttatttttagctagtctcccctgaagtgagtcaaaacagtgttaaacacacagatgcacacacac

SEQ ID NO: 7256 - DNA, 110 bp, synthetic construct
  source 1..110: mol_type = other DNA
cagagaaaagtttgctgcaggctgtgcaaagagatgtgtggctcataaccccgagagcccaaacaccccaaaccaaaggggcgaagcatccttaaaagccaggtgagagt

SEQ ID NO: 7257 - DNA, 110 bp, synthetic construct
  source 1..110: mol_type = other DNA
agcccaaacaccccaaaccaaaggggcgaagcatccttaaaagccaggtgagagtggggggtggcagggtgagtgaccagctcatgtgcagttctctgattagctaataa

SEQ ID NO: 7258 - DNA, 110 bp, synthetic construct
  source 1..110: mol_type = other DNA
ggacagaactgtcaagccggtcacccttgcagatggcgcaacgctggaagggacagaaaaacagcggaggacaacactggaacggaaaaggcatccgggaggttgggata

SEQ ID NO: 7259 - DNA, 110 bp, synthetic construct
  source 1..110: mol_type = other DNA
gaaaaacagcggaggacaacactggaacggaaaaggcatccgggaggttgggatactgatctgaacctaagagagaatgttcaggaggaagaaagtgtaaagctccatgt

SEQ ID NO: 7260 - DNA, 110 bp, synthetic construct
  source 1..110: mol_type = other DNA
ggagccagcctgctgtcctctgcaggagctggggaaaccttggtttgatgaccaatcctaactacgagtacaccccatgtcttgcaaaggtgtgggtatatttttggcct

SEQ ID NO: 7261 - DNA, 110 bp, synthetic construct
  source 1..110: mol_type = other DNA
tcctaactacgagtacaccccatgtcttgcaaaggtgtgggtatatttttggcctcacattatgtgtgtgtgggatggatcaaggtcaggagccaaactcttcttattct

SEQ ID NO: 7262 - DNA, 110 bp, synthetic construct
  source 1..110: mol_type = other DNA
ttgaagtaaagttagttcacaatgttgtgttagtttcagatatacagattctttccccatatagcttattacagaatattgagtagtgtttcctgtgctatacagtaggt

SEQ ID NO: 7263 - DNA, 110 bp, synthetic construct; identical to SEQ ID NO: 7262
  source 1..110: mol_type = other DNA

SEQ ID NO: 7264 - DNA, 110 bp, synthetic construct
  source 1..110: mol_type = other DNA
aatgaaatgctttaagaatgtgatttttagactttttaaagttctggttgataagcttccataactgtgggtgaatatttacctgcttctggctcagtctcctgctgctc

SEQ ID NO: 7265 - DNA, 110 bp, synthetic construct
  source 1..110: mol_type = other DNA
ggaattgaactcctttgtccctaagcgtccccatctataaatgagggatcacaagagtacttgtcacatgggagtgaaccaaatattaaatgagctcatatgcgtagagt

SEQ ID NO: 7266 - DNA, 110 bp, synthetic construct
  source 1..110: mol_type = other DNA
agtacttgtcacatgggagtgaaccaaatattaaatgagctcatatgcgtagagtacctttcttaagcacgaagaaaggtactattatatatacttctaggggtggaaga

SEQ ID NO: 7267 - DNA, 110 bp, synthetic construct
  source 1..110: mol_type = other DNA
ggaccatctgaggtcaaggccacctgccctaatatttctggagtctgcacgttctctctgtgggttgggctatttcatgcctcccactgcagcatctcccttccttctag

SEQ ID NO: 7268 - DNA, 110 bp, synthetic construct
  source 1..110: mol_type = other DNA
gctgcattgggatgaggccctcacttcatccggagacaaacatagcgcccagcagcgtcctcctagccttcatccttgccatggcctccttctgggagctgcctgcatct

SEQ ID NO: 7269 - DNA, 110 bp, synthetic construct
  source 1..110: mol_type = other DNA
cgtcctcctagccttcatccttgccatggcctccttctgggagctgcctgcatctcctctgccctcctccttcacgttgaagtgacagtgacagaggataagctcaacgt

SEQ ID NO: 7270 - DNA, 110 bp, synthetic construct
  source 1..110: mol_type = other DNA
tagacaggtccatttgtgccatctagcttgcttctaataagtaagaatgcagtatgccaagcggtgcaggcttcacttctgttgatggtattttctgtcgatgagtaatg

SEQ ID NO: 7271 - DNA, 110 bp, synthetic construct
  source 1..110: mol_type = other DNA
gccaagcggtgcaggcttcacttctgttgatggtattttctgtcgatgagtaatggatgatggctacttagtatttgttgggtgaatgaattaatctctaaatgaaagat

SEQ ID NO: 7272 - DNA, 110 bp, synthetic construct
  source 1..110: mol_type = other DNA
ttcaacacccacagcttctaaaactcgcctctcctgtcttgtgtggtcactccggcttggttcttctgtctctctggccgtcccccctgcggtacccttaatggtgtctc

SEQ ID NO: 7273 - DNA, 110 bp, synthetic construct
  source 1..110: mol_type = other DNA
acattggttctgtgtccacctgtccccacagtaaatgaagctgtggaagggcatataccacgtctgtttcaggcattgctttatccttgcctcctagtaaagtggctgac

SEQ ID NO: 7274 - DNA, 110 bp, synthetic construct
  source 1..110: mol_type = other DNA
atatgaaatggagaaaatgaaagccttcccaataaaatctggaacaagaaaaaaaatgcctactctcaccacttttatgcagaacagtattgtaaatccaagccatagta

SEQ ID NO: 7275 - DNA, 110 bp, synthetic construct
  source 1..110: mol_type = other DNA
aagaaaaaaaatgcctactctcaccacttttatgcagaacagtattgtaaatccaagccatagtagtcagaaaaacaaaagaaaaaaagtattcaaattggaagagaaga

SEQ ID NO: 7276 - DNA, 110 bp, synthetic construct
  source 1..110: mol_type = other DNA
gactcttacaacgaaagatgaagtctgtgtgacattaatggtccatgttttaccaggttcctgagaaaattcccccttgtctggctaatggaaggtgttttcacagcaag

SEQ ID NO: 7277 - DNA, 110 bp, synthetic construct
  source 1..110: mol_type = other DNA
ggttcctgagaaaattcccccttgtctggctaatggaaggtgttttcacagcaagttaataactggaagcacaaccacaaactacagggcgacttcatgcctccaaagat

SEQ ID NO: 7278 - DNA, 110 bp, synthetic construct
  source 1..110: mol_type = other DNA
ttgccaaatgttttatcacagcttagctagccaagaagattattttatcattgatttttaaatagctatcctatgaaagtggaaatgtctaaccagggtcccacaaagac

SEQ ID NO: 7279 - DNA, 110 bp, synthetic construct
  source 1..110: mol_type = other DNA
ttttaaatagctatcctatgaaagtggaaatgtctaaccagggtcccacaaagaccctgagattgtggaggtttgtctggggtgggggctgtaccctgcccttttctatg

SEQ ID NO: 7280 - DNA, 110 bp, synthetic construct
  source 1..110: mol_type = other DNA
tggaacattctggcttgtggaatacagtgcaattgatggttgatattcaacatcctacttttttaaataaagaaatctgaaatgtggctgctgttaccagggtagaggca

SEQ ID NO: 7281 - DNA, 110 bp, synthetic construct
  source 1..110: mol_type = other DNA
tacttttttaaataaagaaatctgaaatgtggctgctgttaccagggtagaggcacagcttttctcctggttctttattatcacccactcactgaatctcgatgggaagc

SEQ ID NO: 7282 - DNA, 110 bp, synthetic construct
  source 1..110: mol_type = other DNA
acagcttcaagctacaccatagctgcagcaacaccagatccttcaactcactgtgcctgactggggatcgaacccaggtctctgcagtgacccgagctgctgcagtcaga

SEQ ID NO: 7283 - DNA, 110 bp, synthetic construct; identical to SEQ ID NO: 7282
  source 1..110: mol_type = other DNA

SEQ ID NO: 7284 - DNA, 110 bp, synthetic construct
  source 1..110: mol_type = other DNA
ctactagttgggtttgtaacccgctgaaccccaatggggactcccaggtcttcctttcttatattgagacacaatttctatttgcatttgtctcctgcttccccatccta

SEQ ID NO: 7285 - DNA, 110 bp, synthetic construct; identical to SEQ ID NO: 7284
  source 1..110: mol_type = other DNA

SEQ ID NO: 7286 - DNA, 110 bp, synthetic construct
  source 1..110: mol_type = other DNA
tacagcagagcaatccctaaagtcatgtatgcagacatccagaacacctagctatctctgtccggaccctggttaatttttttacaaaccttccgtgtgggtcagtgggg

SEQ ID NO: 7287 - DNA, 110 bp, synthetic construct
  source 1..110: mol_type = other DNA
ctagccacttctcaaaagtctcacaagaacagtgtcctgttactcagccacagaaagagaaataatgccattggcagcaacacggacggacctagaaatgatcgtactaa

SEQ ID NO: 7288 - DNA, 110 bp, synthetic construct
  source 1..110: mol_type = other DNA
agagaaataatgccattggcagcaacacggacggacctagaaatgatcgtactaagggaagtcagacagagagacaaatatctacgatatgatatcgcttatatgtggaa

SEQ ID NO: 7289 - DNA, 110 bp, synthetic construct
  source 1..110: mol_type = other DNA
tcaaattttgatggtagatctcctagagaccccaaaaaatcagcatttctgtgtttgctgaggtgttatcagagtgagaagtggaaatatttaattcaatggggacttca

SEQ ID NO: 7290 - DNA, 110 bp, synthetic construct; identical to SEQ ID NO: 7289
  source 1..110: mol_type = other DNA

SEQ ID NO: 7291 - DNA, 110 bp, synthetic construct
  source 1..110: mol_type = other DNA
actttatcagccactcccattaatctacacctctctatggctgcttttgttctagggcagctgaattgagtagttaccacaaaggcctgaaagggtaaaacacttcctct

SEQ ID NO: 7292 - DNA, 110 bp, synthetic construct
  source 1..110: mol_type = other DNA
ggcttctgaattcatccccgcttcccagtgaccttctgcagcacacatgagcgccggtcccagtccttcctggggcttgtgtccctcgacaccttctgagtgcttggagg

SEQ ID NO: 7293 - DNA, 110 bp, synthetic construct
  source 1..110: mol_type = other DNA
ggtcccagtccttcctggggcttgtgtccctcgacaccttctgagtgcttggaggaaaggaagaaaacaggaacgaccgagaaaggaagagagagagagagcgagagaga

SEQ ID NO: 7294 - DNA, 110 bp, synthetic construct
  source 1..110: mol_type = other DNA
aaaatctacatctagtacactatttaagtgaaacatctagacccccattccaataagaattctttggttctagaagctttggagctgccactgagtcgtgtagattatgt

SEQ ID NO: 7295 - DNA, 110 bp, synthetic construct
  source 1..110: mol_type = other DNA
gtgacgagacatagctcccagtgctacacagcagagttcctctttggctttacatccttagtacctggcatcagagggcagctttgaaacatagatttattgattcacag

SEQ ID NO: 7296 - DNA, 110 bp, synthetic construct; identical to SEQ ID NO: 7295
  source 1..110: mol_type = other DNA

SEQ ID NO: 7297 - DNA, 110 bp, synthetic construct
  source 1..110: mol_type = other DNA
gctttgagttttgtctttctgaacccagttgctttggacagttgagaattcagccacaacctggaaagagggcaggaaatagctgctttcaacaccatctccccaggttc

SEQ ID NO: 7298 - DNA, 110 bp, synthetic construct
  source 1..110: mol_type = other DNA
acaacctggaaagagggcaggaaatagctgctttcaacaccatctccccaggttcatctctagccactgttctgtggcttgttttacatcttagtctacgaattatattt

SEQ ID NO: 7299 - DNA, 110 bp, synthetic construct
  source 1..110: mol_type = other DNA
catttctgtactgccttagaaacatgatttaagaggattgattttgtttcttcatctaaagtagtaagaacaccaagtctcttcctagcttcatgaactctagcaaacca

SEQ ID NO: 7300 - DNA, 110 bp, synthetic construct
  source 1..110: mol_type = other DNA
ctaaagtagtaagaacaccaagtctcttcctagcttcatgaactctagcaaaccacagctgtggtatttcaaatcaacacactgccctcacccctttgaagccttccact

SEQ ID NO: 7301 - DNA, 110 bp, synthetic construct
  source 1..110: mol_type = other DNA
ggcacctacattgggattgatgccatgctggaaggcctggaggcagagaacaaggtggatgtctatggctatgttgtcaagctgaggcgacagaggtgcctgatggttca

SEQ ID NO: 7302 - DNA, 110 bp, synthetic construct
  source 1..110: mol_type = other DNA
attgtatccatatgtcacatcttctgtatccatgcatccactggaggacactttggcggtttccatatcttggcgattgtaaataaggcttcagtaagcatggggctgtt

SEQ ID NO: 7303 - DNA, 110 bp, synthetic construct
  source 1..110: mol_type = other DNA
ggagggagggaggaagggaggaaggaaggaaggaagagagacaatttccagtcaccattgactggtaatagtttgctaacactctgttttttaaaaaacatcctccatcg

SEQ ID NO: 7304 - DNA, 110 bp, synthetic construct
  source 1..110: mol_type = other DNA
ctgtggaactgatatgtatgcacagatagaacttgtaaatgctgcaagtattataaacttttgggtcttttaaagaaagttttatctagcccaatattataatctttgta

SEQ ID NO: 7305 - DNA, 110 bp, synthetic construct
  source 1..110: mol_type = other DNA
atccctcttacctataatcctctagttccagtctgtctgaccacttgacaatgctgtttttttttttttttttcttttaaacgagtgtagctttgggggaccgcttcgat

SEQ ID NO: 7306 - DNA, 110 bp, synthetic construct
  source 1..110: mol_type = other DNA
gtttttttttttttttttcttttaaacgagtgtagctttgggggaccgcttcgatatgcttcacacacagataacagtagacacccctgcaaactctggatgagaaaaaa

SEQ ID NO: 7307 - DNA, 110 bp, synthetic construct
  source 1..110: mol_type = other DNA
tttggttttccccctaatactaaaaagtttacttatggccttttcgatcaaaacgtctcttaggtaagcagaagaaaactgggaacagctgacatttagtagctttgggg

SEQ ID NO: 7308 - DNA, 110 bp, synthetic construct
  source 1..110: mol_type = other DNA
tcctgttttgttgcgttagcacgctgttcatcctaacatatcccggtgggtcgttggagatgtgatttctgtacccaatgaggcgcatgcagctgtacactatgcggagg

SEQ ID NO: 7309 - DNA, 110 bp, synthetic construct
  source 1..110: mol_type = other DNA
acattcttttctctctaacattttacagatgcagtagttcagttgtgctctacaatatgccttcagctacttctgtagcagagttattacataacaatccttactccaac

SEQ ID NO: 7310 - DNA, 110 bp, synthetic construct
  source 1..110: mol_type = other DNA
tatgccttcagctacttctgtagcagagttattacataacaatccttactccaactgtgatcagtggatgatctttgaatatttgtactacacttggaaaatacatttct

SEQ ID NO: 7311 - DNA, 110 bp, synthetic construct; identical to SEQ ID NO: 7309
  source 1..110: mol_type = other DNA

SEQ ID NO: 7312 - DNA, 110 bp, synthetic construct; identical to SEQ ID NO: 7310
  source 1..110: mol_type = other DNA

SEQ ID NO: 7313 - DNA, 110 bp, synthetic construct
  source 1..110: mol_type = other DNA
aacctacttgtacaaaaaaaggaattagctcaagaagatgaaatatccagggtagagagtgacgttggctttggcaattttgttttacattaaatcattatgatttgatt

SEQ ID NO: 7314 - DNA, 110 bp, synthetic construct
  source 1..110: mol_type = other DNA
tgaattcctcagacgcggtgtgactcctgcttggtgcctgagtgacactgccccgctctgcagctctcagcctcagcaccctgtatctgcttctctcccatcagatcctg

SEQ ID NO: 7315 - DNA, 110 bp, synthetic construct
  source 1..110: mol_type = other DNA
gggattgccatgattggctttaaacaacaggaacaatcccaccctcaccaccccctgccaccctgcacaaaaaaaggcaatatctggtgtttggaagatacaaaattctc

SEQ ID NO: 7316 - DNA, 110 bp, synthetic construct
  source 1..110: mol_type = other DNA
tgccaccctgcacaaaaaaaggcaatatctggtgtttggaagatacaaaattctcactcttctaatgtagacagtatagatacacacacagtatacaaacagttatacag

SEQ ID NO: 7317 - DNA, 110 bp, synthetic construct
  source 1..110: mol_type = other DNA
ctttgaggcacagaagggtttcagttttttttttttttgatgaattccaacttatttatttctatcacagtttgtgcttttgctgccatatcaaaaagtcatcaccaaat

SEQ ID NO: 7318 - DNA, 110 bp, synthetic construct
  source 1..110: mol_type = other DNA
ttatttctatcacagtttgtgcttttgctgccatatcaaaaagtcatcaccaaatccaatgtcatgaagatttccccctatgttttcttccaagaggttttagttttgtt

SEQ ID NO: 7319 - DNA, 110 bp, synthetic construct
  source 1..110: mol_type = other DNA
agggaattttagctatagagttttgttttaaagtctatcttccaaaaatttcacgtggctcctgtactccagcttttctatccacccattcacttatccacccaactaat

SEQ ID NO: 7320 - DNA, 110 bp, synthetic construct
  source 1..110: mol_type = other DNA
tccaaatctactcaatcacatttctatgagaggagtccaggaatctgctttttatgagctacccaaatagtttaggcatagcagtatttgagaatcattgatgtagataa

SEQ ID NO: 7321 - DNA, 110 bp, synthetic construct
  source 1..110: mol_type = other DNA
gtggcctctctcagggggttaaagatccggaggtaccatgagctacagtataggtcacagatgtggcttggcttctgtgttgctatctatggctgtggcatgggcctgca

SEQ ID NO: 7322 - DNA, 110 bp, synthetic construct; identical to SEQ ID NO: 7321
  source 1..110: mol_type = other DNA

SEQ ID NO: 7323 - DNA, 110 bp, synthetic construct
  source 1..110: mol_type = other DNA
taggaaccaaggaatgacatagtagtgtgtttcctgagggttttttttttttttttttttttttgtctcatatattttggaattcctgctagaggatctgatacccagag

SEQ ID NO: 7324 - DNA, 110 bp, synthetic construct
  source 1..110: mol_type = other DNA
tttttttttgtctcatatattttggaattcctgctagaggatctgatacccagagatcccatcagatacaggtgaaggtgtcccaaggaaagcctgacctctaaccaaag

SEQ ID NO: 7325 - DNA, 110 bp, synthetic construct
  source 1..110: mol_type = other DNA
ccctgtactcagcatgagctggactctgttctaagcaacagtgttaaattgtgggcctacgtgaagtctggtatttacactctggaggtgaccagagaaaagtaacaggg

SEQ ID NO: 7326 - DNA, 110 bp, synthetic construct
  source 1..110: mol_type = other DNA
cctacgtgaagtctggtatttacactctggaggtgaccagagaaaagtaacagggagaaagtgatttttttcagttgtgtatgttgcataaaggtcctgggagtatttgg

SEQ ID NO: 7327 - DNA, 110 bp, synthetic construct
  source 1..110: mol_type = other DNA
tgggtttagttaaagtcaacttgtatttttccttttctgattcttcatgaacctaagagaacaaatgatcaacacttccctcataagactccttatttttgaggacagga

SEQ ID NO: 7328 - DNA, 110 bp, synthetic construct
  source 1..110: mol_type = other DNA
agagaacaaatgatcaacacttccctcataagactccttatttttgaggacaggatgctccctgtgccggtactcttttctactctttccttaattctctataatcttgc

SEQ ID NO: 7329 - DNA, 110 bp, synthetic construct
  source 1..110: mol_type = other DNA
aatcatagcttgttaactttcctactgatggggagagtgaaactgagccatgaggcttcacggttcactcctgtggtcctacggagcttctatgagtcacatagcagtgc

SEQ ID NO: 7330 - DNA, 110 bp, synthetic construct
  source 1..110: mol_type = other DNA
cttcacggttcactcctgtggtcctacggagcttctatgagtcacatagcagtgctaggccagatggtggaaaaaacaacaccactccgatgagaaaactcttcctggtg

SEQ ID NO: 7331 - DNA, 110 bp, synthetic construct; identical to SEQ ID NO: 7329
  source 1..110: mol_type = other DNA

SEQ ID NO: 7332 - DNA, 110 bp, synthetic construct; identical to SEQ ID NO: 7330
  source 1..110: mol_type = other DNA

SEQ ID NO: 7333 - DNA, 110 bp, synthetic construct
  source 1..110: mol_type = other DNA
aaacgtagtttggattcttgaaatcgcgtcatagtgaaagaggacttagctttctctgacataaggccagccatttccaccagctcctccatgtgcaaaagcattaaaca

SEQ ID NO: 7334 - DNA, 110 bp, synthetic construct
  source 1..110: mol_type = other DNA
ctgacataaggccagccatttccaccagctcctccatgtgcaaaagcattaaacatcttgaaagtgaactcatttacatttcttaaaaaatctaatttttttcttgtttt

SEQ ID NO: 7335 - DNA, 110 bp, synthetic construct
  source 1..110: mol_type = other DNA
cagagtgacatggatggctgctgcatctagcccaccagccagagtgcattacgtgttcaaatccaactgaaggggatgcaggaaaatagcttccccgtgtatccaacaga

SEQ ID NO: 7336 - DNA, 110 bp, synthetic construct
  source 1..110: mol_type = other DNA
ttcaaatccaactgaaggggatgcaggaaaatagcttccccgtgtatccaacagaataaattaaaacagaactttgaaaatacacatcagcttcaggtaggacatccttc

SEQ ID NO: 7337 - DNA, 110 bp, synthetic construct
  source 1..110: mol_type = other DNA
ttaagtcttataaataagtttttcacatgctgagggccaccttcttctgactccacagttagaaccatttgcttttgtgccgtccttaagtatcccctatcatctctgtg

SEQ ID NO: 7338 - DNA, 110 bp, synthetic construct
  source 1..110: mol_type = other DNA
agtcacctccaggaaggccagctgcagtgcattatacctgaacaacatgcaccttgctgtcctaggctgctgcttgtgtgtggtaaggggccaataaataggcagagaca

SEQ ID NO: 7339 - DNA, 110 bp, synthetic construct
  source 1..110: mol_type = other DNA
tatttgagtaacttgagggtcagaaaacttgagaagcttgcctgacataaaacatgagaactgggagagcaaggactcaaatgcacagcagtctcacctcccagccaaat

SEQ ID NO: 7340 - DNA, 110 bp, synthetic construct
  source 1..110: mol_type = other DNA
gagaactgggagagcaaggactcaaatgcacagcagtctcacctcccagccaaatcagaggatcttagttggacttccatacattaatgtgtgagtgatgggctttcctc

SEQ ID NO: 7341 - DNA, 110 bp, synthetic construct
  source 1..110: mol_type = other DNA
agcagtgactgctttaaggggagacaactgggcactttggaagtgttccaaactcacacagctgagacagctgacttcacagtttaaagtcaaaagtactaccttccatc

SEQ ID NO: 7342 - DNA, 110 bp, synthetic construct
  source 1..110: mol_type = other DNA
acttcagagctgagaaggccaaggcacagggggttacgtgtttgctcaaagccgcacaaacaagagttcccatcgtggtgcaatagttaacgaatcctaggaggaaccat

SEQ ID NO: 7343 - DNA, 110 bp, synthetic construct
  source 1..110: mol_type = other DNA
aggccaaggcacagggggttacgtgtttgctcaaagccgcacaaacaagagttcccatcgtggtgcaatagttaacgaatcctaggaggaaccatgaggctgcaggttcg

SEQ ID NO: 7344 - DNA, 110 bp, synthetic construct
  source 1..110: mol_type = other DNA
gtgggcagggctgtgagtaagtcctgggggaaaggggctcactcaggggatcaagcaaggatggcatgggacggcatgggatggcatgggacatccagcaggaatatgga

SEQ ID NO: 7345 - DNA, 110 bp, synthetic construct
  source 1..110: mol_type = other DNA
ctgatgaggctggagccagtactgggaccccctcggctgttggaaatggcaaatcagaattgaggttccagttgatcctccccatttgcataaagatctcagtaaaaatg

SEQ ID NO: 7346 - DNA, 110 bp, synthetic construct
  source 1..110: mol_type = other DNA
agaattgaggttccagttgatcctccccatttgcataaagatctcagtaaaaatggaatagctccttcctacttccagctggagaccctccggagtctcccgtgatcggc

SEQ ID NO: 7347 - DNA, 110 bp, synthetic construct
  source 1..110: mol_type = other DNA
aaattttttaaagagatgaggttctggtgatagaatctcagaaatcagctgggtggctgtgagcatgcttgaatggacctttagaagttttgctttaagtggaccatgca

SEQ ID NO: 7348 - DNA, 110 bp, synthetic construct
  source 1..110: mol_type = other DNA
gctgtgagcatgcttgaatggacctttagaagttttgctttaagtggaccatgcaggcagggacatagagtcaggagcccagacgatggagggggctgggccagggggga

SEQ ID NO: 7349 - DNA, 110 bp, synthetic construct
  source 1..110: mol_type = other DNA
atatagcctcttatttttgccctattttgttcacatttgtatactataaagctctcatgaagtgggaagtgcagctgagacacagtcacacatagagttagatacagcaa

SEQ ID NO: 7350 - DNA, 110 bp, synthetic construct
  source 1..110: mol_type = other DNA
catgaagtgggaagtgcagctgagacacagtcacacatagagttagatacagcaatcactgaagagtgcccagaccccagtgcctaaactgtgctatgaactgggcagtc

SEQ ID NO: 7351 - DNA, 110 bp, synthetic construct
  source 1..110: mol_type = other DNA
atccacgacgggaactcccttccaaacttcttactccccaaagtgctgttacccctggatgaaagatgcttaggtttctcatccaggcaaactccagctcactcttcaaa

SEQ ID NO: 7352 - DNA, 110 bp, synthetic construct
  source 1..110: mol_type = other DNA
tggatgaaagatgcttaggtttctcatccaggcaaactccagctcactcttcaaagcccagctcaaagtttctccctctgggaagcctcctccccggggaagaggtggtg

SEQ ID NO: 7353 - DNA, 110 bp, synthetic construct
  source 1..110: mol_type = other DNA
tactgactatgccccgttggcgacggcagtgtttatcagggtcttgcatccagattaaaagttcctttcgctggaatttttatcctagaattctatacgcagagctgaca

SEQ ID NO: 7354 - DNA, 110 bp, synthetic construct
  source 1..110: mol_type = other DNA
taaaagttcctttcgctggaatttttatcctagaattctatacgcagagctgacatggaaaaggaagaactgaggtcacattcacctcggacctacacagtgtttagaaa

SEQ ID NO: 7355 - DNA, 110 bp, synthetic construct
  source 1..110: mol_type = other DNA
atcagcagaattttccaaggtcccatccaaaccactgtgcacattcataatctgaataacagaattccttctcttctgtcactcacggtgtttgttttctttttgtggcc

SEQ ID NO: 7356 - DNA, 110 bp, synthetic construct
  source 1..110: mol_type = other DNA
ataacagaattccttctcttctgtcactcacggtgtttgttttctttttgtggccatcagaagctaccagtgagataacgcagaaaacagcaagcacggaaggatgattg

SEQ ID NO: 7357 - DNA, 110 bp, synthetic construct
  source 1..110: mol_type = other DNA
aacatttgttttccagatgaggaaactgagactcaaataggttaatgaccttgattcaagccacccagcttgtatatgccacacaaggaagtgacacggacacatggctc

SEQ ID NO: 7358 - DNA, 110 bp, synthetic construct
  source 1..110: mol_type = other DNA
tcaagccacccagcttgtatatgccacacaaggaagtgacacggacacatggctctggggctcacaaatttaatcacctagagcccctctgagtccagttttccaaatct

SEQ ID NO: 7359 - DNA, 110 bp, synthetic construct
  source 1..110: mol_type = other DNA
aacgagagtttgtgtgtctgaaattcttggtgctcttcagtttaggtaaggaatccttttctcacaaagatgactaaatggcaccaacctccgagtgtctgaaagtcctt

SEQ ID NO: 7360 - DNA, 110 bp, synthetic construct
  source 1..110: mol_type = other DNA
ttgtatggttaagaagaccctcccacgacacactgaaccctaatagcaaacaccctggggtgccctgagctgctgggagccacagaccgagggcgctggtccggcaggaa

SEQ ID NO: 7361 - DNA, 110 bp, synthetic construct
  source 1..110: mol_type = other DNA
atttgcttgtgcctttggagtcagctgctgggacgagatgctggcaggcatgatccagccacctctagagacctgagtgtgtgcaagatgaatgtacaaaactcatgacg

SEQ ID NO: 7362 - DNA, 110 bp, synthetic construct
  source 1..110: mol_type = other DNA
cagccacctctagagacctgagtgtgtgcaagatgaatgtacaaaactcatgacggtgtttacctatgactcgggagagaaatcacaacttgacaaacatgtcagagcca

SEQ ID NO: 7363 - DNA, 110 bp, synthetic construct
  source 1..110: mol_type = other DNA
gctcgcagggagacttagtcacctcacctgtaaatggtgacactcacgggagtatgtgatccacagggatcctgaaaagaattgataagaccttgatgtaaaacccagcc

SEQ ID NO: 7364 - DNA, 110 bp, synthetic construct
  source 1..110: mol_type = other DNA
cctattccttttcttttcccttctaagacactccttacctccctctctcaacgcccaacctctgctcatcactccaaaacacacggaacaaattttcccctttggaggat

SEQ ID NO: 7365 - DNA, 110 bp, synthetic construct
  source 1..110: mol_type = other DNA
cgttcctagtcggatttgttgccgctgcgccaggatagcaactcctagcttgttttttttttacgttgactattttgaactttcctagagcagttcaagactgctacaaa

SEQ ID NO: 7366 - DNA, 110 bp, synthetic construct; identical to SEQ ID NO: 7365
  source 1..110: mol_type = other DNA

SEQ ID NO: 7367 - DNA, 110 bp, synthetic construct
  source 1..110: mol_type = other DNA
ctggtgacttgagcaatagctcatatcaattaaaatttaatatccaggggaccaaacggacatggaggaaaaatataatttgaagcgaaagacagacatctttttcggca

SEQ ID NO: 7368 - DNA, 110 bp, synthetic construct
  source 1..110: mol_type = other DNA
taggttttaatccgatacattttggggggccaccacattcttatgtgctttagaacgcccagcgacatccccccgtaaccccgaacctgagctgtccttctgtgctgaaa

SEQ ID NO: 7369 - DNA, 110 bp, synthetic construct
  source 1..110: mol_type = other DNA
cgcccagcgacatccccccgtaaccccgaacctgagctgtccttctgtgctgaaaatttattgaaggtattatgaagcaggttttgctcttgaggaatgcaagtttttaa

SEQ ID NO: 7370 - DNA, 110 bp, synthetic construct
  source 1..110: mol_type = other DNA
actgcatccgggggctgacttccctttgttccttagtccagatgttaatttggcaaatccatgacccgtctttcaccagcacgcccgctaattatactgacttcttggcc

SEQ ID NO: 7371 - DNA, 110 bp, synthetic construct
  source 1..110: mol_type = other DNA
aatccatgacccgtctttcaccagcacgcccgctaattatactgacttcttggccctcaaatggatcttttctctcctcagtaggaatcatacaaaataatagactattt

SEQ ID NO: 7372 - DNA, 110 bp, synthetic construct
  source 1..110: mol_type = other DNA
cagcaccaggatgcaggtgtggtccctggcccaacacactgggttaaaggatccagtgttgccacagctggggcacaggtcaccactgcaagctcggatctgatccctgg

SEQ ID NO: 7373 - DNA, 110 bp, synthetic construct; identical to SEQ ID NO: 7372
  source 1..110: mol_type = other DNA

SEQ ID NO: 7374 - DNA, 110 bp, synthetic construct
  source 1..110: mol_type = other DNA
tctcaggttctttgctgcccttcccagatactgggttttttaaaatggaagttgatgtagtgtagcaacactacatcagcaaatcagtgccatttttccaatagcatttg

SEQ ID NO: 7375 - DNA, 110 bp, synthetic construct
  source 1..110: mol_type = other DNA
tgtagtgtagcaacactacatcagcaaatcagtgccatttttccaatagcatttgcccacttcatatctgtgtcaggttttggtaatcttcccactattgcaaacttttt

SEQ ID NO: 7376 - DNA, 110 bp, synthetic construct
  source 1..110: mol_type = other DNA
acagaactgacagcgtcaacatgactcggtctcggataaactcagatcaacctcggtgtatctgctcgacagcaaggagcccaagcagagcccaggcctcggttcccgaa

SEQ ID NO: 7377 - DNA, 110 bp, synthetic construct
  source 1..110: mol_type = other DNA
gtgtatctgctcgacagcaaggagcccaagcagagcccaggcctcggttcccgaacactcctcttgccaccaaaaggagccggggatctgcggagagagtacagggcaag

SEQ ID NO: 7378 - DNA, 110 bp, synthetic construct
  source 1..110: mol_type = other DNA
cagggtatgtctcttacgatttaaaagttgggtctatccttttatttctgaaaatacaagcaaaccttttacagctgtgcacgagtatatcaacgcgcctggtagagaat

SEQ ID NO: 7379 - DNA, 110 bp, synthetic construct
  source 1..110: mol_type = other DNA
acaagcaaaccttttacagctgtgcacgagtatatcaacgcgcctggtagagaatgagatgcatataatttctccacttaggaaagtgtcctggcaatggcttcacaacc

SEQ ID NO: 7380 - DNA, 110 bp, synthetic construct
  source 1..110: mol_type = other DNA
atggtgactcccaggttcctggcttgcgccctcagtggtgctgccctcctttgatgcagggaacactgggaaatgatcatgcatgggggaaaaggttgatttggggtgtt

SEQ ID NO: 7381 - DNA, 110 bp, synthetic construct
  source 1..110: mol_type = other DNA
gcagggaacactgggaaatgatcatgcatgggggaaaaggttgatttggggtgtttggaggtttcatgactttttcagcacaatttgaaatgtataagattaggacgagg

SEQ ID NO: 7382 - DNA, 110 bp, synthetic construct
  source 1..110: mol_type = other DNA
gaacctccgtatgccatgggcgcggtcctaaaaaaaaaacaaacaaaaaaaaaagaatgagctatgatatcaggaagtctttttttttttttaactcagtgaatttttat

SEQ ID NO: 7383 - DNA, 110 bp, synthetic construct; identical to SEQ ID NO: 7382
  source 1..110: mol_type = other DNA

SEQ ID NO: 7384 - DNA, 110 bp, synthetic construct
  source 1..110: mol_type = other DNA
caacaccacgctgtgaatcaggcacccgcacccagggcagcgtgtgggttaagtcttacgaggcgtcattacgacagggacctccttctgcagggggtactctcctgact

SEQ ID NO: 7385 - DNA, 110 bp, synthetic construct
  source 1..110: mol_type = other DNA
tgataatgcaggggttctcagagtcggggtccttgaatcgagctgtgtttatggcatctgaagactatacagaagttagcagggagttcctgttgtggtgcaatggaaac

SEQ ID NO: 7386 - DNA, 110 bp, synthetic construct
  source 1..110: mol_type = other DNA
gcccagcatggtcatgctgcagagttttctggaggtgagtagccgcagaagtcagggaagctgcaaccccatgttagatcctatgtgctgggagggacggaaagggacat

SEQ ID NO: 7387 - DNA, 110 bp, synthetic construct
  source 1..110: mol_type = other DNA
ggaagctgcaaccccatgttagatcctatgtgctgggagggacggaaagggacattatgactgtcagggtgacattgtggctaaaggccatcagtcctcaaatctcagca

SEQ ID NO: 7388 - DNA, 110 bp, synthetic construct
  source 1..110: mol_type = other DNA
agctgtcactagaggccttatgggctgcatctgttgtagatggaggtgtgtggacaatgtcacaagcctcagtcccttcgtcgccctccagagcagtctcactttgctat

SEQ ID NO: 7389 - DNA, 110 bp, synthetic construct
  source 1..110: mol_type = other DNA
aatgtcacaagcctcagtcccttcgtcgccctccagagcagtctcactttgctataagcaacgacaaaagagaggtcaaggggcactggtacaggacccgcttcagagac

SEQ ID NO: 7390 - DNA, 110 bp, synthetic construct
  source 1..110: mol_type = other DNA
gcccctctagagaccctgctcagctctggggaagaatgtccgggcctctctggggagctggaagagcccccttccccacgaatactcagggaaccgggcctgtcttgagc

SEQ ID NO: 7391 - DNA, 110 bp, synthetic construct
  source 1..110: mol_type = other DNA
agctggaagagcccccttccccacgaatactcagggaaccgggcctgtcttgagcggcctgaggactttggtacatgccagcctcccggaggttctgagaatgagggttt

SEQ ID NO: 7392 - DNA, 110 bp, synthetic construct
  source 1..110: mol_type = other DNA
gtcatttcaagcacctcccctccccccagcaaatctgccttccttgtggaccactgctctgatcccaccccagcctctctcttgtatcatctagggatggaagggttccc

SEQ ID NO: 7393 - DNA, 110 bp, synthetic construct
  source 1..110: mol_type = other DNA
gctctgatcccaccccagcctctctcttgtatcatctagggatggaagggttcccagttcttcccatgaggctggagcatctacggtggtgggccatccagggctgtcac

SEQ ID NO: 7394 - DNA, 110 bp, synthetic construct
  source 1..110: mol_type = other DNA
accaagaaaagtctccggagtgtttgctaaatgagtgagggaatgtaaggggccgcttgcaggtggagaatgatcaaggtacgtaatcctgatttaaaagatggtgcttt

SEQ ID NO: 7395 - DNA, 110 bp, synthetic construct
  source 1..110: mol_type = other DNA
cgctgaagaattgctgtgctctttcttttccacactgcttaagctaacaccacggccccgtccacaccctctattagccgtgatataaagcggatgaatcacatttgtct

SEQ ID NO: 7396 - DNA, 110 bp, synthetic construct
  source 1..110: mol_type = other DNA
atggcggatcgcggggactgaggcctggaaggggtctaggatgccttccttcccaagggagtggctctgccccatgcagcttgactagaagcaagtgtgttagggagcga

SEQ ID NO: 7397 - DNA, 110 bp, synthetic construct
  source 1..110: mol_type = other DNA
agggagtggctctgccccatgcagcttgactagaagcaagtgtgttagggagcgagtagggggtgaggttagcaaggttgggaatctccccgccctcgtggtgggcactt

SEQ ID NO: 7398 - DNA, 110 bp, synthetic construct
  source 1..110: mol_type = other DNA
gtacaagtccttgcaggagttttctactctaaatccggggagttagggctaggtgacgcccaggttttcccccagtctgcaaattctgcccctttattcttgccgatttc

SEQ ID NO: 7399 - DNA, 110 bp, synthetic construct
  source 1..110: mol_type = other DNA
ggctacctgccaacctgcttgtgggtgacacaagggactgaagcgtctgcccacggtgggcatttctaaccagctgggtctcacggccaggtccctcctctctcccatgg

SEQ ID NO: 7400 - DNA, 110 bp, synthetic construct
  source 1..110: mol_type = other DNA
catcaccttttgttctcaaaacgagcttgagtcggccccagggggatgctcaatgggtgatccggccccaggctcctcacccaaccttctcctcactccccaggctggtg

SEQ ID NO: 7401 - DNA, 110 bp, synthetic construct
  source 1..110: mol_type = other DNA
gaacttggctttgcacccctgtttcctctgctgttctggacagtgagaggccacggagcttgactccttttttcacgctggatgtgcctgccccactttccagatggtaa

SEQ ID NO: 7402 - DNA, 110 bp, synthetic construct
  source 1..110: mol_type = other DNA
gagcttgactccttttttcacgctggatgtgcctgccccactttccagatggtaaagctgaggcctaggccctcagggcgatgcttagccctggagtccggtcccacgcc

SEQ ID NO: 7403 - DNA, 110 bp, synthetic construct
  source 1..110: mol_type = other DNA
ttgctttttcattctcttgctagggctctttaatacacaaaagtttttcattcgcataaagtccgatttatctgtttcttttgttgcctgcactgtgggtgtcacagcca

SEQ ID NO: 7404 - DNA, 110 bp, synthetic construct
  source 1..110: mol_type = other DNA
aaagaatgtatgagttgtttttgagggggtagggaggctcaaattaaacgttacctttcctaaaaaataaacagagttcccgttcgtggcgcagtggaaacaaatccgac

SEQ ID NO: 7405 - DNA, 110 bp, synthetic construct; identical to SEQ ID NO: 7404
  source 1..110: mol_type = other DNA

SEQ ID NO: 7406 - DNA, 110 bp, synthetic construct
  source 1..110: mol_type = other DNA
aagcaccaataaaaacagaagaccttcgacctcgctaataaccaaggagatgcttgttgaaacgaggaaatgaccatttcatgtggcacgattgtgtgtgcgggtgcccc

SEQ ID NO: 7407 - DNA, 110 bp, synthetic construct
  source 1..110: mol_type = other DNA
cggccgaagtgcttcagcacggctgtgtggttgctgctcagccacaggcaatcatcaccaaagggcatccctgggaaaaacggttcgagcaaggtggcttgtggcaggtg

SEQ ID NO: 7408 - DNA, 110 bp, synthetic construct
  source 1..110: mol_type = other DNA
tggggctgggcttggaggccgcccctgcctggcgcctgttcccagtgagccccagcggcataacctctactgcagctgcagaacagagtgccagatccaggccaacaaac

SEQ ID NO: 7409 - DNA, 110 bp, synthetic construct
  source 1..110: mol_type = other DNA
tcactaaccactgagccatgatgagaactccaaccaataatttcttgggactcactttatgacaatagctagaaccaagactgcagtaagtccgaggtttgcattttacc

SEQ ID NO: 7410 - DNA, 110 bp, synthetic construct
  source 1..110: mol_type = other DNA
ctcacttaccctcttacggcccctgcagtgaagtgctttcgtgtgtgctctcttattttaccctcctgagaacccaggaactgctggcgggcagggggataagaccctag

SEQ ID NO: 7411 - DNA, 110 bp, synthetic construct
  source 1..110: mol_type = other DNA
atgcctgctgaaccaactgaattttcagatacatctacatctgacagagtacatagataatttgggagaaagttagaggcaggactggacctgactttggccattgggga

SEQ ID NO: 7412 - DNA, 110 bp, synthetic construct
  source 1..110: mol_type = other DNA
gataatttgggagaaagttagaggcaggactggacctgactttggccattggggacctgcggcgccccgagcgtgcagtgtgtcaagacagaggctctggtgtcctggcc

SEQ ID NO: 7413 - DNA, 110 bp, synthetic construct
  source 1..110: mol_type = other DNA
cagcagggttagctctctcttcagacgggacgctctctgcatggcaggcacgagggagggctggctgtcaggcttgctgggcaagatggccacacagatggctccaggca

SEQ ID NO: 7414 - DNA, 110 bp, synthetic construct
  source 1..110: mol_type = other DNA
gtaggaggggtgagtaatgcagatgaggagggtaaaggcagtcacacggcggggtggtggtggtgagggtctcctgggtgagcagggaggacagaaggaaatcacccact

SEQ ID NO: 7415 - DNA, 110 bp, synthetic construct
  source 1..110: mol_type = other DNA
actggccagtgaccagcacggctctcccctgcgggccagccttcactcagctttttgaccacagaggtgaccacagatacaggaacagacatgttatgatgccaaatccc

SEQ ID NO: 7416 - DNA, 110 bp, synthetic construct
  source 1..110: mol_type = other DNA
ccaactggataaatggaaggaaaaaaggtctctgcaggtttgggagagtcattaaggaggtgagaagctgcagggtcagtgacgctcccgcagagaaggaagccagcctt

SEQ ID NO: 7417 - DNA, 110 bp, synthetic construct
  source 1..110: mol_type = other DNA
ggaggtgagaagctgcagggtcagtgacgctcccgcagagaaggaagccagccttgctgtgcttttcctcttggttaaggcaggggctgcaaggctgagaaaccgggcaa

SEQ ID NO: 7418 - DNA, 110 bp, synthetic construct
  source 1..110: mol_type = other DNA
atgtctttttggggtgatgacttgtcccaaaattataggggctgtagctcagcaaattgtacactttaaaagcgtggattttatgacgtgtgtgttatatctcagtaatg

SEQ ID NO: 7419 - DNA, 110 bp, synthetic construct
  source 1..110: mol_type = other DNA
ccccacaactaatgatttccatagtgaagttgtaggaccattcctgatagaggtactccgccacaaagtagtcctcagactgacctcagaaaacaaggtggtactttcac

SEQ ID NO: 7420 - DNA, 110 bp, synthetic construct
  source 1..110: mol_type = other DNA
ctccgccacaaagtagtcctcagactgacctcagaaaacaaggtggtactttcacagtgctgtgggaagacagctaggaacctgcagtccatacagtgatctatatacac

SEQ ID NO: 7421 - DNA, 110 bp, synthetic construct
  source 1..110: mol_type = other DNA
cgtccagcagtgtcacatccgtgtcccccgccccggggaccagctttaggcccgacactccctcctcacgtcagcaggagtgcattgtggctgggaaagtgcctcgtccg

SEQ ID NO: 7422 - DNA, 110 bp, synthetic construct
  source 1..110: mol_type = other DNA
ccccctctctgagcccaggttctctgtcaccaaaattggatactgagtgagacaatgcccatggccctgtccagtaggccagctgtggatccattcacctgacatggctc

SEQ ID NO: 7423 - DNA, 110 bp, synthetic construct
  source 1..110: mol_type = other DNA
tttgatcacctgccagatgtctctgtgcaacaagcaagaaagtgctgcctaatatctgccccaagccctgtgtgcttcagcttttggccattgctccagccctgccctca

SEQ ID NO: 7424 - DNA, 110 bp, synthetic construct
  source 1..110: mol_type = other DNA
ctgccccaagccctgtgtgcttcagcttttggccattgctccagccctgccctcagggcaatgccagccgcctactgtcgtgtccccatgcctgatcccaggcacacagg

SEQ ID NO: 7425 - DNA, 110 bp, synthetic construct
  source 1..110: mol_type = other DNA
aatctgcaggatgcaggccagagagcgggctgcagtctcctggcacagaacccagtcaggctaactgggccacctcgccacccaccactccagtcaaaagcccttatcac

SEQ ID NO: 7426 - DNA, 110 bp, synthetic construct
  source 1..110: mol_type = other DNA
aggaatacactttaaacagtaagttgaatgagaaagcataagccataataagtagataacaaccaacttctcattggaagaaagaaacatctatagcaaagttaatacag

SEQ ID NO: 7427 - DNA, 110 bp, synthetic construct
  source 1..110: mol_type = other DNA
acagactgggtcatgggtcctgttgtttccagctcattttctagaatggaaactgaggcccagcaactcgatcgggccgtacagcgagtcagcaagcagcaggcctgggg

SEQ ID NO: 7428 - DNA, 110 bp, synthetic construct
  source 1..110: mol_type = other DNA
aggcccagcaactcgatcgggccgtacagcgagtcagcaagcagcaggcctggggctcacaatctggctacagagtctgctctgaatcgtgacctctgtgtggtccttgg

SEQ ID NO: 7429 - DNA, 110 bp, synthetic construct
  source 1..110: mol_type = other DNA
ttcagcagggcgactcctgcgcctgggggagaaaaagtacagcaaatgaacaccattaagcttaggctctgttttctagaaatgaaacacagtcactgctggctagctga

SEQ ID NO: 7430 - DNA, 110 bp, synthetic construct
  source 1..110: mol_type = other DNA
ttaagcttaggctctgttttctagaaatgaaacacagtcactgctggctagctgaattccagtggggctgagggatgggacctgggccagacaagccgaggggaatctag

SEQ ID NO: 7431 - DNA, 110 bp, synthetic construct
  source 1..110: mol_type = other DNA
caggtgagacaatcctacccaatcgttacctccctgcacaggtgcacatgacgctagtgtgagaaaaccccacaagagctgatggtgttttccatgcttcacacattcca

SEQ ID NO: 7432 - DNA, 110 bp, synthetic construct
  source 1..110: mol_type = other DNA
agtgtgagaaaaccccacaagagctgatggtgttttccatgcttcacacattccaaaaaattccactgattttcagttgtaatttcaaaaccctgccggccggcagcact

SEQ ID NO: 7433 - DNA, 110 bp, synthetic construct
  source 1..110: mol_type = other DNA
tttttaggccttttgaactttgtttttttttgtttgcttgtttgctttttagggccacaccctcagcacgtggaagttcccaagctaggggctagaactggagctgtagc

SEQ ID NO: 7434 - DNA, 110 bp, synthetic construct
  source 1..110: mol_type = other DNA
cacaccctcagcacgtggaagttcccaagctaggggctagaactggagctgtagctgccagcctgcactacagcagagcaatgctggatctttaacgcaatgagcaaggc

SEQ ID NO: 7435 - DNA, 110 bp, synthetic construct
  source 1..110: mol_type = other DNA
cccttattaggataatgcatcagttggacctggaggagttcaaccaatgaccttgcagagaataattatattctctgattaccgatagtaatgggtctttattttttcta

SEQ ID NO: 7436 - DNA, 110 bp, synthetic construct
  source 1..110: mol_type = other DNA
cagagaataattatattctctgattaccgatagtaatgggtctttattttttctaggacaggggaacattcccctctagtggggaaagtggttcaaactgagggaggtga

SEQ ID NO: 7437 - DNA, 110 bp, synthetic construct
  source 1..110: mol_type = other DNA
gatgagatgggcagcacccaaagacctctgggtaaatcaagggattatttgcaacactgcccccacccccagacaccatgggcgcagacgctctgctgacatgctgttaa

SEQ ID NO: 7438 - DNA, 110 bp, synthetic construct
  source 1..110: mol_type = other DNA
ggatggagcacacaaggtcattccacatgaaagacgctgcgaaaggttcccagtctctggggaccctagagtcagaccaaaggtttgggagagacactgtggactcctga

SEQ ID NO: 7439 - DNA, 110 bp, synthetic construct
  source 1..110: mol_type = other DNA
tctggggaccctagagtcagaccaaaggtttgggagagacactgtggactcctgactggaaatctccaaaacccctttacagtgtccatcaagtccctaaagatctgggg

SEQ ID NO: 7440 - DNA, 110 bp, synthetic construct
  source 1..110: mol_type = other DNA
gactaaagatccagcattgccgaagctgtggcataagtggagctgcagctcagattacatccctgcctgagaaaaatccatgcggaaggtgtggccagaaaaaaaagaaa

SEQ ID NO: 7441 - DNA, 110 bp, synthetic construct
  source 1..110: mol_type = other DNA
tacatccctgcctgagaaaaatccatgcggaaggtgtggccagaaaaaaaagaaagaaacatggtgcaatcttggagcaggatcctggttcctcctgaagggatacacat

SEQ ID NO: 7442 - DNA, 110 bp, synthetic construct
  source 1..110: mol_type = other DNA
gttcccaggctaggggacaaatcagagctactgctgccagcctacatcacaacacacaacaacgccagatccttaaaccactgagcgagcccagggatcgaacccacatc

SEQ ID NO: 7443 - DNA, 110 bp, synthetic construct; identical to SEQ ID NO: 7442
  source 1..110: mol_type = other DNA

SEQ ID NO: 7444 - DNA, 110 bp, synthetic construct
  source 1..110: mol_type = other DNA
gatgcgtaaggtcagaagttgttcttaatctccctgctgagaatgagccagtcgtggaaatgacgccacctctagaagccagcagacttatgacacttgggagtttggac

SEQ ID NO: 7445 - DNA, 110 bp, synthetic construct
  source 1..110: mol_type = other DNA
cttccagccacaaacattctcagacaactgagaccctagcagaaatatctgaggatcaatccttgttatgtgcagtggtcccacagaggatcccactaccaccattaagc

SEQ ID NO: 7446 - DNA, 110 bp, synthetic construct
  source 1..110: mol_type = other DNA
tgaggtagatatttttctgatcatcctgctgaatccaggcatagtgcttagactaattagagctcagcatgaatggcctgtatgttcatgtctttaaaacagctctcctg

SEQ ID NO: 7447 - DNA, 110 bp, synthetic construct
  source 1..110: mol_type = other DNA
caggcatagtgcttagactaattagagctcagcatgaatggcctgtatgttcatgtctttaaaacagctctcctgctgtgtagcaccgggaactatgtctagtcacttat

SEQ ID NO: 7448 - DNA, 110 bp, synthetic construct
  source 1..110: mol_type = other DNA
taaatcaacttggacctcttactctatgtaagtgactaaaggaaaatatgtacatattcatcattgaaacacccaaacattgatatacaaaagccaaggaatactgtgct

SEQ ID NO: 7449 - DNA, 110 bp, synthetic construct
  source 1..110: mol_type = other DNA
ctgctcgtactggaagccagttagtcattgaggaaaacggggaagcttccagatccctcataacagaacagtttgctttcttcttaattagcagcagctatatgagaatt

SEQ ID NO: 7450 - DNA, 110 bp, synthetic construct
  source 1..110: mol_type = other DNA
cctcataacagaacagtttgctttcttcttaattagcagcagctatatgagaatttacttggatagaataaccaaagctgactactatagccaaaacatgctgttaaatt

SEQ ID NO: 7451 - DNA, 110 bp, synthetic construct
  source 1..110: mol_type = other DNA
ttaccgaaacggtacactctgtaatttggtactatttggtttcgtcccctccccgtccatatttgtaataactgttaccattaactctgtttaagtacccaagctgcttg

SEQ ID NO: 7452 - DNA, 110 bp, synthetic construct
  source 1..110: mol_type = other DNA
acaagccgatggaaagagactcaacatgaataatcattaaggagatgcaaattgaacccaccataagatatcacctcacactcattaaggtagctacaggaaaataacac

SEQ ID NO: 7453 - DNA, 110 bp, synthetic construct
  source 1..110: mol_type = other DNA
gggaggaggaggctctgatcatttgcatttctatcaagttcccaggtggtgccaaggcctaggcttcatctgttgcatcctgagcatcacagtgaagatggggcggtgag

SEQ ID NO: 7454 - DNA, 110 bp, synthetic construct
  source 1..110: mol_type = other DNA
ataggcagctatcctaagactgttatatgtctttatttgtggagaaaagttatatttgcatttaaaatactatacagagacctatatatatgtcatatgggtgtgtgtgt

SEQ ID NO: 7455 - DNA, 110 bp, synthetic construct; identical to SEQ ID NO: 7454
  source 1..110: mol_type = other DNA

SEQ ID NO: 7456 - DNA, 110 bp, synthetic construct
  source 1..110: mol_type = other DNA
aaacacagacctcccattctttcctgggattgtgaagtggaactaacttttattgaacagctgctgggtgccaggcatgaggccaggcatttagttcctagagcaatcct

SEQ ID NO: 7457 - DNA, 110 bp, synthetic construct
  source 1..110: mol_type = other DNA
ctggagatgtgggttacagatacaagttttgctgctgacttattattctgagtggaactttcacttctccaaacctcagtttcctcatctgtgcaatgagatgattggaa

SEQ ID NO: 7458 - DNA, 110 bp, synthetic construct
  source 1..110: mol_type = other DNA
aactttcacttctccaaacctcagtttcctcatctgtgcaatgagatgattggaacagataatttataagatcccgtccagcagtaaccgcctgtccctgtcatgggggc

SEQ ID NO: 7459 - DNA, 110 bp, synthetic construct
  source 1..110: mol_type = other DNA
tatggcactgataacctctgaagactgcggaagatgggaacatcttaattatctatggtttccagtactcctgtacaattttctccctttaaaaaaaattcagtcttttc

SEQ ID NO: 7460 - DNA, 110 bp, synthetic construct
  source 1..110: mol_type = other DNA
agctattggatgaagcttattctatcagcagttatgagttaacagtgggagctttgcagataacatcatcttcccactcacagtgagtgattgtaacagccctgtcatta

SEQ ID NO: 7461 - DNA, 110 bp, synthetic construct
  source 1..110: mol_type = other DNA
tgttggaacaaagaccagaaccattacaatatggtttgaatatgaaggtgctttactaagcacccatagtaagatcccacactgatgctggcgaacttcctgtagctggg

SEQ ID NO: 7462 - DNA, 110 bp, synthetic construct
  source 1..110: mol_type = other DNA
ctaagcacccatagtaagatcccacactgatgctggcgaacttcctgtagctgggagggatctgcaaagatccagatgatactcgccctggtggccaatcagtgcacatt

SEQ ID NO: 7463 - DNA, 110 bp, synthetic construct
  source 1..110: mol_type = other DNA
aataattgggaaaagaggaaactggagggtgacaatgaaacagctcccattaatcatcactcatggcaatgttagctcatacctttaggcacaaaatgcttcagaagcca

SEQ ID NO: 7464 - DNA, 110 bp, synthetic construct
  source 1..110: mol_type = other DNA
atcactcatggcaatgttagctcatacctttaggcacaaaatgcttcagaagccacaccaaacccacaatactgtctcccttaaaacttgggcaagatgggagttcccat

SEQ ID NO: 7465 - DNA, 110 bp, synthetic construct
  source 1..110: mol_type = other DNA
aaccaactgcagtggcttgggtcattgcagaggtgcaggttccatccctggcccagcacagtgggttcacatctgtggctccgattcaatccctggcctggaacttccat

SEQ ID NO: 7466 - DNA, 110 bp, synthetic construct
  source 1..110: mol_type = other DNA
ccctggcccagcacagtgggttcacatctgtggctccgattcaatccctggcctggaacttccatatgctgtgtgtgcagccataaaaattatttaaaaaaaaaaaaata

SEQ ID NO: 7467 - DNA, 110 bp, synthetic construct
  source 1..110: mol_type = other DNA
taggtgttggaaaaatataaatgttgcaaacagtgtgttttatatgctgcttccaagaatgaaaatatgccaagtctgggggaaaagggttggtcggtcagatttctgga

SEQ ID NO: 7468 - DNA, 110 bp, synthetic construct; identical to SEQ ID NO: 7467
  source 1..110: mol_type = other DNA

SEQ ID NO: 7469 - DNA, 110 bp, synthetic construct
  source 1..110: mol_type = other DNA
attaggtttgcaaaagcttgccccttcctttagctctaacagtctgtctatcaacaaagcctgtgctaaatgaaatcttttgagaatacgtgtcttcccctggtgcccag

SEQ ID NO: 7470 - DNA, 110 bp, synthetic construct
  source 1..110: mol_type = other DNA
tccacttctttctagagtattctttgtctctctgagaaatctcaccacactcacgtcatgctctctctggccttgcacaactgccctttagcatcttcaatttttttttt

SEQ ID NO: 7471 - DNA, 110 bp, synthetic construct
  source 1..110: mol_type = other DNA
tacagattcaaaggttacttacagtttctggtttgtgtactggaggttcctctttcaaccatgttgaagctgtcatgacgcccgcttccacctggccttctctctacaaa

SEQ ID NO: 7472 - DNA, 110 bp, synthetic construct
  source 1..110: mol_type = other DNA
caaccatgttgaagctgtcatgacgcccgcttccacctggccttctctctacaaagaatgcaaaaaaaaaaaaactgcagaaaacatggtgtaaacacaaccatctagac

SEQ ID NO: 7473 - DNA, 110 bp, synthetic construct
  source 1..110: mol_type = other DNA
aaccttatccaaagaaacagctatttttaatactcccctaaaaaggagttgaaagataagaagaaggtaattctccaaattagaggaaaaaagaataatcaggatcctaa

SEQ ID NO: 7474 - DNA, 110 bp, synthetic construct; identical to SEQ ID NO: 7473
  source 1..110: mol_type = other DNA

SEQ ID NO: 7475 - DNA, 110 bp, synthetic construct
  source 1..110: mol_type = other DNA
taataaactgcaaacaatatgcacaaaaggcctgcagtaagtcaatttaaccacgctatgtagcttaacaaatgtcagaatgctttccttccatacggtagtactaaaaa

SEQ ID NO: 7476 - DNA, 110 bp, synthetic construct
  source 1..110: mol_type = other DNA
gttaaagatggcagatcaaacatacgcacatcaggcttagcaaacaagtccaggtggagctggtcagaaaggtctgggaaaatttcttcaaagaaatgaaactgattaca

SEQ ID NO: 7477 - DNA, 110 bp, synthetic construct
  source 1..110: mol_type = other DNA
acagtcgagtttttcctttacaagaactaaatggctctgaatgccaaataagtggccgaaagcttgtttctgggttttagtgataaatagcctaaacagtctctgttaaa

SEQ ID NO: 7478 - DNA, 110 bp, synthetic construct
  source 1..110: mol_type = other DNA
gacatgtgcccagattggaggaaatgaggagacaggacaaagagcatggtcccgtatgtattcactcagctttccttcaagtaaacatcttgaagcaccgctatctacac

SEQ ID NO: 7479 - DNA, 110 bp, synthetic construct
  source 1..110: mol_type = other DNA
aacagataattcccttttagttcatgcgggagaaacaacttatcatgaaagaagatgatctgaagcttttccactcaggttgtgttctttcatttctttccatttctgta

SEQ ID NO: 7480 - DNA, 110 bp, synthetic construct
  source 1..110: mol_type = other DNA
tgttctaggaggttctgaaggaagctttgggcaatcacaagttctactgtcccagaatccctgtaatttcgaatttccccctgttctgttgatggaactaaaaataacaa

SEQ ID NO: 7481 - DNA, 110 bp, synthetic construct
  source 1..110: mol_type = other DNA
aaaaggcaagtagaatgaaaactcatcccagacagaatttgggagcaaaagcttagccaggagaggtaataggggatgcccaacaatgcaaatagttcattcaggtgaag

SEQ ID NO: 7482 - DNA, 110 bp, synthetic construct
  source 1..110: mol_type = other DNA
gccaggagaggtaataggggatgcccaacaatgcaaatagttcattcaggtgaagctgggggtggggagagttgggggcggggggtagctagtgagctaggcagaaatca

SEQ ID NO: 7483 - DNA, 110 bp, synthetic construct
  source 1..110: mol_type = other DNA
tctgtgtaccagatattttggcagctaccagggctatacccatgactaagatagagctcccactttcaaaatgtgaggaagacaggcaatttcaatgtcagacaggaaat

SEQ ID NO: 7484 - DNA, 110 bp, synthetic construct
  source 1..110: mol_type = other DNA
gctcccactttcaaaatgtgaggaagacaggcaatttcaatgtcagacaggaaatttcaaggcagcatgtaaaggcactatcccacgatgccttggaagccactagccta

SEQ ID NO: 7485 - DNA, 110 bp, synthetic construct
  source 1..110: mol_type = other DNA
tgattcgtggagccaaatagaattaactgtaagtctgtagaagtaggggcattgaaatgggtggatcactcagaggagagtgggctggtggtctgtttcaaatcatgaag

SEQ ID NO: 7486 - DNA, 110 bp, synthetic construct
  source 1..110: mol_type = other DNA
tgagaggatatgcagctgcctgcggagagtaacagggaaccattatggataaatagcttacaatgttatttcggaatctcatgatctaagtagctatactgaaattccta

SEQ ID NO: 7487 - DNA, 110 bp, synthetic construct
  source 1..110: mol_type = other DNA
agagtaacagggaaccattatggataaatagcttacaatgttatttcggaatctcatgatctaagtagctatactgaaattcctataaaacattgggaggaaaaaactat

SEQ ID NO: 7488 - DNA, 110 bp, synthetic construct
  source 1..110: mol_type = other DNA
atctcccccagaccacatcagtaatttcagtcacttgaaatgggttctttggggcttcctgagggcctgactccacactggtgcatggtaaggaagacagcaagacaaag

SEQ ID NO: 7489 - DNA, 110 bp, synthetic construct
  source 1..110: mol_type = other DNA
ttcctgagggcctgactccacactggtgcatggtaaggaagacagcaagacaaagaacagctctggctgtcactcagctgtgatttgggataggcctttgctagagtagc

SEQ ID NO: 7490 - DNA, 110 bp, synthetic construct
  source 1..110: mol_type = other DNA
caagttacttactccaagttagataaaaaggaaacctgagttcaatttgtgagagccagctggcttagtgagcaaacttgcccatccacagagtgtgagggcttaggtga

SEQ ID NO: 7491 - DNA, 110 bp, synthetic construct
  source 1..110: mol_type = other DNA
ctgacttaaaaaaaaatgcacaacctaaagttgagaattaagctttatttggggcacaatgaggacttaagctagggaagcagcatctcaagtaaccctaagagaactgc

SEQ ID NO: 7492 - DNA, 110 bp, synthetic construct
  source 1..110: mol_type = other DNA
taaagttgagaattaagctttatttggggcacaatgaggacttaagctagggaagcagcatctcaagtaaccctaagagaactgctccaaggaggcaaggggggagttag

SEQ ID NO: 7493 - DNA, 110 bp, synthetic construct
  source 1..110: mol_type = other DNA
tagtcagtttgtgctctgaggataggaaggagaagtccgttattcatgttgaaatattctctagaaaaccagggtcatggatataaaatatgaagcatcaaatattgaag

SEQ ID NO: 7494 - DNA, 110 bp, synthetic construct
  source 1..110: mol_type = other DNA
attctctagaaaaccagggtcatggatataaaatatgaagcatcaaatattgaaggcactaggcattacctaaaataacctttggtgtgcgtaaaggttggaaatgtgga

SEQ ID NO: 7495 - DNA, 110 bp, synthetic construct
  source 1..110: mol_type = other DNA
gttctggggagatgtgccagttaggacatgtttgactgcaagaaaactcaaggaaaggaggcctagggcaaaaggaaaattctaaggttggctacttcattccttcagct

SEQ ID NO: 7496 - DNA, 110 bp, synthetic construct
  source 1..110: mol_type = other DNA
aggaggcctagggcaaaaggaaaattctaaggttggctacttcattccttcagctatgctagtgaggggccctttgctctttgtaacatgttggccagtcctcacaggct

SEQ ID NO: 7497 - DNA, 110 bp, synthetic construct
  source 1..110: mol_type = other DNA
atatggtctaaccaggacggccatggcactattgaaatcatacgtatgttagcaaaaatgtgatgacacatactgaaataacggtaattcatctcaggtttgggcataat

SEQ ID NO: 7498 - DNA, 110 bp, synthetic construct
  source 1..110: mol_type = other DNA
aaatgtgatgacacatactgaaataacggtaattcatctcaggtttgggcataatgtcccctttcacctagtttccttccttcctaagaaatttccttccttcctaagaa

SEQ ID NO: 7499 - DNA, 110 bp, synthetic construct
  source 1..110: mol_type = other DNA
taccacagatttagtggcttaaaccatacgtttttatcttgctgttctagaagtcagaagtcttaaatgggtctcactgggccaaacttagctgtcaacagagctgcgtg

SEQ ID NO: 7500 - DNA, 110 bp, synthetic construct
  source 1..110: mol_type = other DNA
agaagtcttaaatgggtctcactgggccaaacttagctgtcaacagagctgcgtgccttcagagtctaggggaggatccatttctttgccttttccaacttctaaaggcc

SEQ ID NO: 7501 - DNA, 110 bp, synthetic construct
  source 1..110: mol_type = other DNA
tgacataagcatggcctctgggctgttggagaaggtgctttagctgaccgagcagaggaaggggtaaaagaacccacaatgatgccattttttgcctgcttttccctgag

SEQ ID NO: 7502 - DNA, 110 bp, synthetic construct
  source 1..110: mol_type = other DNA
ccataatccttcctttgatgtcagggtcaatgcgatcctggtctctcaccaggactagcaatagatgcatgaaaaggaatctcactgtgatctttcctgcaagggaaaca

SEQ ID NO: 7503 - DNA, 110 bp, synthetic construct
  source 1..110: mol_type = other DNA
cccctgcctggaactctcttgccggctctctgtgaatcacttctcaagggccgtttttttcaagaacccttccggaaaccatttttgctttctggatgttgctctctctt

SEQ ID NO: 7504 - DNA, 110 bp, synthetic construct
  source 1..110: mol_type = other DNA
ggtcaagggacctgggattaaatatcctgaagaagagatgtctgaggacggacagcagagccattttcaagggattttacaaaagctggtgaacagctgttgtgcatccc

SEQ ID NO: 7505 - DNA, 110 bp, synthetic construct
  source 1..110: mol_type = other DNA
gcaggtgtgtgttctgtcccctgatggtgaaaggagccagcggttggtacatctggaagaagaggccagctgctgaaaggggaggtaagaaaaggccctgctcttagcag

SEQ ID NO: 7506 - DNA, 110 bp, synthetic construct
  source 1..110: mol_type = other DNA
tgtatctggcttcttttgtacaatacactgtttttgacatccatgttgctatttattaaatagtttatgcctttgtattgctgggtagtatttcattatactaatatacc

SEQ ID NO: 7507 - DNA, 110 bp, synthetic construct
  source 1..110: mol_type = other DNA
gtcagggattaaatcctcatagatactagttgggttcgtaacacgctgagccacaatgggaactccagccattttttgaaaatgggcatataacaagtattaaaaaatga

SEQ ID NO: 7508 - DNA, 110 bp, synthetic construct; identical to SEQ ID NO: 7507
  source 1..110: mol_type = other DNA

SEQ ID NO: 7509 - DNA, 110 bp, synthetic construct
  source 1..110: mol_type = other DNA
cctctccctttgacaatgactaatgacattgagaatcaaggttttctttctcaacgaagcagaatggaccccacagcttgagctctaggaatccacttccactctaagta

SEQ ID NO: 7510 - DNA, 110 bp, synthetic construct
  source 1..110: mol_type = other DNA
gtcactaatttgaattttgtcaaactattttttggaccaaataaaacatacctgtaagctagctgaagcctgcaacctacaacgttgccttcttgatggatattgcccca

SEQ ID NO: 7511 - DNA, 110 bp, synthetic construct
  source 1..110: mol_type = other DNA
tctcttgttctccatgctgtgttgtcacaacccttgggtgctcacaaaacaatttactagctcccatatctttctgggttgcaggaaactctactgaggctgttttgtat

SEQ ID NO: 7512 - DNA, 110 bp, synthetic construct
  source 1..110: mol_type = other DNA
actagctcccatatctttctgggttgcaggaaactctactgaggctgttttgtatctgcctgcctggcctgatgagcacagaaagacagagtactctgggctctccctgg

SEQ ID NO: 7513 - DNA, 110 bp, synthetic construct
  source 1..110: mol_type = other DNA
aacatgggggtttatggtttatactgctcaacagcctagaggcagattttcaggccaagcttgatcaagcaacaaagtgatgacatttgggacctcgtttatttccatgt

SEQ ID NO: 7514 - DNA, 110 bp, synthetic construct
  source 1..110: mol_type = other DNA
ttctttctttcctccattctttcttttcctttctttctgttagcttctctcttaggacacaatattgcctctcattttaaggcgtcctgcctttaatgagtccatcacta

SEQ ID NO: 7515 - DNA, 110 bp, synthetic construct
  source 1..110: mol_type = other DNA
gacacaatattgcctctcattttaaggcgtcctgcctttaatgagtccatcactagttgaggcttgggggctcctcatgaatggactgctcaattacataatgctttcaa

SEQ ID NO: 7516 - DNA, 110 bp, synthetic construct
  source 1..110: mol_type = other DNA
acctgttcttgacaagccaatacttattatttgagtgtgctccttcaacgccatagccgaccaccagaacgccatgatccaggtcttcgctgctgcactgtggttcaaaa

SEQ ID NO: 7517 - DNA, 110 bp, synthetic construct
  source 1..110: mol_type = other DNA
gccgaccaccagaacgccatgatccaggtcttcgctgctgcactgtggttcaaaataaatgcctggaaaagtaaaattaaggttggggtgaggatctccaagagacatgt

SEQ ID NO: 7518 - DNA, 110 bp, synthetic construct
  source 1..110: mol_type = other DNA
tttctcgactgtctgtgaacccaagaggtctgtttggagtcaataacacccacggagagcagccatcctgaaagctgcaggaatcactgctaagtaccaggggcccaggg

SEQ ID NO: 7519 - DNA, 110 bp, synthetic construct
  source 1..110: mol_type = other DNA
ctcgctgcatccttccggtctgggagttttcttttccgttttgaaaaaattgagggataagttataccctcaattgagctatgccattagactagagtccaggtataaca

SEQ ID NO: 7520 - DNA, 110 bp, synthetic construct
  source 1..110: mol_type = other DNA
gataagttataccctcaattgagctatgccattagactagagtccaggtataacaatatgctagttccagatggacaacggaaatgattccacgtctgtatacaccgtga

SEQ ID NO: 7521 - DNA, 110 bp, synthetic construct
  source 1..110: mol_type = other DNA
ttcccagggatttgggggaccccagatcagagcatcataaagtagaatctgtcgtccccagggaaggattaagaatagctcatcactggagttcctggtgtggtactgac

SEQ ID NO: 7522 - DNA, 110 bp, synthetic construct
  source 1..110: mol_type = other DNA
tggttaccaaaggaggaaggtgggagagggggaatacatgaggaggttgggattgacatatgcacagtgctacacagaaaatggacagtgaacaaggacctgccacagag

SEQ ID NO: 7523 - DNA, 110 bp, synthetic construct
  source 1..110: mol_type = other DNA
acatatgcacagtgctacacagaaaatggacagtgaacaaggacctgccacagaggtaacaggggcaacctaaacaataccgtgaataacccacatgggaaaagaaatct

SEQ ID NO: 7524 - DNA, 110 bp, synthetic construct
  source 1..110: mol_type = other DNA
tctttaatcattacttaatgattgccattgagcttttaaaaaaatgcctgaggattgcacaacacgaaaacaataataattttaaaaacagtagtcagcaacaagaaccc

SEQ ID NO: 7525 - DNA, 110 bp, synthetic construct; identical to SEQ ID NO: 7524
  source 1..110: mol_type = other DNA

SEQ ID NO: 7526 - DNA, 110 bp, synthetic construct
  source 1..110: mol_type = other DNA
taacccactgagctacaatgggaactcccaagtgtgcactgaaataggtcttcagaacagggagctgagaaggaaggcagttaagaaaatgaatggacactgtggatttg

SEQ ID NO: 7527 - DNA, 110 bp, synthetic construct
  source 1..110: mol_type = other DNA
aacagggagctgagaaggaaggcagttaagaaaatgaatggacactgtggatttgctaaagactaattgttcctgtcctaaaagaattctctaataatcaaaatttcttc

SEQ ID NO: 7528 - DNA, 110 bp, synthetic construct
  source 1..110: mol_type = other DNA
cctgtgtgtcccacctccaaggagaaaacaagctggggactctctcctcccatccccacggaattgccagtatttttaggactgagtcctgcagtgcacagcaaaccaac

SEQ ID NO: 7529 - DNA, 110 bp, synthetic construct
  source 1..110: mol_type = other DNA
tatctgcagctctagacacacatcagtaacccacaaatatcaaagtattacatgcagaaataggagttcccggtgtggctcgggggttaatgaatcccactaggaaccat

SEQ ID NO: 7530 - DNA, 110 bp, synthetic construct
  source 1..110: mol_type = other DNA
ttttaagcaatttctggatgaaaatgatatcttccttttctacaactgtgtcattgtgtgttgagagtccatatgggctttaattagatttagaatggcagattatcctt

SEQ ID NO: 7531 - DNA, 110 bp, synthetic construct
  source 1..110: mol_type = other DNA
agcgctaatttaatttgctcataaacctctcaggctaggaatattctgggatgctaaaagccatccatatcttttgcctggaaaattacgatagctttttcatcaatctc

SEQ ID NO: 7532 - DNA, 110 bp, synthetic construct
  source 1..110: mol_type = other DNA
aaaagccatccatatcttttgcctggaaaattacgatagctttttcatcaatctccttactttttgtcactccctacgtgacactgtgttctctacttaagttctaacag

SEQ ID NO: 7533 - DNA, 110 bp, synthetic construct
  source 1..110: mol_type = other DNA
ggtgttgaatttttgtcaaaagctttttcagcatatattgagatcactatatgttttttattcatcagttgatgtggcgtgtcatgttgattgatttgtagacattgaaa

SEQ ID NO: 7534 - DNA, 110 bp, synthetic construct
  source 1..110: mol_type = other DNA
agtctgactcattaaaaacaaaatgtggaagagagccctgatctggaggcacgtggtgtttgtagctctcagagctttagtgttgccgatacggcgcctgatcccaatcc

SEQ ID NO: 7535 - DNA, 110 bp, synthetic construct
  source 1..110: mol_type = other DNA
agccccatttttgtcatcagatctgctcatatcaaatcataaacagcatagctgccagagcaatattcccatgggcacctctaattttggcttttctctgcttaacctct

SEQ ID NO: 7536 - DNA, 110 bp, synthetic construct
  source 1..110: mol_type = other DNA
gtggcctaaaaaagccaaaaaaaaaaagggggggggaagccacctggcttttctagtaagaattgctgtaataataatactacccatcagagccccatgatagctcattt

SEQ ID NO: 7537 - DNA, 110 bp, synthetic construct
  source 1..110: mol_type = other DNA
gtaagaattgctgtaataataatactacccatcagagccccatgatagctcatttcgcagaagactgtaggagataagagtgaggctttaggattccagaagctggtttt

SEQ ID NO: 7538 - DNA, 110 bp, synthetic construct
  source 1..110: mol_type = other DNA
cttctatgcctcagttttctcatctgtaaaagagaaagaataatgttttgtcatttagtggcaagtaacagaacactctcttaacctagtttaaacaatataggagtact

SEQ ID NO: 7539 - DNA, 110 bp, synthetic construct
  source 1..110: mol_type = other DNA
cttcttataaggctaccggtcatattggattaagagctactttttatgacccatcgcttttgtgacctcacttgaacttatctaactgcatctataacgaccctctttcc

SEQ ID NO: 7540 - DNA, 110 bp, synthetic construct
  source 1..110: mol_type = other DNA
gtgcctggaatgtccagtctggctaactccaggtaatttccatataaattttaggatcggcttgtcaatttctgcccccccttcaacggcagctgaaattttgtcaggac

SEQ ID NO: 7541 - DNA, 110 bp, synthetic construct
  source 1..110: mol_type = other DNA
atcggcttgtcaatttctgcccccccttcaacggcagctgaaattttgtcaggactgccctgaatacagacaatgtagggattgttgccttcttaataataataagtctt

SEQ ID NO: 7542 - DNA, 110 bp, synthetic construct
  source 1..110: mol_type = other DNA
cctgcatcatcccagagacagcagagctgcgcattattagtgagactaatcatcgtcccaactcagttggaagaaggcgaattctttgtctaaagaaaacactgaaacct

SEQ ID NO: 7543 - DNA, 110 bp, synthetic construct
  source 1..110: mol_type = other DNA
aggatctcgggccacacaaggcgcatcctggttctctctctaggattcctgttccccatggcatttttggctaaaaacttctgctctgctagcttcaaagagtcagtttt

SEQ ID NO: 7544 - DNA, 110 bp, synthetic construct
  source 1..110: mol_type = other DNA
ccatggcatttttggctaaaaacttctgctctgctagcttcaaagagtcagtttttcctttcacccatgtgtgttcccctcttataactaactacacagctcaaacattc

SEQ ID NO: 7545 - DNA, 110 bp, synthetic construct
  source 1..110: mol_type = other DNA
cagaactggaaatagtagtctagactctgacctttgttacaccacagatttattgcttctctgagaactgacgtatggccggaaaggcatcatttcgaaaagattttgct

SEQ ID NO: 7546 - DNA, 110 bp, synthetic construct
  source 1..110: mol_type = other DNA
taagctgatagatgacaggatctcagcttatggggcaattatggaatgcctcaattgaaaccgcggaagaaacagctattttccattttcctccttcgggggaactcaag

SEQ ID NO: 7547 - DNA, 110 bp, synthetic construct
  source 1..110: mol_type = other DNA
ctccctgtgtctccgagaagaatgtcacgcagctgccaaagcctcaaaccggaattgagagaagctcatcagacttcctcacatggtgagtctccagtgtgaggtgactg

SEQ ID NO: 7548 - DNA, 110 bp, synthetic construct
  source 1..110: mol_type = other DNA
tgagagaagctcatcagacttcctcacatggtgagtctccagtgtgaggtgactgcctttacaggctggaagtctggtccccagggatgggcggtctgaccagaggccca

SEQ ID NO: 7549 - DNA, 110 bp, synthetic construct
  source 1..110: mol_type = other DNA
cctcgtggaggaaggtaggctgggctggccaggcggagaggggagctttcagaaaagggggcctcaagtcagaggttggctgtcctcagctctctttgattcctctaatc

SEQ ID NO: 7550 - DNA, 110 bp, synthetic construct
  source 1..110: mol_type = other DNA
agggggcctcaagtcagaggttggctgtcctcagctctctttgattcctctaatcagcaggattcacttttcctacctttgcgtgaatatgcttaatttgtcaggaactc

SEQ ID NO: 7551 - DNA, 110 bp, synthetic construct
  source 1..110: mol_type = other DNA
tctcagccacagcaatgccaaatctgagagcatctgcgaactatacctccaacggtggatccttcacacattgagcaaggccaaggatcagactgcatcctcacagagac

SEQ ID NO: 7552 - DNA, 110 bp, synthetic construct
  source 1..110: mol_type = other DNA
tacacacacagagaaaccggcacagaaatccttacacacactcctacatgcagctgtacacacatccctacacacccctacatacacacacatacacacctatgcacctg

SEQ ID NO: 7553 - DNA, 110 bp, synthetic construct; identical to SEQ ID NO: 7552
  source 1..110: mol_type = other DNA

SEQ ID NO: 7554 - DNA, 110 bp, synthetic construct
  source 1..110: mol_type = other DNA
ctctaccttcccattcaactcaaacagtctatgattcaaaggccatttgcaatcatatttcagattagattgtaatttcccccaaccaacagattctttctcatcatact

SEQ ID NO: 7555 - DNA, 110 bp, synthetic construct
  source 1..110: mol_type = other DNA
tagtgagattcatttccgatgtgccacaatgggaaccccctgtgtgaaatcttttaacatgagcttctattactttcacagtataagatgggaggggaattactcttatt

SEQ ID NO: 7556 - DNA, 110 bp, synthetic construct; identical to SEQ ID NO: 7555
  source 1..110: mol_type = other DNA

SEQ ID NO: 7557 - DNA, 110 bp, synthetic construct
  source 1..110: mol_type = other DNA
gctgtggaatgttcacctccccttgttcacacccacacacaaaacataggcctgtccttgcctggggaggtgaggcaaagacctccttctgatcggtgggctggatagat

SEQ ID NO: 7558 - DNA, 110 bp, synthetic construct
  source 1..110: mol_type = other DNA
ccttgcctggggaggtgaggcaaagacctccttctgatcggtgggctggatagatctttgcaaggcactacattcttagttcatacatttatgccctctacggaatggcg

SEQ ID NO: 7559 - DNA, 110 bp, synthetic construct
  source 1..110: mol_type = other DNA
cttcatccttggagagctcttacagagcagctctgagccgttttcaagagatcgatgacctcctgtggggcgtctgacaaatgcaggaatctttgttcaccgtgacaggt

SEQ ID NO: 7560 - DNA, 110 bp, synthetic construct
  source 1..110: mol_type = other DNA
tcacgccctatttagtatttgtaatgatttttctgtgtatgtgtgaaacaaaataggcgaaacacctattttgatgaatgttctttttagcggaatttaagtatgatcgt

SEQ ID NO: 7561 - DNA, 110 bp, synthetic construct
  source 1..110: mol_type = other DNA
ggcgaaacacctattttgatgaatgttctttttagcggaatttaagtatgatcgtatttagtgtgtcatgatgcttctgatcaatttcagagatcccgtttccaattgtg

SEQ ID NO: 7562 - DNA, 110 bp, synthetic construct
  source 1..110: mol_type = other DNA
aattgtttacaacaaaaagcattctaaatcaagctgtggtttgctgtgttccttcctctctcgctcctgcttgcagatagtcgcggctgtgaatattaatgactgtagtt

SEQ ID NO: 7563 - DNA, 110 bp, synthetic construct
  source 1..110: mol_type = other DNA
agacaaggaatttagcacaaccaagccagctttgaaataaatgctaaaggaacatcttcagcagaaaaagaacatgccacactagaaacacaaaagttacaaaatcagaa

SEQ ID NO: 7564 - DNA, 110 bp, synthetic construct
  source 1..110: mol_type = other DNA
aagttgagaaatgtcatgtcatcaagatagtttaagactctgcttgctccaaggaaattagaagaggcattagctctgactttctaagaactttaataagactatacatt

SEQ ID NO: 7565 - DNA, 110 bp, synthetic construct
  source 1..110: mol_type = other DNA
gtaatttgttctgaagtcacaatacagagacaacttcttatataggaaagccatggatatagtcatttaatgactcacccatgtctgaaatctgaagggaaggcaaagca

SEQ ID NO: 7566 - DNA, 110 bp, synthetic construct
  source 1..110: mol_type = other DNA
gatatagtcatttaatgactcacccatgtctgaaatctgaagggaaggcaaagcactattttgaaaccattgcagcctatctgtaccctccccatgagtggttaaaaggg

SEQ ID NO: 7567 - DNA, 110 bp, synthetic construct
  source 1..110: mol_type = other DNA
agagcacctcaaattcctatcggtaatgaatcttctccagtgcttgatcaaattttcagttttcctgtctttttccttattttaaaaatattctgataggtgaataatat

SEQ ID NO: 7568 - DNA, 110 bp, synthetic construct
  source 1..110: mol_type = other DNA
gggccctccattccatatgccacacgggtcaggccctaaagaaaaagaaagaaatgcaacttctatgatctcaacactagacctactaaatagggttaactctaggggta

SEQ ID NO: 7569 - DNA, 110 bp, synthetic construct
  source 1..110: mol_type = other DNA
gcaacttctatgatctcaacactagacctactaaatagggttaactctaggggtagggcccagcaatctgttttttaaaaatccttttagatgattctgaagtcactaaa

SEQ ID NO: 7570 - DNA, 110 bp, synthetic construct
  source 1..110: mol_type = other DNA
taaattcatcaatacctaaaaattgtatttctaactgctaagacctctccctcataagttaaatatttcatagctctgagttcctctggaggcttagaatttacctcaaa

SEQ ID NO: 7571 - DNA, 110 bp, synthetic construct
  source 1..110: mol_type = other DNA
taagactttcttgacccaagccagtccaaaaaagctgaaacagttgattgcattctcacatgttctgcagacatcagtgcaaaaccatcagacatctggaaaagcaagga

SEQ ID NO: 7572 - DNA, 110 bp, synthetic construct
  source 1..110: mol_type = other DNA
gtctgttctcctggtggttgtggtgatagggtggagttggaattgtgctgtctgtagctctcctgaatcatacttgcttccccactaacccaccgcatgggaattttgtg

SEQ ID NO: 7573 - DNA, 110 bp, synthetic construct
  source 1..110: mol_type = other DNA
aggcaccaggtgccccctttcttaataatcctttcaaatataatataatacaataaaaacaaaacaattttgttctgaccatgatttagaaagagtagctcattcctgtg

SEQ ID NO: 7574 - DNA, 110 bp, synthetic construct
  source 1..110: mol_type = other DNA
ttgttgccacttagtaaggattactgttcactgagtcctcacagcagatgtagacacagcttccagtgcttcacagagagtcatttatgtaatatatatatccagtctac

SEQ ID NO: 7575 - DNA, 110 bp, synthetic construct
  source 1..110: mol_type = other DNA
acagcttccagtgcttcacagagagtcatttatgtaatatatatatccagtctaccttgggaatacatcagcatccttgatttccagagagaaaactgacactgagaagt

SEQ ID NO: 7576 - DNA, 110 bp, synthetic construct
  source 1..110: mol_type = other DNA
aaccaggaaggtggtttaagcttttgatggtttgagccaagacctcttcatgatctgaactgttcttttctgagatactggatgagggacactatgagctgaaagtcatt

SEQ ID NO: 7577 - DNA, 110 bp, synthetic construct
  source 1..110: mol_type = other DNA
tgaactgttcttttctgagatactggatgagggacactatgagctgaaagtcatttggtgtctgagggttcaacttacacaaatcaatagaaacttagcagtatatttga

SEQ ID NO: 7578 - DNA, 110 bp, synthetic construct
  source 1..110: mol_type = other DNA
tttttgggtccccttccattcctatttcaaagtggcagaaagagccacagtaaaaggaaattgttgagagggttggaatgtaaacatgattgtctttattcttcatcaat

SEQ ID NO: 7579 - DNA, 110 bp, synthetic construct
  source 1..110: mol_type = other DNA
gtggccccctcaccccctgcatgacacccactcctcctgctcctaatctccagctactgtcatggaattcccgagggattttggagtcttcaccaacccacgtctgctct

SEQ ID NO: 7580 - DNA, 110 bp, synthetic construct
  source 1..110: mol_type = other DNA
actgtcatggaattcccgagggattttggagtcttcaccaacccacgtctgctctcctagccgtcatcctgcccacccttcttagcaggagccactcctggagaatggca

SEQ ID NO: 7581 - DNA, 110 bp, synthetic construct
  source 1..110: mol_type = other DNA
ggactgtcaccaccacgtagaagtaggttccacaattggataaatggttgggggagtgatagttgagcaaggagctgaaggacataaagagagcattccagaaagagggg

SEQ ID NO: 7582 - DNA, 110 bp, synthetic construct
  source 1..110: mol_type = other DNA
tctccccaaatccctactgcctacattcagaaaactctatcagctctacacactgatcagaggctcccaacttctgtgaggtgacaggaatccaaagacaggacaaacaa

SEQ ID NO: 7583 - DNA, 110 bp, synthetic construct
  source 1..110: mol_type = other DNA
ctgatgactagagttaatgtgaatgcctcatactctccaaggcatttacaggttccacagctcagggggcttgctagaattatgacatttagacaaagtgccaggcctta

SEQ ID NO: 7584 - DNA, 110 bp, synthetic construct
  source 1..110: mol_type = other DNA
cacagctcagggggcttgctagaattatgacatttagacaaagtgccaggccttagacgttcctaaatattctactgatttaaaaaaaaaatacaattggagttcctgtc

SEQ ID NO: 7585 - DNA, 110 bp, synthetic construct
  source 1..110: mol_type = other DNA
gttttcctgcaaatatgttcatttttgtttggtaatgtgcaaaactaaattcgaagtaaatatttcctaagagtataaaatttagttttgaagctttgccctcgggcatc

SEQ ID NO: 7586 - DNA, 110 bp, synthetic construct
  source 1..110: mol_type = other DNA
gtaaatatttcctaagagtataaaatttagttttgaagctttgccctcgggcatcaaaaaaatgagctcttcaacctaatacggttatggttttctatggaagaaagttg

SEQ ID NO: 7587 - DNA, 110 bp, synthetic construct; identical to SEQ ID NO: 7585
  source 1..110: mol_type = other DNA

SEQ ID NO: 7588 - DNA, 110 bp, synthetic construct; identical to SEQ ID NO: 7586
  source 1..110: mol_type = other DNA

SEQ ID NO: 7589 - DNA, 110 bp, synthetic construct
  source 1..110: mol_type = other DNA
agaacctgagatttgaactcaaagatcaaggtgatcgacactacaagaaactaccctccccagactgcacgtacctattttcacatggactataaataccaacacatatc

SEQ ID NO: 7590 - DNA, 110 bp, synthetic construct
  source 1..110: mol_type = other DNA
ctccccagactgcacgtacctattttcacatggactataaataccaacacatatccataatctaggaatttggtgcatttaaaaaataattccgtgtctatttgtgagag

SEQ ID NO: 7591 - DNA, 110 bp, synthetic construct
  source 1..110: mol_type = other DNA
ctgttacatggtcaaagataacaaaaaataaagtccagtatctaaacaagaggaagctggtgaaaaatcagatgtggtcaatatgaagacatagtgacaagacacagata

SEQ ID NO: 7592 - DNA, 110 bp, synthetic construct
  source 1..110: mol_type = other DNA
gagactaaaattatctcctggtctccaaagccctccctggtgaggccctgcccacttctcctcctcttctgggccgctcttcacctgatacctgcaatagtctctttggc

SEQ ID NO: 7593 - DNA, 110 bp, synthetic construct
  source 1..110: mol_type = other DNA
ttctcctcctcttctgggccgctcttcacctgatacctgcaatagtctctttggcagcaaaactctaatttctccctgtacaccccgcatctgtgtctccatcatattta

SEQ ID NO: 7594 - DNA, 110 bp, synthetic construct
  source 1..110: mol_type = other DNA
aaccaccaagtcctacttttccaccatcacatctctaacatctgccccctcctcgctcacctctctgcttctacattttacagcatcattgttcacctaagctgtcgacc

SEQ ID NO: 7595 - DNA, 110 bp, synthetic construct
  source 1..110: mol_type = other DNA
ctcacctctctgcttctacattttacagcatcattgttcacctaagctgtcgacctgaatcttccctctccccatcaccgctcctgtaagtctacctcttcctgcccccc

SEQ ID NO: 7596 - DNA, 110 bp, synthetic construct
  source 1..110: mol_type = other DNA
cacatggggaactccacttattttgtgttgtctttctgaggccagtatttttgataaatccaatttttctcaacccagctttgcagatctaaattttattcaaaaatatc

SEQ ID NO: 7597 - DNA, 110 bp, synthetic construct; identical to SEQ ID NO: 7596
  source 1..110: mol_type = other DNA

SEQ ID NO: 7598 - DNA, 110 bp, synthetic construct
  source 1..110: mol_type = other DNA
gagccacacagagattcctaactctcctcttgatggagatttgggctgcttctaattaggagctattattaatataaattcagtcattcctttgaatccaaagactagaa

SEQ ID NO: 7599 - DNA, 110 bp, synthetic construct; identical to SEQ ID NO: 7598
  source 1..110: mol_type = other DNA

SEQ ID NO: 7600 - DNA, 110 bp, synthetic construct; identical to SEQ ID NO: 7598
  source 1..110: mol_type = other DNA

SEQ ID NO: 7601 - DNA, 110 bp, synthetic construct; identical to SEQ ID NO: 7598
  source 1..110: mol_type = other DNA

SEQ ID NO: 7602 - DNA, 110 bp, synthetic construct
  source 1..110: mol_type = other DNA
aaaaaaaagaggaaggctaatacttaaagaagttaactcataactctgggtaatagcacaagaaccaggtaggcacaactgaccagggtttatcctgcaggtgattttcc

SEQ ID NO: 7603 - DNA, 110 bp, synthetic construct
  source 1..110: mol_type = other DNA
gcacaagaaccaggtaggcacaactgaccagggtttatcctgcaggtgattttccaggctttggcataagatacacctttacataaacacagctggagagtggctaaagc

SEQ ID NO: 7604 - DNA, 110 bp, synthetic construct
  source 1..110: mol_type = other DNA
atccctggcctcactcatcaggttatggatcccgagttgctgtggctatggtataggcccagctgatgcagttccagttcaaatcctaggccaggaacttccatatgcca

SEQ ID NO: 7605 - DNA, 110 bp, synthetic construct
  source 1..110: mol_type = other DNA
ggcccagctgatgcagttccagttcaaatcctaggccaggaacttccatatgccacgggtgcagccctaaaaattaaaataaaataggcttgtgaacggcctttcctaac

SEQ ID NO: 7606 - DNA, 110 bp, synthetic construct
  source 1..110: mol_type = other DNA
caattgctttactcacttaaaataatttattttttactaacaagtaaacatccaactctgttcattaaaccagtggccttcgcgttttctaacagttttttctaagctgg

SEQ ID NO: 7607 - DNA, 110 bp, synthetic construct
  source 1..110: mol_type = other DNA
ctctgttcattaaaccagtggccttcgcgttttctaacagttttttctaagctggagctaaaccttgacaatactttggttgataggcacacacagatgaaactatctgc

SEQ ID NO: 7608 - DNA, 110 bp, synthetic construct
  source 1..110: mol_type = other DNA
ttctaattccaggtaaatgaaataagtccactcctctctctcactcacatagcaaagatataaagcctgcatggaatgcctggaagagctattagaaaactctgggagtt

SEQ ID NO: 7609 - DNA, 110 bp, synthetic construct
  source 1..110: mol_type = other DNA
tggaatgaaacacacaaaaataagtgactatgagaaactcagacactcttatctaagcttgtttcctgtctatatacttactgcatagggctactacgaaaattaaagga

SEQ ID NO: 7610 - DNA, 110 bp, synthetic construct
  source 1..110: mol_type = other DNA
agcttgtttcctgtctatatacttactgcatagggctactacgaaaattaaaggacaggagaagatggcaggctgagcacagcatagacacaaatcagctgaccccaggc

SEQ ID NO: 7611 - DNA, 110 bp, synthetic construct
  source 1..110: mol_type = other DNA
gtccaaattcaaggccatcatttactctccaaaccaagcatttggcttgactttctcattgctgtttttggttttatcattttatctaagatggaccctgatggatcctg

SEQ ID NO: 7612 - DNA, 110 bp, synthetic construct
  source 1..110: mol_type = other DNA
atttccactgcatcacaatgggaactcccatcctccctgtagcttttctgaccaaagtaaagccatcagctcaatgaggccctcatgtcacagtttcccctaaatatctg

SEQ ID NO: 7613 - DNA, 110 bp, synthetic construct
  source 1..110: mol_type = other DNA
tattcaaaagaataatcagtgaggtgctttttcagctgttgaagtgtgacatgtgtacagaaaggtatgcagaatcctcagcatacagcgttctcagcgcaaagttttag

SEQ ID NO: 7614 - DNA, 110 bp, synthetic construct
  source 1..110: mol_type = other DNA
agagaggcttcgtcacagtctggggcacacctggttaagaggcttcagctgtcgaggttggaattatctagagcaatgtttctcaacttggctgtgcattagaggcacct

SEQ ID NO: 7615 - DNA, 110 bp, synthetic construct
  source 1..110: mol_type = other DNA
ccctctcttctctctggataattaagggtggagctgaaaattctaagcttctaatcagagcttggtctttttggtgatcaatgcccatccagaagcccaccaagagtcac

SEQ ID NO: 7616 - DNA, 110 bp, synthetic construct
  source 1..110: mol_type = other DNA
cagagcttggtctttttggtgatcaatgcccatccagaagcccaccaagagtcacttcattagaactaaagacattacaatcacacaggaaattccaagggatttaggaa

SEQ ID NO: 7617 - DNA, 110 bp, synthetic construct
  source 1..110: mol_type = other DNA
gtgtatgtctgtgctttccttcatgtgcaatgcgtctggcttaccaaagaaacggatgctttttattggccacctttcaccttgaatattacacttcctctcgaggagac

SEQ ID NO: 7618 - DNA, 110 bp, synthetic construct
  source 1..110: mol_type = other DNA
tcccccccatctaccatgcatctctatactgatttatggcggtgaggcctgaggcagaaggttttccacctttcttgatgggagttgggatgttccatctgatacattta

SEQ ID NO: 7619 - DNA, 110 bp, synthetic construct
  source 1..110: mol_type = other DNA
aaaggaatttcaaacaccaaaactactatatattatcatcctcaattcctaagagaaaggatatataacaccctaagatataggaagtacataatctcagaatgatgagc

SEQ ID NO: 7620 - DNA, 110 bp, synthetic construct; identical to SEQ ID NO: 7619
  source 1..110: mol_type = other DNA

SEQ ID NO: 7621 - DNA, 110 bp, synthetic construct
  source 1..110: mol_type = other DNA
aagccatccttgctttgatatccctcccataccccacatccactcggccaccacagtcaagtccatcccagcagtagctctggcatctgccctggctcttcagcctgctg

SEQ ID NO: 7622 - DNA, 110 bp, synthetic construct
  source 1..110: mol_type = other DNA
cttctgaggtctgaggagcaaaagcagggtacagcacatgaaccctgcacagagcaccaccaagagggtagacagaccactcctatggtccaactccttggaccaacccc

SEQ ID NO: 7623 - DNA, 110 bp, synthetic construct
  source 1..110: mol_type = other DNA
atgaaaactagctcctctcactgaactaccccctcagaagtggggagtttgttgctacatctctcgaaactggcccaccctgctcatagatatttttccatcccagaagt

SEQ ID NO: 7624 - DNA, 110 bp, synthetic construct
  source 1..110: mol_type = other DNA
agtcagtgaaaggaaattctgaaataagcagttgaattcaaaattttattttctcagttttcgcttttaccaggctcatcttaggctcagaaatgttcttgccttaaaca

SEQ ID NO: 7625 - DNA, 110 bp, synthetic construct
  source 1..110: mol_type = other DNA
agttttcgcttttaccaggctcatcttaggctcagaaatgttcttgccttaaacactgctctgaatgaattaacgacagaagagcaatactgcattacttcttttttaat

SEQ ID NO: 7626 - DNA, 110 bp, synthetic construct
  source 1..110: mol_type = other DNA
acataatgctgaattgtcttgtggggtcatgttaaagttaaatgactccaaactgctgtggtcacacccagagtgcagaatcgattctctttattatgtcataaagatag

SEQ ID NO: 7627 - DNA, 110 bp, synthetic construct
  source 1..110: mol_type = other DNA
ctgtggtcacacccagagtgcagaatcgattctctttattatgtcataaagataggaaagccagaagccgcccatgcctttcccccttctcctcctgctggcatgttgca

SEQ ID NO: 7628 - DNA, 110 bp, synthetic construct
  source 1..110: mol_type = other DNA
gtgagctcaggccatgactagggtcatggctccaaagtcaagtctagcttgggggtcagcttaaaattacaggtcagaaggtggtctgggccgggaaccaagcagtggac

SEQ ID NO: 7629 - DNA, 110 bp, synthetic construct
  source 1..110: mol_type = other DNA
ctgggtctctcctcactacgttaagagcagatttttatctgttctacaaattgtactgccttcaaacccctcctcgaggccagctagccaggcttagcaaagagttttag

SEQ ID NO: 7630 - DNA, 110 bp, synthetic construct
  source 1..110: mol_type = other DNA
gcttctagttctccactctccccttaggtgctcttatccctgcccatagatttcatcttccaccttatgatgaagctcaaatcgctttcttctttttattttattttatt

SEQ ID NO: 7631 - DNA, 110 bp, synthetic construct
  source 1..110: mol_type = other DNA
ttgaggtaccatcactgtgaaggtgaaataagccctcaagaccaccatgtctcctcctaagctgtccctggtcagaatctgtcaccttgttatctcagggctgtaggact

SEQ ID NO: 7632 - DNA, 110 bp, synthetic construct
  source 1..110: mol_type = other DNA
cctaagctgtccctggtcagaatctgtcaccttgttatctcagggctgtaggactccgggtgagggaggtaggggagtggtaagagtctagtgggaccagaagtgttaaa

SEQ ID NO: 7633 - DNA, 110 bp, synthetic construct
  source 1..110: mol_type = other DNA
catccatgctcagtccaccagacaaaggcaaaaatgttcagcaccacggagagtgcctttcatcctgaagaggagcgcaagggtcagtgatagatgaggatttacagccg

SEQ ID NO: 7634 - DNA, 110 bp, synthetic construct
  source 1..110: mol_type = other DNA
cctttcatcctgaagaggagcgcaagggtcagtgatagatgaggatttacagccggggagcccagcctgtctgatctccttccattgctggccagccaccgaggatccct

SEQ ID NO: 7635 - DNA, 110 bp, synthetic construct
  source 1..110: mol_type = other DNA
aagcaagagcgggatgtctacctgcccgcaggcaagtggcgcagctataagggcgagcttttcgacaagacgcctgtactgctcactgattaccctgtagacctggacga

SEQ ID NO: 7636 - DNA, 110 bp, synthetic construct
  source 1..110: mol_type = other DNA
taaggatatggcattgctgcaaactgcgacataggtcgaagatgtagcttggatcttgtgttgccatggctgtggcgtgggccccagctgaggctccaattcaacccctg

SEQ ID NO: 7637 - DNA, 110 bp, synthetic construct; identical to SEQ ID NO: 7636
  source 1..110: mol_type = other DNA

SEQ ID NO: 7638 - DNA, 110 bp, synthetic construct
  source 1..110: mol_type = other DNA
ccagtactgtctatcctctgggctcagcagactgccaacgcccttcccacacccgcccagctcagcgctttgccacctttgccccacactgtgcaccatgctttgattcc

SEQ ID NO: 7639 - DNA, 110 bp, synthetic construct
  source 1..110: mol_type = other DNA
gctggaaaaattaagaaaaaaaaggtggggggaaattcctgttgcagctcagtgggttaagaagctgacatagggtatgtgggtttgacccctggccttgcttagtgggt

SEQ ID NO: 7640 - DNA, 110 bp, synthetic construct
  source 1..110: mol_type = other DNA
aagtttttttcagtaatatccaagctcctatttgagcttaaaaatgtaatcctcttttgtatgctgcttgctgatagcttgcttcacttacattatgggtctctttcttt

SEQ ID NO: 7641 - DNA, 110 bp, synthetic construct
  source 1..110: mol_type = other DNA
tagttttttttgcatccagtataaatccatctttatgctgttgtgtcaaatctccatgaacaaaagacattcacttttgtttatctatactgggcctgtggagaacttat

SEQ ID NO: 7642 - DNA, 110 bp, synthetic construct; identical to SEQ ID NO: 7641
  source 1..110: mol_type = other DNA

SEQ ID NO: 7643 - DNA, 110 bp, synthetic construct
  source 1..110: mol_type = other DNA
gcatcatgagccaccaccctcccaacttcatttttttgctgactaaacccgactcctcaaaatttctcacttccataaggaactctcagtcccctaaacttaatcccaga

SEQ ID NO: 7644 - DNA, 110 bp, synthetic construct
  source 1..110: mol_type = other DNA
caattcatctccaaatttattggcctgtcgggcaaagtgagcttgggttcagtaccagtattaccggtcttacagagctgttaggagtatgtgataatccaagttcaata

SEQ ID NO: 7645 - DNA, 110 bp, synthetic construct
  source 1..110: mol_type = other DNA
cagtattaccggtcttacagagctgttaggagtatgtgataatccaagttcaatattgagtaaattgtctggcacaacgttcagtaggcaatttttggaattattattat

SEQ ID NO: 7646 - DNA, 110 bp, synthetic construct; identical to SEQ ID NO: 7644
  source 1..110: mol_type = other DNA

SEQ ID NO: 7647 - DNA, 110 bp, synthetic construct; identical to SEQ ID NO: 7645
  source 1..110: mol_type = other DNA

SEQ ID NO: 7648 - DNA, 110 bp, synthetic construct
  source 1..110: mol_type = other DNA
agacaagtaaaaaaaatggatatttgatgtacacaaacatggatctgtaaaaattcttatttcaaagacacgaactcaacaatgaatgaaagtgacatacgagaactcat

SEQ ID NO: 7649 - DNA, 110 bp, synthetic construct
  source 1..110: mol_type = other DNA
ttctggtcactgaagcctcctaggactcttgtttagtggcccctctgaacccatccatcactaagctaggggacggggagaagccagctaggaccagactcagtcttgga

SEQ ID NO: 7650 - DNA, 110 bp, synthetic construct
  source 1..110: mol_type = other DNA
tggacatatcaattcttaatgactgaatttcttttgctcttccaaagcagcaaaacactcagaacaagtattaaatgaatgcctgaagggttgctccctctcattcattt

SEQ ID NO: 7651 - DNA, 110 bp, synthetic construct
  source 1..110: mol_type = other DNA
ctgtctctctgggcagcactctgactgctggtcagggaacctgtctagtgatttctaaatctgggctgcattctagatggctgaggcttccagaagcccaaccctttgga

SEQ ID NO: 7652 - DNA, 110 bp, synthetic construct
  source 1..110: mol_type = other DNA
taaatctgggctgcattctagatggctgaggcttccagaagcccaaccctttggacgaaagcatctgactatgcctaatgacaggtccacttaccacacagcatatctca

SEQ ID NO: 7653 - DNA, 110 bp, synthetic construct
  source 1..110: mol_type = other DNA
actccgccaagagctttttgaggctagggttggcaggggctagccatccctgagtggtcctcactgcccagcattattggtcttctagggtttcctagctgagtgtgaca

SEQ ID NO: 7654 - DNA, 110 bp, synthetic construct
  source 1..110: mol_type = other DNA
agctctgctccttaactctgttttctttcttcaacccccgtgtccgttctctactcagagcccagatcacgctgctctgctgtgaagcttaggcgctcctcctccacatc

SEQ ID NO: 7655 - DNA, 110 bp, synthetic construct
  source 1..110: mol_type = other DNA
attaactaaagaaacctaagtcccaggtccagctgtcctgaagcttccatcccaacttatggcaagcagaaccattccagggaacaattttcgaatcatgtcaagaattg

SEQ ID NO: 7656 - DNA, 110 bp, synthetic construct
  source 1..110: mol_type = other DNA
tacccaaggtatgataatttaggtaaataagctttcttgttagccccaagatatttaaccagctgtggagtttctgttgcggctcagcagtaacaaacccacccattatc

SEQ ID NO: 7657 - DNA, 110 bp, synthetic construct
  source 1..110: mol_type = other DNA
tcagttgaagcccttcctttctcatcagaggcggttgtgtgggacaatgtgcctcactttggcatcgctcctcattggcccagtgccaccccctgggagacagtgtagct

SEQ ID NO: 7658 - DNA, 110 bp, synthetic construct
  source 1..110: mol_type = other DNA
actttggcatcgctcctcattggcccagtgccaccccctgggagacagtgtagcttagaggctaagagtgggagctcttgagtcagaacacgtgggtccaaatgctggct

SEQ ID NO: 7659 - DNA, 110 bp, synthetic construct
  source 1..110: mol_type = other DNA
catgtaacattatattaattttagctgtacaacagaatgatttggtacttgtacacactgcaaaattatcaccgttgtaagtctggttaatatccaccaccttacaggag

SEQ ID NO: 7660 - DNA, 110 bp, synthetic construct
  source 1..110: mol_type = other DNA
cgaaaggcacatatgagaaaatgactcaaacacggttggttgccccagactgtttgtcttgtctgtcttgaaactgagaatgagagaataaggctatttcagaaaaacaa

SEQ ID NO: 7661 - DNA, 110 bp, synthetic construct
  source 1..110: mol_type = other DNA
gtcttgtctgtcttgaaactgagaatgagagaataaggctatttcagaaaaacaaagaaagcaatgctacttgagtgtaagaagcattgaccaataactgccaagaggca

SEQ ID NO: 7662 - DNA, 110 bp, synthetic construct
  source 1..110: mol_type = other DNA
ggccccatgctgtaggaaggggatgttctgactccccagacccagctgtcctgcatcagctcccaccacagatctggaccatagatgggaagaggctcttctttacccag

SEQ ID NO: 7663 - DNA, 110 bp, synthetic construct
  source 1..110: mol_type = other DNA
ttactaagcaccctaggcactcacatccatgactcggccttggttggacaaaccgtaaagatcagctggtgcagccccttaggcagcagttctttaccaagtgattactc

SEQ ID NO: 7664 - DNA, 110 bp, synthetic construct
  source 1..110: mol_type = other DNA
aaaaaaaaaaaaaaaaaaaaaagtgtacctccccattataaatctcccccaaacttctagtttccacaagcttaatatgctttaatatatcacaagtgtgatcttggtgg

SEQ ID NO: 7665 - DNA, 110 bp, synthetic construct
  source 1..110: mol_type = other DNA
tctagtttccacaagcttaatatgctttaatatatcacaagtgtgatcttggtggttgtggagggcacagtaggaaaggtggatggatggaatgtcccaggttgagccta

SEQ ID NO: 7666 - DNA, 110 bp, synthetic construct
  source 1..110: mol_type = other DNA
tcattgaaatcgctgaaagtcctcaaatctaaggcataatgacctggaagagtacctttaattgtgatccaagtaatttttatgtcacaagtttttttcacgtttgccct

SEQ ID NO: 7667 - DNA, 110 bp, synthetic construct
  source 1..110: mol_type = other DNA
aatctaaggcataatgacctggaagagtacctttaattgtgatccaagtaatttttatgtcacaagtttttttcacgtttgccctgttttcagttaaaattatatgtcat

SEQ ID NO: 7668 - DNA, 110 bp, synthetic construct
  source 1..110: mol_type = other DNA
tttcgtacatgtcacatttgcgggtatgtggcttctttggaaaagcctatttgaatcctagcaccaactgggagctgggctggggcagctcagagagcatcaactttcac

SEQ ID NO: 7669 - DNA, 110 bp, synthetic construct
  source 1..110: mol_type = other DNA
tcctagcaccaactgggagctgggctggggcagctcagagagcatcaactttcactctgtcctcaagagctcattagaaactctccaggaggttcttaggaagcaaactc

SEQ ID NO: 7670 - DNA, 110 bp, synthetic construct
  source 1..110: mol_type = other DNA
ttacacacagagaaccagttacaagtgagggggtgtgcgtggtggtaaaagagcactgacttcagagccttattctgtgtgttttcatctctgctcctcaacgtgtgacc

SEQ ID NO: 7671 - DNA, 110 bp, synthetic construct
  source 1..110: mol_type = other DNA
ctgacttcagagccttattctgtgtgttttcatctctgctcctcaacgtgtgaccttagggagttgcatgagaattatgataccttcctcaaagggctgttacgaggatt

SEQ ID NO: 7672 - DNA, 110 bp, synthetic construct
  source 1..110: mol_type = other DNA
gttaataactttactgaaatatggaaaagggtgccattttggccattcaaccagtcatgaacagtaaggctaacaaaagacaactgaacatttggtaaaatgctgccatc

SEQ ID NO: 7673 - DNA, 110 bp, synthetic construct
  source 1..110: mol_type = other DNA
catgaacagtaaggctaacaaaagacaactgaacatttggtaaaatgctgccatcccctgggtaaaatccatcacagatcttaattttctcattcatttggaaaatgttc

SEQ ID NO: 7674 - DNA, 110 bp, synthetic construct
  source 1..110: mol_type = other DNA
ttcgttaaccactgcgccacgacgggaactctgaggatttctgtgtattaattttgtatcctgcaacattactgaattcattggtgagctctagttgtttttgttttttg

SEQ ID NO: 7675 - DNA, 110 bp, synthetic construct
  source 1..110: mol_type = other DNA
gcattaatccacctggataccagaaacaaccccaaatgtgccctattgtctctaaggaaatcctttgggcagagccattctaggatcccatacctgtttcccagaaccta

SEQ ID NO: 7676 - DNA, 110 bp, synthetic construct
  source 1..110: mol_type = other DNA
aacctattccaggaagggagctgtcaccaaaggtaactatggaattaactgggcgcgtagacaggaaggaacctagtaaagtcggttgaaattcctctctgtgtcccatt

SEQ ID NO: 7677 - DNA, 110 bp, synthetic construct
  source 1..110: mol_type = other DNA
tgaagggcttcaaaggaaaatagctacatggggctgggatgctgaaaacactagattgacttgaaagaagaaagagaagtgatttgactctttattgactgctgctacaa

SEQ ID NO: 7678 - DNA, 110 bp, synthetic construct
  source 1..110: mol_type = other DNA
gagtggcacacttaacatttaaccgatgctatgatgttatgtgtgaagctcgaccataatggcaacatgtgaaggcagagttagaacagcattgagcaatctatcatcat

SEQ ID NO: 7679 - DNA, 110 bp, synthetic construct
  source 1..110: mol_type = other DNA
agcctgtgtgtgtctttcaagattgaggtctccatttccccagtcccatggagctcctacacacaagcaccactggccttcaatgccatatattctggggactccttctc

SEQ ID NO: 7680 - DNA, 110 bp, synthetic construct
  source 1..110: mol_type = other DNA
cctacacacaagcaccactggccttcaatgccatatattctggggactccttctcccaattctagatccccaggtttgggtacctgacatggggctcataactctcactc

SEQ ID NO: 7681 - DNA, 110 bp, synthetic construct
  source 1..110: mol_type = other DNA
tttaataaacttaagaggaaaaatatagtcacatatgtaccaattctgttgctcttccttcatttctggagctccaggtttccttcatatggtttctatctttattaaca

SEQ ID NO: 7682 - DNA, 110 bp, synthetic construct
  source 1..110: mol_type = other DNA
taatgtcatctcgtgttttttcttaaatgtattgatctgctttaggcgtctccttcttgaaatgattatttgcattttccaagcaattattttggggggtgatttttcat

SEQ ID NO: 7683 - DNA, 110 bp, synthetic construct
  source 1..110: mol_type = other DNA
gcgtctccttcttgaaatgattatttgcattttccaagcaattattttggggggtgatttttcatttgtattaccataaagttcagtagcaatcatctgttttagttttt

SEQ ID NO: 7684 - DNA, 110 bp, synthetic construct
  source 1..110: mol_type = other DNA
cttctccagcatatcatccttgtattgtaaagctacttctcaatttttggagagtttgtttttgtttttggaggctttaatttgtaagtcattaaaatttggacttctta

SEQ ID NO: 7685 - DNA, 110 bp, synthetic construct
  source 1..110: mol_type = other DNA
tggtccagacaatttgaaagctccccataagattctggtgtgcacacggtattgagaaaaagtgctttgggaattaatctcctacccaatggggtcctcaccatcactgc

SEQ ID NO: 7686 - DNA, 110 bp, synthetic construct
  source 1..110: mol_type = other DNA
ggaacttccatatgccgtgggtgtggtcctaaaaagcaaacaaaataaaacaaacaaaaaaacactataaattttaaaccaaaatgagtctaaagagatctccctccttc

SEQ ID NO: 7687 - DNA, 110 bp, synthetic construct
  source 1..110: mol_type = other DNA
aatgggaactccctcctcccccctttttttttaacttccaacaattctagctctactttggaccccctgcctcccagattaaaaatatgaagatacaagtggcttatgtc

SEQ ID NO: 7688 - DNA, 110 bp, synthetic construct; identical to SEQ ID NO: 7687
  source 1..110: mol_type = other DNA

SEQ ID NO: 7689 - DNA, 110 bp, synthetic construct
  source 1..110: mol_type = other DNA
tattggcttgtgtattggatcaggttacctgtaaatgtttgtacttttgatattaagattctaaactatttcctcatccactgaaaagatcacatggtgctctctttcat

SEQ ID NO: 7690 - DNA, 110 bp, synthetic construct
  source 1..110: mol_type = other DNA
tgaaatagaagtaaatgttcattaaatattggttcagaacttaaaacaggataaacaccctccaggttcccatttgcattgggtctaggccttagatttggaatttggct

SEQ ID NO: 7691 - DNA, 110 bp, synthetic construct; identical to SEQ ID NO: 7690
  source 1..110: mol_type = other DNA

SEQ ID NO: 7692 - DNA, 110 bp, synthetic construct
  source 1..110: mol_type = other DNA
ataatttatggcttttctaaagatgtgcattgcttttattttttagaaaaatagtaaagattgaagatttataaggtacaaaaacaagcctgattccccacactcacccc

SEQ ID NO: 7693 - DNA, 110 bp, synthetic construct
  source 1..110: mol_type = other DNA
gacaactggagagtgtaggaagtggggcatgctctggcaggagagtgccatgtttatccacatgctctagctttaggcttggagcagaatgccttagctgcctgtgttct

SEQ ID NO: 7694 - DNA, 110 bp, synthetic construct
  source 1..110: mol_type = other DNA
aaactcttccactagtgaaacacaggaagaccggatatgaatgtgccaaaatatttttactctttttctttaaacagcgcctatggcctgatttctttgaactcaccaga

SEQ ID NO: 7695 - DNA, 110 bp, synthetic construct
  source 1..110: mol_type = other DNA
tttactctttttctttaaacagcgcctatggcctgatttctttgaactcaccagaaagagaactgattctctcaagttgatcacaatgcctaagggaaagttggagaaag

SEQ ID NO: 7696 - DNA, 110 bp, synthetic construct
  source 1..110: mol_type = other DNA
cattcctatggcaacctgtccctcctcctcactctccccaacaatggcacctttcttctcctatggacccataccttctcctgggttcctttggctatggtgctctgctc

SEQ ID NO: 7697 - DNA, 110 bp, synthetic construct
  source 1..110: mol_type = other DNA
aatagaagaggaaatgcagctccagcccacagggcagcttggccttaaagttcgtttaattgatacaatatatcatagccttcttggccagaagttgtagtactgctcaa

SEQ ID NO: 7698 - DNA, 110 bp, synthetic construct
  source 1..110: mol_type = other DNA
agctgaagtatttatagtcttagtaacttagacttgttcctagttgccttggtgttctccatttaaagcctaagaaaggtagacatgtagtttggggtttaaaatagggg

SEQ ID NO: 7699 - DNA, 110 bp, synthetic construct
  source 1..110: mol_type = other DNA
tcagaagactgaccatgctgctaagtcctcattatcatggtaggttccatccacggcacaggtaaagcactctctttaagtgaattcccaggcagtgagcatcattgatg

SEQ ID NO: 7700 - DNA, 110 bp, synthetic construct
  source 1..110: mol_type = other DNA
caactccccccacccccgccaaaggaaaaaagttctagctaccaatacaaaaaggactgaagatgataatatgggagacacttaagtgatgttaacatcctacatgttag

SEQ ID NO: 7701 - DNA, 110 bp, synthetic construct
  source 1..110: mol_type = other DNA
actgaagatgataatatgggagacacttaagtgatgttaacatcctacatgttaggttcatggacatatgtacagtttaactactgggttatagatttaaacttccttaa

SEQ ID NO: 7702 - DNA, 110 bp, synthetic construct
  source 1..110: mol_type = other DNA
tacaaaatgtcctacaggccaaaaaaaacaagactttaaaataagtataacagtagcctttcataggtaacagagtagaagccccagagtttggtttgaagtaaatgact

SEQ ID NO: 7703 - DNA, 110 bp, synthetic construct
  source 1..110: mol_type = other DNA
gcctttcataggtaacagagtagaagccccagagtttggtttgaagtaaatgactgctgattatagagtataaggaaattcatcccaactaatttgcaacttttccctaa

SEQ ID NO: 7704 - DNA, 110 bp, synthetic construct
  source 1..110: mol_type = other DNA
agtagatgatttattctgaggaagaggatggtaggaactgaatttgcaaggaaagctcatagtcatcaaaagtcatttggacgggtagggtaaaccaatacacaatgtga

SEQ ID NO: 7705 - DNA, 110 bp, synthetic construct
  source 1..110: mol_type = other DNA
ggatggtaggaactgaatttgcaaggaaagctcatagtcatcaaaagtcatttggacgggtagggtaaaccaatacacaatgtgataaatcatttaaaagacatttaaat

SEQ ID NO: 7706 - DNA, 110 bp, synthetic construct
  source 1..110: mol_type = other DNA
tatgtaaataaacatacctggcctaggagctgagaaactggatgaatgaagatccagagagaagatgagctatggcaggcccagcttctactctgggcaaaggaagtgag

SEQ ID NO: 7707 - DNA, 110 bp, synthetic construct
  source 1..110: mol_type = other DNA
cctctggaataattccccaaggtgggtggaaacagcacattcccaagagagtagctaggtgaggcacctggaatctacagaaatggaaatgtattgggaagtcaacgtcc

SEQ ID NO: 7708 - DNA, 110 bp, synthetic construct
  source 1..110: mol_type = other DNA
tgttaatatatttcactgtccatcattttgcagccactcaccgacaattcatgggttctgtaggaaagacgcatagtatcagtttccattcgccacatgtaagtttccat

SEQ ID NO: 7709 - DNA, 110 bp, synthetic construct
  source 1..110: mol_type = other DNA
ttcctacgtgctctctgcatgttccctcaagaactcagttgccagagctctacgaaattcaagccacgtgaagagaccacttgtcatctgaggtctttgagttattccag

SEQ ID NO: 7710 - DNA, 110 bp, synthetic construct
  source 1..110: mol_type = other DNA
caggaaactctagcatacagtggaacatgattaaagcttcttcatctctggtacgatatattatttaaaaatgtcaaacctattttgctgtttctggaacctaaatgctt

SEQ ID NO: 7711 - DNA, 110 bp, synthetic construct
  source 1..110: mol_type = other DNA
aaatctacaaaacacactggataagcaaaacaaaacagaaacactcatatttacagagtgggcagatggataaaatgagtgaagggaccaaaacataaaaacaaaggtca

SEQ ID NO: 7712 - DNA, 110 bp, synthetic construct
  source 1..110: mol_type = other DNA
gagtgggcagatggataaaatgagtgaagggaccaaaacataaaaacaaaggtcataaattggattaggattatgttttcaatgaagaactcaaaaaagatcttagttct

SEQ ID NO: 7713 - DNA, 110 bp, synthetic construct
  source 1..110: mol_type = other DNA
cctgcaccactgtaccactcccacatcatgccagaataatttaacagtactctcaactttcggggaggctgagtttaccttcatttctacttttgtggatcatgtgtggc

SEQ ID NO: 7714 - DNA, 110 bp, synthetic construct
  source 1..110: mol_type = other DNA
caaagaattttcctaattcactaccatatactgtgggtctcatggattcaatctacattgactttcagagctatatgtttcatggttctattttcaggtggaagtcttaa

SEQ ID NO: 7715 - DNA, 110 bp, synthetic construct
  source 1..110: mol_type = other DNA
cattgactttcagagctatatgtttcatggttctattttcaggtggaagtcttaaaagctgggatgccagatgtggagtccaaaccctctgctcctcagggagaaggtgg

SEQ ID NO: 7716 - DNA, 110 bp, synthetic construct
  source 1..110: mol_type = other DNA
tcaccaaatttcccacaactcccattcccaggctttgacaaacacatatcttttactatgaacatagttgttttaaattccacgacagtatttatcatcctctatcttag

SEQ ID NO: 7717 - DNA, 110 bp, synthetic construct
  source 1..110: mol_type = other DNA
ctatgaacatagttgttttaaattccacgacagtatttatcatcctctatcttagcccattacataatgcccttaagatttgtccatgttgtcacaaatagcacaatttc

SEQ ID NO: 7718 - DNA, 110 bp, synthetic construct
  source 1..110: mol_type = other DNA
ccacgggatatattatgaaaatatttttgaaatttttatactatgcaaacaagctacttacttgttagtttactgaagactgtgtggttctgcagtggaaaaatcttcaa

SEQ ID NO: 7719 - DNA, 110 bp, synthetic construct; identical to SEQ ID NO: 7718
  source 1..110: mol_type = other DNA

SEQ ID NO: 7720 - DNA, 110 bp, synthetic construct; identical to SEQ ID NO: 7718
  source 1..110: mol_type = other DNA

SEQ ID NO: 7721 - DNA, 110 bp, synthetic construct; identical to SEQ ID NO: 7718
  source 1..110: mol_type = other DNA

SEQ ID NO: 7722 - DNA, 110 bp, synthetic construct
  source 1..110: mol_type = other DNA
ctatgctccttacacacataagcatgtacacataaacacacaagcagataaatttgataagtttatcccaagaaactgaagtcaaagcctgtaagagtatcttacattgt

SEQ ID NO: 7723 - DNA, 110 bp, synthetic construct
  source 1..110: mol_type = other DNA
atgtcctaggtcctgaattatttgcccctgcttttctgccaatctacccatcagcttctgacttacataatcattttattggtcaggtacaacttgtggggctcaagttt

SEQ ID NO: 7724 - DNA, 110 bp, synthetic construct
  source 1..110: mol_type = other DNA
gtccagaatctgaaaagtctattattaaaccactgcacacagtattttctatctcttctctttcattctgtttataagttgaagtgagcagggacctgttgtgacttatg

SEQ ID NO: 7725 - DNA, 110 bp, synthetic construct
  source 1..110: mol_type = other DNA
aaaaaccaaaacacttcctgggcagatagctttcctgattctactcaggcacacacacacatgagtgtgcacaagtaccacaaagatacacatttatactacttctgcct

SEQ ID NO: 7726 - DNA, 110 bp, synthetic construct
  source 1..110: mol_type = other DNA
cagcctgaatctagtttgttggaaatatattatgtttttcgtccctgctcagcattcctatttggccaatgttacagagtctaatcagattttctgccattcattttact

SEQ ID NO: 7727 - DNA, 110 bp, synthetic construct
  source 1..110: mol_type = other DNA
ggttggggtgatgttgtaggtacatagtttttttaaggggaaaaattgctttataacctggaagcggtattataggtttagtcattgatgccattgtgatatttattaat

SEQ ID NO: 7728 - DNA, 110 bp, synthetic construct
  source 1..110: mol_type = other DNA
gatataaaagtctaatatgtggctacctctgcttttgtggctaaagtgaaatcgttgggaatgtccattattatgattggtagggaaaacctgtccctaggaaaagaggc

SEQ ID NO: 7729 - DNA, 110 bp, synthetic construct
  source 1..110: mol_type = other DNA
tttgactttaaatccagtgtgactaatgtttcctgagcacctattatagtcaaaaggtattgggctactcagcatggagtgctacagatgagaatgacatagtgtctgct

SEQ ID NO: 7730 - DNA, 110 bp, synthetic construct; identical to SEQ ID NO: 7729
  source 1..110: mol_type = other DNA

SEQ ID NO: 7731 - DNA, 110 bp, synthetic construct
  source 1..110: mol_type = other DNA
gtgccatgagagcaaagaagagaaaggcttacgctgttctgagatgtaggccatgagggcttcccttaggaaggtatgttttatgtggatctgataagtacggattaaca

SEQ ID NO: 7732 - DNA, 110 bp, synthetic construct
  source 1..110: mol_type = other DNA
gttgcatgtgtggttgatagtagctgagaagagaatactaagcaatgaccagcagtgacagtggtaaactacctaagactgtattcataagtttctgcataacacaaact

SEQ ID NO: 7733 - DNA, 110 bp, synthetic construct
  source 1..110: mol_type = other DNA
gtttctgagagaggttcaatgagattgtaacatctctagccagtcatgccatattgctcaacctcacagcacagcttattagccgtccatctgctttaacgtgtggcttt

SEQ ID NO: 7734 - DNA, 110 bp, synthetic construct
  source 1..110: mol_type = other DNA
gtggcaggaggaagagatgaatgaataaaataatcaagtgacatgtcagaggattgggtttgatggctaatcgactgaaggaggaagattggaaaatatatcctgcttga

SEQ ID NO: 7735 - DNA, 110 bp, synthetic construct
  source 1..110: mol_type = other DNA
ttgagacaaaatttagatctccagatacccaatcagtcccattcactttccattatagcatactgtaaatttctaataaaatgaaagtagatgccctgcactcaattatt

SEQ ID NO: 7736 - DNA, 110 bp, synthetic construct
  source 1..110: mol_type = other DNA
gttttctctgtcagagtttttctgagaagtgacttccaaataaacgaatgctttgtgaagcagctaaagaacatgaggtggtataataacatcccaaattaggtggtaca

SEQ ID NO: 7737 - DNA, 110 bp, synthetic construct
  source 1..110: mol_type = other DNA
ttgctacaagtcatctaagtacaagattgctcatgtgcaaatgagcacttaacaaatattcctttctgatggtgataataatgtattaaagctgtattcatctggcatgc

SEQ ID NO: 7738 - DNA, 110 bp, synthetic construct
  source 1..110: mol_type = other DNA
cacttaacaaatattcctttctgatggtgataataatgtattaaagctgtattcatctggcatgcaaataggtataacacagttcttggaattttaacaaatggagaaag

SEQ ID NO: 7739 - DNA, 110 bp, synthetic construct
  source 1..110: mol_type = other DNA
gaaggtctaatggtgatgatctctctcagcttttatgtgactggtaatgtcttaatcttccccgcattttaaaggatatctggtatttatattgaaagtttttgtttgtt

SEQ ID NO: 7740 - DNA, 110 bp, synthetic construct
  source 1..110: mol_type = other DNA
tcttccccgcattttaaaggatatctggtatttatattgaaagtttttgtttgttttcctttcagcacttcaagtacatcatcctaatgccttttggcctgcagggctac

SEQ ID NO: 7741 - DNA, 110 bp, synthetic construct
  source 1..110: mol_type = other DNA
tgtgtttgttcaggattttcaaatatagattctaataaagaaaaagctttcccttactatattttgttggtcttcatctcggaaataacgagccactggcagtaacaaag

SEQ ID NO: 7742 - DNA, 110 bp, synthetic construct
  source 1..110: mol_type = other DNA
tttgagacttccagggcaagattatattttgaatatttatcttttgttcacttcatttccttctgctttataattttccctaagctgcacatagtttcttcccagccaca

SEQ ID NO: 7743 - DNA, 110 bp, synthetic construct
  source 1..110: mol_type = other DNA
tctgacacatggtgacatgtgctaagcacgcattagcttcctgcttcattagaagtgtttcctatactccttgctttgctgtatggacccaccagaacacatgggatata

SEQ ID NO: 7744 - DNA, 110 bp, synthetic construct
  source 1..110: mol_type = other DNA
tgtttcctatactccttgctttgctgtatggacccaccagaacacatgggatataaaatgcagcttctctgggaaggttcctatcctccacttatcacaagtgaaaatct

SEQ ID NO: 7745 - DNA, 110 bp, synthetic construct
  source 1..110: mol_type = other DNA
acagagctctttagggacttccatccatctctggggagagaaaggcttcgtatgtaatttttcaaacccatcttcacttgttctcctcaagaaaccttctgttggttcag

SEQ ID NO: 7746 - DNA, 110 bp, synthetic construct
  source 1..110: mol_type = other DNA
tactttgcttttttcaaatggatataatgttaggtttagtacactgagaggatgtctgttcatgtacacttttaaaataatttgcagcgaagttgatacccttttagaat

SEQ ID NO: 7747 - DNA, 110 bp, synthetic construct
  source 1..110: mol_type = other DNA
tctaataccatgtgtttatggaacactggtctcgaggtatatgttccctatacaaaggatttatcaccaaacccattttgcagttgtattaatttatgataagacgtggc

SEQ ID NO: 7748 - DNA, 110 bp, synthetic construct
  source 1..110: mol_type = other DNA
aggatttatcaccaaacccattttgcagttgtattaatttatgataagacgtggctcaaaaagaaagtttattcatctaccacctgtgctccttttttcctggatggaga

SEQ ID NO: 7749 - DNA, 110 bp, synthetic construct
  source 1..110: mol_type = other DNA
ggggaatagtgaacattagcatatcaaggtctcacgttcttcacccagcatctggggcagaaatccaattataagacattggattgtggcaaggaatatcaagatattaa

SEQ ID NO: 7750 - DNA, 110 bp, synthetic construct
  source 1..110: mol_type = other DNA
ggcagaaatccaattataagacattggattgtggcaaggaatatcaagatattaaatgacacaaaagtcctggaggctgtgcttattcctctctgttcttcccagtggag

SEQ ID NO: 7751 - DNA, 110 bp, synthetic construct
  source 1..110: mol_type = other DNA
attgaatacccttcatggagtggggactggactaggtgtgtaatagatattgtcggtactctcacattgtttgtcatcaaataggatatatgaatgagatacaaatagga

SEQ ID NO: 7752 - DNA, 110 bp, synthetic construct
  source 1..110: mol_type = other DNA
gactttattccgtcttatgcacccactgtgtgtatgttcactgtataaatagcatatgtaacttgcattttaaccatccctagaaagctgttagaagctagggtttcttt

SEQ ID NO: 7753 - DNA, 110 bp, synthetic construct
  source 1..110: mol_type = other DNA
tgtcactgttgccacttatgggggctgaccttgtaacctgccagttcttttcttcttatttttttctccccctactgaatatcctgtgtaaaatgattgtatgttatttt

SEQ ID NO: 7754 - DNA, 110 bp, synthetic construct
  source 1..110: mol_type = other DNA
tcaaaatttcctaattgtcctatcactatccttttaactattcttctgcaatgggttttttgtgttgtttggtttttgggttttttttgtatccaaccaatgatgatacg

SEQ ID NO: 7755 - DNA, 110 bp, synthetic construct; identical to SEQ ID NO: 7754
  source 1..110: mol_type = other DNA

SEQ ID NO: 7756 - DNA, 110 bp, synthetic construct
  source 1..110: mol_type = other DNA
cctctaggttgcatgtatttgtcataactagatggcaaaatttgcttccattgctctgagattatttcttcattttctctgagacattaaaggatatatttatacactta

SEQ ID NO: 7757 - DNA, 110 bp, synthetic construct
  source 1..110: mol_type = other DNA
taggggctgcattggagctgcagctgccggcctatgccacagcaacaccagatctgaggcctgtctatgaacatcaccgcaacttgcagcaacactggatccctaagcca

SEQ ID NO: 7758 - DNA, 110 bp, synthetic construct
  source 1..110: mol_type = other DNA
gccacagcaacaccagatctgaggcctgtctatgaacatcaccgcaacttgcagcaacactggatccctaagccactgagcagggatcgaactcgcatcctcatggatac

SEQ ID NO: 7759 - DNA, 110 bp, synthetic construct
  source 1..110: mol_type = other DNA
ttccatcaggtcaaaggaagcaatgtgccgagaaagggcagaatctggtgcttccaccctcagaaataagagatgagagcagaaattcaagagaacgtctgggtatccag

SEQ ID NO: 7760 - DNA, 110 bp, synthetic construct
  source 1..110: mol_type = other DNA
cttcctgacacacttgcagagggaagttttctgtgatctcatcttacaattctcaaacacttgctctcatcctcatatacaagctctgaacacaatacgaacatcagttt

SEQ ID NO: 7761 - DNA, 110 bp, synthetic construct
  source 1..110: mol_type = other DNA
tgaagattccccttccctgcccaagctctgaaccaagtgggagacacgggatacatgtggaaatcaaaattccccctgtatttgtgatccagtttggcgatcataacctt

SEQ ID NO: 7762 - DNA, 110 bp, synthetic construct
  source 1..110: mol_type = other DNA
agaagcaagctaccatgttgtgagagagtcatacagcaaggaattgtgagtagccacgggttgcagaaagcagcttctggctgacaaccagcaagggaaaagaatttaat

SEQ ID NO: 7763 - DNA, 110 bp, synthetic construct
  source 1..110: mol_type = other DNA
agaggctcttatttgtatcaaaaagctgcattcttccaaagtcaaaagctttgaggtctttctactctgatgcaaattttctgtccttctcatgatctcttatagcacaa

SEQ ID NO: 7764 - DNA, 110 bp, synthetic construct
  source 1..110: mol_type = other DNA
gcccacatccttgcttctggacattcttctcccatcttcaaagccagcaatcgaaggttgattccccacatcacacctttctaatgcttattctgtggcctcctctctcc

SEQ ID NO: 7765 - DNA, 110 bp, synthetic construct
  source 1..110: mol_type = other DNA
ggttgattccccacatcacacctttctaatgcttattctgtggcctcctctctccccctacccctctctcctcttcctccccccttcctctctccctcccctcttctcct

SEQ ID NO: 7766 - DNA, 110 bp, synthetic construct
  source 1..110: mol_type = other DNA
ttttgtgtaacttcacagattacttgtctatagtatatttgatgttactctttttaattttttttcttttttttgttttttagggccacacccgaggcatatggaggttc

SEQ ID NO: 7767 - DNA, 110 bp, synthetic construct; identical to SEQ ID NO: 7766
  source 1..110: mol_type = other DNA

SEQ ID NO: 7768 - DNA, 110 bp, synthetic construct
  source 1..110: mol_type = other DNA
tgaggccagggattgaccctcactggtcagatctgtaacccactgagctgcaacgggaactccctaggtgcttttcacaacaccctgcacatagtaggtacgaaataatt

SEQ ID NO: 7769 - DNA, 110 bp, synthetic construct
  source 1..110: mol_type = other DNA
gctttccagtgggttagacagctttggcaggagacctgaacaccaacaagaccatctagggagagagcccacccccagctttggcaccatctcttgccagaagcagcccc

SEQ ID NO: 7770 - DNA, 110 bp, synthetic construct
  source 1..110: mol_type = other DNA
tcagattcattaaccactgagccacgataggaactccctggagccattgtctttaaacatgggggcccactgaccaacctatacctgttcagaaaactgtattctagaca

SEQ ID NO: 7771 - DNA, 110 bp, synthetic construct; identical to SEQ ID NO: 7770
  source 1..110: mol_type = other DNA

SEQ ID NO: 7772 - DNA, 110 bp, synthetic construct
  source 1..110: mol_type = other DNA
gggggaaaaatacacacaaaaaaatatgagggtttgccagctagctatccacaatgcctcgtggttctacattggggaaatgagcaaaccattaccactgagtcttcagc

SEQ ID NO: 7773 - DNA, 110 bp, synthetic construct
  source 1..110: mol_type = other DNA
ctggtctcagcggcagtatctctggccaagttagaggtatccttgtgcaccccttctctgcctgcctcttcaccttcctcttacgttgtactccaagtatgatttgcttt

SEQ ID NO: 7774 - DNA, 110 bp, synthetic construct
  source 1..110: mol_type = other DNA
tcggtccctggccagggaacttgcacatgccatcagcagggccaaataaataagtaattttttaaattaaaaaaaaaaaaaaaagcacaccaccaataggagccagcaga

SEQ ID NO: 7775 - DNA, 110 bp, synthetic construct
  source 1..110: mol_type = other DNA
atgatttctgggtctaaaagtgacagtggctctccatcttctcaactccaggttaaactgagctatcttaggcagagggaaaggtcccagacaaaactctgaccggttga

SEQ ID NO: 7776 - DNA, 110 bp, synthetic construct
  source 1..110: mol_type = other DNA
aactgagctatcttaggcagagggaaaggtcccagacaaaactctgaccggttgactccattcaggctgttgcacctctctcctatgagttttaatcagtttcacaaagc

SEQ ID NO: 7777 - DNA, 110 bp, synthetic construct
  source 1..110: mol_type = other DNA
ttcagtattccaaagagcactgtttttgacaggtctttgctgaaaacttttgtattcctactgcctggatggttaaagagacaactgaaaagaatagtagcagcttatct

SEQ ID NO: 7778 - DNA, 110 bp, synthetic construct
  source 1..110: mol_type = other DNA
attttagccaagaaatacctccataagttgaatactgtttcttttcctttttacatcacaccaggaagcatataatgcctagttgtctccgtttatgataaatattaaac

SEQ ID NO: 7779 - DNA, 110 bp, synthetic construct
  source 1..110: mol_type = other DNA
tcacaccaggaagcatataatgcctagttgtctccgtttatgataaatattaaacttgatcagtgggttgaagtgatacctgcctgatccataaagttccagcattcatt

SEQ ID NO: 7780 - DNA, 110 bp, synthetic construct
  source 1..110: mol_type = other DNA
aattcaacaggacatgaaatggatcatacataatgatgaagtgagatttattctgaacatgcagggatcttcagtatccacaaatgtataaatgtaatacacatttacaa

SEQ ID NO: 7781 - DNA, 110 bp, synthetic construct
  source 1..110: mol_type = other DNA
aacatgcagggatcttcagtatccacaaatgtataaatgtaatacacatttacaaaatggaggattaaaattatataatcggagttcccatcgtgactcagtggttaatg

SEQ ID NO: 7782 - DNA, 110 bp, synthetic construct
  source 1..110: mol_type = other DNA
tgcagggcagcattgttagaattcaattctggttccaactcagtcagttccacatggaacatgtagaaaatgaagccatacagggccggccctaggccattacacagtcc

SEQ ID NO: 7783 - DNA, 110 bp, synthetic construct
  source 1..110: mol_type = other DNA
gatcgtcaaaggagtgggaatggaatacaacagcagatgaaaggccagcagtcggaaagtacccatatccagttatcttctcacctccccttgactccaattagtcataa

SEQ ID NO: 7784 - DNA, 110 bp, synthetic construct
  source 1..110: mol_type = other DNA
gtggaactaaaggatggctgctcccacgtaaagtcagatgtattggaatggatctattaaggcaagggaactggaaagataggcgacagtggagagatgcttgataattg

SEQ ID NO: 7785 - DNA, 110 bp, synthetic construct
  source 1..110: mol_type = other DNA
atagtataaacacgtatcacagaaggatctctatcacagaagaacctctgacaacatggctggatgtaatcgaactgtaaattagaagaggaagtgggtgttcagccttg

SEQ ID NO: 7786 - DNA, 110 bp, synthetic construct; identical to SEQ ID NO: 7785
  source 1..110: mol_type = other DNA

SEQ ID NO: 7787 - DNA, 110 bp, synthetic construct
  source 1..110: mol_type = other DNA
aggacagctcaggataacagaatagaaagaaatacaagacatccacagatgaccaaatggatattttatgtcaggagagaaagagtaaatggtccaatgaattgtattga

SEQ ID NO: 7788 - DNA, 110 bp, synthetic construct
  source 1..110: mol_type = other DNA
ccttattccggctacagtccttggggtaggggtgagggcagggaaagttagcaaattccatagctaggaagttcagtggcgttggggactaatgcaccaaactcttcccc

SEQ ID NO: 7789 - DNA, 110 bp, synthetic construct
  source 1..110: mol_type = other DNA
ttccatagctaggaagttcagtggcgttggggactaatgcaccaaactcttcccctccccgcctgagtctcctaccatcccccagcccgctcccggatgcacagggtcct

SEQ ID NO: 7790 - DNA, 110 bp, synthetic construct
  source 1..110: mol_type = other DNA
ttagtccagtccagtgaccaatgagctgcgagggaggctgcgagctgtgtggccaggttccaggaggatgggctgagggtcagttagctgtcttctccaacactctgtga

SEQ ID NO: 7791 - DNA, 110 bp, synthetic construct
  source 1..110: mol_type = other DNA
ggtattatctttcccacttttgttgtggtccctacacatttgttcatccttggtgatctggctggacatcttttcttagttctcccagtgcctttcagaactctgcgcag

SEQ ID NO: 7792 - DNA, 110 bp, synthetic construct
  source 1..110: mol_type = other DNA
atctggctggacatcttttcttagttctcccagtgcctttcagaactctgcgcagctctgtttggccaatttggcaggctgttccctgtcctgcacgtcccatatagttt

SEQ ID NO: 7793 - DNA, 110 bp, synthetic construct
  source 1..110: mol_type = other DNA
ggagtccaaactgaactgtgctgtaagggcaaaatatgcaccaatctcaaagacggagtgaaaacaatgtaattatttcgttagtaattcttatgttgattaagtgtttc

SEQ ID NO: 7794 - DNA, 110 bp, synthetic construct
  source 1..110: mol_type = other DNA
tgatttggaagacaggttattggagttttcttcctaatgctacagctgacttactgcacagggtatctattttaaaataaaaatacctgtttctatctaattcataagga

SEQ ID NO: 7795 - DNA, 110 bp, synthetic construct
  source 1..110: mol_type = other DNA
tgatcatctcatgtaatgtattgaatgctgttctgagagggaaaaccagaatgactgatgggtagagaatggttgtaagtgtctgagctgtttatcctcctgagcacatg

SEQ ID NO: 7796 - DNA, 110 bp, synthetic construct
  source 1..110: mol_type = other DNA
taaagcacaggagtggtgacaatccagtaagacagaagctgtgggagaaacacgagatctaacgagggcgaagatgcacttccatattgtacatgataaagatccttcct

SEQ ID NO: 7797 - DNA, 110 bp, synthetic construct
  source 1..110: mol_type = other DNA
actttcaacttttctggaaacattttatattatttttattcatggccacacccgtagcatgtagaaattgctaggccaggaattgaatctgagctgtacatgcagcaaca

SEQ ID NO: 7798 - DNA, 110 bp, synthetic construct
  source 1..110: mol_type = other DNA
agcatgtagaaattgctaggccaggaattgaatctgagctgtacatgcagcaacaccaggtcgtttaacccactgcgccaggccagggatcatacctgcacctacctctg

SEQ ID NO: 7799 - DNA, 110 bp, synthetic construct
  source 1..110: mol_type = other DNA
ctaaatagacacttcaccaaagaagatacacaaacgactaagtccacacaatgatgctcaacatcattagtcatgggttaaatacaaattacaggacggtgagatactac

SEQ ID NO: 7800 - DNA, 110 bp, synthetic construct
  source 1..110: mol_type = other DNA
gctcaacatcattagtcatgggttaaatacaaattacaggacggtgagatactactacacatgttacactgacaaaaattcaaaagactgactataccaagtgttgtcca

SEQ ID NO: 7801 - DNA, 110 bp, synthetic construct
  source 1..110: mol_type = other DNA
tggtcttttactaaaatagcttttcaagaatttaaataaatttcctacttaaagagcctcctccagctcaccactattttttgaaatgttggttttggagttcccgtcgt

SEQ ID NO: 7802 - DNA, 110 bp, synthetic construct
  source 1..110: mol_type = other DNA
atagcttttcaagaatttaaataaatttcctacttaaagagcctcctccagctcaccactattttttgaaatgttggttttggagttcccgtcgtggcgcagtggttaac

SEQ ID NO: 7803 - DNA, 110 bp, synthetic construct
  source 1..110: mol_type = other DNA
atgtcaaaatatatactgttgatcagctcctatgggttaggtgttttacttacatctttgcattttatcttatttcattcaatggcctggccagaatggtagagtcagga

SEQ ID NO: 7804 - DNA, 110 bp, synthetic construct
  source 1..110: mol_type = other DNA
caatatctttgagctcttctgcagaacgaaaacccccaacacatggaagatgttaaaagcattcgttattcctgaaagaagatgaccagcttcgaaagcaatgcaacctt

SEQ ID NO: 7805 - DNA, 110 bp, synthetic construct; identical to SEQ ID NO: 7804
  source 1..110: mol_type = other DNA

SEQ ID NO: 7806 - DNA, 110 bp, synthetic construct
  source 1..110: mol_type = other DNA
ttatgggctccgtgttcatgagctgacagtggacatcggaggaggcagatatgcacagatggaggggaagaagaagacctcatctaggagttcccattgtggttcagtgg

SEQ ID NO: 7807 - DNA, 110 bp, synthetic construct
  source 1..110: mol_type = other DNA
atgacgggaactctatctcccttataatttttgactgaactagttaattagggctaacagcatagctcaaaaacacacacaattcattaattaaaaaaaaaaaaaatcac

SEQ ID NO: 7808 - DNA, 110 bp, synthetic construct
  source 1..110: mol_type = other DNA
ctggaaaaaaaaggcaaaaaaagaataacaaatttagctgcgattacaacctgtaagcagaatctccagctctctacccctgctcaaggcccagcatctatccaagagca

SEQ ID NO: 7809 - DNA, 110 bp, synthetic construct
  source 1..110: mol_type = other DNA
agcagaatctccagctctctacccctgctcaaggcccagcatctatccaagagcaagcctcagttcactgcaaacaacctcagactcaacatgtttaaaaatgaacacat

SEQ ID NO: 7810 - DNA, 110 bp, synthetic construct
  source 1..110: mol_type = other DNA
aaacatgtgctggagttcccagcatagctcagcagtgctgaggtggctccagccagtatggccaacccctcccagtgagttccgtccccctggctaattaaatacggatc

SEQ ID NO: 7811 - DNA, 110 bp, synthetic construct
  source 1..110: mol_type = other DNA
gtatggccaacccctcccagtgagttccgtccccctggctaattaaatacggatccgggggctccttctgtggcacaacaggatcagcaatgtcttgggagcactaagac

SEQ ID NO: 7812 - DNA, 110 bp, synthetic construct
  source 1..110: mol_type = other DNA
ttttctttataaaattattttttgtttggtgtttttttcttttcttttttctggtcatgcccatagcatgtgaaagttctggggccaagggtccaagctgtgccacagta

SEQ ID NO: 7813 - DNA, 110 bp, synthetic construct
  source 1..110: mol_type = other DNA
catgcccatagcatgtgaaagttctggggccaagggtccaagctgtgccacagtaatgaccacactgggttcttactgtgccaccaggaaactccctctaattgtttatt

SEQ ID NO: 7814 - DNA, 110 bp, synthetic construct
  source 1..110: mol_type = other DNA
tcttttttctttttttgggtgcacctgcagcatatggaagttcccagaccaggggtcaaacctgaaccacagctgtggcaacgccggatccctaacccactacacaacag

SEQ ID NO: 7815 - DNA, 110 bp, synthetic construct
  source 1..110: mol_type = other DNA
tcaaacctgaaccacagctgtggcaacgccggatccctaacccactacacaacagcagggatgccctcttgacttttttttttttctttttttggccacactagtggcat

SEQ ID NO: 7816 - DNA, 110 bp, synthetic construct
  source 1..110: mol_type = other DNA
taaaaaaacaaaaaaggaaaaaaatgcaggttgatgttttcaaaactgctgctaagctatggatgagaaagtagggctttttaaattttttttaagggcgtcacctgtgg

SEQ ID NO: 7817 - DNA, 110 bp, synthetic construct
  source 1..110: mol_type = other DNA
attcgttcaccactgcgccatgacgggaactccctagattcagttttttttttttttaaaacaatccttcacactatcaacaggtaccttacaagacaagtgaaagttac

SEQ ID NO: 7818 - DNA, 110 bp, synthetic construct
  source 1..110: mol_type = other DNA
ttaaaacaatccttcacactatcaacaggtaccttacaagacaagtgaaagttactatagaagttagatgacctcctcgtttttacttagtaaggtagaggcagaatctg

SEQ ID NO: 7819 - DNA, 110 bp, synthetic construct
  source 1..110: mol_type = other DNA
aataacaaaaaacgacttttaggattaccaaatattcatgtgaaattagaccagttggccatagacatacttgctgaataactgaagacattagtgtggagatttggtct

SEQ ID NO: 7820 - DNA, 110 bp, synthetic construct
  source 1..110: mol_type = other DNA
cagatgtgagccacatctaggaccctacactccagtctgtggcaacctggatccttaccccactgagcaaagccaaggatcacacctgcatcctcacagatcctagtcag

SEQ ID NO: 7821 - DNA, 110 bp, synthetic construct
  source 1..110: mol_type = other DNA
tctaggaccctacactccagtctgtggcaacctggatccttaccccactgagcaaagccaaggatcacacctgcatcctcacagatcctagtcaggttcttaacctgtcg

SEQ ID NO: 7822 - DNA, 110 bp, synthetic construct
  source 1..110: mol_type = other DNA
ccgaggtaggtagagacggcacaggcaggaggccaacaggagaggaagagcggcccatgctcttcagacaagtagctggacttcctccgggctcaaatctgctatctcag

SEQ ID NO: 7823 - DNA, 110 bp, synthetic construct
  source 1..110: mol_type = other DNA
agagagcagaggccctgagtgagccactgggcattttttatccaggcccccagatggagaagctggtggggtttctctatttagcaaggagggtctgaagcctgtgaggg

SEQ ID NO: 7824 - DNA, 110 bp, synthetic construct
  source 1..110: mol_type = other DNA
ggccaactgcatatcacagagaaaagcccatctactgtatcagaatgaagacccacatgcctgattatctcttgctctcttgtctgactcacactgttcctcccttttag

SEQ ID NO: 7825 - DNA, 110 bp, synthetic construct
  source 1..110: mol_type = other DNA
acccatggctgcgtccaccgtgataatttgctttagtgagctttggaagatacgctcttggagtctcacaggattctgacaatccgtgataacaattttcaggatgagga

SEQ ID NO: 7826 - DNA, 110 bp, synthetic construct
  source 1..110: mol_type = other DNA
ggctccgctgaccctgattagatcctactgccaagtagatccaggcagtcagtcgccttgctgatgaaggttggaggggtgcttggggcgttaggcacttgtgctcttcc

SEQ ID NO: 7827 - DNA, 110 bp, synthetic construct
  source 1..110: mol_type = other DNA
ccttgctgatgaaggttggaggggtgcttggggcgttaggcacttgtgctcttccccgtggcggtggggaggagtggaagcaagaggtgctgagaaaaggaggtagaaaa

SEQ ID NO: 7828 - DNA, 110 bp, synthetic construct
  source 1..110: mol_type = other DNA
caagctgcagtgcaggttgaagatgtggcttggctctcgtgttgctgtggctgtggcacaggcctcagctacagctcatatttggcccttagcccaggaacctccttatg

SEQ ID NO: 7829 - DNA, 110 bp, synthetic construct
  source 1..110: mol_type = other DNA
gcacaggcctcagctacagctcatatttggcccttagcccaggaacctccttatgtcccaggtatggccttaaaaagaaaaaggggggaaaaaaaaagaaatgcattcca

SEQ ID NO: 7830 - DNA, 110 bp, synthetic construct
  source 1..110: mol_type = other DNA
gagacaccatgggaattcttggcaacaggcactttcaagaaatcaggtatgaagtggttatggaaactgaagcagctcaggctttacatatgggactcttgttatcaact

SEQ ID NO: 7831 - DNA, 110 bp, synthetic construct
  source 1..110: mol_type = other DNA
tcaagagtcaagaagcgtggctgtttttatcacccttcctgttgaacaagcctgagcaccctgggagggaaaaggggagctgtgaccactcactccaacaatgggaacag

SEQ ID NO: 7832 - DNA, 110 bp, synthetic construct
  source 1..110: mol_type = other DNA
aaacagccagcgtcaagcaacgaagagcttctggaaggcattcttgcagaaattccttttttgccggagggtgaaaggccttgctaattgattctgtctgcctttcagat

SEQ ID NO: 7833 - DNA, 110 bp, synthetic construct
  source 1..110: mol_type = other DNA
cacatgtgccatggggtccagccacaatcccagtggattaggacaagcatgctcactgaatacttggggagaaaaccgaagcgtagcggttacacagctctgtatcatgg

SEQ ID NO: 7834 - DNA, 110 bp, synthetic construct
  source 1..110: mol_type = other DNA
ctgaatacttggggagaaaaccgaagcgtagcggttacacagctctgtatcatggaaccagaactgcaaagcaagtctgaccctagaacttgagcttttgaccatgaact

SEQ ID NO: 7835 - DNA, 110 bp, synthetic construct; identical to SEQ ID NO: 7833
  source 1..110: mol_type = other DNA

SEQ ID NO: 7836 - DNA, 110 bp, synthetic construct; identical to SEQ ID NO: 7834
  source 1..110: mol_type = other DNA

SEQ ID NO: 7837 - DNA, 110 bp, synthetic construct
  source 1..110: mol_type = other DNA
caggaactccatgtcacatgttccaaacaattaggatctgtcatttggtctgatattgagagaaaagacttagagtcggtactgttctgaaaaacccaaaccacatggtt

SEQ ID NO: 7838 - DNA, 110 bp, synthetic construct
  source 1..110: mol_type = other DNA
ttccatttttgcttgtccagcaattcattctttgcagctaattaagctgaagaagcctggaaatcaagttggcaccaaaggttaatagagtctttgcctagtaccactac

SEQ ID NO: 7839 - DNA, 110 bp, synthetic construct
  source 1..110: mol_type = other DNA
gcctcaaggtaaattaaccaatagttggatatcttctcacaaagaaaatttaagccccaaggctttacaggttaagttttgctaattattcaaatattcaaacctttgaa

SEQ ID NO: 7840 - DNA, 110 bp, synthetic construct
  source 1..110: mol_type = other DNA
cccaaggctttacaggttaagttttgctaattattcaaatattcaaacctttgaatatactaatttttaagaggttatataatcaggaaaatcccccagtgtatcacatg

SEQ ID NO: 7841 - DNA, 110 bp, synthetic construct
  source 1..110: mol_type = other DNA
gaaagaacactgagtgtggaatagacagttaaatcacaagaacctgagtgtcaacagttccaaagctgatgttcacatttcagacatttgtttataagcgtttgtagagg

SEQ ID NO: 7842 - DNA, 110 bp, synthetic construct
  source 1..110: mol_type = other DNA
agttccaaagctgatgttcacatttcagacatttgtttataagcgtttgtagaggactctcaatctaatattcatccttcatggttctccaaatagcagcaacccttagc

SEQ ID NO: 7843 - DNA, 110 bp, synthetic construct
  source 1..110: mol_type = other DNA
acacaatgaccaacaaactatgtagtttcagagagtcaagctagcttttccttcccctactgctctgctatgtcacagatcaccaccctaggagtggaggtccttgcaca

SEQ ID NO: 7844 - DNA, 110 bp, synthetic construct
  source 1..110: mol_type = other DNA
taaaaacagtaaacatgccttatctcaactttctgtgggtcaggattctgtgtatagtttagctaattacctgtgactcttcctttctaaggtaaagatgtcttatttct

SEQ ID NO: 7845 - DNA, 110 bp, synthetic construct
  source 1..110: mol_type = other DNA
gtctttctggaagctcctatgccggctagctcctttggtgatggtttgtgtgctccaaactttgactttaactgacaatgaaaaaaaagtgggatgtagcaacttttttt

SEQ ID NO: 7846 - DNA, 110 bp, synthetic construct
  source 1..110: mol_type = other DNA
ctgttcaacccttgacacactagttctgtttcctgtgctctatccccgcttctcagactttcctgtgtgtacgaattctctgggcatttacttaaagcacagattccagg

SEQ ID NO: 7847 - DNA, 110 bp, synthetic construct
  source 1..110: mol_type = other DNA
atttccatctctgaccctcactggggatccctggtcttgttgataaggaggccgaagcccatgttccaattttacttgtacgttttttcccctatgactacccatgtagc

SEQ ID NO: 7848 - DNA, 110 bp, synthetic construct
  source 1..110: mol_type = other DNA
ccctagaatttaagagttcattggcaaagagatgttgctgaaacttggcctctgtccaccaggtgacttcaagaaacccagaatcagagtttgggacaaaggaggaaaaa

SEQ ID NO: 7849 - DNA, 110 bp, synthetic construct
  source 1..110: mol_type = other DNA
aaagagatgttgctgaaacttggcctctgtccaccaggtgacttcaagaaacccagaatcagagtttgggacaaaggaggaaaaaaaaatagctttattgctttgccagg

SEQ ID NO: 7850 - DNA, 110 bp, synthetic construct
  source 1..110: mol_type = other DNA
cagaaggctcaaggagcaagaaaaagcagtcttgagtttagacccttaagggctcttaattcctgtgacaaaggaattgcatatacttggctttgacatcagagagcaga

SEQ ID NO: 7851 - DNA, 110 bp, synthetic construct
  source 1..110: mol_type = other DNA
ttaattcctgtgacaaaggaattgcatatacttggctttgacatcagagagcagagctgggacccatgagcggaggtgatgaggttacgtgcaggcagatttcagctcaa

SEQ ID NO: 7852 - DNA, 110 bp, synthetic construct
  source 1..110: mol_type = other DNA
ggcaccatgccagatacagaatacctttcggatagcgtccccgccctccacagaggacacagctgtaatcttggcaaggtagcacccagctattcaactgtggtagtagg

SEQ ID NO: 7853 - DNA, 110 bp, synthetic construct
  source 1..110: mol_type = other DNA
agagcaaagggttatacactggcacaacttggtcataagccatcactgcctacatgaatgtttctgtcatgcaaacatgcagatgaagaagaactgcatgatgcatccag

SEQ ID NO: 7854 - DNA, 110 bp, synthetic construct
  source 1..110: mol_type = other DNA
gaatgtttctgtcatgcaaacatgcagatgaagaagaactgcatgatgcatccagtgaagcaaatggttctatcctctacaaccaagttttctaatagtttgggtgtaac

SEQ ID NO: 7855 - DNA, 110 bp, synthetic construct
  source 1..110: mol_type = other DNA
taaatatagcagatgtgtatattcaagataatacatatttatgagctcttttacatgcagggcactttcccatagctaatgtcatcgaatcaccaccaccacctgaagtt

SEQ ID NO: 7856 - DNA, 110 bp, synthetic construct; identical to SEQ ID NO: 7855
  source 1..110: mol_type = other DNA

SEQ ID NO: 7857 - DNA, 110 bp, synthetic construct
  source 1..110: mol_type = other DNA
gtgatgatttgctcccatgaacttcctctgggatggaggatagcttgcctgacctcctgccccttgaccttggcagtgggatcggccatcctggcatttgtagcctcata

SEQ ID NO: 7858 - DNA, 110 bp, synthetic construct
  source 1..110: mol_type = other DNA
cctatgagtcactttcaagcggaagtgggcagacttgtctgtgacgggctagacggtaaagagttcaggctttgtggaccatactagctctgccacaaccctgcgactca

SEQ ID NO: 7859 - DNA, 110 bp, synthetic construct
  source 1..110: mol_type = other DNA
gtaaaagcaagtgcattccatgttctcccatcctgaagagggctgggtttacccgcctcccatgaggacatctgccttccctctcgcatgtgtgagccccttgggggctg

SEQ ID NO: 7860 - DNA, 110 bp, synthetic construct
  source 1..110: mol_type = other DNA
caagtccttgaaaattctaggaaggtgacttctgccacatttgggttcagatggcctgctgtcattgaaattccaaatcacactttaagagaatgaggtcagagttccca

SEQ ID NO: 7861 - DNA, 110 bp, synthetic construct
  source 1..110: mol_type = other DNA
gggggggatcacacagagtaaggagcaaggccctgggctctcagatgcccacctctgtcctgccccttacagctgctgagctcgagcaagttgctcaacctctctgtgcc

SEQ ID NO: 7862 - DNA, 110 bp, synthetic construct
  source 1..110: mol_type = other DNA
aactcctcagacccccacttaggaagacgcctgcccatctgcttacggaacagtaagacagccccttatctgtccagcttaaaccagatgagcccctgcctgagcctgca

SEQ ID NO: 7863 - DNA, 110 bp, synthetic construct
  source 1..110: mol_type = other DNA
agacagccccttatctgtccagcttaaaccagatgagcccctgcctgagcctgcaggtagcctgggagcagctgggtcatctggttaggaggagggcctggcttccactg

SEQ ID NO: 7864 - DNA, 110 bp, synthetic construct
  source 1..110: mol_type = other DNA
tgatatcactgtgccacagcgggaactcccaatttatgtttttaactgagcacctatttgatgctcctgggtcagctgtgggcgcctcctctgctgctctgagcagctcc

SEQ ID NO: 7865 - DNA, 110 bp, synthetic construct
  source 1..110: mol_type = other DNA
atttgatgctcctgggtcagctgtgggcgcctcctctgctgctctgagcagctccaagggcaggagccaagctgggttggggctgcaggctgtctgggctcaggctgctg

SEQ ID NO: 7866 - DNA, 110 bp, synthetic construct
  source 1..110: mol_type = other DNA
gggtcaggcctggcacctgaggaccgggccatgcagacctgcgctgggtccccgctatctgtcacgccgtgctctgcagcccatgaagctcttatatatacattctgtgg

SEQ ID NO: 7867 - DNA, 110 bp, synthetic construct
  source 1..110: mol_type = other DNA
gtctcttgggacagaacatgatggaagataatgagaaaaaggatgtatgactggatcattttgttgtacagctgaaattggcgcaacactataaatcaactataatttaa

SEQ ID NO: 7868 - DNA, 110 bp, synthetic construct; identical to SEQ ID NO: 7867
  source 1..110: mol_type = other DNA

SEQ ID NO: 7869 - DNA, 110 bp, synthetic construct
  source 1..110: mol_type = other DNA
aatgctgatttcacagagagggccaggcacatgtggggacagggcagggggtgtgacaggaagctcaggctggagggacttctagttgtgtcatcctgttatttgcgtgg

SEQ ID NO: 7870 - DNA, 110 bp, synthetic construct
  source 1..110: mol_type = other DNA
aggtgcatctcccatcccaagcattggactcacctggggttctagttaacaggaccaacaccccagctcttccccagacctactaacccacaacttctggtggtgaggcc

SEQ ID NO: 7871 - DNA, 110 bp, synthetic construct
  source 1..110: mol_type = other DNA
agagggtaacttcctaaacatgactagcctcaaagactctgatcattcttttttcccatgagaagaggtgaaataataagcctaaggtcatggggagcttactcaggttg

SEQ ID NO: 7872 - DNA, 110 bp, synthetic construct
  source 1..110: mol_type = other DNA
ccatgagaagaggtgaaataataagcctaaggtcatggggagcttactcaggttgcagggaaatcatacaaacaggactggaagacttagatcctttccgcatccttacc

SEQ ID NO: 7873 - DNA, 110 bp, synthetic construct
  source 1..110: mol_type = other DNA
tagtcagattcatttctgctctgccacaacaggaactccccatccagctttcagagtctaatttcccacagataccattgcacatggtggtctagcccccagaccagccc

SEQ ID NO: 7874 - DNA, 110 bp, synthetic construct; identical to SEQ ID NO: 7873
  source 1..110: mol_type = other DNA

SEQ ID NO: 7875 - DNA, 110 bp, synthetic construct
  source 1..110: mol_type = other DNA
ggtgtgtaagtgcaatggaaactcaaccactgaaatgactggggatgtccttagtctggtcagagaaacttggatcccagctagttgacctttcatcttggaaaaaaata

SEQ ID NO: 7876 - DNA, 110 bp, synthetic construct
  source 1..110: mol_type = other DNA
ctggtcagagaaacttggatcccagctagttgacctttcatcttggaaaaaaataggagtttctaaataccctgaaatcaccagttatatttaaaatactgtgcctggat

SEQ ID NO: 7877 - DNA, 110 bp, synthetic construct
  source 1..110: mol_type = other DNA
acatcagagtttacagggcaactctggcgattagctgcttctcaaaactcaaattgcttggacatttttaggcataacactgtcaatcaactgtactttagacaaaacaa

SEQ ID NO: 7878 - DNA, 110 bp, synthetic construct
  source 1..110: mol_type = other DNA
cttcttatcacactcacgaccttgccctgggggagacccagactccatagggcctaaagtttaaaaaattagggggtgtctcaagtaaaaataactgaaagtgattagta

SEQ ID NO: 7879 - DNA, 110 bp, synthetic construct
  source 1..110: mol_type = other DNA
cctgggggagacccagactccatagggcctaaagtttaaaaaattagggggtgtctcaagtaaaaataactgaaagtgattagtataaaattaagacatgaagatgattt

SEQ ID NO: 7880 - DNA, 110 bp, synthetic construct
  source 1..110: mol_type = other DNA
gcactcattcacattgggctacttaccattccttcatttaggatgatgaaaaatcacttacggccatttacatagctagcatataaatttaaagtagctatccatctcta

SEQ ID NO: 7881 - DNA, 110 bp, synthetic construct
  source 1..110: mol_type = other DNA
gggctacttaccattccttcatttaggatgatgaaaaatcacttacggccatttacatagctagcatataaatttaaagtagctatccatctctaaaatattttatgaaa

SEQ ID NO: 7882 - DNA, 110 bp, synthetic construct
  source 1..110: mol_type = other DNA
tatcacaaccttgtaaatcaactatatgtccagaaaacttttttaaaaaagtaagaagtcatgctgaaaggcaagacgaggtaaagacaccatcttcccaatgacaaaaa

SEQ ID NO: 7883 - DNA, 110 bp, synthetic construct
  source 1..110: mol_type = other DNA
aagtcatgctgaaaggcaagacgaggtaaagacaccatcttcccaatgacaaaaacagagaaatttctgcccttgtccagctcctcttcccaaaggcagggagagatctg

SEQ ID NO: 7884 - DNA, 110 bp, synthetic construct
  source 1..110: mol_type = other DNA
tttaagcaggggctgatttgattgcagtcagtttaatggatttctctggtggctgttgtgggtggtaatagactggaggcagggaggccatttggaaagttggcttaatc

SEQ ID NO: 7885 - DNA, 110 bp, synthetic construct
  source 1..110: mol_type = other DNA
ttgtgggtggtaatagactggaggcagggaggccatttggaaagttggcttaatcagagctgatgaggacttaaactagggctgtgttaatagaaatggagaagaaggaa

SEQ ID NO: 7886 - DNA, 110 bp, synthetic construct
  source 1..110: mol_type = other DNA
tttaagataaatgacgcacctgctttggaaatggcatctgtctattttagtacaatatataagaatacctaatgtatggtagcgtttaagaagatctcaattattcagaa

SEQ ID NO: 7887 - DNA, 110 bp, synthetic construct
  source 1..110: mol_type = other DNA
gcacctgctttggaaatggcatctgtctattttagtacaatatataagaatacctaatgtatggtagcgtttaagaagatctcaattattcagaaataaatgacatatga

SEQ ID NO: 7888 - DNA, 110 bp, synthetic construct; identical to SEQ ID NO: 7886
  source 1..110: mol_type = other DNA

SEQ ID NO: 7889 - DNA, 110 bp, synthetic construct; identical to SEQ ID NO: 7887
  source 1..110: mol_type = other DNA

SEQ ID NO: 7890 - DNA, 110 bp, synthetic construct
  source 1..110: mol_type = other DNA
ctaccaaatcaaacctaatctcagcctagaatttaaggttttccaaatctcccttattcttgctcttcagcacaagtctcttcgtgataacagttcttcttctcagctaa

SEQ ID NO: 7891 - DNA, 110 bp, synthetic construct
  source 1..110: mol_type = other DNA
attcttgctcttcagcacaagtctcttcgtgataacagttcttcttctcagctaagtacatgtctgtttccacttcatgatgcctggtctttcctcttcaaggatgtgct

SEQ ID NO: 7892 - DNA, 110 bp, synthetic construct
  source 1..110: mol_type = other DNA
cgtcatttgtcttttctctttttctgtatgcaataggttttgtgtcctgctttaaaaagtctttcttattccaagactataaaaggatttgcctgtgctttcttctgtta

SEQ ID NO: 7893 - DNA, 110 bp, synthetic construct
  source 1..110: mol_type = other DNA
tgttttctttctaaaataagattcttcagtagaggccagtgacatttcaccaaagtacgattcagaaaaagcactgcaccagcgtggccagtgggtcctgtccaagccta

SEQ ID NO: 7894 - DNA, 110 bp, synthetic construct
  source 1..110: mol_type = other DNA
tacgattcagaaaaagcactgcaccagcgtggccagtgggtcctgtccaagcctacagctcctaatggtctggttaattacaaagagagattttcaggcggggctactca

SEQ ID NO: 7895 - DNA, 110 bp, synthetic construct
  source 1..110: mol_type = other DNA
tcacgcagcctttagccacactgcggaaacaaggggacagagagctgctgagcactccttgtctaggttgctgattgttgagacatgattctggggacttcacacaaata

SEQ ID NO: 7896 - DNA, 110 bp, synthetic construct
  source 1..110: mol_type = other DNA
ttacttgcacaaacgaatcatgtctcctagtcaggaggatggagccgacagacatcattgttcagaaggcaagttatcgtaatgaggccaagcaaacagggcggggggga

SEQ ID NO: 7897 - DNA, 110 bp, synthetic construct
  source 1..110: mol_type = other DNA
gaactacatggagcttcctcctgcgcagctcaggccccagagctcagactggacgtcacggagcttcatcgcctcctcagccatttacgtgactgtctcccactgtagtt

SEQ ID NO: 7898 - DNA, 110 bp, synthetic construct
  source 1..110: mol_type = other DNA
tcacggagcttcatcgcctcctcagccatttacgtgactgtctcccactgtagttctgcaaagcggcagcagtggtctcttgtttgcggcctgggacaactttgttctgt

SEQ ID NO: 7899 - DNA, 110 bp, synthetic construct
  source 1..110: mol_type = other DNA
catccttcatttttttttttccgtgtgtcattttggccagactcaccatggtatgtggctcttaagcttctaaacatttatcactagtagttgagtacaagtgtttaagg

SEQ ID NO: 7900 - DNA, 110 bp, synthetic construct
  source 1..110: mol_type = other DNA
gacagaacctgcatcctcatggatactactcaaagagttcgccaccactgagccaggatgggaacttggacactagctttttaacactgcatgttataattatcaccaag

SEQ ID NO: 7901 - DNA, 110 bp, synthetic construct
  source 1..110: mol_type = other DNA
tgaaatttctagagggtaaaagtttagggtacagttacaaaggggaaaagtgcatctgtgtttaattatggaaagcatgtaccacatgtacaaatctaagcttagaagtt

SEQ ID NO: 7902 - DNA, 110 bp, synthetic construct
  source 1..110: mol_type = other DNA
ctgtgtttaattatggaaagcatgtaccacatgtacaaatctaagcttagaagttgaggtttctgacaacagcaataatttcgtaaagatacaaaactaagccaaagtta

SEQ ID NO: 7903 - DNA, 110 bp, synthetic construct
  source 1..110: mol_type = other DNA
gcatctgtctttaaaaatcttcccacaaaggaaattcccagccaagatagctccactggtgacttttaccaaaatgtaaggacgataataccaattctacacaaacctct

SEQ ID NO: 7904 - DNA, 110 bp, synthetic construct
  source 1..110: mol_type = other DNA
ctggtgacttttaccaaaatgtaaggacgataataccaattctacacaaacctcttaaagaaacagagggaaggaattcctgtcgtggcgcagtggttaacgaatgcgac

SEQ ID NO: 7905 - DNA, 110 bp, synthetic construct
  source 1..110: mol_type = other DNA
gttaaggatcgatccagcattgtcactgcagtagctcgggtcaccacagtggcgtgaaatcaatacctgaccagggaactgccacatgccaaggcacagaaagagagaga

SEQ ID NO: 7906 - DNA, 110 bp, synthetic construct
  source 1..110: mol_type = other DNA
tggaagttcctaggctaaggaccgaatcgcatctgcagctgtaggcctacaccacagctcacagcaacaacatgcccttaacacaatgagcaaggtcagggatcgaaccc

SEQ ID NO: 7907 - DNA, 110 bp, synthetic construct; identical to SEQ ID NO: 7906
  source 1..110: mol_type = other DNA

SEQ ID NO: 7908 - DNA, 110 bp, synthetic construct
  source 1..110: mol_type = other DNA
gaccaaaaacaaaacaaaaacaaccctaaaaataacaacaaaaaaacccccatctcagccaaagctaccctttctcctttccagaatgaatgtctggaactggagtatcc

SEQ ID NO: 7909 - DNA, 110 bp, synthetic construct
  source 1..110: mol_type = other DNA
cagccaaagctaccctttctcctttccagaatgaatgtctggaactggagtatccatcagttccagacattagaatatggtgatgaagagtcaataactaaggatgacag

SEQ ID NO: 7910 - DNA, 110 bp, synthetic construct; identical to SEQ ID NO: 7908
  source 1..110: mol_type = other DNA

SEQ ID NO: 7911 - DNA, 110 bp, synthetic construct; identical to SEQ ID NO: 7909
  source 1..110: mol_type = other DNA

SEQ ID NO: 7912 - DNA, 110 bp, synthetic construct
  source 1..110: mol_type = other DNA
cttctacttgacaatggctcttcaaggtacagactaccaaggtgactaggcctggaggtgcttcaaacagcaaccacatgctggattgcctgtagtctgccccaaatccc

SEQ ID NO: 7913 - DNA, 110 bp, synthetic construct
  source 1..110: mol_type = other DNA
taaaaaaaaaagaacttaacatagtgtcagtgaggatatgtttccatccttggcctcgctcagggggctaaggatctgatgttgccacaagttgcagcataggtcacaga

SEQ ID NO: 7914 - DNA, 110 bp, synthetic construct
  source 1..110: mol_type = other DNA
gtcagtgaggatatgtttccatccttggcctcgctcagggggctaaggatctgatgttgccacaagttgcagcataggtcacagatgcggcacagatcccgagttgctgt

SEQ ID NO: 7915 - DNA, 110 bp, synthetic construct
  source 1..110: mol_type = other DNA
atacgacgggaactcctacttttaagatttttgttacctcgatagatacactagggctaccactagcctatcagcgcctttgtgcaaattaggagaaaacagctttatag

SEQ ID NO: 7916 - DNA, 110 bp, synthetic construct
  source 1..110: mol_type = other DNA
gctaccactagcctatcagcgcctttgtgcaaattaggagaaaacagctttataggcatatccatttttttcccctttttcatagccaaacctgaagcatatagaagttc

SEQ ID NO: 7917 - DNA, 110 bp, synthetic construct
  source 1..110: mol_type = other DNA
actagtccaaggccagttgccagtttggtctaagtgaggcttaaaaagaaaaaccccaattatttttcttggtcagcgagaggtaaacagtctgtcactcgagaagagaa

SEQ ID NO: 7918 - DNA, 110 bp, synthetic construct
  source 1..110: mol_type = other DNA
ccaattatttttcttggtcagcgagaggtaaacagtctgtcactcgagaagagaactaggaacttaccgcatagtactgacagcctgccttccgacggaaagcaaagggg

SEQ ID NO: 7919 - DNA, 110 bp, synthetic construct
  source 1..110: mol_type = other DNA
tggatcctgcattgccgtggctgtggcataagttggcagctgtagctctgatttgagaaaaaagaaatatatgatcagccacactaaatggggtaaagacagaccataaa

SEQ ID NO: 7920 - DNA, 110 bp, synthetic construct
  source 1..110: mol_type = other DNA
ccctaaaacttctagcaaccaatttttacgtagttatttttttaacactgtaaagccttgtaatatttttacttgacaagcgcaattcagatgaatgcagagcttacttt

SEQ ID NO: 7921 - DNA, 110 bp, synthetic construct
  source 1..110: mol_type = other DNA
ccttgtaatatttttacttgacaagcgcaattcagatgaatgcagagcttacttttagtcctcctggcagcatctttctgagttctttgtcttgattggtctcttggttg

SEQ ID NO: 7922 - DNA, 110 bp, synthetic construct
  source 1..110: mol_type = other DNA
agcgtcatcaaaaaccagacttctttccaagacagtgaattactcaggtgggtccaggacagggattttttttttcccctaagagatctatcagaggacacacaatattg

SEQ ID NO: 7923 - DNA, 110 bp, synthetic construct
  source 1..110: mol_type = other DNA
gaaaagagatgaaattagtgcccaaaggagtatttgtaaagcttgcatcctgcgcaaatgtggaccatcacatgttccacagttactgggagttcccgttgtggcgaagc

SEQ ID NO: 7924 - DNA, 110 bp, synthetic construct
  source 1..110: mol_type = other DNA
gctgagcactgcagagcattttgccaagttggacttttcactgccatgggagacgaacccaaagagaaagacattttgattaggcagatgaagcttgacaaatttacagg

SEQ ID NO: 7925 - DNA, 110 bp, synthetic construct
  source 1..110: mol_type = other DNA
aacccaaagagaaagacattttgattaggcagatgaagcttgacaaatttacaggttaagtgtaatacagaaaggaaaagttaatttgtaaaaaacagactgaggggttg

SEQ ID NO: 7926 - DNA, 110 bp, synthetic construct
  source 1..110: mol_type = other DNA
gcattgccactgctgtggctcaggtggctgtggagctggttcaatccctagccaaagaacttccacatccacatgcagagttgaaaaaataaagaaggaagcaatcatcc

SEQ ID NO: 7927 - DNA, 110 bp, synthetic construct
  source 1..110: mol_type = other DNA
ctcttgaaaactcccaggccattctgatatggataagggccagagggaccacttgcctaggtcctgagcctcagcctcctggttggcctttcttcctttgcactctctgc

SEQ ID NO: 7928 - DNA, 110 bp, synthetic construct
  source 1..110: mol_type = other DNA
atatttaaaacttcctaggaaagagctgtgacacgaggataaaacatgacgtcccggtgggaaggggctgtagacagtggattcaggagtggaactaaggcttactctgg

SEQ ID NO: 7929 - DNA, 110 bp, synthetic construct
  source 1..110: mol_type = other DNA
acctttatcagatgaagacagggaagccttcagcagagaaactcaggcctgttgtatgagggactgaaagtcagcaaccacacattgtcattattgctctaaaaatagct

SEQ ID NO: 7930 - DNA, 110 bp, synthetic construct
  source 1..110: mol_type = other DNA
atgagggactgaaagtcagcaaccacacattgtcattattgctctaaaaatagcttttgctaaagcaataaaataggatgaaggccaatgactgagcctccattgacact

SEQ ID NO: 7931 - DNA, 110 bp, synthetic construct
  source 1..110: mol_type = other DNA
tgagatgtatggtgaacaatatatgaatttaatcttctcggtgatattttctggctacaaatggaaaggtatgcttttgatggacctatatgcttatggaatttagatat

SEQ ID NO: 7932 - DNA, 110 bp, synthetic construct
  source 1..110: mol_type = other DNA
tacaaatggaaaggtatgcttttgatggacctatatgcttatggaatttagatataaaagcccttttattttttaatcttttattaatgataagcaagaggggcagaggg

SEQ ID NO: 7933 - DNA, 110 bp, synthetic construct
  source 1..110: mol_type = other DNA
agtgaaaaaagagaatgactgcagctgctttttgaggaaactgtgtgttcacagacatcaaggcaaaaaaccaaaatcactgcactcatgttcgctctcaaggacagaac

SEQ ID NO: 7934 - DNA, 110 bp, synthetic construct
  source 1..110: mol_type = other DNA
tctttgtgtatataggaagtggcaaattaaacagttctcagaacaatgacttaaagactctgtttaaactctacagtatgacgacctttggcatcttctatgtaaatgca

SEQ ID NO: 7935 - DNA, 110 bp, synthetic construct
  source 1..110: mol_type = other DNA
gactctgtttaaactctacagtatgacgacctttggcatcttctatgtaaatgcagtatggtgactatattcatgcatttaacaagtatttattgagttcttactttgtg

SEQ ID NO: 7936 - DNA, 110 bp, synthetic construct
  source 1..110: mol_type = other DNA
gatgccatctatttctgccaaggcctccttacgggaagaggaggggaaatcttaaaaagctcccgcttggactagacccatcactttccactcgtagcctttctcccttc

SEQ ID NO: 7937 - DNA, 110 bp, synthetic construct
  source 1..110: mol_type = other DNA
cccaagatcaggcttttaaagccattcattcacatgatctgtggcaaagagctttcagatcagtgttcccaattcatcctccccaacatgctagaacaatcttcctaaaa

SEQ ID NO: 7938 - DNA, 110 bp, synthetic construct
  source 1..110: mol_type = other DNA
cagatcagtgttcccaattcatcctccccaacatgctagaacaatcttcctaaaacacagctacaagcctgtctttctcctcatcgaaaattgcagtgaattcccactgc

SEQ ID NO: 7939 - DNA, 110 bp, synthetic construct
  source 1..110: mol_type = other DNA
gagaagaaataagacactcttttagatgaacactacctcggaaagatatgccttaccagataggactcgagtaaaataaaagggtgtaatatcggtgtagagatagacct

SEQ ID NO: 7940 - DNA, 110 bp, synthetic construct
  source 1..110: mol_type = other DNA
ccagataggactcgagtaaaataaaagggtgtaatatcggtgtagagatagacctcaagggaatatcatagagcacgcccccccaaaaccccatgcatcttagtttggtc

SEQ ID NO: 7941 - DNA, 110 bp, synthetic construct
  source 1..110: mol_type = other DNA
atctgacataattagagcacctcttccgtgttccgagatatgtatggcatttcgctgcatcataatgtcattcttgaacaagctagtcttcctcctaaaatctgaatttt

SEQ ID NO: 7942 - DNA, 110 bp, synthetic construct
  source 1..110: mol_type = other DNA
tgcatcataatgtcattcttgaacaagctagtcttcctcctaaaatctgaatttttaaaacactgtcccatattcgtatccctagaaacagcccccaatagacattctat

SEQ ID NO: 7943 - DNA, 110 bp, synthetic construct
  source 1..110: mol_type = other DNA
agtgagtgaccgcagatacaaggcaacaggtaagaaaaactgggtattgtaactattcctgtccttgaaataaattctatcagaaggagaggaagaggcttaagagcaag

SEQ ID NO: 7944 - DNA, 110 bp, synthetic construct
  source 1..110: mol_type = other DNA
ttcctgtccttgaaataaattctatcagaaggagaggaagaggcttaagagcaaggcagaaaattaatgtaagttaaagaattttttgggtgggggggcctgggcttaat

SEQ ID NO: 7945 - DNA, 110 bp, synthetic construct
  source 1..110: mol_type = other DNA
tcactggtgaatctagaaccactgagaattgagactgtgtttatataattctccagggacgtagattccatggcctctcttgataattattccagagtttaatccacctc

SEQ ID NO: 7946 - DNA, 110 bp, synthetic construct
  source 1..110: mol_type = other DNA
gctaccctgcccagcatcacgagagaaggtcaaggatgtaccgctacctcggcgtacagctgttgacatgctgatagcatcctattctgttcagtccctttgtccttcca

SEQ ID NO: 7947 - DNA, 110 bp, synthetic construct
  source 1..110: mol_type = other DNA
atcctcacgctgtgtcaggttcttaacccactcagccacaacaggaactccggggtagctttctagggtggccgtgctccacgtgacctagaaatcctgcatattgcact

SEQ ID NO: 7948 - DNA, 110 bp, synthetic construct
  source 1..110: mol_type = other DNA
aatttctggtttcccagcgcatgtaaaagttacgtttatgtgatactgtagtctattaagagtgcaggagcatgatgtctaagaaaatcaattacattattcaaaagtac

SEQ ID NO: 7949 - DNA, 110 bp, synthetic construct
  source 1..110: mol_type = other DNA
ttaagagtgcaggagcatgatgtctaagaaaatcaattacattattcaaaagtactttattgtgggagttcccgctgtggcaccacacattaagaatcagactgcagtgg

SEQ ID NO: 7950 - DNA, 110 bp, synthetic construct
  source 1..110: mol_type = other DNA
cattgtggctcagcgggttaaggacccagaggtctccgtggagatgtgggttcgatccctagcctcgatcagtggcatcagctgttgctgcaagctacagtgtaggtcgc

SEQ ID NO: 7951 - DNA, 110 bp, synthetic construct
  source 1..110: mol_type = other DNA
tatttgcagttttgtccccttgcatctatatttgatggagtgaggggtcattgcaccatatgaccccttacacgtttataccgccagtttttccattagagttataacac

SEQ ID NO: 7952 - DNA, 110 bp, synthetic construct
  source 1..110: mol_type = other DNA
ccatatgaccccttacacgtttataccgccagtttttccattagagttataacactgctcccactaaccccaccaccaacatccccacatactcctgtctgctgttccac

SEQ ID NO: 7953 - DNA, 110 bp, synthetic construct
  source 1..110: mol_type = other DNA
agccccaggtgtgaagtcttctctcggggtcgcctccccctgcacgactgtgcctgcagctgacaccagaccagagctgccaaaggtgtgacataggcagtagggaagga

SEQ ID NO: 7954 - DNA, 110 bp, synthetic construct
  source 1..110: mol_type = other DNA
gcagctgacaccagaccagagctgccaaaggtgtgacataggcagtagggaaggaagagactaaaaaaaggcccatctgggaagcaccgtaaagcccttttcaaacaggg

SEQ ID NO: 7955 - DNA, 110 bp, synthetic construct
  source 1..110: mol_type = other DNA
gattctgtgctgtaggaatccaggaagttctcagctgggtgatcctgtttcacatggtgtcaaatgtggtcagaagagttcagtgtggcttcccttacctgtcttgacct

SEQ ID NO: 7956 - DNA, 110 bp, synthetic construct
  source 1..110: mol_type = other DNA
tgtttcacatggtgtcaaatgtggtcagaagagttcagtgtggcttcccttacctgtcttgacctttgatggggataatttaggagttcccgtcgtggcgcagtggttaa

SEQ ID NO: 7957 - DNA, 110 bp, synthetic construct
  source 1..110: mol_type = other DNA
aaaaggaaatagtgtggccttcccatgtccgatggctgaaatacgggtataacagtgatagctggagcaggcatcatggaccacagagatgagaccagcaccttagggat

SEQ ID NO: 7958 - DNA, 110 bp, synthetic construct
  source 1..110: mol_type = other DNA
tggcttaaaaaaattcccaatttctcatttactttgtcacagctgatgcaagggatgatacagagactgggagggttgcctaatttctaattgtgaggtcttaagctttc

SEQ ID NO: 7959 - DNA, 110 bp, synthetic construct
  source 1..110: mol_type = other DNA
caaaatccatttggaggcaataatcactataaactcatctgggcagaaaaggagggagttcccactgggatgctgtgggttaagaatctgacttcaggagctcctgctat

SEQ ID NO: 7960 - DNA, 110 bp, synthetic construct
  source 1..110: mol_type = other DNA
gagttcccactgggatgctgtgggttaagaatctgacttcaggagctcctgctatggtgcaatgggatcgttgggcctcgggagtgctgggacacaggttcaatccccag

SEQ ID NO: 7961 - DNA, 110 bp, synthetic construct
  source 1..110: mol_type = other DNA
ctcactagactgagtaaagaagatctgccctcaccaaggtgagtggcattatccagtcttctgggggccctaatggaacaaaaaaggcaaaggtggggattcccattgtg

SEQ ID NO: 7962 - DNA, 110 bp, synthetic construct
  source 1..110: mol_type = other DNA
ttcacattgtgggctctgggaaggatgccccctatgctagactcatgtccaacggcacagctgtatccagtggtggctccaggatgggagagatccatgctccttttcat

SEQ ID NO: 7963 - DNA, 110 bp, synthetic construct
  source 1..110: mol_type = other DNA
cacagctgtatccagtggtggctccaggatgggagagatccatgctccttttcatattgctcccctacctcctatgcagttcccggacccatcccacttcaagagagact

SEQ ID NO: 7964 - DNA, 110 bp, synthetic construct
  source 1..110: mol_type = other DNA
tctcaagcctgcttttagagtttgtttcttctggggagagttaacggtattatcgccatattcagtctccctccaggctccagcctgagctgtttcctttgcggggtctg

SEQ ID NO: 7965 - DNA, 110 bp, synthetic construct
  source 1..110: mol_type = other DNA
ccatattcagtctccctccaggctccagcctgagctgtttcctttgcggggtctggcctcccaccctgtcaaggggcatccttccctcttccactttacctccttcatat

SEQ ID NO: 7966 - DNA, 110 bp, synthetic construct
  source 1..110: mol_type = other DNA
aggattggtggcatctctgcagagccaagacgcaggttcaatccccagcttagcacagtggtttaaagaatcctgcataggtcgaaactgagactcagatttaattcctg

SEQ ID NO: 7967 - DNA, 110 bp, synthetic construct
  source 1..110: mol_type = other DNA
cagtggtttaaagaatcctgcataggtcgaaactgagactcagatttaattcctggccttggaactccatctgccaagtggtggccaaaaaatattacacagtgaagtat

SEQ ID NO: 7968 - DNA, 110 bp, synthetic construct
  source 1..110: mol_type = other DNA
gttgacacatatgaggtcctgtgtaggcgtgctggctgacagccccaataacccagccaactgccagcatcagttgccagacgtgtaagaagtgtgcaagctttcaggtg

SEQ ID NO: 7969 - DNA, 110 bp, synthetic construct
  source 1..110: mol_type = other DNA
gccaactgccagcatcagttgccagacgtgtaagaagtgtgcaagctttcaggtgattggagcctcaagtgtcaagccatcccagccttggagctactcctgctgacact

SEQ ID NO: 7970 - DNA, 110 bp, synthetic construct
  source 1..110: mol_type = other DNA
gaagtgtgttatttaattgccacgtattttggcattctcagctatctttttattaatgatttctcgtttaatttcattgtagccgatgagcagacattgtataatttcta

SEQ ID NO: 7971 - DNA, 110 bp, synthetic construct
  source 1..110: mol_type = other DNA
gggcctatctcctaggatcatattggagattcattggggaaaatgcagtataccattaagcacatttaatagcttaataaatattatttcctttccttaattctgcccct

SEQ ID NO: 7972 - DNA, 110 bp, synthetic construct
  source 1..110: mol_type = other DNA
aagaccctatttccatgtaagattccattccaaggtactaggggttgggattccagcttgtcttttaggaaggacacaactcaacctataacactctttcataaattact

SEQ ID NO: 7973 - DNA, 110 bp, synthetic construct
  source 1..110: mol_type = other DNA
tgcagcatgcagaagttcctagtccagggatcaaacccatgcaacaacagaagggacatccctggatcattagccctctaagccaccagggaacttcaaggcattgtttt

SEQ ID NO: 7974 - DNA, 110 bp, synthetic construct
  source 1..110: mol_type = other DNA
acatccctggatcattagccctctaagccaccagggaacttcaaggcattgttttaatttttttctgtgtcctgagttaccctttggggataatcatttaaactatgcat

SEQ ID NO: 7975 - DNA, 110 bp, synthetic construct
  source 1..110: mol_type = other DNA
accaacagtcagctattgccattagctgcctgtatttaatacattctagatgtaagaaaatgagactcttggagttcctgttatggctcaatgtgttaaggacccaacat

SEQ ID NO: 7976 - DNA, 110 bp, synthetic construct; identical to SEQ ID NO: 7975
  source 1..110: mol_type = other DNA

SEQ ID NO: 7977 - DNA, 110 bp, synthetic construct
  source 1..110: mol_type = other DNA
tagaaatcttccgagcatggatttagactcatctttgaaattcccaaatctgtgctgtttgcagtaacatcatcctccctctatattttgatttgccttctttaatgcac

SEQ ID NO: 7978 - DNA, 110 bp, synthetic construct
  source 1..110: mol_type = other DNA
tgtttgcagtaacatcatcctccctctatattttgatttgccttctttaatgcacagtttctgaaatagactctgagtctttgctttcttgatgcactggtgtcacagcc

SEQ ID NO: 7979 - DNA, 110 bp, synthetic construct
  source 1..110: mol_type = other DNA
ccatgttttggtaaaaagggagccaggctccatgttaatggttgtttttgttcttacagacaaataatgaatacgtttggaccgataaatggagggtaaggtacacaaat

SEQ ID NO: 7980 - DNA, 110 bp, synthetic construct
  source 1..110: mol_type = other DNA
acagacaaataatgaatacgtttggaccgataaatggagggtaaggtacacaaattgggctgccgatgagcccagactgaagacagcatgtgtttatatggatcttgacg

SEQ ID NO: 7981 - DNA, 110 bp, synthetic construct
  source 1..110: mol_type = other DNA
ctaaacatttgtttctttatagctgatccaaggaagatggtcacttccaagccctcttccaactcggccggagtcgttgtcatcgttgttctcctgattctaacgggtgc

SEQ ID NO: 7982 - DNA, 110 bp, synthetic construct
  source 1..110: mol_type = other DNA
gtggcattatttcattctttttgatggtcgaataacattcacgtgtgtgtatcgcatggaataatatatcattgattttaaatcttttctgacatacacattttaagctg

SEQ ID NO: 7983 - DNA, 110 bp, synthetic construct
  source 1..110: mol_type = other DNA
gattttcctctcaaggctacaccttgggtcatggaaatgtcttttcttggtagagaatggagatcaaaacttttcatgtcttggagttcccgtcatggcgcagtagttaa

SEQ ID NO: 7984 - DNA, 110 bp, synthetic construct
  source 1..110: mol_type = other DNA
gctacaccttgggtcatggaaatgtcttttcttggtagagaatggagatcaaaacttttcatgtcttggagttcccgtcatggcgcagtagttaacgaatccaactagga

SEQ ID NO: 7985 - DNA, 110 bp, synthetic construct
  source 1..110: mol_type = other DNA
gaagaccaatcccatttcttgtgttttctacccaggaaagctaatgggtggtgagacagcagggggcaaggaggaactggagcttataacctgttcgacccaggccacag

SEQ ID NO: 7986 - DNA, 110 bp, synthetic construct
  source 1..110: mol_type = other DNA
ccttctgattcattaggaataacgatggccacattttcaaaaatggtagccagtccctcgagacttggtccctacatatcagcatgaagcagagctccttcttatggtgg

SEQ ID NO: 7987 - DNA, 110 bp, synthetic construct
  source 1..110: mol_type = other DNA
cctcgagacttggtccctacatatcagcatgaagcagagctccttcttatggtggaccactagcccaacatcaaaggcaggcatttctcattttacaatctaccaaatat

SEQ ID NO: 7988 - DNA, 110 bp, synthetic construct
  source 1..110: mol_type = other DNA
ccaggtcaagaaacttattaccagcccccgagatgcccctttgacccctgtccctctttactcccttcttcctcgctaaaggcaatcaaccgtcatcatttcttctgaaa

SEQ ID NO: 7989 - DNA, 110 bp, synthetic construct
  source 1..110: mol_type = other DNA
ctttactcccttcttcctcgctaaaggcaatcaaccgtcatcatttcttctgaaattacaccttctcttggcctgttttaagggctttgtataaatggcatcattttcgg

SEQ ID NO: 7990 - DNA, 110 bp, synthetic construct
  source 1..110: mol_type = other DNA
gtatgtttcagttgaaccctaaacttgtatgggtcatgctgaaatgaaaatcagttccttcaccccagatcaacgattcttgtggctcaaatctgcagaggcatcatacc

SEQ ID NO: 7991 - DNA, 110 bp, synthetic construct
  source 1..110: mol_type = other DNA
tccttcaccccagatcaacgattcttgtggctcaaatctgcagaggcatcatacccaagagagtagcctggtcattcatagttgtaaatatgtcagctgctctttgtttt

SEQ ID NO: 7992 - DNA, 110 bp, synthetic construct
  source 1..110: mol_type = other DNA
gcgggtgtgctctcgaggacgagttttaatctgtgctctctgccctgcctgtgaaaaagttcctggtttctagctactactcgtcacaatttaaatgagtagccgtagtt

SEQ ID NO: 7993 - DNA, 110 bp, synthetic construct
  source 1..110: mol_type = other DNA
aaagttcctggtttctagctactactcgtcacaatttaaatgagtagccgtagttaacggtagtaacaactgacactttctgagcacttcctacgtgccaggcttgcttt

SEQ ID NO: 7994 - DNA, 110 bp, synthetic construct
  source 1..110: mol_type = other DNA
cactgcgccacgacgggaactcctgcagttggattttgaacccactgtaccacagtgagaactccataaacctaatttttttgtgcactgggaaaccccaaaactcctgg

SEQ ID NO: 7995 - DNA, 110 bp, synthetic construct
  source 1..110: mol_type = other DNA
tgagaactccataaacctaatttttttgtgcactgggaaaccccaaaactcctgggactgactctctttgcttcagtgttcactttattatggtgatctggaagcgaacc

SEQ ID NO: 7996 - DNA, 110 bp, synthetic construct
  source 1..110: mol_type = other DNA
tctatttcttgatatggatgcttccagcaaatgcatggtctgaacatcactccgttgcaaaagagctgttactagaaattggtgaaaagactaacatgaaaatcgaacat

SEQ ID NO: 7997 - DNA, 110 bp, synthetic construct
  source 1..110: mol_type = other DNA
aagaagtggcctcataaaactgagccaagtattaataacctgcatgtgatatgtattgggcatacccaggtgaaattaaatgtagtctctattttagggaaattatttat

SEQ ID NO: 7998 - DNA, 110 bp, synthetic construct
  source 1..110: mol_type = other DNA
aaaactgagccaagtattaataacctgcatgtgatatgtattgggcatacccaggtgaaattaaatgtagtctctattttagggaaattatttattcggataatataaca

SEQ ID NO: 7999 - DNA, 110 bp, synthetic construct
  source 1..110: mol_type = other DNA
atgattggctactacccgataagtctaactcacttaagaccatcttgtcctgaggaccccagcttcttcctaggcagggctcaaatcctgttccttcttgggattgtttc

SEQ ID NO: 8000 - DNA, 110 bp, synthetic construct
  source 1..110: mol_type = other DNA
aaatgccttatgatttgtgtccatttgaccacgtgtcttgcctctgagttggcatttcagagctggcattgagtcagcctcttcttatctaggtgatcaaagctcagtta

SEQ ID NO: 8001 - DNA, 110 bp, synthetic construct
  source 1..110: mol_type = other DNA
tttggatggagtgacctataaatatctattaaatccatctggtctagtgcttcattaatatgtgtctcgggatgtttttccttgggtttattttgtgtggtacttgttgt

SEQ ID NO: 8002 - DNA, 110 bp, synthetic construct; identical to SEQ ID NO: 8001
  source 1..110: mol_type = other DNA

SEQ ID NO: 8003 - DNA, 110 bp, synthetic construct
  source 1..110: mol_type = other DNA
cagagatctactcaatctagggatcattcgtgtcctgggttagatttgggggcaggtagaggattcatgtaggataaggacctgaggggtgagtaggacttgggaacatt

SEQ ID NO: 8004 - DNA, 110 bp, synthetic construct
  source 1..110: mol_type = other DNA
cgccctagttcctcctggtcgcttgtgagagagagctcttcatctttgagccaggagaatttttcctggatttagctgaattgttgagcatcccgaaaatacttggctct

SEQ ID NO: 8005 - DNA, 110 bp, synthetic construct
  source 1..110: mol_type = other DNA
agaatttttcctggatttagctgaattgttgagcatcccgaaaatacttggctcttcacacactccgcacatgaacctgagcgtgatggttaaggcagagttcacggtac

SEQ ID NO: 8006 - DNA, 110 bp, synthetic construct
  source 1..110: mol_type = other DNA
tacgttacatatataaagtgactgaaagggcagctcggcacatgtgtgtccacgacacaggcggcataaggggtagagggaagagcactgacttgggaatgtccgcatcc

SEQ ID NO: 8007 - DNA, 110 bp, synthetic construct
  source 1..110: mol_type = other DNA
tagaaagaaatgaaatgatatcagagggcaacctaagagatcatgaatgaaacaatcaaatggtaactgtctgggtaaaggtggtaaactactctaaccttgttgagttc

SEQ ID NO: 8008 - DNA, 110 bp, synthetic construct
  source 1..110: mol_type = other DNA
tcaaatggtaactgtctgggtaaaggtggtaaactactctaaccttgttgagttcttcaaaatacatttgacgtggagttctccttgtggctcaatggttaacaaacccg

SEQ ID NO: 8009 - DNA, 110 bp, synthetic construct
  source 1..110: mol_type = other DNA
taacttagcataaataatgtgttcagaattcatccgtgctgtagcatgtatcggaatttcattccttttcaaggctgtataatagtccattgtatgcagagaccacattt

SEQ ID NO: 8010 - DNA, 110 bp, synthetic construct
  source 1..110: mol_type = other DNA
atttcattccttttcaaggctgtataatagtccattgtatgcagagaccacattttactcttccattggtttcttccacattttggttaatgtgaccaatgctactatga

SEQ ID NO: 8011 - DNA, 110 bp, synthetic construct
  source 1..110: mol_type = other DNA
agtacaactatcactttttgcacatgacatggtaatattcatagaaaatactcaagacgccaccagagaagtactagagctaatcaatgaattcaataatgttgcaggat

SEQ ID NO: 8012 - DNA, 110 bp, synthetic construct
  source 1..110: mol_type = other DNA
atgtgtgtggagctctctgtctctctctcacaccagccaactccccacctctatgaacactcctaggtgtcctacaattctatttgactctgataccaactgcccgaggt

SEQ ID NO: 8013 - DNA, 110 bp, synthetic construct
  source 1..110: mol_type = other DNA
aacactcctaggtgtcctacaattctatttgactctgataccaactgcccgaggtcctggtcagactccacaggttcagtccaacaagcctacccccattccaggtgcca

SEQ ID NO: 8014 - DNA, 110 bp, synthetic construct
  source 1..110: mol_type = other DNA
actgtgaaatcatgaataactatagaccttctggcttttccagatttttattaggttgtcttcttgtaccattttaattgcacaaatatcatttcagaaaggcctggcta

SEQ ID NO: 8015 - DNA, 110 bp, synthetic construct; identical to SEQ ID NO: 8014
  source 1..110: mol_type = other DNA

SEQ ID NO: 8016 - DNA, 110 bp, synthetic construct
  source 1..110: mol_type = other DNA
ccactgagccatgacaggaactccttaatctttattctttaataaagatgccctttaagagcaagttttattgcatctcataggtttcaataggctgtttttcagtgctt

SEQ ID NO: 8017 - DNA, 110 bp, synthetic construct; identical to SEQ ID NO: 8016
  source 1..110: mol_type = other DNA

SEQ ID NO: 8018 - DNA, 110 bp, synthetic construct
  source 1..110: mol_type = other DNA
tggatgtagctggcaggaaaggagagaaagacggtattgtttgcatcattcaaattattaaactcagacctacgcgcctcccccaccacaaggctgagcagttacaggga

SEQ ID NO: 8019 - DNA, 110 bp, synthetic construct
  source 1..110: mol_type = other DNA
tattaaactcagacctacgcgcctcccccaccacaaggctgagcagttacagggatggaggtgcaacagaaacgaggggagcggggtgcagacaaaggaagaacagcccc

SEQ ID NO: 8020 - DNA, 110 bp, synthetic construct
  source 1..110: mol_type = other DNA
tataggtgtattttctttcttggtagttggaaaaaaacatttttttttttttttttttaaagctggtgtctcttgaagcagagtgagcctccatgataatgttcgaagtt

SEQ ID NO: 8021 - DNA, 110 bp, synthetic construct
  source 1..110: mol_type = other DNA
tttaaagctggtgtctcttgaagcagagtgagcctccatgataatgttcgaagttggtgatccctctgcaggtgctttgaaatgtcaatcaaaacccaggaggcactcat

SEQ ID NO: 8022 - DNA, 110 bp, synthetic construct
  source 1..110: mol_type = other DNA
tcacactcagcatttctctttccgtagctgtgccacccaacatagcagaactgaagaatttggaagtgctcaacttttttaacaaccagattgaggagctgcccacgcag

SEQ ID NO: 8023 - DNA, 110 bp, synthetic construct
  source 1..110: mol_type = other DNA
gaatttggaagtgctcaacttttttaacaaccagattgaggagctgcccacgcagatcagcagccttcagaaactcaaacacctgaaccttgggtgagtagcctagagga

SEQ ID NO: 8024 - DNA, 110 bp, synthetic construct
  source 1..110: mol_type = other DNA
cactcatgtgcagctccgaggcccgtggcacagagaagtctgtataaatacacgtgcgggtgacggcttgcatttttctcccccaaccacagcatgaatagactaaacac

SEQ ID NO: 8025 - DNA, 110 bp, synthetic construct
  source 1..110: mol_type = other DNA
gcgggtgacggcttgcatttttctcccccaaccacagcatgaatagactaaacacgctgccgcgaggatttggatccctgccagctctggaggtccttgacctgacttat

SEQ ID NO: 8026 - DNA, 110 bp, synthetic construct
  source 1..110: mol_type = other DNA
caggtgtggccctaaaaaaaaaaatgtcatgccacagattggatgagatcccttggacatgaccgtagggggtagaagatagagccatgaagcacctggttcctaaacac

SEQ ID NO: 8027 - DNA, 110 bp, synthetic construct; identical to SEQ ID NO: 8026
  source 1..110: mol_type = other DNA

SEQ ID NO: 8028 - DNA, 110 bp, synthetic construct
  source 1..110: mol_type = other DNA
aaagctactttaaagtccacttatataagaatagttaaataaactggtagattatgggaggtgctttcaacagcacagcatgaggttgaatttatagtgtgattctaatt

SEQ ID NO: 8029 - DNA, 110 bp, synthetic construct
  source 1..110: mol_type = other DNA
gggaggtgctttcaacagcacagcatgaggttgaatttatagtgtgattctaattacagagaatatttacatagctacgtaaaatgagttaatcaaggagttccctcatg

SEQ ID NO: 8030 - DNA, 110 bp, synthetic construct
  source 1..110: mol_type = other DNA
cacatgtacatatataaatttttctcaagttgtcctccgtcatgcttcatcacaaatgaactagatatagttcccagggtatatagcaggatctcattatcttatccagt

SEQ ID NO: 8031 - DNA, 110 bp, synthetic construct; identical to SEQ ID NO: 8030
  source 1..110: mol_type = other DNA

SEQ ID NO: 8032 - DNA, 110 bp, synthetic construct
  source 1..110: mol_type = other DNA
ccttatgttctattgagaaattctaaaaatttctcaacagaagactcagttgtgcgttttgggtgttcaggtaagcttatccgtggtgtacatgtgtgacttttttcaat

SEQ ID NO: 8033 - DNA, 110 bp, synthetic construct
  source 1..110: mol_type = other DNA
gttttgggtgttcaggtaagcttatccgtggtgtacatgtgtgacttttttcaatagcagtgtgatttgcacgcatgcagtgcacagaccctggagttcatagggccctg

SEQ ID NO: 8034 - DNA, 110 bp, synthetic construct
  source 1..110: mol_type = other DNA
ggcagtttggctcagttggaagaggtgaggagcgtgggcgccaagcaacagcttgaacacctggatttgttcatgagttttctcgtttatttattcacacgccctttcac

SEQ ID NO: 8035 - DNA, 110 bp, synthetic construct
  source 1..110: mol_type = other DNA
tagatgtaaagcatgctcagagaggttaagtaagttctccaaggttacccagctgccagttactatagacgaacctcagaactgggtctgacagttggccagacatttta

SEQ ID NO: 8036 - DNA, 110 bp, synthetic construct
  source 1..110: mol_type = other DNA
ccagttactatagacgaacctcagaactgggtctgacagttggccagacattttaacttctactgagtgtagagagattctctccccaaccccctgcttctctctctccc

SEQ ID NO: 8037 - DNA, 110 bp, synthetic construct
  source 1..110: mol_type = other DNA
cagacaggctgaaggttatattcagtgatattgaggctacaaattagattccctgcctgggtacaatgagaaaaatagctttaaagccagtaaagcctttcatttgttgt

SEQ ID NO: 8038 - DNA, 110 bp, synthetic construct
  source 1..110: mol_type = other DNA
cctgggtacaatgagaaaaatagctttaaagccagtaaagcctttcatttgttgttttagctcaagctaacctgcaccccaatttccctgggtgaagagggcctctggct

SEQ ID NO: 8039 - DNA, 110 bp, synthetic construct
  source 1..110: mol_type = other DNA
ccacaaagctagaagcttaaaacaatacgtctgtatcatcccataccttccctgggtcacagaacaggcatgagtgatgtagatcttctctaatggcctcatatgttgaa

SEQ ID NO: 8040 - DNA, 110 bp, synthetic construct
  source 1..110: mol_type = other DNA
gtcacagaacaggcatgagtgatgtagatcttctctaatggcctcatatgttgaaatcccagtgttgaccagggctgtggtcttacacgaggcgctggtcctcttccacg

SEQ ID NO: 8041 - DNA, 110 bp, synthetic construct; identical to SEQ ID NO: 8039
  source 1..110: mol_type = other DNA

SEQ ID NO: 8042 - DNA, 110 bp, synthetic construct; identical to SEQ ID NO: 8040
  source 1..110: mol_type = other DNA

SEQ ID NO: 8043 - DNA, 110 bp, synthetic construct
  source 1..110: mol_type = other DNA
ctaaaaagacaaaataaaacaaacaaacgggtgttgaggccctggtataaacacatctttagtgtgcgtgggtgggagtaggggtggaatgggagggcaaaggtgaaaga

SEQ ID NO: 8044 - DNA, 110 bp, synthetic construct; identical to SEQ ID NO: 8043
  source 1..110: mol_type = other DNA

SEQ ID NO: 8045 - DNA, 110 bp, synthetic construct
  source 1..110: mol_type = other DNA
acctttctttcactctcagtcagaggccaggagcaaccgatttctccaataacaccacacttgatactggttccatcagctccgtggagaatttcattaacgaggacatt

SEQ ID NO: 8046 - DNA, 110 bp, synthetic construct
  source 1..110: mol_type = other DNA
aagtctgagagcccaccctaaaagaaaagataggcagatgcacagcaaagacttgaacagctgatatgatgctattactcaaagcagatcgctcccccttaagcagaaaa

SEQ ID NO: 8047 - DNA, 110 bp, synthetic construct
  source 1..110: mol_type = other DNA
ttccaaatctaagtgaaattgtcacttgtatttttctttgtgtaatttctcctagaggataacaaaatccccgtacatgtattggtagctttattcctgggttccagcat

SEQ ID NO: 8048 - DNA, 110 bp, synthetic construct
  source 1..110: mol_type = other DNA
catacacggtttacagaacagagcaactgccataggatacagccacgtgaacagacacagctcatctgtgactttaggataaccacagaatccagatgcattttcaaact

SEQ ID NO: 8049 - DNA, 110 bp, synthetic construct
  source 1..110: mol_type = other DNA
gtttttggccatttggaagctgaccatactcaacttgtgatacagagggtgggatgttttgcaggaagctcaaagtcatagttcagactttctgagcttttattcaaggg

SEQ ID NO: 8050 - DNA, 110 bp, synthetic construct
  source 1..110: mol_type = other DNA
aattaatgctgcaatgaatattcattcacctgccttctgtgagagtttctttaggttttgtggagttgtttgcaacagacacgttgaccttcaatattagcattattaag

SEQ ID NO: 8051 - DNA, 110 bp, synthetic construct
  source 1..110: mol_type = other DNA
ttttgtggagttgtttgcaacagacacgttgaccttcaatattagcattattaaggaggtggtccttacatggttcctatgtgccaggcactattcttaatgcttaatct

SEQ ID NO: 8052 - DNA, 110 bp, synthetic construct
  source 1..110: mol_type = other DNA
gcaaaagcattgcttaaacaacacacaccaaaaaaacttgaaatccctactctgtactcaaccctaaggcaaaataaacagggagagtaatgaatgtattaatgggttct

SEQ ID NO: 8053 - DNA, 110 bp, synthetic construct
  source 1..110: mol_type = other DNA
tgaatgaccaagtgtgtttcccacatgcctcctggtctaatgttgagggcacagtgtcacaagggtgctgacacacatctggcatcaacacacacaggatggaaaaaaaa

SEQ ID NO: 8054 - DNA, 110 bp, synthetic construct
  source 1..110: mol_type = other DNA
gctgcagctgccagtctatgccacagtcatggcaacaccaggcccaagacacatctgcaacctactcggcagcttgtggtaacgctggatccttaacccactgagcaaag

SEQ ID NO: 8055 - DNA, 110 bp, synthetic construct; identical to SEQ ID NO: 8054
  source 1..110: mol_type = other DNA

SEQ ID NO: 8056 - DNA, 110 bp, synthetic construct
  source 1..110: mol_type = other DNA
gttcatcttcggttgtatagatgcatttgcagaaatgcctcacacactattaaatctcttaactctataccccatgcctttcattagtcttttttctttacccctgattc

SEQ ID NO: 8057 - DNA, 110 bp, synthetic construct
  source 1..110: mol_type = other DNA
ccccatagccaaagcaatgctgagaaagaacaacatggaggcgtcacacttccacacctcaaaatcaatcacacagctctaggaattaaaatagttcgttactggcatga

SEQ ID NO: 8058 - DNA, 110 bp, synthetic construct
  source 1..110: mol_type = other DNA
gctccctaaacattatatcctaacttaacaaacatgtcaaatttgccaactttcctttctgattgtttatccacctataaaacgaggctagcaggccagaaagcctattt

SEQ ID NO: 8059 - DNA, 110 bp, synthetic construct
  source 1..110: mol_type = other DNA
tttctgattgtttatccacctataaaacgaggctagcaggccagaaagcctatttaaactagagataaaaattacatgtgtaaactatttggaaccactagagggaaaga

SEQ ID NO: 8060 - DNA, 110 bp, synthetic construct
  source 1..110: mol_type = other DNA
ggtgattaggtcatgagggtggagccctcataagtggaatttcgtgttcttataaaagagactccacagagctctccagatccttccaccatgtgaggatacagtgagaa

SEQ ID NO: 8061 - DNA, 110 bp, synthetic construct
  source 1..110: mol_type = other DNA
aagagactccacagagctctccagatccttccaccatgtgaggatacagtgagaaggctgaaacctggaggaagaactcctccagacatggctatgatggcatcttgatc

SEQ ID NO: 8062 - DNA, 110 bp, synthetic construct; identical to SEQ ID NO: 8060
  source 1..110: mol_type = other DNA

SEQ ID NO: 8063 - DNA, 110 bp, synthetic construct; identical to SEQ ID NO: 8061
  source 1..110: mol_type = other DNA

SEQ ID NO: 8064 - DNA, 110 bp, synthetic construct
  source 1..110: mol_type = other DNA
ttatgggccaatgcctgtgtgcacagccctagcagactgataatgtggcagccttctaattcatctgagttaaatattagttaaacccttttgtaaaagagaggttgaca

SEQ ID NO: 8065 - DNA, 110 bp, synthetic construct
  source 1..110: mol_type = other DNA
ctaattcatctgagttaaatattagttaaacccttttgtaaaagagaggttgacatgagatgtgggaggaacacaggactacaaaggtcaggcgtggttctgctgttccc

SEQ ID NO: 8066 - DNA, 110 bp, synthetic construct
  source 1..110: mol_type = other DNA
gcagatctgcataaaattctctctgtggtgtttttatctctaatgtataaaagtagttcaccataatacatttcaaactaaaagtccctatccatggatttggaaaagtg

SEQ ID NO: 8067 - DNA, 110 bp, synthetic construct
  source 1..110: mol_type = other DNA
ttcagccaaattgaccaaggtcaaaaagaaggatgaagatactgcagtttggggtttctcattgtggcttggtagtaacgaatccgaccggtatccatggggacgtgggt

SEQ ID NO: 8068 - DNA, 110 bp, synthetic construct
  source 1..110: mol_type = other DNA
caaggtcaaaaagaaggatgaagatactgcagtttggggtttctcattgtggcttggtagtaacgaatccgaccggtatccatggggacgtgggtttgatccctggcctt

SEQ ID NO: 8069 - DNA, 110 bp, synthetic construct
  source 1..110: mol_type = other DNA
aggaggtcaaagagctgcaagttagtttgctttcgtctactctttgactacctagttgccaccaaacctttttccaggaccttgtagaaaagtatacagctatgttaagc

SEQ ID NO: 8070 - DNA, 110 bp, synthetic construct
  source 1..110: mol_type = other DNA
ttgccaccaaacctttttccaggaccttgtagaaaagtatacagctatgttaagccacttttcagtcactactcatggtagtggcataacgcagctgtgtactttcctaa

SEQ ID NO: 8071 - DNA, 110 bp, synthetic construct
  source 1..110: mol_type = other DNA
tctgtcatcttatgtaaactcagctgaatgttaattacatgtatattttggcctcacttaatagaagttaaaagttcatttgcaatgcatttattacagagtcgaggagg

SEQ ID NO: 8072 - DNA, 110 bp, synthetic construct; identical to SEQ ID NO: 8071
  source 1..110: mol_type = other DNA

SEQ ID NO: 8073 - DNA, 110 bp, synthetic construct
  source 1..110: mol_type = other DNA
ggttctcttttttttttcccagagtcctcaactatgaaatgggtcttgcctgcatcatagaatgatgcactccttcaaggatgtgagctttgtgagagaggttgtttatt

SEQ ID NO: 8074 - DNA, 110 bp, synthetic construct
  source 1..110: mol_type = other DNA
catagaatgatgcactccttcaaggatgtgagctttgtgagagaggttgtttatttcttttaacaagaaactcttaagcagaagtgtcccggctggtctactcagcccag

SEQ ID NO: 8075 - DNA, 110 bp, synthetic construct
  source 1..110: mol_type = other DNA
ctctccaatgtaggggcagcagtttatcctgtggcctctctcctcttacagatctaagaggagttgttgatctttcactttgttcagcttttttacttactcgggcagtg

SEQ ID NO: 8076 - DNA, 110 bp, synthetic construct
  source 1..110: mol_type = other DNA
aagaggagttgttgatctttcactttgttcagcttttttacttactcgggcagtgtggcaacgtccaagctttttccatgctagaccagaaaccagaagtctgatccttt

SEQ ID NO: 8077 - DNA, 110 bp, synthetic construct
  source 1..110: mol_type = other DNA
acttttcagacgtacatattgcccgccccccttttttttaaatcatcaagcttgggttaaattactgtttcctatgctaaaaacatgtcagttttgtaacatcgcatgta

SEQ ID NO: 8078 - DNA, 110 bp, synthetic construct
  source 1..110: mol_type = other DNA
taaagctgtattcagggcttgtcttgatgctctttaccaagacactcttcaaaacactttaagagacaccaatccaagctccgagctggttacatactgcctagatttgt

SEQ ID NO: 8079 - DNA, 110 bp, synthetic construct
  source 1..110: mol_type = other DNA
tggcaagttgggtgagcgtgatccatcgcagtcatggaatgtttcactacctattgatgtgttggatgaataggggtgacgccggccagaggggctcacgggcaaaggaa

SEQ ID NO: 8080 - DNA, 110 bp, synthetic construct
  source 1..110: mol_type = other DNA
gatgtgttggatgaataggggtgacgccggccagaggggctcacgggcaaaggaagaaggtataatggtgagtaggctacaccagcgttttggtgctgagggcatgtgtc

SEQ ID NO: 8081 - DNA, 110 bp, synthetic construct
  source 1..110: mol_type = other DNA
cagggcaccatatccaatcgcttgtgatagaccatgatggaaaatagtatgagaaaaagactgcgtatctatgtatggctgggttgccatgctgtacagcagcaattgac

SEQ ID NO: 8082 - DNA, 110 bp, synthetic construct; identical to SEQ ID NO: 8081
  source 1..110: mol_type = other DNA

SEQ ID NO: 8083 - DNA, 110 bp, synthetic construct
  source 1..110: mol_type = other DNA
gggagcagaaagccgcacacactgtaaggtaaatactgggaggaatgggaacatgaaaagggatgcacaataggccctgggaactgggaggatgtgggcagatttccaag

SEQ ID NO: 8084 - DNA, 110 bp, synthetic construct
  source 1..110: mol_type = other DNA
catgctcagttgctatgtcctcaacgtgaatagtttttcattaaagctgctcctaactctccaacccataaactcttcagtcacaaccaaggtggacaatgccatggaaa

SEQ ID NO: 8085 - DNA, 110 bp, synthetic construct
  source 1..110: mol_type = other DNA
ggaaaccagggaggggcaggccccttactgcccctttaataacaaccatcacaagctgggcctgggggcaagtacttgggaaggtcagtcatgtaaatagggtccaggtg

SEQ ID NO: 8086 - DNA, 110 bp, synthetic construct
  source 1..110: mol_type = other DNA
ctgggcctgggggcaagtacttgggaaggtcagtcatgtaaatagggtccaggtgaggcaggcactggtcgggctggggatggacggagagcaagagaacagccatcttg

SEQ ID NO: 8087 - DNA, 110 bp, synthetic construct
  source 1..110: mol_type = other DNA
catattctgtgaatcagaagcagagaaaacaaaggaacttcttcatgaatgtcaaaatgtcctaggagtgactgagttcctcggtgaggataggctgttcatttcatcag

SEQ ID NO: 8088 - DNA, 110 bp, synthetic construct
  source 1..110: mol_type = other DNA
aatgtcctaggagtgactgagttcctcggtgaggataggctgttcatttcatcaggcgaggactcacgggtacgaaaaacaaagcattgagctaagaccccatcctagag

SEQ ID NO: 8089 - DNA, 110 bp, synthetic construct
  source 1..110: mol_type = other DNA
ccagtctggggtctacgtgcttgtgggcagcatccagtgacttcgccaaccttgttggggcttccgtacccacaaaacagctccaagaacatggctcagaatattatcta

SEQ ID NO: 8090 - DNA, 110 bp, synthetic construct; identical to SEQ ID NO: 8089
  source 1..110: mol_type = other DNA

SEQ ID NO: 8091 - DNA, 110 bp, synthetic construct
  source 1..110: mol_type = other DNA
tctcacttttccttcctttaaactttcttccttttgttttgaatgcagatattttattaaactctgagcagaatctttcacatttcactcttaagtaacatcatgtagct

SEQ ID NO: 8092 - DNA, 110 bp, synthetic construct
  source 1..110: mol_type = other DNA
tttatcttctttcctccaaactgaagatgtaccctatcactaagcaaaaatataatgatcacagaaagctctcttcattaacatagtagcattttcctgtgtttttcatt

SEQ ID NO: 8093 - DNA, 110 bp, synthetic construct
  source 1..110: mol_type = other DNA
tgatcacagaaagctctcttcattaacatagtagcattttcctgtgtttttcattaaagcattaaaaatgcagatttccttcatgtctgaaagcaagcatttagaagtta

SEQ ID NO: 8094 - DNA, 110 bp, synthetic construct
  source 1..110: mol_type = other DNA
cactggatgcgagccacatctgtgacctgtgccacagcttttggcatcaccagatccttaacccactgcacgaggccaggtagcgaacccgaatcatcatagacactatg

SEQ ID NO: 8095 - DNA, 110 bp, synthetic construct
  source 1..110: mol_type = other DNA
acatctgtgacctgtgccacagcttttggcatcaccagatccttaacccactgcacgaggccaggtagcgaacccgaatcatcatagacactatgtcgggtttttaaccc

SEQ ID NO: 8096 - DNA, 110 bp, synthetic construct
  source 1..110: mol_type = other DNA
gtaacacggtcacagttcccagtataagagccatgacatttctctgtgtgttgactaaggtgcaagatgccagcttcaatgtgtcatctgttaaaagtgtgggttttcac

SEQ ID NO: 8097 - DNA, 110 bp, synthetic construct
  source 1..110: mol_type = other DNA
cctctcaaggccgggtcactttttttttttttttttaacgaccacacctgcggcatagggacgttccagggctagagatccaattggagctgcagctgccagccttcatc

SEQ ID NO: 8098 - DNA, 110 bp, synthetic construct
  source 1..110: mol_type = other DNA
tcactttttttttttttttttaacgaccacacctgcggcatagggacgttccagggctagagatccaattggagctgcagctgccagccttcatcacagccatagcaatg

SEQ ID NO: 8099 - DNA, 110 bp, synthetic construct
  source 1..110: mol_type = other DNA
aggtgaggacttcacctgcggaaggtgtagccaactccagctcctttcatctttggttgtgtgtttaccaaatgcccgtgatcagtggctttgtgaattgatgtcttttt

SEQ ID NO: 8100 - DNA, 110 bp, synthetic construct
  source 1..110: mol_type = other DNA
gataactcagctatgaacctcacaagtgttctaggagcccaagcaatccctcagcctactgacttcttatagcccagtgcacgcccctcaggggaactcaaagacttgct

SEQ ID NO: 8101 - DNA, 110 bp, synthetic construct
  source 1..110: mol_type = other DNA
ctactgacttcttatagcccagtgcacgcccctcaggggaactcaaagacttgcttgactagagaagaaagttcattgaagttggggaatgtcttgtggctcgcagtatt

SEQ ID NO: 8102 - DNA, 110 bp, synthetic construct; identical to SEQ ID NO: 8100
  source 1..110: mol_type = other DNA

SEQ ID NO: 8103 - DNA, 110 bp, synthetic construct; identical to SEQ ID NO: 8101
  source 1..110: mol_type = other DNA

SEQ ID NO: 8104 - DNA, 110 bp, synthetic construct
  source 1..110: mol_type = other DNA
tggtaatgctaacgctgctgttcccttggccactgagtcacacatacgagccctagggctccgagaagctgagcgggaatatcccgcagaagatggagctgcgctgtcct

SEQ ID NO: 8105 - DNA, 110 bp, synthetic construct
  source 1..110: mol_type = other DNA
atgcagtcacattcctactttctttctttctttttatggctgcacctacagcatatggaagttcctggaccagggactgaattcaaaccacagatgcagcaatgctggat

SEQ ID NO: 8106 - DNA, 110 bp, synthetic construct
  source 1..110: mol_type = other DNA
tggaagttcctggaccagggactgaattcaaaccacagatgcagcaatgctggatactttaacccactgtactgggcaggggatcaaacctgcaacttgcagcatcctga

SEQ ID NO: 8107 - DNA, 110 bp, synthetic construct
  source 1..110: mol_type = other DNA
aaatatttcatttctttgtttcttctagtatgtaaagaattcttgagccgattctacaattccttgatagccagaggggtcaacttttctgtggacaccatagaaaaaga

SEQ ID NO: 8108 - DNA, 110 bp, synthetic construct
  source 1..110: mol_type = other DNA
acaattccttgatagccagaggggtcaacttttctgtggacaccatagaaaaagaattgatcagcctttgcttggatgtcaaaggaaaagaaaaccgcctggtatggtaa

SEQ ID NO: 8109 - DNA, 110 bp, synthetic construct; identical to SEQ ID NO: 8107
  source 1..110: mol_type = other DNA

SEQ ID NO: 8110 - DNA, 110 bp, synthetic construct; identical to SEQ ID NO: 8108
  source 1..110: mol_type = other DNA

SEQ ID NO: 8111 - DNA, 110 bp, synthetic construct
  source 1..110: mol_type = other DNA
agcagttagcatgaagtctaacttgggagctctcaagttctcattcatctctcaggtcaacaaaccttaatggcagctggatgcatgcggtgttagctgctgggtttgcc

SEQ ID NO: 8112 - DNA, 110 bp, synthetic construct
  source 1..110: mol_type = other DNA
gtcaacaaaccttaatggcagctggatgcatgcggtgttagctgctgggtttgccgcaaataacccaaccctcatggtgccttggagctgcttgccgttagttagggaca

SEQ ID NO: 8113 - DNA, 110 bp, synthetic construct
  source 1..110: mol_type = other DNA
gagctgcagctgttggcctacaccacagtcgcagcaaccctgggtccgagccacatctggaacctacactggaactcaaggacatgccagatccttaaccccctgagcaa

SEQ ID NO: 8114 - DNA, 110 bp, synthetic construct; identical to SEQ ID NO: 8113
  source 1..110: mol_type = other DNA

SEQ ID NO: 8115 - DNA, 110 bp, synthetic construct
  source 1..110: mol_type = other DNA
tggattaagtgcttgtgcattagggaccttgctcagagctttacatggatttcgtattactgcccttaacaaatatggacgaggttctttattaccctactaggcaggta

SEQ ID NO: 8116 - DNA, 110 bp, synthetic construct
  source 1..110: mol_type = other DNA
gctgattgtggaaaaacatggtggtataagggggttgtttctcggatatttgaaatgtgctctagaatgagcttaaagagcaactacctggggatcccagggcaacttga

SEQ ID NO: 8117 - DNA, 110 bp, synthetic construct
  source 1..110: mol_type = other DNA
taaccccaggcctggcttaattctgtctcttccacaacttgaaagcacggtcatcctaaacagaagtacttgaattgttcttgagttgagatttttctgcacctattttt

SEQ ID NO: 8118 - DNA, 110 bp, synthetic construct
  source 1..110: mol_type = other DNA
tccttggccactcactccatcgaccccagtgtggtgtgcgtacaccactctcaaaccccaaagatggtatttttgagctgccttttccttagaggggcttttaaggtaac

SEQ ID NO: 8119 - DNA, 110 bp, synthetic construct
  source 1..110: mol_type = other DNA
ggggtgctgagttcaattcaaggattagaggtggttctagggtttccctttgatgacctttcccctaaaccaggtacatctttttgctttgtgtccatcaggactggcaa

SEQ ID NO: 8120 - DNA, 110 bp, synthetic construct
  source 1..110: mol_type = other DNA
acctttcccctaaaccaggtacatctttttgctttgtgtccatcaggactggcaatttatgatgtccaacaaattcatgctaagattagttatgctacactttgcttaaa

SEQ ID NO: 8121 - DNA, 110 bp, synthetic construct
  source 1..110: mol_type = other DNA
ctgtcagactgtgccttgttgagagagtcctgggattccagagagcagagaggcccctgtctcagtcagcttgggcagctaggacaaagtcccacaccctgggtggctta

SEQ ID NO: 8122 - DNA, 110 bp, synthetic construct
  source 1..110: mol_type = other DNA
cctgtctcagtcagcttgggcagctaggacaaagtcccacaccctgggtggcttagacaacaggcattcctgtctcatggttttggaggctgggtgtccaagatcaatgt

SEQ ID NO: 8123 - DNA, 110 bp, synthetic construct
  source 1..110: mol_type = other DNA
cagcaattgggttttcgcctatggaaaggaaatggccagctaaccaagctgctgtcgtcagagagccttttaaacggagctttgcaaatgtgtccatgcagcctgcggta

SEQ ID NO: 8124 - DNA, 110 bp, synthetic construct
  source 1..110: mol_type = other DNA
ttccagcaagttcccaggagacgatgctgtacatgatgtggcccctctttgagagccaccacacaaagacacgaaacattgcgccttggggttgtagagaagctgattta

SEQ ID NO: 8125 - DNA, 110 bp, synthetic construct
  source 1..110: mol_type = other DNA
ccaccacacaaagacacgaaacattgcgccttggggttgtagagaagctgatttagagtctttctaatggtagtagttgcagctgctgttccctgtggctggtgattagg

SEQ ID NO: 8126 - DNA, 110 bp, synthetic construct
  source 1..110: mol_type = other DNA
gagtcacttaggtgacatgctgcggattgctccaacaaaccctccttaactatagactggggatctaaaacatgcatttcccaatctcccttgcagctggggttctgcat

SEQ ID NO: 8127 - DNA, 110 bp, synthetic construct
  source 1..110: mol_type = other DNA
actggggatctaaaacatgcatttcccaatctcccttgcagctggggttctgcatgtgatctggtttacccaagcaagctctctggcaccacatttggaggagtgaagtg

SEQ ID NO: 8128 - DNA, 110 bp, synthetic construct
  source 1..110: mol_type = other DNA
cataaatatggaaactaggcaggtgagctaaggaagccctgctggaggaattcgctctgtgggtctgtggtatgctttgctcctctccccaagtctgaccctttactgta

SEQ ID NO: 8129 - DNA, 110 bp, synthetic construct
  source 1..110: mol_type = other DNA
ggtgtcacacatggtcttccattttacacgagtccctgccagtccctctgcacgcacacacccacgactttgaccccggagctgcttagagcagcctcatctctgctcca

SEQ ID NO: 8130 - DNA, 110 bp, synthetic construct
  source 1..110: mol_type = other DNA
gcttgaagggatgtactttgcacagacgacgtaatgctgtcgcacatttactacattctagtgtaaacagagcttttccattcgctgggaaaacagaaaatgcatgtgac

SEQ ID NO: 8131 - DNA, 110 bp, synthetic construct
  source 1..110: mol_type = other DNA
ttctagtgtaaacagagcttttccattcgctgggaaaacagaaaatgcatgtgactcactttatcatgatattccttgattgaggtggtctggaactgaacttgcagtat

SEQ ID NO: 8132 - DNA, 110 bp, synthetic construct
  source 1..110: mol_type = other DNA
ggggctgttggtagatgtgggaccatgatggttgcagaatttgatcataaaaagagaagatctgaatgcctgacttagagacatttccccagctgctcttggctggaagt

SEQ ID NO: 8133 - DNA, 110 bp, synthetic construct
  source 1..110: mol_type = other DNA
gaagatctgaatgcctgacttagagacatttccccagctgctcttggctggaagttaccaccatcttaataaggaggagttggtctttagcatcaagctcacactatggt

SEQ ID NO: 8134 - DNA, 110 bp, synthetic construct
  source 1..110: mol_type = other DNA
cagtcagctgcactgcagtgctaaatgccgtccctgcagcttcgtaaccatggggtacattccctcgccacgcattgtgcctgtttttctttccttctccaatgactctg

SEQ ID NO: 8135 - DNA, 110 bp, synthetic construct
  source 1..110: mol_type = other DNA
tacattccctcgccacgcattgtgcctgtttttctttccttctccaatgactctgagattgtgattatccagttctctggtttgggagacttagtctaagtcccaggaga

SEQ ID NO: 8136 - DNA, 110 bp, synthetic construct
  source 1..110: mol_type = other DNA
aggatggccgccctgtctttagggtcatatcctttttttttggctgccctgtggcacatggagttcatgggccagggctcagatccaagctgcacttgccacctccgagg

SEQ ID NO: 8137 - DNA, 110 bp, synthetic construct
  source 1..110: mol_type = other DNA
acatggagttcatgggccagggctcagatccaagctgcacttgccacctccgaggcagctgtgggcaaagctagatcctttaacccagtgagctggaccagggatcaaac

SEQ ID NO: 8138 - DNA, 110 bp, synthetic construct
  source 1..110: mol_type = other DNA
acatggtaggtattcaatagatagttgttgaatgaatgaatgaaccaagatatggcacgaaaacatggatagtccaaaggagcttcagagccctgtggtagacaagtggt

SEQ ID NO: 8139 - DNA, 110 bp, synthetic construct
  source 1..110: mol_type = other DNA
aagttgcaagtaaaagtatgcttttaaatgtcctatctcggaattcccatcgtggtgcaacggaaatgaatccgactagtattcttgaggatgcaggtgtgatccctggc

SEQ ID NO: 8140 - DNA, 110 bp, synthetic construct; identical to SEQ ID NO: 8139
  source 1..110: mol_type = other DNA

SEQ ID NO: 8141 - DNA, 110 bp, synthetic construct
  source 1..110: mol_type = other DNA
ctttaaaaaaacactgcatgccaaatcagatgtgtttacaagctgcatttggcaaacaagatgccagttttcaacttgaacaataaaatgagcacgtcccaccccaaata

SEQ ID NO: 8142 - DNA, 110 bp, synthetic construct
  source 1..110: mol_type = other DNA
actaccaacttagaaacaggggagtcttctctccactgcccggttgagaacaccttgaacattaagcagaccaaagagtgttatgctctgtcacatctctgccaatagac

SEQ ID NO: 8143 - DNA, 110 bp, synthetic construct
  source 1..110: mol_type = other DNA
gctaggggggagaataatgaatggcattgggcttcattctaaatagaaatcatcagagttcccatcgtggctcagtggaaactaatctggctagactccatgaggatgca

SEQ ID NO: 8144 - DNA, 110 bp, synthetic construct; identical to SEQ ID NO: 8143
  source 1..110: mol_type = other DNA

SEQ ID NO: 8145 - DNA, 110 bp, synthetic construct
  source 1..110: mol_type = other DNA
acagcaaaccaagaggatctctagtccattagccaatctcttttcaaacctcagggacctcagactttcagtgaaggaagataactaaaggtgttgttattttatctcca

SEQ ID NO: 8146 - DNA, 110 bp, synthetic construct
  source 1..110: mol_type = other DNA
gacctcagactttcagtgaaggaagataactaaaggtgttgttattttatctccagcaggttactcaagactgtttcccattgactcttttcattcatttctagaacttt

SEQ ID NO: 8147 - DNA, 110 bp, synthetic construct
  source 1..110: mol_type = other DNA
tgatcagacatgtattggcagcatctaccattttcgtttttcgtttttgctttgcccaggacgtttaatctcaggagctaatgtgatagctcctgggactctgggctcca

SEQ ID NO: 8148 - DNA, 110 bp, synthetic construct
  source 1..110: mol_type = other DNA
ccaggacgtttaatctcaggagctaatgtgatagctcctgggactctgggctccagggtcaccattgcacacaaagcctgctggtttcaccactctcctctgcaagaagt

SEQ ID NO: 8149 - DNA, 110 bp, synthetic construct
  source 1..110: mol_type = other DNA
tctgcttcttgagatgccccagctcaaggcctctcccagcacttgaaataagttggtattatgctctcttggcagaatttcttctttgatgatagagtacattggagtcc

SEQ ID NO: 8150 - DNA, 110 bp, synthetic construct
  source 1..110: mol_type = other DNA
acggttaatacagaaccaggctcggagctgtccccgcagagcctctgaacctctgagacatcattcatctccttaggtcgacccagagccccgggaatttctttgtgcac

SEQ ID NO: 8151 - DNA, 110 bp, synthetic construct
  source 1..110: mol_type = other DNA
gctggtaggggaagagagaggtcagataccttatccaaaaggtcagtttacctcccagcgtccaaatcacatcacggaagatgggattccctgataaacatccattctct

SEQ ID NO: 8152 - DNA, 110 bp, synthetic construct
  source 1..110: mol_type = other DNA
cagcgtccaaatcacatcacggaagatgggattccctgataaacatccattctctgtaccagcccagggtcagtgtgcttgagcgggcagaagttcggggataagagcaa

SEQ ID NO: 8153 - DNA, 110 bp, synthetic construct
  source 1..110: mol_type = other DNA
aagccgtgtacacacagcctgtggaataacaggcttagaaaactccccgcccaggtttcctcttgagtcttatctgctcctacagggagggcttcagctatgagcaccgg

SEQ ID NO: 8154 - DNA, 110 bp, synthetic construct
  source 1..110: mol_type = other DNA
tttcctcttgagtcttatctgctcctacagggagggcttcagctatgagcaccggccccaggggggatacacacagaaaagtacttccgtctgggccgtcagtcccatgt

SEQ ID NO: 8155 - DNA, 110 bp, synthetic construct
  source 1..110: mol_type = other DNA
ccgtgaccccaaggcctgcagcaaggaagttctgcttctcggtgatggcgcccatccctggacccacctggaacttggcttgaagtcccgaaagtgggcgtgtccaggga

SEQ ID NO: 8156 - DNA, 110 bp, synthetic construct
  source 1..110: mol_type = other DNA
ccctggacccacctggaacttggcttgaagtcccgaaagtgggcgtgtccagggaaccagctgcccggattggaggggcggggccactgcagggcagggcggggccaggg

SEQ ID NO: 8157 - DNA, 110 bp, synthetic construct
  source 1..110: mol_type = other DNA
atttaccaaggaatttacaaacttaaggttactgaatacgacttgaccagagatgactattattggacattttgccttttggaatagtgaaaacttgagaaaaattaatt

SEQ ID NO: 8158 - DNA, 110 bp, synthetic construct
  source 1..110: mol_type = other DNA
tggcctggcaattaagatcaagcattttgtacttcccattgtgactcagcaataatgaaactgactggtgtccatgaggaagtaggttcaaaccctggccttgctcagtc

SEQ ID NO: 8159 - DNA, 110 bp, synthetic construct
  source 1..110: mol_type = other DNA
tttgtacttcccattgtgactcagcaataatgaaactgactggtgtccatgaggaagtaggttcaaaccctggccttgctcagtcagttggggatccagtgttgccatga

SEQ ID NO: 8160 - DNA, 110 bp, synthetic construct
  source 1..110: mol_type = other DNA
tttctccacaaattgagaattagctgaaagctgatttgggttgagggaaggaaagaggcaagagaaattcagagcaggtggtacactattcgccatggtatttgttggga

SEQ ID NO: 8161 - DNA, 110 bp, synthetic construct
  source 1..110: mol_type = other DNA
gggcactttgatcttctgccacctgcatagggacacacctgtttcctccacgagctcctcaggagcagaggccacgtgtgtccggcctaagtatttaggacagggtgcgg

SEQ ID NO: 8162 - DNA, 110 bp, synthetic construct
  source 1..110: mol_type = other DNA
tcctcaggagcagaggccacgtgtgtccggcctaagtatttaggacagggtgcggcaaggcgtggacacacggcagtatttgttgagtgaaccaacaactcaatgaatgg

SEQ ID NO: 8163 - DNA, 110 bp, synthetic construct
  source 1..110: mol_type = other DNA
tcccccactcggaccccaggctcacgtccatattgtcacctgtgcttctgaccatctggctataaatcggaggttgccacaaacttctcaggttcaaggaacttgctaga

SEQ ID NO: 8164 - DNA, 110 bp, synthetic construct
  source 1..110: mol_type = other DNA
gtccatattgtcacctgtgcttctgaccatctggctataaatcggaggttgccacaaacttctcaggttcaaggaacttgctagagcagctcacagaactcagagaaaca

SEQ ID NO: 8165 - DNA, 110 bp, synthetic construct
  source 1..110: mol_type = other DNA
agatgcctgtgagacatctcattgacaaggtcaagtaagcagttatgaacatctgtctacccacagctcaggaaaggatgaaggtgtaggtataaagctggaattcatca

SEQ ID NO: 8166 - DNA, 110 bp, synthetic construct
  source 1..110: mol_type = other DNA
aggagtctgtggatgttttgtagttagggtgggtgacttgatcagctttctttcataaggttttgatttctttgcttttctttcattatttaatggtcgtgttctgtctc

SEQ ID NO: 8167 - DNA, 110 bp, synthetic construct
  source 1..110: mol_type = other DNA
actggagaatctcaaatttgaccagagcctttaattaatcaaactttttttgtggcgggggaatactaagctctgtgtccaaaccagttgcagaggaataaaccacaata

SEQ ID NO: 8168 - DNA, 110 bp, synthetic construct; identical to SEQ ID NO: 8167
  source 1..110: mol_type = other DNA

SEQ ID NO: 8169 - DNA, 110 bp, synthetic construct
  source 1..110: mol_type = other DNA
ctctgctcagggacccccccttaagggtctccctctgacaggctggaggcgaaatctcagctccattatttacttaccatgtgagttacttaatacctccaggcctcagt

SEQ ID NO: 8170 - DNA, 110 bp, synthetic construct
  source 1..110: mol_type = other DNA
ctcagctccattatttacttaccatgtgagttacttaatacctccaggcctcagtttctttatttgtaaggtggtcctggttattggggagaaacctattcagacttggt

SEQ ID NO: 8171 - DNA, 110 bp, synthetic construct
  source 1..110: mol_type = other DNA
gggacagcattaatagacacagctcctttctcctggccccacaaagggctattttgtgtgcagaaccctcctggctggtctctgggaccattctcagtgcagagttaaga

SEQ ID NO: 8172 - DNA, 110 bp, synthetic construct
  source 1..110: mol_type = other DNA
tcagcaggggagaaggaagtacttcatgtcctcttaaaggtcagagagagaatttcaacattataagagcaaatatgaaccaatgatagctatctgtaagtcattaatgc

SEQ ID NO: 8173 - DNA, 110 bp, synthetic construct
  source 1..110: mol_type = other DNA
aaaggtcagagagagaatttcaacattataagagcaaatatgaaccaatgatagctatctgtaagtcattaatgcaaagcatgttaaacattagcttaccgaatacatta

SEQ ID NO: 8174 - DNA, 110 bp, synthetic construct
  source 1..110: mol_type = other DNA
gcacctttttatatgcctcttggccatttgtctatcttcttgaaggaaacattggttgagatccttttcttgagagaagctggaggcagctcatagaccactgcagggtc

SEQ ID NO: 8175 - DNA, 110 bp, synthetic construct
  source 1..110: mol_type = other DNA
tccagctcttcagtttaggatgaaaacaccctatcacaaggaatcttggtctataggcactgtatttgaaagcgtgtaaaacctgtcaaacaaactctggccctatctct

SEQ ID NO: 8176 - DNA, 110 bp, synthetic construct
  source 1..110: mol_type = other DNA
ataaaacacttgtaactaaagaacagcaacaacatgaatataacgaaatgaagttagttgagccataccttgtttcttgcttcaatatcggcattgtatgaaagcagctt

SEQ ID NO: 8177 - DNA, 110 bp, synthetic construct
  source 1..110: mol_type = other DNA
gtcagcttccctctttttcctttttggacttttccttttaccctcttccttcttcctgaaaatttgttgaagtggttagatatagaacagctgtctttcccattgtgaca

SEQ ID NO: 8178 - DNA, 110 bp, synthetic construct
  source 1..110: mol_type = other DNA
ctgaaaatttgttgaagtggttagatatagaacagctgtctttcccattgtgacaagagacaagagtcctgtggcaaggaggtgaaaagtgaagaaaaggagcccgggtc

SEQ ID NO: 8179 - DNA, 110 bp, synthetic construct; identical to SEQ ID NO: 8177
  source 1..110: mol_type = other DNA

SEQ ID NO: 8180 - DNA, 110 bp, synthetic construct; identical to SEQ ID NO: 8178
  source 1..110: mol_type = other DNA

SEQ ID NO: 8181 - DNA, 110 bp, synthetic construct
  source 1..110: mol_type = other DNA
cattctgtccacacttttgaccaactggtcacaaatctgggaaagattcccacagctcccctcagatttgttaatttatagaacgacagaattcagaaaagcactatctt

SEQ ID NO: 8182 - DNA, 110 bp, synthetic construct
  source 1..110: mol_type = other DNA
ctcccctcagatttgttaatttatagaacgacagaattcagaaaagcactatcttcaggattgcagttttatttttaaaggatacagatcagggccagacaaatgaagag

SEQ ID NO: 8183 - DNA, 110 bp, synthetic construct
  source 1..110: mol_type = other DNA
aagcgaataagacagggcctgtggctaagccgagcttcaggtcggccgaggtcggtttgcccatctggtcagaacacgaggtaaagtccaggacgtcgtctatgagctgg

SEQ ID NO: 8184 - DNA, 110 bp, synthetic construct
  source 1..110: mol_type = other DNA
tttgcccatctggtcagaacacgaggtaaagtccaggacgtcgtctatgagctggtgagagggggaaagggctgtcaccagcaccaccacgcccgcgtccctgccacctg

SEQ ID NO: 8185 - DNA, 110 bp, synthetic construct; identical to SEQ ID NO: 8183
  source 1..110: mol_type = other DNA

SEQ ID NO: 8186 - DNA, 110 bp, synthetic construct; identical to SEQ ID NO: 8184
  source 1..110: mol_type = other DNA

SEQ ID NO: 8187 - DNA, 110 bp, synthetic construct
  source 1..110: mol_type = other DNA
attctcattttcttttgaccctagctgaagaaattcacctatagagaatgaaaggggtcatttgagataatagtttattttgcctggaaaactacaaaggttgaataaaa

SEQ ID NO: 8188 - DNA, 110 bp, synthetic construct
  source 1..110: mol_type = other DNA
tctgctaccaggaattcagggtcttgccctgtcttaattgtcatctcctactcgagtgggccattttggagatggatggccccgggaaggaatatttctgtgtaacctta

SEQ ID NO: 8189 - DNA, 110 bp, synthetic construct
  source 1..110: mol_type = other DNA
tgatagtgctacactgtgtttttgttttagtgaaagtacaaaacccacaaagaaaaatccaagctggaggtcacacagggcaatccttagaaagtattgattgttcttgg

SEQ ID NO: 8190 - DNA, 110 bp, synthetic construct
  source 1..110: mol_type = other DNA
aatccaagctggaggtcacacagggcaatccttagaaagtattgattgttcttgggtgagaatccgggcaagttctgtagcaagcagcacaattcaaaagtttatggcaa

SEQ ID NO: 8191 - DNA, 110 bp, synthetic construct
  source 1..110: mol_type = other DNA
ccacaagggaactctgactcaattttaattttaattgaactgattaaagtatttagctacaatgagtgtgtcaaggaaatctgcattattcataagtgccagtatatgtt

SEQ ID NO: 8192 - DNA, 110 bp, synthetic construct
  source 1..110: mol_type = other DNA
gctgttcaagacttcctggctgaggtcacaaacatcatggagctaagaacagctagccctgcagtggccttgtccaagctccggacccacagaatgagtgaccataataa

SEQ ID NO: 8193 - DNA, 110 bp, synthetic construct
  source 1..110: mol_type = other DNA
gccctgcagtggccttgtccaagctccggacccacagaatgagtgaccataataaaattatctattctatggcactgagtttgaatggtttgtcatgcagctgttgatag

SEQ ID NO: 8194 - DNA, 110 bp, synthetic construct
  source 1..110: mol_type = other DNA
tgacagaatcttcccttgacttcagacataaggcacactaaggagtctgtccgtttacaaaaaccactgacttgaggaccaacggtaacaggattggaaagaactgattc

SEQ ID NO: 8195 - DNA, 110 bp, synthetic construct
  source 1..110: mol_type = other DNA
tacaaaaaccactgacttgaggaccaacggtaacaggattggaaagaactgattcaagattgtggggggccagtctgaaaaaagctaggttagctgggggctgttgcagc

SEQ ID NO: 8196 - DNA, 110 bp, synthetic construct
  source 1..110: mol_type = other DNA
ttaaatgggaagagaatcttattgtcagtctgaccaatcatttttaaagaacttgcagtgctcttttgcgtttgttttataatactaactttggagaggtgataagccat

SEQ ID NO: 8197 - DNA, 110 bp, synthetic construct
  source 1..110: mol_type = other DNA
cagtgctcttttgcgtttgttttataatactaactttggagaggtgataagccataaagtgaacagaaagaaggggacataccttttgagaattttgtgggcctatgttt

SEQ ID NO: 8198 - DNA, 110 bp, synthetic construct
  source 1..110: mol_type = other DNA
ttaagtgtcttactggccacaacagaatttgaagctcaagtcttcaggctctgcaatctgtcagtgtgggttttggaaagtaactttctcctcctgtgcttcagtgtccc

SEQ ID NO: 8199 - DNA, 110 bp, synthetic construct
  source 1..110: mol_type = other DNA
gacgcaatggaacatgatgttacagagtcagtctttaggtggcagcaaaggtttaattaaccttgtggtttattggactatcatatgagaaggagggaaaccatcctgct

SEQ ID NO: 8200 - DNA, 110 bp, synthetic construct
  source 1..110: mol_type = other DNA
attaaccttgtggtttattggactatcatatgagaaggagggaaaccatcctgctgctgcttttttggggcagagggtggggtgggggatgcatatgaaaattaataatt

SEQ ID NO: 8201 - DNA, 110 bp, synthetic construct
  source 1..110: mol_type = other DNA
gagatttgtactggacaggaggagtgaaagcacttttccaaccaaccccgggaggttcacctcccactctctctcttcccttttctccaaagaagtagacagaggaggag

SEQ ID NO: 8202 - DNA, 110 bp, synthetic construct
  source 1..110: mol_type = other DNA
gccagtatactatatatacttccaagttgctgaaacatagcacagaaatattcacatcactctccccttgaggatggcaaggcagtgactgtgggtgtggacagactagc

SEQ ID NO: 8203 - DNA, 110 bp, synthetic construct
  source 1..110: mol_type = other DNA
atcactctccccttgaggatggcaaggcagtgactgtgggtgtggacagactagcctccagcataataaggtcatcccacagactatgacatcaaattcaagcaactcaa

SEQ ID NO: 8204 - DNA, 110 bp, synthetic construct
  source 1..110: mol_type = other DNA
attggcatctccatctccgtatctggtttccggttcctcctcatcttcccactgtcacatttttgagtcttccaagcttcggcttccttagacctatttccatctcatca

SEQ ID NO: 8205 - DNA, 110 bp, synthetic construct
  source 1..110: mol_type = other DNA
attaatagctttatttccaggagtaaagagagaactaatagctcatggcatggcgtggcaacagcaatacacaaaacatcaccattgatcatttgtaattaaacacttac

SEQ ID NO: 8206 - DNA, 110 bp, synthetic construct
  source 1..110: mol_type = other DNA
agatcagccctgcatcctcagggttactaatcagattcatttccaatgagccatgacgggaactcctattccaggtaatttctaaggtaactgtgtgggctccatttatt

SEQ ID NO: 8207 - DNA, 110 bp, synthetic construct
  source 1..110: mol_type = other DNA
aacaacgcaggatgagatcgttgccttggtagccggacacgtctatctttccggtaccaactatcttttcctgttcagtaacacctcacgtccctgccatttcattgtgt

SEQ ID NO: 8208 - DNA, 110 bp, synthetic construct
  source 1..110: mol_type = other DNA
ggactgtgactctgattgctgacaggaatgcatgcttcctggccctcgtgatgccaggcaccactggattctgtttcaaaagggagagagtccccttttctagtgacagt

SEQ ID NO: 8209 - DNA, 110 bp, synthetic construct
  source 1..110: mol_type = other DNA
aggcaccactggattctgtttcaaaagggagagagtccccttttctagtgacagtgctcctcttgctacatagttatttgaaagaccctggagacttctatttgaaaaat

SEQ ID NO: 8210 - DNA, 110 bp, synthetic construct
  source 1..110: mol_type = other DNA
aagattcctcttgcttcaggtctttactcatgctattgctcacatgagaaatcactcacccacatttccaaatattaaccaattttttgatgtccagttcaggtcccatc

SEQ ID NO: 8211 - DNA, 110 bp, synthetic construct
  source 1..110: mol_type = other DNA
tacttgtgatttcagaccaagtatttaaaaatcactatccctgaaactttttatcaaagaagagaagctttacctctttgatggcactacctatagctgaaaaaataaag

SEQ ID NO: 8212 - DNA, 110 bp, synthetic construct
  source 1..110: mol_type = other DNA
aaagaagagaagctttacctctttgatggcactacctatagctgaaaaaataaaggtggcttgggaattttctctggaattttttgataattccttttttggggggaggg

SEQ ID NO: 8213 - DNA, 110 bp, synthetic construct
  source 1..110: mol_type = other DNA
gttcaggatctgaagggactggtgtatcacaaagagaacagcaggtcaagaaactagcaaatgctccaaattagaagcagcactgtagctaacagaagtgactgtatggt

SEQ ID NO: 8214 - DNA, 110 bp, synthetic construct
  source 1..110: mol_type = other DNA
agcaaatgctccaaattagaagcagcactgtagctaacagaagtgactgtatggtggaattaaaggatgccaaggtgaccttttagccaaaatgaatccaggcatcctga

SEQ ID NO: 8215 - DNA, 110 bp, synthetic construct; identical to SEQ ID NO: 8213
  source 1..110: mol_type = other DNA

SEQ ID NO: 8216 - DNA, 110 bp, synthetic construct; identical to SEQ ID NO: 8214
  source 1..110: mol_type = other DNA

SEQ ID NO: 8217 - DNA, 110 bp, synthetic construct
  source 1..110: mol_type = other DNA
aaagaactgctttccctttgaaactaatgatgactcttattggaagttggtggatggagttcccatcgtggctcagcggtaacgaacctgactaggatccatgaggatgt

SEQ ID NO: 8218 - DNA, 110 bp, synthetic construct; identical to SEQ ID NO: 8217
  source 1..110: mol_type = other DNA

SEQ ID NO: 8219 - DNA, 110 bp, synthetic construct
  source 1..110: mol_type = other DNA
actcaggaacactatgttgggttcttaactcgctgagccacaatgggaaatcccagggttcacacaggaaagacttctgggaaactagtaacattgtatatcttgatctg

SEQ ID NO: 8220 - DNA, 110 bp, synthetic construct
  source 1..110: mol_type = other DNA
atctttccacatgacctcctcaaatatctcacctgagtaatcttgcagcatgaaaatcttaaggttaattggacttcttacacggcagctgcgagcattccaagaaatca

SEQ ID NO: 8221 - DNA, 110 bp, synthetic construct
  source 1..110: mol_type = other DNA
atcttaaggttaattggacttcttacacggcagctgcgagcattccaagaaatcagggcagaagctgcagggctttttatgacctgtctttggacatgacctcctcaaat

SEQ ID NO: 8222 - DNA, 110 bp, synthetic construct; identical to SEQ ID NO: 8220
  source 1..110: mol_type = other DNA

SEQ ID NO: 8223 - DNA, 110 bp, synthetic construct; identical to SEQ ID NO: 8221
  source 1..110: mol_type = other DNA

SEQ ID NO: 8224 - DNA, 110 bp, synthetic construct
  source 1..110: mol_type = other DNA
gtgctaaacagtccagctaaactccccagaatcctgagagccacaagcacgacggagtcaaagttctgtggtggttaaacaatgcgtgcagcttggggtggttttcccct

SEQ ID NO: 8225 - DNA, 110 bp, synthetic construct
  source 1..110: mol_type = other DNA
ctgaacaatgctggtcaggagaagagataggaagaaactttctcaaatggaaaaataaagagctggctttagtcgagagagtatttaaaaagtcttcagaaagggagatg

SEQ ID NO: 8226 - DNA, 110 bp, synthetic construct
  source 1..110: mol_type = other DNA
taaagagctggctttagtcgagagagtatttaaaaagtcttcagaaagggagatgggaagactttacaaaattaagacaagagagcaggaattcctgttgtggctcagcg

SEQ ID NO: 8227 - DNA, 110 bp, synthetic construct
  source 1..110: mol_type = other DNA
tcatgcacttgttcaatcactgatgaaatgtttattaagtttgtatcacatacgaggcacttgggacatgaaaaagggaggggacatagttcttgtccttatggagctaa

SEQ ID NO: 8228 - DNA, 110 bp, synthetic construct
  source 1..110: mol_type = other DNA
gctgcttttgcagaaccctgagctgcaggacatggaaaaagacaccattgtattcccatggctacgcatgaccatctcgaagcacaacccaccttgcctcctctccaggc

SEQ ID NO: 8229 - DNA, 110 bp, synthetic construct
  source 1..110: mol_type = other DNA
caaagcagctctgtttgaggatctgagggttctgtagtttggggagctcttgagctaggaagcatatccacacccaggccacttcatgcctcctccagaggtttcatgcc

SEQ ID NO: 8230 - DNA, 110 bp, synthetic construct
  source 1..110: mol_type = other DNA
taggaagcatatccacacccaggccacttcatgcctcctccagaggtttcatgccccagcatctatggagagccagagcagcccgtgagaggaatgttgatggacacagg

SEQ ID NO: 8231 - DNA, 110 bp, synthetic construct
  source 1..110: mol_type = other DNA
cagtcacatgcctcgaaactttgagtgaccttcccattgtctactaagcagagcctaagctctttggacgatacgattaaaaggtcttgtactttttagcccctacctgt

SEQ ID NO: 8232 - DNA, 110 bp, synthetic construct
  source 1..110: mol_type = other DNA
tcccttcgtttctgagagctgttggaataagctgccgcttctcacaccaggcggaggaggcttccacttgataaacgaggaaattgcgaacaggccttttgccgcataag

SEQ ID NO: 8233 - DNA, 110 bp, synthetic construct
  source 1..110: mol_type = other DNA
cgccccttgtttaaacaccagaaatttttctaatgtaattgataaagttaggtggtaaagttaggatttttcacaaatagcccttcctttggaagataaagtaaaagact

SEQ ID NO: 8234 - DNA, 110 bp, synthetic construct
  source 1..110: mol_type = other DNA
aaaaagaaaagagaaaaaaaggaaagaaaacgagcttgctggggctggcaactcattatacacgatttccacggcagtgcagtaaggtcgataatttgccttctacgtgt

SEQ ID NO: 8235 - DNA, 110 bp, synthetic construct
  source 1..110: mol_type = other DNA
tgattttaaaaaaatgtttactgtgtttactaattttaagccctaggatgtgccaaaggcagcaagcctgtgctgcagagtcaggacctcaagccatatggcaacagaat

SEQ ID NO: 8236 - DNA, 110 bp, synthetic construct
  source 1..110: mol_type = other DNA
atgtttcttctttatgttgatgttttttatttcctccctctcttgggaggacacggtaaattctccgtcatcttcagaatggaacactatgttcagaaggatccaatttt

SEQ ID NO: 8237 - DNA, 110 bp, synthetic construct
  source 1..110: mol_type = other DNA
tgcaggcaaggtggacacagttgtcagtcacagatcaaggctcacacagcacatggcacaagctaagccacatctgcgctaccatgggcaggggtgttcaggacaagctt

SEQ ID NO: 8238 - DNA, 110 bp, synthetic construct
  source 1..110: mol_type = other DNA
gattaaggtaaaatgacattgtatagatcccaaaagaaacccagggctcccaggtggtgccaagaatggatttgcaggaggtcacagctcggtttccatctgcagcctgt

SEQ ID NO: 8239 - DNA, 110 bp, synthetic construct
  source 1..110: mol_type = other DNA
ttcttgaccttctaggttggcctactgattttgagctttacacccacaaagccgtcttttaactctacttagaggggaattggcccagaaaaaagcaatttctagggctc

SEQ ID NO: 8240 - DNA, 110 bp, synthetic construct
  source 1..110: mol_type = other DNA
actatctcctctcacctattcccgcccatccccaacacatacatacaactcagtgctggaactggacagaaaagcgggggagaaaaaagatcaagagtgttgagtaacag

SEQ ID NO: 8241 - DNA, 110 bp, synthetic construct
  source 1..110: mol_type = other DNA
ctggaactggacagaaaagcgggggagaaaaaagatcaagagtgttgagtaacaggaaagctagaaagcgggtttttttcagggttgtaaatatacttttaatgaagaca

SEQ ID NO: 8242 - DNA, 110 bp, synthetic construct
  source 1..110: mol_type = other DNA
ccacagtatttcaatattttgcccaatttcaatattttgcccaaacagacatactttgggaatcacatatagtgaatgggcagcaatttctttagagaagcccaagaagg

SEQ ID NO: 8243 - DNA, 110 bp, synthetic construct
  source 1..110: mol_type = other DNA
ggaggatgggattaacagagatacattactacatgtaaaacagatgcacaacaaggatttattgtacagcatagggaacattattcaatagcttataataacctatcatt

SEQ ID NO: 8244 - DNA, 110 bp, synthetic construct
  source 1..110: mol_type = other DNA
cagagatacattactacatgtaaaacagatgcacaacaaggatttattgtacagcatagggaacattattcaatagcttataataacctatcattggaaagtatctgaaa

SEQ ID NO: 8245 - DNA, 110 bp, synthetic construct
  source 1..110: mol_type = other DNA
ttggtcagactgggaggtgcagactgtgtccttggacagcgcgtcatcagtgcagatgacggtgtgaagatgctatgcaaatggaagcttatttgcattagaaaaaaaga

SEQ ID NO: 8246 - DNA, 110 bp, synthetic construct
  source 1..110: mol_type = other DNA
caaatctcactcaagttttaagtttaattccttttgtcttaatcaggagcaccaatccgactttttgggccccgtgagtgtagctatggtttcactcatcaatccatcag

SEQ ID NO: 8247 - DNA, 110 bp, synthetic construct
  source 1..110: mol_type = other DNA
caggacctgctctaggtaatatcttgtctgaagtatcagtgatcaagtctaatgcctgtggacaaacacccactctcaatgaccgtcttgaaaagaaagcattttacata

SEQ ID NO: 8248 - DNA, 110 bp, synthetic construct
  source 1..110: mol_type = other DNA
ctgtggacaaacacccactctcaatgaccgtcttgaaaagaaagcattttacatatcatacacaaatgaaaccggatgtccaacaggggtccttatggcccttgaaaagg

SEQ ID NO: 8249 - DNA, 110 bp, synthetic construct
  source 1..110: mol_type = other DNA
tctcagggccatttagaatattatttttggataacatggtctgcaaagggccacatgaaatagggtgaaatgtacagatttatatatgaatataaccataaggaagtata

SEQ ID NO: 8250 - DNA, 110 bp, synthetic construct
  source 1..110: mol_type = other DNA
tatcaacttatctcatcagctctcccttcagagtgtcattaaacagcttgcagagaagatgtaaacacagaatacatgcaaacgggccctagctccacaatgttcagcaa

SEQ ID NO: 8251 - DNA, 110 bp, synthetic construct
  source 1..110: mol_type = other DNA
aagatgtaaacacagaatacatgcaaacgggccctagctccacaatgttcagcaaagaatatgctgattttattaaacaggaagtgaaatgggcaaaataacagccatca

SEQ ID NO: 8252 - DNA, 110 bp, synthetic construct; identical to SEQ ID NO: 8250
  source 1..110: mol_type = other DNA

SEQ ID NO: 8253 - DNA, 110 bp, synthetic construct; identical to SEQ ID NO: 8251
  source 1..110: mol_type = other DNA

SEQ ID NO: 8254 - DNA, 110 bp, synthetic construct
  source 1..110: mol_type = other DNA
agtgagagagaaaaaagaagcaagaagccaaacgtttccaattccagtttaccagggtgacaggatgtgtccctaagctacacgggtaagaaaccctctggtcaccgctt

SEQ ID NO: 8255 - DNA, 110 bp, synthetic construct
  source 1..110: mol_type = other DNA
ggtgacaggatgtgtccctaagctacacgggtaagaaaccctctggtcaccgcttctatgaacctttacaaggaaatgcttttacaagtgagcctttgaaacctacaatt

SEQ ID NO: 8256 - DNA, 110 bp, synthetic construct
  source 1..110: mol_type = other DNA
aagggtgtcaaacatcccttacattatttgcagattctctactggtacagcagttgaggagttcaagtccaaaattcaaaatttgtaacattttagctattcccttaaaa

SEQ ID NO: 8257 - DNA, 110 bp, synthetic construct; identical to SEQ ID NO: 8256
  source 1..110: mol_type = other DNA

SEQ ID NO: 8258 - DNA, 110 bp, synthetic construct
  source 1..110: mol_type = other DNA
aactacattttgagagctgtgttttgttttgttttgttttaatgttttcctccagataggcaaatgcaatctctttcaggcagatcctgaaacacagagatgaacggacc

SEQ ID NO: 8259 - DNA, 110 bp, synthetic construct
  source 1..110: mol_type = other DNA
ataggcaaatgcaatctctttcaggcagatcctgaaacacagagatgaacggaccttctcaggaaagttgaatacaattggagaggaaggcagctctgctggcacagatg

SEQ ID NO: 8260 - DNA, 110 bp, synthetic construct
  source 1..110: mol_type = other DNA
ggaacacagccctgccaacaccttgattttgttcttgtaagactttaagtggaggacccagctgaggcctgctgtaccaggactcctgatctacagggctctgagataat

SEQ ID NO: 8261 - DNA, 110 bp, synthetic construct
  source 1..110: mol_type = other DNA
caaatatttcgaaaaggcagtctttgttgaagtcagcaaatgccgccaggctgttgactgaaacaaagatggaaaatgcggtggacttaataaaaaaagagatggataga

SEQ ID NO: 8262 - DNA, 110 bp, synthetic construct
  source 1..110: mol_type = other DNA
gactgaaacaaagatggaaaatgcggtggacttaataaaaaaagagatggatagatgggggccctggttgtacgaatgtttgtctgggctgagtcaggacacatctagga

SEQ ID NO: 8263 - DNA, 110 bp, synthetic construct
  source 1..110: mol_type = other DNA
tgcccaggcatttccgataaggtagaaacagctcagctcaccctggactttgccctaatcaatgtgagggcagctcacaggggtccacccaccaccaatgtggtccaaca

SEQ ID NO: 8264 - DNA, 110 bp, synthetic construct
  source 1..110: mol_type = other DNA
caaattgcctctgaagcaatcagcatgaaagtctcagcccaaagcaacaggtaaggaatctcggttccagaccccccaagaacgatgacatagaaataaattcagaggag

SEQ ID NO: 8265 - DNA, 110 bp, synthetic construct
  source 1..110: mol_type = other DNA
gaatctcggttccagaccccccaagaacgatgacatagaaataaattcagaggagcacttacggttatcttgtcttctgtttgtcaccccatccttacttggccgtcctc

SEQ ID NO: 8266 - DNA, 110 bp, synthetic construct
  source 1..110: mol_type = other DNA
catgttctctggagtaagactggctgagtttatatacccaaacttgtcacttggtagctacatgctttggggcaaattactttatctttctatacctaaatttccacatt

SEQ ID NO: 8267 - DNA, 110 bp, synthetic construct
  source 1..110: mol_type = other DNA
attgccataagctgcagtgtagattacagatgtggcttggatcaggcgttgctgtggctgtggtataggtcagcggctgtggtgtaggtcagcagctgtggctcctattt

SEQ ID NO: 8268 - DNA, 110 bp, synthetic construct; identical to SEQ ID NO: 8267
  source 1..110: mol_type = other DNA

SEQ ID NO: 8269 - DNA, 110 bp, synthetic construct
  source 1..110: mol_type = other DNA
aaatgccacgatgtaggcttttgcactcatttagctgccacacacagttgtacgtgttgtgcactggaccactttaggttacacctcaatttgtagacacacctgtctga

SEQ ID NO: 8270 - DNA, 110 bp, synthetic construct
  source 1..110: mol_type = other DNA
ttcgatcatgtattgactgtatagtagggagcactgcttctgctctattttgagttttgagcatatgctaaactaacagggcttaaacgttcaaagggaacctaagaagc

SEQ ID NO: 8271 - DNA, 110 bp, synthetic construct
  source 1..110: mol_type = other DNA
tttgagcatatgctaaactaacagggcttaaacgttcaaagggaacctaagaagctattctaccattctaatgatgggaaaataagctatggaatacgcctcccctcacg

SEQ ID NO: 8272 - DNA, 110 bp, synthetic construct
  source 1..110: mol_type = other DNA
gaaactagtagcccctttttgcttaatttctgattctcactaatattgcacaatggtgcatctccccaaaacctggcctctggtaggcaatgggttaatgtatttgatcc

SEQ ID NO: 8273 - DNA, 110 bp, synthetic construct
  source 1..110: mol_type = other DNA
tggggtagcatatccagaattaggagttagagcagtagctccctgatgtcatccgtgtatcagattcgttttatcttttcacacacagctccattattcatgcatggatt

SEQ ID NO: 8274 - DNA, 110 bp, synthetic construct
  source 1..110: mol_type = other DNA
ccttagaccatcatgtgcctttaagtagctttaactagttaagcaccttttaatgatctccatccttcttaactttggtttatgcatgcagtttgttttaaagacgtctc

SEQ ID NO: 8275 - DNA, 110 bp, synthetic construct
  source 1..110: mol_type = other DNA
tgaccctttttcccatcgtcacacctccttctgcctctcttcttctgcttccatgtggtcacatggggccctccagtatcacctgggatcatctctgtcctaaggtcagc

SEQ ID NO: 8276 - DNA, 110 bp, synthetic construct
  source 1..110: mol_type = other DNA
atcatttatactcagaaactattctcccatcctccgacccaccaatgtactggactggatttatgcctcactgagcatccacgcattaatttaccttctaaggcagaatt

SEQ ID NO: 8277 - DNA, 110 bp, synthetic construct
  source 1..110: mol_type = other DNA
tggatttatgcctcactgagcatccacgcattaatttaccttctaaggcagaatttctgtaattattctactctgtgttaagagggcagagaaccctcacattgctaaat

SEQ ID NO: 8278 - DNA, 110 bp, synthetic construct
  source 1..110: mol_type = other DNA
agatggctgtggaagtttgcaccagcccccatagcccatgtaggaggtgttctactgactgagagcttgcaggtgtgcagggtaagaagttcccatggcgagcccacccc

SEQ ID NO: 8279 - DNA, 110 bp, synthetic construct
  source 1..110: mol_type = other DNA
tttccttttctccatacccttgccagcatttgttatttgtgttctttttgatgatggccattctgataggtgacaaacaaccagatcttatagggcatagtctttctttt

SEQ ID NO: 8280 - DNA, 110 bp, synthetic construct; identical to SEQ ID NO: 8279
  source 1..110: mol_type = other DNA

SEQ ID NO: 8281 - DNA, 110 bp, synthetic construct
  source 1..110: mol_type = other DNA
atacaaatgcaggcgctagaatgcagctccaggtgaaagactgaacagcagggattgatcaggaaggagactgaacagcagggattggtcaggaaggaatgactagaggc

SEQ ID NO: 8282 - DNA, 110 bp, synthetic construct
  source 1..110: mol_type = other DNA
atgggcctatgtgctgacttttattttcataagggttcctgaggaataatccagatagaagcatctgaaagaatatgtaaactgccttgaaagcgaggatattacaacca

SEQ ID NO: 8283 - DNA, 110 bp, synthetic construct
  source 1..110: mol_type = other DNA
ctaggaaggaaacaaaactttttagctgcaatatgaatatttgggcttaaatgttcagagaactgtctcaaagggggttcaaaccctagtttagacatgttttttcctaa

SEQ ID NO: 8284 - DNA, 110 bp, synthetic construct; identical to SEQ ID NO: 8283
  source 1..110: mol_type = other DNA

SEQ ID NO: 8285 - DNA, 110 bp, synthetic construct; identical to SEQ ID NO: 8283
  source 1..110: mol_type = other DNA

SEQ ID NO: 8286 - DNA, 110 bp, synthetic construct; identical to SEQ ID NO: 8283
  source 1..110: mol_type = other DNA

SEQ ID NO: 8287 - DNA, 110 bp, synthetic construct
  source 1..110: mol_type = other DNA
aaatgtaaaagtttctcttttgtataaagatggaaaataaagaccaaaaaggaaaagatgagagctagcagtgccccaggtgtgcctcagtggctttcccagtgtctgct

SEQ ID NO: 8288 - DNA, 110 bp, synthetic construct
  source 1..110: mol_type = other DNA
agatgagagctagcagtgccccaggtgtgcctcagtggctttcccagtgtctgctgcatcatgctggctgctgccccagtggtcaaagagagtcacgttgccaggcctgg

SEQ ID NO: 8289 - DNA, 110 bp, synthetic construct
  source 1..110: mol_type = other DNA
agtaacttctcatccactttgaaagcctaccatgaagtgacttggcagaacccggggaacaattgcagtaattaaaggcagcagctcagattttctctgacttttcatca

SEQ ID NO: 8290 - DNA, 110 bp, synthetic construct
  source 1..110: mol_type = other DNA
cctcattatctgaaaataccacatggattttcagctccacacccaggcctaggtctgccccaaacaggaatgacacctgtgcactcattgatgcctggtcaccctcctat

SEQ ID NO: 8291 - DNA, 110 bp, synthetic construct
  source 1..110: mol_type = other DNA
agtagagggaaaggcattcaagtaacggtcctttaagatttctgtcgtttttagctaccatggagaagtttttagctaccatggagaagtataaaagtgagttcttactg

SEQ ID NO: 8292 - DNA, 110 bp, synthetic construct
  source 1..110: mol_type = other DNA
ttctcccagtgggtatcagagacatactccagttaacactgtgtaaggtgcatgtgtgacataggagctgcaaattgaggtaggaccaagtggttaaattcagtgagccg

SEQ ID NO: 8293 - DNA, 110 bp, synthetic construct
  source 1..110: mol_type = other DNA
gtgacataggagctgcaaattgaggtaggaccaagtggttaaattcagtgagccgggtacagatgattacagggaggaaccgtggtgtaagtgctgccctaaaaacacag

SEQ ID NO: 8294 - DNA, 110 bp, synthetic construct
  source 1..110: mol_type = other DNA
ccttggatgctatattcaaggtgttccttcctttgcccctccccccattttttttttttttttaatacaacagctacattggagtttcagagaaactgactttcagcacc

SEQ ID NO: 8295 - DNA, 110 bp, synthetic construct
  source 1..110: mol_type = other DNA
ttttttttaatacaacagctacattggagtttcagagaaactgactttcagcacctgtgctccaagatcttgttagattccccaaagtatcgccacaatcaggttcttgt

SEQ ID NO: 8296 - DNA, 110 bp, synthetic construct
  source 1..110: mol_type = other DNA
ttgatgtgatcagtgcagcctctcagcatccagctttgcatttcagggaaaatcatcccagctctgagccagctcacagcgtgaggctgcagttggggccagaggaactg

SEQ ID NO: 8297 - DNA, 110 bp, synthetic construct
  source 1..110: mol_type = other DNA
ctttacacattccgcacctctgctcttccaaggggctgcctcaaggactagcttctgtctcgccaatcctggagctccaacagcctggaagagttcagctgggaaaaaca

SEQ ID NO: 8298 - DNA, 110 bp, synthetic construct
  source 1..110: mol_type = other DNA
tgtctcgccaatcctggagctccaacagcctggaagagttcagctgggaaaaacacacaaggtggcttgggctggcagaggccacagaccttccccctgcctagcagaga

SEQ ID NO: 8299 - DNA, 110 bp, synthetic construct
  source 1..110: mol_type = other DNA
aaaaatgaaagcacatgaataattagagtagaaggcaagaccttaaatgaccaacatatggcacagaaaacacttgtccaggaggactgggggatgcattgagatgggga

SEQ ID NO: 8300 - DNA, 110 bp, synthetic construct
  source 1..110: mol_type = other DNA
atatggcacagaaaacacttgtccaggaggactgggggatgcattgagatggggaagagagaagcatttttctggtgagagacgagcccatgcaaaggcctggaggcagg

SEQ ID NO: 8301 - DNA, 110 bp, synthetic construct
  source 1..110: mol_type = other DNA
gacacaggaccagatgttcttcaaagtttccttcaaatctaagctcttacgtacagcagattatttctgaagatggttccacagtccgtcctaccattttggggggtata

SEQ ID NO: 8302 - DNA, 110 bp, synthetic construct
  source 1..110: mol_type = other DNA
tgagctgcagttgccacctaagccacagctgagacaatgccagatccttaacccactgttcccagctggggattaaatctgcatcccagtgctcccaagacctgctgacc

SEQ ID NO: 8303 - DNA, 110 bp, synthetic construct
  source 1..110: mol_type = other DNA
ctgttcccagctggggattaaatctgcatcccagtgctcccaagacctgctgaccccattgtgccaggggaggaactcccactgcagcgctattaacaatagccaagaca

SEQ ID NO: 8304 - DNA, 110 bp, synthetic construct
  source 1..110: mol_type = other DNA
tgggatttctaagaaggaagcaaccggtgtcatttgacctgcacttaaacttgtgggactccacatgtctctttgagtaactttggctgcttctgactttggaagctaag

SEQ ID NO: 8305 - DNA, 110 bp, synthetic construct
  source 1..110: mol_type = other DNA
ggactccacatgtctctttgagtaactttggctgcttctgactttggaagctaagttgctgccccttgtttttcttttggacaaaagcctggatgtttcccttagtcact

SEQ ID NO: 8306 - DNA, 110 bp, synthetic construct
  source 1..110: mol_type = other DNA
tgaactagcgctaagagtgacctctctcctggttccagccacactgattccctacgtaagctcttccaaccgtgtggttttacatgtgtgtgtatgcggtaatttccaaa

SEQ ID NO: 8307 - DNA, 110 bp, synthetic construct
  source 1..110: mol_type = other DNA
aaaccacactgtgccaggtgctgttctggacactgatgatacaactgtgaacaaggcatccacagtctgctttcatgagcttacagtctagtggcaggaggcattcaacc

SEQ ID NO: 8308 - DNA, 110 bp, synthetic construct
  source 1..110: mol_type = other DNA
ggtataatgtgaatttcaacagtgttatgttttattcaatgctgggaatgatacacgggatgggatggagttgagggtagatatttgacttggttgcttagaggagagca

SEQ ID NO: 8309 - DNA, 110 bp, synthetic construct; identical to SEQ ID NO: 8308
  source 1..110: mol_type = other DNA

SEQ ID NO: 8310 - DNA, 110 bp, synthetic construct
  source 1..110: mol_type = other DNA
atcagtcagtgaacattggattgtttctactttttggctattgtgaataataccattatgaacatttgtatacaagcttttgcttgaacaccagttttcattcttttcag

SEQ ID NO: 8311 - DNA, 110 bp, synthetic construct
  source 1..110: mol_type = other DNA
ggctattgtgaataataccattatgaacatttgtatacaagcttttgcttgaacaccagttttcattcttttcagtaaatacctaggagtataattactaggttgtatgg

SEQ ID NO: 8312 - DNA, 110 bp, synthetic construct
  source 1..110: mol_type = other DNA
aactctatttcttttgtcttgtgtagccactgagtatcattccattagctttgcttcaaagtgctgtaggccctgccactaatgaaagttcttcccaggtcttttctgac

SEQ ID NO: 8313 - DNA, 110 bp, synthetic construct
  source 1..110: mol_type = other DNA
tcaaagtgctgtaggccctgccactaatgaaagttcttcccaggtcttttctgaccatgctcacaagcctgagcatcttatttctcagccttttttcccaaggtttttgg

SEQ ID NO: 8314 - DNA, 110 bp, synthetic construct
  source 1..110: mol_type = other DNA
ggtggggaaggagagaggaggagggccactccagccaggaggagagctgccgctgccttggacaacgcttgcccttgtgaagtttgatgtctgtaaaggaacaacctcac

SEQ ID NO: 8315 - DNA, 110 bp, synthetic construct
  source 1..110: mol_type = other DNA
aggctcctaaggtcctttttatatctataatttcttcagaaaaaaaggtaatttattcattcaacaaatgcattcattccacgaccatgtgagagctcaccatttaccag

SEQ ID NO: 8316 - DNA, 110 bp, synthetic construct; identical to SEQ ID NO: 8315
  source 1..110: mol_type = other DNA

SEQ ID NO: 8317 - DNA, 110 bp, synthetic construct
  source 1..110: mol_type = other DNA
cacctgcttctttcccactcagccatgaatactttgtccgtaccttctcctccctcaaccccaacagctaaaaccctttccaatgtactctctggaactccgcattttca

SEQ ID NO: 8318 - DNA, 110 bp, synthetic construct
  source 1..110: mol_type = other DNA
caaccccaacagctaaaaccctttccaatgtactctctggaactccgcattttcaggaaaagctgctatatattaaactcaaccttttctcagaacattccctgcaaatt

SEQ ID NO: 8319 - DNA, 110 bp, synthetic construct
  source 1..110: mol_type = other DNA
gaaactgggtcttgggggaacagtgcaaaaatactgagactctgactacttctattgctttaagtaattaactggaaaaaaaaagtaataaattgtacctcacctctgac

SEQ ID NO: 8320 - DNA, 110 bp, synthetic construct
  source 1..110: mol_type = other DNA
cattaataagcagctaccctcaaacatcaacagaggccaagtaggaagcttgaacttcatacctacctggtataaggagatggtgcccaaacttttcctctgtcagataa

SEQ ID NO: 8321 - DNA, 110 bp, synthetic construct
  source 1..110: mol_type = other DNA
ttcatacctacctggtataaggagatggtgcccaaacttttcctctgtcagataagcgtcagagaaagccaagtaaaatgggtttataatagataaaagtcccagaattc

SEQ ID NO: 8322 - DNA, 110 bp, synthetic construct
  source 1..110: mol_type = other DNA
catcaactgtttcactaagattttctcacccacggtaaaaggaattcaagaagatggagatcccatcatggctcagcggaaatgaatgtgactagtatctatgaggttgc

SEQ ID NO: 8323 - DNA, 110 bp, synthetic construct
  source 1..110: mol_type = other DNA
taagattttctcacccacggtaaaaggaattcaagaagatggagatcccatcatggctcagcggaaatgaatgtgactagtatctatgaggttgcaggttcaatccctgg

SEQ ID NO: 8324 - DNA, 110 bp, synthetic construct
  source 1..110: mol_type = other DNA
cattgtgagaggcacagaggtatgtaaatctaggcatttatcttgtgtggagaatggagtgggaggagggacagtgcggttacagtgtttttttgtttgtttgttttttg

SEQ ID NO: 8325 - DNA, 110 bp, synthetic construct
  source 1..110: mol_type = other DNA
ccacttgatttggaccataaaattcgcatttgagagatcactagcttactatcatatgctaattgaaactgcttgtattactgaaggacataaaaataatcttgaaaccc

SEQ ID NO: 8326 - DNA, 110 bp, synthetic construct
  source 1..110: mol_type = other DNA
acttgaccatgctgctaccctgatcttggatttccagcctccaaaagttgagacataaatacctgttatttatcagccagccggtctgtggtactttgttgtagcagtct

SEQ ID NO: 8327 - DNA, 110 bp, synthetic construct
  source 1..110: mol_type = other DNA
gtaaatttttattgttctaagccaatgtgatttcagggttattcactacagcagctagtaatgcacttggtgatcatgaaatcagagcaaagggatttctgttgacatga

SEQ ID NO: 8328 - DNA, 110 bp, synthetic construct
  source 1..110: mol_type = other DNA
ctacagcagctagtaatgcacttggtgatcatgaaatcagagcaaagggatttctgttgacatgaagcacctggcaggagttcccactgtggctcagcaggttaagaacc

SEQ ID NO: 8329 - DNA, 110 bp, synthetic construct
  source 1..110: mol_type = other DNA
acttgagagccagcttccctcctaaaggggaaaaagaactgtaggtcaagaaatgtaggccagtcagccagcagggcagtgactcaaatggggttggatgtcagaatcac

SEQ ID NO: 8330 - DNA, 110 bp, synthetic construct
  source 1..110: mol_type = other DNA
taggccagtcagccagcagggcagtgactcaaatggggttggatgtcagaatcacagcaaaacacagactctgggaccttacctcttcgattctgacgcagttggtaggt

SEQ ID NO: 8331 - DNA, 110 bp, synthetic construct
  source 1..110: mol_type = other DNA
tcccaacgccattggcattatgggtgactttggggccacctctgtaggtaaggctcctttagttcacccctggcatcttctaacagactctgaatttgacatttctcctg

SEQ ID NO: 8332 - DNA, 110 bp, synthetic construct
  source 1..110: mol_type = other DNA
cctttagttcacccctggcatcttctaacagactctgaatttgacatttctcctggactttctgcctctttctctattatcctctgcaacactgctggattaaaatgcat

SEQ ID NO: 8333 - DNA, 110 bp, synthetic construct
  source 1..110: mol_type = other DNA
attcctgggagagaggttgaggacccacaggctctggtagatggagtggagtgtggggatgccgtaaagtggatccccagagttttttgaggagcagcattccagagatt

SEQ ID NO: 8334 - DNA, 110 bp, synthetic construct
  source 1..110: mol_type = other DNA
gggatgccgtaaagtggatccccagagttttttgaggagcagcattccagagattctaggtttggatgttttgcagataggtgcttttcatgagcctgcaaagagctgga

SEQ ID NO: 8335 - DNA, 110 bp, synthetic construct
  source 1..110: mol_type = other DNA
tgtggtcttaagcttttctaattagttctgaggtgtttttaaatgacagcgagactctctgacagcaaattattgctttatttgctttagaggtggacttgtgagcaggg

SEQ ID NO: 8336 - DNA, 110 bp, synthetic construct
  source 1..110: mol_type = other DNA
tttgtttggaataatgatgtgcatgaggaatgagttcagatggaacatgaccatggagtctgtacagggagctgtgctgtaggggatggtagttctctctgctctactct

SEQ ID NO: 8337 - DNA, 110 bp, synthetic construct
  source 1..110: mol_type = other DNA
tctttcttaagccattgtttaggctagttattgcaatgccagaacacttggaaagatgactggctagacagcttgtaatcctaatattgttacctctttaggatctaacc

SEQ ID NO: 8338 - DNA, 110 bp, synthetic construct
  source 1..110: mol_type = other DNA
ctctggctcttgatttggtgttgacagccaagcaaagagcgtcttcaataaattcactctcatattcaagtttttccagatgtgagaagtaattaagtctttgcatttat

SEQ ID NO: 8339 - DNA, 110 bp, synthetic construct
  source 1..110: mol_type = other DNA
atattctagaactcttcgtatattgcccgtaggcgtgccaagaggcaccagttaagtagccagtagccctggtaaacacccatagctccatccgttcattcaccaaacat

SEQ ID NO: 8340 - DNA, 110 bp, synthetic construct
  source 1..110: mol_type = other DNA
gtagccagtagccctggtaaacacccatagctccatccgttcattcaccaaacatttatgtagtatttcctgtcggtgtgagatgctggaaacccgaaaatcaaagatgt

SEQ ID NO: 8341 - DNA, 110 bp, synthetic construct
  source 1..110: mol_type = other DNA
gttagggaaagtgaggaattgagggtgactccacagtacttgatccgagtccccggaaagcagttgagcctgttattcatttttttctcaggtatttgaacgctgactta

SEQ ID NO: 8342 - DNA, 110 bp, synthetic construct
  source 1..110: mol_type = other DNA
tttgccaagcatatgttccacgtccagtctcagctctgacatggaaagacctataggtaagtcgtcaccaccatccttacaacaagaggtaagtggaacaaacctgaaag

SEQ ID NO: 8343 - DNA, 110 bp, synthetic construct
  source 1..110: mol_type = other DNA
catcctttctcgttcttggaattaccccatcagagaagactttcactctatccagaaacaggtgatcgacagaaaatataaacagctagtagaagaactaacattctcat

SEQ ID NO: 8344 - DNA, 110 bp, synthetic construct
  source 1..110: mol_type = other DNA
aaacaggtgatcgacagaaaatataaacagctagtagaagaactaacattctcattccaaccatttcagatgattacagaatcataacacccaagctttaaagggaatag

SEQ ID NO: 8345 - DNA, 110 bp, synthetic construct
  source 1..110: mol_type = other DNA
taagttactagcagagtgtgtacagaatggggcagaagtgaagtggagtaaattcatttttatttgaatttgaaattgccaactctgttcctctctgggtttcttttaat

SEQ ID NO: 8346 - DNA, 110 bp, synthetic construct
  source 1..110: mol_type = other DNA
atttttatttgaatttgaaattgccaactctgttcctctctgggtttcttttaatctcccattgatctatgcatttaaatttggggattgaattttgcaccagcagagtg

SEQ ID NO: 8347 - DNA, 110 bp, synthetic construct
  source 1..110: mol_type = other DNA
ccaaatctaaaatatcagaccaggtctcaccacctccatcagcaacccctactccttatcaaagtttctgcttctctggacttttttggaaggctcctagctccaatccc

SEQ ID NO: 8348 - DNA, 110 bp, synthetic construct
  source 1..110: mol_type = other DNA
ttatcaaagtttctgcttctctggacttttttggaaggctcctagctccaatcccagcttcctccactcctgctggtcatggctctgcgtgacagctggagggacctttt

SEQ ID NO: 8349 - DNA, 110 bp, synthetic construct
  source 1..110: mol_type = other DNA
ttgcatgtccacggtctgtgggggataaaaactaaggaagtacaaaagaaagcattgtcacagagaggcaaagttggagtagcggtcccacgacacctgtgcatacagag

SEQ ID NO: 8350 - DNA, 110 bp, synthetic construct
  source 1..110: mol_type = other DNA
tgtcacagagaggcaaagttggagtagcggtcccacgacacctgtgcatacagagcggtcaaaacagaccgcagaattgcttttggtaaaaggtggacagtgcaaggtgg

SEQ ID NO: 8351 - DNA, 110 bp, synthetic construct
  source 1..110: mol_type = other DNA
gaaaagatcttagtgaaaaaaatcaagaggaaaaagagggagttccctggtggcctcgtgttatgggtctgtcattgtcactgcggttaaggtcactcactgcagtgttt

SEQ ID NO: 8352 - DNA, 110 bp, synthetic construct
  source 1..110: mol_type = other DNA
tcgtgttatgggtctgtcattgtcactgcggttaaggtcactcactgcagtgttttgggtcacagctgtggctcgggttcagtccctggcctgggaacgtccatatgcca

SEQ ID NO: 8353 - DNA, 110 bp, synthetic construct
  source 1..110: mol_type = other DNA
cgtttccactgcgccacgacggaaactccatgcctctctcttctcaaccacacctgggttgcttcctctgcttggccttttgatcctcttccctgtgactctcaggtggt

SEQ ID NO: 8354 - DNA, 110 bp, synthetic construct
  source 1..110: mol_type = other DNA
gggttgcttcctctgcttggccttttgatcctcttccctgtgactctcaggtggttattccagtttgcctttcccggtctcacccgcttaaaatgaggagtctgcttcag

SEQ ID NO: 8355 - DNA, 110 bp, synthetic construct
  source 1..110: mol_type = other DNA
gtcagattcccccccgcccccggtgtcctctttcagcagctccacagtgagctttgtgatgctgacaaagggtgcagttatacccacttggaaattcattgacaaatatt

SEQ ID NO: 8356 - DNA, 110 bp, synthetic construct
  source 1..110: mol_type = other DNA
gtgatgctgacaaagggtgcagttatacccacttggaaattcattgacaaatattctgtgcactggtgcaactggcataacacacagacagcccctgggtgcccggcttc

SEQ ID NO: 8357 - DNA, 110 bp, synthetic construct
  source 1..110: mol_type = other DNA
acacgaaaaatgagttataacaaatgcaatgcttttgggtctcttgcctgagctgagcaagacacattctcaacgtgtagacggggtaatttcttgttgccacaattaaa

SEQ ID NO: 8358 - DNA, 110 bp, synthetic construct
  source 1..110: mol_type = other DNA
agcaagacacattctcaacgtgtagacggggtaatttcttgttgccacaattaaagggttgcgttggaagagtcaggaggcatcggtgaggaacaatgggtggattcact

SEQ ID NO: 8359 - DNA, 110 bp, synthetic construct
  source 1..110: mol_type = other DNA
ctacagttgcaaaatcattttttactaatcagttttaaacactattttattaaagtgacctgctccctcattgccgtctgctgtttccttaggtgacaatcattagaatc

SEQ ID NO: 8360 - DNA, 110 bp, synthetic construct
  source 1..110: mol_type = other DNA
tgacctgctccctcattgccgtctgctgtttccttaggtgacaatcattagaatcacttcatttatcccagggtcactgtctacttcactacatccctccaaaccagaga

SEQ ID NO: 8361 - DNA, 110 bp, synthetic construct
  source 1..110: mol_type = other DNA
tgtttaataagcatgctcacgtccccccaccccaccccatgcacagacacatcactgtgacctctgacttaaagactgtctgccactgaatggacaactagagatgaagc

SEQ ID NO: 8362 - DNA, 110 bp, synthetic construct
  source 1..110: mol_type = other DNA
tgtgacctctgacttaaagactgtctgccactgaatggacaactagagatgaagcatcacagagaaaaaagacagtgaggcaggtgtccctgaagaagcctgtataactt

SEQ ID NO: 8363 - DNA, 110 bp, synthetic construct
  source 1..110: mol_type = other DNA
agagtcctttttttttttttttcaacatctttatatttacctctgataaaaagactgagggagcaaagctatcatcttcttaggttgaaaaggggcacttttcaaagggg

SEQ ID NO: 8364 - DNA, 110 bp, synthetic construct
  source 1..110: mol_type = other DNA
tttccactgcactaactaaaacgaatggttactgataaccctaaaataaaaacttcagtggccaaatcacacatttcaaagacgacatcagatacgatataaaactctct

SEQ ID NO: 8365 - DNA, 110 bp, synthetic construct
  source 1..110: mol_type = other DNA
cagtggccaaatcacacatttcaaagacgacatcagatacgatataaaactctctgtagtgtattgttctccatcatttcaatttacttccacgttcctgagaacattag

SEQ ID NO: 8366 - DNA, 110 bp, synthetic construct
  source 1..110: mol_type = other DNA
tgttattggcatgccttcactaacacagacctatttattctttaagctacaattgctttgttattctgtttctgattctgaaaaaatcacacaaaagatgcgtccttaag

SEQ ID NO: 8367 - DNA, 110 bp, synthetic construct
  source 1..110: mol_type = other DNA
agatctggattattcagtggctaaatatctaactgtggtgggactgcattctcgggtggcttcctcctttttctgaaagttctcaagctttgattgttgattgattgtca

SEQ ID NO: 8368 - DNA, 110 bp, synthetic construct
  source 1..110: mol_type = other DNA
acacacacacacacacacgccttgcatacaacacttttttaatgctctttgctaatctcctgagctttttctcaaccagttgattccttcctcctcaccttacttagaaa

SEQ ID NO: 8369 - DNA, 110 bp, synthetic construct
  source 1..110: mol_type = other DNA
tgctcaaatacacatctttccagagcctccgaatcctgtatctgttatgccttctccctggttatcactttccgttaggcacctcagaagcagtgcttggagactgtgaa

SEQ ID NO: 8370 - DNA, 110 bp, synthetic construct
  source 1..110: mol_type = other DNA
ccagagacttatcagcacacagaattacaattgagtcccagatatggctgttttaaccatcagtcagctgcgtggtcaagacaaccgtacagatggatttgtcaagtgtg

SEQ ID NO: 8371 - DNA, 110 bp, synthetic construct
  source 1..110: mol_type = other DNA
accatcagtcagctgcgtggtcaagacaaccgtacagatggatttgtcaagtgtgttgtctaacatttaactgtaagttagacacttttaaagattttttgaaataaaca

SEQ ID NO: 8372 - DNA, 110 bp, synthetic construct
  source 1..110: mol_type = other DNA
ttgatttacactagcaaacatatcttacaatatgggactgaaaaatccttggacatacagaatttaaggtcacacctagctttaagggaggctgggaaataactactctg

SEQ ID NO: 8373 - DNA, 110 bp, synthetic construct
  source 1..110: mol_type = other DNA
gtaaattatacagactgttccatctagcttaggactaggtttgcttagtaggattctatgtgtatttacagtactgattattttgatctttttcctcggccatttctatt

SEQ ID NO: 8374 - DNA, 110 bp, synthetic construct; identical to SEQ ID NO: 8373
  source 1..110: mol_type = other DNA

SEQ ID NO: 8375 - DNA, 110 bp, synthetic construct
  source 1..110: mol_type = other DNA
ctccctgaatgagtcaacgggtcattcaagaggcacttccatcaaatcgtccaagcaatgccgtttttagctgtgcaattttgcggctggcatggaaagactaagagcaa

SEQ ID NO: 8376 - DNA, 110 bp, synthetic construct
  source 1..110: mol_type = other DNA
caatgccgtttttagctgtgcaattttgcggctggcatggaaagactaagagcaattggacacttacgtgtacaaacacaacatgaggtcctctttctgggaaggggtcg

SEQ ID NO: 8377 - DNA, 110 bp, synthetic construct
  source 1..110: mol_type = other DNA
ccaaagtcatataacttctcctcatctttcaatctcacattctctataattccttcttatagcttgccaattcagctagggtatccctcttgttaaaaaattacatatac

SEQ ID NO: 8378 - DNA, 110 bp, synthetic construct
  source 1..110: mol_type = other DNA
cttatagcttgccaattcagctagggtatccctcttgttaaaaaattacatatacatctgctttaatttctccctctctgtatctttactccttctttctcatgaccttt

SEQ ID NO: 8379 - DNA, 110 bp, synthetic construct
  source 1..110: mol_type = other DNA
cttgtcaagagtgggatgaaggagtggtatgcctgagaaggaacagaatagagcagctaatgctcattacccagaatctcgggttggtactacacagttgattgagcaat

SEQ ID NO: 8380 - DNA, 110 bp, synthetic construct
  source 1..110: mol_type = other DNA
ggagaaaggaagaagaggagggaaggagggagggagggatgagagacggagggaggaaaaacagttcttcagcttctgtctgctttctctctccccgcatttattaccaa

SEQ ID NO: 8381 - DNA, 110 bp, synthetic construct
  source 1..110: mol_type = other DNA
gaaaaacagttcttcagcttctgtctgctttctctctccccgcatttattaccaaggttatttcctgaagtgcacaatattcacacttagctgggagatttaatttagat

SEQ ID NO: 8382 - DNA, 110 bp, synthetic construct
  source 1..110: mol_type = other DNA
aatggggggggggttgtttcatttctaggttttgatttatacatatatatgcatatttgctctgtatttactgcagccattttgacccgttaccatagcttctatacatg

SEQ ID NO: 8383 - DNA, 110 bp, synthetic construct
  source 1..110: mol_type = other DNA
tttgctctgtatttactgcagccattttgacccgttaccatagcttctatacatgaatacgctatctcttttttggctcattttgtattaattccttctttcattccttc

SEQ ID NO: 8384 - DNA, 110 bp, synthetic construct
  source 1..110: mol_type = other DNA
ggaaatcttcccttttcttttactttttgaatgagttccatgtaagttggtactatttcatagtttgatggatatcaccagtgaagttagctgagattaaatatgggttt

SEQ ID NO: 8385 - DNA, 110 bp, synthetic construct
  source 1..110: mol_type = other DNA
tgggttagatcaactgacctttgattctatgcatgtacagaatgaaagaaatattcttcagacttatcctctgggttaagatataccttttgattgaccctgataccact

SEQ ID NO: 8386 - DNA, 110 bp, synthetic construct
  source 1..110: mol_type = other DNA
gggcatcctctttcctcagtgtcatggacaattcccaggaggcccacttagttgtcacttcacagggatcactgggagaataagtgagactagatttctaaggatcagcc

SEQ ID NO: 8387 - DNA, 110 bp, synthetic construct
  source 1..110: mol_type = other DNA
ataattgagaagggatttgaaaatctttagaaataactagaagttaaaaaaaatgagaggaaatggacctggaagaccaattaatgatgatctgggacaaagtgaaaaga

SEQ ID NO: 8388 - DNA, 110 bp, synthetic construct
  source 1..110: mol_type = other DNA
ttagttctttctttctgcccgagaaactttcctctgagatatcctcagggctcatttcccttacctggagtctgctttaaatccccctgtcattgagagctgccatgaca

SEQ ID NO: 8389 - DNA, 110 bp, synthetic construct
  source 1..110: mol_type = other DNA
ttcccttacctggagtctgctttaaatccccctgtcattgagagctgccatgacaaccctatttaaaatggcaaagcccttccccccataattaccctattgcctttaca

SEQ ID NO: 8390 - DNA, 110 bp, synthetic construct; identical to SEQ ID NO: 8388
  source 1..110: mol_type = other DNA

SEQ ID NO: 8391 - DNA, 110 bp, synthetic construct; identical to SEQ ID NO: 8389
  source 1..110: mol_type = other DNA

SEQ ID NO: 8392 - DNA, 110 bp, synthetic construct
  source 1..110: mol_type = other DNA
aggctctgtgttttcaaatacctgacaagcatgttggttattcgttggaagaaaaactctgcttcttaagcttgagggagaatccacattggggcccaatgacaggaagt

SEQ ID NO: 8393 - DNA, 110 bp, synthetic construct
  source 1..110: mol_type = other DNA
gtttgggttttctaaagccagcaccttggggtttgtgccagtaccctgtcctctgtccctgcagaacagcagaggaaagtttcactcaagcactccaagccagccaccca

SEQ ID NO: 8394 - DNA, 110 bp, synthetic construct
  source 1..110: mol_type = other DNA
tccctgcagaacagcagaggaaagtttcactcaagcactccaagccagccacccaaggaaggactgcgacccctctaatctgaggcctccaggatggagatgcacacttc

SEQ ID NO: 8395 - DNA, 110 bp, synthetic construct
  source 1..110: mol_type = other DNA
ctttcccatacatctccttgctataatctcagttttaacaatgccaaacagtactgtaaaaattttagctaatttgctagctattttcatcattcagatttaacaggccc

SEQ ID NO: 8396 - DNA, 110 bp, synthetic construct
  source 1..110: mol_type = other DNA
aactcgtccttaaatgtttggtaaaattcacctgtgaagctatctgtttctggacttttgtttcttatgagttttttgaatattcattctgtcctgttactagtaattgg

SEQ ID NO: 8397 - DNA, 110 bp, synthetic construct
  source 1..110: mol_type = other DNA
gtttggtaaaattcacctgtgaagctatctgtttctggacttttgtttcttatgagttttttgaatattcattctgtcctgttactagtaattggtctgttcagattttc

SEQ ID NO: 8398 - DNA, 110 bp, synthetic construct
  source 1..110: mol_type = other DNA
ttaaaattattcataatgagaacttgaggaagagcagttggatgattccataggctgttgcatctagcaatggaaaaataatattcccatctatgcattttataccactg

SEQ ID NO: 8399 - DNA, 110 bp, synthetic construct
  source 1..110: mol_type = other DNA
tgttgcatctagcaatggaaaaataatattcccatctatgcattttataccactgagttgaaatttctaaactagtagtgttgtagttttagaggctgtttaaaggctgt

SEQ ID NO: 8400 - DNA, 110 bp, synthetic construct
  source 1..110: mol_type = other DNA
tgagaaattccctacttagtatgacaagaagtcccatgctatcttgtacatttcctgtcttatagctggaagcagctgtttttcccaggagctttgattttttttttttt

SEQ ID NO: 8401 - DNA, 110 bp, synthetic construct
  source 1..110: mol_type = other DNA
cttctggacaaaattgtattggcctatctgtttgatgtaacaactttggaaagcaggagtctatttgaaagcttgcagtttccaagggaaggcttggatagtaagttgca

SEQ ID NO: 8402 - DNA, 110 bp, synthetic construct
  source 1..110: mol_type = other DNA
gacataaatgaaaatgacttttacctggagtctctacaacatgaacagtggcctcattgttcccattcaccgagtatgtgaagtagaaccagcaatcatcaacgtccttc

SEQ ID NO: 8403 - DNA, 110 bp, synthetic construct
  source 1..110: mol_type = other DNA
attgttcccattcaccgagtatgtgaagtagaaccagcaatcatcaacgtccttctccttacaatgggacaagggatcgacctggcctggctggggcaatttgtcccgat

SEQ ID NO: 8404 - DNA, 110 bp, synthetic construct
  source 1..110: mol_type = other DNA
gctcaaggggaaacaaaatattcatagaatcagactgaagtacctgatcgtaactgcaaaaccaactgctgtggttggatctgagtgatatcttccggctgcagcttctc

SEQ ID NO: 8405 - DNA, 110 bp, synthetic construct
  source 1..110: mol_type = other DNA
caagcagagagctgtgcccaccactttttactaaggcacagctcagagctcaggctgtggagccagatgcctggactcaaacctctggtcaactcctaactaactaggta

SEQ ID NO: 8406 - DNA, 110 bp, synthetic construct
  source 1..110: mol_type = other DNA
gcgccttaatctcctcccgtgagaagttctggagccttcttcctgccttgtcttaggtgctgctttcctaaggccgcacgtctgtcctgcccgggactgcctggttttga

SEQ ID NO: 8407 - DNA, 110 bp, synthetic construct
  source 1..110: mol_type = other DNA
ggtgctgctttcctaaggccgcacgtctgtcctgcccgggactgcctggttttgaaccttggaagccttgcctccagggagccgccggagactcccgcaaatcaagacac

SEQ ID NO: 8408 - DNA, 110 bp, synthetic construct
  source 1..110: mol_type = other DNA
gtaaatgagctagatagcaacaaggaaccactaaccacagaggtggaataatctggtcagaagggaaggaccaagaggaccagttagaacaaaggaacctctatgaaaca

SEQ ID NO: 8409 - DNA, 110 bp, synthetic construct
  source 1..110: mol_type = other DNA
gtcagaagggaaggaccaagaggaccagttagaacaaaggaacctctatgaaacaagaagcaggagagagcttggaagaaacatgctagttcatattcacaatcagagtt

SEQ ID NO: 8410 - DNA, 110 bp, synthetic construct
  source 1..110: mol_type = other DNA
atgcggatagaaggaagatataaaaggtagtcctagggaggaaattcaccatggagggaaaattatatgagctgggtctggcggattagagatgaaaaggttcagagaga

SEQ ID NO: 8411 - DNA, 110 bp, synthetic construct
  source 1..110: mol_type = other DNA
gggaaaattatatgagctgggtctggcggattagagatgaaaaggttcagagagaaataaaagtctgggatattagatgaaacccattcgtggaaatgagaggctgagat

SEQ ID NO: 8412 - DNA, 110 bp, synthetic construct
  source 1..110: mol_type = other DNA
gcagtgtgctcccactgcggctggctgtcctgctttgatgcagaggaaggtgcaaatcattttagatgaacaaatgtttccttatcccctagtctatgtcagtctagtca

SEQ ID NO: 8413 - DNA, 110 bp, synthetic construct
  source 1..110: mol_type = other DNA
atcattttagatgaacaaatgtttccttatcccctagtctatgtcagtctagtcattagaggtaaaagatttatgaggctcagaccccactaggtaatgagaagaagttt

SEQ ID NO: 8414 - DNA, 110 bp, synthetic construct
  source 1..110: mol_type = other DNA
ccctgccctggctctgaggtccctggagggaatatgtccactcctgaaagctgacagctcaccgtgtttgtaagtctaagtggttttgtaagtgctgtgagcttggtgag

SEQ ID NO: 8415 - DNA, 110 bp, synthetic construct
  source 1..110: mol_type = other DNA
agctcaccgtgtttgtaagtctaagtggttttgtaagtgctgtgagcttggtgaggaatatgcaggaaggggttgtattttttctaaatatgaccttccaacagcttcat

SEQ ID NO: 8416 - DNA, 110 bp, synthetic construct
  source 1..110: mol_type = other DNA
tggttgatttcacaagggaggcaactccacaaaatatagggcgcatgtgaaacaggatacacagggaaagagcaagctgggggtcctaaagaataagatcaaattcttgc

SEQ ID NO: 8417 - DNA, 110 bp, synthetic construct
  source 1..110: mol_type = other DNA
aaaagcatctaagaatgtgttttattgcacttatttctaaagcctggtctgttcacagagggttctaatcagttacctgattactaccttcccttcatggagcataatta

SEQ ID NO: 8418 - DNA, 110 bp, synthetic construct
  source 1..110: mol_type = other DNA
cagagggttctaatcagttacctgattactaccttcccttcatggagcataattagaggagctcttctaaaacacctgaaatgggagtttccattgtggctcagcaggtt

SEQ ID NO: 8419 - DNA, 110 bp, synthetic construct
  source 1..110: mol_type = other DNA
tatatgcttcaggtgcaggcctaagaaacaaaaccaacaaacaacaacaaaaaaacccaacaaaaagtcatgtaaccattcattggttacgcaaagctgcagttaagaaa

SEQ ID NO: 8420 - DNA, 110 bp, synthetic construct
  source 1..110: mol_type = other DNA
cccaacaaaaagtcatgtaaccattcattggttacgcaaagctgcagttaagaaattaataaccagaactggacaaatataaaaggaaagtgactaaggtttattaagtg

SEQ ID NO: 8421 - DNA, 110 bp, synthetic construct
  source 1..110: mol_type = other DNA
gcagtgttcggtgatggcacagttttctgtatggagttcacagcacgaggtttagtacaacactggaaaacatcgaggaaatcggacggtattgcttcgtaaacagagct

SEQ ID NO: 8422 - DNA, 110 bp, synthetic construct
  source 1..110: mol_type = other DNA
tacaacactggaaaacatcgaggaaatcggacggtattgcttcgtaaacagagctgtcacactagactggtactgaggctacggtacttgaaagaaaacatcctagtcct

SEQ ID NO: 8423 - DNA, 110 bp, synthetic construct
  source 1..110: mol_type = other DNA
cagactttattatctctgcacctaatttcagtaagactgtattatgtagagacggcacttattatggtagtttttgttattaagaacattttgggcaaactatcaacggc

SEQ ID NO: 8424 - DNA, 110 bp, synthetic construct
  source 1..110: mol_type = other DNA
gttaacatttgagtggcctttcctctgcctcaacctcaagttccttgactgatcttatcacccaaactctggttccagctgaaggtctactgtctacccaacttcaaggt

SEQ ID NO: 8425 - DNA, 110 bp, synthetic construct
  source 1..110: mol_type = other DNA
catcctgttactgaatcgatatatttagtttgcttactttcctacctccaaatgtcctaacaatcaccaagttgttaaagacgtaataatgataatttcttttgagagga

SEQ ID NO: 8426 - DNA, 110 bp, synthetic construct
  source 1..110: mol_type = other DNA
cctaacaatcaccaagttgttaaagacgtaataatgataatttcttttgagaggagcttttaactatacaaaaggctttcatgatccactaccctattttatcttactta

SEQ ID NO: 8427 - DNA, 110 bp, synthetic construct
  source 1..110: mol_type = other DNA
atttattaccaaaataatgttgtatcaaaaaaatcaaacatcattggcatgcaatgatagtcacttaattttattcaggaatctacaggtcagtgggatggtctgcctgg

SEQ ID NO: 8428 - DNA, 110 bp, synthetic construct
  source 1..110: mol_type = other DNA
tcctttcaagagcatgtgaaaaaattaggaaagcgggggaagggagataataagtatccaacttaagaaaactggaatattagagctcagtttcattctgctcttcattt

SEQ ID NO: 8429 - DNA, 110 bp, synthetic construct
  source 1..110: mol_type = other DNA
atccaacttaagaaaactggaatattagagctcagtttcattctgctcttcatttttctctgaaccaggtcacctctttctaattatgactgaaaactactcaagcgtag

SEQ ID NO: 8430 - DNA, 110 bp, synthetic construct
  source 1..110: mol_type = other DNA
gggaccactgaccaaagctgctcaccttggctaggcactgtaatagccacctgcctgagctgtctcatagcaggaggccccggtaaggaacaggggtgacaccccaacaa

SEQ ID NO: 8431 - DNA, 110 bp, synthetic construct
  source 1..110: mol_type = other DNA
tgagctgtctcatagcaggaggccccggtaaggaacaggggtgacaccccaacaactaaccaggaggatttgggaggggccagtaggaggcaggagatgaccaacctcca

SEQ ID NO: 8432 - DNA, 110 bp, synthetic construct
  source 1..110: mol_type = other DNA
tgataaaaacaaaattatggtgaaggcgactcgcccaatcattggtttgggaatacagggccctgggtgtctgatgagctatgaggtgcactagctttcataaaaattac

SEQ ID NO: 8433 - DNA, 110 bp, synthetic construct
  source 1..110: mol_type = other DNA
ctactcagggctgctctgctcccttggacctctccctgggaacacgggtgatcaaatgaaccgatccaatgcgaacctgaatatgcactgagtttctaggatcaagaatc

SEQ ID NO: 8434 - DNA, 110 bp, synthetic construct
  source 1..110: mol_type = other DNA
atgaaccgatccaatgcgaacctgaatatgcactgagtttctaggatcaagaatcaaatgtgaatttcctccttcttctttgacttgcactaaggttttcctttcctttg

SEQ ID NO: 8435 - DNA, 110 bp, synthetic construct
  source 1..110: mol_type = other DNA
cacaggcaaaaaagcacagggttagatccaacatggagtcaggtttgatcttctctgtcacagaactctgcacgttccagcttagagatgctcttctttagcacgtggct

SEQ ID NO: 8436 - DNA, 110 bp, synthetic construct
  source 1..110: mol_type = other DNA
tgtcacagaactctgcacgttccagcttagagatgctcttctttagcacgtggctcattcttccttcctattggccaatggcttgcatgtgatgaagttatggtcccact

SEQ ID NO: 8437 - DNA, 110 bp, synthetic construct
  source 1..110: mol_type = other DNA
tgaaaggtccagggataattggcatcacctcaggcctcaggtcctggcgggtctgacctgagcatattctaacccaccctgatacacttgcaaaactctattaagactga

SEQ ID NO: 8438 - DNA, 110 bp, synthetic construct
  source 1..110: mol_type = other DNA
acctgagcatattctaacccaccctgatacacttgcaaaactctattaagactgatgattagggtcatgtaggaatagggtcatgtaggaatgattccttccttctcttc

SEQ ID NO: 8439 - DNA, 110 bp, synthetic construct
  source 1..110: mol_type = other DNA
aacgcgccttcaagacttgctttctttcctttagttcctgaaatacttggggtggtggggtgccattagttagccctgcagataggagttggggttggcctgctcagaag

SEQ ID NO: 8440 - DNA, 110 bp, synthetic construct
  source 1..110: mol_type = other DNA
tgtctgatatccttgagtcagacaaaagactatgaaattgatgtggtcagcctcactgccaagctgcatttgccaagaacccaaccaagtggcaattgacagcacttgag

SEQ ID NO: 8441 - DNA, 110 bp, synthetic construct
  source 1..110: mol_type = other DNA
gatggccctgctccaacccacccccaaccccggcccctatcaagaaccccatcctcacacctccatcatttccacggccaaagcgtatctcccgcagccgcttccccaag

SEQ ID NO: 8442 - DNA, 110 bp, synthetic construct
  source 1..110: mol_type = other DNA
cacacctccatcatttccacggccaaagcgtatctcccgcagccgcttccccaagccgctgcctccccctgactgtctctctctctctctcttcctctctcgtccctccc

SEQ ID NO: 8443 - DNA, 110 bp, synthetic construct
  source 1..110: mol_type = other DNA
atcaacagggcaaatgagaaagcttcccaggagaaaaaataagtgtatttcacgagttcatctgaaagctctgtttttaattttaaacacattgcgtctttagaaagtcc

SEQ ID NO: 8444 - DNA, 110 bp, synthetic construct
  source 1..110: mol_type = other DNA
cccactgagccacagcagaaactcctatcactttgttttgataatgtctagttacatgtacatatttatcagactatcgataatcccagtagcaaagagaggcacagcgt

SEQ ID NO: 8445 - DNA, 110 bp, synthetic construct
  source 1..110: mol_type = other DNA
atgtacatatttatcagactatcgataatcccagtagcaaagagaggcacagcgtgacagcaggaccatctttcctgagagacagtgagttactccacttccatcttcgg

SEQ ID NO: 8446 - DNA, 110 bp, synthetic construct
  source 1..110: mol_type = other DNA
ccctccagcctctggctgagcggggcgactttgcaaagaactgagctgggtcccaggccccatgaacccatttcctccctcacacagaggtgcacaccgagggatcacag

SEQ ID NO: 8447 - DNA, 110 bp, synthetic construct
  source 1..110: mol_type = other DNA
ggccccatgaacccatttcctccctcacacagaggtgcacaccgagggatcacagctgaccctcgaaccacacggggctgcttatacgtgcatctcactcaataggaagc

SEQ ID NO: 8448 - DNA, 110 bp, synthetic construct
  source 1..110: mol_type = other DNA
agaaagctgctccatgaatcctacagctccaaagaacagaaggctgccaacaattccaggagcagggaagtgatgcttcccaagcagaggctccaagtgagaactcagcc

SEQ ID NO: 8449 - DNA, 110 bp, synthetic construct
  source 1..110: mol_type = other DNA
tgcatgcccgtgtgtgtgtgcatgcccgtgtgtgtgtgtgtgtgtgtgtgtctatcttccacagggcatagggcatagagcttaatacatactaaatcctcaataaatat

SEQ ID NO: 8450 - DNA, 110 bp, synthetic construct
  source 1..110: mol_type = other DNA
ctaagctacttggtagaaagtcctcttcaaccaaatgacataatgtatatcccaagtcagtcttagctgaaaataattaaactacccttgatagaatttcgataattttg

SEQ ID NO: 8451 - DNA, 110 bp, synthetic construct
  source 1..110: mol_type = other DNA
gaaagtcctcttcaaccaaatgacataatgtatatcccaagtcagtcttagctgaaaataattaaactacccttgatagaatttcgataattttggatgggaaaattctt

SEQ ID NO: 8452 - DNA, 110 bp, synthetic construct
  source 1..110: mol_type = other DNA
ttacaaataaatgctgagttaaggctctaaattctctgtggtgtattcacagcagaggaagaatatcctggccttcaggtcccggagcttgctcattctgtgcagccttt

SEQ ID NO: 8453 - DNA, 110 bp, synthetic construct
  source 1..110: mol_type = other DNA
aggaagaatatcctggccttcaggtcccggagcttgctcattctgtgcagccttttcaaagaagcgcgcaccaagagaatgtaaataccgcttccgcatctgtctgaaca

SEQ ID NO: 8454 - DNA, 110 bp, synthetic construct
  source 1..110: mol_type = other DNA
taaacaagtaaatcttggaagacaaacaatgatgaaaaagtaactaaatagctggaattctcgctgtggcgtgatggggttggcggcgtcttgggagcgctaggacacag

SEQ ID NO: 8455 - DNA, 110 bp, synthetic construct
  source 1..110: mol_type = other DNA
tcctggaggaggcggaagatagacagcagcagcacagctcaagttctcagagttagcaggtcgtgacaaacgacagctgaacgaataggtgactgagctgagctgagaca

SEQ ID NO: 8456 - DNA, 110 bp, synthetic construct
  source 1..110: mol_type = other DNA
ccttgatgagcaatctgcttcaccccatgcttctccttttacccactattacgcagcttcctgcccactcggccaccaatgcagagccataagctccatcataaagagat

SEQ ID NO: 8457 - DNA, 110 bp, synthetic construct
  source 1..110: mol_type = other DNA
gccagactgaggttcttccgcaggtgccctcccccacctcccgccaccccttccccagacacagggcagctttttataattcctttcacagaaaaggaaacagatccaga

SEQ ID NO: 8458 - DNA, 110 bp, synthetic construct
  source 1..110: mol_type = other DNA
tggtgatgctttgcagaattacccatctaaactactttaaggaaggagggtgtatgccatcacagctaagtcattttttagaagaaaaaggaaactgtttttacgctgta

SEQ ID NO: 8459 - DNA, 110 bp, synthetic construct
  source 1..110: mol_type = other DNA
taaatgcacaggaaagaaaatatgggggaaatataacacatgcatttaaatcaaccaatgcagcccctggggcattctccccgttggtgcagggaagggcgcggagggac

SEQ ID NO: 8460 - DNA, 110 bp, synthetic construct
  source 1..110: mol_type = other DNA
caatgcagcccctggggcattctccccgttggtgcagggaagggcgcggagggacagccagatctctgcattagtggctttagggcagagcctcagcttcctcagctgtg

SEQ ID NO: 8461 - DNA, 110 bp, synthetic construct
  source 1..110: mol_type = other DNA
cactctccccctgctgcccttcagactgcagctgattcatattttttaaggcaagtctctgacttcaccctgagctctgtcaagggacttttgtcacatcttgcacagga

SEQ ID NO: 8462 - DNA, 110 bp, synthetic construct
  source 1..110: mol_type = other DNA
taatcatgggcttcaagttgtttcttttccttataagactttgcttgccatgacgagcaagctgacatgaggtgatcctctggctccagctgcctagattcacccagttg

SEQ ID NO: 8463 - DNA, 110 bp, synthetic construct
  source 1..110: mol_type = other DNA
cgactgcagggaggtcctgttgtggtgcaacggaaatgaatgggactagtatctgtaaggattcgagttcgatccctgaccttgctcagtgggtcaggtatccaatactg

SEQ ID NO: 8464 - DNA, 110 bp, synthetic construct
  source 1..110: mol_type = other DNA
cctgttgtggtgcaacggaaatgaatgggactagtatctgtaaggattcgagttcgatccctgaccttgctcagtgggtcaggtatccaatactgccatgagctgtggta

SEQ ID NO: 8465 - DNA, 110 bp, synthetic construct
  source 1..110: mol_type = other DNA
taaaacagcgtctgacatacactaagtgctcactcaagtagctgttgaatgaaaggttatcaaagactgctgactgccccacatgggtgatgaacttggaaatatgaaca

SEQ ID NO: 8466 - DNA, 110 bp, synthetic construct
  source 1..110: mol_type = other DNA
ttgttaagaatcaaaggaacatcactcttctagtatctccaacaggcctttccgaacacacagtaatagagctgaagatctacacacagatcttcttcagcttaagatgg

SEQ ID NO: 8467 - DNA, 110 bp, synthetic construct
  source 1..110: mol_type = other DNA
aatagcccctgccctcatggttatactgttgttatggaagataagatgtccccgtgtaaaaggtccctacataaaacgccagcataatataacacagaataaagtttaat

SEQ ID NO: 8468 - DNA, 110 bp, synthetic construct
  source 1..110: mol_type = other DNA
aaaaaaatggatgctcttaagctaatttttgcatagcctttaagcattctgctctatcttctgtagtacagaagacagcagaggaacacaagagtagagcaagcacgggg

SEQ ID NO: 8469 - DNA, 110 bp, synthetic construct
  source 1..110: mol_type = other DNA
atcttctgtagtacagaagacagcagaggaacacaagagtagagcaagcacggggaacccctctgtacctttccattcattttactgcactccttgtgagcagtgtttgg

SEQ ID NO: 8470 - DNA, 110 bp, synthetic construct
  source 1..110: mol_type = other DNA
ttggttggaggtattttgggggccgcattggaggctgccgactgccggccttaaacaggattctttagctagtatgtaacagaggtccacgcagactgctcgagcgaaat

SEQ ID NO: 8471 - DNA, 110 bp, synthetic construct
  source 1..110: mol_type = other DNA
ttcagcagtgtctggttaagtttccagagacatcacggtgtgtaccgttcacacaaaacaaaattctcatctgatggactttaatttttaaaaacctagtatgtctgtgt

SEQ ID NO: 8472 - DNA, 110 bp, synthetic construct
  source 1..110: mol_type = other DNA
aaacaaaattctcatctgatggactttaatttttaaaaacctagtatgtctgtgttttggtgcatataccgtgcatatgacatgtcgatcatgtgtagaagagacgggtg

SEQ ID NO: 8473 - DNA, 110 bp, synthetic construct
  source 1..110: mol_type = other DNA
tggcactggctccttgaaacgcctgttttggcttcctgtcttcacaaaggctcgtttgctggaaaccagtccaattaattaaggggttgctctatggataattaagtagg

SEQ ID NO: 8474 - DNA, 110 bp, synthetic construct
  source 1..110: mol_type = other DNA
tccggagttcctgttgtggctcagcaggttgggatcccgacatagggtcaggaggatttgggttcaaggcctggccttgctcggtgtgctgaggatcgggtgatgctgaa

SEQ ID NO: 8475 - DNA, 110 bp, synthetic construct
  source 1..110: mol_type = other DNA
atttgggttcaaggcctggccttgctcggtgtgctgaggatcgggtgatgctgaaagcttggcgtgggtcacagaccttgtttttggcattgctgtggcagtgtcacagg

SEQ ID NO: 8476 - DNA, 110 bp, synthetic construct
  source 1..110: mol_type = other DNA
ttgttggccgcacatcgctttatacagcaacctacttgtggatccagctcagagccatcattgtgttgcttctcatcaggaaaggtttgctttcacctttaggaacaagt

SEQ ID NO: 8477 - DNA, 110 bp, synthetic construct
  source 1..110: mol_type = other DNA
ccacttctaactatagatgacaattcacatcatctgtaaaagcttaggatgctatgtggtcagaagacaaagtgaactaggacctgagtgagccatggaagcactgaaag

SEQ ID NO: 8478 - DNA, 110 bp, synthetic construct
  source 1..110: mol_type = other DNA
ttccctgtgtcttccattccagcaactctgggaatacttcataatgtcactgaatgtcaacaatcaccagagctgtgccccaaagggaccaagtatgctctcttcctgaa

SEQ ID NO: 8479 - DNA, 110 bp, synthetic construct
  source 1..110: mol_type = other DNA
gctacacagtgaaagccctcagatttccaggaggctccatggagcattttgtcaggccagttacagacctttgcagcacagcttccacagttaataccttttttccccct

SEQ ID NO: 8480 - DNA, 110 bp, synthetic construct
  source 1..110: mol_type = other DNA
tggtgaaaggaatgctacctgggttctaagaggccattcttgaaaaataagcagaagccaagtgactctggatctgtgtctttattagaagcagaacgccctgtaccttc

SEQ ID NO: 8481 - DNA, 110 bp, synthetic construct
  source 1..110: mol_type = other DNA
agccaagtgactctggatctgtgtctttattagaagcagaacgccctgtaccttctgtttgccttgtgccgagtctgcagaaggaagattggcggctacgcctcttgggt

SEQ ID NO: 8482 - DNA, 110 bp, synthetic construct
  source 1..110: mol_type = other DNA
gtactcagatgaccttcattttatccaatgccctttaaaaaaaatatctccgaattccatccaggatactgcattgcatttagtcaagtttcttagcctcgacactttct

SEQ ID NO: 8483 - DNA, 110 bp, synthetic construct; identical to SEQ ID NO: 8482
  source 1..110: mol_type = other DNA

SEQ ID NO: 8484 - DNA, 110 bp, synthetic construct
  source 1..110: mol_type = other DNA
ctgtcctggaagcgaaccctctctctgcagaagcttggacacaagcttctgagcggggcactcaagaccttcatggtttgatgctttgaggctctgctcccagcctcatc

SEQ ID NO: 8485 - DNA, 110 bp, synthetic construct
  source 1..110: mol_type = other DNA
acaacattatgtgaatttctccctcttcccttcctgccttctgtctttcccccaaaataagcttagattttcatctcagtccataatttccttaacagtgtgtctgtgta

SEQ ID NO: 8486 - DNA, 110 bp, synthetic construct
  source 1..110: mol_type = other DNA
acttacagctaaaatccagagctagaaaatctaacaagaaagccaaatgaaaactcatgtttcaacaacattaagaatgagattaggagttcctgctgtggcacagtggg

SEQ ID NO: 8487 - DNA, 110 bp, synthetic construct
  source 1..110: mol_type = other DNA
ccaagtaattaaaagtatcccagggttatggtgaaataggacaagtaaaacacgctcctggataccagctctctttcaggaccagctcttttgtattttctctctatttt

SEQ ID NO: 8488 - DNA, 110 bp, synthetic construct
  source 1..110: mol_type = other DNA
tcagatttgagatgtctcagataagggaaggctttacatacaaagcagctaagatatgaacggggcttgaagagcctctagactctgaagaggccaggctgtcaggacag

SEQ ID NO: 8489 - DNA, 110 bp, synthetic construct
  source 1..110: mol_type = other DNA
ttggtatgggctctaagacacccaaagtgtcttagaggcttgcagctccaaccctcgccagctggtggacagttgttacccaaccatagctctctgaaggcactgatcag

SEQ ID NO: 8490 - DNA, 110 bp, synthetic construct
  source 1..110: mol_type = other DNA
tctaaaggaggtaggttattgtaaggtcgtctattgctggataactcagattgcccctgctcgttagtgtttataatgtgctgcctggaatgacctagtcctcaggatga

SEQ ID NO: 8491 - DNA, 110 bp, synthetic construct
  source 1..110: mol_type = other DNA
tgcagctcccttatccactctgaaagcctaggattcacaaccctgatgagggtaccagggcctgaagttctggaaaggagccctcccttgcaacgttttctcttctcttt

SEQ ID NO: 8492 - DNA, 110 bp, synthetic construct
  source 1..110: mol_type = other DNA
acacagcaagggtgacagaaggccagtggttggcatgtacccttggccctggtacggagctctcccccgctgtttaccatccaacttcacaccaaggaggtcacttggct

SEQ ID NO: 8493 - DNA, 110 bp, synthetic construct
  source 1..110: mol_type = other DNA
ggacaacaaattaagtggtaataaaataagtgatttcccacagtgatgaaaaagaaactccaacaggtggaataaaaacttgaatggggaagaaatattttcaaatattg

SEQ ID NO: 8494 - DNA, 110 bp, synthetic construct
  source 1..110: mol_type = other DNA
tctttattctagaccaacctcctctgggttttgactgctatagcaaaattttacgtaaatatattttaaaatccagttttggggggaaaaaactgtaactgcaatgtata

SEQ ID NO: 8495 - DNA, 110 bp, synthetic construct
  source 1..110: mol_type = other DNA
tggtaaatcctttaacagagctggcacctacaccttagtctagaacatgtttttctccgcccgcctctttaacttctgttttagcaggtgtggggtggtttgtggttgaa

SEQ ID NO: 8496 - DNA, 110 bp, synthetic construct
  source 1..110: mol_type = other DNA
ctcagtgggttagggatctggcattactgcaagctgtgacataggttgcagatgtagctaggatcccatgttgctgtggctgcggcatgggctggcagctgcagctctga

SEQ ID NO: 8497 - DNA, 110 bp, synthetic construct; identical to SEQ ID NO: 8496
  source 1..110: mol_type = other DNA

SEQ ID NO: 8498 - DNA, 110 bp, synthetic construct
  source 1..110: mol_type = other DNA
gtattgtgcatacatcctcttgtctgatactgaaacaatttcatgtagtaagcgctgtaattctgtcagttttacagtcaaagcagctgaggcttatggaatggagttaa

SEQ ID NO: 8499 - DNA, 110 bp, synthetic construct
  source 1..110: mol_type = other DNA
gtgataattgctgtgctttgttactcgattaatattgtacagtcataaataatgtatccacgtatttggagattgttgcattcccagctgctgacttaccttgagagtca

SEQ ID NO: 8500 - DNA, 110 bp, synthetic construct
  source 1..110: mol_type = other DNA
ctctccataaactcttccccacttgacagtttgtattttagctgtttgttgacagtatgtcttcatcactggaaacatatggtccatgaagtcaggttttttcttttaat

SEQ ID NO: 8501 - DNA, 110 bp, synthetic construct
  source 1..110: mol_type = other DNA
gaaaccaaagcccagtcctgtttatggggagtcctgtttcggcctcggattccgttatcactaagtggcggggcttattgaacccccctccccaagccaaggttgtgttt

SEQ ID NO: 8502 - DNA, 110 bp, synthetic construct
  source 1..110: mol_type = other DNA
atctattactcttacaaagagtgtggacatgtgtgacttacagaaatcattttgtgggactgttgaggccaatctttagcaaatatttattgagtgcctactgtgatgca

SEQ ID NO: 8503 - DNA, 110 bp, synthetic construct
  source 1..110: mol_type = other DNA
gggactgttgaggccaatctttagcaaatatttattgagtgcctactgtgatgcagctgctgttttagatactagagtttcagtgttgaacaaaatccagagaccctgat

SEQ ID NO: 8504 - DNA, 110 bp, synthetic construct
  source 1..110: mol_type = other DNA
taacatcctggccacctttgaacgcacccgaagaaccagcagacattatgcagaaggtgtagaattccatggaagctgagcacacgagacatgagagacttcccacgagc

SEQ ID NO: 8505 - DNA, 110 bp, synthetic construct
  source 1..110: mol_type = other DNA
gcaggagagcaaaacacgaacaaagctgacagagtattaaaaagcaccaatccgatcacgaggctgaagaatataataactgaaaaattcaacagccgcttcgatagcaa

SEQ ID NO: 8506 - DNA, 110 bp, synthetic construct
  source 1..110: mol_type = other DNA
aacctttcaagtttttgctccccaacttactacagttcccagtcttctttgcaatgagacacacattatgtctaagtcctgcttcacgggatatgtgcgagtgatgcatg

SEQ ID NO: 8507 - DNA, 110 bp, synthetic construct
  source 1..110: mol_type = other DNA
gagacacacattatgtctaagtcctgcttcacgggatatgtgcgagtgatgcatgcaattctggcctggcacttaacgtgggagatgtatgcccatcagtccttttcccc

SEQ ID NO: 8508 - DNA, 110 bp, synthetic construct
  source 1..110: mol_type = other DNA
ggactttctaggaagaactaccctggaaaggaagcgttttgtgttaagagcccgagcagagatgcagccggagcagagatgcggccccacttcaccttcccgccccgcca

SEQ ID NO: 8509 - DNA, 110 bp, synthetic construct
  source 1..110: mol_type = other DNA
tcagcaccttctccgtggacacctctacctgggctcccgcatttcccttttgaccccagttccggcgacatcagtatccacaatgacaatgcactctgaactcagtttcc

SEQ ID NO: 8510 - DNA, 110 bp, synthetic construct
  source 1..110: mol_type = other DNA
ccagttccggcgacatcagtatccacaatgacaatgcactctgaactcagtttccctcccccagctccaatttgcctcatctctgaggcctcaagagtgtcccctgcctg

SEQ ID NO: 8511 - DNA, 110 bp, synthetic construct
  source 1..110: mol_type = other DNA
cattagttttgcagctcagatgagtctggcctttacctaattccgtacgtgggagtcctaatcgccaagcatgtgataacggaggaaactccgctgtgataacggcgaga

SEQ ID NO: 8512 - DNA, 110 bp, synthetic construct
  source 1..110: mol_type = other DNA
tcccttcagttacagaaactgctgcacctagagacccgacagggcattaattaactcctacacaacttatattatgggttcctttcgtgtggcagtgggaatgaacccaa

SEQ ID NO: 8513 - DNA, 110 bp, synthetic construct
  source 1..110: mol_type = other DNA
aaactgctgcacctagagacccgacagggcattaattaactcctacacaacttatattatgggttcctttcgtgtggcagtgggaatgaacccaactagtatccatgagg

SEQ ID NO: 8514 - DNA, 110 bp, synthetic construct
  source 1..110: mol_type = other DNA
acagcaagaacaattatacttacttgcttatatagctaactgcttatctgctgtccatctcttccgctacaatgtaaactgtacagggcaagggagttccctgtattcat

SEQ ID NO: 8515 - DNA, 110 bp, synthetic construct
  source 1..110: mol_type = other DNA
tcttttgatgttacaacggctcagacaagaggattgctccttggaggcacggcctggcctactcccgggatgccagccgcacacatggactcgctcaggatccaataagc

SEQ ID NO: 8516 - DNA, 110 bp, synthetic construct
  source 1..110: mol_type = other DNA
ggcctactcccgggatgccagccgcacacatggactcgctcaggatccaataagccagttcttgtgtcttctctacacctcactccacccctccaggctctaggcgtcca

SEQ ID NO: 8517 - DNA, 110 bp, synthetic construct
  source 1..110: mol_type = other DNA
atataactcaggcccttattaatttagacctgtgtctcaccaaccagttcaaatgagagctatcttcttaacatgcgtttagttatttatgcctagaaatcgggagacac

SEQ ID NO: 8518 - DNA, 110 bp, synthetic construct
  source 1..110: mol_type = other DNA
tggaacagactctgccgttgccccatttgcttttgctattatgtattcttggtttgcaccaccgtgctgaataagcaaaaaggacggagaccctgcctgtgaaaagcgcc

SEQ ID NO: 8519 - DNA, 110 bp, synthetic construct
  source 1..110: mol_type = other DNA
gcaccaccgtgctgaataagcaaaaaggacggagaccctgcctgtgaaaagcgccactttggctcctcctgggggccagagacatgcccagtggaccgcctgggccaggg

SEQ ID NO: 8520 - DNA, 110 bp, synthetic construct
  source 1..110: mol_type = other DNA
atatcttggcatgtgttacaaatggagtgagttaaataagcaaatgaatgaatggctctcttgacccaaggtacacacagcaggtgagtggagagctggttaggagcatg

SEQ ID NO: 8521 - DNA, 110 bp, synthetic construct
  source 1..110: mol_type = other DNA
ctctcttgacccaaggtacacacagcaggtgagtggagagctggttaggagcatgtaggcttccactcatggtttacaagggaccctttacaacgtttgataccttctac

SEQ ID NO: 8522 - DNA, 110 bp, synthetic construct
  source 1..110: mol_type = other DNA
acacacgcgcagcccagggacttgccagaggcgaaagcccaggagagatgtggctgcggacagagcttcctctgcccctgggtttccacatgcacctgtgtgctcacctt

SEQ ID NO: 8523 - DNA, 110 bp, synthetic construct
  source 1..110: mol_type = other DNA
gcggacagagcttcctctgcccctgggtttccacatgcacctgtgtgctcacctttcctcagacctgaacttggtgtgagaggcgtgccagcccccgtgggaagtgccag

SEQ ID NO: 8524 - DNA, 110 bp, synthetic construct
  source 1..110: mol_type = other DNA
taaattttttaaagttaaaaaaaaaaaaacacatccactctggaggtggccagaactgaccgtgaaccaccccccaaactccgtgccagattttaaacccatcagccatc

SEQ ID NO: 8525 - DNA, 110 bp, synthetic construct
  source 1..110: mol_type = other DNA
ctgaccgtgaaccaccccccaaactccgtgccagattttaaacccatcagccatccccaactgcatcccaataatttaattcataacatcagtactacataagacaacat

SEQ ID NO: 8526 - DNA, 110 bp, synthetic construct
  source 1..110: mol_type = other DNA
tgaaatactctaacatcaaaataaattcagtacctggaacatatatacgagacggaatactactcagctgtaaaaaaataatgaaataatgccgtttgcagcaaaacgga

SEQ ID NO: 8527 - DNA, 110 bp, synthetic construct
  source 1..110: mol_type = other DNA
atgcccatcaaactcttttccaaccaaccctcctgccaacagatgaagctgtgtggcccaggcttagaactaggcaagcgatatgggggaaatacatactgtctaaagca

SEQ ID NO: 8528 - DNA, 110 bp, synthetic construct
  source 1..110: mol_type = other DNA
gcccaggcttagaactaggcaagcgatatgggggaaatacatactgtctaaagcagatgcatagattataatcgaaagtttctaagttacttctagtccacctttaagat

SEQ ID NO: 8529 - DNA, 110 bp, synthetic construct
  source 1..110: mol_type = other DNA
tggggactgtgttaccacaatcaggacagagatgatgtgtacaactgattgagtgcctactaggcactaacaccacctcccgggtaccgaggtttgtactagactcgcac

SEQ ID NO: 8530 - DNA, 110 bp, synthetic construct
  source 1..110: mol_type = other DNA
gagacaacgtttaagacaaagaagcagcggatctgttgagactaaaatgcatccgtagctggttgaaacccaaaaagttaggaaaggaaaaatcctagctttttggtgtc

SEQ ID NO: 8531 - DNA, 110 bp, synthetic construct
  source 1..110: mol_type = other DNA
ccttaaccagcatcacatagattaacgttacaaacagatgctcccgtattttgaatgggtacagctaaattgatttcacgggtttttggcagccaccatgtttatctttt

SEQ ID NO: 8532 - DNA, 110 bp, synthetic construct
  source 1..110: mol_type = other DNA
taccacccaacacagaaagtgactccacaacaaaaggaacattgtcttgatcaaaactctaacatcagcactcaacacaaagctctactcacagtaaggactccacaaac

SEQ ID NO: 8533 - DNA, 110 bp, synthetic construct
  source 1..110: mol_type = other DNA
acaaacaaacaaacaaaaggccaagactgtgtaccagaatactacattctacataacacactcatacctaggccagggagctgcatttattttaaatcatcttcccatct

SEQ ID NO: 8534 - DNA, 110 bp, synthetic construct
  source 1..110: mol_type = other DNA
cagggcacagtgcctgtaggatgccctttaggtgttggaggtccagtcttgggggcacacaaagctgcataaatgctctctgatctcagcaaatgctgtcatagctcatg

SEQ ID NO: 8535 - DNA, 110 bp, synthetic construct
  source 1..110: mol_type = other DNA
catagtgcctggcacataggaagggccaagtaaagtgtggattggcaggataaattcagtaatcttaaaattcttagtatagtgctgtatgaagaactaggggtgctgtg

SEQ ID NO: 8536 - DNA, 110 bp, synthetic construct
  source 1..110: mol_type = other DNA
tcagtaatcttaaaattcttagtatagtgctgtatgaagaactaggggtgctgtgtgaagatcttcaactagttagtctgtggttctcaaccggcatccggtgggtaggg

SEQ ID NO: 8537 - DNA, 110 bp, synthetic construct
  source 1..110: mol_type = other DNA
ttttcagatcattcattgctaacatctcgaaatgcagtcgattttttttttacactggtcttgtatcctgtgatgttgcttggtccaattagttgtagtagttgtttagt

SEQ ID NO: 8538 - DNA, 110 bp, synthetic construct; identical to SEQ ID NO: 8537
  source 1..110: mol_type = other DNA

SEQ ID NO: 8539 - DNA, 110 bp, synthetic construct
  source 1..110: mol_type = other DNA
tagcatcaagggcaggaaagccaagcagacaagctaggcactctcggaccccatctctggattgagagctgtgtgaattctccggggcacaggtggggataatcatttgt

SEQ ID NO: 8540 - DNA, 110 bp, synthetic construct
  source 1..110: mol_type = other DNA
tctggattgagagctgtgtgaattctccggggcacaggtggggataatcatttgtctcccttctatttgtagagaagccagacccaggaaagcagagaaggaagaagaat

SEQ ID NO: 8541 - DNA, 110 bp, synthetic construct
  source 1..110: mol_type = other DNA
ctcccgggacggaaaacactgccaggttgccttacgagcgcctggaagaatacgtgagctttaaccaccactgtaccatctggggcgtgtgtgtgtgtgtgtgtgtgtgt

SEQ ID NO: 8542 - DNA, 110 bp, synthetic construct
  source 1..110: mol_type = other DNA
agttcatgttttgatagaatctctccaaaatccattaaacatccttttatctttctaaacatgctccactggatacggcttaaacgttctgctcctcagggttatcgtgc

SEQ ID NO: 8543 - DNA, 110 bp, synthetic construct
  source 1..110: mol_type = other DNA
gttctggtgcctgggctggccacgtcgaccgcccccccagcttacctcagaacaggctcgaaatacttcagcatgataatccgggccttgctccgccgtcagttccttta

SEQ ID NO: 8544 - DNA, 110 bp, synthetic construct
  source 1..110: mol_type = other DNA
gctcgaaatacttcagcatgataatccgggccttgctccgccgtcagttcctttaaatcatgcccagaggaaaacacaggcccctcggctgcaggggtttccaggcgagg

SEQ ID NO: 8545 - DNA, 110 bp, synthetic construct
  source 1..110: mol_type = other DNA
cacgaagttgggccctagttaggaataagacagcccagtgttacttggtgtggaaggcagaataatggctcccaaatgctccacatcttaatccctagagcccgtgaatg

SEQ ID NO: 8546 - DNA, 110 bp, synthetic construct
  source 1..110: mol_type = other DNA
ggcagaataatggctcccaaatgctccacatcttaatccctagagcccgtgaatgtgttaggtcacatggaaatggggattcagtttacagatagaattatttatacctg

SEQ ID NO: 8547 - DNA, 110 bp, synthetic construct
  source 1..110: mol_type = other DNA
ttaacagacattcctttgctgattacatattgaaagaattagttgttacaaagacacatgaactgaggctcttggtgttggtgcctcctcagctgttttcagctagcctg

SEQ ID NO: 8548 - DNA, 110 bp, synthetic construct
  source 1..110: mol_type = other DNA
acatgaactgaggctcttggtgttggtgcctcctcagctgttttcagctagcctgactctctgatgcgcttgtatctttaagggtagtccattaccagtgataacgttac

SEQ ID NO: 8549 - DNA, 110 bp, synthetic construct
  source 1..110: mol_type = other DNA
tccttgcccacacagtgctcacaggagcatgtgagcagttataaaatatcctctgggacactccatgagacagttgggtgctgagtgtgaagtgtgagggttggcgtgca

SEQ ID NO: 8550 - DNA, 110 bp, synthetic construct
  source 1..110: mol_type = other DNA
ggacactccatgagacagttgggtgctgagtgtgaagtgtgagggttggcgtgcatttctcacgggctcctgtgcccatcagttcacagtctctggaggggagggcaaag

SEQ ID NO: 8551 - DNA, 110 bp, synthetic construct; identical to SEQ ID NO: 8549
  source 1..110: mol_type = other DNA

SEQ ID NO: 8552 - DNA, 110 bp, synthetic construct; identical to SEQ ID NO: 8550
  source 1..110: mol_type = other DNA

SEQ ID NO: 8553 - DNA, 110 bp, synthetic construct
  source 1..110: mol_type = other DNA
atccttgtcaacctaatttccaaaaaatggacaataaagtcgttcttgggcctgacgtggtacagctgttctgcttatgacagaaactttgctgacctctaacccacaaa

SEQ ID NO: 8554 - DNA, 110 bp, synthetic construct
  source 1..110: mol_type = other DNA
ggtgccggctgcttgctgctggcccagccgggtgccttctctgcagtgaggaggctggttgtgtgataaggagctcctggtccgtccccacggtccccaaccatgcggca

SEQ ID NO: 8555 - DNA, 110 bp, synthetic construct
  source 1..110: mol_type = other DNA
tggttgtgtgataaggagctcctggtccgtccccacggtccccaaccatgcggcagaaagtctgcgtgtagctgtgggtgtgcaaagatactgtccatttatgtataaaa

SEQ ID NO: 8556 - DNA, 110 bp, synthetic construct
  source 1..110: mol_type = other DNA
ggaggctctaggcagtgacctttgccttctggtttcccttcagcgaagtagcaggggggctagtttttctccttcacttgctcgtgggccgttatcgggaggaattgttc

SEQ ID NO: 8557 - DNA, 110 bp, synthetic construct
  source 1..110: mol_type = other DNA
ggggctagtttttctccttcacttgctcgtgggccgttatcgggaggaattgttccattatctgagcttgaacgagcccagtaactggagaagacggccctgtgggagtg

SEQ ID NO: 8558 - DNA, 110 bp, synthetic construct
  source 1..110: mol_type = other DNA
ccacccagcatgcacagcgatcttttttattttcattctacttttaatttggggatcattgtggatctacttacagctgtaggaaagaatacagagagctccgtataccc

SEQ ID NO: 8559 - DNA, 110 bp, synthetic construct
  source 1..110: mol_type = other DNA
tcattgtggatctacttacagctgtaggaaagaatacagagagctccgtatacccttgatgtagcttcccagtggtaacgtcatacaagacagtagtacaaggtcacatc

SEQ ID NO: 8560 - DNA, 110 bp, synthetic construct
  source 1..110: mol_type = other DNA
tcagactgtgggggacaatatatgctccagggccaaaaaccaatagatgaaataactagaaattaactgagattaacagctgggtgtggcagcaattgaaacagatcatc

SEQ ID NO: 8561 - DNA, 110 bp, synthetic construct
  source 1..110: mol_type = other DNA
aaaaccaatagatgaaataactagaaattaactgagattaacagctgggtgtggcagcaattgaaacagatcatccataaatttaacagggcagagaggcagtcaaagag

SEQ ID NO: 8562 - DNA, 110 bp, synthetic construct
  source 1..110: mol_type = other DNA
tcctggacaacctggacctctttctgtttgtgtctcagcagcgagggtgtccctgagactctatcacctgttttcggagtacctggagtcctgtcacatctgtgagtgtc

SEQ ID NO: 8563 - DNA, 110 bp, synthetic construct
  source 1..110: mol_type = other DNA
agactctatcacctgttttcggagtacctggagtcctgtcacatctgtgagtgtccacagtgagtgctggggcacagcgggaaaggcaggcgggggctgctgtctcgggt

SEQ ID NO: 8564 - DNA, 110 bp, synthetic construct
  source 1..110: mol_type = other DNA
tgagggatgtgtccccaggatggggtccgaggacgtgggtgcaacagtgcttcctgcttggcctctgggtacccaggccccagagggccagacactgacccaagatcttc

SEQ ID NO: 8565 - DNA, 110 bp, synthetic construct
  source 1..110: mol_type = other DNA
gcttggcctctgggtacccaggccccagagggccagacactgacccaagatcttcattggcagttaagaccccagctaaccagggaccacggcacaactgtgcatgacat

SEQ ID NO: 8566 - DNA, 110 bp, synthetic construct
  source 1..110: mol_type = other DNA
caggagtgaggccctcggtgctctgggcaaactggcagaacagggcctcagacagttaggcgttttccggagaattctttaggagcccaatgccttatctcctggtatct

SEQ ID NO: 8567 - DNA, 110 bp, synthetic construct; identical to SEQ ID NO: 8566
  source 1..110: mol_type = other DNA

SEQ ID NO: 8568 - DNA, 110 bp, synthetic construct
  source 1..110: mol_type = other DNA
tgcaatttttaaaaagtgttcattttccagaatgatcctctggagcggacctcccagggggagttactactgtgattacacaactgtttcttgaaccaggtgcagtcctg

SEQ ID NO: 8569 - DNA, 110 bp, synthetic construct
  source 1..110: mol_type = other DNA
agggggagttactactgtgattacacaactgtttcttgaaccaggtgcagtcctgggtttgggaaagacaaagatggtgacataaaaatcccaggctttagagtccttct

SEQ ID NO: 8570 - DNA, 110 bp, synthetic construct
  source 1..110: mol_type = other DNA
atgatagtttccttgtagttctgcattattcgactcttctcttgttatttaactttccacatgatgctctgccaaccaggcttgaagctcctccaagcctagaagccatg

SEQ ID NO: 8571 - DNA, 110 bp, synthetic construct
  source 1..110: mol_type = other DNA
tccacatgatgctctgccaaccaggcttgaagctcctccaagcctagaagccatgtcttacactctccatcacctcaagtgtctagcacagtgcctttctcctaggaact

SEQ ID NO: 8572 - DNA, 110 bp, synthetic construct
  source 1..110: mol_type = other DNA
gccagattccgcattgttggggacattagctgctggtgagctgcagcataaaaaaggaatgaatggactggggtggcataaaaggtgcaccgtgatcaaaattcactggg

SEQ ID NO: 8573 - DNA, 110 bp, synthetic construct
  source 1..110: mol_type = other DNA
ggaatgaatggactggggtggcataaaaggtgcaccgtgatcaaaattcactgggccagactgtacgcaaagaataccttaataaacaaaaaagaggaggaaaaacaatc

SEQ ID NO: 8574 - DNA, 110 bp, synthetic construct
  source 1..110: mol_type = other DNA
cattttatgttttctcttcctggactgcacactaacccagggatgagagaggagtggagagcttgtgtgctctcacccctggtccgctgaccaaggagaaccatcgcccc

SEQ ID NO: 8575 - DNA, 110 bp, synthetic construct
  source 1..110: mol_type = other DNA
acatttattcaaagacataactaatcacgtgtctgtgtggtcccctacctgtccaacaagactaaaaatgcaaaaactatgtatcaactcctgcgtttccaccacagttc

SEQ ID NO: 8576 - DNA, 110 bp, synthetic construct
  source 1..110: mol_type = other DNA
acaagactaaaaatgcaaaaactatgtatcaactcctgcgtttccaccacagttcctgccccacaccatccagagagccgaggctcagtatgaggggtagtgtgaaatac

SEQ ID NO: 8577 - DNA, 110 bp, synthetic construct
  source 1..110: mol_type = other DNA
atgacttacaagcatcccttataaatgtgcaagcacacagcaggggctccaccgtgcctctgccacacaggaagtccccaaggaaggaggggacaatcatgtggcacttg

SEQ ID NO: 8578 - DNA, 110 bp, synthetic construct
  source 1..110: mol_type = other DNA
gcacattaggactggcggcacgaaaacatatgccgtcaccaacagccaccctgaaatgaaaagctgactggcatcaagtgacaggggctgcccttccactcagaaagcca

SEQ ID NO: 8579 - DNA, 110 bp, synthetic construct
  source 1..110: mol_type = other DNA
atgaaaagctgactggcatcaagtgacaggggctgcccttccactcagaaagccaagcatctctttctaacgtccacgtgggggttcacctctcaccccttgtacacatg

SEQ ID NO: 8580 - DNA, 110 bp, synthetic construct
  source 1..110: mol_type = other DNA
caactcagtgcgttttcacttacagagatgctttctaaatcatctctgaacaaagggggaagctatctcacagaacccgaaagagaactggggtcccagatcaagatggt

SEQ ID NO: 8581 - DNA, 110 bp, synthetic construct
  source 1..110: mol_type = other DNA
ggggaagctatctcacagaacccgaaagagaactggggtcccagatcaagatggtcaaaaagaaaggcatgacaacgaccaccgtgtggcaggggcccctgcagccctgg

SEQ ID NO: 8582 - DNA, 110 bp, synthetic construct
  source 1..110: mol_type = other DNA
caattaggaacttgggactagaaagtcgagaaagggccagaaaagggagtagaggaaaaagggaacaaaatgaaaagtgatttcagtcctccccctgaaactaaaggcgt

SEQ ID NO: 8583 - DNA, 110 bp, synthetic construct
  source 1..110: mol_type = other DNA
ggaaggtccatctctttcctccctgctcttctatccggtaccctattcagttggtgatgacataaagcggcacctcctaaacgtgtccccttagaaacccaagatgagga

SEQ ID NO: 8584 - DNA, 110 bp, synthetic construct
  source 1..110: mol_type = other DNA
gatgacataaagcggcacctcctaaacgtgtccccttagaaacccaagatgaggacgaggactctcagaaccatctttgggtgaattatgagttcaacatttgttacgat

SEQ ID NO: 8585 - DNA, 110 bp, synthetic construct
  source 1..110: mol_type = other DNA
tttattctgctatccccccaaaaaacttttctgtctatatcggcatcctttatattaaaagcccagcttaccataactaatttagggcctccattccatttgaacaactg

SEQ ID NO: 8586 - DNA, 110 bp, synthetic construct
  source 1..110: mol_type = other DNA
taaaagcccagcttaccataactaatttagggcctccattccatttgaacaactggggttttaccatgatttaattaaaacacatctccctaaattaaacacctttccct

SEQ ID NO: 8587 - DNA, 110 bp, synthetic construct
  source 1..110: mol_type = other DNA
ctgcctctgagcccatgaaggttccactggcccctcctctaggtctgcctccctgacctctgcatctgaagctccatccttgacatctgaggaattctcccatatccttg

SEQ ID NO: 8588 - DNA, 110 bp, synthetic construct
  source 1..110: mol_type = other DNA
acctctgcatctgaagctccatccttgacatctgaggaattctcccatatccttgaggagcagtgcgtgtttgtagatagttgggtatatatcagcctgttttctaccgt

SEQ ID NO: 8589 - DNA, 110 bp, synthetic construct
  source 1..110: mol_type = other DNA
tctcactgttagagtttgcagataaacaaggggaaaaggcaatggattcaagttggagacatcggtatgaacttatgtttagcttactattcatatggatagctacatat

SEQ ID NO: 8590 - DNA, 110 bp, synthetic construct
  source 1..110: mol_type = other DNA
gagacatcggtatgaacttatgtttagcttactattcatatggatagctacatatagaaatatttagagatacgtgtatgtgcttgggttaatagaaatgcacatatttc

SEQ ID NO: 8591 - DNA, 110 bp, synthetic construct
  source 1..110: mol_type = other DNA
aaattgatatgagacaagtgaatacgaaaaaaatgaaaccaaagttcaataacatgtatatatgagagagacccaggaaaacagagtaactctgaaatggcccaagccct

SEQ ID NO: 8592 - DNA, 110 bp, synthetic construct
  source 1..110: mol_type = other DNA
gtatatatgagagagacccaggaaaacagagtaactctgaaatggcccaagccctcatcttaaataccatctcagctaaagacaaaagaggatactggcgtttcagactt

SEQ ID NO: 8593 - DNA, 110 bp, synthetic construct
  source 1..110: mol_type = other DNA
tgcagctccagcaagaccaatctgccaacattgggcataaagctgctgcagcttcaacaagacgccagtggacacataacggcagagccaaatgaactccaggcaaatgg

SEQ ID NO: 8594 - DNA, 110 bp, synthetic construct
  source 1..110: mol_type = other DNA
tgaaccaaggagattcagctactgaatgcagcctgggatcccagattgattcctggaaaagaaggtgggaaatagtggaacagctggtgaaatgtgaatatggtttatag

SEQ ID NO: 8595 - DNA, 110 bp, synthetic construct
  source 1..110: mol_type = other DNA
gaaaagaaggtgggaaatagtggaacagctggtgaaatgtgaatatggtttatagttttgttaatggtactgtgtcagtgttcaaatttgatcattttactgtgattatg

SEQ ID NO: 8596 - DNA, 110 bp, synthetic construct
  source 1..110: mol_type = other DNA
tgactttaaaatcctagctactctgtatagctacatataatcatagcagtgaactgtaacttccttaaaggacagggactagaatttctctccctttttcagcacctctc

SEQ ID NO: 8597 - DNA, 110 bp, synthetic construct
  source 1..110: mol_type = other DNA
agcaggggcaacgtgcttccgagcatggctgctggaacgcagtcattaactatgtcactctgggctggatgtttcacctctttgcgcctgaggtttattcatctgtaaaa

SEQ ID NO: 8598 - DNA, 110 bp, synthetic construct
  source 1..110: mol_type = other DNA
attcttggaacagattgtagctacttgatgttaggtcatacagagaaattacacagtgagagagcaatccttttgcctggtgggagaatggatcctgcactgggaaaaaa

SEQ ID NO: 8599 - DNA, 110 bp, synthetic construct
  source 1..110: mol_type = other DNA
gtgagagagcaatccttttgcctggtgggagaatggatcctgcactgggaaaaaaaattcttgacatggttcataaaacacactcaacaaaagaaaaacctgtctggatc

SEQ ID NO: 8600 - DNA, 110 bp, synthetic construct
  source 1..110: mol_type = other DNA
aaaacagagcccaccttttgcaaatggcaggctgtcgaagggattaatccaagcgccctgcttgcactcaataccaggtaatataagaagagtccttgaatgggcgggat

SEQ ID NO: 8601 - DNA, 110 bp, synthetic construct
  source 1..110: mol_type = other DNA
ttgcatcttcccatacatagaaaagcactaaatcccttgagatacctggttttcttcaacaataatcttttgaagttccaactatttgatctttattgcaaaatttccta

SEQ ID NO: 8602 - DNA, 110 bp, synthetic construct
  source 1..110: mol_type = other DNA
tcaacaataatcttttgaagttccaactatttgatctttattgcaaaatttcctatctatcctggctcctccctaacctctttgcagctgtctctcagagctctttgaga

SEQ ID NO: 8603 - DNA, 110 bp, synthetic construct
  source 1..110: mol_type = other DNA
gaaagatttgcctctcttttgaggaatttgagtggcctttagtgcattggctagtaggcaaattcagaaaacttaaaacttaaaatgctatgcaccttcttcactcttag

SEQ ID NO: 8604 - DNA, 110 bp, synthetic construct
  source 1..110: mol_type = other DNA
gttttctttggaaaaggacccccaaagcatctttttttttttgtctgtgcagctcccatgagcctccaaggactgctaaccataccagctactctacaaatccacaggtg

SEQ ID NO: 8605 - DNA, 110 bp, synthetic construct
  source 1..110: mol_type = other DNA
ccatgagcctccaaggactgctaaccataccagctactctacaaatccacaggtgcatcctatttctctcctggggctcatcttggtctcaacctctcaggtgaggctca

SEQ ID NO: 8606 - DNA, 110 bp, synthetic construct
  source 1..110: mol_type = other DNA
aaggaatacggttccagagatgggactggatgagggctgatgtttgtctttgttgaatagctggggtctcgcattaaaaaatatccggaatgcttctgcctacttcttaa

SEQ ID NO: 8607 - DNA, 110 bp, synthetic construct
  source 1..110: mol_type = other DNA
aatagctggggtctcgcattaaaaaatatccggaatgcttctgcctacttcttaatttttaaatacttgtgttagtagcttctgtggacaaagaggagcattcattttaa

SEQ ID NO: 8608 - DNA, 110 bp, synthetic construct
  source 1..110: mol_type = other DNA
gtcgtttcactgggaggtaagtttcctccattctgtattaattttctggccttctaggagttaatacaacttatttaatgaatggagaggtgccattcacttcctgcata

SEQ ID NO: 8609 - DNA, 110 bp, synthetic construct
  source 1..110: mol_type = other DNA
aggagttaatacaacttatttaatgaatggagaggtgccattcacttcctgcatatggaagaccccttcaaaagacgtctttccaacttatcctgtcgtggtatcagcag

SEQ ID NO: 8610 - DNA, 110 bp, synthetic construct
  source 1..110: mol_type = other DNA
ccccacttgctatattgatctgaagaagaggaaacactaacctgaaaagatatttgcacccacatgtttgtttccacgtgttgttttcaatagccaagacatggaaataa

SEQ ID NO: 8611 - DNA, 110 bp, synthetic construct
  source 1..110: mol_type = other DNA
gcacccacatgtttgtttccacgtgttgttttcaatagccaagacatggaaataatctacctaagtgcccaccaatggatgaatggataaagaaaatgtggtatgtgtaa

SEQ ID NO: 8612 - DNA, 110 bp, synthetic construct
  source 1..110: mol_type = other DNA
ttttgtgcttttttgggtgattttactgttcaaaatggcctccaaggagtactgaaatgctgactggatcctaagcataagaagacggtgatgtgccttacagaggaaat

SEQ ID NO: 8613 - DNA, 110 bp, synthetic construct
  source 1..110: mol_type = other DNA
aatgctgactggatcctaagcataagaagacggtgatgtgccttacagaggaaataggtgcattagatcagcttgtgcaggtatgaactgtagagcagttgtaatgcagt

SEQ ID NO: 8614 - DNA, 110 bp, synthetic construct
  source 1..110: mol_type = other DNA
cattgcctctctggcatgaactaaggactcaggcaaatttcgacagcttcaggagagccacagaagacacccactctttgggggagggaaatgcctttataatcttttaa

SEQ ID NO: 8615 - DNA, 110 bp, synthetic construct
  source 1..110: mol_type = other DNA
agccacagaagacacccactctttgggggagggaaatgcctttataatcttttaattagggtttgaagacaatatacccaaagtgtcagaaaagacttcgtcaatgaccc

SEQ ID NO: 8616 - DNA, 110 bp, synthetic construct
  source 1..110: mol_type = other DNA
aaaaagggggggtggggtgtattgacaaatgagacctttcaaagcatgctccagtttcaaggaaagaggtttctgggactgtaccctatcttactctcctcctcattctt

SEQ ID NO: 8617 - DNA, 110 bp, synthetic construct
  source 1..110: mol_type = other DNA
ttcaaggaaagaggtttctgggactgtaccctatcttactctcctcctcattcttgcaagtctaaaaaataaagtagctaagatacttttaaactatctcaatttctagg

SEQ ID NO: 8618 - DNA, 110 bp, synthetic construct
  source 1..110: mol_type = other DNA
agcagtgacaatgctggatccttaacctgctgatccaccagggaacgctggcatatccttaactgaggctcttcctaccttaattgaggcctgggtatctgttttttttt

SEQ ID NO: 8619 - DNA, 110 bp, synthetic construct; identical to SEQ ID NO: 8618
  source 1..110: mol_type = other DNA

SEQ ID NO: 8620 - DNA, 110 bp, synthetic construct
  source 1..110: mol_type = other DNA
gtggacaggcttcaactcacaggctactgtccacaggctgaatgtcttcttcttgggaaagcttgcctttaaggcattttagctgattcaatcaggccccacagaggatc

SEQ ID NO: 8621 - DNA, 110 bp, synthetic construct
  source 1..110: mol_type = other DNA
ggaaagcttgcctttaaggcattttagctgattcaatcaggccccacagaggatccaggagaatcctacttcattaaattaaagtcacttagatctgcagccacacccac

SEQ ID NO: 8622 - DNA, 110 bp, synthetic construct
  source 1..110: mol_type = other DNA
tggcatgggttgaatgccaggtccagaaatttccacatgccttgggtgtagccaaaagaaaagaaaaatatgatctcagtttgccccaaaaaagtaacatatatgtgtgt

SEQ ID NO: 8623 - DNA, 110 bp, synthetic construct
  source 1..110: mol_type = other DNA
gccaggtccagaaatttccacatgccttgggtgtagccaaaagaaaagaaaaatatgatctcagtttgccccaaaaaagtaacatatatgtgtgtatgtatgtgtatata

SEQ ID NO: 8624 - DNA, 110 bp, synthetic construct
  source 1..110: mol_type = other DNA
ggtgtagagaaggcagtgaacaatggcaccaaatttccaggtctgggcacacaaggaaggactgctttggtctaccagttgggagtgtgttcagctacaagtaataggaa

SEQ ID NO: 8625 - DNA, 110 bp, synthetic construct
  source 1..110: mol_type = other DNA
aaatcaagaaatatggtaaaacttattaaagttggtcttttttttttttttttttctttttgggccatatctgtggcatatggaagttcctaggctaggggtcgtaatgg

SEQ ID NO: 8626 - DNA, 110 bp, synthetic construct; identical to SEQ ID NO: 8625
  source 1..110: mol_type = other DNA

SEQ ID NO: 8627 - DNA, 110 bp, synthetic construct
  source 1..110: mol_type = other DNA
taaaaacaatcccatgctctcgtcctgtgaagtgggtttggaggatctctgctgtacaaaaaggctggcgctttgcattttggaattctgcacagggctgtctctgctgg

SEQ ID NO: 8628 - DNA, 110 bp, synthetic construct
  source 1..110: mol_type = other DNA
acaaaaaggctggcgctttgcattttggaattctgcacagggctgtctctgctggagcctgacacctcagcagagacatggaactcattacctgtcctcagccagaggac

SEQ ID NO: 8629 - DNA, 110 bp, synthetic construct
  source 1..110: mol_type = other DNA
cacaacgggaactcctagtatcccaaatttttaaaaatcacatatattgtatatatcactggagtcagctaaatccatacaaccaaacttcaatgggtgctgtgggccta

SEQ ID NO: 8630 - DNA, 110 bp, synthetic construct
  source 1..110: mol_type = other DNA
tgacctgactatcgtgagctcaatatttttaggcctgacttaaagagaataaaagtgaagcttagagatgctaagaaacatcgcacaggtcaccaatgtttgaattatca

SEQ ID NO: 8631 - DNA, 110 bp, synthetic construct
  source 1..110: mol_type = other DNA
tgaagcttagagatgctaagaaacatcgcacaggtcaccaatgtttgaattatcaggtttggatttaatgcaagttgtcatattcttcacagcgtgttactttggatccg

SEQ ID NO: 8632 - DNA, 110 bp, synthetic construct
  source 1..110: mol_type = other DNA
attgggtaatacatagggatcatggtaaatctgtttattgcttttggtagtatggccactttaacaaaattaattcttccaatgcaggaacatggatatctttacatttc

SEQ ID NO: 8633 - DNA, 110 bp, synthetic construct; identical to SEQ ID NO: 8632
  source 1..110: mol_type = other DNA

SEQ ID NO: 8634 - DNA, 110 bp, synthetic construct
  source 1..110: mol_type = other DNA
ctggaatttcagcacagctgaagcagagggtacaaacgggaagaggcctgagatgaagctggaggagcaggtgaggggggtcacacacggggcgaaggagtgggactgta

SEQ ID NO: 8635 - DNA, 110 bp, synthetic construct
  source 1..110: mol_type = other DNA
aagctggaggagcaggtgaggggggtcacacacggggcgaaggagtgggactgtatctgaacagcgggggaaagtaaacagaggacactaaggaagcagggaagtgtgca

SEQ ID NO: 8636 - DNA, 110 bp, synthetic construct
  source 1..110: mol_type = other DNA
ccaacttgaattacacattctttttaaaactcttatctcattacatatggctccttgagagctgggccagccaaatattcagtcaggaagtcctggatttactttcccag

SEQ ID NO: 8637 - DNA, 110 bp, synthetic construct
  source 1..110: mol_type = other DNA
tgagagctgggccagccaaatattcagtcaggaagtcctggatttactttcccagttactaacttttctttctttctctccctctcttttttttttccacacccatagaa

SEQ ID NO: 8638 - DNA, 110 bp, synthetic construct
  source 1..110: mol_type = other DNA
ctaatgccacctcttaacatgtcctgttcactgtgacactacttatctgccaactgccacattattttatggtgtaatgttgtagataatcctgtcttcttatcagtatg

SEQ ID NO: 8639 - DNA, 110 bp, synthetic construct
  source 1..110: mol_type = other DNA
cgaagtcttagatgaagctagcaataacaatagatgcagtgttgaacagtgagtgaagtgttccctctaagatgggaaagagcagaattaaatcgtctaagtctagggtg

SEQ ID NO: 8640 - DNA, 110 bp, synthetic construct
  source 1..110: mol_type = other DNA
aagtgttccctctaagatgggaaagagcagaattaaatcgtctaagtctagggtggatcctagctctcccacacacaacctcacactgacattttaagcttgaaatcaga

SEQ ID NO: 8641 - DNA, 110 bp, synthetic construct
  source 1..110: mol_type = other DNA
agttgaagagcagaataggtgaaaaacagaatattagagaaaaaaaggggacagcctttcagagaccttcagcaaggcaagtcagtttcgttaaagtcaaggttctggtt

SEQ ID NO: 8642 - DNA, 110 bp, synthetic construct
  source 1..110: mol_type = other DNA
gccttgtgctgaagtttcattttttattgtaataaatattatatattcagacatatatgtgcactttaaacaagatttctaaagcaaacagccatagaggcaacagtcag

SEQ ID NO: 8643 - DNA, 110 bp, synthetic construct; identical to SEQ ID NO: 8642
  source 1..110: mol_type = other DNA

SEQ ID NO: 8644 - DNA, 110 bp, synthetic construct
  source 1..110: mol_type = other DNA
ctataggttgtagtgatgccattaagcaatgccattttagcagaacccccatccacaggagtcctggggactccaaagctgcatggatggttggtgtcctgtagccttgt

SEQ ID NO: 8645 - DNA, 110 bp, synthetic construct
  source 1..110: mol_type = other DNA
caggagtcctggggactccaaagctgcatggatggttggtgtcctgtagccttgtggtgatgattaccatataaggcagctgttcaaaaacagtgacgacttactcatgg

SEQ ID NO: 8646 - DNA, 110 bp, synthetic construct
  source 1..110: mol_type = other DNA
tcctgttggcttgccagcacagtcccattctttctcatgaatgcctggtgagtgctgtggaaaagaagctgtgagttcacatactcccatgtctgtggctttaatggctt

SEQ ID NO: 8647 - DNA, 110 bp, synthetic construct
  source 1..110: mol_type = other DNA
cttcagcccgcaacaatgggtctgactcttattcctgtgtctacaagatgttgcaacaattaagtgaaatgctatctggtaagataaaaacaaaaaacatgctataaaac

SEQ ID NO: 8648 - DNA, 110 bp, synthetic construct
  source 1..110: mol_type = other DNA
atgggtctgactcttattcctgtgtctacaagatgttgcaacaattaagtgaaatgctatctggtaagataaaaacaaaaaacatgctataaaaccaccaaataaatatc

SEQ ID NO: 8649 - DNA, 110 bp, synthetic construct
  source 1..110: mol_type = other DNA
gtacaacaacatgaaagtctggcttgtggaaagctgacttccattgtgtgtaccttctaaactcaaagtggaagcagatcaccagagaagctcatggccctaagggaaca

SEQ ID NO: 8650 - DNA, 110 bp, synthetic construct
  source 1..110: mol_type = other DNA
tctaaactcaaagtggaagcagatcaccagagaagctcatggccctaagggaacaaaaagttcatgaagatagtttataaatgtaagtgtaggacctatgtgctatgaaa

SEQ ID NO: 8651 - DNA, 110 bp, synthetic construct
  source 1..110: mol_type = other DNA
tacaaaagaacttacaaagcagaaaaagactcaaaggttttgaaaccaaatttatggttagcaaagggggtattttgggtgggagagataaatcaggggtctggggtgga

SEQ ID NO: 8652 - DNA, 110 bp, synthetic construct; identical to SEQ ID NO: 8651
  source 1..110: mol_type = other DNA

SEQ ID NO: 8653 - DNA, 110 bp, synthetic construct
  source 1..110: mol_type = other DNA
tcagattgttgtagtgtctcattaacagctaatttcattacttttctgagggaaaatgtctatccgttcccttgactatcagactaatttctagtgctttacttacgtga

SEQ ID NO: 8654 - DNA, 110 bp, synthetic construct
  source 1..110: mol_type = other DNA
atgtctatccgttcccttgactatcagactaatttctagtgctttacttacgtgaccaaaatatagcttctggtaaggtcatattatgtataagtctctacacatttcta

SEQ ID NO: 8655 - DNA, 110 bp, synthetic construct
  source 1..110: mol_type = other DNA
tagtaaaattactcagaatcagttggagtctatagagctttctatgagcttttggagtctgggtcctgaataacctttggtccagggccagtttagcctcactactgggg

SEQ ID NO: 8656 - DNA, 110 bp, synthetic construct
  source 1..110: mol_type = other DNA
tcagtgtctaagtagcatttattgagcacttactgtgtgccagctgctcttccaaattctttctgtgcataaatttatttaattttcattataaccctacatgataagta

SEQ ID NO: 8657 - DNA, 110 bp, synthetic construct
  source 1..110: mol_type = other DNA
gcacttactgtgtgccagctgctcttccaaattctttctgtgcataaatttatttaattttcattataaccctacatgataagtactagcattatctctacattatagat

SEQ ID NO: 8658 - DNA, 110 bp, synthetic construct
  source 1..110: mol_type = other DNA
agaagtaagggtgactgagagcaaacaggagcaggaacggcagacaagagagggatgctatttagggtatgtgtagtgtagacaccatgtggcttgctctcagcagctca

SEQ ID NO: 8659 - DNA, 110 bp, synthetic construct
  source 1..110: mol_type = other DNA
tgctatttagggtatgtgtagtgtagacaccatgtggcttgctctcagcagctcaaaatgtcagggcattgttagcatgttccaaatgccatatatgccgtgtggtttgt

SEQ ID NO: 8660 - DNA, 110 bp, synthetic construct
  source 1..110: mol_type = other DNA
aggagtgtcgatgttgatgggagaagtttctcaatccattgatgtgtgaaggcgggggaatattccaggggcagcactagacccatcctgtttgaatacatcctcaaaag

SEQ ID NO: 8661 - DNA, 110 bp, synthetic construct
  source 1..110: mol_type = other DNA
gaaaagcatctttaagttgttgactttgcttgttcgctatcttataatctcatttcccttcaaaagttttaatatgtcttagcgatttggcacaaagcataactataaaa

SEQ ID NO: 8662 - DNA, 110 bp, synthetic construct
  source 1..110: mol_type = other DNA
gttgttgactttgcttgttcgctatcttataatctcatttcccttcaaaagttttaatatgtcttagcgatttggcacaaagcataactataaaaatgctatacaactat

SEQ ID NO: 8663 - DNA, 110 bp, synthetic construct
  source 1..110: mol_type = other DNA
aatttcattgaggagacagtttctttcaaccttcatgtccaattctgacacagtcctaagagctgcccgtaatatccagaaggtattttaatggttatcatttattattt

SEQ ID NO: 8664 - DNA, 110 bp, synthetic construct
  source 1..110: mol_type = other DNA
ctaagagctgcccgtaatatccagaaggtattttaatggttatcatttattatttttgaggaacaatcagtgaatgaaattacttggctttccagttggtgacactgctc

SEQ ID NO: 8665 - DNA, 110 bp, synthetic construct
  source 1..110: mol_type = other DNA
ttaaaacctgtagctgtagtttttaaaaaaagtttaaagcagtaatacaaagcatctcttagaaagtttcttacctctagtgtctcagaagctgcctaaataagcctcca

SEQ ID NO: 8666 - DNA, 110 bp, synthetic construct
  source 1..110: mol_type = other DNA
ctcttagaaagtttcttacctctagtgtctcagaagctgcctaaataagcctccagagttctgttacccttactacttttggaggcatagtatggcatcctacaagagtc

SEQ ID NO: 8667 - DNA, 110 bp, synthetic construct
  source 1..110: mol_type = other DNA
cacagggggtttgccctattcatctttatagccatcgtgcctagaaaaaaatatgtcttagctacattagaagaaggatctggtatactttggtgttgtatttccaatga

SEQ ID NO: 8668 - DNA, 110 bp, synthetic construct
  source 1..110: mol_type = other DNA
tcttagctacattagaagaaggatctggtatactttggtgttgtatttccaatgaggagatgtgttatatttatagaacagcagagagaaagatttctccttagtccgtc

SEQ ID NO: 8669 - DNA, 110 bp, synthetic construct
  source 1..110: mol_type = other DNA
attataatagtaaaattcattcattcattcagtggaaatgaatccagctagtatccatgaggatgcagattcgatacctggcctcactcagtggctcagggatcccatgt

SEQ ID NO: 8670 - DNA, 110 bp, synthetic construct
  source 1..110: mol_type = other DNA
catgaggatgcagattcgatacctggcctcactcagtggctcagggatcccatgttgctgtggttgcagggtaggccagcagctgtatatatacatatggcaaactggct

SEQ ID NO: 8671 - DNA, 110 bp, synthetic construct
  source 1..110: mol_type = other DNA
ccgctgctgttgagaactccaataatataaaaggaggatgtgcacagtaggtggggcaaaatgggctggatggcgagttgtataagttagagatcatggagctaacggtg

SEQ ID NO: 8672 - DNA, 110 bp, synthetic construct
  source 1..110: mol_type = other DNA
ctgggacttcagcctaggtggttcttcctcgaaagcctgtgagcttgaccactaggctgttggaaatcacttttctcactctggtttgaaacctgaggtgaatctttgac

SEQ ID NO: 8673 - DNA, 110 bp, synthetic construct
  source 1..110: mol_type = other DNA
gagggggaaaaagttattgagtagccaccctctgggtatgatttaaagcaaaataaagctgagaaccaaggcacacgttctcgatcgtaccgctgtatggcaggaagtgg

SEQ ID NO: 8674 - DNA, 110 bp, synthetic construct
  source 1..110: mol_type = other DNA
aagctgagaaccaaggcacacgttctcgatcgtaccgctgtatggcaggaagtggaaacacgcttcagattgttgtaaagcaatgctgtctgtgcctttcccctctcact

SEQ ID NO: 8675 - DNA, 110 bp, synthetic construct
  source 1..110: mol_type = other DNA
aatccacccactaatagtgataatagcttttatttatgcagatcctttctttacgaaacccaatgtgctttttaaaatatgattctgttcattcagaatgcgcccttgtg

SEQ ID NO: 8676 - DNA, 110 bp, synthetic construct
  source 1..110: mol_type = other DNA
tattatcttccgatggagaaaaaagcaaaaatgggaataaaataattgtacttttgcaaacttcttacagttcttccctcagtcagcatgttttaaaataactgctttgg

SEQ ID NO: 8677 - DNA, 110 bp, synthetic construct
  source 1..110: mol_type = other DNA
gcaaacttcttacagttcttccctcagtcagcatgttttaaaataactgctttgggttgaccctttcacattttcgagtttcattttattctgagtgttgtcctttctga

SEQ ID NO: 8678 - DNA, 110 bp, synthetic construct
  source 1..110: mol_type = other DNA
gttgatccgaagatgaagacgacactgactatctgcagctcctcattagtagcgtgtgggggcatctggtctttccagtctgaaaatacagggacaactcctttgtaaag

SEQ ID NO: 8679 - DNA, 110 bp, synthetic construct
  source 1..110: mol_type = other DNA
ttgtcaattgtacctcagcaaagctgaggggaaaaaataaagtaaggagacacatggctcatatgggccccaaacagactatttgacccagaaaggaaggctcatcgttt

SEQ ID NO: 8680 - DNA, 110 bp, synthetic construct; identical to SEQ ID NO: 8679
  source 1..110: mol_type = other DNA

SEQ ID NO: 8681 - DNA, 110 bp, synthetic construct
  source 1..110: mol_type = other DNA
aggagaatgccacgctcctcaggttggaggaagggaaagcatagactcaagcctgcaataaagcaagacctgctctttgctttatatctgtttagctcctgcgcttgagt

SEQ ID NO: 8682 - DNA, 110 bp, synthetic construct
  source 1..110: mol_type = other DNA
caataaagcaagacctgctctttgctttatatctgtttagctcctgcgcttgagtctacacaagatatatctgtcatctttctaggttccaagaagaaaaatcagcctgt

SEQ ID NO: 8683 - DNA, 110 bp, synthetic construct
  source 1..110: mol_type = other DNA
cctttagttcaaaatccacgtataactgtggagttggccctcgattatacccagtttctctgtatccatggttctgcatcagcagattctaccaacagcagacaatggag

SEQ ID NO: 8684 - DNA, 110 bp, synthetic construct
  source 1..110: mol_type = other DNA
tatattattcttcaggcctgaaagatgtttaaatttagatgacttacctttcaaataaatagataacaaggagttcagtgttcccagagaacgatgtgtgaatacttttg

SEQ ID NO: 8685 - DNA, 110 bp, synthetic construct
  source 1..110: mol_type = other DNA
tagatgacttacctttcaaataaatagataacaaggagttcagtgttcccagagaacgatgtgtgaatacttttgaacactgaatgtaattttaaaaattatttccagca

SEQ ID NO: 8686 - DNA, 110 bp, synthetic construct
  source 1..110: mol_type = other DNA
aatgtgtgtgcttcccttataacactaaaaaaaatttttgaagtaaaagaacaaagtaattggctgtccttcttttaaatggtctgagaataaatactggcagtgtttca

SEQ ID NO: 8687 - DNA, 110 bp, synthetic construct
  source 1..110: mol_type = other DNA
gtaattggctgtccttcttttaaatggtctgagaataaatactggcagtgtttcatcttcttggcagtccctcccatgcatcttcagatttcgaggcccgtttgtggaca

SEQ ID NO: 8688 - DNA, 110 bp, synthetic construct
  source 1..110: mol_type = other DNA
ccagatcacacaggtctgttgcgggcggtacatgacatgttctgtttcatctcacaggcctctcccttctcctcttctctccctctccaagcttcttggtgtgagatgct

SEQ ID NO: 8689 - DNA, 110 bp, synthetic construct
  source 1..110: mol_type = other DNA
aggcctctcccttctcctcttctctccctctccaagcttcttggtgtgagatgctgctgtgaaaatattgaaaaaggacttcagtaatttaaatttttaattcaatgaat

SEQ ID NO: 8690 - DNA, 110 bp, synthetic construct
  source 1..110: mol_type = other DNA
cacgctcctgataagaaaccaagtgtcagtactatgcaaggaaatttaatgtggccattgagtgtatttctgccaagctctttgctccctccacgaggcaagcgatggag

SEQ ID NO: 8691 - DNA, 110 bp, synthetic construct
  source 1..110: mol_type = other DNA
ctaagttcatagcacagatcttctaaacttcttcgcgaagtatttcattttagagctcagccctttgaggccggaaaggcacgatcattcccattttacagatgtggaaa

SEQ ID NO: 8692 - DNA, 110 bp, synthetic construct
  source 1..110: mol_type = other DNA
ctcagccctttgaggccggaaaggcacgatcattcccattttacagatgtggaaattacagatgtggaaattgaggtggagaaaggtcaaaccatctttccatctttctc

SEQ ID NO: 8693 - DNA, 110 bp, synthetic construct
  source 1..110: mol_type = other DNA
cccccaccctaatacatgcggatatattaaaataatccaaacggaaggtgttcatttacgagagagctggttttgtaaaagaattctgagtttacaggaaaatcttaatg

SEQ ID NO: 8694 - DNA, 110 bp, synthetic construct
  source 1..110: mol_type = other DNA
ttacgagagagctggttttgtaaaagaattctgagtttacaggaaaatcttaatgccatgaaacaaaactgccaatggccacatcctacaaatcagggatggaaagggct

SEQ ID NO: 8695 - DNA, 110 bp, synthetic construct
  source 1..110: mol_type = other DNA
cacaaatgacctactaattgcccgagctaatggacacctttcagtccttatcttacttaacctttgggtggcacgtgaccacgccctcctccttgaaactctccctcctt

SEQ ID NO: 8696 - DNA, 110 bp, synthetic construct
  source 1..110: mol_type = other DNA
tggcttcatttgactcatctcatcaatgggtgggtcactggaaactttttttctctctcttctcctacccccttgttacacagtgtaagcacacagaaactagtccaagt

SEQ ID NO: 8697 - DNA, 110 bp, synthetic construct
  source 1..110: mol_type = other DNA
tctcttctcctacccccttgttacacagtgtaagcacacagaaactagtccaagtatacgtatgaaattgaaccaaacttatgcagcttcatcctttttacatgagaaga

SEQ ID NO: 8698 - DNA, 110 bp, synthetic construct
  source 1..110: mol_type = other DNA
gggaacttccctctgtccttctctttgtgcttctagaccacacacagctgtaccttgaccgtgactttggtgtgagtctcttctctctacaggagcagactcaagatgaa

SEQ ID NO: 8699 - DNA, 110 bp, synthetic construct
  source 1..110: mol_type = other DNA
ggtaggagggcaggacacggtgacaaaggcagctccctctctggagaggcatgcatttcctcggacacgctctggtctccgcctctagctgcaattagaaatggcagttt

SEQ ID NO: 8700 - DNA, 110 bp, synthetic construct
  source 1..110: mol_type = other DNA
tttcctcggacacgctctggtctccgcctctagctgcaattagaaatggcagtttatttattcaatgacaaaaacatttctcgttgggggctcctgtggtggctcagtgg

SEQ ID NO: 8701 - DNA, 110 bp, synthetic construct
  source 1..110: mol_type = other DNA
aaggaagaaagaaagagctgtattctagatttcctgactttttcattccatcatcctctgaagcgggccattagctaaggtttctgccatctggaaggcaggcatgaata

SEQ ID NO: 8702 - DNA, 110 bp, synthetic construct
  source 1..110: mol_type = other DNA
ctctgaagcgggccattagctaaggtttctgccatctggaaggcaggcatgaatagccaccatctgaactgtctgaagttcaggatcaatttataactggattgcttttc

SEQ ID NO: 8703 - DNA, 110 bp, synthetic construct
  source 1..110: mol_type = other DNA
cctgggagatccaaagaaggtagacttccatccctggcgaagatacaccaaagtcaagctaatgaagacccacgacttatatgagtggagcaggcgaagcaaaggggagt

SEQ ID NO: 8704 - DNA, 110 bp, synthetic construct
  source 1..110: mol_type = other DNA
aagctaatgaagacccacgacttatatgagtggagcaggcgaagcaaaggggagtctgagaccgaggcagatgaagaacacatcccatgactctggacaccagcactgcc

SEQ ID NO: 8705 - DNA, 110 bp, synthetic construct
  source 1..110: mol_type = other DNA
gcttctttttcccagccaagtggatcatttggcccgccaatcccatgagccatttggatcacaggttgtgcatttgtcatcgcagtaaggttgtgggggactccagaccc

SEQ ID NO: 8706 - DNA, 110 bp, synthetic construct
  source 1..110: mol_type = other DNA
ccaccaaagactttccctgaaggacaccagccctgagctctgcctgtgagttttcaccccagttttaacctctgcctgccgtgaggtgctgggccagtaacctctcggga

SEQ ID NO: 8707 - DNA, 110 bp, synthetic construct
  source 1..110: mol_type = other DNA
aaaatgatacacggatgtatatggatgaagtgtgagcaggaggccccgattacaccacgaatttttatataaacatccttcaggtgcatctgtgtcttcaaacttctcga

SEQ ID NO: 8708 - DNA, 110 bp, synthetic construct
  source 1..110: mol_type = other DNA
gcgggtgaggagcctaagtgtaaaatctcctctgatcagctcatcttgggggtgatgtggcctccatgaaacacctgcagcaactggtccttgagtggactgagctgacg

SEQ ID NO: 8709 - DNA, 110 bp, synthetic construct
  source 1..110: mol_type = other DNA
tgtggcctccatgaaacacctgcagcaactggtccttgagtggactgagctgacgatcacaggtttttgcgtcatgtcttctacttttgtcttgaattgccaacttaata

SEQ ID NO: 8710 - DNA, 110 bp, synthetic construct
  source 1..110: mol_type = other DNA
acccctggcctcagtgggcaccccgaggtacgggggcaaccagggcagccaccgccgtacatattttaagctcaagaattatatcataacactgcaggggtgctaaaggg

SEQ ID NO: 8711 - DNA, 110 bp, synthetic construct
  source 1..110: mol_type = other DNA
aaatccataagtattagctgaaaaaggaagtggttcaaggcttacgttatcgtccttttaaaatgtttataatttttttcgatcaagcctgaggcatgtggaagttctca

SEQ ID NO: 8712 - DNA, 110 bp, synthetic construct
  source 1..110: mol_type = other DNA
ttttaaaatgtttataatttttttcgatcaagcctgaggcatgtggaagttctcatgttggggatctaacctgcaaccagagcagcaaccagagccacaatagtgacaaa

SEQ ID NO: 8713 - DNA, 110 bp, synthetic construct
  source 1..110: mol_type = other DNA
attcgtttccactgagccacgacaggaactcctagcaaccactttaacaaggaaaatctgatggaacacctcacccagttcttcagcttaccaccttaaaaaataatgcc

SEQ ID NO: 8714 - DNA, 110 bp, synthetic construct
  source 1..110: mol_type = other DNA
atctgatggaacacctcacccagttcttcagcttaccaccttaaaaaataatgccccaaggggcgcccttgtggcacagctggttaaggataggatggtatcggttggtc

SEQ ID NO: 8715 - DNA, 110 bp, synthetic construct
  source 1..110: mol_type = other DNA
gacaatgttatttgcctgttttattctcattcttgagaccgcactggacttttccagagcctacatgatgttttcacaacaggacagaatgaatacagaaatggggagaa

SEQ ID NO: 8716 - DNA, 110 bp, synthetic construct
  source 1..110: mol_type = other DNA
agagcctacatgatgttttcacaacaggacagaatgaatacagaaatggggagaactcagctggcttctgtgaagtcaggacatcaagggattttgagaaccccagggct

SEQ ID NO: 8717 - DNA, 110 bp, synthetic construct
  source 1..110: mol_type = other DNA
tgaaggtccttcatcagcctcgctgacatatttggaccgtgttccggagacaattatgcgttaggctgtgtgagtcgtaagaagccagtgtcacttactgacatcccttt

SEQ ID NO: 8718 - DNA, 110 bp, synthetic construct
  source 1..110: mol_type = other DNA
atgcgttaggctgtgtgagtcgtaagaagccagtgtcacttactgacatccctttcttttcttttctcttttggtcgtgcccatggcatgtgcaagttcccgggtcaggg

SEQ ID NO: 8719 - DNA, 110 bp, synthetic construct
  source 1..110: mol_type = other DNA
catacagtggatctccaccaggagtcactttgggagtttatgggggagtttttgttgccttaaggactgcaaggtgcagctgaggtcaggaaggccaaggctctgcccag

SEQ ID NO: 8720 - DNA, 110 bp, synthetic construct
  source 1..110: mol_type = other DNA
tgccttaaggactgcaaggtgcagctgaggtcaggaaggccaaggctctgcccaggactgtgcctaaaaagaaagacttgtcttgagggcaacagggtgcttgaacgccc

SEQ ID NO: 8721 - DNA, 110 bp, synthetic construct
  source 1..110: mol_type = other DNA
cactccgcttcttcctttttcctgctgtctccgtttgctctgtgaggtgggatgctttctgggtccatggcactgtctaccacgggtgtggctgaagccggaggtggatg

SEQ ID NO: 8722 - DNA, 110 bp, synthetic construct
  source 1..110: mol_type = other DNA
tttctgggtccatggcactgtctaccacgggtgtggctgaagccggaggtggatgcagggctgatgacaggtggtacgcagagctcctgccacacccaccagaacacttt

SEQ ID NO: 8723 - DNA, 110 bp, synthetic construct
  source 1..110: mol_type = other DNA
actccagatccttaacccactgattcagggatctaacccgaatcctcatggatactggtcgggttcgttggcactaagccaccgtgggaaccccagggctctatccttat

SEQ ID NO: 8724 - DNA, 110 bp, synthetic construct
  source 1..110: mol_type = other DNA
tggtcgggttcgttggcactaagccaccgtgggaaccccagggctctatccttatgagctcatttcaccctaattcgttctttacttcaaatacagtgacatcagaagtg

SEQ ID NO: 8725 - DNA, 110 bp, synthetic construct
  source 1..110: mol_type = other DNA
gggctttttgagttgcaacaacacgcaagtacgcagcttcaccaatagccacgtttcaaagatgcggttggagctctcgctgtaacaagattaacgatgcactgaacgtg

SEQ ID NO: 8726 - DNA, 110 bp, synthetic construct
  source 1..110: mol_type = other DNA
tcaaagatgcggttggagctctcgctgtaacaagattaacgatgcactgaacgtgtaacaagtcttcagttaccaagggggcgcttttaaggtcgatcccagtgtttctg

SEQ ID NO: 8727 - DNA, 110 bp, synthetic construct
  source 1..110: mol_type = other DNA
gcaacagtttgcatctgttaaccccgagctcgccacccatcccacttcttcccccctcccccttggcaaccacaagtctgctatccatgtctgtgagtctgtttctgttc

SEQ ID NO: 8728 - DNA, 110 bp, synthetic construct
  source 1..110: mol_type = other DNA
tgttaaccccgagctcgccacccatcccacttcttcccccctcccccttggcaaccacaagtctgctatccatgtctgtgagtctgtttctgttccatagataggtttgt

SEQ ID NO: 8729 - DNA, 110 bp, synthetic construct
  source 1..110: mol_type = other DNA
aaatcttggctctctaaactttggttacgagaatttcccggggtgtgtaagctcagagacacgcattaaacacgtgtgtctaggtctcctgtatagatatggatagacag

SEQ ID NO: 8730 - DNA, 110 bp, synthetic construct
  source 1..110: mol_type = other DNA
gagacacgcattaaacacgtgtgtctaggtctcctgtatagatatggatagacagatgtatctatatatattttttgcgctaaattttaccttactcatccaggtgaagg

SEQ ID NO: 8731 - DNA, 110 bp, synthetic construct; identical to SEQ ID NO: 8729
  source 1..110: mol_type = other DNA

SEQ ID NO: 8732 - DNA, 110 bp, synthetic construct; identical to SEQ ID NO: 8730
  source 1..110: mol_type = other DNA

SEQ ID NO: 8733 - DNA, 110 bp, synthetic construct
  source 1..110: mol_type = other DNA
gaaaggaaagatgctttgatcagaaaagctggcagtctagggagaaggtggactcacgtcccaagagcagctccaaaggttccgctcggccataagagtttctaaaggga

SEQ ID NO: 8734 - DNA, 110 bp, synthetic construct
  source 1..110: mol_type = other DNA
acgtcccaagagcagctccaaaggttccgctcggccataagagtttctaaagggaataaggtacggtagggggcagtggtgggtagaggttgggctctgcatccttctct

SEQ ID NO: 8735 - DNA, 110 bp, synthetic construct
  source 1..110: mol_type = other DNA
catcagattcttatcccacggtaccaccgcgggaactcccggattctatcttattgtacagccttgaatgtttgggagtcgcttgatttcttcgggagccaaaaccgtga

SEQ ID NO: 8736 - DNA, 110 bp, synthetic construct
  source 1..110: mol_type = other DNA
gtgcaagagagagggggtgaattactcaaggtcacggagccaccgagggcggagcccagctctgagctctggtcttcctcccactgcgagctagcttttcgcgtctcccg

SEQ ID NO: 8737 - DNA, 110 bp, synthetic construct
  source 1..110: mol_type = other DNA
ccagctctgagctctggtcttcctcccactgcgagctagcttttcgcgtctcccgtacggcctcgtttcctttagtaataaataaataacaacgctgttcctttgggttt

SEQ ID NO: 8738 - DNA, 110 bp, synthetic construct
  source 1..110: mol_type = other DNA
tgatccagggaagctctgccggcggacgttgcctttcacaaagagagtgcttcggaagcgcagggagagctgaacgccgtgtacgaggcggtgtgatggagacagcagtg

SEQ ID NO: 8739 - DNA, 110 bp, synthetic construct
  source 1..110: mol_type = other DNA
aagcgcagggagagctgaacgccgtgtacgaggcggtgtgatggagacagcagtgccatgtgccactgtgaggacagagctggtggctctgacgccgtgttaagtcttcc

SEQ ID NO: 8740 - DNA, 110 bp, synthetic construct
  source 1..110: mol_type = other DNA
tcggactttgtgtatttacgcggatgagtgagtagcgggcagaggttttgactgtggccacaccatgaccctgaaatagatccgcgtttcccttattcgtgggcaaagtt

SEQ ID NO: 8741 - DNA, 110 bp, synthetic construct
  source 1..110: mol_type = other DNA
ggccacaccatgaccctgaaatagatccgcgtttcccttattcgtgggcaaagtttttctccagtccctccccttcgactgaagtttcagctgtgatgtgcttcacagga

SEQ ID NO: 8742 - DNA, 110 bp, synthetic construct
  source 1..110: mol_type = other DNA
ggagcagaggaggccagggcctctgctccgtcaaccgcagcgcacacgtccgaggaagccacggggatttgaaccccggtaacgtttgccttcgtagggagacacgcagc

SEQ ID NO: 8743 - DNA, 110 bp, synthetic construct
  source 1..110: mol_type = other DNA
aagccacggggatttgaaccccggtaacgtttgccttcgtagggagacacgcagcctctagagatccctaaagggcaagggacaagcaggacatttaagcatttcttttt

SEQ ID NO: 8744 - DNA, 110 bp, synthetic construct
  source 1..110: mol_type = other DNA
agttttcagaggtgtgagaaacagctgatgtgagacctctgaggaattacagaagaaatgctaatgaaatcttagagcaaagatcacacagattactagaccaaaatgag

SEQ ID NO: 8745 - DNA, 110 bp, synthetic construct
  source 1..110: mol_type = other DNA
gacgtccagtgtgccatggtcaacgtgatgtctcaaaagtctgccaacagtgtttcttcacaccgtcaaattttcctgttgttctgggaacaagcagagatgctgaagaa

SEQ ID NO: 8746 - DNA, 110 bp, synthetic construct
  source 1..110: mol_type = other DNA
cttcacaccgtcaaattttcctgttgttctgggaacaagcagagatgctgaagaagaaaattcaccagcagcggctacatgtccttttgcggggtcctcgcctttccccc

SEQ ID NO: 8747 - DNA, 110 bp, synthetic construct
  source 1..110: mol_type = other DNA
gtgagtgtggttggagtcttggctggaatcagctcctggttcacaggtggtgcccaggcaagtctctgcctctcagtataaggacaccaatcccatcatagggactccac

SEQ ID NO: 8748 - DNA, 110 bp, synthetic construct
  source 1..110: mol_type = other DNA
agtactttggttaatttcttcgcctggcaggagcaaggaaactttgctttctgcacaaagtgaatggtcactctactgagacacagagtggatatctttttatggagaat

SEQ ID NO: 8749 - DNA, 110 bp, synthetic construct
  source 1..110: mol_type = other DNA
ggaggtggggttggcaggacaagacttgatgtggggaatgaagctgaaagagggcaagtcaaaacctccctaattgcagagtcaccttctttttaccctttaatgacaag

SEQ ID NO: 8750 - DNA, 110 bp, synthetic construct
  source 1..110: mol_type = other DNA
attttcagccctttggctttccacctgctgctctgtccaaaattgttcccacccatgttccatccagctagcctccacttagtcttccagactcatctcctgtggcccct

SEQ ID NO: 8751 - DNA, 110 bp, synthetic construct
  source 1..110: mol_type = other DNA
tagatttttgagctattaagccaatatggtttgctttctaaaaccttagttagcccctggactctcactcattgatagcctcagtacctcaggaggagagcagatactgc

SEQ ID NO: 8752 - DNA, 110 bp, synthetic construct; identical to SEQ ID NO: 8751
  source 1..110: mol_type = other DNA

SEQ ID NO: 8753 - DNA, 110 bp, synthetic construct
  source 1..110: mol_type = other DNA
tggtgatgaggatgaagctaaggatgatacaatagctacgttttaggattgccataaggattaaatgactagtgcagcagaagccacgggaagacaggtgctcaatatct

SEQ ID NO: 8754 - DNA, 110 bp, synthetic construct
  source 1..110: mol_type = other DNA
cgattgatgcatttgctgactgccacattgtaggtcgtttgccacatctctggcctcaacctaccaaatgccagtcccatggcctccatccgtttgtgacaaccaaaaat

SEQ ID NO: 8755 - DNA, 110 bp, synthetic construct
  source 1..110: mol_type = other DNA
tcaacctaccaaatgccagtcccatggcctccatccgtttgtgacaaccaaaaatgtctccagtccttgccacatgtccccaggaggcaaggtcaccctggttgagaacc

SEQ ID NO: 8756 - DNA, 110 bp, synthetic construct
  source 1..110: mol_type = other DNA
aatcatgtgctttattgcaggggcctgaacaaacagggctaccagtgtcgacgtaagtaagaaagatttctgttgtattatcgtcattcttttctgttgaggtgtccctg

SEQ ID NO: 8757 - DNA, 110 bp, synthetic construct
  source 1..110: mol_type = other DNA
agtaagaaagatttctgttgtattatcgtcattcttttctgttgaggtgtccctgaacttctgaaaatctcaagctatagtcttttcttttcagaatgtaatgcagcaat

SEQ ID NO: 8758 - DNA, 110 bp, synthetic construct
  source 1..110: mol_type = other DNA
tgtccgtggtccatctttgaatatgtgctgggttttcccacctcttcacctcttttatacaatgaatctctctagcctctcctttttccatcaaaatgatgcccattttt

SEQ ID NO: 8759 - DNA, 110 bp, synthetic construct
  source 1..110: mol_type = other DNA
tatacaatgaatctctctagcctctcctttttccatcaaaatgatgcccatttttcaaagctccattcacacactatctcctttgtgaagtttttccttcatctcactca

SEQ ID NO: 8760 - DNA, 110 bp, synthetic construct
  source 1..110: mol_type = other DNA
gagacgagaaagccaggaaatgatacacaaataaacaagtaggttacatggcaagctaacgggagcagcgccgcggataaaagaaagcgatcctgggagcgcggaaggcg

SEQ ID NO: 8761 - DNA, 110 bp, synthetic construct
  source 1..110: mol_type = other DNA
agacccctgtctctgcttccagaaggaagacagtctgtgtataacacttgtcctgctcctcactggacaagccagaggatgcagtgagcagctggtcatgcacatggtaa

SEQ ID NO: 8762 - DNA, 110 bp, synthetic construct
  source 1..110: mol_type = other DNA
ctcctcactggacaagccagaggatgcagtgagcagctggtcatgcacatggtaagtatctagcagcagatgtacacgaagcacttaccatgtgcggaacccaggaccag

SEQ ID NO: 8763 - DNA, 110 bp, synthetic construct
  source 1..110: mol_type = other DNA
catcgctgttatcagccaaccttcacatcacgaggctacacaagcccgcccctccccagtcttctcccaccgcccccagggcccctctacacttttcatgaaacccaact

SEQ ID NO: 8764 - DNA, 110 bp, synthetic construct
  source 1..110: mol_type = other DNA
agtctgaaggccactcctggagaacccagaagggccggtggagcagaggccgtctgctggagcgttcccttttgctcagggacggtcagtccttgtgttgcatgcaagcc

SEQ ID NO: 8765 - DNA, 110 bp, synthetic construct
  source 1..110: mol_type = other DNA
gctggagcgttcccttttgctcagggacggtcagtccttgtgttgcatgcaagccttcaactgattggacaaggcccacccccattctagaggccaatgtccagtttgct

SEQ ID NO: 8766 - DNA, 110 bp, synthetic construct
  source 1..110: mol_type = other DNA
tactggtgctcgttacacatactagtacttgtaatacaatactagtgatacatcaacatacataaatcaacaactccatggacctcaaaggaattatgccgagtggaaaa

SEQ ID NO: 8767 - DNA, 110 bp, synthetic construct
  source 1..110: mol_type = other DNA
tgtttagaagtcccttgcttggtttaatgctgtatcttgaaattctggttaagctttgaacaaagagttccacctttcatttcgcactggactctgccaattatacagac

SEQ ID NO: 8768 - DNA, 110 bp, synthetic construct
  source 1..110: mol_type = other DNA
ttgaacaaagagttccacctttcatttcgcactggactctgccaattatacagacgatcctgggttatggtaaagtaagcctctgtgggttccactggagtcagatatac

SEQ ID NO: 8769 - DNA, 110 bp, synthetic construct
  source 1..110: mol_type = other DNA
gggtctgctgacagttctatgcaccatctagtggactattgattgagcgctgctgttctcctgagaagctctgggtgcatcaaagcggtgtttgggaaacctcgcctaat

SEQ ID NO: 8770 - DNA, 110 bp, synthetic construct
  source 1..110: mol_type = other DNA
ttctcctgagaagctctgggtgcatcaaagcggtgtttgggaaacctcgcctaattgccagaaccacgaggaaatgccaggggttgcctggccaggctcaaggcctcctc

SEQ ID NO: 8771 - DNA, 110 bp, synthetic construct
  source 1..110: mol_type = other DNA
ccccgggtagccgctggggtccacctgcgatgctgccgcccacctgcagccgcttcagctctgagcacacaggactggccctcctgctttcagtggaggcagctggttcc

SEQ ID NO: 8772 - DNA, 110 bp, synthetic construct; identical to SEQ ID NO: 8771
  source 1..110: mol_type = other DNA

SEQ ID NO: 8773 - DNA, 110 bp, synthetic construct
  source 1..110: mol_type = other DNA
agtcacctcttgaacccgtgctgcctgagccatttgccccccccccccccccgccatgggaggcgagctcccctacctgccttggtgggttcacgagtaggaccgaagat

SEQ ID NO: 8774 - DNA, 110 bp, synthetic construct
  source 1..110: mol_type = other DNA
atgggaggcgagctcccctacctgccttggtgggttcacgagtaggaccgaagatacgggtttgtgccaaggaaggaagcctatctagttcatgctgtaattgtcacatc

SEQ ID NO: 8775 - DNA, 110 bp, synthetic construct
  source 1..110: mol_type = other DNA
ctaccatatataaaacagataaccagcaaggacctcctgtacagctcagggaacgaaccatactcaatatcctgtaataacctataatggcagagaatgaaaaaagaata

SEQ ID NO: 8776 - DNA, 110 bp, synthetic construct; identical to SEQ ID NO: 8775
  source 1..110: mol_type = other DNA

SEQ ID NO: 8777 - DNA, 110 bp, synthetic construct
  source 1..110: mol_type = other DNA
catcattcaatagctctgaaattgtttttcaccattaggttggaatttattataaggctgaggcaaaaggtttttttttcatttttttattttatggccgtaccctcggc

SEQ ID NO: 8778 - DNA, 110 bp, synthetic construct; identical to SEQ ID NO: 8777
  source 1..110: mol_type = other DNA

SEQ ID NO: 8779 - DNA, 110 bp, synthetic construct
  source 1..110: mol_type = other DNA
gatgcggtttggttttcctcctttagccgttcctccacgtttcgaatcatagggtatacaggaagcatagttattcagatcatgagctcaagtctgggctctgccacagt

SEQ ID NO: 8780 - DNA, 110 bp, synthetic construct
  source 1..110: mol_type = other DNA
gaggcggctcactttaccagcagactgtttgaacgaacacattttccgacaggcttaacattcccatcggccctgtgggcttctgggctgtcctgtcacagcagagtcac

SEQ ID NO: 8781 - DNA, 110 bp, synthetic construct
  source 1..110: mol_type = other DNA
accattctaattgagaacagaaaacaagatactaaagagtttaaaaacgtgatggttattagtgaaatgtagaaaagagaccaatttcatttcattcttttgggagctag

SEQ ID NO: 8782 - DNA, 110 bp, synthetic construct; identical to SEQ ID NO: 8781
  source 1..110: mol_type = other DNA

SEQ ID NO: 8783 - DNA, 110 bp, synthetic construct
  source 1..110: mol_type = other DNA
aaacctctgctttgttcgtttacagtcgcgctcgcaggccagggattgaatccaagctgcagttgcaaactccgcagcagctgaggcaacactagatcctttaaccattg

SEQ ID NO: 8784 - DNA, 110 bp, synthetic construct
  source 1..110: mol_type = other DNA
caatgatcatcacgacacgatttacaatagctaagacatggacgcaacctaaatgtccacccacagaggagtggataaagacatggtacatacagagtggattatcactc

SEQ ID NO: 8785 - DNA, 110 bp, synthetic construct
  source 1..110: mol_type = other DNA
acatggacgcaacctaaatgtccacccacagaggagtggataaagacatggtacatacagagtggattatcactcagccatcaaaaagaatgaataccatttgcagcaac

SEQ ID NO: 8786 - DNA, 110 bp, synthetic construct
  source 1..110: mol_type = other DNA
gctcagacaagacaagctggcactcaacgtgagggacggaagagcctctgactggccacttaccgcctcctccagaagctgctcatcagggtggtctttgggagtgtgtc

SEQ ID NO: 8787 - DNA, 110 bp, synthetic construct
  source 1..110: mol_type = other DNA
ccacttaccgcctcctccagaagctgctcatcagggtggtctttgggagtgtgtctaagaatctccttcagcagcaaagggtatttgacgaggcggcttcgaggatatcc

SEQ ID NO: 8788 - DNA, 110 bp, synthetic construct; identical to SEQ ID NO: 8786
  source 1..110: mol_type = other DNA

SEQ ID NO: 8789 - DNA, 110 bp, synthetic construct; identical to SEQ ID NO: 8787
  source 1..110: mol_type = other DNA

SEQ ID NO: 8790 - DNA, 110 bp, synthetic construct
  source 1..110: mol_type = other DNA
cattgcggagaacacaaaaccagagctactcatttcttgattccctagaactgtccgtattgactttggaatgaattagatgtttaaaagctggaaagaattagctcgta

SEQ ID NO: 8791 - DNA, 110 bp, synthetic construct
  source 1..110: mol_type = other DNA
cctggggactgttcagtgttcattagggctttcaccagaggccaagacaaattggaagcattttagatctttcttagcttgtgggggagaagagaggttgaaagtcatca

SEQ ID NO: 8792 - DNA, 110 bp, synthetic construct
  source 1..110: mol_type = other DNA
aagcattttagatctttcttagcttgtgggggagaagagaggttgaaagtcatcacctaaaatgcggcgtgtacgtgctgaattaatcatgggagataaatccctattac

SEQ ID NO: 8793 - DNA, 110 bp, synthetic construct
  source 1..110: mol_type = other DNA
tgttttatgtgtgtctctgcttaaagacaccttatcgaacatatattgctgatccattaacacgacctcacagcgacagagctgtagctcatgcctggatgaggctgatc

SEQ ID NO: 8794 - DNA, 110 bp, synthetic construct
  source 1..110: mol_type = other DNA
attaacacgacctcacagcgacagagctgtagctcatgcctggatgaggctgatctgtgtgtttgcacatcagccttcttacagaacactagacacccgagagccacttt

SEQ ID NO: 8795 - DNA, 110 bp, synthetic construct
  source 1..110: mol_type = other DNA
acactggggctgtcacaggagactgactggccgtcctgggctgtttcagtcggcttcctcggccttcctcctagacgtgagcgagcatgcacttacttctcaagagcagc

SEQ ID NO: 8796 - DNA, 110 bp, synthetic construct
  source 1..110: mol_type = other DNA
tcctcggccttcctcctagacgtgagcgagcatgcacttacttctcaagagcagcatctaggtttctgacagcccccctcttagtgccactagtttccaaaccaccacgg

SEQ ID NO: 8797 - DNA, 110 bp, synthetic construct
  source 1..110: mol_type = other DNA
aataaaatggcaatacagacaaatttatcaataattaccttaaaagtcattggactgaaagctccaatcaagactgttggtggcggtgttcccgtggtggcacagaggaa

SEQ ID NO: 8798 - DNA, 110 bp, synthetic construct
  source 1..110: mol_type = other DNA
taccttaaaagtcattggactgaaagctccaatcaagactgttggtggcggtgttcccgtggtggcacagaggaacagaatctgactaggaaccatgaggatgtgggttt

SEQ ID NO: 8799 - DNA, 110 bp, synthetic construct
  source 1..110: mol_type = other DNA
tgacatgaaaatatatgtgtgtgtgtgtgtgtgcaaactgacttctaaatgtccgtattttcccacagattgtccttgccagatatgtcatacgtcaaaagtccgtaggt

SEQ ID NO: 8800 - DNA, 110 bp, synthetic construct
  source 1..110: mol_type = other DNA
tattttcccacagattgtccttgccagatatgtcatacgtcaaaagtccgtaggtacatctgtggcctctgtcttctatttcaccctttactatctggactgtcctattg

SEQ ID NO: 8801 - DNA, 110 bp, synthetic construct
  source 1..110: mol_type = other DNA
aataaaaaaatagaatggccaactactgtctgcatgtctgggacaattaaaagcagactgaaaactgttctcggccagcccactgcttctccattttagtattcccgtat

SEQ ID NO: 8802 - DNA, 110 bp, synthetic construct
  source 1..110: mol_type = other DNA
gactgaaaactgttctcggccagcccactgcttctccattttagtattcccgtatctttatagatttttaaataaaatgtcatttaaacatggactttacggatgagaaa

SEQ ID NO: 8803 - DNA, 110 bp, synthetic construct
  source 1..110: mol_type = other DNA
caattctgtcccttcctgccacttccatgcgtgtgactgcccaggcctaatatgtcaggcaggatgcggtctgggaccagggcgagcttcctttgaaagcagcagtgctg

SEQ ID NO: 8804 - DNA, 110 bp, synthetic construct
  source 1..110: mol_type = other DNA
caggcaggatgcggtctgggaccagggcgagcttcctttgaaagcagcagtgctgagcagatgtaaatattttctctcccaccccctcccgatcccaccgcccactgccg

SEQ ID NO: 8805 - DNA, 110 bp, synthetic construct
  source 1..110: mol_type = other DNA
gcaaatccagcccttggagaacttgagctggtttattccgtgtgtgtgtgctgttcttagctgtgctatgttgaattcaaccctgaatctgaccactgagtcgtattcct

SEQ ID NO: 8806 - DNA, 110 bp, synthetic construct
  source 1..110: mol_type = other DNA
cttagctgtgctatgttgaattcaaccctgaatctgaccactgagtcgtattcctaacacagtgtttcgttgttgggcttaagtctgtgaagattacttttaaatgggat

SEQ ID NO: 8807 - DNA, 110 bp, synthetic construct
  source 1..110: mol_type = other DNA
gacatgtttgggatgggctgggaggtgaaaggaagaaggagaataacaggtttcacaataaaccacaactgtaaccctaaacaaagggcattataggcgaccacgttttt

SEQ ID NO: 8808 - DNA, 110 bp, synthetic construct
  source 1..110: mol_type = other DNA
caataaaccacaactgtaaccctaaacaaagggcattataggcgaccacgttttttaaagttggcgtaattatacaaaaaacattctgctctttttttttttttagggcc

SEQ ID NO: 8809 - DNA, 110 bp, synthetic construct
  source 1..110: mol_type = other DNA
acggggaaaccattctactttccccggttagatataagctggagctgttggtcttcttaaagatcctccctaataagtatttaatgcaagacaaatgctgtagcaattta

SEQ ID NO: 8810 - DNA, 110 bp, synthetic construct
  source 1..110: mol_type = other DNA
cagtggagagtcagttgggtgcagttaatttttaattgcactctctctctgctctgcctttatttatcgccaagcagctgtagggccagaacccaccagaggggaaatca

SEQ ID NO: 8811 - DNA, 110 bp, synthetic construct
  source 1..110: mol_type = other DNA
gcctttatttatcgccaagcagctgtagggccagaacccaccagaggggaaatcactggttctgtgtcaacaggaatatcgttatagtacatggttcaaaaatagattac

SEQ ID NO: 8812 - DNA, 110 bp, synthetic construct
  source 1..110: mol_type = other DNA
ctttttgggaattaccactttctaaactgatctttttcatgtatttattccaggctttatgtttcttttttgcctatcagaagctatggttcaccaggaaatgggcttta

SEQ ID NO: 8813 - DNA, 110 bp, synthetic construct
  source 1..110: mol_type = other DNA
gttatttgtccccagtgcctaatccaatgccagccgagagcagaactcagcaagagtttgtggaagagatgaatttaaaaacttgtctctcatcaacaagtaggagccac

SEQ ID NO: 8814 - DNA, 110 bp, synthetic construct
  source 1..110: mol_type = other DNA
acgtattcggtagctcttttaccttgcaagcccaagtagtgatcagtaccctgtcgtaaccaagtgcaatacatgtgctgaaattgtacaatttaaaattagtagaatga

SEQ ID NO: 8815 - DNA, 110 bp, synthetic construct
  source 1..110: mol_type = other DNA
gtaaccaagtgcaatacatgtgctgaaattgtacaatttaaaattagtagaatgactaaactgaggctataaagcaggaaaaaaaaaggaattttttcccaaactaatgg

SEQ ID NO: 8816 - DNA, 110 bp, synthetic construct
  source 1..110: mol_type = other DNA
gtccattccactttccggtctgctcacttgggccgcttggtggtgtgcagatgcggactcctgggtgtgtgctgggtcctccaggttatactggaactccacccaacaga

SEQ ID NO: 8817 - DNA, 110 bp, synthetic construct
  source 1..110: mol_type = other DNA
tcatccagaagcaccctcccagacacatccagaaacaatgtgtacctaaatgcctgggtgccctgtgatctgctcaggttggttcatgaaattaaccatcgccctcaggg

SEQ ID NO: 8818 - DNA, 110 bp, synthetic construct
  source 1..110: mol_type = other DNA
gggtgccctgtgatctgctcaggttggttcatgaaattaaccatcgccctcaggggaaggtctccgtttagccaagcgagtggccctgtcacactgtccagggggtccct

SEQ ID NO: 8819 - DNA, 110 bp, synthetic construct
  source 1..110: mol_type = other DNA
tgctgtgacaagtcacgtggaatccctcaaatctacctcaattactgaatgacgtggaagcctgtcacgtttgcatcttttagagagtaagtcaccatttgtttttggaa

SEQ ID NO: 8820 - DNA, 110 bp, synthetic construct
  source 1..110: mol_type = other DNA
ggcaaaggtgttggagtcgagcgggcacatgttttcctagagcttatcattgtgccgaggcagagtggaagcttcaccagcatgaaagggagaccttcacagctttcctt

SEQ ID NO: 8821 - DNA, 110 bp, synthetic construct
  source 1..110: mol_type = other DNA
cgaggcagagtggaagcttcaccagcatgaaagggagaccttcacagctttccttgtatctcctgcttttgctgggactctcccctgccttccagaagccacttctgcct

SEQ ID NO: 8822 - DNA, 110 bp, synthetic construct
  source 1..110: mol_type = other DNA
actctgggtcggggctctgtgcttgtcttccggccgtctgcctggaaaagcctgtggattcccataaagatctctcagcacaagacatcagtgtttgccacgccgaaagc

SEQ ID NO: 8823 - DNA, 110 bp, synthetic construct
  source 1..110: mol_type = other DNA
ctgttcttattgtcacatccgtaacccttatcacagcaaatgacacctagaggccaggtagcaaatacttgttggcagaattcgtgagggttgagtgaatgagcaatcgt

SEQ ID NO: 8824 - DNA, 110 bp, synthetic construct
  source 1..110: mol_type = other DNA
aggtagcaaatacttgttggcagaattcgtgagggttgagtgaatgagcaatcgtgatgattcggtacagcctagaaaattccatcgtggttattgctgttataaggcct

SEQ ID NO: 8825 - DNA, 110 bp, synthetic construct
  source 1..110: mol_type = other DNA
taccctttctaatgctccacccactggagcttgtaagaaagcagagatagcacaagggcagctgagtcaaaaactgctgagggagttccctttgtggctcagcagtaaca

SEQ ID NO: 8826 - DNA, 110 bp, synthetic construct
  source 1..110: mol_type = other DNA
cggaagcccccctgacagtggcccagttagcctcctctgaagcaggcagagagctccaaccaggaggtgctcacaaacgggtttggttcctgaagagtgggaaccctgct

SEQ ID NO: 8827 - DNA, 110 bp, synthetic construct
  source 1..110: mol_type = other DNA
ccaaccaggaggtgctcacaaacgggtttggttcctgaagagtgggaaccctgctgggacgtctcagcagcagcagatgacctctgtccagcagaagcaaataacggcga

SEQ ID NO: 8828 - DNA, 110 bp, synthetic construct
  source 1..110: mol_type = other DNA
gaaaacaccagacccagtccaggaattcggggtgtgtggtctctgctgacacaaagtcttccactaggtttcaaggcctataaactagtcacctgggttggtcaaagttt

SEQ ID NO: 8829 - DNA, 110 bp, synthetic construct
  source 1..110: mol_type = other DNA
agtcgtccttaggactggaaacgatgagcgcaggagctggcgccgaggcgggcggcgtgcatcagctgcactcacttaccggagaccccgtgacttcttctttgcaacac

SEQ ID NO: 8830 - DNA, 110 bp, synthetic construct
  source 1..110: mol_type = other DNA
cgtgcatcagctgcactcacttaccggagaccccgtgacttcttctttgcaacacagggaaaataagtttctagtgggctcctgaaatgcacagatgcagaaacactttg

SEQ ID NO: 8831 - DNA, 110 bp, synthetic construct
  source 1..110: mol_type = other DNA
cggggttgggaagaaggcatgcttcaccagagtggccagagcaaaagagcaggggcctggttagagtcttcagaagggtcacagcttagttgtggggctaaagcaaccct

SEQ ID NO: 8832 - DNA, 110 bp, synthetic construct
  source 1..110: mol_type = other DNA
gaaaagggaggatgaaagctaaaaagacagaagcaagaaatgcccatcaaatgcaaaacacagcattgcaagtctaattcctctctcagtagccacccaaacaactgtgt

SEQ ID NO: 8833 - DNA, 110 bp, synthetic construct
  source 1..110: mol_type = other DNA
taacttcacagttaaatattcttccgcaatatgtctcgtgacggtggtccggggtttctcattattgtataataaatattttcagccgtctcttttaggttatatctcat

SEQ ID NO: 8834 - DNA, 110 bp, synthetic construct
  source 1..110: mol_type = other DNA
gcatctggcctgggaggttctgggtggactttctgcccaggccacgggggcagtcgcagggcccccagcgcagaagggctccgtgccagatgttcgaactctctctcgac

SEQ ID NO: 8835 - DNA, 110 bp, synthetic construct
  source 1..110: mol_type = other DNA
gcagggcccccagcgcagaagggctccgtgccagatgttcgaactctctctcgacattcttagcccctttggtcgtgggtccccacattttcatctgtccctgggcctgc

SEQ ID NO: 8836 - DNA, 110 bp, synthetic construct
  source 1..110: mol_type = other DNA
gggtctggttttcagccacactgacccagaaatgtatccagaataaggacgtatgcagcataataaagatttctagctcagactccatctcggaaagagaaccacggtta

SEQ ID NO: 8837 - DNA, 110 bp, synthetic construct
  source 1..110: mol_type = other DNA
cagcataataaagatttctagctcagactccatctcggaaagagaaccacggttaggtgaggtgggagacgtgttaggaagtgtgagttatagccgtgctgattgagagt

SEQ ID NO: 8838 - DNA, 110 bp, synthetic construct
  source 1..110: mol_type = other DNA
tacactagctcttcctatttctatcactggccccgtgacagaaatgcacatatttcagacaagattaaaatgggaaatatctgtatgcacatattctctgattccctgta

SEQ ID NO: 8839 - DNA, 110 bp, synthetic construct
  source 1..110: mol_type = other DNA
cagacaagattaaaatgggaaatatctgtatgcacatattctctgattccctgtaggtagaagccctcttctactttaagtcatgtttgcagctccctgacctgtggcat

SEQ ID NO: 8840 - DNA, 110 bp, synthetic construct
  source 1..110: mol_type = other DNA
agggtaaaattaaatgataaactttgagaaagtgtacagtgaaagctatccagacagggtggtttcaggcgtatctgtgtacattaggtgtaaggtatccaggcagaagg

SEQ ID NO: 8841 - DNA, 110 bp, synthetic construct
  source 1..110: mol_type = other DNA
aattataacccactgcactgagccaaggttctaaccctcacctctgcagcaatccgagccgctgcagctggatcattaaccccctgcaccacagcgggaactcctgttcg

SEQ ID NO: 8842 - DNA, 110 bp, synthetic construct
  source 1..110: mol_type = other DNA
gagccgctgcagctggatcattaaccccctgcaccacagcgggaactcctgttcgtaggctttttatgatggccattctgagaggtgtgagtgatacctcattgtggttt

SEQ ID NO: 8843 - DNA, 110 bp, synthetic construct
  source 1..110: mol_type = other DNA
ttctgcagaaaagagtttcggttacacttcagtttggtttgcagcactgctgtagacatagcccgtgtcgcagaggggttcttccattagctgtgagactgcataaccga

SEQ ID NO: 8844 - DNA, 110 bp, synthetic construct
  source 1..110: mol_type = other DNA
acatagcccgtgtcgcagaggggttcttccattagctgtgagactgcataaccgagatttttaacaatttgcaagcatctagggttagacatacattgtcttggaaaata

SEQ ID NO: 8845 - DNA, 110 bp, synthetic construct
  source 1..110: mol_type = other DNA
gggggaaagtgtaagtgaattaattcgtagacccccagtcacgtctcagagaactgcagagttgcttgcatgggaacccacttggctggtttagaaagtgtgtctacacc

SEQ ID NO: 8846 - DNA, 110 bp, synthetic construct
  source 1..110: mol_type = other DNA
gtgtgaacttggctgagctgctctgtccaggtatctagtcacacattattctgagtgttcctgtgtgttggggtcagacgctagtgaagcagttgccctccagtgtggtg

SEQ ID NO: 8847 - DNA, 110 bp, synthetic construct
  source 1..110: mol_type = other DNA
tgttcctgtgtgttggggtcagacgctagtgaagcagttgccctccagtgtggtgggccttgtccagtcagttgagggcctgaatagagccaaggctgacctctgacctc

SEQ ID NO: 8848 - DNA, 110 bp, synthetic construct
  source 1..110: mol_type = other DNA
ctgggtcacccagccgtctaacatgccatcacaagtgtccttgtacaaaggggcggggtggaggccaggggacaccagagcaggacgctgtgctgtgggtcctgcagacg

SEQ ID NO: 8849 - DNA, 110 bp, synthetic construct
  source 1..110: mol_type = other DNA
cctctgctccgtcagagtgggggacaggggagcctcccactcattctccgggcatgggaatttccacccagactcagccagagtcctcgagggagtaagacggcttgcct

SEQ ID NO: 8850 - DNA, 110 bp, synthetic construct
  source 1..110: mol_type = other DNA
tcatagaacttgggttacatccagccaagccccacctaggagctctgtcgtctaaatgaggttacttctctctctgtgagtccttctccccacctccaaaaccaagacct

SEQ ID NO: 8851 - DNA, 110 bp, synthetic construct
  source 1..110: mol_type = other DNA
atctagagaaccacataaccggtgaaatttggctttcagaggaacacagagatatatattaatatctccactgtgggtttttactgctttaattatgacttgccgacagc

SEQ ID NO: 8852 - DNA, 110 bp, synthetic construct
  source 1..110: mol_type = other DNA
atattaatatctccactgtgggtttttactgctttaattatgacttgccgacagcttggggaatcttcctttctgtaagacagaaaaacaaaacggtttcatttcgtttc

SEQ ID NO: 8853 - DNA, 110 bp, synthetic construct; identical to SEQ ID NO: 8851
  source 1..110: mol_type = other DNA

SEQ ID NO: 8854 - DNA, 110 bp, synthetic construct; identical to SEQ ID NO: 8852
  source 1..110: mol_type = other DNA

SEQ ID NO: 8855 - DNA, 110 bp, synthetic construct
  source 1..110: mol_type = other DNA
catgctaatgaacttaggtctgcatagttgccaataaaatcatgaaacaactcgagactcaatggtagaaatccagtgtgtgtgtatgtgtgtgtgtacccatcgtgtgt

SEQ ID NO: 8856 - DNA, 110 bp, synthetic construct
  source 1..110: mol_type = other DNA
tacgtatggttggatgagttgactcgctatggacagtggcaggaggggagcttgggcagcacgtgtgcaccatatgctccaggtgtctgagttttttctctgtgggatgc

SEQ ID NO: 8857 - DNA, 110 bp, synthetic construct
  source 1..110: mol_type = other DNA
aggcccgcctccaggctgggtacccaggaaccctccttctctcctcgcctttgagggccctgcctctcaccttggctgcaaaatggaaatgcctgagagcttcagaaatg

SEQ ID NO: 8858 - DNA, 110 bp, synthetic construct
  source 1..110: mol_type = other DNA
ggccctgcctctcaccttggctgcaaaatggaaatgcctgagagcttcagaaatgaccagtgttcatctctgttctctgcacacactcgcacttcctctgtgtagacgta

SEQ ID NO: 8859 - DNA, 110 bp, synthetic construct
  source 1..110: mol_type = other DNA
tctcttgcagtgaacttttcattatattctcaggaaggtctcttagaagttatggggagttcccgttgtggcgcagtgagaacaaatctgaccagtatccatgagcatat

SEQ ID NO: 8860 - DNA, 110 bp, synthetic construct
  source 1..110: mol_type = other DNA
taccttccagggattttagaagcttctcaggcttcaaaaatgcctttggaacaagtactagagcttgtttgctaccctcagcgaagcccataggctgctaccccagcctg

SEQ ID NO: 8861 - DNA, 110 bp, synthetic construct
  source 1..110: mol_type = other DNA
tactagagcttgtttgctaccctcagcgaagcccataggctgctaccccagcctggctgtggttccgcctgcgaaaatcacagcctaaccaatccgttcaagaacgcgcg

SEQ ID NO: 8862 - DNA, 110 bp, synthetic construct
  source 1..110: mol_type = other DNA
tccgactgtaccacccttcaaatacggttctcgctcaaggttactctacagcagtgttgacagcatcgattaaatcatacacgaaaacgaagacttttttcaatgttctt

SEQ ID NO: 8863 - DNA, 110 bp, synthetic construct
  source 1..110: mol_type = other DNA
ctacagcagtgttgacagcatcgattaaatcatacacgaaaacgaagacttttttcaatgttcttattactttgtaacatccttagggttcgattttcaaatattaaatt

SEQ ID NO: 8864 - DNA, 110 bp, synthetic construct
  source 1..110: mol_type = other DNA
gaaaagctggctttgcgcctgcctccttacctcgcaggtttccagctctgtgcccttggatcgatcattagccttctggtcacctttttcttcatctgtgaaggaggctc

SEQ ID NO: 8865 - DNA, 110 bp, synthetic construct
  source 1..110: mol_type = other DNA
cgctaaagggaaactatctcatctcatcggaacgcagcagaattgccatgacagtaccaagaaagaaacaaccgggagggagaagagagtggcttgaaggttatgtcctc

SEQ ID NO: 8866 - DNA, 110 bp, synthetic construct
  source 1..110: mol_type = other DNA
ataacttggggctcggcagcgggatcttccatgcgaccccaaaagctggaagatggacaaaaacaatgccagagggaacggacctctcagttttcaaggctctgttgcca

SEQ ID NO: 8867 - DNA, 110 bp, synthetic construct
  source 1..110: mol_type = other DNA
atccacgacgtgcaaagagcttggctctgaacacacaggcacagggcgtgcccctgggtaaatgccacgagggctctggagatgcgcacatgtaatttggttttcagctc

SEQ ID NO: 8868 - DNA, 110 bp, synthetic construct
  source 1..110: mol_type = other DNA
gggtaaatgccacgagggctctggagatgcgcacatgtaatttggttttcagctctcagctctcgggccaagtccgctgctgtgctcagcccttcctttctcagctacat

SEQ ID NO: 8869 - DNA, 110 bp, synthetic construct
  source 1..110: mol_type = other DNA
tgaggcccttgcagacaaaactatattcttctaaatgagatagtctttccccatttgttaagtttacagcttcataattactcgcaattatcattacgtgttcccaatat

SEQ ID NO: 8870 - DNA, 110 bp, synthetic construct
  source 1..110: mol_type = other DNA
tgccagcttcggttcattctctcacccgattataagccttgaggttattttcatgctccactcttacaaagagagcttctgtggacattgcattcattggcaggacgtct

SEQ ID NO: 8871 - DNA, 110 bp, synthetic construct
  source 1..110: mol_type = other DNA
ctccactcttacaaagagagcttctgtggacattgcattcattggcaggacgtctggctagattgtacggtaactgtactttctgagaaattgtcaggaattctggtcgt

SEQ ID NO: 8872 - DNA, 110 bp, synthetic construct
  source 1..110: mol_type = other DNA
atgcaactacagagctggctttctgcagcagatgtaaaggcaggcagcttattgtcatagcgtgttgggatatttctaatcacatcgtcacatgtgtgctgtcatgcagc

SEQ ID NO: 8873 - DNA, 110 bp, synthetic construct
  source 1..110: mol_type = other DNA
ctgcccttttattggggagggggcttgttatctaggaatagatgagcgtcactgggatgaaatttctgtccctgcaggagccccaggcctggcagacgcacagcaggctg

SEQ ID NO: 8874 - DNA, 110 bp, synthetic construct
  source 1..110: mol_type = other DNA
aggggcagatccaggggacatgaaaagctggggtcagctgtgcagtgcaggacactgtttctgtatcacagacataaacaccgagccacaactgcctcctatggcacatt

SEQ ID NO: 8875 - DNA, 110 bp, synthetic construct
  source 1..110: mol_type = other DNA
gagtaacgtctctggcctgtgactctctggggaacatgtgcgtggaggtgaacgcaggtcgaaaggactcaaggcatccctgctgtgacgctaacttcaaatgacagttg

SEQ ID NO: 8876 - DNA, 110 bp, synthetic construct
  source 1..110: mol_type = other DNA
tcctttgatgagtcattctccatttcctcttccacccagtcccgggcaaccacgttttacttctggattttatgaacttgactattttagacacctcacatcagtgagat

SEQ ID NO: 8877 - DNA, 110 bp, synthetic construct
  source 1..110: mol_type = other DNA
gtgaatcatctaaacaaacgtcctttctgaattcgctggactcttttacagacatccagttcacttagctgcttaaccctcacttgcaaatatttgaagaagaaagctac

SEQ ID NO: 8878 - DNA, 110 bp, synthetic construct
  source 1..110: mol_type = other DNA
taaatattatattaataatagcgtagagaggagttccctttgtggcgcagcagaaatgaatccagctagtctccatgaggacgcgagttcaggccctggccccgctcagc

SEQ ID NO: 8879 - DNA, 110 bp, synthetic construct
  source 1..110: mol_type = other DNA
ccctttgtggcgcagcagaaatgaatccagctagtctccatgaggacgcgagttcaggccctggccccgctcagcaggttaatgaccggtgttgctgtgagctgtggtgt

SEQ ID NO: 8880 - DNA, 110 bp, synthetic construct
  source 1..110: mol_type = other DNA
gagattccagagaacgcgctgttagactcttagtccctgggtttgagggtcgtatttcagatcaaccggacaaggaaaaatgtattcacttacattgaagtgcgctgcat

SEQ ID NO: 8881 - DNA, 110 bp, synthetic construct
  source 1..110: mol_type = other DNA
ccacgcgccctgatttacataacggagtcatcccagagcttctgcttgcctctcagcacagcaggctccatatggaggcctaatgaacacattagcagaacctgtggcga

SEQ ID NO: 8882 - DNA, 110 bp, synthetic construct
  source 1..110: mol_type = other DNA
gcacagcaggctccatatggaggcctaatgaacacattagcagaacctgtggcgacccatttgcaaaggacagactggtccccacgaagggacctatccacacaggcacc

SEQ ID NO: 8883 - DNA, 110 bp, synthetic construct
  source 1..110: mol_type = other DNA
tcagccacttgggcagagttcctgaattctctgagcccctgctccctcacgggcgaggggaacgtggtttcagctttgctcccacagagcttttgtgcaaatcaaaccag

SEQ ID NO: 8884 - DNA, 110 bp, synthetic construct
  source 1..110: mol_type = other DNA
cacagcagcagagcgtcattggtggttttcgaagtctgaccccggttggacacagcttctgatggtcaagtgcctcttgagatttccagtaatgaccacgcttggccaca

SEQ ID NO: 8885 - DNA, 110 bp, synthetic construct
  source 1..110: mol_type = other DNA
agggccccgctctgggccttcgtcccagtgacctggccgtgggaggaccagctgcctctggtctggagcaacaggaggagcacgagacagaagtagagcctgacagagtg

SEQ ID NO: 8886 - DNA, 110 bp, synthetic construct
  source 1..110: mol_type = other DNA
ctctggtctggagcaacaggaggagcacgagacagaagtagagcctgacagagtgtgggagtgcgcgtgcgtgtacatgcgtgtgcgtgcgtgcgtgtgcgcgcagggga

SEQ ID NO: 8887 - DNA, 110 bp, synthetic construct
  source 1..110: mol_type = other DNA
tcactccatcctgctccagcggctcaagctgcctgagatgttaattttgaaaaggagccttctggtcgaccaagaaaatgaacacatgtttccagtagcattaaaggagt

SEQ ID NO: 8888 - DNA, 110 bp, synthetic construct
  source 1..110: mol_type = other DNA
agctgttagcctcctgtggcttctcaaagggaataaaaattaaagagcagcctttgaaattgggcctcccagtctcgccagcacgtttcagtgctcaggtggctggtggc

SEQ ID NO: 8889 - DNA, 110 bp, synthetic construct
  source 1..110: mol_type = other DNA
aggggagaaaagcccttggcagtttgattccagggcccggctttgagggcagatttctgcagtgccgttaaactcctgcagagcttcctctgtagctggttgacactgaa

SEQ ID NO: 8890 - DNA, 110 bp, synthetic construct
  source 1..110: mol_type = other DNA
ggggcggtgtggctgacagggagtaagcaggtcacctttgggcgcacagcttcgtcagtcttgggaagcgctgagcacacacgtgaaattgcgcagcgatgagaccccag

SEQ ID NO: 8891 - DNA, 110 bp, synthetic construct
  source 1..110: mol_type = other DNA
cagtcttgggaagcgctgagcacacacgtgaaattgcgcagcgatgagaccccaggagtttcccggaggctctttgtaatcgattctcctgcatcccgtccacaatactt

SEQ ID NO: 8892 - DNA, 110 bp, synthetic construct
  source 1..110: mol_type = other DNA
tctcgtacagatgactcatcagaaccacctgagaagctccctcttaaagcggcggaaaaatcagtgaaaacatgcaaatgtggtggtcgggcgggagagtgtttaaaacg

SEQ ID NO: 8893 - DNA, 110 bp, synthetic construct
  source 1..110: mol_type = other DNA
aattctgcgctttggaggcgtgtgtctgcacaggttctagaatcatgtgctcagattcgtctgggctgaccaatgaatgtgcgggaagtgggggacaaccagctgatgct

SEQ ID NO: 8894 - DNA, 110 bp, synthetic construct
  source 1..110: mol_type = other DNA
aacatcgccatcattctgatgtgtccgccaagcgcctattccgagtccaggggcgacgtgcccgtcagcctgggagacgcaagcgccgggtgtgtcgtcagacctggacc

SEQ ID NO: 8895 - DNA, 110 bp, synthetic construct
  source 1..110: mol_type = other DNA
agccgagtgtggaaaggcacctggggtggaggattagtgtaaagggcaggagaccgcatcagtccggtgggctgatcacaggctaagacgtcttagtctcttgggtcaca

SEQ ID NO: 8896 - DNA, 110 bp, synthetic construct
  source 1..110: mol_type = other DNA
gcaagtgttcacatcaagtggtggaaggggaataaatacatcaagctcgccttccaggcccacagccacctcctctcctccctgcttgatgcccgtgtcagtcacttctc

SEQ ID NO: 8897 - DNA, 110 bp, synthetic construct
  source 1..110: mol_type = other DNA
aggcccacagccacctcctctcctccctgcttgatgcccgtgtcagtcacttctcaggcacaaccgatcctgcgtccctagcagcttcaccctcattagaatgacgtggc

SEQ ID NO: 8898 - DNA, 110 bp, synthetic construct
  source 1..110: mol_type = other DNA
atatagtggaatcctaccttacgtgaagtatatacattttaaggtcaactcctgaagcagaaacgtatctacatccttcaagattccccagtaaggtgcagcatatcgtc

SEQ ID NO: 8899 - DNA, 110 bp, synthetic construct
  source 1..110: mol_type = other DNA
ttgaactcccccccgtcgaaagcgttaccacaccacactcgcagctcgtgggaagtctcctgtgagagaagtcattgagagagattgtcttctttctgcagggagaacct

SEQ ID NO: 8900 - DNA, 110 bp, synthetic construct
  source 1..110: mol_type = other DNA
ttggactgagtgaatttctgtaacatcgggatgaacaagacgggcatctgactatctcttgagatacgagttaccttacaggtgtcactcccccggccactgcctcacca

SEQ ID NO: 8901 - DNA, 110 bp, synthetic construct
  source 1..110: mol_type = other DNA
ctcttgagatacgagttaccttacaggtgtcactcccccggccactgcctcaccacaagggtgaacctgacccactgccatttccgtgccgccctgcgtccttgtctgcg

SEQ ID NO: 8902 - DNA, 110 bp, synthetic construct
  source 1..110: mol_type = other DNA
gaatagtaaaattcatgctaataatggcaattcttagattttcgtacaacaagaatgaacagcaaatgaaaaatatgatgcaagtcgagcaagaacaaccttggaagaga

SEQ ID NO: 8903 - DNA, 110 bp, synthetic construct
  source 1..110: mol_type = other DNA
tgaacagcaaatgaaaaatatgatgcaagtcgagcaagaacaaccttggaagagagaagaggctttcaatgtagctctcacagccctttttccccgcctttcggacgagg

SEQ ID NO: 8904 - DNA, 110 bp, synthetic construct; identical to SEQ ID NO: 8902
  source 1..110: mol_type = other DNA

SEQ ID NO: 8905 - DNA, 110 bp, synthetic construct; identical to SEQ ID NO: 8903
  source 1..110: mol_type = other DNA

SEQ ID NO: 8906 - DNA, 110 bp, synthetic construct
  source 1..110: mol_type = other DNA
gtggacttgcgtttggagagttcttcagagttctgaaaacagttaaatttgaatgctcttttctccatgaataaatatagacgtcagatttggccaggagaccagggaag

SEQ ID NO: 8907 - DNA, 110 bp, synthetic construct
  source 1..110: mol_type = other DNA
ctcttttctccatgaataaatatagacgtcagatttggccaggagaccagggaagtccatgcacacgcgtcagaggcagcgacgtgtgtacgcttgatcccggtgctcat

SEQ ID NO: 8908 - DNA, 110 bp, synthetic construct
  source 1..110: mol_type = other DNA
gtttgttactgctgagccacaataggacctccctatgctttaaatcactaccaccgtattccgaaatacacctttattatttgctgtttgttctggtggtaatacatcct

SEQ ID NO: 8909 - DNA, 110 bp, synthetic construct; identical to SEQ ID NO: 8908
  source 1..110: mol_type = other DNA

SEQ ID NO: 8910 - DNA, 110 bp, synthetic construct
  source 1..110: mol_type = other DNA
cctcacaaaacccttggagggaggcttgattcttgtttccatttgacatttgcggtacccgaggggggttgaaggtcaccccactggttagtggcaggactagtctcaga

SEQ ID NO: 8911 - DNA, 110 bp, synthetic construct
  source 1..110: mol_type = other DNA
tacccgaggggggttgaaggtcaccccactggttagtggcaggactagtctcagagcaggtcatgaccccagagcctttggctgggcgggaggctgccaggcttggggac

SEQ ID NO: 8912 - DNA, 110 bp, synthetic construct
  source 1..110: mol_type = other DNA
acaaggccaggtgcttaacccactgagccacacaggaactcctgttttaaatttgatttctggtacttcgaaggcaaagacacgaaacataataaccctaactcacagga

SEQ ID NO: 8913 - DNA, 110 bp, synthetic construct
  source 1..110: mol_type = other DNA
atttctggtacttcgaaggcaaagacacgaaacataataaccctaactcacaggaactgagtgctactcaggagtagacaggagctcctttctggctctgaattcgttta

SEQ ID NO: 8914 - DNA, 110 bp, synthetic construct
  source 1..110: mol_type = other DNA
attctcagtaagaagccggcagtgctcactttgggcagaagagtgtgaaagaaatactgaaaaagtgttccaatttctttttcttttttttcttttttaggtctgcaccc

SEQ ID NO: 8915 - DNA, 110 bp, synthetic construct
  source 1..110: mol_type = other DNA
ccggcagtgctcactttgggcagaagagtgtgaaagaaatactgaaaaagtgttccaatttctttttcttttttttcttttttaggtctgcacccacggcatatggaggt

SEQ ID NO: 8916 - DNA, 110 bp, synthetic construct
  source 1..110: mol_type = other DNA
gaaaggggtgaacctttatgtattgaactgaaatcagatgtgaagctgttgccttgtgaaccatgtgggggcacatgcagcttttttgagggctaaattcttgtttttag

SEQ ID NO: 8917 - DNA, 110 bp, synthetic construct
  source 1..110: mol_type = other DNA
acagttaccacctgggtctgcccttgttccactgtgatagcgagtctgtttcacgagctggccccgtaggcacgtgcgtaggaagtgtcttgaaccagtaagtgatttct

SEQ ID NO: 8918 - DNA, 110 bp, synthetic construct
  source 1..110: mol_type = other DNA
agcgttctccgtgctctacagcagaccggccaatcctccacacacctcttctctgaactagattcattaacaattatcctaaaccacttctcactgaagatgtgtttgga

SEQ ID NO: 8919 - DNA, 110 bp, synthetic construct
  source 1..110: mol_type = other DNA
gtaagtgaagtcagaagataatgaaacaatacctccgaagtgcccaaaggctctaactgccagtttatataaaccttcattacaagcagtcccacaatactgaaacttaa

SEQ ID NO: 8920 - DNA, 110 bp, synthetic construct
  source 1..110: mol_type = other DNA
actgccagtttatataaaccttcattacaagcagtcccacaatactgaaacttaagaggttcctcaggaagctccccagtggcctaggagttaaggacccagcactgcca

SEQ ID NO: 8921 - DNA, 110 bp, synthetic construct
  source 1..110: mol_type = other DNA
gcccttcacgtcggggaaggaacactttgccaggtggcaccggtttcactgctgtcggagtggcgaggtttgagttgtactttgacagaatctaaaaaagcaaactcctt

SEQ ID NO: 8922 - DNA, 110 bp, synthetic construct
  source 1..110: mol_type = other DNA
aaataaaaaaaccctcttgccacccacgcaacatagggtgcttaggactagatcaagttcgacttcttttcctttcagtgtcgttacccagcttgactgtgttccgtaac

SEQ ID NO: 8923 - DNA, 110 bp, synthetic construct
  source 1..110: mol_type = other DNA
agttcgacttcttttcctttcagtgtcgttacccagcttgactgtgttccgtaaccaccatcttcacttgcttctgtttctctccaaggggatccttaggcacgtgatgc

SEQ ID NO: 8924 - DNA, 110 bp, synthetic construct; identical to SEQ ID NO: 8922
  source 1..110: mol_type = other DNA

SEQ ID NO: 8925 - DNA, 110 bp, synthetic construct; identical to SEQ ID NO: 8923
  source 1..110: mol_type = other DNA

SEQ ID NO: 8926 - DNA, 110 bp, synthetic construct
  source 1..110: mol_type = other DNA
ctttgctgaaggaccggtaaaaggagtatttagagaataagacaggagggggtgatcgctgtcaaagtgttttaagcttctcttgtgaatcagagctgcttatttatctt

SEQ ID NO: 8927 - DNA, 110 bp, synthetic construct
  source 1..110: mol_type = other DNA
tcgctgtcaaagtgttttaagcttctcttgtgaatcagagctgcttatttatcttctctttcatgacttgcatctttatgtctctgtatggtgcattattggcaatttcc

SEQ ID NO: 8928 - DNA, 110 bp, synthetic construct
  source 1..110: mol_type = other DNA
tatcatggagctacgagactcctcgtaactggctactaccaagatctgcatcgtttcggacagtggccttaaaccggaaccaacccacactctctccaaataaaacctgt

SEQ ID NO: 8929 - DNA, 110 bp, synthetic construct
  source 1..110: mol_type = other DNA
tcggacagtggccttaaaccggaaccaacccacactctctccaaataaaacctgtctccttagggaggactgtggagctcccttcttacagcctgcctccctgggggcag

SEQ ID NO: 8930 - DNA, 110 bp, synthetic construct; identical to SEQ ID NO: 8928
  source 1..110: mol_type = other DNA

SEQ ID NO: 8931 - DNA, 110 bp, synthetic construct; identical to SEQ ID NO: 8929
  source 1..110: mol_type = other DNA

SEQ ID NO: 8932 - DNA, 110 bp, synthetic construct
  source 1..110: mol_type = other DNA
gaactgtggtgtgggtcacagacgtggttgtgacataggccggcagctgcagctctgatccaaccccctagcatggaaacttccatgtgtcgtaggtatgcccccccccc

SEQ ID NO: 8933 - DNA, 110 bp, synthetic construct; identical to SEQ ID NO: 8932
  source 1..110: mol_type = other DNA

SEQ ID NO: 8934 - DNA, 110 bp, synthetic construct
  source 1..110: mol_type = other DNA
agagctgtgccagctgcccctgccgcgggccaggaggcagccctcagcgctttgatctaactgttcagagaaaggagcagccgccaagctcatacgccggcggcaattcc

SEQ ID NO: 8935 - DNA, 110 bp, synthetic construct
  source 1..110: mol_type = other DNA
tctaactgttcagagaaaggagcagccgccaagctcatacgccggcggcaattccgcttctttcctgaatgtgaaggccagaggattttagctaaacctggggggcgggg

SEQ ID NO: 8936 - DNA, 110 bp, synthetic construct
  source 1..110: mol_type = other DNA
ccttgaaagaccagcgtgggcggggtcccacctggtcgaatcactcagaattgattcctccgttagtggaacagagcaaagcccatcggattctcttgtgcccagctttg

SEQ ID NO: 8937 - DNA, 110 bp, synthetic construct
  source 1..110: mol_type = other DNA
tcctccgttagtggaacagagcaaagcccatcggattctcttgtgcccagctttgcacggttcttccgcaattaagagtgacagagcaggagttcccgtcatggctcagc

SEQ ID NO: 8938 - DNA, 110 bp, synthetic construct
  source 1..110: mol_type = other DNA
gtgccgtcaggtgcatcccaacagagggccattctacaaaacgccggatcagcgcgcctcaaacggtccacgtctgcagaaccacagtctgagatgctgtgctttcgtcc

SEQ ID NO: 8939 - DNA, 110 bp, synthetic construct
  source 1..110: mol_type = other DNA
ggggacaagagaatatgcaggcggctcccagaagagcaagcgctgtggcctgagatctatcgggcgaaggtgtctgccgtcaatagtgaaggtgaaaggcacacacaccg

SEQ ID NO: 8940 - DNA, 110 bp, synthetic construct
  source 1..110: mol_type = other DNA
tctatcgggcgaaggtgtctgccgtcaatagtgaaggtgaaaggcacacacaccgtcccctcattttaacagtgttcctggagccgctgggaggcatcgatcactccggg

SEQ ID NO: 8941 - DNA, 110 bp, synthetic construct
  source 1..110: mol_type = other DNA
gaatagggaactccttacacttcccaagtcacttccccttcagggaaggctacgattttacttgcattagatataaattcctgttcatgcatttatttgtccgtgtttgc

SEQ ID NO: 8942 - DNA, 110 bp, synthetic construct
  source 1..110: mol_type = other DNA
ttttacttgcattagatataaattcctgttcatgcatttatttgtccgtgtttgcacagctgcacctgggttcgtgcagcgctcgtgaatttgctgataaaggcaatttt

SEQ ID NO: 8943 - DNA, 110 bp, synthetic construct; identical to SEQ ID NO: 8941
  source 1..110: mol_type = other DNA

SEQ ID NO: 8944 - DNA, 110 bp, synthetic construct; identical to SEQ ID NO: 8942
  source 1..110: mol_type = other DNA

SEQ ID NO: 8945 - DNA, 110 bp, synthetic construct
  source 1..110: mol_type = other DNA
gcctgcacgttcctctagagtctctgggcgggttggacccgtgtcctagtttgggggacttttcatcctgcttttctgcatcatcagtggcccttcggggcgagggaggc

SEQ ID NO: 8946 - DNA, 110 bp, synthetic construct
  source 1..110: mol_type = other DNA
ggacttttcatcctgcttttctgcatcatcagtggcccttcggggcgagggaggcggcccccgctagcagctgtcagagcctgtacactcctgagtctgagggtgggaga

SEQ ID NO: 8947 - DNA, 110 bp, synthetic construct; identical to SEQ ID NO: 8945
  source 1..110: mol_type = other DNA

SEQ ID NO: 8948 - DNA, 110 bp, synthetic construct; identical to SEQ ID NO: 8946
  source 1..110: mol_type = other DNA

SEQ ID NO: 8949 - DNA, 110 bp, synthetic construct
  source 1..110: mol_type = other DNA
ctctctggtgggcggtccgctgggcccccggctcttcctctgcagctcagtgtctcttgctgcctgcggccgccgcctccgaacttctctctgggccccgccacgtgaca

SEQ ID NO: 8950 - DNA, 110 bp, synthetic construct
  source 1..110: mol_type = other DNA
cttgctgcctgcggccgccgcctccgaacttctctctgggccccgccacgtgacagcgacatgtctgggtgtgtttgctcatcctgcttcttggatcgccggctccaatg

SEQ ID NO: 8951 - DNA, 110 bp, synthetic construct
  source 1..110: mol_type = other DNA
ttttcctgagttttcaagacacagctagactctgatttgttcatacaatttagcaaaatcagatttttaaaaaaatcaatgttttacgaaataccggcatttttagcaac

SEQ ID NO: 8952 - DNA, 110 bp, synthetic construct
  source 1..110: mol_type = other DNA
gccagacaacagatatgtgcccagattgctgtaaaggcatctgacctctttctcctaattatccatgagaacttaatgtcccaggtaagactactagtgaatctctgggg

SEQ ID NO: 8953 - DNA, 110 bp, synthetic construct
  source 1..110: mol_type = other DNA
ttccttccagcagaaactcggatgggagccaccactaagaaacaggaggcagagttcctcttagggctcagcggttaacaaacctgactggcatccacgaggacgcaggt

SEQ ID NO: 8954 - DNA, 110 bp, synthetic construct
  source 1..110: mol_type = other DNA
actcggatgggagccaccactaagaaacaggaggcagagttcctcttagggctcagcggttaacaaacctgactggcatccacgaggacgcaggttcgatccctggcctc

SEQ ID NO: 8955 - DNA, 110 bp, synthetic construct
  source 1..110: mol_type = other DNA
accagggagactccagggtgaacaccggccacccctggcttcgggtgactccatctcagcatttacagcggagtaacctatcagctaaccagctgggtagggctgctagt

SEQ ID NO: 8956 - DNA, 110 bp, synthetic construct
  source 1..110: mol_type = other DNA
tcagcatttacagcggagtaacctatcagctaaccagctgggtagggctgctagtagagaccccaaggtctgacttcaagcccctcgtttctagtgaatctaatcctatg

SEQ ID NO: 8957 - DNA, 110 bp, synthetic construct; identical to SEQ ID NO: 8955
  source 1..110: mol_type = other DNA

SEQ ID NO: 8958 - DNA, 110 bp, synthetic construct; identical to SEQ ID NO: 8956
  source 1..110: mol_type = other DNA

SEQ ID NO: 8959 - DNA, 110 bp, synthetic construct
  source 1..110: mol_type = other DNA
tgtgtccgtccgaggatcctgtgagatcacaaacacgcagaatctaatccaaatgacgcaacttacagaactttaaccacaatggagccagggcggcagaaggcgggttg

SEQ ID NO: 8960 - DNA, 110 bp, synthetic construct
  source 1..110: mol_type = other DNA
acgcaacttacagaactttaaccacaatggagccagggcggcagaaggcgggttgggaggagagccagagagacggagaggggcaagactcggaaaaggctctgccctcg

SEQ ID NO: 8961 - DNA, 110 bp, synthetic construct
  source 1..110: mol_type = other DNA
acaaggacaaggctcgttgttcatctggtcttaactggaccgtgtgcatgtgctgcagaattttcaccaagtctagacttcatgccgaagttaaaaagtcgggcaagctt

SEQ ID NO: 8962 - DNA, 110 bp, synthetic construct
  source 1..110: mol_type = other DNA
cagagcgtgtccttccccgaagtgtttcttccccgtggtccacggccccacgcggtcgtgcggccacgactcccattctcgggcaatcatcgcatctccgatgctgggtc

SEQ ID NO: 8963 - DNA, 110 bp, synthetic construct
  source 1..110: mol_type = other DNA
tcgtgcggccacgactcccattctcgggcaatcatcgcatctccgatgctgggtctgtgtcccatccctgcacacagtaggtttgggctcctattaccaacagcctgtac

SEQ ID NO: 8964 - DNA, 110 bp, synthetic construct
  source 1..110: mol_type = other DNA
aacctgtatcctcatggatgcttgtcgggttggttaactgctgagccatgacgggaactccccatcgtctcatccctgtgtgtgccagttcagtgacccagctcccctgt

SEQ ID NO: 8965 - DNA, 110 bp, synthetic construct
  source 1..110: mol_type = other DNA
aactccccatcgtctcatccctgtgtgtgccagttcagtgacccagctcccctgtaaaagaacatccacagccgttccaataagtaactgcagcaaagtttcagcggaag

SEQ ID NO: 8966 - DNA, 110 bp, synthetic construct
  source 1..110: mol_type = other DNA
ttgggaacctccgtatgcggcaggtgcggctctaaagagcaaaaacaaacaacctcgatcctacatggatctggttcccccctgacagcctggcccgagtttccagggga

SEQ ID NO: 8967 - DNA, 110 bp, synthetic construct
  source 1..110: mol_type = other DNA
cgatcctacatggatctggttcccccctgacagcctggcccgagtttccaggggaggatgaggagaactggggcagcggaaaggacgaacagctcgaagggaaaggctgg

SEQ ID NO: 8968 - DNA, 110 bp, synthetic construct
  source 1..110: mol_type = other DNA
agttttgatacattgaaggttaatttaccaaaacgtactaggaaacctttgaattaaaaatggctttgagcgaagcatcggggcccctgggaaggtgttacgccgacttt

SEQ ID NO: 8969 - DNA, 110 bp, synthetic construct
  source 1..110: mol_type = other DNA
aaaaatggctttgagcgaagcatcggggcccctgggaaggtgttacgccgactttcttagggacgggacgaatggtgattgtggtcctaagtgcctcttttgtgcctgct

SEQ ID NO: 8970 - DNA, 110 bp, synthetic construct
  source 1..110: mol_type = other DNA
tgctgcacagctcggtgccccagtcacacatacaagtatgcattcttttttctcgcgttatcacgctccgtcacacgtgagttgacatagttcccagtgctgtgcacagg

SEQ ID NO: 8971 - DNA, 110 bp, synthetic construct
  source 1..110: mol_type = other DNA
acacatacaagtatgcattcttttttctcgcgttatcacgctccgtcacacgtgagttgacatagttcccagtgctgtgcacaggagctcattgcttatccactccaaag

SEQ ID NO: 8972 - DNA, 110 bp, synthetic construct
  source 1..110: mol_type = other DNA
ctctggaatctctgcctttcatgaaagaaagcgaactgggtcacctcctttctttttaaaaacgagacgttctgcttctataaccttcttttctttagctttccagaacc

SEQ ID NO: 8973 - DNA, 110 bp, synthetic construct
  source 1..110: mol_type = other DNA
ttaaaaacgagacgttctgcttctataaccttcttttctttagctttccagaacctggtgctcttgcgtcagcagctgcagacacatctgggtcgttggcaggctgggat

SEQ ID NO: 8974 - DNA, 110 bp, synthetic construct
  source 1..110: mol_type = other DNA
gacctgggttttgctcggtgcactagcgggacgtgtgtactcttatgaattgaaagcgcttccagatacttccttgagggaacggctctacaggaaatctggagaccgcc

SEQ ID NO: 8975 - DNA, 110 bp, synthetic construct
  source 1..110: mol_type = other DNA
gcgcttccagatacttccttgagggaacggctctacaggaaatctggagaccgcccctatgataatacatgtgaaatacgcttcttagtaaaatgcatgttcgtgctaac

SEQ ID NO: 8976 - DNA, 110 bp, synthetic construct
  source 1..110: mol_type = other DNA
ccactgagatacgccctcctggaggagaagatgaagagcggagacataaccgaccactttgctctacagcggaaactgacgcggcattgtaaatcagctagaccttaaca

SEQ ID NO: 8977 - DNA, 110 bp, synthetic construct
  source 1..110: mol_type = other DNA
actttgctctacagcggaaactgacgcggcattgtaaatcagctagaccttaacaacatttttggcctgatgctggctttccggctgggtctagttgttcctccacgaat

SEQ ID NO: 8978 - DNA, 110 bp, synthetic construct
  source 1..110: mol_type = other DNA
agaaaaagctctccagtctcttcctgtacctcctacaacggcactcatcttgttgcaagggctccacccttgtgacctaatgacccccagaggccccatctccggagtcc

SEQ ID NO: 8979 - DNA, 110 bp, synthetic construct
  source 1..110: mol_type = other DNA
gcattatttctttcttttttatggtcgagtagtattctattgtattatatgcaccacgtcttcttgatcctttcatgtgtcagtggacatttaggttgcttctgtgtctt

SEQ ID NO: 8980 - DNA, 110 bp, synthetic construct; identical to SEQ ID NO: 8979
  source 1..110: mol_type = other DNA

SEQ ID NO: 8981 - DNA, 110 bp, synthetic construct
  source 1..110: mol_type = other DNA
cacacagtagcaggtgttcagggccacgctttgaaccagtgcctctgtgttcatgtgaccaagtaaacgataccaccgcccacctggtcactcagaccacgaacctcaac

SEQ ID NO: 8982 - DNA, 110 bp, synthetic construct
  source 1..110: mol_type = other DNA
gcacattgccgtcctgaccagagctcaccactgggtcctcagaggacccgctgttcctcttaaagcacacagatgattgggacggaaatgtcatctgggcaggcaggtcg

SEQ ID NO: 8983 - DNA, 110 bp, synthetic construct
  source 1..110: mol_type = other DNA
gagaccggggattgaaccctcatcttttggatgcttgtcgggtttgttacccctgagccacagcaggaaatccagaaaatgcgtttgtatgctttgggtcttagaggcct

SEQ ID NO: 8984 - DNA, 110 bp, synthetic construct
  source 1..110: mol_type = other DNA
agccacagcaggaaatccagaaaatgcgtttgtatgctttgggtcttagaggcctggaaagacagttgaccacgaagaaagaagggagaaaatgcgaggaggtgggtgtt

SEQ ID NO: 8985 - DNA, 110 bp, synthetic construct
  source 1..110: mol_type = other DNA
atttgcattttcctcctgtttaaggacactgaataccttttcatgtgcctgccggccatcgtgtttcttcttcagagaaggtctcttcaaatcctttgtctgtttttgat

SEQ ID NO: 8986 - DNA, 110 bp, synthetic construct
  source 1..110: mol_type = other DNA
gtgaaacgctgagatcaaggactgacctcggcctccgagtcggggtcctttcatggtgaccgtgctcttcccccccaacaccaaggatgctgattagacaccggcccagg

SEQ ID NO: 8987 - DNA, 110 bp, synthetic construct
  source 1..110: mol_type = other DNA
gtgaccgtgctcttcccccccaacaccaaggatgctgattagacaccggcccaggggaaagggaggttagagctattccgtccagacttctacaaggacaaacgagaaga

SEQ ID NO: 8988 - DNA, 110 bp, synthetic construct
  source 1..110: mol_type = other DNA
agaaattttaataaccaaagcatgttcaggtagtcggttgactgaaaaaaactctgattctctaccctccacatatgcatggtctttgcggtgcagctttgaagcccttc

SEQ ID NO: 8989 - DNA, 110 bp, synthetic construct
  source 1..110: mol_type = other DNA
gattctctaccctccacatatgcatggtctttgcggtgcagctttgaagcccttcctcgcaaggggtggggtctcctaccaccactgagtctggacggctctccgatgta

SEQ ID NO: 8990 - DNA, 110 bp, synthetic construct
  source 1..110: mol_type = other DNA
agaagaacatcatggaaacacttcagtttttttcccatttaaaggggaaaatgatttaattctaccaatcaactaacagaacgcatttatccagactaacgttcttgtat

SEQ ID NO: 8991 - DNA, 110 bp, synthetic construct
  source 1..110: mol_type = other DNA
ttaattctaccaatcaactaacagaacgcatttatccagactaacgttcttgtatagagatattgatgatttttcaatgccttgatatctgagacttcctttctaacatg

SEQ ID NO: 8992 - DNA, 110 bp, synthetic construct
  source 1..110: mol_type = other DNA
gctggcccatcaccctgcctgcctctctccttccttcagaccttagcttggaagagtctgccgattctccaccgctttacgaagtggtttaaaaagagaaggctggattc

SEQ ID NO: 8993 - DNA, 110 bp, synthetic construct
  source 1..110: mol_type = other DNA
acatcgtttctctcataatgcatatcttcatcctgcagggaacaagacagccaagctacacagtcagaacttagctcaaaaggtttccagaaaggctatactgcccactg

SEQ ID NO: 8994 - DNA, 110 bp, synthetic construct
  source 1..110: mol_type = other DNA
ctacacagtcagaacttagctcaaaaggtttccagaaaggctatactgcccactgatctcccaaggtgcctggtatttagaaagaattcacaatggagagtctaaaatac

SEQ ID NO: 8995 - DNA, 110 bp, synthetic construct
  source 1..110: mol_type = other DNA
tgtctggagccaccagcagctggaagagcaaagaaggatcctttcctacaggcgtcacgtggagcttggccctactgacaccttgatttcagatttctatcctcaagaaa

SEQ ID NO: 8996 - DNA, 110 bp, synthetic construct
  source 1..110: mol_type = other DNA
cacgtggagcttggccctactgacaccttgatttcagatttctatcctcaagaaacgggagacaataaatttctgttgttctaaatcacccattttgtggggcttttcta

SEQ ID NO: 8997 - DNA, 110 bp, synthetic construct; identical to SEQ ID NO: 8995
  source 1..110: mol_type = other DNA

SEQ ID NO: 8998 - DNA, 110 bp, synthetic construct; identical to SEQ ID NO: 8996
  source 1..110: mol_type = other DNA

SEQ ID NO: 8999 - DNA, 110 bp, synthetic construct
  source 1..110: mol_type = other DNA
ccaacatttttagacccttttcttcctttgcagttccgctgccatcgccctgggtcagatgataactgacaatgagtcacaatagctccttcattagcttttgctttgcg

SEQ ID NO: 9000 - DNA, 110 bp, synthetic construct
  source 1..110: mol_type = other DNA
cagatgataactgacaatgagtcacaatagctccttcattagcttttgctttgcggctccctccactgcattctgaaccctgtgccaccccaatcttgcaacaggaaaaa

SEQ ID NO: 9001 - DNA, 110 bp, synthetic construct
  source 1..110: mol_type = other DNA
tatgttccgttaacgccatgcatgtgtttaaacctcacagaaatggtagcgactggtacttacgctataacttcgttttcaatgttgtttttgaaatggacatgtcgata

SEQ ID NO: 9002 - DNA, 110 bp, synthetic construct
  source 1..110: mol_type = other DNA
gtacttacgctataacttcgttttcaatgttgtttttgaaatggacatgtcgatacatacacagctgcaccttatacattttatcgctataaatttcttgtgaaaattgt

SEQ ID NO: 9003 - DNA, 110 bp, synthetic construct
  source 1..110: mol_type = other DNA
tggaggggtgaccgtagttaggtttttgaaagaattttaagctgcatgtttgttttaagctcagggtttttttgtgatgtcaaaacataagacgactagtagaatgggag

SEQ ID NO: 9004 - DNA, 110 bp, synthetic construct
  source 1..110: mol_type = other DNA
taagctcagggtttttttgtgatgtcaaaacataagacgactagtagaatgggaggaaatgtttgtaaatcatgtatctgctgagggattaatatctaggccatataaag

SEQ ID NO: 9005 - DNA, 110 bp, synthetic construct
  source 1..110: mol_type = other DNA
gaccgtcttcacgccctgaggcttaaaaggcctttctccccgcacattcctatctctgtagaacgtccctgcttttcttgccgccgcagtccggtctctaccagccagac

SEQ ID NO: 9006 - DNA, 110 bp, synthetic construct
  source 1..110: mol_type = other DNA
ctgtagaacgtccctgcttttcttgccgccgcagtccggtctctaccagccagacagctgacatgaaccagaacgtggccagtccccgccaccctctcccacacccgttt

SEQ ID NO: 9007 - DNA, 110 bp, synthetic construct
  source 1..110: mol_type = other DNA
ctggaatgcagacacacctgccttcgggtgccagggagagtctgcacccttcagggatccccttagatatcagggcatttcctttggggagctcccacggcctccccagg

SEQ ID NO: 9008 - DNA, 110 bp, synthetic construct
  source 1..110: mol_type = other DNA
gatccccttagatatcagggcatttcctttggggagctcccacggcctccccaggctaataatagccgcagtccgtcagtaccctcctgtctgtactgattctaacctat

SEQ ID NO: 9009 - DNA, 110 bp, synthetic construct
  source 1..110: mol_type = other DNA
attgcctctaggtcaagttcttttgaaagtgggttgcttctttttgtgtttgctttacccaacttaactggcggtggaacaacgcagtgattctttaaggctagttcttt

SEQ ID NO: 9010 - DNA, 110 bp, synthetic construct
  source 1..110: mol_type = other DNA
gccgagagtgttttcttgactccctggcgaaccttctcctctgggatcttagagcttgttgtttcctctgggagcttaaattggtcttccgtctacttaggttttctttg

SEQ ID NO: 9011 - DNA, 110 bp, synthetic construct
  source 1..110: mol_type = other DNA
ttgttgtttcctctgggagcttaaattggtcttccgtctacttaggttttctttgtgaatttgtctggtcagtgccattctcacataagtggtgccagagggttagggag

SEQ ID NO: 9012 - DNA, 110 bp, synthetic construct
  source 1..110: mol_type = other DNA
gagattgctcgttcatcagagggagggaccgcttggactgtttacacctggagctcccccaacgataaaagacacccctcggctgttctaagagatgttagggttgggag

SEQ ID NO: 9013 - DNA, 110 bp, synthetic construct
  source 1..110: mol_type = other DNA
ggggactgcactgccagcaatgtgctgatggaggcgactatttcaaactatgcttcctttccctctaaatacagtatttagacgagcttggctgtagttggtctgccttc

SEQ ID NO: 9014 - DNA, 110 bp, synthetic construct
  source 1..110: mol_type = other DNA
cctttccctctaaatacagtatttagacgagcttggctgtagttggtctgccttcgcagccctgtgcctttatgttcgtctctgtaagagtcagggaaattcactctttc

SEQ ID NO: 9015 - DNA, 110 bp, synthetic construct; identical to SEQ ID NO: 9013
  source 1..110: mol_type = other DNA

SEQ ID NO: 9016 - DNA, 110 bp, synthetic construct; identical to SEQ ID NO: 9014
  source 1..110: mol_type = other DNA

SEQ ID NO: 9017 - DNA, 110 bp, synthetic construct
  source 1..110: mol_type = other DNA
cagtggaatctgttctctcgttaatgtgtctgggaaataagataaaaaggagtgcagggctgggaagagaaaggggaaggagcggatggcagatgcgcagggctctgcag

SEQ ID NO: 9018 - DNA, 110 bp, synthetic construct
  source 1..110: mol_type = other DNA
agggctgggaagagaaaggggaaggagcggatggcagatgcgcagggctctgcagttttgagacctgggaagaattgaaggaagaaatggagaacactcacctgggcctg

SEQ ID NO: 9019 - DNA, 110 bp, synthetic construct
  source 1..110: mol_type = other DNA
ggcaagattctgggctccctccaacccaacgctgtcccacagaactctgggccatgctggaagctccatgactactccgcccagtacgggcaccactagtcatctgtggg

SEQ ID NO: 9020 - DNA, 110 bp, synthetic construct
  source 1..110: mol_type = other DNA
aaaaggacttcacaggttcagttttaaatgcctgcaggccgactggctgagctatgacatgcgatcaggttgttcaagtctgcgacgtcacctttatagccagaaggcca

SEQ ID NO: 9021 - DNA, 110 bp, synthetic construct
  source 1..110: mol_type = other DNA
gacatgcgatcaggttgttcaagtctgcgacgtcacctttatagccagaaggccaccttcggagacacaaacccctcagcggtgcccccaccacggcttccagcacaggc

SEQ ID NO: 9022 - DNA, 110 bp, synthetic construct
  source 1..110: mol_type = other DNA
tccactcagcactctgtgctaagctgcctgggaaaggatctgaggaaggtggatgtatgtacacgcacgactcgctcagctgcacacggaaactaacacgcctttccaca

SEQ ID NO: 9023 - DNA, 110 bp, synthetic construct
  source 1..110: mol_type = other DNA
acgtctattctctcaccttgaaaatcttgacacgttacatcaacaaattccccgatttatttcttcctcccgtgcacaccagtttcaaaatgactacaccaaagttacta

SEQ ID NO: 9024 - DNA, 110 bp, synthetic construct
  source 1..110: mol_type = other DNA
tttgtgttcttggaaactggcatgcagggggcgctcaataaggtgggctgaataaatagtgccccctgggggcactgactgagcacttgagcgagtaaccctccccctct

SEQ ID NO: 9025 - DNA, 110 bp, synthetic construct
  source 1..110: mol_type = other DNA
atagtgccccctgggggcactgactgagcacttgagcgagtaaccctccccctctggacccttgggcagcatccgcagtggtggctccgtcacaggtgaggtcctgagtg

SEQ ID NO: 9026 - DNA, 110 bp, synthetic construct
  source 1..110: mol_type = other DNA
aatcagtactttattggatatactgagtattgacgtctctaaaggtcgttagtctaaaagggaaggatgatgatctttgtttatttgtttgttttggccgccccgtggca

SEQ ID NO: 9027 - DNA, 110 bp, synthetic construct
  source 1..110: mol_type = other DNA
aaaagggaaggatgatgatctttgtttatttgtttgttttggccgccccgtggcatccggagctcccaggctagagatcagatccaagacacagctgcaaactaagccac

SEQ ID NO: 9028 - DNA, 110 bp, synthetic construct; identical to SEQ ID NO: 9026
  source 1..110: mol_type = other DNA

SEQ ID NO: 9029 - DNA, 110 bp, synthetic construct
  source 1..110: mol_type = other DNA
tctctaaaggtcgttagtctaaaagggaaggatgatgatctttgtttatttgtttgttttggccgccccgtggcatccggagctcccaggctagagatcagatccaagac

SEQ ID NO: 9030 - DNA, 110 bp, synthetic construct
  source 1..110: mol_type = other DNA
taaaaacgcgttcgtttgtgtattcaaccatgttcaatttctagctcaaaaaatgggtctagtggaaggagcgtggattctggagtcagaagtgacttccattacggatt

SEQ ID NO: 9031 - DNA, 110 bp, synthetic construct
  source 1..110: mol_type = other DNA
ggaaaatgagaaactgtgataacagaagtaccaaaagcgaataggtgagctctctgtctgccaggaaacatctcagcccttccccaaggacatgcagtttcaggtgtcca

SEQ ID NO: 9032 - DNA, 110 bp, synthetic construct
  source 1..110: mol_type = other DNA
gtctgccaggaaacatctcagcccttccccaaggacatgcagtttcaggtgtccacacatcctgagcaaagctggttcaggacttttgttcattcatgcggtacgtgccg

SEQ ID NO: 9033 - DNA, 110 bp, synthetic construct
  source 1..110: mol_type = other DNA
tcagagcaggaaattaacctgcacaaagaaagtggcagcacctgcagaagagggtgaatttcaatcaaaaacttaaattatggtaatagacaaggtatcaagaaaatgca

SEQ ID NO: 9034 - DNA, 110 bp, synthetic construct
  source 1..110: mol_type = other DNA
cagcacctgcagaagagggtgaatttcaatcaaaaacttaaattatggtaatagacaaggtatcaagaaaatgcagatgctttatctaatacatttataataaatgagga

SEQ ID NO: 9035 - DNA, 110 bp, synthetic construct
  source 1..110: mol_type = other DNA
ccgtcttctctgctcagcgggtctcctctcgggggcccctgtgccgctctgttcgcttcctcctttctgctcaaggggcgaagaacacacatcattgcctttccccctct

SEQ ID NO: 9036 - DNA, 110 bp, synthetic construct
  source 1..110: mol_type = other DNA
atactctgatgagagaaggccgggctagagctgacccctcatattcagagtgtttgagtgaccaaggtgcctgtagaagctgcatctggaagttagtcctacggagtctg

SEQ ID NO: 9037 - DNA, 110 bp, synthetic construct
  source 1..110: mol_type = other DNA
gagtgaccaaggtgcctgtagaagctgcatctggaagttagtcctacggagtctgcgagaatctccactgtcttcagattctttagggagagtctggtctcactggttgt

SEQ ID NO: 9038 - DNA, 110 bp, synthetic construct
  source 1..110: mol_type = other DNA
actgatgtcacagctttctcactgtgtattgagctgaagaaaccagacacgaacgtttacacagcctagggagtttctgttgtggctcatcgggttaagaacccgatata

SEQ ID NO: 9039 - DNA, 110 bp, synthetic construct
  source 1..110: mol_type = other DNA
ctgacctaagccctaaccccagacaccacatccttcaagccagagtgaccacacgcagctctcacaccgtgacgccctacaggctagtccttttgcctagaatgcgcctc

SEQ ID NO: 9040 - DNA, 110 bp, synthetic construct
  source 1..110: mol_type = other DNA
ggcacgtctcccgcttaaggtggctcaaaggccactttgattctgcagtaacaactgtatggaagggcgacgtggaccgtccttgggagcttgtccccacgggattctaa

SEQ ID NO: 9041 - DNA, 110 bp, synthetic construct
  source 1..110: mol_type = other DNA
tgtatggaagggcgacgtggaccgtccttgggagcttgtccccacgggattctaaaagttgaggagttccggggactctgaggtggaattccaaggatctgattgcgagt

SEQ ID NO: 9042 - DNA, 110 bp, synthetic construct
  source 1..110: mol_type = other DNA
gctacactggaaccgggtggacagtgtcaccaacgggcaagtgttctcaggcccctttcccccagcttccggacacgtcacactgggtacgtttcaggtctgcaatatga

SEQ ID NO: 9043 - DNA, 110 bp, synthetic construct
  source 1..110: mol_type = other DNA
tttcccccagcttccggacacgtcacactgggtacgtttcaggtctgcaatatgatttgacaaaagtatatactgtgcagtgattaccacaataaggttagttaacacac

SEQ ID NO: 9044 - DNA, 110 bp, synthetic construct
  source 1..110: mol_type = other DNA
aacccccacagagatctatcagcaaaagatggacttcttattccttaaggtatgcgagcacaacttctgatcaatcattgactactaagctacactgacacagagatgac

SEQ ID NO: 9045 - DNA, 110 bp, synthetic construct
  source 1..110: mol_type = other DNA
gagcacaacttctgatcaatcattgactactaagctacactgacacagagatgacccttaggaagccagggtcaaaaacaaaaacaataatttaagtaaaattgacaaaa

SEQ ID NO: 9046 - DNA, 110 bp, synthetic construct
  source 1..110: mol_type = other DNA
tgctgtgacaaaagttggtgacatcagcacaaataagtctttatcactgccctgaaggccttgtaatccggttgggacaaaacgagagaggacaccccagctgctatgac

SEQ ID NO: 9047 - DNA, 110 bp, synthetic construct
  source 1..110: mol_type = other DNA
aggccttgtaatccggttgggacaaaacgagagaggacaccccagctgctatgacatgagtcccactgattccttcatttgccttgattcccactatctggctgaatcag

SEQ ID NO: 9048 - DNA, 110 bp, synthetic construct
  source 1..110: mol_type = other DNA
agacactgccatgtgtccccctgggtggacatttcagtttgagaaccactcttcaggctgagaacctctgatctagactcgtatattttccgctgaggatggccagtcac

SEQ ID NO: 9049 - DNA, 110 bp, synthetic construct
  source 1..110: mol_type = other DNA
ggctgagaacctctgatctagactcgtatattttccgctgaggatggccagtcactgcggccaggattcggtagcccagccccctgtctcctttcggccatccctcatgg

SEQ ID NO: 9050 - DNA, 110 bp, synthetic construct
  source 1..110: mol_type = other DNA
aaatgatgggtcccagcatcagcctccaagctgagccaagagtagggctgggaaagaagcattagattgggaggaggagtggaaaaaaggggattgtatctatgccaagg

SEQ ID NO: 9051 - DNA, 110 bp, synthetic construct
  source 1..110: mol_type = other DNA
acacttgatggagtatttggcgctcgggaaggggagggtttgtgggaaaggccacttgaagactgggctgggaccaaatcagaggacttgctaggctttgctaagaagtt

SEQ ID NO: 9052 - DNA, 110 bp, synthetic construct
  source 1..110: mol_type = other DNA
gccgggcaggaagaaaaataaataccaactctttattacaaaggggcaaaagccaggcatgcggaggctacacttcgaacggcaatggatgccagtgtaactagttttct

SEQ ID NO: 9053 - DNA, 110 bp, synthetic construct
  source 1..110: mol_type = other DNA
gtttgtcttacaaggactccaagagaagagttggccttgaaaaatcaaatccacagcagctttttggggtggctccctggaagcgtattgatcttgaggtgttgggaggg

SEQ ID NO: 9054 - DNA, 110 bp, synthetic construct
  source 1..110: mol_type = other DNA
gcagctttttggggtggctccctggaagcgtattgatcttgaggtgttgggagggaaaaggtttcaccacaaagaaacttcaaagccaactaggtagagtatctgcctct

SEQ ID NO: 9055 - DNA, 110 bp, synthetic construct
  source 1..110: mol_type = other DNA
tggcacagagctgacactccttgtttcaacagaagaacagggcagacaggggcggccactgaagagcaggcttggcctcgaagcccactgcagtcccactgatgtcccca

SEQ ID NO: 9056 - DNA, 110 bp, synthetic construct
  source 1..110: mol_type = other DNA
gtgagctagaggatcagagccatgatgggaactcctgcagtgttttcttttccatgggttaaggagcccttcaccccgtaagcttgagctgccaaggaaaaatcaaagct

SEQ ID NO: 9057 - DNA, 110 bp, synthetic construct
  source 1..110: mol_type = other DNA
gagtcacgatacaaggacaggaaagtgctagaaatgacatggggaatataggtagtcaacccagtgaggaagctggccctctgccttctactttcaaaagttccatcatt

SEQ ID NO: 9058 - DNA, 110 bp, synthetic construct
  source 1..110: mol_type = other DNA
ttacgctatctcggcttacaaagcattgcacggggacgctctgctttcagagagtggggaaacctgtgttggtgacttacagccaccaccttgtacctcacaccccagag

SEQ ID NO: 9059 - DNA, 110 bp, synthetic construct
  source 1..110: mol_type = other DNA
ggggaaacctgtgttggtgacttacagccaccaccttgtacctcacaccccagagcttattaatcttctaactgtcggtttgcaccttctgaccccctgcactcacttct

SEQ ID NO: 9060 - DNA, 110 bp, synthetic construct
  source 1..110: mol_type = other DNA
ctaaagggaaattggatcatatcattacttgacttttaaaaccctgtaatgactttccttttcctttctctgttttttaaggaatgcagccgtggcatatggaagttccc

SEQ ID NO: 9061 - DNA, 110 bp, synthetic construct
  source 1..110: mol_type = other DNA
atcatatcattacttgacttttaaaaccctgtaatgactttccttttcctttctctgttttttaaggaatgcagccgtggcatatggaagttcccaggctaggggtggaa

SEQ ID NO: 9062 - DNA, 110 bp, synthetic construct
  source 1..110: mol_type = other DNA
tcctttctgggtctctactcagcgccctgggtgatcgtgcttctcttcgtgacttcagctgctggcttttcacagccgcctccggctgtggacgcgtaggtctgtggcca

SEQ ID NO: 9063 - DNA, 110 bp, synthetic construct
  source 1..110: mol_type = other DNA
agccctcaaatctaaaattatatgaagcagatataactggcatttacagggtcaagcttatcgcgtttactcatgaagttattctgtgagactgacagctgtatgtagca

SEQ ID NO: 9064 - DNA, 110 bp, synthetic construct
  source 1..110: mol_type = other DNA
tactgtgcagccgggccgagaagctgggctatggaccagtttgatgcctctgcctcttccatgaggaccaagcactcacgactttggagctggtggtcagggtgaataga

SEQ ID NO: 9065 - DNA, 110 bp, synthetic construct
  source 1..110: mol_type = other DNA
tgcagctgatgcagcggggcagcccaagcctgggggtccccagctggaaagcaagggacaggaggtccaacccgagctccaaatgatggctcacagggggaccgtcattc

SEQ ID NO: 9066 - DNA, 110 bp, synthetic construct
  source 1..110: mol_type = other DNA
ggacaggaggtccaacccgagctccaaatgatggctcacagggggaccgtcattctgtccctgtgctcctatctgaaaactgtacgctggacagaacaactaggggacgg

SEQ ID NO: 9067 - DNA, 110 bp, synthetic construct
  source 1..110: mol_type = other DNA
aacagcttcccagaggactgcacactattaagccctggagtggccgaggcctttgctccatccaagcatgggtgagggaccttactcacttttgctcagactctagaaaa

SEQ ID NO: 9068 - DNA, 110 bp, synthetic construct
  source 1..110: mol_type = other DNA
ctccatccaagcatgggtgagggaccttactcacttttgctcagactctagaaaagccatcagaaagaagcaaatccgtgtggtttaagatgcttacggagagaaaagtc

SEQ ID NO: 9069 - DNA, 110 bp, synthetic construct
  source 1..110: mol_type = other DNA
tgcgctcagactatacaccaaggagcagctcaaacgattctcaccctgagcatgttaaccccacatcaagctacaaaaactatgaaggggaacataacctgtcaaaatgg

SEQ ID NO: 9070 - DNA, 110 bp, synthetic construct
  source 1..110: mol_type = other DNA
tacagtaggtaaaaatgatagtgcatatcttctcagattgctacatctctatttgtgtagagacattgtttataactaatggataaaaattctgtttttggcctttctgc

SEQ ID NO: 9071 - DNA, 110 bp, synthetic construct
  source 1..110: mol_type = other DNA
gggggcagatcgtggatgtttaccagcggccctttaacctagcatttctcaatatgggcaccacagggaactggttaaactaccgcagggaaccggttaaaccaccgtat

SEQ ID NO: 9072 - DNA, 110 bp, synthetic construct
  source 1..110: mol_type = other DNA
gggcaccacagggaactggttaaactaccgcagggaaccggttaaaccaccgtatagccacatgttactgttacagatgatgttaccgaagaaacattcagtgtcactga

SEQ ID NO: 9073 - DNA, 110 bp, synthetic construct
  source 1..110: mol_type = other DNA
aaaaccccaccatgacggtggtgatggagtcaaagagctgggctggtaaggcatgttgaacaccagggcctttcttgtcagtcaggagcagagtcatgatgtcgcaccct

SEQ ID NO: 9074 - DNA, 110 bp, synthetic construct
  source 1..110: mol_type = other DNA
tggaatgaactttaaccaccgcaggatctggacctctagcctgtttgaaaggagaagccaactgcatttcccaaagactcgcaccctcctctcttggggtagaagaggag

SEQ ID NO: 9075 - DNA, 110 bp, synthetic construct
  source 1..110: mol_type = other DNA
agccaactgcatttcccaaagactcgcaccctcctctcttggggtagaagaggagaggagatggaggaaatccggacaagccaggggcagatcctgcgagtctgaccgcc

SEQ ID NO: 9076 - DNA, 110 bp, synthetic construct
  source 1..110: mol_type = other DNA
gtgaagcccatggggcaaggagtgcggtctgggtttaagctcttctccacttgctcagctccttgttgctcaaatgttatcttcctggctgggttcccacgaggatgcgg

SEQ ID NO: 9077 - DNA, 110 bp, synthetic construct
  source 1..110: mol_type = other DNA
cagctccttgttgctcaaatgttatcttcctggctgggttcccacgaggatgcggacaaggtgtttatcaactataaaatagaacaaaaatgtaacatggccattgtttc

SEQ ID NO: 9078 - DNA, 110 bp, synthetic construct
  source 1..110: mol_type = other DNA
aacgagacgggtagagtgtaaaatatcaaacaaccaaaacaaaggaacacggaaacaaacccccaaaccagaaggggcgcttctgccgagagagactttgctgtgcgggg

SEQ ID NO: 9079 - DNA, 110 bp, synthetic construct
  source 1..110: mol_type = other DNA
caaacccccaaaccagaaggggcgcttctgccgagagagactttgctgtgcggggtgctggctgggccgggctgggcactgtccctggttcacgacttctccacagtgcc

SEQ ID NO: 9080 - DNA, 110 bp, synthetic construct
  source 1..110: mol_type = other DNA
cgtgtttcacttggagagaaaagggatttctctgactcctgtcctgacctagtgtttgcctccagttgtgcgtgttgtctccaggaggctgcaggatgggtggctcgcag

SEQ ID NO: 9081 - DNA, 110 bp, synthetic construct
  source 1..110: mol_type = other DNA
ttgcctccagttgtgcgtgttgtctccaggaggctgcaggatgggtggctcgcagctgagaaagcgatggtgtggtttttctctttcttctgtgcccaagccttttgatg

SEQ ID NO: 9082 - DNA, 110 bp, synthetic construct
  source 1..110: mol_type = other DNA
cttctctggcacgctcatgttttctctgggggatgagcggagaccagaaatcatgagaccaagggtttgaaaagagaaatgaaaaagaaagctgaagggtcttctcttat

SEQ ID NO: 9083 - DNA, 110 bp, synthetic construct
  source 1..110: mol_type = other DNA
cagtgaccctcaggagctctcaggagcctgtgggtagtagcacaggtgagcatcgactggacacagcagctcagtgatgctggatggagaagatgtacttgcttggcatt

SEQ ID NO: 9084 - DNA, 110 bp, synthetic construct
  source 1..110: mol_type = other DNA
tatgaaatatgtatttttcaaatatcttcttccagattgtggctcatttcattctgcgaaccttgtctttcatagagcataatacactttaaattttgatgaaagccact

SEQ ID NO: 9085 - DNA, 110 bp, synthetic construct
  source 1..110: mol_type = other DNA
gcgaaccttgtctttcatagagcataatacactttaaattttgatgaaagccactttatcaatttttccctcttatgttttgattttggcattgtatctaaaatgccatt

SEQ ID NO: 9086 - DNA, 110 bp, synthetic construct
  source 1..110: mol_type = other DNA
ggggagaggagatgcagaagggctgcagcgaggagggctcaagcctggtatcaaagattcataaagtccggaagccaggaggcaggccgggcctcactgctttgggcttg

SEQ ID NO: 9087 - DNA, 110 bp, synthetic construct
  source 1..110: mol_type = other DNA
ggggccctgcgggctgccccggccgtgatttccacgggccagctcttgagctttcaaatgcccactgacactaccttgccctcaggcaccagcgtttgcatttaatgaca

SEQ ID NO: 9088 - DNA, 110 bp, synthetic construct
  source 1..110: mol_type = other DNA
tgatctggatttgaatctgaattctaccacttcaatcgcggtgtggttttctgcaagctatttcaccctgttgggagattataaatttcatattcttatcaaaatatccc

SEQ ID NO: 9089 - DNA, 110 bp, synthetic construct
  source 1..110: mol_type = other DNA
agctatttcaccctgttgggagattataaatttcatattcttatcaaaatatccctcagtgctcaaaatatgactgcaggattttctttaaaagactcttggaggtaaag

SEQ ID NO: 9090 - DNA, 110 bp, synthetic construct
  source 1..110: mol_type = other DNA
aagagaacgtgaagagacgggaacttccctaccttcctggtaagggtgtgaccgagtgccagcatttcagagaacaatctgcgggcttctggtgcagctggagattcccg

SEQ ID NO: 9091 - DNA, 110 bp, synthetic construct
  source 1..110: mol_type = other DNA
gtgccagcatttcagagaacaatctgcgggcttctggtgcagctggagattcccggagatgtcctcgcgagacgctcaggcacatggatgcggagaaccacggaaccacg

SEQ ID NO: 9092 - DNA, 110 bp, synthetic construct
  source 1..110: mol_type = other DNA
atgtcatgtgtcttcactctccaattaaattacagtccttgaggatggaaaaacctatctcaaaacttcgcagttctcctctttcataagttgctaacttacaacagcaa

SEQ ID NO: 9093 - DNA, 110 bp, synthetic construct
  source 1..110: mol_type = other DNA
tgaaaacgtctacacctgcccgtggttagcaaacagcacaaaataataccatttgtgagagagctagatgcagacaagatctcccccagatttaggaacagaacgcagag

SEQ ID NO: 9094 - DNA, 110 bp, synthetic construct
  source 1..110: mol_type = other DNA
tgagagagctagatgcagacaagatctcccccagatttaggaacagaacgcagagaccacaaatgtctatctgactctccacttacatctctcagtgctccgagtatttt

SEQ ID NO: 9095 - DNA, 110 bp, synthetic construct
  source 1..110: mol_type = other DNA
cgggagggtgtacgttcagcggttggtgctgaccacctgtgattctggaagatagccttggagtggcggacacaaccggatgggccagacggcgacctctggctcccctt

SEQ ID NO: 9096 - DNA, 110 bp, synthetic construct
  source 1..110: mol_type = other DNA
tgacaacctgtgccaccatccaacaagtctgggaaccaccctctgagctcaacagcttcgtcttatagataaactgagtttccagaattttaaagtgacattcctagggc

SEQ ID NO: 9097 - DNA, 110 bp, synthetic construct
  source 1..110: mol_type = other DNA
ttacatttgaaacagactccgtcagcttcccaaaggacatccttgattctgttatacttcttcctccgttagcgcatcactgcacaatgtcatgcttcaatttaaagact

SEQ ID NO: 9098 - DNA, 110 bp, synthetic construct
  source 1..110: mol_type = other DNA
cttgaggattcaggtgaacgagctctgagggctgaatggtcaatctaccaccacccaaacacgatatggaacttctccatcatcccaggaagcatccgcgtcccagtcca

SEQ ID NO: 9099 - DNA, 110 bp, synthetic construct
  source 1..110: mol_type = other DNA
gtaggaagccagtccttggaattctgatatgtggccaagatttgccttttaccccacctggagcagaggccatggcaacaagctgccacatgtctcataagcaaagaatt

SEQ ID NO: 9100 - DNA, 110 bp, synthetic construct
  source 1..110: mol_type = other DNA
acctggagcagaggccatggcaacaagctgccacatgtctcataagcaaagaattgccttatgttaccaatgtgttctgttttcaccttgacgtagaaaggacacattta

SEQ ID NO: 9101 - DNA, 110 bp, synthetic construct
  source 1..110: mol_type = other DNA
agcagcccgcaggagatggctctgttggacacacgtctggaggtgatgaccacatgggaagctcttttatagttttctcaaggaggggccggaactcatttgcatttagg

SEQ ID NO: 9102 - DNA, 110 bp, synthetic construct
  source 1..110: mol_type = other DNA
tatatactgtttaaaatcccatgtgttctttaaaatactaaactgaaactcattacaaagaaagggggttaatgctagtcctattatgactatagggagctgtggtcctt

SEQ ID NO: 9103 - DNA, 110 bp, synthetic construct
  source 1..110: mol_type = other DNA
caaagaaagggggttaatgctagtcctattatgactatagggagctgtggtccttttaggatgtcaggcaagatcatttgtccatgtgttcattcatctatgtaaaaact

SEQ ID NO: 9104 - DNA, 110 bp, synthetic construct
  source 1..110: mol_type = other DNA
gagaaaatatattccaagctgttttttttaaaaccttgtggaatcctttttagttgttgttactctcatctgttggtttattaactttgggactattggaaaggttatta

SEQ ID NO: 9105 - DNA, 110 bp, synthetic construct
  source 1..110: mol_type = other DNA
atctgttgggaggatactcatttcaaaggagacttttttgtaggcttgccagaatgtagactgaggggctcccgtgttgcattttgcaggtattatttccctcctagagt

SEQ ID NO: 9106 - DNA, 110 bp, synthetic construct
  source 1..110: mol_type = other DNA
gtgtgcaagatcttgaagagacacattaaaacatttaatagctctctttggagaatgggattgcctgaaaggtgacaaggacctttcatttttttgttagattttttttc

SEQ ID NO: 9107 - DNA, 110 bp, synthetic construct
  source 1..110: mol_type = other DNA
tgggattgcctgaaaggtgacaaggacctttcatttttttgttagattttttttctgcactaatagattttgcgaaaagaaaaagagagtagataacaatatccacttgg

SEQ ID NO: 9108 - DNA, 110 bp, synthetic construct
  source 1..110: mol_type = other DNA
gctctgctctcagagcccagaacagtgctcaggacacgcttatgagctgatgatagaataggctggttgtggggagttcctgttgtggctcagcaggttacgaaccagac

SEQ ID NO: 9109 - DNA, 110 bp, synthetic construct
  source 1..110: mol_type = other DNA
atttacaccactatttatagacctgccattttccatacttagagcactttccaaaatgcaggaagaggcccagtgaagtgtcagaggtcttctgcctcctggctgctcaa

SEQ ID NO: 9110 - DNA, 110 bp, synthetic construct
  source 1..110: mol_type = other DNA
atgcaggaagaggcccagtgaagtgtcagaggtcttctgcctcctggctgctcaagaaaagccaaccattgctgacagtagaacccaagtccctgaagcagtggtctttg

SEQ ID NO: 9111 - DNA, 110 bp, synthetic construct
  source 1..110: mol_type = other DNA
cagaaagaccatgtgttctctgtcaggccccatggaagccctcagatatagcctctgatggcactcacgcacaagctccggtgacaggtcctaccatgaatcccatccta

SEQ ID NO: 9112 - DNA, 110 bp, synthetic construct
  source 1..110: mol_type = other DNA
tgatggcactcacgcacaagctccggtgacaggtcctaccatgaatcccatcctacgttcaaggcaactgaggctcagagaggtttagcaacctgctaaagacacacagc

SEQ ID NO: 9113 - DNA, 110 bp, synthetic construct
  source 1..110: mol_type = other DNA
tttagattccactggcaggtagcagaaggcaagcctggagctctggaattcccgcgcaggtagcttgtgctgtgggggagcaagcaacctgctggactgggcactggtcg

SEQ ID NO: 9114 - DNA, 110 bp, synthetic construct
  source 1..110: mol_type = other DNA
ttctggtatgagatctcagcttttccttcttcctttgctctgagtgacatgtgagcattaagttctgtgatcgaggtagaatttcttcagcttacttctaaacaacattc

SEQ ID NO: 9115 - DNA, 110 bp, synthetic construct
  source 1..110: mol_type = other DNA
caccccagtttgaccaccaagtctcactgattctgcctccaagctcctcctccgctggtgggggtggcggctgccccttctcatcccagcctcgagtctccagtagccac

SEQ ID NO: 9116 - DNA, 110 bp, synthetic construct
  source 1..110: mol_type = other DNA
actaagaagtggtcgttttctagaaccgtgatggatatgaatcttaagaaactgaaagccagcctccagaagcagctcaaaactcagtgtttgttatgacagaacaaaaa

SEQ ID NO: 9117 - DNA, 110 bp, synthetic construct
  source 1..110: mol_type = other DNA
aagccagcctccagaagcagctcaaaactcagtgtttgttatgacagaacaaaaatcagcgagcccagaagaaggatctccaggctctagccctggctctgctgctcata

SEQ ID NO: 9118 - DNA, 110 bp, synthetic construct; identical to SEQ ID NO: 9116
  source 1..110: mol_type = other DNA

SEQ ID NO: 9119 - DNA, 110 bp, synthetic construct; identical to SEQ ID NO: 9117
  source 1..110: mol_type = other DNA

SEQ ID NO: 9120 - DNA, 110 bp, synthetic construct
  source 1..110: mol_type = other DNA
aactgtctcccccaccatcttcccagctgctttcaagtagaaggggcagcttagatgatcacgggtacaacctcaagggacattctgtgggcagtgtgtgcaggtagcag

SEQ ID NO: 9121 - DNA, 110 bp, synthetic construct
  source 1..110: mol_type = other DNA
tgatcacgggtacaacctcaagggacattctgtgggcagtgtgtgcaggtagcagagaaagaatgtctttatagccccaagagaagccagttctccttacgaggaaactg

SEQ ID NO: 9122 - DNA, 110 bp, synthetic construct
  source 1..110: mol_type = other DNA
attccttgtgtggggattatcttgccccagcaaattattacaatttgttcttatgctggaatcaactctgatgtactactgatgttaggactttaaatattatgtaattt

SEQ ID NO: 9123 - DNA, 110 bp, synthetic construct
  source 1..110: mol_type = other DNA
ctggaatcaactctgatgtactactgatgttaggactttaaatattatgtaatttatttctgtcatgggaaaaaggagtttttaatttcacagccgcaggagaaatacat

SEQ ID NO: 9124 - DNA, 110 bp, synthetic construct; identical to SEQ ID NO: 9122
  source 1..110: mol_type = other DNA

SEQ ID NO: 9125 - DNA, 110 bp, synthetic construct; identical to SEQ ID NO: 9123
  source 1..110: mol_type = other DNA

SEQ ID NO: 9126 - DNA, 110 bp, synthetic construct
  source 1..110: mol_type = other DNA
atctgtattagtgcagtaatagtttaaatagttaagcatttattcttacagtcctgtttgtgatagttaccgggatgtgggtagcataaggcatagaacatatcgaagtt

SEQ ID NO: 9127 - DNA, 110 bp, synthetic construct
  source 1..110: mol_type = other DNA
ttttgttggtcagacggtgggttgtgagatgttccgctcctgcagtcccctcccgttaaagaggttcaactgccgtttgctcggcctttaccttcctgagctcctgaaaa

SEQ ID NO: 9128 - DNA, 110 bp, synthetic construct
  source 1..110: mol_type = other DNA
tagagccgcacatccaactcataatccttatttgtaaacagcaggggaaaaaaaaaaaaaggacacgagcaattctggcaatagttagcttgagctctaacaaaggagcc

SEQ ID NO: 9129 - DNA, 110 bp, synthetic construct
  source 1..110: mol_type = other DNA
ccacatggctaaaatgacaaagactgacaattctgagtgctgacgaggacgtgaagcaacagctgcattcctgtaaagcaccgcttagagttttaaaagcagtcactttg

SEQ ID NO: 9130 - DNA, 110 bp, synthetic construct
  source 1..110: mol_type = other DNA
gcaacagctgcattcctgtaaagcaccgcttagagttttaaaagcagtcactttggaaaactgtttagcagcttctaccaaagcaaaccaaacatctgcaccacggttcc

SEQ ID NO: 9131 - DNA, 110 bp, synthetic construct
  source 1..110: mol_type = other DNA
tgaacttcccttggcatgaactgcatgtctatcttggaccatcatgaacttgaatgttcctgagaacagataactcaatatttcccattttgacacagtcaatctaatcc

SEQ ID NO: 9132 - DNA, 110 bp, synthetic construct
  source 1..110: mol_type = other DNA
gttcctgagaacagataactcaatatttcccattttgacacagtcaatctaatccagggatttttttcagctacactcaaatgttatgttctcaatcactgtcaagttta

SEQ ID NO: 9133 - DNA, 110 bp, synthetic construct
  source 1..110: mol_type = other DNA
gacctgcagtatcaggacccccaggacagagatctcgttctcctcgtgattctgatgcagatctaagctgggaacggcctgactcgaccctacagcaagaggaagtgcag

SEQ ID NO: 9134 - DNA, 110 bp, synthetic construct
  source 1..110: mol_type = other DNA
aaaggccagaagcgagaggcaaggtaacagctgaaagagaggaaggtagcagtccaggtatgcggccagtgcaggcgctgggcagtgggaatggaagggaaggaagatgt

SEQ ID NO: 9135 - DNA, 110 bp, synthetic construct
  source 1..110: mol_type = other DNA
ctgcaccgataggtctggattggaatgcgctcccctcctcctcccagctctgcgatcttgagcaaatctctgaagggctcatcacctccaatccatgtctaaaatgggat

SEQ ID NO: 9136 - DNA, 110 bp, synthetic construct
  source 1..110: mol_type = other DNA
tcgcctctcaggaaggactcccttttcaatctagaaggtccactgccaagcacagaaggtccacatttcgcagactgaactcaggcgaagtcttgccagggaggtgtgag

SEQ ID NO: 9137 - DNA, 110 bp, synthetic construct
  source 1..110: mol_type = other DNA
aaggtccacatttcgcagactgaactcaggcgaagtcttgccagggaggtgtgagccgagggtcgtgtggaacccgggaaacctcctggaaagggaagatgtgagccctg

SEQ ID NO: 9138 - DNA, 110 bp, synthetic construct
  source 1..110: mol_type = other DNA
tggctatgaaccagggagagggccaacgccagaatgcaaccatgctggcgccctgatcttggacttcctagcttccaggactgtgggaaataaacttccgtaatttacag

SEQ ID NO: 9139 - DNA, 110 bp, synthetic construct
  source 1..110: mol_type = other DNA
gctgcatgcgatgcccacgttccacagtgtcccctagtggtcttgggggacagattccagaaccaggcagatcctggtaaatgcacagttagcttcagagcctgtccctt

SEQ ID NO: 9140 - DNA, 110 bp, synthetic construct
  source 1..110: mol_type = other DNA
aggtgcagccaaatgtgcagaaatgcccagctcgggatctgacacctgctacccagccagcaaacattcattaaatctgagtcgtggtgccagatggtctgcccatgctc

SEQ ID NO: 9141 - DNA, 110 bp, synthetic construct
  source 1..110: mol_type = other DNA
gccagcaaacattcattaaatctgagtcgtggtgccagatggtctgcccatgctcacagtcagtctccgctgggtaccgaggtcaggtgtgcagtgtccatcttgagaga

SEQ ID NO: 9142 - DNA, 110 bp, synthetic construct
  source 1..110: mol_type = other DNA
cttcttacctttcacatctcagcctgattcccgtcctcagagacacttccccacctcaaatagtcacccggtagcacgtcactcggctttaaggctcccctgtctttgct

SEQ ID NO: 9143 - DNA, 110 bp, synthetic construct
  source 1..110: mol_type = other DNA
taactggcaaaactacaggtcagatgtgggtctttcagctccatggtcggagcgctttccctcccttaccctgtgctgcgtggacaactgttatcgtttgtctgatgaga

SEQ ID NO: 9144 - DNA, 110 bp, synthetic construct
  source 1..110: mol_type = other DNA
cactgttagccaataaatgatattccactctttgaagtcctgttcccatattattgaacagtttcctcctacttcatattctacttggtcattgaaatatatatggtcac

SEQ ID NO: 9145 - DNA, 110 bp, synthetic construct
  source 1..110: mol_type = other DNA
gaacagtttcctcctacttcatattctacttggtcattgaaatatatatggtcacttacttgtccccagatagttttgtcagaaaatggtatttgcatgtattcttcttt

SEQ ID NO: 9146 - DNA, 110 bp, synthetic construct
  source 1..110: mol_type = other DNA
gcaatgggatagccttttccataagattatctcgattggcttttcaatgctgctttatcctcacaaaatgcctgtctttgccccagcttttcttgataactctgaaatgc

SEQ ID NO: 9147 - DNA, 110 bp, synthetic construct
  source 1..110: mol_type = other DNA
ggatattcagtgtagctccctgagctacacagtaggtaggcccttgttgctcagcaatttgatgtacaagagggtgtatctgctactcccagatgcttaggatgcctcct

SEQ ID NO: 9148 - DNA, 110 bp, synthetic construct
  source 1..110: mol_type = other DNA
aattcccctgattctaattccaagccagaaggtgttcctctggattcccccagaggttcatctacaagggaggagcttggtgctctggactctaggactgcttggggagc

SEQ ID NO: 9149 - DNA, 110 bp, synthetic construct
  source 1..110: mol_type = other DNA
gttcatctacaagggaggagcttggtgctctggactctaggactgcttggggagcagcagaagtgacatttatttagtgctgaccagtagagtggccccatgctaaggac

SEQ ID NO: 9150 - DNA, 110 bp, synthetic construct
  source 1..110: mol_type = other DNA
gccttcggattcctcacctgacagacgggaataatcacaccttgttggcatggctgttttcaagacgagagttcatgggcagttctgggtatattgtaagaactcagtaa

SEQ ID NO: 9151 - DNA, 110 bp, synthetic construct
  source 1..110: mol_type = other DNA
gttttcaagacgagagttcatgggcagttctgggtatattgtaagaactcagtaaatcataactgcgttatcattgttagtactggttattattactacccgcatcaggt

SEQ ID NO: 9152 - DNA, 110 bp, synthetic construct
  source 1..110: mol_type = other DNA
caggggagggtggctcatgttcacctaccgagaggagacccgtgtgtgttcctttagagctctagaagcaaagctaatcaagtaaatgattttattgtctttatccgtct

SEQ ID NO: 9153 - DNA, 110 bp, synthetic construct
  source 1..110: mol_type = other DNA
agagctctagaagcaaagctaatcaagtaaatgattttattgtctttatccgtctcccaggctctcgattcacatggacgatgaactgcgacatattgcacagaactctc

SEQ ID NO: 9154 - DNA, 110 bp, synthetic construct
  source 1..110: mol_type = other DNA
ctgaattcacgtctcaacaggcaaatgcagatccatgtatttgaatgatcatcgtggtaataagaggctttcagttatgagtcatgtttttgaaaagtgagatcggaagg

SEQ ID NO: 9155 - DNA, 110 bp, synthetic construct
  source 1..110: mol_type = other DNA
ggtaataagaggctttcagttatgagtcatgtttttgaaaagtgagatcggaaggaggagcatcatttcaggagctcggggggcaggtgccagctgagaggcagtcttct

SEQ ID NO: 9156 - DNA, 110 bp, synthetic construct; identical to SEQ ID NO: 9154
  source 1..110: mol_type = other DNA

SEQ ID NO: 9157 - DNA, 110 bp, synthetic construct; identical to SEQ ID NO: 9155
  source 1..110: mol_type = other DNA

SEQ ID NO: 9158 - DNA, 110 bp, synthetic construct
  source 1..110: mol_type = other DNA
tcttaagtgtgcagctccagggccattttaatccccgcaggtgattctaattcactccactggcaaggctgaaacacttgctgtggtggttcctggacctaaaactcaca

SEQ ID NO: 9159 - DNA, 110 bp, synthetic construct
  source 1..110: mol_type = other DNA
tccactggcaaggctgaaacacttgctgtggtggttcctggacctaaaactcacaggaaggtgcttgttgaaaatgagcactcaggtacatcccgcacggggtccaccaa

SEQ ID NO: 9160 - DNA, 110 bp, synthetic construct
  source 1..110: mol_type = other DNA
aggtaggagctatggtgaaagatctaacataagccattagaataaagagaacatggaggcagaagtagtattttaaaaataatggctgctaattttccaaaagtgataaa

SEQ ID NO: 9161 - DNA, 110 bp, synthetic construct
  source 1..110: mol_type = other DNA
gaggcagaagtagtattttaaaaataatggctgctaattttccaaaagtgataaaaatcttcaggaaacactaagaaatgcaagcaggataaatacaaagtcacccaagt

SEQ ID NO: 9162 - DNA, 110 bp, synthetic construct
  source 1..110: mol_type = other DNA
agtcccatcttggatgataacgagctgagtaatccagatggatgggaagatctcgtacatcgctttccttccctcacagacagactcacccgctccctctctcaccaaca

SEQ ID NO: 9163 - DNA, 110 bp, synthetic construct
  source 1..110: mol_type = other DNA
cctccagcactgcctatgcccagcctatcaggagaagtcacaaagccacctcccagctgcctccttcgcttcagagccaggcgtcgtctccccagaacaccctgaagttt

SEQ ID NO: 9164 - DNA, 110 bp, synthetic construct
  source 1..110: mol_type = other DNA
gctgcctccttcgcttcagagccaggcgtcgtctccccagaacaccctgaagtttacctcagctgatccacatcttcagcagtaactaacgcctcttaacactgatacag

SEQ ID NO: 9165 - DNA, 110 bp, synthetic construct
  source 1..110: mol_type = other DNA
gaaacaaaacgcagacctcaatttaaattcatttacaaagatcacagcttacaatctagcttgaaatatctgcagcataatcattctataatttcttgcttctgaagaaa

SEQ ID NO: 9166 - DNA, 110 bp, synthetic construct; identical to SEQ ID NO: 9165
  source 1..110: mol_type = other DNA

SEQ ID NO: 9167 - DNA, 110 bp, synthetic construct; identical to SEQ ID NO: 9165
  source 1..110: mol_type = other DNA

SEQ ID NO: 9168 - DNA, 110 bp, synthetic construct; identical to SEQ ID NO: 9165
  source 1..110: mol_type = other DNA

SEQ ID NO: 9169 - DNA, 110 bp, synthetic construct
  source 1..110: mol_type = other DNA
cctctctgtcaccctgtagatcttgtccaccaaccatcaaccaatgtgtgaatgcctggcagggatcatacagcatcctgctcgtgttacaacctgtatccatccttatg

SEQ ID NO: 9170 - DNA, 110 bp, synthetic construct
  source 1..110: mol_type = other DNA
ctggcagggatcatacagcatcctgctcgtgttacaacctgtatccatccttatgggtccttgcttgtcctatgcaattgcgaatattataaatattatccccggagatt

SEQ ID NO: 9171 - DNA, 110 bp, synthetic construct
  source 1..110: mol_type = other DNA
tttatccataaaggtagaggtatataacaatttacgtggttttcggcaaaagtcaaggaagccttagaagcagagaaagcattgacagccccgggtctcgatgtcacagc

SEQ ID NO: 9172 - DNA, 110 bp, synthetic construct; identical to SEQ ID NO: 9171
  source 1..110: mol_type = other DNA

SEQ ID NO: 9173 - DNA, 110 bp, synthetic construct
  source 1..110: mol_type = other DNA
tattttatttatacctgtttcatttcatttcatttcattttatgtttttggtcttttagggccacatcagtggtataaggagattcccaggctagggatctaatcggagc

SEQ ID NO: 9174 - DNA, 110 bp, synthetic construct; identical to SEQ ID NO: 9173
  source 1..110: mol_type = other DNA

SEQ ID NO: 9175 - DNA, 110 bp, synthetic construct
  source 1..110: mol_type = other DNA
ggaagaataatataatttattttgtctcttttctcttagaacacattctcattagctttttagctgtccgtggccaacctagcttcttattctgtgtagtgactgtgtat

SEQ ID NO: 9176 - DNA, 110 bp, synthetic construct; identical to SEQ ID NO: 9175
  source 1..110: mol_type = other DNA

SEQ ID NO: 9177 - DNA, 110 bp, synthetic construct
  source 1..110: mol_type = other DNA
aagaaaatctagaacaccatcttttaatgttggcctatggaattgtgtagcagatctgtctttctacctgctttctacttttacccacatctagtgacataaaggatata

SEQ ID NO: 9178 - DNA, 110 bp, synthetic construct
  source 1..110: mol_type = other DNA
atttgtgtctttttctggctgtacccgtgacacgtggaagttcataggtcaggaatcagatcttcactgcagtaccaacacaagctgcctcagtgacaacacggggtcct

SEQ ID NO: 9179 - DNA, 110 bp, synthetic construct
  source 1..110: mol_type = other DNA
tcagatcttcactgcagtaccaacacaagctgcctcagtgacaacacggggtccttaacccactgagccacagaaaactccatgtagtttgtattatttatttatttact

SEQ ID NO: 9180 - DNA, 110 bp, synthetic construct
  source 1..110: mol_type = other DNA
tgaccatctccatcagagctcttggattaccagctgtattatcagtgagccgtagaagtcgtataggaatcttttttctgagcagtgggtctcaatattaggcttcacat

SEQ ID NO: 9181 - DNA, 110 bp, synthetic construct
  source 1..110: mol_type = other DNA
taggcaggcagctgcagctcccattcaactcctagcctaggaacttccatatgctttgtgtgacccttaaaaatatgtgtgtgtatgtatgtatgagtttataccttttt

SEQ ID NO: 9182 - DNA, 110 bp, synthetic construct; identical to SEQ ID NO: 9181
  source 1..110: mol_type = other DNA

SEQ ID NO: 9183 - DNA, 110 bp, synthetic construct
  source 1..110: mol_type = other DNA
accctggcgaggagcctgagttcccactgttaacagacacaaggcagttacgcttctgaatttggtaacttgttaggtcacacgttcctcttcacagggtatcagcaggg

SEQ ID NO: 9184 - DNA, 110 bp, synthetic construct
  source 1..110: mol_type = other DNA
ctgaatttggtaacttgttaggtcacacgttcctcttcacagggtatcagcagggcgctgtcgggctggagggaagggaggcagaagccagactgggttaataagcacat

SEQ ID NO: 9185 - DNA, 110 bp, synthetic construct
  source 1..110: mol_type = other DNA
gactgaaggatgcattttcctagctgcgaggcatgttggctgctgacggctgatagttgagcccctcagtgggagaagtccgcatttaatgactggtcaaggtggtgggt

SEQ ID NO: 9186 - DNA, 110 bp, synthetic construct
  source 1..110: mol_type = other DNA
gtccatccccttcttcccagctcaggcactgatgactatgagatggctggaatggtggaaatcatcttgtcatcatgaggtcgcaagttcaaggacactgaagatgtcca

SEQ ID NO: 9187 - DNA, 110 bp, synthetic construct
  source 1..110: mol_type = other DNA
tgaagccgtagataattgaagcagagcagtactgggctatcgagttgacttactgcctggagctgctggtaatgttgtaatagtggctaattagattgtatgtcagctcc

SEQ ID NO: 9188 - DNA, 110 bp, synthetic construct
  source 1..110: mol_type = other DNA
cctggagctgctggtaatgttgtaatagtggctaattagattgtatgtcagctccacaaaacctgtttgctaccacagatcataaaagaatgtgggatttgtttgacaaa

SEQ ID NO: 9189 - DNA, 110 bp, synthetic construct; identical to SEQ ID NO: 9187
  source 1..110: mol_type = other DNA

SEQ ID NO: 9190 - DNA, 110 bp, synthetic construct; identical to SEQ ID NO: 9188
  source 1..110: mol_type = other DNA

SEQ ID NO: 9191 - DNA, 110 bp, synthetic construct
  source 1..110: mol_type = other DNA
tcaccctttgcttgtcttttttcctccttggagcctgactgcttttccccggaaacggacagagatctgcaaataaagcaacgcgtcctgcaggccacagctcctccaag

SEQ ID NO: 9192 - DNA, 110 bp, synthetic construct
  source 1..110: mol_type = other DNA
cggacagagatctgcaaataaagcaacgcgtcctgcaggccacagctcctccaagctttggcagcccagaggcgggcagtaacacacaacgcggggcgttatttgcagga

SEQ ID NO: 9193 - DNA, 110 bp, synthetic construct
  source 1..110: mol_type = other DNA
ggctgggggcatctgggatggccccacaccttctcttgatctacaaggcactgtggaatccctgtggagaagtgcgtctaaaagggagtggatatttacaatgaaacaca

SEQ ID NO: 9194 - DNA, 110 bp, synthetic construct
  source 1..110: mol_type = other DNA
ccggtgctgctggcagccatcgctgtttgcccacggactgattctgatgttgggattcctgtgcaatcctgaggagctgctcatgcctctccatctgcacctaaaagagg

SEQ ID NO: 9195 - DNA, 110 bp, synthetic construct
  source 1..110: mol_type = other DNA
ttcctgtgcaatcctgaggagctgctcatgcctctccatctgcacctaaaagagggcctcggagccaagtgcacccccccatctcctacagacagattcttcttacgaca

SEQ ID NO: 9196 - DNA, 110 bp, synthetic construct
  source 1..110: mol_type = other DNA
ctgtgcctggtctgagggtggttttggccccgcctctagctctaagagaaaaacgaaaactcacagctggatttcctataaatcctctcctttaaaactggctcagtagc

SEQ ID NO: 9197 - DNA, 110 bp, synthetic construct
  source 1..110: mol_type = other DNA
tgttcccctaaagtgacacacacatgatagtctgcaggtaatagaaggcccttagtcatcaccaaagagtacccgtatttctattaaacgtaagtacagactgattaacg

SEQ ID NO: 9198 - DNA, 110 bp, synthetic construct
  source 1..110: mol_type = other DNA
cttctttctgtaccgctactcattggctggaatgctcttcatggagcccttcccatccctggctccttctcagctttcaagtatcagctcaactgatacagtttcaggtg

SEQ ID NO: 9199 - DNA, 110 bp, synthetic construct
  source 1..110: mol_type = other DNA
tccctggctccttctcagctttcaagtatcagctcaactgatacagtttcaggtgggccatcctgttccctttacctaagcagaagtagaacccagtatgttggctctat

SEQ ID NO: 9200 - DNA, 110 bp, synthetic construct
  source 1..110: mol_type = other DNA
ttgtatctctcacaagggtcctctcttaataaacacactcttcgcctgctgctctgcctcacgggaaagtctttctgtgatgggctaaaagaacatgagcttcagtaagg

SEQ ID NO: 9201 - DNA, 110 bp, synthetic construct
  source 1..110: mol_type = other DNA
gcctcacgggaaagtctttctgtgatgggctaaaagaacatgagcttcagtaaggcctgacaccaagttagcagttttcattaaaagactgttctgtaacagtccttgag

SEQ ID NO: 9202 - DNA, 110 bp, synthetic construct
  source 1..110: mol_type = other DNA
agagatatcaagtaagttatccaaggtcacctagctggtatatgatggagctacagtaaaaactgaaacggcaggtttctaaaccacagttctgtgagtgaaggaacaaa

SEQ ID NO: 9203 - DNA, 110 bp, synthetic construct
  source 1..110: mol_type = other DNA
cagctcctcctacctcattttttattctctctctctcaccctattttacatcactgttcatatttacaataggtaaaagcaactctacagaaggattaatgactgaaaat

SEQ ID NO: 9204 - DNA, 110 bp, synthetic construct
  source 1..110: mol_type = other DNA
gttcatatttacaataggtaaaagcaactctacagaaggattaatgactgaaaatgagaagagtcacttttcccaaggacattcactttttaaagggcatcatttgacaa

SEQ ID NO: 9205 - DNA, 110 bp, synthetic construct; identical to SEQ ID NO: 9203
  source 1..110: mol_type = other DNA

SEQ ID NO: 9206 - DNA, 110 bp, synthetic construct; identical to SEQ ID NO: 9204
  source 1..110: mol_type = other DNA

SEQ ID NO: 9207 - DNA, 110 bp, synthetic construct
  source 1..110: mol_type = other DNA
ttctatgtatttaaaattttcatcaaacttggaaaaattaagccattcttcaaataccatgcccccccacgccttttcctttttccttggagactccaattacatgtaca

SEQ ID NO: 9208 - DNA, 110 bp, synthetic construct; identical to SEQ ID NO: 9207
  source 1..110: mol_type = other DNA

SEQ ID NO: 9209 - DNA, 110 bp, synthetic construct
  source 1..110: mol_type = other DNA
cacacactgtgatcagtccccaatgatcctgcccaattttttttggtttctcacataaatgtacatcatgggactcctccactgacagtagctttcttcacaacacctgt

SEQ ID NO: 9210 - DNA, 110 bp, synthetic construct
  source 1..110: mol_type = other DNA
taaatgtacatcatgggactcctccactgacagtagctttcttcacaacacctgttaccaaaacccaccaaagggttttaaccaaaaactataaaatgtctttatgtggc

SEQ ID NO: 9211 - DNA, 110 bp, synthetic construct
  source 1..110: mol_type = other DNA
agacttttttttttaatagaatgccagctgataaatttggaaggaatggatagaactaagaaaagcaccattttgcagctttcgaatttaagacatggttctggcagggt

SEQ ID NO: 9212 - DNA, 110 bp, synthetic construct
  source 1..110: mol_type = other DNA
ctaagaaaagcaccattttgcagctttcgaatttaagacatggttctggcagggtcaggattaacaatggatgctaaaaccattggctgaaaagttgttgtttgaaactt

SEQ ID NO: 9213 - DNA, 110 bp, synthetic construct; identical to SEQ ID NO: 9211
  source 1..110: mol_type = other DNA

SEQ ID NO: 9214 - DNA, 110 bp, synthetic construct; identical to SEQ ID NO: 9212
  source 1..110: mol_type = other DNA

SEQ ID NO: 9215 - DNA, 110 bp, synthetic construct
  source 1..110: mol_type = other DNA
ttacacatcacctccacggatctcaggagaagtggccatgtctgtcaatgcattttgtgctgctgtttaaatgttactgatacggggatcagcactcactacatggactc

SEQ ID NO: 9216 - DNA, 110 bp, synthetic construct
  source 1..110: mol_type = other DNA
tgtgctgctgtttaaatgttactgatacggggatcagcactcactacatggactcacagccatttatgggctggacaggatcttagacatcattttagtctaggagttac

SEQ ID NO: 9217 - DNA, 110 bp, synthetic construct; identical to SEQ ID NO: 9215
  source 1..110: mol_type = other DNA

SEQ ID NO: 9218 - DNA, 110 bp, synthetic construct; identical to SEQ ID NO: 9216
  source 1..110: mol_type = other DNA

SEQ ID NO: 9219 - DNA, 110 bp, synthetic construct
  source 1..110: mol_type = other DNA
agcagtatttattttcttttaaaatcagagctgtatgtgcgtgtttgacagtgagctgttattcttaaaggcagcaggagagacagcatgttaaagtttcatattaaaca

SEQ ID NO: 9220 - DNA, 110 bp, synthetic construct
  source 1..110: mol_type = other DNA
ctgttattcttaaaggcagcaggagagacagcatgttaaagtttcatattaaacaacaagaacttttaaggaacgtcctcaatttacattcacagtttcaaagttcaaga

SEQ ID NO: 9221 - DNA, 110 bp, synthetic construct
  source 1..110: mol_type = other DNA
cagcagtgacaacatggaacaaggaatccttaaccagtaggccaccagggagcctctccccaaacttttgatagtatctctgccaggtctcagtcagctgctgtttcctc

SEQ ID NO: 9222 - DNA, 110 bp, synthetic construct
  source 1..110: mol_type = other DNA
ctccccaaacttttgatagtatctctgccaggtctcagtcagctgctgtttcctccaggaccctatcattgtccccctaattagcacaagatatcccttgaagtagtccc

SEQ ID NO: 9223 - DNA, 110 bp, synthetic construct
  source 1..110: mol_type = other DNA
ccagttccaacatcactgactgggccgtcccctctgaccactccagagggatgagaactgcccccagccccaacccttttttattttctcatatgcacacttgtcctgtt

SEQ ID NO: 9224 - DNA, 110 bp, synthetic construct
  source 1..110: mol_type = other DNA
aactgcccccagccccaacccttttttattttctcatatgcacacttgtcctgttatcacctgtcctgtcatttcttccttgtttatctctcttatctccccaactataa

SEQ ID NO: 9225 - DNA, 110 bp, synthetic construct
  source 1..110: mol_type = other DNA
aacatctaatcgcagtgctttgtgaaaagcaaactgaattttgtagagagggaagaagggtcctgagtagaaaaatctgtggaaggcagttaacaactcctttcaatgcc

SEQ ID NO: 9226 - DNA, 110 bp, synthetic construct
  source 1..110: mol_type = other DNA
aagggtcctgagtagaaaaatctgtggaaggcagttaacaactcctttcaatgccctaaactatcacatgctgatgaaagtgttcttgctcagcactctggtttttccat

SEQ ID NO: 9227 - DNA, 110 bp, synthetic construct; identical to SEQ ID NO: 9225
  source 1..110: mol_type = other DNA

SEQ ID NO: 9228 - DNA, 110 bp, synthetic construct; identical to SEQ ID NO: 9226
  source 1..110: mol_type = other DNA

SEQ ID NO: 9229 - DNA, 110 bp, synthetic construct
  source 1..110: mol_type = other DNA
aaagagagtatgtgataatggtttgagaactaggagaccctgtgcttaggtttgatgacaggctctgtgaagaataatattgcgtaaatgccattagtatttaggaaacg

SEQ ID NO: 9230 - DNA, 110 bp, synthetic construct
  source 1..110: mol_type = other DNA
tgacaggctctgtgaagaataatattgcgtaaatgccattagtatttaggaaacgttttttgcatatttgctgcacactgtttctgtttacttcttgagtctcttattca

SEQ ID NO: 9231 - DNA, 110 bp, synthetic construct
  source 1..110: mol_type = other DNA
gtcagccggttccctctaagcctgttcttggccttcctcaaggttcagtgctcttgttgctgttgtcccctgttctccagcttttggtagtttgcacttctttcccttgc

SEQ ID NO: 9232 - DNA, 110 bp, synthetic construct
  source 1..110: mol_type = other DNA
tttttgacttgaaaggaccacgagctccttcctgtctcataaaaaaagggaggttaacacaaaaaagcgttgcagagtgtgtttgtatttgtgtgtgtgtatgtatgcat

SEQ ID NO: 9233 - DNA, 110 bp, synthetic construct
  source 1..110: mol_type = other DNA
aatgatgtgaggaaatatgcctctttcttttcttatttctgcttcctcctgaattttggctccattctataagactctctccatgagacaggaaatgacctttaagaatc

SEQ ID NO: 9234 - DNA, 110 bp, synthetic construct
  source 1..110: mol_type = other DNA
ttggctccattctataagactctctccatgagacaggaaatgacctttaagaatcctatgtttatgccctactgactttcctatcccaggagaggactactccttcccag

SEQ ID NO: 9235 - DNA, 110 bp, synthetic construct
  source 1..110: mol_type = other DNA
gtttctcctttcaaaagaaaaattttgtttaagaaagtgaaatacttccttatgaaaacagatagaaatatgcagctgtgtcgcagatgataacttattctgaaacctga

SEQ ID NO: 9236 - DNA, 110 bp, synthetic construct
  source 1..110: mol_type = other DNA
aaacagatagaaatatgcagctgtgtcgcagatgataacttattctgaaacctgaaggcaccccttctcaagatgaactgggcacatgaacaggtgtggaagccactgct

SEQ ID NO: 9237 - DNA, 110 bp, synthetic construct
  source 1..110: mol_type = other DNA
tggattaaaaagctaggggaataagaaacgtcctgatttgatgacatttagagtgtgagtttgttttttccaaaaggccgtctctgttcattgtttctcacagtgctgtg

SEQ ID NO: 9238 - DNA, 110 bp, synthetic construct
  source 1..110: mol_type = other DNA
aaatttaggctaccatcaccccagagtcccctaaaaaactttatagattcataatacctcctaaatacaaaacaatactcgtttgttgtgagaaatttggaaaacattga

SEQ ID NO: 9239 - DNA, 110 bp, synthetic construct
  source 1..110: mol_type = other DNA
ctggattttgacaataccttctttgtcagaagtatgttgcaaagagagtcagcgaagctgctgttgccaggtacctgttccctggcacctgagacaaaggctatttgaga

SEQ ID NO: 9240 - DNA, 110 bp, synthetic construct
  source 1..110: mol_type = other DNA
cattgtaaggagtaaacaagataaagcgtaagtgggatagcaaaatacctggcatgtgataagcattcaataaatattagctgttattttttttttttcccactacatcc

SEQ ID NO: 9241 - DNA, 110 bp, synthetic construct
  source 1..110: mol_type = other DNA
gccaatcaggtccttccacatggagtgtccatcattgttgttcctgcggccttgcctttgctgcttttggttcatttttctatgtgtaattctccaagtttcccattaat

SEQ ID NO: 9242 - DNA, 110 bp, synthetic construct
  source 1..110: mol_type = other DNA
ctttgctgcttttggttcatttttctatgtgtaattctccaagtttcccattaattctgtgagccacctgttaaacatctgatataatcttttttctgtttaaaaagcca

SEQ ID NO: 9243 - DNA, 110 bp, synthetic construct
  source 1..110: mol_type = other DNA
ttccagagaattctcttgagcttccaaatgaaagtggccctcctgggtgctttcgtagctttttaggtgcatcttatcaaaaggtgatcacagcacattggaacctgaca

SEQ ID NO: 9244 - DNA, 110 bp, synthetic construct
  source 1..110: mol_type = other DNA
tagctttttaggtgcatcttatcaaaaggtgatcacagcacattggaacctgacagctggtctggcttcttctctaaagacagacactctctcttgttcattttgaaatc

SEQ ID NO: 9245 - DNA, 110 bp, synthetic construct
  source 1..110: mol_type = other DNA
tgggcccgagctgaggccgttgatacgcagccgcctgggggggacggcgggcctaacaataaccctgtcaaaacacaattccatccggggagggaaagaagatgtgtgga

SEQ ID NO: 9246 - DNA, 110 bp, synthetic construct
  source 1..110: mol_type = other DNA
acaataaccctgtcaaaacacaattccatccggggagggaaagaagatgtgtggaatgtaaatcaaatgaaaataaagaccatcaaagcacagccagaataaggatgttt

SEQ ID NO: 9247 - DNA, 110 bp, synthetic construct
  source 1..110: mol_type = other DNA
caaagcctgatttgctctcatggccagtcggatttccggggtagtattagctatctttaaaacatatttccatggcaactggtttaaaaccatgtttgtctgtagagcct

SEQ ID NO: 9248 - DNA, 110 bp, synthetic construct
  source 1..110: mol_type = other DNA
gtggctctttgttgagggctttggaggacgtggtcttgacacaggagccagaatgagaggcaccctcagaactcagaaggctccactgcacccctgggaggggacttggt

SEQ ID NO: 9249 - DNA, 110 bp, synthetic construct
  source 1..110: mol_type = other DNA
agaggcaccctcagaactcagaaggctccactgcacccctgggaggggacttggtggctaagtgtccagcaaagtacaacaggccttgaccaaaacgaagggaaggaaaa

SEQ ID NO: 9250 - DNA, 110 bp, synthetic construct
  source 1..110: mol_type = other DNA
agacatatctctaaatcaggcttcaatatgctcttcagttgccatgatgccttggctataaggttagggataagtatgcaatccagcaaaagcagatgcattgagagtat

SEQ ID NO: 9251 - DNA, 110 bp, synthetic construct
  source 1..110: mol_type = other DNA
cttgaaatatccaaggaatagcaaggaaggcagtgcagctgggaccaagggaaccagagcagggcccagaaaggcaggtgatggaggcaggaagaagctgcctgccagag

SEQ ID NO: 9252 - DNA, 110 bp, synthetic construct
  source 1..110: mol_type = other DNA
agagcagggcccagaaaggcaggtgatggaggcaggaagaagctgcctgccagaggatgctgaaccttctcagtcctagtagcgataccgcctgttactcagcaacatgg

SEQ ID NO: 9253 - DNA, 110 bp, synthetic construct
  source 1..110: mol_type = other DNA
acaaaaaaaaaaaaaaaagaaaatgtttctcagctgaaatttttaaaattaaatcggcagattgagagcatctgccaactgatggcgcacttaaatgtctcctgtgacct

SEQ ID NO: 9254 - DNA, 110 bp, synthetic construct
  source 1..110: mol_type = other DNA
ggcagattgagagcatctgccaactgatggcgcacttaaatgtctcctgtgaccttctcaaccaaaggataaaagaaaaacaccacaggaagctgacctgtgtccaaact

SEQ ID NO: 9255 - DNA, 110 bp, synthetic construct
  source 1..110: mol_type = other DNA
tccccaacccactgagcgagtccagggatccaacccgcaaccccatggcccccagtcagattcgctaaccactccaccacgacggaactcccagagctggtgttcttcaa

SEQ ID NO: 9256 - DNA, 110 bp, synthetic construct
  source 1..110: mol_type = other DNA
tcagattcgctaaccactccaccacgacggaactcccagagctggtgttcttcaatgctgtgttctagaattccttaaaagggacacaatagagaaatggctacagatgc

SEQ ID NO: 9257 - DNA, 110 bp, synthetic construct
  source 1..110: mol_type = other DNA
agccaggtgatggtgaaaggtagatggagaagttagaagagggagtccttggactaaatgtgtgtttcttccagggtcagcaggagaggaggaggcagaggagggagtga

SEQ ID NO: 9258 - DNA, 110 bp, synthetic construct
  source 1..110: mol_type = other DNA
aggtgtacagaatttctgtatacctcataaaggcacagccatctagcaccgtaatggtacatttgttacaaatgatgaatatatattaacatgtcattattatcctaagt

SEQ ID NO: 9259 - DNA, 110 bp, synthetic construct
  source 1..110: mol_type = other DNA
ccatagaatctatcctcctttacattatgttcaataagaatgtattctctatcattgggaagactggctaggcgaccaaggcctagaatgtcatgtttgagaaggatact

SEQ ID NO: 9260 - DNA, 110 bp, synthetic construct; identical to SEQ ID NO: 9259
  source 1..110: mol_type = other DNA

SEQ ID NO: 9261 - DNA, 110 bp, synthetic construct
  source 1..110: mol_type = other DNA
gagcaccttcttgggactaattgatctgcagaacattgtatggtttaccaagtgcctgccacactgatgccatcgttacctgcggcagtccacggggccgtacacgcagt

SEQ ID NO: 9262 - DNA, 110 bp, synthetic construct
  source 1..110: mol_type = other DNA
ctgccacactgatgccatcgttacctgcggcagtccacggggccgtacacgcagtggaggcttcccttccgaggcctgtgtaactatttctgtggcatctcttttgccct

SEQ ID NO: 9263 - DNA, 110 bp, synthetic construct
  source 1..110: mol_type = other DNA
actgttaaccctactgcctggaacaaggactccctcaataaattgttgacaggataaataaggcagggcattgccaagcagatgctgcagtggacatttgcaaaaacttt

SEQ ID NO: 9264 - DNA, 110 bp, synthetic construct
  source 1..110: mol_type = other DNA
gctgcatttaactaatcctcagagtaactcccttttcagaggccgttctctcactatagatgtggaaactaagactacaagaaatatgaagtattagacaaggttatgca

SEQ ID NO: 9265 - DNA, 110 bp, synthetic construct
  source 1..110: mol_type = other DNA
aatactgatacctgaaatggtagtcagaggaattgggccttttaaaaaattacatatgtatgtaatcttgatcatgatggaatttatactgaagtgaaaattaacttggt

SEQ ID NO: 9266 - DNA, 110 bp, synthetic construct
  source 1..110: mol_type = other DNA
atgtcagggagttcctgctgtggtacagcgagttaagaatctggctgtagcagctaggtccctgagcgagtttgatgtgttactgtggtttacatgatccagcgttgctg

SEQ ID NO: 9267 - DNA, 110 bp, synthetic construct
  source 1..110: mol_type = other DNA
cagcgagttaagaatctggctgtagcagctaggtccctgagcgagtttgatgtgttactgtggtttacatgatccagcgttgctgcagctgtggcataggtcacagctgt

SEQ ID NO: 9268 - DNA, 110 bp, synthetic construct
  source 1..110: mol_type = other DNA
ctggcagtcattcttcattctcacctgtgtcctactcataccgttttatacaataattccctttttgaaaatactctttaaagtaataatccagtaaatgttgatactta

SEQ ID NO: 9269 - DNA, 110 bp, synthetic construct
  source 1..110: mol_type = other DNA
tctatttctctttttttattcagtagtacttgaatttttactgattcatttaaactcccctattactccacttccgcaactggcagtacatatttttaatacggccggtc

SEQ ID NO: 9270 - DNA, 110 bp, synthetic construct
  source 1..110: mol_type = other DNA
tcccctattactccacttccgcaactggcagtacatatttttaatacggccggtcacagctggatatgcagcagattgtcggcaactatccccttgtgctgcctcttaat

SEQ ID NO: 9271 - DNA, 110 bp, synthetic construct
  source 1..110: mol_type = other DNA
tgtaaaggctggtttagaacaggaagtgggagagactcaagatgtgagaggaatttgacataaaggaagttcatcattactgcgatggaggtgagtcaaggagttcccgg

SEQ ID NO: 9272 - DNA, 110 bp, synthetic construct
  source 1..110: mol_type = other DNA
tgacataaaggaagttcatcattactgcgatggaggtgagtcaaggagttcccgggtgtggctcagtgggttaaagatctgacatggtctccatgagaacacaggttcca

SEQ ID NO: 9273 - DNA, 110 bp, synthetic construct
  source 1..110: mol_type = other DNA
gacccatgtagtaggtattggaaccagttttttttggtgggtagaaggatagacgaagaagatgcaccagaacttcttttcttgaagctcctagagttatggactgaatc

SEQ ID NO: 9274 - DNA, 110 bp, synthetic construct
  source 1..110: mol_type = other DNA
ttgccttaccgttggagcacttcctgcatattcaggcttctctctcccacatgcatattatctacactctgtgggttcactgcgggaagctagcatggtgcacagtgtcg

SEQ ID NO: 9275 - DNA, 110 bp, synthetic construct
  source 1..110: mol_type = other DNA
tattatctacactctgtgggttcactgcgggaagctagcatggtgcacagtgtcggattagtatttctagtcagaatatttattctggtgaatatatatttgctgctgaa

SEQ ID NO: 9276 - DNA, 110 bp, synthetic construct
  source 1..110: mol_type = other DNA
tcccgctgacatccagacatgctgccctttctaaactatttttatttggaaagagatcgtaggttttcaaataacgagatcttccatatgggaaatctgctggtttgtga

SEQ ID NO: 9277 - DNA, 110 bp, synthetic construct
  source 1..110: mol_type = other DNA
ctccagtgagttcagttttagctgtggaacaatgggctatcccggtggaaaagccaagaaggcagaatacacacatacacatacatacactttttctctaaagctttaga

SEQ ID NO: 9278 - DNA, 110 bp, synthetic construct
  source 1..110: mol_type = other DNA
ttactagctgtgtgagctgaaggcactctctcttagtttcagttcccccccttgtaatatgagaataataatactgccttaccttgtacagttttaaagatcaaatggca

SEQ ID NO: 9279 - DNA, 110 bp, synthetic construct
  source 1..110: mol_type = other DNA
aatatgagaataataatactgccttaccttgtacagttttaaagatcaaatggcatgtgcatttaaagaatgtaacatagtacttggaacatagaagtgcttcgtgaata

SEQ ID NO: 9280 - DNA, 110 bp, synthetic construct
  source 1..110: mol_type = other DNA
tgataagaagtaaggctttaaatggtcttcacacacctgtatttaattggctaaaaatcatggagacaagtctgatgcctctgactgattctctgcctactgcctacaga

SEQ ID NO: 9281 - DNA, 110 bp, synthetic construct
  source 1..110: mol_type = other DNA
aatcatggagacaagtctgatgcctctgactgattctctgcctactgcctacagagaaaaaataaatgacttacatcatcaccctagaataataaggtgtattctgaaga

SEQ ID NO: 9282 - DNA, 110 bp, synthetic construct
  source 1..110: mol_type = other DNA
taaaaggaaaaggacttgtttcctccgcttcttcagtctggtacaagttcgctggcaatgtgaaaaacaacttttttctaaatttaaatttaactactttacacttttga

SEQ ID NO: 9283 - DNA, 110 bp, synthetic construct
  source 1..110: mol_type = other DNA
cgcttcttcagtctggtacaagttcgctggcaatgtgaaaaacaacttttttctaaatttaaatttaactactttacacttttgaaccttttaatgtaactagaataagc

SEQ ID NO: 9284 - DNA, 110 bp, synthetic construct
  source 1..110: mol_type = other DNA
tggttaaccctgcctcagtttccctttggacatcccctgctcccagaatctgcagtcccagtgaaggggaccctatccacatctctgaaggtggggcgggatggcccaga

SEQ ID NO: 9285 - DNA, 110 bp, synthetic construct
  source 1..110: mol_type = other DNA
tatcccatcctcacatgccatgtgcctgcatcacatggttccccactagatgaacaggaagttaagtaaactcagctagagcaattccagttggtattttgcagccacat

SEQ ID NO: 9286 - DNA, 110 bp, synthetic construct
  source 1..110: mol_type = other DNA
aggaagttaagtaaactcagctagagcaattccagttggtattttgcagccacattaaaggaactagctgtgatactggggaacgcaacaaagtgagaatcacattatct

SEQ ID NO: 9287 - DNA, 110 bp, synthetic construct
  source 1..110: mol_type = other DNA
attgatgagctctgcacacagggaggggccacctgggtgggttaaaggaaagggggaggtggggccagatcgaggcaggattagcaagacccaatgcgggcttggatttt

SEQ ID NO: 9288 - DNA, 110 bp, synthetic construct
  source 1..110: mol_type = other DNA
gaggtggggccagatcgaggcaggattagcaagacccaatgcgggcttggattttactctaagccagatggagaattagggaagggctttaagcaaaggtcctgatgtgt

SEQ ID NO: 9289 - DNA, 110 bp, synthetic construct
  source 1..110: mol_type = other DNA
cagatacagtacatgtccttaaggagtccatcatccgtgataatggcttgagtccatccttccatacagatgtgctgtcctatggcaaaggggacagccaactgccttgc

SEQ ID NO: 9290 - DNA, 110 bp, synthetic construct
  source 1..110: mol_type = other DNA
gtggaataaccgtaacgaagttcaggacagaaggctggaaatagggtttgggagctcctgagaggagccgggttagagacgcagcccttcaagactaagagtgtgttgtc

SEQ ID NO: 9291 - DNA, 110 bp, synthetic construct
  source 1..110: mol_type = other DNA
tcctgagaggagccgggttagagacgcagcccttcaagactaagagtgtgttgtcaaaggtaaacgaacttgggtttgaactctgccttccacactcacgaactagctgt

SEQ ID NO: 9292 - DNA, 110 bp, synthetic construct
  source 1..110: mol_type = other DNA
tgcccaaaaagcagaatcagaagcctatggacccacacacggtgtgtgtgtttggaacccgcacacacgctggcccaggcctggtgctaagtggcaacttggtctacacc

SEQ ID NO: 9293 - DNA, 110 bp, synthetic construct
  source 1..110: mol_type = other DNA
aacccgcacacacgctggcccaggcctggtgctaagtggcaacttggtctacacctctcatgttcttggagagaacacgcaacaagtaagttagaaaaataaagaaaacc

SEQ ID NO: 9294 - DNA, 110 bp, synthetic construct
  source 1..110: mol_type = other DNA
atctcaaaatgacttgcctttctttccctgttctctcaccacctgagccaaggaaggggtgagaaacgagtcagctcagagccggaggctggttctgaatgaaatgttgc

SEQ ID NO: 9295 - DNA, 110 bp, synthetic construct
  source 1..110: mol_type = other DNA
ggggtgagaaacgagtcagctcagagccggaggctggttctgaatgaaatgttgctggtgatgtctccttaaggcagggatgtgcacacagacggccaaccaacaacctc

SEQ ID NO: 9296 - DNA, 110 bp, synthetic construct; identical to SEQ ID NO: 9294
  source 1..110: mol_type = other DNA

SEQ ID NO: 9297 - DNA, 110 bp, synthetic construct; identical to SEQ ID NO: 9295
  source 1..110: mol_type = other DNA

SEQ ID NO: 9298 - DNA, 110 bp, synthetic construct
  source 1..110: mol_type = other DNA
ggaaatgtgttgcttttcaccttaagaggaagggtcacggacaccccgtctgtgaaaaatgaatagaatctaagaaaaccgtcctcacactgaacagctctcttttcaaa

SEQ ID NO: 9299 - DNA, 110 bp, synthetic construct
  source 1..110: mol_type = other DNA
aaaatgaatagaatctaagaaaaccgtcctcacactgaacagctctcttttcaaacaataacatctagtgcatttttcagagcatctacttcagtattcaacctttttaa

SEQ ID NO: 9300 - DNA, 110 bp, synthetic construct
  source 1..110: mol_type = other DNA
atgctggacctaggacctgacgggggtgtgcattctccacttacagggaagacgtctaaacactcccgagaagctgtcttaggagaggcgtccccaggaagacaggatgg

SEQ ID NO: 9301 - DNA, 110 bp, synthetic construct
  source 1..110: mol_type = other DNA
gtgtgtcacatgctgaaaattcccgctcaagctcccaacaccccagtgaaggaggtgaatgatatcattgtgcctgaaggtgagtagaggatacacccagggtcccaaag

SEQ ID NO: 9302 - DNA, 110 bp, synthetic construct
  source 1..110: mol_type = other DNA
ggctttgaggggaggaatgggcaaggagggtgagcaggcctaggcttgtctagctgagtaacttcagcaggctctggggtccaggggctgtcccaagttgtccgaggtgg

SEQ ID NO: 9303 - DNA, 110 bp, synthetic construct
  source 1..110: mol_type = other DNA
gtatctgaagagttcccaatctcctgaaagaaaaagaaagcttgctttgtaaacgaacaggcatctactataaactctcactaggggtgatttttgtccccaagagacat

SEQ ID NO: 9304 - DNA, 110 bp, synthetic construct
  source 1..110: mol_type = other DNA
gatcttaccatgtttgaggaagaaatatattcctgggacctaaagaatgtatttaaataatgaatggagagtacaaacttctttaagttctcttaccatctgctatttta

SEQ ID NO: 9305 - DNA, 110 bp, synthetic construct; identical to SEQ ID NO: 9304
  source 1..110: mol_type = other DNA

SEQ ID NO: 9306 - DNA, 110 bp, synthetic construct
  source 1..110: mol_type = other DNA
cggacactgttgggtccttaacctgctgaaccacaatgggaagtgctacagagtgtttaatgtgtgctggagactgtgccacatgttcatctcacctaatccttacaaac

SEQ ID NO: 9307 - DNA, 110 bp, synthetic construct
  source 1..110: mol_type = other DNA
gccccattaaggtggtttggatgtaacctcggagggtagattttaaagggcattgtgctgatcgatgcttccatttcaactctgtgacagttaccggcagtgaaaccaca

SEQ ID NO: 9308 - DNA, 110 bp, synthetic construct
  source 1..110: mol_type = other DNA
acagcttcacttcagtgaaatcccaatgaaacaacccattcaactgatacaaagtttagatagacgtattctttgatttaaaaaaaatcttcacaagaaaagaaaaccaa

SEQ ID NO: 9309 - DNA, 110 bp, synthetic construct
  source 1..110: mol_type = other DNA
ttgcctcatcctcctttaagaacagcaagagtttttagagaggagcctaggttattcatctttacccctcagcgtaatgccaagaacagagtaggtgttttagtcagctt

SEQ ID NO: 9310 - DNA, 110 bp, synthetic construct
  source 1..110: mol_type = other DNA
tcatctttacccctcagcgtaatgccaagaacagagtaggtgttttagtcagctttcagctttccttagactgtgctccaagatacataagctcaaaatcacaataattt

SEQ ID NO: 9311 - DNA, 110 bp, synthetic construct
  source 1..110: mol_type = other DNA
ttcagactttgagaaaataaataaagctctgcagggataacttcagacttctgctttcattaaagcggccttcgatgcatctcccctccctccaaacagagcaccacgtg

SEQ ID NO: 9312 - DNA, 110 bp, synthetic construct
  source 1..110: mol_type = other DNA
ttcattaaagcggccttcgatgcatctcccctccctccaaacagagcaccacgtgtacatttgttccttcctatgtcaagtctcagtaccagaatcccctctcttctcta

SEQ ID NO: 9313 - DNA, 110 bp, synthetic construct
  source 1..110: mol_type = other DNA
cccgtggcctcctctgaggagtcactaagatcattagcctgcttgactgccgacaggggcagccttctcacaagtgtcccctcgttcctagcaatcattagtgccactca

SEQ ID NO: 9314 - DNA, 110 bp, synthetic construct
  source 1..110: mol_type = other DNA
ggggcagccttctcacaagtgtcccctcgttcctagcaatcattagtgccactcagccacagccacggaggacaaggtcagcccctcaaggaatcagccacttaattaga

SEQ ID NO: 9315 - DNA, 110 bp, synthetic construct
  source 1..110: mol_type = other DNA
attccctgtcccgggaaattccacatgccactggcacaaccaaaaaaaaaaaaaaaaaaaaaaacagtcattttccttcaaactttgattaacttcatgtgcataaaatt

SEQ ID NO: 9316 - DNA, 110 bp, synthetic construct
  source 1..110: mol_type = other DNA
tgggaaatttgaaaaaaaaaaaaaaaaaaaaaaaaggcctgtgaggagagaaaagatgattctgaaggctctttacacctgggttaccagagcatcagaggggacagcca

SEQ ID NO: 9317 - DNA, 110 bp, synthetic construct
  source 1..110: mol_type = other DNA
aatcagaatctctctagcttccttagtagaactaagagatctcacattacattgctacctctaaaacacaactctttaaaagcgtaatctggccatcttatcatctaagc

SEQ ID NO: 9318 - DNA, 110 bp, synthetic construct
  source 1..110: mol_type = other DNA
tacctctaaaacacaactctttaaaagcgtaatctggccatcttatcatctaagcgttttcgttgcgtactcaagaacaccactgtcagtaaactgcagaacacatcgaa

SEQ ID NO: 9319 - DNA, 110 bp, synthetic construct
  source 1..110: mol_type = other DNA
ggttaagagaagagtcatccattagattggaaaatagtccgagagttagaaataaaaagttccgttttgtcattttaagtccaaagaacctattatatatcccagtaaaa

SEQ ID NO: 9320 - DNA, 110 bp, synthetic construct
  source 1..110: mol_type = other DNA
catccattagattggaaaatagtccgagagttagaaataaaaagttccgttttgtcattttaagtccaaagaacctattatatatcccagtaaaaataaggcacaaagat

SEQ ID NO: 9321 - DNA, 110 bp, synthetic construct
  source 1..110: mol_type = other DNA
atcaaataatttctatgtggtagaagtatttatttttatttttttaaggtatagtttggacttcccgttatggcagagcggagacgaatctgactaggaaccatgaggtt

SEQ ID NO: 9322 - DNA, 110 bp, synthetic construct; identical to SEQ ID NO: 9321
  source 1..110: mol_type = other DNA

SEQ ID NO: 9323 - DNA, 110 bp, synthetic construct
  source 1..110: mol_type = other DNA
tggagtttggaaaggatgtctacaccagagataagtaattgagagctggtgttatatatagtagttgaagataggaagcaacatttccatcacgttcctgcaagtcagta

SEQ ID NO: 9324 - DNA, 110 bp, synthetic construct
  source 1..110: mol_type = other DNA
atgcaaccttagtgcattctgagtaaactcaatgatttcacacttaaacccagcagctttagctttaactctatgtggtgacactggggagcatatctgaccactgattg

SEQ ID NO: 9325 - DNA, 110 bp, synthetic construct
  source 1..110: mol_type = other DNA
gtacttctgggctccctcttctgttcatttgattagtttgtctgctctttcaataattccactctgtcttgattactgtagctttatagtaaatcttaaagtcagatagt

SEQ ID NO: 9326 - DNA, 110 bp, synthetic construct
  source 1..110: mol_type = other DNA
agtcatctagtcctttgaagtctattttcctccctgagaatctaacagaaatagacatggccttcagataaagattaatatgttagctttattattgctgaagctggatt

SEQ ID NO: 9327 - DNA, 110 bp, synthetic construct
  source 1..110: mol_type = other DNA
ctaatatcaatttccctccaatcagcaaaataaaaaaaaataatgtggcaagtaagcagttttgtcatctaatttgtactagataagtaatgctcatgaagacttacttg

SEQ ID NO: 9328 - DNA, 110 bp, synthetic construct
  source 1..110: mol_type = other DNA
acttactaatctagaccatccctgttactttatagagtttagtaaattgtgccacagagatgttaatttgctatggcaacccagatctgcaaactctgatgctgttcatt

SEQ ID NO: 9329 - DNA, 110 bp, synthetic construct
  source 1..110: mol_type = other DNA
ctttgggtaaaagaaatccaaatgtcagaagtcagcgataagctgagacaactgcagtgcatctccctggttaaataggttacacactatcctgaagtcaaagcctaatt

SEQ ID NO: 9330 - DNA, 110 bp, synthetic construct
  source 1..110: mol_type = other DNA
tttaactgttaagttcgcttctcaaacaacttctcattttatctactctcccttcatgttccctatgatttcagctcccctggaaggccggttacagaagggcttccctg

SEQ ID NO: 9331 - DNA, 110 bp, synthetic construct
  source 1..110: mol_type = other DNA
gaagtcaagtaagcaatcaattgactgaaaaaagggggcaaagaagtcactgttggttattccctgtagagaaataaggtcctaagagggttacggaaaagttcagtaaa

SEQ ID NO: 9332 - DNA, 110 bp, synthetic construct
  source 1..110: mol_type = other DNA
aacacttggcgatatgctgcccttttaaaaatgcattatgtagtccatgtgtgctgttgttgctgtaaggtttatcttatgcctcaagaatccattcacctaatattaga

SEQ ID NO: 9333 - DNA, 110 bp, synthetic construct
  source 1..110: mol_type = other DNA
tgcatctgttaaattcataattgtaaactctaggactattgaccagcaggtcagcctgctcacattaaacagggtaataaaggacgagttctcgcctgttgataggatga

SEQ ID NO: 9334 - DNA, 110 bp, synthetic construct
  source 1..110: mol_type = other DNA
attgggttgtatctgaagatgcctgttggttggctggcacatcattgtaatggcattttatttaaacgtgtttaggcagaaatagctgttctctcttttgttcctttgtt

SEQ ID NO: 9335 - DNA, 110 bp, synthetic construct
  source 1..110: mol_type = other DNA
gttgcaacaaattttcactttgagtttcttaggggcttatctcaaaaagagatagtgaggaaacaaaagagctataatgctcgatcctcaaagagaaaataaaataacgt

SEQ ID NO: 9336 - DNA, 110 bp, synthetic construct
  source 1..110: mol_type = other DNA
tgaggaaacaaaagagctataatgctcgatcctcaaagagaaaataaaataacgtttatgggaccattctgtgtacccggctctgtgctacagagatgcgtttgcataca

SEQ ID NO: 9337 - DNA, 110 bp, synthetic construct
  source 1..110: mol_type = other DNA
ccctaaaaagattaaaagaaaaaagaaagaagaagaagagaggaaggaagaaagctgatttccagagctgccaaatttagtatcaaaatgtccagttttcaacaaaaact

SEQ ID NO: 9338 - DNA, 110 bp, synthetic construct
  source 1..110: mol_type = other DNA
ggaagaaagctgatttccagagctgccaaatttagtatcaaaatgtccagttttcaacaaaaacttatgagacatacaaagaaataagaaaacatggcacatgaaccaga

SEQ ID NO: 9339 - DNA, 110 bp, synthetic construct; identical to SEQ ID NO: 9337
  source 1..110: mol_type = other DNA

SEQ ID NO: 9340 - DNA, 110 bp, synthetic construct
  source 1..110: mol_type = other DNA
aagagaggaaggaagaaagctgatttccagagctgccaaatttagtatcaaaatgtccagttttcaacaaaaacttatgagacatacaaagaaataagaaaacatggcac

SEQ ID NO: 9341 - DNA, 110 bp, synthetic construct
  source 1..110: mol_type = other DNA
tccttacccccttactcacagcatcagaggggaattctctttccgtcaccacatgtgtaaacctactgctccatctgtaaacccattatttctgtatgccatgctgttac

SEQ ID NO: 9342 - DNA, 110 bp, synthetic construct
  source 1..110: mol_type = other DNA
ttaagatccttagaagaaagcttatatagtaaattatacaatttgatcttattcctccatccgctaagacagtggggaaactaaacagttaagtcaaaggcagcgaagtt

SEQ ID NO: 9343 - DNA, 110 bp, synthetic construct
  source 1..110: mol_type = other DNA
ttcctccatccaatccatgtaaaatgtagcttttgcagattagtacagccttgagataaaattggatggctttaaactaacaactgacttctcaggctgatcatggaaag

SEQ ID NO: 9344 - DNA, 110 bp, synthetic construct
  source 1..110: mol_type = other DNA
ataaaattggatggctttaaactaacaactgacttctcaggctgatcatggaaagaggttgtagagttaaacaatcaaaagtaaaacctggtctcaactttatgtgataa

SEQ ID NO: 9345 - DNA, 110 bp, synthetic construct
  source 1..110: mol_type = other DNA
cagatcaaatagctcagatctattgagaatatcacagaacagaatgatgtttgttttcttatgttgtccgtgtagcatcatgaaggagagaaactgataaaatggataaa

SEQ ID NO: 9346 - DNA, 110 bp, synthetic construct
  source 1..110: mol_type = other DNA
ttttcagatttttctctccattgcccttttctaaagacaagtgtttaagtatcggacaagggctctgtttttcttctagagttattttttcaatgaactattatttcctg

SEQ ID NO: 9347 - DNA, 110 bp, synthetic construct
  source 1..110: mol_type = other DNA
ttaaagtctctgattgtatctgcttttcagcatttcgtggcatctccctactccacaaagtagcagagcaaaatttcagagataaggaaatcaaaacactcagctaagtg

SEQ ID NO: 9348 - DNA, 110 bp, synthetic construct
  source 1..110: mol_type = other DNA
atcacacaaccatcccctccaagtgcaccagataattcacttttaacaccccagaacaacatgattttacctgttgctcctggattcggagtgtatggaggtggtggggg

SEQ ID NO: 9349 - DNA, 110 bp, synthetic construct
  source 1..110: mol_type = other DNA
tcacaggccccttaaacgtaaggtgtaaaatggagcttggtattacccccctgaaagctcctttcctcctacccctcctatcatgataaaagacctcactgtccatttcg

SEQ ID NO: 9350 - DNA, 110 bp, synthetic construct
  source 1..110: mol_type = other DNA
agctcctttcctcctacccctcctatcatgataaaagacctcactgtccatttcgcagttggacagtcacccaagactccctctcttttttcttcttcactcccatatcg

SEQ ID NO: 9351 - DNA, 110 bp, synthetic construct
  source 1..110: mol_type = other DNA
gtcaagtgcctgtccaaaatcacacagccagagagtaaataaaatgcgctaggacaggcattatccagttaccaagctaaaattgtttcctccatcctacaagcactttg

SEQ ID NO: 9352 - DNA, 110 bp, synthetic construct
  source 1..110: mol_type = other DNA
ccagtcggtattctcagacacagctacaaacaaacccctgtgctcccaggaagcgcagtgtatgcctgtggctggagttcctcagataaatagagctattaaattttttt

SEQ ID NO: 9353 - DNA, 110 bp, synthetic construct
  source 1..110: mol_type = other DNA
gtcagaggagaagcttttcggtggcagtggatgcttccacctcttgtagaaacggaagtccaaatccactggaaactgagcttccagaccaaaggatcactgatattcct

SEQ ID NO: 9354 - DNA, 110 bp, synthetic construct
  source 1..110: mol_type = other DNA
gtgtctccatcttgggaggggatttttgtttgttttgtgccattgttgtttctccagaaaggccagctgcagcaatgctgttgctgtgtatgggatagtagggatcctgc

SEQ ID NO: 9355 - DNA, 110 bp, synthetic construct
  source 1..110: mol_type = other DNA
ataggttattaaaagatactgaatatagttccctgagctatacagtaagatcctgttgcttatacagttatgtgtatctgttaatcccaaactcctaacttatcctttcc

SEQ ID NO: 9356 - DNA, 110 bp, synthetic construct
  source 1..110: mol_type = other DNA
agagacttttgctcagaacttcaatgaatactttctccaaggtggaagtaaagactccctatttttaaaaacctcactatccggggctgcttattacagtatgtatgtga

SEQ ID NO: 9357 - DNA, 110 bp, synthetic construct
  source 1..110: mol_type = other DNA
tccctatttttaaaaacctcactatccggggctgcttattacagtatgtatgtgatcctttttatattctgtgatccttttatcttgaattggatcttagaaagcagaac

SEQ ID NO: 9358 - DNA, 110 bp, synthetic construct
  source 1..110: mol_type = other DNA
ctttgaggaagcactagaaagaggcattcgttctgagctcaagaaatccaaggtgaaacctccaaaagttaaattctgtgggcctgttttcttatctctaatcaagccca

SEQ ID NO: 9359 - DNA, 110 bp, synthetic construct
  source 1..110: mol_type = other DNA
ttactcaccagtcactactgacagctttgctttcaaatttcctgtaatagagtctcacctgacttaggtcttgctgtttctgtgcaattattgctttaagctaacaaaaa

SEQ ID NO: 9360 - DNA, 110 bp, synthetic construct
  source 1..110: mol_type = other DNA
cacctgacttaggtcttgctgtttctgtgcaattattgctttaagctaacaaaaactgcactgcattaatatttaaaattaaaatcaatgattactctagcacagtgaca

SEQ ID NO: 9361 - DNA, 110 bp, synthetic construct
  source 1..110: mol_type = other DNA
tgaagagctgagttcggttttggccctgtcaggtttgatgtgcctgtgatcatacagtaggagatggctactgggaagataacacagagaatgagggctggaactgaatt

SEQ ID NO: 9362 - DNA, 110 bp, synthetic construct
  source 1..110: mol_type = other DNA
cctgcagaaatcaaatttctctcccataacatttaggcctgagggaggtatcttgtttcctgcatctcgggaatctttgcatcaattggggaaagctcgaatgcgcccaa

SEQ ID NO: 9363 - DNA, 110 bp, synthetic construct
  source 1..110: mol_type = other DNA
ccgacaatcgactgctagattactcgcctttttcctacttgatgatctgtcacgttggacatcctcttcccaccgttcagctgagaggcgagatgggaatttttcacaag

SEQ ID NO: 9364 - DNA, 110 bp, synthetic construct
  source 1..110: mol_type = other DNA
cccatatacaaccctcccttttgtctcagcccattgcagctttgttgttgacagtccccctgcaatctggctgcaactgatccttggagaccctctgtggccaccatagt

SEQ ID NO: 9365 - DNA, 110 bp, synthetic construct
  source 1..110: mol_type = other DNA
cctccacccacgcccacacacactctccatcacatgcaaaaatgtttctgtattattgggatttctttcaggattcgttttaagcatcgccttcactttgaaggctttca

SEQ ID NO: 9366 - DNA, 110 bp, synthetic construct
  source 1..110: mol_type = other DNA
ttgggctgaaaggtggagcagctgtaacacccagtgaacaaccagatcagcgccacaaggatccatcgccctttctgctcacggagggcagagtgtcactgcagtgggtg

SEQ ID NO: 9367 - DNA, 110 bp, synthetic construct
  source 1..110: mol_type = other DNA
taatgagttccacacgttcacgacctgctgtatgaagttgtaattttccaaactgctcggaaacccttgttctcgaacgtgtcaagccaccctgggcctctgcctctggg

SEQ ID NO: 9368 - DNA, 110 bp, synthetic construct
  source 1..110: mol_type = other DNA
gctgaggccagggctaacggaggaaggtcaaagagaggtcaagactacttcaggggccaacagccatatacctgcccagcccagatagtttcatctggctttgtaatcag

SEQ ID NO: 9369 - DNA, 110 bp, synthetic construct
  source 1..110: mol_type = other DNA
gccaacagccatatacctgcccagcccagatagtttcatctggctttgtaatcagaattcagcataaatagaccagagaacagaaacgtgagttaagatctaagacagtc

SEQ ID NO: 9370 - DNA, 110 bp, synthetic construct
  source 1..110: mol_type = other DNA
taaattcacggagggtccccatgttcccaatcttttagctaagtaaaaaaggctgttctgccgctcactttaagaagctatgactagccacaaactcaatgtcaggattc

SEQ ID NO: 9371 - DNA, 110 bp, synthetic construct
  source 1..110: mol_type = other DNA
ttctgccgctcactttaagaagctatgactagccacaaactcaatgtcaggattcgtaaacttttcttcacaacttctaactaaggggaagccttcgaggtaaggaggga

SEQ ID NO: 9372 - DNA, 110 bp, synthetic construct
  source 1..110: mol_type = other DNA
gagatgagggcagcactggtttctggtgccaaccttaaaggggcagcgaaacaagtattttagtgcaacaatttgtcaaaacactatggatgtttgctttacaaccacat

SEQ ID NO: 9373 - DNA, 110 bp, synthetic construct
  source 1..110: mol_type = other DNA
tattttagtgcaacaatttgtcaaaacactatggatgtttgctttacaaccacataaaattatcatgcattgggaaccattgtctccaatcagcccacgatctgggacct

SEQ ID NO: 9374 - DNA, 110 bp, synthetic construct
  source 1..110: mol_type = other DNA
ttctgttcttccatctttgagtttacagaattcactgttgttcattcagaaaacgattcttaccggtgaaagcagctgattaatgtgaaagggaaataggacgcagtgaa

SEQ ID NO: 9375 - DNA, 110 bp, synthetic construct
  source 1..110: mol_type = other DNA
gacccaaatgatttggtgggggggggtgtgtggaaatagggctcctgacacaagccctgcactgtccctgcctcctctcctcatttgcctttgattaatgaccaacttct

SEQ ID NO: 9376 - DNA, 110 bp, synthetic construct
  source 1..110: mol_type = other DNA
cctgcactgtccctgcctcctctcctcatttgcctttgattaatgaccaacttctcccctcaccccccagccatcccttcccagtccaggctgtgatggcagagcctggg

SEQ ID NO: 9377 - DNA, 110 bp, synthetic construct
  source 1..110: mol_type = other DNA
caatcaggcagtttgtgactcctgtgggaaatagatgccgatggctcttcgggcatgggatgggtgccactagcgcggaggctactggcaggagctgggagcttctgtta

SEQ ID NO: 9378 - DNA, 110 bp, synthetic construct
  source 1..110: mol_type = other DNA
tgggatgggtgccactagcgcggaggctactggcaggagctgggagcttctgttactccccaggggtttagtctaccttctctaagatctctgcagccctaagggtgggg

SEQ ID NO: 9379 - DNA, 110 bp, synthetic construct
  source 1..110: mol_type = other DNA
ccagcttctctcatcggggctgcagagaagtgagaagcagagcttctgggatccgaccctctcagtggtaacttctcagcaagatcatgacagaaaaaagagcgcttttt

SEQ ID NO: 9380 - DNA, 110 bp, synthetic construct
  source 1..110: mol_type = other DNA
accctctcagtggtaacttctcagcaagatcatgacagaaaaaagagcgcttttttcttcttacaaaccctgccttacaaagtacaaacagcccatccttcctctgggaa

SEQ ID NO: 9381 - DNA, 110 bp, synthetic construct
  source 1..110: mol_type = other DNA
cttctcccacctaattcctgcctcttgagtcccttctttcaccctccttgactttcacacatcatggcttttagatactctcaaacaactggtggctgggtcaggagctc

SEQ ID NO: 9382 - DNA, 110 bp, synthetic construct
  source 1..110: mol_type = other DNA
cacacatcatggcttttagatactctcaaacaactggtggctgggtcaggagctccttccatgtgatgtaggtgtgggtttgagacctcacatgggggctgaatctggag

SEQ ID NO: 9383 - DNA, 110 bp, synthetic construct
  source 1..110: mol_type = other DNA
aacgcaggcaaaggtcctgcagcaaagttctggagagatgggcatggccttagttaggttagagatggagaaacatgggcttatttgacatatattttggaagtagaatt

SEQ ID NO: 9384 - DNA, 110 bp, synthetic construct
  source 1..110: mol_type = other DNA
aggttagagatggagaaacatgggcttatttgacatatattttggaagtagaatttgagctcatggcatctacaaaatgaatttctaggtaaaagacatagagcgaaatt

SEQ ID NO: 9385 - DNA, 110 bp, synthetic construct
  source 1..110: mol_type = other DNA
agaggacaccagcacacggtaggctgtataacagtcaaagaaccctgagctcagggaacccaaatcttttatactggactacaagcatgcctgcctttgactgcagagag

SEQ ID NO: 9386 - DNA, 110 bp, synthetic construct
  source 1..110: mol_type = other DNA
gtccgaaggtccgttctgcgggtttttcccagagcagagagggcctcaggcctgatcttcaccctgaactcctttcaggcatgctgcaggtcagtgactgaagtgactgg

SEQ ID NO: 9387 - DNA, 110 bp, synthetic construct
  source 1..110: mol_type = other DNA
tcttcaccctgaactcctttcaggcatgctgcaggtcagtgactgaagtgactggtgacttactccttgtagaggcagatggcaaatgaccatttttagtgggcagagtt

SEQ ID NO: 9388 - DNA, 110 bp, synthetic construct; identical to SEQ ID NO: 9386
  source 1..110: mol_type = other DNA

SEQ ID NO: 9389 - DNA, 110 bp, synthetic construct
  source 1..110: mol_type = other DNA
ctgcgggtttttcccagagcagagagggcctcaggcctgatcttcaccctgaactcctttcaggcatgctgcaggtcagtgactgaagtgactggtgacttactccttgt

SEQ ID NO: 9390 - DNA, 110 bp, synthetic construct
  source 1..110: mol_type = other DNA
ccaaaggttaccagggggcctatgacttctgccaaagcatactaccttattcatttgaaaacaaagtgtgaaaactcagctgtgtaaaactggccagctgacactttatt

SEQ ID NO: 9391 - DNA, 110 bp, synthetic construct
  source 1..110: mol_type = other DNA
tgaaaacaaagtgtgaaaactcagctgtgtaaaactggccagctgacactttattaaaactccatccaaaactaacaatctacagtgtcatttttggaaaatgccattca

SEQ ID NO: 9392 - DNA, 110 bp, synthetic construct
  source 1..110: mol_type = other DNA
gccaccatactgggatcagtgtctggtggcatctccacctagtctgaagacagtgagaccagagccgtgaaagctgtgtgagtgcagggacggtgtcttaattcacttac

SEQ ID NO: 9393 - DNA, 110 bp, synthetic construct
  source 1..110: mol_type = other DNA
agaccagagccgtgaaagctgtgtgagtgcagggacggtgtcttaattcacttactgttgtgtcctaggtgcctgtcatcataaatgctcaacagcaattgtaagatgct

SEQ ID NO: 9394 - DNA, 110 bp, synthetic construct
  source 1..110: mol_type = other DNA
tgcaaaagattttccttaccctcaggataaatccaggctctttgcagactctaagtgccttacagatcggatggcctctgcccacgccagagctgctagcccgtctccat

SEQ ID NO: 9395 - DNA, 110 bp, synthetic construct
  source 1..110: mol_type = other DNA
tgccttacagatcggatggcctctgcccacgccagagctgctagcccgtctccatcagcaaatagtcctcccttggcttggggcgcctgccttcctcccttcgccagagc

SEQ ID NO: 9396 - DNA, 110 bp, synthetic construct
  source 1..110: mol_type = other DNA
agctttatttaattattcataaatagggcaggctcccatcttatcataaagaaaggagctctgaggagctgtacaagatggaaaataggagttcctgtcataactcagtg

SEQ ID NO: 9397 - DNA, 110 bp, synthetic construct
  source 1..110: mol_type = other DNA
gggcaggctcccatcttatcataaagaaaggagctctgaggagctgtacaagatggaaaataggagttcctgtcataactcagtggttaacgaatctgactagcatccat

SEQ ID NO: 9398 - DNA, 110 bp, synthetic construct
  source 1..110: mol_type = other DNA
gagtctaacatgacgggttccacgatcctactcctgttggcccagagcaccttagaagtggtccttgctgtccctgggctaagctgaacttggcaatcaggtggttactt

SEQ ID NO: 9399 - DNA, 110 bp, synthetic construct
  source 1..110: mol_type = other DNA
aagtctcagtggcctcagtgtttccaagttcaagggccaatttttagtccttgttttcctggagcccccagtcccttcaccaagagactcacaaagagataatcactgtg

SEQ ID NO: 9400 - DNA, 110 bp, synthetic construct
  source 1..110: mol_type = other DNA
ttctcacaactgccctgatccccggcttggagaaagagcacgaccccagagtggtgagttgactttatggatgtttttaagtgaaggactttgttcccggagttcccttc

SEQ ID NO: 9401 - DNA, 110 bp, synthetic construct
  source 1..110: mol_type = other DNA
gagcacgaccccagagtggtgagttgactttatggatgtttttaagtgaaggactttgttcccggagttcccttcgtggcgcagtggttaacgaccccgactaggaacca

SEQ ID NO: 9402 - DNA, 110 bp, synthetic construct
  source 1..110: mol_type = other DNA
ccctgaccacgcccgcacctgctctgggctcttggtgttcggggtccgcgtcagagctcgtcggggcccagcagactcccagcgccatctccttccataaacccgcccct

SEQ ID NO: 9403 - DNA, 110 bp, synthetic construct
  source 1..110: mol_type = other DNA
gctcgtcggggcccagcagactcccagcgccatctccttccataaacccgcccctgaaaacctgagctgacagtgcccagccctgacgcgccaacgcccacccactgtga

SEQ ID NO: 9404 - DNA, 110 bp, synthetic construct
  source 1..110: mol_type = other DNA
ctcaaaatcaaccagttcacaggagctattagggtcactatttttttctttagccaccctgcggcatatggagttctctggccagggattagatctgagccacatttgca

SEQ ID NO: 9405 - DNA, 110 bp, synthetic construct
  source 1..110: mol_type = other DNA
gtattggagaagaaaaaaagcatgacggtgctgaaatgtacacacagaacccgacgcagcgctgcactgcccagcttgccacctcctgtttgcctctccccctgcctttt

SEQ ID NO: 9406 - DNA, 110 bp, synthetic construct
  source 1..110: mol_type = other DNA
ggccaaacatcttaacacacacctccccaaagaaaatctaaaggtggcaaataagcacatgaaaagatcctttggagttcccgttgcggcgcagtggttaacgaatctga

SEQ ID NO: 9407 - DNA, 110 bp, synthetic construct
  source 1..110: mol_type = other DNA
cacacacctccccaaagaaaatctaaaggtggcaaataagcacatgaaaagatcctttggagttcccgttgcggcgcagtggttaacgaatctgactaggcaccatgagg

SEQ ID NO: 9408 - DNA, 110 bp, synthetic construct
  source 1..110: mol_type = other DNA
aacctattgaacatcaaggtttagcctagcctactttgcacctgctcagaacacttgtgttagcttacagttaggcaaaatcatctaatacaaagcctattttataataa

SEQ ID NO: 9409 - DNA, 110 bp, synthetic construct
  source 1..110: mol_type = other DNA
tcagaacacttgtgttagcttacagttaggcaaaatcatctaatacaaagcctattttataataaaggtggaatatgtcatgtaatttattgaatgttgtcctaagagcg

SEQ ID NO: 9410 - DNA, 110 bp, synthetic construct
  source 1..110: mol_type = other DNA
agtcccatacaaacctttctggatttcctttccaaaataggatctttctatcccttaagtctctaaaaacactttcagcagtctttatcttaccctggtctttcaagtat

SEQ ID NO: 9411 - DNA, 110 bp, synthetic construct
  source 1..110: mol_type = other DNA
ctagtcagatttgtttctgctaagccacgacaggaactccgacgtttgtaatttaatcctctattttccttttccccgttgccatcttccactagagaacacttaagttc

SEQ ID NO: 9412 - DNA, 110 bp, synthetic construct
  source 1..110: mol_type = other DNA
atcctctattttccttttccccgttgccatcttccactagagaacacttaagttcttgtctataaagctcacaaaatgtttgaggttgaaggtgatcctgctgtgctctt

SEQ ID NO: 9413 - DNA, 110 bp, synthetic construct
  source 1..110: mol_type = other DNA
ttaagtgttactattattaaagatatggtttatctgtaggaattagatgttcacagtgctataagctatgacttgcttcagtatactatgttgttactggtatggtggtt

SEQ ID NO: 9414 - DNA, 110 bp, synthetic construct; identical to SEQ ID NO: 9413
  source 1..110: mol_type = other DNA

SEQ ID NO: 9415 - DNA, 110 bp, synthetic construct; identical to SEQ ID NO: 9413
  source 1..110: mol_type = other DNA

SEQ ID NO: 9416 - DNA, 110 bp, synthetic construct; identical to SEQ ID NO: 9413
  source 1..110: mol_type = other DNA

SEQ ID NO: 9417 - DNA, 110 bp, synthetic construct
  source 1..110: mol_type = other DNA
aaggctgtgaccatttctgctgtacaacaaagggaccccgtcatacacaatccgttttcattttatggtcagattgcccgttaaagtaaatgggcaccttcccttctttc

SEQ ID NO: 9418 - DNA, 110 bp, synthetic construct
  source 1..110: mol_type = other DNA
agatttagtttctgtagagcatcttaggttcacagccacattgagcagaaagcccagggaatttgcatttgcccccatgcctccccatacagcgtcctctggccttgagg

SEQ ID NO: 9419 - DNA, 110 bp, synthetic construct
  source 1..110: mol_type = other DNA
agggaatttgcatttgcccccatgcctccccatacagcgtcctctggccttgagggagcccagcctctcccctgtgctggggaggagtagtggttcttcctgtcacgaca

SEQ ID NO: 9420 - DNA, 110 bp, synthetic construct
  source 1..110: mol_type = other DNA
ctttctctaaggaacagaggagcattacatcagcgaatgtgccaaaggcaaccggccagggaggtctgattatgggcctgaaatcaccacaaagctgaaatgcaggaagt

SEQ ID NO: 9421 - DNA, 110 bp, synthetic construct
  source 1..110: mol_type = other DNA
ccagggaggtctgattatgggcctgaaatcaccacaaagctgaaatgcaggaagtgacccatgagctttgagcacaggcagtttgcaatggaagaagtaagcggtctgtt

SEQ ID NO: 9422 - DNA, 110 bp, synthetic construct
  source 1..110: mol_type = other DNA
atgtgaataattaattgtcatgaaaagcctctctgcctccctgaagaagcagaaacgccaggactgtaggatatgctgttatcagatccattacacggcttcccaaaggc

SEQ ID NO: 9423 - DNA, 110 bp, synthetic construct
  source 1..110: mol_type = other DNA
gggaggctttgggggcctggaaatgttctctgcccagatctagacatttgcacacataacttacgagctgtccgctgaccattgcgccctttaccgaacctgtgctccac

SEQ ID NO: 9424 - DNA, 110 bp, synthetic construct
  source 1..110: mol_type = other DNA
ataacttacgagctgtccgctgaccattgcgccctttaccgaacctgtgctccacctcccgttccggagaatttaaatcttaatcgtacagaaggctggaagcagtaaac

SEQ ID NO: 9425 - DNA, 110 bp, synthetic construct
  source 1..110: mol_type = other DNA
taaatgagtgctttttagtggcttcagctcatgggcaatgaaatctatcacagctggtcaattaagaaattaagtacttttctttgatattatatcaatttcttgtaaag

SEQ ID NO: 9426 - DNA, 110 bp, synthetic construct
  source 1..110: mol_type = other DNA
agctcatgggcaatgaaatctatcacagctggtcaattaagaaattaagtacttttctttgatattatatcaatttcttgtaaagaaaaatgtgtaaccctggacacctt

SEQ ID NO: 9427 - DNA, 110 bp, synthetic construct
  source 1..110: mol_type = other DNA
atcgcacctggaacaggaaaccaggaaacgcacccccaccgggatctctgggccacagttttcaaacagacagctcccctctccacgggctgagaaacccttgggtcata

SEQ ID NO: 9428 - DNA, 110 bp, synthetic construct
  source 1..110: mol_type = other DNA
cagttttcaaacagacagctcccctctccacgggctgagaaacccttgggtcatatactgaggttgcctccttttgtgtagaatgcagttcaggaagcagtttttcaccg

SEQ ID NO: 9429 - DNA, 110 bp, synthetic construct
  source 1..110: mol_type = other DNA
actccgtgtgacttagaaaactcatggaatcctaaattaatggagggggaagctgtatcaaggtgttggttttaaaaagtgaactttatcttctgctagacaagcattca

SEQ ID NO: 9430 - DNA, 110 bp, synthetic construct
  source 1..110: mol_type = other DNA
tatcaaggtgttggttttaaaaagtgaactttatcttctgctagacaagcattcaactacaaatcccagaggaagccccaaacccagatggaaagaccacacccaaatct

SEQ ID NO: 9431 - DNA, 110 bp, synthetic construct
  source 1..110: mol_type = other DNA
ttcatgtgccacccaaaactgtcagtctccaaagctccatggcaaatgtccctgacgcggggccgggcgcgcacgctctgctcggcgagctcattgtctggctgtcagcg

SEQ ID NO: 9432 - DNA, 110 bp, synthetic construct
  source 1..110: mol_type = other DNA
cgcggggccgggcgcgcacgctctgctcggcgagctcattgtctggctgtcagcgtttcaatgcgggccctgttttcacagcgagacacactcaattggcccagcagctc

SEQ ID NO: 9433 - DNA, 110 bp, synthetic construct
  source 1..110: mol_type = other DNA
acacccagtttatgttgcaggagaatttaagacctgcacgattctcttcagcgatgtggtgacattcaccaccatctgtgccgcctgcgaacctatccagatagtgaata

SEQ ID NO: 9434 - DNA, 110 bp, synthetic construct
  source 1..110: mol_type = other DNA
gtggtgacattcaccaccatctgtgccgcctgcgaacctatccagatagtgaatatgctaaattcaatgtactccaagtttgacaggctaaccagcgtccacgacgtcta

SEQ ID NO: 9435 - DNA, 110 bp, synthetic construct
  source 1..110: mol_type = other DNA
gctattttaggggaatttagatttacgataggctcaatctggcccctttatgcggatagaagtttcgtctcctataaatgataccccttctcctcacagtgcagctggct

SEQ ID NO: 9436 - DNA, 110 bp, synthetic construct
  source 1..110: mol_type = other DNA
accgataaaaacaagaaattccagaatgacacccagttctatgcaatgattacgtatctaacatgttcctaaatgggctttttttcctcctatatccgtggcatgcctgc

SEQ ID NO: 9437 - DNA, 110 bp, synthetic construct
  source 1..110: mol_type = other DNA
ataagccaaaaaacaggtgcttccaaagggcttcaagtgggtgtttgattaacatctcatagcccatggcagctccagggcatgtttggaaattctctatgtccaaggtg

SEQ ID NO: 9438 - DNA, 110 bp, synthetic construct
  source 1..110: mol_type = other DNA
ttgaaccttaaaatcaagtttcttccatctacaaaggaaaaaagaagccttcctatagctgctcaccagtcttcccactacacggggatgctgtcttcctaatctagcct

SEQ ID NO: 9439 - DNA, 110 bp, synthetic construct
  source 1..110: mol_type = other DNA
tagctgctcaccagtcttcccactacacggggatgctgtcttcctaatctagcctccaccttgcagcctttgtgatcctttcaaactagaccatgatccccctcccagcc

SEQ ID NO: 9440 - DNA, 110 bp, synthetic construct
  source 1..110: mol_type = other DNA
agagcctgaaacactgctggaacagcattactgtcatccggtttgcccaatacagagtatgacttgaagtaacaccctttatttatgcagttactaggggctaacactac

SEQ ID NO: 9441 - DNA, 110 bp, synthetic construct
  source 1..110: mol_type = other DNA
ttagttgtccagaacgtgggctgatgagctgataaaaaaagaaatgcagtagctgaagtagccaagagtatatgaaatgagactggcccagtccaaaaaaaggcttgtta

SEQ ID NO: 9442 - DNA, 110 bp, synthetic construct
  source 1..110: mol_type = other DNA
aagtagccaagagtatatgaaatgagactggcccagtccaaaaaaaggcttgttaaaaaaagaaaagaaagtaaaaacagatcagattgggaaaactgggacaagctgct

SEQ ID NO: 9443 - DNA, 110 bp, synthetic construct
  source 1..110: mol_type = other DNA
ctgaagttttcttgctactgcctgacacatttcttttactgttgttccaggagtatttcaacggaaagatggggaagcatgattcacttcattttaagctattaataact

SEQ ID NO: 9444 - DNA, 110 bp, synthetic construct
  source 1..110: mol_type = other DNA
tttcaacggaaagatggggaagcatgattcacttcattttaagctattaataacttaggagaaggaggttaacctatagttccctggttatgtgtaattttttttaattg

SEQ ID NO: 9445 - DNA, 110 bp, synthetic construct
  source 1..110: mol_type = other DNA
tggcggcctctttatatgtctagtaagtggctggcccttttcatgctcctcagctctggccagtcccagccacctgggatcaggtatccacttctataccaaacagccat

SEQ ID NO: 9446 - DNA, 110 bp, synthetic construct
  source 1..110: mol_type = other DNA
tcctcctatttaatgataaaattactgactagaagcaaaatacagaagagcacatgtgtactccaggtctcagtttgcattcttgggaggttgcgttaagtaggtcaaca

SEQ ID NO: 9447 - DNA, 110 bp, synthetic construct
  source 1..110: mol_type = other DNA
acaacaaaattacaaccatacaattcatcacattgaaactattctactatgccttcatttatctaacaatggtctattacctctatgtactacacactgaactagaaagc

SEQ ID NO: 9448 - DNA, 110 bp, synthetic construct
  source 1..110: mol_type = other DNA
catttatctaacaatggtctattacctctatgtactacacactgaactagaaagctaggtaaaagctcgacatctctgcaagctcttccaagagttctgtctgactcttt

SEQ ID NO: 9449 - DNA, 110 bp, synthetic construct
  source 1..110: mol_type = other DNA
aagacaaagataaaaatgtataagttttgtgttttagcttatttcacattctgatccatagcccaaccagatttcctaatgaaaatttccctcagttggtacctcaaata

SEQ ID NO: 9450 - DNA, 110 bp, synthetic construct
  source 1..110: mol_type = other DNA
tcaaccagacccagatcattgatctttacctgttaagagttaaaattaacttaaattgggactactgacttctgcagagctattataaaccagaaatgtctggtttcttt

SEQ ID NO: 9451 - DNA, 110 bp, synthetic construct
  source 1..110: mol_type = other DNA
ttgggactactgacttctgcagagctattataaaccagaaatgtctggtttcttttctccaaaataaatgtaaacaggtttggagttcccgctgtggcacagcagaaatg

SEQ ID NO: 9452 - DNA, 110 bp, synthetic construct
  source 1..110: mol_type = other DNA
agatgacgaaaggcatttcttaatatcccatggcacaagtcaaagccggaaagtttaaacgacttttctcaaggcaagtgcaaggtttcctgaccttgctgggtcacaga

SEQ ID NO: 9453 - DNA, 110 bp, synthetic construct
  source 1..110: mol_type = other DNA
aggagtgcactttactcccttggtcggcttcccttccatggcagatcccaatcctgaagtagctcttttattcctgactctaagcagctggatgtgactggagaaaagtc

SEQ ID NO: 9454 - DNA, 110 bp, synthetic construct
  source 1..110: mol_type = other DNA
ctctgtcctggcctgctcagtaggagatcagtatagtttcaaggaagctgggaaggctgttatgaccctctagagtcttttcgtattcattgtttactacctaagatcct

SEQ ID NO: 9455 - DNA, 110 bp, synthetic construct
  source 1..110: mol_type = other DNA
gctgttatgaccctctagagtcttttcgtattcattgtttactacctaagatcctactttcagtagggtttttttttttttttttttccccaaaaagctttgactcctgt

SEQ ID NO: 9456 - DNA, 110 bp, synthetic construct
  source 1..110: mol_type = other DNA
acaaaaagtaaatttgttgcatagtactggggtgggagttgagtagaatggggtggtgactgctaaaagataggtttcttttcgtagtgatgaaaatactctcaaattga

SEQ ID NO: 9457 - DNA, 110 bp, synthetic construct
  source 1..110: mol_type = other DNA
gtgactgctaaaagataggtttcttttcgtagtgatgaaaatactctcaaattgactttggtaatggttgtacagctctgtgaatatactaaaaaccattgatttgtaca

SEQ ID NO: 9458 - DNA, 110 bp, synthetic construct
  source 1..110: mol_type = other DNA
tttatctcatccatattcttcgctgagtttcagattcatatagccaattgcccttgagtccttagacatagcctctgagaacgccttcaagcattccgttgtcatttcaa

SEQ ID NO: 9459 - DNA, 110 bp, synthetic construct
  source 1..110: mol_type = other DNA
gagtccttagacatagcctctgagaacgccttcaagcattccgttgtcatttcaaccaggcagaaatggagcatatcttctcccacaagcctgctcctcttctcatcccc

SEQ ID NO: 9460 - DNA, 110 bp, synthetic construct
  source 1..110: mol_type = other DNA
atacctatcatatttgttgaattttgaataagcagggccaagtaagtttgaagaatattatattagcatattaaactcgttagaagtcctgcagcaaaggaaataggtta

SEQ ID NO: 9461 - DNA, 110 bp, synthetic construct; identical to SEQ ID NO: 9460
  source 1..110: mol_type = other DNA

SEQ ID NO: 9462 - DNA, 110 bp, synthetic construct
  source 1..110: mol_type = other DNA
cctgctcaagtaaacatagcatctaaggagtgcattcacattaagttaggaccaactaaacacccctagaatgggagagtttttatggccagggattcctcctgggggca

SEQ ID NO: 9463 - DNA, 110 bp, synthetic construct
  source 1..110: mol_type = other DNA
ctaaacacccctagaatgggagagtttttatggccagggattcctcctgggggcacatgagattaggaagccaaggaatctaagcattctaatatgcaatttcacacaac

SEQ ID NO: 9464 - DNA, 110 bp, synthetic construct
  source 1..110: mol_type = other DNA
ctgggaggccttcccagggcacagctgcagggccacgtctgtacctttgctgcccaggctttcagctccaggcttggctgcctggactattttgaaatccatcgaatggc

SEQ ID NO: 9465 - DNA, 110 bp, synthetic construct
  source 1..110: mol_type = other DNA
aggctttcagctccaggcttggctgcctggactattttgaaatccatcgaatggccttagtggaaaaaaacaatgccctttgttggcccactattatcactgtcatcttt

SEQ ID NO: 9466 - DNA, 110 bp, synthetic construct
  source 1..110: mol_type = other DNA
gactcattccaagtacttttcacaatatcctgaaatacagtaggtgcttaatcgttgttaatgagcctcagcttcctcatgtataaaactagaattaatgacttgcccag

SEQ ID NO: 9467 - DNA, 110 bp, synthetic construct
  source 1..110: mol_type = other DNA
agactccacatttaagtgataccatatttttccttctcttccttccattgtaggtattaccacatcttgtttttaatccatttatctgtcgatggacatttaggttgttt

SEQ ID NO: 9468 - DNA, 110 bp, synthetic construct; identical to SEQ ID NO: 9467
  source 1..110: mol_type = other DNA

SEQ ID NO: 9469 - DNA, 110 bp, synthetic construct
  source 1..110: mol_type = other DNA
accataaaatacagtaaacattgaacattgtccaacagttagttttttcctccagcactgaaagaaattaagctcggccatatgtggatgggttatatttagagacaatg

SEQ ID NO: 9470 - DNA, 110 bp, synthetic construct
  source 1..110: mol_type = other DNA
gcttgacggggattctggtgcctgaagaatgatcccttgggttccagagagctattccaattatctttgtcttgaaaaccccctcactgacagagaaggttgactgatgg

SEQ ID NO: 9471 - DNA, 110 bp, synthetic construct
  source 1..110: mol_type = other DNA
tatatattccatataatttatcggctacccagctgagacttgtgatattattttccgaagagggtcagagacgttgcgatttaaacccagatctatgtgattccaaagcc

SEQ ID NO: 9472 - DNA, 110 bp, synthetic construct; identical to SEQ ID NO: 9471
  source 1..110: mol_type = other DNA

SEQ ID NO: 9473 - DNA, 110 bp, synthetic construct
  source 1..110: mol_type = other DNA
gtagaactgagacgtggtggtccagccatggatgggctgctacagggcagtgaatgttacagagctgctgctccctgcagtgcaaggatgaacctcacatacagagttga

SEQ ID NO: 9474 - DNA, 110 bp, synthetic construct
  source 1..110: mol_type = other DNA
gatcgtgtcattcctcggcttaaagccctctatggctcctcactgcacctcagaatggttcccaaggcccctcttggttccattctctgctgccaacctcctactccttg

SEQ ID NO: 9475 - DNA, 110 bp, synthetic construct
  source 1..110: mol_type = other DNA
tggttcccaaggcccctcttggttccattctctgctgccaacctcctactccttgcctgctgatgctacaaccacatgcagtttctcagtttctcatcccccccaacacc

SEQ ID NO: 9476 - DNA, 110 bp, synthetic construct
  source 1..110: mol_type = other DNA
cccctcacctgcttcaaatgctcacttccttactttaaccacctgaagctccccggagccatcctaatcgctcccaggaaagtgctctcaaccctcgtgctcttttctct

SEQ ID NO: 9477 - DNA, 110 bp, synthetic construct
  source 1..110: mol_type = other DNA
gtggctaaaaggaccagctccaaggccattcaaggcttgaattcgtattctaagtgccacatttaaaaaaaaaagaaaaaagtagtttagtttgtgattattctgcttaa

SEQ ID NO: 9478 - DNA, 110 bp, synthetic construct
  source 1..110: mol_type = other DNA
gccacatttaaaaaaaaaagaaaaaagtagtttagtttgtgattattctgcttaaagtgtgtctctggtctaggcaaaagtcagcatttttatttctgcgtacctgtatg

SEQ ID NO: 9479 - DNA, 110 bp, synthetic construct
  source 1..110: mol_type = other DNA
ctcaggatctgattctccttgctggactccattctctatctcccatgtagacaacatcctcgtgacctcatttgggctctgactcttcaagccaaatcaccgctctcata

SEQ ID NO: 9480 - DNA, 110 bp, synthetic construct
  source 1..110: mol_type = other DNA
atcctcgtgacctcatttgggctctgactcttcaagccaaatcaccgctctcatagctccaggactcagacttgatgactgcctccaccaaatggacactttcatcgccc

SEQ ID NO: 9481 - DNA, 110 bp, synthetic construct
  source 1..110: mol_type = other DNA
caaacccatccccatggttcctagtcggattcgtttccgctgcgccaggacaggaactctgtaatgttgttttctaagatgatagtaccactgttgatgttcagttcctc

SEQ ID NO: 9482 - DNA, 110 bp, synthetic construct; identical to SEQ ID NO: 9481
  source 1..110: mol_type = other DNA

SEQ ID NO: 9483 - DNA, 110 bp, synthetic construct
  source 1..110: mol_type = other DNA
gtttaaatttattctatgaatttagagggtttttttttttttttcgcttttttaaggccacacctgcagcatatgggattcagtcggagctgcagctgctggcctacatc

SEQ ID NO: 9484 - DNA, 110 bp, synthetic construct
  source 1..110: mol_type = other DNA
atgaatttagagggtttttttttttttttcgcttttttaaggccacacctgcagcatatgggattcagtcggagctgcagctgctggcctacatcacagctacagcaaca

SEQ ID NO: 9485 - DNA, 110 bp, synthetic construct
  source 1..110: mol_type = other DNA
ggaaagtggtggtagaagaggatggagccaggaggaagacaaatatgcagattacattttgtaaaagtctgtgtgtttacagaggtgagttatgcagttgggttaaaaac

SEQ ID NO: 9486 - DNA, 110 bp, synthetic construct
  source 1..110: mol_type = other DNA
tattatatatttggtcctaaattgttcgactcctaggctatacatctgtgccaccttctcggactccttggcaatgtggctgagcccgtggccgcctctgaagaggaggc

SEQ ID NO: 9487 - DNA, 110 bp, synthetic construct
  source 1..110: mol_type = other DNA
ttctcggactccttggcaatgtggctgagcccgtggccgcctctgaagaggaggcaaagcctgcagcttgcccttgctctctccccacacttaggtctgtggacgctcca

SEQ ID NO: 9488 - DNA, 110 bp, synthetic construct
  source 1..110: mol_type = other DNA
gaccttgcctgtggtatgtggatgttccctggccagggattgaatccatggcacagcagcgacctgagctgcagcagtgacagcaccagatccttagtctgctgagccac

SEQ ID NO: 9489 - DNA, 110 bp, synthetic construct
  source 1..110: mol_type = other DNA
gcagcgacctgagctgcagcagtgacagcaccagatccttagtctgctgagccacaaaggacctccagattgggtgttctcttttttctttcttttttttaacttctttt

SEQ ID NO: 9490 - DNA, 110 bp, synthetic construct
  source 1..110: mol_type = other DNA
tggtcaaaactagttagaataaaaacttttttggcatttaaagaagtaaggttaggacactggggagattcattcccgaggaacgtgctcgcagattggccatttacttc

SEQ ID NO: 9491 - DNA, 110 bp, synthetic construct
  source 1..110: mol_type = other DNA
gacactggggagattcattcccgaggaacgtgctcgcagattggccatttacttcctccgtcaggctgcagagagggccagcctggcatggaagggagcaggcctccagc

SEQ ID NO: 9492 - DNA, 110 bp, synthetic construct
  source 1..110: mol_type = other DNA
agaaaaagcatgaactaatggtttttgactttgaaaatcccaattcctgtttcaaacaatgtgtgctctccctgtgatgcccccctcccatccccagtaagtggctacac

SEQ ID NO: 9493 - DNA, 110 bp, synthetic construct
  source 1..110: mol_type = other DNA
attatatttttcttgagctaatattaagtttttaccactttgcctttctcaacagatgccagagaaagatgggggaggtgaagcagatatgagcaaagcagtcaaggtaa

SEQ ID NO: 9494 - DNA, 110 bp, synthetic construct; identical to SEQ ID NO: 9493
  source 1..110: mol_type = other DNA

SEQ ID NO: 9495 - DNA, 110 bp, synthetic construct
  source 1..110: mol_type = other DNA
cctgaggtaatattatatttctataaatttcctctcagaactgcttttgctgcatccctagctttggattgttatgttttcattttcctttgcctctcattatttttcga

SEQ ID NO: 9496 - DNA, 110 bp, synthetic construct; identical to SEQ ID NO: 9495
  source 1..110: mol_type = other DNA

SEQ ID NO: 9497 - DNA, 110 bp, synthetic construct
  source 1..110: mol_type = other DNA
tggaaaacttatggaaccccccccccaccttgttttttttttcctccctacatatgggcttctagatattagagctacagttgtaggtaaaaccagccaggatgatgccg

SEQ ID NO: 9498 - DNA, 110 bp, synthetic construct
  source 1..110: mol_type = other DNA
gggcttctagatattagagctacagttgtaggtaaaaccagccaggatgatgccgggatgggtgaccaagcagtaggcaagccaggtaaggcagtttctcatggtgacaa

SEQ ID NO: 9499 - DNA, 110 bp, synthetic construct
  source 1..110: mol_type = other DNA
gtcttattcaaaattctattccctacagcttccatataacgtcttgcattacatgatgctcagatctatttgcaggttgaatggacaatacaaacagatattctacttac

SEQ ID NO: 9500 - DNA, 110 bp, synthetic construct
  source 1..110: mol_type = other DNA
aactcctcagaatattttttttgagtctccccttgtctaaacagtcttccttcgactttttcataagctaccacacagttgccatttctttacgatctcgtttcttgaaa

SEQ ID NO: 9501 - DNA, 110 bp, synthetic construct
  source 1..110: mol_type = other DNA
aaaataaaggggaacgtcccaaacttgataaagactatctacaaaaaacatacagctaacagcatacttgatgatgagaaacccaaagctttcccactaacaacgggtac

SEQ ID NO: 9502 - DNA, 110 bp, synthetic construct
  source 1..110: mol_type = other DNA
ctaacagcatacttgatgatgagaaacccaaagctttcccactaacaacgggtacaaggcacggatgttgcctctcaccactccttctcaacactgtactggaagtcctt

SEQ ID NO: 9503 - DNA, 110 bp, synthetic construct
  source 1..110: mol_type = other DNA
gccgccatcttggattgcagcctcctgctggttcctgcgcaaagcagcccggctgagctgccactgcagccgttttccaggaggaactctggtctgaagggccaggtggg

SEQ ID NO: 9504 - DNA, 110 bp, synthetic construct; identical to SEQ ID NO: 9503
  source 1..110: mol_type = other DNA

SEQ ID NO: 9505 - DNA, 110 bp, synthetic construct
  source 1..110: mol_type = other DNA
cacaaattgcattgctaatatgtttgccccttgaggaggaaaagaagaggaatgaaccagaagagaacgtagggagaaaaaagacaggatatgggagaggccgtggattc

SEQ ID NO: 9506 - DNA, 110 bp, synthetic construct
  source 1..110: mol_type = other DNA
accagaagagaacgtagggagaaaaaagacaggatatgggagaggccgtggattcagggcaggaaagtgaccgtgttgtctctggataaactcccctttgaagtgtccac

SEQ ID NO: 9507 - DNA, 110 bp, synthetic construct
  source 1..110: mol_type = other DNA
aaggaagttattactgcttctgcacaggtaggaaaactcaggagggcacaccagatgttttgcttaaaagttacagtttgaagaaaaactaaacactaaaactaacattt

SEQ ID NO: 9508 - DNA, 110 bp, synthetic construct
  source 1..110: mol_type = other DNA
tgttttgcttaaaagttacagtttgaagaaaaactaaacactaaaactaacatttactgagtacttgctctgttcactaggcccttgatatgtactaactcattcgatcc

SEQ ID NO: 9509 - DNA, 110 bp, synthetic construct
  source 1..110: mol_type = other DNA
tctcaatttcttttgtgttctctagccacactttatttctactgacagaggtttcaagtgcgcatcacactcatccatttcctttccctactacagctctcgtaatggga

SEQ ID NO: 9510 - DNA, 110 bp, synthetic construct
  source 1..110: mol_type = other DNA
aagtgcgcatcacactcatccatttcctttccctactacagctctcgtaatgggaaatcattcccactgctaacaaatatatttcaggaatctgctatctgcgagggatg

SEQ ID NO: 9511 - DNA, 110 bp, synthetic construct
  source 1..110: mol_type = other DNA
ttgcctggctttgtagcccatgctctccaccgctacattactctggtttgatgaccactgaatgaatgagtaaatgaatggcggagtgtctggtttatcccgatacactg

SEQ ID NO: 9512 - DNA, 110 bp, synthetic construct
  source 1..110: mol_type = other DNA
cactgaatgaatgagtaaatgaatggcggagtgtctggtttatcccgatacactgccaaaaatgggatacctacacctggccagcaatcttgcaaatgcgtacctcaact

SEQ ID NO: 9513 - DNA, 110 bp, synthetic construct
  source 1..110: mol_type = other DNA
gggcagagggagctagggagctctgtgggagcccttttgtaaaagcattaatcccattcatgagggctccccattcatgatctaagcagctcccaaaggccctacttcct

SEQ ID NO: 9514 - DNA, 110 bp, synthetic construct
  source 1..110: mol_type = other DNA
gtccatatgccccaggtgcagccataaaataaaaaataaaaaataaaaaataaaaaaaaaataaaaagagagagagaggcctatttactgtgtgtcaggaagtgtgtgag

SEQ ID NO: 9515 - DNA, 110 bp, synthetic construct
  source 1..110: mol_type = other DNA
aaaaaataaaaagagagagagaggcctatttactgtgtgtcaggaagtgtgtgaggcaggcagtagaaacctactctggttaattgaagcagactggaaattgttgagaa

SEQ ID NO: 9516 - DNA, 110 bp, synthetic construct
  source 1..110: mol_type = other DNA
acaccagtccgccatcttcccagtttttcttttcccaccaacacctgtctctccagtattggtcttttgagcagcaagcagctgaattggggttcagaaccctcattgtc

SEQ ID NO: 9517 - DNA, 110 bp, synthetic construct
  source 1..110: mol_type = other DNA
attgctcagcagttgatggacatttgttttcactttctggctcttgtgataatacaggtctgaatatttgtatacaagctttcatttctcttgggtgtgtatatctagga

SEQ ID NO: 9518 - DNA, 110 bp, synthetic construct
  source 1..110: mol_type = other DNA
gctgagggactcgagcgctgcggggcgccccctctcccttgccggcaggacccctcatcaccctctcctcgggattggtagctgatgttctcaaggtcctcactgacctc

SEQ ID NO: 9519 - DNA, 110 bp, synthetic construct
  source 1..110: mol_type = other DNA
tgagaaatgcagcctctcgggtcctgccccagacccccaatctgagcctgcatttcactgagctcccagggggtgtgtgtgcttatgagaatatgagatgctcctcgcct

SEQ ID NO: 9520 - DNA, 110 bp, synthetic construct
  source 1..110: mol_type = other DNA
cccgattgctaacatggctaggttatctgggactcgccaattggggtttttttcatgctgggtgtatgttatctattgttgtataataagtgacactaagattagcagct

SEQ ID NO: 9521 - DNA, 110 bp, synthetic construct
  source 1..110: mol_type = other DNA
tgctgggtgtatgttatctattgttgtataataagtgacactaagattagcagcttaaaacagcacacatttattatggcagcgtttctttgagtcagaaactaggaagt

SEQ ID NO: 9522 - DNA, 110 bp, synthetic construct
  source 1..110: mol_type = other DNA
tatactccagagagagtggtttccttgaacctgtgtcccgagtgagaatggcggagccctaagccaagccacagtgaagatctgtcttaagcaagaattaagcttctgtt

SEQ ID NO: 9523 - DNA, 110 bp, synthetic construct
  source 1..110: mol_type = other DNA
gccctaagccaagccacagtgaagatctgtcttaagcaagaattaagcttctgttgttttaaatctgctttgtctatcctgactaatgcaaatttcagcagtaattagag

SEQ ID NO: 9524 - DNA, 110 bp, synthetic construct
  source 1..110: mol_type = other DNA
taattctaatcaggggctcatagaaagtttccagagaagataagcatggagctgagttagctccatagagtatgggacaggatgttccaggctgaacgcaccacatgttt

SEQ ID NO: 9525 - DNA, 110 bp, synthetic construct
  source 1..110: mol_type = other DNA
gttagctccatagagtatgggacaggatgttccaggctgaacgcaccacatgtttatagctcaaacttcccttgttcctggaatctcaagtatttggccattgctagaat

SEQ ID NO: 9526 - DNA, 110 bp, synthetic construct
  source 1..110: mol_type = other DNA
acccacctggaataacatttaaccaagtgtctggctaccctgtagcccagtcaggttgacatctaaaattaaccctcacagctcacttgtgagtattttcctcctctcca

SEQ ID NO: 9527 - DNA, 110 bp, synthetic construct
  source 1..110: mol_type = other DNA
tgtagttacagatagtgccaacccattggcaaaataagtgtcaactaaaaagaagctttgaaagaagccaactgattctagctgccccacgtggtatgaagcactgattt

SEQ ID NO: 9528 - DNA, 110 bp, synthetic construct
  source 1..110: mol_type = other DNA
aacagataccacaacatttaatttggtttccctgctgtatgaagacaagtttggccctcttctgatgatgataaatttaataggaagacaactgtgctttataatgggaa

SEQ ID NO: 9529 - DNA, 110 bp, synthetic construct
  source 1..110: mol_type = other DNA
cctcttctgatgatgataaatttaataggaagacaactgtgctttataatgggaagaaagaagtaaatcacaaattgaatacatattgagggtctgttttgtgttagata

SEQ ID NO: 9530 - DNA, 110 bp, synthetic construct
  source 1..110: mol_type = other DNA
ggaagctcaaagttaacatatttaagaatgcaatttatacccctgtgcaacctgttctttcctattcttttacgtctcagtcgaggcagcacaattcaccttgttgctta

SEQ ID NO: 9531 - DNA, 110 bp, synthetic construct
  source 1..110: mol_type = other DNA
tctttcctattcttttacgtctcagtcgaggcagcacaattcaccttgttgcttagctcaaacctgcaaataatattttcttctgtccctgccataatacatatccattg

SEQ ID NO: 9532 - DNA, 110 bp, synthetic construct
  source 1..110: mol_type = other DNA
agtcaggttcataacccgctgttccacaatgggaactacttggcttagtttctgtaaggaggagatttatttcctaaaccaataagctggtggccaagagtgagagatgt

SEQ ID NO: 9533 - DNA, 110 bp, synthetic construct
  source 1..110: mol_type = other DNA
aaggaggagatttatttcctaaaccaataagctggtggccaagagtgagagatgtggtgccaggaagtggagaaataagagaaaacttaacaggagatgaaggaaagaac

SEQ ID NO: 9534 - DNA, 110 bp, synthetic construct
  source 1..110: mol_type = other DNA
aattgcatctacaaagtcccttctgctttgtattgtaagatcacatattcagaggtttcagggattaggatgcagctatcgcggggaggccattattctgcatactacag

SEQ ID NO: 9535 - DNA, 110 bp, synthetic construct
  source 1..110: mol_type = other DNA
tttcagggattaggatgcagctatcgcggggaggccattattctgcatactacagccaagatctcagaaggtggatattagcattaacggaagtataaaaataaacactg

SEQ ID NO: 9536 - DNA, 110 bp, synthetic construct
  source 1..110: mol_type = other DNA
ctgtgccacaacgggaactccttccactgagatttttaaatatgcattcttcttaagtttaatttatgctagggtacatttactctaatatctcagctgggtgcttccat

SEQ ID NO: 9537 - DNA, 110 bp, synthetic construct
  source 1..110: mol_type = other DNA
agtttaatttatgctagggtacatttactctaatatctcagctgggtgcttccatacatcaagaatatacaacactggagtttccattgtggctcagcgggttaagaacc

SEQ ID NO: 9538 - DNA, 110 bp, synthetic construct; identical to SEQ ID NO: 9536
  source 1..110: mol_type = other DNA

SEQ ID NO: 9539 - DNA, 110 bp, synthetic construct; identical to SEQ ID NO: 9537
  source 1..110: mol_type = other DNA

SEQ ID NO: 9540 - DNA, 110 bp, synthetic construct
  source 1..110: mol_type = other DNA
aaattgagcccttaaatcatgccaagatggaagacagagcttgccatccttaaaaggaggcgtgtgttgaattacagccaaggtctgatcaagatggaccccacaaaatt

SEQ ID NO: 9541 - DNA, 110 bp, synthetic construct
  source 1..110: mol_type = other DNA
aggtaagacaaagagataagaacatgagacacccacttgcctcacaagagcatcctcgggagaagagagacattttggaagacatctttatctccaacgtggaagcattt

SEQ ID NO: 9542 - DNA, 110 bp, synthetic construct
  source 1..110: mol_type = other DNA
tcgggagaagagagacattttggaagacatctttatctccaacgtggaagcatttggaataaagaccaacttcctcaattttttttttcctgatgactcaagatgatgtg

SEQ ID NO: 9543 - DNA, 110 bp, synthetic construct
  source 1..110: mol_type = other DNA
tgcatcttagcttcctccttcctcttacagagtgtaaagggataacagtaatatctaccatataggcttgttatgaggattactgaaatatcaggtgaaatatttagaac

SEQ ID NO: 9544 - DNA, 110 bp, synthetic construct
  source 1..110: mol_type = other DNA
taccatataggcttgttatgaggattactgaaatatcaggtgaaatatttagaacagtacttagaacaaagcttggcacacagttagctcatgaagtaaggtaagttatt

SEQ ID NO: 9545 - DNA, 110 bp, synthetic construct
  source 1..110: mol_type = other DNA
ccagtccctcagccccctaaaatgctgaaatgttgaacccatgttccaactctcctcctcaccagagtctagaagctggaagtttcttttacttattctgcattgagcca

SEQ ID NO: 9546 - DNA, 110 bp, synthetic construct
  source 1..110: mol_type = other DNA
ctgcaaagtctttgaaaactgtgttgacaccggaaccccagtgtactgaaggcagttttaaactttcgacttcaagctaatcgggctattaaaacaaaaatatcaacact

SEQ ID NO: 9547 - DNA, 110 bp, synthetic construct
  source 1..110: mol_type = other DNA
ttttaaactttcgacttcaagctaatcgggctattaaaacaaaaatatcaacacttgtttgccataggatttaacaagacccacaatttcacaacctaatattcacaatg

SEQ ID NO: 9548 - DNA, 110 bp, synthetic construct
  source 1..110: mol_type = other DNA
acccaatggaatagaagaaagccgtgtatggcctacccattttatcctatcaaaattcaggattccccttctcccacagggccactcaccacagcggagtcaaagcccca

SEQ ID NO: 9549 - DNA, 110 bp, synthetic construct
  source 1..110: mol_type = other DNA
ttcaggattccccttctcccacagggccactcaccacagcggagtcaaagccccaagatgggtcaagaccaaggtcacaattaggccacaatgctaaaagatacagcctt

SEQ ID NO: 9550 - DNA, 110 bp, synthetic construct
  source 1..110: mol_type = other DNA
gagccagccttgtgggtgaataacacagacacgtttctctgagcctagaaatggcaactgtcagaagtctaatctctcccggtcaggactgcccgtagtaataaacactt

SEQ ID NO: 9551 - DNA, 110 bp, synthetic construct
  source 1..110: mol_type = other DNA
aggcagaagttaggtacagaatctcaaaggaagtttttccatggatggcaagaaccaaactacagtagctcccgactctagagtaagtctgtgttcttggctggatggtg

SEQ ID NO: 9552 - DNA, 110 bp, synthetic construct
  source 1..110: mol_type = other DNA
caaactacagtagctcccgactctagagtaagtctgtgttcttggctggatggtgaccacttactagattctaaaggatggttcaggagttcctggtgtccatgaggatg

SEQ ID NO: 9553 - DNA, 110 bp, synthetic construct
  source 1..110: mol_type = other DNA
tccttagcactgatgtttcggaatggtgacgcatcttgttatctccctattctgtcctctagggttatgatcacagctactacttcatcgcaaccttcattaccgatcac

SEQ ID NO: 9554 - DNA, 110 bp, synthetic construct
  source 1..110: mol_type = other DNA
cctctagggttatgatcacagctactacttcatcgcaaccttcattaccgatcacatcagacatcacgccaaatacctgaatgcgtgagaaacgtcagataagagacgcc

SEQ ID NO: 9555 - DNA, 110 bp, synthetic construct
  source 1..110: mol_type = other DNA
ggtcagattcacttcctctgtgccatgacgggaattcctgacagaattttcttccaggtgaccacccagtaagacatctctctccttcccctctactcccccccgccccg

SEQ ID NO: 9556 - DNA, 110 bp, synthetic construct
  source 1..110: mol_type = other DNA
aggtgaccacccagtaagacatctctctccttcccctctactcccccccgccccgcccgccaaagaagaaacatccagatggggtgaccactggcgggaagcctcaatgc

SEQ ID NO: 9557 - DNA, 110 bp, synthetic construct
  source 1..110: mol_type = other DNA
gagtaatagtggaagaaagatgacttaatttggagatttgcaaagtgaagcagctgaaaatcagcgcatgcaacagtgttccgtaattttctcctagagctgccccgtgt

SEQ ID NO: 9558 - DNA, 110 bp, synthetic construct
  source 1..110: mol_type = other DNA
gaaaatcagcgcatgcaacagtgttccgtaattttctcctagagctgccccgtgtctaatctgggagctttttattgaagtctggttgatttatgaagttgtgttaactt

SEQ ID NO: 9559 - DNA, 110 bp, synthetic construct
  source 1..110: mol_type = other DNA
cacagctcacctgttctgcattaagaggtctctgctcggaggtttttaaaccttctaccgtcaatcccagttgtctaagggacgaggaaaatactggagaagtgaaatct

SEQ ID NO: 9560 - DNA, 110 bp, synthetic construct
  source 1..110: mol_type = other DNA
ctgggaacttccgtatgccgatgaggccctagaaaaagaccacacacacaaaaaaaaggccatttaaatgagagtgattaccaccataagcaatcttacactcatgacta

SEQ ID NO: 9561 - DNA, 110 bp, synthetic construct; identical to SEQ ID NO: 9560
  source 1..110: mol_type = other DNA

SEQ ID NO: 9562 - DNA, 110 bp, synthetic construct
  source 1..110: mol_type = other DNA
aaaaactagtttcagggctattgctccacataagagtaagcccttctgtgctttccacatgtcacagttctgaggttcggaggctcaaggtaggaaactctttaaagagc

SEQ ID NO: 9563 - DNA, 110 bp, synthetic construct
  source 1..110: mol_type = other DNA
cacatgtcacagttctgaggttcggaggctcaaggtaggaaactctttaaagagctggcgaagactcttattaatacagaaaaaggaagccctgcctatttacttctcag

SEQ ID NO: 9564 - DNA, 110 bp, synthetic construct
  source 1..110: mol_type = other DNA
cagtttttccattccttctggttggtatttactacagcgtgcacactgcagagttatgaagggactggtgagggtcatggcctgtgcccggtggaggtgaccttgcagac

SEQ ID NO: 9565 - DNA, 110 bp, synthetic construct
  source 1..110: mol_type = other DNA
cttggatgaggcagcataatgatgagttctgaagacagctcagaccccgctcttcgacctgtgagctgtgtgacttgggacaagttatttcagccttgggttcctcaatt

SEQ ID NO: 9566 - DNA, 110 bp, synthetic construct
  source 1..110: mol_type = other DNA
ctattctcctgcctctgatgctccggggattctggaaattacagtggatgcccagtgactgattgatctttaaacgttaaactagtgctgcattcctgggctgattttta

SEQ ID NO: 9567 - DNA, 110 bp, synthetic construct
  source 1..110: mol_type = other DNA
tgactgattgatctttaaacgttaaactagtgctgcattcctgggctgatttttacagatgggatgtcagtgatgacggtgtacagttgagagtgaatcagaagacagta

SEQ ID NO: 9568 - DNA, 110 bp, synthetic construct; identical to SEQ ID NO: 9566
  source 1..110: mol_type = other DNA

SEQ ID NO: 9569 - DNA, 110 bp, synthetic construct; identical to SEQ ID NO: 9567
  source 1..110: mol_type = other DNA

SEQ ID NO: 9570 - DNA, 110 bp, synthetic construct
  source 1..110: mol_type = other DNA
aagtgtcgtaggaggggttaccatgaagattacaattggcatcctaaatttaaaacaacctagtttggattgataccaagttcacttcagtagctcacaaaattcttatt

SEQ ID NO: 9571 - DNA, 110 bp, synthetic construct
  source 1..110: mol_type = other DNA
caacctagtttggattgataccaagttcacttcagtagctcacaaaattcttattactacgtaactccatcatcttccccaccccacccactttctgttgcttctttgat

SEQ ID NO: 9572 - DNA, 110 bp, synthetic construct
  source 1..110: mol_type = other DNA
tggagggtcctgatgacttttcacaccagagtgaaaaccaccagcatctggctgcttcgtggtgtgatccgtcctgccacggcgcggcctggctgtgtctccggtgtcct

SEQ ID NO: 9573 - DNA, 110 bp, synthetic construct
  source 1..110: mol_type = other DNA
ttcgtggtgtgatccgtcctgccacggcgcggcctggctgtgtctccggtgtcctgaaagaatttcctgcctcttgaccaccccgcccccatccctggtgttgtattact

SEQ ID NO: 9574 - DNA, 110 bp, synthetic construct
  source 1..110: mol_type = other DNA
aaagggtgggatatccagtccttatggagaaagctacataatagatgccaagagaaagtagggaaaaaatgggcaacatgtacgcagttttgcatcatcaagcccccttt

SEQ ID NO: 9575 - DNA, 110 bp, synthetic construct
  source 1..110: mol_type = other DNA
aagtagggaaaaaatgggcaacatgtacgcagttttgcatcatcaagcccccttttctgcgtctcaaggatgtgaacgaaccttccttccatttccagtgctttataaca

SEQ ID NO: 9576 - DNA, 110 bp, synthetic construct
  source 1..110: mol_type = other DNA
ttgtcctttttccttgctgctcttccggacccttattaaaatatacaccagctgtttccacaggtattggggacctggtcctccatccatcaagcccttgaatgtgccca

SEQ ID NO: 9577 - DNA, 110 bp, synthetic construct
  source 1..110: mol_type = other DNA
ggcacaaatataaacaccccatttgtgagtatccccggatatgcgtgggcagatgtggggttcaagatcagagtcttcaccagcttgagagcagctgtcatcgctttcta

SEQ ID NO: 9578 - DNA, 110 bp, synthetic construct
  source 1..110: mol_type = other DNA
gggagctccgggaaagtcaagttgaagcaagactataaatatatttagtatctgtcctgaggcagtgcaaactgtttctgatgcttttttctgatagggatggccagtcc

SEQ ID NO: 9579 - DNA, 110 bp, synthetic construct
  source 1..110: mol_type = other DNA
cctgaggcagtgcaaactgtttctgatgcttttttctgatagggatggccagtccaatagctgaatcccacacaccagaggctctgcccagccaatgctacactgagcac

SEQ ID NO: 9580 - DNA, 110 bp, synthetic construct
  source 1..110: mol_type = other DNA
gccttaataaagaattcttcttatttcttaaaggaaattgtagaaaatgtatggctctattttctgcctccattaagtcggtaggtagaccagttgtcccatgtccggga

SEQ ID NO: 9581 - DNA, 110 bp, synthetic construct
  source 1..110: mol_type = other DNA
tctattttctgcctccattaagtcggtaggtagaccagttgtcccatgtccgggacatttaccaccacttggcaacacagtaccttaagttcagacttttcagggaatta

SEQ ID NO: 9582 - DNA, 110 bp, synthetic construct
  source 1..110: mol_type = other DNA
ggatcgaacccgcatcctcttggattctcgttgggtttgttaaccactgagccgcgaagggaactgccagatacatatttgatacttgtgattcctgtttcttctcaagg

SEQ ID NO: 9583 - DNA, 110 bp, synthetic construct; identical to SEQ ID NO: 9582
  source 1..110: mol_type = other DNA

SEQ ID NO: 9584 - DNA, 110 bp, synthetic construct
  source 1..110: mol_type = other DNA
tgtgacctatgctgcagctgcagcaatgccagatactttaacccactgcattgggatggggatcaaacctctgcttccatagcgacccaagccactgcagtcggattctt

SEQ ID NO: 9585 - DNA, 110 bp, synthetic construct
  source 1..110: mol_type = other DNA
atggggatcaaacctctgcttccatagcgacccaagccactgcagtcggattcttactccacggtgccacagcgggaactccctcaggacacattttaagaataaaagta

SEQ ID NO: 9586 - DNA, 110 bp, synthetic construct
  source 1..110: mol_type = other DNA
gccattttggcacagttacaagaaaagttactttaaaagacattaggaagtgaatgagagacgatgcctagtgctgataagatgccctttcaagcacagttcattcggta

SEQ ID NO: 9587 - DNA, 110 bp, synthetic construct
  source 1..110: mol_type = other DNA
gagagacgatgcctagtgctgataagatgccctttcaagcacagttcattcggtaggaatttactgagggccttaaaagtatccatactctttggctcaggattttgttt

SEQ ID NO: 9588 - DNA, 110 bp, synthetic construct
  source 1..110: mol_type = other DNA
gatgttcatcgcaagttttgcctctagaagcggctgatgcttgttcaatttttacttaacaagctctccgttctcaagtctctggtactttataatcacagatggagagc

SEQ ID NO: 9589 - DNA, 110 bp, synthetic construct
  source 1..110: mol_type = other DNA
ttaacaagctctccgttctcaagtctctggtactttataatcacagatggagagccgtgattagccgtttaatccggtaaccataagcactagttatttcctgtggcaga

SEQ ID NO: 9590 - DNA, 110 bp, synthetic construct
  source 1..110: mol_type = other DNA
actgtacattctattcatgttattagcatgtcctttaaagaagtgacacagtgctagaatgtcattagaaatgacagctatcattttggtttcagcccacattgtaagac

SEQ ID NO: 9591 - DNA, 110 bp, synthetic construct
  source 1..110: mol_type = other DNA
agaatgtcattagaaatgacagctatcattttggtttcagcccacattgtaagactacaccatgaaaatcagttctaggaatacacagaaattgatccaacagttctccg

SEQ ID NO: 9592 - DNA, 110 bp, synthetic construct
  source 1..110: mol_type = other DNA
tgttttctgctgaagagttttctcagctcgtatcttgccagtagaagtttcagtgtccaaaggcctcatcattttacatgaatccttcccatttcaatccaagcatgctg

SEQ ID NO: 9593 - DNA, 110 bp, synthetic construct
  source 1..110: mol_type = other DNA
acgccaaccagaaagacatgggcatgcgagctgtgccttttctttctttgtgactctgtacctgaatcctggaaagtctggcgcaggccctttcacatgctatgcatgta

SEQ ID NO: 9594 - DNA, 110 bp, synthetic construct
  source 1..110: mol_type = other DNA
ctgtacctgaatcctggaaagtctggcgcaggccctttcacatgctatgcatgtagaccctcattctaatgaaagacaatgaagcagagggcccacgttcgcttcatagc

SEQ ID NO: 9595 - DNA, 110 bp, synthetic construct
  source 1..110: mol_type = other DNA
tccagcccaatgtcgctggcagaacagctgaaaagtcctggccttgagtgagctttcttccataggccaccccccaacgctacggcctcagaaattgaagatgaaggagt

SEQ ID NO: 9596 - DNA, 110 bp, synthetic construct
  source 1..110: mol_type = other DNA
gagtgagctttcttccataggccaccccccaacgctacggcctcagaaattgaagatgaaggagttcccatgatggcgcagcggaaacgaatccgactaggaaccatgag

SEQ ID NO: 9597 - DNA, 110 bp, synthetic construct
  source 1..110: mol_type = other DNA
attcatttcattcagtctttcagaaaggatttattgagcactccgtctgagccagtcgctgtcctaggtgctgaggcagtaaggaacaaaattaagttctctcggagctg

SEQ ID NO: 9598 - DNA, 110 bp, synthetic construct
  source 1..110: mol_type = other DNA
tcgctgtcctaggtgctgaggcagtaaggaacaaaattaagttctctcggagctgggagcctatgcgggaagacagatggtaagcaaattaaaaaaactcaaatatatgt

SEQ ID NO: 9599 - DNA, 110 bp, synthetic construct
  source 1..110: mol_type = other DNA
tctgaggaatccagagtccagaggccagtgtgtctccttccagattcttctccacactcatgcacatatattcatgcagacttgcacataaacaggaggtcttctgagtt

SEQ ID NO: 9600 - DNA, 110 bp, synthetic construct
  source 1..110: mol_type = other DNA
gagccacaaaaggaactcccgattgggtgaagcttgctggtaataagtatgttgtcacttctagtcaatgggatggggcagagagatgcatagagagagtgcagagctgg

SEQ ID NO: 9601 - DNA, 110 bp, synthetic construct; identical to SEQ ID NO: 9600
  source 1..110: mol_type = other DNA

SEQ ID NO: 9602 - DNA, 110 bp, synthetic construct
  source 1..110: mol_type = other DNA
tttatctgttcacttgcccagcatccacctcccctacgagggcagcagggactgcagagtccctagacacctaggacagtttagggcacccgacttcacaatagctattt

SEQ ID NO: 9603 - DNA, 110 bp, synthetic construct
  source 1..110: mol_type = other DNA
agagtccctagacacctaggacagtttagggcacccgacttcacaatagctatttatccagcacgggaagaaagcaatgatctagccccgcctcctcccgagtcacatgg

SEQ ID NO: 9604 - DNA, 110 bp, synthetic construct
  source 1..110: mol_type = other DNA
tgatgacctctgccccgctcaatgctaaattctcctctgctcaagccccttcatgaatacatgtactcttagcttaaaactttccccttctgctgttctgagagacactg

SEQ ID NO: 9605 - DNA, 110 bp, synthetic construct
  source 1..110: mol_type = other DNA
aatacatgtactcttagcttaaaactttccccttctgctgttctgagagacactgctttggaaaagacctaataaatccttccttctcctgatctttggttgtgtctttt

SEQ ID NO: 9606 - DNA, 110 bp, synthetic construct
  source 1..110: mol_type = other DNA
gagagcgcacatgaatgcacacgtgggtacacgccagcctcacacactcggcccaagctgctttcgctaaactgtgatcaatcatctttatagactgcatgagccgtata

SEQ ID NO: 9607 - DNA, 110 bp, synthetic construct
  source 1..110: mol_type = other DNA
agctgctttcgctaaactgtgatcaatcatctttatagactgcatgagccgtatacacacactgtagaatacagtgcggccaagaaaagggagacagagccagatgcagt

SEQ ID NO: 9608 - DNA, 110 bp, synthetic construct
  source 1..110: mol_type = other DNA
agatgaaggatcctaaagaaacgtgggggaggaggaggaaaggaagatatgagcaaacccataattattcagaaaatatgacgcaaatcatttcatacagctactgactg

SEQ ID NO: 9609 - DNA, 110 bp, synthetic construct
  source 1..110: mol_type = other DNA
gatatgagcaaacccataattattcagaaaatatgacgcaaatcatttcatacagctactgactggcctatataccaaccaaaagcttacagagaagaatctaaagaaaa

SEQ ID NO: 9610 - DNA, 110 bp, synthetic construct
  source 1..110: mol_type = other DNA
ggactggagatgtctctgtagcaccaggacacgggttaggtccctggccaacacggtgagtcgaaggaactggtgttgctgcagctgccactcagatctgaaccctgggc

SEQ ID NO: 9611 - DNA, 110 bp, synthetic construct
  source 1..110: mol_type = other DNA
accaggtccttcaggttgtaatactggtgtttctcaaaagccgaaaacagcatatccaaaacatattgcttatcagctcgggctcgttttccatcttctttctttttcct

SEQ ID NO: 9612 - DNA, 110 bp, synthetic construct
  source 1..110: mol_type = other DNA
tttgaggactagatttaggatgagaaaacattttagcttcctcactcaaagcatcgctcctcaactttcccctacggactgggagaagaaggtgcacgtacattcccaca

SEQ ID NO: 9613 - DNA, 110 bp, synthetic construct
  source 1..110: mol_type = other DNA
aaaaactggcgccaaatgagggctaatgattaacataacggaaaggatcttaaacaaaattataaacactagtatagctcattcttttcactgaagggtaattgcatgga

SEQ ID NO: 9614 - DNA, 110 bp, synthetic construct
  source 1..110: mol_type = other DNA
tagaaataccagcagagcctccttgctgcctgcctgcatctctcacaagtgtcctatcctatttcttgcctatcaaaataaacaaacaaaccaaaaaaggagttcctgtc

SEQ ID NO: 9615 - DNA, 110 bp, synthetic construct
  source 1..110: mol_type = other DNA
agcctccttgctgcctgcctgcatctctcacaagtgtcctatcctatttcttgcctatcaaaataaacaaacaaaccaaaaaaggagttcctgtcgtggctcagtggaaa

SEQ ID NO: 9616 - DNA, 110 bp, synthetic construct
  source 1..110: mol_type = other DNA
tagtgacaatgcctgatccttaacctgctgagccaccggggaatccctagctgcattttgaaggtagcaagggccaacttgatttgccgaagcaatggatgtgggatgtg

SEQ ID NO: 9617 - DNA, 110 bp, synthetic construct
  source 1..110: mol_type = other DNA
tgtatgatttggcctgagggaaagtgggtgggagaggtttgtttctaaaacctcagttttagagatagtgaaacatacttcatagcagatagggagtccactaggtggag

SEQ ID NO: 9618 - DNA, 110 bp, synthetic construct
  source 1..110: mol_type = other DNA
gttttagagatagtgaaacatacttcatagcagatagggagtccactaggtggagtagttttgtgaacttaacttcagtagttactgtggctctgaggaaaccctgtata

SEQ ID NO: 9619 - DNA, 110 bp, synthetic construct
  source 1..110: mol_type = other DNA
tcccacatggtctagcggttaggattcctggttttcacccaggcggcccgggttcgactcccggtgtgggaacgccagtacttcctttttgaaaagtaaccaacagcaac

SEQ ID NO: 9620 - DNA, 110 bp, synthetic construct
  source 1..110: mol_type = other DNA
gactcccggtgtgggaacgccagtacttcctttttgaaaagtaaccaacagcaacccaactcaagttcctcttaactagggaaagattagtcttttcggtaaacggtata

SEQ ID NO: 9621 - DNA, 110 bp, synthetic construct
  source 1..110: mol_type = other DNA
ctgagccgtaatgggaacgccacatcctgggttttttcttgtttccatctctggctcgtgttgttgtccctgcctggatttcacgctctctttcccagctccagaaaacc

SEQ ID NO: 9622 - DNA, 110 bp, synthetic construct
  source 1..110: mol_type = other DNA
tcgtgttgttgtccctgcctggatttcacgctctctttcccagctccagaaaaccgaatcgtattcatcttttaagacctatggacgctctcttatttttccaaaggtag

SEQ ID NO: 9623 - DNA, 110 bp, synthetic construct
  source 1..110: mol_type = other DNA
ttcaagaggccagtggctaatgggccccctgcgttgttagctctggtggagggtgcaggctgaagctatacttggctctggggtgggggtgggcatctgggagtttctgc

SEQ ID NO: 9624 - DNA, 110 bp, synthetic construct
  source 1..110: mol_type = other DNA
caggctgaagctatacttggctctggggtgggggtgggcatctgggagtttctgctgaccttctgtgctatgtatggggtgagtggggtggacagtattgcccccaggac

SEQ ID NO: 9625 - DNA, 110 bp, synthetic construct
  source 1..110: mol_type = other DNA
tctttaatacttgtctttgcattctaagtgggagtattcccttcctgtacttgattttaaatagtgatctatttcacagttctcaaaaataagtaaactgtgttatgatg

SEQ ID NO: 9626 - DNA, 110 bp, synthetic construct
  source 1..110: mol_type = other DNA
ccacaaagacctaatgattgagtgagtagcccagggtgagcagctctagggcttatttcacatttgactggcagagtaaagggctcaatcgaggatgagcatttgctgag

SEQ ID NO: 9627 - DNA, 110 bp, synthetic construct
  source 1..110: mol_type = other DNA
tttcacatttgactggcagagtaaagggctcaatcgaggatgagcatttgctgagcgaggcacctggggtataaagcagataaagtcatggcctctgccctccgtctact

SEQ ID NO: 9628 - DNA, 110 bp, synthetic construct
  source 1..110: mol_type = other DNA
ttttttcttttataattgatacggccctgctttggctgattcccattcctctccctttggttgctttttatcagtcttttcccaccttctggagtagcacagcagaccgt

SEQ ID NO: 9629 - DNA, 110 bp, synthetic construct
  source 1..110: mol_type = other DNA
gctcttcgcccacccacccgtcaattaggaaggtgggttaacagaggaaggtaaatgaaagcaagagaatcggacctgtgatcaccatcttccctcataggagaagatgt

SEQ ID NO: 9630 - DNA, 110 bp, synthetic construct
  source 1..110: mol_type = other DNA
tgaaagcaagagaatcggacctgtgatcaccatcttccctcataggagaagatgtcctacgtctctgtataaaaatccgggaagcatgaggaactaaccccatgacctca

SEQ ID NO: 9631 - DNA, 110 bp, synthetic construct
  source 1..110: mol_type = other DNA
gttcctccacgagattctgatgcttatcaatgcttaacaacctttattggactcctcaaaaaacttaaaaatagaattgccatatgatctagcaatcccacttctgggca

SEQ ID NO: 9632 - DNA, 110 bp, synthetic construct
  source 1..110: mol_type = other DNA
tcaaaaaacttaaaaatagaattgccatatgatctagcaatcccacttctgggcatctagccccctaattcgaaaagatacatgcacccctgtgttcatggcaacactat

SEQ ID NO: 9633 - DNA, 110 bp, synthetic construct
  source 1..110: mol_type = other DNA
ttttcttttcttcttttttttaaaatttatttttatggccacatctgtggcacatggaagtccccagattaggggttgaatccgagctgcagctgtgggcctatgccaca

SEQ ID NO: 9634 - DNA, 110 bp, synthetic construct
  source 1..110: mol_type = other DNA
ggaagtccccagattaggggttgaatccgagctgcagctgtgggcctatgccacagctgtggcaacactgtatctgagctgcctctgtgacctatgtggcagcttaggac

SEQ ID NO: 9635 - DNA, 110 bp, synthetic construct
  source 1..110: mol_type = other DNA
gcactccctgtgtttagagccaggctgatgtctctgtctatgagtagctcacaccatctcacaatgaattaccaagtccatttgtcacctggtgttggggggtgggtgtc

SEQ ID NO: 9636 - DNA, 110 bp, synthetic construct
  source 1..110: mol_type = other DNA
aagtatcaagggcaccattttcttgctttttctacccagataccctagtgtttcatgcttccatggataagaagagaaatcatggaaggtgaaaaatggagattttattt

SEQ ID NO: 9637 - DNA, 110 bp, synthetic construct
  source 1..110: mol_type = other DNA
tgcttccatggataagaagagaaatcatggaaggtgaaaaatggagattttattttttttattttttaataacccagggcttccttccttccttccttcctttctgtctt

SEQ ID NO: 9638 - DNA, 110 bp, synthetic construct
  source 1..110: mol_type = other DNA
aacagctgtggtcacatacttaaccctctgcgccacggtgggaactctcaagtgactttctatagttacaaggctcatcctgatttggccctgattcctcctgcagctgc

SEQ ID NO: 9639 - DNA, 110 bp, synthetic construct
  source 1..110: mol_type = other DNA
gtcaccaggtttccccccacccaccgcccccccagggccagcccttcatacacgatgctcgcttggccgctggagccctggcgggtctcctcccaaactactgagtgaga

SEQ ID NO: 9640 - DNA, 110 bp, synthetic construct
  source 1..110: mol_type = other DNA
tgctcgcttggccgctggagccctggcgggtctcctcccaaactactgagtgagaggaatgtctgtttttgtacttgcttgccaatgcatgtctatttatctggtggggt

SEQ ID NO: 9641 - DNA, 110 bp, synthetic construct
  source 1..110: mol_type = other DNA
aagtgtgtggacaggtaccccaaagctgctggtgaacacctcttgtgtgccaggcactattccaggggttcaaggacacagatgaaaacgaaccactgtttgtgcagagg

SEQ ID NO: 9642 - DNA, 110 bp, synthetic construct
  source 1..110: mol_type = other DNA
actattccaggggttcaaggacacagatgaaaacgaaccactgtttgtgcagaggaagttcatgttttagcgaagaggcagacatgcatagataaaccccaaatattatg

SEQ ID NO: 9643 - DNA, 110 bp, synthetic construct
  source 1..110: mol_type = other DNA
caatgggaactctgaatagcaattattgatcccattttacatattttacaaattgaagttcagaaagttaagtgacttggtcgaaggcatactgttacaaagtgatagaa

SEQ ID NO: 9644 - DNA, 110 bp, synthetic construct
  source 1..110: mol_type = other DNA
aagttcagaaagttaagtgacttggtcgaaggcatactgttacaaagtgatagaactggcccgtagctcttaggctagttttcttcccacagcatcgcaattcttaaagg

SEQ ID NO: 9645 - DNA, 110 bp, synthetic construct
  source 1..110: mol_type = other DNA
gactgctctgtgaggcaagaggggacatgggatcctggtttggaggcaaaaagcatgtgcggatttgagggaaattggaataataggcttagaaccaaagctagccccac

SEQ ID NO: 9646 - DNA, 110 bp, synthetic construct
  source 1..110: mol_type = other DNA
tgtgcggatttgagggaaattggaataataggcttagaaccaaagctagccccaccccagccacccagatagagatgggacaggtagaaaccttacccatcagcctgccc

SEQ ID NO: 9647 - DNA, 110 bp, synthetic construct
  source 1..110: mol_type = other DNA
atggaagcaattcctttctttccaaatcccaagtcccaactctgcatttccagcttgtaatttgtctctcttcaaaacgtattttccctggggatggctgtatctgaagg

SEQ ID NO: 9648 - DNA, 110 bp, synthetic construct
  source 1..110: mol_type = other DNA
tgtaatttgtctctcttcaaaacgtattttccctggggatggctgtatctgaaggtgctaacagtcagcagggacaaggatatcaggggtcttgttctgtctcctcttct

SEQ ID NO: 9649 - DNA, 110 bp, synthetic construct
  source 1..110: mol_type = other DNA
tattgagcagtttttccctttattaattatataggaagagagtactttatgtggagaaactcctaattatttaaaagcgattgaatcaatctctctagggaaggagaact

SEQ ID NO: 9650 - DNA, 110 bp, synthetic construct
  source 1..110: mol_type = other DNA
gaaactcctaattatttaaaagcgattgaatcaatctctctagggaaggagaactgtgtgcattaacatttattgagttcctgtccatggtagataattaatatttgtta

SEQ ID NO: 9651 - DNA, 110 bp, synthetic construct
  source 1..110: mol_type = other DNA
tcagtgctccacttcagtaactcatacacacatcaaacagtataagtggcaaactttcactttcccctctgaagtctgttcatctttctcatcttagtaaatgtggcagc

SEQ ID NO: 9652 - DNA, 110 bp, synthetic construct
  source 1..110: mol_type = other DNA
ttcactttcccctctgaagtctgttcatctttctcatcttagtaaatgtggcagcattcatccagttgctcaagccagaaccatggtagttgatcttgacttgactcttc

SEQ ID NO: 9653 - DNA, 110 bp, synthetic construct
  source 1..110: mol_type = other DNA
ctagtcggattcgtttctgctgagccacgacgggaactccaaactcctaaccctaatgaagttcttcattaggaatttttcccatagtcagttttctctgttaagatcct

SEQ ID NO: 9654 - DNA, 110 bp, synthetic construct; identical to SEQ ID NO: 9653
  source 1..110: mol_type = other DNA

SEQ ID NO: 9655 - DNA, 110 bp, synthetic construct
  source 1..110: mol_type = other DNA
cctttcagcaccttttaaaccatatcagtgtctgaagtttctctgtccagtcagcacacagctggaagagtcacctcacctctccaacacgctcctctgattttgccgct

SEQ ID NO: 9656 - DNA, 110 bp, synthetic construct
  source 1..110: mol_type = other DNA
acaaatatcctcaacagagagagatgtgcctgagacccctgtgctataccaaatacatgcaagtgggaacagctcctaaaactctctaaggatatttgcccactgtaaat

SEQ ID NO: 9657 - DNA, 110 bp, synthetic construct
  source 1..110: mol_type = other DNA
cctgtgtgcaaaatctagcctcttacctgttttttatcaattaagttttattgaaatacagacatattcatttctgctcctgtctgcttttgcttacaaaagccaagctg

SEQ ID NO: 9658 - DNA, 110 bp, synthetic construct
  source 1..110: mol_type = other DNA
atacagacatattcatttctgctcctgtctgcttttgcttacaaaagccaagctgaatagctgagacagagactatatgtcccacaaagcctaaaatatgtaccacctgg

SEQ ID NO: 9659 - DNA, 110 bp, synthetic construct
  source 1..110: mol_type = other DNA
gaagaggcctgtttcatctcatacctggactcagttttctatcaatgcaacctgtttacaagggcttctatggtagtcataccacgttgatcactcgtgttgaactcact

SEQ ID NO: 9660 - DNA, 110 bp, synthetic construct
  source 1..110: mol_type = other DNA
ctcacggaggcaattcagcaagcatcatttactgttgaaggttaaagcagttgtaccctgtaatctcctactcagctgccaacactaatttaatacagagaggtgaacac

SEQ ID NO: 9661 - DNA, 110 bp, synthetic construct
  source 1..110: mol_type = other DNA
ccctgtaatctcctactcagctgccaacactaatttaatacagagaggtgaacacatggctgaaacatttagtacagtatctatttttcccatctcagtttaagattatg

SEQ ID NO: 9662 - DNA, 110 bp, synthetic construct
  source 1..110: mol_type = other DNA
agccattcttccaaacgcggggaaaggtattgcacacgtgataccttttgaggttccttatgctgttttaaagaatctgaattccgctctgtattatttatgacataggt

SEQ ID NO: 9663 - DNA, 110 bp, synthetic construct
  source 1..110: mol_type = other DNA
ccttatgctgttttaaagaatctgaattccgctctgtattatttatgacataggtaggcactgaactctaataccccttcccaggaagaaaaacttggatgggactggct

SEQ ID NO: 9664 - DNA, 110 bp, synthetic construct
  source 1..110: mol_type = other DNA
ctttttgtgactttggacaacaaactcagaatcttggtgggaattcccgctgtggtgcagtgggttaggaatctgactgcagtctcttgggtcactgcagatatgctggt

SEQ ID NO: 9665 - DNA, 110 bp, synthetic construct
  source 1..110: mol_type = other DNA
tgcagtgggttaggaatctgactgcagtctcttgggtcactgcagatatgctggtttgatccctgggcctggggccgtgggttcaaggagcagccacggcatgggtccca

SEQ ID NO: 9666 - DNA, 110 bp, synthetic construct
  source 1..110: mol_type = other DNA
caggaacttgtaaagaattgtaaacgctgcatttcccgtggaaagtctccattcatacaaagtgacagagcactgaggcacgtgccaggataattcagcccagaaagcac

SEQ ID NO: 9667 - DNA, 110 bp, synthetic construct
  source 1..110: mol_type = other DNA
tacaaagtgacagagcactgaggcacgtgccaggataattcagcccagaaagcactggatgtgagacatcttaacagaaaagacctcgttcattaaaactgacctgggga

SEQ ID NO: 9668 - DNA, 110 bp, synthetic construct
  source 1..110: mol_type = other DNA
gtagggaacaagcaaggggaagtgaataggtcccatcaagaggtgatttcacacccctgccagatgtcccggtgcccacatatggctttcttagggtgacttccaagatg

SEQ ID NO: 9669 - DNA, 110 bp, synthetic construct
  source 1..110: mol_type = other DNA
ggaatggcattgaggggagtagcttgattcggttccttgtttgggaggagggagggaagatagaattcttgtttgcagtggtggttacttatatctatacaggggataaa

SEQ ID NO: 9670 - DNA, 110 bp, synthetic construct
  source 1..110: mol_type = other DNA
tatttattgctgcacttagcctcctctcatgatacaacccccaaatccagccgtcttcctctgccgccccagtctctttcctaaaactcagatccgaacatccccacttg

SEQ ID NO: 9671 - DNA, 110 bp, synthetic construct
  source 1..110: mol_type = other DNA
ttcctctgccgccccagtctctttcctaaaactcagatccgaacatccccacttgggttaaaatccttcagctgccttgattgcccccagacgaaaatagctgagtcccg

SEQ ID NO: 9672 - DNA, 110 bp, synthetic construct
  source 1..110: mol_type = other DNA
cctggtctggtctttgagcaaagtggttacgtgtacaatatatcttcgaaaaccttcaaacataaagagtattggtgagcttcacttctctggagcatttactcaaaagc

SEQ ID NO: 9673 - DNA, 110 bp, synthetic construct
  source 1..110: mol_type = other DNA
tggatactagtcaggtgcatggagcgtcgtggggttcttaacgagctgagccacagctggagctgcccctacccccctgcttcatttttggagagtatgcatagcagctc

SEQ ID NO: 9674 - DNA, 110 bp, synthetic construct; identical to SEQ ID NO: 9673
  source 1..110: mol_type = other DNA

SEQ ID NO: 9675 - DNA, 110 bp, synthetic construct
  source 1..110: mol_type = other DNA
cgccacctcttgggtgcttctgccctcagttctgcttctgttactttaaaaattgtttttgttgaaatgaccttcgtggcagtaacacccataggatcaatttaaatgct

SEQ ID NO: 9676 - DNA, 110 bp, synthetic construct
  source 1..110: mol_type = other DNA
cgaagtgcctctaaggtaagtccttttttcctccgctgtggatctggacagctttccacctgatgatccctttaagcagaaagtgttctttagggcgatgcagtttaatg

SEQ ID NO: 9677 - DNA, 110 bp, synthetic construct
  source 1..110: mol_type = other DNA
ccacctgatgatccctttaagcagaaagtgttctttagggcgatgcagtttaatggaactttctgcaggggcagaaacgctctgtgtctgtgtggctttagaggaatccc

SEQ ID NO: 9678 - DNA, 110 bp, synthetic construct
  source 1..110: mol_type = other DNA
aggcaagaggacagggccaggtccttttctcctatgatttaatggttggctgagccagcttaacaaacaatgagcttgcctgccttgttgagaccgtaatcctcagctgg

SEQ ID NO: 9679 - DNA, 110 bp, synthetic construct
  source 1..110: mol_type = other DNA
cagcttaacaaacaatgagcttgcctgccttgttgagaccgtaatcctcagctggtccaaagggagatgctgacacctcagaggggaagaaagcagctttgtccagccag

SEQ ID NO: 9680 - DNA, 110 bp, synthetic construct
  source 1..110: mol_type = other DNA
acgaacactctaagaattttagatcctaagtgatgctaatttgattttaatgagttagcaaattcctgtttgttcttaaagatccgaccatggccagcgggactttcatt

SEQ ID NO: 9681 - DNA, 110 bp, synthetic construct
  source 1..110: mol_type = other DNA
tagcaaattcctgtttgttcttaaagatccgaccatggccagcgggactttcatttcggcagtttggtttgatgtcattgtcaccatcaccacactctttgaacttttaa

SEQ ID NO: 9682 - DNA, 110 bp, synthetic construct
  source 1..110: mol_type = other DNA
tcttcatgcttggggagcatgggaaaatgacttgataccttttatttctctagatgcttccaaagtctccagtgaggctatacattaaaaggaaaggacgcagaaacagg

SEQ ID NO: 9683 - DNA, 110 bp, synthetic construct
  source 1..110: mol_type = other DNA
gcttccaaagtctccagtgaggctatacattaaaaggaaaggacgcagaaacaggagctctgggaagtttttcccagaagggctttgtgaaggctctgatctcttgagac

SEQ ID NO: 9684 - DNA, 110 bp, synthetic construct
  source 1..110: mol_type = other DNA
aatatttgtcacttctcctaggttccaggcatggctgccagaccctgaggctgcacacataaacccagacagatcctctgtcgggtgggagcttacagtatccaagcata

SEQ ID NO: 9685 - DNA, 110 bp, synthetic construct
  source 1..110: mol_type = other DNA
cacataaacccagacagatcctctgtcgggtgggagcttacagtatccaagcatagctctcaatagttgccatgtattattggaaagatatctttacatcattggccaga

SEQ ID NO: 9686 - DNA, 110 bp, synthetic construct
  source 1..110: mol_type = other DNA
ggaaataatgcaccgtttagtttcgtgttgatgatgtgtctcccggttagagcgcccttacttttagcttattaataattaacacacctcttggtgtggtggagattgtg

SEQ ID NO: 9687 - DNA, 110 bp, synthetic construct
  source 1..110: mol_type = other DNA
ccttacttttagcttattaataattaacacacctcttggtgtggtggagattgtgtcaggttgatacactggataagtacctgaacacatgtcagcttcattgtgcaagt

SEQ ID NO: 9688 - DNA, 110 bp, synthetic construct
  source 1..110: mol_type = other DNA
tggtggccagtacagaacacaaacaaggccttgtgcgtcttagtggaaagctccccagccatgaaaacacacactgaaccggaagcgtgggctcccccaaagaagcccag

SEQ ID NO: 9689 - DNA, 110 bp, synthetic construct
  source 1..110: mol_type = other DNA
cagccatgaaaacacacactgaaccggaagcgtgggctcccccaaagaagcccagctgtgaaactggcaaatgtcaaagagcattaagtcaaatttgacttccttggctg

SEQ ID NO: 9690 - DNA, 110 bp, synthetic construct
  source 1..110: mol_type = other DNA
cagcccaacgcgatgtcctccagcaaagctgcttgaactcagggagctggagcggaggaggagggcgggctttatgcaggttgggtttaagcaggtggctgaaataaaag

SEQ ID NO: 9691 - DNA, 110 bp, synthetic construct
  source 1..110: mol_type = other DNA
caatacacatggaggagaggaaaagcgagtgaatgctgtggccggggactcctgactatcctacaaatataaaatgagcacacacccgtgaagttaccagaaatgaagtg

SEQ ID NO: 9692 - DNA, 110 bp, synthetic construct
  source 1..110: mol_type = other DNA
ctatcctacaaatataaaatgagcacacacccgtgaagttaccagaaatgaagtgggtaaggattcaggtagtgacactgaagaatgggaatcgttatactatgtattcc

SEQ ID NO: 9693 - DNA, 110 bp, synthetic construct
  source 1..110: mol_type = other DNA
tgcccctctgcacgcatctgtggaatcctgcttccatcattgtctacagagacgctgcatattaatcctaaaggcatgaaaaagggacacatcctttctggccatgaaaa

SEQ ID NO: 9694 - DNA, 110 bp, synthetic construct
  source 1..110: mol_type = other DNA
ttggggagggattaaggaaattgtgcacataataggttttgcacattgcctggcacacaaaatcgttagctgttgctgccctattactacttctgttgctgctgcagtga

SEQ ID NO: 9695 - DNA, 110 bp, synthetic construct
  source 1..110: mol_type = other DNA
cacaaaatcgttagctgttgctgccctattactacttctgttgctgctgcagtgaggtcagggaaacaggagtgactgtgccttttgcttatacctccctctccctgcat

SEQ ID NO: 9696 - DNA, 110 bp, synthetic construct
  source 1..110: mol_type = other DNA
acagcctccggtggcagctggatgcctacaggaatgaggtggagctgctgaagcaggagaaagagcagctgtttcgaacagaagacaacctcaccaaggaccagcagctc

SEQ ID NO: 9697 - DNA, 110 bp, synthetic construct
  source 1..110: mol_type = other DNA
ggagaaagagcagctgtttcgaacagaagacaacctcaccaaggaccagcagctccagttcctgcagcagaccatgcaaggcatgcaacaggtaggggcccaggtcccca

SEQ ID NO: 9698 - DNA, 110 bp, synthetic construct
  source 1..110: mol_type = other DNA
tagcagcctgtgtgatggtgatgataattctcatttataactcagtgccccttccctttggctgctaagcgtcagttgtcgggttccagctggcagcatgtgcattttct

SEQ ID NO: 9699 - DNA, 110 bp, synthetic construct
  source 1..110: mol_type = other DNA
ctttggctgctaagcgtcagttgtcgggttccagctggcagcatgtgcattttctaacatttgcagattacactccctggcacttgtgaggaagggctgtacccgccgca

SEQ ID NO: 9700 - DNA, 110 bp, synthetic construct
  source 1..110: mol_type = other DNA
aaagaatgaatgaatgcaggaatgaatgagtgaatatcactggattttttaaaatgtgtaaatcgtagttgatttccaatgttgtgcccgtttctgctatacagcaaagt

SEQ ID NO: 9701 - DNA, 110 bp, synthetic construct
  source 1..110: mol_type = other DNA
gtgtaaatcgtagttgatttccaatgttgtgcccgtttctgctatacagcaaagtgacccagtcatatatgcgtgtatatatatgaaggtatatatacattgtctgtata

SEQ ID NO: 9702 - DNA, 110 bp, synthetic construct
  source 1..110: mol_type = other DNA
ctccagctggaggagaacagcagctcaggacaaaacgggggaggccagtgagggcaaagtagtggccagcctgtagcttctgttggtaggggaggggggacctgtgtgga

SEQ ID NO: 9703 - DNA, 110 bp, synthetic construct
  source 1..110: mol_type = other DNA
aaagtagtggccagcctgtagcttctgttggtaggggaggggggacctgtgtggatctggcagaagagagcaggtagatggggagtgagatctcacagcacacacacaca

SEQ ID NO: 9704 - DNA, 110 bp, synthetic construct
  source 1..110: mol_type = other DNA
ttcggtgagaaatttccctccagcagggctcagctaccctaatggactctgccatcccatataggcaggtctccagccgttaaagttgactttctttgaaatcattctcc

SEQ ID NO: 9705 - DNA, 110 bp, synthetic construct
  source 1..110: mol_type = other DNA
tgccatcataaaacccagagcacacgcagcttaatgcccaggtgacaaagtaccgcactaagaagaggagggcactctttcatgtggaaaagaaatagtctgatacccaa

SEQ ID NO: 9706 - DNA, 110 bp, synthetic construct
  source 1..110: mol_type = other DNA
tggccaggccggaaatccctccagccctctcagccctgaccttcatgcctgcccctgaccttcaatgacccgttccatgacccgtgcatccctgcagggccagtgtacag

SEQ ID NO: 9707 - DNA, 110 bp, synthetic construct
  source 1..110: mol_type = other DNA
tgaccttcaatgacccgttccatgacccgtgcatccctgcagggccagtgtacaggtgggatctcacattttcctttatactcacatttccttctggaaacagaatcatg

SEQ ID NO: 9708 - DNA, 110 bp, synthetic construct
  source 1..110: mol_type = other DNA
caacgttaagtaattaaaacctgaggatcattaatcacaaacaaccaactagaagcaaacgctaaagcttcggccaatcaaataatttccttgctttgattctgcctctt

SEQ ID NO: 9709 - DNA, 110 bp, synthetic construct; identical to SEQ ID NO: 9708
  source 1..110: mol_type = other DNA

SEQ ID NO: 9710 - DNA, 110 bp, synthetic construct
  source 1..110: mol_type = other DNA
ccctgcttaaaaccgtttccttttttatatttattctcagtgagagagctcacttcttcttcctccccacccacctttttgtttttcttgatcagtcgcataagaaatag

SEQ ID NO: 9711 - DNA, 110 bp, synthetic construct
  source 1..110: mol_type = other DNA
atttggctcaatttccacaaagcaagctctctgaatttaaacaacagccaagtagaaaggggaaaaaagggaagaaacaagaaagactgctggcaaatcagaatttggtg

SEQ ID NO: 9712 - DNA, 110 bp, synthetic construct
  source 1..110: mol_type = other DNA
cagcagtgcaggttgatgcagaggcatggttggatccccagagcagtgggtcaaggatctggcattgccgcagctgcggctcggattccatccctggccctcaaacctcc

SEQ ID NO: 9713 - DNA, 110 bp, synthetic construct
  source 1..110: mol_type = other DNA
ccccagagcagtgggtcaaggatctggcattgccgcagctgcggctcggattccatccctggccctcaaacctccatatgctgcaggtgtggccatgaatatataaaata

SEQ ID NO: 9714 - DNA, 110 bp, synthetic construct
  source 1..110: mol_type = other DNA
ctaaatcaaatccagtaggagacctctaggttttatccattaaaatgaaactcttgtcagcttccagaaggtattagggacagagcagtgtcaccaaatgtctacggagt

SEQ ID NO: 9715 - DNA, 110 bp, synthetic construct
  source 1..110: mol_type = other DNA
gtcagcttccagaaggtattagggacagagcagtgtcaccaaatgtctacggagtgctcagtgccttctagttaggccaagagagttccagtttcactggggactggact

SEQ ID NO: 9716 - DNA, 110 bp, synthetic construct
  source 1..110: mol_type = other DNA
atcagatctgagccacagtcacaacctcagctgcagctgcgaccatgccagatccttaacccactgtgcggggctggggatcgaacccatttcctagcgctcccaagatg

SEQ ID NO: 9717 - DNA, 110 bp, synthetic construct
  source 1..110: mol_type = other DNA
cagtcacaacctcagctgcagctgcgaccatgccagatccttaacccactgtgcggggctggggatcgaacccatttcctagcgctcccaagatgccgctgatcccgttt

SEQ ID NO: 9718 - DNA, 110 bp, synthetic construct
  source 1..110: mol_type = other DNA
acagcaaagtgacccagtcctatatatgtgtatatactttttctcatacccatcttccactctagtctatcgcaagagactggacatagttctctgtgctgcacagtagg

SEQ ID NO: 9719 - DNA, 110 bp, synthetic construct; identical to SEQ ID NO: 9718
  source 1..110: mol_type = other DNA

SEQ ID NO: 9720 - DNA, 110 bp, synthetic construct
  source 1..110: mol_type = other DNA
tgggttaaacatcataggagacagagagcaagctctccagtgtctcctctgttgagggcactaatcccatcatgagggctcatggcctgtctaaacttattacctcccaa

SEQ ID NO: 9721 - DNA, 110 bp, synthetic construct
  source 1..110: mol_type = other DNA
agaaaccaggccccttacttccagcccactacccttcccatttcactagatgagacaggtggctttccatatttcatgaatcttctccttgagtcagagttaatgctgtg

SEQ ID NO: 9722 - DNA, 110 bp, synthetic construct
  source 1..110: mol_type = other DNA
caggtggctttccatatttcatgaatcttctccttgagtcagagttaatgctgtgagagaaagaaatgccaggtggaaaaactgacaagtcaggtcttccacagccactt

SEQ ID NO: 9723 - DNA, 110 bp, synthetic construct
  source 1..110: mol_type = other DNA
ctttgttgttacaagttcaacaggtcattgctatgccctgtggagtgaaatagatgacgatattgtggaatgagttaaaaacatggattttcctgctttaacacttctcc

SEQ ID NO: 9724 - DNA, 110 bp, synthetic construct
  source 1..110: mol_type = other DNA
gacgatattgtggaatgagttaaaaacatggattttcctgctttaacacttctcctaagcttgaaggtcgctgagaattgtatcagggagatgcttttcagtttagcaca

SEQ ID NO: 9725 - DNA, 110 bp, synthetic construct
  source 1..110: mol_type = other DNA
acaatgggaactcctgctacattttcttattagttttacacttgcagtcaaccttgtcagagttattttgattatggattatgttaagcttttatattaggtacttgcaa

SEQ ID NO: 9726 - DNA, 110 bp, synthetic construct
  source 1..110: mol_type = other DNA
actgcacttgccttggcacgtgggatttcaaacagggctaagctggatgtgctgaagtccagcttctccagggcagtatagttagtagctgatggaaatcagcagcctaa

SEQ ID NO: 9727 - DNA, 110 bp, synthetic construct
  source 1..110: mol_type = other DNA
tctgaacgtacaggatgtcttcttgaaaattcttcaatccccaaatctatgacgccacaattttgccagagatgaagctaagcccatttgatgtgatacttcagatcctt

SEQ ID NO: 9728 - DNA, 110 bp, synthetic construct
  source 1..110: mol_type = other DNA
aaagagacaggatggagggaggaggtccagtggaagcacattgcctggactgcagttctaagttcagggagtccattgagccacaggtgtttttcagagggttacggcac

SEQ ID NO: 9729 - DNA, 110 bp, synthetic construct
  source 1..110: mol_type = other DNA
ttctaagttcagggagtccattgagccacaggtgtttttcagagggttacggcactttccagcaatgggctgccttcgtattcctgtggcgatcattgaggagcagccta

SEQ ID NO: 9730 - DNA, 110 bp, synthetic construct
  source 1..110: mol_type = other DNA
atcagtatcttcatttcagtaatgaggaaatgtgacagtgagagaggggaaatggcttattcagggtcacagaactagccaatggcagggccaaggcgggagccagatct

SEQ ID NO: 9731 - DNA, 110 bp, synthetic construct
  source 1..110: mol_type = other DNA
cttattcagggtcacagaactagccaatggcagggccaaggcgggagccagatcttgtgactaaattcaaattccaaatccagccttccccccacttcgggtccctgggg

SEQ ID NO: 9732 - DNA, 110 bp, synthetic construct
  source 1..110: mol_type = other DNA
acccttccattggctgtaaatacatctgctctctacagagttcaaaggcatggggagggtcttctggtaccctgggggccataccgcttagtagtctcacacacctatat

SEQ ID NO: 9733 - DNA, 110 bp, synthetic construct
  source 1..110: mol_type = other DNA
tcaggtggctgcctccctcggcaacccaagcagcagctgtagggacatctggctggttgagcaaggatttaacaccccgtttaccagatataatacagggttcatacact

SEQ ID NO: 9734 - DNA, 110 bp, synthetic construct
  source 1..110: mol_type = other DNA
gttgagcaaggatttaacaccccgtttaccagatataatacagggttcatacacttgttaacatatgtaatgcattcattttaacatcttaatgatacccttcctgtaat

SEQ ID NO: 9735 - DNA, 110 bp, synthetic construct
  source 1..110: mol_type = other DNA
acgtgctctggaggagaggtgataaagagagccaagaggcaacaactggatgtaattgaaacactgatctggaaagagaagcaatgccagaccccttgaaggccctgctt

SEQ ID NO: 9736 - DNA, 110 bp, synthetic construct
  source 1..110: mol_type = other DNA
ttgaaacactgatctggaaagagaagcaatgccagaccccttgaaggccctgcttcatggaattcaatgctttcgtgaagatagacgggaaaactcaccacccccttgac

SEQ ID NO: 9737 - DNA, 110 bp, synthetic construct
  source 1..110: mol_type = other DNA
acatttgattttcttccctttcagactctgaaggagacagtgattcatgtttaccttgcttttatggttatgatggatcgctgagttccgccaacattcaagacagatgc

SEQ ID NO: 9738 - DNA, 110 bp, synthetic construct
  source 1..110: mol_type = other DNA
ttgcttttatggttatgatggatcgctgagttccgccaacattcaagacagatgcacagagctctaggaagcctgtttttgtttatatatgatttccaaatattaaccca

SEQ ID NO: 9739 - DNA, 110 bp, synthetic construct
  source 1..110: mol_type = other DNA
tcatggattctagacaggttcattaatcactgagccacagtgggaactccaacacctctgtttttaatttgaggaaacaccatactatttttcctggctgctgtaacatt

SEQ ID NO: 9740 - DNA, 110 bp, synthetic construct
  source 1..110: mol_type = other DNA
ctctgtttttaatttgaggaaacaccatactatttttcctggctgctgtaacatttcacagtcggcctccatatctgtgggttctgtatcttcggattcaaccaatcagg

SEQ ID NO: 9741 - DNA, 110 bp, synthetic construct
  source 1..110: mol_type = other DNA
gtgggaaacatcaaattcacagctcttcagcaaagtcaaaagtggtgccaaccgcctcgtccctagaataaaacagaagactggagtattttcatcgtgtaggaaacatt

SEQ ID NO: 9742 - DNA, 110 bp, synthetic construct
  source 1..110: mol_type = other DNA
agagagcgcatgagtttcaacatgaactcttccttttctatggtattttgttcgctttccgacagactgcccactgacgcgttgtgaggcgtggaaggaggtgtggcggg

SEQ ID NO: 9743 - DNA, 110 bp, synthetic construct
  source 1..110: mol_type = other DNA
gccaagtccaagaaagccaagccttttgcaaggataccctgtcctgagcaatcggaagcaaagccaggagctttccaggttcaataaactgttcttattcagcctcgaaa

SEQ ID NO: 9744 - DNA, 110 bp, synthetic construct
  source 1..110: mol_type = other DNA
ttccaattttttcagaagtagtttttgctacttttatatcagggaaaaagatttaaatacaattagcttctttaaggaatagcccatgtttcaggtcatcgttccttttc

SEQ ID NO: 9745 - DNA, 110 bp, synthetic construct
  source 1..110: mol_type = other DNA
aatacaattagcttctttaaggaatagcccatgtttcaggtcatcgttccttttcttagtttggacaagatcatcattttcttaatgacaaaacaaagatttcaactgta

SEQ ID NO: 9746 - DNA, 110 bp, synthetic construct
  source 1..110: mol_type = other DNA
aggagcaaccaagaataaaggatcagagatggggagcggggtatgggagacagaacagagcttacgccatcttcgtcctctatgatgtccttcccgatggaggccaaggt

SEQ ID NO: 9747 - DNA, 110 bp, synthetic construct
  source 1..110: mol_type = other DNA
cagaaaactagggccctcaagacaaatctgtcggccatatacttccagtagctgattgtatacagcccacaagctaagaagggttttatatgtttaaatgcctttttttt

SEQ ID NO: 9748 - DNA, 110 bp, synthetic construct
  source 1..110: mol_type = other DNA
aaacctgcatcctatggatgctagtcagattcgtttctactgagccacgatgggcactccacaatttagtttttaaagcactgctttgtcttttgtctttttagggccgc

SEQ ID NO: 9749 - DNA, 110 bp, synthetic construct
  source 1..110: mol_type = other DNA
ggatgctagtcagattcgtttctactgagccacgatgggcactccacaatttagtttttaaagcactgctttgtcttttgtctttttagggccgcacccgaggcatatgg

SEQ ID NO: 9750 - DNA, 110 bp, synthetic construct
  source 1..110: mol_type = other DNA
atctatacctataggctggaggagcccagggccacttatgttacagcatgtgcagaagtgttaagctacatattcagttgtaccccttcatttcagtccctcagggaggg

SEQ ID NO: 9751 - DNA, 110 bp, synthetic construct
  source 1..110: mol_type = other DNA
aagtgttaagctacatattcagttgtaccccttcatttcagtccctcagggagggtctcttcagggcagagggccaccacccttgactggaggagtggcaggactcttac

SEQ ID NO: 9752 - DNA, 110 bp, synthetic construct
  source 1..110: mol_type = other DNA
ttccttaaaatcaatcttaggctgtcggggacttttttccccctagttgctacaagcacccgtttgtattttccctcccaacatctagtctgtaagctcctggaggcgag

SEQ ID NO: 9753 - DNA, 110 bp, synthetic construct
  source 1..110: mol_type = other DNA
gcacccgtttgtattttccctcccaacatctagtctgtaagctcctggaggcgagaggccactgggcactctgactaagggtgtgaaaatatgataaccctccttcaaga

SEQ ID NO: 9754 - DNA, 110 bp, synthetic construct
  source 1..110: mol_type = other DNA
tagatggtcactgtgaaacaatccttattcatttaaccaaagtcataaaagatttaaaaaaaaaatacagatcacttaaggccacagaaactcacacaatctgttatcga

SEQ ID NO: 9755 - DNA, 110 bp, synthetic construct
  source 1..110: mol_type = other DNA
aaaaaaaaaatacagatcacttaaggccacagaaactcacacaatctgttatcgaaggcagtactccaggtaaactttgttctcttaatagagaaaattaaatctagtct

SEQ ID NO: 9756 - DNA, 110 bp, synthetic construct
  source 1..110: mol_type = other DNA
ttcaggggacaaaggagcatcagagtgtccttcttgcaccagctatttcttaaataactttaaatcaagatatccacatgggagttgctgttgtggctcagcggaaatga

SEQ ID NO: 9757 - DNA, 110 bp, synthetic construct
  source 1..110: mol_type = other DNA
cctaatacaatgtaaatgctctataaatagttctacatacaatttcagtgctacatcaatagtggctggctctcagctaatttaaattttgctttctgaaactttgaggt

SEQ ID NO: 9758 - DNA, 110 bp, synthetic construct
  source 1..110: mol_type = other DNA
tcaatagtggctggctctcagctaatttaaattttgctttctgaaactttgaggttttttttttttttttttttccaaatgttttcaaatccaccgttggtggagtcctc

SEQ ID NO: 9759 - DNA, 110 bp, synthetic construct
  source 1..110: mol_type = other DNA
ggcgggggtgcgggggcagctcttataagaatttctgtgctaattttattacggcaatttttgatgtcagaaaatttaaagcccgttttctggaaataggacatcctcca

SEQ ID NO: 9760 - DNA, 110 bp, synthetic construct
  source 1..110: mol_type = other DNA
ctgcagctccaattcgatccctcgcctcggaacttccatgtgccagaagtgcgaccctaaaaaaataaataaatcaacgctctggccaggagtcactcagtatctcattc

SEQ ID NO: 9761 - DNA, 110 bp, synthetic construct; identical to SEQ ID NO: 9760
  source 1..110: mol_type = other DNA

SEQ ID NO: 9762 - DNA, 110 bp, synthetic construct
  source 1..110: mol_type = other DNA
tcggagggcaccttacaatgcagcgcctgttttataaaagcacattcgtttgatttgagatgcgtatgtgacggggcccggggggcgcattcctatggtcctttgtgctc

SEQ ID NO: 9763 - DNA, 110 bp, synthetic construct
  source 1..110: mol_type = other DNA
atgctgcagatgcagtcataaaaagaaaagaaaaaacgaaaaacaaaaaacaacccacacaattaagtaatgtcttatttatccatctcggtcaagatattaacatgcta

SEQ ID NO: 9764 - DNA, 110 bp, synthetic construct; identical to SEQ ID NO: 9763
  source 1..110: mol_type = other DNA

SEQ ID NO: 9765 - DNA, 110 bp, synthetic construct
  source 1..110: mol_type = other DNA
cagtttgatccctggcctgtcacagtgggttagaggatctggggctgccacatgtgcagcatggattgcagctgtgggtcacgttcaattcctggcccagtaacttccat

SEQ ID NO: 9766 - DNA, 110 bp, synthetic construct
  source 1..110: mol_type = other DNA
gcagcatggattgcagctgtgggtcacgttcaattcctggcccagtaacttccatatgccgagagtgcagccattaaaaaaaaaattggaggggagttcccatcatggct

SEQ ID NO: 9767 - DNA, 110 bp, synthetic construct
  source 1..110: mol_type = other DNA
acacccaagaactactgctcccgagaaaaacccagacggaggagaaggtggctggaagcctttagccggaagtggcgaacccggaagtaaaagtgatcaggtgtctatag

SEQ ID NO: 9768 - DNA, 110 bp, synthetic construct
  source 1..110: mol_type = other DNA
cactgttggtatggatcttaggtgtatatccttccaaattcttttctatgcatatgtaaatacatcctttctcactgcaggtaaacttgtatttgtagcttaccatagtt

SEQ ID NO: 9769 - DNA, 110 bp, synthetic construct
  source 1..110: mol_type = other DNA
gtaaatacatcctttctcactgcaggtaaacttgtatttgtagcttaccatagtttacttaagaaatccacaaattgctgaatacttcatgtgttttagctaaacccttt

SEQ ID NO: 9770 - DNA, 110 bp, synthetic construct
  source 1..110: mol_type = other DNA
gcaacagcagtgacttgagccactgaagtgacaatgttggatccttaacccactgagctaccagagaactccccctcaaatcttatagcagataaaaacattttaaaaac

SEQ ID NO: 9771 - DNA, 110 bp, synthetic construct
  source 1..110: mol_type = other DNA
taacccactgagctaccagagaactccccctcaaatcttatagcagataaaaacattttaaaaactaacatagactggggagttcccattgtggctcagcaggttacaaa

SEQ ID NO: 9772 - DNA, 110 bp, synthetic construct
  source 1..110: mol_type = other DNA
caatctcattactcagtatagctctgttcagattttctatttcttccagattcaatcttggtagattatatatttctaaaaacgtatccatttttgctagcttacccaat

SEQ ID NO: 9773 - DNA, 110 bp, synthetic construct; identical to SEQ ID NO: 9772
  source 1..110: mol_type = other DNA

SEQ ID NO: 9774 - DNA, 110 bp, synthetic construct; identical to SEQ ID NO: 9772
  source 1..110: mol_type = other DNA

SEQ ID NO: 9775 - DNA, 110 bp, synthetic construct; identical to SEQ ID NO: 9772
  source 1..110: mol_type = other DNA

SEQ ID NO: 9776 - DNA, 110 bp, synthetic construct
  source 1..110: mol_type = other DNA
ttatgtccctgaaaacaccaacacatgagagtttataagagctttattcacaataggccaaaattcaaagcaaacaaagtattattcagtaagtgaatgggtaggtaaac

SEQ ID NO: 9777 - DNA, 110 bp, synthetic construct
  source 1..110: mol_type = other DNA
tcatcccaggacaaatttgctactcaagcataagaccgctacagagatgtgtgatgtaaaagcttgggctgagtatgttgtaaaaggggctgcaaaaggacccctatggc

SEQ ID NO: 9778 - DNA, 110 bp, synthetic construct
  source 1..110: mol_type = other DNA
gtaaaagcttgggctgagtatgttgtaaaaggggctgcaaaaggacccctatggcttccttacaacagttactttagccctttactccatcgtttctagcaagtgctgta

SEQ ID NO: 9779 - DNA, 110 bp, synthetic construct
  source 1..110: mol_type = other DNA
tttttaaagaacaatagcactgtggcagtgccgtcaagaactggctcgtgatcgcagtggaaaagaaagtgaaactctgcacagatggcctttgggacagggtcaccttt

SEQ ID NO: 9780 - DNA, 110 bp, synthetic construct
  source 1..110: mol_type = other DNA
tgattgagaggtagctgagtaatgtatgacccacgatcgggaattatctgggcatcattcaggaatcctcccagttctcagctccttccgcagtccgtgccttccatatt

SEQ ID NO: 9781 - DNA, 110 bp, synthetic construct
  source 1..110: mol_type = other DNA
tttttattaataaattagttgacaggcagagaatgtgcaagttgaatttttcagtgcctgtacatgagctgggcagtagatttcttaaagataagagtagtatcagtttc

SEQ ID NO: 9782 - DNA, 110 bp, synthetic construct
  source 1..110: mol_type = other DNA
cttctgatctgtgtcatgccttggatttctaagatgttgtttaaaattctgccgttagaaaatttttttttttacagtgcaccactaaattagatgatccaaagggctct

SEQ ID NO: 9783 - DNA, 110 bp, synthetic construct
  source 1..110: mol_type = other DNA
gggaattcctatatactctgttattaatccatgttatctgactttttaaaagatttcttcctgtccggagtttccattgtggcaaagtagaaacaaatctgacttgtatc

SEQ ID NO: 9784 - DNA, 110 bp, synthetic construct
  source 1..110: mol_type = other DNA
aatccatgttatctgactttttaaaagatttcttcctgtccggagtttccattgtggcaaagtagaaacaaatctgacttgtatccatgaggatgagggattgattcctg

SEQ ID NO: 9785 - DNA, 110 bp, synthetic construct
  source 1..110: mol_type = other DNA
aatcacttgacctctattcctcagactctccctctgttaattcaagtaaagctttttgcactctaaggagtgttcagaaaatgtagcaattatccttgatattttgtgac

SEQ ID NO: 9786 - DNA, 110 bp, synthetic construct
  source 1..110: mol_type = other DNA
aaaaacagtggagggatttggggagagggcaaaagacctttggggaatctcagaaatcataccttcgagcttgcgttgcttgggtataagataaggtctgattgtaaggg

SEQ ID NO: 9787 - DNA, 110 bp, synthetic construct
  source 1..110: mol_type = other DNA
atcataccttcgagcttgcgttgcttgggtataagataaggtctgattgtaagggttttaatgtacccatatggtgaaaagggaggcctttgggatgaagttaaatggcc

SEQ ID NO: 9788 - DNA, 110 bp, synthetic construct
  source 1..110: mol_type = other DNA
aggcattttatcgagtgcctgatatatatgtaaggtgcatatgttttacaaaagcaacaaatattttttaatacttggatgagacgccggtgcttgaaatcccacaggtt

SEQ ID NO: 9789 - DNA, 110 bp, synthetic construct
  source 1..110: mol_type = other DNA
tgtgctttcccaaatgctgcgcgcacttttataaattagcccctggtttttgcattgctcaatctgagtgtaccatttgctactttcagagaacttaatgggtccaggta

SEQ ID NO: 9790 - DNA, 110 bp, synthetic construct
  source 1..110: mol_type = other DNA
tccagtgagggggataatcaagtcatcacattaatgaacaggtaattctgagctgagtgccctccctgaggcccaagagcacggttctaggagagtataataagggaact

SEQ ID NO: 9791 - DNA, 110 bp, synthetic construct
  source 1..110: mol_type = other DNA
agtgccctccctgaggcccaagagcacggttctaggagagtataataagggaactgatctagatgaaaaggtggagagggaacaaacagtttagggaaggacaagaagag

SEQ ID NO: 9792 - DNA, 110 bp, synthetic construct
  source 1..110: mol_type = other DNA
agggcaggcaccatggcagttctgagtccccagcagcaggaccaactctcaagcgtgatcgttggatggcagctattacctctcagctcctctgcttgtccaaggtccac

SEQ ID NO: 9793 - DNA, 110 bp, synthetic construct
  source 1..110: mol_type = other DNA
agacaggaccacggaaactgtcactctaagagtctctgcccgacagccaggaacggaaatttaaaaggaaagattttctgggcatgggttttgggagaagaggagtagtg

SEQ ID NO: 9794 - DNA, 110 bp, synthetic construct
  source 1..110: mol_type = other DNA
gaaatttaaaaggaaagattttctgggcatgggttttgggagaagaggagtagtgtttgcagagagtgaaacttgccctaaaaagagaagggggaagactgctgacagtg

SEQ ID NO: 9795 - DNA, 110 bp, synthetic construct
  source 1..110: mol_type = other DNA
cttgggaccaatttccattcgttgcacttttgacaagtttgatgtggccttttgtcaacattgatgattctgctacagattgaaaacagaagtatttggttgaaaagtct

SEQ ID NO: 9796 - DNA, 110 bp, synthetic construct
  source 1..110: mol_type = other DNA
caacattgatgattctgctacagattgaaaacagaagtatttggttgaaaagtctatattttggagttggagtctcctaaaccatgagggctaaatctgcatcattcctg

SEQ ID NO: 9797 - DNA, 110 bp, synthetic construct
  source 1..110: mol_type = other DNA
tagagaggggaatgaacactaaatacaagctggaaaacttctgcattctaccagttatttgcagaatgttcattaaaggcgggaacaccatgctctaccttctgtttgtc

SEQ ID NO: 9798 - DNA, 110 bp, synthetic construct
  source 1..110: mol_type = other DNA
attccttgttttgcagagaaagtgtgattgggcttttcctgatgattctacctgccggggatggatgggcacttacgagttttcgacactcaggactttcttagacatcc

SEQ ID NO: 9799 - DNA, 110 bp, synthetic construct
  source 1..110: mol_type = other DNA
ttgcagatgttgcaattcctaaaaatgcaggaagcatgattgggggggcaactctggatggattggtttgtatgtaattttttattggtgttttatatacatacatatat

SEQ ID NO: 9800 - DNA, 110 bp, synthetic construct
  source 1..110: mol_type = other DNA
gggcaactctggatggattggtttgtatgtaattttttattggtgttttatatacatacatatatatatgaatgatgcagaatgtgtatagtcagttttccaaaccaatc

SEQ ID NO: 9801 - DNA, 110 bp, synthetic construct
  source 1..110: mol_type = other DNA
tcagggtctttcaccgaagctgtcaatttccctacctatgaggaagaagccccctggcatcatcatcggtgttctgcctgaccatggttctgttctgtttaattcccagc

SEQ ID NO: 9802 - DNA, 110 bp, synthetic construct
  source 1..110: mol_type = other DNA
ggcccagttctggggtatgattttcaagtataattcttgaaagctcagccctgcatcatctgtttaagtttcttcagccctccaatgattcagtaaactctatgtctgta

SEQ ID NO: 9803 - DNA, 110 bp, synthetic construct
  source 1..110: mol_type = other DNA
gaaccatttaaacaatccattcttcaagaatagcaagcagaactgagctcagcgagcacaacgggaagggttatctcaggaccgaaggcaggcacccaggttcctgacag

SEQ ID NO: 9804 - DNA, 110 bp, synthetic construct
  source 1..110: mol_type = other DNA
gcacaacgggaagggttatctcaggaccgaaggcaggcacccaggttcctgacaggggtgatggagggcatagggtcacgtttccagcagtggccctgagaattaatgac

SEQ ID NO: 9805 - DNA, 110 bp, synthetic construct
  source 1..110: mol_type = other DNA
gagcatccgctagaacagggcattttctagatacttcacatgagtcagctccaagcgaagctagacgtggatacttcttgcccttgacccctaccttccctcatgctgct

SEQ ID NO: 9806 - DNA, 110 bp, synthetic construct
  source 1..110: mol_type = other DNA
aggtggaatgaatacatggaaccccttgagctgtatttgagggaccccctcgggaaaggggaggcaagctcttctctgacagcgaggggcgggctgggatgtggggcagg

SEQ ID NO: 9807 - DNA, 110 bp, synthetic construct
  source 1..110: mol_type = other DNA
aaggggaggcaagctcttctctgacagcgaggggcgggctgggatgtggggcagggatgtggaacctctgggatgggaaatgggaaggaatttccatcaatgatcatgag

SEQ ID NO: 9808 - DNA, 110 bp, synthetic construct
  source 1..110: mol_type = other DNA
cgatcaagaaataacaaacagcgaaaagttttgacaagtcgaatgtaattatcgcagctgctcatttcgtttttaagaattgctatcaagtagcaattatgaaatacctg

SEQ ID NO: 9809 - DNA, 110 bp, synthetic construct
  source 1..110: mol_type = other DNA
gaagtaaatgataaaaataagtcacgtagtgtagtttgacagggaaacgttgccatagacaatcagcgtggccgtcggaattctatggagtattaaatggattcccattt

SEQ ID NO: 9810 - DNA, 110 bp, synthetic construct
  source 1..110: mol_type = other DNA
ttttaaaaaattattttcaaaacacatgctttgttaaacttgaattacatagaaccagtaagattgctgttccatattagagaccacagaacttttcctctaaaaagccg

SEQ ID NO: 9811 - DNA, 110 bp, synthetic construct
  source 1..110: mol_type = other DNA
tgttctgttgattcatacttctgtttttatgccagaaccatactcttttgaggattgtagttttgtggtacagtctgtagccagggatcctgattgccccagcttcattt

SEQ ID NO: 9812 - DNA, 110 bp, synthetic construct
  source 1..110: mol_type = other DNA
ggcggtggaaagacatatactgaggggatgagattggtatatacatactgctatgaatagaatagataactggcaaggacctgctatagagtacagggaaatttattcaa

SEQ ID NO: 9813 - DNA, 110 bp, synthetic construct
  source 1..110: mol_type = other DNA
ggtatatacatactgctatgaatagaatagataactggcaaggacctgctatagagtacagggaaatttattcaatattctgtaataacttatatggttattcatagtag

SEQ ID NO: 9814 - DNA, 110 bp, synthetic construct
  source 1..110: mol_type = other DNA
gaggccagggattgagcccacatcctcgtggatactagttgacttctcaacccactgaaccacaatgggaacccccaactctctactttttttttttccatcatcaatga

SEQ ID NO: 9815 - DNA, 110 bp, synthetic construct; identical to SEQ ID NO: 9814
  source 1..110: mol_type = other DNA

SEQ ID NO: 9816 - DNA, 110 bp, synthetic construct
  source 1..110: mol_type = other DNA
aaagatataaaaacacaaacagaaacatgtagttgtgctagcattttgctgtacacatagaacatgcgtgccaatgtaacagacaacaaccctgactccatagtggatct

SEQ ID NO: 9817 - DNA, 110 bp, synthetic construct
  source 1..110: mol_type = other DNA
ggcatgtcagtgagacctgagcctgtgggcaaaggagaaactggggagacatgatgatgtagttgaatgcaacacccagttcatgagggcctctcacctcacactgaggg

SEQ ID NO: 9818 - DNA, 110 bp, synthetic construct
  source 1..110: mol_type = other DNA
gatgtagttgaatgcaacacccagttcatgagggcctctcacctcacactgagggactttcactttataccgacaacccttgggtttttaaagttttcagtaaaaacctt

SEQ ID NO: 9819 - DNA, 110 bp, synthetic construct
  source 1..110: mol_type = other DNA
ccttattggaattaaggggcttttgtgatacctggcgaggtagcggggataacgtagatcagaaggactttgagctcattttcttttggaactttaagaggagaggtctc

SEQ ID NO: 9820 - DNA, 110 bp, synthetic construct
  source 1..110: mol_type = other DNA
tttgttgattttgatcacaagtccacaccaatcagttttagtcagtctagttgaggtcatttggtgctgaggcagtatattccagccactttgggtgataaactttccac

SEQ ID NO: 9821 - DNA, 110 bp, synthetic construct
  source 1..110: mol_type = other DNA
gtcatttggtgctgaggcagtatattccagccactttgggtgataaactttccacaacaagaaggtgttggaaggtcaatcaggcatctcccatggagtgtgatatacct

SEQ ID NO: 9822 - DNA, 110 bp, synthetic construct; identical to SEQ ID NO: 9820
  source 1..110: mol_type = other DNA

SEQ ID NO: 9823 - DNA, 110 bp, synthetic construct; identical to SEQ ID NO: 9821
  source 1..110: mol_type = other DNA

SEQ ID NO: 9824 - DNA, 110 bp, synthetic construct
  source 1..110: mol_type = other DNA
aggctgggaagtcccgaagtcccaaattcccatagtctaggcaccagtgtatttagtatttggtgaggacccacttcctggttcatagacagctgtcttctcagtttatc

SEQ ID NO: 9825 - DNA, 110 bp, synthetic construct
  source 1..110: mol_type = other DNA
gtatttggtgaggacccacttcctggttcatagacagctgtcttctcagtttatcctcatatgacagaaggagaagaagaagggaaaaaaaaaccctctctggagtcaat

SEQ ID NO: 9826 - DNA, 110 bp, synthetic construct
  source 1..110: mol_type = other DNA
gcttgatttaacagtcagtttcagttcaaggtgaaggtaatcccaggtgctaggccagcaaagggctgtgagactacagctcctgcaggctacagaggaagaaccgacag

SEQ ID NO: 9827 - DNA, 110 bp, synthetic construct
  source 1..110: mol_type = other DNA
ccaattctccttcctctgcctgaagtcctgggggttttcctttgatatgtactttgaaaagctagtcaagctcctggaggtaaatctcacaatattgttgggtctcccca

SEQ ID NO: 9828 - DNA, 110 bp, synthetic construct
  source 1..110: mol_type = other DNA
ctccttcccattccaatccccaccgctccgaaaaacatcgttttaaaaattccgtctgtaaggaagactcatttcatcactgttttctctctggatctaagcatttccag

SEQ ID NO: 9829 - DNA, 110 bp, synthetic construct
  source 1..110: mol_type = other DNA
aatcgggaagtgatcaattgggatggctgtgcagtaagcagaattgaaaacttagcagcaagaataatcaaattgcctctgcccctgtcctttaaaactgtctgaaattt

SEQ ID NO: 9830 - DNA, 110 bp, synthetic construct
  source 1..110: mol_type = other DNA
aagcagaattgaaaacttagcagcaagaataatcaaattgcctctgcccctgtcctttaaaactgtctgaaatttgaagttcccatcacggctcagtggttaacgaatcc

SEQ ID NO: 9831 - DNA, 110 bp, synthetic construct
  source 1..110: mol_type = other DNA
tgtcagatttttgccagtctcccagaatcatgatgtattgctttcaagtaggcatcttgaagagttagaatgcggaaggatttaaaaaaaaaaaaaaaaaaaaacctcag

SEQ ID NO: 9832 - DNA, 110 bp, synthetic construct
  source 1..110: mol_type = other DNA
tggcccaactggtagtagggttgtagcatttacagctctcaccatgtccaggtgaatgcacggatttttacataacaattcctgatatttgaccatctgggcattagtca

SEQ ID NO: 9833 - DNA, 110 bp, synthetic construct
  source 1..110: mol_type = other DNA
atgtatttctcatggtacaatacactctgagtagaaaacttttgtgtgttttggtggattagtatgggacttagactccagttaacacatcttgaaaaggaaatccctgc

SEQ ID NO: 9834 - DNA, 110 bp, synthetic construct
  source 1..110: mol_type = other DNA
tccacattttacaattgtttgcaccttctagagacctgtgattcctaaatgcttctaggaacccacatttctgattacttttctactgcatgaaaaaaagcacctgtgct

SEQ ID NO: 9835 - DNA, 110 bp, synthetic construct
  source 1..110: mol_type = other DNA
aaccactgagccacaaagggaactccccagtgttcattttttttttttttcagataaatacccagaaatggaatttctggattgtaagctgattctacttttagttttta

SEQ ID NO: 9836 - DNA, 110 bp, synthetic construct
  source 1..110: mol_type = other DNA
ggaaacaaaaggatttgtccaattgtccagattggaatatgatggagttggaacagcatttgtgcagctgggaacatccacaaaactgggagttccctgtttcccaatac

SEQ ID NO: 9837 - DNA, 110 bp, synthetic construct
  source 1..110: mol_type = other DNA
tgcttgcattactcctactcttaggaagatgcccttgatagtaggggtacgagagtttgggacatggggggatataaagtagctgttaaggtcatggtgactagaaacaa

SEQ ID NO: 9838 - DNA, 110 bp, synthetic construct
  source 1..110: mol_type = other DNA
tagcagttctatataattaaaagaattacagtaaaatgtaaacactcatgctctcacaactcagcttatgaaacagaacagaaccaatatattttaagtccagtacggac

SEQ ID NO: 9839 - DNA, 110 bp, synthetic construct
  source 1..110: mol_type = other DNA
taaatacactaattacatcaagtgcaggcaataaaacaggtgctaaaacagtgctctcacacactgtttttcatttacagctccatagaagaccttttgcgcagagcttg

SEQ ID NO: 9840 - DNA, 110 bp, synthetic construct
  source 1..110: mol_type = other DNA
cttcagtctacatgtctgaccttttgtctcctactttctatctacaattaacacggttcggccacccctctagtaagcagctgctaatgagatttcaagccacctttaaa

SEQ ID NO: 9841 - DNA, 110 bp, synthetic construct
  source 1..110: mol_type = other DNA
cctgcatcctcacggacactagtcatatctatttctgctgtgccacaacaagacctccacccttccttcagctttcttgtagaatagaggttctatgctggatggagcaa

SEQ ID NO: 9842 - DNA, 110 bp, synthetic construct
  source 1..110: mol_type = other DNA
actcttctagaaggaatgggagtgagaataagaatggatgagtgcagattggactttaaaaacccagaaatctaaaaaatgtattactatataattttttatgctgctgt

SEQ ID NO: 9843 - DNA, 110 bp, synthetic construct
  source 1..110: mol_type = other DNA
attcatttccactgcactacgatgggaactcctaaattcaacactttttaactttgtgtcctggggcaagctattcactttctttgactcagcttcctaaagtgtagaca

SEQ ID NO: 9844 - DNA, 110 bp, synthetic construct
  source 1..110: mol_type = other DNA
acactggctgctggagctggactccggcagttcctcttttccgaagtttcatatatgttttgtgagttgtaaactttttccactagagttttttatttattaatcatagg

SEQ ID NO: 9845 - DNA, 110 bp, synthetic construct
  source 1..110: mol_type = other DNA
taaatatgtgcctctaagaaaaatgatcagaaaaattacccacgttcatagaatggcttagggcattaataaacacttgcatttctaaagaaaactaagcataaaaagtc

SEQ ID NO: 9846 - DNA, 110 bp, synthetic construct
  source 1..110: mol_type = other DNA
aagaaaaatgatcagaaaaattacccacgttcatagaatggcttagggcattaataaacacttgcatttctaaagaaaactaagcataaaaagtctctggtcatatgata

SEQ ID NO: 9847 - DNA, 110 bp, synthetic construct
  source 1..110: mol_type = other DNA
tcttacttccaaagaacacaatgtattaattgattttaaataatccaaacctggtgttgaacactaaaatggaaaaatccagtgatactcataggcagattgaactgctc

SEQ ID NO: 9848 - DNA, 110 bp, synthetic construct
  source 1..110: mol_type = other DNA
cagggaactttgattgacccatttttaattaataaattaacattagtcataggatacctagggaaatttgctgcatatcatttgtaagcttggggaattctcttttattt

SEQ ID NO: 9849 - DNA, 110 bp, synthetic construct
  source 1..110: mol_type = other DNA
ctggagatacccttaaatatttaagcctgaggaatttccaaagaatccataatatttttgatcaagaggctgagtgtgccaattggatgcgatgaattagtctagaaaat

SEQ ID NO: 9850 - DNA, 110 bp, synthetic construct
  source 1..110: mol_type = other DNA
aaatgagccagtatgaatgacttccaatggaaaataattttcatatcaaggccaaagcctaacatctttaaaaggaaaaaaatcccacatttgcaggaaaagttcaaatt

SEQ ID NO: 9851 - DNA, 110 bp, synthetic construct
  source 1..110: mol_type = other DNA
catggataccgtttgggtttgtttcccctgagccactgcaggagttcctcaatgtattttaaatagttatgtatatgatcacaatgcatagccagattcaagaactttca

SEQ ID NO: 9852 - DNA, 110 bp, synthetic construct
  source 1..110: mol_type = other DNA
gaattaccaggaagttctccttggtgcctgagctctgcaggcaagactcttaacaggagatgccatccgagtgagtggcccattaacagtggtattgcaattgcaataaa

SEQ ID NO: 9853 - DNA, 110 bp, synthetic construct
  source 1..110: mol_type = other DNA
taaaattgaatttaaaaagtgtaaagtgcaaggaaactcaagtgaagtaatagaaagaaaactggcattttcgcaagtgaagaggagaaccagcaaaagagaaaatcaaa

SEQ ID NO: 9854 - DNA, 110 bp, synthetic construct; identical to SEQ ID NO: 9853
  source 1..110: mol_type = other DNA

SEQ ID NO: 9855 - DNA, 110 bp, synthetic construct; identical to SEQ ID NO: 9853
  source 1..110: mol_type = other DNA

SEQ ID NO: 9856 - DNA, 110 bp, synthetic construct; identical to SEQ ID NO: 9853
  source 1..110: mol_type = other DNA

SEQ ID NO: 9857 - DNA, 110 bp, synthetic construct
  source 1..110: mol_type = other DNA
aacttggtgcttaattttggatttgggaaaatttagaatgccataaattctttatggatctatgtatagctatcgttctgatatcagacacctaaatatcaaatctggtt

SEQ ID NO: 9858 - DNA, 110 bp, synthetic construct
  source 1..110: mol_type = other DNA
ttggctattcctcaaatgaatatttgacctctcccctgatgggaactagaaggaataagagtatagcatgaagatggcaaagctattttataatagagataccatagtaa

SEQ ID NO: 9859 - DNA, 110 bp, synthetic construct
  source 1..110: mol_type = other DNA
tggcaatgtgtgtattagagataactagctttgaagtggatgcctctttgaaccgaatactgaggcaatcaaagcttaagtcaggcacttgcattacaaagacgaaaaac

SEQ ID NO: 9860 - DNA, 110 bp, synthetic construct
  source 1..110: mol_type = other DNA
caggggcaacataggggtgggggagtgagaagaacaaagtattgagtgtaagttaggctgaaagacgtatggttcaacatgaagagatagctaacattttgtaatatggc

SEQ ID NO: 9861 - DNA, 110 bp, synthetic construct
  source 1..110: mol_type = other DNA
ggctgaaagacgtatggttcaacatgaagagatagctaacattttgtaatatggcgccagcctacgccatatttacttattttttcatggcatagtccaaaactgaaatt

SEQ ID NO: 9862 - DNA, 110 bp, synthetic construct
  source 1..110: mol_type = other DNA
atgtatgttataaaataatcagaataactgtatctttttgtttaaatcactgtctcccaaatatgtggtttctatagctacagtttttacatttacagacagcaggtggt

SEQ ID NO: 9863 - DNA, 110 bp, synthetic construct
  source 1..110: mol_type = other DNA
gttttactttaggtttcaaactagataggagatgggaaaggtaattccattacttacacagagttgtttaaactgttgaaagaaaaacaaaacaggtagattgcatacgc

SEQ ID NO: 9864 - DNA, 110 bp, synthetic construct
  source 1..110: mol_type = other DNA
acacagagttgtttaaactgttgaaagaaaaacaaaacaggtagattgcatacgctaacagttggattactttagtaaaaattaccacattatgtagttgaaagatcatg

SEQ ID NO: 9865 - DNA, 110 bp, synthetic construct
  source 1..110: mol_type = other DNA
gatggacagaaggggagggagaagttacaggcactaaaaactgtcaatggtcatgtccaaattggaatcagattgttacgcactgtcacaccatagttactttagaaaag

SEQ ID NO: 9866 - DNA, 110 bp, synthetic construct
  source 1..110: mol_type = other DNA
tccaaattggaatcagattgttacgcactgtcacaccatagttactttagaaaaggccaagaatagggcagccacaatgttgcttcctgaaactttctattttctaagaa

SEQ ID NO: 9867 - DNA, 110 bp, synthetic construct
  source 1..110: mol_type = other DNA
tgccagtgagaaagtaaagtttaccgtaaaaagataaaaatatttgcctcttacacagatatctaggaagagttgtaaaatcatgttaaggatctagaggaaaaattaga

SEQ ID NO: 9868 - DNA, 110 bp, synthetic construct
  source 1..110: mol_type = other DNA
gcctcttacacagatatctaggaagagttgtaaaatcatgttaaggatctagaggaaaaattagatataaaactcctcagttatcatttaaaaatctctgagagcaaaaa

SEQ ID NO: 9869 - DNA, 110 bp, synthetic construct
  source 1..110: mol_type = other DNA
gtctacatagtgcatccctttcttctttatcaagtttctatgagtgcctacttgcatatttaattattattagactattaactgagaagaaggtcatctaggcccaagaa

SEQ ID NO: 9870 - DNA, 110 bp, synthetic construct
  source 1..110: mol_type = other DNA
gcctacttgcatatttaattattattagactattaactgagaagaaggtcatctaggcccaagaatatcagagatcttttaatgtacttgggtagctgaggttttatttt

SEQ ID NO: 9871 - DNA, 110 bp, synthetic construct
  source 1..110: mol_type = other DNA
cccattgtaggcatttaatacattttcatcatttacaaaactgagcttgtgaccgagtttgtgaccttttcagttgaaatggagaaaaaaaaatcaagcatctttccaga

SEQ ID NO: 9872 - DNA, 110 bp, synthetic construct
  source 1..110: mol_type = other DNA
atttatttctctcaagaacttttatctttaaaaggtggcaccatccattctctgttcctaagcttgatgattaggatagtctgctagaaaaagcaagacaggcaaaacca

SEQ ID NO: 9873 - DNA, 110 bp, synthetic construct
  source 1..110: mol_type = other DNA
tcctaagcttgatgattaggatagtctgctagaaaaagcaagacaggcaaaaccaaactgaatgtattggttttccctcaatctataattccttgataaccatttttctt

SEQ ID NO: 9874 - DNA, 110 bp, synthetic construct; identical to SEQ ID NO: 9872
  source 1..110: mol_type = other DNA

SEQ ID NO: 9875 - DNA, 110 bp, synthetic construct; identical to SEQ ID NO: 9873
  source 1..110: mol_type = other DNA

SEQ ID NO: 9876 - DNA, 110 bp, synthetic construct
  source 1..110: mol_type = other DNA
ctcagatgaagctcatagaatttgcatgttaccctgtcaggtttaaagttaaaacaccaaatatgaaatagtaactctttacaaagacaggctaagccttcctcaagaag

SEQ ID NO: 9877 - DNA, 110 bp, synthetic construct
  source 1..110: mol_type = other DNA
ctcatggataatagtcaggtttgttaacctctgaaccatgatgggaactctgaagaggaaaaggtgtgcttgtggcccgtacagggatcaaactggagaccttagcatta

SEQ ID NO: 9878 - DNA, 110 bp, synthetic construct
  source 1..110: mol_type = other DNA
attgcaactgcatcaactccataaagcccaaagcaagggaatcataaaggcatttccgttcttcaacatgaacgtgaaattcatttttcctgctcacatttcactggcca

SEQ ID NO: 9879 - DNA, 110 bp, synthetic construct
  source 1..110: mol_type = other DNA
ccgttcttcaacatgaacgtgaaattcatttttcctgctcacatttcactggccagacctaatcacttggccccatccaaattcaagaaggtgtgaaagcatagctttct

SEQ ID NO: 9880 - DNA, 110 bp, synthetic construct
  source 1..110: mol_type = other DNA
caggctaggggtcagatcagagctacagtctctggcaatgaggtatccgagccatgtctgcaacctacaccgacctgcaccacagctcacggcaaagctgggtccctgac

SEQ ID NO: 9881 - DNA, 110 bp, synthetic construct
  source 1..110: mol_type = other DNA
gcagtgagaatcctggctccttaagttactagccatcagggaactctactgttgtcttatatttttagctctaccttttagtctcaccttcagagagaaatgtagcctca

SEQ ID NO: 9882 - DNA, 110 bp, synthetic construct
  source 1..110: mol_type = other DNA
ctttgccccacagcaatcctgccaggtcactgtggtcactgttcccgctaattctttcaagccacgtgtaggctgggtgacaagggagctgctgagagggtagggtcagg

SEQ ID NO: 9883 - DNA, 110 bp, synthetic construct
  source 1..110: mol_type = other DNA
tacactttagttttctactcttaagagagtcagtatgtttgcattttaagaaactttcttccaagtggcccacataatggctctataatgccttcaaatttggcaaaaaa

SEQ ID NO: 9884 - DNA, 110 bp, synthetic construct
  source 1..110: mol_type = other DNA
ttcttccaagtggcccacataatggctctataatgccttcaaatttggcaaaaaattagccttcagaagagaaactgcagatattctttattcatcttattaggtttcca

SEQ ID NO: 9885 - DNA, 110 bp, synthetic construct
  source 1..110: mol_type = other DNA
gagggagagtggagggagtgagatggattggggttttggagttaatagatgaaaattattacatttaaatggatacacaacaatgtcctattatatagcacagggaactc

SEQ ID NO: 9886 - DNA, 110 bp, synthetic construct
  source 1..110: mol_type = other DNA
gagtgagatggattggggttttggagttaatagatgaaaattattacatttaaatggatacacaacaatgtcctattatatagcacagggaactctatccaatctcttgg

SEQ ID NO: 9887 - DNA, 110 bp, synthetic construct
  source 1..110: mol_type = other DNA
aatgtgaactcgagccccaaagtgatttagagacttgccctaagtattccacatgctgagtagtgaagatggattttgtacattgaattcttagctaatatccctcattc

SEQ ID NO: 9888 - DNA, 110 bp, synthetic construct
  source 1..110: mol_type = other DNA
aagactgttaaatgtatgtagtgtaaatggaagctttggactatcaatgaaaaaagtcattttgccaggtttaaataaaaacctatagtaaagataattgtccccaaggc

SEQ ID NO: 9889 - DNA, 110 bp, synthetic construct
  source 1..110: mol_type = other DNA
gtcattttgccaggtttaaataaaaacctatagtaaagataattgtccccaaggcacaacgttggtgagaaaggagacttcccatcctatagagtaaagagttttctgtc

SEQ ID NO: 9890 - DNA, 110 bp, synthetic construct
  source 1..110: mol_type = other DNA
agctatcagtctcttttcagccaagataaaatctgaattactaatcagcttccctctgcccccacgctcagtctaactcttagcacaggctgtttacatttggacttaat

SEQ ID NO: 9891 - DNA, 110 bp, synthetic construct
  source 1..110: mol_type = other DNA
aaatttggtagggcctaatattttaaatcacctgtccatgatctgagaggctttactaggacatttatcttcagaaagaaataaaaagacctagggattctatcattata

SEQ ID NO: 9892 - DNA, 110 bp, synthetic construct
  source 1..110: mol_type = other DNA
tttatagctcatggcaagcttaactcatggatatataaaggggaggcttctgtatacaaagatatgcctgaaggagcagctggaagtttatgtcagaaaagcttctccag

SEQ ID NO: 9893 - DNA, 110 bp, synthetic construct; identical to SEQ ID NO: 9892
  source 1..110: mol_type = other DNA

SEQ ID NO: 9894 - DNA, 110 bp, synthetic construct
  source 1..110: mol_type = other DNA
taggctgggcaagctccacatattcacatgtagttttagctcagtaaatcatttggaagactgcctctaaataaatttggtgcaatgcaaatgtagggataggctcaagt

SEQ ID NO: 9895 - DNA, 110 bp, synthetic construct
  source 1..110: mol_type = other DNA
gaagactgcctctaaataaatttggtgcaatgcaaatgtagggataggctcaagttaaattctctattcctgatacttcaggtatcctcatgcctcaattttttttagtt

SEQ ID NO: 9896 - DNA, 110 bp, synthetic construct
  source 1..110: mol_type = other DNA
aaagacttccctaaggactattagataagattttcctaccttggcataagtaaaataaaccatctggtccggatgatgtgttatgtttccagcagcagcagtagcctttg

SEQ ID NO: 9897 - DNA, 110 bp, synthetic construct
  source 1..110: mol_type = other DNA
taaaccatctggtccggatgatgtgttatgtttccagcagcagcagtagcctttgcttatactatagacctaacagaactaagaggttaaaaatgtatgaatattctgta

SEQ ID NO: 9898 - DNA, 110 bp, synthetic construct
  source 1..110: mol_type = other DNA
aaattggtacaaggactatataaaacagtatggaggtacctcggaaaactaaatatagaactataattgttcccatccatacgcttctgggtacctatccagacaaaact

SEQ ID NO: 9899 - DNA, 110 bp, synthetic construct
  source 1..110: mol_type = other DNA
aaactaaatatagaactataattgttcccatccatacgcttctgggtacctatccagacaaaactttcattgaaaaaaatacacacaccccatgttcattgcaccaatgt

SEQ ID NO: 9900 - DNA, 110 bp, synthetic construct
  source 1..110: mol_type = other DNA
tatcatcaagattcaaatactgctctttctctgttatgcttctctctggagggccttatgctcatgtcactcctgtttacagtagaagagggaggcttttagtcactctc

SEQ ID NO: 9901 - DNA, 110 bp, synthetic construct
  source 1..110: mol_type = other DNA
ttatgctcatgtcactcctgtttacagtagaagagggaggcttttagtcactctctacatcatttaagaattgtattagggaaaaaaatgtctatttattttgagctcaa

SEQ ID NO: 9902 - DNA, 110 bp, synthetic construct
  source 1..110: mol_type = other DNA
aaatagctgtagaggaaaaagtatcatgggagagctttttcctgttaagataaagaagcagagagaagatgagggcataaagagcaatgcctatgaagcagtatttccag

SEQ ID NO: 9903 - DNA, 110 bp, synthetic construct
  source 1..110: mol_type = other DNA
tttgtcttttgttataataccatgatgattctctgtataaatatgtcttcgtgtctgaatgtaaattcaaaattcagaacatatgaaccaaagcccttgtgttctttgca

SEQ ID NO: 9904 - DNA, 110 bp, synthetic construct
  source 1..110: mol_type = other DNA
tgaatgtaaattcaaaattcagaacatatgaaccaaagcccttgtgttctttgcattcgtcgtgtttttccttcatgaagtttcctccatggtgcctggaatgaaattca

SEQ ID NO: 9905 - DNA, 110 bp, synthetic construct
  source 1..110: mol_type = other DNA
aaagtgttgaggagatgagtgccacattgttctgcctttttagagtgtacaattgaataaaaggccgacacataactacccacacaatgaaaacaatattcaggaaagcc

SEQ ID NO: 9906 - DNA, 110 bp, synthetic construct
  source 1..110: mol_type = other DNA
gttaattgatcactgctccaagttcattgagattgcagtagaaacaggcatctcaagcagttcagctgagattagctgtatctcatcacaggagaggcaagatgtggcta

SEQ ID NO: 9907 - DNA, 110 bp, synthetic construct
  source 1..110: mol_type = other DNA
agcagttcagctgagattagctgtatctcatcacaggagaggcaagatgtggctactgcaggttctcctcactgacagtggacttccaattttaagtgcatatgcttcga

SEQ ID NO: 9908 - DNA, 110 bp, synthetic construct
  source 1..110: mol_type = other DNA
acagaagttgagttataccaccaaagagaaaaaaaaatcaatgagaattatacaatgcaatatgagaatgccttgttttaccacaaaaaacacaaacacttggagaagaa

SEQ ID NO: 9909 - DNA, 110 bp, synthetic construct
  source 1..110: mol_type = other DNA
tgcaatatgagaatgccttgttttaccacaaaaaacacaaacacttggagaagaaacagtatgctatcaaataacaaatggttgcttggtaaagaaatcaaggaggaaat

SEQ ID NO: 9910 - DNA, 110 bp, synthetic construct
  source 1..110: mol_type = other DNA
aaaagcttcagaaagcctctattgaaacaaaatgctgttcatatcctgatccatgctaggaggaataaatcgcacaaaagaacctaaagaaaactgttttatagttacta

SEQ ID NO: 9911 - DNA, 110 bp, synthetic construct
  source 1..110: mol_type = other DNA
actcctgttggaaaatcctctgcactcctgaaaataactccttaccagctgagtaaagcttaaccctcccctgcaacagataagaaaatgccacacatctagaaggtgag

SEQ ID NO: 9912 - DNA, 110 bp, synthetic construct
  source 1..110: mol_type = other DNA
gcgagagattaagatgagcctggaagctgcaaggagcctagatctcaaacgagaagcttagactctgttaggcagcatactaaaagccactgaaattttaaagcagtgtt

SEQ ID NO: 9913 - DNA, 110 bp, synthetic construct
  source 1..110: mol_type = other DNA
gcttagactctgttaggcagcatactaaaagccactgaaattttaaagcagtgttaagattttaaaacccactccagttcctcagtaaaggagaggtttaagggatgtat

SEQ ID NO: 9914 - DNA, 110 bp, synthetic construct; identical to SEQ ID NO: 9912
  source 1..110: mol_type = other DNA

SEQ ID NO: 9915 - DNA, 110 bp, synthetic construct; identical to SEQ ID NO: 9913
  source 1..110: mol_type = other DNA

SEQ ID NO: 9916 - DNA, 110 bp, synthetic construct
  source 1..110: mol_type = other DNA
gctactctgggctcagtggagtcacctgcaaatgggcttagaagggtgccttgacagtgcacagcagagctctggggtgggcggtgaggaggtaggaccagtttcagcag

SEQ ID NO: 9917 - DNA, 110 bp, synthetic construct
  source 1..110: mol_type = other DNA
agtgcacagcagagctctggggtgggcggtgaggaggtaggaccagtttcagcagtaccttcaggagctgaaggatcgatggagtagatggaggaaaaaatgtattaaga

SEQ ID NO: 9918 - DNA, 110 bp, synthetic construct
  source 1..110: mol_type = other DNA
ttaccagtcctgatccctgtcactgacagatgtctcaggctaccaggcacttgcggtcacctgcctgtggctgagcagctattaagtaagcggtttctaaagtatgcaat

SEQ ID NO: 9919 - DNA, 110 bp, synthetic construct
  source 1..110: mol_type = other DNA
agtttagatgtaacattgtcaaaatgggaggcttgctgtggtttcacaacttgaaacatctcactagacacaaagctacaaacttacatgaataatcctccattgttcca

SEQ ID NO: 9920 - DNA, 110 bp, synthetic construct
  source 1..110: mol_type = other DNA
acatctcactagacacaaagctacaaacttacatgaataatcctccattgttccatagatttatctaagcctgaacttcccattttcaccttcttgccagccatctcatg

SEQ ID NO: 9921 - DNA, 110 bp, synthetic construct
  source 1..110: mol_type = other DNA
agtttggttcatgataggcacaaaaggtataaattaaaagaagcaatgctaagtgactggccagtcatcctcagcttttcctgcatcctgtggttctgattcttaatggg

SEQ ID NO: 9922 - DNA, 110 bp, synthetic construct
  source 1..110: mol_type = other DNA
actggccagtcatcctcagcttttcctgcatcctgtggttctgattcttaatgggaccctcatataataatatattataatttgcatttgctatttatttaatttactgc

SEQ ID NO: 9923 - DNA, 110 bp, synthetic construct
  source 1..110: mol_type = other DNA
acatgccatgggtgcagcccccaaaaaaaataaataaataaaaaatagcacttcactgctcaggaacattgtaaacaacatgtcaggaaaatactctttacatgtaaccg

SEQ ID NO: 9924 - DNA, 110 bp, synthetic construct
  source 1..110: mol_type = other DNA
ctgctcaggaacattgtaaacaacatgtcaggaaaatactctttacatgtaaccgaagattaaatatgcaatactggaacaaaaatttcaatgaaaaactgttacaatgg

SEQ ID NO: 9925 - DNA, 110 bp, synthetic construct
  source 1..110: mol_type = other DNA
taaaccctgtgtcagtaggacatgtattcatagcagtgttctctgattttgtagttttgactagcatcctgtgaacccaaagctgtatcacagcaatattctctgacttg

SEQ ID NO: 9926 - DNA, 110 bp, synthetic construct
  source 1..110: mol_type = other DNA
tcactaatcgattcttgcttctagtgccagataaagtaaagctaagagataggttcaaacttgcatttaaaagttgaccatctttgtgactcagcagttaatgaaattga

SEQ ID NO: 9927 - DNA, 110 bp, synthetic construct
  source 1..110: mol_type = other DNA
atggaaaagaaacgtacctctttggtaagcacctattctgtttcaagcatgcaatgatgttatttctagtagggccactgagaaatgcacaactgatgagctatctatgt

SEQ ID NO: 9928 - DNA, 110 bp, synthetic construct
  source 1..110: mol_type = other DNA
atgcatttcatagacttgtggagatatctcaaggcttggcctattttaacctctttgttcctgttagctatcattatgattatgtataaagcatcaacatataaaagtaa

SEQ ID NO: 9929 - DNA, 110 bp, synthetic construct
  source 1..110: mol_type = other DNA
tttgtcttactttgagatgattggtaatactgtgcagggatgaaactaaggatgagaataactcctggggtggaggatggggtaggtccatagaatgtcctgttacacct

SEQ ID NO: 9930 - DNA, 110 bp, synthetic construct
  source 1..110: mol_type = other DNA
gaataactcctggggtggaggatggggtaggtccatagaatgtcctgttacacctgtagaaaagtagggttgtgagaatatcatcttgtgattcaacattttgtttgatt

SEQ ID NO: 9931 - DNA, 110 bp, synthetic construct
  source 1..110: mol_type = other DNA
tacatagtgtggaaatctgaggtaagggtgagttctgatacatacagtttgtaaagtatttagaccaaagtaaataatttgatgccttttagtttgatgtagacaactct

SEQ ID NO: 9932 - DNA, 110 bp, synthetic construct
  source 1..110: mol_type = other DNA
acacctaaataagaccaggacaaccttaatttgttatgaatgggcagtaagagatgttgtgagaaaagttgacagagtaattccctcgaatctatattcctttgtttctg

SEQ ID NO: 9933 - DNA, 110 bp, synthetic construct
  source 1..110: mol_type = other DNA
ggcagcaaacccaaacttcctgaatttcaaaattattttccaggctgccctggcacttagaaataggaagttttctcctccttcgtttgctgagctcaggttttctcaac

SEQ ID NO: 9934 - DNA, 110 bp, synthetic construct
  source 1..110: mol_type = other DNA
cttagaaataggaagttttctcctccttcgtttgctgagctcaggttttctcaactgttgtcatggggattggatgatcctttgtggcttgggctgtcctgtgcattgta

SEQ ID NO: 9935 - DNA, 110 bp, synthetic construct; identical to SEQ ID NO: 9933
  source 1..110: mol_type = other DNA

SEQ ID NO: 9936 - DNA, 110 bp, synthetic construct; identical to SEQ ID NO: 9934
  source 1..110: mol_type = other DNA

SEQ ID NO: 9937 - DNA, 110 bp, synthetic construct
  source 1..110: mol_type = other DNA
aagcacacataaaaatcagctaagagtgtataaaccattccacaggccatagaggttggatcagcagtgcttctgcaaaaagttaagtagccaggtagagttgttgactg

SEQ ID NO: 9938 - DNA, 110 bp, synthetic construct
  source 1..110: mol_type = other DNA
aatgtactgtgaggttccctaatatgaagatggggcataggtcttaagtaggcccaagtccattgccctccaagactcttggcgatcttggctccactcttttggaggtc

SEQ ID NO: 9939 - DNA, 110 bp, synthetic construct
  source 1..110: mol_type = other DNA
aagtccattgccctccaagactcttggcgatcttggctccactcttttggaggtcctttcatttccattaatgtgtataagaagaaataggaatgtatgttctgcttgag

SEQ ID NO: 9940 - DNA, 110 bp, synthetic construct
  source 1..110: mol_type = other DNA
ttttatgagctgggcaatttggttggctaatgagagggaggattattccaattgtttccaggcagaggtaggggtttccaggaattcagccactgcccatttttttagcc

SEQ ID NO: 9941 - DNA, 110 bp, synthetic construct
  source 1..110: mol_type = other DNA
gctgatttctctgtcagataggtggcctccagggtagggattcctttcctctttcacagctttctctttaggagtactgatccattcttgattccttctcttctcttctc

SEQ ID NO: 9942 - DNA, 110 bp, synthetic construct
  source 1..110: mol_type = other DNA
caaacccacaacctcacagagataatgtcggatccttatcccactgagctacaatggtaactcctaaaatacgttttttagattgacagtttcttataaaatttaatacg

SEQ ID NO: 9943 - DNA, 110 bp, synthetic construct
  source 1..110: mol_type = other DNA
aggtttcaaatactataacattcacacatatgttataatttagaatagaaggatttcctgtcctggccctgtagttaacaactccaactagtatccatgaagatgcaggt

SEQ ID NO: 9944 - DNA, 110 bp, synthetic construct
  source 1..110: mol_type = other DNA
ctggacccaaggggccctgagtctagtgtttccctactgatacttagagccaaggtcctgggttcctggagctggtaccagtctgcaatggtgagggcctgttctaaaga

SEQ ID NO: 9945 - DNA, 110 bp, synthetic construct
  source 1..110: mol_type = other DNA
acaaaacaaaatgcttattcaaccacttggcccagagaaagaatgttcaaccacactgccaaaagttaccatttttttctgatctttccaacatgatttgggtgatctgt

SEQ ID NO: 9946 - DNA, 110 bp, synthetic construct
  source 1..110: mol_type = other DNA
gatattttatttgaatattgcttgatgaaaaggaactcacaggagagtgatgatgggataggtcaagcagacagagaagaaagcttataggcagttacatatggaaatta

SEQ ID NO: 9947 - DNA, 110 bp, synthetic construct
  source 1..110: mol_type = other DNA
ggataggtcaagcagacagagaagaaagcttataggcagttacatatggaaattagggagtcatttagaacatggattctgatttacaccattagtgagctccctgaatc

SEQ ID NO: 9948 - DNA, 110 bp, synthetic construct
  source 1..110: mol_type = other DNA
aagtaagggcagcacatcagtataatactaatgttacaaacatttttattaatgaataatcacccatgatactgaagacagaaactgttctcaaaattttgtctcctccc

SEQ ID NO: 9949 - DNA, 110 bp, synthetic construct
  source 1..110: mol_type = other DNA
aggtccacaactgggtataactgtcaactatgctccttggccagatggagccactggctcagctcttaagttaagcagagcgactgggtaggccttcaacttgggaacta

SEQ ID NO: 9950 - DNA, 110 bp, synthetic construct
  source 1..110: mol_type = other DNA
ggctcagctcttaagttaagcagagcgactgggtaggccttcaacttgggaactaccctgagcagaaatgtaatacaccaagatatgcattctggttgctgtgagccacc

SEQ ID NO: 9951 - DNA, 110 bp, synthetic construct; identical to SEQ ID NO: 9949
  source 1..110: mol_type = other DNA

SEQ ID NO: 9952 - DNA, 110 bp, synthetic construct; identical to SEQ ID NO: 9950
  source 1..110: mol_type = other DNA

SEQ ID NO: 9953 - DNA, 110 bp, synthetic construct
  source 1..110: mol_type = other DNA
ttgtgaatctccctttttggtgctagggaactgtgatcccgagagactgttttaccttacatttgtttctttgatatatgacagcacctgccatgataaccagagctctg

SEQ ID NO: 9954 - DNA, 110 bp, synthetic construct
  source 1..110: mol_type = other DNA
cttacatttgtttctttgatatatgacagcacctgccatgataaccagagctctgttccatttggttgtcctcctagtgtacattttgcatactgggagatctttagtat

SEQ ID NO: 9955 - DNA, 110 bp, synthetic construct
  source 1..110: mol_type = other DNA
gtgcagctgctggcttaggacatattcatagcaatgccagatccaggccatgtgttcgacctacacagcagcccacaccacagctcagggtattgcgagtccttaagcca

SEQ ID NO: 9956 - DNA, 110 bp, synthetic construct
  source 1..110: mol_type = other DNA
gtgccacactagaaacttaggctttttcaatcattttgtttagattctaggagttgatttaacactctaaggtcccatatttctggattttctctattactaaaattttt

SEQ ID NO: 9957 - DNA, 110 bp, synthetic construct
  source 1..110: mol_type = other DNA
taaggagttatatgtaattatcatctaccagaactgatgggactgtatcccccaataatcaacaagaaagctcaatgtttttaaaacttgggattttttccttctcttcc

SEQ ID NO: 9958 - DNA, 110 bp, synthetic construct
  source 1..110: mol_type = other DNA
ctctgggtcacgaccatgtcaagttcaagtggtgtgttttgaggtagctattggctcaatacaattttaggcagcctgtcatctcttttctcggaatatgctggtcttta

SEQ ID NO: 9959 - DNA, 110 bp, synthetic construct
  source 1..110: mol_type = other DNA
ctactttattttacttctttttctcttactctgtgattttaggaaaaacaattatcttctttgttcttacagggctgtttatattttggaagatatctgtgtagcttgcc

SEQ ID NO: 9960 - DNA, 110 bp, synthetic construct
  source 1..110: mol_type = other DNA
cttctttgttcttacagggctgtttatattttggaagatatctgtgtagcttgcctgagtttagtatttttgccacaggggctgtttttagtattgatgcctgccaccaa

SEQ ID NO: 9961 - DNA, 110 bp, synthetic construct
  source 1..110: mol_type = other DNA
ttgttcctagtcagattcatctccgctgcaccatgacgggaactccaacatttttcttaacattaaaaaaagatttttgtgactgcttatagaaatatactatagtacta

SEQ ID NO: 9962 - DNA, 110 bp, synthetic construct
  source 1..110: mol_type = other DNA
ttcatctccgctgcaccatgacgggaactccaacatttttcttaacattaaaaaaagatttttgtgactgcttatagaaatatactatagtactactgaagaagtctagc

SEQ ID NO: 9963 - DNA, 110 bp, synthetic construct
  source 1..110: mol_type = other DNA
ctttgtctaatatagttttacataattcatatggaaaacttggaaagcttcactacagtctaaaagatcttgctgctgggaactgcgataataagcataattttcttctg

SEQ ID NO: 9964 - DNA, 110 bp, synthetic construct
  source 1..110: mol_type = other DNA
cagtctaaaagatcttgctgctgggaactgcgataataagcataattttcttctgcttaatttccactagtttaatccatgcctccagaaatgcataaatgttgatcaca

SEQ ID NO: 9965 - DNA, 110 bp, synthetic construct
  source 1..110: mol_type = other DNA
aaatacattgttgttggtactgcttttggcccaccttaaccatgggtttgttgattattgtcccaggtgtctctcaggcatttttttttcatctggctaccagtactgat

SEQ ID NO: 9966 - DNA, 110 bp, synthetic construct
  source 1..110: mol_type = other DNA
agagtattgggaaactagtgggatttattataaattttgggggaaaatgaatttaacaagaggtaatgctgtggtgatgaattcaatgtttttaatgttctttgacagat

SEQ ID NO: 9967 - DNA, 110 bp, synthetic construct; identical to SEQ ID NO: 9966
  source 1..110: mol_type = other DNA

SEQ ID NO: 9968 - DNA, 110 bp, synthetic construct
  source 1..110: mol_type = other DNA
aacaaaattatttgttgtagtcttttcatattgccctattatctctagtcactcctatgtaagttatttggttttctgagtgttttatttccctcccattaaactgactg

SEQ ID NO: 9969 - DNA, 110 bp, synthetic construct
  source 1..110: mol_type = other DNA
aagctgactagtatccatgaggatgcatatttgatccctagacccacttagtgtgttaaagatctatcattgctatgagctacggtgtaggttgcagacattaacacaga

SEQ ID NO: 9970 - DNA, 110 bp, synthetic construct
  source 1..110: mol_type = other DNA
catatttgatccctagacccacttagtgtgttaaagatctatcattgctatgagctacggtgtaggttgcagacattaacacagatctgggttgctgtggctgtggtata

SEQ ID NO: 9971 - DNA, 110 bp, synthetic construct; identical to SEQ ID NO: 9970
  source 1..110: mol_type = other DNA

SEQ ID NO: 9972 - DNA, 110 bp, synthetic construct; identical to SEQ ID NO: 9970
  source 1..110: mol_type = other DNA

SEQ ID NO: 9973 - DNA, 110 bp, synthetic construct
  source 1..110: mol_type = other DNA
ttgtgtcattggataaagcaacaaccagagatctttgtgaattttgtagttctttctgtacatcagcttaatgttaacaaattttctaacagaataacaatagctcaaat

SEQ ID NO: 9974 - DNA, 110 bp, synthetic construct
  source 1..110: mol_type = other DNA
gctgccagcagtggcactgttcatcccccaagaggtcagggaaaacacagaaactttggttctgcccaaagaatctgaatggtcacagtgccagaagacctgctgaaagc

SEQ ID NO: 9975 - DNA, 110 bp, synthetic construct
  source 1..110: mol_type = other DNA
ttggttctgcccaaagaatctgaatggtcacagtgccagaagacctgctgaaagcagcattcacttcccgcaaaagcaaagacctacttgagcagggaaaatacaggaat

SEQ ID NO: 9976 - DNA, 110 bp, synthetic construct; identical to SEQ ID NO: 9974
  source 1..110: mol_type = other DNA

SEQ ID NO: 9977 - DNA, 110 bp, synthetic construct; identical to SEQ ID NO: 9975
  source 1..110: mol_type = other DNA

SEQ ID NO: 9978 - DNA, 110 bp, synthetic construct
  source 1..110: mol_type = other DNA
ctaatgtagttcaaacaaatcttgcagttaattaaagagaactttaccaagaattctggctggtcttccagaatactgcattacattgttcagctcagcacagtctaaaa

SEQ ID NO: 9979 - DNA, 110 bp, synthetic construct
  source 1..110: mol_type = other DNA
ctggctggtcttccagaatactgcattacattgttcagctcagcacagtctaaaattagcccctagtttaaggactaataaacttctttggccaacaatttgtcccagac

SEQ ID NO: 9980 - DNA, 110 bp, synthetic construct
  source 1..110: mol_type = other DNA
tatatatcaaactaaaaatataaatttaaacaaaatgagatggcaaagacatatgttcaagaaatagggaacaagacagagccctagaaaacaaccaagtgaaatggaga

SEQ ID NO: 9981 - DNA, 110 bp, synthetic construct
  source 1..110: mol_type = other DNA
tgcctctctggaaggcccaagcttcttttcagttacctcaattttgggaaccccaccctagctccctcagtttgtctccttgcagccaatcccagtactccccctaatct

SEQ ID NO: 9982 - DNA, 110 bp, synthetic construct
  source 1..110: mol_type = other DNA
taaggcaggttttggctttttcccaatccaccctcagctgtcattggacaagaatccagccccttcaggctgtagccatggagccaaccgtggcctctccctgggttagt

SEQ ID NO: 9983 - DNA, 110 bp, synthetic construct
  source 1..110: mol_type = other DNA
tctttttgatctaaaggcccttaactcattcctgcttactgattgcatttgccctctgtggatatttgcatgtcttattatcactttattcaacttgtcctttcaaatta

SEQ ID NO: 9984 - DNA, 110 bp, synthetic construct
  source 1..110: mol_type = other DNA
atctagagcagagtaagacaatgtagagctcatgtcccccacaaacacatcaaaagtacatgtacaaatacagtgattctcataaaaaactaactgaaactggaagaagg

SEQ ID NO: 9985 - DNA, 110 bp, synthetic construct
  source 1..110: mol_type = other DNA
acaccggccattgccattgttgtgttgtatagatctgggcttttaacttattcaataaaatgttggattttttttttaaagcagcaagtaatttactaggagatgacatt

SEQ ID NO: 9986 - DNA, 110 bp, synthetic construct
  source 1..110: mol_type = other DNA
gatggcctctctttgtctgcattgtggtagcttctcattagctgggctgttgtgggtgtgtagagcaaacttcttccaggaggaatgcaaggtctgcaaacagcagtcaa

SEQ ID NO: 9987 - DNA, 110 bp, synthetic construct
  source 1..110: mol_type = other DNA
gcacttcccagtgcatcccccctacccctaccccatgaacactcacgaaacctgaggctgcctgccattctgaagggctggcctcaccacttgtgggaagctgaccacca

SEQ ID NO: 9988 - DNA, 110 bp, synthetic construct
  source 1..110: mol_type = other DNA
ggctgcctgccattctgaagggctggcctcaccacttgtgggaagctgaccaccacagaggctttcactgctctggcctgcctgccctctggagggtatacacccccacg

SEQ ID NO: 9989 - DNA, 110 bp, synthetic construct
  source 1..110: mol_type = other DNA
tttacatatgctgtttcattaaatcaacagccttaaaaagtgggcattatcttcatcatagagatgagaatactgagcctcagaaatggttaagaaatctgttaagggtc

SEQ ID NO: 9990 - DNA, 110 bp, synthetic construct; identical to SEQ ID NO: 9989
  source 1..110: mol_type = other DNA

SEQ ID NO: 9991 - DNA, 110 bp, synthetic construct
  source 1..110: mol_type = other DNA
gccacagcaatcagatgagaaaaaaagataaaacatatccaaattggaaagaaagaaaattgttatttgcagatggcatatactataaataaaaagcccttatgatgcca

SEQ ID NO: 9992 - DNA, 110 bp, synthetic construct; identical to SEQ ID NO: 9991
  source 1..110: mol_type = other DNA

SEQ ID NO: 9993 - DNA, 110 bp, synthetic construct
  source 1..110: mol_type = other DNA
gtctgctcctgtgtgtatttcccctatagaggcagggtgaagagtgggtcatatacctttcttagaaggaggtaggccaggtggctcatggttggggaaggggcattaca

SEQ ID NO: 9994 - DNA, 110 bp, synthetic construct
  source 1..110: mol_type = other DNA
cctttcttagaaggaggtaggccaggtggctcatggttggggaaggggcattacaatgtgatggatggggcaatgataagggtctgatattttttgtcttaaagttcaaa

SEQ ID NO: 9995 - DNA, 110 bp, synthetic construct
  source 1..110: mol_type = other DNA
tgttggcctttctaatagttttcagtactgaagccttgtctccttctctgtcatcttgtctcagtcagggctttactctcctgctctaaagctaagacctgaatagatat

SEQ ID NO: 9996 - DNA, 110 bp, synthetic construct
  source 1..110: mol_type = other DNA
ttgtctcagtcagggctttactctcctgctctaaagctaagacctgaatagatatttgtccaaagagggcatacccatggccaaaaagcacatgaaatgagtacatagct

SEQ ID NO: 9997 - DNA, 110 bp, synthetic construct
  source 1..110: mol_type = other DNA
ttaaagcaagagaatgcattccccagaccacccccaacacactaacaattttcgggtaaaaataacagtagaatatggatgaaagggctataggaatacaatctctctga

SEQ ID NO: 9998 - DNA, 110 bp, synthetic construct
  source 1..110: mol_type = other DNA
tggtagcatgccatgtcttcctctggtttctgagatgactgctgtggtttgtcccaccacctgaggtcacagaagaggcactacattgtgcttaaccccccactgccctt

SEQ ID NO: 9999 - DNA, 110 bp, synthetic construct
  source 1..110: mol_type = other DNA
accacctgaggtcacagaagaggcactacattgtgcttaaccccccactgcccttagctcacacaaaagttgtccagccacccatagcccacatgagaagtgcccagtct

SEQ ID NO: 10000 - DNA, 110 bp, synthetic construct
  source 1..110: mol_type = other DNA
aagttaatgccatgtcatccaaagtgtttagaagataatctcctggagttcccattatgactcaatgggttaagaacccaaaaaagtgtctgtgatgatgcaaattcaat

SEQ ID NO: 10001 - DNA, 110 bp, synthetic construct
  source 1..110: mol_type = other DNA
tttgcagatgtactgcagaccaagtttctgggcagaggactgccaaccaggatgccaactgtcccaggcaggaaagcagaaaactccctatggacataagcttgccagat

SEQ ID NO: 10002 - DNA, 110 bp, synthetic construct
  source 1..110: mol_type = other DNA
caactgtcccaggcaggaaagcagaaaactccctatggacataagcttgccagataaaagagggaattctgagtgaaattgaaatatcagataaacaataaatgaaagtt

SEQ ID NO: 10003 - DNA, 110 bp, synthetic construct
  source 1..110: mol_type = other DNA
tcaaactgcaccacagcagtggcctgagccacagcaatgacaacaacagatccttagcccactgaacctcaagagaacgccaatctaatttaatattttaaagtggataa

SEQ ID NO: 10004 - DNA, 110 bp, synthetic construct
  source 1..110: mol_type = other DNA
agcccactgaacctcaagagaacgccaatctaatttaatattttaaagtggataatagtggggtcatgatcatagaaaattgatgtctttgcaatacccattaatagaaa

SEQ ID NO: 10005 - DNA, 110 bp, synthetic construct
  source 1..110: mol_type = other DNA
ttttatcagcagaagtaccagagcaagcttttctctcattttactccaaagggcaacagcactgagctataatgaggtaatttttttttccagccatgcacactctgcgt

SEQ ID NO: 10006 - DNA, 110 bp, synthetic construct
  source 1..110: mol_type = other DNA
agaaggcagaattggagatggaagttggaaaataaaaatgataaatttagcataaggaagagatggtgaataccatttagtttaagtagttattcactaaatagcacccc

SEQ ID NO: 10007 - DNA, 110 bp, synthetic construct
  source 1..110: mol_type = other DNA
tgcttctacgaggatggggccctcttgaaatccatctctacttgagccagagtgatccatcagcattataaaggagagcttggcatatccccttgctttaaaccttatac

SEQ ID NO: 10008 - DNA, 110 bp, synthetic construct
  source 1..110: mol_type = other DNA
acagtcaaatatttgtagtcacattttttttttcttttcatggccatccctgccgcatagggaatttccagtgctagagggctgaattagagctgcatctgcagccctat

SEQ ID NO: 10009 - DNA, 110 bp, synthetic construct
  source 1..110: mol_type = other DNA
aaaaatcaaaatgagataaagcaaaaaacccagcgaacatccttctactatccttacagtgggtctcattgtttgagatcaatggttggtccctgtcattttacctgttt

SEQ ID NO: 10010 - DNA, 110 bp, synthetic construct
  source 1..110: mol_type = other DNA
cacccccaacctcttgtccctcactccctggtgaaaatgagaactttgccctctagttgcctctacaaggagagtagatactctccaatcctggaattaataaagcatac

SEQ ID NO: 10011 - DNA, 110 bp, synthetic construct
  source 1..110: mol_type = other DNA
tagggatcatatttaagcataaagctataaaatgcaaagcaaaggcataatgattagagtgatgagcagctgagtacacaatggatgttctttaaatattggtataattg

SEQ ID NO: 10012 - DNA, 110 bp, synthetic construct
  source 1..110: mol_type = other DNA
ggaacaaggcaggaggactatcctaaggatggctcctgactgacattagaaaagtgaggtttaaagcttcaaggatactataaatcatcaaagatgagacagattccaac

SEQ ID NO: 10013 - DNA, 110 bp, synthetic construct
  source 1..110: mol_type = other DNA
gaggtttaaagcttcaaggatactataaatcatcaaagatgagacagattccaacatacattatttgagtatatgagttacactcagacagtaatatgaatttaagtcct

SEQ ID NO: 10014 - DNA, 110 bp, synthetic construct
  source 1..110: mol_type = other DNA
taaccagcacagaagtttaatcaagaaaattagggtgtgataactgatcatattcctttcattttaaatcataattttattctgtggaataactttagctgaggtactga

SEQ ID NO: 10015 - DNA, 110 bp, synthetic construct
  source 1..110: mol_type = other DNA
gctaaatgaactgatgtaatctcagcacagccacgcaggtgataatagtgggggaattctcattactcctggatctgggggaggagaaggagatggagtgaagcactcca

SEQ ID NO: 10016 - DNA, 110 bp, synthetic construct
  source 1..110: mol_type = other DNA
agatcaggactgttgggcttgaaggtggttggaggtgcggggccccagtcaaatcttcctatgctctgctcttccagctcagctggtaggcttattgtcccattgatagg

SEQ ID NO: 10017 - DNA, 110 bp, synthetic construct
  source 1..110: mol_type = other DNA
gagaaaataaaagtcaagaaggaatgttataaaatccataaattcaagaatatcatgagaggatggacatgaaaatttttagcaatctgagaatatttgaagagcctgtc

SEQ ID NO: 10018 - DNA, 110 bp, synthetic construct
  source 1..110: mol_type = other DNA
cagaggaaaaattgtataatgcctcccaggtgtgtaagagaggtgaaaaactatagctcatctgatgtactgttcatgacttagtgggcttattagttcccgaatgaaga

SEQ ID NO: 10019 - DNA, 110 bp, synthetic construct
  source 1..110: mol_type = other DNA
ttaaacatgcaaacttgttcacctgcccagcatgaatgctaccctttctgccataagcatatgtcatttccaaacagtttacgcatttattatgtttaaacaatatctct

SEQ ID NO: 10020 - DNA, 110 bp, synthetic construct
  source 1..110: mol_type = other DNA
agcatatgtcatttccaaacagtttacgcatttattatgtttaaacaatatctcttatccatgatgcaggtagataaagatctcactttagcttctttggaagacaagaa

SEQ ID NO: 10021 - DNA, 110 bp, synthetic construct; identical to SEQ ID NO: 10019
  source 1..110: mol_type = other DNA

SEQ ID NO: 10022 - DNA, 110 bp, synthetic construct; identical to SEQ ID NO: 10020
  source 1..110: mol_type = other DNA

SEQ ID NO: 10023 - DNA, 110 bp, synthetic construct
  source 1..110: mol_type = other DNA
ccttttggtcagtgtgactagatgaacacagctctctcaaaagcattatggttacagatgaaggtgcaagcagatatggctggaaaagttcctttgtctggaaatatttt

SEQ ID NO: 10024 - DNA, 110 bp, synthetic construct
  source 1..110: mol_type = other DNA
aattagaagacttctcttttctgaaagtctactattagaggctactttagcaccgtgtaagctaagttcctcaggttatgcttttctgaccttcgtggtgacttccccaa

SEQ ID NO: 10025 - DNA, 110 bp, synthetic construct
  source 1..110: mol_type = other DNA
atgcatcatacacatacacatacaacaagatagaacaccccatgggcaagtaccagctctagcacaccctgggctgatccatgagcaagacaatacaccatctccaaggc

SEQ ID NO: 10026 - DNA, 110 bp, synthetic construct
  source 1..110: mol_type = other DNA
gctctagcacaccctgggctgatccatgagcaagacaatacaccatctccaaggccctctgtggtcctgcagccactcagcagcgagtcagcatcaaccccatgaacact

SEQ ID NO: 10027 - DNA, 110 bp, synthetic construct; identical to SEQ ID NO: 10025
  source 1..110: mol_type = other DNA

SEQ ID NO: 10028 - DNA, 110 bp, synthetic construct; identical to SEQ ID NO: 10026
  source 1..110: mol_type = other DNA

SEQ ID NO: 10029 - DNA, 110 bp, synthetic construct
  source 1..110: mol_type = other DNA
tgggatgtggggcttttctagggggccagcattgctggttagctgttccatggtagtgcagcaccccccaactgtgggagcagccagctgggccactgagaacccaaggg

SEQ ID NO: 10030 - DNA, 110 bp, synthetic construct; identical to SEQ ID NO: 10029
  source 1..110: mol_type = other DNA

SEQ ID NO: 10031 - DNA, 110 bp, synthetic construct
  source 1..110: mol_type = other DNA
gtgggaatgtaagctgtgcagaacagtatggataatagtatggagaacagtatggactcttgggcatgtatctggacaaaactttccttaaaaatatacatgcacccaca

SEQ ID NO: 10032 - DNA, 110 bp, synthetic construct; identical to SEQ ID NO: 10031
  source 1..110: mol_type = other DNA

SEQ ID NO: 10033 - DNA, 110 bp, synthetic construct
  source 1..110: mol_type = other DNA
aactacgcacttagagttcagagatgattgcttcattcctttaaaagtaaagctgagttaagcaataagagtgttgcagttgattataggaaggacaaatatcatttaaa

SEQ ID NO: 10034 - DNA, 110 bp, synthetic construct; identical to SEQ ID NO: 10033
  source 1..110: mol_type = other DNA

SEQ ID NO: 10035 - DNA, 110 bp, synthetic construct
  source 1..110: mol_type = other DNA
tgtttctaagtagccttctgagaagcttcagggataaaatgcacagtgtctcaagaagaaccttttcctgcctattacttccagccccagaaactcttcacttctctaaa

SEQ ID NO: 10036 - DNA, 110 bp, synthetic construct
  source 1..110: mol_type = other DNA
acatgtactttagaactctgaatcagtagatatttgccttccacagtgttcatctgttcagtggtctttgacaagctgacaaactgtgaccagacttaccaaggagagga

SEQ ID NO: 10037 - DNA, 110 bp, synthetic construct
  source 1..110: mol_type = other DNA
ttttgcttattttttaaatttactttcttgtcgagggctggaggtaaaaattacagtcttctactttcctttgccatgatcatagctcttatcccataggacaagaacct

SEQ ID NO: 10038 - DNA, 110 bp, synthetic construct
  source 1..110: mol_type = other DNA
actccaaacaaatctaaatgaattaaaaatctaggaagtgactgagatttccccagaggtaagtgatccatgatttatttcctccatagatttccacagttttgagatgg

SEQ ID NO: 10039 - DNA, 110 bp, synthetic construct; identical to SEQ ID NO: 10038
  source 1..110: mol_type = other DNA

SEQ ID NO: 10040 - DNA, 110 bp, synthetic construct
  source 1..110: mol_type = other DNA
tttcatcatatattcctatctcagtgatcttgaattgcacaagtcagaaaccactaagttattcctagctccttttttaaattactgtcaacatctctgaggggtcgtgg

SEQ ID NO: 10041 - DNA, 110 bp, synthetic construct
  source 1..110: mol_type = other DNA
tagcaccagtcccttatctgaatcaataggtttaggtttcatataaaaaaagcgtatttttaaacattcttacaaagtttccatgattaagaaactcctcatgtttatac

SEQ ID NO: 10042 - DNA, 110 bp, synthetic construct
  source 1..110: mol_type = other DNA
acaatatctgtctctgtctgatctggcctcgtggatggaaactgtacaatgacagtggagtcactggggataaaacaaattatagctttctaaaatcaaaacttcattca

SEQ ID NO: 10043 - DNA, 110 bp, synthetic construct
  source 1..110: mol_type = other DNA
tccattctttcctttatccattcagaaagtatatcctgatcactggctttatctagacactgtgataggtactaggatttgagtagtagatataatggatatattcccct

SEQ ID NO: 10044 - DNA, 110 bp, synthetic construct; identical to SEQ ID NO: 10043
  source 1..110: mol_type = other DNA

SEQ ID NO: 10045 - DNA, 110 bp, synthetic construct
  source 1..110: mol_type = other DNA
ggaaaagattgtctcttcagttaagtgatattgaaaaattggacagctacatgcaaaacaatcaaactggactactttcttacatcatacccaaaaacaaaataaaaatg

SEQ ID NO: 10046 - DNA, 110 bp, synthetic construct; identical to SEQ ID NO: 10045
  source 1..110: mol_type = other DNA

SEQ ID NO: 10047 - DNA, 110 bp, synthetic construct
  source 1..110: mol_type = other DNA
taggtacatttaattttaaagagcatgccatttacatatatttctattgctaagttaattaaacaatgagaccgctaaactgaagtggctctgatgccctagtggcttcc

SEQ ID NO: 10048 - DNA, 110 bp, synthetic construct; identical to SEQ ID NO: 10047
  source 1..110: mol_type = other DNA

SEQ ID NO: 10049 - DNA, 110 bp, synthetic construct
  source 1..110: mol_type = other DNA
tggatgtgtggatatgtatgaacttaaaagaaaatagttcttctctacaaagagcctggggtatgaactttttgaggaaatggacctttcttattgttaaacctcttacc

SEQ ID NO: 10050 - DNA, 110 bp, synthetic construct
  source 1..110: mol_type = other DNA
ctggggtatgaactttttgaggaaatggacctttcttattgttaaacctcttaccactcttcacagattttctgtgcttttcatataaaatataaaattgtttatgagta

SEQ ID NO: 10051 - DNA, 110 bp, synthetic construct
  source 1..110: mol_type = other DNA
tgaatgcctcctggtaactctggtttgagttggtggttcagaactggaaatatgacagccctgaaggctaataaaatttaaagttcagtagacaatacaggttttatact

SEQ ID NO: 10052 - DNA, 110 bp, synthetic construct
  source 1..110: mol_type = other DNA
cgaactggcatcctcacgaatactacatcaggtcctttaaaggggcatatgtagatacaatgcaagtaataatttatgaaaacagatacaaaaattgtttacatatatat

SEQ ID NO: 10053 - DNA, 110 bp, synthetic construct
  source 1..110: mol_type = other DNA
aaaaaaacactctcgagtgttagagagattaaaaaattttttaaataacttcggtcaggctaggactggaagaagcatcttgattcctataaagaaacatgggagagagc

SEQ ID NO: 10054 - DNA, 110 bp, synthetic construct
  source 1..110: mol_type = other DNA
aagggcagcagggagctaaggtaatgcaccacctcctgcctaatctccaggtggtgggggcaaaccacattagtcatttcaggcaccagaggtgggcgtggcctgccgac

SEQ ID NO: 10055 - DNA, 110 bp, synthetic construct
  source 1..110: mol_type = other DNA
gggggcaaaccacattagtcatttcaggcaccagaggtgggcgtggcctgccgacaataagggtccatgaacagatgccacctgtggccccagtcgcctcagaggttggc

SEQ ID NO: 10056 - DNA, 110 bp, synthetic construct
  source 1..110: mol_type = other DNA
ccagcactgcaagctcctggaaaaggaccccagcccagaaaagctagaacaatcttggcccagctgtgcaaagtctgcctctattctgaggcagccctaccaattctgac

SEQ ID NO: 10057 - DNA, 110 bp, synthetic construct; identical to SEQ ID NO: 10056
  source 1..110: mol_type = other DNA

SEQ ID NO: 10058 - DNA, 110 bp, synthetic construct
  source 1..110: mol_type = other DNA
tgctggctttctctgtgggagtggagtgcttctcaagtgtgggcagagctagctggcttgctccgcaggagtgtggcgcctcctgtgtgtagacaggctgggccagggaa

SEQ ID NO: 10059 - DNA, 110 bp, synthetic construct
  source 1..110: mol_type = other DNA
ggaagccaatttgaacaaatgccctaaagactgaggtcagaagttatgtgttggctagaacaaggggtatgttttctgggcaacattgagctttctcaagcagtcatttc

SEQ ID NO: 10060 - DNA, 110 bp, synthetic construct
  source 1..110: mol_type = other DNA
tagaacaaggggtatgttttctgggcaacattgagctttctcaagcagtcatttcaatggatttcttctgccagaagctatgctagtttggtcaagtttctaagtgcagt

SEQ ID NO: 10061 - DNA, 110 bp, synthetic construct
  source 1..110: mol_type = other DNA
gcttctcctgccagcccagacctcctcccaggtttcttcagctgtggtgttctactccccaccctgtggcacacagctccctgtgccctcaggctgtatccacacagcca

SEQ ID NO: 10062 - DNA, 110 bp, synthetic construct
  source 1..110: mol_type = other DNA
ccagacctcctcccaggtttcttcagctgtggtgttctactccccaccctgtggcacacagctccctgtgccctcaggctgtatccacacagccaactctagtcctctcc

SEQ ID NO: 10063 - DNA, 110 bp, synthetic construct
  source 1..110: mol_type = other DNA
ataagaaatgtattctctcataattccggagactagaagtccaaaataaggctttggcagccaatttccctctagaagctctagaggaaatttcttccttgcctcttctg

SEQ ID NO: 10064 - DNA, 110 bp, synthetic construct
  source 1..110: mol_type = other DNA
actctctaaaatggagctgagaggccattggggaatgtaactaggcacatttcagcctggatgaatttaaccttttgatctgatgaagtcacccagaaaatctgggaatt

SEQ ID NO: 10065 - DNA, 110 bp, synthetic construct
  source 1..110: mol_type = other DNA
aatgaccacaggtgggaattttcttcaaaaatctctacataattttaccatgtagaaatgaggtgagcaaaatttgagtctgagtttttaaagtcttaagaagatacatg

SEQ ID NO: 10066 - DNA, 110 bp, synthetic construct
  source 1..110: mol_type = other DNA
ccctacatttgactttgattatgccattttacactaccaccagcaatgaataaatcgttagccccagctttggagaaactgagcatcccctccagaagtcttgtctctct

SEQ ID NO: 10067 - DNA, 110 bp, synthetic construct
  source 1..110: mol_type = other DNA
ggctcagatcaaggctctcagggaataggagaaagccctccaaaatgagaccaaagctcatcaagaagaaataaggtctctccatgaggacgtcaaggccctacagcatc

SEQ ID NO: 10068 - DNA, 110 bp, synthetic construct
  source 1..110: mol_type = other DNA
tgactttaaaactcctggaagaaaagtggataactccaaagatcccatataacagacactgtgttcagtgattttgtatcatgtgttccatattttgatctagctttgct

SEQ ID NO: 10069 - DNA, 110 bp, synthetic construct; identical to SEQ ID NO: 10068
  source 1..110: mol_type = other DNA

SEQ ID NO: 10070 - DNA, 110 bp, synthetic construct
  source 1..110: mol_type = other DNA
ggagccatcttctcttattttcatctcaacttgaccttcccaaggggaagagggtattttgtcctatttagcttggattggaagtgtcatggcattggtacatgatgggt

SEQ ID NO: 10071 - DNA, 110 bp, synthetic construct
  source 1..110: mol_type = other DNA
cataggcaatgggaggttcctgacctcctccctgtccctggaatatacactctgcctacctttcccacagtgggagctgttccaaaggacttagtcttgagatagtaaga

SEQ ID NO: 10072 - DNA, 110 bp, synthetic construct
  source 1..110: mol_type = other DNA
aacccatacctctgcagagacctgagctgcagcagtagaattcttaacccattgagccatggtaggaatcccataatgtaagtttaaacacattattcagggagttcctg

SEQ ID NO: 10073 - DNA, 110 bp, synthetic construct
  source 1..110: mol_type = other DNA
atgattaaatttgtgttttataaaattcactcgaaagcattgtgtagaacagatacatgtagggaaagatggcccaggagttaggcaattaacacagggtcctttgcaaa

SEQ ID NO: 10074 - DNA, 110 bp, synthetic construct
  source 1..110: mol_type = other DNA
catgtagggaaagatggcccaggagttaggcaattaacacagggtcctttgcaaaaaagaataaagcctaatctaaaagcaatgatcatacatgaggaaagaggagattg

SEQ ID NO: 10075 - DNA, 110 bp, synthetic construct
  source 1..110: mol_type = other DNA
gttccctaagtacattggatctgataaaaaccctagatttggagtccatatcaacagatctattctgagcatatgatgcactcaatgtgctacatataatttctcaagcc

SEQ ID NO: 10076 - DNA, 110 bp, synthetic construct
  source 1..110: mol_type = other DNA
ccatatcaacagatctattctgagcatatgatgcactcaatgtgctacatataatttctcaagccacaggtgtagttcattgttttttgttttgtttgtttgtttttgtt

SEQ ID NO: 10077 - DNA, 110 bp, synthetic construct
  source 1..110: mol_type = other DNA
tgggcgtggcccgctaccactaaggttccctgaacaggcacaatttgcagctccaataacctcagacgagggcattgcaattgaaaactacctgttgctgccctcagtcc

SEQ ID NO: 10078 - DNA, 110 bp, synthetic construct
  source 1..110: mol_type = other DNA
ataacctcagacgagggcattgcaattgaaaactacctgttgctgccctcagtcccctgggaactcacacgccatgctgctgccactgccaaatgtgctgggaacatcat

SEQ ID NO: 10079 - DNA, 110 bp, synthetic construct
  source 1..110: mol_type = other DNA
tgcccagtgtctgggtgagaagccagagcatcctgaaacaccatcacagggcaccaccacagaaaatctactcagacttctgtctctctgttctctatttagtactgctt

SEQ ID NO: 10080 - DNA, 110 bp, synthetic construct
  source 1..110: mol_type = other DNA
ttctcctcttgttggaaaaagggaaaactttgcaagtctatcaactttaattttcccttagcttgatagtgattttcaagtgtatctcttcaccatcaattagatttcaa

SEQ ID NO: 10081 - DNA, 110 bp, synthetic construct
  source 1..110: mol_type = other DNA
ccttagcttgatagtgattttcaagtgtatctcttcaccatcaattagatttcaaccaatactaatatgactggacaatattatctgccattggtgggtgaataaaacac

SEQ ID NO: 10082 - DNA, 110 bp, synthetic construct
  source 1..110: mol_type = other DNA
ctccccccttttagaaggcagaatatttgcttttatccagctgtatgaattctctcctgattgttgatatacttcaaaaagtatgaagaaaccctcatttgaatgcttag

SEQ ID NO: 10083 - DNA, 110 bp, synthetic construct
  source 1..110: mol_type = other DNA
gctcactgcaggaaaatcctgaagtgaaaggccaggaggatatccttttggttgcagttttgatcttaaaagtgaaagagctcctttgttaaagcacaacagggtcagta

SEQ ID NO: 10084 - DNA, 110 bp, synthetic construct
  source 1..110: mol_type = other DNA
ctatgtcttgatatactgcttttcaagtttctgtttcactgactctgatacagtattgatacatgcagctcaaagagtgattaaaaatgtaattactgttgcaaataata

SEQ ID NO: 10085 - DNA, 110 bp, synthetic construct
  source 1..110: mol_type = other DNA
gtaaagagaagtcacttaaaggcaaataaattgataattcatcattgaaggtatcattctaagaaaaccgttttttaacagagaaaccaaatccaaattctgtaccagct

SEQ ID NO: 10086 - DNA, 110 bp, synthetic construct
  source 1..110: mol_type = other DNA
ttaatttcagggcaacgtaagcttttgacactatttctctttctacagctgctcagttattctcaaatcttttactccacaagcctggacgtgatcatctatatgttata

SEQ ID NO: 10087 - DNA, 110 bp, synthetic construct
  source 1..110: mol_type = other DNA
gagcaaatctactagactgcacacaaaatgattaaccaatcacacaataatattatcaagatggaatttgcaatctagaggcatatactgttgtataacaatagacatat

SEQ ID NO: 10088 - DNA, 110 bp, synthetic construct
  source 1..110: mol_type = other DNA
tcaagatggaatttgcaatctagaggcatatactgttgtataacaatagacatatgaataggcaatggccaacaaatgtaaacaggataactggaggaaaggagctacat

SEQ ID NO: 10089 - DNA, 110 bp, synthetic construct; identical to SEQ ID NO: 10087
  source 1..110: mol_type = other DNA

SEQ ID NO: 10090 - DNA, 110 bp, synthetic construct; identical to SEQ ID NO: 10088
  source 1..110: mol_type = other DNA

SEQ ID NO: 10091 - DNA, 110 bp, synthetic construct
  source 1..110: mol_type = other DNA
cctcagttcatcagggatctggctttgccttaagcagtggtgtatgtaggtcacagatattgcttggatcctgacttgctgcggtgtggtgtaagccagcagctgtagct

SEQ ID NO: 10092 - DNA, 110 bp, synthetic construct
  source 1..110: mol_type = other DNA
gtaggtcacagatattgcttggatcctgacttgctgcggtgtggtgtaagccagcagctgtagcttggatttgaccactaacctgggaatttccatgtgctatgccacgg

SEQ ID NO: 10093 - DNA, 110 bp, synthetic construct
  source 1..110: mol_type = other DNA
ttcagcattctaacttccatctttgaggttcaagccattttccaaaaacaaaatcttttaatttatattgaacacctgaagttgcacacttcatgagcataaaaacacta

SEQ ID NO: 10094 - DNA, 110 bp, synthetic construct
  source 1..110: mol_type = other DNA
tactcattcctcatgattaaattatgagtcaaaaacgtttttcctagaaaaaaataaatgcctctccccaaagtggagctgaatttaaacatttgaagcaatgaggatcc

SEQ ID NO: 10095 - DNA, 110 bp, synthetic construct; identical to SEQ ID NO: 10094
  source 1..110: mol_type = other DNA

SEQ ID NO: 10096 - DNA, 110 bp, synthetic construct
  source 1..110: mol_type = other DNA
caaatctctgtcagatacatgatttgcaattgttttctctcagtctgtggctcgttttgcctttttattttcataggttgaagataattgatttttgtgtattaatcttg

SEQ ID NO: 10097 - DNA, 110 bp, synthetic construct
  source 1..110: mol_type = other DNA
tattaactcatttcagattctctttaagggagagaaagcttctagctttaagtagtaattgttttcctctttaaagccacacagcagtccttgaataaattaaactgcaa

SEQ ID NO: 10098 - DNA, 110 bp, synthetic construct
  source 1..110: mol_type = other DNA
ctgtaaaatattctagtgtattttcaacgagtttaatttttgacagtgagtctgctttcctcacccacaaacaaacacattaaaaaacccatagatgaccttaactaatt

SEQ ID NO: 10099 - DNA, 110 bp, synthetic construct
  source 1..110: mol_type = other DNA
tttcctcacccacaaacaaacacattaaaaaacccatagatgaccttaactaattgtaaacattctcaggactcattaattttcctcaacttcctctttcttcggaaaat

SEQ ID NO: 10100 - DNA, 110 bp, synthetic construct
  source 1..110: mol_type = other DNA
gcgtacgccacagccacagcaacaccaaatccttaaccaaacatcttatccaaatgtctgctacctgcaccatagctcactgcaacgccaaatccttaacccactgagag

SEQ ID NO: 10101 - DNA, 110 bp, synthetic construct
  source 1..110: mol_type = other DNA
ctttcttgcacagggtcctgtgaagtgggtgtagtgtctctctttcaggctgtagatcagctctgtataaagtccatttcaggaccaaaactgaggaagtagttgctatt

SEQ ID NO: 10102 - DNA, 110 bp, synthetic construct
  source 1..110: mol_type = other DNA
acaccaaacaatgcattcttttcaaccatgcctcttgaatatcagataatttactccctttggtcattgctacataaccctattgaagaagctggcatatattacttttt

SEQ ID NO: 10103 - DNA, 110 bp, synthetic construct
  source 1..110: mol_type = other DNA
ccctttggtcattgctacataaccctattgaagaagctggcatatattactttttccagattaaaaattctaatgaaaaatgtgatgattttcacaacttggtggagaaa

SEQ ID NO: 10104 - DNA, 110 bp, synthetic construct
  source 1..110: mol_type = other DNA
cagaacatagatgtacacttagatcttgccactaacctgctggcttccctccatataaaactgaactttaaatactgttcctgtcagaagacaggaaatgtgtcacccca

SEQ ID NO: 10105 - DNA, 110 bp, synthetic construct
  source 1..110: mol_type = other DNA
ttaaacttctttagagtctattcacaaatattttctgaaggatttttgcttatatacttttaattgaaaatggcctttttggtgttctgattgctacctgtgggtgtcaa

SEQ ID NO: 10106 - DNA, 110 bp, synthetic construct
  source 1..110: mol_type = other DNA
aaatgaaaacaactagtgtccatgagtgtgcaggtttgatccctaactttgattggtggatcagggatatagcattgctaggagctttggtgtaggtcaaaaatgcagct

SEQ ID NO: 10107 - DNA, 110 bp, synthetic construct
  source 1..110: mol_type = other DNA
agcccactggctgctgtgtttccttcctggtttccatccagatggtataagcactgggccgaataacagctgcaatctatatggacaggctgctcctattagactcaatt

SEQ ID NO: 10108 - DNA, 110 bp, synthetic construct
  source 1..110: mol_type = other DNA
tctcaactcccttgccacactcccttgagaccagtaacaccacagtctcctgaagtgatacctaatagctctacaccttcagtttcactgacgtgaaccaattcattttt

SEQ ID NO: 10109 - DNA, 110 bp, synthetic construct
  source 1..110: mol_type = other DNA
ttttgtaaaatcgctcattgaaattatttcagaccaccaggctgtacaacatagagatgagttgatgcttgtccccagaaccatgaagaagaatttagaaagctgaggta

SEQ ID NO: 10110 - DNA, 110 bp, synthetic construct
  source 1..110: mol_type = other DNA
gatgagttgatgcttgtccccagaaccatgaagaagaatttagaaagctgaggtaaagaagatttttgagggaacatgaatggatgtaatcatcaaaggaaaaggtaatg

SEQ ID NO: 10111 - DNA, 110 bp, synthetic construct
  source 1..110: mol_type = other DNA
caatcattattaactcatggtacacacaaaaactggcagcaaggtagatttattcaagttcagcagcttgtagaccccgctctgctgcttgtgctgatgggaacattttc

SEQ ID NO: 10112 - DNA, 110 bp, synthetic construct
  source 1..110: mol_type = other DNA
caaaactctatcattaaaatctaaggataaaagcagtcaaaacctgataacatcggtataatttcaagcttcatactgatgatgtaaagggacatgagcattcatttcac

SEQ ID NO: 10113 - DNA, 110 bp, synthetic construct
  source 1..110: mol_type = other DNA
gtataatttcaagcttcatactgatgatgtaaagggacatgagcattcatttcacaactgagttttaacagaatggcagaattgcactcttcacatgtttgaaacaatct

SEQ ID NO: 10114 - DNA, 110 bp, synthetic construct; identical to SEQ ID NO: 10112
  source 1..110: mol_type = other DNA

SEQ ID NO: 10115 - DNA, 110 bp, synthetic construct; identical to SEQ ID NO: 10113
  source 1..110: mol_type = other DNA

SEQ ID NO: 10116 - DNA, 110 bp, synthetic construct
  source 1..110: mol_type = other DNA
agtagcacctctctgaggggtttcactgcttcaaagggccaagtgatagattcgtgagagcaggaggtgtattctgaaatataaggcttttgagagtcttgggattcctc

SEQ ID NO: 10117 - DNA, 110 bp, synthetic construct
  source 1..110: mol_type = other DNA
aaagtgtactataaaataaaaaagatagagccaagcaataaaatcagcaaggggactgctggcctaacatctgacctaacttgaaggtcttgataatgggttcattgatt

SEQ ID NO: 10118 - DNA, 110 bp, synthetic construct
  source 1..110: mol_type = other DNA
ttcagtaaatagcttttataggaaaacattgcctacacttcaaaatatgtacagcaatgaggtacaaaactaaattgtgtgattttagtcagcacactgtgtaggattaa

SEQ ID NO: 10119 - DNA, 110 bp, synthetic construct
  source 1..110: mol_type = other DNA
aacctcatggttcctagtcagattcgtttcctttgcgccacaacaggaactccaaaaggaagtgttctcaatgataagaccttagtttttaacaagctatgtgaatctgc

SEQ ID NO: 10120 - DNA, 110 bp, synthetic construct
  source 1..110: mol_type = other DNA
aaggaagtgttctcaatgataagaccttagtttttaacaagctatgtgaatctgcatacaattatatgacagaaggacaatatttatacccgcccaccattataaaaata

SEQ ID NO: 10121 - DNA, 110 bp, synthetic construct; identical to SEQ ID NO: 10119
  source 1..110: mol_type = other DNA

SEQ ID NO: 10122 - DNA, 110 bp, synthetic construct; identical to SEQ ID NO: 10120
  source 1..110: mol_type = other DNA

SEQ ID NO: 10123 - DNA, 110 bp, synthetic construct
  source 1..110: mol_type = other DNA
atggttactagttgggttcgttaaccactgagccactacaggagctccctatagattcttttttttaattcatactatcttccatcatgtttttatccaaatgattggac

SEQ ID NO: 10124 - DNA, 110 bp, synthetic construct; identical to SEQ ID NO: 10123
  source 1..110: mol_type = other DNA

SEQ ID NO: 10125 - DNA, 110 bp, synthetic construct
  source 1..110: mol_type = other DNA
cagtggtttttcatcatctaccatataatgttcaaactccttcatcatatcacagatggcccttcctgagcttgccaaaagtactatttgaaacccaatctctgacccct

SEQ ID NO: 10126 - DNA, 110 bp, synthetic construct
  source 1..110: mol_type = other DNA
atggcccttcctgagcttgccaaaagtactatttgaaacccaatctctgacccctgattttcagatatatcctctgggccaagaacaatccttagaaaataatcagggcc

SEQ ID NO: 10127 - DNA, 110 bp, synthetic construct
  source 1..110: mol_type = other DNA
tcttacatatcttagtggagattactacctatttggatgcccaagacagaaatccagagctcatccttcatctctccattccctgcaccttctctactcaaacccctagc

SEQ ID NO: 10128 - DNA, 110 bp, synthetic construct
  source 1..110: mol_type = other DNA
atttttctatgttttggtttggtgaagagtatttagtccagttggttgaaaatctgaaacaaaaatttaggagagaagcagcaagtgtaaatacagattggagactagtt

SEQ ID NO: 10129 - DNA, 110 bp, synthetic construct
  source 1..110: mol_type = other DNA
tacgaactggatagagtatctttcaaaatcccagagcctctctggaatcctattggcagaagaggacaacatacctggctaccagctactactaggttgcctctgggatt

SEQ ID NO: 10130 - DNA, 110 bp, synthetic construct
  source 1..110: mol_type = other DNA
gcagaagaggacaacatacctggctaccagctactactaggttgcctctgggatttggtgctccgtccagtttgctcttctttgggtttgtgatgctttttcttaccacc

SEQ ID NO: 10131 - DNA, 110 bp, synthetic construct
  source 1..110: mol_type = other DNA
attcaggactggatcctgagtgggagaacacacatgggggagttgttaatgcacagaagctgatactttaagatatggcagttgatatcacaactaaggcagacaaatcc

SEQ ID NO: 10132 - DNA, 110 bp, synthetic construct
  source 1..110: mol_type = other DNA
gaaatttttagggaggacgatcttgctgtctttctgtagctcctgatgatggccatccactttaggccttccgtggcttgtagacgcatcattccctaaccgacctctat

SEQ ID NO: 10133 - DNA, 110 bp, synthetic construct
  source 1..110: mol_type = other DNA
taatttttgacttatagaacagttgcaaagctagagcagttgtaaacatagtacagagcattcctatgtgtcctttactcagtttcccctcatgtcatcattttacggga

SEQ ID NO: 10134 - DNA, 110 bp, synthetic construct
  source 1..110: mol_type = other DNA
aacctattcctccacagtgacctgaggctgcagtcggattattaacccactggaccatggagggaattccctatttttccaattttgagagacccacagggacaagaaat

SEQ ID NO: 10135 - DNA, 110 bp, synthetic construct
  source 1..110: mol_type = other DNA
caaaatggcaataaacagcatttctgtacccggtggtcatggtttggatggaatggactatatgttcttgttcttatgttaccttaaaaatggtttctgtacactgacct

SEQ ID NO: 10136 - DNA, 110 bp, synthetic construct
  source 1..110: mol_type = other DNA
gttcatggcaatggtggatcctttaactcactgagcggagccagggtttgaaccttcatcgtcatggatattaatcaggctcgttttccactgagccaagatgggaacgc

SEQ ID NO: 10137 - DNA, 110 bp, synthetic construct
  source 1..110: mol_type = other DNA
tcatcgtcatggatattaatcaggctcgttttccactgagccaagatgggaacgcctttggcccactttgtgaagaaattttatattaaaaaaaaaggccaaccccccta

SEQ ID NO: 10138 - DNA, 110 bp, synthetic construct
  source 1..110: mol_type = other DNA
tgacccaccctgtttctataaacaaatatttgacaattttctgtcttccaaaaccacatctaatccataaccaggccctgatcattctatctgaaaaacacaccttgaat

SEQ ID NO: 10139 - DNA, 110 bp, synthetic construct
  source 1..110: mol_type = other DNA
ggctttgggtcaaggtcctactctgatttcagcccctagcatgcaacaaagagcacagttccctaaaccaaaatggtagatgtcttttgggaaaaagtatgtgtttcaat

SEQ ID NO: 10140 - DNA, 110 bp, synthetic construct
  source 1..110: mol_type = other DNA
gcccctggggagcagcctgccttatgccaagccactgagggaataacaccactctatatttgggactgtctgggatttttccgccactcctaagcagctcttttaaaaat

SEQ ID NO: 10141 - DNA, 110 bp, synthetic construct
  source 1..110: mol_type = other DNA
atatttgggactgtctgggatttttccgccactcctaagcagctcttttaaaaatgaaaacccggtgaccgaacttcctgtactctgttacacacaaatcaagtagaaga

SEQ ID NO: 10142 - DNA, 110 bp, synthetic construct
  source 1..110: mol_type = other DNA
aaaaaaattcgtatgtagaaacaatgtgatgttacatggagatgggcccttatgcaaagagacagaaaaagctcactctttctctgtaccatgggaggatgtagcgagaa

SEQ ID NO: 10143 - DNA, 110 bp, synthetic construct
  source 1..110: mol_type = other DNA
aggcatgtactgttggggtatatgaatatttacaattctctccaataaatttgtcttgctttgcttttaaaactgtaatagaacatagcatgttcaaggcgcagaatata

SEQ ID NO: 10144 - DNA, 110 bp, synthetic construct
  source 1..110: mol_type = other DNA
gaacttcctctttgtcaggcccttaagcactttcttcatagactattcccttcagttcccacaaacgatctatgtgggagctattattattatgtctcttttagaaatga

SEQ ID NO: 10145 - DNA, 110 bp, synthetic construct
  source 1..110: mol_type = other DNA
cttctttttaaatttgaagatatgaggtcctggaaagaatgagtaggtaaatcttttttcctctttttcttttcttgatcttctctacccttaataatactgcaagctta

SEQ ID NO: 10146 - DNA, 110 bp, synthetic construct
  source 1..110: mol_type = other DNA
ggtcctggaaagaatgagtaggtaaatcttttttcctctttttcttttcttgatcttctctacccttaataatactgcaagcttaaataagaaaggaaattttcaaaagg

SEQ ID NO: 10147 - DNA, 110 bp, synthetic construct
  source 1..110: mol_type = other DNA
aattcttctttggccaatattgtgctttgttcatcttttattctcagggcccagcaaggttggtcttaccttgtgcctttgatgagcacaaactgtggtttcaagttgga

SEQ ID NO: 10148 - DNA, 110 bp, synthetic construct
  source 1..110: mol_type = other DNA
agacaagtaacagtttttttctagtcatcaagctctttttttagttaggaaatgtgtaaatcgatgcaaccgaacatctctccactccagcatggcagcaatacaatgtg

SEQ ID NO: 10149 - DNA, 110 bp, synthetic construct
  source 1..110: mol_type = other DNA
ggcctcgcccagtgggttatggatctggtgttgccttgagctgtggtgtaggctgacagctacagctgcaatgctgtccttgtcctgggaatctccacatgccatggcta

SEQ ID NO: 10150 - DNA, 110 bp, synthetic construct; identical to SEQ ID NO: 10149
  source 1..110: mol_type = other DNA

SEQ ID NO: 10151 - DNA, 110 bp, synthetic construct
  source 1..110: mol_type = other DNA
agaacatttagtgagacaagagtagggtaggtctctgaatgccagctctagttcctatagagctgaattggagacctcaactcggcttgaagccatgatagctgataact

SEQ ID NO: 10152 - DNA, 110 bp, synthetic construct
  source 1..110: mol_type = other DNA
tatagagctgaattggagacctcaactcggcttgaagccatgatagctgataactctattggcaatggcctatagcatcgcttgcttctacatatcccttgtaactaata

SEQ ID NO: 10153 - DNA, 110 bp, synthetic construct
  source 1..110: mol_type = other DNA
gggtagggatcagattcaagtagggatcagttacaacctatgcccagctgctgcaacactggatccttaatccactgtacctggccagggattgagcctgtgtcccagca

SEQ ID NO: 10154 - DNA, 110 bp, synthetic construct
  source 1..110: mol_type = other DNA
acactggatccttaatccactgtacctggccagggattgagcctgtgtcccagcaccgcagggacactgctgattccattgcaccacaacagaaattccaataaagttac

SEQ ID NO: 10155 - DNA, 110 bp, synthetic construct
  source 1..110: mol_type = other DNA
ctcattttatcctctcatcagcccgctgctgtaggttactgtttatcagtcaagatccttttagggaacacatgtcacctacggaagggactgtttacaaacaggtagaa

SEQ ID NO: 10156 - DNA, 110 bp, synthetic construct
  source 1..110: mol_type = other DNA
tccttttagggaacacatgtcacctacggaagggactgtttacaaacaggtagaaaccaacaggtgataatgaacattttaggattggtaaccgtgcaaagctttaatca

SEQ ID NO: 10157 - DNA, 110 bp, synthetic construct
  source 1..110: mol_type = other DNA
agtatattcagctcccaccagaccgcagctccagaggtgatcaacattttcatcaaacaagatcttccttctccagaccttcatctttctgtccctccccagcagggcca

SEQ ID NO: 10158 - DNA, 110 bp, synthetic construct
  source 1..110: mol_type = other DNA
aacaagatcttccttctccagaccttcatctttctgtccctccccagcagggccacctgtaccagctgctgaacacaccggatctagatatgcccagttctaccaaccag

SEQ ID NO: 10159 - DNA, 110 bp, synthetic construct
  source 1..110: mol_type = other DNA
tttgttttcgtagcaggcatttaacagtcatttggtgtcagttgcttcctttataagtgccacatgacacatttttcccttctctgggttcctgagaccctaatcccaaa

SEQ ID NO: 10160 - DNA, 110 bp, synthetic construct
  source 1..110: mol_type = other DNA
tgctccccaaacctgctgtttcttgggagaccctcgctcaatgaatggcatcatcagggcaagctgccagaccacaaagcagactctgaccttttcctgagccttctact

SEQ ID NO: 10161 - DNA, 110 bp, synthetic construct
  source 1..110: mol_type = other DNA
acacatgaactcagtctctgagtaggagggaaacagcatattcaagcgggacagtctgaggcgtgagcgtagaaattctgtgtgctgggtgcctggctgacctaactcta

SEQ ID NO: 10162 - DNA, 110 bp, synthetic construct
  source 1..110: mol_type = other DNA
ctgaggcgtgagcgtagaaattctgtgtgctgggtgcctggctgacctaactctagtgccagcctcaactagaatagaaagtacattaataagacaggtgggccagcaag

SEQ ID NO: 10163 - DNA, 110 bp, synthetic construct
  source 1..110: mol_type = other DNA
cacgtgacactttctgccttggatggtggtttttttatgtacggaagctcctcggccctgcagaggtgccagcacatgtgaaacccagggcctgcctctttcatcttcga

SEQ ID NO: 10164 - DNA, 110 bp, synthetic construct
  source 1..110: mol_type = other DNA
gtgatagtggaggttgatgagtagaggatgacctaagatgggaagaggaacaggctgcagggctcagctgcaaaaataaggagaaaacaaagcatctatcagaaaggggc

SEQ ID NO: 10165 - DNA, 110 bp, synthetic construct
  source 1..110: mol_type = other DNA
tggccctaaaaaagtaaaaacaaacaaaacaaacaaacaaaaaaaacccctaggctttccgatttgtgtcctggacacctgaatgtttctttctttttagataggctaag

SEQ ID NO: 10166 - DNA, 110 bp, synthetic construct
  source 1..110: mol_type = other DNA
tttccgatttgtgtcctggacacctgaatgtttctttctttttagataggctaagaacagctctacatgccaccatgagtcacctaggtaatgactgcccgttgattttg

SEQ ID NO: 10167 - DNA, 110 bp, synthetic construct
  source 1..110: mol_type = other DNA
tttctctttctggacaatctgttatgctcatataaaatttttaaaatgtgactctagcacgcaaactccttcgtgattaataaacgttgaatgattctgtactaatggca

SEQ ID NO: 10168 - DNA, 110 bp, synthetic construct; identical to SEQ ID NO: 10167
  source 1..110: mol_type = other DNA

SEQ ID NO: 10169 - DNA, 110 bp, synthetic construct
  source 1..110: mol_type = other DNA
cacagacttcagttttattggtccagggatcggcacctgaaatcagctgagcctactaaactccttttgttgacaccgacctcaatctagtctgatgaaagaaaatggaa

SEQ ID NO: 10170 - DNA, 110 bp, synthetic construct
  source 1..110: mol_type = other DNA
ctaaactccttttgttgacaccgacctcaatctagtctgatgaaagaaaatggaaacacttaggttgtattttctgccacatagatcagggagcaaaaaatagtttggaa

SEQ ID NO: 10171 - DNA, 110 bp, synthetic construct
  source 1..110: mol_type = other DNA
acatttttgttccaggttccaaagggggtacagagaaaatccttggatcccataagtctcccttgtactggttcaacaggcaatggaactcctggagagcaagttcccag

SEQ ID NO: 10172 - DNA, 110 bp, synthetic construct
  source 1..110: mol_type = other DNA
gtctcccttgtactggttcaacaggcaatggaactcctggagagcaagttcccaggtgggagaagtatggaaatagaagcgaggagactagagaagacaagaaaaatcaa

SEQ ID NO: 10173 - DNA, 110 bp, synthetic construct
  source 1..110: mol_type = other DNA
ttttgtccctattgtcctatcgacgtgataaattatactaatggatatcctattgttgaactatcactgccttccttaaacaaataccatttttaaagccccgatggatt

SEQ ID NO: 10174 - DNA, 110 bp, synthetic construct; identical to SEQ ID NO: 10173
  source 1..110: mol_type = other DNA

SEQ ID NO: 10175 - DNA, 110 bp, synthetic construct
  source 1..110: mol_type = other DNA
aattttattttaagtattcttttcaaattgtcatcatgatgccttttctaggcaaggtttagtcattctcacattgtttctcagcttaggtcccagtgcagaacaaaact

SEQ ID NO: 10176 - DNA, 110 bp, synthetic construct
  source 1..110: mol_type = other DNA
ttcctaaggggtatatttttgataacaagcaccactccagatctgggcacacagccctgaagttgcataaaagaaagtcagtattggcatatgttaggatgagctgtaaa

SEQ ID NO: 10177 - DNA, 110 bp, synthetic construct
  source 1..110: mol_type = other DNA
cctgaagttgcataaaagaaagtcagtattggcatatgttaggatgagctgtaaatattgaacaaaagcaaaacttctaagtagtaactgctcaaccatatacaaaatgt

SEQ ID NO: 10178 - DNA, 110 bp, synthetic construct
  source 1..110: mol_type = other DNA
aaattatttttaacatataaacttggtctctttagactctttgcaattaatattttcactcttgattatccaggggcaaaaccagaaactatttccacacctcctctttt

SEQ ID NO: 10179 - DNA, 110 bp, synthetic construct; identical to SEQ ID NO: 10178
  source 1..110: mol_type = other DNA

SEQ ID NO: 10180 - DNA, 110 bp, synthetic construct
  source 1..110: mol_type = other DNA
ttgctgtctcccctaccagactgagaactctttgtcttcttctttctggtgcacccattactattcagagagctgtgtactgagcaaccactcaagagctgcctttttaa

SEQ ID NO: 10181 - DNA, 110 bp, synthetic construct
  source 1..110: mol_type = other DNA
atggcacacctagcatttatttaagcccaactgaatattccagagtataaggagacgtaaagtgaacatactggttttcctcgactaaagtggcaccgggctaaatatta

SEQ ID NO: 10182 - DNA, 110 bp, synthetic construct
  source 1..110: mol_type = other DNA
cgtaaagtgaacatactggttttcctcgactaaagtggcaccgggctaaatattaaacctatggaaactcatgagaaatagactcgcactaataggctttgctctctctc

SEQ ID NO: 10183 - DNA, 110 bp, synthetic construct
  source 1..110: mol_type = other DNA
ttcttaagtattaaattaaactttaagtttggtggcagacattactggttaaatgaataagtcttgttcgcattttgcttttccttagccatactccaattagaaacatc

SEQ ID NO: 10184 - DNA, 110 bp, synthetic construct
  source 1..110: mol_type = other DNA
atgctgttatgccccatattttgaataaagtgcatgccaaatacaaaatctagtgggcccagcatactaagtctcacctgcctgagagagttaggccatcaaagcaacac

SEQ ID NO: 10185 - DNA, 110 bp, synthetic construct
  source 1..110: mol_type = other DNA
attcctctgttttgagttgtgctgccgaagtcccaaagtctgaaacacaccattacctctgaatagatggtgggtttaactcttctgaaaaccaatcagattctggagaa

SEQ ID NO: 10186 - DNA, 110 bp, synthetic construct
  source 1..110: mol_type = other DNA
agtcatcaattttagtaacgtgggcctccttatttacgctgcaacaaacattctgatattatgcgaccctatataacttacataaatgtgttgatattcacacacacgtg

SEQ ID NO: 10187 - DNA, 110 bp, synthetic construct
  source 1..110: mol_type = other DNA
cgcccacccctcagccaggcatccatacaccactgtcttattagctgccctaaatctgcacctttaatcattgcctgagaatacagtcaaagtatactccctagatcaga

SEQ ID NO: 10188 - DNA, 110 bp, synthetic construct
  source 1..110: mol_type = other DNA
aaataaaaaatagctttccttttttttgattagaaaagtgcaatgtgcacattctaaaaccctcagagaatgccgcaaagtaaactttaatctctcaaaacaccaggaac

SEQ ID NO: 10189 - DNA, 110 bp, synthetic construct; identical to SEQ ID NO: 10188
  source 1..110: mol_type = other DNA

SEQ ID NO: 10190 - DNA, 110 bp, synthetic construct
  source 1..110: mol_type = other DNA
tgcctgtagccaagttcttctctttacacaagtgcaaaagcagatacctcccctctcactcctgcacacttgagaagaagctgtactgacgctaaagctgacacagaaag

SEQ ID NO: 10191 - DNA, 110 bp, synthetic construct
  source 1..110: mol_type = other DNA
tcactcctgcacacttgagaagaagctgtactgacgctaaagctgacacagaaagacacagagacactggataccattgagacattaaaccaaactaatgctgaagacct

SEQ ID NO: 10192 - DNA, 110 bp, synthetic construct
  source 1..110: mol_type = other DNA
gttatgatatcaaccctttccatatagcttgctgacatgaaagagcttgaacacctcaaaggacccagcctataaataatgggtctcaggaataccactggttacaccaa

SEQ ID NO: 10193 - DNA, 110 bp, synthetic construct
  source 1..110: mol_type = other DNA
ctagccaggtcattactgctgagccacgacaggaactccttgccttagttcttgaaatcccaattttcctattgcaatttcccagcctacaggctgaaactgagactggg

SEQ ID NO: 10194 - DNA, 110 bp, synthetic construct; identical to SEQ ID NO: 10193
  source 1..110: mol_type = other DNA

SEQ ID NO: 10195 - DNA, 110 bp, synthetic construct
  source 1..110: mol_type = other DNA
cacctctgaattggcagccagttgatgagaagtatgggtggcctgggaaccctggagctcgtgactggtgtctgaagtgaggagacccttgtggaggaaggacagtgccc

SEQ ID NO: 10196 - DNA, 110 bp, synthetic construct
  source 1..110: mol_type = other DNA
agctcgtgactggtgtctgaagtgaggagacccttgtggaggaaggacagtgcccttaacatgtgaactgtgacctaattctgggtagttaagatcagaattgcattgta

SEQ ID NO: 10197 - DNA, 110 bp, synthetic construct
  source 1..110: mol_type = other DNA
acacttctatctacaagtttccctatccgactttaaagaaaaatgtctagctgcacatagaaatcatcctcgtactttctagccaaatactgtcccatacaaaaatgaga

SEQ ID NO: 10198 - DNA, 110 bp, synthetic construct
  source 1..110: mol_type = other DNA
gtggggttcagtggatggaaaattactaagaggaacatcaagggtaaggggggcgtctggctaaatctacctatactaacaggattcttgataaagacaggccaggtgat

SEQ ID NO: 10199 - DNA, 110 bp, synthetic construct
  source 1..110: mol_type = other DNA
tacattttcccaggagtcccacattaccatagcctgctggtaagcatgtggaatgtgctggcagagctgaggatctctgaccactgctgcactctggggtggtcagtgta

SEQ ID NO: 10200 - DNA, 110 bp, synthetic construct
  source 1..110: mol_type = other DNA
atctggctctgggtagcacccttctctggaggaagcccttattcatcgtcagcaggtctggccatcatctcagagaggagccactaccattcctgtgttacttgtgcctg

SEQ ID NO: 10201 - DNA, 110 bp, synthetic construct
  source 1..110: mol_type = other DNA
ttttggtcttagttgttgatattacagggaactgacataatcaccacaaaaatgcatgtaactatagctcaactacacaaaaatggaaaccagaaaatctccaagaagga

SEQ ID NO: 10202 - DNA, 110 bp, synthetic construct
  source 1..110: mol_type = other DNA
agtattgctctctgctacttttattcttctgacttattactctttattctcaccccttttaatcagctatcaagtttgttgattatgcagaggactgataacattcaatg

SEQ ID NO: 10203 - DNA, 110 bp, synthetic construct
  source 1..110: mol_type = other DNA
gtaggtcacagacacagttgggatctggcgttcctgtggctgtggcataggccaagggctaaagctcccattagacccctaacctaggaacttccgtatgctgaaggtgt

SEQ ID NO: 10204 - DNA, 110 bp, synthetic construct; identical to SEQ ID NO: 10203
  source 1..110: mol_type = other DNA

SEQ ID NO: 10205 - DNA, 110 bp, synthetic construct
  source 1..110: mol_type = other DNA
ctggtatactgaattcactgcacatctataaacacccactgtgtgcttggcacagtcttacatgccatgggggaaacataggtgttctcgttaaaggaaataataatcta

SEQ ID NO: 10206 - DNA, 110 bp, synthetic construct
  source 1..110: mol_type = other DNA
tcttacatgccatgggggaaacataggtgttctcgttaaaggaaataataatctagtgatggagacgcatgcaattaggtcctctgccagtcggagtgtgatccttgctg

SEQ ID NO: 10207 - DNA, 110 bp, synthetic construct
  source 1..110: mol_type = other DNA
agccattttaaagtttcactcttacatataagttagaacttttaaaataatgctgaagccaggttttcctgttgtctctctttcatatcaaatagaggaggctttggagt

SEQ ID NO: 10208 - DNA, 110 bp, synthetic construct
  source 1..110: mol_type = other DNA
tggtcatgagtaactttcaggaaaattttgattttctagctctgtgaacattagctagagtgtatcttgttgtagggtgttggggttggtaaatgccagatattccttct

SEQ ID NO: 10209 - DNA, 110 bp, synthetic construct
  source 1..110: mol_type = other DNA
gtggacgttctgcctgcagcctgccaagttttttagtaaatgggtgccatacattctcaagttgttgccagcaccaagaatcacactgttctatgtggctcctccttcta

SEQ ID NO: 10210 - DNA, 110 bp, synthetic construct
  source 1..110: mol_type = other DNA
cacaatggagaaggcgaacggcccagctatgaaatgcagcagatgtcctgcaatgtgccagtgcgaggatcccagggcctgctgaagggaaaggctacatccattttgtt

SEQ ID NO: 10211 - DNA, 110 bp, synthetic construct
  source 1..110: mol_type = other DNA
aattccctagacttaggatctttgatcaaattgttcctttctaatgccaccttgtattagttgagtttcaactgacgtctcaagctatgcctaccatgacatttttcatt

SEQ ID NO: 10212 - DNA, 110 bp, synthetic construct
  source 1..110: mol_type = other DNA
acacacacacacacacacacacacacacgcatataagcatcagataacaacagaatcagaatgatacccatatttgtcaagcggccaccaagtatttgcttaaaaattaa

SEQ ID NO: 10213 - DNA, 110 bp, synthetic construct
  source 1..110: mol_type = other DNA
tcagaatgatacccatatttgtcaagcggccaccaagtatttgcttaaaaattaaaaaaaattaaaaaacacttttggaaattccctcatagagcagcgggttaaggatc

SEQ ID NO: 10214 - DNA, 110 bp, synthetic construct
  source 1..110: mol_type = other DNA
aaagtgatatgtgctgcataataaagccatctttcaatgtgccactcctaaaagcacttcccataagggaaaaatttctttaatcacaggacaagcctcccagtccacaa

SEQ ID NO: 10215 - DNA, 110 bp, synthetic construct
  source 1..110: mol_type = other DNA
agattctgcccagataagcactagagcatgggcagttacttctttaattgtcctgtattcgcaagctcactactcactcctttcagctggaactacatcctcaatcatgt

SEQ ID NO: 10216 - DNA, 110 bp, synthetic construct
  source 1..110: mol_type = other DNA
gttacatattttggatattgaccccttatcacacatattactcagtagggtgctgttttgttttttactcatagtttccttcaccgtgcaaaactttttagtttgatttg

SEQ ID NO: 10217 - DNA, 110 bp, synthetic construct
  source 1..110: mol_type = other DNA
ctatgtctgtacatgccggaagctgagctagacctaggcactggttattgtcaataatcaacaagagagatgtggtcactggagtcaaaaaacattttctgagacaacgc

SEQ ID NO: 10218 - DNA, 110 bp, synthetic construct
  source 1..110: mol_type = other DNA
aatcaacaagagagatgtggtcactggagtcaaaaaacattttctgagacaacgccgaagtatccacataactggagaaaataatcactttctgaggtgagtggtctgca

SEQ ID NO: 10219 - DNA, 110 bp, synthetic construct
  source 1..110: mol_type = other DNA
ctttttttttttttttttctttttttaaggccaaatctgtgacatatggaagttcacaggctaagggttgaatcagagctgcacctgaggcctaggccacagacaacacc

SEQ ID NO: 10220 - DNA, 110 bp, synthetic construct
  source 1..110: mol_type = other DNA
acaggctaagggttgaatcagagctgcacctgaggcctaggccacagacaacaccagatctaagccacatccgtgaccaacactccagcctgtagcaatgccagatcctc

SEQ ID NO: 10221 - DNA, 110 bp, synthetic construct
  source 1..110: mol_type = other DNA
cccaggacaaagaaaggaaaggttttttccccactcagagggtctcactccccacttcctgggcagccacggtcccctcctccgagttgatgcagtttatatacatgaag

SEQ ID NO: 10222 - DNA, 110 bp, synthetic construct
  source 1..110: mol_type = other DNA
tataggaaaatggccaatgttgtacagctattttaataaaaaatcaagctacaaaatagcaggtagagtgtgatgtcactgatacataaaagtaaaactggatacatatt

SEQ ID NO: 10223 - DNA, 110 bp, synthetic construct
  source 1..110: mol_type = other DNA
tgggaacacctatcatttgctactcttatgagattggcattttccagggttgtagccgtggctctcttgagctttcttgttttcttcccgccctgggcgctcatcatgtc

SEQ ID NO: 10224 - DNA, 110 bp, synthetic construct
  source 1..110: mol_type = other DNA
gatggaagagcctaattttctaatgccccaaatgcttcctcacagctatgttagaaggattaataattacggcaatgcttcaaggctgacagtataatcaatttgactga

SEQ ID NO: 10225 - DNA, 110 bp, synthetic construct
  source 1..110: mol_type = other DNA
tggaaatctaagaatcaagcagaaaggccatccattcaatttcagataaactcaggaaaatctctcaggctgcctagccaacgagaattcgatgcctgaaaccaggacca

SEQ ID NO: 10226 - DNA, 110 bp, synthetic construct
  source 1..110: mol_type = other DNA
agccctctgccagggactccctaggtttgaagcaaatcgagatctatagctttagatcaaaggcttaactgggaaatggccacaaacgggaaaaggtttcttttttttct

SEQ ID NO: 10227 - DNA, 110 bp, synthetic construct
  source 1..110: mol_type = other DNA
atcaaaggcttaactgggaaatggccacaaacgggaaaaggtttcttttttttcttttatcaaaaagccatatggctttcactgctcctacaagaccaaaagggggaaat

SEQ ID NO: 10228 - DNA, 110 bp, synthetic construct
  source 1..110: mol_type = other DNA
gccttcctgggcttaggaacaccaagcagcacatgagcacaaggcctggggtcattttatacagtgaaatcaccagtaaaagtcacaaaaatgaaaaaaaaaaaaaaagt

SEQ ID NO: 10229 - DNA, 110 bp, synthetic construct
  source 1..110: mol_type = other DNA
ctggggtcattttatacagtgaaatcaccagtaaaagtcacaaaaatgaaaaaaaaaaaaaaagtggcactaaatagactgcagaaagaactctattttttcccagggta

SEQ ID NO: 10230 - DNA, 110 bp, synthetic construct
  source 1..110: mol_type = other DNA
ttcagaacagaagaagaggaaaaaataaaatctcagggacaagatgttacaccatcagtatatttcatgaagcaaaccatcagcaatgcctgtggaacaattgggctaat

SEQ ID NO: 10231 - DNA, 110 bp, synthetic construct
  source 1..110: mol_type = other DNA
aaattattgtgtaatagcagagatactggaaattttaagcatgttttctgtaattttccaatcctttaccccccaattttactggagcttgttagattatgagaaaaggt

SEQ ID NO: 10232 - DNA, 110 bp, synthetic construct
  source 1..110: mol_type = other DNA
ttccaatcctttaccccccaattttactggagcttgttagattatgagaaaaggttttcctccagttatcctcaggtttagattttccatggaatttgcctccatttcat

SEQ ID NO: 10233 - DNA, 110 bp, synthetic construct
  source 1..110: mol_type = other DNA
agaatcacctagaggagtcactaagacccagatgactggactcttaaccccagagttgctgattcagtagctgtggagtaggtctgaggatttttctctctgacaagttc

SEQ ID NO: 10234 - DNA, 110 bp, synthetic construct
  source 1..110: mol_type = other DNA
aaattaatcagcagacccagggagacagatccttcaagataaaacctgacttagttgtcgttcctaaattcagccttcaaattatagctctgtcagttccttagaggaga

SEQ ID NO: 10235 - DNA, 110 bp, synthetic construct
  source 1..110: mol_type = other DNA
gcttgcagagattaggatggggccatcgctggcataccacaatcacgttgatacttacccactaaaaccaggaattactattccccccttgtgcctctgtttatttttat

SEQ ID NO: 10236 - DNA, 110 bp, synthetic construct
  source 1..110: mol_type = other DNA
ggcaaatagacagttatcagcattgaatcatgttattatattattctataataattctagtcatacctttggaatggataagcaatgagttcctgctgtgtagcactagg

SEQ ID NO: 10237 - DNA, 110 bp, synthetic construct
  source 1..110: mol_type = other DNA
atcagcattgaatcatgttattatattattctataataattctagtcatacctttggaatggataagcaatgagttcctgctgtgtagcactaggaactatatctagtca

SEQ ID NO: 10238 - DNA, 110 bp, synthetic construct
  source 1..110: mol_type = other DNA
gggggccatccgttttcagtgacaggtcgtaatggacagagagggttgcattatcaaataatgcgcttctgctgggaatgtgggtctgcaacatacacatctgtcaaaca

SEQ ID NO: 10239 - DNA, 110 bp, synthetic construct
  source 1..110: mol_type = other DNA
aaataatgcgcttctgctgggaatgtgggtctgcaacatacacatctgtcaaacagccagaagcggccttttccgagctggttagggatgtaaataatgtgaccacaggc

SEQ ID NO: 10240 - DNA, 110 bp, synthetic construct
  source 1..110: mol_type = other DNA
acatgtagatcccatttatccagaaatagcggaatatccaagtgtggagtatatgtaatcgtaaagaatatgaaacaatttacacctaatagtgtagggcaggcttaaag

SEQ ID NO: 10241 - DNA, 110 bp, synthetic construct
  source 1..110: mol_type = other DNA
taatcgtaaagaatatgaaacaatttacacctaatagtgtagggcaggcttaaagttagtttgatagaaattcagtgccgttcgactttgatcagtattattctttcctt

SEQ ID NO: 10242 - DNA, 110 bp, synthetic construct
  source 1..110: mol_type = other DNA
atttagacgtacaggaatcctcatagggaaattggtgaaacaatgatgatgggtaatatcatccaagataaatgtgtgaagaataagagtgggataaagatggagccctg

SEQ ID NO: 10243 - DNA, 110 bp, synthetic construct
  source 1..110: mol_type = other DNA
atatcatccaagataaatgtgtgaagaataagagtgggataaagatggagccctgacgtggagggcaggtagagccttgtgaaagcgatggacatataaaggatgaccag

SEQ ID NO: 10244 - DNA, 110 bp, synthetic construct
  source 1..110: mol_type = other DNA
attttgaaaaaaggaagtgctttgataattagtagaatatccaccagaatgatcacaagctctgatgagaaaagtcttggcacggcaaaatcgtgccacaggaatattca

SEQ ID NO: 10245 - DNA, 110 bp, synthetic construct
  source 1..110: mol_type = other DNA
caagctctgatgagaaaagtcttggcacggcaaaatcgtgccacaggaatattcaattccttgatcatgccaggaatattgcagatggaaggaaggagaaacacttgagg

SEQ ID NO: 10246 - DNA, 110 bp, synthetic construct
  source 1..110: mol_type = other DNA
gagcctgtgttgctgtggctgtggtgtatgtagtcctgggggctgcagctctgattagctccctagaccaggaacttccatgtactttccccaacaatctctccttccct

SEQ ID NO: 10247 - DNA, 110 bp, synthetic construct
  source 1..110: mol_type = other DNA
gatgggaggcctgtcttgaagcatttgctgtcttataggttgagcaaaggatgtggggagatgcttccggttctaggaaaggagatatggaggggatacaaggaggaagt

SEQ ID NO: 10248 - DNA, 110 bp, synthetic construct
  source 1..110: mol_type = other DNA
gggagatgcttccggttctaggaaaggagatatggaggggatacaaggaggaagtggtcacatttaatcataacaactgtcacaggtggaatgcttgctattatctcatg

SEQ ID NO: 10249 - DNA, 110 bp, synthetic construct
  source 1..110: mol_type = other DNA
tttcataccacatttaagttttcgtagtcaaaatgattcagaatacatgcatagcaaatttttaaaaggctaaacgttttcataggcctgtggtacttaactttctaaag

SEQ ID NO: 10250 - DNA, 110 bp, synthetic construct
  source 1..110: mol_type = other DNA
tcacccagtcaaggcaacaaaagatagtggaagcttccctggtgaagaaccatttcccttaggagtagcagcaaaactaacgctcactgcaagtatccttctccctagag

SEQ ID NO: 10251 - DNA, 110 bp, synthetic construct
  source 1..110: mol_type = other DNA
cccttaggagtagcagcaaaactaacgctcactgcaagtatccttctccctagaggaatggatcgaagagaacaaagcttgtccagatggttttaaacagaaacattgct

SEQ ID NO: 10252 - DNA, 110 bp, synthetic construct
  source 1..110: mol_type = other DNA
atattaccatcatggacacattttaacagtttaagagaactgaataacagtgaaaaatagtttatataactataccactgacacgtgggcaaatggatttgaattctgaa

SEQ ID NO: 10253 - DNA, 110 bp, synthetic construct
  source 1..110: mol_type = other DNA
aatatcaccatacatctataagatgactatctttgtcatatttcacagaatgaacagatattttccaatggccttgataatcaagcatatgaattctggtctgcaaatga

SEQ ID NO: 10254 - DNA, 110 bp, synthetic construct
  source 1..110: mol_type = other DNA
cctatcagagatgagaagagaacccctaacgggttcatccctcccctgggtcaaacaggaattcagggaacaacaccaggcatgcagggcaatgtgtgcaaggaatagag

SEQ ID NO: 10255 - DNA, 110 bp, synthetic construct
  source 1..110: mol_type = other DNA
caggaattcagggaacaacaccaggcatgcagggcaatgtgtgcaaggaatagagatcaagacccaccctggaaatcagcaggcaaggctcaggatcctcttccacccag

SEQ ID NO: 10256 - DNA, 110 bp, synthetic construct; identical to SEQ ID NO: 10254
  source 1..110: mol_type = other DNA

SEQ ID NO: 10257 - DNA, 110 bp, synthetic construct; identical to SEQ ID NO: 10255
  source 1..110: mol_type = other DNA

SEQ ID NO: 10258 - DNA, 110 bp, synthetic construct
  source 1..110: mol_type = other DNA
aatcgttttctaagagttctaagaagaggttgggtcattaccctcccatttccatgcagcaatattcccaagagtgctgtgaaagaggaaatatgccagtaaaagtaatt

SEQ ID NO: 10259 - DNA, 110 bp, synthetic construct
  source 1..110: mol_type = other DNA
aaggacctgttttctactattttatacagagtgaactttaaaagttaccaaaaatacatatgttgttcccaaagtaaccacacacacatatgcaaaaaattctcttgaga

SEQ ID NO: 10260 - DNA, 110 bp, synthetic construct; identical to SEQ ID NO: 10259
  source 1..110: mol_type = other DNA

SEQ ID NO: 10261 - DNA, 110 bp, synthetic construct
  source 1..110: mol_type = other DNA
tacacatgactgagaacaagcttgaatatatctgaagaaatttgagaaactaaccaaattgctaccaaaagagaaagaaaattttagcagccatttgcaaatttcccgct

SEQ ID NO: 10262 - DNA, 110 bp, synthetic construct
  source 1..110: mol_type = other DNA
tcaagaaatagaacacagtcctcatactacccctgagtaaatacttccttcttagtccctaaagagaactgatatctgtaatcctaagactatgccatagatttcctttt

SEQ ID NO: 10263 - DNA, 110 bp, synthetic construct
  source 1..110: mol_type = other DNA
tttcaaagtccttaagaacagggcttaagatttcctatagaagaaattgcttatgtagacagtggcttcagcttcagaagcccaagagttccagccttgcctgcctgata

SEQ ID NO: 10264 - DNA, 110 bp, synthetic construct
  source 1..110: mol_type = other DNA
ttgatgagggatgctgagggaatgtaaaaaggaagagctagacctctgccttcggcagctgagaaggaagcgatgtgttcactgtaggaaaacacggcagggatggagaa

SEQ ID NO: 10265 - DNA, 110 bp, synthetic construct
  source 1..110: mol_type = other DNA
gatcatgcctgagtctcaacagaaaacatcctctacagtagctttcatgaccacagttggttgtacacaaacagatcagcacacatgtatttgagcatctgtgctaggaa

SEQ ID NO: 10266 - DNA, 110 bp, synthetic construct
  source 1..110: mol_type = other DNA
tccaactcagggtaatggggaaccagcatagctagagccccccagtcagagtcagaattaacctgtggcccaaggttggattcctgttaaaagtgatcccaggagttccc

SEQ ID NO: 10267 - DNA, 110 bp, synthetic construct
  source 1..110: mol_type = other DNA
ctagtcagattcattaaccactgcgccgcgacgggaactccctattacctgatttttagattataagagcaaataactgatggagctgggatttgaaccaagacagttta

SEQ ID NO: 10268 - DNA, 110 bp, synthetic construct; identical to SEQ ID NO: 10267
  source 1..110: mol_type = other DNA

SEQ ID NO: 10269 - DNA, 110 bp, synthetic construct
  source 1..110: mol_type = other DNA
ttcctagtcagattcggtaaccactgcgtcacaacgggaactccattcttaagactccttgagcttcagtttcctcatctgcaaaatacaaatcactatagaagaaggtt

SEQ ID NO: 10270 - DNA, 110 bp, synthetic construct
  source 1..110: mol_type = other DNA
tctaactgtttgcctttgggacctgcataaattttgaaggaggtaagagaatacaattaaaaacacacacatacaaacccaatgtaaatattaatcaccaataaggtact

SEQ ID NO: 10271 - DNA, 110 bp, synthetic construct
  source 1..110: mol_type = other DNA
atcgcgcttccttcactatcattggctcataagaaacatccagttttggtgactcgagcccgccaaaagtcatgtcagcatttgaagatgcagctgttactgcgggactg

SEQ ID NO: 10272 - DNA, 110 bp, synthetic construct
  source 1..110: mol_type = other DNA
actagttaacagaatgtcctacgtactctgtgagatttattttaattaaattaatccttagaatgacctcgtgaggtaagtaccattattatccttattttacagatgag

SEQ ID NO: 10273 - DNA, 110 bp, synthetic construct; identical to SEQ ID NO: 10272
  source 1..110: mol_type = other DNA

SEQ ID NO: 10274 - DNA, 110 bp, synthetic construct
  source 1..110: mol_type = other DNA
atagttcattaattataaatcagctaagttatgaaaatcatgtccccagggcaccaccaggaacaagtcacatgagcccacggaaagtcttacagagaaagtaatggcta

SEQ ID NO: 10275 - DNA, 110 bp, synthetic construct
  source 1..110: mol_type = other DNA
accaggaacaagtcacatgagcccacggaaagtcttacagagaaagtaatggctaaggtagagccacactgcaggaaagccccatgattagctctgccagaaactagtga

SEQ ID NO: 10276 - DNA, 110 bp, synthetic construct; identical to SEQ ID NO: 10274
  source 1..110: mol_type = other DNA

SEQ ID NO: 10277 - DNA, 110 bp, synthetic construct; identical to SEQ ID NO: 10275
  source 1..110: mol_type = other DNA

SEQ ID NO: 10278 - DNA, 110 bp, synthetic construct
  source 1..110: mol_type = other DNA
caggctctatctaacaggacgtttggtctggaggtgggtatgtagtgacagggtaggtccacagaaaccttgagctgttggttcagtagatctagcagttctgtgcagcc

SEQ ID NO: 10279 - DNA, 110 bp, synthetic construct
  source 1..110: mol_type = other DNA
catcccctctcttatcaaatttctcacacattgccagacatcttcttattaaacgtgaccctctactctgaattacacaagttgaaaaacattgagcagcatatttactg

SEQ ID NO: 10280 - DNA, 110 bp, synthetic construct
  source 1..110: mol_type = other DNA
ttgaagaggggaattcagtagaatagcttttatagcatgtctatgagaacaagcaaaatgttaacaaaagtggagtgcccattgtggctcagcagttaacaaacccgact

SEQ ID NO: 10281 - DNA, 110 bp, synthetic construct
  source 1..110: mol_type = other DNA
ccaccctgcagagaacctccttgggagagccatggagtccaggtagtccactagagcttagatttccaaacccatttgcccccttgatcaggtgtgtttaagccgtgtgc

SEQ ID NO: 10282 - DNA, 110 bp, synthetic construct
  source 1..110: mol_type = other DNA
caagctttgattttctgtatacttagcccttactcagcttctcctctgcttggctctttatcttttttagcacttttgcacacaggtgggcttgtggatatactactttt

SEQ ID NO: 10283 - DNA, 110 bp, synthetic construct
  source 1..110: mol_type = other DNA
aaacacatgtagacagcaaatgatctttcagtccagctgcctatgcatgtcccataaggtcgatgccagtgattagtgttttggtctgttagccttgatcttttgttgtt

SEQ ID NO: 10284 - DNA, 110 bp, synthetic construct
  source 1..110: mol_type = other DNA
agtggagagagtgagggaggaggcaatgacagtagaggtttcacccttgggcagtaagttcagctatggtaattatgattggagcagtctctgtacaatccagagaaacc

SEQ ID NO: 10285 - DNA, 110 bp, synthetic construct
  source 1..110: mol_type = other DNA
cagctggcaattcaggcaggtggcctctggaggctccatcctccccagcagactgcagaagctagaggggtacaaagagtctagttcacaggggtatttgatggaattga

SEQ ID NO: 10286 - DNA, 110 bp, synthetic construct
  source 1..110: mol_type = other DNA
cagaagctagaggggtacaaagagtctagttcacaggggtatttgatggaattgatcttgaggatgatgaggaaccacaggggtgggagtgtcgggacaggagaatgtca

SEQ ID NO: 10287 - DNA, 110 bp, synthetic construct
  source 1..110: mol_type = other DNA
actagaaaactgaaccagtttatcattaatctgtgtgaggttcaacgttattattctgttaaatgaagggcctagactggtattcatttctctcaaaacttactggtaaa

SEQ ID NO: 10288 - DNA, 110 bp, synthetic construct
  source 1..110: mol_type = other DNA
tttttgtttttttggtttttttttttttgctcaggagtacacagctaattggcaagtttctcaaagtggattctaatttagggaatgatggagaatataaaaagagttac

SEQ ID NO: 10289 - DNA, 110 bp, synthetic construct
  source 1..110: mol_type = other DNA
ccccaacccccagcgtggctgtggcccagagcgtcccagcagctccagggagatgactgtcgtttccgtgcttgaaacagaaacaggtgtttgtttgaaggacagcagtt

SEQ ID NO: 10290 - DNA, 110 bp, synthetic construct
  source 1..110: mol_type = other DNA
ctcagtttatgggaagagaagtgcaacaaacccatgaaacctacaggacatttctacccctaaaacccctactggataaggactgatataggtaattgagcgaggccaat

SEQ ID NO: 10291 - DNA, 110 bp, synthetic construct; identical to SEQ ID NO: 10290
  source 1..110: mol_type = other DNA

SEQ ID NO: 10292 - DNA, 110 bp, synthetic construct
  source 1..110: mol_type = other DNA
agtctccttatatgtaaactagaaatatcattggtgacacttggactagcttacccttacattaactcctcttaacccattctgctgggaagcatccttttttttttttt

SEQ ID NO: 10293 - DNA, 110 bp, synthetic construct; identical to SEQ ID NO: 10292
  source 1..110: mol_type = other DNA

SEQ ID NO: 10294 - DNA, 110 bp, synthetic construct
  source 1..110: mol_type = other DNA
aactccttgccactgcctcaagggacctaaactatccaccctggtcagctctccaagctcctctccagctcctccccccaacaccactccaaccttgttgatccttgaac

SEQ ID NO: 10295 - DNA, 110 bp, synthetic construct
  source 1..110: mol_type = other DNA
ataacaatgtctttgagcctttctgcagaactgaaagccccaacaaatggacgaagtactggatgaagcagtctttcttcccggaagaaggaggactaccagaaccagtc

SEQ ID NO: 10296 - DNA, 110 bp, synthetic construct; identical to SEQ ID NO: 10295
  source 1..110: mol_type = other DNA

SEQ ID NO: 10297 - DNA, 110 bp, synthetic construct
  source 1..110: mol_type = other DNA
gggaactccttattattattatttttaatatttatttgagtcaaggtctgatgtgtcttctctctcttcctctctcatatgtatgagtgtgcgtgtgtgaatggcttttc

SEQ ID NO: 10298 - DNA, 110 bp, synthetic construct
  source 1..110: mol_type = other DNA
tagccttgcacagagtcggctattagtgtttgtcagggagaagaaggagggacgatcaggaaggaaaggtggagaagtactgatgaagaagggaaaggatgggagtaccg

SEQ ID NO: 10299 - DNA, 110 bp, synthetic construct
  source 1..110: mol_type = other DNA
tcaggaaggaaaggtggagaagtactgatgaagaagggaaaggatgggagtaccgtgcagattcccatccttcagaatggggtggtcaggctccatgggagaggcagggc

SEQ ID NO: 10300 - DNA, 110 bp, synthetic construct
  source 1..110: mol_type = other DNA
gtgtgtgtgtgtgtgccattggtttgatgctaactagtttatatgttagcatactttaaaattcaattcaacgaatacttatggagctctatattccaggcactctgtta

SEQ ID NO: 10301 - DNA, 110 bp, synthetic construct
  source 1..110: mol_type = other DNA
tgggaactccctcactggctttttatatcatcttaaactgagaaaggaagggagaaggaaatgacagctctcaagagcctactctttttaccataagcaaaatatcctgt

SEQ ID NO: 10302 - DNA, 110 bp, synthetic construct
  source 1..110: mol_type = other DNA
ttgagccgtctatcagatttattaccactaactgaattccattaactttggcacgctaaccattacagggaatgcaagaatgggtcaaattgtactgtagagcattttgc

SEQ ID NO: 10303 - DNA, 110 bp, synthetic construct
  source 1..110: mol_type = other DNA
tgctgtgataaattagatacaggatactatttgatacatagtgacaaagaatctatgtttggaggaatgtgaaaagcttcctagagaaattgaccagttcaccagggtgt

SEQ ID NO: 10304 - DNA, 110 bp, synthetic construct
  source 1..110: mol_type = other DNA
aacaacagaagcactggcatgtgagtttcagagaaattccatatttgctaggagtgacacccagcactattctccaagctgagtaaactctccatccaaaaatgtcacaa

SEQ ID NO: 10305 - DNA, 110 bp, synthetic construct
  source 1..110: mol_type = other DNA
tttctccattcggcagtccaggggaagactcctaattgagtgacctttcaaccaagagtcaaggaaggttgttactgcaatcttaataaagctcttggttcttcaacttg

SEQ ID NO: 10306 - DNA, 110 bp, synthetic construct
  source 1..110: mol_type = other DNA
gagtcaaggaaggttgttactgcaatcttaataaagctcttggttcttcaacttggtccctgagccttggagcgagtagtaggagttggtcccgagtttcctgggctact

SEQ ID NO: 10307 - DNA, 110 bp, synthetic construct
  source 1..110: mol_type = other DNA
cccatctgcctcccatgtacctttgatttcaaatcttttccttacttgctacctgagctaagagtgaaataaagtgaaagccatctctggatctggacaggctcttgtga

SEQ ID NO: 10308 - DNA, 110 bp, synthetic construct
  source 1..110: mol_type = other DNA
agctaagagtgaaataaagtgaaagccatctctggatctggacaggctcttgtgatctggtctatctgacagatgctcaatattgaggtccttgatgtaaatggttccaa

SEQ ID NO: 10309 - DNA, 110 bp, synthetic construct
  source 1..110: mol_type = other DNA
cccaaatggcatttattttatatgggggtgtgcaatctgacttagtacttacatcaagtcgcagatacttctctgctacttaacctcactgaaaactgcagagccagtat

SEQ ID NO: 10310 - DNA, 110 bp, synthetic construct
  source 1..110: mol_type = other DNA
gaaaatatggaacgtacactgtgtatggctttttttttccccaaagcaaattacttgtgacaatcatatacaaggccggttcatcaatccactcttgggaactgagaggc

SEQ ID NO: 10311 - DNA, 110 bp, synthetic construct
  source 1..110: mol_type = other DNA
tgtgacaatcatatacaaggccggttcatcaatccactcttgggaactgagaggcaatcaggactcaaacacaggctcagtgttctgaggcggatggcttgctgaataat

SEQ ID NO: 10312 - DNA, 110 bp, synthetic construct
  source 1..110: mol_type = other DNA
cagcagattatccttgcttcagatggagatcaggagactccattttcagtttcttaggtcgtatatgcattgctattatctacacagcaactctcttgcaatttcagact

SEQ ID NO: 10313 - DNA, 110 bp, synthetic construct
  source 1..110: mol_type = other DNA
gctcttcaaactatactttgaggactgctcttctggaatgatctcaacactcgcacggtgatggtgagctggcgtcatcagctgaaggcactcaacctagaaggctctgg

SEQ ID NO: 10314 - DNA, 110 bp, synthetic construct
  source 1..110: mol_type = other DNA
cggtgatggtgagctggcgtcatcagctgaaggcactcaacctagaaggctctggtggctggttcaaatcactagggttttggatctaaggacaaagcatgtctagagag

SEQ ID NO: 10315 - DNA, 110 bp, synthetic construct
  source 1..110: mol_type = other DNA
ggtggggtgctacttctagaggatactgaaagctgggaaaatgagttacaggcgcagtaaggaagcccttggctgcctcaccgacaggcaagcctcacacgagactttga

SEQ ID NO: 10316 - DNA, 110 bp, synthetic construct
  source 1..110: mol_type = other DNA
gaatgtatgtctatgtatgactgggtcactttgctatatggcagaaattgtagatccactgtacttcaagaataaattaaagagtaaataaatgagtagaaggcagctgg

SEQ ID NO: 10317 - DNA, 110 bp, synthetic construct; identical to SEQ ID NO: 10316
  source 1..110: mol_type = other DNA

SEQ ID NO: 10318 - DNA, 110 bp, synthetic construct
  source 1..110: mol_type = other DNA
tgagcacctactgtctcccaggaggagactcctgaaacgtgatccctcctctaatagagggtatgcatctgttggggttatgcagctggagaggcggaaaactagctgag

SEQ ID NO: 10319 - DNA, 110 bp, synthetic construct
  source 1..110: mol_type = other DNA
aagctgagatttaacagctaagaagctgggttcaaggagaggaacactgacaggtaaggctgaaaaagcaggcgattgccacatcacaccaaggactctacaccttttct

SEQ ID NO: 10320 - DNA, 110 bp, synthetic construct
  source 1..110: mol_type = other DNA
tttcaaaattccagtaactgcatctttgagaacagcaaacacagagacaagacagcttgccgtttctctgataagagagaggcttgctaattgtgacagttctttacgag

SEQ ID NO: 10321 - DNA, 110 bp, synthetic construct
  source 1..110: mol_type = other DNA
cttgccgtttctctgataagagagaggcttgctaattgtgacagttctttacgagacataaacctagattctaaatattaatattttgtttaaaattcatgttttcaaac

SEQ ID NO: 10322 - DNA, 110 bp, synthetic construct
  source 1..110: mol_type = other DNA
tttttccaagacagatatttatgaagtgcataatgaccttctgggtcatataacagggaaacacataacacatgtaaaacagtaagaaactacgcagagttgtcatcagg

SEQ ID NO: 10323 - DNA, 110 bp, synthetic construct
  source 1..110: mol_type = other DNA
gggaaacacataacacatgtaaaacagtaagaaactacgcagagttgtcatcaggattctgtggccagggggtcagggcagggagagcttactatgagttagatgcagtc

SEQ ID NO: 10324 - DNA, 110 bp, synthetic construct
  source 1..110: mol_type = other DNA
tactcagtatcaaacactcttctccacacatccacatgactttctacttcacattgtaacatttaaaaaaggtcacataatctgtgggagccaccttaaatcctctatca

SEQ ID NO: 10325 - DNA, 110 bp, synthetic construct
  source 1..110: mol_type = other DNA
gatttctgttcattactaggactctgagcaggcagtggtctcccttactgtagtacagataaattcagctttgtcttatcagcaggtgatttttggtgagattttcccag

SEQ ID NO: 10326 - DNA, 110 bp, synthetic construct
  source 1..110: mol_type = other DNA
ccagacctctgtgttgattagtcaacacaagcacttaaatttgccttatgtgggagttcctgttgcagctcagcggtaacaaacctgactagtacacaggaggatgcagg

SEQ ID NO: 10327 - DNA, 110 bp, synthetic construct
  source 1..110: mol_type = other DNA
aggaattatctacaaagactattttaataaggtggcatccattagctaagtaggatactacatcctaactattttacacaacaaatactgaaacatctgtagacaaaggg

SEQ ID NO: 10328 - DNA, 110 bp, synthetic construct
  source 1..110: mol_type = other DNA
cccagctagaaataagagaagtgtctatgttttcagttctctccaatttaaagtcaattcagctctatcgatagggaaagtacgtagtatcaagagagagccttcatatc

SEQ ID NO: 10329 - DNA, 110 bp, synthetic construct
  source 1..110: mol_type = other DNA
ctatgaaagtattgttcactactaagtcaggtggtatattttgtgtagcttttaaattgtttcatggagttggcttgatttttgtttctctatttttctgtgtatctgtt

SEQ ID NO: 10330 - DNA, 110 bp, synthetic construct
  source 1..110: mol_type = other DNA
ttttgttttttttgctagtgtgattttagtaattatcaagtctgttaatggacgtctttggttttatgggggtcttttggccgtgtctgctgcgtgtggaagttcctggg

SEQ ID NO: 10331 - DNA, 110 bp, synthetic construct
  source 1..110: mol_type = other DNA
atcctactcagattcgtttcctctgtgccacaatgggagctcctgttctctgccttctcacggccacctccttattgtgggtcctcctcctgccttgcttagcttctcac

SEQ ID NO: 10332 - DNA, 110 bp, synthetic construct
  source 1..110: mol_type = other DNA
tcttagagccgttatcatcagagatgagtttaggggagctattcaggtacacagggaggaaaaggacttttgggaagagataatagcaaaacatgcaacagtctgtttgg

SEQ ID NO: 10333 - DNA, 110 bp, synthetic construct
  source 1..110: mol_type = other DNA
gttctaccttggtgcataaagaaatttgacccgtaaacatcatgcaaaacaactgagggtctttatatatgtttcacacaaaatatttctgggagttgaatttgttgggc

SEQ ID NO: 10334 - DNA, 110 bp, synthetic construct
  source 1..110: mol_type = other DNA
tgacggtgttttcactgtatttattaccaaagaatccttgtaagaatagaaacatcagggcctctccttgaaagaggacctctgtatcttttcttctagcctctgagtgc

SEQ ID NO: 10335 - DNA, 110 bp, synthetic construct
  source 1..110: mol_type = other DNA
gcttctgttccattctctgtttcttcttctcctggcattcccattacatgtgcgttacagcttttgtaattgtcccatggttattgaatactctgttcttttctttcttt

SEQ ID NO: 10336 - DNA, 110 bp, synthetic construct
  source 1..110: mol_type = other DNA
tataagggactgaaatgatgaagccaaggttcttgtgaagtctccccaaaaagcctcaggggaaacagtatcagtccactcattgaaactgagttcacattcttttttgt

SEQ ID NO: 10337 - DNA, 110 bp, synthetic construct
  source 1..110: mol_type = other DNA
tcaggggaaacagtatcagtccactcattgaaactgagttcacattcttttttgtttttttaatggcagacccaggttaggggttgaattagatgtgccacttcggccct

SEQ ID NO: 10338 - DNA, 110 bp, synthetic construct
  source 1..110: mol_type = other DNA
ctgaacaacttggatgagcatgtccagctgcacttccatggtcaacgcccaccacccaacctctgtcagcttcctgactctgcctttcttacgtatcccagctgggtacc

SEQ ID NO: 10339 - DNA, 110 bp, synthetic construct
  source 1..110: mol_type = other DNA
taaggcatcctgtttccaggttggtggccaaagagaaagctcagcttctagtcatcttatgtctgcttcccttgactttcccaaagacagcaggctgaggacaggaatga

SEQ ID NO: 10340 - DNA, 110 bp, synthetic construct
  source 1..110: mol_type = other DNA
tttctattgactggtgagaagcagtggctacatgaaccaacatgcaaaaatgcgggaattggaagccagctctggctcctcctccacatctgaaactcctgcaatagttg

SEQ ID NO: 10341 - DNA, 110 bp, synthetic construct
  source 1..110: mol_type = other DNA
gaataagtattattccaatttactgtctaatcaagcacactttagttccctgcccactgttcaagaagaaaccagctctttactgatcttaagagcattcagcagtagaa

SEQ ID NO: 10342 - DNA, 110 bp, synthetic construct
  source 1..110: mol_type = other DNA
tgcccaggtaatcctgaaggaggaacaggattggtaagatcaaattgttgtttgggggccacaaaaattctcctctttgggaactaaagaggagatatcaaattggcagg

SEQ ID NO: 10343 - DNA, 110 bp, synthetic construct
  source 1..110: mol_type = other DNA
atgggttaaggatctggctttgtaggtcacgaatgtggctcacatcttgcgttgctgtgactgtggcataggccttcagctatagctccaatgagacacctcacccggga

SEQ ID NO: 10344 - DNA, 110 bp, synthetic construct
  source 1..110: mol_type = other DNA
tgtgactgtggcataggccttcagctatagctccaatgagacacctcacccgggaactttcatatgctgcaagtgcggctgtaaaaagaaaagaaaagaaaacctatgat

SEQ ID NO: 10345 - DNA, 110 bp, synthetic construct
  source 1..110: mol_type = other DNA
cccctcccaccttccctgccactcccgcaggctccggctcgtgctcacactgagggcgagtgcccggggccaggggcagaccaggagcagctcacttgtacttggcagag

SEQ ID NO: 10346 - DNA, 110 bp, synthetic construct
  source 1..110: mol_type = other DNA
gcgagtgcccggggccaggggcagaccaggagcagctcacttgtacttggcagagggaagctctgcagatcccaacaagtgtctttacgggtcgggtcttgtccctgtaa

SEQ ID NO: 10347 - DNA, 110 bp, synthetic construct
  source 1..110: mol_type = other DNA
tgaatctttttccttccttttgtcaaactcctgcttgtctgtttcctaagctgtaagaagaggagggagggaacgtttctgtgagaaagcagggatgctatttcgggttc

SEQ ID NO: 10348 - DNA, 110 bp, synthetic construct
  source 1..110: mol_type = other DNA
agaagaggagggagggaacgtttctgtgagaaagcagggatgctatttcgggttctgttgcccttgctgccttgaagatgtagtggtgtcaacatccacaaaataggtgt

SEQ ID NO: 10349 - DNA, 110 bp, synthetic construct
  source 1..110: mol_type = other DNA
aactctggctgcccccttcgctgccgaatcatgagcatcgctctagcagggaactcctgtctttcctgatcatcagtcagcatcggcagcactctagctaagcttttcac

SEQ ID NO: 10350 - DNA, 110 bp, synthetic construct
  source 1..110: mol_type = other DNA
tttcatgaaagtagggcccccgtgatggaactgatagctttacaagaaaaggacgtgagactatagccagaaggtgacacaccaggtagagaatgcccacaaggaatggg

SEQ ID NO: 10351 - DNA, 110 bp, synthetic construct
  source 1..110: mol_type = other DNA
gaacaaatttcattctgagcagatacctacaagagaaggaaagcagaaagatatacgaccacaggggagcaatgtctttccatacattacaaacactcagtagaaaaaac

SEQ ID NO: 10352 - DNA, 110 bp, synthetic construct
  source 1..110: mol_type = other DNA
tctcaaatctgaatgatgcatccttctttatcaaaatgagagggccagtgcctgttctgagacccaacaagctcttcctttgattttaacaaactcctagaagagaaggg

SEQ ID NO: 10353 - DNA, 110 bp, synthetic construct
  source 1..110: mol_type = other DNA
cttgaggtttcattacagtctctgctgcattcaattactgacagctgctactcaatcacacatcgtgttacaaattcataccttctgttccacaatcaaaatcagtacca

SEQ ID NO: 10354 - DNA, 110 bp, synthetic construct
  source 1..110: mol_type = other DNA
gatctggggtgttagcaccacacacatacatacacaaatggtaactatgaggcgatgatgcgctaattagcttatcatggtaattatgtcacaatgtgtatgtataaaat

SEQ ID NO: 10355 - DNA, 110 bp, synthetic construct
  source 1..110: mol_type = other DNA
aaatgatccttgcttgtaacatttgtagatttctgtggtttaaatatctccactacagatgatttcaagctaccaacatgatttagaaaatccctgaaaatttaatattg

SEQ ID NO: 10356 - DNA, 110 bp, synthetic construct
  source 1..110: mol_type = other DNA
ttatcaagtgattgacaggatgaagcaggcacaatacatttttctgattaatatactgccatgcgctttgatttcctccatatgaagcttacacagacgaggtggtgcca

SEQ ID NO: 10357 - DNA, 110 bp, synthetic construct
  source 1..110: mol_type = other DNA
caaagatagaaaaatactgtctgacgagagagctattaaaaagaataggactgtattaccactggctcaaatcactccactaagagaataccttctctgaagaaactaaa

SEQ ID NO: 10358 - DNA, 110 bp, synthetic construct
  source 1..110: mol_type = other DNA
aatgcctcatggcattatctttaggaaaaactttttattgggcaactcactcaagcatactcgattccacatttcttaataaatgaggggatgtgccctcttaacactga

SEQ ID NO: 10359 - DNA, 110 bp, synthetic construct
  source 1..110: mol_type = other DNA
tgggttaaatggggatttaaattttgcagaaggaaatgctaaataactggaagatatttgagttaaacaaacaaaaaacgtgcatggaggaaaacaaggaaagtatcaga

SEQ ID NO: 10360 - DNA, 110 bp, synthetic construct; identical to SEQ ID NO: 10359
  source 1..110: mol_type = other DNA

SEQ ID NO: 10361 - DNA, 110 bp, synthetic construct; identical to SEQ ID NO: 10359
  source 1..110: mol_type = other DNA

SEQ ID NO: 10362 - DNA, 110 bp, synthetic construct; identical to SEQ ID NO: 10359
  source 1..110: mol_type = other DNA

SEQ ID NO: 10363 - DNA, 110 bp, synthetic construct
  source 1..110: mol_type = other DNA
ctaacagctagaccatgatttcactgtgaagaactagacatctgtatttattattaatttgatagtatttttgtccccattaaacagaagatgtaattgatgcttagagg

SEQ ID NO: 10364 - DNA, 110 bp, synthetic construct; identical to SEQ ID NO: 10363
  source 1..110: mol_type = other DNA

SEQ ID NO: 10365 - DNA, 110 bp, synthetic construct
  source 1..110: mol_type = other DNA
tttctataatcattttgaaatagtaggtgagctattgtctcaagatactgcaacacttgtccattatatgacaagtcaaaattcttgaatgtgtatatgattgagtggga

SEQ ID NO: 10366 - DNA, 110 bp, synthetic construct
  source 1..110: mol_type = other DNA
aacacaactctacctcaacattcagctggtggcttcacaagctacttgactgaaaaagtaagaagtaatgactagtctgggatcacacgagttggaattgtcccaagcaa

SEQ ID NO: 10367 - DNA, 110 bp, synthetic construct
  source 1..110: mol_type = other DNA
aacctgctgagccactagggaatttcatcattaatattttaaacagatataaagcagattttaagtgaacaatgataaaatacagttgacccttgaacaacatagatttg

SEQ ID NO: 10368 - DNA, 110 bp, synthetic construct
  source 1..110: mol_type = other DNA
catatcttaaaaataggaatttagaggctttttaatcatcagcctataatcatagcttgttctgttctagaaaaggtctttcgtgagcaaataaattcattccctttcaa

SEQ ID NO: 10369 - DNA, 110 bp, synthetic construct
  source 1..110: mol_type = other DNA
cttgttctgttctagaaaaggtctttcgtgagcaaataaattcattccctttcaacttacattctattgttgacatagcatgttacatttatcctcataaacacagtgca

SEQ ID NO: 10370 - DNA, 110 bp, synthetic construct
  source 1..110: mol_type = other DNA
attttcataggtagaaagcttaaatgctacactgtttcttccttagagctatgctctagaaaggtcatccctttatgttctacttattgctattattcatgtatttgaag

SEQ ID NO: 10371 - DNA, 110 bp, synthetic construct
  source 1..110: mol_type = other DNA
tctatttcatttaagaagcttctggttataatagagactagatatgcatataaacctccctgagctaacgtgttaatatcactattgacaacttagtacaaaggcctgga

SEQ ID NO: 10372 - DNA, 110 bp, synthetic construct
  source 1..110: mol_type = other DNA
aacattttaaacctctgtatacttgagacccatgagcagctcaactatatttgtctaatatgcactctatttcagataatcacgagaataccaataccttaggcctggaa

SEQ ID NO: 10373 - DNA, 110 bp, synthetic construct
  source 1..110: mol_type = other DNA
tattacaatatctatgattttcttagcattaagcctcttttgtcatggctagtttgcaattattgtcatttctacttatcagagtaatcacactggaacgttactatgga

SEQ ID NO: 10374 - DNA, 110 bp, synthetic construct
  source 1..110: mol_type = other DNA
gcaattattgtcatttctacttatcagagtaatcacactggaacgttactatggaagaacacttttttgtcctagggagaagcagcttagagagacaagtaaaatttata

SEQ ID NO: 10375 - DNA, 110 bp, synthetic construct
  source 1..110: mol_type = other DNA
caaaaatgtgaaaatgtacaagttcaactctatgggatcagctattatcacaggtgcatttgtatcttttagcagtatcaggaacttaagagtgacttggcaatgcttct

SEQ ID NO: 10376 - DNA, 110 bp, synthetic construct; identical to SEQ ID NO: 10375
  source 1..110: mol_type = other DNA

SEQ ID NO: 10377 - DNA, 110 bp, synthetic construct
  source 1..110: mol_type = other DNA
actgcaagagcggagctgaatagttgcagcagagaccatggctggcaaagtccgaaatatttactctctgacactttatagggcaagtttgccagcttctgccttgtaaa

SEQ ID NO: 10378 - DNA, 110 bp, synthetic construct
  source 1..110: mol_type = other DNA
aatatttactctctgacactttatagggcaagtttgccagcttctgccttgtaaagcagctttccagtaaagaaggtcaaagctacatccactttcataagcaaaccaag

SEQ ID NO: 10379 - DNA, 110 bp, synthetic construct
  source 1..110: mol_type = other DNA
agagagagcaagtcagaatttgaaaagatactccacatcctatgtctgaagggcaatgttaactaaaaggagataccacttcacaactaagaccaaaatccacaatactg

SEQ ID NO: 10380 - DNA, 110 bp, synthetic construct
  source 1..110: mol_type = other DNA
cacagccataatagtgactacattttggcaagtaggtattagtggcttgttagcgctctcaggtgcttcatttgagctgagtctcttaagatttttagaaacactttctt

SEQ ID NO: 10381 - DNA, 110 bp, synthetic construct
  source 1..110: mol_type = other DNA
ctgtttctaacattgaaaaacatgcatcatagaactctgatctctaagaaaaggtaaataggatgagctccatgagtgacctggattttgcatgggagcaagtttctaga

SEQ ID NO: 10382 - DNA, 110 bp, synthetic construct
  source 1..110: mol_type = other DNA
aaataggatgagctccatgagtgacctggattttgcatgggagcaagtttctagatggaagcacaggagttggaaccccagtagcagactagtaatattgctgatctgag

SEQ ID NO: 10383 - DNA, 110 bp, synthetic construct
  source 1..110: mol_type = other DNA
tatcaagacctataaagaagctgtagcaattaagacaatacagtagtgtaaaagctcactaaggaaacaggtcgcacagtacagaaacatacacagtgtaattcttctaa

SEQ ID NO: 10384 - DNA, 110 bp, synthetic construct; identical to SEQ ID NO: 10383
  source 1..110: mol_type = other DNA

SEQ ID NO: 10385 - DNA, 110 bp, synthetic construct
  source 1..110: mol_type = other DNA
ctctctaggaaaaatgccaacttatgcattagtcttttttggagctcttagctactatgtaagaatcccaaccacctacctaaagaggccacagtgagaaacagactgca

SEQ ID NO: 10386 - DNA, 110 bp, synthetic construct
  source 1..110: mol_type = other DNA
attagcattgtttgattattctattttgtgtgtaattttatttttatttatttcttagggcatattgtagtgcctgggctagggatccactcagagctgcagctgccagc

SEQ ID NO: 10387 - DNA, 110 bp, synthetic construct
  source 1..110: mol_type = other DNA
tatgcatttccccttgtatttttcaagggagctatatgctataaaactttttctgaacttcccatctaatcttcagaaatgtatttgctggagtttccatcatggtgcag

SEQ ID NO: 10388 - DNA, 110 bp, synthetic construct
  source 1..110: mol_type = other DNA
ttattacttcatgatgctttactcactttaccctaatttcgttttcttcattacacctgccggttacttctttgtatgcttttgtgtgacccagtagaacatgaagcttt

SEQ ID NO: 10389 - DNA, 110 bp, synthetic construct
  source 1..110: mol_type = other DNA
atttatgtgaaaatttgtgtcattagattgcagctataacaagactcttacctagtttggagtttatggaagactctctaggcaagtaaatttaaggagttaagataaca

SEQ ID NO: 10390 - DNA, 110 bp, synthetic construct
  source 1..110: mol_type = other DNA
tttggagtttatggaagactctctaggcaagtaaatttaaggagttaagataacaaggaactaacccatgaaaataatagaaagcatgcctgacagaggaggaattgaaa

SEQ ID NO: 10391 - DNA, 110 bp, synthetic construct; identical to SEQ ID NO: 10389
  source 1..110: mol_type = other DNA

SEQ ID NO: 10392 - DNA, 110 bp, synthetic construct; identical to SEQ ID NO: 10390
  source 1..110: mol_type = other DNA

SEQ ID NO: 10393 - DNA, 110 bp, synthetic construct
  source 1..110: mol_type = other DNA
atagattcaatgctaccaacaccttgattgctttcacactattaagttccaacgatagctaaccaaaagtttgtattttaacagatttaaaggtagactttggatcacat

SEQ ID NO: 10394 - DNA, 110 bp, synthetic construct
  source 1..110: mol_type = other DNA
agattgaacagtcagcagtctgaatcctctcattaaagacatgtgcctgcttgtccaccactctgcttctagctcactctgcccattgtgcaatttcatctccagtttct

SEQ ID NO: 10395 - DNA, 110 bp, synthetic construct
  source 1..110: mol_type = other DNA
gtatagcaaatgccacaaacttagcagttgaaaataacccaatattattatctcattttccctgtgttagaattttggccttgtttagctggattctctactcagtgtct

SEQ ID NO: 10396 - DNA, 110 bp, synthetic construct
  source 1..110: mol_type = other DNA
atcatgttccatcacaggcaattagctatagtttgttgtgcctatacagcaggatctcattgcttttgttatcttaaaatacaacagggttaggaaaaaaagtcaaaata

SEQ ID NO: 10397 - DNA, 110 bp, synthetic construct
  source 1..110: mol_type = other DNA
tttttccatactaggatttgcctatgttttgctcagataaagtggctatccagatgaactctggagtggaggtgatgttactctcccagtataaggctatgagtgcctta

SEQ ID NO: 10398 - DNA, 110 bp, synthetic construct
  source 1..110: mol_type = other DNA
cattcaggtctcagccatggagcaattagaaactcatgggtctcacagactctgccatgtgcacgtgcagcttagccttcatctaaggaaacacagtgaacctccactag

SEQ ID NO: 10399 - DNA, 110 bp, synthetic construct
  source 1..110: mol_type = other DNA
acatgaactgatctattttcttctctctcttacacacataaacataatacacacgaagctacatggtaggttccttaatcattcctagtttatagatagaaaaacaaatc

SEQ ID NO: 10400 - DNA, 110 bp, synthetic construct
  source 1..110: mol_type = other DNA
aattaatgatttgataagaacgctgaaatttcaacagcttgtttacacaatggtaacattcagtcaactttctcagcaaggctatctgtgggaaagaagcacatttttct

SEQ ID NO: 10401 - DNA, 110 bp, synthetic construct
  source 1..110: mol_type = other DNA
gagaggcaaggcaccattgttgggaggcattgaggagggggatagggctgccgctaagagcttcctcctctgtgagcactcttaggtaacaggaaacacctgttagagta

SEQ ID NO: 10402 - DNA, 110 bp, synthetic construct
  source 1..110: mol_type = other DNA
gacccatctgcatcaagagctttgctgctaatatcatagagctagctagaggataacctaatccagatcaaggcctctgattgtaagttccttgctgtggacccaataaa

SEQ ID NO: 10403 - DNA, 110 bp, synthetic construct
  source 1..110: mol_type = other DNA
gtgtgatgagtgtctcttgtgttttattttccttccactagaatacctggccctgttccagactaaagctatccgagcaatctctgcctggtctaagtctgaggaagact

SEQ ID NO: 10404 - DNA, 110 bp, synthetic construct
  source 1..110: mol_type = other DNA
ttccagactaaagctatccgagcaatctctgcctggtctaagtctgaggaagactcaaagcagtccttggctctcagcatttcatggtttagactataaagaactaaata

SEQ ID NO: 10405 - DNA, 110 bp, synthetic construct
  source 1..110: mol_type = other DNA
ttttccattgccttgttgtacttttctacactgcattattatcacctcacatagatagaaacatatgtttatgatctgtctgttcagctaaaatttaagttcagtgaagg

SEQ ID NO: 10406 - DNA, 110 bp, synthetic construct
  source 1..110: mol_type = other DNA
gttctctaaaacaaatatcagatagcttattgacgtgaagtaaggaccctgctgccacacagtctagcttcctatctcagctctatttcctagctgcctgactttaagca

SEQ ID NO: 10407 - DNA, 110 bp, synthetic construct
  source 1..110: mol_type = other DNA
tgtagtccccatgtctaaattcataatctttctaagccatttcctcctccaccgtatgtgcagttctatagggagaaacgtaagtgtcacccttgaaaatttatttcact

SEQ ID NO: 10408 - DNA, 110 bp, synthetic construct
  source 1..110: mol_type = other DNA
atcatttctgatccactacatttttatggaagtttattgagctattaatttgaataaattattagatgcagtgcatctgggtttcagaaaggtgttttacaaggtctcac

SEQ ID NO: 10409 - DNA, 110 bp, synthetic construct
  source 1..110: mol_type = other DNA
ctcacgaggaaatgcttacacagctattttattgatgctcgtaaagagccaaaaagtagagagctatgaaaacagtaggactctgtgcctctctctttgagagggagagt

SEQ ID NO: 10410 - DNA, 110 bp, synthetic construct
  source 1..110: mol_type = other DNA
gtagagagctatgaaaacagtaggactctgtgcctctctctttgagagggagagtgacagtggcttggaagtcctgtaaagatttctgagtgatctgcagttccacatag

SEQ ID NO: 10411 - DNA, 110 bp, synthetic construct
  source 1..110: mol_type = other DNA
caaaagggttgtgaactggcgattagatatctccctaatcctcttttgagctttgtgctatttatcagatattcttcctaatttgtggttttaccttatgaacattttca

SEQ ID NO: 10412 - DNA, 110 bp, synthetic construct
  source 1..110: mol_type = other DNA
acaccgtaacaaaacataccctgacaaacaaaatcagctaccttcactatcaacgtatgtcaggggctcagttgagctggagagaaagccctgagttctcagctgtcaat

SEQ ID NO: 10413 - DNA, 110 bp, synthetic construct
  source 1..110: mol_type = other DNA
tttcttgctaaataatttagttgtagcttaggaatgtgaaggtgctatgtagaagaaaaatggatctattcccaggggctggctgaactaaactaactgtggccatcata

SEQ ID NO: 10414 - DNA, 110 bp, synthetic construct
  source 1..110: mol_type = other DNA
gtctgatatatacatgtgtggacatttatataaagtgtacaattcagtgttttgtattatattagcataattgggtatccaccatcaccatccagttttagaacattttc

SEQ ID NO: 10415 - DNA, 110 bp, synthetic construct
  source 1..110: mol_type = other DNA
aggatttcctatgaccaataggcaaaggtaaaaaaggccttggtcttggtaattgaattgactggtacaataagtgggcactagctcaaaaaagctgttgtcattttaca

SEQ ID NO: 10416 - DNA, 110 bp, synthetic construct
  source 1..110: mol_type = other DNA
cttagtgtagcaatctactgtgtggttggttgaaactaatagaaaaatctatgtcaaattctcattatttattagtttatttgaatttgaagtcaagtgggggacgttgt

SEQ ID NO: 10417 - DNA, 110 bp, synthetic construct
  source 1..110: mol_type = other DNA
attagtagggctgacctaagggaaatttatttaagctagtcagaaagatttgcagagcattcaaatgcaactttttaagttttaaataggtttaaatattgctaatgccc

SEQ ID NO: 10418 - DNA, 110 bp, synthetic construct
  source 1..110: mol_type = other DNA
agtatttagctgaacagagttaagtctctcaactagtgtctatctacagttttagaagttgttaatatcctcaagagataagaagaaaaatagaacagattacagatggc

SEQ ID NO: 10419 - DNA, 110 bp, synthetic construct
  source 1..110: mol_type = other DNA
tgttgaatgattcaacaggcttcttttcaggggcaaaattatttctcctagctgtaatttatgagaaccctacatgtgtttctatttgagtagatctaaagagcttcgtt

SEQ ID NO: 10420 - DNA, 110 bp, synthetic construct
  source 1..110: mol_type = other DNA
gcacttcttcgtgaacaagtctccttccctgagactttttttttttcttgagcaaatggcgtaaggactgagatggcatgttgacaaggtgcctctgagatcacttattt

SEQ ID NO: 10421 - DNA, 110 bp, synthetic construct
  source 1..110: mol_type = other DNA
gagtcaaaaatcatttatatagctgaattcgcaacattccagcttgtgctgaaatagccaatttataacacaactcttaactcatatatctggaaagatatcaactctat

SEQ ID NO: 10422 - DNA, 110 bp, synthetic construct
  source 1..110: mol_type = other DNA
tattcaggagctacaacttctcttacaaccaaaagcatacttttcagctttttacaaatagtaatgtttggaatacttccaatgacctaaacatgtgaactatggcataa

SEQ ID NO: 10423 - DNA, 110 bp, synthetic construct
  source 1..110: mol_type = other DNA
atagactatcctcacaacactgatcctggacatccctcaaaactcttctaccattcatctaaagattttaacatgggacttctcatgtgaaacagtctacacaaactaat

SEQ ID NO: 10424 - DNA, 110 bp, synthetic construct
  source 1..110: mol_type = other DNA
catctaaagattttaacatgggacttctcatgtgaaacagtctacacaaactaatctcattagaaaacagttccttctcagaggaaaagctttagacttttaatctgctg

SEQ ID NO: 10425 - DNA, 110 bp, synthetic construct
  source 1..110: mol_type = other DNA
ctgatatatggaaaaatgaggacagagaactgagctgagaaagaaagtcctagcggagctgcctgcattgcaaatgttcaatggatgagaggtacatagtttttttctga

SEQ ID NO: 10426 - DNA, 110 bp, synthetic construct
  source 1..110: mol_type = other DNA
cgtaacagtgagaggtacggaattttataaacgcttgaaagaaaccaatcttgtagaaatggaagacaatttttataatgccctcttgctaaattcagtaattttcccac

SEQ ID NO: 10427 - DNA, 110 bp, synthetic construct
  source 1..110: mol_type = other DNA
tataaaagaagcctgacagaaagctatctaatgtattttctattgatttaattatggaaaagaccaaattataagaccaaaaactacatcataggtggcttgtttgggga

SEQ ID NO: 10428 - DNA, 110 bp, synthetic construct; identical to SEQ ID NO: 10427
  source 1..110: mol_type = other DNA

SEQ ID NO: 10429 - DNA, 110 bp, synthetic construct
  source 1..110: mol_type = other DNA
acattcacttcttctgaacttcccttccaaatcacattaaattttaaaaagctgtataattattatgtttctattgacgcaataggcatgagagtggagacaagccttag

SEQ ID NO: 10430 - DNA, 110 bp, synthetic construct
  source 1..110: mol_type = other DNA
ataattattatgtttctattgacgcaataggcatgagagtggagacaagccttagtacaatttcactccctcctaatgacacatattccagtgagcaatgcatggacact

SEQ ID NO: 10431 - DNA, 110 bp, synthetic construct
  source 1..110: mol_type = other DNA
ctcctctccatttccacagctctcaactagcaaaaataattaactgtggtactgaagtagcctcaaaataagttactttatttgttcaacccaaatgatccacctaatgc

SEQ ID NO: 10432 - DNA, 110 bp, synthetic construct; identical to SEQ ID NO: 10431
  source 1..110: mol_type = other DNA

SEQ ID NO: 10433 - DNA, 110 bp, synthetic construct; identical to SEQ ID NO: 10431
  source 1..110: mol_type = other DNA

SEQ ID NO: 10434 - DNA, 110 bp, synthetic construct; identical to SEQ ID NO: 10431
  source 1..110: mol_type = other DNA

SEQ ID NO: 10435 - DNA, 110 bp, synthetic construct
  source 1..110: mol_type = other DNA
tgtttgataatgaacatttccaattggggcagaatttagactgacattcattttcattattatcatactgtttgatagcacctttgtgggaaggaagcttatagtattaa

SEQ ID NO: 10436 - DNA, 110 bp, synthetic construct
  source 1..110: mol_type = other DNA
ggggcagaatttagactgacattcattttcattattatcatactgtttgatagcacctttgtgggaaggaagcttatagtattaatttaaaatatccattaattgtgaac

SEQ ID NO: 10437 - DNA, 110 bp, synthetic construct
  source 1..110: mol_type = other DNA
tgaaaagtgtaacagttcattgttttgagcaatgccatgtttaattttgcctataaggaaaaggcaatcctgaaaatgacatcactcttataaacttgggtagaatataa

SEQ ID NO: 10438 - DNA, 110 bp, synthetic construct
  source 1..110: mol_type = other DNA
catgtttaattttgcctataaggaaaaggcaatcctgaaaatgacatcactcttataaacttgggtagaatataacagaaggctaaatctatcctcccattaattaattg

SEQ ID NO: 10439 - DNA, 110 bp, synthetic construct
  source 1..110: mol_type = other DNA
gggcacccacaatttttcctgggaacatggatgctggaggcagccattttgggggtttcattctactgtaatagctgctgataggaagcattattttggaattctccctc

SEQ ID NO: 10440 - DNA, 110 bp, synthetic construct
  source 1..110: mol_type = other DNA
tttcattctactgtaatagctgctgataggaagcattattttggaattctccctcaagatattagtgctggaacctacccacaaactgcctggcactagccctagccccc

SEQ ID NO: 10441 - DNA, 110 bp, synthetic construct
  source 1..110: mol_type = other DNA
taaaacaactccttttcctagaagtgttctaaaaacttaccattccagcatgattgtttcagttccccaatggacagaagagtatcagtgctcaattcaaaactggctgt

SEQ ID NO: 10442 - DNA, 110 bp, synthetic construct
  source 1..110: mol_type = other DNA
gtttcagttccccaatggacagaagagtatcagtgctcaattcaaaactggctgtctcaagcccttcagacttgcttcttgttcaacacctgaagttatctaaactggtc

SEQ ID NO: 10443 - DNA, 110 bp, synthetic construct
  source 1..110: mol_type = other DNA
aatgtgatagcttagaaagtggcagaagaattagagttatgtctgaaaataagttactaggaaagtaaagaagaatctattcagagcacaaattcatggaaaggattatt

SEQ ID NO: 10444 - DNA, 110 bp, synthetic construct; identical to SEQ ID NO: 10443
  source 1..110: mol_type = other DNA

SEQ ID NO: 10445 - DNA, 110 bp, synthetic construct
  source 1..110: mol_type = other DNA
acctggttacattgttatagctgtgcatgaagaaaataatatggccttatagatttctaaagaagaggaagtgaaaaggtatgatttaggatgtaagtaaattaaacaca

SEQ ID NO: 10446 - DNA, 110 bp, synthetic construct
  source 1..110: mol_type = other DNA
tattgcctcctcttttaccagcatttaacaaacatgaaagatctctttaaacaaagaaaacaacatttggacaagcaataaattgatccaccagagtattttgatggaat

SEQ ID NO: 10447 - DNA, 110 bp, synthetic construct
  source 1..110: mol_type = other DNA
agggtcttcttgggcactgccttcctgcggaaagtgcctatagcctgcaaccacgggcaaatatggaggtctcctctgttttctttctctcaaggactgtagctctatgc

SEQ ID NO: 10448 - DNA, 110 bp, synthetic construct
  source 1..110: mol_type = other DNA
ggcaaatatggaggtctcctctgttttctttctctcaaggactgtagctctatgctgcttgtacagtagtttgaaatggtgtccctctatataattttttcattttaaga

SEQ ID NO: 10449 - DNA, 110 bp, synthetic construct
  source 1..110: mol_type = other DNA
gtgagctaatttgtgaggaccttagtttctctgtaaagaatgttatggattctgagattattgaaggacagcacactgactccgtcagtttccaagccacctaataaatt

SEQ ID NO: 10450 - DNA, 110 bp, synthetic construct
  source 1..110: mol_type = other DNA
gattattgaaggacagcacactgactccgtcagtttccaagccacctaataaattagaattagtttcacctatagttactatcagaatcctctcactgaaaaagataaag

SEQ ID NO: 10451 - DNA, 110 bp, synthetic construct
  source 1..110: mol_type = other DNA
tgtgttcttcccaaaagagatcaggatcaacgggcttccacgtggcaaggcctgaaatatatctgtgccctcctttcacacagctatttgcattagtctacaatagttca

SEQ ID NO: 10452 - DNA, 110 bp, synthetic construct
  source 1..110: mol_type = other DNA
gtctggagaagaggccaagcagtgctgatctactgggctgtgcatgattgacctgtgaagctgtatccatcctatctgtctctgagatccccatttgggggatgctctga

SEQ ID NO: 10453 - DNA, 110 bp, synthetic construct
  source 1..110: mol_type = other DNA
tcttgcccatgaaccaggaaatcaagtctttcttactcataattcaccttgtgttgagttcaatgtcaacctatgataggaattttcagttagctgttctgaattatttt

SEQ ID NO: 10454 - DNA, 110 bp, synthetic construct; identical to SEQ ID NO: 10453
  source 1..110: mol_type = other DNA

SEQ ID NO: 10455 - DNA, 110 bp, synthetic construct
  source 1..110: mol_type = other DNA
tgtccttgtgaggaaaaggatggcattctaactgtgagctgtgaaaaccgggggatcatcagcctttctgaaattagccctccccgtttcccaatctaccacctcttgtt

SEQ ID NO: 10456 - DNA, 110 bp, synthetic construct
  source 1..110: mol_type = other DNA
gctgttgaataaatgacttgccagcaatagagaccaaactgagcccctatgacaaaaacctcttcaaggagaataaccagctacttattagcaagttgattatatcaggt

SEQ ID NO: 10457 - DNA, 110 bp, synthetic construct
  source 1..110: mol_type = other DNA
ccctaatgacctcgtgttaccttaactctgtacagttgaaatagccctatttccaaatagggtcattttcaaagctattgggagttaaacttcaacatgcgaattatggg

SEQ ID NO: 10458 - DNA, 110 bp, synthetic construct
  source 1..110: mol_type = other DNA
ttctcctttctttaactgcacaccgaggatgaatatacagaccagctcacagagattgcgttgtattggtttcttaatctatgggataggaattatcatgataggcaagg

SEQ ID NO: 10459 - DNA, 110 bp, synthetic construct
  source 1..110: mol_type = other DNA
tattttgtgatcaatgctcacctggttgttattattttttctggccacgcccatggcatgtggaagttcccaggccagggatcgactcctcactgaagttgtgacctgca

SEQ ID NO: 10460 - DNA, 110 bp, synthetic construct
  source 1..110: mol_type = other DNA
gcatgtggaagttcccaggccagggatcgactcctcactgaagttgtgacctgcactacagctatggcaatgttggatccttgacctgctacccaggggaacttctatca

SEQ ID NO: 10461 - DNA, 110 bp, synthetic construct
  source 1..110: mol_type = other DNA
agcaaagttctttaagagaaacatggatcctggataaagatgtcaaagctgcaagcaaaaataaaaggaaatattgttatgacagtgggggtgctctctgcctttgccct

SEQ ID NO: 10462 - DNA, 110 bp, synthetic construct
  source 1..110: mol_type = other DNA
caaaaataaaaggaaatattgttatgacagtgggggtgctctctgcctttgccctgaaatcaaaattcactcaaagttctgtaatttggagccttgctcagggggaaaag

SEQ ID NO: 10463 - DNA, 110 bp, synthetic construct
  source 1..110: mol_type = other DNA
attgcgagtcagcatcatcaaccttttagtctagagtctctgtgcttgtgggcggcgtatagttgacttcttccaagtgctgggggtttcagcacttgcaaaacagctcc

SEQ ID NO: 10464 - DNA, 110 bp, synthetic construct
  source 1..110: mol_type = other DNA
tttgagctagatactgtttttcttaatatcacgtaatgaatagggattgagtaaatacatttgaggaaatgaaatactttgccatattgctagcaataccaattccagtt

SEQ ID NO: 10465 - DNA, 110 bp, synthetic construct
  source 1..110: mol_type = other DNA
tacatttgaggaaatgaaatactttgccatattgctagcaataccaattccagtttaaaaacaaatttcaggttctggttttaatgaggtaaccataccttactctctca

SEQ ID NO: 10466 - DNA, 110 bp, synthetic construct
  source 1..110: mol_type = other DNA
gattagtgggtcattgtgaacaaataaggctgttttcctgtctctgcactgaattgtcatgtggaatatgccttaaagctattatccttatccactcacactgtaatgca

SEQ ID NO: 10467 - DNA, 110 bp, synthetic construct
  source 1..110: mol_type = other DNA
tcatggaagttgcttagctaagcaaatattaagggataaaaaaactcaggcaaaccttcattaataataacacgaaacatcagagatcatgaactattgtgacacaacaa

SEQ ID NO: 10468 - DNA, 110 bp, synthetic construct
  source 1..110: mol_type = other DNA
aggagcacctagtgggattcatggtgaaattatgcaagaaggtctggattcttatatcttcagcttgtagtgtattcacactgttctgccagtccacactcagctttcat

SEQ ID NO: 10469 - DNA, 110 bp, synthetic construct
  source 1..110: mol_type = other DNA
aggcaataggttggtgactttagtgtggtcatttaaaacagaaaatgtaaaaattgatgcccttgctgtgtgaacggtgagattcttgattagggaacccatgttgttga

SEQ ID NO: 10470 - DNA, 110 bp, synthetic construct
  source 1..110: mol_type = other DNA
agtgttgatgcaaataggagaaagtggcaaattttctgtaccgcttctagtatcagaattatccagctgttcaggtgcacatagtagcagtaatttgtgaaattaaatac

SEQ ID NO: 10471 - DNA, 110 bp, synthetic construct
  source 1..110: mol_type = other DNA
gaattatccagctgttcaggtgcacatagtagcagtaatttgtgaaattaaatacattgatatcttatgatgtaacacttcattgatgggatagacaagttttccatttg

SEQ ID NO: 10472 - DNA, 110 bp, synthetic construct
  source 1..110: mol_type = other DNA
ctgaaatgatttctccttcctatagctgagtgctgcctgagacagcacgtatctggtagatgtcaagaagggagggagttctctcacctggggcccagtaccttacaaga

SEQ ID NO: 10473 - DNA, 110 bp, synthetic construct
  source 1..110: mol_type = other DNA
gatccttaaccctctgcgctgggccagggatggaacccacatcccagtgcttccaagatgcaagatgctgctgatttgtccaatggtgccatagcaggagctccatagaa

SEQ ID NO: 10474 - DNA, 110 bp, synthetic construct
  source 1..110: mol_type = other DNA
agatgcaagatgctgctgatttgtccaatggtgccatagcaggagctccatagaagctctgatgttataactaaataataattacaactaaattttataactaaatatta

SEQ ID NO: 10475 - DNA, 110 bp, synthetic construct; identical to SEQ ID NO: 10473
  source 1..110: mol_type = other DNA

SEQ ID NO: 10476 - DNA, 110 bp, synthetic construct; identical to SEQ ID NO: 10474
  source 1..110: mol_type = other DNA

SEQ ID NO: 10477 - DNA, 110 bp, synthetic construct
  source 1..110: mol_type = other DNA
gtatttgtaacttccttagcttataatacagaatgaagccattacttgaatttctgttcccattaagcatacaggtagttgatcaattccctgtttgtagttatatgttt

SEQ ID NO: 10478 - DNA, 110 bp, synthetic construct
  source 1..110: mol_type = other DNA
tgagtagggcttctgagtggcctctttcatactgttaaaggtaaatacttgtcaaggtacttcacacttttcctcagagcatagctgaatgcttttagagcgagttttct

SEQ ID NO: 10479 - DNA, 110 bp, synthetic construct
  source 1..110: mol_type = other DNA
ggagtggagatggatgagagttgatacatgtaggatgtgccgtatgtgagaatttacagacagatttttttctgaacctaaaattagaaactaaagggatattatatgga

SEQ ID NO: 10480 - DNA, 110 bp, synthetic construct
  source 1..110: mol_type = other DNA
actcataaaaagggctttatggctatcacgtggtccagccaagcacaggccttattgcatggagtgtactttttgcatatgaacatcaacaaccctacctacagcatgtg

SEQ ID NO: 10481 - DNA, 110 bp, synthetic construct
  source 1..110: mol_type = other DNA
tacaatatcgacacataaaaaaatattctaaactctggagatgtggggaaaatatgattcaagtgtgataccagcttgtggaaaaagccctaagaaagagatgcttgatt

SEQ ID NO: 10482 - DNA, 110 bp, synthetic construct
  source 1..110: mol_type = other DNA
agggatcaaactggagccacatcagtgaccagagccaccctagtaacaacactaaatccttaaccagctgctccaccagggaactccaagagtagtacttttagagggca

SEQ ID NO: 10483 - DNA, 110 bp, synthetic construct
  source 1..110: mol_type = other DNA
tctttagcaggtctatgctaaaggacacaacaaagaacatttttcaggcacaaggaaaataaaccagatagactcttatatgcagcatattatagatagacaacatatat

SEQ ID NO: 10484 - DNA, 110 bp, synthetic construct
  source 1..110: mol_type = other DNA
ttaaatgagacggtaattcatatgaacactgataaaagccataatgctattttttccattctaatttgaacactgaacaaacgtttctattctatattctccctcactga

SEQ ID NO: 10485 - DNA, 110 bp, synthetic construct
  source 1..110: mol_type = other DNA
ccattctaatttgaacactgaacaaacgtttctattctatattctccctcactgattcctcacttaagaatacaaaattgccttctttaaatcagcatgtgcacaatagt

SEQ ID NO: 10486 - DNA, 110 bp, synthetic construct
  source 1..110: mol_type = other DNA
tggcttaaagacttaacataagacaccatacaattcctagaagagaacataaacaaaacattctccgacatcaactgtacagatgttttcttaggtcagtctctaaaggc

SEQ ID NO: 10487 - DNA, 110 bp, synthetic construct; identical to SEQ ID NO: 10486
  source 1..110: mol_type = other DNA

SEQ ID NO: 10488 - DNA, 110 bp, synthetic construct
  source 1..110: mol_type = other DNA
tttctggcaatttttcagtgctgaaaagttttaaaagatcaggttagaatcttataaacataaggatggctaacatccctggaagacatcaccatgggtggtagatattt

SEQ ID NO: 10489 - DNA, 110 bp, synthetic construct
  source 1..110: mol_type = other DNA
caaacacatatgatgttcaatccattagctatgaattctaaatgtgaatcaacttgtatccatgcatttggaaaaagtagttaatattcctcatgctacttggcagattt

SEQ ID NO: 10490 - DNA, 110 bp, synthetic construct
  source 1..110: mol_type = other DNA
gacttccttttttccaaggataggcagaatcacagaagtcggctctatgatatttgggtattagctggatcactcttgttgtagagtagaaaacagatttatagttagca

SEQ ID NO: 10491 - DNA, 110 bp, synthetic construct
  source 1..110: mol_type = other DNA
gggtattagctggatcactcttgttgtagagtagaaaacagatttatagttagcaagaatgtaagcagggagaccagcccagaaaatcgcatcagagttgatgataatct

SEQ ID NO: 10492 - DNA, 110 bp, synthetic construct
  source 1..110: mol_type = other DNA
tactgcctttaaaatcaaccatctgaataaacaagtataagcttgttttccttcgtttaaaggaaaaataaaatttagaaaatgttactcttagaattcccatcgtggct

SEQ ID NO: 10493 - DNA, 110 bp, synthetic construct
  source 1..110: mol_type = other DNA
tgctacaagtcccacatgtaacagtataatgggtatacctacttgaccacaacgttggaaagaatgaacatttaaataaagacattgttgtaatttagagtactgaaaat

SEQ ID NO: 10494 - DNA, 110 bp, synthetic construct
  source 1..110: mol_type = other DNA
aactgtcacttaaatcatcacctgcagttgcctagaataaaatgcctactgaaggcacagctatggaggactaagtactggccaacataacactcgtgctggatatgcca

SEQ ID NO: 10495 - DNA, 110 bp, synthetic construct
  source 1..110: mol_type = other DNA
aattcacttgttagctctagtagcttattgagaattcttcggggaattccctcaaggctcagcaggttgatccggcattgtcactgcatgacttgggtcactgctgtggc

SEQ ID NO: 10496 - DNA, 110 bp, synthetic construct; identical to SEQ ID NO: 10495
  source 1..110: mol_type = other DNA

SEQ ID NO: 10497 - DNA, 110 bp, synthetic construct
  source 1..110: mol_type = other DNA
gtatgcgaggagtaggctagaaaggcagaaagaacacgcattgggtaaaagcagatgttctatccgttgtctttatccaacagcttcctttgtcttataccatttttgtc

SEQ ID NO: 10498 - DNA, 110 bp, synthetic construct
  source 1..110: mol_type = other DNA
ctagacatttaaaataacatgatgagtagcattggaaatgagatatttgttgtatgtgttagctgttttgtttctgttttgttgctactgccaatggattttttttcttt

SEQ ID NO: 10499 - DNA, 110 bp, synthetic construct
  source 1..110: mol_type = other DNA
cacaagaacttctctttgcagttgagttaagagctgacttaaacccataaaactattaaggaagagagtcagggcttggacagttcatgctcattaaacactatatgaca

SEQ ID NO: 10500 - DNA, 110 bp, synthetic construct
  source 1..110: mol_type = other DNA
cagtacttgaatctcaatatcaaataaacaaaacaccccccccaaatgagcagtagagccaaatagatatttttccaaagaacacaatcaaatggccaaaaaacacataa

SEQ ID NO: 10501 - DNA, 110 bp, synthetic construct
  source 1..110: mol_type = other DNA
ccccccccaaatgagcagtagagccaaatagatatttttccaaagaacacaatcaaatggccaaaaaacacataaaagatgctcaacattgttattattagagaaattca

SEQ ID NO: 10502 - DNA, 110 bp, synthetic construct
  source 1..110: mol_type = other DNA
aacaaacaaacaaacaaacaaaaaaaccaagtagccctcagatggtaccctgcatgtatacattaaaagactgagtggatagctgaatgcaatgcagcatttgggctcag

SEQ ID NO: 10503 - DNA, 110 bp, synthetic construct
  source 1..110: mol_type = other DNA
gtatacattaaaagactgagtggatagctgaatgcaatgcagcatttgggctcaggtaccatcagagcaaatgtagattatccagtattatctaccacataacttcttat

SEQ ID NO: 10504 - DNA, 110 bp, synthetic construct
  source 1..110: mol_type = other DNA
atctcttctcttgactgattttgatctgtatattttcactatagtaaattgcagccacaaacatagtagctttcaatgagttctgtgagtccttctaaaaaattccccaa

SEQ ID NO: 10505 - DNA, 110 bp, synthetic construct
  source 1..110: mol_type = other DNA
tgtgttaatcagggttctccagagaaatagaaccaataggagctatatatggaaatttattttaagggattggctcagtaattatggaactcatcatgtccaaaagttgt

SEQ ID NO: 10506 - DNA, 110 bp, synthetic construct
  source 1..110: mol_type = other DNA
agaggtctgtgttgcaagtaccaccaggcttcctgggttgcactgaatgtaacggggagaaggtcagacacatacaacctatgaattcttatagtcgagttcacagactc

SEQ ID NO: 10507 - DNA, 110 bp, synthetic construct
  source 1..110: mol_type = other DNA
ttcttcctcaccctcctttctttcaggggctttgattatattatttacgttaagtcctttaaatctattcaatataaaaggtcatttttttctggcaattttgcttctat

SEQ ID NO: 10508 - DNA, 110 bp, synthetic construct; identical to SEQ ID NO: 10507
  source 1..110: mol_type = other DNA

SEQ ID NO: 10509 - DNA, 110 bp, synthetic construct; identical to SEQ ID NO: 10507
  source 1..110: mol_type = other DNA

SEQ ID NO: 10510 - DNA, 110 bp, synthetic construct; identical to SEQ ID NO: 10507
  source 1..110: mol_type = other DNA

SEQ ID NO: 10511 - DNA, 110 bp, synthetic construct
  source 1..110: mol_type = other DNA
caaggaaagacaattatgcaaaacaaagttttgattttcagtgatccaaagaaaaccttaaaaggaggtggcacatgccaaactgacaacagataattcacaataatcaa

SEQ ID NO: 10512 - DNA, 110 bp, synthetic construct; identical to SEQ ID NO: 10511
  source 1..110: mol_type = other DNA

SEQ ID NO: 10513 - DNA, 110 bp, synthetic construct
  source 1..110: mol_type = other DNA
tggggacctgattttctgttcccaacttaagcagctagggaactggacaaatacctgaaacaagaatttcagacattgaaaacaaagcaggattgagattccttagagaa

SEQ ID NO: 10514 - DNA, 110 bp, synthetic construct
  source 1..110: mol_type = other DNA
gtcatcttccctgtcattttctacttccaggacccaaacctcttctctggggctgagttggagtccaacaatcaggcatttcgccaaaaactaagggaaaataatcagct

SEQ ID NO: 10515 - DNA, 110 bp, synthetic construct
  source 1..110: mol_type = other DNA
agttggagtccaacaatcaggcatttcgccaaaaactaagggaaaataatcagctttaatgagtaaatggtgaaattgactcaacctctgtggaatgtcatattttcctc

SEQ ID NO: 10516 - DNA, 110 bp, synthetic construct
  source 1..110: mol_type = other DNA
aaaaaactaaaaacagagttaccatatgatccaacatagatctagacaaaaccgtaattctaaacgataatgcactcctgtgttcatagcagctctatttataatagtca

SEQ ID NO: 10517 - DNA, 110 bp, synthetic construct
  source 1..110: mol_type = other DNA
aggatacatcaacccttccttcttctagatattcttaaatctctggattatcagattaggaatatattatagctcatctccatctactgccactatgaccctcccgacat

SEQ ID NO: 10518 - DNA, 110 bp, synthetic construct
  source 1..110: mol_type = other DNA
ttaggaatatattatagctcatctccatctactgccactatgaccctcccgacatatgcacacaagatatacatcgaagaagatatattgaaggagggaaagagcacttg

SEQ ID NO: 10519 - DNA, 110 bp, synthetic construct
  source 1..110: mol_type = other DNA
acaaatacctgcagttccctctgcacaaaatattgtcataattttttctctggtgtagattgccttttttaggttaaatatttccatgaagagaaagagctaatacaaca

SEQ ID NO: 10520 - DNA, 110 bp, synthetic construct
  source 1..110: mol_type = other DNA
tggctttaaaattacaggtattatttaggtttcttctacaaatggacacgagaatgtccactcagatgtttagcttagatataattgtttatacagatctacagctgacc

SEQ ID NO: 10521 - DNA, 110 bp, synthetic construct
  source 1..110: mol_type = other DNA
tgaaagtaaatagagcttgtggacaaaagtttgacatcaattccattggctacgtttttcataaattaccatctataataaaagtcatcctgctatattacgttttagaa

SEQ ID NO: 10522 - DNA, 110 bp, synthetic construct
  source 1..110: mol_type = other DNA
aaagacgacatttctatttcttatccttcttctaaagaattatgtctcagttcgtcctcaacctggacaggaaagaaggtatatacttattttatttgttccttttttgt

SEQ ID NO: 10523 - DNA, 110 bp, synthetic construct
  source 1..110: mol_type = other DNA
ttcaccacaagttagaaaaatccaattttcaattgatccctgaatttggaagagggatataagttcaatccaaattactgaggggaaaataaatacaggcagtcaatatg

SEQ ID NO: 10524 - DNA, 110 bp, synthetic construct
  source 1..110: mol_type = other DNA
cccatatctctacatctttttgctggtttcttttattttcatcccctaagctaacacctgctcttcctgattgccaaaacggttctgcctgtgcacaggaaaagatggaa

SEQ ID NO: 10525 - DNA, 110 bp, synthetic construct
  source 1..110: mol_type = other DNA
ggttacaaaggtggaatgtgagcctaccttgttccagagtctgtgtgaactgcttatacctagcactcactctgctcttgagctggaggtatgggtccaagttaaggaaa

SEQ ID NO: 10526 - DNA, 110 bp, synthetic construct
  source 1..110: mol_type = other DNA
gggatggagagtttgtcattggattggtgtgggggcccattagagacggatgcgtttagatacctcataccaatggacttacacaggatttggctttctgggatggctta

SEQ ID NO: 10527 - DNA, 110 bp, synthetic construct
  source 1..110: mol_type = other DNA
catctcgtctattctaggtaggaaatcatccaatggcacctactccatgcagaataaaataaaagctccttagtatgacatgcggtgctcttcaaatctggcccctgcct

SEQ ID NO: 10528 - DNA, 110 bp, synthetic construct
  source 1..110: mol_type = other DNA
aaaataaaagctccttagtatgacatgcggtgctcttcaaatctggcccctgccttctcaatgttcttagcttttccctcttcccttgatcctgtgaattactcgcagtt

SEQ ID NO: 10529 - DNA, 110 bp, synthetic construct
  source 1..110: mol_type = other DNA
tttttttcctttctcaaaagagatacccaatgttttctcatttcctttttcttccccagtcctgtataatacaaacaaaaatagctcctcatagagaatggctagtagat

SEQ ID NO: 10530 - DNA, 110 bp, synthetic construct
  source 1..110: mol_type = other DNA
tacttgcagctctctgtaacagctaccatgacctcccagccagagaaggcaaatgatttgctctaaacattttgcaagccaactgaacactggacatatctaagtatgta

SEQ ID NO: 10531 - DNA, 110 bp, synthetic construct
  source 1..110: mol_type = other DNA
gtactccaaaccgcaggagacaacattgtccttcagattgggagccaccgtatttgttagccagacagtggaagctaggcctacagtagggattgagagcattccattcc

SEQ ID NO: 10532 - DNA, 110 bp, synthetic construct
  source 1..110: mol_type = other DNA
tgttgaggaaactttaattgagcttttaaagaaagaagaaaacagaagtagttcttgatttaactgatgcttacaagtagaaatgaacaaggtacattgaggagggagtg

SEQ ID NO: 10533 - DNA, 110 bp, synthetic construct
  source 1..110: mol_type = other DNA
aacttactcatgcctggggggctctttcaggcctggttgcataaatcacttctacttaattatggaaagctgctgagtaaccctgactttacagctaagttgatctaaca

SEQ ID NO: 10534 - DNA, 110 bp, synthetic construct
  source 1..110: mol_type = other DNA
gtctatacctcatagggtggttaaaggggaatcaaagtactgtgtgccgttgcgtccatcaaaaggaatcacgcagctagtttttaataatagcaacagtaatagcagca

SEQ ID NO: 10535 - DNA, 110 bp, synthetic construct
  source 1..110: mol_type = other DNA
ttgagattgtttttcttccgtcgtggttgtggttcaattgaccattaggtgggatgcatgctctgatgagcttggcactcaaaaccctgggtccctctgtaattgacatt

SEQ ID NO: 10536 - DNA, 110 bp, synthetic construct
  source 1..110: mol_type = other DNA
gtgaggattcatttgtagtcccagatatttatttataatctaatcgcttctctatttttgtcattacccactgcaccaaagttatgcagcagagttaatgccaatctaaa

SEQ ID NO: 10537 - DNA, 110 bp, synthetic construct
  source 1..110: mol_type = other DNA
ttttgtcattacccactgcaccaaagttatgcagcagagttaatgccaatctaaaatgccatggtctaaaaagtcatagctcttcagtgtgtttaccatttgtatcatga

SEQ ID NO: 10538 - DNA, 110 bp, synthetic construct
  source 1..110: mol_type = other DNA
cctcgcatcctgaaatgttcccttgcaaaaccaaacacgattacttttccttcaagttgaagaggcgatgctaattatatttatataaatacagaaaatgcattcatggt

SEQ ID NO: 10539 - DNA, 110 bp, synthetic construct
  source 1..110: mol_type = other DNA
gaccttctccttgcttgagtcaggtgcaaatgagtatgtgatcaactaagtggcaatatttacatatggatttagattgtgtaatgtttgaagtttgtgttcattctctt

SEQ ID NO: 10540 - DNA, 110 bp, synthetic construct
  source 1..110: mol_type = other DNA
ggttttgttgttgttgttgttttggcctgggattttatcttgctctttcgcttcgaacatattcctctgtcttcttttgtttgaatttctgttatttgtctctattactt

SEQ ID NO: 10541 - DNA, 110 bp, synthetic construct
  source 1..110: mol_type = other DNA
ccatgagtctttggcaaaactcattgggtatcagagctgggccatgttgacacataaaattaagcatcacaagtagtattctaggtgatgaatgagatggcaactttgtg

SEQ ID NO: 10542 - DNA, 110 bp, synthetic construct
  source 1..110: mol_type = other DNA
taaggcagttgttatcatcacaaggccccatcctcatacctaatttaactctaattgtaggttagggcttcatgatatgccatttagtgcacagcaacacatttattttg

SEQ ID NO: 10543 - DNA, 110 bp, synthetic construct
  source 1..110: mol_type = other DNA
tgtaggttagggcttcatgatatgccatttagtgcacagcaacacatttattttgcaatagaaaaagtaaattagaaacaatctcttttcccatgtaactaatttggact

SEQ ID NO: 10544 - DNA, 110 bp, synthetic construct
  source 1..110: mol_type = other DNA
agtgatacattgttctaattgggaccattagttaggactgctggacacttggagtagtacagaatgcattagctaggtaaatcagtaagtgatcatatatatgacttaat

SEQ ID NO: 10545 - DNA, 110 bp, synthetic construct
  source 1..110: mol_type = other DNA
agttatcaggcaatcatgacaagggcaggaaacaagctcatatggagtctagctttagcccagtttcagagggagctagtctcgagcatgaattgcaccatagtttgaga

SEQ ID NO: 10546 - DNA, 110 bp, synthetic construct
  source 1..110: mol_type = other DNA
tagcccagtttcagagggagctagtctcgagcatgaattgcaccatagtttgagacagatggcctgggcctttctagccctacatcagtcgtcatcatgacgggctaacc

SEQ ID NO: 10547 - DNA, 110 bp, synthetic construct
  source 1..110: mol_type = other DNA
ggggtaaatatgctaccataatgctacagagtgagtacagtaccaaagcttatcttccttgccaataagagaaagtttgtaaggtgtttgttggaaagattggaaaaggt

SEQ ID NO: 10548 - DNA, 110 bp, synthetic construct
  source 1..110: mol_type = other DNA
attgattacataattttcaaggtccagtgcaaaatgcaaatggagatccacctgtttaaaagttactcagcatttcaaggtagccacagtagcacatgcatgaggccttg

SEQ ID NO: 10549 - DNA, 110 bp, synthetic construct
  source 1..110: mol_type = other DNA
ttaaaagttactcagcatttcaaggtagccacagtagcacatgcatgaggccttggtaagcaggttgtatgcccatgaagacaggcatgtattttaagaaaaccaatctc

SEQ ID NO: 10550 - DNA, 110 bp, synthetic construct
  source 1..110: mol_type = other DNA
aacctactgactacacaggattctaaataaccaggtgatctgatttctcaatcgaaagctgagtagaagcatgaaattggaggaagagtctgccaaaggcatagttgcca

SEQ ID NO: 10551 - DNA, 110 bp, synthetic construct
  source 1..110: mol_type = other DNA
ttcatgcccagctggtggagaaggtccaggctggttgcctgcagctcataagcgggtgagggtttaggaggcatttgtcataggattctgcattggaagtgatcagtgaa

SEQ ID NO: 10552 - DNA, 110 bp, synthetic construct
  source 1..110: mol_type = other DNA
cagggaactagatgtttcacagtaacgatttttccagtgtttaatttgaaaccgcagacattttcccgatgttttaaaaagagtttatgaaacataatttgaccatttct

SEQ ID NO: 10553 - DNA, 110 bp, synthetic construct
  source 1..110: mol_type = other DNA
cttccatcacacaactataagaaaagtcagctaataacagcaaggagctttgaaatggatcccttcccaatcaagcctccaaatgagaatatagccaggtcaacacctgg

SEQ ID NO: 10554 - DNA, 110 bp, synthetic construct
  source 1..110: mol_type = other DNA
gaatctttgagtcagaaacagaattttctctaaccagagtatccaagagtaagaaaacctggtatcattcactttccaaaggtttattcaaagctgtatcacatagctaa

SEQ ID NO: 10555 - DNA, 110 bp, synthetic construct
  source 1..110: mol_type = other DNA
aacctggtatcattcactttccaaaggtttattcaaagctgtatcacatagctaatatgcagactgtaactctttatacctgtaaggccttggccattattattattgcc

SEQ ID NO: 10556 - DNA, 110 bp, synthetic construct
  source 1..110: mol_type = other DNA
tacacgcaagagaattgcccatttgtactgaatggacagattacattggtcaaggaatgattgaagttttcttttaaaattcaggcagacattttgatgcaatctacatc

SEQ ID NO: 10557 - DNA, 110 bp, synthetic construct
  source 1..110: mol_type = other DNA
agagaactccaaagctgctttatttcttgctattttaaaaaactgaagttatagcctgggattgtcattgtattccccacacacataaccaccaagatccagtctttaac

SEQ ID NO: 10558 - DNA, 110 bp, synthetic construct
  source 1..110: mol_type = other DNA
aatacacaatagatgtcttctatcagtgggatatggaatgccaatgccacaaatgaacctggaaaatgattatacatatggaaaaaaattgtattcctacttaacaatat

SEQ ID NO: 10559 - DNA, 110 bp, synthetic construct; identical to SEQ ID NO: 10558
  source 1..110: mol_type = other DNA

SEQ ID NO: 10560 - DNA, 110 bp, synthetic construct
  source 1..110: mol_type = other DNA
ctctccgagaccacaggaaaatttcctttcgactttgttacagagagtgacaaccttctctaagcaccagcttccatttgtccattctcactgacataagaggctattgc

SEQ ID NO: 10561 - DNA, 110 bp, synthetic construct
  source 1..110: mol_type = other DNA
ccttcttagagccttgacccttattgagtctacccacaaaatctggttcccatgatgccagcttgcctctgatcagttcttattttccaggactattgcaataggagtga

SEQ ID NO: 10562 - DNA, 110 bp, synthetic construct
  source 1..110: mol_type = other DNA
tgccagcttgcctctgatcagttcttattttccaggactattgcaataggagtgagttttctcactggcttatttcctgtaaatagtcaggagagtgggtgtctgatcat

SEQ ID NO: 10563 - DNA, 110 bp, synthetic construct
  source 1..110: mol_type = other DNA
aaatcctttctcatgtaagactgcacaattgttttcataaccagtttagacaatactgaataaactcacacccactctacctgtaacatctctgctatgatgttagcaga

SEQ ID NO: 10564 - DNA, 110 bp, synthetic construct
  source 1..110: mol_type = other DNA
ttatcacatcaatttgttagatgcggtaatctcaaaccttgttgacattaggattatctggggagctcttgaaaatcctcatgtgccagcagcatctcagatggattata

SEQ ID NO: 10565 - DNA, 110 bp, synthetic construct
  source 1..110: mol_type = other DNA
cgacgggaactcctgaagtaaaattctgaatgaatggtgaaacactccagaccctagctccttgatggtttctttgcattacattcacaaggttggcggcaaagcctgga

SEQ ID NO: 10566 - DNA, 110 bp, synthetic construct; identical to SEQ ID NO: 10565
  source 1..110: mol_type = other DNA

SEQ ID NO: 10567 - DNA, 110 bp, synthetic construct
  source 1..110: mol_type = other DNA
cagactgctctgtgtgccctgcagtggtttgcccagcctcccttcctctggcttctggttatcttagctctataagaagaatgaggtgtgagaggaatagaagctgtgat

SEQ ID NO: 10568 - DNA, 110 bp, synthetic construct
  source 1..110: mol_type = other DNA
tagcctcaggtcccaaataactattttaccaagttagaattcaagcttcttggagaggagggtagctgactgttgcaaacttcttggtatgggaatcctttgctcttgca

SEQ ID NO: 10569 - DNA, 110 bp, synthetic construct
  source 1..110: mol_type = other DNA
cacaagaaaactctcctccacccctgttctcattcctaggctaatagggcaaaagacattggggccaagaatgaggaagttgaaacaaaactcagtgtggtcaagggagt

SEQ ID NO: 10570 - DNA, 110 bp, synthetic construct
  source 1..110: mol_type = other DNA
acattggggccaagaatgaggaagttgaaacaaaactcagtgtggtcaagggagttatgagcctgaggtgtgagattaaatttggttctgggaattttgaccaacaatgg

SEQ ID NO: 10571 - DNA, 110 bp, synthetic construct
  source 1..110: mol_type = other DNA
catttattttattaggacacagtgggacataatagtaaagaacagccttcagtcttatatgcttgggtttgaggaaaagctcttccatttagtggttgtgagttctagga

SEQ ID NO: 10572 - DNA, 110 bp, synthetic construct
  source 1..110: mol_type = other DNA
cctcaaaagtatgaaccccatatagaaataaatccaaagctaaactaatcatggtgacataagaaaagagatactccttcattgctcagcagttaacaaacccgactagg

SEQ ID NO: 10573 - DNA, 110 bp, synthetic construct; identical to SEQ ID NO: 10572
  source 1..110: mol_type = other DNA

SEQ ID NO: 10574 - DNA, 110 bp, synthetic construct
  source 1..110: mol_type = other DNA
ttttttttttcagtttcactgtaattacggtgtcaatatttgtggctgtagtaacattgaacttaagcttgttaattatgactgatagtggcctgccatgagataaccca

SEQ ID NO: 10575 - DNA, 110 bp, synthetic construct
  source 1..110: mol_type = other DNA
attgaacttaagcttgttaattatgactgatagtggcctgccatgagataacccagacagtcgctcagtctcagcacactggtggcactagatcatcagtgataaatcaa

SEQ ID NO: 10576 - DNA, 110 bp, synthetic construct
  source 1..110: mol_type = other DNA
gctcatcagtagaatttcctcagccaatttatctcccgttattatgaaatatggtagcacagctgccatcttgtaaggatacttggtaaacatgttatgagaaaggtgaa

SEQ ID NO: 10577 - DNA, 110 bp, synthetic construct
  source 1..110: mol_type = other DNA
agcacagctgccatcttgtaaggatacttggtaaacatgttatgagaaaggtgaatcttttagaattcctcttgaattttgttaaatcgaacatgggaaaataagattgt

SEQ ID NO: 10578 - DNA, 110 bp, synthetic construct; identical to SEQ ID NO: 10576
  source 1..110: mol_type = other DNA

SEQ ID NO: 10579 - DNA, 110 bp, synthetic construct; identical to SEQ ID NO: 10577
  source 1..110: mol_type = other DNA

SEQ ID NO: 10580 - DNA, 110 bp, synthetic construct
  source 1..110: mol_type = other DNA
aagtgagattagtagtgtgtatgttttgagagaccaataatctagagcactttcaccatcaacagaaaagtctgaaagtaccttccctaggagaattggtggtttctcat

SEQ ID NO: 10581 - DNA, 110 bp, synthetic construct
  source 1..110: mol_type = other DNA
tacctcaacttccatttgttttcagccccctttgggattgtatgctttacttgtttggtgcattccattttggagagctacctggggtggttgaaaatatgtattttagt

SEQ ID NO: 10582 - DNA, 110 bp, synthetic construct
  source 1..110: mol_type = other DNA
atgcaagcacaatccagaagtactgggttaatactcccagtggcaacctcggaactgttgaaggacaggggccagtgggtaaaggctccagcctcctgccctttaggttg

SEQ ID NO: 10583 - DNA, 110 bp, synthetic construct
  source 1..110: mol_type = other DNA
cagagaggcacatggcagcccgattacaaaaggccaggcaggctgtgcacatgtgtttggcttttttgtaaggctatgtagaattattaaacaattttacaaaggaaagt

SEQ ID NO: 10584 - DNA, 110 bp, synthetic construct
  source 1..110: mol_type = other DNA
gctaaattcatgttgcagtctatcctattataggatctctacagcagtgagactcagaataaaaaattgcgcatagcccatcagctgggaaatagcagctgatgcactgt

SEQ ID NO: 10585 - DNA, 110 bp, synthetic construct
  source 1..110: mol_type = other DNA
agaataaaaaattgcgcatagcccatcagctgggaaatagcagctgatgcactgtctagtttagtgctccagttactcagctccacattctcggtaacctcagaatgtca

SEQ ID NO: 10586 - DNA, 110 bp, synthetic construct
  source 1..110: mol_type = other DNA
tgtttgaatagtttctactgagatctgtgttgctatagccgctaaaaagagaagacttaactgttctgcttggcctcaagaacttgcctcttaccccctgcatctgctct

SEQ ID NO: 10587 - DNA, 110 bp, synthetic construct
  source 1..110: mol_type = other DNA
tccctttctagcacctaaatcactttctggatttagaaaaatcctcatccttttgggtctaagggaaggcagagcttgcctatccgtatgggaattaaaaacgtcagatg

SEQ ID NO: 10588 - DNA, 110 bp, synthetic construct
  source 1..110: mol_type = other DNA
ggtctaagggaaggcagagcttgcctatccgtatgggaattaaaaacgtcagatgcttgctttcctaggctcctttgcagccaggccaaagtcacatgacctagaatgga

SEQ ID NO: 10589 - DNA, 110 bp, synthetic construct
  source 1..110: mol_type = other DNA
tgatggcctctctcgccaggcatcctcacttggtggtagggaaaatgaggacctgctgcatgaaactgtttcagcaccaccctgagcttaatagcgctgtctttcattgc

SEQ ID NO: 10590 - DNA, 110 bp, synthetic construct
  source 1..110: mol_type = other DNA
ccacacacatattttcttgtaatgatcactcagttccatgtcctcaggttaattcaggcgtcattttggggaacagtcacccgacagcactgtcagccagctggcagctg

SEQ ID NO: 10591 - DNA, 110 bp, synthetic construct
  source 1..110: mol_type = other DNA
aggcgtcattttggggaacagtcacccgacagcactgtcagccagctggcagctgcgttactccgctcatgagtgatgaagaagacaaagtgtatagcgttcttatttaa

SEQ ID NO: 10592 - DNA, 110 bp, synthetic construct
  source 1..110: mol_type = other DNA
cttctgcattcaccagaggcatgaggacttctgtggaggaacgagaaacagctaggtgttccatcattatccacttttagtggctccgtttcattaaatattgtgccagg

SEQ ID NO: 10593 - DNA, 110 bp, synthetic construct
  source 1..110: mol_type = other DNA
ctattatgataaacaatgcagttgagagaaacagtcgttgaccaccaatgtgcgtatcctgagagctacgaggaccaaccaggtggaggtcactttgaaatcgatgactt

SEQ ID NO: 10594 - DNA, 110 bp, synthetic construct
  source 1..110: mol_type = other DNA
tcatggtagagtttggagactaaagtacattagtagaagcacgatttttaatacctaaattagaattggcacactgtcttcttggatcccattggccaaggaaatctcac

SEQ ID NO: 10595 - DNA, 110 bp, synthetic construct
  source 1..110: mol_type = other DNA
taaattagaattggcacactgtcttcttggatcccattggccaaggaaatctcacggtcattcccaacattgatggggcaggaagtatacaactcctgtgacagtggagg

SEQ ID NO: 10596 - DNA, 110 bp, synthetic construct
  source 1..110: mol_type = other DNA
tgccatgagaggcctagctttggggctttatagcctttcccgtgcctttttcattgagcttaatcatttctatcttttcatttaaagtgagagacatgagaccctttcat

SEQ ID NO: 10597 - DNA, 110 bp, synthetic construct
  source 1..110: mol_type = other DNA
gttaccaccctgagtgggcagcccatcagctggtgtctgtggatcaaatgccccttcatggtgcagtcaccaccatccagggattcccaacgcaaacgacttgctgcctg

SEQ ID NO: 10598 - DNA, 110 bp, synthetic construct
  source 1..110: mol_type = other DNA
ctcaggcactggcccaatctttcccactcacctgcaaccccttgggaagctgtgctctataggtgccagcattttctgaaacgttagtgatccccagttacacatatcaa

SEQ ID NO: 10599 - DNA, 110 bp, synthetic construct
  source 1..110: mol_type = other DNA
tctataggtgccagcattttctgaaacgttagtgatccccagttacacatatcaaatgccccatacagcagatgtaagatgggacagagctttcagtgaagcagcttctt

SEQ ID NO: 10600 - DNA, 110 bp, synthetic construct
  source 1..110: mol_type = other DNA
catttcctaggaaggtgtaaatttttcctaaggcctattaattgaggtagcacctaagtcagcatagctattgacattttaaggtgaaaggcatattgttattgtacact

SEQ ID NO: 10601 - DNA, 110 bp, synthetic construct
  source 1..110: mol_type = other DNA
ggaccagttttgttcaagcaaatatattcaagctttgcccctcgtgaaatttcaagtgaccatttccctgtgattaaccttacctgccataccttcctctcctcgtccca

SEQ ID NO: 10602 - DNA, 110 bp, synthetic construct
  source 1..110: mol_type = other DNA
cctgcagaatgactatcaatttacactctgccaacatggttaatgggctgtagcgtaattgtctgtttatctatctgttatcctcattaggttataagcacttcaaggac

SEQ ID NO: 10603 - DNA, 110 bp, synthetic construct
  source 1..110: mol_type = other DNA
tatttcttaataatgagctgattttgaattcagaatgaccatttattcattcagccttcattgcatgtattgctcattgtattgacaccataatgcccttgacataagga

SEQ ID NO: 10604 - DNA, 110 bp, synthetic construct; identical to SEQ ID NO: 10603
  source 1..110: mol_type = other DNA

SEQ ID NO: 10605 - DNA, 110 bp, synthetic construct
  source 1..110: mol_type = other DNA
cctgccgagggctggggctgtcattccctgcccgtgaaagccctattggcctggctgacacctgccaacacgaatgtgtctataaatcccagaccacgcccttcccttac

SEQ ID NO: 10606 - DNA, 110 bp, synthetic construct
  source 1..110: mol_type = other DNA
aaacaggtctaatattggcaatgttgaggctacagattttagtctcaaaggaaagatgtgcaaaagctcgagttttcctagctgggctaatgtcctcattatctattcaa

SEQ ID NO: 10607 - DNA, 110 bp, synthetic construct
  source 1..110: mol_type = other DNA
tggacttgtgatcctaaaattatcagatgagaaatttgcattaacaccactgaaaaaaaaaaataggtagccaagttttgtatgtccacaaagaacattggaatctaccg

SEQ ID NO: 10608 - DNA, 110 bp, synthetic construct
  source 1..110: mol_type = other DNA
aaaaaaaataggtagccaagttttgtatgtccacaaagaacattggaatctaccgactttaaataagaagagaggagttcccattgtggctcagcggaaaccaatctgac

SEQ ID NO: 10609 - DNA, 110 bp, synthetic construct
  source 1..110: mol_type = other DNA
ttaacctcagtatcctttttgtctttaatgtgcatacacctagattttccaaaataaaacttagctttgttatctggagcagttccgtttcatcaggactaaatgcatat

SEQ ID NO: 10610 - DNA, 110 bp, synthetic construct
  source 1..110: mol_type = other DNA
caaggatgccttggtgtgtataacgatgtacatctctaccaatattaagctttggaattgataggtattctaatttcataaacctgaagatttaaaataatattctccct

SEQ ID NO: 10611 - DNA, 110 bp, synthetic construct
  source 1..110: mol_type = other DNA
ctaccaatattaagctttggaattgataggtattctaatttcataaacctgaagatttaaaataatattctccctgtacatatgtcctggggctggttatgtatatttcc

SEQ ID NO: 10612 - DNA, 110 bp, synthetic construct
  source 1..110: mol_type = other DNA
caaactgtggcgtagatcgtagatgcagctcagatctggtgttgccttggctgtggtataggtcgcagctgcagctccaatttgacctctgtcctgggaacttctgtatg

SEQ ID NO: 10613 - DNA, 110 bp, synthetic construct
  source 1..110: mol_type = other DNA
gtataggtcgcagctgcagctccaatttgacctctgtcctgggaacttctgtatgccacaggggcagccataaaaaaataaaaataaagcaaaacaaaacaatttccatt

SEQ ID NO: 10614 - DNA, 110 bp, synthetic construct
  source 1..110: mol_type = other DNA
tcttacatagggttcctctgttaggtgggaatcattcaaaatgtcattattatacatgacagaagttatgcacaattaaatgcatttcctgcaactaacagcattgaatg

SEQ ID NO: 10615 - DNA, 110 bp, synthetic construct
  source 1..110: mol_type = other DNA
ttcttctctgctgtcttctccatctttgtctctattaaatgcatgttagagcttctttatccatacttcatatctgataactgctctttcatatttcctatcacttcggc

SEQ ID NO: 10616 - DNA, 110 bp, synthetic construct
  source 1..110: mol_type = other DNA
ccgtgggaactccctacccacctcttttatttcacctcctcattgtcctagagcgtatcttaaatatcagccgaagagctgagatgcccagcaaagtgaaaacccatcat

SEQ ID NO: 10617 - DNA, 110 bp, synthetic construct
  source 1..110: mol_type = other DNA
cggctcctgaggagcagcagtgatccctgccatgaggcataatctgtagtaacatgtggctccgggagggatccccttcctttctcagccagaagcggagaaaaggaagt

SEQ ID NO: 10618 - DNA, 110 bp, synthetic construct
  source 1..110: mol_type = other DNA
gtggctccgggagggatccccttcctttctcagccagaagcggagaaaaggaagtggatacaagttacctggaaagaaaaggagggagatactcatttgctgctgtgagt

SEQ ID NO: 10619 - DNA, 110 bp, synthetic construct
  source 1..110: mol_type = other DNA
cggggggtggatggattggtaaacagagcgagagaaggaaggaggaagagaagatgctatttttgaagaagccccttgaggacctttgaggatgagggaagacagatgat

SEQ ID NO: 10620 - DNA, 110 bp, synthetic construct
  source 1..110: mol_type = other DNA
gctatttttgaagaagccccttgaggacctttgaggatgagggaagacagatgatcttgtaactgagctggcgctctgcgggctcctgggcacacaagcctttctgctac

SEQ ID NO: 10621 - DNA, 110 bp, synthetic construct
  source 1..110: mol_type = other DNA
tcacagtcctctgtaaagactgcctgtggctttcgcagtcctgttgcatgccccccttcaatctaaaatgctcccttcagttcctgtcgtggtgcagtggataatgaatc

SEQ ID NO: 10622 - DNA, 110 bp, synthetic construct
  source 1..110: mol_type = other DNA
atgcaatatttgcataaactgcctcgtggatgtgacatttcagaagttataacggtgttaagtgctttaacttggctttctatatgggtgaagctgaattggcttcaaca

SEQ ID NO: 10623 - DNA, 110 bp, synthetic construct
  source 1..110: mol_type = other DNA
cagtaaaaaaagcatgaggctttggcaccccttccatctgtttttacaatgtgagtggtcaaggctctaaaccaaaactgttgcaatgaccctgaattcagatccgtcgg

SEQ ID NO: 10624 - DNA, 110 bp, synthetic construct
  source 1..110: mol_type = other DNA
tggtcaaggctctaaaccaaaactgttgcaatgaccctgaattcagatccgtcggccaggttggttgagggtgacgggcccaccactggctatcaggaatgtagctgagg

SEQ ID NO: 10625 - DNA, 110 bp, synthetic construct
  source 1..110: mol_type = other DNA
ttaacatgtcagaatgaaaactgtctctaggccgtctgtcaaagaaaagggttaggagttacctcttcattacccatttggaagaatcagtctgcttagagaaaaattca

SEQ ID NO: 10626 - DNA, 110 bp, synthetic construct
  source 1..110: mol_type = other DNA
aaacaggtgccagccacaagtaggcacatggcccggagcctttcagagctcgcctaacttcaagaacaacatcaaacaaggtggtggacggcttcattagcatcctgttt

SEQ ID NO: 10627 - DNA, 110 bp, synthetic construct
  source 1..110: mol_type = other DNA
tccatcacctcatgtcagccgcctcacctcctcccaagtggtgggaacctggcccacgtcagggccttctcacctgcctcagatacccacctggcattgtcagatgaaat

SEQ ID NO: 10628 - DNA, 110 bp, synthetic construct
  source 1..110: mol_type = other DNA
acgtcagggccttctcacctgcctcagatacccacctggcattgtcagatgaaatgcaggatgcccaattaaattcaggtttcagagaaacaacaaaactttcttagctg

SEQ ID NO: 10629 - DNA, 110 bp, synthetic construct
  source 1..110: mol_type = other DNA
gaccattcctattacatactctgtcttctttaactttcaggaaaactcggtgaggtaagagctctgtttgcagttgggggggcgagtcttagggctgatgaataagtgac

SEQ ID NO: 10630 - DNA, 110 bp, synthetic construct
  source 1..110: mol_type = other DNA
taagagctctgtttgcagttgggggggcgagtcttagggctgatgaataagtgactcgcccaaagtcgcacaagcataagtggaagcaatggggtttgaatgaagcccaa

SEQ ID NO: 10631 - DNA, 110 bp, synthetic construct; identical to SEQ ID NO: 10629
  source 1..110: mol_type = other DNA

SEQ ID NO: 10632 - DNA, 110 bp, synthetic construct; identical to SEQ ID NO: 10630
  source 1..110: mol_type = other DNA

SEQ ID NO: 10633 - DNA, 110 bp, synthetic construct
  source 1..110: mol_type = other DNA
tagggctccctagatctgattcatcagagtcactaaaaaacataacagggagctcccgttgtggcttcgtggtaaagaactcgactagatccatgaggatgcaggttcga

SEQ ID NO: 10634 - DNA, 110 bp, synthetic construct; identical to SEQ ID NO: 10633
  source 1..110: mol_type = other DNA

SEQ ID NO: 10635 - DNA, 110 bp, synthetic construct
  source 1..110: mol_type = other DNA
ctgatgaccgctgtcctcattaacgtctgttgagaattcaaaaggatatttctttttctttttttggttgtgccctcaacccatggaagttcctgagtcaggtatccaac

SEQ ID NO: 10636 - DNA, 110 bp, synthetic construct
  source 1..110: mol_type = other DNA
atatttctttttctttttttggttgtgccctcaacccatggaagttcctgagtcaggtatccaacctgcaccacagcagcaaccttagctgctgtggtgacaatgccaga

SEQ ID NO: 10637 - DNA, 110 bp, synthetic construct
  source 1..110: mol_type = other DNA
tctctttgtatttttccatcctgaccagggagtaagttaagagaagcagacatttgaagtatagctgtaattcccttcaggctgtccttttctcctgtcattttatgtca

SEQ ID NO: 10638 - DNA, 110 bp, synthetic construct
  source 1..110: mol_type = other DNA
ggcgtctacaggctgcagtgtaggtcacagatgcggttccgatgcacctttgctgtggcgtaagcctgcagctgcagccctactggacccctagcccaggcatttctgtg

SEQ ID NO: 10639 - DNA, 110 bp, synthetic construct
  source 1..110: mol_type = other DNA
tggcgtaagcctgcagctgcagccctactggacccctagcccaggcatttctgtgtgccccaggtgccaccataaaaaagaaaaaagaaagtaaaactctatgtgagaca

SEQ ID NO: 10640 - DNA, 110 bp, synthetic construct
  source 1..110: mol_type = other DNA
ttatggtgttacttttccccaagagactgcaaactcaactctttggaaactgaccgcagctcctaggtctatgttagacccacaccaggcccaataacactttgggactt

SEQ ID NO: 10641 - DNA, 110 bp, synthetic construct
  source 1..110: mol_type = other DNA
gcagctcctaggtctatgttagacccacaccaggcccaataacactttgggacttgagctggaggcagtggctttccacggcttgacacaacacagacaaaaaaaaacaa

SEQ ID NO: 10642 - DNA, 110 bp, synthetic construct
  source 1..110: mol_type = other DNA
cctgaagtccagacactgaatttttcctttcctactgagggagagtacagtggggttgctcaccagccaagctggtgcaaacgcttgtgttcacagcccagctccaccga

SEQ ID NO: 10643 - DNA, 110 bp, synthetic construct
  source 1..110: mol_type = other DNA
ctaagtggtccataagaagtcaggttttaaaattagctttattcctattgtctcggtttcctgaaacttgaaaattatatgaacacttttgcagaggtgtcaacaattca

SEQ ID NO: 10644 - DNA, 110 bp, synthetic construct
  source 1..110: mol_type = other DNA
gaagaagcagaagaagaataacatcaaggccacgcttaccctcaagcccggccacttccatcactttaccaagactcccttgcgatttttaaatcatgtgcgtatgacaa

SEQ ID NO: 10645 - DNA, 110 bp, synthetic construct
  source 1..110: mol_type = other DNA
ttccatcactttaccaagactcccttgcgatttttaaatcatgtgcgtatgacaatagcattacttgtactttgactatctacggatggactcgatgatacgaaggggaa

SEQ ID NO: 10646 - DNA, 110 bp, synthetic construct
  source 1..110: mol_type = other DNA
gggcagcaagtcatccatatgcccaatgtctttggagaaacgatttaaaatccttcctgcaagaagaggatatgagaaattattcatttccccagataggcccttgaaga

SEQ ID NO: 10647 - DNA, 110 bp, synthetic construct
  source 1..110: mol_type = other DNA
cctgcaagaagaggatatgagaaattattcatttccccagataggcccttgaagagaaacaattcatgaacaaatcaaaacaatattttaagtgcatatgtatttaatat

SEQ ID NO: 10648 - DNA, 110 bp, synthetic construct
  source 1..110: mol_type = other DNA
cggcctctgcctcaaggcaggtaagatttatggaaattgcttaaacccaacaaagaagagatttcatcctggcttcttcattctaagctccctctttaacagcttcgaga

SEQ ID NO: 10649 - DNA, 110 bp, synthetic construct
  source 1..110: mol_type = other DNA
aagagatttcatcctggcttcttcattctaagctccctctttaacagcttcgagacaggagttcccgttgtggcacagtggaaatgaataacattagcatccatgaggac

SEQ ID NO: 10650 - DNA, 110 bp, synthetic construct
  source 1..110: mol_type = other DNA
acagatctctggattcatccgcagaggcatgaataccagctctgcaaagggaggtaaaactgagggagaagagagcctttgccacaagttcaaggagagtgacctgccgg

SEQ ID NO: 10651 - DNA, 110 bp, synthetic construct
  source 1..110: mol_type = other DNA
aacaatggagccccaagaagggctggtttgttaccgatccccttccaaccttcggccccaagctacccaggcggtgcctggaccgggccacccattgcaggcacatcccc

SEQ ID NO: 10652 - DNA, 110 bp, synthetic construct
  source 1..110: mol_type = other DNA
cataagaaatcatggacacccagctgctcagcgccgtcgtggagggcttgtccattaaatcaaatatggcctgcctgaaacaaaaactcaaagaagaaatctaagggcac

SEQ ID NO: 10653 - DNA, 110 bp, synthetic construct
  source 1..110: mol_type = other DNA
aattcttgtgagatccttttttttttttttttttttaaatcagatgtggttacgaagaaaagctggcgatggtgatctgcctttctttccccacctaaaacattctgtga

SEQ ID NO: 10654 - DNA, 110 bp, synthetic construct
  source 1..110: mol_type = other DNA
aaaaaacaagcaaacaaacaaaaaaccttaaaaacagagttaccatatgatcccgcaatcccactcctgccgctcctcggcatataccaaaggaaaccataatttgaaaa

SEQ ID NO: 10655 - DNA, 110 bp, synthetic construct
  source 1..110: mol_type = other DNA
aacgtgagggcgagagacagcaccaggcccacctgcccgacattcaaagctaaaagaggatgaagaggaggatgaggtcagtgcccttcttttttaaatttattttattg

SEQ ID NO: 10656 - DNA, 110 bp, synthetic construct
  source 1..110: mol_type = other DNA
gaggatgaagaggaggatgaggtcagtgcccttcttttttaaatttattttattggtttacgatgttgtgttaatttttgctgtacagtaattcagttatatataatctt

SEQ ID NO: 10657 - DNA, 110 bp, synthetic construct
  source 1..110: mol_type = other DNA
agttgaaagggaagtagtgacttggcagcggagaaacctgtgatggagtcaatatcaccagtggaaacccgtctgcatcacgcgtctcctaacatgatgtcagctgacag

SEQ ID NO: 10658 - DNA, 110 bp, synthetic construct
  source 1..110: mol_type = other DNA
caccagtggaaacccgtctgcatcacgcgtctcctaacatgatgtcagctgacagcctgcagagcacgcagattaaacactgtttctgggtgaacatctgcgggggtgtt

SEQ ID NO: 10659 - DNA, 110 bp, synthetic construct
  source 1..110: mol_type = other DNA
ccaggtctctgtaattctctgggctttctctcacgtctggtcacaagatggctgctgccgcctttgcatccgggctttgagctttaagcaggaacatcaaagtctgggat

SEQ ID NO: 10660 - DNA, 110 bp, synthetic construct
  source 1..110: mol_type = other DNA
gccgtggcaatgtgggatccttaacccactgcgccacaagggaacttcctatagatgtctttattagctcttttctgcagtcacttaaaaatatatcacctacaattgcc

SEQ ID NO: 10661 - DNA, 110 bp, synthetic construct
  source 1..110: mol_type = other DNA
agtttgaagttttggataagaactggtatttgtgtcatctgtgagtcagacactttccaataccaatcacagcatgagtgaccgtaacattttcctgaagcgtgaaagac

SEQ ID NO: 10662 - DNA, 110 bp, synthetic construct
  source 1..110: mol_type = other DNA
tccaataccaatcacagcatgagtgaccgtaacattttcctgaagcgtgaaagacttaaagaggaaaatggcattgtttgcaaatgctcgatgaaagaaaaggaacacgt

SEQ ID NO: 10663 - DNA, 110 bp, synthetic construct
  source 1..110: mol_type = other DNA
ttctcaaactttcatggaacattcagaaagacagaccatgttctgggcccaacacaactaaacaaatgtgaaagaatagaaaccatacagctatgttctcagactgatgc

SEQ ID NO: 10664 - DNA, 110 bp, synthetic construct
  source 1..110: mol_type = other DNA
aactaaacaaatgtgaaagaatagaaaccatacagctatgttctcagactgatgctggaaagatgttatcagcatctggggtcttgttcacgcagcccaaaaatgaactt

SEQ ID NO: 10665 - DNA, 110 bp, synthetic construct
  source 1..110: mol_type = other DNA
agggtccaagaacccaggtccacaacacttggaggagtagctcactgcctttttctgagctgagcgtgagcaggcacctctctccgattcctctcctgtttgacatccct

SEQ ID NO: 10666 - DNA, 110 bp, synthetic construct
  source 1..110: mol_type = other DNA
ttgttcctctgctggttgttgacatcagtacccaacatgctgtagagtttccatcttattctcttctttgatgtaatgtgttacttcagctactgaacagtatcattgtt

SEQ ID NO: 10667 - DNA, 110 bp, synthetic construct
  source 1..110: mol_type = other DNA
ttattctcttctttgatgtaatgtgttacttcagctactgaacagtatcattgtttctcttgacagcagaacttggagttgttggtagtctctctctgtcctcttgctct

SEQ ID NO: 10668 - DNA, 110 bp, synthetic construct
  source 1..110: mol_type = other DNA
acactctttgttttaatttaacaatcctctaaattaaatttttgtttgattttcgggtaaatcagctctgtggctacaaaaaataaaagatcgttctagggctgccactg

SEQ ID NO: 10669 - DNA, 110 bp, synthetic construct
  source 1..110: mol_type = other DNA
aggaaagatgccatgactggagaagggagaaggagaattaagtaagatgcccaggtttttggagtgttcaaattggtatgtgttcaagctgttccctgagaaattattta

SEQ ID NO: 10670 - DNA, 110 bp, synthetic construct
  source 1..110: mol_type = other DNA
aaaacgtgtttaaagcgcagtgatgtgtcacatgcagttagcgtacaggccacattatgtccctgtgcacagaattcaacacagttttgtctcttctctgtttaaatata

SEQ ID NO: 10671 - DNA, 110 bp, synthetic construct
  source 1..110: mol_type = other DNA
tatgtccctgtgcacagaattcaacacagttttgtctcttctctgtttaaatataatggtcaggcttgccctcagaatcggtgttagaatgtggtctcttgtaggatgta

SEQ ID NO: 10672 - DNA, 110 bp, synthetic construct
  source 1..110: mol_type = other DNA
caatggtatagttttagtgcaaaccagcttctcttcctcctggtatgtcgcactcaggtagggcccatacattgtggccttaggtcaaggaagtttattatgggcactgt

SEQ ID NO: 10673 - DNA, 110 bp, synthetic construct
  source 1..110: mol_type = other DNA
cacctaccctggacttcaccctagcatcgggggtgagaaagaggcccagaaacccaccactccgccttcactctctacctctgtttgcctcgaaccaccgggattaatga

SEQ ID NO: 10674 - DNA, 110 bp, synthetic construct
  source 1..110: mol_type = other DNA
accactccgccttcactctctacctctgtttgcctcgaaccaccgggattaatgacttacgctgtgcctgccatcactgttgatgtggtcgccaccacatactctccaga

SEQ ID NO: 10675 - DNA, 110 bp, synthetic construct
  source 1..110: mol_type = other DNA
tttcaaccaaccagccttcaggagtaatcatgttgagggttaggaggggagattcagggatatccaagaattttgccactggtccagcgacgtcattagctgttaacgtc

SEQ ID NO: 10676 - DNA, 110 bp, synthetic construct
  source 1..110: mol_type = other DNA
agggatatccaagaattttgccactggtccagcgacgtcattagctgttaacgtcagttctggttccagaacaaaacggtaaaagctgttaaaagaaaataaagtatgta

SEQ ID NO: 10677 - DNA, 110 bp, synthetic construct
  source 1..110: mol_type = other DNA
ggctgtttctgaaatattgagctggtggagctgacagaacttgatgatctactgtttgggaggttatgagagaaaataagcagcttcgtacaactatcaggcttctagta

SEQ ID NO: 10678 - DNA, 110 bp, synthetic construct
  source 1..110: mol_type = other DNA
ctacagctttttaatgcatctcattatttctgggcccctatttaacccccaaacctacttaactactcaggccccaagctggaaatgttaaaatcacctttgattctctt

SEQ ID NO: 10679 - DNA, 110 bp, synthetic construct
  source 1..110: mol_type = other DNA
tctaaagccccaagggtgcggggcttcttcctaactgttgccaaaaggctttctctgtagctgtaggatgtgtacttctggcagtccatcccccacatgggtgctaatag

SEQ ID NO: 10680 - DNA, 110 bp, synthetic construct
  source 1..110: mol_type = other DNA
tgtagctgtaggatgtgtacttctggcagtccatcccccacatgggtgctaataggagtgctttatgtagccactgcagatcagaatgtggattgtatgggcctctcaag

SEQ ID NO: 10681 - DNA, 110 bp, synthetic construct
  source 1..110: mol_type = other DNA
taaggaaactgtggttatttaggagagatttattctttggagatgccttaagtttcaaatgtctatgacacaggttcccatcgtggctccgaggtaacaaacccaactgt

SEQ ID NO: 10682 - DNA, 110 bp, synthetic construct
  source 1..110: mol_type = other DNA
tttggagatgccttaagtttcaaatgtctatgacacaggttcccatcgtggctccgaggtaacaaacccaactgtatccatgaggacacgggttccatccctggccttgc

SEQ ID NO: 10683 - DNA, 110 bp, synthetic construct
  source 1..110: mol_type = other DNA
ttgatttggtttccaacatctctctggaatgcagtcactttctccatctctgaagcaaaccaccagttccaaatccaagtaccgtcacttcccagctatgccacttggga

SEQ ID NO: 10684 - DNA, 110 bp, synthetic construct
  source 1..110: mol_type = other DNA
caaaccaccagttccaaatccaagtaccgtcacttcccagctatgccacttgggataattaatgtctgcaaattttggtttcaaaggcaaaccagacttttcaaagaaaa

SEQ ID NO: 10685 - DNA, 110 bp, synthetic construct
  source 1..110: mol_type = other DNA
aggaggcatttacaaacatcagattttcctggtttttaagccaagctcagcttctacactgtcacagcttcaactatgaggatatagaatagcctcagaacccagttgtc

SEQ ID NO: 10686 - DNA, 110 bp, synthetic construct
  source 1..110: mol_type = other DNA
tatccagcaggattcattgaatgtaagtgtaggtcgtgcaggcagaggacatgagcattggattggagtcatttaaagctaatccttagttatctggagatttattttat

SEQ ID NO: 10687 - DNA, 110 bp, synthetic construct
  source 1..110: mol_type = other DNA
ccaaaaatgttctcctgaataaagaaagcagaattgtaaacatgctacatcatttggtgaataagccattgggtcatgagaactttttttaagcttaccgaaagaccttc

SEQ ID NO: 10688 - DNA, 110 bp, synthetic construct
  source 1..110: mol_type = other DNA
ggtgaataagccattgggtcatgagaactttttttaagcttaccgaaagaccttctctaagccaaacccgagggttactttttttcagttaccgtcatggactgaatgtg

SEQ ID NO: 10689 - DNA, 110 bp, synthetic construct
  source 1..110: mol_type = other DNA
aacagtttctggaaaattctccattctgctctttattgtcgtgcgtctgacctatcagagaccgttttcagcctatgataagctccaagatgaatttaggaggcaaattc

SEQ ID NO: 10690 - DNA, 110 bp, synthetic construct
  source 1..110: mol_type = other DNA
cccccgagtgagaaaagggattgaacctgcaacctcatggagcctagtcggattcgtttctaggaactcttaaattttttttgacttgaccattaatggtctctgcaagc

SEQ ID NO: 10691 - DNA, 110 bp, synthetic construct; identical to SEQ ID NO: 10690
  source 1..110: mol_type = other DNA

SEQ ID NO: 10692 - DNA, 110 bp, synthetic construct
  source 1..110: mol_type = other DNA
cttgtccacacctgaggggcaattcacccagcacgtgcaccacagccagttagactacttctatttctggtcccaccaaatcatgaacaactccttctctctttaaagat

SEQ ID NO: 10693 - DNA, 110 bp, synthetic construct
  source 1..110: mol_type = other DNA
tacttctatttctggtcccaccaaatcatgaacaactccttctctctttaaagatgccctgtctataaagtggagcgtgaccttccgggatgactgaaaacagaaaataa

SEQ ID NO: 10694 - DNA, 110 bp, synthetic construct
  source 1..110: mol_type = other DNA
tttcaggcaatacgtctgtgcatttatattcctaatttatggtctaaggtaatgaatcagtgtggctgaggtaactacacagttattttccttcttctttttcctttttt

SEQ ID NO: 10695 - DNA, 110 bp, synthetic construct
  source 1..110: mol_type = other DNA
attccatctgccttcatgccacccaagcagaggaatatcaaatatccttgatatgctgaaacgcgttggcgttcaagaaattaaccgcgtgtgggaggaggagtggcata

SEQ ID NO: 10696 - DNA, 110 bp, synthetic construct
  source 1..110: mol_type = other DNA
tggtcaaaaagcaggaagtgccaccataccaccatacattgtaggtatgtagcggtatgatacagtttatcatagatgtactgtgccctctggggccaaagaaccatgag

SEQ ID NO: 10697 - DNA, 110 bp, synthetic construct
  source 1..110: mol_type = other DNA
tgacttggcttccttgtcaaacacatactgttgtattttatgtaagtgatattgtgctaacctcagtgaatttcttgcttcttcactcaaaatgatacttttaggtttca

SEQ ID NO: 10698 - DNA, 110 bp, synthetic construct
  source 1..110: mol_type = other DNA
cttgtcacttaacaattattctttgaacatttgtaggccttttgttctctgtacgatgtgagaagccattgagaagcttatactctggaagttagactaaagtatttctc

SEQ ID NO: 10699 - DNA, 110 bp, synthetic construct
  source 1..110: mol_type = other DNA
gaccgttgtagttgtctgtttacatattcacacaaaagaagctacaattttgatgcctgcaaagatatagcttgttaggaacagtggggttaatcccattctcttcagac

SEQ ID NO: 10700 - DNA, 110 bp, synthetic construct
  source 1..110: mol_type = other DNA
cctgcaaagatatagcttgttaggaacagtggggttaatcccattctcttcagactggttcttggaattgtgctggtcatagactccgtgctattcaagatggacagttt

SEQ ID NO: 10701 - DNA, 110 bp, synthetic construct
  source 1..110: mol_type = other DNA
taaaaggaatttgaagcatcagggagaaaagtggaattttgattgttaagtcagggaagggccttgagattcctgaaatagcatggtgtgggcaggagatgtttatgttt

SEQ ID NO: 10702 - DNA, 110 bp, synthetic construct
  source 1..110: mol_type = other DNA
gggatgttattggaacatcttgaggtagccaacagctacatcagagctgcatattgaaaagatcgttttgactccagcatgagaaatgcaaccgatttggaggtcatctg

SEQ ID NO: 10703 - DNA, 110 bp, synthetic construct
  source 1..110: mol_type = other DNA
gaaaagatcgttttgactccagcatgagaaatgcaaccgatttggaggtcatctgggggaaaaacaatggattaaggatttggatattttgagtatgcaggaactgacag

SEQ ID NO: 10704 - DNA, 110 bp, synthetic construct
  source 1..110: mol_type = other DNA
cgctgggctgtcctggaacgtctgtctgaaacccctgagtccaagagacaatcttcctggtcctgctgggagggagcagagttgcaagcttctttggtggctttcctgtg

SEQ ID NO: 10705 - DNA, 110 bp, synthetic construct
  source 1..110: mol_type = other DNA
cctggtcctgctgggagggagcagagttgcaagcttctttggtggctttcctgtgactttcagggggactttaactttggcctggaacccactaatgtcggcgggcctca

SEQ ID NO: 10706 - DNA, 110 bp, synthetic construct
  source 1..110: mol_type = other DNA
atttgcccctggaggaggggaggaggagtattttcacactgcacggttcagaaatgcagctgcatggagataataaaatgactggctttatgttgcctttacgagggttt

SEQ ID NO: 10707 - DNA, 110 bp, synthetic construct
  source 1..110: mol_type = other DNA
gcagctgcatggagataataaaatgactggctttatgttgcctttacgagggtttttaaatcgtgtcgtgacaatgcaccctccttctggcggctcaggctgccctgcgt

SEQ ID NO: 10708 - DNA, 110 bp, synthetic construct; identical to SEQ ID NO: 10706
  source 1..110: mol_type = other DNA

SEQ ID NO: 10709 - DNA, 110 bp, synthetic construct; identical to SEQ ID NO: 10707
  source 1..110: mol_type = other DNA

SEQ ID NO: 10710 - DNA, 110 bp, synthetic construct
  source 1..110: mol_type = other DNA
gccaccagctgtggtgtgcttcacagacgaggcttggtgctgctgttgcagtggctgtggccgaggccgcagctgcagctccgaatcaactcctagcccagaaattttca

SEQ ID NO: 10711 - DNA, 110 bp, synthetic construct
  source 1..110: mol_type = other DNA
tgtggccgaggccgcagctgcagctccgaatcaactcctagcccagaaattttcatagtcgcaggtatagcccataaaaaaataatgataatgaacaaataaataaaaat

SEQ ID NO: 10712 - DNA, 110 bp, synthetic construct
  source 1..110: mol_type = other DNA
attaaaggagcccatggagaccactgggctctccttgagattggctccttgggcttgtctttgatccaaatggctccttaccacctggcgtcacattaaccctctgcaga

SEQ ID NO: 10713 - DNA, 110 bp, synthetic construct
  source 1..110: mol_type = other DNA
tgtctttgatccaaatggctccttaccacctggcgtcacattaaccctctgcagagggctgatcgccaccttccctcctctgatcaagaccctcaaggccaagtgcagaa

SEQ ID NO: 10714 - DNA, 110 bp, synthetic construct; identical to SEQ ID NO: 10712
  source 1..110: mol_type = other DNA

SEQ ID NO: 10715 - DNA, 110 bp, synthetic construct; identical to SEQ ID NO: 10713
  source 1..110: mol_type = other DNA

SEQ ID NO: 10716 - DNA, 110 bp, synthetic construct
  source 1..110: mol_type = other DNA
gtcctctccccaactcttccatcaaacccaaattgcgaatacaaatctgcaactcaggtatcctgacaacttgctgagggggcccaaatctacgattttagctatttgat

SEQ ID NO: 10717 - DNA, 110 bp, synthetic construct
  source 1..110: mol_type = other DNA
aggtatcctgacaacttgctgagggggcccaaatctacgattttagctatttgatatttaatattctccaattaaataaaatctatgagaatacacaaatggacacatga

SEQ ID NO: 10718 - DNA, 110 bp, synthetic construct
  source 1..110: mol_type = other DNA
ttggtaacttgccaattcaatcttgtagatctgaaaaattttgaacactcaacacagctactggtacccgacacacgatggatatatatgtatctgaaatcctcggttcc

SEQ ID NO: 10719 - DNA, 110 bp, synthetic construct
  source 1..110: mol_type = other DNA
agctactggtacccgacacacgatggatatatatgtatctgaaatcctcggttccccaatccacgttgtgaaccattgaaagtgtgaataatcattggcgtttacataac

SEQ ID NO: 10720 - DNA, 110 bp, synthetic construct
  source 1..110: mol_type = other DNA
agtcatcctcattgccatgaacgggggagtaatcttggaaacttgaagcatcttggcaaggccagacatggagtacgtctttgagtggagctgaaaggcccccaagcctt

SEQ ID NO: 10721 - DNA, 110 bp, synthetic construct
  source 1..110: mol_type = other DNA
gcaaggccagacatggagtacgtctttgagtggagctgaaaggcccccaagccttctagaaaattctaaatccaaatgtgggagtcttcatgaaaaatctgctgaggcac

SEQ ID NO: 10722 - DNA, 110 bp, synthetic construct
  source 1..110: mol_type = other DNA
ctctaggtaaggagatgttgaaaaattgagtttgggtacgagcttccccgtggggtgttggatggaacacatgtcgaagaccttcagatgtggatttggagttcagaatg

SEQ ID NO: 10723 - DNA, 110 bp, synthetic construct
  source 1..110: mol_type = other DNA
tcaaaaagaggttatttcctttccatgaaagaccctctctaggaatgcctccaggctgctcatcaaacatcagtggaaataccaattcccaactctactggagccctcat

SEQ ID NO: 10724 - DNA, 110 bp, synthetic construct
  source 1..110: mol_type = other DNA
ctgctcatcaaacatcagtggaaataccaattcccaactctactggagccctcatgcatcaggtgacccgcagtgcccaccctcagtcgctggcttgacatgtccctggt

SEQ ID NO: 10725 - DNA, 110 bp, synthetic construct
  source 1..110: mol_type = other DNA
caggacagcttcataccataaggattcttagactcaccagtttacttcctgcaagaaagagccagctcccttcttccctcctttgtaaatcagcgccttcccctctgtgc

SEQ ID NO: 10726 - DNA, 110 bp, synthetic construct
  source 1..110: mol_type = other DNA
cggcacctctgacgtttttgcccctctctctctccatgctaaccaccactgaaacgcttccaaagtgtgggcgcttccccagctcctggctcgtaattgattaaaaagac

SEQ ID NO: 10727 - DNA, 110 bp, synthetic construct
  source 1..110: mol_type = other DNA
atcattattgctcctttcgcattcccgccccattgttcatagatcatccttctctcggccagtcttgatcttcttaatcttcgaagtgaggaaaagagcttgtctctggc

SEQ ID NO: 10728 - DNA, 110 bp, synthetic construct
  source 1..110: mol_type = other DNA
cggccagtcttgatcttcttaatcttcgaagtgaggaaaagagcttgtctctggcactaatttgaatgaaaccagctattatgacctagaagataatgatgacaagaaac

SEQ ID NO: 10729 - DNA, 110 bp, synthetic construct
  source 1..110: mol_type = other DNA
ttttgtagaaagtcaaggcagaaaaaaaatcctaactgccatcattttcccatgttgagacctcatgctgcagctttttccccaagtgaattttttgtctgagccataaa

SEQ ID NO: 10730 - DNA, 110 bp, synthetic construct
  source 1..110: mol_type = other DNA
tgagacctcatgctgcagctttttccccaagtgaattttttgtctgagccataaagatcttagagcccctcgtgggaatgccatggcagcagccctccaaaaccattagg

SEQ ID NO: 10731 - DNA, 110 bp, synthetic construct
  source 1..110: mol_type = other DNA
ccctggaccagggaattttacaagggaaagtggtgtcagggagaactttcgaattaggctagagctgctccgtcagtggtgacggccacctggaagacggtgatgtcttt

SEQ ID NO: 10732 - DNA, 110 bp, synthetic construct
  source 1..110: mol_type = other DNA
aggctagagctgctccgtcagtggtgacggccacctggaagacggtgatgtctttccttcctgaagtggagaaacattctgtgggaaagagcagggcttgggtatgttac

SEQ ID NO: 10733 - DNA, 110 bp, synthetic construct
  source 1..110: mol_type = other DNA
aaaattactgcatactgagtattgggcgtattttaagggagcaccccaagcagtacctttaaagctggtgaaatcaaattgtatttctggcactctgtccacactaaccg

SEQ ID NO: 10734 - DNA, 110 bp, synthetic construct
  source 1..110: mol_type = other DNA
cctttaaagctggtgaaatcaaattgtatttctggcactctgtccacactaaccgcatccccccaagtgcgggttcatgtttacagttgtggcctcgttcactgtcttgt

SEQ ID NO: 10735 - DNA, 110 bp, synthetic construct
  source 1..110: mol_type = other DNA
gctctcccatggcccttgacccgtgttggcacacggcccccttcagggaggaagctcataaagagtgtgtgctgggagttcacgtcgtggctcagcagtgacaagcctga

SEQ ID NO: 10736 - DNA, 110 bp, synthetic construct
  source 1..110: mol_type = other DNA
tcataaagagtgtgtgctgggagttcacgtcgtggctcagcagtgacaagcctgaccggtgtccccgagaatgcggcatcgatccctggtctcgctcagtgggctgagga

SEQ ID NO: 10737 - DNA, 110 bp, synthetic construct
  source 1..110: mol_type = other DNA
tgtataaacactagttagataacattggttgatatccttctgcactgctgcagagttcttgcagttgaggtcattttccagccaagttggcagagaaaagagaagaaaaa

SEQ ID NO: 10738 - DNA, 110 bp, synthetic construct
  source 1..110: mol_type = other DNA
ttcttgcagttgaggtcattttccagccaagttggcagagaaaagagaagaaaaataactagagatttctctcatcctttacagaccttaagaagcccttttctcagttc

SEQ ID NO: 10739 - DNA, 110 bp, synthetic construct
  source 1..110: mol_type = other DNA
gatgcatggcgctgaagccatattgcttgaggtcacatccctggtatgttctgaaggtcacatggcgccgagctaagtccagaatctgtccttaatcaccttccgcagca

SEQ ID NO: 10740 - DNA, 110 bp, synthetic construct
  source 1..110: mol_type = other DNA
ggtcacatggcgccgagctaagtccagaatctgtccttaatcaccttccgcagcacacagaccacctctttcaaggttatttgatgctaagatcttcccaccaaactaca

SEQ ID NO: 10741 - DNA, 110 bp, synthetic construct
  source 1..110: mol_type = other DNA
aaatagttatggaacacctgggatttcagagaggaaattcttctgtctgccctcaagcagcttagggtctagaaattcaatgttcggtccatgcccaaatcctgtcaatt

SEQ ID NO: 10742 - DNA, 110 bp, synthetic construct
  source 1..110: mol_type = other DNA
tttagatatttgggtttaaattcaccgcctttatttgctttccattggttccaatttctttcctcttctattaacttgctggttatacattttctcctttttggtggttt

SEQ ID NO: 10743 - DNA, 110 bp, synthetic construct
  source 1..110: mol_type = other DNA
aagtctactgcagctaagagaccagacgatgggccccttccctctgattccatgtatgaaaagggagggatttggagggtggattcgaccttttttcggatttgaagaag

SEQ ID NO: 10744 - DNA, 110 bp, synthetic construct
  source 1..110: mol_type = other DNA
catgaaaatcaggtggtgcatctacccagtgttgccaccaagcccccagaagcgaggggagaggcctccttccccccaccttcagaggaagcgtggccctgcctgctcct

SEQ ID NO: 10745 - DNA, 110 bp, synthetic construct
  source 1..110: mol_type = other DNA
tagcctttgggaccctttaattaggttttggctctcctgtaacccctgcctcattttggtatccaaggaacctaacacaagtcacccttgagactgaccaaggtgtcaca

SEQ ID NO: 10746 - DNA, 110 bp, synthetic construct
  source 1..110: mol_type = other DNA
ttggtatccaaggaacctaacacaagtcacccttgagactgaccaaggtgtcacatgagtgaccccacacagaatcacatgcaaaaatatctctttgggctggaagttaa

SEQ ID NO: 10747 - DNA, 110 bp, synthetic construct
  source 1..110: mol_type = other DNA
tgcagtggcagccccaggaattgaaatagctgagctgtaagagctgtatccctaccccagggaaggcagggactggtcctccctcggtcagcatcacacagcatccctcc

SEQ ID NO: 10748 - DNA, 110 bp, synthetic construct
  source 1..110: mol_type = other DNA
ggtgtaggttgcagctgcagcttgaattcaatccctggcttccatatgccgcaggtgcagccaaaaaacaaaggtggacatcctgtcttgtttctgatcttagaggaaac

SEQ ID NO: 10749 - DNA, 110 bp, synthetic construct
  source 1..110: mol_type = other DNA
tgcagccaaaaaacaaaggtggacatcctgtcttgtttctgatcttagaggaaaccctgtcaggttttcgccactgagtgtgacgttagctgtggacttaccatatattg

SEQ ID NO: 10750 - DNA, 110 bp, synthetic construct
  source 1..110: mol_type = other DNA
ctatggactccaaaaagtggcataggggttacctgaagctagagagggatgggagttattgtttaaggggtacaggatttcatttttggatgatgaaaaagttctagaga

SEQ ID NO: 10751 - DNA, 110 bp, synthetic construct
  source 1..110: mol_type = other DNA
ttattgtttaaggggtacaggatttcatttttggatgatgaaaaagttctagagatgaacagtcgcaatggttgcccaatgatgtgaatacacttaacgccagtgcactg

SEQ ID NO: 10752 - DNA, 110 bp, synthetic construct
  source 1..110: mol_type = other DNA
ttggtcccctctttacatgtctgtgtacgaggtgggcttgccataaatagtgtggagtgagcgaggtgagtgcatattagcatttctcctttgtgcaggggaggagaagt

SEQ ID NO: 10753 - DNA, 110 bp, synthetic construct
  source 1..110: mol_type = other DNA
ttctcatcttcatgaatacaaattgggcgcttaacctgctgagctgtaacaggaactccctccagtacatttttttaaaaaagatctttgtcagatatgtgatttgcgaa

SEQ ID NO: 10754 - DNA, 110 bp, synthetic construct
  source 1..110: mol_type = other DNA
ctccctccagtacatttttttaaaaaagatctttgtcagatatgtgatttgcgaatatttttttccccagcttatttcttcagggtcaaaacaggacaggatctgtatgc

SEQ ID NO: 10755 - DNA, 110 bp, synthetic construct
  source 1..110: mol_type = other DNA
acccaggctgtaggggtgaaagcacccaacccgaaccactagagtagcagggaactcctcaggaaaatagaattttttggaggctgggtggagttccctggtggcctatc

SEQ ID NO: 10756 - DNA, 110 bp, synthetic construct
  source 1..110: mol_type = other DNA
tcctcaggaaaatagaattttttggaggctgggtggagttccctggtggcctatcaggttaagggtcttgtgttgtttctgctgtggatagggtgactactgtagtgtgg

SEQ ID NO: 10757 - DNA, 110 bp, synthetic construct
  source 1..110: mol_type = other DNA
aatatattgtgtcatattctccagtcaaccctttgtaattccttgtgttttaggacaacaaagaagactggttggtccatcacaaaaatgctgtcagattggattcacat

SEQ ID NO: 10758 - DNA, 110 bp, synthetic construct
  source 1..110: mol_type = other DNA
tgatgcctggaaccatagcagccgcgttgtgattggtcttgggataaaggcaagacgatgattggctgaagggtggaagcagcgttcttgtgggcgtcactgagctattg

SEQ ID NO: 10759 - DNA, 110 bp, synthetic construct
  source 1..110: mol_type = other DNA
cgatgattggctgaagggtggaagcagcgttcttgtgggcgtcactgagctattgatcgtccagtgcctggagcatagtatactaaatagcaaattctgtatgctaagta

SEQ ID NO: 10760 - DNA, 110 bp, synthetic construct
  source 1..110: mol_type = other DNA
ttctcatgcttctaggactctcataaatctgcttctgtttttgtagacagactcaattatttcagtgttgcattaattttaacgacaatatgtttgggcaacagtttctt

SEQ ID NO: 10761 - DNA, 110 bp, synthetic construct
  source 1..110: mol_type = other DNA
attatttcagtgttgcattaattttaacgacaatatgtttgggcaacagtttcttgctttggcagctctttttcatctgtcattcccattgtcatttttctcttcttgca

SEQ ID NO: 10762 - DNA, 110 bp, synthetic construct
  source 1..110: mol_type = other DNA
tgccactccatcacctccaggctgctctgggatttttcccatttcttaacaccacctaacctccacgacaaacttatcaagaccccaccaaccatccatcctcccttgct

SEQ ID NO: 10763 - DNA, 110 bp, synthetic construct
  source 1..110: mol_type = other DNA
ctaacctccacgacaaacttatcaagaccccaccaaccatccatcctcccttgctggaggcgctctctgagttccccttgtctgtacctctaattagaccttgaatcata

SEQ ID NO: 10764 - DNA, 110 bp, synthetic construct
  source 1..110: mol_type = other DNA
aaggctctatttcttccataaattgggcttgaaataggagcttagccagagcactgggtgaagaagagctgcttgctctccatcaagtcaggacttaaagtccgtttcat

SEQ ID NO: 10765 - DNA, 110 bp, synthetic construct
  source 1..110: mol_type = other DNA
gggtgaagaagagctgcttgctctccatcaagtcaggacttaaagtccgtttcattatttcattggaagaaagtcgtccgccaaggctggagtctattgaatgtgtggta

SEQ ID NO: 10766 - DNA, 110 bp, synthetic construct
  source 1..110: mol_type = other DNA
caacagttatgcttcatttaccatagtcatccacccatcaccctttcagccacctgtccatccatccatcctgcttagctgtttatcttttgcaccttttgaaagtttgc

SEQ ID NO: 10767 - DNA, 110 bp, synthetic construct
  source 1..110: mol_type = other DNA
gtccatccatccatcctgcttagctgtttatcttttgcaccttttgaaagtttgctataactgtaaactctagacatcaggatgtttcattgttcttttttaaaataaaa

SEQ ID NO: 10768 - DNA, 110 bp, synthetic construct
  source 1..110: mol_type = other DNA
ctggtcccatcagtggcctgtattgatttcaggtggcatcttcctctacacacagcagaccctttgctgttgcttaaataccggatgctccaagctaagcatgtctgaaa

SEQ ID NO: 10769 - DNA, 110 bp, synthetic construct
  source 1..110: mol_type = other DNA
cagaccctttgctgttgcttaaataccggatgctccaagctaagcatgtctgaaactgaatatactttgccttccttatctctaatgctgtgctcttgcatcttttaaaa

SEQ ID NO: 10770 - DNA, 110 bp, synthetic construct
  source 1..110: mol_type = other DNA
atgtcaacgcacctcgtttgttcttcacattggaggtcggcaaaaaagagccagacagtaaatttgttaggctttgcaagccgtgctgtttctatggcaaccactcagct

SEQ ID NO: 10771 - DNA, 110 bp, synthetic construct
  source 1..110: mol_type = other DNA
cagtaaatttgttaggctttgcaagccgtgctgtttctatggcaaccactcagctctgcccctgcagcgcagagcagccgtggacaaagtaaaatgagagtggtcaggtt

SEQ ID NO: 10772 - DNA, 110 bp, synthetic construct
  source 1..110: mol_type = other DNA
gtgccttaatatccagatgctttcttagaaagttcccccagattatttacctagagcccccgggctgatggaaattcctcgccggccacttgtcatagaggaagaaacga

SEQ ID NO: 10773 - DNA, 110 bp, synthetic construct
  source 1..110: mol_type = other DNA
gcccccgggctgatggaaattcctcgccggccacttgtcatagaggaagaaacgatgcgcttcccaggagttaaggaagttcatggagtagcagtgaacaccagccatca

SEQ ID NO: 10774 - DNA, 110 bp, synthetic construct
  source 1..110: mol_type = other DNA
ttatcattcgtccctttccttgaagttggcttctagctgtcctgaacggttggttggaggatattacataggttcatggttgaaaatcctcttttaaattgtttctggga

SEQ ID NO: 10775 - DNA, 110 bp, synthetic construct
  source 1..110: mol_type = other DNA
gatgtccacgctaaaaactttctagaaaaaggctgatcgaaagggagaatgtgttccgcctcccgggagagaaagagagacgtgaatcaagcggcacatgattcaccttc

SEQ ID NO: 10776 - DNA, 110 bp, synthetic construct
  source 1..110: mol_type = other DNA
ccgcctcccgggagagaaagagagacgtgaatcaagcggcacatgattcaccttcacttacaatcaacttccaaacagggaaaggtcactgacgccccacagacggcaca

SEQ ID NO: 10777 - DNA, 110 bp, synthetic construct
  source 1..110: mol_type = other DNA
ctcaggcccggccgctgacgaacctcccgactcagccttctccatgcttcccacacctcctgtgtccacaaacctgggaagcaaatttcgcagtttcccaggtgagctcc

SEQ ID NO: 10778 - DNA, 110 bp, synthetic construct
  source 1..110: mol_type = other DNA
cctcctgtgtccacaaacctgggaagcaaatttcgcagtttcccaggtgagctccggctaagagctgctgtgtctgacccaagccagtgaatcactagcttttgccgtga

SEQ ID NO: 10779 - DNA, 110 bp, synthetic construct
  source 1..110: mol_type = other DNA
ttaattataaatgaaaatgttccgtgcatactttagaagcaaagttgccacctgaaacatgaaataatgacaagggatcagcgccacaaaaggtaaaaccaggctgagaa

SEQ ID NO: 10780 - DNA, 110 bp, synthetic construct
  source 1..110: mol_type = other DNA
aacatgaaataatgacaagggatcagcgccacaaaaggtaaaaccaggctgagaatataagaagctattctcaggtcagacaacggcagccaacaccctccgtggctgct

SEQ ID NO: 10781 - DNA, 110 bp, synthetic construct
  source 1..110: mol_type = other DNA
ctctccttcttcagtccctgtctgagaaaatcccctgcttctatctccctcccaagtctcgaagctcctcgccctccggcccgggtgagtctccaagccgccaggacgct

SEQ ID NO: 10782 - DNA, 110 bp, synthetic construct
  source 1..110: mol_type = other DNA
ttatcctctcaccttcttcctcttgtggcttcccctccactctcagctggagtgacagcacctcatacaccactgccatttcgggaggagagacgtggagggtctccata

SEQ ID NO: 10783 - DNA, 110 bp, synthetic construct
  source 1..110: mol_type = other DNA
cagcacctcatacaccactgccatttcgggaggagagacgtggagggtctccatagcaattatgcgtgttctggtctccatggagatacttactaacccgtggagcaatt

SEQ ID NO: 10784 - DNA, 110 bp, synthetic construct
  source 1..110: mol_type = other DNA
gaaatggtgggagtcttgagatgtacatttgggatggaactcaagtcaatgccttttttttccccacatccctggtgtgtgggaattccagggatcagacaaagacacag

SEQ ID NO: 10785 - DNA, 110 bp, synthetic construct
  source 1..110: mol_type = other DNA
ttttttccccacatccctggtgtgtgggaattccagggatcagacaaagacacagcagtgatgccaagtccttaactgctaggccaccagagaactaccttttaatacaa

SEQ ID NO: 10786 - DNA, 110 bp, synthetic construct
  source 1..110: mol_type = other DNA
tgcgggttaagctacttctggtcctggccccactccacacgcgtctttatatatgtattcattccagctcctgctttcctttcctcttcaagtctttcgctaagaattta

SEQ ID NO: 10787 - DNA, 110 bp, synthetic construct
  source 1..110: mol_type = other DNA
tattcattccagctcctgctttcctttcctcttcaagtctttcgctaagaatttatctcttagagttctttcaacgctgacttccatttctcgacttccattttccttgc

SEQ ID NO: 10788 - DNA, 110 bp, synthetic construct
  source 1..110: mol_type = other DNA
gcttaggccccttgccttttgcacaggatgcctgcaatctatacacaccattctgcaccttgctttctccacttcacaataatatatactggaaatcattcaatgcatat

SEQ ID NO: 10789 - DNA, 110 bp, synthetic construct
  source 1..110: mol_type = other DNA
caccttgctttctccacttcacaataatatatactggaaatcattcaatgcatattagggcagggcatagaaagttcccttttttatagctactgagcaattcaataaat

SEQ ID NO: 10790 - DNA, 110 bp, synthetic construct
  source 1..110: mol_type = other DNA
aatgagaaacagagaggttccggaacccggccaaagacactcagctaggaagtgacagagctggtgagagagtgtgaatgtgcgtcgttcatgatacagcagctctgcgt

SEQ ID NO: 10791 - DNA, 110 bp, synthetic construct
  source 1..110: mol_type = other DNA
cagagctggtgagagagtgtgaatgtgcgtcgttcatgatacagcagctctgcgtgatgtcaagaagcagcttttatggagttcccgtggtggcgcagcagaaacgaatc

SEQ ID NO: 10792 - DNA, 110 bp, synthetic construct
  source 1..110: mol_type = other DNA
ttaggggaggtgaagggaggtgaggacacctaacgtaaaaataaaagctagtatgtttttatacaaagcccactggaatggggcataagtgttatcgtcaaactactacc

SEQ ID NO: 10793 - DNA, 110 bp, synthetic construct
  source 1..110: mol_type = other DNA
gagagttcgtccaattggcatagttgagtggcccgatgtctctagcatcattcatgggacacttggatttaacagtaaaacagcttagaattcgtataaggcacatagta

SEQ ID NO: 10794 - DNA, 110 bp, synthetic construct
  source 1..110: mol_type = other DNA
gcaggtgctttctcggcacagggacaggcgtgatcacggcgagagcgcttcccagacggaacgccagcccttgtgtttctgcctgtgaatgttcccgggagggcacccga

SEQ ID NO: 10795 - DNA, 110 bp, synthetic construct
  source 1..110: mol_type = other DNA
acggaacgccagcccttgtgtttctgcctgtgaatgttcccgggagggcacccgagagctggcgggctgctgggggtcaggttcaaattctcactttgagctcttggcca

SEQ ID NO: 10796 - DNA, 110 bp, synthetic construct
  source 1..110: mol_type = other DNA
ccgcattctttctttggtaacagctttactgagacttaagcggcacaccccacaattcacccgtgaagtgcacgacccagtggtgcgggtggagccccacctgccccgca

SEQ ID NO: 10797 - DNA, 110 bp, synthetic construct
  source 1..110: mol_type = other DNA
ctgagagcagtagggatttacgaactttgcagtggtccctgtgtctctggttgagccctggggaggctgatgatcgagggaagagagcgctttctgccctcacagagctc

SEQ ID NO: 10798 - DNA, 110 bp, synthetic construct
  source 1..110: mol_type = other DNA
ccctggggaggctgatgatcgagggaagagagcgctttctgccctcacagagctcagtctatgcagctccacgaagagactataaaagacggtgatgagtgtgctgatga

SEQ ID NO: 10799 - DNA, 110 bp, synthetic construct
  source 1..110: mol_type = other DNA
aggggactctttctattttcattcctttctaaaataaattcattttagaccctggcatccaggcaagtgtctcacatactggatctatgtcatactggttggcccaacag

SEQ ID NO: 10800 - DNA, 110 bp, synthetic construct
  source 1..110: mol_type = other DNA
catccaggcaagtgtctcacatactggatctatgtcatactggttggcccaacagaaggtactatattcacagttaaataggaattttcttcctcctccctccctccctt

SEQ ID NO: 10801 - DNA, 110 bp, synthetic construct
  source 1..110: mol_type = other DNA
tcaggttgccttcatgtgagatgctttacctggcacctcggaacagcaggcccgtttcaggtttcaacctgcacatcagctgccaaggactgagacacctgtaagttaat

SEQ ID NO: 10802 - DNA, 110 bp, synthetic construct
  source 1..110: mol_type = other DNA
acatcccactatctccaacttaatattccaagaataaattcccatgagactcgttgtgtcatgatactggtcacattctccacatcgtcagtgttaattcagtacctgct

SEQ ID NO: 10803 - DNA, 110 bp, synthetic construct
  source 1..110: mol_type = other DNA
ggctttaggtaaaattaagtccctcaaacgctttcttaacaggaaaggctggaaatgctacagtgcaatgtacacgcggccaccaacgcctgctgacaatctaaacagaa

SEQ ID NO: 10804 - DNA, 110 bp, synthetic construct
  source 1..110: mol_type = other DNA
tgctacagtgcaatgtacacgcggccaccaacgcctgctgacaatctaaacagaactttctttgacatctctgcgctctctgggtcacgggtagcggttataaacccact

SEQ ID NO: 10805 - DNA, 110 bp, synthetic construct
  source 1..110: mol_type = other DNA
tccacatccacattcaagtttctgtgtggacatctgttctcaattcgtaggcatacctagaagtgaaacagcagtcatagagtaactccatatttagcttttggaaaaac

SEQ ID NO: 10806 - DNA, 110 bp, synthetic construct
  source 1..110: mol_type = other DNA
cctagaagtgaaacagcagtcatagagtaactccatatttagcttttggaaaaactgtccaactgttttccaaaatgtccacagcatttcacagtcccaccagcaacgta

SEQ ID NO: 10807 - DNA, 110 bp, synthetic construct
  source 1..110: mol_type = other DNA
cctagatttctgaaaattgtcaatatttatagttcaactatattagactatagcgtaaagcatcatttcaggtttggacaggagccaaagccagtgtggcaggagcagag

SEQ ID NO: 10808 - DNA, 110 bp, synthetic construct
  source 1..110: mol_type = other DNA
agactcagatggaggcggtgggggggccgggagggaggaagtattccaaaaagttccaaaaatcaaagcttggtgccctctatttttcctccagtatatggagttcctgg

SEQ ID NO: 10809 - DNA, 110 bp, synthetic construct
  source 1..110: mol_type = other DNA
ccaaaaatcaaagcttggtgccctctatttttcctccagtatatggagttcctggtccagggatcagatggatcttcaacccactctcctgggctggggatcgaacctgc

SEQ ID NO: 10810 - DNA, 110 bp, synthetic construct
  source 1..110: mol_type = other DNA
acagtttaggcgttgaatgccaagaggtaaaagaaaaatctcacgcccttgcttatataaccatttacactgggaccccttatacctgttcgccatgttcccagcagctc

SEQ ID NO: 10811 - DNA, 110 bp, synthetic construct
  source 1..110: mol_type = other DNA
tataaccatttacactgggaccccttatacctgttcgccatgttcccagcagctcccttcccaatcgcccaaagggccaaacacccaaccctggtgcacagatgagtgga

SEQ ID NO: 10812 - DNA, 110 bp, synthetic construct
  source 1..110: mol_type = other DNA
gtgcttctcttctctgcccctttaaccacatccgttttcccccatggcacgtccacccccaagtgtgaatttccaggcaagcactgcattcccagcatccaacgcagagc

SEQ ID NO: 10813 - DNA, 110 bp, synthetic construct
  source 1..110: mol_type = other DNA
cccccaagtgtgaatttccaggcaagcactgcattcccagcatccaacgcagagctggcagggcgtgaaaccctgggtcatgagtcaagttcatctcacctgccttcact

SEQ ID NO: 10814 - DNA, 110 bp, synthetic construct
  source 1..110: mol_type = other DNA
tttttttcagctggggtggtcgaatgaatggctgtgtgtgtgagaaaaaaagagtgaattgggggcggggttttgtggaagggcctggcccagttgtcaaagcaccagac

SEQ ID NO: 10815 - DNA, 110 bp, synthetic construct
  source 1..110: mol_type = other DNA
gaattgggggcggggttttgtggaagggcctggcccagttgtcaaagcaccagacacgtgtggcatttgtaccctgatggtttaaacaggatgtgggcccaacaccaagg

SEQ ID NO: 10816 - DNA, 110 bp, synthetic construct
  source 1..110: mol_type = other DNA
atcccttcgttggaactttaaacgtgtggaaggagacttggcgctgtcttccatggtttctacatctgccattctgcaaagacgatagacagcagctttggacatttgca

SEQ ID NO: 10817 - DNA, 110 bp, synthetic construct
  source 1..110: mol_type = other DNA
gtttctacatctgccattctgcaaagacgatagacagcagctttggacatttgcagagtactgcacagcttacaaagctctcatgcagcctgtctcacaccatcacagtg

SEQ ID NO: 10818 - DNA, 110 bp, synthetic construct
  source 1..110: mol_type = other DNA
ctttacacacgtccctgaatttcatcttcgtgcccacatcagagtacgttaaggatacagcggtggtgtggatggtgtgacccagagatatttgctcatgactgcgagat

SEQ ID NO: 10819 - DNA, 110 bp, synthetic construct
  source 1..110: mol_type = other DNA
tacagcggtggtgtggatggtgtgacccagagatatttgctcatgactgcgagattgtgttgtgctctttctatgttgtggtaccatggtatttcttttagtgcattttg

SEQ ID NO: 10820 - DNA, 110 bp, synthetic construct
  source 1..110: mol_type = other DNA
ctgtccctcagccccacacgcctctggaccacctgtctctctggtgcagggaggggttccgtcttgttccctcttcccaaatgtagactcacccagtgacagtcgctgac

SEQ ID NO: 10821 - DNA, 110 bp, synthetic construct
  source 1..110: mol_type = other DNA
gttccgtcttgttccctcttcccaaatgtagactcacccagtgacagtcgctgaccttataggactgcgttggtcaattgtttcaagtcacctagtcatcattagtttta

SEQ ID NO: 10822 - DNA, 110 bp, synthetic construct
  source 1..110: mol_type = other DNA
tggagcaagctgggaaaatcatctctaggccgtggatggacagggcactgcaggaaggctgccccttgaactgggtcatcaatttgaccacctgacctgtgtacacgcgg

SEQ ID NO: 10823 - DNA, 110 bp, synthetic construct
  source 1..110: mol_type = other DNA
aggctgccccttgaactgggtcatcaatttgaccacctgacctgtgtacacgcggcactgcgggcgtccccgctcctcccactgctccagcctccgcttggccctacgtt

SEQ ID NO: 10824 - DNA, 110 bp, synthetic construct
  source 1..110: mol_type = other DNA
cagagacaagcccttacctgtggcggaatgatctttgactcccaacagctgaactatctgtatagaccgaaacccatctcacgctcttgccttgaggaagtaaaatccac

SEQ ID NO: 10825 - DNA, 110 bp, synthetic construct
  source 1..110: mol_type = other DNA
ctgttgtggcttagcagtgacgaatgtgacaggaatccatgagggctcgggttcgatcactggtccccctctctgggctgggactctggcgttgctgtgagctgcagtgt

SEQ ID NO: 10826 - DNA, 110 bp, synthetic construct
  source 1..110: mol_type = other DNA
ctcgggttcgatcactggtccccctctctgggctgggactctggcgttgctgtgagctgcagtgtgggtacaaacacggctcaggttccacgttgctctggctgtggcat

SEQ ID NO: 10827 - DNA, 110 bp, synthetic construct
  source 1..110: mol_type = other DNA
actagtcaggttcattaccactaagccacagctggaactccaaagccggcctctttttatgctgatgtcactttaaacccactgtggcacaaagtgagctcatttttccc

SEQ ID NO: 10828 - DNA, 110 bp, synthetic construct
  source 1..110: mol_type = other DNA
tttatgctgatgtcactttaaacccactgtggcacaaagtgagctcatttttcccaaaatcatgtccaaagttcaaactcctcaaagttattgccctttctgctgtctct

SEQ ID NO: 10829 - DNA, 110 bp, synthetic construct
  source 1..110: mol_type = other DNA
ttcaacaaagacatcacaaataagcctatcatttagtagcttagaagtgggtaatttgggaaaaaagtgaatcggaaagggtcgaggagtgggggtgggccggaaagagg

SEQ ID NO: 10830 - DNA, 110 bp, synthetic construct
  source 1..110: mol_type = other DNA
ttgggaaaaaagtgaatcggaaagggtcgaggagtgggggtgggccggaaagaggtctcaggaaaccatccgcatacggacgctagggggcgctgcagcacggttttggc

SEQ ID NO: 10831 - DNA, 110 bp, synthetic construct
  source 1..110: mol_type = other DNA
ccatcagtgcttgagagtttctgttgctttgtgtccttgccagcatttagtatctttagttaaaaattttaaagctctcgtaatagatgtgtagtgtatagtggtatatg

SEQ ID NO: 10832 - DNA, 110 bp, synthetic construct
  source 1..110: mol_type = other DNA
aaggccagggattgaacctacatcctcgtggatagtagtcgggtttgtttccactgagcagcgatgggaactcccagtgtgttcctttttctaaactcagcagtgcactt

SEQ ID NO: 10833 - DNA, 110 bp, synthetic construct; identical to SEQ ID NO: 10832
  source 1..110: mol_type = other DNA

SEQ ID NO: 10834 - DNA, 110 bp, synthetic construct
  source 1..110: mol_type = other DNA
ctggtaaaatatatgtaacgtacagtttaccattttaactatttgaagtataccgttcagtggccttatttaagtacatcctcattgttaggccgctgtcatccccatcc

SEQ ID NO: 10835 - DNA, 110 bp, synthetic construct
  source 1..110: mol_type = other DNA
tacagtacaggtgaactgctataaaaattaaaggctgcttggtttttgtagcagtgtcaagcactgtagaagttataaactcatgttccccattttgtattgacccagtg

SEQ ID NO: 10836 - DNA, 110 bp, synthetic construct
  source 1..110: mol_type = other DNA
catattctcatggagtcttaggagttagcaggtttttctttgaagggcattctgcttttctggttcctgtttatcttggaaagctaagtgttttattttcatctccagta

SEQ ID NO: 10837 - DNA, 110 bp, synthetic construct
  source 1..110: mol_type = other DNA
gggaactccaggaatcggcaattctgatggatggccatcccccggttctctttcccgttgcttcaccaaagagaaaagccaagctccatctctccatgaacctgctcctc

SEQ ID NO: 10838 - DNA, 110 bp, synthetic construct
  source 1..110: mol_type = other DNA
cataataaattggcttcatcgtcaaaaaagatcaactattttctttgggcccattgcccctttaagctgctctacccaccccgggaacacaaagcctttgaacacaaggc

SEQ ID NO: 10839 - DNA, 110 bp, synthetic construct
  source 1..110: mol_type = other DNA
tacatagtggacccactggtacctaggaactggtaccaaatgaagctgagtgacccccaaaggaaagtgaatacaaactcgacgcttggtttaattgcatagttcagctg

SEQ ID NO: 10840 - DNA, 110 bp, synthetic construct
  source 1..110: mol_type = other DNA
gcagtcagctaggcaggtgagatgagacagcgtgtgcaaaggtcctgagccaatccagtagattggttcctaatctgaatcatcactgcttagcttgccttggtattcat

SEQ ID NO: 10841 - DNA, 110 bp, synthetic construct
  source 1..110: mol_type = other DNA
cagtagattggttcctaatctgaatcatcactgcttagcttgccttggtattcatctactagctttttatctccagcaatatgacccttcttgggacagcttcttttgct

SEQ ID NO: 10842 - DNA, 110 bp, synthetic construct
  source 1..110: mol_type = other DNA
cctcctgattgctagtcagattcgtttccgctgcaccgtgacgagaaatcctattttcttccttatgcatctctgccatttttcttaatcagagctgtgcctcagccaag

SEQ ID NO: 10843 - DNA, 110 bp, synthetic construct
  source 1..110: mol_type = other DNA
ttcttccttatgcatctctgccatttttcttaatcagagctgtgcctcagccaagccagactgcctgctcttcccaaatgtgggtggctccttttgtttccttccttttc

SEQ ID NO: 10844 - DNA, 110 bp, synthetic construct; identical to SEQ ID NO: 10842
  source 1..110: mol_type = other DNA

SEQ ID NO: 10845 - DNA, 110 bp, synthetic construct; identical to SEQ ID NO: 10843
  source 1..110: mol_type = other DNA

SEQ ID NO: 10846 - DNA, 110 bp, synthetic construct
  source 1..110: mol_type = other DNA
atttctctcagtccctaggttctccttgcatacctttctcttccttccagtttatcaggtgaagaaccttaggctgttagaccttagagtttctctcagtcttgacttag

SEQ ID NO: 10847 - DNA, 110 bp, synthetic construct
  source 1..110: mol_type = other DNA
caggtgaagaaccttaggctgttagaccttagagtttctctcagtcttgacttagctgattgcagaatcatggtgccgttcaacgttttcctccgttcttggtatttcct

SEQ ID NO: 10848 - DNA, 110 bp, synthetic construct
  source 1..110: mol_type = other DNA
tagaatgtaatttttagagcagttttatttttacccaaaaatgagtggtaagtgcattgagttcctgtatatccctttactcacctgactccctgcccctgtccccctcc

SEQ ID NO: 10849 - DNA, 110 bp, synthetic construct
  source 1..110: mol_type = other DNA
attgagttcctgtatatccctttactcacctgactccctgcccctgtccccctcctccacctggcagtttctcctattagcaacatcttgtatggtgtggtatatttgtt

SEQ ID NO: 10850 - DNA, 110 bp, synthetic construct
  source 1..110: mol_type = other DNA
tccaaggttaggataagctcagagagatccacacactcacacttcatggtcaaactgtccaaaaccaacaagaggagttttcttggtggcctatcagttaaggatttggc

SEQ ID NO: 10851 - DNA, 110 bp, synthetic construct
  source 1..110: mol_type = other DNA
agctcagagagatccacacactcacacttcatggtcaaactgtccaaaaccaacaagaggagttttcttggtggcctatcagttaaggatttggcattgtcactgctgtg

SEQ ID NO: 10852 - DNA, 110 bp, synthetic construct
  source 1..110: mol_type = other DNA
cacttatgcattatttaatttaatctgcagtacatcactatgaggccgatactattattatcttgattttatatgtgaggaaacagacctttgctcaaggtcacaactaa

SEQ ID NO: 10853 - DNA, 110 bp, synthetic construct
  source 1..110: mol_type = other DNA
catgcagtagatgctcgagaaatgatctcccttcccccttaaatgtacacattttgtttttttaaaagaatctaaagtagctcgcactttgcaagcagttcttttctatt

SEQ ID NO: 10854 - DNA, 110 bp, synthetic construct
  source 1..110: mol_type = other DNA
gtttttttaaaagaatctaaagtagctcgcactttgcaagcagttcttttctattctgtgaaaaattcgtggaaagttgaggaaataagactaaaaatggggagttccca

SEQ ID NO: 10855 - DNA, 110 bp, synthetic construct
  source 1..110: mol_type = other DNA
aagaaataacaacaagaatttttcagtggtcggcccccctttctatggatttaaatcattgtttaaagagatatatcctggaattcccatcatggctcagtggttaacga

SEQ ID NO: 10856 - DNA, 110 bp, synthetic construct
  source 1..110: mol_type = other DNA
gaatttttcagtggtcggcccccctttctatggatttaaatcattgtttaaagagatatatcctggaattcccatcatggctcagtggttaacgagtctgactaggaacc

SEQ ID NO: 10857 - DNA, 110 bp, synthetic construct
  source 1..110: mol_type = other DNA
ccttggtggagagctcccccccgccccccgaaccttcttgggcctttcttcgcgcatttgcagtttgaacgatacaagttgccaagtgcgtcccggtctttgcttgtttc

SEQ ID NO: 10858 - DNA, 110 bp, synthetic construct
  source 1..110: mol_type = other DNA
ccccaagctcatgttggagccgcaagtcccctctgatgggcgccctccagcccagcgttccagcccagctccggaaacggccgggcaaggatgctgaggttgctgcttcc

SEQ ID NO: 10859 - DNA, 110 bp, synthetic construct
  source 1..110: mol_type = other DNA
cgttccagcccagctccggaaacggccgggcaaggatgctgaggttgctgcttcccagtctaggcagtaatttttactctcccctctctgtttaactcaaggtgaaatcg

SEQ ID NO: 10860 - DNA, 110 bp, synthetic construct
  source 1..110: mol_type = other DNA
cgagcaacacacgtgtctctcccggggagggggagttggggggcgcttatgttacagagacccccctccctgcccactgaaacgttactttttcctgagggtctgccata

SEQ ID NO: 10861 - DNA, 110 bp, synthetic construct
  source 1..110: mol_type = other DNA
agagacccccctccctgcccactgaaacgttactttttcctgagggtctgccatagctacacatccatccttgagaagtttccagggctgcaggaaacaggtgaagaaac

SEQ ID NO: 10862 - DNA, 110 bp, synthetic construct
  source 1..110: mol_type = other DNA
cacagaaatacacagggtcacaagagccataacagcccatactctccaaagctatgtgtagattcaatgcaatcccttcaaaatcccaattgcgggagttcccgttgtgg

SEQ ID NO: 10863 - DNA, 110 bp, synthetic construct
  source 1..110: mol_type = other DNA
tgggcgtcaacgccacactttcaagcaagagtgaccagtgaccatggtccctaaatcatcccaagagagacgtgtgagcttcgtttacaagtttcaaatcattttcttct

SEQ ID NO: 10864 - DNA, 110 bp, synthetic construct
  source 1..110: mol_type = other DNA
tcatcccaagagagacgtgtgagcttcgtttacaagtttcaaatcattttcttctttgagcttaacatgtgttaataaggggaaagggcacttaaaggcaagcttctaca

SEQ ID NO: 10865 - DNA, 110 bp, synthetic construct
  source 1..110: mol_type = other DNA
tgaggcccctgaagtcacagatgtttcgaatagaagtgtggcccagccagggacaaaagtgccgcggtcctgcctgaaccgccctgacaccgcgcttgagaaggcccgct

SEQ ID NO: 10866 - DNA, 110 bp, synthetic construct
  source 1..110: mol_type = other DNA
aaagtgccgcggtcctgcctgaaccgccctgacaccgcgcttgagaaggcccgctggtttagattcgaagtcgcaagagatcctctgaaaagggcattttaaatcagctg

SEQ ID NO: 10867 - DNA, 110 bp, synthetic construct
  source 1..110: mol_type = other DNA
attcacgcaccagctgccctctgccaggctgaaatgagacagtgcctctggaaaccagaataaagaacacgtggtttctgccccagcatctggagacctgagctgcctgc

SEQ ID NO: 10868 - DNA, 110 bp, synthetic construct
  source 1..110: mol_type = other DNA
cagaataaagaacacgtggtttctgccccagcatctggagacctgagctgcctgctcctctcctggggccctcaaggcacagggactgtcatttccaccaccctccgcgg

SEQ ID NO: 10869 - DNA, 110 bp, synthetic construct
  source 1..110: mol_type = other DNA
atcacagggtctaacaaagagaattgctggctctcccatcctttcagcagagtgttctgcctgcttgagaaaacaggagagcgctagaggtgcctctggtggcctggtcg

SEQ ID NO: 10870 - DNA, 110 bp, synthetic construct
  source 1..110: mol_type = other DNA
tctgcctgcttgagaaaacaggagagcgctagaggtgcctctggtggcctggtcgtagctggttcctttctttgctgttgtgctgtgagggtctcgtgtggctctggagc

SEQ ID NO: 10871 - DNA, 110 bp, synthetic construct
  source 1..110: mol_type = other DNA
cagccgcagcccagaggttcatgatccttcggggttgatcggtgtggatagaagacaacctttcctttgcaacagacttgaaactttggtggttatacattgctgattgg

SEQ ID NO: 10872 - DNA, 110 bp, synthetic construct
  source 1..110: mol_type = other DNA
caacctttcctttgcaacagacttgaaactttggtggttatacattgctgattggatggccttgaaatgggcaaagtggaatagagaactgaagaaatcccccccccatg

SEQ ID NO: 10873 - DNA, 110 bp, synthetic construct
  source 1..110: mol_type = other DNA
gagtctttcctttccaagtcctggttggcttttcctatgacagcacttgataaacatgagctagcgactatcaatcgtcttttgatcagtttgccagttttaacccaggt

SEQ ID NO: 10874 - DNA, 110 bp, synthetic construct
  source 1..110: mol_type = other DNA
atgagctagcgactatcaatcgtcttttgatcagtttgccagttttaacccaggtcaagagtcagtgagagagagccaggcagcccgaggctgaccggcttccatttgaa

SEQ ID NO: 10875 - DNA, 110 bp, synthetic construct
  source 1..110: mol_type = other DNA
tgcttgctggaaaggactttggcaatacgtattcagagccttcaagatgctcgttctgtttgtctcagttctgcttctgcaaatctatttcaggaaaatgatctcaaata

SEQ ID NO: 10876 - DNA, 110 bp, synthetic construct
  source 1..110: mol_type = other DNA
ctgtttgtctcagttctgcttctgcaaatctatttcaggaaaatgatctcaaataaaataaatcttccagggcgaagtggctgtttgggtgactattaataacaagacac

SEQ ID NO: 10877 - DNA, 110 bp, synthetic construct
  source 1..110: mol_type = other DNA
tttttcacgttagccacgttgctatgggtgtcaagctgttcttgaaaatcaaagcgttggagatgcctgatcctgcgctttcatcactctgtggcccacggtggcctgca

SEQ ID NO: 10878 - DNA, 110 bp, synthetic construct
  source 1..110: mol_type = other DNA
gttggagatgcctgatcctgcgctttcatcactctgtggcccacggtggcctgcattccaggacagtggcagctgggtctggtgctctgggcaagctctgggcacctctc

SEQ ID NO: 10879 - DNA, 110 bp, synthetic construct
  source 1..110: mol_type = other DNA
cctctcacagctcttgtgaaagcaccgatcctattcatgagggttctagctcacgtcttaattatgtcacgccacaccggggactagatttccacatgcgcatttccatt

SEQ ID NO: 10880 - DNA, 110 bp, synthetic construct
  source 1..110: mol_type = other DNA
attggtgtacaaatacctgtgtgagtccctgctttcaattcttttgggtatgtatacgccaatatacctaaaagtggcattggtagaacatatgctagtctatgctgaat

SEQ ID NO: 10881 - DNA, 110 bp, synthetic construct
  source 1..110: mol_type = other DNA
tttgaaggaaagagatttaagaacgctgatctctgaggatctctcaccagggcttgctctatcaccacgtgcggacggcgtcttctgcgaggccctgcgatttacagact

SEQ ID NO: 10882 - DNA, 110 bp, synthetic construct
  source 1..110: mol_type = other DNA
gctctatcaccacgtgcggacggcgtcttctgcgaggccctgcgatttacagactgggaatgggctcggggagaatcctgcccatcttgagggaccccgaggggctcagc

SEQ ID NO: 10883 - DNA, 110 bp, synthetic construct
  source 1..110: mol_type = other DNA
ggtgatgcaggcagatctagctttaattgggcacagagccatggacaacgttcttatacccttgaatggcaggaatgggcaccgcttctgaatcctggccccattttctc

SEQ ID NO: 10884 - DNA, 110 bp, synthetic construct
  source 1..110: mol_type = other DNA
atacccttgaatggcaggaatgggcaccgcttctgaatcctggccccattttctcgacctataagccccagacaatgatttatttcacttccagagtctgttcttccact

SEQ ID NO: 10885 - DNA, 110 bp, synthetic construct
  source 1..110: mol_type = other DNA
tgcaggacaagcattcacagggcacatgtgcagctcagccctgtgaacttgatcgaggctttggcaggaatgaaatgagggtgcccacattctgggcgggggtacaccag

SEQ ID NO: 10886 - DNA, 110 bp, synthetic construct
  source 1..110: mol_type = other DNA
agtgtgacttctggtctagaactgggatggggacgtggccctctctttctttgttctgcatctccttcttttggtcgagctcctccagagcagaggagaagactgtctca

SEQ ID NO: 10887 - DNA, 110 bp, synthetic construct
  source 1..110: mol_type = other DNA
ctgcatctccttcttttggtcgagctcctccagagcagaggagaagactgtctcaggaaaccagccatacttcaggatgaccctctttgtggctatttaaagctgacgac

SEQ ID NO: 10888 - DNA, 110 bp, synthetic construct
  source 1..110: mol_type = other DNA
ttctcgacctctggagaacaggcttgaggcctgagcctagagtgttcacgccccttctgtgatccgcccccctctctctctttctccctcagactctcctaggagctgct

SEQ ID NO: 10889 - DNA, 110 bp, synthetic construct
  source 1..110: mol_type = other DNA
tctgtgatccgcccccctctctctctttctccctcagactctcctaggagctgctattcaaagacaatggcatgaaattgtggccttttctttgtgtggttatggctgat

SEQ ID NO: 10890 - DNA, 110 bp, synthetic construct
  source 1..110: mol_type = other DNA
cagttcccagaatttttaaatacaccccaggatatccctgatatgactttacgactgatgacatctttgggaacctatttcaccttctggcttgagttcttccttctgtg

SEQ ID NO: 10891 - DNA, 110 bp, synthetic construct
  source 1..110: mol_type = other DNA
ctaggatgaaacgtacttaggtgcttagacctagatctgcaacatctatgtgacatgctgctgtgagggccagtccttttttaaagtaaattgttcctctgaattatagt

SEQ ID NO: 10892 - DNA, 110 bp, synthetic construct
  source 1..110: mol_type = other DNA
cctctacgaagctcctggaatagcatcactttcttagaccccaaactctccaaagcacacctccagctggataagaaataaactcacaacagtgatactcagctcatcaa

SEQ ID NO: 10893 - DNA, 110 bp, synthetic construct
  source 1..110: mol_type = other DNA
cacacctccagctggataagaaataaactcacaacagtgatactcagctcatcaattctcctgatttaattcattcttctcagcctcctcccttcgtggtctgaattcac

SEQ ID NO: 10894 - DNA, 110 bp, synthetic construct
  source 1..110: mol_type = other DNA
gtcaagaaggccagggttaatgaggttggaatttgcaaaatttctaacagataatgattcctggaaatgtgaagcataaggaataacatgggaatgacttatcttatagc

SEQ ID NO: 10895 - DNA, 110 bp, synthetic construct
  source 1..110: mol_type = other DNA
gattcctggaaatgtgaagcataaggaataacatgggaatgacttatcttatagcttgataatcattaaactagacaggacagatcaagagggctaagaggaagtggtag

SEQ ID NO: 10896 - DNA, 110 bp, synthetic construct
  source 1..110: mol_type = other DNA
tgaggaagcttcacccacatgttggttgggggctgactgtcaggtgggggcctcagttcttgtccacaaggactctcatcctcttacttagggacttactttctttgggc

SEQ ID NO: 10897 - DNA, 110 bp, synthetic construct
  source 1..110: mol_type = other DNA
gttcttgtccacaaggactctcatcctcttacttagggacttactttctttgggcatatcccagagcagcatccaaatggacaagacaggaagctgcaggtcagcaggag

SEQ ID NO: 10898 - DNA, 110 bp, synthetic construct
  source 1..110: mol_type = other DNA
caaggaatacctttgtctgttgacagatcataattagatttattgtggtgattgcgttttggtgtgtatttgtttgtttgttttgctgcatgggcagcatggggaagttc

SEQ ID NO: 10899 - DNA, 110 bp, synthetic construct
  source 1..110: mol_type = other DNA
gcttaacatgtcaaagacttagaatagcgttttgcacaaagtaagtgcttgatacacattaatgtgtgtatatgtatataacatgttattatagtgatgcacaaaaggtg

SEQ ID NO: 10900 - DNA, 110 bp, synthetic construct
  source 1..110: mol_type = other DNA
acattaatgtgtgtatatgtatataacatgttattatagtgatgcacaaaaggtgagctaggatggatagatggatggatagaaagatagagagatggatagataagaag

SEQ ID NO: 10901 - DNA, 110 bp, synthetic construct
  source 1..110: mol_type = other DNA
actcataagtcaagagtctagggcctagagatttttggacgcttgagttcagtcccatggttagcgttgccagagccagctttaggaagagtctgtttccttttcctttc

SEQ ID NO: 10902 - DNA, 110 bp, synthetic construct
  source 1..110: mol_type = other DNA
aaattcagtatgttttagaggctgctccagttgtatgtatttaccatttagaaagaaagtttgtgcctatccagaccctaggaaaattgaactgggcataaaatgaactg

SEQ ID NO: 10903 - DNA, 110 bp, synthetic construct
  source 1..110: mol_type = other DNA
tttaggatcactttgttggaaagtgtgtactttaatttgtagaaagggaacagcatgttctagaaaaagtacacatcaaccagcagtaaagtatggtgtggtagaattat

SEQ ID NO: 10904 - DNA, 110 bp, synthetic construct
  source 1..110: mol_type = other DNA
tgttctagaaaaagtacacatcaaccagcagtaaagtatggtgtggtagaattattgggcttgaaagatcaaagaaggaatcctgcaggaggactacacccaatataaac

SEQ ID NO: 10905 - DNA, 110 bp, synthetic construct
  source 1..110: mol_type = other DNA
ctgtgttataaactggcttcactcgaggcggacgctgtgcaatgagaatattggctgttattcgctgtaggcaataaatattgggaagtcttcatgagaccatggttgac

SEQ ID NO: 10906 - DNA, 110 bp, synthetic construct
  source 1..110: mol_type = other DNA
tgttattcgctgtaggcaataaatattgggaagtcttcatgagaccatggttgacacttactatagatcagagattctcagtaacagaaaggtgtaaccttcccgctgcc

SEQ ID NO: 10907 - DNA, 110 bp, synthetic construct
  source 1..110: mol_type = other DNA
tgagctccttaagccaagcagcccaggtgacagccttaaattcttcactagggcctctgcacacatctgtacacatgccagcgagtggtttggggcattccttgtcattc

SEQ ID NO: 10908 - DNA, 110 bp, synthetic construct
  source 1..110: mol_type = other DNA
tctgcacacatctgtacacatgccagcgagtggtttggggcattccttgtcattcacttgtgaacgtttgatagccggtcctcttgcttgcaggtgcatagtgccaggag

SEQ ID NO: 10909 - DNA, 110 bp, synthetic construct
  source 1..110: mol_type = other DNA
tgggcagggagttacatgtacaagaaatctgatttttcctgtttaaactccttcatggtagcttgccttttaaaaagccaatgtatagttagatatatggtgggcctgaa

SEQ ID NO: 10910 - DNA, 110 bp, synthetic construct
  source 1..110: mol_type = other DNA
tggtagcttgccttttaaaaagccaatgtatagttagatatatggtgggcctgaaatacatactcccttcccttaaaagactcattcacatgagaatacattgcctactg

SEQ ID NO: 10911 - DNA, 110 bp, synthetic construct
  source 1..110: mol_type = other DNA
ccagtaggtcactcgggggcagagaagctggcacctgcccgcaaagatatcaggtctctgcccagagccttgccttgttaagaggctcactaaagatggaccttaatctt

SEQ ID NO: 10912 - DNA, 110 bp, synthetic construct
  source 1..110: mol_type = other DNA
caggctcccgtctctgaggaaataagtcaacaggagaataacagagagagaaacgggccaagagctggaattgaggaggaaccagccaaggccagtgcttttgattctgc

SEQ ID NO: 10913 - DNA, 110 bp, synthetic construct
  source 1..110: mol_type = other DNA
gggtagaaagaggacatcgctagcagttgaaggactgagaatgcttcacaccttataaagcaaatgtcaggtatggagctgtagacaagccagacacattcttcttcttc

SEQ ID NO: 10914 - DNA, 110 bp, synthetic construct
  source 1..110: mol_type = other DNA
cagaggtaataccgccctcttcatgacattgctgtggaattcaatgagatgacgccttcctgtaaagtaacaagccctccaaaacacgactgcctcttatactgacttta

SEQ ID NO: 10915 - DNA, 110 bp, synthetic construct
  source 1..110: mol_type = other DNA
gtgtaagcaccagctgccggggactctggcacagatctttcataccgagagctatgggacagtcttctgatctatctgccttgaaagcatactgacccatccttcatcac

SEQ ID NO: 10916 - DNA, 110 bp, synthetic construct
  source 1..110: mol_type = other DNA
acatctgctgtcttgttttcctcatagcaccatggcaacctgatatctcttcattaatttgtcaacttaatgtctgactcatccagatagaatgtaattggcataagaac

SEQ ID NO: 10917 - DNA, 110 bp, synthetic construct
  source 1..110: mol_type = other DNA
aatttgtcaacttaatgtctgactcatccagatagaatgtaattggcataagaacagggatcttatcttttaatgctgtattcatagtaaccaatacaggatttgaaata

SEQ ID NO: 10918 - DNA, 110 bp, synthetic construct
  source 1..110: mol_type = other DNA
ctctataatatgtaagttaatgagtcctaaagtaaattagaggttcccaagctcagaagaccgacaggatatagatattacttgatgggacaaagattctgtttgggatg

SEQ ID NO: 10919 - DNA, 110 bp, synthetic construct
  source 1..110: mol_type = other DNA
gaagaccgacaggatatagatattacttgatgggacaaagattctgtttgggatgatagttttagaaatagatagttggggagttcctgtcgtggcgcagtggttaacga

SEQ ID NO: 10920 - DNA, 110 bp, synthetic construct
  source 1..110: mol_type = other DNA
ccaataaatgtatatgaaactaacaggagccatgatgttgctccatcactttcgacacacagcacatgtctctctcagcttaggccccaggtctcccctgatcacagcac

SEQ ID NO: 10921 - DNA, 110 bp, synthetic construct
  source 1..110: mol_type = other DNA
ctttccacatcggtacctgtaacagagcttggtagaataaagagctcaaaaattccttaccaaatgaataaacttggaagatcattcaacccttaagtttgtagatgaaa

SEQ ID NO: 10922 - DNA, 110 bp, synthetic construct
  source 1..110: mol_type = other DNA
ctataaacactggcttatcctcccaggactcctcttacccatccacactgattactcaactgtggactcaatccacaaatgtaagtctccagtccccaccctattccctg

SEQ ID NO: 10923 - DNA, 110 bp, synthetic construct
  source 1..110: mol_type = other DNA
cagggtctcagctaagaacccagaaagaaagacggaaagcatttttcctctcctgcaggatggcgggatactggttctcgtggataaggagtttcgttaccaacacacag

SEQ ID NO: 10924 - DNA, 110 bp, synthetic construct
  source 1..110: mol_type = other DNA
tggaggaagatctgattggcttgtttgaatacatccgtgggctggtggtgaaccacctgaaactggcctggtttctgcaatgggtgaggttgtttggctggcggacccca

SEQ ID NO: 10925 - DNA, 110 bp, synthetic construct
  source 1..110: mol_type = other DNA
cctgaaactggcctggtttctgcaatgggtgaggttgtttggctggcggaccccatcctcgggagcagagtagggaatcttgcctcatgtcatgcagggtcccctgcgtt

SEQ ID NO: 10926 - DNA, 110 bp, synthetic construct
  source 1..110: mol_type = other DNA
gtgaccagtggaggtattctgtttcagatttactaaccagagataagcttacaaagtggtaggatgatacactcctctggcccaaagcagcctcctagagaattcagcct

SEQ ID NO: 10927 - DNA, 110 bp, synthetic construct
  source 1..110: mol_type = other DNA
ctgaaagcaaatcaccctgatatatgagtacctcgatgcgatcccatgactgaactgggtccagaacaaggcgaccctgccaggtgtctacagtttattagaactttgaa

SEQ ID NO: 10928 - DNA, 110 bp, synthetic construct
  source 1..110: mol_type = other DNA
tgggtccagaacaaggcgaccctgccaggtgtctacagtttattagaactttgaaatatatttcttcttggtcagctgtgtagtgagcacttagtgtatgccaggcactg

SEQ ID NO: 10929 - DNA, 110 bp, synthetic construct
  source 1..110: mol_type = other DNA
aagaaacgtatccgaattatcttcctctctatgttgcacgacttcatcagttggatgctgaaaaggtcggccgtgttcatttttactctgagtggctcactctgtttgca

SEQ ID NO: 10930 - DNA, 110 bp, synthetic construct
  source 1..110: mol_type = other DNA
tgctgaaaaggtcggccgtgttcatttttactctgagtggctcactctgtttgcagtactagatgaggtttgcatttggaataaaggtgcaacctctgtcctctcttctc

SEQ ID NO: 10931 - DNA, 110 bp, synthetic construct
  source 1..110: mol_type = other DNA
aactcggcctcagcttgagcttgccggaaccccttctgtttctggatgtaacgtctcatgtcctctttgttgctttggcttccatatcctatggtgttacacgtcagaga

SEQ ID NO: 10932 - DNA, 110 bp, synthetic construct
  source 1..110: mol_type = other DNA
agggctgcagctcattataaaagtgttcatagtagatggagtcctgctttagcaccacactgtcaccaaccagcaggtagggtaggcggtaggctgcaaccgtgccatcg

SEQ ID NO: 10933 - DNA, 110 bp, synthetic construct
  source 1..110: mol_type = other DNA
cacactgtcaccaaccagcaggtagggtaggcggtaggctgcaaccgtgccatcgacgtttatctggtacttatgctgcaagagagcagtcaagtagaagaagccccgtt

SEQ ID NO: 10934 - DNA, 110 bp, synthetic construct; identical to SEQ ID NO: 10932
  source 1..110: mol_type = other DNA

SEQ ID NO: 10935 - DNA, 110 bp, synthetic construct; identical to SEQ ID NO: 10933
  source 1..110: mol_type = other DNA

SEQ ID NO: 10936 - DNA, 110 bp, synthetic construct
  source 1..110: mol_type = other DNA
ctataaaactccacattcaacccgcccttcctgcctgcctgataatacctctttatctgctggaaatcattcctcaagattcgttggctctccgaccggtacatcggaaa

SEQ ID NO: 10937 - DNA, 110 bp, synthetic construct
  source 1..110: mol_type = other DNA
tctgctggaaatcattcctcaagattcgttggctctccgaccggtacatcggaaatcatctacaaggaagaaaacagcttggaaaacttatccaacagcctgggcaagct

SEQ ID NO: 10938 - DNA, 110 bp, synthetic construct
  source 1..110: mol_type = other DNA
caagtgatgatgagacagaacatgagagaacccctgctgctgaagctggcggtgccatcagcttgcaggaatcccggaacacgccaggtgaacctttagagacagtgagt

SEQ ID NO: 10939 - DNA, 110 bp, synthetic construct
  source 1..110: mol_type = other DNA
catcagcttgcaggaatcccggaacacgccaggtgaacctttagagacagtgagtcacttaggaaaagtggcctcacttaacgccagggagcgtgagaatttcctgaaaa

SEQ ID NO: 10940 - DNA, 110 bp, synthetic construct
  source 1..110: mol_type = other DNA
tgggttttttttctctcctttttaaggcataccaggtggcctctacacaggtgagcatacctcaggccaagagagctgggtgtgtgcccagtgttggcagcctactgcgc

SEQ ID NO: 10941 - DNA, 110 bp, synthetic construct
  source 1..110: mol_type = other DNA
catacctcaggccaagagagctgggtgtgtgcccagtgttggcagcctactgcgcttaaacgcgaacagttttcctgcagcgaattttgcaaatctaaacatttaaagtc

SEQ ID NO: 10942 - DNA, 110 bp, synthetic construct
  source 1..110: mol_type = other DNA
ccagaagcttgcagctctgtgaatacccgatctttatagacagagaccctgcccagcttgctttaagcagtgccattggtataagagcagataagtaatttctgaatatc

SEQ ID NO: 10943 - DNA, 110 bp, synthetic construct
  source 1..110: mol_type = other DNA
gcttgctttaagcagtgccattggtataagagcagataagtaatttctgaatatcctttgatagaaaaacatgcccactggtaagattttgatacaagaaaaaaatttac

SEQ ID NO: 10944 - DNA, 110 bp, synthetic construct
  source 1..110: mol_type = other DNA
aggcaggtgtgagcatcaccttaggttcctgctgggaccccaacatactgagtgtggacacttcaggtaggagctgtctgggaggtggtgtatctgtaacatccattgcc

SEQ ID NO: 10945 - DNA, 110 bp, synthetic construct
  source 1..110: mol_type = other DNA
aaaggagaaagacggagatgtttgtccttgaacaacattctaatttgggttcagccagatgatgaaggtttgatctagcagtatggggactgctctgatctgttaaaaca

SEQ ID NO: 10946 - DNA, 110 bp, synthetic construct
  source 1..110: mol_type = other DNA
cagatgatgaaggtttgatctagcagtatggggactgctctgatctgttaaaacagctggtatcctgttgggatgtcttaactggtttaggattgggatgaaaacctctg

SEQ ID NO: 10947 - DNA, 110 bp, synthetic construct
  source 1..110: mol_type = other DNA
tgggaggttgctattccgtcgcttgagtgttaggtttcatcttttcaaactcctcttctatcatcttcagagatgatctcttccaggaagctttcaaccaggcaattgac

SEQ ID NO: 10948 - DNA, 110 bp, synthetic construct
  source 1..110: mol_type = other DNA
tttgcaataaacaattgggggaatatttagtgttcagtctgcccaagatagcgcaatcttggttaagcttgaggttaacccaattctcttctgagtctcctgatcaagcc

SEQ ID NO: 10949 - DNA, 110 bp, synthetic construct
  source 1..110: mol_type = other DNA
atcttggttaagcttgaggttaacccaattctcttctgagtctcctgatcaagccttccttcatctggtcccgactttgagtaatttgtgttccagcttctgatacatgc

SEQ ID NO: 10950 - DNA, 110 bp, synthetic construct
  source 1..110: mol_type = other DNA
cttccagtaatttttaaaactgggataaaggtaatattgggatacaaagtattgtttcacaaagacaacttatttagctactgttttaagggagtgaaaacaacaaagtc

SEQ ID NO: 10951 - DNA, 110 bp, synthetic construct
  source 1..110: mol_type = other DNA
ttcacaaagacaacttatttagctactgttttaagggagtgaaaacaacaaagtcaccaccctaagtaagtcaaaccatatttagagcgtattccttttagtatattttc

SEQ ID NO: 10952 - DNA, 110 bp, synthetic construct
  source 1..110: mol_type = other DNA
aactcaatttctttagtgcctggggcctgtgtacctagaataattttcacagttgatagacagggtccttgtacactgggagcttaacagtttggagctggggtgtttgt

SEQ ID NO: 10953 - DNA, 110 bp, synthetic construct
  source 1..110: mol_type = other DNA
atagacagggtccttgtacactgggagcttaacagtttggagctggggtgtttgtgaactctggtgatgctgtggatgtgggaggtctcatggagcctgagcgcacagtg

SEQ ID NO: 10954 - DNA, 110 bp, synthetic construct
  source 1..110: mol_type = other DNA
ccccatttctccacctgtaccttctaggttggtctggatcctatatgctcactgggctgcttgcagctttctcgggcctttcttacttttactcgtattttctctttcct

SEQ ID NO: 10955 - DNA, 110 bp, synthetic construct
  source 1..110: mol_type = other DNA
gctgcttgcagctttctcgggcctttcttacttttactcgtattttctctttccttctctggtgcagctgggtcttttatgagaaagtctatgcgtttctcagggatttc

SEQ ID NO: 10956 - DNA, 110 bp, synthetic construct
  source 1..110: mol_type = other DNA
ctggatcactgcaggcttgggagcctatccttggtagctgggggcaaaagttctgccggaggaaacgtcactgacagaaaaatgaaaagtgccacccggggatgctgaga

SEQ ID NO: 10957 - DNA, 110 bp, synthetic construct
  source 1..110: mol_type = other DNA
aactccgcgcgtacaccctgaatttccaaacggcctctctgctgcctgatgtctacatccctccctttgtctggagaaaccatactctcctgtacttttctgtaaaagca

SEQ ID NO: 10958 - DNA, 110 bp, synthetic construct
  source 1..110: mol_type = other DNA
catccctccctttgtctggagaaaccatactctcctgtacttttctgtaaaagcaccccagctaaggcggaattatttcatgtgccttcgtggtcctttttcattgagca

SEQ ID NO: 10959 - DNA, 110 bp, synthetic construct
  source 1..110: mol_type = other DNA
atctcattagtacattccattccaagccattctctctccagctagatccttgtaattatccatgtaactcatttttagtgctttttactcctcctcagccatcttgctgt

SEQ ID NO: 10960 - DNA, 110 bp, synthetic construct
  source 1..110: mol_type = other DNA
ttatccatgtaactcatttttagtgctttttactcctcctcagccatcttgctgtcatatccagactgattttcccagcacaaaaatttggtaatttctcttcttgctta

SEQ ID NO: 10961 - DNA, 110 bp, synthetic construct
  source 1..110: mol_type = other DNA
tagagttggggctggtttactaggccttgagggtcacaacttccggaaaactcgacagcagcttcagttcttgaatctaagatgggtgattcttcaattataagaacatg

SEQ ID NO: 10962 - DNA, 110 bp, synthetic construct
  source 1..110: mol_type = other DNA
ataaacaaagactaaaaggtgtagcattttaataccttacattcaggagtgcacggatttttaaacaaaggatgtgtggatttggaaaaaaacattctcttatgttaaaa

SEQ ID NO: 10963 - DNA, 110 bp, synthetic construct
  source 1..110: mol_type = other DNA
cagtggttcagacttgagggaattcttagagtcagtggagtcgattctgtcaagaatcatagctgagaaaagaaaaggagatggggtggtattgctggagagaaacttaa

SEQ ID NO: 10964 - DNA, 110 bp, synthetic construct
  source 1..110: mol_type = other DNA
atcatagctgagaaaagaaaaggagatggggtggtattgctggagagaaacttaatcaaggatttccccctcttgtcttcttctgtcatggggaagacgtaaagagagta

SEQ ID NO: 10965 - DNA, 110 bp, synthetic construct
  source 1..110: mol_type = other DNA
tggagaaatttaaaatccagaaatcaatcaatagctacacttcccaaaatagagatatttttctagactataccatgatgatttccaaataaatgctgaggattcactag

SEQ ID NO: 10966 - DNA, 110 bp, synthetic construct
  source 1..110: mol_type = other DNA
ccttctgtactttgcgtaacaagcacaagcaaacaaacaccatggacctggaggacattatgctcagtgaaataagctagtcgcagaaagacacatattgcatgattcct

SEQ ID NO: 10967 - DNA, 110 bp, synthetic construct
  source 1..110: mol_type = other DNA
cattatgctcagtgaaataagctagtcgcagaaagacacatattgcatgattcctcttacagtaagtatctaaaagggtcagtctcttagaagcagagagaatggtggtc

SEQ ID NO: 10968 - DNA, 110 bp, synthetic construct
  source 1..110: mol_type = other DNA
gaattccatgtggaacttcctcaaaatctggatgatggacagaaaactttaggagtgcagtcctggcctgaggctttgcaccaggagctcactggttctatgtctagaaa

SEQ ID NO: 10969 - DNA, 110 bp, synthetic construct
  source 1..110: mol_type = other DNA
acacattatagaatccgtaagagttgaccagcaaagaaagctgacttcaggggattgatccactaggtgaaaggtgtataataaggagtgggcagaaaaaatggcatgcc

SEQ ID NO: 10970 - DNA, 110 bp, synthetic construct
  source 1..110: mol_type = other DNA
acgaggtttgtcattttggtgactgaggtatcttccttggattgcgggatctggagaaatcacacagcctacaccaagatgcaggtgcaacctcagaatttccggtggga

SEQ ID NO: 10971 - DNA, 110 bp, synthetic construct
  source 1..110: mol_type = other DNA
gaaatcacacagcctacaccaagatgcaggtgcaacctcagaatttccggtgggagacatctgtgtagcccacccaaacactccgtgaagttcagggccagcgttacacc

SEQ ID NO: 10972 - DNA, 110 bp, synthetic construct
  source 1..110: mol_type = other DNA
gaagaagcagaattattttatttgtgtctcgtaaaaatgacggtgtgaactcttcaccccttttctcccttaaacaaatcaggattagaagagtgttcgcagctttatgg

SEQ ID NO: 10973 - DNA, 110 bp, synthetic construct
  source 1..110: mol_type = other DNA
accccttttctcccttaaacaaatcaggattagaagagtgttcgcagctttatggtggtggggatggaaaggaggaagctgtagaaatttggaaattagaaaaaaaagtt

SEQ ID NO: 10974 - DNA, 110 bp, synthetic construct
  source 1..110: mol_type = other DNA
ggtcttaatagtattagttactgtaagttgatttgtatatattacttttttttttctcttttctttttaggtgcacacctgaggcatatggaagttcctaggttagggac

SEQ ID NO: 10975 - DNA, 110 bp, synthetic construct; identical to SEQ ID NO: 10974
  source 1..110: mol_type = other DNA

SEQ ID NO: 10976 - DNA, 110 bp, synthetic construct
  source 1..110: mol_type = other DNA
gggcaaatgaggataaccctgtgggcctgacagtaagtatttggtcaaatcagtgaactggaggtcctggtgggagttgaaaagttgataaaactatggtatgagagaga

SEQ ID NO: 10977 - DNA, 110 bp, synthetic construct
  source 1..110: mol_type = other DNA
tcagcaaatatgggagtcaaatgccagtgacatggcttcttaggttggaagcacaagctcagacatagagaagactcaatacgtaactggattggtgtgattcctgccct

SEQ ID NO: 10978 - DNA, 110 bp, synthetic construct
  source 1..110: mol_type = other DNA
agctcagacatagagaagactcaatacgtaactggattggtgtgattcctgccctacgttggctgcataagcccacagatctctcaagtacaaatggctccctaagggat

SEQ ID NO: 10979 - DNA, 110 bp, synthetic construct
  source 1..110: mol_type = other DNA
aacttcgaataggttgggaaaagttaactagttgtattaacatactgagtgaaaattaccataggtacagtcaggatttaatttgaaggaacccttctatataatctcgg

SEQ ID NO: 10980 - DNA, 110 bp, synthetic construct; identical to SEQ ID NO: 10979
  source 1..110: mol_type = other DNA

SEQ ID NO: 10981 - DNA, 110 bp, synthetic construct
  source 1..110: mol_type = other DNA
tagatatgtacttttccagccttcaatcccaaacctcttaatcaagcacagtcacaatgctcacgatgcaaccctggtgatacgcctacaagcgcacactcaccaagtct

SEQ ID NO: 10982 - DNA, 110 bp, synthetic construct
  source 1..110: mol_type = other DNA
aatgctcacgatgcaaccctggtgatacgcctacaagcgcacactcaccaagtctggtagctcttttgtcctctataatcatactcttcttttatcagtcccatcaggtc

SEQ ID NO: 10983 - DNA, 110 bp, synthetic construct
  source 1..110: mol_type = other DNA
ttcttgaaaataatttgcatgcatctacgatttaaatgatccaaactgcatatacactagaacaagcactaaaaggaagctataaacaataaagaattagcgaaagaagg

SEQ ID NO: 10984 - DNA, 110 bp, synthetic construct; identical to SEQ ID NO: 10983
  source 1..110: mol_type = other DNA

SEQ ID NO: 10985 - DNA, 110 bp, synthetic construct
  source 1..110: mol_type = other DNA
gattggttggagaattcccgaagcagtgagtggtttggccaggatgactcagagtaaaggaagctggggaagacagtggttaaaggaatgaggtcaaagagatgacaagg

SEQ ID NO: 10986 - DNA, 110 bp, synthetic construct
  source 1..110: mol_type = other DNA
aaaggaagctggggaagacagtggttaaaggaatgaggtcaaagagatgacaaggctggaaggtgtagggctttggaagatcaggactttagaccttactctgagtaaga

SEQ ID NO: 10987 - DNA, 110 bp, synthetic construct
  source 1..110: mol_type = other DNA
atttactttggacaacttgctgatggggttcaaaaactggggtggccctaggtagtttcacccttcagaatgtagcttttccctaattcgaccttccactccctgtccca

SEQ ID NO: 10988 - DNA, 110 bp, synthetic construct
  source 1..110: mol_type = other DNA
aggttcgatccctggcctcacttagcgggttaaggatccggcactgccacaagctggagtgtaggttgcagatccagctcagatccagcattgctgaggctgtggtgtag

SEQ ID NO: 10989 - DNA, 110 bp, synthetic construct; identical to SEQ ID NO: 10988
  source 1..110: mol_type = other DNA

SEQ ID NO: 10990 - DNA, 110 bp, synthetic construct
  source 1..110: mol_type = other DNA
tagcctctgccacaaaagttatcagtatatttattttaattggacattgaaacataagttaaaattgaataagggaagtgggacagtgatcctatcctattaaagagaat

SEQ ID NO: 10991 - DNA, 110 bp, synthetic construct; identical to SEQ ID NO: 10990
  source 1..110: mol_type = other DNA

SEQ ID NO: 10992 - DNA, 110 bp, synthetic construct
  source 1..110: mol_type = other DNA
tcaattaaatcaaatgtctaagcatttaccaccatgcctggcacacagtaaatgagagcttttgtcatctcctcgtccctgcctcactgtatcccttccctcagtaattc

SEQ ID NO: 10993 - DNA, 110 bp, synthetic construct
  source 1..110: mol_type = other DNA
ccctgtgcaagaaaaatagggtggtagctgtttattgctaccgctaagtaagtcgaggactggatgggttcgatggtgttgctcacaagtctaaacattttttagcatct

SEQ ID NO: 10994 - DNA, 110 bp, synthetic construct
  source 1..110: mol_type = other DNA
tagtgaaacaggcgttttagacacgagaccccaagcatcaagcacccttctttgttcattttcagcaccttttctgaaatacgtgagaaagtaagactttaacaaaggca

SEQ ID NO: 10995 - DNA, 110 bp, synthetic construct
  source 1..110: mol_type = other DNA
tcattttcagcaccttttctgaaatacgtgagaaagtaagactttaacaaaggcaagagctcaacaactatgaaataaatgaataaatgtggctcggtccaaaattcagt

SEQ ID NO: 10996 - DNA, 110 bp, synthetic construct; identical to SEQ ID NO: 10994
  source 1..110: mol_type = other DNA

SEQ ID NO: 10997 - DNA, 110 bp, synthetic construct; identical to SEQ ID NO: 10995
  source 1..110: mol_type = other DNA

SEQ ID NO: 10998 - DNA, 110 bp, synthetic construct
  source 1..110: mol_type = other DNA
tgagcctgagaacttccatatgctgcaagtgaggccctaaaaagaaaaaggaaagaaaagaagagaagatagtttatgatattcacaatggggaacaatggaaggcttgt

SEQ ID NO: 10999 - DNA, 110 bp, synthetic construct; identical to SEQ ID NO: 10998
  source 1..110: mol_type = other DNA

SEQ ID NO: 11000 - DNA, 110 bp, synthetic construct
  source 1..110: mol_type = other DNA
tggcagaaattcagaaccaagaagactttctttttcttttcctcatccttggcatgtagaaattcccaggctagggatcaaacccacaccacagtagcaacccaagctgc

SEQ ID NO: 11001 - DNA, 110 bp, synthetic construct
  source 1..110: mol_type = other DNA
accaagaagactttctttttcttttcctcatccttggcatgtagaaattcccaggctagggatcaaacccacaccacagtagcaacccaagctgctgcagtgaagatgct

SEQ ID NO: 11002 - DNA, 110 bp, synthetic construct
  source 1..110: mol_type = other DNA
ttctgagagatgtatgaacaggtggtaagcaaatcctcagctctagatgatacaacagatggagaggtagagtgagactgtctatgaaggaagatttattggcttggagt

SEQ ID NO: 11003 - DNA, 110 bp, synthetic construct
  source 1..110: mol_type = other DNA
tccaactatacttaaagcccaatttatggcacctgccgtgagaggcaaatgctttcattctaataggtatgacctacttgttagaaggattggtgcccatccatgtggtt

SEQ ID NO: 11004 - DNA, 110 bp, synthetic construct
  source 1..110: mol_type = other DNA
cattctaataggtatgacctacttgttagaaggattggtgcccatccatgtggttccagacttgtggaaacatatataagcaaggcagaggagctggtcatcaaggaaca

SEQ ID NO: 11005 - DNA, 110 bp, synthetic construct
  source 1..110: mol_type = other DNA
agaattcgtgcaccactgctctagaccgacttgtttactcccatgaggtcagctagctgaattttagatcatttcaaatgtattaattgaataaacaactattaaatctt

SEQ ID NO: 11006 - DNA, 110 bp, synthetic construct
  source 1..110: mol_type = other DNA
aaaaagatccatgtctttcctctggaagaaaacaggatgtacagattgtcaatgctgcctcatagttaacacactggattttaaaagcaatgaaaacagttgacgcggat

SEQ ID NO: 11007 - DNA, 110 bp, synthetic construct
  source 1..110: mol_type = other DNA
tgcctcatagttaacacactggattttaaaagcaatgaaaacagttgacgcggatactgtagcggtattttaagtgaaagcctcactttaaggagtcaggtagtttatca

SEQ ID NO: 11008 - DNA, 110 bp, synthetic construct
  source 1..110: mol_type = other DNA
taagagtgtaggctcatcgatgctcacttacatatggggttataccccagtactcctttatttacgttgttgctcaaaccattgcagctttggcctttggggatcctttt

SEQ ID NO: 11009 - DNA, 110 bp, synthetic construct
  source 1..110: mol_type = other DNA
atggcacacgctggtctctctcttcgaagcggtatctctgtgatttcttcgcagggcctcctttcatccttcttacttaagttactcaactcaaagtcacccttctgccg

SEQ ID NO: 11010 - DNA, 110 bp, synthetic construct
  source 1..110: mol_type = other DNA
tcaaaagagtacagccaccaattttctgattaatgacaaggtcacaacacccataaccttttaggaaataagcttaataagtgaatgggagatttctctggcctctgtgg

SEQ ID NO: 11011 - DNA, 110 bp, synthetic construct
  source 1..110: mol_type = other DNA
aagcaatgctgaatcctgcattaccaataccaggacaggtccccacactcttggatggagtaactgtgggatacagaacatacagatagtagacaagcctggtcccatga

SEQ ID NO: 11012 - DNA, 110 bp, synthetic construct
  source 1..110: mol_type = other DNA
tggagtaactgtgggatacagaacatacagatagtagacaagcctggtcccatgacggcttggagatgaaaagggccgcagtcacgcacagcagtagaaaatacactcta

SEQ ID NO: 11013 - DNA, 110 bp, synthetic construct
  source 1..110: mol_type = other DNA
aaaattttataaatcatagaacccacaaaaccttgttctacccctgagtttagttggattggaacctttttcagtgccatctgtggctcctggaagacgggtattattat

SEQ ID NO: 11014 - DNA, 110 bp, synthetic construct
  source 1..110: mol_type = other DNA
ggacgctgagccatagtcatcagcttccatggaaaactcggggatagaatttacgtctcacccaagcacaactaatttaaaacctatatttcaataggatttccaagtga

SEQ ID NO: 11015 - DNA, 110 bp, synthetic construct
  source 1..110: mol_type = other DNA
aggcaacccccttcagaggtgtcttctttttttggcatctctaaaacctgggcagatccattgtgccccagagaatcagtctcatggcctctaataaatctaaaaaacat

SEQ ID NO: 11016 - DNA, 110 bp, synthetic construct
  source 1..110: mol_type = other DNA
atccattgtgccccagagaatcagtctcatggcctctaataaatctaaaaaacatgtcggttcctgcaaatgaatggaccagagtggtcatgaggacaccagggagtttt

SEQ ID NO: 11017 - DNA, 110 bp, synthetic construct
  source 1..110: mol_type = other DNA
aattctatggaaaagtctgaagtgcctcacatctcagtaactgcagatctgctcagtgcggtgacgtgctgtttaatccgataggaaatctaagaagaatataatctaag

SEQ ID NO: 11018 - DNA, 110 bp, synthetic construct
  source 1..110: mol_type = other DNA
gtgcggtgacgtgctgtttaatccgataggaaatctaagaagaatataatctaagactcttctcacatggaatgtactttttcagctgcaagaacaagctcttccacaga

SEQ ID NO: 11019 - DNA, 110 bp, synthetic construct
  source 1..110: mol_type = other DNA
atgtctgcatcagggcaatagcgaaacccagtatcgatctcagtgcttccggtttggactatgatagaaacaatggcaccaacatggattaaaggaaatgcgaaaagaaa

SEQ ID NO: 11020 - DNA, 110 bp, synthetic construct
  source 1..110: mol_type = other DNA
ggactatgatagaaacaatggcaccaacatggattaaaggaaatgcgaaaagaaacactgacttagcagagaagaccatcatttcagttctgaccctactgagttcaggt

SEQ ID NO: 11021 - DNA, 110 bp, synthetic construct
  source 1..110: mol_type = other DNA
aggccagcagtccaagatcagtatgtctaggctgaagttcttcccaagactttagggagactctctcccttgtcctgggccatctctgcctctctgttaacagcaccatg

SEQ ID NO: 11022 - DNA, 110 bp, synthetic construct
  source 1..110: mol_type = other DNA
ggagactctctcccttgtcctgggccatctctgcctctctgttaacagcaccatgtccttctgcctctcccttctgtggataatccaggaccatcacctcatctcaagtt

SEQ ID NO: 11023 - DNA, 110 bp, synthetic construct
  source 1..110: mol_type = other DNA
tttgatcaacgaattcaaacacttttatgccacatggtattataattccttcacggagacatcagagctaattttccagtaagatatttctgatgcttatagcctctata

SEQ ID NO: 11024 - DNA, 110 bp, synthetic construct
  source 1..110: mol_type = other DNA
cagccagtttaattgactccttaggtctccctccttcagactcgccatctaaagggagtcacgtctacagctattattcagaatcatcatctaaatttgaatcacgttga

SEQ ID NO: 11025 - DNA, 110 bp, synthetic construct
  source 1..110: mol_type = other DNA
ctataaacatcagaaagcataacattccacctgagaaagatctcagaatacaatgcctgaattctctgatttgaaattgtagaggacagataattatcaacatgtcagtt

SEQ ID NO: 11026 - DNA, 110 bp, synthetic construct
  source 1..110: mol_type = other DNA
acagggccagcagaagagagagcttctactgcttcctatctctcacactttgaccatctttgatctcttttaaagtctcacctgattagatcgtattcacccagaaaaat

SEQ ID NO: 11027 - DNA, 110 bp, synthetic construct
  source 1..110: mol_type = other DNA
atctttgatctcttttaaagtctcacctgattagatcgtattcacccagaaaaatcccctttgtgttcaacatcaagtcaactgattagcaagtttaattaactttcgcg

SEQ ID NO: 11028 - DNA, 110 bp, synthetic construct
  source 1..110: mol_type = other DNA
gaaaatatttgttatgaattaccgtcccctctttatggaagagaaaagtggacgttcacagaaactcaacgacttgaccaaattctagagctagcaaattgcggagtgaa

SEQ ID NO: 11029 - DNA, 110 bp, synthetic construct
  source 1..110: mol_type = other DNA
tcacagaaactcaacgacttgaccaaattctagagctagcaaattgcggagtgaaaattaaggctatgtttctctcactctggtgtccgtgcattctccatctgctatat

SEQ ID NO: 11030 - DNA, 110 bp, synthetic construct
  source 1..110: mol_type = other DNA
actttacttttatgtctggcatccctttcccatctgggtacctgtccaaataggaatccccttggataactgactgtcacctcagactccatgggttcaaactggaactc

SEQ ID NO: 11031 - DNA, 110 bp, synthetic construct
  source 1..110: mol_type = other DNA
atttttattagggcaaaagttaaggcttctgagacattggcagcttatcaagcatcctaaggaaacatttggtttctctcttcaactagccacccagtgctgccctgatg

SEQ ID NO: 11032 - DNA, 110 bp, synthetic construct
  source 1..110: mol_type = other DNA
gtttatgaaaacgcatgttctagagacacatactgactcgcttaatagaaattgctgaaatcataaatctagggaattggtgggttttggatgtttaatttatatttact

SEQ ID NO: 11033 - DNA, 110 bp, synthetic construct
  source 1..110: mol_type = other DNA
tgttctagagacacatactgactcgcttaatagaaattgctgaaatcataaatctagggaattggtgggttttggatgtttaatttatatttactgagttttgaaagttt

SEQ ID NO: 11034 - DNA, 110 bp, synthetic construct
  source 1..110: mol_type = other DNA
caccatcatatgccttcctagatattgtatacaaaaacacaaagaggcgcaccatggtttttcacataaatgctatcttgctttaaaaatctaaaagatctccttgaaat

SEQ ID NO: 11035 - DNA, 110 bp, synthetic construct
  source 1..110: mol_type = other DNA
agatttgcttggctgaaactctctcttcttccttttctctcatttctactttttgtaccaacacacaaaaatcagctatttcataaataataatatttgaggacaagcat

SEQ ID NO: 11036 - DNA, 110 bp, synthetic construct
  source 1..110: mol_type = other DNA
taccaacacacaaaaatcagctatttcataaataataatatttgaggacaagcatcatatctattacaaactgcatcatgcccccccaccaatttatgtgttaaagtcct

SEQ ID NO: 11037 - DNA, 110 bp, synthetic construct
  source 1..110: mol_type = other DNA
tactgcgttagattatctctaatttcttacattagcagacttgaggaagaagacagaaaggttccattttaaagagcatattgcggcaaatcaggaatcttttcaaaact

SEQ ID NO: 11038 - DNA, 110 bp, synthetic construct
  source 1..110: mol_type = other DNA
gaaaggttccattttaaagagcatattgcggcaaatcaggaatcttttcaaaactggctgcccaactgcaaattggaataatatggatgagaggctcaagcacattaagc

SEQ ID NO: 11039 - DNA, 110 bp, synthetic construct
  source 1..110: mol_type = other DNA
tcagcgtctggctttgaattaacagccggtgactcttgaaagttgttcaacacaggccccaatctgccgctggggcccaggaagcctttctgatttaagggcagttgttg

SEQ ID NO: 11040 - DNA, 110 bp, synthetic construct
  source 1..110: mol_type = other DNA
actttacaggtcactgatgccctcaagctctgttcttaggtctcttcctttctacgggcacatgggctccttggaggacttatatctgcaccctcaacacaggtgactcg

SEQ ID NO: 11041 - DNA, 110 bp, synthetic construct
  source 1..110: mol_type = other DNA
ttcctttagttgtgggaataatgtaacagctctcgaggaccgattccctacacaagtatggataaggagggcgttcattaacagctgggacataaaggagaaaagctggt

SEQ ID NO: 11042 - DNA, 110 bp, synthetic construct
  source 1..110: mol_type = other DNA
ctgctgtggtgcagattccagcccttgcccgagaacttccacatgccatgggtgtggccaaacaaaacagaaaaactaagccgcagggaagctgttaattcagcaagaga

SEQ ID NO: 11043 - DNA, 110 bp, synthetic construct
  source 1..110: mol_type = other DNA
ggccaaacaaaacagaaaaactaagccgcagggaagctgttaattcagcaagagatgtgggttccacttcaactagaaacacccgttactgggactatcttgatatccaa

SEQ ID NO: 11044 - DNA, 110 bp, synthetic construct
  source 1..110: mol_type = other DNA
ctggattatttttatgtcccttgctcgccaggctcagtgtcccttactcctcctccctctctcaggaacccaggactcagcttatagacactgcctttttggaaactctt

SEQ ID NO: 11045 - DNA, 110 bp, synthetic construct
  source 1..110: mol_type = other DNA
cctctctcaggaacccaggactcagcttatagacactgcctttttggaaactcttcccaagtgatctcaggcccctcaacacacccctaagtccggatttctttccatga

SEQ ID NO: 11046 - DNA, 110 bp, synthetic construct
  source 1..110: mol_type = other DNA
ctcctcaccatccgaacgtggagtccaggaaaggagaagagaccaaggtgacatcaaatgtttggccagagcatctggaaatctggggtggccgttggttgaccagtgag

SEQ ID NO: 11047 - DNA, 110 bp, synthetic construct
  source 1..110: mol_type = other DNA
aaagggctgctctgtggcaccatggaagctgttgtgcctgttcttctctggaccctcactgagcactggggcaaaagtgtccctggtgccctgtacggtttggtctgtcc

SEQ ID NO: 11048 - DNA, 110 bp, synthetic construct
  source 1..110: mol_type = other DNA
aaattgtcagaggaaagagttccctctgtcatgaaacagaggctttttgtatccgcctgaagtggtagctgaaggagccttgtgaattgaacattgactatgggagaagg

SEQ ID NO: 11049 - DNA, 110 bp, synthetic construct
  source 1..110: mol_type = other DNA
cttgtcacctgtcccctttgcctggagtcactgtttctccccaaatctgcgtaacccattcctccacctccttcaagcattagctgagatgacactttctcagtgagctc

SEQ ID NO: 11050 - DNA, 110 bp, synthetic construct
  source 1..110: mol_type = other DNA
ccattcctccacctccttcaagcattagctgagatgacactttctcagtgagctccccatctctcctgcttaacaacacaccacacctcatgttcttgttaccctccctc

SEQ ID NO: 11051 - DNA, 110 bp, synthetic construct
  source 1..110: mol_type = other DNA
ggcagttaaaatagatgcaaaaatcactgacatgtattctgtgttaagctccataaaacagcgacacgtcgtccaggggctcggatggaggagggatcagtttccacgcg

SEQ ID NO: 11052 - DNA, 110 bp, synthetic construct
  source 1..110: mol_type = other DNA
aaacagcgacacgtcgtccaggggctcggatggaggagggatcagtttccacgcggtgtgaggatggaggctgtggccgttcagtgtccccggagaaagcagatgggcct

SEQ ID NO: 11053 - DNA, 110 bp, synthetic construct
  source 1..110: mol_type = other DNA
gcataatatctgcttcaatcaaagtcacttaaatccaggcaagccttgcctttgcatataaaacccaagctggtgctgtgtaccagcagtggtgaccaagacgaggccaa

SEQ ID NO: 11054 - DNA, 110 bp, synthetic construct
  source 1..110: mol_type = other DNA
atataaaacccaagctggtgctgtgtaccagcagtggtgaccaagacgaggccaactcaaatattaacttgtccaggaatccacattcctgacccttctttataaatgtc

SEQ ID NO: 11055 - DNA, 110 bp, synthetic construct
  source 1..110: mol_type = other DNA
ttcagcatttttaagatcttatcaaaaaaggagcgctgggccctttggagagatggcggggtctgcgtgtgtcagtcagttttgcaccagcaaaacaatattataaaata

SEQ ID NO: 11056 - DNA, 110 bp, synthetic construct
  source 1..110: mol_type = other DNA
cctacatcacagctgcggcaatgctggatcctttaacctactgtaccaggccagggattgaacccttgcctttgcagtgacccgagccactgcagtcaagattcttaacc

SEQ ID NO: 11057 - DNA, 110 bp, synthetic construct
  source 1..110: mol_type = other DNA
gattgaacccttgcctttgcagtgacccgagccactgcagtcaagattcttaacccacggcaccatgtcaagaactccttttatggctttttaaaaatccatgcaaaagt

SEQ ID NO: 11058 - DNA, 110 bp, synthetic construct
  source 1..110: mol_type = other DNA
atgggttgtattctgaggtacaagggttgggatttcaccatatgaatttggggcagaacacaattcagcccatcgcaacatcatgtatcattttcagtgccatttgcttt

SEQ ID NO: 11059 - DNA, 110 bp, synthetic construct
  source 1..110: mol_type = other DNA
gaacacaattcagcccatcgcaacatcatgtatcattttcagtgccatttgctttaaaaatcgagcaagggacttcccattgtggctcagcaggctaaggacctgacaca

SEQ ID NO: 11060 - DNA, 110 bp, synthetic construct
  source 1..110: mol_type = other DNA
tccaatttctttctcactacactcacaagttcaaggtacatgcacaagcttaggtaagtcggtaagagggttttgggtatgctcatcccacaggcttgtggtaaatggct

SEQ ID NO: 11061 - DNA, 110 bp, synthetic construct
  source 1..110: mol_type = other DNA
cacccagaggtgggagaggacacccagtagacagcagcttggtgcctcggtgccctggagccggtcatggccagtgagcgctgactcaccaaagaaaccaaggaaaacca

SEQ ID NO: 11062 - DNA, 110 bp, synthetic construct
  source 1..110: mol_type = other DNA
acgattaaaatccgtaattttaccagcacatatttaaccccagagcaaaaaaaaaaaaaaaaatcgattttttattcgagcagtttcttcaactgtttccagagttaagg

SEQ ID NO: 11063 - DNA, 110 bp, synthetic construct
  source 1..110: mol_type = other DNA
aaaaaaaatcgattttttattcgagcagtttcttcaactgtttccagagttaaggaaaaaatttttaaaagcccaattataaaaatttgggcgagttcggagacagagcc

SEQ ID NO: 11064 - DNA, 110 bp, synthetic construct
  source 1..110: mol_type = other DNA
gacaggctgtgcaggcagtaggtggctgctgctaaggagtcacttctaactatagctcagcagctttatagcctaaaggggagggcaaatggaaactcccaagctcaaca

SEQ ID NO: 11065 - DNA, 110 bp, synthetic construct
  source 1..110: mol_type = other DNA
ttctgctcaacaggctccataatttgtggggcccagtgcaaaacggaaatgtggggcccttgttcaaaatgtcagaaaacagtgctgtttaaggtgtcagtatataaagc

SEQ ID NO: 11066 - DNA, 110 bp, synthetic construct
  source 1..110: mol_type = other DNA
gcccttgttcaaaatgtcagaaaacagtgctgtttaaggtgtcagtatataaagcttttcccttttttctgtcatctctctcccaacatattgtgactttttaatttgct

SEQ ID NO: 11067 - DNA, 110 bp, synthetic construct
  source 1..110: mol_type = other DNA
aaagctctttaatgagggagcactggccttgaggatgaggagcggttaccggaaaggtgcgggtgttgaaaagtgtagtgaggcctgctcagcagtaaacctgtgagcca

SEQ ID NO: 11068 - DNA, 110 bp, synthetic construct
  source 1..110: mol_type = other DNA
caataattgccttcttactgctggtgaccctgtaacttcttctgcctcatagcgtccaaaccacagctccctgttcctgggttcctctctcccaagaacttgagatgtct

SEQ ID NO: 11069 - DNA, 110 bp, synthetic construct
  source 1..110: mol_type = other DNA
gtctgttagaaactttcctaagcccttctctgctcgcatctcaaggtgtccggaggccctgttcacccctcctcctcggtggcctggagaggagcccgacgccctgctcc

SEQ ID NO: 11070 - DNA, 110 bp, synthetic construct
  source 1..110: mol_type = other DNA
ttatgacatctagggaagcctcatcccggcgggaagacaggtgcacacttgaaattccgtggttaagggatggagggaagactggccagaggaaagcagcctttgtctga

SEQ ID NO: 11071 - DNA, 110 bp, synthetic construct
  source 1..110: mol_type = other DNA
ctctgggttcgcttccgaacacagccctggacgttttccctgtgcagtggggtcgactctaaattcaacaaaacgctgaaacaaagaagtgagggtttttggctttggag

SEQ ID NO: 11072 - DNA, 110 bp, synthetic construct
  source 1..110: mol_type = other DNA
actctaaattcaacaaaacgctgaaacaaagaagtgagggtttttggctttggagacaaaatggagcgaggaccgtgtgctgctggggtcgcagcgaaaacacaggggtc

SEQ ID NO: 11073 - DNA, 110 bp, synthetic construct
  source 1..110: mol_type = other DNA
ctgaatacaaaagaccacttactctgtgtgctttccagggtctatggcaactgatcagctagtgggcagagtgggcggccacatggaaaatcttaaagatgtagagatat

SEQ ID NO: 11074 - DNA, 110 bp, synthetic construct
  source 1..110: mol_type = other DNA
cagctagtgggcagagtgggcggccacatggaaaatcttaaagatgtagagatatgccttcctgagagcggaggcttatgtgttggtttcctagggttgtggtagcacac

SEQ ID NO: 11075 - DNA, 110 bp, synthetic construct
  source 1..110: mol_type = other DNA
tgaattatggttttctctggatatatgcccagaagtgggattgctagaaaactctaagacactgataaaggaaactgaagattacacaaacagaagatgtaccatgctgt

SEQ ID NO: 11076 - DNA, 110 bp, synthetic construct
  source 1..110: mol_type = other DNA
tgcccagaagtgggattgctagaaaactctaagacactgataaaggaaactgaagattacacaaacagaagatgtaccatgctgttggattagaagaatcaatattgtca

SEQ ID NO: 11077 - DNA, 110 bp, synthetic construct
  source 1..110: mol_type = other DNA
gactgaacccagctaatctccatgaaacacgtgagatcaagcttctgcttctccgtctgacatgagacccatgcaaggccctaaatgggccctagcaaggagatatttgt

SEQ ID NO: 11078 - DNA, 110 bp, synthetic construct
  source 1..110: mol_type = other DNA
gggctcttggataaaatggaccaggcacagcacttccataaaaactaggatcatgccgattttcagcttgcttttcattttgcagaataaagaaaatcaacaaggttgtt

SEQ ID NO: 11079 - DNA, 110 bp, synthetic construct
  source 1..110: mol_type = other DNA
ccgattttcagcttgcttttcattttgcagaataaagaaaatcaacaaggttgtttctgacatacccagaccatcactttgtctaccatgaaactgtttgtctgacttta

SEQ ID NO: 11080 - DNA, 110 bp, synthetic construct
  source 1..110: mol_type = other DNA
tgtcattagccctaaactttacgaaaaaaataaataaataacagctagtcagcggacccagtctgttttaatcacccaaataccttttaacttgctcccacttttcattt

SEQ ID NO: 11081 - DNA, 110 bp, synthetic construct
  source 1..110: mol_type = other DNA
acaccgtgctcctcggctacagaaccactgcgtggacggcaccaaagagcttttcgaggtcgccggtctctcgcccacgcctttccaaagtcttggtaaaccgagtgtct

SEQ ID NO: 11082 - DNA, 110 bp, synthetic construct
  source 1..110: mol_type = other DNA
gaggtcgccggtctctcgcccacgcctttccaaagtcttggtaaaccgagtgtcttcagggccctgtcagtggacagaggaaaggggaaggtggggtatttgcacaccgt

SEQ ID NO: 11083 - DNA, 110 bp, synthetic construct
  source 1..110: mol_type = other DNA
agtgactggatacagttccctgtgctatgcagcaggaggtctgcagattcttcagtgaacgtggcattcattaatatgatgagaatctttcatgtttgtttttgtttttg

SEQ ID NO: 11084 - DNA, 110 bp, synthetic construct; identical to SEQ ID NO: 11083
  source 1..110: mol_type = other DNA

SEQ ID NO: 11085 - DNA, 110 bp, synthetic construct
  source 1..110: mol_type = other DNA
ttggctttttcttcggcacttggaggtttctagtccagagatggaatctgagctggagctgcaaacgtcaacacagctgcagcaatgctagatcctcaacccattgtgcc

SEQ ID NO: 11086 - DNA, 110 bp, synthetic construct
  source 1..110: mol_type = other DNA
gctaatctattactggctgcatcacaaagccgggagctgcggctttattcgaatctcccaggctctgcatcccctgcgctttagaaaatacacaaagaaaagccacctca

SEQ ID NO: 11087 - DNA, 110 bp, synthetic construct
  source 1..110: mol_type = other DNA
ccccctctggccaacaggatgtactcactttacttggatacacgataatatactgcctacaggtattacattatattatatataataaagatacactttcaaagctcctt

SEQ ID NO: 11088 - DNA, 110 bp, synthetic construct
  source 1..110: mol_type = other DNA
ttccagaggctctgagagagattctgtgccttgactcttctgatgactggtgctggaaggagctgctgggcactcggtggctcgtggccactttccgccaatctctgcct

SEQ ID NO: 11089 - DNA, 110 bp, synthetic construct
  source 1..110: mol_type = other DNA
ggctgatgagtcctttctaacagagcccttttttgcatcatgaaagaataactgcttcgctaggtaacttacagggcctctttcaagaaggaattattttatctttatag

SEQ ID NO: 11090 - DNA, 110 bp, synthetic construct
  source 1..110: mol_type = other DNA
ttcgctaggtaacttacagggcctctttcaagaaggaattattttatctttatagaccaccttgcaagttagaaatgatttcaaacagaaatagaatgttccatttctta

SEQ ID NO: 11091 - DNA, 110 bp, synthetic construct
  source 1..110: mol_type = other DNA
gaatccacaaacaaaacccagcacgaataggctggcagctttatgtggaaaggcgttcttacaacacggggggtgactactggctggacccaagggtagatgtcagatcc

SEQ ID NO: 11092 - DNA, 110 bp, synthetic construct
  source 1..110: mol_type = other DNA
ctacacccatcatgaaaaaatggtggacaaagaagacaagacaagctgctctgggtgatgatgagcagctgagaagccagcatcgtggtgaaagcttgggggacaaggca

SEQ ID NO: 11093 - DNA, 110 bp, synthetic construct
  source 1..110: mol_type = other DNA
gagctcagagatgtcccctggacgggatccaggtgagacaggagagcagctggggagaagacaagagctggtcagagtctgatttatgtgacggtgggacggcagatttg

SEQ ID NO: 11094 - DNA, 110 bp, synthetic construct
  source 1..110: mol_type = other DNA
agaagacaagagctggtcagagtctgatttatgtgacggtgggacggcagatttgctgatggactggattgaatgtgggagtgaaagagtaagtcacacaggacttgcat

SEQ ID NO: 11095 - DNA, 110 bp, synthetic construct
  source 1..110: mol_type = other DNA
caacggggattcaagattcaagtccccgaaacttttacgtctttgttatcttatgaaattagattcagctgagcacacaaacactgctctttcaagcctccaggataagt

SEQ ID NO: 11096 - DNA, 110 bp, synthetic construct
  source 1..110: mol_type = other DNA
aaattagattcagctgagcacacaaacactgctctttcaagcctccaggataagtatttcaaagcgtccacattcctggaggcctctgatgtgtgagcaagggttgagga

SEQ ID NO: 11097 - DNA, 110 bp, synthetic construct
  source 1..110: mol_type = other DNA
cacagtccttagaaccatgcctcgagcctccttttaatctggagcagacagcccggcgagctcagggggtgcagcacgaggcgcttgatctggaacagcccctcccctct

SEQ ID NO: 11098 - DNA, 110 bp, synthetic construct
  source 1..110: mol_type = other DNA
agcaaaccattctcctgagagaaataatgaaaaaagatagctgtccccatggaagagctaatttacctaatacacacaattcattttgttggaggccaaatgcattgctt

SEQ ID NO: 11099 - DNA, 110 bp, synthetic construct
  source 1..110: mol_type = other DNA
agctaatttacctaatacacacaattcattttgttggaggccaaatgcattgcttctcaccgatcccgcagccagactgcctcacaaggcaaagtctaacgccatctccc

SEQ ID NO: 11100 - DNA, 110 bp, synthetic construct
  source 1..110: mol_type = other DNA
atgcactgtattaactgttggtgtgtttatctacttatgtaattaatttacatcttcagcttcaaactctgcccagggctctagacaaatgtaccaaattcttctatgca

SEQ ID NO: 11101 - DNA, 110 bp, synthetic construct
  source 1..110: mol_type = other DNA
tcagcttcaaactctgcccagggctctagacaaatgtaccaaattcttctatgcaaatacacacagtgaactctccaagttctataaatatgttcccaaattaaagcaat

SEQ ID NO: 11102 - DNA, 110 bp, synthetic construct
  source 1..110: mol_type = other DNA
tcacacaactgtgctagtcgaagcttaactggatgggtcaccttggcccccgatgacctagggaacaacatggtgtgaagggcacggcttggtatcaggaagaggataaa

SEQ ID NO: 11103 - DNA, 110 bp, synthetic construct
  source 1..110: mol_type = other DNA
cagaaagctgaggtgttacattttaaatatctcatttcttaaatttgttttgtaaggcagaaaataaacaaacaaaaatcctagagagaaagcctcctgtaaagactaca

SEQ ID NO: 11104 - DNA, 110 bp, synthetic construct
  source 1..110: mol_type = other DNA
tttagcaatgcactgccatacacatttttttcaggcatgtaacagtaaaatcccaaataacagtggtttcaagcaggccatatcaccctgaatgcgcctgatcttgtcaa

SEQ ID NO: 11105 - DNA, 110 bp, synthetic construct
  source 1..110: mol_type = other DNA
aataacagtggtttcaagcaggccatatcaccctgaatgcgcctgatcttgtcaaaaaggaaaaattttaggaagttcccatcgtggctcagtggtaacaaaccagacta

SEQ ID NO: 11106 - DNA, 110 bp, synthetic construct
  source 1..110: mol_type = other DNA
tgagtttgtagtctgttctttccctagcaaagcctcagttgagaccccagcccgggcccacaacttcctgtggatatatctaagccatgctggacttctgacacacagat

SEQ ID NO: 11107 - DNA, 110 bp, synthetic construct
  source 1..110: mol_type = other DNA
attgaatgaaagtgagtatgtgtgaagaaataatgcaacaggacctcacataattcttcctctaatacacgctccatgaaaggtcttcatgcccatatggcacgacgata

SEQ ID NO: 11108 - DNA, 110 bp, synthetic construct
  source 1..110: mol_type = other DNA
cttcctctaatacacgctccatgaaaggtcttcatgcccatatggcacgacgataccagagacaactgaccacatgcagtatcagttgggattcctcctgttcaaagtga

SEQ ID NO: 11109 - DNA, 110 bp, synthetic construct
  source 1..110: mol_type = other DNA
aaccttgatcctaaattaatgtttctagtgctgttgatactaccccctggctcaaagttatcgtgcacccccacattgcctgtaaagctttctaaaacatggtccccaca

SEQ ID NO: 11110 - DNA, 110 bp, synthetic construct
  source 1..110: mol_type = other DNA
agttatcgtgcacccccacattgcctgtaaagctttctaaaacatggtccccacactagctttgcaggctacctgcattcttttagaacatataccatattttctaatca

SEQ ID NO: 11111 - DNA, 110 bp, synthetic construct
  source 1..110: mol_type = other DNA
ccagctgtgtcgcagtctgaccttttctaagtctttcaatgagaaactcgttattatactggaatgtctgcaaagagttaagtaaattgaacaaaatgatgactgagtta

SEQ ID NO: 11112 - DNA, 110 bp, synthetic construct
  source 1..110: mol_type = other DNA
cttcatttgaaaaaggagactttcctcttattaggccaaatgatccagctgtcatgctgtgtggaactgcaggtgtgtgtccagcacagtggctttgtgcgggtgctctg

SEQ ID NO: 11113 - DNA, 110 bp, synthetic construct
  source 1..110: mol_type = other DNA
cttagcgtggcccatctcctcagcagccctgagctagactccacgtacgagaacctttcctcatagttctgctcagttcaggcttgagtccccgtctagtaaagaagaaa

SEQ ID NO: 11114 - DNA, 110 bp, synthetic construct
  source 1..110: mol_type = other DNA
ctgcctttggaagactcatgccaagaataaactaggcattcctcattagccttcaagcccaggatgatcgatcgcctgtcagaaagctggtccccgggtccctcccggcc

SEQ ID NO: 11115 - DNA, 110 bp, synthetic construct
  source 1..110: mol_type = other DNA
gcacagccagaaatactagtcccgagagcaaataaagttagggtatctcgtatttgtaaattttttaattaatgttatttgacagtgctgaccagctttataagtaggca

SEQ ID NO: 11116 - DNA, 110 bp, synthetic construct
  source 1..110: mol_type = other DNA
gtttagccatggggaagagcaggtacatggccccagaagaatggagaagctggatgtaagtccagcagatacaggggatgagagtttatgaggctgtgcaggaagactta

SEQ ID NO: 11117 - DNA, 110 bp, synthetic construct
  source 1..110: mol_type = other DNA
gtaagtccagcagatacaggggatgagagtttatgaggctgtgcaggaagacttagattttgtgcgcaaggaaaccctttggagaaattttaaacattaaaaggacgaga

SEQ ID NO: 11118 - DNA, 110 bp, synthetic construct
  source 1..110: mol_type = other DNA
ttctcggggtgtgggcatctggaattttccatccttctgctatcacaaagagtgcagtgcagtaacaaaggaatgtgatttttttttttctaaagtaaattaggaaggaa

SEQ ID NO: 11119 - DNA, 110 bp, synthetic construct
  source 1..110: mol_type = other DNA
aaaagactgtcgatgcatctagcgaatccctgctatcaaacactttaaagaaaaatgtctcggtgatcattcaatcgaagttacttgatctgagccctgtaattcgtccg

SEQ ID NO: 11120 - DNA, 110 bp, synthetic construct
  source 1..110: mol_type = other DNA
tgtctcggtgatcattcaatcgaagttacttgatctgagccctgtaattcgtccggccttgagagtctttccacttgtcatcttcatctttctcgtctctatgtgccgtg

SEQ ID NO: 11121 - DNA, 110 bp, synthetic construct
  source 1..110: mol_type = other DNA
tctccagagcaaaatggagtgtcccctttttctttaggaaaacagtgcctctttggggctgtgcctgtccctccttgagctgagcgggagctccttcaggaatactctct

SEQ ID NO: 11122 - DNA, 110 bp, synthetic construct
  source 1..110: mol_type = other DNA
gaggccagttgcctggagactggcttttccttgctggtgttgctcttgtctcaagctcaagtttatatttcggagccgattttaggagaatctcagaagctctagaatac

SEQ ID NO: 11123 - DNA, 110 bp, synthetic construct
  source 1..110: mol_type = other DNA
ctcaagtttatatttcggagccgattttaggagaatctcagaagctctagaatactggagggggaggactgttccagcctctgtatctttaaatagggtcactcatctca

SEQ ID NO: 11124 - DNA, 110 bp, synthetic construct
  source 1..110: mol_type = other DNA
tctcgtccttctagtggaattaaatgttctcaaacacagtctcaaatgcttactctccaatccttcaccattccggctcacatgaccctgtgtctccatgacctagctcc

SEQ ID NO: 11125 - DNA, 110 bp, synthetic construct
  source 1..110: mol_type = other DNA
tccaatccttcaccattccggctcacatgaccctgtgtctccatgacctagctcctccctcctgtcacccacctgccttctatttcaagaagcttctcctcccttgggaa

SEQ ID NO: 11126 - DNA, 110 bp, synthetic construct
  source 1..110: mol_type = other DNA
gggttgagatgacccctgccatctgtagaaaaaatgtaggcgtgctgatggacgttctaagatacatactcatttgagcgaagcctcatgacattgcaccatgtcattaa

SEQ ID NO: 11127 - DNA, 110 bp, synthetic construct
  source 1..110: mol_type = other DNA
gggtgccactagtcaagggacatttgtgtctggagctgggttttgaaggatgacgagcacatagatggaaacacgagggcatttacagaatcccaaaggtctcttgctaa

SEQ ID NO: 11128 - DNA, 110 bp, synthetic construct
  source 1..110: mol_type = other DNA
ccagtcctcatggatactagtcgggttcgttactaccgagccacaacgggaactcctggttgtatgcttttcgtaagtaagaattacctatccgtaaagcaagtggtttc

SEQ ID NO: 11129 - DNA, 110 bp, synthetic construct; identical to SEQ ID NO: 11128
  source 1..110: mol_type = other DNA

SEQ ID NO: 11130 - DNA, 110 bp, synthetic construct
  source 1..110: mol_type = other DNA
tgtttgctcttctttgtaagccaaatctatctacatcctctttagattccacgagttgctcctctccgaggatttctccttcagcacgtgtcgagctctcagtgtcacgg

SEQ ID NO: 11131 - DNA, 110 bp, synthetic construct
  source 1..110: mol_type = other DNA
ttgctcctctccgaggatttctccttcagcacgtgtcgagctctcagtgtcacggtcatttttttatccttttcccttccattgattcatggtgctgccgcagtccttcc

SEQ ID NO: 11132 - DNA, 110 bp, synthetic construct
  source 1..110: mol_type = other DNA
cgctgggatgtcacttcactaggggtcttttgtcacttccttggttccagtgaggcggccctcgggcaccggggtggcaccggtgtcagccatagcactcagcacgtgca

SEQ ID NO: 11133 - DNA, 110 bp, synthetic construct
  source 1..110: mol_type = other DNA
tgaaattaaaaaaaaaaaacaacagaatgcagaaagctttcatcaggatcccaaccgctctggtaaaatacatgtaatcattgtgtttatatgcattgcacttgatggaa

SEQ ID NO: 11134 - DNA, 110 bp, synthetic construct
  source 1..110: mol_type = other DNA
gtcatcttggaaagagggagctgcagagatacatgaaggagccagagaacagataagcaggagttcccgctgtggcacggtgggttaaggaaatagcctggtggcatgtt

SEQ ID NO: 11135 - DNA, 110 bp, synthetic construct
  source 1..110: mol_type = other DNA
ccaatatcacagtgccaagttaccatgaagtaaaggcgatgataagaagacagcttgtttgagctgtaagagtaggattttgaggagttcccattgtggtgcagtggcaa

SEQ ID NO: 11136 - DNA, 110 bp, synthetic construct
  source 1..110: mol_type = other DNA
caagttaccatgaagtaaaggcgatgataagaagacagcttgtttgagctgtaagagtaggattttgaggagttcccattgtggtgcagtggcaacgaatccaactagta

SEQ ID NO: 11137 - DNA, 110 bp, synthetic construct
  source 1..110: mol_type = other DNA
caaaacctcttaacgtgccgcaattcgcttgtacagtaacctcaggttattccttctaacccaccggctgtttcccaccccacgtaaagcccctcacactcaagctggac

SEQ ID NO: 11138 - DNA, 110 bp, synthetic construct
  source 1..110: mol_type = other DNA
ctaacccaccggctgtttcccaccccacgtaaagcccctcacactcaagctggacgtgttccccttgtcttcttgacacggtcagttttggtccatccctaaaggcgtaa

SEQ ID NO: 11139 - DNA, 110 bp, synthetic construct
  source 1..110: mol_type = other DNA
ctctgactcccaggcagaggtatctcttatttagtcaccatacctgtgtaccgtgggtgtttcatcagtgtgtctggaataaagctggcattggaaattaacagctgttc

SEQ ID NO: 11140 - DNA, 110 bp, synthetic construct
  source 1..110: mol_type = other DNA
ggtgtttcatcagtgtgtctggaataaagctggcattggaaattaacagctgttcaatttaaagcgatgtttctgcatagcagagatcagagctatgccgtctttgcttc

SEQ ID NO: 11141 - DNA, 110 bp, synthetic construct
  source 1..110: mol_type = other DNA
tggaaatggtggggccggaggggattctttctgtttggaagcgattacccaggagggacagaaagtgtctggagtggtagaaagagagagaactctgttttaaaggagcg

SEQ ID NO: 11142 - DNA, 110 bp, synthetic construct
  source 1..110: mol_type = other DNA
ggacagaaagtgtctggagtggtagaaagagagagaactctgttttaaaggagcgcggtgacattctcagatcagcaggaagaaaaacaagtctgatgggagagagacac

SEQ ID NO: 11143 - DNA, 110 bp, synthetic construct
  source 1..110: mol_type = other DNA
ggtttgcctgttacagcatcttgggtaactgtaactaacacccttgatctgtatttggctggatgtcttacatgatgctgagtgtttacaatacttaattagctgagttt

SEQ ID NO: 11144 - DNA, 110 bp, synthetic construct
  source 1..110: mol_type = other DNA
tggctggatgtcttacatgatgctgagtgtttacaatacttaattagctgagtttggccgcccttctttagccatttttattctttatgatgataaaaatcatgcctgtt

SEQ ID NO: 11145 - DNA, 110 bp, synthetic construct
  source 1..110: mol_type = other DNA
caagggtgcagggcagagaggtacagcgtcagtctcttccggggatcagagcaaccatcagagctgcctccatccccctgtggacgtgatttcaaacccgttgggggtcc

SEQ ID NO: 11146 - DNA, 110 bp, synthetic construct
  source 1..110: mol_type = other DNA
tcacagctacgttgaaaccctcaggcttgaaattgggaaatcccaactcagcttccactaactaatttttctcctagtcccaggccacacatcctgcttctccacaggcc

SEQ ID NO: 11147 - DNA, 110 bp, synthetic construct
  source 1..110: mol_type = other DNA
tctgaagcaaactgtctgacctttaaagacgaagcgtagtgcagtatgtacaaaaagttaacgaaggtcttcatttgaatgctttcacgccttgtcttctttaagtaaga

SEQ ID NO: 11148 - DNA, 110 bp, synthetic construct
  source 1..110: mol_type = other DNA
cagccagagttggagagaggggacgagcctacggggtaaatcctgacactcatcagaaaaggggtggttggtgagtctttacccaggaagccgaggtccccggaggcttg

SEQ ID NO: 11149 - DNA, 110 bp, synthetic construct
  source 1..110: mol_type = other DNA
gaaaaggggtggttggtgagtctttacccaggaagccgaggtccccggaggcttggatccccgggtcagcccaccagcggccagcagggcaggaggaaatgagtgccctc

SEQ ID NO: 11150 - DNA, 110 bp, synthetic construct
  source 1..110: mol_type = other DNA
tgtgcggccacgtcgaaagcaggacacgagcatggaaatgttttaattgccttcacagccattgcaggcaacgggctgatgcattaaaaactccccggcaagggcgtcag

SEQ ID NO: 11151 - DNA, 110 bp, synthetic construct
  source 1..110: mol_type = other DNA
cagccattgcaggcaacgggctgatgcattaaaaactccccggcaagggcgtcagattctcaagggggagcctctggttggccaaccagccatttcagaaacccccctcc

SEQ ID NO: 11152 - DNA, 110 bp, synthetic construct
  source 1..110: mol_type = other DNA
tttactgcacccgccacttctctgcagctgtaggtccttcaggtgtcctagttttgtgcaggaggcttgacttcaacgaggcagctttgcaagcattcccacggtctggc

SEQ ID NO: 11153 - DNA, 110 bp, synthetic construct
  source 1..110: mol_type = other DNA
gtgcaggaggcttgacttcaacgaggcagctttgcaagcattcccacggtctggcctctcatcctgctcagtggccaaatcaatccccaaagcaaagttgccaggattgt

SEQ ID NO: 11154 - DNA, 110 bp, synthetic construct
  source 1..110: mol_type = other DNA
cgtgcaaaattattcggctctctggtcattgtcacaactttaaccccacgtcaaagaagttgttgactaaccgggtgagaaactgcacatttcctactgcttccggctcg

SEQ ID NO: 11155 - DNA, 110 bp, synthetic construct
  source 1..110: mol_type = other DNA
gaagttgttgactaaccgggtgagaaactgcacatttcctactgcttccggctcgcccacctggaatgtcatcctttctctttgttgagacgaaccatctttcgaattct

SEQ ID NO: 11156 - DNA, 110 bp, synthetic construct
  source 1..110: mol_type = other DNA
cccaggaaggaaattccagtccccctgaaactaaaccttcacatctaattgcaacttgagctttggcccaagctgggaaagaaaaagaaatggaaaaaccaaaactgtgt

SEQ ID NO: 11157 - DNA, 110 bp, synthetic construct
  source 1..110: mol_type = other DNA
ttgagctttggcccaagctgggaaagaaaaagaaatggaaaaaccaaaactgtgtctgcctcatggtcggaggcaggatttccctgatgtgacaacttgggtgcagccca

SEQ ID NO: 11158 - DNA, 110 bp, synthetic construct
  source 1..110: mol_type = other DNA
cacccagctgccatcaccccagccacagtcctgtaattggggtggtgggagggagctgagacggggtttcagtgaaggcagcgccgtgctctcatctccaaagaggtccc

SEQ ID NO: 11159 - DNA, 110 bp, synthetic construct
  source 1..110: mol_type = other DNA
ctgagacggggtttcagtgaaggcagcgccgtgctctcatctccaaagaggtccctgagagtcttcaagtccagctttgtctgcattcagcttgtggcaatgctctttgt

SEQ ID NO: 11160 - DNA, 110 bp, synthetic construct; identical to SEQ ID NO: 11158
  source 1..110: mol_type = other DNA

SEQ ID NO: 11161 - DNA, 110 bp, synthetic construct; identical to SEQ ID NO: 11159
  source 1..110: mol_type = other DNA

SEQ ID NO: 11162 - DNA, 110 bp, synthetic construct
  source 1..110: mol_type = other DNA
ctgcagtaaaccactgcatgagaggcacggtacgctgcctgcctctgctccccaaactctcggggggcgcttggtaactgcctagctgtgtatctgtctaggtcagccgg

SEQ ID NO: 11163 - DNA, 110 bp, synthetic construct
  source 1..110: mol_type = other DNA
actctcggggggcgcttggtaactgcctagctgtgtatctgtctaggtcagccgggtgccaatcacagagctccttggaagagagctgagggatgctctgatctccgctg

SEQ ID NO: 11164 - DNA, 110 bp, synthetic construct
  source 1..110: mol_type = other DNA
gggctgggagggcgttcgtcagtgccccatcactgatcccaaagtagagcttataggagttcccagtgtggcccagcaataatgaaccaactagtatccatgaggacgag

SEQ ID NO: 11165 - DNA, 110 bp, synthetic construct
  source 1..110: mol_type = other DNA
cacaacaggtcggttcatggagagagacaggttgttgggacaaggaagagtgactttatttggaaagccagcagactgagaagagggtggactcctgtcccaaagacaca

SEQ ID NO: 11166 - DNA, 110 bp, synthetic construct
  source 1..110: mol_type = other DNA
ttatttggaaagccagcagactgagaagagggtggactcctgtcccaaagacacatcttgcccaagttagaacgcaggcttcttctgttctgaaaggggagggagtagcc

SEQ ID NO: 11167 - DNA, 110 bp, synthetic construct
  source 1..110: mol_type = other DNA
tgtgtgtatgtgaaatgcaagggtgtttattgcattagtgctgagactagaacctgacaggcatgggtggaataatttctattggcgcatcttcactgccgtcctgaatg

SEQ ID NO: 11168 - DNA, 110 bp, synthetic construct
  source 1..110: mol_type = other DNA
gacaggcatgggtggaataatttctattggcgcatcttcactgccgtcctgaatggaacagcaagcagctggaaaagccaaatcgaatgcccacgactaagagcagatca

SEQ ID NO: 11169 - DNA, 110 bp, synthetic construct
  source 1..110: mol_type = other DNA
gtgggccgaagagtaaagagagaggacacaacccctttgcactgaaaccacatcagctaaagacaagaaagggattctagcatcattgacggcgtggcgctccccttggg

SEQ ID NO: 11170 - DNA, 110 bp, synthetic construct
  source 1..110: mol_type = other DNA
gctaaagacaagaaagggattctagcatcattgacggcgtggcgctccccttggggtgggggtgggggccccagccttagcgtgactgtcgaggccgcccttcccaagcc

SEQ ID NO: 11171 - DNA, 110 bp, synthetic construct
  source 1..110: mol_type = other DNA
ccggaggaggccatcggctcacaaaaggggccgcccttctcccccagccccagaaggcccttcctgggctcctagagaacaagcgggaagctctgacaacctgcagaaac

SEQ ID NO: 11172 - DNA, 110 bp, synthetic construct
  source 1..110: mol_type = other DNA
ggcccttcctgggctcctagagaacaagcgggaagctctgacaacctgcagaaaccagacgagaaacaggcctggaacctcaaaggaatcgacccgagtgtcacgcgggg

SEQ ID NO: 11173 - DNA, 110 bp, synthetic construct
  source 1..110: mol_type = other DNA
gcacaattttagcacttgagcaaagggctggcacagtttcagctgttgcttgacacagatctaacatcagcactgcagaactgaagtgacatcctgggcacccatgaacc

SEQ ID NO: 11174 - DNA, 110 bp, synthetic construct
  source 1..110: mol_type = other DNA
tcttccctcaggcttcttccttagatcagcaggttgagcttccagtctgatgacgttatccacatccccgctccctcacgcattttgggcttcagcctcgctctcctctg

SEQ ID NO: 11175 - DNA, 110 bp, synthetic construct
  source 1..110: mol_type = other DNA
ctggtcactgcctctctgcctgtgacttctttcctgtgcagctctctcacctccctaggtaacttgaagcttccctttttttggacactgcagggtcctagactctggaa

SEQ ID NO: 11176 - DNA, 110 bp, synthetic construct
  source 1..110: mol_type = other DNA
ctcctgcctctcccctggtggctgccctttgttaatgaaactctcctgggacgtttgaaggcctgaatgactcactcacctggaattcaatggcctccctggggggtctg

SEQ ID NO: 11177 - DNA, 110 bp, synthetic construct
  source 1..110: mol_type = other DNA
aaagtttttgctttgacatgtgctgctccctgtacaggaatcccaccctccccgtgccacccttaaacgtgtgcaaactccaacggctggccttgcccgtcttctagtgt

SEQ ID NO: 11178 - DNA, 110 bp, synthetic construct
  source 1..110: mol_type = other DNA
gccacccttaaacgtgtgcaaactccaacggctggccttgcccgtcttctagtgtcagccaccaaactccacgtgctccagggagctctcccttccatcatcggctccat

SEQ ID NO: 11179 - DNA, 110 bp, synthetic construct
  source 1..110: mol_type = other DNA
cccaacgcagcttccagggggctcctacgaaggaagagctcacacaaaaccccaaaacccagatttcacagcacaggggccaaggaggaggctgaataagatgccagggg

SEQ ID NO: 11180 - DNA, 110 bp, synthetic construct
  source 1..110: mol_type = other DNA
atcaaggctgaggctgaggcctcaaaagctgtggtcccagaccactgccaaccagctcaggtgttggcttggtgccggccagctgcccttccactcctgcacgagctctc

SEQ ID NO: 11181 - DNA, 110 bp, synthetic construct
  source 1..110: mol_type = other DNA
caccaggcacccaaacactggacactgttaaaggggaaacagactgagctcaggaaccagagggcccgtccagacctgggcataccggccgtgcagatggggagtcatcc

SEQ ID NO: 11182 - DNA, 110 bp, synthetic construct
  source 1..110: mol_type = other DNA
accagagggcccgtccagacctgggcataccggccgtgcagatggggagtcatcccaactaaaggaacctcggaaggtcaaagatgacatcgcactaagacccaaaggcg

SEQ ID NO: 11183 - DNA, 110 bp, synthetic construct
  source 1..110: mol_type = other DNA
caacctctgcggcctcagtctctgcccctgttaggtgggtttgccaagtttcccaagacctgcgcgctgggcaatgcagaatacccacagctgaccgacgctcctgcctt

SEQ ID NO: 11184 - DNA, 110 bp, synthetic construct
  source 1..110: mol_type = other DNA
agacctgcgcgctgggcaatgcagaatacccacagctgaccgacgctcctgccttggtccaacgggtgtcgactcggcagtcggcaaacccagagacaaagctaagctcc

SEQ ID NO: 11185 - DNA, 110 bp, synthetic construct
  source 1..110: mol_type = other DNA
catagatctctgtttccgctgcctctttttttctctttcgtagaggggcggggaggagggaggaggtcgagttgatttgaacgtcttcaggtcgcccggcctccggccct

SEQ ID NO: 11186 - DNA, 110 bp, synthetic construct
  source 1..110: mol_type = other DNA
gagggaggaggtcgagttgatttgaacgtcttcaggtcgcccggcctccggccctgcattggttattggtgctgctggggcgggccgagttctctgaccctgggttgtga

SEQ ID NO: 11187 - DNA, 110 bp, synthetic construct
  source 1..110: mol_type = other DNA
gcattaccgttctcctgtgcagcgctttgcgctgggggtctctccaccccaatacccagtcatagcccactcctcaaacaaggacgccctgtggacttacacgcccctct

SEQ ID NO: 11188 - DNA, 110 bp, synthetic construct
  source 1..110: mol_type = other DNA
ctgaccaaatgtttgataagacaaggtcccttaccaaatactgcagccacatcatcattcagatttcttaaatttgctggcagttcagtgcttgaaactaggtgggcatt

SEQ ID NO: 11189 - DNA, 110 bp, synthetic construct
  source 1..110: mol_type = other DNA
cattcagatttcttaaatttgctggcagttcagtgcttgaaactaggtgggcattgtcattcagttttcttaactttgctggcaattcaatacttgcaactaggggagga

SEQ ID NO: 11190 - DNA, 110 bp, synthetic construct
  source 1..110: mol_type = other DNA
gcgtcattgtcctttgtgaagccagtgaacggtgaggcatttcagggaaggcttagcagcttggtaccgtcatgggcaagtcggaatcaaggaccgtgtttatcagcctg

SEQ ID NO: 11191 - DNA, 110 bp, synthetic construct
  source 1..110: mol_type = other DNA
gcagcttggtaccgtcatgggcaagtcggaatcaaggaccgtgtttatcagcctggggttctcgtctcaccagaggtcttttgcgtctgtgttaagggtcctccagctac

SEQ ID NO: 11192 - DNA, 110 bp, synthetic construct
  source 1..110: mol_type = other DNA
gagccagtggcttttagatggtgacgtgcccccccccgtagctacatagcagcattaccatcacgcccaacggtccaggtggggagtttgcaccttccgctcttgcaatt

SEQ ID NO: 11193 - DNA, 110 bp, synthetic construct
  source 1..110: mol_type = other DNA
gctctgggttcttactcttactgagtctctgctgattaaagctcctttccagcaagcaggtctggaggctgtttttgcggggtggccagtggattggcctctgacggaca

SEQ ID NO: 11194 - DNA, 110 bp, synthetic construct
  source 1..110: mol_type = other DNA
ggaggctgcaggcagtgcaggtgccggcttccttccgcttccggccagaacaggtgagctgagcagcaactcggttagaagcgcatgcctgttgcgggctgatggtcttg

SEQ ID NO: 11195 - DNA, 110 bp, synthetic construct
  source 1..110: mol_type = other DNA
gtcgtttttgcccggaggccagcattaagcttcctcccgtccttccagttggaagacgggagctgcgcgggctaggccttttctcctgacttctccgagcttgagaggca

SEQ ID NO: 11196 - DNA, 110 bp, synthetic construct
  source 1..110: mol_type = other DNA
acgggagctgcgcgggctaggccttttctcctgacttctccgagcttgagaggcagggccgtccgtgggaagagtctgggcagtgagccctgcaccggcttcccgctgtg

SEQ ID NO: 11197 - DNA, 110 bp, synthetic construct
  source 1..110: mol_type = other DNA
gtatttatatatgttatggctgctttatgtggctataccatggtttacatagctagttgcccatggatgggcccttggatagacagcaattacaaatccacacaacgagt

SEQ ID NO: 11198 - DNA, 110 bp, synthetic construct
  source 1..110: mol_type = other DNA
ggcgccctgaacctccccacctgagctgtgttttttgacacagcttcctactgtacctgcttgcttcctcgcatggtgagtgcggcccgtctttgcaggaagaactcctt

SEQ ID NO: 11199 - DNA, 110 bp, synthetic construct
  source 1..110: mol_type = other DNA
ctccccagcctgtggctcatttgccttcgtggggtttgctttcccaggcgggtgaccagagctccactgttgtagcagaaagatgttgttatgacagtgttagcctctcg

SEQ ID NO: 11200 - DNA, 110 bp, synthetic construct
  source 1..110: mol_type = other DNA
ccagagctccactgttgtagcagaaagatgttgttatgacagtgttagcctctcggcaaattgcatagcctcgaggattgcactggaggcgtcgtgcaaacacttttggg

SEQ ID NO: 11201 - DNA, 110 bp, synthetic construct
  source 1..110: mol_type = other DNA
agcccccgtcccggaacctgtgggctgaggccttcaccacgggtcctgggatccggctttgaggaggaagaaatgaaggaaagcacgggtctctgaagctgtctgcactg

SEQ ID NO: 11202 - DNA, 110 bp, synthetic construct
  source 1..110: mol_type = other DNA
aggcgagcaggactgtgatgggcaggcttgaagccggagggaattggagatcaaatcgagctgagtcctgctgccccgaaggaagcagagttccgcctcccccaggaaca

SEQ ID NO: 11203 - DNA, 110 bp, synthetic construct
  source 1..110: mol_type = other DNA
ctcaagatgaagtgatgcccccaaaccctcctgagtctgggacaaaactgctttctttgtcaccccaagtccaggtcatcctcacctacacagctgacacagacgcagac

SEQ ID NO: 11204 - DNA, 110 bp, synthetic construct
  source 1..110: mol_type = other DNA
tttgtcaccccaagtccaggtcatcctcacctacacagctgacacagacgcagactgatattcaggctacagatttaggcacatgcgccatcactgcggcagatgcctct

SEQ ID NO: 11205 - DNA, 110 bp, synthetic construct
  source 1..110: mol_type = other DNA
caggacagaccattgtagacagaacttcaacaggtaacgtgtgatcaatcctccgatctggatcatgggcccttttcaacccgagaagccccgcaaaggcagcgctgccc

SEQ ID NO: 11206 - DNA, 110 bp, synthetic construct
  source 1..110: mol_type = other DNA
atctggatcatgggcccttttcaacccgagaagccccgcaaaggcagcgctgcccacccttcgtacacagtgcgtgtgaccgacacctgtcacagagcgtggacgcgcat

SEQ ID NO: 11207 - DNA, 110 bp, synthetic construct; identical to SEQ ID NO: 11205
  source 1..110: mol_type = other DNA

SEQ ID NO: 11208 - DNA, 110 bp, synthetic construct; identical to SEQ ID NO: 11206
  source 1..110: mol_type = other DNA

SEQ ID NO: 11209 - DNA, 110 bp, synthetic construct
  source 1..110: mol_type = other DNA
gaaaataagtggaaacaggacacgtacagccaagaaggagagaaaggagggggcaggagagcgagtgcagcgctcgtcttgagtgtcacgtgtgtacggatgcaccccaa

SEQ ID NO: 11210 - DNA, 110 bp, synthetic construct
  source 1..110: mol_type = other DNA
ggagagcgagtgcagcgctcgtcttgagtgtcacgtgtgtacggatgcaccccaagctcgtaacggagacacacggaggtactgggacctcacgtggcgctgctttgaga

SEQ ID NO: 11211 - DNA, 110 bp, synthetic construct
  source 1..110: mol_type = other DNA
gggctgcagcgctctgcacccacccccgcacacaccttctctgcttcctcgcctgtggcctgtgccccgtctccacggtggccgtcctgagggcccggctcactggtttg

SEQ ID NO: 11212 - DNA, 110 bp, synthetic construct
  source 1..110: mol_type = other DNA
tggcctgtgccccgtctccacggtggccgtcctgagggcccggctcactggtttggatttgcattcctcgtgtgatcgagcagctctccgtgtgctggtggccgtcgtct

SEQ ID NO: 11213 - DNA, 110 bp, synthetic construct
  source 1..110: mol_type = other DNA
ccgctgtgggtggggttcctgatgtccccgtgtgtctgtcgacgctaggtcggctctcaggggttcgggcaacgtgaagtagcctgacttattatgactttgaaacctgt

SEQ ID NO: 11214 - DNA, 110 bp, synthetic construct
  source 1..110: mol_type = other DNA
ctcaggggttcgggcaacgtgaagtagcctgacttattatgactttgaaacctgtgtgctagtatctgaacatgcaaacagcaaagggagttcccgtcgtggcgcagcgg

SEQ ID NO: 11215 - DNA, 110 bp, synthetic construct
  source 1..110: mol_type = other DNA
catcttccgggactaggcgaccctctccgtttctggccatagtcacaccggaagctcctggaatggtagggttctcatctttcccatgtagcatgtggacactggatgct

SEQ ID NO: 11216 - DNA, 110 bp, synthetic construct
  source 1..110: mol_type = other DNA
tcctggaatggtagggttctcatctttcccatgtagcatgtggacactggatgctgggcccacggaggggccagctatgtgctatgtgccctgctgtcccctccccaggt

SEQ ID NO: 11217 - DNA, 110 bp, synthetic construct
  source 1..110: mol_type = other DNA
ccaactggctcctggctccctgggctctgggacaccagctcttagtccacccttgtcactactccatcacccgtcacattggctactatccctggactgtcctttctcct

SEQ ID NO: 11218 - DNA, 110 bp, synthetic construct
  source 1..110: mol_type = other DNA
tcactactccatcacccgtcacattggctactatccctggactgtcctttctcctgcttctggccggtgtcaacagaggctggtcactgtgcacttcacgttgttggtga

SEQ ID NO: 11219 - DNA, 110 bp, synthetic construct
  source 1..110: mol_type = other DNA
atttctctaataattattaatattgagcatcttttcatgtgtctgttggccatctatctgtcgtccttggagaaacatctatgtaggttttctgaccattttttaattgg

SEQ ID NO: 11220 - DNA, 110 bp, synthetic construct; identical to SEQ ID NO: 11219
  source 1..110: mol_type = other DNA

SEQ ID NO: 11221 - DNA, 110 bp, synthetic construct
  source 1..110: mol_type = other DNA
acctcttgagagaaaaagcacagggattcgcacagctgctcaccaaaatatcaccgttacaccaccttccatgcacaacccacaggcactttatccggatcccaaagcca

SEQ ID NO: 11222 - DNA, 110 bp, synthetic construct
  source 1..110: mol_type = other DNA
attcgcacagctgctcaccaaaatatcaccgttacaccaccttccatgcacaacccacaggcactttatccggatcccaaagccaggtcaggctggggtttccaaattcc

SEQ ID NO: 11223 - DNA, 110 bp, synthetic construct
  source 1..110: mol_type = other DNA
gcagcgagggaacaggctgcacatgcagcctgtcggccggggtgctgccggccccgggtctgatctttcccgacgggactccattgctcgtccatctcccggaccagcgg

SEQ ID NO: 11224 - DNA, 110 bp, synthetic construct
  source 1..110: mol_type = other DNA
gggtctgatctttcccgacgggactccattgctcgtccatctcccggaccagcggtgagtccaggaccagtcacgtcatgtgacgggtcttggggatgtcggtgtttgcc

SEQ ID NO: 11225 - DNA, 110 bp, synthetic construct
  source 1..110: mol_type = other DNA
ctcagctgtccaccggacctcagcacatggggtcgaggccccagatcctcctggggccaacccggtgtccttgaggcagaacgccagcctgaaagctgacattctggttc

SEQ ID NO: 11226 - DNA, 110 bp, synthetic construct
  source 1..110: mol_type = other DNA
gccaacccggtgtccttgaggcagaacgccagcctgaaagctgacattctggttctgcagcatctgcctgtcccgccagcccccagacccaaagcgtgaacagggtcggc

SEQ ID NO: 11227 - DNA, 110 bp, synthetic construct
  source 1..110: mol_type = other DNA
gtggcactgtagtattttatgcaacatgattgtcagctgtcttaggaattttcacatctatgtacatatggaacgttggtctgtggcttttctgtggctgacgtgtctgg

SEQ ID NO: 11228 - DNA, 110 bp, synthetic construct
  source 1..110: mol_type = other DNA
gtgtgtcctagggccgggaagtggccgagccgggagatgggtggcatcatcagctttccgtatggggaagtagaggcctggccgaaaggggtgtgggcacccgtgaaggc

SEQ ID NO: 11229 - DNA, 110 bp, synthetic construct
  source 1..110: mol_type = other DNA
ttccgtatggggaagtagaggcctggccgaaaggggtgtgggcacccgtgaaggcgtttgcttccctgttttcacacctggcgcttatcctgtgctttgttctgaatgcc

SEQ ID NO: 11230 - DNA, 110 bp, synthetic construct
  source 1..110: mol_type = other DNA
ggcttccacccgaaggcaccctgaacacacggccaggtcagaaaggaccccggcgtgggaagctcgagtccagcagctccactcaggtgaaaatgtttcttacaagttgc

SEQ ID NO: 11231 - DNA, 110 bp, synthetic construct
  source 1..110: mol_type = other DNA
aggaggatccctgtatatgcacaaaggagttttcttactcttataaagtttctcataaatctgtatgaaagcaattacagttacggactaaattctccgtcaaacccgac

SEQ ID NO: 11232 - DNA, 110 bp, synthetic construct; identical to SEQ ID NO: 11231
  source 1..110: mol_type = other DNA

SEQ ID NO: 11233 - DNA, 110 bp, synthetic construct
  source 1..110: mol_type = other DNA
tggtccggaaggagcagcgggccaacgtgcacaggctccggtccaggagccccgccatcttctcccgcccgacgtcaggccgcgtgacaaacctgccggaagggagcaga

SEQ ID NO: 11234 - DNA, 110 bp, synthetic construct
  source 1..110: mol_type = other DNA
catcttctcccgcccgacgtcaggccgcgtgacaaacctgccggaagggagcagacaagcaggggacggctcgacaggggcccccgctgaaaagcagcccccttcccggc

SEQ ID NO: 11235 - DNA, 110 bp, synthetic construct
  source 1..110: mol_type = other DNA
ctcgccagccattctccgggcgaccacagccagcagctgagaaagtccaaacaacctgtgtatctcacagttctccacagaccgaataactcaggccgtatactggtcct

SEQ ID NO: 11236 - DNA, 110 bp, synthetic construct
  source 1..110: mol_type = other DNA
ttttctttttatctctccttctgccttctttctttcactgtgcttctgcgggcccagctcccctggctgggatacagcagcgattcgattcagggggtgttggtgactct

SEQ ID NO: 11237 - DNA, 110 bp, synthetic construct
  source 1..110: mol_type = other DNA
agctcccctggctgggatacagcagcgattcgattcagggggtgttggtgactctggttccgccagtgagtcctggctctactgggagaaccaggagtggttggtccagc

SEQ ID NO: 11238 - DNA, 110 bp, synthetic construct
  source 1..110: mol_type = other DNA
ctgggcaaactagtccctacaaccaagtgcaactgggccacttcagaggctgcgctggcctcagaaagaggctgcatcccaggcccctaactgtaacaggaggatgagcc

SEQ ID NO: 11239 - DNA, 110 bp, synthetic construct
  source 1..110: mol_type = other DNA
cgacctgtgagaactgggtggctgtgtgtctaagtcccagtttccagttttgcttgacattcatcaaacccaggaaagcacaaaaatcactggccgacagctaagccact

SEQ ID NO: 11240 - DNA, 110 bp, synthetic construct
  source 1..110: mol_type = other DNA
gacattcatcaaacccaggaaagcacaaaaatcactggccgacagctaagccactggcgtccacgtgatgccttagtgtgcgggtccacgcctgggggcctggccccata

SEQ ID NO: 11241 - DNA, 110 bp, synthetic construct
  source 1..110: mol_type = other DNA
caggttcattttcactgagccacgaagagaacggccacgtaacttctattcaagctggcaaagggtacacgggcatctgctgttttatctgtaatcacaggtcatgcttt

SEQ ID NO: 11242 - DNA, 110 bp, synthetic construct
  source 1..110: mol_type = other DNA
tggcaaagggtacacgggcatctgctgttttatctgtaatcacaggtcatgcttttaaggaaaaatacattcgctttcctcaatacacatgtttgtctcaaacttcaaaa

SEQ ID NO: 11243 - DNA, 110 bp, synthetic construct; identical to SEQ ID NO: 11241
  source 1..110: mol_type = other DNA

SEQ ID NO: 11244 - DNA, 110 bp, synthetic construct; identical to SEQ ID NO: 11242
  source 1..110: mol_type = other DNA

SEQ ID NO: 11245 - DNA, 110 bp, synthetic construct
  source 1..110: mol_type = other DNA
ctgctgcgctacgatgggagctcctggatttacctggaacgagagccaggggcatgttctaatacagactccaagtgaataaatgcccacaatcatgaggttgtgtggaa

SEQ ID NO: 11246 - DNA, 110 bp, synthetic construct; identical to SEQ ID NO: 11245
  source 1..110: mol_type = other DNA

SEQ ID NO: 11247 - DNA, 110 bp, synthetic construct
  source 1..110: mol_type = other DNA
gggccctgggctggctgcccggggggagacatgaggctttcttccagatccgcagactctgctgtgcggggggcgagagctccgtgtgtgtcatctacgaggacatgtcc

SEQ ID NO: 11248 - DNA, 110 bp, synthetic construct
  source 1..110: mol_type = other DNA
actctgctgtgcggggggcgagagctccgtgtgtgtcatctacgaggacatgtccctcagccgcagcaacaccgtgtccctccccagccagttccagtgagcctgcagca

SEQ ID NO: 11249 - DNA, 110 bp, synthetic construct
  source 1..110: mol_type = other DNA
caggtgcctttcagacctgacaggcagacatcccccttagattcaaaacggaaggttagaaagctcagcattttcattgggttgtgatgttcgttgtagagctgtaaatg

SEQ ID NO: 11250 - DNA, 110 bp, synthetic construct
  source 1..110: mol_type = other DNA
ctcgaatataggccgtgagaccccgttcctctaggtctcttacgattgggataagtccccgtcgtgcctcgggtctcagaggatgttgctgttggcaaggaaagaacttc

SEQ ID NO: 11251 - DNA, 110 bp, synthetic construct
  source 1..110: mol_type = other DNA
tccccgtcgtgcctcgggtctcagaggatgttgctgttggcaaggaaagaacttctgctctttaagagttatttctaatgctcgagcattttttgctcttcctgtctttc

SEQ ID NO: 11252 - DNA, 110 bp, synthetic construct
  source 1..110: mol_type = other DNA
atatgcctgtgtcttagaaaaggaaagtgcatgagctgcccttagtttaggcaggtaacgtgcctcctaacttcatgctaatccatacctttgcctgagtctctgcgtct

SEQ ID NO: 11253 - DNA, 110 bp, synthetic construct
  source 1..110: mol_type = other DNA
taacgtgcctcctaacttcatgctaatccatacctttgcctgagtctctgcgtctctgtatgagcttgtgatctccggggagattaaacccttcacctacctgtttctgc

SEQ ID NO: 11254 - DNA, 110 bp, synthetic construct
  source 1..110: mol_type = other DNA
ggaggggagtgctctgcggccgtcgtgggcggcctcaacgtcctgctgaagcccaactcctcgctgcaattcatgaagctgggcatgctcagccaggacggcacctgcag

SEQ ID NO: 11255 - DNA, 110 bp, synthetic construct
  source 1..110: mol_type = other DNA
ccaaaagataaaaatatatataaagataaaaataaaaattaaaaaaagcctccagatgacttagacacctgagagcgtcaatgctgtgtgaatagatgctggctcacagc

SEQ ID NO: 11256 - DNA, 110 bp, synthetic construct
  source 1..110: mol_type = other DNA
cactgtgatgtttgtggcctcgcctgtcagcagctgggagtgacaggacatcctgtctctctcctgattctaatctgagagagtcctacctccaaggcccttggtacctg

SEQ ID NO: 11257 - DNA, 110 bp, synthetic construct
  source 1..110: mol_type = other DNA
tattttaccgcaatacaaattttttacgttttaagatgcaggagtggtggcgcccgtggtacccgtgtttaactcacggccgggactgctgccagcaccgctgactcaca

SEQ ID NO: 11258 - DNA, 110 bp, synthetic construct; identical to SEQ ID NO: 11257
  source 1..110: mol_type = other DNA

SEQ ID NO: 11259 - DNA, 110 bp, synthetic construct
  source 1..110: mol_type = other DNA
ccctccccttttgcttgacacgctcaggactgtttatccatctcccagggtagaagttccactcggtacgtggcatccacccgcggtgggtgcgagggacacaggtgccc

SEQ ID NO: 11260 - DNA, 110 bp, synthetic construct
  source 1..110: mol_type = other DNA
gttccactcggtacgtggcatccacccgcggtgggtgcgagggacacaggtgccccgtgtccatcgtcccaacttctctcaattttatctgtattcacacgcgttagggc

SEQ ID NO: 11261 - DNA, 110 bp, synthetic construct
  source 1..110: mol_type = other DNA
aaaatatgagtagatgattaacctcatttgtaattagggagaacagattaaagactacaatgagattgcattttgctcaccaaactggccaaaaggatactaccaaatga

SEQ ID NO: 11262 - DNA, 110 bp, synthetic construct
  source 1..110: mol_type = other DNA
tacaatgagattgcattttgctcaccaaactggccaaaaggatactaccaaatgaatgtttgtggcagggtgcagccagagcccaagatctatggccccttggccaaaat

SEQ ID NO: 11263 - DNA, 110 bp, synthetic construct
  source 1..110: mol_type = other DNA
cctctgtgcaccgaggcctgtgcccccaggtgggcaatggtgtaggaaccccatttctggtttttgtctctgtaaatggaacgttttgtgctgagtcagctcttaacata

SEQ ID NO: 11264 - DNA, 110 bp, synthetic construct
  source 1..110: mol_type = other DNA
tctggtttttgtctctgtaaatggaacgttttgtgctgagtcagctcttaacatagatgtgtttgtgctaacggatacatgtgacgcctcagccgtccgttctttttttt

SEQ ID NO: 11265 - DNA, 110 bp, synthetic construct
  source 1..110: mol_type = other DNA
tgtgaaccatccattctaagtgtttccttttcgttgaatctgaccttcttcgccagcatcaccagcatcccatccctggaccgtcatgccttcagcttcggacacccaac

SEQ ID NO: 11266 - DNA, 110 bp, synthetic construct
  source 1..110: mol_type = other DNA
gcatcaccagcatcccatccctggaccgtcatgccttcagcttcggacacccaacacggccggaggaccccacagatagttgggggctgacagtttgctccgcagggctg

SEQ ID NO: 11267 - DNA, 110 bp, synthetic construct
  source 1..110: mol_type = other DNA
aggtgcggccctaaaaagcaaaacaaagacaaaaacaaaaaaagacccactaagagttcctatcgtggtgccgtgggttaaggatcggactgcagtggctggggttgcag

SEQ ID NO: 11268 - DNA, 110 bp, synthetic construct; identical to SEQ ID NO: 11267
  source 1..110: mol_type = other DNA

SEQ ID NO: 11269 - DNA, 110 bp, synthetic construct
  source 1..110: mol_type = other DNA
cctgcggatcagtcagtgacgttttacggaatcttctacgtgaagctccagcaggtgctcagctcacctgctttgttgctgccgctgttgctacagtgactcagattggc

SEQ ID NO: 11270 - DNA, 110 bp, synthetic construct
  source 1..110: mol_type = other DNA
tgctcagctcacctgctttgttgctgccgctgttgctacagtgactcagattggcctcccccccagtgtgtttcctgtcggctatttttaatatacaaaaagggcaaaac

SEQ ID NO: 11271 - DNA, 110 bp, synthetic construct
  source 1..110: mol_type = other DNA
ttgtccctgtcctacagagagggaaccgagacagcaaggttcggcagctaccaccaggtcacggagctggcatgcggcagggcattcttacagtcaggcagccggaggac

SEQ ID NO: 11272 - DNA, 110 bp, synthetic construct
  source 1..110: mol_type = other DNA
cactggtccagatggtgcgggaggagggcggccgagaacagccctgcctcctccccgcacaatgaggcacctgcgcgcgggccccagccacccagctttactttaagtgg

SEQ ID NO: 11273 - DNA, 110 bp, synthetic construct
  source 1..110: mol_type = other DNA
cgcacaatgaggcacctgcgcgcgggccccagccacccagctttactttaagtggatgtaactagtaacgtgggccaggaacaggacgaacccccaggatccaataatca

SEQ ID NO: 11274 - DNA, 110 bp, synthetic construct
  source 1..110: mol_type = other DNA
tccagagaccgccccgctgtcagacagtctctctgcggttttcgtcgcgttgccagctgtcctacttcttttctgttgtgtcccgttccttacgttgcgctgcaccttcc

SEQ ID NO: 11275 - DNA, 110 bp, synthetic construct
  source 1..110: mol_type = other DNA
gaaatgtagtaattttagatgtacagaaacattgcaaagacagcagagcgtcttagatgctctcagcccagcttctccgagggctaacccctcacagagccacggcacag

SEQ ID NO: 11276 - DNA, 110 bp, synthetic construct
  source 1..110: mol_type = other DNA
atggccgctcttagaaccagctgagatgatgtgactgcagccaacccaggaaaaccagctgtcaaacacctgggaggcaaagtggtcggtaagacagcagaggcaacacg

SEQ ID NO: 11277 - DNA, 110 bp, synthetic construct
  source 1..110: mol_type = other DNA
cagctgtcaaacacctgggaggcaaagtggtcggtaagacagcagaggcaacacgaggccttgaaaacagccgtggaaatccgagtcgagcctctgaacaggcctcctgg

SEQ ID NO: 11278 - DNA, 110 bp, synthetic construct
  source 1..110: mol_type = other DNA
ggacatccactccggccctggtgccccatgaccattgggaggacattatgcatcctcactgttgactcaagtccattcctctgcctggagcagagcaagaagcactgcgt

SEQ ID NO: 11279 - DNA, 110 bp, synthetic construct
  source 1..110: mol_type = other DNA
tcactgttgactcaagtccattcctctgcctggagcagagcaagaagcactgcgtttcttttgggatcaggagactggatttgcctttaaagctcaggaagctgcccctg

SEQ ID NO: 11280 - DNA, 110 bp, synthetic construct
  source 1..110: mol_type = other DNA
gctctccgcacttccccagatggtgcctgagcccatatcttaccaacagcaggggcgtgttgagagcataagtacttctctccgggcttgcctggatctgtctcggggtg

SEQ ID NO: 11281 - DNA, 110 bp, synthetic construct
  source 1..110: mol_type = other DNA
cggagggcaaaaacagcgtttagtcgtgacccatcgactgtcgcgaaaacgttcaattacaaggaactttttttccatcgaggaaaggcttatattaagaggtgccggct

SEQ ID NO: 11282 - DNA, 110 bp, synthetic construct
  source 1..110: mol_type = other DNA
attacaaggaactttttttccatcgaggaaaggcttatattaagaggtgccggctttccagggtgaaatacaagagccagaccccgtgattttgtcagaaagccccagca

SEQ ID NO: 11283 - DNA, 110 bp, synthetic construct
  source 1..110: mol_type = other DNA
ttgagctcacagcccaacaggaaatgaagttacaggtggtgaatgagtgacaaccttcgcacagaaggggatgtgccatagcctgtctgatggtacctggctcctgtgcg

SEQ ID NO: 11284 - DNA, 110 bp, synthetic construct
  source 1..110: mol_type = other DNA
ttcgcacagaaggggatgtgccatagcctgtctgatggtacctggctcctgtgcggcggggccctccgtgcccggaggctgttcatcaaagtccagggatgtgtagctgc

SEQ ID NO: 11285 - DNA, 110 bp, synthetic construct
  source 1..110: mol_type = other DNA
ttcctatggtggctccgtgagttcagaacctgatatagctccacctttgcacaggaggttaaggatccggcattgccgtaaactgtagcatgggttctggatacagctca

SEQ ID NO: 11286 - DNA, 110 bp, synthetic construct
  source 1..110: mol_type = other DNA
agaaagagcagacccgtctctctgggggttcccagatccagagccacatcccacctttcacggatgggcagccaaggtcgggcagtggccctaaggcatgtgtcgtgaat

SEQ ID NO: 11287 - DNA, 110 bp, synthetic construct
  source 1..110: mol_type = other DNA
tttcacggatgggcagccaaggtcgggcagtggccctaaggcatgtgtcgtgaatttccctagaggattctcccagactgctgttcgtgccagatggggaagcccactgg

SEQ ID NO: 11288 - DNA, 110 bp, synthetic construct
  source 1..110: mol_type = other DNA
tcccccatgaagcagccaaaggattctgcagatttgagtcttaccaaaaagcaggttccaggagttcctgctgtggcacagtgggattggtggtgtcttgggagcactgg

SEQ ID NO: 11289 - DNA, 110 bp, synthetic construct
  source 1..110: mol_type = other DNA
ccaaaggattctgcagatttgagtcttaccaaaaagcaggttccaggagttcctgctgtggcacagtgggattggtggtgtcttgggagcactgggacacaggttctatc

SEQ ID NO: 11290 - DNA, 110 bp, synthetic construct
  source 1..110: mol_type = other DNA
agcctggtcccagccctaaggccccactcgctgtccacctggcttggcttcctctaattctcttcagcccaatcaaagggtaccccatgcatgtatatttgggcccaaat

SEQ ID NO: 11291 - DNA, 110 bp, synthetic construct
  source 1..110: mol_type = other DNA
aattctcttcagcccaatcaaagggtaccccatgcatgtatatttgggcccaaatccccttcctggctgagaaagcctgggcgatgtcttagccggattacttcctttgc

SEQ ID NO: 11292 - DNA, 110 bp, synthetic construct
  source 1..110: mol_type = other DNA
cacagttcagaacccccaccctctgcgccttcctccccctccttttcccttgcacttacgctgacagcttgcgtagattgagcgcccactaccggggcggggggcaattt

SEQ ID NO: 11293 - DNA, 110 bp, synthetic construct
  source 1..110: mol_type = other DNA
ttacgctgacagcttgcgtagattgagcgcccactaccggggcggggggcaatttaattctcatcctctccataaggtaggtcctatcacggtcactgtctcacagatgg

SEQ ID NO: 11294 - DNA, 110 bp, synthetic construct
  source 1..110: mol_type = other DNA
agccaccagggaactcccctttggtacctttttaggttgatatccattgtttttcatcatgaggtttacagagttgcaaaagatatgatttccagtgtatcgtaaatttc

SEQ ID NO: 11295 - DNA, 110 bp, synthetic construct; identical to SEQ ID NO: 11294
  source 1..110: mol_type = other DNA

SEQ ID NO: 11296 - DNA, 110 bp, synthetic construct
  source 1..110: mol_type = other DNA
tgcccctcccaggtcagcgtgccccctgcccagctctgccacaccagccccttctatggagaattaacctcccagtgaccaactgggtgactggagatgcaaaggattgg

SEQ ID NO: 11297 - DNA, 110 bp, synthetic construct
  source 1..110: mol_type = other DNA
atggagaattaacctcccagtgaccaactgggtgactggagatgcaaaggattggcctcaccctcttgatttttgcttttctgttgcctcaggaaactgatctctgagaa

SEQ ID NO: 11298 - DNA, 110 bp, synthetic construct
  source 1..110: mol_type = other DNA
aactagcatcctggaagataaactgcctctgtgacatttctaatcacatttaaaaagtactcccctggagttcccatcttggcgcagcggtaatgaatccgactaggaac

SEQ ID NO: 11299 - DNA, 110 bp, synthetic construct
  source 1..110: mol_type = other DNA
cctctgtgacatttctaatcacatttaaaaagtactcccctggagttcccatcttggcgcagcggtaatgaatccgactaggaaccttgagcttgcgggttccatccctg

SEQ ID NO: 11300 - DNA, 110 bp, synthetic construct
  source 1..110: mol_type = other DNA
acgacgggaactcctaaaatagttcttaatcaagtttggtgagtttttaaatcatcaaactcaggaacatttttggatgaaactccttttccatgtggggcatcttcttg

SEQ ID NO: 11301 - DNA, 110 bp, synthetic construct
  source 1..110: mol_type = other DNA
taatgctgagactgtttgtaaatattggttctagggaactagctctaacctgcagtttgtctgccgtgtgttggtaaacctgccggaacatcactctctgtaattccctt

SEQ ID NO: 11302 - DNA, 110 bp, synthetic construct
  source 1..110: mol_type = other DNA
caaagcccgttgtgttgttctgttaactggcactgcctggttactcaccttcccactccaccctcaccagatggaatcaagacgcccactgtgctcggaaacttctgtct

SEQ ID NO: 11303 - DNA, 110 bp, synthetic construct
  source 1..110: mol_type = other DNA
ctccaccctcaccagatggaatcaagacgcccactgtgctcggaaacttctgtctatagctgtgaaaactgttgtgcaaggccccatctcctctgcctcctcgagaatcc

SEQ ID NO: 11304 - DNA, 110 bp, synthetic construct
  source 1..110: mol_type = other DNA
tcacactggcgtctgcatttccaggccctggacaaccttgctgaacttctctcgatggtcactgctctgccttggctgtgagctgcgatgtcacttcctgtttccagtga

SEQ ID NO: 11305 - DNA, 110 bp, synthetic construct
  source 1..110: mol_type = other DNA
agggagtggagagcagctggacagatgcaggaaccccacaaggccaagagccctcccatttcagtgcagacacacagcagcttgatgtcctccctcttaccctcctccca

SEQ ID NO: 11306 - DNA, 110 bp, synthetic construct
  source 1..110: mol_type = other DNA
ccatttcagtgcagacacacagcagcttgatgtcctccctcttaccctcctcccaattactgtccagcttggagcttcccgctcaggctggagcaggtgaaaggcctgaa

SEQ ID NO: 11307 - DNA, 110 bp, synthetic construct
  source 1..110: mol_type = other DNA
aaataggaagagggtgttgctgtggtccagtggctgtcaaagtagagtgtcatatgctccgtcacagcttgatgcccgcactaatagactgtcccagtggggagggaccc

SEQ ID NO: 11308 - DNA, 110 bp, synthetic construct
  source 1..110: mol_type = other DNA
gctccgtcacagcttgatgcccgcactaatagactgtcccagtggggagggacccagctggggatctgcttgtccaactccctcctcttttgaccacgaaggagattggg

SEQ ID NO: 11309 - DNA, 110 bp, synthetic construct
  source 1..110: mol_type = other DNA
tgcttcactgcatcttccacccttgatttatggaaggctttgcccaggatgttttcagtgagacttgatgggcagcagagctatgccctgcatggccacaccttttctgt

SEQ ID NO: 11310 - DNA, 110 bp, synthetic construct
  source 1..110: mol_type = other DNA
agcttgtatatgtctgaaatagactttgcctaaaattttgtcttgaaagcagtttttgctgggtatggacttctacgttgacggggttttcttgttggtttgttttgttt

SEQ ID NO: 11311 - DNA, 110 bp, synthetic construct
  source 1..110: mol_type = other DNA
ttgctgggtatggacttctacgttgacggggttttcttgttggtttgttttgtttcctctcctcagtactttaaagctacggcctcagggtcttctggtttgcctggttt

SEQ ID NO: 11312 - DNA, 110 bp, synthetic construct
  source 1..110: mol_type = other DNA
gcatgggggcagcgccgaggatgcagcctcggagttgccagggactgcctctcctcctgagcgtgctccaaggccccggcttcctcttcgctgggaccagaggtgcctgt

SEQ ID NO: 11313 - DNA, 110 bp, synthetic construct
  source 1..110: mol_type = other DNA
cctgagcgtgctccaaggccccggcttcctcttcgctgggaccagaggtgcctgtggattatacagcaagaaggaacacagtccatctcagacgcactgcagggtttgtg

SEQ ID NO: 11314 - DNA, 110 bp, synthetic construct
  source 1..110: mol_type = other DNA
tgagcagagcctgggttcgagcccaggcagtcaaaccccagattcacactctagtgagaagcgagggctctcaggccactttctgcaccatgcacaatcaagaagtcagc

SEQ ID NO: 11315 - DNA, 110 bp, synthetic construct
  source 1..110: mol_type = other DNA
gagaagcgagggctctcaggccactttctgcaccatgcacaatcaagaagtcagctgcagccttgagttggggacagtggaagcaacccacctccaaaatccaggggtcc

SEQ ID NO: 11316 - DNA, 110 bp, synthetic construct
  source 1..110: mol_type = other DNA
aactacctcgctgctattttaagccgaagttgcagcttctagcgtcggtcggccattcggaaaagggttttggtctgtgtccctccggacaaagaaacgggtgtttgccc

SEQ ID NO: 11317 - DNA, 110 bp, synthetic construct
  source 1..110: mol_type = other DNA
tctctagggagcagacagtccctgctcaggaggaaatggatcttatccaaaccaggcaagcggatctagtgagagggggcgtccacccaccctcctgcaggggacgatgc

SEQ ID NO: 11318 - DNA, 110 bp, synthetic construct
  source 1..110: mol_type = other DNA
gcaagcggatctagtgagagggggcgtccacccaccctcctgcaggggacgatgcctggttcagcagggcctccggccaaggctgctgaggtcattctgactctgtttac

SEQ ID NO: 11319 - DNA, 110 bp, synthetic construct
  source 1..110: mol_type = other DNA
gtgtatgcgcacctctcctgcaacttgcaagaaacggatcatctgagcgcctcaccagcgcttctcgagagaagagggtgacagactgctcccgagctcgtgccgtgggg

SEQ ID NO: 11320 - DNA, 110 bp, synthetic construct
  source 1..110: mol_type = other DNA
cagcgcttctcgagagaagagggtgacagactgctcccgagctcgtgccgtggggtcccttaacttgggcaaagcaaaatcacacagcataatgtgagaaagataaacta

SEQ ID NO: 11321 - DNA, 110 bp, synthetic construct
  source 1..110: mol_type = other DNA
ttggggtgccagggaagaggggggactccaggacacttgggggcacgttcagagttggacgcatatgtgacgttttaatatgtatcattgctggctagtcagcacttggg

SEQ ID NO: 11322 - DNA, 110 bp, synthetic construct
  source 1..110: mol_type = other DNA
tggacgcatatgtgacgttttaatatgtatcattgctggctagtcagcacttgggtatatgtgacaacagaaatttctttcttctctctcttttttttgttttttgtttt

SEQ ID NO: 11323 - DNA, 110 bp, synthetic construct
  source 1..110: mol_type = other DNA
aaacatgtgtcacagcctattaaacagatttctcctgaaagaggccactggtgagtccagggtcgacatttgaggagctcgtcgatgggtgggtggcaggggcttctccc

SEQ ID NO: 11324 - DNA, 110 bp, synthetic construct
  source 1..110: mol_type = other DNA
cgtttgacgggcagtcgcccgtcttcctgctgtcagaagaactgccttttcggttgaacttcaggtctcccggcacccgcccacggccgctggggagggagaagctgagc

SEQ ID NO: 11325 - DNA, 110 bp, synthetic construct
  source 1..110: mol_type = other DNA
gaacttcaggtctcccggcacccgcccacggccgctggggagggagaagctgagctgtgactgctgcagtagccagagctggcggaaggaggatgctgtccctttaagac

SEQ ID NO: 11326 - DNA, 110 bp, synthetic construct
  source 1..110: mol_type = other DNA
tcacatctctggaaatagctctggtgaagggggtgggggctttctgcccgccccccaactcccgcaggtcctgcctagagccgcttcaggcgtttctacgctggagctca

SEQ ID NO: 11327 - DNA, 110 bp, synthetic construct; identical to SEQ ID NO: 11326
  source 1..110: mol_type = other DNA

SEQ ID NO: 11328 - DNA, 110 bp, synthetic construct
  source 1..110: mol_type = other DNA
gtaacaggggagcctttcgtctcagcccccacaaccgactgtcagcaaaggaattgagggaaccacatgcctccgtggccctggagggcggatggcagcattcactgctc

SEQ ID NO: 11329 - DNA, 110 bp, synthetic construct
  source 1..110: mol_type = other DNA
ggtctcccgggcaccgccacggccacctcgctcccttttctaggggttcttgagaagccgctggagaagaaatctgggcggaattacgggcccccaggcaccaagaagct

SEQ ID NO: 11330 - DNA, 110 bp, synthetic construct; identical to SEQ ID NO: 11329
  source 1..110: mol_type = other DNA

SEQ ID NO: 11331 - DNA, 110 bp, synthetic construct
  source 1..110: mol_type = other DNA
aaaaattagaactgaaatccaaattacataacaattataaggttacagacacgtggttataaaagaaaattgtaccctaacacgggcacgatcaatgaaagctgacacca

SEQ ID NO: 11332 - DNA, 110 bp, synthetic construct
  source 1..110: mol_type = other DNA
gttataaaagaaaattgtaccctaacacgggcacgatcaatgaaagctgacaccaaccccctcaaaccccaagtccccagcgtctgtccactctagggtgtctccagctg

SEQ ID NO: 11333 - DNA, 110 bp, synthetic construct
  source 1..110: mol_type = other DNA
ggcaggtgacttaacctctctgggcttcagttaccttatctttaaaatggagaggatagctacggctcactcagatgtcttggccatcaaaagagacaaggtgcaggaag

SEQ ID NO: 11334 - DNA, 110 bp, synthetic construct
  source 1..110: mol_type = other DNA
atagctacggctcactcagatgtcttggccatcaaaagagacaaggtgcaggaagtatgcttcattgtcaaacacttgttgcgcccttactgtgtgccaggccccatgct

SEQ ID NO: 11335 - DNA, 110 bp, synthetic construct
  source 1..110: mol_type = other DNA
ggtggatggcccagaacaatccacctggaaaatagaaaagagaacccagggagcagacagctgtctgtagactcagccaagcggggttcagagctttcctgtgtacctaa

SEQ ID NO: 11336 - DNA, 110 bp, synthetic construct
  source 1..110: mol_type = other DNA
gacagctgtctgtagactcagccaagcggggttcagagctttcctgtgtacctaatactgatgctccagagctccagctctcccagcctctccttaaggggtttttatgg

SEQ ID NO: 11337 - DNA, 110 bp, synthetic construct
  source 1..110: mol_type = other DNA
tatgctagtaaaaatagggtgcacattatacccacagacgctttctcctaggagaaaaaaagaaactggcagcaaccacatcgcagcctcacaatgggtgcccgagtcac

SEQ ID NO: 11338 - DNA, 110 bp, synthetic construct
  source 1..110: mol_type = other DNA
aaaaaagaaactggcagcaaccacatcgcagcctcacaatgggtgcccgagtcacagatgcttttcttttctaaaatccttctcaatgagcaaaggttccttttataacc

SEQ ID NO: 11339 - DNA, 110 bp, synthetic construct
  source 1..110: mol_type = other DNA
atgtggcccccagctctggcctggccttgaccttcagctgcatgtggacagtgttgactggaagcggtcccccttccaaccaaacacacgcaaaggccaaacaaggattt

SEQ ID NO: 11340 - DNA, 110 bp, synthetic construct
  source 1..110: mol_type = other DNA
tgtgtcaatattgatctaaaggcaaaaaaaaaatctatctggaagctcacttgagctctatattttaatacagactaaaaggcatacggttttaactataaggtgcgtta

SEQ ID NO: 11341 - DNA, 110 bp, synthetic construct
  source 1..110: mol_type = other DNA
ctctatattttaatacagactaaaaggcatacggttttaactataaggtgcgttaaattaggcaagaacaaaacaagcagcacacctcggtacatgaaatgaccttcaag

SEQ ID NO: 11342 - DNA, 110 bp, synthetic construct
  source 1..110: mol_type = other DNA
cttcaccacagccacagcaacaccagagctgagccgtgtctgcaaccaacaccaaccacagctcacggccaaaggcagatccacaacccactgagtgggaccagcggtag

SEQ ID NO: 11343 - DNA, 110 bp, synthetic construct
  source 1..110: mol_type = other DNA
gtgtctgcaaccaacaccaaccacagctcacggccaaaggcagatccacaacccactgagtgggaccagcggtagaactgtcattctcatggatactagttgagttcgtt

SEQ ID NO: 11344 - DNA, 110 bp, synthetic construct
  source 1..110: mol_type = other DNA
taaggacaggagagtccactcaactgggcaaccacgaggccatttagtccccagcaggggcagcagcttgcacagtgaacaatggtgcgagatcacctggaacatgaggt

SEQ ID NO: 11345 - DNA, 110 bp, synthetic construct
  source 1..110: mol_type = other DNA
aggggcagcagcttgcacagtgaacaatggtgcgagatcacctggaacatgaggtgactgacgaattcctaatgaagatgtcgcctgtgccaggggctcgggtgtttgac

SEQ ID NO: 11346 - DNA, 110 bp, synthetic construct
  source 1..110: mol_type = other DNA
acccccgaccccgactacggcccctgcagctttctgaacgctggaacaggcatagcctgcatcacccgaagaaaccagccagaagtcatttaatgacataaatggaagct

SEQ ID NO: 11347 - DNA, 110 bp, synthetic construct
  source 1..110: mol_type = other DNA
ctgtctcctccttcaacggggggagaggcgcagctcggcccgtatggctttgatgcagcatcagtggagctcgaaagctgagaacgggccaaggatgaacctgtcgcccc

SEQ ID NO: 11348 - DNA, 110 bp, synthetic construct
  source 1..110: mol_type = other DNA
tcctgtctctgcctttgcaaaccccagggtctcagggcaaacccttgtgcagcacctgcttcctggcactggccacttaaatgggggtccagagccccccagggagccca

SEQ ID NO: 11349 - DNA, 110 bp, synthetic construct
  source 1..110: mol_type = other DNA
ctgcttcctggcactggccacttaaatgggggtccagagccccccagggagcccaaggttaagcctccgtccctctcagcatggcgctctcccggggtcggagggcactc

SEQ ID NO: 11350 - DNA, 110 bp, synthetic construct
  source 1..110: mol_type = other DNA
accacagcttcgcctctctgctgcagaccgggccctgggctctctgcggccaccgctgcatctgccctgccttctcctctccgtcacagtcgcaggcatcgccccttggg

SEQ ID NO: 11351 - DNA, 110 bp, synthetic construct
  source 1..110: mol_type = other DNA
tccagcttgtctcctgggacgtgaagatcccagtcggaagacgtcgtctgagggaagttgctggaggcaagtcagaccagcttgtgagagccgaatccatgcatctcttc

SEQ ID NO: 11352 - DNA, 110 bp, synthetic construct
  source 1..110: mol_type = other DNA
agttgctggaggcaagtcagaccagcttgtgagagccgaatccatgcatctcttcccaccactaccatctgagaagtcctggccctaagcttcaaattggccatcggagg

SEQ ID NO: 11353 - DNA, 110 bp, synthetic construct
  source 1..110: mol_type = other DNA
tgcacctctaggtgccgttggaacccacaggggaaaagagctcccaccaaggttgcctcgaaaatgtcagcccttatccaggcctgccaggggccacgcccgttccctgt

SEQ ID NO: 11354 - DNA, 110 bp, synthetic construct
  source 1..110: mol_type = other DNA
cctcctcgacctcaaaagatcttttcaaggctgaaaggtaaagagaggagaacgtgatgagcagcgggctccggaaccacggggcgcatcctgctaacggggaatcctgg

SEQ ID NO: 11355 - DNA, 110 bp, synthetic construct
  source 1..110: mol_type = other DNA
ggcgacatcaggatcaggacaccctgaagacctcccaccctggaaaaagttgcactcagtccttctgaagctcaggtccccatattctgcgacgcctcacacggcgggca

SEQ ID NO: 11356 - DNA, 110 bp, synthetic construct
  source 1..110: mol_type = other DNA
gaaagcctgcagtcagacgcacgaggctgggatccagaccccggcaggcgcgcgcggcgggccgagggcagtgaccttcctttccaggtctcagtgtccccgtctgcaga

SEQ ID NO: 11357 - DNA, 110 bp, synthetic construct
  source 1..110: mol_type = other DNA
ggcgggccgagggcagtgaccttcctttccaggtctcagtgtccccgtctgcagaatggggactccatctctgggacttagattaaatgaggtcacacgttgtgggcact

SEQ ID NO: 11358 - DNA, 110 bp, synthetic construct
  source 1..110: mol_type = other DNA
gtcaccgccaacagatttggggaggggagaggctgtctcaggagggcgtttatacagacaaacaggaagctggggtgaaagggccgagaggatgcttcaggctctgctct

SEQ ID NO: 11359 - DNA, 110 bp, synthetic construct
  source 1..110: mol_type = other DNA
ttgccaataattgacctaatctgataagcatccaccaatttatacgaaacggaaaacagaggaacatgttaaatgattccaggagaaaataatcagccagctatagacca

SEQ ID NO: 11360 - DNA, 110 bp, synthetic construct
  source 1..110: mol_type = other DNA
cccttttgtctctggtggtttccaggttggggatagtcttggcaattacatatccaggacgcaggaggcttcttgtgctactcgtggtggaagcgtgccaggctgaaaag

SEQ ID NO: 11361 - DNA, 110 bp, synthetic construct
  source 1..110: mol_type = other DNA
aggacgcaggaggcttcttgtgctactcgtggtggaagcgtgccaggctgaaaagccttgcatgcccagccctctggcatcaccttcttcctgcatcactttccgaatgg

SEQ ID NO: 11362 - DNA, 110 bp, synthetic construct
  source 1..110: mol_type = other DNA
gatggcgcaggtccagaacttacccgagggggcagtgatacccttcctggaaccgtggcgcgcagctgctgagacgggttctgctttggggagagtctctttttttcctt

SEQ ID NO: 11363 - DNA, 110 bp, synthetic construct
  source 1..110: mol_type = other DNA
aagttgcctaaatgtaattatctggctttatgcttcgttaaagaaaccagacacaagagagtccattctgtgtgatgccattcctgtgacattctagaataggccaagct

SEQ ID NO: 11364 - DNA, 110 bp, synthetic construct
  source 1..110: mol_type = other DNA
agagagtccattctgtgtgatgccattcctgtgacattctagaataggccaagctaatctatgggacagaaatcagaggaggggttgtgactggggtgggagcgggaggg

SEQ ID NO: 11365 - DNA, 110 bp, synthetic construct
  source 1..110: mol_type = other DNA
ccagcgtttcacgggtcaaagcaagtcccaaggtcaagctcggttccaatgggacgaaggggtatgctctgcttgtagtgtatgcagtgagtcgttgctgaacagtaatt

SEQ ID NO: 11366 - DNA, 110 bp, synthetic construct
  source 1..110: mol_type = other DNA
gaaggggtatgctctgcttgtagtgtatgcagtgagtcgttgctgaacagtaatttaccttagcacctcccacgcctgaaaggcggcctgcattccagcttgaatagtcc

SEQ ID NO: 11367 - DNA, 110 bp, synthetic construct
  source 1..110: mol_type = other DNA
gagccgtagaaaatattagtaccagaaaaaactcaagaaaccaccaaatctgcgttcacagactcagctccgggccaggcaggtggtggagctgggtgggggccaccata

SEQ ID NO: 11368 - DNA, 110 bp, synthetic construct
  source 1..110: mol_type = other DNA
gccctgatgtgtcctgttagttccatcctttccccaggagagagagaaggacacggtcattgtccagagtcagcagtgactctggcgctcctgcaggaagttttcctgag

SEQ ID NO: 11369 - DNA, 110 bp, synthetic construct
  source 1..110: mol_type = other DNA
gtcattgtccagagtcagcagtgactctggcgctcctgcaggaagttttcctgagggcagctcaacaggaaaggaataaggctgatgcagccagcgaagctgggagagga

SEQ ID NO: 11370 - DNA, 110 bp, synthetic construct
  source 1..110: mol_type = other DNA
ctgctctgatccaccctgtcctctgtcccgaccctctggcttcagcgaggctgcagccaggcctctctcccgctctcaccattccctccccactctcagaactgaagaat

SEQ ID NO: 11371 - DNA, 110 bp, synthetic construct
  source 1..110: mol_type = other DNA
gccaggcctctctcccgctctcaccattccctccccactctcagaactgaagaatccctcattccaccaactccagcaaaagggacaggtttagatccattagctaaacc

SEQ ID NO: 11372 - DNA, 110 bp, synthetic construct
  source 1..110: mol_type = other DNA
acacaacctgacccccaaatttgcatccttcaacctgcatttgatggacaccccagggcgccaactctcaagcagaaaagtccggggactctgcctgatggacgtgcctg

SEQ ID NO: 11373 - DNA, 110 bp, synthetic construct
  source 1..110: mol_type = other DNA
gggcgccaactctcaagcagaaaagtccggggactctgcctgatggacgtgcctggctgaggtgccacggagagaatgtggaagttcccgggccagggagggacccaagc

SEQ ID NO: 11374 - DNA, 110 bp, synthetic construct
  source 1..110: mol_type = other DNA
ccttcaacaggagcaatgggggcatccccaggcatgttgagaaatattaaatagaaagctagaaaatgcaccaggacgcccaacagcacgactggattccgaccaaaacg

SEQ ID NO: 11375 - DNA, 110 bp, synthetic construct
  source 1..110: mol_type = other DNA
gttgagtaaaccaaaattattcaggcttaccttctcacctggtaagtagaccataattggactttggggtttttctgcatcaaaaagtaaactgtagttaaaatgtcttc

SEQ ID NO: 11376 - DNA, 110 bp, synthetic construct
  source 1..110: mol_type = other DNA
ggcttcacaaatctctcagaggttcagctgtcatgtgctttaggaccttagctaagagtgcgcagcggaactggagttttgccgtaaaagctgtaaaaagccctgtgtag

SEQ ID NO: 11377 - DNA, 110 bp, synthetic construct
  source 1..110: mol_type = other DNA
gagtgcgcagcggaactggagttttgccgtaaaagctgtaaaaagccctgtgtaggaggcgtctgagcccttggctgtaggttccttgaactgtgtgtagcatttccaca

SEQ ID NO: 11378 - DNA, 110 bp, synthetic construct
  source 1..110: mol_type = other DNA
gctcacatatatacaagtgggacccttactgcccaaccacctacaagcacggcgcccccacccaattaccctaaaagtgggaccttcctgtcaagtacacacaaaagcgg

SEQ ID NO: 11379 - DNA, 110 bp, synthetic construct
  source 1..110: mol_type = other DNA
tcccctctggagggtgcagtaccagctctggggggcaggtggcagcatctctacgctcgtgcctcagaacgcccggcttttctttttcgggttttcctagctattcctac

SEQ ID NO: 11380 - DNA, 110 bp, synthetic construct
  source 1..110: mol_type = other DNA
gcagagcaacatccgacttttaacacttcggggagtcttattactaaaataagccagcctcagagttcccattgcggcacagcggaaacgaatccgactaggaaccatga

SEQ ID NO: 11381 - DNA, 110 bp, synthetic construct; identical to SEQ ID NO: 11380
  source 1..110: mol_type = other DNA

SEQ ID NO: 11382 - DNA, 110 bp, synthetic construct
  source 1..110: mol_type = other DNA
cccccggggcaggaacacctccaggagggtggctccgggcccgacacaatttcagaacaggcacgataggaaaaggccccacgctcattctcctcggggcagagccatcc

SEQ ID NO: 11383 - DNA, 110 bp, synthetic construct
  source 1..110: mol_type = other DNA
aacaggcacgataggaaaaggccccacgctcattctcctcggggcagagccatccccttcccgagaaccggggagccctcaggacaccccggggaccgaggctgcccggg

SEQ ID NO: 11384 - DNA, 110 bp, synthetic construct
  source 1..110: mol_type = other DNA
cacccgctcccctcactcctttccccagaggcaacccaccaacacatacacgcatgtctccctggttctcttcctacaccgttgcattcgcgcacgcgtctgtgcgtgtg

SEQ ID NO: 11385 - DNA, 110 bp, synthetic construct
  source 1..110: mol_type = other DNA
tttccgcggagccgcgatgggaactccgtgatagcatgatttttaatgaatgcctgtaatcccatcagatagatgaacctgagtttctttgatcaatctcctcttttgac

SEQ ID NO: 11386 - DNA, 110 bp, synthetic construct; identical to SEQ ID NO: 11385
  source 1..110: mol_type = other DNA

SEQ ID NO: 11387 - DNA, 110 bp, synthetic construct
  source 1..110: mol_type = other DNA
gggcgtgctgattgccactcgcccccttcagggcagcactgaggacacacgtctgtgtgtacacgtgggcacacgcatgtctgagtatgtccctgcctgctctgtgtatg

SEQ ID NO: 11388 - DNA, 110 bp, synthetic construct
  source 1..110: mol_type = other DNA
tgtgtacacgtgggcacacgcatgtctgagtatgtccctgcctgctctgtgtatgcgttgagacgtgtgagttcgtctcagtccctccacctccagtccagcacctcaga

SEQ ID NO: 11389 - DNA, 110 bp, synthetic construct
  source 1..110: mol_type = other DNA
tgcctcttctagtctctccttttctcctccatcccgatgcttgcaaaacgcaaatatgtttcttgctactgcttcactttttataggctggcgtcccagctctgtaacca

SEQ ID NO: 11390 - DNA, 110 bp, synthetic construct
  source 1..110: mol_type = other DNA
atgtttcttgctactgcttcactttttataggctggcgtcccagctctgtaaccatcacccagggccctttggggtctgagggctgcccgtctcgcttgctccatctttg

SEQ ID NO: 11391 - DNA, 110 bp, synthetic construct
  source 1..110: mol_type = other DNA
ccatggatcagcaaagattgttatcagctggtttgatacacgtagctgcaggtccgcaaggttttgtgcagcccggttttggaacatctggcttcatacaacctggcaca

SEQ ID NO: 11392 - DNA, 110 bp, synthetic construct
  source 1..110: mol_type = other DNA
gcaaggttttgtgcagcccggttttggaacatctggcttcatacaacctggcacagagcagcctggcttggtccagcctggtgcatctcagcctggcctggtgcagcctg

SEQ ID NO: 11393 - DNA, 110 bp, synthetic construct
  source 1..110: mol_type = other DNA
acccaaaggaacctagggaattggccccagacctgctcattttgctgctaagaaaatggaggcccagccaaatgaattggttcggccagggctacccagcaagttcatgt

SEQ ID NO: 11394 - DNA, 110 bp, synthetic construct
  source 1..110: mol_type = other DNA
atggaggcccagccaaatgaattggttcggccagggctacccagcaagttcatgttctcactgagccatcaaccattctcaaggaatcggattgcgaacttgcccttgga

SEQ ID NO: 11395 - DNA, 110 bp, synthetic construct
  source 1..110: mol_type = other DNA
gatccccagccagtccccgttgggtcggggacccagtgtggctgcacgtgtggcttaggtcgcagctacggctcgaatctgatccgtggccccggagctccatgtgcctt

SEQ ID NO: 11396 - DNA, 110 bp, synthetic construct
  source 1..110: mol_type = other DNA
aaagccgagcaggcggtgcgaggacacgaacacacccacgcagctggactcctctctcgtcctctctttacccacttaatgattgtctttcttttaacatatgatttgat

SEQ ID NO: 11397 - DNA, 110 bp, synthetic construct
  source 1..110: mol_type = other DNA
ccacgcagctggactcctctctcgtcctctctttacccacttaatgattgtctttcttttaacatatgatttgatttttttggttttttttttttttttttttttttttg

SEQ ID NO: 11398 - DNA, 110 bp, synthetic construct
  source 1..110: mol_type = other DNA
ctgtgaatgaagctgctataaacattcctgtgcaaggattttggggggggggttgttttgttttgttttgttttgactgtactcacaccatgtggaaattccagggccag

SEQ ID NO: 11399 - DNA, 110 bp, synthetic construct
  source 1..110: mol_type = other DNA
gggggggttgttttgttttgttttgttttgactgtactcacaccatgtggaaattccagggccagggattgacttgccacagaagcgacctgagccactgcagtgacaac

SEQ ID NO: 11400 - DNA, 110 bp, synthetic construct
  source 1..110: mol_type = other DNA
cagagaccagctcctcagccaccagctacaactcggagttcagcaagcgcctgctgagcacctatatctgtgagtgctcctgcgcccgggctccctgcctctctctgccg

SEQ ID NO: 11401 - DNA, 110 bp, synthetic construct
  source 1..110: mol_type = other DNA
gagcacctatatctgtgagtgctcctgcgcccgggctccctgcctctctctgccgctcccctttgtgctctgctgctgttcccgtcctgctcctgagcgcccctgacctt

SEQ ID NO: 11402 - DNA, 110 bp, synthetic construct
  source 1..110: mol_type = other DNA
acagctttgggggccgtcatccaacagccacagaggcaggagctgctggcacaggcatagaacatgagtctaagacaggtcccaaaatggagccgaggaccgtccgcctt

SEQ ID NO: 11403 - DNA, 110 bp, synthetic construct
  source 1..110: mol_type = other DNA
catagaacatgagtctaagacaggtcccaaaatggagccgaggaccgtccgccttaaggctttgggcctgcaccctggacacagtggacagggagccttcctggctgtta

SEQ ID NO: 11404 - DNA, 110 bp, synthetic construct
  source 1..110: mol_type = other DNA
aggacactggccacaggccatgctcgaatctcctgagaaggacagagctgtgtcctggtgactgggtgacatcactcctgggagatgaaagttggttcttgtgggtgaaa

SEQ ID NO: 11405 - DNA, 110 bp, synthetic construct
  source 1..110: mol_type = other DNA
tggtgactgggtgacatcactcctgggagatgaaagttggttcttgtgggtgaaaaaaaatttattcattttatggataaatcacagatatgcatacacaaaagacgtct

SEQ ID NO: 11406 - DNA, 110 bp, synthetic construct
  source 1..110: mol_type = other DNA
agtaaaaggaatccaaattggaaaagaggtaaaactatcactgtttgcaaatgatatgatactaagaaaaccctaaagacagaaccagaaaactggtgtctttgccaaat

SEQ ID NO: 11407 - DNA, 110 bp, synthetic construct; identical to SEQ ID NO: 11406
  source 1..110: mol_type = other DNA

SEQ ID NO: 11408 - DNA, 110 bp, synthetic construct
  source 1..110: mol_type = other DNA
cggaactgaatgatgagactagggacgtggaggatgaccccagcttcccatttcagctgtggaggagcgcaagttccccgcctgaggtaaacagagtctctaaggggcaa

SEQ ID NO: 11409 - DNA, 110 bp, synthetic construct
  source 1..110: mol_type = other DNA
gctgtggaggagcgcaagttccccgcctgaggtaaacagagtctctaaggggcaaaaacatgcgcacgtcagcagttcttttttttcctctgccgtcagcagctcagcaa

SEQ ID NO: 11410 - DNA, 110 bp, synthetic construct
  source 1..110: mol_type = other DNA
gggcttgggtgagtccatggcttctcccagcagtgacagtcggtgggggctgccgtgggggaggccttagactttgcagcaagcagacctgggcgtgtagccttcccact

SEQ ID NO: 11411 - DNA, 110 bp, synthetic construct
  source 1..110: mol_type = other DNA
agcttgttctcagcaggtgcctgcagaagggtttagggtctgcgtcatgtctacaacttacttgaatagctgagcaaacaaaagtagaccgaacataattctctctcgct

SEQ ID NO: 11412 - DNA, 110 bp, synthetic construct
  source 1..110: mol_type = other DNA
gagcgtcagggacaggggaactcggggaccccaggccccctgggcccgccctctctgggaactgccccctcgacccatttccctttctctctcttttgctttttagggcc

SEQ ID NO: 11413 - DNA, 110 bp, synthetic construct
  source 1..110: mol_type = other DNA
tgggaactgccccctcgacccatttccctttctctctcttttgctttttagggccacacccacggcctatagacgtttccagggtagggatggaattgaatcggagctgt

SEQ ID NO: 11414 - DNA, 110 bp, synthetic construct
  source 1..110: mol_type = other DNA
ttgggaatctctgcttgttcagacccctcatttgtgtcataggcacccctgtgactttctaaggccctggagaatccaacaacgggaagctgtgcctctgggcggctcta

SEQ ID NO: 11415 - DNA, 110 bp, synthetic construct
  source 1..110: mol_type = other DNA
tttctaaggccctggagaatccaacaacgggaagctgtgcctctgggcggctctagctcgttccgttctgttttagagtggaattcctctgccctctgctgtgaacgggc

SEQ ID NO: 11416 - DNA, 110 bp, synthetic construct
  source 1..110: mol_type = other DNA
tgagctcgctcaggaacagctcgaccatggccttgacggctcttgcccggaccgtgtgcagcaccagctgctcccccttcagagacagctccagggtggagtcagccggg

SEQ ID NO: 11417 - DNA, 110 bp, synthetic construct
  source 1..110: mol_type = other DNA
gtgcagcaccagctgctcccccttcagagacagctccagggtggagtcagccgggcagtccacgcccagcacctcagcaaagctgcgcagagggtgggggcgtcagccgg

SEQ ID NO: 11418 - DNA, 110 bp, synthetic construct
  source 1..110: mol_type = other DNA
tggaaaggcggaagagggcgtaaaaaaaggcagggcacgctccaaactgctgaaggttgaaaagcccctccggctccatccacctggacacaggggacacgatcagcaca

SEQ ID NO: 11419 - DNA, 110 bp, synthetic construct
  source 1..110: mol_type = other DNA
agaagaagttgttggggcttgtggggaggagggaagagaagcactgatccttgatggctggggtttggctgggtagaaaaagggaagagtggcgtctcagatgcaggctt

SEQ ID NO: 11420 - DNA, 110 bp, synthetic construct
  source 1..110: mol_type = other DNA
cggttgctgggaggacaaagggcaggctcctgaccctcagccgtgctgtgaggtcagagaaaggcagcttggagtcaggagagtcagggctttatttggagccctgtgac

SEQ ID NO: 11421 - DNA, 110 bp, synthetic construct
  source 1..110: mol_type = other DNA
agagaaaggcagcttggagtcaggagagtcagggctttatttggagccctgtgaccttgggcagggcccttaacctctgatcccttcacccatccgcttaaaacacaagc

SEQ ID NO: 11422 - DNA, 110 bp, synthetic construct
  source 1..110: mol_type = other DNA
gggatcgaacccatgtcctcatggatactcgtcggattcctttctgctgagtcacaacgagaactcccgttctcattcttgctgaaagtggctgagtctggttctcccgc

SEQ ID NO: 11423 - DNA, 110 bp, synthetic construct
  source 1..110: mol_type = other DNA
aacgagaactcccgttctcattcttgctgaaagtggctgagtctggttctcccgctcctggattaaattcttctgaggttgaggttgcctgtgggttttgtttcatggtg

SEQ ID NO: 11424 - DNA, 110 bp, synthetic construct
  source 1..110: mol_type = other DNA
gcacattgcactagatttatgtccttacctgctgcccagaaatcccaactgctcaggggcactgtcggcgagatgttgggtctggaggtggtgagattacagacctgctc

SEQ ID NO: 11425 - DNA, 110 bp, synthetic construct
  source 1..110: mol_type = other DNA
ggggcactgtcggcgagatgttgggtctggaggtggtgagattacagacctgctcaaatcgaatcaccagaccctattgcttcaacagtgctcagccccatctactagat

SEQ ID NO: 11426 - DNA, 110 bp, synthetic construct
  source 1..110: mol_type = other DNA
gtaaagtgtttttgccacttgcttgagaacaatagattatgttctgaggaactctgagaatatcgggtttacaaaaacctcttgggaaagctgattacgaagctttctga

SEQ ID NO: 11427 - DNA, 110 bp, synthetic construct
  source 1..110: mol_type = other DNA
agggcttcccaattgaccacagaggcccagctaggccctcagaatccgctctctgtcccttggagctggcaggtaccagtaaaagggttgagcagcagctctcctgcagg

SEQ ID NO: 11428 - DNA, 110 bp, synthetic construct
  source 1..110: mol_type = other DNA
aaggatgtatcacatgggctggctcctttgtctcttcccctgaagagtctttatctcagcaggtggctggatatactcaccgccgtgacagatgttagggtctgtccctc

SEQ ID NO: 11429 - DNA, 110 bp, synthetic construct
  source 1..110: mol_type = other DNA
tcagcaggtggctggatatactcaccgccgtgacagatgttagggtctgtccctccaagccctctgagctgcaccaggatggagactgggtgtctcttgtacgggacaca

SEQ ID NO: 11430 - DNA, 110 bp, synthetic construct
  source 1..110: mol_type = other DNA
catgtggacatgtagggagacacatactccgtgggaaagcacaggctttgaacctcaagtactgtggctcctcctgctgccctacggtgagcagccacaacctccccatt

SEQ ID NO: 11431 - DNA, 110 bp, synthetic construct
  source 1..110: mol_type = other DNA
atcggatctgcctttgaagaaggaaattcctcagcctccctgagctaccggcccacaagctctggaatcaggacttttcctctaagcagggtagagagccaagctcagga

SEQ ID NO: 11432 - DNA, 110 bp, synthetic construct
  source 1..110: mol_type = other DNA
aagtgacctcccccccaccaaaaaagcacttagcatagtccccggtgattaaagtattgagttattagtactactttcagaataagtaatatttggactgatctatgagg

SEQ ID NO: 11433 - DNA, 110 bp, synthetic construct
  source 1..110: mol_type = other DNA
acatcctgcatctccaggccatcccctcttctcaggctttctgtaacttcaggtacctccccgtgctctccgcagcaatagctccaggcctccccgtgctgctagtcttt

SEQ ID NO: 11434 - DNA, 110 bp, synthetic construct
  source 1..110: mol_type = other DNA
gagggtgtggggactaggaaagaagggtggtggggtgatggagagaagttggacctgagctccaagggccttgagtgctgggttaaggactttatatggaggtcaagcga

SEQ ID NO: 11435 - DNA, 110 bp, synthetic construct
  source 1..110: mol_type = other DNA
tgagctccaagggccttgagtgctgggttaaggactttatatggaggtcaagcgaccaagtgtggtgagacaggctcaggtctgggctttaggaaggtgccctgagccag

SEQ ID NO: 11436 - DNA, 110 bp, synthetic construct
  source 1..110: mol_type = other DNA
gaaatcagggcggactgtgaaacacgaagatcaggaaggaggtttaaaggtctatgtccaccctccaccgtgcatttcatttcagaaactgcacttgggagaagaccatg

SEQ ID NO: 11437 - DNA, 110 bp, synthetic construct
  source 1..110: mol_type = other DNA
aggattgagagacaggaaggcattttgggctctggctgtaaatggaggcccttggcaccatgtggttactgctctgactggccggctctctgaggatacagttgctcttt

SEQ ID NO: 11438 - DNA, 110 bp, synthetic construct
  source 1..110: mol_type = other DNA
caccatgtggttactgctctgactggccggctctctgaggatacagttgctctttggagaagggcattgtttcctgcaccaggcagatcttgggcttggtcaccagctga

SEQ ID NO: 11439 - DNA, 110 bp, synthetic construct
  source 1..110: mol_type = other DNA
agcctccctctggtgctgcagctttggcctgggaaggaatcagccgctccctttcaccttgccctcccttgtgtcagctcccatgccactcctctgccatcatatgccat

SEQ ID NO: 11440 - DNA, 110 bp, synthetic construct
  source 1..110: mol_type = other DNA
ccctcccgactaggagccaggggagataaacaggagtaatcctcagctgttgcccttgggactctgggactcgggcaggaggtggtggaggggacgtgaacagatggatg

SEQ ID NO: 11441 - DNA, 110 bp, synthetic construct
  source 1..110: mol_type = other DNA
ttgggactctgggactcgggcaggaggtggtggaggggacgtgaacagatggatgattcagaggattcggataccgtgtgttcagaggaggaaaggacagggaggagatg

SEQ ID NO: 11442 - DNA, 110 bp, synthetic construct
  source 1..110: mol_type = other DNA
ctaagagccttcagtgggagcaggccctgctgacaccttgatttctggcctctagctatggtttgtgttggcaccacccagaccctctttgtcctgtggcaggttgggaa

SEQ ID NO: 11443 - DNA, 110 bp, synthetic construct
  source 1..110: mol_type = other DNA
ctctctctttctccggggcacttaggacctccttgcgtatttgatgcttgtttattgtctacctcccctgccctccaggagactgtgagcttcttgaggatgggagctta

SEQ ID NO: 11444 - DNA, 110 bp, synthetic construct
  source 1..110: mol_type = other DNA
tgtctacctcccctgccctccaggagactgtgagcttcttgaggatgggagcttaatttgttttgcttatcggtccctagcaccgcatctgccaggttgtaggggttcaa

SEQ ID NO: 11445 - DNA, 110 bp, synthetic construct
  source 1..110: mol_type = other DNA
cccacccagtaattcatgggacaccgggcaaagtgttcacaaatatctttcctcggaagtagagataattatagctgggtcccctagaccttcccgctggcccgtgactc

SEQ ID NO: 11446 - DNA, 110 bp, synthetic construct
  source 1..110: mol_type = other DNA
gtggatacacatccattctctttcagtttgtttggggttttttttgctttttatggctgcacctgcagcatatggaggttccaaggtcgaattagaactacagctgctga

SEQ ID NO: 11447 - DNA, 110 bp, synthetic construct
  source 1..110: mol_type = other DNA
gctttttatggctgcacctgcagcatatggaggttccaaggtcgaattagaactacagctgctgaccaacgtcacagccacagcaacataggatctgagccgcgtctgtg

SEQ ID NO: 11448 - DNA, 110 bp, synthetic construct
  source 1..110: mol_type = other DNA
ggggatggatgacacaacctgatactcaagcacagaagaatttctctttcctggtctcataggtaagagcagaagctaacgaccagagcatatctgtggcaattcttcaa

SEQ ID NO: 11449 - DNA, 110 bp, synthetic construct
  source 1..110: mol_type = other DNA
ctcatcagagggagctcccagtttgcaaaagccttggggtgattggtgggcagtgggaggggattatgaagggcccgggaccctgtgcctgggggctgagactttgcaga

SEQ ID NO: 11450 - DNA, 110 bp, synthetic construct
  source 1..110: mol_type = other DNA
ggaggggattatgaagggcccgggaccctgtgcctgggggctgagactttgcagaggaaattgctcaggaacccagatgggtgatggcttcttttctgtggaaatcaact

SEQ ID NO: 11451 - DNA, 110 bp, synthetic construct
  source 1..110: mol_type = other DNA
aagagagagaggaaggaggaaggtaggaagaaggaaagagttcccatcatggctagtcagaaatgaatctgactagtatccaggaggttgcgggttcattccccggcctc

SEQ ID NO: 11452 - DNA, 110 bp, synthetic construct; identical to SEQ ID NO: 11451
  source 1..110: mol_type = other DNA

SEQ ID NO: 11453 - DNA, 110 bp, synthetic construct
  source 1..110: mol_type = other DNA
cgtcctcctggatactagtcaggttggttaaccactgagccacgataagaactccgggatggctcttttcagaaggatcctcgtctcatgccacatcctgctccccaaat

SEQ ID NO: 11454 - DNA, 110 bp, synthetic construct
  source 1..110: mol_type = other DNA
gggatggctcttttcagaaggatcctcgtctcatgccacatcctgctccccaaatcttggggtgcaatggagggtaagccatgctgagctgtcacctggctgacacccta

SEQ ID NO: 11455 - DNA, 110 bp, synthetic construct
  source 1..110: mol_type = other DNA
ggcgttgctctggctgtggtgtaggccagctccgattcgacccctagcctcctagcctgggaacttctacatgctgaggctttggccctaaaaccagacaaaaaaaaaaa

SEQ ID NO: 11456 - DNA, 110 bp, synthetic construct
  source 1..110: mol_type = other DNA
cctgggaacttctacatgctgaggctttggccctaaaaccagacaaaaaaaaaaaaaaaaaaaaaaaagccaccctggagggtagcgctctgcccttacacccttcaccc

SEQ ID NO: 11457 - DNA, 110 bp, synthetic construct
  source 1..110: mol_type = other DNA
gatactagttggattcgtttccaaagagccatgacgggaatgccattcttcacctcttcctactgtagcctcctgattccccaggtgcattgcttcagctgcttcctgga

SEQ ID NO: 11458 - DNA, 110 bp, synthetic construct
  source 1..110: mol_type = other DNA
cttcctactgtagcctcctgattccccaggtgcattgcttcagctgcttcctggatactcccaatgggctaggcacgaggtgaaaggaagctgagtccatctctgcctcc

SEQ ID NO: 11459 - DNA, 110 bp, synthetic construct
  source 1..110: mol_type = other DNA
cctttctgattttaatatctccatgcggttttgatgtctagccaggttttgaaccacagggctagggaattgaaaaagcttaagcagctctctctctcttaaaaaaattt

SEQ ID NO: 11460 - DNA, 110 bp, synthetic construct
  source 1..110: mol_type = other DNA
gtctagccaggttttgaaccacagggctagggaattgaaaaagcttaagcagctctctctctcttaaaaaaattttttttagggctgcacccatggcatatggaagtccc

SEQ ID NO: 11461 - DNA, 110 bp, synthetic construct
  source 1..110: mol_type = other DNA
cgttttattttgagcgaattttagactcacttgcatttgtaactgaggacacggctgaggtgatcagcaaaaccggtgtcaccgggacatctggagttggtcagctgcgg

SEQ ID NO: 11462 - DNA, 110 bp, synthetic construct
  source 1..110: mol_type = other DNA
tgaggtgatcagcaaaaccggtgtcaccgggacatctggagttggtcagctgcgggaagtacccaccgcactttgtcctccacagcgagggggtctggcaggtgggctct

SEQ ID NO: 11463 - DNA, 110 bp, synthetic construct
  source 1..110: mol_type = other DNA
gcttctttgatgatcgctcagcccggcctccccttccccacggtctccccgtccgtcccccaagaggtctgagatccaccactttggacattcagattcatctcaaccag

SEQ ID NO: 11464 - DNA, 110 bp, synthetic construct
  source 1..110: mol_type = other DNA
tttgcaccaatcctctgagatggatgtcatcacccccaaacataaggaaacgggggtgtcgtgtttaccttaaggacagcgatctactgaagagctgggatctgaaccca

SEQ ID NO: 11465 - DNA, 110 bp, synthetic construct
  source 1..110: mol_type = other DNA
gtgtcgtgtttaccttaaggacagcgatctactgaagagctgggatctgaacccaggcagtgacggcgaatgccttggtctggactgaaactgacctgacaaatgccctc

SEQ ID NO: 11466 - DNA, 110 bp, synthetic construct
  source 1..110: mol_type = other DNA
tccaacccgcagccccatccgtcaccccaaggatggcagtgggcatctcttgttcctgctcccggtgttagttccccagagctgccctagccaatgaccactgactgggt

SEQ ID NO: 11467 - DNA, 110 bp, synthetic construct
  source 1..110: mol_type = other DNA
ctgctcccggtgttagttccccagagctgccctagccaatgaccactgactgggtgatttcagacaccagaaatggatctggatgccagaggtcctgctccttccttttt

SEQ ID NO: 11468 - DNA, 110 bp, synthetic construct
  source 1..110: mol_type = other DNA
atccttctctgctctcccatctccttgcgcctggaatctccttcccatccttttaggactccacgctgtgcctggcagcatgcggccccatgaggagctctgcacaaaca

SEQ ID NO: 11469 - DNA, 110 bp, synthetic construct
  source 1..110: mol_type = other DNA
ggactccacgctgtgcctggcagcatgcggccccatgaggagctctgcacaaacaggagcccttggctcagaggcacccacctttttagggcacgaccctctaccctccc

SEQ ID NO: 11470 - DNA, 110 bp, synthetic construct
  source 1..110: mol_type = other DNA
ggtggggtaaacaggtggcatcagctaagggttttggcaaagcacgttaatgaagaggccattcacagacttgtgagcagagttaggggatagggaaggatgcaggaacc

SEQ ID NO: 11471 - DNA, 110 bp, synthetic construct
  source 1..110: mol_type = other DNA
ctgaatttttccaggagctcccacctttggatccagactaaccatagcccaggcactgtcttagggaaaatgccataacgataccttggcaatgtttttccttccctcct

SEQ ID NO: 11472 - DNA, 110 bp, synthetic construct
  source 1..110: mol_type = other DNA
ctgtcttagggaaaatgccataacgataccttggcaatgtttttccttccctccttccacgccctgctgccatcactccaactgggacaggcacggtgtgcaggaccgaa

SEQ ID NO: 11473 - DNA, 110 bp, synthetic construct
  source 1..110: mol_type = other DNA
agaggactcgacaggtgtatccacggctgttcccgagaagctgtgaagtgggttttgtctccctggtgggatgaccggcctcaggtggcgctgcctggagcgggggctgg

SEQ ID NO: 11474 - DNA, 110 bp, synthetic construct
  source 1..110: mol_type = other DNA
aagcgcccttcggcgcacagagccctgtgtgactgtggtagtcacatgctcacgaggctggtcttgacagctggcgggcttctgcagatgcaaacatgttgccatttctc

SEQ ID NO: 11475 - DNA, 110 bp, synthetic construct
  source 1..110: mol_type = other DNA
ggctggtcttgacagctggcgggcttctgcagatgcaaacatgttgccatttctccctggccactggctggcagttggcatttctttgcatgggcaagattccctgggtg

SEQ ID NO: 11476 - DNA, 110 bp, synthetic construct
  source 1..110: mol_type = other DNA
gcaaatgaggtctgccccttcatggatcactccagggacaccagaggagtctgtactggctcgggaggaaccggggactcagggtgggggtgacggggaaaattcacaca

SEQ ID NO: 11477 - DNA, 110 bp, synthetic construct
  source 1..110: mol_type = other DNA
ctggctcgggaggaaccggggactcagggtgggggtgacggggaaaattcacacatactcatgcacccatgagagcgaaaagataaaaccgtacaggacattgctcaagc

SEQ ID NO: 11478 - DNA, 110 bp, synthetic construct
  source 1..110: mol_type = other DNA
tgattgccatgtttgcgacactccatcaagtggagctgagaggccgtctcccacccctcgtcaccaggcttggtcctccccatatgctcaggagctgcaggcagcaccta

SEQ ID NO: 11479 - DNA, 110 bp, synthetic construct
  source 1..110: mol_type = other DNA
cctcgtcaccaggcttggtcctccccatatgctcaggagctgcaggcagcacctatggtccttcagaagccagttcatcacccccattcaaggctccctttgagacgcta

SEQ ID NO: 11480 - DNA, 110 bp, synthetic construct
  source 1..110: mol_type = other DNA
actcaggtgaactatgacaagctcttggaaagggccagccctcttttactgggaaggtggttgagttggagttagatacagagcagggattagaagcagactttggatgt

SEQ ID NO: 11481 - DNA, 110 bp, synthetic construct
  source 1..110: mol_type = other DNA
agggtcctgggtacctaagcccagcccccaacatctacatggcgtttccaagaggctgaaccagggtcacaaatcccattttgcggatggagacacaaagacctatgggg

SEQ ID NO: 11482 - DNA, 110 bp, synthetic construct
  source 1..110: mol_type = other DNA
ctgaaccagggtcacaaatcccattttgcggatggagacacaaagacctatggggatgggacccggccccggcttcctgtgccaggcttggccacaagtaggatgaggga

SEQ ID NO: 11483 - DNA, 110 bp, synthetic construct
  source 1..110: mol_type = other DNA
tatcaggaaggggcggatcctatccgtggctccaagggacgtggcacagaccagcctcagcccctccttgggcctgctggccgtgagtctgtcacagaaagatgctcgac

SEQ ID NO: 11484 - DNA, 110 bp, synthetic construct
  source 1..110: mol_type = other DNA
ctcagcccctccttgggcctgctggccgtgagtctgtcacagaaagatgctcgacccatgcagagcaaagccagcgggcagtgacggtgggtggggcagaggaccgcagt

SEQ ID NO: 11485 - DNA, 110 bp, synthetic construct
  source 1..110: mol_type = other DNA
ggaatcttgaaccaaagagcccacacgaggatggacagggagtttggggttagtagatgcaaatggttacatttatttattcatttatttactttttttagggctacacc

SEQ ID NO: 11486 - DNA, 110 bp, synthetic construct
  source 1..110: mol_type = other DNA
agagcccacacgaggatggacagggagtttggggttagtagatgcaaatggttacatttatttattcatttatttactttttttagggctacacctgaggcacatggagg

SEQ ID NO: 11487 - DNA, 110 bp, synthetic construct
  source 1..110: mol_type = other DNA
agattataatatacatatatttgaattttgacactaaggagcagattcttctctggagcctccgaaaggcacgcagctctgcggacgctttgaattgagccacctaagtc

SEQ ID NO: 11488 - DNA, 110 bp, synthetic construct
  source 1..110: mol_type = other DNA
gagcctccgaaaggcacgcagctctgcggacgctttgaattgagccacctaagtctcacttggggcttctgatctccagaactgtaagattagggactagaggtgtttta

SEQ ID NO: 11489 - DNA, 110 bp, synthetic construct
  source 1..110: mol_type = other DNA
gccaggctgtgtaataaccgtgtgtcacagcctctccagctcagcatcagcagggcagtcccacagggttctgccttgcctatacttctagctgcaggaagaatgttcat

SEQ ID NO: 11490 - DNA, 110 bp, synthetic construct
  source 1..110: mol_type = other DNA
cagtcccacagggttctgccttgcctatacttctagctgcaggaagaatgttcataaaagagcactagagactttcatggaaaggtttatccagggctgccagcacatgg

SEQ ID NO: 11491 - DNA, 110 bp, synthetic construct
  source 1..110: mol_type = other DNA
cactgaagaaggccccagagaaacgcgtcagcgtttatacggcacagcctgcgtgccaggcactgtgcagatggcccttgacaggtactaccttgtttcatctccgggtc

SEQ ID NO: 11492 - DNA, 110 bp, synthetic construct
  source 1..110: mol_type = other DNA
ccaggcactgtgcagatggcccttgacaggtactaccttgtttcatctccgggtcacccctttaaggtaaggagggaggtatttttagctccattttagaggcaatggct

SEQ ID NO: 11493 - DNA, 110 bp, synthetic construct
  source 1..110: mol_type = other DNA
ggccggcagctgtagctctgattcaaccactagccatggaccttccatatgccacagatgtggccctaaaaaaagactgttttggcttctatggatcctttctatttcca

SEQ ID NO: 11494 - DNA, 110 bp, synthetic construct
  source 1..110: mol_type = other DNA
agatgtggccctaaaaaaagactgttttggcttctatggatcctttctatttccatgtaaattctagaaacagcttgtcaacttctattaagaagcctgttgggattttg

SEQ ID NO: 11495 - DNA, 110 bp, synthetic construct
  source 1..110: mol_type = other DNA
ctgtgccgtggtcacccttctctgcctggcatataggtctttctctttgctttttttttttttttttttaaatgaatatccagttgttctggaatctttttttaaaaaaa

SEQ ID NO: 11496 - DNA, 110 bp, synthetic construct
  source 1..110: mol_type = other DNA
ccttctctgcctggcatataggtctttctctttgctttttttttttttttttttaaatgaatatccagttgttctggaatctttttttaaaaaaactttcctttcacgcc

SEQ ID NO: 11497 - DNA, 110 bp, synthetic construct
  source 1..110: mol_type = other DNA
acagtttgattcctgcctcttggttgtattccattggtctctgtctgtccttacggaaggaccacactgttttgatgactggcgcattgctctgttgggggatgagccag

SEQ ID NO: 11498 - DNA, 110 bp, synthetic construct
  source 1..110: mol_type = other DNA
gaaggaccacactgttttgatgactggcgcattgctctgttgggggatgagccagccctccagtcgaaagccataggaaccaggaaattcaactttgtgtcgtgggcttc

SEQ ID NO: 11499 - DNA, 110 bp, synthetic construct
  source 1..110: mol_type = other DNA
aaccactggacacgcataatcgaaaatggccagattctcaaaaaacatgaggagtgactgattggaattaaacgtttttgtgcgggacataacagaggtatgggaataaa

SEQ ID NO: 11500 - DNA, 110 bp, synthetic construct
  source 1..110: mol_type = other DNA
gactgattggaattaaacgtttttgtgcgggacataacagaggtatgggaataaattgtaggagaaagcttaaatggggcagccgtaaaccagtgcattgttatcaagct

SEQ ID NO: 11501 - DNA, 110 bp, synthetic construct
  source 1..110: mol_type = other DNA
gccctcctccacccacccctgcagagatggtaggaggagggaaaacccaaaacccgcttcctctctgttcctggcaggagctacagggctcctaggctgactcagacagt

SEQ ID NO: 11502 - DNA, 110 bp, synthetic construct
  source 1..110: mol_type = other DNA
gcttcctctctgttcctggcaggagctacagggctcctaggctgactcagacagttggtaactgcccttgatgtgttacgtgtctccatggctcgggctgcatttctctt

SEQ ID NO: 11503 - DNA, 110 bp, synthetic construct
  source 1..110: mol_type = other DNA
cttcccccgtggccccgcgcctcccacctcctgcctccagttcagagaattgattggattttcctgtagggccggggatgagcaggagcctgttcgttcggctagcacgt

SEQ ID NO: 11504 - DNA, 110 bp, synthetic construct
  source 1..110: mol_type = other DNA
ggattttcctgtagggccggggatgagcaggagcctgttcgttcggctagcacgtgatgagggcaacggtgtggcaggcagccgggcgggccctggagcccaggaacaca

SEQ ID NO: 11505 - DNA, 110 bp, synthetic construct
  source 1..110: mol_type = other DNA
tgccttgagagggtctcgtgactcctcactgagaaggtggacgaaacacttcacgtgtggaaagttccataggtcttttggcataaaggcagctgggatagaagcgtggg

SEQ ID NO: 11506 - DNA, 110 bp, synthetic construct
  source 1..110: mol_type = other DNA
tgtggaaagttccataggtcttttggcataaaggcagctgggatagaagcgtggggagaggcggggcttgttgagcaggacgggcccggagcccctgcttcctctgaccc

SEQ ID NO: 11507 - DNA, 110 bp, synthetic construct
  source 1..110: mol_type = other DNA
ggaccctcgggaccacgttgagcctatggggtaacccagtgggtctcccaccgtagggtccttggcttaatcccagctgcagagtccccgttgccatctgtaagcatttg

SEQ ID NO: 11508 - DNA, 110 bp, synthetic construct
  source 1..110: mol_type = other DNA
agcgagaccagcctgtggctccgctggatggtgaggctcccgcaagggcagcgtgggtgggatgtctccccagtcctcatcagcctgcagaggtgtcgctgcctctgagg

SEQ ID NO: 11509 - DNA, 110 bp, synthetic construct
  source 1..110: mol_type = other DNA
aattgccttcggctacgttcaagttccaacggctgagttcttgaaaagctgccacagagacattgtggcctgcaaagcttgaaatatttcttacctggctctttacagaa

SEQ ID NO: 11510 - DNA, 110 bp, synthetic construct
  source 1..110: mol_type = other DNA
agagacattgtggcctgcaaagcttgaaatatttcttacctggctctttacagaaggagtttgccgagccctgtattattgcattaaccaggccgggttcacaggtgact

SEQ ID NO: 11511 - DNA, 110 bp, synthetic construct
  source 1..110: mol_type = other DNA
gaagccatccctgcaaaccttagattctgcctcgttcagagggcacagacaccccccaccacccaacccataaagtgtgagaacaggtggtagggtcccagccggaaagg

SEQ ID NO: 11512 - DNA, 110 bp, synthetic construct
  source 1..110: mol_type = other DNA
ccaccacccaacccataaagtgtgagaacaggtggtagggtcccagccggaaagggaggtttggagacaggacggggctgagcatcctggacctgacaccccacaccccg

SEQ ID NO: 11513 - DNA, 110 bp, synthetic construct
  source 1..110: mol_type = other DNA
gcccctccccgcaccgcctgccagaaaacaaaaacaccaagaaaccaagtcaacttttcacctcctgagtttatttttccagagattccagggccagcaaagccggtgtt

SEQ ID NO: 11514 - DNA, 110 bp, synthetic construct
  source 1..110: mol_type = other DNA
tttcacctcctgagtttatttttccagagattccagggccagcaaagccggtgttgagaaggaggaagaagaaaaccaaaacgatgtacgaggggccagggacggctcgg

SEQ ID NO: 11515 - DNA, 110 bp, synthetic construct
  source 1..110: mol_type = other DNA
tgcgccacgatgggagctccaaaaaattagcactttgtcttgatcaagcctccatgccagggtgctagcaagcaaagcagtgaggacctgtgtctagaagcatgtacaaa

SEQ ID NO: 11516 - DNA, 110 bp, synthetic construct; identical to SEQ ID NO: 11515
  source 1..110: mol_type = other DNA

SEQ ID NO: 11517 - DNA, 110 bp, synthetic construct
  source 1..110: mol_type = other DNA
agccccggggattctccagtgcccagggtgtctgagcctgaccccgtcctccttttctcccgcttagccaaagagagtttcccccaaagctgatctgggagcctgtggct

SEQ ID NO: 11518 - DNA, 110 bp, synthetic construct
  source 1..110: mol_type = other DNA
tctcccgcttagccaaagagagtttcccccaaagctgatctgggagcctgtggctgccccggagggtcacatatggtgactctctcctggagcagtgctgaggcagcgac

SEQ ID NO: 11519 - DNA, 110 bp, synthetic construct
  source 1..110: mol_type = other DNA
aaaggcagcagtccgcatccacctaagtcctccaagacactatgtgttaaggacacttctggccctactatttcaggactggtcagctgacacctgccaccactcattcc

SEQ ID NO: 11520 - DNA, 110 bp, synthetic construct
  source 1..110: mol_type = other DNA
cttctggccctactatttcaggactggtcagctgacacctgccaccactcattccgaggtgcccttgcccatctcagtcacgtagccgggaagtaggtgctttgggctgt

SEQ ID NO: 11521 - DNA, 110 bp, synthetic construct
  source 1..110: mol_type = other DNA
catggcctttttgagaaagccacacaccctctccccagctaaatggctgtctgtacatattcatacatacacactccaaaatgtgtatgttacaagttttatggaccttt

SEQ ID NO: 11522 - DNA, 110 bp, synthetic construct
  source 1..110: mol_type = other DNA
cctacagtttcagggacagaaaaagatgtcactgatggtgtgaagtgctgtctagaacagcgtttgaggaatagctcagggagtctgtggatccaaggtcagtgattact

SEQ ID NO: 11523 - DNA, 110 bp, synthetic construct
  source 1..110: mol_type = other DNA
aacagcgtttgaggaatagctcagggagtctgtggatccaaggtcagtgattactgtgtgtgtcgtgggtgaggaaggtggcagggctgtacctatgagcgacggggctc

SEQ ID NO: 11524 - DNA, 110 bp, synthetic construct
  source 1..110: mol_type = other DNA
taatgccaatgaatgacgtctttccttgaaacgaggctaggacgggcatgcagagctcacccagatgccacctggcccagacctttgggatcgcgtccctgtgaaatggt

SEQ ID NO: 11525 - DNA, 110 bp, synthetic construct
  source 1..110: mol_type = other DNA
ctcacccagatgccacctggcccagacctttgggatcgcgtccctgtgaaatggtaaatcacgtattgggcgtccaagtaacgcagttacctctgctccaaacagaatta

SEQ ID NO: 11526 - DNA, 110 bp, synthetic construct
  source 1..110: mol_type = other DNA
cagccctgcctggtggcgacaagcggtcccaggggctgggagggagggacagtcctaggggcttctagttcccacacgttccgaggatctcattctgcagctggctggcc

SEQ ID NO: 11527 - DNA, 110 bp, synthetic construct
  source 1..110: mol_type = other DNA
taggggcttctagttcccacacgttccgaggatctcattctgcagctggctggcctgctggagagctaatgaggtgaagaaaattcaggggaaatgattgattaaaacaa

SEQ ID NO: 11528 - DNA, 110 bp, synthetic construct
  source 1..110: mol_type = other DNA
cttttctgggttacagactcctcgctgtaccttcttgtggcacatggggcgagggagctctctggagcctcttttataaggacaacgatcccattcctgagggctccgac

SEQ ID NO: 11529 - DNA, 110 bp, synthetic construct
  source 1..110: mol_type = other DNA
agctctctggagcctcttttataaggacaacgatcccattcctgagggctccgacggggggttcaaagccctaacccccagtgctaggagggagagcttttaggaggtaa

SEQ ID NO: 11530 - DNA, 110 bp, synthetic construct
  source 1..110: mol_type = other DNA
cgcgccccctgggggctccgtgtcaggatgtagtcgagctctgtgctgtagatatacttctgttccaacttgacatccctggtcgtgtctcttaggtagccagtgatatt

SEQ ID NO: 11531 - DNA, 110 bp, synthetic construct
  source 1..110: mol_type = other DNA
tagcttcaggctgcctttgattttaagtgccttttctctgcaagattacaacggaaacagcaagaataatcttattaaaaatgcatttctgtttttagattacccagata

SEQ ID NO: 11532 - DNA, 110 bp, synthetic construct
  source 1..110: mol_type = other DNA
ttacaacggaaacagcaagaataatcttattaaaaatgcatttctgtttttagattacccagataagtgatagcatgtgacgtttgtgtctcactgtctaacttcactta

SEQ ID NO: 11533 - DNA, 110 bp, synthetic construct
  source 1..110: mol_type = other DNA
acttgagtatttatttccccttggtggaaccccatcgcggagatccctctgccgagagcctggggtctccacatttcagctttgtccgtttccttccgagactttgcaaa

SEQ ID NO: 11534 - DNA, 110 bp, synthetic construct
  source 1..110: mol_type = other DNA
ccttatctctttgggaagcgtatttcaacagttggcgtctccttgattgcttctgggagagtattccctgtgttggtttctttcattcagcttataaagatcctcaagtc

SEQ ID NO: 11535 - DNA, 110 bp, synthetic construct
  source 1..110: mol_type = other DNA
ggagagtattccctgtgttggtttctttcattcagcttataaagatcctcaagtctttccatgaaaaaaatattttttgaccttacattttcattcttgctgctgccctc

SEQ ID NO: 11536 - DNA, 110 bp, synthetic construct
  source 1..110: mol_type = other DNA
tgataggtgattacaaagcgatggctttaagagaggagagaagtggaagcaaactagaaaagagggcaagagacacacacaattatgttggaaagacgtgaatgattatc

SEQ ID NO: 11537 - DNA, 110 bp, synthetic construct
  source 1..110: mol_type = other DNA
agaaaagagggcaagagacacacacaattatgttggaaagacgtgaatgattatctcaaagctttttctcccatcttccctcgaaacacataccagcttttttcaataca

SEQ ID NO: 11538 - DNA, 110 bp, synthetic construct
  source 1..110: mol_type = other DNA
gataactagtttgttattgctgagccacagtgggaattcccccaaagagatttttgttggctcactagtggagaggcttctggaagctcatggaatcagggagaacttta

SEQ ID NO: 11539 - DNA, 110 bp, synthetic construct
  source 1..110: mol_type = other DNA
cagtaaatcgagagaggagttgctgaggcaaggaatagggactttattcagaaaaccagcagactgagaagatgatggactcatgtcccaaagaacctactcgcctgagt

SEQ ID NO: 11540 - DNA, 110 bp, synthetic construct
  source 1..110: mol_type = other DNA
ccagcagactgagaagatgatggactcatgtcccaaagaacctactcgcctgagttagaatccaggcttcttttgtactaaaagaggagggagtaaagccaaattatgtc

SEQ ID NO: 11541 - DNA, 110 bp, synthetic construct
  source 1..110: mol_type = other DNA
tgtgacctcaaagtagcatattctcaagtgtggaccctttatctcctggattcccaatttcgaggactctgctgaggctccttataggaatatctaccgggctgatcaag

SEQ ID NO: 11542 - DNA, 110 bp, synthetic construct
  source 1..110: mol_type = other DNA
aatttcgaggactctgctgaggctccttataggaatatctaccgggctgatcaaggcttcctgtgatgaccacttaggggtcctcgcttacccccgatggttagcccact

SEQ ID NO: 11543 - DNA, 110 bp, synthetic construct
  source 1..110: mol_type = other DNA
tgtgcaagtcaccccgtatgtgtttcccatgttggtttgtgagcacttgaccacagacgaccgggatggaatcttttttgcaatcagagaacctctgagattagccccac

SEQ ID NO: 11544 - DNA, 110 bp, synthetic construct
  source 1..110: mol_type = other DNA
gacgaccgggatggaatcttttttgcaatcagagaacctctgagattagccccacctggagtcctggttgggtctgtcagctctcccagaggcacaagagaccttgacac

SEQ ID NO: 11545 - DNA, 110 bp, synthetic construct
  source 1..110: mol_type = other DNA
taacgtttcaggaagagcccatgaaccaaatccgagtgggaggaggaggcagaggagcaaagacgatccacagctgtggtgcctggtgacaggcagtgatggagctcagg

SEQ ID NO: 11546 - DNA, 110 bp, synthetic construct
  source 1..110: mol_type = other DNA
ctgctggctctcgcattattgggctggaaactcctaagtgtacatgtgttaaccaggattggccctggtgacaaaaacggagactgcaggcagggtcaaggggtccagcg

SEQ ID NO: 11547 - DNA, 110 bp, synthetic construct
  source 1..110: mol_type = other DNA
ggattggccctggtgacaaaaacggagactgcaggcagggtcaaggggtccagcgtggctagatctgatgtggaggttggaaatctggctcttcccaagtctgaaacgtg

SEQ ID NO: 11548 - DNA, 110 bp, synthetic construct
  source 1..110: mol_type = other DNA
agtcttcacagaggggactttggatgatctttcactctccccgagggacagttattttcacatctgtcctattctgagaggcgcagccatctttgtcttcccaaatgtct

SEQ ID NO: 11549 - DNA, 110 bp, synthetic construct
  source 1..110: mol_type = other DNA
tttcacatctgtcctattctgagaggcgcagccatctttgtcttcccaaatgtctctgtcaccaaacctctcatcttgcttcgttcgagggctcgaccattcattcagcc

SEQ ID NO: 11550 - DNA, 110 bp, synthetic construct
  source 1..110: mol_type = other DNA
taacatttattactgtctcaggtttctgtggagcaggaaaataggtgcagcttagcagtgtcctcgggctcagggtttctcacgaggctgcagtcaaggctgaaggttca

SEQ ID NO: 11551 - DNA, 110 bp, synthetic construct
  source 1..110: mol_type = other DNA
cagtgtcctcgggctcagggtttctcacgaggctgcagtcaaggctgaaggttcaagtggggcggggtctgcatccaagctcactcagtgcttgtgggtcagattgagtt

SEQ ID NO: 11552 - DNA, 110 bp, synthetic construct
  source 1..110: mol_type = other DNA
aggggggaataccgccggattggggtgtctgaaaggctgccccggtgagacgagcatgtttgttccacctgattctgtcgagtaggaggaggacacgtttgctaaggttc

SEQ ID NO: 11553 - DNA, 110 bp, synthetic construct
  source 1..110: mol_type = other DNA
atgtttgttccacctgattctgtcgagtaggaggaggacacgtttgctaaggttcttgagtgacaggtctcagcccacttttggggagtctgacggggtgaggattgcga

SEQ ID NO: 11554 - DNA, 110 bp, synthetic construct
  source 1..110: mol_type = other DNA
ctcctttcaggctctcgccagcagtgtcggagcattccagttgctccagcttagcacttggtgctgtcacttcttaccagtttggtcatgctggtgggtgtgtggtggtg

SEQ ID NO: 11555 - DNA, 110 bp, synthetic construct
  source 1..110: mol_type = other DNA
aggagccgccagaaagagctcttgtccttcaggggtgaggggacttagccgaggtcttcatgacattaagggtttgaagttcaatgttgacttaatcggggtaacaaaaa

SEQ ID NO: 11556 - DNA, 110 bp, synthetic construct
  source 1..110: mol_type = other DNA
cttcatgacattaagggtttgaagttcaatgttgacttaatcggggtaacaaaaaggggtcctccgtccataaagagggagcccacgacaagaatttgatccttgtccct

SEQ ID NO: 11557 - DNA, 110 bp, synthetic construct
  source 1..110: mol_type = other DNA
taaacatgagctaacctccctgttccccagtgaggtcagtcgggagccccatgctttactggatggtgccaccaaggccagggagatgaagtgagtcacggcactccggg

SEQ ID NO: 11558 - DNA, 110 bp, synthetic construct
  source 1..110: mol_type = other DNA
caaatgtacagcctaatgaccttcctccaaagcttctgctccctgcagcttcctggatccacttttcccgcaaaggtacttacgtttcttgatgtctggagatgagttag

SEQ ID NO: 11559 - DNA, 110 bp, synthetic construct
  source 1..110: mol_type = other DNA
gatccacttttcccgcaaaggtacttacgtttcttgatgtctggagatgagttagtagcctcttctctggagcagagagggtttgtcacgaccaccgccttcctgttaat

SEQ ID NO: 11560 - DNA, 110 bp, synthetic construct
  source 1..110: mol_type = other DNA
ccccagtgcccaagatcgtacagctgcaaagtgtcagagttgtaattcacacccggaaaggcccagcatcttccttcccactaaaccaggttaaccctctggcaaatgac

SEQ ID NO: 11561 - DNA, 110 bp, synthetic construct
  source 1..110: mol_type = other DNA
agggctgcgtgatgcaaagcagggctttggacctgggagattaaggagccagtccgccactgttggtctggcatcagggtaaacaggatacaagttcagatcctgcttcc

SEQ ID NO: 11562 - DNA, 110 bp, synthetic construct
  source 1..110: mol_type = other DNA
tttacagcatctcgtgggagctggctcattgtgtgctgggtttattaggggaggaagctaaggctttgtgtggttattcatgggagacactgaaaggtgtccaccctgtt

SEQ ID NO: 11563 - DNA, 110 bp, synthetic construct
  source 1..110: mol_type = other DNA
agctaaggctttgtgtggttattcatgggagacactgaaaggtgtccaccctgttctgatgggaaatgaggtgacacagccaccaggaattccaccccatccagtcaccc

SEQ ID NO: 11564 - DNA, 110 bp, synthetic construct
  source 1..110: mol_type = other DNA
gggtcctctatgagctctggtcaccaggaccaatttcagacctttaagcgacgttaagacactcagccaagaaaaatcaaggagctcagggaagagtcgcagcccagtgt

SEQ ID NO: 11565 - DNA, 110 bp, synthetic construct
  source 1..110: mol_type = other DNA
aagacactcagccaagaaaaatcaaggagctcagggaagagtcgcagcccagtgtttttcaggaaataatacagccccatgtcttattgcagcttgaaggctctttgaaa

SEQ ID NO: 11566 - DNA, 110 bp, synthetic construct
  source 1..110: mol_type = other DNA
tgctaaaccaccgagatttggggagtgttttgttataatgctgatgacgctcacacagctgtggcagaacatgcaagggagggaggatggttatgggcaaagcacacatg

SEQ ID NO: 11567 - DNA, 110 bp, synthetic construct
  source 1..110: mol_type = other DNA
cagctgtggcagaacatgcaagggagggaggatggttatgggcaaagcacacatgggtcaaggtccttcactgagacgctgtctggttttgacaactgcaggacgcgccg

SEQ ID NO: 11568 - DNA, 110 bp, synthetic construct
  source 1..110: mol_type = other DNA
cctcaaatgacctcatttaagtgtgtcatgcctttcctgccaagaccctgattgacacaaaaactgaaagttggagggaagaatttaaatagtgcagcggtctttactga

SEQ ID NO: 11569 - DNA, 110 bp, synthetic construct
  source 1..110: mol_type = other DNA
cacaaaaactgaaagttggagggaagaatttaaatagtgcagcggtctttactgagctctttgctttcgcattccttacgaggaagctcagctttggagaatcgggggag

SEQ ID NO: 11570 - DNA, 110 bp, synthetic construct
  source 1..110: mol_type = other DNA
cttctctctcctgtctccgtctccctcctctaatgacactgaatgcccaaggagtcatgatccaaaccccaggccttgcttcgtagctccccaggtctcgatctgcagag

SEQ ID NO: 11571 - DNA, 110 bp, synthetic construct
  source 1..110: mol_type = other DNA
catgatccaaaccccaggccttgcttcgtagctccccaggtctcgatctgcagagtctccttcggtgacaggcaaggaaggcacatccctgaaccttcccctctgctgca

SEQ ID NO: 11572 - DNA, 110 bp, synthetic construct
  source 1..110: mol_type = other DNA
ttcaaattgcactttggggcagtccactgaaaaaccaagttgtcacaggagaagctcagcctggattgcacccagggggtgaatggcttgcctacttgtcatataagcgg

SEQ ID NO: 11573 - DNA, 110 bp, synthetic construct
  source 1..110: mol_type = other DNA
tcagcctggattgcacccagggggtgaatggcttgcctacttgtcatataagcgggtggctgtctgaatgttggaccatcttacccagagaatccaaatgcagctcatgc

SEQ ID NO: 11574 - DNA, 110 bp, synthetic construct
  source 1..110: mol_type = other DNA
ggagagactgggggcggggggcaggggtgcgggggaggggggggctctccatctgagggatggggcctggcaagagttttacatgggtaaagattaagactccttatagg

SEQ ID NO: 11575 - DNA, 110 bp, synthetic construct
  source 1..110: mol_type = other DNA
agggatggggcctggcaagagttttacatgggtaaagattaagactccttatagggagagcgtgataaccccccagggttgggggaagaatcagagttttgctctgctga

SEQ ID NO: 11576 - DNA, 110 bp, synthetic construct
  source 1..110: mol_type = other DNA
aagtatccacaaggacggaggttcaaccccggcctcgatccatgaattaaggattcagcattgcagtgagctgcggtgtagaccacggacgcggctgggatctggcgttg

SEQ ID NO: 11577 - DNA, 110 bp, synthetic construct
  source 1..110: mol_type = other DNA
tgggcccaaagtatttacattcagatttgcatataatttgcatataatttgtgtccagtgacaaagcctatgtgttgttcaggtaacctttaagctcaagttgattttca

SEQ ID NO: 11578 - DNA, 110 bp, synthetic construct
  source 1..110: mol_type = other DNA
cagtgacaaagcctatgtgttgttcaggtaacctttaagctcaagttgattttcagaatgtcccactgtcctgtctctccccatccgtctgctcacatacagggtgcgaa

SEQ ID NO: 11579 - DNA, 110 bp, synthetic construct
  source 1..110: mol_type = other DNA
tgactttcaaggaaattatgttgagcgaaagaagtcagatataaatgggtatatattacatagcttcatttacacaaagttcgagaacaggcaaagcaagtgtgtgttga

SEQ ID NO: 11580 - DNA, 110 bp, synthetic construct
  source 1..110: mol_type = other DNA
ttacatagcttcatttacacaaagttcgagaacaggcaaagcaagtgtgtgttgatagaaatcgggccagtgtcgtctatgggagatggggattgactgaacgagaagag

SEQ ID NO: 11581 - DNA, 110 bp, synthetic construct
  source 1..110: mol_type = other DNA
cttcttctggaatcctctttcatatttcctaccctgtgacttctttccatagggaagtgtgtcggagacatgcctgtggaggatatttgaagggatggatgtaaagcttt

SEQ ID NO: 11582 - DNA, 110 bp, synthetic construct
  source 1..110: mol_type = other DNA
agtgtgtcggagacatgcctgtggaggatatttgaagggatggatgtaaagctttaagattgcagtctttatgcatttctggcctggatttacaggtttggagaaaacag

SEQ ID NO: 11583 - DNA, 110 bp, synthetic construct
  source 1..110: mol_type = other DNA
caagccatcagatctgagtaggggaaaaagaccagcccttctcaagaaggctttgccatcccagccaagagggagctcaggttggggcaggttcccacgaagcagccaaa

SEQ ID NO: 11584 - DNA, 110 bp, synthetic construct
  source 1..110: mol_type = other DNA
tcattttcgaagacagtctcgaagtattctcgacatccggcaggaatgttcgaggtcatgctatgttcagactagaaatatattgaatatatatgagctgatgttagggt

SEQ ID NO: 11585 - DNA, 110 bp, synthetic construct
  source 1..110: mol_type = other DNA
tcatgctatgttcagactagaaatatattgaatatatatgagctgatgttagggtcacacgccttgtttgttatgagaatgtgtgaaatattttccaaggctgataagct

SEQ ID NO: 11586 - DNA, 110 bp, synthetic construct
  source 1..110: mol_type = other DNA
gatcgaacctgcgtcctcatggatgcttgtcagattcgtttttgctgagccataatgggcactcctacaggagtttcttatagatagcaaataattgggtcctgcttttc

SEQ ID NO: 11587 - DNA, 110 bp, synthetic construct; identical to SEQ ID NO: 11586
  source 1..110: mol_type = other DNA

SEQ ID NO: 11588 - DNA, 110 bp, synthetic construct
  source 1..110: mol_type = other DNA
tgtaagggtatgtgtagatttttagaaagacctgttacagggtaataacatgtgtccaatcccagctactttttaccagcaaaataatagggacacagttaaattaatat

SEQ ID NO: 11589 - DNA, 110 bp, synthetic construct
  source 1..110: mol_type = other DNA
ctgtaaaaagacgttggcctcaagagtggccagccccaaagtgaacccaccactgacgtgaaagcaaacagctggggcgccgtctggatgtggggacgggaggcagtgag

SEQ ID NO: 11590 - DNA, 110 bp, synthetic construct
  source 1..110: mol_type = other DNA
acgtgaaagcaaacagctggggcgccgtctggatgtggggacgggaggcagtgagagggaacctccaggctctcctgccccggcagacatccgccagccaagcaaaggag

SEQ ID NO: 11591 - DNA, 110 bp, synthetic construct
  source 1..110: mol_type = other DNA
cagatgctggtcacacacagagaaaacgtgtctgtgggcatgaccctctccaacgccatcgtctcatgggtggtagcgacgcagggtggagggaccacgtgacagtgctg

SEQ ID NO: 11592 - DNA, 110 bp, synthetic construct
  source 1..110: mol_type = other DNA
aagttcctgggcgagcaacgccggagtgcgaagctgaataacatcctacgctatctgtcacatcgtttatgttcccttctcccggccgggcctcggcacactgcataaat

SEQ ID NO: 11593 - DNA, 110 bp, synthetic construct
  source 1..110: mol_type = other DNA
tgtcacatcgtttatgttcccttctcccggccgggcctcggcacactgcataaatctacagctgcagaaaccgagatcgcatataaaattgaaggatttattttgaggta

SEQ ID NO: 11594 - DNA, 110 bp, synthetic construct
  source 1..110: mol_type = other DNA
aaaatggtattccttcaaaacgtagagtttacatcatcagaatcttgaattcggaaaatggagacttgttgtaatggaaaatcgtgctcatttttggaattactaagggt

SEQ ID NO: 11595 - DNA, 110 bp, synthetic construct
  source 1..110: mol_type = other DNA
aaatggagacttgttgtaatggaaaatcgtgctcatttttggaattactaagggttcgattactacgttggagtactcccccagatatcttaggtccctttttactctga

SEQ ID NO: 11596 - DNA, 110 bp, synthetic construct
  source 1..110: mol_type = other DNA
ggggatagactggaagaacgaagacatgttaggcttatgtagttcaggcaaaggataacgtgggcctgaaccaacagaggaggagctgatatagaggcgagagctcagct

SEQ ID NO: 11597 - DNA, 110 bp, synthetic construct
  source 1..110: mol_type = other DNA
taacgtgggcctgaaccaacagaggaggagctgatatagaggcgagagctcagcttggctagcttcgggggttgtttggttatggaggatgaaaaatgaatagaaaaagg

SEQ ID NO: 11598 - DNA, 110 bp, synthetic construct
  source 1..110: mol_type = other DNA
taaatacaataatattctttttatgctcccatactccccagtaactaaataccacacagttgatagacatgggactaaatcagtggaatatgaagatatttaggagttca

SEQ ID NO: 11599 - DNA, 110 bp, synthetic construct
  source 1..110: mol_type = other DNA
acagttgatagacatgggactaaatcagtggaatatgaagatatttaggagttcagatgcccacaggaccgtgcgatgaaatggatatggagagagatgagggacagggg

SEQ ID NO: 11600 - DNA, 110 bp, synthetic construct
  source 1..110: mol_type = other DNA
aaacctgcgattgtttcacagggactgacggcaccagcatagataagtctggtagaaaccttgattaaaatactagaggagttctctgagataccgtgaagcatggccca

SEQ ID NO: 11601 - DNA, 110 bp, synthetic construct
  source 1..110: mol_type = other DNA
aaaccttgattaaaatactagaggagttctctgagataccgtgaagcatggcccattaattcattgagattgctctataaaaccttaaaaactgataccgttcatctgac

SEQ ID NO: 11602 - DNA, 110 bp, synthetic construct
  source 1..110: mol_type = other DNA
aagatcatgctttggaagcagagtaggattggttttgaataaaaggattctagaatttatgttatataaggtaaatgctcatcaagggagacctgtgtgtgtgtgtgtgt

SEQ ID NO: 11603 - DNA, 110 bp, synthetic construct
  source 1..110: mol_type = other DNA
tttatgttatataaggtaaatgctcatcaagggagacctgtgtgtgtgtgtgtgtgaatatttttgtttgggagttgatatgtgtagttaaaaatggtggctgaggaatc

SEQ ID NO: 11604 - DNA, 110 bp, synthetic construct
  source 1..110: mol_type = other DNA
cgctgcgagaggaagacgtcggcacgattctagtggaaaagaggagtagactctccaggtaaagcaccgaggagcaagcttggtggattagaatccccatgcctttgtct

SEQ ID NO: 11605 - DNA, 110 bp, synthetic construct
  source 1..110: mol_type = other DNA
caggtaaagcaccgaggagcaagcttggtggattagaatccccatgcctttgtctctgcctggtgttattcttccagcctaagcttaggacagagaaacctggtgtattc

SEQ ID NO: 11606 - DNA, 110 bp, synthetic construct
  source 1..110: mol_type = other DNA
aggctggcagttgcagcttctgtttgacccctagtctgggaagttccatgtgcacagccatagaaagaaaaaataagaaagaacattgatacagtgatctaggttccagg

SEQ ID NO: 11607 - DNA, 110 bp, synthetic construct; identical to SEQ ID NO: 11606
  source 1..110: mol_type = other DNA

SEQ ID NO: 11608 - DNA, 110 bp, synthetic construct
  source 1..110: mol_type = other DNA
gaatagaattgtgatgtgattgtaatatgtcgccgggtctcctgccgtagcatttataaaaccagtcctcacttggcttgtctgagtcaagttgctgatgaagtcttcct

SEQ ID NO: 11609 - DNA, 110 bp, synthetic construct
  source 1..110: mol_type = other DNA
ataaaaccagtcctcacttggcttgtctgagtcaagttgctgatgaagtcttcctactgttctttcccggagaaggacgtgaggctgatggagcctttgaagatgactcc

SEQ ID NO: 11610 - DNA, 110 bp, synthetic construct
  source 1..110: mol_type = other DNA
tgcctctccttaatcctcagcggctcccttggtgtcttcgtgtctgttgagcacgtccatgacgctagcttgcagcctgtgtgctccctttttaattttatgtaaactga

SEQ ID NO: 11611 - DNA, 110 bp, synthetic construct
  source 1..110: mol_type = other DNA
atcactttggctgatgaaagttccctagagtgaaattttacatccaaagactaaacactttgtagccccacttcagccagttcgctaatccacaaccttgatggaatatt

SEQ ID NO: 11612 - DNA, 110 bp, synthetic construct
  source 1..110: mol_type = other DNA
cactttgtagccccacttcagccagttcgctaatccacaaccttgatggaatattttatctggacatatctgggagaaaaaaaatgtaaatatatgtcgcgaactgcagg

SEQ ID NO: 11613 - DNA, 110 bp, synthetic construct
  source 1..110: mol_type = other DNA
ttcaatcactactctttacctgctgtggccagaggtagcaaatacaaataaagggtatctgtatttatctagcgactcaaacatccatgtaatccttgccatcaacactt

SEQ ID NO: 11614 - DNA, 110 bp, synthetic construct
  source 1..110: mol_type = other DNA
tatctgtatttatctagcgactcaaacatccatgtaatccttgccatcaacactttccataaccttctatctacaatctatgatagattactgtaaaataatagcaaaca

SEQ ID NO: 11615 - DNA, 110 bp, synthetic construct
  source 1..110: mol_type = other DNA
cggaagaacatgtttaacgtagctttctagaattaggacccatcgatggcatttctctaggccgagatttacatcccaccaccctctttttccctgtgatcacgcagtgt

SEQ ID NO: 11616 - DNA, 110 bp, synthetic construct
  source 1..110: mol_type = other DNA
aggaagtcttaagtctcacttgtcaagaagtcagtttgaagaacgaaggtaaaggaggttagagtttaaaggcaggaggcgcaagtagaaagactgctgagacttaagct

SEQ ID NO: 11617 - DNA, 110 bp, synthetic construct
  source 1..110: mol_type = other DNA
aggttagagtttaaaggcaggaggcgcaagtagaaagactgctgagacttaagcttaaattgtaagccgtccgcttagctagtggtgtgttaggtaagctccctaagttt

SEQ ID NO: 11618 - DNA, 110 bp, synthetic construct
  source 1..110: mol_type = other DNA
ggatggcatggtatatggtagcaacgggggatcccttgtcatcttcctagtcttatgtcttattttctattaagcttgccctttgtcagaggtgaggttatgtgagattc

SEQ ID NO: 11619 - DNA, 110 bp, synthetic construct
  source 1..110: mol_type = other DNA
gttaagcatctgcctttgcggtgagctgcgatggaggtcgcaggtgcggcttggatcctgtgttgctatggctttattgtaggacggaagctacagctctgctctgactg

SEQ ID NO: 11620 - DNA, 110 bp, synthetic construct; identical to SEQ ID NO: 11619
  source 1..110: mol_type = other DNA

SEQ ID NO: 11621 - DNA, 110 bp, synthetic construct
  source 1..110: mol_type = other DNA
tttctccatccagcctacgagttgattatgtatccatttgaggtagttaggtttcaagagacaaagtatatccatcaacagtaatatttgttgaatatttactgtgtttt

SEQ ID NO: 11622 - DNA, 110 bp, synthetic construct
  source 1..110: mol_type = other DNA
aagagacaaagtatatccatcaacagtaatatttgttgaatatttactgtgttttgggcacagtgctagatgcttagacatatataacaatgaggtatagttctttctgt

SEQ ID NO: 11623 - DNA, 110 bp, synthetic construct
  source 1..110: mol_type = other DNA
attcagattaaaatataccgagatggtctatgtaatggtatgaccctagatcaagaagagatttggggtcttctttcctagtcttgctttaatgtttccatacagaaact

SEQ ID NO: 11624 - DNA, 110 bp, synthetic construct
  source 1..110: mol_type = other DNA
aagagatttggggtcttctttcctagtcttgctttaatgtttccatacagaaactctttattaaaaagaaagcaaatttaaatctccagtacaacactgtcttaccatgt

SEQ ID NO: 11625 - DNA, 110 bp, synthetic construct
  source 1..110: mol_type = other DNA
agttaccaacgtcaaatgacttttgtgaaattaaaaaccataatacaggtagagccctcagctaagtatctggcacatgagaatcattcagtatctgtcattgttcttac

SEQ ID NO: 11626 - DNA, 110 bp, synthetic construct
  source 1..110: mol_type = other DNA
cctcagctaagtatctggcacatgagaatcattcagtatctgtcattgttcttactatgtgtagataactaccccgtacatgttggtccagaagagctacttgcgatgaa

SEQ ID NO: 11627 - DNA, 110 bp, synthetic construct
  source 1..110: mol_type = other DNA
atcagaaacctattaggttttgaattattgaattataccctatctattttgatctctaagccaattctattttttccccggagatcgtcacaaaagcttcaaaaaattag

SEQ ID NO: 11628 - DNA, 110 bp, synthetic construct; identical to SEQ ID NO: 11627
  source 1..110: mol_type = other DNA

SEQ ID NO: 11629 - DNA, 110 bp, synthetic construct
  source 1..110: mol_type = other DNA
ccatttatgcctaacagacagaaacttcaaagaaagaatccacacatagtgaaaacataagtatgccattttccctccatggtcttttccaaaaatccatctgtttcatc

SEQ ID NO: 11630 - DNA, 110 bp, synthetic construct
  source 1..110: mol_type = other DNA
agccaatgtgtcctgtttgttgcaacaggatttacacgtctgaaatgactcagctttcgacacttcctaaagatttgtgagtgggacgcctgccctctctctggcttcta

SEQ ID NO: 11631 - DNA, 110 bp, synthetic construct
  source 1..110: mol_type = other DNA
ttcgacacttcctaaagatttgtgagtgggacgcctgccctctctctggcttctacaagcaatacagacctgagtcaacttcctaataaaactgaccaaaacacctcact

SEQ ID NO: 11632 - DNA, 110 bp, synthetic construct
  source 1..110: mol_type = other DNA
ccatgcaaaccaacttgggtctgggtgtgaaagaaggtagtaataaaataaattaggccacgagccaagtttagaatcgatcgcctcttttgtttgagtccacgaaaccc

SEQ ID NO: 11633 - DNA, 110 bp, synthetic construct
  source 1..110: mol_type = other DNA
ggccacgagccaagtttagaatcgatcgcctcttttgtttgagtccacgaaaccctttaggtgaacatatttaaataaaaacagaacgcccccatatatcgatataatgc

SEQ ID NO: 11634 - DNA, 110 bp, synthetic construct
  source 1..110: mol_type = other DNA
aaaggtgttgagaggaatagtacagatatttaaaatttgatgcatgatagggagttctcttatggcatagcaggttaaggatctggcggttgttattgcagcagcttggg

SEQ ID NO: 11635 - DNA, 110 bp, synthetic construct
  source 1..110: mol_type = other DNA
tctcttatggcatagcaggttaaggatctggcggttgttattgcagcagcttgggtcactgctgcggctcaggttcagtccccagcccaagagcttccacgtgctgtggg

SEQ ID NO: 11636 - DNA, 110 bp, synthetic construct
  source 1..110: mol_type = other DNA
attttccgaaagacacacgagactttatttggtgaagacagtagctggtattataacctaatttttttatttgctccagagtatctcagaaccacctacttcctaatgag

SEQ ID NO: 11637 - DNA, 110 bp, synthetic construct
  source 1..110: mol_type = other DNA
acctaatttttttatttgctccagagtatctcagaaccacctacttcctaatgagaaaaacctctggccatcacagttagtacttgtaaattttgaatgtttcatcacct

SEQ ID NO: 11638 - DNA, 110 bp, synthetic construct
  source 1..110: mol_type = other DNA
cactgcaccatggcaggaactgctgttgtggcattctaaaagccttaggcaccttcttctaatcatcttgtgctaatagcttatggcatctgaatatgtggaccccttta

SEQ ID NO: 11639 - DNA, 110 bp, synthetic construct; identical to SEQ ID NO: 11638
  source 1..110: mol_type = other DNA

SEQ ID NO: 11640 - DNA, 110 bp, synthetic construct
  source 1..110: mol_type = other DNA
ttgcattccttaaaacccataaaccaatgggctgcattattcatgacataagctgtacactctagaatcgtaaaaggaagccgagggggccagatgaaaacccatccagg

SEQ ID NO: 11641 - DNA, 110 bp, synthetic construct
  source 1..110: mol_type = other DNA
tacactctagaatcgtaaaaggaagccgagggggccagatgaaaacccatccaggcaaaagcatcccagaaccttgttgacagttaaggggcaagatgtggaggaaaact

SEQ ID NO: 11642 - DNA, 110 bp, synthetic construct
  source 1..110: mol_type = other DNA
tgagatgggcagccaaattcagagccctactctacatcagaatcttaaagtgaggtggtgtgccctttcaccatggatgaacctgctgaattttcactcacttttaaaga

SEQ ID NO: 11643 - DNA, 110 bp, synthetic construct
  source 1..110: mol_type = other DNA
cactgtctcagctctttctgaacttcctttccgatccttgtttacttcgcttttcttttctgttttctcagaccttcaaatgacagagcataccatcacccagtcagatg

SEQ ID NO: 11644 - DNA, 110 bp, synthetic construct
  source 1..110: mol_type = other DNA
ttttctgttttctcagaccttcaaatgacagagcataccatcacccagtcagatgttgtatgtatactatttctctatgcaggtgtacctggttttatcatttcacttta

SEQ ID NO: 11645 - DNA, 110 bp, synthetic construct
  source 1..110: mol_type = other DNA
gtatttggttaaatcacaatagaaagccttgctgagattgttggctcctcttactggtgaatctaactttttctgtgtacttcgttttcagatatctcggttgaagcaat

SEQ ID NO: 11646 - DNA, 110 bp, synthetic construct
  source 1..110: mol_type = other DNA
gattgttggctcctcttactggtgaatctaactttttctgtgtacttcgttttcagatatctcggttgaagcaatgagatcaagtgttttgctctagtttattttaaaat

SEQ ID NO: 11647 - DNA, 110 bp, synthetic construct
  source 1..110: mol_type = other DNA
tcgccggtgtcatggtacttggaggtagggcccttggaggtgactgagtcatgaatctcatgaatgggattagagcccttatgaaagacattccagagagtgccctcttc

SEQ ID NO: 11648 - DNA, 110 bp, synthetic construct
  source 1..110: mol_type = other DNA
tctcatgaatgggattagagcccttatgaaagacattccagagagtgccctcttcccgtctgccatctgaggaccatctacgaaccaggaagtgggctgtcaccaaacag

SEQ ID NO: 11649 - DNA, 110 bp, synthetic construct
  source 1..110: mol_type = other DNA
tgttactggaggaaggttgcatgttgggcatgagaatgagcatgtccgagagcccgtgagggagtggggacctcagacctactattgcaaggaacccaaatgagcttgca

SEQ ID NO: 11650 - DNA, 110 bp, synthetic construct
  source 1..110: mol_type = other DNA
gtgagggagtggggacctcagacctactattgcaaggaacccaaatgagcttgcaaaaggattctccccacagcatccctctaagtgcccagacaactgggcacctctat

SEQ ID NO: 11651 - DNA, 110 bp, synthetic construct
  source 1..110: mol_type = other DNA
ggcagagcctttgtgggagccattcccctaccctggcccctagaaggtggctgcgcatgctaccaaaatagccccaaagctaaaatccattgggtattcatctcaaattc

SEQ ID NO: 11652 - DNA, 110 bp, synthetic construct
  source 1..110: mol_type = other DNA
catgctaccaaaatagccccaaagctaaaatccattgggtattcatctcaaattccccttctccttagccagatccctaaaatgtccttgatcatctgggccactcatca

SEQ ID NO: 11653 - DNA, 110 bp, synthetic construct; identical to SEQ ID NO: 11651
  source 1..110: mol_type = other DNA

SEQ ID NO: 11654 - DNA, 110 bp, synthetic construct; identical to SEQ ID NO: 11652
  source 1..110: mol_type = other DNA

SEQ ID NO: 11655 - DNA, 110 bp, synthetic construct
  source 1..110: mol_type = other DNA
gcaaacagctattacggtgcctggccaatgtgggcagtttcagtcgatgattccctgacattgcccgtgttaataagtgccttgtacaattttacctcgacagtcttttc

SEQ ID NO: 11656 - DNA, 110 bp, synthetic construct
  source 1..110: mol_type = other DNA
tgacattgcccgtgttaataagtgccttgtacaattttacctcgacagtcttttctcacggcgttacctcaatgctccccatttgccattttggtccagcttaaccaatt

SEQ ID NO: 11657 - DNA, 110 bp, synthetic construct
  source 1..110: mol_type = other DNA
gttccttaaaaaaactaaaaagagaactgccataggatccagcaatcccactcctggcaagtatccaaaggaaaccataattcgaaaggtacatgcaccccaatattcac

SEQ ID NO: 11658 - DNA, 110 bp, synthetic construct; identical to SEQ ID NO: 11657
  source 1..110: mol_type = other DNA

SEQ ID NO: 11659 - DNA, 110 bp, synthetic construct
  source 1..110: mol_type = other DNA
ctcactttcagccatttttaacactgagacttttctccccccaagttcaacatgagacagaacgacaatgtacaactcaaaggctgagctgttttgtgtcctgagactta

SEQ ID NO: 11660 - DNA, 110 bp, synthetic construct
  source 1..110: mol_type = other DNA
gtcatcatggcagtgctaattctcaccctcagcagttgaaagagagagagagggagagaaagagaaaatttggtcatgggggtggggcacgggaggaggagggaaagaat

SEQ ID NO: 11661 - DNA, 110 bp, synthetic construct
  source 1..110: mol_type = other DNA
gagaaagagaaaatttggtcatgggggtggggcacgggaggaggagggaaagaatagaacggggctcgtgtatttggcaacacttactgactcttcgctacttgaatttt

SEQ ID NO: 11662 - DNA, 110 bp, synthetic construct
  source 1..110: mol_type = other DNA
ataaaaagtggtcgagtcctctcctcaatggatcgtatactttcccaggtcagacctccctggaattcaccaccaagaaaggcacaagtgaaatcgcaccctcgaggcat

SEQ ID NO: 11663 - DNA, 110 bp, synthetic construct
  source 1..110: mol_type = other DNA
ctccctggaattcaccaccaagaaaggcacaagtgaaatcgcaccctcgaggcatctcaaataagacttcacatttctctgttgcaggtcaagtgaaagttgatcgttgg

SEQ ID NO: 11664 - DNA, 110 bp, synthetic construct
  source 1..110: mol_type = other DNA
tgttacctttaaggtaaaggagattttgcagatgtgattaagttaggagcttgcgacagggagattattccagactacccaatgccccagtgtaagagtggaatgtagag

SEQ ID NO: 11665 - DNA, 110 bp, synthetic construct
  source 1..110: mol_type = other DNA
ataaatgggggtcttcaaatggatgcagagagtcatttccagtaaaccaagggtctgtctgcacatgtgaaaatgtctgtgagacgccgaaacgctgctggtcactcaga

SEQ ID NO: 11666 - DNA, 110 bp, synthetic construct
  source 1..110: mol_type = other DNA
tgtctgcacatgtgaaaatgtctgtgagacgccgaaacgctgctggtcactcagagtctctttgtattgtgacgacagaaacaaagcttcccactgtgttcaaggaactc

SEQ ID NO: 11667 - DNA, 110 bp, synthetic construct
  source 1..110: mol_type = other DNA
ctagccattggatgttcctgttcaactaatacctggtccatatcttgttaccatggaaacttcatagctcattcacaagatgtatccttgggatggcttgattttaagag

SEQ ID NO: 11668 - DNA, 110 bp, synthetic construct
  source 1..110: mol_type = other DNA
acttaaagcttggtggctacacagatagtcattatatgatctttttttttgttagcgtttttgtttttttaaggcggcacccagggcatatggaagttcccaggctaggg

SEQ ID NO: 11669 - DNA, 110 bp, synthetic construct; identical to SEQ ID NO: 11668
  source 1..110: mol_type = other DNA

SEQ ID NO: 11670 - DNA, 110 bp, synthetic construct
  source 1..110: mol_type = other DNA
ttcctgaacatctttacagtaaactgatgttatctggccatgacgttatttcatcctcctgactgcaaaggtcatcattaaactaacacggagcagtcccctgcctgttt

SEQ ID NO: 11671 - DNA, 110 bp, synthetic construct
  source 1..110: mol_type = other DNA
acacacacacacacacacacacacacacttcctagtggataaatgaccctcaacgtgtattggagcttataaaactctatggaagttcccaatgtggctcagtggttaac

SEQ ID NO: 11672 - DNA, 110 bp, synthetic construct
  source 1..110: mol_type = other DNA
cacacacacacacttcctagtggataaatgaccctcaacgtgtattggagcttataaaactctatggaagttcccaatgtggctcagtggttaacaaatccgactaggaa

SEQ ID NO: 11673 - DNA, 110 bp, synthetic construct
  source 1..110: mol_type = other DNA
aggagaggttccagaaaatcagatagaactgtggggcagcactaactgacaagagccatggcctttggaagaggaaaccaggcactttattcacagctcggcaggaagac

SEQ ID NO: 11674 - DNA, 110 bp, synthetic construct
  source 1..110: mol_type = other DNA
ccatggcctttggaagaggaaaccaggcactttattcacagctcggcaggaagacatgcatgggaacggctgacctccttcttttcctgccctctgagcaccagctgatg

SEQ ID NO: 11675 - DNA, 110 bp, synthetic construct
  source 1..110: mol_type = other DNA
gggggcaatatagagatagaagattaggagctaaaaactatcatgtacaggagttcctgtcgtggtgcagcagaaatgaaactgaccaggaaccatgaggttgcgggttt

SEQ ID NO: 11676 - DNA, 110 bp, synthetic construct; identical to SEQ ID NO: 11675
  source 1..110: mol_type = other DNA

SEQ ID NO: 11677 - DNA, 110 bp, synthetic construct
  source 1..110: mol_type = other DNA
gatgtgtaaaaggagatttgctctaagaatcggccaagaaatcccacagtctgacctctgcaagctggagaaccgggcaaatccctgttataatgaggacaaagtcctga

SEQ ID NO: 11678 - DNA, 110 bp, synthetic construct
  source 1..110: mol_type = other DNA
gataaataattccactctctcgtgtcctcaaatagatctaggattcacttgtgccacaggagagtatttcagaacggtgtttctactacatcttcaccagaagagcactt

SEQ ID NO: 11679 - DNA, 110 bp, synthetic construct
  source 1..110: mol_type = other DNA
acaggagagtatttcagaacggtgtttctactacatcttcaccagaagagcactttctctaaactcaaagttgtcaatcaggccccattatctaaagtatcattatgaac

SEQ ID NO: 11680 - DNA, 110 bp, synthetic construct
  source 1..110: mol_type = other DNA
gccaaaggagatataggacattgagagacatactttaccatcggcagatgcccgggagttagctagaaagagggcaatatgtatactctgaggtcagaatgtgcttgccc

SEQ ID NO: 11681 - DNA, 110 bp, synthetic construct
  source 1..110: mol_type = other DNA
gagttagctagaaagagggcaatatgtatactctgaggtcagaatgtgcttgccctgttgtggctgagtgggttgagaacccgatgtagtctcactcagtgggttaagga

SEQ ID NO: 11682 - DNA, 110 bp, synthetic construct
  source 1..110: mol_type = other DNA
ctcagaatataatctcacacttgaaaaaaaaaaaatctctggtaattaatactgtcgccacaaaaaccttacactcaagccatgtcttttgtgtctcacctgtacctttc

SEQ ID NO: 11683 - DNA, 110 bp, synthetic construct
  source 1..110: mol_type = other DNA
cgccacaaaaaccttacactcaagccatgtcttttgtgtctcacctgtacctttctagatgttagccatacagtccttataatgggtcatctggtttcctcaaaacctca

SEQ ID NO: 11684 - DNA, 110 bp, synthetic construct
  source 1..110: mol_type = other DNA
tcagacggcactgcgccatagcaggtagcccacgaatgtcagccgtcttcacctggatgagacaggaactttgccttagctggtctgaagcagtcacggtgacaatgaca

SEQ ID NO: 11685 - DNA, 110 bp, synthetic construct
  source 1..110: mol_type = other DNA
gatgagacaggaactttgccttagctggtctgaagcagtcacggtgacaatgacagaggcagatgctttgatttttaaaaagatcaaaatgggaaatgattgacttgtct

SEQ ID NO: 11686 - DNA, 110 bp, synthetic construct
  source 1..110: mol_type = other DNA
gtggcaaaagtacattaatatatatatatttcctccgaaggatctgtctcttgcagctgtaaggataatgttcaaaagaaatactccagtcctatttccccaaaggcctt

SEQ ID NO: 11687 - DNA, 110 bp, synthetic construct
  source 1..110: mol_type = other DNA
gagacctgtgcagattaaagctgcacaccagctactgttccctgttcttaatgtccaagtgtcagctgctccatcctactcctgacacaactgaagggccattcataggg

SEQ ID NO: 11688 - DNA, 110 bp, synthetic construct
  source 1..110: mol_type = other DNA
caagtgtcagctgctccatcctactcctgacacaactgaagggccattcataggggatagaacatatttgtagcatgaaagtggactcatttatttgtctaactgagaaa

SEQ ID NO: 11689 - DNA, 110 bp, synthetic construct
  source 1..110: mol_type = other DNA
gatcctcctctctcttcgtgcagtcgctcctacgtatgagtgcttcagtcggatggagcagagcggaggagaaggatgtgtgggggcctcgtctatactataatccccaa

SEQ ID NO: 11690 - DNA, 110 bp, synthetic construct
  source 1..110: mol_type = other DNA
gagcagagcggaggagaaggatgtgtgggggcctcgtctatactataatccccaagctccttgttcagcctgactcccgctgtgcttgccccttcattctgcatctcttg

SEQ ID NO: 11691 - DNA, 110 bp, synthetic construct; identical to SEQ ID NO: 11689
  source 1..110: mol_type = other DNA

SEQ ID NO: 11692 - DNA, 110 bp, synthetic construct; identical to SEQ ID NO: 11690
  source 1..110: mol_type = other DNA

SEQ ID NO: 11693 - DNA, 110 bp, synthetic construct
  source 1..110: mol_type = other DNA
agcgaggccagggttcttaacctgttgagccacaagaagaactccttaatggcactatattactgagctaatctaaagctccagagatatccagactttattttcccttt

SEQ ID NO: 11694 - DNA, 110 bp, synthetic construct
  source 1..110: mol_type = other DNA
tatattactgagctaatctaaagctccagagatatccagactttattttccctttatcaccacatccaaagagtcattaagtaatgttgattttatcttccaatgtttta

SEQ ID NO: 11695 - DNA, 110 bp, synthetic construct
  source 1..110: mol_type = other DNA
caaaaaaacattcacgcagaaatacctagagtaacatttgaccaaatccccatgcactctgtggtccagtgaggttgatccaaagaaggaatcatcacggggttaatgca

SEQ ID NO: 11696 - DNA, 110 bp, synthetic construct
  source 1..110: mol_type = other DNA
actctgtggtccagtgaggttgatccaaagaaggaatcatcacggggttaatgcaactgagctaccaattaaatattctaggtacgacgtaaagtgttatctaacgcaaa

SEQ ID NO: 11697 - DNA, 110 bp, synthetic construct
  source 1..110: mol_type = other DNA
ctacttcaaagtgttcgtatagataatcaaagagaggtatgaatgtgaaaagcgcttggtattgtggctgacaggtaacacaagcttcataaaaggaggatgctgttccc

SEQ ID NO: 11698 - DNA, 110 bp, synthetic construct
  source 1..110: mol_type = other DNA
tcttcaaggcaaattctgtctgcactcaagtttcagaaacaccgtgtgacaagttttggtagcatccattagttcacacatgtggaaattttgctgcttcatgcacattt

SEQ ID NO: 11699 - DNA, 110 bp, synthetic construct
  source 1..110: mol_type = other DNA
ttggtagcatccattagttcacacatgtggaaattttgctgcttcatgcacattttcttctaggcaataggacaaaaaaacagtgatattggaatcataaagtttagcag

SEQ ID NO: 11700 - DNA, 110 bp, synthetic construct
  source 1..110: mol_type = other DNA
ggccaaagaaaaaaaagagagagagatggtccttctcttcagttccctacctaaattgattggtagccatcactcaacatccttccatactgctgtctaaatttgaaact

SEQ ID NO: 11701 - DNA, 110 bp, synthetic construct
  source 1..110: mol_type = other DNA
ctgaagaatccattaagggagaggactagagctgtatgagttgctaaaagaagctagttggacatgctttgaatcctggaaaaagaagaagctaactcagcctgagtcac

SEQ ID NO: 11702 - DNA, 110 bp, synthetic construct
  source 1..110: mol_type = other DNA
agttggacatgctttgaatcctggaaaaagaagaagctaactcagcctgagtcacataaggcaagacacttgtaatgtttaaaaaagaaagaaagagatgcccggattgc

SEQ ID NO: 11703 - DNA, 110 bp, synthetic construct
  source 1..110: mol_type = other DNA
tttcatgcttaaaagctcaacacaaatcactaagtagtgttaaggctaacatgtccagcaaaggccatccattcaacagtcacacttacaaaaggtgcgtctgccatggc

SEQ ID NO: 11704 - DNA, 110 bp, synthetic construct
  source 1..110: mol_type = other DNA
aatatacatctaggtggtagcatagtcacacatagagaaacctaactattccacgtgactttaaaacacaataatttgtcagcacattcctgaggggtatactctaatac

SEQ ID NO: 11705 - DNA, 110 bp, synthetic construct
  source 1..110: mol_type = other DNA
cagtgctgccccagctgtgatgtaggtcacagctacagcttggattcagtccctggcctgcaaactttcatatgccacaggcatgccccaccccacccctgaaaaaaaat

SEQ ID NO: 11706 - DNA, 110 bp, synthetic construct
  source 1..110: mol_type = other DNA
gcctgcaaactttcatatgccacaggcatgccccaccccacccctgaaaaaaaatttactctctttcactccaacttatattaaaagtggggaacatttttaagtttggg

SEQ ID NO: 11707 - DNA, 110 bp, synthetic construct
  source 1..110: mol_type = other DNA
gaatattacctgagaaaatgaagaggctatttttatgcaacagaacagtccccgtcttttcagaatccattttcctatgtccgtcttcctcgtctgcctcaacagcagtg

SEQ ID NO: 11708 - DNA, 110 bp, synthetic construct
  source 1..110: mol_type = other DNA
ttttaaacatatacaaacgagaacaatctaaggaacccttatgtaccagtcacccccatgaaacaatgatcagctctggaccagtcttgcttcatctgcagccccacccc

SEQ ID NO: 11709 - DNA, 110 bp, synthetic construct
  source 1..110: mol_type = other DNA
ccatgaaacaatgatcagctctggaccagtcttgcttcatctgcagccccacccctgctagaccgcttaaaagcgaatcccagacatcatttgatttcctccgtatattg

SEQ ID NO: 11710 - DNA, 110 bp, synthetic construct
  source 1..110: mol_type = other DNA
ccaaagattgcctacacactaccagaagctaggagaaaagagtggagactctttcccccagccttcagaaggaatcaaccctgctgccaccatggtctcagacttcgagc

SEQ ID NO: 11711 - DNA, 110 bp, synthetic construct
  source 1..110: mol_type = other DNA
aaaaaagcagtatctgcaaggcacagtacagcaaagtgcaataaaatgagatatgcctgtataacagtaagtaaactgtatcttaatttactgttgtgggaaataagcaa

SEQ ID NO: 11712 - DNA, 110 bp, synthetic construct
  source 1..110: mol_type = other DNA
cctgtataacagtaagtaaactgtatcttaatttactgttgtgggaaataagcaaaggctcctgcaatgaactgagtcccatagctctgttctttggacttagtctatgt

SEQ ID NO: 11713 - DNA, 110 bp, synthetic construct
  source 1..110: mol_type = other DNA
tatctgaatcctgtgttaggaaattttcatgtcccccatctcccatttttcccacatcagcttcccctctaaccttgtggctatgatgaccaaagctgagggtgagctaa

SEQ ID NO: 11714 - DNA, 110 bp, synthetic construct
  source 1..110: mol_type = other DNA
caataaggagtgtgatagattttgtttgcctttggagggcaattgcttattttctttgtttggtcttgtagagattgattaattttattactttgataaccctctgtatt

SEQ ID NO: 11715 - DNA, 110 bp, synthetic construct; identical to SEQ ID NO: 11714
  source 1..110: mol_type = other DNA

SEQ ID NO: 11716 - DNA, 110 bp, synthetic construct
  source 1..110: mol_type = other DNA
caatgctagatctgagctccatctatgacctacaccatagctcaccttaacgcactgagcagggccaaggattgaacgcgtgtcctccacgtggatacgagtcagatttg

SEQ ID NO: 11717 - DNA, 110 bp, synthetic construct
  source 1..110: mol_type = other DNA
aagaacatcttcagaaaacggtaaagaaactacccacaggaattaagcgaaaggtacttttgttaaactaccaatatgtatcattcagggcctgacactatcctgataac

SEQ ID NO: 11718 - DNA, 110 bp, synthetic construct
  source 1..110: mol_type = other DNA
acttttgttaaactaccaatatgtatcattcagggcctgacactatcctgataacatttcttagcgtgaagcctcatgagtccctccttcctctgttttctttccaccta

SEQ ID NO: 11719 - DNA, 110 bp, synthetic construct
  source 1..110: mol_type = other DNA
ttacatttccctttgtgagctcttaggttttttgtttatttgtttttccggttttcaatgaacagctgtaggttctgtttaaaagcactcttttctttaaattggcccaa

SEQ ID NO: 11720 - DNA, 110 bp, synthetic construct
  source 1..110: mol_type = other DNA
ttccaagatttatccatctgcagttccgcctctgcacattcgaccaatccctgggcagtgtagaaaggcagtatttgccaccaaaaaactccacgtatactcgaacccgt

SEQ ID NO: 11721 - DNA, 110 bp, synthetic construct
  source 1..110: mol_type = other DNA
cagtgtagaaaggcagtatttgccaccaaaaaactccacgtatactcgaacccgtgcagttcagacctctgttgttcagggtcaggggtatgtcattcacatctcaagcc

SEQ ID NO: 11722 - DNA, 110 bp, synthetic construct
  source 1..110: mol_type = other DNA
ttttattccaaaacaggcgcgtttcttgacatatgtgaaggacaggtccctgcaatacttggacatggtggagctggtaaaatcgacactgctcaacattcttagtggtt

SEQ ID NO: 11723 - DNA, 110 bp, synthetic construct
  source 1..110: mol_type = other DNA
atttagtgtttatggcagtacattttatatccgtttattaggatggatatcctgttcagctctctgctaggcccactgacagtgttatgctgaaaaaaggaaaatcaaga

SEQ ID NO: 11724 - DNA, 110 bp, synthetic construct
  source 1..110: mol_type = other DNA
tcagctctctgctaggcccactgacagtgttatgctgaaaaaaggaaaatcaagattagattgggagttcacgttgtggcgcagcagaaatgaatcagactagtatccta

SEQ ID NO: 11725 - DNA, 110 bp, synthetic construct
  source 1..110: mol_type = other DNA
tctaataatatgtcatttaagtttcattgttttcttcactcttcaagttttcttctcagtaataggaggttagaaagccaagactttctttctgatgcttagatgtctaa

SEQ ID NO: 11726 - DNA, 110 bp, synthetic construct
  source 1..110: mol_type = other DNA
tcagtaataggaggttagaaagccaagactttctttctgatgcttagatgtctaacatattctgcactgttgtgaacaagcttctttgctcattgttctaatgttactga

SEQ ID NO: 11727 - DNA, 110 bp, synthetic construct
  source 1..110: mol_type = other DNA
attcatggaagatcaacatcttatgcatgattcatgccaaagaatgtgacagatactcaattcgactctgctgtttgggaagggctgtcatagtttcttaacattcctac

SEQ ID NO: 11728 - DNA, 110 bp, synthetic construct
  source 1..110: mol_type = other DNA
cctcatgaatactagttaggttcattgccacggagccacaacaggaactccgggtctctttttgttatgaagaattattccatgagttcccatcatggcgcagtggttaa

SEQ ID NO: 11729 - DNA, 110 bp, synthetic construct; identical to SEQ ID NO: 11728
  source 1..110: mol_type = other DNA

SEQ ID NO: 11730 - DNA, 110 bp, synthetic construct; identical to SEQ ID NO: 11728
  source 1..110: mol_type = other DNA

SEQ ID NO: 11731 - DNA, 110 bp, synthetic construct; identical to SEQ ID NO: 11728
  source 1..110: mol_type = other DNA

SEQ ID NO: 11732 - DNA, 110 bp, synthetic construct
  source 1..110: mol_type = other DNA
gggcagccttatgttttccgtctgtctgttttccttcctcctctagcccttgaagcccgtgggtcagaactccctctctgcgggattttccttctcactgctccgtggca

SEQ ID NO: 11733 - DNA, 110 bp, synthetic construct
  source 1..110: mol_type = other DNA
cccgtgggtcagaactccctctctgcgggattttccttctcactgctccgtggcatcttggcttgcttctcacctgccctaaggaagactcaggtctcctgcttccagaa

SEQ ID NO: 11734 - DNA, 110 bp, synthetic construct
  source 1..110: mol_type = other DNA
tacaagatacagtcagctaactgactaaataagaaataggtaagagcagctgatgatctactttgtagggaaaaaaatcctaagaaagattaagatcactattatgaaaa

SEQ ID NO: 11735 - DNA, 110 bp, synthetic construct; identical to SEQ ID NO: 11734
  source 1..110: mol_type = other DNA

SEQ ID NO: 11736 - DNA, 110 bp, synthetic construct
  source 1..110: mol_type = other DNA
ctgattcagtgaatctggagtggtgacagtggcaaccacagggtggtgaagttagacgactaatcaacccaagccaacctgcattagttttacttgcaaattgcaataga

SEQ ID NO: 11737 - DNA, 110 bp, synthetic construct
  source 1..110: mol_type = other DNA
acgactaatcaacccaagccaacctgcattagttttacttgcaaattgcaatagaacaccctttcctggctccatgcttgtagctttatcacacaaaatctatgaaaccc

SEQ ID NO: 11738 - DNA, 110 bp, synthetic construct
  source 1..110: mol_type = other DNA
ggctacctgttcttagttttccatgtaagtagtgccaccatctgtcccgtgtcctggaaatagagctttgcgtagggttggggctctgcatcaggttggctgtgcgtgac

SEQ ID NO: 11739 - DNA, 110 bp, synthetic construct
  source 1..110: mol_type = other DNA
ggaaatagagctttgcgtagggttggggctctgcatcaggttggctgtgcgtgactcgtgaggatttctacgtcgtgggctccagttgcacttctccccagttagacaac

SEQ ID NO: 11740 - DNA, 110 bp, synthetic construct
  source 1..110: mol_type = other DNA
acctcacggttactagtcagatttgtttccactgcaccacaacggaaactccccatggtttattcttaaagctctgaccacggtctgaaagtacaggacttcctcattca

SEQ ID NO: 11741 - DNA, 110 bp, synthetic construct
  source 1..110: mol_type = other DNA
tggtttattcttaaagctctgaccacggtctgaaagtacaggacttcctcattcattgacttttgtattgtctcccccaaatgtctatcatagcggcttctcgtaggcac

SEQ ID NO: 11742 - DNA, 110 bp, synthetic construct
  source 1..110: mol_type = other DNA
aaaaagttgaaaacgacaaagtttcacacataaataatgctgggaagactaggaggggttataaaaagtaactctgaaatccgcgcaaacttatttttaaaaaataaagt

SEQ ID NO: 11743 - DNA, 110 bp, synthetic construct
  source 1..110: mol_type = other DNA
agactaggaggggttataaaaagtaactctgaaatccgcgcaaacttatttttaaaaaataaagtcatcctcattcagtacttcattattagtaacaaattactgatgac

SEQ ID NO: 11744 - DNA, 110 bp, synthetic construct
  source 1..110: mol_type = other DNA
gtcagtgtgccaggccaccaggcacccattcattgctcaacatcaacccctggaactcaggtcagaaactcattcagtgggcgttctcacccttttctgagcttcagaat

SEQ ID NO: 11745 - DNA, 110 bp, synthetic construct
  source 1..110: mol_type = other DNA
ctcaggtcagaaactcattcagtgggcgttctcacccttttctgagcttcagaatcacccgggtaacgagccatgctaatgcccaggccacccccagacccatgaaatca

SEQ ID NO: 11746 - DNA, 110 bp, synthetic construct
  source 1..110: mol_type = other DNA
gagtctacagtgtgggaagtcccagagccaggagttgaacacaggctttctcccgccaaagctgatgtccctaactgccacccagctatagtacatagtaaaatgaactt

SEQ ID NO: 11747 - DNA, 110 bp, synthetic construct
  source 1..110: mol_type = other DNA
caagtgacctagaagagcttctgtgaccagagtgatgctagaaagtttcccaatttatgcctgctgcagtctaactcctgtagtccctattctggagttctactgtggtt

SEQ ID NO: 11748 - DNA, 110 bp, synthetic construct
  source 1..110: mol_type = other DNA
tatgcctgctgcagtctaactcctgtagtccctattctggagttctactgtggttttttaaaaacaagttcattcataacagtcttaatatcggtagaacttttacacca

SEQ ID NO: 11749 - DNA, 110 bp, synthetic construct
  source 1..110: mol_type = other DNA
tgtctctctttcccctcacttcttgtctgtgctgctctagttcgaggtgataaacccagctcagcactttgcaaccttcccatcagactcccaagagagtcgaacagtcc

SEQ ID NO: 11750 - DNA, 110 bp, synthetic construct
  source 1..110: mol_type = other DNA
caccagatgcgtgaattgcattctctgagcaaaattcgtatatggcacagtagcacgtctgtaatttttaaaaactggaagcgaagctccctttggggaaggaaaagctg

SEQ ID NO: 11751 - DNA, 110 bp, synthetic construct
  source 1..110: mol_type = other DNA
aaaatctgccttgtagatctccttggttggcaagaatacctgctatacatttccatggactgtgaagatataaaacataatagcctttagaatttaaatactggcctttg

SEQ ID NO: 11752 - DNA, 110 bp, synthetic construct
  source 1..110: mol_type = other DNA
tggactgtgaagatataaaacataatagcctttagaatttaaatactggcctttgatccttgattgccaaatagcccaaatgcatgattttaacaatgctgcaggacact

SEQ ID NO: 11753 - DNA, 110 bp, synthetic construct
  source 1..110: mol_type = other DNA
tgaggaatgccatgggtctctcgggccgcgcagtgcacaactgcacgatagaatccttgagcagggcctgaatgttgtgcttctggacgtagagctcacattcccggagg

SEQ ID NO: 11754 - DNA, 110 bp, synthetic construct
  source 1..110: mol_type = other DNA
cttgagcagggcctgaatgttgtgcttctggacgtagagctcacattcccggaggctacgctcctcctcactggcggtgctgccagacgccatggttccctacaggaaaa

SEQ ID NO: 11755 - DNA, 110 bp, synthetic construct
  source 1..110: mol_type = other DNA
aataatccttctcataattaaaaatcatttacaagctgacatttgccaagagtaggctgacattgctctcgacaccgattaaaaatgaagctgctggagttcctgtcgtg

SEQ ID NO: 11756 - DNA, 110 bp, synthetic construct
  source 1..110: mol_type = other DNA
tgtaattacagctactccagcaacatcctgtccatcaggctgaaccggcaggtgagtggggtgggggggagtcccgggctccagctggtgggatccgaaaaaacagatga

SEQ ID NO: 11757 - DNA, 110 bp, synthetic construct
  source 1..110: mol_type = other DNA
gtggggtgggggggagtcccgggctccagctggtgggatccgaaaaaacagatgaatatccttcatgatgaatgcctcgaccacaagcgtgtagttctacaggggggtta

SEQ ID NO: 11758 - DNA, 110 bp, synthetic construct
  source 1..110: mol_type = other DNA
aagaccactcccagttggcgctgtatttctctaggctattgctgaaggtaccagacacatttctatccactttcagtcctagcatattttcagctctccaggaaccagaa

SEQ ID NO: 11759 - DNA, 110 bp, synthetic construct
  source 1..110: mol_type = other DNA
cacatttctatccactttcagtcctagcatattttcagctctccaggaaccagaactcaattacagtggttcttttattattttttttttttatttttttagtgctgcac

SEQ ID NO: 11760 - DNA, 110 bp, synthetic construct
  source 1..110: mol_type = other DNA
tggcagtgagcacaaccctcctgggagcacctccttaaactttgctcacgctaacccaagcccaagacagaggaaaatccagttaccctgacggccgggttggatggtta

SEQ ID NO: 11761 - DNA, 110 bp, synthetic construct
  source 1..110: mol_type = other DNA
ccaagcccaagacagaggaaaatccagttaccctgacggccgggttggatggttatttgatgtctacatgtaataaacatcctcacagctccttcctttgcccctagtcc

SEQ ID NO: 11762 - DNA, 110 bp, synthetic construct; identical to SEQ ID NO: 11760
  source 1..110: mol_type = other DNA

SEQ ID NO: 11763 - DNA, 110 bp, synthetic construct; identical to SEQ ID NO: 11761
  source 1..110: mol_type = other DNA

SEQ ID NO: 11764 - DNA, 110 bp, synthetic construct
  source 1..110: mol_type = other DNA
gcaatgggatcggcagtgtcttgggagcatggggatgcaggttctatccccagctcggcacagtgggttaaggatcctgtgttgctgcagcagcagcttaggtcacaact

SEQ ID NO: 11765 - DNA, 110 bp, synthetic construct; identical to SEQ ID NO: 11764
  source 1..110: mol_type = other DNA

SEQ ID NO: 11766 - DNA, 110 bp, synthetic construct
  source 1..110: mol_type = other DNA
tacctctcctccacatatagctctcatttctccccagagtggaatgacggatcaattgattgctaatgccctggagtgatcacacccaactactgtttgctctccccatt

SEQ ID NO: 11767 - DNA, 110 bp, synthetic construct
  source 1..110: mol_type = other DNA
aagtttttggtgcgttttcctagagtatcttccttgacatcctgctctcacaaactcaaaacgttaaccaaacatcttcacatcctccccaacaccggcccgcagctctc

SEQ ID NO: 11768 - DNA, 110 bp, synthetic construct
  source 1..110: mol_type = other DNA
agagtgactcccgccgcctgaagtctgcagtctttctcttccaaaacaggcttttgtgtttcctgcactgtgtgcttggcagggagcctggggaccttgacatcacgtcc

SEQ ID NO: 11769 - DNA, 110 bp, synthetic construct
  source 1..110: mol_type = other DNA
gtgtttcctgcactgtgtgcttggcagggagcctggggaccttgacatcacgtcctctgcccacccgcctcccccaaggcatatacggtggccaaggacaagtgtccaca

SEQ ID NO: 11770 - DNA, 110 bp, synthetic construct
  source 1..110: mol_type = other DNA
atatgagaaggtatggagatgctttcaagtatcagttcttataatcgagcggactacagtcttgagctgttttcccctgttctccccgttatccattaacacctcccctc

SEQ ID NO: 11771 - DNA, 110 bp, synthetic construct
  source 1..110: mol_type = other DNA
acagtcttgagctgttttcccctgttctccccgttatccattaacacctcccctcaaccgtccatccatccatcttcccatccatccgtccatcacccagccctcatcca

SEQ ID NO: 11772 - DNA, 110 bp, synthetic construct; identical to SEQ ID NO: 11770
  source 1..110: mol_type = other DNA

SEQ ID NO: 11773 - DNA, 110 bp, synthetic construct; identical to SEQ ID NO: 11771
  source 1..110: mol_type = other DNA

SEQ ID NO: 11774 - DNA, 110 bp, synthetic construct
  source 1..110: mol_type = other DNA
ttgaatgttcagagcaggataattcataatggccaaaaggtggaaccatctctcatgtctatcagctggtgaatggatatgacttattcctacaagggactacttttcag

SEQ ID NO: 11775 - DNA, 110 bp, synthetic construct
  source 1..110: mol_type = other DNA
tgtctatcagctggtgaatggatatgacttattcctacaagggactacttttcagctgtgaaaaagaaagacatgctgataccggttacaacatggatgcattttgaaaa

SEQ ID NO: 11776 - DNA, 110 bp, synthetic construct
  source 1..110: mol_type = other DNA
actgcgccaccatgggaactccgtatttcaagggtttagatctttactcagagagtttgtcaatcccttggacttgccttccgtgaatatattcatgagagtaactagac

SEQ ID NO: 11777 - DNA, 110 bp, synthetic construct
  source 1..110: mol_type = other DNA
tttgtcaatcccttggacttgccttccgtgaatatattcatgagagtaactagacctgacatttacatttggggctctccccctcccattggaggtgaaaggtgatcatg

SEQ ID NO: 11778 - DNA, 110 bp, synthetic construct
  source 1..110: mol_type = other DNA
tacagagaaccagagttcaagttcaagtcagagttcaaacacgtttcaaagcatctcaggtgaaggggagggctgtccaaaatggcaattatccccccctccattccatt

SEQ ID NO: 11779 - DNA, 110 bp, synthetic construct
  source 1..110: mol_type = other DNA
tcaggtgaaggggagggctgtccaaaatggcaattatccccccctccattccattcctaaagatggaaacgttgaagcaaagggtgggagaactttgggaccatgtagag

SEQ ID NO: 11780 - DNA, 110 bp, synthetic construct
  source 1..110: mol_type = other DNA
gttggagatgccttattctgaaaaaccgatgacatctgcttccatcagggctgaaggctggaactaagaagtgtacctacatctaaaaagcctgaccctgaacctccttc

SEQ ID NO: 11781 - DNA, 110 bp, synthetic construct
  source 1..110: mol_type = other DNA
ggctggaactaagaagtgtacctacatctaaaaagcctgaccctgaacctccttcatggaacgggagcccaagaggggaccagagggagcaaaggagaaaagagaatcct

SEQ ID NO: 11782 - DNA, 110 bp, synthetic construct
  source 1..110: mol_type = other DNA
cacaccctgcagcccctgacccccaagaaatcctgaggctaatcactaaaatcaagcccccttcccctggcagaaggcacagcgtggttctacctagagcttttcaacct

SEQ ID NO: 11783 - DNA, 110 bp, synthetic construct
  source 1..110: mol_type = other DNA
gcccccttcccctggcagaaggcacagcgtggttctacctagagcttttcaacctgttccttcctgtgagccacacattatcaaacaggggctttggaaccagacttggg

SEQ ID NO: 11784 - DNA, 110 bp, synthetic construct
  source 1..110: mol_type = other DNA
tggttgccgaggaatgatctctcataggatgagctaataattgacttttcctctttctaagaatcataaaggtatagaccaaatctgttcaagagcctggcatcatcaga

SEQ ID NO: 11785 - DNA, 110 bp, synthetic construct
  source 1..110: mol_type = other DNA
gacgctgggcaccccgggaagcccccagcgacaggatggcttccagaggccaaggccaagaaatgagctctgccaactaccccgtgtaggtcgacggctgcttcactcat

SEQ ID NO: 11786 - DNA, 110 bp, synthetic construct
  source 1..110: mol_type = other DNA
ccaagaaatgagctctgccaactaccccgtgtaggtcgacggctgcttcactcatactcggcctttccgtgaagacctggcccttctcacccgcccatcctgagccgggg

SEQ ID NO: 11787 - DNA, 110 bp, synthetic construct
  source 1..110: mol_type = other DNA
gtttccgaggaaggcactgttaacatgtgaccctacaggctaaggtttgaatctgagctatcgcccttgagtcatggtcagggcttttgcacaaaccaggaagcaagccc

SEQ ID NO: 11788 - DNA, 110 bp, synthetic construct
  source 1..110: mol_type = other DNA
agctatcgcccttgagtcatggtcagggcttttgcacaaaccaggaagcaagcccatccatcctccattccccctctcctagtcctttgctttttccatcgcatccctgg

SEQ ID NO: 11789 - DNA, 110 bp, synthetic construct
  source 1..110: mol_type = other DNA
gggaggtgggactgtgaggtggcagatgctgcctggagaccaaggccctctctgtctttcgcctcgcatttcggcctctggttggaaacagtcagcttggcagcctggca

SEQ ID NO: 11790 - DNA, 110 bp, synthetic construct
  source 1..110: mol_type = other DNA
ctttcgcctcgcatttcggcctctggttggaaacagtcagcttggcagcctggcagtcgtgataggctttggcgagcagcaacgctgcgaatagcttgagatgaaattag

SEQ ID NO: 11791 - DNA, 110 bp, synthetic construct
  source 1..110: mol_type = other DNA
acctgtccttgaagcctcttctctgtccccttccagagggaacaacctctgtttcctccccaaaacacacgattcacacaatcaccactgagactgtcgctggtccctag

SEQ ID NO: 11792 - DNA, 110 bp, synthetic construct
  source 1..110: mol_type = other DNA
aacaaagaaactaactgaaaacaagtgtgggctacgatgtggagaaattggaagcctgaactgctgatgggaatgtaaaatgatgctgcagctatggaagacagcacgga

SEQ ID NO: 11793 - DNA, 110 bp, synthetic construct
  source 1..110: mol_type = other DNA
ctgaactgctgatgggaatgtaaaatgatgctgcagctatggaagacagcacggaagatttctcaaaaaagtaaaaacagaattaccatacgatccagcaattccacttc

SEQ ID NO: 11794 - DNA, 110 bp, synthetic construct
  source 1..110: mol_type = other DNA
catcaccgctcactccaatgactcctaactaatcacccagccgccagctcactgccttacaattcttactcctcggcttaaaattcttcagtggcttctgattgttgaca

SEQ ID NO: 11795 - DNA, 110 bp, synthetic construct
  source 1..110: mol_type = other DNA
ttgtccagtctggtccttcacatgtgggggcatctcaaaggtaaacatgaagcagcacacctctttaccttgagctactagacactttcagctgatcaacaataatgtgt

SEQ ID NO: 11796 - DNA, 110 bp, synthetic construct
  source 1..110: mol_type = other DNA
cacacctctttaccttgagctactagacactttcagctgatcaacaataatgtgtaatggagttcacggagaccaggcaggtggcacatcatgcaaagcggggaggatga

SEQ ID NO: 11797 - DNA, 110 bp, synthetic construct
  source 1..110: mol_type = other DNA
cacccgtaggggattcagggttctcctcagtctggacctcgagtttcctgcacattcggtcccagctgggctcatctccgcaggtctctccacatacactctgtgctctc

SEQ ID NO: 11798 - DNA, 110 bp, synthetic construct
  source 1..110: mol_type = other DNA
gaatttgaatggaaaaaaacagctcatctttgctttcagccccctaactggcctttgccatttcccttcaactgtgaatacagtcaacaaaccagggtagtattagcaat

SEQ ID NO: 11799 - DNA, 110 bp, synthetic construct
  source 1..110: mol_type = other DNA
gggtttatgcttactttcattattttattaaatcaaatctttttcaatgagggggaaaaggagaggaattcaagcataagcttcaagatggatatgtacgatgttatatt

SEQ ID NO: 11800 - DNA, 110 bp, synthetic construct
  source 1..110: mol_type = other DNA
gatactcacaaacccagaattttaagcacagctctggtctagaagtgtactctcaggcttaaatagttcatcttccccatgtcctcaaacatacgcctgagggcacccat

SEQ ID NO: 11801 - DNA, 110 bp, synthetic construct
  source 1..110: mol_type = other DNA
ggcttaaatagttcatcttccccatgtcctcaaacatacgcctgagggcacccattaactaggtacccataacataaaacaaaaatattcctaataatcactaatgctca

SEQ ID NO: 11802 - DNA, 110 bp, synthetic construct
  source 1..110: mol_type = other DNA
cctgtctcaggttctgcatctaggcatacatcgttttgcctgttttgcctaatgtccttttctatttaaacggtccagcccaccccaacctaagcagaaatgcagtgctt

SEQ ID NO: 11803 - DNA, 110 bp, synthetic construct
  source 1..110: mol_type = other DNA
tagtcatgacaggtgaaggagcatccttaagtcctgaggtctgtgtgtcccacatcctccctccgtctctccccaggacgcggagctgacagctcttgctgtgctgtcct

SEQ ID NO: 11804 - DNA, 110 bp, synthetic construct
  source 1..110: mol_type = other DNA
gtcttagatatgaaaattaatgtttaatccaatggccccagacaaggaaaaggtggggcaaaatagttttcatagcttctgtcccctgtggtccacggggagcacctgag

SEQ ID NO: 11805 - DNA, 110 bp, synthetic construct
  source 1..110: mol_type = other DNA
tgtgacatctttatgttgtgagcaaaatggttgaaggatggttagctggagccgggcaggcatgttgttttgcagcgaaagaaacccaacgtgactagtagcctgctcta

SEQ ID NO: 11806 - DNA, 110 bp, synthetic construct
  source 1..110: mol_type = other DNA
tgagctgaaatgttgcctctgattattgtgggtatccctgtcattaaggtcttggtgcaagtttaaatggaagcatgaagctaaagacatagactttcaccaaattctgt

SEQ ID NO: 11807 - DNA, 110 bp, synthetic construct
  source 1..110: mol_type = other DNA
tgcaagtttaaatggaagcatgaagctaaagacatagactttcaccaaattctgtggggtgacagtagcgttctgtaatgtaggcatcatatgatgtaccagtgttcctc

SEQ ID NO: 11808 - DNA, 110 bp, synthetic construct
  source 1..110: mol_type = other DNA
aaatcctttcagaattaatttatttaaggattaagcccgtcagaaccccaggaccatttccagtaaacagcttacccatcgcatctgtgaccaggctcgtttccctcgtg

SEQ ID NO: 11809 - DNA, 110 bp, synthetic construct
  source 1..110: mol_type = other DNA
atttccagtaaacagcttacccatcgcatctgtgaccaggctcgtttccctcgtgagccagtggtggtaattggactcagtctttcctgtgagacaccactcactttcag

SEQ ID NO: 11810 - DNA, 110 bp, synthetic construct
  source 1..110: mol_type = other DNA
tacacttaatcacaatcataacagttgtgcagcgtcggtggtatagtggtgagcacagctgccttccagtgataacagtgccggggtccccaccgcctgtatgaatactg

SEQ ID NO: 11811 - DNA, 110 bp, synthetic construct
  source 1..110: mol_type = other DNA
cagctgccttccagtgataacagtgccggggtccccaccgcctgtatgaatactgggttgtgcataggtgattgcatgcagtcaaacaatggccatctccacctgcagtc

SEQ ID NO: 11812 - DNA, 110 bp, synthetic construct
  source 1..110: mol_type = other DNA
atagtaagtactcacatcgtgcagtctttttttttttttttttcctgctatctcccaagctgccaaccatttaaaacacttcgtatacattatttaattgtgctagcagc

SEQ ID NO: 11813 - DNA, 110 bp, synthetic construct
  source 1..110: mol_type = other DNA
caagctgccaaccatttaaaacacttcgtatacattatttaattgtgctagcagccctctactactggaaatatgcttcttctggataaagaaacaggctcaagaactta

SEQ ID NO: 11814 - DNA, 110 bp, synthetic construct
  source 1..110: mol_type = other DNA
tggttcttggggtttcccccgtttctctctgacttgctgtggtcacacttgaacgtgtggccttgagcaccagcttttgcaatgccaggacctctttatttttaaggcag

SEQ ID NO: 11815 - DNA, 110 bp, synthetic construct
  source 1..110: mol_type = other DNA
ggagggggaaccctgatctcatggtcattcaaggacccacggtcttcgtctcccgtccctggctccgccacctctcagagcttcgaattcttccaccgcgtcctcctcat

SEQ ID NO: 11816 - DNA, 110 bp, synthetic construct
  source 1..110: mol_type = other DNA
gaaatatccaaagagcaaaggagttgagtcctgactccggagctgaggcagggaggtcgatgacagctagtgtgcagcctccctcccgtcttaatcacctgccttttcta

SEQ ID NO: 11817 - DNA, 110 bp, synthetic construct
  source 1..110: mol_type = other DNA
gtcgatgacagctagtgtgcagcctccctcccgtcttaatcacctgccttttctacgccaggcacttgctgtgtgagttgcagcttaaatccttgtcatgcctgatcttt

SEQ ID NO: 11818 - DNA, 110 bp, synthetic construct
  source 1..110: mol_type = other DNA
gagcgcagtctctgggtggttctcccattaagaggaggcgacctcgatccatcaatcgtagtacacgtgatcatagaagctaacgttgattggcgcctatccagtgcaac

SEQ ID NO: 11819 - DNA, 110 bp, synthetic construct
  source 1..110: mol_type = other DNA
atgattaggtagagataacaagagctaaagacgagcagaaatccagtggtgggtatatgcacagagaatagggcgtggaggaccgtggctcatgaaagaggtgggatgat

SEQ ID NO: 11820 - DNA, 110 bp, synthetic construct
  source 1..110: mol_type = other DNA
ctctgtttcttccgcctccactggtcttctttctctcttctgacaagagaaaacccagctggagtcagctgacttagtgaagagaagcttgggatcttggtggaccccag

SEQ ID NO: 11821 - DNA, 110 bp, synthetic construct
  source 1..110: mol_type = other DNA
ggctccccacccctagtctcagtgggcctgggacagaatgatggggcagagattaagaagtcctccggagatgaggtaagatttagtgatgtccagatgctcttggttcc

SEQ ID NO: 11822 - DNA, 110 bp, synthetic construct
  source 1..110: mol_type = other DNA
cactaaccagcctcctttccccttcaaattccacaacaaatgtgaaatagatagaggagccctgtaccaaagcgtgagctttttgcctgcaagagctggatgagcgaatg

SEQ ID NO: 11823 - DNA, 110 bp, synthetic construct
  source 1..110: mol_type = other DNA
ggagccctgtaccaaagcgtgagctttttgcctgcaagagctggatgagcgaatgcggctccaactagaagccaaataggaccaagccgccccatgctgggcagggcagc

SEQ ID NO: 11824 - DNA, 110 bp, synthetic construct
  source 1..110: mol_type = other DNA
aatgggctcggctttttactgccccttcccctcccctaacaataacagatttgctattcaatttgtggccattatgattcggcgtaatctttcttttaccattattctta

SEQ ID NO: 11825 - DNA, 110 bp, synthetic construct
  source 1..110: mol_type = other DNA
attcaatttgtggccattatgattcggcgtaatctttcttttaccattattcttagtaataattggaaatcaggaactgacggttagattacaaagacgaaagagagata

SEQ ID NO: 11826 - DNA, 110 bp, synthetic construct
  source 1..110: mol_type = other DNA
tcaaggttgtttgtggataagctgatgttttaattgccttccttacttctgactttgacatggataagaagcaaggccagtgtcacagaaatttagatcaagactgtgct

SEQ ID NO: 11827 - DNA, 110 bp, synthetic construct
  source 1..110: mol_type = other DNA
tgacatggataagaagcaaggccagtgtcacagaaatttagatcaagactgtgctactctatgatactacaagagtgaagcaggatagaggattgtggtctgaaggagtc

SEQ ID NO: 11828 - DNA, 110 bp, synthetic construct; identical to SEQ ID NO: 11826
  source 1..110: mol_type = other DNA

SEQ ID NO: 11829 - DNA, 110 bp, synthetic construct; identical to SEQ ID NO: 11827
  source 1..110: mol_type = other DNA

SEQ ID NO: 11830 - DNA, 110 bp, synthetic construct
  source 1..110: mol_type = other DNA
cccttcagcagaacatgggtagctgatgggactggaaagagctagcagagctgcgaggaaaaggaacagaggagagggggaatcaaggaggaagtttccccaagataagg

SEQ ID NO: 11831 - DNA, 110 bp, synthetic construct
  source 1..110: mol_type = other DNA
aagaaaagaacctcatggatgtcttaaaagtgtcttcagagttcccaggcgttccccagatctcaccgtgcaaatggtctacgccattcctgattggataatctactacc

SEQ ID NO: 11832 - DNA, 110 bp, synthetic construct
  source 1..110: mol_type = other DNA
ccagatctcaccgtgcaaatggtctacgccattcctgattggataatctactacctggaacaaaaaccctataattgatacacccccttagcgggtgcatttatcccttc

SEQ ID NO: 11833 - DNA, 110 bp, synthetic construct
  source 1..110: mol_type = other DNA
tctgtacgggatggttctacatggaagttgagtcctctgctttatgcagctctggcaaatgtccttaagactttccatcaggggagttcccgtcttggctcagtggttaa

SEQ ID NO: 11834 - DNA, 110 bp, synthetic construct
  source 1..110: mol_type = other DNA
ctcttggcatgatttattgtaaattattttcaagttatgcgtgatatgaccaactttccagcaatattagcatatgttgtgcagcacttaaattttcaaaacttggtctg

SEQ ID NO: 11835 - DNA, 110 bp, synthetic construct
  source 1..110: mol_type = other DNA
atctaatgaacattcagtacgtattgatggggatatttcaggagctaaattctctctcatgggcaaggaaggaataggctattaagttacatacagtgctttgtgtgttt

SEQ ID NO: 11836 - DNA, 110 bp, synthetic construct
  source 1..110: mol_type = other DNA
tcgttaccaccgagccatgacgggaactgcctctttcctaccttctggtgtccgtggccatcctgtgtgttccttggcttgtagctgcatcactctcatctcgagctcca

SEQ ID NO: 11837 - DNA, 110 bp, synthetic construct
  source 1..110: mol_type = other DNA
gcttggctcattggctgctaggagagctggtgcctggcctctcactgtcacacgtaggaaggtggggtcctcgccagtgggcccttgaatgactatggttggattagagg

SEQ ID NO: 11838 - DNA, 110 bp, synthetic construct
  source 1..110: mol_type = other DNA
ccgtagaaaaatggtaaagaacatgaatagctaaactatggaagaagaaatgccaataaccaatagccttactcctaatcacaagaaatgtgatggaaacaagaagataa

SEQ ID NO: 11839 - DNA, 110 bp, synthetic construct
  source 1..110: mol_type = other DNA
ccataacagcctctgaccaaggagctaattgtacagtgaaagaaataaagaagctagttgaactcttaggtgcgccagccctatcatgtaccccaactacgagaagcagc

SEQ ID NO: 11840 - DNA, 110 bp, synthetic construct
  source 1..110: mol_type = other DNA
aggggtcagaaaaggctgccccgaagaggtgaccgttgagttcagagttaaagtagctgggtgaaggaaggggaggggggattctcggccctcggaccccagtgcaaggg

SEQ ID NO: 11841 - DNA, 110 bp, synthetic construct
  source 1..110: mol_type = other DNA
gctgggtgaaggaaggggaggggggattctcggccctcggaccccagtgcaagggactggagggaaagctgtgaaggattttaaagtagggagtgatgtgatcagatctg

SEQ ID NO: 11842 - DNA, 110 bp, synthetic construct
  source 1..110: mol_type = other DNA
cagtcactccttgcagatactctgatgagctaagactgtcaggtcccccaccatgctgtgcctacagagcttggccactccactgttccaggtgtggtgacggatctgtg

SEQ ID NO: 11843 - DNA, 110 bp, synthetic construct
  source 1..110: mol_type = other DNA
tggctcctgccttcctctctcgtgccaacttcatctcttgttgcacctccacaaccttcctgcagccacagcacagcgaatgtggttactaggaagaagtgcgtgctctt

SEQ ID NO: 11844 - DNA, 110 bp, synthetic construct
  source 1..110: mol_type = other DNA
gatgcaggtcaggtgcccaggaccaaggctgggcaattaaggagtggagaagctgtagcaagtttagggcctgaaaggaaagagccagcagagggaaactaaagacaggc

SEQ ID NO: 11845 - DNA, 110 bp, synthetic construct
  source 1..110: mol_type = other DNA
tagcaagtttagggcctgaaaggaaagagccagcagagggaaactaaagacaggcaaaggggaaatgaatggcttgcaccttttgagcgtttactggactggtttcatga

SEQ ID NO: 11846 - DNA, 110 bp, synthetic construct
  source 1..110: mol_type = other DNA
gagccacagcagaaactctgttctatgtaaagttcttatacccatgctcggcacagaaaatgcactatatactcttagctattgtgttagctaccagtcacacatgtatt

SEQ ID NO: 11847 - DNA, 110 bp, synthetic construct
  source 1..110: mol_type = other DNA
gcccccatagcagaagcagggtgggtgtcctcttgcccacttcaagtccatcatgcctcctcccccgcagtccgtcactagtgccctttggaggcgcagaccgtctgacc

SEQ ID NO: 11848 - DNA, 110 bp, synthetic construct
  source 1..110: mol_type = other DNA
gctgctggcctacgccacaacaacgcgaatctgaacaggatccaagccatgtcttcagcctgcaccacacagctcagggcaacaccagttccttaacccactgcacaagg

SEQ ID NO: 11849 - DNA, 110 bp, synthetic construct; identical to SEQ ID NO: 11848
  source 1..110: mol_type = other DNA

SEQ ID NO: 11850 - DNA, 110 bp, synthetic construct
  source 1..110: mol_type = other DNA
agtatcctcttcacagtgctgattaccgaagctactttggagaatggattaatacatctgagaagtagagacaccacaatgagggaaatgatgcatatatccaaagtaaa

SEQ ID NO: 11851 - DNA, 110 bp, synthetic construct
  source 1..110: mol_type = other DNA
tttggagaatggattaatacatctgagaagtagagacaccacaatgagggaaatgatgcatatatccaaagtaaaagactttttaactaaatatatatcatcagctaaga

SEQ ID NO: 11852 - DNA, 110 bp, synthetic construct
  source 1..110: mol_type = other DNA
gtcccctcacctgctgtgtcacaaagctctaactaaaatagcctccccaaagtttaaaaaaaaaaggaattcccatcgcggcttagtggtaatgaaccaaactagtatcc

SEQ ID NO: 11853 - DNA, 110 bp, synthetic construct
  source 1..110: mol_type = other DNA
aaaatccttgatgtgtggcagggaaagagtctgtttcgactgctgtgattatttctgaggtcatttgaagaaggtctagggaagatggtttggtctttgggaagctcaag

SEQ ID NO: 11854 - DNA, 110 bp, synthetic construct
  source 1..110: mol_type = other DNA
tgaggtcatttgaagaaggtctagggaagatggtttggtctttgggaagctcaagaaagagagcattgaagttaaaaagaaggccgaggatgcaagagtgagcaagaaga

SEQ ID NO: 11855 - DNA, 110 bp, synthetic construct
  source 1..110: mol_type = other DNA
ctttccagacactgcaggaagaagagagagacgggcaattccggaagggacatcatctagagattcccaggtccccaaacccgctcagcttttgtcaattacagattccc

SEQ ID NO: 11856 - DNA, 110 bp, synthetic construct
  source 1..110: mol_type = other DNA
tctagagattcccaggtccccaaacccgctcagcttttgtcaattacagattcccagtcccccagcccccacagcccgcctgcatcagaatttctgggtgggagttcccg

SEQ ID NO: 11857 - DNA, 110 bp, synthetic construct
  source 1..110: mol_type = other DNA
caatacttttacatgtgaattttaaagcatttcaagcttccatgcaagattctgtgttgcctcttgccaaacttcttgtaatgcttaattgcattgtgtgaagtgtctgt

SEQ ID NO: 11858 - DNA, 110 bp, synthetic construct
  source 1..110: mol_type = other DNA
caagtgatcctgatcacttagccgttctaaacctcagtttcggggcggggggggagtataaggattagatgaattaacgtcaatcacctggcacattctgagtagtaaac

SEQ ID NO: 11859 - DNA, 110 bp, synthetic construct
  source 1..110: mol_type = other DNA
aggttcaggtgaggcttgtcaccatccaaaaataattttaacacccccgaatagttggtgtacaagacctttggattctgccaagggcagacacaccctgggggctcttg

SEQ ID NO: 11860 - DNA, 110 bp, synthetic construct
  source 1..110: mol_type = other DNA
tggtgtacaagacctttggattctgccaagggcagacacaccctgggggctcttgtgttccttgccaggttgtactgagactgatttcctagctcccagaatagagcgca

SEQ ID NO: 11861 - DNA, 110 bp, synthetic construct
  source 1..110: mol_type = other DNA
ggagccggtgtaggattttatgtggaggaaagacaggaacagattcgcctttgtcggtccccttgggcggtaggtggggtgcagaatctgaagggcagagatctgagcag

SEQ ID NO: 11862 - DNA, 110 bp, synthetic construct
  source 1..110: mol_type = other DNA
ggtccccttgggcggtaggtggggtgcagaatctgaagggcagagatctgagcagggaactggttagaaggctgctgtgtaggcccagtagggaagtggggacatcacat

SEQ ID NO: 11863 - DNA, 110 bp, synthetic construct
  source 1..110: mol_type = other DNA
ccctttgcttcaggcatcgagattagggcagctgactgtttctagggcttctgtaggacctctagaatctttaagaatcacaagacaatatggtggggatgctggtggca

SEQ ID NO: 11864 - DNA, 110 bp, synthetic construct
  source 1..110: mol_type = other DNA
agctccagggttggctgtgagcttaccttgtggatgggctgccgaaaaagtcaatgccatcttgggatgaatgaatagaatgggcgtccaggccaagacgaaaaggcctc

SEQ ID NO: 11865 - DNA, 110 bp, synthetic construct
  source 1..110: mol_type = other DNA
tcgcacaagcagcgtatgaattacacttgacctaaggctgtggttgcacatgagggggagccgtgacttgaccagtctggggccactgaggaaatgggaacagatgtggc

SEQ ID NO: 11866 - DNA, 110 bp, synthetic construct
  source 1..110: mol_type = other DNA
gggagccgtgacttgaccagtctggggccactgaggaaatgggaacagatgtggcaaagctgtagaaacccacggaaaggagatagatggtggttgttcctgtggcagaa

SEQ ID NO: 11867 - DNA, 110 bp, synthetic construct
  source 1..110: mol_type = other DNA
ctggtcagctccttccgggtgtagttaaagcaactccaccactgctggttgagaattacaaagatgcgaggttggttttgcaaatgttttgaatttaacaagaatttaaa

SEQ ID NO: 11868 - DNA, 110 bp, synthetic construct
  source 1..110: mol_type = other DNA
ttacaaagatgcgaggttggttttgcaaatgttttgaatttaacaagaatttaaataccgtctgccttagaatctttgatttgctgactgttaatctgcctttcagctct

SEQ ID NO: 11869 - DNA, 110 bp, synthetic construct
  source 1..110: mol_type = other DNA
aaacaaacaaacaacaaaaaaatatatgtgtatacacacacacacttctcaaccactgtttcattaaactgtgaaacatatcatatagctgtatgtttgtgcattctctt

SEQ ID NO: 11870 - DNA, 110 bp, synthetic construct
  source 1..110: mol_type = other DNA
agctttggcatcatttggccaggaatcaaacacacgcctttgcagcaaaccaagctgctgcagtcagattcttaacccaccacgccatggtgggaattcctttttttttt

SEQ ID NO: 11871 - DNA, 110 bp, synthetic construct
  source 1..110: mol_type = other DNA
tgctgcagtcagattcttaacccaccacgccatggtgggaattcctttttttttttttttcctaaacctaactcttaatacttccaggagagctcatccattctctattt

SEQ ID NO: 11872 - DNA, 110 bp, synthetic construct
  source 1..110: mol_type = other DNA
tgagaaaagagcttgcaggcaggctcaccccagatgtagaatatacccaccagcttgtctgataaagaagaaacaaggttgcttattttatgattaactgtcacacaaca

SEQ ID NO: 11873 - DNA, 110 bp, synthetic construct
  source 1..110: mol_type = other DNA
cagctgtctgaattcctcctagggcctgctagctcactgctagcctccttaattcagaggagcagagttggagcaaaactctcaccctcagatatggctgactcttttgc

SEQ ID NO: 11874 - DNA, 110 bp, synthetic construct
  source 1..110: mol_type = other DNA
ggggctggagaggaacactgctgcgttagcagagggacgggtattcacagcagaaggatgcgtacactcggctccagccacataggtctggaagcggacacacaaccgcc

SEQ ID NO: 11875 - DNA, 110 bp, synthetic construct
  source 1..110: mol_type = other DNA
ggatgcgtacactcggctccagccacataggtctggaagcggacacacaaccgccgttagaggtcaccatgcaggggactgaggtggaaatgggaaaggaaggagagaag

SEQ ID NO: 11876 - DNA, 110 bp, synthetic construct
  source 1..110: mol_type = other DNA
tcaaggaatcttggccagatttaccagaaaatctgctgagcccaaacaagggcagtctggatctgctaccacttgtttcctctcggctgcaatgatgctgcctgttctat

SEQ ID NO: 11877 - DNA, 110 bp, synthetic construct
  source 1..110: mol_type = other DNA
tctggatctgctaccacttgtttcctctcggctgcaatgatgctgcctgttctatgacgcctcactgctaacgacagctgacactgagaaagcccgagtgctctggctgc

SEQ ID NO: 11878 - DNA, 110 bp, synthetic construct
  source 1..110: mol_type = other DNA
aaaaatcacaagttttgaaataacaccaacatgtctttgaatcctgactctactactcagctgtgggaacttgggcaggtacttaacctttccgaacctcaatctccata

SEQ ID NO: 11879 - DNA, 110 bp, synthetic construct
  source 1..110: mol_type = other DNA
tcatggatattagtcgggtttgcaacctgatgagccacaaagggaactcccctcaaaatgttaaacagaggagttccctttgtggttcagtgggttacgaatctgattag

SEQ ID NO: 11880 - DNA, 110 bp, synthetic construct; identical to SEQ ID NO: 11879
  source 1..110: mol_type = other DNA

SEQ ID NO: 11881 - DNA, 110 bp, synthetic construct
  source 1..110: mol_type = other DNA
gcaggtgtgtgtgggagcagaggagtgactgtcacacagcctaaagttccagaggctgctaaagatctgacatccccatcctgtgctctgacaggaaggagggtggccgg

SEQ ID NO: 11882 - DNA, 110 bp, synthetic construct
  source 1..110: mol_type = other DNA
ctgctgtatcacacagacatgcgactccatagtcctccttccaactatcgtgtccctgttcccaggtttagcaaaacttaacaggaaagttcgagctgttcactgtgttg

SEQ ID NO: 11883 - DNA, 110 bp, synthetic construct
  source 1..110: mol_type = other DNA
ctgttcccaggtttagcaaaacttaacaggaaagttcgagctgttcactgtgttgaattcctctcttcccatcctctcctccatttgttgcaatcatgctttcaaactca

SEQ ID NO: 11884 - DNA, 110 bp, synthetic construct
  source 1..110: mol_type = other DNA
tcatgctcagatcctttccttcagcttccagcaccgacaaaacatggtgaggggtacggggcagagggatgggtgaaggaggctgactgaggccacggtcgacacgagtg

SEQ ID NO: 11885 - DNA, 110 bp, synthetic construct
  source 1..110: mol_type = other DNA
acggggcagagggatgggtgaaggaggctgactgaggccacggtcgacacgagtgttgcagagttgaaagggaggaaagacatgagcatgagtgggagatggattccatt

SEQ ID NO: 11886 - DNA, 110 bp, synthetic construct
  source 1..110: mol_type = other DNA
aacttcattttatattttggagaataaaggccaggggtgggatagggatgaagataggagaaagggaaatcataaagggagaaatcagctctatttatactgcttatttc

SEQ ID NO: 11887 - DNA, 110 bp, synthetic construct
  source 1..110: mol_type = other DNA
aggagaaagggaaatcataaagggagaaatcagctctatttatactgcttatttcatctagaacaaacttaaccacatcataagatgggaaatagaaatggcaccttact

SEQ ID NO: 11888 - DNA, 110 bp, synthetic construct
  source 1..110: mol_type = other DNA
acacacacacacacacacagtggttttcccttttgctgcttcagaataaaattcttataagattagggactctttgcattaaaaaaaaaattcattagtttggtactagc

SEQ ID NO: 11889 - DNA, 110 bp, synthetic construct
  source 1..110: mol_type = other DNA
aacatacaaactttgaagagcctacacatggggttatactgtggtgtgtccatgaagaaaaagctttagttgttttgttaaattgaggatataccatgaggttgttctta

SEQ ID NO: 11890 - DNA, 110 bp, synthetic construct
  source 1..110: mol_type = other DNA
tattagacctccatcgatttactcaaactgcttcttctacctaaaatgcagttacctctacaatgaaattgtatccagtatgcattaatggtgcttggtgtctagcagag

SEQ ID NO: 11891 - DNA, 110 bp, synthetic construct
  source 1..110: mol_type = other DNA
ctctacaatgaaattgtatccagtatgcattaatggtgcttggtgtctagcagagctgactgagactcagtcttggaactattatttatgtaactgtaggaaaagaaaat

SEQ ID NO: 11892 - DNA, 110 bp, synthetic construct
  source 1..110: mol_type = other DNA
gaaagagtttcatttctggatcccagtgtacttgttcagcaggctcctacattgtgcatggtttctccacgacctggttcctacagcacacgcagcttctctggcctcgg

SEQ ID NO: 11893 - DNA, 110 bp, synthetic construct
  source 1..110: mol_type = other DNA
gcatggtttctccacgacctggttcctacagcacacgcagcttctctggcctcgggttactgcagtatgtacagcttctccagtatcctacctctggactgtacagaggc

SEQ ID NO: 11894 - DNA, 110 bp, synthetic construct
  source 1..110: mol_type = other DNA
cttttcggttctgctttcaagaccttgatcagaataggcaggaatagatagctgtttccaagagtggcttaacagcccaaagtggaaacagttgtttaaaccagagtttt

SEQ ID NO: 11895 - DNA, 110 bp, synthetic construct
  source 1..110: mol_type = other DNA
agctataaaaatggattcatgccgaagtgctggggagcctttgtcaagcaaagaagccaccagtggtgtttcaagtgctatcgttatttggccactcacgggctgtgtgc

SEQ ID NO: 11896 - DNA, 110 bp, synthetic construct
  source 1..110: mol_type = other DNA
gccaccagtggtgtttcaagtgctatcgttatttggccactcacgggctgtgtgccctgggacgaatcacttaccctctctatgcttccttttcttcatctgtaaaagag

SEQ ID NO: 11897 - DNA, 110 bp, synthetic construct
  source 1..110: mol_type = other DNA
gtaagctgtttttgtggggcagtttgcggaagaaattctgtctcatgctgagtgatgctctcttgcctgtgacagactcaggcgtcataattacaacttgcccacacttc

SEQ ID NO: 11898 - DNA, 110 bp, synthetic construct
  source 1..110: mol_type = other DNA
tgctctcttgcctgtgacagactcaggcgtcataattacaacttgcccacacttccttctttgagaatggaaagcctatctcatgttcagaaatggcctactgtttcatc

SEQ ID NO: 11899 - DNA, 110 bp, synthetic construct
  source 1..110: mol_type = other DNA
ctgaaccctgtggggtgtgtagcagtagtaagatcatccccatggctttgacccgtgaggacacagagacctgggaagcttaagtaactgcccaaagtcaccaaactcac

SEQ ID NO: 11900 - DNA, 110 bp, synthetic construct
  source 1..110: mol_type = other DNA
gcaataagcaaacctatcagaccatcttctgccgcgccagacacgttatttgcgcatttcatcattttggagctacggtcatcagccccatcttacacatgacgaaactg

SEQ ID NO: 11901 - DNA, 110 bp, synthetic construct
  source 1..110: mol_type = other DNA
tcagggactggctgcaacctgccttttggaactgttcctgtccctgtgcccccgaagccagtacttctcaaactacctgaatcgcctaaggagcttgtgaaatgcaaggt

SEQ ID NO: 11902 - DNA, 110 bp, synthetic construct
  source 1..110: mol_type = other DNA
agccagtacttctcaaactacctgaatcgcctaaggagcttgtgaaatgcaaggttctaattcaattaattgagagggcgggggcacctgagattctgcatgtataacaa

SEQ ID NO: 11903 - DNA, 110 bp, synthetic construct
  source 1..110: mol_type = other DNA
tttattttggccacacctgcagcatatggaatttcctgggccagggatcgaacctgcgccactgcagagacaacaccagatcataacccactaggccacagcaggagctc

SEQ ID NO: 11904 - DNA, 110 bp, synthetic construct
  source 1..110: mol_type = other DNA
gcgccactgcagagacaacaccagatcataacccactaggccacagcaggagctcctcaagagagttattttctaaattaagggacacaagagcttcctgactgctaatc

SEQ ID NO: 11905 - DNA, 110 bp, synthetic construct
  source 1..110: mol_type = other DNA
acagctacaataaggaacaatacgaagctggggtggaggggggggaatgctaatggtaaattaggtcgacgtggcattcaaaacaaatgagccacaaactccaatgttct

SEQ ID NO: 11906 - DNA, 110 bp, synthetic construct
  source 1..110: mol_type = other DNA
cctttgaagaagtaattaagttaaaatgggtcattagtgcggaccctaatccaatatgactgatgtctttatacagtggaaattgggacacagaaacaccacacacacat

SEQ ID NO: 11907 - DNA, 110 bp, synthetic construct
  source 1..110: mol_type = other DNA
atacctcataagagaagaaatgtttatcaagacttgtaggaagtttctcttgtagctcagcacgttaagaatctgacaagtatccatgaggatgaaagtttgaccttgcc

SEQ ID NO: 11908 - DNA, 110 bp, synthetic construct
  source 1..110: mol_type = other DNA
agaaatgtttatcaagacttgtaggaagtttctcttgtagctcagcacgttaagaatctgacaagtatccatgaggatgaaagtttgaccttgccttgctcagtggatta

SEQ ID NO: 11909 - DNA, 110 bp, synthetic construct
  source 1..110: mol_type = other DNA
ctcagctggccgggctgtacgtgacctccaaggtgaagcctgtcacagccttgcgggactactgcaaaggtctttaatggatcatttaatatatctagtcttcatttcaa

SEQ ID NO: 11910 - DNA, 110 bp, synthetic construct
  source 1..110: mol_type = other DNA
aaattacggagaaggctagaagaagagcaactgtgagataaatgagactgaaggcttcttccatgatgccacccagtaggagaaggggcagaaaggaatcctgggtggct

SEQ ID NO: 11911 - DNA, 110 bp, synthetic construct
  source 1..110: mol_type = other DNA
gagaataccaggagagtgctgacttggtcagacactcatgaatgggagagctttgtggaggaccagctttctcaaggagacattccagtattccactggagaaaaaaaat

SEQ ID NO: 11912 - DNA, 110 bp, synthetic construct
  source 1..110: mol_type = other DNA
tggggtgttgccccggaccagagaaagcacaggggaaagtcatccttgagaagttggtttaggaagggcttgcacagatgtgcagctcaagttcatttctcactagaatg

SEQ ID NO: 11913 - DNA, 110 bp, synthetic construct
  source 1..110: mol_type = other DNA
cgatggctattttgtcaaagccaatgtcagaaaagaaaggacctaaaatatagcagtagtagcagaacagagagacactgacgaaattaaatatggaatttttcagcatt

SEQ ID NO: 11914 - DNA, 110 bp, synthetic construct
  source 1..110: mol_type = other DNA
caaagccaatgtcagaaaagaaaggacctaaaatatagcagtagtagcagaacagagagacactgacgaaattaaatatggaatttttcagcattttattatgaaaattt

SEQ ID NO: 11915 - DNA, 110 bp, synthetic construct
  source 1..110: mol_type = other DNA
ctgcaatcagaatgcctcatttgaagggccaatacggcttgtgtacaagacagacagggagctatagggaatagggactccactcttacagggcacatggaaaactcttt

SEQ ID NO: 11916 - DNA, 110 bp, synthetic construct
  source 1..110: mol_type = other DNA
cctctgtgccacaacaggaactcctcatatgtcctatcttaagagatacacaaaagttgtttgggaaactcatgataaactaaaaaaatgtaaattcaatctttttaaca

SEQ ID NO: 11917 - DNA, 110 bp, synthetic construct; identical to SEQ ID NO: 11916
  source 1..110: mol_type = other DNA

SEQ ID NO: 11918 - DNA, 110 bp, synthetic construct
  source 1..110: mol_type = other DNA
ggaaggaagagggggagacatcacagacaaaaattgctgggccaggtaatattaaaaatatagtgccaaaatcagcatacaatgtttatacatttttgaaatttttattt

SEQ ID NO: 11919 - DNA, 110 bp, synthetic construct; identical to SEQ ID NO: 11918
  source 1..110: mol_type = other DNA

SEQ ID NO: 11920 - DNA, 110 bp, synthetic construct
  source 1..110: mol_type = other DNA
ttgctggcacttactcaagcaacacatcagaagcagcttcgatctttgagggtggccactccaccacagctcacccttaatccgccctgagggttcatccagatcctacc

SEQ ID NO: 11921 - DNA, 110 bp, synthetic construct
  source 1..110: mol_type = other DNA
ccactccaccacagctcacccttaatccgccctgagggttcatccagatcctacctgctctgtggtatgactccacaacagggtggggtcctcagaggctgggagcaatg

SEQ ID NO: 11922 - DNA, 110 bp, synthetic construct
  source 1..110: mol_type = other DNA
ctactctccatgtccttgatctgtttcctttttgtagataggaccatatacatgatatcgcttatatgtggaatctaaaataggtatggtatacattaaagttgttgaga

SEQ ID NO: 11923 - DNA, 110 bp, synthetic construct
  source 1..110: mol_type = other DNA
tatcgcttatatgtggaatctaaaataggtatggtatacattaaagttgttgagagagtctatcccaagagttctcatcacaaggaaaaaatgttttctgtatctatatt

SEQ ID NO: 11924 - DNA, 110 bp, synthetic construct
  source 1..110: mol_type = other DNA
agattaagactctctattgacaatattcaattttgcctgagctttgtgctcccgaaaaacagggaaatttaaaggaattccctcagccttttgtgttctggataatggct

SEQ ID NO: 11925 - DNA, 110 bp, synthetic construct
  source 1..110: mol_type = other DNA
gctggatccttaatccactgagcgaggccagggatcggagacacaatctcgtggttcctagtcaagcagggtgttttgaaaatatttccccctaaaagcccacaatttaa

SEQ ID NO: 11926 - DNA, 110 bp, synthetic construct
  source 1..110: mol_type = other DNA
tcctagtcaagcagggtgttttgaaaatatttccccctaaaagcccacaatttaagctgtcttttctttacaaacctataggtaaaattgttcacattgatgcaacctga

SEQ ID NO: 11927 - DNA, 110 bp, synthetic construct
  source 1..110: mol_type = other DNA
acttctctgggttataccatcaatgaacagcttaacgctcgtaacactcacacgtttgctcttaaggagggagtggataggaaataagaggagagttagggtggaatacc

SEQ ID NO: 11928 - DNA, 110 bp, synthetic construct
  source 1..110: mol_type = other DNA
gtttttctgggatagcttctcagttatcagccccagagagggataatcctgtaaaaagggagggtgtggaggttagttaagacgtctcttcacatacatccctgaattct

SEQ ID NO: 11929 - DNA, 110 bp, synthetic construct
  source 1..110: mol_type = other DNA
aagggagggtgtggaggttagttaagacgtctcttcacatacatccctgaattcttaggtcttagctaatatgagctgtggctcagaccatggtaaggcttaaacttgtt

SEQ ID NO: 11930 - DNA, 110 bp, synthetic construct
  source 1..110: mol_type = other DNA
aagcaaacacagtgtggtaaagggtagtaacagctacagggaggccaggaggcccgaataaatggctgaaggccagagccacgcggggtacactctggctaacattccca

SEQ ID NO: 11931 - DNA, 110 bp, synthetic construct
  source 1..110: mol_type = other DNA
caaagcccggagccctgggtgccacctctcgggcctcacccctgctctgccaacctggtctcctctccctccaaacccagctaagcaaacccagttgtgataggttgtcc

SEQ ID NO: 11932 - DNA, 110 bp, synthetic construct
  source 1..110: mol_type = other DNA
tggtctcctctccctccaaacccagctaagcaaacccagttgtgataggttgtcctgcagagcccagggagacaggcctgcatcaggacgtgatcctcaagaagcagaaa

SEQ ID NO: 11933 - DNA, 110 bp, synthetic construct
  source 1..110: mol_type = other DNA
gcacagaggagaactgacatgagccctggtttaggctgggctaacgcagactcaggcatcctccttccttcacctctaaccacgcaaggccagtgttctgccccaaggga

SEQ ID NO: 11934 - DNA, 110 bp, synthetic construct
  source 1..110: mol_type = other DNA
gcatcctccttccttcacctctaaccacgcaaggccagtgttctgccccaagggagatcagttagtctcctgcctgggatcaaatgctgctgacagcaggcctggctgtt

SEQ ID NO: 11935 - DNA, 110 bp, synthetic construct
  source 1..110: mol_type = other DNA
gcacacaaatgtgaacacaagtctccaacattatgtcctaggtatactcttctgcacaccatgttctttcagtaggttcttagaaactctccatgttttataaaggaata

SEQ ID NO: 11936 - DNA, 110 bp, synthetic construct
  source 1..110: mol_type = other DNA
tctttccagagaccctccctcccttaactttcatacctctgttggtaagaatactttcattattctgtttttcttatctcacggactctctttctgtttcttttcccact

SEQ ID NO: 11937 - DNA, 110 bp, synthetic construct
  source 1..110: mol_type = other DNA
gtaataaactctaggagtccacttttgtcttagtttgggctgctataacgaaaataccatggactgggtggcttaaaaacaatagaaatttatttctacaagattttctg

SEQ ID NO: 11938 - DNA, 110 bp, synthetic construct
  source 1..110: mol_type = other DNA
atccaagctgcgactgcgacctacgccgcagtttgtggcaacatcagattcttaacccagagtgaggctaggaatcaaacccacatcctcacagagataccatcgagttg

SEQ ID NO: 11939 - DNA, 110 bp, synthetic construct
  source 1..110: mol_type = other DNA
ccgcagtttgtggcaacatcagattcttaacccagagtgaggctaggaatcaaacccacatcctcacagagataccatcgagttgataacctgctgagccacaacaggaa

SEQ ID NO: 11940 - DNA, 110 bp, synthetic construct
  source 1..110: mol_type = other DNA
tcagaacccttccaagaccagctgggactcaggacagaggaaagcctgtgggatattctgggcccagatgatcccttgcatagagagttatggctgcaaatgaaccatcc

SEQ ID NO: 11941 - DNA, 110 bp, synthetic construct
  source 1..110: mol_type = other DNA
ccagcccccctgccgagcttccccactgtccaagcatgtgtgtccccatttgtcagtgcattcctttgcacaaagtgaggatgataaaatgcaccaggtggcagacctgg

SEQ ID NO: 11942 - DNA, 110 bp, synthetic construct
  source 1..110: mol_type = other DNA
aataaagtttatggccgcttccagtgtatacaatgctttactgatgctgcgcttaggggctgtgtccctgtgcattgtgcccaagcatgtgcatggatgccctccagtct

SEQ ID NO: 11943 - DNA, 110 bp, synthetic construct
  source 1..110: mol_type = other DNA
ggggctgtgtccctgtgcattgtgcccaagcatgtgcatggatgccctccagtctcaaaggcatacctttgggcaggagggtgggcagggagaggatgatataaacaggg

SEQ ID NO: 11944 - DNA, 110 bp, synthetic construct
  source 1..110: mol_type = other DNA
aagttttgcagaggggaggggtgttgaggatgggagctgatcctagcagctgggctgggaagcagaagaccagagttatgttctatttctgcttcccattgctgtgtgac

SEQ ID NO: 11945 - DNA, 110 bp, synthetic construct
  source 1..110: mol_type = other DNA
aagtttgggtcccatcctgggccccatcaacagcagagggacgaggaggcctggaggggaagctgaggacccccaaacaagggctatgctgtcaccttcagagaggtagg

SEQ ID NO: 11946 - DNA, 110 bp, synthetic construct
  source 1..110: mol_type = other DNA
ggggaagctgaggacccccaaacaagggctatgctgtcaccttcagagaggtagggagtctgtactgaaaacccacaccccaccgggtggtttttccgccatgggctgtc

SEQ ID NO: 11947 - DNA, 110 bp, synthetic construct; identical to SEQ ID NO: 11945
  source 1..110: mol_type = other DNA

SEQ ID NO: 11948 - DNA, 110 bp, synthetic construct; identical to SEQ ID NO: 11946
  source 1..110: mol_type = other DNA

SEQ ID NO: 11949 - DNA, 110 bp, synthetic construct
  source 1..110: mol_type = other DNA
ctcaaagtgtggtccccacgctagcatggacatcagctaggagcacgcgggaatcttaagaaatgcacacggagtccccatcatggcgcagcagaaacaaatccgactag

SEQ ID NO: 11950 - DNA, 110 bp, synthetic construct; identical to SEQ ID NO: 11949
  source 1..110: mol_type = other DNA

SEQ ID NO: 11951 - DNA, 110 bp, synthetic construct
  source 1..110: mol_type = other DNA
ttattgagggtcgactgtgtgccaggcacctgccaggcgcttcacatataccaagtgatttaatagacctccgcaggaggttgttccatcagtcactcactcaatcattc

SEQ ID NO: 11952 - DNA, 110 bp, synthetic construct
  source 1..110: mol_type = other DNA
tgatttaatagacctccgcaggaggttgttccatcagtcactcactcaatcattcacagcatctcctgagcaggcactgggagcattaaatgctacgtcctgtgcggcag

SEQ ID NO: 11953 - DNA, 110 bp, synthetic construct
  source 1..110: mol_type = other DNA
tgcctcaataataattcctacttcccagggttcttatgaggactaaatgacttaatatttgcaaagcaggtagaacaatgctgagaaagttatatatgctacataaataa

SEQ ID NO: 11954 - DNA, 110 bp, synthetic construct
  source 1..110: mol_type = other DNA
tatttgcaaagcaggtagaacaatgctgagaaagttatatatgctacataaataaaaggaaaaaggtaattatttcattgaaatcagcattagctgcctctcattcacca

SEQ ID NO: 11955 - DNA, 110 bp, synthetic construct
  source 1..110: mol_type = other DNA
aggagggaggagaatgagttggggtatttagcccaccagctccctgataaggggaggccatgggccctctgttttccttactgagggtccccattgctcgcatggcagcc

SEQ ID NO: 11956 - DNA, 110 bp, synthetic construct
  source 1..110: mol_type = other DNA
ggccatgggccctctgttttccttactgagggtccccattgctcgcatggcagcctttctccacgactcttcttcagggtctgcactgcatgactctcctgtggtttccc

SEQ ID NO: 11957 - DNA, 110 bp, synthetic construct
  source 1..110: mol_type = other DNA
caaccagggcagcctctccctccatcactattcttagaaagaccctcagagcatctctggaattccaaggcaccttacctcctggcagagaaagggagaaaggactgggc

SEQ ID NO: 11958 - DNA, 110 bp, synthetic construct
  source 1..110: mol_type = other DNA
tctggaattccaaggcaccttacctcctggcagagaaagggagaaaggactgggccctgcttcgtgcactcaggaacccaggctcccagcaggccccgagcaatagtggg

SEQ ID NO: 11959 - DNA, 110 bp, synthetic construct
  source 1..110: mol_type = other DNA
agctcatttccttccttagccaccctttcccagaagctgacaaggccgtgagtggggcccaagctcaggctcctacagccacccttctttccctggtgcctccccattgc

SEQ ID NO: 11960 - DNA, 110 bp, synthetic construct
  source 1..110: mol_type = other DNA
gggtgggagctgccgcacaatctgccttcctcttgccagccttcgccccaccctgtcatccccaagggatctattagcatctctcgacttgcacaggctgggtaaatcag

SEQ ID NO: 11961 - DNA, 110 bp, synthetic construct
  source 1..110: mol_type = other DNA
tcatccccaagggatctattagcatctctcgacttgcacaggctgggtaaatcaggctccctgtgtggcagtgctcactagagaccaggaaaagggacgtggagatatgg

SEQ ID NO: 11962 - DNA, 110 bp, synthetic construct
  source 1..110: mol_type = other DNA
ggactgtggtcatctgaaggcctgactgtggccggtggctctgcttgtaaatggcttattcatgtggctattggccaaaggcgtctgtttttgctagctattggcaggag

SEQ ID NO: 11963 - DNA, 110 bp, synthetic construct
  source 1..110: mol_type = other DNA
ttattcatgtggctattggccaaaggcgtctgtttttgctagctattggcaggaggcctccgtttctcaccgtgtgagagtttcagaccacctctctgttaggctgcttg

SEQ ID NO: 11964 - DNA, 110 bp, synthetic construct
  source 1..110: mol_type = other DNA
ggcgtggccaagttctgggcgttatttaaggaaatttgccttggttgagctaaaagtagaaactagtttggggcgttggtctgtgtgggaaacaccaagacgccgacacc

SEQ ID NO: 11965 - DNA, 110 bp, synthetic construct
  source 1..110: mol_type = other DNA
gtagaaactagtttggggcgttggtctgtgtgggaaacaccaagacgccgacaccagagttagacataaggaaggtttcctatttagtgtgaagctagacagccgccctg

SEQ ID NO: 11966 - DNA, 110 bp, synthetic construct
  source 1..110: mol_type = other DNA
catgtcatcatctcctcacctctaaggtacctggtagccctttcctctttgagcctatccctagtcccacatcatccacctcctcgcccctggaaaaagccctgtagacc

SEQ ID NO: 11967 - DNA, 110 bp, synthetic construct
  source 1..110: mol_type = other DNA
attagcctgaagactgtaggtgtttggttgctgttgtttcatttaaacagttcatgaatatataaggcatcctacagacactattaataccaggatgagctaaaaacctg

SEQ ID NO: 11968 - DNA, 110 bp, synthetic construct
  source 1..110: mol_type = other DNA
gaatatataaggcatcctacagacactattaataccaggatgagctaaaaacctggtctttgttctattatgcatgtagagcttactatagttccctggacatcatagat

SEQ ID NO: 11969 - DNA, 110 bp, synthetic construct
  source 1..110: mol_type = other DNA
tacttttccaaagacctttaattggcagctttccccttcagctattggtactcatgtaggaattttcttctggattttctatttaaaaaagagttcagttctgtttatgg

SEQ ID NO: 11970 - DNA, 110 bp, synthetic construct
  source 1..110: mol_type = other DNA
aaaatattttccgttttagatttgtacgcatcttttagaatatccaatctgatttttttaatgtctatatcacctgttgcctttaacacctgccttcaacatctgttgac

SEQ ID NO: 11971 - DNA, 110 bp, synthetic construct; identical to SEQ ID NO: 11970
  source 1..110: mol_type = other DNA

SEQ ID NO: 11972 - DNA, 110 bp, synthetic construct
  source 1..110: mol_type = other DNA
atttccaagtaagaagtggtacaaatagtggacattatttccctcactttttccatgtggttatctttaaacttcaggcgatgcatgcggccttgtgatcaacacctttt

SEQ ID NO: 11973 - DNA, 110 bp, synthetic construct
  source 1..110: mol_type = other DNA
tgtggttatctttaaacttcaggcgatgcatgcggccttgtgatcaacaccttttgtcccaaacagcttttaatttttttagagtatctatggaatgtctaatgcaaggg

SEQ ID NO: 11974 - DNA, 110 bp, synthetic construct
  source 1..110: mol_type = other DNA
tgagattgctaaggtacaaatattaatggtttaaaaatcttttagaggcgtcctcactgtggcacagtgggctaatgatccatcttgtttgatccctggcccaagaactt

SEQ ID NO: 11975 - DNA, 110 bp, synthetic construct
  source 1..110: mol_type = other DNA
aatgcagtaatcatatcagtcacagaatccttagtttcgcatttgttgtaattcagccttcacctagaaaagctgcgtgtgcatgtgtgtacatgcttcaggaaacgaag

SEQ ID NO: 11976 - DNA, 110 bp, synthetic construct
  source 1..110: mol_type = other DNA
gccttcacctagaaaagctgcgtgtgcatgtgtgtacatgcttcaggaaacgaagcccttcagggacaccatgttgttaggtatcaagatcttctcttttctccttctcc

SEQ ID NO: 11977 - DNA, 110 bp, synthetic construct
  source 1..110: mol_type = other DNA
agacaccaccgatcctggtgcgccacagcaggaactccagcactctgtcttctgggcagtgcctgtctgggtcctaaggggtaggagtgactgcaggcctgactagtctg

SEQ ID NO: 11978 - DNA, 110 bp, synthetic construct
  source 1..110: mol_type = other DNA
gcagtgcctgtctgggtcctaaggggtaggagtgactgcaggcctgactagtctgcaccctgggcttcaacactgaaatcacgcctaagtgacggagcagcccagaggcc

SEQ ID NO: 11979 - DNA, 110 bp, synthetic construct
  source 1..110: mol_type = other DNA
aggagagactgtggtgccttctctgccctccccactcccttcctgggcaggtgaagggcaggaagttagcctggtctagctttctcaggttaaacagaaagctacaggct

SEQ ID NO: 11980 - DNA, 110 bp, synthetic construct
  source 1..110: mol_type = other DNA
gggcaggaagttagcctggtctagctttctcaggttaaacagaaagctacaggctcacagtcaccagtacctagtaaagtggggcaaggtagctctgagcatatagagaa

SEQ ID NO: 11981 - DNA, 110 bp, synthetic construct; identical to SEQ ID NO: 11979
  source 1..110: mol_type = other DNA

SEQ ID NO: 11982 - DNA, 110 bp, synthetic construct; identical to SEQ ID NO: 11980
  source 1..110: mol_type = other DNA

SEQ ID NO: 11983 - DNA, 110 bp, synthetic construct
  source 1..110: mol_type = other DNA
cctctctgctggcgactcagacgtgacatgttcatgatcacattcgtgtcaggccttcccacgcatcgtgtgtctccggctcatcgtcctctgcccagcaccccccgccc

SEQ ID NO: 11984 - DNA, 110 bp, synthetic construct
  source 1..110: mol_type = other DNA
ttcccacgcatcgtgtgtctccggctcatcgtcctctgcccagcaccccccgccccgcctctgaagctcacagggtaagcagggacttcgcatccccttttgcacgtgag

SEQ ID NO: 11985 - DNA, 110 bp, synthetic construct
  source 1..110: mol_type = other DNA
cccccacttctaagtttgtttcttgctcaagagccatttgctatttttcagatcctgtagctcaggctgcattaaaaactctagagaaaggagaggttttcatctttctt

SEQ ID NO: 11986 - DNA, 110 bp, synthetic construct
  source 1..110: mol_type = other DNA
tgtagctcaggctgcattaaaaactctagagaaaggagaggttttcatctttcttttgggaactaagaaaagaggcaaagtgactctatctctagagccaagacggctct

SEQ ID NO: 11987 - DNA, 110 bp, synthetic construct
  source 1..110: mol_type = other DNA
gagaaacctgtagattaaaagagacttcagagacatcaaccagtcacaactgaactcatcttatctggatcttgatttaatgcaattgtttaaaaagtgctttttgacat

SEQ ID NO: 11988 - DNA, 110 bp, synthetic construct
  source 1..110: mol_type = other DNA
acacaaaggagggcatgagaagaaaggctgaaatgaaaacagagcagggagttccctggtggcctagcagttatggatctgatgttatcactgcagtggttctgattaca

SEQ ID NO: 11989 - DNA, 110 bp, synthetic construct
  source 1..110: mol_type = other DNA
ctggtggcctagcagttatggatctgatgttatcactgcagtggttctgattacagctgtggtgcaggtttgaatcctggcccgagaacttccacatgctgtgggcccag

SEQ ID NO: 11990 - DNA, 110 bp, synthetic construct
  source 1..110: mol_type = other DNA
gttaatgtggcgattgtgtacaggatggcttagaaagggagagactagtgatgcaaacaccagtcagaagacagttatacccacccagatgaaatgagagactaagctgg

SEQ ID NO: 11991 - DNA, 110 bp, synthetic construct
  source 1..110: mol_type = other DNA
aacaccagtcagaagacagttatacccacccagatgaaatgagagactaagctggaatcgttaggacgtaagatagctactacggtcaacagtgagtattttcaagtgaa

SEQ ID NO: 11992 - DNA, 110 bp, synthetic construct
  source 1..110: mol_type = other DNA
ccagtgatttcctatgcagctccgcaggtccttgtcaaaggcggtaaatggtggcaatgtggctttttgtgccttgtatcccgacgttggtttctaacgtgactaggacc

SEQ ID NO: 11993 - DNA, 110 bp, synthetic construct
  source 1..110: mol_type = other DNA
aatgtggctttttgtgccttgtatcccgacgttggtttctaacgtgactaggacctttagagcagggagttctttttccctgtgagagttccttgcttctggcactcctg

SEQ ID NO: 11994 - DNA, 110 bp, synthetic construct
  source 1..110: mol_type = other DNA
gtggtgtaggtcacagacctggcttggatcctgcatcgctgtggctgtggctgtggctgcggctgtggctgtggccagcagctgcagctccgatttgaccccctagcctg

SEQ ID NO: 11995 - DNA, 110 bp, synthetic construct; identical to SEQ ID NO: 11994
  source 1..110: mol_type = other DNA

SEQ ID NO: 11996 - DNA, 110 bp, synthetic construct
  source 1..110: mol_type = other DNA
agaatcaactaagcccaagatagcggaagatttgactttcagtccttgaaccttattatacactcattggctcattgtaatacattagcatactaaatgacacacctacc

SEQ ID NO: 11997 - DNA, 110 bp, synthetic construct
  source 1..110: mol_type = other DNA
ctgctctgagacacgctgttcactgaggctgcgccgaggacggcctggggcggtgacccagctgtgtttggctgagcagcctatccaggccctcagtagcctgtcccgaa

SEQ ID NO: 11998 - DNA, 110 bp, synthetic construct
  source 1..110: mol_type = other DNA
acccagctgtgtttggctgagcagcctatccaggccctcagtagcctgtcccgaaggtaaaaggcagtcaaaccctttcctctgctttgtgagcttcctcacctgacatt

SEQ ID NO: 11999 - DNA, 110 bp, synthetic construct
  source 1..110: mol_type = other DNA
ttgccagaatgcttgattctggaacagagaggcagtgccgcgagttgcccgaccgcaggggtgtcacccaccagccccaggcccgggaggcctccggcccactggcacca

SEQ ID NO: 12000 - DNA, 110 bp, synthetic construct
  source 1..110: mol_type = other DNA
cagctctggggggatggggtgtcactgtctgagacaggatatttgcagggagggacagaagctttggcgcatggcacaggacatctgtggtggagctgcctccctggggt

SEQ ID NO: 12001 - DNA, 110 bp, synthetic construct
  source 1..110: mol_type = other DNA
cagaagctttggcgcatggcacaggacatctgtggtggagctgcctccctggggtgccatggtgcctgggtctcggcggaggtgtgaggagatgtggcactttggggccc

SEQ ID NO: 12002 - DNA, 110 bp, synthetic construct
  source 1..110: mol_type = other DNA
ttctccagagaagcccccaattctatatcactgaggatagccggtctcccagtcaccccagagccactgaaaacctcagcagtggtcccctgagaatagctgctttgcgc

SEQ ID NO: 12003 - DNA, 110 bp, synthetic construct
  source 1..110: mol_type = other DNA
ccccagagccactgaaaacctcagcagtggtcccctgagaatagctgctttgcgctcagcttgcctgtgcaatcaacaggatgactgtctcgtgaaatacagtgatatgt

SEQ ID NO: 12004 - DNA, 110 bp, synthetic construct
  source 1..110: mol_type = other DNA
ctggctcgttgggtcctgaatcgtgtcctcgggcagttcagcgtggtgcttcggagcagatttgggaatctgatgaacctgaatttgaacctgagcttgaccctgagctg

SEQ ID NO: 12005 - DNA, 110 bp, synthetic construct
  source 1..110: mol_type = other DNA
gcagatttgggaatctgatgaacctgaatttgaacctgagcttgaccctgagctgtgggacttcagacaattacctagcctctctgagcttcagctgcttcatgaataga

SEQ ID NO: 12006 - DNA, 110 bp, synthetic construct
  source 1..110: mol_type = other DNA
aatcctgggcctaagaacttccacatgcctcatgtgcagccaaaaaaaaaagaagataaattaaaaaaatttaaaaagaaaagtcctgggagttcccacatggctccatg

SEQ ID NO: 12007 - DNA, 110 bp, synthetic construct
  source 1..110: mol_type = other DNA
aaaaaagaagataaattaaaaaaatttaaaaagaaaagtcctgggagttcccacatggctccatggtaatgaacccgactagtatccgagaggatgtaggttcgatccct

SEQ ID NO: 12008 - DNA, 110 bp, synthetic construct
  source 1..110: mol_type = other DNA
tctgatttgaccccctagctcacaggtatggcagtgaaaaaagtaatttctaatactttaaatattgaggagttcccattgcagctcagcagttaatgaacctgactaga

SEQ ID NO: 12009 - DNA, 110 bp, synthetic construct
  source 1..110: mol_type = other DNA
gtatggcagtgaaaaaagtaatttctaatactttaaatattgaggagttcccattgcagctcagcagttaatgaacctgactagaatccatgaggacacagatttgatcc

SEQ ID NO: 12010 - DNA, 110 bp, synthetic construct
  source 1..110: mol_type = other DNA
agtaatgtggccttggccaggtcatgccagttgtcattaaccaagcacctgctctgtgccagacgctgtgccagggactggagacaggtgtggaatccacatgcctgagc

SEQ ID NO: 12011 - DNA, 110 bp, synthetic construct
  source 1..110: mol_type = other DNA
gtgccagacgctgtgccagggactggagacaggtgtggaatccacatgcctgagctgaaggagctcggactgtaacggggatggacactttgacggtataaaggtggtcg

SEQ ID NO: 12012 - DNA, 110 bp, synthetic construct
  source 1..110: mol_type = other DNA
atggtagaccccaaagtgaggggtgtgaaaacatccagataaagcagacccgtctccaaagctcagccaaacatggactgacctcccagccccctctccctgcagccctt

SEQ ID NO: 12013 - DNA, 110 bp, synthetic construct
  source 1..110: mol_type = other DNA
ggtgctgtgtgtcgcaaggcccatgaaagaagctaaccctggccccactcctgacactttcgggttcaggacaagaagtcagtaggagcccacttagggtccatctacat

SEQ ID NO: 12014 - DNA, 110 bp, synthetic construct
  source 1..110: mol_type = other DNA
actttcgggttcaggacaagaagtcagtaggagcccacttagggtccatctacatgtttaaaagttagcaagcaagccagcccaggaagttcccatcgtggagcagcaga

SEQ ID NO: 12015 - DNA, 110 bp, synthetic construct
  source 1..110: mol_type = other DNA
gatttttattttaccctgggtaaagtgaaaattaaaataccgatcaaatgggcaactgctctggtcttaaaaagaaccagtagtaataccaaggtaccttacttttgtat

SEQ ID NO: 12016 - DNA, 110 bp, synthetic construct
  source 1..110: mol_type = other DNA
ctgctctggtcttaaaaagaaccagtagtaataccaaggtaccttacttttgtatagcccattttcatgctgtctcacttaatccttacagcagtcatgtaaagtaggca

SEQ ID NO: 12017 - DNA, 110 bp, synthetic construct
  source 1..110: mol_type = other DNA
gaggaaagaactcgggaacaaggcttttaacacgcaagggatcccttcaggcatggagcccccggaggggctggggcccgcggcacaggcactgtgcgcgccgcactcag

SEQ ID NO: 12018 - DNA, 110 bp, synthetic construct
  source 1..110: mol_type = other DNA
cctccacggctgctttcccgcccctcctggtgattttgctccaaacgaaggaagcacccatgggttcccgcatcattgtgcccgtagtcactcagagtccccgggccggc

SEQ ID NO: 12019 - DNA, 110 bp, synthetic construct
  source 1..110: mol_type = other DNA
acccatgggttcccgcatcattgtgcccgtagtcactcagagtccccgggccggcctggaggctccagagagtgacccggctcctccttatgccacagtcgtccagccag

SEQ ID NO: 12020 - DNA, 110 bp, synthetic construct
  source 1..110: mol_type = other DNA
tccccacccggcagaccctgaggtccccctgctctccagcaccaatgaccagccccctttaccagccttggagtctctcccccaaagtagtgaaacttcccctggggcta

SEQ ID NO: 12021 - DNA, 110 bp, synthetic construct
  source 1..110: mol_type = other DNA
gactcatagcttcgagattgaagaggtggtcagaggggtccgagtgagtgaaactgtgtgggatgagacccagcaggcttcctggaggaggcagcctgtgaacaatatcc

SEQ ID NO: 12022 - DNA, 110 bp, synthetic construct
  source 1..110: mol_type = other DNA
agcgcacaagaagacggctgtgggggggaaagtttttcctcctgaggcagagcaaagaggtggaaactcccctcctctttacttcccagctgcaactcctgattcctggg

SEQ ID NO: 12023 - DNA, 110 bp, synthetic construct
  source 1..110: mol_type = other DNA
agaggtggaaactcccctcctctttacttcccagctgcaactcctgattcctggggtgttgggcatcctcctctacccccatcccaggggccagagtggcaggcaccaag

SEQ ID NO: 12024 - DNA, 110 bp, synthetic construct
  source 1..110: mol_type = other DNA
ctactagtatttctttcccttggcccccggagcataaatcccctgccacttagctttgctgctgccaaacctacacctccctccccagcacgcttcacgctaggcagtgt

SEQ ID NO: 12025 - DNA, 110 bp, synthetic construct
  source 1..110: mol_type = other DNA
gggaattcacaagcagcctataacatgcccagatgaagggcatctcccccagcatagaggaggggcattgctcagacaggagtggagggaccgagatggctctgagagct

SEQ ID NO: 12026 - DNA, 110 bp, synthetic construct
  source 1..110: mol_type = other DNA
agaggaggggcattgctcagacaggagtggagggaccgagatggctctgagagctggggagggggcgagtagccaggccttgtctacagagccagagtcctggcaatgct

SEQ ID NO: 12027 - DNA, 110 bp, synthetic construct
  source 1..110: mol_type = other DNA
ggcctcgtagcgctctggcccgttcagcaagtatcgccgccaatcacggtagaactcagctgaggtctcaggctggaagagcgttttctcctggatcataaaggaaggaa

SEQ ID NO: 12028 - DNA, 110 bp, synthetic construct
  source 1..110: mol_type = other DNA
tcagctgaggtctcaggctggaagagcgttttctcctggatcataaaggaaggaaagagagtccagagctcttccagctgctctgtgaccgtaagagggaggcggagtct

SEQ ID NO: 12029 - DNA, 110 bp, synthetic construct
  source 1..110: mol_type = other DNA
ctgctcagctttccgccccaggtctcaacagctgctacaaacacctggccacatggcccgggaaacagcctgccagttcccgaagccctctcacagattctctgagcagc

SEQ ID NO: 12030 - DNA, 110 bp, synthetic construct
  source 1..110: mol_type = other DNA
tgaggaggggtcatcccaagccacctccactggtggctgcctgccccacgggggcacccctctagccctccccctgcccgacctgagctgtggcaatccatgatgatgga

SEQ ID NO: 12031 - DNA, 110 bp, synthetic construct
  source 1..110: mol_type = other DNA
acccctctagccctccccctgcccgacctgagctgtggcaatccatgatgatggaagctacattcacacagggagaattggtggacaaggccaaagcctcatgaggtggg

SEQ ID NO: 12032 - DNA, 110 bp, synthetic construct
  source 1..110: mol_type = other DNA
actaactgagtgaaagaaatgacccgaggttgctagttcatttactgagtacctactagtgtctggcaccccgatgagcacagcatgctaactgcagagaaagaaccgca

SEQ ID NO: 12033 - DNA, 110 bp, synthetic construct
  source 1..110: mol_type = other DNA
tatatatagtagttggtatctgctaatccccagactaatttattgctcccccatccctcttcccctttgataaccataagtctattttctatgtctgtgagtctgttttg

SEQ ID NO: 12034 - DNA, 110 bp, synthetic construct; identical to SEQ ID NO: 12033
  source 1..110: mol_type = other DNA

SEQ ID NO: 12035 - DNA, 110 bp, synthetic construct
  source 1..110: mol_type = other DNA
agagctgaagccattggtctacgccacagccacaacaatagcaacataccacagatctcggcaaggctgatccttaacccataagcgaggccagggatggaagccacatt

SEQ ID NO: 12036 - DNA, 110 bp, synthetic construct
  source 1..110: mol_type = other DNA
caatagcaacataccacagatctcggcaaggctgatccttaacccataagcgaggccagggatggaagccacattctcatggataataggttcattactgctgagccata

SEQ ID NO: 12037 - DNA, 110 bp, synthetic construct
  source 1..110: mol_type = other DNA
tcactgattttaacggtctcatttagtatatattaattttcccaatacatttgaatttactgttggactctattctattcccttgatctactgtctatgtctgtgccaat

SEQ ID NO: 12038 - DNA, 110 bp, synthetic construct; identical to SEQ ID NO: 12037
  source 1..110: mol_type = other DNA

SEQ ID NO: 12039 - DNA, 110 bp, synthetic construct
  source 1..110: mol_type = other DNA
actgagtgagaccagagatccaacccacatcctcatagagacaatgtcaggttcttaacccactgagtcacaacaggaatgctgataaatcaactttcaaaatgattttg

SEQ ID NO: 12040 - DNA, 110 bp, synthetic construct
  source 1..110: mol_type = other DNA
taacccactgagtcacaacaggaatgctgataaatcaactttcaaaatgattttggagtttagagctggaatgcggtggtgctgccccatcctctcacctacctaccttc

SEQ ID NO: 12041 - DNA, 110 bp, synthetic construct
  source 1..110: mol_type = other DNA
cagggatgtgacgtcagaaaaaaaaatcctttccccaaaccaaaggtggaattggaaccaaccccaggctgacttagggaaatagtaattaacccgcaatggatgtcaga

SEQ ID NO: 12042 - DNA, 110 bp, synthetic construct
  source 1..110: mol_type = other DNA
aaccaaccccaggctgacttagggaaatagtaattaacccgcaatggatgtcagagctgttgatgtgggcacagaaggaagagtagtccagggtacctgaacctcctaga

SEQ ID NO: 12043 - DNA, 110 bp, synthetic construct
  source 1..110: mol_type = other DNA
tcagaatcttgcaacaaatggagctgcagggcggtgccaccttcctggcccgcttcttgggcagtggagggaccctcctgtggggatgtcgcacctatcatcattggaga

SEQ ID NO: 12044 - DNA, 110 bp, synthetic construct
  source 1..110: mol_type = other DNA
cttgggcagtggagggaccctcctgtggggatgtcgcacctatcatcattggagaaaaggttagttttaacttctaatgttggcggactggcacaaatcacttgggagag

SEQ ID NO: 12045 - DNA, 110 bp, synthetic construct
  source 1..110: mol_type = other DNA
gggtacaattgtttttgtttttgttttaatttgtaggatttatgagcgttgctagaatgctttcataagctagacctgttgaaccagccttcgtttttttttttaatctt

SEQ ID NO: 12046 - DNA, 110 bp, synthetic construct
  source 1..110: mol_type = other DNA
cagatagtaaagggatatctgaatatatttggtccctgagtttagaacacttagtagctagggttcagattaaaaaggacttcatccaaataattggctggagagataat

SEQ ID NO: 12047 - DNA, 110 bp, synthetic construct
  source 1..110: mol_type = other DNA
agctagggttcagattaaaaaggacttcatccaaataattggctggagagataatctgtatagtccacacactacaaatttcagacatgacaagaatttatctctctctg

SEQ ID NO: 12048 - DNA, 110 bp, synthetic construct
  source 1..110: mol_type = other DNA
atcacctcccctaaagttaaatccccttctcaatgactgatcaatggaaagtgctgaaggcggagaggggttaagggtgcaactctctcacctcaacttggaacagttct

SEQ ID NO: 12049 - DNA, 110 bp, synthetic construct
  source 1..110: mol_type = other DNA
gaaggcggagaggggttaagggtgcaactctctcacctcaacttggaacagttctgaagggtcattctagctccagagttcccagggcattggcccgtagctgttattgg

SEQ ID NO: 12050 - DNA, 110 bp, synthetic construct
  source 1..110: mol_type = other DNA
tttaatagccaagtgtgttcgagcgggaactttaacaggcagcacagacctagaacctttccatccatatcagaaagtcctaacgggtcctgcagtgaacagtgctgcac

SEQ ID NO: 12051 - DNA, 110 bp, synthetic construct
  source 1..110: mol_type = other DNA
gtaaagtgaggccgatgatatcacccacgtcatggagtggtctggggattatacgcgatagggcagcacagctatgtgtggcatgggggcgattacacaaaggcagtgct

SEQ ID NO: 12052 - DNA, 110 bp, synthetic construct
  source 1..110: mol_type = other DNA
cgatagggcagcacagctatgtgtggcatgggggcgattacacaaaggcagtgctatgccgccagggagccctctctgtcatctggtcacctcccccctctcagcttctg

SEQ ID NO: 12053 - DNA, 110 bp, synthetic construct
  source 1..110: mol_type = other DNA
ccctgtcccccttctgggactttcctaaagggagagaaggggatgtaggacgcgtgctgggagacccctgtagctccccgcgtctgggctacagtcgagtgtctcccagc

SEQ ID NO: 12054 - DNA, 110 bp, synthetic construct
  source 1..110: mol_type = other DNA
ctagtcggattgtttcctctgcgccacaacgggaattcccgttttgtttttttttaatgattttaattttttccattatagttggtgagggttaggtttttgaaggtgga

SEQ ID NO: 12055 - DNA, 110 bp, synthetic construct; identical to SEQ ID NO: 12054
  source 1..110: mol_type = other DNA

SEQ ID NO: 12056 - DNA, 110 bp, synthetic construct
  source 1..110: mol_type = other DNA
acccagcagggagaacgtttgctctttgtcctgctccaagaaccggccaggacatttgtcatgatttcagacaggaatagaagctcccagagcctctagcagtgctgctc

SEQ ID NO: 12057 - DNA, 110 bp, synthetic construct
  source 1..110: mol_type = other DNA
gggggctcagcatcagctagtcccagaactcggggtggcacctgggttggggctctgagtgtcaggcacatggcagaagcctggaaaccacatgcctttggactccacgg

SEQ ID NO: 12058 - DNA, 110 bp, synthetic construct
  source 1..110: mol_type = other DNA
tgagtgtcaggcacatggcagaagcctggaaaccacatgcctttggactccacggaagtcagatgaaaccacgagttgtagctggagcagcgggtatccactccccacag

SEQ ID NO: 12059 - DNA, 110 bp, synthetic construct
  source 1..110: mol_type = other DNA
ggggtcaaatcggatcttcagctgctgacctgtgctacagccactgcaacaccagatccgagtcatgtctgtgacctgcgccacagctcacggcagataccagatcctta

SEQ ID NO: 12060 - DNA, 110 bp, synthetic construct; identical to SEQ ID NO: 12059
  source 1..110: mol_type = other DNA

SEQ ID NO: 12061 - DNA, 110 bp, synthetic construct
  source 1..110: mol_type = other DNA
ttgaattataatttgaagaccactcattttatagaaggtgagtgggtctcactagggctaggtgacttgtggagaatacccgcgctgcccatggtggcagagctgagaac

SEQ ID NO: 12062 - DNA, 110 bp, synthetic construct
  source 1..110: mol_type = other DNA
ggctaggtgacttgtggagaatacccgcgctgcccatggtggcagagctgagaacaaatcccaggctttatctgggattaataaagtgggtgcctaatgccctgtgactt

SEQ ID NO: 12063 - DNA, 110 bp, synthetic construct
  source 1..110: mol_type = other DNA
ctgctggggacttgatcagaaaaattatgatggggctggggtgaggtaagggtattgttcctggaactattttgtggacataaactatcccaggtctcagcaccttagct

SEQ ID NO: 12064 - DNA, 110 bp, synthetic construct
  source 1..110: mol_type = other DNA
tgttcctggaactattttgtggacataaactatcccaggtctcagcaccttagctccttcttgagggctgtgtatcttgttgcatttgaattggggatgggtgaggagat

SEQ ID NO: 12065 - DNA, 110 bp, synthetic construct
  source 1..110: mol_type = other DNA
ggtttctagtcagatttgttaactgcttcgccacgacgggaactcctgtcttttatctttttttcgtgtttttagggctgcgcttgtggcatgtggaagctcccaggggc

SEQ ID NO: 12066 - DNA, 110 bp, synthetic construct; identical to SEQ ID NO: 12065
  source 1..110: mol_type = other DNA

SEQ ID NO: 12067 - DNA, 110 bp, synthetic construct
  source 1..110: mol_type = other DNA
cggagggaaatgggatgttcgcctgctggcccaaggccacagtgtcctttgtccgccccctcctcacccgggagacttgggagcagaggcagccatgctgtccctctggg

SEQ ID NO: 12068 - DNA, 110 bp, synthetic construct
  source 1..110: mol_type = other DNA
gttgagatctgaagctgggaggcccagctctttaaggcccccacagctgggggccctggttgccacctcctggccccccctcaccttttcctggttctgggcaccgacct

SEQ ID NO: 12069 - DNA, 110 bp, synthetic construct
  source 1..110: mol_type = other DNA
ctggttgccacctcctggccccccctcaccttttcctggttctgggcaccgaccttcttgcgatccagaacgattcaggaacagcgctgggcgggctgggttctcacgcg

SEQ ID NO: 12070 - DNA, 110 bp, synthetic construct
  source 1..110: mol_type = other DNA
cttaaaaagcatcctcctgcgtctgccgggatctggggcaggggaagggggtggggggagggacagatactcgtagacccccgagacaaatgaacttggtctgagacatg

SEQ ID NO: 12071 - DNA, 110 bp, synthetic construct
  source 1..110: mol_type = other DNA
gggagggacagatactcgtagacccccgagacaaatgaacttggtctgagacatgggatcagctgggctgagacctatggaggacgcagagctgccgttttctttgttaa

SEQ ID NO: 12072 - DNA, 110 bp, synthetic construct
  source 1..110: mol_type = other DNA
atattactaatgttaataccaaagtctataaataattgaacttcccatgtaaggtcctcgatgtagattcttaggggagcggggtgccagggaatgtcattacaaggtga

SEQ ID NO: 12073 - DNA, 110 bp, synthetic construct
  source 1..110: mol_type = other DNA
acccatgactcctccttggggaaccctgtggatctctggaaccagccaagagggatagcactcttctggtccatgcccatttcggccccagtcctgcagctctgggctgt

SEQ ID NO: 12074 - DNA, 110 bp, synthetic construct
  source 1..110: mol_type = other DNA
tagcactcttctggtccatgcccatttcggccccagtcctgcagctctgggctgtggaatagtcagtaagagaagagctctgaccccatgtgcttggaatgtcatcctcc

SEQ ID NO: 12075 - DNA, 110 bp, synthetic construct
  source 1..110: mol_type = other DNA
atgctatgcatagatagctgatgccagacttgctcaagacacatgattgttaaacgcctaaaggtcagagtaaaagtttaaccagctacgtgacttttaaaaaactgtat

SEQ ID NO: 12076 - DNA, 110 bp, synthetic construct
  source 1..110: mol_type = other DNA
agacttgctcaagacacatgattgttaaacgcctaaaggtcagagtaaaagtttaaccagctacgtgacttttaaaaaactgtattctgcacctgcagccccctcctcac

SEQ ID NO: 12077 - DNA, 110 bp, synthetic construct
  source 1..110: mol_type = other DNA
aagcagacccatgctggtcatcggaccaggttcaaggcatttgttgccattggagattgcaaaggacacgtcggtttgggcggcaagtgctctgaggaagtaaccacggc

SEQ ID NO: 12078 - DNA, 110 bp, synthetic construct
  source 1..110: mol_type = other DNA
attgcaaaggacacgtcggtttgggcggcaagtgctctgaggaagtaaccacggccatccagggggccatcactctagccaaactctccgtcatccctgtgtggcgaggc

SEQ ID NO: 12079 - DNA, 110 bp, synthetic construct; identical to SEQ ID NO: 12077
  source 1..110: mol_type = other DNA

SEQ ID NO: 12080 - DNA, 110 bp, synthetic construct; identical to SEQ ID NO: 12078
  source 1..110: mol_type = other DNA

SEQ ID NO: 12081 - DNA, 110 bp, synthetic construct
  source 1..110: mol_type = other DNA
gacatcaggggagtggttcttaacctgaaggggtgggagatcatagaccatccgtaatggctccaataaaagctctggacccgctcctcaacaaaatacatacacatccc

SEQ ID NO: 12082 - DNA, 110 bp, synthetic construct
  source 1..110: mol_type = other DNA
aatggctccaataaaagctctggacccgctcctcaacaaaatacatacacatccccacacacccatgcaggcagttggtttcaaggaagagcacattcatgaaccccacc

SEQ ID NO: 12083 - DNA, 110 bp, synthetic construct
  source 1..110: mol_type = other DNA
ctgcagttccaattgattccacccctaaactggggacttccatatgctgcaagtgcagcccttaaaaaaaatcaccctgacagctatgtggagagtggaagtggggagtt

SEQ ID NO: 12084 - DNA, 110 bp, synthetic construct; identical to SEQ ID NO: 12083
  source 1..110: mol_type = other DNA

SEQ ID NO: 12085 - DNA, 110 bp, synthetic construct
  source 1..110: mol_type = other DNA
aaaattccaaataggaatttttttctcaaaaaatttttttttctcgaggtacatgaaagttcccaggccagggattgaacccgtgccacagcagtgccccaaatcactgc

SEQ ID NO: 12086 - DNA, 110 bp, synthetic construct
  source 1..110: mol_type = other DNA
aatttttttctcaaaaaatttttttttctcgaggtacatgaaagttcccaggccagggattgaacccgtgccacagcagtgccccaaatcactgcagtaacagtgctgga

SEQ ID NO: 12087 - DNA, 110 bp, synthetic construct
  source 1..110: mol_type = other DNA
cactgaatccttgtctcaggctctgcacggaggaagctggacctaggacacctttgtgtacagatcgcccctgagctaggacagtgtgtcagtgcaaaataatgctaaat

SEQ ID NO: 12088 - DNA, 110 bp, synthetic construct
  source 1..110: mol_type = other DNA
gctggacctaggacacctttgtgtacagatcgcccctgagctaggacagtgtgtcagtgcaaaataatgctaaatcgggagttcccgttgtggcacagtggttaatgaat

SEQ ID NO: 12089 - DNA, 110 bp, synthetic construct
  source 1..110: mol_type = other DNA
gcattggagaattcccagcacagaacattcaagcattcatacattgaccattcatatgtggagtgcctgctaggttgaaggactctgggttctgagcacacagccctgag

SEQ ID NO: 12090 - DNA, 110 bp, synthetic construct
  source 1..110: mol_type = other DNA
atgtggagtgcctgctaggttgaaggactctgggttctgagcacacagccctgagtgagagggataagaacctgccctcatggagtgtacattgcactgggaagtgggga

SEQ ID NO: 12091 - DNA, 110 bp, synthetic construct
  source 1..110: mol_type = other DNA
catctgcagccgaagacaagaaagaaaaagcagtaagaaaaaatcccaaaaccccatgcagcagctacggtattaaaaacgccgaagcatcggaaagaaacacccacagt

SEQ ID NO: 12092 - DNA, 110 bp, synthetic construct
  source 1..110: mol_type = other DNA
atgcagcagctacggtattaaaaacgccgaagcatcggaaagaaacacccacagtaggaacatctccagatcatcaaggcactgctgttaccgaaaacacccccagcctt

SEQ ID NO: 12093 - DNA, 110 bp, synthetic construct
  source 1..110: mol_type = other DNA
cttgcggtctttcatcatagcattgtctttgggtgagactgaaggtgcccctcggtgccttgattcctgagaggagctggcgggagtgaggaggaggacagaacaaggtc

SEQ ID NO: 12094 - DNA, 110 bp, synthetic construct
  source 1..110: mol_type = other DNA
aacagttgtttggctttggaagaccatggccaagacacagaaccatgaatgtaaaggaacaaagggacacagctatctagagataaatggagaagagggcccctttatgg

SEQ ID NO: 12095 - DNA, 110 bp, synthetic construct
  source 1..110: mol_type = other DNA
ggaacaaagggacacagctatctagagataaatggagaagagggcccctttatggtggggaagccttgcaccaacttgcactgttgcctctgacttttgtgctcgttaat

SEQ ID NO: 12096 - DNA, 110 bp, synthetic construct
  source 1..110: mol_type = other DNA
agaaaagaaaattagcattcctggagttcactggtggcttagtggttaaagatttggcattgtcactgccgtggctctgattcgatccctgacctaggaaattccccatg

SEQ ID NO: 12097 - DNA, 110 bp, synthetic construct
  source 1..110: mol_type = other DNA
ggcattgtcactgccgtggctctgattcgatccctgacctaggaaattccccatgccatggggcatggccaaaaaaaaagaaaattagcattccttattcctttgttttg

SEQ ID NO: 12098 - DNA, 110 bp, synthetic construct
  source 1..110: mol_type = other DNA
acagcaggcctcctgggacacagggtctctgggacaataaaatagttgacttgaaatggttgtgttactacttctacttatatgatgaatgacgagtttatacattatat

SEQ ID NO: 12099 - DNA, 110 bp, synthetic construct
  source 1..110: mol_type = other DNA
atggttgtgttactacttctacttatatgatgaatgacgagtttatacattatattccagtgtacttgtgtgatcaatgtctttgtgaataaacagctctctaattctgc

SEQ ID NO: 12100 - DNA, 110 bp, synthetic construct
  source 1..110: mol_type = other DNA
tccaggtagcacggtcccctgagcgtaagccacgaggggtggcatgcagagctgccaaattggagccattgtagctgcagacagaagccaggaagactggtgccttgggg

SEQ ID NO: 12101 - DNA, 110 bp, synthetic construct
  source 1..110: mol_type = other DNA
caaattggagccattgtagctgcagacagaagccaggaagactggtgccttggggagctccacctctttcaaatgcttccacatctgggcggactcatttcccagcacgg

SEQ ID NO: 12102 - DNA, 110 bp, synthetic construct
  source 1..110: mol_type = other DNA
gaagccctcagcaggctctcatatacaggttcatgcagaagatagactaggtcgagtagggtcaggcaggtcgcatgtagcctcgtggctgggactaaacagccattgta

SEQ ID NO: 12103 - DNA, 110 bp, synthetic construct
  source 1..110: mol_type = other DNA
gtagggtcaggcaggtcgcatgtagcctcgtggctgggactaaacagccattgtatcctagatggagatgcatgtagtaaaaagcattgtgtgtgtcttctctgatcaga

SEQ ID NO: 12104 - DNA, 110 bp, synthetic construct
  source 1..110: mol_type = other DNA
ctacttacagccgcagtatcatgtgtctggtgcacacttcactgcagcacttgtgtaccctgtgttagtctcaaattgcccccgctgaggatctcagccttactggataa

SEQ ID NO: 12105 - DNA, 110 bp, synthetic construct
  source 1..110: mol_type = other DNA
taccctgtgttagtctcaaattgcccccgctgaggatctcagccttactggataaacagaaatctcccccaaacaagagcagagatgtctgcagtgtcactgtgctgagt

SEQ ID NO: 12106 - DNA, 110 bp, synthetic construct
  source 1..110: mol_type = other DNA
cttattgactgctttctaattccacttcatttatgttttcactgggaatttggggagaatcagcccggactcactactgattgttgccttggagttgactaggaatctag

SEQ ID NO: 12107 - DNA, 110 bp, synthetic construct
  source 1..110: mol_type = other DNA
gttctcatccccattccccacatcaaaggcgaagaccacatcccgggatgctggacaattcggggtggggtgggggaggggactcagatcctcagaatccctcacggatt

SEQ ID NO: 12108 - DNA, 110 bp, synthetic construct
  source 1..110: mol_type = other DNA
caattcggggtggggtgggggaggggactcagatcctcagaatccctcacggattcacccagtacaacccctcttcttcactctttggtgctccctgaatgtccctccaa

SEQ ID NO: 12109 - DNA, 110 bp, synthetic construct
  source 1..110: mol_type = other DNA
tttagtagttattatttggatagatgtgtgaggcgtgagatcttcagcgtgagatcttcagaaggtatgcataggtgtgatgcgaaaacaagtttgagcaatctgaatta

SEQ ID NO: 12110 - DNA, 110 bp, synthetic construct
  source 1..110: mol_type = other DNA
cttcagaaggtatgcataggtgtgatgcgaaaacaagtttgagcaatctgaattagcatgttagacaccctttctctcactcggggaagtttgtgaagcctgagcgtcag

SEQ ID NO: 12111 - DNA, 110 bp, synthetic construct
  source 1..110: mol_type = other DNA
ggttcttaatctgctgagccacaatgggaactctgtgaagctttcattgactgcagtgtttccttgtagcaaagatctctttacttggctgccataggcattatattaaa

SEQ ID NO: 12112 - DNA, 110 bp, synthetic construct
  source 1..110: mol_type = other DNA
gtgtttccttgtagcaaagatctctttacttggctgccataggcattatattaaaatcaatatagtaggagttctttttatggctcagcaagttaagacaacagtctctg

SEQ ID NO: 12113 - DNA, 110 bp, synthetic construct
  source 1..110: mol_type = other DNA
catttagccttgggaacacaaaaacgacagtaatactactagtagtaataataatagccagtgcctgctattaagatctccagaccaggagttcccgtcgtggctcagtg

SEQ ID NO: 12114 - DNA, 110 bp, synthetic construct; identical to SEQ ID NO: 12113
  source 1..110: mol_type = other DNA

SEQ ID NO: 12115 - DNA, 110 bp, synthetic construct
  source 1..110: mol_type = other DNA
ataacacacatctacttatacataagaaattcatcttcacatcagactgtaaggcttttcctctctccttttcctctggtagtgttatcttcctttattaagaggactca

SEQ ID NO: 12116 - DNA, 110 bp, synthetic construct
  source 1..110: mol_type = other DNA
taaatgagatgtacatggagctttgacattgtgtaaatagggaattgttaactgcccctgcctttcagcagcatatattgtgtcttcctgatcagactgtaaaccccaca

SEQ ID NO: 12117 - DNA, 110 bp, synthetic construct
  source 1..110: mol_type = other DNA
ccctgcctttcagcagcatatattgtgtcttcctgatcagactgtaaaccccacagagtgtactttttatactcttaagactgtccattttcttttgatatctcctccaa

SEQ ID NO: 12118 - DNA, 110 bp, synthetic construct
  source 1..110: mol_type = other DNA
agatgatcatcttctcctgctggaactactgcagtagcctcttgatagatctccttgcttctgatctcagccccttccaaaccaccacttgcatttcctcaaatcaattt

SEQ ID NO: 12119 - DNA, 110 bp, synthetic construct
  source 1..110: mol_type = other DNA
tgcttctgatctcagccccttccaaaccaccacttgcatttcctcaaatcaattttctttcgaaaatgcaaattaggagttcccgttgtggcgcagcagaaacgaatccg

SEQ ID NO: 12120 - DNA, 110 bp, synthetic construct
  source 1..110: mol_type = other DNA
aatcccagcctatccccccactaccccagattatcgcggacgatcccaggctatcccacactattccagacagtcaacttttcagctcctttctggcttggtaggttctc

SEQ ID NO: 12121 - DNA, 110 bp, synthetic construct
  source 1..110: mol_type = other DNA
ccacactattccagacagtcaacttttcagctcctttctggcttggtaggttctctaactagattaatagggcccgggctccccaccaaacactttcccactcttcctaa

SEQ ID NO: 12122 - DNA, 110 bp, synthetic construct
  source 1..110: mol_type = other DNA
tgagggcagaagggtgagaaggacctagccatgacaaagctggaggaggaaaaagaagggcatatgcaaaggccctggactgactgtaatttagtaggcaggagggaggc

SEQ ID NO: 12123 - DNA, 110 bp, synthetic construct
  source 1..110: mol_type = other DNA
aagggcatatgcaaaggccctggactgactgtaatttagtaggcaggagggaggctggtgaggtaggcagggccttgaaacagataagaaaaggagaactccttttacca

SEQ ID NO: 12124 - DNA, 110 bp, synthetic construct
  source 1..110: mol_type = other DNA
cctctcctctaaaccaagcaaagtgcagtattgcattgagttagccttaaaattgtcgacctttgaatttctttctacttgtggtttagacacaataaatatttaatcgc

SEQ ID NO: 12125 - DNA, 110 bp, synthetic construct
  source 1..110: mol_type = other DNA
cagttacagctggactaatagatcctttgattcaaaagctaaaataccagaagattccattggctttctattatgattgactcatgggccatgggttccttaaaattgat

SEQ ID NO: 12126 - DNA, 110 bp, synthetic construct
  source 1..110: mol_type = other DNA
tccattggctttctattatgattgactcatgggccatgggttccttaaaattgatgaaaactcccactctagcatagtggctaagagcaagaattctgaaaatggactgt

SEQ ID NO: 12127 - DNA, 110 bp, synthetic construct
  source 1..110: mol_type = other DNA
agtcctggtccagtgtcagacacacagcaggacctcagtaaatgtttactgaataaactgtcaaatttctaaaatcagtgtccaccacagcaaataaataatagatatga

SEQ ID NO: 12128 - DNA, 110 bp, synthetic construct
  source 1..110: mol_type = other DNA
aactgtcaaatttctaaaatcagtgtccaccacagcaaataaataatagatatgacctgtgctctaggcacaccactgtggtctttttttttttttttttttagggccac

SEQ ID NO: 12129 - DNA, 110 bp, synthetic construct
  source 1..110: mol_type = other DNA
tctaattcgctttttgtctttgatctgctagagaccttttggggattgtgagtgcgtgtgtttaaaaatacttccaaagtgagtaaagaaattcattccaaaattttatg

SEQ ID NO: 12130 - DNA, 110 bp, synthetic construct
  source 1..110: mol_type = other DNA
agataaggctctagactcaggtaccacagcagtggccttgaggcaccatttgttgccttagtgaccaatgttgaggggcagggttggaagctagagtaattccaggtgtc

SEQ ID NO: 12131 - DNA, 110 bp, synthetic construct
  source 1..110: mol_type = other DNA
gacacggtgccaggaatcaccaggttcctgtggcctcgacattcctttcctgccaagggcacttctgttttttgaggttccctatagattaaaaataaagaagtggaaaa

SEQ ID NO: 12132 - DNA, 110 bp, synthetic construct
  source 1..110: mol_type = other DNA
agggcacttctgttttttgaggttccctatagattaaaaataaagaagtggaaaattggtgtagaaaacatgtggcatttaaaaaacagatgtgttgaggtataattgac

SEQ ID NO: 12133 - DNA, 110 bp, synthetic construct
  source 1..110: mol_type = other DNA
catggatagtagttggatttgttaaccgctgagccacgacaggaactcctttatccactattgacctgaccattcccctagattgcaagctccggtgggacctctcagga

SEQ ID NO: 12134 - DNA, 110 bp, synthetic construct; identical to SEQ ID NO: 12133
  source 1..110: mol_type = other DNA

SEQ ID NO: 12135 - DNA, 110 bp, synthetic construct
  source 1..110: mol_type = other DNA
tttgtactataaataggaagttgggttgtaagtaatttaaagtaaactcactctgctcagtatgtatctctttgacatggagttcccattgtggttcaggggtagcaaac

SEQ ID NO: 12136 - DNA, 110 bp, synthetic construct
  source 1..110: mol_type = other DNA
ttttggccaggcatgcagaagttcttgggccagggatcaaacccaggccacggcaatgcccaaactactgcagtgacaacgctgagatccttaatctgagttacagggca

SEQ ID NO: 12137 - DNA, 110 bp, synthetic construct
  source 1..110: mol_type = other DNA
atgcccaaactactgcagtgacaacgctgagatccttaatctgagttacagggcaactcccagggtggtatatttgggaggaatcgagacttgagagtcagaactgagag

SEQ ID NO: 12138 - DNA, 110 bp, synthetic construct
  source 1..110: mol_type = other DNA
aagaggaaagattactacaagatccttggagtagacaagaatgcatctgaggatgagatcaagaaagcttaccggaaacgggccttgatgcaccatccaggtagagcggc

SEQ ID NO: 12139 - DNA, 110 bp, synthetic construct
  source 1..110: mol_type = other DNA
aacaacagaaacagatcgaagcatttcttaatgttcagaagggataattggcaattagttaatgctacccttgttgtgccccagctctggaaatggaagatttaggagct

SEQ ID NO: 12140 - DNA, 110 bp, synthetic construct
  source 1..110: mol_type = other DNA
tagaagttgaattccaagtgcagtgattttttttttcttcccagtccattatagttaatcttattagttggagcaaacatcaagagaaaaaagtacaaccagaaattttg

SEQ ID NO: 12141 - DNA, 110 bp, synthetic construct
  source 1..110: mol_type = other DNA
taatcttattagttggagcaaacatcaagagaaaaaagtacaaccagaaattttggctctcaaggtgctgcaggactattaatgtttaggccttggatgttatactaaga

SEQ ID NO: 12142 - DNA, 110 bp, synthetic construct
  source 1..110: mol_type = other DNA
cctacttgcctccttggctagatgtccttgtgcagtacacaacctgaacaactgtgtgcagcccacttccagagaatccccaggtccctgcctgccctcaccatagcctt

SEQ ID NO: 12143 - DNA, 110 bp, synthetic construct
  source 1..110: mol_type = other DNA
gtgcagcccacttccagagaatccccaggtccctgcctgccctcaccatagcctttctcgccataggccaggaatggagggatgatgatcttccttctctctccaggaca

SEQ ID NO: 12144 - DNA, 110 bp, synthetic construct
  source 1..110: mol_type = other DNA
ctccgggacactagtcggttttgttactgctgaaccatgatggcaactcccaagggttcttcttaatgtcagggcagggctctgccaggacaggcttggatttaggctgc

SEQ ID NO: 12145 - DNA, 110 bp, synthetic construct; identical to SEQ ID NO: 12144
  source 1..110: mol_type = other DNA

SEQ ID NO: 12146 - DNA, 110 bp, synthetic construct
  source 1..110: mol_type = other DNA
tattcaacaaaagtcctgggccattcacttggacaaaggaaagaccacctcccccactgccttttcccccctccccaaaagatctgtcctcaatgggtgcctgggaagct

SEQ ID NO: 12147 - DNA, 110 bp, synthetic construct
  source 1..110: mol_type = other DNA
tggtgggatttccttttggcaacttgtctcatccccttacaagagatttgggagtgtttctagatctcactagatctatcctcctaatttgttcagctttccatagcttg

SEQ ID NO: 12148 - DNA, 110 bp, synthetic construct
  source 1..110: mol_type = other DNA
gtttctagatctcactagatctatcctcctaatttgttcagctttccatagcttgatctcctaagggtcccatgaaattccaccctgaatagaactgggaatccagggca

SEQ ID NO: 12149 - DNA, 110 bp, synthetic construct
  source 1..110: mol_type = other DNA
ggactggggacaatgggcctggcaggaacggcgagttccgggttccagagccttccctccccctccctgactcaaaccctccttcccaaagcccagatacccatctcccg

SEQ ID NO: 12150 - DNA, 110 bp, synthetic construct
  source 1..110: mol_type = other DNA
cctccccctccctgactcaaaccctccttcccaaagcccagatacccatctcccggcctgaaggtgcttgtttggtttctgtgtgctggggcctctctgtgtgtttacgg

SEQ ID NO: 12151 - DNA, 110 bp, synthetic construct
  source 1..110: mol_type = other DNA
cctggagctgcagatcgaaggcctgaaggaagagctggcctacctgaagaagaaccacgaggaggtgggtttcgagctgggcctcccttccaccccagcccagctttccg

SEQ ID NO: 12152 - DNA, 110 bp, synthetic construct
  source 1..110: mol_type = other DNA
cacgaggaggtgggtttcgagctgggcctcccttccaccccagcccagctttccggaactgagaaccctttatccttctgtacccccgactctggtcacaagtgctgcac

SEQ ID NO: 12153 - DNA, 110 bp, synthetic construct
  source 1..110: mol_type = other DNA
cctgctgggagctccagggtgtcaggtgcttctcagataccgactcatctaacgctggtttttcagttgtggccactggggccctgaaaagttgagtaattttcccaagg

SEQ ID NO: 12154 - DNA, 110 bp, synthetic construct
  source 1..110: mol_type = other DNA
gctggccataatctacaggcttggccctgccccgggcaccgcctggggtggccccagaggaggcaaagcctcccaagctgtcctccctggtggctccgcctggatctggt

SEQ ID NO: 12155 - DNA, 110 bp, synthetic construct
  source 1..110: mol_type = other DNA
agaggaggcaaagcctcccaagctgtcctccctggtggctccgcctggatctggtgattctctcttcccttcagtttctcgtccttattcagctcctatcacactcctgg

SEQ ID NO: 12156 - DNA, 110 bp, synthetic construct
  source 1..110: mol_type = other DNA
gggactggcctccccagggtccctgagaggcactcccaaccttctcctgtctctcccattgcagatggaagagcttaaccagcaggtggccaccagctctgagcagcttc

SEQ ID NO: 12157 - DNA, 110 bp, synthetic construct
  source 1..110: mol_type = other DNA
acaaacaaaaaaaacccaactgaaaaagaaatagatgttttaatggagttcccgttgcggctcagtgggtttaaaaacctgactaatgtccatgaggatgcaggtttgat

SEQ ID NO: 12158 - DNA, 110 bp, synthetic construct; identical to SEQ ID NO: 12157
  source 1..110: mol_type = other DNA

SEQ ID NO: 12159 - DNA, 110 bp, synthetic construct
  source 1..110: mol_type = other DNA
tatctgcctcacagagtccttgcccaatgtaaacaagataacaattatagaagactcggaaaattcctaacagacagcaggcactccaaaatagtagctattagtcttgt

SEQ ID NO: 12160 - DNA, 110 bp, synthetic construct
  source 1..110: mol_type = other DNA
tcggaaaattcctaacagacagcaggcactccaaaatagtagctattagtcttgtatttctttagaggcttgtgaatttaaatacataattgttattttgtttactaatc

SEQ ID NO: 12161 - DNA, 110 bp, synthetic construct
  source 1..110: mol_type = other DNA
ccaagtctggacaaattgtttatgaaaccatggagtgaccactaggaagagaatgctcagtttaggtaaactctgcctaaaggttatagaagggcattcatgacgaagca

SEQ ID NO: 12162 - DNA, 110 bp, synthetic construct
  source 1..110: mol_type = other DNA
ctcagtttaggtaaactctgcctaaaggttatagaagggcattcatgacgaagcaagtaagggcaatggttggcccaagtctagcctgtcatgtgacctgcataaaaagt

SEQ ID NO: 12163 - DNA, 110 bp, synthetic construct
  source 1..110: mol_type = other DNA
ctcgatattttacaaccttctaaactgtaaccctgaatctaatttccaatgtaaaaacgtactattccacatcaaataggaacaattcctttatccttaaaaggtttact

SEQ ID NO: 12164 - DNA, 110 bp, synthetic construct; identical to SEQ ID NO: 12163
  source 1..110: mol_type = other DNA

SEQ ID NO: 12165 - DNA, 110 bp, synthetic construct
  source 1..110: mol_type = other DNA
tcatgacaacgccagatccttaaatcctgaacgaggccggggattgaacccaccctctcatggttcctagtcggattcctctccactgcaccacgatgggaactccacac

SEQ ID NO: 12166 - DNA, 110 bp, synthetic construct; identical to SEQ ID NO: 12165
  source 1..110: mol_type = other DNA

SEQ ID NO: 12167 - DNA, 110 bp, synthetic construct
  source 1..110: mol_type = other DNA
gaggactctgtggccaaaggccacgctccagatcaggaacaccgaacacagtaagagcctgaatatataaatatcctcagcctatgacatcaagcccccaggagtttcaa

SEQ ID NO: 12168 - DNA, 110 bp, synthetic construct
  source 1..110: mol_type = other DNA
agcctgaatatataaatatcctcagcctatgacatcaagcccccaggagtttcaaggtgcagcttatggaggggaacctctaggtcaaagggtttagggtttctcctgag

SEQ ID NO: 12169 - DNA, 110 bp, synthetic construct; identical to SEQ ID NO: 12167
  source 1..110: mol_type = other DNA

SEQ ID NO: 12170 - DNA, 110 bp, synthetic construct; identical to SEQ ID NO: 12168
  source 1..110: mol_type = other DNA

SEQ ID NO: 12171 - DNA, 110 bp, synthetic construct
  source 1..110: mol_type = other DNA
ccactacaggcaaaaacagttgtcctgtgcatgtttttggttccttctttcattcagtcaagaaacacttcttaaacccccagagtgggccagactggagattcaaggaa

SEQ ID NO: 12172 - DNA, 110 bp, synthetic construct
  source 1..110: mol_type = other DNA
agtcaagaaacacttcttaaacccccagagtgggccagactggagattcaaggaagaataagatgtggttcttgcttggaggggctcacagttgagggtagagatagaca

SEQ ID NO: 12173 - DNA, 110 bp, synthetic construct
  source 1..110: mol_type = other DNA
gtaattcaccttccttcacagcaaagccaatggaggtttctggttattatttccgatttttctcatcgtttctcctgtttttaatattctagagcaaggaactgactaca

SEQ ID NO: 12174 - DNA, 110 bp, synthetic construct
  source 1..110: mol_type = other DNA
ttgcctttcaaaagtcaaactcctgtttctagatcattgcttccaccaccagcaatgctaacgctgttctacagatcgataatgccaggctgaccgctgatgacttcaga

SEQ ID NO: 12175 - DNA, 110 bp, synthetic construct
  source 1..110: mol_type = other DNA
tgctaacgctgttctacagatcgataatgccaggctgaccgctgatgacttcagactcaagtaagtagactcatagagtgaaaagactccatggagatcaacaggacgca

SEQ ID NO: 12176 - DNA, 110 bp, synthetic construct
  source 1..110: mol_type = other DNA
aagccttagcttaggagtaagctaccaagggttgagcaagaaaattaatataccctctgcatgcaagacggattagagagattggaatagagaccagagacacagtgaat

SEQ ID NO: 12177 - DNA, 110 bp, synthetic construct
  source 1..110: mol_type = other DNA
tctgcatgcaagacggattagagagattggaatagagaccagagacacagtgaataggttactgtagcaattcagggatacagtgacatttttctgaactgaaataatcc

SEQ ID NO: 12178 - DNA, 110 bp, synthetic construct
  source 1..110: mol_type = other DNA
agtccccatggaatccccagagcactgctccaggaggatattaaagagtatttcttgactttcatctttgggccccagtgactagtacacatcgtatacacggtgtatat

SEQ ID NO: 12179 - DNA, 110 bp, synthetic construct
  source 1..110: mol_type = other DNA
gattctcgcacctctgatccccaggtgttttggggacatgagcagaaaatgtctgtggagtgaatgaatgaatggcatcaaagactctgatgggaggggtgttattggcc

SEQ ID NO: 12180 - DNA, 110 bp, synthetic construct
  source 1..110: mol_type = other DNA
tggagtgaatgaatgaatggcatcaaagactctgatgggaggggtgttattggccaccctgaggcatatggcgttcccaggccagggatcagatccgagctggagttgca

SEQ ID NO: 12181 - DNA, 110 bp, synthetic construct
  source 1..110: mol_type = other DNA
tgaaatgtccccaacctctttcccaatgtttaaaaagaggcctgggaacgcgggcacatttatcttgtatggtttacgcaaaaggcactcggtgccgagcctcaacctga

SEQ ID NO: 12182 - DNA, 110 bp, synthetic construct
  source 1..110: mol_type = other DNA
acatttatcttgtatggtttacgcaaaaggcactcggtgccgagcctcaacctgatcacatgcaaagcccaaggcgtgcgttcttctccccggactagggggacttgggg

SEQ ID NO: 12183 - DNA, 110 bp, synthetic construct
  source 1..110: mol_type = other DNA
gcacatcaccctctgcgcatgcgccttggccacctgccagctgactctcccagggcaccttgcacttcaacctggctggtctgtctccagcctatcctcccagacagtga

SEQ ID NO: 12184 - DNA, 110 bp, synthetic construct
  source 1..110: mol_type = other DNA
tggcagatagcaggtgctgggttgggagccacaggccctggtcccaggctggcctgagagcaggtggttggcaaggattgaggaccaaaggaggaatggactcactctct

SEQ ID NO: 12185 - DNA, 110 bp, synthetic construct
  source 1..110: mol_type = other DNA
gagagcaggtggttggcaaggattgaggaccaaaggaggaatggactcactctctttccctccatctctgttcgtttccccatttctctgatggcttcttgagctgctat

SEQ ID NO: 12186 - DNA, 110 bp, synthetic construct
  source 1..110: mol_type = other DNA
ttcaaaagggcttgtgatctgaagagggaggcctgcaggtaaacacaccacacagtcatgtgttatagagagaaatgcacttgaatgtcaagaaaacagagtggagccag

SEQ ID NO: 12187 - DNA, 110 bp, synthetic construct
  source 1..110: mol_type = other DNA
cagccatctggactgagtctgttctggcctgggccacactctgcaatcaccccgcttcaacctacacagccacctctaccctaagcttatagatcatacaaccatatggt

SEQ ID NO: 12188 - DNA, 110 bp, synthetic construct
  source 1..110: mol_type = other DNA
aaggttggcactcacctgattaagtcgatcttgcaagatagtggctatctgatttttggtgtaaggtgggaagttcaacagccgtggcttacacttttctctagcttgaa

SEQ ID NO: 12189 - DNA, 110 bp, synthetic construct
  source 1..110: mol_type = other DNA
ttggtgtaaggtgggaagttcaacagccgtggcttacacttttctctagcttgaagcctcggcagaattctgtctgtgagatctagagtattagcaatacctgaggagga

SEQ ID NO: 12190 - DNA, 110 bp, synthetic construct
  source 1..110: mol_type = other DNA
cagcaggatatctgcggagatcaaacgccaccactgatgtcaggagggcacgttcaggacccgactggacactcaccacccccaacccctcctgcctctgagggcaaatt

SEQ ID NO: 12191 - DNA, 110 bp, synthetic construct
  source 1..110: mol_type = other DNA
gctgcagctcccgccgccccgcgccaaggaactgccactgtctgagccggaagcaccagattcttcgtcctcagtgtcctgcgaagcgcgttgccgccgccggtccgcca

SEQ ID NO: 12192 - DNA, 110 bp, synthetic construct; identical to SEQ ID NO: 12191
  source 1..110: mol_type = other DNA

SEQ ID NO: 12193 - DNA, 110 bp, synthetic construct
  source 1..110: mol_type = other DNA
atctttcccctgctcctgacttctgacctctaagacagctcccagtttctttcataatttcctctccccactgtgagcagcatgtgagcagctggttcctcagctcagag

SEQ ID NO: 12194 - DNA, 110 bp, synthetic construct
  source 1..110: mol_type = other DNA
aatttcctctccccactgtgagcagcatgtgagcagctggttcctcagctcagagcagcctcgctgtgcccactgccccccgcagcctcccacgcaggagtaggttcgct

SEQ ID NO: 12195 - DNA, 110 bp, synthetic construct
  source 1..110: mol_type = other DNA
gagactcttcactgtagtgaaatggggaacagaataatagtctacctaaggtgggcttaagaatcccccaggggaggagttctcgtcgtggcgcagtggttaacgaatcc

SEQ ID NO: 12196 - DNA, 110 bp, synthetic construct; identical to SEQ ID NO: 12195
  source 1..110: mol_type = other DNA

SEQ ID NO: 12197 - DNA, 110 bp, synthetic construct
  source 1..110: mol_type = other DNA
gtctgcagtaaaattttcagtttcagtccctgcccccatttttgacctctcctgcccattattgctagagtagagaagaaacgggcattgattaagacaccaggggaaga

SEQ ID NO: 12198 - DNA, 110 bp, synthetic construct
  source 1..110: mol_type = other DNA
ccattattgctagagtagagaagaaacgggcattgattaagacaccaggggaagaaaaagcaaaaagggagttccattgtaggctgagcgtgatgagtccaactagcatc

SEQ ID NO: 12199 - DNA, 110 bp, synthetic construct
  source 1..110: mol_type = other DNA
ataaattttgtaaatcatttaccactgtgtctgcacagagggagcttttcatagatgctcgccccagtcactctgctgctggcggttattattccttcctgtcccctgga

SEQ ID NO: 12200 - DNA, 110 bp, synthetic construct
  source 1..110: mol_type = other DNA
tgctcgccccagtcactctgctgctggcggttattattccttcctgtcccctggagatcttgactgaaatgggaagttgctggtgagcacaactccctcagggctcctta

SEQ ID NO: 12201 - DNA, 110 bp, synthetic construct
  source 1..110: mol_type = other DNA
cactggggaaagaacgtccacagtggggtggaagggacctgaaggctctctgagatcattcttcctctctttgcagagaaagatggtggtgcatcttgcttaggtaagga

SEQ ID NO: 12202 - DNA, 110 bp, synthetic construct
  source 1..110: mol_type = other DNA
tgcaattccaatcaaacttccagtaagttattttgtggttatcaacaaactaattctaaatgttatatgaagaggcaaaagacccaggataattaacacaatactgaaga

SEQ ID NO: 12203 - DNA, 110 bp, synthetic construct; identical to SEQ ID NO: 12202
  source 1..110: mol_type = other DNA

SEQ ID NO: 12204 - DNA, 110 bp, synthetic construct
  source 1..110: mol_type = other DNA
gtggccaagaatcagaggttcttcatcccctgctcttttttcctttttcttcctaaaccacatgtttccataagccaggactaggctatcaaatcccactcttgacacct

SEQ ID NO: 12205 - DNA, 110 bp, synthetic construct
  source 1..110: mol_type = other DNA
ttgactgtccacacatgtgccatctgccactgtcccctgagacttcagtgccacgtgggacggttctgcccgggttgagggtccttcttcccctttcaaggactccagaa

SEQ ID NO: 12206 - DNA, 110 bp, synthetic construct
  source 1..110: mol_type = other DNA
tcgttaggggaagggactcacgtgtcccagctgctaccaactgtccccacagtggccccgggccgagcacccccaactcccactatctctagcttgggcctggactccat

SEQ ID NO: 12207 - DNA, 110 bp, synthetic construct
  source 1..110: mol_type = other DNA
cggcctataccacagccacggcaatgccggatctgaacagtgtttgcagtctacatcacagctcatcacagcaggattcttaacacactgagcgaggcagggatctaacc

SEQ ID NO: 12208 - DNA, 110 bp, synthetic construct; identical to SEQ ID NO: 12207
  source 1..110: mol_type = other DNA

SEQ ID NO: 12209 - DNA, 110 bp, synthetic construct
  source 1..110: mol_type = other DNA
gagtgcacttgagcctcgcttcacccgtgaggcaggtgtgattattggccctccggcctcaatgcagcagctgagccttggatggttgaaagcacctgcccgggatcggg

SEQ ID NO: 12210 - DNA, 110 bp, synthetic construct
  source 1..110: mol_type = other DNA
gcctcaatgcagcagctgagccttggatggttgaaagcacctgcccgggatcgggcagccagtgaaggggtgcagttgaacttgagcccacagctgttgaagtccagacg

SEQ ID NO: 12211 - DNA, 110 bp, synthetic construct
  source 1..110: mol_type = other DNA
gtgcaaatggcaatggaaatgggagaggacagcaagggatgcagcccaaagaggatgccctttggggaagtggtccagggagatggtccagcgcatttgcaaaggaggca

SEQ ID NO: 12212 - DNA, 110 bp, synthetic construct
  source 1..110: mol_type = other DNA
tgccctttggggaagtggtccagggagatggtccagcgcatttgcaaaggaggcacagggctgagtctctttaggttggcacgtacttgttacgcgcgggcagctacctc

SEQ ID NO: 12213 - DNA, 110 bp, synthetic construct
  source 1..110: mol_type = other DNA
ccccacccccagacagtgggtgtataggctcatcctgggggttcctttccatccccatcccaacattcatacgccccccccaacagccaaggagatcgctcctgtcggct

SEQ ID NO: 12214 - DNA, 110 bp, synthetic construct
  source 1..110: mol_type = other DNA
caagaatctgctgtattcaggaaggaggggagaagcagcatgacattgtggaatgttctataacctgggagatcctcctgaaccaagagctttgcattggagaggctgac

SEQ ID NO: 12215 - DNA, 110 bp, synthetic construct
  source 1..110: mol_type = other DNA
ttctataacctgggagatcctcctgaaccaagagctttgcattggagaggctgacatgcgacccccagaagaacagtggcttcaaagtggagttcttcccacccaccccg

SEQ ID NO: 12216 - DNA, 110 bp, synthetic construct; identical to SEQ ID NO: 12214
  source 1..110: mol_type = other DNA

SEQ ID NO: 12217 - DNA, 110 bp, synthetic construct; identical to SEQ ID NO: 12215
  source 1..110: mol_type = other DNA

SEQ ID NO: 12218 - DNA, 110 bp, synthetic construct
  source 1..110: mol_type = other DNA
gtgagaggccatcatgaggactgggtattggttctaagctgggtgggagagacgctctgggccgggtggctggctagaaggaggaggggccaggaagagcaaagggctgc

SEQ ID NO: 12219 - DNA, 110 bp, synthetic construct
  source 1..110: mol_type = other DNA
cggcatgaagtcatcttcagggttaggatcctcaggctcattgtctcagaaaaatcccccatcatctaactcttgtacagcatcttcctcttccttttcctcaagtggct

SEQ ID NO: 12220 - DNA, 110 bp, synthetic construct
  source 1..110: mol_type = other DNA
atttgactggttgttgtctttgtcccacgttatagaaaagtatcttgagatattagtttagagtcaatccatttcatttgaattcatctcctcagtataaaccgaataat

SEQ ID NO: 12221 - DNA, 110 bp, synthetic construct
  source 1..110: mol_type = other DNA
caggtacagactgtgatacctgccgggtgcaaggatggggttctgctcagcaattggatcaacacagactggcccctgggatctgctctctacacaaggcaccgagggtc

SEQ ID NO: 12222 - DNA, 110 bp, synthetic construct
  source 1..110: mol_type = other DNA
ggctgctcctcgacatatgggcatttgaagttccctggccaggcatcagatataagtcacagctgcaacctaggtgaacactggatccttaacccactatgccaggcttg

SEQ ID NO: 12223 - DNA, 110 bp, synthetic construct
  source 1..110: mol_type = other DNA
gaattattgtatccagacccctgggtgggggaggtgcagagggtggttcctgtcctggcgattcctcatgcctcccatgggctctgtttgggtaacaacaggaggacaac

SEQ ID NO: 12224 - DNA, 110 bp, synthetic construct
  source 1..110: mol_type = other DNA
tggcgattcctcatgcctcccatgggctctgtttgggtaacaacaggaggacaaccacagctactatgtgtctcatctatacggtcccagcgagccccgcagccaggacc

SEQ ID NO: 12225 - DNA, 110 bp, synthetic construct
  source 1..110: mol_type = other DNA
gaacctgagttgtcatggatgctagtcatagtggtttccactgaactatgacgagaactcccctccactctctctttactcactctctggagaagatccacctgttgggc

SEQ ID NO: 12226 - DNA, 110 bp, synthetic construct
  source 1..110: mol_type = other DNA
tgtgtggggagcatccactgggctggggtgcggctggactgtgacccacagctcttgtctctttggggctcaggttatctgcttcggctgctgattcctcctaaggatgt

SEQ ID NO: 12227 - DNA, 110 bp, synthetic construct
  source 1..110: mol_type = other DNA
tgtctctttggggctcaggttatctgcttcggctgctgattcctcctaaggatgtggttagtctctgccctcctggggcctggggcctggagaggggctcccctggcaat

SEQ ID NO: 12228 - DNA, 110 bp, synthetic construct
  source 1..110: mol_type = other DNA
aaacgaggtctgcctgctggaatctggagacccagagatgctgcctctgcaccctacacactctcctatcgctcagttctgataaagctggaatccgttggggattcagg

SEQ ID NO: 12229 - DNA, 110 bp, synthetic construct
  source 1..110: mol_type = other DNA
acacactctcctatcgctcagttctgataaagctggaatccgttggggattcagggttcacaggtgtgtggctcctgggccctgggtgcccaccctgtgcgactccagag

SEQ ID NO: 12230 - DNA, 110 bp, synthetic construct
  source 1..110: mol_type = other DNA
tcgatcttccacaagaaccccccgtttccaaaacaatgcagtaggtaaacgccgctaagggcgtctcaaccattagcaacgaacatcaggctcatcatacatttaatcct

SEQ ID NO: 12231 - DNA, 110 bp, synthetic construct
  source 1..110: mol_type = other DNA
attcctactttttcttggcagcttttctggaaattgtgatgagagctggtggtggggaaaaaaaatcactgaaatcaccagcagttttcctgtgtctcggtggctggcta

SEQ ID NO: 12232 - DNA, 110 bp, synthetic construct
  source 1..110: mol_type = other DNA
ggaaaaaaaatcactgaaatcaccagcagttttcctgtgtctcggtggctggctatcacctaagccattccagatggattggaattctttctttctttctttctttcttc

SEQ ID NO: 12233 - DNA, 110 bp, synthetic construct
  source 1..110: mol_type = other DNA
ctcacagcaatgccggatccctgacccactgtatgaggctagggatcaaaccacagtcctcatgaacactagtcagatttgttccccctgcaccacaggggactccagtt

SEQ ID NO: 12234 - DNA, 110 bp, synthetic construct; identical to SEQ ID NO: 12233
  source 1..110: mol_type = other DNA

SEQ ID NO: 12235 - DNA, 110 bp, synthetic construct
  source 1..110: mol_type = other DNA
cgcaccatccagcagtgttgtgaaaatatcctgctgaatgctgcttggctaaagcgtgatgctgagagcatccaccagtacctccttcagcgaaaggcctcgccacccac

SEQ ID NO: 12236 - DNA, 110 bp, synthetic construct
  source 1..110: mol_type = other DNA
aatcaggctgatgtaagaggtgtgccggtaggcaaaatgtgttccagtaaggaacagttgacatcttttgtctttttgtgtgtgtccatgcacaggttttgcagactttg

SEQ ID NO: 12237 - DNA, 110 bp, synthetic construct
  source 1..110: mol_type = other DNA
atcaaatggacatctgcagagggccctggttgacaggatgctgcagagaaggctccagtccatgcccttcccactggcagtccggaggcggagctctgggttgggccttg

SEQ ID NO: 12238 - DNA, 110 bp, synthetic construct
  source 1..110: mol_type = other DNA
cagtccatgcccttcccactggcagtccggaggcggagctctgggttgggccttgattatttatgcagatatgaaccacccagggaggcctggcagggctgcaaggcagg

SEQ ID NO: 12239 - DNA, 110 bp, synthetic construct
  source 1..110: mol_type = other DNA
gtgccaggtttaaattttcagaagagctggcatgttcaccgtttttgctcatggcagccctgagccatcctttaagaagcccggctacccggctggagagatgaagtcaa

SEQ ID NO: 12240 - DNA, 110 bp, synthetic construct
  source 1..110: mol_type = other DNA
agccctgagccatcctttaagaagcccggctacccggctggagagatgaagtcaagagactgaacaggatttcccatcgtgactcagcggtaacgaaccatgaatccata

SEQ ID NO: 12241 - DNA, 110 bp, synthetic construct
  source 1..110: mol_type = other DNA
tcttcatcaggatcttgtgcttccgcagctggtgccgcaggagcagcttgtcctccgcactcagagccacatgctggcagactgctatcatccggttgtctcggaaaacg

SEQ ID NO: 12242 - DNA, 110 bp, synthetic construct
  source 1..110: mol_type = other DNA
cgcactcagagccacatgctggcagactgctatcatccggttgtctcggaaaacggctgctatctcccgacggaggagccggacgaggcctgtctcctgaagtcagggag

SEQ ID NO: 12243 - DNA, 110 bp, synthetic construct
  source 1..110: mol_type = other DNA
gcctgggggtggagcactagagctgcaagcatctccctgggcgtctctcatctgcatcttctctgtcttcaccttagaaagactccttaccctgaaccccaccacttgac

SEQ ID NO: 12244 - DNA, 110 bp, synthetic construct
  source 1..110: mol_type = other DNA
gggcctggagagattggtggtctgcttctcaggaccccatggtgggggctgtgaaggtcgtggggaagaaggtgcaatacagtggcggtgaccagaaagctagacaggga

SEQ ID NO: 12245 - DNA, 110 bp, synthetic construct
  source 1..110: mol_type = other DNA
ggtcgtggggaagaaggtgcaatacagtggcggtgaccagaaagctagacagggagcaggcccacgcccaggcaaacatatcacctccttatgaaaatgatggtcttttt

SEQ ID NO: 12246 - DNA, 110 bp, synthetic construct
  source 1..110: mol_type = other DNA
agctctttccccgcttactgacctctgcccggagagtagatctaagctctagggatatttatttcccaaagcaggaagaagagaggggctcccagtctcctcagcatttc

SEQ ID NO: 12247 - DNA, 110 bp, synthetic construct
  source 1..110: mol_type = other DNA
cgagagagcttgaggttatgaaggctgaaaggaagcctcagagcttagctgtgtgggcagcggttcctcttcagagaggaccgggctggagcctggctgcagcctgacca

SEQ ID NO: 12248 - DNA, 110 bp, synthetic construct
  source 1..110: mol_type = other DNA
ggcagcggttcctcttcagagaggaccgggctggagcctggctgcagcctgaccagaggggccccctcctcgtgtttgaactgggaagcactggagtgcccaccgtgggg

SEQ ID NO: 12249 - DNA, 110 bp, synthetic construct
  source 1..110: mol_type = other DNA
tctagcctcctccccaatttattcaacatatctgctctccccggtagcacactttggactacccatccccctcttacaattccctcgaagttaccgctcctcagccctgc

SEQ ID NO: 12250 - DNA, 110 bp, synthetic construct
  source 1..110: mol_type = other DNA
tccgcccctcccctgctcacacacattctcttgctctttgcatcgatgccactgctttcttggaaggtaagtgactggcatgaaatgtggtttttggaaatgtgtcactg

SEQ ID NO: 12251 - DNA, 110 bp, synthetic construct
  source 1..110: mol_type = other DNA
aaaagcacagaaacagctgttacatccctgaggaaccacaacagtcaaggaaaggttattagggaagctgaagaagaggctacagtggtggagaggcagatatcactgcc

SEQ ID NO: 12252 - DNA, 110 bp, synthetic construct
  source 1..110: mol_type = other DNA
ttattagggaagctgaagaagaggctacagtggtggagaggcagatatcactgccaagctagggcgatgcaacaggaacggttattttgccaaaagagtacaacagagac

SEQ ID NO: 12253 - DNA, 110 bp, synthetic construct
  source 1..110: mol_type = other DNA
catgagctgtggtgtaggtggcagatacggctcggatcctgagttgctgtggcattgtctggcagctacaactttgatttgacccttggcctgggaactcccatatgcca

SEQ ID NO: 12254 - DNA, 110 bp, synthetic construct; identical to SEQ ID NO: 12253
  source 1..110: mol_type = other DNA

SEQ ID NO: 12255 - DNA, 110 bp, synthetic construct
  source 1..110: mol_type = other DNA
ttttttcccccttcagttcatgacgcacaatgtgtaaagcaactttcattcctaatcacaaagctagaaaggaatatacaaaatttgcacgttattaattgccatttgct

SEQ ID NO: 12256 - DNA, 110 bp, synthetic construct
  source 1..110: mol_type = other DNA
gaagaaagacataaaacgaaaaactatgcacaatttgactttgggcaaacgtacgaattttctaaatgacattgttagctgagacaaacttgtactatcgttgggtatca

SEQ ID NO: 12257 - DNA, 110 bp, synthetic construct
  source 1..110: mol_type = other DNA
ctcttattggacttctatgaatgtgacacctctttaggacaaggtcctggtatcatgagggataatgctaggctaagagtccagacagctcagggtgagatcatatgtga

SEQ ID NO: 12258 - DNA, 110 bp, synthetic construct
  source 1..110: mol_type = other DNA
tgagggataatgctaggctaagagtccagacagctcagggtgagatcatatgtgattttccatggattggaggctatgcttcacattataccaagagagagctgtgaggg

SEQ ID NO: 12259 - DNA, 110 bp, synthetic construct
  source 1..110: mol_type = other DNA
ctcctcagtgctgatggagaaggaaacacagtacccatgacgggcaaaggctggagttccagtgctttcgtcttctagctgtgagactgtagctgcagcctcagcttcct

SEQ ID NO: 12260 - DNA, 110 bp, synthetic construct
  source 1..110: mol_type = other DNA
ttgtaacatttggggaaaaaaataattccaaacaacattttggaggcagtaacttaaaaagaaaacacaagatcatggttaggagaatctttaattgaatcagttggtgt

SEQ ID NO: 12261 - DNA, 110 bp, synthetic construct; identical to SEQ ID NO: 12260
  source 1..110: mol_type = other DNA

SEQ ID NO: 12262 - DNA, 110 bp, synthetic construct
  source 1..110: mol_type = other DNA
caccaggacttctgatggggcataaagttctggaaacaaaaattttgcagaggaccaccaccaacttctaagacctgcatcacgtctattgcatatgtcatttgctaggt

SEQ ID NO: 12263 - DNA, 110 bp, synthetic construct
  source 1..110: mol_type = other DNA
caccaccaacttctaagacctgcatcacgtctattgcatatgtcatttgctaggttgttcaaaagtcctctgaaggctaaacaatgaggaaaagagaagctgactgaaaa

SEQ ID NO: 12264 - DNA, 110 bp, synthetic construct
  source 1..110: mol_type = other DNA
gccatgagctgtggtgtaggtcccagctgcatcttggatcctgctttgttgtggccgaggtgtaggacggcggctgcagctccgactgaactcataacctggggacctcc

SEQ ID NO: 12265 - DNA, 110 bp, synthetic construct
  source 1..110: mol_type = other DNA
gtaggtcccagctgcatcttggatcctgctttgttgtggccgaggtgtaggacggcggctgcagctccgactgaactcataacctggggacctccatatgctgtgagtgt

SEQ ID NO: 12266 - DNA, 110 bp, synthetic construct
  source 1..110: mol_type = other DNA
tattttctgctccacttcccccttctcttggccttctacttgcagctactttcctaaaatagagtaggttttgttatggcaggatgatggtacaaggaaatggatctgat

SEQ ID NO: 12267 - DNA, 110 bp, synthetic construct
  source 1..110: mol_type = other DNA
caaaaggaaacacaacagtgacctcagactctaaacaacacctggtgggctgacagctaaggcagggttaagaggaagatgaggtggaagagaggctgacatcctaaatg

SEQ ID NO: 12268 - DNA, 110 bp, synthetic construct
  source 1..110: mol_type = other DNA
cagctttgattgtgcggagacaaaacccagactggtatagaattcagccctgcacccggctccactgagggcagctctctgcaaggtcctggccagaaatccattaaaac

SEQ ID NO: 12269 - DNA, 110 bp, synthetic construct
  source 1..110: mol_type = other DNA
ctacaacctaagagtctgaaaaaatgtgcagaaggggacaggtgttggccaagtcattctttattgctaggacaactgctggcatttgaatgtgtggaccctgaggttct

SEQ ID NO: 12270 - DNA, 110 bp, synthetic construct
  source 1..110: mol_type = other DNA
cagtgaaagacatttaaatggtcgttctcggtgggagaggatataattcgtctcgggagtgaaattggcgtttggaaagggcttctataaaagggtttcatacaaagcga

SEQ ID NO: 12271 - DNA, 110 bp, synthetic construct
  source 1..110: mol_type = other DNA
gaaaccaagaaagcaaggacatgatctggtggccttgtagtcccagaggacaatccaatccttttcactctccccatagtcagggtggagctgagagggattttaagctg

SEQ ID NO: 12272 - DNA, 110 bp, synthetic construct
  source 1..110: mol_type = other DNA
caatccttttcactctccccatagtcagggtggagctgagagggattttaagctgcaatttctgaaatcgtcattgacacgctctgacatcaatttcccctttctctctc

SEQ ID NO: 12273 - DNA, 110 bp, synthetic construct
  source 1..110: mol_type = other DNA
gaaacttctgatcacagcaaaattcccataactgcaatgttccttggtggccatgaaatctggaccgcttgtcaccttgatgtcaccttctaagctgctgctaagccctg

SEQ ID NO: 12274 - DNA, 110 bp, synthetic construct
  source 1..110: mol_type = other DNA
aaatctggaccgcttgtcaccttgatgtcaccttctaagctgctgctaagccctgaaaattgttccagacaagccaggaaaggctggggaccctgaggctcttggtttgg

SEQ ID NO: 12275 - DNA, 110 bp, synthetic construct
  source 1..110: mol_type = other DNA
cttttttccatcacttggattctttgctcctggttggtgtaagccaacaagtggccatggttggagctgagtagaatagtacaaatgctacgtattataacatccccact

SEQ ID NO: 12276 - DNA, 110 bp, synthetic construct
  source 1..110: mol_type = other DNA
cctgggactgaggttgagaatttcttctcctcaggcctcttcctccaattgattgcattagactaaccaaaaatagcatggcggggaactcagatagctagtgtgggtac

SEQ ID NO: 12277 - DNA, 110 bp, synthetic construct
  source 1..110: mol_type = other DNA
cattagactaaccaaaaatagcatggcggggaactcagatagctagtgtgggtaccagaggtttctcatcttgatttcacagctctcagcagaagcgtcttatttctgaa

SEQ ID NO: 12278 - DNA, 110 bp, synthetic construct
  source 1..110: mol_type = other DNA
aacaaatctttacatggttaatggaatgctagctgccttcccagaagaacgacccttagaaggctcttggcaggaggggcacgtagactcccttaagattgtcatcctgg

SEQ ID NO: 12279 - DNA, 110 bp, synthetic construct
  source 1..110: mol_type = other DNA
ctcgtcacttatcccagagggacggccagctctcaaaacccaggaaaccaagctacagaagacaactctctgtgcacgcctctttcccgctatcccaggggtagactctt

SEQ ID NO: 12280 - DNA, 110 bp, synthetic construct
  source 1..110: mol_type = other DNA
cagtttcctcacctatcaaatgagggctgagactcctaggactgtgaaacctcgagtgcaggcctagagagctcggactcttgaaactgaagcacacctgcttgaaattt

SEQ ID NO: 12281 - DNA, 110 bp, synthetic construct
  source 1..110: mol_type = other DNA
tcataataaaatacttctagttaaaaacaatactgggaagttctagttaaccatcagactctggaatacctaagggaacaagctgttactcactgtaaataaagagctct

SEQ ID NO: 12282 - DNA, 110 bp, synthetic construct
  source 1..110: mol_type = other DNA
agactctggaatacctaagggaacaagctgttactcactgtaaataaagagctctaactggcacaacactgcaaatcaactatacttaaagaaaagaaaaaggaaaagat

SEQ ID NO: 12283 - DNA, 110 bp, synthetic construct
  source 1..110: mol_type = other DNA
tggtgtcttaacccccaaattttaactcaaggctaaacattcagcctttaatatattcttgtattaaagcaatttaacaatctgcttgtgagcagcaaaaatccctcagc

SEQ ID NO: 12284 - DNA, 110 bp, synthetic construct
  source 1..110: mol_type = other DNA
ccagggagcgaacccgcatcctcttggataccagtcaggtttgtaacccattgagccatagtgggaactcccccagcctgaatgtctaacctcagtcctatacatctatt

SEQ ID NO: 12285 - DNA, 110 bp, synthetic construct
  source 1..110: mol_type = other DNA
ccatagtgggaactcccccagcctgaatgtctaacctcagtcctatacatctatttcttcagctctttaactcacaaattgaggaactcccaccaagagccaggcatgtt

SEQ ID NO: 12286 - DNA, 110 bp, synthetic construct
  source 1..110: mol_type = other DNA
agaggcttaagggaggcacagaggttggggggtggggggaaacacagcagagaatgggtcagacccagtcctggcctcttgcacacccactcctcttgtatagagccact

SEQ ID NO: 12287 - DNA, 110 bp, synthetic construct
  source 1..110: mol_type = other DNA
gggtcagacccagtcctggcctcttgcacacccactcctcttgtatagagccactgaagcagacaggcacctccgcagcgtgcacagcatcctcggaacgcagctcgctg

SEQ ID NO: 12288 - DNA, 110 bp, synthetic construct
  source 1..110: mol_type = other DNA
ggaccatgttaatttttagcctgtctatttctcactcctccgaggtggtaggtacaagaaagttgtgaagccaggatttgaacacagctccttcccgctccaaaagccac

SEQ ID NO: 12289 - DNA, 110 bp, synthetic construct
  source 1..110: mol_type = other DNA
aagaaagttgtgaagccaggatttgaacacagctccttcccgctccaaaagccactcttaaccacgattccccatgcaaaaccacccttcctcctgtgtttagtgtccct

SEQ ID NO: 12290 - DNA, 110 bp, synthetic construct
  source 1..110: mol_type = other DNA
ttagatcgtgtccggtgctcttggcaccacaaagttatagctgagcccctctctcccagcccgccccctttcaaattattactgcaacatcctcctcagtaattcgctct

SEQ ID NO: 12291 - DNA, 110 bp, synthetic construct
  source 1..110: mol_type = other DNA
ccgttggagacattcttatcccaatttacagctgggaaaagagaggctcagaatctttaggggcttccttgccaaggtcacacagtgagcaaagtatcagaatccagatt

SEQ ID NO: 12292 - DNA, 110 bp, synthetic construct
  source 1..110: mol_type = other DNA
catttatatccttactcggtcacttgtgacaatgacatacaagatgactggtttcagctagacatgcacttaggtatagctttggaaaagaatgatgacaacgggtttac

SEQ ID NO: 12293 - DNA, 110 bp, synthetic construct
  source 1..110: mol_type = other DNA
aataaatattaaccagatgcaagctggtggtatagtgttgcaatatgggaggtggcaagctggaggccacaggccaaacctggcttgtaggcatgtttcctttagctggc

SEQ ID NO: 12294 - DNA, 110 bp, synthetic construct
  source 1..110: mol_type = other DNA
caagctggaggccacaggccaaacctggcttgtaggcatgtttcctttagctggcaaagaattttaaaaattgtcagagttcatgcaaaagtcaatatttccatctcttt

SEQ ID NO: 12295 - DNA, 110 bp, synthetic construct
  source 1..110: mol_type = other DNA
acagctcatttgttcggaagctgaacaggaatgggtttaaactgccacaaaagtgagagaagagttgactcttcaaaacgtcactgctgagaaggttgaagttctgagtc

SEQ ID NO: 12296 - DNA, 110 bp, synthetic construct
  source 1..110: mol_type = other DNA
ctctatgtgcaagacagggagcacagggtgagagaagagggacctcaagcttaccactctgcctgccaagtactccccaactctaagaagccacactcaggcagcctctg

SEQ ID NO: 12297 - DNA, 110 bp, synthetic construct
  source 1..110: mol_type = other DNA
cctgttaactgtcataacatattgggctgcaaggaaattaactgtgatgcactatttggcttattgagagcttttccctttgaaaaatcctcagtttttccaacaacaaa

SEQ ID NO: 12298 - DNA, 110 bp, synthetic construct
  source 1..110: mol_type = other DNA
ggatcctgtgccattggtgggtcttcagtggaaccccagccacttcctgttgttccagtgtggctgggtgcatgaggcaccctcgagcaggaggcagtgtggagtagggg

SEQ ID NO: 12299 - DNA, 110 bp, synthetic construct
  source 1..110: mol_type = other DNA
ctctgaaaatgactcctcggccttccaggctttgagtgggggaatggcctcagaagctcacacagcccacgatggactcagatgtcctccttggccctgctctgaatacc

SEQ ID NO: 12300 - DNA, 110 bp, synthetic construct
  source 1..110: mol_type = other DNA
gggggtgattcaggcgtagagacggatacctagactgggagaagtggatattaattcagaggcagaaactcgggcttcaggggctatgaaggactggagcaaatattcgc

SEQ ID NO: 12301 - DNA, 110 bp, synthetic construct
  source 1..110: mol_type = other DNA
tcagaggcagaaactcgggcttcaggggctatgaaggactggagcaaatattcgcaacctctgctctcctcccaggatgactccatccggctgggtccctttccctgagc

SEQ ID NO: 12302 - DNA, 110 bp, synthetic construct
  source 1..110: mol_type = other DNA
gaagaaagccttggtgtccatcttctgcctccgagctgggagcagcgtcaagtatctgaatggactcatttcatgacattcgcttggcccactgtctcgtcgtgtaatat

SEQ ID NO: 12303 - DNA, 110 bp, synthetic construct
  source 1..110: mol_type = other DNA
ctgaatggactcatttcatgacattcgcttggcccactgtctcgtcgtgtaatattgggccagttattgcaagcctccagggcttagtttgctcgtctgtgaaatggagg

SEQ ID NO: 12304 - DNA, 110 bp, synthetic construct
  source 1..110: mol_type = other DNA
cctggcagacctgaacaatgatgggtgagaatccagggatgcttctttaggggtggggagaatgatgagggaagtgggcttgcccaagccagggccgagtaatggaggtt

SEQ ID NO: 12305 - DNA, 110 bp, synthetic construct
  source 1..110: mol_type = other DNA
ggagcaaggccaccttccctatgacttctttgtcctgacctgtggcacaggtcctgtggcggtgatgtttggcaagacagaagtttggatgtgaccactcaggggcgcct

SEQ ID NO: 12306 - DNA, 110 bp, synthetic construct
  source 1..110: mol_type = other DNA
gtggcggtgatgtttggcaagacagaagtttggatgtgaccactcaggggcgcctagaggcagctcctccatttgactcatcagagcccacagaccagatgctggtccca

SEQ ID NO: 12307 - DNA, 110 bp, synthetic construct
  source 1..110: mol_type = other DNA
tcaccaaaaagcagaaatagcaataggtacaaacccctcccttcttcccatgagacaactcaggcccagagaggttccaagactccttcagagccacacagctccaagtg

SEQ ID NO: 12308 - DNA, 110 bp, synthetic construct
  source 1..110: mol_type = other DNA
caactcaggcccagagaggttccaagactccttcagagccacacagctccaagtggacaagcccagcctgggactcgccagcgccagctccaaagctactccttcaccct

SEQ ID NO: 12309 - DNA, 110 bp, synthetic construct
  source 1..110: mol_type = other DNA
ctgtctctatggaaatcactgcagtgaccagtctgtggtggccccaaagtgccaatctctgtctccatggagacccttaggtagtctccctgggtccaagctctgtgggc

SEQ ID NO: 12310 - DNA, 110 bp, synthetic construct
  source 1..110: mol_type = other DNA
tctctgtctccatggagacccttaggtagtctccctgggtccaagctctgtgggcaatgcctgaggatcgggggatgtctccaccctgatggaatatcccagaaataagt

SEQ ID NO: 12311 - DNA, 110 bp, synthetic construct
  source 1..110: mol_type = other DNA
ccccagtgcacacatgatccaggccccgggacgggctggagtgcgcctagaccaggcaaaccagctgtggcccacttctgcatctgtgttccttaaccctcacctaccac

SEQ ID NO: 12312 - DNA, 110 bp, synthetic construct
  source 1..110: mol_type = other DNA
gggtcaagttggagctgcagctgctggccttacaccacagccacagctgcagccaccccagatctgagccatatctgtgacccaccctgaagctcatggcaaagccagat

SEQ ID NO: 12313 - DNA, 110 bp, synthetic construct
  source 1..110: mol_type = other DNA
ggccttacaccacagccacagctgcagccaccccagatctgagccatatctgtgacccaccctgaagctcatggcaaagccagatccttaagccttggagtgaggccagg

SEQ ID NO: 12314 - DNA, 110 bp, synthetic construct
  source 1..110: mol_type = other DNA
cccagagacgggaacgtgtaggtgctatcgtttcccagagttctagatacggtgtatttatccatggctctggtgtttttctaagataagtaactgaattgctgaaactg

SEQ ID NO: 12315 - DNA, 110 bp, synthetic construct
  source 1..110: mol_type = other DNA
ccctcaacccaagccttccatcccttgtttgtagatgagggatgactgtggacggtgtggtgttgacagatcatttcccactttcaggcttataagcggtgcttttccga

SEQ ID NO: 12316 - DNA, 110 bp, synthetic construct
  source 1..110: mol_type = other DNA
cccccctcctctggcttcattatttgctatttagtgggaagtaagaagaggctcgcttttcttctgcacagtttatcattctttagctggcctggccctctgctggcctc

SEQ ID NO: 12317 - DNA, 110 bp, synthetic construct
  source 1..110: mol_type = other DNA
cgcagggcaggctggggccgcagggcactggggccttgagagtggggacatagaaaggaggggactcagggatcagcttttggggagatgaccttggaaaggcaggccta

SEQ ID NO: 12318 - DNA, 110 bp, synthetic construct
  source 1..110: mol_type = other DNA
aggaggggactcagggatcagcttttggggagatgaccttggaaaggcaggcctatgagaccttgaacaatatcttagggtgggatacagaaggcagaatccttcacctg

SEQ ID NO: 12319 - DNA, 110 bp, synthetic construct
  source 1..110: mol_type = other DNA
ttgctgctgatgacatcactgagctctgcggtgggtgacatccctgagatcgatgggatctagaaagtaatcacagggctctgaggtcccttgtctctttgaaatcaaga

SEQ ID NO: 12320 - DNA, 110 bp, synthetic construct
  source 1..110: mol_type = other DNA
attcagtccatccgcatgcgtgtttgcattcacaggcctctagctgtcactcgagttgggttcagatcttgactgcctagcattatcggagtcagagtaagatggggttg

SEQ ID NO: 12321 - DNA, 110 bp, synthetic construct
  source 1..110: mol_type = other DNA
gcatcacagtccctctccccaacagtgatccgggtcctagaagggtgggtgggggctctgttgcccctcctggcatcttgcatcccttgcatggagctgcccctgccctc

SEQ ID NO: 12322 - DNA, 110 bp, synthetic construct
  source 1..110: mol_type = other DNA
ctctgttgcccctcctggcatcttgcatcccttgcatggagctgcccctgccctctcacacctttgctcagatttcaactttgctggcacttctgttttccattagggtg

SEQ ID NO: 12323 - DNA, 110 bp, synthetic construct
  source 1..110: mol_type = other DNA
gatgtctcccatccccatggtgctgagctatgatgtttggccttgatggggagcgctggaggctccacctgctttgtgtcagggtggtcccggtcctgcgtctcatttag

SEQ ID NO: 12324 - DNA, 110 bp, synthetic construct
  source 1..110: mol_type = other DNA
agccctgtaagacggaatgtgcacttacgcagccccgttgtggtggctgatggacacgcctaggcttccggaccctgtgccccatagctgggttttggtcccttctccta

SEQ ID NO: 12325 - DNA, 110 bp, synthetic construct
  source 1..110: mol_type = other DNA
acgcctaggcttccggaccctgtgccccatagctgggttttggtcccttctcctatccctgtttgccatcagcggttcccccagagccacccctccatccccgcagatac

SEQ ID NO: 12326 - DNA, 110 bp, synthetic construct
  source 1..110: mol_type = other DNA
caaggaaagggatccgggaatgccagttaggggagggcatggtatgcattgagagccaaggaaagactcaccaacggggacatttaagctaagacctgaaggaggtgagg

SEQ ID NO: 12327 - DNA, 110 bp, synthetic construct
  source 1..110: mol_type = other DNA
aattagcagttagtgactgggccacttagtcataaaaatttgccttttacatgctgtctaattatcatttttccccaaattttgcattgtaggactaccgttggaagatt

SEQ ID NO: 12328 - DNA, 110 bp, synthetic construct
  source 1..110: mol_type = other DNA
gcctttgagcctgaggggtcaagtgtctacatggtcaagtgtccacatgccagcacctgctacctgacttctatttgcacagatgtggggctgagctgcgtggctacctg

SEQ ID NO: 12329 - DNA, 110 bp, synthetic construct
  source 1..110: mol_type = other DNA
cctgctacctgacttctatttgcacagatgtggggctgagctgcgtggctacctggtgtaggtgtgaagttgagggctctgatctctgggctccctctcatcagctcact

SEQ ID NO: 12330 - DNA, 110 bp, synthetic construct
  source 1..110: mol_type = other DNA
ttcttaaaccatactcatagaagcttccagaagtcatcagtttatacccatctctcagcttccggaagtcatcagtttatacccatctgctagaaaccaagctagacgga

SEQ ID NO: 12331 - DNA, 110 bp, synthetic construct
  source 1..110: mol_type = other DNA
ttgtctatacttttcaagaactctgtaaagggaaggcacagattctctttactgaactgcccaggtttaaaacttgagagcagcatctgataagtgttgattaaatatca

SEQ ID NO: 12332 - DNA, 110 bp, synthetic construct
  source 1..110: mol_type = other DNA
actgcccaggtttaaaacttgagagcagcatctgataagtgttgattaaatatcaatagcatggttcatggacatggaaggcagacctgtgtttgccaggggggaggtgg

SEQ ID NO: 12333 - DNA, 110 bp, synthetic construct
  source 1..110: mol_type = other DNA
atgggaactcttcccctgcatcatctttgtttccgccactcattgcctggaagaagcttcccatccccctcccctggatgatttttgctcttcctctaaggcttagttca

SEQ ID NO: 12334 - DNA, 110 bp, synthetic construct
  source 1..110: mol_type = other DNA
cctccccgccatggcaatctcttttctaggtgaacattttttgtcttgaccggaaatttcttcccggtgtgtgacatctgactttcaccttttcttctaaagcttagctc

SEQ ID NO: 12335 - DNA, 110 bp, synthetic construct
  source 1..110: mol_type = other DNA
atttcttcccggtgtgtgacatctgactttcaccttttcttctaaagcttagctctggtgcaggtgagctgaggaaatgtgactccccactacccccgaagccaccgccc

SEQ ID NO: 12336 - DNA, 110 bp, synthetic construct
  source 1..110: mol_type = other DNA
tcagttgtagaatttagggctcttgaaatgtgccagaggacttgtccgagccctcagtttttcctttgggaggctcttaaggtgtcaggataagagggctaaatctgacc

SEQ ID NO: 12337 - DNA, 110 bp, synthetic construct
  source 1..110: mol_type = other DNA
agtttttcctttgggaggctcttaaggtgtcaggataagagggctaaatctgaccagactgaagatgcaagaaggcctataccctgtagcaccctcgcccacccctaaac

SEQ ID NO: 12338 - DNA, 110 bp, synthetic construct; identical to SEQ ID NO: 12336
  source 1..110: mol_type = other DNA

SEQ ID NO: 12339 - DNA, 110 bp, synthetic construct; identical to SEQ ID NO: 12337
  source 1..110: mol_type = other DNA

SEQ ID NO: 12340 - DNA, 110 bp, synthetic construct
  source 1..110: mol_type = other DNA
actcagtgcttgtaggcattttgtctcctctaggttcaagtacaggaagactcaggcgactcggaagtggagaatgaagcaaaagataattttccacctcaaaagaagcc

SEQ ID NO: 12341 - DNA, 110 bp, synthetic construct
  source 1..110: mol_type = other DNA
gcgactcggaagtggagaatgaagcaaaagataattttccacctcaaaagaagccagtttggctggatgaagaagatgaagatgaggagatgtaggttgcctaatttttc

SEQ ID NO: 12342 - DNA, 110 bp, synthetic construct; identical to SEQ ID NO: 12340
  source 1..110: mol_type = other DNA

SEQ ID NO: 12343 - DNA, 110 bp, synthetic construct; identical to SEQ ID NO: 12341
  source 1..110: mol_type = other DNA

SEQ ID NO: 12344 - DNA, 110 bp, synthetic construct
  source 1..110: mol_type = other DNA
cttcactgggtgggatctgtagttaagttgtacctttcttctgtaaatgcagtagtgtgttttgttttgtgacttcctatctggtctagaagtcagtagaagaaagaaac

SEQ ID NO: 12345 - DNA, 110 bp, synthetic construct
  source 1..110: mol_type = other DNA
tgtgttttgttttgtgacttcctatctggtctagaagtcagtagaagaaagaaacatttgaatggtggcaatgtataaagaactgtatattggagaatgggaaatagtta

SEQ ID NO: 12346 - DNA, 110 bp, synthetic construct
  source 1..110: mol_type = other DNA
tgcgcccctgtgtggatgccttcacagggcgatagcatcagcatgatgaatcagctgtggcttcattagcttgtccctgatatttaatggtagctgatgcctgccttcca

SEQ ID NO: 12347 - DNA, 110 bp, synthetic construct
  source 1..110: mol_type = other DNA
aactcttacattaacgacctactccttgaaccttaatttgtattcatttcccaaggctgctgtaaaaaagcacctcaaactgggtggcttgaaacagctaatacagagtt

SEQ ID NO: 12348 - DNA, 110 bp, synthetic construct
  source 1..110: mol_type = other DNA
gctgctgtaaaaaagcacctcaaactgggtggcttgaaacagctaatacagagttccagtcgtgacttggtggtaaccaacccaactagtacccatgagcatatgggttc

SEQ ID NO: 12349 - DNA, 110 bp, synthetic construct
  source 1..110: mol_type = other DNA
ggcacctgtacaaacttctcttcaagcaacaaaatattcagagacaccactagagatgaaaaataactgtgtgcatgggtagctggagcaaatcattgacaatgaaatac

SEQ ID NO: 12350 - DNA, 110 bp, synthetic construct
  source 1..110: mol_type = other DNA
atgaaaaataactgtgtgcatgggtagctggagcaaatcattgacaatgaaatacaaaaagactaaaaatccaactgccacttctgaagagacaggagcaaaaaaagctg

SEQ ID NO: 12351 - DNA, 110 bp, synthetic construct
  source 1..110: mol_type = other DNA
ggatatgcggagatgaataaggcatgcgttgtttatgaactgtaagtactcacagtctgaggctgaaggaggagatagactaccgataatgccttcccaatagagctgct

SEQ ID NO: 12352 - DNA, 110 bp, synthetic construct
  source 1..110: mol_type = other DNA
tctgaggctgaaggaggagatagactaccgataatgccttcccaatagagctgctgtggggactgaaggagatagtgcagcacatagcacagggctggacacattagaaa

SEQ ID NO: 12353 - DNA, 110 bp, synthetic construct
  source 1..110: mol_type = other DNA
aggctacctttatgtaactcaaagaattgttggggggatagggtcaagttggcagaggagtaagacatgaagctcaccttttcccacaaacacaccaaaaaaaccctatc

SEQ ID NO: 12354 - DNA, 110 bp, synthetic construct
  source 1..110: mol_type = other DNA
aaagtctccttaggaatatcttccaaaagtcagaaggaagttatagaactcctttgagatcaacattacaatgtgggggatgggtgcaggtaaactatcaaagaaccagg

SEQ ID NO: 12355 - DNA, 110 bp, synthetic construct
  source 1..110: mol_type = other DNA
gagatcaacattacaatgtgggggatgggtgcaggtaaactatcaaagaaccaggcctgcataatatgaggttcagaaatttctctagataaaagcaagcaaaggaggcc

SEQ ID NO: 12356 - DNA, 110 bp, synthetic construct
  source 1..110: mol_type = other DNA
aggtgttctcctcttcatttttgctggggacttgcatgtggcttgccatggttgcagatccagagctataattctttgtgagcctgaataaacacatttttgttggaaca

SEQ ID NO: 12357 - DNA, 110 bp, synthetic construct
  source 1..110: mol_type = other DNA
ggtaaaaggactttctgttgccatagtttcagaggcacatatgtggtcagctgtctagagctagatttattttcagacataagatattactgacagcgagctctgtgact

SEQ ID NO: 12358 - DNA, 110 bp, synthetic construct
  source 1..110: mol_type = other DNA
ggggaactccacacacatttttttttattcatttgcccatcaatgagcactgagggtgcttccatatcttagatattgtaaataaagcttcaattaacagtgaggtgcat

SEQ ID NO: 12359 - DNA, 110 bp, synthetic construct
  source 1..110: mol_type = other DNA
ggaattaaggttgccaatcagctgaccttagatggggagattagcctggagcaccccactggtgtaatcacaagtgtccctatgagggaaagaggacaggctggtgaaaa

SEQ ID NO: 12360 - DNA, 110 bp, synthetic construct
  source 1..110: mol_type = other DNA
ccgcttggactaaaaacagaaaaagcttccccaaagcagggtgggccctgactaggctcatgtcacaggatattgagatgctgatgtttcttaagcaacaagtggagtgg

SEQ ID NO: 12361 - DNA, 110 bp, synthetic construct
  source 1..110: mol_type = other DNA
acaccaagtttagctattcattaaagagataccccaagggcttctgctagcttagtcgaaatttccatgtgaaagagctaaacatggattactggaaattattttatagt

SEQ ID NO: 12362 - DNA, 110 bp, synthetic construct
  source 1..110: mol_type = other DNA
ttctttcccgcctatccaccagaagccagcccaaccatattgtgtttatgatatttggttaagcccaatattatgactctgtttgagagtcatttgccaaggtaaaggtt

SEQ ID NO: 12363 - DNA, 110 bp, synthetic construct
  source 1..110: mol_type = other DNA
tggttaagcccaatattatgactctgtttgagagtcatttgccaaggtaaaggttctttccaatagaacttggtcagccagaggggaagttctttgtcgtttgtacatcc

SEQ ID NO: 12364 - DNA, 110 bp, synthetic construct
  source 1..110: mol_type = other DNA
tgtgtcagggtgtttttagttgtcaataataattggggaacatctattgacatttactgccaggggccgggggtgctaaaaggactgtacttctgggcgatgtcaaatgg

SEQ ID NO: 12365 - DNA, 110 bp, synthetic construct
  source 1..110: mol_type = other DNA
actgccaggggccgggggtgctaaaaggactgtacttctgggcgatgtcaaatggtttcttagaaatgccaataatacctccattaacaaattcagtctgggactctgct

SEQ ID NO: 12366 - DNA, 110 bp, synthetic construct
  source 1..110: mol_type = other DNA
gaccaggaaacagagctgaatagagaagttgaagctgcaggggatacctggtttgcctctggctgccacgcagttctcctttttgtttgattttaatttactacaaaatg

SEQ ID NO: 12367 - DNA, 110 bp, synthetic construct
  source 1..110: mol_type = other DNA
tttttggaagtcaggcatggctggctggcttgtgggcttgtaggcaggttcaaggatatgaatcattgcctgggacctttcagacagctttttaaggacagggccactct

SEQ ID NO: 12368 - DNA, 110 bp, synthetic construct
  source 1..110: mol_type = other DNA
agggctgagggaagcaggagaagacattgctgaacatgaggaaagtacaggcaagacatggtggagaaaaatgatgtgaaaggagctggaaagatgatgctcaaagtgag

SEQ ID NO: 12369 - DNA, 110 bp, synthetic construct
  source 1..110: mol_type = other DNA
acatggtggagaaaaatgatgtgaaaggagctggaaagatgatgctcaaagtgaggcaggcaccagattccagcaggacttggaagcttccattttataggaggccaaag

SEQ ID NO: 12370 - DNA, 110 bp, synthetic construct
  source 1..110: mol_type = other DNA
tagaatcatccttaccttcttcatttctcttacatcccaccatccacttcccagaaaataatgccagctccaccttcaaaatatataatgaatctaaccacttctgatta

SEQ ID NO: 12371 - DNA, 110 bp, synthetic construct
  source 1..110: mol_type = other DNA
aaataatgccagctccaccttcaaaatatataatgaatctaaccacttctgattacctagttctcctccagaacttgtaaaagttggaaaatgtcactcttcgttcataa

SEQ ID NO: 12372 - DNA, 110 bp, synthetic construct
  source 1..110: mol_type = other DNA
tcttattgtatatgcttagttccattcactggaaggtcttacccagggagtaaaatgaaaatgaatgggaatgaggggacaaggaagtgaaatattgagtgaacatttat

SEQ ID NO: 12373 - DNA, 110 bp, synthetic construct
  source 1..110: mol_type = other DNA
tgaaaatgaatgggaatgaggggacaaggaagtgaaatattgagtgaacatttataataccataagtaatggcacatatatcctggttagatatatggcatatatatcct

SEQ ID NO: 12374 - DNA, 110 bp, synthetic construct
  source 1..110: mol_type = other DNA
ctctgatcaatggctttcccaaggacaatctctctggtgaatgcttctcatggagagcgtatgtattcctagaaagatgattcataaacaggaaatacagggagactaca

SEQ ID NO: 12375 - DNA, 110 bp, synthetic construct
  source 1..110: mol_type = other DNA
gcgggaaacaatgaaccaattcctataaagagctaaggaaatacaatttgaagctggagtcctatcattaaagtatgaagcaggaggtaaatgctattcttagatatata

SEQ ID NO: 12376 - DNA, 110 bp, synthetic construct
  source 1..110: mol_type = other DNA
aggaaatacaatttgaagctggagtcctatcattaaagtatgaagcaggaggtaaatgctattcttagatatataagaactcaaattttacaatccacatagcattttct

SEQ ID NO: 12377 - DNA, 110 bp, synthetic construct
  source 1..110: mol_type = other DNA
tatatttggttctagccacctgcttagtcaattgaggaataactgagaaacactctttgctcagctgtgtccccctttaactccactcctgaagaggtggcaaagtttat

SEQ ID NO: 12378 - DNA, 110 bp, synthetic construct
  source 1..110: mol_type = other DNA
gggaggaggagccccaggagcatttaggtttgaaagccaaggcttgagtgcaggagctccataggactgggataaaaaggctccactcttggagggtgcatacaaagttt

SEQ ID NO: 12379 - DNA, 110 bp, synthetic construct
  source 1..110: mol_type = other DNA
gctccataggactgggataaaaaggctccactcttggagggtgcatacaaagtttcatgtgcaccagggcccaacaaaaagcaatgactccactaggcctgggtcttgga

SEQ ID NO: 12380 - DNA, 110 bp, synthetic construct
  source 1..110: mol_type = other DNA
tccagaaggcactttttactgctggctggtcagtccctaatggcaagtgctaacaaggcagccctggctcagaggagccctcggcttggatcttgaagcagatacactgt

SEQ ID NO: 12381 - DNA, 110 bp, synthetic construct
  source 1..110: mol_type = other DNA
aggcagccctggctcagaggagccctcggcttggatcttgaagcagatacactgtctccatgcctgccacatgcgcccaagtccccactggttccgcgatcacctgattt

SEQ ID NO: 12382 - DNA, 110 bp, synthetic construct
  source 1..110: mol_type = other DNA
ctgatctcttaggggatgggcacaaccactggcagttcttctggtgcaggttcaactcaactagctcagaggccactggcaggaacctgaaagttgtgttatttccccag

SEQ ID NO: 12383 - DNA, 110 bp, synthetic construct
  source 1..110: mol_type = other DNA
agaggcagtacagaatttgacaagttccagaaagctccttctgttctttaatcgtccactttcagaactcagtgcaacgtccttgattcaaggtctactctcttctaaat

SEQ ID NO: 12384 - DNA, 110 bp, synthetic construct
  source 1..110: mol_type = other DNA
ccatttgtgtaaataaagtttggaaaagttctgccacagaatacttccagctgtcataaagaaactaggtaccatatgctggcaataagtcgagcctgatagaagcccat

SEQ ID NO: 12385 - DNA, 110 bp, synthetic construct
  source 1..110: mol_type = other DNA
accttcccatgggtccttgccactgccagggcacagcaagtaggcactagctactagtcctgtccattgactctaactcactggaaacaggcacagaaccatagaaataa

SEQ ID NO: 12386 - DNA, 110 bp, synthetic construct
  source 1..110: mol_type = other DNA
agtcctgtccattgactctaactcactggaaacaggcacagaaccatagaaataaaatgtaagctctcacataatgcccaggggtgctcaataatataaacagccctcca

SEQ ID NO: 12387 - DNA, 110 bp, synthetic construct
  source 1..110: mol_type = other DNA
aagacaggaccaagggggtggtttagactatggcatttattgaggcttctgtaagaaggtcattgcagggcatgtttagaatgtattagtttgagaggcatatcaagatg

SEQ ID NO: 12388 - DNA, 110 bp, synthetic construct
  source 1..110: mol_type = other DNA
tctagcaagtagttgggagattaccagttataggggagattgaagtcagattagctcattagttactagaggaaaaaactgagggtatataactcaccacctctttgata

SEQ ID NO: 12389 - DNA, 110 bp, synthetic construct
  source 1..110: mol_type = other DNA
tctttttcaaaaaaggttttgtccagatatacgcccacgtgtaggattgatgtgtaatctggtagttctatatttaattttctgtgatacctccgtattgttttctttag

SEQ ID NO: 12390 - DNA, 110 bp, synthetic construct; identical to SEQ ID NO: 12389
  source 1..110: mol_type = other DNA

SEQ ID NO: 12391 - DNA, 110 bp, synthetic construct
  source 1..110: mol_type = other DNA
acacttgtgaaaggttcaagcaggcaggcacagaaggtcttccatgaggggatctggtaggctacagttttatcatccaaggcagtgggggttgcttggaaaagcctgcc

SEQ ID NO: 12392 - DNA, 110 bp, synthetic construct; identical to SEQ ID NO: 12391
  source 1..110: mol_type = other DNA

SEQ ID NO: 12393 - DNA, 110 bp, synthetic construct
  source 1..110: mol_type = other DNA
caaataaactcttacactctttaatacacctcagtttatcttttagaagctctactgttgagatggaacaaaagacccccaagagcaaaaagcaattagatataggtcct

SEQ ID NO: 12394 - DNA, 110 bp, synthetic construct
  source 1..110: mol_type = other DNA
aattgttactcataaaaccacaagggattgggaggtgtgagctaggaaaaatgacaaagaccagatatatatgagagatatattttggtcatctgaatgatctggcacat

SEQ ID NO: 12395 - DNA, 110 bp, synthetic construct
  source 1..110: mol_type = other DNA
gcctgttcactgggctcttgacagtggaaagaatctgcaggatggtggtggagtctgctcccagttgcaatgccctgggtagtgacagtgatcttcaaggaggtcacaag

SEQ ID NO: 12396 - DNA, 110 bp, synthetic construct; identical to SEQ ID NO: 12395
  source 1..110: mol_type = other DNA

SEQ ID NO: 12397 - DNA, 110 bp, synthetic construct
  source 1..110: mol_type = other DNA
aacagcttagcttttcaagcagcatagtttgacttgataattttcctaagaaaataagtctttaccttgctagggagtatcattgagctttgacaacataagtcagtgga

SEQ ID NO: 12398 - DNA, 110 bp, synthetic construct
  source 1..110: mol_type = other DNA
gaatctgttaccctaactgttgaatctgagctggccttgtgataaattgaccactagaatgcatcagaagtgtatcatattagttttgagcctgcatctcaagattcttt

SEQ ID NO: 12399 - DNA, 110 bp, synthetic construct
  source 1..110: mol_type = other DNA
tacatttcaaatttgatttttaagttatattaaagaataaacagtggttggtcctgtgaatccaaggatgatgttctaacaaagaacaaaaagtgcagcaacaaggatta

SEQ ID NO: 12400 - DNA, 110 bp, synthetic construct
  source 1..110: mol_type = other DNA
tagagtccagggtgatcacatttaagggtttaagctgaggaaatctggttttcaaggttagatatcattgtttgggggtgttggagggaagggtgttttctgccactaag

SEQ ID NO: 12401 - DNA, 110 bp, synthetic construct
  source 1..110: mol_type = other DNA
ccccagacacataaccttagcctattcttgagaaaaactaggaagatctcaatcgaaatatgttctgaaaaatacctgaccagtacttttcccaagtgtcaagacaatga

SEQ ID NO: 12402 - DNA, 110 bp, synthetic construct
  source 1..110: mol_type = other DNA
tctataggctccagttgtttggaatgttgccctaagatggttttcaattgtcaacacattcaggtatcacaccagctacaaatctttcttgtccaaggtaaaaatcttgc

SEQ ID NO: 12403 - DNA, 110 bp, synthetic construct
  source 1..110: mol_type = other DNA
ataaaaatccaattgaatgtagttgcaaaacacaatgtgaaacaagatgtagatccagagccttttccagctcctaaatcacatgacttgagaaaatttaaaaatcccta

SEQ ID NO: 12404 - DNA, 110 bp, synthetic construct
  source 1..110: mol_type = other DNA
cagagccttttccagctcctaaatcacatgacttgagaaaatttaaaaatccctaaggaccagtaactgctacatgccccttatttaacctctttataaattaaattttt

SEQ ID NO: 12405 - DNA, 110 bp, synthetic construct
  source 1..110: mol_type = other DNA
tgacttggagattgcaggtcaggactgcacgggagaatggatggttctaaagcttaggttatgaatgtctgtggaactcacacctagctcccaactctgatccctcaact

SEQ ID NO: 12406 - DNA, 110 bp, synthetic construct
  source 1..110: mol_type = other DNA
aggttatgaatgtctgtggaactcacacctagctcccaactctgatccctcaactctcagtaacagagtaatttctctattccagttacttctgaccctggcacttagca

SEQ ID NO: 12407 - DNA, 110 bp, synthetic construct
  source 1..110: mol_type = other DNA
gcaaaagcaacacttgaatccataatacaatatttccaaatctcacataaggaggtctcattgctccccacttacatgtaccagctccattctgggatcctcctcacctc

SEQ ID NO: 12408 - DNA, 110 bp, synthetic construct
  source 1..110: mol_type = other DNA
agatgtgttctgccctttgtgcagaagtcccttttggtagatcttttgcttcagtggtagaaagtagggtcatcacagaatgcccagcaaagtgttttccctcttttaca

SEQ ID NO: 12409 - DNA, 110 bp, synthetic construct
  source 1..110: mol_type = other DNA
ttaatttttcttaagtccctcttttactatattggctatgtttggtaataacattttcctgcgtcaaaataaatgaccagagagttccccttgtggctcagcagaaatga

SEQ ID NO: 12410 - DNA, 110 bp, synthetic construct; identical to SEQ ID NO: 12409
  source 1..110: mol_type = other DNA

SEQ ID NO: 12411 - DNA, 110 bp, synthetic construct; identical to SEQ ID NO: 12409
  source 1..110: mol_type = other DNA

SEQ ID NO: 12412 - DNA, 110 bp, synthetic construct; identical to SEQ ID NO: 12409
  source 1..110: mol_type = other DNA

SEQ ID NO: 12413 - DNA, 110 bp, synthetic construct
  source 1..110: mol_type = other DNA
aacttacatatctgttcattaaagaaacatgaataatcaactactaattccaggcatagttctaagcagtagacaaaatcttgccaggccacactgtgagagctgcctaa

SEQ ID NO: 12414 - DNA, 110 bp, synthetic construct
  source 1..110: mol_type = other DNA
atagttctaagcagtagacaaaatcttgccaggccacactgtgagagctgcctaagaggatggcagtcataaaacaactaattgcagacttgctattttgaatggaatga

SEQ ID NO: 12415 - DNA, 110 bp, synthetic construct
  source 1..110: mol_type = other DNA
cttccatgggataaaaaatttgcccctccttccctctggtaggatcaaatctgtgggattcaactccagagctctgggtaggatcagattgaaattctctcctgctgaag

SEQ ID NO: 12416 - DNA, 110 bp, synthetic construct
  source 1..110: mol_type = other DNA
ctgttcatagccagagaaaatcctcttttcaagaatatcatttaaagctgtttaaaacacatagcttactttgctacataagttaaaattggaagcaaagaattctgaga

SEQ ID NO: 12417 - DNA, 110 bp, synthetic construct; identical to SEQ ID NO: 12416
  source 1..110: mol_type = other DNA

SEQ ID NO: 12418 - DNA, 110 bp, synthetic construct
  source 1..110: mol_type = other DNA
ggtttgcagtggcccagctagccactccagccctcagggggtgttgcactccaatggaatagctgctcagcatccctagtccgctggaggagcccctgcagcccagaaaa

SEQ ID NO: 12419 - DNA, 110 bp, synthetic construct; identical to SEQ ID NO: 12418
  source 1..110: mol_type = other DNA

SEQ ID NO: 12420 - DNA, 110 bp, synthetic construct
  source 1..110: mol_type = other DNA
aaatttgaaagaagttctcctgtgggtaaaatgctgtcaaataactttgtgcgctttgtgaaaggaagaatcaatcaatgtgacaaacttcatttttgtcttattttaag

SEQ ID NO: 12421 - DNA, 110 bp, synthetic construct
  source 1..110: mol_type = other DNA
tctcctgtgggtaaaatgctgtcaaataactttgtgcgctttgtgaaaggaagaatcaatcaatgtgacaaacttcatttttgtcttattttaagaaattgccacagctt

SEQ ID NO: 12422 - DNA, 110 bp, synthetic construct
  source 1..110: mol_type = other DNA
actctgttccatgacatggttctgatttctaaaaaggaaatcttataaaaggagaacagatgagccgcagtttccacagctgtagatggtcttgaggcaatactgaaatt

SEQ ID NO: 12423 - DNA, 110 bp, synthetic construct
  source 1..110: mol_type = other DNA
acagatgagccgcagtttccacagctgtagatggtcttgaggcaatactgaaatttttgcctattttctttcctgcctatgagaggtttcacacacccttggccagctca

SEQ ID NO: 12424 - DNA, 110 bp, synthetic construct
  source 1..110: mol_type = other DNA
ttaaatttgcacttagaagtgatatgtatctcacccacaatattccactggctatggaaagctatgtggccaggcttaactttcaggaagtggagaaaaacaattcaatg

SEQ ID NO: 12425 - DNA, 110 bp, synthetic construct
  source 1..110: mol_type = other DNA
gggctgaggaattgaactggcacctctgcactgacccgagctgctgcaatgggatccttaacccactgtgctgggcaggaactttgagaataattttttaaaaactatct

SEQ ID NO: 12426 - DNA, 110 bp, synthetic construct
  source 1..110: mol_type = other DNA
ttggcgctgagttcttgtcaatagtctccagctgacaagagcaactgattaacgtctgcgtagttttaaactgactcgcaataaaatcttacttctgctagatttagttg

SEQ ID NO: 12427 - DNA, 110 bp, synthetic construct
  source 1..110: mol_type = other DNA
aaacttccaatggatttatttaacgataatgtcaaggcatttggccacacttacatgcctcttagtagctcatcattataagtaattttccagaatttttttcttctcat

SEQ ID NO: 12428 - DNA, 110 bp, synthetic construct
  source 1..110: mol_type = other DNA
aagggcatcataagagggcagagccttcatggcttgggtccctgggtgaccatgtggatggagtagaggccctctacactcccacactgaacatcataacatccattacg

SEQ ID NO: 12429 - DNA, 110 bp, synthetic construct
  source 1..110: mol_type = other DNA
gaattgaaggacaagctcaagcaagctgaatacacatggaggttatttgtcactgttgatgcacaggaatcagtagaaacagcagctgccagcttctggaatgccatcaa

SEQ ID NO: 12430 - DNA, 110 bp, synthetic construct
  source 1..110: mol_type = other DNA
gttgggggagcacgtttaaatattaaaagagagaggagatgaagagtgtgggactcagtgttgccttctagctggagctgaatgtccttgtcacttcccttctctggtta

SEQ ID NO: 12431 - DNA, 110 bp, synthetic construct
  source 1..110: mol_type = other DNA
cagtgttgccttctagctggagctgaatgtccttgtcacttcccttctctggttatcaattttcttcatctaaaaatgtagggtagagattatgtgatttctaaggtcat

SEQ ID NO: 12432 - DNA, 110 bp, synthetic construct
  source 1..110: mol_type = other DNA
tagaggtaagaaaattcattgaattgcttttgcatgaccatacttattaaaatgtagttgctagtgtgtactgagtgttttgagtcgtcttgatctaagcacttagcaag

SEQ ID NO: 12433 - DNA, 110 bp, synthetic construct
  source 1..110: mol_type = other DNA
ttcttccattgccttcgtagtgaaagaagagctatgttagcttcccagacttcactcacacctctgggaaggaatggacgtaacatcccagcaacactggcacttgaatc

SEQ ID NO: 12434 - DNA, 110 bp, synthetic construct
  source 1..110: mol_type = other DNA
agaaactgaggaaccctgttgagaatgatagcttgtctataatggccttaaagttgcattgcactgagcccctccattcagttcaaatatggactgactctattctgaaa

SEQ ID NO: 12435 - DNA, 110 bp, synthetic construct
  source 1..110: mol_type = other DNA
ggaaaggaggggattggggcgtggagaaggtgggagaatatatccatagtgttttattgtcctacaaattattgtgtggtacataaagctttttcacaattagtgacatg

SEQ ID NO: 12436 - DNA, 110 bp, synthetic construct
  source 1..110: mol_type = other DNA
attgtcctacaaattattgtgtggtacataaagctttttcacaattagtgacatgaagcttgaaaataaaatagaactgggacaagtagcatacctgcataaaagttttg

SEQ ID NO: 12437 - DNA, 110 bp, synthetic construct
  source 1..110: mol_type = other DNA
ataaggacagcagtaaggaaagaggctttcctctgagggagagctgaagtaagtcttaaccaaggcagcagcattgaggatagagagaggggatatttctgagaaacaaa

SEQ ID NO: 12438 - DNA, 110 bp, synthetic construct
  source 1..110: mol_type = other DNA
agctgcttaaaaataaatgttggcctatctcagtggccaaaaaccatggagagtaggatgaaatcattttaagacagaaataacaaactttgagaaagacattcggagaa

SEQ ID NO: 12439 - DNA, 110 bp, synthetic construct
  source 1..110: mol_type = other DNA
gatccgaggaggatcatggtggaaaatgaagtgtggccagaccctgagtgtccctgcacagcattccaaggcctctggactttatcctgatcaggacagtggcataagca

SEQ ID NO: 12440 - DNA, 110 bp, synthetic construct
  source 1..110: mol_type = other DNA
gcacagcattccaaggcctctggactttatcctgatcaggacagtggcataagcaaggtccttattagaaagattaccctgtcaactatatgaaagatggaggagttgga

SEQ ID NO: 12441 - DNA, 110 bp, synthetic construct
  source 1..110: mol_type = other DNA
taggaactgaggctcccaggtcacaacttgccagtgctcacgggccagtcagtctcaggctggctggttccatgctgactcttagcttgcagatgaggttcagaaaatac

SEQ ID NO: 12442 - DNA, 110 bp, synthetic construct
  source 1..110: mol_type = other DNA
cagtcagtctcaggctggctggttccatgctgactcttagcttgcagatgaggttcagaaaatactcatgattttaagagaatcaaatctttttttttttaaattttatt

SEQ ID NO: 12443 - DNA, 110 bp, synthetic construct; identical to SEQ ID NO: 12441
  source 1..110: mol_type = other DNA

SEQ ID NO: 12444 - DNA, 110 bp, synthetic construct; identical to SEQ ID NO: 12442
  source 1..110: mol_type = other DNA

SEQ ID NO: 12445 - DNA, 110 bp, synthetic construct
  source 1..110: mol_type = other DNA
ttgccctgaccaactaaactgtatgtatttttggtgctaggtaattattaaagccattataaatctcctatctcaaagaatatatactgttacattctcctaagatattc

SEQ ID NO: 12446 - DNA, 110 bp, synthetic construct
  source 1..110: mol_type = other DNA
attataaatctcctatctcaaagaatatatactgttacattctcctaagatattctctcggcggggggagggggaaacataagtaaacctgtaaattctaaaaccttttg

SEQ ID NO: 12447 - DNA, 110 bp, synthetic construct
  source 1..110: mol_type = other DNA
atacaaagtaggtcaaatatttgtcaaatagatgagggatcgaaaggtacatgccattgcttccgtgttaaccgtcaccgcacatccatctgtgctgccccagctgcaac

SEQ ID NO: 12448 - DNA, 110 bp, synthetic construct
  source 1..110: mol_type = other DNA
attgcttccgtgttaaccgtcaccgcacatccatctgtgctgccccagctgcaacacgagcgtgcacagagatgaacatggcattctgattgagataacctttcagtcac

SEQ ID NO: 12449 - DNA, 110 bp, synthetic construct
  source 1..110: mol_type = other DNA
tttctcccacatcttgtgttattgttagctaaggtaatctaacaaagacactgtcttctcttagatttccctgagggtgaggataggaaagtctaatcggaaacttatat

SEQ ID NO: 12450 - DNA, 110 bp, synthetic construct
  source 1..110: mol_type = other DNA
ttctcttagatttccctgagggtgaggataggaaagtctaatcggaaacttatatctatcaatcctctatctatctatctatctatctatctatctatctatctatctac

SEQ ID NO: 12451 - DNA, 110 bp, synthetic construct
  source 1..110: mol_type = other DNA
cagccactgatggaactttaatctttctgttttctggatctggtattagctggggccaagtatcagcttatttccttgatagacaaggagatgatgcagtagtagatggg

SEQ ID NO: 12452 - DNA, 110 bp, synthetic construct
  source 1..110: mol_type = other DNA
ccaagtatcagcttatttccttgatagacaaggagatgatgcagtagtagatggggtgaggggtgacctggtgagggaggaggtggggacagagaggaggcagggcccca

SEQ ID NO: 12453 - DNA, 110 bp, synthetic construct; identical to SEQ ID NO: 12451
  source 1..110: mol_type = other DNA

SEQ ID NO: 12454 - DNA, 110 bp, synthetic construct; identical to SEQ ID NO: 12452
  source 1..110: mol_type = other DNA

SEQ ID NO: 12455 - DNA, 110 bp, synthetic construct
  source 1..110: mol_type = other DNA
ccaataaaactggttgctgtcttggatgagtttctccttccttaaggttccaacatgctgcatacgtagcattctgaatcatttttctatcctgttctcctgcgtggaag

SEQ ID NO: 12456 - DNA, 110 bp, synthetic construct
  source 1..110: mol_type = other DNA
aatgtgctgaatgggaacaactccttttctctcagatctatacacttggtgagcatccctagaggaggtgccagctctgtccacatgcagtccctttggttcccattcag

SEQ ID NO: 12457 - DNA, 110 bp, synthetic construct
  source 1..110: mol_type = other DNA
aactcaaaactacaatgagttacgacctcacaccagttagagtggccaacattcacaagtcaacagaggtggagcaagacggcagaggagtatggggtcgtgcacatctt

SEQ ID NO: 12458 - DNA, 110 bp, synthetic construct
  source 1..110: mol_type = other DNA
tagaaaggatgcctgaaagagcaactgacgtgtaccactgtggggatgacagccatgcagtacaaatggtggactaggaaatcgaggcatctaggtcagtgataattccc

SEQ ID NO: 12459 - DNA, 110 bp, synthetic construct
  source 1..110: mol_type = other DNA
tgcagtacaaatggtggactaggaaatcgaggcatctaggtcagtgataattccctccacaaataaacctcttactggtttactggtttaagtcacatattaattgggtt

SEQ ID NO: 12460 - DNA, 110 bp, synthetic construct
  source 1..110: mol_type = other DNA
tgtgctttcagggcctatgtggagcatttgcagctgtggtcacaggagggctattcatactttcctgacaagttttatagggtttgatattattgggccatagatgtggg

SEQ ID NO: 12461 - DNA, 110 bp, synthetic construct
  source 1..110: mol_type = other DNA
ttctctagggaataaactgctaccaatctggatcatgtacagctgcccatgactggccaagaagccacagtgagctgaaatcatgatctcgatgctgtaacaaagttgct

SEQ ID NO: 12462 - DNA, 110 bp, synthetic construct
  source 1..110: mol_type = other DNA
gccaagaagccacagtgagctgaaatcatgatctcgatgctgtaacaaagttgctcttaaaggttttgaaaggaatgaaataagtatagaaacacttgaaagaatttgta

SEQ ID NO: 12463 - DNA, 110 bp, synthetic construct; identical to SEQ ID NO: 12461
  source 1..110: mol_type = other DNA

SEQ ID NO: 12464 - DNA, 110 bp, synthetic construct; identical to SEQ ID NO: 12462
  source 1..110: mol_type = other DNA

SEQ ID NO: 12465 - DNA, 110 bp, synthetic construct
  source 1..110: mol_type = other DNA
gcccttgaagtgattggggctgcaagtggtgcttgttcatggacccctagtggtagtgggtcatgcccacctctggaaacaaagataactgtggtggtttgcctcagcca

SEQ ID NO: 12466 - DNA, 110 bp, synthetic construct; identical to SEQ ID NO: 12465
  source 1..110: mol_type = other DNA

SEQ ID NO: 12467 - DNA, 110 bp, synthetic construct
  source 1..110: mol_type = other DNA
gataagcaaacaaataaccagtatatccatgcctctcatttaaaattcccaaggaatctatggagttaccattgtttctctcattgtgcagaaagaaaattttaggctta

SEQ ID NO: 12468 - DNA, 110 bp, synthetic construct
  source 1..110: mol_type = other DNA
atctatggagttaccattgtttctctcattgtgcagaaagaaaattttaggcttaaaaatgttatttcccaagattaccctagtgctagaaattgaaagaattggatttg

SEQ ID NO: 12469 - DNA, 110 bp, synthetic construct
  source 1..110: mol_type = other DNA
aagctgctggcaatagtaccaatgcccctgagagggctgccggtgcctgctctctaatggagctgtgggctgcccaactggcgaaagcccagccagtggccctgtgaagg

SEQ ID NO: 12470 - DNA, 110 bp, synthetic construct
  source 1..110: mol_type = other DNA
aatggagctgtgggctgcccaactggcgaaagcccagccagtggccctgtgaaggctcacatcagtggcagaatttccacaccaaaggagccagggaaggcccattaacc

SEQ ID NO: 12471 - DNA, 110 bp, synthetic construct
  source 1..110: mol_type = other DNA
tcctagggagacaaaatcacccctgtgcctaagggtgtggtctttgttcacataatcaaagctggtgcactgaaaccatattcacattttaattcatggaatggaagaag

SEQ ID NO: 12472 - DNA, 110 bp, synthetic construct
  source 1..110: mol_type = other DNA
tcaaagctggtgcactgaaaccatattcacattttaattcatggaatggaagaaggagaaaaatagaaggcctacaacctccttttaagagggtgatagagatgtacata

SEQ ID NO: 12473 - DNA, 110 bp, synthetic construct
  source 1..110: mol_type = other DNA
ttttgcagtgtagtatgaagtcaaggaccagctctgtcctttaaaaaaaaaatattgctttggctgccctaaatcctgctggtgatgtctctaatatacaatatatacac

SEQ ID NO: 12474 - DNA, 110 bp, synthetic construct; identical to SEQ ID NO: 12473
  source 1..110: mol_type = other DNA

SEQ ID NO: 12475 - DNA, 110 bp, synthetic construct
  source 1..110: mol_type = other DNA
atatccatgcattcaaacattgtccccatgagaattttactgaagacatttttctttgggaggaaaactgagaaacagctttgactcacacacaagacccctaagaaaat

SEQ ID NO: 12476 - DNA, 110 bp, synthetic construct
  source 1..110: mol_type = other DNA
ttgggaggaaaactgagaaacagctttgactcacacacaagacccctaagaaaatacatttttaaagaggaaggccatgaccttgtatttatttatgcaaaaattaagcc

SEQ ID NO: 12477 - DNA, 110 bp, synthetic construct
  source 1..110: mol_type = other DNA
tgaatccatctggaagccagaaggcacagatgcccagaggatgcagctcacagagatgcttccaagggcccagagcaggtggaaaaggtggagggtacatctagagggtc

SEQ ID NO: 12478 - DNA, 110 bp, synthetic construct
  source 1..110: mol_type = other DNA
atgcttccaagggcccagagcaggtggaaaaggtggagggtacatctagagggtcagacagagagggtgcagcacaagcccatccctgactcagaaacatcccttctctt

SEQ ID NO: 12479 - DNA, 110 bp, synthetic construct
  source 1..110: mol_type = other DNA
caaagaaataaggaaagaggtaggagtaattaggcatacggagcaaaccctcactgctcgtggactgacaaactcaagaaagcccagtgtgtatcacatgtgagcttgtg

SEQ ID NO: 12480 - DNA, 110 bp, synthetic construct
  source 1..110: mol_type = other DNA
gctcgtggactgacaaactcaagaaagcccagtgtgtatcacatgtgagcttgtgcatattccagagggcactaggcaagccactgcaagcctacaagaatttatgagag

SEQ ID NO: 12481 - DNA, 110 bp, synthetic construct
  source 1..110: mol_type = other DNA
tattatgggttcaaaattccaggaaactctttgaggacagggactctactgtcttcctcactgtattcagattctaaccgactacagggccaggcaggctctgtgtttgt

SEQ ID NO: 12482 - DNA, 110 bp, synthetic construct
  source 1..110: mol_type = other DNA
cctcactgtattcagattctaaccgactacagggccaggcaggctctgtgtttgtggaactgaatctattcttgaaggggcagcccggggtgttattgactgttaatctt

SEQ ID NO: 12483 - DNA, 110 bp, synthetic construct
  source 1..110: mol_type = other DNA
accttgcccagcatggggcccatgttagagggtgtggccacagccctgtgtgtgggctctattgctgccatcccaccacacagctgtggtttcccttttccagcatggga

SEQ ID NO: 12484 - DNA, 110 bp, synthetic construct
  source 1..110: mol_type = other DNA
ccttgtcagattaattaaccacagagccacgacaggaactaccaggttcaggattctaatgtttcacctgctcttcctcagtaaatgggtatcaaaatatcaacttcatt

SEQ ID NO: 12485 - DNA, 110 bp, synthetic construct
  source 1..110: mol_type = other DNA
ctaatgtttcacctgctcttcctcagtaaatgggtatcaaaatatcaacttcattgatagctggggagtgtccaaaaaatccaaaatacatggtaactaggaaacttcac

SEQ ID NO: 12486 - DNA, 110 bp, synthetic construct
  source 1..110: mol_type = other DNA
gtatgttctaatcaattctcttttgaatcattcagtccctcataaaatgatgtattcagctgaactgtgaggaaaactttgtttttactgacttccttggccgatgcttt

SEQ ID NO: 12487 - DNA, 110 bp, synthetic construct
  source 1..110: mol_type = other DNA
tgtgtctgtgtactgggatcaactaatgtcaccatcacctgccctcatgcaaactaaaattcagctttttctcactttcacttcctcctcctgtaccattgacaaattct

SEQ ID NO: 12488 - DNA, 110 bp, synthetic construct
  source 1..110: mol_type = other DNA
ttttccttttaagcttttttgttaatctattatttgccacaactcttcttcactacctcaggcagctgtgatagtaagtaattgctcatgtttgtttttaacagatgccc

SEQ ID NO: 12489 - DNA, 110 bp, synthetic construct
  source 1..110: mol_type = other DNA
gtaatctaaaatatgacacaagaattccattgtggttcaatgggttaaggatcatgcattgtcactgctgtggatctggttacctcgtggtacaggtttgatccctggcc

SEQ ID NO: 12490 - DNA, 110 bp, synthetic construct; identical to SEQ ID NO: 12489
  source 1..110: mol_type = other DNA

SEQ ID NO: 12491 - DNA, 110 bp, synthetic construct
  source 1..110: mol_type = other DNA
tggagccatagacatggattaggttgctatctgagacaagcaagcatctggaatgaaaaagaagccaggccctcaagaaacatcaaaggaaaaagaaaaggaagaaccag

SEQ ID NO: 12492 - DNA, 110 bp, synthetic construct
  source 1..110: mol_type = other DNA
ttaggatgtgacataccttttaggaggccacattccatccattgcaataaccatagttgtcactgtagcaactgaaaacttctcacaatgcactgatctacatcatcttg

SEQ ID NO: 12493 - DNA, 110 bp, synthetic construct
  source 1..110: mol_type = other DNA
gaaagcatcctcctttagggtgttttgattgcattaaacgcatttaaatcacatgtagagagcagtatgtgggatctgtcttttcattctcacaacctataagatggtca

SEQ ID NO: 12494 - DNA, 110 bp, synthetic construct
  source 1..110: mol_type = other DNA
cacgggcccccataaattatgaaccatggtctttcttttttttttttttttttttttttttttgcaaatgagcctaaggttcgagtagagaaatcatagctcacaaccac

SEQ ID NO: 12495 - DNA, 110 bp, synthetic construct
  source 1..110: mol_type = other DNA
ttttttttgcaaatgagcctaaggttcgagtagagaaatcatagctcacaaccacagaagcagaatttctgtggaagcagaatttccctggttctgagcacatccatacc

SEQ ID NO: 12496 - DNA, 110 bp, synthetic construct
  source 1..110: mol_type = other DNA
tgctcaaagccttccctacccattagccctctgccaaatgccccatcctcagcacacatgcagagggctagacaaggagaatgcccgcagtggaagaggaaccagccagg

SEQ ID NO: 12497 - DNA, 110 bp, synthetic construct
  source 1..110: mol_type = other DNA
acatgcagagggctagacaaggagaatgcccgcagtggaagaggaaccagccaggaaatagtttggacttggtagagaaacaaagtgcccccgccccatcacctggggag

SEQ ID NO: 12498 - DNA, 110 bp, synthetic construct
  source 1..110: mol_type = other DNA
gtaacagaactccagattaaattaatatccacatgcacacagtagctgcaatggggcagttgccaagttatccctgccctcacgagaaagggaagaaagcaaatactagc

SEQ ID NO: 12499 - DNA, 110 bp, synthetic construct
  source 1..110: mol_type = other DNA
gcagttgccaagttatccctgccctcacgagaaagggaagaaagcaaatactagccagggccttcgatctggaacgctgaaatcagatccccatgcggtagcgccatgcg

SEQ ID NO: 12500 - DNA, 110 bp, synthetic construct
  source 1..110: mol_type = other DNA
tgtgctgagacatagactctgccaggtcagcataagcctgtttataagtaattcaatctgaggtggggaggagctgccagtgcacatgcacacatgcacacgtacaccag

SEQ ID NO: 12501 - DNA, 110 bp, synthetic construct
  source 1..110: mol_type = other DNA
atctgaggtggggaggagctgccagtgcacatgcacacatgcacacgtacaccagtgcacgcatgtaccttctgcacaagccagttgtggtggggagacctgatcttcat

SEQ ID NO: 12502 - DNA, 110 bp, synthetic construct
  source 1..110: mol_type = other DNA
gatctagtccttggcccagatcttcatgttctaaataaaccacctctttcaacgggaaaggcattccattcctttgcccggaatgcctagcccaccctgaatgcctccca

SEQ ID NO: 12503 - DNA, 110 bp, synthetic construct
  source 1..110: mol_type = other DNA
gcatattcttatttcactgtggctagtagctacattattgtccagcaaaagtccagaaggatccagcaacggcttttatactgagtgtagtacgggagagactctcagac

SEQ ID NO: 12504 - DNA, 110 bp, synthetic construct
  source 1..110: mol_type = other DNA
accgcctcccgcattcccaggacccactagtcatgctgagttctcaaggcagtcaggagaactttctcagctcatccaaaaggttttgttatttctccttctgggtggca

SEQ ID NO: 12505 - DNA, 110 bp, synthetic construct
  source 1..110: mol_type = other DNA
ggagaactttctcagctcatccaaaaggttttgttatttctccttctgggtggcacagactcactcccaattcgttaggcatttatttgctcacttcccatctttcggga

SEQ ID NO: 12506 - DNA, 110 bp, synthetic construct
  source 1..110: mol_type = other DNA
cctggggagacaccctgcaagtccctggaccacgccctggcttcctcacctgtgaagcagagctgataacagcagtaagacagaagccttttctttgtcttttgggtgtg

SEQ ID NO: 12507 - DNA, 110 bp, synthetic construct
  source 1..110: mol_type = other DNA
cccaaagcccaaggtgctcacagaactctccgtactctggctgggccagaaactcatatcactcagaactgcacagcctctgggatcaactttcggctctccacattcca

SEQ ID NO: 12508 - DNA, 110 bp, synthetic construct
  source 1..110: mol_type = other DNA
tcgttccatatggaagctgctggaggccactagattccacccagctgattgcccttggccgtgctagataatctccatggcccccaagtacataaaatgcagcaatcaaa

SEQ ID NO: 12509 - DNA, 110 bp, synthetic construct
  source 1..110: mol_type = other DNA
cgcctttattacctttcttgttccgcacctattcctcaagattaaggagcatcagagaaggagttgaaaccatgtacaagcctccgtgtccttgttttgaaggaaaaagc

SEQ ID NO: 12510 - DNA, 110 bp, synthetic construct
  source 1..110: mol_type = other DNA
cacctattcctcaagattaaggagcatcagagaaggagttgaaaccatgtacaagcctccgtgtccttgttttgaaggaaaaagcttttcctttagcctcccaggcctcc

SEQ ID NO: 12511 - DNA, 110 bp, synthetic construct
  source 1..110: mol_type = other DNA
attttaaccgtttttaagagtacagttcggtggcattaagtatatgcacattattgtgcgtgctgacgattttcaaacgatatacaaattaacaaagctgtaatctcttt

SEQ ID NO: 12512 - DNA, 110 bp, synthetic construct
  source 1..110: mol_type = other DNA
gtgcgtgctgacgattttcaaacgatatacaaattaacaaagctgtaatctctttcttcgctaaacatcatattagtgctggagtaacaccaacaacaaaaaatgccaaa

SEQ ID NO: 12513 - DNA, 110 bp, synthetic construct
  source 1..110: mol_type = other DNA
cctattctaaggtttcaccaaagcaaccactgtgttaatggactaaaaccttgcaaccctcccaagagaattcaggaagatggatgctcagaattcgaaaagaaccttga

SEQ ID NO: 12514 - DNA, 110 bp, synthetic construct
  source 1..110: mol_type = other DNA
accctcccaagagaattcaggaagatggatgctcagaattcgaaaagaaccttgagaccaggtggaaaaatcagcagtgtattaaaatcttatttctatcttttcaatcc

SEQ ID NO: 12515 - DNA, 110 bp, synthetic construct
  source 1..110: mol_type = other DNA
tgactgaatccaaggtatcactggttctcaaaccttagcatatattagaaccctctggaatgcttgttcaatgccagatggccgagccctataccagagcttctgattcg

SEQ ID NO: 12516 - DNA, 110 bp, synthetic construct
  source 1..110: mol_type = other DNA
tggaatgcttgttcaatgccagatggccgagccctataccagagcttctgattcggtaggtctgggcaggggggctacccaagaatctgtgtttctaactatgtgatact

SEQ ID NO: 12517 - DNA, 110 bp, synthetic construct
  source 1..110: mol_type = other DNA
tgaggaatgactgacagagagcttatctggagaacagaagattaaagcggaactgaggtctatcacatgacaaaaggattgggtttattctatgtgatcctaaaataaag

SEQ ID NO: 12518 - DNA, 110 bp, synthetic construct
  source 1..110: mol_type = other DNA
tcctccctccacttcttctccctttcaaactcgctggggtttctggaaagctcacccttcccctgggtgtggagtccccacctgtaaactccagagtgagtggctgggaa

SEQ ID NO: 12519 - DNA, 110 bp, synthetic construct
  source 1..110: mol_type = other DNA
atttggtcagcagtatggcacgcctgtggttttcagagctcctcctggtgaatcaagagtgatgctggctccagagtctgggatggcaggtcaggctggggaagaggaga

SEQ ID NO: 12520 - DNA, 110 bp, synthetic construct
  source 1..110: mol_type = other DNA
agagtgatgctggctccagagtctgggatggcaggtcaggctggggaagaggagacccagggccctgaccattggaaggaccttcacgtgacctgtccagcttctggctt

SEQ ID NO: 12521 - DNA, 110 bp, synthetic construct
  source 1..110: mol_type = other DNA
tggcagtgactttatggtggcagctgcctgcagcaacacctgtgactcacagatttcacaggagagagactggcaagcatggaagaggccttaccctgatccctcttaca

SEQ ID NO: 12522 - DNA, 110 bp, synthetic construct
  source 1..110: mol_type = other DNA
gacctcttgttttcaggagcaagtccagtctccttggttatgctctacaagactccttgtgatctagcccatgtctccatccgtatctcttgtccagctctctgcacgct

SEQ ID NO: 12523 - DNA, 110 bp, synthetic construct
  source 1..110: mol_type = other DNA
cttgtgatctagcccatgtctccatccgtatctcttgtccagctctctgcacgctttttgtgcctgagacaagcaaggatatttcatgctgttatgactctgcctgccgt

SEQ ID NO: 12524 - DNA, 110 bp, synthetic construct
  source 1..110: mol_type = other DNA
tatctgtttgggggaggggttgctcccaagggcacaggactcttgctccgggtgggtatcaggtgtctctcagagtggaaagtattgcataccagtgtgtttcctgtacc

SEQ ID NO: 12525 - DNA, 110 bp, synthetic construct
  source 1..110: mol_type = other DNA
gtatcaggtgtctctcagagtggaaagtattgcataccagtgtgtttcctgtaccccctccacctccaagccaaggatgtttcggatccacctcctggtgggttttgggc

SEQ ID NO: 12526 - DNA, 110 bp, synthetic construct
  source 1..110: mol_type = other DNA
tacctcttggagcttcactttcctcatctgtaaaatggggaagatttctctctaaggattgtgaggttagatgaggtgatgcatttaaagcccttcaaccaacagtgctg

SEQ ID NO: 12527 - DNA, 110 bp, synthetic construct
  source 1..110: mol_type = other DNA
ggattgtgaggttagatgaggtgatgcatttaaagcccttcaaccaacagtgctgggcacatgataccccaccccaggcagcacgtgtggcctgtggccttgctgtcaca

SEQ ID NO: 12528 - DNA, 110 bp, synthetic construct
  source 1..110: mol_type = other DNA
agcgctgcccggctggaagggtgccccggtgggcccggcggccagagggaacagctttctgcaggctcacctcaaggcagccagactgagcttggcttctcccaggaagc

SEQ ID NO: 12529 - DNA, 110 bp, synthetic construct
  source 1..110: mol_type = other DNA
tttctgcaggctcacctcaaggcagccagactgagcttggcttctcccaggaagcttgtacagcatctctatcccaaaaagcagttgaccgaagtttcaggtctccatca

SEQ ID NO: 12530 - DNA, 110 bp, synthetic construct
  source 1..110: mol_type = other DNA
cacgcttaccggcgaggataacccatcattgtttggtggtttatccagggctgtattcacgctgaatcttctatttatccgggtggcccatccagggactgatgaaaagt

SEQ ID NO: 12531 - DNA, 110 bp, synthetic construct
  source 1..110: mol_type = other DNA
tcctgcccagtccctagtgcctggagatggtcagggatctagtggcagctcagacaggatttcactcatgtccagctaacgcgcagtgagtatccccaaggggccgcatc

SEQ ID NO: 12532 - DNA, 110 bp, synthetic construct
  source 1..110: mol_type = other DNA
aggatttcactcatgtccagctaacgcgcagtgagtatccccaaggggccgcatccgtcatcggaaacacatcctttctcttggaaaggcagctggttcttccccttaga

SEQ ID NO: 12533 - DNA, 110 bp, synthetic construct
  source 1..110: mol_type = other DNA
tctcagaagtgagcacaaacccccccacacacgctgttctatcaatactaacgcgaaagacctagtctggaagaaaaaccgtctaaggattgtctggttgtatttggggg

SEQ ID NO: 12534 - DNA, 110 bp, synthetic construct
  source 1..110: mol_type = other DNA
ctaaatctgcctgtggtacctgccttgttgggctctgcatacacaactatctcaaaaataggtgcatttgttttatacctggcaagctgcagagggcttcctctatcgaa

SEQ ID NO: 12535 - DNA, 110 bp, synthetic construct
  source 1..110: mol_type = other DNA
cacaaccttctggttcctagtaggattcattaaccactgagccatgacgggaactccaggctgggtatttctaaagcagagtaagcaggagttccggctgtggcacagca

SEQ ID NO: 12536 - DNA, 110 bp, synthetic construct
  source 1..110: mol_type = other DNA
ccaggctgggtatttctaaagcagagtaagcaggagttccggctgtggcacagcatattaagaattagactgtagtagctctggttgctacagaggcacaggtttgatcc

SEQ ID NO: 12537 - DNA, 110 bp, synthetic construct; identical to SEQ ID NO: 12535
  source 1..110: mol_type = other DNA

SEQ ID NO: 12538 - DNA, 110 bp, synthetic construct; identical to SEQ ID NO: 12536
  source 1..110: mol_type = other DNA

SEQ ID NO: 12539 - DNA, 110 bp, synthetic construct
  source 1..110: mol_type = other DNA
aggggaactaggttatgtttgggtcggggaggaggcgggggtggaaccactgaaaccgtcagatctggcttgcccggcggccagctccccatgaagtgtggatattgatc

SEQ ID NO: 12540 - DNA, 110 bp, synthetic construct
  source 1..110: mol_type = other DNA
ccgtcagatctggcttgcccggcggccagctccccatgaagtgtggatattgatcgaggaggcagccgcacaggggaaaagatactgtgaagactgctggaaggccactg

SEQ ID NO: 12541 - DNA, 110 bp, synthetic construct
  source 1..110: mol_type = other DNA
caaccgatcctagtaatagttttgataagaaaatactcacagtccttgcttctcctactcgtcttaaagtgacaccttcggccaatagagccttccctgcttccacaaat

SEQ ID NO: 12542 - DNA, 110 bp, synthetic construct
  source 1..110: mol_type = other DNA
tactcgtcttaaagtgacaccttcggccaatagagccttccctgcttccacaaataacttctcttcatctgtttctccaagtcgctgtagctcaatgtatttctccacaa

SEQ ID NO: 12543 - DNA, 110 bp, synthetic construct
  source 1..110: mol_type = other DNA
gggctgtgtgccccccacgccctccaggcctccctctcaggaagccaaggttacctggggcaggagagggaaagtcaaagtcatttcccacggccacactgctggatgta

SEQ ID NO: 12544 - DNA, 110 bp, synthetic construct
  source 1..110: mol_type = other DNA
tggggcaggagagggaaagtcaaagtcatttcccacggccacactgctggatgtagatttctgggactcgtatttcagtcgatctggaaaaaggaccacactgtggtcaa

SEQ ID NO: 12545 - DNA, 110 bp, synthetic construct
  source 1..110: mol_type = other DNA
gcgcttatatgggcgtctgagcagaggaagcacccaacgagacaggtgggcataggatctggcccagatcttggcccttttcctgtactcacaccttaagcaatcttttt

SEQ ID NO: 12546 - DNA, 110 bp, synthetic construct
  source 1..110: mol_type = other DNA
acacctctaccctcgccccattcttttccctcagacatccttgccagctagagcttctggtgtggatgaaggggcagaacttcgcttctgtgagacaggccccccctgga

SEQ ID NO: 12547 - DNA, 110 bp, synthetic construct
  source 1..110: mol_type = other DNA
tctggtgtggatgaaggggcagaacttcgcttctgtgagacaggccccccctggagtcaagagtcaaggcctactcccttggggtggagctctgggattccgggaagggg

SEQ ID NO: 12548 - DNA, 110 bp, synthetic construct; identical to SEQ ID NO: 12546
  source 1..110: mol_type = other DNA

SEQ ID NO: 12549 - DNA, 110 bp, synthetic construct; identical to SEQ ID NO: 12547
  source 1..110: mol_type = other DNA

SEQ ID NO: 12550 - DNA, 110 bp, synthetic construct
  source 1..110: mol_type = other DNA
aaaaaaaaaaaaaaaaaagaaaggtgaagtctaaattccctccccttggagttcttgttgtggctcaggtgaatgaacccagctaggatccgtgaggatgtgggttcaat

SEQ ID NO: 12551 - DNA, 110 bp, synthetic construct
  source 1..110: mol_type = other DNA
tgtcttctgttcttgcaaggaggatcatccatcctcctaatacctaatggcagctcagactttgtgctgcaggctgaggaacagaaaggtacagtctggcctgagaagtg

SEQ ID NO: 12552 - DNA, 110 bp, synthetic construct
  source 1..110: mol_type = other DNA
cagactttgtgctgcaggctgaggaacagaaaggtacagtctggcctgagaagtgcctgtcccgacataggtaatgtgtcattgcatcactgggtttttaaccctctttc

SEQ ID NO: 12553 - DNA, 110 bp, synthetic construct
  source 1..110: mol_type = other DNA
tgacccgatcatcctaaagagaagcctcaaagaacaccgtcatattgatgagagtttatacctttaagacacctctcgtggaagctctgctgtgttcctgatatgaattt

SEQ ID NO: 12554 - DNA, 110 bp, synthetic construct
  source 1..110: mol_type = other DNA
caatgtggttgactgaggggagacgctgaaaacaccagtgatgataaacctatcacagagatatgtttaaaacgttgtaagagcccggaggcatctgtttggcatgggag

SEQ ID NO: 12555 - DNA, 110 bp, synthetic construct
  source 1..110: mol_type = other DNA
gcaggcagcaccacggccccatagccttccacgcggtacctctgccagaagtccagggagaggacctcgcagtagagcacaggccatgccgggagagcctctgcgggaag

SEQ ID NO: 12556 - DNA, 110 bp, synthetic construct
  source 1..110: mol_type = other DNA
cgagtggtggagaatcatttatgtgggtcactcagcgtccctgcccaggtgccgtccctggcatcacgggctccatccctcctgggactctcacatcacagttatttggt

SEQ ID NO: 12557 - DNA, 110 bp, synthetic construct
  source 1..110: mol_type = other DNA
actctgtctgtctgtctgtctctctctctctctcgttgcctgcccatcatccgacccttctgtatgttagggtgccacagagctgggcctgcttttactctctcccaaag

SEQ ID NO: 12558 - DNA, 110 bp, synthetic construct
  source 1..110: mol_type = other DNA
acaccagcatcataaagtcaagctcctgcagctggagggggctgggaaaaaaccgattggcatgctatttctggctcccagcaccagaatagtctctgaggcccagtttg

SEQ ID NO: 12559 - DNA, 110 bp, synthetic construct
  source 1..110: mol_type = other DNA
tccagctatgccaccaactatctatatgaccttggcaaagagcttggagcctccgttttcttacctacagtatgtggaatctgaaaaattgcaacaaactagtgaatgta

SEQ ID NO: 12560 - DNA, 110 bp, synthetic construct
  source 1..110: mol_type = other DNA
tgtgaagatgatgagaaatgatcagcttctgggtctacactgagatggagctgacaggatttggggttggatgtggaatgtgagagaagagagtcaaggaagacgccaag

SEQ ID NO: 12561 - DNA, 110 bp, synthetic construct
  source 1..110: mol_type = other DNA
ctgctaaacaatatattatattcttgcttttaagatatatacacaatgcctaatgttccacacattactctggaaccgaaaacacgactattgtcagaacacttctttca

SEQ ID NO: 12562 - DNA, 110 bp, synthetic construct
  source 1..110: mol_type = other DNA
ttccacacattactctggaaccgaaaacacgactattgtcagaacacttctttcaagatttctgagatgtgtcaaggacaaacttccactcaaggcaccatgctcacttt

SEQ ID NO: 12563 - DNA, 110 bp, synthetic construct
  source 1..110: mol_type = other DNA
tctctagtcacgaactatagaaatgatccctgaaagtatagtcttaccctacagaagcctattttttccagctgtacgaaacgcatacatattatactgatggtgaattt

SEQ ID NO: 12564 - DNA, 110 bp, synthetic construct
  source 1..110: mol_type = other DNA
cattaaccactgcgccacgatgggaactcctctgctgactcacttgttaatttttaacggccattctgacaggtgtgaagtggtacctccttagttttgatttgcatttc

SEQ ID NO: 12565 - DNA, 110 bp, synthetic construct; identical to SEQ ID NO: 12564
  source 1..110: mol_type = other DNA

SEQ ID NO: 12566 - DNA, 110 bp, synthetic construct
  source 1..110: mol_type = other DNA
aacaccctatctgcagcatgggagaaaggactagacaggaggggaagacaagacgcagagagacaagctaaaggctcctggagtaccaaaaagagaaagggtaatggctt

SEQ ID NO: 12567 - DNA, 110 bp, synthetic construct
  source 1..110: mol_type = other DNA
tagtagcgaaatattgaaatggatattttttttggctgtgactgcagcacgccgaagttcctcgtccatagattgaacccgtgccatagcagtgactgccagatccttaa

SEQ ID NO: 12568 - DNA, 110 bp, synthetic construct
  source 1..110: mol_type = other DNA
tcgggttcattatcattgagccacgacaggaactcctgcaggttgtagctgatttctagtcatatcatgttgtggtcagaaagatgatttcagttttcttaaatttacca

SEQ ID NO: 12569 - DNA, 110 bp, synthetic construct; identical to SEQ ID NO: 12568
  source 1..110: mol_type = other DNA

SEQ ID NO: 12570 - DNA, 110 bp, synthetic construct; identical to SEQ ID NO: 12568
  source 1..110: mol_type = other DNA

SEQ ID NO: 12571 - DNA, 110 bp, synthetic construct; identical to SEQ ID NO: 12568
  source 1..110: mol_type = other DNA

SEQ ID NO: 12572 - DNA, 110 bp, synthetic construct
  source 1..110: mol_type = other DNA
gtggctgccttactggtcttcatcatggccatgctagtttggggccaggggcaggggaatagccacctcccccgcaagcttagctacatccaatcccagaccaatggagg

SEQ ID NO: 12573 - DNA, 110 bp, synthetic construct
  source 1..110: mol_type = other DNA
ttgcatacaactaaaatttttgctgaaagattaaactaaaaaatcccatctaccgtacaggaagaagacaacaaggaattccatctcgtctctgagctcagctcagctca

SEQ ID NO: 12574 - DNA, 110 bp, synthetic construct
  source 1..110: mol_type = other DNA
caaatctctcgatttctgagttcgagacaactcaatagtaagtctctattaaaacaagaattatacaaatgtgagtattaagcagtgcttcactagtacagtaaattatt

SEQ ID NO: 12575 - DNA, 110 bp, synthetic construct; identical to SEQ ID NO: 12574
  source 1..110: mol_type = other DNA

SEQ ID NO: 12576 - DNA, 110 bp, synthetic construct
  source 1..110: mol_type = other DNA
taacctgtgttttccaggttcaaccaggcccaccaccatgtccagtattctacccggaaaaacaagaaatcactctcccatctgatggcctctgggttttgagatttcct

SEQ ID NO: 12577 - DNA, 110 bp, synthetic construct
  source 1..110: mol_type = other DNA
ggaaaaacaagaaatcactctcccatctgatggcctctgggttttgagatttccttatgcctatgtgactgagagaggaccttgtttccctccaaaggagaacgtgcaat

SEQ ID NO: 12578 - DNA, 110 bp, synthetic construct
  source 1..110: mol_type = other DNA
gaagattctaatacatgtgtattacaaagcccttgttattggaatttgagatagctaataaataatgctgcttactttttcttcccaagttgggaaccaacttagaaata

SEQ ID NO: 12579 - DNA, 110 bp, synthetic construct
  source 1..110: mol_type = other DNA
aaagcccttgttattggaatttgagatagctaataaataatgctgcttactttttcttcccaagttgggaaccaacttagaaataaaatgtatgcatcagaaagtaaaga

SEQ ID NO: 12580 - DNA, 110 bp, synthetic construct
  source 1..110: mol_type = other DNA
attaaaccaggctgcctttgtaaatacccatgagacaatttgatccctgtggtattaacatgaatggttagagaaagatacagattgtattagcaatagctggaagtata

SEQ ID NO: 12581 - DNA, 110 bp, synthetic construct
  source 1..110: mol_type = other DNA
taacatgaatggttagagaaagatacagattgtattagcaatagctggaagtataacttggcaggcaaccaaaataattaatcagtggcctgattctcatgttagaattg

SEQ ID NO: 12582 - DNA, 110 bp, synthetic construct
  source 1..110: mol_type = other DNA
ttatggaagagttccaacagaagccaataagcccagtttaaaaacacagtcaatcaatttagcttttcttaaagaaaagtgcatatccaacctgaaattacttacttctt

SEQ ID NO: 12583 - DNA, 110 bp, synthetic construct
  source 1..110: mol_type = other DNA
aatttagcttttcttaaagaaaagtgcatatccaacctgaaattacttacttcttttcccccaactatttgatctttgaaagccctaatgtcctgctaatgaagtgttag

SEQ ID NO: 12584 - DNA, 110 bp, synthetic construct
  source 1..110: mol_type = other DNA
attgcacgtggtttgtcctgactagagcaaaggacccagtggaaaagtatggaagaagagactgcagaggttggtgggaccagatactgaagcttttgctatcctggtgg

SEQ ID NO: 12585 - DNA, 110 bp, synthetic construct
  source 1..110: mol_type = other DNA
aagagactgcagaggttggtgggaccagatactgaagcttttgctatcctggtggtacttgggtgtctttgtgctccaaggttcaactaacaggttggccagatctatgg

SEQ ID NO: 12586 - DNA, 110 bp, synthetic construct
  source 1..110: mol_type = other DNA
ctccccacattacaaaaaagcagactgaggttcccaggatcccagagatatggttgccaggcccaagatctcgataagaaacattttcaactttcacattcctaagctgg

SEQ ID NO: 12587 - DNA, 110 bp, synthetic construct
  source 1..110: mol_type = other DNA
gccaggcccaagatctcgataagaaacattttcaactttcacattcctaagctggcttgccagcacagaaatcacaggctcccttctccatcccagccctgaaggtagtg

SEQ ID NO: 12588 - DNA, 110 bp, synthetic construct; identical to SEQ ID NO: 12586
  source 1..110: mol_type = other DNA

SEQ ID NO: 12589 - DNA, 110 bp, synthetic construct; identical to SEQ ID NO: 12587
  source 1..110: mol_type = other DNA

SEQ ID NO: 12590 - DNA, 110 bp, synthetic construct
  source 1..110: mol_type = other DNA
tcaggattgcttccaatccgagattctgggatctatgccctttatcctgaagtgtcctcttttcacctggttcttagcaggactcagattaaagagcttctgttggtgaa

SEQ ID NO: 12591 - DNA, 110 bp, synthetic construct
  source 1..110: mol_type = other DNA
cctcttttcacctggttcttagcaggactcagattaaagagcttctgttggtgaaatggaaatctggccgccatcattaaaagggccatcaccttcttatacaggcactg

SEQ ID NO: 12592 - DNA, 110 bp, synthetic construct
  source 1..110: mol_type = other DNA
taggattcagtctagaagtgtccggtgcaggagcttccgttcctgagaaactgagtgtgccaccctcttggcacgtagatgtttcaccaacccagacactttctgaaccc

SEQ ID NO: 12593 - DNA, 110 bp, synthetic construct
  source 1..110: mol_type = other DNA
tctaaggtagtgcctatgagcttccaatggatagtggcatctggaagagaaggcacctgcccagcttggcaagagtcattattagatccccactgaccctgagcaggggc

SEQ ID NO: 12594 - DNA, 110 bp, synthetic construct
  source 1..110: mol_type = other DNA
agtgtttaatgagcttgaatataggcacttgatgtaaagtagaagtaaattgcttctccaattgtcattttagttgatccagagtaccagaaggaggcagaacagagaca

SEQ ID NO: 12595 - DNA, 110 bp, synthetic construct
  source 1..110: mol_type = other DNA
ttatagaaagactcgggtcccatcctcatctctgtgactgagcatcatgttgaattgtatcagaagtttccctagagcctaaaagtcttaccctccaaattacaaatcct

SEQ ID NO: 12596 - DNA, 110 bp, synthetic construct
  source 1..110: mol_type = other DNA
aacatcaccacatcaaaagtagaaaccaaggtctccaggacatagggccgggtgttcaccaaacagaagggtacgcacagactggctgacttcctgtcctcaagtcactg

SEQ ID NO: 12597 - DNA, 110 bp, synthetic construct
  source 1..110: mol_type = other DNA
cccatctggcactaataactacctcttccaaattctcatagtgcaaattgtctaaagctctcatttggctgaggtagtggcttacctccccaaataaattttaagctcct

SEQ ID NO: 12598 - DNA, 110 bp, synthetic construct
  source 1..110: mol_type = other DNA
taataatggttatttatatactcctgaaagtgcttgaacattcctttgattctcttctttatcaaggacattttcctacgaagttatgtgtagttacgcccatcatgtca

SEQ ID NO: 12599 - DNA, 110 bp, synthetic construct
  source 1..110: mol_type = other DNA
gacagaaaggcaaaaaaaaaaaaaagaaagaaagaaaatgtccccagacgttgccaaatgttccacggccagttaccaccaatcccattgagaaccaccaccctagataa

SEQ ID NO: 12600 - DNA, 110 bp, synthetic construct
  source 1..110: mol_type = other DNA
gacgcacttctttctctgtcccataccatccccaaatcagggcttttcttagcttcagctaacatcaccaccatctgcactgttgtataagccagggtcccatgaattat

SEQ ID NO: 12601 - DNA, 110 bp, synthetic construct
  source 1..110: mol_type = other DNA
gacaggaactccctaattctttgttgattccaactctgtcagggttcacctccgttccatttcactagcccatttagctgtatcctccacctctgaaacattggactaaa

SEQ ID NO: 12602 - DNA, 110 bp, synthetic construct
  source 1..110: mol_type = other DNA
ccagatccttaacttgccgtgccacagcgagaactccttactcctttattttttacttcatctttttgggccgctgtaacaaaaataccataaggaacaatagaaacttg

SEQ ID NO: 12603 - DNA, 110 bp, synthetic construct
  source 1..110: mol_type = other DNA
atcttaatatagtctttttcaattgttcttcatgacctcttgaatggaagccacgcttttcagctaagcattcaaaacccactgtgaattctagcctcactttctgtctg

SEQ ID NO: 12604 - DNA, 110 bp, synthetic construct
  source 1..110: mol_type = other DNA
agtttctgcttggtcaaagcaagtcacaaagtaagctgttgtgactccaagtcagtggttggggaagtatatttcacctcaaatggggaactacaaagtctgggtaaaga

SEQ ID NO: 12605 - DNA, 110 bp, synthetic construct
  source 1..110: mol_type = other DNA
tctatctggtcattttactgaagtcatggtaattacttcatgagttaacttcacgagttaatttataaatcgttctgtgtgaggcaaagcttcttggtaagatacatata

SEQ ID NO: 12606 - DNA, 110 bp, synthetic construct
  source 1..110: mol_type = other DNA
gtgttagtatatctgatttaaaccagtgacttctggtatgttttgtacagtacacctgaacaagagcagctaatggtggtgtggctgagttggatgataaaagaagaagc

SEQ ID NO: 12607 - DNA, 110 bp, synthetic construct
  source 1..110: mol_type = other DNA
aagatactggtttaaatgtgtttacagaaacatctttgtgcagagaagaacccgaaaggaggtctcatttagtttttttaaagtttatttttataatggtcagaggggga

SEQ ID NO: 12608 - DNA, 110 bp, synthetic construct
  source 1..110: mol_type = other DNA
cttgaggtatttttgccatgtagaagtttgtcatttctgtttcacagtacaatttgtcaaaagttgtctataggtgctgattctatttcctcacttcctgttctttccta

SEQ ID NO: 12609 - DNA, 110 bp, synthetic construct
  source 1..110: mol_type = other DNA
gtcaaaagttgtctataggtgctgattctatttcctcacttcctgttctttcctaatccatcccaatagtattgctgtctgcataattctactgaaactctttttatcag

SEQ ID NO: 12610 - DNA, 110 bp, synthetic construct
  source 1..110: mol_type = other DNA
cctaacactgcctaaaatattttgttaaagaaggtaggcagaggagttcccatcgtggctccatgttaacgaaccccactagtttccacgaggatgtggggtcaacccca

SEQ ID NO: 12611 - DNA, 110 bp, synthetic construct
  source 1..110: mol_type = other DNA
gcttgttaactctgagccacaatggaaccgagagtccatatatttaaccacaggtacagctaagaatgtatttaagatgggaggtaagaaaagtctccctacatctccaa

SEQ ID NO: 12612 - DNA, 110 bp, synthetic construct
  source 1..110: mol_type = other DNA
acagctaagaatgtatttaagatgggaggtaagaaaagtctccctacatctccaaggcaggaaagtacagtgttcctctctaggaaagttgagtacccctgaataagggc

SEQ ID NO: 12613 - DNA, 110 bp, synthetic construct
  source 1..110: mol_type = other DNA
atgccctatgcattctgcaggtgtattaattattgccgttatttatttgttttgttatttaagatgaaaatacatttagaaaaagcaactagctctgcatcactctgatg

SEQ ID NO: 12614 - DNA, 110 bp, synthetic construct; identical to SEQ ID NO: 12613
  source 1..110: mol_type = other DNA

SEQ ID NO: 12615 - DNA, 110 bp, synthetic construct
  source 1..110: mol_type = other DNA
tggtttgtgccaggcccaggatatgaaccgaggaaacactaactgagtctacaatacatagttctcgccctcctgtggtctgcagggagaaactaacacgcaaatggatt

SEQ ID NO: 12616 - DNA, 110 bp, synthetic construct
  source 1..110: mol_type = other DNA
gcctgccggcctggtggctaaaagctgagctgcgagaacattctggcttgcaaacaaaaggccccaaacccattcccaagagaacttcagtggccttaggaagaattcta

SEQ ID NO: 12617 - DNA, 110 bp, synthetic construct
  source 1..110: mol_type = other DNA
tattccacccaagcaaccaaagaggccgctctcctcatcggatcttcttattttgctgctggccacagtttgataaactctcccctgggagatcagaatttcaacctggg

SEQ ID NO: 12618 - DNA, 110 bp, synthetic construct
  source 1..110: mol_type = other DNA
tctgcacagcagaatccgaaaatttgacttccatcttgaaagtggggggcagggagcgagggtctcaaagaaactcttattgggggaagaagggcagctacgccccatcc

SEQ ID NO: 12619 - DNA, 110 bp, synthetic construct
  source 1..110: mol_type = other DNA
gcgagggtctcaaagaaactcttattgggggaagaagggcagctacgccccatcccaaacccatctgtggccagaaggtacctcccgtctgagccgacctcttgccctcg

SEQ ID NO: 12620 - DNA, 110 bp, synthetic construct
  source 1..110: mol_type = other DNA
gtaggtgcctattcagtaggactgggtggggcctgagatgccgcacttctaatcagctccctgatacagaagagactgcgctctgaggagtaaggttttgaaaggttttg

SEQ ID NO: 12621 - DNA, 110 bp, synthetic construct
  source 1..110: mol_type = other DNA
gctccctgatacagaagagactgcgctctgaggagtaaggttttgaaaggttttgctctactttgggggagagttgttttgcatgaagggacagcttaccagcggggagt

SEQ ID NO: 12622 - DNA, 110 bp, synthetic construct
  source 1..110: mol_type = other DNA
gagagagagagagaaatccaagaacggctgtgagaaggtttagtggcaaagaatgagagtggggggtgggcgggatcagaactcatgtaaagaaaacactggggtgatgc

SEQ ID NO: 12623 - DNA, 110 bp, synthetic construct
  source 1..110: mol_type = other DNA
tacaagtaaggcaagagctccaggcaaccgcgaagtctgggtagcaaagcataaggcaaatgacgttatctcgctgagccccagttttcccacatgtgaaacgatcactc

SEQ ID NO: 12624 - DNA, 110 bp, synthetic construct
  source 1..110: mol_type = other DNA
gcaaatgacgttatctcgctgagccccagttttcccacatgtgaaacgatcactcaatcatctctagagtccctttcaacgaaaattacagagtgaagttagaaatgcaa

SEQ ID NO: 12625 - DNA, 110 bp, synthetic construct
  source 1..110: mol_type = other DNA
aaaaaaaaaaatagatcctttgaaaaatcactaataattaagctcccactcttgctttcttggaggtgctcacttaaaacaggaataaagggagttcctgtcatggctca

SEQ ID NO: 12626 - DNA, 110 bp, synthetic construct
  source 1..110: mol_type = other DNA
tatgataaacagaaaaaacggagcgtgaataccgataaatgcaagccttccgtttcggaaagtcttcacttatttgattaagttaggtgaaaaacagagcagtcatgctt

SEQ ID NO: 12627 - DNA, 110 bp, synthetic construct
  source 1..110: mol_type = other DNA
acctctgttggtgtgattactgggtaaatatctgcttgtgataaccacttaaatgggttccttttctttagtctttaccacatctattcaatgctgctgccagaataatc

SEQ ID NO: 12628 - DNA, 110 bp, synthetic construct
  source 1..110: mol_type = other DNA
catgcacacacatgtgcacttatatccgccctcacctaaaaaaaaagaagaggaagaggcacaaaaatacatactctacatttcaagaaaagaaactaaaaatgcacaga

SEQ ID NO: 12629 - DNA, 110 bp, synthetic construct
  source 1..110: mol_type = other DNA
gaggcacaaaaatacatactctacatttcaagaaaagaaactaaaaatgcacagaactacccggtaaacagtttggaggtagttttctacctgaggcagcatcaatcacg

SEQ ID NO: 12630 - DNA, 110 bp, synthetic construct; identical to SEQ ID NO: 12628
  source 1..110: mol_type = other DNA

SEQ ID NO: 12631 - DNA, 110 bp, synthetic construct; identical to SEQ ID NO: 12629
  source 1..110: mol_type = other DNA

SEQ ID NO: 12632 - DNA, 110 bp, synthetic construct
  source 1..110: mol_type = other DNA
actcactgaatgctgctgagcagcaccactgcccattgggaaataactggccaggtgagaaaaaaatggttaacactcctggctgctcccacagccatctgcaggctagc

SEQ ID NO: 12633 - DNA, 110 bp, synthetic construct
  source 1..110: mol_type = other DNA
tgagaaaaaaatggttaacactcctggctgctcccacagccatctgcaggctagccttccctgccaccaagataggggataattagattgcctggaaaaacttagatgcc

SEQ ID NO: 12634 - DNA, 110 bp, synthetic construct
  source 1..110: mol_type = other DNA
ctatgtaacttgcattatagtgagtaaccagaacatatattaaaattttttgcattggaataatctgttacctgctacactacactcattaaggaagctcattaagcttt

SEQ ID NO: 12635 - DNA, 110 bp, synthetic construct
  source 1..110: mol_type = other DNA
tggaataatctgttacctgctacactacactcattaaggaagctcattaagcttttattaggaaaagactagtccacccagagccaaatggaatatacacaggtcattca

SEQ ID NO: 12636 - DNA, 110 bp, synthetic construct
  source 1..110: mol_type = other DNA
agcggacttttataaagtaatgatgattaacaaaaatggggaaaaacaagtacttgtcaagtagggcaaattcgttcagaacatatgatgtgtgagagggtgaaggtcta

SEQ ID NO: 12637 - DNA, 110 bp, synthetic construct
  source 1..110: mol_type = other DNA
ctgattaatccggtaaatcatttgggtggtgattggtagaaagagcttctattctgtagtcattcttggaagggctttcatgaaaagtgaggtaaagaagtgaactcata

SEQ ID NO: 12638 - DNA, 110 bp, synthetic construct
  source 1..110: mol_type = other DNA
ggtttgtgggaaagcaggacactgaagtaggagtgaagtcagccgagagcaagggagaggctgatgggatgaggaactataactattaggtgaaggcttgttgccttcca

SEQ ID NO: 12639 - DNA, 110 bp, synthetic construct
  source 1..110: mol_type = other DNA
agaggctgatgggatgaggaactataactattaggtgaaggcttgttgccttccacttagctcttctcataataccgcacaaaaattcaattcgttttgttgtttattaa

SEQ ID NO: 12640 - DNA, 110 bp, synthetic construct
  source 1..110: mol_type = other DNA
tggttctgagcagttgctcagatcccttcacaaatgctgggtatccccaggtcattaaagaatcacttccgtatcatgctggggtgccctgtgatgttgtctaaggccca

SEQ ID NO: 12641 - DNA, 110 bp, synthetic construct
  source 1..110: mol_type = other DNA
taaagaatcacttccgtatcatgctggggtgccctgtgatgttgtctaaggcccatatgcctgggcctctcaggcagcagttcctactgtgtgttcttactccctttcta

SEQ ID NO: 12642 - DNA, 110 bp, synthetic construct
  source 1..110: mol_type = other DNA
ttgctcagtgggttaacgatctgtcaagctatggtatagatcgaagacctggctcggatcctgtgttgctgtgctctggcatgacctctagcctgggaacctccatatgc

SEQ ID NO: 12643 - DNA, 110 bp, synthetic construct
  source 1..110: mol_type = other DNA
acgatctgtcaagctatggtatagatcgaagacctggctcggatcctgtgttgctgtgctctggcatgacctctagcctgggaacctccatatgctgcgggttcggccct

SEQ ID NO: 12644 - DNA, 110 bp, synthetic construct
  source 1..110: mol_type = other DNA
catgtgtatattttctctggagaaatccctatcagctctattgcttatttttaactgggtcattgttgttataagacaattcgttttttaaaattgatatcaggggagtt

SEQ ID NO: 12645 - DNA, 110 bp, synthetic construct
  source 1..110: mol_type = other DNA
tgggtcattgttgttataagacaattcgttttttaaaattgatatcaggggagtttccattgtggaacggcagaaacgaatcccactagtatctaagaggattcaggttc

SEQ ID NO: 12646 - DNA, 110 bp, synthetic construct
  source 1..110: mol_type = other DNA
ccaaacctactgcttatactttttttgtctttagcctgaagatgtgtaatcaggctaaagtggctcagtgggttacagacctaactagtatccatgaggatgaacattca

SEQ ID NO: 12647 - DNA, 110 bp, synthetic construct
  source 1..110: mol_type = other DNA
tgtctttagcctgaagatgtgtaatcaggctaaagtggctcagtgggttacagacctaactagtatccatgaggatgaacattcaatccctggcctctctcagtgggtta

SEQ ID NO: 12648 - DNA, 110 bp, synthetic construct
  source 1..110: mol_type = other DNA
tatctgtcttgtgtagttgttgatgcctattgattgtaacttcctaattgaacggaattaggagaattgtaaagaatgaggagactttcctggttctttatatgctgagt

SEQ ID NO: 12649 - DNA, 110 bp, synthetic construct
  source 1..110: mol_type = other DNA
aaggagcatgaggaaatgtattcatgcctcatgtccccagaggaaggaggactacatctgtgagagcatcagaagtctcttacaaatatctacgttcagtattctcatgc

SEQ ID NO: 12650 - DNA, 110 bp, synthetic construct
  source 1..110: mol_type = other DNA
ggaggactacatctgtgagagcatcagaagtctcttacaaatatctacgttcagtattctcatgctttatgctctcaaattcccttttttttttttttttttttttgtct

SEQ ID NO: 12651 - DNA, 110 bp, synthetic construct
  source 1..110: mol_type = other DNA
tgtgcacccgtggtatatggaagttcctgggccaggagtccacttggcccagctacagcaacactggatccgagctatatctataacctgtgccacagcttgcagcaaca

SEQ ID NO: 12652 - DNA, 110 bp, synthetic construct
  source 1..110: mol_type = other DNA
tatggaagttcctgggccaggagtccacttggcccagctacagcaacactggatccgagctatatctataacctgtgccacagcttgcagcaacaccggatccttaactc

SEQ ID NO: 12653 - DNA, 110 bp, synthetic construct
  source 1..110: mol_type = other DNA
gggagaaaaactagttgatagcaactgtctctgaggtggccattcatgtcagatttagcaactagatttcaaagcagtatgataattgttttcaaagaactaaaggaagc

SEQ ID NO: 12654 - DNA, 110 bp, synthetic construct
  source 1..110: mol_type = other DNA
agagactgtggggacctatttgaggtgagctgaaggtgcctgagagcctagacaataacaagcaggaaaaccatgttgggaaggcctctgaaatttgaactgttacggca

SEQ ID NO: 12655 - DNA, 110 bp, synthetic construct
  source 1..110: mol_type = other DNA
gccggtggagcccaggactgcaggagttgggggctggggggcgatgcccagtcaccaaaacagcagagaaacagactgtgccccagggagactgggcagctttggaaaaa

SEQ ID NO: 12656 - DNA, 110 bp, synthetic construct; identical to SEQ ID NO: 12655
  source 1..110: mol_type = other DNA

SEQ ID NO: 12657 - DNA, 110 bp, synthetic construct
  source 1..110: mol_type = other DNA
ggagatggttagatcagtccaccctgcctctcctcttattatggcaacagaggaagggagcagacagcggttctactctagtgagtaaccccaaagttaaccttgaaggg

SEQ ID NO: 12658 - DNA, 110 bp, synthetic construct
  source 1..110: mol_type = other DNA
gggagcagacagcggttctactctagtgagtaaccccaaagttaaccttgaagggtaaagtttaatgaggcagtgtgggcatgtagggtggggcaggggcggggctggct

SEQ ID NO: 12659 - DNA, 110 bp, synthetic construct
  source 1..110: mol_type = other DNA
gacaccggtctggagaagaaagacctgtgtgtggcattcttttgctcagcttcctcctcttgtgccccagcaatctgccaggaccgccctgcccagtagctgccagttgc

SEQ ID NO: 12660 - DNA, 110 bp, synthetic construct
  source 1..110: mol_type = other DNA
cctcttgtgccccagcaatctgccaggaccgccctgcccagtagctgccagttgctcatcaccatctccctgtgcctgtctctgctctttgaagggtcagatccaacggt

SEQ ID NO: 12661 - DNA, 110 bp, synthetic construct
  source 1..110: mol_type = other DNA
gtttcaaagaaaaactcctaaggaagatagagaaagaatagatagaattcatatggagattggccaaggaaggccacctctggtaaaatgacattgaatatagacttgaa

SEQ ID NO: 12662 - DNA, 110 bp, synthetic construct
  source 1..110: mol_type = other DNA
gagattggccaaggaaggccacctctggtaaaatgacattgaatatagacttgaataaagtgactgtgtggaccctgtagatatctggggggggaaggctgagaaggaat

SEQ ID NO: 12663 - DNA, 110 bp, synthetic construct
  source 1..110: mol_type = other DNA
caagttgagttgcattttattcttaacttagtactttctgagacagaatgccagtatacttatcctttaaacatcccagttaaagacttgatatgactgaattgaaacta

SEQ ID NO: 12664 - DNA, 110 bp, synthetic construct
  source 1..110: mol_type = other DNA
gcgcgctcacgtgcacgctcacgttcacgggcattacaaaggcggaggcccacagctgctaggtgcagatgccaactcaattatgtgaagaaatgcatgcaggctcgtgc

SEQ ID NO: 12665 - DNA, 110 bp, synthetic construct
  source 1..110: mol_type = other DNA
ctgctaggtgcagatgccaactcaattatgtgaagaaatgcatgcaggctcgtgcatgtggtaggttttacatcagaaaaactcttgccatcaaattgaagtcagcttgt

SEQ ID NO: 12666 - DNA, 110 bp, synthetic construct
  source 1..110: mol_type = other DNA
gtcccgtgtttgggtgcacgggcctcctctgagtctgctggctcgactagttgatcaagttcacaggctgcagatatgagagctcatattccggccctcagcccctgtga

SEQ ID NO: 12667 - DNA, 110 bp, synthetic construct
  source 1..110: mol_type = other DNA
gcaggcgtcctgaaaacacctgctctgtggccttgagcttctgcactctaccatgggattggacctaagctgcagttgggagggatttaagttagacccaaagaatgtta

SEQ ID NO: 12668 - DNA, 110 bp, synthetic construct
  source 1..110: mol_type = other DNA
gcagcaaggtgaggctaccctatccccagctgcatgagctggatcgtgctggccagatcctcaaaggctgacagagctctagaaggccacactcagagccctgggcattc

SEQ ID NO: 12669 - DNA, 110 bp, synthetic construct
  source 1..110: mol_type = other DNA
gatcctcaaaggctgacagagctctagaaggccacactcagagccctgggcattctgagcccctcacttaggtaaagaggaaaaaaaaatggagttcctattgcagctca

SEQ ID NO: 12670 - DNA, 110 bp, synthetic construct
  source 1..110: mol_type = other DNA
cactgtcgtttctggtcagttgattcatttgaccatttgacgaggtgcaggtactgtgctaagccctggggacaaagacggattggcctccagaagctcacatcccaggg

SEQ ID NO: 12671 - DNA, 110 bp, synthetic construct
  source 1..110: mol_type = other DNA
gtgctaagccctggggacaaagacggattggcctccagaagctcacatcccaggggaaggagacagaggagagacaggtggagagtggaagagaaaagggggcgtggagg

SEQ ID NO: 12672 - DNA, 110 bp, synthetic construct
  source 1..110: mol_type = other DNA
taacgtcttgctttgcagtggtatatctgctacaggcaatacacaaacactgataggctcctattaactgaagtccgcagtttatattagggttcactctttgtgttgtg

SEQ ID NO: 12673 - DNA, 110 bp, synthetic construct
  source 1..110: mol_type = other DNA
ggctcctattaactgaagtccgcagtttatattagggttcactctttgtgttgtgcagctccatgggtcttgacaaatgcacattttgtgtgtttacctttacagtatca

SEQ ID NO: 12674 - DNA, 110 bp, synthetic construct
  source 1..110: mol_type = other DNA
agaaggcgttctggggtctcctagagtcacactctgaccttggtcagtgatcttgtcctgccaatcccacccaatttccccacggatctggctccagtgaaactgtgtgg

SEQ ID NO: 12675 - DNA, 110 bp, synthetic construct
  source 1..110: mol_type = other DNA
tcctgccaatcccacccaatttccccacggatctggctccagtgaaactgtgtgggaagcagggggtgtctgtatctacccctgttcaattcacctgacagagaaagacc

SEQ ID NO: 12676 - DNA, 110 bp, synthetic construct
  source 1..110: mol_type = other DNA
gtgtccctgtccctggtctcttccccctggtgggaagtagggggccctgagacctcatccccacagttccgagagtaacgtgaccttgctccttgttcccctgcatgggt

SEQ ID NO: 12677 - DNA, 110 bp, synthetic construct
  source 1..110: mol_type = other DNA
agcctggggaaggggctgcactctgcccttagcagcccccacccatccacccacccagaattagctgtcatctagaccaaggggttctcagccctggctgcacacctaaa

SEQ ID NO: 12678 - DNA, 110 bp, synthetic construct
  source 1..110: mol_type = other DNA
tcctagtcggatttgtttccgccgtgccatgacggaagctcctcttctttttgttttgccttccttctctctcctcagcccctaccccagcaccaggctcctccttgccc

SEQ ID NO: 12679 - DNA, 110 bp, synthetic construct
  source 1..110: mol_type = other DNA
ttgccttccttctctctcctcagcccctaccccagcaccaggctcctccttgcccttcccatgatccctcgggagcgctgggcacaagggccgcttgccctcccccgccc

SEQ ID NO: 12680 - DNA, 110 bp, synthetic construct
  source 1..110: mol_type = other DNA
aagcatgagcaaagcaagcaggggtgagggaagctgggtttgagaaactgaagctgcattgctggagtggagccgagtgcctgtgtttgaagtcctgctctgccttctgg

SEQ ID NO: 12681 - DNA, 110 bp, synthetic construct
  source 1..110: mol_type = other DNA
gatggggcatgactcacaaaaggctccagaggtaatcaaagcggagctgggaatcaaatcctcctgcagcgcaggctgtttccacgctcccgtgttagtcacgttcctcc

SEQ ID NO: 12682 - DNA, 110 bp, synthetic construct
  source 1..110: mol_type = other DNA
aaatcctcctgcagcgcaggctgtttccacgctcccgtgttagtcacgttcctccagatgcagccgctcgcacgaaagcatggccacagaccctgccctcctgcagagcc

SEQ ID NO: 12683 - DNA, 110 bp, synthetic construct
  source 1..110: mol_type = other DNA
cccttgtgcccaagaccctgggagtcaaggtcgggggtagcagccaggcaggagctccatccaagggcccctcagacctttccgtttatctcagcatctctctgttgcca

SEQ ID NO: 12684 - DNA, 110 bp, synthetic construct
  source 1..110: mol_type = other DNA
tccatccaagggcccctcagacctttccgtttatctcagcatctctctgttgccatttctgctcggtacccaggaatgggggactttcaggaggcagagcatcagccttc

SEQ ID NO: 12685 - DNA, 110 bp, synthetic construct
  source 1..110: mol_type = other DNA
tgggtcagcagccgtgggaaggatggggtgtggctcattgacttggtaaggagggtagggtgggaaacttgcttctctgagaatctgtgtataaaatcgcagctaaatat

SEQ ID NO: 12686 - DNA, 110 bp, synthetic construct
  source 1..110: mol_type = other DNA
tagggtgggaaacttgcttctctgagaatctgtgtataaaatcgcagctaaatattctgacggttccagctcgggtccagtccctgcggttagaaggatcgggcactatg

SEQ ID NO: 12687 - DNA, 110 bp, synthetic construct
  source 1..110: mol_type = other DNA
aaagacccttgtcagactgtgcctccctcatgcaaaaagagaaccgtcaccacgggatgccaccacgggcccgccaccatgcgtggctattcactcaaattatttccatt

SEQ ID NO: 12688 - DNA, 110 bp, synthetic construct
  source 1..110: mol_type = other DNA
gatgccaccacgggcccgccaccatgcgtggctattcactcaaattatttccatttagagaggctggcgtttgctccattttcatctccaggtgcccggacatcttgggc

SEQ ID NO: 12689 - DNA, 110 bp, synthetic construct
  source 1..110: mol_type = other DNA
attaagaatcctggtgtttggcatgttcccacaggatctgtgcattatttacatggtaaaagtgcaagatgcaagtttctcagttgtagtggcaattgcagttaatcctg

SEQ ID NO: 12690 - DNA, 110 bp, synthetic construct
  source 1..110: mol_type = other DNA
aagcataagagataagaggacaactgttggtgataataaggatggaaaacagggtttagcaactgacggaatgtatcaagtaagggcaccagcacgccagtgatctctga

SEQ ID NO: 12691 - DNA, 110 bp, synthetic construct
  source 1..110: mol_type = other DNA
catagtttggggttttgccagggcagtacaggtaggtatgtaatcccttatctacacttctgaaatttaaagaggtctgaaaattcatagttatcttgttcgtttgtttt

SEQ ID NO: 12692 - DNA, 110 bp, synthetic construct
  source 1..110: mol_type = other DNA
ctgtggtcggaaaataaaaaggacatttagagtgctacctaatgaatagtgtacatttaaatagcatgagccataatttgcagaaagcatgaaaggaaataaaagcttca

SEQ ID NO: 12693 - DNA, 110 bp, synthetic construct
  source 1..110: mol_type = other DNA
tttaaatagcatgagccataatttgcagaaagcatgaaaggaaataaaagcttcaagtgtcagaatgggattctggggcagagcagcactttgagaatgcagtgaaaaat

SEQ ID NO: 12694 - DNA, 110 bp, synthetic construct
  source 1..110: mol_type = other DNA
gcagccccgcgcagctcagctgcagggctcgagtgctccttgtccagataacagcatgagagaccctggtctgtgctgtggttgctgaggggcccggctgcgctgcgacg

SEQ ID NO: 12695 - DNA, 110 bp, synthetic construct
  source 1..110: mol_type = other DNA
atgagagaccctggtctgtgctgtggttgctgaggggcccggctgcgctgcgacgccgtacactgagggccgcttcaaacctcacagccagccagccagccagggcgcag

SEQ ID NO: 12696 - DNA, 110 bp, synthetic construct
  source 1..110: mol_type = other DNA
cacgtgtgtacccttcattgccttcttaggtcctgggcaaggagaggggacgcagtcacagccagggtaataaatactgaacggggcggtgggtgtgaccggcgggctgg

SEQ ID NO: 12697 - DNA, 110 bp, synthetic construct
  source 1..110: mol_type = other DNA
tcacagccagggtaataaatactgaacggggcggtgggtgtgaccggcgggctggagcgggggctctgtgaccctacatcccagtatgttgtgcgtaacctgaaaacatt

SEQ ID NO: 12698 - DNA, 110 bp, synthetic construct
  source 1..110: mol_type = other DNA
tgagcagattttataaaaggctgtcacgcaggatagttcccgagtctctattctatttagtgcccaggcagagcctcagagctttgacttcatccaggagccctggaccg

SEQ ID NO: 12699 - DNA, 110 bp, synthetic construct; identical to SEQ ID NO: 12698
  source 1..110: mol_type = other DNA

SEQ ID NO: 12700 - DNA, 110 bp, synthetic construct
  source 1..110: mol_type = other DNA
acagtcagattcttaacccgcttggccacaacaggaactcaagaaatgtcatttccttttttcttttatggccgcacctgagacatatggaagttcccaggctaggggtc

SEQ ID NO: 12701 - DNA, 110 bp, synthetic construct; identical to SEQ ID NO: 12700
  source 1..110: mol_type = other DNA

SEQ ID NO: 12702 - DNA, 110 bp, synthetic construct
  source 1..110: mol_type = other DNA
acctgtataacagagtgaattcataaggcagcaagagcaacctctgagcgcaaaaaacctgcacctttgctgtttggaagctttgagcatcaggggaatgggtttcattt

SEQ ID NO: 12703 - DNA, 110 bp, synthetic construct
  source 1..110: mol_type = other DNA
aacctgcacctttgctgtttggaagctttgagcatcaggggaatgggtttcattttataagagatccttacaatgcacttggccctcattcacaaacaaaaagtatgcac

SEQ ID NO: 12704 - DNA, 110 bp, synthetic construct
  source 1..110: mol_type = other DNA
cacctcttcagagaactcttctctgccaagactcctccacctcatcaccctgtatgttgtttgcaatgatagtcagaatctttaattatcttgtatatgtatgtgcgtat

SEQ ID NO: 12705 - DNA, 110 bp, synthetic construct
  source 1..110: mol_type = other DNA
atctggcattatcacaacagtggcctgggtagctgctgtggcataggtttgatccctggcctgggaatttctgcatgccacaagcaaggccaaaaaaatttcttttcttt

SEQ ID NO: 12706 - DNA, 110 bp, synthetic construct
  source 1..110: mol_type = other DNA
ctggcctgggaatttctgcatgccacaagcaaggccaaaaaaatttcttttcttttgctccacggcaacctagactctgccccttttcaaagagagtgagattgttggag

SEQ ID NO: 12707 - DNA, 110 bp, synthetic construct
  source 1..110: mol_type = other DNA
tattttttttttttttgctttttagggtcacatctgcagcataagaaagttcccagactaggagtcaaattggaactagctttggcctatgccacagccacagcattgcc

SEQ ID NO: 12708 - DNA, 110 bp, synthetic construct
  source 1..110: mol_type = other DNA
gactaggagtcaaattggaactagctttggcctatgccacagccacagcattgccagatccaagcctcatcttcgacctgcactacatagcaacaccggatcctttaccc

SEQ ID NO: 12709 - DNA, 110 bp, synthetic construct
  source 1..110: mol_type = other DNA
cctgcctcttccaccccacggttacgtaaagtgtaccctcaccagcacagcgtgctcgagcctttaagtccagagcagctgtgttaggaaatcccagcagggtctggggc

SEQ ID NO: 12710 - DNA, 110 bp, synthetic construct
  source 1..110: mol_type = other DNA
gtccgtgtaggtgatgagaagtctcctctcaggaggagtgctgagagtgtcggatggagaaaggcagcatgcaacaaagatccacaacattttccctctctcctctattt

SEQ ID NO: 12711 - DNA, 110 bp, synthetic construct
  source 1..110: mol_type = other DNA
tgtgaaattgacaagtttttctttattgttttgaaaaaaagtcacagcaaactaaacttactggtgaattgtaaaggtttccattagaaatgtaagctgagtgaaagggt

SEQ ID NO: 12712 - DNA, 110 bp, synthetic construct
  source 1..110: mol_type = other DNA
acttactggtgaattgtaaaggtttccattagaaatgtaagctgagtgaaagggttaaaaagaaataaaaatgggtgggtttacaagttcaaaaacaaagggcatttggg

SEQ ID NO: 12713 - DNA, 110 bp, synthetic construct
  source 1..110: mol_type = other DNA
gatggaaaacagtatggagattcctcaaaaaactagagttgccatatgattcagcaattctactcctaggaatatatccagataaaactataattcaaaaaaatactgga

SEQ ID NO: 12714 - DNA, 110 bp, synthetic construct
  source 1..110: mol_type = other DNA
caaaaaactagagttgccatatgattcagcaattctactcctaggaatatatccagataaaactataattcaaaaaaatactggagttcccgtcgtggctcaatggttaa

SEQ ID NO: 12715 - DNA, 110 bp, synthetic construct
  source 1..110: mol_type = other DNA
tatctgtgcaataatatatgccagcaggaaataatacttgggctgagtgatttatgataactagtcactattaatgacatgttggtcttggaattagctgagaataaaat

SEQ ID NO: 12716 - DNA, 110 bp, synthetic construct
  source 1..110: mol_type = other DNA
gataactagtcactattaatgacatgttggtcttggaattagctgagaataaaattcaaaatatcaaaaaaaaaatttttggccacatccacagcatgtggaagctccca

SEQ ID NO: 12717 - DNA, 110 bp, synthetic construct
  source 1..110: mol_type = other DNA
ctgcgacctggcagcgggctctcacctgacaatgctggcgctctgatcttggactccagcctccagaactgtgaggaataaacttctgttgtttataagctaaccagtct

SEQ ID NO: 12718 - DNA, 110 bp, synthetic construct
  source 1..110: mol_type = other DNA
ccagcctccagaactgtgaggaataaacttctgttgtttataagctaaccagtctctggtattttgttacagcagcctaaatgagctaagataacaagctacagattggg

SEQ ID NO: 12719 - DNA, 110 bp, synthetic construct
  source 1..110: mol_type = other DNA
gcattttccactaccctgggattttgagaaacctgtcgcttggagcctgattggtaaaagcccttacttatgcgcagcctgggaactgctctgtttagaagccagaaacc

SEQ ID NO: 12720 - DNA, 110 bp, synthetic construct
  source 1..110: mol_type = other DNA
ggaatgaaacgagttgaaccaaagctacaggaggtaggtgagtcggaagggggggggtggggaatcttcttttgttcttttccatcaggtcaactcaattcccatgctgc

SEQ ID NO: 12721 - DNA, 110 bp, synthetic construct
  source 1..110: mol_type = other DNA
ggtggggaatcttcttttgttcttttccatcaggtcaactcaattcccatgctgcttctccctgcccccaagttttctgacccagaacagagcttactttgtgcaatggc

SEQ ID NO: 12722 - DNA, 110 bp, synthetic construct
  source 1..110: mol_type = other DNA
aacaaccctgacagaaattacaaaaaatcaaaacaatgcaaactggaaaaagtgaaaagcaaacttcctttctcacttttttactatctgctttccaaaccccaatcact

SEQ ID NO: 12723 - DNA, 110 bp, synthetic construct; identical to SEQ ID NO: 12722
  source 1..110: mol_type = other DNA

SEQ ID NO: 12724 - DNA, 110 bp, synthetic construct
  source 1..110: mol_type = other DNA
agctgttactaagaatatattcctttatgagaaggaagttccaagattcactatagggtcagtgcaggttcaactcagttccatggcctctataacaatttgtgtccaga

SEQ ID NO: 12725 - DNA, 110 bp, synthetic construct
  source 1..110: mol_type = other DNA
tttatgatttaggaaaaaaggcaaattaatgaatttatttatttttattactattattattttgtctttttagggccacacccacagcatgtggaaattcccgggctagg

SEQ ID NO: 12726 - DNA, 110 bp, synthetic construct; identical to SEQ ID NO: 12725
  source 1..110: mol_type = other DNA

SEQ ID NO: 12727 - DNA, 110 bp, synthetic construct
  source 1..110: mol_type = other DNA
ccccgagtaatgatttttccacatgtgtttaagaagtcagcccatgtctcttgtcatctctttgatctttcctggtttcctggcctctggcgaacttccttcccagaaag

SEQ ID NO: 12728 - DNA, 110 bp, synthetic construct
  source 1..110: mol_type = other DNA
cttgagaagcaaactccaagctaaaaccacaccttggatggagacagcagaactgagggagctccgttagagaagagtccaggctgaggctggcctttcggactttggtt

SEQ ID NO: 12729 - DNA, 110 bp, synthetic construct
  source 1..110: mol_type = other DNA
agggagctccgttagagaagagtccaggctgaggctggcctttcggactttggttcatgcatcaaacattctaccttataccaggaccatgcaagcacctgacaaccagc

SEQ ID NO: 12730 - DNA, 110 bp, synthetic construct; identical to SEQ ID NO: 12728
  source 1..110: mol_type = other DNA

SEQ ID NO: 12731 - DNA, 110 bp, synthetic construct; identical to SEQ ID NO: 12729
  source 1..110: mol_type = other DNA

SEQ ID NO: 12732 - DNA, 110 bp, synthetic construct
  source 1..110: mol_type = other DNA
gggtgtgtattactgctctgcttctgccttagattaacagctgtgtgctctcccacacattgtcctgtttctaacaacaaacattatacctgctttcacagtctttgcct

SEQ ID NO: 12733 - DNA, 110 bp, synthetic construct
  source 1..110: mol_type = other DNA
cacattgtcctgtttctaacaacaaacattatacctgctttcacagtctttgcctcctttgcaacattcttgttttccacagggccggggggaggggggggcaggaatca

SEQ ID NO: 12734 - DNA, 110 bp, synthetic construct
  source 1..110: mol_type = other DNA
attctaccaaacatttagagaagagttttaacatctattcatctcaaactattcccctcagaaaatgcagaggaaagactattttcaaacttattctatgaggccagcat

SEQ ID NO: 12735 - DNA, 110 bp, synthetic construct
  source 1..110: mol_type = other DNA
cctcagaaaatgcagaggaaagactattttcaaacttattctatgaggccagcatcaccttgatttcacaaccaaaaacaccacacaaaaaaagaaaattacaggccaat

SEQ ID NO: 12736 - DNA, 110 bp, synthetic construct
  source 1..110: mol_type = other DNA
atggatggacaagggtggagccctgatgtccagaggatgagctgtttaaaaagagaagggcgaggtgccagcacaacgacccagcagggacggtgggaccaagggttggt

SEQ ID NO: 12737 - DNA, 110 bp, synthetic construct
  source 1..110: mol_type = other DNA
agagtgtctcattactcagccaaatactagtctctgttcagttggacatcaatcctagtttcaccagtccacaccagatttaagatagcaccaagcataaaggtctgcag

SEQ ID NO: 12738 - DNA, 110 bp, synthetic construct
  source 1..110: mol_type = other DNA
gcagcctctagggaccacgatgagaccacctgcgctctccctgcacttccaggtgccctcagctgagaacccgtggactagatggtggctttggttctggagtgtgacac

SEQ ID NO: 12739 - DNA, 110 bp, synthetic construct
  source 1..110: mol_type = other DNA
atttcagatagctcctgtcctgtctataggagttattttcagcattggatctacgtgtgacctgggaaatctcttagagttctcataagatccaccacttcaaagactca

SEQ ID NO: 12740 - DNA, 110 bp, synthetic construct
  source 1..110: mol_type = other DNA
ctatagacaccagagtgccgatccctaaagacacccctacaccacatgcggtgtacggtcccaaagattcctagtggtcctacgctactttctactcttcacacactact

SEQ ID NO: 12741 - DNA, 110 bp, synthetic construct
  source 1..110: mol_type = other DNA
cggtcccaaagattcctagtggtcctacgctactttctactcttcacacactactatagaggttccagtgtacagtgctagatagagggctggtctgaaaatgtgtgcac

SEQ ID NO: 12742 - DNA, 110 bp, synthetic construct
  source 1..110: mol_type = other DNA
ggttagcctctttgaggtccatttgactggtctaaagtatacctgtctgcttctacaacttcggagctgtctgagtatctgagggcatcctcttaattagagatgtagat

SEQ ID NO: 12743 - DNA, 110 bp, synthetic construct
  source 1..110: mol_type = other DNA
caacttcggagctgtctgagtatctgagggcatcctcttaattagagatgtagatcttaggtgcagacatgtctttgctcctgtctaaaactttccagaactgactcaac

SEQ ID NO: 12744 - DNA, 110 bp, synthetic construct
  source 1..110: mol_type = other DNA
acacagagaacagacttgtggttatcggggctggggggcagtgggatgaatttggagtttggggttagtagatttatacaaatagaaaaatgtattctcttaatatacat

SEQ ID NO: 12745 - DNA, 110 bp, synthetic construct
  source 1..110: mol_type = other DNA
gggcagtgggatgaatttggagtttggggttagtagatttatacaaatagaaaaatgtattctcttaatatacatatttctgaaatcacatcctagcagcacttgaagaa

SEQ ID NO: 12746 - DNA, 110 bp, synthetic construct
  source 1..110: mol_type = other DNA
aacaacactccttgttataaaatgtttatttccaagtaaaaaattcaaagcgaatttggtgcagctactatggaaaacagtatggaggttccttaaaaaactaggggtac

SEQ ID NO: 12747 - DNA, 110 bp, synthetic construct
  source 1..110: mol_type = other DNA
tataaaatgtttatttccaagtaaaaaattcaaagcgaatttggtgcagctactatggaaaacagtatggaggttccttaaaaaactaggggtaccatatgatccagtaa

SEQ ID NO: 12748 - DNA, 110 bp, synthetic construct
  source 1..110: mol_type = other DNA
tgatttggtgttagttttccaatccaactctgagagtttatggggagtttggatggcaaatccaccacttacactggccatacatatgtctagctcctggcgatgcctgt

SEQ ID NO: 12749 - DNA, 110 bp, synthetic construct
  source 1..110: mol_type = other DNA
gcaaatccaccacttacactggccatacatatgtctagctcctggcgatgcctgtgcgattcttagcctttaaaccctttcctgccccttctatctgttgacatccttac

SEQ ID NO: 12750 - DNA, 110 bp, synthetic construct
  source 1..110: mol_type = other DNA
agagaggctgaggtggacgtgctatgcccacatttttcctaagtgaaatagacttaaattctccagtgcagagaactggctcttagatggaattcaccttctagcttggc

SEQ ID NO: 12751 - DNA, 110 bp, synthetic construct
  source 1..110: mol_type = other DNA
aaattctccagtgcagagaactggctcttagatggaattcaccttctagcttggccagggctgccggaggcaggattccagtgagacaacctgatcaagtctgagacaga

SEQ ID NO: 12752 - DNA, 110 bp, synthetic construct
  source 1..110: mol_type = other DNA
aaaaagtacaggtacctggttccctattccagacttaacaagttagactataggagacaacaccgtgtaatgtcctttttttttaagctactcacacgattttgatgttc

SEQ ID NO: 12753 - DNA, 110 bp, synthetic construct
  source 1..110: mol_type = other DNA
gacaacaccgtgtaatgtcctttttttttaagctactcacacgattttgatgttcatccatattggaaacctttagtctggttgaactagaggcatatatggcatgagga

SEQ ID NO: 12754 - DNA, 110 bp, synthetic construct
  source 1..110: mol_type = other DNA
attcattaactgctgagccacttagggaactccccgtactccacttttctagaaaagattccccattccgactggctcctggttctcttctatccccagcaatacccttc

SEQ ID NO: 12755 - DNA, 110 bp, synthetic construct
  source 1..110: mol_type = other DNA
agattccccattccgactggctcctggttctcttctatccccagcaatacccttcccccagctcctaggtttctactgtggcttttgtcctcctagaaaaagaggaagat

SEQ ID NO: 12756 - DNA, 110 bp, synthetic construct
  source 1..110: mol_type = other DNA
ctaccatagaccaagctctggactcaagttggcaagtaagggacttccccagtggagattggtccccaaaggccaaggatacatgccctggaagagcccttcctggactt

SEQ ID NO: 12757 - DNA, 110 bp, synthetic construct
  source 1..110: mol_type = other DNA
agattggtccccaaaggccaaggatacatgccctggaagagcccttcctggacttgaccttgggttcctagctgtgtgacctaggcaggtcacttcaccttttagagtta

SEQ ID NO: 12758 - DNA, 110 bp, synthetic construct
  source 1..110: mol_type = other DNA
tttgcggtgtgagagttcctccgtctttgtggacagtctcttccacccacgggacgaaggtgatgttagcagagccaggcaggaggtgggggtagcctctcatcgccccg

SEQ ID NO: 12759 - DNA, 110 bp, synthetic construct
  source 1..110: mol_type = other DNA
gaaggtgatgttagcagagccaggcaggaggtgggggtagcctctcatcgccccgtccctccacccacctgggctccgtccgggcagaagcaaggagggtgggaggcagc

SEQ ID NO: 12760 - DNA, 110 bp, synthetic construct; identical to SEQ ID NO: 12758
  source 1..110: mol_type = other DNA

SEQ ID NO: 12761 - DNA, 110 bp, synthetic construct; identical to SEQ ID NO: 12759
  source 1..110: mol_type = other DNA

SEQ ID NO: 12762 - DNA, 110 bp, synthetic construct
  source 1..110: mol_type = other DNA
ctgtatctgctggcctataccacagccacagcagtgagggatccaagccgagtctgtggcttgcactgcagctctcagcaacactggatccttaacctagtgagcgaggc

SEQ ID NO: 12763 - DNA, 110 bp, synthetic construct
  source 1..110: mol_type = other DNA
gagggatccaagccgagtctgtggcttgcactgcagctctcagcaacactggatccttaacctagtgagcgaggctagggattgaacccaagtcctcgttgatactagtc

SEQ ID NO: 12764 - DNA, 110 bp, synthetic construct
  source 1..110: mol_type = other DNA
ctgacttcagtgcagtgccgtccgttacggagcaccatgtgggcccagaggtgtatatgttcaggtctctgaattgggtggatgagggattgaggagctaagggaagaag

SEQ ID NO: 12765 - DNA, 110 bp, synthetic construct
  source 1..110: mol_type = other DNA
tatgttcaggtctctgaattgggtggatgagggattgaggagctaagggaagaagtctaagctgtctggactgtggaggtgggggtggggtgaggaaaagtgacagattt

SEQ ID NO: 12766 - DNA, 110 bp, synthetic construct
  source 1..110: mol_type = other DNA
ggggtacgtcttgggcacacgtggctgaggaacaacgaggggagaaagagcagggaagagcggcttcttccttgatacttttctagctctggccctgtctctgggaaacg

SEQ ID NO: 12767 - DNA, 110 bp, synthetic construct
  source 1..110: mol_type = other DNA
aagagcggcttcttccttgatacttttctagctctggccctgtctctgggaaacgggcacaaatcactgttctctgttcccgggttcttatcagcaccacagaccatagt

SEQ ID NO: 12768 - DNA, 110 bp, synthetic construct
  source 1..110: mol_type = other DNA
catatcaaaggaaagatttcagtgagcctagactcttgcatcttcccatacacagataaaagtgctaaattccttgagaaatctggttctctttaattaatagtaatttt

SEQ ID NO: 12769 - DNA, 110 bp, synthetic construct; identical to SEQ ID NO: 12768
  source 1..110: mol_type = other DNA

SEQ ID NO: 12770 - DNA, 110 bp, synthetic construct
  source 1..110: mol_type = other DNA
cagggcttaaatctgagctgcagctgcaacctacaccacagctacagcaatgccaattcttttaacacactgtgctgggctggagatggaagctgcacctctggagtgac

SEQ ID NO: 12771 - DNA, 110 bp, synthetic construct; identical to SEQ ID NO: 12770
  source 1..110: mol_type = other DNA

SEQ ID NO: 12772 - DNA, 110 bp, synthetic construct
  source 1..110: mol_type = other DNA
ctgggcatcctcccccactgccgacccctcctttattggaaaggtaattagccaggacagctggcagcccatgtgtgtgagggaacgggggctccatggcattgaatgga

SEQ ID NO: 12773 - DNA, 110 bp, synthetic construct
  source 1..110: mol_type = other DNA
tcatgaagctctgatgtgaacggaagctctgcatggctcagctcattctcagggctcctaagccaacatctgcagtttccccagttactctgtgccctaaactctccctg

SEQ ID NO: 12774 - DNA, 110 bp, synthetic construct
  source 1..110: mol_type = other DNA
cactgcgccacgacgggaactccgctatctctgttttctatcagtatcttgcccgaggtgaggccttgtgttctgacatttaaagccctctggattttctctcttgtacc

SEQ ID NO: 12775 - DNA, 110 bp, synthetic construct; identical to SEQ ID NO: 12774
  source 1..110: mol_type = other DNA

SEQ ID NO: 12776 - DNA, 110 bp, synthetic construct
  source 1..110: mol_type = other DNA
gaaaggagaaggctttccccatagctcagttttgaacccctggtcactgagtccctctcttggcacctcctctgtgggattctatctgtcccaacgcttccatcgtcagg

SEQ ID NO: 12777 - DNA, 110 bp, synthetic construct
  source 1..110: mol_type = other DNA
atactagaagcagccccagagaatacaccctctgcatgggatctcggaccatctcttaccattgcaggtggctagaacaggcatagtaacctctgaggtactgaagcatc

SEQ ID NO: 12778 - DNA, 110 bp, synthetic construct
  source 1..110: mol_type = other DNA
ttaccattgcaggtggctagaacaggcatagtaacctctgaggtactgaagcatctcaattattgagactctcacccagtgggctcgggcccaggagttagtgataaggg

SEQ ID NO: 12779 - DNA, 110 bp, synthetic construct
  source 1..110: mol_type = other DNA
gtggctctggggtgatggctttaggggatatggtggggctgacagcctcactgctcctcagttttgaatctccaaatagttaggaatccgtcttgggagttgggagagca

SEQ ID NO: 12780 - DNA, 110 bp, synthetic construct
  source 1..110: mol_type = other DNA
cctcagttttgaatctccaaatagttaggaatccgtcttgggagttgggagagcagggagccggggctgagctgggaagagctgggaatattaatgcgtgtgtgtgtgtg

SEQ ID NO: 12781 - DNA, 110 bp, synthetic construct
  source 1..110: mol_type = other DNA
tgactcatttaatccactcaccctctaaggcagctgtgattacttccttcattctacagatggagaaacagacacagaggaagcagcacaagcagagttctcaaacttgg

SEQ ID NO: 12782 - DNA, 110 bp, synthetic construct
  source 1..110: mol_type = other DNA
tttaccctttcagttcctttccccttccatcacccctgacttcctttgataatttatccaccccttcattcagcagcagcatcccctcccagccagggcaaagggagcta

SEQ ID NO: 12783 - DNA, 110 bp, synthetic construct
  source 1..110: mol_type = other DNA
atccaccccttcattcagcagcagcatcccctcccagccagggcaaagggagctagaccacgggaagaaattgacttcatctcgattccatgccaggactgggaataggg

SEQ ID NO: 12784 - DNA, 110 bp, synthetic construct
  source 1..110: mol_type = other DNA
agctgactcacccaaagccctatggctggtaaagggcaggccaggcagcctgctccatagtctgtgctctaaccactacctcatgctgtctctcctgtggaaagaacatt

SEQ ID NO: 12785 - DNA, 110 bp, synthetic construct
  source 1..110: mol_type = other DNA
catagtctgtgctctaaccactacctcatgctgtctctcctgtggaaagaacattggagatttaggttcaagccctcatctgcatttacttgcagtgtgactttggacga

SEQ ID NO: 12786 - DNA, 110 bp, synthetic construct
  source 1..110: mol_type = other DNA
ttgaaattccggaaacatcaccctgttacctccccaccgaccaatcagaagaaggtccatgagctgctcctgcatccgaagatcttctcctctaagacggcttcaaaagc

SEQ ID NO: 12787 - DNA, 110 bp, synthetic construct
  source 1..110: mol_type = other DNA
tccatgagctgctcctgcatccgaagatcttctcctctaagacggcttcaaaagcccctgcctgaaagctatcggggacttcaggtcttttgaacacaagcacccctcat

SEQ ID NO: 12788 - DNA, 110 bp, synthetic construct
  source 1..110: mol_type = other DNA
ctctttgtgatgggatccttggagatggaatctggttattccccataaacaccgtgctggttgggctcaccccctgaatgtgaccatggggaagctgaagatgggggggg

SEQ ID NO: 12789 - DNA, 110 bp, synthetic construct
  source 1..110: mol_type = other DNA
gctggttgggctcaccccctgaatgtgaccatggggaagctgaagatgggggggggcatgccctgacctatgaacaaccagcttccttcagccatgggtggccaggatgc

SEQ ID NO: 12790 - DNA, 110 bp, synthetic construct
  source 1..110: mol_type = other DNA
aaatatttacccgccagcctggtggaatggcctgcttcccttcctgcctttccgccaccagcagagccccaagggtgagctcagctctcgggccactcagcccctctctg

SEQ ID NO: 12791 - DNA, 110 bp, synthetic construct
  source 1..110: mol_type = other DNA
tgctccctaaggctctgatgttgcaggattcaagctctgggcagtcacgagctctgcttgtttctctccctttgtggaactcgcagcacagggtcatgtgcaagattgaa

SEQ ID NO: 12792 - DNA, 110 bp, synthetic construct
  source 1..110: mol_type = other DNA
gcttgtttctctccctttgtggaactcgcagcacagggtcatgtgcaagattgaaaaataaatggataaataaataaataatgccttttgttggtgcagcgttgaatagt

SEQ ID NO: 12793 - DNA, 110 bp, synthetic construct
  source 1..110: mol_type = other DNA
ccacagcaacgccagacggagctgcatctgcgacctatgctgcagctcgtggcaatgttgcggatccttaacccactgagcgagggtcaagggcctgagttctcatggat

SEQ ID NO: 12794 - DNA, 110 bp, synthetic construct
  source 1..110: mol_type = other DNA
atctgcgacctatgctgcagctcgtggcaatgttgcggatccttaacccactgagcgagggtcaagggcctgagttctcatggatactagtcaggttctttaccactgag

SEQ ID NO: 12795 - DNA, 110 bp, synthetic construct
  source 1..110: mol_type = other DNA
gtctttgtgtgttggcaccaccttcctttagcagagatctagttaatttccattcttttttggtgagttaactgatgtagcttgtgctgtccatggtatcatggaaagca

SEQ ID NO: 12796 - DNA, 110 bp, synthetic construct
  source 1..110: mol_type = other DNA
ttttttggtgagttaactgatgtagcttgtgctgtccatggtatcatggaaagcagagaaagatgaagtccaggagttcccgttgtggcgccatggaaaagaatctgact

SEQ ID NO: 12797 - DNA, 110 bp, synthetic construct
  source 1..110: mol_type = other DNA
gcagcattctgtcaactgtgttttccttcctgtggccctcaggagctgtgatttgagatagccactgtcagagttcctgtcatggcacagtggaaacgagtctgaccagg

SEQ ID NO: 12798 - DNA, 110 bp, synthetic construct
  source 1..110: mol_type = other DNA
gtgactctccaggggctcgagggggttctcgacgcctggagtccagtttcaacgggcaggttgcgggggttctccgcgcctcggaggtctgggtaatttggaccaggctg

SEQ ID NO: 12799 - DNA, 110 bp, synthetic construct
  source 1..110: mol_type = other DNA
gcaggttgcgggggttctccgcgcctcggaggtctgggtaatttggaccaggctgctcattcccaagggtaccttgtgtattcacacgctgccatccaggctctccaggt

SEQ ID NO: 12800 - DNA, 110 bp, synthetic construct
  source 1..110: mol_type = other DNA
tgcctgaagtctcctggggagtgaggaatgacactgagagaaaaacctggtctatttacatagaatcagccagatgttccatggagctgaggtcttttttccaaggcaag

SEQ ID NO: 12801 - DNA, 110 bp, synthetic construct
  source 1..110: mol_type = other DNA
ggtgcttaggaagcaggtattctaatgaagtccatttcaaaaatgagaaagctgaggtttagggccttgaactgtttccttcctcttcttctgtgaagttatttgtaaaa

SEQ ID NO: 12802 - DNA, 110 bp, synthetic construct
  source 1..110: mol_type = other DNA
ggtttagggccttgaactgtttccttcctcttcttctgtgaagttatttgtaaaagggaagcctgcttctcagagttgccctgagaaaaaaacgtttctttataacgact

SEQ ID NO: 12803 - DNA, 110 bp, synthetic construct
  source 1..110: mol_type = other DNA
ctctcttggagcagaaagagtgtagctttgggtttgaatctagtgccttgcccggcttgatgaagatactatctaaatcgctcaaccttttggagctttagtttgccaat

SEQ ID NO: 12804 - DNA, 110 bp, synthetic construct
  source 1..110: mol_type = other DNA
gaacccagaagcctgtgatgaagtcagcagggtggagcgtggtggccctcaccaagctcccaggctggaagaaagggccacgcggactggtcaggaaggcctagatgaag

SEQ ID NO: 12805 - DNA, 110 bp, synthetic construct
  source 1..110: mol_type = other DNA
gctcccaggctggaagaaagggccacgcggactggtcaggaaggcctagatgaagctagttgagtctagaagcttcttagctcctgacgtccctgacaaggtgtaaccaa

SEQ ID NO: 12806 - DNA, 110 bp, synthetic construct
  source 1..110: mol_type = other DNA
ctagagatgatttaattcactatctgaatcctttgaccactgatcatttttatatattgccatctctcccccctgtaagatacgatgtcttccctaacttgaccttctca

SEQ ID NO: 12807 - DNA, 110 bp, synthetic construct
  source 1..110: mol_type = other DNA
attgccatctctcccccctgtaagatacgatgtcttccctaacttgaccttctcagaacttagaactgctcagcccatgctaagttctcgaaatgtgtcatcagcgagtt

SEQ ID NO: 12808 - DNA, 110 bp, synthetic construct
  source 1..110: mol_type = other DNA
tttagggagttgtccatattggctctgggcaaagggagagtatttccctgaattgcagatgcacctttccccacgttttaccctttcttgttttctttcattgggaattt

SEQ ID NO: 12809 - DNA, 110 bp, synthetic construct
  source 1..110: mol_type = other DNA
cccagaggcaagagagatgagtgtttagaaaaaccaccccatggcttagtaggaccaagatgaaaattacatgggctgagagaaggggatggagtgggaagtggcgagag

SEQ ID NO: 12810 - DNA, 110 bp, synthetic construct
  source 1..110: mol_type = other DNA
caagatgaaaattacatgggctgagagaaggggatggagtgggaagtggcgagagagctgggcaggatggagcctgtgttccatgcaaagcggtaagattttctgtcttg

SEQ ID NO: 12811 - DNA, 110 bp, synthetic construct
  source 1..110: mol_type = other DNA
tctggagtccacataagactatggagctttccccgagtgcctgctttcttgctggaagctccgccttgatgtggctgcagagagcttaaaccctggctccaatttctgac

SEQ ID NO: 12812 - DNA, 110 bp, synthetic construct
  source 1..110: mol_type = other DNA
cttcagaatcttatcttgcatggaattccaggtagctagtcccagtttaccagagtaaataaattctcatgaaatgaaatctatttttcctatccttctaccagatcttg

SEQ ID NO: 12813 - DNA, 110 bp, synthetic construct
  source 1..110: mol_type = other DNA
taaataaattctcatgaaatgaaatctatttttcctatccttctaccagatcttgaggtatttttaaagagaagtctggatctgggagagatgaaagcttcatgcaaagg

SEQ ID NO: 12814 - DNA, 110 bp, synthetic construct
  source 1..110: mol_type = other DNA
cattttcctgtaacatacatttttagggtttggagaggcccttagagaccatgtagaggaggggctccgtggagccagggtccctgctgaacgtttacacaagtatgggt

SEQ ID NO: 12815 - DNA, 110 bp, synthetic construct
  source 1..110: mol_type = other DNA
catgtccagaaccttggagtgaggcaccggcactgaaggttcattaaccacctctgctgctgctgagtttgtggaaatgaagtggactcttcccactttggtctgtgttt

SEQ ID NO: 12816 - DNA, 110 bp, synthetic construct
  source 1..110: mol_type = other DNA
gctgctgctgagtttgtggaaatgaagtggactcttcccactttggtctgtgtttagctactgtgctggggacactgtggtaggaacagacctacctgtggctcctctgt

SEQ ID NO: 12817 - DNA, 110 bp, synthetic construct
  source 1..110: mol_type = other DNA
gtgttgacggggctggttcctgtgttcttgctgtttcccctaatgtcttcacattgtggtttaatgaccctcatgtctatacattatcgtcaccaaaagcttgtcggccc

SEQ ID NO: 12818 - DNA, 110 bp, synthetic construct
  source 1..110: mol_type = other DNA
tctcttcccagcacctcccctctttagtagatctgatgtcctcgtgcacagactctggagccctgcttcgccagtcttcctcgaagctcttcctctgcctttccagctcc

SEQ ID NO: 12819 - DNA, 110 bp, synthetic construct
  source 1..110: mol_type = other DNA
tggagccctgcttcgccagtcttcctcgaagctcttcctctgcctttccagctccccaggatctgccctgaaaacccatccccctaactcacatcttcccggcagtaact

SEQ ID NO: 12820 - DNA, 110 bp, synthetic construct
  source 1..110: mol_type = other DNA
aagtcatttctatatttttctgctgtaattttgtaacattatgatgaacgtctctgagcataaagccttcttttttcttcttcgccttccttttcaagttcagtttctag

SEQ ID NO: 12821 - DNA, 110 bp, synthetic construct
  source 1..110: mol_type = other DNA
gagcataaagccttcttttttcttcttcgccttccttttcaagttcagtttctagaaaagaatcccatgactgggattgctgggtcaaatcctacaaacatcctaagggc

SEQ ID NO: 12822 - DNA, 110 bp, synthetic construct
  source 1..110: mol_type = other DNA
gtacagtggggaaaaaaagtgtgttgggggaaataacaataggaaataaaattttaaaaagctatggctaatgtgtactgggcgtcaaccaggggccaagccatgtcaca

SEQ ID NO: 12823 - DNA, 110 bp, synthetic construct
  source 1..110: mol_type = other DNA
aaaaagctatggctaatgtgtactgggcgtcaaccaggggccaagccatgtcacaaaacacttggcttgaagttgcgcctttgattctttcaataacccagggagagagg

SEQ ID NO: 12824 - DNA, 110 bp, synthetic construct
  source 1..110: mol_type = other DNA
agattccacgcagaggcgctatcatatgatgtttttctttcactgtctaacttcacttggtgtgataatctctagggaacatgcccatttgtttccaacggcagagctga

SEQ ID NO: 12825 - DNA, 110 bp, synthetic construct
  source 1..110: mol_type = other DNA
cttggtgtgataatctctagggaacatgcccatttgtttccaacggcagagctgattacctgctacagagaccatgtggcccacagggctgaaatatttatctgcccctt

SEQ ID NO: 12826 - DNA, 110 bp, synthetic construct
  source 1..110: mol_type = other DNA
gcatccttctctgctgccatcttggtctccgcttccttgaggactgagctgatttgtcttcctaccaatatttgaattccacacacagccaagatgaatcaagtgtgttg

SEQ ID NO: 12827 - DNA, 110 bp, synthetic construct
  source 1..110: mol_type = other DNA
gtcttcctaccaatatttgaattccacacacagccaagatgaatcaagtgtgttgggtcaagccaagattgtattaagcattttgcagtcgttggtcttgcaagaagcct

SEQ ID NO: 12828 - DNA, 110 bp, synthetic construct
  source 1..110: mol_type = other DNA
gggtgttgacacaggacatcatccattttctgtctccgggactaacccacagagctgaggtcagcaaagaatgagccagaaagaaaagaagttcaatccaaaggacattg

SEQ ID NO: 12829 - DNA, 110 bp, synthetic construct
  source 1..110: mol_type = other DNA
attcatacaatggaatatgatttagcagctaaaataaagaaagtagatttgcatatttgcataaaggtagttcagaagcacggtattgattataaatgtggaggtggtgg

SEQ ID NO: 12830 - DNA, 110 bp, synthetic construct
  source 1..110: mol_type = other DNA
tttgcataaaggtagttcagaagcacggtattgattataaatgtggaggtggtggtgatggaagtatttttaaggtcactgggactgatcctggcatgatataccatagg

SEQ ID NO: 12831 - DNA, 110 bp, synthetic construct
  source 1..110: mol_type = other DNA
ctgcaggttgatctctatccgccccccttttttgtccctggcgattcatctgtcgaggaatctgcagcatccaatctgacttttcccgctgtctgggttttgctgacttc

SEQ ID NO: 12832 - DNA, 110 bp, synthetic construct
  source 1..110: mol_type = other DNA
aggaatctgcagcatccaatctgacttttcccgctgtctgggttttgctgacttctcactcatggtgcaattccgcgcattcgcctgtgttgcctacaaaagggccactg

SEQ ID NO: 12833 - DNA, 110 bp, synthetic construct
  source 1..110: mol_type = other DNA
acttgtccagagccaggtggtaagtgctaacagttcctgtgacaccatttaagtatcctggaccttattgctgcccttgtatgtgagcaaaacctgtcctgcttagtttt

SEQ ID NO: 12834 - DNA, 110 bp, synthetic construct
  source 1..110: mol_type = other DNA
tcctggaccttattgctgcccttgtatgtgagcaaaacctgtcctgcttagttttccacacagcagccacacacctgccagtgtcatcttgaagggctgaactgctgcat

SEQ ID NO: 12835 - DNA, 110 bp, synthetic construct
  source 1..110: mol_type = other DNA
gagtaaccgtcccctccatccctatcactctgagctagctttgcttggtggagggtggaggaaggagacagggattctaggcagagagcagaaaaatgtggaccagaaag

SEQ ID NO: 12836 - DNA, 110 bp, synthetic construct
  source 1..110: mol_type = other DNA
tggaggaaggagacagggattctaggcagagagcagaaaaatgtggaccagaaagagatgcggcaaggctgggaaacagcagaaaatctgggaggatggggcaaggaagg

SEQ ID NO: 12837 - DNA, 110 bp, synthetic construct
  source 1..110: mol_type = other DNA
cggagggcagatctagtttccctttttacattgaattgtgagaacccagcaatagaaacatttaattggtcagagctgagagcaagccaacagctatgatgccatctttc

SEQ ID NO: 12838 - DNA, 110 bp, synthetic construct
  source 1..110: mol_type = other DNA
ttccgggttagtttcccaatagtgttatttcctacctggaacgcctcctcccctctctgttaaaaagacacagggaagtaaaagaaggaatactggaattctgatcccag

SEQ ID NO: 12839 - DNA, 110 bp, synthetic construct
  source 1..110: mol_type = other DNA
tctgttaaaaagacacagggaagtaaaagaaggaatactggaattctgatcccagagctgatggtgtgacccagggcgaactgatgactctctctgggcctcagtttcct

SEQ ID NO: 12840 - DNA, 110 bp, synthetic construct
  source 1..110: mol_type = other DNA
tgactttggggaaatcagtttagggaatcagatgtaaactcagctcgggtctgtagatatccaaattaaccaacattgggctggatctgagagaggctatttgggggcca

SEQ ID NO: 12841 - DNA, 110 bp, synthetic construct
  source 1..110: mol_type = other DNA
actggacaattcagcctttgttcaaggttgttaaggaagttggctggaaggctcagacaggtaatgtcttgacctggtagagccaggagccgggtggaagcaggtaggga

SEQ ID NO: 12842 - DNA, 110 bp, synthetic construct
  source 1..110: mol_type = other DNA
gacaggtaatgtcttgacctggtagagccaggagccgggtggaagcaggtagggacaagtaaggccgctggccaactggagcacaggtaccctgcctagaggcatcctag

SEQ ID NO: 12843 - DNA, 110 bp, synthetic construct
  source 1..110: mol_type = other DNA
tccttatagaccaatttgtcctagaacagagcagacagtaaaaaaagactgttggtagcagggtccactgtattatgcatgacattcatttgctaatttgcatttccttc

SEQ ID NO: 12844 - DNA, 110 bp, synthetic construct
  source 1..110: mol_type = other DNA
ggtactgtagctgctgcattataggtatttcttacaggcagccaggatgccagggggccataggactctgcttcttcactctctggaggagggtctgtcggtctgtgcag

SEQ ID NO: 12845 - DNA, 110 bp, synthetic construct
  source 1..110: mol_type = other DNA
tggcgtccaagtcttatttatctttgtactgccaggacctcgcagagtatttgacacttaacggttgctcattgatattgaaggagctaaggaatgccttgtctttcatt

SEQ ID NO: 12846 - DNA, 110 bp, synthetic construct
  source 1..110: mol_type = other DNA
acttaacggttgctcattgatattgaaggagctaaggaatgccttgtctttcatttcaaaaacccctcatcatctcaggttctttgatacttcgatcgttcatcagtcaa

SEQ ID NO: 12847 - DNA, 110 bp, synthetic construct
  source 1..110: mol_type = other DNA
tttttcccccatggcagaatccttgcatggaacaaaagctgtagcacagccccaatatataacacagataaagggagaggggctccggatcaactgcaaatggggacctc

SEQ ID NO: 12848 - DNA, 110 bp, synthetic construct
  source 1..110: mol_type = other DNA
gtttcctttgggctcaccagcttacctggaggtggctgcaatctctgatgactgtggcatcctttgctgcagatgtggcaggcaagattttatttctcacatctcagagc

SEQ ID NO: 12849 - DNA, 110 bp, synthetic construct
  source 1..110: mol_type = other DNA
gaggcatcctctttatacctgtaaaaagaaaaaggaaagaagaaaattacagaaaacttgacactccttggttctcccacctcggaaagcaatttcacaccatccagaag

SEQ ID NO: 12850 - DNA, 110 bp, synthetic construct
  source 1..110: mol_type = other DNA
acttgacactccttggttctcccacctcggaaagcaatttcacaccatccagaagagctgaagatgcacgtgctttagctgtccactaactactccacctctaggtggct

SEQ ID NO: 12851 - DNA, 110 bp, synthetic construct
  source 1..110: mol_type = other DNA
tcggcttagagaagccggagctgaaataatctgtctaagaaaaatcatgtgctcgagtttcaccttctcgcttaagggcaaaaacctattttctctttcgattccttcat

SEQ ID NO: 12852 - DNA, 110 bp, synthetic construct
  source 1..110: mol_type = other DNA
gagagttgctgttttaccccattgaacattttgtagaatgttcctggggagacagttttaaagtatgtcctgtagcttgtctttagctgaggaaggatgacaagtggcca

SEQ ID NO: 12853 - DNA, 110 bp, synthetic construct
  source 1..110: mol_type = other DNA
tctccctggctgttttcagcagtgtccattcctcctttgatggcttttaatgtggtcttcatttctcagggtttttgttttttttttttttcttgagctcttgcagttta

SEQ ID NO: 12854 - DNA, 110 bp, synthetic construct
  source 1..110: mol_type = other DNA
ccattcctcctttgatggcttttaatgtggtcttcatttctcagggtttttgttttttttttttttcttgagctcttgcagtttatctccttgaaaaaaaatttaagtat

SEQ ID NO: 12855 - DNA, 110 bp, synthetic construct
  source 1..110: mol_type = other DNA
cagttattatccgtcttttttttccaaaatgtttcaaggcctcactttatgtatatggtcaatcaaaaggatcccctggaatgaacatacattttgagtcctctcataag

SEQ ID NO: 12856 - DNA, 110 bp, synthetic construct
  source 1..110: mol_type = other DNA
attatattcctaggaaggttactcatcccttaccatgactcagaattctagcaattatcgattgtagtatttgtgtttgtattgtcacctgtatatgatcagcagaagta

SEQ ID NO: 12857 - DNA, 110 bp, synthetic construct
  source 1..110: mol_type = other DNA
tatcgattgtagtatttgtgtttgtattgtcacctgtatatgatcagcagaagtattaggaggagcagggtgggaatgggcaactataggatggggctgaactgaaggta

SEQ ID NO: 12858 - DNA, 110 bp, synthetic construct
  source 1..110: mol_type = other DNA
tgtcactcaagtccttgactttggccccaatgcctgtcactcttccagcctctgtgggaatgatcttaggacagtctgtcccattggagtgctggttagctatagaaaga

SEQ ID NO: 12859 - DNA, 110 bp, synthetic construct
  source 1..110: mol_type = other DNA
agctgaagcctaagaaacctacagtctcaaagcaggaggtggaggaagataatggagaaagtcagatgctgtcaaagtgtatcgcgtttcttctccttactttctattaa

SEQ ID NO: 12860 - DNA, 110 bp, synthetic construct
  source 1..110: mol_type = other DNA
agaaagtcagatgctgtcaaagtgtatcgcgtttcttctccttactttctattaaagggagacctgtctggcacatgacacgaattcactaagtggttaaacaggtctct

SEQ ID NO: 12861 - DNA, 110 bp, synthetic construct
  source 1..110: mol_type = other DNA
aagaggaaaaagacagagcctctgcttattgtttagtgggggtgaggcaaatgtacacagaaatcattgcagaacagcttcctgcatgctaaaacaaggagaggcgggga

SEQ ID NO: 12862 - DNA, 110 bp, synthetic construct
  source 1..110: mol_type = other DNA
tgaaatgtgcctcttactgtctccactactgagaaagtgaattgctcctgtcgggttatttttccatcatcccgggaccatcagcagctctctaataaaatgctctagat

SEQ ID NO: 12863 - DNA, 110 bp, synthetic construct
  source 1..110: mol_type = other DNA
cattaaccactgagccacgacgggaactcctagagcgtctcactcttaagctgccttagttgggatgattgccctgcatcatctgtctgtaaaatatttgaggtctctgg

SEQ ID NO: 12864 - DNA, 110 bp, synthetic construct
  source 1..110: mol_type = other DNA
ttagttgggatgattgccctgcatcatctgtctgtaaaatatttgaggtctctggggacacgtcgtaaaagaaataaacatctctttatgggttccccacaaggagccta

SEQ ID NO: 12865 - DNA, 110 bp, synthetic construct
  source 1..110: mol_type = other DNA
atgtctcacctgcttaacgtgtccacccggtaccctctcggagccctgtcatgctttcactcatcttaagaaacatctaaggtgttcccgtcatggctcaggggtaacga

SEQ ID NO: 12866 - DNA, 110 bp, synthetic construct
  source 1..110: mol_type = other DNA
aacgtgtccacccggtaccctctcggagccctgtcatgctttcactcatcttaagaaacatctaaggtgttcccgtcatggctcaggggtaacgaacccaactagtatcc

SEQ ID NO: 12867 - DNA, 110 bp, synthetic construct
  source 1..110: mol_type = other DNA
accttgtgagaaagctgagtgctgcaatacttggtgaaaaggtctcattagagatgaaacgttcccctgcagtagtgcagtgagggcggtcctgtgtggggcaggtgggg

SEQ ID NO: 12868 - DNA, 110 bp, synthetic construct
  source 1..110: mol_type = other DNA
gaaacgttcccctgcagtagtgcagtgagggcggtcctgtgtggggcaggtgggggggtgcacaagtatctattttagtttgattcatctatgtttcttggtctgctctg

SEQ ID NO: 12869 - DNA, 110 bp, synthetic construct
  source 1..110: mol_type = other DNA
tggcatgatcatgtgaatggaagaaaaagcctgcaagaaaatacattgaggagttaccattgtggttcatcggaaacaaatttgactagtattcattaagatgtgggttc

SEQ ID NO: 12870 - DNA, 110 bp, synthetic construct
  source 1..110: mol_type = other DNA
accattgtggttcatcggaaacaaatttgactagtattcattaagatgtgggttcaataattggcctgctcagtgggtcgggtggggatccagcatagccacatagccgt

SEQ ID NO: 12871 - DNA, 110 bp, synthetic construct
  source 1..110: mol_type = other DNA
ggagtccagaccccaaaccttcaatctttcctccctacacccaagagttatgtgctctggctgcattggaccggggtgagaaagttaagaccagagaagtgtcccaaatg

SEQ ID NO: 12872 - DNA, 110 bp, synthetic construct
  source 1..110: mol_type = other DNA
gaaacaactagggggatatgggataaagtaatgggaggcggctaactataacacggtattcagggaaaaacctccctgacaaagcagcacttgtgccctggagtgaagga

SEQ ID NO: 12873 - DNA, 110 bp, synthetic construct
  source 1..110: mol_type = other DNA
gtattcagggaaaaacctccctgacaaagcagcacttgtgccctggagtgaaggatgaaatggaacctgtcaggtgaagagccaggaatgagctggccgggaagatagga

SEQ ID NO: 12874 - DNA, 110 bp, synthetic construct
  source 1..110: mol_type = other DNA
ccacagtagcccatcttaattccacacgaacatgtccagtggggtaaaacacagctgacccttgaacacaggcttgcagatcaactttgacacagattttttttgacaag

SEQ ID NO: 12875 - DNA, 110 bp, synthetic construct
  source 1..110: mol_type = other DNA
tgacccttgaacacaggcttgcagatcaactttgacacagattttttttgacaagagcaaatacaacagtactacacaacctgtgttatctgagatgtgaaatcacggat

SEQ ID NO: 12876 - DNA, 110 bp, synthetic construct
  source 1..110: mol_type = other DNA
cgggaacttccaaagccatctatttctgaaactcctccaggaggtaacacagacgcacagtgagctgcaaaatcaggtccaagttctggattttaggtcttagaaaacca

SEQ ID NO: 12877 - DNA, 110 bp, synthetic construct
  source 1..110: mol_type = other DNA
tgtgtgttcgaggagctcattcttcgacggccgcgaacgagaacctggattccggtatcactctcacagtgaggaggctagaagcctgaaatcaaggtgcaagcaggctt

SEQ ID NO: 12878 - DNA, 110 bp, synthetic construct
  source 1..110: mol_type = other DNA
atatggaaagcagcatttttgaaatcctgttttctttttctcttgtaaatttctaggaaaaaaaaaaaaaaccaaaaaactctctggcccttgaagcattttcctttgca

SEQ ID NO: 12879 - DNA, 110 bp, synthetic construct
  source 1..110: mol_type = other DNA
cctgtttttatttttttaatggctgcacctgcagcttgtgaaaattcccaggccaggagattgaatccaagctgcagatgcagcaccgctggatcctttaacccactgca

SEQ ID NO: 12880 - DNA, 110 bp, synthetic construct
  source 1..110: mol_type = other DNA
ggagattgaatccaagctgcagatgcagcaccgctggatcctttaacccactgcaccagcccagggatcgaacccaagcctctgcaacatcctgggatgctgcagtcgaa

SEQ ID NO: 12881 - DNA, 110 bp, synthetic construct
  source 1..110: mol_type = other DNA
tgagccacaacaggaactccaggaatgcctcactcttaatatttttggtgtaagacttcacagacttaagagtttttatcttctctgacataagtagtcatatcatatct

SEQ ID NO: 12882 - DNA, 110 bp, synthetic construct
  source 1..110: mol_type = other DNA
atatgttgcatgtctggtagtagcctagccttgttcccagtctttatcttaactagtttcccttggcgagctcaacagctgctggctctatccatcattcctttgctgag

SEQ ID NO: 12883 - DNA, 110 bp, synthetic construct
  source 1..110: mol_type = other DNA
gtttcccttggcgagctcaacagctgctggctctatccatcattcctttgctgagctaactgtaactgttcctttcttcccgtctgatggcagacccccaccttaaggcc

SEQ ID NO: 12884 - DNA, 110 bp, synthetic construct
  source 1..110: mol_type = other DNA
cacaggtgttcgctatgcaaagacccgccccaagagagcttatttccccagccagggagcaagccgcccagtggtcagagctttgttggctgatggtagcttcagacgcg

SEQ ID NO: 12885 - DNA, 110 bp, synthetic construct
  source 1..110: mol_type = other DNA
ctcccagcttcggagtagaacccgagatccagtccaaagctgagcagtgtatcacaagtctctgtgccccctgattgcctcgagggcgggcaggtgacctaagccggccc

SEQ ID NO: 12886 - DNA, 110 bp, synthetic construct
  source 1..110: mol_type = other DNA
gactaagaggtaacttcatttccaagatcagggaagagctcatgggacttgagcacctagaatatggccaatactccaagaagcttgtgtgtgtgtatcttttccattaa

SEQ ID NO: 12887 - DNA, 110 bp, synthetic construct
  source 1..110: mol_type = other DNA
cctagaatatggccaatactccaagaagcttgtgtgtgtgtatcttttccattaacgaccttctccctcctcctggaaataacgaccattctgacttctcctgctttgtg

SEQ ID NO: 12888 - DNA, 110 bp, synthetic construct
  source 1..110: mol_type = other DNA
tctttagatgcactgtgggactgtagcgtgggtgctgggattgctctttaaagatgaggaagacggttcagtggggtgaggcgtcgtggtcccccagggcctgtgctgag

SEQ ID NO: 12889 - DNA, 110 bp, synthetic construct
  source 1..110: mol_type = other DNA
gaggaagacggttcagtggggtgaggcgtcgtggtcccccagggcctgtgctgagaacattcccagaggctggcatgcctgtaaaatggcatagggctgcagagtgtgtg

SEQ ID NO: 12890 - DNA, 110 bp, synthetic construct
  source 1..110: mol_type = other DNA
gccctggtgatcagctgcttctctggagacagagtcattcgagggagcgcttgcaatttttaatgataataaaatgactcagcgccccgcagaatgctttggagagagag

SEQ ID NO: 12891 - DNA, 110 bp, synthetic construct
  source 1..110: mol_type = other DNA
atttttaatgataataaaatgactcagcgccccgcagaatgctttggagagagagcagccttggactccaaggaaaaggccaaagggaggagcagagagtttgacacgcc

SEQ ID NO: 12892 - DNA, 110 bp, synthetic construct
  source 1..110: mol_type = other DNA
ggaccccagccggcaggaaggcatctctctctgcctttgaccccccggagaacccgcaggggtgtgtgcctgggtggtgagactttatgctttccttttttgctttcttt

SEQ ID NO: 12893 - DNA, 110 bp, synthetic construct
  source 1..110: mol_type = other DNA
gcaggggtgtgtgcctgggtggtgagactttatgctttccttttttgctttctttctattctgaattcagccagcttctcagtgaatttgtcagaaagaaccacagatat

SEQ ID NO: 12894 - DNA, 110 bp, synthetic construct
  source 1..110: mol_type = other DNA
ggtcgaatctgagctacagctgccctcctacactacagccacaacaacataggatccgagccacatctttggcctacaccacacagctcacagcaacaccagatcgttaa

SEQ ID NO: 12895 - DNA, 110 bp, synthetic construct; identical to SEQ ID NO: 12894
  source 1..110: mol_type = other DNA

SEQ ID NO: 12896 - DNA, 110 bp, synthetic construct
  source 1..110: mol_type = other DNA
tactgctgagccacacagggaactccagggcacctgtcttttgaggcgaatatttctcccaggaaaagaggtgaacaggaaggagaaacttgctcctaccctctttccta

SEQ ID NO: 12897 - DNA, 110 bp, synthetic construct
  source 1..110: mol_type = other DNA
ctcccaggaaaagaggtgaacaggaaggagaaacttgctcctaccctctttcctatcctgagacggaagtctggagccaagaggagaccccgctgagctctctcatctcc

SEQ ID NO: 12898 - DNA, 110 bp, synthetic construct
  source 1..110: mol_type = other DNA
ggaagtcagtgtgaaagttcacacagtgagcacctgtccatgagggcggggacggtgtcacttctctttgatgttctagctcctggctcctagcccagtgcccaggacac

SEQ ID NO: 12899 - DNA, 110 bp, synthetic construct
  source 1..110: mol_type = other DNA
atcagagccctgttggcaattacgctgcagcctgcagcaacaccgacccacatccgcacagacactatgttgggttcttaacctgctgagctacaacaggaactccacat

SEQ ID NO: 12900 - DNA, 110 bp, synthetic construct
  source 1..110: mol_type = other DNA
gcacagacactatgttgggttcttaacctgctgagctacaacaggaactccacattaacctattttaatattggcattcttatgccagaactaagtgagaacaggtgtcc

SEQ ID NO: 12901 - DNA, 110 bp, synthetic construct
  source 1..110: mol_type = other DNA
acccccactttaaagtcttttcgtatctaatgcagaagtctagcctagtgtaaaaggatggaaattacttgctaacccaatttaaagaatctctctttgtgaaagaatca

SEQ ID NO: 12902 - DNA, 110 bp, synthetic construct
  source 1..110: mol_type = other DNA
tggagagcggttgcagatgatgggatgacaaacctggtaggatccacttcaaaactaacatgttgccaatcagaggatgtgatcacaatccgtaataaaggatccaggag

SEQ ID NO: 12903 - DNA, 110 bp, synthetic construct
  source 1..110: mol_type = other DNA
aacaaaaacaaacaacccctccactaattataaaagatacaccccaatgttctcagcagcgttatttacaactgccaagatacagaaacaacctaagtgtccatcaacag

SEQ ID NO: 12904 - DNA, 110 bp, synthetic construct
  source 1..110: mol_type = other DNA
gatacaccccaatgttctcagcagcgttatttacaactgccaagatacagaaacaacctaagtgtccatcaacagtcgaatggataaagagcatgtgctatgtacataca

SEQ ID NO: 12905 - DNA, 110 bp, synthetic construct
  source 1..110: mol_type = other DNA
aaaatggataaaagtggagctgtgataaacaaaacctgaaaaccttcaaaatatgacaagaacagaattttttttaattcatgatccaaatctggtcaggtactatctac

SEQ ID NO: 12906 - DNA, 110 bp, synthetic construct
  source 1..110: mol_type = other DNA
acaagaacagaattttttttaattcatgatccaaatctggtcaggtactatctactcaatatactcacatcagagctgaaggtttcacaactaccttttaatgagtttgc

SEQ ID NO: 12907 - DNA, 110 bp, synthetic construct
  source 1..110: mol_type = other DNA
atcccaacagatgtggcactgtaaaggcctgaacaccccaacccaattctgggcaactcaaaggctcattctagctccagagctcccaaagtagcacagcagaagtgaat

SEQ ID NO: 12908 - DNA, 110 bp, synthetic construct
  source 1..110: mol_type = other DNA
aatgcatgaaaagatgctcactagacattagggaactcaaaatcataatgatataccactccatgcccaccggatggctgtagctaaaaatttttttaaagaaaattttt

SEQ ID NO: 12909 - DNA, 110 bp, synthetic construct
  source 1..110: mol_type = other DNA
ccactccatgcccaccggatggctgtagctaaaaatttttttaaagaaaatttttcttttaaaaaagtgttggcaaggatgtggaacaattagtactctcatatactgct

SEQ ID NO: 12910 - DNA, 110 bp, synthetic construct
  source 1..110: mol_type = other DNA
agaagcaagcaacttcttaggactgagacacccatttccccagctgctgggagcgctgggtggccaatagctctcaaggcttctaccctttccaggaattgccatcagca

SEQ ID NO: 12911 - DNA, 110 bp, synthetic construct
  source 1..110: mol_type = other DNA
gtgtacactttatgctaaggaagctgcagttagtttagtctttgtaatcacagtgagatgctgcagggcttcatatgatgaggaaataattctcaccttggaatgttaac

SEQ ID NO: 12912 - DNA, 110 bp, synthetic construct
  source 1..110: mol_type = other DNA
atgtggaaacattcaaactggctgcaccgttttccatactttgaagcactttgggtatagttctaaactaaaatcaaatcattcacctttgggagttcccgttatggctc

SEQ ID NO: 12913 - DNA, 110 bp, synthetic construct
  source 1..110: mol_type = other DNA
tcactgcacatagtgggaaaagaagacaccaaatgatcgtgatagcagaatgactggctaatgtgcataaaacataaaattagatcccttcctcacactgcactcagaga

SEQ ID NO: 12914 - DNA, 110 bp, synthetic construct
  source 1..110: mol_type = other DNA
actggccgccacatgatggctggggctcagggacctgcttgttctgttcggcctgcccctcattttgaaaacaacagaatcgaaatgcttgtagacaggtgggaagagtc

SEQ ID NO: 12915 - DNA, 110 bp, synthetic construct
  source 1..110: mol_type = other DNA
cccctcattttgaaaacaacagaatcgaaatgcttgtagacaggtgggaagagtcacgacctgcagacccccccccccccccgctactgcctcccacctggctggcggca

SEQ ID NO: 12916 - DNA, 110 bp, synthetic construct
  source 1..110: mol_type = other DNA
agcctgagaacctccatatgccgtgggtgtggcccttctaggtaaaaagacaaggaaaaaaaaaaatggggaagaagatgaagctgtgcccgtacgccctagagaagaat

SEQ ID NO: 12917 - DNA, 110 bp, synthetic construct
  source 1..110: mol_type = other DNA
aaaaaaaaaaatggggaagaagatgaagctgtgcccgtacgccctagagaagaatttgggaggtaaaagaactcacaggtattgactactgtgtgtcaggccttctgctt

SEQ ID NO: 12918 - DNA, 110 bp, synthetic construct
  source 1..110: mol_type = other DNA
gagtgagtggccctgctgctttcttgggaagaaacgtgtgcctggctgttcccgtgtcttttcccggcagcaatgctaggagcaacgctggtggcgatagcaaggtggcg

SEQ ID NO: 12919 - DNA, 110 bp, synthetic construct
  source 1..110: mol_type = other DNA
cgggtgaggactgaggctcctgcccttttggggcctgaagggggagtgtctagagcagccaggctggggcaggttgggggtgattttctttttagggccacacctgcagc

SEQ ID NO: 12920 - DNA, 110 bp, synthetic construct
  source 1..110: mol_type = other DNA
gtgtctagagcagccaggctggggcaggttgggggtgattttctttttagggccacacctgcagcacttggaggttctcaggccaggggtcgagtcagctgcagctgcca

SEQ ID NO: 12921 - DNA, 110 bp, synthetic construct
  source 1..110: mol_type = other DNA
cagtgatctctggaggctgaccttcccctgctttacagcaggcgagatctaaaggctcagagactttctgtctatggccttcggtcctttagctggtaggaggtggggga

SEQ ID NO: 12922 - DNA, 110 bp, synthetic construct
  source 1..110: mol_type = other DNA
ctcagagactttctgtctatggccttcggtcctttagctggtaggaggtgggggaggtgagatttgaacttgagtctctctgactctcgtccctgtgatcttccccatga

SEQ ID NO: 12923 - DNA, 110 bp, synthetic construct
  source 1..110: mol_type = other DNA
atggtcctggctcttggtctcatccctctcagaaatgcctgggtccttgctcttggaacctggccaaaccctttcacctccctaagcctcagtttcctactctgccaaat

SEQ ID NO: 12924 - DNA, 110 bp, synthetic construct
  source 1..110: mol_type = other DNA
gagacggggcagagagggtccctgagccaccttctcaaccacggagtgccctggctgtctaaaacccatcatcagtcatgccaggtttccagaactgcacgccttctcca

SEQ ID NO: 12925 - DNA, 110 bp, synthetic construct
  source 1..110: mol_type = other DNA
tgtctaaaacccatcatcagtcatgccaggtttccagaactgcacgccttctccacccctcagtcctgctaaagccccttagcccactcctgactcctcctctgcccggg

SEQ ID NO: 12926 - DNA, 110 bp, synthetic construct
  source 1..110: mol_type = other DNA
tctcccagtcttgaagtgccaccatgtgcagtagcgtgttggggctctgagactctggtggtaaagcaacatgtttgccttcattcagctaagcaatcagagcagaacac

SEQ ID NO: 12927 - DNA, 110 bp, synthetic construct
  source 1..110: mol_type = other DNA
tggtggtaaagcaacatgtttgccttcattcagctaagcaatcagagcagaacacatggacaaggcttccaacagcctgaccagctctaacctctggctgcctctaggat

SEQ ID NO: 12928 - DNA, 110 bp, synthetic construct
  source 1..110: mol_type = other DNA
ttggtaattattatgccattaattatgcattcattcatgcacatctattaagcctcaaatatgggacaggtcctgtgctaaatgctgggaacccaacacagcatagcagc

SEQ ID NO: 12929 - DNA, 110 bp, synthetic construct
  source 1..110: mol_type = other DNA
caaatatgggacaggtcctgtgctaaatgctgggaacccaacacagcatagcagctctagtgtgaggaagcctggattcaagttctgccttatcctctaccagctgtgtg

SEQ ID NO: 12930 - DNA, 110 bp, synthetic construct
  source 1..110: mol_type = other DNA
ttgagaaacaatcctccacgttttcaagaggcagcttgggccctcttccttgcttcagcatctcagtccagagccaaacctctgcttcaacttgtcttcatgcttcccag

SEQ ID NO: 12931 - DNA, 110 bp, synthetic construct
  source 1..110: mol_type = other DNA
tacccggttatctgtgttaccttccgcaggacagggactctgccgtattagtcacccctccacacttaacagtgcccagaacataatagaggctcaataaacatgcactg

SEQ ID NO: 12932 - DNA, 110 bp, synthetic construct
  source 1..110: mol_type = other DNA
ccctccacacttaacagtgcccagaacataatagaggctcaataaacatgcactgagtcccacttaccggaaggcaactcagattgggaggaaaggggactggcctgagt

SEQ ID NO: 12933 - DNA, 110 bp, synthetic construct
  source 1..110: mol_type = other DNA
aagcagctgactcgggaaaatgcacccgagctgcttctgtggttctttgcatctgtctgcaagaccgttgagcagcagagattcacttctggcctgaactcattcttgag

SEQ ID NO: 12934 - DNA, 110 bp, synthetic construct
  source 1..110: mol_type = other DNA
gaagatcctaataggctagcctctgaattggaagacgttaatttctcctgtctcttttcattaactatttgcatccaccctgcgagatagctagggcaggtgtatttatt

SEQ ID NO: 12935 - DNA, 110 bp, synthetic construct
  source 1..110: mol_type = other DNA
tttcattaactatttgcatccaccctgcgagatagctagggcaggtgtatttattctcatttcacagatgaggacacagatgtccagtgaggttaaggagtaggatttct

SEQ ID NO: 12936 - DNA, 110 bp, synthetic construct
  source 1..110: mol_type = other DNA
tgattttttgagttgaaccttttgattaagtcctaattgcatccttttgtgggcttctgtatacaaaggattgcccaggtgccggctcagggtgtgaacatgtgctcttg

SEQ ID NO: 12937 - DNA, 110 bp, synthetic construct
  source 1..110: mol_type = other DNA
tctgtatacaaaggattgcccaggtgccggctcagggtgtgaacatgtgctcttgatttggaaatgatggcctgtctaggcaggtacctagaggtgaagtatctgaccaa

SEQ ID NO: 12938 - DNA, 110 bp, synthetic construct
  source 1..110: mol_type = other DNA
ctgttttatgtcagtgtgtctatcatggtgctattactataccatcttgatttttgtagctttatagtaagtttcgaaatcaggtaatgcaatacctttaactttgttct

SEQ ID NO: 12939 - DNA, 110 bp, synthetic construct
  source 1..110: mol_type = other DNA
gtagctttatagtaagtttcgaaatcaggtaatgcaatacctttaactttgttcttcaaaactgcatattcttggagttcctgttgtggcccagcaggtatccatgagga

SEQ ID NO: 12940 - DNA, 110 bp, synthetic construct; identical to SEQ ID NO: 12938
  source 1..110: mol_type = other DNA

SEQ ID NO: 12941 - DNA, 110 bp, synthetic construct; identical to SEQ ID NO: 12939
  source 1..110: mol_type = other DNA

SEQ ID NO: 12942 - DNA, 110 bp, synthetic construct
  source 1..110: mol_type = other DNA
gatattccaaacggagggaataactgttagcatcttttatggaatggttagcgtttaaatgcaaataatgagaaatgaagctgttagggccaagtcatggatggtcttga

SEQ ID NO: 12943 - DNA, 110 bp, synthetic construct
  source 1..110: mol_type = other DNA
taaatgcaaataatgagaaatgaagctgttagggccaagtcatggatggtcttgaatatcgaactagggaaattatctttatttagtaggcattttagggcccagtgaaa

SEQ ID NO: 12944 - DNA, 110 bp, synthetic construct; identical to SEQ ID NO: 12942
  source 1..110: mol_type = other DNA

SEQ ID NO: 12945 - DNA, 110 bp, synthetic construct; identical to SEQ ID NO: 12943
  source 1..110: mol_type = other DNA

SEQ ID NO: 12946 - DNA, 110 bp, synthetic construct
  source 1..110: mol_type = other DNA
tttcactgaggtagaaatagtcttgtctcctaacagagaccttatcttacagttaagagaatcagagtatgctacagagttcattcaattcaaacttcttggaactgtcc

SEQ ID NO: 12947 - DNA, 110 bp, synthetic construct
  source 1..110: mol_type = other DNA
agagaatcagagtatgctacagagttcattcaattcaaacttcttggaactgtcctacactttggtgggagcataaattggtacaaccactatggaaaacagtatagagt

SEQ ID NO: 12948 - DNA, 110 bp, synthetic construct
  source 1..110: mol_type = other DNA
taagaaggtgtttcattttcacaatttctgaagagggtagctgagagcaggtcagcacaatgaagaatcgagccaagagaggaggcagaattcaaagatgctggcaagga

SEQ ID NO: 12949 - DNA, 110 bp, synthetic construct
  source 1..110: mol_type = other DNA
agttcatacctggcatgactttcagaagtgggtcaagctggaagctgtattgtttctctcttaaacaggtcgtcccagaagaggttcttgtagtctcctagtttctcctc

SEQ ID NO: 12950 - DNA, 110 bp, synthetic construct
  source 1..110: mol_type = other DNA
ctctcttaaacaggtcgtcccagaagaggttcttgtagtctcctagtttctcctctttccataccttattctattactttttacagaccaccgaacattaagttccttta

SEQ ID NO: 12951 - DNA, 110 bp, synthetic construct
  source 1..110: mol_type = other DNA
acactgcaccacaaagggaactccagatgtttgtttttacagtgtactcacttgtccttggaagtcttctgggccatttgtcttttttcttttcttttcttttttttctt

SEQ ID NO: 12952 - DNA, 110 bp, synthetic construct; identical to SEQ ID NO: 12951
  source 1..110: mol_type = other DNA

SEQ ID NO: 12953 - DNA, 110 bp, synthetic construct
  source 1..110: mol_type = other DNA
atgatacagttgtcaaacgtgcaggagcgaagcaatttgagttgggagaccaagtgagggtcctgcttgttcagcaagtcatgaatctcccatctaacgtcaggcgtatc

SEQ ID NO: 12954 - DNA, 110 bp, synthetic construct
  source 1..110: mol_type = other DNA
gagggtcctgcttgttcagcaagtcatgaatctcccatctaacgtcaggcgtatcgatggggatgtgaatgtggagagctagcaaatggagcaggtgctcactggatgtg

SEQ ID NO: 12955 - DNA, 110 bp, synthetic construct
  source 1..110: mol_type = other DNA
gaagccaggtcccagctcctgggctcagctggcacctgccctgcctctcacctcccaagtgcagtgagttcacacttgaaggctggctcagccccgagatgcctcctgca

SEQ ID NO: 12956 - DNA, 110 bp, synthetic construct
  source 1..110: mol_type = other DNA
cagtaaggcgaggtgtgtctggtcagccccctcagggcagtgaggtgtggtccctaagtgtggccacaatcagcactggaccgcatggagccaggttctctggcttctgg

SEQ ID NO: 12957 - DNA, 110 bp, synthetic construct
  source 1..110: mol_type = other DNA
aagtgtggccacaatcagcactggaccgcatggagccaggttctctggcttctggaggtccagggagtaggattagaagacggagccagcctggacagaccctggagtag

SEQ ID NO: 12958 - DNA, 110 bp, synthetic construct
  source 1..110: mol_type = other DNA
agacagaatactcagatgctaagatggtctgcagctaatgtcttgccaggattgtccctctggagtgtgtttggcggtgtagagggggctcctgaggcctgagactccgg

SEQ ID NO: 12959 - DNA, 110 bp, synthetic construct
  source 1..110: mol_type = other DNA
ccctctggagtgtgtttggcggtgtagagggggctcctgaggcctgagactccggagatgtggttttcagttttaactaggtggctctggcatgtcatttctcccctgaa

SEQ ID NO: 12960 - DNA, 110 bp, synthetic construct
  source 1..110: mol_type = other DNA
cccttctaccggaaaacaagttcccacagactcccagatccagaagtgttcaggtctggacctctgcttgtcccttcagtccacggttttcccagggtggggctgtgcct

SEQ ID NO: 12961 - DNA, 110 bp, synthetic construct
  source 1..110: mol_type = other DNA
ctggacctctgcttgtcccttcagtccacggttttcccagggtggggctgtgcctccatccaactgggagcgacccccttttaggggcagtgtgacctcatcggatgggg

SEQ ID NO: 12962 - DNA, 110 bp, synthetic construct
  source 1..110: mol_type = other DNA
cagggtcacaactttcccacccctcaattccagggcctttaaccttcatctgccacagctgtcaggatgcttcccaagaaggcactgtcggcgggtggagggtgctcctg

SEQ ID NO: 12963 - DNA, 110 bp, synthetic construct
  source 1..110: mol_type = other DNA
ccaaagaaataacaaaaagacaaaaaaaaaagtaaagaatattgtacttggaattcctctgtggcacggtgggttaaggatctggtattgtcactgtagctgcccaggtc

SEQ ID NO: 12964 - DNA, 110 bp, synthetic construct; identical to SEQ ID NO: 12963
  source 1..110: mol_type = other DNA

SEQ ID NO: 12965 - DNA, 110 bp, synthetic construct
  source 1..110: mol_type = other DNA
ttaggctccctttggtttttctgcctagagtgggaggcatcagtcccaggcacagcctgccacctaaaccaagcaaccctaagctcctaatctgccaggagctggctggc

SEQ ID NO: 12966 - DNA, 110 bp, synthetic construct
  source 1..110: mol_type = other DNA
cctgccacctaaaccaagcaaccctaagctcctaatctgccaggagctggctggctttgggaagctactctgtctttctgcctggactttggttttctcacgtgtaaaat

SEQ ID NO: 12967 - DNA, 110 bp, synthetic construct
  source 1..110: mol_type = other DNA
atatcaggcgaatgattctttcctcctctcccgcctggatgccttcaggtggtagtcccgttccctcccattttcccccaaggaagttctccctagttgagtattgaagg

SEQ ID NO: 12968 - DNA, 110 bp, synthetic construct
  source 1..110: mol_type = other DNA
tcccgttccctcccattttcccccaaggaagttctccctagttgagtattgaaggcagatttccctgcggcagcggcagcgctgtgtgtgtgcgttggggagttggtgtt

SEQ ID NO: 12969 - DNA, 110 bp, synthetic construct
  source 1..110: mol_type = other DNA
ggaacactatgggctccagcaaaggaaatgccttcatatacaaatgggcttcaggcaacaacaggtggggagctgcccttcctgagctttccagaagccagacactctgg

SEQ ID NO: 12970 - DNA, 110 bp, synthetic construct
  source 1..110: mol_type = other DNA
ggaactccttattttcttttttcgtggtatctatctggttttggtattagtgttgatggtggatgtctttgggagtgttccttctacttcactgtcttggagaagtttaa

SEQ ID NO: 12971 - DNA, 110 bp, synthetic construct; identical to SEQ ID NO: 12970
  source 1..110: mol_type = other DNA

SEQ ID NO: 12972 - DNA, 110 bp, synthetic construct
  source 1..110: mol_type = other DNA
gttaggaagtggtggaaagtgccttctccatatggtctcaaaggtattttgacttgatagaatacaaccaactgaaagcttctagaataaaaaaaagttggagacaaggt

SEQ ID NO: 12973 - DNA, 110 bp, synthetic construct
  source 1..110: mol_type = other DNA
tctcaaaggtattttgacttgatagaatacaaccaactgaaagcttctagaataaaaaaaagttggagacaaggtgcctaaaatcatcacgttgcacattttaaatatct

SEQ ID NO: 12974 - DNA, 110 bp, synthetic construct
  source 1..110: mol_type = other DNA
cctgggtgtccctccctcctcaaatccttcccgccatcagcaaggccctcacttctctccctcccagccaggaccacctgtgcgcttcacagctgttatgaaagagatag

SEQ ID NO: 12975 - DNA, 110 bp, synthetic construct
  source 1..110: mol_type = other DNA
tctccctcccagccaggaccacctgtgcgcttcacagctgttatgaaagagataggcagccgggattatcaggccagacaaggttcctgtgacagttccctgcccccacc

SEQ ID NO: 12976 - DNA, 110 bp, synthetic construct
  source 1..110: mol_type = other DNA
ggccggggatggaacctgaattctcatggacattagccaggttcttaacacactgagccaccatgggaattccggatcttgcgttttttgagccaaaaacacccttagta

SEQ ID NO: 12977 - DNA, 110 bp, synthetic construct
  source 1..110: mol_type = other DNA
agccaccatgggaattccggatcttgcgttttttgagccaaaaacacccttagtagtctggcaatgcctgactgttcataaatgcataaaatacatgagatacaaattat

SEQ ID NO: 12978 - DNA, 110 bp, synthetic construct
  source 1..110: mol_type = other DNA
gaggcctaacctggcctgggcaggctcacgtgctttcccactcaagggcccttccttgactgtccttgacatcatctgtccctgagattccagggttgtcacctaagctt

SEQ ID NO: 12979 - DNA, 110 bp, synthetic construct
  source 1..110: mol_type = other DNA
ttgactgtccttgacatcatctgtccctgagattccagggttgtcacctaagctttggctttacttccaaaaccatgttggccatttcctcagtcctgagagacgggccc

SEQ ID NO: 12980 - DNA, 110 bp, synthetic construct
  source 1..110: mol_type = other DNA
cctgagtgctcaggctaaatgatgatgtaacattttctcagaggtttcagccccaatttccaggactctccttatttcctccctcctctgtgactacctagcaatcaata

SEQ ID NO: 12981 - DNA, 110 bp, synthetic construct
  source 1..110: mol_type = other DNA
tctcagaggtttcagccccaatttccaggactctccttatttcctccctcctctgtgactacctagcaatcaatatcttgagaaagcagagttgacttgaacatgtgctg

SEQ ID NO: 12982 - DNA, 110 bp, synthetic construct
  source 1..110: mol_type = other DNA
tccttcctggcaagctcgcccatctcctccttggtgtctcggagctgccgctgtagcctcttgttttgctccttctcccggttctcagcggccgtgcgctggtctcgttc

SEQ ID NO: 12983 - DNA, 110 bp, synthetic construct
  source 1..110: mol_type = other DNA
aaaaaaaaagggcagcagagagtagctgagaggaaaagcacatgggcttcaggttagaatcctgccctggctcttggtatcatatgaccttggaccagtcactcaacctc

SEQ ID NO: 12984 - DNA, 110 bp, synthetic construct
  source 1..110: mol_type = other DNA
agaatcctgccctggctcttggtatcatatgaccttggaccagtcactcaacctccatgagccttggtttcctcatttttattttatttcttttttgttgtttttttagg

SEQ ID NO: 12985 - DNA, 110 bp, synthetic construct
  source 1..110: mol_type = other DNA
ggccaggaggggacactggggttagcaagtcgagtcccatctgaacaggagctctgctctggcagcctgactgacacatgctcaccacctcccaaggcgtcggccgcact

SEQ ID NO: 12986 - DNA, 110 bp, synthetic construct
  source 1..110: mol_type = other DNA
agtttgtggtaatttgtacagtagccctaggaaattcatacaaagatgtctgaatttgaaatacagcttggagagtgatcagcataacgtagttgttgaaatctagagag

SEQ ID NO: 12987 - DNA, 110 bp, synthetic construct
  source 1..110: mol_type = other DNA
ttgaaatacagcttggagagtgatcagcataacgtagttgttgaaatctagagagtaggtgagatgacccaagaagggtctagaatgagacggaaaagaggccaagaaca

SEQ ID NO: 12988 - DNA, 110 bp, synthetic construct
  source 1..110: mol_type = other DNA
cacatggaaaatcaaggaatccatcagggcagggggtgtgagtactatcagagggtaggctccagagctgtgcttttccatgcaacagtggctgaccaatacaacaccag

SEQ ID NO: 12989 - DNA, 110 bp, synthetic construct
  source 1..110: mol_type = other DNA
taggctccagagctgtgcttttccatgcaacagtggctgaccaatacaacaccagtttttgtagggtaaggttccaagaaagtccagaggctgtctcaggaaggatctct

SEQ ID NO: 12990 - DNA, 110 bp, synthetic construct
  source 1..110: mol_type = other DNA
cctgggataatcgacttgaaggttgggtctgagtttccccagctgatgacgaagaagatgaagatgaagatgaagatggtgacacggaagagttctgtacagttttgttg

SEQ ID NO: 12991 - DNA, 110 bp, synthetic construct
  source 1..110: mol_type = other DNA
agatgaagatgaagatgaagatggtgacacggaagagttctgtacagttttgttgaggttttccttaactttgcttgcataacttattttaggaactattttagcactgc

SEQ ID NO: 12992 - DNA, 110 bp, synthetic construct
  source 1..110: mol_type = other DNA
ataacattcacaacattgtaaatcaactacactttaataaaactctgtaaaattgagaacaaaaactatggggagttcccatagtggctcagtggaaacgaatctgactg

SEQ ID NO: 12993 - DNA, 110 bp, synthetic construct; identical to SEQ ID NO: 12992
  source 1..110: mol_type = other DNA

SEQ ID NO: 12994 - DNA, 110 bp, synthetic construct
  source 1..110: mol_type = other DNA
tctaattgaatttttaaagtttaagttctcttcagtgtttgatagcaactagcagtcctagtagagtgcttgactgtgaactcggacaactatttataaaaccacacaac

SEQ ID NO: 12995 - DNA, 110 bp, synthetic construct
  source 1..110: mol_type = other DNA
tcctagtagagtgcttgactgtgaactcggacaactatttataaaaccacacaacataaaaagcacatcttcatgaacctgtatagatcttgaagctattccagtgtatt

SEQ ID NO: 12996 - DNA, 110 bp, synthetic construct
  source 1..110: mol_type = other DNA
gaggccagggatccaacctgcatcctcatgggttgggttcttaacctactgagccacagtgggaactcctgagtctgtttatatttacagggttttttttttctttttca

SEQ ID NO: 12997 - DNA, 110 bp, synthetic construct
  source 1..110: mol_type = other DNA
ctactgagccacagtgggaactcctgagtctgtttatatttacagggttttttttttctttttcaatatttggttcattttttagcatgccttaaatttttgattggttg

SEQ ID NO: 12998 - DNA, 110 bp, synthetic construct
  source 1..110: mol_type = other DNA
tatgttgtatatgtgtcccctagctccatctgctacaggtttctaattgtaatgaaacaccagtagtaatgagcacgatttagcacccagaccttgaattcctcaataaa

SEQ ID NO: 12999 - DNA, 110 bp, synthetic construct
  source 1..110: mol_type = other DNA
atgaaggatcgacccaatgctgaaagttaggtgttacttggtattccaccactcgtgtggaaattgagttgaaggtgggtaggaagctgtgagtatgacctgaaggaaaa

SEQ ID NO: 13000 - DNA, 110 bp, synthetic construct
  source 1..110: mol_type = other DNA
gcccctcttaagggggacggagacagcaaaggagcacccagtgtgtacaagctgggtgccctaactatggtgcctgtgacaattgtcaggcaaggtgggaaatgctaccc

SEQ ID NO: 13001 - DNA, 110 bp, synthetic construct
  source 1..110: mol_type = other DNA
gtgccctaactatggtgcctgtgacaattgtcaggcaaggtgggaaatgctacccctgctttaccagtgaggaaactgtcccagagaggttggggtgcttattcgaggtc

SEQ ID NO: 13002 - DNA, 110 bp, synthetic construct
  source 1..110: mol_type = other DNA
acttgttggcagagagtgaatttgacatgctgtctcctaccctgaaatggctttttttccttctcccctgtccttttcttctctttaaagagagcctagcactccattct

SEQ ID NO: 13003 - DNA, 110 bp, synthetic construct
  source 1..110: mol_type = other DNA
tttccttctcccctgtccttttcttctctttaaagagagcctagcactccattctagagggaagggtctaagactaggaagcaggaatccttcaatgccttcagttccat

SEQ ID NO: 13004 - DNA, 110 bp, synthetic construct
  source 1..110: mol_type = other DNA
agttaggaagagacagaaagatgaatggtagacaaggtggcaaacaaaagcagacagacatcaggagactgtcaagaatctcgtcagctccatggaaatcactgaatgac

SEQ ID NO: 13005 - DNA, 110 bp, synthetic construct
  source 1..110: mol_type = other DNA
agacatcaggagactgtcaagaatctcgtcagctccatggaaatcactgaatgacttcatttacgttagagtaaatctgtcatcatttacttcccaattaccatactgac

SEQ ID NO: 13006 - DNA, 110 bp, synthetic construct; identical to SEQ ID NO: 13004
  source 1..110: mol_type = other DNA

SEQ ID NO: 13007 - DNA, 110 bp, synthetic construct; identical to SEQ ID NO: 13005
  source 1..110: mol_type = other DNA

SEQ ID NO: 13008 - DNA, 110 bp, synthetic construct
  source 1..110: mol_type = other DNA
taactaagaggaagtacttcctgaccatgaaggtccttgcgtgaggtatggtatcattgtttctttctttttttccccgctgcgctcgtgacatatggaagtttccaggc

SEQ ID NO: 13009 - DNA, 110 bp, synthetic construct
  source 1..110: mol_type = other DNA
acttcctgaccatgaaggtccttgcgtgaggtatggtatcattgtttctttctttttttccccgctgcgctcgtgacatatggaagtttccaggccaggggtcaaatctg

SEQ ID NO: 13010 - DNA, 110 bp, synthetic construct
  source 1..110: mol_type = other DNA
gttgccagcaatttaaatggaaacttacagatacataaagcaactccatcaacgctattcctgattacctgaagaaattgaaagctaacacatagtcttgtgatgtttca

SEQ ID NO: 13011 - DNA, 110 bp, synthetic construct
  source 1..110: mol_type = other DNA
tttgacttttggactccttatcagccaccttcagtctctgacagcagttggactggccagcccacagaggcccactctccagtgaacaaaggcttgctatgtaaaacaga

SEQ ID NO: 13012 - DNA, 110 bp, synthetic construct
  source 1..110: mol_type = other DNA
tccaactattattacagaactgtctatttctcccttcaattctatttttgcttcacacagttttttcttcttttttcagccatgcctgaggcatgcagaagttccagggt

SEQ ID NO: 13013 - DNA, 110 bp, synthetic construct; identical to SEQ ID NO: 13012
  source 1..110: mol_type = other DNA

SEQ ID NO: 13014 - DNA, 110 bp, synthetic construct
  source 1..110: mol_type = other DNA
agtcttctaaatatgacaacacaggctggcaactaaagcaatatcaaaattttctgaagttgtgatattcccttaagcatttctaaaacttctcacatgaaaaggagagg

SEQ ID NO: 13015 - DNA, 110 bp, synthetic construct
  source 1..110: mol_type = other DNA
atatgtcaaactttttaaaaaagcatacaaaattatagatacagcagcatttcagctacctaaaacacactcagctgtgtggcacatatcttttattctcttttctgtgt

SEQ ID NO: 13016 - DNA, 110 bp, synthetic construct
  source 1..110: mol_type = other DNA
ctacctaaaacacactcagctgtgtggcacatatcttttattctcttttctgtgtttttccgtattttccaaatttcctacaattggcatatatttctttttttctttct

SEQ ID NO: 13017 - DNA, 110 bp, synthetic construct
  source 1..110: mol_type = other DNA
gaaactgtctttctcagactattgttgcctaccaatgacatcagaattaacttgagtgcttggtttaagtacagagtcctagcttcttcctcagatcttctgaatcagaa

SEQ ID NO: 13018 - DNA, 110 bp, synthetic construct
  source 1..110: mol_type = other DNA
caaggaggctaggataaatagccttcactttgcctagccaaatctgggtacaacaagtagcttttgtcacagagctattcgcaacaactaaagtgataccattgtgattg

SEQ ID NO: 13019 - DNA, 110 bp, synthetic construct
  source 1..110: mol_type = other DNA
ccctaaaccaaccaaccaacaaacaaaaactgactgaaactggcacacacataccctttaagtatataatatctcatagacctttagctcatcccatgtagcagtaatgt

SEQ ID NO: 13020 - DNA, 110 bp, synthetic construct
  source 1..110: mol_type = other DNA
ttataggcacttattaaatcaagcagttggtgaagaggaagtacctacatgcagctttcgtgaagccaggtgagatatgacacatgaactatttagaagaaagatactgt

SEQ ID NO: 13021 - DNA, 110 bp, synthetic construct
  source 1..110: mol_type = other DNA
tttcgtgaagccaggtgagatatgacacatgaactatttagaagaaagatactgttcatgatttgtggttgtggggtcattttaactctctggaagactgtattgttgca

SEQ ID NO: 13022 - DNA, 110 bp, synthetic construct
  source 1..110: mol_type = other DNA
cctcaccctggatctaatacaatatctcagagcctgcttcttggactggcctcagcagcaagatttcatcccattagatgccttttcctgccacaggaccattctcttct

SEQ ID NO: 13023 - DNA, 110 bp, synthetic construct
  source 1..110: mol_type = other DNA
aggataaattctaaatgggtagatatttaaatataaaaatcaaaatccaggagttcctgctatggcacagtgggttaagaacatgattgcagcagcttgggttgctgtgg

SEQ ID NO: 13024 - DNA, 110 bp, synthetic construct
  source 1..110: mol_type = other DNA
cctgctatggcacagtgggttaagaacatgattgcagcagcttgggttgctgtggaggagcaggtttcatctcaggcagtgagttaaaggatctgaatttgctgcagctg

SEQ ID NO: 13025 - DNA, 110 bp, synthetic construct
  source 1..110: mol_type = other DNA
ttcttctgcagcttgcaggtaaaggtgatgccattgtcattttcactgatggaggtgacacagacagagctggaattgattttgtttcctgatttcagatccactctccc

SEQ ID NO: 13026 - DNA, 110 bp, synthetic construct
  source 1..110: mol_type = other DNA
actcactgccctaatttgagccactcttatttgggttgactggcctaaacagcgcctaaagtttgaaagccaattcccaatctgtaacgatggagaatccccctgaggtc

SEQ ID NO: 13027 - DNA, 110 bp, synthetic construct
  source 1..110: mol_type = other DNA
ctaaagtttgaaagccaattcccaatctgtaacgatggagaatccccctgaggtcagacccactccattgctgtttcaggtcaggtcaaatcagctccatctgggaaact

SEQ ID NO: 13028 - DNA, 110 bp, synthetic construct
  source 1..110: mol_type = other DNA
tcccctggtgaagaggcctctcggacctgcaagcttgcagattagatctggccataggacctacgctgagtcaagttctgttgggtgaattataaatgaatggaagacct

SEQ ID NO: 13029 - DNA, 110 bp, synthetic construct
  source 1..110: mol_type = other DNA
ggttcctagtcggattcctttccactgtaccatgacaggaactccaatttctttttctgatagttcattgttagtgtgtggaaatgcaaaagatgttctgtatattaatt

SEQ ID NO: 13030 - DNA, 110 bp, synthetic construct; identical to SEQ ID NO: 13029
  source 1..110: mol_type = other DNA

SEQ ID NO: 13031 - DNA, 110 bp, synthetic construct
  source 1..110: mol_type = other DNA
gaacttaagaccagggtagaaaccctgaagtatgcccaagttggcagagccctagcttcattttagtgctccttaggcttgaatcgatgaactgcctgtgctgttgcgaa

SEQ ID NO: 13032 - DNA, 110 bp, synthetic construct
  source 1..110: mol_type = other DNA
cttcattttagtgctccttaggcttgaatcgatgaactgcctgtgctgttgcgaaggaagacgttccattttgatagtttccctatcccgtgtgctgtgtagtaatcagt

SEQ ID NO: 13033 - DNA, 110 bp, synthetic construct
  source 1..110: mol_type = other DNA
tttgttgaaaaggatgtctgtcttacattgaattccttttgcatatttgtaaaaaaaatgactgaggagtttccactatggtgcagtaggttaagaatcaaactgctcgg

SEQ ID NO: 13034 - DNA, 110 bp, synthetic construct
  source 1..110: mol_type = other DNA
aaatgactgaggagtttccactatggtgcagtaggttaagaatcaaactgctcgggttgctgtggaggctagggttgctgtggaggctcgggtttgacccctggactgcc

SEQ ID NO: 13035 - DNA, 110 bp, synthetic construct
  source 1..110: mol_type = other DNA
agtcagagcctggtccaaggatttttctattcctggtcccgaatgttgcctctcagaggagattatcctctctcagctgttgtcttatataatggatctttcctttgggg

SEQ ID NO: 13036 - DNA, 110 bp, synthetic construct
  source 1..110: mol_type = other DNA
tgagtacccctgacccgcacagcccagcaattctcaaagctgcctgggttttgtgagcagctgggtggaaatggtccccaccacctttgggcctcacaatactgttactt

SEQ ID NO: 13037 - DNA, 110 bp, synthetic construct
  source 1..110: mol_type = other DNA
agcagctgggtggaaatggtccccaccacctttgggcctcacaatactgttacttgcttgggcgttcccgtcacggctcagtggcagtgaacccaactagtatccatgag

SEQ ID NO: 13038 - DNA, 110 bp, synthetic construct
  source 1..110: mol_type = other DNA
atgcagatggaagcaccaaggctcaaagcccttaggtgatttctcaaggtcacgcagctggtaagtgaggagaggtactttcacatcctccagcagacctcactgtctgc

SEQ ID NO: 13039 - DNA, 110 bp, synthetic construct
  source 1..110: mol_type = other DNA
aaaaatgtgacatctgtaggcttttgtcagattatcaggggaatctgacctaaaaaaggttgagaatcagtaatctaatccaatcttccaaaagggaaacctaaagtcat

SEQ ID NO: 13040 - DNA, 110 bp, synthetic construct
  source 1..110: mol_type = other DNA
aaggttgagaatcagtaatctaatccaatcttccaaaagggaaacctaaagtcataggaccagctaggacttgaatcagaatttcctactgcccagtgtccctttgtcca

SEQ ID NO: 13041 - DNA, 110 bp, synthetic construct
  source 1..110: mol_type = other DNA
accttgctttcatctttattcttaatgatcacacttaactccacttacaggagtaatcaaagaggtgaaaccctctccctgcagggagaatagcacagttaagaagcctg

SEQ ID NO: 13042 - DNA, 110 bp, synthetic construct
  source 1..110: mol_type = other DNA
atcaaagaggtgaaaccctctccctgcagggagaatagcacagttaagaagcctggaaaaaggaattgttttctgatgagcaaatgtcaaattttataggagattagctt

SEQ ID NO: 13043 - DNA, 110 bp, synthetic construct
  source 1..110: mol_type = other DNA
actctgtaaggtgcttggtggcaggttcagaaaggccctggttcattcatcaggagatcagggttccccagcttggttccttaagccacatctgttggagtccagcagga

SEQ ID NO: 13044 - DNA, 110 bp, synthetic construct
  source 1..110: mol_type = other DNA
gatcagggttccccagcttggttccttaagccacatctgttggagtccagcaggaaacagatggcacactcggcttggggggcttggggagagcttgtaacaggactgtg

SEQ ID NO: 13045 - DNA, 110 bp, synthetic construct
  source 1..110: mol_type = other DNA
tcagcggtggcccccgtgctctctgctctctcttctgctgaggaataagctgaaagggacctcagctctggggagacccagcactggggagaagtgagaatggctgggtt

SEQ ID NO: 13046 - DNA, 110 bp, synthetic construct
  source 1..110: mol_type = other DNA
gggacctcagctctggggagacccagcactggggagaagtgagaatggctgggttgcctgcatcttctcaactcagggagaggccggcccgccgtcctggggctggtgct

SEQ ID NO: 13047 - DNA, 110 bp, synthetic construct
  source 1..110: mol_type = other DNA
gaaatgttgcagggtttctccaagggcaagaagaactcgtttatgtattttttaaatggatgatggctggtctccagtccctgtggtatttggattccactgaatacatt

SEQ ID NO: 13048 - DNA, 110 bp, synthetic construct
  source 1..110: mol_type = other DNA
atggatgatggctggtctccagtccctgtggtatttggattccactgaatacatttaaaagaatgacgtcacagttttattttaagatgtaaatatttacgttattctgg

SEQ ID NO: 13049 - DNA, 110 bp, synthetic construct
  source 1..110: mol_type = other DNA
tgagtctggtaggctaaggagaccttgaaagcattttctctgtcctctgagagaggggccctctagcttgaacataaagcaacgagaagccagggtctggcaggttccca

SEQ ID NO: 13050 - DNA, 110 bp, synthetic construct
  source 1..110: mol_type = other DNA
gggccctctagcttgaacataaagcaacgagaagccagggtctggcaggttcccactgctgtggcctgccctttggatgaattaagaggtccgttgtctgaggctgtccg

SEQ ID NO: 13051 - DNA, 110 bp, synthetic construct
  source 1..110: mol_type = other DNA
ctgtttgtaagtgtgtgatgcggtggcgtcaggtacatccacgctgggcagccgtcaccaccatccatctgtagagctttctcacctttcccagccgaaactctgtaccg

SEQ ID NO: 13052 - DNA, 110 bp, synthetic construct
  source 1..110: mol_type = other DNA
ttcaggtgttgcccctgcccccacccccccaaaaaagaataaatgttggtgagggtgtgtagaaaagggagccctcctacacggttggtagaatgtaaatgtaggcagcc

SEQ ID NO: 13053 - DNA, 110 bp, synthetic construct
  source 1..110: mol_type = other DNA
cccccaaaaaagaataaatgttggtgagggtgtgtagaaaagggagccctcctacacggttggtagaatgtaaatgtaggcagccactatggagtagagtatggaggttc

SEQ ID NO: 13054 - DNA, 110 bp, synthetic construct
  source 1..110: mol_type = other DNA
ccactgccctaagtgggctttcatcggaaagatctcatcagcttctgtactcatagaatccagagggacacccattagaagtgttcccgtgtgggtgtctgctgtgcgcc

SEQ ID NO: 13055 - DNA, 110 bp, synthetic construct
  source 1..110: mol_type = other DNA
tccctagcccactgcgtcacaggagaatgcctgtgttttgtatttagccacatgttacaaacactttccatcttgctgcagtcttcgtaatggccacttattaccatgac

SEQ ID NO: 13056 - DNA, 110 bp, synthetic construct
  source 1..110: mol_type = other DNA
tctattaaaactctttctccctttgcttattatgaaccatctagcctgttattacttatcatttttttgtctttttagggctaccttctcggcatatggaagttctcagg

SEQ ID NO: 13057 - DNA, 110 bp, synthetic construct
  source 1..110: mol_type = other DNA
tctccctttgcttattatgaaccatctagcctgttattacttatcatttttttgtctttttagggctaccttctcggcatatggaagttctcaggctagggtggaatcgg

SEQ ID NO: 13058 - DNA, 110 bp, synthetic construct
  source 1..110: mol_type = other DNA
tcccctctgtcatttcaaatatattctttcaccgtctctttgggaggaaaatgaagcccattcatggaagaaaataaatggcgcttagtagtaaagggaccataaatagt

SEQ ID NO: 13059 - DNA, 110 bp, synthetic construct
  source 1..110: mol_type = other DNA
gcccattcatggaagaaaataaatggcgcttagtagtaaagggaccataaatagtttggggaggaaaaaaaaaaaaggcagctttcatttgcttcctcctactgacacat

SEQ ID NO: 13060 - DNA, 110 bp, synthetic construct
  source 1..110: mol_type = other DNA
ctctttgagaacaagttaagtttctaggtatcacaccctttccctcttgagtattgcagcatgtatttcctttttaggagatccattcacttaagatagtcacttaaatt

SEQ ID NO: 13061 - DNA, 110 bp, synthetic construct
  source 1..110: mol_type = other DNA
ccccccgtgctctgtctcaattcctggcctaactgcagagcccagtcagggccagataagaaaaaggcgatggaggcggcctctgattccggtcgccgaggcggcagtgg

SEQ ID NO: 13062 - DNA, 110 bp, synthetic construct
  source 1..110: mol_type = other DNA
tccggccagaagccaagtcccgtgaggacaccagtctccatggtccaggcaggagacaatggctgctctgaaagtacagctttgagatgaggccactcttatgcaggctc

SEQ ID NO: 13063 - DNA, 110 bp, synthetic construct
  source 1..110: mol_type = other DNA
tcatactgtaacagagagtgaaggatggacgcctggtgattcggccgacttcaggacgagtttcatttatttactcagtaaatattttttgaaaggctacagtatgacca

SEQ ID NO: 13064 - DNA, 110 bp, synthetic construct
  source 1..110: mol_type = other DNA
acgagtttcatttatttactcagtaaatattttttgaaaggctacagtatgaccagtagtgtgttccctctggggatagagtgctgaacaaagcaggttcattccttgcc

SEQ ID NO: 13065 - DNA, 110 bp, synthetic construct
  source 1..110: mol_type = other DNA
tttgggccacgggttcagtaacctcgggctttgttcatcttcttccccggggaagatgggtgccctgcccgcagcagttgaaatttcaggaagttatgagatgctgatgt

SEQ ID NO: 13066 - DNA, 110 bp, synthetic construct
  source 1..110: mol_type = other DNA
atgggtgccctgcccgcagcagttgaaatttcaggaagttatgagatgctgatgtcccatgtatgacccctgcctagaatgaatattttggatatttttccctaaaatgt

SEQ ID NO: 13067 - DNA, 110 bp, synthetic construct
  source 1..110: mol_type = other DNA
agtcatggggagacagaatgttccaggtcaggaagacggaacacatgatctctgccagagggacggggacaccggtgagatcagtcaccgtgttctcgggtttccctctg

SEQ ID NO: 13068 - DNA, 110 bp, synthetic construct
  source 1..110: mol_type = other DNA
gagtcacttagactgtttttaggtgttcccgtcgtgactagtattcaaggtcttgggttcaatccctggcctcactcaatgagtcaaggacccagcattgctatgagctg

SEQ ID NO: 13069 - DNA, 110 bp, synthetic construct
  source 1..110: mol_type = other DNA
gttatatatattcccccaattctccattcctaataataatagctaaacgtgggagtctaaacgtgttctaatcctcccaacataggtgctaaatgtgttctaatcctaaa

SEQ ID NO: 13070 - DNA, 110 bp, synthetic construct
  source 1..110: mol_type = other DNA
atagaaacaaaagataaggacaaatcaacaaatgtaggtgaagatatacaggaatcagaaccatcctccactgctggtgggattgcaaaatggagcacagccactttgca

SEQ ID NO: 13071 - DNA, 110 bp, synthetic construct
  source 1..110: mol_type = other DNA
cagaaccatcctccactgctggtgggattgcaaaatggagcacagccactttgcaaaacagtgtggcagttccaagtgttaaacacagttaccgtctgacccggaaattt

SEQ ID NO: 13072 - DNA, 110 bp, synthetic construct
  source 1..110: mol_type = other DNA
ggctatatgggtgagaggtcagccctggacacagcaaacaggaggcaggtcacccacaggggaccatgctgggcaggccggggcctagccctctagctgtggtcacaggg

SEQ ID NO: 13073 - DNA, 110 bp, synthetic construct
  source 1..110: mol_type = other DNA
tgtacagggcccatctttccctggttactgcaggctctaccctcctctccaccttacccagctggcaggccccagagacagggtggcaggttccctctggacattcacag

SEQ ID NO: 13074 - DNA, 110 bp, synthetic construct
  source 1..110: mol_type = other DNA
acccagctggcaggccccagagacagggtggcaggttccctctggacattcacagggaagagagcagttgtttccatggaagccagatgggcacgaaatgttgcagcttt

SEQ ID NO: 13075 - DNA, 110 bp, synthetic construct
  source 1..110: mol_type = other DNA
ctgcacctgaaagcctacgtacacctgacaggaaaaccagagtgacactagaggccaagggactgtgggtctcaggacataaccaaggaagaagaaattcttgtttccag

SEQ ID NO: 13076 - DNA, 110 bp, synthetic construct
  source 1..110: mol_type = other DNA
caagggactgtgggtctcaggacataaccaaggaagaagaaattcttgtttccagctgcccatctcccatgtctactgaccacaccacactcacattggctcggttgatg

SEQ ID NO: 13077 - DNA, 110 bp, synthetic construct
  source 1..110: mol_type = other DNA
caggccctctcccgctcccatccaggtgacatcatccggaaaatcatccccaatcacgagctggtggggcagctggcagggctgtacctggagagcatcagcccaagcag

SEQ ID NO: 13078 - DNA, 110 bp, synthetic construct
  source 1..110: mol_type = other DNA
acgtaaagtgtgcaagaggatgggtccttaaagctgattttgggtaccagctggtagtccttcactcagagcctctgcatcttacctggagctctgaccagagcgtggct

SEQ ID NO: 13079 - DNA, 110 bp, synthetic construct
  source 1..110: mol_type = other DNA
gggaaggaaccctcctgggacatggtagcaggaggcatgggggccactttggaaactggctgccacacatcttccttttcatcgacattgttcctgtctctgggccttgc

SEQ ID NO: 13080 - DNA, 110 bp, synthetic construct
  source 1..110: mol_type = other DNA
gtttgctctagttatccacctgatctccataaacagaaccatttaaccttccggcgggggggggtcacggttggccacctgcctctgagaccagaaactcagattcattt

SEQ ID NO: 13081 - DNA, 110 bp, synthetic construct
  source 1..110: mol_type = other DNA
gggggggggtcacggttggccacctgcctctgagaccagaaactcagattcatttctgcaggagaagaaccagtgtgtccaagttgggagtttgggtcctgaacagtttc

SEQ ID NO: 13082 - DNA, 110 bp, synthetic construct
  source 1..110: mol_type = other DNA
gacctcaggctaaaaatcgacaaaggagagttaggttccctgggtacgaaagcagctaaacatgttatctacacagcaaatatgggggcacttgtcaatccagacacttt

SEQ ID NO: 13083 - DNA, 110 bp, synthetic construct
  source 1..110: mol_type = other DNA
ctaaacatgttatctacacagcaaatatgggggcacttgtcaatccagacactttatacacatacatataacccaaatggaatccgttatttcaacttacttcacggtgt

SEQ ID NO: 13084 - DNA, 110 bp, synthetic construct
  source 1..110: mol_type = other DNA
agggaaaataataataagattctatacatctattctggctgtacctgcagcatgcagaagttcccgtgccagggatagaaccagagccacagcagtcacaacgccaaatc

SEQ ID NO: 13085 - DNA, 110 bp, synthetic construct
  source 1..110: mol_type = other DNA
aagattctatacatctattctggctgtacctgcagcatgcagaagttcccgtgccagggatagaaccagagccacagcagtcacaacgccaaatccttaactgctaggcc

SEQ ID NO: 13086 - DNA, 110 bp, synthetic construct
  source 1..110: mol_type = other DNA
ctccatatgccacggggtagccaaaaaaaaaggcagttatttaccctcaagtaataatggcagctcagacccagggccgcctccagtgagaaagacatctcacttcagga

SEQ ID NO: 13087 - DNA, 110 bp, synthetic construct
  source 1..110: mol_type = other DNA
aaccccgtgcaattcaacagatggttttactctaagagtttttactccaaaataaagatggtactctcttagtacttgtgctacacacccacggatgcattcattagaga

SEQ ID NO: 13088 - DNA, 110 bp, synthetic construct
  source 1..110: mol_type = other DNA
agatggtactctcttagtacttgtgctacacacccacggatgcattcattagagaaaagcaggacagtcacaaaaggcaaccacattcttccctccctgaaatgacaaga

SEQ ID NO: 13089 - DNA, 110 bp, synthetic construct
  source 1..110: mol_type = other DNA
ttcctggaccagggatcgaaccctcacaacagcagtaaccggaaccacagcaatgacaatgacagatccttaacccactgagttaccagggaactccaaacttccatttt

SEQ ID NO: 13090 - DNA, 110 bp, synthetic construct
  source 1..110: mol_type = other DNA
acaatgacagatccttaacccactgagttaccagggaactccaaacttccatttttaaaagggtcaaaaatgactactgttcagaaatgttagagtgtttttctttggtg

SEQ ID NO: 13091 - DNA, 110 bp, synthetic construct
  source 1..110: mol_type = other DNA
ttatggaacaaatcattttgtaaactgttctatcacagaggaatgttcaagcttgagcatatgcgaagtagacaaaatagaataacaaactattacccaacttcaaaact

SEQ ID NO: 13092 - DNA, 110 bp, synthetic construct
  source 1..110: mol_type = other DNA
tgagtaataaaaaaatacttaaagttgtgttaatttcaggtgtatatctgaaggtgaactttaaagtgactaaaactaagtgactctaagacgctctgaaatcacacact

SEQ ID NO: 13093 - DNA, 110 bp, synthetic construct
  source 1..110: mol_type = other DNA
gaactttaaagtgactaaaactaagtgactctaagacgctctgaaatcacacactaagttaaatctgtaaaaaaactgccatttttataagctggaaactattgaagacc

SEQ ID NO: 13094 - DNA, 110 bp, synthetic construct
  source 1..110: mol_type = other DNA
aacatgcctgatagtctcttttcttaactcacagaaaaatagaaggagcacgtttgaaaaagggaaatgcagctgctaagagaacacattttataataactgaggtgact

SEQ ID NO: 13095 - DNA, 110 bp, synthetic construct
  source 1..110: mol_type = other DNA
ataaaacaggtaacacaaaaaaagtcgataatcagaatgaccctgaatttatcaccataaatattggcagctagatgacaatagataaatgccttcaaaattctgaggaa

SEQ ID NO: 13096 - DNA, 110 bp, synthetic construct
  source 1..110: mol_type = other DNA
cataaatattggcagctagatgacaatagataaatgccttcaaaattctgaggaaaaattgatttctgggagttccattgtggcacagtggaaacgaatctgactaggaa

SEQ ID NO: 13097 - DNA, 110 bp, synthetic construct
  source 1..110: mol_type = other DNA
ttgtaagttttcaaaaagcatcttccagatttctataaattggttgaaatacaaccagcacaggtatatttgaactatgggaagaatggaatgagtcatttgattttaga

SEQ ID NO: 13098 - DNA, 110 bp, synthetic construct; identical to SEQ ID NO: 13097
  source 1..110: mol_type = other DNA

SEQ ID NO: 13099 - DNA, 110 bp, synthetic construct; identical to SEQ ID NO: 13097
  source 1..110: mol_type = other DNA

SEQ ID NO: 13100 - DNA, 110 bp, synthetic construct; identical to SEQ ID NO: 13097
  source 1..110: mol_type = other DNA

SEQ ID NO: 13101 - DNA, 110 bp, synthetic construct
  source 1..110: mol_type = other DNA
aaggaatctgcacccttgctccagaggcctcttggctttctttgaactttacccatggtggcgatgtcctgcctttgatccctcgactgctgtccagctagcatccgtag

SEQ ID NO: 13102 - DNA, 110 bp, synthetic construct
  source 1..110: mol_type = other DNA
tggtggcgatgtcctgcctttgatccctcgactgctgtccagctagcatccgtagtgtctttagggcaccaatgaagtctccagcatttttcacatataaaggacaagaa

SEQ ID NO: 13103 - DNA, 110 bp, synthetic construct
  source 1..110: mol_type = other DNA
ctccgcccctctgcccaccctctggcgcagaaaccagagacagtgccccccactggtccagggaagggttggggttggagggcgagctgactaggggtcagaaaatccac

SEQ ID NO: 13104 - DNA, 110 bp, synthetic construct
  source 1..110: mol_type = other DNA
gtccagggaagggttggggttggagggcgagctgactaggggtcagaaaatccaccccaagctgcctcagatctctcactagctgtgtgaccttgggtgagtcacatcac

SEQ ID NO: 13105 - DNA, 110 bp, synthetic construct
  source 1..110: mol_type = other DNA
cttctctcttttggtgatgggttgcatcctcctggacgtgtcacccacccctataactggggacctctttccaagagcagctcctatccttcattccctcttctctctcc

SEQ ID NO: 13106 - DNA, 110 bp, synthetic construct
  source 1..110: mol_type = other DNA
tgcgtattccatctgcagctcagagcaggataaagctacggcctcccttgggagttggcttttgagcttcgggccttagtcagctctgttcctggggcgatcgctgacag

SEQ ID NO: 13107 - DNA, 110 bp, synthetic construct
  source 1..110: mol_type = other DNA
tggcttttgagcttcgggccttagtcagctctgttcctggggcgatcgctgacagagagtcccaggtccctgccatgtggcctggggcctcatcagccaggcctcagagg

SEQ ID NO: 13108 - DNA, 110 bp, synthetic construct
  source 1..110: mol_type = other DNA
gtttaggtcacatgtctatctctgaaccaatcattgcaaccagagagatggaaggctctgattggccagacctggatcaccacctagatggtaaggatggaggcaggggt

SEQ ID NO: 13109 - DNA, 110 bp, synthetic construct
  source 1..110: mol_type = other DNA
ctctgattggccagacctggatcaccacctagatggtaaggatggaggcaggggtagctccttaaggaaaattgaaggttgttgcaatgagaggaggaggaaatggatcc

SEQ ID NO: 13110 - DNA, 110 bp, synthetic construct
  source 1..110: mol_type = other DNA
ctctgccccctcctacaagccacacctgcagaggaaccacgtcttactctttaggtgtttttttaaacctttgagtaggaggtttgggctctgtgatggcctcgcggatg

SEQ ID NO: 13111 - DNA, 110 bp, synthetic construct
  source 1..110: mol_type = other DNA
cgggggcgggtgagagaggcaggggttgcagccggcatgctgggtctgctagtgtatactgtctaactctgatcttcaccacgagccaccgcactgtgttgattggcata

SEQ ID NO: 13112 - DNA, 110 bp, synthetic construct
  source 1..110: mol_type = other DNA
atactgtctaactctgatcttcaccacgagccaccgcactgtgttgattggcatacagtgggcaacaaggggagccctagcttgacgcctttagggcaacttcatggggg

SEQ ID NO: 13113 - DNA, 110 bp, synthetic construct
  source 1..110: mol_type = other DNA
ctaagctctcagtcactgtgtagatggttctcagggaaggagcctggcaggtctgtgggtttgggtctgttctgctcaccccaggggttggccagggagggaaccagtca

SEQ ID NO: 13114 - DNA, 110 bp, synthetic construct
  source 1..110: mol_type = other DNA
tgggtttgggtctgttctgctcaccccaggggttggccagggagggaaccagtcagtcctcttaaaaagcatgtgactctggagttcccttcatggctcagtggttaacg

SEQ ID NO: 13115 - DNA, 110 bp, synthetic construct
  source 1..110: mol_type = other DNA
taagttaccttgctctttatgactccattacttcgtgtgaaccataggctgttgtatttaaagaattaaatatgggtcagtgtggttggggtgaagaggagagtggtgag

SEQ ID NO: 13116 - DNA, 110 bp, synthetic construct
  source 1..110: mol_type = other DNA
tctttgtttgatagaagcgttatacatatgaatatatcatgcagacattgcctatcttttagctagtgagtttattccatttacatagatttcagcgagctggatgggat

SEQ ID NO: 13117 - DNA, 110 bp, synthetic construct
  source 1..110: mol_type = other DNA
cttttagctagtgagtttattccatttacatagatttcagcgagctggatgggattgtggtactgtggtcggataagttgaaggatctggtcttacgaaatcagtattag

SEQ ID NO: 13118 - DNA, 110 bp, synthetic construct
  source 1..110: mol_type = other DNA
tcactgtggcgtcagttactgcctagtagaatctaaggtctatgtctgttgacttgatctctttttcctacatttcctcattagtcatcatgcaaacatatctgaccaaa

SEQ ID NO: 13119 - DNA, 110 bp, synthetic construct
  source 1..110: mol_type = other DNA
gatctctttttcctacatttcctcattagtcatcatgcaaacatatctgaccaaacctcacaccctgcacatccaatctaagtagatgacactcttttgtaaggaggaga

SEQ ID NO: 13120 - DNA, 110 bp, synthetic construct
  source 1..110: mol_type = other DNA
cgagttcccactcctggggatctcagagtcctgggcagcagcgggtcctgttttggatgttcctgtccatgtacctggtcacagtggtgggaaatatgctcatcatcctg

SEQ ID NO: 13121 - DNA, 110 bp, synthetic construct
  source 1..110: mol_type = other DNA
tcctgttttggatgttcctgtccatgtacctggtcacagtggtgggaaatatgctcatcatcctggccatcggctctgactcccgtctgcacacccccatgtacttcttc

SEQ ID NO: 13122 - DNA, 110 bp, synthetic construct
  source 1..110: mol_type = other DNA
tgaaacttcccagatgctatatggagaaatgcagtatagtcttactatcgagaccatctacaggctggtagtcagcaactctggagctggagatgtcctcgaattcagtt

SEQ ID NO: 13123 - DNA, 110 bp, synthetic construct
  source 1..110: mol_type = other DNA
tgtgaacatatgtacatatgcaagagagtctgctcaagtagctgggtggaaggcggcatcataaataaaaatatagaacaaaggaccaagatcagacttgggagaatata

SEQ ID NO: 13124 - DNA, 110 bp, synthetic construct
  source 1..110: mol_type = other DNA
tgcacctccaccagtaatacagattccctccaagaggaactagaaaatataaggcagagccaagaaaaacgacaaaattcatgtgcagagaacacactgagctaagggta

SEQ ID NO: 13125 - DNA, 110 bp, synthetic construct
  source 1..110: mol_type = other DNA
aatataaggcagagccaagaaaaacgacaaaattcatgtgcagagaacacactgagctaagggtagtaaaaaccagaacgaacaatgcacaggaacaaattagtaatgtg

SEQ ID NO: 13126 - DNA, 110 bp, synthetic construct
  source 1..110: mol_type = other DNA
tccctgctcccagtaaattgggctgtgtccacacaaactcatataatctagcatatcatagtatatatagcatgccccaggacattttcaggcatctcaaaaacttgaaa

SEQ ID NO: 13127 - DNA, 110 bp, synthetic construct
  source 1..110: mol_type = other DNA
tcatagtatatatagcatgccccaggacattttcaggcatctcaaaaacttgaaaattactaacagttgtttttcctttccttttcaggcaaagagtgaggaagatccct

SEQ ID NO: 13128 - DNA, 110 bp, synthetic construct
  source 1..110: mol_type = other DNA
tccaacttccaactgaataaagtagcctgccccaaaatacagactactagagcaaagacagctttgtgccttagtgccgtcccggtggaatttgaaggagccttaggcaa

SEQ ID NO: 13129 - DNA, 110 bp, synthetic construct
  source 1..110: mol_type = other DNA
agacagctttgtgccttagtgccgtcccggtggaatttgaaggagccttaggcaaagtcttaaaggacacaaagataaagattggggaggagagaagaggaaagcactac

SEQ ID NO: 13130 - DNA, 110 bp, synthetic construct
  source 1..110: mol_type = other DNA
gcatgtgaggagtagtgaagaagagcagagctgtcacctccactgcttcatactctatgctcctcttaatacaacccgaggccacacttcagcatccgcatatcacacca

SEQ ID NO: 13131 - DNA, 110 bp, synthetic construct
  source 1..110: mol_type = other DNA
tgaagcagcccacccagtgctatcagttagtcagtcaacaaacctcgactctgtcctgcagctcttgcacctgcttccttagatcccctactggaaaccaagcttctccc

SEQ ID NO: 13132 - DNA, 110 bp, synthetic construct
  source 1..110: mol_type = other DNA
cacgaatctcttggttattggcacaaatgctcggaggtgccggcaccaagaaagagaaagctgtggaaaatccactccactgcatccaacagagaatcagcgagaactcc

SEQ ID NO: 13133 - DNA, 110 bp, synthetic construct
  source 1..110: mol_type = other DNA
gaaagctgtggaaaatccactccactgcatccaacagagaatcagcgagaactccgtcctttctggctccctgttcatgacggatgtgtgaggggaccattcacttgttg

SEQ ID NO: 13134 - DNA, 110 bp, synthetic construct
  source 1..110: mol_type = other DNA
gcccacttttcacactcatgcctccctcggcctctccccatctcaaaccactcatgtgcctttggaaaccactggttagaatttgggggtcatggagttctcttgcagct

SEQ ID NO: 13135 - DNA, 110 bp, synthetic construct
  source 1..110: mol_type = other DNA
tcagccttcagattggaaccggcctaggatctacatactagtgggcaagcatacagttaatttcttccacctggtttcatatttgtaaaatagctttaaagacatggctc

SEQ ID NO: 13136 - DNA, 110 bp, synthetic construct
  source 1..110: mol_type = other DNA
gttaatttcttccacctggtttcatatttgtaaaatagctttaaagacatggctcagaatgttatccatagcccctgaggaggagccagaggtccttaacttttgttttt

SEQ ID NO: 13137 - DNA, 110 bp, synthetic construct
  source 1..110: mol_type = other DNA
gggaggagaaaagggcctgaggctgcatttctaacaagcttccagatgatgctgttgctgctggttcacgaaccacactttgagtagccgctgagggaggaggctgaggg

SEQ ID NO: 13138 - DNA, 110 bp, synthetic construct
  source 1..110: mol_type = other DNA
tgctgctggttcacgaaccacactttgagtagccgctgagggaggaggctgagggccgtctgacagctgtttccacctgccaggtgagtgcctcctgtcatctcattagc

SEQ ID NO: 13139 - DNA, 110 bp, synthetic construct
  source 1..110: mol_type = other DNA
atttttctgtgctggaactttatttttaaaggcagtttgaatgcaagagagctgtgagtcccctgaaggttgaaaaacagtagagaaacaaggccgaaaggcaagtgcac

SEQ ID NO: 13140 - DNA, 110 bp, synthetic construct
  source 1..110: mol_type = other DNA
gagtcccctgaaggttgaaaaacagtagagaaacaaggccgaaaggcaagtgcaccttttcagtaatgactccctcacacctctcttccaccacctgctcttaactcctc

SEQ ID NO: 13141 - DNA, 110 bp, synthetic construct; identical to SEQ ID NO: 13139
  source 1..110: mol_type = other DNA

SEQ ID NO: 13142 - DNA, 110 bp, synthetic construct; identical to SEQ ID NO: 13140
  source 1..110: mol_type = other DNA

SEQ ID NO: 13143 - DNA, 110 bp, synthetic construct
  source 1..110: mol_type = other DNA
ttttctctcttctacatcagtgaccttttcaaaagatgggattcccatcctaagagtttactggagtatcatcaataaaaatgctactccggttaccattctgctcccta

SEQ ID NO: 13144 - DNA, 110 bp, synthetic construct
  source 1..110: mol_type = other DNA
gtttactggagtatcatcaataaaaatgctactccggttaccattctgctccctacaacacaagaacatctaggaaaagcatgacctagagcctcacgaaatattataaa

SEQ ID NO: 13145 - DNA, 110 bp, synthetic construct
  source 1..110: mol_type = other DNA
tggaggtaaggagactgaagctgcctgacactgagtcacttggggagagtcgcgagtcactcttgaagcagaatggtgtgtggcggcacatcccaaactacatcccagaa

SEQ ID NO: 13146 - DNA, 110 bp, synthetic construct
  source 1..110: mol_type = other DNA
aggttccaaggaccatcagcatgcaccccttttacaggagggaaactgagcctcggagaaggagcaggaagtttgctaaaggtcctagcagacaggcgggtaggagaggg

SEQ ID NO: 13147 - DNA, 110 bp, synthetic construct
  source 1..110: mol_type = other DNA
ccgccttcttcagggctggggcatcgttcaccccgtctccagtctgagggccaggttaggtgggttctcgcctgagaaactttccttccacctccctgactcccctcaac

SEQ ID NO: 13148 - DNA, 110 bp, synthetic construct
  source 1..110: mol_type = other DNA
ttaggtgggttctcgcctgagaaactttccttccacctccctgactcccctcaactcagcccaccaccaagtttaggggacatccccaaggaagcaggcagctggacaga

SEQ ID NO: 13149 - DNA, 110 bp, synthetic construct
  source 1..110: mol_type = other DNA
gggggtcatcattatgctccccaaatccttctgtttccccaccatgggggcacccagtaggactgctcgtcccagctcccggcgtgaagtgcaaaaagaatgtatgtcag

SEQ ID NO: 13150 - DNA, 110 bp, synthetic construct
  source 1..110: mol_type = other DNA
cacaataatgtaaggaccacacagttggtccatgggagaacagagctttgaacacaggccatctggccccagagcccaggctcgtaactcctgtgctgcactgcttgtgc

SEQ ID NO: 13151 - DNA, 110 bp, synthetic construct
  source 1..110: mol_type = other DNA
cagctcatacagctcaaaaaaggaaacaacccaatcgaaaagtcagcagaagacctagacatttccccaaagaagatataaatatgtccaacaggcacatgaaaagatac

SEQ ID NO: 13152 - DNA, 110 bp, synthetic construct
  source 1..110: mol_type = other DNA
aaaaaaggaaacaacccaatcgaaaagtcagcagaagacctagacatttccccaaagaagatataaatatgtccaacaggcacatgaaaagatactcaacatctctaata

SEQ ID NO: 13153 - DNA, 110 bp, synthetic construct
  source 1..110: mol_type = other DNA
ctccaggccacaacataacacaggtgtaagtgctggcagtgggtagatattctggaaaagatggtttaaaactgaagacacaaacccgcctggaaggcttcccgtgccac

SEQ ID NO: 13154 - DNA, 110 bp, synthetic construct
  source 1..110: mol_type = other DNA
ttatatcttacacccccaccaaaactactaaagaactggacagtggagtgactgaaacagaaaattcacaacagcaccttataaagaagtaaacttggaaactgctggtc

SEQ ID NO: 13155 - DNA, 110 bp, synthetic construct
  source 1..110: mol_type = other DNA
aacagaaaattcacaacagcaccttataaagaagtaaacttggaaactgctggtcagttttctaaacctcagacactgccctgcccactacctactcagccagggactgc

SEQ ID NO: 13156 - DNA, 110 bp, synthetic construct
  source 1..110: mol_type = other DNA
tggcacagtcattttgaaagggaaaacagctgtacggtgaaaacagtcaatactctaagggatcatctcaaaactcccagttacatgcaactcaggtgctgggaccccag

SEQ ID NO: 13157 - DNA, 110 bp, synthetic construct
  source 1..110: mol_type = other DNA
tgcactgtcaaccacgacatgggcatgtcgcccatgaccctacacagtcagctatgccatgagctaacagaccctccagaggccagaagcccaggaggggtagggatgtt

SEQ ID NO: 13158 - DNA, 110 bp, synthetic construct
  source 1..110: mol_type = other DNA
ccacactgagtgactctgagctagaccacttcagcaagaggtgaaaacaggataggctaattcgagaaatggaaaagcctttacttgtatggatgcagcaaatccagctg

SEQ ID NO: 13159 - DNA, 110 bp, synthetic construct
  source 1..110: mol_type = other DNA
gctaattcgagaaatggaaaagcctttacttgtatggatgcagcaaatccagctgcctcggaacaaagcaacaatttaaaagcaagggtgttgtttctcttttaaacatt

SEQ ID NO: 13160 - DNA, 110 bp, synthetic construct
  source 1..110: mol_type = other DNA
ttgactccttggttattggtgacccccaggcgagccccggaccggacaatggcgcggcacaagttggcgttccctttcatgtacgctaagagcagcactggaagacaaaa

SEQ ID NO: 13161 - DNA, 110 bp, synthetic construct
  source 1..110: mol_type = other DNA
ttgggggtgagggctggaccgtccactctgagaatctctgggctagatgaccatttggaagacgttatgagctaaagttctaccagaaaaatgccccttatgtttcagtt

SEQ ID NO: 13162 - DNA, 110 bp, synthetic construct
  source 1..110: mol_type = other DNA
aacccaccacgatccctgattacaaaaacaagcaatacgtgcctcacatttaacagcacacatttgtggccgagccctttcgagcactctttcaaatgtgtaacttctcc

SEQ ID NO: 13163 - DNA, 110 bp, synthetic construct
  source 1..110: mol_type = other DNA
gcacacatttgtggccgagccctttcgagcactctttcaaatgtgtaacttctcctccagacggcagggggcactctgtgatcttttaaaagccaacatttgactccagg

SEQ ID NO: 13164 - DNA, 110 bp, synthetic construct
  source 1..110: mol_type = other DNA
ctatataatgcccaaagcagatatattttaccccacaaaagcaccagccagaacatactttaggagctcccgttgtggtgcaacagaaatgaatctattatccacgagga

SEQ ID NO: 13165 - DNA, 110 bp, synthetic construct
  source 1..110: mol_type = other DNA
ttttaccccacaaaagcaccagccagaacatactttaggagctcccgttgtggtgcaacagaaatgaatctattatccacgaggatgtgggttcaatccctgacctcgct

SEQ ID NO: 13166 - DNA, 110 bp, synthetic construct
  source 1..110: mol_type = other DNA
gagagccctcttctcagcttcatctatccatctgcccaacggatatttctccccagcggcccacaggcacattaaattctctatatccaaaacaaaacttcaggagttcc

SEQ ID NO: 13167 - DNA, 110 bp, synthetic construct
  source 1..110: mol_type = other DNA
tgcagcatgtggaagtttccaggccaggaatcagatctgggttgcagtttcgacctacagtgcagctttgacaaaaccagatactttaacccactgtgccgggctgggga

SEQ ID NO: 13168 - DNA, 110 bp, synthetic construct
  source 1..110: mol_type = other DNA
agtttcgacctacagtgcagctttgacaaaaccagatactttaacccactgtgccgggctggggattgaacctgcctcgtggtgctgcagaagacagtgctgattccatt

SEQ ID NO: 13169 - DNA, 110 bp, synthetic construct
  source 1..110: mol_type = other DNA
catggcaatcccagatcctcgacctcactgggccaggccaagacgcaggttcagtccctgtcctcgctcagtgggttaaggaccagggttgctgtgagctgtggtgtatg

SEQ ID NO: 13170 - DNA, 110 bp, synthetic construct
  source 1..110: mol_type = other DNA
tcctcgacctcactgggccaggccaagacgcaggttcagtccctgtcctcgctcagtgggttaaggaccagggttgctgtgagctgtggtgtatgtaggtccaagaccgc

SEQ ID NO: 13171 - DNA, 110 bp, synthetic construct
  source 1..110: mol_type = other DNA
ataaaagtgttggaagacttggggaaatattttataacccttaggtgaagaagatatgcactaacaagacacaaaaagatccctctagaggtgattacaccaaagttaaa

SEQ ID NO: 13172 - DNA, 110 bp, synthetic construct
  source 1..110: mol_type = other DNA
tgctgttttgggaaatcgggttcctgtagcctccacctaaaggggcagctgataccatatctattgctctgcagcctcctgtgctggggtctgccagggactccgtcctg

SEQ ID NO: 13173 - DNA, 110 bp, synthetic construct
  source 1..110: mol_type = other DNA
tgcagtgaatggagagaaatcttgcctccctgtttcagaaagtacttcctttagcccctggactgtgccccgagatccccgagacattctgccccagagcctgctgagct

SEQ ID NO: 13174 - DNA, 110 bp, synthetic construct
  source 1..110: mol_type = other DNA
ccctggactgtgccccgagatccccgagacattctgccccagagcctgctgagctccccccaggctgatccacaaggactgggtggcctataattagccaagtggggggg

SEQ ID NO: 13175 - DNA, 110 bp, synthetic construct
  source 1..110: mol_type = other DNA
ctccttttgcctgcttccccaaggagcttactctctcaccgaccccttcacatcttcctaccggccccttctcaacaacagtaaaacaggggtgagtccccagaaattct

SEQ ID NO: 13176 - DNA, 110 bp, synthetic construct
  source 1..110: mol_type = other DNA
tcctaccggccccttctcaacaacagtaaaacaggggtgagtccccagaaattctcctcctacgtatgtaccccacagacatgcactagaatgttcatagcagggagttc

SEQ ID NO: 13177 - DNA, 110 bp, synthetic construct
  source 1..110: mol_type = other DNA
catccctgtgatagtccctgtgcttggtccatttcttagatgctcagcagatatgtatcaaatcgataaaagaatgaatgacaggtggctgaaaatcagactgggttatc

SEQ ID NO: 13178 - DNA, 110 bp, synthetic construct
  source 1..110: mol_type = other DNA
ctgctgccctggggggtccttctggggccctagagccaggagcggggcggggggtctgcttgcccttccccagcattgctttcggaccgtcggagctaagtaccttggtg

SEQ ID NO: 13179 - DNA, 110 bp, synthetic construct
  source 1..110: mol_type = other DNA
ctgcttgcccttccccagcattgctttcggaccgtcggagctaagtaccttggtgtattctcagcgcttctctgttttcaccaaatctgactttctttccagtcctgtga

SEQ ID NO: 13180 - DNA, 110 bp, synthetic construct
  source 1..110: mol_type = other DNA
cagctgcagctccgatttgattcctagactgggaacttgagtatgctgaaggtacaggcctatatatgatccagcagtttcatttctgggtatgtatcggaaggaaatat

SEQ ID NO: 13181 - DNA, 110 bp, synthetic construct; identical to SEQ ID NO: 13180
  source 1..110: mol_type = other DNA

SEQ ID NO: 13182 - DNA, 110 bp, synthetic construct; identical to SEQ ID NO: 13180
  source 1..110: mol_type = other DNA

SEQ ID NO: 13183 - DNA, 110 bp, synthetic construct; identical to SEQ ID NO: 13180
  source 1..110: mol_type = other DNA

SEQ ID NO: 13184 - DNA, 110 bp, synthetic construct
  source 1..110: mol_type = other DNA
ctgctttctgagagcagctcctggacttccctgcatgctatccttgtgccggtcagatcagggaggaactgggaatgcaggaaggtggcgccaggacagcagctttggag

SEQ ID NO: 13185 - DNA, 110 bp, synthetic construct
  source 1..110: mol_type = other DNA
gatcagggaggaactgggaatgcaggaaggtggcgccaggacagcagctttggagccacatcatgtagcagcttggagaccaaagacaactgcctgtccctgagtgctac

SEQ ID NO: 13186 - DNA, 110 bp, synthetic construct
  source 1..110: mol_type = other DNA
actgcagaagacatctgtcacacaccaaccctgccccgtgtccgggccccacgggaaagggaagacgctctcactggtgcttggctgcatagtttagttttgattgcagt

SEQ ID NO: 13187 - DNA, 110 bp, synthetic construct
  source 1..110: mol_type = other DNA
ccctgccactgcgccacgatgggaactcctgttgtttgccttttcactagaatatgaactccccccaagccagggccctgtttaccttgttcactgctatagcttaaatg

SEQ ID NO: 13188 - DNA, 110 bp, synthetic construct
  source 1..110: mol_type = other DNA
gaactccccccaagccagggccctgtttaccttgttcactgctatagcttaaatgccaggataatacctagcacagagtcggtgctcaatatgcaggctccctcccctgc

SEQ ID NO: 13189 - DNA, 110 bp, synthetic construct
  source 1..110: mol_type = other DNA
ggccgggcttcctgggtggaaaccagccgtggtggtctcacaggaccctgggtgaaagggcagggtagggcagcccccggggactcaggaatagctatagctctgggcct

SEQ ID NO: 13190 - DNA, 110 bp, synthetic construct
  source 1..110: mol_type = other DNA
aagggcagggtagggcagcccccggggactcaggaatagctatagctctgggcctgggggcaggctgtgagagggctgcagtcgtgtgtgggcagggccagcctgtgagg

SEQ ID NO: 13191 - DNA, 110 bp, synthetic construct
  source 1..110: mol_type = other DNA
aaagcctacgtgtagctctgcagaccaggcgtgctatggcttagtgttttacataagcatagccaccaaatgatgcttttttcccctggtcagttaatgcgattaatgtc

SEQ ID NO: 13192 - DNA, 110 bp, synthetic construct
  source 1..110: mol_type = other DNA
gtgcttaggggtaggaccagagctctcaggtatgctcagtccctcatgtttagcccaaagtcttgagacttcccttcaaagcatgagatgcattgtgctggttgaggtgc

SEQ ID NO: 13193 - DNA, 110 bp, synthetic construct
  source 1..110: mol_type = other DNA
caaagtcttgagacttcccttcaaagcatgagatgcattgtgctggttgaggtgcacatttgttttctggggaggagggtaggtaaacttgagtttacacacatgctcgt

SEQ ID NO: 13194 - DNA, 110 bp, synthetic construct
  source 1..110: mol_type = other DNA
ggagcaggcccaggtccacgctggcttgccctctcagcgctgggggccaggccatgagtgtctggctttctgggcaggctctgaagggttatctccctgcttctgttctc

SEQ ID NO: 13195 - DNA, 110 bp, synthetic construct
  source 1..110: mol_type = other DNA
cagggcccctgacctctgaccttggactgagccaggaccttgtcaggactcgactgagctctgacctcagctagggcccttatccaacattcagttctcccgggagaccc

SEQ ID NO: 13196 - DNA, 110 bp, synthetic construct
  source 1..110: mol_type = other DNA
gagctctgacctcagctagggcccttatccaacattcagttctcccgggagaccctgcagaccagtagtcctggggggagacgctgcacgtctctgtgggtgcggccccc

SEQ ID NO: 13197 - DNA, 110 bp, synthetic construct
  source 1..110: mol_type = other DNA
gagagtgaggtcaaggttttgtttcctctgccttctttccagggggatttcatggcctgtctggttgacggccacactgtttgcagggcagccctctgcacccagctctc

SEQ ID NO: 13198 - DNA, 110 bp, synthetic construct
  source 1..110: mol_type = other DNA
cctgtctggttgacggccacactgtttgcagggcagccctctgcacccagctctcactgtaccgatcgcctgcgactgctgaaaggaatcgccccgcaggtgtatcggtc

SEQ ID NO: 13199 - DNA, 110 bp, synthetic construct
  source 1..110: mol_type = other DNA
gttgggttcatttctgctgagccacaatgggaactcctcatctgatcttaacagtggcccctgtgaatcagggaaggtacatggtagccaccacattctgcagttaggga

SEQ ID NO: 13200 - DNA, 110 bp, synthetic construct; identical to SEQ ID NO: 13199
  source 1..110: mol_type = other DNA

SEQ ID NO: 13201 - DNA, 110 bp, synthetic construct
  source 1..110: mol_type = other DNA
agaactgtaggtcaaagggagaagcgaatgcctagagtgtagggatgttgtaggaggtagaggtaacctaattaggttgggcaccacctatcacagtgcctggcctggag

SEQ ID NO: 13202 - DNA, 110 bp, synthetic construct
  source 1..110: mol_type = other DNA
ggtagaggtaacctaattaggttgggcaccacctatcacagtgcctggcctggagaagtccttgctaagcggtggctcttgatggtgtcgaggacctcaaagatgatggt

SEQ ID NO: 13203 - DNA, 110 bp, synthetic construct
  source 1..110: mol_type = other DNA
gcttatggggtgtgaacaagaccaggatttgggctgtgctgatggggaggaagggttgaatcctggatatatcccttctcccttctcaccagaaacctcctctttctatt

SEQ ID NO: 13204 - DNA, 110 bp, synthetic construct
  source 1..110: mol_type = other DNA
ttgaatcctggatatatcccttctcccttctcaccagaaacctcctctttctattcaggagcttggtgctccccttcccccattcccttcccaattaaatggaggtggct

SEQ ID NO: 13205 - DNA, 110 bp, synthetic construct
  source 1..110: mol_type = other DNA
ctttgctttccttattaattaattcatcctgctcattccaacttgaaagcatgatgtgttgtagctgctcacgtagccatctcaagagaccggaataagcatacatttca

SEQ ID NO: 13206 - DNA, 110 bp, synthetic construct
  source 1..110: mol_type = other DNA
tctgcgtctgcacagaactgaaggcttcctcatttgcagggtctcttccaggatctgggctgctcaggatctggaggcggcccgcctcacccctagcgcttaattaaaat

SEQ ID NO: 13207 - DNA, 110 bp, synthetic construct
  source 1..110: mol_type = other DNA
tgggctgctcaggatctggaggcggcccgcctcacccctagcgcttaattaaaatgaagatgaagtgctctccgtgacgggtcacgctctgtggcagtcactgcgccaag

SEQ ID NO: 13208 - DNA, 110 bp, synthetic construct
  source 1..110: mol_type = other DNA
caccgcagggtgagctgctcaggatctgaaccagggaagtcagctggggtgggaagaagagggctgggatggaggaaagtgtgactgattgggtggggggttgagaggga

SEQ ID NO: 13209 - DNA, 110 bp, synthetic construct
  source 1..110: mol_type = other DNA
cttggcctatttcaacagccatcacttttccttacaactgagaccacgctcacgcatgacaggtttggcattttggcatttgagctcccctgagaatttcacatgtgtga

SEQ ID NO: 13210 - DNA, 110 bp, synthetic construct
  source 1..110: mol_type = other DNA
tcctatccacacacacacacaaagcaaagcagatgtggaaatctgaacttctgccacagtctcttgctgtgccatcaagtcacaccaccctttgctttctctctgatctt

SEQ ID NO: 13211 - DNA, 110 bp, synthetic construct
  source 1..110: mol_type = other DNA
acagtctcttgctgtgccatcaagtcacaccaccctttgctttctctctgatcttgaactcccaccaaattccaggaaactcctcaagcccgtggtgcacacgaaacccc

SEQ ID NO: 13212 - DNA, 110 bp, synthetic construct
  source 1..110: mol_type = other DNA
ttcctgtgaggagtcttaggacaatgaagtttccaactccacttatccagagctgtgggagcctcgccagaaatgtagcagatgcggagcaatgcgtgacacaaaggaca

SEQ ID NO: 13213 - DNA, 110 bp, synthetic construct
  source 1..110: mol_type = other DNA
tgggagcctcgccagaaatgtagcagatgcggagcaatgcgtgacacaaaggacacagcttccccagtttgggtcttatggatgcacagaggttaacaagggtgcctgag

SEQ ID NO: 13214 - DNA, 110 bp, synthetic construct
  source 1..110: mol_type = other DNA
tgaagaggaggaaaaatcaatagaggacttgagtttattaggtatgatcttatgactttctctcatgagataatttctcgaactggaatccagaaagtgaaacatatcac

SEQ ID NO: 13215 - DNA, 110 bp, synthetic construct
  source 1..110: mol_type = other DNA
ctttctctcatgagataatttctcgaactggaatccagaaagtgaaacatatcactgagtgaatacaaattttggagtatcttcttccccacctctgcttttaacccatc

SEQ ID NO: 13216 - DNA, 110 bp, synthetic construct
  source 1..110: mol_type = other DNA
atgctaggggttgtctcagcaacacccaccccaccccccaaaccaagcagaagcaagttcctacttgcatactcctactgacagggtgctcactaccttatgagctagcc

SEQ ID NO: 13217 - DNA, 110 bp, synthetic construct
  source 1..110: mol_type = other DNA
agttcctacttgcatactcctactgacagggtgctcactaccttatgagctagcccctttcacatgtggtcagtatcatctgagaagcagacatcttcttcttgaagttt

SEQ ID NO: 13218 - DNA, 110 bp, synthetic construct
  source 1..110: mol_type = other DNA
ttcctacctgctccttcctagttacaagcctgaggctggagctggcttgcgtcagagccagaggcttagattgtatgtattcacataaggcttccccactcctctggaca

SEQ ID NO: 13219 - DNA, 110 bp, synthetic construct
  source 1..110: mol_type = other DNA
actccagaaaatctttaaacttggcgctgctctgagaatcagacattcagtgacctttctctctctttctctgactccaccagggacagcttgctgtaacagaacaaacg

SEQ ID NO: 13220 - DNA, 110 bp, synthetic construct
  source 1..110: mol_type = other DNA
tttctctctctttctctgactccaccagggacagcttgctgtaacagaacaaacgaaagagaccagccttctgctttctcgtgcagcttcccacactcacccttggtgag

SEQ ID NO: 13221 - DNA, 110 bp, synthetic construct
  source 1..110: mol_type = other DNA
acagattttggtgcctggaagtaaagtgcccctgcaacaaacacccaaaaatgctgaaggggctttggaactggatggtgggcggagggtagaagaatattgaagagcat

SEQ ID NO: 13222 - DNA, 110 bp, synthetic construct
  source 1..110: mol_type = other DNA
cagcatcaccagccgctcacctctggaaaaaggtccatctcagagatttccattccctctgggggccaacttccaaattctgcgcttgaaagatttgttttaattaagcc

SEQ ID NO: 13223 - DNA, 110 bp, synthetic construct
  source 1..110: mol_type = other DNA
cctctgggggccaacttccaaattctgcgcttgaaagatttgttttaattaagcccgccgcagtcagaggccttgaacgttatctccatctcggctggctcctttccttt

SEQ ID NO: 13224 - DNA, 110 bp, synthetic construct
  source 1..110: mol_type = other DNA
cctctgctctgcaataaacaggtctcaacagtcacaaaggacaggctctgtcttcagggagtttagagctcaggtccccaaatcacaggagtgtgatggggtctgggggg

SEQ ID NO: 13225 - DNA, 110 bp, synthetic construct
  source 1..110: mol_type = other DNA
agggagtttagagctcaggtccccaaatcacaggagtgtgatggggtctgggggggtggtccccaccgctggatctggggatctggcacctaaagggtggctgtgaggat

SEQ ID NO: 13226 - DNA, 110 bp, synthetic construct
  source 1..110: mol_type = other DNA
gaagctctctgaaccccgtactattgggaattttatggagctttattacatagataccaccaatgaggatctctgtttccagcctctcccttctctggagaatgagaggg

SEQ ID NO: 13227 - DNA, 110 bp, synthetic construct
  source 1..110: mol_type = other DNA
tttctttgtcttcctcttggctaaatattatacctgccatcctccttcctcatcctggaagacagaggtgtggctaagattttccttcctgtggtggctcagcggttatt

SEQ ID NO: 13228 - DNA, 110 bp, synthetic construct
  source 1..110: mol_type = other DNA
tggaagacagaggtgtggctaagattttccttcctgtggtggctcagcggttattgaactgctaatatccatgaggacgtaggttcgagccctggccttgctcagtgggg

SEQ ID NO: 13229 - DNA, 110 bp, synthetic construct
  source 1..110: mol_type = other DNA
ctttgcatgagtctggcttgtcctggtaaacttttcagcttccccaaatactgtctcttcccagattggacaagaggacgaggcgcagagtgacattttctctatcaagg

SEQ ID NO: 13230 - DNA, 110 bp, synthetic construct
  source 1..110: mol_type = other DNA
ggttctcttttaaacattgttcggcttgaatctgctctttcaggaaaagtatttcagccttcagcttctcctccatgtgatcggctgctgtccgcacgtgaacaatgttc

SEQ ID NO: 13231 - DNA, 110 bp, synthetic construct
  source 1..110: mol_type = other DNA
agccttcagcttctcctccatgtgatcggctgctgtccgcacgtgaacaatgttctctcggtattttaataccaactcccggagcgcctgaattcaaggaacaaatggtt

SEQ ID NO: 13232 - DNA, 110 bp, synthetic construct
  source 1..110: mol_type = other DNA
gtatctgactacccagaacccagcaaagtgcctgcacagatgaagcaggagtgaaatggctactgaagtgactactgaatccgagctagcccattcccacaccacatgag

SEQ ID NO: 13233 - DNA, 110 bp, synthetic construct
  source 1..110: mol_type = other DNA
atggctactgaagtgactactgaatccgagctagcccattcccacaccacatgagaactacattagcaccacaaacagctttagaaatttacctttgtgtcatctacaaa

SEQ ID NO: 13234 - DNA, 110 bp, synthetic construct
  source 1..110: mol_type = other DNA
attgcagagaagtcttatcaatttttttaatggctttcaagcacaaaatattactctaggccagtggttctcaaagtatggtccctgaaccaacaacatcggcattagta

SEQ ID NO: 13235 - DNA, 110 bp, synthetic construct; identical to SEQ ID NO: 13234
  source 1..110: mol_type = other DNA

SEQ ID NO: 13236 - DNA, 110 bp, synthetic construct
  source 1..110: mol_type = other DNA
taggacctctggaaggggtacagacctactgacacctgatttcagctcagtgatactgattctggacatctggcctcctcaactatgagagaataaacttcttattctaa

SEQ ID NO: 13237 - DNA, 110 bp, synthetic construct
  source 1..110: mol_type = other DNA
gtggacccttgtctctactcctgaggcccttcctctctcagaagctccactgatctgctttttttttttttttacaatttcttcacctcagccctgctgtctctcctgta

SEQ ID NO: 13238 - DNA, 110 bp, synthetic construct
  source 1..110: mol_type = other DNA
acaacacctcccttcgacccacgccttctgaactcatgactattccagatcatttctttttcctgcgaaaaactcagatgtgccaatatacaggcatgaccattggtggg

SEQ ID NO: 13239 - DNA, 110 bp, synthetic construct
  source 1..110: mol_type = other DNA
ctttttcctgcgaaaaactcagatgtgccaatatacaggcatgaccattggtgggttttgaagtaaactaaggggctggcactcaggactgcttctcccgaaagaggcta

SEQ ID NO: 13240 - DNA, 110 bp, synthetic construct
  source 1..110: mol_type = other DNA
gccacttgggtggttctggcttcagtctctcatgcacgtgcactggatggtggtgccccctcctcactcccagtttctttgcccatttgaagcccaaagaggtctctgct

SEQ ID NO: 13241 - DNA, 110 bp, synthetic construct
  source 1..110: mol_type = other DNA
gaactcacaccttgttactcaccagagaattcacactggagagaaacccgttgaatgtagcaactgtcagaaggccttcagtgggcacacagctttccttaaacatcagg

SEQ ID NO: 13242 - DNA, 110 bp, synthetic construct
  source 1..110: mol_type = other DNA
tgtagcaactgtcagaaggccttcagtgggcacacagctttccttaaacatcaggaatgtcatactggaagggagcttggggaacacaagagagtcctccaacaggactt

SEQ ID NO: 13243 - DNA, 110 bp, synthetic construct
  source 1..110: mol_type = other DNA
caggagagtggtataaaaaacagggaaaagggagttcccactgtggcacaacaggactagcattgtctctggagcgccaggacacaggtttgatccctggctggcgctgc

SEQ ID NO: 13244 - DNA, 110 bp, synthetic construct
  source 1..110: mol_type = other DNA
actagcattgtctctggagcgccaggacacaggtttgatccctggctggcgctgcagatcaaaggatccaatattgccacagctgcagtgtagccctcagctgcggcttg

SEQ ID NO: 13245 - DNA, 110 bp, synthetic construct
  source 1..110: mol_type = other DNA
gggaggacgatgagccctgctccacccccaggaatgttctaccaatggacaggggaagaagagtcctgtctcagaaagagagcagagcaggagctgggatgggacgaggg

SEQ ID NO: 13246 - DNA, 110 bp, synthetic construct
  source 1..110: mol_type = other DNA
aagaagagtcctgtctcagaaagagagcagagcaggagctgggatgggacgaggggtcagggtacagattagagcttgggccttggtgggctactccagaaatagccttc

SEQ ID NO: 13247 - DNA, 110 bp, synthetic construct
  source 1..110: mol_type = other DNA
tacctgtcccacaccatatgacaaaatcactggtccacagtaaaacaagatgcaagacatagaagttaagtatgtatctatcgatccccaacttcaagacctggttcaaa

SEQ ID NO: 13248 - DNA, 110 bp, synthetic construct
  source 1..110: mol_type = other DNA
gacatagaagttaagtatgtatctatcgatccccaacttcaagacctggttcaaaattctaatccagaaagtcctccccaattaaatcagcccctctgattattctctct

SEQ ID NO: 13249 - DNA, 110 bp, synthetic construct
  source 1..110: mol_type = other DNA
gcctacaaaccagagtctggctctgtctgggaacgtagatgagacggcaggaaaaaattgaatctcagagcacttgacaaccagacagagctgccactctgaacagatgg

SEQ ID NO: 13250 - DNA, 110 bp, synthetic construct
  source 1..110: mol_type = other DNA
aattgaatctcagagcacttgacaaccagacagagctgccactctgaacagatggggtgtcctaagtcaggcatttacatttcaaggaacctgtagaattcaatatacag

SEQ ID NO: 13251 - DNA, 110 bp, synthetic construct
  source 1..110: mol_type = other DNA
gtttggaaggaagcaactccttcccgggcccctcccttcggctggaggtggacttccagctctggcccgttgccaagaaaccaagagtaacctgatgctacccttatgct

SEQ ID NO: 13252 - DNA, 110 bp, synthetic construct
  source 1..110: mol_type = other DNA
ccagctctggcccgttgccaagaaaccaagagtaacctgatgctacccttatgctgcccttgtagtatctgccacacccgccttgatagaatccttttataagcctcatg

SEQ ID NO: 13253 - DNA, 110 bp, synthetic construct
  source 1..110: mol_type = other DNA
agatgacgcctgatgtcctagaggcatgaacagtctaggcttcagtcaaactgacctgggttggaattctaactatgcctctgaggaactgtgacgttgggcagctcatt

SEQ ID NO: 13254 - DNA, 110 bp, synthetic construct
  source 1..110: mol_type = other DNA
ctgggttggaattctaactatgcctctgaggaactgtgacgttgggcagctcattaatctattcaaacctcagtcttcccatctgaaaaatggagacaaaaagtgacttt

SEQ ID NO: 13255 - DNA, 110 bp, synthetic construct
  source 1..110: mol_type = other DNA
caagagaatccaactgcagtggctgaggttgatggggagatgcaggtttgatcccccacctaccacagtggttaaaggatctaatggtcctgctcctgtggtgtagtttg

SEQ ID NO: 13256 - DNA, 110 bp, synthetic construct
  source 1..110: mol_type = other DNA
ggagatgcaggtttgatcccccacctaccacagtggttaaaggatctaatggtcctgctcctgtggtgtagtttgcagctgtgactcggattcactccctggcccaggaa

SEQ ID NO: 13257 - DNA, 110 bp, synthetic construct
  source 1..110: mol_type = other DNA
gatctttgtaaatgcaggaagggctgggtcctcagaggcgcttcctggagatctgggaagggattcggtctacaggatggctaggctttgtgggctcagagaaatgtgca

SEQ ID NO: 13258 - DNA, 110 bp, synthetic construct
  source 1..110: mol_type = other DNA
ggaagggattcggtctacaggatggctaggctttgtgggctcagagaaatgtgcacgtggcatttcaggcctgtagggcactcgtattcaggtagctgcccagggcacgt

SEQ ID NO: 13259 - DNA, 110 bp, synthetic construct
  source 1..110: mol_type = other DNA
cagacttgtcagtgaaggcaagaaccagacttgggactgtgtagttaggaagagtgcccagtaccagcctgcagaacaagtccggtgagcaacactctgagaccgggtca

SEQ ID NO: 13260 - DNA, 110 bp, synthetic construct
  source 1..110: mol_type = other DNA
gcccagtaccagcctgcagaacaagtccggtgagcaacactctgagaccgggtcactgaagcttgcaccactccagctgctgtgccagcaactcagtgttaccgcaacct

SEQ ID NO: 13261 - DNA, 110 bp, synthetic construct
  source 1..110: mol_type = other DNA
acgctacctgccctccttaaccctgctttgtggggttgaaggtagtttccacagtgaagagggaccttgtgaaggtcagagggactttttccaacttctccaaaccttcg

SEQ ID NO: 13262 - DNA, 110 bp, synthetic construct
  source 1..110: mol_type = other DNA
tctctctgaggctcaattctatgatctgtaaaacagatcataacagagaggttaggataagattaggtattcacagcacttgacatatatgcggtcctcaataatttcac

SEQ ID NO: 13263 - DNA, 110 bp, synthetic construct
  source 1..110: mol_type = other DNA
gataagattaggtattcacagcacttgacatatatgcggtcctcaataatttcactaatgcctgcctgactcataggcagtgtttcatagagataccaaatcaatgaatg

SEQ ID NO: 13264 - DNA, 110 bp, synthetic construct
  source 1..110: mol_type = other DNA
ctgtctcaccatcatacctcccatgggcactgagtacacctgccagaaggagggagaacagtggtgtcaccatgtgtacccttcctgtaactcgtctgggttcacctgtc

SEQ ID NO: 13265 - DNA, 110 bp, synthetic construct
  source 1..110: mol_type = other DNA
gaacagtggtgtcaccatgtgtacccttcctgtaactcgtctgggttcacctgtccattgtgggattggtatgtgaagaattaaagagtaagagaagcagagattggaaa

SEQ ID NO: 13266 - DNA, 110 bp, synthetic construct
  source 1..110: mol_type = other DNA
tctttctttccgtcttttgggtctcagttcagaaatcaaggccttccttgaaaatgcctcccacctgcccgaggagctttttatgacggcatcctggctctgtttccttg

SEQ ID NO: 13267 - DNA, 110 bp, synthetic construct
  source 1..110: mol_type = other DNA
gcctcccacctgcccgaggagctttttatgacggcatcctggctctgtttccttgatggtttctacttttatctgaaatcatctcgctcctttatctaccttgttcccta

SEQ ID NO: 13268 - DNA, 110 bp, synthetic construct
  source 1..110: mol_type = other DNA
ggcagccagctcccatccctagctgattttcaaaaagtcaccttatgaacacagcaaaagacagcttattgctctcagcactttggaaattccaagggtttgaggagctc

SEQ ID NO: 13269 - DNA, 110 bp, synthetic construct
  source 1..110: mol_type = other DNA
aaaagacagcttattgctctcagcactttggaaattccaagggtttgaggagctctgtgccagaaatggggaccaaatacacattccttattaaaaatcacagcgttaca

SEQ ID NO: 13270 - DNA, 110 bp, synthetic construct
  source 1..110: mol_type = other DNA
ggtttgtgctttttctccagatggtgagttttatccactacattttgatttttctgaatttcctttataaaaggaacttgaacttcagttttgaagcctcccttataacc

SEQ ID NO: 13271 - DNA, 110 bp, synthetic construct
  source 1..110: mol_type = other DNA
gaatttcctttataaaaggaacttgaacttcagttttgaagcctcccttataaccacactcaatcatagttaatgcttttatgatagcatttatagccttgaattttgtt

SEQ ID NO: 13272 - DNA, 110 bp, synthetic construct
  source 1..110: mol_type = other DNA
cttaattgttttccttttaaaaaggtaacagatgatgggtatgttaattagctggatgtggtcatcattttacaacatacacatctgtcaaaacatgttgggcaccttaa

SEQ ID NO: 13273 - DNA, 110 bp, synthetic construct
  source 1..110: mol_type = other DNA
atgtggtcatcattttacaacatacacatctgtcaaaacatgttgggcaccttaaatgaatacactttttatataatttgtcagttatacctcaatagagcgggaaaaca

SEQ ID NO: 13274 - DNA, 110 bp, synthetic construct
  source 1..110: mol_type = other DNA
gtgtgtgtgtgtgtgtgcgcgcgcgcttgccctatatttatgtgttccactttggaaccattcctttctgcctaaaaaaatttcctttagtccttgtattttcagtagat

SEQ ID NO: 13275 - DNA, 110 bp, synthetic construct
  source 1..110: mol_type = other DNA
aaccattcctttctgcctaaaaaaatttcctttagtccttgtattttcagtagatgtgatagtgatgaactctcgtttttcgtttgtctaaaaatatctttactgtgtat

SEQ ID NO: 13276 - DNA, 110 bp, synthetic construct
  source 1..110: mol_type = other DNA
cgtcttgatacatctgtggacacggttttttttgttttttgttttttttccttaggagagatatatcctaaataatgaaaccaaggacaacaaaactgtccccttgaaac

SEQ ID NO: 13277 - DNA, 110 bp, synthetic construct
  source 1..110: mol_type = other DNA
gagagatatatcctaaataatgaaaccaaggacaacaaaactgtccccttgaaacctctgtcccttttgagccagatcttccaataggaattgggtatcagtcaatgaat

SEQ ID NO: 13278 - DNA, 110 bp, synthetic construct
  source 1..110: mol_type = other DNA
cccgtctacaaggtatttcagcatctcttcactctgcatctgaccgcccttcagagtttaggctcctagactcaggagacattcacactggagctaactttgtagcctat

SEQ ID NO: 13279 - DNA, 110 bp, synthetic construct
  source 1..110: mol_type = other DNA
gtttaggctcctagactcaggagacattcacactggagctaactttgtagcctattaggttagcaacaacctcgctttccacacacacagtgctatggaaaaagagtgag

SEQ ID NO: 13280 - DNA, 110 bp, synthetic construct
  source 1..110: mol_type = other DNA
ttccagtccttctgagtcccacgtctcagtaaaggacagcatcatccacctcgctgccccagccgagaaccagggggccacactggatcaatctctcttgccttctcgcc

SEQ ID NO: 13281 - DNA, 110 bp, synthetic construct
  source 1..110: mol_type = other DNA
gccccagccgagaaccagggggccacactggatcaatctctcttgccttctcgccgcgcttctgccctctctggctcacattggtctctcctttctctcccaaccctcgc

SEQ ID NO: 13282 - DNA, 110 bp, synthetic construct
  source 1..110: mol_type = other DNA
attgtcatatgcttaaccaggtggcggctgcaatggcagccactgtaccagatgcggtttcgttgcctgagcaaagtaacacatctcctggcacttcatacgcagctact

SEQ ID NO: 13283 - DNA, 110 bp, synthetic construct
  source 1..110: mol_type = other DNA
ggtttcgttgcctgagcaaagtaacacatctcctggcacttcatacgcagctactgttctagcaaatgcctttttctccaccccattaggggtggcagtgtttagtttca

SEQ ID NO: 13284 - DNA, 110 bp, synthetic construct
  source 1..110: mol_type = other DNA
aatgggaaaaagttataaagtgccaaatttatacacagaataaaaaggctgcacgtggggccggactgggacactttgtgtaggtcccaccctccaagaaggtgaggaca

SEQ ID NO: 13285 - DNA, 110 bp, synthetic construct
  source 1..110: mol_type = other DNA
acaaaatacatggaaaaataacacaaatgtatgctaaccactgacagtgtttggctctggggtcttgggatcaaaatgacccttctcaattatgctaagatcaccgtcct

SEQ ID NO: 13286 - DNA, 110 bp, synthetic construct
  source 1..110: mol_type = other DNA
tctggggtcttgggatcaaaatgacccttctcaattatgctaagatcaccgtcctgactagaatgcatatgacaagctcagcgcaaaactgtgttcttcaaacaccacta

SEQ ID NO: 13287 - DNA, 110 bp, synthetic construct
  source 1..110: mol_type = other DNA
aagtgtgggtgcccggatccccagaactaacatagcttcaaagtcagctccatgcctcaaacttactactggccctcaagcccgaacgcaggccccctggtgcccaaacc

SEQ ID NO: 13288 - DNA, 110 bp, synthetic construct
  source 1..110: mol_type = other DNA
ctcaaacttactactggccctcaagcccgaacgcaggccccctggtgcccaaaccaatcaaactaattcaacatcccataagaaacatgcaccccgcaattgacaaatta

SEQ ID NO: 13289 - DNA, 110 bp, synthetic construct
  source 1..110: mol_type = other DNA
cactgtgctgcgagggaactccacaggtctgggattcttatatttccctcaggccagtggaaggaggttgacatgcaggaaaaagttatctgggaaatgagaatggggca

SEQ ID NO: 13290 - DNA, 110 bp, synthetic construct
  source 1..110: mol_type = other DNA
agtggaaggaggttgacatgcaggaaaaagttatctgggaaatgagaatggggcagctagcacccgggagcacaccaccccctctcaccccccccaaccagctgaagctg

SEQ ID NO: 13291 - DNA, 110 bp, synthetic construct
  source 1..110: mol_type = other DNA
tgcacacacacccacaggaacacatacaaacatgcacacacacaggtgcatccagcacacatgcacccgatggtcacatcgtcggtgtgcacagccctgatcttggacct

SEQ ID NO: 13292 - DNA, 110 bp, synthetic construct
  source 1..110: mol_type = other DNA
cacacatgcacccgatggtcacatcgtcggtgtgcacagccctgatcttggacctgggggtcctagaaaccagatcctgtgtgctttaaatttgtctgggcccctcagac

SEQ ID NO: 13293 - DNA, 110 bp, synthetic construct
  source 1..110: mol_type = other DNA
acacatgcacacacacacacagatgcacacttgtgcacactcgtgtacacaggctccctctctgaccttcactcaggtcctgctgctgtttctccagctgggactccaga

SEQ ID NO: 13294 - DNA, 110 bp, synthetic construct
  source 1..110: mol_type = other DNA
ccctctctgaccttcactcaggtcctgctgctgtttctccagctgggactccagagacttcatctttctgcccacatttcctcctggaggagactccgctcagtatcccg

SEQ ID NO: 13295 - DNA, 110 bp, synthetic construct
  source 1..110: mol_type = other DNA
ttatccccctcaaggctgggccatttaggagctcccattgtggctgagcgggttacgaaccagactagtatccataaggacatgggttagatccctggcctcattcagtg

SEQ ID NO: 13296 - DNA, 110 bp, synthetic construct; identical to SEQ ID NO: 13295
  source 1..110: mol_type = other DNA

SEQ ID NO: 13297 - DNA, 110 bp, synthetic construct
  source 1..110: mol_type = other DNA
aaaatgcaaactggtccatcatgaccaaaagcagatccgtggttgcctagggggtgaaaggactaattacaaagaggtaccaggaaacactggaggtgatagatgtgttc

SEQ ID NO: 13298 - DNA, 110 bp, synthetic construct
  source 1..110: mol_type = other DNA
cgccactcagaaacccaccactcactggtgctgggcaggccctggcttcagcacactggacaacattagctacttatttattatctgatactctccttctcccaactgtg

SEQ ID NO: 13299 - DNA, 110 bp, synthetic construct
  source 1..110: mol_type = other DNA
accgacgaccccgccttcgtcgaggcagccaacaccttgaagtattcgttttatggccagaggaggtgtctttccttcacgccgtagctacgaagttgtgtgacccgggg

SEQ ID NO: 13300 - DNA, 110 bp, synthetic construct
  source 1..110: mol_type = other DNA
ggcctccccgaatgaagaaggagttatgagcctggggggttctgatggcctgattgtctccccctccctgggatgcccttggcgttctggctgtccccaggctagcagca

SEQ ID NO: 13301 - DNA, 110 bp, synthetic construct
  source 1..110: mol_type = other DNA
tggcctgattgtctccccctccctgggatgcccttggcgttctggctgtccccaggctagcagcaggctctgagcgagccccggggccttctctgtggcggaggggggtg

SEQ ID NO: 13302 - DNA, 110 bp, synthetic construct
  source 1..110: mol_type = other DNA
tgccttgttcatttgttcaacagagcttactgagcacttgtcacatgagtcagacactagactgggcatgggggacccagcattgcccaggcaagatgaagtcatttgcc

SEQ ID NO: 13303 - DNA, 110 bp, synthetic construct
  source 1..110: mol_type = other DNA
actagactgggcatgggggacccagcattgcccaggcaagatgaagtcatttgccacctgcagcttgggatctagcaggcgagacagacatgttacgggcaaattctgcc

SEQ ID NO: 13304 - DNA, 110 bp, synthetic construct
  source 1..110: mol_type = other DNA
catgtgacacgtggggaaactgaggccccggaggccactctgtgagagtagagcacaaaccaggatacagccctggatcccattgaggggggcgaaatgcaagcagcagg

SEQ ID NO: 13305 - DNA, 110 bp, synthetic construct
  source 1..110: mol_type = other DNA
caaaccaggatacagccctggatcccattgaggggggcgaaatgcaagcagcaggagactgtctaatctctttagtggatggccagtggctgggtttgttctagttagcg

SEQ ID NO: 13306 - DNA, 110 bp, synthetic construct
  source 1..110: mol_type = other DNA
agggagtttccagggggagtttgacccactgagccccttatttctctgcaaatacatcacatctaccctttaaacttttcccttctagaacgagaaggatgaggagatga

SEQ ID NO: 13307 - DNA, 110 bp, synthetic construct
  source 1..110: mol_type = other DNA
atcacatctaccctttaaacttttcccttctagaacgagaaggatgaggagatgagcacgaaggtctacttagatttggtacggacatcccgtagggtgggagagggtgt

SEQ ID NO: 13308 - DNA, 110 bp, synthetic construct
  source 1..110: mol_type = other DNA
tctgatcttgcctgtgtgggtctcccttcaagcaccggcctgctctccagccccactgtgtcccacacctccgtgtcttggctggtgctgcttctcctgccagaaaggca

SEQ ID NO: 13309 - DNA, 110 bp, synthetic construct
  source 1..110: mol_type = other DNA
ctgtgtcccacacctccgtgtcttggctggtgctgcttctcctgccagaaaggcaaatctctccaaaatgttaagatctacctcaaacgccacatccctctagctgcccc

SEQ ID NO: 13310 - DNA, 110 bp, synthetic construct
  source 1..110: mol_type = other DNA
catccttctcggaggatctgggagaagctccgccttggtattggtcctgatactgagagcagcaggagttctcctgagcagctggtcggttgttaatctcagcaactctt

SEQ ID NO: 13311 - DNA, 110 bp, synthetic construct
  source 1..110: mol_type = other DNA
ccagaaggggagcgaactctggcaccccctgatgccagcatcctcatcagcaatgtgtgcagcatcggggaccatgtggcccaggagctttttcagggctcagatctggg

SEQ ID NO: 13312 - DNA, 110 bp, synthetic construct
  source 1..110: mol_type = other DNA
tggctaggcctgatgattcgtcctaagactgagaaccttgatgtcatcgtcaacgtcagtgacactgaaagctgggaccagcatgttcagaagctcaacaagttcttaga

SEQ ID NO: 13313 - DNA, 110 bp, synthetic construct
  source 1..110: mol_type = other DNA
gcagaagacctcgtgccagccctggcgggaggggagggcgggggacagtcggttcccaagttatgaatggagtcaccccttttcttgttgtcattcagcttgcagactga

SEQ ID NO: 13314 - DNA, 110 bp, synthetic construct
  source 1..110: mol_type = other DNA
ccaagttatgaatggagtcaccccttttcttgttgtcattcagcttgcagactgacccagtctccggcctttgttctcctcctggaacccgggcattgggccccccacac

SEQ ID NO: 13315 - DNA, 110 bp, synthetic construct
  source 1..110: mol_type = other DNA
ggggagaggaacagcgcactgtgcccagtgccctgggacacaccccctcagagcactggcatctataggcgcccccccccccctaacattaattacccaagacctacagc

SEQ ID NO: 13316 - DNA, 110 bp, synthetic construct
  source 1..110: mol_type = other DNA
ctggcatctataggcgcccccccccccctaacattaattacccaagacctacagccttccacaggtgtagcgacttgtgtatcttttgagctatttgaacgctcaggtca

SEQ ID NO: 13317 - DNA, 110 bp, synthetic construct
  source 1..110: mol_type = other DNA
ggcttgggagcgggacggggagccacctgccctcgccgtgttgtcagtgtcctctcgtccgtcaggctatcaagcggacatacgacaagaaggcggtggatctctacatg

SEQ ID NO: 13318 - DNA, 110 bp, synthetic construct
  source 1..110: mol_type = other DNA
cgtccgtcaggctatcaagcggacatacgacaagaaggcggtggatctctacatgctgttcaatggcgagctggccctcgtgaaccgtgagctgaacaagaagtggccgt

SEQ ID NO: 13319 - DNA, 110 bp, synthetic construct
  source 1..110: mol_type = other DNA
ggggacacgtctctgcttcccaaaaccatatggcagccggtctcccaacgttcgaaagctggcagagtgcgtgtagttggaggctccagctctgctcagggcggtggtaa

SEQ ID NO: 13320 - DNA, 110 bp, synthetic construct
  source 1..110: mol_type = other DNA
gcggcagggctagtgactggagagccgtgatgctgaaggaaatcaaacgggaggcagaagggcgcgggagttaggagggaggaggccctggtcctgagacgcagcccctt

SEQ ID NO: 13321 - DNA, 110 bp, synthetic construct
  source 1..110: mol_type = other DNA
agaagggcgcgggagttaggagggaggaggccctggtcctgagacgcagccccttttcccggccagctgccccttctacaagatcatggtgcccaccgtcgacacagtcc

SEQ ID NO: 13322 - DNA, 110 bp, synthetic construct
  source 1..110: mol_type = other DNA
ctagcctgggaacctccatatgccaccggtgcctccctagaaaagaccaaaaaaaaaggaaaaaaaaagtggcagtgtgaccagttcatattaccgttgctattgttgtt

SEQ ID NO: 13323 - DNA, 110 bp, synthetic construct
  source 1..110: mol_type = other DNA
aaggaaaaaaaaagtggcagtgtgaccagttcatattaccgttgctattgttgttaataaatagctgtcatggagttccccttgtggtgcagtagaaacgaatctgacta

SEQ ID NO: 13324 - DNA, 110 bp, synthetic construct
  source 1..110: mol_type = other DNA
ccctctttagacatgctggctagggttcccttctgccacaagccttgctcagacgctgttcccctccccgccggcttttatcccagtcacgctccttcatctttccgcac

SEQ ID NO: 13325 - DNA, 110 bp, synthetic construct
  source 1..110: mol_type = other DNA
acgaaataattgagtgagacgggtggcgggacgtgcggcggagtggactgggatgcagggtgaagaactctctgtgggagaggagaccgagggcgtggggcctgcaggaa

SEQ ID NO: 13326 - DNA, 110 bp, synthetic construct
  source 1..110: mol_type = other DNA
cagggtgaagaactctctgtgggagaggagaccgagggcgtggggcctgcaggaagggctgggggcgtcaaatgcatggaaggcccaagagtgagattaaacggagatga

SEQ ID NO: 13327 - DNA, 110 bp, synthetic construct
  source 1..110: mol_type = other DNA
ccacatctatccattctcctgtaatagacattgggtcgtttccatttggggatattacagatacagctgtggtgaacatttgcgtacattttttgggtagacaagtgtac

SEQ ID NO: 13328 - DNA, 110 bp, synthetic construct
  source 1..110: mol_type = other DNA
tacagatacagctgtggtgaacatttgcgtacattttttgggtagacaagtgtactttcttctgttgggatataactcggaatggcatcactgatgcatctgttttggtc

SEQ ID NO: 13329 - DNA, 110 bp, synthetic construct
  source 1..110: mol_type = other DNA
atcagggcagtgtggcagcagcctgaaaggcagacctgcagctgcttttatgtagggcttgccatggggggcttgggacgctcggaggggaaagaagctgcctggctggc

SEQ ID NO: 13330 - DNA, 110 bp, synthetic construct
  source 1..110: mol_type = other DNA
gctcactcaagtttgaaacccattgctcagtgtctggctcttgagtctttcttgccctggtgcttttcaaataccaactttgtatcttcctggaaagagaagccgaactg

SEQ ID NO: 13331 - DNA, 110 bp, synthetic construct
  source 1..110: mol_type = other DNA
cctggtgcttttcaaataccaactttgtatcttcctggaaagagaagccgaactggaaatacaccaccccaaggcggaggaaacatcctcctctgggcagggggtgagag

SEQ ID NO: 13332 - DNA, 110 bp, synthetic construct
  source 1..110: mol_type = other DNA
cagtgtagctctctgtccccatgctgctattcttgtcccctcccagaggaaggagagatggcttcctaaggcaaaatctgagcgtttgccaccagtgacaccaggagctc

SEQ ID NO: 13333 - DNA, 110 bp, synthetic construct
  source 1..110: mol_type = other DNA
agatggcttcctaaggcaaaatctgagcgtttgccaccagtgacaccaggagctcctgccactggaatccagcagtcttcccgagaggctgaaagccagcgctttcccgg

SEQ ID NO: 13334 - DNA, 110 bp, synthetic construct
  source 1..110: mol_type = other DNA
ttaatcactacagggaaggttgccctgcagcttaaattacacataacgacccacctctgggacccctgcctcccaggtaatgtgcattaagctaaaataacttcgtttgg

SEQ ID NO: 13335 - DNA, 110 bp, synthetic construct
  source 1..110: mol_type = other DNA
tctgggacccctgcctcccaggtaatgtgcattaagctaaaataacttcgtttggctcccaggaaacctcctcaccaggctcacctgtgaataaccacaggcagaaagaa

SEQ ID NO: 13336 - DNA, 110 bp, synthetic construct
  source 1..110: mol_type = other DNA
tatatatgtgtgtgtgtgtatgtacacatatctacgcataaaagggtgaacaacaaacccgtgctctgagccacccaaggccgctgccccacacatctgctgtttccagt

SEQ ID NO: 13337 - DNA, 110 bp, synthetic construct
  source 1..110: mol_type = other DNA
aacccgtgctctgagccacccaaggccgctgccccacacatctgctgtttccagtcttagaaatgctctggaatgattgctgcagagacaaacataaacgtacatactgc

SEQ ID NO: 13338 - DNA, 110 bp, synthetic construct
  source 1..110: mol_type = other DNA
gagcccatcttcactacaaaagctggaataccaagcagtccctttcccagcttccctggcacatggtttaggctcccaccaccgtctactggaccacttctgcagtggaa

SEQ ID NO: 13339 - DNA, 110 bp, synthetic construct
  source 1..110: mol_type = other DNA
ctggcacatggtttaggctcccaccaccgtctactggaccacttctgcagtggaatgcttcctggctgtgtaaaacccaagcctagttctcctagagattctgtgaatta

SEQ ID NO: 13340 - DNA, 110 bp, synthetic construct
  source 1..110: mol_type = other DNA
gactggaagtatctggatacctggtaccctagaatgcccccacctactacgcccacccatccctaatgccgccaacgcctcagctgtccttgaaacttgaaatcaattca

SEQ ID NO: 13341 - DNA, 110 bp, synthetic construct
  source 1..110: mol_type = other DNA
gaaaatctgtcacttccgccctggagcctgggtgattttgagcagctggtgaccagtctgactcttcacgatcccaacatctttggttcccaataaggatgctgaaacgc

SEQ ID NO: 13342 - DNA, 110 bp, synthetic construct
  source 1..110: mol_type = other DNA
aatcaaatccttcataaaattgttggggtatgacattggcagagagcctggccaacgggaagccattttagttcccccaccttgagcttctgttgaaattattgtccgca

SEQ ID NO: 13343 - DNA, 110 bp, synthetic construct
  source 1..110: mol_type = other DNA
cgggaagccattttagttcccccaccttgagcttctgttgaaattattgtccgcaaatccatctggcagccaggaatgtctctcctgtgttatctgggcctgtttgtcat

SEQ ID NO: 13344 - DNA, 110 bp, synthetic construct
  source 1..110: mol_type = other DNA
agtgtcacctcaaagacactgaaatcctaagcctagtacctgtgaatgtgaccttatttggaaattagggtctctgcagatgatctagctaaagtgaggttattaagggt

SEQ ID NO: 13345 - DNA, 110 bp, synthetic construct
  source 1..110: mol_type = other DNA
atttggaaattagggtctctgcagatgatctagctaaagtgaggttattaagggtgggccctaatccactatgatgaggggacatttggacactgagacagacacgcacg

SEQ ID NO: 13346 - DNA, 110 bp, synthetic construct
  source 1..110: mol_type = other DNA
aaatcctccaagaaataatagcttaaaagagggagaaccagagagttcccgttgcggcttggtggtaatgaacccgactagtatctatgaagacacaggtttgatccctg

SEQ ID NO: 13347 - DNA, 110 bp, synthetic construct
  source 1..110: mol_type = other DNA
tacacagtcttggttaatttttatgcactgtaaaactgttgcaaggttttcttcctgaaaatgtgtaagcttggttatattgtgtttaaaatccagtgggcagatgtaaa

SEQ ID NO: 13348 - DNA, 110 bp, synthetic construct
  source 1..110: mol_type = other DNA
ttaaatgtttttgtgagctggccttttctcaggtgtttaggttatatggtaaccggattgtatagacccacttaaacactaacctgttattgctggagttgcattctctg

SEQ ID NO: 13349 - DNA, 110 bp, synthetic construct
  source 1..110: mol_type = other DNA
cgggttctcagtgctcatttacacgggtggcgacacttatgctctaaggtacaatctcaacagctaaaaatgattctggaacaaacattcaactaccatgaattcccaga

SEQ ID NO: 13350 - DNA, 110 bp, synthetic construct
  source 1..110: mol_type = other DNA
aagtgtttccagtggtgtcttctggctctgagtatatttagagacataaaatatagttctgaatgaacaggaaaaatctgatctcttctgcacatgagagcatagaaaca

SEQ ID NO: 13351 - DNA, 110 bp, synthetic construct
  source 1..110: mol_type = other DNA
gttctgaatgaacaggaaaaatctgatctcttctgcacatgagagcatagaaacaatgtatttctctcactgaagagtatctaacaagtatcagagaattgttatctgta

SEQ ID NO: 13352 - DNA, 110 bp, synthetic construct
  source 1..110: mol_type = other DNA
tacttactctaaatacgaacccttgcgcccctaaagtctcctggcctgagcaacgtcttgagagctccacttagcacgtttttagggcttttctgaactagatcacacat

SEQ ID NO: 13353 - DNA, 110 bp, synthetic construct
  source 1..110: mol_type = other DNA
taaaaataatgcatgtcccgtctcccccaaaagttctgctcccagttacacaccttacaccttcagaaaaccacgcttctatgcatcaggccacatccagagctgttccc

SEQ ID NO: 13354 - DNA, 110 bp, synthetic construct
  source 1..110: mol_type = other DNA
tacaccttcagaaaaccacgcttctatgcatcaggccacatccagagctgttccctgaagcaatgtttcaagagccctgaaccggggcggggggaggatggggggcagag

SEQ ID NO: 13355 - DNA, 110 bp, synthetic construct
  source 1..110: mol_type = other DNA
agcttcctccctggtccacgggaggggagctacatgcctacccaggataagacaccaatgctttctaccctcaggacaagcctcagcctctccacaaccaacaatccacc

SEQ ID NO: 13356 - DNA, 110 bp, synthetic construct
  source 1..110: mol_type = other DNA
caatgctttctaccctcaggacaagcctcagcctctccacaaccaacaatccaccatgcctgcaaatcccaacccaaacgccaccctttcagaaattcttttcgggtcac

SEQ ID NO: 13357 - DNA, 110 bp, synthetic construct
  source 1..110: mol_type = other DNA
acatgtccacactggaggcaaacagctggcgaattctgaagtctggtcaatgcttagagatgaaaacagggtcattggtctcggagtatctgctggtccctgggggatca

SEQ ID NO: 13358 - DNA, 110 bp, synthetic construct
  source 1..110: mol_type = other DNA
agagatgaaaacagggtcattggtctcggagtatctgctggtccctgggggatcagacccgtgggaagatgggaagatggggcatcatgttttggtgctgagggccctgc

SEQ ID NO: 13359 - DNA, 110 bp, synthetic construct
  source 1..110: mol_type = other DNA
catcgtgcgctttcaaaagctgttacgatcactcatagcagctctgtctgcagtgccctttcctatgtttcaaagtcccgcccatctctgtgggcttcctcgggctgtca

SEQ ID NO: 13360 - DNA, 110 bp, synthetic construct
  source 1..110: mol_type = other DNA
taaccacaagactacatctccacaaaaaaagctggagcagtggcacattcttatacactctgatatggcaaacccagagaccagcaccaggaaaccaccacaattaacac

SEQ ID NO: 13361 - DNA, 110 bp, synthetic construct
  source 1..110: mol_type = other DNA
tagggccattggcagcaacatggatggacgagagatgtgagggaagccagagaaagacaaatagcatgtgatatcacttatacgtggaattaaaaaaatgatacaagtga

SEQ ID NO: 13362 - DNA, 110 bp, synthetic construct
  source 1..110: mol_type = other DNA
tgtgagggaagccagagaaagacaaatagcatgtgatatcacttatacgtggaattaaaaaaatgatacaagtgaaattatttatcagtcagaaatagacccacagacat

SEQ ID NO: 13363 - DNA, 110 bp, synthetic construct
  source 1..110: mol_type = other DNA
gagggttctgagcagactctggggctgcaaggggccagccaggttcaggcagatgctaccctgctgtttcattgctttcaagcggtggtttacctaaaatccagagctga

SEQ ID NO: 13364 - DNA, 110 bp, synthetic construct
  source 1..110: mol_type = other DNA
ctaccctgctgtttcattgctttcaagcggtggtttacctaaaatccagagctgatgctcgttatgataatcttgagtcatcaagggaagtttaatttctattcactaat

SEQ ID NO: 13365 - DNA, 110 bp, synthetic construct
  source 1..110: mol_type = other DNA
aagccattcctcccccagacctccctggctgcacactgggcacacataacgtacagcctcggcatttaacttccacagagcatggttccctcctgcatgaggctgcgagc

SEQ ID NO: 13366 - DNA, 110 bp, synthetic construct
  source 1..110: mol_type = other DNA
gcctcggcatttaacttccacagagcatggttccctcctgcatgaggctgcgagcttccttagcagggagcgagccaaggtcacggaacacctgctacccttttcacctc

SEQ ID NO: 13367 - DNA, 110 bp, synthetic construct
  source 1..110: mol_type = other DNA
aagttcctgactgggtaattcgctggttgaagcttctgattgggtgacttacaggttgacgcttcttctgattggctgaggctgagagtgagtgtggggtggaaggatgc

SEQ ID NO: 13368 - DNA, 110 bp, synthetic construct
  source 1..110: mol_type = other DNA
cggagggcttccttcctgactccccctctctccagcagtgactgcacagccttgccaggagccccgggcccccagcttccctctcctcctccatccccacctccggaatt

SEQ ID NO: 13369 - DNA, 110 bp, synthetic construct
  source 1..110: mol_type = other DNA
caggagccccgggcccccagcttccctctcctcctccatccccacctccggaattccgtcaaaacgaagccatccctcccagacctgcgtgaacctcacttttctgggcc

SEQ ID NO: 13370 - DNA, 110 bp, synthetic construct
  source 1..110: mol_type = other DNA
atatgatgaacatatgcatggtctttagccccgttcctccgacggaggagcgtttcctggtattcacagcaaaagcccctctcaacccagacctgcgtttatgtcctgag

SEQ ID NO: 13371 - DNA, 110 bp, synthetic construct
  source 1..110: mol_type = other DNA
cctggtattcacagcaaaagcccctctcaacccagacctgcgtttatgtcctgagcttctggacgggggctggttgtgattagagggttggaacttttggcctgcacccc

SEQ ID NO: 13372 - DNA, 110 bp, synthetic construct
  source 1..110: mol_type = other DNA
aaatattatttctccccgtgtccccttcttagagggacaacatctctgcttctgtggtcattggtactatgccatcgctacccgggttagcttcctctggccataaggcg

SEQ ID NO: 13373 - DNA, 110 bp, synthetic construct
  source 1..110: mol_type = other DNA
ggtcattggtactatgccatcgctacccgggttagcttcctctggccataaggcggtgctttatcagcattcccactaaatgcagcccccgcacggatcagctttccgag

SEQ ID NO: 13374 - DNA, 110 bp, synthetic construct
  source 1..110: mol_type = other DNA
ctgaaattcaaggggaaaccccgagaagaaaacccatcaagacacaattgggggcggaagcgtcaagcttatcattaccagctgaagatatgattgactgcctgggaaac

SEQ ID NO: 13375 - DNA, 110 bp, synthetic construct
  source 1..110: mol_type = other DNA
ggaagcgtcaagcttatcattaccagctgaagatatgattgactgcctgggaaaccctggccaatgggcagaggaatttttaggccttaggagagagcgcagcaaagtag

SEQ ID NO: 13376 - DNA, 110 bp, synthetic construct
  source 1..110: mol_type = other DNA
cagtgtttacatgctttcttttcgattatggccattctggtgaatgtgaagtggcgtgtcagtgtggttttgtcatttcctcaatgtgaactgttctagcattcttggaa

SEQ ID NO: 13377 - DNA, 110 bp, synthetic construct
  source 1..110: mol_type = other DNA
gtgaagtggcgtgtcagtgtggttttgtcatttcctcaatgtgaactgttctagcattcttggaataaagtttctttggttatgtattattctctgctaatattttattt

SEQ ID NO: 13378 - DNA, 110 bp, synthetic construct
  source 1..110: mol_type = other DNA
ctgatcttttagcatccaaataggaatgtacatggaaagccaggagaaaataaatgactcctcactctggccgattctctgcttcagggatctggaggaggctgatggtc

SEQ ID NO: 13379 - DNA, 110 bp, synthetic construct
  source 1..110: mol_type = other DNA
gactcctcactctggccgattctctgcttcagggatctggaggaggctgatggtccaggactccccgtggtggtttatgtttttctcgtactggtttctctgcctggaga

SEQ ID NO: 13380 - DNA, 110 bp, synthetic construct
  source 1..110: mol_type = other DNA
aaagaaggaaggaaaccagaactcgagagaggaagagggggcagagacttgaacgagcgaagtgctttggtgtcagcccggtaccagctgtggtccctgactcagcggct

SEQ ID NO: 13381 - DNA, 110 bp, synthetic construct
  source 1..110: mol_type = other DNA
ccaagcgttccttctgtcccatgaggccactcctttggtcctgggttgggaagtcgtccttcagcatctaaaacctccctgcacgctcggcgccttcacctgctggagcg

SEQ ID NO: 13382 - DNA, 110 bp, synthetic construct
  source 1..110: mol_type = other DNA
gtccttcagcatctaaaacctccctgcacgctcggcgccttcacctgctggagcgacccctgagaaggtggcgacccttttaggcccgatagtccagggttgtcccggtc

SEQ ID NO: 13383 - DNA, 110 bp, synthetic construct
  source 1..110: mol_type = other DNA
tctggacgggcatttttctcacccatttcctttgcgaggggaacgatcttccatgaagcctacattttttaagatttcagcttttcgcttttcgaatgcatggtacttgt

SEQ ID NO: 13384 - DNA, 110 bp, synthetic construct
  source 1..110: mol_type = other DNA
agtctttcctttgtgagccaaaaccaatttgggtgcatttgcttaaaaaaaaaaaaaaaaaaaagctaaaccccatttgaggatgaagaaatgctagttgtgttccgttc

SEQ ID NO: 13385 - DNA, 110 bp, synthetic construct
  source 1..110: mol_type = other DNA
aaaaaaaaagctaaaccccatttgaggatgaagaaatgctagttgtgttccgttccctttgactagggggataaaaaaatccctctggaagaaactcaaaactttctcct

SEQ ID NO: 13386 - DNA, 110 bp, synthetic construct
  source 1..110: mol_type = other DNA
cttgcttgctgcctgggtgctcacggaattcattctgcaactgctgtgaacaagaacccggatttcagtatcatctttccagtatcacttccatcaacaaaccaaaaaaa

SEQ ID NO: 13387 - DNA, 110 bp, synthetic construct; identical to SEQ ID NO: 13386
  source 1..110: mol_type = other DNA

SEQ ID NO: 13388 - DNA, 110 bp, synthetic construct
  source 1..110: mol_type = other DNA
actggagggggtggggggcttctgtgaaatgagtgttatataaacaagtctgcgtgtcacctgggccagaaaagcttgcacaggacaactactgtgttcattctgagggt

SEQ ID NO: 13389 - DNA, 110 bp, synthetic construct
  source 1..110: mol_type = other DNA
gtcacctgggccagaaaagcttgcacaggacaactactgtgttcattctgagggtcactattggaagagtcagtagtcatttgacccccccgtccccacccaaacacata

SEQ ID NO: 13390 - DNA, 110 bp, synthetic construct
  source 1..110: mol_type = other DNA
cccattcctcaacttgtcaactgcacgaacctgtgctggagcaggtcaactcaagactggggactcgctgaccctcagggcacacctcctgctggagaaggacctttccc

SEQ ID NO: 13391 - DNA, 110 bp, synthetic construct
  source 1..110: mol_type = other DNA
ccctggccctgctcagagggttaaggatccggtgttgccccgagctgtggtgtgggtctcagatgcagctcagatctgtagcataggcctgaggcgaaggctccgatttg

SEQ ID NO: 13392 - DNA, 110 bp, synthetic construct
  source 1..110: mol_type = other DNA
gtctcagatgcagctcagatctgtagcataggcctgaggcgaaggctccgatttgacctctaccctgggaacgtccatgtgctgcacatgcggccctaaaaagacaaaat

SEQ ID NO: 13393 - DNA, 110 bp, synthetic construct
  source 1..110: mol_type = other DNA
tggatttgtgatttgcaacagaaatggttccagcatttgggcagccccattgccgtgtgtaagagacacaggttctttgatttataagactatgtatcatttttttctaa

SEQ ID NO: 13394 - DNA, 110 bp, synthetic construct
  source 1..110: mol_type = other DNA
atctgggacctcgtgtgggtaccagcggtgggaggacggagctgcccggatctcagcagttctagcatttaactgagcttgcaggaccactcaaagggaggaaatcttat

SEQ ID NO: 13395 - DNA, 110 bp, synthetic construct
  source 1..110: mol_type = other DNA
gcagttctagcatttaactgagcttgcaggaccactcaaagggaggaaatcttatttcaggcatcagtaaagggctgttcctctgaagcctttcatctccaggaccgttc

SEQ ID NO: 13396 - DNA, 110 bp, synthetic construct
  source 1..110: mol_type = other DNA
cctcatgtaaacagaatcatacaatatttgctgttccatgtctggcttatttcacaaagcaaaatattttcaaggtccactcctgttgtagcatgcatcagaattttctt

SEQ ID NO: 13397 - DNA, 110 bp, synthetic construct
  source 1..110: mol_type = other DNA
aaagcaaaatattttcaaggtccactcctgttgtagcatgcatcagaattttcttctttttaaaggctgagtaatattccactgcatatgtacaccacgtgttgtttatc

SEQ ID NO: 13398 - DNA, 110 bp, synthetic construct
  source 1..110: mol_type = other DNA
gtcagcctggtcccgcaggctcagtctcagaggtggacaagctcagccgctctgtgcagcgtctccttaccttctgtgggaccagaggaaagatcaggagtcaagcttgc

SEQ ID NO: 13399 - DNA, 110 bp, synthetic construct
  source 1..110: mol_type = other DNA
agatgtattaaagggctgatctgatcattgttgcgaatctgggcttgtggggagcctcccggaacagctggcccacatcctgactcatcttgattccctaatagagcctc

SEQ ID NO: 13400 - DNA, 110 bp, synthetic construct
  source 1..110: mol_type = other DNA
ctcccggaacagctggcccacatcctgactcatcttgattccctaatagagcctccggcagagagtggcttctctgtttagaacattctagaatgatgacaataggggca

SEQ ID NO: 13401 - DNA, 110 bp, synthetic construct
  source 1..110: mol_type = other DNA
gcgtacttgctatagcccatgagccttcttatttagtcatcaccagagcctttgagatagctagtttagagaagttaagtcacctgcccagggtcacgcagcccttaggt

SEQ ID NO: 13402 - DNA, 110 bp, synthetic construct
  source 1..110: mol_type = other DNA
gatagctagtttagagaagttaagtcacctgcccagggtcacgcagcccttaggtgggagagatctgaacccaggcaagatttgtgacagacgcattcctgaccactgtt

SEQ ID NO: 13403 - DNA, 110 bp, synthetic construct
  source 1..110: mol_type = other DNA
ggctcttcactcataaaggctccttggtctctgagatgtatcagagggccatggtgtggacaggtgtactagggttggtgtcgacaggtgtactagaccctcggtggccc

SEQ ID NO: 13404 - DNA, 110 bp, synthetic construct
  source 1..110: mol_type = other DNA
gtggacaggtgtactagggttggtgtcgacaggtgtactagaccctcggtggccctgggtgtggagctgggggttggacagcacggctggctggctggtggtcacgtctg

SEQ ID NO: 13405 - DNA, 110 bp, synthetic construct
  source 1..110: mol_type = other DNA
ccagccggaccagaacccagaactgctgattcccaggccggtgaccttggacctggtgaatagcagaggcctggcatcatcccgcacggcctcggccatggacgcgccct

SEQ ID NO: 13406 - DNA, 110 bp, synthetic construct
  source 1..110: mol_type = other DNA
gtgaatagcagaggcctggcatcatcccgcacggcctcggccatggacgcgcccttctcccctcctcccccttcgcctccccccttcactcctccctttcctcctcccct

SEQ ID NO: 13407 - DNA, 110 bp, synthetic construct
  source 1..110: mol_type = other DNA
cccctccaacccactccttcacgcgaaccttcccctgcctgccctgcaaaaatggcttctgtggctttccaagcccagccttccgctcacctgcccggagagaaaaatga

SEQ ID NO: 13408 - DNA, 110 bp, synthetic construct
  source 1..110: mol_type = other DNA
cttctgtggctttccaagcccagccttccgctcacctgcccggagagaaaaatgagataagaaaacaacagaagaaggacagtggggaaaaaacttgggctacatccacg

SEQ ID NO: 13409 - DNA, 110 bp, synthetic construct
  source 1..110: mol_type = other DNA
taccctcctcagggctgggagcagagacttcccattcaattatcgaggaatagaaataatactttctcactatttacaaagcgatggcatagaaaagcacaaagaagaaa

SEQ ID NO: 13410 - DNA, 110 bp, synthetic construct
  source 1..110: mol_type = other DNA
ataatactttctcactatttacaaagcgatggcatagaaaagcacaaagaagaaaaagcagcgcccaagatcagcttggaggttgtcacgaaaggcctgggtccttttat

SEQ ID NO: 13411 - DNA, 110 bp, synthetic construct
  source 1..110: mol_type = other DNA
agcaaggacaccgcgagaaaggaaagcagagcccgctcttcttcccaaccccataaagcgacgacctcttcctcctctcctgagcagctggccagctacctgcccaattc

SEQ ID NO: 13412 - DNA, 110 bp, synthetic construct
  source 1..110: mol_type = other DNA
aagcgacgacctcttcctcctctcctgagcagctggccagctacctgcccaattcagatcccctcccatccgctggcatctgtttccctctctttcctggagaagggcag

SEQ ID NO: 13413 - DNA, 110 bp, synthetic construct
  source 1..110: mol_type = other DNA
aagaaaacccatcgacttctaaattacctccatctattaactcctttatctaattctcccaacaaccctacgacctgaggcccagattatgatgctcatttgacagacgg

SEQ ID NO: 13414 - DNA, 110 bp, synthetic construct
  source 1..110: mol_type = other DNA
ctcccaacaaccctacgacctgaggcccagattatgatgctcatttgacagacggaaatgcatgcagtgagaggtgtgagcagctcgccacaggccagagggtccaagca

SEQ ID NO: 13415 - DNA, 110 bp, synthetic construct
  source 1..110: mol_type = other DNA
tggggagtcatcccccatcccaagggactccgcctgcatagcctccatccccacccagccttgaggtccagcctgcttatgggtgacattcccagatacagagggcatga

SEQ ID NO: 13416 - DNA, 110 bp, synthetic construct
  source 1..110: mol_type = other DNA
cagccttgaggtccagcctgcttatgggtgacattcccagatacagagggcatgagctacaatcctgctgaaactgcatctgctttggcccgagaagtcccagggctcag

SEQ ID NO: 13417 - DNA, 110 bp, synthetic construct; identical to SEQ ID NO: 13415
  source 1..110: mol_type = other DNA

SEQ ID NO: 13418 - DNA, 110 bp, synthetic construct; identical to SEQ ID NO: 13416
  source 1..110: mol_type = other DNA

SEQ ID NO: 13419 - DNA, 110 bp, synthetic construct
  source 1..110: mol_type = other DNA
catggtagtggatgttttgtgcattttgtaggaattggcgatctcgagagtcagctttaagaagacggtgaggaggagttcccatcgtggctcagtggaaaagagcctga

SEQ ID NO: 13420 - DNA, 110 bp, synthetic construct
  source 1..110: mol_type = other DNA
tttgtgcattttgtaggaattggcgatctcgagagtcagctttaagaagacggtgaggaggagttcccatcgtggctcagtggaaaagagcctgactagtatccatgagg

SEQ ID NO: 13421 - DNA, 110 bp, synthetic construct
  source 1..110: mol_type = other DNA
atgacgggacctccgagtagctttgctttgagcagggacatcatcctttatgcccctctgcctggtcatcggatgcaggctgtcctgggttgagggagggactaagctga

SEQ ID NO: 13422 - DNA, 110 bp, synthetic construct
  source 1..110: mol_type = other DNA
ctctgcctggtcatcggatgcaggctgtcctgggttgagggagggactaagctgagaggcgtcagccacggacactcccagcagaggtagtcctggtgcctgagtgtctg

SEQ ID NO: 13423 - DNA, 110 bp, synthetic construct
  source 1..110: mol_type = other DNA
cccccaaaccctgaatttttaaagggtgaatcttatgctatatgaaaatatctcagtaaaaataactattaaagagtgtggtattggctcgtccatccactgaaagtgct

SEQ ID NO: 13424 - DNA, 110 bp, synthetic construct
  source 1..110: mol_type = other DNA
gtaaaaataactattaaagagtgtggtattggctcgtccatccactgaaagtgctgttgatctctgtagaactcgatctctcaaagaattttttgttacttaaaaaaaat

SEQ ID NO: 13425 - DNA, 110 bp, synthetic construct
  source 1..110: mol_type = other DNA
caggtgtgctgagaaggtgggtgcttacctgagcccgaggtggcaggtggctggaagaaaggagctattgccgcagcgtgggactaaattttcctgctttagtcttttgt

SEQ ID NO: 13426 - DNA, 110 bp, synthetic construct
  source 1..110: mol_type = other DNA
agaaaggagctattgccgcagcgtgggactaaattttcctgctttagtcttttgtgacttagattttcttaaggaaccatgtagatggttttaacccctgaaaacttcca

SEQ ID NO: 13427 - DNA, 110 bp, synthetic construct
  source 1..110: mol_type = other DNA
catctgtagctccgactggacccttagtctgggaaactccatatgccacgggtgccgccctaaaaagaaaaaaaaaaaaaaatcctgacctcactatttaaactgtgaat

SEQ ID NO: 13428 - DNA, 110 bp, synthetic construct; identical to SEQ ID NO: 13427
  source 1..110: mol_type = other DNA

SEQ ID NO: 13429 - DNA, 110 bp, synthetic construct
  source 1..110: mol_type = other DNA
ttctctcaggaaacttctctgcagaatttggatttccgctacatctagtttttgcaccaaattcatacttactgttatgtgtgttcattatatctttggacaatttattt

SEQ ID NO: 13430 - DNA, 110 bp, synthetic construct
  source 1..110: mol_type = other DNA
tggtggccttcttcgccttctcctcggcgttcctcgcatccctgctggcgtcctcgacctcgctctggagctgcatcaggtctgtctccagcttcttcttggtgtggatg

SEQ ID NO: 13431 - DNA, 110 bp, synthetic construct
  source 1..110: mol_type = other DNA
gacctcgctctggagctgcatcaggtctgtctccagcttcttcttggtgtggatgaggctggtgttctagggtgagcagagcaggggttacttgggcgtgtgtgaggctg

SEQ ID NO: 13432 - DNA, 110 bp, synthetic construct
  source 1..110: mol_type = other DNA
catgggattaaaagtgttggtgagaaattaggctcttggggatattcttttatattttaggaagaaacaattatgatccaatggcctaaattctgcttaccatgagagaa

SEQ ID NO: 13433 - DNA, 110 bp, synthetic construct
  source 1..110: mol_type = other DNA
ataataaatgatagtgatacatgccaccaagaagatacagtaccatcttgtagaagagaaccagggctaccattttagccacgtggccagaaatcggctctttgaggaga

SEQ ID NO: 13434 - DNA, 110 bp, synthetic construct
  source 1..110: mol_type = other DNA
gagctggaacaggaagatgcagaacgaagaggaggaagagcctcataggtgaaggaaagagtcagtacagtttgagaagctcaggaggctggatgctgagggaagtgcat

SEQ ID NO: 13435 - DNA, 110 bp, synthetic construct
  source 1..110: mol_type = other DNA
aaagagtcagtacagtttgagaagctcaggaggctggatgctgagggaagtgcatatgctgggtgtggagtggtgtccaggggcggaaccggcagtccggagagccggac

SEQ ID NO: 13436 - DNA, 110 bp, synthetic construct
  source 1..110: mol_type = other DNA
ccccgaaaagtgctcgcatatgggtgcttgccctcgcttccttctcttggaaaccagcaactactgtataaaaagctcaggccagcctgctggatgatggaagatgcagt

SEQ ID NO: 13437 - DNA, 110 bp, synthetic construct
  source 1..110: mol_type = other DNA
cctgtccccactggtaaccgctagatggattcttagctgtcttcaggaattccgtgttcccacagcccagttaatttcagaatcaggtgtttatacagcatcacggcaat

SEQ ID NO: 13438 - DNA, 110 bp, synthetic construct
  source 1..110: mol_type = other DNA
gggctgtgctgtgaatggccgggtgtgggggaacgtgcgtgtttggtgaccggaagtgaggagacacacgggagggagacagggttttcctaactcaggaggaggatcgg

SEQ ID NO: 13439 - DNA, 110 bp, synthetic construct
  source 1..110: mol_type = other DNA
gtgaggagacacacgggagggagacagggttttcctaactcaggaggaggatcgggtcgttttcctaccttgccgagtcaagcggatgccccgccccagtgtgggcatcc

SEQ ID NO: 13440 - DNA, 110 bp, synthetic construct
  source 1..110: mol_type = other DNA
cagcttgctgtgcaatcccagagtcagcagaaaggggctggaacgtgtgcacgtctcttttacatcccccagaaattcggggaacccgctgggatgtgttggcagcaaca

SEQ ID NO: 13441 - DNA, 110 bp, synthetic construct
  source 1..110: mol_type = other DNA
tcttttacatcccccagaaattcggggaacccgctgggatgtgttggcagcaacaggaactgactcaggtggctcagcgtagggagcaggtggggctgttcactgcagaa

SEQ ID NO: 13442 - DNA, 110 bp, synthetic construct
  source 1..110: mol_type = other DNA
ggccccagtttccgagccctggaaacatctctctctggggtcccttactcctaaggtagcagtgacctccaccgttacttcctagctcctctgtcacctgtataaccagt

SEQ ID NO: 13443 - DNA, 110 bp, synthetic construct
  source 1..110: mol_type = other DNA
gtagcagtgacctccaccgttacttcctagctcctctgtcacctgtataaccagttccctgaacacaactccatctgctttaaagacccctgggtcttcctctttctgac

SEQ ID NO: 13444 - DNA, 110 bp, synthetic construct
  source 1..110: mol_type = other DNA
tactagcccaggtgaccaaaccctcgcctatgctccccctgtattcatgccttcgtaatgagttctacttgtcattagttagcttcatctgtgtttccagctgggatcct

SEQ ID NO: 13445 - DNA, 110 bp, synthetic construct
  source 1..110: mol_type = other DNA
gtcatcttccacgtcaggtgttctacctgctgagcatctgctatacaccaggcgctgtactggggcttggggtataatgacggaaaaatctgatatcatcccagctgtgc

SEQ ID NO: 13446 - DNA, 110 bp, synthetic construct
  source 1..110: mol_type = other DNA
tgtactggggcttggggtataatgacggaaaaatctgatatcatcccagctgtgctttcatgaggcacattatatatatataaaaaagtcccacagggagttccttggcg

SEQ ID NO: 13447 - DNA, 110 bp, synthetic construct
  source 1..110: mol_type = other DNA
ataaaaaagaatattccttccagctcaagtacagtgctcttcctaagatattctccactttgttttctttcagtgatgttttagtggcactcttagactggtgtcccata

SEQ ID NO: 13448 - DNA, 110 bp, synthetic construct
  source 1..110: mol_type = other DNA
cactttgttttctttcagtgatgttttagtggcactcttagactggtgtcccatacaaatgttccactggcttgcctcttaatctggctaagttctagtctgattttcag

SEQ ID NO: 13449 - DNA, 110 bp, synthetic construct
  source 1..110: mol_type = other DNA
gaccagctgtatggtctgaactaaacctgcaataaagacatgaaaccactaggtggcgatagggtgtgttcaaattcaaactgtagcagacctgctgttgagaccaaatt

SEQ ID NO: 13450 - DNA, 110 bp, synthetic construct
  source 1..110: mol_type = other DNA
gatctccgtagcactgtgtggaacgcgccccagggctgctcccctaggaggggagggtgggcatccggctgcctgttcccagtgcctggtgccttaatgccacacttctg

SEQ ID NO: 13451 - DNA, 110 bp, synthetic construct
  source 1..110: mol_type = other DNA
ggtgggcatccggctgcctgttcccagtgcctggtgccttaatgccacacttctgggtggcacctgcacgtgattgggcaaaaccccaatgcagtaaggcagagaggcac

SEQ ID NO: 13452 - DNA, 110 bp, synthetic construct
  source 1..110: mol_type = other DNA
ctcctaagcaccaggaacgctgcctccctcgttttacttagttctcagaagtaagctcggattgttgtattaaaaagataagaaaagagggttcctaagagtcaagtcct

SEQ ID NO: 13453 - DNA, 110 bp, synthetic construct
  source 1..110: mol_type = other DNA
cagccccttctccagtcccccctccacgccctaaacgtcctgcacaggatctttaggacacgttccgacgcgttaatgcatacctgcgtgtgtacagacacgcctctttt

SEQ ID NO: 13454 - DNA, 110 bp, synthetic construct
  source 1..110: mol_type = other DNA
ggacacgttccgacgcgttaatgcatacctgcgtgtgtacagacacgcctctttttcccgtgaaagcaaaaccatgctgcccctattggtctggaacgtctcggggacaa

SEQ ID NO: 13455 - DNA, 110 bp, synthetic construct
  source 1..110: mol_type = other DNA
gaatctcaaggctctacctcaagtgatggagggagaaacacagatgatgtgctcggcatcttgcccatgttttttcctccagcagctcagagatggcgaaaggggcttga

SEQ ID NO: 13456 - DNA, 110 bp, synthetic construct
  source 1..110: mol_type = other DNA
ttcccaactgggtgtgccctaatgattctttcctggatcatttataacagctcctcctgcagttcaccatggcaaccacggaaaagtcctcccctgctacccagtggatg

SEQ ID NO: 13457 - DNA, 110 bp, synthetic construct
  source 1..110: mol_type = other DNA
cctgcagttcaccatggcaaccacggaaaagtcctcccctgctacccagtggatgtgaggccatacgtaggttttcatttcacacttggagaaaacaaaacactgtcatg

SEQ ID NO: 13458 - DNA, 110 bp, synthetic construct
  source 1..110: mol_type = other DNA
tccccaaaaacgctatgtgtacccctgttggcgtgagagatgattgtggaggtgtcagcacaggtctgtcataaaatgtgctaagggataacttttttttggcaagtgat

SEQ ID NO: 13459 - DNA, 110 bp, synthetic construct
  source 1..110: mol_type = other DNA
attatggattctgtaggttccctgtttatgtttctgcccttagcctaatccttcaaactatgcagtaagtaagcagcctggcaagaacccccatttctttcattatgaaa

SEQ ID NO: 13460 - DNA, 110 bp, synthetic construct
  source 1..110: mol_type = other DNA
aactatgcagtaagtaagcagcctggcaagaacccccatttctttcattatgaaattgctgtaaagctgtgattcacttggagacaagatgatttcctgctgaggcttca

SEQ ID NO: 13461 - DNA, 110 bp, synthetic construct
  source 1..110: mol_type = other DNA
cttcatgcctacgtagacgaagggccctctgactcagaaccccaacccagcctgaaacacttgcgggctgggcagtggtggagtcatgggatgacattcgatctcattct

SEQ ID NO: 13462 - DNA, 110 bp, synthetic construct
  source 1..110: mol_type = other DNA
aacacttgcgggctgggcagtggtggagtcatgggatgacattcgatctcattctcttaaggtgaaaatccacaaccagcgcacatgagccaaaactgtttagatggaac

SEQ ID NO: 13463 - DNA, 110 bp, synthetic construct
  source 1..110: mol_type = other DNA
ctgggctcatggaacgaagaggaagagggacataggaaatcccagcatcagccgtggagtaagacctcgtggtccctctccccgcaggcttttccatttcttgaattcac

SEQ ID NO: 13464 - DNA, 110 bp, synthetic construct
  source 1..110: mol_type = other DNA
ctcagcaaggtaaagggcacttacagtgatgaaagctgaggtgagggacgtgggacactggcatgactggtgctcccaatttgtacccatgcagcttacaatcaaaaata

SEQ ID NO: 13465 - DNA, 110 bp, synthetic construct
  source 1..110: mol_type = other DNA
cactggcatgactggtgctcccaatttgtacccatgcagcttacaatcaaaaataatttggttttctgttattgtttgcttttatttccaaagcagtatgtatacagtac

SEQ ID NO: 13466 - DNA, 110 bp, synthetic construct
  source 1..110: mol_type = other DNA
tgagctgcccgctctgctctttcccaaatgcttaggcaaaggcagagctcatagggagtgacggacataagtcagcagtgctgtggggtccacgagagtctatccaacaa

SEQ ID NO: 13467 - DNA, 110 bp, synthetic construct
  source 1..110: mol_type = other DNA
gagtgacggacataagtcagcagtgctgtggggtccacgagagtctatccaacaaaagggggttctgtttgctgatgaagttacttctcggaatcagagtgcatttccca

SEQ ID NO: 13468 - DNA, 110 bp, synthetic construct
  source 1..110: mol_type = other DNA
ccccgggggagaccactccgacagggatgcaagctcaccctccgcccctgtgctgccctttgttcccgtccccaacaggctcatcatgacgaaaggtgaaaacagctgcc

SEQ ID NO: 13469 - DNA, 110 bp, synthetic construct
  source 1..110: mol_type = other DNA
ccctttgttcccgtccccaacaggctcatcatgacgaaaggtgaaaacagctgccaggataaatggagcgtcttcctaggtgcttccattaggtgtgagaaagaatctcc

SEQ ID NO: 13470 - DNA, 110 bp, synthetic construct
  source 1..110: mol_type = other DNA
cttcctgcaagcgctttaccgccacctgctggagatgtttcatcctgtgctccgtggaccacgagggaatggctctacctccggctgtgcccacagaatcaaacatggtg

SEQ ID NO: 13471 - DNA, 110 bp, synthetic construct
  source 1..110: mol_type = other DNA
ctgactctgcaaacgagctaaaaccagggaggtgtgtcgtcagctccccaaacccgcggcccgagaatcctgtctgcgtgctcgtcggctgaagactcttctcgcctgca

SEQ ID NO: 13472 - DNA, 110 bp, synthetic construct
  source 1..110: mol_type = other DNA
cacagtaatcacacttgcagggcttctctcctgtgtgggttcgctgatgtttcaccaagtttgagctcctcggaaaggcttttttgcaggtggggcactgaaagctcgtc

SEQ ID NO: 13473 - DNA, 110 bp, synthetic construct
  source 1..110: mol_type = other DNA
caagtttgagctcctcggaaaggcttttttgcaggtggggcactgaaagctcgtcttggcggtggtgtgagttctttggtgaaaaataagctgggggttccggtagaagg

SEQ ID NO: 13474 - DNA, 110 bp, synthetic construct
  source 1..110: mol_type = other DNA
cccacgagtatagccgagtgtcaaaacgagggtgactggctctgccactccgtattggtttttctagtttgcccgggaatgtgggatttggctaggaatagggatttttg

SEQ ID NO: 13475 - DNA, 110 bp, synthetic construct
  source 1..110: mol_type = other DNA
tggtttttctagtttgcccgggaatgtgggatttggctaggaatagggatttttgtgggatggttgtgtaaagcaatctatcaagcaggttgaatttctttcttgttgtc

SEQ ID NO: 13476 - DNA, 110 bp, synthetic construct
  source 1..110: mol_type = other DNA
cttattcatgggcctgacaggctgaggtttgtggaagtaggagagggctctgtagtctttcttttcttttttttgtctttttttgtcttttctagggctgcacctgtggc

SEQ ID NO: 13477 - DNA, 110 bp, synthetic construct
  source 1..110: mol_type = other DNA
agtaggagagggctctgtagtctttcttttcttttttttgtctttttttgtcttttctagggctgcacctgtggcatacggagactccaggctaggggtctaatcagagc

SEQ ID NO: 13478 - DNA, 110 bp, synthetic construct
  source 1..110: mol_type = other DNA
ggcagagctgccctccagttggccttggttttgaactcacgtcccttgcgtaggtagggttggagctcctagcgtacatgtggttctcttgctgttgctcctttccgtta

SEQ ID NO: 13479 - DNA, 110 bp, synthetic construct
  source 1..110: mol_type = other DNA
ttgtctcctcctgggccctcgtctgcttcgctgggaaacgaagcggacaaactccacgcagctgctttcaggcctcagttctatgattctgcggctgatttccacgtgga

SEQ ID NO: 13480 - DNA, 110 bp, synthetic construct
  source 1..110: mol_type = other DNA
acgcagctgctttcaggcctcagttctatgattctgcggctgatttccacgtggatgaaagatgttgatacgcaaagtgggggctgttttctgactctgctgccgcaaaa

SEQ ID NO: 13481 - DNA, 110 bp, synthetic construct
  source 1..110: mol_type = other DNA
ggtacataggtgcgtctaatggaaattcccccacagcctggtgcattcttcagtgtttgtctggcaggggcagccttaccatgcggaagaggcccccacctcctctgcga

SEQ ID NO: 13482 - DNA, 110 bp, synthetic construct
  source 1..110: mol_type = other DNA
tttgtctggcaggggcagccttaccatgcggaagaggcccccacctcctctgcgacgagcccctcgtgggcgcttagtggtgtcacacagcatcttcctgcctggtcctc

SEQ ID NO: 13483 - DNA, 110 bp, synthetic construct
  source 1..110: mol_type = other DNA
ctgggtaggccccgcttctttttatagcctcttctgcatagatcctggagctgttggaacattccaaatcacctccagactcgtggtcacccccctcgttttatagataa

SEQ ID NO: 13484 - DNA, 110 bp, synthetic construct
  source 1..110: mol_type = other DNA
ggaacattccaaatcacctccagactcgtggtcacccccctcgttttatagataaaatggaagctccaaaagggttcactgtcttttaaaaattttttattggagtatag

SEQ ID NO: 13485 - DNA, 110 bp, synthetic construct
  source 1..110: mol_type = other DNA
atgtgtaggcactgtggaggccttttttgattactgcagcctcttttccccctcgtggaagcccgctgatcctgttcgttcttctcatggtaacttgtgctctcatctcc

SEQ ID NO: 13486 - DNA, 110 bp, synthetic construct
  source 1..110: mol_type = other DNA
tggaagcccgctgatcctgttcgttcttctcatggtaacttgtgctctcatctcccagtcatagcttgacacaccctgtctggattaacaggtttctttccgtggtcggt

SEQ ID NO: 13487 - DNA, 110 bp, synthetic construct
  source 1..110: mol_type = other DNA
agcgttacctgtggtgcacagtagcttcttggcggttatcgactttatggatagtagtgcaaatatggtaatcccgaattccgaatttatccctcccattccgcttggat

SEQ ID NO: 13488 - DNA, 110 bp, synthetic construct
  source 1..110: mol_type = other DNA
agtgcaaatatggtaatcccgaattccgaatttatccctcccattccgcttggataaccatacatttgttttcaaagtctgtgggtctgttcgtgctttgtaaataagtt

SEQ ID NO: 13489 - DNA, 110 bp, synthetic construct
  source 1..110: mol_type = other DNA
tgctgcactgtgtctgttgataatttaatgcaggttttgtccaccgttgcagaagtggtaccttgtggttcccatggatgacgtaacttctccaaggagctacagaatgt

SEQ ID NO: 13490 - DNA, 110 bp, synthetic construct
  source 1..110: mol_type = other DNA
tggtaccttgtggttcccatggatgacgtaacttctccaaggagctacagaatgtggggagcaatctcagggcttcaactcctttattttatagatgataaaatagaacc

SEQ ID NO: 13491 - DNA, 110 bp, synthetic construct
  source 1..110: mol_type = other DNA
tgctgtgaactatggtgtaggtcccagatgtggttcgatccccgagttgctgtgactgtggtgtaggccatcagagacagctccaattagatccctggcttgggaacttc

SEQ ID NO: 13492 - DNA, 110 bp, synthetic construct; identical to SEQ ID NO: 13491
  source 1..110: mol_type = other DNA

SEQ ID NO: 13493 - DNA, 110 bp, synthetic construct
  source 1..110: mol_type = other DNA
cgtttttgaaacaacctccgtggttgggggctttccatggactgattggcttagacctgggctccagttccaacccttgatgggctcacctttggaccagtcagagaggg

SEQ ID NO: 13494 - DNA, 110 bp, synthetic construct
  source 1..110: mol_type = other DNA
cctgggctccagttccaacccttgatgggctcacctttggaccagtcagagagggaggagggtgagcttccttttgaacacctgagctcatgggggagggatggaacaag

SEQ ID NO: 13495 - DNA, 110 bp, synthetic construct
  source 1..110: mol_type = other DNA
cagtaaagaaatgccaacttgaaaccagggtatttggaattagaaactcgtccatactggaattccacttgtagagaaaatcattaaaatcagcaagtgtggaatgttga

SEQ ID NO: 13496 - DNA, 110 bp, synthetic construct
  source 1..110: mol_type = other DNA
actggaattccacttgtagagaaaatcattaaaatcagcaagtgtggaatgttgagcaggggcattcagaagcgggagttcatgaagagggaaagacaaactccagctcg

SEQ ID NO: 13497 - DNA, 110 bp, synthetic construct
  source 1..110: mol_type = other DNA
tactgtaaatggcagtgtttcactctttttatggccaagtaatattccactgcattgatatgacatcttaatccagttatctgtggatgggcagatgggttgcttccatg

SEQ ID NO: 13498 - DNA, 110 bp, synthetic construct
  source 1..110: mol_type = other DNA
cctggggaaaagaaaggtggaaactaaaaaatcttgcaattctttaaggaagcgtagtcctgtctggtctctcagctctgtcatccttgttgaggatgcttccggagatg

SEQ ID NO: 13499 - DNA, 110 bp, synthetic construct
  source 1..110: mol_type = other DNA
tgctggctcttctcatttctttttacccctggttgtgttgaagcgccgtgaaaatcacttttgttgtggaattgaggcagtattccataatgtgatttgtatacagttca

SEQ ID NO: 13500 - DNA, 110 bp, synthetic construct
  source 1..110: mol_type = other DNA
ctgagcggtggcgggagaggatcagctcgggaactcctgctctttgctcagagcgtggacgttttctccatcgcacatggcacgcttggcacatggcggcatctgtacac

SEQ ID NO: 13501 - DNA, 110 bp, synthetic construct
  source 1..110: mol_type = other DNA
cccaatatcctgacttccattcctgttggtgaggtttgcctgtttttggactttacatcaatgaaatcatagagtgtgcactctcttgaagccagctttcttttttctct

SEQ ID NO: 13502 - DNA, 110 bp, synthetic construct
  source 1..110: mol_type = other DNA
ttgcctgtttttggactttacatcaatgaaatcatagagtgtgcactctcttgaagccagctttcttttttctctttttttttttattttcccactgtatagcaagggga

SEQ ID NO: 13503 - DNA, 110 bp, synthetic construct
  source 1..110: mol_type = other DNA
gcagcaagaactctcatctcttgccggtgatgggaatgaaacttggtatagccactttggaagatagtttggtaaagctaaacatactcttaccatatcaggctctttag

SEQ ID NO: 13504 - DNA, 110 bp, synthetic construct
  source 1..110: mol_type = other DNA
tttggaagatagtttggtaaagctaaacatactcttaccatatcaggctctttagtatttaaccaaaggagttgaaaacttatgtcagtacacaaacatttatagcagcc

SEQ ID NO: 13505 - DNA, 110 bp, synthetic construct
  source 1..110: mol_type = other DNA
gccccgtgctaaaagggacttgtagatttgttcctcagatgtcatcagatgttgctaaagatgatttttgatttggagtcggggtcccggataagctgcaggaacgtagc

SEQ ID NO: 13506 - DNA, 110 bp, synthetic construct
  source 1..110: mol_type = other DNA
taaagatgatttttgatttggagtcggggtcccggataagctgcaggaacgtagccactgctcgtggatggaaaggttgccaccattatcctgtctgtccttgtgatgct

SEQ ID NO: 13507 - DNA, 110 bp, synthetic construct; identical to SEQ ID NO: 13505
  source 1..110: mol_type = other DNA

SEQ ID NO: 13508 - DNA, 110 bp, synthetic construct; identical to SEQ ID NO: 13506
  source 1..110: mol_type = other DNA

SEQ ID NO: 13509 - DNA, 110 bp, synthetic construct
  source 1..110: mol_type = other DNA
tcatgtatcagttctaggattttttttttttcagattccttggccttttctgcatagataagcttgtcatctgcaaatggaaacatttaaatttgttcctttcatatcta

SEQ ID NO: 13510 - DNA, 110 bp, synthetic construct
  source 1..110: mol_type = other DNA
gagggcttaccagttgagggtgcactctctgagttgcccagggtctccatgcctatgtttcgaacggcatttaggagttcccgttgtggctcagtgggttaagaacccaa

SEQ ID NO: 13511 - DNA, 110 bp, synthetic construct; identical to SEQ ID NO: 13510
  source 1..110: mol_type = other DNA

SEQ ID NO: 13512 - DNA, 110 bp, synthetic construct
  source 1..110: mol_type = other DNA
ggttgtgggtggtgctgtgctgtaaaaaggaccaagaataacataaactgatagtttctattctcttctaatcattttttaaagactgttcatgctctattacttttttt

SEQ ID NO: 13513 - DNA, 110 bp, synthetic construct
  source 1..110: mol_type = other DNA
aagcctgtcccttcctgaatgcctgccagctgatggcatcattcaggtcttccactcaggctgctaccctaccaggacaggtcaagtatctcgcttcctgttgccatgtc

SEQ ID NO: 13514 - DNA, 110 bp, synthetic construct
  source 1..110: mol_type = other DNA
cagtactcagaggagaatctttctctaagttcaagttcaaatgggatcttttttcctacctcattcattgcttttattatagtatcaacacttccccagctttcatcgta

SEQ ID NO: 13515 - DNA, 110 bp, synthetic construct
  source 1..110: mol_type = other DNA
ctacctcattcattgcttttattatagtatcaacacttccccagctttcatcgtaagaattattctatcaatttctcctacgctgcccccccttctcctcaccctactct

SEQ ID NO: 13516 - DNA, 110 bp, synthetic construct
  source 1..110: mol_type = other DNA
tcagcctgggagagctgctggcctggatcaataagtgggaaatcagctggacgcaatccacggtctggaagatgagtggagggaagcttgtttttggtacgttggaatgt

SEQ ID NO: 13517 - DNA, 110 bp, synthetic construct
  source 1..110: mol_type = other DNA
atccacggtctggaagatgagtggagggaagcttgtttttggtacgttggaatgtggcatggacttaggaccaaagtcaagaagagttttgatgtaaaaatgtaaaaacg

SEQ ID NO: 13518 - DNA, 110 bp, synthetic construct
  source 1..110: mol_type = other DNA
acctgtgttctagggcacgactagtgagaatctgtgcaatgggggaaagagaacaattgagaacggacagctacatctcctggtatcagtgcatggattgtattaatgac

SEQ ID NO: 13519 - DNA, 110 bp, synthetic construct
  source 1..110: mol_type = other DNA
caattggaaaattgtaagaaaaataaagcaatgcaaggaggggctcctcaggcacatcacatctttgaaaaaatggacaagtatagtataatgtagggataaacacttgg

SEQ ID NO: 13520 - DNA, 110 bp, synthetic construct
  source 1..110: mol_type = other DNA
atcacatctttgaaaaaatggacaagtatagtataatgtagggataaacacttgggagctaaaaccgtaaagaagggcaaagaggaattgctctcaaatcaaggcgacct

SEQ ID NO: 13521 - DNA, 110 bp, synthetic construct
  source 1..110: mol_type = other DNA
gtttaaattctcagatctctctctgtccctttccctccagtctctcctgagcttcagaacgatatttccaagtgccaaatacacaaatgtttcctaagttgcagaagaca

SEQ ID NO: 13522 - DNA, 110 bp, synthetic construct
  source 1..110: mol_type = other DNA
agaacgatatttccaagtgccaaatacacaaatgtttcctaagttgcagaagacaatagctgtctgtttgaaagatggtactgaaagttggagaccagagagagactgag

SEQ ID NO: 13523 - DNA, 110 bp, synthetic construct
  source 1..110: mol_type = other DNA
cggactgtctctttccctggtggcctccataaacgtctggctctttggtctctattggaattaccttgagctgggagacgccgctgagagcagatgtctccactgtatgt

SEQ ID NO: 13524 - DNA, 110 bp, synthetic construct
  source 1..110: mol_type = other DNA
tcctgcttccccgtcaggttacacagttgaagctacagtgtagacaggggcagcgggggacatggggctggcgcacgcccctatctgctgtagggttttgacagagagct

SEQ ID NO: 13525 - DNA, 110 bp, synthetic construct
  source 1..110: mol_type = other DNA
ggggacatggggctggcgcacgcccctatctgctgtagggttttgacagagagctgctcgtttctggttcatcccagtgcaagggaactgctgctgcacacatggctcag

SEQ ID NO: 13526 - DNA, 110 bp, synthetic construct
  source 1..110: mol_type = other DNA
aaaagaaatgtgtttccaataagccgtatttactggagtttcacaacgatctaataggtacctgtctattacgtggtagtcaagctgacgaaatgtgtttctaataatca

SEQ ID NO: 13527 - DNA, 110 bp, synthetic construct
  source 1..110: mol_type = other DNA
aggtacctgtctattacgtggtagtcaagctgacgaaatgtgtttctaataatcaattggcatttcaaataatggaagataactgccatatgatatccaaacctgggtat

SEQ ID NO: 13528 - DNA, 110 bp, synthetic construct
  source 1..110: mol_type = other DNA
gggaaccctggcagccagaaagcatgctcctcccccacgtgaccagaccttgatttcctgacttaacatccacctctgagaaagcccagcgctctcggcgctagaggcca

SEQ ID NO: 13529 - DNA, 110 bp, synthetic construct
  source 1..110: mol_type = other DNA
tcctgacttaacatccacctctgagaaagcccagcgctctcggcgctagaggccacgcgggtctgagagctggcagtgggcgcagaggcatcaagccatctgtccatcag

SEQ ID NO: 13530 - DNA, 110 bp, synthetic construct
  source 1..110: mol_type = other DNA
cctgcaagagcgctctggaacagccgaagctggaaatgtgcacattcaaggtatgtgaaacgctatcagacaaatgcaagctaaaagaagccaggcgtcaccacgctaat

SEQ ID NO: 13531 - DNA, 110 bp, synthetic construct
  source 1..110: mol_type = other DNA
tgaaacgctatcagacaaatgcaagctaaaagaagccaggcgtcaccacgctaatgtcagaaacctacatagaacaacatccatagataaaatacatggaacgcggaggt

SEQ ID NO: 13532 - DNA, 110 bp, synthetic construct
  source 1..110: mol_type = other DNA
gccaagcgctcgtcctgtgtcatctcgtgtagtcctctcaacaactccaaggggcagtgttacccccgtgttagaggggagaggaacacagttcttctcagagcagcttg

SEQ ID NO: 13533 - DNA, 110 bp, synthetic construct
  source 1..110: mol_type = other DNA
agtgttacccccgtgttagaggggagaggaacacagttcttctcagagcagcttgaccacagacacacacacacaggccgtcagcagcccaagcacaagccggactccag

SEQ ID NO: 13534 - DNA, 110 bp, synthetic construct
  source 1..110: mol_type = other DNA
gccagcacctgctaagcacaaaacacacctggcaccttgcgtatgtttcctcgtctcgtcctgctgttcacctgcaggtcgacatcgtgaccttcgttactcgtatgaag

SEQ ID NO: 13535 - DNA, 110 bp, synthetic construct
  source 1..110: mol_type = other DNA
tcgtcctgctgttcacctgcaggtcgacatcgtgaccttcgttactcgtatgaagctcagagcggttgagttgcgagtcttctgaggcttgtccagggtacaggaagaat

SEQ ID NO: 13536 - DNA, 110 bp, synthetic construct
  source 1..110: mol_type = other DNA
ggcaggcaggagaaggcacccaaaaccttggaagcaaaatgcccttcctaatactgctctccacgcgtggcctcagctgaagtcaaccttcaagaagccgactgaacttc

SEQ ID NO: 13537 - DNA, 110 bp, synthetic construct
  source 1..110: mol_type = other DNA
aaatcacagcccgggggcggggacgggagctgagacaggcccagcacgaggaggaaaacaggtttcagaaaggctctcggtgacaagggcgcgttttgggttgttttgtt

SEQ ID NO: 13538 - DNA, 110 bp, synthetic construct; identical to SEQ ID NO: 13537
  source 1..110: mol_type = other DNA

SEQ ID NO: 13539 - DNA, 110 bp, synthetic construct
  source 1..110: mol_type = other DNA
tgacgtcacggggcaggagacaaagaaacgatgcttctcccagcccagctcccgtgatctggcgcagggggatgtgcctctgcggaaaagcactgtgtctacaaagctcc

SEQ ID NO: 13540 - DNA, 110 bp, synthetic construct
  source 1..110: mol_type = other DNA
gatctggcgcagggggatgtgcctctgcggaaaagcactgtgtctacaaagctccagacccaggcaagcattctggccaatgggaaccgagacgtgagatggttcgtacg

SEQ ID NO: 13541 - DNA, 110 bp, synthetic construct
  source 1..110: mol_type = other DNA
ggccgctctgccccttcatccgaggtcactgttctttcggaagaaggtcagtaacattaatacgagtgcctgctgtcccggctcacaccccattctctttgtctggtgac

SEQ ID NO: 13542 - DNA, 110 bp, synthetic construct
  source 1..110: mol_type = other DNA
tccagttgcagctcaatatttaaagctatccaaggcgaaatgtcacctagaagtacggcttacctacaggtgttaggacactggctgagaagcggatgctaaggcacttt

SEQ ID NO: 13543 - DNA, 110 bp, synthetic construct
  source 1..110: mol_type = other DNA
aaagccagggaaggcgcaccggtcctcagggagagcaaacctttaaaggcttctgcagccaaccgacatgagccggttcccacatgggtgtcacaggtcgacgggaagca

SEQ ID NO: 13544 - DNA, 110 bp, synthetic construct
  source 1..110: mol_type = other DNA
cagccaaccgacatgagccggttcccacatgggtgtcacaggtcgacgggaagcaggacccgagggcaggatgaaggagaccccctaaggagatcatcccaccgacctgc

SEQ ID NO: 13545 - DNA, 110 bp, synthetic construct
  source 1..110: mol_type = other DNA
aggccgggctttctggctcggagctggggctggccgagcagaagagcagacagctgcgcccatccaaccctgaaatcccccaccttttgtgtaagggagaaaagttcctg

SEQ ID NO: 13546 - DNA, 110 bp, synthetic construct
  source 1..110: mol_type = other DNA
gcgcccatccaaccctgaaatcccccaccttttgtgtaagggagaaaagttcctggaccagggatcaaatctgagccagggcagtgacaacactggatccttaactacga

SEQ ID NO: 13547 - DNA, 110 bp, synthetic construct
  source 1..110: mol_type = other DNA
ttttgtacctctttcagaaactgcagttccttctgaaaggaaaaaggaaaaaagttgccctgtggggccaaatgagaacttcagctttcaaagcaaaatcgcatcctgga

SEQ ID NO: 13548 - DNA, 110 bp, synthetic construct
  source 1..110: mol_type = other DNA
tgccctgtggggccaaatgagaacttcagctttcaaagcaaaatcgcatcctggactaaactgccagggagagctgatgtctgctaaactgctggtctaaagtcgtgcat

SEQ ID NO: 13549 - DNA, 110 bp, synthetic construct
  source 1..110: mol_type = other DNA
tattaactgcgtgtgtgcactgacacaatttgctagttttctgagtaggcgaattgcgcttagtcatcttggcatttttaaatgtaaatgaaaaatcacccggtgctctg

SEQ ID NO: 13550 - DNA, 110 bp, synthetic construct
  source 1..110: mol_type = other DNA
gcgcttagtcatcttggcatttttaaatgtaaatgaaaaatcacccggtgctctgagccagaagcgagaaagataaataacaccaggaagctggtcgttgcccgtctgtc

SEQ ID NO: 13551 - DNA, 110 bp, synthetic construct
  source 1..110: mol_type = other DNA
ctaaaacctcgcaacttctgtgccagcctgaaagaatagcaagttcataatcggaaatcctgtttgacgtttctctcatcttttttagaattgaaatgcccactttaact

SEQ ID NO: 13552 - DNA, 110 bp, synthetic construct
  source 1..110: mol_type = other DNA
gcctgaaagaatagcaagttcataatcggaaatcctgtttgacgtttctctcatcttttttagaattgaaatgcccactttaacttttaaatcttaataaaactcattgc

SEQ ID NO: 13553 - DNA, 110 bp, synthetic construct
  source 1..110: mol_type = other DNA
ttctttgccttcgtaactacctttagggtgtaatccatgaaaaatgtggatgccttggtatttctgctctaaagctggggccgtgtcatgattcccaagtccatgccgaa

SEQ ID NO: 13554 - DNA, 110 bp, synthetic construct
  source 1..110: mol_type = other DNA
tggtatttctgctctaaagctggggccgtgtcatgattcccaagtccatgccgaacccccaggcgcttgataggcataggtgtgggacttagggtttcgggggtgggcag

SEQ ID NO: 13555 - DNA, 110 bp, synthetic construct
  source 1..110: mol_type = other DNA
aacacgtctcctccgcgggggtgtcagcaccgcctgggcgccccggctccctccagggcttcctctccagctgcccagtagcgcccagagcagtgaaatgagtcccaagt

SEQ ID NO: 13556 - DNA, 110 bp, synthetic construct
  source 1..110: mol_type = other DNA
gggcttcctctccagctgcccagtagcgcccagagcagtgaaatgagtcccaagtgccctttgccgcgctgtgtgtcagtatcttatccatcctccgtcagcttgcacgc

SEQ ID NO: 13557 - DNA, 110 bp, synthetic construct
  source 1..110: mol_type = other DNA
ccctccttctgggccgacctcgagaaatcaggccagctgccatgggatttaaacgctggaaggagcaaaaggagtgatgaaaaaaattttaaataaagaacaaatgatag

SEQ ID NO: 13558 - DNA, 110 bp, synthetic construct
  source 1..110: mol_type = other DNA
gtaaaggatacattttaaaagcaaaaggttaaaatcatgactctaggaattcctgttgtggctcagcagtaacaaacccaaccagtatacatgaggactcgggtttgatc

SEQ ID NO: 13559 - DNA, 110 bp, synthetic construct; identical to SEQ ID NO: 13558
  source 1..110: mol_type = other DNA

SEQ ID NO: 13560 - DNA, 110 bp, synthetic construct
  source 1..110: mol_type = other DNA
ctcgtttgttatggctgcgaatcggatagatcacaataatgtattttacctctcgatgcccacttaggtagttttcagccttctccgatgtgagctaagctgcggtgact

SEQ ID NO: 13561 - DNA, 110 bp, synthetic construct
  source 1..110: mol_type = other DNA
atgcccacttaggtagttttcagccttctccgatgtgagctaagctgcggtgactaatacatatttaggtgtttccatcatctgagcctgtgcgtatctgtgggataaat

SEQ ID NO: 13562 - DNA, 110 bp, synthetic construct
  source 1..110: mol_type = other DNA
tgaggaagtttaatgattctttccagtgtgtttcctagtgattccatgtgctcttaaattattctctcctcaaccaccatccctttctgggctgttaccatttgttaaaa

SEQ ID NO: 13563 - DNA, 110 bp, synthetic construct
  source 1..110: mol_type = other DNA
aaattattctctcctcaaccaccatccctttctgggctgttaccatttgttaaaaaccagacctgtcagaacaggcttctgcttccatgaatgacgtgaatgaaaggttg

SEQ ID NO: 13564 - DNA, 110 bp, synthetic construct
  source 1..110: mol_type = other DNA
tgtcttcctcttctgagccaccatcctcctgccacatctcacattaatcctcgcgcgacgaggagctgtcaccaaatgcgacatctgcaggagatgttgagcacatcgtc

SEQ ID NO: 13565 - DNA, 110 bp, synthetic construct
  source 1..110: mol_type = other DNA
cgacgaggagctgtcaccaaatgcgacatctgcaggagatgttgagcacatcgtcatcaattcggcacctggaggccctgtggctataactttacacctgtgtggtgcgc

SEQ ID NO: 13566 - DNA, 110 bp, synthetic construct
  source 1..110: mol_type = other DNA
tcagttaaatactccttcttcaaagaggtctttcctgaccctcctgtgaaattcaggctcctctgttgtaagctctccaaataccctgcccttttcccttagaacatgga

SEQ ID NO: 13567 - DNA, 110 bp, synthetic construct
  source 1..110: mol_type = other DNA
gaactcaaaagttagttgcattggaattttgaaaatgcattctgtctcattagtagcttctttaattaagcaccagtgtggcgttggaaataaaatattcagccctagat

SEQ ID NO: 13568 - DNA, 110 bp, synthetic construct
  source 1..110: mol_type = other DNA
gcttctttaattaagcaccagtgtggcgttggaaataaaatattcagccctagatggagttatctgaacatgcttctctggtatcgtaattctcatagtttaacaggaga

SEQ ID NO: 13569 - DNA, 110 bp, synthetic construct
  source 1..110: mol_type = other DNA
gatctgcagcaacttccctctccagcctgtgacacgtcctttgcaacacgagacctcgtgaagcctggccctcatccttccaatgtccatgctgccaccagacactgtcc

SEQ ID NO: 13570 - DNA, 110 bp, synthetic construct
  source 1..110: mol_type = other DNA
tcgtgaagcctggccctcatccttccaatgtccatgctgccaccagacactgtccagctaccaagagaatacatcctatgtacctatccctctgcacgtccaaagacacc

SEQ ID NO: 13571 - DNA, 110 bp, synthetic construct
  source 1..110: mol_type = other DNA
aatgctcaataaatgttagctttaaaattagcacagaggaatttataacataaaaggtaaataaccattctccaccccacaaataaacgccccaaaaatagactctataa

SEQ ID NO: 13572 - DNA, 110 bp, synthetic construct
  source 1..110: mol_type = other DNA
ggtaaataaccattctccaccccacaaataaacgccccaaaaatagactctataaatatgtcattaatagttgtatctttccagatttttccttgtcatataccaaaata

SEQ ID NO: 13573 - DNA, 110 bp, synthetic construct
  source 1..110: mol_type = other DNA
tggcactccgcacacgcaggaaatggacctactttaattacgtcaagggccacagaggaagaggctgcccaggatttggaggatcaagcttccgaagatttgtccagctt

SEQ ID NO: 13574 - DNA, 110 bp, synthetic construct
  source 1..110: mol_type = other DNA
aggaagaggctgcccaggatttggaggatcaagcttccgaagatttgtccagcttggagggatttgcagtgatgcacctagttttggtctcattttgagctaaccatcta

SEQ ID NO: 13575 - DNA, 110 bp, synthetic construct; identical to SEQ ID NO: 13573
  source 1..110: mol_type = other DNA

SEQ ID NO: 13576 - DNA, 110 bp, synthetic construct; identical to SEQ ID NO: 13574
  source 1..110: mol_type = other DNA

SEQ ID NO: 13577 - DNA, 110 bp, synthetic construct
  source 1..110: mol_type = other DNA
ccacgtcctcacagcacctggacaaacgtccactcagccatctggggatattcttactgcaagtcaacctctcctacctccttctagacgccaagctacaggaggacaag

SEQ ID NO: 13578 - DNA, 110 bp, synthetic construct
  source 1..110: mol_type = other DNA
actgcaagtcaacctctcctacctccttctagacgccaagctacaggaggacaaggtctgtcactgctctgaactaggtcctaaggtgtagcagagtaccaggccggggc

SEQ ID NO: 13579 - DNA, 110 bp, synthetic construct
  source 1..110: mol_type = other DNA
gatgggtgctctctgtgggtctggagcctgccgatggggcattattgctattactgctttactgagagggaaacagcttaacgaagcctccacttttgtgttcagcaatc

SEQ ID NO: 13580 - DNA, 110 bp, synthetic construct
  source 1..110: mol_type = other DNA
gctttactgagagggaaacagcttaacgaagcctccacttttgtgttcagcaatcgtccagtgtccatccctctagcccagagagagtctctttctgctcgaggttccca

SEQ ID NO: 13581 - DNA, 110 bp, synthetic construct
  source 1..110: mol_type = other DNA
aagcctgcaccctgccctccctgcccccaacctactgggctcagggttactccttatgaagggacttgaataagcatgcttcccatcttgcagtgaactggagagctcat

SEQ ID NO: 13582 - DNA, 110 bp, synthetic construct
  source 1..110: mol_type = other DNA
atgaagggacttgaataagcatgcttcccatcttgcagtgaactggagagctcattttcattatttgaaaaatctaatacagacatttgacaacgtgggcagtctaccca

SEQ ID NO: 13583 - DNA, 110 bp, synthetic construct
  source 1..110: mol_type = other DNA
gcgccggggaaggagtcttgtcccagggagggagcactgcacctttacttcgaacccggaccttctgtacttctggtcagcgtgcccttctctttagcgattaaagcagc

SEQ ID NO: 13584 - DNA, 110 bp, synthetic construct
  source 1..110: mol_type = other DNA
ccggaccttctgtacttctggtcagcgtgcccttctctttagcgattaaagcagctggacagtgtgtgttggctacacacaggctgtttgaattaccgtacaattcgctg

SEQ ID NO: 13585 - DNA, 110 bp, synthetic construct
  source 1..110: mol_type = other DNA
aactccatgatgtttttgtgttcttgttccagtatcttccttatatcctttaacttgtctattagtctaattttaaatgtgtgttctgaagataatacactgtgcagctt

SEQ ID NO: 13586 - DNA, 110 bp, synthetic construct
  source 1..110: mol_type = other DNA
tgtctattagtctaattttaaatgtgtgttctgaagataatacactgtgcagcttttctcttgaaagtggtgatgccgttaacctgagggctctgacactgtctccacgg

SEQ ID NO: 13587 - DNA, 110 bp, synthetic construct
  source 1..110: mol_type = other DNA
cctccagggtgatggtcttgccggtcagggtcttcacgaagatctgcattttgacctatagagttcaagaaaacgtactgtatcacctcacgatgtttcactattcgtat

SEQ ID NO: 13588 - DNA, 110 bp, synthetic construct; identical to SEQ ID NO: 13587
  source 1..110: mol_type = other DNA

SEQ ID NO: 13589 - DNA, 110 bp, synthetic construct
  source 1..110: mol_type = other DNA
ccttggaaggtgaaaagccccggagttcgtaactcttgcggtggcacaacctggtggtgtctgggtcttgtctctggcatcatgacagggtctgggagtggcccagcctc

SEQ ID NO: 13590 - DNA, 110 bp, synthetic construct
  source 1..110: mol_type = other DNA
ggtgtctgggtcttgtctctggcatcatgacagggtctgggagtggcccagcctcactcggacgacatcctttagggtgtcgttttgctgccctgggcgtgcacgccgtt

SEQ ID NO: 13591 - DNA, 110 bp, synthetic construct
  source 1..110: mol_type = other DNA
cccatggcatatggagttctaggggtcagggagcagatccaagctgcacactgctgaccttaagctgaagcaacctgggatccttagcccagtgtgctgcctggggatca

SEQ ID NO: 13592 - DNA, 110 bp, synthetic construct
  source 1..110: mol_type = other DNA
ccaagtgcccggggcaccaggaccgcccgtgaacgcagggctctggccttttccgccttcagccgggagtgcttctcggtggcggagggcgcgcgctcttcaggaagtaa

SEQ ID NO: 13593 - DNA, 110 bp, synthetic construct
  source 1..110: mol_type = other DNA
ccttcagccgggagtgcttctcggtggcggagggcgcgcgctcttcaggaagtaagtagcctgagattcagttggtttgggggcattggttattcgtatagtttgataag

SEQ ID NO: 13594 - DNA, 110 bp, synthetic construct
  source 1..110: mol_type = other DNA
gggtttgctggtgatccgatgcaggcagggggagtcccgcgttagaccagggtctcagccagggggttcgtgcgtgtttacagggcggtggaagtcactactcactgtgt

SEQ ID NO: 13595 - DNA, 110 bp, synthetic construct
  source 1..110: mol_type = other DNA
cagccagggggttcgtgcgtgtttacagggcggtggaagtcactactcactgtgtgtgtgactcacaggcaaccaaatggacggtggtgcctttcagagaagtgggaaga

SEQ ID NO: 13596 - DNA, 110 bp, synthetic construct
  source 1..110: mol_type = other DNA
tctctttgttacggcggcctggtgtgcacccttcctaacaccaggcgagtccttcacgtactcacagcattaccgagtgatttacttacattttcaagctgcccccgtat

SEQ ID NO: 13597 - DNA, 110 bp, synthetic construct
  source 1..110: mol_type = other DNA
acgtactcacagcattaccgagtgatttacttacattttcaagctgcccccgtataaatgctacattggccatctgaaagaaaccacaagctgttttcagtttagaccac

SEQ ID NO: 13598 - DNA, 110 bp, synthetic construct
  source 1..110: mol_type = other DNA
ccctttttctcgtctgtctcccccaccaggatgcgacctccgaaaggcccaggctgagtccgtctccctcaaaactgtaccctagcacccggcacagaagaaccacgtgg

SEQ ID NO: 13599 - DNA, 110 bp, synthetic construct
  source 1..110: mol_type = other DNA
gagtccgtctccctcaaaactgtaccctagcacccggcacagaagaaccacgtggaatatttgcatgtgactctcaggttgctcggaaatgctcggctgaaggcactcag

SEQ ID NO: 13600 - DNA, 110 bp, synthetic construct
  source 1..110: mol_type = other DNA
aacaataaaaggaacaagtgcttagtgcaagatccccaggaaacacaggagtagcaggacgctcagttatggcccttttgtacgagctgggactctgaagcgacagaacc

SEQ ID NO: 13601 - DNA, 110 bp, synthetic construct
  source 1..110: mol_type = other DNA
aggacgctcagttatggcccttttgtacgagctgggactctgaagcgacagaacccaactggagctgattccagaaaaggcgggatctgccctaaggcttttcaggtccc

SEQ ID NO: 13602 - DNA, 110 bp, synthetic construct
  source 1..110: mol_type = other DNA
tggttgtaccctggatggggacttagttatatcctggctggggagctagttataccaactgtgggtctagttataccagctgtggggttagttatactagctctgggtcc

SEQ ID NO: 13603 - DNA, 110 bp, synthetic construct
  source 1..110: mol_type = other DNA
caactgtgggtctagttataccagctgtggggttagttatactagctctgggtccaggaataccagctgtggggttagttatacccgactggggagttagttatacctgg

SEQ ID NO: 13604 - DNA, 110 bp, synthetic construct
  source 1..110: mol_type = other DNA
acaccttgcactcaaggtcacggaaactctctgcaaacccaacagagggaccaacatggaaggattctgcacataaaataaacctgaatgacccgctcggtgtgcggccc

SEQ ID NO: 13605 - DNA, 110 bp, synthetic construct
  source 1..110: mol_type = other DNA
atggaaggattctgcacataaaataaacctgaatgacccgctcggtgtgcggcccttccgctaaaggcaaccagcagggtcccattcagagatggtttggaagcttccgg

SEQ ID NO: 13606 - DNA, 110 bp, synthetic construct
  source 1..110: mol_type = other DNA
gatgctcctagacagtcatctctggctgtaagatttccaaccatccatgaaatttctccttatctgtgtcccggcacgaatgcagctcagacgctttgcattcagcagag

SEQ ID NO: 13607 - DNA, 110 bp, synthetic construct
  source 1..110: mol_type = other DNA
ctccttatctgtgtcccggcacgaatgcagctcagacgctttgcattcagcagagcttccctgaacaccgtgtgggtgccgagcaccgcggtacgagaggacgcgggcgc

SEQ ID NO: 13608 - DNA, 110 bp, synthetic construct
  source 1..110: mol_type = other DNA
ccaacaatcagagcaggaggaaccaccgtctggctcatgatgaaatcaaccaccgaaagaagctccagctttgggttccatcctcggcataaaaagtgtgctaagaaggt

SEQ ID NO: 13609 - DNA, 110 bp, synthetic construct
  source 1..110: mol_type = other DNA
ggcacctgacagcagcacctctttcttttttttcttctcctctgttagtctggaaattacacactctccgtttttcagttattgcctcctaggaatctgattagagagct

SEQ ID NO: 13610 - DNA, 110 bp, synthetic construct
  source 1..110: mol_type = other DNA
attacacactctccgtttttcagttattgcctcctaggaatctgattagagagcttacagcccatgcttgtcttcttgcgtctttgtttctcaaaggtctaggcgatttt

SEQ ID NO: 13611 - DNA, 110 bp, synthetic construct
  source 1..110: mol_type = other DNA
ctgtcttttccgtttcatctctcttaggagctttgtgaaagtcggcgtgagaaaccttagctgtcagactagaattttgtatgtctatgttgacttctgtctaaaataga

SEQ ID NO: 13612 - DNA, 110 bp, synthetic construct
  source 1..110: mol_type = other DNA
cttagctgtcagactagaattttgtatgtctatgttgacttctgtctaaaatagacccaaggtagaaaacccacgcttctcttcggaacccttcgcatcccttagcaagc

SEQ ID NO: 13613 - DNA, 110 bp, synthetic construct
  source 1..110: mol_type = other DNA
acgctcaccctctggacctcttttagggatcagttccgtggcgttaaggacgtttccgtcattgtcccgccattgccaccctctgtctccagagctggtgaatgtcgtgt

SEQ ID NO: 13614 - DNA, 110 bp, synthetic construct
  source 1..110: mol_type = other DNA
ccgtcattgtcccgccattgccaccctctgtctccagagctggtgaatgtcgtgtgttctccacacaggcagacgcaggctgggtgcacgtggaacagtagggtgcctgt

SEQ ID NO: 13615 - DNA, 110 bp, synthetic construct
  source 1..110: mol_type = other DNA
ctgtagctgccggcctgtgtcacagccacagccatgccagatcggagctgcatttgcaagctgcaccacaggtcaaggcaacgccggatgcctaacccactgagggaggc

SEQ ID NO: 13616 - DNA, 110 bp, synthetic construct
  source 1..110: mol_type = other DNA
ccacagccatgccagatcggagctgcatttgcaagctgcaccacaggtcaaggcaacgccggatgcctaacccactgagggaggccagggatgaaacccgaaacctcatg

SEQ ID NO: 13617 - DNA, 110 bp, synthetic construct
  source 1..110: mol_type = other DNA
tttcatctgtataaaagcagaggcaaatgtgagctacgagctgggaggctgttaatttgggaaacaggtgctgccgtggataataagagatcgtaactcaggtgctgtct

SEQ ID NO: 13618 - DNA, 110 bp, synthetic construct
  source 1..110: mol_type = other DNA
tttgggaaacaggtgctgccgtggataataagagatcgtaactcaggtgctgtctgctcactcagacacagatcagcttggctcctcgggggctctgccccagcaaataa

SEQ ID NO: 13619 - DNA, 110 bp, synthetic construct
  source 1..110: mol_type = other DNA
tgaagattcgtttttcctacatcgcaagaaatccaaagaactttgttgcactcggtttggctgcttgataaagcctgtcaggagctaaggcagtatccctctgctttgct

SEQ ID NO: 13620 - DNA, 110 bp, synthetic construct
  source 1..110: mol_type = other DNA
actccctcaaggatttgtaatgtcacaagatgttgcatctgctttgccacaggagtggcggggacaaatacaagctcagccagaggctgtccacacgcgccgttcagagc

SEQ ID NO: 13621 - DNA, 110 bp, synthetic construct
  source 1..110: mol_type = other DNA
tggcggggacaaatacaagctcagccagaggctgtccacacgcgccgttcagagcaagaaccgaaaggaaacacagcggctcagcgcggatgcaagattcagagatgact

SEQ ID NO: 13622 - DNA, 110 bp, synthetic construct
  source 1..110: mol_type = other DNA
gcctaattcttatgccaacgtcctcggccctgtgcacacgggcgtgtggacacaatccagctccacccccacaggcgggctggcaaggctggggccagaggcccccccac

SEQ ID NO: 13623 - DNA, 110 bp, synthetic construct
  source 1..110: mol_type = other DNA
agatttagcccagggtagggggtggcaaactatggaccagagctgcctaccgcctgcttctgtaattaatggaacagagacgggtactttatgagctgtccacggctgtg

SEQ ID NO: 13624 - DNA, 110 bp, synthetic construct
  source 1..110: mol_type = other DNA
gcttctgtaattaatggaacagagacgggtactttatgagctgtccacggctgtgttcatgctgtgacagcagagttgagggtgtgtcggagacatgcggcctgcgagtc

SEQ ID NO: 13625 - DNA, 110 bp, synthetic construct
  source 1..110: mol_type = other DNA
gcggccccggggaacgtggtcagcaccgagcacgtgaaagctagtttgcactctcaggattgggatgacgtgcgtctgagtccaggtctttattggcctatgatcttaag

SEQ ID NO: 13626 - DNA, 110 bp, synthetic construct
  source 1..110: mol_type = other DNA
ctgcatttatgtgatctcacttaattttagatgatgttgcaacacaggtagaatcttcaattaatatagaattttcccagctgccaaggacagaagaaaccaagagtttt

SEQ ID NO: 13627 - DNA, 110 bp, synthetic construct
  source 1..110: mol_type = other DNA
ttcaattaatatagaattttcccagctgccaaggacagaagaaaccaagagttttcctatagatcttctgaggtgtttataacatcccacatccaacccagcagcaaatc

SEQ ID NO: 13628 - DNA, 110 bp, synthetic construct
  source 1..110: mol_type = other DNA
gggagacaaagttaaaaaccattttactccaaaatgtacagtccttccttccactacaacagaggttctcagatttttggtctcagggcctttttacactctcaaaaatt

SEQ ID NO: 13629 - DNA, 110 bp, synthetic construct
  source 1..110: mol_type = other DNA
gctgcatctctgattcaacccctagcttgggaacttccctatgccacaggtgtggacgtgaaaagaaaaaaaagtttaaaaaaaaacaataacaagaaatgcggttttgc

SEQ ID NO: 13630 - DNA, 110 bp, synthetic construct; identical to SEQ ID NO: 13629
  source 1..110: mol_type = other DNA

SEQ ID NO: 13631 - DNA, 110 bp, synthetic construct
  source 1..110: mol_type = other DNA
aaccactgtgcccactgctactgtagtcactgtgccccgacgggaactcctgatttttttttttttttaatattgagctgcagtaggtgtctgtgtattttggatattgg

SEQ ID NO: 13632 - DNA, 110 bp, synthetic construct
  source 1..110: mol_type = other DNA
cccgacgggaactcctgatttttttttttttttaatattgagctgcagtaggtgtctgtgtattttggatattggtcccttgtgagttgcctcatttgcaaatattttct

SEQ ID NO: 13633 - DNA, 110 bp, synthetic construct
  source 1..110: mol_type = other DNA
gcttgttgatggcgtcttacagataggcgggtggaggtgctggactctcgtagagcttatagtttcgtgaaagaagcaggaagttaattgagaaccttaagcaagtgcag

SEQ ID NO: 13634 - DNA, 110 bp, synthetic construct
  source 1..110: mol_type = other DNA
cttatagtttcgtgaaagaagcaggaagttaattgagaaccttaagcaagtgcagtacctttgcttgtgcagtgatggacctacggtgttatgggagccttgaggagggc

SEQ ID NO: 13635 - DNA, 110 bp, synthetic construct
  source 1..110: mol_type = other DNA
ttctttgtagccctaagggctggggtttctccccagctgttgctgtccgcagctgctccccagtggctactggagctggagcgtatggtgtcctgcagcctgagagcaag

SEQ ID NO: 13636 - DNA, 110 bp, synthetic construct
  source 1..110: mol_type = other DNA
ctccccagtggctactggagctggagcgtatggtgtcctgcagcctgagagcaagtgcagggtaaaagctgtaatggtggttcttggcctccaagccccttgggttttct

SEQ ID NO: 13637 - DNA, 110 bp, synthetic construct
  source 1..110: mol_type = other DNA
ccagattttttgtttcctttgagttagtagaaagtcttgcaacatggagcctttaattcttatgcagtgataagctggaggtggtcgcagttgcctctacccagagttca

SEQ ID NO: 13638 - DNA, 110 bp, synthetic construct
  source 1..110: mol_type = other DNA
attcttatgcagtgataagctggaggtggtcgcagttgcctctacccagagttcaagtttatccctgtcctcattccttagcactccccttcattcactgggatggttca

SEQ ID NO: 13639 - DNA, 110 bp, synthetic construct; identical to SEQ ID NO: 13637
  source 1..110: mol_type = other DNA

SEQ ID NO: 13640 - DNA, 110 bp, synthetic construct; identical to SEQ ID NO: 13638
  source 1..110: mol_type = other DNA

SEQ ID NO: 13641 - DNA, 110 bp, synthetic construct
  source 1..110: mol_type = other DNA
ccttcccaacctgtacacttgcaacctgaataggagatacacagtgggagagcctcacacaggattcctggccccatgaaacttactgcactcagcagaattgaaagagg

SEQ ID NO: 13642 - DNA, 110 bp, synthetic construct
  source 1..110: mol_type = other DNA
taaagtgagaaataataactggtaatattgcatttagggttatcattaacttgggctaaattacagtgagatagctccagaaataaatggaagaattggagggaaagcaa

SEQ ID NO: 13643 - DNA, 110 bp, synthetic construct
  source 1..110: mol_type = other DNA
ttataagcttgcactgggagctttcatagtgtcatttttcgctagccttattatccttaggataagagcctgtacttctctaggaaaccttagacccttcagtgacgacg

SEQ ID NO: 13644 - DNA, 110 bp, synthetic construct; identical to SEQ ID NO: 13643
  source 1..110: mol_type = other DNA

SEQ ID NO: 13645 - DNA, 110 bp, synthetic construct
  source 1..110: mol_type = other DNA
ttcttattccctgacctcattcccccagtttggtggtgacaaagctgctcctatttgataaattaataaactctaaatttatgatgatagattgtgccgttattctcaga

SEQ ID NO: 13646 - DNA, 110 bp, synthetic construct
  source 1..110: mol_type = other DNA
cattgcaaaattgagtgcattagatatatttcaggtggcctgggctttttgtgatgagttggagacctaaacactatttaaaactttgttgttctgagttctcaacattc

SEQ ID NO: 13647 - DNA, 110 bp, synthetic construct
  source 1..110: mol_type = other DNA
actcagaggagtcacttctcttccattaatttccttctctgtaaaatgagggaggtgacaagaccatctgtcgagcttagacgttttaagatgatatacctaaactccac

SEQ ID NO: 13648 - DNA, 110 bp, synthetic construct
  source 1..110: mol_type = other DNA
tgacaagaccatctgtcgagcttagacgttttaagatgatatacctaaactccactgtgagctgttagaactgaaggcctcctggcttgtagatggttgtgagctgctgt

SEQ ID NO: 13649 - DNA, 110 bp, synthetic construct
  source 1..110: mol_type = other DNA
tacgatatattagaaaggggttcattgaaaaagagcaccgccagagttctcgttatggctcagcagttaacaaacctgactatgatccacaaggatgcaggttcgatccc

SEQ ID NO: 13650 - DNA, 110 bp, synthetic construct; identical to SEQ ID NO: 13649
  source 1..110: mol_type = other DNA

SEQ ID NO: 13651 - DNA, 110 bp, synthetic construct
  source 1..110: mol_type = other DNA
gaggagaggccgggtaggttagacagtggtcagagcgcaggccccaacttcgggtagacttgggttcagatatcagctgtggacattgccaaacctcactgtgcctcagt

SEQ ID NO: 13652 - DNA, 110 bp, synthetic construct
  source 1..110: mol_type = other DNA
ccttcctgtaacccgtcagagatcgcagccccagtggctagcaccctctttacctgaaatttgggtgccaccgtaaggtgctcctctgcaagttcagaggtcagaggaag

SEQ ID NO: 13653 - DNA, 110 bp, synthetic construct
  source 1..110: mol_type = other DNA
gaaatttgggtgccaccgtaaggtgctcctctgcaagttcagaggtcagaggaaggatctctgcagcttgcccccactgtggtcccacaagacccagaagctgccttgag

SEQ ID NO: 13654 - DNA, 110 bp, synthetic construct
  source 1..110: mol_type = other DNA
gggttgaagccattgctacaagctttccttctctgtggccatcccagggcatacaccctcaggcactgtgggaggcatagctgttggggtacgagctacatctggggtgc

SEQ ID NO: 13655 - DNA, 110 bp, synthetic construct
  source 1..110: mol_type = other DNA
atatgtgccatctagaataggttacccgagggttcccgtcatggctcaggggtaatgaacctgaatagcatccatgaggatttgagttccatccctggactcactcagtg

SEQ ID NO: 13656 - DNA, 110 bp, synthetic construct; identical to SEQ ID NO: 13655
  source 1..110: mol_type = other DNA

SEQ ID NO: 13657 - DNA, 110 bp, synthetic construct
  source 1..110: mol_type = other DNA
gaaggaattcagcaagaggcaaaataataagtaagaagtagatttattgagagacacacaccatagacagaatgtgggcctctcagaaggcaagagcagcttggaagata

SEQ ID NO: 13658 - DNA, 110 bp, synthetic construct; identical to SEQ ID NO: 13657
  source 1..110: mol_type = other DNA

SEQ ID NO: 13659 - DNA, 110 bp, synthetic construct
  source 1..110: mol_type = other DNA
cattctttctttcttttttatgactgagtagtattccattaggaaagcttccacagggaagccagtaataaggaggaagccttccctgccaagtgcttttcaaattccaa

SEQ ID NO: 13660 - DNA, 110 bp, synthetic construct
  source 1..110: mol_type = other DNA
gggaagccagtaataaggaggaagccttccctgccaagtgcttttcaaattccaacagataggtgctgttgggtggagccaggggagagtgccatgacaaagggtggtgt

SEQ ID NO: 13661 - DNA, 110 bp, synthetic construct
  source 1..110: mol_type = other DNA
tttttatatgggaacaatgagagcagtaacaatgaggcagcctccactgtaatttagagataaaagaaaaaaagatagcactggctgaagataagaaaaaattcaagttt

SEQ ID NO: 13662 - DNA, 110 bp, synthetic construct
  source 1..110: mol_type = other DNA
agagataaaagaaaaaaagatagcactggctgaagataagaaaaaattcaagttttcaggaaaaaaacacctaagggctcattcagcttgctgccaggaccctgaagatt

SEQ ID NO: 13663 - DNA, 110 bp, synthetic construct
  source 1..110: mol_type = other DNA
actgagttataaaggtagacagtgaaaatactgaaggaattaatgctgaatatcaaggaattaagaagatacgaacagtaatgtaggtttccttagaaaggaactagaaa

SEQ ID NO: 13664 - DNA, 110 bp, synthetic construct
  source 1..110: mol_type = other DNA
tagacagtgaaaatactgaaggaattaatgctgaatatcaaggaattaagaagatacgaacagtaatgtaggtttccttagaaaggaactagaaactataaggaggagcc

SEQ ID NO: 13665 - DNA, 110 bp, synthetic construct
  source 1..110: mol_type = other DNA
tttgagactgaaagtttcactcttagaagaacactgttttaatctctgaaaatcgttcagtaaccatattacttccttcaaggaaaacagtctcttgtgagaaaacaaat

SEQ ID NO: 13666 - DNA, 110 bp, synthetic construct
  source 1..110: mol_type = other DNA
gttcatccgaagctagttgtaaaagtatgccatacatacaaacaatacccatttttactatagctccataggaaataccaatctgatagaatggctcctagggtttatta

SEQ ID NO: 13667 - DNA, 110 bp, synthetic construct
  source 1..110: mol_type = other DNA
tactatagctccataggaaataccaatctgatagaatggctcctagggtttattagaaagcttatgaacaaaagacaatagatcatttggtcatttttgccagaggttgt

SEQ ID NO: 13668 - DNA, 110 bp, synthetic construct
  source 1..110: mol_type = other DNA
gcaggtgagagccaacaagatgatgaataagaggcaggaaagggaagtggttccttgcagtgaagagaggttaggctggaaaacatcagcaaaggtcagagttttcagtg

SEQ ID NO: 13669 - DNA, 110 bp, synthetic construct
  source 1..110: mol_type = other DNA
tgcagtgaagagaggttaggctggaaaacatcagcaaaggtcagagttttcagtgtcatttaaggcatggaaagagtttataccattatcttaaaggaattggaaggagg

SEQ ID NO: 13670 - DNA, 110 bp, synthetic construct
  source 1..110: mol_type = other DNA
aatcaatgagggagtcagaaagcctcaggtcaggatgaccctttggcatcacatacacctgaggtctggaaggagtgaactgaagctgccccctgtggcactcttctgag

SEQ ID NO: 13671 - DNA, 110 bp, synthetic construct
  source 1..110: mol_type = other DNA
tctgtggcacaatcttttgacttggagtataaatcaaatggtcatttccactgtcctccatcacaaaaggtgaatcttttgcggcacttaattcctggcctaagaagctg

SEQ ID NO: 13672 - DNA, 110 bp, synthetic construct
  source 1..110: mol_type = other DNA
ctccatcacaaaaggtgaatcttttgcggcacttaattcctggcctaagaagctgtcttctcccgaagaaatctcatgtgcctcagaggcaaatctagaatataaaaaag

SEQ ID NO: 13673 - DNA, 110 bp, synthetic construct
  source 1..110: mol_type = other DNA
agttctgatattttatttgggaaagaagctgaaggagctgcttcttgttacggtagtcagacccacggatgaggtagctggtacctgagttgtaggaaaccacgacaact

SEQ ID NO: 13674 - DNA, 110 bp, synthetic construct
  source 1..110: mol_type = other DNA
gtcagacccacggatgaggtagctggtacctgagttgtaggaaaccacgacaactcttgctcccacagggcagttattttcccagatgtgaaggtcattgacaatagaag

SEQ ID NO: 13675 - DNA, 110 bp, synthetic construct
  source 1..110: mol_type = other DNA
gagatctttcttttttgttaatttacacaggtatagccctaaaccttcttcttagagctacttttgctgaatcccctaagttgcagtatgttgtttccagttctgtggag

SEQ ID NO: 13676 - DNA, 110 bp, synthetic construct
  source 1..110: mol_type = other DNA
agctacttttgctgaatcccctaagttgcagtatgttgtttccagttctgtggagccactacctgggctctacgaccacctctggtccagaaaggttgaggctgtatttc

SEQ ID NO: 13677 - DNA, 110 bp, synthetic construct
  source 1..110: mol_type = other DNA
ggtggtccaaccctcctcttctcatccaccccaacaatggtgactcatttctcctgcgtgcctaggcctcctcccaggttcccttggcagtggtgatatgctccccagct

SEQ ID NO: 13678 - DNA, 110 bp, synthetic construct
  source 1..110: mol_type = other DNA
tctgctgcctctggagcagttgccgatgggtttcccacaagtagagctggggctgttaccacagctgagtcccagaggtcctatgacaaaagaggaagagctgaaacctc

SEQ ID NO: 13679 - DNA, 110 bp, synthetic construct
  source 1..110: mol_type = other DNA
ttaccacagctgagtcccagaggtcctatgacaaaagaggaagagctgaaacctctcctcctggctctgtgaaccatgaatttacacctctaccaccagccttataaatt

SEQ ID NO: 13680 - DNA, 110 bp, synthetic construct
  source 1..110: mol_type = other DNA
aactcagaaacagttgaatattggcaatggaacatagctcaacctgatattcaccagcatcctgaaatctcttagaaagagaagtgcccttaattttgataaatcatccc

SEQ ID NO: 13681 - DNA, 110 bp, synthetic construct
  source 1..110: mol_type = other DNA
aagaaatggggggaggggtcccacttaattgtttgggaaaatgcaaaaccatattcttactgtctttcccagtctccttccaatatcttagctagtgatggaagcaaaca

SEQ ID NO: 13682 - DNA, 110 bp, synthetic construct
  source 1..110: mol_type = other DNA
cttactgtctttcccagtctccttccaatatcttagctagtgatggaagcaaacatactttgtttaaatagcccagagatgggattaagatggcagaatagaaggactgg

SEQ ID NO: 13683 - DNA, 110 bp, synthetic construct
  source 1..110: mol_type = other DNA
ttcccccatagagatatcccattccaccctcaaatcacaccatttcttctttggaaattgttaaagctcaactttttccctttatttagtgactatgagaccccttatgc

SEQ ID NO: 13684 - DNA, 110 bp, synthetic construct
  source 1..110: mol_type = other DNA
atggaaaaaataaaaatcattctaaaaaaaataattatggttttctccagatagatgcccaagagtgggactgcgggatcacgtggtagttctacttttagttttttgag

SEQ ID NO: 13685 - DNA, 110 bp, synthetic construct; identical to SEQ ID NO: 13684
  source 1..110: mol_type = other DNA

SEQ ID NO: 13686 - DNA, 110 bp, synthetic construct
  source 1..110: mol_type = other DNA
gccaatttctgctgcaaaatgactcagttatacatatatcgacatccttttttatattcttttccatcacaatctatgtcccgggagattggatataattccctgtgctg

SEQ ID NO: 13687 - DNA, 110 bp, synthetic construct
  source 1..110: mol_type = other DNA
attcttttccatcacaatctatgtcccgggagattggatataattccctgtgctgtacagttgaccttgttgtttatccagccttgtcctatttatgaccttcatcctga

SEQ ID NO: 13688 - DNA, 110 bp, synthetic construct
  source 1..110: mol_type = other DNA
agaattctaataaaagagcgaagcagcttcttaaatacatttcaccatcccaggtgggtattgagtcgataggaagaaaaatgcacaaagctagacaaccataccttaca

SEQ ID NO: 13689 - DNA, 110 bp, synthetic construct
  source 1..110: mol_type = other DNA
cactgggctacccccagttcgataaactgtctccataacaccatctgcacatctacgttggccaagatgttctctccattaagcatccaaaggttggacaagtcctgccc

SEQ ID NO: 13690 - DNA, 110 bp, synthetic construct
  source 1..110: mol_type = other DNA
ggactagtcttctcaaggtgatgatagaggaactccgtgtgtaggggatgcttctgtctgctcacagctgcatctcagttccaggtccagggctaggacttattaagtgt

SEQ ID NO: 13691 - DNA, 110 bp, synthetic construct
  source 1..110: mol_type = other DNA
ggccattgctgtggggtggtttgatccctggcctgagaacttccacgtgcctcaggcatgccccacctcctccaaaaaaagatcagcagtgctctccccaccccaccgct

SEQ ID NO: 13692 - DNA, 110 bp, synthetic construct
  source 1..110: mol_type = other DNA
gcatgccccacctcctccaaaaaaagatcagcagtgctctccccaccccaccgctgatttcagcatcattcctgtccgttccctcactctgcaggccctggggagtcact

SEQ ID NO: 13693 - DNA, 110 bp, synthetic construct
  source 1..110: mol_type = other DNA
gtcatagcatcatttacataaagtgatgcaacatctgaattccggtatgtgtgaggataaattatacagcttgtttctttatagctacaccttgggtttcatcagatgcg

SEQ ID NO: 13694 - DNA, 110 bp, synthetic construct
  source 1..110: mol_type = other DNA
ctcatggatactagttggatttgttactactgagccacaatgggaactcccgaagatatattcttgactgaatatacattcttactggttgaaagctcagttaccaacaa

SEQ ID NO: 13695 - DNA, 110 bp, synthetic construct; identical to SEQ ID NO: 13694
  source 1..110: mol_type = other DNA

SEQ ID NO: 13696 - DNA, 110 bp, synthetic construct
  source 1..110: mol_type = other DNA
agaaaaaaaggaagaaagttctagagtgaaataaattacacttttctagctacgtataccctagccagattaagtatgtgtcttctttatcaattcatagaatgatgcta

SEQ ID NO: 13697 - DNA, 110 bp, synthetic construct
  source 1..110: mol_type = other DNA
ataccctagccagattaagtatgtgtcttctttatcaattcatagaatgatgctaccaaggggactagatttcatttaattcatctgagtgtatgtttagaagacagtat

SEQ ID NO: 13698 - DNA, 110 bp, synthetic construct
  source 1..110: mol_type = other DNA
aagaatctgactgcagcagctaggtttgctacagaggctagtgagaagaggctagcctgggacagtgggttaaggatctggcattgcagcagctgtgctgtaggtcacag

SEQ ID NO: 13699 - DNA, 110 bp, synthetic construct
  source 1..110: mol_type = other DNA
gcagctaggtttgctacagaggctagtgagaagaggctagcctgggacagtgggttaaggatctggcattgcagcagctgtgctgtaggtcacagctgcagctcagattc

SEQ ID NO: 13700 - DNA, 110 bp, synthetic construct
  source 1..110: mol_type = other DNA
tgcatgggggcagcagcggtggggtggggtggtggtgatgttcacatccacacgttgcttaagggtcagctgtatttaagtaccagagacagtgcatagatgtgagtgtc

SEQ ID NO: 13701 - DNA, 110 bp, synthetic construct
  source 1..110: mol_type = other DNA
aagaggatgtgtttttttcttaaggcatttactttttaggccaaattagattaactttttaataggccaacaatttcaaccctgacaacttcaaaatccttccacattct

SEQ ID NO: 13702 - DNA, 110 bp, synthetic construct; identical to SEQ ID NO: 13701
  source 1..110: mol_type = other DNA

SEQ ID NO: 13703 - DNA, 110 bp, synthetic construct
  source 1..110: mol_type = other DNA
aggtagaacacctgagctctttccagctcttctgtcagactcaacatggacctttgcatatttccctttgtagtcactgcaaggcatcatatcagacacatactgctatc

SEQ ID NO: 13704 - DNA, 110 bp, synthetic construct
  source 1..110: mol_type = other DNA
ttggggttagcaggtgcaaactctagcatttggactggagaagtaatgagagcctgctgtataccacagggaactttatctagtcacctgtgatggatggaatatgatgg

SEQ ID NO: 13705 - DNA, 110 bp, synthetic construct
  source 1..110: mol_type = other DNA
gctgtataccacagggaactttatctagtcacctgtgatggatggaatatgatggaggataatgcgagaaaaagagtgtgtgttggggggggggtcactctgctgtacag

SEQ ID NO: 13706 - DNA, 110 bp, synthetic construct
  source 1..110: mol_type = other DNA
ttcaccatttgtaaaaactaagtataacattccctgacctcctcatctcacacaaccaaatacgatgatgatatgaaaggccgtgggaactctacagaaccattcagctt

SEQ ID NO: 13707 - DNA, 110 bp, synthetic construct
  source 1..110: mol_type = other DNA
ccaaatacgatgatgatatgaaaggccgtgggaactctacagaaccattcagctttaatgttattatcacaacaactacatctccttaactggagagagtaacagtcatt

SEQ ID NO: 13708 - DNA, 110 bp, synthetic construct
  source 1..110: mol_type = other DNA
gccacatctatgacctaggccacagcttgtgccaacacgggatcctgaacccactgaggaggctgggaattgaacccgaatcctcacggagtctatgttgtgttcttaac

SEQ ID NO: 13709 - DNA, 110 bp, synthetic construct; identical to SEQ ID NO: 13708
  source 1..110: mol_type = other DNA

SEQ ID NO: 13710 - DNA, 110 bp, synthetic construct; identical to SEQ ID NO: 13708
  source 1..110: mol_type = other DNA

SEQ ID NO: 13711 - DNA, 110 bp, synthetic construct; identical to SEQ ID NO: 13708
  source 1..110: mol_type = other DNA

SEQ ID NO: 13712 - DNA, 110 bp, synthetic construct
  source 1..110: mol_type = other DNA
tgtcacttaattttactaaactagcatgatcttgatatcacatttattgtggctcagcagctgaaggagccgtcattgtctctgtgagaatgcaggttcaatccctgttc

SEQ ID NO: 13713 - DNA, 110 bp, synthetic construct
  source 1..110: mol_type = other DNA
agcagctgaaggagccgtcattgtctctgtgagaatgcaggttcaatccctgttctcattcagagggttaagtacccagtgttgctatggctgtggcgtaggcctgcagc

SEQ ID NO: 13714 - DNA, 110 bp, synthetic construct
  source 1..110: mol_type = other DNA
accccaccctctatacttagccatgttttctgaaccaaagtaagaacatgggatctgacaaatgtacttatgggggacctggggtgtgctgtccttgagactggaattgg

SEQ ID NO: 13715 - DNA, 110 bp, synthetic construct
  source 1..110: mol_type = other DNA
tgacaaatgtacttatgggggacctggggtgtgctgtccttgagactggaattgggactcttagccaaaatcacacaaaaattaagtacatgctggcttgcttctctaga

SEQ ID NO: 13716 - DNA, 110 bp, synthetic construct
  source 1..110: mol_type = other DNA
cagattgggttagggtcacccatatgaccacacttaaccttaattaactctttaaaggccctatctccaattatagttacatcccaaagtactgaggggttagagcttca

SEQ ID NO: 13717 - DNA, 110 bp, synthetic construct
  source 1..110: mol_type = other DNA
aagcagatcatgctgactcttatgatgtggggtttccaatcttggatgcatgctttttgcccaacacccacctccctgtcaccttatgcaaaaaaattattaatgcccag

SEQ ID NO: 13718 - DNA, 110 bp, synthetic construct
  source 1..110: mol_type = other DNA
tttgcccaacacccacctccctgtcaccttatgcaaaaaaattattaatgcccagatacccaacccaggtaattccctttggccttctctctgaaactgtcttcttgtct

SEQ ID NO: 13719 - DNA, 110 bp, synthetic construct
  source 1..110: mol_type = other DNA
ccccagcaccatgtgtctttttttaattattgttcatttataatgttgtgttttgggtggataacaaagtgatagcttattacaaaactggcatgacttgttgaaaagac

SEQ ID NO: 13720 - DNA, 110 bp, synthetic construct
  source 1..110: mol_type = other DNA
atgaggcagagctggttggctgtgtggtctgatggaaagaacatggagccaggcatccagagactctgcttcctgtgccactcgagccctcccaccccccgtaacctgct

SEQ ID NO: 13721 - DNA, 110 bp, synthetic construct
  source 1..110: mol_type = other DNA
tccagagactctgcttcctgtgccactcgagccctcccaccccccgtaacctgctttcctcacctgtcaggtaagtgggcctattcttaaaatccctttcagctttatcg

SEQ ID NO: 13722 - DNA, 110 bp, synthetic construct
  source 1..110: mol_type = other DNA
cctagggctgctctaacaagtgaccacacacttggtggcttacaacaccaggcgtctattctctcacagttccagcggccaaaagctcaaattcagcatcactgctcaga

SEQ ID NO: 13723 - DNA, 110 bp, synthetic construct
  source 1..110: mol_type = other DNA
cacaggatatggtacggatcaggtggaggctggtaataggagtgagtgaatgggaggcaaagagaatggctgaggacctgggggtcccggcagagctcatgggaaaggtc

SEQ ID NO: 13724 - DNA, 110 bp, synthetic construct
  source 1..110: mol_type = other DNA
ggcaaagagaatggctgaggacctgggggtcccggcagagctcatgggaaaggtcaggagaagttacacttgccacaggaaaggatgggtgaatagatgggaaccccaaa

SEQ ID NO: 13725 - DNA, 110 bp, synthetic construct; identical to SEQ ID NO: 13723
  source 1..110: mol_type = other DNA

SEQ ID NO: 13726 - DNA, 110 bp, synthetic construct; identical to SEQ ID NO: 13724
  source 1..110: mol_type = other DNA

SEQ ID NO: 13727 - DNA, 110 bp, synthetic construct
  source 1..110: mol_type = other DNA
ggagatgattctggccataactgaagggagcttgggagcagaccttccccagtcgagcccctgatgggactgcagctctagttcacatttctaccgaagctcaatgacac

SEQ ID NO: 13728 - DNA, 110 bp, synthetic construct
  source 1..110: mol_type = other DNA
agcccctgatgggactgcagctctagttcacatttctaccgaagctcaatgacacctgaagcagaggacctggaaaagctacagaaactgagctaattaatggctgagcc

SEQ ID NO: 13729 - DNA, 110 bp, synthetic construct
  source 1..110: mol_type = other DNA
tggaccactaggagacttggcctttgaggctgccagtgagggccagatagtcatgcaggtgcttctaagccataataagttttccctgatacttcctgcctcccttgttt

SEQ ID NO: 13730 - DNA, 110 bp, synthetic construct
  source 1..110: mol_type = other DNA
acaagaaatgaccactgagactacaagttgtttgcttcccagcacactattctacttgattagtgtctattagaatccatcaaatgttctggaaggcatcacgagcatgt

SEQ ID NO: 13731 - DNA, 110 bp, synthetic construct
  source 1..110: mol_type = other DNA
ttgattagtgtctattagaatccatcaaatgttctggaaggcatcacgagcatgtctgggagctagaagatggatctgattagaggaatgtttcccacattaatctggaa

SEQ ID NO: 13732 - DNA, 110 bp, synthetic construct
  source 1..110: mol_type = other DNA
gagagtaggttgcagtcccagaaccaagggggttgtgaaaaggatcatgtccccgacacaagctggtgcacacccctccttagtctgcaaaccatcaggatcaccacctg

SEQ ID NO: 13733 - DNA, 110 bp, synthetic construct
  source 1..110: mol_type = other DNA
gagataggagggctactccataacacagctccagagagcatccttcacaccagagtctacgcaaatagcatattctaaaattaggcagtgcacagactgcacaactgtgt

SEQ ID NO: 13734 - DNA, 110 bp, synthetic construct
  source 1..110: mol_type = other DNA
tctacgcaaatagcatattctaaaattaggcagtgcacagactgcacaactgtgtgcagtgaccctaacaacatccaaagaattactctgtcagatatattattaaatat

SEQ ID NO: 13735 - DNA, 110 bp, synthetic construct
  source 1..110: mol_type = other DNA
aatgtttgcgttccttctgggtgaatcatgaaagagctggtgtgagcttcggcacatactctcttctgccatctcaccagcagcattcgggatggtacaggcatcttagc

SEQ ID NO: 13736 - DNA, 110 bp, synthetic construct
  source 1..110: mol_type = other DNA
atgatgtgacttttgcttttgaggatccccgtggctttcgtgcagaggatagacaggaatagaagctaggagccggtgtgagtcttcaggtcatactcaggtgagagatg

SEQ ID NO: 13737 - DNA, 110 bp, synthetic construct
  source 1..110: mol_type = other DNA
ggaatagaagctaggagccggtgtgagtcttcaggtcatactcaggtgagagatggtggtaggtggggctgaggtgctgtgagtgcagtgaagtaatcagattctaaatg

SEQ ID NO: 13738 - DNA, 110 bp, synthetic construct
  source 1..110: mol_type = other DNA
acggtccttcctatggcccaggccctgtgttgggctagggccgtggactatttggtgctctggtctgtggatcccagcttttctcccatccccatgactgttctcactac

SEQ ID NO: 13739 - DNA, 110 bp, synthetic construct
  source 1..110: mol_type = other DNA
tgctctggtctgtggatcccagcttttctcccatccccatgactgttctcactactacatctcttcctggagtgttttctttactgaaggtaccctctcctttcagcctc

SEQ ID NO: 13740 - DNA, 110 bp, synthetic construct
  source 1..110: mol_type = other DNA
aattccaaagcccttttggttactgccattcttttgttttcctgtttcatctgaagagctatgggaggtccactatcctaaattattttgtaaaagacagggagagaaca

SEQ ID NO: 13741 - DNA, 110 bp, synthetic construct
  source 1..110: mol_type = other DNA
cacatcttctcaaaatgcatctttaataattttaatttgttacatactgttcttgagcttttggagcacatgcacacacatagacattggtgagtcaaaacccctgccag

SEQ ID NO: 13742 - DNA, 110 bp, synthetic construct
  source 1..110: mol_type = other DNA
agcttttggagcacatgcacacacatagacattggtgagtcaaaacccctgccagtatcaagtgcctcaagtgaaagatagtggttcaggggtgtagggcagggttgggg

SEQ ID NO: 13743 - DNA, 110 bp, synthetic construct
  source 1..110: mol_type = other DNA
aaattagggctataatgtaaataaaacgtgaaaaatgtcctaaaaagaataggaacaaactgagaccccccttcagctaagtcatttgagaccttcccttatcctagata

SEQ ID NO: 13744 - DNA, 110 bp, synthetic construct; identical to SEQ ID NO: 13743
  source 1..110: mol_type = other DNA

SEQ ID NO: 13745 - DNA, 110 bp, synthetic construct
  source 1..110: mol_type = other DNA
ctgccatacttgtgtctaaacaaagggagacggctaacactctaaatgttagagcaaaagaatccagaaatgtgagtacaacagatacaagtgtttgacgggtagtatta

SEQ ID NO: 13746 - DNA, 110 bp, synthetic construct
  source 1..110: mol_type = other DNA
aaaagaatccagaaatgtgagtacaacagatacaagtgtttgacgggtagtattagctccatctcttttaatcaatttacgcagcttatgcacagccggctctttaagtt

SEQ ID NO: 13747 - DNA, 110 bp, synthetic construct; identical to SEQ ID NO: 13745
  source 1..110: mol_type = other DNA

SEQ ID NO: 13748 - DNA, 110 bp, synthetic construct; identical to SEQ ID NO: 13746
  source 1..110: mol_type = other DNA

SEQ ID NO: 13749 - DNA, 110 bp, synthetic construct
  source 1..110: mol_type = other DNA
ggtattagaatagccattgtttacatgcttattgaatgaaccattgcacatcactttacgttatgatttgtgtttcctcttccgtcagtcagaggggaatgatttcagac

SEQ ID NO: 13750 - DNA, 110 bp, synthetic construct
  source 1..110: mol_type = other DNA
ttacgttatgatttgtgtttcctcttccgtcagtcagaggggaatgatttcagactagtgtatggtggggcagagacccatgagtcctttctccttggctagcactcctg

SEQ ID NO: 13751 - DNA, 110 bp, synthetic construct
  source 1..110: mol_type = other DNA
attttaaaatatgtaaacaaatgatttggatgttcacaggagagaatggtcagtttcaagtttagggatttggaagactttaaggaaatgttggccttcgagctggactt

SEQ ID NO: 13752 - DNA, 110 bp, synthetic construct
  source 1..110: mol_type = other DNA
tctttggttaaacgtgtcctgtctcgtcctccagacgggagagtgacgtcctatgcaccaggctggcatatggagtgactctccccatttcacctgtgacatctgttcta

SEQ ID NO: 13753 - DNA, 110 bp, synthetic construct
  source 1..110: mol_type = other DNA
ctcaataaaaaaacacaaaatccacccaacgagacattaagacaaacaactgcagaaaattgacaagaaacagttctgtgggtcttttggaggactgaaaaggttgcctg

SEQ ID NO: 13754 - DNA, 110 bp, synthetic construct
  source 1..110: mol_type = other DNA
aaaattgacaagaaacagttctgtgggtcttttggaggactgaaaaggttgcctgggattttgtgactgcttggctttgaaggcagagctctgagtgcagggttgcctgg

SEQ ID NO: 13755 - DNA, 110 bp, synthetic construct
  source 1..110: mol_type = other DNA
gatacaaacccaactggacaagtctagaactgtactgaggccagagtgtggcaatcctttgaaagaaggagactcagctgtggccagagtttgtctttgcacttggctac

SEQ ID NO: 13756 - DNA, 110 bp, synthetic construct
  source 1..110: mol_type = other DNA
cttaggcactaaatagctccagggagactttaccaagggttttgtagctacaacagtttttgatcatggataaagtagtgacatgataaacctctggggaataatgtggt

SEQ ID NO: 13757 - DNA, 110 bp, synthetic construct
  source 1..110: mol_type = other DNA
actgttaactgagactccaggaggaaaggagtctggggtatttaccctgctttgaacactgtgtctttcaaagcctggctatgtataaacacacaaagaactgaaccaca

SEQ ID NO: 13758 - DNA, 110 bp, synthetic construct
  source 1..110: mol_type = other DNA
acactgtgtctttcaaagcctggctatgtataaacacacaaagaactgaaccacaaacaaaaggaactccagtgatcctagttctaatttatgactgtaccagtaggagt

SEQ ID NO: 13759 - DNA, 110 bp, synthetic construct
  source 1..110: mol_type = other DNA
ccatcatggctcagtggtaacaaacccataaaggttccatgaggacgagggttcaatccttggcctcactgggtgggttaaagatccagcgttgccctgagctgtagtgt

SEQ ID NO: 13760 - DNA, 110 bp, synthetic construct; identical to SEQ ID NO: 13759
  source 1..110: mol_type = other DNA

SEQ ID NO: 13761 - DNA, 110 bp, synthetic construct
  source 1..110: mol_type = other DNA
atgttccatcacaagtgactggtcataattccctgtggtatacagcaggacctcattgtctattcattctaaatgtaacactctgcatctatcaaccttgaactcccagt

SEQ ID NO: 13762 - DNA, 110 bp, synthetic construct
  source 1..110: mol_type = other DNA
tggtatacagcaggacctcattgtctattcattctaaatgtaacactctgcatctatcaaccttgaactcccagtccatcccactcccaacccctctcccttggcaacca

SEQ ID NO: 13763 - DNA, 110 bp, synthetic construct
  source 1..110: mol_type = other DNA
gcagttaaccaacccgactagcatccatgaagacgcgggttcattccctggcctcgcacattaggttaagtaaggatctggcgttgtggtgagctcatggtgtaggtctc

SEQ ID NO: 13764 - DNA, 110 bp, synthetic construct
  source 1..110: mol_type = other DNA
gactagcatccatgaagacgcgggttcattccctggcctcgcacattaggttaagtaaggatctggcgttgtggtgagctcatggtgtaggtctcagacgcggctcggat

SEQ ID NO: 13765 - DNA, 110 bp, synthetic construct
  source 1..110: mol_type = other DNA
aatgcctatatgtgttttgttttttctcttgattcacagaaattctttatgtattttggacatcaaacttctcttggttttgcatattaccttttcccagcctatagctt

SEQ ID NO: 13766 - DNA, 110 bp, synthetic construct
  source 1..110: mol_type = other DNA
ttggacatcaaacttctcttggttttgcatattaccttttcccagcctatagcttatattttttactttctttatggtatcattggacacaatttcttgataagctcaat

SEQ ID NO: 13767 - DNA, 110 bp, synthetic construct
  source 1..110: mol_type = other DNA
ctgactctaccaagggccaaagcaagtgcagagacccgatccaaggttctgtggcaatcctcagacagtttatggtggctctctttagagaggtcctgacgttggggttt

SEQ ID NO: 13768 - DNA, 110 bp, synthetic construct
  source 1..110: mol_type = other DNA
aatcctcagacagtttatggtggctctctttagagaggtcctgacgttggggtttatatagtcctacgaatactaagaggcacctgaagtatctcccccaggagagcagc

SEQ ID NO: 13769 - DNA, 110 bp, synthetic construct
  source 1..110: mol_type = other DNA
ccactgagtcatgacaggcactccaaaagaaattattatctacacaaattaataaaatcatcattttaattacaatctaatagtacaaatggctaagactgtcttaacgc

SEQ ID NO: 13770 - DNA, 110 bp, synthetic construct; identical to SEQ ID NO: 13769
  source 1..110: mol_type = other DNA

SEQ ID NO: 13771 - DNA, 110 bp, synthetic construct
  source 1..110: mol_type = other DNA
ataagtcaaggccctcacatactgctttatttctgagaattgctaacagaaacaagcttctatgcttcaagttgttctcaaatactctgtccattcatttgctccttttc

SEQ ID NO: 13772 - DNA, 110 bp, synthetic construct
  source 1..110: mol_type = other DNA
tcacaaacaatataaaacacatgcttaatgaaatctgaattataggtgagtactcaaatccacataaaaatcagagttccccggtggctcaaggggtcatagacctggca

SEQ ID NO: 13773 - DNA, 110 bp, synthetic construct
  source 1..110: mol_type = other DNA
aaatccacataaaaatcagagttccccggtggctcaaggggtcatagacctggcactgtactgcagcagcttgggtcactgctgtggtgcacattccatccctggcccag

SEQ ID NO: 13774 - DNA, 110 bp, synthetic construct
  source 1..110: mol_type = other DNA
ttggattcgttaccactgcaccacaacgggaactccttggttcaatctttttaatcttacataggaacaaaatgttcattaacgctaaaacataacacattcctgctaac

SEQ ID NO: 13775 - DNA, 110 bp, synthetic construct; identical to SEQ ID NO: 13774
  source 1..110: mol_type = other DNA

SEQ ID NO: 13776 - DNA, 110 bp, synthetic construct
  source 1..110: mol_type = other DNA
gcactgccttgtgtcagctttctctactctgctgagtttttgtgggttagagtctatggtggtggtgatggaggcggtgatggagctagtgatggtggcagcgaaggtga

SEQ ID NO: 13777 - DNA, 110 bp, synthetic construct
  source 1..110: mol_type = other DNA
actcataattttaaaggattatttcattgtcttttagtagctggtgttgctaatgagaagttttgatgcctcaatgattcttcttcctttgctggtaacctgttcttttt

SEQ ID NO: 13778 - DNA, 110 bp, synthetic construct
  source 1..110: mol_type = other DNA
ggagtttgaacagggaggtgttgtctgcagagggcagggaatgaaacattatcagaaagtactgactttaagtttgccggtggtcctgtttgcaactctgcatagcattt

SEQ ID NO: 13779 - DNA, 110 bp, synthetic construct
  source 1..110: mol_type = other DNA
gggcttcagttcctccaaatgtgaacaccatgtcagcagcactcggtgatctaggagatgcagctgatcacaacaatcaagtaaaaggcaccatggaccctggagttggc

SEQ ID NO: 13780 - DNA, 110 bp, synthetic construct
  source 1..110: mol_type = other DNA
agatgcagctgatcacaacaatcaagtaaaaggcaccatggaccctggagttggctttggtgatggagatttcttttatcaggcgtgggaaaggtgctttctcggcacca

SEQ ID NO: 13781 - DNA, 110 bp, synthetic construct
  source 1..110: mol_type = other DNA
agaatacacatgcgcacatctgtatctatatctatatctgtatctatgaccatctttatctatctatctatctatctatctacctaaaactgaatcactgtgctatacac

SEQ ID NO: 13782 - DNA, 110 bp, synthetic construct
  source 1..110: mol_type = other DNA
atctgtatctatgaccatctttatctatctatctatctatctatctacctaaaactgaatcactgtgctatacacctaaaacacaaaattgtaaatcaactctgtttcag

SEQ ID NO: 13783 - DNA, 110 bp, synthetic construct
  source 1..110: mol_type = other DNA
tgatgttccttaaacttcagccatcctgtctgatttttaccacaactgtgcaagcctgcatcattatttactttccattttacgttcaactgacttatttttttcatgtt

SEQ ID NO: 13784 - DNA, 110 bp, synthetic construct
  source 1..110: mol_type = other DNA
ttcagccatcctgtctgatttttaccacaactgtgcaagcctgcatcattatttactttccattttacgttcaactgacttatttttttcatgttaaataatttattcta

SEQ ID NO: 13785 - DNA, 110 bp, synthetic construct
  source 1..110: mol_type = other DNA
agagagatgcagagaatgaaagagacactctgtgagctgtagggggagggagcggtggagataaagcgggaggtgcagggtcagttctactaagaaggtcccttcgtccc

SEQ ID NO: 13786 - DNA, 110 bp, synthetic construct
  source 1..110: mol_type = other DNA
tccctcctggtgtttaatttctaccaatcaaatggtataaagtgacatctcctagttgtaatttgcctttccctcattattaattagtttgagctctttttaggtatttc

SEQ ID NO: 13787 - DNA, 110 bp, synthetic construct
  source 1..110: mol_type = other DNA
catctcctagttgtaatttgcctttccctcattattaattagtttgagctctttttaggtatttctcagacactatattttctttttttagtaattgcccattcatagct

SEQ ID NO: 13788 - DNA, 110 bp, synthetic construct
  source 1..110: mol_type = other DNA
ctccctcttctgtcttcagtttatgattttgaaggggctgacctacctctcagctccaggggagcacaggtagccagccagtcagcacatcccattccctggattctgtg

SEQ ID NO: 13789 - DNA, 110 bp, synthetic construct
  source 1..110: mol_type = other DNA
gttgtgttactctttgctctggattgtttggctataatagtttgtcctctgctgactgacacatactggcataactgagaagtcagcttcttctactgaagtcctagcat

SEQ ID NO: 13790 - DNA, 110 bp, synthetic construct
  source 1..110: mol_type = other DNA
ctgacacatactggcataactgagaagtcagcttcttctactgaagtcctagcatgttcccatgtggggctgaggaacctgctaggacttcagtgggagccgataaggag

SEQ ID NO: 13791 - DNA, 110 bp, synthetic construct
  source 1..110: mol_type = other DNA
ttgtgccctttgagaggatatttaatacctttatacaaagtatacagagctagataaaggaaacagcatttactctggaagaagttttggaatgtgccaggtttgttcta

SEQ ID NO: 13792 - DNA, 110 bp, synthetic construct
  source 1..110: mol_type = other DNA
aacccacttagtgaggccaggtatcgaacccgcatcccagtgaatactagtcagtttagtttctgctgagccacgttaggaactcccatgtcggcaattgtgctggctgt

SEQ ID NO: 13793 - DNA, 110 bp, synthetic construct; identical to SEQ ID NO: 13792
  source 1..110: mol_type = other DNA

SEQ ID NO: 13794 - DNA, 110 bp, synthetic construct
  source 1..110: mol_type = other DNA
gaaacaataaaacttctagaagaaaatatagcagaaaatctttgtgatcttgggttggacagagtccttagctactagatagaagcatgatccttaaaagcaaaaactgg

SEQ ID NO: 13795 - DNA, 110 bp, synthetic construct
  source 1..110: mol_type = other DNA
tggacagagtccttagctactagatagaagcatgatccttaaaagcaaaaactggtaatctgggcttgataaaacttgaaagattttgtttcaaaactaccattaagaca

SEQ ID NO: 13796 - DNA, 110 bp, synthetic construct
  source 1..110: mol_type = other DNA
ggggcacaacagggtcacagtgtctctacagtgccaggatgcacattccatccccagctcagcacagtggtttaaaggatccggtgttcctgcaggttgcaactgcagtt

SEQ ID NO: 13797 - DNA, 110 bp, synthetic construct
  source 1..110: mol_type = other DNA
agctcagcacagtggtttaaaggatccggtgttcctgcaggttgcaactgcagttcagatctgatcccccctccatatgccatggggtagccaaaaaaaaatttttttaa

SEQ ID NO: 13798 - DNA, 110 bp, synthetic construct
  source 1..110: mol_type = other DNA
caccctgaagagcagtctagtgttggtgccataagtaaagtgggtaaatatttaaaggagacgtttggggaagggcactcctcagcagctattaaatgccacaggtacaa

SEQ ID NO: 13799 - DNA, 110 bp, synthetic construct
  source 1..110: mol_type = other DNA
aggagacgtttggggaagggcactcctcagcagctattaaatgccacaggtacaaagttatgatctgcaaatacaggcttcaaggtattccttccaatcagctgtcattc

SEQ ID NO: 13800 - DNA, 110 bp, synthetic construct
  source 1..110: mol_type = other DNA
ctgagtaacaggttaaaattctgaacttcagaaaccaccctttaaatgtgacacaacaccttttccacattgtaaaaatccattgtagcatgacaagaaacagaatatca

SEQ ID NO: 13801 - DNA, 110 bp, synthetic construct
  source 1..110: mol_type = other DNA
cttttaatggcttatgttggccaaagtcatcacaaaacaaaaatgtaggcatctccaaatacaacgtgggaaagctaaaactgctgagggacaacaatttctaaagccac

SEQ ID NO: 13802 - DNA, 110 bp, synthetic construct
  source 1..110: mol_type = other DNA
caaatacaacgtgggaaagctaaaactgctgagggacaacaatttctaaagccactggcgaaagtgatcaagccaatactcattacaaagaaagaaagaaaaaacaaaaa

SEQ ID NO: 13803 - DNA, 110 bp, synthetic construct
  source 1..110: mol_type = other DNA
gaagtcttaaatgttgagaacttacccatattgtaaagcacacatagggtggaagtggacatttctacaggtcaaaatcagcttaacgacccccgccccatcctggtcac

SEQ ID NO: 13804 - DNA, 110 bp, synthetic construct
  source 1..110: mol_type = other DNA
atggcccctagtcagattcattaaccactgtgccacaacgggaacaccgacactgacttttctgaagagaacaattggctggactatggaattctattgatctgaacttg

SEQ ID NO: 13805 - DNA, 110 bp, synthetic construct; identical to SEQ ID NO: 13804
  source 1..110: mol_type = other DNA

SEQ ID NO: 13806 - DNA, 110 bp, synthetic construct
  source 1..110: mol_type = other DNA
gtaaatatttatagagtacccactctgctggagaccatgcttagcgctgggcatctatttaaatattttcaactttagttgtattagttatttattgctgcataacagat

SEQ ID NO: 13807 - DNA, 110 bp, synthetic construct
  source 1..110: mol_type = other DNA
aaccccaggagtttggggttggtagctgctttgagctttaaaataaacattttggagttcccatcatgactcagcagtaacatcctcgactagtatccatgaggatgtgg

SEQ ID NO: 13808 - DNA, 110 bp, synthetic construct; identical to SEQ ID NO: 13807
  source 1..110: mol_type = other DNA

SEQ ID NO: 13809 - DNA, 110 bp, synthetic construct
  source 1..110: mol_type = other DNA
agctaggggctgatacctctgttgctccaaagctagaagtttagaacatgagggagaccaggggaagttaaactaaaggaagaactgagtttcctgaaactgggaggttg

SEQ ID NO: 13810 - DNA, 110 bp, synthetic construct
  source 1..110: mol_type = other DNA
ggaacctccatatgatgcaagcagggcccttgaggaaaaaacttttttaaaggagtgcacaaggaatgtcatgagatacaaactccaaacaactggacagctgcgaagca

SEQ ID NO: 13811 - DNA, 110 bp, synthetic construct
  source 1..110: mol_type = other DNA
tgcacaaggaatgtcatgagatacaaactccaaacaactggacagctgcgaagcaactttctctgtcaccttctcctctctgatagctgtttgatactatgcctaactta

SEQ ID NO: 13812 - DNA, 110 bp, synthetic construct
  source 1..110: mol_type = other DNA
agttatgcaagatgaatgagttccagggaactaatgtatagcatggagatgatagttaatgctgtaatgcacacttgaaatgtgctaagaggatagatcctacacataca

SEQ ID NO: 13813 - DNA, 110 bp, synthetic construct
  source 1..110: mol_type = other DNA
tggcatctgtggctatttaaatgtaaagtaattaaaattaattaaaaattaaaatacagtttctcagtcgcactagacatatgttaagtgtccaagtggctagtggcttc

SEQ ID NO: 13814 - DNA, 110 bp, synthetic construct; identical to SEQ ID NO: 13813
  source 1..110: mol_type = other DNA

SEQ ID NO: 13815 - DNA, 110 bp, synthetic construct; identical to SEQ ID NO: 13813
  source 1..110: mol_type = other DNA

SEQ ID NO: 13816 - DNA, 110 bp, synthetic construct; identical to SEQ ID NO: 13813
  source 1..110: mol_type = other DNA

SEQ ID NO: 13817 - DNA, 110 bp, synthetic construct
  source 1..110: mol_type = other DNA
agtctaggacaagatctacagggggacggaaatggattatttggatttttaaaattctaaagacccctgaaactcttagatagattacatggcagtctcttggtttacta

SEQ ID NO: 13818 - DNA, 110 bp, synthetic construct
  source 1..110: mol_type = other DNA
attgccacagccgcacgcctgaagcattatctcctatctgtggtattacgtgctgtaatcccacagctaaatgcggtaacccgaatttcacagagactctgtcacaggct

SEQ ID NO: 13819 - DNA, 110 bp, synthetic construct
  source 1..110: mol_type = other DNA
taatcccacagctaaatgcggtaacccgaatttcacagagactctgtcacaggcttgctgagataacccatctcggtatgcagagtgccaggtcgcacggagcctgtagg

SEQ ID NO: 13820 - DNA, 110 bp, synthetic construct
  source 1..110: mol_type = other DNA
tgtccatctagaaaacaagagtagtaagacccatctcataggatagctgaggatcaaatgagttactaatacctttactcatctgtaagtcacaaatgaatgttaaatga

SEQ ID NO: 13821 - DNA, 110 bp, synthetic construct
  source 1..110: mol_type = other DNA
gacctcgacagaaagatccacacctgatctatgccagcttcaaaagtgagaccgagacaatttaacccagaagcaaattgttgaatccagagaatccagcgttgttggta

SEQ ID NO: 13822 - DNA, 110 bp, synthetic construct
  source 1..110: mol_type = other DNA
ccacagaccacctatgaaaacttttctttgaatcctgagatatgaaaagttgtccttagggattcacagactcagctggggaagttactttcattaattacagcacaaag

SEQ ID NO: 13823 - DNA, 110 bp, synthetic construct
  source 1..110: mol_type = other DNA
ttagggattcacagactcagctggggaagttactttcattaattacagcacaaagcaacctcttgaatagggtattgtgaagtttgtttttgaaaatcatattcctttag

SEQ ID NO: 13824 - DNA, 110 bp, synthetic construct
  source 1..110: mol_type = other DNA
agagcaaataatgtatcgagctccatgtgcatcctctacaattgatggctgtcagggtagatgtcaggatggttgtttgaaggatgagctctcacagaagtaaaagtgag

SEQ ID NO: 13825 - DNA, 110 bp, synthetic construct
  source 1..110: mol_type = other DNA
ggacaatactaaagtctcaaaaggatgccctgtaaggccaattaactttagacatgacatcaagctctcttaccctggtttgtgtctgtgtgtgtatacgtgtattacag

SEQ ID NO: 13826 - DNA, 110 bp, synthetic construct
  source 1..110: mol_type = other DNA
tattgctgaatagcagtccattgcctggatgcaccatattcactttattcattcactagtttggggtttttgttttttgtggtttttgtttgtttgttttttgttttgct

SEQ ID NO: 13827 - DNA, 110 bp, synthetic construct
  source 1..110: mol_type = other DNA
tggatgcaccatattcactttattcattcactagtttggggtttttgttttttgtggtttttgtttgtttgttttttgttttgctttttagggccacacctgtgtcatat

SEQ ID NO: 13828 - DNA, 110 bp, synthetic construct
  source 1..110: mol_type = other DNA
atagtaggttgttactttttcccaagttattacatttcctctccatgcctcatgtagtacaatcttggtagctttagtatatttccacagactggataacttttgtttgc

SEQ ID NO: 13829 - DNA, 110 bp, synthetic construct
  source 1..110: mol_type = other DNA
actgttcagatggcttctgtgaacttgctggatttgcccgaacagaagtcatgcagaagagttgcagctgtaaattcttgttcggggttgaaaccaacgagcaattgatg

SEQ ID NO: 13830 - DNA, 110 bp, synthetic construct
  source 1..110: mol_type = other DNA
gaagagttgcagctgtaaattcttgttcggggttgaaaccaacgagcaattgatgcttcagatagaaaagtcattggaggaaaaaaccgaattcaaaggagaaattatgt

SEQ ID NO: 13831 - DNA, 110 bp, synthetic construct
  source 1..110: mol_type = other DNA
agccagtgactgagtgaagcacgaatgctaagataggtctgttcctaggagacatggccctgcctggatggtcaccttggctagatggctcctccacagcctggaagagc

SEQ ID NO: 13832 - DNA, 110 bp, synthetic construct
  source 1..110: mol_type = other DNA
atttagtttattgactgtcatgcagctctaatctggtccattttcttgttagcgctgtaattccacctagcaatttgataccaactgatatctcataagcagccagctgg

SEQ ID NO: 13833 - DNA, 110 bp, synthetic construct
  source 1..110: mol_type = other DNA
ctttttttaagattatacatataaatgatagcatatgacatttgtgtctcattgcctgactaacttcatttagcataatttctaggttcatccatgttcctgcaaatgcc

SEQ ID NO: 13834 - DNA, 110 bp, synthetic construct; identical to SEQ ID NO: 13833
  source 1..110: mol_type = other DNA

SEQ ID NO: 13835 - DNA, 110 bp, synthetic construct
  source 1..110: mol_type = other DNA
ggcttacctcagcctgtagtttggaaagcaaatctcattgaagggcttggtaaacccctctttggatttcttacgataggttggaaactttggagttcccttgcgactca

SEQ ID NO: 13836 - DNA, 110 bp, synthetic construct
  source 1..110: mol_type = other DNA
cttggtaaacccctctttggatttcttacgataggttggaaactttggagttcccttgcgactcagcagtaacaaacccaactagtaacattgaggatgcagattcaatc

SEQ ID NO: 13837 - DNA, 110 bp, synthetic construct
  source 1..110: mol_type = other DNA
tggggaagttaacgtcaaaatacgcctaaaatgagcataaaaattcctacagggtttctgagcagcctaaaaagttgacattcctgtaaaataccttgctaagtgtctaa

SEQ ID NO: 13838 - DNA, 110 bp, synthetic construct
  source 1..110: mol_type = other DNA
ttctgagcagcctaaaaagttgacattcctgtaaaataccttgctaagtgtctaacacctagaaagacctcagtatgtgtgttaattaattgttttctttttcttttgtt

SEQ ID NO: 13839 - DNA, 110 bp, synthetic construct
  source 1..110: mol_type = other DNA
tgggttgggggttttttgaatgaaaaaaaaattagtcatgcaatatttactctctgggcaaaacgacatttttcagctgctcagacttctcagtaatgagtgagaatggc

SEQ ID NO: 13840 - DNA, 110 bp, synthetic construct
  source 1..110: mol_type = other DNA
gggcaaaacgacatttttcagctgctcagacttctcagtaatgagtgagaatggccaatatggaacaaaggaacaagcccctctaaagacttcttttttgagcagaaata

SEQ ID NO: 13841 - DNA, 110 bp, synthetic construct
  source 1..110: mol_type = other DNA
agttctttcatcaactgaatggttcatagtgcatctataaatagggaaaggatgctaatgcttattaagtatgtattatgagcaaggcaatttgtgaacattacctcatt

SEQ ID NO: 13842 - DNA, 110 bp, synthetic construct; identical to SEQ ID NO: 13841
  source 1..110: mol_type = other DNA

SEQ ID NO: 13843 - DNA, 110 bp, synthetic construct
  source 1..110: mol_type = other DNA
gatggcctcccaaatacctagctctgttcacaagccccacaggactacagcaagtttcagagggtccaggagtacctccttggctgtatacccaggctcagcagaaatgc

SEQ ID NO: 13844 - DNA, 110 bp, synthetic construct
  source 1..110: mol_type = other DNA
agcttccatctcaacctagtcccaataactacagtattattagctccagtctatgcataggggaatctgagagagatcacaagacatgtacatggaagagccaagaatag

SEQ ID NO: 13845 - DNA, 110 bp, synthetic construct
  source 1..110: mol_type = other DNA
ctaaagcagcatccctccaactttcttctctgactgcaacaaggaaaaaatattcacgagcttccgtttaacgtttcccactttcaaaggaattgctcagaatatcgccc

SEQ ID NO: 13846 - DNA, 110 bp, synthetic construct
  source 1..110: mol_type = other DNA
tgcacactccccctatcaaaaatatgtcctatattaaatttttagaaaagcttgaatgggacagggagtggtgaaaagacaggtcaaaggatttacacaccttcctgtat

SEQ ID NO: 13847 - DNA, 110 bp, synthetic construct
  source 1..110: mol_type = other DNA
atgggacagggagtggtgaaaagacaggtcaaaggatttacacaccttcctgtataaaaaggttctaaaggctgcttgagtctcctatgtcagagatgttgtacctgtac

SEQ ID NO: 13848 - DNA, 110 bp, synthetic construct
  source 1..110: mol_type = other DNA
gagacctttaggcaatgttaaagaacttggactttatcctcctaatttttgagggaagaccttgaagcggacttctgtttttttgtttttcattattggctgcatttgtg

SEQ ID NO: 13849 - DNA, 110 bp, synthetic construct
  source 1..110: mol_type = other DNA
aagaccttgaagcggacttctgtttttttgtttttcattattggctgcatttgtggcatatggaagatcccaggccagggacctacaccaggatgttgtgccgagaccag

SEQ ID NO: 13850 - DNA, 110 bp, synthetic construct
  source 1..110: mol_type = other DNA
taacttgactgcatttcagttagaacacaagctgtgcttttgagtgcagtgactttggctgatatcagatttccaaaacccagtaagaagtggcaaaggcaaggattcaa

SEQ ID NO: 13851 - DNA, 110 bp, synthetic construct
  source 1..110: mol_type = other DNA
caccatcgtatagtactcactgcctcttccccagccatcaaaagtaagaatttgatagaagaaaattcctggccaagttcttattatggctcagggttaagaatcctatt

SEQ ID NO: 13852 - DNA, 110 bp, synthetic construct
  source 1..110: mol_type = other DNA
tagaagaaaattcctggccaagttcttattatggctcagggttaagaatcctattagtaaccatgaggatgcagatttgattccccagcctggctcagtgggttaaggat

SEQ ID NO: 13853 - DNA, 110 bp, synthetic construct
  source 1..110: mol_type = other DNA
aacccactgagccacagcaggaactccttgtttgcattttgtaacactatcttctcatgcaatttataagaataacatagctcaactattaggaaagttgtcaatgctat

SEQ ID NO: 13854 - DNA, 110 bp, synthetic construct
  source 1..110: mol_type = other DNA
ataaaggaaagcactcaacaacgtgccaggagctggggctacagaagaaatactggcatgtaaccagttttgttgttggtggtggtttttttaaccgccacacctgcagc

SEQ ID NO: 13855 - DNA, 110 bp, synthetic construct
  source 1..110: mol_type = other DNA
gaatctcaacaaaacctttgcaatttgacttcacaaatccaaacaactctcattagtttgtcatctggataaagtcatggctatacataggtcctagggaaagtaccaga

SEQ ID NO: 13856 - DNA, 110 bp, synthetic construct
  source 1..110: mol_type = other DNA
aatatttgagctattggatggaactgaaagatgatgtttatggagaatattttggaaaactgatacctgtctaaatgatagtactcaaaacaacatgacctctttgtggt

SEQ ID NO: 13857 - DNA, 110 bp, synthetic construct
  source 1..110: mol_type = other DNA
aaaactgatacctgtctaaatgatagtactcaaaacaacatgacctctttgtggtttagttattaatatcttctgttaacttttctgctgatcattctacttaaactctg

SEQ ID NO: 13858 - DNA, 110 bp, synthetic construct
  source 1..110: mol_type = other DNA
aaaactgctctagagaggcagaccaaaggtgcacagctttcaaatgaaaaactgaaacgtgttctctgaattactaaacaccaccctcattgtcatcaacaatgaaaacg

SEQ ID NO: 13859 - DNA, 110 bp, synthetic construct
  source 1..110: mol_type = other DNA
aacgtgttctctgaattactaaacaccaccctcattgtcatcaacaatgaaaacggtagctttcaacagtttcaacaaagttgaaaatgctgagttgagtttttcagttt

SEQ ID NO: 13860 - DNA, 110 bp, synthetic construct
  source 1..110: mol_type = other DNA
ttacttggttctggaggatggctagggttgtacactgtgtcctgtaaaccatgcaaagccatagatgttgggcattgtggcggggttcctagaagctggctggagcccac

SEQ ID NO: 13861 - DNA, 110 bp, synthetic construct
  source 1..110: mol_type = other DNA
aagccatagatgttgggcattgtggcggggttcctagaagctggctggagcccactccataaagctccagcagtcactgacaacctctgttattggcctaggggatggag

SEQ ID NO: 13862 - DNA, 110 bp, synthetic construct
  source 1..110: mol_type = other DNA
ttcatgcttaactaggtcactgtctctctgagaatctggagtgacatatgctggctatggtgggttgaattctggtccatacgagttcctgccagttttacttcctgccc

SEQ ID NO: 13863 - DNA, 110 bp, synthetic construct
  source 1..110: mol_type = other DNA
tatggtgggttgaattctggtccatacgagttcctgccagttttacttcctgcccatggctcgcctgccaaagaaggagacttaggttgtggtggctagtgtgcccacat

SEQ ID NO: 13864 - DNA, 110 bp, synthetic construct
  source 1..110: mol_type = other DNA
ttgatatttagggttaacgtaattaagttcagtgtataaaaactttacaaagtgtcctcacagagcacttctgttggcccatactcatctccttgctttggtattaatcg

SEQ ID NO: 13865 - DNA, 110 bp, synthetic construct
  source 1..110: mol_type = other DNA
cctcacagagcacttctgttggcccatactcatctccttgctttggtattaatcgatattccttacttgaggactgcttgtttaaatagcagtctccttcgaagaacagg

SEQ ID NO: 13866 - DNA, 110 bp, synthetic construct
  source 1..110: mol_type = other DNA
tgatttaactcctagcctgggaacttctatatgctgcaggtgtgccctaaaaagatctgccccctccaaaagaaatcttggctaaatgatacttttcttttctttttttt

SEQ ID NO: 13867 - DNA, 110 bp, synthetic construct; identical to SEQ ID NO: 13866
  source 1..110: mol_type = other DNA

SEQ ID NO: 13868 - DNA, 110 bp, synthetic construct
  source 1..110: mol_type = other DNA
accagaaaagatatgctacacccaaagacatgaatcccaatgagataacaggaagcctcactcacaataaaaacaaattcagtacaccctggcagtcaacccaggaactg

SEQ ID NO: 13869 - DNA, 110 bp, synthetic construct
  source 1..110: mol_type = other DNA
ctgttagctcttgattaaatacagaccccaaaacttgtcttaggacccttggccagaggacccatttctagacttggctgccgggagtcctctttgcaaaacatgctggg

SEQ ID NO: 13870 - DNA, 110 bp, synthetic construct
  source 1..110: mol_type = other DNA
gaggacccatttctagacttggctgccgggagtcctctttgcaaaacatgctgggagtggatcacgagttctgatccggggcttctgggtgggctccggactctgcctgg

SEQ ID NO: 13871 - DNA, 110 bp, synthetic construct
  source 1..110: mol_type = other DNA
gctaaacagtaggtctttgttggttatgtattttatatgtagtagtgtgtatctgtaaatcccaaactctcctaatttatcctcccaccctcaactttcctatttgtaac

SEQ ID NO: 13872 - DNA, 110 bp, synthetic construct
  source 1..110: mol_type = other DNA
tatgtagtagtgtgtatctgtaaatcccaaactctcctaatttatcctcccaccctcaactttcctatttgtaactataagtttgttttctatatctgtgggtctgtttc

SEQ ID NO: 13873 - DNA, 110 bp, synthetic construct
  source 1..110: mol_type = other DNA
cctagctgaaagccagcaccaagtgccagacatgtgggcaagtaagtgagccttcagatggtcctatcacccagccttcgagcacccccatccctagctggtgctctatg

SEQ ID NO: 13874 - DNA, 110 bp, synthetic construct
  source 1..110: mol_type = other DNA
agatggtcctatcacccagccttcgagcacccccatccctagctggtgctctatggagcagaaatgagatatccccattgagccctgccaagattgcaggattgttgagt

SEQ ID NO: 13875 - DNA, 110 bp, synthetic construct
  source 1..110: mol_type = other DNA
tagaagtggtttagcctagaggtaaaaatagccacatgaaataacagagtttggtacttctgctctccctttaaaaatattcttaatttcctaagaatgtgctgattaga

SEQ ID NO: 13876 - DNA, 110 bp, synthetic construct
  source 1..110: mol_type = other DNA
aaccaagccaggtttcctactgaggttctttatttataacatggtgaactggagccacagcctgcattgcatttagttcagacgggaatctctgtgaggaaggaaaaaat

SEQ ID NO: 13877 - DNA, 110 bp, synthetic construct
  source 1..110: mol_type = other DNA
cacagcctgcattgcatttagttcagacgggaatctctgtgaggaaggaaaaaatggatgttagaagctctgtatgactagatgaggacaaattgttaactccttacatc

SEQ ID NO: 13878 - DNA, 110 bp, synthetic construct
  source 1..110: mol_type = other DNA
gctttccaggagctgggacagatctcccttccactctcccaaattgttttccctggcagctccaatcactttcaagttaggaatgatgcataagtgctgctttcatatcc

SEQ ID NO: 13879 - DNA, 110 bp, synthetic construct
  source 1..110: mol_type = other DNA
gcagctccaatcactttcaagttaggaatgatgcataagtgctgctttcatatcccagatgccttcagagactgcatcttccctgtgggggaggctgggtcagtagtggt

SEQ ID NO: 13880 - DNA, 110 bp, synthetic construct
  source 1..110: mol_type = other DNA
gaattcattaattttagttgcttcatttttattcaccccagggataggagaaaaagactgaaacctagatgttacaccccagggcttcctctgctgacttttacatcttt

SEQ ID NO: 13881 - DNA, 110 bp, synthetic construct; identical to SEQ ID NO: 13880
  source 1..110: mol_type = other DNA

SEQ ID NO: 13882 - DNA, 110 bp, synthetic construct
  source 1..110: mol_type = other DNA
ctttatctctcagtgatacggattctttaaaaaacttaatttttgaaaactacgtatatctaagtttgtgctaagcgaccttgaaaaaattgctttgtgacttcctggat

SEQ ID NO: 13883 - DNA, 110 bp, synthetic construct
  source 1..110: mol_type = other DNA
tcaaattcctaggttttattgttacaaaaccaacatgtcctaatgcagaatgccccttaaaaatgatacaaataattcagctaattctgtgtgtaatcaaagtgaaagag

SEQ ID NO: 13884 - DNA, 110 bp, synthetic construct
  source 1..110: mol_type = other DNA
gactgtgtcttgcttgcagaccttggctacttggacctcctgtcttctcatttgtttatgttttctcttcactcattgatttgtggtgcctgaaggaatgtggaagtata

SEQ ID NO: 13885 - DNA, 110 bp, synthetic construct
  source 1..110: mol_type = other DNA
gctacattgtgactgctttagactcagtataaggctccatccatataactactttaacaatatgttcattgacagatgtgtaccagtcaactatgccacaataatgtgga

SEQ ID NO: 13886 - DNA, 110 bp, synthetic construct
  source 1..110: mol_type = other DNA
aacaatatgttcattgacagatgtgtaccagtcaactatgccacaataatgtggaatatcaaatcaccccaagtgcagtggcttaaaacaaaccattaacttttacttat

SEQ ID NO: 13887 - DNA, 110 bp, synthetic construct
  source 1..110: mol_type = other DNA
gtggaatagcagaagttaaattgctttgaaagatggaaaacctttgttctgtaccagctctagctttacttagctgtacaacatcagacaaaccacagttgtctgggcct

SEQ ID NO: 13888 - DNA, 110 bp, synthetic construct
  source 1..110: mol_type = other DNA
ctggcactggggttgggaataccaacagctggaagcgggagggtagcatgcaaaggccaattgttaaatgttcacaaattcttcgagcagaattctaaatttctggtagc

SEQ ID NO: 13889 - DNA, 110 bp, synthetic construct
  source 1..110: mol_type = other DNA
gccaattgttaaatgttcacaaattcttcgagcagaattctaaatttctggtagcttaagatagaccgtggtgggcctatttataccatggcaattgcaaatgctatata

SEQ ID NO: 13890 - DNA, 110 bp, synthetic construct
  source 1..110: mol_type = other DNA
agaaaggaaaaatgacttttgttttcgtggtgtaggtcggtttctcttgactcatttttgtcacgtgtcttttacttcttttaacttctaaataaataaaagagcaaaaa

SEQ ID NO: 13891 - DNA, 110 bp, synthetic construct
  source 1..110: mol_type = other DNA
ataggcagtgtctactgaaaaaaaatgttgaaaattacgttttctttggtggaaaaaactgcagatagactgcatcccaggcctaagaccagatagtgagaaattcaaaa

SEQ ID NO: 13892 - DNA, 110 bp, synthetic construct
  source 1..110: mol_type = other DNA
aaactgcagatagactgcatcccaggcctaagaccagatagtgagaaattcaaaaggttacagttagtttggagttcccatcatggctctgcagttaaagaacccaacta

SEQ ID NO: 13893 - DNA, 110 bp, synthetic construct
  source 1..110: mol_type = other DNA
catagtgttttacaaaaagtgactacaccgatttagattcctaccagcagtgcaaaagggttttcctgtctttacatccttaccaacacttgttattttctgtctttttc

SEQ ID NO: 13894 - DNA, 110 bp, synthetic construct
  source 1..110: mol_type = other DNA
aagggttttcctgtctttacatccttaccaacacttgttattttctgtctttttcataatcacagttctgacaggtgtgaaatgatatcactgtagttttgatttgtgtt

SEQ ID NO: 13895 - DNA, 110 bp, synthetic construct
  source 1..110: mol_type = other DNA
atgcctcagttgtgcagatctttgcagaggctgcagcggtgcccacccttgggctagcaaagtgacaaatctttcagctctgtgccctggggcccttgagaagaactctg

SEQ ID NO: 13896 - DNA, 110 bp, synthetic construct
  source 1..110: mol_type = other DNA
caaattacatttttaaaaaatgactgcacatataaatgtaaacctatagctgtgataagttcacaaaggagatccttgtagtgctatgaaaacctagaatgtgagaatgt

SEQ ID NO: 13897 - DNA, 110 bp, synthetic construct
  source 1..110: mol_type = other DNA
taagttcacaaaggagatccttgtagtgctatgaaaacctagaatgtgagaatgtggcttgcctacagaaatgagagattcaaacacctcatgcaactttatattaaaaa

SEQ ID NO: 13898 - DNA, 110 bp, synthetic construct
  source 1..110: mol_type = other DNA
tgggctccacctcagaaattctaattcattgagtctcaaatgggacctcagattctacatttccaatgagcttgggtgttgcagataatagctggcccacaggaagcact

SEQ ID NO: 13899 - DNA, 110 bp, synthetic construct
  source 1..110: mol_type = other DNA
tacatttccaatgagcttgggtgttgcagataatagctggcccacaggaagcacttggagcagcactgctctagcatctcagcgttgacatgtacttattgagggagcca

SEQ ID NO: 13900 - DNA, 110 bp, synthetic construct
  source 1..110: mol_type = other DNA
ttcttgttttccctgctgttgtggctaagccacagtgtttttatagcccattcagttcttacaggatttcatcatattccaggtgacaccaaccgttctgagacgtccca

SEQ ID NO: 13901 - DNA, 110 bp, synthetic construct
  source 1..110: mol_type = other DNA
ttcttacaggatttcatcatattccaggtgacaccaaccgttctgagacgtcccaggtgttctctttgagtcccaatacataacctgagtttgacaagtctaacttaaca

SEQ ID NO: 13902 - DNA, 110 bp, synthetic construct
  source 1..110: mol_type = other DNA
ctaatgcacctgttgtgtgccatgtaatttcttgaaatttggaatcagatttgtcacagtcacccttatttttacttccacattgagttccatgcagtgctggcttcata

SEQ ID NO: 13903 - DNA, 110 bp, synthetic construct
  source 1..110: mol_type = other DNA
acagtcacccttatttttacttccacattgagttccatgcagtgctggcttcatatcacagcaactactaaatctcagcctcacaaagatatggcatcatcagaggaaat

SEQ ID NO: 13904 - DNA, 110 bp, synthetic construct
  source 1..110: mol_type = other DNA
tcaatttctactctacagaaaattgacccagttatagacacacacacacatattttctcacattatctaccatcatgttcatcacaagtgacaagatataattccctgtg

SEQ ID NO: 13905 - DNA, 110 bp, synthetic construct; identical to SEQ ID NO: 13904
  source 1..110: mol_type = other DNA

SEQ ID NO: 13906 - DNA, 110 bp, synthetic construct
  source 1..110: mol_type = other DNA
tttctcaggatgtctttgcctattctgtgtctcttgtgctccaaaaaactttaaaatattttgttgaaaaatgggcagatctaaacagacaattatccaaagaagacata

SEQ ID NO: 13907 - DNA, 110 bp, synthetic construct; identical to SEQ ID NO: 13906
  source 1..110: mol_type = other DNA

SEQ ID NO: 13908 - DNA, 110 bp, synthetic construct
  source 1..110: mol_type = other DNA
aaattaaatgcagatatcaaaacgttgtatatttatttatttttgcctgcgcctacagcatgtgaaaagttcccaggacagatggtgaacccatgccacagcagtgaccc

SEQ ID NO: 13909 - DNA, 110 bp, synthetic construct
  source 1..110: mol_type = other DNA
tgtatatttatttatttttgcctgcgcctacagcatgtgaaaagttcccaggacagatggtgaacccatgccacagcagtgacccaaatctgcagtgacaatgccagatc

SEQ ID NO: 13910 - DNA, 110 bp, synthetic construct
  source 1..110: mol_type = other DNA
tcaggtctttgctcaaatgtcaccttggtaattatcccccggcctttgaccacttctttttaaattttacaatgtttgctcttacaactctgaatcttagtttccatgcc

SEQ ID NO: 13911 - DNA, 110 bp, synthetic construct
  source 1..110: mol_type = other DNA
ctttttaaattttacaatgtttgctcttacaactctgaatcttagtttccatgccattttccccattgtatttaccaccttctaacatataatttacctatcatccatgt

SEQ ID NO: 13912 - DNA, 110 bp, synthetic construct
  source 1..110: mol_type = other DNA
aggacattcatgattcatgggaagagatcaaaatattaccatgaacaggagtttggaagaagttgattacaagcctcagggatgactttcaggggttcaagacttcagtg

SEQ ID NO: 13913 - DNA, 110 bp, synthetic construct
  source 1..110: mol_type = other DNA
gaagaagttgattacaagcctcagggatgactttcaggggttcaagacttcagtggaggaaataaatgcaaatgcagtaaaaatagcaagaaaggagttcctgctgtggc

SEQ ID NO: 13914 - DNA, 110 bp, synthetic construct
  source 1..110: mol_type = other DNA
tgaattctctagtgtgtgttgactgttctggtccagcttcttattgaaacatgcaaagacaaacctgcagatcttgtcttgtcttacaaatatgaaataaaagtcatgaa

SEQ ID NO: 13915 - DNA, 110 bp, synthetic construct
  source 1..110: mol_type = other DNA
actccatcttccattccatatttgttagttgatgttttattttatttatttatttatttaagtttttattttctggctgtgcttgccaatttcaggagttcctgggcctg

SEQ ID NO: 13916 - DNA, 110 bp, synthetic construct
  source 1..110: mol_type = other DNA
atttaagtttttattttctggctgtgcttgccaatttcaggagttcctgggcctgggatcgaacctgagccacaggagtgacaatgtcaaatccttaactgcttaagcca

SEQ ID NO: 13917 - DNA, 110 bp, synthetic construct
  source 1..110: mol_type = other DNA
gcgtacatcagtcattaagtctcttgcaagataaactccaactgcctcttctcttctttatgaacattgtatataaatacctgtagctaccaatatctatgataatatta

SEQ ID NO: 13918 - DNA, 110 bp, synthetic construct; identical to SEQ ID NO: 13917
  source 1..110: mol_type = other DNA

SEQ ID NO: 13919 - DNA, 110 bp, synthetic construct
  source 1..110: mol_type = other DNA
gtgccactcccaggtggaggtgatagaaaacaattattagtcttctcccctgcctgtctactgttgtttaaattaatggtacacaggttacccttggaagctacaagtag

SEQ ID NO: 13920 - DNA, 110 bp, synthetic construct
  source 1..110: mol_type = other DNA
gtctactgttgtttaaattaatggtacacaggttacccttggaagctacaagtagaagatgtcacagtcacccacaatataggtttttgaatgactggataaatcattgc

SEQ ID NO: 13921 - DNA, 110 bp, synthetic construct
  source 1..110: mol_type = other DNA
gaaggccctcataactctttgatgctcactgaccaactcctaaccactctaaatgacttgcaggagatgaatctgactataccgtggtatctttaacaaaagtcactgag

SEQ ID NO: 13922 - DNA, 110 bp, synthetic construct
  source 1..110: mol_type = other DNA
acttgcaggagatgaatctgactataccgtggtatctttaacaaaagtcactgaggctgacaccacaccagaagctacttctttctgctcaacaggcagaaatctttgct

SEQ ID NO: 13923 - DNA, 110 bp, synthetic construct
  source 1..110: mol_type = other DNA
ctatccctgcctcagtccaccttgttaattctgctgaatcagggcgaagtctcagctagtttctggaccccagtgacactactctgatggggaaactggaatatggtctg

SEQ ID NO: 13924 - DNA, 110 bp, synthetic construct
  source 1..110: mol_type = other DNA
ctagtttctggaccccagtgacactactctgatggggaaactggaatatggtctgttttagctaggcaggaaataaaagatctggtcaccattaatcctatccaggttgg

SEQ ID NO: 13925 - DNA, 110 bp, synthetic construct
  source 1..110: mol_type = other DNA
aggtaaggggttgggtctctcatttcagaaggtgatcttgcaggtaagctttccaatttaggcctctatggtgtgagcaatggagaatctaataagaagcatttccatgg

SEQ ID NO: 13926 - DNA, 110 bp, synthetic construct
  source 1..110: mol_type = other DNA
atttaggcctctatggtgtgagcaatggagaatctaataagaagcatttccatggaaacaaaagaaaggttaattgttgggacctgctatacacctaagtactgagggca

SEQ ID NO: 13927 - DNA, 110 bp, synthetic construct
  source 1..110: mol_type = other DNA
gcagagaacagaatcttctcactggtcacaaagccaagctatcaagttacagagtaagaggaaaggaaaactcacctggcccatggttctcatctttatgttgaacaatg

SEQ ID NO: 13928 - DNA, 110 bp, synthetic construct
  source 1..110: mol_type = other DNA
aagaggaaaggaaaactcacctggcccatggttctcatctttatgttgaacaatgcaaaaggcagagaggggaaaatgacaatctttgaaaggaaaaaagattaatagaa

SEQ ID NO: 13929 - DNA, 110 bp, synthetic construct
  source 1..110: mol_type = other DNA
ctaattcatatccctgaccattgctaaatgcagctttcatcctgctcaaaagggaacctaaccaaagcatgtgggaggctatgtggcccatcccacagccctgcttatgg

SEQ ID NO: 13930 - DNA, 110 bp, synthetic construct
  source 1..110: mol_type = other DNA
ctagtgatggaaaagctgaatagcatgaccatatgagacctggactgcttatgatcaggatgttacaggagagagaaatgaacctcgtctttttaaaccacttctatctg

SEQ ID NO: 13931 - DNA, 110 bp, synthetic construct
  source 1..110: mol_type = other DNA
caggatgttacaggagagagaaatgaacctcgtctttttaaaccacttctatctgggcctttgatttggctacttagctaggaccctaaggagcaagaagaacagatttg

SEQ ID NO: 13932 - DNA, 110 bp, synthetic construct
  source 1..110: mol_type = other DNA
aggagattggaatggttaggagagaaaggaaaagatgaccatgagttcagtgtgaccagcttcaggggcagacactatcatttatcccactattctttctcttataaatt

SEQ ID NO: 13933 - DNA, 110 bp, synthetic construct
  source 1..110: mol_type = other DNA
ccagcttcaggggcagacactatcatttatcccactattctttctcttataaattcactccatgaaggtgagaccaccatcatcctgaaagagtggcttccagaatttga

SEQ ID NO: 13934 - DNA, 110 bp, synthetic construct
  source 1..110: mol_type = other DNA
tgttaggagtggtagaagtgtggatgactgggtatagattttgcactttgatctggacatcctagatcactgtactgcaacaagaaaatggccaaatctaagtgttctga

SEQ ID NO: 13935 - DNA, 110 bp, synthetic construct
  source 1..110: mol_type = other DNA
gacatcctagatcactgtactgcaacaagaaaatggccaaatctaagtgttctgaatctgaaaccaggtcagagacatcagcaccatcatactatcatgtgatcattgtc

SEQ ID NO: 13936 - DNA, 110 bp, synthetic construct
  source 1..110: mol_type = other DNA
caacagtacctgaagactgcaatcctttgagataaggcaacaatgatatgaattgccaaaagccaactctgtttgctaatgcgaacagaaaacccactctccaaagttca

SEQ ID NO: 13937 - DNA, 110 bp, synthetic construct
  source 1..110: mol_type = other DNA
ccaaaagccaactctgtttgctaatgcgaacagaaaacccactctccaaagttcaggaccagggagaggtacaatttgtcacttgtaatcgcctgttttctcagacaaga

SEQ ID NO: 13938 - DNA, 110 bp, synthetic construct
  source 1..110: mol_type = other DNA
aacaaacagtgcatcatttcagttactttgtagaatcatagtcaggagggatcttggtggtttaacagtatagctttcttggtttttagattaagaaacttcagtaaaag

SEQ ID NO: 13939 - DNA, 110 bp, synthetic construct; identical to SEQ ID NO: 13938
  source 1..110: mol_type = other DNA

SEQ ID NO: 13940 - DNA, 110 bp, synthetic construct
  source 1..110: mol_type = other DNA
cagggcggggagaggaggcaaagcggggaggcaagctgggtgagaagaaactgttctggggtatgtgaggacatggcttaagccctggcaggcagacaaggtggcaaccc

SEQ ID NO: 13941 - DNA, 110 bp, synthetic construct
  source 1..110: mol_type = other DNA
actctaggtccaggataatcagatacccaaaaattatcctttccccttcatgccattctcttatagttcaagctgccatacctctgcagtttctcccgtttaatttttga

SEQ ID NO: 13942 - DNA, 110 bp, synthetic construct
  source 1..110: mol_type = other DNA
tattttttatttccaaagaactgaagacaccctgtgggtagaatccttattctgtaccttacttttcatctctgcagtatcttatatattgcaaaagtacttgcagagga

SEQ ID NO: 13943 - DNA, 110 bp, synthetic construct
  source 1..110: mol_type = other DNA
accttacttttcatctctgcagtatcttatatattgcaaaagtacttgcagaggaatgagtgaatgcgaatgaacagatggatacaagagttccacactcagaggctcac

SEQ ID NO: 13944 - DNA, 110 bp, synthetic construct
  source 1..110: mol_type = other DNA
attcttaacctgctgagacacaatgggaactccagaagattttttcaaaagcaacagttggccagagctgtctctttaggcctcctctgcttttccttagggcagagaga

SEQ ID NO: 13945 - DNA, 110 bp, synthetic construct
  source 1..110: mol_type = other DNA
gcctcccacttttagggagaggtgatagagcttggtacagtgagcaacaagctagaaaaatgaaagcaaagctcctgaagagccttctaactttattcatacacacaaca

SEQ ID NO: 13946 - DNA, 110 bp, synthetic construct
  source 1..110: mol_type = other DNA
aaaaatgaaagcaaagctcctgaagagccttctaactttattcatacacacaacataaatcatttcatcactagtatgaaatgttcccgatccctaaaatagagcaatgg

SEQ ID NO: 13947 - DNA, 110 bp, synthetic construct
  source 1..110: mol_type = other DNA
gttgacttactctcctcctgcacctctagacagtgaactcatcctttggtgaactagaaccaagaaagctttcatagagaatatgtctcttcatgagataggaatatatt

SEQ ID NO: 13948 - DNA, 110 bp, synthetic construct
  source 1..110: mol_type = other DNA
gtaggaacactcaagaaaaataaaggaccaattgtcttgatatggtgagttacccatcactgggaaaaatcaacccaaagacttgtttggaggtaggagatggttttctt

SEQ ID NO: 13949 - DNA, 110 bp, synthetic construct
  source 1..110: mol_type = other DNA
atcactgggaaaaatcaacccaaagacttgtttggaggtaggagatggttttcttacatttagtgggaggttgggttcagtgagtttgaacactctttcttaggttttgg

SEQ ID NO: 13950 - DNA, 110 bp, synthetic construct
  source 1..110: mol_type = other DNA
cctggtcctcacaatgccagtacattctaaggtcatgtcatatactatctgacacccagatatttagcttacagttctcccctccctaaactgcaaaagatatagtcagt

SEQ ID NO: 13951 - DNA, 110 bp, synthetic construct
  source 1..110: mol_type = other DNA
gccatccttgtatcagtaaaaaccaagaactgcccagatcatttcgttattttgtactgtgcatttgtccttgggatttcccgtggttgcagctttgccatgaaactgta

SEQ ID NO: 13952 - DNA, 110 bp, synthetic construct
  source 1..110: mol_type = other DNA
actgtgcatttgtccttgggatttcccgtggttgcagctttgccatgaaactgtagaatgacaaacaggaacagagctagctaccagataaaggctgtgtaactttgttt

SEQ ID NO: 13953 - DNA, 110 bp, synthetic construct
  source 1..110: mol_type = other DNA
aaaggcaaagaaggttgtgttacaaacattatcctatacccctatgatacagaatgaggatattactaaaaaaattgctctacatttacttttccctaaagaagcaggca

SEQ ID NO: 13954 - DNA, 110 bp, synthetic construct
  source 1..110: mol_type = other DNA
gaggatattactaaaaaaattgctctacatttacttttccctaaagaagcaggcattacgtttactaccaggtgctccacttctgtgcactcacatggtcaaaggccagt

SEQ ID NO: 13955 - DNA, 110 bp, synthetic construct
  source 1..110: mol_type = other DNA
acctcgtgggtcccttcttagtggctcttttcagtgaatagacaggagattggggtgagacattttctactttccttagcagtaaactttgtgctggcaaagtgccattt

SEQ ID NO: 13956 - DNA, 110 bp, synthetic construct
  source 1..110: mol_type = other DNA
tgagacattttctactttccttagcagtaaactttgtgctggcaaagtgccattttatactaaaaagccaatgattagtctcatccaaagcagtcattgagtgcagactg

SEQ ID NO: 13957 - DNA, 110 bp, synthetic construct
  source 1..110: mol_type = other DNA
ctgcatctttaaaagacaaaactaccttcgaaagcgagcagccagtaagaaggtcccttaactctgaaagctcggtgtggctctgaggcagtggtctctgaggaggtttt

SEQ ID NO: 13958 - DNA, 110 bp, synthetic construct
  source 1..110: mol_type = other DNA
ccttaactctgaaagctcggtgtggctctgaggcagtggtctctgaggaggttttgtgatttcgaaagtgtaaatctccaaggttctggcccccagaggccacagcagaa

SEQ ID NO: 13959 - DNA, 110 bp, synthetic construct
  source 1..110: mol_type = other DNA
ttccggctgtggcaaagtgggttcagaatccaacagcagtggctccggtggaggtgtgggttcaatgagccaactcagagcattgggttaaggatccagtgttggtgtag

SEQ ID NO: 13960 - DNA, 110 bp, synthetic construct
  source 1..110: mol_type = other DNA
cggtggaggtgtgggttcaatgagccaactcagagcattgggttaaggatccagtgttggtgtagctgtggcacaggtcttagctgtggcttggatttgatccctggccc

SEQ ID NO: 13961 - DNA, 110 bp, synthetic construct; identical to SEQ ID NO: 13959
  source 1..110: mol_type = other DNA

SEQ ID NO: 13962 - DNA, 110 bp, synthetic construct
  source 1..110: mol_type = other DNA
gcagtggctccggtggaggtgtgggttcaatgagccaactcagagcattgggttaaggatccagtgttggtgtagctgtggcacaggtcttagctgtggcttggatttga

SEQ ID NO: 13963 - DNA, 110 bp, synthetic construct
  source 1..110: mol_type = other DNA
agtttcaactagcaattaagcctaaaacatgggaagccacggcagtatattaaacattaacttttgtatttatctctcagtgggatcccattccacatttcctctaaact

SEQ ID NO: 13964 - DNA, 110 bp, synthetic construct
  source 1..110: mol_type = other DNA
attaacttttgtatttatctctcagtgggatcccattccacatttcctctaaacttacatcaaagtatggcaaataccccatcatctagtcccagttcaggacacagttc

SEQ ID NO: 13965 - DNA, 110 bp, synthetic construct
  source 1..110: mol_type = other DNA
attaaaagtatcagatgccagtgaaaacctccattaagccaaatgtttgacatcattgaaaacagcttcagaaagtagagaacagactgcattaagtctgattgctagac

SEQ ID NO: 13966 - DNA, 110 bp, synthetic construct
  source 1..110: mol_type = other DNA
ttgaaaacagcttcagaaagtagagaacagactgcattaagtctgattgctagactgactttggagagaaaaggatgtatcgtaagggatgcgggccatatttaatgaac

SEQ ID NO: 13967 - DNA, 110 bp, synthetic construct
  source 1..110: mol_type = other DNA
atcctactccaactaagcctttgctcacaccatgccatggaaacttttttctttttcctttttacagccaaacctgcagcatgtggaagtttcaaagctaggggtctaag

SEQ ID NO: 13968 - DNA, 110 bp, synthetic construct
  source 1..110: mol_type = other DNA
cacaccatgccatggaaacttttttctttttcctttttacagccaaacctgcagcatgtggaagtttcaaagctaggggtctaagtggagctgcagttgcaggcctacac

SEQ ID NO: 13969 - DNA, 110 bp, synthetic construct
  source 1..110: mol_type = other DNA
gtgtgtgtgttgggggctatctggtctgcagctaaaccttttcccagcagatcattggctgagtttgaagcagaggagagagtcaagttaggaaactcagtggggatgat

SEQ ID NO: 13970 - DNA, 110 bp, synthetic construct
  source 1..110: mol_type = other DNA
gcgccatcacgggaacgccctcatcttgcactttcaacacctgttgtaagggcccatgtgcctggcactgggatgagcagggtgtgctaagggtgcagattaaaccatac

SEQ ID NO: 13971 - DNA, 110 bp, synthetic construct
  source 1..110: mol_type = other DNA
atgtgcctggcactgggatgagcagggtgtgctaagggtgcagattaaaccatacttgggcactgaaagaactctcagtcccccacacccctccctgcaccccagccccc

SEQ ID NO: 13972 - DNA, 110 bp, synthetic construct
  source 1..110: mol_type = other DNA
tgtccatgcttagcagctgttcttaaattccatgcaatacagatgccaggcagtcctgcagaccacagtttgtgagcttgctggtcccgtcaaattctcatagctgaatg

SEQ ID NO: 13973 - DNA, 110 bp, synthetic construct
  source 1..110: mol_type = other DNA
ctgcagaccacagtttgtgagcttgctggtcccgtcaaattctcatagctgaatgcagcagtgatttagcactgacttagcctgttagtgtcttccattgccttcccctg

SEQ ID NO: 13974 - DNA, 110 bp, synthetic construct
  source 1..110: mol_type = other DNA
acctacgccacagctgcagcaacacaagatcctttaacccactttgttgggcaggggatcgaacccacatgcccctgcagctacccgagctgctgcagtcagattcttaa

SEQ ID NO: 13975 - DNA, 110 bp, synthetic construct; identical to SEQ ID NO: 13974
  source 1..110: mol_type = other DNA

SEQ ID NO: 13976 - DNA, 110 bp, synthetic construct
  source 1..110: mol_type = other DNA
agatgctgtcagtcatcgattttaatatgcattttctgaagtgggttctgctacaacctaccaggtctccttccaaaagaaataattcctatagatcatttttatgagtg

SEQ ID NO: 13977 - DNA, 110 bp, synthetic construct
  source 1..110: mol_type = other DNA
ctgaagtgggttctgctacaacctaccaggtctccttccaaaagaaataattcctatagatcatttttatgagtgggggaaaatatttgtagaaaactaaaaatttagaa

SEQ ID NO: 13978 - DNA, 110 bp, synthetic construct
  source 1..110: mol_type = other DNA
tccctagttaagcaagccaataaaaaaacgttcattttttttaaaagaggcaattttgtattatactttctgtttcctacatgtagcttaagtgatagattggtctagga

SEQ ID NO: 13979 - DNA, 110 bp, synthetic construct
  source 1..110: mol_type = other DNA
ttgtattatactttctgtttcctacatgtagcttaagtgatagattggtctaggagattctaaataaatggccctacataaatccactttttcactcacagagtcactgt

SEQ ID NO: 13980 - DNA, 110 bp, synthetic construct
  source 1..110: mol_type = other DNA
atttcccctccttcacaacctgatttgactgtcctcctctccatatgcctgggccaaagcaagaaagaccactgcctttgtgtgagagaccactgcatctgtccctgaag

SEQ ID NO: 13981 - DNA, 110 bp, synthetic construct
  source 1..110: mol_type = other DNA
aaagcaagaaagaccactgcctttgtgtgagagaccactgcatctgtccctgaagatcatggcaggagctgaaggtgaagccgggttgtaggcaggctgccatatagttt

SEQ ID NO: 13982 - DNA, 110 bp, synthetic construct
  source 1..110: mol_type = other DNA
atgtttattgttgattgaaaaaaaaaaaaaaaaccactcccccccctcccccgaggggccaccaccacacttcaagatctaccgctctcgaatgccccattttctttctt

SEQ ID NO: 13983 - DNA, 110 bp, synthetic construct
  source 1..110: mol_type = other DNA
gggccaccaccacacttcaagatctaccgctctcgaatgccccattttctttcttttccttcttttcttttctttcctttctttcctttctttctttctttctttctttc

SEQ ID NO: 13984 - DNA, 110 bp, synthetic construct
  source 1..110: mol_type = other DNA
tgacttagcgaaacattactcatcacgctctggagccagttgctttcactgggtggcaaaatgggccaagagaaacagaatttgcatggcttgcaaatctaaagttatgg

SEQ ID NO: 13985 - DNA, 110 bp, synthetic construct
  source 1..110: mol_type = other DNA
gaggtcagacaggccagcctgaatcagagtcctaaccaatcaggttatggaagtttgtggaagttaattagaacagatcctttgctcgtgccctcacagtagcaagaaac

SEQ ID NO: 13986 - DNA, 110 bp, synthetic construct
  source 1..110: mol_type = other DNA
tgtggaagttaattagaacagatcctttgctcgtgccctcacagtagcaagaaacagctttttacatctgtcaggccatcagaaacacattttacaatggtgacatcaaa

SEQ ID NO: 13987 - DNA, 110 bp, synthetic construct
  source 1..110: mol_type = other DNA
aacctgtgtcctctttgatactagtcaaattcatttctgccgagccatgacagaactccagaaaccactaatatttttgaactgcatatccttatatgtcaaattatatt

SEQ ID NO: 13988 - DNA, 110 bp, synthetic construct; identical to SEQ ID NO: 13987
  source 1..110: mol_type = other DNA

SEQ ID NO: 13989 - DNA, 110 bp, synthetic construct
  source 1..110: mol_type = other DNA
tggggcatttgctgattcttcacacacatcaagatgtggctcagtagggtagaaaagctgctaagtgcccaaaacataaaagagcttttggtgatttcacagggtcgggg

SEQ ID NO: 13990 - DNA, 110 bp, synthetic construct
  source 1..110: mol_type = other DNA
gtgttctacagaactgatttgggaacatgtgtttaattccttaaactcacatttaaagtagccccattcctttgatcaagctgcttaaccatcatctcctataatatatt

SEQ ID NO: 13991 - DNA, 110 bp, synthetic construct
  source 1..110: mol_type = other DNA
aagtagccccattcctttgatcaagctgcttaaccatcatctcctataatatattgtattcatatccaagttacctcattcatagttttgtaatgaaacatacagattca

SEQ ID NO: 13992 - DNA, 110 bp, synthetic construct
  source 1..110: mol_type = other DNA
tttcacttttagttttaagattcagcctttctgcttaatctctatttcctttgatcctgtccaagataatttttggtgtatggaacaactcttatatgaacaaattggag

SEQ ID NO: 13993 - DNA, 110 bp, synthetic construct
  source 1..110: mol_type = other DNA
gtgggttaaggatctggtgttgccatggtccgtggtataggttgtagatgcggctcagatcctgaaagttttttaaaacttggctttccttccagaaattctcatatcag

SEQ ID NO: 13994 - DNA, 110 bp, synthetic construct; identical to SEQ ID NO: 13993
  source 1..110: mol_type = other DNA

SEQ ID NO: 13995 - DNA, 110 bp, synthetic construct
  source 1..110: mol_type = other DNA
tctcaattgaagtcccaaaattactgttccaattgatgctttctgtggcacactgaaacttcactttcttgacatcatatcctaatcactgtacaattcccaaatacaag

SEQ ID NO: 13996 - DNA, 110 bp, synthetic construct
  source 1..110: mol_type = other DNA
accaacccatacacaaaataggccatctgggaatgatacctcggtgaagtaaatttatgcattttgaatcctgaacacctaatgagaagctcctgagtagcagatattca

SEQ ID NO: 13997 - DNA, 110 bp, synthetic construct
  source 1..110: mol_type = other DNA
tatgcattttgaatcctgaacacctaatgagaagctcctgagtagcagatattcagtatgtgtttggtggatgactaaatgaataaactctctttgtaagaaaaccaacc

SEQ ID NO: 13998 - DNA, 110 bp, synthetic construct
  source 1..110: mol_type = other DNA
gtccatccatgttgttgcaagtggcattatttcattcttttctatttctgagtaatattccattgcatatatgtaagagaccaggcttttggatttggattctggctttg

SEQ ID NO: 13999 - DNA, 110 bp, synthetic construct; identical to SEQ ID NO: 13998
  source 1..110: mol_type = other DNA

SEQ ID NO: 14000 - DNA, 110 bp, synthetic construct
  source 1..110: mol_type = other DNA
gagaatgaatgcttcatcagtgaagaatcttccaggatgtattctgaaatgcaaagggccatgcacagaatatgaagtagaacggtagcataagctacatgtgagaggtt

SEQ ID NO: 14001 - DNA, 110 bp, synthetic construct
  source 1..110: mol_type = other DNA
gggccatgcacagaatatgaagtagaacggtagcataagctacatgtgagaggttaaaatctacctccattctctttacgaatatgttctgggcatttcgtgtcttgaaa

SEQ ID NO: 14002 - DNA, 110 bp, synthetic construct
  source 1..110: mol_type = other DNA
gtaccattacctgaacattacctgatgtaccattttgatgtgactacacctatcgtttgttttttttttcaactgtagaaaaaattttgctgatatctctccaaatattt

SEQ ID NO: 14003 - DNA, 110 bp, synthetic construct
  source 1..110: mol_type = other DNA
tctcacttaaaagacctattcagaaataccgcatgcttgcttgtttggatgataccacaggcaaagcaataaagccatgaagtgttacaagtccctatcccattctcgaa

SEQ ID NO: 14004 - DNA, 110 bp, synthetic construct
  source 1..110: mol_type = other DNA
cacaggcaaagcaataaagccatgaagtgttacaagtccctatcccattctcgaactgttctcaaattctctcccaattcataagtagtttaggagttaagatactcatt

SEQ ID NO: 14005 - DNA, 110 bp, synthetic construct
  source 1..110: mol_type = other DNA
gttcattaaccaatgagccatgacgagaactccttaccttccatcttaagcacttttgctgtaccctattgacctaactctatatccttcaagctcagaaatcatctccc

SEQ ID NO: 14006 - DNA, 110 bp, synthetic construct
  source 1..110: mol_type = other DNA
ttgctgtaccctattgacctaactctatatccttcaagctcagaaatcatctccccttaggaatccctccattaccctggctttgtgcttttctgtatcatggcactcat

SEQ ID NO: 14007 - DNA, 110 bp, synthetic construct; identical to SEQ ID NO: 14005
  source 1..110: mol_type = other DNA

SEQ ID NO: 14008 - DNA, 110 bp, synthetic construct; identical to SEQ ID NO: 14006
  source 1..110: mol_type = other DNA

SEQ ID NO: 14009 - DNA, 110 bp, synthetic construct
  source 1..110: mol_type = other DNA
gtcttccttgtacagtcagaataatcacttttatcaactctttggcaataaatatattctgtgtctctatttgggtttcttcttttctgaatgtccatgattaatattga

SEQ ID NO: 14010 - DNA, 110 bp, synthetic construct; identical to SEQ ID NO: 14009
  source 1..110: mol_type = other DNA

SEQ ID NO: 14011 - DNA, 110 bp, synthetic construct
  source 1..110: mol_type = other DNA
ctcaaaaagcctcttctgaacagctaagcccattcatttccccctcaaatctttcttattttactgtttctgtaactttgctaaagttatcctgggttcttggacttcct

SEQ ID NO: 14012 - DNA, 110 bp, synthetic construct
  source 1..110: mol_type = other DNA
tcccattttaaggtacacaacctgaatgacacagacaccatttttggtatcataagttatccacaggttccaaatctttggcgattgttctacttaccacacctaagaat

SEQ ID NO: 14013 - DNA, 110 bp, synthetic construct
  source 1..110: mol_type = other DNA
gttatccacaggttccaaatctttggcgattgttctacttaccacacctaagaattctgtcctgttgtggcagaggagtgagggagggttaacacactcgcacaagtcct

SEQ ID NO: 14014 - DNA, 110 bp, synthetic construct
  source 1..110: mol_type = other DNA
tgtatgatgtttatatagaataaaaatttggagtgtgtacacagaacgcaatacaatgtttttagcaaaaatttacgtgggagaaattcccactatggcaaagtgggcta

SEQ ID NO: 14015 - DNA, 110 bp, synthetic construct
  source 1..110: mol_type = other DNA
atgtttttagcaaaaatttacgtgggagaaattcccactatggcaaagtgggctaagaagctgactgcagtgacttaggttgctgcagaggcacaggtttaatccctggc

SEQ ID NO: 14016 - DNA, 110 bp, synthetic construct
  source 1..110: mol_type = other DNA
aataaaactgatgcacagagtttgagtaacttgatagttactatatagtgattcttggccttactctattcaagcttttcttttaagttgctaccagcctttttcgaagt

SEQ ID NO: 14017 - DNA, 110 bp, synthetic construct
  source 1..110: mol_type = other DNA
tggccttactctattcaagcttttcttttaagttgctaccagcctttttcgaagtaaagaggatacataaataaataatgtaaaccagtgatttcaatgtcaaactgtca

SEQ ID NO: 14018 - DNA, 110 bp, synthetic construct
  source 1..110: mol_type = other DNA
aagctggtaggtgtgtgcagtcaagacattctcccactgcttttataaacagcaggtgttctccctagctgcctcactaaagtagatgggcatgtgcaatccacgtaggg

SEQ ID NO: 14019 - DNA, 110 bp, synthetic construct
  source 1..110: mol_type = other DNA
gtgttctccctagctgcctcactaaagtagatgggcatgtgcaatccacgtagggaatgcctcttgatcacctggccctgatggccaaaggggcttgaggtttggggctc

SEQ ID NO: 14020 - DNA, 110 bp, synthetic construct
  source 1..110: mol_type = other DNA
aatgaccataccaaaagaggagtagctgaacagggaagactcaccaaatgttatccacaatgtgggacagagtcaccaaaagggagaatactggaaagagtcctttgatt

SEQ ID NO: 14021 - DNA, 110 bp, synthetic construct
  source 1..110: mol_type = other DNA
caagaagtcattactgcttcctattaaataatcataaacatcttctttgtggcttacagaaaagaacagtgggcttcttaggactcaccaaaagtctgcatctcttcaaa

SEQ ID NO: 14022 - DNA, 110 bp, synthetic construct
  source 1..110: mol_type = other DNA
acagaaaagaacagtgggcttcttaggactcaccaaaagtctgcatctcttcaaagagtcattattggtggagaaagtcacccattaaacctctaagaagagagagtatt

SEQ ID NO: 14023 - DNA, 110 bp, synthetic construct
  source 1..110: mol_type = other DNA
gtcccttgaatccagatctgacaattcaggtatttattctttcttccttttctacccctttctttcttttccatcagggcaaagaactgtgaaatgtatgcctgcatcca

SEQ ID NO: 14024 - DNA, 110 bp, synthetic construct
  source 1..110: mol_type = other DNA
ccctttctttcttttccatcagggcaaagaactgtgaaatgtatgcctgcatccaaaagtatgaaaaattcatcctgtatttttaaaataagaaagcattactagaacat

SEQ ID NO: 14025 - DNA, 110 bp, synthetic construct
  source 1..110: mol_type = other DNA
ccaagatgcctcatgtaacaggaagcatcatatcatcaagaaaaatggaacttaggagttcccgttgtggctcaatggttaatgaatcggactaggaatcatgaggttgc

SEQ ID NO: 14026 - DNA, 110 bp, synthetic construct; identical to SEQ ID NO: 14025
  source 1..110: mol_type = other DNA

SEQ ID NO: 14027 - DNA, 110 bp, synthetic construct
  source 1..110: mol_type = other DNA
ctgccagggggtagtaggggtaagaatgaaaggcaaagcacaaaggatttttcaggcagtgaaactactgtgtatgatacattagtggtggacacatgtcattatacatt

SEQ ID NO: 14028 - DNA, 110 bp, synthetic construct
  source 1..110: mol_type = other DNA
gcagtgaaactactgtgtatgatacattagtggtggacacatgtcattatacatttgtccaaacccacagaataaaaacaccaagagtgaacacctcatgtaaactatgg

SEQ ID NO: 14029 - DNA, 110 bp, synthetic construct
  source 1..110: mol_type = other DNA
ttaaatggggttctggtttcttttaccgctggtatttggtgcagaggaatttttttctttttttgctttttagagccacaccagtggcataggttcccaggctaggggta

SEQ ID NO: 14030 - DNA, 110 bp, synthetic construct
  source 1..110: mol_type = other DNA
gtttcttttaccgctggtatttggtgcagaggaatttttttctttttttgctttttagagccacaccagtggcataggttcccaggctaggggtagaatcagagctatag

SEQ ID NO: 14031 - DNA, 110 bp, synthetic construct
  source 1..110: mol_type = other DNA
cttctgacttaggtgtgtgaacaaacccaggacagtatcactcaccatccagtaatacaaaagattaagtcacaatccactgcagctacccactgacagtgattcctgag

SEQ ID NO: 14032 - DNA, 110 bp, synthetic construct
  source 1..110: mol_type = other DNA
aaataaaatgcacgtatatacttgttatgatctgaatatgcctccatatgttgcagccctaaaccccaatgtgattatgtttggagataaggcctgtgaggatgtgatac

SEQ ID NO: 14033 - DNA, 110 bp, synthetic construct; identical to SEQ ID NO: 14032
  source 1..110: mol_type = other DNA

SEQ ID NO: 14034 - DNA, 110 bp, synthetic construct
  source 1..110: mol_type = other DNA
ttagaccagccagaacttaaaaggacagaggaaaatcttttcctccccaacagtatcttttatattccatgccagtgagttttagccatgagtgataggcaaaactgtat

SEQ ID NO: 14035 - DNA, 110 bp, synthetic construct
  source 1..110: mol_type = other DNA
gaactgcatggtatatggtatcatatggttacactgtcaccaaaacattcttgaaacaacaatagggtacaaattagagtaagaaataaggtgtttgcctcccctcagaa

SEQ ID NO: 14036 - DNA, 110 bp, synthetic construct
  source 1..110: mol_type = other DNA
aacatgaaaaccctcctccctgtcttaagccagaacaaccttgaggtgtaatttacacttggagcttctctgaggcttagtcaaggctaggacttagcctgaaagatcac

SEQ ID NO: 14037 - DNA, 110 bp, synthetic construct
  source 1..110: mol_type = other DNA
cacttggagcttctctgaggcttagtcaaggctaggacttagcctgaaagatcactctgtctcagtgcctcaccttccctgccctgcctacccctatattctttaccata

SEQ ID NO: 14038 - DNA, 110 bp, synthetic construct
  source 1..110: mol_type = other DNA
gaaatctaaatgcatattcttgaatgaaagaagtctgtatgacattttagaaaaggcaaaacttggagttcctgctgtggcatagtgggttaagaatctgactgcagttg

SEQ ID NO: 14039 - DNA, 110 bp, synthetic construct
  source 1..110: mol_type = other DNA
gcaaaacttggagttcctgctgtggcatagtgggttaagaatctgactgcagttgtttgcctaaggaggcaaggattcattccccagcctggcatagtgggttaaagatc

SEQ ID NO: 14040 - DNA, 110 bp, synthetic construct
  source 1..110: mol_type = other DNA
gcatttgcaagagtgggagcttttccagggctgagctgaaggagcgggaaggaggggacaactggggctggaggtgaggaggaggggccactggctgggagcttcagcca

SEQ ID NO: 14041 - DNA, 110 bp, synthetic construct
  source 1..110: mol_type = other DNA
gtattctgcaatgatagttgccttctaatactgacagccttgtttaatctcctcttgggagtgggctaaacttactgatgcaattctaacatgtagactatggcagaagt

SEQ ID NO: 14042 - DNA, 110 bp, synthetic construct
  source 1..110: mol_type = other DNA
tgggagtgggctaaacttactgatgcaattctaacatgtagactatggcagaagtgatggaagacagtatgagaaaaagaatgcatgtatatgtatgactgggtcgctat

SEQ ID NO: 14043 - DNA, 110 bp, synthetic construct
  source 1..110: mol_type = other DNA
tctattaaaaaaaaccaagcactcccctgtggtgggggagcccaaggctcgcccgctcagagtgcccaaccactctgttggttgacaaactccgcttgcaatctcattgc

SEQ ID NO: 14044 - DNA, 110 bp, synthetic construct
  source 1..110: mol_type = other DNA
ggctcgcccgctcagagtgcccaaccactctgttggttgacaaactccgcttgcaatctcattgcttcagcctctgcctccttcttccccgccgttctaacaatcttatc

SEQ ID NO: 14045 - DNA, 110 bp, synthetic construct
  source 1..110: mol_type = other DNA
cttaatcatcctaagattcatgggctgtcctcttggtccctaccttgcacacaccctcaactctccagtccatttctcacctcaagttctcagtgagggaaactgcaaca

SEQ ID NO: 14046 - DNA, 110 bp, synthetic construct
  source 1..110: mol_type = other DNA
ctcaactctccagtccatttctcacctcaagttctcagtgagggaaactgcaacaccattgaaatccaactctgcaaccacagcaactcatcctcctagaaatatgtgga

SEQ ID NO: 14047 - DNA, 110 bp, synthetic construct
  source 1..110: mol_type = other DNA
ggggttggcttgtacatcctgtacccaggccttgtttttctgcttttgttttgttttaaaggaaccaaatatgttctagttccgagatagtgttacttcaaaagattcct

SEQ ID NO: 14048 - DNA, 110 bp, synthetic construct
  source 1..110: mol_type = other DNA
caggccttgtttttctgcttttgttttgttttaaaggaaccaaatatgttctagttccgagatagtgttacttcaaaagattcctgttaacatactatagcaagaaatta

SEQ ID NO: 14049 - DNA, 110 bp, synthetic construct
  source 1..110: mol_type = other DNA
gagtgacttagctggctctttcccactcagggtctttcatgaagttgtatgcagatgtccagcagggtggcatctgaaagctcagctaaagtcagtggatctgctttcaa

SEQ ID NO: 14050 - DNA, 110 bp, synthetic construct
  source 1..110: mol_type = other DNA
gaggctggcatagaggaggcagaggaaggccttcacaaactccaggacagtctgtaccgtgtcatctcttctctgtgagtgtgttactcctgccctgtccccttacaaag

SEQ ID NO: 14051 - DNA, 110 bp, synthetic construct
  source 1..110: mol_type = other DNA
accgtgtcatctcttctctgtgagtgtgttactcctgccctgtccccttacaaagtaccttgggctccacaggtgatctggagctgcctttctcacatcaatccctgtgc

SEQ ID NO: 14052 - DNA, 110 bp, synthetic construct
  source 1..110: mol_type = other DNA
tacttgttgttgacctaacagcagctctgatgaccccgttgtcatattccctcggaagtgctgtcttcctttagtgctgcatttgctgtaattgtcctaacacactgctt

SEQ ID NO: 14053 - DNA, 110 bp, synthetic construct
  source 1..110: mol_type = other DNA
gggaaaagtaaaatagaatactaaggagaccattggcaaggtggcaaggtgccaaaacctagtccaccaaatgagagcatagccatatagcaaggctgtgcagtctcaca

SEQ ID NO: 14054 - DNA, 110 bp, synthetic construct
  source 1..110: mol_type = other DNA
taaataagtacacatccaacttcgtgctcaggcccccaacgccatccatgagctggcttctgcctgcctgtacagcctccttttctgctggatttcctccctttcgtttg

SEQ ID NO: 14055 - DNA, 110 bp, synthetic construct
  source 1..110: mol_type = other DNA
gcttctgcctgcctgtacagcctccttttctgctggatttcctccctttcgtttgactctgttcacagtggccttcttcctgcttctcatcttctgcttctccatgttgt

SEQ ID NO: 14056 - DNA, 110 bp, synthetic construct
  source 1..110: mol_type = other DNA
aacgtagaaagttcagggtaaaaggccgtgtttgcaaaataaggacaatttaaactccagtacacactgaccaatttttaggttaaaattgttgatttagaatgacatcc

SEQ ID NO: 14057 - DNA, 110 bp, synthetic construct; identical to SEQ ID NO: 14056
  source 1..110: mol_type = other DNA

SEQ ID NO: 14058 - DNA, 110 bp, synthetic construct
  source 1..110: mol_type = other DNA
tatatctgaacaaagctataattcagcaagattcattacacccctctgttcatagcagcaccattcacgatagccaagacatggaaactacctaaatatccattggcaga

SEQ ID NO: 14059 - DNA, 110 bp, synthetic construct; identical to SEQ ID NO: 14058
  source 1..110: mol_type = other DNA

SEQ ID NO: 14060 - DNA, 110 bp, synthetic construct
  source 1..110: mol_type = other DNA
tgtagcatttctcccttctagaatcttgtgttgctttctttctgagtttgttctttttccctttctcttgttagcatgtaagctctgtgagcatggggattgtctatttt

SEQ ID NO: 14061 - DNA, 110 bp, synthetic construct
  source 1..110: mol_type = other DNA
cagaactgtcacctcttatgttatatttaaatagaaaattcctggggaaaaatttatgtatagtggaatggataaatgtgccgtgttcatacaatggaatattgtgtaat

SEQ ID NO: 14062 - DNA, 110 bp, synthetic construct
  source 1..110: mol_type = other DNA
atgtatagtggaatggataaatgtgccgtgttcatacaatggaatattgtgtaataaggaaataaaaaaacagaacaataaacactgtatgtggaggtcacaaacatgat

SEQ ID NO: 14063 - DNA, 110 bp, synthetic construct
  source 1..110: mol_type = other DNA
ggctgcactaatattgcatttaaaatacagaatttggagtttctgttgtggttcagcaggttaaagacccgacattgtctctgtgaggatacagattcaatccctggcct

SEQ ID NO: 14064 - DNA, 110 bp, synthetic construct; identical to SEQ ID NO: 14063
  source 1..110: mol_type = other DNA

SEQ ID NO: 14065 - DNA, 110 bp, synthetic construct
  source 1..110: mol_type = other DNA
tccatagggtaggaagcattgtctctcctgcccattcatggtctgcaggaccacagccaagaagccagctttctcccacctatttcctcacttttaatgatgtatcctgg

SEQ ID NO: 14066 - DNA, 110 bp, synthetic construct
  source 1..110: mol_type = other DNA
gccaagaagccagctttctcccacctatttcctcacttttaatgatgtatcctggagaaagaattaaagcaacagaatatgaatgttacagtgtcatttgcaaagctaaa

SEQ ID NO: 14067 - DNA, 110 bp, synthetic construct
  source 1..110: mol_type = other DNA
atgtcacctgctctctgaggacatgctgcagtccagccaccggcagctggagcctgagcacacactcacctcaggagtcatggtttggccacagccaagtacacccaggg

SEQ ID NO: 14068 - DNA, 110 bp, synthetic construct
  source 1..110: mol_type = other DNA
tatggatcctaggggtagggtttgaatcggagctgcagttgccaggcctacaccatggccatggcaatgccagatccgagcctcatcttccacctatgccacgacttggc

SEQ ID NO: 14069 - DNA, 110 bp, synthetic construct
  source 1..110: mol_type = other DNA
cagttgccaggcctacaccatggccatggcaatgccagatccgagcctcatcttccacctatgccacgacttggcggcaatgctgcatccttaacccattgagtgaggcc

SEQ ID NO: 14070 - DNA, 110 bp, synthetic construct
  source 1..110: mol_type = other DNA
gctgtacagtagctgtcatcatacttgataaagacaggcctggaatcctgcctcaacacatgccacacctgcccatcaggctgcatccatccggaagctttagccctaag

SEQ ID NO: 14071 - DNA, 110 bp, synthetic construct
  source 1..110: mol_type = other DNA
tgtacaatggggataataccttttactgtacactgggtcttatgcccattgtacagacaaggaaaccaaagcccaggggcagcgactctcccggggtcacacaggctgcc

SEQ ID NO: 14072 - DNA, 110 bp, synthetic construct
  source 1..110: mol_type = other DNA
gacaaggaaaccaaagcccaggggcagcgactctcccggggtcacacaggctgccacacggcaggagggggagtagaactcagtggatcccaatccaggaccagaaaggc

SEQ ID NO: 14073 - DNA, 110 bp, synthetic construct
  source 1..110: mol_type = other DNA
gcctggtattgcccactgtctttccccacttcccatggtcattctttccatcccctcttccctgatgactcagctgtttattctgccatcccctttcagctgatgggctt

SEQ ID NO: 14074 - DNA, 110 bp, synthetic construct
  source 1..110: mol_type = other DNA
ctaatggaccataacatagtctccccctgtttcacattagcagccatccccacccatcacatcagcatttgtgtggtttgtaacaacaccgaaaattacaattcaaattc

SEQ ID NO: 14075 - DNA, 110 bp, synthetic construct
  source 1..110: mol_type = other DNA
atcacatcagcatttgtgtggtttgtaacaacaccgaaaattacaattcaaattcaatgcaaattgggtcatatggtgaaattgcaaatctaatagagtcttggggtttt

SEQ ID NO: 14076 - DNA, 110 bp, synthetic construct
  source 1..110: mol_type = other DNA
ccagggaactccagataatatgcatttgtaatataaacatattggagtgccaagcaatttaaaaaaaaaaaaataagagggtggttgatgatttcagtaaagattgatcc

SEQ ID NO: 14077 - DNA, 110 bp, synthetic construct
  source 1..110: mol_type = other DNA
aatttaaaaaaaaaaaaataagagggtggttgatgatttcagtaaagattgatccataagcagagacagagctaggaaaaatctgtagcatttaagctccacatttgggg

SEQ ID NO: 14078 - DNA, 110 bp, synthetic construct
  source 1..110: mol_type = other DNA
aaaaatggaaagagctgaggcagtttctgttgcattttagggctgtccattgctggcggtctttctgagttgttgcccaagcacatttggcaatttttaccttcctggag

SEQ ID NO: 14079 - DNA, 110 bp, synthetic construct
  source 1..110: mol_type = other DNA
gcggtctttctgagttgttgcccaagcacatttggcaatttttaccttcctggagtcatagcggagctctggactgcagtatgatacaaaagagtgctgcgggcaagact

SEQ ID NO: 14080 - DNA, 110 bp, synthetic construct
  source 1..110: mol_type = other DNA
gcatcctcatggatcctagttgggttcattatgacggcataacgaaaactatgagctatgacggcaactgcaaaagattcataaataattgtttaaagaactgtggtgag

SEQ ID NO: 14081 - DNA, 110 bp, synthetic construct; identical to SEQ ID NO: 14080
  source 1..110: mol_type = other DNA

SEQ ID NO: 14082 - DNA, 110 bp, synthetic construct
  source 1..110: mol_type = other DNA
cttcctttacttctcaaagttcaagtcagtgacatggggtttacagtatcattagccacgttcagatgaggaagctgacagttgaactgggatttacatgctgttgtgat

SEQ ID NO: 14083 - DNA, 110 bp, synthetic construct
  source 1..110: mol_type = other DNA
ggtgtgtggtgcttagtcttcagtttttctctcttggttcttggtccttaatgtgaattagaaaagttcattttaaggtttttttccaaataaacatgctgatttgggga

SEQ ID NO: 14084 - DNA, 110 bp, synthetic construct
  source 1..110: mol_type = other DNA
aattagaaaagttcattttaaggtttttttccaaataaacatgctgatttggggagaggagggaggattcaggccaaggtcagcattacctatatcacctgcctcttccc

SEQ ID NO: 14085 - DNA, 110 bp, synthetic construct
  source 1..110: mol_type = other DNA
cctcgacatgcggaagttctggggccaggattgaccctcgccacagcaatgacaacgctggatccttaaccactaggccaccatggaactcctggcttgaccttgttggt

SEQ ID NO: 14086 - DNA, 110 bp, synthetic construct
  source 1..110: mol_type = other DNA
cgctggatccttaaccactaggccaccatggaactcctggcttgaccttgttggttctagagatggaaaaggagcacaagccaaagacttgtgggagcctctgcaagctg

SEQ ID NO: 14087 - DNA, 110 bp, synthetic construct
  source 1..110: mol_type = other DNA
tgtagacctctggttccgcataggggagatatgtacacagggcttctgtctttttttaccttttatttatttatttttctacagtacagcatggtgacccagttacacat

SEQ ID NO: 14088 - DNA, 110 bp, synthetic construct; identical to SEQ ID NO: 14087
  source 1..110: mol_type = other DNA

SEQ ID NO: 14089 - DNA, 110 bp, synthetic construct
  source 1..110: mol_type = other DNA
aacttatcatggtcttttggacccaaagggccaatccacaagaaacccaagacatccatcaaacttctcagacctgtttaggacaagttgatccacttttaatacggagt

SEQ ID NO: 14090 - DNA, 110 bp, synthetic construct
  source 1..110: mol_type = other DNA
cccaagacatccatcaaacttctcagacctgtttaggacaagttgatccacttttaatacggagtcagaagaaaaatctggttttgccccccaaaactcactccccccaa

SEQ ID NO: 14091 - DNA, 110 bp, synthetic construct
  source 1..110: mol_type = other DNA
agtgacccagccagatatattccttttctcttctctcttccatttcttttctcttccatcatggtctgtcccaagagactggttatagttccctgtgctatgcagcctca

SEQ ID NO: 14092 - DNA, 110 bp, synthetic construct; identical to SEQ ID NO: 14091
  source 1..110: mol_type = other DNA

SEQ ID NO: 14093 - DNA, 110 bp, synthetic construct
  source 1..110: mol_type = other DNA
ttgagatgcacaaaatacctcagtcagttacagaaggaatgagtcactttgctcataggggtcttgattctttcagatcttacagcttttcaatcgaagtacttgaaggc

SEQ ID NO: 14094 - DNA, 110 bp, synthetic construct
  source 1..110: mol_type = other DNA
taggggtcttgattctttcagatcttacagcttttcaatcgaagtacttgaaggcttgtcctattcagcctaaaggagtcagctttcggcaagacttttaggtcagtggt

SEQ ID NO: 14095 - DNA, 110 bp, synthetic construct
  source 1..110: mol_type = other DNA
agttgtatatgcttctcttggggattcacaaaggaaagctgctgaaccttgcaggcctttgtgtaactcagtgtttcctgaacacatctgatggtagaaccctgtgtatt

SEQ ID NO: 14096 - DNA, 110 bp, synthetic construct
  source 1..110: mol_type = other DNA
ttctctgtggtcttagatttcttctttagaattcctgcttagaattctcttgcccctttgtgttataagtaaaattgtaaagagctctgatgctggagtcaggctgcctg

SEQ ID NO: 14097 - DNA, 110 bp, synthetic construct
  source 1..110: mol_type = other DNA
gtttttgtttttggctgcacccacaccatgtggaaatttccaggccggggatgaaatctgtgccacagcagtgattaatgccagatcctttaaccactaggccaccaggg

SEQ ID NO: 14098 - DNA, 110 bp, synthetic construct
  source 1..110: mol_type = other DNA
atctgtgccacagcagtgattaatgccagatcctttaaccactaggccaccagggaactccttaaaatgctattaagtgcatcgaaacctattttcttcagtgggccgga

SEQ ID NO: 14099 - DNA, 110 bp, synthetic construct
  source 1..110: mol_type = other DNA
tatatcactcaattgcaacaagtcaatggaagcttaaggagtgtgaagaattatctagcagaagcatccaagcatccaaacagtggtgcactgttgcatggccagaatca

SEQ ID NO: 14100 - DNA, 110 bp, synthetic construct
  source 1..110: mol_type = other DNA
tcacagtgatttatcatttcctcctatcacatttctggtgatgttgcatctcatcgtttctgaaaatgctggaagcacatttgtgggatgtattcacaggatatatttac

SEQ ID NO: 14101 - DNA, 110 bp, synthetic construct
  source 1..110: mol_type = other DNA
gtttctgaaaatgctggaagcacatttgtgggatgtattcacaggatatatttacatctcataatactcgttggcttggaaataatggttgctgggactcttttaggaag

SEQ ID NO: 14102 - DNA, 110 bp, synthetic construct
  source 1..110: mol_type = other DNA
ttctgctggatttagaagcagtgtttgacacagctgattgctacatttccttgaagctctttcttctgttgtcctccaggatacaacgttttcctgatttttctcacaaa

SEQ ID NO: 14103 - DNA, 110 bp, synthetic construct
  source 1..110: mol_type = other DNA
gctctttcttctgttgtcctccaggatacaacgttttcctgatttttctcacaaatcactggccactctttttcagtcttttctggctctttttcatctatctgttgaga

SEQ ID NO: 14104 - DNA, 110 bp, synthetic construct
  source 1..110: mol_type = other DNA
gggggttcatctgaaagctttcattatgagctataaataatcaagtgaattattcatccatttatttgttcattcatccttcattaaagagtgaatgcattcaccagcca

SEQ ID NO: 14105 - DNA, 110 bp, synthetic construct; identical to SEQ ID NO: 14104
  source 1..110: mol_type = other DNA

SEQ ID NO: 14106 - DNA, 110 bp, synthetic construct
  source 1..110: mol_type = other DNA
caaagcccaaggacagcctacttcaactgatcaaatcttaccattttgccatattgctgaacttattgtttatcagtccccatgcacattttatcctgtttaaatatatg

SEQ ID NO: 14107 - DNA, 110 bp, synthetic construct
  source 1..110: mol_type = other DNA
gctgaacttattgtttatcagtccccatgcacattttatcctgtttaaatatatggtaatctattcttgaactaatgcaactttagagaaaatgaagccgggttcattca

SEQ ID NO: 14108 - DNA, 110 bp, synthetic construct
  source 1..110: mol_type = other DNA
gtgactaaactaaacaagtgtatactcgttgatgctggcaaagaaaagtttgataccctacccagtgccctgtgtacgctgaatactatctgacaccatgaattattttt

SEQ ID NO: 14109 - DNA, 110 bp, synthetic construct; identical to SEQ ID NO: 14108
  source 1..110: mol_type = other DNA

SEQ ID NO: 14110 - DNA, 110 bp, synthetic construct
  source 1..110: mol_type = other DNA
gatgaaacccttttccttgaaaaataactagtagtgcccttactctgtccttcctctttcgacttaaaaacagctgtaatcactttcccactcttctcgttcccagactg

SEQ ID NO: 14111 - DNA, 110 bp, synthetic construct
  source 1..110: mol_type = other DNA
tctattggttgctaaatgggatgtaccagactctctgtcttttactcccaggaatgctagaagtcaagtaagttaaattcttgaaataaacatattccagtgctgtgcct

SEQ ID NO: 14112 - DNA, 110 bp, synthetic construct
  source 1..110: mol_type = other DNA
tgtcttttactcccaggaatgctagaagtcaagtaagttaaattcttgaaataaacatattccagtgctgtgcctacctttatgcaaaatatctaattaaatgaaaaatg

SEQ ID NO: 14113 - DNA, 110 bp, synthetic construct
  source 1..110: mol_type = other DNA
gaattggcctgtaccctccaaaaacatccaggtcaagaaacacaaagactgaggaaatgtttcagaataaggagacatgacagctaaatgtagtaggatgttgtggaaca

SEQ ID NO: 14114 - DNA, 110 bp, synthetic construct
  source 1..110: mol_type = other DNA
aatgacagggcatctcaccaggcacagggactcactatggcaccatattaccacatcttctcaagcttgccagcttcacctctgacaaattcagacagactcccaggggc

SEQ ID NO: 14115 - DNA, 110 bp, synthetic construct
  source 1..110: mol_type = other DNA
ccatcatttttctgcccatttccttgaccctggtcaagttcctgatgactgacaccatcctttcattacaagcagcagcaggagggaaggaggccaccactggtaatcac

SEQ ID NO: 14116 - DNA, 110 bp, synthetic construct
  source 1..110: mol_type = other DNA
catcctttcattacaagcagcagcaggagggaaggaggccaccactggtaatcactctggtaccactagtgccctcctgactgtccagacacatgttcaccttcttatgg

SEQ ID NO: 14117 - DNA, 110 bp, synthetic construct
  source 1..110: mol_type = other DNA
gcagctgtccagcaagacttattatgtggatcagcagatgagatatcaccatatgcaacagagtatttacttttgtagacatgctgccagtctttgatagatgtgttggg

SEQ ID NO: 14118 - DNA, 110 bp, synthetic construct
  source 1..110: mol_type = other DNA
caacagagtatttacttttgtagacatgctgccagtctttgatagatgtgttgggtcttgcacgtaccatccttcccattacagaagtcccagaacctgagaaagtgcta

SEQ ID NO: 14119 - DNA, 110 bp, synthetic construct
  source 1..110: mol_type = other DNA
atttgggatttcataccgtttttgcacctgaaatcttgtctctgttctggcaagaccgtgttcaagactttggtcaaaacacggaaataaaaatggtcctcaggtattta

SEQ ID NO: 14120 - DNA, 110 bp, synthetic construct
  source 1..110: mol_type = other DNA
ccgtgttcaagactttggtcaaaacacggaaataaaaatggtcctcaggtatttatttttgttattattaatcctgctctttttcttctaattattaccgctgccactag

SEQ ID NO: 14121 - DNA, 110 bp, synthetic construct
  source 1..110: mol_type = other DNA
cagatgttccctacagggaaaatgtgggctgggattggagagtataattggaattcaaagaccagcggaaaatgaaaagaaggaaatgtactttaatactggaactgaga

SEQ ID NO: 14122 - DNA, 110 bp, synthetic construct
  source 1..110: mol_type = other DNA
caaagaccagcggaaaatgaaaagaaggaaatgtactttaatactggaactgagagattaaaccaaactggccaagcttcacttgcatcccttactataaaggcaattta

SEQ ID NO: 14123 - DNA, 110 bp, synthetic construct
  source 1..110: mol_type = other DNA
gggatgtaaaagatctttgttctttctctggacttatgcaatgtcctgctgtctccaggctgtaagccagaaagaaggaagatgacgaacatactttgggaaccaaaaaa

SEQ ID NO: 14124 - DNA, 110 bp, synthetic construct
  source 1..110: mol_type = other DNA
caggctgtaagccagaaagaaggaagatgacgaacatactttgggaaccaaaaaacaaatattcagggggattccctggtggtcgagtagttaggattcaggactttcgc

SEQ ID NO: 14125 - DNA, 110 bp, synthetic construct
  source 1..110: mol_type = other DNA
cttttagccactgtggagggttctcattcctgctttggctgctcataatttagctattactttatatttcctccatctgacctttaataaatggtaaaattgactgagtc

SEQ ID NO: 14126 - DNA, 110 bp, synthetic construct
  source 1..110: mol_type = other DNA
attactttatatttcctccatctgacctttaataaatggtaaaattgactgagtcaagtatcctcctccttctctcacaggcagtaaatctctcttttttcctggaaaaa

SEQ ID NO: 14127 - DNA, 110 bp, synthetic construct
  source 1..110: mol_type = other DNA
catgatttatgtagtgataggtgacaaggaaactggtttgctaccacaccaatggctattaggaaaattaatccttgctatttctccagaacaataagctcagttctgcc

SEQ ID NO: 14128 - DNA, 110 bp, synthetic construct
  source 1..110: mol_type = other DNA
ctattaggaaaattaatccttgctatttctccagaacaataagctcagttctgcctctacttaaaattctctttccaaatctctcatggcttcctccctcacttcagtga

SEQ ID NO: 14129 - DNA, 110 bp, synthetic construct
  source 1..110: mol_type = other DNA
gttaatttttagatcaggccctgcaggtaatttaaaattcattgcattgcctattttaccagtctactatggtgtaggaaatggcttcccttgttgcttcttcccttatc

SEQ ID NO: 14130 - DNA, 110 bp, synthetic construct
  source 1..110: mol_type = other DNA
ttaccagtctactatggtgtaggaaatggcttcccttgttgcttcttcccttatcaagaggtgcactgctacagttactatctgtagagttatttatatgatcaactgtc

SEQ ID NO: 14131 - DNA, 110 bp, synthetic construct
  source 1..110: mol_type = other DNA
tcaggcacacgacccttgttccctgcaagaagcctcagatactcggcctagctatctggcagagaggaagaggaaagcctggattatacaccctattcttccaaatgttg

SEQ ID NO: 14132 - DNA, 110 bp, synthetic construct
  source 1..110: mol_type = other DNA
atgctgacagtgcttgtcttttctcattactcccatgttttcatgtttatcttagctattctcacatgttcattttcttccagatgaacttcagagtaatctagtattta

SEQ ID NO: 14133 - DNA, 110 bp, synthetic construct; identical to SEQ ID NO: 14132
  source 1..110: mol_type = other DNA

SEQ ID NO: 14134 - DNA, 110 bp, synthetic construct
  source 1..110: mol_type = other DNA
atcatccaagaagagagggatgggaaaagacctcttcttcctctttcttctagtagcagctcctccttggtatccagtaggacagtatttgaccctataaaatcgaacta

SEQ ID NO: 14135 - DNA, 110 bp, synthetic construct
  source 1..110: mol_type = other DNA
agggatgggaaaagacctcttcttcctctttcttctagtagcagctcctccttggtatccagtaggacagtatttgaccctataaaatcgaactaggactgtcatggtgc

SEQ ID NO: 14136 - DNA, 110 bp, synthetic construct
  source 1..110: mol_type = other DNA
ttgaaattttaggaaagaatcctctcattgttaatctagtgtctgaatttttttttttttctgacaatggaagttgattccagaggaaaatagtttgtgagctcagttca

SEQ ID NO: 14137 - DNA, 110 bp, synthetic construct
  source 1..110: mol_type = other DNA
tttttctgacaatggaagttgattccagaggaaaatagtttgtgagctcagttcaaggaatctctaatttattagtgtagtatgtggtagttaacatttcctccttggta

SEQ ID NO: 14138 - DNA, 110 bp, synthetic construct
  source 1..110: mol_type = other DNA
ttccagcaaggggctaaaagcagtccaggccttgtttggacttggaggatttttcatgagatctgaaaataaaagaaacaaaatgacaagtcactgacactacaggatga

SEQ ID NO: 14139 - DNA, 110 bp, synthetic construct
  source 1..110: mol_type = other DNA
atgagatctgaaaataaaagaaacaaaatgacaagtcactgacactacaggatgattctcatagtttacttgtgggtctgccaaacacacgtgttaaaccccaagggact

SEQ ID NO: 14140 - DNA, 110 bp, synthetic construct
  source 1..110: mol_type = other DNA
ctgtggttggaaggtggggcagtggacggaacaggaaggcatctcagagaagatgactcaatttcttgattttaagcatttcgccccatgcttaagttaggcaagctaga

SEQ ID NO: 14141 - DNA, 110 bp, synthetic construct
  source 1..110: mol_type = other DNA
actcaatttcttgattttaagcatttcgccccatgcttaagttaggcaagctagaggatgtcccaggcagacatacatgcaaacagtgagacatatgaatctctctaagg

SEQ ID NO: 14142 - DNA, 110 bp, synthetic construct
  source 1..110: mol_type = other DNA
ctttgtgcttctatgtaaaaatagattttaaatgtgcagagaagattgtgtcctctgaagctgaaggtcccagtgtagaaagcaaatgtctcagattactaactggaaca

SEQ ID NO: 14143 - DNA, 110 bp, synthetic construct
  source 1..110: mol_type = other DNA
tgaagctgaaggtcccagtgtagaaagcaaatgtctcagattactaactggaacagaaaaaataaaaaagtagtctgactttcacactcttaaactcctctccaatgcag

SEQ ID NO: 14144 - DNA, 110 bp, synthetic construct
  source 1..110: mol_type = other DNA
gttctctttttccttacggcaaaaatactgatgattttgaaaccacacaacttcgattgagaattgaacccacaggctggaattctaatcctgccaaaaccatgattgac

SEQ ID NO: 14145 - DNA, 110 bp, synthetic construct
  source 1..110: mol_type = other DNA
tggttgtttgatgctatatcaatacagttgatttttatatatcgacgaggtgtcagcagctttgctaaattcacttattaatgtcgataacttgtccataggtccttttg

SEQ ID NO: 14146 - DNA, 110 bp, synthetic construct; identical to SEQ ID NO: 14145
  source 1..110: mol_type = other DNA

SEQ ID NO: 14147 - DNA, 110 bp, synthetic construct
  source 1..110: mol_type = other DNA
accagggtgtgggcagggttgggtccttgtaatggtcacgtgggaagggtctgctccaggcccccctccagctctgtagacgaccacctgtccctgtgtcttcacatcgt

SEQ ID NO: 14148 - DNA, 110 bp, synthetic construct
  source 1..110: mol_type = other DNA
ccaggcccccctccagctctgtagacgaccacctgtccctgtgtcttcacatcgtcttccctctgtgcacaagttccttctttatatcaggataccagtcacatggacta

SEQ ID NO: 14149 - DNA, 110 bp, synthetic construct
  source 1..110: mol_type = other DNA
catttttgaaaactcccctttgagctatttcagagttctgattgctcactacttaatcagagaaccatttccttaattagagccaggcagaaaatttactctgaatcttg

SEQ ID NO: 14150 - DNA, 110 bp, synthetic construct
  source 1..110: mol_type = other DNA
atcagagaaccatttccttaattagagccaggcagaaaatttactctgaatcttgatcaaagatgcttaaaatatgaagctttgtttatatgccactcctaggagatcag

SEQ ID NO: 14151 - DNA, 110 bp, synthetic construct
  source 1..110: mol_type = other DNA
tgttacttagtgatgcacaatacttgtttatagtaaaagtaattttgctagctggaggaggatggtgaaagtctcttggaaaatctgggaagggaccctcatgggtatgg

SEQ ID NO: 14152 - DNA, 110 bp, synthetic construct
  source 1..110: mol_type = other DNA
agaatattgacctgggaatttagggaactggttggtattagttttgcctttgctgtgtgtgaccatagtttgaactctgtatgtatcagttttatcactcataatctaaa

SEQ ID NO: 14153 - DNA, 110 bp, synthetic construct
  source 1..110: mol_type = other DNA
tgtgtgaccatagtttgaactctgtatgtatcagttttatcactcataatctaaaggaattggttacaataggttaggattggcagctattgctcagaagccaaatcctg

SEQ ID NO: 14154 - DNA, 110 bp, synthetic construct
  source 1..110: mol_type = other DNA
ctcttcaccttatgtgcaccatacaacgctgttggacctaacttcaaattatcaatagcgtattggggtttgacaaccaaagtggatttttttattctttttaaatatcc

SEQ ID NO: 14155 - DNA, 110 bp, synthetic construct
  source 1..110: mol_type = other DNA
acgctgttggacctaacttcaaattatcaatagcgtattggggtttgacaaccaaagtggatttttttattctttttaaatatcccttcacctatgaaacaaaattgttt

SEQ ID NO: 14156 - DNA, 110 bp, synthetic construct
  source 1..110: mol_type = other DNA
cagtaagcaagttcttaagtctcatctcttcctacatgcatctgtctctttagattttagctaatagttttctagcaacatcagctttctggtgtgtccaagaaaagtca

SEQ ID NO: 14157 - DNA, 110 bp, synthetic construct
  source 1..110: mol_type = other DNA
tgccatgaccctgccactaatgcaacacctggcagtcatctacatttgcttgctgctgtcaatgctgtaacagctactgcagctgctgcagtcaagaatccatgaaccca

SEQ ID NO: 14158 - DNA, 110 bp, synthetic construct
  source 1..110: mol_type = other DNA
ctgctctgtttatttgcttatttatttatttatttattattatggctgcagttgtggaatatggaagttcccaggacagggattgaatctgagccaaagtgtcaacatat

SEQ ID NO: 14159 - DNA, 110 bp, synthetic construct
  source 1..110: mol_type = other DNA
ttatttatttattattatggctgcagttgtggaatatggaagttcccaggacagggattgaatctgagccaaagtgtcaacatatgccacagcagtggcaatgctggatc

SEQ ID NO: 14160 - DNA, 110 bp, synthetic construct
  source 1..110: mol_type = other DNA
atgtattttaaaagggaccatgtggcctttagaacctaaaatattttccatttgaccctttataggaagtttaccaactcctatcccagggcagcaaaatcatttgaagg

SEQ ID NO: 14161 - DNA, 110 bp, synthetic construct
  source 1..110: mol_type = other DNA
ccctttataggaagtttaccaactcctatcccagggcagcaaaatcatttgaaggacttgtgaacatgcattgctgggttctacctgcagaagttttgattcagagacct

SEQ ID NO: 14162 - DNA, 110 bp, synthetic construct
  source 1..110: mol_type = other DNA
agccatgagctggattccagaagcgctcaaggcacacagtctgacccacaaaatgtggattcatcaagatccttggaacttctagctcttttcctttgttttcacttcct

SEQ ID NO: 14163 - DNA, 110 bp, synthetic construct
  source 1..110: mol_type = other DNA
tggattcatcaagatccttggaacttctagctcttttcctttgttttcacttcctctcctttctctgctgatgtgaatgttatcactccaaaccctcatcacctccttta

SEQ ID NO: 14164 - DNA, 110 bp, synthetic construct
  source 1..110: mol_type = other DNA
atgtgttggacctcaagtcacacaaaaaataaaaatatctcacgactataatctataacattgtactttctcaggatactcagcttcagataatctcacttaaaaggtct

SEQ ID NO: 14165 - DNA, 110 bp, synthetic construct
  source 1..110: mol_type = other DNA
taacattgtactttctcaggatactcagcttcagataatctcacttaaaaggtctggaagtactataaagaactgaggtccagagaggcatttttcacatcagcttaacc

SEQ ID NO: 14166 - DNA, 110 bp, synthetic construct
  source 1..110: mol_type = other DNA
atcaggtgggaaaaggaatttaatacatttgcaacacctgatatgattctcagccaaaccctcaatgggccatggcttgggatggttctcttgaattgcccagaattgag

SEQ ID NO: 14167 - DNA, 110 bp, synthetic construct
  source 1..110: mol_type = other DNA
tctagagttcccttaaatctatcaagtgtgtctgtctggtctctgttaccctaaacataagattttttagagcaggggccctggggtgtttttatctagcttgtcctcag

SEQ ID NO: 14168 - DNA, 110 bp, synthetic construct
  source 1..110: mol_type = other DNA
cataagattttttagagcaggggccctggggtgtttttatctagcttgtcctcagtgcattttagatactcaattatatgttggttaacttcaaacaaacaaacaaaaat

SEQ ID NO: 14169 - DNA, 110 bp, synthetic construct
  source 1..110: mol_type = other DNA
actgaaaaatgggctatgaattaaataagacgttggtgaagagacccgcaaagccttttgattcttttgatgaaaaattatgttgttctgtaaaagcttggtcagaagga

SEQ ID NO: 14170 - DNA, 110 bp, synthetic construct
  source 1..110: mol_type = other DNA
ttttgattcttttgatgaaaaattatgttgttctgtaaaagcttggtcagaaggattttgcaattcaaatgatgtttagtgcagttcggtgcttggcatagagaatagta

SEQ ID NO: 14171 - DNA, 110 bp, synthetic construct
  source 1..110: mol_type = other DNA
atgtccctggtagagaaataaaaccaggcatagttttcagctgatctggagaaatcttacagcttaggcaggttgaagtagcccaaaataagaaacgggactcttcagag

SEQ ID NO: 14172 - DNA, 110 bp, synthetic construct
  source 1..110: mol_type = other DNA
tgttcttttacatatctcttgtgtagatagtcttattttctctaagctaacatgtagatagaatagagcagaggctgggaaaccttttctggaaagggacaaatactaaa

SEQ ID NO: 14173 - DNA, 110 bp, synthetic construct; identical to SEQ ID NO: 14172
  source 1..110: mol_type = other DNA

SEQ ID NO: 14174 - DNA, 110 bp, synthetic construct
  source 1..110: mol_type = other DNA
gccttgggcccaaggagaaataagttagtcctcttcatatgctcaaactcaatattgataattaatatactcctcaaacagagcgatttttttagctttcttaaactatt

SEQ ID NO: 14175 - DNA, 110 bp, synthetic construct
  source 1..110: mol_type = other DNA
aagtgaaaacccatggtttcaaatcatttaggaattcctaatacctatattaagacctgcaaactccaatgatgacaggaatcaaacaggttatgtaaagaaagaggcta

SEQ ID NO: 14176 - DNA, 110 bp, synthetic construct
  source 1..110: mol_type = other DNA
cctgcaaactccaatgatgacaggaatcaaacaggttatgtaaagaaagaggctaggcagatggaagataataaatggtaacaatacccagattcagtgttgtagacaat

SEQ ID NO: 14177 - DNA, 110 bp, synthetic construct
  source 1..110: mol_type = other DNA
tagttcatgtcttccatttggcggagggcagggggggttagcatctgtacaacagctcaggaaatgcacagtagatactaatgtctgggtacttctgagagaagcaaagg

SEQ ID NO: 14178 - DNA, 110 bp, synthetic construct
  source 1..110: mol_type = other DNA
ctcaggaaatgcacagtagatactaatgtctgggtacttctgagagaagcaaaggaagaggatttggaggaataatctgtcctgggaaggtcacatggggtcctgctgag

SEQ ID NO: 14179 - DNA, 110 bp, synthetic construct
  source 1..110: mol_type = other DNA
aaaacagctatttttgtcacactagtcactgcatggtctttgttcctccaagtttaatggctacatgttcttctcttccaactgctctgctgatcctctgacaaacagcc

SEQ ID NO: 14180 - DNA, 110 bp, synthetic construct
  source 1..110: mol_type = other DNA
aatggctacatgttcttctcttccaactgctctgctgatcctctgacaaacagccccaaacgggaattccagaataatgtccagtctttaccagaaaactgtctatcctg

SEQ ID NO: 14181 - DNA, 110 bp, synthetic construct
  source 1..110: mol_type = other DNA
aatgactccctcgatttttctgtatcatggtcttgactcattatcttctccccactagtacctccttcactcactgggagaggacttactccactaactgggatctctaa

SEQ ID NO: 14182 - DNA, 110 bp, synthetic construct
  source 1..110: mol_type = other DNA
tagtacctccttcactcactgggagaggacttactccactaactgggatctctaagctcttggtatagtgccttcaagattaggagatggattctggatgcctgggtgtt

SEQ ID NO: 14183 - DNA, 110 bp, synthetic construct
  source 1..110: mol_type = other DNA
tgatgtagatactgctggcagacagtttaggaacaggttctactacaaggacactggtgatagcaagcttcattttggaatcctccctctaacgcataagtgctagagac

SEQ ID NO: 14184 - DNA, 110 bp, synthetic construct
  source 1..110: mol_type = other DNA
ggtgatagcaagcttcattttggaatcctccctctaacgcataagtgctagagacttaccccgccaccagccattcaacatatgtgccaggctacttgagacaagggagc

SEQ ID NO: 14185 - DNA, 110 bp, synthetic construct
  source 1..110: mol_type = other DNA
cacctttggcagtcaggggagctccatgtgcaggcagcagagcaggatggtcacacagtgatcactggagaccagagaaagttgttgagtccttcctttgttgtctctgt

SEQ ID NO: 14186 - DNA, 110 bp, synthetic construct
  source 1..110: mol_type = other DNA
cagtgatcactggagaccagagaaagttgttgagtccttcctttgttgtctctgtctttattgacacctcatttaacttctctctttggaagccttttcaggtgcatagt

SEQ ID NO: 14187 - DNA, 110 bp, synthetic construct
  source 1..110: mol_type = other DNA
aaataacatacaaaatatgtgttaatccaagtttatgttattgggaaggcttctggtcaatagtaggctattagtaattaagttttcatggagtcaaaagttacatgtgg

SEQ ID NO: 14188 - DNA, 110 bp, synthetic construct; identical to SEQ ID NO: 14187
  source 1..110: mol_type = other DNA

SEQ ID NO: 14189 - DNA, 110 bp, synthetic construct
  source 1..110: mol_type = other DNA
tggggtacctggagacatgatccagccaccctgctctgcctctcagctaacctcagtaatcccatctcctcattcaagtgagtttcaagtctccacagaaaaattcaagt

SEQ ID NO: 14190 - DNA, 110 bp, synthetic construct
  source 1..110: mol_type = other DNA
tccagttcagcttcctacctacagaattatggcaggacgtgagtttggccctcgtgagatgaataggtcagcagaaacatattcttgtcttcctaatagcaggcatctct

SEQ ID NO: 14191 - DNA, 110 bp, synthetic construct
  source 1..110: mol_type = other DNA
taagtacagcagaatattttaggggatcagagaagggatgaaggctgtggagatggctctcctgcatagctttaattgatggcttccaaatgtttatcccagctaaacct

SEQ ID NO: 14192 - DNA, 110 bp, synthetic construct
  source 1..110: mol_type = other DNA
cctgtcagaatggctattgtcaaaaagaccccaagtaacaaatgctgtcgaggatgtggaaaaaagagaaccttggtacatcgtggaatgtgaattgtttcagctactgt

SEQ ID NO: 14193 - DNA, 110 bp, synthetic construct
  source 1..110: mol_type = other DNA
attgtcaaaaagaccccaagtaacaaatgctgtcgaggatgtggaaaaaagagaaccttggtacatcgtggaatgtgaattgtttcagctactgtggaaaacagtatgga

SEQ ID NO: 14194 - DNA, 110 bp, synthetic construct
  source 1..110: mol_type = other DNA
gttaatctgcacaaaggaagccagctgacaaaaatgaatagaactcaacataaacagcgatggcggtgtaaatgtccacaaacgcaggagataagtggagaagtgttttt

SEQ ID NO: 14195 - DNA, 110 bp, synthetic construct
  source 1..110: mol_type = other DNA
agcgatggcggtgtaaatgtccacaaacgcaggagataagtggagaagtgttttttcctatttcctgtgagtttctaggcattaaagaaaactctaaaaaaatgttttgg

SEQ ID NO: 14196 - DNA, 110 bp, synthetic construct
  source 1..110: mol_type = other DNA
ccctagcaggactgaactccagctgcccacgggacaacttcgaagtgacacagcctgtacctgtatcacctccctcactgcccaccactgcttcctgagatgccccatag

SEQ ID NO: 14197 - DNA, 110 bp, synthetic construct
  source 1..110: mol_type = other DNA
ggtaggatggcttacagtagaaacgaatgctttgtttctcggtcatgataatgtacatggattcaggaggccagttctggatcaagctgtttcccagctatgtgaccttg

SEQ ID NO: 14198 - DNA, 110 bp, synthetic construct
  source 1..110: mol_type = other DNA
agttatgcatatatgtatgtgtatgaaaaatatactcttttccattatgatttatcacaggatattgagtagagttccctggaccatgcagtaggaccttgttgtttgtc

SEQ ID NO: 14199 - DNA, 110 bp, synthetic construct
  source 1..110: mol_type = other DNA
cacaggatattgagtagagttccctggaccatgcagtaggaccttgttgtttgtccatcctgtatatactagtttgcctctgctaaccccaaactcccgatccttccctc

SEQ ID NO: 14200 - DNA, 110 bp, synthetic construct
  source 1..110: mol_type = other DNA
agcaaaaccaaaaacaaaaacacatggagctgaaaatcaagctgtgatagcaaacaagtaggataagggacttagaagtggctgatgagagtagtcctcagtgaggaggt

SEQ ID NO: 14201 - DNA, 110 bp, synthetic construct
  source 1..110: mol_type = other DNA
aagtaggataagggacttagaagtggctgatgagagtagtcctcagtgaggaggtgtgaggtctgagaaggaaggagctgaccttgcatatggttggggtggggtggcgg

SEQ ID NO: 14202 - DNA, 110 bp, synthetic construct
  source 1..110: mol_type = other DNA
ggggcataatccgacatgtctaagacggcagatggaatcagggaggcacaggggttttgtctaggttgtgggtctcgccccacgtttgataggaggctgtcaggtgtttg

SEQ ID NO: 14203 - DNA, 110 bp, synthetic construct
  source 1..110: mol_type = other DNA
tttgtctaggttgtgggtctcgccccacgtttgataggaggctgtcaggtgtttgggcagaagggggacatacctggattttaatagctccaagatggttgttacatgga

SEQ ID NO: 14204 - DNA, 110 bp, synthetic construct
  source 1..110: mol_type = other DNA
tgcccctagtcctttataggacctgctctggcccctcttccagcttccctcaagcatcccagcatcacagaggccttgccacccccacacactctcttgtctctccctcc

SEQ ID NO: 14205 - DNA, 110 bp, synthetic construct
  source 1..110: mol_type = other DNA
cctcactcacaatagctctctatctgcacatccaaaccttcatatcttcccctcactccactccttgatttcctccctttaaaaaggtcttcattcccatatgcacttga

SEQ ID NO: 14206 - DNA, 110 bp, synthetic construct
  source 1..110: mol_type = other DNA
gtttcacacatggaatgttaagctaaagaagtcaaacagcaaagaatacatgaagtatgatgccccttatatacaacttagacataagcaatactaatctatgatgtgga

SEQ ID NO: 14207 - DNA, 110 bp, synthetic construct
  source 1..110: mol_type = other DNA
cagtgataaaagcctgaataacaacatactttttaaaatgtgtatttcagtgacctatgaaaccaggaattagttataaaaacaagattcattctaattgctccctactc

SEQ ID NO: 14208 - DNA, 110 bp, synthetic construct
  source 1..110: mol_type = other DNA
aaacttccttgaatatagcagtcatccagcagtgatctatttaccccttgcccggatagctcttttcttcatattaatctgcactgtaattcagcaaagcaaaagaattt

SEQ ID NO: 14209 - DNA, 110 bp, synthetic construct
  source 1..110: mol_type = other DNA
tcttaagggcatgagctttggggcttgaggaaactatctctttatgaaagtgtttcaagaagggagactgcttccagggcccaagaatgggttcttgtctaacactcaga

SEQ ID NO: 14210 - DNA, 110 bp, synthetic construct
  source 1..110: mol_type = other DNA
tgaggaaactatctctttatgaaagtgtttcaagaagggagactgcttccagggcccaagaatgggttcttgtctaacactcagaaaagaattgtctgaggagtcacacg

SEQ ID NO: 14211 - DNA, 110 bp, synthetic construct
  source 1..110: mol_type = other DNA
ccttaacagtcaaattatggagtagctcaatcacccccaaagtccctttatttactttgtaagtccatgccctcttcctacccccgtttttagataaacacacagagtat

SEQ ID NO: 14212 - DNA, 110 bp, synthetic construct
  source 1..110: mol_type = other DNA
ctcagaatgagacctacctaactggcacctggatcttggtgagccctgaggagatgctgggtaagaaagtgcaggatactggctccagagagctgacctgcatattaaag

SEQ ID NO: 14213 - DNA, 110 bp, synthetic construct
  source 1..110: mol_type = other DNA
acctaactggcacctggatcttggtgagccctgaggagatgctgggtaagaaagtgcaggatactggctccagagagctgacctgcatattaaaggaatgatttcagtga

SEQ ID NO: 14214 - DNA, 110 bp, synthetic construct; identical to SEQ ID NO: 14212
  source 1..110: mol_type = other DNA

SEQ ID NO: 14215 - DNA, 110 bp, synthetic construct; identical to SEQ ID NO: 14213
  source 1..110: mol_type = other DNA

SEQ ID NO: 14216 - DNA, 110 bp, synthetic construct
  source 1..110: mol_type = other DNA
aaagaaaggcagtccctctcaatccatggaccagaagggagggggccaaaagataaagcccccctctgtggtaccctcattggctgaatcaaccagtgttcagagggcaa

SEQ ID NO: 14217 - DNA, 110 bp, synthetic construct
  source 1..110: mol_type = other DNA
aagcccccctctgtggtaccctcattggctgaatcaaccagtgttcagagggcaacagagctggtgctgcacaaagaggtctgcctcccgggcccagagcaggggtggat

SEQ ID NO: 14218 - DNA, 110 bp, synthetic construct
  source 1..110: mol_type = other DNA
cctgagtttatgctgatgccattgactagatggcacttactacatgatgctacgtggagaagttacatggtcaattggtgtttcatggaaggtactgcatcttccttggc

SEQ ID NO: 14219 - DNA, 110 bp, synthetic construct
  source 1..110: mol_type = other DNA
ggagaagttacatggtcaattggtgtttcatggaaggtactgcatcttccttggcctcagtagcaaaccaaaagttatttttcaaaagaacaatagcttgaaaagggcat

SEQ ID NO: 14220 - DNA, 110 bp, synthetic construct
  source 1..110: mol_type = other DNA
ttatatgatttttatttaaaaaacatacatgcaataagatgttgggggaaaaacgtatgagtaattgtttcccttttctgccgaaaacaaagaaataagccaaaccaacc

SEQ ID NO: 14221 - DNA, 110 bp, synthetic construct
  source 1..110: mol_type = other DNA
tatgagtaattgtttcccttttctgccgaaaacaaagaaataagccaaaccaaccaaccactggcttttctcctttgacccagcttctaaatctagaagaagggagtctc

SEQ ID NO: 14222 - DNA, 110 bp, synthetic construct
  source 1..110: mol_type = other DNA
aaatccacagctaacatcatactcagtggtgaaaagctgaaggcattttctctaagattaggaacaagatgaggatgttcactctcaccactgttattaaacatgatatt

SEQ ID NO: 14223 - DNA, 110 bp, synthetic construct; identical to SEQ ID NO: 14222
  source 1..110: mol_type = other DNA

SEQ ID NO: 14224 - DNA, 110 bp, synthetic construct
  source 1..110: mol_type = other DNA
ccttgcacttttctagggtgcaaacttagcatcaaagcagagatgaggggtccaaaatgttcagtttctgatgagatgagctattcctatgctgccttggcttgttgctc

SEQ ID NO: 14225 - DNA, 110 bp, synthetic construct
  source 1..110: mol_type = other DNA
aatgttcagtttctgatgagatgagctattcctatgctgccttggcttgttgctcacacactgcatttcttgtgtcagccattgcgccctgtgttatgttacatcagggg

SEQ ID NO: 14226 - DNA, 110 bp, synthetic construct
  source 1..110: mol_type = other DNA
gaaattgaaaaaagtatgccaaaatgatgggctgatgtcaaagtctaacttgctttagagtagctcacaattagttttcttttattttaaataaacacacatactggctt

SEQ ID NO: 14227 - DNA, 110 bp, synthetic construct
  source 1..110: mol_type = other DNA
ggcaggaggggaaaggaatatttgatgagattgggcaagccaatttccatgttttctgggaagtcctgcttctttctagtcacttaaccaacatctgttgagctgtgact

SEQ ID NO: 14228 - DNA, 110 bp, synthetic construct
  source 1..110: mol_type = other DNA
ctgggaagtcctgcttctttctagtcacttaaccaacatctgttgagctgtgacttggggaagagtatggcacagcccaggggcttcagaggccagtcctaaagcctgtg

SEQ ID NO: 14229 - DNA, 110 bp, synthetic construct
  source 1..110: mol_type = other DNA
gaccacaatttgagtgataaagatgaggttattaaagctgtagttgaatctgcaacttacctaaggtctcagactcaagaggcaaggtgaacccagaacccatgactatg

SEQ ID NO: 14230 - DNA, 110 bp, synthetic construct
  source 1..110: mol_type = other DNA
cttacctaaggtctcagactcaagaggcaaggtgaacccagaacccatgactatgagtttatagttttttctgccatcttataagaaataagatgagagggtggataaat

SEQ ID NO: 14231 - DNA, 110 bp, synthetic construct
  source 1..110: mol_type = other DNA
gacatcttccccatctctagcaaactctatgagtaccaggaacaaaccagatagtattccactagtgtgatacatttgctgttctggcttttctcagcttgttccgatat

SEQ ID NO: 14232 - DNA, 110 bp, synthetic construct
  source 1..110: mol_type = other DNA
attccactagtgtgatacatttgctgttctggcttttctcagcttgttccgatattgatctgaggaggaattagaagttatcttctgtgctgctttttgcagaactgatt

SEQ ID NO: 14233 - DNA, 110 bp, synthetic construct; identical to SEQ ID NO: 14231
  source 1..110: mol_type = other DNA

SEQ ID NO: 14234 - DNA, 110 bp, synthetic construct; identical to SEQ ID NO: 14232
  source 1..110: mol_type = other DNA

SEQ ID NO: 14235 - DNA, 110 bp, synthetic construct
  source 1..110: mol_type = other DNA
ttacaaatgaagacgctaaagccccataggccattccttatccaaggccatctggttatagtgtttcttcaaagcatccttctgagaccagcaccatcaactcacctagg

SEQ ID NO: 14236 - DNA, 110 bp, synthetic construct
  source 1..110: mol_type = other DNA
ttatagtgtttcttcaaagcatccttctgagaccagcaccatcaactcacctaggaatttgttaggaattcaaattcccagtgtccactccagacctcctgagtcagaag

SEQ ID NO: 14237 - DNA, 110 bp, synthetic construct
  source 1..110: mol_type = other DNA
caagagtaaaacatgctgccgtggacaaaggatgcagggctggatgagttcctgtttcagatgttcaaggattgcaatgagcgtttcaaagctgaggggaggggcacgtg

SEQ ID NO: 14238 - DNA, 110 bp, synthetic construct
  source 1..110: mol_type = other DNA
ttcagatgttcaaggattgcaatgagcgtttcaaagctgaggggaggggcacgtggcgtgcaggggatcctggatgggggcttccactggctctgctctggcagtagccc

SEQ ID NO: 14239 - DNA, 110 bp, synthetic construct
  source 1..110: mol_type = other DNA
ggtaacaaggtggtgtcacaggggttaacttgattcacccttaggtgccaataggttgggggccacgtactcatgaccatcaagtggctaattttttccagttggtggta

SEQ ID NO: 14240 - DNA, 110 bp, synthetic construct
  source 1..110: mol_type = other DNA
ttgggggccacgtactcatgaccatcaagtggctaattttttccagttggtggtagttttgttactggaatctgggttcttgttcttggagccaaagaatgaactttaag

SEQ ID NO: 14241 - DNA, 110 bp, synthetic construct
  source 1..110: mol_type = other DNA
aggaccaacccttctgctgatttgaatgcagtcttagtttgactttatagagtcaaatactctcttactggataaaaaggaggagctactacacaagaaagaggaagagg

SEQ ID NO: 14242 - DNA, 110 bp, synthetic construct
  source 1..110: mol_type = other DNA
aatactctcttactggataaaaaggaggagctactacacaagaaagaggaagaggcagtctttcccaaccccactccccttggattctagaaatgtagcccacctaatcc

SEQ ID NO: 14243 - DNA, 110 bp, synthetic construct
  source 1..110: mol_type = other DNA
gacaatgctggatccttaacccactgcactacagtgggaaatctcaattatcgactcttgagcccagtttttgtggctcaggggaggcctggaagactgcagcttttcca

SEQ ID NO: 14244 - DNA, 110 bp, synthetic construct
  source 1..110: mol_type = other DNA
tcttgagcccagtttttgtggctcaggggaggcctggaagactgcagcttttccacaaacaagaagcaggcagaaggtcctgttcagtttcactattatgaatctcactt

SEQ ID NO: 14245 - DNA, 110 bp, synthetic construct
  source 1..110: mol_type = other DNA
ctaaaaaacttgacagcaagattccctttagtttccactgactgaaatcaggactgatgcctgtccttcattgcaaagcctgctgggaaagcaagtgttcagcctctagg

SEQ ID NO: 14246 - DNA, 110 bp, synthetic construct
  source 1..110: mol_type = other DNA
gatgcctgtccttcattgcaaagcctgctgggaaagcaagtgttcagcctctagggtgagatgtggactctgtgggaagaatgatggggaggagactggtcatttggttg

SEQ ID NO: 14247 - DNA, 110 bp, synthetic construct
  source 1..110: mol_type = other DNA
aataagccttcaaataagtattaactaaccacacacccctttagatgattctaaatgaaattaaatggattctcaaccatcttagccaagtgcttctgtcaagttgagtg

SEQ ID NO: 14248 - DNA, 110 bp, synthetic construct; identical to SEQ ID NO: 14247
  source 1..110: mol_type = other DNA

SEQ ID NO: 14249 - DNA, 110 bp, synthetic construct
  source 1..110: mol_type = other DNA
tctttgtcactctccaactggagagacacaaaggcctccctgacatcttcatccaggacccctttttaacaagctcagacccagagttcccgttgtggcacaggggaaat

SEQ ID NO: 14250 - DNA, 110 bp, synthetic construct
  source 1..110: mol_type = other DNA
ctccctgacatcttcatccaggacccctttttaacaagctcagacccagagttcccgttgtggcacaggggaaatgaacctgactcgtgaccatgaggttatgggttcga

SEQ ID NO: 14251 - DNA, 110 bp, synthetic construct
  source 1..110: mol_type = other DNA
ttattactttttttttttttttcttcccacttatcttaacctggctggttggttcaccaagctagagtaaatgctaggatggggaatatgcattcagttttatttaaacc

SEQ ID NO: 14252 - DNA, 110 bp, synthetic construct
  source 1..110: mol_type = other DNA
accaagctagagtaaatgctaggatggggaatatgcattcagttttatttaaaccagcatcttatgtctggggaagtcttactgttacctgcagacaattaactgagttt

SEQ ID NO: 14253 - DNA, 110 bp, synthetic construct
  source 1..110: mol_type = other DNA
ctcctgagacagtcttattgtatctggactccaaccagatcacatccatccccaatgagatttttaaggacctccatcaactgagagttctcaacctgtccaaaaatggc

SEQ ID NO: 14254 - DNA, 110 bp, synthetic construct
  source 1..110: mol_type = other DNA
tgagatttttaaggacctccatcaactgagagttctcaacctgtccaaaaatggcattgagtttattgatgagcatgccttcaaaggagtagctgaaactttgcagactc

SEQ ID NO: 14255 - DNA, 110 bp, synthetic construct
  source 1..110: mol_type = other DNA
tgtaatggttaactttatgtgtcaacttgactgggccacaggttacccagatgtttggtcaaacattgttctgagtgtgtctatgaaggtgtttggatgagattaacatt

SEQ ID NO: 14256 - DNA, 110 bp, synthetic construct
  source 1..110: mol_type = other DNA
tggtcaaacattgttctgagtgtgtctatgaaggtgtttggatgagattaacatttgaaccctaaagcacattgccctcccccacgtgggtgagtccaatccaatcagtt

SEQ ID NO: 14257 - DNA, 110 bp, synthetic construct
  source 1..110: mol_type = other DNA
ctgcacccatgggatatggaagtccctaggccaggcatcaaatccgagctgcagccatgacctgaccacagttgtggcaacactgggttcttaactcatagtgtcaagct

SEQ ID NO: 14258 - DNA, 110 bp, synthetic construct
  source 1..110: mol_type = other DNA
catgacctgaccacagttgtggcaacactgggttcttaactcatagtgtcaagctggggatcaaacctgaacctcagcagctacccaaactgctgcagagacaataccag

SEQ ID NO: 14259 - DNA, 110 bp, synthetic construct
  source 1..110: mol_type = other DNA
ctatttgcagcataaagtggagaaaataatacagggaattatgccccatgacaggcagaagttcccaggccaggaactgaacccacagcagtgaccggagccaaagcaat

SEQ ID NO: 14260 - DNA, 110 bp, synthetic construct
  source 1..110: mol_type = other DNA
ttcttctccctggaaagctgaggaagacttctgaagtgcatgctcaaaaagagcttacctaaagtaagttataagacagttttcctttagtctccaaagtcttccaatta

SEQ ID NO: 14261 - DNA, 110 bp, synthetic construct
  source 1..110: mol_type = other DNA
tacctaaagtaagttataagacagttttcctttagtctccaaagtcttccaattaagaaaatggtgttaggacttcctgttgtggctcagtggcaacaaactcgactagt

SEQ ID NO: 14262 - DNA, 110 bp, synthetic construct
  source 1..110: mol_type = other DNA
ttagtcttttttaggaactttcatactgttttccacggaagctgcaccagtttataatcccattaagagcgcacaagtgttctctcttctccacatcctcacaacttttg

SEQ ID NO: 14263 - DNA, 110 bp, synthetic construct
  source 1..110: mol_type = other DNA
agcctcccgggtggcttcttaccctccagaacttcactcctcactcagtaatgctacctgaatctctctgtgcacagtgaccagctttcaagaaagagtgttaaaaaaaa

SEQ ID NO: 14264 - DNA, 110 bp, synthetic construct
  source 1..110: mol_type = other DNA
agtcatgcctgttcttaaggagggtgaagagatactgatgtatctgtgacctggagaacctggtttggtttgggcaaagctgaaggcagtgctgaggcacataggataca

SEQ ID NO: 14265 - DNA, 110 bp, synthetic construct
  source 1..110: mol_type = other DNA
gaacctggtttggtttgggcaaagctgaaggcagtgctgaggcacataggatacagctctataaacaagagctttttcaagttcaagcctgttccaaagggagggaggag

SEQ ID NO: 14266 - DNA, 110 bp, synthetic construct
  source 1..110: mol_type = other DNA
actaattaccccttgataagagtgtgtggcagttaaagcagctacttagtcattgctagaattaataaaaatctgtaggaatatccaagcgacacccccatttacgtctc

SEQ ID NO: 14267 - DNA, 110 bp, synthetic construct
  source 1..110: mol_type = other DNA
atgtttcttatcaattgttcgcttacccactaatttgcaaattttcagtaattcacaatgaatctccttatcagtgctggaaatttataaagttctactgactccactag

SEQ ID NO: 14268 - DNA, 110 bp, synthetic construct
  source 1..110: mol_type = other DNA
caatgaatctccttatcagtgctggaaatttataaagttctactgactccactagcttctctttgctttgacattatttatcattgagctatgtaattgtattattgatg

SEQ ID NO: 14269 - DNA, 110 bp, synthetic construct
  source 1..110: mol_type = other DNA
atggaaaagtcttactgtctgagcaacaggatctttaaagagggcttaagctacgactatggcaaaggctgcaagttcaagccagtaggtgaagttttaggcctattaga

SEQ ID NO: 14270 - DNA, 110 bp, synthetic construct
  source 1..110: mol_type = other DNA
aattctttcagattcaggtgaatcaagaagcacaccaagcaattctagtttaagcaataaatatcgataaatcacgtattcaactcctattgaatgtccttttgtttcca

SEQ ID NO: 14271 - DNA, 110 bp, synthetic construct
  source 1..110: mol_type = other DNA
aataaatatcgataaatcacgtattcaactcctattgaatgtccttttgtttccagaaacaaccaccctccatggtagaatcattggccccagttcttcattggttctgg

SEQ ID NO: 14272 - DNA, 110 bp, synthetic construct
  source 1..110: mol_type = other DNA
ggaatcagattcttctaaaattaagagactgagctttaaaatgctgtcaaatgtcttcacatcaataaaatttacggcagcggtcccccaagcagggtaccaaaagcaat

SEQ ID NO: 14273 - DNA, 110 bp, synthetic construct
  source 1..110: mol_type = other DNA
aaaaaaaaaaaaaaaaaagaagcagaatttggtcagcattataagaaaattatacatgaggtgctatgacacccaagaggacggacatgcaatcatcttctgagagggct

SEQ ID NO: 14274 - DNA, 110 bp, synthetic construct
  source 1..110: mol_type = other DNA
atgaggtgctatgacacccaagaggacggacatgcaatcatcttctgagagggctaaggaaaacttcctaaggacggtagcctctgcacgggctcagaaggatggataga

SEQ ID NO: 14275 - DNA, 110 bp, synthetic construct
  source 1..110: mol_type = other DNA
agagagtctgggtctcctgcgagagtagaaggccaggtcctaccatgaagggacgttgggagcctccttcaaatccagcagcagcatagcccttgatgcaagcatcccag

SEQ ID NO: 14276 - DNA, 110 bp, synthetic construct
  source 1..110: mol_type = other DNA
ccaccgtccagtcctctggagctcaggcccagcatggtgggcggcctctttagtggtctcacccaggctgggggcagatccattgggaaatacaggaatctttctctttt

SEQ ID NO: 14277 - DNA, 110 bp, synthetic construct
  source 1..110: mol_type = other DNA
ctaaaaatacgcttgacacacattctttcatttacaatcctaaacagttctaggagaagatactactatcctaaatatatgagagaaataagtcgttttcccaagttccc

SEQ ID NO: 14278 - DNA, 110 bp, synthetic construct
  source 1..110: mol_type = other DNA
gaagatactactatcctaaatatatgagagaaataagtcgttttcccaagttcccacagcttgtactgggagaagctggaacttaaaattatgtcgtttgctttcaggga

SEQ ID NO: 14279 - DNA, 110 bp, synthetic construct; identical to SEQ ID NO: 14277
  source 1..110: mol_type = other DNA

SEQ ID NO: 14280 - DNA, 110 bp, synthetic construct; identical to SEQ ID NO: 14278
  source 1..110: mol_type = other DNA

SEQ ID NO: 14281 - DNA, 110 bp, synthetic construct
  source 1..110: mol_type = other DNA
ccacaactaactgcaagggggcttgggaaacgtgctatagatttgtggacagggaagaagaggaaactcattcatgctaaatagctaacagacccagacacagagccttt

SEQ ID NO: 14282 - DNA, 110 bp, synthetic construct
  source 1..110: mol_type = other DNA
tgatcgtgccctccgctaatagtcaacgccaggcctatgggccaaatccagcccaccgagaaggtcttcaaagcaaagttttgttagaatccagccaggccattcaatta

SEQ ID NO: 14283 - DNA, 110 bp, synthetic construct
  source 1..110: mol_type = other DNA
ccgagaaggtcttcaaagcaaagttttgttagaatccagccaggccattcaattatgcattgtctatggctgcctcctcaccaccacagcagagatgagtacctatgaca

SEQ ID NO: 14284 - DNA, 110 bp, synthetic construct
  source 1..110: mol_type = other DNA
aaaagcaagaaaaagaaatgttatccatccttctagctttctcatctctttccctctctgttgatattataaaaggaagagaggtcaattgcctctagaggcaaaaatcc

SEQ ID NO: 14285 - DNA, 110 bp, synthetic construct
  source 1..110: mol_type = other DNA
ggctactttccatgtctctgaggtaagatacgtttctaaagtgtacatttctcatgagggcagaaagagctgtagagcacagtttccacaagggttatgggaatatagat

SEQ ID NO: 14286 - DNA, 110 bp, synthetic construct
  source 1..110: mol_type = other DNA
gagggcagaaagagctgtagagcacagtttccacaagggttatgggaatatagatcttaacagcctggactcctgcgtcagccaaacacattctgaatccagtcccactg

SEQ ID NO: 14287 - DNA, 110 bp, synthetic construct
  source 1..110: mol_type = other DNA
agaaatgtgtatttgccatcagagaggtagtcacttgactgggagagggcgagggtgatgacaaatacatttcttatcctggtttgtaccttgtacattgcaggtccatt

SEQ ID NO: 14288 - DNA, 110 bp, synthetic construct
  source 1..110: mol_type = other DNA
tgatgacaaatacatttcttatcctggtttgtaccttgtacattgcaggtccattgcatactcaaggccaggctgagcaagggtgatggggcagcgagaggttgtaggaa

SEQ ID NO: 14289 - DNA, 110 bp, synthetic construct
  source 1..110: mol_type = other DNA
tgtgtgtgtgtgtgtgtgtgtttagtgctactcaactcagctgcttttccactacaaaggggggttttccattgagaaagtaaaacaggagggaagggtcagggcgcaac

SEQ ID NO: 14290 - DNA, 110 bp, synthetic construct
  source 1..110: mol_type = other DNA
aacactcccacaataatgtaaaatcaatgtctattttaaaacagagttgcacggagcttaaaaaactcccaaagctgagcggctgcaaagtctggcgcctcggcctgctg

SEQ ID NO: 14291 - DNA, 110 bp, synthetic construct
  source 1..110: mol_type = other DNA
ttaaaagttggtaggagtctcctggtggctttatggttaagggtccagcattgtcattgcttgggtcactgctgtggcacagcttccatccctggcctggggaacttctg

SEQ ID NO: 14292 - DNA, 110 bp, synthetic construct
  source 1..110: mol_type = other DNA
gagatggaggtgcagggagatgaagtgaccagctcaatgccgagggattgattaattgattcatggatgtgagacgagtgtgggaaatggggcagctgtgtgaattgtgc

SEQ ID NO: 14293 - DNA, 110 bp, synthetic construct
  source 1..110: mol_type = other DNA
tttcaaaagtcttgacaaatgggagcctgctaaggatgaagagagaataataaccatgcagtgtgagaaagcatccaatgatctgggatccttagctgaggtgccaacag

SEQ ID NO: 14294 - DNA, 110 bp, synthetic construct
  source 1..110: mol_type = other DNA
tatactgatttcctcatcagtaaaatggtcacagagtacttgctctgccatctacataccggggctgctgtgaatattgaataatgacagcaacttagaaatagttacac

SEQ ID NO: 14295 - DNA, 110 bp, synthetic construct
  source 1..110: mol_type = other DNA
ataccggggctgctgtgaatattgaataatgacagcaacttagaaatagttacactgcaatgaagaccacagagaaaagaataaacataggcttttgaagataacaaaaa

SEQ ID NO: 14296 - DNA, 110 bp, synthetic construct
  source 1..110: mol_type = other DNA
cacgatatgctgtcttcaaaatgtggtccgtttttagcagttaagagctcgatactctgtgcaaaattgcagtgagtgtggtgttttaatgcagcatttctatcactctc

SEQ ID NO: 14297 - DNA, 110 bp, synthetic construct
  source 1..110: mol_type = other DNA
cttgacacccatccatctccttatattcaacacttggccatggttttgtgcccggatgaaaactaccaaaatggtctctaaataaatcagggacctcttttgagaatgaa

SEQ ID NO: 14298 - DNA, 110 bp, synthetic construct
  source 1..110: mol_type = other DNA
aaaaagaaagaaagaaaaagaaaaagaaacactttaagatagctgtcagaagacctggcttgcaactcttttaaagatgatcgtattctcttatgagaggtaattatctc

SEQ ID NO: 14299 - DNA, 110 bp, synthetic construct
  source 1..110: mol_type = other DNA
tggcttgcaactcttttaaagatgatcgtattctcttatgagaggtaattatctctcagctatctgcttcctgagaccaggggccaaacctatcctgttttacattagac

SEQ ID NO: 14300 - DNA, 110 bp, synthetic construct
  source 1..110: mol_type = other DNA
aggataaagaaaaggaaaaacaacatagctacatttccagctccaaatgatgactattttgtagagttatagcctcctgccagtgagtcctatgctggattcagagattg

SEQ ID NO: 14301 - DNA, 110 bp, synthetic construct
  source 1..110: mol_type = other DNA
ctacaagctggcagtggtggtgccccatagtcagagctatatctcctgttgggtagccattccctagcctcccctgagcctgtgttccctgttgttgctaaaagctccct

SEQ ID NO: 14302 - DNA, 110 bp, synthetic construct
  source 1..110: mol_type = other DNA
cacacatgcacgtgttcatggctggcaatgcagccagcaaaaacctacagaagaggatcgggaaaccaaagatcttttccaggtcctgccactaattccatgtaagtttt

SEQ ID NO: 14303 - DNA, 110 bp, synthetic construct
  source 1..110: mol_type = other DNA
gatcgggaaaccaaagatcttttccaggtcctgccactaattccatgtaagtttttagacaagtcagtttcactcaggtacagttagtcaaatgtaaaatgacaaaattg

SEQ ID NO: 14304 - DNA, 110 bp, synthetic construct
  source 1..110: mol_type = other DNA
aacgtagtgcaataatagttcaaaagaagactttattttaaagtaaaagatactcatcacagaaacaatagctagaatttaggtacagcctgttctgtgccagaaagtac

SEQ ID NO: 14305 - DNA, 110 bp, synthetic construct
  source 1..110: mol_type = other DNA
atcacagaaacaatagctagaatttaggtacagcctgttctgtgccagaaagtaccacaaacccatgatataggtcacctcacatccaccatgcagggatggttgttact

SEQ ID NO: 14306 - DNA, 110 bp, synthetic construct
  source 1..110: mol_type = other DNA
aggttgacttaggatctaaaacaatccctgggttcatgggatgtcgtgtgagtacttagtttacacttgagtgaagacagttagtgtaatgtggagatgaggtctttact

SEQ ID NO: 14307 - DNA, 110 bp, synthetic construct
  source 1..110: mol_type = other DNA
atatctgtgcctgaaacaagacttttctcccagggtaatcaatcagtctttaataaaagcgcattcttaactacttgagctgataaatagtgaagtttgttttaaagaag

SEQ ID NO: 14308 - DNA, 110 bp, synthetic construct
  source 1..110: mol_type = other DNA
aaggtcgctattatggtgcgggtttggtgcctggcctgggaacctgtgtgtgccacaagcacggccaaaacataaaagtgcttcttatatgtaaggttcactgatgtttt

SEQ ID NO: 14309 - DNA, 110 bp, synthetic construct
  source 1..110: mol_type = other DNA
caagcacggccaaaacataaaagtgcttcttatatgtaaggttcactgatgttttattgaatgcaggtgctctctgctcatctcctcactcattgtattacccacgttgt

SEQ ID NO: 14310 - DNA, 110 bp, synthetic construct
  source 1..110: mol_type = other DNA
atgggtgcagaggacttcctccatctaacatggggctgttcaaagctgccatatagtatccagttgtgtgactgctgccctctgtggataacatgttcctattgtcatca

SEQ ID NO: 14311 - DNA, 110 bp, synthetic construct
  source 1..110: mol_type = other DNA
ggttggagaaaagcacaagctgcagggtctgtgggctgcctgattggagaaaagcatcaagctacagggcccctgccagtggtcctgtgaaggcccacatcagtagcact

SEQ ID NO: 14312 - DNA, 110 bp, synthetic construct
  source 1..110: mol_type = other DNA
atcaagctacagggcccctgccagtggtcctgtgaaggcccacatcagtagcacttattccacaccaagggaactgtgggaggcccattaatccatattccaatctacag

SEQ ID NO: 14313 - DNA, 110 bp, synthetic construct
  source 1..110: mol_type = other DNA
taaggaagagaagccagcaccagcatttaaggtagaaagagctagctaactccgtggtgctgtgcaaatgcagttcggtttctggtcaggactgcccttatctataaatc

SEQ ID NO: 14314 - DNA, 110 bp, synthetic construct
  source 1..110: mol_type = other DNA
tatggaagttcccaggttaggggtccattggagctacagctgccggcatatgccttagtcatggcaatgcaggatccaagccatgttcgtgacctataccacagctcatg

SEQ ID NO: 14315 - DNA, 110 bp, synthetic construct; identical to SEQ ID NO: 14314
  source 1..110: mol_type = other DNA

SEQ ID NO: 14316 - DNA, 110 bp, synthetic construct
  source 1..110: mol_type = other DNA
gaagaaaaagagaaaagaagcaagataggacctacacccttaggagggagctggaaagagaaaagctcctgcatcctgggaagttcccccccaccagtgaggagatcagc

SEQ ID NO: 14317 - DNA, 110 bp, synthetic construct
  source 1..110: mol_type = other DNA
aagagaaaagctcctgcatcctgggaagttcccccccaccagtgaggagatcagccaggacagagaaggaactctagacaatcaatgtgaagcagttaaaatgaaaaaac

SEQ ID NO: 14318 - DNA, 110 bp, synthetic construct
  source 1..110: mol_type = other DNA
ttcttctctcaacaagaaagctgaggaggaccaggaagggaagcccatatatgtaagacattaataaagcaaatggattatcctgctttgacacattatttttgtgactt

SEQ ID NO: 14319 - DNA, 110 bp, synthetic construct
  source 1..110: mol_type = other DNA
cctccacctgccttttatctgtaaaaaaaactttagccaaagagtaagcttcatcagggaaataagaaaatgaagacgcaaatgaaaatagtcaaaggagactaaataac

SEQ ID NO: 14320 - DNA, 110 bp, synthetic construct
  source 1..110: mol_type = other DNA
gccaaagagtaagcttcatcagggaaataagaaaatgaagacgcaaatgaaaatagtcaaaggagactaaataacaatagttcagtcagtaagcaaagtcaaggaccttt

SEQ ID NO: 14321 - DNA, 110 bp, synthetic construct
  source 1..110: mol_type = other DNA
gtgcagccacgaggagagttttcagttcttcttccttggtcacatggccccacatggttcagctatagtttcagccccacttctatatgagggcaacccaccagtgtctg

SEQ ID NO: 14322 - DNA, 110 bp, synthetic construct
  source 1..110: mol_type = other DNA
aataaaaccttgcctgaatttccctgactagcctcttatcaatttctattaaggaggccaagaaccctggacaggagttcccatcgtggcgtagtggttaacgaatccaa

SEQ ID NO: 14323 - DNA, 110 bp, synthetic construct; identical to SEQ ID NO: 14322
  source 1..110: mol_type = other DNA

SEQ ID NO: 14324 - DNA, 110 bp, synthetic construct
  source 1..110: mol_type = other DNA
tgaactcaactttcttaaatcacttctcatgcagatatcaatgttattctttttaaaagaccagtttcattcaatggcatgttcccatcactttgtaggaataaaatttc

SEQ ID NO: 14325 - DNA, 110 bp, synthetic construct
  source 1..110: mol_type = other DNA
aaagaccagtttcattcaatggcatgttcccatcactttgtaggaataaaatttccatgaatgggctagagttttctttcttgagatttgtggactgaatgagaccatct

SEQ ID NO: 14326 - DNA, 110 bp, synthetic construct
  source 1..110: mol_type = other DNA
tcgaaaatagcatcacagtttccttctcttagaagctttctcacccttgacaagcctgtgggacaaatagacctgacctctgcagcctcttgcctgtcagccctgattga

SEQ ID NO: 14327 - DNA, 110 bp, synthetic construct
  source 1..110: mol_type = other DNA
ctgtgggacaaatagacctgacctctgcagcctcttgcctgtcagccctgattgaatattcactccacagtgtcatgccagccatcgctaacaattacagaagaaggaag

SEQ ID NO: 14328 - DNA, 110 bp, synthetic construct
  source 1..110: mol_type = other DNA
gaattgggccattacagcagattccttgtgttccatacaagaatagacagaagcaatttggttttcaattacttaagcttgttctaaaaagctttctactacttaaaatc

SEQ ID NO: 14329 - DNA, 110 bp, synthetic construct
  source 1..110: mol_type = other DNA
tgaatattttatagaagagacagcaaagatggaaaggatgagaaagaatgagaaagaagagcaattcaaaagttagttgtcagctgaataagaggctagaatctcaatga

SEQ ID NO: 14330 - DNA, 110 bp, synthetic construct
  source 1..110: mol_type = other DNA
caggctctcagggagcctgtgtctctgaactgggacacacagttttcttctccccacttatgtgggaaaggatggctgcagtgggctggagctggggatttccctttccc

SEQ ID NO: 14331 - DNA, 110 bp, synthetic construct
  source 1..110: mol_type = other DNA
acttatgtgggaaaggatggctgcagtgggctggagctggggatttccctttccccaggtcagttaggctctgataatggccccagcaggttaggcactggtaaaccaca

SEQ ID NO: 14332 - DNA, 110 bp, synthetic construct
  source 1..110: mol_type = other DNA
ctcagggaatcagataagcatcaagggaagaggccaaggaagggcacagtcttgacaggtgaaccaaagacacttttgttttcagggctggagctggctgccagctttgt

SEQ ID NO: 14333 - DNA, 110 bp, synthetic construct
  source 1..110: mol_type = other DNA
caggtgaaccaaagacacttttgttttcagggctggagctggctgccagctttgtggatttctgtcagtcagcaggctgctgcacttctttgcttctctattttcctgaa

SEQ ID NO: 14334 - DNA, 110 bp, synthetic construct
  source 1..110: mol_type = other DNA
ttggctttagatatgaaattgtgtggagttcctgagctttgtattattctaaatgttaagtaacaaagatgtttgcatctgcaagaggaggaaggctcatgaaatgctct

SEQ ID NO: 14335 - DNA, 110 bp, synthetic construct
  source 1..110: mol_type = other DNA
tgtatgaattctagggagacacagttcagtccataacagtggtaaatgtctcctgtgccatattccaacattctctttccctgcctgagcaaccttggaacctgtgtgtt

SEQ ID NO: 14336 - DNA, 110 bp, synthetic construct
  source 1..110: mol_type = other DNA
tgccatattccaacattctctttccctgcctgagcaaccttggaacctgtgtgttccagatgtcccaaatagaattgagctaaaccctgagccatagtttagaagaggct

SEQ ID NO: 14337 - DNA, 110 bp, synthetic construct
  source 1..110: mol_type = other DNA
agtcctggaagtgcatgggacagaggcagcggtctttaaataggtccatattggccttcattttcaatttccttgatgctagagctattggccaagtggcagatatgtag

SEQ ID NO: 14338 - DNA, 110 bp, synthetic construct
  source 1..110: mol_type = other DNA
tgtcagtttgtaaagtcaatttttatcttccttgtaccatatgactattaatcatgccttgtgcttttcagttcatttcttcctttctatgcagcttcctagtattttgt

SEQ ID NO: 14339 - DNA, 110 bp, synthetic construct
  source 1..110: mol_type = other DNA
gccttgtgcttttcagttcatttcttcctttctatgcagcttcctagtattttgtccagtataacttgagaatcagtaaatacctcaagggcaaaacttgtgctgagagt

SEQ ID NO: 14340 - DNA, 110 bp, synthetic construct
  source 1..110: mol_type = other DNA
cccagaggatgtcagggtctgcacccagagtggatgtgttttgcgagaggtcaacagcagttttttaaatgatctctattcattggaaactgcactagagtttccacttc

SEQ ID NO: 14341 - DNA, 110 bp, synthetic construct
  source 1..110: mol_type = other DNA
agcagttttttaaatgatctctattcattggaaactgcactagagtttccacttcatagctatgaactttcaacctctaacatcttggccagagaaaaaagtaaaaaggc

SEQ ID NO: 14342 - DNA, 110 bp, synthetic construct
  source 1..110: mol_type = other DNA
cttattctctttctctttgctaagtagttcattacctttcctgaagggaggttgtagcttttccacataaatgaaatgatactggtctatgcagtttgtttatttattgc

SEQ ID NO: 14343 - DNA, 110 bp, synthetic construct
  source 1..110: mol_type = other DNA
caacttacttggggttaactctgtgtctctccactttctgccccaggcccttttctggtgccagaagggctcacaagcccatattcaaacacagcttgaaggtactgagg

SEQ ID NO: 14344 - DNA, 110 bp, synthetic construct
  source 1..110: mol_type = other DNA
tggtgccagaagggctcacaagcccatattcaaacacagcttgaaggtactgaggctgataactccctagagggcaagtcttacctagtggggaacagaggccagtccac

SEQ ID NO: 14345 - DNA, 110 bp, synthetic construct
  source 1..110: mol_type = other DNA
tttgatgctcagaagtagcagctggaacaataggtgtttccaagtttggtgcaccagtggatcagcaccatcaagaacataggttgttcggcattcccatcatggtgcag

SEQ ID NO: 14346 - DNA, 110 bp, synthetic construct
  source 1..110: mol_type = other DNA
taaatcgtagatattttgtgtaaattctgttctgttctcattaaaataagcctgccttttaaaaggtgattagcccctgccatttttgtttgacatgtgcataagctgtt

SEQ ID NO: 14347 - DNA, 110 bp, synthetic construct
  source 1..110: mol_type = other DNA
tcctggcttcatccagcctcctcttaggtgagggtgctacacactggcaatccacacagagcagggctgacagtgactgatcgtcctatgtcagcctcttccaccctggg

SEQ ID NO: 14348 - DNA, 110 bp, synthetic construct
  source 1..110: mol_type = other DNA
acagagcagggctgacagtgactgatcgtcctatgtcagcctcttccaccctggggccagggcagtatgaaacgtatgcacgcatgcagatggcatcatcaagattgctg

SEQ ID NO: 14349 - DNA, 110 bp, synthetic construct
  source 1..110: mol_type = other DNA
gaataaatcttgttgacatgaatatattcttaagaagcatcagagggaaaatatacatcagagtgcccaataacactgaatggcttctggatctgctgtattaggcccat

SEQ ID NO: 14350 - DNA, 110 bp, synthetic construct
  source 1..110: mol_type = other DNA
catcagagtgcccaataacactgaatggcttctggatctgctgtattaggcccatgcatttgaaattatacttccaaatatccattagttgatagaggggaatagagtaa

SEQ ID NO: 14351 - DNA, 110 bp, synthetic construct
  source 1..110: mol_type = other DNA
aaatattaaattgttgcggtggggtaaatactcatcctagaatgtgaaatcttcattgatgtgtgggtcctattgattgcacagatgcattactaagcagtactcgggtt

SEQ ID NO: 14352 - DNA, 110 bp, synthetic construct
  source 1..110: mol_type = other DNA
gtcctgaatgaagtagaggcccacagctactactttctggtctgaaatgttctattaaactacccatgctctcaaggacagtaatttgatgtcttaactgtattaatacc

SEQ ID NO: 14353 - DNA, 110 bp, synthetic construct
  source 1..110: mol_type = other DNA
tcagcctgcgacccttctatctcctgcctcaagggaaggtggagtttgagtcaaggaacataggttttgctcatggggagctggggagagagcaagccactatagcacca

SEQ ID NO: 14354 - DNA, 110 bp, synthetic construct
  source 1..110: mol_type = other DNA
ggagctaagagcctttaattgtgatgtgtataatatttagctcccttctggaaagtgtccctcctagttgaatttcaacttactctctctgttgcatgtctcatggacaa

SEQ ID NO: 14355 - DNA, 110 bp, synthetic construct
  source 1..110: mol_type = other DNA
aatcagtaagtgagataggctaactctggaaagttttgacaaccagatacatatagctgaggcagttacctcattcatctatttcccaaaatataactaccattgacctc

SEQ ID NO: 14356 - DNA, 110 bp, synthetic construct
  source 1..110: mol_type = other DNA
gcattctgttttgattgttactgatttggaacctatgctagtgtaactgtgccacgttccagtcatatttcaccaccataaccttgcaagggcttgggaggcctgagagc

SEQ ID NO: 14357 - DNA, 110 bp, synthetic construct
  source 1..110: mol_type = other DNA
gttccagtcatatttcaccaccataaccttgcaagggcttgggaggcctgagagctgcatcagaagagcttactagcctcaaacattaggtgctgccaactttggcagcc

SEQ ID NO: 14358 - DNA, 110 bp, synthetic construct
  source 1..110: mol_type = other DNA
agagaccctgatggacagcccacctctgcccaggatacctgcccagatggaccattacacactagggcttttagctgcagcctaactacaggcttgattggtattttaac

SEQ ID NO: 14359 - DNA, 110 bp, synthetic construct
  source 1..110: mol_type = other DNA
ctgcatcttgttcttatccgtatcctacactgcaggtagtagtgccacattttaatgactccaggatttaaagcaaaaatgccacaaataacctaggttcccaatagcaa

SEQ ID NO: 14360 - DNA, 110 bp, synthetic construct
  source 1..110: mol_type = other DNA
tgactccaggatttaaagcaaaaatgccacaaataacctaggttcccaatagcaacctggagcatacatgaaactctccaagtgaattgctttattgagctaacttattc

SEQ ID NO: 14361 - DNA, 110 bp, synthetic construct
  source 1..110: mol_type = other DNA
tacaggttttaataaaaacccctggtggttatcattttgcaaactttggacacacactattacatctttaagttagattgttttctgaccattagattatgctttcaagg

SEQ ID NO: 14362 - DNA, 110 bp, synthetic construct
  source 1..110: mol_type = other DNA
taaccactgcgccacgacgggaactccataaattctaaatgtaattgtttccatctactaaccccaaactccctgttcatcctactccctcctcccccttagcaaccaca

SEQ ID NO: 14363 - DNA, 110 bp, synthetic construct; identical to SEQ ID NO: 14362
  source 1..110: mol_type = other DNA

SEQ ID NO: 14364 - DNA, 110 bp, synthetic construct
  source 1..110: mol_type = other DNA
ttttggtcttcgatacagggacagtgctggctgtcgatacacacgtccggtatgggaatgcctagtgttgactgaagtgaagtggagatctttagctgaacaaccagagg

SEQ ID NO: 14365 - DNA, 110 bp, synthetic construct
  source 1..110: mol_type = other DNA
ggtatctacattttatgaactatgccacatagcactgttctggcgttgccttattctgatagaactcaagtttaatagtagcttgatggtttccattgtgtcttcttgtt

SEQ ID NO: 14366 - DNA, 110 bp, synthetic construct
  source 1..110: mol_type = other DNA
gaggggtaggcagtagcctgattgtgctaggcaataccaggaattcagattttgttctcattgtaatggaaagctgttggccagctttagactggttaatgtgcaggtaa

SEQ ID NO: 14367 - DNA, 110 bp, synthetic construct
  source 1..110: mol_type = other DNA
acagccaccacaactcaggatccaagccacgtctgcaagcaacacccccactcatggcagtgccagaaccttaacccactgagcagggtcagggggcaaacctgcatcct

SEQ ID NO: 14368 - DNA, 110 bp, synthetic construct
  source 1..110: mol_type = other DNA
caggatccaagccacgtctgcaagcaacacccccactcatggcagtgccagaaccttaacccactgagcagggtcagggggcaaacctgcatcctcctggatactagtcg

SEQ ID NO: 14369 - DNA, 110 bp, synthetic construct
  source 1..110: mol_type = other DNA
gccctctgttggcaccattgtatagatggacattccttaccactccctatcctattattttttttcttcaagtaaattttaacaacataaattcagggttaataggggaa

SEQ ID NO: 14370 - DNA, 110 bp, synthetic construct; identical to SEQ ID NO: 14369
  source 1..110: mol_type = other DNA

SEQ ID NO: 14371 - DNA, 110 bp, synthetic construct
  source 1..110: mol_type = other DNA
ggtgccatactgaggtgtttggacagcatttccttttttctgtaaatggtcttccagctgaagtaaacaatggacttggaagaaatggaaacagacaatcctgttattgc

SEQ ID NO: 14372 - DNA, 110 bp, synthetic construct
  source 1..110: mol_type = other DNA
agctgaagtaaacaatggacttggaagaaatggaaacagacaatcctgttattgcaatgattcagacaagaggggacacagatctggagcaggatggggtgtcaggcggg

SEQ ID NO: 14373 - DNA, 110 bp, synthetic construct
  source 1..110: mol_type = other DNA
ttgaatgtgaaacctgtgttgatggccacaatgagctaagacacttacttaacaggtttaaatttctttatatgaattttgaactcaagatacttcctgaactggtctga

SEQ ID NO: 14374 - DNA, 110 bp, synthetic construct
  source 1..110: mol_type = other DNA
tctaaaggaaatagatatcgagagacaggaagcagaagcatgtagggctgcaaacaagctgaactcaagcaggttcacaccaaaacatattataaaaaaatggcaaaagt

SEQ ID NO: 14375 - DNA, 110 bp, synthetic construct
  source 1..110: mol_type = other DNA
aactcccagagaagcttttctaaacccaatacgtgtattagtctaccagggctttcataccaaaacaccatagcctgggtggcttaaataacaggaattcatcgtctcag

SEQ ID NO: 14376 - DNA, 110 bp, synthetic construct
  source 1..110: mol_type = other DNA
ctccatatgcctcaggtgtggccctaaaaagctaaaaaaaaggaaaaaaagtcatctgtttgttgttgttcacaagatgctaattaaggtctcagaaagtaagagtactc

SEQ ID NO: 14377 - DNA, 110 bp, synthetic construct
  source 1..110: mol_type = other DNA
agtcacaaaaaactaagtcagctaagatttctttatttgcaacactgcactcaatagacatgaatcagcgtgctgaccacattctaataagactctaataatatctcttc

SEQ ID NO: 14378 - DNA, 110 bp, synthetic construct
  source 1..110: mol_type = other DNA
agacatgaatcagcgtgctgaccacattctaataagactctaataatatctcttctcagagctccaaacattcaagtgtgcatttactctttctcccagatggccatcaa

SEQ ID NO: 14379 - DNA, 110 bp, synthetic construct
  source 1..110: mol_type = other DNA
aagttgtccaccttcacaactacacacttttccctacaccagggagtctcaagctttagtttgtgtcaggataacccgatcgccagaatctgccccctctagatgtgtca

SEQ ID NO: 14380 - DNA, 110 bp, synthetic construct
  source 1..110: mol_type = other DNA
ttagtttgtgtcaggataacccgatcgccagaatctgccccctctagatgtgtcatgagacaagagtttatatttttaacaagtacttcccaggacattctttttttttt

SEQ ID NO: 14381 - DNA, 110 bp, synthetic construct
  source 1..110: mol_type = other DNA
tggaaagaggaaaggaaaaaaagactcccattatgtcatgaacaataggtgtcatttcctcagagaaagaattaggaactctattcagagtcatcagaggggccaggtgg

SEQ ID NO: 14382 - DNA, 110 bp, synthetic construct
  source 1..110: mol_type = other DNA
atatcacttaaagttggatatattgtgggtagatgtttcaattattgaattgctagctcttatgctacacagaaaaggttaagaaactttctgtaaagggccagagagta

SEQ ID NO: 14383 - DNA, 110 bp, synthetic construct
  source 1..110: mol_type = other DNA
ctctttgaaagtgctggagcattgtggtaacaaaagttactatatttcagtttgtctattcactcaggtgtcctaaaagttcccttggaagtcatcaaactgctgcattc

SEQ ID NO: 14384 - DNA, 110 bp, synthetic construct
  source 1..110: mol_type = other DNA
ctattcactcaggtgtcctaaaagttcccttggaagtcatcaaactgctgcattctattgatcagtagaaatagatctaccaaactcttaattatcttgtctttgttatg

SEQ ID NO: 14385 - DNA, 110 bp, synthetic construct
  source 1..110: mol_type = other DNA
aagcagtactggctgatcactgccttccacgccaagggcaacctgcaggagtatctgacgcgccacgtcatcagctgggaggacctccgcaggctgggcggctcgctggc

SEQ ID NO: 14386 - DNA, 110 bp, synthetic construct
  source 1..110: mol_type = other DNA
tttaaggatttctggttaacataaagatggcctctgatagtccaaatgcacacatttttctaatttttcatttccatgttcattttaactttttcaagtttctgagtgtg

SEQ ID NO: 14387 - DNA, 110 bp, synthetic construct
  source 1..110: mol_type = other DNA
ttttctaatttttcatttccatgttcattttaactttttcaagtttctgagtgtgtcctaagtgaatacgggaaaagagaatataatgagtgtgtgtcctctcttgtcag

SEQ ID NO: 14388 - DNA, 110 bp, synthetic construct
  source 1..110: mol_type = other DNA
catcaatatgaatgagtacatctttgttgattagagggattatcaatgcatcatccttgtgctaaaatccatcagctagttcctctgattggtgacttttcattgcctgc

SEQ ID NO: 14389 - DNA, 110 bp, synthetic construct
  source 1..110: mol_type = other DNA
gcaggttaaagattaccaggtaaaggatgatgctcggggttgtcagtcaagtcccctggctgctgccctctctccctcactggcattcattacgggccacatgtaaccaa

SEQ ID NO: 14390 - DNA, 110 bp, synthetic construct
  source 1..110: mol_type = other DNA
taaccaagtttttttcccagatatccacattcccaaacattcttctgctacagaaagaatgtctcatgagaaagggcctggggagctgcgtgtagaatctcagactggat

SEQ ID NO: 14391 - DNA, 110 bp, synthetic construct
  source 1..110: mol_type = other DNA
catagccaacatctggcacaatttggtattactggacatgttatcgccttgtcacttactcaatgacaatcagactgacagcagtctaagctttttggtattctcccaaa

SEQ ID NO: 14392 - DNA, 110 bp, synthetic construct
  source 1..110: mol_type = other DNA
ttactcaatgacaatcagactgacagcagtctaagctttttggtattctcccaaattcagttttaaggttaaattttgcacttcactattcatatatggcaactattgat

SEQ ID NO: 14393 - DNA, 110 bp, synthetic construct
  source 1..110: mol_type = other DNA
taagaactcttgtcatcgctcacctgagagaagcatcaaacatggaaccttcctctcagccttaaggccttgcttcccactcaatacgtcaggctccaggcaggatctaa

SEQ ID NO: 14394 - DNA, 110 bp, synthetic construct
  source 1..110: mol_type = other DNA
tcagccttaaggccttgcttcccactcaatacgtcaggctccaggcaggatctaaattctctgcattttcaccctggctcttgcttctaacatcccttcttaggattttt

SEQ ID NO: 14395 - DNA, 110 bp, synthetic construct
  source 1..110: mol_type = other DNA
agaaacaaattttggatgcccttcagaaaggaaaaaaaaaaaaggcagctgaagcttccagctttcatctcactgaagactcaggcattgcacagagaaagacttaaatg

SEQ ID NO: 14396 - DNA, 110 bp, synthetic construct
  source 1..110: mol_type = other DNA
ttccagctttcatctcactgaagactcaggcattgcacagagaaagacttaaatgatcttggttttctcaatgctgtattttcctgacatttgtcattctatctcctatt

SEQ ID NO: 14397 - DNA, 110 bp, synthetic construct
  source 1..110: mol_type = other DNA
gccctctgtcacatcctagctcacattccttattttcccaatgtagatccccatttgtaccagggagataaatatttatcacagagccacaataattcatgcacccccag

SEQ ID NO: 14398 - DNA, 110 bp, synthetic construct
  source 1..110: mol_type = other DNA
caccttgtgactctactgaccaagaagtctgacccttaagcacagtgctaccacggcatcaggagatacataattaagtcagctaagatgtgcttggaggacacggaaga

SEQ ID NO: 14399 - DNA, 110 bp, synthetic construct
  source 1..110: mol_type = other DNA
tagcaacagcctgttggccatctctgggggcagctgaagcagtagaatatgcagggctgtggtgttaaccattgtacctgctgagacccaccaaggaaaagctattccca

SEQ ID NO: 14400 - DNA, 110 bp, synthetic construct
  source 1..110: mol_type = other DNA
gctgtggtgttaaccattgtacctgctgagacccaccaaggaaaagctattcccacctcttagcaaagtcaagactccagctgtggaaaagccccggcccacagcaacag

SEQ ID NO: 14401 - DNA, 110 bp, synthetic construct; identical to SEQ ID NO: 14399
  source 1..110: mol_type = other DNA

SEQ ID NO: 14402 - DNA, 110 bp, synthetic construct; identical to SEQ ID NO: 14400
  source 1..110: mol_type = other DNA

SEQ ID NO: 14403 - DNA, 110 bp, synthetic construct
  source 1..110: mol_type = other DNA
ctgcactgtcacaatagctgtttattcatttggaagcttatttcctcaaatgcaaagacatcatcaaagactttccttgtggcacgtagaaatccctttgactataactt

SEQ ID NO: 14404 - DNA, 110 bp, synthetic construct
  source 1..110: mol_type = other DNA
cagcatctctctgtctgaaagggcaataccttactagccagtttctctgcatctatcttggccctccagctcattctgtacacaccagccaggcaaggtctctacagagc

SEQ ID NO: 14405 - DNA, 110 bp, synthetic construct
  source 1..110: mol_type = other DNA
aagccattgaaattttgcagtttccttattaaagcagctagcattatactaaccagtatactaatcctaaatatggacattcctttccaacttatggaaccctagttttt

SEQ ID NO: 14406 - DNA, 110 bp, synthetic construct
  source 1..110: mol_type = other DNA
tcccctttggccaactctaacccagaatcgtagaggaacaggattccagggaatgtagttcccagctaaccatccagacatctaggcttagctatttaataaagtatcac

SEQ ID NO: 14407 - DNA, 110 bp, synthetic construct
  source 1..110: mol_type = other DNA
tagttcccagctaaccatccagacatctaggcttagctatttaataaagtatcaccaaatcccaggttatgggtatgcctccagttactagaatagccacaggaaactgt

SEQ ID NO: 14408 - DNA, 110 bp, synthetic construct
  source 1..110: mol_type = other DNA
agttttagctagaaatccagccacccaagaagaaactacatttccaagactctgttgtatctaagtgtggccatgtaaattacctatatcaatggggtagagacaacttc

SEQ ID NO: 14409 - DNA, 110 bp, synthetic construct
  source 1..110: mol_type = other DNA
taataaatgatttacaccatgattggtgctgtgcattttcttagatagagctcccgactttgatggaatgctgtattcttttaatttaaagataacagcagcaataaaat

SEQ ID NO: 14410 - DNA, 110 bp, synthetic construct
  source 1..110: mol_type = other DNA
gactgaaccacaccacgggctttcctgcggctccagcttgcaaaccatggatcttgtggctcttcagcctccacaatacatctatataataaattcctattggttctgtg

SEQ ID NO: 14411 - DNA, 110 bp, synthetic construct
  source 1..110: mol_type = other DNA
gtagcacctgtcacctcacaaagcccccgctggctcttgctgttctaatatctgcaggggcaaggagagctttggtcctagatgactcgggacagaatgggtagtcaaac

SEQ ID NO: 14412 - DNA, 110 bp, synthetic construct
  source 1..110: mol_type = other DNA
aggggcaaggagagctttggtcctagatgactcgggacagaatgggtagtcaaacagctgctggcaaagtatactcaagtgtcagagaggaagctgggtcataaatccgg

SEQ ID NO: 14413 - DNA, 110 bp, synthetic construct
  source 1..110: mol_type = other DNA
cacacccgtgacctcatctgccagcagcaccagcaggaggaatctggcctccagatcagcttccagatctcacacgaatgcactgaggaaactgtcgtgcattatgaggc

SEQ ID NO: 14414 - DNA, 110 bp, synthetic construct
  source 1..110: mol_type = other DNA
tcagcttccagatctcacacgaatgcactgaggaaactgtcgtgcattatgaggcatcactgggagagagcctgagacaggaatttgagttgttaggtttccagtcggga

SEQ ID NO: 14415 - DNA, 110 bp, synthetic construct
  source 1..110: mol_type = other DNA
tggtccatccctcttgaccacattgctcacaaaagggcagaacactgccttcttggacctcagataaaaatgtatgcactgggtgataactcctttgacagtctgtctgc

SEQ ID NO: 14416 - DNA, 110 bp, synthetic construct
  source 1..110: mol_type = other DNA
gacctcagataaaaatgtatgcactgggtgataactcctttgacagtctgtctgcaaatgatgcaaaagcgctgtatcaattttggagtttcacatacacttgatcaagt

SEQ ID NO: 14417 - DNA, 110 bp, synthetic construct
  source 1..110: mol_type = other DNA
cactgtctgcccgatcccaatcctatgagtcagtgaccttgtaataaaccggtccattgattacatgcagctgcctacctcgctcttccgtctcaagatatcttcccagt

SEQ ID NO: 14418 - DNA, 110 bp, synthetic construct
  source 1..110: mol_type = other DNA
attgattacatgcagctgcctacctcgctcttccgtctcaagatatcttcccagtttcatgggcacttttcgttcctccatcctccaacactcataaatgcagagaacag

SEQ ID NO: 14419 - DNA, 110 bp, synthetic construct
  source 1..110: mol_type = other DNA
gctgatatccactatccatttttaccttttctcttgcccactcatcataaaaacacacacgcaacactcctttgagaatgggataattgtatactgtattctcttaaaac

SEQ ID NO: 14420 - DNA, 110 bp, synthetic construct
  source 1..110: mol_type = other DNA
ctcatcaggttctaatgccacaatgagttaaaagtctaaatgaagccaccttttactaagagctggttctagagaaattttgaggggaggctacaataacctttccaagg

SEQ ID NO: 14421 - DNA, 110 bp, synthetic construct
  source 1..110: mol_type = other DNA
tggtgttggtcctttagttaaactcttgcttcaccagggcagcagaataatgattgtaagttctgaatggctggccatcctcggtggaaactcacttcagagtttcaaat

SEQ ID NO: 14422 - DNA, 110 bp, synthetic construct
  source 1..110: mol_type = other DNA
gtaagttctgaatggctggccatcctcggtggaaactcacttcagagtttcaaatgtgaataatttttaaaatggaaggaggaaatagtaaaactatagagaaagcaaat

SEQ ID NO: 14423 - DNA, 110 bp, synthetic construct
  source 1..110: mol_type = other DNA
acacttcaaactcccctgagagggatctggctgcttgcctattgccaagatccctgctggccccaatttcttactttccatactcacgttgagatggactgctacaaagt

SEQ ID NO: 14424 - DNA, 110 bp, synthetic construct
  source 1..110: mol_type = other DNA
gctggccccaatttcttactttccatactcacgttgagatggactgctacaaagtcagcttaagggaagcagtctcagctacctaccaagtttcatgtctcggcgggatg

SEQ ID NO: 14425 - DNA, 110 bp, synthetic construct
  source 1..110: mol_type = other DNA
agagagattatttcccagccagaagtttcagccttcattcccctttccttcatcataccagtctattctacttgaggctttcttcctgtacctggtaagtaagagggtgt

SEQ ID NO: 14426 - DNA, 110 bp, synthetic construct
  source 1..110: mol_type = other DNA
tccctgtagccccagggaggttcaggagagcagccaagtcgcccccaggccctgtaaaggaggcagttttaggtgaatgagggccaaactcaagaaatccagcagtgaat

SEQ ID NO: 14427 - DNA, 110 bp, synthetic construct
  source 1..110: mol_type = other DNA
aaaggaggcagttttaggtgaatgagggccaaactcaagaaatccagcagtgaatgttcctgctatgataaaggggaaaggagtctgactagcatccatgaggatgcagg

SEQ ID NO: 14428 - DNA, 110 bp, synthetic construct
  source 1..110: mol_type = other DNA
tcaattctttgaaggatacctatcattatatccacacaagaccttgcaacaaaagatcaaggtcattcttgccacagaccagattcctttcagattcccatcctatgcaa

SEQ ID NO: 14429 - DNA, 110 bp, synthetic construct
  source 1..110: mol_type = other DNA
aggcttgttggaatatggtagggcacatttgtggatgtgtctatttctctcctccctggactgactagctcagtccacacttttttttttttttttttttttttgctttt

SEQ ID NO: 14430 - DNA, 110 bp, synthetic construct
  source 1..110: mol_type = other DNA
gcaggcaagacctggaagtactactcacattccactgggctgaatgagaatgagaatgcaattttgggttgcaatcccagtttcgccacttccaatctctggtcttggcc

SEQ ID NO: 14431 - DNA, 110 bp, synthetic construct
  source 1..110: mol_type = other DNA
atgcaattttgggttgcaatcccagtttcgccacttccaatctctggtcttggccaaatcaatgcatgtctttgcacctctgtttcctaatccttcatggagttaggaaa

SEQ ID NO: 14432 - DNA, 110 bp, synthetic construct
  source 1..110: mol_type = other DNA
ctgaagctttcaaagctgtgccttaagacatctgtagcttcctcttttgctcatcttccctcttgggaaccagttcttgtgtagaagtccagccactcaacctaccatgc

SEQ ID NO: 14433 - DNA, 110 bp, synthetic construct
  source 1..110: mol_type = other DNA
tcctgggcaggaggagggctcagctcaagttgtgtcacacaaaacattactttttagaagtatcacttggggtgcttcccagcactgatgccactcaggttgttctctgc

SEQ ID NO: 14434 - DNA, 110 bp, synthetic construct
  source 1..110: mol_type = other DNA
cattttacagatgaggaaactgtggcgtaggttagtgactttctcagggacagactgagtccagaggacatgatttccccactgagctaacgctgcttctcagtctgaca

SEQ ID NO: 14435 - DNA, 110 bp, synthetic construct
  source 1..110: mol_type = other DNA
gaggtaaacctatgctctccatgtgactcagcaaacccactcataggtatttatccaaagaattgagagcttgtttatgtccaccaaaaaatctcaccagaatattcacc

SEQ ID NO: 14436 - DNA, 110 bp, synthetic construct
  source 1..110: mol_type = other DNA
ttgtcccaaagtcacaaagttataagtagtgaaactggctttttggccaggccatttgagtccagatcttgagctcatgaaagggcagtttggagtcttttttttttttc

SEQ ID NO: 14437 - DNA, 110 bp, synthetic construct
  source 1..110: mol_type = other DNA
ttgagtccagatcttgagctcatgaaagggcagtttggagtcttttttttttttctccccattatcaatatgtcatgagtattttctcatgtcatttggtttttttttct

SEQ ID NO: 14438 - DNA, 110 bp, synthetic construct
  source 1..110: mol_type = other DNA
tttcagtgatgagtgagagcgttttaaacctctgcccagaaatcaactggctccgttcgtaatattcacagtagtcatagttcctacaaagtcccagtcttttttccaag

SEQ ID NO: 14439 - DNA, 110 bp, synthetic construct
  source 1..110: mol_type = other DNA
tacaagtgtaaagtattaataaaccatgtgcacgtaaataaatggattagccgtttaattcttggaactctccctaccataaaaagcagtttttcatgatctattagctg

SEQ ID NO: 14440 - DNA, 110 bp, synthetic construct
  source 1..110: mol_type = other DNA
taattcttggaactctccctaccataaaaagcagtttttcatgatctattagctgacaattgaattaattaaaactttgactttgtggagttcccatcgtggctcactgg

SEQ ID NO: 14441 - DNA, 110 bp, synthetic construct
  source 1..110: mol_type = other DNA
cagagtgtttggtgttgtgccagctaagcagagaaaagtttggatcagaaatgtcctaagggagttcccatcatggctcagcagttaacatacctgtctagtatccatga

SEQ ID NO: 14442 - DNA, 110 bp, synthetic construct
  source 1..110: mol_type = other DNA
caactattggggtttgtcagagcctaaacaacctggtagaagggaaatttccaactctagctcccttgagccatcctgtcccatgtatggggcagagagctgaggaagac

SEQ ID NO: 14443 - DNA, 110 bp, synthetic construct
  source 1..110: mol_type = other DNA
tctagctcccttgagccatcctgtcccatgtatggggcagagagctgaggaagactgagaagcacttgtgaagttcacagcccatgcacacgggttcactgagacctaat

SEQ ID NO: 14444 - DNA, 110 bp, synthetic construct
  source 1..110: mol_type = other DNA
ttctcattagtcccataaacatttccacttaaatgttactggtgagaatctcagagcctcgtctagctgcaagagcatctgggaaaggtggtcttttagagaggtacatt

SEQ ID NO: 14445 - DNA, 110 bp, synthetic construct
  source 1..110: mol_type = other DNA
tcttatattttgcccagaggcaagtatggctgtcagctgtcttgaatcgtgtttttttcttttctaagatgattctaggctgtcttctccctaatggttccaggtggaga

SEQ ID NO: 14446 - DNA, 110 bp, synthetic construct
  source 1..110: mol_type = other DNA
tttcttttctaagatgattctaggctgtcttctccctaatggttccaggtggagaactggtttacctgggtgtaattatatagcagtcagagaagacagggaaaaacact

SEQ ID NO: 14447 - DNA, 110 bp, synthetic construct
  source 1..110: mol_type = other DNA
cttctgtggtgctcgttcagtccctggcctgggaatttcgtcatgccatgaacatggctgaaaaggaaagaaatggggtcctcagtattcttacttattcctagtatctt

SEQ ID NO: 14448 - DNA, 110 bp, synthetic construct
  source 1..110: mol_type = other DNA
agaaatttgtcccaaagcagggaaatatcacagaaatcaaccaaatagtttaattgtgaggctctcatgaacttagagatactgatatagtggatcaagaaaggcatgta

SEQ ID NO: 14449 - DNA, 110 bp, synthetic construct; identical to SEQ ID NO: 14448
  source 1..110: mol_type = other DNA

SEQ ID NO: 14450 - DNA, 110 bp, synthetic construct
  source 1..110: mol_type = other DNA
tttctagtaggttctttcagaagtgggattcggatcggcatttaactcaaattcccgaatcctgggaatggaaagagggagccaattccctgggaaggttagcgtccagg

SEQ ID NO: 14451 - DNA, 110 bp, synthetic construct
  source 1..110: mol_type = other DNA
cgaatcctgggaatggaaagagggagccaattccctgggaaggttagcgtccagggggaggaagaagggaaggagagggcgccttgaatccgccacagtttccctcctgg

SEQ ID NO: 14452 - DNA, 110 bp, synthetic construct
  source 1..110: mol_type = other DNA
aactcaggtaagtacctattccatgggtctctccatccccagcacctacacactgggtcaactcagcccaaaggcccaagcctggagaattcctgacatgagctgctcag

SEQ ID NO: 14453 - DNA, 110 bp, synthetic construct
  source 1..110: mol_type = other DNA
tttctatctttccatagcaggttagtggtgggttgcatccttgacataaatggtgtagatgcccttgcaggttctctgtgtcttctaggtgccttgagtgacctcttagg

SEQ ID NO: 14454 - DNA, 110 bp, synthetic construct
  source 1..110: mol_type = other DNA
aagaagggctttagaaatgggagaaaatagcagaggaacttagggagggaatagctagtttgcaaagcaagccctgagctcccctcatgctgatagaggcccctggagaa

SEQ ID NO: 14455 - DNA, 110 bp, synthetic construct
  source 1..110: mol_type = other DNA
tagtttgcaaagcaagccctgagctcccctcatgctgatagaggcccctggagaagcacacacaccacacagatgttggagtgagacgtgtctggttttacatcttggct

SEQ ID NO: 14456 - DNA, 110 bp, synthetic construct
  source 1..110: mol_type = other DNA
gctagctgatacctcttgttcatcaggggaaagaaatcagactcaggagctctgggtatctatttgagatcactgaagaaagatggtcctgctggctttctggctctgtc

SEQ ID NO: 14457 - DNA, 110 bp, synthetic construct
  source 1..110: mol_type = other DNA
ggggacagagaggggagagaaaggtggttgaaaatagctttagtgcatctgctatatttcagcacgtgttacagccttagcagattctgttccaagctgaaacatctgga

SEQ ID NO: 14458 - DNA, 110 bp, synthetic construct
  source 1..110: mol_type = other DNA
agaataaattataccaatactcaacagtcacactaacaaagatgatgcacagatgttactacactaaaatgcttcactgagaccaattttacatactttgtaagaatcta

SEQ ID NO: 14459 - DNA, 110 bp, synthetic construct
  source 1..110: mol_type = other DNA
ttccaaatcagtgtatcctttccttatgactcaactgacacctttatgatataaactaatcttctacataaactttagtttctctggaccctcttttatgttccactgat

SEQ ID NO: 14460 - DNA, 110 bp, synthetic construct
  source 1..110: mol_type = other DNA
taagagtaaaatcgtaacctaagcatacacatttgatgctttaagtctcccatgtttcctcttagctaatggtacaggctgggttacctaggaagcaggctctaagatgg

SEQ ID NO: 14461 - DNA, 110 bp, synthetic construct
  source 1..110: mol_type = other DNA
cagcaagtgcaaagctctgtgaaactgatacaaggccaagtacaggagtaaagatgcaaagggaaccaggggaagagtcagcgacccagacctaagtcaactccagtgca

SEQ ID NO: 14462 - DNA, 110 bp, synthetic construct
  source 1..110: mol_type = other DNA
gcaaagggaaccaggggaagagtcagcgacccagacctaagtcaactccagtgcacagcatttctctacgtcacagtcaaggttcagaagtgggtgtgtgacacaaataa

SEQ ID NO: 14463 - DNA, 110 bp, synthetic construct
  source 1..110: mol_type = other DNA
agcaaaatgggagtaggaaaccaagggctgaaagctctgagagaaaaagaggattggtaagggattgaggtgggacagataaaattatcccagggaatggagatgtaggc

SEQ ID NO: 14464 - DNA, 110 bp, synthetic construct
  source 1..110: mol_type = other DNA
tcttctcaggagacggctcctattggtcaaaggcaattctctagaaaagggggtagctctgagcaattagcaatcaatctttcaagcagccaaagaactagataagaaaa

SEQ ID NO: 14465 - DNA, 110 bp, synthetic construct
  source 1..110: mol_type = other DNA
tataattgtttatcacaaaattagtttagcaagctgtgtagctttgaaaaagtcatttatctcttattgctaaagatatcctgaaaggggttcccattgcggctctgtgg

SEQ ID NO: 14466 - DNA, 110 bp, synthetic construct
  source 1..110: mol_type = other DNA
gttagtacagagaaattgaaaataagggaatagtcagcaggtgaaagctaaatgaactggaaatgtttttcttttaaaataacagcttagcagttcctgatggctcagca

SEQ ID NO: 14467 - DNA, 110 bp, synthetic construct
  source 1..110: mol_type = other DNA
gggaatagtcagcaggtgaaagctaaatgaactggaaatgtttttcttttaaaataacagcttagcagttcctgatggctcagcaggttaaggatctagtgttatcactg

SEQ ID NO: 14468 - DNA, 110 bp, synthetic construct
  source 1..110: mol_type = other DNA
gaatgcctttaaggaacgcagtgctaatcatttgtcaaactggcggtactgcttggatggatgcaaaggactgtatctttctgttgtttcttggtcattgtaaattcctc

SEQ ID NO: 14469 - DNA, 110 bp, synthetic construct
  source 1..110: mol_type = other DNA
cttatctttcatgatttctgtgggtcaggaagggaggggaggccaacctggcatatcagagtctctcatgaggtagcctcaagatgttgtctggcgtcactgaagggctt

SEQ ID NO: 14470 - DNA, 110 bp, synthetic construct
  source 1..110: mol_type = other DNA
aaccgggccacagcagcgacctagtccatagcagtgacaatgccagatctttaacccactgaaccatcagggcactgcatcagctttattgcacatggtgctcatccttg

SEQ ID NO: 14471 - DNA, 110 bp, synthetic construct
  source 1..110: mol_type = other DNA
ccccatcctgtgtgttcccagaggccttggttacatcactgctctgaaagtaagagtagacttgtcttgcttatcactgttcttctccttaacacaccattaaataggga

SEQ ID NO: 14472 - DNA, 110 bp, synthetic construct
  source 1..110: mol_type = other DNA
acattctacaaaaaagagtctagattacttaattccttccccaaatcttatgattttgaagtcatttttaaaaaacgtcttcatgtttgtccttttgctgtgccttttgt

SEQ ID NO: 14473 - DNA, 110 bp, synthetic construct; identical to SEQ ID NO: 14472
  source 1..110: mol_type = other DNA

SEQ ID NO: 14474 - DNA, 110 bp, synthetic construct
  source 1..110: mol_type = other DNA
cataggaggttctattgagaagggttaagttgaggtgacaaaagatgcactgatctcatgagcttcagaacatcctactaatagcacaagccctaccttcttcccaaggt

SEQ ID NO: 14475 - DNA, 110 bp, synthetic construct
  source 1..110: mol_type = other DNA
tcatgagcttcagaacatcctactaatagcacaagccctaccttcttcccaaggtgtggtcacagctgaggcacaccttccacatctgtgaagccctgatgctttttagt

SEQ ID NO: 14476 - DNA, 110 bp, synthetic construct
  source 1..110: mol_type = other DNA
cattggctatacattttagagcatatatgtactttaatttccatgcttgaattggggagttttaaatatacaggtttcagtgattctatctcaaagaagatcaaactgaa

SEQ ID NO: 14477 - DNA, 110 bp, synthetic construct
  source 1..110: mol_type = other DNA
catttcgtggaaggggtaggattatgacacatgtgtcctaaggcccaggcagtattctcatcactaccctatacacacttcacattattctgtgaggaaatctgttggtt

SEQ ID NO: 14478 - DNA, 110 bp, synthetic construct
  source 1..110: mol_type = other DNA
aggatgacacaattgcactctgaactttgagaacgaccttcggggtttgttccattgtaataatgccttttcaataattccaccagctgggagttgattggagaatattg

SEQ ID NO: 14479 - DNA, 110 bp, synthetic construct
  source 1..110: mol_type = other DNA
tgtaataatgccttttcaataattccaccagctgggagttgattggagaatattgttcttgctcctttattttcttaaagggttgttaatctgtaacaatagcaacaaca

SEQ ID NO: 14480 - DNA, 110 bp, synthetic construct
  source 1..110: mol_type = other DNA
atggatagaatcccattgctaaagatataaccgaaaacatcagggaggagtggctgagagcaacagcgtaggcatggtcagactgcacagaatttagcgatttggaggtc

SEQ ID NO: 14481 - DNA, 110 bp, synthetic construct
  source 1..110: mol_type = other DNA
gagagcaacagcgtaggcatggtcagactgcacagaatttagcgatttggaggtcaatggtgagagagggaacccagtggcagtcagtgaaggcacttggaatggttttg

SEQ ID NO: 14482 - DNA, 110 bp, synthetic construct
  source 1..110: mol_type = other DNA
tcaggtggagaagccttgtgaagcacatcattggtgtcccacccaggttccctttgtgatggccagtgcatatgcccctgagctgcagtgatggctgactgttcgcacct

SEQ ID NO: 14483 - DNA, 110 bp, synthetic construct
  source 1..110: mol_type = other DNA
gtttgcccacatgcctaatgctagatgtcctatatattttatgcctctgaaaaaatctgattttccatatttgtgatgactagtgggtaggtgattacatttggatgaag

SEQ ID NO: 14484 - DNA, 110 bp, synthetic construct
  source 1..110: mol_type = other DNA
tctgattttccatatttgtgatgactagtgggtaggtgattacatttggatgaagaaagaagctaaaactccatggagttaattaactaaccctgaattcaaagcccagt

SEQ ID NO: 14485 - DNA, 110 bp, synthetic construct
  source 1..110: mol_type = other DNA
ctggagaacctctttaggtattttttaaaagactaattatctgaatttaggttggtttgtttggttgtacctgaggcatgtgaaaatttatgggccagcgatttaaccta

SEQ ID NO: 14486 - DNA, 110 bp, synthetic construct
  source 1..110: mol_type = other DNA
gtagctctgtaacataactggtcacagtaaaatgctatgctaagagctatgatgttatagcagatttctagatagggtgtggctaagttcaatattaaatagcaatggga

SEQ ID NO: 14487 - DNA, 110 bp, synthetic construct
  source 1..110: mol_type = other DNA
agctgaaaaatgtttaaatcactaagcttggaatggtttattacagtgaaacagctaaatgacacagaatttaaactactgtgttatgagcaaggatagttaaaacactc

SEQ ID NO: 14488 - DNA, 110 bp, synthetic construct
  source 1..110: mol_type = other DNA
taaatgacacagaatttaaactactgtgttatgagcaaggatagttaaaacactctctgagtagcagtagtccatataagtcacattttcaaagaaagatacagctttgt

SEQ ID NO: 14489 - DNA, 110 bp, synthetic construct
  source 1..110: mol_type = other DNA
tataatatcaaagcaaatacacagtaggaagcataatccatttacctccctgcatgttcctattactgaaccatgccgtttgatgaaattgtttagctcagttctgggca

SEQ ID NO: 14490 - DNA, 110 bp, synthetic construct
  source 1..110: mol_type = other DNA
gttcctattactgaaccatgccgtttgatgaaattgtttagctcagttctgggcagcttctaaccccaatggcaacatttatgaagcttctaagccagcccaagaactgt

SEQ ID NO: 14491 - DNA, 110 bp, synthetic construct
  source 1..110: mol_type = other DNA
caagcaggcttaggattagctagtttgtttgaagaatttcagtggattcttaggaatagaggctgtctctctcattgtctgctcccttgccctggagttatgaggtcaga

SEQ ID NO: 14492 - DNA, 110 bp, synthetic construct
  source 1..110: mol_type = other DNA
ggtctcagtgctttgccctgggagaagaggaccaggttgctgctggccttcactaatgtgaaataagagttttgcttatagccgtcgctcccacttctcttgggctttac

SEQ ID NO: 14493 - DNA, 110 bp, synthetic construct
  source 1..110: mol_type = other DNA
atgtgaaataagagttttgcttatagccgtcgctcccacttctcttgggctttacagttgtgacagttgttattgcgtcttgataggtgctatccacggtaatccatact

SEQ ID NO: 14494 - DNA, 110 bp, synthetic construct
  source 1..110: mol_type = other DNA
atagtttcactgaactattcatgcagaatagtttcactgacctaaaaatttccggtgtcacacctaccagtttctcccccatcaccacctcaattcctggtaactaccag

SEQ ID NO: 14495 - DNA, 110 bp, synthetic construct
  source 1..110: mol_type = other DNA
tcttggtatctaataagtaacccagacttattcacatggtagctggcagagcttcaaggagtacagaagtaggcaagacctcttgatgcctgcacttggaacagtcacag

SEQ ID NO: 14496 - DNA, 110 bp, synthetic construct
  source 1..110: mol_type = other DNA
catctcctgctgtttgacttgaattctactcatctcaggagctagttttgcccaaatgtccaatttctacttcacttctgaacaatgtagttgttggaaaaagttctgta

SEQ ID NO: 14497 - DNA, 110 bp, synthetic construct
  source 1..110: mol_type = other DNA
atttttatttgagcaatttgcatatgcatattgtctcattatcttaatacaatactgtttgggagggctgatacctaaatacatgatggaaatacagttactctgatgag

SEQ ID NO: 14498 - DNA, 110 bp, synthetic construct
  source 1..110: mol_type = other DNA
tgtttgggagggctgatacctaaatacatgatggaaatacagttactctgatgagatctggtttaaataatcagaaaactttctaaatgtgtttacattatagtttgtgt

SEQ ID NO: 14499 - DNA, 110 bp, synthetic construct
  source 1..110: mol_type = other DNA
aaaaccaaggcttggtaataggtcagtgaaaggtatattttggtttagtttgcctacactacatctcatctcctatcaaatggagaggcacattctcctctgattcctta

SEQ ID NO: 14500 - DNA, 110 bp, synthetic construct; identical to SEQ ID NO: 14499
  source 1..110: mol_type = other DNA

SEQ ID NO: 14501 - DNA, 110 bp, synthetic construct
  source 1..110: mol_type = other DNA
tgtctctggagcctttgccaacaaataaacacactttttctttcctggctctcctttcttccaggctcactaactctacagcgtttcaaggccctttgggatttttcttc

SEQ ID NO: 14502 - DNA, 110 bp, synthetic construct
  source 1..110: mol_type = other DNA
ttcttccaggctcactaactctacagcgtttcaaggccctttgggatttttcttctgtccctcggtgaactcacaactcacgtgctttcagctattgcctgtgttcagat

SEQ ID NO: 14503 - DNA, 110 bp, synthetic construct
  source 1..110: mol_type = other DNA
tctactggagcctaaggattgatgttaacccccatgacaccactcagtttccttaccatcaaccaatcagagaattgtgcatgagctgatcacacgccctggggtgttcc

SEQ ID NO: 14504 - DNA, 110 bp, synthetic construct
  source 1..110: mol_type = other DNA
tgtcttaagggactacgtgtttaaaggagcttgtcgacaatcttagatgtttgccagcatgtaggtgagcttaactccccaagctggggttacctggttacctgtatgcc

SEQ ID NO: 14505 - DNA, 110 bp, synthetic construct
  source 1..110: mol_type = other DNA
cgggacaggctgatatttgcattcatgatgcatgttagcatatacaggacccaccaaccctgagctcatgcattaactcttacacacaatgtgccttgttgcaccaactg

SEQ ID NO: 14506 - DNA, 110 bp, synthetic construct
  source 1..110: mol_type = other DNA
aaccctgagctcatgcattaactcttacacacaatgtgccttgttgcaccaactgggtggacatacatattctcgtgtttcagcccagtcacacaggaggccactggttc

SEQ ID NO: 14507 - DNA, 110 bp, synthetic construct
  source 1..110: mol_type = other DNA
atttttaaaacaaaaatcttctgaaattgggtaactgaattcatgtataaatggtagaaggagcaggcagcatttcttttccgtttttcagagtctcctaaagcttggct

SEQ ID NO: 14508 - DNA, 110 bp, synthetic construct
  source 1..110: mol_type = other DNA
agaaggagcaggcagcatttcttttccgtttttcagagtctcctaaagcttggcttcataatgagccaagtgaatcacctgtagagggaatagccagtgtttcctgttct

SEQ ID NO: 14509 - DNA, 110 bp, synthetic construct
  source 1..110: mol_type = other DNA
gatatagagcttccctccttttctagggcaacatatggaaatatccacagaaacctgaagtgttccaggcagattgctgggataaaacctcattatggttttgtttttcc

SEQ ID NO: 14510 - DNA, 110 bp, synthetic construct
  source 1..110: mol_type = other DNA
tgagtttatccccatctctcttagagtcagctgagatggggcgagggagcatcggagctaaagaaagaatttggtccaccagcatgaccagtaagagatagtcatttata

SEQ ID NO: 14511 - DNA, 110 bp, synthetic construct
  source 1..110: mol_type = other DNA
cttcccatgtttcctcctccttcccgttttcagacctatctgtgcacctatctcagcagtagcaggcagaagtgaaacattgtttcttcattcttttccttcaggctttg

SEQ ID NO: 14512 - DNA, 110 bp, synthetic construct
  source 1..110: mol_type = other DNA
gcagtagcaggcagaagtgaaacattgtttcttcattcttttccttcaggctttgtttgttggcttattttctatgatgtggcactgtaagattcatctagggtgaatga

SEQ ID NO: 14513 - DNA, 110 bp, synthetic construct
  source 1..110: mol_type = other DNA
caagccacagctggcttggatccctaacccactgtaccaggcgggatagaacccgtatcccagtgctaagacgccatcaatcgcatcgcaccacagcaggaattcccaga

SEQ ID NO: 14514 - DNA, 110 bp, synthetic construct
  source 1..110: mol_type = other DNA
tatcccagtgctaagacgccatcaatcgcatcgcaccacagcaggaattcccagatacatacttatttatttttgtctttcatctttttagggccatacccacggcacat

SEQ ID NO: 14515 - DNA, 110 bp, synthetic construct
  source 1..110: mol_type = other DNA
cacaccataatcaggttgagcagagaagcaaagtaacaaaggctctgttaaagactattatctcttacaagacttagagctggggacccatctttcagctttgccaatat

SEQ ID NO: 14516 - DNA, 110 bp, synthetic construct
  source 1..110: mol_type = other DNA
ctgccttcttcttcctattactgaaaggactttagatatcagagtcctgggtccagctgcacttataacttctataaacagaagaagccattctatttcttaggactcta

SEQ ID NO: 14517 - DNA, 110 bp, synthetic construct
  source 1..110: mol_type = other DNA
tttttccttttttattctgttcacgtggtaggaaataattttggaaatgaaaatccctcataattcatgggaaggaagcaaaagagcagttttattcattaccctttctg

SEQ ID NO: 14518 - DNA, 110 bp, synthetic construct
  source 1..110: mol_type = other DNA
taattggccatatctgacacacacatctcctggttgaagaccagtacaataattgaatgttatatccacactttgatacattatttcaatatttcaaaactatgaggata

SEQ ID NO: 14519 - DNA, 110 bp, synthetic construct
  source 1..110: mol_type = other DNA
tggattgaatgtctttttgtccaagtgtcacctctctctaaatcttcaccaaacaaaaacaagattaatcattgtctcttctttgtctccatagtccaccactggagctg

SEQ ID NO: 14520 - DNA, 110 bp, synthetic construct
  source 1..110: mol_type = other DNA
aaaacaagattaatcattgtctcttctttgtctccatagtccaccactggagctggtgggagcaactgattgtaggagacagtttccagtattaacctgagccccttggg

SEQ ID NO: 14521 - DNA, 110 bp, synthetic construct
  source 1..110: mol_type = other DNA
gttatccactattattatcaacaatctaactgccaaaccctatgcccttctcatatatctctttactcatgatgacttggacgcataagacattgacagctactccttta

SEQ ID NO: 14522 - DNA, 110 bp, synthetic construct
  source 1..110: mol_type = other DNA
tatctctttactcatgatgacttggacgcataagacattgacagctactcctttatttagaccctctctcctttatccttgtcagttctccaccttctggacattctgat

SEQ ID NO: 14523 - DNA, 110 bp, synthetic construct
  source 1..110: mol_type = other DNA
caaacggcagacagagtttttataaatctgtaaaacatttacataacaataaaaagacctataacctcctaggaaaataattaaattttgagcaggtaggttctgcccat

SEQ ID NO: 14524 - DNA, 110 bp, synthetic construct; identical to SEQ ID NO: 14523
  source 1..110: mol_type = other DNA

SEQ ID NO: 14525 - DNA, 110 bp, synthetic construct
  source 1..110: mol_type = other DNA
tactactttaaaatggttttgcttccttcctgcagggtcagtggtaatgaactccatccagcctcttgccattctcgcagtattgttatgtcctaaagcaaatatattac

SEQ ID NO: 14526 - DNA, 110 bp, synthetic construct
  source 1..110: mol_type = other DNA
atcgaactcccccacttcctccacccaccactctgtgtacatgagtcccctaggtttaccataattgaaactgccagctccccagccaccaattattggctcctaggtgg

SEQ ID NO: 14527 - DNA, 110 bp, synthetic construct
  source 1..110: mol_type = other DNA
cggatgcaagctctgtactgattgtagaaaggggctgtgggaattgcatcatcacagggctcaaaagtggtataaacacatctaacttaagagaatcagagcagcaagga

SEQ ID NO: 14528 - DNA, 110 bp, synthetic construct
  source 1..110: mol_type = other DNA
agggctcaaaagtggtataaacacatctaacttaagagaatcagagcagcaaggagcatatgtgcactgcagagagaatttagtggaagcactgtcttagttgtcttagc

SEQ ID NO: 14529 - DNA, 110 bp, synthetic construct
  source 1..110: mol_type = other DNA
agaggcacctgtgttcttaggaggtctttagacagcctgtttgctgttgggtggggctgtgttcctgcctcctttgttgcttggcctgaggcttctcagctctcatggat

SEQ ID NO: 14530 - DNA, 110 bp, synthetic construct
  source 1..110: mol_type = other DNA
cctgtttgctgttgggtggggctgtgttcctgcctcctttgttgcttggcctgaggcttctcagctctcatggatggggccagatttttccaaaatggccatctccaggg

SEQ ID NO: 14531 - DNA, 110 bp, synthetic construct
  source 1..110: mol_type = other DNA
gctccgaaaatgatgtcagctggtcacagaggccgaggatagctgagtgactaactctgaaagtttcgattggaaaaaagtttggagggtggtcagaggctggaggaagg

SEQ ID NO: 14532 - DNA, 110 bp, synthetic construct
  source 1..110: mol_type = other DNA
ctctttctaaagtacaaccacaagaccatctcaaaaatggtcttgagatgaaaaattaagaacaattcctttatactacatataatgccattgttgaaatttcagttgtc

SEQ ID NO: 14533 - DNA, 110 bp, synthetic construct; identical to SEQ ID NO: 14532
  source 1..110: mol_type = other DNA

SEQ ID NO: 14534 - DNA, 110 bp, synthetic construct
  source 1..110: mol_type = other DNA
ctatacctgtatgcgcacttcccatcagctgttttggttgtaatggtgacgtgtgccacatggcttatgctggccaaagcctaaggaagaaaaggaaatggaattaaaga

SEQ ID NO: 14535 - DNA, 110 bp, synthetic construct
  source 1..110: mol_type = other DNA
cacactgcccctccttttatgttatcatgatagattagtgctatatatgacacttaattggtactctcagtatgctaagaataagctctactgaagttgaaatgaaaaac

SEQ ID NO: 14536 - DNA, 110 bp, synthetic construct
  source 1..110: mol_type = other DNA
aattggtactctcagtatgctaagaataagctctactgaagttgaaatgaaaaacagctttcttcagagggtttttcctattgtgtagagtagatttgtctgtctttaag

SEQ ID NO: 14537 - DNA, 110 bp, synthetic construct
  source 1..110: mol_type = other DNA
taatgcattcatagtttctgggaattggggcttgggcatctctgggggagggtatggtgtccattattcagcctaccaaataatatggattagaaattttacttcttttc

SEQ ID NO: 14538 - DNA, 110 bp, synthetic construct
  source 1..110: mol_type = other DNA
ggtgtccattattcagcctaccaaataatatggattagaaattttacttcttttccagatatctcatcagttgtgcctacagatgcattctttccctgtctgttttattt

SEQ ID NO: 14539 - DNA, 110 bp, synthetic construct
  source 1..110: mol_type = other DNA
tcctattttttaatttttatttttagctgcatgatgcagtggcttgatgtgggatttcagttcccagaccagggactgaacccgggctttagcagtgaaagcgccaagtc

SEQ ID NO: 14540 - DNA, 110 bp, synthetic construct; identical to SEQ ID NO: 14539
  source 1..110: mol_type = other DNA

SEQ ID NO: 14541 - DNA, 110 bp, synthetic construct
  source 1..110: mol_type = other DNA
ggtgggagggccttggaagacaggtcagcatcctttagctttgggataaagggcagaagcagccccgctctcctcaggtgggcctggctgacctcagctcagggatgcag

SEQ ID NO: 14542 - DNA, 110 bp, synthetic construct
  source 1..110: mol_type = other DNA
gaagcagccccgctctcctcaggtgggcctggctgacctcagctcagggatgcagctcatgtgcccttctctctgccttccccagcctcacccagggtccccaggacagc

SEQ ID NO: 14543 - DNA, 110 bp, synthetic construct
  source 1..110: mol_type = other DNA
tcagcacttaggcaaaaatgggacacagggagaaagctctttggacatcttttgtccagccatgacaatttttcttagtgtagtcctctctcacctggtggagggaattc

SEQ ID NO: 14544 - DNA, 110 bp, synthetic construct
  source 1..110: mol_type = other DNA
cttggggtgacctgagatatctggggatggaggaaaatcccttctcagtggcatggagcatgagggttcttcagacaaactaacagaggaggaagcgggagctgtgatgt

SEQ ID NO: 14545 - DNA, 110 bp, synthetic construct
  source 1..110: mol_type = other DNA
gagcatgagggttcttcagacaaactaacagaggaggaagcgggagctgtgatgtgctgatgagatggatagcatgtgtaggaccagagcggggtgagcaggaaaactga

SEQ ID NO: 14546 - DNA, 110 bp, synthetic construct
  source 1..110: mol_type = other DNA
tggtttaggcattggcatttccttatgaattggtttctaagatcatttcagccttcttagccagttgggagtggaaccttggagggaaaaggccagaggaagcaagaagg

SEQ ID NO: 14547 - DNA, 110 bp, synthetic construct
  source 1..110: mol_type = other DNA
cttagccagttgggagtggaaccttggagggaaaaggccagaggaagcaagaaggatcaaatgagaagtcagcaaagactactactaagccttacccacatcttaatttt

SEQ ID NO: 14548 - DNA, 110 bp, synthetic construct
  source 1..110: mol_type = other DNA
agtcctcttccatgctcatgtggtcatggtagaatttggtccattttggaagtaggactgaggtccgaatttctccctggctgttcaaagggatcactttcagcttccag

SEQ ID NO: 14549 - DNA, 110 bp, synthetic construct
  source 1..110: mol_type = other DNA
gactgaggtccgaatttctccctggctgttcaaagggatcactttcagcttccagagctgcccacagtcccttgccacctggccactctgctttcaggatagtaggagta

SEQ ID NO: 14550 - DNA, 110 bp, synthetic construct; identical to SEQ ID NO: 14548
  source 1..110: mol_type = other DNA

SEQ ID NO: 14551 - DNA, 110 bp, synthetic construct; identical to SEQ ID NO: 14549
  source 1..110: mol_type = other DNA

SEQ ID NO: 14552 - DNA, 110 bp, synthetic construct
  source 1..110: mol_type = other DNA
tctttaccatgtattgttcttattggtatagactcttagactgaattgccagacatgctgtgtgctctggtgcctgttacatatgtcatttgtattcccctaagcaagtt

SEQ ID NO: 14553 - DNA, 110 bp, synthetic construct
  source 1..110: mol_type = other DNA
attaagtgctttcaggaagttgaaatgtcactgtttgttgatcaactaggtcagccttttcatttgaggaagcttttgattttggctgttgatcactttcatgtattggg

SEQ ID NO: 14554 - DNA, 110 bp, synthetic construct
  source 1..110: mol_type = other DNA
ctacattctggggcagtgccagctcagccaggtctaagcttgtgctctcagggttctgcagttatccctagaccgtgacttgagaggcagctagaagggactttttgagg

SEQ ID NO: 14555 - DNA, 110 bp, synthetic construct
  source 1..110: mol_type = other DNA
cagattgaatctcaatccctccaaacctactccttccacatgaccccctatcagttaaagactttcctctcttccttgctcaccactcctaatggtcactgactccttgg

SEQ ID NO: 14556 - DNA, 110 bp, synthetic construct
  source 1..110: mol_type = other DNA
taaagactttcctctcttccttgctcaccactcctaatggtcactgactccttggagctctgacttcaatttgggagtttgcattttttactttataatttaactttatt

SEQ ID NO: 14557 - DNA, 110 bp, synthetic construct
  source 1..110: mol_type = other DNA
gtgaatgaaacagccatatgaggctcacccccctcctcaaagcattagggtgtggagagttccccagtgcgggtccaggtgaaaactagtcctgggctggttttattgtg

SEQ ID NO: 14558 - DNA, 110 bp, synthetic construct
  source 1..110: mol_type = other DNA
agagttccccagtgcgggtccaggtgaaaactagtcctgggctggttttattgtgtggtcaccactgtgtgcatccctaggggttgtaggcttggagggggaggtcagtc

SEQ ID NO: 14559 - DNA, 110 bp, synthetic construct
  source 1..110: mol_type = other DNA
gtgtttggctctctctcatcctttaggctgtccctggtctccaggtgaaaaccgtcctcccactcctagcttgtcagtccataacccagtgtctttctttcaaggcacct

SEQ ID NO: 14560 - DNA, 110 bp, synthetic construct
  source 1..110: mol_type = other DNA
cagtgtcatcacccagacctctgcgttgggagcccagggctgaaactggggttttgagctttcctcactctggttgctgacagatgcacaagagtatgtctgtggtggtt

SEQ ID NO: 14561 - DNA, 110 bp, synthetic construct
  source 1..110: mol_type = other DNA
gagctttcctcactctggttgctgacagatgcacaagagtatgtctgtggtggttcgggccatggtaggcttggcaggcaagggtcttccaggcacctttcactgtctgc

SEQ ID NO: 14562 - DNA, 110 bp, synthetic construct
  source 1..110: mol_type = other DNA
ttctcttgctaatgaagagaagttaggctgcaaatcattcaaagaggtcctgccggctcagttcacccccaagctgggcagatgggcccactgtggttcgagggccttgg

SEQ ID NO: 14563 - DNA, 110 bp, synthetic construct
  source 1..110: mol_type = other DNA
actgcctgcatcttgtgcatgtctgagtgtgtttttctaaggggaagatccataccgctcataaagattctcaaagggccactgacgcctgagggagaaggattagttca

SEQ ID NO: 14564 - DNA, 110 bp, synthetic construct
  source 1..110: mol_type = other DNA
ttcaaagctgtgcatccagaagataaaagaagtactgcattactttttggaataatttttctctctaaggaaatagagaagaagaatcaaaagcttggatttcagtgtgt

SEQ ID NO: 14565 - DNA, 110 bp, synthetic construct
  source 1..110: mol_type = other DNA
tatcactgagccgtgatgggaattcccactgttatttgtttttatgagtcaatccagattttcttcatgtgcttacaaacaagtatgaatatggatctttgtttttttcc

SEQ ID NO: 14566 - DNA, 110 bp, synthetic construct
  source 1..110: mol_type = other DNA
agattttcttcatgtgcttacaaacaagtatgaatatggatctttgtttttttccttttatacataaaagcttgctatatatactattctgcaccttgtgttcctctcag

SEQ ID NO: 14567 - DNA, 110 bp, synthetic construct
  source 1..110: mol_type = other DNA
atgtcacttgaggtcgtggacttggggcaaaattccacagcttgcctaattaccttttagagcagctcccctaaagtgttttcccatccacctcggccacaggagccctc

SEQ ID NO: 14568 - DNA, 110 bp, synthetic construct
  source 1..110: mol_type = other DNA
tttagagcagctcccctaaagtgttttcccatccacctcggccacaggagccctctcccagggctatctcccacactgggaccctcactgggctccacccgtgcagagac

SEQ ID NO: 14569 - DNA, 110 bp, synthetic construct
  source 1..110: mol_type = other DNA
tgctgcactcggcttctcactgcctcatcctccatctctgcggcctcatcctcatctgacaccacagtggcctctgggctgccttcccctcctggaggaaaaagcccccc

SEQ ID NO: 14570 - DNA, 110 bp, synthetic construct
  source 1..110: mol_type = other DNA
tactctgtagaagggtcccctccagtctcgctgggaagtttctaacaccggaagtgcccttggtggggactagagcagaggcagtaaaaacttagagcaagtagcttcag

SEQ ID NO: 14571 - DNA, 110 bp, synthetic construct
  source 1..110: mol_type = other DNA
gcccttggtggggactagagcagaggcagtaaaaacttagagcaagtagcttcagagaggttggctttgagcccttcacgccccaaactcctggcaatctgtacagcgga

SEQ ID NO: 14572 - DNA, 110 bp, synthetic construct
  source 1..110: mol_type = other DNA
gctggatttacttattctaagaggttctttaggattttctatatataagattgtatcatccacaaacagtgatcattttactgcttcctttctagtttggatgcttttta

SEQ ID NO: 14573 - DNA, 110 bp, synthetic construct
  source 1..110: mol_type = other DNA
tcatccacaaacagtgatcattttactgcttcctttctagtttggatgctttttaattctttttcttgcctaatttctctgattagaacttctgtgttgaatagatatgg

SEQ ID NO: 14574 - DNA, 110 bp, synthetic construct
  source 1..110: mol_type = other DNA
taaactggcagacaaccagcagaacggttacaaaataattgtgcctgatatttccttttattgatgtcattcatgtgtcacactgcctcagcttcggtgtacagcatact

SEQ ID NO: 14575 - DNA, 110 bp, synthetic construct
  source 1..110: mol_type = other DNA
ttttattgatgtcattcatgtgtcacactgcctcagcttcggtgtacagcatactgacctgattcatttataggttgcaacgtgattgccattgcagcctcagccaacac

SEQ ID NO: 14576 - DNA, 110 bp, synthetic construct
  source 1..110: mol_type = other DNA
aattgtgtagggtctgggaccaggggtgcttagtcttggggcacctgactgggttcctccccagccatcctgtagagctctgaccataacccttgtgctctgcacccagg

SEQ ID NO: 14577 - DNA, 110 bp, synthetic construct
  source 1..110: mol_type = other DNA
ctaacttccttttaccacaggctccagatatttttagatacatctctcctttacctaccctctctgatcccagtagtcccttgcctccttgctccttcaggccttgactg

SEQ ID NO: 14578 - DNA, 110 bp, synthetic construct
  source 1..110: mol_type = other DNA
taccctctctgatcccagtagtcccttgcctccttgctccttcaggccttgactggttggttccctgaggaattccttctggtttccctatgtctggcccatgcttttac

SEQ ID NO: 14579 - DNA, 110 bp, synthetic construct
  source 1..110: mol_type = other DNA
cacccattttcatagcagcattatttataatgactaaaatgtggaagcagcttaagcgtacatcagtagatcaatgaatacacaaaatgtggcatatatatatatatgca

SEQ ID NO: 14580 - DNA, 110 bp, synthetic construct; identical to SEQ ID NO: 14579
  source 1..110: mol_type = other DNA

SEQ ID NO: 14581 - DNA, 110 bp, synthetic construct
  source 1..110: mol_type = other DNA
aaatgaagtctttgagactagtcctttaggagaaccaagttttcaaagacttttccaatgaaaattgacaaaaatttttttaagctcttgctttgaaaaagctcttcaaa

SEQ ID NO: 14582 - DNA, 110 bp, synthetic construct
  source 1..110: mol_type = other DNA
ctaccccactgtcatcaggtaagggttgcaggtgcaactcctgctcttctcctcctgagacctgatttgggccatccctcctatgccctcacgctattccccaaagagct

SEQ ID NO: 14583 - DNA, 110 bp, synthetic construct
  source 1..110: mol_type = other DNA
tgagacctgatttgggccatccctcctatgccctcacgctattccccaaagagcttacagagctggctctggggcagcagggatggatggggcctgaggcatggagcatt

SEQ ID NO: 14584 - DNA, 110 bp, synthetic construct
  source 1..110: mol_type = other DNA
acagggacagagagggcagatagggaggtgagagtgagaaagctgaaatcatcttgctaagggtcaggccgttgtgtgcgaagaaagatcctattcgatcttgacgtgat

SEQ ID NO: 14585 - DNA, 110 bp, synthetic construct
  source 1..110: mol_type = other DNA
acacaacacactatgcacgtaccacacacatggacataccacacacatatacacacctcatgcagtgagtggacactgagagttcttcactctgtgccctttctcctgga

SEQ ID NO: 14586 - DNA, 110 bp, synthetic construct; identical to SEQ ID NO: 14585
  source 1..110: mol_type = other DNA

SEQ ID NO: 14587 - DNA, 110 bp, synthetic construct
  source 1..110: mol_type = other DNA
tttttatgttttggccacagtctggtcatatggaagttcctgggccaggaattgaatccgagctgcaggtgcaacctgtgccacagctttggcaacaccagattcttaac

SEQ ID NO: 14588 - DNA, 110 bp, synthetic construct
  source 1..110: mol_type = other DNA
atccgagctgcaggtgcaacctgtgccacagctttggcaacaccagattcttaacccactgtgggaactccaaagtttttttgttttgttttgtttttggctgtgcctgc

SEQ ID NO: 14589 - DNA, 110 bp, synthetic construct
  source 1..110: mol_type = other DNA
tgtttgttgatatttgctgtattggagcacacatactgcattaactgtcagagtgatgacgtgtgtatagcctctggaagattctatattcttaagagaacaaggatttt

SEQ ID NO: 14590 - DNA, 110 bp, synthetic construct
  source 1..110: mol_type = other DNA
aaccattaagcccattttacaggtaaggaaattgaggcgatgaggggttaagtaacaaatatgcctggggtcatgaagctcacgaatgtgagaaccaggaggtgaactca

SEQ ID NO: 14591 - DNA, 110 bp, synthetic construct
  source 1..110: mol_type = other DNA
caaatatgcctggggtcatgaagctcacgaatgtgagaaccaggaggtgaactcagtgccatccttcaagacttagagcaaccactaccccttctggaaaagtttctgag

SEQ ID NO: 14592 - DNA, 110 bp, synthetic construct
  source 1..110: mol_type = other DNA
agggaaactctggctcaggccaggcgacaggaagcaagcaggtttctggtcctagttttgctctgcatcttctgcagtgtcatcagctcgtgtctggctgccctgatcca

SEQ ID NO: 14593 - DNA, 110 bp, synthetic construct
  source 1..110: mol_type = other DNA
ttttgctctgcatcttctgcagtgtcatcagctcgtgtctggctgccctgatccatgggaccttaaagctctggctgagacctccatggaggtccaggcccaaatctctg

SEQ ID NO: 14594 - DNA, 110 bp, synthetic construct
  source 1..110: mol_type = other DNA
gaagaggattacagatggcaaataaagtcatgaaaagatgtttagggagttctgttgtggctcagcagaaatgaatctgactggtatctgtgaggatgtgggtccgatcc

SEQ ID NO: 14595 - DNA, 110 bp, synthetic construct; identical to SEQ ID NO: 14594
  source 1..110: mol_type = other DNA

SEQ ID NO: 14596 - DNA, 110 bp, synthetic construct
  source 1..110: mol_type = other DNA
caggatgttctggaggtgttggcagtaaggacaaaaggcagggtggggagactgaggtgagagatgcttaggaaaccatgaagcaggatcacctctctaagagcaggaga

SEQ ID NO: 14597 - DNA, 110 bp, synthetic construct
  source 1..110: mol_type = other DNA
ggtgagagatgcttaggaaaccatgaagcaggatcacctctctaagagcaggagagagtgaggtctgagtcctggtgggtgtgattgttaaggtgagaagggaagagggc

SEQ ID NO: 14598 - DNA, 110 bp, synthetic construct
  source 1..110: mol_type = other DNA
aaagcccatacgtgcccactgggccactcacgttcacgatgaggaagtccagccagcaccaggcattggtgaaataactgtttaagccataggccacccacttgagcagc

SEQ ID NO: 14599 - DNA, 110 bp, synthetic construct
  source 1..110: mol_type = other DNA
gcaccaggcattggtgaaataactgtttaagccataggccacccacttgagcagcatctcaaacacaaagataaacgtgaacaccctgtcagtgtactccagcaaggcct

SEQ ID NO: 14600 - DNA, 110 bp, synthetic construct
  source 1..110: mol_type = other DNA
taaaggaattgtattgcaaaagaaaccatgagccctgactgaaaagcctttgactgtttaaatctggccatctttctacaagcaggaggcaagctttgaaggctgtatat

SEQ ID NO: 14601 - DNA, 110 bp, synthetic construct
  source 1..110: mol_type = other DNA
gtttaaatctggccatctttctacaagcaggaggcaagctttgaaggctgtatatgccttcttcagatatggcacagtcacttctaggagcagtccctcagagagctgac

SEQ ID NO: 14602 - DNA, 110 bp, synthetic construct
  source 1..110: mol_type = other DNA
gttaggcatatgattggaacaacaaggaaattggacaggtgagtaagctgtctatagtggtggaagtgtgaccacattatccatgctcctgcccagtagtcagagattga

SEQ ID NO: 14603 - DNA, 110 bp, synthetic construct
  source 1..110: mol_type = other DNA
tataccttattgattacccaattgttccaaggaaatttaattcttatgaaactgggcagccaactctggtgtcttttctctgagctcaattcttccgcataccatgtcat

SEQ ID NO: 14604 - DNA, 110 bp, synthetic construct
  source 1..110: mol_type = other DNA
agactcagttctgaaatggatccccagaaaggtctattaaagataccacagaacttagcaaggagagtgacagatcctcccatgaaggtgagctttcaaattaacactcc

SEQ ID NO: 14605 - DNA, 110 bp, synthetic construct
  source 1..110: mol_type = other DNA
tagcaaggagagtgacagatcctcccatgaaggtgagctttcaaattaacactccaaagtgtacgatgagacaaacataaaaccagtagccctaagaaattaaccacagg

SEQ ID NO: 14606 - DNA, 110 bp, synthetic construct
  source 1..110: mol_type = other DNA
agagctgtgattggcacacaagcttagagagatgaaggtgctaaaaagactaattggaaaccagggcttctgaatcttcatgcctaggtggcccaattcatcttggactt

SEQ ID NO: 14607 - DNA, 110 bp, synthetic construct
  source 1..110: mol_type = other DNA
tgcctctagaggctagcagaaacaaacacaaatcctttctggagaaattccactctgatccaggccttaagcaattcctatatgtaagtattaataaaaattagtatttc

SEQ ID NO: 14608 - DNA, 110 bp, synthetic construct
  source 1..110: mol_type = other DNA
tgatccaggccttaagcaattcctatatgtaagtattaataaaaattagtatttcaggagttcccattgtggctctgcaggttcagaacccaacatagtatccatgagga

SEQ ID NO: 14609 - DNA, 110 bp, synthetic construct
  source 1..110: mol_type = other DNA
atcctggattatcccagtaggcccaatctaatcatgtgagctcttaaaaatgaaaaaactttctctgctagagacagaagtcagagatgtgaggcatgagagggaccctc

SEQ ID NO: 14610 - DNA, 110 bp, synthetic construct
  source 1..110: mol_type = other DNA
atccaatacacaattgaatgggagccacaggcagagagcatgacagtgggaggaatcctccttccagaacccaagagctggggagataccctgttttcttttgccaagat

SEQ ID NO: 14611 - DNA, 110 bp, synthetic construct
  source 1..110: mol_type = other DNA
ttcaaattcttggcagtaggattaattcagatatccttggaggacaggctgtctttatctatcagtgtttttagatatgcgtgccctttgacccatcaactctacttcag

SEQ ID NO: 14612 - DNA, 110 bp, synthetic construct
  source 1..110: mol_type = other DNA
tatctatcagtgtttttagatatgcgtgccctttgacccatcaactctacttcaggaattagaacacacaaaaatgttgaccatggcattgtaaaagaaaccaaatatgg

SEQ ID NO: 14613 - DNA, 110 bp, synthetic construct
  source 1..110: mol_type = other DNA
ctctttcacactatctgctattgattttatgtgacatctaagtgttgtttaatcaagtaactttgccaggagcttgctctggttttcctcagtagcctatgactgaattt

SEQ ID NO: 14614 - DNA, 110 bp, synthetic construct
  source 1..110: mol_type = other DNA
gttgttgccatgagctctagtgtagctcgcagatgcaacttggaccctgtgtgactgtagtgtaggccaggggctataactctgatttgatccttagcctgggaacttcc

SEQ ID NO: 14615 - DNA, 110 bp, synthetic construct
  source 1..110: mol_type = other DNA
gtatcctttgttggtgaatctctgtctgttgaccatctttctttagagatactgtcacagaacagctggcgcccaaagtctataccacccaggcttcacctgtcaccgag

SEQ ID NO: 14616 - DNA, 110 bp, synthetic construct
  source 1..110: mol_type = other DNA
cacagaacagctggcgcccaaagtctataccacccaggcttcacctgtcaccgagagcagattgattctgttaaactctgcactctagaggtcagaccattcctctctgt

SEQ ID NO: 14617 - DNA, 110 bp, synthetic construct; identical to SEQ ID NO: 14615
  source 1..110: mol_type = other DNA

SEQ ID NO: 14618 - DNA, 110 bp, synthetic construct; identical to SEQ ID NO: 14616
  source 1..110: mol_type = other DNA

SEQ ID NO: 14619 - DNA, 110 bp, synthetic construct
  source 1..110: mol_type = other DNA
tggtgtgggcagcaaggtcccttccatagccctgagtcaggcagactctgtgccaggcatgctatagtcagagtctcatttgaccctcaattcttggcttgcgaactggg

SEQ ID NO: 14620 - DNA, 110 bp, synthetic construct
  source 1..110: mol_type = other DNA
ggcatgctatagtcagagtctcatttgaccctcaattcttggcttgcgaactgggtgttctcagctggtcgcagagatgataaaatagagctgaagtcagagtttaccca

SEQ ID NO: 14621 - DNA, 110 bp, synthetic construct
  source 1..110: mol_type = other DNA
catcttcttccaaaagaagtgacacaggtgccaggcaccgtaaagcttatctcagaggacgggaaaccaaagcttcctttgtagcagactctgtctctcccattcatctc

SEQ ID NO: 14622 - DNA, 110 bp, synthetic construct
  source 1..110: mol_type = other DNA
aggacgggaaaccaaagcttcctttgtagcagactctgtctctcccattcatctccagcttccaatgtttactccggccctttccttcttgggtggtagaaatgcctcca

SEQ ID NO: 14623 - DNA, 110 bp, synthetic construct
  source 1..110: mol_type = other DNA
aggtgagcttgcaccacaaaggtttgtggtcacaagagcaaattgaacacaattgttactcttgcaagtaaaatctgtcattgactataaaccctcctcccccaacccag

SEQ ID NO: 14624 - DNA, 110 bp, synthetic construct
  source 1..110: mol_type = other DNA
aagcagggcacctgccaggtcactgtcagtcactctgctaaccatgggagggcagacttcatgggaaatgcttccttgctagtactttttcaaaccctagtgtagacctg

SEQ ID NO: 14625 - DNA, 110 bp, synthetic construct
  source 1..110: mol_type = other DNA
acttcatgggaaatgcttccttgctagtactttttcaaaccctagtgtagacctggtataagtcttctccgctatctgagatctgatgctcaggggccagaacatgactg

SEQ ID NO: 14626 - DNA, 110 bp, synthetic construct
  source 1..110: mol_type = other DNA
cagcaccttctcattccaagcatgccttccttgcattgcacttactgacatctctgcaacattcttcatctatactgtaagctcactctcagcaggatatttatctgatc

SEQ ID NO: 14627 - DNA, 110 bp, synthetic construct
  source 1..110: mol_type = other DNA
cctcactgctacatttgacaccccgaggtccagctaccttgctggagtgtgtgtgagtcaggagcagggtctctatcttactattatattcccaaggtccaactcagggc

SEQ ID NO: 14628 - DNA, 110 bp, synthetic construct
  source 1..110: mol_type = other DNA
agtcaggagcagggtctctatcttactattatattcccaaggtccaactcagggcttggctgctcttactgactgaatgaggcctataaatatacctagaagtcagttgg

SEQ ID NO: 14629 - DNA, 110 bp, synthetic construct
  source 1..110: mol_type = other DNA
cacctcttgcttggatatatgtaaaaatacagaaggctctatctccagaccttcggtaaggagaagcaacaggggccttgtcagcttggagagaagggaagcagacttta

SEQ ID NO: 14630 - DNA, 110 bp, synthetic construct
  source 1..110: mol_type = other DNA
tcctgattatatatattttaaagaaaggttctgtctaggcttctagacaagccagaattcttgtattgtgctttctgaaagctgttttttcctgccccctcccccgcgcc

SEQ ID NO: 14631 - DNA, 110 bp, synthetic construct
  source 1..110: mol_type = other DNA
ttttgttacttatcttcatttacacatgttgctttccaactcaccctctgctcatggagcaggggccctgccatggtctctacacctagcagcttcaggctttacaaagc

SEQ ID NO: 14632 - DNA, 110 bp, synthetic construct
  source 1..110: mol_type = other DNA
ggagcaggggccctgccatggtctctacacctagcagcttcaggctttacaaagcaaaattcttgcaacaactcaaatgtcattaaaaggaaaaatcatagaaaaatata

SEQ ID NO: 14633 - DNA, 110 bp, synthetic construct
  source 1..110: mol_type = other DNA
taagtatagaagattatctgtttaatctgggtcagcctgatacaatcagttcaaagtccttaaaagcaggactaaggcttctgagagagctagagagggaaaaaaattct

SEQ ID NO: 14634 - DNA, 110 bp, synthetic construct
  source 1..110: mol_type = other DNA
gtccttaaaagcaggactaaggcttctgagagagctagagagggaaaaaaattctgactgtggataacagcttcagcccatgctggtgaagtgccagcctccttctggtc

SEQ ID NO: 14635 - DNA, 110 bp, synthetic construct
  source 1..110: mol_type = other DNA
acttaggagagggcattgatgagttccaaatattttccttagtggaattccttctcctatctttgtgatgttttcccctctagactcaggaccatatgctcttactctgg

SEQ ID NO: 14636 - DNA, 110 bp, synthetic construct
  source 1..110: mol_type = other DNA
cctatctttgtgatgttttcccctctagactcaggaccatatgctcttactctggcctttgagacaacagcaacagagtgtcttctagtaatacctggaacagggctcac

SEQ ID NO: 14637 - DNA, 110 bp, synthetic construct
  source 1..110: mol_type = other DNA
attaacacctctcagttcagttccatcagggccactttcagtgaaagggaccacaatcaagaccttaaaaatgcccgtctttggagcttgggaaatgtgttaatgtaatt

SEQ ID NO: 14638 - DNA, 110 bp, synthetic construct
  source 1..110: mol_type = other DNA
caaactttgggcgtccttgtgacagcgaggtctcactaaccctgtggtgcggcagcgatgggagctttgggacttttgggagcgcagtaccctgggacagcaagcaaccc

SEQ ID NO: 14639 - DNA, 110 bp, synthetic construct
  source 1..110: mol_type = other DNA
cgatgggagctttgggacttttgggagcgcagtaccctgggacagcaagcaacccgagccaagcgcaaaaccaatcaatgtatgtggaatgaaggagcatcgctagcgca

SEQ ID NO: 14640 - DNA, 110 bp, synthetic construct
  source 1..110: mol_type = other DNA
ttttcctggcccgctgttctttatttacctagtttctctgattaggtttggtgtagagattacatagtgtttgggtgtagagattacatggtgtttctaatgataggttc

SEQ ID NO: 14641 - DNA, 110 bp, synthetic construct
  source 1..110: mol_type = other DNA
gagattacatagtgtttgggtgtagagattacatggtgtttctaatgataggttctttggtgttgacgtaatgtgtagtaaataaataggtggtgaatgtgtgaattaaa

SEQ ID NO: 14642 - DNA, 110 bp, synthetic construct
  source 1..110: mol_type = other DNA
aagaacagcaaagacaaacagaagatctcaaaagcagctagagataaaagatatacttcaaaagagtaacaaccagactgacacttgattgccagcagcagtagaatgat

SEQ ID NO: 14643 - DNA, 110 bp, synthetic construct
  source 1..110: mol_type = other DNA
gatggaaacttagagagatttatgtgccaacttctcttttatagagaagaaactcagaattcagagaagtaaagtgacttgtccactgtcctacagagaatgaggggaag

SEQ ID NO: 14644 - DNA, 110 bp, synthetic construct
  source 1..110: mol_type = other DNA
agaattcagagaagtaaagtgacttgtccactgtcctacagagaatgaggggaagtgaattgtaatcctgtcttggccatggcttccaactcagactgtttttgtgtaat

SEQ ID NO: 14645 - DNA, 110 bp, synthetic construct
  source 1..110: mol_type = other DNA
ccactgagtcagtctgcttcctgagtgttttctctctcctcgctcaaagctcctgctgcctgcccttgccccagggctggctggggtggcaggactcactgtcaggaaag

SEQ ID NO: 14646 - DNA, 110 bp, synthetic construct
  source 1..110: mol_type = other DNA
tgcagaacttgcttttctgctaactgtcggaatgtgttctgtctatgtacaagagtgggggactcacagtggaacaggagcattgcagggggcacatttcaagcaagtgc

SEQ ID NO: 14647 - DNA, 110 bp, synthetic construct
  source 1..110: mol_type = other DNA
cctcacctctctgagtctcagactggttacccatccttccagcaaggctaccgagaacattgtcctttccctaaacccgtcatgaagcttagttttctcacccagatatt

SEQ ID NO: 14648 - DNA, 110 bp, synthetic construct
  source 1..110: mol_type = other DNA
aacattgtcctttccctaaacccgtcatgaagcttagttttctcacccagatatttggagctggtgtttgctgttttccttcgttattaccaaacacttttttaaagctc

SEQ ID NO: 14649 - DNA, 110 bp, synthetic construct; identical to SEQ ID NO: 14647
  source 1..110: mol_type = other DNA

SEQ ID NO: 14650 - DNA, 110 bp, synthetic construct; identical to SEQ ID NO: 14648
  source 1..110: mol_type = other DNA

SEQ ID NO: 14651 - DNA, 110 bp, synthetic construct
  source 1..110: mol_type = other DNA
gaaaggatatagattactcagacatggtaaccacacttctcgccaaaaggggaccttaattaagcaagcaactccaggtttacatttttcaaatgggttattttcttaaa

SEQ ID NO: 14652 - DNA, 110 bp, synthetic construct
  source 1..110: mol_type = other DNA
tcctgtgggaagttctggagcatgaagtgtactgtggaggtggtcccagcttgcggcaagagggctggccttttatacccccatgtcagtcactcattggctgtgggctg

SEQ ID NO: 14653 - DNA, 110 bp, synthetic construct
  source 1..110: mol_type = other DNA
agaccacaggtgccctggatttaggtggtgcctccacccaaatatctttcgcagcagaagagaaggtggggctgaacaccagcgacattatgaaggtgtccctgtatggc

SEQ ID NO: 14654 - DNA, 110 bp, synthetic construct
  source 1..110: mol_type = other DNA
catcttgatagggattgcattgaatctgtagatggtttttggtagtattgacaatttttcttttcttttttggcctccctgtgccatatggaattcccaggccaaggatc

SEQ ID NO: 14655 - DNA, 110 bp, synthetic construct; identical to SEQ ID NO: 14654
  source 1..110: mol_type = other DNA

SEQ ID NO: 14656 - DNA, 110 bp, synthetic construct
  source 1..110: mol_type = other DNA
atgggttgtggcaaaaggagtacccagcgcaatattttcagtgttgaatacattctttctttcttatttatggagttctcagtctaggagtcaggtctgagctgcagttt

SEQ ID NO: 14657 - DNA, 110 bp, synthetic construct
  source 1..110: mol_type = other DNA
tttcagtgttgaatacattctttctttcttatttatggagttctcagtctaggagtcaggtctgagctgcagttttgacttataccacagtgtggcaatgccagatcctt

SEQ ID NO: 14658 - DNA, 110 bp, synthetic construct
  source 1..110: mol_type = other DNA
aatagattcaagtcccaagcctttgcttcaggacagatctcacctcctgggaacgcttcctgactctcctgtggccttgtgcaaagaataccctaggtaccagcttgacc

SEQ ID NO: 14659 - DNA, 110 bp, synthetic construct
  source 1..110: mol_type = other DNA
cagcatttctgttatcacatgttatcagcatcagctctccctgcggcagagtgcttactggaatctttcagaagcccacttaccaagcatcccacaccggagaggtccca

SEQ ID NO: 14660 - DNA, 110 bp, synthetic construct
  source 1..110: mol_type = other DNA
tactggaatctttcagaagcccacttaccaagcatcccacaccggagaggtcccaggtctccagaaacaaggccctttccatgagcctgaggtggaattaacttcccatg

SEQ ID NO: 14661 - DNA, 110 bp, synthetic construct
  source 1..110: mol_type = other DNA
gaccccttccaatctccatatttttggtatcatcatttagtggttctagactacagctctggagccagacagctgtgttgaatctcagctgtaataattactaagagtag

SEQ ID NO: 14662 - DNA, 110 bp, synthetic construct
  source 1..110: mol_type = other DNA
ttatatataaatttaaaaatatgcaatggggaatgtagtttttcaagattctttttgagttgtgcatgcaagctagaatgtgacgaccacaaaactatgggtaggttcca

SEQ ID NO: 14663 - DNA, 110 bp, synthetic construct; identical to SEQ ID NO: 14662
  source 1..110: mol_type = other DNA

SEQ ID NO: 14664 - DNA, 110 bp, synthetic construct
  source 1..110: mol_type = other DNA
cctttgtttcacatcagcaaacatgatttctgccgctaagactgagctagactcgtttgttctcaggaaacctatgtggctcttggtgaagatttcaggagtgagttgtc

SEQ ID NO: 14665 - DNA, 110 bp, synthetic construct
  source 1..110: mol_type = other DNA
gcagtgctctccatacaacagccctggatgtcactggagaaaaaccaagccaccgggtctcctcccacttccagtcctccatgtatttttggaaatacatggtgtagtca

SEQ ID NO: 14666 - DNA, 110 bp, synthetic construct
  source 1..110: mol_type = other DNA
gtgaggggaggcgagtcacttcaccactctttttttttttaatttattttattagagcacaattgatttacaatgttggtttacattctgctgtagagtgaagggattca

SEQ ID NO: 14667 - DNA, 110 bp, synthetic construct
  source 1..110: mol_type = other DNA
gcaggagtgggttcccctgtgaagccagaaatggtgcaacccaaggagttagccagcaagaaggtggccaagccaaccctcaaggagccgtattaagactcacatcttag

SEQ ID NO: 14668 - DNA, 110 bp, synthetic construct
  source 1..110: mol_type = other DNA
gcaagaaggtggccaagccaaccctcaaggagccgtattaagactcacatcttagggcaaatgtggggacagtatgttcaaggctcaggcagggaacaaggcaggagtag

SEQ ID NO: 14669 - DNA, 110 bp, synthetic construct
  source 1..110: mol_type = other DNA
ctattgttgctttattgttactttgagtggttattaatagggagttcccattgtggctcagtaggttaagaacccaccataccgtctgtgaggacacatgtttgagccct

SEQ ID NO: 14670 - DNA, 110 bp, synthetic construct
  source 1..110: mol_type = other DNA
tcccattgtggctcagtaggttaagaacccaccataccgtctgtgaggacacatgtttgagcccttgcccccccattagtgggttaaggatctggcatttctgcaagctg

SEQ ID NO: 14671 - DNA, 110 bp, synthetic construct
  source 1..110: mol_type = other DNA
tgtggcagggattttaagataagaaaatgattttgctgagttgtatgacagtttgtcactcgtccttcttgtctacaggctaccgttggattgattcgaaatcttgccct

SEQ ID NO: 14672 - DNA, 110 bp, synthetic construct
  source 1..110: mol_type = other DNA
tggacaaatcatacagttcctggtctaaaaaaaggggagacctgatagcctatactgttgcagagaaacatgacagatattctccccagctctcaaaagatggagagatg

SEQ ID NO: 14673 - DNA, 110 bp, synthetic construct
  source 1..110: mol_type = other DNA
tgttgcagagaaacatgacagatattctccccagctctcaaaagatggagagatggccaagcccctccagatcaggctctgattcatcttgccaacttcacttcttcctc

SEQ ID NO: 14674 - DNA, 110 bp, synthetic construct
  source 1..110: mol_type = other DNA
ggaaggctccagaatgtccgcgatgcccatggtcagctgagcaaagatggggagcaggctgtcgacaccatcagacctgagttcagagtcttgggtgctaaaggtgcaaa

SEQ ID NO: 14675 - DNA, 110 bp, synthetic construct
  source 1..110: mol_type = other DNA
attctgtggttttgaaatttttcataatagaaaagtgggtaaaaatatcatccatggcaatgggaacttgaaagaggagaggtcttgtttgagaatgaatattatttgaa

SEQ ID NO: 14676 - DNA, 110 bp, synthetic construct
  source 1..110: mol_type = other DNA
ggcaatgggaacttgaaagaggagaggtcttgtttgagaatgaatattatttgaaagtggaatttcaagaggtgggttgggagctgaatatcttgagataagaagtcaaa

SEQ ID NO: 14677 - DNA, 110 bp, synthetic construct
  source 1..110: mol_type = other DNA
tgatatgtgaccaacttcattcttatgcatgtgagtgaaacttattttgagatatttacaggttcatatgcagttgtaagaaacaatacagacagatgccgtatatatgt

SEQ ID NO: 14678 - DNA, 110 bp, synthetic construct; identical to SEQ ID NO: 14677
  source 1..110: mol_type = other DNA

SEQ ID NO: 14679 - DNA, 110 bp, synthetic construct
  source 1..110: mol_type = other DNA
atacagctctccatttgatggcaagaatgtcaggtatctccagagtggaaagagctggctttaccctgcttccttgctttgcttccatgccttacatagtatactctggg

SEQ ID NO: 14680 - DNA, 110 bp, synthetic construct
  source 1..110: mol_type = other DNA
tggctttaccctgcttccttgctttgcttccatgccttacatagtatactctgggtgatgcaggaagacccccttggtccccactgaggcagggtgagagatgccctgaa

SEQ ID NO: 14681 - DNA, 110 bp, synthetic construct
  source 1..110: mol_type = other DNA
gtaaatgataaacttatttgcattaatctactgaaatgttggttccttttttccacaagccagctttatccattctaacagttctctatccaaaaggtctgattgtataa

SEQ ID NO: 14682 - DNA, 110 bp, synthetic construct
  source 1..110: mol_type = other DNA
aggaatctgtcagagcaccagcactgctatgcacagtcccctgcctgtgagctgaggggcaaccgtacagtgtgcttcaggtgggcaacgaaggagtcagagtgaccaga

SEQ ID NO: 14683 - DNA, 110 bp, synthetic construct
  source 1..110: mol_type = other DNA
ggggcaaccgtacagtgtgcttcaggtgggcaacgaaggagtcagagtgaccagaaattaagtacggggaacttaggagaccacacctgatttcgagatgacaaaagaaa

SEQ ID NO: 14684 - DNA, 110 bp, synthetic construct
  source 1..110: mol_type = other DNA
cctcctgcgtgtgcattttgatgagctgcaaatgactagatgcctggtcccctagggctgactggctggtctggaatccttccttctgttgggatgcatgacaacgaaca

SEQ ID NO: 14685 - DNA, 110 bp, synthetic construct
  source 1..110: mol_type = other DNA
tccagagatactactgatcctgttgtgccacaatgggaactcctcttttaaatatttatcatatatactcttattaggctcagcataaacatctctgtgttgccttagca

SEQ ID NO: 14686 - DNA, 110 bp, synthetic construct
  source 1..110: mol_type = other DNA
caccattccctcctcaaaaactccaccatgtttttgcccctgaacgccactaaaaataacccctgagaaatgatgcctgttggcaatctaatggtcaattctccattctc

SEQ ID NO: 14687 - DNA, 110 bp, synthetic construct
  source 1..110: mol_type = other DNA
ataacccctgagaaatgatgcctgttggcaatctaatggtcaattctccattctcatcttactgacacgctaagccgcatctgacactggtgttattcccttcatctcta

SEQ ID NO: 14688 - DNA, 110 bp, synthetic construct
  source 1..110: mol_type = other DNA
caaacactgagggaaaaaaatcaagtcacaaaggaatacatattgttttgatacaaaaggcaaaagtaggcaaatccaacctttatcatttaagaaggcatgcacaggct

SEQ ID NO: 14689 - DNA, 110 bp, synthetic construct
  source 1..110: mol_type = other DNA
aaaggcaaaagtaggcaaatccaacctttatcatttaagaaggcatgcacaggctgacaaaggaatatgcatgattagtgtgaatgtcaggatagtggtcccctcctcaa

SEQ ID NO: 14690 - DNA, 110 bp, synthetic construct
  source 1..110: mol_type = other DNA
tgttctaaagaggtgcccgccaaccccagtgagatccactacctaggaaacctgttcacttttccacccttcctctcagcacttcagtcattataattagcccagttacc

SEQ ID NO: 14691 - DNA, 110 bp, synthetic construct
  source 1..110: mol_type = other DNA
caggcatctgggtttatttctgggctttctattctgttccattggtctgtatgtctgttttcatactatagctttgtaatattgtctgaaatctggagagttatgcctcc

SEQ ID NO: 14692 - DNA, 110 bp, synthetic construct; identical to SEQ ID NO: 14691
  source 1..110: mol_type = other DNA

SEQ ID NO: 14693 - DNA, 110 bp, synthetic construct
  source 1..110: mol_type = other DNA
ttctcccgtgcagctcatctcaattcagaccagctgcttttcaatggcccagtagcctcttctggctggggggtaccatacttgacagcgtaagagactgtctacaactg

SEQ ID NO: 14694 - DNA, 110 bp, synthetic construct
  source 1..110: mol_type = other DNA
cctcttctggctggggggtaccatacttgacagcgtaagagactgtctacaactgttttccatgattttttagtttgtacttatccttttttccttctgaatcctagaga

SEQ ID NO: 14695 - DNA, 110 bp, synthetic construct
  source 1..110: mol_type = other DNA
taataagcaaccattgtgccgccaaactccaaagaatagactctaggactcatgacacaactgaaaaaaagcactgaaccctgactggatctgcatatcacctgatgacc

SEQ ID NO: 14696 - DNA, 110 bp, synthetic construct
  source 1..110: mol_type = other DNA
cacaactgaaaaaaagcactgaaccctgactggatctgcatatcacctgatgacctcaaagtaaagatctcccagaactgaagcagacaacatctgatgagacagctctc

SEQ ID NO: 14697 - DNA, 110 bp, synthetic construct; identical to SEQ ID NO: 14695
  source 1..110: mol_type = other DNA

SEQ ID NO: 14698 - DNA, 110 bp, synthetic construct
  source 1..110: mol_type = other DNA
ggactcatgacacaactgaaaaaaagcactgaaccctgactggatctgcatatcacctgatgacctcaaagtaaagatctcccagaactgaagcagacaacatctgatga

SEQ ID NO: 14699 - DNA, 110 bp, synthetic construct
  source 1..110: mol_type = other DNA
atatgctgcaggagcgtcccactcccacaccccccacaccccccaaaaaatacatattgaagttatctagtagcacagtgggttaaggacctggtattgtcactgcagtg

SEQ ID NO: 14700 - DNA, 110 bp, synthetic construct
  source 1..110: mol_type = other DNA
gtcccactcccacaccccccacaccccccaaaaaatacatattgaagttatctagtagcacagtgggttaaggacctggtattgtcactgcagtggcttgggtcactgct

SEQ ID NO: 14701 - DNA, 110 bp, synthetic construct
  source 1..110: mol_type = other DNA
cttgaactttatttagtagatgattggcctgagatccttaatatagacatcccgctatcatgtgagaattccattctgctcaagtacaaatgcaagggaatttgggaatg

SEQ ID NO: 14702 - DNA, 110 bp, synthetic construct
  source 1..110: mol_type = other DNA
actctcctccactcacagtcaatgggcaaaagcttttataggtggaagggatatatgcagaaacagcagtcagctctaatagtcatcttgaaatgggtcatctggtcatc

SEQ ID NO: 14703 - DNA, 110 bp, synthetic construct
  source 1..110: mol_type = other DNA
gcaaaagcttttataggtggaagggatatatgcagaaacagcagtcagctctaatagtcatcttgaaatgggtcatctggtcatctggtggtctgaccagtgtcatcttg

SEQ ID NO: 14704 - DNA, 110 bp, synthetic construct
  source 1..110: mol_type = other DNA
tgtaattcagtgaaactcctgtggtaagcaataggaggtgtactactactgcatggaataatttggtgagtacataagaagtcagaaataaaagctgctttaaaaaaaca

SEQ ID NO: 14705 - DNA, 110 bp, synthetic construct
  source 1..110: mol_type = other DNA
aagcaataggaggtgtactactactgcatggaataatttggtgagtacataagaagtcagaaataaaagctgctttaaaaaaacagtcataggagttcccgtcgtggtgc

SEQ ID NO: 14706 - DNA, 110 bp, synthetic construct
  source 1..110: mol_type = other DNA
taaggaatggcacaaacttacagcatgtgcagaaactggcagcccggaaatgagggatctgtgcatagattttccaggcactggggatgatgagagaaggaacaagtttg

SEQ ID NO: 14707 - DNA, 110 bp, synthetic construct
  source 1..110: mol_type = other DNA
tgggcatcaatgacatgcatatctggcattgcataagggctgtgaggaaagtgatttcagggactttccactctagttgagagctaaaacttttgcacaaaaaagtgact

SEQ ID NO: 14708 - DNA, 110 bp, synthetic construct
  source 1..110: mol_type = other DNA
ggtcccctaacctctgtccaaaatcatgccaccaacaaagagacaatgttgttacagccacagtactatcagagccaccagggagccatgacagggctctcaaggcagat

SEQ ID NO: 14709 - DNA, 110 bp, synthetic construct
  source 1..110: mol_type = other DNA
agccacagtactatcagagccaccagggagccatgacagggctctcaaggcagatcctctttggggacaatggacaagagtttagggtcagagccaggtcaaggtcaggc

SEQ ID NO: 14710 - DNA, 110 bp, synthetic construct; identical to SEQ ID NO: 14708
  source 1..110: mol_type = other DNA

SEQ ID NO: 14711 - DNA, 110 bp, synthetic construct; identical to SEQ ID NO: 14709
  source 1..110: mol_type = other DNA

SEQ ID NO: 14712 - DNA, 110 bp, synthetic construct
  source 1..110: mol_type = other DNA
gaccttcctccttggctgcatctcagagctaaatacaagagaaaagaggtggtgaggacccagggttgatgaccccattgacagcccatgattaaggagacccaggtctt

SEQ ID NO: 14713 - DNA, 110 bp, synthetic construct
  source 1..110: mol_type = other DNA
attcaccctgtactgatcctctaaaaaactgaccaagtcacacttagattgaaaagctgatacagatttttaagtggttcctcggagacaactgctaattactaaaacta

SEQ ID NO: 14714 - DNA, 110 bp, synthetic construct
  source 1..110: mol_type = other DNA
gctgatacagatttttaagtggttcctcggagacaactgctaattactaaaactagtgttattgaatctagtggtttattgcatcattcgatttaaaagaccaaaataat

SEQ ID NO: 14715 - DNA, 110 bp, synthetic construct
  source 1..110: mol_type = other DNA
accctcacccccaccacaaaggcaaatgtggcttttattattatttcccggacctctactgctatgtcactaccagctttcctcccaccattagcctccctgtctcttct

SEQ ID NO: 14716 - DNA, 110 bp, synthetic construct
  source 1..110: mol_type = other DNA
gggtttgaaggcatgaagtgccctggcagtagaagtgcttgaccactcccctggacttgtatcttagctgggctggcctgggcttaagggtggggtgtgtggctgcagct

SEQ ID NO: 14717 - DNA, 110 bp, synthetic construct
  source 1..110: mol_type = other DNA
cttgtatcttagctgggctggcctgggcttaagggtggggtgtgtggctgcagctggtatagtcagatggggaggggcatctgcagcttcagggaatgggcatttctggc

SEQ ID NO: 14718 - DNA, 110 bp, synthetic construct
  source 1..110: mol_type = other DNA
tgccctttggaacctactgtgtgtcctgccccacaggttctatagctgctgggccaattgaccaggacttcagcacagggactatcacaacaggaggcactacctgtgaa

SEQ ID NO: 14719 - DNA, 110 bp, synthetic construct
  source 1..110: mol_type = other DNA
gtatcaagggaagggactggaaagtggtgaatagtttatatacaccctcccaccttagctgaaagcagcccctgcccccaagaccctgaacatgagactctgggcagatg

SEQ ID NO: 14720 - DNA, 110 bp, synthetic construct
  source 1..110: mol_type = other DNA
tagctgaaagcagcccctgcccccaagaccctgaacatgagactctgggcagatgtacaagaggggagacaacatgtgtctggggtggctggagggggcttgctggcagg

SEQ ID NO: 14721 - DNA, 110 bp, synthetic construct
  source 1..110: mol_type = other DNA
cacatcccaaagcaagctgtggggccatcacacaggagggagaggtggtcactatctgatgatggttgatgctctgttggttatcttcaaccagttagcagtggagatat

SEQ ID NO: 14722 - DNA, 110 bp, synthetic construct
  source 1..110: mol_type = other DNA
ttcttttggctgtgcctatggcgtgtggaagttcctgggctagggatcaaacccgtgctgcaggaacaacttgagctgctgtaatgacaacactgggccctcaacctact

SEQ ID NO: 14723 - DNA, 110 bp, synthetic construct
  source 1..110: mol_type = other DNA
tgctgcaggaacaacttgagctgctgtaatgacaacactgggccctcaacctactgagccacagaggaactccttaaatatgtactttcatgcacgggcccaagcccagc

SEQ ID NO: 14724 - DNA, 110 bp, synthetic construct
  source 1..110: mol_type = other DNA
gactttttgggggtatgatccaggcagtgtagctaaaacacacgtgtagcctctggaaagggacttacctcagcactggctgctgatcagctctgcttccaggtagaagc

SEQ ID NO: 14725 - DNA, 110 bp, synthetic construct
  source 1..110: mol_type = other DNA
tctgagcagagaagtcaggagaaatgggatggactcctgacgtgcagagactgtgagttaatacgccattaagctcatggtcgtttgttttgcagcaaattcatgaggca

SEQ ID NO: 14726 - DNA, 110 bp, synthetic construct
  source 1..110: mol_type = other DNA
agttaatacgccattaagctcatggtcgtttgttttgcagcaaattcatgaggcaagggaggggcccgtctcaggtgctgacctgctttgtacagcccgacatggagcac

SEQ ID NO: 14727 - DNA, 110 bp, synthetic construct
  source 1..110: mol_type = other DNA
aaaccctccaaaacctttcccagaactccctcaccctccaggtagctgccctgactggcctcagctccagacaggaccgtttcttgttgtgcatacttcttcattctttg

SEQ ID NO: 14728 - DNA, 110 bp, synthetic construct
  source 1..110: mol_type = other DNA
caggctcagaatgtccaaggaagttctgcatattcattggttagcctaagcggctgggctggacaggatttcaagccagctggtcccaccccttgtctctctgtcgacca

SEQ ID NO: 14729 - DNA, 110 bp, synthetic construct
  source 1..110: mol_type = other DNA
gggctggacaggatttcaagccagctggtcccaccccttgtctctctgtcgaccaagctgattctgcaggaagcaggaaggctgcctcaggatgaccccccttcctctag

SEQ ID NO: 14730 - DNA, 110 bp, synthetic construct
  source 1..110: mol_type = other DNA
agtaactataaaggaagacagtccgtcccacagcaatatacttccccagaggtggcaaaacatccagcttactatcccttagttctgccttcaacacaacaaacccaagc

SEQ ID NO: 14731 - DNA, 110 bp, synthetic construct
  source 1..110: mol_type = other DNA
caaaacatccagcttactatcccttagttctgccttcaacacaacaaacccaagcgtccacgcacatagatgaacatgggaacaggtgtgtgttcctcattgcagataaa

SEQ ID NO: 14732 - DNA, 110 bp, synthetic construct
  source 1..110: mol_type = other DNA
agccgtatgtgaggaatatccagctgatgtgcatgggatacaaggacgtttggctatctggcccttacctacctctctgaccttgtctcctatgctccacatgtttgctg

SEQ ID NO: 14733 - DNA, 110 bp, synthetic construct
  source 1..110: mol_type = other DNA
tggaacttattaattcattagaccagtgaacagtcataaacacctaccacttgtgcctggccctatgcaggtactagggatcctcaagcctctcattgcagagcttgtgt

SEQ ID NO: 14734 - DNA, 110 bp, synthetic construct
  source 1..110: mol_type = other DNA
cctggccctatgcaggtactagggatcctcaagcctctcattgcagagcttgtgtccagcagtgatatgtgtagggccagggccaagaaatgttggggaaacaaggagtt

SEQ ID NO: 14735 - DNA, 110 bp, synthetic construct
  source 1..110: mol_type = other DNA
ttgcagttttaggatgtgaagcctgaactggccctgagagccaagatatcagagaagctcatgtctgcagaatgacaagaacgtgatctgcaggcttctctgagggagga

SEQ ID NO: 14736 - DNA, 110 bp, synthetic construct
  source 1..110: mol_type = other DNA
agctcatgtctgcagaatgacaagaacgtgatctgcaggcttctctgagggaggaaatgccttcttgaactcagaaacctctcatgaactgtgggggggcccctcacagt

SEQ ID NO: 14737 - DNA, 110 bp, synthetic construct
  source 1..110: mol_type = other DNA
gctcatcctttggatgttaggcacaacttcaggtccaggacacagcatgtcaatgcacagctccatcctgttaactttaaacgagttcctgatgaactactgcctggaaa

SEQ ID NO: 14738 - DNA, 110 bp, synthetic construct
  source 1..110: mol_type = other DNA
aatgaaaagacactgaataggaacttggatccccaaagctataatagcaccaggaaaagtaaatatatatgcaaacatataagacagtacaaatgtacttttcttttcct

SEQ ID NO: 14739 - DNA, 110 bp, synthetic construct
  source 1..110: mol_type = other DNA
aatagacctagcaccaagggacaggatagaaccggagcagaaaaaattccaccctagccatgagggacaattttttttttgctttttagagcctcacccatggtataggg

SEQ ID NO: 14740 - DNA, 110 bp, synthetic construct
  source 1..110: mol_type = other DNA
tttacataatggaactttttccaaatatcatccaggttcttagcttgatctgcgtgtggttctctagctagatgttttggttctgactgctgtgtattattctaaagtgt

SEQ ID NO: 14741 - DNA, 110 bp, synthetic construct
  source 1..110: mol_type = other DNA
ctgcttgcagagccccaggttttgcaacctggagctgaggttgcactcactggggatgaggaagcacaagggattatgagaccagtcattcattgtctggggtgttggta

SEQ ID NO: 14742 - DNA, 110 bp, synthetic construct
  source 1..110: mol_type = other DNA
tgagatccaggaagaatgatacagccgaactctataggtagtattcgtattgagcctgaaagagagctactcctggaccacatcccaggtccttctgtccctctttgata

SEQ ID NO: 14743 - DNA, 110 bp, synthetic construct
  source 1..110: mol_type = other DNA
gcaagtgccaaacaaaccatccattgtctttggcaatgtaccaaacatcttagcatcagagagctgctggagtcctttgcactcttgggtagtagggtttcttttttcat

SEQ ID NO: 14744 - DNA, 110 bp, synthetic construct
  source 1..110: mol_type = other DNA
aataataccatttattggaaacatttcttgtgccaggcacctttcattcactgcagctcatccttaatagcattctgaaagagaggcactgtgcagggagttcccatcat

SEQ ID NO: 14745 - DNA, 110 bp, synthetic construct
  source 1..110: mol_type = other DNA
gctcatccttaatagcattctgaaagagaggcactgtgcagggagttcccatcatggctcagcggttaacaatcccaactaatgtccatgaggacaccggttcaatccct

SEQ ID NO: 14746 - DNA, 110 bp, synthetic construct
  source 1..110: mol_type = other DNA
attgaacccacatcctcatgaatactagcagggttcatttctgttgtgccacagtgggaactccagaatctgtatatgtcttgatagctacccggctgctccagtttgaa

SEQ ID NO: 14747 - DNA, 110 bp, synthetic construct
  source 1..110: mol_type = other DNA
gggacggggccaccccagttacctcaccaggatgtgtcgacttgccctgacaaattaggtggaatgaaaaaacccacttgtattggtagagttggcttcctttggtagcc

SEQ ID NO: 14748 - DNA, 110 bp, synthetic construct
  source 1..110: mol_type = other DNA
taggtggaatgaaaaaacccacttgtattggtagagttggcttcctttggtagccggtatttgacttctagtcacctttgagtcaaagacgtctctaggctcactttaac

SEQ ID NO: 14749 - DNA, 110 bp, synthetic construct; identical to SEQ ID NO: 14747
  source 1..110: mol_type = other DNA

SEQ ID NO: 14750 - DNA, 110 bp, synthetic construct; identical to SEQ ID NO: 14748
  source 1..110: mol_type = other DNA

SEQ ID NO: 14751 - DNA, 110 bp, synthetic construct
  source 1..110: mol_type = other DNA
tggttctgagaatcagaccctggaaactatacccttgttgctcacatttccttgtaaatccaaaagctcatctagtcctttgcagtgagaaataacagcctccacacacc

SEQ ID NO: 14752 - DNA, 110 bp, synthetic construct
  source 1..110: mol_type = other DNA
tgtttaaaaattttttttaaaacttatatattaggttactgttcaacctcctagggtggggaaaacgcaagccatgaggggttgtatttccctcagagggttgttgaagg

SEQ ID NO: 14753 - DNA, 110 bp, synthetic construct
  source 1..110: mol_type = other DNA
gtggggaaaacgcaagccatgaggggttgtatttccctcagagggttgttgaaggcatagacccctttcccagacaagcatcattgcacagatgagtgcagggctcctgg

SEQ ID NO: 14754 - DNA, 110 bp, synthetic construct
  source 1..110: mol_type = other DNA
tccattggcttgattttcatttacttatgtacatgaagctaaacatcttttattatgccctgcaattatggcagagattaaagtgatgcttaacacatcatacattagtt

SEQ ID NO: 14755 - DNA, 110 bp, synthetic construct
  source 1..110: mol_type = other DNA
tgtccccttatccctttccatacatatacttcccatcaacctgccaatcacaggctgagctgatcaatgatttgtcacatgcacttgccctgaccttattcaggccaatc

SEQ ID NO: 14756 - DNA, 110 bp, synthetic construct
  source 1..110: mol_type = other DNA
tgagctgatcaatgatttgtcacatgcacttgccctgaccttattcaggccaatctgagtccctctctgggattctacttattgaggttgcagaggaaattttttttctg

SEQ ID NO: 14757 - DNA, 110 bp, synthetic construct
  source 1..110: mol_type = other DNA
tatctcctaacagcttaacacagaaaaaacaccttaactgctaaaggaaggtgaaccctgacttactgaacagtttggtacactattattttgagaataaaatgagatga

SEQ ID NO: 14758 - DNA, 110 bp, synthetic construct
  source 1..110: mol_type = other DNA
ccctgacttactgaacagtttggtacactattattttgagaataaaatgagatgatacatgtgaaaaaacctggaaggtttacagagaacaaatgatttggtagctagaa

SEQ ID NO: 14759 - DNA, 110 bp, synthetic construct
  source 1..110: mol_type = other DNA
ttttcctcactatatgacactaaggggttgacatctatcagggttagtttctgttttacagacatagaaattaaagatggacaggataggcccagaaattgtcagaagct

SEQ ID NO: 14760 - DNA, 110 bp, synthetic construct
  source 1..110: mol_type = other DNA
ttacagacatagaaattaaagatggacaggataggcccagaaattgtcagaagctctggactgcctcgtattggtaaaacaagtagacaccctgggttaatttcattgtt

SEQ ID NO: 14761 - DNA, 110 bp, synthetic construct
  source 1..110: mol_type = other DNA
gtccttcaaaactgatggaaaaattaagacatccccagataaatgaaagctgatagggttcatttcatttagacctgcccttcaagaaatgctcaaaggaggcctgtagg

SEQ ID NO: 14762 - DNA, 110 bp, synthetic construct
  source 1..110: mol_type = other DNA
gggttcatttcatttagacctgcccttcaagaaatgctcaaaggaggcctgtagggtgaaatgaaaggacatgagacagtaacttaagatcatatgaggaaataaggatc

SEQ ID NO: 14763 - DNA, 110 bp, synthetic construct
  source 1..110: mol_type = other DNA
tatttgtgtgtgtgtaagggcacaggcaccagaagaaaaaaaggatcagcctatcaaatccatggtcaaacagatactgttgtgttattgctgaatttaggtaaaggagt

SEQ ID NO: 14764 - DNA, 110 bp, synthetic construct
  source 1..110: mol_type = other DNA
tcctgccctttgccctgtgctccctgccctcccccagctacctgggttgcagcacatgctcctggtaaagattgccctctttcctgcagtaagccatggttttcaggtac

SEQ ID NO: 14765 - DNA, 110 bp, synthetic construct
  source 1..110: mol_type = other DNA
caagggttactatgtaaaaatccatgcataaagctggaagttgtatgaactctgaacccagccacctatctaccagatgaagtggggcccctagaccataactgcttaga

SEQ ID NO: 14766 - DNA, 110 bp, synthetic construct; identical to SEQ ID NO: 14765
  source 1..110: mol_type = other DNA

SEQ ID NO: 14767 - DNA, 110 bp, synthetic construct
  source 1..110: mol_type = other DNA
aattctgtcttctgccagtacccacagctgttgtatttaagagctctcagtcccgtttataagaactgtccagtggagagccggggaaccacagaccccagggagcctcc

SEQ ID NO: 14768 - DNA, 110 bp, synthetic construct
  source 1..110: mol_type = other DNA
tccctgtctaggaagagaagctgtgctctttggcagggatgctttcatgagctttggggccatgctccccttcagcatatgccttttgccttccacttccagaccatccc

SEQ ID NO: 14769 - DNA, 110 bp, synthetic construct
  source 1..110: mol_type = other DNA
tcaaattgaatgtatcttttttcctccctaaaccagtgttcccactctcactaaaggacgctgtcatcactcaagccccaaaccagcaaattatcattttctccttctcc

SEQ ID NO: 14770 - DNA, 110 bp, synthetic construct
  source 1..110: mol_type = other DNA
ggacgctgtcatcactcaagccccaaaccagcaaattatcattttctccttctcccacacatctccctcaactattcctatcctgtagattttttttttctttttagggc

SEQ ID NO: 14771 - DNA, 110 bp, synthetic construct
  source 1..110: mol_type = other DNA
ccacatgctgccaggtgtagccagcataaattaattaaaaaactgaagaaccagcttcagtcaaaaagggactagaaggcttgatttcaggtttgtgctcttttcctgta

SEQ ID NO: 14772 - DNA, 110 bp, synthetic construct
  source 1..110: mol_type = other DNA
ttcagtcaaaaagggactagaaggcttgatttcaggtttgtgctcttttcctgtatgtttttagagtcaaagaatcacaaaatgttggtactagagaaatcttttattta

SEQ ID NO: 14773 - DNA, 110 bp, synthetic construct
  source 1..110: mol_type = other DNA
caggtatatcttaattcaaaatactaaaaagaaaacagtgcacctaaatttttgctctttttgctctttttcccccctacgctctaggaagcaggtaacataaaccgatc

SEQ ID NO: 14774 - DNA, 110 bp, synthetic construct
  source 1..110: mol_type = other DNA
tctttttgctctttttcccccctacgctctaggaagcaggtaacataaaccgatcattgagctgcctgggccaggtgattactgcgcttgtggatgtagggaatggaaaa

SEQ ID NO: 14775 - DNA, 110 bp, synthetic construct
  source 1..110: mol_type = other DNA
ctatggtaatgctatccttagttttgcgaggaactgccatactgctttccatagtagctgtaccagtttatattcccatcaacactgtaggagggttcccttttcttcac

SEQ ID NO: 14776 - DNA, 110 bp, synthetic construct
  source 1..110: mol_type = other DNA
gccatactgctttccatagtagctgtaccagtttatattcccatcaacactgtaggagggttcccttttcttcacacactctctagcacttggtatttgtagacttttta

SEQ ID NO: 14777 - DNA, 110 bp, synthetic construct
  source 1..110: mol_type = other DNA
acatggcctcgtatttagggctttttcctcccctgaggactgactccaggggagccctggacatcaaggtgattacaggaaagaagctgaagggatcatggacacatcca

SEQ ID NO: 14778 - DNA, 110 bp, synthetic construct
  source 1..110: mol_type = other DNA
atttgttgaaagctccctgtgtgccttctcacagcacccagcatggacacccactgtacagtgcccagaaatggccaggacccttcaaagaagctgagctaaggctgggc

SEQ ID NO: 14779 - DNA, 110 bp, synthetic construct
  source 1..110: mol_type = other DNA
gtacagtgcccagaaatggccaggacccttcaaagaagctgagctaaggctgggcctcccctctcctacagcaactcggctgactgtgtgtctgtgtgtctttgaatttt

SEQ ID NO: 14780 - DNA, 110 bp, synthetic construct
  source 1..110: mol_type = other DNA
ttaaaaacagcattaaaaaaaaaaaagttcagatcttggccatcaacagcacagcagaggtcacaggagcaatagcacaggtagaagttaagtcattttggaaaggttgc

SEQ ID NO: 14781 - DNA, 110 bp, synthetic construct
  source 1..110: mol_type = other DNA
aacttcagtatctctgaggtctgcctgcttccctgcaaaacagctcaatgtgatcgagatggtcagttacaactcaccccactccaacccatgtgtgttaaggtaccatc

SEQ ID NO: 14782 - DNA, 110 bp, synthetic construct
  source 1..110: mol_type = other DNA
atatggcccactataatcaagaaaaggtaagcattttaagcataagcatctctgcctggatttgtctacacagtgatctatatagatgtgtttttaaacacttaaaagat

SEQ ID NO: 14783 - DNA, 110 bp, synthetic construct
  source 1..110: mol_type = other DNA
gcatctctgcctggatttgtctacacagtgatctatatagatgtgtttttaaacacttaaaagatggaacctaatattgattacttagtgtttaaattagaaacaggttg

SEQ ID NO: 14784 - DNA, 110 bp, synthetic construct
  source 1..110: mol_type = other DNA
ggaggtggcccctggaggtccagggctctgggggcccacagaacagcagacagggcaagggggctgccctgtccagccctgcctctcgctgaagccctctttagcttggt

SEQ ID NO: 14785 - DNA, 110 bp, synthetic construct
  source 1..110: mol_type = other DNA
caagggggctgccctgtccagccctgcctctcgctgaagccctctttagcttggtttttctcctttccacctattgcccacctgtacaacaaatgctcacagagctcctt

SEQ ID NO: 14786 - DNA, 110 bp, synthetic construct; identical to SEQ ID NO: 14784
  source 1..110: mol_type = other DNA

SEQ ID NO: 14787 - DNA, 110 bp, synthetic construct; identical to SEQ ID NO: 14785
  source 1..110: mol_type = other DNA

SEQ ID NO: 14788 - DNA, 110 bp, synthetic construct
  source 1..110: mol_type = other DNA
tggacacatctcaaggagatttccagaagcgtttttaggcgcatggttaaaagtataaccccggccgctgcccacagccaccttctaggcctcaggctggtccacctgtg

SEQ ID NO: 14789 - DNA, 110 bp, synthetic construct
  source 1..110: mol_type = other DNA
aaactgcacagactcaaattcatctatccatccatccatccgtccatctgtccatccatctatataactgctttgcgagaagggggaaaattcccctttaaacaaacaaa

SEQ ID NO: 14790 - DNA, 110 bp, synthetic construct
  source 1..110: mol_type = other DNA
ccatctatataactgctttgcgagaagggggaaaattcccctttaaacaaacaaaaaatgatgtcaatattgagaaaatttgaaaggcagtgaaaggctatgaaagaaaa

SEQ ID NO: 14791 - DNA, 110 bp, synthetic construct
  source 1..110: mol_type = other DNA
tttgaatgcccagccttttgatgaggttctttgtctttaggactgatggtgctttggctgaacccagaatcagctttatgtgagaatgtcaaagcttgggtcctctagaa

SEQ ID NO: 14792 - DNA, 110 bp, synthetic construct
  source 1..110: mol_type = other DNA
gacactgcatccagcatgatgcccaagcctcggagtagaaatgactgaggcagatgttccagtgggttgggcctgagatggcagctctgatttgcaacgtctcgtccagc

SEQ ID NO: 14793 - DNA, 110 bp, synthetic construct
  source 1..110: mol_type = other DNA
ttctggatatgccaaggcagctgggtccatggagagaaaagtcctggttattaacttatttttattcatttggctgtgaaccacccagcgggagatggtgctattagctt

SEQ ID NO: 14794 - DNA, 110 bp, synthetic construct
  source 1..110: mol_type = other DNA
ctcagagttccacatcctcctccagagatggataatgtcatcctcattctcaaaaagcagaaaagagattctgagggctgtcaattgaagatcctagctggttatttgag

SEQ ID NO: 14795 - DNA, 110 bp, synthetic construct
  source 1..110: mol_type = other DNA
agcagaaaagagattctgagggctgtcaattgaagatcctagctggttatttgaggtcacacacgctgttggaacaaacagtcctaacaatatgctcaagcatgatagga

SEQ ID NO: 14796 - DNA, 110 bp, synthetic construct
  source 1..110: mol_type = other DNA
aacacctgtgatttccacttcatttttcttccttttcttttatcatgccgtttctttatgttctatatagcaagaaaaaggatgcaaagggaattccaagcctatgtaaa

SEQ ID NO: 14797 - DNA, 110 bp, synthetic construct
  source 1..110: mol_type = other DNA
tacctggtagccggttactccagagcctgcactttactctttagcaacacgtcgtctatcagatgaggtgggaatgatcactgtagctgctttaacagcttccctagaga

SEQ ID NO: 14798 - DNA, 110 bp, synthetic construct
  source 1..110: mol_type = other DNA
caaaccaagataggaagcttaacctcatcactgttgggttggatccaaagccaatcagtcacatgcagcatctgagcagctgaacttttctaaagatggaaggggtgcca

SEQ ID NO: 14799 - DNA, 110 bp, synthetic construct
  source 1..110: mol_type = other DNA
ccctaaccctgggatcattttgtccagctgggtggatgggtctctgcttatgaagcttataagcttatgctgagtgtcacgtgactagcctaagttcatcagtagtagaa

SEQ ID NO: 14800 - DNA, 110 bp, synthetic construct
  source 1..110: mol_type = other DNA
cttataagcttatgctgagtgtcacgtgactagcctaagttcatcagtagtagaaagaaaagggacctgccttccctgtgccttagtgcgatgtcgtgttgaaagaacag

SEQ ID NO: 14801 - DNA, 110 bp, synthetic construct
  source 1..110: mol_type = other DNA
cttgatgtggcaggagttgatcctcagatctgactgaactctctcttcctccccccatcccagctctgtgagtggccgggcattggtttgcttcaaggctagcagataga

SEQ ID NO: 14802 - DNA, 110 bp, synthetic construct
  source 1..110: mol_type = other DNA
catcccagctctgtgagtggccgggcattggtttgcttcaaggctagcagatagactggctcccagagggcggggattgctttgcccaccgcaacatcccagtgcctggc

SEQ ID NO: 14803 - DNA, 110 bp, synthetic construct
  source 1..110: mol_type = other DNA
gatggaaacgttatgaccagaggcttataggaacctaaccctgtgtttcctctgggagcagtggttcactatctgctatttgtggtgactttacggagcttaactacctc

SEQ ID NO: 14804 - DNA, 110 bp, synthetic construct
  source 1..110: mol_type = other DNA
gagcagtggttcactatctgctatttgtggtgactttacggagcttaactacctcgagttgcgagactctactgtagggctcttatgtctggcttagttctcccagacag

SEQ ID NO: 14805 - DNA, 110 bp, synthetic construct
  source 1..110: mol_type = other DNA
tgggcttggaggggggaactggccttttcccacattaaaaaaacccaacagcagatgatgacagctagtcagaatgccccaccgtgtgggttaaattaattgaagggtct

SEQ ID NO: 14806 - DNA, 110 bp, synthetic construct
  source 1..110: mol_type = other DNA
tgatgacagctagtcagaatgccccaccgtgtgggttaaattaattgaagggtctctttctgccaagacagccttaggctgagggtaaagtccatcccaaggtccagatg

SEQ ID NO: 14807 - DNA, 110 bp, synthetic construct
  source 1..110: mol_type = other DNA
cccctggcatagttctgaagtcacaccttactgtgggttctcagatggcctcaaccagtgagggatcttgagatgggcagactcctgggcacctcaaaaaggggttggaa

SEQ ID NO: 14808 - DNA, 110 bp, synthetic construct
  source 1..110: mol_type = other DNA
tctgccaatgccaccaatgagggctcacatgggattctgcctaactttgcctcagaccaagggacccatttggctaaagtcagaaatatgacaatgggaataaggacaca

SEQ ID NO: 14809 - DNA, 110 bp, synthetic construct
  source 1..110: mol_type = other DNA
accaagggacccatttggctaaagtcagaaatatgacaatgggaataaggacacaagctctgttggtcccatcttgtaaggcatcacttggaagttgccagattactaaa

SEQ ID NO: 14810 - DNA, 110 bp, synthetic construct
  source 1..110: mol_type = other DNA
gtcttcccagtaggaactacatttcagggtaaccaaatagctccagctgatgaaacaaaggtctactttaaagaagagtgcccgctaggtgtagatggatgagagactta

SEQ ID NO: 14811 - DNA, 110 bp, synthetic construct
  source 1..110: mol_type = other DNA
tgaggtgagatgctgaacaccttgagctcagagctggaagcagagatcctggttaccacctcccacagtgaccgttcttgctctgcatggctttgttaaaagatgatcct

SEQ ID NO: 14812 - DNA, 110 bp, synthetic construct
  source 1..110: mol_type = other DNA
ggaaacaagttaacactgtcaactctcagggccctgctctatcaacacaccgacgataacaacccagctccttcactgtggctcccaatctcctccctagcatgagtggt

SEQ ID NO: 14813 - DNA, 110 bp, synthetic construct
  source 1..110: mol_type = other DNA
agggccacctccttctctgccacctgggccctcatagtctccttggccttcttgacagccaggaggctcgcctccatctggtcgcccatgtgccggatgctggcctgctc

SEQ ID NO: 14814 - DNA, 110 bp, synthetic construct
  source 1..110: mol_type = other DNA
cagccaggaggctcgcctccatctggtcgcccatgtgccggatgctggcctgctctgactccagagaggccagggagccctggatagctgcctcccgctgctgcagtgca

SEQ ID NO: 14815 - DNA, 110 bp, synthetic construct
  source 1..110: mol_type = other DNA
agtaacaacacaaggaatgaaggatcagaggaggaggaggaggtttggggcatgcaagacaaccttgccctgctgaccaaatttttcgtactcgttccaacacaacagct

SEQ ID NO: 14816 - DNA, 110 bp, synthetic construct
  source 1..110: mol_type = other DNA
gcctcctcctgtttattctctctcaagacagccctggattttctaccaaggcatggctgcctggaatacagctaacatttcccaggcttccttgaaccagagtcttcctt

SEQ ID NO: 14817 - DNA, 110 bp, synthetic construct
  source 1..110: mol_type = other DNA
attccctcaccttcctcaagtcttttctcaaatgtcatctcatgagctccttattgacgccctccactttaaaactgcacctcgacaaccccatctcactgcctttcctc

SEQ ID NO: 14818 - DNA, 110 bp, synthetic construct
  source 1..110: mol_type = other DNA
gcctggctgaagttctggtagtgcctatatcctttgaccttcagtgctcaacaggactcagtctattcttttgactcttcaaacatagaggtaatagctctcacttttgc

SEQ ID NO: 14819 - DNA, 110 bp, synthetic construct
  source 1..110: mol_type = other DNA
actcagtctattcttttgactcttcaaacatagaggtaatagctctcacttttgctagcatctcagggctcctcaacatccctgttggttcttctaacccagccaacccc

SEQ ID NO: 14820 - DNA, 110 bp, synthetic construct
  source 1..110: mol_type = other DNA
cttaaggctgttgaaaatgcatactagacatatgaccctcacttcttggtcaattcaaatattctgatatctgatatttgcgtatgtagacatagaaacatacagatata

SEQ ID NO: 14821 - DNA, 110 bp, synthetic construct
  source 1..110: mol_type = other DNA
agacatatgaccctcacttcttggtcaattcaaatattctgatatctgatatttgcgtatgtagacatagaaacatacagatatagatacacgcatatatatgacatttt

SEQ ID NO: 14822 - DNA, 110 bp, synthetic construct
  source 1..110: mol_type = other DNA
ctcctatgtcatctttctcaaagcttccagttagggttcattgctgtgatgctgtagattcattgtcactacaatttgctatgtgggaacccctcacttcccccaggcgg

SEQ ID NO: 14823 - DNA, 110 bp, synthetic construct
  source 1..110: mol_type = other DNA
cttgggcctcagagtgcctctgagcactgtgctggcctgtacatctcattcaggtgttcataggtaccactgagctgccccatcttctgtgccaaggaaaggattcatgc

SEQ ID NO: 14824 - DNA, 110 bp, synthetic construct
  source 1..110: mol_type = other DNA
gttcataggtaccactgagctgccccatcttctgtgccaaggaaaggattcatgcagctaaccacttggtctctcatttgttctggattgttcgttacataagcctggtc

SEQ ID NO: 14825 - DNA, 110 bp, synthetic construct
  source 1..110: mol_type = other DNA
gttggggaggggagacacaaacattcagatcacacatatctacactcacctgtacctatttgaggcttgcagctcagggttcctgggggtgctgtacttgtagcctttga

SEQ ID NO: 14826 - DNA, 110 bp, synthetic construct
  source 1..110: mol_type = other DNA
ctatttgaggcttgcagctcagggttcctgggggtgctgtacttgtagcctttgaccaacttagatctatgtttgaagaagccttggtttggggtcaggacactggagtt

SEQ ID NO: 14827 - DNA, 110 bp, synthetic construct
  source 1..110: mol_type = other DNA
tcacaatggaataagtctgtattttgactgtgatggtagacacacaaatctgcacatatgctaaaacttagagctacagacatatacacacaaatgcatatgaaactggt

SEQ ID NO: 14828 - DNA, 110 bp, synthetic construct
  source 1..110: mol_type = other DNA
tctcatgcaatctgggattcaattcaattaataaactacgaatccaaatcagattcatttgagtgtattttgataaaagaggaatttttgttgggtataggagggattta

SEQ ID NO: 14829 - DNA, 110 bp, synthetic construct
  source 1..110: mol_type = other DNA
cactggaactgagaagctgactgattccacatcatgcaggtaaagtgcaaagctgcctgaatactgtcatacagggcatggcaatcaagccacagatcaaagcctggcaa

SEQ ID NO: 14830 - DNA, 110 bp, synthetic construct
  source 1..110: mol_type = other DNA
cctgaatactgtcatacagggcatggcaatcaagccacagatcaaagcctggcaatgccagtacatgaggtcaagggagcctcactaatgtgtctgacttacagctccac

SEQ ID NO: 14831 - DNA, 110 bp, synthetic construct
  source 1..110: mol_type = other DNA
cattcacagatacaccaacagagccccaggatgaaggcatctgcccaaggtcacttcataaacctgggcatcctgccttccaatcatgccctgggtgaaagtgagatgag

SEQ ID NO: 14832 - DNA, 110 bp, synthetic construct
  source 1..110: mol_type = other DNA
tcataaacctgggcatcctgccttccaatcatgccctgggtgaaagtgagatgagaatccagacagagaattgagacctgtgccctgggagaggtggaatatcgtctcca

SEQ ID NO: 14833 - DNA, 110 bp, synthetic construct; identical to SEQ ID NO: 14831
  source 1..110: mol_type = other DNA

SEQ ID NO: 14834 - DNA, 110 bp, synthetic construct; identical to SEQ ID NO: 14832
  source 1..110: mol_type = other DNA

SEQ ID NO: 14835 - DNA, 110 bp, synthetic construct
  source 1..110: mol_type = other DNA
gctgctgagggaggagaagcctcaccccctgcagctgacttccaccctaaagccccctccactacgacactcgcacccacaaccagtgatctgagcctatacatggtcag

SEQ ID NO: 14836 - DNA, 110 bp, synthetic construct
  source 1..110: mol_type = other DNA
gtgcttataactcatggtggcctgaaatttctgggctatggaaaaggctagaaggggcaggcagagacacagaaacagacagtaagctagttggagaaagggttggcaga

SEQ ID NO: 14837 - DNA, 110 bp, synthetic construct
  source 1..110: mol_type = other DNA
ggcaggcagagacacagaaacagacagtaagctagttggagaaagggttggcagagcagggagaggactactgaggcacacaaacacctgaggggctgagctggcctgga

SEQ ID NO: 14838 - DNA, 110 bp, synthetic construct
  source 1..110: mol_type = other DNA
gtgtctaccctgggggtctccccttcctggtcccacactcccagggaagctgctccctgctcccaggacatctctggccacttgttctccttgggcaccttctgctcctg

SEQ ID NO: 14839 - DNA, 110 bp, synthetic construct
  source 1..110: mol_type = other DNA
atttaagaatgaatttggacttattatagctactaaaacaaaaacagattgcaagaaatctgaaaaataatcaccaaagacacacagttacatgaattgtctggcaggga

SEQ ID NO: 14840 - DNA, 110 bp, synthetic construct
  source 1..110: mol_type = other DNA
taattgcatattttaccaaagcaaggttctctgtgagtagctgaacacagctaaagaactttaggaaattttaacctgctatgtgaaccagtcaatcacacattctcttc

SEQ ID NO: 14841 - DNA, 110 bp, synthetic construct
  source 1..110: mol_type = other DNA
ctgccgcttgcagccccttttaggtgctactggggcagccttgcccaagggctactggcgacatacagggctggggccttcctcaaaggggcctctcctttccttcccta

SEQ ID NO: 14842 - DNA, 110 bp, synthetic construct
  source 1..110: mol_type = other DNA
ctcttcctggaactgacctctgaatcttgagtctcagaaccccacctttcccccagtagctcaggctttggtgtccaggccggtggtaacaatggtctgtgtgcatttct

SEQ ID NO: 14843 - DNA, 110 bp, synthetic construct
  source 1..110: mol_type = other DNA
ttgagcgggacccctatgagcaccccgagaggctacagcagttgcagcaggagctggaggcctttcggggccagctgggtgatacagggtctcttgacgctgtatggcgg

SEQ ID NO: 14844 - DNA, 110 bp, synthetic construct
  source 1..110: mol_type = other DNA
agtgaccatggatcagcctggcacacgttggacagcactgacaatggataccatctgcaggcacctggcaaggagggagaaaagccaattaataatgatgacttgaccct

SEQ ID NO: 14845 - DNA, 110 bp, synthetic construct
  source 1..110: mol_type = other DNA
agcacagggagcatgcaggccatcaccttccattcccagcacacagtggctctgcagtagtggatgaagtccagcaccgccactgccccgacacccaggctcagcagcac

SEQ ID NO: 14846 - DNA, 110 bp, synthetic construct
  source 1..110: mol_type = other DNA
cattttccaggaagggtaagttgaggcacagaagagagaaatcacagcactacttgggtaatcagcttttctcactaagcttgagaggggacctgacatctacttttgtt

SEQ ID NO: 14847 - DNA, 110 bp, synthetic construct
  source 1..110: mol_type = other DNA
tcaactgagggccctttagggtagaatcccacacacaaatcataggttatcagtaggacatgatagtggcaaagatcaacgacattatctctgcaacagggatggcaaat

SEQ ID NO: 14848 - DNA, 110 bp, synthetic construct
  source 1..110: mol_type = other DNA
accttgcccttcccaattttatctcccagcccataacatatagtatgtatacacacacattaactatgcatacatatgcacacgtagcatataacatctaacatcttact

SEQ ID NO: 14849 - DNA, 110 bp, synthetic construct
  source 1..110: mol_type = other DNA
attactctcctttatgttgtctttgaattcactctttcctccacgggctgtcatcacagctcacttggattattagagcagcttgctcagggagaactagctttcaaatg

SEQ ID NO: 14850 - DNA, 110 bp, synthetic construct
  source 1..110: mol_type = other DNA
catcttagggaggcactgaagctcgagttccaaacaactttctagatttgttacctcagtatttctggcaacagatgtacagagagatggctttggcatgtctgctcaac

SEQ ID NO: 14851 - DNA, 110 bp, synthetic construct
  source 1..110: mol_type = other DNA
cctcagaaggaggaataaatagagaggaaaaagggccaagtgctcatgggaaacaattataccttggtgtggtttatgagctatatttaggagtcatgctgtggcttttt

SEQ ID NO: 14852 - DNA, 110 bp, synthetic construct
  source 1..110: mol_type = other DNA
aagctgcaagggagcagagggactttgggagcaaagtcccaagagaggttgaatctgggatgggaatgaaaagacagacaaaagcatgtgtttttggctcaataaacaaa

SEQ ID NO: 14853 - DNA, 110 bp, synthetic construct
  source 1..110: mol_type = other DNA
cccttttaatcagcttcagctctaatccagattggccctgaggacttcactgtcgttctgaggcagttacatgaattgaatgttgtgtgaggggaatggccgttgaaacc

SEQ ID NO: 14854 - DNA, 110 bp, synthetic construct
  source 1..110: mol_type = other DNA
ctctggtattccccaaagcggcaagaataagactccccgggccacaggggtggcaggtcaggtaccgacaagaaaacctgccgagagaggccaggacaagctgctggagc

SEQ ID NO: 14855 - DNA, 110 bp, synthetic construct
  source 1..110: mol_type = other DNA
ggtcaggtaccgacaagaaaacctgccgagagaggccaggacaagctgctggagccaatgggcagcagatcagggctcctgacgtaggcaggcaccagaggccagctccc

SEQ ID NO: 14856 - DNA, 110 bp, synthetic construct
  source 1..110: mol_type = other DNA
cagccctccgtgctcacggcctttgccagcactggggccattcttgtcttcctgctccggttcttctctgagtattatcagcctgccttttgctcctatctgttgaatca

SEQ ID NO: 14857 - DNA, 110 bp, synthetic construct
  source 1..110: mol_type = other DNA
ccccagaaagaaaaccccaggtggagagaaaagagcagctcttcatatcccaagtccacccaggagccctcctgcccaatgtcctgcccacatcaggagacctcaccttg

SEQ ID NO: 14858 - DNA, 110 bp, synthetic construct
  source 1..110: mol_type = other DNA
tgggtcagagctgagcctggccccagacccttcggggccctgagagtccctcaagctgcacttaccttttctccaggctcacccacagcccctgttagtcctcggtcacc

SEQ ID NO: 14859 - DNA, 110 bp, synthetic construct
  source 1..110: mol_type = other DNA
gccctcaggatccaggccaacagccaggcctgtgggggagaagggatgggatgaatggggtatattctagagctgctgagcccctcacatatggggagaggctgggggtg

SEQ ID NO: 14860 - DNA, 110 bp, synthetic construct
  source 1..110: mol_type = other DNA
gctgaggaacaataaaacagtagattctgtttcaaaaatctggacaagtttattcataagggaaatagcagcctctcagaggcgtatctgtagaactatcagcaagatca

SEQ ID NO: 14861 - DNA, 110 bp, synthetic construct
  source 1..110: mol_type = other DNA
ataagggaaatagcagcctctcagaggcgtatctgtagaactatcagcaagatcacactgccccatctctttgcttgtcagaccagatttctggaatgaaaggatagagg

SEQ ID NO: 14862 - DNA, 110 bp, synthetic construct
  source 1..110: mol_type = other DNA
ccatcctggcttgaagtgcactctagcttccagagctgccagatagaatagctctcatgtagggtccaggtcaataacctgggctctttgagcctgtgcatggacccatt

SEQ ID NO: 14863 - DNA, 110 bp, synthetic construct
  source 1..110: mol_type = other DNA
actctacatgccagcccccaggtccagtcctcccagcatatttagtatctaccgatagcagtttctcctttgccttacaagtactgatgagtctctagtggacaggaagg

SEQ ID NO: 14864 - DNA, 110 bp, synthetic construct
  source 1..110: mol_type = other DNA
gctggcctgtgccatagccacagcaatgcaagatccaagccacgtctgcagctgacaccacagcaatgctggatccttagttcagtgagcaaggccagggatcgaactgg

SEQ ID NO: 14865 - DNA, 110 bp, synthetic construct
  source 1..110: mol_type = other DNA
atgcaagatccaagccacgtctgcagctgacaccacagcaatgctggatccttagttcagtgagcaaggccagggatcgaactggcatcctcatagatcttagtcggatt

SEQ ID NO: 14866 - DNA, 110 bp, synthetic construct
  source 1..110: mol_type = other DNA
gggaagaccacgaggggcagatggtgggaaactgagttggcccgtgtaataggcacggggtataggaaatcacattgtgcctcctgcctggtccttgtagacccttttgt

SEQ ID NO: 14867 - DNA, 110 bp, synthetic construct
  source 1..110: mol_type = other DNA
aatggcttgggaaatgcaggttagaaagatttcaaagtgaattcccctgctcccgtgacttcaaaagtgactttatattgacatttctcagatcccacccatgtgtacct

SEQ ID NO: 14868 - DNA, 110 bp, synthetic construct
  source 1..110: mol_type = other DNA
gagccacaacaggaactcatacacttccccaaatttattttcttcaataattagatgtgttcatgtaaaacagagattgcttgagttctgaaaaccactctagaatcata

SEQ ID NO: 14869 - DNA, 110 bp, synthetic construct
  source 1..110: mol_type = other DNA
tgtgttcatgtaaaacagagattgcttgagttctgaaaaccactctagaatcatagctactattatatcaaagcaactttttttaagtagagcaaaccatgcaaaaaaaa

SEQ ID NO: 14870 - DNA, 110 bp, synthetic construct
  source 1..110: mol_type = other DNA
gctcaaagcagatgaacagacctggaagccgcaccacacagtctgtgtccgtgaaagcagcatctacttcatccagcctcaggggaccagctcccacacgcaacttgaca

SEQ ID NO: 14871 - DNA, 110 bp, synthetic construct
  source 1..110: mol_type = other DNA
agcagcatctacttcatccagcctcaggggaccagctcccacacgcaacttgacaatcacctcatcagaactctgcctccaatccagcaacaactctgtagaaggagttc

SEQ ID NO: 14872 - DNA, 110 bp, synthetic construct
  source 1..110: mol_type = other DNA
agtttgcatggaggttagtcacatgcagaagcttttgagacacagagatctcttaggtacactggtcattatccctctatgggtggggcagagggaaaggaattggtgaa

SEQ ID NO: 14873 - DNA, 110 bp, synthetic construct
  source 1..110: mol_type = other DNA
cacctttcctgagcagtcccactaattagaacagctttagggagctctcccacagtgcttgtttaaggatctggtgttgttactgcagcagcttgggtggcagctgtgtg

SEQ ID NO: 14874 - DNA, 110 bp, synthetic construct
  source 1..110: mol_type = other DNA
gataacaggcaaattacattcctatcaccaacctgatacgctcacaaacagcctggtacaaaaattcgagggtgagcttgtgctttgggacagaaaccaacagaggctgc

SEQ ID NO: 14875 - DNA, 110 bp, synthetic construct
  source 1..110: mol_type = other DNA
gtacaaaaattcgagggtgagcttgtgctttgggacagaaaccaacagaggctgcccatacagcaccgccccggtggaagtgctcgacggcctggacttcctctccctga

SEQ ID NO: 14876 - DNA, 110 bp, synthetic construct
  source 1..110: mol_type = other DNA
aagctgtaccccaagtacctgacacagaaattttctggtcaatggaagataatcttaaaatatttttttattgaaaagtgactgtgatattctactatttcatgagaaga

SEQ ID NO: 14877 - DNA, 110 bp, synthetic construct
  source 1..110: mol_type = other DNA
gctcagatacccacccccagcctgttgcagctctggatgtgttcctgcccccaggtctgggcagccagaacggatccacacctgatggctccacgcatttctcgtcctgg

SEQ ID NO: 14878 - DNA, 110 bp, synthetic construct
  source 1..110: mol_type = other DNA
tctgggcagccagaacggatccacacctgatggctccacgcatttctcgtcctggtgagtaaatctcttcccactttaaccccatgcttggcacatagaggccactcctg

SEQ ID NO: 14879 - DNA, 110 bp, synthetic construct
  source 1..110: mol_type = other DNA
tgtgttttcagattttctctgtatttgaaagctattttagagggattttcctctttcttcatgtaacagggcacacagccccactggtaaggaaatggagaaataggtag

SEQ ID NO: 14880 - DNA, 110 bp, synthetic construct
  source 1..110: mol_type = other DNA
ctgcggatctgggagggtcctggatggaaactaggggttccagctgctgtgtctctagggggaagacacttggtgctagaagtagagagggatgggttagcagatgacac

SEQ ID NO: 14881 - DNA, 110 bp, synthetic construct
  source 1..110: mol_type = other DNA
agcactgtactgggctttgtgaagagcctggaaggatatacgacgctctgctgtcctctagcacctcacagtctggttggtcgtagagctcttgaagagctctgagaaca

SEQ ID NO: 14882 - DNA, 110 bp, synthetic construct
  source 1..110: mol_type = other DNA
ctctagcacctcacagtctggttggtcgtagagctcttgaagagctctgagaacaaagtcatggaaggatcctaggagtgacactgtaggtagctcagtgcatgagaagt

SEQ ID NO: 14883 - DNA, 110 bp, synthetic construct
  source 1..110: mol_type = other DNA
caccaggcactctacacggtatgggaatggacagacaagtgttatcttgtttacagcatccggtgcctaccaggggccctgtaagagcagctcataggaacgccagtgca

SEQ ID NO: 14884 - DNA, 110 bp, synthetic construct
  source 1..110: mol_type = other DNA
gcatccggtgcctaccaggggccctgtaagagcagctcataggaacgccagtgcacttctgagcacccacagttcctctcagatgctcttaagctctgcctctcctgggc

SEQ ID NO: 14885 - DNA, 110 bp, synthetic construct
  source 1..110: mol_type = other DNA
aaggtccccaaataagaacaagagggctcagggaacatagctataaaaatgcactcagcaccctatgggtgggggactcaccctctctaaggaaattctagaccattgtg

SEQ ID NO: 14886 - DNA, 110 bp, synthetic construct
  source 1..110: mol_type = other DNA
catgtttttactgggttgtttgcattagggtctgaatcaggtcctagggcaggcgggaaactatagcaccaagctaggctttggtttgctaaaacagttactttggaaaa

SEQ ID NO: 14887 - DNA, 110 bp, synthetic construct
  source 1..110: mol_type = other DNA
ctggagctggggacagcaatgggaccagttgcaacctaagatatggcaggctaagcaagccgtcttacccaacgaggcctcgggtatcagctaccagaaagcagattcca

SEQ ID NO: 14888 - DNA, 110 bp, synthetic construct
  source 1..110: mol_type = other DNA
tgcaggcaggccaggggcctgggagggactggtataggtgtgagcaatgcagaccctgtccctgccctcctggagcagagtctcttactagctctgaaaccatgagagtg

SEQ ID NO: 14889 - DNA, 110 bp, synthetic construct
  source 1..110: mol_type = other DNA
ctgtccctgccctcctggagcagagtctcttactagctctgaaaccatgagagtgatctcaaggagagagtcaccatcactagcatgtctggccccagtttacctgtgtc

SEQ ID NO: 14890 - DNA, 110 bp, synthetic construct; identical to SEQ ID NO: 14888
  source 1..110: mol_type = other DNA

SEQ ID NO: 14891 - DNA, 110 bp, synthetic construct; identical to SEQ ID NO: 14889
  source 1..110: mol_type = other DNA

SEQ ID NO: 14892 - DNA, 110 bp, synthetic construct
  source 1..110: mol_type = other DNA
ctattgggtaccttttaaccctgtcacgttgtggtactcagtaaaacagagtgggtaattgcaggagctttggatagggtttgaacccctggctcctccactaaatgaat

SEQ ID NO: 14893 - DNA, 110 bp, synthetic construct
  source 1..110: mol_type = other DNA
cgcatctatcgttccactccacctgaggtgatagtggaagtgctggagccttacgtccgccttactactgccaatgttcgcatcatcaagaacagaacaggccccatggg

SEQ ID NO: 14894 - DNA, 110 bp, synthetic construct
  source 1..110: mol_type = other DNA
ggatggtatgacatggacttaaattctcatttggtggtagcaccttctctgaagtttgggccattgcctagttttatattgtcttctggttttattttgccactttggtg

SEQ ID NO: 14895 - DNA, 110 bp, synthetic construct
  source 1..110: mol_type = other DNA
tcccaggcaccattagtttctcccctctctgcacaaacaactatagcaatgtttttgtttgtttttcttttttggcatttagagctcctgggccagggatcagagccagc

SEQ ID NO: 14896 - DNA, 110 bp, synthetic construct
  source 1..110: mol_type = other DNA
gcccagagcaacccacagtcagtgaccctgcccctaaaggttgcctctggacagtccctaccccgagctgaacctgcatgcactgggacctgggactgaggagcaaaaat

SEQ ID NO: 14897 - DNA, 110 bp, synthetic construct
  source 1..110: mol_type = other DNA
gtgttgccccctctaaatatagcccagtgggctgagctcagttctattttcagtgcaggctgggaggtggccaggccttctccggggtcataggagccacttctactccc

SEQ ID NO: 14898 - DNA, 110 bp, synthetic construct
  source 1..110: mol_type = other DNA
ttcctcagcctatatgatatttttccaaacaaactagaccctgtggctcaaggctggcctgactgccttcaggaagtagctgccaccactgtttcattagtggaagcagc

SEQ ID NO: 14899 - DNA, 110 bp, synthetic construct
  source 1..110: mol_type = other DNA
ttctgcacataatcatggttataacagtcggggaagaggtagaagccccacagatgctgaggccgaaacgccttgacaaatcgcagtgtctccagcatgaactgccgggc

SEQ ID NO: 14900 - DNA, 110 bp, synthetic construct
  source 1..110: mol_type = other DNA
gctgaggccgaaacgccttgacaaatcgcagtgtctccagcatgaactgccgggcagcaaactcaaattcatactgcgcctgcttgactacacgatctggtggccagtca

SEQ ID NO: 14901 - DNA, 110 bp, synthetic construct
  source 1..110: mol_type = other DNA
tcatcctcacgtctgactcaaatccttctagctggagtgaattggtttccctattgtgcaaagctacactgtccctagaaaacagaatctcaaccacactctacccaatc

SEQ ID NO: 14902 - DNA, 110 bp, synthetic construct
  source 1..110: mol_type = other DNA
gtgcaaagctacactgtccctagaaaacagaatctcaaccacactctacccaatctccctgccccccatctccacctcccttgcccaccaaggagaaggagggaggtgtt

SEQ ID NO: 14903 - DNA, 110 bp, synthetic construct
  source 1..110: mol_type = other DNA
tgggcaacccaggaatattcagtaccacctgctgtgcccaccctgcgtggtctaaccacctgcacagaggtgccactcagctgaccctgctgggcatgggtggtgcctgc

SEQ ID NO: 14904 - DNA, 110 bp, synthetic construct
  source 1..110: mol_type = other DNA
agcccagtatccagcccccagaacccaggctgcctccatgtgccactaatttactgactcactgaataggctgagcagacagtctttgcttgccctttcagagtaaacac

SEQ ID NO: 14905 - DNA, 110 bp, synthetic construct
  source 1..110: mol_type = other DNA
gactcactgaataggctgagcagacagtctttgcttgccctttcagagtaaacactattttcaccccaagcccttgaccaagtgctaggttgatctcactcattgccagg

SEQ ID NO: 14906 - DNA, 110 bp, synthetic construct
  source 1..110: mol_type = other DNA
ccttcatatagctcctgccctgagctgttctctatcctctgggaactgacctcggatacggcctcagagtgacctcttagcacatggcagaagttggtgacccttctccc

SEQ ID NO: 14907 - DNA, 110 bp, synthetic construct
  source 1..110: mol_type = other DNA
tgcttgttctcacagagctgatattccatgcaggtaggtacaatatgagctagcggcctccagaaggtgtgggtatgagatcccgaaggaaggatctaaacccctgagaa

SEQ ID NO: 14908 - DNA, 110 bp, synthetic construct
  source 1..110: mol_type = other DNA
attgcctagacctccaggaggtctcccttgaagaagctagaacaattctaaggatgcagttatttatctagagactcctggacctcaggttgggggacttacttgtttct

SEQ ID NO: 14909 - DNA, 110 bp, synthetic construct
  source 1..110: mol_type = other DNA
ttccctgcacccttgtgctctgggaaagaccacactattttgtttccttttgtgtttcagacccagctcctatgggctctgaagcgtcgcacctcccccagcccttgggg

SEQ ID NO: 14910 - DNA, 110 bp, synthetic construct
  source 1..110: mol_type = other DNA
ttcagacccagctcctatgggctctgaagcgtcgcacctcccccagcccttggggctcaaggcccctccctcctctggtcccacaggtcctgtccacttggcctttccca

SEQ ID NO: 14911 - DNA, 110 bp, synthetic construct
  source 1..110: mol_type = other DNA
tctgattcgactcctggcctgggaacttccatatgccacaaatgcggcctgaaaaaaaaaagagaagctgagacagaataggcactaggttatgacctccaccggctcta

SEQ ID NO: 14912 - DNA, 110 bp, synthetic construct
  source 1..110: mol_type = other DNA
aaaaaagagaagctgagacagaataggcactaggttatgacctccaccggctctagtttgcagacttgttgctacgaggaagcctgaaggcccagcccttctgtccacag

SEQ ID NO: 14913 - DNA, 110 bp, synthetic construct
  source 1..110: mol_type = other DNA
gtccctttgctctgcagagctgattccaagaactgtggctcttggcagcgttcactcaggatcctttcctagaacattggcctggccctacccaggctgctggagtctca

SEQ ID NO: 14914 - DNA, 110 bp, synthetic construct
  source 1..110: mol_type = other DNA
atacagacgtacccatggctcctgcattgacacacatcccccatccgcacactgcctacactcatatactcccatacacacagcccttatgtgcgtgtacccaagtttcc

SEQ ID NO: 14915 - DNA, 110 bp, synthetic construct
  source 1..110: mol_type = other DNA
ctacactcatatactcccatacacacagcccttatgtgcgtgtacccaagtttccatgcacaaacacacacctccacacatacctctgctcatgcacacacccatgcacc

SEQ ID NO: 14916 - DNA, 110 bp, synthetic construct
  source 1..110: mol_type = other DNA
ccacctcccaagaaatgcatgctgatgactgttcccaagagctttgcatccaatgctcttcccacacaaaaagccaggaggtcttttaagaactgcactcaggtttgacc

SEQ ID NO: 14917 - DNA, 110 bp, synthetic construct
  source 1..110: mol_type = other DNA
cctgttctattgatctgtatttctcttcctgtgccagtaccgtagtgttttgatgctgtagctttgtggcatagtcagaagccaaagagcctgattcttccagctccatt

SEQ ID NO: 14918 - DNA, 110 bp, synthetic construct; identical to SEQ ID NO: 14917
  source 1..110: mol_type = other DNA

SEQ ID NO: 14919 - DNA, 110 bp, synthetic construct
  source 1..110: mol_type = other DNA
ccctatatctacagtgttgtgtaatgatgaagtaatgctgaccactaaaccgtgggaacatggttcaccatatggtaacagtttattaggctgtcaagtggccattgcag

SEQ ID NO: 14920 - DNA, 110 bp, synthetic construct
  source 1..110: mol_type = other DNA
gaacatggttcaccatatggtaacagtttattaggctgtcaagtggccattgcagcccttcaggttttggaagaagaaaaccttgctgaaaatgcagacaagacgagtgc

SEQ ID NO: 14921 - DNA, 110 bp, synthetic construct
  source 1..110: mol_type = other DNA
agaatccaatgtctgagttggcctcacccaacctatttccatcagagcatgagctaatttgtactattgatacatgtaaagggcacaaattatttttaaaaattaatcta

SEQ ID NO: 14922 - DNA, 110 bp, synthetic construct
  source 1..110: mol_type = other DNA
aatttgtactattgatacatgtaaagggcacaaattatttttaaaaattaatctaagcagggcttgggcagtgctatggtctttccttagagaaaaatgtttcaaaactg

SEQ ID NO: 14923 - DNA, 110 bp, synthetic construct; identical to SEQ ID NO: 14921
  source 1..110: mol_type = other DNA

SEQ ID NO: 14924 - DNA, 110 bp, synthetic construct; identical to SEQ ID NO: 14922
  source 1..110: mol_type = other DNA

SEQ ID NO: 14925 - DNA, 110 bp, synthetic construct
  source 1..110: mol_type = other DNA
gctggcctttaaccctgtgtcacctaaagctagtccctatagctgtgcacctatacatggccagcccaactcctatccctgcctccactaccacacattgtattcagggt

SEQ ID NO: 14926 - DNA, 110 bp, synthetic construct
  source 1..110: mol_type = other DNA
accccctctggtagttgatttctcgtctcatagcattgtggtcagagaaaatgctttgtatagcttcagttttttaaatttttccaaagtttggtctgtggcccaaggta

SEQ ID NO: 14927 - DNA, 110 bp, synthetic construct
  source 1..110: mol_type = other DNA
ttgtatagcttcagttttttaaatttttccaaagtttggtctgtggcccaaggtatgatctatcctggagaatgtttcccatgcccttgagaagaattatattctgctgc

SEQ ID NO: 14928 - DNA, 110 bp, synthetic construct
  source 1..110: mol_type = other DNA
gtcctccttcacgcaatacatgtctgctgagcattcagcacgtcgtgggtgctgagatgcaaggaggagtaagattgacctctccccttgaagagcatatcccctgtgtc

SEQ ID NO: 14929 - DNA, 110 bp, synthetic construct
  source 1..110: mol_type = other DNA
gatcttgtcagaacccctttggggaagcttcaagcttcttattccctgggatttgggagctttttatggagatggaattttttctctttgggaagacggagcctcagtgc

SEQ ID NO: 14930 - DNA, 110 bp, synthetic construct
  source 1..110: mol_type = other DNA
ccctccgccccctgcccagtcctctgggggcaggaggcagtccagggctggacgctgtgcctaagctgcttttcgcctcagagtgctttatttgggcagacggtgttctt

SEQ ID NO: 14931 - DNA, 110 bp, synthetic construct
  source 1..110: mol_type = other DNA
gacatttctgaccagctgctattagacagctcaataaacatgcgatctggatcggatgatgagaaacctaacttttgcttggctttcctaaaactctctctgtcaccctg

SEQ ID NO: 14932 - DNA, 110 bp, synthetic construct
  source 1..110: mol_type = other DNA
gtggcccagcttcatagaggggcctgagactcaagtgggaagtgaaacagcaatgccccccaacctcacccccactcccacacaccaggatcccatccatgaggagcccc

SEQ ID NO: 14933 - DNA, 110 bp, synthetic construct
  source 1..110: mol_type = other DNA
ctctgctccccctgcccccatagaaaagagtagctccttgtggcacacaccagtctcctagcaccctctagcatgcttttttctgctttctactgtgcccccaaagcctg

SEQ ID NO: 14934 - DNA, 110 bp, synthetic construct
  source 1..110: mol_type = other DNA
ccttgtggcacacaccagtctcctagcaccctctagcatgcttttttctgctttctactgtgcccccaaagcctgtgattttatatatatatatatatatatatatatat

SEQ ID NO: 14935 - DNA, 110 bp, synthetic construct
  source 1..110: mol_type = other DNA
caggctaggggtcaaattggagctacagctctttctgcagctctttttcatcatggtttattacaggttattaaatatagttcctatgcttacagtaggaccttgttgtt

SEQ ID NO: 14936 - DNA, 110 bp, synthetic construct
  source 1..110: mol_type = other DNA
ccccatttccagtgaagaaaggcaacaaagtaagagtggaaagtaagaatgacatagggatgcagaggcgggacaaagatagtcgggcgtaggtggaccaatactaaacc

SEQ ID NO: 14937 - DNA, 110 bp, synthetic construct
  source 1..110: mol_type = other DNA
tgactctatccaaaccacaagctgctgcctgaggctgtcctcatatatgcagaaccagttgtcccattctacagccctggcaccagtcttctaaacttgtaactgggagg

SEQ ID NO: 14938 - DNA, 110 bp, synthetic construct
  source 1..110: mol_type = other DNA
gctgtcactgagttcagtttaaggcaggacatgtaggagtgaattctagcaacgccctctgatccataataggattttcaggggttcaatctgaacctgacctttctggc

SEQ ID NO: 14939 - DNA, 110 bp, synthetic construct
  source 1..110: mol_type = other DNA
gcgtggcctataacgtcgttcctgccaccatgagtgcctgctttgacttccgcgtagcaccggatgtggacctgaaggtgccaactccacctgggtttggaggagggggc

SEQ ID NO: 14940 - DNA, 110 bp, synthetic construct
  source 1..110: mol_type = other DNA
tcaaacattttaaattgtttattcaataaaatgagggactatttggcgatggaaaacaaacacacacgctgattcaccttcctgtacacctgaaactaacacaacttgtc

SEQ ID NO: 14941 - DNA, 110 bp, synthetic construct
  source 1..110: mol_type = other DNA
acaaacacacacgctgattcaccttcctgtacacctgaaactaacacaacttgtcacaggtcccagctccttgtggggacagagctgggggacggcctgagctctattgg

SEQ ID NO: 14942 - DNA, 110 bp, synthetic construct
  source 1..110: mol_type = other DNA
ggaaagctggctccaagctgaccctaatccagggcagctgcagaagctgcctcctggggagcaggaccatgacagctctatatcctgcccgggtcccagcctctgtgtgt

SEQ ID NO: 14943 - DNA, 110 bp, synthetic construct
  source 1..110: mol_type = other DNA
ggggagcaggaccatgacagctctatatcctgcccgggtcccagcctctgtgtgtccctatctccactccatcccagatcctcggcagggtccggccccaactctgccct

SEQ ID NO: 14944 - DNA, 110 bp, synthetic construct
  source 1..110: mol_type = other DNA
gaaactacctctgaaaagggcagcttggagaagggagtcagcttctgctccatcgcacagcctcatcctcttggccactgctgtcatcgctgtttcagagcttgttcctg

SEQ ID NO: 14945 - DNA, 110 bp, synthetic construct
  source 1..110: mol_type = other DNA
cacagcctcatcctcttggccactgctgtcatcgctgtttcagagcttgttcctgctctagctacctggaagcacttccccaaaagcctccacaaagacaactttcacct

SEQ ID NO: 14946 - DNA, 110 bp, synthetic construct
  source 1..110: mol_type = other DNA
ttctggggcagaccacaccagcaccgagccctgccacagcagctcgcctcactctgcccagggtggcctctcatgacatgcaactggcattaccagtgacactgtggctg

SEQ ID NO: 14947 - DNA, 110 bp, synthetic construct
  source 1..110: mol_type = other DNA
acatggaggataaagctgggcgttggccacaagccagagtcggcctctactctgagaatgtggctgtgggtagctacctcaccgggcatgtgtgaggactggatacaaaa

SEQ ID NO: 14948 - DNA, 110 bp, synthetic construct
  source 1..110: mol_type = other DNA
gaatgtggctgtgggtagctacctcaccgggcatgtgtgaggactggatacaaaaatgcacacaaggacttcccatcttggcgcagtggaaacgattctgactaggaacc

SEQ ID NO: 14949 - DNA, 110 bp, synthetic construct
  source 1..110: mol_type = other DNA
gttttttatcatctagcacttgccaaagcacaaatgctcaggaagtatttgttgaattgtttgttgaatttcatgacctcagtcttacctaactcttgcttaatctactc

SEQ ID NO: 14950 - DNA, 110 bp, synthetic construct
  source 1..110: mol_type = other DNA
attgtttgttgaatttcatgacctcagtcttacctaactcttgcttaatctactccttctttagtctacacttgagattaattcttgctaggtaactcccagccctagac

SEQ ID NO: 14951 - DNA, 110 bp, synthetic construct
  source 1..110: mol_type = other DNA
actagtatccatgcagagatgcaggttcaattcctagcctcgctcagtgggttaaagcatccagtgttgccctaagctgtcatacaggtcgcagttcagatcccaggtgg

SEQ ID NO: 14952 - DNA, 110 bp, synthetic construct
  source 1..110: mol_type = other DNA
agtgggttaaagcatccagtgttgccctaagctgtcatacaggtcgcagttcagatcccaggtggctatggtacaggctggcagatgcagctccgattcaacccctagcc

SEQ ID NO: 14953 - DNA, 110 bp, synthetic construct
  source 1..110: mol_type = other DNA
aagaacaaagaagctgggattaacgattgttctgggacatttctgtagcttattttaatcatattttcaggagccatgatgtctctggtttacagttctctggccaggct

SEQ ID NO: 14954 - DNA, 110 bp, synthetic construct
  source 1..110: mol_type = other DNA
ggcggttctgggcagtgtgtctccctccatccttcaccccctaactgggaggttctaccttttctgcaccctcaagggctggggtgggctgagatccataccttagtgtc

SEQ ID NO: 14955 - DNA, 110 bp, synthetic construct
  source 1..110: mol_type = other DNA
gaaaatgatcaaggcttaggagggggtcatgggaacctctaatttgaagccaaaaaggacagaagctgagggtaaactggggccccagtacttgcacctggtgtctgaag

SEQ ID NO: 14956 - DNA, 110 bp, synthetic construct
  source 1..110: mol_type = other DNA
tgtcaaatggccaaggggaggcagagtagaagatatgcccctcggtcccttaagccaatgccgccagcaggaaatccaagtgggtgggcagatggcctggagctgcaggc

SEQ ID NO: 14957 - DNA, 110 bp, synthetic construct
  source 1..110: mol_type = other DNA
caatgccgccagcaggaaatccaagtgggtgggcagatggcctggagctgcaggccagctgagcccccatgtggtctgcttctccccaaccagaaccaaggaagggctgg

SEQ ID NO: 14958 - DNA, 110 bp, synthetic construct
  source 1..110: mol_type = other DNA
tgtgaccaaggtgagcagctgctggggtagcaggtctttgcagtggccagggcaggagaggctggctggatggatggaacccaagcctcagcatggcctctgcttgcagc

SEQ ID NO: 14959 - DNA, 110 bp, synthetic construct
  source 1..110: mol_type = other DNA
gagaggctggctggatggatggaacccaagcctcagcatggcctctgcttgcagcttaatttctttcaaagtatgataggcacatagctgctcgtcaggaagatgactct

SEQ ID NO: 14960 - DNA, 110 bp, synthetic construct; identical to SEQ ID NO: 14958
  source 1..110: mol_type = other DNA

SEQ ID NO: 14961 - DNA, 110 bp, synthetic construct; identical to SEQ ID NO: 14959
  source 1..110: mol_type = other DNA

SEQ ID NO: 14962 - DNA, 110 bp, synthetic construct
  source 1..110: mol_type = other DNA
ctgtgtcctgtccccatgcctgtaagacctctcaccttcctggggccagggccaacttcactgaggtggacatgagtctgatcctggatcccacaggctactatagcctc

SEQ ID NO: 14963 - DNA, 110 bp, synthetic construct
  source 1..110: mol_type = other DNA
taaattcttttaaagagctcttggcatgacacgttttggccatgcaatattaagataaagatatgagactaaaaaaggtaactaatagagagggtcctagggacttagga

SEQ ID NO: 14964 - DNA, 110 bp, synthetic construct; identical to SEQ ID NO: 14963
  source 1..110: mol_type = other DNA

SEQ ID NO: 14965 - DNA, 110 bp, synthetic construct
  source 1..110: mol_type = other DNA
ttaggacataaaagtgtgttagggaaaggctaaagcagatcaacctttaaaaacaatgaccctgggagttcctacgccagagccccagcaacgccagatctgagccgcat

SEQ ID NO: 14966 - DNA, 110 bp, synthetic construct
  source 1..110: mol_type = other DNA
tgaccaggtgccatattcggactccagggcttctatgaggaagtggccaacccgctgttgacgagtgtggaggtggggtaccctgagaacgccatccaggacctcaccca

SEQ ID NO: 14967 - DNA, 110 bp, synthetic construct
  source 1..110: mol_type = other DNA
gaaaagccacagacacaattcaattacaaaataaaacatgaggaatgttcatattcttacaactaaagtgtaatcttgaagctggaaggtgatcacagaccacacagcag

SEQ ID NO: 14968 - DNA, 110 bp, synthetic construct
  source 1..110: mol_type = other DNA
ccttcagggtactgtatcacctgtcaggaagacttccttggccaccttatgaatagcatcccagctcctagcttttctcactctcctactctgctttttttttttttttt

SEQ ID NO: 14969 - DNA, 110 bp, synthetic construct
  source 1..110: mol_type = other DNA
gaagtagtcaatgaagatttaaatgaaaattcacgatctgatttctggtcccccaaaaataaacactatcatgagagataaaaagggaaagtggagctgggaataaaata

SEQ ID NO: 14970 - DNA, 110 bp, synthetic construct
  source 1..110: mol_type = other DNA
tggtcccccaaaaataaacactatcatgagagataaaaagggaaagtggagctgggaataaaataatgaatatttttaattattcatggattgtgatatccttattcctc

SEQ ID NO: 14971 - DNA, 110 bp, synthetic construct
  source 1..110: mol_type = other DNA
actgtgctttaacctgaatcactcgttcacttcctaaatgcttctgacccagaatggtccaaccagatgcatatttaccacattgatgagagtcactggggccacggtct

SEQ ID NO: 14972 - DNA, 110 bp, synthetic construct
  source 1..110: mol_type = other DNA
atattatctgtcctgtgacggcaattgtaaggattaaagaagacaaaagtctgctccttcagaagcttaaatcctaatggaagagagactgggaaaaaaaaaaaaactaa

SEQ ID NO: 14973 - DNA, 110 bp, synthetic construct
  source 1..110: mol_type = other DNA
acttggtttccctatctgagaagtgtggtcagttatcaggactgtcttcccaggctgttgggagcatggagtggatgtggtgaggatgtgagtgtactttgtaaactgtg

SEQ ID NO: 14974 - DNA, 110 bp, synthetic construct
  source 1..110: mol_type = other DNA
agggagatgagggtctgcagagtggggtaggaagaggaccatcatcacagacattccctgcagagtccacccaccccacatgccctatcaagttgataccctttactaga

SEQ ID NO: 14975 - DNA, 110 bp, synthetic construct
  source 1..110: mol_type = other DNA
ctcctgaaggctcaaaggaaaatggtaggaatgagctgggctctttctgggaggcatctcctggtagtttctccacttcttctgactccagacccacaactgttggctgt

SEQ ID NO: 14976 - DNA, 110 bp, synthetic construct
  source 1..110: mol_type = other DNA
atatgggtaatcaactctctcagtgaaagaaaacctgcccaaataaaccactgcgcaatcttacaattcaatgtaaaattacaaagagagggagttcccatcgtggctca

SEQ ID NO: 14977 - DNA, 110 bp, synthetic construct
  source 1..110: mol_type = other DNA
attaatcaactgcctgtcatacctctttaatacttttcccctacatttttggcggcaaactctgcctcttcacatgacaatgagcatcattttctacagcgacaaggaag

SEQ ID NO: 14978 - DNA, 110 bp, synthetic construct
  source 1..110: mol_type = other DNA
tttccgtctgtgttatcctagcaagagcagagactctgggggaaatagatttggatctgggccccacgtttgctgcccactagctttgggactgaacaaattgagttggt

SEQ ID NO: 14979 - DNA, 110 bp, synthetic construct
  source 1..110: mol_type = other DNA
gccctgggacccagtgcacatgaaatctgtgtgcgcctttcaagaccggggtctctcttcccccccagacccgtggagctcccaagcacaagccccactggccttcaatg

SEQ ID NO: 14980 - DNA, 110 bp, synthetic construct; identical to SEQ ID NO: 14979
  source 1..110: mol_type = other DNA

SEQ ID NO: 14981 - DNA, 110 bp, synthetic construct
  source 1..110: mol_type = other DNA
cagccggggacacaagaacagttctccagccagtccatacccacctctgggaggatggtgatcacctccaggattccctgtgaacacagctcctcatccctaagtcatgt

SEQ ID NO: 14982 - DNA, 110 bp, synthetic construct
  source 1..110: mol_type = other DNA
ggagcttccctttgacattccagtgtgggagacagagtgagagtataagaggggaagggtgatgctcttgcacatttggggcaggggaggtgtcaagaaaggcctctttg

SEQ ID NO: 14983 - DNA, 110 bp, synthetic construct
  source 1..110: mol_type = other DNA
agggtgatgctcttgcacatttggggcaggggaggtgtcaagaaaggcctctttgctcaggtgacaggtgagcagggacctgaatgaagtgagggagcaggtttgtggac

SEQ ID NO: 14984 - DNA, 110 bp, synthetic construct
  source 1..110: mol_type = other DNA
cattttagtgcctgtgtgttttcacaggaagcagtaaggaaggcctgtcgaatatgtttttaaaaatattcatatttgcaaagatttttgctagtatttcatacatatct

SEQ ID NO: 14985 - DNA, 110 bp, synthetic construct
  source 1..110: mol_type = other DNA
ccccaaagctggaaggtagaaagaggcacatactgtgatggaacaaccagttcgttgaaatatatttgggggaaaatcataaacaatttaaaaactttttgtatcagaac

SEQ ID NO: 14986 - DNA, 110 bp, synthetic construct
  source 1..110: mol_type = other DNA
tgaaatatatttgggggaaaatcataaacaatttaaaaactttttgtatcagaacaaaagtagatcccttatgaaggagcacgcaaatgacatgtgaggttttaaaatcc

SEQ ID NO: 14987 - DNA, 110 bp, synthetic construct
  source 1..110: mol_type = other DNA
gtatgactctctgtagcccatttgactggtcttagccaggttggaagagagtagttgagctcatctggggcaagagttttgctctctctgcatgctaaaaggatggagag

SEQ ID NO: 14988 - DNA, 110 bp, synthetic construct
  source 1..110: mol_type = other DNA
ctcgggtaaaagtggaagtcgaggttcagcagtggagttgactaagatcattgtgctgggtttcaaatctagaccagctgataggaaagactgagggcgcttgtccactg

SEQ ID NO: 14989 - DNA, 110 bp, synthetic construct
  source 1..110: mol_type = other DNA
ctgttgatgactgccatcggcgcaagtactcttgacaccatgacagtgttgttggtgatagtttggtgtcagaacgtggtacctcatcacagatgctggcttttcagggg

SEQ ID NO: 14990 - DNA, 110 bp, synthetic construct
  source 1..110: mol_type = other DNA
gtgatttccgctagaaattgggccactttgtagttgttctctgcaaaaatattttcacagcagaagacagcctctggttataagaaagagaaattttaaagcagccatga

SEQ ID NO: 14991 - DNA, 110 bp, synthetic construct
  source 1..110: mol_type = other DNA
cacagcagaagacagcctctggttataagaaagagaaattttaaagcagccatgacagcatctgtatgcttgaggggcactgtcactgcatttggaaaatgaatagtttt

SEQ ID NO: 14992 - DNA, 110 bp, synthetic construct
  source 1..110: mol_type = other DNA
cacggcagctggggatctcacaggaccagcagagggctcagcgcgggcctcaccaaagtaacttcacacacaggagatgacagtaaaaacaaatgatttctccccccagt

SEQ ID NO: 14993 - DNA, 110 bp, synthetic construct
  source 1..110: mol_type = other DNA
aagtaacttcacacacaggagatgacagtaaaaacaaatgatttctccccccagtggagacaggggtctgaatgagagaacacaggaaaatatcctcaccccaaactcca

SEQ ID NO: 14994 - DNA, 110 bp, synthetic construct
  source 1..110: mol_type = other DNA
tgttttgtgtctgggacgtttaaaaggagaagctgccagcccctgaagagacttcaggaggaaggaagggtgcatggatattacatgggtacgcatgatgtgtcatgaag

SEQ ID NO: 14995 - DNA, 110 bp, synthetic construct
  source 1..110: mol_type = other DNA
agtttcctggcctagcccatgggatttaggtcaaagagcctaggctctaaacccagctgggacacatactagttcagtggtcctggctaagttattgaggctctcatctt

SEQ ID NO: 14996 - DNA, 110 bp, synthetic construct
  source 1..110: mol_type = other DNA
gctgggacacatactagttcagtggtcctggctaagttattgaggctctcatctttacaatgagaagaataataatgggttcggtagggttgtggggaagattgaatgag

SEQ ID NO: 14997 - DNA, 110 bp, synthetic construct
  source 1..110: mol_type = other DNA
cagctatcaagcccaagggaggtagaggcaattaagatttagaccttcaccaccaggtccaatagccatggaggcaggatgtgggtggtcatatgccagattaaacacta

SEQ ID NO: 14998 - DNA, 110 bp, synthetic construct
  source 1..110: mol_type = other DNA
ggtccaatagccatggaggcaggatgtgggtggtcatatgccagattaaacactaactgtgctctgagaggtgttgtaggaatcaaaggaaacttcgaggcatctcttca

SEQ ID NO: 14999 - DNA, 110 bp, synthetic construct
  source 1..110: mol_type = other DNA
ggaaatggagtggtctattaaaaagtaatggttgccactgcctgacggatctgtttcttgcaacattagtgtcatggtgatgtattagcagaatctccaaagtggaaaag

SEQ ID NO: 15000 - DNA, 110 bp, synthetic construct
  source 1..110: mol_type = other DNA
ctctggctgtgggtgtgaatcctggtttcacctgtatactgtatactgtggatggtatacagccttcagcagatactcagcttcttaatttacattttcctcttctttaa

SEQ ID NO: 15001 - DNA, 110 bp, synthetic construct
  source 1..110: mol_type = other DNA
accccaaattttaatttgcctgaagcacacttctagacatggggttttagatacttagagattagtcacacaacatctaaaggttagattgtatttactcataaacatag

SEQ ID NO: 15002 - DNA, 110 bp, synthetic construct
  source 1..110: mol_type = other DNA
ggtcttacatggaacttcacaagacagatgtattagagttgaaagatatggttagcactcctattctaaacagctcacagttctgtggccacgaagcatcctagggtaaa

SEQ ID NO: 15003 - DNA, 110 bp, synthetic construct
  source 1..110: mol_type = other DNA
gtgctgaaggatgtggctttttgtgacactgaagttatttttaaagaataaagagagagtgacttggactttgagctatcagaacttaggaatgtgattataattgtagt

SEQ ID NO: 15004 - DNA, 110 bp, synthetic construct
  source 1..110: mol_type = other DNA
agagtgacttggactttgagctatcagaacttaggaatgtgattataattgtagtatacaaattgcacagtttcagtgagtagaaatattgtccaaagagaattaatgca

SEQ ID NO: 15005 - DNA, 110 bp, synthetic construct
  source 1..110: mol_type = other DNA
aacacacatcagagccctgacatgtgttttctaagcagattcacatcattgacccctcttgcaaactcaagaggcagatgttattaccactgccatctactcctgacaca

SEQ ID NO: 15006 - DNA, 110 bp, synthetic construct
  source 1..110: mol_type = other DNA
ttactttggttgtggaacccctttgtccattacctcttcccatttttcagagcacattttttttttctctatcttttctcccattaagccaaaatgatcaggaaccaaaa

SEQ ID NO: 15007 - DNA, 110 bp, synthetic construct
  source 1..110: mol_type = other DNA
tccattacctcttcccatttttcagagcacattttttttttctctatcttttctcccattaagccaaaatgatcaggaaccaaaaaatgaaatacaagtagaacaaaaaa

SEQ ID NO: 15008 - DNA, 110 bp, synthetic construct
  source 1..110: mol_type = other DNA
acctcatcctccagtccctcctgtttgctggctgggatgcatgtgccctaactacttggagcgcgtgaatctgcagagatagctattcaccttcaaattcagcaagatag

SEQ ID NO: 15009 - DNA, 110 bp, synthetic construct
  source 1..110: mol_type = other DNA
atagctgtaactttacaaataaataatagtgttatctgtgctttgggccagtgcctcccccaagtcagtagattgggagctcctataggcttcacactgccttttgagat

SEQ ID NO: 15010 - DNA, 110 bp, synthetic construct
  source 1..110: mol_type = other DNA
tcccccaagtcagtagattgggagctcctataggcttcacactgccttttgagatggttggtgagaaggtctccattcaaagagcagtgacattctgcatggctgaggag

SEQ ID NO: 15011 - DNA, 110 bp, synthetic construct; identical to SEQ ID NO: 15009
  source 1..110: mol_type = other DNA

SEQ ID NO: 15012 - DNA, 110 bp, synthetic construct; identical to SEQ ID NO: 15010
  source 1..110: mol_type = other DNA

SEQ ID NO: 15013 - DNA, 110 bp, synthetic construct
  source 1..110: mol_type = other DNA
cttctagattcatggaagtgccaatgcaaggagctccagcatgccaaacactcattatccctcatctggctgctactaggtcttaatctccatcttggtagaagaccatt

SEQ ID NO: 15014 - DNA, 110 bp, synthetic construct
  source 1..110: mol_type = other DNA
aactcctggcctagaagatactctccagctgcgttggcccgacatttaagcctcccgccatttggcctcaacctgcacaaccatatcccctactcccattctttcaagcc

SEQ ID NO: 15015 - DNA, 110 bp, synthetic construct
  source 1..110: mol_type = other DNA
tatcttcaggcacgttgcctagttccttcttctataggttgtggataagtaagcttttaaatggcactgtatttccttctagtctttttttttttttctatacaaaactt

SEQ ID NO: 15016 - DNA, 110 bp, synthetic construct
  source 1..110: mol_type = other DNA
ctagcagctaagctagcctttccccacaagtaagcaagctcgtttgatccccgcatggtagttctgagtggatattgccttctagctttgcagaagaaactgagctccaa

SEQ ID NO: 15017 - DNA, 110 bp, synthetic construct
  source 1..110: mol_type = other DNA
taacctttgcctccattagacctaagccttgtggcaggtgggcctgtgccctatgtctgcatctctctctagctcctaaatcatgcgtcacccttggcactcagtctccc

SEQ ID NO: 15018 - DNA, 110 bp, synthetic construct
  source 1..110: mol_type = other DNA
ttattgtattgaatggactggatgcttcataggtagttacaaaccaatcagctgtaatggttctcaaagtggggcacccagaccagaaacatgagcatcacctgtgaact

SEQ ID NO: 15019 - DNA, 110 bp, synthetic construct
  source 1..110: mol_type = other DNA
aatggttctcaaagtggggcacccagaccagaaacatgagcatcacctgtgaacttgttagaaatgcaagttctcttatttgctcaacgtcatcaaatcagaaaccaaat

SEQ ID NO: 15020 - DNA, 110 bp, synthetic construct
  source 1..110: mol_type = other DNA
agcagcctggacttgtgaaagcttagagcaggagacagacgtgtgtctgagactctgtgtgtctgtaaaacattcacaaggcaagtttgggagcgattaaaatctgtgaa

SEQ ID NO: 15021 - DNA, 110 bp, synthetic construct
  source 1..110: mol_type = other DNA
tgtgtgtctgtaaaacattcacaaggcaagtttgggagcgattaaaatctgtgaatggccggaaggagtactgcttttgccaaaaaataactgcaggaagggcagccatg

SEQ ID NO: 15022 - DNA, 110 bp, synthetic construct
  source 1..110: mol_type = other DNA
ctgagccaagcaattggagaatacacactttttccagcacaagatctggccacggatcatgccataaagctagcctcagaaagtatagaaatctagtgctatcttctctg

SEQ ID NO: 15023 - DNA, 110 bp, synthetic construct
  source 1..110: mol_type = other DNA
cgctttgaggaaaatcaagagctaatgtcccaaggagattctactatgacttcctggcacaatgtccaacttgccttcccccgcacctctgccctcactatcctggagaa

SEQ ID NO: 15024 - DNA, 110 bp, synthetic construct
  source 1..110: mol_type = other DNA
ggcacaatgtccaacttgccttcccccgcacctctgccctcactatcctggagaaaaactggcttccatgcaatctcatccagcaggatccaagctgagttcattgctcc

SEQ ID NO: 15025 - DNA, 110 bp, synthetic construct
  source 1..110: mol_type = other DNA
gctatctgagagaaaacaacctcattcaggacatcaagctgtgaagacaccaaattgtgaagaatatcaacctcccagacagccatctgttgtgcaaactacacgcgatg

SEQ ID NO: 15026 - DNA, 110 bp, synthetic construct
  source 1..110: mol_type = other DNA
gttccctctgtttagaacactttctcctgctttttctcagctaactctcatacataattcaggtatcagtaaaatgatatctataggaggcaattcttggtaggtagagg

SEQ ID NO: 15027 - DNA, 110 bp, synthetic construct
  source 1..110: mol_type = other DNA
gagaggattttcgtatctgctgaagggtcagagcttttcacaggatgccaaaaagtccaaatcacagcagctccaaaaatgaatatttgtttatgtatcaccgaatcatt

SEQ ID NO: 15028 - DNA, 110 bp, synthetic construct
  source 1..110: mol_type = other DNA
tccaaatcacagcagctccaaaaatgaatatttgtttatgtatcaccgaatcattgcacggtacgcctgaagcaaaacattgtaaagcaactatactccagtaaaattaa

SEQ ID NO: 15029 - DNA, 110 bp, synthetic construct
  source 1..110: mol_type = other DNA
ttaatacctcccacaacaattcagacatttgtcctcatttctttccttacccacagcctctcagagagccatgacagagtcattgcagagcttctgctcttaaaaacaaa

SEQ ID NO: 15030 - DNA, 110 bp, synthetic construct
  source 1..110: mol_type = other DNA
gcctctcagagagccatgacagagtcattgcagagcttctgctcttaaaaacaaataaacagccacctttttttcccaatggtaagaaatgacgtatgccttttggctta

SEQ ID NO: 15031 - DNA, 110 bp, synthetic construct
  source 1..110: mol_type = other DNA
tattaggttcagaattatgaggctaagtctcacctaaagttatgaataatcaaagaagtctctttttttaataagctgtcctggcaattcactcattcattcatgtatac

SEQ ID NO: 15032 - DNA, 110 bp, synthetic construct
  source 1..110: mol_type = other DNA
aagtctctttttttaataagctgtcctggcaattcactcattcattcatgtatactgtcaacaagtacttgccaaatgcctaccatgtgctagcaattgggttaggcctg

SEQ ID NO: 15033 - DNA, 110 bp, synthetic construct
  source 1..110: mol_type = other DNA
gaatgtacagttgcagtgttcttgatctggtcttttaaccacgaaggttaagttattttaagatatccatttttttttattatatactatgtgccaagaactgaagtagg

SEQ ID NO: 15034 - DNA, 110 bp, synthetic construct
  source 1..110: mol_type = other DNA
ttttaagatatccatttttttttattatatactatgtgccaagaactgaagtaggagctatttatgtagactacatcttcctttgtcagaatggcaagctctatgggctt

SEQ ID NO: 15035 - DNA, 110 bp, synthetic construct
  source 1..110: mol_type = other DNA
tcaaatatattgtcatcacctagctcaaacacaataacactggttaatcaccacgttaaataaaacccaggtgcttggaataaaagttcttaatgaatctgtaggatgtc

SEQ ID NO: 15036 - DNA, 110 bp, synthetic construct
  source 1..110: mol_type = other DNA
atctcaatgtttaagctggcaaataagaaaaacaccacctgtatttagtgtccaggtaatcaaatagaaaattcatcaggctatgctaaaagcaacaaaatacatccacc

SEQ ID NO: 15037 - DNA, 110 bp, synthetic construct
  source 1..110: mol_type = other DNA
gcattcatttgtggtagggagaacccacacaatcaacatctcctaggctccattcccccccacccccgattttattggcttttcagggctaattcatgtccatgtatcac

SEQ ID NO: 15038 - DNA, 110 bp, synthetic construct
  source 1..110: mol_type = other DNA
aagttacacaagaaaaaccactcatgacacacaagagccatggatggtcatgtgattagaaacctaaatgttcataaccctctcttcatttttcacatattcacattatg

SEQ ID NO: 15039 - DNA, 110 bp, synthetic construct
  source 1..110: mol_type = other DNA
ttagaaacctaaatgttcataaccctctcttcatttttcacatattcacattatgcctctagcttcctaatccactttagttaacaagttcacaagaccaagtatgtttt

SEQ ID NO: 15040 - DNA, 110 bp, synthetic construct
  source 1..110: mol_type = other DNA
aagcatagttgcagatgtaattaaggatcttgagatcatccaggattaccaagctggaccataaatatgatgaaaaaatatgcttatggagttcccatagtggtgcaatg

SEQ ID NO: 15041 - DNA, 110 bp, synthetic construct
  source 1..110: mol_type = other DNA
tcatccaggattaccaagctggaccataaatatgatgaaaaaatatgcttatggagttcccatagtggtgcaatggttaacaaatccgagtaggaaccatgaggttgcag

SEQ ID NO: 15042 - DNA, 110 bp, synthetic construct; identical to SEQ ID NO: 15040
  source 1..110: mol_type = other DNA

SEQ ID NO: 15043 - DNA, 110 bp, synthetic construct
  source 1..110: mol_type = other DNA
gatcttgagatcatccaggattaccaagctggaccataaatatgatgaaaaaatatgcttatggagttcccatagtggtgcaatggttaacaaatccgagtaggaaccat

SEQ ID NO: 15044 - DNA, 110 bp, synthetic construct
  source 1..110: mol_type = other DNA
aagtcaccagttccactcctgatacccagatttctggaacatggcctcaattctgtccttcccagctatgacaatacaatatggatcacatcttgggctcaattctaata

SEQ ID NO: 15045 - DNA, 110 bp, synthetic construct
  source 1..110: mol_type = other DNA
tgtcctgaatttcatcttcaaactaagaatgtatatctgccaaccaaggggtactagagcaattaggagagacacgtcccacttaagacaagcaacaacccaactgaggc

SEQ ID NO: 15046 - DNA, 110 bp, synthetic construct
  source 1..110: mol_type = other DNA
agagcaattaggagagacacgtcccacttaagacaagcaacaacccaactgaggcaactcactgggttcagagccactggatctactctgagaaaattcagaaatccagg

SEQ ID NO: 15047 - DNA, 110 bp, synthetic construct
  source 1..110: mol_type = other DNA
tgacttaagtacaggaatatttgccaatacagaatcacgttgtggatcggtaatagagagggaaattataaattgttcatctcctgagattcctgcagaatttaatgaac

SEQ ID NO: 15048 - DNA, 110 bp, synthetic construct
  source 1..110: mol_type = other DNA
catctagtgtcatgactaaaaagaaaagtaccagaggccacagtaaaattaactaaatggcagcaactaagacagaggagactgtgcagtattttcagaggcaaaaatga

SEQ ID NO: 15049 - DNA, 110 bp, synthetic construct
  source 1..110: mol_type = other DNA
aatggcagcaactaagacagaggagactgtgcagtattttcagaggcaaaaatgaaagaaacttaaatattattataatcacttatttgtatgcctatttctaagggaga

SEQ ID NO: 15050 - DNA, 110 bp, synthetic construct
  source 1..110: mol_type = other DNA
ccagttcaactacaaaaatccatgttatgcaactgtagtcatatagggactgtatggtcctaagaatgtttttatccaatggaaggagtcagagaaagggagcttaaggg

SEQ ID NO: 15051 - DNA, 110 bp, synthetic construct
  source 1..110: mol_type = other DNA
cttccaagttaactgtacatcaggaagctactcaatgatgccattaaaacagaccttttccggagagagagaaaggactcaatagccttctctcaaaagcatgtttgctt

SEQ ID NO: 15052 - DNA, 110 bp, synthetic construct
  source 1..110: mol_type = other DNA
aggtcactttgaacactggccctgtgagcatttaagtttgggattcctgttcataggtctggcttatttctttcctttaacatattgcttaactttttcatttttaactt

SEQ ID NO: 15053 - DNA, 110 bp, synthetic construct
  source 1..110: mol_type = other DNA
tcacacacacagattaaattgtttttctgtaaatactgggtatgaagaggaagcaaacaaccaaaccacctgagcgtagacccaagcaactcagctactggctcgctctc

SEQ ID NO: 15054 - DNA, 110 bp, synthetic construct
  source 1..110: mol_type = other DNA
aacaaccaaaccacctgagcgtagacccaagcaactcagctactggctcgctctcactttactatgaaaggcagttacaaagactttgctcctgaagccgagaaagtaga

SEQ ID NO: 15055 - DNA, 110 bp, synthetic construct
  source 1..110: mol_type = other DNA
agataaaatagtttaggatttagggatcccaggggctcaggcctacacttcagtgccatttaatctaatcattgcagattaaatgagagttgtcagttaacctgagaacc

SEQ ID NO: 15056 - DNA, 110 bp, synthetic construct
  source 1..110: mol_type = other DNA
taaccactgcaccaccacgggaactcctccacttgttatctttatgttctcaaggaaacgggaacttaagtacctagtacagtcctagaaatgtttgtagctactttaac

SEQ ID NO: 15057 - DNA, 110 bp, synthetic construct
  source 1..110: mol_type = other DNA
aaacgggaacttaagtacctagtacagtcctagaaatgtttgtagctactttaactgaagaaaagcaaaagcagcaataattaggaaattatttttagcctcacattttg

SEQ ID NO: 15058 - DNA, 110 bp, synthetic construct
  source 1..110: mol_type = other DNA
cccatcacgacgaggtagagaaagagatggaggctgacaagggcacaagacagacagaattagcaccttgcacaagaaagctgtaagaaccaagaaggcaagtgtacaga

SEQ ID NO: 15059 - DNA, 110 bp, synthetic construct
  source 1..110: mol_type = other DNA
agaattagcaccttgcacaagaaagctgtaagaaccaagaaggcaagtgtacagaacattcccttgctaacgtagggcttcatttatccaagaatgtcatgagtgtctgt

SEQ ID NO: 15060 - DNA, 110 bp, synthetic construct
  source 1..110: mol_type = other DNA
aaataaggctaatcacattttggaaaataactggaatagagagatggaaacaaccaatcagtctctgcctacagctggaattaaaagaagtaaacttgagaactgagagg

SEQ ID NO: 15061 - DNA, 110 bp, synthetic construct
  source 1..110: mol_type = other DNA
aaaacttactatatgattcaggattccaattctggatacataaacacacacacacacacaaagaaaacaaaattattatctcagaaaggtatttgcacccccaggttcag

SEQ ID NO: 15062 - DNA, 110 bp, synthetic construct
  source 1..110: mol_type = other DNA
ccaattctggatacataaacacacacacacacacaaagaaaacaaaattattatctcagaaaggtatttgcacccccaggttcagtgcagcattatttacaatagccaag

SEQ ID NO: 15063 - DNA, 110 bp, synthetic construct
  source 1..110: mol_type = other DNA
tcctgatgaaccatacaaaaactattgtagtgcacatcttcctttttttacttacattttgtgcatgtctttgaacaagctaattcagtaaacacattcatgaatcttta

SEQ ID NO: 15064 - DNA, 110 bp, synthetic construct
  source 1..110: mol_type = other DNA
attttgtgcatgtctttgaacaagctaattcagtaaacacattcatgaatctttaaggatctgtagattgctctttttttttttggccttgtccaaggaatatgggaact

SEQ ID NO: 15065 - DNA, 110 bp, synthetic construct
  source 1..110: mol_type = other DNA
atcatgacagtaactgctagataaaaacatgctaacttgcccaaagaaaaatagttataactaaagaactaaggtcagattttaccccctataacttaactctatttgtg

SEQ ID NO: 15066 - DNA, 110 bp, synthetic construct
  source 1..110: mol_type = other DNA
agacccctttagtggctagtgcttgttttcatcttagccctgattgcatcaaagtgaagttatctctatttgaaaccctcctctccctatccttatctcacaatacccag

SEQ ID NO: 15067 - DNA, 110 bp, synthetic construct
  source 1..110: mol_type = other DNA
atgtttagaggtgaagaaagaaataaccactaagaaaacaatgccaaaaatttaaatactgaactagaaacctcagacttgagttctagccagcagccctgatacttaat

SEQ ID NO: 15068 - DNA, 110 bp, synthetic construct
  source 1..110: mol_type = other DNA
gccaaggatattaaaattagaaacgagtcatttttgtcttttcctttttgttcccacagagcagtttctgttctatctacatatagataagatgcattaatctgccttat

SEQ ID NO: 15069 - DNA, 110 bp, synthetic construct; identical to SEQ ID NO: 15068
  source 1..110: mol_type = other DNA

SEQ ID NO: 15070 - DNA, 110 bp, synthetic construct
  source 1..110: mol_type = other DNA
aagtatatggaaagacaaaggaattatagtaaggaaagctattttgataatggacaataatgtggtaggaatcagtctatctgatttcaagactgttatttcagacacac

SEQ ID NO: 15071 - DNA, 110 bp, synthetic construct; identical to SEQ ID NO: 15070
  source 1..110: mol_type = other DNA

SEQ ID NO: 15072 - DNA, 110 bp, synthetic construct
  source 1..110: mol_type = other DNA
gaaagatgtctcctctgcgtggttatatgagagggatttccaggtcaagtcagccaaggccatacacccaaaaagccagatcctagttgtgtggggcgtaaccccaggat

SEQ ID NO: 15073 - DNA, 110 bp, synthetic construct
  source 1..110: mol_type = other DNA
aaggccatacacccaaaaagccagatcctagttgtgtggggcgtaaccccaggatcccacagaagacactatgggtgtgagatggggaagttgtggcatttagatccagg

SEQ ID NO: 15074 - DNA, 110 bp, synthetic construct
  source 1..110: mol_type = other DNA
tatatagttccaatctacaaaccaaattaattcttgacttcccattgagtgtttcatggtggttaaaagtgtgggctcccatactgacagcttgtgtcacagccctggct

SEQ ID NO: 15075 - DNA, 110 bp, synthetic construct
  source 1..110: mol_type = other DNA
atggtggttaaaagtgtgggctcccatactgacagcttgtgtcacagccctggcttgtccacttcagtaactgctgggtaatcttggataaatgactccacctatttgaa

SEQ ID NO: 15076 - DNA, 110 bp, synthetic construct
  source 1..110: mol_type = other DNA
ccaactgccatgtggacctcctggaaaactgtgggcactcagtggtgatggagagacccaggaagacagccaagctcgtgattgacttcttaacttccgtgcacaacaca

SEQ ID NO: 15077 - DNA, 110 bp, synthetic construct
  source 1..110: mol_type = other DNA
acccaggaagacagccaagctcgtgattgacttcttaacttccgtgcacaacacagacaacaacaagaagctggactaaggcctcaatggcagcctgcattccacacctg

SEQ ID NO: 15078 - DNA, 110 bp, synthetic construct; identical to SEQ ID NO: 15076
  source 1..110: mol_type = other DNA

SEQ ID NO: 15079 - DNA, 110 bp, synthetic construct; identical to SEQ ID NO: 15077
  source 1..110: mol_type = other DNA

SEQ ID NO: 15080 - DNA, 110 bp, synthetic construct
  source 1..110: mol_type = other DNA
tggtggccataatggaaagagggatgagctgcaatctttccctggaaacacagctggtgctggcaatgactggagggtcctggaggggtgttagcactgtggaaaatact

SEQ ID NO: 15081 - DNA, 110 bp, synthetic construct
  source 1..110: mol_type = other DNA
ggtgctggcaatgactggagggtcctggaggggtgttagcactgtggaaaatactggcaataccacccatgtcttcacttggcagattggtcttcaaggaccatggatta

SEQ ID NO: 15082 - DNA, 110 bp, synthetic construct
  source 1..110: mol_type = other DNA
gctgggcttctcattgggctcatctttctttccacttctctgcccactgcccatctttttgctgcaatcacacttactccagtttatgtcttttacttctaggccagatt

SEQ ID NO: 15083 - DNA, 110 bp, synthetic construct
  source 1..110: mol_type = other DNA
tttttgctgcaatcacacttactccagtttatgtcttttacttctaggccagatttatgatttatctgagaactaggtcaaggataatgtctttcagctttttgataaaa

SEQ ID NO: 15084 - DNA, 110 bp, synthetic construct
  source 1..110: mol_type = other DNA
tcgcaaatgggcctcaacccagcctgtcaaatcaaaaacatgattgttaaaaagacaagaaacaagagtagcaaccactttattcctccaacattcaaataatgttttta

SEQ ID NO: 15085 - DNA, 110 bp, synthetic construct
  source 1..110: mol_type = other DNA
caagaaacaagagtagcaaccactttattcctccaacattcaaataatgtttttaaaaggtcacgttaaaagaaatctctttgggaattcccatagtggctcagtggtta

SEQ ID NO: 15086 - DNA, 110 bp, synthetic construct
  source 1..110: mol_type = other DNA
tttttaaaaaatttcagatgactgacccagtcacgttaaatgtaggtggacacttgtacacaacatctctcaccacgttgacacgttacccggattccatgcttggagct

SEQ ID NO: 15087 - DNA, 110 bp, synthetic construct
  source 1..110: mol_type = other DNA
gtacacaacatctctcaccacgttgacacgttacccggattccatgcttggagctatgtttgggggggacttccccacagctcgagatcctcaaggcaattacttcattg

SEQ ID NO: 15088 - DNA, 110 bp, synthetic construct
  source 1..110: mol_type = other DNA
ccagcatggctttgtcatgattctcattcctgagggcttttccccttagcaagagctctttcccaggagtcacccctgggggtttcctcacttgtctgctgcctaaagat

SEQ ID NO: 15089 - DNA, 110 bp, synthetic construct
  source 1..110: mol_type = other DNA
ctctttcccaggagtcacccctgggggtttcctcacttgtctgctgcctaaagatcatgctgtcctgggttttttcccctaccttgactgcttccaaaataggacacgca

SEQ ID NO: 15090 - DNA, 110 bp, synthetic construct
  source 1..110: mol_type = other DNA
tgtcgaaggccagggctatgggagaaagatgtacaggtgagagtgaaaagacaagaaaagggatcagttctctgaggaagaccttgtagaaagaaggtcgggagaacagt

SEQ ID NO: 15091 - DNA, 110 bp, synthetic construct
  source 1..110: mol_type = other DNA
tgcccccttctccttgaatgtgaatcctcatttcagtgaaacaaacataactgtctctatttcagagtgaaagacaatgttcctagactgtgtgatgcccaagacagggg

SEQ ID NO: 15092 - DNA, 110 bp, synthetic construct
  source 1..110: mol_type = other DNA
tctatttcagagtgaaagacaatgttcctagactgtgtgatgcccaagacaggggccataacgaggtcatctctgcatgttctctctggcagcctttaactatgcctcta

SEQ ID NO: 15093 - DNA, 110 bp, synthetic construct
  source 1..110: mol_type = other DNA
caagaagagttctgaaattcactctgattgggctagagtacagtatattctcattcctaaaagaacaaatgtagctaaatggatggaatgtgctaattaacttaccaaac

SEQ ID NO: 15094 - DNA, 110 bp, synthetic construct
  source 1..110: mol_type = other DNA
tgtttcagagccaggtgctctcttatctatctggatacttacttagtttctatttcagaaccactcttacactgtaggttttattttcagtttggggctaaggacctgta

SEQ ID NO: 15095 - DNA, 110 bp, synthetic construct
  source 1..110: mol_type = other DNA
agcctgtaagtggctcatatctgagtccatttaaggatttctaacttggatctgagtgatttatatgtttaaagatcttaagtcttcacggtttgaaaataatacaactt

SEQ ID NO: 15096 - DNA, 110 bp, synthetic construct; identical to SEQ ID NO: 15095
  source 1..110: mol_type = other DNA

SEQ ID NO: 15097 - DNA, 110 bp, synthetic construct
  source 1..110: mol_type = other DNA
gagtagtccagtttgtttagctgttgcttgggtttgtggtggtatccacctcactgtggtttcaatttaaatttttttccaatgactaataatattgaccatcttttttt

SEQ ID NO: 15098 - DNA, 110 bp, synthetic construct
  source 1..110: mol_type = other DNA
ctggtgatcttggtggtttagctgtgtatctgtgactgtgttggcctgggtgcatgcctgcagaatgagtgtggttataataagcagttcacgaatctcttcacaatacc

SEQ ID NO: 15099 - DNA, 110 bp, synthetic construct
  source 1..110: mol_type = other DNA
taaaaagatagaagaggcatttaaggttactcaggaattgttcctcaaatttcttccctgttctttatgggaatggatagctgtatttctgccctatttattttatgttt

SEQ ID NO: 15100 - DNA, 110 bp, synthetic construct
  source 1..110: mol_type = other DNA
gcctcaaaacacagccccacatggtttggggcaggtaagggctggagcttgagaaatagagcaagaaggcatgatgtctgggtggcaggagtctgtagttaatgggagat

SEQ ID NO: 15101 - DNA, 110 bp, synthetic construct
  source 1..110: mol_type = other DNA
ccttttcagaacataagcacacaaaggctccacctattttggtgggaactgaagcagaaaggataggttgagctgagactcttagcttgaggttcatgaactcatttaaa

SEQ ID NO: 15102 - DNA, 110 bp, synthetic construct
  source 1..110: mol_type = other DNA
tctaatatcatatcaaaaaagaaaagtccttttaacctacaacaatacaaattgcaagtatttcagctaatctcaaggattttggaaatgttcctggaaatctaaccatc

SEQ ID NO: 15103 - DNA, 110 bp, synthetic construct
  source 1..110: mol_type = other DNA
agcctttaaagataatgtgaacatgacatattctgaaaactgaatagaattatagctgactttttggtcttggtattttcatgaactgttacaggcaaaatgcctttgca

SEQ ID NO: 15104 - DNA, 110 bp, synthetic construct; identical to SEQ ID NO: 15103
  source 1..110: mol_type = other DNA

SEQ ID NO: 15105 - DNA, 110 bp, synthetic construct
  source 1..110: mol_type = other DNA
ataactgcagagatgctgacctagtgtgactggttctctgcttagcagtggccaaatattccatgcctggtaaacagggagccgtctcataaaatggtactgatttcagg

SEQ ID NO: 15106 - DNA, 110 bp, synthetic construct
  source 1..110: mol_type = other DNA
atattccatgcctggtaaacagggagccgtctcataaaatggtactgatttcaggaaacttctccctctggttgggtggcatacaaatttgcaatctgttttatccccta

SEQ ID NO: 15107 - DNA, 110 bp, synthetic construct
  source 1..110: mol_type = other DNA
tgctaattgtagaggagaagggtggtgggaatgcaaaaaaaagaaagatgaggtggaggagaggcaaagaattgggagagctgcataatgatcagggcccagagaaagac

SEQ ID NO: 15108 - DNA, 110 bp, synthetic construct
  source 1..110: mol_type = other DNA
gaggagaggcaaagaattgggagagctgcataatgatcagggcccagagaaagacacaatgcccactagtaacttggaattatctggtagcatatccactgctgactctc

SEQ ID NO: 15109 - DNA, 110 bp, synthetic construct
  source 1..110: mol_type = other DNA
caaagtgcttagcacagcctggcatgaagtaaatgctatattagtccctcaggttcgccttaacagattaccacaaatgtagaagctgaaagcagcacacatttattccc

SEQ ID NO: 15110 - DNA, 110 bp, synthetic construct
  source 1..110: mol_type = other DNA
tactgctgttcagacgcagaaatcaagcattaagtggcctcatcaacgcagatcgcaccagctgaatcccaataatttagagcctaaaatgctaatgcctccttggttct

SEQ ID NO: 15111 - DNA, 110 bp, synthetic construct
  source 1..110: mol_type = other DNA
catgcaatgtgggacagtgctctcgtataggaagatcagattcacatctcttcgtaggcaaattctgtttaagctaacacgtatagttatttgttaagaaatgaaagtct

SEQ ID NO: 15112 - DNA, 110 bp, synthetic construct
  source 1..110: mol_type = other DNA
tcacagtgtttacttctcacaatattctcaaggggtgggaattagatacagaaacggcaggacatggagtttcaatagcagaccaagctcccccggctagaaaatggcag

SEQ ID NO: 15113 - DNA, 110 bp, synthetic construct
  source 1..110: mol_type = other DNA
tattcatagttgtcagtcttggttgtatttagctagtgctttgaaatgacagcgagtcttaagaggtgaccatagcaactctgaaagtgacaaaaagtaagaactggcta

SEQ ID NO: 15114 - DNA, 110 bp, synthetic construct
  source 1..110: mol_type = other DNA
gcaacactttgagactgtgttgttacttgcagtaggaactacagcaagcaggtgagggttcccaagaggagctgttgcctctccaacattttatgatttgctatgagctt

SEQ ID NO: 15115 - DNA, 110 bp, synthetic construct
  source 1..110: mol_type = other DNA
agagtgacactttgataagaatttattatattttaaaatgcatatgtattatagcaaagttccacaaaagaaaacagtgagtgaagagcaaggctgccctctgacctgtg

SEQ ID NO: 15116 - DNA, 110 bp, synthetic construct; identical to SEQ ID NO: 15115
  source 1..110: mol_type = other DNA

SEQ ID NO: 15117 - DNA, 110 bp, synthetic construct
  source 1..110: mol_type = other DNA
acatttctactagttgaaactttcaaggtctagctcagaagtcagatcatccaccaaacttttccagtcctctcatcaaaataaatgtctgtcacctcagcattctcata

SEQ ID NO: 15118 - DNA, 110 bp, synthetic construct
  source 1..110: mol_type = other DNA
tgtttagctgctgatgcactacttaggattaatagtgtgattcagtgcaaatgaagctatggaaatgggggctagagttagtttcataccaacttgtagcctggaagaat

SEQ ID NO: 15119 - DNA, 110 bp, synthetic construct
  source 1..110: mol_type = other DNA
gtttcattaaatcctcacaacaacctaatgagaaaactgaggcatagaaaccagtccaaggtcagtaaggctacaacttggtggagtggagatctagatccaatcagcct

SEQ ID NO: 15120 - DNA, 110 bp, synthetic construct
  source 1..110: mol_type = other DNA
ccaaggtcagtaaggctacaacttggtggagtggagatctagatccaatcagcctagctctagactcaaaccctaagctgttctgcagtactgctattcatattctaatc

SEQ ID NO: 15121 - DNA, 110 bp, synthetic construct; identical to SEQ ID NO: 15119
  source 1..110: mol_type = other DNA

SEQ ID NO: 15122 - DNA, 110 bp, synthetic construct; identical to SEQ ID NO: 15120
  source 1..110: mol_type = other DNA

SEQ ID NO: 15123 - DNA, 110 bp, synthetic construct
  source 1..110: mol_type = other DNA
ttcaggctctctcaaaaaaacaatgcatataataaccaatgaacgtgcccttttaaaaatgcagtccagaggtagattttcacattaggaagtgcatccatcacaagctg

SEQ ID NO: 15124 - DNA, 110 bp, synthetic construct
  source 1..110: mol_type = other DNA
aaaatgcagtccagaggtagattttcacattaggaagtgcatccatcacaagctgttcaagctaagagatatttgaaatcaattgatccaacactcacgtttttacagtt

SEQ ID NO: 15125 - DNA, 110 bp, synthetic construct
  source 1..110: mol_type = other DNA
gaaaaagaacttatatctgggccccacattggtactcctgtctttaagaaataaaacacccttagaaaattaggggcgagggattctttcccccccttccagtgtctgtg

SEQ ID NO: 15126 - DNA, 110 bp, synthetic construct; identical to SEQ ID NO: 15125
  source 1..110: mol_type = other DNA

SEQ ID NO: 15127 - DNA, 110 bp, synthetic construct
  source 1..110: mol_type = other DNA
atctttttcctggcttttctattacctgtgcaactatgagctagtcacattgttagcatctatttcctcctcaataaaagaaaggtgtcatcctgtttcatgatgttttt

SEQ ID NO: 15128 - DNA, 110 bp, synthetic construct
  source 1..110: mol_type = other DNA
gtggaatggaaaggaggcagctggtgaagatctgtttcaggccaaggacagacgggctgatggactaggcatcgggggagtgaggcagaaaaggaagattcgagagtgat

SEQ ID NO: 15129 - DNA, 110 bp, synthetic construct
  source 1..110: mol_type = other DNA
acttttggcattatatctaagaaatcatagcataatccaaggtgatgaagattgatgcctatgtttttgtctaagagttttatatttctagctcttccatttaggtcttt

SEQ ID NO: 15130 - DNA, 110 bp, synthetic construct
  source 1..110: mol_type = other DNA
tgctctagggcagaaaatggggatacctagtgcagcttaggcaagaggcttcaggtcacacctgccctaagctaattcccacaggagtggcctgagtaaaaagtgagaca

SEQ ID NO: 15131 - DNA, 110 bp, synthetic construct
  source 1..110: mol_type = other DNA
tcacacctgccctaagctaattcccacaggagtggcctgagtaaaaagtgagacaaaacgatatgaggtgggccacaagaagtacataatacattaattcacttcctcag

SEQ ID NO: 15132 - DNA, 110 bp, synthetic construct; identical to SEQ ID NO: 15130
  source 1..110: mol_type = other DNA

SEQ ID NO: 15133 - DNA, 110 bp, synthetic construct; identical to SEQ ID NO: 15131
  source 1..110: mol_type = other DNA

SEQ ID NO: 15134 - DNA, 110 bp, synthetic construct
  source 1..110: mol_type = other DNA
cttactccatttaccttatttgtattttttaataaaccacaacacaaagggcatagcttagtcaatgaccccacatactaagaggagagtggctgatgcctttcttacac

SEQ ID NO: 15135 - DNA, 110 bp, synthetic construct
  source 1..110: mol_type = other DNA
agcaaaggagggactgaccatagtacctaagctgcataaggagggaagcgaggatgtgagagggagaatgactacaggcagacctcattttagagcactttgctttatgt

SEQ ID NO: 15136 - DNA, 110 bp, synthetic construct
  source 1..110: mol_type = other DNA
aaagataaagcaggtcccagtactcttccagaaacatcttagtccctttcagagtaagtcaggcactgtaggaagctgccttcactctctgaaatcctctagacattctt

SEQ ID NO: 15137 - DNA, 110 bp, synthetic construct
  source 1..110: mol_type = other DNA
gcaaagaatcatcacttctaaactatttgtatgaacatatttgagcactggttattctatggcagtgcagagtaaggtaagctctgtaccgacccaacagaattcatgca

SEQ ID NO: 15138 - DNA, 110 bp, synthetic construct
  source 1..110: mol_type = other DNA
caagcaaatttacagaagtgtacacaattaaacaattcttgtccttagggaatttaaagtctaataaaagagaaaaataagtcattcaactaggccaaactaccttggtt

SEQ ID NO: 15139 - DNA, 110 bp, synthetic construct
  source 1..110: mol_type = other DNA
gactgttctcagtggatttcccttctttgctgagtttcaaagctacagagagataaaaacaaaagcactgagttttctgtgagtaaaacaccaaacgctttctctctatg

SEQ ID NO: 15140 - DNA, 110 bp, synthetic construct
  source 1..110: mol_type = other DNA
atggtcagtttacagatcatcacacagacaccatgccacataaaataatagagaattgtgaatagctaggtgaaattaaaaacaattacaaataaaacagcatgaatgtg

SEQ ID NO: 15141 - DNA, 110 bp, synthetic construct
  source 1..110: mol_type = other DNA
tttcttagcctctcattccactcttgcccagtttaggaattagctaatgccttgaaggaaaaccatacagagattgggatcacttctctgaagtttcccattacttcaaa

SEQ ID NO: 15142 - DNA, 110 bp, synthetic construct
  source 1..110: mol_type = other DNA
acgcataattaaacactgtgcatctattgtcagaaagaagaaaagtgttaaatggtggttatttggaaaggcctgtttacaagcacctaagagtaagaatgctcaccaag

SEQ ID NO: 15143 - DNA, 110 bp, synthetic construct
  source 1..110: mol_type = other DNA
agatgtttccagacaaatttgcatctgaccactgatggaaaggtactttggaaagcccaatgtcatatttgttcctttggtcaaaaatggtgtagaacaggagttcctat

SEQ ID NO: 15144 - DNA, 110 bp, synthetic construct
  source 1..110: mol_type = other DNA
ctttggaaagcccaatgtcatatttgttcctttggtcaaaaatggtgtagaacaggagttcctattgtggcccagcgataatgaacctgactagtatccatgaggacgtg

SEQ ID NO: 15145 - DNA, 110 bp, synthetic construct
  source 1..110: mol_type = other DNA
tttcattaacacattacacaaattctttagaggccaatttgcattcacttagagaaacatttgtgggggtggcatataatatacagaaatacctgctccgtttctgaaaa

SEQ ID NO: 15146 - DNA, 110 bp, synthetic construct
  source 1..110: mol_type = other DNA
aacatttgtgggggtggcatataatatacagaaatacctgctccgtttctgaaaatcaatttgttaaatagccctcaaactatgacagctttatggtaggattatgactt

SEQ ID NO: 15147 - DNA, 110 bp, synthetic construct
  source 1..110: mol_type = other DNA
tctgtgtccatcctctttgttttagagggtgatctacttgatggtgtgatattataagttaatgggattttgttaaccaaaataccgattagctcagagctctcccagag

SEQ ID NO: 15148 - DNA, 110 bp, synthetic construct
  source 1..110: mol_type = other DNA
aagttaatgggattttgttaaccaaaataccgattagctcagagctctcccagagcagttcctccagggggaatggggaggaatttttgtaattatgtagctcagagtct

SEQ ID NO: 15149 - DNA, 110 bp, synthetic construct
  source 1..110: mol_type = other DNA
gccctaggattcttagaactgacagtatccatgagctgggtaccatgttaggtaggcttctcaggatgctaacagcacctgtccctctttctgcctgctcacccatagca

SEQ ID NO: 15150 - DNA, 110 bp, synthetic construct
  source 1..110: mol_type = other DNA
tctgtttctcattcttcccagattgttctgtttttctccactcagttatttcctcgttcacccacccagaccattgcctgccgccagctttgttccctccattgctacgt

SEQ ID NO: 15151 - DNA, 110 bp, synthetic construct
  source 1..110: mol_type = other DNA
gttcacccacccagaccattgcctgccgccagctttgttccctccattgctacgtgctcaagcatttcatgtgtttggctgtccagagaccgagggtcatttttgctgat

SEQ ID NO: 15152 - DNA, 110 bp, synthetic construct
  source 1..110: mol_type = other DNA
ttgaagagccagagaaaggaacggaaacttagaaatatcttgattaaaagtctgagctgaacgacaaattgcacaatgaatgaagcagctcctatgtgcctgatactgtg

SEQ ID NO: 15153 - DNA, 110 bp, synthetic construct
  source 1..110: mol_type = other DNA
gctgaacgacaaattgcacaatgaatgaagcagctcctatgtgcctgatactgtgctcagagctggcagctagtagcaaatgagctagctacagagttcactgtccagct

SEQ ID NO: 15154 - DNA, 110 bp, synthetic construct
  source 1..110: mol_type = other DNA
ccaaaatgggctgaccagggtgatagtgcttttattggcagtgataattagtccagcttaattatgtcagcatttgggcttttgatcccctgctaatttgtgtgcctgca

SEQ ID NO: 15155 - DNA, 110 bp, synthetic construct
  source 1..110: mol_type = other DNA
ggtgtcagctcttgatattgtttgtggctatttccattgttctcaaaacccaggttccttggtccagctcttggaggtgccgaaatgggagcctgagagtatggattttc

SEQ ID NO: 15156 - DNA, 110 bp, synthetic construct
  source 1..110: mol_type = other DNA
attttggggtaggtctgaagagagtctaggtacaaagctgttatttgccatcccgaggaattaattttgtagatgatggctaaacaaatgtggccacgtgtgttgaattg

SEQ ID NO: 15157 - DNA, 110 bp, synthetic construct
  source 1..110: mol_type = other DNA
tgccttgcttttaatgtatttgaaacttctctagctggtacttaatattctgaaggcatggtttgtttgctggaagaaagataggcatggcttctagttcacacctgtgg

SEQ ID NO: 15158 - DNA, 110 bp, synthetic construct
  source 1..110: mol_type = other DNA
gcatggtttgtttgctggaagaaagataggcatggcttctagttcacacctgtggcgctagggctcagaaggatgcagcgagttatagtcagggccctgctccaggtctc

SEQ ID NO: 15159 - DNA, 110 bp, synthetic construct
  source 1..110: mol_type = other DNA
tcccaaagtatttctttttgacaacctatcttcaacaattcttcagccaccactgaagctacttcatttaatgttagcagttttgcttctactaggaggattgagcccct

SEQ ID NO: 15160 - DNA, 110 bp, synthetic construct
  source 1..110: mol_type = other DNA
ttggtttggatgtcaccaaactggcagcttctaaggctcttgtggctacaaaaggcaatattgggatatgacaccagcacagtggatcaggtaccatcctgaagcctcag

SEQ ID NO: 15161 - DNA, 110 bp, synthetic construct
  source 1..110: mol_type = other DNA
caatattgggatatgacaccagcacagtggatcaggtaccatcctgaagcctcaggggaagaaaagcattactatctagacctttccaagttagttgtatgtgataagct

SEQ ID NO: 15162 - DNA, 110 bp, synthetic construct
  source 1..110: mol_type = other DNA
gcatgggctacaaatgttattggtggatgtaagtcatggaggattaggaacacgttctttgagctttcatgttatcaggtaacatgcattaaagatccccctgactacaa

SEQ ID NO: 15163 - DNA, 110 bp, synthetic construct
  source 1..110: mol_type = other DNA
tggatgcaggtgccaggcagacagaagcaggcagtgtcccctctgaaagctaggaagttggaattaaggaggggaggggtttccactgagaattagaacatggatagcag

SEQ ID NO: 15164 - DNA, 110 bp, synthetic construct
  source 1..110: mol_type = other DNA
caccaaaaatgaaaaacagtgaagaaaagagagaaacaatggctagctaggtcatgtgaccttgatgagctgcctccataaaacaaaccaaaaaacccaaattatatcag

SEQ ID NO: 15165 - DNA, 110 bp, synthetic construct; identical to SEQ ID NO: 15164
  source 1..110: mol_type = other DNA

SEQ ID NO: 15166 - DNA, 110 bp, synthetic construct
  source 1..110: mol_type = other DNA
cttggggggtggggagagaacaaaatgaggtcattgaaactctgaagaaaaagagcaccaaaaatgaaaaacagtgaagaaaagagagaaacaatggctagctaggtcat

SEQ ID NO: 15167 - DNA, 110 bp, synthetic construct; identical to SEQ ID NO: 15164
  source 1..110: mol_type = other DNA

SEQ ID NO: 15168 - DNA, 110 bp, synthetic construct
  source 1..110: mol_type = other DNA
attattttcatttcttccctggtgatgcctgtggcagatatagccttttcctggacacatgcagccatctcagagctaagattcaaagccaaactcagcagacctctttg

SEQ ID NO: 15169 - DNA, 110 bp, synthetic construct
  source 1..110: mol_type = other DNA
cacatgcagccatctcagagctaagattcaaagccaaactcagcagacctctttgtaactacaatgttaggaacagcgatctacaataatgatgattttcaccactcctt

SEQ ID NO: 15170 - DNA, 110 bp, synthetic construct
  source 1..110: mol_type = other DNA
agcatcattggccgaaagaagatagaatttttgtacaatgaagaacacctacatgctaatagctgcttcctactttcagaggatcagaggtagcacatgatgtagatgca

SEQ ID NO: 15171 - DNA, 110 bp, synthetic construct
  source 1..110: mol_type = other DNA
tcaagaaggcttgattcatgaagtatgtgagacccaatgtgtacttgattcctagaaaatggagcgggttgaacaaagaacaattggccttagtgtgattggttgcagaa

SEQ ID NO: 15172 - DNA, 110 bp, synthetic construct
  source 1..110: mol_type = other DNA
aaaatggagcgggttgaacaaagaacaattggccttagtgtgattggttgcagaatattatgggaatagtatgcaaccaatagatatgagaccaacccagggtgaaagga

SEQ ID NO: 15173 - DNA, 110 bp, synthetic construct
  source 1..110: mol_type = other DNA
cttgcatgaacttctggagaaaccaaaccttttagcttggagttagccaaaacggtggcaatgagaagaactttctagaagatgaaccaaggagaaacataacttacgtt

SEQ ID NO: 15174 - DNA, 110 bp, synthetic construct
  source 1..110: mol_type = other DNA
ctacgaggtgtgaaagcagaacaaagaacttgccttctatgagcttctgatctacataagagtcaacataccttaaataccgaatatacactatggcctggcattgtaca

SEQ ID NO: 15175 - DNA, 110 bp, synthetic construct
  source 1..110: mol_type = other DNA
cccaacagtgaccaggctctaaatcaccttaaaccctcccagctcaagggaccttgctacccagccttaaaattggcagacaggtggagaaaaagggacactgtgtacag

SEQ ID NO: 15176 - DNA, 110 bp, synthetic construct
  source 1..110: mol_type = other DNA
caaaactcagtcatagcagtgttgctggtcaaaggccagatatcaggtgctgtattctaaaatgtgtcgatatgtcttccaactcatcctacaatcccatgtcccactaa

SEQ ID NO: 15177 - DNA, 110 bp, synthetic construct
  source 1..110: mol_type = other DNA
acatcctgtttcccatgtggaagcattcactttgggccaacagctcgggggaagtcctcagctttaaactggtcctgcccatcctccctaagacaattgccatttccaac

SEQ ID NO: 15178 - DNA, 110 bp, synthetic construct
  source 1..110: mol_type = other DNA
aatactctaacagggaaatgttgtgggcattgctctgacctttgatttatgatctttgagctctggatgatattcaacagcatcacctaatacttagctgctaataaact

SEQ ID NO: 15179 - DNA, 110 bp, synthetic construct
  source 1..110: mol_type = other DNA
tttatgttactttatgtttatttggggtctttaatagattataagttctttttcatttttttaattctttttgctttttagggccgaacctgcggcatatgggtcaaatc

SEQ ID NO: 15180 - DNA, 110 bp, synthetic construct
  source 1..110: mol_type = other DNA
atgccacctgagtatttatactttctggttctagcagtgagaggcagtaggaactcaaggcaggattcaggccaaggttagatgtctactattttttgataaaggcaaac

SEQ ID NO: 15181 - DNA, 110 bp, synthetic construct
  source 1..110: mol_type = other DNA
caaggcaggattcaggccaaggttagatgtctactattttttgataaaggcaaaccttggaataatgaccatggccaaataatcaatagccagtttcttaaaagacagag

SEQ ID NO: 15182 - DNA, 110 bp, synthetic construct
  source 1..110: mol_type = other DNA
tactgaagaggacatcgaggctaagaaaggttaagtaacttgtcaaaagttctcctattactagttttctgagctagtatttaacctgaagactaatttcaaagcctaca

SEQ ID NO: 15183 - DNA, 110 bp, synthetic construct
  source 1..110: mol_type = other DNA
ctgaaactcacagaaaccctatgaagagctatgatcttattttaacaaagcagactaagaaatttgcccaggatcatacactttaatggcagaaatggaatttaaaccca

SEQ ID NO: 15184 - DNA, 110 bp, synthetic construct
  source 1..110: mol_type = other DNA
tttggtagacataagatgtccaaaagggggctggattttgtttatgcaggaagggggcatgtattagaaaaatgcagagggacgtgaggaagcaaagttatgaggtgagt

SEQ ID NO: 15185 - DNA, 110 bp, synthetic construct
  source 1..110: mol_type = other DNA
attcttttcttcaactggatttttaaaagaaaatcagacaccttttaaagtcaaacttcctggagttccccagctgctcctgataaataccgtatgaggatgatgttgga

SEQ ID NO: 15186 - DNA, 110 bp, synthetic construct
  source 1..110: mol_type = other DNA
tcaccatccattctccagtctctgccccagtctctttggtctctttggaacccacaagagagaatgatgctaccacctcaagctgatgcaccatcaaaacttggaggaag

SEQ ID NO: 15187 - DNA, 110 bp, synthetic construct
  source 1..110: mol_type = other DNA
aagagagaatgatgctaccacctcaagctgatgcaccatcaaaacttggaggaagtccaccctcaacccttttagctctcatactaaaagcctatttcctgctctgtaca

SEQ ID NO: 15188 - DNA, 110 bp, synthetic construct
  source 1..110: mol_type = other DNA
gcatactgcagagacaagaaaaagctcctccatgaggtcacagaatttaccttataagtagcaatgaagtaaaataagcgactacttagtaaggagaatctagttgcatc

SEQ ID NO: 15189 - DNA, 110 bp, synthetic construct
  source 1..110: mol_type = other DNA
tggtcccccaggctcctcgagttgttgctgtgtgtttagagagggaagaaaagaaagaaggagctggtgacgcggatgcttggtgcggtggtgccagtgctggtgtgtgt

SEQ ID NO: 15190 - DNA, 110 bp, synthetic construct
  source 1..110: mol_type = other DNA
ggtcccagaaaattacaggatagctgaagaatgagatcgagggtgagaatgacagcttggaggactgggcataaagcatgtcaaaggcctctgaggtcagtgagccctag

SEQ ID NO: 15191 - DNA, 110 bp, synthetic construct
  source 1..110: mol_type = other DNA
cttggaggactgggcataaagcatgtcaaaggcctctgaggtcagtgagccctagtgagaaggtggagggaagcaggaagttgtaggggaggaggcagggggaggtggag

SEQ ID NO: 15192 - DNA, 110 bp, synthetic construct; identical to SEQ ID NO: 15190
  source 1..110: mol_type = other DNA

SEQ ID NO: 15193 - DNA, 110 bp, synthetic construct; identical to SEQ ID NO: 15191
  source 1..110: mol_type = other DNA

SEQ ID NO: 15194 - DNA, 110 bp, synthetic construct
  source 1..110: mol_type = other DNA
ttagtcctagaacttagtgggtctagatatggataaaatccactcttattagattaattgttatgggctaggtcttcaactgaaatttcatctttcatcattataacagc

SEQ ID NO: 15195 - DNA, 110 bp, synthetic construct
  source 1..110: mol_type = other DNA
aattgttatgggctaggtcttcaactgaaatttcatctttcatcattataacagctccagagatatgtcatgttttatcaatcttgcagctggatctagtataatctttc

SEQ ID NO: 15196 - DNA, 110 bp, synthetic construct
  source 1..110: mol_type = other DNA
gaaagcccaggactgacttcaggcactaaaatatatctctggaacctaggccaaagtttttcccaggaggtggtttcagcctcttcattaccagttagctttgcaaactc

SEQ ID NO: 15197 - DNA, 110 bp, synthetic construct
  source 1..110: mol_type = other DNA
atcttgtaaataagaaaacacagattaggcacaaagaagttagcgaatatgattaaccaaggttatatgacagctatgcctgaataaaaacctccatctgcagctctaaa

SEQ ID NO: 15198 - DNA, 110 bp, synthetic construct
  source 1..110: mol_type = other DNA
ctcattttgccccaactaaaaacgtaactctcaactttttaggttgtgcatatgttttttcaaggcaacataaccaaaggaattaaaagctaggactgaaacagacattt

SEQ ID NO: 15199 - DNA, 110 bp, synthetic construct
  source 1..110: mol_type = other DNA
agccacacaggaactcctgtgtgtatatgtatatatatgtgtgtatacatacatatatgaattatgagcaaagttgttctgaataactatgtccatttttttggacctaa

SEQ ID NO: 15200 - DNA, 110 bp, synthetic construct
  source 1..110: mol_type = other DNA
tatgaattatgagcaaagttgttctgaataactatgtccatttttttggacctaacatactcatttctgttgagtatttaaccagagtggagtttctgtaactttcctct

SEQ ID NO: 15201 - DNA, 110 bp, synthetic construct
  source 1..110: mol_type = other DNA
cctttactctcctagtccaagtacagttacctcctagtcaccattacctcctgcttaagctaaagcaacagcctacgtattcttcccggtatccactcttgcctttctaa

SEQ ID NO: 15202 - DNA, 110 bp, synthetic construct
  source 1..110: mol_type = other DNA
tagagctcctgggacctcaatttaccagctaaactttgtgtatgttcttttcatctctgtaattatcagtagatcaattaatatgactctgataacgataatccttggga

SEQ ID NO: 15203 - DNA, 110 bp, synthetic construct
  source 1..110: mol_type = other DNA
catgtatgtctaatacgccttcttcatgtgtattggtgtgatctaggggcaccaagctgccttggtcattggtggttctcttgacagaattcagccactcctcttggtgg

SEQ ID NO: 15204 - DNA, 110 bp, synthetic construct
  source 1..110: mol_type = other DNA
cagggactgggaaattttacacaataaggcagagtctccgtttcctcagatgacgaaaggggatgaggaggccgaagatgataactaacggctaacgatgacattgtgtg

SEQ ID NO: 15205 - DNA, 110 bp, synthetic construct
  source 1..110: mol_type = other DNA
aaaggggatgaggaggccgaagatgataactaacggctaacgatgacattgtgtgtgctttgcactggtgcagatctcatgttgcaggcattagttcccaggagagttgt

SEQ ID NO: 15206 - DNA, 110 bp, synthetic construct
  source 1..110: mol_type = other DNA
tcatatccaggttggaattttcccatggagatggtctccaataggctcctacagatgtgtcacgtaaagagaaaattatctatagcaagccctcttttccaatgtaatga

SEQ ID NO: 15207 - DNA, 110 bp, synthetic construct
  source 1..110: mol_type = other DNA
aaggtaaggtggagaaaaatattaattaattacgatagctactaatgactgaggattcatggggaggggggacattttatgtacatcatctcatccactctcaccagagc

SEQ ID NO: 15208 - DNA, 110 bp, synthetic construct
  source 1..110: mol_type = other DNA
ttcatggggaggggggacattttatgtacatcatctcatccactctcaccagagctctttgaaaggagttttctgtacacacggtaacactaaggcccggcgcaggtggt

SEQ ID NO: 15209 - DNA, 110 bp, synthetic construct
  source 1..110: mol_type = other DNA
tggttctggggcagctgggggagggtgacaagatggcaattcacagtcctagatgtgagatgagaagaaaaagccaaagtcagtcaatgcacacattactggtcatggta

SEQ ID NO: 15210 - DNA, 110 bp, synthetic construct
  source 1..110: mol_type = other DNA
cttttttgtatttattttattcttttcattcaaacttgcgtctgggagctgcagttcgatttctggtgtatatttgtttgtgaaaccactggctatgcatgcaaaataac

SEQ ID NO: 15211 - DNA, 110 bp, synthetic construct
  source 1..110: mol_type = other DNA
gatgctgctcaggcttgctagaaatgtctcaggatgcagtggacagaaatgcgtctcaacaagatattggaaaggtcagactcctgagggccccagcatgcaggccccaa

SEQ ID NO: 15212 - DNA, 110 bp, synthetic construct
  source 1..110: mol_type = other DNA
tcaacaagatattggaaaggtcagactcctgagggccccagcatgcaggccccaacaatgaggcacagcagaccctgccagcatcctgggagttggaaggcttaccaatt

SEQ ID NO: 15213 - DNA, 110 bp, synthetic construct
  source 1..110: mol_type = other DNA
aaatgcctctgatgatttccacatttccccattggccatcatgctgtctaggattggagagaagctggagcctggagggtcacaggagaggagatggaattcacactact

SEQ ID NO: 15214 - DNA, 110 bp, synthetic construct
  source 1..110: mol_type = other DNA
aataaaatttttaaaaaatcctgtctttttgaagctaaaagtactacaaacaaaactgaatttaaatttcaggtgtggagttctctctgtggcacaatgcattaagaacc

SEQ ID NO: 15215 - DNA, 110 bp, synthetic construct
  source 1..110: mol_type = other DNA
cttctgaaaaaattaatcagtgtatacagtaggccacacttatccttggctgtgctttacaccatttcagttactcatgatcagctagtcatttaaaaaatattaagggg

SEQ ID NO: 15216 - DNA, 110 bp, synthetic construct
  source 1..110: mol_type = other DNA
gacatattggtgagaaaatcagaaataggtaacagactagcttaaaagagctcttaaaatcagcctgtaccctgtctcagaatgtcagaagccacctctggaaggtccta

SEQ ID NO: 15217 - DNA, 110 bp, synthetic construct
  source 1..110: mol_type = other DNA
aaaatcagcctgtaccctgtctcagaatgtcagaagccacctctggaaggtcctaaccttccactatatttcctcccttttgacaatgtctacacagcctgatgactttg

SEQ ID NO: 15218 - DNA, 110 bp, synthetic construct
  source 1..110: mol_type = other DNA
aattttcctacacagcgttaaaaccctaattagaaatttcaatttgaagagtctgatagctctttactctcatgttttctgaaccaacattttagagagttggtttgtga

SEQ ID NO: 15219 - DNA, 110 bp, synthetic construct
  source 1..110: mol_type = other DNA
acagccttccatttgcatttggagatccacatgattctgggaggctgactccataccagagtccatcaggggaaactttgagctcagcagagccaatctatgccttccac

SEQ ID NO: 15220 - DNA, 110 bp, synthetic construct
  source 1..110: mol_type = other DNA
gggcaagttactcaacctctccaaacctcagagatctatctacactcactgaaggctcactgtgtgccaggcgttgcccccagacactacaaccagatgaagctcccacc

SEQ ID NO: 15221 - DNA, 110 bp, synthetic construct
  source 1..110: mol_type = other DNA
ctcactgtgtgccaggcgttgcccccagacactacaaccagatgaagctcccaccctcagggagcttacattccagtggggatgagagacacaaaatatcagtggatact

SEQ ID NO: 15222 - DNA, 110 bp, synthetic construct
  source 1..110: mol_type = other DNA
tcaaaactattcaattacatgaatactgatgatacagaaagagacagagctagagagaaacagagagggagagagggggagaaggagagagacacaagaggtatacttta

SEQ ID NO: 15223 - DNA, 110 bp, synthetic construct
  source 1..110: mol_type = other DNA
agaaacagagagggagagagggggagaaggagagagacacaagaggtatactttaccatccccgggaatgatgcggagggtaaccgtatttcctgcttccttgattaggt

SEQ ID NO: 15224 - DNA, 110 bp, synthetic construct
  source 1..110: mol_type = other DNA
agggagcaaaatggatggatggaatgagtcccttctatcttccttcagcaaacttggtctcctcctcattaaacatcctctcctgtccaatgacaacaagagttaacaaa

SEQ ID NO: 15225 - DNA, 110 bp, synthetic construct
  source 1..110: mol_type = other DNA
aattttgttttcaggtcagagctggccctcaggctgctaatttattacaaagaggcaggaaaagatggatctgatatcagatgatagattaaatcaaagtgtgcccattt

SEQ ID NO: 15226 - DNA, 110 bp, synthetic construct
  source 1..110: mol_type = other DNA
tgcctaaggggtttatatttttatccccggcctcaaaattcttgtgctcctcagtacatccatcaacttccaatgcaacaaacccttttgaagaaaatgacacccactgc

SEQ ID NO: 15227 - DNA, 110 bp, synthetic construct
  source 1..110: mol_type = other DNA
tcttcagttatagagtagtaccagatgatttaattaaataagaaatgctggatcactttctttctgttgccaaacactttgggacctcatgttcaattaaaaattaaaac

SEQ ID NO: 15228 - DNA, 110 bp, synthetic construct
  source 1..110: mol_type = other DNA
gaatcactatgcttcatacaagccacaaactgaatacacaattccgcaaaagatgccttgattctgtcagccagccagctccttattaatcagccaagaatgaggctgga

SEQ ID NO: 15229 - DNA, 110 bp, synthetic construct
  source 1..110: mol_type = other DNA
tcttcatcatcaaccttctggttccaaccaatctgagctctatgtgctgtaatctgcatgtagtcaccatccaccacctgggtaggtggagttcttagtttctacagaac

SEQ ID NO: 15230 - DNA, 110 bp, synthetic construct
  source 1..110: mol_type = other DNA
atgcagggaaagcagagatgtgccaatttcatgtgaaagcaaaatcatactcagacattttcggggggtgggggacctgccctgaaggcatatggaagctcccaggctag

SEQ ID NO: 15231 - DNA, 110 bp, synthetic construct
  source 1..110: mol_type = other DNA
aaagcaaaatcatactcagacattttcggggggtgggggacctgccctgaaggcatatggaagctcccaggctaggggtcgaaccagagctgtaggtgccggcctacacc

SEQ ID NO: 15232 - DNA, 110 bp, synthetic construct
  source 1..110: mol_type = other DNA
tgtaccttgtctaatattagacttgaaacagggcttagcacaccacagacacttcataaatgtgtacttaggaataacattattttgccatatctgtctgctcaacacca

SEQ ID NO: 15233 - DNA, 110 bp, synthetic construct
  source 1..110: mol_type = other DNA
acgctcctgagttaaatttaactacagcaagaatcttcagggcagacacaatcaatcaacatttgtggctcaaaaaaccaactgctaccttttaaaagatctcttagact

SEQ ID NO: 15234 - DNA, 110 bp, synthetic construct
  source 1..110: mol_type = other DNA
ctgggacaatggaggttctgggaagttaacatgcccatggttcttcagctagagtcagacccaaccagtgggcctccaaacccgtataacaccaagtcccactgcctccc

SEQ ID NO: 15235 - DNA, 110 bp, synthetic construct
  source 1..110: mol_type = other DNA
tccttctgcaccggattatatcagacagtccctagcctgcaccaagctaagtcgtaagggactcccaccaccagcagccatcagaaaggtcatcactcctctccaggctt

SEQ ID NO: 15236 - DNA, 110 bp, synthetic construct
  source 1..110: mol_type = other DNA
attttagagaaaacttccttcatgttgagttaatgggcttttcctgcaaagtatggcggtgaaagactttgcttttgaattaccaaactccgagcacattttgaacaatt

SEQ ID NO: 15237 - DNA, 110 bp, synthetic construct
  source 1..110: mol_type = other DNA
gatggtgtatgaaaccatcaggttatacacttaatcccttggggagtcctgctaagtaaagctggccttttaggcccaaggtggggtcagcagttcagagacatttcctg

SEQ ID NO: 15238 - DNA, 110 bp, synthetic construct
  source 1..110: mol_type = other DNA
tgtttccttcctgaagtttctatggggagagcctctggtatgtgagttttcatttggagcacagagcaggttattcagaaagaaagcttcaggagttaacagatgcaaac

SEQ ID NO: 15239 - DNA, 110 bp, synthetic construct
  source 1..110: mol_type = other DNA
ggagcacagagcaggttattcagaaagaaagcttcaggagttaacagatgcaaactgttaagtttagattggacagactatgaggtcctcatggaactatgtccaatcac

SEQ ID NO: 15240 - DNA, 110 bp, synthetic construct
  source 1..110: mol_type = other DNA
agaaaattgtttcacgtgtgatttgagcacaaaagtggcctgcagttgctataccagataattatttcctgtctaatatgttagcatgttcctagtatttactaccagca

SEQ ID NO: 15241 - DNA, 110 bp, synthetic construct
  source 1..110: mol_type = other DNA
attattcagccttaaaaaaagaagttgtgacacatgctgcaacatggatgaatcttgaagacactgagctaagtgaaaaaagccagtcaccaaagacaaacactgtatga

SEQ ID NO: 15242 - DNA, 110 bp, synthetic construct
  source 1..110: mol_type = other DNA
tgaagacactgagctaagtgaaaaaagccagtcaccaaagacaaacactgtatgactccacttccatgaggtacctacagcagacaaattcgttgagatggcaagttcag

SEQ ID NO: 15243 - DNA, 110 bp, synthetic construct
  source 1..110: mol_type = other DNA
cacaaacccaagagcgaaagaggcccttcaaagcctgaacagctggaatcatcacatggatggagatcctgggtgtgtcttcttcacaagccagtgtgagaaagcaacat

SEQ ID NO: 15244 - DNA, 110 bp, synthetic construct
  source 1..110: mol_type = other DNA
ggtttcatctcagctattaatcccactgccatcactgccaattaacaagtactgcaaaccatgagcttaaagtctgtctcttaaggggcccatgtcacattaagtggcaa

SEQ ID NO: 15245 - DNA, 110 bp, synthetic construct
  source 1..110: mol_type = other DNA
aaaatcttggcaaattattttcctcttaggtggacaagttagacaagtctagtagggcgggagaaaatccaggaaaaaaatcgtcttgctctctcatttctcatctggac

SEQ ID NO: 15246 - DNA, 110 bp, synthetic construct
  source 1..110: mol_type = other DNA
ggcgggagaaaatccaggaaaaaaatcgtcttgctctctcatttctcatctggaccctctagatggacaactgcctaaaatgccagtgcatgaacaagcaggaagtaggg

SEQ ID NO: 15247 - DNA, 110 bp, synthetic construct
  source 1..110: mol_type = other DNA
ctgctttgagaaatgcttatcagggtcatttccaggatcctcttgttcacttgcatcctccaagtggatgggtggatccggccttggctgccacagactggcttggagcc

SEQ ID NO: 15248 - DNA, 110 bp, synthetic construct
  source 1..110: mol_type = other DNA
ctgtctttccagtggaaagatagctcagtgataacaatgaagggtcagggtctatgcaaattctttggcattatgtatatgttggttttagcagttcaggtgaggatgac

SEQ ID NO: 15249 - DNA, 110 bp, synthetic construct
  source 1..110: mol_type = other DNA
aaatcaaacaacatgcacaaaagtcaccatgccagtggtcaccccccaacctgcgaagattttttttgatataagtaagcatagctctgaaactccttcagagttcccat

SEQ ID NO: 15250 - DNA, 110 bp, synthetic construct
  source 1..110: mol_type = other DNA
taaagatagctcattaagctatctttctgggcacacaggtgctccattttccaccctcatgtgagggtcagtgtggtcacatgactgaggtctgctcaaagaaatgtggg

SEQ ID NO: 15251 - DNA, 110 bp, synthetic construct; identical to SEQ ID NO: 15250
  source 1..110: mol_type = other DNA

SEQ ID NO: 15252 - DNA, 110 bp, synthetic construct
  source 1..110: mol_type = other DNA
ctctctggttttctggagctgttcactccagttccatttccttcctctttccttaccttacctaaagttagagcctagctgaggctctggttcctgggtaagcagaatca

SEQ ID NO: 15253 - DNA, 110 bp, synthetic construct
  source 1..110: mol_type = other DNA
aaaagtgaatctcagtgggggtctaacaagatccttaaattatccttgtttccgaagcttggacattacacactgataggctttcagaaactcttcttttgctttgtccg

SEQ ID NO: 15254 - DNA, 110 bp, synthetic construct
  source 1..110: mol_type = other DNA
actttgagaaatatgaatggcattaccttccagtaccagttcctatacaggtacagtatctggttgtttaaaggtaaatactctaatgggattctctctctctctctctt

SEQ ID NO: 15255 - DNA, 110 bp, synthetic construct
  source 1..110: mol_type = other DNA
ttaaaaaaagaaattacccatttaatggattgttttaatgccatggggataacagcaatgaaataaaaatgaatgcaatctaggttctatgtgtcttagaccccagacta

SEQ ID NO: 15256 - DNA, 110 bp, synthetic construct; identical to SEQ ID NO: 15255
  source 1..110: mol_type = other DNA

SEQ ID NO: 15257 - DNA, 110 bp, synthetic construct; identical to SEQ ID NO: 15255
  source 1..110: mol_type = other DNA

SEQ ID NO: 15258 - DNA, 110 bp, synthetic construct; identical to SEQ ID NO: 15255
  source 1..110: mol_type = other DNA

SEQ ID NO: 15259 - DNA, 110 bp, synthetic construct
  source 1..110: mol_type = other DNA
gcaaaataagttttattagcatgactaaactagcttctggatgaatctgcaaggctggtttccatttgtttttgattttaagattagaaattctttaaagtaacttgcac

SEQ ID NO: 15260 - DNA, 110 bp, synthetic construct; identical to SEQ ID NO: 15259
  source 1..110: mol_type = other DNA

SEQ ID NO: 15261 - DNA, 110 bp, synthetic construct
  source 1..110: mol_type = other DNA
tcctatttttctctcgtggctttctttccattttatatagagcactgaaagcctgtgtttttatatctgcactctgtggtgtgatccctgcagcattttgcaggtaacaa

SEQ ID NO: 15262 - DNA, 110 bp, synthetic construct
  source 1..110: mol_type = other DNA
tgtttttatatctgcactctgtggtgtgatccctgcagcattttgcaggtaacaaatgcccctcctcagctaatgcacacatgggggcccataggcctgtgttctgtgga

SEQ ID NO: 15263 - DNA, 110 bp, synthetic construct
  source 1..110: mol_type = other DNA
gaactctacttccttcctctatgctaacctggggcatggaaaaatgtgcagttgttcacaaatatgtggaacgtggtggtcataccacttcctgggccctctcgaaaccc

SEQ ID NO: 15264 - DNA, 110 bp, synthetic construct
  source 1..110: mol_type = other DNA
tcacaaatatgtggaacgtggtggtcataccacttcctgggccctctcgaaacccatcctttcttttttctgtagaagccctgttctggtcaaggccctcaatgctgttc

SEQ ID NO: 15265 - DNA, 110 bp, synthetic construct
  source 1..110: mol_type = other DNA
gggatcagcttccattcaaagagctccaagaagccttaatttatacccccaaacccctaccgggtatgcctacaatgtgctcccattattaataaatgcatttatcattg

SEQ ID NO: 15266 - DNA, 110 bp, synthetic construct
  source 1..110: mol_type = other DNA
ccttctctattacagtgcatttgtcacaatcttgacttgttttatgtatttcttttcttttagatctaccttcaggacagttggtgcaactctatgtagaatgcaatggg

SEQ ID NO: 15267 - DNA, 110 bp, synthetic construct
  source 1..110: mol_type = other DNA
tcttttagatctaccttcaggacagttggtgcaactctatgtagaatgcaatgggaacagagctacaagttctaagaaggcagggtccttttctatcttgctcactgata

SEQ ID NO: 15268 - DNA, 110 bp, synthetic construct; identical to SEQ ID NO: 15266
  source 1..110: mol_type = other DNA

SEQ ID NO: 15269 - DNA, 110 bp, synthetic construct; identical to SEQ ID NO: 15267
  source 1..110: mol_type = other DNA

SEQ ID NO: 15270 - DNA, 110 bp, synthetic construct
  source 1..110: mol_type = other DNA
tctccactgacctgtataaaagagaaatctagggttgtacattgttatgaatatatttaagaggcctcttgttatcagagtcccagctcttcagggtgaattatggaaca

SEQ ID NO: 15271 - DNA, 110 bp, synthetic construct
  source 1..110: mol_type = other DNA
ggacatgccaagattaatgaaccaaaaaatcttagaagcaggcaggacctaagaagtcaaccagctgcagcttgaatcttttcttttgtaaggtggcccattccaatgtc

SEQ ID NO: 15272 - DNA, 110 bp, synthetic construct
  source 1..110: mol_type = other DNA
ttttctcactgttactgaggaccatgagtaagttcctctcagttctgagctctgctctctctgctttgagctcccactttaactggcttttcacagggccccatttgatt

SEQ ID NO: 15273 - DNA, 110 bp, synthetic construct
  source 1..110: mol_type = other DNA
tctctctgctttgagctcccactttaactggcttttcacagggccccatttgattggaaaccccatatctttaattccattctaagatccatgtgagaactcagtggtag

SEQ ID NO: 15274 - DNA, 110 bp, synthetic construct
  source 1..110: mol_type = other DNA
aaaccaaatagtacacatcttcaggccactactgaaattctctgtttgtgattcagttttgtctaaaatcagagaaccctatttcctataaggctacaacagttttttgg

SEQ ID NO: 15275 - DNA, 110 bp, synthetic construct
  source 1..110: mol_type = other DNA
caaaggaagcaatttttatgatgaattaaattaacatcgactcaggaatgctacagagtctaacaaagcagatgccatctcttctctgaagggccttctagttcaaagga

SEQ ID NO: 15276 - DNA, 110 bp, synthetic construct
  source 1..110: mol_type = other DNA
gagtctaacaaagcagatgccatctcttctctgaagggccttctagttcaaaggagatgccatgccaaggggtagccacagtgctggtgaggggctctgtcatacttaat

SEQ ID NO: 15277 - DNA, 110 bp, synthetic construct
  source 1..110: mol_type = other DNA
gagaagtcaggaaattaaagaaaggggaaaaaaatgggaaaacagacaaggacgatgctcgatgtgactgagccccacacagtcctttcttaataagtgatattacttaa

SEQ ID NO: 15278 - DNA, 110 bp, synthetic construct
  source 1..110: mol_type = other DNA
ctgcacatttattttggccaacttgttcaattgcttcattaaaaataacatataggagttcctgtcgtggctcagagtccgactaggaaccatgaggttgcgaatttggt

SEQ ID NO: 15279 - DNA, 110 bp, synthetic construct; identical to SEQ ID NO: 15278
  source 1..110: mol_type = other DNA

SEQ ID NO: 15280 - DNA, 110 bp, synthetic construct
  source 1..110: mol_type = other DNA
ttaagttgctgttttatttattgacaccttttactagctcatgccaataaggctcaggtcaatatgactgtactaaaaccctcaaatggtttctggcatatttattatag

SEQ ID NO: 15281 - DNA, 110 bp, synthetic construct
  source 1..110: mol_type = other DNA
aactgcattatctctttcctatttccatattgcacttccctccccctaatcattccacccaagacccaattctgtagtcaaaacgtccatccatatctttcttaaatatt

SEQ ID NO: 15282 - DNA, 110 bp, synthetic construct
  source 1..110: mol_type = other DNA
aacatttgtctaaatctgtttacactagcttgggttatagaaatgatataactccaccctaagtgaagtgaagttcataaccttggggtaaagtaccttttgagacatcg

SEQ ID NO: 15283 - DNA, 110 bp, synthetic construct
  source 1..110: mol_type = other DNA
tgttggacactaccctaggctgtggcaatacagtgatacactaaacagcaagaccctgctctcctgtctcccaggaaaaacaagcaagacagaagtcattgtttgggaag

SEQ ID NO: 15284 - DNA, 110 bp, synthetic construct
  source 1..110: mol_type = other DNA
ctgctctcctgtctcccaggaaaaacaagcaagacagaagtcattgtttgggaagcaagaggctttgttttgttcgcttctatattcccagcacctagggcagtgccagg

SEQ ID NO: 15285 - DNA, 110 bp, synthetic construct
  source 1..110: mol_type = other DNA
catagaagcctatgtcaaccaaataattttttttttggctgcacccatggcatatggaagttctctggccagggaaagaaaccaagctgcagctgcaagctttgcctcag

SEQ ID NO: 15286 - DNA, 110 bp, synthetic construct
  source 1..110: mol_type = other DNA
ggaagttctctggccagggaaagaaaccaagctgcagctgcaagctttgcctcagctgggggcaactccagatcctaacccactgcaccaggctgggaagcaaacctaag

SEQ ID NO: 15287 - DNA, 110 bp, synthetic construct
  source 1..110: mol_type = other DNA
gttaaacttgcccagtgtgtgggtccaggttctttctaccctcagctctgtgcctcatccttcccttgctctgctctgtgtagtgaggatacatttacctggctcctggg

SEQ ID NO: 15288 - DNA, 110 bp, synthetic construct
  source 1..110: mol_type = other DNA
gagaagataaatacacaatggctcttgaggacttggactaagaagaaacacactgtaagctccaccggggctccccccttcaatacggtcaagaacaacatcagagtgat

SEQ ID NO: 15289 - DNA, 110 bp, synthetic construct
  source 1..110: mol_type = other DNA
ttttttttcaatgtttaataagtgccttcgatatacaagctggatacatattccttacagtttataacacaatcccttgcagacagtggttgcctgacaaatgcttgagg

SEQ ID NO: 15290 - DNA, 110 bp, synthetic construct
  source 1..110: mol_type = other DNA
gatatgcatctctgctgtaccctgataatgaagagggaacaaaagaaggaagtttcaggctttcctaatcagctttgtgccatggagccctgaatgatcttggaagaccc

SEQ ID NO: 15291 - DNA, 110 bp, synthetic construct
  source 1..110: mol_type = other DNA
caataaggtgaattttcccatgtatattggcagcttctcaaggctcaatctggttgtttaaataaagttgtctgatgtagaaattaagtgttaaaacttaaggactttat

SEQ ID NO: 15292 - DNA, 110 bp, synthetic construct
  source 1..110: mol_type = other DNA
cccccccaaaggtggaagcagctagctgggccactgagatcccaaggggctcttccccagggcaggcagatttggcaggaccgccttgcaatgagggcatattttgcatg

SEQ ID NO: 15293 - DNA, 110 bp, synthetic construct
  source 1..110: mol_type = other DNA
ctgggccactgagatcccaaggggctcttccccagggcaggcagatttggcaggaccgccttgcaatgagggcatattttgcatggctgggacgagcttgttctagcttt

SEQ ID NO: 15294 - DNA, 110 bp, synthetic construct
  source 1..110: mol_type = other DNA
ttctcatctgctatgaagttctcagctgctcagagctccctatctctgtcaccgtcacttatggtctaacactgaaccttcctgagctgccctaacacacaaaggaggca

SEQ ID NO: 15295 - DNA, 110 bp, synthetic construct
  source 1..110: mol_type = other DNA
ctccaaagtccttttctgtcccaccttgtctccctgctgctgagggactccccgacatgtggcaacttctctgctccttcagcttcttccctggggtgcaggtcccaacc

SEQ ID NO: 15296 - DNA, 110 bp, synthetic construct
  source 1..110: mol_type = other DNA
tcaagtacactcagtgcccactcagtaggaagctacttacagcacaattcagagtaagaatttggattagggagttcctgttgtgtctcaatggttaacaaatccaatta

SEQ ID NO: 15297 - DNA, 110 bp, synthetic construct
  source 1..110: mol_type = other DNA
cctgcattgaaacactgtgcaggctgaacacagcacatatatgggcaaatacacgccacaagctaccagtttataatccttcctgtcaatcattcccctgcaacccaagg

SEQ ID NO: 15298 - DNA, 110 bp, synthetic construct
  source 1..110: mol_type = other DNA
aatctaccgtgcctaagtgcctaatacatgttgccaccaatttataagaaaattgaagcttcatgaggctaagccacgaacccgtgattgcacaacttctgtgctgccaa

SEQ ID NO: 15299 - DNA, 110 bp, synthetic construct
  source 1..110: mol_type = other DNA
aagcttcatgaggctaagccacgaacccgtgattgcacaacttctgtgctgccaaggctgaggaattagggcctcctgaattcttgggtatacacagcatgcctctccca

SEQ ID NO: 15300 - DNA, 110 bp, synthetic construct
  source 1..110: mol_type = other DNA
ataatattcaagaaacacacccacctattattttcatcctctagtttccttagcctatttttctctgattcaagctgggcctgaaatctactgttttcttgtcttaagag

SEQ ID NO: 15301 - DNA, 110 bp, synthetic construct
  source 1..110: mol_type = other DNA
tctatcattaaaaattaaactgtgatttctcaaaaatatgtcatgaaagtctcgttttcagtctgttaaaagcagcaccaagaaccttagagaatcgtaacaacactaag

SEQ ID NO: 15302 - DNA, 110 bp, synthetic construct
  source 1..110: mol_type = other DNA
aacctcaagaacaaactggagaataaaatagagggaatcggtctgaagaggacgcccatgggcattgtcctggatgccctagaacagcaggaagaaaacatcagcaagtt

SEQ ID NO: 15303 - DNA, 110 bp, synthetic construct
  source 1..110: mol_type = other DNA
gcaagccactcattttaaagatcagcctcagagaccttaagaaactttgcatttgcaccctcaactatggcatcttggcatactgaggttgttttttgtttttttccttt

SEQ ID NO: 15304 - DNA, 110 bp, synthetic construct
  source 1..110: mol_type = other DNA
caccctcaactatggcatcttggcatactgaggttgttttttgtttttttcctttttcagctgtacctgtggcatatagaagttcgtggtccagggactgactctgaact

SEQ ID NO: 15305 - DNA, 110 bp, synthetic construct
  source 1..110: mol_type = other DNA
aaaggggggaggaaaggtgtctatcgttgtctaccacaaaataaattatctttcaaatgttagcatttatcacttggaatgtgttatgtaattttaaaagagtacaattt

SEQ ID NO: 15306 - DNA, 110 bp, synthetic construct
  source 1..110: mol_type = other DNA
aacataaggcctcagggtaagctccaaagccattaggaagtgaatctccccatccaacctcaaatgttcatctctgtcagagccaggaggacacacagtggagcttaaag

SEQ ID NO: 15307 - DNA, 110 bp, synthetic construct
  source 1..110: mol_type = other DNA
caggaactcctcgattacttcctaaaaatgagtgcatcttaaaatagtccttttgggaattttggaataatattgtctataacaacaacaaggagaaacatttaagtgtt

SEQ ID NO: 15308 - DNA, 110 bp, synthetic construct
  source 1..110: mol_type = other DNA
tttcctctaaggtgaaagagtgtttactgatgcattggtgttttgcaaaaaatgctcttttatatgtagcaaagtgttactgataaaggcaaagaatattaaacatcacc

SEQ ID NO: 15309 - DNA, 110 bp, synthetic construct
  source 1..110: mol_type = other DNA
tcttttatatgtagcaaagtgttactgataaaggcaaagaatattaaacatcacctagattgcaggaataactttgcctgctgatggccaaatgaagaggctcaagtctc

SEQ ID NO: 15310 - DNA, 110 bp, synthetic construct
  source 1..110: mol_type = other DNA
gccacagaaatttctcatgtacataccacagaatactgcctctttcagtccacttttccctgttggactgtaaaccttctgaggagtccctgaaggtgagtggaggtggg

SEQ ID NO: 15311 - DNA, 110 bp, synthetic construct
  source 1..110: mol_type = other DNA
ttccctgttggactgtaaaccttctgaggagtccctgaaggtgagtggaggtggggtagctggatggtccctccttgtgcaggagagggaccccgtctactggaaagtgt

SEQ ID NO: 15312 - DNA, 110 bp, synthetic construct
  source 1..110: mol_type = other DNA
tcacagacatggctcggatcctgcatgttgctgtagtataggctaatagctatagctctgattcaacctgggaatttccatatgccatggtatggccctgaaaaggaagg

SEQ ID NO: 15313 - DNA, 110 bp, synthetic construct
  source 1..110: mol_type = other DNA
tcccacaaggagtatttggaatttctttcatccttgccagtctgacaggtgataagtttgcttatttaaagaatgcataacgtggagttccctggtggctcagtgggtct

SEQ ID NO: 15314 - DNA, 110 bp, synthetic construct
  source 1..110: mol_type = other DNA
caatggtctgaattacttgttttcctcttatgtcctcatttttagtctggtcttagctcatgtacctgctaggaactactgaatacaagtgacagaaacctgttctagca

SEQ ID NO: 15315 - DNA, 110 bp, synthetic construct
  source 1..110: mol_type = other DNA
gctcatgtacctgctaggaactactgaatacaagtgacagaaacctgttctagcaaactgaagataagcaaggaagagagaaatgtggtcccggtacttctacgagcatt

SEQ ID NO: 15316 - DNA, 110 bp, synthetic construct
  source 1..110: mol_type = other DNA
cccagataatatttctaagcctaatgcctccttttccccaactagctcacatttcgatcctgtgcacagccatgcacacatgtgcacatgtccccaccacacacagcttt

SEQ ID NO: 15317 - DNA, 110 bp, synthetic construct
  source 1..110: mol_type = other DNA
gctcatgctgtattgagggagggggaagagagtgcgaaatgagaggggagaattcataaaggcaatacactccaagattctttgcagtttgcacctgtaaacttgacatt

SEQ ID NO: 15318 - DNA, 110 bp, synthetic construct
  source 1..110: mol_type = other DNA
ctgagaagttgcctggcatgtaggccttcagtgctaaaacagaaaatctcagacaccctacttttggttatcctacctttgttctcagtcaccctacttttgttgctagc

SEQ ID NO: 15319 - DNA, 110 bp, synthetic construct
  source 1..110: mol_type = other DNA
gtaaacatacaattattttctagctctatggagagccaacaagcaatgacaccccaataacaatgagcacactgagcactcagatcttggtttttaaataccaacctttg

SEQ ID NO: 15320 - DNA, 110 bp, synthetic construct
  source 1..110: mol_type = other DNA
gggcttgttaccgctgagccacaatgggaactcctgcctctctattaaatcctgagaccaggtgtatggtttcagctgggagatggtgggtttgaatcccctcctaagcc

SEQ ID NO: 15321 - DNA, 110 bp, synthetic construct
  source 1..110: mol_type = other DNA
tctggtcccccaaatccttagtgttaagtggtgcagtaaggcaagaaacaattatgatatgagatagaataaatgaagtcagggtctaaagcaggtaaagccaggtggta

SEQ ID NO: 15322 - DNA, 110 bp, synthetic construct
  source 1..110: mol_type = other DNA
gatatgagatagaataaatgaagtcagggtctaaagcaggtaaagccaggtggtagctggttgaatgtagaaagtgatttcctctgaggaacaggtggagtgggactgga

SEQ ID NO: 15323 - DNA, 110 bp, synthetic construct
  source 1..110: mol_type = other DNA
agagattagacatattgctggagtctttttcagaataacaaggaacaagttcaaacctttcttgttggccagacttaaatcatgttcccattcatgagccagtacctctg

SEQ ID NO: 15324 - DNA, 110 bp, synthetic construct
  source 1..110: mol_type = other DNA
ccatgtatccagctctacattttcacctgtacatccatcgagtgtgcattttcactgtcccatctctctagctctaactgctgatcagtagctctcatctcggtctggca

SEQ ID NO: 15325 - DNA, 110 bp, synthetic construct
  source 1..110: mol_type = other DNA
tctctgccctgttgttcatagtttgtgactttgcagaacgtgacattttttcaggactgtatagatggaggtagagcagaaacacctgaatcaacctcaaagctgtgata

SEQ ID NO: 15326 - DNA, 110 bp, synthetic construct
  source 1..110: mol_type = other DNA
actgtatagatggaggtagagcagaaacacctgaatcaacctcaaagctgtgataatttagtagttaacgtatgtgaagtctgcagcctggctcctgaagtggctgcctt

SEQ ID NO: 15327 - DNA, 110 bp, synthetic construct
  source 1..110: mol_type = other DNA
tactttctataaaggaccaaatagtaaatgttttaccctttggaggtcataccatctgttcctcaactctgctctagcactgtaatagcttccacgcagtcctattctat

SEQ ID NO: 15328 - DNA, 110 bp, synthetic construct
  source 1..110: mol_type = other DNA
ttttaatttctagagggactaaatcttttcccttttgcccaaaccaaccatctgtttcttctctgtccatgtttgtcatctctcaagctgatttgatgcaagttcttcct

SEQ ID NO: 15329 - DNA, 110 bp, synthetic construct
  source 1..110: mol_type = other DNA
taggggagttaatatgcacatgcctttaacgagatatgctaaatgtgtatatagcaccgttactaatagccctttcctgtgctcttttcttaaagttgaacgaagaagaa

SEQ ID NO: 15330 - DNA, 110 bp, synthetic construct
  source 1..110: mol_type = other DNA
agatccctgacccacagagcaaggccagcgatcaaattcgcatcctcatgaatattagttgggtccattacctctaagccacaccaggagctccaaactcttgatattta

SEQ ID NO: 15331 - DNA, 110 bp, synthetic construct; identical to SEQ ID NO: 15330
  source 1..110: mol_type = other DNA

SEQ ID NO: 15332 - DNA, 110 bp, synthetic construct
  source 1..110: mol_type = other DNA
gatactggcaggtcctccagttgggtccccttagctggtgaatgaaactatgagtcaggtgctcagagccgtgactgggcctggggaccacactaacatctttctcctaa

SEQ ID NO: 15333 - DNA, 110 bp, synthetic construct
  source 1..110: mol_type = other DNA
cctttcagtcatcagatcttaacttgacccacctccaaagatgagagcaagaccttggactataagctgtcctcctgcaactgctgggtttctggctgattcttgctgag

SEQ ID NO: 15334 - DNA, 110 bp, synthetic construct
  source 1..110: mol_type = other DNA
aggtctggcctgctaggggcaataatggaaatagaggcctgaagcccttttctgggatggtaatgaaaagaacctatagaaagcacttgtcaacttgcttcacagttagt

SEQ ID NO: 15335 - DNA, 110 bp, synthetic construct
  source 1..110: mol_type = other DNA
taagcctactatttcttagtatattatacaagtaccattggaagcatgaaggacgatttttggtgctacacaaatacatttagtctcaaaattatttctaatacatggcc

SEQ ID NO: 15336 - DNA, 110 bp, synthetic construct
  source 1..110: mol_type = other DNA
ccattaaccaatccacaaatatcaaaaggctttcccttattttaaactcatccaagttgctgcatgcagatattcagcaccttatgagaagacactggagacatggtcat

SEQ ID NO: 15337 - DNA, 110 bp, synthetic construct
  source 1..110: mol_type = other DNA
aaagggcaattttgctgtttccacttgagctaggacatccatctcctgcccttggacatccacactcctggatctcagaacttcttacttggaccaggatttacaccact

SEQ ID NO: 15338 - DNA, 110 bp, synthetic construct
  source 1..110: mol_type = other DNA
gcttcaaattgatatgcaacttgtgattcaggaggtctggaagagggcgtgtgattctgcgtttctaacatgcaccagataatggccttgctgttgctccaggggccata

SEQ ID NO: 15339 - DNA, 110 bp, synthetic construct
  source 1..110: mol_type = other DNA
tctgcgtttctaacatgcaccagataatggccttgctgttgctccaggggccatactttcagcagcaacttctagaagagggggtggatgagtgaatgaagaaatgaatg

SEQ ID NO: 15340 - DNA, 110 bp, synthetic construct
  source 1..110: mol_type = other DNA
gcagtccacgccatatcctgtctttaaggagattcaagtcgtgttctagccaggacatttttcttgcatcacatctttaaatatgttaatttcccattactatgatcttc

SEQ ID NO: 15341 - DNA, 110 bp, synthetic construct
  source 1..110: mol_type = other DNA
ttgccttagatttctatattaggccctttctagacaatagtggagggtagaacccttaagccaaaacacaacagttttccttagttcaggacacagagttcagtttggtg

SEQ ID NO: 15342 - DNA, 110 bp, synthetic construct
  source 1..110: mol_type = other DNA
gatcagcatcttctggcagctggttaaaagtgcagactctgaggctctgcatagcttatctgaattagaatctgcatgggaataagatgcccaggtgatattgtatgcat

SEQ ID NO: 15343 - DNA, 110 bp, synthetic construct
  source 1..110: mol_type = other DNA
ttatctgaattagaatctgcatgggaataagatgcccaggtgatattgtatgcatgggaaagtttgagaaggcagatttacaatgttcagatttcaaaactacttagtag

SEQ ID NO: 15344 - DNA, 110 bp, synthetic construct
  source 1..110: mol_type = other DNA
tctagatatccatctatccatgtatccatccctctgctgatgtatttcctgagcatctattacatactcagcctaaggctggggcctgggaaaatgaaagaacttttaga

SEQ ID NO: 15345 - DNA, 110 bp, synthetic construct
  source 1..110: mol_type = other DNA
caataataactactgcccgatggttttctagccagattttatttctcccgttattctctaactctgatctcattatcttctgattaaccacctttattaattttcccagc

SEQ ID NO: 15346 - DNA, 110 bp, synthetic construct
  source 1..110: mol_type = other DNA
ttgttgttgactgtggcctggagttttagtgcagaggctaacatgaaaaaaagatgcattgttgggctttgctggggagagagattcttcatttgtagtctcagcaatag

SEQ ID NO: 15347 - DNA, 110 bp, synthetic construct
  source 1..110: mol_type = other DNA
gcattgttgggctttgctggggagagagattcttcatttgtagtctcagcaatagcttcaaatgggaccatttctaatacactacatgtgagtctgaatcaaaggcttaa

SEQ ID NO: 15348 - DNA, 110 bp, synthetic construct
  source 1..110: mol_type = other DNA
aaaaaagtttttgcaccctggttttttgttttgttacaattttgatggtatcaagattgctagctattcagatattatttaaatcaaactgccagctgctacagtcatac

SEQ ID NO: 15349 - DNA, 110 bp, synthetic construct
  source 1..110: mol_type = other DNA
aggcattcctcacatatcgtattattgtattcccaaagatctgtgaataaaccgtgattttaaacagaatcatcttttctaccatcttacttcagaattggttctcttta

SEQ ID NO: 15350 - DNA, 110 bp, synthetic construct
  source 1..110: mol_type = other DNA
ctattgcctctaaattgaactcaaaccacaaagtaatgttggaatcatttagcagagttagtctgaatgtgtcgagatcagaatagactaggattttcttttttccagtc

SEQ ID NO: 15351 - DNA, 110 bp, synthetic construct
  source 1..110: mol_type = other DNA
tgggttgaccttgacctccctctacccacccgcccaaatggccacatgcccagacccagcaagggagctattcaagtggcctgagtttctttggggtaggacattttaag

SEQ ID NO: 15352 - DNA, 110 bp, synthetic construct
  source 1..110: mol_type = other DNA
ccagcaagggagctattcaagtggcctgagtttctttggggtaggacattttaagattccaagagaaagccttctgcttctccatattgaacataaaactgacgtgtggc

SEQ ID NO: 15353 - DNA, 110 bp, synthetic construct
  source 1..110: mol_type = other DNA
cctcctttcaaaccccaggttttcattcttgctgtgctgttactctagtacttcccccacatctggaaactgccctttcccatcagctaaaccagaatttctcttgtgtc

SEQ ID NO: 15354 - DNA, 110 bp, synthetic construct
  source 1..110: mol_type = other DNA
ttcttctatggcctaattaataccggacttggtgacatttatgtatcagagcagtaagctaaacaggaaacaatttatgtcacctaaagctttttaacaaatcgatgcaa

SEQ ID NO: 15355 - DNA, 110 bp, synthetic construct
  source 1..110: mol_type = other DNA
gctattttgcaacttactccactgcttctgcctgactttcaacttaaagcgcattgaattatggttacacacacacacatatacgcagagtcttgtattttgtattatca

SEQ ID NO: 15356 - DNA, 110 bp, synthetic construct
  source 1..110: mol_type = other DNA
cacctgggactaaaatcatgtattatatgtggttcggctgagccttgaacgcaaaagaaagtgcaaggttttagtgcccattcagagctgagaatgtagataaggtgaat

SEQ ID NO: 15357 - DNA, 110 bp, synthetic construct
  source 1..110: mol_type = other DNA
gtacactctgcctcttgtccagtgcaaactgtttaagggcaaagaccaaaagagttcctattgtggctcagcagcttaaggacctgacacagtatccatgaggatgcagg

SEQ ID NO: 15358 - DNA, 110 bp, synthetic construct
  source 1..110: mol_type = other DNA
aacagtatatatagttctgttcattgggcctcagtttacccatctgcaccacaagaagggagcaggggaaagactctgagcttcctgcctgggctgttgcactgatagcc

SEQ ID NO: 15359 - DNA, 110 bp, synthetic construct
  source 1..110: mol_type = other DNA
tcttccttaaaccgatttacatagcctttttcctagctgtcccaaaatgcagattcttcaaggaatatttcaggcatttaaacggaaagtgaactcccatgaattttggc

SEQ ID NO: 15360 - DNA, 110 bp, synthetic construct
  source 1..110: mol_type = other DNA
cttcaaggaatatttcaggcatttaaacggaaagtgaactcccatgaattttggcaaaaataatggaaacaaggactgaaacaaaaatatccaataaaaaacactttctc

SEQ ID NO: 15361 - DNA, 110 bp, synthetic construct
  source 1..110: mol_type = other DNA
cagcctgtcacatccaaactagaatccaaacaagttaactttcttctagcaagttattcacttcagtgctccagacatcagggtttttttccccgctcagctttattcct

SEQ ID NO: 15362 - DNA, 110 bp, synthetic construct
  source 1..110: mol_type = other DNA
attcacttcagtgctccagacatcagggtttttttccccgctcagctttattcctaagcaaacctctttttagtatattttttcccctaagaatttgaaagatgctctag

SEQ ID NO: 15363 - DNA, 110 bp, synthetic construct
  source 1..110: mol_type = other DNA
ttcaaaaggtgaagaaggttcaccccactcggtgaaccagagtgacggcagagtgtgcacccattccatctgtgaggagttttgaaatgttcaacgagctttcacgcaca

SEQ ID NO: 15364 - DNA, 110 bp, synthetic construct
  source 1..110: mol_type = other DNA
tgcacccattccatctgtgaggagttttgaaatgttcaacgagctttcacgcacattacatcttatttaattcttgtaactacatgctactcctagctcagtagtaaggg

SEQ ID NO: 15365 - DNA, 110 bp, synthetic construct
  source 1..110: mol_type = other DNA
aaatcaggacacactttgctaatgtactactggataaagcaaatttcgcactacattaagagctgccagggtccaaaaccaccaaaacggcccttttggtcgaaggagtg

SEQ ID NO: 15366 - DNA, 110 bp, synthetic construct
  source 1..110: mol_type = other DNA
aaagtgtttggagctactgttacctacactgaatggttgtttcctactatcaacgttgttttctgctggtatataactgacaataatagctaacatttcttctagaaatc

SEQ ID NO: 15367 - DNA, 110 bp, synthetic construct
  source 1..110: mol_type = other DNA
cacacacacttagatatgtgtgccaaagcagctgtctacactcacatgtgtatgtaaatccaatccataaggatgggtgctattgtgggagacaaggctggatttgatcc

SEQ ID NO: 15368 - DNA, 110 bp, synthetic construct
  source 1..110: mol_type = other DNA
gaaattacccaaagcctagaggaaaaaaacactcaaaagcactagaaagaagagttcttagagctcacatcccaccagaaataatggatgatcccagtagccagagtgga

SEQ ID NO: 15369 - DNA, 110 bp, synthetic construct
  source 1..110: mol_type = other DNA
cacatgttgttctgttctgtgcctttgaagatgctgtgccttctccacagacttcccttctcctacttcttggctcagctcacttctgctcaccttatacctttccttct

SEQ ID NO: 15370 - DNA, 110 bp, synthetic construct
  source 1..110: mol_type = other DNA
caacgctgcctctaaacctagatacagagtgttaagagtccatgcctttggccgggagactgctcccagactgtcactggtgcaagggtaggggcgtccactcagagccc

SEQ ID NO: 15371 - DNA, 110 bp, synthetic construct
  source 1..110: mol_type = other DNA
tgatttgctgagtgcctcaaagtacaaaaagatatattatgtctttatggaaagcgatcattaataacacatgatactgacatttcacctaaacatagatgagggggaag

SEQ ID NO: 15372 - DNA, 110 bp, synthetic construct
  source 1..110: mol_type = other DNA
gtggcacatccgttgattggaatattagagataaaacaaaatgagctaacaagtcatgaaatgacatgaagtagctaaagcgcattttaccaagtgaaaggagtcaaccc

SEQ ID NO: 15373 - DNA, 110 bp, synthetic construct
  source 1..110: mol_type = other DNA
gtttatcataggacatttctctgggcttctgaatgactgtttcaggaggtcatttagcaaccgagctagcaggtcagccctgttttcctccccaagtaccttcactctct

SEQ ID NO: 15374 - DNA, 110 bp, synthetic construct
  source 1..110: mol_type = other DNA
agcaaccgagctagcaggtcagccctgttttcctccccaagtaccttcactctcttgggtccaaagtagccagattcattgctgcattcccctggagaggaagtgagtga

SEQ ID NO: 15375 - DNA, 110 bp, synthetic construct
  source 1..110: mol_type = other DNA
ggggcacaaagcgagcgcaaaattacccctcatcccacatccctgacgacactgagggggtttgtccttccagctatgggagtccaatttacgtctttcacttcacatgc

SEQ ID NO: 15376 - DNA, 110 bp, synthetic construct
  source 1..110: mol_type = other DNA
tatattcatctacccattacagtttttaccaccgatactattattcacttaatatttgctttttaaatcaagttgggcctaacacctggaactacatcattatttttgag

SEQ ID NO: 15377 - DNA, 110 bp, synthetic construct
  source 1..110: mol_type = other DNA
ttgctttttaaatcaagttgggcctaacacctggaactacatcattatttttgagagcagaaaaattagtgaaatcatgcatttgatgtgctagtagcatctgttttcct

SEQ ID NO: 15378 - DNA, 110 bp, synthetic construct
  source 1..110: mol_type = other DNA
acaccatatctttgcttcatttgatggagttacctaacatctgtgcactccaatatcctcacctgcaaaatgggggtaataacattactcatcttacaggaagtagtatt

SEQ ID NO: 15379 - DNA, 110 bp, synthetic construct
  source 1..110: mol_type = other DNA
tcctcacctgcaaaatgggggtaataacattactcatcttacaggaagtagtattagctgtgatgatgcttgaaattgtttaacagagtaattgccatggtacatcatga

SEQ ID NO: 15380 - DNA, 110 bp, synthetic construct
  source 1..110: mol_type = other DNA
tgggatgaatgacccatgggactggtgattggcaggctggttggctcagggactctcagctgagggaggggaggccactatatggcctttcatcctcctaaattgtcttg

SEQ ID NO: 15381 - DNA, 110 bp, synthetic construct
  source 1..110: mol_type = other DNA
aaatctctatcaacatatgtcccaggttgctctttggtggtcagtgtgtgctgaggcagctatgtggccagtaaagtctctaaaggtcagtgaggttttagcagcctggt

SEQ ID NO: 15382 - DNA, 110 bp, synthetic construct
  source 1..110: mol_type = other DNA
gatgatggttgacatggtcaccccagagaccagaaatgacccatctcttctgagtcagtctccccatggtagactcagagcttcatgactccccttggaaatttgtccaa

SEQ ID NO: 15383 - DNA, 110 bp, synthetic construct
  source 1..110: mol_type = other DNA
ttgtgaggattaaaggatatgatgcaacataaagcacttgctgcagagtaggcttgcagtaagtaatagctagcattttctccctctcttctcactcacccctgaaaatg

SEQ ID NO: 15384 - DNA, 110 bp, synthetic construct
  source 1..110: mol_type = other DNA
cagggtacatctgaaagcaaagctgatcagtttcctctcagcaccattaaaagtgattaaatgctcatcctttagaaacctgtgcagcctttttgtgcatttccctacaa

SEQ ID NO: 15385 - DNA, 110 bp, synthetic construct
  source 1..110: mol_type = other DNA
attaaatgctcatcctttagaaacctgtgcagcctttttgtgcatttccctacaaagagagttgccatcatttgctaaaggtaagtagggagagggagttaaagatagga

SEQ ID NO: 15386 - DNA, 110 bp, synthetic construct
  source 1..110: mol_type = other DNA
ggaactcgagccaacagctgtccatggcttaggtgttttgacctcattcccttccatgtgacatgtcagctactcagcgtggtctgaacaccagcaacatcaccgcacct

SEQ ID NO: 15387 - DNA, 110 bp, synthetic construct
  source 1..110: mol_type = other DNA
atgtgacatgtcagctactcagcgtggtctgaacaccagcaacatcaccgcaccttggccttctttagaaattcagactttcaactatggagagcagtatggaagttcct

SEQ ID NO: 15388 - DNA, 110 bp, synthetic construct
  source 1..110: mol_type = other DNA
tctgcttcgctctcctgtgttttactgcagacaagctctctagctctttctgtttgtccttctgaactcatggcctgaaaatggccacccagcatgactggtccagtctg

SEQ ID NO: 15389 - DNA, 110 bp, synthetic construct
  source 1..110: mol_type = other DNA
tggacactagtcaggttcatttccactgagccacaaagggaactccaatgaaccactgtgaatacagcttatacggatgacccttgaactgcatagtctattaataggtg

SEQ ID NO: 15390 - DNA, 110 bp, synthetic construct
  source 1..110: mol_type = other DNA
ctgtgaatacagcttatacggatgacccttgaactgcatagtctattaataggtgaattcttttccattgtaaatactacagcactacctgatccatggttggttgaatt

SEQ ID NO: 15391 - DNA, 110 bp, synthetic construct
  source 1..110: mol_type = other DNA
agaagcaacattctagtctacctttctttgatgccaaggtttgcttcatttttcagtaatgggaggaataaggcaagcaccaaaggccacagaacagaatatgaagctgg

SEQ ID NO: 15392 - DNA, 110 bp, synthetic construct
  source 1..110: mol_type = other DNA
gtaatgggaggaataaggcaagcaccaaaggccacagaacagaatatgaagctggatggtacactgggtagttctaactacctcattgtttccgaggattcccaagggtc

SEQ ID NO: 15393 - DNA, 110 bp, synthetic construct; identical to SEQ ID NO: 15391
  source 1..110: mol_type = other DNA

SEQ ID NO: 15394 - DNA, 110 bp, synthetic construct; identical to SEQ ID NO: 15392
  source 1..110: mol_type = other DNA

SEQ ID NO: 15395 - DNA, 110 bp, synthetic construct
  source 1..110: mol_type = other DNA
ctctcttctactggtcactgtcatgtccacctaagttccccagagctatggcaaccactttgtgaccatgaagaagaggccatcaacacgcagcagagggcaaagcagaa

SEQ ID NO: 15396 - DNA, 110 bp, synthetic construct
  source 1..110: mol_type = other DNA
gctaaggttctgccagcacttattttggtggccgtactcttccaagtgctttactgtatcataatctcacatgataacttacagtcactctaaaccagtgcttttcaagc

SEQ ID NO: 15397 - DNA, 110 bp, synthetic construct
  source 1..110: mol_type = other DNA
ggtttctgcccaccctctggactgagggcaggaattcagttggcttcagccactcctgttcctgcagcttgcagccgagtgcctggctcataggacatgctcactggttg

SEQ ID NO: 15398 - DNA, 110 bp, synthetic construct
  source 1..110: mol_type = other DNA
gcattaggggtgctctcaatatcaacacccacagaagcagaaacctcatctgagggagaagctcagctgtgaataggtctctgcgaagtcctcaacaaggaccccctggg

SEQ ID NO: 15399 - DNA, 110 bp, synthetic construct
  source 1..110: mol_type = other DNA
gagaagctcagctgtgaataggtctctgcgaagtcctcaacaaggaccccctggggagctgtcacagccattcagagtcccaagttggagcagaagggccagatccgtat

SEQ ID NO: 15400 - DNA, 110 bp, synthetic construct
  source 1..110: mol_type = other DNA
cttcttcatgaagaaaaagaaatataacgagagctcccaattaaggagccttcggttgaggccagtcactgtgcagagcactttctgtgtttcaccctgtcggatccaca

SEQ ID NO: 15401 - DNA, 110 bp, synthetic construct
  source 1..110: mol_type = other DNA
gtccaacttggccaccaggaccttcaccttgattccaaaattgaagagctgggcgcatcaccatccactctgtaatgtacaagtcaccccattcacatgatactgaccag

SEQ ID NO: 15402 - DNA, 110 bp, synthetic construct
  source 1..110: mol_type = other DNA
ctacagaaggactgaaggggtgacaggccctgtttgacaagcttaggacaagacaagcctagcacagagcttggcaccatgtagtggctccacagtgacagctgctatga

SEQ ID NO: 15403 - DNA, 110 bp, synthetic construct
  source 1..110: mol_type = other DNA
gacaaagatgaagcctagacaaagctaaagccatagggctgccgtgatctggaacactcctgttgcacccgggcacatggctggagggtttttccagctacttccatatg

SEQ ID NO: 15404 - DNA, 110 bp, synthetic construct
  source 1..110: mol_type = other DNA
actcctgttgcacccgggcacatggctggagggtttttccagctacttccatatgcatgagcccatgcagtcctttcctcagccacatgggctaagcaaatacatttgac

SEQ ID NO: 15405 - DNA, 110 bp, synthetic construct
  source 1..110: mol_type = other DNA
ttgaacccttgcaatgtgttccattttgtggccccaacacaccaggccttgataagtcttccctggaaatgcctcttgcagctgccctttcctcaccactccctgaccac

SEQ ID NO: 15406 - DNA, 110 bp, synthetic construct
  source 1..110: mol_type = other DNA
ttaattacacttctataaataatctacagtcaaacaaaagtcagctgaatgttcagttcatttggtagagaaactggtgcccgaacactgaagcaaatggcccaagacca

SEQ ID NO: 15407 - DNA, 110 bp, synthetic construct
  source 1..110: mol_type = other DNA
gttcatttggtagagaaactggtgcccgaacactgaagcaaatggcccaagaccaccacccaacattaaaaaccccattaatacatttggggactgccaagaggctccca

SEQ ID NO: 15408 - DNA, 110 bp, synthetic construct
  source 1..110: mol_type = other DNA
actcatcccactagatacataaatacattacaatgctaagtaaataaaacctctctcttatgtgggggacagagatataaaatggaagaggaagcccaggaatattccga

SEQ ID NO: 15409 - DNA, 110 bp, synthetic construct
  source 1..110: mol_type = other DNA
gccaggtggggaagcccccccgcccctgcactgggtggtatctggtatccttgacacctgtgaagctggtgcagggatgaggatttacatcaaggtcctagcagtgagct

SEQ ID NO: 15410 - DNA, 110 bp, synthetic construct
  source 1..110: mol_type = other DNA
ccaggcacacagacacctgtaatctcacccagagacaaaaccccatccaccagagggataggaatccacccccacctacccgtgggttggccccagtccctccaatcagg

SEQ ID NO: 15411 - DNA, 110 bp, synthetic construct
  source 1..110: mol_type = other DNA
cctgtaatctcacccagagacaaaaccccatccaccagagggataggaatccacccccacctacccgtgggttggccccagtccctccaatcaggaagcctacagcaaac

SEQ ID NO: 15412 - DNA, 110 bp, synthetic construct
  source 1..110: mol_type = other DNA
caggacccctcctctaatttatttcatgttccttctatggggcagggtgggggttcaaggagaacaagtgcctctgacttgacggtcagtgaacaagatgcatagctgtg

SEQ ID NO: 15413 - DNA, 110 bp, synthetic construct
  source 1..110: mol_type = other DNA
caaggagaacaagtgcctctgacttgacggtcagtgaacaagatgcatagctgtgccttagccactctgatggttttctcttttccagaatagcatgattccaacaggct

SEQ ID NO: 15414 - DNA, 110 bp, synthetic construct
  source 1..110: mol_type = other DNA
aaaatgggcttaaaattgtggtgaggttatagctctgacttacatatgagcaggaaattaccttgacttttaaggatctaggtaaaattagtactaacccctattctatt

SEQ ID NO: 15415 - DNA, 110 bp, synthetic construct
  source 1..110: mol_type = other DNA
tactccacagtgatttatcgcaattaaaaggaataattatttgccccttgggtcaagtcagagattccgagggtttgaatgccgtaatgtgtaaataaatcaagctacag

SEQ ID NO: 15416 - DNA, 110 bp, synthetic construct
  source 1..110: mol_type = other DNA
agtcagagattccgagggtttgaatgccgtaatgtgtaaataaatcaagctacagtagaggagccctcaagatttgtgaggcacagcagaacttcccacttgtgaggcct

SEQ ID NO: 15417 - DNA, 110 bp, synthetic construct
  source 1..110: mol_type = other DNA
gtgtcctttgtaagccagaatattgagccacttgactgttagcttgggagggggttatgccaacaatggcttcttttctgaatcattagggttcttctccaaaatggcct

SEQ ID NO: 15418 - DNA, 110 bp, synthetic construct
  source 1..110: mol_type = other DNA
aagtctaccacaccagcagggctgacaacccagcaggatctttgtccaggtctcgtgaggagactggtgtcctggggcattgtcagtgagaaaatggcctcagagcttgg

SEQ ID NO: 15419 - DNA, 110 bp, synthetic construct
  source 1..110: mol_type = other DNA
ctgttgacaacttggggagctgggaaactgggaggcatttgccagttgatggtctgtgaatcaggcctcctgctttgtggggtctttttgtggaataagtcagaaaacgt

SEQ ID NO: 15420 - DNA, 110 bp, synthetic construct
  source 1..110: mol_type = other DNA
ctccttaatcctgattgctctgctctcgttgcaggaggaactgattctagtcaaatccttccctcccacagtcaaattcaagcagctcattcgccctcagtggccaacat

SEQ ID NO: 15421 - DNA, 110 bp, synthetic construct
  source 1..110: mol_type = other DNA
tccttccctcccacagtcaaattcaagcagctcattcgccctcagtggccaacatgtttcctatgccatgaaggatgggttgcttttattctcagagagatttggggcaa

SEQ ID NO: 15422 - DNA, 110 bp, synthetic construct
  source 1..110: mol_type = other DNA
ctagacttaagaggaaattaagggtttggcatctaaaaagcctgtcaccatgacggttcaacagctgagcgtcaggagttgccttcaaggctcatcaataggagaggcag

SEQ ID NO: 15423 - DNA, 110 bp, synthetic construct
  source 1..110: mol_type = other DNA
atttatagttgtaccaaccatcatcacaacccaattttacaacattgccaaccaaagccattcttcttgaacctttgagcttattcaacattcttcagcctgtgctaaac

SEQ ID NO: 15424 - DNA, 110 bp, synthetic construct
  source 1..110: mol_type = other DNA
tgactttaattggcactattgccgtgcagaagcttaaagacattattttccaaaccactaatttcatcttcatggcccagcatacctccctgaggatgcattagctgcag

SEQ ID NO: 15425 - DNA, 110 bp, synthetic construct
  source 1..110: mol_type = other DNA
cactaatttcatcttcatggcccagcatacctccctgaggatgcattagctgcagagccggctttcctccctcgggttcaaagagagagcctcctacacaagggggcctg

SEQ ID NO: 15426 - DNA, 110 bp, synthetic construct
  source 1..110: mol_type = other DNA
ttacagaaataaaaacacaaaatggacaaaagcttagactgctagaaaatgcctgagctcctggaactaaatgtagcaattgcgcttacatttattaagcacttactata

SEQ ID NO: 15427 - DNA, 110 bp, synthetic construct
  source 1..110: mol_type = other DNA
agctcctggaactaaatgtagcaattgcgcttacatttattaagcacttactatataccaggtacaaagaggaaggaaaaatatcagatcaagccagaagaaattgccaa

SEQ ID NO: 15428 - DNA, 110 bp, synthetic construct
  source 1..110: mol_type = other DNA
gcattcatctcagaaggaaaaacactgaaggaggagctttttgtatttttgtcttttgtcttttaggcccttgcccacagtgtatggagattcccaggctagtagtccaa

SEQ ID NO: 15429 - DNA, 110 bp, synthetic construct
  source 1..110: mol_type = other DNA
gcccgatcagatgcccagcatggaccatggtgattgagtcttcttttccatttaaaaaaattaatgatgatttttcttaactcgcccaaagggattttaatctgaaggat

SEQ ID NO: 15430 - DNA, 110 bp, synthetic construct
  source 1..110: mol_type = other DNA
aaaaattaatgatgatttttcttaactcgcccaaagggattttaatctgaaggatgccataaattctcctctctaaatcctcttccatctatttacttcatgttttgacc

SEQ ID NO: 15431 - DNA, 110 bp, synthetic construct
  source 1..110: mol_type = other DNA
tttcctttattttcttggtgtaaagctggaaaacctacgcatctatgttgtctggaaaggtagcagactatggactataaaagcagtggctgggagttcccttcgtggct

SEQ ID NO: 15432 - DNA, 110 bp, synthetic construct
  source 1..110: mol_type = other DNA
gtacagactccttctctggtagtaaaatcctggctggccgccttccagtcatctctctgtcttttgacttgtccatgtacaaacagagtctattatattacttcaatgtg

SEQ ID NO: 15433 - DNA, 110 bp, synthetic construct
  source 1..110: mol_type = other DNA
tctgtcttttgacttgtccatgtacaaacagagtctattatattacttcaatgtgatgcctgattttcacttcctagaactgagttgtcatttttaattaatttcattcc

SEQ ID NO: 15434 - DNA, 110 bp, synthetic construct
  source 1..110: mol_type = other DNA
gtttatcactctgtaaaatgagaatagtaataatgacctcttaaggctattgcggggaatttgattatgtttaaagagtgtaacaccatgtctggaatggagttcacggt

SEQ ID NO: 15435 - DNA, 110 bp, synthetic construct
  source 1..110: mol_type = other DNA
taaattgcacatgaactctttcatctttagataattacggtttcgattgtattgtttatgtgtaacaatgtggatgaaattgggtcttctggcagctggcttgaagattt

SEQ ID NO: 15436 - DNA, 110 bp, synthetic construct
  source 1..110: mol_type = other DNA
ttatgtgtaacaatgtggatgaaattgggtcttctggcagctggcttgaagatttttttttttttttaaactgaggaaatgcagcctttgctaagaagttacattcagcc

SEQ ID NO: 15437 - DNA, 110 bp, synthetic construct
  source 1..110: mol_type = other DNA
aatgatgtttcccaccaggaattccaggagctgccaaaggatggaggaggcggacactggcctgattgcagagcagtgagtcagaggtccagaggcttcttgaacttcac

SEQ ID NO: 15438 - DNA, 110 bp, synthetic construct
  source 1..110: mol_type = other DNA
aaggctctgggtagagatttgtggagggcaaaatacaagaaattcgacagctaatggtgaatctggagagccctgattaaatgatatttaaattatttatactgagggta

SEQ ID NO: 15439 - DNA, 110 bp, synthetic construct
  source 1..110: mol_type = other DNA
ggtgaatctggagagccctgattaaatgatatttaaattatttatactgagggtattcaaacatttccattatttgtggataatttcactgttggaagattcagatccaa

SEQ ID NO: 15440 - DNA, 110 bp, synthetic construct
  source 1..110: mol_type = other DNA
tctcttggaccgatgctgccaaagtgtcagaaatcaaactgatcacatccaagaaatattgaaagaggtaaaacctgaggggaaatgaaaatgcattcagccaaagaagc

SEQ ID NO: 15441 - DNA, 110 bp, synthetic construct
  source 1..110: mol_type = other DNA
catccaagaaatattgaaagaggtaaaacctgaggggaaatgaaaatgcattcagccaaagaagcaaatacaaataaatacaaataaaaatggaagtagacatcttttag

SEQ ID NO: 15442 - DNA, 110 bp, synthetic construct; identical to SEQ ID NO: 15440
  source 1..110: mol_type = other DNA

SEQ ID NO: 15443 - DNA, 110 bp, synthetic construct; identical to SEQ ID NO: 15441
  source 1..110: mol_type = other DNA

SEQ ID NO: 15444 - DNA, 110 bp, synthetic construct
  source 1..110: mol_type = other DNA
ataatctgggcacagctacatatgtgagatgatgctctgtgcattaatttgccagcttcgtttctgtcagcctcacatatttgaagagctggaagaaagttctggaggaa

SEQ ID NO: 15445 - DNA, 110 bp, synthetic construct
  source 1..110: mol_type = other DNA
cttcgtttctgtcagcctcacatatttgaagagctggaagaaagttctggaggaaaaaattttacccaatcattgtgagtacttaagaagtcaggtcatttttcatgata

SEQ ID NO: 15446 - DNA, 110 bp, synthetic construct
  source 1..110: mol_type = other DNA
tgtagacatgcagttgtactctgattcaagtcctagcccaggaacttccatatgatgcatgtatggccataaaaaggaagaaaaagagaaggaaaaaaaagaatatacaa

SEQ ID NO: 15447 - DNA, 110 bp, synthetic construct
  source 1..110: mol_type = other DNA
tgcatgtatggccataaaaaggaagaaaaagagaaggaaaaaaaagaatatacaatggagaaaggacatttcttcagtaaatagtactgggaaaactggacagctacacg

SEQ ID NO: 15448 - DNA, 110 bp, synthetic construct
  source 1..110: mol_type = other DNA
gggacccttgacctatgcattgagggtgacaagtttaaactgtgttctccacctgcggctgcagggagacagagctaaggatttggagggggagttccttatgtttcaca

SEQ ID NO: 15449 - DNA, 110 bp, synthetic construct
  source 1..110: mol_type = other DNA
cttggtccacacagtacctaggattgggcttcattcaggacatcaggatgctgactactgacttttaggtaaaaacagccagcgcaaactactggagttcccacatacag

SEQ ID NO: 15450 - DNA, 110 bp, synthetic construct
  source 1..110: mol_type = other DNA
tactgacttttaggtaaaaacagccagcgcaaactactggagttcccacatacagctagctctagggcttggccatagagacagttttacttctcaaatgaaatatagaa

SEQ ID NO: 15451 - DNA, 110 bp, synthetic construct
  source 1..110: mol_type = other DNA
tattatctcgcctaacttcgcaaggcttgttttatttctttatttaaaggggagtagatggaaattgtgggccagaaagctttagaaacagaccctgggtcacagagctg

SEQ ID NO: 15452 - DNA, 110 bp, synthetic construct
  source 1..110: mol_type = other DNA
aagcatctccagggtgggaaagtttcaaggctaataggttttttgcatacaaggttgaactcagctagtgtctgaacatgtgtgtctgcctctgtcagaagaagggatat

SEQ ID NO: 15453 - DNA, 110 bp, synthetic construct
  source 1..110: mol_type = other DNA
cctgtcatgaaggaagaaatttattcacagttccctaggaactggaggcatggcccaccacacaggaccacatggggaagcaccagagtcagtcaggaggcatagggagt

SEQ ID NO: 15454 - DNA, 110 bp, synthetic construct
  source 1..110: mol_type = other DNA
caccacacaggaccacatggggaagcaccagagtcagtcaggaggcatagggagtgaggataaaacatgggcaagagcatttattgtgggttctgcaggaaagaaggggt

SEQ ID NO: 15455 - DNA, 110 bp, synthetic construct
  source 1..110: mol_type = other DNA
aacacttaaggcctacagagtgttttcaaggtgtctacattccatttcaaagcaatggtagaaaatacagcatgtccatgaatcagaacactgcataaacatggattcag

SEQ ID NO: 15456 - DNA, 110 bp, synthetic construct
  source 1..110: mol_type = other DNA
gcatgggctggcaattcatggatcatggaccaaatccagcctgtggcctgttctggaattttattagaacatagtcacatacattttgcctatggatgcttttgtactac

SEQ ID NO: 15457 - DNA, 110 bp, synthetic construct
  source 1..110: mol_type = other DNA
tggcagcatcgcaaaaggacatgttccattggatacagtgcagataagatacctcagcatggtctgtcctgccaaaagatgtgtgcttgtgaattatagaaaacttgagt

SEQ ID NO: 15458 - DNA, 110 bp, synthetic construct
  source 1..110: mol_type = other DNA
agcatggtctgtcctgccaaaagatgtgtgcttgtgaattatagaaaacttgagtgatttcaattgaatcattcagtccaaccctcgtcttgtagaataagtaactgcag

SEQ ID NO: 15459 - DNA, 110 bp, synthetic construct
  source 1..110: mol_type = other DNA
tcagaaggcaatggtatgcactcttgataatgttaaaggagccaaaattcctattttcagagcaagctcctatcttttcctatcttacacattactaccagaaaaagtgc

SEQ ID NO: 15460 - DNA, 110 bp, synthetic construct
  source 1..110: mol_type = other DNA
tggctcagtggtaacaaatcctactagtatccatgaggatacgagttcgattcctagcctcgttcagtgggttaacgattgggggtgcagtaagctgtggtataggttgc

SEQ ID NO: 15461 - DNA, 110 bp, synthetic construct
  source 1..110: mol_type = other DNA
aaatcctactagtatccatgaggatacgagttcgattcctagcctcgttcagtgggttaacgattgggggtgcagtaagctgtggtataggttgcagatgtagctcggat

SEQ ID NO: 15462 - DNA, 110 bp, synthetic construct
  source 1..110: mol_type = other DNA
cccatcaactatcatctcatctcccacattggccccaaaccccaccccaccaatctggacgtaccacttaaaaattcaatgattggctcaacaaaggtttccagaatcca

SEQ ID NO: 15463 - DNA, 110 bp, synthetic construct
  source 1..110: mol_type = other DNA
caattaaagcttaattattataagtatttgcaagcccagacaacctcatcttatcttctggggtggttataaccaagcattaaagattaaaacaaatcaaaactaccacg

SEQ ID NO: 15464 - DNA, 110 bp, synthetic construct; identical to SEQ ID NO: 15463
  source 1..110: mol_type = other DNA

SEQ ID NO: 15465 - DNA, 110 bp, synthetic construct
  source 1..110: mol_type = other DNA
acagctggcctcctgaatggaaggcgtacccttattttgtttcaagctactgacggtgtaatcatttgttagggcagccagggctaacatgagtgcagcattgctcggtg

SEQ ID NO: 15466 - DNA, 110 bp, synthetic construct
  source 1..110: mol_type = other DNA
gagctttaatcttatccttgtgatactttagaatcgtagaaacatgaaatctttcagtgtgtctgaccctacctcctctgtgacttgaacaaatggatatttagtttttc

SEQ ID NO: 15467 - DNA, 110 bp, synthetic construct; identical to SEQ ID NO: 15466
  source 1..110: mol_type = other DNA

SEQ ID NO: 15468 - DNA, 110 bp, synthetic construct
  source 1..110: mol_type = other DNA
ttatattaggctcacctggataatccaggctaccatggctattttaaggtcaacttatttttgaccttcatcacatctgccagctgtgtatattcatggaggtaatacca

SEQ ID NO: 15469 - DNA, 110 bp, synthetic construct
  source 1..110: mol_type = other DNA
aaccaacccctagggcccatatcatctccctgacttgatgcactctactcatttacattctctgctggagccttagggatatctgtgtttaaaacttctagtttattgaa

SEQ ID NO: 15470 - DNA, 110 bp, synthetic construct
  source 1..110: mol_type = other DNA
cattctctgctggagccttagggatatctgtgtttaaaacttctagtttattgaaaactgccagttgtttccagatgttctctctgtttcagtctatccatgttaaagat

SEQ ID NO: 15471 - DNA, 110 bp, synthetic construct
  source 1..110: mol_type = other DNA
ggaagtcatttccttagcacaagggtaattgcactgaaagggaacttgtgttttcagaagctcatgcccagtggttctgaggataaatagaatcaataatactagcaaca

SEQ ID NO: 15472 - DNA, 110 bp, synthetic construct
  source 1..110: mol_type = other DNA
agaagctcatgcccagtggttctgaggataaatagaatcaataatactagcaacaaagttagtgctaaatgagcacttaatgaattgaaaacagactagaaagccagcta

SEQ ID NO: 15473 - DNA, 110 bp, synthetic construct
  source 1..110: mol_type = other DNA
tcctgtctcactgtcatcacacttctttctttgactctgaccctcaagagtacctcttataagaatcctgtgattatactagattcacatgcatgatttaggccagtctc

SEQ ID NO: 15474 - DNA, 110 bp, synthetic construct
  source 1..110: mol_type = other DNA
cttataagaatcctgtgattatactagattcacatgcatgatttaggccagtctctccagctctagatacttcatcatacctgcaaagtctcctctgccatataaggtac

SEQ ID NO: 15475 - DNA, 110 bp, synthetic construct
  source 1..110: mol_type = other DNA
aatgcaaatggttaagtgttctgcattctaatcagtaaacagccctgtgactaaatcataatttaatgatctcttcctagagggataatgatgcaaaatttagatctcaa

SEQ ID NO: 15476 - DNA, 110 bp, synthetic construct
  source 1..110: mol_type = other DNA
tcataatttaatgatctcttcctagagggataatgatgcaaaatttagatctcaaaagaggattctcatttttatctaattgggctgatttttctgtaaaatttctgccg

SEQ ID NO: 15477 - DNA, 110 bp, synthetic construct
  source 1..110: mol_type = other DNA
ttgtagtggagtaaaccagattataacttacataaattgaatgcacacaagactacatatcttcatgtgtatgtagagtggtgatacaattttgcaatggctcatcagcc

SEQ ID NO: 15478 - DNA, 110 bp, synthetic construct
  source 1..110: mol_type = other DNA
catatcttcatgtgtatgtagagtggtgatacaattttgcaatggctcatcagcccctgtgaaagcccactgacataggatagcagtagattactatcaaatacaaggag

SEQ ID NO: 15479 - DNA, 110 bp, synthetic construct
  source 1..110: mol_type = other DNA
caatatgtggatatcagggctccgcctgtggggcagatataaagatcacttagtcatcctgtgaatgtgattgatgcagactattttctgtgattttattatttatttat

SEQ ID NO: 15480 - DNA, 110 bp, synthetic construct
  source 1..110: mol_type = other DNA
atcctgtgaatgtgattgatgcagactattttctgtgattttattatttatttatttatttttgtctttttgccttttctaggcccacacctatgacatatggaggttcc

SEQ ID NO: 15481 - DNA, 110 bp, synthetic construct
  source 1..110: mol_type = other DNA
ctctacttatcaaatttagttgggacctattttgttctctgttatgaagatgtgtaattagttcacttaaataacttagcacgttctcattgtattcctctcctgaattt

SEQ ID NO: 15482 - DNA, 110 bp, synthetic construct
  source 1..110: mol_type = other DNA
aattagttcacttaaataacttagcacgttctcattgtattcctctcctgaatttgatagttgtgataacaatttgccaaagccaccatcacagagaacaagtaactggg

SEQ ID NO: 15483 - DNA, 110 bp, synthetic construct
  source 1..110: mol_type = other DNA
ccctcaggtgtgaaggaagggagaaaagtaagaggttaatcaactgatggtagacatttaacagctccgaagataggctggaagtccaggtccacattcatttccctaca

SEQ ID NO: 15484 - DNA, 110 bp, synthetic construct
  source 1..110: mol_type = other DNA
aggtgcacattggagggggaggttgatactctatgggatagaaagtgcatactttaactccggtggattggggttcagacaatggaagataagggggagagctttgtagg

SEQ ID NO: 15485 - DNA, 110 bp, synthetic construct
  source 1..110: mol_type = other DNA
aactccggtggattggggttcagacaatggaagataagggggagagctttgtaggctgacaaaactcaatgtgcaaagccttgaggcagtgaacagtatgtttggggaca

SEQ ID NO: 15486 - DNA, 110 bp, synthetic construct
  source 1..110: mol_type = other DNA
tccaggagtggttggaaatatggtgctgtttagtcaatggcagaagcagacacagtgagttgaacaccaccacataagcacctgctagactctttactggccagatatac

SEQ ID NO: 15487 - DNA, 110 bp, synthetic construct
  source 1..110: mol_type = other DNA
tgagttgaacaccaccacataagcacctgctagactctttactggccagatatacttctcatttctacacatttctactcatttctatagtgtgactttactgagccttc

SEQ ID NO: 15488 - DNA, 110 bp, synthetic construct
  source 1..110: mol_type = other DNA
tcagtcactccagagacatttgtgcacactataaattcaggaatgttgcccaccattcagtttcacaaggattagctgctacaatgttacaccgaaaagaaattcaggag

SEQ ID NO: 15489 - DNA, 110 bp, synthetic construct
  source 1..110: mol_type = other DNA
tccctcatatcttctcttcctctatgcctgactgcaaattacctaacatttaactctgaccctaggctgtgaagctctcaagctggtcaaatggtgacatgcttttaaca

SEQ ID NO: 15490 - DNA, 110 bp, synthetic construct
  source 1..110: mol_type = other DNA
catgaactgaagggcagcggcacaatcattctttcttaccaccatgcccaattacccagttgcagaatttgtgctcccatccttgcaatttcagaacacttagcttagtg

SEQ ID NO: 15491 - DNA, 110 bp, synthetic construct
  source 1..110: mol_type = other DNA
ccagttgcagaatttgtgctcccatccttgcaatttcagaacacttagcttagtggttctgaatcctatgggaagaaaacttttattaggagacctaataaatattctat

SEQ ID NO: 15492 - DNA, 110 bp, synthetic construct; identical to SEQ ID NO: 15490
  source 1..110: mol_type = other DNA

SEQ ID NO: 15493 - DNA, 110 bp, synthetic construct; identical to SEQ ID NO: 15491
  source 1..110: mol_type = other DNA

SEQ ID NO: 15494 - DNA, 110 bp, synthetic construct
  source 1..110: mol_type = other DNA
gctttggctggtaccaaaaattctaatgatgtttcattgagaagaatatactctgagattagtaaatatcataaagatgccaccctttaacttaatggtggtaatttgtc

SEQ ID NO: 15495 - DNA, 110 bp, synthetic construct
  source 1..110: mol_type = other DNA
gcctaaaaataatccagtaggaacataaagggtcagcctaaggtgattcaagaaagtagctcagttatttgtctgcataaatacaggggaaaagtgaatgttaatctaaa

SEQ ID NO: 15496 - DNA, 110 bp, synthetic construct
  source 1..110: mol_type = other DNA
gtagctcagttatttgtctgcataaatacaggggaaaagtgaatgttaatctaaatttccaaactctagaatagccataacatatttatttatacactccagatattgca

SEQ ID NO: 15497 - DNA, 110 bp, synthetic construct; identical to SEQ ID NO: 15495
  source 1..110: mol_type = other DNA

SEQ ID NO: 15498 - DNA, 110 bp, synthetic construct; identical to SEQ ID NO: 15496
  source 1..110: mol_type = other DNA

SEQ ID NO: 15499 - DNA, 110 bp, synthetic construct
  source 1..110: mol_type = other DNA
cttttcgttgtctctcactttataaattcaagaactaaattcagacatgagcttagccaaatctaaaacccaaatattctcttttgactatatgaccactctttcttttt

SEQ ID NO: 15500 - DNA, 110 bp, synthetic construct; identical to SEQ ID NO: 15499
  source 1..110: mol_type = other DNA

SEQ ID NO: 15501 - DNA, 110 bp, synthetic construct
  source 1..110: mol_type = other DNA
cattcacaatagctcatcaagcagaaggcagagtacaaaagtagaaagcaaatagatagggcatctactacttttgttttctgtttatgctgctaacattccctgacagc

SEQ ID NO: 15502 - DNA, 110 bp, synthetic construct
  source 1..110: mol_type = other DNA
atagggcatctactacttttgttttctgtttatgctgctaacattccctgacagcgagaagattgaaatgttggacattcagtcactgtatatagtctgccttcaactta

SEQ ID NO: 15503 - DNA, 110 bp, synthetic construct
  source 1..110: mol_type = other DNA
aggagaaacataaagtcagtccacttgcaggaatgaaaaggactggaggaaaatagctttttgtcagtgaaatcccctttatcagattaaacacattcaccaatatactg

SEQ ID NO: 15504 - DNA, 110 bp, synthetic construct
  source 1..110: mol_type = other DNA
ttcatctgggtttttgataactattacagaagcagcactcacacttattcatgcaactagtttgttaaataaaagctcttgcttcttttgttttctcccttagtatttaa

SEQ ID NO: 15505 - DNA, 110 bp, synthetic construct
  source 1..110: mol_type = other DNA
tgttgctcttgtgcacaataaatttgaattagatattactggtacctctttcctaagaatttggaatgtagacttatcgaatgaatccagctttgtaggaggatcttatt

SEQ ID NO: 15506 - DNA, 110 bp, synthetic construct
  source 1..110: mol_type = other DNA
agaatttggaatgtagacttatcgaatgaatccagctttgtaggaggatcttattatgtgacttcagaatctctgagtggccaggttttctggcttatacaaagtaggaa

SEQ ID NO: 15507 - DNA, 110 bp, synthetic construct; identical to SEQ ID NO: 15505
  source 1..110: mol_type = other DNA

SEQ ID NO: 15508 - DNA, 110 bp, synthetic construct; identical to SEQ ID NO: 15506
  source 1..110: mol_type = other DNA

SEQ ID NO: 15509 - DNA, 110 bp, synthetic construct
  source 1..110: mol_type = other DNA
tgcttctgatgcaaattttaatcatgcgtttgcagtttaatatgctataccttattttgatcagctccttaactcctcagccttcagtccttgtgtctcatctcatttta

SEQ ID NO: 15510 - DNA, 110 bp, synthetic construct
  source 1..110: mol_type = other DNA
tttgatcagctccttaactcctcagccttcagtccttgtgtctcatctcattttatttccagcaattttgtttcaaatctggttccatttactatccacacttactgctc

SEQ ID NO: 15511 - DNA, 110 bp, synthetic construct
  source 1..110: mol_type = other DNA
tcagaaatccactttcccttcagttacgttttcatatcaacagtgtgaattatatcttttgaaatcttagtcattctgctctattgactaaaaatgaacaaataactcac

SEQ ID NO: 15512 - DNA, 110 bp, synthetic construct; identical to SEQ ID NO: 15511
  source 1..110: mol_type = other DNA

SEQ ID NO: 15513 - DNA, 110 bp, synthetic construct
  source 1..110: mol_type = other DNA
gtcaaacacatctgcatgatgctatcaaggtatttttaaagatatgattaacatttaaatcaggatgctatgaataaagcagtaccatattgtgggtgggctgcatccag

SEQ ID NO: 15514 - DNA, 110 bp, synthetic construct
  source 1..110: mol_type = other DNA
taaatcaggatgctatgaataaagcagtaccatattgtgggtgggctgcatccaggcagttgaaagttttgagaaagactgacatcccctgagtaagagtgaattctacc

SEQ ID NO: 15515 - DNA, 110 bp, synthetic construct
  source 1..110: mol_type = other DNA
agtgacaagagctgtgcagcagcctaaggagattgtcttgcccaacactggtcccattgttccctagcaatgtgctctagcaacaggggacttctgtttttgctctggta

SEQ ID NO: 15516 - DNA, 110 bp, synthetic construct
  source 1..110: mol_type = other DNA
attgttccctagcaatgtgctctagcaacaggggacttctgtttttgctctggtagctggaagtcagttctagttggtcgagcatctcctctctcctgagtatcaactcc

SEQ ID NO: 15517 - DNA, 110 bp, synthetic construct; identical to SEQ ID NO: 15515
  source 1..110: mol_type = other DNA

SEQ ID NO: 15518 - DNA, 110 bp, synthetic construct; identical to SEQ ID NO: 15516
  source 1..110: mol_type = other DNA

SEQ ID NO: 15519 - DNA, 110 bp, synthetic construct
  source 1..110: mol_type = other DNA
tttttctatgctgtcactcataatgtttcctgaatctggcatactagtgttttaggtcaagctgcagtaagaaaataacatatatggagttgcttaagcagacatttatt

SEQ ID NO: 15520 - DNA, 110 bp, synthetic construct
  source 1..110: mol_type = other DNA
gtcaagctgcagtaagaaaataacatatatggagttgcttaagcagacatttatttctcagagttaaggaggttgaaaagtctgagagtaaggtgccaggatattgggtt

SEQ ID NO: 15521 - DNA, 110 bp, synthetic construct
  source 1..110: mol_type = other DNA
atataatcacacaatcatttgcttattcattcaacaaattgtcatcggggctgcgtgctagctgttgtgggaatcataatgaaaaaaaattctaatgcctcttattctga

SEQ ID NO: 15522 - DNA, 110 bp, synthetic construct
  source 1..110: mol_type = other DNA
ttttatttaatgttaactatgtcagttgcttcatttgttaagtgcatcacttctgtttgtctaatgtcatcttgctctatggagagaaagataggttagctttaagcaat

SEQ ID NO: 15523 - DNA, 110 bp, synthetic construct
  source 1..110: mol_type = other DNA
tttgtctaatgtcatcttgctctatggagagaaagataggttagctttaagcaatataactgtagttgggtattcctgactcatttatttttggaggcaactctactgat

SEQ ID NO: 15524 - DNA, 110 bp, synthetic construct
  source 1..110: mol_type = other DNA
agacattctgagtgttctcaaacttgctgtgaacttctgttctatttttaccttttgagacccgcctagctataatccatcccacacaaggcagtgggagtgatcttctt

SEQ ID NO: 15525 - DNA, 110 bp, synthetic construct
  source 1..110: mol_type = other DNA
tataatattggaaatattatgcacagcagttaggggaggatgttgatgctgctctttagctgaagtgtctttttttcatgtctagctctgaaaattagaagagttacttt

SEQ ID NO: 15526 - DNA, 110 bp, synthetic construct
  source 1..110: mol_type = other DNA
ttgcatgaagcaaagagaaaaataaaagccattgttatttatttagcaacctgcataattccttctaattatccaaaggcagattctgccatgaagaataagagctctcc

SEQ ID NO: 15527 - DNA, 110 bp, synthetic construct
  source 1..110: mol_type = other DNA
taattccttctaattatccaaaggcagattctgccatgaagaataagagctctccaaggacgcctcggttgaacagggacaatcacagggctgcagcaattagaaaagtt

SEQ ID NO: 15528 - DNA, 110 bp, synthetic construct
  source 1..110: mol_type = other DNA
agagattagtaaactgttgttatcatagataagcaagggataaataggggaagaacaccgccaccaataaaagcggcttcgacgtgttttatagctatgtgtctgagcct

SEQ ID NO: 15529 - DNA, 110 bp, synthetic construct
  source 1..110: mol_type = other DNA
caccgccaccaataaaagcggcttcgacgtgttttatagctatgtgtctgagcctcagagaagtaaatgacttattcctagtcacaaagcagacaagtgatagagctgag

SEQ ID NO: 15530 - DNA, 110 bp, synthetic construct
  source 1..110: mol_type = other DNA
tctgaaaggaaaaaaaataaaagatgaaatactgccactgctcccaaaattagcttctttgactggaatcatgaaagatagtgcaaaaaagcaactcactgaatattgct

SEQ ID NO: 15531 - DNA, 110 bp, synthetic construct
  source 1..110: mol_type = other DNA
cactgctcccaaaattagcttctttgactggaatcatgaaagatagtgcaaaaaagcaactcactgaatattgcttaataaattgagcaatgtcagtatatttttcttca

SEQ ID NO: 15532 - DNA, 110 bp, synthetic construct
  source 1..110: mol_type = other DNA
aaagcctaagtccacgccttggtgaagtatgcatggtagggaaggagatatgcttacagttcacatttaaactgtgtgagttggttaagtagtgtgatgcacaaaaggag

SEQ ID NO: 15533 - DNA, 110 bp, synthetic construct
  source 1..110: mol_type = other DNA
acagttcacatttaaactgtgtgagttggttaagtagtgtgatgcacaaaaggagggatgtggaggtagaaattaaaaatctttttgagcatctgctggttgaagagtac

SEQ ID NO: 15534 - DNA, 110 bp, synthetic construct
  source 1..110: mol_type = other DNA
gattttttttaagtaggttgcaaaatacacttacacgctgacaaaatatccacatcactagtttaaaatattgtgaacatgggcttgagaaattgagatattgtactgcc

SEQ ID NO: 15535 - DNA, 110 bp, synthetic construct
  source 1..110: mol_type = other DNA
cactagtttaaaatattgtgaacatgggcttgagaaattgagatattgtactgcctaagtttggattgaatatagtgttgtccattgccgcattcttctttatatctccc

SEQ ID NO: 15536 - DNA, 110 bp, synthetic construct
  source 1..110: mol_type = other DNA
attcctggaacttacatggtgaatcagaagaaagctgtgtgcatggagtgctatggaagcatggaagagcaacgtataacctattctaagggttcccagtaggcttccca

SEQ ID NO: 15537 - DNA, 110 bp, synthetic construct
  source 1..110: mol_type = other DNA
tcttttgaaaacttggaatgctgtcattctctgcctgtggttgagtaggttcttgtatcatactcacatttccactctgtaggtttgatggtgtctactagcttcagaaa

SEQ ID NO: 15538 - DNA, 110 bp, synthetic construct
  source 1..110: mol_type = other DNA
tatcatactcacatttccactctgtaggtttgatggtgtctactagcttcagaaaaaaaattagcaaatccaatggaattttaaatggaatatttaagtggctaacatga

SEQ ID NO: 15539 - DNA, 110 bp, synthetic construct
  source 1..110: mol_type = other DNA
gaattattgtcctgatattagagatgaataaaatactgaagttcatggaaataagtcactcacccacatggtacagctagagaatgagtgagaacgccttctgactccag

SEQ ID NO: 15540 - DNA, 110 bp, synthetic construct
  source 1..110: mol_type = other DNA
tgggggaggagttaggatggaaggcagtgttaagtcaggttcttggcagccaaggcttgtttaatgaagatgcagctttcttcgaaaaacaaagaaagaagcaaaattct

SEQ ID NO: 15541 - DNA, 110 bp, synthetic construct
  source 1..110: mol_type = other DNA
gcagccaaggcttgtttaatgaagatgcagctttcttcgaaaaacaaagaaagaagcaaaattcttgtcaggctagaaaataactgtcaaaaattgcttgaagaattacc

SEQ ID NO: 15542 - DNA, 110 bp, synthetic construct
  source 1..110: mol_type = other DNA
taataagatgacattcttctcgttaaagtgtacgctatgagagtaaagatcagtgaaattatcattccgtacgatctggtatttagtgactgtatattcgactgataagt

SEQ ID NO: 15543 - DNA, 110 bp, synthetic construct
  source 1..110: mol_type = other DNA
aaattatcattccgtacgatctggtatttagtgactgtatattcgactgataagtacaaggtgactatagaatttgtacaatcatcttgataattgaagctcactcaaac

SEQ ID NO: 15544 - DNA, 110 bp, synthetic construct
  source 1..110: mol_type = other DNA
tgtgagactgttggcctgatggcacctcctctgcccttgccagacatgaaaatgccatgtaacttccaaagagatgaagagaccatcagtaggaaagtctgggagttcct

SEQ ID NO: 15545 - DNA, 110 bp, synthetic construct
  source 1..110: mol_type = other DNA
ctcctctgcccttgccagacatgaaaatgccatgtaacttccaaagagatgaagagaccatcagtaggaaagtctgggagttcctgttgtggctcagcagtaacaaacct

SEQ ID NO: 15546 - DNA, 110 bp, synthetic construct
  source 1..110: mol_type = other DNA
aatgcatgatacatggttggttgaatacacagatgcagaattgtggatatgaaaggccagttatgggacatcttgagcatccgtagattttggtatctatggctggtcct

SEQ ID NO: 15547 - DNA, 110 bp, synthetic construct
  source 1..110: mol_type = other DNA
aagaaccagttatgtcctgtatttgtttagcatccttctcatgagccttgactctgtcagctctcaaaatacttggcaaaaggaaagtcctttagttcccataagagttc

SEQ ID NO: 15548 - DNA, 110 bp, synthetic construct
  source 1..110: mol_type = other DNA
cttcaatcccccctcaatatctaaggcagactagtgatgaggcccaaattgatgactcttgacaaagcccacaataagacaggtggggaagaatgtagagaagaggtgaa

SEQ ID NO: 15549 - DNA, 110 bp, synthetic construct
  source 1..110: mol_type = other DNA
gaatgttcaaggaaatctttgggggctctgaagtgaaatgagatcccacattaagatgtttcattaagaggccgggacaaacaacttcagcctgccactgcaactacatg

SEQ ID NO: 15550 - DNA, 110 bp, synthetic construct
  source 1..110: mol_type = other DNA
atgtttcattaagaggccgggacaaacaacttcagcctgccactgcaactacatgtaatctgtcacagacaagtaagcgacagcaaggtgggacagacagctcggattca

SEQ ID NO: 15551 - DNA, 110 bp, synthetic construct
  source 1..110: mol_type = other DNA
acttcctaaccacaaatgcagcagcagttattgccagatattgtgtgaaatccttacacagctggatgacagataacataagggagaacaaggacttggatgtgacaggt

SEQ ID NO: 15552 - DNA, 110 bp, synthetic construct
  source 1..110: mol_type = other DNA
aacacaggcaaacagacagctcagctccgtgtggggaatctgcagaggcttgtgcctgtgcaacaatacccattcccatgagagggctgctgacgcccttattcctgttg

SEQ ID NO: 15553 - DNA, 110 bp, synthetic construct
  source 1..110: mol_type = other DNA
cccttagagtcagggtatcagcttcatataaaatatgaggatataaagtaagagaagtctccagaatattcaggctgttacttgcagaagtccagatactaagcaattgg

SEQ ID NO: 15554 - DNA, 110 bp, synthetic construct
  source 1..110: mol_type = other DNA
tttgaatttgggatagagaaatgtgtaaggacaaggctaatagtacatactggcaggaacatagaaattccttgtgctattagtcagctaaatgagtgcaaaacatgaac

SEQ ID NO: 15555 - DNA, 110 bp, synthetic construct
  source 1..110: mol_type = other DNA
ggaacatagaaattccttgtgctattagtcagctaaatgagtgcaaaacatgaacaaaattctcccgcttataaagcatgaacattttctgtaagttgctaacattctct

SEQ ID NO: 15556 - DNA, 110 bp, synthetic construct
  source 1..110: mol_type = other DNA
ttttaaacaaacataccaaactgtgaatagtgggtccctgtgactcaagagagaaaaacaagagggtggcttttagcttttgctttatgtattcctgacacaaactgtta

SEQ ID NO: 15557 - DNA, 110 bp, synthetic construct
  source 1..110: mol_type = other DNA
ctacatggcctcctcgctcaggtggccaacccatgagtgttcatgcaacctctgaggagctcaaactctctcacctcataactactagacactctcaccttcctggagga

SEQ ID NO: 15558 - DNA, 110 bp, synthetic construct
  source 1..110: mol_type = other DNA
aatttctccattaaaaacctctccctttctcttcaataatgttagccttgtattgaccaaagcaaaatatgcaaagctgaaacgagtatcagtgtgtataaagactaaag

SEQ ID NO: 15559 - DNA, 110 bp, synthetic construct
  source 1..110: mol_type = other DNA
accaaagcaaaatatgcaaagctgaaacgagtatcagtgtgtataaagactaaagtgagttaataaaaattaaaaaaaaaggagattctgtcatggctcagcagaaacga

SEQ ID NO: 15560 - DNA, 110 bp, synthetic construct
  source 1..110: mol_type = other DNA
ttgttcaagttcacaaagctacttgtagatatcagaacaagttgttttccataagcactcatttgttagaaattagacaagaaagcacagcaacccccagtagggacata

SEQ ID NO: 15561 - DNA, 110 bp, synthetic construct
  source 1..110: mol_type = other DNA
cactcatttgttagaaattagacaagaaagcacagcaacccccagtagggacatatagatatacctatactgatatttctcaaacccaaactgaacttgaataaacaaaa

SEQ ID NO: 15562 - DNA, 110 bp, synthetic construct
  source 1..110: mol_type = other DNA
ataactacagtacaaggcagaaactgatcagaatcataaaagaggtaattacattagcaagagatggttaagaaggaggtaagatttattttcacctagaagttattatc

SEQ ID NO: 15563 - DNA, 110 bp, synthetic construct
  source 1..110: mol_type = other DNA
agcaagagatggttaagaaggaggtaagatttattttcacctagaagttattatcaaggctttaaagaagagacaacaattgaatgggggattttaaaggatatgttata

SEQ ID NO: 15564 - DNA, 110 bp, synthetic construct
  source 1..110: mol_type = other DNA
agcagccttcccgattcccaggcagagctcacctttttcagttttcgacaacctccagtgcccctgcttcaaaaatgcactgtatcctcaacttcctatttacccaggac

SEQ ID NO: 15565 - DNA, 110 bp, synthetic construct
  source 1..110: mol_type = other DNA
cataaaccactagccctgtccattgcctccatatccctggaaatacatgcagcatcctttaatagggataacagccggcacactgagaaaagagacagtgagcatccaaa

SEQ ID NO: 15566 - DNA, 110 bp, synthetic construct
  source 1..110: mol_type = other DNA
cctccatatccctggaaatacatgcagcatcctttaatagggataacagccggcacactgagaaaagagacagtgagcatccaaaccaaaatcagccctcactccaaaaa

SEQ ID NO: 15567 - DNA, 110 bp, synthetic construct
  source 1..110: mol_type = other DNA
gttgccctagtcatggtgaatgggtgccaggctgtgctcataatcaatgtcaataagaagcttaaacagtgaagccaaaaggctgctaataatataatttttgtagctaa

SEQ ID NO: 15568 - DNA, 110 bp, synthetic construct
  source 1..110: mol_type = other DNA
tgtatactgcatttacactttttggatcttacagccctgcccaatacctggaccagggaagttgaagagattacaggaaaacattgattttatttaagctagtcccctaa

SEQ ID NO: 15569 - DNA, 110 bp, synthetic construct
  source 1..110: mol_type = other DNA
gggaagttgaagagattacaggaaaacattgattttatttaagctagtcccctaagtgctagacaacccacaggaattcaatccaattgggttcaactcaaggagcatct

SEQ ID NO: 15570 - DNA, 110 bp, synthetic construct
  source 1..110: mol_type = other DNA
atctgagctgctccagtcagattcttaacccactgcaccacagcaggcactctcaatactatttatgatcatgagaaattgggaacaacctaaaaaagattagataaaaa

SEQ ID NO: 15571 - DNA, 110 bp, synthetic construct
  source 1..110: mol_type = other DNA
taacccactgcaccacagcaggcactctcaatactatttatgatcatgagaaattgggaacaacctaaaaaagattagataaaaaatagatattatactcagatggtgaa

SEQ ID NO: 15572 - DNA, 110 bp, synthetic construct
  source 1..110: mol_type = other DNA
ggagaaagtatgagtgatctggatagaagatcaagccagccataacatcctcttaagtcaaagcctaacccagaacaaggccctgactctcttcaattctatgaagggta

SEQ ID NO: 15573 - DNA, 110 bp, synthetic construct
  source 1..110: mol_type = other DNA
gaagatcaagccagccataacatcctcttaagtcaaagcctaacccagaacaaggccctgactctcttcaattctatgaagggtaagaggtaaggaagctgcaagagaaa

SEQ ID NO: 15574 - DNA, 110 bp, synthetic construct
  source 1..110: mol_type = other DNA
caaaacaatacatttcccaagacagctagagcttcacaatctagttgaacaatcaaacttttgttgacaaaaacaaaacaaattgaatctctggctaatacaatttggca

SEQ ID NO: 15575 - DNA, 110 bp, synthetic construct
  source 1..110: mol_type = other DNA
aacttttgttgacaaaaacaaaacaaattgaatctctggctaatacaatttggcaagcagcagggattcattcagaggaggaataatttttggcaacctttattcccaat

SEQ ID NO: 15576 - DNA, 110 bp, synthetic construct
  source 1..110: mol_type = other DNA
tctaccacacgggctgccaactcaggctctggaaagacttccaacatttgtcaaggggccacatccttaaagttgagcttcacggaagttccagtcatggcgcagtggaa

SEQ ID NO: 15577 - DNA, 110 bp, synthetic construct
  source 1..110: mol_type = other DNA
gccaactcaggctctggaaagacttccaacatttgtcaaggggccacatccttaaagttgagcttcacggaagttccagtcatggcgcagtggaaacaaatccaactagg

SEQ ID NO: 15578 - DNA, 110 bp, synthetic construct
  source 1..110: mol_type = other DNA
tcagtgaagtatatccagctagtttcactttctccttttgaactatattaggacaaagggaaagagaattaacactgtcctgggagagttcctattgtggctcagtgggt

SEQ ID NO: 15579 - DNA, 110 bp, synthetic construct; identical to SEQ ID NO: 15578
  source 1..110: mol_type = other DNA

SEQ ID NO: 15580 - DNA, 110 bp, synthetic construct
  source 1..110: mol_type = other DNA
acatccccgttgctgcagaattgagcatcaaaagttttttcttctgaaacggtcaggaacaggatcaacagatcctttgggggactgggtcttcatgatcgcttctaaat

SEQ ID NO: 15581 - DNA, 110 bp, synthetic construct
  source 1..110: mol_type = other DNA
ggaacaggatcaacagatcctttgggggactgggtcttcatgatcgcttctaaatatttagctgttccctgggctacaatctttgggctttgctaattagaaaagtcaga

SEQ ID NO: 15582 - DNA, 110 bp, synthetic construct
  source 1..110: mol_type = other DNA
tgtatgtatgtaagggggtggcgacttggaagagaagatgccagctgtagcttctcacagcagaagtttggaggccaaggacggggctgcagttcagtccctctattacc

SEQ ID NO: 15583 - DNA, 110 bp, synthetic construct
  source 1..110: mol_type = other DNA
cacagcagaagtttggaggccaaggacggggctgcagttcagtccctctattaccacatgtgttttgttgatttcattctggtcttggtctgcatgtaagaaaaaaaaaa

SEQ ID NO: 15584 - DNA, 110 bp, synthetic construct
  source 1..110: mol_type = other DNA
agagctgtgctaacttgagctcacctacaatcattttctaatatttttggaagtagtgtacactttgacctaacagtacaaccatgtaactactcactgaagatgaatga

SEQ ID NO: 15585 - DNA, 110 bp, synthetic construct
  source 1..110: mol_type = other DNA
catctttggtgccttgcctttaacagttctgtcactgatctgagttcctttccgtaagaaagttcattttaaacagtgatcttgagctagagtttttgtgtcagagaact

SEQ ID NO: 15586 - DNA, 110 bp, synthetic construct
  source 1..110: mol_type = other DNA
ccctaggaatttcaggacgtttaaattgttaattcatcaaccatccttgtgcccctacactgccccttggccctgggttaccggagtgtacaggacagatacaagtctct

SEQ ID NO: 15587 - DNA, 110 bp, synthetic construct
  source 1..110: mol_type = other DNA
tacactgccccttggccctgggttaccggagtgtacaggacagatacaagtctcttccatcggggaccttgcattgtggagctcaaagctctaaggacttgaagggcttt

SEQ ID NO: 15588 - DNA, 110 bp, synthetic construct
  source 1..110: mol_type = other DNA
accctggaaaaagtgtctgacgtggtctcccagtgtgttcattacctgttatgattttgaacttggtcttagctttttttttttttattctcatttattttttataattt

SEQ ID NO: 15589 - DNA, 110 bp, synthetic construct
  source 1..110: mol_type = other DNA
aattcagcgtgctcaactgcccatttactagcacacctgctcagaaaatactgggcttctccctttatggagtagcttggattttagaccctggtgtcatttttataggc

SEQ ID NO: 15590 - DNA, 110 bp, synthetic construct
  source 1..110: mol_type = other DNA
aggaagccttccaaagaggtagctgcaccccaggggaaggaagagcagggggcagggtgggtggtgagagcacagagcagtgggcttagtgtaaactgaagacaggaggc

SEQ ID NO: 15591 - DNA, 110 bp, synthetic construct
  source 1..110: mol_type = other DNA
ttagagaataccatcatggaactctactggtagcttatgggcacacttagaaagctgtaggctctgtatcatccagcagtaattggttttgctttgcaaagctctcaact

SEQ ID NO: 15592 - DNA, 110 bp, synthetic construct
  source 1..110: mol_type = other DNA
tgtaggctctgtatcatccagcagtaattggttttgctttgcaaagctctcaactcttagaagctggaaacagtgtcctattttcattttttaaatcttcttccccccgt

SEQ ID NO: 15593 - DNA, 110 bp, synthetic construct
  source 1..110: mol_type = other DNA
agagggctgagaagaactacttgaggcatttttggtttcacagagtctatggagctgctaagaatggcaaggagaaaaaagtctggaagagatctccagaggtgcagaat

SEQ ID NO: 15594 - DNA, 110 bp, synthetic construct
  source 1..110: mol_type = other DNA
tgctaagaatggcaaggagaaaaaagtctggaagagatctccagaggtgcagaatgtaagagcgaagattgaagagaaatcagaaagctcttagctggacagtaaagcag

SEQ ID NO: 15595 - DNA, 110 bp, synthetic construct
  source 1..110: mol_type = other DNA
ctaagttcccagaaccccaaagtgcataaaaagctgagtaataaattactgtttccacaagcgaagctagactcggttgtcagctctaccctcaagctccttttaaccag

SEQ ID NO: 15596 - DNA, 110 bp, synthetic construct
  source 1..110: mol_type = other DNA
tgaagttcctccatggaaacaggaggcctgtgtgtgcctgtgaaggggaggatgtgggaggggacagagatggaagttcctgttttttgttttctgagtgtttttgtttt

SEQ ID NO: 15597 - DNA, 110 bp, synthetic construct
  source 1..110: mol_type = other DNA
gactgtaattgcttgtgggctttaggatgctgaaaaagaactcagtaaatttcatacctctttttttaaacctcagactttaatctgtgattcttatggaatatatggat

SEQ ID NO: 15598 - DNA, 110 bp, synthetic construct
  source 1..110: mol_type = other DNA
tgggctttaggatgctgaaaaagaactcagtaaatttcatacctctttttttaaacctcagactttaatctgtgattcttatggaatatatggatggtgaggaaaaagta

SEQ ID NO: 15599 - DNA, 110 bp, synthetic construct
  source 1..110: mol_type = other DNA
attattaaagtgatagataatgattacacttctattatagttcaaattctcttgtgttgcaattatggcttatctgttaggctctccagatatactgggaactccttaag

SEQ ID NO: 15600 - DNA, 110 bp, synthetic construct; identical to SEQ ID NO: 15599
  source 1..110: mol_type = other DNA

SEQ ID NO: 15601 - DNA, 110 bp, synthetic construct
  source 1..110: mol_type = other DNA
aggagtccaaaatcagggtatgggcagggtcagtctccctctgatatttctacggggaaatctttccttgcttccagcttctggtggctctaggccttccttggtttgtg

SEQ ID NO: 15602 - DNA, 110 bp, synthetic construct
  source 1..110: mol_type = other DNA
ctttccccaaatctccacttgttcaccaacccagaagctctctgtatcccatcattttgggtttttgttgaggcttcattacataggtgtgattgatgaagctattgact

SEQ ID NO: 15603 - DNA, 110 bp, synthetic construct
  source 1..110: mol_type = other DNA
tttgggtttttgttgaggcttcattacataggtgtgattgatgaagctattgactattggtgattgttccaacctccagcccctcttctctccccagaggtcagggaggc

SEQ ID NO: 15604 - DNA, 110 bp, synthetic construct
  source 1..110: mol_type = other DNA
gcctcttcctccaaccatctctagtgtcactgttcttcccctgaccattccttttggaaccagcattatgggtttctaccctcgattccaagctttccaagcccccatgt

SEQ ID NO: 15605 - DNA, 110 bp, synthetic construct
  source 1..110: mol_type = other DNA
ggaaccagcattatgggtttctaccctcgattccaagctttccaagcccccatgtgggggattcaattgcattttcttttgttcagagtgtgacctgcactctaaagaca

SEQ ID NO: 15606 - DNA, 110 bp, synthetic construct
  source 1..110: mol_type = other DNA
gcaatcactcactgatatcactatgatatttaatgtatacttagagacattgtacaagctttggccactgagaactcttgcaattggattccatgttcttttgatgtacc

SEQ ID NO: 15607 - DNA, 110 bp, synthetic construct
  source 1..110: mol_type = other DNA
actagattgccatggactcctcacaggatgtttagcagcatccttggcctctgttccccagtagcatccttccctcacctcccatgtgataatcaaaaacatctccaaac

SEQ ID NO: 15608 - DNA, 110 bp, synthetic construct
  source 1..110: mol_type = other DNA
aatttatcaagttctgtgccagttatcttaaatgcataagcagcttcaccactgtacattgttgtttaaatgttgagagacaggaaagcagaattttttttttttttttt

SEQ ID NO: 15609 - DNA, 110 bp, synthetic construct
  source 1..110: mol_type = other DNA
agtgccaggtcagttccaagctgttcgaggatgcttgtctctctttcacaatatacagttttcaatgcacgtgccctctcagctgtgtggaggctgagctgtgagggagc

SEQ ID NO: 15610 - DNA, 110 bp, synthetic construct
  source 1..110: mol_type = other DNA
gccgtacccccaaaatctccctaatgtcaaatcctttcttaacgtgtctcccattcccagcccttagcaacagctgatcatttctccaccctatagttttgctttctccc

SEQ ID NO: 15611 - DNA, 110 bp, synthetic construct
  source 1..110: mol_type = other DNA
ttctagtttgataaatgaaacttgctgggaatcccagtcttctcactccagaaactgtttttcctaaggtgtccacatttctttcaccaaagcctgtgaggctctgccag

SEQ ID NO: 15612 - DNA, 110 bp, synthetic construct
  source 1..110: mol_type = other DNA
tgtttttcctaaggtgtccacatttctttcaccaaagcctgtgaggctctgccagctttcttgtcttgaccctaaaacaagagaatccaccaaaatgttagtttttataa

SEQ ID NO: 15613 - DNA, 110 bp, synthetic construct
  source 1..110: mol_type = other DNA
tgcaagatctataattacaaattcgtgtttgtacaacaaggaagaggatcacagttaatgagaaagtaaaataaaatctcccggcttagacaggagccttgggttcaggg

SEQ ID NO: 15614 - DNA, 110 bp, synthetic construct
  source 1..110: mol_type = other DNA
taatgagaaagtaaaataaaatctcccggcttagacaggagccttgggttcagggttagaaatggttcttttagaaaataatgtttgaacccagagcacaggatgaatac

SEQ ID NO: 15615 - DNA, 110 bp, synthetic construct
  source 1..110: mol_type = other DNA
caagaatacaatgaataatagtacagtttggttctactattttgatttatgctgagctgccaggagttgtgcccaccattgtatctgcaccactgtttgtgcaaacatca

SEQ ID NO: 15616 - DNA, 110 bp, synthetic construct
  source 1..110: mol_type = other DNA
gggaaacaatgcatctcttttccacatggattgtgagctgtgagaggcttcagtctcttgcagagagagttgttggcagcaggagacactgaggtcagcccacacagagg

SEQ ID NO: 15617 - DNA, 110 bp, synthetic construct
  source 1..110: mol_type = other DNA
agctgtgaaaaacaaaaggcagagttaattcaaaccactcagcttcacaaatgcaattcagttggtactgattgtgaagtagcattactcagcctgcaagttatttaatc

SEQ ID NO: 15618 - DNA, 110 bp, synthetic construct
  source 1..110: mol_type = other DNA
attcagttggtactgattgtgaagtagcattactcagcctgcaagttatttaatcttttgccgtgaagtattcagagtggtaagacaggtgagcactgatgttggctgtc

SEQ ID NO: 15619 - DNA, 110 bp, synthetic construct
  source 1..110: mol_type = other DNA
tctttagaaaagaatgtcttctggccaaataaatgcaaagaaggttcaaggtctgtacattattgggtgtctgtaacaatgagtaagttaacaggaagcaactcctcatt

SEQ ID NO: 15620 - DNA, 110 bp, synthetic construct
  source 1..110: mol_type = other DNA
tacattattgggtgtctgtaacaatgagtaagttaacaggaagcaactcctcattcatatgaattctgatgaaaagttcatgtcatcatccagatgtctgcactatctga

SEQ ID NO: 15621 - DNA, 110 bp, synthetic construct
  source 1..110: mol_type = other DNA
tatcactcagatgttatgaatccaaaactcaaggaatagggcctctatttttagcacattgcctaaatgagcctgtgtaatagtccatatctttcttaggggactccctg

SEQ ID NO: 15622 - DNA, 110 bp, synthetic construct
  source 1..110: mol_type = other DNA
ggtaatactggcagttggttgataggcgatcatggggttcacctctaatcagagaaaatgagaaatgtctcaggagtgtgaagcaggagacatggataatagtttattat

SEQ ID NO: 15623 - DNA, 110 bp, synthetic construct
  source 1..110: mol_type = other DNA
aaatgagaaatgtctcaggagtgtgaagcaggagacatggataatagtttattatctccttttatcccattctggtctcctaaagccagacattacagagctagagataa

SEQ ID NO: 15624 - DNA, 110 bp, synthetic construct
  source 1..110: mol_type = other DNA
gtggtagtatttggatcatccatgcttactgattctttttttctaaatgaaatcagaaacaagggcttcaactaaaaatgagaatcaaggagttatcattgaaaacttga

SEQ ID NO: 15625 - DNA, 110 bp, synthetic construct
  source 1..110: mol_type = other DNA
gaaacaagggcttcaactaaaaatgagaatcaaggagttatcattgaaaacttgagaagaaggagaaaatttaaaattatcttctagaagaataggagagtgaatggatg

SEQ ID NO: 15626 - DNA, 110 bp, synthetic construct
  source 1..110: mol_type = other DNA
attcccgctccttgtcattttaaggcttgataggtatgtgaaatgatgagctaatgacagacactctgctagagtcctagcattcatgagtgcttgcacatggaaagtcc

SEQ ID NO: 15627 - DNA, 110 bp, synthetic construct
  source 1..110: mol_type = other DNA
aattcaaactgattctcaaaatggcctctggttcctaactgcttttaaaattgagcttattttgtatgtgagtgtgtgtgtgttgaggggaggtgtatatataattcaac

SEQ ID NO: 15628 - DNA, 110 bp, synthetic construct
  source 1..110: mol_type = other DNA
agcctttggttattgattcaaccttcagtccctctcctttccctggaggtcaggggagtgggactgaaaggtccagctctcctattacatggttagttcccctggcaacc

SEQ ID NO: 15629 - DNA, 110 bp, synthetic construct
  source 1..110: mol_type = other DNA
aaggcattacaagttgtattttcaactcgggtctccatttgagaatatttccactacttccttcaatgtcatcaatttaaatggcttctagtccatctaaatttaagctg

SEQ ID NO: 15630 - DNA, 110 bp, synthetic construct
  source 1..110: mol_type = other DNA
acttccttcaatgtcatcaatttaaatggcttctagtccatctaaatttaagctgtaaatattttctagtatgtgaaaagaaaatcatagtgattctttgtgccagaggc

SEQ ID NO: 15631 - DNA, 110 bp, synthetic construct
  source 1..110: mol_type = other DNA
catttgagataaaaatttatggtaagataagcttctaggctgggggaaggaatacttagtgtcttaaatgagggatcctaaacattgggcagggggcagaaaggaataat

SEQ ID NO: 15632 - DNA, 110 bp, synthetic construct
  source 1..110: mol_type = other DNA
cattgttgacaaaaaacaaaggaaatgggcaagatttactgccctgcttatcaaaaaatgtcttatataatttgacatttttctggcctttttataataatttcttggcc

SEQ ID NO: 15633 - DNA, 110 bp, synthetic construct
  source 1..110: mol_type = other DNA
acaaaggaaatgggcaagatttactgccctgcttatcaaaaaatgtcttatataatttgacatttttctggcctttttataataatttcttggcctaatgaacactatag

SEQ ID NO: 15634 - DNA, 110 bp, synthetic construct
  source 1..110: mol_type = other DNA
atataaaattctgcaattttgccagaagtaaaattatttgccaaaatagttacgtgtggaaaactcacaagttgaaggttcttaggaacttttattgacagatattcagc

SEQ ID NO: 15635 - DNA, 110 bp, synthetic construct
  source 1..110: mol_type = other DNA
aagcagcagcagcagtttgttaagccaacccaggccctggggcagcagcacagcagaccacccgctccagttcctatgccctctccctcttatactttattattaaaagt

SEQ ID NO: 15636 - DNA, 110 bp, synthetic construct
  source 1..110: mol_type = other DNA
tatctttctaaatcaccagtggaacaaagggaaaaatgatagctgtatagacgcaccatctatcctggtacaacacatgcttctgcaatgttaattaacccatgtgctat

SEQ ID NO: 15637 - DNA, 110 bp, synthetic construct
  source 1..110: mol_type = other DNA
gagaggacagcctttcattgtggtagctaatgatgactttttttccctatagtcttacaaataattccaaagagattgaaagataaaataaacaaacatcaaaagtttct

SEQ ID NO: 15638 - DNA, 110 bp, synthetic construct
  source 1..110: mol_type = other DNA
gcttcttagtgtaggagggattatgatttttctaattgaggatttcagtggtggtaaagagctggtatgcaaaaactcattggcctcctcaaatttgaccctcttgatca

SEQ ID NO: 15639 - DNA, 110 bp, synthetic construct
  source 1..110: mol_type = other DNA
atttttctaattgaggatttcagtggtggtaaagagctggtatgcaaaaactcattggcctcctcaaatttgaccctcttgatcaaaatagacaggccctctggtttccc

SEQ ID NO: 15640 - DNA, 110 bp, synthetic construct
  source 1..110: mol_type = other DNA
cacgaaaaaaaatacctttcatggatgattagtttgttaaagctgccacacaaagtactgcagactgggtagcttgaatagcagaaatttattgtttcatgagtcttcag

SEQ ID NO: 15641 - DNA, 110 bp, synthetic construct
  source 1..110: mol_type = other DNA
cttttaaaaggaatttaaaaccaaaaaggtatcggctcccctgcatatcctcagatacagtaattattccactggataaatttgagggaagataagatagatgacaatac

SEQ ID NO: 15642 - DNA, 110 bp, synthetic construct; identical to SEQ ID NO: 15641
  source 1..110: mol_type = other DNA

SEQ ID NO: 15643 - DNA, 110 bp, synthetic construct
  source 1..110: mol_type = other DNA
acctaagacttctgaagtccacttttttttttcttttagaaccacacctgaagcacatggaagtacccaggcgaggggtcaaaccagaactatagctgtaggcctacacc

SEQ ID NO: 15644 - DNA, 110 bp, synthetic construct
  source 1..110: mol_type = other DNA
agtccacttttttttttcttttagaaccacacctgaagcacatggaagtacccaggcgaggggtcaaaccagaactatagctgtaggcctacaccacagccacagcaact

SEQ ID NO: 15645 - DNA, 110 bp, synthetic construct
  source 1..110: mol_type = other DNA
cattctaaatattcctggttctagttatatctctagctacttctgaaggattccggaatgcttttacttctcaattgcctttctctggatttgtagaggactcataaaga

SEQ ID NO: 15646 - DNA, 110 bp, synthetic construct
  source 1..110: mol_type = other DNA
aagtggaaataaatccgaccaatatccgtgaagatgtgggtttgatttttgaacttgccaatcagggatccggccttgccataagctgagatgtaggtggcagacacggc

SEQ ID NO: 15647 - DNA, 110 bp, synthetic construct
  source 1..110: mol_type = other DNA
cgaccaatatccgtgaagatgtgggtttgatttttgaacttgccaatcagggatccggccttgccataagctgagatgtaggtggcagacacggcttggatctggcattg

SEQ ID NO: 15648 - DNA, 110 bp, synthetic construct
  source 1..110: mol_type = other DNA
gtaccaggtcatctcatgttcttcacagaatattaaagttagaggaaatttcagagcatccagtcaagcttcttaaaaaatatagccaaagggccaccagtctagaaatt

SEQ ID NO: 15649 - DNA, 110 bp, synthetic construct
  source 1..110: mol_type = other DNA
aatattcaattttttaaatgaaaacttgggcttgcttccatgacaagatagtccctatcaacttaaattcatgaaatggttgtaaacaattcccagtcaagactttttga

SEQ ID NO: 15650 - DNA, 110 bp, synthetic construct
  source 1..110: mol_type = other DNA
ttgggcttgcttccatgacaagatagtccctatcaacttaaattcatgaaatggttgtaaacaattcccagtcaagactttttgatgatgatatcttcaatttttttttt

SEQ ID NO: 15651 - DNA, 110 bp, synthetic construct
  source 1..110: mol_type = other DNA
aagccttctgcccacaaatccagcttgtgccaacgagtctcgctactgcccactctaagtcatttcacaagacaatgaaaaagaagttgttacaaataaaacctcagctg

SEQ ID NO: 15652 - DNA, 110 bp, synthetic construct
  source 1..110: mol_type = other DNA
atcaaccttcacttttggtgaagcaactgtccaaacacttcagttttgcagatggatgtctataggggaagctatctgatatattcttgtgagttaacttacatatcatt

SEQ ID NO: 15653 - DNA, 110 bp, synthetic construct
  source 1..110: mol_type = other DNA
atgtctataggggaagctatctgatatattcttgtgagttaacttacatatcattcttgtaattttggctaaattgagagatggagtcctctcaggggtaaacaaaatcc

SEQ ID NO: 15654 - DNA, 110 bp, synthetic construct
  source 1..110: mol_type = other DNA
tcagggagctaggtgagacatggtgcctcttacaggatctagaggcagaagggacagaatgcagtagtcatctcagaggccagagggaggcttgccactactggaggcct

SEQ ID NO: 15655 - DNA, 110 bp, synthetic construct
  source 1..110: mol_type = other DNA
gcatggacatttttaaaaataaaatcaccatttatcaaggttgttgggcttttcgttgttttgatcatgtgattgcttgcttatttatttaaatgttatgcaatacagac

SEQ ID NO: 15656 - DNA, 110 bp, synthetic construct
  source 1..110: mol_type = other DNA
ctcctgaaaactgttctgtactgaaatgtccaaaacttgattttaaatgtcacgtggccaaaagaatccaatctctatataataaataatgataatgcacaggaaatttt

SEQ ID NO: 15657 - DNA, 110 bp, synthetic construct
  source 1..110: mol_type = other DNA
gttgatcagttcaagtagtttttggattgagtcttttgggtttctatatacagcatcgtgccatctgtatatcttttaaaaaattaggaactaaaaaacaccagaaaaat

SEQ ID NO: 15658 - DNA, 110 bp, synthetic construct; identical to SEQ ID NO: 15657
  source 1..110: mol_type = other DNA

SEQ ID NO: 15659 - DNA, 110 bp, synthetic construct
  source 1..110: mol_type = other DNA
tgtttccctcctataaaaggtatatcatggtatattatctctgaggttccttacagctctaagatgctatgatatttgaaatagcataggtaaataaaatctagcaaaac

SEQ ID NO: 15660 - DNA, 110 bp, synthetic construct
  source 1..110: mol_type = other DNA
tctggacccacataaagctcccaacctcagtgggcctgcaatggaaagatgaaccccaagaacacccagctgtgaaagccagaagggtttgcctatcagacagcagaaag

SEQ ID NO: 15661 - DNA, 110 bp, synthetic construct
  source 1..110: mol_type = other DNA
ccaagaacacccagctgtgaaagccagaagggtttgcctatcagacagcagaaaggtgtagcaaacagagagtccatgcttaaaaggctcacagaaaatctcacatactc

SEQ ID NO: 15662 - DNA, 110 bp, synthetic construct
  source 1..110: mol_type = other DNA
tagagctagagctccaagccctatgatccagctgtttctttgcttgggtcacatttggagtttctagaactgcaaggctgtcactcaaaacaatacatggccatcaattc

SEQ ID NO: 15663 - DNA, 110 bp, synthetic construct
  source 1..110: mol_type = other DNA
ggataagtggattctctgtagtagaaagactaataactcctacgcccagatagtccttcactgagggcaagctaccatcacattcatcaccttgtgtgatactaataata

SEQ ID NO: 15664 - DNA, 110 bp, synthetic construct
  source 1..110: mol_type = other DNA
aggggtctggagaagtgtcagccctccctctgctccatcatgcatccctcgctattatagctgtgattctccagaggcctccccaggggaccttctgatcacaattcctg

SEQ ID NO: 15665 - DNA, 110 bp, synthetic construct
  source 1..110: mol_type = other DNA
tatctatcacctggccttggtgagctgtagagactactgagtaccagttggtaatggccttgcttgtgccccactcccaccccagaacccagcatcttctcttctgctag

SEQ ID NO: 15666 - DNA, 110 bp, synthetic construct
  source 1..110: mol_type = other DNA
tattctcaaattgtacctttgatttataaactgcagggtgaggggtccatcaatggagaatatttctcttcctaaataccaaatttaaatttatgcccatcaagactaaa

SEQ ID NO: 15667 - DNA, 110 bp, synthetic construct
  source 1..110: mol_type = other DNA
gggtgaggggtccatcaatggagaatatttctcttcctaaataccaaatttaaatttatgcccatcaagactaaaactaaattatttggcttacagtatacttcaaagtg

SEQ ID NO: 15668 - DNA, 110 bp, synthetic construct
  source 1..110: mol_type = other DNA
ggtggtagggaagaaaaaaaaaaatctgggaatgaagcctaattgtccccacctctctggagatgctctgcctttagtactgtccacagtgtccaaggtccactgagctg

SEQ ID NO: 15669 - DNA, 110 bp, synthetic construct
  source 1..110: mol_type = other DNA
tctggagatgctctgcctttagtactgtccacagtgtccaaggtccactgagctgcctgagctttttctctatggcatctcctgcatcctggagttcaggaccaggatgt

SEQ ID NO: 15670 - DNA, 110 bp, synthetic construct
  source 1..110: mol_type = other DNA
gtagcctccccagagcagaggtacagggggcaagagagatgtcaagctattctggaaagaagtgagaaatcagtgggcaagtttcttccctcttctggcagcatcaatta

SEQ ID NO: 15671 - DNA, 110 bp, synthetic construct
  source 1..110: mol_type = other DNA
gaatccagctgggtggggcatcaccaagctaacacagcctccgggtgacatggctgtgcagcaaagcttaaaaacttaccaactccactgggtcgataaattttctgtga

SEQ ID NO: 15672 - DNA, 110 bp, synthetic construct
  source 1..110: mol_type = other DNA
attgcattaagttgtaattgaccagaccttgtagaactaagttctccgtgaccgttggcagcacgtggaatgacgctcctctgtatggatatccctgagtgctggggaca

SEQ ID NO: 15673 - DNA, 110 bp, synthetic construct
  source 1..110: mol_type = other DNA
tggcagcacgtggaatgacgctcctctgtatggatatccctgagtgctggggacacctcagctttcctggactctgtccacccaatgccaatagccttgtttccaattat

SEQ ID NO: 15674 - DNA, 110 bp, synthetic construct
  source 1..110: mol_type = other DNA
agtttaatgatcctatttaatgtccccaaacgtttttcctggcgatcaaggacttaaaaaaaaaaaaaaaattcccttaaacgtctgacagtcatttcccagatacccta

SEQ ID NO: 15675 - DNA, 110 bp, synthetic construct
  source 1..110: mol_type = other DNA
aaaaaaaaaaaaaaaattcccttaaacgtctgacagtcatttcccagataccctattatctttgtctcttttgagctagttgaggttaaattttaagccagagtttacaa

SEQ ID NO: 15676 - DNA, 110 bp, synthetic construct
  source 1..110: mol_type = other DNA
gcgtcaagtcagcaggcctggacaggggtgcatgatgcagtctggccagagctcagggaagaagggccgagggtactcattgaagatattatttcaggcctggcctacac

SEQ ID NO: 15677 - DNA, 110 bp, synthetic construct
  source 1..110: mol_type = other DNA
gggaagaagggccgagggtactcattgaagatattatttcaggcctggcctacacagtgggtcaaaccagtggttctcaaccaacatttgaggttttgcctcatagggga

SEQ ID NO: 15678 - DNA, 110 bp, synthetic construct
  source 1..110: mol_type = other DNA
tcccaaagggtgtctctctttgtcagaggctccaatcaacaaaatcactggccataaagacttgtagctccaaggggtttttcgagttgtgggagttcatgggtattatc

SEQ ID NO: 15679 - DNA, 110 bp, synthetic construct
  source 1..110: mol_type = other DNA
aaagacttgtagctccaaggggtttttcgagttgtgggagttcatgggtattatcacttcttatgtatggttcttccccatctgagaatttgctctggcacttagtggat

SEQ ID NO: 15680 - DNA, 110 bp, synthetic construct
  source 1..110: mol_type = other DNA
ttagttttggctttaagaagtccaagtagagatgtgggataagcagttggatatctgaggctcaggttaggagagcactctagctgagacacagatttggaaggcattaa

SEQ ID NO: 15681 - DNA, 110 bp, synthetic construct
  source 1..110: mol_type = other DNA
gacgactactgagacaaacctgcttttccgccctggggcaaatttggaaaacctgaaagtcaggttcagactgagcttgggcgggagcctggaagagtcctgattgaccc

SEQ ID NO: 15682 - DNA, 110 bp, synthetic construct
  source 1..110: mol_type = other DNA
aaagtcaggttcagactgagcttgggcgggagcctggaagagtcctgattgaccccttcccaggtcttcttgactttctctcctcccttgtcctggggcaattcctacca

SEQ ID NO: 15683 - DNA, 110 bp, synthetic construct
  source 1..110: mol_type = other DNA
ttccctgttggcagtgacttgttttttgttcttgtcatatttccaggccctagtctcttaccaagcatagtacagggctcagcgcaggcttgctgaataaatgcatgagt

SEQ ID NO: 15684 - DNA, 110 bp, synthetic construct
  source 1..110: mol_type = other DNA
tcttaccaagcatagtacagggctcagcgcaggcttgctgaataaatgcatgagtaggagcttgaggcagggcaattctggggccctctcaacattctaagtgcctagga

SEQ ID NO: 15685 - DNA, 110 bp, synthetic construct
  source 1..110: mol_type = other DNA
tggggatctcaaatgcttactgaggactccctaatcttatctccagatcttacttttctctggaattccaggctcatatctactgccttcttttttaacagctctattga

SEQ ID NO: 15686 - DNA, 110 bp, synthetic construct
  source 1..110: mol_type = other DNA
gatcttacttttctctggaattccaggctcatatctactgccttcttttttaacagctctattgaggtataatttacatatgctaaaattcacccatttaaaatgtataa

SEQ ID NO: 15687 - DNA, 110 bp, synthetic construct
  source 1..110: mol_type = other DNA
gtgcctctgcatgctcccagcaaaggccttaagagagagaaggacactggtccacttgatttcttccaaactcgagggccagtaaagagaatggtcaagggacacaccat

SEQ ID NO: 15688 - DNA, 110 bp, synthetic construct
  source 1..110: mol_type = other DNA
ttgatttcttccaaactcgagggccagtaaagagaatggtcaagggacacaccatgaggctgcagtcatggggcagagtaaaccgacatcaaggagagcttattcagtat

SEQ ID NO: 15689 - DNA, 110 bp, synthetic construct
  source 1..110: mol_type = other DNA
gcattggtatctctattgaaaatacaaatcgggtagacagtcccttgccaagcttctaagcagatgcccagtttgtctacaggaaaggctgacttgaagtaaaaggctag

SEQ ID NO: 15690 - DNA, 110 bp, synthetic construct
  source 1..110: mol_type = other DNA
ctaagcagatgcccagtttgtctacaggaaaggctgacttgaagtaaaaggctagaaaaactttcctctagtcaataaatgctatggactaattataggaacatgtagtc

SEQ ID NO: 15691 - DNA, 110 bp, synthetic construct
  source 1..110: mol_type = other DNA
cccccaaccctattccaaccttcacctgtggcccccagctgcccgccctaccgatggggagaagaccaagagacatccaggactgcaccttcaggatatctctgactgtg

SEQ ID NO: 15692 - DNA, 110 bp, synthetic construct
  source 1..110: mol_type = other DNA
tgccagattcagtagttacctacagggagtggatctaaggacaataatttttaatgtggcatagtattattctacattaatgctgataataaaaggatatacttttaaca

SEQ ID NO: 15693 - DNA, 110 bp, synthetic construct; identical to SEQ ID NO: 15692
  source 1..110: mol_type = other DNA

SEQ ID NO: 15694 - DNA, 110 bp, synthetic construct
  source 1..110: mol_type = other DNA
tgcaatgatgtgcatatgttatttttgccccttttttctttattcttttatctggctgcctggaatgcagatttgatagctacggctctagcagccatcttcaacaataa

SEQ ID NO: 15695 - DNA, 110 bp, synthetic construct
  source 1..110: mol_type = other DNA
ctgcctggaatgcagatttgatagctacggctctagcagccatcttcaacaataaggacaaggcatttgccccaggagtggtagagcagaactctggaaggagctgctga

SEQ ID NO: 15696 - DNA, 110 bp, synthetic construct
  source 1..110: mol_type = other DNA
agggtttttgtttgttcgtttgtatttatttattttgtctttttagagccgcacccatggcacctggaggttgtgaggctagcggtcgaatcggagctatagccattggc

SEQ ID NO: 15697 - DNA, 110 bp, synthetic construct
  source 1..110: mol_type = other DNA
catggcacctggaggttgtgaggctagcggtcgaatcggagctatagccattggcccaccacagctcagggcaacgctggatcttttaacccaccgagcaaggccaggga

SEQ ID NO: 15698 - DNA, 110 bp, synthetic construct
  source 1..110: mol_type = other DNA
cggaagaaatgtaagaaaaagaaatatgtcaactcgggaactgtgagtactccatagggctctggccttccctggatccttctgtttctatccccactgacagacaaatg

SEQ ID NO: 15699 - DNA, 110 bp, synthetic construct
  source 1..110: mol_type = other DNA
ttttgtaaatcagttttgtatatggagcagctgtagaatgggagggccccaaagtgtgcaggacgggaaactgaatgctaggcctcccgtgtgcctgggggctcaggtgg

SEQ ID NO: 15700 - DNA, 110 bp, synthetic construct
  source 1..110: mol_type = other DNA
aagcttcacacatacttgggagctacctacccctattccctccctgctcccagcagactcgggaaagggccacagtgaagtcatcattcacctgtacagcccaccccaag

SEQ ID NO: 15701 - DNA, 110 bp, synthetic construct
  source 1..110: mol_type = other DNA
tctacacggtcttggagggataggccgaggtccttaccgctgagggcttggcagggtggggctggaaaggaaagagcctgaatgaatgaatggttgttagctcacgggct

SEQ ID NO: 15702 - DNA, 110 bp, synthetic construct
  source 1..110: mol_type = other DNA
cctggcgggaggccggcctgggggcagggcgagggccgccgcagggcacccgctaggagctggtccatctcgggttacctctccttttcctccatctcctttcccctggc

SEQ ID NO: 15703 - DNA, 110 bp, synthetic construct
  source 1..110: mol_type = other DNA
tctgccatcgttgcctgatggatttaacacatgcacatggagcaccttggtgtgaacaccagctgtcattcagcctggcacatcactgtctgaattcctctgccagtgtg

SEQ ID NO: 15704 - DNA, 110 bp, synthetic construct
  source 1..110: mol_type = other DNA
ggctccaccctgtaataggaggtgtcagtagtccattgaacccccacgctggaatccatcttggctaaaagaagcacatgtacattggggaggggcgtgggttcatcagg

SEQ ID NO: 15705 - DNA, 110 bp, synthetic construct
  source 1..110: mol_type = other DNA
ccatcttggctaaaagaagcacatgtacattggggaggggcgtgggttcatcaggtgtgggaaataaaacaagataattggccaaagacccagaaagtctgcccctacac

SEQ ID NO: 15706 - DNA, 110 bp, synthetic construct
  source 1..110: mol_type = other DNA
gaggaagactctgatgaggaacgatgaggcctgggggctcccttggacttgaggggccaaattccaattttcccacaggagccgcaggtaactgaccaggggggacaatt

SEQ ID NO: 15707 - DNA, 110 bp, synthetic construct
  source 1..110: mol_type = other DNA
gccaaattccaattttcccacaggagccgcaggtaactgaccaggggggacaatttgattgatttcctgtaggtgcgggtgcaacagtctggtaaacactaaggtgacaa

SEQ ID NO: 15708 - DNA, 110 bp, synthetic construct
  source 1..110: mol_type = other DNA
agcgtacctgaggaatcgtgtcctgtgtgctcatgtgtcttctcccaagtgccgttctcctctttccagataatgaccttccggtcataggagcaggatgccaggatatt

SEQ ID NO: 15709 - DNA, 110 bp, synthetic construct
  source 1..110: mol_type = other DNA
accaggggtggggccagaggggtggggtgggggctctggggtggatagtccttggcccaaactccagctctgtcacttgtgagctaggtgaccttgggcaaatcactgct

SEQ ID NO: 15710 - DNA, 110 bp, synthetic construct
  source 1..110: mol_type = other DNA
cccaaactccagctctgtcacttgtgagctaggtgaccttgggcaaatcactgctttgaggcagtctcctgtccttcagaagagtcaaggccacctactgggcaggtcag

SEQ ID NO: 15711 - DNA, 110 bp, synthetic construct
  source 1..110: mol_type = other DNA
gggaccacagtcggctggcaggaagcaggagtgggagttctcaggttcccagcgattaacatggttggtgacttttgcgggctgagaagaggcaaagggaaatacatgag

SEQ ID NO: 15712 - DNA, 110 bp, synthetic construct
  source 1..110: mol_type = other DNA
cttcctaacagtcctgttagaggagcgatgatgctcctattttattgacaggggaactgaggctcagcgagggccagatggcagaggtaggatggacagagctgatgcct

SEQ ID NO: 15713 - DNA, 110 bp, synthetic construct
  source 1..110: mol_type = other DNA
gtggtagtgaggaaatgaggcaccgtgccaaggccttcctagcagtaaatactcagtatgtacccttgtcccaagaccccccatggacaccaaactccgaggatgctcaa

SEQ ID NO: 15714 - DNA, 110 bp, synthetic construct
  source 1..110: mol_type = other DNA
ttggatttatttgtggggaaggatgcctgcggttttatttaaaagaggtttcctctgggcctgtctgggtgttgctcccacacagacttggagtaaacatttcgcgtgga

SEQ ID NO: 15715 - DNA, 110 bp, synthetic construct
  source 1..110: mol_type = other DNA
ttagactccaggctgggctgctgagaggagaggcttgtgcatcacagctcattcgaaagtcaagtctcaggggaaggtaagtgctaagaccaccaacacaggagactctt

SEQ ID NO: 15716 - DNA, 110 bp, synthetic construct
  source 1..110: mol_type = other DNA
ccctcttcaccatctcctttagggagctcgtgaactctgcctgccttaattaccccagggcctgataccgaataactagggacagtccttatgccccagagcccactgaa

SEQ ID NO: 15717 - DNA, 110 bp, synthetic construct
  source 1..110: mol_type = other DNA
cagggcctgataccgaataactagggacagtccttatgccccagagcccactgaaattattcaaactagtcaatcctaaacctgcttaccctgtctcacctccttctcat

SEQ ID NO: 15718 - DNA, 110 bp, synthetic construct
  source 1..110: mol_type = other DNA
ctctcagaacctgggctcaaaaaatatttggtgatgaatgaagaaggcaaatggaagggaggatggagaaagagtctcacttccagcttccccaagagaaatttccagag

SEQ ID NO: 15719 - DNA, 110 bp, synthetic construct
  source 1..110: mol_type = other DNA
agggaggatggagaaagagtctcacttccagcttccccaagagaaatttccagagacctggggaggagtgctgtgggcatcatggtgaccaagacctgtgtggaggactc

SEQ ID NO: 15720 - DNA, 110 bp, synthetic construct
  source 1..110: mol_type = other DNA
aaggttctctggcttctatctgcagaggggcaccctgtactctgaaggggacatgagacattcagccgggagtcccagcttgaatgctcatgggtttctattgaggccag

SEQ ID NO: 15721 - DNA, 110 bp, synthetic construct
  source 1..110: mol_type = other DNA
tcacatctttctaatgtaggaaagtgtgtaatcttaagctttctgaaatgtctaaatgagcccaatcccatcagtgccttcacagattcccagggatccaggtgcacaga

SEQ ID NO: 15722 - DNA, 110 bp, synthetic construct
  source 1..110: mol_type = other DNA
ccactaattcattttgacaacttctcccttaacctctcatcaaatcatttccagggtataatcaccctggaaaaaaacctgtcctctccatttttattgtccatccatct

SEQ ID NO: 15723 - DNA, 110 bp, synthetic construct
  source 1..110: mol_type = other DNA
gttgtcctttaagtaatggtatgaaggtataatcctgtacagggactagcagaatcttcttgtgctagaaaggttttaaccaatgttctctagtggggtaggaagaggtt

SEQ ID NO: 15724 - DNA, 110 bp, synthetic construct
  source 1..110: mol_type = other DNA
cttcttgtgctagaaaggttttaaccaatgttctctagtggggtaggaagaggttgtatcatagggtcaaacttttatcctcaggcgggggagcaggtgggagggagcga

SEQ ID NO: 15725 - DNA, 110 bp, synthetic construct
  source 1..110: mol_type = other DNA
ggcccgccctggagctgcgtgtggtgtcctgcccgcagtgtgcaccaggagctgtggtctgaagggccggtgggagcctctacacacagcaccctgtgagccagtgaagc

SEQ ID NO: 15726 - DNA, 110 bp, synthetic construct
  source 1..110: mol_type = other DNA
ggtctgaagggccggtgggagcctctacacacagcaccctgtgagccagtgaagctacattaagcacaaaggagaaaaacaggttagactttattttattacccagctgc

SEQ ID NO: 15727 - DNA, 110 bp, synthetic construct; identical to SEQ ID NO: 15725
  source 1..110: mol_type = other DNA

SEQ ID NO: 15728 - DNA, 110 bp, synthetic construct
  source 1..110: mol_type = other DNA
caggagctgtggtctgaagggccggtgggagcctctacacacagcaccctgtgagccagtgaagctacattaagcacaaaggagaaaaacaggttagactttattttatt

SEQ ID NO: 15729 - DNA, 110 bp, synthetic construct
  source 1..110: mol_type = other DNA
gataactcctagaaccacatcttttaaaaaactgatttaatggaatatttattgagctatgcatcaggcatggttctgaactgggggtggggacaggcttcttaactgag

SEQ ID NO: 15730 - DNA, 110 bp, synthetic construct
  source 1..110: mol_type = other DNA
ggtgaggatcaaagaccctccccaggggggtatttgaaagcaatgctcttcccaaaggaacagctccaggtggtggagtttcatcctggcaaaagatgccaagtggagat

SEQ ID NO: 15731 - DNA, 110 bp, synthetic construct
  source 1..110: mol_type = other DNA
aggaacagctccaggtggtggagtttcatcctggcaaaagatgccaagtggagatatttaaggaacttccaccctcccgcgtcacactgcatgggcgggtgtctcctgtt

SEQ ID NO: 15732 - DNA, 110 bp, synthetic construct
  source 1..110: mol_type = other DNA
ccagcgtcaggggcagaggttcctgcaaaagagccacccccctcccttacccttcaggatgccaattagaacttgctgaattttgaaacgtgagctcatctgtacagact

SEQ ID NO: 15733 - DNA, 110 bp, synthetic construct
  source 1..110: mol_type = other DNA
aggatgccaattagaacttgctgaattttgaaacgtgagctcatctgtacagactagggggaaacagcggaagggtgcggagttctagaccttgcggggcgggggggggg

SEQ ID NO: 15734 - DNA, 110 bp, synthetic construct
  source 1..110: mol_type = other DNA
gctggacatttagacttcatctcatttttcctattattaaaatatgtggagtgaagctttcctgcatgtgatatagaaaatggttctttaaaagagcattaggacaagtc

SEQ ID NO: 15735 - DNA, 110 bp, synthetic construct
  source 1..110: mol_type = other DNA
gttagttttcattttcaaaggaaaattattttctctagacagacttttgtcctctgctactctataaaaatggagttatgtggccctgagtcattcagccatctttgcct

SEQ ID NO: 15736 - DNA, 110 bp, synthetic construct
  source 1..110: mol_type = other DNA
taaaattcagatttaacccagtatcttgtatcttacctgctaaccccagtaaggaagggaggggtactttcactgactgctctcagtacaaggtcgaatgtgaaggtgct

SEQ ID NO: 15737 - DNA, 110 bp, synthetic construct
  source 1..110: mol_type = other DNA
agggaggggtactttcactgactgctctcagtacaaggtcgaatgtgaaggtgctgtgaagagcaagccccacactgttccagtgtaaggttctatggtcttaatactgc

SEQ ID NO: 15738 - DNA, 110 bp, synthetic construct; identical to SEQ ID NO: 15736
  source 1..110: mol_type = other DNA

SEQ ID NO: 15739 - DNA, 110 bp, synthetic construct; identical to SEQ ID NO: 15737
  source 1..110: mol_type = other DNA

SEQ ID NO: 15740 - DNA, 110 bp, synthetic construct
  source 1..110: mol_type = other DNA
ctctgtatacttcagggatgtttgtgtttttctcattcattcatttcataattagtatctcttatgagcaaagcactatgctgtggacaaatgcaaatagttcaactctt

SEQ ID NO: 15741 - DNA, 110 bp, synthetic construct
  source 1..110: mol_type = other DNA
tatctcttatgagcaaagcactatgctgtggacaaatgcaaatagttcaactctttaaaagaaagagagagaatttttaacataatttattacgcaggctgattctaaaa

SEQ ID NO: 15742 - DNA, 110 bp, synthetic construct
  source 1..110: mol_type = other DNA
tcaccagtaacctgagtaaaaagcgcttaggaaaaaatgtggtctgtcctagcatttccacaagctacttaaggaaaacctctggtgcctctttcctgcagagtagaaca

SEQ ID NO: 15743 - DNA, 110 bp, synthetic construct
  source 1..110: mol_type = other DNA
actcgtccaagtatttgggaaattcagatgcctgcagcatcccaaagaccacagggccagaaaaaaaggacttggcagctgtttgtgccctagaggcaaatctaggagga

SEQ ID NO: 15744 - DNA, 110 bp, synthetic construct
  source 1..110: mol_type = other DNA
atgtggtatagccaacattcagccataaatagtaacgaagtattgacatctgcaacaacatgagtgagcttttcattacacagagttcaagaagccagccacagaagacc

SEQ ID NO: 15745 - DNA, 110 bp, synthetic construct
  source 1..110: mol_type = other DNA
caacatgagtgagcttttcattacacagagttcaagaagccagccacagaagaccatgtatatgaaatgtgcagaacatgtaaatttggagagacagaaagtaagctggt

SEQ ID NO: 15746 - DNA, 110 bp, synthetic construct
  source 1..110: mol_type = other DNA
tgaccagcctgctctcaaacagggtctctcaggcagtctccatggaaccatggtgcagctaggagcatgccttggggaacaagagggacctcaacaggtttagccaaagg

SEQ ID NO: 15747 - DNA, 110 bp, synthetic construct
  source 1..110: mol_type = other DNA
cagctaggagcatgccttggggaacaagagggacctcaacaggtttagccaaagggaaatgaccattttcttgagcactgactctaaaaatcaggaacaacacaggctta

SEQ ID NO: 15748 - DNA, 110 bp, synthetic construct
  source 1..110: mol_type = other DNA
gaacagattgaagatttaaacatttcgttttccctttacccagtggcttctgatcccgtacggccctctcattaccctcgattctcggtgccttaaccacatcagcagaa

SEQ ID NO: 15749 - DNA, 110 bp, synthetic construct
  source 1..110: mol_type = other DNA
ccgtacggccctctcattaccctcgattctcggtgccttaaccacatcagcagaaattctctccttctcagagacaagggttacaatttcactacttgtgaaatgtgtta

SEQ ID NO: 15750 - DNA, 110 bp, synthetic construct
  source 1..110: mol_type = other DNA
aagagccacattctcattcattgctacgattttcacctggaaaaagcagaacattcagaaggaaaattccataaacctatgcattcatacatgcactggaactgccccaa

SEQ ID NO: 15751 - DNA, 110 bp, synthetic construct
  source 1..110: mol_type = other DNA
cagaaggaaaattccataaacctatgcattcatacatgcactggaactgccccaaactctcagccctgaagagcttggcatattaggccaggtgacatgaaacaattatt

SEQ ID NO: 15752 - DNA, 110 bp, synthetic construct
  source 1..110: mol_type = other DNA
ttcagccatgaggtctcccctaggccaccttttagacagagtgtataaggtgtgcatgtgtgtgtgccctccggggtctggggcgggagtcggggggcctaggagggtaa

SEQ ID NO: 15753 - DNA, 110 bp, synthetic construct
  source 1..110: mol_type = other DNA
atgtgtgtgtgccctccggggtctggggcgggagtcggggggcctaggagggtaaagctgtttgtgtcagtgtgtgtgtgaatgtgtctgtgagtgtgactgcctttgcg

SEQ ID NO: 15754 - DNA, 110 bp, synthetic construct
  source 1..110: mol_type = other DNA
ggaggtttgttgttgttgttcctatttgtgtggtttatttatgaaacaagtgtttacaagctacttttacatatccagccctgttctagacagaagtggaattttgacat

SEQ ID NO: 15755 - DNA, 110 bp, synthetic construct
  source 1..110: mol_type = other DNA
atgctgcaggtacagccctgaaaagacacaaaaaagaagcaagtggatgttgagcagtctctttgagagttctgaacactgcactgcttgtgcccctcacaagacactga

SEQ ID NO: 15756 - DNA, 110 bp, synthetic construct
  source 1..110: mol_type = other DNA
catcaagcccttcaccactgttgatttctccagcatttccactccacactatgaagacatcccattcccgagagctgatccaatggttgcagattataagtacgacctga

SEQ ID NO: 15757 - DNA, 110 bp, synthetic construct
  source 1..110: mol_type = other DNA
gacatcccattcccgagagctgatccaatggttgcagattataagtacgacctgaagctccaggactaccaaagtatgaggtttattttcacttttctggctcccaagac

SEQ ID NO: 15758 - DNA, 110 bp, synthetic construct
  source 1..110: mol_type = other DNA
tcggattcatttccactgagccacgacacaggaactccccaatgggtactcttgaatgagtttaggccactgtcctgaaaggaacatgggggatcaggaactccgaagct

SEQ ID NO: 15759 - DNA, 110 bp, synthetic construct
  source 1..110: mol_type = other DNA
atgagtttaggccactgtcctgaaaggaacatgggggatcaggaactccgaagctgggatcttgaattccacaagagcctggggaccccttagtgggacagtcaccatct

SEQ ID NO: 15760 - DNA, 110 bp, synthetic construct
  source 1..110: mol_type = other DNA
ctgcaggtgtggccctaaaaataaacattttttttaaaaggtggatcccaagcagagtgcctttcacagacatatgatgttaaggattattgtgtattttgttagatgta

SEQ ID NO: 15761 - DNA, 110 bp, synthetic construct
  source 1..110: mol_type = other DNA
tgtctgagtatttactatgagaaggtaagagaatttatttatacacaatccacgtagaaatctccctgatgttaaaagtgggttgtagtaatttccatattgctttaata

SEQ ID NO: 15762 - DNA, 110 bp, synthetic construct
  source 1..110: mol_type = other DNA
ggtgacaggaacgggagcaggtgtcatccttgtgcagacagacagtattttgtgagtgttaaggggaagccttatgcctgcacattccttcgttgctagttttgaagttc

SEQ ID NO: 15763 - DNA, 110 bp, synthetic construct
  source 1..110: mol_type = other DNA
gtgttaaggggaagccttatgcctgcacattccttcgttgctagttttgaagttcagctgcctttttattttgattggttacaggaggtgattctaagccgttgggtttc

SEQ ID NO: 15764 - DNA, 110 bp, synthetic construct
  source 1..110: mol_type = other DNA
acctatttctccctatgtcaaaccaaaacccagagacacaccctggctgatgagtgtagtgagcccagagactgaggcagtggaagggaacgagctcatcaaaggggctc

SEQ ID NO: 15765 - DNA, 110 bp, synthetic construct
  source 1..110: mol_type = other DNA
aacattaattctttataataactgtgaagtaggcactatgtcatccccattttatagctgagtaaactgaggcttatagttataccacttacctggggtcatacagctag

SEQ ID NO: 15766 - DNA, 110 bp, synthetic construct
  source 1..110: mol_type = other DNA
agctgagtaaactgaggcttatagttataccacttacctggggtcatacagctagcaaacggcagaaccaagaatcaaacccaggcagttaaccattacactttaagggt

SEQ ID NO: 15767 - DNA, 110 bp, synthetic construct
  source 1..110: mol_type = other DNA
tcctcatgtataccaactactcaggttcgttactgctgagccacagtgggaactcccaaatgaatactattttagctttcgctgtgatatatctatagcatgtaatttta

SEQ ID NO: 15768 - DNA, 110 bp, synthetic construct
  source 1..110: mol_type = other DNA
ctgagccacagtgggaactcccaaatgaatactattttagctttcgctgtgatatatctatagcatgtaattttaaaaatctgttcaaggattgattgatttctttttca

SEQ ID NO: 15769 - DNA, 110 bp, synthetic construct
  source 1..110: mol_type = other DNA
cagctggctcccaggatggcgaagtggaggcacggggcaggggctgggaggacagatacatacactctgctgctgttgccagggtgcttttctgctgagccaaggaccac

SEQ ID NO: 15770 - DNA, 110 bp, synthetic construct
  source 1..110: mol_type = other DNA
ctagaaggtcacagaattgaggtttgcttctcactctctctgggtccaggcccgagctctccaagctggggacaacacgtccctgagccaccacatcgttgccctttcaa

SEQ ID NO: 15771 - DNA, 110 bp, synthetic construct
  source 1..110: mol_type = other DNA
cttgatgatgcccctgatgtgcctgttgagcctacgtaaacagtggtgcctaataactgcagcttcatgggcagggagtggggaagactcctggatggatgtgggagggg

SEQ ID NO: 15772 - DNA, 110 bp, synthetic construct
  source 1..110: mol_type = other DNA
tagtaagcggcatcgcttatttcacaacatcaggcaggatcaggatgggtgtgatatctctagataggtggggtggaaggcactgagctagaaggccagaagactggccc

SEQ ID NO: 15773 - DNA, 110 bp, synthetic construct
  source 1..110: mol_type = other DNA
atctctagataggtggggtggaaggcactgagctagaaggccagaagactggcccaaacatcttcgacattcagactggggcctgaaggacccagttatcaggatatggt

SEQ ID NO: 15774 - DNA, 110 bp, synthetic construct
  source 1..110: mol_type = other DNA
aaacattttatcagtgccatcagcctctgtgtagcttacataatccacatgtgcaataatagtatgccaacaggctaacgcaaagagcccagtaaaaatgaaatggtgtt

SEQ ID NO: 15775 - DNA, 110 bp, synthetic construct
  source 1..110: mol_type = other DNA
catcatgccacctctctggcaccctgtcattcagttcttgactttgacatatgtgtaaatggatgagatctgttttaaaagacagaagtgccaaatgggaattaaattaa

SEQ ID NO: 15776 - DNA, 110 bp, synthetic construct
  source 1..110: mol_type = other DNA
tcttgactttgacatatgtgtaaatggatgagatctgttttaaaagacagaagtgccaaatgggaattaaattaacttctggtgcaattccatataatgatttgtaaatc

SEQ ID NO: 15777 - DNA, 110 bp, synthetic construct
  source 1..110: mol_type = other DNA
taatgatcacaaggcaaatccatgtaacaacattctggataaacaaaagagcagtgcaatttgggtgctaaaattctccctctctcctaagattcaaggctcctgataaa

SEQ ID NO: 15778 - DNA, 110 bp, synthetic construct
  source 1..110: mol_type = other DNA
gcaatttgggtgctaaaattctccctctctcctaagattcaaggctcctgataaagtacttaaatatcttatgaataaaaaggggaaagcagaagtaaattcacatacta

SEQ ID NO: 15779 - DNA, 110 bp, synthetic construct
  source 1..110: mol_type = other DNA
tgcctgaactctctcacatcctaactagctggtggtatccaggtcctggcgccatgccagaagctgagagcatagcaaaaaacaatggagaaattccttgccttaccttc

SEQ ID NO: 15780 - DNA, 110 bp, synthetic construct
  source 1..110: mol_type = other DNA
tttggcacatgctgattttgttttggtaaaatttgccatgcaaaggttttaatatcaaatttatctctattttaaaccttttgagtttagaagtttctccattgctggat

SEQ ID NO: 15781 - DNA, 110 bp, synthetic construct
  source 1..110: mol_type = other DNA
gtaaaaatgtaaacattccgacagctaacagtcctatgactcaaaagttaagcttccctcagcctaaggacaccatgggacacaggccggctaagtggtgggctccccca

SEQ ID NO: 15782 - DNA, 110 bp, synthetic construct
  source 1..110: mol_type = other DNA
ccctcagcctaaggacaccatgggacacaggccggctaagtggtgggctcccccaggccgggccgaccttgcccgcctccccagccctaccttcctggatgctgttctgt

SEQ ID NO: 15783 - DNA, 110 bp, synthetic construct
  source 1..110: mol_type = other DNA
atgttgagcctggaaattcagtgcctcctcataaccctgctttcctttcagctctttctcttctccttcctatacctgccccatcccacctgccagaataggaagaacga

SEQ ID NO: 15784 - DNA, 110 bp, synthetic construct
  source 1..110: mol_type = other DNA
ttctcttctccttcctatacctgccccatcccacctgccagaataggaagaacgagagcagagatggagaccagaactgagggcccttcagcagcagttcacaggaacaa

SEQ ID NO: 15785 - DNA, 110 bp, synthetic construct
  source 1..110: mol_type = other DNA
agattaaggcaagtgaaatgcaaccaaataagtaagaaagtatgtctcacaatgtgtgacaggagcatgaatgtgtccattaggttaaagatgataatcatacagagaaa

SEQ ID NO: 15786 - DNA, 110 bp, synthetic construct
  source 1..110: mol_type = other DNA
ctcacaatgtgtgacaggagcatgaatgtgtccattaggttaaagatgataatcatacagagaaaaaaattctacattatttaagttcttcaaaaccagcaataaagtga

SEQ ID NO: 15787 - DNA, 110 bp, synthetic construct
  source 1..110: mol_type = other DNA
gggtaccatggggggttgtggacagattctcccaaaggtcactgtcccagtctttccatcttccttttcatttccccacctaacttccaactcactgatccaagaagccc

SEQ ID NO: 15788 - DNA, 110 bp, synthetic construct
  source 1..110: mol_type = other DNA
aacaagaccttcacaacggaaatgcattctgccaggacaggcctcagcagctatgagaacctgtggtcaagcttctggaaagagcactactttgtagagaacggacagga

SEQ ID NO: 15789 - DNA, 110 bp, synthetic construct
  source 1..110: mol_type = other DNA
ataaaaaccttcaccagcgggaccctcttgtttcctttggctggctgtgcaacatgctctgcttctgcggtcccctgattgattgttggcatggatcacagagcttgtgc

SEQ ID NO: 15790 - DNA, 110 bp, synthetic construct
  source 1..110: mol_type = other DNA
agacacaaaacccactgccataaactgtcctcaaggccccagagctccaactgctgtggcaatgatgaagggcagccatatcaagcacggggacattggccaccacagtc

SEQ ID NO: 15791 - DNA, 110 bp, synthetic construct
  source 1..110: mol_type = other DNA
gcagtgacatcatttccatgagagaaggtgaggaattttccagccaagggtggaaagtcagcaaatgctggggtctctgctacggcactgggctactgagtccccctggg

SEQ ID NO: 15792 - DNA, 110 bp, synthetic construct
  source 1..110: mol_type = other DNA
agtcagcaaatgctggggtctctgctacggcactgggctactgagtccccctggggttggagctgagaccagagtgtgaaggtcaaccatgtggcaattgaggggaagga

SEQ ID NO: 15793 - DNA, 110 bp, synthetic construct
  source 1..110: mol_type = other DNA
ctggcaggcaggtgggaggccagggtctgggtgcaggtgcagagacagctcccttggcagcgtgggcagagccaggatgatgtccactagagagaagctagtatttaagg

SEQ ID NO: 15794 - DNA, 110 bp, synthetic construct
  source 1..110: mol_type = other DNA
ggcagcgtgggcagagccaggatgatgtccactagagagaagctagtatttaaggaacagaaggcaaatccttttggctccagggagggagggatctacatggttctaca

SEQ ID NO: 15795 - DNA, 110 bp, synthetic construct
  source 1..110: mol_type = other DNA
cccatttgtagaatgttcaagcacagtcaccacttaggggtcagcagttggggtgagggggtggagagcagacctctgtgggcgagggtatgtggtgggggcttccaaga

SEQ ID NO: 15796 - DNA, 110 bp, synthetic construct
  source 1..110: mol_type = other DNA
agggggtggagagcagacctctgtgggcgagggtatgtggtgggggcttccaagatgcccattacattcctgatcaggagacatggctctgctcaggttgtgaaaactca

SEQ ID NO: 15797 - DNA, 110 bp, synthetic construct; identical to SEQ ID NO: 15795
  source 1..110: mol_type = other DNA

SEQ ID NO: 15798 - DNA, 110 bp, synthetic construct; identical to SEQ ID NO: 15796
  source 1..110: mol_type = other DNA

SEQ ID NO: 15799 - DNA, 110 bp, synthetic construct
  source 1..110: mol_type = other DNA
ctctcatatactcttcaagctcttccaattccacccagcttctctgaagcatctcacagcaaggtgatctcctgtgccgtcttgtgcagctgtgcccagctcagccacat

SEQ ID NO: 15800 - DNA, 110 bp, synthetic construct
  source 1..110: mol_type = other DNA
ctgactcaggaaatttaggtggggactgagaacatccatttctaacaggttcccagggatgctattatttctgagctggaaccacatttgtgagaactgctgatccagga

SEQ ID NO: 15801 - DNA, 110 bp, synthetic construct
  source 1..110: mol_type = other DNA
ctcaaccaagcccaaagctgatgctacccaccagggtttctggtgtgtgtaccgatccaggccccttcctgcctatgtcagccccgaggtgcatcacaacagaaagaact

SEQ ID NO: 15802 - DNA, 110 bp, synthetic construct
  source 1..110: mol_type = other DNA
gcatagggcttctcagatacaaacaggctggctaagccgagagtacagatgacacttaagcaaagctggggttcaacacttcgagcttcaaatccacctataattcatag

SEQ ID NO: 15803 - DNA, 110 bp, synthetic construct
  source 1..110: mol_type = other DNA
cacctggaggccagggtagtctcctctctggtctgttccactttgcctggccttctccatcccccagtggactctccccaaggtggcttgggaatgcacaagtcagaatc

SEQ ID NO: 15804 - DNA, 110 bp, synthetic construct
  source 1..110: mol_type = other DNA
tccatcccccagtggactctccccaaggtggcttgggaatgcacaagtcagaatcaggcttcctctgacccctcaatgccttccaccaaaccccccctgaaagccacctc

SEQ ID NO: 15805 - DNA, 110 bp, synthetic construct
  source 1..110: mol_type = other DNA
tgttcccaccttggccccctgcagccgtttcagatgtaagttaaatcccctcctcactcatagcctcacaacagctcccacctgacccagagcagaagccaaaatcttcc

SEQ ID NO: 15806 - DNA, 110 bp, synthetic construct
  source 1..110: mol_type = other DNA
cctgcgggttggcaaacctaggatgtcctcggctcatgctgtctgggatcatttatgccctgttcagctgggccagaaagttccagaagcttctggtctggtcccagcac

SEQ ID NO: 15807 - DNA, 110 bp, synthetic construct
  source 1..110: mol_type = other DNA
atgtaacagatgaagatctcgaagggcttgggggtcatgatcatgggcactcagactcagccaggagaggcaaaggctggaccatgggctgctgcactgcccgcaggccc

SEQ ID NO: 15808 - DNA, 110 bp, synthetic construct
  source 1..110: mol_type = other DNA
atgtgcagccacactctcctcagtcagggaagactcattaaaagcctaggaggctggtgcttcaactatggctgtgttttcactgcttttttcttgaggcagctgcttaa

SEQ ID NO: 15809 - DNA, 110 bp, synthetic construct
  source 1..110: mol_type = other DNA
ctaggaggctggtgcttcaactatggctgtgttttcactgcttttttcttgaggcagctgcttaatgatgtctgagaactcctgcatgtgctgctgaccagctctgtctc

SEQ ID NO: 15810 - DNA, 110 bp, synthetic construct
  source 1..110: mol_type = other DNA
catccaagttcttgcctggatctgttctgcagtgccgtggttatcatgtttgcatcacactctgtcatgggtcagagctggctttattattagggctgtgtaatattcca

SEQ ID NO: 15811 - DNA, 110 bp, synthetic construct
  source 1..110: mol_type = other DNA
acaaagcaagccagccaacaaacctgtgccatgttcactttggttggtcaggaaaaaaagaagtgctaagagcaaagtgaaagtcctcttcactggcctgcagtgtgggc

SEQ ID NO: 15812 - DNA, 110 bp, synthetic construct
  source 1..110: mol_type = other DNA
aaaagaagtgctaagagcaaagtgaaagtcctcttcactggcctgcagtgtgggctgctgtctggatgctggagctctgtgcccatgctgggctccaacagcccgtgcag

SEQ ID NO: 15813 - DNA, 110 bp, synthetic construct
  source 1..110: mol_type = other DNA
atgtattcattttccacaaatgaaatgactcatttttgaccattttgcaaatataggactttgctccttgttcccgggagcatgtgtctgcttttctctgtgttccaggg

SEQ ID NO: 15814 - DNA, 110 bp, synthetic construct
  source 1..110: mol_type = other DNA
gaaatccggaggccagctgggtgcccagaagggaggtgctgggcagacacccatgtcctcgtcttttcagctatagcaactgaaaacagcctgctgtggcctgtccgggc

SEQ ID NO: 15815 - DNA, 110 bp, synthetic construct
  source 1..110: mol_type = other DNA
tcctcgtcttttcagctatagcaactgaaaacagcctgctgtggcctgtccgggctctgctgggagaagagcattccagcaagtgggtggtccttgggtacagagccaac

SEQ ID NO: 15816 - DNA, 110 bp, synthetic construct; identical to SEQ ID NO: 15814
  source 1..110: mol_type = other DNA

SEQ ID NO: 15817 - DNA, 110 bp, synthetic construct; identical to SEQ ID NO: 15815
  source 1..110: mol_type = other DNA

SEQ ID NO: 15818 - DNA, 110 bp, synthetic construct
  source 1..110: mol_type = other DNA
atggatctagcgttgtgttctgccctcacagatgtgttgcaaagccccagtgagatgtatatgtgtggaaatgcatttaaactgtacgatacggtgcagatgcaagaggc

SEQ ID NO: 15819 - DNA, 110 bp, synthetic construct
  source 1..110: mol_type = other DNA
tgtatatgtgtggaaatgcatttaaactgtacgatacggtgcagatgcaagaggcagcagagtaagtggtcagtgctggcttcagtacctgctagtcccgtgcgttgggg

SEQ ID NO: 15820 - DNA, 110 bp, synthetic construct
  source 1..110: mol_type = other DNA
cctgaggtctggtgtgaggctgatgcctggtgggctctgcctccccctagctgtgctctctgacccaccacctggtctttctgcgtttctctttcccaacctgaccactc

SEQ ID NO: 15821 - DNA, 110 bp, synthetic construct
  source 1..110: mol_type = other DNA
gagcctcagtggaccaactcggaaacaaaggggctaagatgacttgatggtccaactgaccaaacttagtcacatagctgtggaacatacacatgcccacagtcaagcct

SEQ ID NO: 15822 - DNA, 110 bp, synthetic construct
  source 1..110: mol_type = other DNA
caagaatagcacttctgctcatccgcatggtcacagtcgcgggccaggtggccaggtttgccgcagttgtagcagcactgctctcgctctctcttgggctccttgcagtc

SEQ ID NO: 15823 - DNA, 110 bp, synthetic construct
  source 1..110: mol_type = other DNA
actcagacacagaggtctggtaatatacattcagtcactcatggggactccagcccagctgaccagccccagcctgcatatcctctcaaccacctgcctcgttgtcagat

SEQ ID NO: 15824 - DNA, 110 bp, synthetic construct
  source 1..110: mol_type = other DNA
cctctggttagttggaggttctggttgtgagagttttcgcgccctctccagcccgcctctgggaatgtctccccccttcttcccctgtgtaccctgtcacagctgtcctg

SEQ ID NO: 15825 - DNA, 110 bp, synthetic construct
  source 1..110: mol_type = other DNA
atgttcaggtcgtacgtgaaaaggagcaaacaaaacagaatagaacattacacgaaggacatggggtggggaggtgctcttcgaggaaatatcttctctgtctgtgtggg

SEQ ID NO: 15826 - DNA, 110 bp, synthetic construct
  source 1..110: mol_type = other DNA
ggcacatctgtggaagacagagctgatcactccatctggcaggtgagaagtgttggggtccaaaggggaagccttgtgttgaacaacacaacttaaacaaacctactgaa

SEQ ID NO: 15827 - DNA, 110 bp, synthetic construct
  source 1..110: mol_type = other DNA
cctcctaactatgggaaatcctatgaggcaaagtcggaaaccatctctaaatttcccaaaggtaccacaatcatgcaggacaagcaaggtgcccaagtttacagtgttta

SEQ ID NO: 15828 - DNA, 110 bp, synthetic construct
  source 1..110: mol_type = other DNA
ccaaaggtaccacaatcatgcaggacaagcaaggtgcccaagtttacagtgtttaaaaacataaaaaagttttactggttccaaaacacaaaaatacaactgcaaaaact

SEQ ID NO: 15829 - DNA, 110 bp, synthetic construct
  source 1..110: mol_type = other DNA
tcctagcactgaacagatacagatgtcccatcagctgcagggtgggagccatgccctgggcccacctcatgccctgttccttccagctatatatggacagaacagtgttc

SEQ ID NO: 15830 - DNA, 110 bp, synthetic construct
  source 1..110: mol_type = other DNA
cacttggggagatgtggaagatgctctggggttcgccaaacagagcggagggttaagagctgagggaacagagtaacacaggcgcaggatggaggcaattcaggaatgac

SEQ ID NO: 15831 - DNA, 110 bp, synthetic construct
  source 1..110: mol_type = other DNA
agagctgagggaacagagtaacacaggcgcaggatggaggcaattcaggaatgacccagtgccaaggctggggtgggacctcgaggctagagggtcagatgctgaggcca

SEQ ID NO: 15832 - DNA, 110 bp, synthetic construct
  source 1..110: mol_type = other DNA
aatattattcatattttgattttaaaaagccattttaaaatgataaaatttatgcttagctcatgggctatacaaaattgggggcagggcaacacctccggccccaccat

SEQ ID NO: 15833 - DNA, 110 bp, synthetic construct
  source 1..110: mol_type = other DNA
aaaacttcacatgaccctgagttcgactccatagggagagccctttccccttgggttggagaaagtgccagtgagtatatgatcagaaaactcctctctaatgtcaggag

SEQ ID NO: 15834 - DNA, 110 bp, synthetic construct
  source 1..110: mol_type = other DNA
ttggagaaagtgccagtgagtatatgatcagaaaactcctctctaatgtcaggagatctggccaattccacagccaaagtagcagctcagtgataatcataagctgaaca

SEQ ID NO: 15835 - DNA, 110 bp, synthetic construct
  source 1..110: mol_type = other DNA
gggaacggaaccagaagggatgcagcggccttctacctgccctttcccagtccatgaacttgcttagtgaccaggtttgaaacctgaaagggagcgactgggtgtggacc

SEQ ID NO: 15836 - DNA, 110 bp, synthetic construct
  source 1..110: mol_type = other DNA
ccacatgcctgcaggtgatggcgattctgttgtaggcttgtggctgagagcctttgctgcctgcatggtcatcctgtccatccatctgtgaagtgaccaggacaccccag

SEQ ID NO: 15837 - DNA, 110 bp, synthetic construct
  source 1..110: mol_type = other DNA
cgttggtaatggacaaagggggaacaaacgtggatctgtactttacttcctgcgccttagaaacgcagtggggtgtcctggagcatgacttaatgttaggggataagtca

SEQ ID NO: 15838 - DNA, 110 bp, synthetic construct
  source 1..110: mol_type = other DNA
catgatttggagcctcagccttccctcccgaggcctggagactgttggggtcctgacatgtaagctctacacttgtgtgaacaggcccacagaagctgcagagaccaacc

SEQ ID NO: 15839 - DNA, 110 bp, synthetic construct
  source 1..110: mol_type = other DNA
acatgtaagctctacacttgtgtgaacaggcccacagaagctgcagagaccaaccttcctgcagccccacttgggcctgaagcacccagttcccagagacagtgcagcct

SEQ ID NO: 15840 - DNA, 110 bp, synthetic construct
  source 1..110: mol_type = other DNA
ggattaaaggatctgacattgccacagctttggcataggtcaactgcagttcaagtctgatctctggccgaagaactccatatgccactgggaggcaaaaagaaaaaaac

SEQ ID NO: 15841 - DNA, 110 bp, synthetic construct
  source 1..110: mol_type = other DNA
ctctcatatacaactgggttatagaggtacttaactgctcagtgctctgggtgtgctatattctggcagtgggctcacccagctggcaacacactcaaaatgtgttctcc

SEQ ID NO: 15842 - DNA, 110 bp, synthetic construct
  source 1..110: mol_type = other DNA
caagctcttcaaatacactatatttccaagctcacagagaatattacatactaggccagaaagcaagtctcaaaaaatttccaaaaaacagtaacaaacagacaagagtc

SEQ ID NO: 15843 - DNA, 110 bp, synthetic construct
  source 1..110: mol_type = other DNA
ccagaaagcaagtctcaaaaaatttccaaaaaacagtaacaaacagacaagagtctcagatcacaatgtgttagagatcaatactagctccactgttgccacaagctggg

SEQ ID NO: 15844 - DNA, 110 bp, synthetic construct
  source 1..110: mol_type = other DNA
ttactcagatctgggaaagtgttttgcagagttacctgggactgaaaatgttttgaggagttctctggtggcctagcaggttaaggatccagcattgttgctgctatggc

SEQ ID NO: 15845 - DNA, 110 bp, synthetic construct
  source 1..110: mol_type = other DNA
tgtgccacgagcaaccatgaaggtaccaaggacgttatgcattagggtacatgagtagctctgcagagagggcagaacaccctttctccgggcagttggtgctttgagag

SEQ ID NO: 15846 - DNA, 110 bp, synthetic construct
  source 1..110: mol_type = other DNA
ctccagttctacctgtagcctgggaacttccatatgcctcaggtatggccctggggaaaaaaaaaaaaaaattgttgcctcctctggtccctaacacaatgccatatttt

SEQ ID NO: 15847 - DNA, 110 bp, synthetic construct
  source 1..110: mol_type = other DNA
tggccctggggaaaaaaaaaaaaaaattgttgcctcctctggtccctaacacaatgccatatttttgaaaaattgcctaaagatttttagtgtgaaaagtagatgtaata

SEQ ID NO: 15848 - DNA, 110 bp, synthetic construct; identical to SEQ ID NO: 15846
  source 1..110: mol_type = other DNA

SEQ ID NO: 15849 - DNA, 110 bp, synthetic construct; identical to SEQ ID NO: 15847
  source 1..110: mol_type = other DNA

SEQ ID NO: 15850 - DNA, 110 bp, synthetic construct
  source 1..110: mol_type = other DNA
actcattcctccatagatctctcaatcactgttgttttattacctggtttcagagttactgttagttcttcccataacaattgcaattttgcactttggattcccagctc

SEQ ID NO: 15851 - DNA, 110 bp, synthetic construct
  source 1..110: mol_type = other DNA
ttactgttagttcttcccataacaattgcaattttgcactttggattcccagctcctaaaaccagagagaaaatgagaaaaatacattctaaaagtaatttttactctga

SEQ ID NO: 15852 - DNA, 110 bp, synthetic construct
  source 1..110: mol_type = other DNA
cctgatgtgccacagtgggaactcctcaactctgaacatttttgcataaagaattttggtcttttcagtttcctatttgatttagctcatctagctctagacctctcaga

SEQ ID NO: 15853 - DNA, 110 bp, synthetic construct
  source 1..110: mol_type = other DNA
ttggtcttttcagtttcctatttgatttagctcatctagctctagacctctcagaatcacagaaaatgtattcatattgtaggtgaagaaactgaggctctgagagatag

SEQ ID NO: 15854 - DNA, 110 bp, synthetic construct
  source 1..110: mol_type = other DNA
ttgtctttgtcaattcataggtgaaaaatgagtatcttaatttccagttgtcaaaagggttgggcacttatattttcctgtgcattgttttcttatattctttgctcagt

SEQ ID NO: 15855 - DNA, 110 bp, synthetic construct
  source 1..110: mol_type = other DNA
agggttgggcacttatattttcctgtgcattgttttcttatattctttgctcagttttttctttccttgtcatatttgaacatgcatttgcaaatattttgcattttgtt

SEQ ID NO: 15856 - DNA, 110 bp, synthetic construct
  source 1..110: mol_type = other DNA
catagagtaatctacagtaccaacacttgcagttaatatttacattttattgaattaagtgtttactgtttggtttttgaacacttggaccaatgactgtgcagctgata

SEQ ID NO: 15857 - DNA, 110 bp, synthetic construct; identical to SEQ ID NO: 15856
  source 1..110: mol_type = other DNA

SEQ ID NO: 15858 - DNA, 110 bp, synthetic construct
  source 1..110: mol_type = other DNA
tactgtgtgggtttgcagtcactcactgaaggaatggaactgattctgcccaccctgaggaagcttgggaaggagggctcattgctgtcttgtcagcaaacggtgtcagg

SEQ ID NO: 15859 - DNA, 110 bp, synthetic construct
  source 1..110: mol_type = other DNA
atttacagtgttctgtcaattcttttttccttctgcctcacatccaaactttatccctagcttctctcctctacttgctttaaatcttgtttgaggagtgctttggagaa

SEQ ID NO: 15860 - DNA, 110 bp, synthetic construct
  source 1..110: mol_type = other DNA
tgaattgccagagggagggaaagaggaccttcatggtgggtgattcatactgaggtagaaatgagcagcatgaaacttatgggtaaatgtagatggctggaggtactaag

SEQ ID NO: 15861 - DNA, 110 bp, synthetic construct
  source 1..110: mol_type = other DNA
atcataaagacacaacataaacacacacaggagctggggacaaccttacaggtaaccagtctcactctgcattttgcataaagaaataaccaaactccatgagaggggat

SEQ ID NO: 15862 - DNA, 110 bp, synthetic construct
  source 1..110: mol_type = other DNA
ccactatggaatctcctagcatttcttatacctcatactatgtcacagagcgagctttgctgaagggccccagcttgctttttatttcctttttatttatgcattttaat

SEQ ID NO: 15863 - DNA, 110 bp, synthetic construct
  source 1..110: mol_type = other DNA
agatagagtttaatcccacctaggcacctggaaaggtgaagtgatggggccccaaaaaaattcggcatatacaggagttccccatcatggcgtggtggaaacgaatacga

SEQ ID NO: 15864 - DNA, 110 bp, synthetic construct
  source 1..110: mol_type = other DNA
atccctgagtctgtttattcacctgatatggctgaccactcactcgctcttcctcagaactccctccagcttctctgacacggcagctctctgctctggttgtctttcct

SEQ ID NO: 15865 - DNA, 110 bp, synthetic construct
  source 1..110: mol_type = other DNA
agaactccctccagcttctctgacacggcagctctctgctctggttgtctttcctttctgtggtcttactgtgggctcatcctaccagctctgaaatgtagggtaatctt

SEQ ID NO: 15866 - DNA, 110 bp, synthetic construct
  source 1..110: mol_type = other DNA
actcatggccctggggctccagggcagggcttatcagcctacagaggaccaagttgccctcaaagcagagctcaggcaccaacggccagaaagatgcctccatgctttgt

SEQ ID NO: 15867 - DNA, 110 bp, synthetic construct
  source 1..110: mol_type = other DNA
gtgctcagtcttaaccacactggtctactgccccttggagaagtgggtttctctcccagcaggtctgttcctaatctgctccggccctccctggccctgcttccacttct

SEQ ID NO: 15868 - DNA, 110 bp, synthetic construct
  source 1..110: mol_type = other DNA
ccagcaggtctgttcctaatctgctccggccctccctggccctgcttccacttctgtcaaggaaggatgaagactgaagtacccataagtcccttcctggctggaaacac

SEQ ID NO: 15869 - DNA, 110 bp, synthetic construct
  source 1..110: mol_type = other DNA
gctcttcccaaacatgagcctcaacataccccttctccagctctgccctcaaacgcccgtcgtggcatgagtgcatttgcgtgcatagacataggacagcctggactctg

SEQ ID NO: 15870 - DNA, 110 bp, synthetic construct
  source 1..110: mol_type = other DNA
gtttgctttccacttctgctcttactccctattaggagctggaacactgatggggcagagacccagctatgaccatgcagccacattagcacagcctatagactggtgga

SEQ ID NO: 15871 - DNA, 110 bp, synthetic construct
  source 1..110: mol_type = other DNA
aagggaatgttcttgctgctgcacatcagtgagttagtggtaccctggctctcaccttagctgccacaataccatcactgccaccagggggtgcgagagagctacagcct

SEQ ID NO: 15872 - DNA, 110 bp, synthetic construct
  source 1..110: mol_type = other DNA
agcgtgtcattctggaggtctcattgacctcaagaatgggaaatagatggtctctatcctttattcaagcaggatgcagcttttatcctgaagttatctgtctgccagga

SEQ ID NO: 15873 - DNA, 110 bp, synthetic construct
  source 1..110: mol_type = other DNA
atgggaaatagatggtctctatcctttattcaagcaggatgcagcttttatcctgaagttatctgtctgccaggaacagagtacatttgctcagtctgggatccatctgt

SEQ ID NO: 15874 - DNA, 110 bp, synthetic construct
  source 1..110: mol_type = other DNA
caagtttatgacttagcaagttagtggcagagcagggatgcaaacccagggccgccttccttgtaactagcctttcagctctacaactttggtctccgagatacacggaa

SEQ ID NO: 15875 - DNA, 110 bp, synthetic construct
  source 1..110: mol_type = other DNA
ggagaggatagatgttcaggaggggactggtgagggacctggcttccctgctactcggcccattggagtgcctggtactgagtcactcccattatctccactgttctagg

SEQ ID NO: 15876 - DNA, 110 bp, synthetic construct
  source 1..110: mol_type = other DNA
gttcagagagaagagtcacacttggtcccacagctggaggcaagagaggagcccggcagctgagatggaggaagtcctggggccaggcagaaaccaaaccctggcatttt

SEQ ID NO: 15877 - DNA, 110 bp, synthetic construct
  source 1..110: mol_type = other DNA
ctccttgcagcacctacctcgcaggacacagagatgccacagagaacagggccaagagctgattacaagagcagaatgtataggacccagtgcctttggacccaattcca

SEQ ID NO: 15878 - DNA, 110 bp, synthetic construct
  source 1..110: mol_type = other DNA
tgtggctggggtgggtctagttagcagctgtgggcttttgggcccacatgcatgaagtcagggctggtgtcttcactgatactctagctcccacagtgggtccatgtaca

SEQ ID NO: 15879 - DNA, 110 bp, synthetic construct
  source 1..110: mol_type = other DNA
atgagtgacaagtagcattatggacttgctgcatatgatcaggaagaacctggaccactgggacatcttctccgacagagccacagagggcgcagctgtccaaggtggac

SEQ ID NO: 15880 - DNA, 110 bp, synthetic construct
  source 1..110: mol_type = other DNA
cactgggacatcttctccgacagagccacagagggcgcagctgtccaaggtggacaaggagcccatgacacatgggggagctggtggtctatgcaccaagcagaattcta

SEQ ID NO: 15881 - DNA, 110 bp, synthetic construct
  source 1..110: mol_type = other DNA
tctttctctgccaacccccacacgctgcagtcatggccacggccatgctccccgagcacttctgacttttctgcttccaagctttgctccacattctagtatctccttcc

SEQ ID NO: 15882 - DNA, 110 bp, synthetic construct
  source 1..110: mol_type = other DNA
tgataaaacatggttctaatacctacatccaagatggggatgaaaacagtggaacagaggagaagctaatggtatgccacttcaaacctcttccagatggacatcaatcc

SEQ ID NO: 15883 - DNA, 110 bp, synthetic construct
  source 1..110: mol_type = other DNA
gggtgtgccatccaggatagccactgggtcctgcctctgaaagtatgaaagcaagagatatgagtgggaccctccatcagccagctcacactccaactggggagcaccca

SEQ ID NO: 15884 - DNA, 110 bp, synthetic construct
  source 1..110: mol_type = other DNA
aggacttgagctctgcctgctgggagctctggctgaggggtagtgtggaaggttccacctcctgtgcatccttgaggacagcctttccctgcagacagccagagtgcagg

SEQ ID NO: 15885 - DNA, 110 bp, synthetic construct
  source 1..110: mol_type = other DNA
tgcccacagcctctgcctcggcttcctacaggaaacagagtgtcgagggtcagatggggagagtgtggagccttgtcccacccgctccatgctctgagctctggaggaca

SEQ ID NO: 15886 - DNA, 110 bp, synthetic construct
  source 1..110: mol_type = other DNA
ggggagagtgtggagccttgtcccacccgctccatgctctgagctctggaggacagacctgtcttgtctgtcccgccacctgaaatgagacagcagatcacaagctctct

SEQ ID NO: 15887 - DNA, 110 bp, synthetic construct
  source 1..110: mol_type = other DNA
gtaggccaatggccagaggctcagaatgctgatgtggagctccttgctgtatagctcctctccatctacccttcacctgatatctcccatctacctctctaccacccacc

SEQ ID NO: 15888 - DNA, 110 bp, synthetic construct
  source 1..110: mol_type = other DNA
gcctttggtggtagtcaaggccctcctgtgctagtgtgtcagcactgttctgcatcaaactctacttctttccacactcaagctggccactctctccttgcttgtccaat

SEQ ID NO: 15889 - DNA, 110 bp, synthetic construct
  source 1..110: mol_type = other DNA
tacagactatacaacctgcaaaatctgctctattgctctatggacatatcgggatggttcccaagctggttatgtagggatttcaccaaatttccatgagaaactggctg

SEQ ID NO: 15890 - DNA, 110 bp, synthetic construct
  source 1..110: mol_type = other DNA
acttccttccctgagactcctgtctgcatcaacctccctcatccttacactcatcattgtctgctctttctcttcccagcacttcattaatcaggtgacagttgactctt

SEQ ID NO: 15891 - DNA, 110 bp, synthetic construct
  source 1..110: mol_type = other DNA
gtgtccttaagcaagagtaacattagcaaaaataaacaaatgagctacatcaagctaaaaagggcttttatagcaaaggaaacagtcaacaaaacaaaaagataacctat

SEQ ID NO: 15892 - DNA, 110 bp, synthetic construct
  source 1..110: mol_type = other DNA
ggttatttcctattacagatggttcctacagtgctgccagccaccaacaggcagaagataatcatgctccaagctgggctgcacaagtccggtggttaggccattgattt

SEQ ID NO: 15893 - DNA, 110 bp, synthetic construct
  source 1..110: mol_type = other DNA
agataatcatgctccaagctgggctgcacaagtccggtggttaggccattgatttgcacctattagagagacttggtggaggagggctttaaaataatactcaggagttc

SEQ ID NO: 15894 - DNA, 110 bp, synthetic construct
  source 1..110: mol_type = other DNA
catggaaacagaaggttgaatcatggcgcatccccgagagcctggtccgcttagctccgctgacatctttccacttcattagtctctttatcaagtgactctgcatagga

SEQ ID NO: 15895 - DNA, 110 bp, synthetic construct
  source 1..110: mol_type = other DNA
tccgctgacatctttccacttcattagtctctttatcaagtgactctgcataggactaagtgtattttggtgtcaaggtgcactggagatgattcaaaaacagagtgacc

SEQ ID NO: 15896 - DNA, 110 bp, synthetic construct
  source 1..110: mol_type = other DNA
taagtatgtctgaggcacgcagcagggaagaaagtctagactcagaagttagatagctagacacgaattctaacctcagccatgactgtaggaaagttctataactactc

SEQ ID NO: 15897 - DNA, 110 bp, synthetic construct
  source 1..110: mol_type = other DNA
ctgttaaacagggtggacttgaggctgaccactggattggtgacaaagttctgggggagaattagcaacaaccaggcactatttgggcagctatctttgaacttatttcc

SEQ ID NO: 15898 - DNA, 110 bp, synthetic construct
  source 1..110: mol_type = other DNA
ggagaattagcaacaaccaggcactatttgggcagctatctttgaacttatttcctgcaaccacctccccagtttctcgtcactattgacaaataaaatggaaaactaat

SEQ ID NO: 15899 - DNA, 110 bp, synthetic construct
  source 1..110: mol_type = other DNA
caacattgtaaatcaactatactttaattttaaaaaagaccacaaccatccaatggaactttctgcaaaaaaagggaaataaatgttctgtatgtgtgcctcccaattca

SEQ ID NO: 15900 - DNA, 110 bp, synthetic construct
  source 1..110: mol_type = other DNA
caggtcactgctgtggctcagtttcagtccctggccagggaacttactcataccgtgggaacagccgaaaaaatataaaaataggagttcctgctgtagcaaagtgggct

SEQ ID NO: 15901 - DNA, 110 bp, synthetic construct
  source 1..110: mol_type = other DNA
acaggagctcaaagattgtgtccatcagccctcgttccttaagagcttctccacaggcctctagatatgtaccaaactggaagcctgccccctttcctagataagaaaat

SEQ ID NO: 15902 - DNA, 110 bp, synthetic construct
  source 1..110: mol_type = other DNA
tgcagatgtgccctagaaggtgcccaggggcgtgaagctgtgtctctggctgatagtcaccctggccccttacgtcttcctgtttctcaggcgtggcccacagagctttt

SEQ ID NO: 15903 - DNA, 110 bp, synthetic construct
  source 1..110: mol_type = other DNA
aaaaggtttaagccagggcaggatttctagaatggtggagtaaggagcttgatgtgccctctccccagaaaaacaacctttttggcagtggatgttgatcaagggagagg

SEQ ID NO: 15904 - DNA, 110 bp, synthetic construct
  source 1..110: mol_type = other DNA
acgggaactaatctgccctttttcctaataattacttttacgtatttaaaggagttagctcattatctttgattaacattgaatcaataacaatcattcaacctgaagct

SEQ ID NO: 15905 - DNA, 110 bp, synthetic construct
  source 1..110: mol_type = other DNA
atgccattagtgttacaggaaaaatgtgaaagctaccagactcttagtaataaagttctattggagaaaaatttgtccagatgttgtgcatgagttcacagaacttaaaa

SEQ ID NO: 15906 - DNA, 110 bp, synthetic construct
  source 1..110: mol_type = other DNA
tgagaacaatttaaaaggacatcaatgcactttctcaagtatttgaagtagatttagcaatccctatcttgagctactgcatcttcaaagacttttaaataaattttact

SEQ ID NO: 15907 - DNA, 110 bp, synthetic construct
  source 1..110: mol_type = other DNA
tttggaaggataaagtaattggtcctataacgtgttaactttgttacagaatcacacatttcccaggagcctctgttttcataaaattcttaatcaagtttccaaagttc

SEQ ID NO: 15908 - DNA, 110 bp, synthetic construct; identical to SEQ ID NO: 15907
  source 1..110: mol_type = other DNA

SEQ ID NO: 15909 - DNA, 110 bp, synthetic construct
  source 1..110: mol_type = other DNA
aatgagtattagttgaagccagagactaactgcaataccagggattgtagtctgtgctaataactttcctttttaatagttcctacagaaaaagaggcccacatcaattg

SEQ ID NO: 15910 - DNA, 110 bp, synthetic construct
  source 1..110: mol_type = other DNA
ttagggtcataagctacctgatggaaaggaccattttatctgttatatttttattcacatctcctaaccttatcacatgttaaatatgtaactagaatttagcaaggtgt

SEQ ID NO: 15911 - DNA, 110 bp, synthetic construct; identical to SEQ ID NO: 15910
  source 1..110: mol_type = other DNA

SEQ ID NO: 15912 - DNA, 110 bp, synthetic construct
  source 1..110: mol_type = other DNA
cagtgaaggctagtttctttaaatctggctaatgggtttggccagaattcaagagtcaagctagagtgatgctgtcagtgaaactgactctgatcttctatcaggggctt

SEQ ID NO: 15913 - DNA, 110 bp, synthetic construct
  source 1..110: mol_type = other DNA
tcaagctagagtgatgctgtcagtgaaactgactctgatcttctatcaggggcttcttgaaccaagagtgcctattagaatttagccagattgggagttccctttgtggc

SEQ ID NO: 15914 - DNA, 110 bp, synthetic construct
  source 1..110: mol_type = other DNA
taaaaaggtgataaagttgctgagaagacaaacagtggatggatgaaacaacccagaaatcagcaatagcaagaagctgctctggccctaaatgggaaagatgaagtggg

SEQ ID NO: 15915 - DNA, 110 bp, synthetic construct
  source 1..110: mol_type = other DNA
atgaatacttgtttgcctcactaccctcaatctctctgcagaattctttctctaaagggacaagttctgtgagctgacatcaggtggctagggttcagcattctcacccc

SEQ ID NO: 15916 - DNA, 110 bp, synthetic construct
  source 1..110: mol_type = other DNA
agggacaagttctgtgagctgacatcaggtggctagggttcagcattctcaccccacagccacccaagaacaatatgaccagaaagtcccctatttctggaattcaagtc

SEQ ID NO: 15917 - DNA, 110 bp, synthetic construct
  source 1..110: mol_type = other DNA
tgtgagcatggacaaagaatgggcctcattgtccataagtctcctgttccacagctggaaaatgggcacaacagcaacacctgcatctagttactggaaccatggcagct

SEQ ID NO: 15918 - DNA, 110 bp, synthetic construct
  source 1..110: mol_type = other DNA
tggaaaatgggcacaacagcaacacctgcatctagttactggaaccatggcagctattatgacaactattatcatcatacaaaccaatttggagagatttcaatgaatca

SEQ ID NO: 15919 - DNA, 110 bp, synthetic construct
  source 1..110: mol_type = other DNA
gagtttcccatcctctattctctgattttcctgtaaattaggatttagatctagagacttgcttcatgttcctttaaataattatttatttttgtacctggtatgttctt

SEQ ID NO: 15920 - DNA, 110 bp, synthetic construct
  source 1..110: mol_type = other DNA
gacttgcttcatgttcctttaaataattatttatttttgtacctggtatgttctttcataaggggcacataatttctggttcatgatattgatgatcgcataccagagcc

SEQ ID NO: 15921 - DNA, 110 bp, synthetic construct
  source 1..110: mol_type = other DNA
gctgagcacaggaaacaaggctgctgcctgggtcggcactgtgcccccacttatcacaccccagtctctttccacacaccttcccacctccacactcacttcccgggata

SEQ ID NO: 15922 - DNA, 110 bp, synthetic construct
  source 1..110: mol_type = other DNA
acaccccagtctctttccacacaccttcccacctccacactcacttcccgggataaaatattccttatttttcaggctctacccatttcactaatgtccagggtcctagg

SEQ ID NO: 15923 - DNA, 110 bp, synthetic construct
  source 1..110: mol_type = other DNA
aatatggctctgcccaccagagagtcaagaaccagctccatccaagagccatttccatgaggatgccctcacaagcctctaaaacagccttatccaccaggggcagacac

SEQ ID NO: 15924 - DNA, 110 bp, synthetic construct
  source 1..110: mol_type = other DNA
ggaaggatcacacaaagtcagaagacgatgagctcctcctggcacttattcccgctggtcctccgtgcttgtccttatagattttgttataaatagtggtcaagttttat

SEQ ID NO: 15925 - DNA, 110 bp, synthetic construct
  source 1..110: mol_type = other DNA
actttgatctcctctgattaagttagaagaagtcaaattagaggtgaaggattatcatgcattgccttccaaggtttctgacacagggttggccagagctctagcgttct

SEQ ID NO: 15926 - DNA, 110 bp, synthetic construct
  source 1..110: mol_type = other DNA
catgcattgccttccaaggtttctgacacagggttggccagagctctagcgttcttaatgcaccatgggcaaacaccagcatgaagttatagcatttagggaattcactt

SEQ ID NO: 15927 - DNA, 110 bp, synthetic construct
  source 1..110: mol_type = other DNA
caccttgctcccaggaacactggcccaggctcatacagccctgagcactcacacggagactccacatccatttccctgaaccccttgtggactgggagctccctgagaga

SEQ ID NO: 15928 - DNA, 110 bp, synthetic construct
  source 1..110: mol_type = other DNA
gagactccacatccatttccctgaaccccttgtggactgggagctccctgagagaagaagccatgtcttttatcactttgtctaattgcgttctcttaacctgaaggagg

SEQ ID NO: 15929 - DNA, 110 bp, synthetic construct
  source 1..110: mol_type = other DNA
agcaaatctgtttcaggccagaagcctgctattgtaaaggggggtaggcctggcttctttgctcttttcctcttggaacttgtcctccttccttcccctgaggcacccat

SEQ ID NO: 15930 - DNA, 110 bp, synthetic construct
  source 1..110: mol_type = other DNA
aaatctatggacacagaaattagattaggggttgctgagagctgagggaatggaaagggttggatgtaggagctaaagtgtacgggatttctttctggagtaaggaagat

SEQ ID NO: 15931 - DNA, 110 bp, synthetic construct
  source 1..110: mol_type = other DNA
agggttggatgtaggagctaaagtgtacgggatttctttctggagtaaggaagatattataatatctactgtttttatggcatataactgaaaataatgaaaaccactgt

SEQ ID NO: 15932 - DNA, 110 bp, synthetic construct
  source 1..110: mol_type = other DNA
tgtctagtgagtgagtaccacggcaggatgtgtgagagtcaggagaggttcaggtgagctcagggatgatggctgtggagctggggggtcgggagcatgatgtccacatg

SEQ ID NO: 15933 - DNA, 110 bp, synthetic construct
  source 1..110: mol_type = other DNA
ttgtcctcaggatagactgtcctgccaactggcacaggctccctgcaacttccgtgtcaggccaacctggactgagctccttcacatatcttgcttccttttctgtccct

SEQ ID NO: 15934 - DNA, 110 bp, synthetic construct
  source 1..110: mol_type = other DNA
tttttctgactttgtattacaatatttgaaatactaagacataaaaacatgtggctctaagcgatgatcagcctcctctcccccttttgcaagctaggtcgggggattat

SEQ ID NO: 15935 - DNA, 110 bp, synthetic construct
  source 1..110: mol_type = other DNA
tctaagcgatgatcagcctcctctcccccttttgcaagctaggtcgggggattattcagaaatgatgctctagatggtggccccaggctctgagctgtagaatgacattg

SEQ ID NO: 15936 - DNA, 110 bp, synthetic construct
  source 1..110: mol_type = other DNA
ttggtcgcgtataacacaagtttattttctcacagttctagagtccagaagtccaagctcagtatcactgggctggggtcaaggtgccagcaagcctgggctccttcaca

SEQ ID NO: 15937 - DNA, 110 bp, synthetic construct
  source 1..110: mol_type = other DNA
agctcagtatcactgggctggggtcaaggtgccagcaagcctgggctccttcacaggttctaggagagagtctggtgctgcctttcagcatctagtagttgctggccttc

SEQ ID NO: 15938 - DNA, 110 bp, synthetic construct
  source 1..110: mol_type = other DNA
ctctgattgaggtgactgtggggtgtcagggctccctgttagaaaggcggcaggggtatttgtggcaggactggtccatgtatgagctgtgtgtgtggcgggagggtggg

SEQ ID NO: 15939 - DNA, 110 bp, synthetic construct
  source 1..110: mol_type = other DNA
gtatttgtggcaggactggtccatgtatgagctgtgtgtgtggcgggagggtgggagggagggagctggagcccccagatcttgctcagtgttccccggccagcctcacc

SEQ ID NO: 15940 - DNA, 110 bp, synthetic construct; identical to SEQ ID NO: 15938
  source 1..110: mol_type = other DNA

SEQ ID NO: 15941 - DNA, 110 bp, synthetic construct; identical to SEQ ID NO: 15939
  source 1..110: mol_type = other DNA

SEQ ID NO: 15942 - DNA, 110 bp, synthetic construct
  source 1..110: mol_type = other DNA
gcttaattttatttccttagccctccttatagcctggaaaaaatgacagatctcgtagccgtttgggatgttgctttaagtgatggagttcataagattgaatttgaaca

SEQ ID NO: 15943 - DNA, 110 bp, synthetic construct
  source 1..110: mol_type = other DNA
atgaaagttgttagcagaacaattatattggatcatcaaaaatgtgatttaaatcattcttgacaggaaaaaattaaaatacgtagcctttaacgtactctttcagcacc

SEQ ID NO: 15944 - DNA, 110 bp, synthetic construct
  source 1..110: mol_type = other DNA
tgcttcagcagtgacctgagttgctgcagtgacaatgctggatccttaacctgctccaccccaagggaactccagatagttaccctttctaagcacttattttgagccaa

SEQ ID NO: 15945 - DNA, 110 bp, synthetic construct
  source 1..110: mol_type = other DNA
ccaccccaagggaactccagatagttaccctttctaagcacttattttgagccaaggagattacttacattttctcatttcatttttgtggcaaatgaatgaggacttgg

SEQ ID NO: 15946 - DNA, 110 bp, synthetic construct
  source 1..110: mol_type = other DNA
gtgcctgtttcttcatgatccttgaagctttgcattgaagtctgtgtactggaaatggcagaaacctcttccagtctttacatactgattttgctaagtaaagaccttct

SEQ ID NO: 15947 - DNA, 110 bp, synthetic construct
  source 1..110: mol_type = other DNA
tggcagaaacctcttccagtctttacatactgattttgctaagtaaagaccttctctcctattgggtttccagtatgatgggactccctctggaactgtggacgacaaat

SEQ ID NO: 15948 - DNA, 110 bp, synthetic construct
  source 1..110: mol_type = other DNA
atggcaaagtttaagatcgctgagcttgttttcattcagcagttgaggtgtatcaggtggtttgagcttgaggtcatgtccctgcttattgacaacaaagtcatgaaggc

SEQ ID NO: 15949 - DNA, 110 bp, synthetic construct
  source 1..110: mol_type = other DNA
agccagggcctgcgtggctcagtcagccgagggctggggtcccaggccctctgagggaagctgcctcagcacagagtccaggagaagggctgtggcatatccaacttgcc

SEQ ID NO: 15950 - DNA, 110 bp, synthetic construct
  source 1..110: mol_type = other DNA
ggaagctgcctcagcacagagtccaggagaagggctgtggcatatccaacttgcctctcaggtaacttgattcctggacatgagactttttccatttatcagattggttt

SEQ ID NO: 15951 - DNA, 110 bp, synthetic construct
  source 1..110: mol_type = other DNA
tatccccattttaccaacaaggaactcagaattccagaaggaggggctgcttccttgaaatcacagagtcagggagtggtggggatgagatgttttagggtgcttcaggt

SEQ ID NO: 15952 - DNA, 110 bp, synthetic construct
  source 1..110: mol_type = other DNA
cttgtctccgctgttgccaataaaccttaagatttcagtgtactggtagcagcaaatgccagggagctgctctgatatagcactggctctctaagctggaggcctgtctc

SEQ ID NO: 15953 - DNA, 110 bp, synthetic construct
  source 1..110: mol_type = other DNA
catttgcttggtattcccatgctgaggactttgcactcaacctttgggttgtctctcaacaataagtcagctgccatggctcccacttttctcatggcacttagaaaggc

SEQ ID NO: 15954 - DNA, 110 bp, synthetic construct
  source 1..110: mol_type = other DNA
tcttctcatatttttcacggagcctctgtcaggcctgcatgtgcagaaggtggccaataaccatttgattactttcatctctatgaaacataccagcatagaaagaaagc

SEQ ID NO: 15955 - DNA, 110 bp, synthetic construct
  source 1..110: mol_type = other DNA
aataaccatttgattactttcatctctatgaaacataccagcatagaaagaaagcttgttgaccgggggtggttacttgcgccatttagctgatgggaaattgtgattta

SEQ ID NO: 15956 - DNA, 110 bp, synthetic construct
  source 1..110: mol_type = other DNA
gaatggatgtgtgccactgcatgggccctggcagtatgagtgggagctagtcaggagggtacatgcagggcattttaagtggagggaattgagagttcgattttcccaga

SEQ ID NO: 15957 - DNA, 110 bp, synthetic construct
  source 1..110: mol_type = other DNA
tgctggggatacggtgaagattcctgctctctaatagccttcactgcctgtgctgagctccacgaaggaggtgaaagacaaagttaaaaggaggaaggtgggattccgtc

SEQ ID NO: 15958 - DNA, 110 bp, synthetic construct
  source 1..110: mol_type = other DNA
agctccacgaaggaggtgaaagacaaagttaaaaggaggaaggtgggattccgtctgccttgggagactgaagaaggcttcttggaggaggtaacacttaaaaatgggcc

SEQ ID NO: 15959 - DNA, 110 bp, synthetic construct
  source 1..110: mol_type = other DNA
cttgaacacttgacggcacacctggtcaccgcatgtcagctcctacaacatcaaaaagcaggtgagtgactaatcagccaggccctccttctgcccatccccagccctct

SEQ ID NO: 15960 - DNA, 110 bp, synthetic construct
  source 1..110: mol_type = other DNA
aaatctcttttttatattctgtaacaatggcctccaagtgtcagttaagtggtagagctggcagtcattgagccgacatcaatagccttgcactggaggtgagaggtgct

SEQ ID NO: 15961 - DNA, 110 bp, synthetic construct
  source 1..110: mol_type = other DNA
taagtcaaaccattataagttggagtccatccgtacttcctcgtcatttctcgcgtgttactgctctagcttctttcagtatttctctgtcccatctcatactttccata

SEQ ID NO: 15962 - DNA, 110 bp, synthetic construct
  source 1..110: mol_type = other DNA
tctttcccccgagaaagaagaaccaaatcactgtagaaccaaatgctgctctgcgagagcgaacagctttggctgccgggaactacagaggtccagagacaaaggccaga

SEQ ID NO: 15963 - DNA, 110 bp, synthetic construct
  source 1..110: mol_type = other DNA
caatcactgagaagctcagatttccccagcttcacgctagccacagaatgcctttcaattcctagttcccagattggcactgtgggtctaggcgaacgtgagagggagac

SEQ ID NO: 15964 - DNA, 110 bp, synthetic construct
  source 1..110: mol_type = other DNA
caattcctagttcccagattggcactgtgggtctaggcgaacgtgagagggagacaatgatgagggaatcacgactccactgcggtttgttaaacacaccatataaaacc

SEQ ID NO: 15965 - DNA, 110 bp, synthetic construct
  source 1..110: mol_type = other DNA
aagcctaccaagattgtgtgctaactagtgttcgtaggttctgagtgaggaaatgtggagctctacagcaaggaatgggtgtcgtctttctggtggggatcctgtctgct

SEQ ID NO: 15966 - DNA, 110 bp, synthetic construct
  source 1..110: mol_type = other DNA
tggagctctacagcaaggaatgggtgtcgtctttctggtggggatcctgtctgctgagcctctagcacaaggatttgttgctcataaaaagtagttgagggagttcccat

SEQ ID NO: 15967 - DNA, 110 bp, synthetic construct
  source 1..110: mol_type = other DNA
atgaagctgtggaactgagcctcagggctgtactgggaatgcaggtgcagtggtggcttagaatagctgaccaggagttcctgttgtggcacaatggttaacaaatccga

SEQ ID NO: 15968 - DNA, 110 bp, synthetic construct
  source 1..110: mol_type = other DNA
aggacgcaggttctctccctgatctggctcagtgggttgggatccagcattgttgtgagctgtggcttaggttgtagacctggctcggatctggtgttgctgttgctgtg

SEQ ID NO: 15969 - DNA, 110 bp, synthetic construct
  source 1..110: mol_type = other DNA
gttgggatccagcattgttgtgagctgtggcttaggttgtagacctggctcggatctggtgttgctgttgctgtggtataggctggcagttgcaactctgattcgagccc

SEQ ID NO: 15970 - DNA, 110 bp, synthetic construct
  source 1..110: mol_type = other DNA
tgatcagagatgagcctggaaagctaggcaggggccaggctatccggaggcttgtaggacatgtaggcattttagatttcattctgaatgatgtggaactgggacaaccc

SEQ ID NO: 15971 - DNA, 110 bp, synthetic construct
  source 1..110: mol_type = other DNA
tgccgtcttgccctatccagaggtcccagatatttatcttagagaagtgagctaagggggttgttctgaggttttgctgggcacaggggctcagccagcccatgtgtgca

SEQ ID NO: 15972 - DNA, 110 bp, synthetic construct
  source 1..110: mol_type = other DNA
attttgctcttggaaacctgtcttacctgtacagcagctgcaatcattcctgaacttgtactgctctcatagtctctaacattgactttagggtttacctaaatacttga

SEQ ID NO: 15973 - DNA, 110 bp, synthetic construct
  source 1..110: mol_type = other DNA
ttgtactgctctcatagtctctaacattgactttagggtttacctaaatacttgattcttttttctcagacccagagaacgggctagattccaccttagcacagggaggc

SEQ ID NO: 15974 - DNA, 110 bp, synthetic construct
  source 1..110: mol_type = other DNA
ccatgcttctttaggggagaagctaggagctgtccagctgtcccaggagctacgacctaggtctttgcagtggtcggtgtactgtggcctcacttcctgctcctgcagtc

SEQ ID NO: 15975 - DNA, 110 bp, synthetic construct
  source 1..110: mol_type = other DNA
agatgctgaccccagggggcttccaggtttaggggaacctgtcctgccttcctttccttcatcagaacatcttcttcagctgcaattccagcctctaggagcatggagga

SEQ ID NO: 15976 - DNA, 110 bp, synthetic construct
  source 1..110: mol_type = other DNA
tcatagggtttggaggaggaattatctcctgccacacagtaagtgtccatttatgtttagctgtcctatttttatccatatcctgcagatagggaaactgaggcttggga

SEQ ID NO: 15977 - DNA, 110 bp, synthetic construct
  source 1..110: mol_type = other DNA
cagctgatggagagcggatgacatgccttgtctgcctagcatcagaccttggcatgattattaataggattccacttcagctgcgaacacccccaattctcagtaagcat

SEQ ID NO: 15978 - DNA, 110 bp, synthetic construct
  source 1..110: mol_type = other DNA
gattattaataggattccacttcagctgcgaacacccccaattctcagtaagcatccagagacgttgcctggtgtcctggttatggctcttcaccactttctactcaaat

SEQ ID NO: 15979 - DNA, 110 bp, synthetic construct
  source 1..110: mol_type = other DNA
gctgaattttgccccaggccaccagcttgtgacctctggtaatgaggaataaagaactataggtttcatatacttggaggtttgcatgctgccaaagagggatgtttgcc

SEQ ID NO: 15980 - DNA, 110 bp, synthetic construct
  source 1..110: mol_type = other DNA
ctttgttcatctatgtgctgtttatgactgctttcatgccacaggggcagggttgagtagttgtgatagagaccatatggcttgcaaaatctaaaatatttactccctgg

SEQ ID NO: 15981 - DNA, 110 bp, synthetic construct
  source 1..110: mol_type = other DNA
agtagttgtgatagagaccatatggcttgcaaaatctaaaatatttactccctggccctttgcaaaaaatagttttgccaatgcctgctttagagctttgctcaagagca

SEQ ID NO: 15982 - DNA, 110 bp, synthetic construct
  source 1..110: mol_type = other DNA
ctctgtgcatagcacaattctcttaccaatggggaatcaaactaagtattataggacattgggaccaggtgacatgtagctcctgacctgtgtccccaggaagcttctgg

SEQ ID NO: 15983 - DNA, 110 bp, synthetic construct
  source 1..110: mol_type = other DNA
acattgggaccaggtgacatgtagctcctgacctgtgtccccaggaagcttctggatccacaggatcttgggggtggtattaagagaaggggcttagtcctgggttcaga

SEQ ID NO: 15984 - DNA, 110 bp, synthetic construct
  source 1..110: mol_type = other DNA
ggtgcaaagtaggggctttgggggctgtcgctgaggcaggagctgatggatactcctgcatgagactgtttgcaacacaggtacctacagcggttgttctcaaatcgggg

SEQ ID NO: 15985 - DNA, 110 bp, synthetic construct
  source 1..110: mol_type = other DNA
tctctaaacagtcccctcaggactgggcataaggtaaagggatacagcaggtactcagctgtgcttagtcatttccctgggaccacgcctgatccagggcagggcacaga

SEQ ID NO: 15986 - DNA, 110 bp, synthetic construct
  source 1..110: mol_type = other DNA
cacaaccccaggcctttttcagtctgcttcctccacttatttccaagagtaagcaagtgtgtgtgtatgcttttcataaattgaatctcgttaggcccactggttttcaa

SEQ ID NO: 15987 - DNA, 110 bp, synthetic construct
  source 1..110: mol_type = other DNA
agtgtgtgtgtatgcttttcataaattgaatctcgttaggcccactggttttcaaatcagctaacaatactcatcttcccaatgttagacctcagggctagggtacccaa

SEQ ID NO: 15988 - DNA, 110 bp, synthetic construct
  source 1..110: mol_type = other DNA
aagaggcatctgagaggacagtgaccaagcaaggctttcaaaggagctgtcatctgactagaaacccaaatgtctgacctagtcatccacactgagtccttccctgagaa

SEQ ID NO: 15989 - DNA, 110 bp, synthetic construct
  source 1..110: mol_type = other DNA
tctctaatggactgcacgagtgggagccactctttcctgctcacaaaatgtagttgagggactgatggagagcagctgctctagtccaggttgcactctggtgcattgaa

SEQ ID NO: 15990 - DNA, 110 bp, synthetic construct
  source 1..110: mol_type = other DNA
gagggactgatggagagcagctgctctagtccaggttgcactctggtgcattgaagaagccagcagaaggaggaggcagacactgaaggaaaaaaaggggggaggagagg

SEQ ID NO: 15991 - DNA, 110 bp, synthetic construct
  source 1..110: mol_type = other DNA
cccaactatgagaagccattatccattcctccaaaatacctctagagagctggcgctttggaggggagggcagtatcagttccccaggcataaccactgcttccattctc

SEQ ID NO: 15992 - DNA, 110 bp, synthetic construct
  source 1..110: mol_type = other DNA
cctaacatcatccagagatacagctccacccaaagtctgcctcaatctagggcctatgctctttctgctgtacttggttatctgctcattcacccaatattatggggctt

SEQ ID NO: 15993 - DNA, 110 bp, synthetic construct
  source 1..110: mol_type = other DNA
atgctctttctgctgtacttggttatctgctcattcacccaatattatggggcttgggcattatattagatttctgcatgcactaccatgtagtacatgcattctcttga

SEQ ID NO: 15994 - DNA, 110 bp, synthetic construct
  source 1..110: mol_type = other DNA
agaaccttccagcccaatagtggcagagccaggcatgcaccttggtctgtcttacttcccaggccttgttcttgtgatatactattctggctgccagctttttgtggcag

SEQ ID NO: 15995 - DNA, 110 bp, synthetic construct
  source 1..110: mol_type = other DNA
ttcccaggccttgttcttgtgatatactattctggctgccagctttttgtggcagtatatcaggaaaaaaggaattggattacaataccattctgctgacattcctagag

SEQ ID NO: 15996 - DNA, 110 bp, synthetic construct
  source 1..110: mol_type = other DNA
ccatcagaactgcactgaggtctagagctcactggccctggggaccactttcccgggcactccatccatccccccagatttatggctggctggtcctgccatcaaaatgt

SEQ ID NO: 15997 - DNA, 110 bp, synthetic construct
  source 1..110: mol_type = other DNA
cgtaggaatgaatgagggccaccacagcctaagcctcacctacatttggcaaggtccagctttctgccattgtgctagcccaataggtacaaagtgatgtctccttattg

SEQ ID NO: 15998 - DNA, 110 bp, synthetic construct
  source 1..110: mol_type = other DNA
agcagagggtcctgccacttgcatatgctttcccataaccgtttactgttttcagattggggcttgtcctcagctggagaaacgtgctgaccccatcccaccccacccct

SEQ ID NO: 15999 - DNA, 110 bp, synthetic construct
  source 1..110: mol_type = other DNA
attggggcttgtcctcagctggagaaacgtgctgaccccatcccaccccacccctactgctctcttccaagtacttactaagcaccaggcactgtgcagatgccagggac

SEQ ID NO: 16000 - DNA, 110 bp, synthetic construct
  source 1..110: mol_type = other DNA
gcccacttcccacatacacacttagaaggtcagaggacatccaatggaggaggaaatccttggaggaagtggctattgggagggtgtaggtattctggtccagcagaacc

SEQ ID NO: 16001 - DNA, 110 bp, synthetic construct
  source 1..110: mol_type = other DNA
ccatggccaacacggaggagggtaaggagagcgctgtcccctccccacctctatttcctgtctccagacccctgatgagatgtacttggggggagaaggggtaacctcag

SEQ ID NO: 16002 - DNA, 110 bp, synthetic construct
  source 1..110: mol_type = other DNA
tcctgtctccagacccctgatgagatgtacttggggggagaaggggtaacctcaggaccagctctcacaccccctccttaatctaagaaggcaggggcataactctagcc

SEQ ID NO: 16003 - DNA, 110 bp, synthetic construct
  source 1..110: mol_type = other DNA
tatcatggaccatcttcttcctccccattcacctactcatccccacactccagcctactcatttttcacctgagagcactcagcccaagccaactgtaatagtccctaat

SEQ ID NO: 16004 - DNA, 110 bp, synthetic construct
  source 1..110: mol_type = other DNA
ctgtcactttatgaggtgctagctctgcccattcaacctgggaaaaataaagcgtcacataatttgctccgctctagttgagaaggtttgaagttaagagaattctgtgc

SEQ ID NO: 16005 - DNA, 110 bp, synthetic construct
  source 1..110: mol_type = other DNA
aggcttcaatccaccctcatccaggaagcccttcctcttcctccctcaaactccaccctctctgagagtcagctcattgcctcctgggctgaagatgcctctcctggccc

SEQ ID NO: 16006 - DNA, 110 bp, synthetic construct
  source 1..110: mol_type = other DNA
gcttgtataataagcctactgcagtggggagaaggggttgcagctggtagcaaatacagtgattcatgcatacataagtaatagaggacagaccaccctggagctgggag

SEQ ID NO: 16007 - DNA, 110 bp, synthetic construct
  source 1..110: mol_type = other DNA
gcaggtctgatggggtatctggaggagctgccatagaccccaggggtgtgcgagctcagatctcccatggaggtaatatgcaggaagatggccagaaaggaacccaagga

SEQ ID NO: 16008 - DNA, 110 bp, synthetic construct
  source 1..110: mol_type = other DNA
tcagatctcccatggaggtaatatgcaggaagatggccagaaaggaacccaaggaatgcttgacttccagagtgaccgtgggcctcctcttctctaggggtgaaaaagga

SEQ ID NO: 16009 - DNA, 110 bp, synthetic construct
  source 1..110: mol_type = other DNA
tcccagttttatttgtatcttcttatattctaagaaagaaagttgagtggagcgtgaaaaagatggtttaaagacttcgcctaaagggcctaagaggaatttagttgaat

SEQ ID NO: 16010 - DNA, 110 bp, synthetic construct
  source 1..110: mol_type = other DNA
aggaagagtggaatagaataacaagtaggactggttgcaaaaatgcttcgacctttgaatgtccattttcttgggctggtgcgtccccaaagtgtctactaagcagagag

SEQ ID NO: 16011 - DNA, 110 bp, synthetic construct
  source 1..110: mol_type = other DNA
tgaatgtccattttcttgggctggtgcgtccccaaagtgtctactaagcagagagctggctggactagcagagtaaactatagataagaccaggtagactgggagaatac

SEQ ID NO: 16012 - DNA, 110 bp, synthetic construct
  source 1..110: mol_type = other DNA
accaacaaccagagctttacagtaaaccatcaacctggccacaaatgtgcctctctccttgttctaggcctacggagcatgaagatttttacctaaaatcacccactctt

SEQ ID NO: 16013 - DNA, 110 bp, synthetic construct
  source 1..110: mol_type = other DNA
tccttgttctaggcctacggagcatgaagatttttacctaaaatcacccactctttccctttcattaatacaccttgatgaactaatgactaaaccacttatgctcacat

SEQ ID NO: 16014 - DNA, 110 bp, synthetic construct
  source 1..110: mol_type = other DNA
ctctgtcatccttcatagcagtcctggccagggtggaaactactccagctgggtcaggccctgctgtcagtggtcaccatacagaacctcttttaagtccctgtcactag

SEQ ID NO: 16015 - DNA, 110 bp, synthetic construct
  source 1..110: mol_type = other DNA
gagcctactgcttatgtatttaaaaaattaagatttcgggagttcctcttgtggctcagctggttaagaatatgactagtatccgtaaggatgcatgttcaatccctggc

SEQ ID NO: 16016 - DNA, 110 bp, synthetic construct; identical to SEQ ID NO: 16015
  source 1..110: mol_type = other DNA

SEQ ID NO: 16017 - DNA, 110 bp, synthetic construct
  source 1..110: mol_type = other DNA
atacaacgttgttgtataaatcataccccaacaaatctgactttttaaaaaatccatccttgaagcttcgatttatctcagcaaccctcttactctataggatgtaaacc

SEQ ID NO: 16018 - DNA, 110 bp, synthetic construct
  source 1..110: mol_type = other DNA
gttcctgggctaggaatctagtcagagctgcagcttcgggcctacgccatagccacaacaatgcagaatccaagcagagtctgtgagctacaccatagctcatggcaaca

SEQ ID NO: 16019 - DNA, 110 bp, synthetic construct; identical to SEQ ID NO: 16018
  source 1..110: mol_type = other DNA

SEQ ID NO: 16020 - DNA, 110 bp, synthetic construct
  source 1..110: mol_type = other DNA
acataaggaaacggaggcgcagagggctaagtaactgctcaggctctcacagctggtgagtggcagggccaagatctgaaccgaagccatctggtttcagcgaccctatt

SEQ ID NO: 16021 - DNA, 110 bp, synthetic construct
  source 1..110: mol_type = other DNA
gtgagtggcagggccaagatctgaaccgaagccatctggtttcagcgaccctattattaattactttgctttattcacccctcaagaatgagagtaagatcgcatttaag

SEQ ID NO: 16022 - DNA, 110 bp, synthetic construct
  source 1..110: mol_type = other DNA
agagccacacattttcaaatttttaatcgcaaaattatatcgcttagcattgatttgaagatagagaaccttactaggtaatttgtaaacatttttccttattcctgcca

SEQ ID NO: 16023 - DNA, 110 bp, synthetic construct; identical to SEQ ID NO: 16022
  source 1..110: mol_type = other DNA

SEQ ID NO: 16024 - DNA, 110 bp, synthetic construct; identical to SEQ ID NO: 16022
  source 1..110: mol_type = other DNA

SEQ ID NO: 16025 - DNA, 110 bp, synthetic construct; identical to SEQ ID NO: 16022
  source 1..110: mol_type = other DNA

SEQ ID NO: 16026 - DNA, 110 bp, synthetic construct
  source 1..110: mol_type = other DNA
atctaaaacacatggtgagctttctggccaaggccccggatcttatacatagattctgaggggcccaaaaatctgtattcttaataaggttcatgggtgattcttaagca

SEQ ID NO: 16027 - DNA, 110 bp, synthetic construct
  source 1..110: mol_type = other DNA
ttcttcgctgatgacctgcatatctctatttccctccaagctctagctccagtcttaaactatatacagggagtccccctcgtggcagcaccaaattaaaattccattat

SEQ ID NO: 16028 - DNA, 110 bp, synthetic construct
  source 1..110: mol_type = other DNA
caggcccaaccacttcatttctgggaacttacggtaacttggtctgcctaattccacatttcttcccttcaataaactccagatgaacactcctgaaattttagctttat

SEQ ID NO: 16029 - DNA, 110 bp, synthetic construct
  source 1..110: mol_type = other DNA
acatttcttcccttcaataaactccagatgaacactcctgaaattttagctttatcatactctccctccattcaaaaacaggaatcaattatctatagattatatgaatt

SEQ ID NO: 16030 - DNA, 110 bp, synthetic construct
  source 1..110: mol_type = other DNA
taaatatatattcatccgcttagaactttactaaagtaagtataagaaactgtattacctcctttactgactaccccattactgccttgcatttactgaaatgtggctaa

SEQ ID NO: 16031 - DNA, 110 bp, synthetic construct
  source 1..110: mol_type = other DNA
cagctctgagacatcttggacccatcagccatctgccctgggatctacacacactcttcagtgggccaacaccagctttgggatacctcagaccctggagtcatccatat

SEQ ID NO: 16032 - DNA, 110 bp, synthetic construct
  source 1..110: mol_type = other DNA
atggaacgtaagccacagctgcaagttgcaccacagctgtggtaataccagatacctaacccactgtgtcacataggaacttccaaatttggatttcttaatgtcacaaa

SEQ ID NO: 16033 - DNA, 110 bp, synthetic construct
  source 1..110: mol_type = other DNA
gtagaaggagaaaagacaggcctctgggaaggggcaaagtgttactgtggatactaaaactgttttgtttattcagtaactttagagctctgggaataggtctactagaa

SEQ ID NO: 16034 - DNA, 110 bp, synthetic construct
  source 1..110: mol_type = other DNA
gataatacacccaagaaaaacgtttcacccacaataaagaaatacaatttaaagtaagaaacagttggatttcattgcatccagtgttagaggaagcactagaatcagtt

SEQ ID NO: 16035 - DNA, 110 bp, synthetic construct
  source 1..110: mol_type = other DNA
gaaagggtggagatgctacttcctaccttatttataagaaaataaaaactattgtctatctagttagatattcaagctgttaatgcctcttctccccatctcacacagta

SEQ ID NO: 16036 - DNA, 110 bp, synthetic construct
  source 1..110: mol_type = other DNA
tcccttttttgggcaaattcttataaaaatgtttattgtaaagttatatattttgtctatgatgggattatgcacttcccagttgggattttacatcagggtttttaggc

SEQ ID NO: 16037 - DNA, 110 bp, synthetic construct
  source 1..110: mol_type = other DNA
aatttcagaagagaaaacttacttgtagtcacagggtaggtggtggtaacaggtggtgctatagttgttggcaatttttttggcctgaatttgtagtgaccaataaatcc

SEQ ID NO: 16038 - DNA, 110 bp, synthetic construct
  source 1..110: mol_type = other DNA
acaatgtcggttacttaacttgctgagccacaacaggaacttctattagtgtcttctttttaccttttcggtctcctaggtaacacctttacacctagttaatagctttt

SEQ ID NO: 16039 - DNA, 110 bp, synthetic construct
  source 1..110: mol_type = other DNA
ctttttaccttttcggtctcctaggtaacacctttacacctagttaatagctttttaaaaaatattaactggcatggttttttgtctcctcacggaatcttgatggatat

SEQ ID NO: 16040 - DNA, 110 bp, synthetic construct; identical to SEQ ID NO: 16038
  source 1..110: mol_type = other DNA

SEQ ID NO: 16041 - DNA, 110 bp, synthetic construct; identical to SEQ ID NO: 16039
  source 1..110: mol_type = other DNA

SEQ ID NO: 16042 - DNA, 110 bp, synthetic construct
  source 1..110: mol_type = other DNA
ctttacccagatcatttctcctaggcgagtaatcccctcaccttcaggctgtggaagggccagtacatgttgcccggttgttatctgttcctactgtagctaggctccct

SEQ ID NO: 16043 - DNA, 110 bp, synthetic construct
  source 1..110: mol_type = other DNA
tgctgcgcgaccccaccctggacctcaaggtcatccacctggtgcgtgatccccgggctgttgccagttcacggatccgttcgcgccatggactcatccgtgaaagccta

SEQ ID NO: 16044 - DNA, 110 bp, synthetic construct
  source 1..110: mol_type = other DNA
ggctgttgccagttcacggatccgttcgcgccatggactcatccgtgaaagcctacaggtggtgcgcagccgggacccgcgagcccaccgcatgcccttcttagaagccg

SEQ ID NO: 16045 - DNA, 110 bp, synthetic construct
  source 1..110: mol_type = other DNA
ggcagagatgtagcctttcaatcccccctccctgggcctctggcattattcatattggagctttcaaccagctgacttggaaagcacttttaactacagctcacatcatt

SEQ ID NO: 16046 - DNA, 110 bp, synthetic construct
  source 1..110: mol_type = other DNA
gctttgggagtaaaagttcagaaacagaagcccagcctgctgttctgctgaggcagggccctggatctgcctgagagattgatgtgtgtggcgtcattcttacaaacttg

SEQ ID NO: 16047 - DNA, 110 bp, synthetic construct
  source 1..110: mol_type = other DNA
gggagcagttattttttcccctttgttcggcagcagctgtggctcccaaatgtgttgcctgccagggatttagaacttgatgattcacaggttttgtaagttggtgcttt

SEQ ID NO: 16048 - DNA, 110 bp, synthetic construct
  source 1..110: mol_type = other DNA
gaatagtttggggaagattaagtaaaatcgtccatgaggttatgctcagtaaacactaactgacttttaagatattcttaaaaaacagtcgtcaaagaaattttgccacc

SEQ ID NO: 16049 - DNA, 110 bp, synthetic construct
  source 1..110: mol_type = other DNA
caggattcttcaggtggacacagcctgctctttgtcgattatgaaggctggcttcaagtccatcacagaacttggatgtgacttttgtctcctttgggctcaagtgcctc

SEQ ID NO: 16050 - DNA, 110 bp, synthetic construct
  source 1..110: mol_type = other DNA
aaatgagaggaaacagtcttgtgtgtcagcaccagaaccacagacaatacaaatcagaggaaagctttggcagaaaaccatcgtacctctccctgaatcaaaagaacttc

SEQ ID NO: 16051 - DNA, 110 bp, synthetic construct
  source 1..110: mol_type = other DNA
agaggaaagctttggcagaaaaccatcgtacctctccctgaatcaaaagaacttcaaataggagttccctggtggcacagcaggttaaggatctggtgctgctgctgtgg

SEQ ID NO: 16052 - DNA, 110 bp, synthetic construct
  source 1..110: mol_type = other DNA
ctgggaatctggaatagtgacttagcctctcaataacaaagcatggcctcaaatgaagaaccagaaagctttgattaaaaatcagctacccgtattcaaagtttccgttc

SEQ ID NO: 16053 - DNA, 110 bp, synthetic construct
  source 1..110: mol_type = other DNA
cagggctaggattcaaacccaggtggctggctctagagcccatgcttttggccactgcagtctactagtatctacaaaacatgatgactgttaaggcaaggttgaaccaa

SEQ ID NO: 16054 - DNA, 110 bp, synthetic construct
  source 1..110: mol_type = other DNA
tgcagtctactagtatctacaaaacatgatgactgttaaggcaaggttgaaccaattttcatgtgtttgtttttaaatccatgaaaatgaagtaaaagaggtttcagaag

SEQ ID NO: 16055 - DNA, 110 bp, synthetic construct
  source 1..110: mol_type = other DNA
tctgttaaaccctcacacttgacatcagcgttctggctttcctctttaaatgtaacttatttttgccttaccaactattttaagtgaagagcccaccagaccagcttctt

SEQ ID NO: 16056 - DNA, 110 bp, synthetic construct
  source 1..110: mol_type = other DNA
tccaatgatccttgacattggtatccccagctttgtctagtcccctctcccactgtaccagggctggtctgtgtgcccaacagaagtggtaaggtgttgcttcccagatc

SEQ ID NO: 16057 - DNA, 110 bp, synthetic construct
  source 1..110: mol_type = other DNA
gggcgatcttctggcgagggtggatgggtattatgggatccatgtgtgagaaacagctgcctagaattgtttcagctgttgtaaagagaggagttgacttgatgggagga

SEQ ID NO: 16058 - DNA, 110 bp, synthetic construct
  source 1..110: mol_type = other DNA
cattttccaatcctgatattgtttaacattaggttggaaagctgaaagaaaaaggggcttaggaaacttttccaactctttcgcagaaaagtatttcatctcctcctatt

SEQ ID NO: 16059 - DNA, 110 bp, synthetic construct
  source 1..110: mol_type = other DNA
aagaaaaaggggcttaggaaacttttccaactctttcgcagaaaagtatttcatctcctcctatttgtgttttcttctcagaatatcatttatattcttctgtaccaata

SEQ ID NO: 16060 - DNA, 110 bp, synthetic construct; identical to SEQ ID NO: 16058
  source 1..110: mol_type = other DNA

SEQ ID NO: 16061 - DNA, 110 bp, synthetic construct; identical to SEQ ID NO: 16059
  source 1..110: mol_type = other DNA

SEQ ID NO: 16062 - DNA, 110 bp, synthetic construct
  source 1..110: mol_type = other DNA
tgcagccattgccctctccatcacagctgcctctcagcatgcaaggagctagtgaagggacagtggatttcttcagaaaaactcaaaatcctcacaactttgtttaccag

SEQ ID NO: 16063 - DNA, 110 bp, synthetic construct
  source 1..110: mol_type = other DNA
acctaattaatctggtaagacaatggctgttgatgaaaggatattgggatattgtaaaaactcttttttcagagtgatgccatgggatattggttaacttcaataaataa

SEQ ID NO: 16064 - DNA, 110 bp, synthetic construct
  source 1..110: mol_type = other DNA
gctgttgatgaaaggatattgggatattgtaaaaactcttttttcagagtgatgccatgggatattggttaacttcaataaataagatatttctgaatgttaaagcttgg

SEQ ID NO: 16065 - DNA, 110 bp, synthetic construct
  source 1..110: mol_type = other DNA
caatggcctttaatatattcataatcaattttagaatgatttaatcattccaaaattaaacctcatgtccctagcagttattctttatttcccctctttcaagctcctga

SEQ ID NO: 16066 - DNA, 110 bp, synthetic construct; identical to SEQ ID NO: 16065
  source 1..110: mol_type = other DNA

SEQ ID NO: 16067 - DNA, 110 bp, synthetic construct
  source 1..110: mol_type = other DNA
tgtcacagatgaggatactgtgaaagagagcctaaaaacatgtccaagattacaaaaccaataagtggcagaggctttaatagtcctaattttcagcggcctcatcccat

SEQ ID NO: 16068 - DNA, 110 bp, synthetic construct
  source 1..110: mol_type = other DNA
aaccaataagtggcagaggctttaatagtcctaattttcagcggcctcatcccatcatagttacaacctcaccaatcctatggaattgagtgaacatgatctgctctcct

SEQ ID NO: 16069 - DNA, 110 bp, synthetic construct
  source 1..110: mol_type = other DNA
aacaaaaaaaaaacaaaaaaaccccaaaccgagcactcctattccttcttgaataagtgcttcttctctattgaatatagttttgtagggttactttaattgttcatacc

SEQ ID NO: 16070 - DNA, 110 bp, synthetic construct
  source 1..110: mol_type = other DNA
agtgcttcttctctattgaatatagttttgtagggttactttaattgttcatacctcccatagccaaagggcaggacatcatgcaaaatgggcgagttggatgctctctt

SEQ ID NO: 16071 - DNA, 110 bp, synthetic construct
  source 1..110: mol_type = other DNA
tatgttcacattcacagtgattaaatattaatcagactcctatatcccatgaaatgctagagggaaaatgataattcatacgatattcttagcatctatcatgatgtcac

SEQ ID NO: 16072 - DNA, 110 bp, synthetic construct
  source 1..110: mol_type = other DNA
gctagagggaaaatgataattcatacgatattcttagcatctatcatgatgtcacatatcaaagacatcaatgatatcaaagaattgcatattaaagtggtattttcccc

SEQ ID NO: 16073 - DNA, 110 bp, synthetic construct
  source 1..110: mol_type = other DNA
cctatcaagttcccaggtaagttgatattgtgggtctggagaccacactttgaacaactgctgtaagtcaaatgaagtgttgaatttaaattcttctcttgatccctcaa

SEQ ID NO: 16074 - DNA, 110 bp, synthetic construct
  source 1..110: mol_type = other DNA
aactgctgtaagtcaaatgaagtgttgaatttaaattcttctcttgatccctcaattttctcttccatgtattttatctttttctatccacccaatcctgtctctttaaa

SEQ ID NO: 16075 - DNA, 110 bp, synthetic construct; identical to SEQ ID NO: 16073
  source 1..110: mol_type = other DNA

SEQ ID NO: 16076 - DNA, 110 bp, synthetic construct; identical to SEQ ID NO: 16074
  source 1..110: mol_type = other DNA

SEQ ID NO: 16077 - DNA, 110 bp, synthetic construct
  source 1..110: mol_type = other DNA
tcgccaaccactgcgccacgacgggaactcctgataatgattttttaaatgtggccatcttttgctaaataatgcagaatacacaagtcataacaattaatcaccccaga

SEQ ID NO: 16078 - DNA, 110 bp, synthetic construct; identical to SEQ ID NO: 16077
  source 1..110: mol_type = other DNA

SEQ ID NO: 16079 - DNA, 110 bp, synthetic construct
  source 1..110: mol_type = other DNA
tagatggaaaattatagaccaaatgatttttgctgtgcaaaatttcacaggtagagaaatcttgatttacttcctaactatgccactgtaattctcagctgattttaatt

SEQ ID NO: 16080 - DNA, 110 bp, synthetic construct; identical to SEQ ID NO: 16079
  source 1..110: mol_type = other DNA

SEQ ID NO: 16081 - DNA, 110 bp, synthetic construct
  source 1..110: mol_type = other DNA
tgtcaactatagattcatagcatggggactctagaaagggttttagaagttctatggtctaagtttcttgatttaaagataataaagcggaggtttatggtagtaaaaat

SEQ ID NO: 16082 - DNA, 110 bp, synthetic construct
  source 1..110: mol_type = other DNA
aagggttttagaagttctatggtctaagtttcttgatttaaagataataaagcggaggtttatggtagtaaaaatgcttgttcaaattcataaggtatgttgcaaagtgt

SEQ ID NO: 16083 - DNA, 110 bp, synthetic construct; identical to SEQ ID NO: 16081
  source 1..110: mol_type = other DNA

SEQ ID NO: 16084 - DNA, 110 bp, synthetic construct; identical to SEQ ID NO: 16082
  source 1..110: mol_type = other DNA

SEQ ID NO: 16085 - DNA, 110 bp, synthetic construct
  source 1..110: mol_type = other DNA
ttgtgtccttttctttttagttttcacaaatgtaatgtttggttttgatttgtcattgccctttttttaaaatatgttaaccccttcctatgtctgcttgctttatcctg

SEQ ID NO: 16086 - DNA, 110 bp, synthetic construct; identical to SEQ ID NO: 16085
  source 1..110: mol_type = other DNA

SEQ ID NO: 16087 - DNA, 110 bp, synthetic construct
  source 1..110: mol_type = other DNA
tgggaggcagaggcaactgcaagaagctgccagtctagggaggcagaggcgaccgcaagaaggacccctgttcaactacagacttagtggaaatggtttgttagagatga

SEQ ID NO: 16088 - DNA, 110 bp, synthetic construct
  source 1..110: mol_type = other DNA
tattaaatgttttcagttagcaataggtattatattgcataaggtaccaccacatttaatggttctatagtatgtgttgaagattctgtggttaattttcctaaggctga

SEQ ID NO: 16089 - DNA, 110 bp, synthetic construct; identical to SEQ ID NO: 16088
  source 1..110: mol_type = other DNA

SEQ ID NO: 16090 - DNA, 110 bp, synthetic construct
  source 1..110: mol_type = other DNA
gtaattggtgatgcccattagaaaatagactgggaaaaggggcactaaacaaaacctataatctcagaataagtagaaataataggatgtttttgtttagatcacatata

SEQ ID NO: 16091 - DNA, 110 bp, synthetic construct; identical to SEQ ID NO: 16090
  source 1..110: mol_type = other DNA

SEQ ID NO: 16092 - DNA, 110 bp, synthetic construct
  source 1..110: mol_type = other DNA
tcagtctctcaaactggcctgccatatcttcaggtatgaatggatctgtaaccaaagaggacttaagaaaaatcccagagaaggattctgaccacatggcaagcactgac

SEQ ID NO: 16093 - DNA, 110 bp, synthetic construct
  source 1..110: mol_type = other DNA
agaggacttaagaaaaatcccagagaaggattctgaccacatggcaagcactgacccagagctgaaggacacagtgatagtacaatatcagctacttacataacatttga

SEQ ID NO: 16094 - DNA, 110 bp, synthetic construct
  source 1..110: mol_type = other DNA
gttacaaagggctcagttaaggggtaaagtataaatatctagctgtccatgtcatggcaccccacctaacggtcttatgtcttgcctacatattctctctcatttcctac

SEQ ID NO: 16095 - DNA, 110 bp, synthetic construct
  source 1..110: mol_type = other DNA
aaagcctggcatgagtggaaatacagatgtgaaagctcaaggtgttgagtatagtttaagactggatgtgaatggggcattcagtagaagagatgtaggcagtgttcaga

SEQ ID NO: 16096 - DNA, 110 bp, synthetic construct
  source 1..110: mol_type = other DNA
gacaacaaagtttgaagtgtgtcctggcctggcaattgaaagaaatggtcattgaagtttaggctgttactatattcagaagctaggatgatagtcaggataatatttga

SEQ ID NO: 16097 - DNA, 110 bp, synthetic construct
  source 1..110: mol_type = other DNA
cattcatacaggaaaattgtgtagtcaagtctcttatatgttcatccttccagcaagacaattgactttctttaaatagcctgcataagtatgacctggataattcatgg

SEQ ID NO: 16098 - DNA, 110 bp, synthetic construct
  source 1..110: mol_type = other DNA
agacaattgactttctttaaatagcctgcataagtatgacctggataattcatggggctagtaattgttttctatcattacagtcaggtatcaggaaactaggacaaaac

SEQ ID NO: 16099 - DNA, 110 bp, synthetic construct
  source 1..110: mol_type = other DNA
atttgggtctgtttgccttaatccaattagctactgagctaaattgtgtctggagtctagtttgtcaaggcttactccacctctggcttccacctttttctagaacataa

SEQ ID NO: 16100 - DNA, 110 bp, synthetic construct
  source 1..110: mol_type = other DNA
aaatttttttttgaaatgtctaagcactccgttctccacaaggcctgctctcagatgggttataaggagcctcattgacctgggaaagggaaatacctgattccaaccag

SEQ ID NO: 16101 - DNA, 110 bp, synthetic construct
  source 1..110: mol_type = other DNA
tcatcaagtgaaggggtcactccaaggaaatcactctcagagcttaatgttaccgccaatgggataaaagggcatttcattccctggttggacttctgacacacagcaaa

SEQ ID NO: 16102 - DNA, 110 bp, synthetic construct
  source 1..110: mol_type = other DNA
ttgataaatttaaaatagaccagattgtcagaattatttcctagcaaagacattgctgaatgacatggaattgatgtgttgcagaaatagctgataagggaatagactgc

SEQ ID NO: 16103 - DNA, 110 bp, synthetic construct; identical to SEQ ID NO: 16102
  source 1..110: mol_type = other DNA

SEQ ID NO: 16104 - DNA, 110 bp, synthetic construct
  source 1..110: mol_type = other DNA
actttcctgattaatggtgcaatttccacaaaatctgtataactgggacagctgctttcttgataaaatcttcctgtctatcagtttcaggtgtattgacaataaaggtt

SEQ ID NO: 16105 - DNA, 110 bp, synthetic construct
  source 1..110: mol_type = other DNA
ccaacctcactcagtgggttaagacctagcattgctatgcctatagtgtaggacggaaggtgtagctttgacccctcgcctggtaacctccatacaccatgagtgtggcc

SEQ ID NO: 16106 - DNA, 110 bp, synthetic construct
  source 1..110: mol_type = other DNA
gtggaagtttaatacagccacgttggccatctttattagtatttaaaatatgtggactcagtaatcttgcagctctctatcttagatgactatgctcgtttgtgtaaata

SEQ ID NO: 16107 - DNA, 110 bp, synthetic construct
  source 1..110: mol_type = other DNA
tctctctctctctctctctctctctctctaccatttggggacacagcaagaaagcagctgtcctttacaagccaggaagagagctttcacaaaaaaccaaccattctggc

SEQ ID NO: 16108 - DNA, 110 bp, synthetic construct; identical to SEQ ID NO: 16107
  source 1..110: mol_type = other DNA

SEQ ID NO: 16109 - DNA, 110 bp, synthetic construct
  source 1..110: mol_type = other DNA
accaagaccgggggcagaagtggggtggggcttttatcagtgcaaggaacctgacaacaaagagtctgcctttaaaaatccacacctatattttagactcaaggaaacaa

SEQ ID NO: 16110 - DNA, 110 bp, synthetic construct
  source 1..110: mol_type = other DNA
ctagcaaatgtattttctctgcccaggccaagccagccatgtgaccagaatcttggcactgaaagaagagtttttacccttccccagtactctagctttttattactgac

SEQ ID NO: 16111 - DNA, 110 bp, synthetic construct
  source 1..110: mol_type = other DNA
atcaccaattctgcaacaggtttgactccatgtatgtaccatggctttgcctagacattacctgtggagatgatcaagatgcaacatacaggtgaccaaagagaagatat

SEQ ID NO: 16112 - DNA, 110 bp, synthetic construct
  source 1..110: mol_type = other DNA
tacctatcacctttctgacaggacattcatttggcatcagataagtaaatgtattgaggctggttgtggcgagtacacagctgacctgtatactcatctccctgcagtca

SEQ ID NO: 16113 - DNA, 110 bp, synthetic construct
  source 1..110: mol_type = other DNA
ctgcaagtgctgagcattatcgcggtaactcgagagtgaggcataagtgatttacaacctcatcagctctttgaaatgtgtgtctagcctgatttacagttttctcttac

SEQ ID NO: 16114 - DNA, 110 bp, synthetic construct
  source 1..110: mol_type = other DNA
acctcaatatttaattaaataggatagagactttcagttctaattaagatggaataaacaaactcctgcctgtctctatctctaaatgcagctttaaaacctaaatagtg

SEQ ID NO: 16115 - DNA, 110 bp, synthetic construct
  source 1..110: mol_type = other DNA
aaacaaactcctgcctgtctctatctctaaatgcagctttaaaacctaaatagtgcaaggaacactattttaaggatctgaaagtaaacagtagcaggcacagtggggaa

SEQ ID NO: 16116 - DNA, 110 bp, synthetic construct
  source 1..110: mol_type = other DNA
cattactttccccaatatggttgcactggcaataggtcagcaactggctccagaactgatagatgtcatctacatgttttatagcttaaaggatctttacagcttctgac

SEQ ID NO: 16117 - DNA, 110 bp, synthetic construct
  source 1..110: mol_type = other DNA
tagcaacgtccaagtactaccctcatcattcctgagatgagtcttaatgtgtgtttatgctcataaagaagaacccctaggtcagctcattcctaattctatgaacccac

SEQ ID NO: 16118 - DNA, 110 bp, synthetic construct
  source 1..110: mol_type = other DNA
tatgctcataaagaagaacccctaggtcagctcattcctaattctatgaacccacctttcacatgtatacaaaggactgctaatattgcatattaaggttacgcaaaatg

SEQ ID NO: 16119 - DNA, 110 bp, synthetic construct
  source 1..110: mol_type = other DNA
acttatgcaatgaatgataactgtaatcatttccttatagcagaaaatactttcaaaagatagctagggcaccatctctaattacacacagtcttctgcaataaggttca

SEQ ID NO: 16120 - DNA, 110 bp, synthetic construct
  source 1..110: mol_type = other DNA
aaagatagctagggcaccatctctaattacacacagtcttctgcaataaggttcagttactctctcatcaagagaattacatgttttcacatcccataacctaagaatct

SEQ ID NO: 16121 - DNA, 110 bp, synthetic construct; identical to SEQ ID NO: 16119
  source 1..110: mol_type = other DNA

SEQ ID NO: 16122 - DNA, 110 bp, synthetic construct; identical to SEQ ID NO: 16120
  source 1..110: mol_type = other DNA

SEQ ID NO: 16123 - DNA, 110 bp, synthetic construct
  source 1..110: mol_type = other DNA
gagaggctgtgctggacaaaaccagcctaaagctctggatcacctgcttccattacccctgcccagggcttcaagtgcccttcacacctttgcttcctggagggagagca

SEQ ID NO: 16124 - DNA, 110 bp, synthetic construct
  source 1..110: mol_type = other DNA
taaaaattagtactgcattcagactatggggtattttgtttagattgaagtatatccagaaaatctggcttaacctggacatatcattggaaaaaagaggatctcttata

SEQ ID NO: 16125 - DNA, 110 bp, synthetic construct
  source 1..110: mol_type = other DNA
ccagaaaatctggcttaacctggacatatcattggaaaaaagaggatctcttatacaccctgaaagaattctagggacacttgggggcctttggaccaaattgataactg

SEQ ID NO: 16126 - DNA, 110 bp, synthetic construct
  source 1..110: mol_type = other DNA
gcgtgccagattgcctttgatataagttggtcgtaaaaatgctaaagggttagtatttatgatccttgtaggttataataacatacttcctgtgttattactttaacaga

SEQ ID NO: 16127 - DNA, 110 bp, synthetic construct
  source 1..110: mol_type = other DNA
tggctgtggtggagctcagtattcagctgaggagctcaggtcaggattcctatgagtggacctgccttgaactatcccaggtaatccagttaattattagacctttagca

SEQ ID NO: 16128 - DNA, 110 bp, synthetic construct
  source 1..110: mol_type = other DNA
acataaaagtgtggaagcatagcaatggagagcttctgctatgaggttctcatattatacatgaattggtattatagcacctaaaagtacactctaataatttaaaggtg

SEQ ID NO: 16129 - DNA, 110 bp, synthetic construct
  source 1..110: mol_type = other DNA
gttctcatattatacatgaattggtattatagcacctaaaagtacactctaataatttaaaggtgtatacgacaaaaactaaagcttccacatttgaacactcaacggat

SEQ ID NO: 16130 - DNA, 110 bp, synthetic construct
  source 1..110: mol_type = other DNA
cacctattattggagtactcagtgacactaaacgttggatacaggtgcaggttgaaggagagctcttctttatacacatctaaatattaagggatgtctacggtaataaa

SEQ ID NO: 16131 - DNA, 110 bp, synthetic construct
  source 1..110: mol_type = other DNA
acctaaattgatgtcattttattttggagcttagaggaagtgaggttcaggaactcaaaactgacagaaaccaatggatggtgacagaaaccaatggatggtggacattt

SEQ ID NO: 16132 - DNA, 110 bp, synthetic construct
  source 1..110: mol_type = other DNA
ctgaatgtgaacctctctggactggttttctctaaaccaggctgcattcctaagatatgatatatttcacattttatagctatgaattatagtggcattaaaacagaaca

SEQ ID NO: 16133 - DNA, 110 bp, synthetic construct
  source 1..110: mol_type = other DNA
gcaagtagatcggagctgcatgatctaaggatggccactcagatgcttttgttgggaatgctgaatttagaggatatgatgttaagacagagactcagttaagagataat

SEQ ID NO: 16134 - DNA, 110 bp, synthetic construct
  source 1..110: mol_type = other DNA
gaatgctgaatttagaggatatgatgttaagacagagactcagttaagagataatttgaggcagttgtcatagagtaaaaggtcgagaagctgctattcttgtacaggac

SEQ ID NO: 16135 - DNA, 110 bp, synthetic construct
  source 1..110: mol_type = other DNA
ttacatccaaaaagaatggattcatttcttgaagatgtgggaagttaaaaacacggtcatcatagcttgactagaaaaagattttgctgcctaaaagatatggcgtattt

SEQ ID NO: 16136 - DNA, 110 bp, synthetic construct
  source 1..110: mol_type = other DNA
ggccaagtttggagcctagatttctaccttcgttaagctgtaatgaggtgccccaacacccctcccagggttgagtcagaccttcaagtagtgagctttgactttcatct

SEQ ID NO: 16137 - DNA, 110 bp, synthetic construct
  source 1..110: mol_type = other DNA
aaagatggtttgaaatctattctgaacattatgcaatgtttatggattattccgatttcaatcagctataggccccatactaaagggtggagtgaagatcttgctctagt

SEQ ID NO: 16138 - DNA, 110 bp, synthetic construct
  source 1..110: mol_type = other DNA
tgccacaagagaactctcaaagtgttttattatggatgctaacagagcaagctttttagactactttgttgtgtaaatgaacactgttctgtttgtaccataagaacaga

SEQ ID NO: 16139 - DNA, 110 bp, synthetic construct
  source 1..110: mol_type = other DNA
ttttagcaactttctgcttcacttagcagcatatcctggacatctttccaggccaacgtacttcagttcactttattcttttgtatgctgcctggtaatccagcaatagc

SEQ ID NO: 16140 - DNA, 110 bp, synthetic construct
  source 1..110: mol_type = other DNA
acgtacttcagttcactttattcttttgtatgctgcctggtaatccagcaatagccaatagctggattaatgtcactggaagagagtccgaggttgcagcctttttatct

SEQ ID NO: 16141 - DNA, 110 bp, synthetic construct; identical to SEQ ID NO: 16139
  source 1..110: mol_type = other DNA

SEQ ID NO: 16142 - DNA, 110 bp, synthetic construct; identical to SEQ ID NO: 16140
  source 1..110: mol_type = other DNA

SEQ ID NO: 16143 - DNA, 110 bp, synthetic construct
  source 1..110: mol_type = other DNA
ggtatccgagttacctacgagccatccactgaagtccgaaagtgaccttctgcctagctgtcattaccctgagctaccaccttagttctgaatctggggttttgctctcc

SEQ ID NO: 16144 - DNA, 110 bp, synthetic construct
  source 1..110: mol_type = other DNA
ctatgttggaactgcccctggaatccatctttctaattccaggtgttccagggatcccagagctgctgggcgaggaacatgctctggtactgtatggactcactaaagcc

SEQ ID NO: 16145 - DNA, 110 bp, synthetic construct
  source 1..110: mol_type = other DNA
cccagagctgctgggcgaggaacatgctctggtactgtatggactcactaaagcctcatggggttaggattctagtgccacagtaagtttttggtgccaattcgtggagg

SEQ ID NO: 16146 - DNA, 110 bp, synthetic construct
  source 1..110: mol_type = other DNA
atgtgggcttgaggaagagacctgaggagagcagaacaggtgggttcctaggatacccatcctttaaagaccttccaagaacctaggaaggctcagttttcataaggcac

SEQ ID NO: 16147 - DNA, 110 bp, synthetic construct
  source 1..110: mol_type = other DNA
ccattttagtaaacatctttattattgaaagagctcatacaacagacactccgagagacagtcaaaagacttgaagaatttaggaaagaaaacatgcatttactaatcaa

SEQ ID NO: 16148 - DNA, 110 bp, synthetic construct
  source 1..110: mol_type = other DNA
agacagtcaaaagacttgaagaatttaggaaagaaaacatgcatttactaatcaaccatggaaaaattatcagcttcgcaaggaatcatggatatgcaaatgaaagtatg

SEQ ID NO: 16149 - DNA, 110 bp, synthetic construct
  source 1..110: mol_type = other DNA
taatactctttttcagcagctctcaaaactagactccacagagattatgtaccagtcacgaaggtgtttactagccctcaaaaggcccttccgagaactcttaaaactta

SEQ ID NO: 16150 - DNA, 110 bp, synthetic construct
  source 1..110: mol_type = other DNA
ttcaccaagcagttcctaattacatcagaggtgctgtgtggtcattatgtcacccagctggaaacagtaaggcttactgggcagtgttcacttttccagcctgcttttcc

SEQ ID NO: 16151 - DNA, 110 bp, synthetic construct
  source 1..110: mol_type = other DNA
aatttatatccagaaaattaacaattgattacattatgcttgcatccattgttaataaatctaagtgagtgtgtctcttagatgctttgggtaatagggaaaaaaagcag

SEQ ID NO: 16152 - DNA, 110 bp, synthetic construct
  source 1..110: mol_type = other DNA
acctgaggctatgtcctttctcagctctttttcccaatcctgcttaactctctcccttgctaagtttttcttgacgagcactccctcagtaattgatgtacatcccaacc

SEQ ID NO: 16153 - DNA, 110 bp, synthetic construct
  source 1..110: mol_type = other DNA
gtaaggacacccaaatctgttataacctcatcttaatttggttacacttggaaagaagctatatccaaataaaggtgacattcacaggttccaattggacatgaagtttt

SEQ ID NO: 16154 - DNA, 110 bp, synthetic construct
  source 1..110: mol_type = other DNA
ggcatatcaggccttggcaggccatggctggcgccactctgctttctttgaaccctctcttctcttgctctggctagttcattagctgccagcaggctgcagcctcgttt

SEQ ID NO: 16155 - DNA, 110 bp, synthetic construct
  source 1..110: mol_type = other DNA
catgcaataagttgctgagctaggatgtgaacagggctgttcttctcctgataggaggttgctgcccagtttatgaagagaccacaagatgaatgaagattttctgacaa

SEQ ID NO: 16156 - DNA, 110 bp, synthetic construct
  source 1..110: mol_type = other DNA
aatcaagtccctttttcagcaattttaagtttatactaagaaaccacaacttcggtgtgatggcttttttctatggccaatcccaatccagagaatatgattttaaggat

SEQ ID NO: 16157 - DNA, 110 bp, synthetic construct
  source 1..110: mol_type = other DNA
ctactccaggtgatttataggttcatgagaattttctaacaaattattgtaattcatcagaaatgattgggttttctcaatttataagttattcaaattctgtgctggcc

SEQ ID NO: 16158 - DNA, 110 bp, synthetic construct
  source 1..110: mol_type = other DNA
atcagaaatgattgggttttctcaatttataagttattcaaattctgtgctggccggggcgagagccttatcgtttctcatgatgacaggcagtgtctgactcaaggggt

SEQ ID NO: 16159 - DNA, 110 bp, synthetic construct
  source 1..110: mol_type = other DNA
aaatagaaatgctcgatgcttctttcaagattagatgtggtcttctcccatcttcaatgagcagctatggttatttctttaaggtaaagctctaccccaagctcaaggaa

SEQ ID NO: 16160 - DNA, 110 bp, synthetic construct
  source 1..110: mol_type = other DNA
ttctgattgttcatggcccaatccaaaccatctaacactctggctcctactaagagttttagaataaacaaaagaaagaactacaactatttaacgcagtaggttctaca

SEQ ID NO: 16161 - DNA, 110 bp, synthetic construct
  source 1..110: mol_type = other DNA
aagaaaaagagagaccaatgaatggacacatgctcatgcagagaggcttattctgggtcctggagtgcaagcttggaaccctagccttgctgggcctcagatggtaagag

SEQ ID NO: 16162 - DNA, 110 bp, synthetic construct
  source 1..110: mol_type = other DNA
cttgcctctttctaggttgttgggagggagaggcgggcttctctttctctcattctgccctctcttagtcctcaaaatgacccggttttcttaacaagcatcattagaaa

SEQ ID NO: 16163 - DNA, 110 bp, synthetic construct
  source 1..110: mol_type = other DNA
tgccctctcttagtcctcaaaatgacccggttttcttaacaagcatcattagaaatacactttataaaaggaagaagatccctgtaagatcagttcaacataaaggaatt

SEQ ID NO: 16164 - DNA, 110 bp, synthetic construct
  source 1..110: mol_type = other DNA
gtcaggaaagtgacatctgggctgacacctaaatgttgggaaggaagtggctgtctaaagacctgggaaagatcattccaggaaaaaaggagcacagctggggcaggagt

SEQ ID NO: 16165 - DNA, 110 bp, synthetic construct
  source 1..110: mol_type = other DNA
taaagacctgggaaagatcattccaggaaaaaaggagcacagctggggcaggagtgagccagttcccagtgaataaggaggaagtgggtttgctagggtgggatcagatt

SEQ ID NO: 16166 - DNA, 110 bp, synthetic construct; identical to SEQ ID NO: 16164
  source 1..110: mol_type = other DNA

SEQ ID NO: 16167 - DNA, 110 bp, synthetic construct; identical to SEQ ID NO: 16165
  source 1..110: mol_type = other DNA

SEQ ID NO: 16168 - DNA, 110 bp, synthetic construct
  source 1..110: mol_type = other DNA
ttctaagatattttccaagattttaaggaatacctcaaaatgcaagctgggtccaactctctgcatttttttttcccctaggagcacaaatttgcttagaacatcgcaca

SEQ ID NO: 16169 - DNA, 110 bp, synthetic construct
  source 1..110: mol_type = other DNA
agaaggaataggaaaggctcaaagtccatagacccctgagctgacctaaggcctaggccgtgtctaactctgcttaacacactgagaaaagaagttaaatacaagccaga

SEQ ID NO: 16170 - DNA, 110 bp, synthetic construct
  source 1..110: mol_type = other DNA
agccttcacctaaggataggagtttgatgagattttgcagatttcttccccattcatttctctccctaataccctgaccaagaaaaaagttaattgttccagatgaaata

SEQ ID NO: 16171 - DNA, 110 bp, synthetic construct
  source 1..110: mol_type = other DNA
aatggtttcctaaaacttctgaaagtatctgtatgtgagacccttggtagctaatgttgataaattagtgttatttaaaccgcaatccatatgcaaaattcccccaaaga

SEQ ID NO: 16172 - DNA, 110 bp, synthetic construct
  source 1..110: mol_type = other DNA
gttgataaattagtgttatttaaaccgcaatccatatgcaaaattcccccaaagagcctttctgctatcctgccccagggtccagttaaggatcctgcactgcttttgac

SEQ ID NO: 16173 - DNA, 110 bp, synthetic construct
  source 1..110: mol_type = other DNA
acattacctgatccttaacctgctgagccaccatggggaattcccaacatttctttgttttaaatcagcatgtgtttaaccaaagttagggtaggatgagtaaaagtctt

SEQ ID NO: 16174 - DNA, 110 bp, synthetic construct
  source 1..110: mol_type = other DNA
aggagggaaggagtgttggacagagagaaccactgggcacatgcatcaagacacacgagaggacagcacagcagggggatgtgcattgctcaagctcttgagtaacatga

SEQ ID NO: 16175 - DNA, 110 bp, synthetic construct
  source 1..110: mol_type = other DNA
cgagaggacagcacagcagggggatgtgcattgctcaagctcttgagtaacatgatagaatattgtcagtgagatagtgttatcaccattttgccaaaaaggaaaccgat

SEQ ID NO: 16176 - DNA, 110 bp, synthetic construct
  source 1..110: mol_type = other DNA
gtcagtatccccttttcaaataattagaactgtgtcaatattatttataaccaaggctcatcatttacctttaaaggggttgtaattccccagctacctctagtgaccag

SEQ ID NO: 16177 - DNA, 110 bp, synthetic construct
  source 1..110: mol_type = other DNA
gctcatcatttacctttaaaggggttgtaattccccagctacctctagtgaccaggagaaactgtgcccttttgatttaatgagggcaggcttttctctgagtccaggct

SEQ ID NO: 16178 - DNA, 110 bp, synthetic construct
  source 1..110: mol_type = other DNA
aaacaaggcccagtttactcagcttaacaagtgccagctgttcccagcccaggatcccatctacctcctacctcaggtccattttctcctttcatctgggctcatggtag

SEQ ID NO: 16179 - DNA, 110 bp, synthetic construct
  source 1..110: mol_type = other DNA
gtgagctgcattctgataaatagtcctaagtttaaatctctacttaaaacccaatgtgctggtaaggcaagaaaacagaggttttattaacgtgtatttaatttctggta

SEQ ID NO: 16180 - DNA, 110 bp, synthetic construct
  source 1..110: mol_type = other DNA
ctctgtatgtcaggaaagatgggctgaagttgctgcttacacagaaatgatgaggatttgattaaaatattttaaaagccttgattttgcttaaataagcagcatgtttg

SEQ ID NO: 16181 - DNA, 110 bp, synthetic construct
  source 1..110: mol_type = other DNA
gctccccaatgacctcacagtcaaggacggccgtgtctccagccttgactctcgtgttggccctagaaccctgccggatccgtggggcagctgttatgaccgttaggtga

SEQ ID NO: 16182 - DNA, 110 bp, synthetic construct
  source 1..110: mol_type = other DNA
gttggccctagaaccctgccggatccgtggggcagctgttatgaccgttaggtgaactttcatctcatccttccctagcgtattctgggcatagcaggtataatctcctt

SEQ ID NO: 16183 - DNA, 110 bp, synthetic construct
  source 1..110: mol_type = other DNA
tggaaggataattacatttgcagaggttctccccaagtaatgagggttccaagtcccacactgagctcttttagcctgtggtgtcctacactgagagtatgagtgccaga

SEQ ID NO: 16184 - DNA, 110 bp, synthetic construct
  source 1..110: mol_type = other DNA
ttgcatttccctaatgtcaaataagattgagcataaatgcttattttccttccatataggtctcttgatgaagcatctgctcagtgtttttcccatttaaaaaactgggt

SEQ ID NO: 16185 - DNA, 110 bp, synthetic construct
  source 1..110: mol_type = other DNA
ataggtctcttgatgaagcatctgctcagtgtttttcccatttaaaaaactgggttgttttcttattctcaagtcttgagattttcagtctttcatgattaaatatgaag

SEQ ID NO: 16186 - DNA, 110 bp, synthetic construct
  source 1..110: mol_type = other DNA
gaaaatggcctggcaggtcatgagatcctagagcttgccagtgaaaacgtttggcttgctctggcagaacccagacgatgtatcatctctggtggagtgtccttctgacc

SEQ ID NO: 16187 - DNA, 110 bp, synthetic construct
  source 1..110: mol_type = other DNA
cccagtcccagtttggtttagcacagaaacaggaaaatatattcagtcttcaaattttttagctccagtgcagtaaagtatgattattttattcctcactgcaaataact

SEQ ID NO: 16188 - DNA, 110 bp, synthetic construct
  source 1..110: mol_type = other DNA
tgtgctaaccaaatcaagaggaatcgcagaagccactgtatagtccagcaccatttgttagctcttgaactaagcaaccctctcatatatatatccttcttggtctgtta

SEQ ID NO: 16189 - DNA, 110 bp, synthetic construct
  source 1..110: mol_type = other DNA
acatcttggtcattccttgattcttttggaagtctttcaaatgaaattgagaaggtgagaatagagaaagtgagcttgagcatgaccagaaaagagttgtatagttatgt

SEQ ID NO: 16190 - DNA, 110 bp, synthetic construct
  source 1..110: mol_type = other DNA
ctatatttatatctttgtactcctttagctccatgatagccacctaggatagtctaagttttctgtctcctaatgtaagatccaacacatttgaagttccctattagtca

SEQ ID NO: 16191 - DNA, 110 bp, synthetic construct
  source 1..110: mol_type = other DNA
ttattcttgccccttatccttcctgctatttaaaagaagacttgagtaataaccaaaagtggacaaagccattgcattagtcataaatccatgtattacatttcaaacac

SEQ ID NO: 16192 - DNA, 110 bp, synthetic construct
  source 1..110: mol_type = other DNA
gtaataaccaaaagtggacaaagccattgcattagtcataaatccatgtattacatttcaaacactacatgttcaattctaaatcagcacactaatactctgaattactt

SEQ ID NO: 16193 - DNA, 110 bp, synthetic construct
  source 1..110: mol_type = other DNA
tggcacttattcccttcttttgaagttatggctataaccaaaggagaggaagatgcttttactttagagctttggcttttgtagttttccatagatctctctctctctct

SEQ ID NO: 16194 - DNA, 110 bp, synthetic construct
  source 1..110: mol_type = other DNA
gataaagccacaagtagcatcatactcaatgttgaaaagctaaagcttttcctctaaatttacaatcccaagacaagaatgtccactcaccacttctctttatcatagta

SEQ ID NO: 16195 - DNA, 110 bp, synthetic construct
  source 1..110: mol_type = other DNA
agggctggaatcaggtccattgtaagttcttccttctttttaaactaaggctggtcctgcaacagtggttcctgttatttttctttaattcaaggacttgaaaatctaat

SEQ ID NO: 16196 - DNA, 110 bp, synthetic construct
  source 1..110: mol_type = other DNA
gtgaaatgcaaatcaaaactgcaaagagctatatctcacacctgccagggtggctactatttaaaaaaaaataacagaaaataataaatattgatgagaatgtggagaaa

SEQ ID NO: 16197 - DNA, 110 bp, synthetic construct
  source 1..110: mol_type = other DNA
gatcatagttatggatagagttgctttagggaaattttcagctactatagtccagcagtgatgttaagtcaggatttgggacagcatattattatagtatacattcaaga

SEQ ID NO: 16198 - DNA, 110 bp, synthetic construct
  source 1..110: mol_type = other DNA
catatcttcaggaccatggcaaataatgtaactatgtgacttgcaaagttaggctaagtgtgaagtagagagcgctgcccctccccacatcccatccccaaggactttat

SEQ ID NO: 16199 - DNA, 110 bp, synthetic construct
  source 1..110: mol_type = other DNA
ggaaatattgaacagcccgaataagaattagcactgctattttaatcaggtgaaccctggatttttaaagctcaaacaggcaacaattctaatacaggaagcactgcgaa

SEQ ID NO: 16200 - DNA, 110 bp, synthetic construct
  source 1..110: mol_type = other DNA
ctaatttgaaaaatactattgaagatgcttgctttaaagctttggtgccgaaatcagactgcctgagtacaaacccaaatttatagctgttaatccattaatactatgag

SEQ ID NO: 16201 - DNA, 110 bp, synthetic construct
  source 1..110: mol_type = other DNA
gtaaaccataagggaggcaatagctcaagtcatctctcccctttgatgagtttcgccatggccacaacctgtctggctgcccagacagcttgtatcagctcatgttcaat

SEQ ID NO: 16202 - DNA, 110 bp, synthetic construct
  source 1..110: mol_type = other DNA
ggggttgcaagtttacatgtgaacagcagaaaatgtacaggtctcaagtcagtcttaccataacagctctatatccttaaaagggaatgttttctcccccataatcaaaa

SEQ ID NO: 16203 - DNA, 110 bp, synthetic construct
  source 1..110: mol_type = other DNA
gtctattaggatcttgaaagaaagcaggatggaagaaaatacaggggcagctctagtcctcagtgacagtaggatcatgattaggctgcaaagatgagtaaaacagggtt

SEQ ID NO: 16204 - DNA, 110 bp, synthetic construct
  source 1..110: mol_type = other DNA
gaggatggatggcttagggaattctgtagggtgcataccaacttttatttttaaactgttcatttacttagagttccagtctgtatgtgctgttagtgattaacccacct

SEQ ID NO: 16205 - DNA, 110 bp, synthetic construct
  source 1..110: mol_type = other DNA
tctagtacagtagcaatctcatgcccatggctcattggattggcttcatcactctctgagggtcagcttctcctcatatcttcctctaatctcagtggttttctttttct

SEQ ID NO: 16206 - DNA, 110 bp, synthetic construct
  source 1..110: mol_type = other DNA
ataatattttaagagtccttcctacatccttttcttctcacgttcattcctcttcttgaatgatattattcacccagactgtcaacttccccttaccattgtagccaaga

SEQ ID NO: 16207 - DNA, 110 bp, synthetic construct
  source 1..110: mol_type = other DNA
tattgctacttcgggcccagagggtaatggttcccagctgttagtagccctaggatgttgcactatcccctgttgatttccctgaaccttgcttacattttcctaaatct

SEQ ID NO: 16208 - DNA, 110 bp, synthetic construct
  source 1..110: mol_type = other DNA
gctaagcaataaccctacttaacagtactccacaatagcctcgaccagtcgcttccactagcatcctgtaccagttgcaacattgcaacagcaggaaggcattatgtagc

SEQ ID NO: 16209 - DNA, 110 bp, synthetic construct
  source 1..110: mol_type = other DNA
cactagcatcctgtaccagttgcaacattgcaacagcaggaaggcattatgtagcccacatacaggatacccatttagtcctggttctggtggccagttggaattgaaca

SEQ ID NO: 16210 - DNA, 110 bp, synthetic construct
  source 1..110: mol_type = other DNA
gcataaataaaaaaaacattctgaatttgtagtgatagctgatggtagatttggaaaacaaggatagctgtgggggattcccattgtggctcagcgataatgaacccgac

SEQ ID NO: 16211 - DNA, 110 bp, synthetic construct
  source 1..110: mol_type = other DNA
gcctattctcatgcttggtgctgcaaaagctcagtggggataaaatagcagcacgaatctttaaatgactgcttatggagtcaactgttggagccctagcccctaatacg

SEQ ID NO: 16212 - DNA, 110 bp, synthetic construct
  source 1..110: mol_type = other DNA
caacacaaaagggaaagtttacacttttcccttcaaaattcttatttttcccatgaggactcctataataaagtatctgattcgatttttgatgcttgattacagacaac

SEQ ID NO: 16213 - DNA, 110 bp, synthetic construct
  source 1..110: mol_type = other DNA
aggactcctataataaagtatctgattcgatttttgatgcttgattacagacaacttttaagttttaccccatccctcataccttctgccccccgtctgggcaagctaag

SEQ ID NO: 16214 - DNA, 110 bp, synthetic construct
  source 1..110: mol_type = other DNA
cttggacttccctgaactccctggtgactgaaatgcataggccaccttggaattgggatagttgtctttgtgttgaccatgaaccacacctccttgaatacctctgctcc

SEQ ID NO: 16215 - DNA, 110 bp, synthetic construct
  source 1..110: mol_type = other DNA
gttcaatccttgttatacatggtggaaattcaatagataatggctaaaactgaaaaatcgaggagtaaccattttaaaaagcatgttgtttggagttcctactatggtgc

SEQ ID NO: 16216 - DNA, 110 bp, synthetic construct
  source 1..110: mol_type = other DNA
aatcgaggagtaaccattttaaaaagcatgttgtttggagttcctactatggtgcagtaggttaagaatccaactgcagtggtctgggtcgctgcagaggtacaggttca

SEQ ID NO: 16217 - DNA, 110 bp, synthetic construct
  source 1..110: mol_type = other DNA
ttttttttttttttggtggggggaatatgttggctactcagatcccttccaccatggatgcagcaagctgaccctccttttcaaccctgcagggggcttccagggttggg

SEQ ID NO: 16218 - DNA, 110 bp, synthetic construct
  source 1..110: mol_type = other DNA
ggaaggaaggggctgaaaagacaaggaacaggaagcaacaatggtacagctttgaggcagtattctggttccctctcaagagatacacatagtgatgcagacatcttata

SEQ ID NO: 16219 - DNA, 110 bp, synthetic construct
  source 1..110: mol_type = other DNA
gaacaggaagcaacaatggtacagctttgaggcagtattctggttccctctcaagagatacacatagtgatgcagacatcttatatacccaagagtaacattatattcct

SEQ ID NO: 16220 - DNA, 110 bp, synthetic construct
  source 1..110: mol_type = other DNA
aaatgtctctcttacgtctttcatcaaaagaaaaataaacaattaaaaataatgtgctacagaggctgacttaaaacacgatccttccatttcaagatctccatattgct

SEQ ID NO: 16221 - DNA, 110 bp, synthetic construct
  source 1..110: mol_type = other DNA
gctacagaggctgacttaaaacacgatccttccatttcaagatctccatattgctcacattaatggttgttaaaatgctaattcaactagtttagcaagtttgtgattgc

SEQ ID NO: 16222 - DNA, 110 bp, synthetic construct
  source 1..110: mol_type = other DNA
gaggagatgaccccaaaggttaattaatgtcacactgaggttttatgacatgctctagtttcctcctgtcaattctgccccctggcaaagcatgacctccggaagcaatc

SEQ ID NO: 16223 - DNA, 110 bp, synthetic construct
  source 1..110: mol_type = other DNA
tagtttcctcctgtcaattctgccccctggcaaagcatgacctccggaagcaatctcaagtcatccagatgctttcattttttcctgtttgcgctatgaacagtgattct

SEQ ID NO: 16224 - DNA, 110 bp, synthetic construct
  source 1..110: mol_type = other DNA
gctctgtaggactgagccaaccacccaccacctaattgtaattctagggcctctgtcaagatgcttgactgctgggtctcccatggttctcagcttcagggaggctcccg

SEQ ID NO: 16225 - DNA, 110 bp, synthetic construct
  source 1..110: mol_type = other DNA
aagtgagtttttctcctacatcacttcagttgaaaatgtcaaaaattactcagcgaacaagtgtaagcatttgcaattatcaagctgacaatgtcacaggaaacacaaca

SEQ ID NO: 16226 - DNA, 110 bp, synthetic construct
  source 1..110: mol_type = other DNA
aaaatagcacctatgcaattaactgatcagaaatcagtagttaggaggttgaaaagcttgggagcttagggcattcccagagagcaaggtaaaacaaaagtgaaggttgc

SEQ ID NO: 16227 - DNA, 110 bp, synthetic construct
  source 1..110: mol_type = other DNA
atctcatttataattctgtttccaccaccttcatttgtctcttattatgcatagataattgcaacttggaaactgatattcccagtcttggaactctgtacttcaataaa

SEQ ID NO: 16228 - DNA, 110 bp, synthetic construct
  source 1..110: mol_type = other DNA
taattgcaacttggaaactgatattcccagtcttggaactctgtacttcaataaatttcaaacaaaacatttccttctggtataaccagagttatggtcacagggatttt

SEQ ID NO: 16229 - DNA, 110 bp, synthetic construct
  source 1..110: mol_type = other DNA
agctggctttttctcaagagagtatttcaatttttatgagctctgcatttcccgggtcatattggcctgggattaaaaataggaacagaggagcaaaaacaaacagtaat

SEQ ID NO: 16230 - DNA, 110 bp, synthetic construct
  source 1..110: mol_type = other DNA
atatgagtggctctggaatgcctcttcttgctgaggaatgagtgactgagcccctagaactgagaagaggcaggctatacaaatcctgagattgtcacattaaccaccct

SEQ ID NO: 16231 - DNA, 110 bp, synthetic construct
  source 1..110: mol_type = other DNA
gtgcactgtagacccaggtccagtgccaggaagatgatcccctggggcttacccgaaggctctaagaaactgagactccactcttaaagagtgagcacacagatctgctt

SEQ ID NO: 16232 - DNA, 110 bp, synthetic construct
  source 1..110: mol_type = other DNA
gactcctggcctcctgaaatgtgaaagaatacattttttttttaagctgctcaatttatagtaatttgttatggcaacactaggaaactaatacagatgttggtcctaga

SEQ ID NO: 16233 - DNA, 110 bp, synthetic construct
  source 1..110: mol_type = other DNA
taagacagcaagaaagtagagatggagtggatttaggatttgtcagccctgggttaatagctgaagacttgagggtatttgagttcttaaaaggagaagagttataaaga

SEQ ID NO: 16234 - DNA, 110 bp, synthetic construct
  source 1..110: mol_type = other DNA
tccaccatctttcatttctccattagagcccttgccctggtcctccttcatatgagctatttgatgtgtatgttggatactccatgtgaccgtcctatggaggtagggac

SEQ ID NO: 16235 - DNA, 110 bp, synthetic construct
  source 1..110: mol_type = other DNA
acaaagatccctgccctcccaaaattacattcagaaaggtgctaagcgctatgaaaaaagaagtaaggatgaccatggctagtaattaggttgatcctaaatccagcttt

SEQ ID NO: 16236 - DNA, 110 bp, synthetic construct
  source 1..110: mol_type = other DNA
tgttttttgcaagtcccttgttcctgctccctttttcctagaaaagtgttttattttgtacagcttttcagagctcctttttgtctgctaaattgtgatgttgcctgatt

SEQ ID NO: 16237 - DNA, 110 bp, synthetic construct
  source 1..110: mol_type = other DNA
agaatgtttgcacatcatgcatgtcttaacaacctgactctgtgaggaaggcagccttccattttcacaaccagctttcccggaagtttcctgcccaaagatcacaaggt

SEQ ID NO: 16238 - DNA, 110 bp, synthetic construct
  source 1..110: mol_type = other DNA
cttccattttcacaaccagctttcccggaagtttcctgcccaaagatcacaaggtggtaggaagtttccacagttaacagactgttatgaactacagctgcttagagcca

SEQ ID NO: 16239 - DNA, 110 bp, synthetic construct
  source 1..110: mol_type = other DNA
tcttctgatggcttggctaacgaccatttagggaatatggaacatttacaaggctataaaggtgacactgagctttctaatccagcagtcagttttcaccacaatagttt

SEQ ID NO: 16240 - DNA, 110 bp, synthetic construct
  source 1..110: mol_type = other DNA
gcagacacacctgggttcaattccaagactactccatactcacctaaatcttgggcaagaaactaatcttcaagcctcatcaataacatgggataataattcctgcaatt

SEQ ID NO: 16241 - DNA, 110 bp, synthetic construct
  source 1..110: mol_type = other DNA
caagaaactaatcttcaagcctcatcaataacatgggataataattcctgcaattctcttgattattatgtgttaaagtgacctaaagtaaatgcccaggcacatggcag

SEQ ID NO: 16242 - DNA, 110 bp, synthetic construct
  source 1..110: mol_type = other DNA
aggctgtctcagcctctcctacttgtttcagtatattttttccctcatttggacaatgaatagtagttgctcagctagttttgggggtgtttttcagaggaaatttttcc

SEQ ID NO: 16243 - DNA, 110 bp, synthetic construct
  source 1..110: mol_type = other DNA
tcctcatggatactagtttataacctgctgagttcacaacgtgaacgcctgtcgatacatttctttttcttttttaaaaatacgtttctttttatgcatacacacaactc

SEQ ID NO: 16244 - DNA, 110 bp, synthetic construct
  source 1..110: mol_type = other DNA
cctacaaaatcttttcttcttttaaactaatttgtatcagatcatagagactgctttttcagtccttggaggtggaatgcagaatttaacatttcaggtatttgaaaaat

SEQ ID NO: 16245 - DNA, 110 bp, synthetic construct
  source 1..110: mol_type = other DNA
tcatgaggctttttcacaccaagaaggaaacaaatatccatctgtaaaagaagaagctcgtgggattggtaagaaagaggctgtcctatagggagttgtttccagaagag

SEQ ID NO: 16246 - DNA, 110 bp, synthetic construct
  source 1..110: mol_type = other DNA
gctcgtgggattggtaagaaagaggctgtcctatagggagttgtttccagaagagaaagaaagtagaaagttcttctggtactcggagatggaagtggctgaaaaagagg

SEQ ID NO: 16247 - DNA, 110 bp, synthetic construct
  source 1..110: mol_type = other DNA
tcgtgtatttttgcattattcttgggtttatgagtttacacacctctcttctcaattagataattggaagagaaggaaagagacattttgctgaaaaaggcccatgcaag

SEQ ID NO: 16248 - DNA, 110 bp, synthetic construct
  source 1..110: mol_type = other DNA
ttagataattggaagagaaggaaagagacattttgctgaaaaaggcccatgcaagaacagctaaaaccaagaaggaagcctgaatttccaaaatcgaaatcaattctcaa

SEQ ID NO: 16249 - DNA, 110 bp, synthetic construct
  source 1..110: mol_type = other DNA
aagacacatagggctcatctaaagcacctgacaagtgttgtctagcaaagcatactcctcttaagggaaagaaaagcctggaagaaagtctgaatgtcagatgcctcaac

SEQ ID NO: 16250 - DNA, 110 bp, synthetic construct
  source 1..110: mol_type = other DNA
tctcagttagaggggtagctttgcagtggtcgatctgatttcacacagattcccttccattctcaagtcttctggaacatcaaaattcaaagcatggattaggtaataaa

SEQ ID NO: 16251 - DNA, 110 bp, synthetic construct
  source 1..110: mol_type = other DNA
cagagtttacccaccccaattccttatcccagtttggtcctttttacaatatcgaacactttaatggcaggttcgtccctagattttaggataacccctttagtggatgg

SEQ ID NO: 16252 - DNA, 110 bp, synthetic construct
  source 1..110: mol_type = other DNA
tgcacagaaagagacgccatcagcgtaagtattcatgggagagtctccagggaagtgctatggaaggtgggggtgagcatggagagttggcctgcagagctttctaaaca

SEQ ID NO: 16253 - DNA, 110 bp, synthetic construct
  source 1..110: mol_type = other DNA
tgctatggaaggtgggggtgagcatggagagttggcctgcagagctttctaaacaaggaggattaatgtgtgtgtggacatgcagagaggctttatcttcagaacacatt

SEQ ID NO: 16254 - DNA, 110 bp, synthetic construct
  source 1..110: mol_type = other DNA
aaagtgtcacacctctgaccaataattacctcaagtcctctaaacactgaccagctgttccacaaatttagctcaattctgacaccacatacgtgaagagagtgtcagat

SEQ ID NO: 16255 - DNA, 110 bp, synthetic construct
  source 1..110: mol_type = other DNA
tgttccacaaatttagctcaattctgacaccacatacgtgaagagagtgtcagatcccacaggagaagggctcagccccacaggactgacccccacctcccatttcagat

SEQ ID NO: 16256 - DNA, 110 bp, synthetic construct
  source 1..110: mol_type = other DNA
ttacacaaaacaaaacaaaacaaaaccctcaaaagcaagtttcctctccaagtaagtgggctttcaacatctacaaattcaccttatttaatagccacagccagtacaca

SEQ ID NO: 16257 - DNA, 110 bp, synthetic construct
  source 1..110: mol_type = other DNA
gtgggctttcaacatctacaaattcaccttatttaatagccacagccagtacacagggatctgtgagaaaaaaaccaaggttgaaatgaagtccatggtaccctgctgtc

SEQ ID NO: 16258 - DNA, 110 bp, synthetic construct
  source 1..110: mol_type = other DNA
ggatcttattcttcagtattaggctgctttagctgaggctgcataagccaacgcttgtcaggtttagaggtttggaagaggacatctgtcctgtgcaatcaccgcatggt

SEQ ID NO: 16259 - DNA, 110 bp, synthetic construct
  source 1..110: mol_type = other DNA
tgtcaggtttagaggtttggaagaggacatctgtcctgtgcaatcaccgcatggtcatgagaaagcctgggaggatttctttaactcctccctaaaaaggataaaatgaa

SEQ ID NO: 16260 - DNA, 110 bp, synthetic construct
  source 1..110: mol_type = other DNA
gaggccaggagcagctcagctgtctaaggccctggacaagtaagaggattgtagcctttggcctgcagaatgtttagagcacaaagtgcatctttacactttttcagacc

SEQ ID NO: 16261 - DNA, 110 bp, synthetic construct
  source 1..110: mol_type = other DNA
ctttggcctgcagaatgtttagagcacaaagtgcatctttacactttttcagacctaagttaggtgcatttatacaacaagtagttatcaagtgcctataatgtgccaga

SEQ ID NO: 16262 - DNA, 110 bp, synthetic construct
  source 1..110: mol_type = other DNA
ttgtttttagcctgtctttatttttttaagttgtgtctgttaaaagccacattttcttggaatatttgtcaccattatccttcttcgttagacttcatccagtgttttta

SEQ ID NO: 16263 - DNA, 110 bp, synthetic construct
  source 1..110: mol_type = other DNA
cttggaatatttgtcaccattatccttcttcgttagacttcatccagtgtttttaggtctttctcactggcattacattctgaacacatgatttttttttttttttaact

SEQ ID NO: 16264 - DNA, 110 bp, synthetic construct
  source 1..110: mol_type = other DNA
aggtaaaaataaaatgtatatctgttcttcatgataatttgactatgaatcaaatgatataggagaaagcaccctgcatagtacctggaatagtacactatcaacaaaca

SEQ ID NO: 16265 - DNA, 110 bp, synthetic construct
  source 1..110: mol_type = other DNA
gatataggagaaagcaccctgcatagtacctggaatagtacactatcaacaaacatcaactttcttccttattttctgaggatgtgtggaaatgttttatctgtgcctgt

SEQ ID NO: 16266 - DNA, 110 bp, synthetic construct
  source 1..110: mol_type = other DNA
acattttccaaaaagctcaaggtttaaggtttcggcagaaacactgatgaagctggctttggttctcctatcccaaagttgttaattttttcttgtttttttaatctcta

SEQ ID NO: 16267 - DNA, 110 bp, synthetic construct
  source 1..110: mol_type = other DNA
tcaacaaaactctctgtgcttcagtttctctctccttcccatttccaagcaatgaagaccatacttactaggaaccatagtcaagatgatcaacatcggtgaggcttaag

SEQ ID NO: 16268 - DNA, 110 bp, synthetic construct
  source 1..110: mol_type = other DNA
catgagctgcagtgtagcttgcagataccgctttgatctgctcttgctgtgctgtggtgtagtctggcagctgaagtcctattcgacccctagctttgaaactttcaaat

SEQ ID NO: 16269 - DNA, 110 bp, synthetic construct
  source 1..110: mol_type = other DNA
tccattaattcaggtttttaaaaaatgtctttaacactatttaaaattaaggtcggtagtcaagataggtaggttatgctcccataactaacaccgaaagttttgtctta

SEQ ID NO: 16270 - DNA, 110 bp, synthetic construct
  source 1..110: mol_type = other DNA
cacatgcttttggcaaaggcatcttctagtccaatcaccaccgactgctcagttagctcaccgttgtcaggagctaccctctccttcaccagcttcccctgggtcctggc

SEQ ID NO: 16271 - DNA, 110 bp, synthetic construct
  source 1..110: mol_type = other DNA
gtttgagcactgggtgaagtttttccatcccagccactactcatgcctcccctaagcagcggccactccaaagatttatagttctttctgagatgtcttctagcagtaac

SEQ ID NO: 16272 - DNA, 110 bp, synthetic construct
  source 1..110: mol_type = other DNA
caacaaagcacctattttgaccggtgtgaaatggagaaaaaaacaacatatcacaggattaaataagatattagatgttaaaagctgtttgtgaatgataaaatcctctg

SEQ ID NO: 16273 - DNA, 110 bp, synthetic construct
  source 1..110: mol_type = other DNA
aaatattcttgtataccctggtgtccccaaagaactaacagggcttttgacagtgcatatactgcagtcatacttttttctctcgggcacagaatgacacttactttggt

SEQ ID NO: 16274 - DNA, 110 bp, synthetic construct
  source 1..110: mol_type = other DNA
ccatgtagatgcagtgtgactgttgctcactgggaaaggaagacagagtccagctgatgttaagtgttctgtatagtggggacagttaacacagaggaagagagatcact

SEQ ID NO: 16275 - DNA, 110 bp, synthetic construct
  source 1..110: mol_type = other DNA
aagagaggcacaggttctaccccaaagcctccgaaaggaaccatccctgccaatatcttgattttcagcttttggcttctgagctgtgagagaataaatttctcatttca

SEQ ID NO: 16276 - DNA, 110 bp, synthetic construct
  source 1..110: mol_type = other DNA
ctcctcaccatagtctctagaggccctgcaatatctggtcctcgcctcttccttccatatgccaaagccatgtttgccttagtacctttgtattcactgctcactcttag

SEQ ID NO: 16277 - DNA, 110 bp, synthetic construct
  source 1..110: mol_type = other DNA
catatgccaaagccatgtttgccttagtacctttgtattcactgctcactcttagatgctcttttctgatatctacataactgacttctctttgacattcaggtctaaaa

SEQ ID NO: 16278 - DNA, 110 bp, synthetic construct
  source 1..110: mol_type = other DNA
tgatagccctgaagttattgggagaactgatttacaaaagtgtagaaaggacataatgaatatgtgtttgcactttagtcatctattctttggtaagacaaaaatataga

SEQ ID NO: 16279 - DNA, 110 bp, synthetic construct
  source 1..110: mol_type = other DNA
tgaagtcctgcacacaagggagtaatccagagaagcaaactaaagaaacaatgaggcaaacataaagaactgatttgtcgttgccagggagcaggaggtgtgggggcgga

SEQ ID NO: 16280 - DNA, 110 bp, synthetic construct
  source 1..110: mol_type = other DNA
gcaaacataaagaactgatttgtcgttgccagggagcaggaggtgtgggggcggaaggactgagagtttgggattagcagatgccagctattatatataggatagataaa

SEQ ID NO: 16281 - DNA, 110 bp, synthetic construct
  source 1..110: mol_type = other DNA
aaacccacgaaattcctcagaagttctgcacacctaagctggaaaaaagcatacagtttacatcatatgaaagtagtttttggaaacaagtgttcatgcaaaatgatttt

SEQ ID NO: 16282 - DNA, 110 bp, synthetic construct
  source 1..110: mol_type = other DNA
cattgttataatgcccttcatggcccccacatcctcttgccacctgcagaaagtttcttaacatctaccaactgtattgttcctttttggttaatgaacaactgacatga

SEQ ID NO: 16283 - DNA, 110 bp, synthetic construct
  source 1..110: mol_type = other DNA
aattaaaatattaaaattgaatgaatagttccttcaacaggaataatcttcacagaaaagcttgcttatctttccattgggggtatccgtcttctagccctggagcagga

SEQ ID NO: 16284 - DNA, 110 bp, synthetic construct; identical to SEQ ID NO: 16283
  source 1..110: mol_type = other DNA

SEQ ID NO: 16285 - DNA, 110 bp, synthetic construct
  source 1..110: mol_type = other DNA
tctgagaagcccatcagcctgggaagggagcataaccagtttctgacatgcaaagtcagatcatggagcaaagtggtagcttggaagttcaggctactgtgtggagagga

SEQ ID NO: 16286 - DNA, 110 bp, synthetic construct
  source 1..110: mol_type = other DNA
atagtttctccattgtgtgactgagattgtcttctgaacatttccttttttaatgttcacatacagaaagaggctataaaaataaaatttgtagactgaccatatgtcca

SEQ ID NO: 16287 - DNA, 110 bp, synthetic construct
  source 1..110: mol_type = other DNA
ttaaaaccacttgctgtgtgtctggactaggggagaacaccattaattaagggcagaatgaagacctggggttgatactagctcacccactcactgaccatgtgattttt

SEQ ID NO: 16288 - DNA, 110 bp, synthetic construct
  source 1..110: mol_type = other DNA
acagttctgtgagtcagaaattggcacaggacttagctggatggctcctctctgttcctcccttactgtggcctcagccgggatgggctcaggttactataggtagcaag

SEQ ID NO: 16289 - DNA, 110 bp, synthetic construct
  source 1..110: mol_type = other DNA
cagatccttaacccactgagcgatgccaccaattgaatctgcatcctcgtctacactgcatcctcatcaacacagcttcttaatgtactgagccacagagggaacttctc

SEQ ID NO: 16290 - DNA, 110 bp, synthetic construct
  source 1..110: mol_type = other DNA
ccaaatcttgttttgcgttttttcattaaaaaaaaaaaatctgcttggccggtatgctaggaaagacctagactactgcaaaaatctctaattagtcttctcccatttta

SEQ ID NO: 16291 - DNA, 110 bp, synthetic construct
  source 1..110: mol_type = other DNA
caggaagagttctaagaaagagaaaggtgttcttccagctaggcctgcaaagtatatggggatgatgaaggctggtccaggaagtgtccatcagtgaagtggatgagcag

SEQ ID NO: 16292 - DNA, 110 bp, synthetic construct
  source 1..110: mol_type = other DNA
acagtcctagcccttaggaaggtcacagtctgcagatatgagtcaactcttgctaaacagctagataagtttaatgaggtatgaggattattggtcacctggagcatcag

SEQ ID NO: 16293 - DNA, 110 bp, synthetic construct
  source 1..110: mol_type = other DNA
ggttagaaaattttggctgagactgagaaaggctcttcatacacacttgtttggactagagagaacatctgtagtgttcctttgccacattgaaaaagtaagttgtagga

SEQ ID NO: 16294 - DNA, 110 bp, synthetic construct
  source 1..110: mol_type = other DNA
gataaaagcacatggaatgttgttttaataaagatggtagtaactgaagaccaatgggcattctcttgacttctccccaaatagctatttcttgtcagaatgtctgtgtc

SEQ ID NO: 16295 - DNA, 110 bp, synthetic construct
  source 1..110: mol_type = other DNA
ggcagaagcttctcccaggctctctccagatttatgagttaatgccatcacttgtccctttgtagatgtgctgtcctgtctggaagtcagggttggtgtcaactaagtgg

SEQ ID NO: 16296 - DNA, 110 bp, synthetic construct
  source 1..110: mol_type = other DNA
gacatgagtcaattagccctcaggggatttcagcccctcagcttttgagtttccagctaaggccccagaccttggggaacagaaacaaactattctgctgtgccctgtct

SEQ ID NO: 16297 - DNA, 110 bp, synthetic construct
  source 1..110: mol_type = other DNA
aatttcataattatattcaacagtgccttctaacatgcttgtaagttgacatcggtgtgtgtgtagcacacattaaatctccactttaggtttgctcgtttgttatatcc

SEQ ID NO: 16298 - DNA, 110 bp, synthetic construct
  source 1..110: mol_type = other DNA
tgaatcattccccgctttctaatacaaagtgtaccaaatatattttcattcataattctggacagctctggattatcaatgtgaacatccatgattaccctgggccagga

SEQ ID NO: 16299 - DNA, 110 bp, synthetic construct
  source 1..110: mol_type = other DNA
tttttttgctttttagggtagcactcacagcacatggaggtcgaattagagctacagatgccggtccacaccacagcaaagccgcatctgcaagcaacctaccaacctac

SEQ ID NO: 16300 - DNA, 110 bp, synthetic construct
  source 1..110: mol_type = other DNA
ggaggtcgaattagagctacagatgccggtccacaccacagcaaagccgcatctgcaagcaacctaccaacctacgccacagctcacgacaatgctggatcctgaaccca

SEQ ID NO: 16301 - DNA, 110 bp, synthetic construct
  source 1..110: mol_type = other DNA
aaaggaggagggggcttctgattattgagaattctcgtgtagttaaagagagccgactctgggagagctagtgggaccttaggattcaggatctccctgcatctctcctt

SEQ ID NO: 16302 - DNA, 110 bp, synthetic construct
  source 1..110: mol_type = other DNA
ccagatccttacgaacagagcaggcctttgggtgtttggcagatgaggagggagaaaacttacctgctttaagattcctctgtttgtgtgaaagcccatctttaataatt

SEQ ID NO: 16303 - DNA, 110 bp, synthetic construct
  source 1..110: mol_type = other DNA
aagtttaagtaagctgctaatagtcagaattctatcagactgtttccagctgtcataggtgtagaaaaatgaactttaaattatggagaggaaggaagttcctgttgtgg

SEQ ID NO: 16304 - DNA, 110 bp, synthetic construct
  source 1..110: mol_type = other DNA
aaagaaagacagggacaaatgagaaacatagaatcaactgcaaaacaaggtttaaaatggccataaataggagtttacatcatgactcagtggttaactaatccaactag

SEQ ID NO: 16305 - DNA, 110 bp, synthetic construct
  source 1..110: mol_type = other DNA
tgcagttggcccttatagaatttgacagctaatcgtcctgcataagggatctgcctctccccttacatttgggaaattaaccttggggaggaggtcgaggtggagcccaa

SEQ ID NO: 16306 - DNA, 110 bp, synthetic construct
  source 1..110: mol_type = other DNA
acccacaaacctgtatcttcctctttctgccctgaagcttctctgcctccaccaggggtactttgggaaactactcaacagttcagacaagcaaaacatgaatgtcgagg

SEQ ID NO: 16307 - DNA, 110 bp, synthetic construct
  source 1..110: mol_type = other DNA
tcatatccccaccaagacttcttttcaccccaagtaactctaatggcctgtctagctttcacatctgcggggtgtgaggtcaccaggatgacaagaaacgggttttgatg

SEQ ID NO: 16308 - DNA, 110 bp, synthetic construct
  source 1..110: mol_type = other DNA
catcttaaatgccattataatatcaagtatatcatcaatgtttcttggttgcttaagtgagagctagaagctccatctggttaaagatgtcatcttgttagcaaacaggg

SEQ ID NO: 16309 - DNA, 110 bp, synthetic construct
  source 1..110: mol_type = other DNA
gtgagtgtgaaatcagaacaagaggatttacattaatcaaacagtccatggctgctgggtaggttaattagctgcatccaactcacaatggggatcaggttacttttggg

SEQ ID NO: 16310 - DNA, 110 bp, synthetic construct
  source 1..110: mol_type = other DNA
ctggtggcttggcagtgagctcattggagaagacagtgggggaactgagtgagggcaccattacagcagatgcaggatggatagactgatagctttcagctcaactctga

SEQ ID NO: 16311 - DNA, 110 bp, synthetic construct
  source 1..110: mol_type = other DNA
caccattacagcagatgcaggatggatagactgatagctttcagctcaactctgattttcccatgtatggaattttaaagagatgtctaggatttcagttctttaattta

SEQ ID NO: 16312 - DNA, 110 bp, synthetic construct
  source 1..110: mol_type = other DNA
actttcaacctcagctcttctttagcaatcatacaataaacatttgtatgtttcttcattgtttttcctgcttaggaactagtatttggcagaactgattagaaaaatgt

SEQ ID NO: 16313 - DNA, 110 bp, synthetic construct; identical to SEQ ID NO: 16312
  source 1..110: mol_type = other DNA

SEQ ID NO: 16314 - DNA, 110 bp, synthetic construct
  source 1..110: mol_type = other DNA
gtgaaatttttatttgtcaagggttcaggatgcatgaaaatatatggagcacttttaataactcagctttgatgaacctagaagacattagctatataacctctgttgta

SEQ ID NO: 16315 - DNA, 110 bp, synthetic construct; identical to SEQ ID NO: 16314
  source 1..110: mol_type = other DNA

SEQ ID NO: 16316 - DNA, 110 bp, synthetic construct
  source 1..110: mol_type = other DNA
ctcttcatttcccttcctagagaatttccaggggctagatatgaaacttgatgacaagaatccctaggaagcctgaaatcacgtagaatttgtgatggctatgggtattc

SEQ ID NO: 16317 - DNA, 110 bp, synthetic construct
  source 1..110: mol_type = other DNA
aagaatccctaggaagcctgaaatcacgtagaatttgtgatggctatgggtattcgccctcttctttgcagagcatggaacctggcacactagtcctgatgtaaaatctc

SEQ ID NO: 16318 - DNA, 110 bp, synthetic construct
  source 1..110: mol_type = other DNA
cagtgagcattttaagccttaattgttattttctttttgtcttgtcttgatcagctaccttggcacctggaagctcagatgtctctgaaactcagctcaactcttagcag

SEQ ID NO: 16319 - DNA, 110 bp, synthetic construct
  source 1..110: mol_type = other DNA
tgcaaactgggagtactcaaaccggaaaaacaaggagtgaagatctgggttatcctgttataaaacagcttgcatggggagaaagcagtgactgtttattctctatagtg

SEQ ID NO: 16320 - DNA, 110 bp, synthetic construct
  source 1..110: mol_type = other DNA
agtgctgctgaacttccaattactattataatatctccattcaaacctcaaaggcaatatttagataagagaacaaaaatgaacaagcataatatgcctcattacagtct

SEQ ID NO: 16321 - DNA, 110 bp, synthetic construct
  source 1..110: mol_type = other DNA
gactgacaggattcttagagctgaaactgaataacttaatccaccgtaccacctgctctgaaggaagtgaagcagtgggataaaaatacttaaatacaacacaggactgt

SEQ ID NO: 16322 - DNA, 110 bp, synthetic construct
  source 1..110: mol_type = other DNA
ttacccaggagtaataaggaaaagtgtacattgtgtagatctggaatggggttagggacagaaaacttttattaagtaacaggtatatacagttaagctgagatctgaaa

SEQ ID NO: 16323 - DNA, 110 bp, synthetic construct
  source 1..110: mol_type = other DNA
ggacagaaaacttttattaagtaacaggtatatacagttaagctgagatctgaaagatgaatagaattttgctacgaggcatatttatgggaaataagaggcagtggaca

SEQ ID NO: 16324 - DNA, 110 bp, synthetic construct
  source 1..110: mol_type = other DNA
ctggaggccttcatcaagagaaacaagacttaaggtcataaactctgtgacagacagaagagagtcagtttggcaaagtaccccagacctttaggtattcctcaaatcaa

SEQ ID NO: 16325 - DNA, 110 bp, synthetic construct
  source 1..110: mol_type = other DNA
tcctgatacctcaaatgccagatcatctatatccttaaccaaactgcattcccaactttgctaagcacaaacaaaggggggatgtcttcactgaaaactgacatgaagaa

SEQ ID NO: 16326 - DNA, 110 bp, synthetic construct
  source 1..110: mol_type = other DNA
ctttgctaagcacaaacaaaggggggatgtcttcactgaaaactgacatgaagaagaattccagccaggaccaaacatctccatgtagagatggaccaccactgatttgg

SEQ ID NO: 16327 - DNA, 110 bp, synthetic construct
  source 1..110: mol_type = other DNA
tgtatggtccttgcccaagacagttaccatatagtattaaagttattaccagggggcagctccttaataaagtaattgtcaaaaaaaaaaaaaaaagcagtttcttgaaa

SEQ ID NO: 16328 - DNA, 110 bp, synthetic construct
  source 1..110: mol_type = other DNA
actatcccaattatactagtgtccaaagcaacaaaatacttagaaataaatgtaaccaagaaagtttaagagctacacaatgaaaacttcgagactgcagaaagaaattg

SEQ ID NO: 16329 - DNA, 110 bp, synthetic construct; identical to SEQ ID NO: 16328
  source 1..110: mol_type = other DNA

SEQ ID NO: 16330 - DNA, 110 bp, synthetic construct
  source 1..110: mol_type = other DNA
agtctctgacagatagtctctgagagctggcgtccctatgtcagagaaaggcctggttccaggacattcatgtacatcctcagaacatttatgaggactggcatccatag

SEQ ID NO: 16331 - DNA, 110 bp, synthetic construct
  source 1..110: mol_type = other DNA
aacctctcctactcctcttaaattcaaaggccttcacaaccacagatagatcttaagatcactgatgaatgctataaccaatcagtaaaaacaaattcttagtttactgc

SEQ ID NO: 16332 - DNA, 110 bp, synthetic construct
  source 1..110: mol_type = other DNA
acaaccacagatagatcttaagatcactgatgaatgctataaccaatcagtaaaaacaaattcttagtttactgccaaatgccttttattagcaaagcatgaaaagtgtt

SEQ ID NO: 16333 - DNA, 110 bp, synthetic construct
  source 1..110: mol_type = other DNA
gagataaggaggaatttacaaagctgaattgaaagcaccatacagagagccaagagtagaaaggagtaaggtcatatgctagaagcaagaagaaaaggtttcaagccagc

SEQ ID NO: 16334 - DNA, 110 bp, synthetic construct
  source 1..110: mol_type = other DNA
cagtctagaaagtgggagctcagttgcagctcatgtgtgcatatgctatctaaatgatgagaggtgaatcactcacatcttcactgtaataagaatagagaaacctgctg

SEQ ID NO: 16335 - DNA, 110 bp, synthetic construct
  source 1..110: mol_type = other DNA
attgatttggcaaattatcaacttagtaaggccagactgactctgtcaacaccgatgaaatagatactaatcccagatcaaatagatgttgagtatgccagacgttcact

SEQ ID NO: 16336 - DNA, 110 bp, synthetic construct
  source 1..110: mol_type = other DNA
atccttccccaattgtgccacattggcaagtggattactttgaactgaaggcagtcaagacttgccaactcaggaaaagctttcctctcccttaactgcctaaaataatt

SEQ ID NO: 16337 - DNA, 110 bp, synthetic construct
  source 1..110: mol_type = other DNA
atatgttggatatgtttccttataaaactgttaaacctgattttgatacaagagacattgaaatgagtagcattactaatgacagcgatgaaaggttgtggataaagaat

SEQ ID NO: 16338 - DNA, 110 bp, synthetic construct
  source 1..110: mol_type = other DNA
cattgaaatgagtagcattactaatgacagcgatgaaaggttgtggataaagaatgatggattgactttatcttagtctgcctgttaaattactgcttacattttactat

SEQ ID NO: 16339 - DNA, 110 bp, synthetic construct
  source 1..110: mol_type = other DNA
aagaatagaggccagaaacaggatccaaggattcaggattttagctcaacattttgtgttcatttcctgagatgagtaatatttaaacggctgccttaactgagtttgaa

SEQ ID NO: 16340 - DNA, 110 bp, synthetic construct
  source 1..110: mol_type = other DNA
ctgaccaggataataatgtatctcattccctcatttcttattttgtcaacaaacttaggaagttcacggaattcttcaccaatcgtaaagtctagctgcctttccatgta

SEQ ID NO: 16341 - DNA, 110 bp, synthetic construct
  source 1..110: mol_type = other DNA
caagggcttagaaagtaatacaatgtcttcctgatatgtgctaaacttgggtaacagagagcagacagctctttaaatagtttataaagtactgttaaaaagaaagaaaa

SEQ ID NO: 16342 - DNA, 110 bp, synthetic construct; identical to SEQ ID NO: 16341
  source 1..110: mol_type = other DNA

SEQ ID NO: 16343 - DNA, 110 bp, synthetic construct; identical to SEQ ID NO: 16341
  source 1..110: mol_type = other DNA

SEQ ID NO: 16344 - DNA, 110 bp, synthetic construct; identical to SEQ ID NO: 16341
  source 1..110: mol_type = other DNA

SEQ ID NO: 16345 - DNA, 110 bp, synthetic construct
  source 1..110: mol_type = other DNA
cgggcgttaggacgcagtatacgaaacgccgggctggaacccgaatgcaaatccatcagccgcccccaaatcgcgcacagagggagcggcgctcgggagcccccagatca

SEQ ID NO: 16346 - DNA, 110 bp, synthetic construct
  source 1..110: mol_type = other DNA
ctgcttggggattgtacccaataacaaagtaggatttctcaagcaaactatttggacataagcttttaataactgtattgtaactcacttagaaacagaagtgggagaat

SEQ ID NO: 16347 - DNA, 110 bp, synthetic construct
  source 1..110: mol_type = other DNA
ttaacttgcaactgacagattaactggagaggagacagagtttctttatttacccttgcacaatgtaagttgttcagtgacaagccactgaatagccagggataaaaatt

SEQ ID NO: 16348 - DNA, 110 bp, synthetic construct
  source 1..110: mol_type = other DNA
gtaactgggaatgagtttgataggatttcacagacaagaagcttaagaacctaaaagatgttttgagagtctaaccaatacaatacagtaaatgatattaagagactgca

SEQ ID NO: 16349 - DNA, 110 bp, synthetic construct
  source 1..110: mol_type = other DNA
agatgttttgagagtctaaccaatacaatacagtaaatgatattaagagactgcaggtcagctgaaaacagaaactgtcttggaggaaatgggcctaaaacagatcttaa

SEQ ID NO: 16350 - DNA, 110 bp, synthetic construct
  source 1..110: mol_type = other DNA
gactatgatcttccttctccactggtgtctccttcagcccctgcattggaaaccttagttctcttggatataaatgttaaatgaacagtgttagggaaattcaaatggca

SEQ ID NO: 16351 - DNA, 110 bp, synthetic construct
  source 1..110: mol_type = other DNA
aaaacagtatgcctgacatttaggaagtccagactgtatacttagaagagagaaatctaggataggagaccatgttattgatgagactgagacaccttcagataagctag

SEQ ID NO: 16352 - DNA, 110 bp, synthetic construct
  source 1..110: mol_type = other DNA
tctaggataggagaccatgttattgatgagactgagacaccttcagataagctagaaacctcaaaatgggcctaaacaaaatatattatgtgagtagagaagaggataaa

SEQ ID NO: 16353 - DNA, 110 bp, synthetic construct
  source 1..110: mol_type = other DNA
aggggcctgagcctctgcattcagattcctaacccactgtgccacagtgggaactccctgagatttgtactctaactaagctgcattatgccttctctattataaatata

SEQ ID NO: 16354 - DNA, 110 bp, synthetic construct
  source 1..110: mol_type = other DNA
agtgggaactccctgagatttgtactctaactaagctgcattatgccttctctattataaatataattcaattgtatagattcaaaaactgagtatttcttagataggat

SEQ ID NO: 16355 - DNA, 110 bp, synthetic construct
  source 1..110: mol_type = other DNA
tagtaaaattacaaaggtagtacagagagtttctctaatattcctcatgcggtttccctacttttaacattgtacattagtatggcatctttcttacaattaataaacca

SEQ ID NO: 16356 - DNA, 110 bp, synthetic construct
  source 1..110: mol_type = other DNA
ggtagtacagagagtttctctaatattcctcatgcggtttccctacttttaacattgtacattagtatggcatctttcttacaattaataaaccatattgatacattatc

SEQ ID NO: 16357 - DNA, 110 bp, synthetic construct
  source 1..110: mol_type = other DNA
aatataacccaccccctctctcctcctgcatggaagcccttctagactctcctgtgtctgcaaccccttttaaaattaagccaaccacacaagaaaagtgtgagccatct

SEQ ID NO: 16358 - DNA, 110 bp, synthetic construct
  source 1..110: mol_type = other DNA
gtctgcaaccccttttaaaattaagccaaccacacaagaaaagtgtgagccatctcttcagcaattccttagacctaactacaaatactgagtatctaaaacagctagaa

SEQ ID NO: 16359 - DNA, 110 bp, synthetic construct
  source 1..110: mol_type = other DNA
agctgaaaaggagtgagacccagggcaatttagcaccagctctgcaccaatatctgtgcctgtctctgtaaacttaggagagatccagtacctgtcaaacatttccatca

SEQ ID NO: 16360 - DNA, 110 bp, synthetic construct
  source 1..110: mol_type = other DNA
atatattgaaatctcactctgagctaagtacagagctagtttctcatagacaaaaaatgaaacatcccaacttagaagattccactattgtccatttattcaaaacttac

SEQ ID NO: 16361 - DNA, 110 bp, synthetic construct
  source 1..110: mol_type = other DNA
ccttcctggagcctaagaacatgactatgtttggaagtaaggctgttacacatttgattagctaagacaagatcatactggagtagggtagggagaatcttaacctaata

SEQ ID NO: 16362 - DNA, 110 bp, synthetic construct
  source 1..110: mol_type = other DNA
gattagctaagacaagatcatactggagtagggtagggagaatcttaacctaatataaatgcagccttcacaagaagaggagaaccagaaagatagacaaacagaaataa

SEQ ID NO: 16363 - DNA, 110 bp, synthetic construct
  source 1..110: mol_type = other DNA
agggactcaactctgatctatctgcaggcaacacgccaggcagctagggaagcgagtgtctcggttctaaggaggaagttctgggtgacacaacattgcatctataacac

SEQ ID NO: 16364 - DNA, 110 bp, synthetic construct
  source 1..110: mol_type = other DNA
acaggaatgccccaaattgtaatcttgatcaatacatatatgcagagtgttaactgtgtacttcttctcagttttatatatcttaatatttgttctagatgtggttcctt

SEQ ID NO: 16365 - DNA, 110 bp, synthetic construct
  source 1..110: mol_type = other DNA
ggcaaatggagaactctcctgcttctgaatgtgcaaggcccctcacaaaagcaagagctccagggatgagaagaggtgttgactgccctctccacttgccttctctctag

SEQ ID NO: 16366 - DNA, 110 bp, synthetic construct
  source 1..110: mol_type = other DNA
ataatcgataggcctacaagctgacatcctcaatcgcagatgtcctttttaactggcagagggaggtagggccgtcagactgatgcggggctgtacagcaaggattgcag

SEQ ID NO: 16367 - DNA, 110 bp, synthetic construct
  source 1..110: mol_type = other DNA
cagtaataatgctagattttactcaaaatgcatccttttacatcttttatcaccgttggtttgtacagttcattgaatggctggatataatctttagattttatagacac

SEQ ID NO: 16368 - DNA, 110 bp, synthetic construct
  source 1..110: mol_type = other DNA
agatgagataagtatgatgctggtattgtccagacaggaagttccactggccaccctggagcccttggtcaaagcacagctccttgaagaatgggccaactctgtgaaga

SEQ ID NO: 16369 - DNA, 110 bp, synthetic construct
  source 1..110: mol_type = other DNA
ctggagcccttggtcaaagcacagctccttgaagaatgggccaactctgtgaagaagcaaaaagtggaagtgtacctgcccaggtaagaggctcctgtgtgactccctct

SEQ ID NO: 16370 - DNA, 110 bp, synthetic construct
  source 1..110: mol_type = other DNA
gacacacactgcatgctccagccagacccaacactcacattgcaccagccatctgcccagctccccatctttatgaaataccatttgaatcaagcctcaagtcaaataga

SEQ ID NO: 16371 - DNA, 110 bp, synthetic construct
  source 1..110: mol_type = other DNA
ggtacactgaatctgttgggtttcaaaggactagaacagctccatcttttttcaaacctggatgtttaaactagtgcaaggaagcactgggtgtgtgtgtgcagtccctg

SEQ ID NO: 16372 - DNA, 110 bp, synthetic construct
  source 1..110: mol_type = other DNA
acctggatgtttaaactagtgcaaggaagcactgggtgtgtgtgtgcagtccctgttgtgatgggaagctccaggcccacctgggctctgccctgttggtgggtacctgt

SEQ ID NO: 16373 - DNA, 110 bp, synthetic construct
  source 1..110: mol_type = other DNA
tcagtttcctagggaggatttaatggtttgtctactttgggtgtgtgcatgtgacactctcttacatttctgtttttccttctcctggaactagctcaaataaaataaaa

SEQ ID NO: 16374 - DNA, 110 bp, synthetic construct
  source 1..110: mol_type = other DNA
actctcttacatttctgtttttccttctcctggaactagctcaaataaaataaaaattcttagctcattctttagaaaagagaggaaaaagctcagctaccaatctaagt

SEQ ID NO: 16375 - DNA, 110 bp, synthetic construct
  source 1..110: mol_type = other DNA
cagcaaatactgtcaacatttcactactcacagctctttattattactttttttgattggggagagggctgcattaagtgttgaaaactaaccacaagtacaagaaaaag

SEQ ID NO: 16376 - DNA, 110 bp, synthetic construct
  source 1..110: mol_type = other DNA
attggggagagggctgcattaagtgttgaaaactaaccacaagtacaagaaaaagctttcaaaaatatgtacaagatgattctgctcttaggaagcacatatagtgctta

SEQ ID NO: 16377 - DNA, 110 bp, synthetic construct
  source 1..110: mol_type = other DNA
aagagtgccttctatataagtgacattgaaaatcacaggtgattaatacttaacctctttgaattcttagttgatgcctaggcaaatttctaactattccaaatgtatta

SEQ ID NO: 16378 - DNA, 110 bp, synthetic construct; identical to SEQ ID NO: 16377
  source 1..110: mol_type = other DNA

SEQ ID NO: 16379 - DNA, 110 bp, synthetic construct
  source 1..110: mol_type = other DNA
tttagatcttatgtttctttgctaaaagtttcttgtaatttctctgtcttggcctccagtttttttcctgaaatcttggatcgtccttactatcattactctaaagtcta

SEQ ID NO: 16380 - DNA, 110 bp, synthetic construct
  source 1..110: mol_type = other DNA
ccagtttttttcctgaaatcttggatcgtccttactatcattactctaaagtctatttcatgtagattgcttatctacttcatttagttgttctggggttttgtttcgtt

SEQ ID NO: 16381 - DNA, 110 bp, synthetic construct
  source 1..110: mol_type = other DNA
actctggacctaccttgatgagacagccactatctggaatgttagtagttaccggagcagagtgccaagagctttggaaggtcatacatcagcaattaaaatctggttta

SEQ ID NO: 16382 - DNA, 110 bp, synthetic construct
  source 1..110: mol_type = other DNA
ataatgaaactcaactttgtcgtgttccatttggctttgaattgtcgcagctcttaggaccctgtgctcaaggatagcaggggttccttggcactcttgagtaatctgga

SEQ ID NO: 16383 - DNA, 110 bp, synthetic construct
  source 1..110: mol_type = other DNA
aggaccctgtgctcaaggatagcaggggttccttggcactcttgagtaatctggagatcagagatgagtccatcacagggtgtcattaactagcattgtaatagagatgt

SEQ ID NO: 16384 - DNA, 110 bp, synthetic construct
  source 1..110: mol_type = other DNA
atttgtggcaacagagatggtgcctttgtgcaatataatacatactgtgtatcaaagaaatattgtgccacttctctgaagctgacattggaatgacattgtaatcctgg

SEQ ID NO: 16385 - DNA, 110 bp, synthetic construct
  source 1..110: mol_type = other DNA
ccgtctgtcaggaggtatcagcagaggcctcgtggggagctgggattcttgcccaacccagtgagcatgaaccccttgtgctcccttagagtctgtgtgggcactttgac

SEQ ID NO: 16386 - DNA, 110 bp, synthetic construct
  source 1..110: mol_type = other DNA
agtaattgagacaaggcacaaagggcctcctgggcgctgacaatattttattttatggttgtaatgatagttacaacagtacttgctttgtgataaatagtaattgcatt

SEQ ID NO: 16387 - DNA, 110 bp, synthetic construct
  source 1..110: mol_type = other DNA
cttctcgtacagtcaaggcacagagctcttgccttagctgctcggtctggttcttggagatttactaggtaagagtttgaggtggtgatgagcacagacattaacccatc

SEQ ID NO: 16388 - DNA, 110 bp, synthetic construct
  source 1..110: mol_type = other DNA
ttgaaagcaagggtgctccctaccccaacttcagatgtcaatcacaagtccagattattaccggtgcttctgatcagctggctatagatcagagattccaatcatcccct

SEQ ID NO: 16389 - DNA, 110 bp, synthetic construct
  source 1..110: mol_type = other DNA
ctctttcagttaatccttgctcatatctctccactgtcactgttccattgtaattggacaagattctgcatatcctcagtgcgaaatgaacctgctgtccagggagatct

SEQ ID NO: 16390 - DNA, 110 bp, synthetic construct
  source 1..110: mol_type = other DNA
ggacaagattctgcatatcctcagtgcgaaatgaacctgctgtccagggagatctggccagctgtgtctttccttgcgaggagagtggccattgcatggagaatccaaat

SEQ ID NO: 16391 - DNA, 110 bp, synthetic construct
  source 1..110: mol_type = other DNA
acacacacccaagagagggctttctgtgtttgaatggctcaggggagaagccacaaaaccttagtgctctcaaagcccagcctcaagacatttagcaggtcattgtcatc

SEQ ID NO: 16392 - DNA, 110 bp, synthetic construct
  source 1..110: mol_type = other DNA
cccttctcctccttccctttacatatttttgtaaaattaaaatctcaccctccaatgaccctcatccacatatttttggccaacacaggagcctgatgacctttgtgatc

SEQ ID NO: 16393 - DNA, 110 bp, synthetic construct
  source 1..110: mol_type = other DNA
tatttcttaaaagactttgagtcatggacatcagcaggacaatggcacttctgagctttgacctaaaatttgtatatatatatacacacacatatacacacacatataca

SEQ ID NO: 16394 - DNA, 110 bp, synthetic construct
  source 1..110: mol_type = other DNA
ctttgacctaaaatttgtatatatatatacacacacatatacacacacatatacagagagaaagagtgcttgatggtatctccatgtttgaaacaacgctcccccaactt

SEQ ID NO: 16395 - DNA, 110 bp, synthetic construct
  source 1..110: mol_type = other DNA
tcccaggcagaaaaaaaaaaaaattgcctccaccaccaaactttgcgtcctgcgcccgatcagcatctacaatgatggtcttcattttcttctttctttttgcctttttt

SEQ ID NO: 16396 - DNA, 110 bp, synthetic construct
  source 1..110: mol_type = other DNA
tcatttctgcttcctatctgtgagcaacgaagggctttaattgctgttccaccatttcaaacagttctcagaagactgcccctcctctactgaaagagttgggataaagc

SEQ ID NO: 16397 - DNA, 110 bp, synthetic construct
  source 1..110: mol_type = other DNA
ttagattcgaggtagatgcatttggacaaacccagtcccgtcgcctacagtccaggctgagactcttgccttccccgtcagtaccggccccgcggacatcgcagtgcgaa

SEQ ID NO: 16398 - DNA, 110 bp, synthetic construct
  source 1..110: mol_type = other DNA
cctatcatgttcgaaggcatacgggagaaaagccttatgtgtgtgatacctgtggaaaggcatttgctgtctctagttctcttatcactcattctcgaaaacatacaggt

SEQ ID NO: 16399 - DNA, 110 bp, synthetic construct
  source 1..110: mol_type = other DNA
atacctgtggaaaggcatttgctgtctctagttctcttatcactcattctcgaaaacatacaggtaaaaatttgacacagagattacttaaataaggaaagttataaata

SEQ ID NO: 16400 - DNA, 110 bp, synthetic construct
  source 1..110: mol_type = other DNA
cctttgttgaccacatcagggcagcagaggatcccactgattccctcatcatttgaacctccaagtgcggataggtatttccttccaatgtgatattccaatcaaaggag

SEQ ID NO: 16401 - DNA, 110 bp, synthetic construct
  source 1..110: mol_type = other DNA
aacctccaagtgcggataggtatttccttccaatgtgatattccaatcaaaggagaaaatggatattgttaaatttgcgaatgctgttaaggccagtgtcattttatcat

SEQ ID NO: 16402 - DNA, 110 bp, synthetic construct
  source 1..110: mol_type = other DNA
tacttctcttgtcttcagtccatttgctagttaccttctcatacccaaaaacacagaaagaggttctttcagatggtgtatcgcagagattggaggaaggaattgtgtgt

SEQ ID NO: 16403 - DNA, 110 bp, synthetic construct
  source 1..110: mol_type = other DNA
cctttccatacataatgctttgtaaatttgtgcaaaagcatctgcagagcacatgttattaatttaggactaatggttgaaataatacttttggacaaattttaggacat

SEQ ID NO: 16404 - DNA, 110 bp, synthetic construct
  source 1..110: mol_type = other DNA
ttatttccctctgagcattttctggaaacagaatttcatcatattcatgaattcaaattagtgtgctctcaggaaagatattggaatgtggcgttgtttggtcaagtgaa

SEQ ID NO: 16405 - DNA, 110 bp, synthetic construct
  source 1..110: mol_type = other DNA
aattagtgtgctctcaggaaagatattggaatgtggcgttgtttggtcaagtgaatttatctaatgttgagatcttgagagtgtcagaaaatgccactaaacttcaatat

SEQ ID NO: 16406 - DNA, 110 bp, synthetic construct
  source 1..110: mol_type = other DNA
catggtacctgggtactcagcattttggtcaattcttttgagatagggccaccaaggtcaaatgacttgcaaatggccactgaattagtccctggaagttctggagcaag

SEQ ID NO: 16407 - DNA, 110 bp, synthetic construct
  source 1..110: mol_type = other DNA
ggtcaaatgacttgcaaatggccactgaattagtccctggaagttctggagcaagtccccaaagcttcctcaattactgtttctcgtcaatgtaagtcagacatcaggat

SEQ ID NO: 16408 - DNA, 110 bp, synthetic construct
  source 1..110: mol_type = other DNA
cagtcacctctaagctacatcttaacattccatttacagctgatattatcctattttttgattagaaactggctctgcaaatgagctaagctgtgagattagctggcaaa

SEQ ID NO: 16409 - DNA, 110 bp, synthetic construct
  source 1..110: mol_type = other DNA
gtttttgcccaaaggtccccagggacatctgctggaggccctcttgttttaatggtggagatctgacaattatttgtgtaaaattccatgagagtcggctgtgtttactt

SEQ ID NO: 16410 - DNA, 110 bp, synthetic construct
  source 1..110: mol_type = other DNA
tggagatctgacaattatttgtgtaaaattccatgagagtcggctgtgtttacttgtctatcccccgtgaccagagaagcacttggcacatagaaagtgttaaataaaga

SEQ ID NO: 16411 - DNA, 110 bp, synthetic construct
  source 1..110: mol_type = other DNA
tttacttctttttcttctctttttccaaatgctcctctcgttgcctgtgccaaactgaaagaggaagttgttttgttttgctatatcaagagctgaggcttcttacttga

SEQ ID NO: 16412 - DNA, 110 bp, synthetic construct
  source 1..110: mol_type = other DNA
tgaaagaggaagttgttttgttttgctatatcaagagctgaggcttcttacttgacccacttggtaggactccagccaagccttaagggtatactgtgttgcctttgttt

SEQ ID NO: 16413 - DNA, 110 bp, synthetic construct
  source 1..110: mol_type = other DNA
tgcttggtttctcttctggcccttttattccttcactgtcattttaatgggtctctgagaagaagttcaagctggggctcaggactttattctgaaagcactctttgaac

SEQ ID NO: 16414 - DNA, 110 bp, synthetic construct
  source 1..110: mol_type = other DNA
gctttgtgcacactcgtgctctgtgattaatgatgtcctggaactcagctgcagttctgcaggaccacataatagaactttacagcatgaatgtcttggatgccatccat

SEQ ID NO: 16415 - DNA, 110 bp, synthetic construct
  source 1..110: mol_type = other DNA
tatatatcaccaaaataagctaagatacaaccatcacccagaagttcacattgcgttgattttaacaaaaccgtaagcctctcttttcgatggaaaacaaactatgatat

SEQ ID NO: 16416 - DNA, 110 bp, synthetic construct
  source 1..110: mol_type = other DNA
gaggtcagagggctcaaaactccaccttcagagcatgctgacaccaccatattgtatacgtgcatcccatgaagaagcatgtagcttagttgctcccacatagaatgaca

SEQ ID NO: 16417 - DNA, 110 bp, synthetic construct
  source 1..110: mol_type = other DNA
aaaaggaagagagggcctgacaccatatcctgtacacagccagcaatctatacacatctaataggaatcattttcaagctgaagaatcccacaccatttaaagggagaag

SEQ ID NO: 16418 - DNA, 110 bp, synthetic construct
  source 1..110: mol_type = other DNA
atctaataggaatcattttcaagctgaagaatcccacaccatttaaagggagaagggctgctattcatggcaaaggagacaaatgagtttgatgtgacaagttagagtgc

SEQ ID NO: 16419 - DNA, 110 bp, synthetic construct
  source 1..110: mol_type = other DNA
ccctagccattttcaggctcttccattcttgtttttcttgcagtaaagtaggtgtatatagctccagcctgaaggaacttcctgttactatactgagcagggactgtgtt

SEQ ID NO: 16420 - DNA, 110 bp, synthetic construct
  source 1..110: mol_type = other DNA
acttatgaatgctagaaatcatgtagctgattttcttcctttttgtttgctgcgtggaaactcacagtcaaatttggaatttgcttctagttgactgtgctgggcctcat

SEQ ID NO: 16421 - DNA, 110 bp, synthetic construct
  source 1..110: mol_type = other DNA
gccatgagctgtggtataagttgcagatgcagcttgtatcccatgttgctgtgtctgggatcactagctatcttgggatcactagctcatagttctagggttcccctagg

SEQ ID NO: 16422 - DNA, 110 bp, synthetic construct
  source 1..110: mol_type = other DNA
aggaggggaaagaatggaaggcttggaatgtcaagttaccatatacaaattctatcaccagcaactgagtgagctgggctgaacccaggtctgattcgttttttgatccc

SEQ ID NO: 16423 - DNA, 110 bp, synthetic construct
  source 1..110: mol_type = other DNA
ccagaggggactatggagaaggcagcggttcacctcgcacacatcagtcaccacggacatacatcagtcaccatgggcttaagcttccacatctctgagaccacaggtct

SEQ ID NO: 16424 - DNA, 110 bp, synthetic construct
  source 1..110: mol_type = other DNA
ttataagttattatacggagttcccgctgtggttggtgggttaagaatcacactgcaacagctcaggtcactgcagaggcaacaggttcaatctctggcccagatgcaga

SEQ ID NO: 16425 - DNA, 110 bp, synthetic construct
  source 1..110: mol_type = other DNA
caacagctcaggtcactgcagaggcaacaggttcaatctctggcccagatgcagagggttaaaggatctgatgttgccacagctgtcaactcgaattcatccctggctca

SEQ ID NO: 16426 - DNA, 110 bp, synthetic construct
  source 1..110: mol_type = other DNA
tgggaactccactaccatgctgttttgattattacagttttgtagtatggtcttaagacaaggagtgtgatacagctttcttctttttctcaagattgctttggcaattt

SEQ ID NO: 16427 - DNA, 110 bp, synthetic construct
  source 1..110: mol_type = other DNA
ccaggcagggtctgactgctgcagaggcaggcaggcagcaggtttggttagagcgacttgaagtgggtggagtttggagtcctttcgtatttgtttactggtaaagaaga

SEQ ID NO: 16428 - DNA, 110 bp, synthetic construct
  source 1..110: mol_type = other DNA
tggcagttgaatgagattggttcagcaaaagagagcagagagtttattcattgatcgaggaatggagaagggagagctcatactctaaagatagcttctcgtcaaaggga

SEQ ID NO: 16429 - DNA, 110 bp, synthetic construct
  source 1..110: mol_type = other DNA
cgaggaatggagaagggagagctcatactctaaagatagcttctcgtcaaagggaggaaagcgggagacttctaaggggtcagaggcaggtgcatcatcagagactagcg

SEQ ID NO: 16430 - DNA, 110 bp, synthetic construct
  source 1..110: mol_type = other DNA
attcactaaccactgagccacaacgggaactccaaatttaacctttaattcctgtatgcttctctcgtttctcctttgatctgagctgggttcatcattcggttccactt

SEQ ID NO: 16431 - DNA, 110 bp, synthetic construct
  source 1..110: mol_type = other DNA
ctctatgccatagaataacacccattgattttgaattttgtctaatcttgttacatgagaaaggaatgaatcagagagttcactccttataactttctacatggtgccac

SEQ ID NO: 16432 - DNA, 110 bp, synthetic construct
  source 1..110: mol_type = other DNA
tgagaaaggaatgaatcagagagttcactccttataactttctacatggtgccacatagatctacgaaaatgtctccccgggagacacagagtgtgtggggctaagagac

SEQ ID NO: 16433 - DNA, 110 bp, synthetic construct
  source 1..110: mol_type = other DNA
attctcatcaatttacagtgattctcatcaaaattatcagattacctttcatattcttagacttttgaagtccttaaaatcctgaagtatgtcagtgcaagttctcacaa

SEQ ID NO: 16434 - DNA, 110 bp, synthetic construct; identical to SEQ ID NO: 16433
  source 1..110: mol_type = other DNA

SEQ ID NO: 16435 - DNA, 110 bp, synthetic construct; identical to SEQ ID NO: 16433
  source 1..110: mol_type = other DNA

SEQ ID NO: 16436 - DNA, 110 bp, synthetic construct; identical to SEQ ID NO: 16433
  source 1..110: mol_type = other DNA

SEQ ID NO: 16437 - DNA, 110 bp, synthetic construct
  source 1..110: mol_type = other DNA
tactttttctttcaaagccccttgaaaaagaaaaaaaaaagtgctaaccccctgctgtgagtcttgggcttttccaaagaataagtaatactcttgctttttctttactt

SEQ ID NO: 16438 - DNA, 110 bp, synthetic construct
  source 1..110: mol_type = other DNA
aaccccctgctgtgagtcttgggcttttccaaagaataagtaatactcttgctttttctttacttataggagaatacgccatttaattttctttatatatataattactg

SEQ ID NO: 16439 - DNA, 110 bp, synthetic construct
  source 1..110: mol_type = other DNA
ctcctgggaaaatataggctcctgagtacacttgttcttcccacctcatttatttctatttttatttttgagcctttgcattagtcaggcattgaactgagttttacatg

SEQ ID NO: 16440 - DNA, 110 bp, synthetic construct
  source 1..110: mol_type = other DNA
ctatttttatttttgagcctttgcattagtcaggcattgaactgagttttacatggaccacataatttaactcttaaatggggaaaattctattatgaccattacataga

SEQ ID NO: 16441 - DNA, 110 bp, synthetic construct
  source 1..110: mol_type = other DNA
gtgctaaaggtttgattaaagttaacctgcaggatgctatgattaggtgtggttgttcttttaaactatgacaccttttttggtattgctcctttgatatttgacagata

SEQ ID NO: 16442 - DNA, 110 bp, synthetic construct
  source 1..110: mol_type = other DNA
aaataaaataatagacgacatggatccagaagcaatttcctctcacagatttgcctttataattgtgaggaagtctcagcacgtggtctatccttgaaacaaagaccaag

SEQ ID NO: 16443 - DNA, 110 bp, synthetic construct
  source 1..110: mol_type = other DNA
tttataattgtgaggaagtctcagcacgtggtctatccttgaaacaaagaccaaggtgccctggatttctgatactaatgcttccaccatactcttgagatgaggatcct

SEQ ID NO: 16444 - DNA, 110 bp, synthetic construct
  source 1..110: mol_type = other DNA
tattggatcctcccatggtttgaagcctaaaacaaaacaattggcttaaaaggttgactgaagatgacttttacttcatgcattatattaagcacatcaaaatgttttat

SEQ ID NO: 16445 - DNA, 110 bp, synthetic construct
  source 1..110: mol_type = other DNA
gactgaagatgacttttacttcatgcattatattaagcacatcaaaatgttttattatgctggatgttcaaatcaacagaagccaaaggcttttgagagcttgtttagat

SEQ ID NO: 16446 - DNA, 110 bp, synthetic construct
  source 1..110: mol_type = other DNA
gttaatctagtaaagggatcactttgtcaccaggattgatttagactatgaaagaaagctgtagattatcacggccaccaagcaactttgtgtggagaagataccaggtt

SEQ ID NO: 16447 - DNA, 110 bp, synthetic construct
  source 1..110: mol_type = other DNA
gagcttttgttcaaaaagtttcagtgtttctcagtgttcatctgtggacaggatgcagtgctgatgtgttttgccaagtcagagattccacatggcagctgtcaaggttg

SEQ ID NO: 16448 - DNA, 110 bp, synthetic construct
  source 1..110: mol_type = other DNA
cagtgctgatgtgttttgccaagtcagagattccacatggcagctgtcaaggttgatgtatcatctttgaagatgtgccttgaaactttactatgacccatgaaaactct

SEQ ID NO: 16449 - DNA, 110 bp, synthetic construct
  source 1..110: mol_type = other DNA
actgagcatttagaggaaggagggctaactgtgtttgatgttttcccaacaacgatatttgagctgagccttggagactgagtaggttgaccatttaaacaagctaaaaa

SEQ ID NO: 16450 - DNA, 110 bp, synthetic construct
  source 1..110: mol_type = other DNA
ccccccaagactgagcaaagtggatgataggtaccttctacattctaaaggaaggtgttagacacatcaatgtggcactaacgtaaggcagcaaaatcagtacagcagtg

SEQ ID NO: 16451 - DNA, 110 bp, synthetic construct
  source 1..110: mol_type = other DNA
tgttagacacatcaatgtggcactaacgtaaggcagcaaaatcagtacagcagtggatccttagtttctataaaagaacaatagttcatcagagagattaaccaaagtaa

SEQ ID NO: 16452 - DNA, 110 bp, synthetic construct
  source 1..110: mol_type = other DNA
gttccagggagtcctggcaggatgtgtctcaggagcttatcacctgctgtctatgatgtctttaaatacccccccccacaagattattttcataaagcttgatcagtact

SEQ ID NO: 16453 - DNA, 110 bp, synthetic construct
  source 1..110: mol_type = other DNA
catctgtctgtataaggccacgcagactgtgaacttccatttaggcattagagtttgaagacatgctttaaaaatagcttatagttcttcctggaacactccagttttga

SEQ ID NO: 16454 - DNA, 110 bp, synthetic construct
  source 1..110: mol_type = other DNA
aataatgctgccctgtctccttgtccttttagacttaggggtgcaacagcttccaactgtaaccaggtcctggcttcttcattatcccctgctggttcccataacccgct

SEQ ID NO: 16455 - DNA, 110 bp, synthetic construct
  source 1..110: mol_type = other DNA
actgtaaccaggtcctggcttcttcattatcccctgctggttcccataacccgctaatacttctgttgattatctgttaattacactgtcaattaactcctttgtgtgtt

SEQ ID NO: 16456 - DNA, 110 bp, synthetic construct
  source 1..110: mol_type = other DNA
agttttattgatggctaggttcctagtaatctttcctcaaatatacacataaattgtcttcagtcaaactgtcttagagaatatagctttaatcgaaaaccaaattgtac

SEQ ID NO: 16457 - DNA, 110 bp, synthetic construct
  source 1..110: mol_type = other DNA
tgggaggtaggggcagaaacattctaaaagactgtttcctctttcatacatatggtattttgaaactgactagctttaaactatttttctccatttcaggaaaatcaagg

SEQ ID NO: 16458 - DNA, 110 bp, synthetic construct
  source 1..110: mol_type = other DNA
gaaacattctaaaagactgtttcctctttcatacatatggtattttgaaactgactagctttaaactatttttctccatttcaggaaaatcaaggggattatttgtactc

SEQ ID NO: 16459 - DNA, 110 bp, synthetic construct; identical to SEQ ID NO: 16457
  source 1..110: mol_type = other DNA

SEQ ID NO: 16460 - DNA, 110 bp, synthetic construct; identical to SEQ ID NO: 16458
  source 1..110: mol_type = other DNA

SEQ ID NO: 16461 - DNA, 110 bp, synthetic construct
  source 1..110: mol_type = other DNA
agtctactcctggatggggccaagaaattgtacccagctgataactccaaacacgtttcctggggctatagattttaggtctggaatgatctgaaaaactttattttaga

SEQ ID NO: 16462 - DNA, 110 bp, synthetic construct
  source 1..110: mol_type = other DNA
caaaattacacataaaacatgggtaatcctagtttaaatggatgattccctaccagaggcatcgctactacagtgatgaaaatcaagcctggatagttcaaatcatttta

SEQ ID NO: 16463 - DNA, 110 bp, synthetic construct; identical to SEQ ID NO: 16462
  source 1..110: mol_type = other DNA

SEQ ID NO: 16464 - DNA, 110 bp, synthetic construct
  source 1..110: mol_type = other DNA
ttctcacagatcctatgttgggttcgtaacctgctgagccacgatgggaactcatagactgtattcttagctggactttttagtggccttatctggaataatactgttaa

SEQ ID NO: 16465 - DNA, 110 bp, synthetic construct
  source 1..110: mol_type = other DNA
aagtagtacatgtcctaccactttaaaatacctggtatgaggttcccagtggtgtgccagactggctcaagccagcttgtttctgtcagtaaaagtcaattctgtaatcc

SEQ ID NO: 16466 - DNA, 110 bp, synthetic construct
  source 1..110: mol_type = other DNA
atccagttgcccttccaatgggaccatcattaactgattaaatctactcctgtgactggccagctgttagctggcgagcgatagtttaatttactttaagaagataaagt

SEQ ID NO: 16467 - DNA, 110 bp, synthetic construct
  source 1..110: mol_type = other DNA
tgtaatatggaaaagttgtgagaaaatcaccagcagtgttgggtctataattattgtgaaattcatggctagggatggtgggagaaatcagtcttaggtttatttctggt

SEQ ID NO: 16468 - DNA, 110 bp, synthetic construct; identical to SEQ ID NO: 16467
  source 1..110: mol_type = other DNA

SEQ ID NO: 16469 - DNA, 110 bp, synthetic construct
  source 1..110: mol_type = other DNA
ctttgggagccttttcatcttcctttaatcatttgtttgcctcagttaaccttaaagccatgttttgcagagataattttaggctcatgataatattaggcagcctcaaa

SEQ ID NO: 16470 - DNA, 110 bp, synthetic construct
  source 1..110: mol_type = other DNA
gggagggggttgcatttatagatgttagatagctctaagactatgactcaagatggcagcatttgaatcagatactgaagtatgaacaatattccatgtatgatattgca

SEQ ID NO: 16471 - DNA, 110 bp, synthetic construct
  source 1..110: mol_type = other DNA
gcagcatttgaatcagatactgaagtatgaacaatattccatgtatgatattgcagggaaaggatttcctaggccaaagataaagtatgtgtaaggcacagaagtagaaa

SEQ ID NO: 16472 - DNA, 110 bp, synthetic construct
  source 1..110: mol_type = other DNA
tccttttgctcttctttgtgtttatcattgcttttataatagctcccctcccttttagagctttatggttgcttatttaagtaatttctttcctattgtagtttcctgca

SEQ ID NO: 16473 - DNA, 110 bp, synthetic construct; identical to SEQ ID NO: 16472
  source 1..110: mol_type = other DNA

SEQ ID NO: 16474 - DNA, 110 bp, synthetic construct
  source 1..110: mol_type = other DNA
agagattaaatctgatctgcagatgcgaactgagccacagctatggcaacaccagatccttaaccccactgctcctggtcagggatcaaacacacacctctacagagacc

SEQ ID NO: 16475 - DNA, 110 bp, synthetic construct
  source 1..110: mol_type = other DNA
cacaccatgccacagcaatccagtctctctcaacttcttaagtgttatacttatctcttagtattaccttctatagtgaggcgatatttcattttacgtctgactaagga

SEQ ID NO: 16476 - DNA, 110 bp, synthetic construct
  source 1..110: mol_type = other DNA
catggccctaactatgcagggcttaacacctaccagagctcaggcaccagtcctagaatcccccaggccctggcgctggccttcaaggtgtctactccagccacttaacc

SEQ ID NO: 16477 - DNA, 110 bp, synthetic construct
  source 1..110: mol_type = other DNA
agcttcaatactgaattagatggacttgactcttgatctcatgtattttataagtagagttgcccagacaatgggcttttgtatcaaacctaccagtgttgaaattctaa

SEQ ID NO: 16478 - DNA, 110 bp, synthetic construct
  source 1..110: mol_type = other DNA
gcatactaagaccaaatgaaagtcatctttttttaccaattcaactttcattctgcctcattctgtcacttgaagacatttctttagggaaataaaatgttttagtctaa

SEQ ID NO: 16479 - DNA, 110 bp, synthetic construct
  source 1..110: mol_type = other DNA
ttccaagaggctccttgatctttataaaaacaggcctctggtaggcgtgtcccgccttaaaatcaccaagcatatcttatcccactagggacacaaggttggaggcagac

SEQ ID NO: 16480 - DNA, 110 bp, synthetic construct
  source 1..110: mol_type = other DNA
tctggcgttgctgttgttgtggcatagtccaatagctacagctcgtattctaccaaggggtagaacttccatatgctgcgggtgtagccctaaaaaaaaaagaaaattgc

SEQ ID NO: 16481 - DNA, 110 bp, synthetic construct; identical to SEQ ID NO: 16480
  source 1..110: mol_type = other DNA

SEQ ID NO: 16482 - DNA, 110 bp, synthetic construct
  source 1..110: mol_type = other DNA
aaccaatcagaaaatggagcaatgataaaaagtgaaaagacaaatattacaagaaacagcagatggcaggggctctggacatggtaaaagaaaggatagaaagtaaaact

SEQ ID NO: 16483 - DNA, 110 bp, synthetic construct
  source 1..110: mol_type = other DNA
gagaaaagccatggtgtcaaagaggtatactcactcattcacaagcagcttgcgatagagccagatgttcaacctagaccagtagccccacagggaactgcttcctgaac

SEQ ID NO: 16484 - DNA, 110 bp, synthetic construct
  source 1..110: mol_type = other DNA
aggcctgtgggtgtgcttgcgggatagcaaacagattagacagaatctttaatggacttgagatactcccagaaggtctatgccctttaaaaaaaataaataaatatttg

SEQ ID NO: 16485 - DNA, 110 bp, synthetic construct
  source 1..110: mol_type = other DNA
acttgagatactcccagaaggtctatgccctttaaaaaaaataaataaatatttggtatcagtttggtaaggtttttttttgtgtgtgtgtgaattttctccatctgatt

SEQ ID NO: 16486 - DNA, 110 bp, synthetic construct
  source 1..110: mol_type = other DNA
agataatgccgaacagcccagagctcagggaaaccacacatgtcttgtaaggaaccttgactagcaaactataggaccagaaagatgatgcgaataggagcaggaatgtg

SEQ ID NO: 16487 - DNA, 110 bp, synthetic construct
  source 1..110: mol_type = other DNA
cctctgatttggtcttgatttctcatgagacttcattcatttcaacaaatctgtctagcttcaaacttgagtttatttaatactctaaaatatttcaagcacttcatggg

SEQ ID NO: 16488 - DNA, 110 bp, synthetic construct
  source 1..110: mol_type = other DNA
ggaagatggtaccttgagcagaaataaggaacacaagcagacacacaggttctagaattgcagttctcagcttggggtatcagggaggtgtaggagtgttgctggttggc

SEQ ID NO: 16489 - DNA, 110 bp, synthetic construct
  source 1..110: mol_type = other DNA
aatctttctgccaaggtagttactgtactcatctatgtataaaattaggatgtcagaaccatggactttgtacttttcccagccctaggatgctcgaactctgggaaggc

SEQ ID NO: 16490 - DNA, 110 bp, synthetic construct
  source 1..110: mol_type = other DNA
ctagagcaggaccattcacatggagatggtgggtgtagatccgagaattctcaacgccctctgacttggttggattgctgagctggacacacacacacacacacacacac

SEQ ID NO: 16491 - DNA, 110 bp, synthetic construct
  source 1..110: mol_type = other DNA
tcccattccagatccttgagatctaggagaacaggtccacagaggcttacctttcaggtcagcctcttctcagacagggagctggatgcaccctatgacctttctatctc

SEQ ID NO: 16492 - DNA, 110 bp, synthetic construct
  source 1..110: mol_type = other DNA
gattgcacaggaggtaaaggtgagggagaggaagtgacatcaaagaaagctcccagaaactcagcaaatgagtgttctgcttgctgaaggggtgcatccagactgggctg

SEQ ID NO: 16493 - DNA, 110 bp, synthetic construct
  source 1..110: mol_type = other DNA
gaaactcagcaaatgagtgttctgcttgctgaaggggtgcatccagactgggctggtctgagacactggctgaaaggaaacagagaccatctcaccttacctcattcagg

SEQ ID NO: 16494 - DNA, 110 bp, synthetic construct
  source 1..110: mol_type = other DNA
gacttaagatactcccttcctgtgtaacagtgctagaagatgtgtgttcccattcacctgtgccatagccacatacatcagctgctctggtcttcgcattactgggtagg

SEQ ID NO: 16495 - DNA, 110 bp, synthetic construct
  source 1..110: mol_type = other DNA
taggtgggcctccaggctgattgatactatgcctcagtaatatcagagtgatatcatgtatctttaaaaaaaatctttactctcctgtcctttgagtttgtttcatcttc

SEQ ID NO: 16496 - DNA, 110 bp, synthetic construct
  source 1..110: mol_type = other DNA
taagtacatatggcttcacttcctttttattttttaatgatcactcagctttcaatagaagtgttggaatttcaaaaggatctgataagaagcactcgtcttcctctgcc

SEQ ID NO: 16497 - DNA, 110 bp, synthetic construct
  source 1..110: mol_type = other DNA
tagaagtgttggaatttcaaaaggatctgataagaagcactcgtcttcctctgcccccaagttctgaacaatttgagaacaaaataaatggatggcataaggaggccgta

SEQ ID NO: 16498 - DNA, 110 bp, synthetic construct
  source 1..110: mol_type = other DNA
ctttttaatttctgccaatctgacagggagagatggcatcttagtgtagttttaaattgcatatctcatgagtgaagtgaacgtttattcatatgtttaaaggttatttt

SEQ ID NO: 16499 - DNA, 110 bp, synthetic construct
  source 1..110: mol_type = other DNA
attgcatatctcatgagtgaagtgaacgtttattcatatgtttaaaggttatttttataggtttcttgtgaatgggtaaggactgaaatattctgtttttgcccaagtat

SEQ ID NO: 16500 - DNA, 110 bp, synthetic construct
  source 1..110: mol_type = other DNA
cactgttaattagcaagaagaagagaataaaactgagaaggcaactagagatatttgcctaacccttctcttgagcaggtaaatctatgaatctatgtcttttttttttc

SEQ ID NO: 16501 - DNA, 110 bp, synthetic construct
  source 1..110: mol_type = other DNA
tttaaaattaaccacatcttctgttcaaatgttgctggaattgacctactatgtctatggagataataagattaaggtgaatgtagtaatgaatagtataacacagccta

SEQ ID NO: 16502 - DNA, 110 bp, synthetic construct; identical to SEQ ID NO: 16501
  source 1..110: mol_type = other DNA

SEQ ID NO: 16503 - DNA, 110 bp, synthetic construct
  source 1..110: mol_type = other DNA
cctgggtgacaggcagttaacagaaagaagagttctagttcacttgccaaagggtgatgaagtcaaggaagctatgaagcatctttaagaagacatggccattttccatg

SEQ ID NO: 16504 - DNA, 110 bp, synthetic construct
  source 1..110: mol_type = other DNA
ggtagcactatagcccctttcctagacctgagcctcatgcagctgaaatataagatggccctgagtacatatcactgatgtccacacagttctataaaagcaaatgagca

SEQ ID NO: 16505 - DNA, 110 bp, synthetic construct
  source 1..110: mol_type = other DNA
cagtccctgagaagagagtaagcaagagtgaagcagaaggccagttcccagctcagtgtgctgaggttatgaggacaggttgtggttatggcaagaatttagaggtccaa

SEQ ID NO: 16506 - DNA, 110 bp, synthetic construct
  source 1..110: mol_type = other DNA
tgcagaaaaggtttgcatactggtagggcctgttagctggcagatttccattgcggtacttatgtggatcagaggcaggcagacaaaaaaaggaaggattctgcctctca

SEQ ID NO: 16507 - DNA, 110 bp, synthetic construct
  source 1..110: mol_type = other DNA
ccttctatgagaaggggttgctcataagtagaggctctattgatggctgaggaaataccagctgtgaccaccaggtttggcacagctagaccgggactaaactgctctgc

SEQ ID NO: 16508 - DNA, 110 bp, synthetic construct
  source 1..110: mol_type = other DNA
catgacagaagtatcattttgaaacaattaacagtgtctgtctctaacaaaaaggcatttggctgctgtagctgacatctagcaatgctgagaagaaaacacagtgttca

SEQ ID NO: 16509 - DNA, 110 bp, synthetic construct
  source 1..110: mol_type = other DNA
gcctccttctcacccagcttctgcttcagcagcctgtgcatcaccatagagacagaaacgtttgtggaaagttctgaggcccaagggaacctatataattggtaaaggac

SEQ ID NO: 16510 - DNA, 110 bp, synthetic construct
  source 1..110: mol_type = other DNA
tcctacacccaaagacaaagaagaagaagaagccacatcaagacagtagaaggagctctttaacaatataagcaatatcataccttccaggtgggtgacctgcagactgg

SEQ ID NO: 16511 - DNA, 110 bp, synthetic construct
  source 1..110: mol_type = other DNA
gaagaagccacatcaagacagtagaaggagctctttaacaatataagcaatatcataccttccaggtgggtgacctgcagactggaaaacaactgtatcacagaggctct

SEQ ID NO: 16512 - DNA, 110 bp, synthetic construct
  source 1..110: mol_type = other DNA
gatgaagagtgtgactcccctgagtcagtcaaccagcagactcaagaggaaagcgctatagaagttcacactgctgaagatgttccaattgctgcagaagtgcatgcaat

SEQ ID NO: 16513 - DNA, 110 bp, synthetic construct
  source 1..110: mol_type = other DNA
taactgcagcagctctggtcgctgcagaggtatggatttgatccctgcctggcacagtggattgaaggttccagtagtgttgctgcagctatgccttagattcagtccct

SEQ ID NO: 16514 - DNA, 110 bp, synthetic construct
  source 1..110: mol_type = other DNA
ttcatacattggggatttgatgacaaatgagctaaatattttcgtagttctaaatactaacaggttttttttgtgattctgcctatcatcctaagcaacataacagacag

SEQ ID NO: 16515 - DNA, 110 bp, synthetic construct
  source 1..110: mol_type = other DNA
attgagtttgatctatcaaacatgcctccagtggggcccagagtctttcaaagtcaatttactaatcattccaacagttatgactgctgctcactggaggtgcccatgaa

SEQ ID NO: 16516 - DNA, 110 bp, synthetic construct
  source 1..110: mol_type = other DNA
acctcatttcttggctgcactattggccacatgaaggcaagtgtttgagagcactaggtaaggtagtgatctcagtgggggtgtgtgggcagtgagaggatgagtttgag

SEQ ID NO: 16517 - DNA, 110 bp, synthetic construct
  source 1..110: mol_type = other DNA
gaccagaaggttcaagtaaactctttgtctcctttgggagtaggactcagagcagggtctgtgctcaaggagcttcttgggagggcgagcagtttttcccagcactggtg

SEQ ID NO: 16518 - DNA, 110 bp, synthetic construct
  source 1..110: mol_type = other DNA
gcacagagcagcatccacttttcagaatttactaactttcaacaagttagtaagctttcccaagaagctgttctgacaggacctggcagctgcctcaagctccaagcaca

SEQ ID NO: 16519 - DNA, 110 bp, synthetic construct
  source 1..110: mol_type = other DNA
ggctcagaaagatggaacacattcaccctcatgctgcttagaagtggtggagctagagctacccttttagacccatgagctggccagcagactgggctgtgggattttta

SEQ ID NO: 16520 - DNA, 110 bp, synthetic construct
  source 1..110: mol_type = other DNA
ctcccttttgaggtcaatacttcagctgttttgactgttttagagccctttacgcctgaggagggacactcccaaagcagtgcactttccaggggctgtttgggagaggg

SEQ ID NO: 16521 - DNA, 110 bp, synthetic construct
  source 1..110: mol_type = other DNA
gaggagagggactggtctgtgtgagggcttggggagttggcatacacaagtgtgatacagagggaagaccaaaggtaggagacggcagggccttctaacattggaaagga

SEQ ID NO: 16522 - DNA, 110 bp, synthetic construct
  source 1..110: mol_type = other DNA
tacagagggaagaccaaaggtaggagacggcagggccttctaacattggaaaggagggtggtgtagctagagcaaagttgggttcgggagggtgatctcagatgactcta

SEQ ID NO: 16523 - DNA, 110 bp, synthetic construct
  source 1..110: mol_type = other DNA
aatccttttgtcccctgttagttgagtcattttgctatagctgagttactgacgtagagatgtggcctgaatttgccatgtgcacttaagcaatagagtaaaaactgaag

SEQ ID NO: 16524 - DNA, 110 bp, synthetic construct
  source 1..110: mol_type = other DNA
ttggccaccaatttgtcatactgtcagataatttataattgtctaatccagaagcattctaaacaatttttatccaagctttagaatgctttaaggcaagtgaagatgtc

SEQ ID NO: 16525 - DNA, 110 bp, synthetic construct
  source 1..110: mol_type = other DNA
gtaatgcaaattttactagcttgtttcaagtcaagatataagaaggaaggagttcttccagctcaagataatgcttctaagtcgttagccctctgtgtgctttgttttta

SEQ ID NO: 16526 - DNA, 110 bp, synthetic construct
  source 1..110: mol_type = other DNA
ttccagctcaagataatgcttctaagtcgttagccctctgtgtgctttgtttttagaagcatatatgtacaaaatggaacctcagggatgattgtgccaaccttcagatc

SEQ ID NO: 16527 - DNA, 110 bp, synthetic construct
  source 1..110: mol_type = other DNA
ctgtggctgtagtttaggctgtagctctgattcagcccttagcttggaaacctccgtctgccccaggtgcagccctaaattttttttttaatttttaaataaataaataa

SEQ ID NO: 16528 - DNA, 110 bp, synthetic construct
  source 1..110: mol_type = other DNA
gtggtgtaaaaatcggtgacgcccgccatctcccgggaaccgcgttgagctacttagctgagacagcaggcggaagatgagggctaatgaaataaaccgggttttcaagt

SEQ ID NO: 16529 - DNA, 110 bp, synthetic construct
  source 1..110: mol_type = other DNA
gctcagtgttactaaatgcattatctatgccttatttcatgaatatcacctaggcagagggtagatatgtattaagaaaacagcttaccacaatactaaaatcagaactc

SEQ ID NO: 16530 - DNA, 110 bp, synthetic construct
  source 1..110: mol_type = other DNA
agagggtagatatgtattaagaaaacagcttaccacaatactaaaatcagaactcctctaacagaatattatcctaacttacagcaaagactaatcttcatggctctgag

SEQ ID NO: 16531 - DNA, 110 bp, synthetic construct
  source 1..110: mol_type = other DNA
agcaatagaattcctgattctacatgtccttacccttccttctctacctataccagcaaacttgttcctctccctctcttcattctcattaagtggcccctctattaaac

SEQ ID NO: 16532 - DNA, 110 bp, synthetic construct
  source 1..110: mol_type = other DNA
tccagtcaaagcctgaaagatcaaaatatcattgcctgctctctttttgtttacaagaggtggctaataggggatggtgaggcaacatagattctgtatacataatagtc

SEQ ID NO: 16533 - DNA, 110 bp, synthetic construct
  source 1..110: mol_type = other DNA
taaacaatgatgagtctaaaaccacagagccagaaatgacctgtagaataaaaaaccaacatttcatacactgccacaaataagctagggtcagtataaaataaaatgca

SEQ ID NO: 16534 - DNA, 110 bp, synthetic construct
  source 1..110: mol_type = other DNA
ccaacatttcatacactgccacaaataagctagggtcagtataaaataaaatgcaatgtgaaataaactgtagtgtaaaataaagagcgagcttgaagaaaaggaaaata

SEQ ID NO: 16535 - DNA, 110 bp, synthetic construct
  source 1..110: mol_type = other DNA
ctacggtgctgtggcgtcttgcgcagtgcggacgcctccactctagactgaagcgaaaaagctcgcagtgggagcagaaaattggtctattgataacattcgctctgagt

SEQ ID NO: 16536 - DNA, 110 bp, synthetic construct
  source 1..110: mol_type = other DNA
gattagtgttcttataaaaggccctgcagaactctcgctttgtgtctgtctctctctctgcaccatgaggatataatgagaagtcagctatctgcaacctggaggagggt

SEQ ID NO: 16537 - DNA, 110 bp, synthetic construct
  source 1..110: mol_type = other DNA
agttagcctagcaaacgtttccccaacctggtcaatgttgtggctggactagcctttgtggttctttttatgactgcaagagttactttagctaaatccattagagaatt

SEQ ID NO: 16538 - DNA, 110 bp, synthetic construct
  source 1..110: mol_type = other DNA
ttgtggttctttttatgactgcaagagttactttagctaaatccattagagaattttgaggaatgagatttattactcacagatcctgagggccacacagccaggttgtg

SEQ ID NO: 16539 - DNA, 110 bp, synthetic construct
  source 1..110: mol_type = other DNA
agttttatggcatcgtctaagtagagaaatggcagtgaataaagaactgatctataaagttacattgaaacagacatgacagggattctaacactgcggttttatttttt

SEQ ID NO: 16540 - DNA, 110 bp, synthetic construct
  source 1..110: mol_type = other DNA
gttgccggttaacaaaagtatagttcatagggaggattgtttataaccagttgccaaatatatttgtttctggcttggatgaatgatgtatcaatatcaatgcccacatt

SEQ ID NO: 16541 - DNA, 110 bp, synthetic construct
  source 1..110: mol_type = other DNA
aggcaataactcttcaatatttttcgagcttccaagtgccaggtgttctatataattgcaaggtgctcctcttaaaaagtattctcaaaaatgactggtttgggccagca

SEQ ID NO: 16542 - DNA, 110 bp, synthetic construct
  source 1..110: mol_type = other DNA
attccaaaattcttgaatacagctgatgtggctccagattcagagatatactggacagttctccggagctcctcaacagcagtactgaaagttttatttttaagatcttg

SEQ ID NO: 16543 - DNA, 110 bp, synthetic construct
  source 1..110: mol_type = other DNA
tgggccactattccctagcatgctgctgtcactgcattggtcatctggttctccttcaagtggaggagatatactaatgccctctatagaagcaggtgtaagttaccgaa

SEQ ID NO: 16544 - DNA, 110 bp, synthetic construct
  source 1..110: mol_type = other DNA
tcccaaatggagaaagattaaaatgttggcatcattcaacatttactatgttcaatgtgcaagtgaacggagatctcctgggaaaaatcaattatctaaaattggatttt

SEQ ID NO: 16545 - DNA, 110 bp, synthetic construct; identical to SEQ ID NO: 16544
  source 1..110: mol_type = other DNA

SEQ ID NO: 16546 - DNA, 110 bp, synthetic construct
  source 1..110: mol_type = other DNA
acccaaagacgtctgttatggtacaacacttgaccaagagtgatatgatctcagttaccaagctcagactgcaatctatctgcataaacctgcagacagagagtttcagg

SEQ ID NO: 16547 - DNA, 110 bp, synthetic construct
  source 1..110: mol_type = other DNA
gcatcaggcattggcctggagattgggacataagaagacttgtgcacaaacaggtaatttggacagttctagaccacaacttcctttttccagagtttgaaattgtaata

SEQ ID NO: 16548 - DNA, 110 bp, synthetic construct
  source 1..110: mol_type = other DNA
agaatatgaaacattccattcatatctaactttaacagaatacctgatttttcacctcatttctaatccaactgtctcccactatgataaattacaccatcatccaatga

SEQ ID NO: 16549 - DNA, 110 bp, synthetic construct
  source 1..110: mol_type = other DNA
ctcatttctaatccaactgtctcccactatgataaattacaccatcatccaatgagacatttttcttcccctccccatcaacatgcaattcatcattacatgagttgacc

SEQ ID NO: 16550 - DNA, 110 bp, synthetic construct
  source 1..110: mol_type = other DNA
cagggtgtgggtagaagggccatctgggaagaggatgggtgggaggagaaggatcagaaggagcctgcagctgcggtggggtggtgcacagtatctgtcagaggaggcag

SEQ ID NO: 16551 - DNA, 110 bp, synthetic construct
  source 1..110: mol_type = other DNA
tcttcagaaattcccattatctatacccatcctcaaacttgtcccaggatctgattgatgaaagatttgactcctctgttctaggctctcaaaattctttggatagccca

SEQ ID NO: 16552 - DNA, 110 bp, synthetic construct
  source 1..110: mol_type = other DNA
gcaggaggattgcctctgaagactggactggtgggtggcttattccatttctccatactgtcttctgtattttctataattccactctttgttcctatcccacaagggag

SEQ ID NO: 16553 - DNA, 110 bp, synthetic construct
  source 1..110: mol_type = other DNA
ggagccctataagaagttgttcactgcagatcccagggtgagcccccctctcacataccagctcctttccctggatcggtgccatcattcctagaaccttcttctttgtt

SEQ ID NO: 16554 - DNA, 110 bp, synthetic construct
  source 1..110: mol_type = other DNA
tttagcagtttagcaaaattcagcatgttgatttagcaccaagtgaggcaatctaaataattactggaaggatgtgatattgtaacttatccattatgagaaaactttcc

SEQ ID NO: 16555 - DNA, 110 bp, synthetic construct
  source 1..110: mol_type = other DNA
tccaagccccacatcagtttcccaaatctggggttctggtcttgggaggaggaactaccagagcatttggcatttaagaccagcacaggagatccctgggactggggtgg

SEQ ID NO: 16556 - DNA, 110 bp, synthetic construct
  source 1..110: mol_type = other DNA
ccggggcaggtcatgggaggcgagtgtcaacactgaagggcaagagccagttctaaggacaagcccctgggaactgttctagcgcagagacccacagacaggcggtctgt

SEQ ID NO: 16557 - DNA, 110 bp, synthetic construct
  source 1..110: mol_type = other DNA
cctagctcaggccctatgcatccggcacgtgggagaccaggacggaccagagatgcctaccttctgcagttcacctcggaagactcatgcttggacagagaccacacgtc

SEQ ID NO: 16558 - DNA, 110 bp, synthetic construct
  source 1..110: mol_type = other DNA
cgaagttggagctgcaggccagggctacctctggaaagctgcagacatgaacacggaagaagaggaggaactacagcagaccctttggggtgagcttggtcttattcctg

SEQ ID NO: 16559 - DNA, 110 bp, synthetic construct
  source 1..110: mol_type = other DNA
tgcaagcatgggaccccaagttggcaagcttcctagtagtcatcagagagggaacgtcatcttgcaatgattcacagtgcccataacataaaaacaaatctgtcattaag

SEQ ID NO: 16560 - DNA, 110 bp, synthetic construct
  source 1..110: mol_type = other DNA
gtcatcttgcaatgattcacagtgcccataacataaaaacaaatctgtcattaagattattaaaacgaggagttcccattggggcttagtgggttaagaacctgactagt

SEQ ID NO: 16561 - DNA, 110 bp, synthetic construct
  source 1..110: mol_type = other DNA
cttgatcgcgcacggacgcctgctaccaagcggagcttcagcaaggaagtggaagagcggagtagagagcggccctcccagcctgagggactgcgtaaggcagctagcct

SEQ ID NO: 16562 - DNA, 110 bp, synthetic construct
  source 1..110: mol_type = other DNA
ccaggaattcccctttaggacccagacctgaaatccagggaacctcccactcaaaggccctatccctgggagattgggtgtcctcgcacccccacccccactccacccac

SEQ ID NO: 16563 - DNA, 110 bp, synthetic construct
  source 1..110: mol_type = other DNA
cagccagcaggtgctgagatgtatgctatgctatagggaggggttcctgcccctgcccctcatcaggttctgattgaatggatcaggggttgttaggcctgggtatttgt

SEQ ID NO: 16564 - DNA, 110 bp, synthetic construct
  source 1..110: mol_type = other DNA
aaagtacctatgaaaaaaacttatagcaaccattgtaattaatggtaaaactgttgaaagttttcaccttgaggtggagaatgaggcaaaaatactaaattcaccacttc

SEQ ID NO: 16565 - DNA, 110 bp, synthetic construct; identical to SEQ ID NO: 16564
  source 1..110: mol_type = other DNA

SEQ ID NO: 16566 - DNA, 110 bp, synthetic construct
  source 1..110: mol_type = other DNA
aacagagaggagaaaatcacccccataatccatcaccctaagccaataacttgcaaattcccttcaagtctttgtccacaaggcatgcagatatttaagtattgctatga

SEQ ID NO: 16567 - DNA, 110 bp, synthetic construct
  source 1..110: mol_type = other DNA
cagaatacagggtttcttcctcctgaggcttaggttaaactacactctcaggccccttagcaggacagagcttttcccaaccaacttcagttcgaccctcttgaaccctg

SEQ ID NO: 16568 - DNA, 110 bp, synthetic construct
  source 1..110: mol_type = other DNA
tcccaggatggtatctctcctccatccatctgacaacccccaggggcagggagaagctgatggcagagattttatgccttgccttaaataggggggaaactgaggccaga

SEQ ID NO: 16569 - DNA, 110 bp, synthetic construct
  source 1..110: mol_type = other DNA
ggaagatgaggcttgaatgggtggccacagtgggcttcctgatgttgccctccttgcccctccccacaagctgagccggcagagcttggtccctgctggcctctttgtgg

SEQ ID NO: 16570 - DNA, 110 bp, synthetic construct
  source 1..110: mol_type = other DNA
tcatatatttgtgcagtaataagagttgtaataatcaaaggtctgccctaatgtgcacattttaaaaatgtgcacttcagccactttggcttttaacactcacagtaatt

SEQ ID NO: 16571 - DNA, 110 bp, synthetic construct
  source 1..110: mol_type = other DNA
cacattttaaaaatgtgcacttcagccactttggcttttaacactcacagtaattctgcaaggtagagcattagcttcaatttttagatgaggaagcttatactccacaa

SEQ ID NO: 16572 - DNA, 110 bp, synthetic construct
  source 1..110: mol_type = other DNA
tgcataatattaagcatcgtgtattaagcatttcaccactggtctgcacattggaagagcttgctctataacatatttgggcaacaccaagtgacaagggaggtgtaagt

SEQ ID NO: 16573 - DNA, 110 bp, synthetic construct
  source 1..110: mol_type = other DNA
atgttttctgacctctgatctagattatataataattggcctagattggtaacaggaagccattatgggttcttagttaattaaagtgatgttttatgaagattactgta

SEQ ID NO: 16574 - DNA, 110 bp, synthetic construct
  source 1..110: mol_type = other DNA
ctgaagagatacatttttctgtcagtcatggtactctgtggtaaaagttgttcgctttacaactccaacagtggcgtgagtgcgtttccttgagacagcttacttgtgtt

SEQ ID NO: 16575 - DNA, 110 bp, synthetic construct
  source 1..110: mol_type = other DNA
tttacaactccaacagtggcgtgagtgcgtttccttgagacagcttacttgtgttttgctgtggaacataagtactttattcctatttctcatttcatcacaccgaatat

SEQ ID NO: 16576 - DNA, 110 bp, synthetic construct
  source 1..110: mol_type = other DNA
agtcaaaataaataaataaataaagtcacaatacacaacagtttcatcaccacatatatcccttatgtccttatcctccatcactgacccctagctatgagtaagtttcc

SEQ ID NO: 16577 - DNA, 110 bp, synthetic construct
  source 1..110: mol_type = other DNA
atatcccttatgtccttatcctccatcactgacccctagctatgagtaagtttccatattgggcatatgtattcatttttcttgggtggctatctaggattgaaatggat

SEQ ID NO: 16578 - DNA, 110 bp, synthetic construct
  source 1..110: mol_type = other DNA
gagagggacatgtaacaaaaacccggagtcttcaagtggcagtaatagtggtacggtatagctatgcaaaatggaaaccagagcagtgaatgggaggcagttggcatgag

SEQ ID NO: 16579 - DNA, 110 bp, synthetic construct
  source 1..110: mol_type = other DNA
atccataaggctgtcttctaggttccaaagaacctaaagtcagttacttcagcaaacacaggacccacatctgctggcaagcttttggtacaagttcctttcaaaatagc

SEQ ID NO: 16580 - DNA, 110 bp, synthetic construct
  source 1..110: mol_type = other DNA
aatcctgtagtctgtatcctcccatagcctgaatgcccccaagcccagaggtctgctctttagactctcctgacatcctagatgttgtcatcccagattcccgtcttcct

SEQ ID NO: 16581 - DNA, 110 bp, synthetic construct
  source 1..110: mol_type = other DNA
gcctgtagataaaagtaaaggagaaaaagaatgattcaatgatactgggaactgggaaattattcaattaatggaaggcttctgtggtaatgttgcagtcaaagagatca

SEQ ID NO: 16582 - DNA, 110 bp, synthetic construct
  source 1..110: mol_type = other DNA
tttgtttcgatttaagatctcagcttctctcaagaattccctattaatagcagctgcttgaccacagattttgtcgtgtttgacctagagccctgagtggtctttcctcc

SEQ ID NO: 16583 - DNA, 110 bp, synthetic construct
  source 1..110: mol_type = other DNA
tacatcctgcttccatgtttgctgaacctaaaggcatggctatctgggaccatgggaaagggccagcagcttctggtttcctaggagcagtacctggcagttagctagag

SEQ ID NO: 16584 - DNA, 110 bp, synthetic construct
  source 1..110: mol_type = other DNA
ccttgctacttagtggcacgaggatgaaggcgagacacaggtcaccaaccaccgagcttcttgggggacttccctttgtggtgggcagaccacctgccagcattcagcag

SEQ ID NO: 16585 - DNA, 110 bp, synthetic construct
  source 1..110: mol_type = other DNA
atcttttggagtcaagagcttcccctttggtgggctattctgggcctccctgtcctccaaagggttactgccccttgcagcttaaaggagccatgtctttgggaaaccag

SEQ ID NO: 16586 - DNA, 110 bp, synthetic construct
  source 1..110: mol_type = other DNA
tccaaagggttactgccccttgcagcttaaaggagccatgtctttgggaaaccaggggcccagtcatgccttgccaggtggtatcactatgaaccatgatgggactgtga

SEQ ID NO: 16587 - DNA, 110 bp, synthetic construct
  source 1..110: mol_type = other DNA
aaaatctccagaagtaagagcttttatcaaaataagaacaccccaccaacacttttttgttgttgttagaagaaccgaaataaacacagaagttaaatttaaagtaccct

SEQ ID NO: 16588 - DNA, 110 bp, synthetic construct
  source 1..110: mol_type = other DNA
gaggtgggaagggtgcgagcccggctctcgaccccaggtagagctgtgggtggcattaccggaaaaacaaatttaataaagagcggcgccaatttaaaaggatgagctca

SEQ ID NO: 16589 - DNA, 110 bp, synthetic construct
  source 1..110: mol_type = other DNA
ttaccggaaaaacaaatttaataaagagcggcgccaatttaaaaggatgagctcatttgaaactcaagctgcagggctggcgcggccccactcctctcctggcccccacc

SEQ ID NO: 16590 - DNA, 110 bp, synthetic construct
  source 1..110: mol_type = other DNA
ctatgaactgtaccatggaatccaacccttcatcccgtattaataccctccccacctttttttaaaaacaaaaaatgagattatatttcttttaatcagctgtattttgc

SEQ ID NO: 16591 - DNA, 110 bp, synthetic construct
  source 1..110: mol_type = other DNA
cccttcatcccgtattaataccctccccacctttttttaaaaacaaaaaatgagattatatttcttttaatcagctgtattttgcagtataccatgaaccgttttccaaa

SEQ ID NO: 16592 - DNA, 110 bp, synthetic construct; identical to SEQ ID NO: 16590
  source 1..110: mol_type = other DNA

SEQ ID NO: 16593 - DNA, 110 bp, synthetic construct; identical to SEQ ID NO: 16591
  source 1..110: mol_type = other DNA

SEQ ID NO: 16594 - DNA, 110 bp, synthetic construct
  source 1..110: mol_type = other DNA
ttatccccttgtaacagctttaagaaatagccttttaaaggcatacattgtataactcttatcttattccctgctatatataatacagattacataaaggccgacaaatc

SEQ ID NO: 16595 - DNA, 110 bp, synthetic construct; identical to SEQ ID NO: 16594
  source 1..110: mol_type = other DNA

SEQ ID NO: 16596 - DNA, 110 bp, synthetic construct
  source 1..110: mol_type = other DNA
ttctgccttcccttctctccagagaggtgcagcggacggggtaaacatcttctactttaccctgggcaactgctccctgagatgtagctctgagaaagtgtcccaaccag

SEQ ID NO: 16597 - DNA, 110 bp, synthetic construct
  source 1..110: mol_type = other DNA
aatgttgtaattatgcaaaatgttttcctccctctctccctcctagtttgcctgttgcagacatcaattgctgctgtagaaacattcaggaacctggaagagagccccac

SEQ ID NO: 16598 - DNA, 110 bp, synthetic construct
  source 1..110: mol_type = other DNA
aattttggacttcatggaaggaaacctggagttcctagatgcagcactgaccaggcatgaacaatagagtgggtgggtgggaaagtgctctgaacctttagcaagcagtt

SEQ ID NO: 16599 - DNA, 110 bp, synthetic construct
  source 1..110: mol_type = other DNA
catgaacaatagagtgggtgggtgggaaagtgctctgaacctttagcaagcagttccacgttatggaatttcctaggagagcattttgctacccacaccagctccagtgg

SEQ ID NO: 16600 - DNA, 110 bp, synthetic construct
  source 1..110: mol_type = other DNA
ttatattcaccctagtgtttgctgagccagcacagtgcctgtacatgctatgggagcactgactggttagtacggccaagaagaaagtcctggcaatggagttggccacg

SEQ ID NO: 16601 - DNA, 110 bp, synthetic construct
  source 1..110: mol_type = other DNA
gccatctccctcttctgtgtctctacctaagtggtgtccctggttgaaatgccttcttccactttcacttgcccatcaagtacctcaagtgctgtcaacttcaagaaacc

SEQ ID NO: 16602 - DNA, 110 bp, synthetic construct
  source 1..110: mol_type = other DNA
tcagtcaggcccaatgggaaaagaggcacattgcatctcctacaagaaatcaactacccttgaaactctaccaatgagtaactgtaactggcctgaactctcacttttct

SEQ ID NO: 16603 - DNA, 110 bp, synthetic construct
  source 1..110: mol_type = other DNA
acccttgaaactctaccaatgagtaactgtaactggcctgaactctcacttttctccaatggacttttgttcaaaacatcctctcccaacttactcttttttctctataa

SEQ ID NO: 16604 - DNA, 110 bp, synthetic construct
  source 1..110: mol_type = other DNA
cacatgtccacctggtatgtgtccccacactccctggactccctccaacagcttgtttcaggtcggccaattcagcacatattcgtatagggccatgcatcacataaaac

SEQ ID NO: 16605 - DNA, 110 bp, synthetic construct
  source 1..110: mol_type = other DNA
tctctgctggtattaaaatcatccacacatgtgatggggaccaaaaaacataagtgcaccgggggagggggactcctggggaaaggccagctatgttctcctctttctac

SEQ ID NO: 16606 - DNA, 110 bp, synthetic construct
  source 1..110: mol_type = other DNA
gttggcaaactccctccagaaagcaaggacatgcttggggtggttctccctgtcctgaaaggcagaagatcctttggggcctatggtgggaagtttcctatttttcctgc

SEQ ID NO: 16607 - DNA, 110 bp, synthetic construct
  source 1..110: mol_type = other DNA
ttctaaacagtggtccaaggacatgggctctcagatatatgaatctggagttgattatctgaattggcctcttttgatgggagtgggttactgttagcacaaagtatgag

SEQ ID NO: 16608 - DNA, 110 bp, synthetic construct
  source 1..110: mol_type = other DNA
caggactggattttagttttgttaacttgattgacattttgagaaaggtggttgcgtgtgagatcttgagaatcagaattccataccctttggtaatttatcatttttcc

SEQ ID NO: 16609 - DNA, 110 bp, synthetic construct
  source 1..110: mol_type = other DNA
caaatttatgcctaccagaggggaaagggggtggaggagggataaattaggagtctgagattagcagagacacaccactatacataaaatagataaatgacaaggacatg

SEQ ID NO: 16610 - DNA, 110 bp, synthetic construct
  source 1..110: mol_type = other DNA
agggggtggaggagggataaattaggagtctgagattagcagagacacaccactatacataaaatagataaatgacaaggacatgctctgtagcacagggaactgtattc

SEQ ID NO: 16611 - DNA, 110 bp, synthetic construct
  source 1..110: mol_type = other DNA
ctaacacaattaacagtgatttcttaatataatacctaatctatattcaaatatccctgattgtcaccagtgttaatttctttaaaggtctgcagattgcatgtgagtgt

SEQ ID NO: 16612 - DNA, 110 bp, synthetic construct
  source 1..110: mol_type = other DNA
cctgattgtcaccagtgttaatttctttaaaggtctgcagattgcatgtgagtgttgtgtgtcttaagccatttatttttcatgcctattgacttgttgatgaaactagt

SEQ ID NO: 16613 - DNA, 110 bp, synthetic construct
  source 1..110: mol_type = other DNA
cctctgcatctaattttccctattttcctgttatccctttcagttgacacagttactgctaaggacaagatggtggacatttctaaatctacccctcatcctccatcctg

SEQ ID NO: 16614 - DNA, 110 bp, synthetic construct
  source 1..110: mol_type = other DNA
tttttgatctagcgctgatttgcctgtccagcttaatctcagtaccagccaagatctggcatatcattctgggagcatgccataaccatctgggcttcagtcccattgca

SEQ ID NO: 16615 - DNA, 110 bp, synthetic construct
  source 1..110: mol_type = other DNA
gtcctgccacttggaacacaatctgagggtattcacaaaatactgtgtatatcctacaaaccaacaatcttagctcaaggtacctgtcttagagaaatatccatgttcaa

SEQ ID NO: 16616 - DNA, 110 bp, synthetic construct
  source 1..110: mol_type = other DNA
acaaaccaacaatcttagctcaaggtacctgtcttagagaaatatccatgttcaaacatgttcattgctgcgttatttgtcaaggtgaaaactaagcctcagtaaagtaa

SEQ ID NO: 16617 - DNA, 110 bp, synthetic construct
  source 1..110: mol_type = other DNA
gagagaggtaacagatgcatgtagaagagctgaccagagagtctccagccaacttgccagctgaccagccacagacatgtgaattaggccagatcagcagaacctccaga

SEQ ID NO: 16618 - DNA, 110 bp, synthetic construct
  source 1..110: mol_type = other DNA
gtaaaaagcacacaagtgagatttaaagcacctggatccaccccctgtctctatcactcatgtgttagagcttaacaatttgctcaagcttcctgagcctcagattttta

SEQ ID NO: 16619 - DNA, 110 bp, synthetic construct
  source 1..110: mol_type = other DNA
actcatgtgttagagcttaacaatttgctcaagcttcctgagcctcagatttttaatttatactggtttttatacaggaatgtattttggtaacattcttggagattttt

SEQ ID NO: 16620 - DNA, 110 bp, synthetic construct
  source 1..110: mol_type = other DNA
actcccaggtccttgagagacagagtcaccacacaccatagggtgtatgtgtgtggcgggggggagtcacacagaaggagtgctaagggagctggctcaaccaaacaggt

SEQ ID NO: 16621 - DNA, 110 bp, synthetic construct
  source 1..110: mol_type = other DNA
gcgggggggagtcacacagaaggagtgctaagggagctggctcaaccaaacaggtgggaagccaaagaagagtgagaactagtgggcaagcgcctttactgggggtcagg

SEQ ID NO: 16622 - DNA, 110 bp, synthetic construct
  source 1..110: mol_type = other DNA
ttcttaaaaaaatgtttaatgggagggtattatgtaacctaactgctaccctatcagagagctagagtaggctggtattacaattcacaattttctgttaaaaaactgag

SEQ ID NO: 16623 - DNA, 110 bp, synthetic construct
  source 1..110: mol_type = other DNA
ccaaggtcccacctctgcacacaaggtcagtccaggtcctctccccaccctcgctgctcacctgtacaaatctggctccgcacgtttcgcatttgtagggcttctctcca

SEQ ID NO: 16624 - DNA, 110 bp, synthetic construct
  source 1..110: mol_type = other DNA
gctcacctgtacaaatctggctccgcacgtttcgcatttgtagggcttctctccagagtgaattcgggtgtgggttttcaggtttgccggccggttaaactgggccccac

SEQ ID NO: 16625 - DNA, 110 bp, synthetic construct
  source 1..110: mol_type = other DNA
tacagggagaatgccatgtgaacatgaagatagctatcgacaagccaaggggaaaggcctggagcagaccctcccctcacagccagggagcaaatgccagcaccttgaca

SEQ ID NO: 16626 - DNA, 110 bp, synthetic construct
  source 1..110: mol_type = other DNA
ggttctgtggtttcctggccaccacgcaggtgtggctggtggaagcagaggtctgaatagaggagccaagggcctgtgacctcgcagataaacagggtgacccctcgccc

SEQ ID NO: 16627 - DNA, 110 bp, synthetic construct
  source 1..110: mol_type = other DNA
aatagaggagccaagggcctgtgacctcgcagataaacagggtgacccctcgccccatgaattaggtgttccccaaaaaattcactttgcgtgaaagtatcctgaccctt

SEQ ID NO: 16628 - DNA, 110 bp, synthetic construct; identical to SEQ ID NO: 16626
  source 1..110: mol_type = other DNA

SEQ ID NO: 16629 - DNA, 110 bp, synthetic construct; identical to SEQ ID NO: 16627
  source 1..110: mol_type = other DNA

SEQ ID NO: 16630 - DNA, 110 bp, synthetic construct
  source 1..110: mol_type = other DNA
atcccaaaaaccaggccacttgcctagtctcagtttctgaaatgagttctccttagttttgacagcagtagttgatttgtaattttccagctcagttaaatctcctcctg

SEQ ID NO: 16631 - DNA, 110 bp, synthetic construct; identical to SEQ ID NO: 16630
  source 1..110: mol_type = other DNA

SEQ ID NO: 16632 - DNA, 110 bp, synthetic construct
  source 1..110: mol_type = other DNA
agactactctagggttgacgtgtatccgattattcctatctggcccatggagagatggaggaatgcaaagctgaagtccactggcgcccaagagggccttttccctgtct

SEQ ID NO: 16633 - DNA, 110 bp, synthetic construct
  source 1..110: mol_type = other DNA
acttaagcagctttcgaatctctgtctcagatttccttatctaggtcagaccgcgtctttttaaaaattttgcatggactctacttcatagattggattggtccctttag

SEQ ID NO: 16634 - DNA, 110 bp, synthetic construct
  source 1..110: mol_type = other DNA
gcattgaaactggatttttcatcattttaacctgaatggttgtagtgctacagatttttcacaagtataatatgacttatacagggcatgtcctcagatacccaaagaca

SEQ ID NO: 16635 - DNA, 110 bp, synthetic construct
  source 1..110: mol_type = other DNA
ttttcacaagtataatatgacttatacagggcatgtcctcagatacccaaagacagctttgtttcctcattcatcttcttcctgcttcagtctttttctcactacctaca

SEQ ID NO: 16636 - DNA, 110 bp, synthetic construct; identical to SEQ ID NO: 16634
  source 1..110: mol_type = other DNA

SEQ ID NO: 16637 - DNA, 110 bp, synthetic construct; identical to SEQ ID NO: 16635
  source 1..110: mol_type = other DNA

SEQ ID NO: 16638 - DNA, 110 bp, synthetic construct
  source 1..110: mol_type = other DNA
tgtcataattgtaaaaaatgtcctatttgttgaccaatattttgggttcaagttatgattctggcttttgatggcttgcagcgtgggcagattgtttcttttgagctttc

SEQ ID NO: 16639 - DNA, 110 bp, synthetic construct
  source 1..110: mol_type = other DNA
tgattctggcttttgatggcttgcagcgtgggcagattgtttcttttgagctttctttcccctgtctttgtaatggagataatagtcccttctccttgggttttaggcag

SEQ ID NO: 16640 - DNA, 110 bp, synthetic construct
  source 1..110: mol_type = other DNA
ctctagcctcatcctgagaccaagacttgttacttaatatctgtagggtctcagctcacttagtataatcctgcaatcctctcatttacagaacacactaagaccttctg

SEQ ID NO: 16641 - DNA, 110 bp, synthetic construct
  source 1..110: mol_type = other DNA
aagcatgatcctacaggcagcagaatctgagtggaacttggaaaggagttgagatatacctgccctctttctttcctccatgttaccagtgagctaaatcactgcttctc

SEQ ID NO: 16642 - DNA, 110 bp, synthetic construct
  source 1..110: mol_type = other DNA
gcagaagggaaagcaccagttaaaaccctttggggcacccggactcagcacataggtctatgcttcctcttctgcatcacccacatacaacttagaccagtcttcctacc

SEQ ID NO: 16643 - DNA, 110 bp, synthetic construct
  source 1..110: mol_type = other DNA
gtgtccccgatttctcccaagaataggaaaagtacgggaggcagtagagctggtcatgtctgggtctagcatattagcctgacccattctggaagaatattctccaacat

SEQ ID NO: 16644 - DNA, 110 bp, synthetic construct
  source 1..110: mol_type = other DNA
atgtctgggtctagcatattagcctgacccattctggaagaatattctccaacatataaaggagaagattgttccttcagaatacagtgcatctgctttcacagctgaga

SEQ ID NO: 16645 - DNA, 110 bp, synthetic construct; identical to SEQ ID NO: 16643
  source 1..110: mol_type = other DNA

SEQ ID NO: 16646 - DNA, 110 bp, synthetic construct; identical to SEQ ID NO: 16644
  source 1..110: mol_type = other DNA

SEQ ID NO: 16647 - DNA, 110 bp, synthetic construct
  source 1..110: mol_type = other DNA
ctcccagtaagctgtgatagcatcttatactacttagaagattgtatttaaatcacctatgcatttctcatgtaccccatcagctacaaactctccctaagggcagagat

SEQ ID NO: 16648 - DNA, 110 bp, synthetic construct
  source 1..110: mol_type = other DNA
cttcggcagccacgtccacaacaaagtgaatggcaggttccttgggtcagggttagctgcaggatgacactgcccaaaggctcgggctgtgaagggagaatgactagaag

SEQ ID NO: 16649 - DNA, 110 bp, synthetic construct
  source 1..110: mol_type = other DNA
tcatgttctatttgcctaaaagtcaggttggctgtctatgaactggctggtcaatctccaccatccaccttggagtccattaaccagccaagaaagtgatgctccctccc

SEQ ID NO: 16650 - DNA, 110 bp, synthetic construct
  source 1..110: mol_type = other DNA
ctccaccatccaccttggagtccattaaccagccaagaaagtgatgctccctcccttacctataacccccacaatgcacccctactgctgctggccgaagggtatatctg

SEQ ID NO: 16651 - DNA, 110 bp, synthetic construct
  source 1..110: mol_type = other DNA
gtctatccctgaaggtttaacagctccagctatagaacagaatacttaataccaagctttccaaatatctctccagaacttaaaaacaaacaaaaaccccaaaccaaaac

SEQ ID NO: 16652 - DNA, 110 bp, synthetic construct
  source 1..110: mol_type = other DNA
gtgtgtgggtctgtactggactctctattgtgttccatcaatctacatatctagcctttctctatctagcagtctgttttgacaattttagtgattgactatatacttct

SEQ ID NO: 16653 - DNA, 110 bp, synthetic construct
  source 1..110: mol_type = other DNA
ttgtcaaggttcacctcctcctttgatttctttcctgctgagacctgtgaaatgagtcaggctatcagaagagcttgggataagagaaaagagccactggtaatcatttt

SEQ ID NO: 16654 - DNA, 110 bp, synthetic construct
  source 1..110: mol_type = other DNA
gtcaggctatcagaagagcttgggataagagaaaagagccactggtaatcattttgtcttcctggagttttaaaatatcaagggcatctttaatttaacttgacccattt

SEQ ID NO: 16655 - DNA, 110 bp, synthetic construct
  source 1..110: mol_type = other DNA
tggtggagatttgccttagctctcacatgaatattccagtgcccccccttttttccatggcatcctcttttttcacccaggaggaggtcactactttccaggttagccaa

SEQ ID NO: 16656 - DNA, 110 bp, synthetic construct
  source 1..110: mol_type = other DNA
agttctgtgggcttgggaaagtagctttttcttttcagacttccagcttcctcaaaaccctttcagccagatgaaatcaaatgcttctactctgtgggtaaaatcaacta

SEQ ID NO: 16657 - DNA, 110 bp, synthetic construct
  source 1..110: mol_type = other DNA
ataaggaaaagatagggaagttgtccatcttcatcagtagtaaaattcagaccatgggtaaatagaaaaacatgaggagttcctgctttggtgcagtgggttaagcatct

SEQ ID NO: 16658 - DNA, 110 bp, synthetic construct
  source 1..110: mol_type = other DNA
ttttgttcttaatcatggtgccctaggttcttttttttttttttctgttcaaataaggcactaatgagctgtcgtaattattaagctgattgattgttactttcataatg

SEQ ID NO: 16659 - DNA, 110 bp, synthetic construct
  source 1..110: mol_type = other DNA
tagaaaagcagagggaaggggacttcttactttcttttacctaacaagtcttattcctttttgagaaccttgcatttgcttcaaaatatgcccaatactagatcgtctta

SEQ ID NO: 16660 - DNA, 110 bp, synthetic construct
  source 1..110: mol_type = other DNA
attcatttccactgtgccacgacgggaactcccttcatatctttttatggcttgatagctcatttatgtttagccctaagtagtattctattgtctggacatacgagttt

SEQ ID NO: 16661 - DNA, 110 bp, synthetic construct
  source 1..110: mol_type = other DNA
gccagcaaggctcacctgcagtcttaccccctgtttggaaaagggcccccaggtcttgagggaaagctggtgaattgagaggctaaaggtttagcagtgacctcctctca

SEQ ID NO: 16662 - DNA, 110 bp, synthetic construct
  source 1..110: mol_type = other DNA
tccaggtcagattagatgagcatattatcctgtttactgcctcaaactgagctggaagctgaggaaggaaagggctgggaaatgtgagagccgtagagggccagaagttt

SEQ ID NO: 16663 - DNA, 110 bp, synthetic construct
  source 1..110: mol_type = other DNA
aagctgaggaaggaaagggctgggaaatgtgagagccgtagagggccagaagttttcaaattaggcagaggaatgtgctgacagctctcttgttggggaaaggaggactg

SEQ ID NO: 16664 - DNA, 110 bp, synthetic construct
  source 1..110: mol_type = other DNA
tgaaatactctcttaaagcttgttcaaagtacttgatagctagttcaaagtcatcggtctcataatgtttaactgctgcaccataactttcctgtaagaaacaaaaataa

SEQ ID NO: 16665 - DNA, 110 bp, synthetic construct
  source 1..110: mol_type = other DNA
ggtctcataatgtttaactgctgcaccataactttcctgtaagaaacaaaaataagttattttttcaaagagcacccacgggagcacttcaatttcaggattcaggcaga

SEQ ID NO: 16666 - DNA, 110 bp, synthetic construct
  source 1..110: mol_type = other DNA
ctgaaatgtccaagcacttctacattcagaggtccaggaaaaaagaagagctatcaggagttccccagtggctcagagggttaaggatctggcattatcactgttatggc

SEQ ID NO: 16667 - DNA, 110 bp, synthetic construct
  source 1..110: mol_type = other DNA
caaaacaagggaaatttaaaatctcactcagccgctaagactgcctttaacacaccaaaggcaatctgctcacccatatccaaactaatccattccccatcttttcccac

SEQ ID NO: 16668 - DNA, 110 bp, synthetic construct
  source 1..110: mol_type = other DNA
agatcctctattatttcaactaatatttagtgaaggcctactctgtgtaatcagtatgccaaccattgtagagttacacaaataattaaaaggcacagtctttgtactca

SEQ ID NO: 16669 - DNA, 110 bp, synthetic construct
  source 1..110: mol_type = other DNA
acaaaacaagctaaatttaaagaaaaacaagtcagtgaagaaaatccctgtgggaatggccagagatgactaaattatccaagatggtcaaagccttgaaattatttgaa

SEQ ID NO: 16670 - DNA, 110 bp, synthetic construct
  source 1..110: mol_type = other DNA
catatggtatgggggaaggctggactgtggataggcccatagggtcctgctccgctactgacttgcctgaattttcctgtctgtccacttatcaatttccattgattaag

SEQ ID NO: 16671 - DNA, 110 bp, synthetic construct
  source 1..110: mol_type = other DNA
gaagttgaaccttctgagggcaggatagcatcagagttttgcactgctgtccacctttagctggcgcccagagaatggcacctcctagttccattgttagtacacaaaga

SEQ ID NO: 16672 - DNA, 110 bp, synthetic construct
  source 1..110: mol_type = other DNA
ttaacttggctggactcgaagtccaaactctttacttctgtgtttgacagcaggtgaaatctctgcttagttttttcatttttcatctattgttttctttgggctatcta

SEQ ID NO: 16673 - DNA, 110 bp, synthetic construct
  source 1..110: mol_type = other DNA
gatgatggggaaatgtatggtccttttgctattgtggtcacatggttagctctgctccctttgctgtaaggtgccacttttgaatactaacccttttccctcttttgctc

SEQ ID NO: 16674 - DNA, 110 bp, synthetic construct
  source 1..110: mol_type = other DNA
gattcctggaaagaacctcagctctcccaatggggggctggggccaggggctgtgatgtgcagataccactttcaggttccacccagattggctcctctatgggttgggg

SEQ ID NO: 16675 - DNA, 110 bp, synthetic construct
  source 1..110: mol_type = other DNA
tttccttcatgggaatatgaccagagctatgagaatggacttgaattctgcccgcgcagaggagcgaccactttcaattttggttctccattactagtactaaggttgaa

SEQ ID NO: 16676 - DNA, 110 bp, synthetic construct
  source 1..110: mol_type = other DNA
catattaatgtttaaaatattactgccgcaatagtagaaaaatcaaagcaatgaaaacaggaagataaggattatctattcaccgacaggattttagattcgtacgtaca

SEQ ID NO: 16677 - DNA, 110 bp, synthetic construct; identical to SEQ ID NO: 16676
  source 1..110: mol_type = other DNA

SEQ ID NO: 16678 - DNA, 110 bp, synthetic construct
  source 1..110: mol_type = other DNA
tgtattgagttcattggtccctgtgctaagaaggcttaccactctgcctgtagaaattttaatctttctttgagactggttttgcatgttaactactttaaggtttcctg

SEQ ID NO: 16679 - DNA, 110 bp, synthetic construct
  source 1..110: mol_type = other DNA
attttaatctttctttgagactggttttgcatgttaactactttaaggtttcctgatacagctctgccaagtcaccccccactccttacatctacccccccagtttataa

SEQ ID NO: 16680 - DNA, 110 bp, synthetic construct
  source 1..110: mol_type = other DNA
aaactagcagggcaacgaagagctagttctaagagcattgatttgcaggacaggattttataatcagttgaaaaaggaatatagaataaaattgctgaactaaatgtaag

SEQ ID NO: 16681 - DNA, 110 bp, synthetic construct
  source 1..110: mol_type = other DNA
aaaaattcaagacagcaaatgaaagctaattggaaactcagagaaaggaagtaaaccccatttggggcgggggtaggagaaaaggtgattaggaaaactttcactgaaat

SEQ ID NO: 16682 - DNA, 110 bp, synthetic construct
  source 1..110: mol_type = other DNA
gacctagagggatttagaaatttctctctcttctatcgctggccagacacctgggcctctaacagctgtttacaggacaaggcgaacatgatactctatcatcaaatcta

SEQ ID NO: 16683 - DNA, 110 bp, synthetic construct
  source 1..110: mol_type = other DNA
cctctaacagctgtttacaggacaaggcgaacatgatactctatcatcaaatctaccaaaaatgaacagcttgtgtgtagctcattaatgcagataagactcgttatcta

SEQ ID NO: 16684 - DNA, 110 bp, synthetic construct
  source 1..110: mol_type = other DNA
aagacattgggattaaaggttatagacagagtttagaagaggccgaatcctgaactacaacgcaatttatgagttagatgtttttatgggttgttcaaagctagaattgt

SEQ ID NO: 16685 - DNA, 110 bp, synthetic construct
  source 1..110: mol_type = other DNA
ctggtaggaattttgcattcaacatcaaattacttctaattcaaaacaatttctgcctactaactccacttcagattttccagagttttctttaaaacttccatataggt

SEQ ID NO: 16686 - DNA, 110 bp, synthetic construct
  source 1..110: mol_type = other DNA
cctactaactccacttcagattttccagagttttctttaaaacttccatataggtacaagaaaagaagaaactcatatgatttccacaaatcagattcttggcaaaatta

SEQ ID NO: 16687 - DNA, 110 bp, synthetic construct; identical to SEQ ID NO: 16685
  source 1..110: mol_type = other DNA

SEQ ID NO: 16688 - DNA, 110 bp, synthetic construct; identical to SEQ ID NO: 16686
  source 1..110: mol_type = other DNA

SEQ ID NO: 16689 - DNA, 110 bp, synthetic construct
  source 1..110: mol_type = other DNA
aaatggagacctaaaaaagaataggtctgcatgactcactgacccacccagactcagacctgcattctccgctttatcggactttcacaagcgaaacaaccaagcccatg

SEQ ID NO: 16690 - DNA, 110 bp, synthetic construct
  source 1..110: mol_type = other DNA
acccagactcagacctgcattctccgctttatcggactttcacaagcgaaacaaccaagcccatgaagtgactgacttcccacggacaaagacagccccaaggagaaagt

SEQ ID NO: 16691 - DNA, 110 bp, synthetic construct
  source 1..110: mol_type = other DNA
cggtaacctacacaggagtatgaatcatattttactctacttaaatggcccaaggaagtttatagaaatgtgttcaatacatagataatgaagccaatgaatgtctatac

SEQ ID NO: 16692 - DNA, 110 bp, synthetic construct
  source 1..110: mol_type = other DNA
aagtttatagaaatgtgttcaatacatagataatgaagccaatgaatgtctatacaatgtgtcatgaattgtgaatctgtcagagtgcatgtttgggggaattttcaaat

SEQ ID NO: 16693 - DNA, 110 bp, synthetic construct; identical to SEQ ID NO: 16691
  source 1..110: mol_type = other DNA

SEQ ID NO: 16694 - DNA, 110 bp, synthetic construct; identical to SEQ ID NO: 16692
  source 1..110: mol_type = other DNA

SEQ ID NO: 16695 - DNA, 110 bp, synthetic construct
  source 1..110: mol_type = other DNA
tactatatggtgagcttgaggaagaagacttggaaacattatttctttggattattcagaagctcgtatctaagaagatactctttaaaagatcctttaagtaaaatggt

SEQ ID NO: 16696 - DNA, 110 bp, synthetic construct
  source 1..110: mol_type = other DNA
gaccgcatcttcatcagctacaagtaaatgggagtcctacatgtcagccgtatccacaacagtctctgtcatcttcactatgtcctggaagaaattcttccctgtaactc

SEQ ID NO: 16697 - DNA, 110 bp, synthetic construct
  source 1..110: mol_type = other DNA
tcaggaaagaaggagaaaagctaaatcttgtaagtggctattaaaagacacaaataacattccttgtcaatctggaaaggtgaggaaaaaagacagtcgagctgtttgtg

SEQ ID NO: 16698 - DNA, 110 bp, synthetic construct
  source 1..110: mol_type = other DNA
ccatgctgacacactgtaaatgctcaataaacccttatgaaattaaacattctctggtgagtttacaatctgaggagagtagaggtgattctagacaatgagaatgacaa

SEQ ID NO: 16699 - DNA, 110 bp, synthetic construct
  source 1..110: mol_type = other DNA
ggtgagtttacaatctgaggagagtagaggtgattctagacaatgagaatgacaagaatgagaatgattagaatgtcccataaagttttaaacagaaccctgtgtctggg

SEQ ID NO: 16700 - DNA, 110 bp, synthetic construct
  source 1..110: mol_type = other DNA
aaactagaagcagtccttagcttataccatcaattacaccatcaaactgatctttgtgtaccccatttagatttttgtatagcagccaacataaacatttaaagctttct

SEQ ID NO: 16701 - DNA, 110 bp, synthetic construct
  source 1..110: mol_type = other DNA
tgcaggtggtaatccttctaactggaattacctcttctgtgtttgtcccaactcagatgtcacctcctcgacactttccctgatcttctctgtttattaatactccttca

SEQ ID NO: 16702 - DNA, 110 bp, synthetic construct
  source 1..110: mol_type = other DNA
gcaactagcatcacagtccttgggagctgtccctagtgctgactcgaaactttaatatggatcatacgtaacctgatcttttccaagatctgacctttgttcatgtacca

SEQ ID NO: 16703 - DNA, 110 bp, synthetic construct
  source 1..110: mol_type = other DNA
ctagccatcagtttctatttttataaaatgagaacagtaaggcatcacagggttaggtttaactgagataatatatgtaaagctggaggtatcatgcctgagaaacagtg

SEQ ID NO: 16704 - DNA, 110 bp, synthetic construct
  source 1..110: mol_type = other DNA
actttcatcattatggaaaattctcttggacagcactgttcaattttcaacagccactatgaaatgtcatcattcatgacactgaaatccacacaggtcaaccaaatggg

SEQ ID NO: 16705 - DNA, 110 bp, synthetic construct
  source 1..110: mol_type = other DNA
atttcagttatcaagaggctagaagagtggttcccaaacactgctatacctagtgtctttaaaaaacacctatgcctctctcctatcctagcattctgctgtaactggta

SEQ ID NO: 16706 - DNA, 110 bp, synthetic construct
  source 1..110: mol_type = other DNA
aagaccccgcccccataacctcctccaccctttgctataaaaattttgtacccacttgtaaccaggaagaagttgctttcagaacatgcggtccccattctccaatcctt

SEQ ID NO: 16707 - DNA, 110 bp, synthetic construct
  source 1..110: mol_type = other DNA
actgggattgttatatacaaatgtttcctgcaatcattgtgtgctactgaattattcctctttaatgttcaccagagcttacagacagggagcaggttgtacaaaatact

SEQ ID NO: 16708 - DNA, 110 bp, synthetic construct
  source 1..110: mol_type = other DNA
tgcctcactttcctcatctataaaatgtgctagcattgatcaagtttcaacagaggtcagctattcttattgctacagttacgatgggaagccaaagtacagaagtagaa

SEQ ID NO: 16709 - DNA, 110 bp, synthetic construct
  source 1..110: mol_type = other DNA
aaaaaggcttttcatcttcccacgaaaactgcatcttgacccataaatcatctaatacagaattcactgttgctagcttaggactatcagaagtgaaatcagagaatgac

SEQ ID NO: 16710 - DNA, 110 bp, synthetic construct
  source 1..110: mol_type = other DNA
tacagaattcactgttgctagcttaggactatcagaagtgaaatcagagaatgacatggctacaaagggacttttgaagacctgtaacccaacctttctacactctgccc

SEQ ID NO: 16711 - DNA, 110 bp, synthetic construct
  source 1..110: mol_type = other DNA
cccagtgcagcacatgaatagaaagagttatttcccctgatccgagacctggtatgtggtgttgtggtccagagctcattgtaaattccaagttgcaaaacctggagaga

SEQ ID NO: 16712 - DNA, 110 bp, synthetic construct
  source 1..110: mol_type = other DNA
atggagtctgaaaagggatatctctttttatctgaaggaaatttgggtaggaaaaataggctaaaagtattctctgatctaggcagctcttataaagtaatttattcatt

SEQ ID NO: 16713 - DNA, 110 bp, synthetic construct
  source 1..110: mol_type = other DNA
attggccaaaagccatcccagggggatgtcaagtccagatgttcagctttctgaatgaggaaggcaagcacatctgaaaagagtcacagttgggagactttagaagcaaa

SEQ ID NO: 16714 - DNA, 110 bp, synthetic construct
  source 1..110: mol_type = other DNA
agtgcctgagatgtttgtatgatattgtgacaaggttcatagagaaaacaaaggtaagtccatgtctgccctgaacgagctagatttccagtcacctaagaagctagatt

SEQ ID NO: 16715 - DNA, 110 bp, synthetic construct
  source 1..110: mol_type = other DNA
ttccttaaaaaaataatacctgagtctttcactgagtaggtaaagtcatttggtgacactgagtagaagagaaatgctataggggaaggccttcaaggataattgactag

SEQ ID NO: 16716 - DNA, 110 bp, synthetic construct
  source 1..110: mol_type = other DNA
acactgagtagaagagaaatgctataggggaaggccttcaaggataattgactagaatgagcaatggcttcccttctctcttaattaaggaagctcttctgaagacagtt

SEQ ID NO: 16717 - DNA, 110 bp, synthetic construct
  source 1..110: mol_type = other DNA
ggccctaaaaagaaaaaaaaaaatctgatgagctgacagggaaaagaagccttagacttattccaggtggcctcataaaactaaatagtctgaatgaaattaagtagact

SEQ ID NO: 16718 - DNA, 110 bp, synthetic construct
  source 1..110: mol_type = other DNA
agacaattatttttaaggtgaacagtaattctttggagaacctttttaagttgcgctggcaatgattccatacaggttccgtccaaaccaaatacgctccctatttttta

SEQ ID NO: 16719 - DNA, 110 bp, synthetic construct
  source 1..110: mol_type = other DNA
tgcaactctctccacctaattttctctatccagaaagtagagatgataatacgtatttcatggatgtttaaagaataaaacacaataatataaaatgacctggcccacag

SEQ ID NO: 16720 - DNA, 110 bp, synthetic construct
  source 1..110: mol_type = other DNA
cttacaagtctttcaccaagcacactatacacaatctttcccttcattgaagcagattaaacatttcccaatgcacaatgtttgtaagtaactcagaaatgggcatccag

SEQ ID NO: 16721 - DNA, 110 bp, synthetic construct
  source 1..110: mol_type = other DNA
attaaacatttcccaatgcacaatgtttgtaagtaactcagaaatgggcatccagtccagagcttggcagcacatggaagcagatgtgaggtgactgtttctactctaac

SEQ ID NO: 16722 - DNA, 110 bp, synthetic construct
  source 1..110: mol_type = other DNA
ctagttaacagaatcagggcactgccttggttcaggtcagactggtgctgagtggtggagagtgagacagggctgggttcagtcccccctcctccatcctctccctccct

SEQ ID NO: 16723 - DNA, 110 bp, synthetic construct
  source 1..110: mol_type = other DNA
aagttggagtgaggggtgtgggtgtctttaaataggtattggtagaaattaatagaaataaaacagtgacagaaaagcgaaaaagaaaagctaaagggcaacaaaatctt

SEQ ID NO: 16724 - DNA, 110 bp, synthetic construct
  source 1..110: mol_type = other DNA
aaataaaacagtgacagaaaagcgaaaaagaaaagctaaagggcaacaaaatcttacaacattaaagcatatagagaatctcttgaactggaaaatcgtgtttgcctcta

SEQ ID NO: 16725 - DNA, 110 bp, synthetic construct; identical to SEQ ID NO: 16723
  source 1..110: mol_type = other DNA

SEQ ID NO: 16726 - DNA, 110 bp, synthetic construct; identical to SEQ ID NO: 16724
  source 1..110: mol_type = other DNA

SEQ ID NO: 16727 - DNA, 110 bp, synthetic construct
  source 1..110: mol_type = other DNA
ctggtctagacttcatacctggaggtttcaatggaaaacagattctagaagacattgagaatatcccagtctcacacagcaaatttagatagctgtgtagcaggtccttt

SEQ ID NO: 16728 - DNA, 110 bp, synthetic construct
  source 1..110: mol_type = other DNA
tccatctctgtggtttagtgactccccacttggccaaggaatggtgcccttgccgttcctgtgaggttgggcctagctggctggtaccttcccttgctcagccaggcagt

SEQ ID NO: 16729 - DNA, 110 bp, synthetic construct
  source 1..110: mol_type = other DNA
gggtggaaccatcactctctgtccaggacctttagctcgcttttctcacttggatcaagtgatgaccagaagaccagtaggccctccctttgcttgtggcaagagatggc

SEQ ID NO: 16730 - DNA, 110 bp, synthetic construct
  source 1..110: mol_type = other DNA
ctgcagtcagacttttaacccactgcacgttggtgggaactcctcagcctcctattttaaaggaaacacatcagtcaatgggggttatggagcggagataaaaatctctt

SEQ ID NO: 16731 - DNA, 110 bp, synthetic construct
  source 1..110: mol_type = other DNA
gctggccccacatccatagatctgattctggaaaaggcagatgagagaggctgagtccagagccaagtctggactagagccaagaccacagcagaggtgagcacaaggga

SEQ ID NO: 16732 - DNA, 110 bp, synthetic construct
  source 1..110: mol_type = other DNA
cagttattacaacttttgaagaaaatattattatgctctgtttttgtacttggggaaactgaagctttattcaagaagacatcaccttctatgcttgatagaattacaac

SEQ ID NO: 16733 - DNA, 110 bp, synthetic construct; identical to SEQ ID NO: 16732
  source 1..110: mol_type = other DNA

SEQ ID NO: 16734 - DNA, 110 bp, synthetic construct
  source 1..110: mol_type = other DNA
ctgggatgttaccgctctgctcagatgaagaatagcatctgaacagcaagcagggatgaaagtaactgccaaaatagctgtgcgggtctgtcctccgcagagcaggtgct

SEQ ID NO: 16735 - DNA, 110 bp, synthetic construct
  source 1..110: mol_type = other DNA
atgaaagtaactgccaaaatagctgtgcgggtctgtcctccgcagagcaggtgctcacaaatagtccctgacctgagttaagttagacaggcaaatggagattggacagt

SEQ ID NO: 16736 - DNA, 110 bp, synthetic construct
  source 1..110: mol_type = other DNA
ggggtgcaatctccttttgatctccaagaaggctctgactcatttgtgctgtatttcctgtctttgtcctattcaaagtttatgtctgcacatggcagctctctgtcaag

SEQ ID NO: 16737 - DNA, 110 bp, synthetic construct
  source 1..110: mol_type = other DNA
tcctgtctttgtcctattcaaagtttatgtctgcacatggcagctctctgtcaagtctatgctggctcatatgcacaggaatattagcaggcaatttgttaacaaagatt

SEQ ID NO: 16738 - DNA, 110 bp, synthetic construct
  source 1..110: mol_type = other DNA
agcacagactccacccctggacctcattgaacaggtcttctcagaggaaagatttcactaccccagttaattactctccatagaaattttcttcatttttttttcagact

SEQ ID NO: 16739 - DNA, 110 bp, synthetic construct
  source 1..110: mol_type = other DNA
cactaccccagttaattactctccatagaaattttcttcatttttttttcagacttaactcctttgtaattagttctaggcatagaattttgttgatctgaacatgggcc

SEQ ID NO: 16740 - DNA, 110 bp, synthetic construct
  source 1..110: mol_type = other DNA
ttcagggctctttccatgaggaaagctctacccgaaacacatcctgaagccccaagagaagcggggtcaccctccccaaccccgcctatgccccatggttgactccatct

SEQ ID NO: 16741 - DNA, 110 bp, synthetic construct
  source 1..110: mol_type = other DNA
tatcagttctaggagtcccttggtagctcagcaggttaaggatctgggattgtcgccactatagcacaggttggatccctggaccaggagcttccacatgccatgggcat

SEQ ID NO: 16742 - DNA, 110 bp, synthetic construct
  source 1..110: mol_type = other DNA
ccactatagcacaggttggatccctggaccaggagcttccacatgccatgggcatggccaaaaaaaaaaaaagataaaaagaaaaaaagaaatacatatcagttattttt

SEQ ID NO: 16743 - DNA, 110 bp, synthetic construct
  source 1..110: mol_type = other DNA
cacacatatacctgaaaaaaatatacttcttttttctgtctgaccatttaaaaattgccgagtcacgatgcttctctcataaatacctggtaggtctatcctaaggatag

SEQ ID NO: 16744 - DNA, 110 bp, synthetic construct
  source 1..110: mol_type = other DNA
gaaacaaaacaagtccacaaattgcacatggaaattgtgcccgcctaccccggggttcgaaccaccaccctggctatcgggaatgaatgccttctagcaagaggggggga

SEQ ID NO: 16745 - DNA, 110 bp, synthetic construct
  source 1..110: mol_type = other DNA
cataagctgtcaagaattcttctgatgttggcggtcgatggggatcttcatcctctctaggctttatgatgtcaatgccgtatgtagcttctaaaacacgtcttggaata

SEQ ID NO: 16746 - DNA, 110 bp, synthetic construct
  source 1..110: mol_type = other DNA
tctaggctttatgatgtcaatgccgtatgtagcttctaaaacacgtcttggaatattctggcaaacgtaagcttgtcaaggaatccgttcctttgaaggaccccctcctc

SEQ ID NO: 16747 - DNA, 110 bp, synthetic construct
  source 1..110: mol_type = other DNA
tctagagtgaggcttcgtgggctcaaagctcagctccacctctcaccaacagcaaggcctagggccagatacgccatcccttcgtgctgctgtctctgcacctattccca

SEQ ID NO: 16748 - DNA, 110 bp, synthetic construct
  source 1..110: mol_type = other DNA
gcagctgctgacttatgctacagccaccgcagcaccagatcccctctgcaatcagatgccacagctacagcaacaccagattctttacctactgagcgaggccagggatt

SEQ ID NO: 16749 - DNA, 110 bp, synthetic construct
  source 1..110: mol_type = other DNA
cccttacatcattccatctgaagataaacagtaagattgagactctctgaagaaggaaacaaaaataattgcaacttgtgttttttgccatagaatcgtctaatagctca

SEQ ID NO: 16750 - DNA, 110 bp, synthetic construct
  source 1..110: mol_type = other DNA
gagagggaggagggggatgagaaatgggctagaaggtcaccagcatttaaagtagggaagacaaagagcggccagcaaaggagcctgccaaggatgaccaataaggcaaa

SEQ ID NO: 16751 - DNA, 110 bp, synthetic construct
  source 1..110: mol_type = other DNA
ggaagacaaagagcggccagcaaaggagcctgccaaggatgaccaataaggcaaaaggaagaccaggacagaaagggggcacagggagtgggcacttccagaagttggga

SEQ ID NO: 16752 - DNA, 110 bp, synthetic construct
  source 1..110: mol_type = other DNA
gataattgaagtttgaagagcactgctttatgggagatcataagagagagtggtgtatttgggtgtgacttccagagtctaacggatctgaatttgaagctcaactctgt

SEQ ID NO: 16753 - DNA, 110 bp, synthetic construct
  source 1..110: mol_type = other DNA
tatttgggtgtgacttccagagtctaacggatctgaatttgaagctcaactctgtcctgtaactaatacatgagcactttaaagtcagagcagtgttgctatagagcccc

SEQ ID NO: 16754 - DNA, 110 bp, synthetic construct
  source 1..110: mol_type = other DNA
ttctgtcaacatccatagagctattctttctttttttcttcacacatacaagacactgcataatgtttcgttcatgtgacaactctctttacttccaaaatgtggttttt

SEQ ID NO: 16755 - DNA, 110 bp, synthetic construct
  source 1..110: mol_type = other DNA
ccccttccctgagccatctctctctatgcaggtctctgcttgcctgtgggatgttcagcttggctttgtatagtactgcttgtaggaagttcccacatagaaactgggaa

SEQ ID NO: 16756 - DNA, 110 bp, synthetic construct
  source 1..110: mol_type = other DNA
ccatctctgttctttgatggcgagtttgatttctgagcagagtctggtcacctggcgctggcacgggtgagtcagggataatgagcttctgtaatgcaattgggagcgaa

SEQ ID NO: 16757 - DNA, 110 bp, synthetic construct
  source 1..110: mol_type = other DNA
aaagctttgggagcactcaggcgggcagcaatgcctgatatgcttagaacagctgagatgtgagggaagtccccttgctggcgcagtggaaccatgtccactggaaggga

SEQ ID NO: 16758 - DNA, 110 bp, synthetic construct
  source 1..110: mol_type = other DNA
agatgtgagggaagtccccttgctggcgcagtggaaccatgtccactggaagggaggaacttactccacggaggggccgccacctgcagggagcactgctgcgcagtctg

SEQ ID NO: 16759 - DNA, 110 bp, synthetic construct
  source 1..110: mol_type = other DNA
agtcatgttcttcatcatggccaagagcatgcaactggcctggaacctcaaagactgtgaagagagaagcaccagtggcagcttcgtgtcaggcaggatgcagcctcttc

SEQ ID NO: 16760 - DNA, 110 bp, synthetic construct
  source 1..110: mol_type = other DNA
gcaaaataccccctccgctccccactgagagcattgatgactacagaaaattcagattaaagctgcagagtcctcagatgggagcacaaaaaccaattctcaagttaatg

SEQ ID NO: 16761 - DNA, 110 bp, synthetic construct
  source 1..110: mol_type = other DNA
gccacctcagggctgcatggccctaagcaagctctgaaccacctctggaaccaaaatcttcacctgggagacctcttcctagggaagaatccctccctcctcaaaggagg

SEQ ID NO: 16762 - DNA, 110 bp, synthetic construct
  source 1..110: mol_type = other DNA
ctgctatgtatttctcgacaattcttgatgtagcctttccacctacattccccaagcttatcattttaatctgtttcccagttcccagatcccaggagaaaatctgatga

SEQ ID NO: 16763 - DNA, 110 bp, synthetic construct
  source 1..110: mol_type = other DNA
cacgaggcaggcaggctggacaacaggaagcagatttagctccattttatcaattggatgccatggagactcagggaggggagtgacttgtcctaggtcgcccagggcac

SEQ ID NO: 16764 - DNA, 110 bp, synthetic construct
  source 1..110: mol_type = other DNA
tcctcaacccagatctgaccctcgaaatccctctttcttctcacccacacaccagactcccagtagctgctttgtttgggggaagattttcttaaaactgcaggttgagc

SEQ ID NO: 16765 - DNA, 110 bp, synthetic construct
  source 1..110: mol_type = other DNA
ctctccttattatgctagcctggacttcttagcgggagcagcccagctcctccgggcgcacctcaggacactgtgtaagaacgattctgttatttcatcttttgtcagcc

SEQ ID NO: 16766 - DNA, 110 bp, synthetic construct
  source 1..110: mol_type = other DNA
cttgaggttttttgagtgaagatgggagtaaaagagacattgtttgtttgtttgtttttgcatcatctcagtttctttcgagcaagtatttaaataattcaaggctcaaa

SEQ ID NO: 16767 - DNA, 110 bp, synthetic construct
  source 1..110: mol_type = other DNA
tttctgcccgccccccccagctcccttaactatatgttcttcacaatgaagacgcttattttaaaatgtttgcaaatgactggttgttagatgtgatgactaaatcgtca

SEQ ID NO: 16768 - DNA, 110 bp, synthetic construct
  source 1..110: mol_type = other DNA
aatcctttgaaattttgtactagtttctcttatattcaatagggaaccaatccgttcctgttcagaagtctcttacttatttaccccaggtgtccctaacttagcaccac

SEQ ID NO: 16769 - DNA, 110 bp, synthetic construct
  source 1..110: mol_type = other DNA
tgatatttgcccactggttggtgaagctaggtcatggccttctggttggcagggccatgtctagaggtgactgtgggctcaggaggtctttaggcagtctgtctgctgat

SEQ ID NO: 16770 - DNA, 110 bp, synthetic construct
  source 1..110: mol_type = other DNA
atgggcagcacaaggggcccggggtcttgttgcagctcagcccctgatgcacctctgagagcttatccaatcagactccttgtggccaagggcttgggccaggctccacc

SEQ ID NO: 16771 - DNA, 110 bp, synthetic construct
  source 1..110: mol_type = other DNA
taacctccatgttgtaagcatatcccgcagaggaagcaatgtgagcacgggcatggctgaggtgataatgcagaatagaggcgaccgcagaaaaatgcagtgtttctaga

SEQ ID NO: 16772 - DNA, 110 bp, synthetic construct
  source 1..110: mol_type = other DNA
gtccttacgtgcacagaccagatttctaacgtgggcacgctgccagatcagtagatggaggaccagtggcaccggctcttgatgacctgaagcaaaggcttcctgaaagt

SEQ ID NO: 16773 - DNA, 110 bp, synthetic construct
  source 1..110: mol_type = other DNA
atgtggcaatatttttagttgtggggcagaagatggtaaggttcgaatctttagggtgatgggagtcaagtgtgaacaggaattgggatttaaaggccacactttgggga

SEQ ID NO: 16774 - DNA, 110 bp, synthetic construct
  source 1..110: mol_type = other DNA
gtgatgggagtcaagtgtgaacaggaattgggatttaaaggccacactttggggatctcccaggtctgctttctgccaggatcatatttgctgcttactggagggaatga

SEQ ID NO: 16775 - DNA, 110 bp, synthetic construct
  source 1..110: mol_type = other DNA
aaaaactgtttattgcaaatgtatagtttctaaaagaagggtcttggtcataaaattaatcattgactaattgtcacaaagttaccctaaggagcaaagacttagagctg

SEQ ID NO: 16776 - DNA, 110 bp, synthetic construct
  source 1..110: mol_type = other DNA
tcctccctcctacgcatgcctttggccgccccttgcccccagcccaccctcattcttcatccccccacgaggaaccttctagggcggtggtagaggcaaaatccttgatc

SEQ ID NO: 16777 - DNA, 110 bp, synthetic construct
  source 1..110: mol_type = other DNA
gtcttcctggagcatctgctctggtggatttgtgaacatagtgcctgagggacacagggccaattgcacaaattctcacagtggaggtgggatcgagggcagtgccaaca

SEQ ID NO: 16778 - DNA, 110 bp, synthetic construct
  source 1..110: mol_type = other DNA
agaacctcggagctttggaagccactgtcggatagcaggcagtgtcctgctgggtccttttctgcctcagccgggtcatcatagaagctgtgtctgaagagagccagtgg

SEQ ID NO: 16779 - DNA, 110 bp, synthetic construct
  source 1..110: mol_type = other DNA
ggcctcttacacagtggctagcatcacctcatcgtcacactcccagtcacctttgctttcatccaagccccaggctctaagctctcggaagccttcttccttggcctctg

SEQ ID NO: 16780 - DNA, 110 bp, synthetic construct
  source 1..110: mol_type = other DNA
agaacccagccaccatattccctacccaattccccagcctgcaatagcttaatttctccttgtgggacctggaaaagtggctcagaggggagcagcaggtgtcgaggagc

SEQ ID NO: 16781 - DNA, 110 bp, synthetic construct
  source 1..110: mol_type = other DNA
acctagactaacatagtagctactaactaacatgcagaatacactggacaaaggggtgattcacatcccaggtgggacagagcaggatagcatgagatttcatcatagtg

SEQ ID NO: 16782 - DNA, 110 bp, synthetic construct
  source 1..110: mol_type = other DNA
tcagtggcactctctctcaagcaagttttgtgatacaaaaggactcttgcttgtgacacagttcacagttccttgcttgccagctgcatcctactggcttataaaccagc

SEQ ID NO: 16783 - DNA, 110 bp, synthetic construct
  source 1..110: mol_type = other DNA
acaaaataacagaacaaacaagaaaaagcaaaacaatcttagcttgggctgctagaacaaagtaccacagattgggtggcttataaacaaagaaatttacttctcacagt

SEQ ID NO: 16784 - DNA, 110 bp, synthetic construct
  source 1..110: mol_type = other DNA
actgccctcaaaatcctcagtgctctattttgttatggccacacctggagcatatgaaagtatggaagctccccagccagggattaaatccaagccacagctgcaaagta

SEQ ID NO: 16785 - DNA, 110 bp, synthetic construct
  source 1..110: mol_type = other DNA
gtccaaagaactctaaaataaggggaaaggctgcaagtaggaaacaagaagtactcagcttagatgaatgggctggttttaagtgtctaatcatatttagaaagatcaag

SEQ ID NO: 16786 - DNA, 110 bp, synthetic construct
  source 1..110: mol_type = other DNA
ccatcatacagtaaaagctgttagttatatagtattacctgacttttcagtaaatatgtgttacgagagaccattcgttattgcctaaactttagggtttcttcaaacaa

SEQ ID NO: 16787 - DNA, 110 bp, synthetic construct; identical to SEQ ID NO: 16786
  source 1..110: mol_type = other DNA

SEQ ID NO: 16788 - DNA, 110 bp, synthetic construct
  source 1..110: mol_type = other DNA
tgtgcagcatttagggcaaagcctggcacccggacaatagggctgaaatgttaactcctgttgttgtcgtcacacctgaggacacaggtcccaggccctgagtaagctgt

SEQ ID NO: 16789 - DNA, 110 bp, synthetic construct
  source 1..110: mol_type = other DNA
caggctccttctgaaggggctaggaagggagggagaggactttactcaccatagtcttactagtatttaccatagtaccaaatatccaggaatgatttggtcgaagaaca

SEQ ID NO: 16790 - DNA, 110 bp, synthetic construct
  source 1..110: mol_type = other DNA
ccttcttaggatatatcttcttctaggtggaacagggaacaggtatactctgagaccgtcattcaaatagagttctttttttcttttttgtctttttagagccgcagcct

SEQ ID NO: 16791 - DNA, 110 bp, synthetic construct
  source 1..110: mol_type = other DNA
gagatactaaataagcaaggttggaaaagagaatgaatgatggttatagggaagggtagagactgcctgccaaaggtattgcctgctgttctgtgtaatcactgagactt

SEQ ID NO: 16792 - DNA, 110 bp, synthetic construct
  source 1..110: mol_type = other DNA
gtagagactgcctgccaaaggtattgcctgctgttctgtgtaatcactgagacttctggattattatttagtaagagaatttgcttggtggctaactaatgttgcctagg

SEQ ID NO: 16793 - DNA, 110 bp, synthetic construct
  source 1..110: mol_type = other DNA
ggcatggatccccagctgtggtgtgtgtgtctgtctcccggatggggctcttcctctacaggagagctgactgcagcatgttggtgagtgtggctggttctggagagggg

SEQ ID NO: 16794 - DNA, 110 bp, synthetic construct
  source 1..110: mol_type = other DNA
gattgggaggtcaattccaagggcagctttggaagccatgcgttggagaatggcagagccactcagagtatggagacctgagtggctgtgttggggagagccacccaccg

SEQ ID NO: 16795 - DNA, 110 bp, synthetic construct
  source 1..110: mol_type = other DNA
aatagagccatccatgcaattctttatcccttaagcaaagctagaaggaagtgggatgatgtttccttggatgtcatggtcaaaattggttggacatgtagcttgtccag

SEQ ID NO: 16796 - DNA, 110 bp, synthetic construct
  source 1..110: mol_type = other DNA
atgatgtttccttggatgtcatggtcaaaattggttggacatgtagcttgtccagactcaggaaaggaaaactgttggtgaagggtgacatggagactgaagcaagaagg

SEQ ID NO: 16797 - DNA, 110 bp, synthetic construct
  source 1..110: mol_type = other DNA
aaacactttatgatgacggatgaaagaaaagccacagggaagtaaattaaagcttgaagaagctaattgggcaaacactgcttgaagccttaatgtctttactgttgaat

SEQ ID NO: 16798 - DNA, 110 bp, synthetic construct
  source 1..110: mol_type = other DNA
gaagaagctaattgggcaaacactgcttgaagccttaatgtctttactgttgaattagtgattttactccctggaatttatactaaggaaacaacacaaaacaaaaacag

SEQ ID NO: 16799 - DNA, 110 bp, synthetic construct; identical to SEQ ID NO: 16797
  source 1..110: mol_type = other DNA

SEQ ID NO: 16800 - DNA, 110 bp, synthetic construct; identical to SEQ ID NO: 16798
  source 1..110: mol_type = other DNA

SEQ ID NO: 16801 - DNA, 110 bp, synthetic construct
  source 1..110: mol_type = other DNA
ctcctgccttttctccattcacatttgcaaaggactcattttctggctcaagtttccatgtacatttcagagtctgagggatatgaattttggctataggcctgtggtcc

SEQ ID NO: 16802 - DNA, 110 bp, synthetic construct
  source 1..110: mol_type = other DNA
ccatgtacatttcagagtctgagggatatgaattttggctataggcctgtggtcctggatggggcgtgggctaaggagctggtgaggaggcccatgtgctgcctcacagg

SEQ ID NO: 16803 - DNA, 110 bp, synthetic construct
  source 1..110: mol_type = other DNA
tggccgtgaccttgttttgtgccccaagcacagcttgcttagaactggtgcccagaaaagctttcctggctccctgtggcttccccacggagccaccttaccaggcgggt

SEQ ID NO: 16804 - DNA, 110 bp, synthetic construct
  source 1..110: mol_type = other DNA
ggtcgtcttagacaagggcagccagctgagtgtgttgtagggaggttgaggtaggtcaaaggctgttctggggaaggagtcacaggcgaggctaaaggggggaagcagcc

SEQ ID NO: 16805 - DNA, 110 bp, synthetic construct
  source 1..110: mol_type = other DNA
ctggcagccttccctgctggctcttgccttggcttaaggcccttgagttagaggaggccacccaggtatggagagcatttcgctgcagccttttctaagtggctctggct

SEQ ID NO: 16806 - DNA, 110 bp, synthetic construct
  source 1..110: mol_type = other DNA
ggccacccaggtatggagagcatttcgctgcagccttttctaagtggctctggcttcatcttccttctctgtgcagagcatccggtctaaagtggagctgtccgtctggg

SEQ ID NO: 16807 - DNA, 110 bp, synthetic construct
  source 1..110: mol_type = other DNA
gacatccggccaccagccctcagcaccggccagcctctcactccccatctcaggcaccttcccactcggccttgctggagagtgaaactcttactaacattaactagaat

SEQ ID NO: 16808 - DNA, 110 bp, synthetic construct
  source 1..110: mol_type = other DNA
accttcccactcggccttgctggagagtgaaactcttactaacattaactagaatagtgtctttgaaacactggtgtcatggggattttgtttaaaaaataaaaataaaa

SEQ ID NO: 16809 - DNA, 110 bp, synthetic construct
  source 1..110: mol_type = other DNA
agagtagaggatgctcaaaatctcattaggaaagaagggaattcagaggacacactgacctccttctgacaaaagcctcctggtaaatgtctctggggtgtcatctctag

SEQ ID NO: 16810 - DNA, 110 bp, synthetic construct
  source 1..110: mol_type = other DNA
agagaaagaatccatttatgatattgaggaaattgtataagaattaagatgaatagaaaagctccagcatcaccccaaagcacttctcatgactaaatatctaactcagt

SEQ ID NO: 16811 - DNA, 110 bp, synthetic construct
  source 1..110: mol_type = other DNA
tctctggctgggagacctgcgtccaggaggaggaggctgtgtagaccctgtgggcaagagctgtcaggaatctggttttatttgaacagcagagggcggcaggtgcctcc

SEQ ID NO: 16812 - DNA, 110 bp, synthetic construct
  source 1..110: mol_type = other DNA
gcatcccagaactctgtgtttggtaccagccaaaagggtggtgagtgtgtgccctgtcatagcatatttcttcataagtttcagcttcttgggttttttttcctcattcc

SEQ ID NO: 16813 - DNA, 110 bp, synthetic construct
  source 1..110: mol_type = other DNA
tgccttgcgttctggcacgcttctaccttctcctcttttctccatctgcttcccgcagttttccctgtttttcttcataatttagctcctcggccctctacactgctttg

SEQ ID NO: 16814 - DNA, 110 bp, synthetic construct
  source 1..110: mol_type = other DNA
aacccagatgtgggggtggcagtggagtctgagaagcaggcagagtgagagctactaggaagggtctggggactctcaactgtttggggagggagcatgaggaagagctg

SEQ ID NO: 16815 - DNA, 110 bp, synthetic construct
  source 1..110: mol_type = other DNA
taggaagggtctggggactctcaactgtttggggagggagcatgaggaagagctgagtgagggaagacagccaggtgtctgacatggcaccctgggtccttgtaagagaa

SEQ ID NO: 16816 - DNA, 110 bp, synthetic construct; identical to SEQ ID NO: 16814
  source 1..110: mol_type = other DNA

SEQ ID NO: 16817 - DNA, 110 bp, synthetic construct; identical to SEQ ID NO: 16815
  source 1..110: mol_type = other DNA

SEQ ID NO: 16818 - DNA, 110 bp, synthetic construct
  source 1..110: mol_type = other DNA
caacctgggctcaatgttttccccatctgttccccacaatagtaactggtacttggatcaactttccccaggcagcagcagctctctgtgtgccagtgccagtgcccctt

SEQ ID NO: 16819 - DNA, 110 bp, synthetic construct
  source 1..110: mol_type = other DNA
tatagggcagggcatacacatggtgtcaattacatgttggttccccccacccaccctcctctaccctggatcaggcctttctgttactgctcagttctcattgacatatt

SEQ ID NO: 16820 - DNA, 110 bp, synthetic construct
  source 1..110: mol_type = other DNA
ctcctctaccctggatcaggcctttctgttactgctcagttctcattgacatatttgttttggttgttttttggggttttttggttttttgggtttttttatcagtatct

SEQ ID NO: 16821 - DNA, 110 bp, synthetic construct
  source 1..110: mol_type = other DNA
ctgtggtccctctgtcctgacccccagctgagagtacaccactcattctcccccaatctgactcccgatgcagatgaaagtgtctcttcctggcctcacaaagggtggta

SEQ ID NO: 16822 - DNA, 110 bp, synthetic construct
  source 1..110: mol_type = other DNA
gcccgggtgatgctgatactgctggttcacgacccaccttttgagtaggaaggtcttagaaagtaaaatacctgcccttctgttgttgtaaataaatggtctatttcttt

SEQ ID NO: 16823 - DNA, 110 bp, synthetic construct
  source 1..110: mol_type = other DNA
ttagaaagtaaaatacctgcccttctgttgttgtaaataaatggtctatttctttacagtgagcgcttgtgccacagagatccatgcacctccaatttccttggtcccag

SEQ ID NO: 16824 - DNA, 110 bp, synthetic construct
  source 1..110: mol_type = other DNA
ggactgccctgtgattgttaggatgttcgacagcatccttgacctcaatagcaccccacccccaaaagtgtcatcagacattgccaactgtcctctaaagggggtacaaa

SEQ ID NO: 16825 - DNA, 110 bp, synthetic construct
  source 1..110: mol_type = other DNA
ataaaacagcagggtagggaaccacaaacctctgtgccataggtcagtgggaggaggagaaagaacatgtgctttgcagcccagagatctgttctctgagctccacagtg

SEQ ID NO: 16826 - DNA, 110 bp, synthetic construct
  source 1..110: mol_type = other DNA
ggagaaagaacatgtgctttgcagcccagagatctgttctctgagctccacagtgagctgggaataataattcctacttcccagcattactggaggcggagggtgggggg

SEQ ID NO: 16827 - DNA, 110 bp, synthetic construct; identical to SEQ ID NO: 16825
  source 1..110: mol_type = other DNA

SEQ ID NO: 16828 - DNA, 110 bp, synthetic construct; identical to SEQ ID NO: 16826
  source 1..110: mol_type = other DNA

SEQ ID NO: 16829 - DNA, 110 bp, synthetic construct
  source 1..110: mol_type = other DNA
tgccaaagtcatttggcagcaggccagcctgtccccaggagaaaggtgtgcatctgattcagccctctaagctttattatttgctaaattatagcaactttttaaagctg

SEQ ID NO: 16830 - DNA, 110 bp, synthetic construct
  source 1..110: mol_type = other DNA
catgcccctgctcttcttcctatagagaatttgagtaggttgagacagcttgaggccagagaaccatttctaaagcctggggcaagggaggatggggtggacaaagtatc

SEQ ID NO: 16831 - DNA, 110 bp, synthetic construct
  source 1..110: mol_type = other DNA
ccagagaaccatttctaaagcctggggcaagggaggatggggtggacaaagtatcaaatacttctagactggaagccaactgtttttccctttcccttctgtaccaagag

SEQ ID NO: 16832 - DNA, 110 bp, synthetic construct
  source 1..110: mol_type = other DNA
cttctattcatgccgcggattattctctaacaggcttaaagtcttcctcaagagagagctgtttaaatgacaccagttttggacatgccacatagataaccgagggcaca

SEQ ID NO: 16833 - DNA, 110 bp, synthetic construct
  source 1..110: mol_type = other DNA
gagctgtttaaatgacaccagttttggacatgccacatagataaccgagggcacatgtaatccctccacaaccacactaggtgattgtgccgggggcggatcgtcatagt

SEQ ID NO: 16834 - DNA, 110 bp, synthetic construct
  source 1..110: mol_type = other DNA
aggacccgagtgagggagatcgtgccccttcttagggcatgtgccatctgcttgccttattactgaggccccttcctctgcctccagaagactccacatccctgggacta

SEQ ID NO: 16835 - DNA, 110 bp, synthetic construct
  source 1..110: mol_type = other DNA
ggacaagggggtgcctgtcccccaagatacctgtgagtggctttgttggtgtccgacagtcagctagactttgcaacaggaatttaaaccttaagcttccttctttatca

SEQ ID NO: 16836 - DNA, 110 bp, synthetic construct
  source 1..110: mol_type = other DNA
caggcacagtcagagtaggagaagggggagctggagtgggagggagaacaaaatgcctgagagggcctcagagcctggcataacgtgccggggtgtccacctcctgcctg

SEQ ID NO: 16837 - DNA, 110 bp, synthetic construct
  source 1..110: mol_type = other DNA
taccatcatagagatatattgcataagaatccttaggtcctgtgcccaatctttttattgcttctcagggcaggattattcttgattccaacataagcttgaaggaggta

SEQ ID NO: 16838 - DNA, 110 bp, synthetic construct
  source 1..110: mol_type = other DNA
tattgcttctcagggcaggattattcttgattccaacataagcttgaaggaggtaaggaggcagctatatgccagctgcaaaatgttactttgatgcccacctacaccaa

SEQ ID NO: 16839 - DNA, 110 bp, synthetic construct
  source 1..110: mol_type = other DNA
ttcccctttcttgtcacctgtgttttactgctcttacgtattgaaaggaagatggaattatttcaaaagtagtgaaccaaggccttctctgctaagaaccaaaacttgaa

SEQ ID NO: 16840 - DNA, 110 bp, synthetic construct
  source 1..110: mol_type = other DNA
agaatgtggaagaagatcggtgcagcctggacacacctccctccccacaccggcccagacagacacgtacactgggcgttttcatgtgactttgttgtgggtggctggcc

SEQ ID NO: 16841 - DNA, 110 bp, synthetic construct
  source 1..110: mol_type = other DNA
tggttcctagtcacatttgttttcactgcaccacgatgggaactcccccatcttactagcttttaagtatacagttcagtggcgttaggaacattcactctatggtgcaa

SEQ ID NO: 16842 - DNA, 110 bp, synthetic construct
  source 1..110: mol_type = other DNA
aggcctgactttcttcagatggcatccaggtagccaccacaaaattgaggggaaaggcatgagttgagcacaaaagctagtaaaggaaaggaaattcagcacctgttaga

SEQ ID NO: 16843 - DNA, 110 bp, synthetic construct
  source 1..110: mol_type = other DNA
ttagtgtgtacttcctagtttgagaacagcagtcagctatttttaaaggacatcttttgaaaggatatgacaggcctgctgtaactgtaaggggtcactagagggcttta

SEQ ID NO: 16844 - DNA, 110 bp, synthetic construct
  source 1..110: mol_type = other DNA
catgtttaggaagaaaagacagcaagacaaagcacagaatgatcaatccagggctcggcgtccagtcagcctcattccacttcaagcctgagagggtttgtctcccttga

SEQ ID NO: 16845 - DNA, 110 bp, synthetic construct
  source 1..110: mol_type = other DNA
agaaactaaatgtattcgtagatttgagctgacccaacattgcccagaatttggccacatagccagaaatttcaggataattcagaggttcataaaattatcccccaaac

SEQ ID NO: 16846 - DNA, 110 bp, synthetic construct
  source 1..110: mol_type = other DNA
tggttagatagggacaaggttgatcctggtataagtactctttaaccataaatttcctatagctgtggcatggccccagagctccccgcaccctgaagccactgtggtga

SEQ ID NO: 16847 - DNA, 110 bp, synthetic construct
  source 1..110: mol_type = other DNA
attaatccttactgtgctttgattgaagaggcttatggtaagataaagtctttattaggtgtcctaaaattattttttctccatgctttcctggcctgtccacatctatc

SEQ ID NO: 16848 - DNA, 110 bp, synthetic construct
  source 1..110: mol_type = other DNA
ttgggagtttaaacggtaagaaaatctttttttttttttttttttttggctgtattggtggcatgcaaagattcctgggccagggtttaaacctgtaccgtagtgacaat

SEQ ID NO: 16849 - DNA, 110 bp, synthetic construct
  source 1..110: mol_type = other DNA
atgaggaaaccgggcacaaagagatcaaacaacttggtccaaggtcacacaacaaggaagctgtagagctaggacacaagcctaggcagtccagctacagagctcagact

SEQ ID NO: 16850 - DNA, 110 bp, synthetic construct
  source 1..110: mol_type = other DNA
aggagtcatgggtaatggagaggagtttgagagcagcactggaaagagcatcagcatgaatgtatttgactgtaactagaggtggttatgctcttagtggaattctggtg

SEQ ID NO: 16851 - DNA, 110 bp, synthetic construct
  source 1..110: mol_type = other DNA
gggctgtaggtgtggatagggcacggggcccactcagctcctcccttccccccaccgaggctcctggacatacctcccagaatcccagtgttctgccaattcaagaggaa

SEQ ID NO: 16852 - DNA, 110 bp, synthetic construct
  source 1..110: mol_type = other DNA
ctctttgtaagcagatctaggcctgtggcagccaaggccaagcaggcacatcttaccacccttaagcatatacaagcaccctggtggaagaagcttggggaagaagcaga

SEQ ID NO: 16853 - DNA, 110 bp, synthetic construct
  source 1..110: mol_type = other DNA
taaatgtgcttgacctacctgtaggttatcacacatctcttgactatatgttaaccgctgaatttcagtaggagagacaaggtataaagcctgtccttcgttggtgaaac

SEQ ID NO: 16854 - DNA, 110 bp, synthetic construct
  source 1..110: mol_type = other DNA
ccttcccatatccacgtattaaaatatttaagactgttaaaatgacaatacttcccagactgatcatgagaataaatgtgatcccttgaaggaaggaaaagactaagagg

SEQ ID NO: 16855 - DNA, 110 bp, synthetic construct
  source 1..110: mol_type = other DNA
gtaaatgtttctccactgtctctatttgttatttgaattcataagaagccatgaaagtttacaagctagagtaaaaacttccaataaattcaaatagacgcctgtgtcct

SEQ ID NO: 16856 - DNA, 110 bp, synthetic construct
  source 1..110: mol_type = other DNA
actacagcttccctctgcgcctcaactaccggcttaaacgagccacgccacttatgcgacaaagaaaacgccatattcctgcgaccagttttagaaaccacccgctactt

SEQ ID NO: 16857 - DNA, 110 bp, synthetic construct
  source 1..110: mol_type = other DNA
cactatgaggcaaagcaaggtgggttcctgccagggggaggcagcttgcacagtccaatgaccccccacgggcctgatgccgactgctttgaaaaggccagcaaagccag

SEQ ID NO: 16858 - DNA, 110 bp, synthetic construct
  source 1..110: mol_type = other DNA
tggaccacttccaggccaaagcattctggccatgttagttcctgacccacgtggtccattaggaagtggcagagctctctgaggggagagtcttctctttcctcctttca

SEQ ID NO: 16859 - DNA, 110 bp, synthetic construct
  source 1..110: mol_type = other DNA
ccattaggaagtggcagagctctctgaggggagagtcttctctttcctcctttcagacaaaaaggagaagttttcagacttcccatcaggtgagagagaaaaaacatggg

SEQ ID NO: 16860 - DNA, 110 bp, synthetic construct
  source 1..110: mol_type = other DNA
atcacggtttgaagaatggaaaaattgagtgctgctctgggtctaatttctcagtagtgcttctctgaaattaatttcttgtgatggtgcttcaagtgacttggtctgtt

SEQ ID NO: 16861 - DNA, 110 bp, synthetic construct
  source 1..110: mol_type = other DNA
cagtcaacagcagtgctatctaggacttaaagctaggcgactctgcgagctgtggtggccaagagttagtggcagcaacagcagtgtccttaccacaacagttccaggta

SEQ ID NO: 16862 - DNA, 110 bp, synthetic construct
  source 1..110: mol_type = other DNA
aagaatttttgttttccagtgtcccgctgcatctgatgtacctgatttatcttctcctttctgcagtaatatccagctttggctgacccaacattaaactcatcaagttt

SEQ ID NO: 16863 - DNA, 110 bp, synthetic construct
  source 1..110: mol_type = other DNA
tttatgtaagacagttataatgtatgtattcattattgaatgaaaacttaaccgctgcatgagattcatccataagctatgtgttgccctagttcatttattttccttgc

SEQ ID NO: 16864 - DNA, 110 bp, synthetic construct
  source 1..110: mol_type = other DNA
tggcaggttccagcaactgaggtagtcactgaaatggagctttagctgttctagaccctataattgctccaaggcactgtcagtcatatttgtggttggatccccagtat

SEQ ID NO: 16865 - DNA, 110 bp, synthetic construct
  source 1..110: mol_type = other DNA
ctcagaacgtctttatgaagcttgtctgttgctgagtgggactgtattctcaccctgtcagctgttggcctgaataatcacagcacagatcccacagtctgttgagtggg

SEQ ID NO: 16866 - DNA, 110 bp, synthetic construct
  source 1..110: mol_type = other DNA
ccactacgatgtctcagactacaaatcaaactcctgattcacccctgcccctaaacctaacccaccctcagctttcccacctcagaaaacagaaccaccctctccccaac

SEQ ID NO: 16867 - DNA, 110 bp, synthetic construct
  source 1..110: mol_type = other DNA
ttttggttttgtttttaactcatcccttacgtgtgattgcattttggaaagtgagctggtcgacttgagcaagcagctgggttgctattttttttttttcaaagttgtgc

SEQ ID NO: 16868 - DNA, 110 bp, synthetic construct
  source 1..110: mol_type = other DNA
aactctgtgcataagatctgtttcaaatgctgccagtgattttctgaggctggaccattagctgagccttgggacattattacctagtgaaggtctgtgtttgccatacc

SEQ ID NO: 16869 - DNA, 110 bp, synthetic construct
  source 1..110: mol_type = other DNA
cattcctttgtttaatcttccctcagagctctggtgtccctgaattccaccatcctcaggcagttgacagagacagccattttctccagttttaaggggatttatcctgg

SEQ ID NO: 16870 - DNA, 110 bp, synthetic construct
  source 1..110: mol_type = other DNA
tgtagctcagaacatggtctatcttggggaatgtttcatatgcacttaaaaatgtgtattccacagttccccttgtggcacagcagaaacgaatctgaataggaaccata

SEQ ID NO: 16871 - DNA, 110 bp, synthetic construct; identical to SEQ ID NO: 16870
  source 1..110: mol_type = other DNA

SEQ ID NO: 16872 - DNA, 110 bp, synthetic construct
  source 1..110: mol_type = other DNA
aaaaaggttcttaaggtaaagctcattgagaagatgatattccagcaaagatttgaagatgataaaggaatgaggcatgtggatgggggtgggtggagagcattttgggc

SEQ ID NO: 16873 - DNA, 110 bp, synthetic construct
  source 1..110: mol_type = other DNA
agattcaatgctcttagagtggttgaggtgactaagtgtgttaggttctgcctgagagaggcagtgaagccctgagcttagagctaagacagcccccactcccccattca

SEQ ID NO: 16874 - DNA, 110 bp, synthetic construct
  source 1..110: mol_type = other DNA
cactgcaacgcaatgggaactccaagaagaaaacatgaatgatttagatcacatgtccttctccctagttttccacatgacaatctgggcttcacacttggaaaggcgag

SEQ ID NO: 16875 - DNA, 110 bp, synthetic construct
  source 1..110: mol_type = other DNA
tccttctccctagttttccacatgacaatctgggcttcacacttggaaaggcgagaacaggcctggtcttggcttctgacttcttgaactaggttcttctgaagtaaagg

SEQ ID NO: 16876 - DNA, 110 bp, synthetic construct; identical to SEQ ID NO: 16874
  source 1..110: mol_type = other DNA

SEQ ID NO: 16877 - DNA, 110 bp, synthetic construct; identical to SEQ ID NO: 16875
  source 1..110: mol_type = other DNA

SEQ ID NO: 16878 - DNA, 110 bp, synthetic construct
  source 1..110: mol_type = other DNA
agttcaagtttcctcagatatagcacattgcacatcacctctatgggccttggggggacagacaaatggaaccaatgcagacatgaagctcattacatttgctatgcctt

SEQ ID NO: 16879 - DNA, 110 bp, synthetic construct
  source 1..110: mol_type = other DNA
aatctgccatacccacctagctccctttcttcataagtatttgtttgcctcttgattcttccctctagtttcagatgttacagcttttcccggcatttccttctagcagt

SEQ ID NO: 16880 - DNA, 110 bp, synthetic construct
  source 1..110: mol_type = other DNA
gcttaatgactgtttatgttcctcaaacttatcaagtcaccctcctctagttttggaattttgaaatgtgtatacttctttggtccagctttcctttgatatatagcaag

SEQ ID NO: 16881 - DNA, 110 bp, synthetic construct
  source 1..110: mol_type = other DNA
tatttgttatcctgacgagtagtcacagggaacatggagcacagggcaggtgtgagttggctatggtgttggatgcagctgggtagagacgggtgagggctgagcagaga

SEQ ID NO: 16882 - DNA, 110 bp, synthetic construct
  source 1..110: mol_type = other DNA
agtataagagttttctgttccaaaatgagcttgagaaatggaagtcagccctcagttacatggtcttcataatgttggacagggacacttgggacatttaagtatctggt

SEQ ID NO: 16883 - DNA, 110 bp, synthetic construct
  source 1..110: mol_type = other DNA
gtggttattatttatttatttattttttaccacagggtatcccagagcagctactagtatctagggcatttctctctttgaggaatatcaacagaggctgtccaagtttt

SEQ ID NO: 16884 - DNA, 110 bp, synthetic construct
  source 1..110: mol_type = other DNA
ccattgtgtctccataaaattaagtggaatctcctgctcccattggggtcactaccttcatgggctatttccacactccttagctgtagtgtctaaggaactgtgaagca

SEQ ID NO: 16885 - DNA, 110 bp, synthetic construct
  source 1..110: mol_type = other DNA
cttttcttgattattgttcatgttctaggctcatgtttgttttgaagggaaaagcagagagctggctcctttgtggaaagcttttgttttatccactgcatctcttcttg

SEQ ID NO: 16886 - DNA, 110 bp, synthetic construct
  source 1..110: mol_type = other DNA
ggcctacaccaaatacaaggactgaggcttatgtgggataaaccagaaccagggaaagagtcctcaaagctccttgctaaggtcatgtttaaagggctaggatttgacat

SEQ ID NO: 16887 - DNA, 110 bp, synthetic construct
  source 1..110: mol_type = other DNA
ccagcaattgtgtgtggcttgggtgtaaaatagatgattataatattaggtgggacatatttaatgattaaacagtggagaccagctgttagaaaaatcattcttgaggt

SEQ ID NO: 16888 - DNA, 110 bp, synthetic construct
  source 1..110: mol_type = other DNA
acagtaaacatctctcactgaataaaacacgacacccacttaataactttacagttagcagcttccacctcccactggtcccatgcagctgcttaaagaagtgaattttc

SEQ ID NO: 16889 - DNA, 110 bp, synthetic construct
  source 1..110: mol_type = other DNA
gatttgatgtccaaaattctaaagctgtattatttctatattaaaaccaaaaccttcaccactgagcttgattgaagcgcctcccaggccaccaaaaataaaaaaatata

SEQ ID NO: 16890 - DNA, 110 bp, synthetic construct
  source 1..110: mol_type = other DNA
gttccagtaaataaaaatcagcagtgcctatgtagtttgtcatctttgctgctggaaaagtcatcttttttcccttcaaaggactctgagaggctgagctcatcttcatg

SEQ ID NO: 16891 - DNA, 110 bp, synthetic construct
  source 1..110: mol_type = other DNA
aaaagtcatcttttttcccttcaaaggactctgagaggctgagctcatcttcatgaaggaagatgatgttatgttaatttgagcggcgttagatgggattaggaagcatt

SEQ ID NO: 16892 - DNA, 110 bp, synthetic construct
  source 1..110: mol_type = other DNA
aagtataccgtggacttacgtgaaaaaatgaactgtatccaggaatcaaaaccacagcacataacgctctatcgatgtgcacgccagctttagaagagacagagaccaca

SEQ ID NO: 16893 - DNA, 110 bp, synthetic construct
  source 1..110: mol_type = other DNA
agcacataacgctctatcgatgtgcacgccagctttagaagagacagagaccacatgcgcccgcgaaaaaagctcttctgagctgccgggggtttggggcgggtgtgaaa

SEQ ID NO: 16894 - DNA, 110 bp, synthetic construct
  source 1..110: mol_type = other DNA
atttttattgttgaagggcacgtgatggcaggaaaataggttcctaacctggtcagcacctcagtgtgggagctgctgctctagtgacagtgtctctgccaacttaacgc

SEQ ID NO: 16895 - DNA, 110 bp, synthetic construct
  source 1..110: mol_type = other DNA
accaaggaactaattctgtgtaccttcgagaggcagagatggaggtaacaatcatttttaccatatgatgctgagctgccttctcttaatctttccctctgtttttcatt

SEQ ID NO: 16896 - DNA, 110 bp, synthetic construct
  source 1..110: mol_type = other DNA
atgattccataattcattggaattaagtggctaaatgtgatctagaagcagcatggtggatctgtgttcttctaatgggccaggggtcatagataaccacccatccctga

SEQ ID NO: 16897 - DNA, 110 bp, synthetic construct
  source 1..110: mol_type = other DNA
gtggatctgtgttcttctaatgggccaggggtcatagataaccacccatccctgatcgggtcaccaatgaatactgggaggtgagatgatggatgttttaaatctgtaag

SEQ ID NO: 16898 - DNA, 110 bp, synthetic construct
  source 1..110: mol_type = other DNA
tctttcattcctgtctttcactttacctgtacaagatagcttctgcttacctgcatatgtcatttttgtctgtatctctaagtcatttctcacgtcttgtgtaaaaacct

SEQ ID NO: 16899 - DNA, 110 bp, synthetic construct
  source 1..110: mol_type = other DNA
tatgtcatttttgtctgtatctctaagtcatttctcacgtcttgtgtaaaaacctattttttctgacttgtgaaagttaatttattcctcatgcccagtttaaatgccat

SEQ ID NO: 16900 - DNA, 110 bp, synthetic construct
  source 1..110: mol_type = other DNA
gtatgtggaggaagattcagtgaatgccttcatctactatcccccatgtatttgagctgtgtgggatcttttaaaaagtcacaagtgagacagactcagaggcaatagtt

SEQ ID NO: 16901 - DNA, 110 bp, synthetic construct
  source 1..110: mol_type = other DNA
gctgtgtgggatcttttaaaaagtcacaagtgagacagactcagaggcaatagttgacaaaagccacccacttgaaaaagtcagaattagctgtcttcctataggaagcc

SEQ ID NO: 16902 - DNA, 110 bp, synthetic construct
  source 1..110: mol_type = other DNA
catcataatgtttcacaggtggaatagctttgcctattgttggaatgtcatcaatgttaaaaagcctagacttcccttgctatctcttcccatatgcattgtcagaaaca

SEQ ID NO: 16903 - DNA, 110 bp, synthetic construct
  source 1..110: mol_type = other DNA
atattttttgaagtatctctctgcatgggctaccatttgaggcagacacattacatgctctctaggagagtacaagctcagacattaaggcatcatacacagatagaaag

SEQ ID NO: 16904 - DNA, 110 bp, synthetic construct
  source 1..110: mol_type = other DNA
cagaaagtgattaattgtgatgactatgcctgttctacccgtaatgacttcttatagcccatttatttaaaataaagtaagctgcttatttgttttttaacttccatttt

SEQ ID NO: 16905 - DNA, 110 bp, synthetic construct
  source 1..110: mol_type = other DNA
ggtagacagacaagtgaaaatgactgtgtggatggttagacatgaaagactggaatttaggaaaaacataagagttagaaatttagatttgtactttatttacacagaag

SEQ ID NO: 16906 - DNA, 110 bp, synthetic construct
  source 1..110: mol_type = other DNA
atttcttcacttctaaatttatcactggaattgtcaacaagacattgcccaatataagggagctgagttagccatatttaatagcatggaagttgtctcagccaagttag

SEQ ID NO: 16907 - DNA, 110 bp, synthetic construct
  source 1..110: mol_type = other DNA
tttctgtcagtcaactttgataatgtgggattgtgtgattcaaatgaagaatcgagcagggaaaatgagctctatctacttcctttctcttcatcttgatgatggaaaaa

SEQ ID NO: 16908 - DNA, 110 bp, synthetic construct
  source 1..110: mol_type = other DNA
gggccttgtctggagatagcattttgtatttggaagtgtttcaactcatgatattccttcaaatacttacagctctaggagaaggaattttagaaaagatcgtgaatcct

SEQ ID NO: 16909 - DNA, 110 bp, synthetic construct
  source 1..110: mol_type = other DNA
ccacatatttcatgtgtatgattctccctcatcaccacatggattctgtgcaactgtttatatcattagtctcactctctacaggaggaaactgaatctttctaagttaa

SEQ ID NO: 16910 - DNA, 110 bp, synthetic construct
  source 1..110: mol_type = other DNA
gtttatatcattagtctcactctctacaggaggaaactgaatctttctaagttaaataatggcccaaaggaagtgaacaaactggaatccacactcaggccagtacgcct

SEQ ID NO: 16911 - DNA, 110 bp, synthetic construct
  source 1..110: mol_type = other DNA
ttctttcttaaagaggattttgtttccttgacaagatagttactgtacctggcatgtgataggtactctgtaaaggacagctattaaaagagctagactttgctctagaa

SEQ ID NO: 16912 - DNA, 110 bp, synthetic construct
  source 1..110: mol_type = other DNA
tcttttctctctcagtgaactttcctcagccctcccacttatatcttctttactcttttatttgttgggaggaacttggaaacaaggtggcataatttaaccagagtcta

SEQ ID NO: 16913 - DNA, 110 bp, synthetic construct
  source 1..110: mol_type = other DNA
atgcacacccagaccctatctgttttggagcatctccatcccctgcaagctcagattcctctccactcagcctgtaagttaggaaagagtggtggacgatgaagcaggcc

SEQ ID NO: 16914 - DNA, 110 bp, synthetic construct
  source 1..110: mol_type = other DNA
tgtgcatttccatcagcataaagaaacttactacatatgtacgataaacttcctatcatctttaaaagttgagctttgtaatgtatgagtaaattaagagccagatattg

SEQ ID NO: 16915 - DNA, 110 bp, synthetic construct
  source 1..110: mol_type = other DNA
cttacctcagggctagctgcctggaaaatagactctgaagctgatattcacatgtaatacaaagacagaacctttgtctcctgaatcatcaggtgattggtttattctgc

SEQ ID NO: 16916 - DNA, 110 bp, synthetic construct
  source 1..110: mol_type = other DNA
ctcaaccctgcctcagtgtcttcccccttcttttctgttgttgtagattctaactggatataaaaagagagctcttcaaacattgtgaatatacttaacactaatgaaat

SEQ ID NO: 16917 - DNA, 110 bp, synthetic construct
  source 1..110: mol_type = other DNA
cccgcccctcccgaagctgttatcctttttaaggatgctgaagaggcaggaggaagggattttctaaaagttatattgataaacacacttgcacaaacatatgctaggca

SEQ ID NO: 16918 - DNA, 110 bp, synthetic construct
  source 1..110: mol_type = other DNA
gacagcaaaactgtgcagatgagattttgtggctactcatagttagaaatccagaatctcaggcaagaaatttacaatagacatgtatggttgctttgtgtataaagagc

SEQ ID NO: 16919 - DNA, 110 bp, synthetic construct
  source 1..110: mol_type = other DNA
atctcaggcaagaaatttacaatagacatgtatggttgctttgtgtataaagagctcgtagggattgaagaaggtttctgaaacaagagggggctgtaattactttgctt

SEQ ID NO: 16920 - DNA, 110 bp, synthetic construct
  source 1..110: mol_type = other DNA
agagaaagtcttcctgggaaaataaaaacaccatatatcacaacctttctcagttaaagactgaaaaatgcaaagctgtcttgaatctttggcaaaggaaatcatccaga

SEQ ID NO: 16921 - DNA, 110 bp, synthetic construct
  source 1..110: mol_type = other DNA
tatcaccctgtggggtaggtatagtcacataaatgacattctacagaagtccccgcctgtgtcaaagctctcagctctgcccctccctaacccccagtgaacctacctgc

SEQ ID NO: 16922 - DNA, 110 bp, synthetic construct
  source 1..110: mol_type = other DNA
cctatttttataaaagatttgggaaacatacaagctacctagtgtaaattacattgtagaggcaaaaacgggggaacattgtagaggcaacacaccactgacagtaccaa

SEQ ID NO: 16923 - DNA, 110 bp, synthetic construct
  source 1..110: mol_type = other DNA
atgggatgacaaccagccaagattctgtagggaaccaggacattcctcctggaatctgggtcctaaacagaagcagctttcatgaaggtcttgatcgtgcaagtcttctt

SEQ ID NO: 16924 - DNA, 110 bp, synthetic construct
  source 1..110: mol_type = other DNA
tatagtaactacaacatacatttaaaatacagtaaattttttaaagtatggtaaaacagagtggtttttaccttgtttagagtattggcaactgactgccccgtagtctt

SEQ ID NO: 16925 - DNA, 110 bp, synthetic construct
  source 1..110: mol_type = other DNA
acagagtggtttttaccttgtttagagtattggcaactgactgccccgtagtcttagaaatctctctagcagaagcagcatttcagttataatttgaaggagggaaagat

SEQ ID NO: 16926 - DNA, 110 bp, synthetic construct
  source 1..110: mol_type = other DNA
gaccaaagacagaaaaaaagaaaagaaagaaaattaaatgttatagtcagtattgctgcaaaggaagataaagagagtccagtcaatatgtacatatgttgtgagacttt

SEQ ID NO: 16927 - DNA, 110 bp, synthetic construct
  source 1..110: mol_type = other DNA
ctgcaaaggaagataaagagagtccagtcaatatgtacatatgttgtgagacttttaacacaatgagaagttttttctcttgagtctagacagtaccctctgatattttt

SEQ ID NO: 16928 - DNA, 110 bp, synthetic construct
  source 1..110: mol_type = other DNA
caatatcctaagacacatcctaggccccatctatctggtcgtccgccattttccaatcctaggcctgaacatcataggcatttgttcaatacattgttgttgcagctact

SEQ ID NO: 16929 - DNA, 110 bp, synthetic construct
  source 1..110: mol_type = other DNA
atcctaggcctgaacatcataggcatttgttcaatacattgttgttgcagctactgcttttaaattcttttgtccactgaggtttgaggactgctgattaactgtatagc

SEQ ID NO: 16930 - DNA, 110 bp, synthetic construct
  source 1..110: mol_type = other DNA
tcccccacccacttgtgcccaccaagccataaaggctctcctgtgtattagggatgctctgtgttggcagagcttgagaaactgaagcccagtgtagaccctccgctgac

SEQ ID NO: 16931 - DNA, 110 bp, synthetic construct
  source 1..110: mol_type = other DNA
gctctgtgttggcagagcttgagaaactgaagcccagtgtagaccctccgctgactgaggaaacctctctgagaggtagggagagggagccttccagcctggagaagcag

SEQ ID NO: 16932 - DNA, 110 bp, synthetic construct
  source 1..110: mol_type = other DNA
aacttgagtgaatctaaaagcagcaagagtagaactagctaccatttatttagcatgtagtgtgtgccaggcaagagcttgtcattattgctaatcctcacaacgcccta

SEQ ID NO: 16933 - DNA, 110 bp, synthetic construct
  source 1..110: mol_type = other DNA
tgtagtgtgtgccaggcaagagcttgtcattattgctaatcctcacaacgccctagcaaggtaggtgtattatctgcattctgtataagtaaagatctttatgattctag

SEQ ID NO: 16934 - DNA, 110 bp, synthetic construct
  source 1..110: mol_type = other DNA
tttactccgtctatggattcagatctaatctttcctgaaacgccttcacagactcattcagaaagaatgttttccagctatctgggtatcccttacccagtctagtaaaa

SEQ ID NO: 16935 - DNA, 110 bp, synthetic construct
  source 1..110: mol_type = other DNA
catcctaccaggtattatgagtctctggaagagagacacagagtgccagctagccacatacatctgaccacagaaccctttttatagagaccgagtaacatctcatagaa

SEQ ID NO: 16936 - DNA, 110 bp, synthetic construct
  source 1..110: mol_type = other DNA
tgctgaaaacagtcaattcagaagagggacataccttctggctggatttcctctctggaaaaaagatgtaagaccagttctaacagcaggcaaatgatctttcaaccctc

SEQ ID NO: 16937 - DNA, 110 bp, synthetic construct
  source 1..110: mol_type = other DNA
acacacacacaagaacattgtttaaattttagctgttgacaatgaagaagctttgataggtgcaggggaggtgtttgggttgggcaccaggcagcaccagaaggcagtct

SEQ ID NO: 16938 - DNA, 110 bp, synthetic construct
  source 1..110: mol_type = other DNA
gctgtgcttggcaagctcccccactctcacctgcttctctcctctctctcctccatctccctatttctaggtcacttggagtcccccagcaatcctggaaagtgaaaaca

SEQ ID NO: 16939 - DNA, 110 bp, synthetic construct
  source 1..110: mol_type = other DNA
tctccctatttctaggtcacttggagtcccccagcaatcctggaaagtgaaaacattcgagtggaacactgttcgaaaaacccagacctcagtagctgtccgcaagtgca

SEQ ID NO: 16940 - DNA, 110 bp, synthetic construct
  source 1..110: mol_type = other DNA
agctatgctctgcagatcccccttcaagaaaagacttgttgcccagctgccaggagtatggttagcagacagcctccagccatcagatcctcgtaggccaggtctgcaga

SEQ ID NO: 16941 - DNA, 110 bp, synthetic construct
  source 1..110: mol_type = other DNA
gtgcttatttgtcttgagagcaataaagaacacctaagagcttcaggaaaaaaggtgcaagatcacacatatgtgttttagttggattactacatattatgaacaaatgc

SEQ ID NO: 16942 - DNA, 110 bp, synthetic construct
  source 1..110: mol_type = other DNA
tttactaccagtcctgaatgatatgacttttgggagcaagggtgaggtgttatgtaaaagctaaataccaaagttccaagacaatatttatttacaaagaaaagccttca

SEQ ID NO: 16943 - DNA, 110 bp, synthetic construct
  source 1..110: mol_type = other DNA
atccactggtaaatgaataaacaaaatgtggtatattcatacactggaatacagtttagctacttgatacaaattgccaacacggatgaacctcaaaaacattacactag

SEQ ID NO: 16944 - DNA, 110 bp, synthetic construct
  source 1..110: mol_type = other DNA
ttagctacttgatacaaattgccaacacggatgaacctcaaaaacattacactagggagttctcattgtggcacagcgcagacaaatctgactagtatccatgaagatgt

SEQ ID NO: 16945 - DNA, 110 bp, synthetic construct
  source 1..110: mol_type = other DNA
taatttcctgctttattgtttccctcatgattaactcattgaaacatgatttacttttcaaatctcggatttagcttaacataggaccttctctgcttattaaaaatgtt

SEQ ID NO: 16946 - DNA, 110 bp, synthetic construct
  source 1..110: mol_type = other DNA
aaactagctgaaaagcctgtggcccattcctttggcagaggggctgttctacaagaactggctgagaaattttcagcctgatccctccaggaccaagctgttcccttaga

SEQ ID NO: 16947 - DNA, 110 bp, synthetic construct
  source 1..110: mol_type = other DNA
gtgcctattctttagccaatgccagactgccttgattactgtagcttcagaatgaagtttaaaattagatggtataaatcttccagtcttactcattattaaacattgct

SEQ ID NO: 16948 - DNA, 110 bp, synthetic construct
  source 1..110: mol_type = other DNA
ggagtgagccaggccaagatgtttgcccctttggtttgtgaggtgtggtgaggcagcagctgcaaatgcaaagctctctccgccctgattgttggcaagccagtgtgcat

SEQ ID NO: 16949 - DNA, 110 bp, synthetic construct
  source 1..110: mol_type = other DNA
gaatacggccacttacatattctctaaaacctctggagagaaccttgaagctacttgtcttaactggtgggtgattttgcctcctcactccactctaggaactttgggga

SEQ ID NO: 16950 - DNA, 110 bp, synthetic construct
  source 1..110: mol_type = other DNA
tgtcttaactggtgggtgattttgcctcctcactccactctaggaactttggggaatgtatggaaacatcttggctgtcacaactgggagaatgctactggcatccaaga

SEQ ID NO: 16951 - DNA, 110 bp, synthetic construct
  source 1..110: mol_type = other DNA
attgattcaatgcaactccggaggcaagaaatggccattcagcagtcactgggaatgcgctgcccagaagatgagtatgcaggctatggttaccatagttaccatcaagg

SEQ ID NO: 16952 - DNA, 110 bp, synthetic construct
  source 1..110: mol_type = other DNA
tgctgtttctttgattgccctgggttaaaatattggagaaagtaaagcgtcatgattcatgaaagtaactgcatctgtaagcaaactgaagaatttggccccctgaggag

SEQ ID NO: 16953 - DNA, 110 bp, synthetic construct
  source 1..110: mol_type = other DNA
ttcatgaaagtaactgcatctgtaagcaaactgaagaatttggccccctgaggagctccaaagatgttcgcagaatgaatttgaagattccaaattctattttgcttctt

SEQ ID NO: 16954 - DNA, 110 bp, synthetic construct
  source 1..110: mol_type = other DNA
tcatctgttgtgggaaccttcatccctaatctcctcccccagacggctgagtctatcactcttagcaatgacttggctggtcacccaacttagacagcagctgcgtcatg

SEQ ID NO: 16955 - DNA, 110 bp, synthetic construct
  source 1..110: mol_type = other DNA
tcactcttagcaatgacttggctggtcacccaacttagacagcagctgcgtcatgaacaatacagcatttgttatgactctgaattaccaaaccactttatgcccagttc

(The sequence listing continues in the following parts.)